United States Patent Application Publication US 2005/0244851 A1 - sequence listing, part 49

SEQ ID NO: 1899555 - DNA, 25 bp, Homo sapien
ccctgcacaaggcatgttacttata

SEQ ID NO: 1899556 - DNA, 25 bp, Homo sapien
ctctcatcatctcagttcccttgtt

SEQ ID NO: 1899557 - DNA, 25 bp, Homo sapien
tcagttcccttgttgccatggtcac

SEQ ID NO: 1899558 - DNA, 25 bp, Homo sapien
ttctctcatcatctcagttcccttg

SEQ ID NO: 1899559 - DNA, 25 bp, Homo sapien
ttttctctcatcatctcagttccct

SEQ ID NO: 1899560 - DNA, 25 bp, Homo sapien
cagagctccccagtaacaacacttt

SEQ ID NO: 1899561 - DNA, 25 bp, Homo sapien
gcagagctccccagtaacaacactt

SEQ ID NO: 1899562 - DNA, 25 bp, Homo sapien
agagctccccagtaacaacactttg

SEQ ID NO: 1899563 - DNA, 25 bp, Homo sapien
gagctccccagtaacaacactttga

SEQ ID NO: 1899564 - DNA, 25 bp, Homo sapien
ggcagcattctcacagatacactga

SEQ ID NO: 1899565 - DNA, 25 bp, Homo sapien
tattaatgccaagacaaggcggcca

SEQ ID NO: 1899566 - DNA, 25 bp, Homo sapien
aaggcggccaagcactcttaacggc

SEQ ID NO: 1899567 - DNA, 25 bp, Homo sapien
ccactagtgtaagctcaagagtaca

SEQ ID NO: 1899568 - DNA, 25 bp, Homo sapien
cattttggagcccaaccagggtgtg

SEQ ID NO: 1899569 - DNA, 25 bp, Homo sapien
gagagtgtaccagctcatggtgtca

SEQ ID NO: 1899570 - DNA, 25 bp, Homo sapien
catggtgtcagacctaagcagagta

SEQ ID NO: 1899571 - DNA, 25 bp, Homo sapien
gaatggtctattccagagagtctga

SEQ ID NO: 1899572 - DNA, 25 bp, Homo sapien
tctcatagaattccgtggagattgt

SEQ ID NO: 1899573 - DNA, 25 bp, Homo sapien
caaagctcgagatagtgctcagtaa

SEQ ID NO: 1899574 - DNA, 25 bp, Homo sapien
gatgctatccggaattctctcatag

SEQ ID NO: 1899575 - DNA, 25 bp, Homo sapien
tgctcagtaaacacgggtctgatgc

SEQ ID NO: 1899576 - DNA, 25 bp, Homo sapien
taactgcgaataactgagtcaaaat

SEQ ID NO: 1899577 - DNA, 25 bp, Homo sapien
aactgcgaataactgagtcaaaatg

SEQ ID NO: 1899578 - DNA, 25 bp, Homo sapien
cataactgcgaataactgagtcaaa

SEQ ID NO: 1899579 - DNA, 25 bp, Homo sapien
actgcgaataactgagtcaaaatga

SEQ ID NO: 1899580 - DNA, 25 bp, Homo sapien
tataagggtgaaatactaacttcca

SEQ ID NO: 1899581 - DNA, 25 bp, Homo sapien
gggcaccatattataaccattacat

SEQ ID NO: 1899582 - DNA, 25 bp, Homo sapien
gtccatcacttttgcccttcattag

SEQ ID NO: 1899583 - DNA, 25 bp, Homo sapien
taaaagagtgcttgatgagcatgaa

SEQ ID NO: 1899584 - DNA, 25 bp, Homo sapien
gttcaaactacagacctgggcaaca

SEQ ID NO: 1899585 - DNA, 25 bp, Homo sapien
tcacttaggttctagtcgtgcagct

SEQ ID NO: 1899586 - DNA, 25 bp, Homo sapien
cttaggttctagtcgtgcagctttc

SEQ ID NO: 1899587 - DNA, 25 bp, Homo sapien
ggttctagtcgtgcagctttctctg

SEQ ID NO: 1899588 - DNA, 25 bp, Homo sapien
tgcagtgacacagcatgggagcatt

SEQ ID NO: 1899589 - DNA, 25 bp, Homo sapien
accagagtccagaacttctgagccc

SEQ ID NO: 1899590 - DNA, 25 bp, Homo sapien
cagtgacacagcatgggagcattga

SEQ ID NO: 1899591 - DNA, 25 bp, Homo sapien
cacagcacaccagagtccagaactt

SEQ ID NO: 1899592 - DNA, 25 bp, Homo sapien
ctttcctcccccgagacatgagatt

SEQ ID NO: 1899593 - DNA, 25 bp, Homo sapien
gaacctgaatcctgtcctcttgctt

SEQ ID NO: 1899594 - DNA, 25 bp, Homo sapien
tcagcagaacctgaatcctgtcctc

SEQ ID NO: 1899595 - DNA, 25 bp, Homo sapien
tcccccgagacatgagattcatcac

SEQ ID NO: 1899596 - DNA, 25 bp, Homo sapien
gcagtctgtctatcctttatgcaaa

SEQ ID NO: 1899597 - DNA, 25 bp, Homo sapien
caaatgccatgggctctagctcctg

SEQ ID NO: 1899598 - DNA, 25 bp, Homo sapien
tatcctttatgcaaatgccatgggc

SEQ ID NO: 1899599 - DNA, 25 bp, Homo sapien
catggggtccatccagttgcttgcc

SEQ ID NO: 1899600 - DNA, 25 bp, Homo sapien
atgccctggatagcagcaatcccat

SEQ ID NO: 1899601 - DNA, 25 bp, Homo sapien
gagggacttcaatcccggtgatgcc

SEQ ID NO: 1899602 - DNA, 25 bp, Homo sapien
gaaagaccaccacttgcaggatagt

SEQ ID NO: 1899603 - DNA, 25 bp, Homo sapien
caggatagtggacggcaaagtagca

SEQ ID NO: 1899604 - DNA, 25 bp, Homo sapien
agggccctgaaatgcggccactgct

SEQ ID NO: 1899605 - DNA, 25 bp, Homo sapien
ggccactgctccatgttcgggacca

SEQ ID NO: 1899606 - DNA, 25 bp, Homo sapien
ctgctccatgttcgggaccagccct

SEQ ID NO: 1899607 - DNA, 25 bp, Homo sapien
gggccctgaaatgcggccactgctc

SEQ ID NO: 1899608 - DNA, 25 bp, Homo sapien
atgccattccattgcttatcatcct

SEQ ID NO: 1899609 - DNA, 25 bp, Homo sapien
gagttcaatgccattccattgctta

SEQ ID NO: 1899610 - DNA, 25 bp, Homo sapien
cattccattgcttatcatcctgttc

SEQ ID NO: 1899611 - DNA, 25 bp, Homo sapien
gccattccattgcttatcatcctgt

SEQ ID NO: 1899612 - DNA, 25 bp, Homo sapien
tacagtatctatttgcatgcgcctc

SEQ ID NO: 1899613 - DNA, 25 bp, Homo sapien
cgaaaatccacactacgaaagcggg

SEQ ID NO: 1899614 - DNA, 25 bp, Homo sapien
tggatctcgcgcgtgtatctgccct

SEQ ID NO: 1899615 - DNA, 25 bp, Homo sapien
catgcgcctctttgtagtttgcgaa

SEQ ID NO: 1899616 - DNA, 25 bp, Homo sapien
gatggttgccggcattgagctccct

SEQ ID NO: 1899617 - DNA, 25 bp, Homo sapien
ttgccggcattgagctccctgctgg

SEQ ID NO: 1899618 - DNA, 25 bp, Homo sapien
ggcaggcgatggttgccggcattga

SEQ ID NO: 1899619 - DNA, 25 bp, Homo sapien
gacagccagtgccaaagagcgccca

SEQ ID NO: 1899620 - DNA, 25 bp, Homo sapien
caaagcctggctctcgagcccgact

SEQ ID NO: 1899621 - DNA, 25 bp, Homo sapien
acaaacgcccctatctgccaccctt

SEQ ID NO: 1899622 - DNA, 25 bp, Homo sapien
ttcacccgatctcgcgctgacaaag

SEQ ID NO: 1899623 - DNA, 25 bp, Homo sapien
tcccagggtgaatggtccttagtga

SEQ ID NO: 1899624 - DNA, 25 bp, Homo sapien
caactcggcatgacggtttttgacg

SEQ ID NO: 1899625 - DNA, 25 bp, Homo sapien
tgcatcctgttcaactcggcatgac

SEQ ID NO: 1899626 - DNA, 25 bp, Homo sapien
ctcggcatgacggtttttgacggtt

SEQ ID NO: 1899627 - DNA, 25 bp, Homo sapien
tcctgttcaactcggcatgacggtt

SEQ ID NO: 1899628 - DNA, 25 bp, Homo sapien
ttaaatggtccatctagttgagaac

SEQ ID NO: 1899629 - DNA, 25 bp, Homo sapien
caagtgccagtgcttagttgtttaa

SEQ ID NO: 1899630 - DNA, 25 bp, Homo sapien
tattaggctctcattacatgttaag

SEQ ID NO: 1899631 - DNA, 25 bp, Homo sapien
tgaaaatttcaactcaggcctacaa

SEQ ID NO: 1899632 - DNA, 25 bp, Homo sapien
gatgccaagctgtgcctgcagtcac

SEQ ID NO: 1899633 - DNA, 25 bp, Homo sapien
taggttcatcctggtcaggtcagtg

SEQ ID NO: 1899634 - DNA, 25 bp, Homo sapien
caggtcagtgagaactggatgccaa

SEQ ID NO: 1899635 - DNA, 25 bp, Homo sapien
ccgacatccctaggttcatcctggt

SEQ ID NO: 1899636 - DNA, 25 bp, Homo sapien
ggttatgtctataggggcatcatca

SEQ ID NO: 1899637 - DNA, 25 bp, Homo sapien
atgtctataggggcatcatcacaac

SEQ ID NO: 1899638 - DNA, 25 bp, Homo sapien
gttatgtctataggggcatcatcac

SEQ ID NO: 1899639 - DNA, 25 bp, Homo sapien
tctataggggcatcatcacaaccag

SEQ ID NO: 1899640 - DNA, 25 bp, Homo sapien
gacaaaaggataaatggtactccca

SEQ ID NO: 1899641 - DNA, 25 bp, Homo sapien
caatgggaagtgtttgtagcttgag

SEQ ID NO: 1899642 - DNA, 25 bp, Homo sapien
caaattggacaaaaggataaatggt

SEQ ID NO: 1899643 - DNA, 25 bp, Homo sapien
tgtaaggaaggattgacaaagagaa

SEQ ID NO: 1899644 - DNA, 25 bp, Homo sapien
ctactgactggtctgtctctcccag

SEQ ID NO: 1899645 - DNA, 25 bp, Homo sapien
tactgactggtctgtctctcccagg

SEQ ID NO: 1899646 - DNA, 25 bp, Homo sapien
actgactggtctgtctctcccaggc

SEQ ID NO: 1899647 - DNA, 25 bp, Homo sapien
gcttcacttacatcactgaaagcag

SEQ ID NO: 1899648 - DNA, 25 bp, Homo sapien
tttccataaccagaagccacttctg

SEQ ID NO: 1899649 - DNA, 25 bp, Homo sapien
ggtgcttcacttacatcactgaaag

SEQ ID NO: 1899650 - DNA, 25 bp, Homo sapien
ttctgtggtgcttcacttacatcac

SEQ ID NO: 1899651 - DNA, 25 bp, Homo sapien
tcattgcaaagttaaggagtaacat

SEQ ID NO: 1899652 - DNA, 25 bp, Homo sapien
gcttcattgcaaagttaaggagtaa

SEQ ID NO: 1899653 - DNA, 25 bp, Homo sapien
ggtgcaggttgctgtattgcttcat

SEQ ID NO: 1899654 - DNA, 25 bp, Homo sapien
cttcattgcaaagttaaggagtaac

SEQ ID NO: 1899655 - DNA, 25 bp, Homo sapien
tgggctatgtcagtgtcagatctaa

SEQ ID NO: 1899656 - DNA, 25 bp, Homo sapien
gtcagtgtcagatctaaagtggtaa

SEQ ID NO: 1899657 - DNA, 25 bp, Homo sapien
tcagatctaaagtggtaactggaga

SEQ ID NO: 1899658 - DNA, 25 bp, Homo sapien
ggctatgtcagtgtcagatctaaag

SEQ ID NO: 1899659 - DNA, 25 bp, Homo sapien
tcatgctttcaactgtttctgctgg

SEQ ID NO: 1899660 - DNA, 25 bp, Homo sapien
taaggtctgcctatggtgtttcaaa

SEQ ID NO: 1899661 - DNA, 25 bp, Homo sapien
ttcaaagcccccttcatgctttcaa

SEQ ID NO: 1899662 - DNA, 25 bp, Homo sapien
gagccaggatccaagttccattcat

SEQ ID NO: 1899663 - DNA, 25 bp, Homo sapien
caccttcagttccttaaatgagata

SEQ ID NO: 1899664 - DNA, 25 bp, Homo sapien
ccaaggtgagattgccagaggatat

SEQ ID NO: 1899665 - DNA, 25 bp, Homo sapien
tccagtctcagattggcctcattag

SEQ ID NO: 1899666 - DNA, 25 bp, Homo sapien
gagataatcctgaagatgccatcct

SEQ ID NO: 1899667 - DNA, 25 bp, Homo sapien
cacaggctctgtctcaatccgtatg

SEQ ID NO: 1899668 - DNA, 25 bp, Homo sapien
tctcaatccgtatgcatgattcacg

SEQ ID NO: 1899669 - DNA, 25 bp, Homo sapien
gtatgcatgattcacgtcctttcaa

SEQ ID NO: 1899670 - DNA, 25 bp, Homo sapien
tttggtaaagtgaaaatgttattca

SEQ ID NO: 1899671 - DNA, 25 bp, Homo sapien
tctccctctttggagtttctatgag

SEQ ID NO: 1899672 - DNA, 25 bp, Homo sapien
tccctctttggagtttctatgagct

SEQ ID NO: 1899673 - DNA, 25 bp, Homo sapien
ctctctccctctttggagtttctat

SEQ ID NO: 1899674 - DNA, 25 bp, Homo sapien
ctctccctctttggagtttctatga

SEQ ID NO: 1899675 - DNA, 25 bp, Homo sapien
ccaggtggagatggaaattacaatg

SEQ ID NO: 1899676 - DNA, 25 bp, Homo sapien
atgactatcgagtcccggagccagg

SEQ ID NO: 1899677 - DNA, 25 bp, Homo sapien
agaaaggctgagttgatttggagac

SEQ ID NO: 1899678 - DNA, 25 bp, Homo sapien
gaaattacaatgactatcgagtccc

SEQ ID NO: 1899679 - DNA, 25 bp, Homo sapien
gtagattagagtttgggctttaaca

SEQ ID NO: 1899680 - DNA, 25 bp, Homo sapien
gtttgggctttaacaagctgagtgt

SEQ ID NO: 1899681 - DNA, 25 bp, Homo sapien
tttgggctttaacaagctgagtgtg

SEQ ID NO: 1899682 - DNA, 25 bp, Homo sapien
ctctggtagattagagtttgggctt

SEQ ID NO: 1899683 - DNA, 25 bp, Homo sapien
gaaactgcaaataagcggagactcc

SEQ ID NO: 1899684 - DNA, 25 bp, Homo sapien
tgaccacgggcaatttaaaccacag

SEQ ID NO: 1899685 - DNA, 25 bp, Homo sapien
tctctggctagagatgctgctctcc

SEQ ID NO: 1899686 - DNA, 25 bp, Homo sapien
caagacctgggtggattcctgaaac

SEQ ID NO: 1899687 - DNA, 25 bp, Homo sapien
taaattagcacagccccgtgaagag

SEQ ID NO: 1899688 - DNA, 25 bp, Homo sapien
aacatcatggatcatcagaggaatg

SEQ ID NO: 1899689 - DNA, 25 bp, Homo sapien
caaagaaatacccacacattcatgt

SEQ ID NO: 1899690 - DNA, 25 bp, Homo sapien
tgaagagcagtctggaggctcctca

SEQ ID NO: 1899691 - DNA, 25 bp, Homo sapien
tgagcccctatagccaaatagcctt

SEQ ID NO: 1899692 - DNA, 25 bp, Homo sapien
gttcttgagcccctatagccaaata

SEQ ID NO: 1899693 - DNA, 25 bp, Homo sapien
ttgagcccctatagccaaatagcct

SEQ ID NO: 1899694 - DNA, 25 bp, Homo sapien
tcttgagcccctatagccaaatagc

SEQ ID NO: 1899695 - DNA, 25 bp, Homo sapien
tccagcttgggcaacacagaaagac

SEQ ID NO: 1899696 - DNA, 25 bp, Homo sapien
agcttgggcaacacagaaagactct

SEQ ID NO: 1899697 - DNA, 25 bp, Homo sapien
ctgcactccagcttgggcaacacag

SEQ ID NO: 1899698 - DNA, 25 bp, Homo sapien
agaggttgcagtgagacgagcacca

SEQ ID NO: 1899699 - DNA, 25 bp, Homo sapien
ctgtgtgccagggatcttcaaatag

SEQ ID NO: 1899700 - DNA, 25 bp, Homo sapien
caaataggtatatgtttcagtcggc

SEQ ID NO: 1899701 - DNA, 25 bp, Homo sapien
gccagggatcttcaaataggtatat

SEQ ID NO: 1899702 - DNA, 25 bp, Homo sapien
tatatgtttcagtcggccccttttc

SEQ ID NO: 1899703 - DNA, 25 bp, Homo sapien
ttctttgatcactaccaggtggttt

SEQ ID NO: 1899704 - DNA, 25 bp, Homo sapien
tttgatcactaccaggtggtttccc

SEQ ID NO: 1899705 - DNA, 25 bp, Homo sapien
ttgatcactaccaggtggtttcccc

SEQ ID NO: 1899706 - DNA, 25 bp, Homo sapien
tctttgatcactaccaggtggtttc

SEQ ID NO: 1899707 - DNA, 25 bp, Homo sapien
cgttagcccacagccaagttacgtt

SEQ ID NO: 1899708 - DNA, 25 bp, Homo sapien
aggaagagggtaatgttttggctat

SEQ ID NO: 1899709 - DNA, 25 bp, Homo sapien
tagcccacagccaagttacgttttg

SEQ ID NO: 1899710 - DNA, 25 bp, Homo sapien
gagggtaatgttttggctatattag

SEQ ID NO: 1899711 - DNA, 25 bp, Homo sapien
aattgtcgctttagctttatattca

SEQ ID NO: 1899712 - DNA, 25 bp, Homo sapien
tctgctgagccaatatcacctgccc

SEQ ID NO: 1899713 - DNA, 25 bp, Homo sapien
atcacctgcccatacacctcgaatg

SEQ ID NO: 1899714 - DNA, 25 bp, Homo sapien
ctaaatttgaaattgtcgctttagc

SEQ ID NO: 1899715 - DNA, 25 bp, Homo sapien
tggcttcttagaggttaatagattt

SEQ ID NO: 1899716 - DNA, 25 bp, Homo sapien
ttcttggcttcttagaggttaatag

SEQ ID NO: 1899717 - DNA, 25 bp, Homo sapien
cttggcttcttagaggttaatagat

SEQ ID NO: 1899718 - DNA, 25 bp, Homo sapien
atgttccagtaacataatacagttt

SEQ ID NO: 1899719 - DNA, 25 bp, Homo sapien
tccaccctgaaactagtaatccaat

SEQ ID NO: 1899720 - DNA, 25 bp, Homo sapien
gtatctaccttggagcatgcattag

SEQ ID NO: 1899721 - DNA, 25 bp, Homo sapien
catgcattagattatagataaggcc

SEQ ID NO: 1899722 - DNA, 25 bp, Homo sapien
gtcttcaaaatgtagacattcggtc

SEQ ID NO: 1899723 - DNA, 25 bp, Homo sapien
gaggatgtccattttagcgccaaaa

SEQ ID NO: 1899724 - DNA, 25 bp, Homo sapien
tggaaccccaactgtcaatgctggt

SEQ ID NO: 1899725 - DNA, 25 bp, Homo sapien
tcagaggatgtccattttagcgcca

SEQ ID NO: 1899726 - DNA, 25 bp, Homo sapien
cacttgaagtgggacacttggaacc

SEQ ID NO: 1899727 - DNA, 25 bp, Homo sapien
gaattatctggaccccaagttggat

SEQ ID NO: 1899728 - DNA, 25 bp, Homo sapien
tattattagtcaagccatagatgtc

SEQ ID NO: 1899729 - DNA, 25 bp, Homo sapien
tggaccccaagttggatgagaactg

SEQ ID NO: 1899730 - DNA, 25 bp, Homo sapien
aaagtccccgatggaattgtgagaa

SEQ ID NO: 1899731 - DNA, 25 bp, Homo sapien
ataatagcaggtagtacttttatca

SEQ ID NO: 1899732 - DNA, 25 bp, Homo sapien
taatagcaggtagtacttttatcat

SEQ ID NO: 1899733 - DNA, 25 bp, Homo sapien
aataatagcaggtagtacttttatc

SEQ ID NO: 1899734 - DNA, 25 bp, Homo sapien
gaaaatggcagttctgtcagtcttg

SEQ ID NO: 1899735 - DNA, 25 bp, Homo sapien
aatcttcagcattgccctggctgag

SEQ ID NO: 1899736 - DNA, 25 bp, Homo sapien
gttctgtcagtcttggctccttccc

SEQ ID NO: 1899737 - DNA, 25 bp, Homo sapien
gcaaaatcttcagcattgccctggc

SEQ ID NO: 1899738 - DNA, 25 bp, Homo sapien
gatgatggttgcagatgccttcata

SEQ ID NO: 1899739 - DNA, 25 bp, Homo sapien
ggcgctattctttttaggctagaga

SEQ ID NO: 1899740 - DNA, 25 bp, Homo sapien
gagatgatggttgcagatgccttca

SEQ ID NO: 1899741 - DNA, 25 bp, Homo sapien
cattcttaaaaagctcgatggcgct

SEQ ID NO: 1899742 - DNA, 25 bp, Homo sapien
ttaaaagggtgccatcctgcgtggt

SEQ ID NO: 1899743 - DNA, 25 bp, Homo sapien
gggtgccatcctgcgtggtatatga

SEQ ID NO: 1899744 - DNA, 25 bp, Homo sapien
ccatcctgcgtggtatatgaggcag

SEQ ID NO: 1899745 - DNA, 25 bp, Homo sapien
aaagggtgccatcctgcgtggtata

SEQ ID NO: 1899746 - DNA, 25 bp, Homo sapien
gaattgctaaaggtcgccaacggtg

SEQ ID NO: 1899747 - DNA, 25 bp, Homo sapien
ctaaaggtcgccaacggtgccttgg

SEQ ID NO: 1899748 - DNA, 25 bp, Homo sapien
gccttgggaaggcctttagaagaca

SEQ ID NO: 1899749 - DNA, 25 bp, Homo sapien
ggcctttagaagacaaagggcagca

SEQ ID NO: 1899750 - DNA, 25 bp, Homo sapien
ctgtaaagacgacagaggttggagg

SEQ ID NO: 1899751 - DNA, 25 bp, Homo sapien
acagaggttggaggttcctgctaca

SEQ ID NO: 1899752 - DNA, 25 bp, Homo sapien
tgtaaagacgacagaggttggaggt

SEQ ID NO: 1899753 - DNA, 25 bp, Homo sapien
acgacagaggttggaggttcctgct

SEQ ID NO: 1899754 - DNA, 25 bp, Homo sapien
tgagcataacctgcacgggcacatg

SEQ ID NO: 1899755 - DNA, 25 bp, Homo sapien
tatcttttaccagtgagagacagga

SEQ ID NO: 1899756 - DNA, 25 bp, Homo sapien
gacaagacattagtgagcagcagat

SEQ ID NO: 1899757 - DNA, 25 bp, Homo sapien
taagggaggaagtacgctatacacc

SEQ ID NO: 1899758 - DNA, 25 bp, Homo sapien
gcccatagttcctgtagcactgact

SEQ ID NO: 1899759 - DNA, 25 bp, Homo sapien
ttcaccctcatcatcggtatagtca

SEQ ID NO: 1899760 - DNA, 25 bp, Homo sapien
tatagtcaccctcacactgacactg

SEQ ID NO: 1899761 - DNA, 25 bp, Homo sapien
aaaccagggcccatagttcctgtag

SEQ ID NO: 1899762 - DNA, 25 bp, Homo sapien
ctgtaacaggtataacaataatgaa

SEQ ID NO: 1899763 - DNA, 25 bp, Homo sapien
tgtaacaggtataacaataatgaaa

SEQ ID NO: 1899764 - DNA, 25 bp, Homo sapien
gtaacaggtataacaataatgaaaa

SEQ ID NO: 1899765 - DNA, 25 bp, Homo sapien
tatatgagtacattctctagtggtg

SEQ ID NO: 1899766 - DNA, 25 bp, Homo sapien
ccaccagcctatcattctgttacat

SEQ ID NO: 1899767 - DNA, 25 bp, Homo sapien
ccaggcagtatacactgcatgctat

SEQ ID NO: 1899768 - DNA, 25 bp, Homo sapien
gaacaagattagacagattttacca

SEQ ID NO: 1899769 - DNA, 25 bp, Homo sapien
cctcccactctgtgagttgtctatt

SEQ ID NO: 1899770 - DNA, 25 bp, Homo sapien
ctttggtgactataaccttattgtt

SEQ ID NO: 1899771 - DNA, 25 bp, Homo sapien
taaccttattgtttgaaatcaggta

SEQ ID NO: 1899772 - DNA, 25 bp, Homo sapien
tgaaatccttgctacgacagtgtct

SEQ ID NO: 1899773 - DNA, 25 bp, Homo sapien
gaaccaggctattgcttctataaga

SEQ ID NO: 1899774 - DNA, 25 bp, Homo sapien
tagacaaccctaaaacccacatggc

SEQ ID NO: 1899775 - DNA, 25 bp, Homo sapien
taagtgtctgatccataccatggag

SEQ ID NO: 1899776 - DNA, 25 bp, Homo sapien
gaggacacagggaacctttctctga

SEQ ID NO: 1899777 - DNA, 25 bp, Homo sapien
ggtcttcgatgttggtgacctacag

SEQ ID NO: 1899778 - DNA, 25 bp, Homo sapien
tggtcttcgatgttggtgacctaca

SEQ ID NO: 1899779 - DNA, 25 bp, Homo sapien
ttggtgacctacagatggggttttg

SEQ ID NO: 1899780 - DNA, 25 bp, Homo sapien
gtcttcgatgttggtgacctacaga

SEQ ID NO: 1899781 - DNA, 25 bp, Homo sapien
tttcagacaatagggaattcccttg

SEQ ID NO: 1899782 - DNA, 25 bp, Homo sapien
gcacatctcacagtaggtgatctag

SEQ ID NO: 1899783 - DNA, 25 bp, Homo sapien
catgtgtctttgctggtgggtagac

SEQ ID NO: 1899784 - DNA, 25 bp, Homo sapien
tctcttggcatcataaaatactgtc

SEQ ID NO: 1899785 - DNA, 25 bp, Homo sapien
ccaaattatccaaagaaagctgtca

SEQ ID NO: 1899786 - DNA, 25 bp, Homo sapien
taatgatgaaaatccccagtaagca

SEQ ID NO: 1899787 - DNA, 25 bp, Homo sapien
tctgcctctggtattggaatcacgg

SEQ ID NO: 1899788 - DNA, 25 bp, Homo sapien
gaatcacgggctcagatagaaccac

SEQ ID NO: 1899789 - DNA, 25 bp, Homo sapien
cggcagagatgtgcagctccagtct

SEQ ID NO: 1899790 - DNA, 25 bp, Homo sapien
gacaggcaatccagtaaagacatgg

SEQ ID NO: 1899791 - DNA, 25 bp, Homo sapien
tggcaaggctaggatacagcagact

SEQ ID NO: 1899792 - DNA, 25 bp, Homo sapien
tattctccatgtgttgtgcagcggc

SEQ ID NO: 1899793 - DNA, 25 bp, Homo sapien
tcaaaattgttacggccagaccatg

SEQ ID NO: 1899794 - DNA, 25 bp, Homo sapien
tttcaaaattgttacggccagacca

SEQ ID NO: 1899795 - DNA, 25 bp, Homo sapien
aattgttacggccagaccatgtctt

SEQ ID NO: 1899796 - DNA, 25 bp, Homo sapien
tacggccagaccatgtcttccttat

SEQ ID NO: 1899797 - DNA, 25 bp, Homo sapien
ggtctcccatgtatcttccaaaagg

SEQ ID NO: 1899798 - DNA, 25 bp, Homo sapien
gagaggcgccaatcttagacacagg

SEQ ID NO: 1899799 - DNA, 25 bp, Homo sapien
tagacacgaaagcaattatacagcc

SEQ ID NO: 1899800 - DNA, 25 bp, Homo sapien
taagaacttgcatccatgacatggc

SEQ ID NO: 1899801 - DNA, 25 bp, Homo sapien
tctcctagccgccgcagccccgcca

SEQ ID NO: 1899802 - DNA, 25 bp, Homo sapien
cactctcctagccgccgcagccccg

SEQ ID NO: 1899803 - DNA, 25 bp, Homo sapien
actctcctagccgccgcagccccgc

SEQ ID NO: 1899804 - DNA, 25 bp, Homo sapien
ctcctagccgccgcagccccgccag

SEQ ID NO: 1899805 - DNA, 25 bp, Homo sapien
gctgttagtgctttatcggaactga

SEQ ID NO: 1899806 - DNA, 25 bp, Homo sapien
gcttgtaatttgcaatggaaaagta

SEQ ID NO: 1899807 - DNA, 25 bp, Homo sapien
gaaattattctaggtatcactgata

SEQ ID NO: 1899808 - DNA, 25 bp, Homo sapien
tttttatagtaggaacagtgctgtt

SEQ ID NO: 1899809 - DNA, 25 bp, Homo sapien
tagtaactaactaacctggtcatcc

SEQ ID NO: 1899810 - DNA, 25 bp, Homo sapien
taggcactcctaccttatgaatggc

SEQ ID NO: 1899811 - DNA, 25 bp, Homo sapien
ggcagaaaacgcacaatcaaggact

SEQ ID NO: 1899812 - DNA, 25 bp, Homo sapien
gctttcataaatacaatccaggaga

SEQ ID NO: 1899813 - DNA, 25 bp, Homo sapien
tccagtggtaggagcatctgtaagt

SEQ ID NO: 1899814 - DNA, 25 bp, Homo sapien
gtgtgaaaaacagataggatgcctt

SEQ ID NO: 1899815 - DNA, 25 bp, Homo sapien
tgaatacgaaaagatcagtctacct

SEQ ID NO: 1899816 - DNA, 25 bp, Homo sapien
tacctctactccattctagacaaag

SEQ ID NO: 1899817 - DNA, 25 bp, Homo sapien
gagacagtgaagcaagtaaaaagaa

SEQ ID NO: 1899818 - DNA, 25 bp, Homo sapien
tgtaagtaaaattacgtagctgatt

SEQ ID NO: 1899819 - DNA, 25 bp, Homo sapien
tgttgccacagtaaagaacagtttt

SEQ ID NO: 1899820 - DNA, 25 bp, Homo sapien
atgcttcttttgttgccacagtaaa

SEQ ID NO: 1899821 - DNA, 25 bp, Homo sapien
actcaatgagtttatgctttatgaa

SEQ ID NO: 1899822 - DNA, 25 bp, Homo sapien
tatgaagtcatagagccatggatgt

SEQ ID NO: 1899823 - DNA, 25 bp, Homo sapien
gagtttatgctttatgaagtcatag

SEQ ID NO: 1899824 - DNA, 25 bp, Homo sapien
tgaagtcatagagccatggatgtga

SEQ ID NO: 1899825 - DNA, 25 bp, Homo sapien
gcttgtagttactatggaatcataa

SEQ ID NO: 1899826 - DNA, 25 bp, Homo sapien
actgcttgtagttactatggaatca

SEQ ID NO: 1899827 - DNA, 25 bp, Homo sapien
tgtagttactatggaatcataatga

SEQ ID NO: 1899828 - DNA, 25 bp, Homo sapien
ctagactgcttgtagttactatgga

SEQ ID NO: 1899829 - DNA, 25 bp, Homo sapien
tccttcagacaggatgtgtatttat

SEQ ID NO: 1899830 - DNA, 25 bp, Homo sapien
gaggcctaagatgatgttttcttcc

SEQ ID NO: 1899831 - DNA, 25 bp, Homo sapien
cttccttcagacaggatgtgtattt

SEQ ID NO: 1899832 - DNA, 25 bp, Homo sapien
gtgtagaagtaattgaggcctaaga

SEQ ID NO: 1899833 - DNA, 25 bp, Homo sapien
ccaaatgaacctttacgagcaggcc

SEQ ID NO: 1899834 - DNA, 25 bp, Homo sapien
ttacgagcaggccaccgtccagttt

SEQ ID NO: 1899835 - DNA, 25 bp, Homo sapien
caggccaccgtccagtttcatgcag

SEQ ID NO: 1899836 - DNA, 25 bp, Homo sapien
atgaacctttacgagcaggccaccg

SEQ ID NO: 1899837 - DNA, 25 bp, Homo sapien
gacaacatgcttcccactgaacttt

SEQ ID NO: 1899838 - DNA, 25 bp, Homo sapien
gataaagacaacatgcttcccactg

SEQ ID NO: 1899839 - DNA, 25 bp, Homo sapien
taaagacaacatgcttcccactgaa

SEQ ID NO: 1899840 - DNA, 25 bp, Homo sapien
caacatgcttcccactgaacttttt

SEQ ID NO: 1899841 - DNA, 25 bp, Homo sapien
agattatgatagctttccgaccact

SEQ ID NO: 1899842 - DNA, 25 bp, Homo sapien
attatgatagctttccgaccactac

SEQ ID NO: 1899843 - DNA, 25 bp, Homo sapien
ctggaaagatttcagtttaggaacg

SEQ ID NO: 1899844 - DNA, 25 bp, Homo sapien
taggaacgggaacaaagattatgat

SEQ ID NO: 1899845 - DNA, 25 bp, Homo sapien
tgctgggcttgagctcgtccggctt

SEQ ID NO: 1899846 - DNA, 25 bp, Homo sapien
gatgctgggcttgagctcgtccggc

SEQ ID NO: 1899847 - DNA, 25 bp, Homo sapien
agatgctgggcttgagctcgtccgg

SEQ ID NO: 1899848 - DNA, 25 bp, Homo sapien
atgctgggcttgagctcgtccggct

SEQ ID NO: 1899849 - DNA, 25 bp, Homo sapien
tggccttttccttgctgagcgccag

SEQ ID NO: 1899850 - DNA, 25 bp, Homo sapien
gtgggatattgggaaacgttatcaa

SEQ ID NO: 1899851 - DNA, 25 bp, Homo sapien
tgggatattgggaaacgttatcaat

SEQ ID NO: 1899852 - DNA, 25 bp, Homo sapien
caataccgactatgtttcaagttgt

SEQ ID NO: 1899853 - DNA, 25 bp, Homo sapien
gccaataccgactatgtttcaagtt

SEQ ID NO: 1899854 - DNA, 25 bp, Homo sapien
ctttgctggcaaccaaacatgtatc

SEQ ID NO: 1899855 - DNA, 25 bp, Homo sapien
gttcagcatgcagtgccttgaacag

SEQ ID NO: 1899856 - DNA, 25 bp, Homo sapien
tttctttgctggcaaccaaacatgt

SEQ ID NO: 1899857 - DNA, 25 bp, Homo sapien
catgcagtgccttgaacagaagagt

SEQ ID NO: 1899858 - DNA, 25 bp, Homo sapien
cgctgttccctcatagggtctatgc

SEQ ID NO: 1899859 - DNA, 25 bp, Homo sapien
ctcatagggtctatgcctagcttcc

SEQ ID NO: 1899860 - DNA, 25 bp, Homo sapien
ttccctcatagggtctatgcctagc

SEQ ID NO: 1899861 - DNA, 25 bp, Homo sapien
tgttccctcatagggtctatgccta

SEQ ID NO: 1899862 - DNA, 25 bp, Homo sapien
aaatgagtccactagctccccagca

SEQ ID NO: 1899863 - DNA, 25 bp, Homo sapien
aaaattcaaatgctggatggcaagc

SEQ ID NO: 1899864 - DNA, 25 bp, Homo sapien
aatggctaaaatgacaggcataaaa

SEQ ID NO: 1899865 - DNA, 25 bp, Homo sapien
gcaaagtcatcaagattcaggagaa

SEQ ID NO: 1899866 - DNA, 25 bp, Homo sapien
ggttgactgaggaataaaaactcaa

SEQ ID NO: 1899867 - DNA, 25 bp, Homo sapien
cggttgactgaggaataaaaactca

SEQ ID NO: 1899868 - DNA, 25 bp, Homo sapien
gttgactgaggaataaaaactcaat

SEQ ID NO: 1899869 - DNA, 25 bp, Homo sapien
ttgactgaggaataaaaactcaatc

SEQ ID NO: 1899870 - DNA, 25 bp, Homo sapien
ttttcaaggcaaacgatcatactca

SEQ ID NO: 1899871 - DNA, 25 bp, Homo sapien
ttttttaggccaacagtacactgat

SEQ ID NO: 1899872 - DNA, 25 bp, Homo sapien
tcttcagacttcaagcataggcctc

SEQ ID NO: 1899873 - DNA, 25 bp, Homo sapien
gaagttgctccatcgatttgtaaag

SEQ ID NO: 1899874 - DNA, 25 bp, Homo sapien
ttccatcacccaactgccacttatc

SEQ ID NO: 1899875 - DNA, 25 bp, Homo sapien
gagtttatcctgatcttccatcacc

SEQ ID NO: 1899876 - DNA, 25 bp, Homo sapien
ctgacattgctgagtttatcctgat

SEQ ID NO: 1899877 - DNA, 25 bp, Homo sapien
cattgctgagtttatcctgatcttc

SEQ ID NO: 1899878 - DNA, 25 bp, Homo sapien
gcctcgtaatgaattctttctccat

SEQ ID NO: 1899879 - DNA, 25 bp, Homo sapien
caaagatgtgtgaaggcataagaac

SEQ ID NO: 1899880 - DNA, 25 bp, Homo sapien
tccatcaaagttgcccttaaaggtg

SEQ ID NO: 1899881 - DNA, 25 bp, Homo sapien
tcagattgcctcgtaatgaattctt

SEQ ID NO: 1899882 - DNA, 25 bp, Homo sapien
taaggttcttcagctatttgcaatc

SEQ ID NO: 1899883 - DNA, 25 bp, Homo sapien
cttggttttgcaagttccactgagg

SEQ ID NO: 1899884 - DNA, 25 bp, Homo sapien
tccctagtttgcatgtaattatggc

SEQ ID NO: 1899885 - DNA, 25 bp, Homo sapien
catttactggatctgtatccctagt

SEQ ID NO: 1899886 - DNA, 25 bp, Homo sapien
tgtggatacgggtcatttttgcctt

SEQ ID NO: 1899887 - DNA, 25 bp, Homo sapien
ttgttcttttccagtgatgttatca

SEQ ID NO: 1899888 - DNA, 25 bp, Homo sapien
cagagtgtggatacgggtcattttt

SEQ ID NO: 1899889 - DNA, 25 bp, Homo sapien
tgttcttttccagtgatgttatcat

SEQ ID NO: 1899890 - DNA, 25 bp, Homo sapien
gacacagtagaaaccggcataatcc

SEQ ID NO: 1899891 - DNA, 25 bp, Homo sapien
gaacggccctttggattgcatggaa

SEQ ID NO: 1899892 - DNA, 25 bp, Homo sapien
cttcaggagggcgaccagagatgcc

SEQ ID NO: 1899893 - DNA, 25 bp, Homo sapien
gcgtgaatccggtgtgcagtctcca

SEQ ID NO: 1899894 - DNA, 25 bp, Homo sapien
tgctgttcgggtataacctacttcc

SEQ ID NO: 1899895 - DNA, 25 bp, Homo sapien
tccatcctgcacagctcgctgttct

SEQ ID NO: 1899896 - DNA, 25 bp, Homo sapien
tcaagctgctgttcgggtataacct

SEQ ID NO: 1899897 - DNA, 25 bp, Homo sapien
gctgctgttcgggtataacctactt

SEQ ID NO: 1899898 - DNA, 25 bp, Homo sapien
tttcttctcacacattgaatctcct

SEQ ID NO: 1899899 - DNA, 25 bp, Homo sapien
ttgcctttcttctcacacattgaat

SEQ ID NO: 1899900 - DNA, 25 bp, Homo sapien
ttctcacacattgaatctcctccat

SEQ ID NO: 1899901 - DNA, 25 bp, Homo sapien
tgggctgacctcactgattgccttt

SEQ ID NO: 1899902 - DNA, 25 bp, Homo sapien
catgtcactgaagtttatggaaact

SEQ ID NO: 1899903 - DNA, 25 bp, Homo sapien
atgtcactgaagtttatggaaactt

SEQ ID NO: 1899904 - DNA, 25 bp, Homo sapien
gacatgtcactgaagtttatggaaa

SEQ ID NO: 1899905 - DNA, 25 bp, Homo sapien
acatgtcactgaagtttatggaaac

SEQ ID NO: 1899906 - DNA, 25 bp, Homo sapien
gtttaggaatattcaagcaggcctc

SEQ ID NO: 1899907 - DNA, 25 bp, Homo sapien
catactgccattgcttcacattgaa

SEQ ID NO: 1899908 - DNA, 25 bp, Homo sapien
cattgaaaccacacaggcaccttag

SEQ ID NO: 1899909 - DNA, 25 bp, Homo sapien
gcatatctcaatttctcaggctgct

SEQ ID NO: 1899910 - DNA, 25 bp, Homo sapien
ctgggtcatctggtgccattattat

SEQ ID NO: 1899911 - DNA, 25 bp, Homo sapien
gtttagaggagtaaagatacgggca

SEQ ID NO: 1899912 - DNA, 25 bp, Homo sapien
ggagtaaagatacgggcataataag

SEQ ID NO: 1899913 - DNA, 25 bp, Homo sapien
catctggtgccattattatcagtac

SEQ ID NO: 1899914 - DNA, 25 bp, Homo sapien
tatgtctgctgaactgtgtctgggc

SEQ ID NO: 1899915 - DNA, 25 bp, Homo sapien
gatatgtctgctgaactgtgtctgg

SEQ ID NO: 1899916 - DNA, 25 bp, Homo sapien
atgtctgctgaactgtgtctgggcc

SEQ ID NO: 1899917 - DNA, 25 bp, Homo sapien
tgatatgtctgctgaactgtgtctg

SEQ ID NO: 1899918 - DNA, 25 bp, Homo sapien
cagtggttggacaaactgaggcaaa

SEQ ID NO: 1899919 - DNA, 25 bp, Homo sapien
tgaggcaaaggccttcagtagtgtc

SEQ ID NO: 1899920 - DNA, 25 bp, Homo sapien
tgagtccaagttggaagatgtgctg

SEQ ID NO: 1899921 - DNA, 25 bp, Homo sapien
gtaattggcatggtggtaactgaaa

SEQ ID NO: 1899922 - DNA, 25 bp, Homo sapien
ctcctctctgtaaatccacaggacc

SEQ ID NO: 1899923 - DNA, 25 bp, Homo sapien
tgatcctcctctctgtaaatccaca

SEQ ID NO: 1899924 - DNA, 25 bp, Homo sapien
atttgatcctcctctctgtaaatcc

SEQ ID NO: 1899925 - DNA, 25 bp, Homo sapien
gatcctcctctctgtaaatccacag

SEQ ID NO: 1899926 - DNA, 25 bp, Homo sapien
aaatcaccaagcttagagccagccg

SEQ ID NO: 1899927 - DNA, 25 bp, Homo sapien
agccagccgaccatggaggagttga

SEQ ID NO: 1899928 - DNA, 25 bp, Homo sapien
gaaattgtgcggtggcactgctgca

SEQ ID NO: 1899929 - DNA, 25 bp, Homo sapien
gcgctgagtagtaatgctgaacctg

SEQ ID NO: 1899930 - DNA, 25 bp, Homo sapien
gctatttatagctcccatcaggaag

SEQ ID NO: 1899931 - DNA, 25 bp, Homo sapien
tcacagtcctgccaaaactgtggtg

SEQ ID NO: 1899932 - DNA, 25 bp, Homo sapien
caagtgttcaaaatggcgttcgaca

SEQ ID NO: 1899933 - DNA, 25 bp, Homo sapien
caaaatctccatgacggaggtggtc

SEQ ID NO: 1899934 - DNA, 25 bp, Homo sapien
cattattagtccatctgcatgtgca

SEQ ID NO: 1899935 - DNA, 25 bp, Homo sapien
gcatgtgcactcttcagctgcatca

SEQ ID NO: 1899936 - DNA, 25 bp, Homo sapien
atctgcatgtgcactcttcagctgc

SEQ ID NO: 1899937 - DNA, 25 bp, Homo sapien
atgcagtcattattagtccatctgc

SEQ ID NO: 1899938 - DNA, 25 bp, Homo sapien
tgttcacaaacagggagcgtctcgg

SEQ ID NO: 1899939 - DNA, 25 bp, Homo sapien
tgttctaggctcagacgagggttca

SEQ ID NO: 1899940 - DNA, 25 bp, Homo sapien
cacatttgagctggacaggacgtta

SEQ ID NO: 1899941 - DNA, 25 bp, Homo sapien
gaagctgaccaaggccctagatgca

SEQ ID NO: 1899942 - DNA, 25 bp, Homo sapien
gtggcacagtggaacagcgcagtct

SEQ ID NO: 1899943 - DNA, 25 bp, Homo sapien
aactgaatgaactgtctgcgtggca

SEQ ID NO: 1899944 - DNA, 25 bp, Homo sapien
gacagatttttggatcccagctcta

SEQ ID NO: 1899945 - DNA, 25 bp, Homo sapien
tgagtaaaaggaatcaccacagcct

SEQ ID NO: 1899946 - DNA, 25 bp, Homo sapien
cttaaaatgtcgctaaccttcctgg

SEQ ID NO: 1899947 - DNA, 25 bp, Homo sapien
caattcaatgtaactgcaggctcaa

SEQ ID NO: 1899948 - DNA, 25 bp, Homo sapien
gaggatttctattgaaccctggagg

SEQ ID NO: 1899949 - DNA, 25 bp, Homo sapien
ccctggaggtaatatttgtaatcac

SEQ ID NO: 1899950 - DNA, 25 bp, Homo sapien
gatgtcccggtatggaacgcagtca

SEQ ID NO: 1899951 - DNA, 25 bp, Homo sapien
gcagacttgaggtagcagagccaca

SEQ ID NO: 1899952 - DNA, 25 bp, Homo sapien
taatcctccagtagtagatcagcgg

SEQ ID NO: 1899953 - DNA, 25 bp, Homo sapien
cagggtagctatggatcctcaaggc

SEQ ID NO: 1899954 - DNA, 25 bp, Homo sapien
ttctggaaaatggacaatgagttcc

SEQ ID NO: 1899955 - DNA, 25 bp, Homo sapien
agagatgcaggagttcttcaagcat

SEQ ID NO: 1899956 - DNA, 25 bp, Homo sapien
cagaacagcagtatcaggtcccatt

SEQ ID NO: 1899957 - DNA, 25 bp, Homo sapien
cttcaagcatttcaacacagaacag

SEQ ID NO: 1899958 - DNA, 25 bp, Homo sapien
gcaatgtagccaaatcagggactct

SEQ ID NO: 1899959 - DNA, 25 bp, Homo sapien
cagggactctctacatacctatagc

SEQ ID NO: 1899960 - DNA, 25 bp, Homo sapien
taagacccaagatccagcaatgtag

SEQ ID NO: 1899961 - DNA, 25 bp, Homo sapien
caatacaagtctacctccatagagg

SEQ ID NO: 1899962 - DNA, 25 bp, Homo sapien
tgtccatggagctaaccttaacaag

SEQ ID NO: 1899963 - DNA, 25 bp, Homo sapien
tccagtagctagagaatacacatcg

SEQ ID NO: 1899964 - DNA, 25 bp, Homo sapien
tcgttttaaagctacacgtggaaca

SEQ ID NO: 1899965 - DNA, 25 bp, Homo sapien
tatttgtagagaacacctgccattg

SEQ ID NO: 1899966 - DNA, 25 bp, Homo sapien
tccaggagttggcagcaaagtgcag

SEQ ID NO: 1899967 - DNA, 25 bp, Homo sapien
ggaaaaagcactagacaatcaggtc

SEQ ID NO: 1899968 - DNA, 25 bp, Homo sapien
aactactctacctgtttagctggag

SEQ ID NO: 1899969 - DNA, 25 bp, Homo sapien
gggacagcattctcatggcacactc

SEQ ID NO: 1899970 - DNA, 25 bp, Homo sapien
gggcgcccgcggaagagcccaggga

SEQ ID NO: 1899971 - DNA, 25 bp, Homo sapien
gctccatgtagtccctcccggaact

SEQ ID NO: 1899972 - DNA, 25 bp, Homo sapien
ggctccatgtagtccctcccggaac

SEQ ID NO: 1899973 - DNA, 25 bp, Homo sapien
ctccatgtagtccctcccggaactt

SEQ ID NO: 1899974 - DNA, 25 bp, Homo sapien
gggtgcatattgaagaatttcataa

SEQ ID NO: 1899975 - DNA, 25 bp, Homo sapien
ttggggtgcatattgaagaatttca

SEQ ID NO: 1899976 - DNA, 25 bp, Homo sapien
cattggggtgcatattgaagaattt

SEQ ID NO: 1899977 - DNA, 25 bp, Homo sapien
tcattggggtgcatattgaagaatt

SEQ ID NO: 1899978 - DNA, 25 bp, Homo sapien
tcagtggcataggattggaccaaaa

SEQ ID NO: 1899979 - DNA, 25 bp, Homo sapien
cacagcggcttctctgcgctgcagt

SEQ ID NO: 1899980 - DNA, 25 bp, Homo sapien
agtgagggattctgtagggagagca

SEQ ID NO: 1899981 - DNA, 25 bp, Homo sapien
tccgtcctacacagcggcttctctg

SEQ ID NO: 1899982 - DNA, 25 bp, Homo sapien
tctccaagtatctctgggcttccat

SEQ ID NO: 1899983 - DNA, 25 bp, Homo sapien
aaatgcagcctgaaagggctttcac

SEQ ID NO: 1899984 - DNA, 25 bp, Homo sapien
tcatgaacattaattggaggaaagc

SEQ ID NO: 1899985 - DNA, 25 bp, Homo sapien
ctattgtgtgaagagaccgagggca

SEQ ID NO: 1899986 - DNA, 25 bp, Homo sapien
taagtgtcgcatccaagcagtttct

SEQ ID NO: 1899987 - DNA, 25 bp, Homo sapien
tcttcggtcatatattctccccagg

SEQ ID NO: 1899988 - DNA, 25 bp, Homo sapien
cagatgcctaaccacacaatgtaga

SEQ ID NO: 1899989 - DNA, 25 bp, Homo sapien
aattctgggcctgtttaagtcataa

SEQ ID NO: 1899990 - DNA, 25 bp, Homo sapien
tgtgactcagctagtgaccattatg

SEQ ID NO: 1899991 - DNA, 25 bp, Homo sapien
ggaactactgttagtctaccctgct

SEQ ID NO: 1899992 - DNA, 25 bp, Homo sapien
taagagtatgccctcacaatgagag

SEQ ID NO: 1899993 - DNA, 25 bp, Homo sapien
cccatgggacttacctatctgtcaa

SEQ ID NO: 1899994 - DNA, 25 bp, Homo sapien
gaaggccatgggacttaactatttg

SEQ ID NO: 1899995 - DNA, 25 bp, Homo sapien
aaatatacagcaggagggatgagga

SEQ ID NO: 1899996 - DNA, 25 bp, Homo sapien
gagaaaatatacagcaggagggatg

SEQ ID NO: 1899997 - DNA, 25 bp, Homo sapien
cataatttattacgcaaaaaatgag

SEQ ID NO: 1899998 - DNA, 25 bp, Homo sapien
taatttattacgcaaaaaatgagaa

SEQ ID NO: 1899999 - DNA, 25 bp, Homo sapien
tgaattccttcggctcttgacatgt

SEQ ID NO: 1900000 - DNA, 25 bp, Homo sapien
ttctgttctaactggtattcctgca

SEQ ID NO: 1900001 - DNA, 25 bp, Homo sapien
ctgaattccttcggctcttgacatg

SEQ ID NO: 1900002 - DNA, 25 bp, Homo sapien
gttctaactggtattcctgcattat

SEQ ID NO: 1900003 - DNA, 25 bp, Homo sapien
tcatacttctcaaatctacactatt

SEQ ID NO: 1900004 - DNA, 25 bp, Homo sapien
tacttctcaaatctacactattcct

SEQ ID NO: 1900005 - DNA, 25 bp, Homo sapien
aatctacactattcctcttcaaata

SEQ ID NO: 1900006 - DNA, 25 bp, Homo sapien
cttctcaaatctacactattcctct

SEQ ID NO: 1900007 - DNA, 25 bp, Homo sapien
taattatggtcacattgttgctcat

SEQ ID NO: 1900008 - DNA, 25 bp, Homo sapien
aattatggtcacattgttgctcatt

SEQ ID NO: 1900009 - DNA, 25 bp, Homo sapien
ttatggtcacattgttgctcatttg

SEQ ID NO: 1900010 - DNA, 25 bp, Homo sapien
ataattatggtcacattgttgctca

SEQ ID NO: 1900011 - DNA, 25 bp, Homo sapien
cttttagaaacgacagcagcttttc

SEQ ID NO: 1900012 - DNA, 25 bp, Homo sapien
cgagcaatctctcctttaacttctg

SEQ ID NO: 1900013 - DNA, 25 bp, Homo sapien
ctttacgagcaatctctcctttaac

SEQ ID NO: 1900014 - DNA, 25 bp, Homo sapien
tacacatcttttagaaacgacagca

SEQ ID NO: 1900015 - DNA, 25 bp, Homo sapien
tgtaatatcctaaacgcttaacaca

SEQ ID NO: 1900016 - DNA, 25 bp, Homo sapien
tttcctgtaatatcctaaacgctta

SEQ ID NO: 1900017 - DNA, 25 bp, Homo sapien
tcctgtaatatcctaaacgcttaac

SEQ ID NO: 1900018 - DNA, 25 bp, Homo sapien
gtaatatcctaaacgcttaacacaa

SEQ ID NO: 1900019 - DNA, 25 bp, Homo sapien
taatcatttggactgttaggaaaat

SEQ ID NO: 1900020 - DNA, 25 bp, Homo sapien
aacataatcatttggactgttagga

SEQ ID NO: 1900021 - DNA, 25 bp, Homo sapien
cataatcatttggactgttaggaaa

SEQ ID NO: 1900022 - DNA, 25 bp, Homo sapien
aatcatttggactgttaggaaaata

SEQ ID NO: 1900023 - DNA, 25 bp, Homo sapien
tgcgtccatcgtccagtgaagaccc

SEQ ID NO: 1900024 - DNA, 25 bp, Homo sapien
aaattccaggtcaggctctgcgtcc

SEQ ID NO: 1900025 - DNA, 25 bp, Homo sapien
agacccctagagaaagctctgtgac

SEQ ID NO: 1900026 - DNA, 25 bp, Homo sapien
caaaattccaggtcaggctctgcgt

SEQ ID NO: 1900027 - DNA, 25 bp, Homo sapien
gattccctgtatcaagtccgtgaca

SEQ ID NO: 1900028 - DNA, 25 bp, Homo sapien
ctgcctctgggtctcggaagtaggc

SEQ ID NO: 1900029 - DNA, 25 bp, Homo sapien
ctggttagcgggagcactggctgct

SEQ ID NO: 1900030 - DNA, 25 bp, Homo sapien
ggcgcggaggacagtctcaatgtca

SEQ ID NO: 1900031 - DNA, 25 bp, Homo sapien
tcctgataccgcgaatcactagtgc

SEQ ID NO: 1900032 - DNA, 25 bp, Homo sapien
tgataccgcgaatcactagtgctcc

SEQ ID NO: 1900033 - DNA, 25 bp, Homo sapien
taccgcgaatcactagtgctcccat

SEQ ID NO: 1900034 - DNA, 25 bp, Homo sapien
gaaattcctgataccgcgaatcact

SEQ ID NO: 1900035 - DNA, 25 bp, Homo sapien
cacgtgggaacaccggcgcaggaca

SEQ ID NO: 1900036 - DNA, 25 bp, Homo sapien
tgcgctcaggttcaggccgcacgtg

SEQ ID NO: 1900037 - DNA, 25 bp, Homo sapien
ggacaactccgggacacccggagca

SEQ ID NO: 1900038 - DNA, 25 bp, Homo sapien
tcctcataacattatgcgctcaggt

SEQ ID NO: 1900039 - DNA, 25 bp, Homo sapien
cagagatatattcctcctggatgcc

SEQ ID NO: 1900040 - DNA, 25 bp, Homo sapien
agagacttcccgcatttcttggcag

SEQ ID NO: 1900041 - DNA, 25 bp, Homo sapien
tacattggacctgcgtggataatcc

SEQ ID NO: 1900042 - DNA, 25 bp, Homo sapien
tcaactttagatgacggtttgctgc

SEQ ID NO: 1900043 - DNA, 25 bp, Homo sapien
attcccttctcaccaaggtaccctg

SEQ ID NO: 1900044 - DNA, 25 bp, Homo sapien
tcccttctcaccaaggtaccctgta

SEQ ID NO: 1900045 - DNA, 25 bp, Homo sapien
ccttctcaccaaggtaccctgtaag

SEQ ID NO: 1900046 - DNA, 25 bp, Homo sapien
ttctcaccaaggtaccctgtaagcc

SEQ ID NO: 1900047 - DNA, 25 bp, Homo sapien
tgttcccgggaggtgaccatattaa

SEQ ID NO: 1900048 - DNA, 25 bp, Homo sapien
tccctgttcccgggaggtgaccata

SEQ ID NO: 1900049 - DNA, 25 bp, Homo sapien
aggactataggcacggaccattgcg

SEQ ID NO: 1900050 - DNA, 25 bp, Homo sapien
ataggcacggaccattgcgcccggc

SEQ ID NO: 1900051 - DNA, 25 bp, Homo sapien
ggtcagtaccatagagtgtattatc

SEQ ID NO: 1900052 - DNA, 25 bp, Homo sapien
ctctggcgggttggttcccctgacg

SEQ ID NO: 1900053 - DNA, 25 bp, Homo sapien
tcaggcttggggatttcgtccacct

SEQ ID NO: 1900054 - DNA, 25 bp, Homo sapien
gaatttgttctggtcagtaccatag

SEQ ID NO: 1900055 - DNA, 25 bp, Homo sapien
agcgaagctactgcgggttctgtta

SEQ ID NO: 1900056 - DNA, 25 bp, Homo sapien
gcagagcgaagctactgcgggttct

SEQ ID NO: 1900057 - DNA, 25 bp, Homo sapien
cagcagagcgaagctactgcgggtt

SEQ ID NO: 1900058 - DNA, 25 bp, Homo sapien
agagcgaagctactgcgggttctgt

SEQ ID NO: 1900059 - DNA, 25 bp, Homo sapien
tcaccccatcgggtaagccagtctc

SEQ ID NO: 1900060 - DNA, 25 bp, Homo sapien
tctggcacctaacccagcagaccgc

SEQ ID NO: 1900061 - DNA, 25 bp, Homo sapien
agcagaccgctcaccccatcgggta

SEQ ID NO: 1900062 - DNA, 25 bp, Homo sapien
ggtgcctgcgctgccgtctctggca

SEQ ID NO: 1900063 - DNA, 25 bp, Homo sapien
gcatcagtattgaagcgcagttttt

SEQ ID NO: 1900064 - DNA, 25 bp, Homo sapien
gaattcgtaacgtaagaaggtagca

SEQ ID NO: 1900065 - DNA, 25 bp, Homo sapien
tgctagcatttttatatcccctgca

SEQ ID NO: 1900066 - DNA, 25 bp, Homo sapien
gcagttttttgcacctctgctcatt

SEQ ID NO: 1900067 - DNA, 25 bp, Homo sapien
tagctgagcgagtgatgaaagctgt

SEQ ID NO: 1900068 - DNA, 25 bp, Homo sapien
tgtagctgagcgagtgatgaaagct

SEQ ID NO: 1900069 - DNA, 25 bp, Homo sapien
aagctgtggaagaactatggtctgg

SEQ ID NO: 1900070 - DNA, 25 bp, Homo sapien
gaagaactatggtctggaagatgga

SEQ ID NO: 1900071 - DNA, 25 bp, Homo sapien
ggatggaggaagacaaatttgggaa

SEQ ID NO: 1900072 - DNA, 25 bp, Homo sapien
gcggatgggtgggaggggatggagg

SEQ ID NO: 1900073 - DNA, 25 bp, Homo sapien
gaggggatggaggaagacaaatttg

SEQ ID NO: 1900074 - DNA, 25 bp, Homo sapien
ctgcggatgggtgggaggggatgga

SEQ ID NO: 1900075 - DNA, 25 bp, Homo sapien
gcaaggtcaatttctagagcccaca

SEQ ID NO: 1900076 - DNA, 25 bp, Homo sapien
gcctttctgcaaggtcaatttctag

SEQ ID NO: 1900077 - DNA, 25 bp, Homo sapien
agacctcctagcctttctgcaaggt

SEQ ID NO: 1900078 - DNA, 25 bp, Homo sapien
ctggcgggtacagacctcctagcct

SEQ ID NO: 1900079 - DNA, 25 bp, Homo sapien
acttcagttccactaggttccctat

SEQ ID NO: 1900080 - DNA, 25 bp, Homo sapien
gggctccaccttccggcatgcttct

SEQ ID NO: 1900081 - DNA, 25 bp, Homo sapien
cttccggcatgcttctcgtgtcctg

SEQ ID NO: 1900082 - DNA, 25 bp, Homo sapien
cactaggttccctattgttccctgc

SEQ ID NO: 1900083 - DNA, 25 bp, Homo sapien
tgatgaccagtggtattaaggctgc

SEQ ID NO: 1900084 - DNA, 25 bp, Homo sapien
ctgatgaccagtggtattaaggctg

SEQ ID NO: 1900085 - DNA, 25 bp, Homo sapien
tcacctcaatctcagtccaaaatct

SEQ ID NO: 1900086 - DNA, 25 bp, Homo sapien
cctcaatctcagtccaaaatctgtg

SEQ ID NO: 1900087 - DNA, 25 bp, Homo sapien
ctgccagatgcccaacatgcttctt

SEQ ID NO: 1900088 - DNA, 25 bp, Homo sapien
gccagatgcccaacatgcttcttca

SEQ ID NO: 1900089 - DNA, 25 bp, Homo sapien
aagccatctgtgctcaatacccatt

SEQ ID NO: 1900090 - DNA, 25 bp, Homo sapien
catctgtgctcaatacccatttcct

SEQ ID NO: 1900091 - DNA, 25 bp, Homo sapien
gccatctgtgctcaatacccatttc

SEQ ID NO: 1900092 - DNA, 25 bp, Homo sapien
gtgctcaatacccatttcctccatg

SEQ ID NO: 1900093 - DNA, 25 bp, Homo sapien
tgggatcctgagtgcacaacattgg

SEQ ID NO: 1900094 - DNA, 25 bp, Homo sapien
gggatcctgagtgcacaacattggt

SEQ ID NO: 1900095 - DNA, 25 bp, Homo sapien
ctatgggatcctgagtgcacaacat

SEQ ID NO: 1900096 - DNA, 25 bp, Homo sapien
atcctgagtgcacaacattggtgac

SEQ ID NO: 1900097 - DNA, 25 bp, Homo sapien
tggtcattgtaggaaatggcattct

SEQ ID NO: 1900098 - DNA, 25 bp, Homo sapien
ttgggcagcactggcacttaaaatt

SEQ ID NO: 1900099 - DNA, 25 bp, Homo sapien
tcagagaagtgggtggtagcttccc

SEQ ID NO: 1900100 - DNA, 25 bp, Homo sapien
tctacatcagtagattcagaggctg

SEQ ID NO: 1900101 - DNA, 25 bp, Homo sapien
cttccctcaaacatgaggtatgcta

SEQ ID NO: 1900102 - DNA, 25 bp, Homo sapien
gctagtataaaggtatatcacataa

SEQ ID NO: 1900103 - DNA, 25 bp, Homo sapien
cctcaaacatgaggtatgctagtat

SEQ ID NO: 1900104 - DNA, 25 bp, Homo sapien
aacatgaggtatgctagtataaagg

SEQ ID NO: 1900105 - DNA, 25 bp, Homo sapien
gctgaggacccagctatgaataaaa

SEQ ID NO: 1900106 - DNA, 25 bp, Homo sapien
cctctgagggaacagtcaaaatatc

SEQ ID NO: 1900107 - DNA, 25 bp, Homo sapien
taagcacaccagtaacgacacaaaa

SEQ ID NO: 1900108 - DNA, 25 bp, Homo sapien
catttgaatagtctcactggaggta

SEQ ID NO: 1900109 - DNA, 25 bp, Homo sapien
ggaacccgtgttgcctcagtcgatg

SEQ ID NO: 1900110 - DNA, 25 bp, Homo sapien
agaggctctgccactccgaatctca

SEQ ID NO: 1900111 - DNA, 25 bp, Homo sapien
tgacagtgtcctggcagcgctgaat

SEQ ID NO: 1900112 - DNA, 25 bp, Homo sapien
aatcagcagaggagtgatggcatcc

SEQ ID NO: 1900113 - DNA, 25 bp, Homo sapien
tccagtcccacttgtatctaggtgg

SEQ ID NO: 1900114 - DNA, 25 bp, Homo sapien
gccatatgactagcccttgccagga

SEQ ID NO: 1900115 - DNA, 25 bp, Homo sapien
tgcagagccccgtgatggaaggaac

SEQ ID NO: 1900116 - DNA, 25 bp, Homo sapien
ccaggagggtatgactagaaggaca

SEQ ID NO: 1900117 - DNA, 25 bp, Homo sapien
ttcacaagcttaggatgatttactc

SEQ ID NO: 1900118 - DNA, 25 bp, Homo sapien
tcacaagcttaggatgatttactct

SEQ ID NO: 1900119 - DNA, 25 bp, Homo sapien
ccacgaccattgagcagccgatcaa

SEQ ID NO: 1900120 - DNA, 25 bp, Homo sapien
ttaggtccccacgaccattgagcag

SEQ ID NO: 1900121 - DNA, 25 bp, Homo sapien
attgagcagccgatcaactcagtga

SEQ ID NO: 1900122 - DNA, 25 bp, Homo sapien
aactcagtgaccatgcacagggttc

SEQ ID NO: 1900123 - DNA, 25 bp, Homo sapien
aacttgggctttacgcatcatcacc

SEQ ID NO: 1900124 - DNA, 25 bp, Homo sapien
tacgcatcatcacctgattcacttt

SEQ ID NO: 1900125 - DNA, 25 bp, Homo sapien
gggctttacgcatcatcacctgatt

SEQ ID NO: 1900126 - DNA, 25 bp, Homo sapien
tgcaacttgggctttacgcatcatc

SEQ ID NO: 1900127 - DNA, 25 bp, Homo sapien
tctctttcatttcctctggcaggct

SEQ ID NO: 1900128 - DNA, 25 bp, Homo sapien
ggctgctgagaaaaggaaccccaca

SEQ ID NO: 1900129 - DNA, 25 bp, Homo sapien
gctgctgagaaaaggaaccccacat

SEQ ID NO: 1900130 - DNA, 25 bp, Homo sapien
ctttcatttcctctggcaggctgct

SEQ ID NO: 1900131 - DNA, 25 bp, Homo sapien
accaccagtgccttgttcccgcagt

SEQ ID NO: 1900132 - DNA, 25 bp, Homo sapien
acaccaccagtgccttgttcccgca

SEQ ID NO: 1900133 - DNA, 25 bp, Homo sapien
ccaccagtgccttgttcccgcagtt

SEQ ID NO: 1900134 - DNA, 25 bp, Homo sapien
cgcagtttaccacccagtgaaggag

SEQ ID NO: 1900135 - DNA, 25 bp, Homo sapien
gagaggaagatctaaagaactaaag

SEQ ID NO: 1900136 - DNA, 25 bp, Homo sapien
agaactaaagatactatctgcacct

SEQ ID NO: 1900137 - DNA, 25 bp, Homo sapien
agaggaagatctaaagaactaaaga

SEQ ID NO: 1900138 - DNA, 25 bp, Homo sapien
tgccttgcaaatgtaactacacttg

SEQ ID NO: 1900139 - DNA, 25 bp, Homo sapien
gctgccttcactggcttgggaaggg

SEQ ID NO: 1900140 - DNA, 25 bp, Homo sapien
cattcatgtcctaactgctcgataa

SEQ ID NO: 1900141 - DNA, 25 bp, Homo sapien
gctgaaaggccacaggatcaacact

SEQ ID NO: 1900142 - DNA, 25 bp, Homo sapien
tcatttcagaggggctttgctccag

SEQ ID NO: 1900143 - DNA, 25 bp, Homo sapien
ctcagtgctagagctgtgcgttgct

SEQ ID NO: 1900144 - DNA, 25 bp, Homo sapien
tcagtgctagagctgtgcgttgctg

SEQ ID NO: 1900145 - DNA, 25 bp, Homo sapien
tattccttcaaagtacacgatggtg

SEQ ID NO: 1900146 - DNA, 25 bp, Homo sapien
aatgtctccaataaagtcgtacagg

SEQ ID NO: 1900147 - DNA, 25 bp, Homo sapien
tagtataaagcaggaaatgaaagcc

SEQ ID NO: 1900148 - DNA, 25 bp, Homo sapien
tgaaagccgataagggaggatctct

SEQ ID NO: 1900149 - DNA, 25 bp, Homo sapien
ctgcttctcgtcttcatgctctgtg

SEQ ID NO: 1900150 - DNA, 25 bp, Homo sapien
gcttctcgtcttcatgctctgtgaa

SEQ ID NO: 1900151 - DNA, 25 bp, Homo sapien
tgcttctcgtcttcatgctctgtga

SEQ ID NO: 1900152 - DNA, 25 bp, Homo sapien
cttctcgtcttcatgctctgtgaaa

SEQ ID NO: 1900153 - DNA, 25 bp, Homo sapien
tgcaggcaagggtactccagtctag

SEQ ID NO: 1900154 - DNA, 25 bp, Homo sapien
gcagcatgtggcatcgtaacccaga

SEQ ID NO: 1900155 - DNA, 25 bp, Homo sapien
ttcaaagccaggaatactgctgcag

SEQ ID NO: 1900156 - DNA, 25 bp, Homo sapien
taagatgcagattatcctccctggg

SEQ ID NO: 1900157 - DNA, 25 bp, Homo sapien
tcaggagactccaactacagaggtt

SEQ ID NO: 1900158 - DNA, 25 bp, Homo sapien
taagttactggaagtcctcgagcag

SEQ ID NO: 1900159 - DNA, 25 bp, Homo sapien
tcagataggtggcagaaagtctcca

SEQ ID NO: 1900160 - DNA, 25 bp, Homo sapien
ttagcactaggtggctcatcacgcc

SEQ ID NO: 1900161 - DNA, 25 bp, Homo sapien
gaaaataacagacactcctttggat

SEQ ID NO: 1900162 - DNA, 25 bp, Homo sapien
tcctaaagcatgattcagtagcagc

SEQ ID NO: 1900163 - DNA, 25 bp, Homo sapien
tcacagattataattaagagaacgc

SEQ ID NO: 1900164 - DNA, 25 bp, Homo sapien
taaatagataaaactccttagtgac

SEQ ID NO: 1900165 - DNA, 25 bp, Homo sapien
caaggatcctattacacagttgcta

SEQ ID NO: 1900166 - DNA, 25 bp, Homo sapien
gagtcaaggacaagctccaactggt

SEQ ID NO: 1900167 - DNA, 25 bp, Homo sapien
gttcccaaaactaggactggagctc

SEQ ID NO: 1900168 - DNA, 25 bp, Homo sapien
ccaaaaacacagtatagggtagcca

SEQ ID NO: 1900169 - DNA, 25 bp, Homo sapien
tcttgtcccatctgtccaaggtgag

SEQ ID NO: 1900170 - DNA, 25 bp, Homo sapien
tccaaggtgagacaaaagtttgcta

SEQ ID NO: 1900171 - DNA, 25 bp, Homo sapien
ctgtccaaggtgagacaaaagtttg

SEQ ID NO: 1900172 - DNA, 25 bp, Homo sapien
ctcatcttgtcccatctgtccaagg

SEQ ID NO: 1900173 - DNA, 25 bp, Homo sapien
atctttagaaccaaacttcttatgg

SEQ ID NO: 1900174 - DNA, 25 bp, Homo sapien
ttcagaatctttagaaccaaacttc

SEQ ID NO: 1900175 - DNA, 25 bp, Homo sapien
gaaccaaacttcttatgggcctgca

SEQ ID NO: 1900176 - DNA, 25 bp, Homo sapien
tctgttcagaatctttagaaccaaa

SEQ ID NO: 1900177 - DNA, 25 bp, Homo sapien
tagtacctcataccataatcctgga

SEQ ID NO: 1900178 - DNA, 25 bp, Homo sapien
gctggtccaatgttgctactgtttc

SEQ ID NO: 1900179 - DNA, 25 bp, Homo sapien
caagtggatgacaacctgctggtcc

SEQ ID NO: 1900180 - DNA, 25 bp, Homo sapien
gaatccttcagagactgagtaaggg

SEQ ID NO: 1900181 - DNA, 25 bp, Homo sapien
tggaaaggatatgggagacagtaac

SEQ ID NO: 1900182 - DNA, 25 bp, Homo sapien
tattctacatattgaatctgagtgg

SEQ ID NO: 1900183 - DNA, 25 bp, Homo sapien
attctacatattgaatctgagtgga

SEQ ID NO: 1900184 - DNA, 25 bp, Homo sapien
tatttctcatggtagtggtaaggca

SEQ ID NO: 1900185 - DNA, 25 bp, Homo sapien
caacatagaatgaaggaaacgaacg

SEQ ID NO: 1900186 - DNA, 25 bp, Homo sapien
gccacctcgcttagtaaattataga

SEQ ID NO: 1900187 - DNA, 25 bp, Homo sapien
caaaaacgtattgccctaacagcac

SEQ ID NO: 1900188 - DNA, 25 bp, Homo sapien
taaacataacggagctttctgaagc

SEQ ID NO: 1900189 - DNA, 25 bp, Homo sapien
tgtacttctacaatggatccagcgg

SEQ ID NO: 1900190 - DNA, 25 bp, Homo sapien
gatccagcggaacatgtttagcaag

SEQ ID NO: 1900191 - DNA, 25 bp, Homo sapien
gaaggcctgtgtacctgtcatcatg

SEQ ID NO: 1900192 - DNA, 25 bp, Homo sapien
aagattcttcctcactaaattcaca

SEQ ID NO: 1900193 - DNA, 25 bp, Homo sapien
tcacaggtaattttaagtcccctca

SEQ ID NO: 1900194 - DNA, 25 bp, Homo sapien
tcctcactaaattcacaggtaattt

SEQ ID NO: 1900195 - DNA, 25 bp, Homo sapien
cactaaattcacaggtaattttaag

SEQ ID NO: 1900196 - DNA, 25 bp, Homo sapien
aaacaagtagtaacacattatgttt

SEQ ID NO: 1900197 - DNA, 25 bp, Homo sapien
acatgttggctgtcaaatggctggc

SEQ ID NO: 1900198 - DNA, 25 bp, Homo sapien
tccttgccaggtggcatattttcca

SEQ ID NO: 1900199 - DNA, 25 bp, Homo sapien
tggctgtcaaatggctggcaatagt

SEQ ID NO: 1900200 - DNA, 25 bp, Homo sapien
ttggcaggcttttaccatgtattgc

SEQ ID NO: 1900201 - DNA, 25 bp, Homo sapien
tgggaggaaggttcttcttctgacc

SEQ ID NO: 1900202 - DNA, 25 bp, Homo sapien
cagctgggaggaaggttcttcttct

SEQ ID NO: 1900203 - DNA, 25 bp, Homo sapien
ctgaccccacttggcaggcttttac

SEQ ID NO: 1900204 - DNA, 25 bp, Homo sapien
cagaatggatgctaagcgaggagga

SEQ ID NO: 1900205 - DNA, 25 bp, Homo sapien
tgaggaccccttatactcaaggtag

SEQ ID NO: 1900206 - DNA, 25 bp, Homo sapien
ccagggaggagtagttcaacttcat

SEQ ID NO: 1900207 - DNA, 25 bp, Homo sapien
cttgaagagttggaggatgaaggcc

SEQ ID NO: 1900208 - DNA, 25 bp, Homo sapien
tatactgctcaataacattccctag

SEQ ID NO: 1900209 - DNA, 25 bp, Homo sapien
gaagaaatcgcccaatatactgctc

SEQ ID NO: 1900210 - DNA, 25 bp, Homo sapien
gattgacaacacacgatacacatgc

SEQ ID NO: 1900211 - DNA, 25 bp, Homo sapien
tgccagcaaaacaggatgttgtcca

SEQ ID NO: 1900212 - DNA, 25 bp, Homo sapien
tacttagttttcctataacaggcac

SEQ ID NO: 1900213 - DNA, 25 bp, Homo sapien
cattttacagctaggataactaagg

SEQ ID NO: 1900214 - DNA, 25 bp, Homo sapien
taacaaagggcgaggaatatggaaa

SEQ ID NO: 1900215 - DNA, 25 bp, Homo sapien
tatggcatctaactaagcatgtgtg

SEQ ID NO: 1900216 - DNA, 25 bp, Homo sapien
tgcatgtggcagcagtaaacaatct

SEQ ID NO: 1900217 - DNA, 25 bp, Homo sapien
tgtgcccatgatttcacaagaattc

SEQ ID NO: 1900218 - DNA, 25 bp, Homo sapien
tctcttgctgtaatactgcatgtgg

SEQ ID NO: 1900219 - DNA, 25 bp, Homo sapien
tgatccggaatagtaatttttgggc

SEQ ID NO: 1900220 - DNA, 25 bp, Homo sapien
ttagttgcccgtggtataggatacc

SEQ ID NO: 1900221 - DNA, 25 bp, Homo sapien
tactctcaggtgcaatacaggtatg

SEQ ID NO: 1900222 - DNA, 25 bp, Homo sapien
taccggtgatatagggtaccacgtg

SEQ ID NO: 1900223 - DNA, 25 bp, Homo sapien
ccgtgctatagggtaccacatggta

SEQ ID NO: 1900224 - DNA, 25 bp, Homo sapien
ttatatagtatacactatctcctac

SEQ ID NO: 1900225 - DNA, 25 bp, Homo sapien
tactattgctagattaataaagtca

SEQ ID NO: 1900226 - DNA, 25 bp, Homo sapien
gagctctttaactaatgtatcccta

SEQ ID NO: 1900227 - DNA, 25 bp, Homo sapien
tgtatccctaactctcaatccagca

SEQ ID NO: 1900228 - DNA, 25 bp, Homo sapien
tttaatacttcaccaaggtattcca

SEQ ID NO: 1900229 - DNA, 25 bp, Homo sapien
tacttcaccaaggtattccaaggac

SEQ ID NO: 1900230 - DNA, 25 bp, Homo sapien
tgtctggacgttcccgtaagttaca

SEQ ID NO: 1900231 - DNA, 25 bp, Homo sapien
gtgaccatggcagatttatcagaaa

SEQ ID NO: 1900232 - DNA, 25 bp, Homo sapien
gattcacatttttcttcctccagaa

SEQ ID NO: 1900233 - DNA, 25 bp, Homo sapien
agatggataaatattcaacttgggc

SEQ ID NO: 1900234 - DNA, 25 bp, Homo sapien
gtaatcttgtcagtttgaccaactg

SEQ ID NO: 1900235 - DNA, 25 bp, Homo sapien
aaatagtaatcttgtcagtttgacc

SEQ ID NO: 1900236 - DNA, 25 bp, Homo sapien
tttgaccaactgtttcatgtactct

SEQ ID NO: 1900237 - DNA, 25 bp, Homo sapien
tctgagagattaaatagtaatcttg

SEQ ID NO: 1900238 - DNA, 25 bp, Homo sapien
gcttgaaaagatacatagcctgaat

SEQ ID NO: 1900239 - DNA, 25 bp, Homo sapien
tgcaaaacacaacgaatccatgatc

SEQ ID NO: 1900240 - DNA, 25 bp, Homo sapien
tttttatctatgagcaaatcatcag

SEQ ID NO: 1900241 - DNA, 25 bp, Homo sapien
tgatcttacggttaaggcttgaaaa

SEQ ID NO: 1900242 - DNA, 25 bp, Homo sapien
taaatatcttgctacaacttgaggg

SEQ ID NO: 1900243 - DNA, 25 bp, Homo sapien
gctgtgcttggcatgtccattgcta

SEQ ID NO: 1900244 - DNA, 25 bp, Homo sapien
tgatatcatcccaaccaaaaagttg

SEQ ID NO: 1900245 - DNA, 25 bp, Homo sapien
tgtaggacatgacttaaatatcttg

SEQ ID NO: 1900246 - DNA, 25 bp, Homo sapien
ttttgactccaaactagctttccaa

SEQ ID NO: 1900247 - DNA, 25 bp, Homo sapien
gcattaccagtaactacaatctcag

SEQ ID NO: 1900248 - DNA, 25 bp, Homo sapien
gaatctatcttccattctacgtcag

SEQ ID NO: 1900249 - DNA, 25 bp, Homo sapien
tacccagcgaccttggcattaccag

SEQ ID NO: 1900250 - DNA, 25 bp, Homo sapien
catccgcaagttgtgagaaaggcac

SEQ ID NO: 1900251 - DNA, 25 bp, Homo sapien
cagctgcatccgcaagttgtgagaa

SEQ ID NO: 1900252 - DNA, 25 bp, Homo sapien
tgcatccgcaagttgtgagaaaggc

SEQ ID NO: 1900253 - DNA, 25 bp, Homo sapien
ccgcaagttgtgagaaaggcactac

SEQ ID NO: 1900254 - DNA, 25 bp, Homo sapien
tggcgctctttagccgataatgaag

SEQ ID NO: 1900255 - DNA, 25 bp, Homo sapien
gtctccacagtgcactggcaactgc

SEQ ID NO: 1900256 - DNA, 25 bp, Homo sapien
atgtctccacagtgcactggcaact

SEQ ID NO: 1900257 - DNA, 25 bp, Homo sapien
aaggtggcgctctttagccgataat

SEQ ID NO: 1900258 - DNA, 25 bp, Homo sapien
ctttgaagttcctgacacaattgtt

SEQ ID NO: 1900259 - DNA, 25 bp, Homo sapien
gttcctgacacaattgttgatgcat

SEQ ID NO: 1900260 - DNA, 25 bp, Homo sapien
ctgtacaaataggtccacattgtcc

SEQ ID NO: 1900261 - DNA, 25 bp, Homo sapien
gaagttcctgacacaattgttgatg

SEQ ID NO: 1900262 - DNA, 25 bp, Homo sapien
gatttcacattaagatcagtttgga

SEQ ID NO: 1900263 - DNA, 25 bp, Homo sapien
cagcaacatccagcatttactggta

SEQ ID NO: 1900264 - DNA, 25 bp, Homo sapien
tatgagaccagcaccatgcaaagtg

SEQ ID NO: 1900265 - DNA, 25 bp, Homo sapien
caaattgcagctctcatggtggaaa

SEQ ID NO: 1900266 - DNA, 25 bp, Homo sapien
aaattgtcagggagaaaccaggctg

SEQ ID NO: 1900267 - DNA, 25 bp, Homo sapien
tgtgaaacagggcttactctgcctt

SEQ ID NO: 1900268 - DNA, 25 bp, Homo sapien
tcaatcctgagtcccaatcctgtgc

SEQ ID NO: 1900269 - DNA, 25 bp, Homo sapien
aatcctgtgcatgcccaaattgtca

SEQ ID NO: 1900270 - DNA, 25 bp, Homo sapien
cccagcagtctttttcgaaaacagt

SEQ ID NO: 1900271 - DNA, 25 bp, Homo sapien
atcccagcagtctttttcgaaaaca

SEQ ID NO: 1900272 - DNA, 25 bp, Homo sapien
gcagtctttttcgaaaacagtagta

SEQ ID NO: 1900273 - DNA, 25 bp, Homo sapien
cagcagtctttttcgaaaacagtag

SEQ ID NO: 1900274 - DNA, 25 bp, Homo sapien
ggaagaactgctggatcactaaact

SEQ ID NO: 1900275 - DNA, 25 bp, Homo sapien
gtggagctaattttctgtcattcag

SEQ ID NO: 1900276 - DNA, 25 bp, Homo sapien
ttggtaatatagacagtggagctaa

SEQ ID NO: 1900277 - DNA, 25 bp, Homo sapien
tcttactcttactcttcccagcatt

SEQ ID NO: 1900278 - DNA, 25 bp, Homo sapien
aagggctctagagggtctggctaca

SEQ ID NO: 1900279 - DNA, 25 bp, Homo sapien
caaagggctctagagggtctggcta

SEQ ID NO: 1900280 - DNA, 25 bp, Homo sapien
cgagacaaagggctctagagggtct

SEQ ID NO: 1900281 - DNA, 25 bp, Homo sapien
gacaaagggctctagagggtctggc

SEQ ID NO: 1900282 - DNA, 25 bp, Homo sapien
ggtttggctcctgcacaattctaca

SEQ ID NO: 1900283 - DNA, 25 bp, Homo sapien
tgttgtaaaccccttaggacgtgca

SEQ ID NO: 1900284 - DNA, 25 bp, Homo sapien
cttgtgttgagtaaaccgatgatac

SEQ ID NO: 1900285 - DNA, 25 bp, Homo sapien
ctgggaaggattagcctgcttgtgt

SEQ ID NO: 1900286 - DNA, 25 bp, Homo sapien
tggcaatagaccagataagctgcag

SEQ ID NO: 1900287 - DNA, 25 bp, Homo sapien
gctgtattatagcagctctgcttgc

SEQ ID NO: 1900288 - DNA, 25 bp, Homo sapien
atctcatttagacctgagctgatcc

SEQ ID NO: 1900289 - DNA, 25 bp, Homo sapien
tgcagaaccagctgtaatctcattt

SEQ ID NO: 1900290 - DNA, 25 bp, Homo sapien
gattaactgatgctccgaaaaaatt

SEQ ID NO: 1900291 - DNA, 25 bp, Homo sapien
tgtatgccaactttacaaagcagct

SEQ ID NO: 1900292 - DNA, 25 bp, Homo sapien
tctccagcagtagtagctgactacc

SEQ ID NO: 1900293 - DNA, 25 bp, Homo sapien
gaggaatgccaaaccctactgtaac

SEQ ID NO: 1900294 - DNA, 25 bp, Homo sapien
tatgcagcataagccacataatcgg

SEQ ID NO: 1900295 - DNA, 25 bp, Homo sapien
tcctccttaagagagagatttatgc

SEQ ID NO: 1900296 - DNA, 25 bp, Homo sapien
taattaagagatcaaccaacccagt

SEQ ID NO: 1900297 - DNA, 25 bp, Homo sapien
ctattccaggaagggtgtacaaggt

SEQ ID NO: 1900298 - DNA, 25 bp, Homo sapien
ggttactcccagactgaatagcagg

SEQ ID NO: 1900299 - DNA, 25 bp, Homo sapien
taggcaatttagatccaatcagccc

SEQ ID NO: 1900300 - DNA, 25 bp, Homo sapien
cacccgctggcaagaaataatactc

SEQ ID NO: 1900301 - DNA, 25 bp, Homo sapien
tctaatgctgcatttgcacaccggg

SEQ ID NO: 1900302 - DNA, 25 bp, Homo sapien
ttccactctaatcccaatacagaca

SEQ ID NO: 1900303 - DNA, 25 bp, Homo sapien
gactggttccgaaatgtctcaaaag

SEQ ID NO: 1900304 - DNA, 25 bp, Homo sapien
cccagccttgagagactggttccga

SEQ ID NO: 1900305 - DNA, 25 bp, Homo sapien
tacagacaatctgcacttgtagatt

SEQ ID NO: 1900306 - DNA, 25 bp, Homo sapien
gcaactatcaggcactactagaggt

SEQ ID NO: 1900307 - DNA, 25 bp, Homo sapien
gaccctcaacttcgttggacaagaa

SEQ ID NO: 1900308 - DNA, 25 bp, Homo sapien
tgttctggcctgaaccctcaattgg

SEQ ID NO: 1900309 - DNA, 25 bp, Homo sapien
taaactgtcacacatagctagtgct

SEQ ID NO: 1900310 - DNA, 25 bp, Homo sapien
tacttgtaggatacgaacctatgag

SEQ ID NO: 1900311 - DNA, 25 bp, Homo sapien
gcaatgtatctcaaccttagcactg

SEQ ID NO: 1900312 - DNA, 25 bp, Homo sapien
taggagttgtcttgagcactgtaga

SEQ ID NO: 1900313 - DNA, 25 bp, Homo sapien
gagtgtttagcagcatttctgacct

SEQ ID NO: 1900314 - DNA, 25 bp, Homo sapien
atggtgtaatgtgaccaaaacttcc

SEQ ID NO: 1900315 - DNA, 25 bp, Homo sapien
aagttttgtataggtgattggtgtt

SEQ ID NO: 1900316 - DNA, 25 bp, Homo sapien
taggtgattggtgttattaatagaa

SEQ ID NO: 1900317 - DNA, 25 bp, Homo sapien
taaggctatgactttgctgcaaaaa

SEQ ID NO: 1900318 - DNA, 25 bp, Homo sapien
cagtaaaagccacctcagacatgag

SEQ ID NO: 1900319 - DNA, 25 bp, Homo sapien
cgtatctctgggtaataatacactt

SEQ ID NO: 1900320 - DNA, 25 bp, Homo sapien
catgagctcatgatcttgctcagaa

SEQ ID NO: 1900321 - DNA, 25 bp, Homo sapien
aatatctgtaacgtatctctgggta

SEQ ID NO: 1900322 - DNA, 25 bp, Homo sapien
ccagagctgctcttgactttagttc

SEQ ID NO: 1900323 - DNA, 25 bp, Homo sapien
agggctaagagaaagcatggctctc

SEQ ID NO: 1900324 - DNA, 25 bp, Homo sapien
catggctctcagactgcaccagagc

SEQ ID NO: 1900325 - DNA, 25 bp, Homo sapien
ctgcatcttgtgtttgcatataagc

SEQ ID NO: 1900326 - DNA, 25 bp, Homo sapien
taaattagcatacaactgaaaacca

SEQ ID NO: 1900327 - DNA, 25 bp, Homo sapien
aattagcatacaactgaaaaccata

SEQ ID NO: 1900328 - DNA, 25 bp, Homo sapien
tcataaattagcatacaactgaaaa

SEQ ID NO: 1900329 - DNA, 25 bp, Homo sapien
attagcatacaactgaaaaccatac

SEQ ID NO: 1900330 - DNA, 25 bp, Homo sapien
tcaggaggtctaaaacatgacttgc

SEQ ID NO: 1900331 - DNA, 25 bp, Homo sapien
tctgagacgttacaaaagcaggctt

SEQ ID NO: 1900332 - DNA, 25 bp, Homo sapien
catgggaaggatacaagcaatagct

SEQ ID NO: 1900333 - DNA, 25 bp, Homo sapien
gattctcgacatgctcgcagaagca

SEQ ID NO: 1900334 - DNA, 25 bp, Homo sapien
cttttttgatggaattttgaatata

SEQ ID NO: 1900335 - DNA, 25 bp, Homo sapien
tcttttttgatggaattttgaatat

SEQ ID NO: 1900336 - DNA, 25 bp, Homo sapien
caccacacctggccttaagttttgc

SEQ ID NO: 1900337 - DNA, 25 bp, Homo sapien
tgcacactcatgacagaagatactg

SEQ ID NO: 1900338 - DNA, 25 bp, Homo sapien
accgctgggctcaaagaacacaaaa

SEQ ID NO: 1900339 - DNA, 25 bp, Homo sapien
tatccaaagatatcagtgcacactc

SEQ ID NO: 1900340 - DNA, 25 bp, Homo sapien
aaaaaccagtgcttgtgaaccgctg

SEQ ID NO: 1900341 - DNA, 25 bp, Homo sapien
tgatcttgtttatcgcaacagcaag

SEQ ID NO: 1900342 - DNA, 25 bp, Homo sapien
gacttgtttccaaggatgagggcca

SEQ ID NO: 1900343 - DNA, 25 bp, Homo sapien
tgacttcatggtattagcaaggcct

SEQ ID NO: 1900344 - DNA, 25 bp, Homo sapien
aagcatagacaagggtgacttcatg

SEQ ID NO: 1900345 - DNA, 25 bp, Homo sapien
aaaactggtcaggttatcagcctgg

SEQ ID NO: 1900346 - DNA, 25 bp, Homo sapien
tctggtatgacaagacaccctagac

SEQ ID NO: 1900347 - DNA, 25 bp, Homo sapien
acagttttcgtagcattgatgatca

SEQ ID NO: 1900348 - DNA, 25 bp, Homo sapien
caatggacattccttcaggttggct

SEQ ID NO: 1900349 - DNA, 25 bp, Homo sapien
caggttcttactataatattcccat

SEQ ID NO: 1900350 - DNA, 25 bp, Homo sapien
tcacaaagtgtcaaacaacagtgaa

SEQ ID NO: 1900351 - DNA, 25 bp, Homo sapien
aaatcacaaagtgtcaaacaacagt

SEQ ID NO: 1900352 - DNA, 25 bp, Homo sapien
tggtaacaattgcaatgtttggctc

SEQ ID NO: 1900353 - DNA, 25 bp, Homo sapien
cgtaattgttcttctagaatgacac

SEQ ID NO: 1900354 - DNA, 25 bp, Homo sapien
tcgtaattgttcttctagaatgaca

SEQ ID NO: 1900355 - DNA, 25 bp, Homo sapien
gtaattgttcttctagaatgacacc

SEQ ID NO: 1900356 - DNA, 25 bp, Homo sapien
cactgttttaacgtactaggcatag

SEQ ID NO: 1900357 - DNA, 25 bp, Homo sapien
taaatatgttgggaagctactggaa

SEQ ID NO: 1900358 - DNA, 25 bp, Homo sapien
taagtcagagatagcacatgtactg

SEQ ID NO: 1900359 - DNA, 25 bp, Homo sapien
gaagggctgcaattgaactacatga

SEQ ID NO: 1900360 - DNA, 25 bp, Homo sapien
taacgtcagggtcactagcagaaat

SEQ ID NO: 1900361 - DNA, 25 bp, Homo sapien
ttgaaaggacagttcgattataccc

SEQ ID NO: 1900362 - DNA, 25 bp, Homo sapien
tgaaaaggtcaatggtaacgggcaa

SEQ ID NO: 1900363 - DNA, 25 bp, Homo sapien
gctgtagagtataaccatgggagga

SEQ ID NO: 1900364 - DNA, 25 bp, Homo sapien
gataacatattacaaaactttacag

SEQ ID NO: 1900365 - DNA, 25 bp, Homo sapien
tacagggcttccatacaatatgttt

SEQ ID NO: 1900366 - DNA, 25 bp, Homo sapien
ttaaaaggaggtcaagtctgacctc

SEQ ID NO: 1900367 - DNA, 25 bp, Homo sapien
aaaggaggtcaagtctgacctctag

SEQ ID NO: 1900368 - DNA, 25 bp, Homo sapien
acaaagttccaatttgattccactt

SEQ ID NO: 1900369 - DNA, 25 bp, Homo sapien
ctgaacactgatggactttttcagc

SEQ ID NO: 1900370 - DNA, 25 bp, Homo sapien
tcagcagttcttctacaaagttcca

SEQ ID NO: 1900371 - DNA, 25 bp, Homo sapien
tctacaaagttccaatttgattcca

SEQ ID NO: 1900372 - DNA, 25 bp, Homo sapien
aactaaccctcagattccatggatg

SEQ ID NO: 1900373 - DNA, 25 bp, Homo sapien
gatactgggccgtgtgtgaacttct

SEQ ID NO: 1900374 - DNA, 25 bp, Homo sapien
gggtctatccaatattccaaagagg

SEQ ID NO: 1900375 - DNA, 25 bp, Homo sapien
caatggctcccatacctcgtagagg

SEQ ID NO: 1900376 - DNA, 25 bp, Homo sapien
caactaaaacctaatggatccctgg

SEQ ID NO: 1900377 - DNA, 25 bp, Homo sapien
catttcatctggtactccatggcga

SEQ ID NO: 1900378 - DNA, 25 bp, Homo sapien
gatgctacatgagtaataatccacc

SEQ ID NO: 1900379 - DNA, 25 bp, Homo sapien
ggatccctggactggattacaggca

SEQ ID NO: 1900380 - DNA, 25 bp, Homo sapien
gattccactgtgatgttatctgggt

SEQ ID NO: 1900381 - DNA, 25 bp, Homo sapien
cctatgtgggtgcactgaatttatc

SEQ ID NO: 1900382 - DNA, 25 bp, Homo sapien
aagtcagctgcccaattgtcactct

SEQ ID NO: 1900383 - DNA, 25 bp, Homo sapien
tggcctccattgttgttgaaaagtc

SEQ ID NO: 1900384 - DNA, 25 bp, Homo sapien
gagatggccctctctaatatgggtg

SEQ ID NO: 1900385 - DNA, 25 bp, Homo sapien
gcagacctttggactgagactggaa

SEQ ID NO: 1900386 - DNA, 25 bp, Homo sapien
tgaatacaacaaaaagtcctccgag

SEQ ID NO: 1900387 - DNA, 25 bp, Homo sapien
tcctccgagggtagagaagactccc

SEQ ID NO: 1900388 - DNA, 25 bp, Homo sapien
taagacttgtcttcgggtggattgc

SEQ ID NO: 1900389 - DNA, 25 bp, Homo sapien
gattgcagtcaatagtaggccacca

SEQ ID NO: 1900390 - DNA, 25 bp, Homo sapien
taaaactgacagtactaagcactcc

SEQ ID NO: 1900391 - DNA, 25 bp, Homo sapien
tcaaggtgtttttctatactcccag

SEQ ID NO: 1900392 - DNA, 25 bp, Homo sapien
agaagatgaataagtagaacccata

SEQ ID NO: 1900393 - DNA, 25 bp, Homo sapien
ttccgagacaaaccatttacttctg

SEQ ID NO: 1900394 - DNA, 25 bp, Homo sapien
cactggtcactcattaatgattcag

SEQ ID NO: 1900395 - DNA, 25 bp, Homo sapien
aaaccatttacttctgtggtctaga

SEQ ID NO: 1900396 - DNA, 25 bp, Homo sapien
tcaacggaatgaagggaaaatctcg

SEQ ID NO: 1900397 - DNA, 25 bp, Homo sapien
taatcatctagtgccgtggtcagca

SEQ ID NO: 1900398 - DNA, 25 bp, Homo sapien
caaaagataataagcgccagagagg

SEQ ID NO: 1900399 - DNA, 25 bp, Homo sapien
taatgggctagattacacctcaggg

SEQ ID NO: 1900400 - DNA, 25 bp, Homo sapien
cctgttgagtgacaggcttattaaa

SEQ ID NO: 1900401 - DNA, 25 bp, Homo sapien
acctgttgagtgacaggcttattaa

SEQ ID NO: 1900402 - DNA, 25 bp, Homo sapien
ctgttgagtgacaggcttattaaat

SEQ ID NO: 1900403 - DNA, 25 bp, Homo sapien
tacctgttgagtgacaggcttatta

SEQ ID NO: 1900404 - DNA, 25 bp, Homo sapien
gatgttggttaaattgtcacttgcc

SEQ ID NO: 1900405 - DNA, 25 bp, Homo sapien
ttgtcacttgccagattcataaact

SEQ ID NO: 1900406 - DNA, 25 bp, Homo sapien
cagattcataaactgatgaccatat

SEQ ID NO: 1900407 - DNA, 25 bp, Homo sapien
tcaaataggctgatgttggttaaat

SEQ ID NO: 1900408 - DNA, 25 bp, Homo sapien
taataaatgccatgacggtggaaaa

SEQ ID NO: 1900409 - DNA, 25 bp, Homo sapien
tgtaaagaatttctagcaccagcca

SEQ ID NO: 1900410 - DNA, 25 bp, Homo sapien
caccagccaatgtatatccaagtgg

SEQ ID NO: 1900411 - DNA, 25 bp, Homo sapien
gaatttctagcaccagccaatgtat

SEQ ID NO: 1900412 - DNA, 25 bp, Homo sapien
tatcaactgtgattgagaattcatt

SEQ ID NO: 1900413 - DNA, 25 bp, Homo sapien
gaaccaattaacctaccactattca

SEQ ID NO: 1900414 - DNA, 25 bp, Homo sapien
caatactcctccataaacacaagga

SEQ ID NO: 1900415 - DNA, 25 bp, Homo sapien
ttttactaggtatttcatagcatgt

SEQ ID NO: 1900416 - DNA, 25 bp, Homo sapien
caaatgctcctatattaacactggg

SEQ ID NO: 1900417 - DNA, 25 bp, Homo sapien
ggacaggaacatgactctcagcatt

SEQ ID NO: 1900418 - DNA, 25 bp, Homo sapien
caaagcctcataaggatggacagga

SEQ ID NO: 1900419 - DNA, 25 bp, Homo sapien
cactgggaagttcagataggtgtcc

SEQ ID NO: 1900420 - DNA, 25 bp, Homo sapien
gatgaaaactttaacataatggaga

SEQ ID NO: 1900421 - DNA, 25 bp, Homo sapien
tctgctttgcagtgtagagttgata

SEQ ID NO: 1900422 - DNA, 25 bp, Homo sapien
ttgcagtgtagagttgataccttcc

SEQ ID NO: 1900423 - DNA, 25 bp, Homo sapien
cataatggagaaatagtacacactg

SEQ ID NO: 1900424 - DNA, 25 bp, Homo sapien
aaaatagacaatgttaatcatagtt

SEQ ID NO: 1900425 - DNA, 25 bp, Homo sapien
ccaaaatagacaatgttaatcatag

SEQ ID NO: 1900426 - DNA, 25 bp, Homo sapien
aaccaaaatagacaatgttaatcat

SEQ ID NO: 1900427 - DNA, 25 bp, Homo sapien
caaaatagacaatgttaatcatagt

SEQ ID NO: 1900428 - DNA, 25 bp, Homo sapien
aactctgcttttatcccttccaaat

SEQ ID NO: 1900429 - DNA, 25 bp, Homo sapien
atcttttagtggctccacaggagtt

SEQ ID NO: 1900430 - DNA, 25 bp, Homo sapien
tcatactctctgtcatggtttacaa

SEQ ID NO: 1900431 - DNA, 25 bp, Homo sapien
aaaatcatactctctgtcatggttt

SEQ ID NO: 1900432 - DNA, 25 bp, Homo sapien
cccacaattagctagggttggaagc

SEQ ID NO: 1900433 - DNA, 25 bp, Homo sapien
aagacccacaattagctagggttgg

SEQ ID NO: 1900434 - DNA, 25 bp, Homo sapien
ccacaattagctagggttggaagcc

SEQ ID NO: 1900435 - DNA, 25 bp, Homo sapien
gacccacaattagctagggttggaa

SEQ ID NO: 1900436 - DNA, 25 bp, Homo sapien
ctggactgtaacaaggtttccaagt

SEQ ID NO: 1900437 - DNA, 25 bp, Homo sapien
tcacaactggactgtaacaaggttt

SEQ ID NO: 1900438 - DNA, 25 bp, Homo sapien
caaaatcacaactggactgtaacaa

SEQ ID NO: 1900439 - DNA, 25 bp, Homo sapien
caactggactgtaacaaggtttcca

SEQ ID NO: 1900440 - DNA, 25 bp, Homo sapien
gtttcagtaacccactgaatgccaa

SEQ ID NO: 1900441 - DNA, 25 bp, Homo sapien
tcactaatgctgtttcagtaaccca

SEQ ID NO: 1900442 - DNA, 25 bp, Homo sapien
aaagagttctctagatgaattcact

SEQ ID NO: 1900443 - DNA, 25 bp, Homo sapien
agagttctctagatgaattcactaa

SEQ ID NO: 1900444 - DNA, 25 bp, Homo sapien
cacaagaaaagtaaggaggtttgca

SEQ ID NO: 1900445 - DNA, 25 bp, Homo sapien
gctccagctctaagctgtcagtcag

SEQ ID NO: 1900446 - DNA, 25 bp, Homo sapien
gtcgatgcagcagaacagttctcca

SEQ ID NO: 1900447 - DNA, 25 bp, Homo sapien
tgtcagtcaggaacgtcgatgcagc

SEQ ID NO: 1900448 - DNA, 25 bp, Homo sapien
cacttggggttcgtcgtatcattaa

SEQ ID NO: 1900449 - DNA, 25 bp, Homo sapien
tggggttcgtcgtatcattaagggc

SEQ ID NO: 1900450 - DNA, 25 bp, Homo sapien
ggttcgtcgtatcattaagggctcc

SEQ ID NO: 1900451 - DNA, 25 bp, Homo sapien
gaaacacttggggttcgtcgtatca

SEQ ID NO: 1900452 - DNA, 25 bp, Homo sapien
agaaagttctcaagacgtccgccag

SEQ ID NO: 1900453 - DNA, 25 bp, Homo sapien
tagcgtcccgggcttgcctagaact

SEQ ID NO: 1900454 - DNA, 25 bp, Homo sapien
taagacaaaatgcacaaccaactgg

SEQ ID NO: 1900455 - DNA, 25 bp, Homo sapien
tcgaaatccggccactaagtcgggc

SEQ ID NO: 1900456 - DNA, 25 bp, Homo sapien
ccgcgtacccggctgcagcaaggac

SEQ ID NO: 1900457 - DNA, 25 bp, Homo sapien
cggtatcccgcgtacccggctgcag

SEQ ID NO: 1900458 - DNA, 25 bp, Homo sapien
tcggttacccgcggtgcctgtcgta

SEQ ID NO: 1900459 - DNA, 25 bp, Homo sapien
cctggcagcactcgggcggagaagg

SEQ ID NO: 1900460 - DNA, 25 bp, Homo sapien
atttccagctcccgaaacctgcctc

SEQ ID NO: 1900461 - DNA, 25 bp, Homo sapien
aacaggcgaaattcccgccaccgcg

SEQ ID NO: 1900462 - DNA, 25 bp, Homo sapien
tggggtctaaaccgcaaacaggcga

SEQ ID NO: 1900463 - DNA, 25 bp, Homo sapien
cctgtgacccagaccaccaacagga

SEQ ID NO: 1900464 - DNA, 25 bp, Homo sapien
gcagggactgccgccagatgtgcct

SEQ ID NO: 1900465 - DNA, 25 bp, Homo sapien
ggactgccgccagatgtgcctgcct

SEQ ID NO: 1900466 - DNA, 25 bp, Homo sapien
ctgcaatgtcatcgtttctttcccc

SEQ ID NO: 1900467 - DNA, 25 bp, Homo sapien
gcctgcaatgtcatcgtttctttcc

SEQ ID NO: 1900468 - DNA, 25 bp, Homo sapien
tgttctgtaatcagagtgcagagac

SEQ ID NO: 1900469 - DNA, 25 bp, Homo sapien
tctgtaatcagagtgcagagactgc

SEQ ID NO: 1900470 - DNA, 25 bp, Homo sapien
taatcagagtgcagagactgctgcc

SEQ ID NO: 1900471 - DNA, 25 bp, Homo sapien
cagtgttctgtaatcagagtgcaga

SEQ ID NO: 1900472 - DNA, 25 bp, Homo sapien
aattctatcgggcatctggttcaac

SEQ ID NO: 1900473 - DNA, 25 bp, Homo sapien
caactctgttgtcagcttcgttttt

SEQ ID NO: 1900474 - DNA, 25 bp, Homo sapien
tctcggaattctatcgggcatctgg

SEQ ID NO: 1900475 - DNA, 25 bp, Homo sapien
tcagttatccattctcggaattcta

SEQ ID NO: 1900476 - DNA, 25 bp, Homo sapien
cactgactattgttctgtaacctgt

SEQ ID NO: 1900477 - DNA, 25 bp, Homo sapien
tgtaacctgtaatggcacagcccat

SEQ ID NO: 1900478 - DNA, 25 bp, Homo sapien
gactattgttctgtaacctgtaatg

SEQ ID NO: 1900479 - DNA, 25 bp, Homo sapien
tgttctgtaacctgtaatggcacag

SEQ ID NO: 1900480 - DNA, 25 bp, Homo sapien
tcttgtttctaagaagttgcttgtc

SEQ ID NO: 1900481 - DNA, 25 bp, Homo sapien
tctaagaagttgcttgtccaaagaa

SEQ ID NO: 1900482 - DNA, 25 bp, Homo sapien
ttatatcttgtttctaagaagttgc

SEQ ID NO: 1900483 - DNA, 25 bp, Homo sapien
ctaagaagttgcttgtccaaagaaa

SEQ ID NO: 1900484 - DNA, 25 bp, Homo sapien
acaagaactctctagcatagggaag

SEQ ID NO: 1900485 - DNA, 25 bp, Homo sapien
tcagatgtgatactcccacaatttc

SEQ ID NO: 1900486 - DNA, 25 bp, Homo sapien
gagctcagatgtgatactcccacaa

SEQ ID NO: 1900487 - DNA, 25 bp, Homo sapien
tctagcatagggaagatgtatccaa

SEQ ID NO: 1900488 - DNA, 25 bp, Homo sapien
gccacagtgcagaaggaccatcttt

SEQ ID NO: 1900489 - DNA, 25 bp, Homo sapien
tccttttgagatgcattggttccca

SEQ ID NO: 1900490 - DNA, 25 bp, Homo sapien
tattcttcagtataagctggcttgg

SEQ ID NO: 1900491 - DNA, 25 bp, Homo sapien
ttctccaccactctaatgttcacag

SEQ ID NO: 1900492 - DNA, 25 bp, Homo sapien
taccctacaggatcaatggcaaggt

SEQ ID NO: 1900493 - DNA, 25 bp, Homo sapien
tcctgatttgaagatgatagtagct

SEQ ID NO: 1900494 - DNA, 25 bp, Homo sapien
tttcttctaagcagaggctctatgg

SEQ ID NO: 1900495 - DNA, 25 bp, Homo sapien
actaataactatagctctctcccag

SEQ ID NO: 1900496 - DNA, 25 bp, Homo sapien
tcttgaattcggtggcagatccttg

SEQ ID NO: 1900497 - DNA, 25 bp, Homo sapien
gaaattgtgaattggcaggttagca

SEQ ID NO: 1900498 - DNA, 25 bp, Homo sapien
gatccttgcaggttgaaattgtgaa

SEQ ID NO: 1900499 - DNA, 25 bp, Homo sapien
cccctagcatgtgatacttctgttc

SEQ ID NO: 1900500 - DNA, 25 bp, Homo sapien
ttcaaagcctgcaaatcattgactg

SEQ ID NO: 1900501 - DNA, 25 bp, Homo sapien
gcctgcaaatcattgactgcaagga

SEQ ID NO: 1900502 - DNA, 25 bp, Homo sapien
ctgcaaatcattgactgcaaggacc

SEQ ID NO: 1900503 - DNA, 25 bp, Homo sapien
caaagcctgcaaatcattgactgca

SEQ ID NO: 1900504 - DNA, 25 bp, Homo sapien
cctggtatgtagctgtctctttcgg

SEQ ID NO: 1900505 - DNA, 25 bp, Homo sapien
ttagaaaatatctgcgctgtagttc

SEQ ID NO: 1900506 - DNA, 25 bp, Homo sapien
aatatctgcgctgtagttctgtctc

SEQ ID NO: 1900507 - DNA, 25 bp, Homo sapien
cggtgctgctgcgtttgcagccatg

SEQ ID NO: 1900508 - DNA, 25 bp, Homo sapien
ggcactatgaggaactcggagtagt

SEQ ID NO: 1900509 - DNA, 25 bp, Homo sapien
ccagttgggcaagagttgtggcttc

SEQ ID NO: 1900510 - DNA, 25 bp, Homo sapien
gcttagcaaagtactgacatatccc

SEQ ID NO: 1900511 - DNA, 25 bp, Homo sapien
agttgaaatcaactaccagttgggc

SEQ ID NO: 1900512 - DNA, 25 bp, Homo sapien
gcatctctttggcaaccttaaaaaa

SEQ ID NO: 1900513 - DNA, 25 bp, Homo sapien
tgtctgttaaaggtgaccccctgca

SEQ ID NO: 1900514 - DNA, 25 bp, Homo sapien
tacccttgctctggttcatttgatt

SEQ ID NO: 1900515 - DNA, 25 bp, Homo sapien
gtaattctctcttcccaacataggc

SEQ ID NO: 1900516 - DNA, 25 bp, Homo sapien
gactctcttcatttaaccgcttatt

SEQ ID NO: 1900517 - DNA, 25 bp, Homo sapien
tggactctcttcatttaaccgctta

SEQ ID NO: 1900518 - DNA, 25 bp, Homo sapien
aacactggactctcttcatttaacc

SEQ ID NO: 1900519 - DNA, 25 bp, Homo sapien
tttcccccgctacaaggaagagtga

SEQ ID NO: 1900520 - DNA, 25 bp, Homo sapien
taaattgccgaataggaaggctcaa

SEQ ID NO: 1900521 - DNA, 25 bp, Homo sapien
aatggaataaattgccgaataggaa

SEQ ID NO: 1900522 - DNA, 25 bp, Homo sapien
caaataggcaaatcgtaggttttgc

SEQ ID NO: 1900523 - DNA, 25 bp, Homo sapien
taggaaggctcaaattcagccagaa

SEQ ID NO: 1900524 - DNA, 25 bp, Homo sapien
cctatcctcactagttggatttact

SEQ ID NO: 1900525 - DNA, 25 bp, Homo sapien
tgaatttcttgcctatcctcactag

SEQ ID NO: 1900526 - DNA, 25 bp, Homo sapien
tttcttgcctatcctcactagttgg

SEQ ID NO: 1900527 - DNA, 25 bp, Homo sapien
tcttgcctatcctcactagttggat

SEQ ID NO: 1900528 - DNA, 25 bp, Homo sapien
gctggttagatcctgtgaatgtaga

SEQ ID NO: 1900529 - DNA, 25 bp, Homo sapien
gagattctgctctggaagattcacc

SEQ ID NO: 1900530 - DNA, 25 bp, Homo sapien
gctttcaatgaaccaagaagtttcc

SEQ ID NO: 1900531 - DNA, 25 bp, Homo sapien
tcaggagaaacaagtcttctgggtt

SEQ ID NO: 1900532 - DNA, 25 bp, Homo sapien
tagcagctagagagtagttacaaag

SEQ ID NO: 1900533 - DNA, 25 bp, Homo sapien
tagagagtagttacaaagaggtgga

SEQ ID NO: 1900534 - DNA, 25 bp, Homo sapien
actctagagggaccaaaatagcagc

SEQ ID NO: 1900535 - DNA, 25 bp, Homo sapien
tcctgcagacccaactctagaggga

SEQ ID NO: 1900536 - DNA, 25 bp, Homo sapien
cctcaagttacatggtttatgttcc

SEQ ID NO: 1900537 - DNA, 25 bp, Homo sapien
ctcctcaagttacatggtttatgtt

SEQ ID NO: 1900538 - DNA, 25 bp, Homo sapien
tcaagttacatggtttatgttccat

SEQ ID NO: 1900539 - DNA, 25 bp, Homo sapien
ctcaagttacatggtttatgttcca

SEQ ID NO: 1900540 - DNA, 25 bp, Homo sapien
tgtccttggcgtgtacaccctgtgg

SEQ ID NO: 1900541 - DNA, 25 bp, Homo sapien
ctagatgtccttggcgtgtacaccc

SEQ ID NO: 1900542 - DNA, 25 bp, Homo sapien
tacaccctgtggaatctggttcatc

SEQ ID NO: 1900543 - DNA, 25 bp, Homo sapien
gcgtgtacaccctgtggaatctggt

SEQ ID NO: 1900544 - DNA, 25 bp, Homo sapien
ctggaattggcagaccttccctcat

SEQ ID NO: 1900545 - DNA, 25 bp, Homo sapien
tttccccccacatgactaaatattc

SEQ ID NO: 1900546 - DNA, 25 bp, Homo sapien
tgtgggtggcagtgtccgtaaggct

SEQ ID NO: 1900547 - DNA, 25 bp, Homo sapien
tcacctcctgcctatgctgacaggg

SEQ ID NO: 1900548 - DNA, 25 bp, Homo sapien
ggcagtgtccgtaaggctgccagcc

SEQ ID NO: 1900549 - DNA, 25 bp, Homo sapien
ttttctaagtgcatgaactctttca

SEQ ID NO: 1900550 - DNA, 25 bp, Homo sapien
caaattaaccattctgggtcaactt

SEQ ID NO: 1900551 - DNA, 25 bp, Homo sapien
tttctaagtgcatgaactctttcaa

SEQ ID NO: 1900552 - DNA, 25 bp, Homo sapien
cattctgggtcaacttttctaagtg

SEQ ID NO: 1900553 - DNA, 25 bp, Homo sapien
taccatacaacctgcccactaggct

SEQ ID NO: 1900554 - DNA, 25 bp, Homo sapien
cttgcctcctctttatgcatctgac

SEQ ID NO: 1900555 - DNA, 25 bp, Homo sapien
ttgcctcctctttatgcatctgacc

SEQ ID NO: 1900556 - DNA, 25 bp, Homo sapien
tctttctaccatacaacctgcccac

SEQ ID NO: 1900557 - DNA, 25 bp, Homo sapien
tttctcaggtccctctaatgccttt

SEQ ID NO: 1900558 - DNA, 25 bp, Homo sapien
ctctaatgcctttctatgtgtcata

SEQ ID NO: 1900559 - DNA, 25 bp, Homo sapien
ttaggtattttctcaggtccctcta

SEQ ID NO: 1900560 - DNA, 25 bp, Homo sapien
ggtattttctcaggtccctctaatg

SEQ ID NO: 1900561 - DNA, 25 bp, Homo sapien
aagcctttgactggttacttgagca

SEQ ID NO: 1900562 - DNA, 25 bp, Homo sapien
gacatagtcactattcccaccatga

SEQ ID NO: 1900563 - DNA, 25 bp, Homo sapien
catgaccagtggcacatttgtgaga

SEQ ID NO: 1900564 - DNA, 25 bp, Homo sapien
ttagaagttgtgacaagagccatcc

SEQ ID NO: 1900565 - DNA, 25 bp, Homo sapien
gtgacaggctgccagtcaaacagag

SEQ ID NO: 1900566 - DNA, 25 bp, Homo sapien
gacaggctgccagtcaaacagagca

SEQ ID NO: 1900567 - DNA, 25 bp, Homo sapien
ctctcgctgccaagcggctttaggt

SEQ ID NO: 1900568 - DNA, 25 bp, Homo sapien
tttaggtggtaactgatctgtgaca

SEQ ID NO: 1900569 - DNA, 25 bp, Homo sapien
cagatggaaactgacacaggccttc

SEQ ID NO: 1900570 - DNA, 25 bp, Homo sapien
tcagatggaaactgacacaggcctt

SEQ ID NO: 1900571 - DNA, 25 bp, Homo sapien
gatggaaactgacacaggccttctg

SEQ ID NO: 1900572 - DNA, 25 bp, Homo sapien
agatggaaactgacacaggccttct

SEQ ID NO: 1900573 - DNA, 25 bp, Homo sapien
gaggaatcaaggaagtaagtgtagt

SEQ ID NO: 1900574 - DNA, 25 bp, Homo sapien
gaatcaaggaagtaagtgtagtaag

SEQ ID NO: 1900575 - DNA, 25 bp, Homo sapien
caaggaagtaagtgtagtaagaatc

SEQ ID NO: 1900576 - DNA, 25 bp, Homo sapien
ctgagaggaatcaaggaagtaagtg

SEQ ID NO: 1900577 - DNA, 25 bp, Homo sapien
atgatcctattgtctctgtgacttt

SEQ ID NO: 1900578 - DNA, 25 bp, Homo sapien
ctattgtctctgtgactttgttcat

SEQ ID NO: 1900579 - DNA, 25 bp, Homo sapien
tcctattgtctctgtgactttgttc

SEQ ID NO: 1900580 - DNA, 25 bp, Homo sapien
gatcctattgtctctgtgactttgt

SEQ ID NO: 1900581 - DNA, 25 bp, Homo sapien
gatattttgccttctttgtatctcc

SEQ ID NO: 1900582 - DNA, 25 bp, Homo sapien
tattttgccttctttgtatctccat

SEQ ID NO: 1900583 - DNA, 25 bp, Homo sapien
catgatattttgccttctttgtatc

SEQ ID NO: 1900584 - DNA, 25 bp, Homo sapien
tgatattttgccttctttgtatctc

SEQ ID NO: 1900585 - DNA, 25 bp, Homo sapien
gaatgggctgcactttacaactgga

SEQ ID NO: 1900586 - DNA, 25 bp, Homo sapien
gaagcagccattcagatgtaggcct

SEQ ID NO: 1900587 - DNA, 25 bp, Homo sapien
ttcgttttagtacccaggcaaggca

SEQ ID NO: 1900588 - DNA, 25 bp, Homo sapien
tataggctggattttactcactggc

SEQ ID NO: 1900589 - DNA, 25 bp, Homo sapien
ggtccacagccagtatgaagtctca

SEQ ID NO: 1900590 - DNA, 25 bp, Homo sapien
tatgtaataagaagccccagataga

SEQ ID NO: 1900591 - DNA, 25 bp, Homo sapien
cccagatagaatggcttgagtaggc

SEQ ID NO: 1900592 - DNA, 25 bp, Homo sapien
tgaagtctcacagatcaagaggctc

SEQ ID NO: 1900593 - DNA, 25 bp, Homo sapien
ggtatcaggacccttccactcttgg

SEQ ID NO: 1900594 - DNA, 25 bp, Homo sapien
gacaatgtaaatctcgtagaaggta

SEQ ID NO: 1900595 - DNA, 25 bp, Homo sapien
catgtttgtgagccaggactgtgtg

SEQ ID NO: 1900596 - DNA, 25 bp, Homo sapien
caatagggccgagttgacaatgtaa

SEQ ID NO: 1900597 - DNA, 25 bp, Homo sapien
gccagggtagggacaatggagagac

SEQ ID NO: 1900598 - DNA, 25 bp, Homo sapien
gggacaatggagagacaaattcagc

SEQ ID NO: 1900599 - DNA, 25 bp, Homo sapien
ggtagggacaatggagagacaaatt

SEQ ID NO: 1900600 - DNA, 25 bp, Homo sapien
tagggacaatggagagacaaattca

SEQ ID NO: 1900601 - DNA, 25 bp, Homo sapien
gaagaaataaaaggctcgtgaatac

SEQ ID NO: 1900602 - DNA, 25 bp, Homo sapien
aaaggaccaaaagattgcaaagact

SEQ ID NO: 1900603 - DNA, 25 bp, Homo sapien
taaaaggctcgtgaatacggccaaa

SEQ ID NO: 1900604 - DNA, 25 bp, Homo sapien
aggctcgtgaatacggccaaagtgg

SEQ ID NO: 1900605 - DNA, 25 bp, Homo sapien
tgggatcgccttaacccaagctcaa

SEQ ID NO: 1900606 - DNA, 25 bp, Homo sapien
gagaaacttgcaatctgggatcgcc

SEQ ID NO: 1900607 - DNA, 25 bp, Homo sapien
ggcagccagagaaacttgcaatctg

SEQ ID NO: 1900608 - DNA, 25 bp, Homo sapien
gctcaaggatcaagatgattcaaag

SEQ ID NO: 1900609 - DNA, 25 bp, Homo sapien
ttggatagaatttcagttgctgctg

SEQ ID NO: 1900610 - DNA, 25 bp, Homo sapien
agttgtgctggcaggcgaatgaatt

SEQ ID NO: 1900611 - DNA, 25 bp, Homo sapien
gtgctggcaggcgaatgaatttgtc

SEQ ID NO: 1900612 - DNA, 25 bp, Homo sapien
caggcgaatgaatttgtcctacatg

SEQ ID NO: 1900613 - DNA, 25 bp, Homo sapien
tggcaggcgaatgaatttgtcctac

SEQ ID NO: 1900614 - DNA, 25 bp, Homo sapien
ctaaatctgctgatgctcacaaact

SEQ ID NO: 1900615 - DNA, 25 bp, Homo sapien
aaatctgctgatgctcacaaactgc

SEQ ID NO: 1900616 - DNA, 25 bp, Homo sapien
agcggtgtgctgtctaacctttttc

SEQ ID NO: 1900617 - DNA, 25 bp, Homo sapien
gctccagcggtgtgctgtctaacct

SEQ ID NO: 1900618 - DNA, 25 bp, Homo sapien
tgttctgattttaaggccaatggga

SEQ ID NO: 1900619 - DNA, 25 bp, Homo sapien
aactctatagattggtttgctgctc

SEQ ID NO: 1900620 - DNA, 25 bp, Homo sapien
cctcttgactgcagtaagtacctac

SEQ ID NO: 1900621 - DNA, 25 bp, Homo sapien
taaattcatctaacaaggcactcct

SEQ ID NO: 1900622 - DNA, 25 bp, Homo sapien
agagggtttgcatcttcccactggc

SEQ ID NO: 1900623 - DNA, 25 bp, Homo sapien
cagtagagggtttgcatcttcccac

SEQ ID NO: 1900624 - DNA, 25 bp, Homo sapien
tgtcaggccagtagagggtttgcat

SEQ ID NO: 1900625 - DNA, 25 bp, Homo sapien
tggttggggctctccacagagcaag

SEQ ID NO: 1900626 - DNA, 25 bp, Homo sapien
ctttaaccgtgtcctggttctgcca

SEQ ID NO: 1900627 - DNA, 25 bp, Homo sapien
tgtcgaagactgatctctttaaccg

SEQ ID NO: 1900628 - DNA, 25 bp, Homo sapien
cctttttgtgcactgggacttcctt

SEQ ID NO: 1900629 - DNA, 25 bp, Homo sapien
ctctctgtctgctagatatttccat

SEQ ID NO: 1900630 - DNA, 25 bp, Homo sapien
aaccacaggttcatgtgcaatcaca

SEQ ID NO: 1900631 - DNA, 25 bp, Homo sapien
ccttccttatggattacatattgca

SEQ ID NO: 1900632 - DNA, 25 bp, Homo sapien
caaacagtggtggtgaatactgtgt

SEQ ID NO: 1900633 - DNA, 25 bp, Homo sapien
gcaatgtgacaaacagtggtggtga

SEQ ID NO: 1900634 - DNA, 25 bp, Homo sapien
ccatatggttgggaggtctggatct

SEQ ID NO: 1900635 - DNA, 25 bp, Homo sapien
acagatgtcgcaggcagcttcccgc

SEQ ID NO: 1900636 - DNA, 25 bp, Homo sapien
tcaaatgtttggtactgtccaacct

SEQ ID NO: 1900637 - DNA, 25 bp, Homo sapien
agatgtcgcaggcagcttcccgcat

SEQ ID NO: 1900638 - DNA, 25 bp, Homo sapien
aaaatcaaagactgagtgactcttt

SEQ ID NO: 1900639 - DNA, 25 bp, Homo sapien
aaatcaaagactgagtgactctttt

SEQ ID NO: 1900640 - DNA, 25 bp, Homo sapien
aaggcagggctgcaagtacaatatg

SEQ ID NO: 1900641 - DNA, 25 bp, Homo sapien
caatatgctctacagacagaggaga

SEQ ID NO: 1900642 - DNA, 25 bp, Homo sapien
aaagacagcttccatgtgtatgaag

SEQ ID NO: 1900643 - DNA, 25 bp, Homo sapien
tgaagtgtggaaaatctgagacatg

SEQ ID NO: 1900644 - DNA, 25 bp, Homo sapien
tgtgagggttagaccaccataggcc

SEQ ID NO: 1900645 - DNA, 25 bp, Homo sapien
ttgtgagggttagaccaccataggc

SEQ ID NO: 1900646 - DNA, 25 bp, Homo sapien
gtgagggttagaccaccataggcca

SEQ ID NO: 1900647 - DNA, 25 bp, Homo sapien
gagttggcaatctccgaagagcctt

SEQ ID NO: 1900648 - DNA, 25 bp, Homo sapien
tgtttctgcacagtgggagttggca

SEQ ID NO: 1900649 - DNA, 25 bp, Homo sapien
tccagcattgctttttagaatgaaa

SEQ ID NO: 1900650 - DNA, 25 bp, Homo sapien
tccattacaccagcacgcagggaca

SEQ ID NO: 1900651 - DNA, 25 bp, Homo sapien
tggctttctaatcgaaaacttgctt

SEQ ID NO: 1900652 - DNA, 25 bp, Homo sapien
gaaggttttgcttggctttctaatc

SEQ ID NO: 1900653 - DNA, 25 bp, Homo sapien
caccatttaataagaaggttttgct

SEQ ID NO: 1900654 - DNA, 25 bp, Homo sapien
tgtagcctctggggagataaggacc

SEQ ID NO: 1900655 - DNA, 25 bp, Homo sapien
tacatttgttgggaccagttcacct

SEQ ID NO: 1900656 - DNA, 25 bp, Homo sapien
tctgccgtgcagcatgagatctgta

SEQ ID NO: 1900657 - DNA, 25 bp, Homo sapien
taagtcgtgctttacagtcatagac

SEQ ID NO: 1900658 - DNA, 25 bp, Homo sapien
tggtccatatccacataagtcgtgc

SEQ ID NO: 1900659 - DNA, 25 bp, Homo sapien
gtttacaaagggataagcacaggct

SEQ ID NO: 1900660 - DNA, 25 bp, Homo sapien
gaaggatttgttttgccgtgaggaa

SEQ ID NO: 1900661 - DNA, 25 bp, Homo sapien
tgggattcctggttaaaagagtctc

SEQ ID NO: 1900662 - DNA, 25 bp, Homo sapien
tgttttgccgtgaggaaaatggttc

SEQ ID NO: 1900663 - DNA, 25 bp, Homo sapien
gctctcactgttggaactgttaact

SEQ ID NO: 1900664 - DNA, 25 bp, Homo sapien
ctttgctctcactgttggaactgtt

SEQ ID NO: 1900665 - DNA, 25 bp, Homo sapien
ggtcagaaagatcctggtgaaggca

SEQ ID NO: 1900666 - DNA, 25 bp, Homo sapien
tcaacgatggcgtagaatactgaca

SEQ ID NO: 1900667 - DNA, 25 bp, Homo sapien
gtcctgaatgttcgcaagggtatta

SEQ ID NO: 1900668 - DNA, 25 bp, Homo sapien
tgaatgttcgcaagggtattaattt

SEQ ID NO: 1900669 - DNA, 25 bp, Homo sapien
cctgaatgttcgcaagggtattaat

SEQ ID NO: 1900670 - DNA, 25 bp, Homo sapien
tgtcctgaatgttcgcaagggtatt

SEQ ID NO: 1900671 - DNA, 25 bp, Homo sapien
tggatgtaataaagattgtttctgc

SEQ ID NO: 1900672 - DNA, 25 bp, Homo sapien
caaggtatcgagatatattcctctc

SEQ ID NO: 1900673 - DNA, 25 bp, Homo sapien
tctttaatgaacagccaacatgatc

SEQ ID NO: 1900674 - DNA, 25 bp, Homo sapien
gggaagcggacaatctatcaaggta

SEQ ID NO: 1900675 - DNA, 25 bp, Homo sapien
tttttaggttgctttaatgatgatg

SEQ ID NO: 1900676 - DNA, 25 bp, Homo sapien
acattttgcagcaataccgatgatt

SEQ ID NO: 1900677 - DNA, 25 bp, Homo sapien
gcagcaataccgatgattattgatc

SEQ ID NO: 1900678 - DNA, 25 bp, Homo sapien
ttaggttgctttaatgatgatgacg

SEQ ID NO: 1900679 - DNA, 25 bp, Homo sapien
tgtgttccatcacggagtaacatgg

SEQ ID NO: 1900680 - DNA, 25 bp, Homo sapien
caaaagctaagtgatcatcgctctg

SEQ ID NO: 1900681 - DNA, 25 bp, Homo sapien
tggtcccttggaggccataattggt

SEQ ID NO: 1900682 - DNA, 25 bp, Homo sapien
tatgagatgatttccttgaagtccc

SEQ ID NO: 1900683 - DNA, 25 bp, Homo sapien
agttttgaggaataatctgagatca

SEQ ID NO: 1900684 - DNA, 25 bp, Homo sapien
tagttttgaggaataatctgagatc

SEQ ID NO: 1900685 - DNA, 25 bp, Homo sapien
ctgagagtagctaaatgagcaagct

SEQ ID NO: 1900686 - DNA, 25 bp, Homo sapien
tctgagagtagctaaatgagcaagc

SEQ ID NO: 1900687 - DNA, 25 bp, Homo sapien
gagagtagctaaatgagcaagcttt

SEQ ID NO: 1900688 - DNA, 25 bp, Homo sapien
gttctgagagtagctaaatgagcaa

SEQ ID NO: 1900689 - DNA, 25 bp, Homo sapien
actggtcgctcaggggagctatgtc

SEQ ID NO: 1900690 - DNA, 25 bp, Homo sapien
caggggagctatgtccctgaaggaa

SEQ ID NO: 1900691 - DNA, 25 bp, Homo sapien
tctgcttgaacctgtctggactggt

SEQ ID NO: 1900692 - DNA, 25 bp, Homo sapien
aggtggaggctctgcttgaacctgt

SEQ ID NO: 1900693 - DNA, 25 bp, Homo sapien
ttatttggaatctttgacatcttta

SEQ ID NO: 1900694 - DNA, 25 bp, Homo sapien
aatctttgacatctttatatcctgc

SEQ ID NO: 1900695 - DNA, 25 bp, Homo sapien
ggaatctttgacatctttatatcct

SEQ ID NO: 1900696 - DNA, 25 bp, Homo sapien
tttggaatctttgacatctttatat

SEQ ID NO: 1900697 - DNA, 25 bp, Homo sapien
aggctgaccacccagagatcgccaa

SEQ ID NO: 1900698 - DNA, 25 bp, Homo sapien
ctctccattggtaaacttgcaatgt

SEQ ID NO: 1900699 - DNA, 25 bp, Homo sapien
cattggtaaacttgcaatgttccag

SEQ ID NO: 1900700 - DNA, 25 bp, Homo sapien
gagatcgccaacatctcttatctct

SEQ ID NO: 1900701 - DNA, 25 bp, Homo sapien
gccccaaatgatataccaggtatcc

SEQ ID NO: 1900702 - DNA, 25 bp, Homo sapien
tcaacctgatccactatgtccactg

SEQ ID NO: 1900703 - DNA, 25 bp, Homo sapien
ggtaaatgcttgatccaaatctgcc

SEQ ID NO: 1900704 - DNA, 25 bp, Homo sapien
aatctgggggtaaatgcttgatcca

SEQ ID NO: 1900705 - DNA, 25 bp, Homo sapien
aaatgttcttattatttccggccat

SEQ ID NO: 1900706 - DNA, 25 bp, Homo sapien
gaaatgttcttattatttccggcca

SEQ ID NO: 1900707 - DNA, 25 bp, Homo sapien
tgaaatgttcttattatttccggcc

SEQ ID NO: 1900708 - DNA, 25 bp, Homo sapien
ttgaaatgttcttattatttccggc

SEQ ID NO: 1900709 - DNA, 25 bp, Homo sapien
cagaatccagacacaatagccatgg

SEQ ID NO: 1900710 - DNA, 25 bp, Homo sapien
gctccctggtggatccctatgataa

SEQ ID NO: 1900711 - DNA, 25 bp, Homo sapien
tatctccacatatacagctccctgg

SEQ ID NO: 1900712 - DNA, 25 bp, Homo sapien
gatagtgtgtatcattgccctgtag

SEQ ID NO: 1900713 - DNA, 25 bp, Homo sapien
acaggcagtttcttgggttgtgtga

SEQ ID NO: 1900714 - DNA, 25 bp, Homo sapien
cttcatttgttctatatccctcaaa

SEQ ID NO: 1900715 - DNA, 25 bp, Homo sapien
tcatgccaatggctgcttggttaca

SEQ ID NO: 1900716 - DNA, 25 bp, Homo sapien
cagatatggtggctagaacaggcag

SEQ ID NO: 1900717 - DNA, 25 bp, Homo sapien
agattgttctactaggggccatatt

SEQ ID NO: 1900718 - DNA, 25 bp, Homo sapien
attgttctactaggggccatatttt

SEQ ID NO: 1900719 - DNA, 25 bp, Homo sapien
tagattgttctactaggggccatat

SEQ ID NO: 1900720 - DNA, 25 bp, Homo sapien
gattgttctactaggggccatattt

SEQ ID NO: 1900721 - DNA, 25 bp, Homo sapien
gacaaagtatggacatgcctcctac

SEQ ID NO: 1900722 - DNA, 25 bp, Homo sapien
taaaaacctgttgcgcctattggtg

SEQ ID NO: 1900723 - DNA, 25 bp, Homo sapien
accctgattgtaagattatctgatg

SEQ ID NO: 1900724 - DNA, 25 bp, Homo sapien
gagcctttagcagaatggtttcaag

SEQ ID NO: 1900725 - DNA, 25 bp, Homo sapien
tccatgtgagggatctcacatagtt

SEQ ID NO: 1900726 - DNA, 25 bp, Homo sapien
aaatccatgtgagggatctcacata

SEQ ID NO: 1900727 - DNA, 25 bp, Homo sapien
ttaaatccatgtgagggatctcaca

SEQ ID NO: 1900728 - DNA, 25 bp, Homo sapien
atccatgtgagggatctcacatagt

SEQ ID NO: 1900729 - DNA, 25 bp, Homo sapien
tagctccttgcttatcggagatacg

SEQ ID NO: 1900730 - DNA, 25 bp, Homo sapien
tattctgcaaagtgaacagcactct

SEQ ID NO: 1900731 - DNA, 25 bp, Homo sapien
tttcccaagggaatcggccagagga

SEQ ID NO: 1900732 - DNA, 25 bp, Homo sapien
cctagaggaaagttatgcccaaatt

SEQ ID NO: 1900733 - DNA, 25 bp, Homo sapien
gtagagcaaagctctgatttgagtt

SEQ ID NO: 1900734 - DNA, 25 bp, Homo sapien
caaagctctgatttgagttatcaca

SEQ ID NO: 1900735 - DNA, 25 bp, Homo sapien
gcaaagctctgatttgagttatcac

SEQ ID NO: 1900736 - DNA, 25 bp, Homo sapien
gagcaaagctctgatttgagttatc

SEQ ID NO: 1900737 - DNA, 25 bp, Homo sapien
ctttgcttgacctttgtctatggca

SEQ ID NO: 1900738 - DNA, 25 bp, Homo sapien
tattatcctttgcttgacctttgtc

SEQ ID NO: 1900739 - DNA, 25 bp, Homo sapien
gaattgagttattatcctttgcttg

SEQ ID NO: 1900740 - DNA, 25 bp, Homo sapien
gcttgacctttgtctatggcatatt

SEQ ID NO: 1900741 - DNA, 25 bp, Homo sapien
aacagcatgtggcatttcaacatgt

SEQ ID NO: 1900742 - DNA, 25 bp, Homo sapien
caacagcatgtggcatttcaacatg

SEQ ID NO: 1900743 - DNA, 25 bp, Homo sapien
acagcatgtggcatttcaacatgtc

SEQ ID NO: 1900744 - DNA, 25 bp, Homo sapien
acttccgtcaccactggcattctta

SEQ ID NO: 1900745 - DNA, 25 bp, Homo sapien
cttccgtcaccactggcattcttat

SEQ ID NO: 1900746 - DNA, 25 bp, Homo sapien
ttccgtcaccactggcattcttata

SEQ ID NO: 1900747 - DNA, 25 bp, Homo sapien
cacttccgtcaccactggcattctt

SEQ ID NO: 1900748 - DNA, 25 bp, Homo sapien
tgtgaaatgatgacagtttcaggca

SEQ ID NO: 1900749 - DNA, 25 bp, Homo sapien
ctttgtaagatgtgtcctgagaatg

SEQ ID NO: 1900750 - DNA, 25 bp, Homo sapien
tgagaatgtgaaatgatgacagttt

SEQ ID NO: 1900751 - DNA, 25 bp, Homo sapien
ttgtaagatgtgtcctgagaatgtg

SEQ ID NO: 1900752 - DNA, 25 bp, Homo sapien
aagtggccacaggcgttgccaagct

SEQ ID NO: 1900753 - DNA, 25 bp, Homo sapien
gccacaggcgttgccaagctgaatg

SEQ ID NO: 1900754 - DNA, 25 bp, Homo sapien
acaggcgttgccaagctgaatgctt

SEQ ID NO: 1900755 - DNA, 25 bp, Homo sapien
tggccacaggcgttgccaagctgaa

SEQ ID NO: 1900756 - DNA, 25 bp, Homo sapien
aaaccctgaaacttgactgcattca

SEQ ID NO: 1900757 - DNA, 25 bp, Homo sapien
tacttaggcaacatacactgagaaa

SEQ ID NO: 1900758 - DNA, 25 bp, Homo sapien
gtgtgccagtgttcaacatattgac

SEQ ID NO: 1900759 - DNA, 25 bp, Homo sapien
aatttatactgaacagtcacttggc

SEQ ID NO: 1900760 - DNA, 25 bp, Homo sapien
tctggtcacgaaattctagttgaaa

SEQ ID NO: 1900761 - DNA, 25 bp, Homo sapien
attcattttctggtcacgaaattct

SEQ ID NO: 1900762 - DNA, 25 bp, Homo sapien
cattttctggtcacgaaattctagt

SEQ ID NO: 1900763 - DNA, 25 bp, Homo sapien
ggtcacgaaattctagttgaaaagc

SEQ ID NO: 1900764 - DNA, 25 bp, Homo sapien
tgcgtgtttcctctcatgattgttt

SEQ ID NO: 1900765 - DNA, 25 bp, Homo sapien
tatttggtagatggcagggtggggt

SEQ ID NO: 1900766 - DNA, 25 bp, Homo sapien
accatgggagaattgcaataatcca

SEQ ID NO: 1900767 - DNA, 25 bp, Homo sapien
aaccatgggagaattgcaataatcc

SEQ ID NO: 1900768 - DNA, 25 bp, Homo sapien
gaaccatgggagaattgcaataatc

SEQ ID NO: 1900769 - DNA, 25 bp, Homo sapien
gaaagttgccatcgaaattctcaac

SEQ ID NO: 1900770 - DNA, 25 bp, Homo sapien
ttcggctgaaagttgccatcgaaat

SEQ ID NO: 1900771 - DNA, 25 bp, Homo sapien
gctgaaagttgccatcgaaattctc

SEQ ID NO: 1900772 - DNA, 25 bp, Homo sapien
aagttgccatcgaaattctcaacat

SEQ ID NO: 1900773 - DNA, 25 bp, Homo sapien
ggaataatagagatttggtacatgt

SEQ ID NO: 1900774 - DNA, 25 bp, Homo sapien
gaataatagagatttggtacatgtt

SEQ ID NO: 1900775 - DNA, 25 bp, Homo sapien
ataatagagatttggtacatgtttt

SEQ ID NO: 1900776 - DNA, 25 bp, Homo sapien
aataatagagatttggtacatgttt

SEQ ID NO: 1900777 - DNA, 25 bp, Homo sapien
ttgtttttatgatgtcttggtttta

SEQ ID NO: 1900778 - DNA, 25 bp, Homo sapien
tgtttttatgatgtcttggttttac

SEQ ID NO: 1900779 - DNA, 25 bp, Homo sapien
tatcgcttgattagggctccccatt

SEQ ID NO: 1900780 - DNA, 25 bp, Homo sapien
gaacatggatacacaagtagctcct

SEQ ID NO: 1900781 - DNA, 25 bp, Homo sapien
ggcacaatattgtatagcagacctc

SEQ ID NO: 1900782 - DNA, 25 bp, Homo sapien
tgtaagaacacctaatatgcaacct

SEQ ID NO: 1900783 - DNA, 25 bp, Homo sapien
tctacatattactgtctaggaaaac

SEQ ID NO: 1900784 - DNA, 25 bp, Homo sapien
atctaaaagggtactatatttccag

SEQ ID NO: 1900785 - DNA, 25 bp, Homo sapien
ttctatctacatattactgtctagg

SEQ ID NO: 1900786 - DNA, 25 bp, Homo sapien
gggtactatatttccaggattgctt

SEQ ID NO: 1900787 - DNA, 25 bp, Homo sapien
ccattatgtgtacagcatttcatta

SEQ ID NO: 1900788 - DNA, 25 bp, Homo sapien
cagggtctagtccattatgtgtaca

SEQ ID NO: 1900789 - DNA, 25 bp, Homo sapien
tagtccattatgtgtacagcatttc

SEQ ID NO: 1900790 - DNA, 25 bp, Homo sapien
cacagcagggtctagtccattatgt

SEQ ID NO: 1900791 - DNA, 25 bp, Homo sapien
aatggcattgatatgacattattaa

SEQ ID NO: 1900792 - DNA, 25 bp, Homo sapien
attattaatggcattgatatgacat

SEQ ID NO: 1900793 - DNA, 25 bp, Homo sapien
ggcattgatatgacattattaattt

SEQ ID NO: 1900794 - DNA, 25 bp, Homo sapien
gaaagacaatatgatattattttag

SEQ ID NO: 1900795 - DNA, 25 bp, Homo sapien
gcttctgcatgtgagagtttgatgt

SEQ ID NO: 1900796 - DNA, 25 bp, Homo sapien
aaattagcttctgcatgtgagagtt

SEQ ID NO: 1900797 - DNA, 25 bp, Homo sapien
tctgcatgtgagagtttgatgtgaa

SEQ ID NO: 1900798 - DNA, 25 bp, Homo sapien
catgtgagagtttgatgtgaaatga

SEQ ID NO: 1900799 - DNA, 25 bp, Homo sapien
tgcacagaaagcattgcaagaagta

SEQ ID NO: 1900800 - DNA, 25 bp, Homo sapien
gaagtaggcagtgcaaaactaccaa

SEQ ID NO: 1900801 - DNA, 25 bp, Homo sapien
taagctagagcaccagcatatgcac

SEQ ID NO: 1900802 - DNA, 25 bp, Homo sapien
aaactaccaaaagaggatgtatgtc

SEQ ID NO: 1900803 - DNA, 25 bp, Homo sapien
aggccagcaatgctactccagtgga

SEQ ID NO: 1900804 - DNA, 25 bp, Homo sapien
taatggccgtcatccaccaatctag

SEQ ID NO: 1900805 - DNA, 25 bp, Homo sapien
ccagtggaagtagctgcacagaaac

SEQ ID NO: 1900806 - DNA, 25 bp, Homo sapien
gccgtcatccaccaatctagaagca

SEQ ID NO: 1900807 - DNA, 25 bp, Homo sapien
catgtaggcaactttcaacctgtgc

SEQ ID NO: 1900808 - DNA, 25 bp, Homo sapien
tcacatgtaggcaactttcaacctg

SEQ ID NO: 1900809 - DNA, 25 bp, Homo sapien
tgtaggcaactttcaacctgtgcca

SEQ ID NO: 1900810 - DNA, 25 bp, Homo sapien
ggcaactttcaacctgtgccactca

SEQ ID NO: 1900811 - DNA, 25 bp, Homo sapien
agagatcatttccttatctccttcc

SEQ ID NO: 1900812 - DNA, 25 bp, Homo sapien
aagagatcatttccttatctccttc

SEQ ID NO: 1900813 - DNA, 25 bp, Homo sapien
tccttcctcttcaccccaaatcacc

SEQ ID NO: 1900814 - DNA, 25 bp, Homo sapien
cctcttcaccccaaatcacccttct

SEQ ID NO: 1900815 - DNA, 25 bp, Homo sapien
tgtgcagataattcatcagtctgta

SEQ ID NO: 1900816 - DNA, 25 bp, Homo sapien
cagtgctccgttaacatcttcagtg

SEQ ID NO: 1900817 - DNA, 25 bp, Homo sapien
tcatcagtctgtatcttcattcctg

SEQ ID NO: 1900818 - DNA, 25 bp, Homo sapien
tctcagtgctccgttaacatcttca

SEQ ID NO: 1900819 - DNA, 25 bp, Homo sapien
ggcgctggtgacaagtgaaattgct

SEQ ID NO: 1900820 - DNA, 25 bp, Homo sapien
tctttcagccaagcatactccatca

SEQ ID NO: 1900821 - DNA, 25 bp, Homo sapien
gtgatggccatttttagctgccctg

SEQ ID NO: 1900822 - DNA, 25 bp, Homo sapien
tattgcgcctgagtacgtgttgcag

SEQ ID NO: 1900823 - DNA, 25 bp, Homo sapien
taatagacaagacaggcaaataatg

SEQ ID NO: 1900824 - DNA, 25 bp, Homo sapien
atgctcatctgccaatgggctctga

SEQ ID NO: 1900825 - DNA, 25 bp, Homo sapien
tctgagcaatatcacaaacatccac

SEQ ID NO: 1900826 - DNA, 25 bp, Homo sapien
caggcaaataatgatggaggccaca

SEQ ID NO: 1900827 - DNA, 25 bp, Homo sapien
tacctcaccacatgtgttagcacaa

SEQ ID NO: 1900828 - DNA, 25 bp, Homo sapien
gagtctctcagcatttacctcacca

SEQ ID NO: 1900829 - DNA, 25 bp, Homo sapien
gctgtggagtagaggaggctgcacc

SEQ ID NO: 1900830 - DNA, 25 bp, Homo sapien
tcaccacatgtgttagcacaaagtg

SEQ ID NO: 1900831 - DNA, 25 bp, Homo sapien
gcaactgccatgagctctcgttcct

SEQ ID NO: 1900832 - DNA, 25 bp, Homo sapien
aactgccatgagctctcgttcctgg

SEQ ID NO: 1900833 - DNA, 25 bp, Homo sapien
ttatgagcaactgccatgagctctc

SEQ ID NO: 1900834 - DNA, 25 bp, Homo sapien
gagcaactgccatgagctctcgttc

SEQ ID NO: 1900835 - DNA, 25 bp, Homo sapien
ctgttgtggattcttgcttcaagct

SEQ ID NO: 1900836 - DNA, 25 bp, Homo sapien
tcttgcttcaagctctctctatgct

SEQ ID NO: 1900837 - DNA, 25 bp, Homo sapien
gttgtggattcttgcttcaagctct

SEQ ID NO: 1900838 - DNA, 25 bp, Homo sapien
tgcttcaagctctctctatgcttac

SEQ ID NO: 1900839 - DNA, 25 bp, Homo sapien
gaatgactgcgaatctacagtttta

SEQ ID NO: 1900840 - DNA, 25 bp, Homo sapien
caccctgaacctgaaaccttgttga

SEQ ID NO: 1900841 - DNA, 25 bp, Homo sapien
ttgttgagaatgactgcgaatctac

SEQ ID NO: 1900842 - DNA, 25 bp, Homo sapien
accctgaacctgaaaccttgttgag

SEQ ID NO: 1900843 - DNA, 25 bp, Homo sapien
acttgttatccttatccttcccatg

SEQ ID NO: 1900844 - DNA, 25 bp, Homo sapien
gaacattgtctctggagttctgtac

SEQ ID NO: 1900845 - DNA, 25 bp, Homo sapien
tgtcaggcctgaacattgtctctgg

SEQ ID NO: 1900846 - DNA, 25 bp, Homo sapien
taatatccagccagtcgctcctttg

SEQ ID NO: 1900847 - DNA, 25 bp, Homo sapien
tcttcttacattacttgacccagtg

SEQ ID NO: 1900848 - DNA, 25 bp, Homo sapien
attcttcttacattacttgacccag

SEQ ID NO: 1900849 - DNA, 25 bp, Homo sapien
gcaattcttcttacattacttgacc

SEQ ID NO: 1900850 - DNA, 25 bp, Homo sapien
agcaattcttcttacattacttgac

SEQ ID NO: 1900851 - DNA, 25 bp, Homo sapien
tgtaggaagatgcagcgacactcca

SEQ ID NO: 1900852 - DNA, 25 bp, Homo sapien
ctgtaggaagatgcagcgacactcc

SEQ ID NO: 1900853 - DNA, 25 bp, Homo sapien
gtaggaagatgcagcgacactccat

SEQ ID NO: 1900854 - DNA, 25 bp, Homo sapien
tatctgtgagtcttagccatacatc

SEQ ID NO: 1900855 - DNA, 25 bp, Homo sapien
cttagccatacatcagtgtctaacc

SEQ ID NO: 1900856 - DNA, 25 bp, Homo sapien
gccatacatcagtgtctaaccaaag

SEQ ID NO: 1900857 - DNA, 25 bp, Homo sapien
tcaaatatctgtgagtcttagccat

SEQ ID NO: 1900858 - DNA, 25 bp, Homo sapien
atgtctctggactgaaatggagcca

SEQ ID NO: 1900859 - DNA, 25 bp, Homo sapien
tactagaatccctgacaatgtactc

SEQ ID NO: 1900860 - DNA, 25 bp, Homo sapien
acagctcatttccaactcgcctagt

SEQ ID NO: 1900861 - DNA, 25 bp, Homo sapien
gttgtgccagttagagccagcagtt

SEQ ID NO: 1900862 - DNA, 25 bp, Homo sapien
caatatatgtttgtactagaatccc

SEQ ID NO: 1900863 - DNA, 25 bp, Homo sapien
tgattccattctctgagagttctgc

SEQ ID NO: 1900864 - DNA, 25 bp, Homo sapien
tgcatcatcacagcaactctagcct

SEQ ID NO: 1900865 - DNA, 25 bp, Homo sapien
ccctttgcctggtaagttgcagggt

SEQ ID NO: 1900866 - DNA, 25 bp, Homo sapien
gacaggaatttgtaccattttgccc

SEQ ID NO: 1900867 - DNA, 25 bp, Homo sapien
cactgattattcagccaggctcgca

SEQ ID NO: 1900868 - DNA, 25 bp, Homo sapien
gaggtagtaaggtattcagcgtctg

SEQ ID NO: 1900869 - DNA, 25 bp, Homo sapien
tttccttatttgccagaggtagtaa

SEQ ID NO: 1900870 - DNA, 25 bp, Homo sapien
agtgtgctttctcagtgtatgtatg

SEQ ID NO: 1900871 - DNA, 25 bp, Homo sapien
tgtcctagggctataggagtgtgct

SEQ ID NO: 1900872 - DNA, 25 bp, Homo sapien
catatatcacattaaggagacccat

SEQ ID NO: 1900873 - DNA, 25 bp, Homo sapien
gcattgcaaacatcatacccctgca

SEQ ID NO: 1900874 - DNA, 25 bp, Homo sapien
taatgggacctgctgaaatgcatgc

SEQ ID NO: 1900875 - DNA, 25 bp, Homo sapien
taaatttagctatgtaatgcactgt

SEQ ID NO: 1900876 - DNA, 25 bp, Homo sapien
tgtaatgcactgtgttcatcatctc

SEQ ID NO: 1900877 - DNA, 25 bp, Homo sapien
ttccatgaagcacctcaaataaaac

SEQ ID NO: 1900878 - DNA, 25 bp, Homo sapien
catgtcgctgagagcattggcgccg

SEQ ID NO: 1900879 - DNA, 25 bp, Homo sapien
aactggaaccctttgccaaagtgtg

SEQ ID NO: 1900880 - DNA, 25 bp, Homo sapien
ccaaagtgtggtgagcatgtcgctg

SEQ ID NO: 1900881 - DNA, 25 bp, Homo sapien
tcctcatctcccttcacaatcatat

SEQ ID NO: 1900882 - DNA, 25 bp, Homo sapien
cctcatctcccttcacaatcatatg

SEQ ID NO: 1900883 - DNA, 25 bp, Homo sapien
ctcctcatctcccttcacaatcata

SEQ ID NO: 1900884 - DNA, 25 bp, Homo sapien
cccatgttgtactcactgtgataac

SEQ ID NO: 1900885 - DNA, 25 bp, Homo sapien
tccagagcaccattagacacccatg

SEQ ID NO: 1900886 - DNA, 25 bp, Homo sapien
ttagacacccatgttgtactcactg

SEQ ID NO: 1900887 - DNA, 25 bp, Homo sapien
gggcttgcatccagagcaccattag

SEQ ID NO: 1900888 - DNA, 25 bp, Homo sapien
aacagaagtgatgtgagcccctgaa

SEQ ID NO: 1900889 - DNA, 25 bp, Homo sapien
gaaaattaggcttcgaagtctggct

SEQ ID NO: 1900890 - DNA, 25 bp, Homo sapien
atggtcccacgacacaggaacagaa

SEQ ID NO: 1900891 - DNA, 25 bp, Homo sapien
ctgctggatggtcccacgacacagg

SEQ ID NO: 1900892 - DNA, 25 bp, Homo sapien
cttctgtgggttttgcagagtcagt

SEQ ID NO: 1900893 - DNA, 25 bp, Homo sapien
ctcttctgtgggttttgcagagtca

SEQ ID NO: 1900894 - DNA, 25 bp, Homo sapien
ctgtgggttttgcagagtcagtcat

SEQ ID NO: 1900895 - DNA, 25 bp, Homo sapien
gatctcttctgtgggttttgcagag

SEQ ID NO: 1900896 - DNA, 25 bp, Homo sapien
tttcagtaagatagccatggccagc

SEQ ID NO: 1900897 - DNA, 25 bp, Homo sapien
gcttggctgagcaaaatgcgtacca

SEQ ID NO: 1900898 - DNA, 25 bp, Homo sapien
ccagcagaaggcttgaaaatgccaa

SEQ ID NO: 1900899 - DNA, 25 bp, Homo sapien
tatgatattcttgcacacgtcagcc

SEQ ID NO: 1900900 - DNA, 25 bp, Homo sapien
ctaaagttctactgcagtgccccac

SEQ ID NO: 1900901 - DNA, 25 bp, Homo sapien
cccaaatcctccatggaacgagtat

SEQ ID NO: 1900902 - DNA, 25 bp, Homo sapien
cagggaatgtgatgaggctcctcac

SEQ ID NO: 1900903 - DNA, 25 bp, Homo sapien
tccatggaacgagtatagaacaggg

SEQ ID NO: 1900904 - DNA, 25 bp, Homo sapien
catcatcatgcagactccagcaggg

SEQ ID NO: 1900905 - DNA, 25 bp, Homo sapien
ttgaagagctggtaatgaagtggac

SEQ ID NO: 1900906 - DNA, 25 bp, Homo sapien
ggacaaattataccacaggtgtcat

SEQ ID NO: 1900907 - DNA, 25 bp, Homo sapien
tataccacaggtgtcatcatcatgc

SEQ ID NO: 1900908 - DNA, 25 bp, Homo sapien
tgtgagaagcgtaaccaatttcagc

SEQ ID NO: 1900909 - DNA, 25 bp, Homo sapien
gagaagcgtaaccaatttcagcagc

SEQ ID NO: 1900910 - DNA, 25 bp, Homo sapien
cccatgtgagaagcgtaaccaattt

SEQ ID NO: 1900911 - DNA, 25 bp, Homo sapien
agtcacccatgtgagaagcgtaacc

SEQ ID NO: 1900912 - DNA, 25 bp, Homo sapien
aaaagacgacagactgtaactgtga

SEQ ID NO: 1900913 - DNA, 25 bp, Homo sapien
aaatcatctgtgttgttcggctgta

SEQ ID NO: 1900914 - DNA, 25 bp, Homo sapien
ggatgcaaaaaagacgacagactgt

SEQ ID NO: 1900915 - DNA, 25 bp, Homo sapien
tctgctcagtggtggtaacacatgc

SEQ ID NO: 1900916 - DNA, 25 bp, Homo sapien
ttgctttatgtggagatatatcttc

SEQ ID NO: 1900917 - DNA, 25 bp, Homo sapien
tttgtgggccagagggtgtacacct

SEQ ID NO: 1900918 - DNA, 25 bp, Homo sapien
gtgctgaagcatgtgcttgatattc

SEQ ID NO: 1900919 - DNA, 25 bp, Homo sapien
tgaagcatgtgcttgatattcacct

SEQ ID NO: 1900920 - DNA, 25 bp, Homo sapien
ttggctttatgctggccaaaggtgc

SEQ ID NO: 1900921 - DNA, 25 bp, Homo sapien
aagcatgtgcttgatattcaccttt

SEQ ID NO: 1900922 - DNA, 25 bp, Homo sapien
tcttttatatctcccatacctccgg

SEQ ID NO: 1900923 - DNA, 25 bp, Homo sapien
caacaaaataaagtggacccttctg

SEQ ID NO: 1900924 - DNA, 25 bp, Homo sapien
ggatggtattgagccagggcccata

SEQ ID NO: 1900925 - DNA, 25 bp, Homo sapien
gaacactgtcgcagcaatgctttaa

SEQ ID NO: 1900926 - DNA, 25 bp, Homo sapien
cctagtgacaaagtgttcttccttc

SEQ ID NO: 1900927 - DNA, 25 bp, Homo sapien
tctctttgcactggtgactaacggt

SEQ ID NO: 1900928 - DNA, 25 bp, Homo sapien
ttctctttgcactggtgactaacgg

SEQ ID NO: 1900929 - DNA, 25 bp, Homo sapien
cctttgaacaatggaagttgtgcaa

SEQ ID NO: 1900930 - DNA, 25 bp, Homo sapien
tcacagtcaaacgtgtagtttcact

SEQ ID NO: 1900931 - DNA, 25 bp, Homo sapien
cacagtcaaacgtgtagtttcactt

SEQ ID NO: 1900932 - DNA, 25 bp, Homo sapien
catcacagtcaaacgtgtagtttca

SEQ ID NO: 1900933 - DNA, 25 bp, Homo sapien
cagtcaaacgtgtagtttcacttcc

SEQ ID NO: 1900934 - DNA, 25 bp, Homo sapien
tcataacgccgtgtcacacctctgt

SEQ ID NO: 1900935 - DNA, 25 bp, Homo sapien
ctggttgcccctcataacgccgtgt

SEQ ID NO: 1900936 - DNA, 25 bp, Homo sapien
ggttgcccctcataacgccgtgtca

SEQ ID NO: 1900937 - DNA, 25 bp, Homo sapien
gaatttcttctggttgcccctcata

SEQ ID NO: 1900938 - DNA, 25 bp, Homo sapien
ttagaactggtggataagatggaag

SEQ ID NO: 1900939 - DNA, 25 bp, Homo sapien
ttggtgggaaaatgtcaagagcatc

SEQ ID NO: 1900940 - DNA, 25 bp, Homo sapien
gaaactggcctgttgaatcctcgga

SEQ ID NO: 1900941 - DNA, 25 bp, Homo sapien
attcaggatgaagctttaggagttt

SEQ ID NO: 1900942 - DNA, 25 bp, Homo sapien
cagaacttcattgaggatatagatc

SEQ ID NO: 1900943 - DNA, 25 bp, Homo sapien
ctaagtgaagtaccctctgtgtagg

SEQ ID NO: 1900944 - DNA, 25 bp, Homo sapien
ttttttctgaaatggctagagccat

SEQ ID NO: 1900945 - DNA, 25 bp, Homo sapien
ttaggactaagtgaagtaccctctg

SEQ ID NO: 1900946 - DNA, 25 bp, Homo sapien
ttttcgtctgtgttatatttgtctc

SEQ ID NO: 1900947 - DNA, 25 bp, Homo sapien
gaatttactgatccaaattttcgtc

SEQ ID NO: 1900948 - DNA, 25 bp, Homo sapien
gatccaaattttcgtctgtgttata

SEQ ID NO: 1900949 - DNA, 25 bp, Homo sapien
tgactccagaatttactgatccaaa

SEQ ID NO: 1900950 - DNA, 25 bp, Homo sapien
aaatgaaatattaggtttgtcaagc

SEQ ID NO: 1900951 - DNA, 25 bp, Homo sapien
ccatggtccccagataaaaaatgaa

SEQ ID NO: 1900952 - DNA, 25 bp, Homo sapien
ggtttgtcaagcgtatatcattgtt

SEQ ID NO: 1900953 - DNA, 25 bp, Homo sapien
tattaggtttgtcaagcgtatatca

SEQ ID NO: 1900954 - DNA, 25 bp, Homo sapien
gttttcggaatcagttttctctcta

SEQ ID NO: 1900955 - DNA, 25 bp, Homo sapien
catttcgcagccttatttttatggt

SEQ ID NO: 1900956 - DNA, 25 bp, Homo sapien
tatggttttcggaatcagttttctc

SEQ ID NO: 1900957 - DNA, 25 bp, Homo sapien
aaaatgccaaatatatcgtcatcca

SEQ ID NO: 1900958 - DNA, 25 bp, Homo sapien
aatttgtgccaagataactttccgt

SEQ ID NO: 1900959 - DNA, 25 bp, Homo sapien
cttcataaatttgtgccaagataac

SEQ ID NO: 1900960 - DNA, 25 bp, Homo sapien
tggatttgatagagcagtggaatct

SEQ ID NO: 1900961 - DNA, 25 bp, Homo sapien
ctttccgtggaaagttggatttgat

SEQ ID NO: 1900962 - DNA, 25 bp, Homo sapien
gctcattgcacgaaagggccactga

SEQ ID NO: 1900963 - DNA, 25 bp, Homo sapien
tcattgcacgaaagggccactgaga

SEQ ID NO: 1900964 - DNA, 25 bp, Homo sapien
ctcattgcacgaaagggccactgag

SEQ ID NO: 1900965 - DNA, 25 bp, Homo sapien
caagatgtggagttctaagttgaca

SEQ ID NO: 1900966 - DNA, 25 bp, Homo sapien
ccaagatgtggagttctaagttgac

SEQ ID NO: 1900967 - DNA, 25 bp, Homo sapien
aagatgtggagttctaagttgacaa

SEQ ID NO: 1900968 - DNA, 25 bp, Homo sapien
atccaagatgtggagttctaagttg

SEQ ID NO: 1900969 - DNA, 25 bp, Homo sapien
tttttgaggccttactaatgcccag

SEQ ID NO: 1900970 - DNA, 25 bp, Homo sapien
gggccggtctctattggatcacagt

SEQ ID NO: 1900971 - DNA, 25 bp, Homo sapien
tggtaccacaggaagtgtcatgatc

SEQ ID NO: 1900972 - DNA, 25 bp, Homo sapien
tttcactagggccagatggtgtcct

SEQ ID NO: 1900973 - DNA, 25 bp, Homo sapien
tggctcagggatgcatacaaatcac

SEQ ID NO: 1900974 - DNA, 25 bp, Homo sapien
aaagtgtgccctgtctgcgctgtaa

SEQ ID NO: 1900975 - DNA, 25 bp, Homo sapien
tcagggtcgtggctatcttaagtag

SEQ ID NO: 1900976 - DNA, 25 bp, Homo sapien
aaactttgactatggaccaatcgta

SEQ ID NO: 1900977 - DNA, 25 bp, Homo sapien
ccttctgactgttaggatctacatt

SEQ ID NO: 1900978 - DNA, 25 bp, Homo sapien
caccttctgactgttaggatctaca

SEQ ID NO: 1900979 - DNA, 25 bp, Homo sapien
tctgactgttaggatctacattctg

SEQ ID NO: 1900980 - DNA, 25 bp, Homo sapien
cttctgactgttaggatctacattc

SEQ ID NO: 1900981 - DNA, 25 bp, Homo sapien
tctggctccagtacactcttgtgtc

SEQ ID NO: 1900982 - DNA, 25 bp, Homo sapien
gtgtctctgcgttgagaaactccag

SEQ ID NO: 1900983 - DNA, 25 bp, Homo sapien
tcgtggagattctactctggctcca

SEQ ID NO: 1900984 - DNA, 25 bp, Homo sapien
gaagagttcacccttcgtggagatt

SEQ ID NO: 1900985 - DNA, 25 bp, Homo sapien
acagcatcttgcacgttcagtctct

SEQ ID NO: 1900986 - DNA, 25 bp, Homo sapien
tagtgagtctatttgggaggagaca

SEQ ID NO: 1900987 - DNA, 25 bp, Homo sapien
agagacatgctcagtagtgagtcta

SEQ ID NO: 1900988 - DNA, 25 bp, Homo sapien
cctcagactgtcagacacacttgag

SEQ ID NO: 1900989 - DNA, 25 bp, Homo sapien
actttgactggctatcgtgatgcca

SEQ ID NO: 1900990 - DNA, 25 bp, Homo sapien
gatgccagtttctaccttttgataa

SEQ ID NO: 1900991 - DNA, 25 bp, Homo sapien
ggctatcgtgatgccagtttctacc

SEQ ID NO: 1900992 - DNA, 25 bp, Homo sapien
gatggtactttgactggctatcgtg

SEQ ID NO: 1900993 - DNA, 25 bp, Homo sapien
aacacagatcgcaggtagcactgga

SEQ ID NO: 1900994 - DNA, 25 bp, Homo sapien
gataaattccattcgtcagagcaaa

SEQ ID NO: 1900995 - DNA, 25 bp, Homo sapien
gtcagagcaaacacagatcgcaggt

SEQ ID NO: 1900996 - DNA, 25 bp, Homo sapien
cattcgtcagagcaaacacagatcg

SEQ ID NO: 1900997 - DNA, 25 bp, Homo sapien
ctgaggaatacttttgatttttggt

SEQ ID NO: 1900998 - DNA, 25 bp, Homo sapien
tgatttttggtaaaatttgtgagtc

SEQ ID NO: 1900999 - DNA, 25 bp, Homo sapien
tgaggaatacttttgatttttggta

SEQ ID NO: 1901000 - DNA, 25 bp, Homo sapien
tgggctgctctgcaatctcatattt

SEQ ID NO: 1901001 - DNA, 25 bp, Homo sapien
aatcttgggctgctctgcaatctca

SEQ ID NO: 1901002 - DNA, 25 bp, Homo sapien
gatcaatcttgggctgctctgcaat

SEQ ID NO: 1901003 - DNA, 25 bp, Homo sapien
cttgggctgctctgcaatctcatat

SEQ ID NO: 1901004 - DNA, 25 bp, Homo sapien
tgcttcttcttgaagtaatcatcag

SEQ ID NO: 1901005 - DNA, 25 bp, Homo sapien
gaagtaatcatcagtaagatgtttt

SEQ ID NO: 1901006 - DNA, 25 bp, Homo sapien
ttcttcttgaagtaatcatcagtaa

SEQ ID NO: 1901007 - DNA, 25 bp, Homo sapien
taatcatcagtaagatgttttggga

SEQ ID NO: 1901008 - DNA, 25 bp, Homo sapien
ttttaacaatggtgagttgatcaac

SEQ ID NO: 1901009 - DNA, 25 bp, Homo sapien
cttggagatgttgccaccagaggag

SEQ ID NO: 1901010 - DNA, 25 bp, Homo sapien
taacaatggtgagttgatcaacaga

SEQ ID NO: 1901011 - DNA, 25 bp, Homo sapien
caagcttggagatgttgccaccaga

SEQ ID NO: 1901012 - DNA, 25 bp, Homo sapien
gaattggaggtccttattaggctgc

SEQ ID NO: 1901013 - DNA, 25 bp, Homo sapien
gatccaaagagctgaatttaagcag

SEQ ID NO: 1901014 - DNA, 25 bp, Homo sapien
ggcatgacctatgataacaccaggg

SEQ ID NO: 1901015 - DNA, 25 bp, Homo sapien
tatggatgtggtcagtcagcaaact

SEQ ID NO: 1901016 - DNA, 25 bp, Homo sapien
ccagtgttcatagcctattctcatg

SEQ ID NO: 1901017 - DNA, 25 bp, Homo sapien
cagtgttcatagcctattctcatga

SEQ ID NO: 1901018 - DNA, 25 bp, Homo sapien
caggcactgagaatcaagaagacca

SEQ ID NO: 1901019 - DNA, 25 bp, Homo sapien
gctaaccacataaggctgcaggcct

SEQ ID NO: 1901020 - DNA, 25 bp, Homo sapien
gtgcttctgagatgaagccccacga

SEQ ID NO: 1901021 - DNA, 25 bp, Homo sapien
gatgaagccccacgattaacacagg

SEQ ID NO: 1901022 - DNA, 25 bp, Homo sapien
gggactaagcattccaagattggcc

SEQ ID NO: 1901023 - DNA, 25 bp, Homo sapien
taacacagggcccttaatgatgggc

SEQ ID NO: 1901024 - DNA, 25 bp, Homo sapien
ctgcagcaacatccgccagtggtgg

SEQ ID NO: 1901025 - DNA, 25 bp, Homo sapien
tacattaagagattctgatgtgcct

SEQ ID NO: 1901026 - DNA, 25 bp, Homo sapien
ttctgatgtgcctgcagcaacatcc

SEQ ID NO: 1901027 - DNA, 25 bp, Homo sapien
tccgccagtggtggctgactgtaga

SEQ ID NO: 1901028 - DNA, 25 bp, Homo sapien
ctccacagtaggctttgttctgtac

SEQ ID NO: 1901029 - DNA, 25 bp, Homo sapien
ccacagtaggctttgttctgtacta

SEQ ID NO: 1901030 - DNA, 25 bp, Homo sapien
attctccacagtaggctttgttctg

SEQ ID NO: 1901031 - DNA, 25 bp, Homo sapien
ttctccacagtaggctttgttctgt

SEQ ID NO: 1901032 - DNA, 25 bp, Homo sapien
tggctgactttgatctcagctttac

SEQ ID NO: 1901033 - DNA, 25 bp, Homo sapien
tctgtcatcctgttctacaactgtc

SEQ ID NO: 1901034 - DNA, 25 bp, Homo sapien
ggctgactttgatctcagctttact

SEQ ID NO: 1901035 - DNA, 25 bp, Homo sapien
tacttgttctgtcatcctgttctac

SEQ ID NO: 1901036 - DNA, 25 bp, Homo sapien
ctggagggagtgtgatggcgcaatc

SEQ ID NO: 1901037 - DNA, 25 bp, Homo sapien
ctaaatcaggttttttaagacatag

SEQ ID NO: 1901038 - DNA, 25 bp, Homo sapien
cacgcctggcccattttagttattt

SEQ ID NO: 1901039 - DNA, 25 bp, Homo sapien
ccacgcctggcccattttagttatt

SEQ ID NO: 1901040 - DNA, 25 bp, Homo sapien
tatgggttgaaatgtcccaaagggc

SEQ ID NO: 1901041 - DNA, 25 bp, Homo sapien
aaggcaatagtaaggagtccctcag

SEQ ID NO: 1901042 - DNA, 25 bp, Homo sapien
gaggaaggaatctgtatgggttgaa

SEQ ID NO: 1901043 - DNA, 25 bp, Homo sapien
tctggttgatgataacaggtaaggc

SEQ ID NO: 1901044 - DNA, 25 bp, Homo sapien
tctaaaaggagtaaccatttggagc

SEQ ID NO: 1901045 - DNA, 25 bp, Homo sapien
agttcctgccacaacggctgagacg

SEQ ID NO: 1901046 - DNA, 25 bp, Homo sapien
gaaacacttcaaacagcgctgcgga

SEQ ID NO: 1901047 - DNA, 25 bp, Homo sapien
ggctgagacgttctgattctgtgga

SEQ ID NO: 1901048 - DNA, 25 bp, Homo sapien
aattttcaggtccactccaacccag

SEQ ID NO: 1901049 - DNA, 25 bp, Homo sapien
tgatcttggagttcgcgaagtaact

SEQ ID NO: 1901050 - DNA, 25 bp, Homo sapien
caagtcagagcgtgcgttccgcagt

SEQ ID NO: 1901051 - DNA, 25 bp, Homo sapien
gatcggattccacttgatcttggag

SEQ ID NO: 1901052 - DNA, 25 bp, Homo sapien
gggcgagtcggcagcgggaggagcc

SEQ ID NO: 1901053 - DNA, 25 bp, Homo sapien
ggcgagtcggcagcgggaggagccg

SEQ ID NO: 1901054 - DNA, 25 bp, Homo sapien
gcagaggaccaggggcgagtcggca

SEQ ID NO: 1901055 - DNA, 25 bp, Homo sapien
gaccaggggcgagtcggcagcggga

SEQ ID NO: 1901056 - DNA, 25 bp, Homo sapien
agctgtccgaaaggtccccgcattt

SEQ ID NO: 1901057 - DNA, 25 bp, Homo sapien
tgaggttttaatcttgatccgccgg

SEQ ID NO: 1901058 - DNA, 25 bp, Homo sapien
ttttaatcttgatccgccggtcctg

SEQ ID NO: 1901059 - DNA, 25 bp, Homo sapien
tgacttagaatctcccgctttgagg

SEQ ID NO: 1901060 - DNA, 25 bp, Homo sapien
ctgtagtaaacctcttcacgaagga

SEQ ID NO: 1901061 - DNA, 25 bp, Homo sapien
tgtagtaaacctcttcacgaaggaa

SEQ ID NO: 1901062 - DNA, 25 bp, Homo sapien
cctcttcacgaaggaaaggagggct

SEQ ID NO: 1901063 - DNA, 25 bp, Homo sapien
caatcatctctaactttatgatgtc

SEQ ID NO: 1901064 - DNA, 25 bp, Homo sapien
aacgtctgcccctatgttcccagga

SEQ ID NO: 1901065 - DNA, 25 bp, Homo sapien
aatgacagattcgaaactctgagac

SEQ ID NO: 1901066 - DNA, 25 bp, Homo sapien
ttatgatgtccaaaagctgtctaga

SEQ ID NO: 1901067 - DNA, 25 bp, Homo sapien
gtgtgcaggcagaataagagaactg

SEQ ID NO: 1901068 - DNA, 25 bp, Homo sapien
gttttcattaaagcagccagctgcc

SEQ ID NO: 1901069 - DNA, 25 bp, Homo sapien
tgcaggcccttagaaaagaagttcc

SEQ ID NO: 1901070 - DNA, 25 bp, Homo sapien
tattatgtctctcccaagaaccagc

SEQ ID NO: 1901071 - DNA, 25 bp, Homo sapien
gagtagggacgttcaaacatgatcc

SEQ ID NO: 1901072 - DNA, 25 bp, Homo sapien
caagttacagtgcatggactgaccc

SEQ ID NO: 1901073 - DNA, 25 bp, Homo sapien
caaggtactgggtgctactaagacc

SEQ ID NO: 1901074 - DNA, 25 bp, Homo sapien
cagctcaatgtatgggagtggtcac

SEQ ID NO: 1901075 - DNA, 25 bp, Homo sapien
caggtccggctcactatctcgagga

SEQ ID NO: 1901076 - DNA, 25 bp, Homo sapien
tgagtagaggttcctccggacctgg

SEQ ID NO: 1901077 - DNA, 25 bp, Homo sapien
agagggagtcggctccgtttcttca

SEQ ID NO: 1901078 - DNA, 25 bp, Homo sapien
cagggtattgactgagtagaggttc

SEQ ID NO: 1901079 - DNA, 25 bp, Homo sapien
aagtccagctcagggtattgactga

SEQ ID NO: 1901080 - DNA, 25 bp, Homo sapien
ggcccgcacgaatcgcctgctcagc

SEQ ID NO: 1901081 - DNA, 25 bp, Homo sapien
tggcgaggcccgcacgaatcgcctg

SEQ ID NO: 1901082 - DNA, 25 bp, Homo sapien
gaggcccgcacgaatcgcctgctca

SEQ ID NO: 1901083 - DNA, 25 bp, Homo sapien
gcgaggcccgcacgaatcgcctgct

SEQ ID NO: 1901084 - DNA, 25 bp, Homo sapien
gagtgagggagatatcaagacacct

SEQ ID NO: 1901085 - DNA, 25 bp, Homo sapien
gttgtttgaaatcctctccacgtca

SEQ ID NO: 1901086 - DNA, 25 bp, Homo sapien
cctagcgagtgatctcgaggagctg

SEQ ID NO: 1901087 - DNA, 25 bp, Homo sapien
tccacgtcaacgtaagcagcctgtg

SEQ ID NO: 1901088 - DNA, 25 bp, Homo sapien
cgcgctgaggctcggacttgttcat

SEQ ID NO: 1901089 - DNA, 25 bp, Homo sapien
caaagttatgggattcctagcagcc

SEQ ID NO: 1901090 - DNA, 25 bp, Homo sapien
ccaggtccgcgaaaagaaaggcacg

SEQ ID NO: 1901091 - DNA, 25 bp, Homo sapien
tggattcttctgtccgtgggagctc

SEQ ID NO: 1901092 - DNA, 25 bp, Homo sapien
caacgtggtgatttataaacagctc

SEQ ID NO: 1901093 - DNA, 25 bp, Homo sapien
cgctcataaacacaggacacgtgga

SEQ ID NO: 1901094 - DNA, 25 bp, Homo sapien
gctcagccactctccaaagagcatg

SEQ ID NO: 1901095 - DNA, 25 bp, Homo sapien
attctcagccaaagcgtcttgcccg

SEQ ID NO: 1901096 - DNA, 25 bp, Homo sapien
gccggcaaaaccagcgatagagcga

SEQ ID NO: 1901097 - DNA, 25 bp, Homo sapien
cctctgagcgttgatttggctgccc

SEQ ID NO: 1901098 - DNA, 25 bp, Homo sapien
taactgttgattcgctttacagcgc

SEQ ID NO: 1901099 - DNA, 25 bp, Homo sapien
ttcccttcccggcagtaactgttga

SEQ ID NO: 1901100 - DNA, 25 bp, Homo sapien
tgtctgtggccgataagagcaccgg

SEQ ID NO: 1901101 - DNA, 25 bp, Homo sapien
tctgtggccgataagagcaccggga

SEQ ID NO: 1901102 - DNA, 25 bp, Homo sapien
ccaagtgtctgtggccgataagagc

SEQ ID NO: 1901103 - DNA, 25 bp, Homo sapien
tggccgataagagcaccgggaccgc

SEQ ID NO: 1901104 - DNA, 25 bp, Homo sapien
ttaaccggagcgctcagtccggctc

SEQ ID NO: 1901105 - DNA, 25 bp, Homo sapien
gctcagtccggctccgagagtcatg

SEQ ID NO: 1901106 - DNA, 25 bp, Homo sapien
tccgagagtcatggcgaccgcagcg

SEQ ID NO: 1901107 - DNA, 25 bp, Homo sapien
cagcgtctaaccactacagcctgct

SEQ ID NO: 1901108 - DNA, 25 bp, Homo sapien
ctaccgcgaagcgcagagcctggtg

SEQ ID NO: 1901109 - DNA, 25 bp, Homo sapien
agcgcctccatcgtgcacgccgagc

SEQ ID NO: 1901110 - DNA, 25 bp, Homo sapien
gcgcggggggctaccgcgaagcgca

SEQ ID NO: 1901111 - DNA, 25 bp, Homo sapien
gcccggcggcatgcagcagggcgcg

SEQ ID NO: 1901112 - DNA, 25 bp, Homo sapien
gacacccgctcagccacgctcacca

SEQ ID NO: 1901113 - DNA, 25 bp, Homo sapien
caacggacacccgctcagccacgct

SEQ ID NO: 1901114 - DNA, 25 bp, Homo sapien
tgcagagcaacggacacccgctcag

SEQ ID NO: 1901115 - DNA, 25 bp, Homo sapien
ctgcagagcaacggacacccgctca

SEQ ID NO: 1901116 - DNA, 25 bp, Homo sapien
cgggacccggggcatggcggagcgc

SEQ ID NO: 1901117 - DNA, 25 bp, Homo sapien
ccgggacccggggcatggcggagcg

SEQ ID NO: 1901118 - DNA, 25 bp, Homo sapien
ggacccggggcatggcggagcgcgg

SEQ ID NO: 1901119 - DNA, 25 bp, Homo sapien
gggacccggggcatggcggagcgcg

SEQ ID NO: 1901120 - DNA, 25 bp, Homo sapien
tactcgcagcccagcttcacggtga

SEQ ID NO: 1901121 - DNA, 25 bp, Homo sapien
aacggcggcttgctctactcgcagc

SEQ ID NO: 1901122 - DNA, 25 bp, Homo sapien
tccatgggagcgtccaacggcggct

SEQ ID NO: 1901123 - DNA, 25 bp, Homo sapien
tgaacggcatgctgggcgccggcgg

SEQ ID NO: 1901124 - DNA, 25 bp, Homo sapien
acaccatgccgaccaccacccgcac

SEQ ID NO: 1901125 - DNA, 25 bp, Homo sapien
cgggacgcgcacgacgagccacacc

SEQ ID NO: 1901126 - DNA, 25 bp, Homo sapien
acgacgagccacaccatgccgacca

SEQ ID NO: 1901127 - DNA, 25 bp, Homo sapien
acgcgcacgacgagccacaccatgc

SEQ ID NO: 1901128 - DNA, 25 bp, Homo sapien
aagcagttcaagcagcggcggatca

SEQ ID NO: 1901129 - DNA, 25 bp, Homo sapien
gcatagacaagatcgcagcgcaagg

SEQ ID NO: 1901130 - DNA, 25 bp, Homo sapien
tctgggcaccctgtatggcaacgtg

SEQ ID NO: 1901131 - DNA, 25 bp, Homo sapien
gacctggagcagttcgccaagcagt

SEQ ID NO: 1901132 - DNA, 25 bp, Homo sapien
tggcctttagtgaagctatccagag

SEQ ID NO: 1901133 - DNA, 25 bp, Homo sapien
ggcatatttatttgcctgtatttca

SEQ ID NO: 1901134 - DNA, 25 bp, Homo sapien
gctgctcgttcctgaggtatgggaa

SEQ ID NO: 1901135 - DNA, 25 bp, Homo sapien
ctgcttcgggtgcatcacgctgctc

SEQ ID NO: 1901136 - DNA, 25 bp, Homo sapien
ctagttggcggcaaacagctctctg

SEQ ID NO: 1901137 - DNA, 25 bp, Homo sapien
caaagttcactacaaaaagtactat

SEQ ID NO: 1901138 - DNA, 25 bp, Homo sapien
tattaattgataagatcagctcatc

SEQ ID NO: 1901139 - DNA, 25 bp, Homo sapien
tactataacagggagattaattcgt

SEQ ID NO: 1901140 - DNA, 25 bp, Homo sapien
tcagctcatcaaacatactatttcg

SEQ ID NO: 1901141 - DNA, 25 bp, Homo sapien
tattgatccaacgtactttccgcca

SEQ ID NO: 1901142 - DNA, 25 bp, Homo sapien
tgctattgatccaacgtactttccg

SEQ ID NO: 1901143 - DNA, 25 bp, Homo sapien
tttgctattgatccaacgtactttc

SEQ ID NO: 1901144 - DNA, 25 bp, Homo sapien
atctttgctattgatccaacgtact

SEQ ID NO: 1901145 - DNA, 25 bp, Homo sapien
ggtcctggccgtcccaggcgatgcc

SEQ ID NO: 1901146 - DNA, 25 bp, Homo sapien
cttcagaagtgggtcctggccgtcc

SEQ ID NO: 1901147 - DNA, 25 bp, Homo sapien
gagagcgaggggatccgcggtccgc

SEQ ID NO: 1901148 - DNA, 25 bp, Homo sapien
actccgatagacttgggagagcgag

SEQ ID NO: 1901149 - DNA, 25 bp, Homo sapien
cgcagctgacggctgagcatcctgg

SEQ ID NO: 1901150 - DNA, 25 bp, Homo sapien
tttatcccggctgaggagtcctcgg

SEQ ID NO: 1901151 - DNA, 25 bp, Homo sapien
gaaagagcccggcttcgtggaggca

SEQ ID NO: 1901152 - DNA, 25 bp, Homo sapien
aaagccgcgccggaatgaaatcagc

SEQ ID NO: 1901153 - DNA, 25 bp, Homo sapien
gcagcactaatcacccgcagctttt

SEQ ID NO: 1901154 - DNA, 25 bp, Homo sapien
gcagcttttcacgaatccacacacg

SEQ ID NO: 1901155 - DNA, 25 bp, Homo sapien
aatcacccgcagcttttcacgaatc

SEQ ID NO: 1901156 - DNA, 25 bp, Homo sapien
cagcagcactaatcacccgcagctt

SEQ ID NO: 1901157 - DNA, 25 bp, Homo sapien
tccctggacttggaaatcaggacgc

SEQ ID NO: 1901158 - DNA, 25 bp, Homo sapien
caggcgccccgcgacatcctggagt

SEQ ID NO: 1901159 - DNA, 25 bp, Homo sapien
gacttggaaatcaggacgctgtgga

SEQ ID NO: 1901160 - DNA, 25 bp, Homo sapien
ccgcgacatcctggagtcgccggga

SEQ ID NO: 1901161 - DNA, 25 bp, Homo sapien
cattccactcggaaagtcctctcac

SEQ ID NO: 1901162 - DNA, 25 bp, Homo sapien
cccattccactcggaaagtcctctc

SEQ ID NO: 1901163 - DNA, 25 bp, Homo sapien
gccggtgcctagagtgggcttaggg

SEQ ID NO: 1901164 - DNA, 25 bp, Homo sapien
agccggtgcctagagtgggcttagg

SEQ ID NO: 1901165 - DNA, 25 bp, Homo sapien
gggtccctccgccactcgagcagag

SEQ ID NO: 1901166 - DNA, 25 bp, Homo sapien
attctgccggcgcaatgtgggggtc

SEQ ID NO: 1901167 - DNA, 25 bp, Homo sapien
cctccgccactcgagcagagcctgc

SEQ ID NO: 1901168 - DNA, 25 bp, Homo sapien
gccggcgcaatgtgggggtccctcc

SEQ ID NO: 1901169 - DNA, 25 bp, Homo sapien
gagccatcgtagagggggagatccg

SEQ ID NO: 1901170 - DNA, 25 bp, Homo sapien
catcgtagagggggagatccgatgg

SEQ ID NO: 1901171 - DNA, 25 bp, Homo sapien
taagagccatcgtagagggggagat

SEQ ID NO: 1901172 - DNA, 25 bp, Homo sapien
agccatcgtagagggggagatccga

SEQ ID NO: 1901173 - DNA, 25 bp, Homo sapien
ctgcatcatagtaaaactcaacatt

SEQ ID NO: 1901174 - DNA, 25 bp, Homo sapien
catttaaaggttcttgaggtgccat

SEQ ID NO: 1901175 - DNA, 25 bp, Homo sapien
caacatttaaaggttcttgaggtgc

SEQ ID NO: 1901176 - DNA, 25 bp, Homo sapien
ctgttctgcatcatagtaaaactca

SEQ ID NO: 1901177 - DNA, 25 bp, Homo sapien
cagtgaagtccaaaggcaggctgat

SEQ ID NO: 1901178 - DNA, 25 bp, Homo sapien
gactaattatctgggcatcctatgg

SEQ ID NO: 1901179 - DNA, 25 bp, Homo sapien
aattctgtcttgcattagggagggc

SEQ ID NO: 1901180 - DNA, 25 bp, Homo sapien
tatggtccagccaagttgacagatg

SEQ ID NO: 1901181 - DNA, 25 bp, Homo sapien
catagttggagtttcgtatttcaaa

SEQ ID NO: 1901182 - DNA, 25 bp, Homo sapien
gaatgtaaatctggtgcctttcact

SEQ ID NO: 1901183 - DNA, 25 bp, Homo sapien
cctttcccatatatgtacgccatga

SEQ ID NO: 1901184 - DNA, 25 bp, Homo sapien
tacgccatgaaagtcaagtgttcag

SEQ ID NO: 1901185 - DNA, 25 bp, Homo sapien
acaggtttagaagggctgaaggcac

SEQ ID NO: 1901186 - DNA, 25 bp, Homo sapien
aaggcaccgaggaatgtggcctgat

SEQ ID NO: 1901187 - DNA, 25 bp, Homo sapien
ctacacaggtttagaagggctgaag

SEQ ID NO: 1901188 - DNA, 25 bp, Homo sapien
ggaatgtggcctgatgatgctccag

SEQ ID NO: 1901189 - DNA, 25 bp, Homo sapien
gggctgtgacgcaaacctatttacc

SEQ ID NO: 1901190 - DNA, 25 bp, Homo sapien
catctaggctggtaatttcacaggg

SEQ ID NO: 1901191 - DNA, 25 bp, Homo sapien
gagttctgtacacaggcggatggct

SEQ ID NO: 1901192 - DNA, 25 bp, Homo sapien
tccattatattcagcagtgccctga

SEQ ID NO: 1901193 - DNA, 25 bp, Homo sapien
tattggctcaaaagtaagcacctga

SEQ ID NO: 1901194 - DNA, 25 bp, Homo sapien
ttatgctcttaaacaggatcaggga

SEQ ID NO: 1901195 - DNA, 25 bp, Homo sapien
tacaggcaaagatcttgagcacact

SEQ ID NO: 1901196 - DNA, 25 bp, Homo sapien
gctaacaatgcatcacctggcttca

SEQ ID NO: 1901197 - DNA, 25 bp, Homo sapien
cattttgcactgctacttggcacac

SEQ ID NO: 1901198 - DNA, 25 bp, Homo sapien
caaaggagacttatgtggtgctgtc

SEQ ID NO: 1901199 - DNA, 25 bp, Homo sapien
tggccacactcattcgtttaggtac

SEQ ID NO: 1901200 - DNA, 25 bp, Homo sapien
tcacattagaatggcagagttgaac

SEQ ID NO: 1901201 - DNA, 25 bp, Homo sapien
tctatcggctgaaggactgtgtcca

SEQ ID NO: 1901202 - DNA, 25 bp, Homo sapien
tcatgcaacctgaagtagaatctgc

SEQ ID NO: 1901203 - DNA, 25 bp, Homo sapien
caatgccaacgttgaagtgactgaa

SEQ ID NO: 1901204 - DNA, 25 bp, Homo sapien
gactcagatgttaaccaagcaagga

SEQ ID NO: 1901205 - DNA, 25 bp, Homo sapien
tagctcacaccatagtgcctgcagt

SEQ ID NO: 1901206 - DNA, 25 bp, Homo sapien
gaattacaagtaacaacaagctgct

SEQ ID NO: 1901207 - DNA, 25 bp, Homo sapien
tatccagagaagaagtaacctttca

SEQ ID NO: 1901208 - DNA, 25 bp, Homo sapien
gagcttctgcctagtcttcaattgg

SEQ ID NO: 1901209 - DNA, 25 bp, Homo sapien
caggtgcaatcataagtacactaga

SEQ ID NO: 1901210 - DNA, 25 bp, Homo sapien
cagttgaacagttaatccagagaaa

SEQ ID NO: 1901211 - DNA, 25 bp, Homo sapien
tccacctcctgtgtcgctaggacta

SEQ ID NO: 1901212 - DNA, 25 bp, Homo sapien
gtacactagagtctcaaaatcccat

SEQ ID NO: 1901213 - DNA, 25 bp, Homo sapien
tgactaaagcatatcactgattaac

SEQ ID NO: 1901214 - DNA, 25 bp, Homo sapien
cttgaagagaagtgcttgcagtatt

SEQ ID NO: 1901215 - DNA, 25 bp, Homo sapien
taaatgccacgatactttattgctc

SEQ ID NO: 1901216 - DNA, 25 bp, Homo sapien
cactgattaacataaggtaaaaata

SEQ ID NO: 1901217 - DNA, 25 bp, Homo sapien
taaaatctacaaatgtcttaattct

SEQ ID NO: 1901218 - DNA, 25 bp, Homo sapien
tacttgatttaatggacaatttcat

SEQ ID NO: 1901219 - DNA, 25 bp, Homo sapien
caaatgtcttaattcttaccattaa

SEQ ID NO: 1901220 - DNA, 25 bp, Homo sapien
tctacaaatgtcttaattcttacca

SEQ ID NO: 1901221 - DNA, 25 bp, Homo sapien
tctgcgaacagaaggacacatcaag

SEQ ID NO: 1901222 - DNA, 25 bp, Homo sapien
cagctctgttatcaatctgcgaaca

SEQ ID NO: 1901223 - DNA, 25 bp, Homo sapien
ggatgccggacttaccattcttgtt

SEQ ID NO: 1901224 - DNA, 25 bp, Homo sapien
caggagttttcttaaggatgccgga

SEQ ID NO: 1901225 - DNA, 25 bp, Homo sapien
caccttaagtataacatttatataa

SEQ ID NO: 1901226 - DNA, 25 bp, Homo sapien
aacaccttaagtataacatttatat

SEQ ID NO: 1901227 - DNA, 25 bp, Homo sapien
ccttaagtataacatttatataatg

SEQ ID NO: 1901228 - DNA, 25 bp, Homo sapien
taagtataacatttatataatgtgc

SEQ ID NO: 1901229 - DNA, 25 bp, Homo sapien
ttctgtcaccccagttcaaaatggt

SEQ ID NO: 1901230 - DNA, 25 bp, Homo sapien
cacccctggctaaaagtaagaagca

SEQ ID NO: 1901231 - DNA, 25 bp, Homo sapien
gccaatttagcatctaggacctgaa

SEQ ID NO: 1901232 - DNA, 25 bp, Homo sapien
taactactgtgacactgctagcacc

SEQ ID NO: 1901233 - DNA, 25 bp, Homo sapien
tattccctatattaactgatctatc

SEQ ID NO: 1901234 - DNA, 25 bp, Homo sapien
tcctaacaaaaagtctgagattggc

SEQ ID NO: 1901235 - DNA, 25 bp, Homo sapien
ttctcactcttacaagtagaccaag

SEQ ID NO: 1901236 - DNA, 25 bp, Homo sapien
atcaaaccaagccatcttatcagga

SEQ ID NO: 1901237 - DNA, 25 bp, Homo sapien
tgtgtcacacacagatctattagct

SEQ ID NO: 1901238 - DNA, 25 bp, Homo sapien
taatatgtccagctgctgtaacctg

SEQ ID NO: 1901239 - DNA, 25 bp, Homo sapien
gtgtgccagtctggtgaagcacccg

SEQ ID NO: 1901240 - DNA, 25 bp, Homo sapien
tacatctccacagatccagggtccg

SEQ ID NO: 1901241 - DNA, 25 bp, Homo sapien
gctagctatcacatcatagtcttca

SEQ ID NO: 1901242 - DNA, 25 bp, Homo sapien
tagctatcacatcatagtcttcaat

SEQ ID NO: 1901243 - DNA, 25 bp, Homo sapien
ctagctatcacatcatagtcttcaa

SEQ ID NO: 1901244 - DNA, 25 bp, Homo sapien
agtgggctcccaagactgtttctag

SEQ ID NO: 1901245 - DNA, 25 bp, Homo sapien
gactgagatggcctgagcccatact

SEQ ID NO: 1901246 - DNA, 25 bp, Homo sapien
gcaggctagcaataaggaagatcca

SEQ ID NO: 1901247 - DNA, 25 bp, Homo sapien
catcgggtccatcaagaagagtcac

SEQ ID NO: 1901248 - DNA, 25 bp, Homo sapien
caaatactccctagcataccagaag

SEQ ID NO: 1901249 - DNA, 25 bp, Homo sapien
tcacttacggtatgtgtgcacacaa

SEQ ID NO: 1901250 - DNA, 25 bp, Homo sapien
tcttcctactaagtgaatgcaaggc

SEQ ID NO: 1901251 - DNA, 25 bp, Homo sapien
gaattcttccagtcagttacactgg

SEQ ID NO: 1901252 - DNA, 25 bp, Homo sapien
gcttatctagtccaacagtccctag

SEQ ID NO: 1901253 - DNA, 25 bp, Homo sapien
gaaaaacttactgaactatcggcat

SEQ ID NO: 1901254 - DNA, 25 bp, Homo sapien
agaggtgattagcttgtcggagaca

SEQ ID NO: 1901255 - DNA, 25 bp, Homo sapien
tttgaccagtaaggacagtaaaaca

SEQ ID NO: 1901256 - DNA, 25 bp, Homo sapien
tctcatggataaataatgtcagtgt

SEQ ID NO: 1901257 - DNA, 25 bp, Homo sapien
tcatggataaataatgtcagtgttt

SEQ ID NO: 1901258 - DNA, 25 bp, Homo sapien
gctctcatggataaataatgtcagt

SEQ ID NO: 1901259 - DNA, 25 bp, Homo sapien
ctctcatggataaataatgtcagtg

SEQ ID NO: 1901260 - DNA, 25 bp, Homo sapien
taattgagtagtataaagaattctc

SEQ ID NO: 1901261 - DNA, 25 bp, Homo sapien
ggtagggtgagtcaggatacatttc

SEQ ID NO: 1901262 - DNA, 25 bp, Homo sapien
gaacaagtaattgagtagtataaag

SEQ ID NO: 1901263 - DNA, 25 bp, Homo sapien
ggatacatttcacccataggaagaa

SEQ ID NO: 1901264 - DNA, 25 bp, Homo sapien
gaagctctgaacagaagttcaaaat

SEQ ID NO: 1901265 - DNA, 25 bp, Homo sapien
ggtgctgaagctctgaacagaagtt

SEQ ID NO: 1901266 - DNA, 25 bp, Homo sapien
gctgaagctctgaacagaagttcaa

SEQ ID NO: 1901267 - DNA, 25 bp, Homo sapien
tgctgaagctctgaacagaagttca

SEQ ID NO: 1901268 - DNA, 25 bp, Homo sapien
tgcctgtctcatgagtacagaatgg

SEQ ID NO: 1901269 - DNA, 25 bp, Homo sapien
catgctggataccaatctttgtcag

SEQ ID NO: 1901270 - DNA, 25 bp, Homo sapien
caattgattcttatatggtaggata

SEQ ID NO: 1901271 - DNA, 25 bp, Homo sapien
ttctttagctaaggaagaatctaag

SEQ ID NO: 1901272 - DNA, 25 bp, Homo sapien
ccctccctcaaataagagagaattc

SEQ ID NO: 1901273 - DNA, 25 bp, Homo sapien
ttatattatgcagaggtggggtttc

SEQ ID NO: 1901274 - DNA, 25 bp, Homo sapien
accctccctcaaataagagagaatt

SEQ ID NO: 1901275 - DNA, 25 bp, Homo sapien
gaccctccctcaaataagagagaat

SEQ ID NO: 1901276 - DNA, 25 bp, Homo sapien
acttgaaactaaacatatgtagaaa

SEQ ID NO: 1901277 - DNA, 25 bp, Homo sapien
atttaaatccaattactttgtccag

SEQ ID NO: 1901278 - DNA, 25 bp, Homo sapien
gaaccatctattagaagttattctt

SEQ ID NO: 1901279 - DNA, 25 bp, Homo sapien
actttgtccagatttgctatgaacc

SEQ ID NO: 1901280 - DNA, 25 bp, Homo sapien
tcctacaataatatagtcgaataca

SEQ ID NO: 1901281 - DNA, 25 bp, Homo sapien
tctttcctcacagatactcgactga

SEQ ID NO: 1901282 - DNA, 25 bp, Homo sapien
tcgactgatcaatttgcataacaac

SEQ ID NO: 1901283 - DNA, 25 bp, Homo sapien
tcactgtattggatctttcctacaa

SEQ ID NO: 1901284 - DNA, 25 bp, Homo sapien
taatatatgcactgaccctggaaac

SEQ ID NO: 1901285 - DNA, 25 bp, Homo sapien
caagcttattgctggcagggctaga

SEQ ID NO: 1901286 - DNA, 25 bp, Homo sapien
tgaacactgagctgaaaaaagggca

SEQ ID NO: 1901287 - DNA, 25 bp, Homo sapien
tgggaccaggtcagaacattcaagg

SEQ ID NO: 1901288 - DNA, 25 bp, Homo sapien
cttttgttcgatagagaacaagtcg

SEQ ID NO: 1901289 - DNA, 25 bp, Homo sapien
aagcttgaggtggtagcttatcaca

SEQ ID NO: 1901290 - DNA, 25 bp, Homo sapien
gaacaagtcgtttaaggctgcataa

SEQ ID NO: 1901291 - DNA, 25 bp, Homo sapien
tcacaggaggagagatttaaggcct

SEQ ID NO: 1901292 - DNA, 25 bp, Homo sapien
taattcggatccacaaaccttcaga

SEQ ID NO: 1901293 - DNA, 25 bp, Homo sapien
ggcgtactaattcggatccacaaac

SEQ ID NO: 1901294 - DNA, 25 bp, Homo sapien
ctgcaagacaattcaaggcgtacta

SEQ ID NO: 1901295 - DNA, 25 bp, Homo sapien
caattcaaggcgtactaattcggat

SEQ ID NO: 1901296 - DNA, 25 bp, Homo sapien
tatcatccaggcaatagtctaggca

SEQ ID NO: 1901297 - DNA, 25 bp, Homo sapien
aagggcagtccagggcaggataaca

SEQ ID NO: 1901298 - DNA, 25 bp, Homo sapien
ttgaagagagaaggagatgataacc

SEQ ID NO: 1901299 - DNA, 25 bp, Homo sapien
caggataacaagcagagtgaagaac

SEQ ID NO: 1901300 - DNA, 25 bp, Homo sapien
gaaaagaaactcagtgcatccatgg

SEQ ID NO: 1901301 - DNA, 25 bp, Homo sapien
gcactttgccagtacagctggactt

SEQ ID NO: 1901302 - DNA, 25 bp, Homo sapien
tattcacagacttcattagcttcag

SEQ ID NO: 1901303 - DNA, 25 bp, Homo sapien
ggacttcagccattcacgactaata

SEQ ID NO: 1901304 - DNA, 25 bp, Homo sapien
cactggacaagagtgcagcgagact

SEQ ID NO: 1901305 - DNA, 25 bp, Homo sapien
cagcgagactgtagaaattccagag

SEQ ID NO: 1901306 - DNA, 25 bp, Homo sapien
caatgctggctcagtagtttgcaag

SEQ ID NO: 1901307 - DNA, 25 bp, Homo sapien
gatgaagcctctattgccagtccaa

SEQ ID NO: 1901308 - DNA, 25 bp, Homo sapien
ggtccctatacctagaacgattgaa

SEQ ID NO: 1901309 - DNA, 25 bp, Homo sapien
catgctgttgaacccaatctctctc

SEQ ID NO: 1901310 - DNA, 25 bp, Homo sapien
tctaggctcagtattaatttcaggt

SEQ ID NO: 1901311 - DNA, 25 bp, Homo sapien
tatcacaaaacgcagagtaacaaca

SEQ ID NO: 1901312 - DNA, 25 bp, Homo sapien
ggagtttccaaacaagtcacacagt

SEQ ID NO: 1901313 - DNA, 25 bp, Homo sapien
aatgcaaatctcttggtgaaaccca

SEQ ID NO: 1901314 - DNA, 25 bp, Homo sapien
tatgacgcagcagaatagactccac

SEQ ID NO: 1901315 - DNA, 25 bp, Homo sapien
ggctgtatactggaccaccctgaag

SEQ ID NO: 1901316 - DNA, 25 bp, Homo sapien
tacttccagtcgtataagatttgtg

SEQ ID NO: 1901317 - DNA, 25 bp, Homo sapien
tccccgaggacagcactgctaaact

SEQ ID NO: 1901318 - DNA, 25 bp, Homo sapien
ttaaactggcgagcttgggaagcat

SEQ ID NO: 1901319 - DNA, 25 bp, Homo sapien
tcagtgtaatattccagaagagaac

SEQ ID NO: 1901320 - DNA, 25 bp, Homo sapien
cattgatctcctccctaaatctttt

SEQ ID NO: 1901321 - DNA, 25 bp, Homo sapien
aacaatgaaacatctattgatttca

SEQ ID NO: 1901322 - DNA, 25 bp, Homo sapien
cttaataatatattggtcacctttt

SEQ ID NO: 1901323 - DNA, 25 bp, Homo sapien
catataccagtaactctcagtaacc

SEQ ID NO: 1901324 - DNA, 25 bp, Homo sapien
tcgctgacacatctctaatacctag

SEQ ID NO: 1901325 - DNA, 25 bp, Homo sapien
catgttacggaggtagcagctgacc

SEQ ID NO: 1901326 - DNA, 25 bp, Homo sapien
tctcaggctagaatgagagcgggaa

SEQ ID NO: 1901327 - DNA, 25 bp, Homo sapien
tccctacagttgaacaggtgccctg

SEQ ID NO: 1901328 - DNA, 25 bp, Homo sapien
tatccttggttgagtagccttcttc

SEQ ID NO: 1901329 - DNA, 25 bp, Homo sapien
gatatacttgcacacatgcaaagtg

SEQ ID NO: 1901330 - DNA, 25 bp, Homo sapien
gactagaaacaactaagtgcccatc

SEQ ID NO: 1901331 - DNA, 25 bp, Homo sapien
gaggaagctctctttgtacttacaa

SEQ ID NO: 1901332 - DNA, 25 bp, Homo sapien
tctttggcatactggactacctctg

SEQ ID NO: 1901333 - DNA, 25 bp, Homo sapien
taggtggcgtcctcttgaatggcaa

SEQ ID NO: 1901334 - DNA, 25 bp, Homo sapien
actgctccgggatgataggtttcta

SEQ ID NO: 1901335 - DNA, 25 bp, Homo sapien
taagttcgaaacacagctgtctgag

SEQ ID NO: 1901336 - DNA, 25 bp, Homo sapien
ctcggcgccgaaggcatatataata

SEQ ID NO: 1901337 - DNA, 25 bp, Homo sapien
tcctcttgtagctgtcctggctcgg

SEQ ID NO: 1901338 - DNA, 25 bp, Homo sapien
ttctcctcttgtagctgtcctggct

SEQ ID NO: 1901339 - DNA, 25 bp, Homo sapien
tggctcggcgccgaaggcatatata

SEQ ID NO: 1901340 - DNA, 25 bp, Homo sapien
gttaacatgggaaagaccggtgaca

SEQ ID NO: 1901341 - DNA, 25 bp, Homo sapien
ttaacatgggaaagaccggtgacat

SEQ ID NO: 1901342 - DNA, 25 bp, Homo sapien
tgttaacatgggaaagaccggtgac

SEQ ID NO: 1901343 - DNA, 25 bp, Homo sapien
gatgtgaattatgaagcttcaaaag

SEQ ID NO: 1901344 - DNA, 25 bp, Homo sapien
ggtcaggtgtcctcagtaagatgca

SEQ ID NO: 1901345 - DNA, 25 bp, Homo sapien
tgaagcttcaaaaggtcaggtgtcc

SEQ ID NO: 1901346 - DNA, 25 bp, Homo sapien
caaaaggtcaggtgtcctcagtaag

SEQ ID NO: 1901347 - DNA, 25 bp, Homo sapien
aatgcaaaagttggcattcatccag

SEQ ID NO: 1901348 - DNA, 25 bp, Homo sapien
gtcacaggatacacatgggaaatgc

SEQ ID NO: 1901349 - DNA, 25 bp, Homo sapien
gacttcaggtacaaatgctgacatg

SEQ ID NO: 1901350 - DNA, 25 bp, Homo sapien
aggtaccctgaactttgcatgctga

SEQ ID NO: 1901351 - DNA, 25 bp, Homo sapien
catatggatcaagaggaagactgga

SEQ ID NO: 1901352 - DNA, 25 bp, Homo sapien
gcaaatggagaaggcaagggaacca

SEQ ID NO: 1901353 - DNA, 25 bp, Homo sapien
gagactcctatccagcttcaaagct

SEQ ID NO: 1901354 - DNA, 25 bp, Homo sapien
tcttgaaaatccaagcgaatgaagc

SEQ ID NO: 1901355 - DNA, 25 bp, Homo sapien
ctgtgactctggaataaccctaaat

SEQ ID NO: 1901356 - DNA, 25 bp, Homo sapien
gcccaacatgctatctcacaaagtg

SEQ ID NO: 1901357 - DNA, 25 bp, Homo sapien
catctgaatgagaagaactgtgact

SEQ ID NO: 1901358 - DNA, 25 bp, Homo sapien
tttaacgatgggtaagaataagcca

SEQ ID NO: 1901359 - DNA, 25 bp, Homo sapien
aaatatagtggatttacaccctgcc

SEQ ID NO: 1901360 - DNA, 25 bp, Homo sapien
aaaaattggagatatctggctgagg

SEQ ID NO: 1901361 - DNA, 25 bp, Homo sapien
cacctgtcatagcttgccattatag

SEQ ID NO: 1901362 - DNA, 25 bp, Homo sapien
aaatccaaggacaatacacctgtca

SEQ ID NO: 1901363 - DNA, 25 bp, Homo sapien
catattaccgaagagcaagatcaag

SEQ ID NO: 1901364 - DNA, 25 bp, Homo sapien
tacttcagaccaggaccaagatggt

SEQ ID NO: 1901365 - DNA, 25 bp, Homo sapien
tatttgctcttaagggaagacctgg

SEQ ID NO: 1901366 - DNA, 25 bp, Homo sapien
tgatttggttatgcacacgctagct

SEQ ID NO: 1901367 - DNA, 25 bp, Homo sapien
tggcagataaagagatgtctccctc

SEQ ID NO: 1901368 - DNA, 25 bp, Homo sapien
ttgcagcccactatgaaagattcag

SEQ ID NO: 1901369 - DNA, 25 bp, Homo sapien
tctctggcaaagatcagacagcttt

SEQ ID NO: 1901370 - DNA, 25 bp, Homo sapien
acataacctacttcatctgctagtg

SEQ ID NO: 1901371 - DNA, 25 bp, Homo sapien
gggcggctccccgactctctagatg

SEQ ID NO: 1901372 - DNA, 25 bp, Homo sapien
tctagatgcggcacaaccgccgcaa

SEQ ID NO: 1901373 - DNA, 25 bp, Homo sapien
tagcgcgacccggaaggaagacgcg

SEQ ID NO: 1901374 - DNA, 25 bp, Homo sapien
ttcaccagcgaccaggcagcgcgag

SEQ ID NO: 1901375 - DNA, 25 bp, Homo sapien
ccataccaacgttcagaagcctctg

SEQ ID NO: 1901376 - DNA, 25 bp, Homo sapien
gaagcctctgaccattacctctgat

SEQ ID NO: 1901377 - DNA, 25 bp, Homo sapien
tgcctgcaggctcatttccatacca

SEQ ID NO: 1901378 - DNA, 25 bp, Homo sapien
tgcatacaaatcctgcctgcaggct

SEQ ID NO: 1901379 - DNA, 25 bp, Homo sapien
aggacttgctgtgactttgtgacca

SEQ ID NO: 1901380 - DNA, 25 bp, Homo sapien
ttcatagcaacagctccaagtccag

SEQ ID NO: 1901381 - DNA, 25 bp, Homo sapien
aagtccagacagctccaaagtaaat

SEQ ID NO: 1901382 - DNA, 25 bp, Homo sapien
ctcatatcattagtgcgctctggca

SEQ ID NO: 1901383 - DNA, 25 bp, Homo sapien
tacacctggaaccatactgggtatg

SEQ ID NO: 1901384 - DNA, 25 bp, Homo sapien
tactgggtatgcactgtagatttga

SEQ ID NO: 1901385 - DNA, 25 bp, Homo sapien
gaaccatactgggtatgcactgtag

SEQ ID NO: 1901386 - DNA, 25 bp, Homo sapien
tagctacacctggaaccatactggg

SEQ ID NO: 1901387 - DNA, 25 bp, Homo sapien
aaatgaacagttccatcgcagttca

SEQ ID NO: 1901388 - DNA, 25 bp, Homo sapien
gaacagttccatcgcagttcaaaga

SEQ ID NO: 1901389 - DNA, 25 bp, Homo sapien
tgaagaggcaccaaactccagcagt

SEQ ID NO: 1901390 - DNA, 25 bp, Homo sapien
tccatcgcagttcaaagaatgaaga

SEQ ID NO: 1901391 - DNA, 25 bp, Homo sapien
gaggagggtaataaatgcatctgac

SEQ ID NO: 1901392 - DNA, 25 bp, Homo sapien
gatttgtccagtcagtcactctcca

SEQ ID NO: 1901393 - DNA, 25 bp, Homo sapien
taactgccagtcacgattcctgcct

SEQ ID NO: 1901394 - DNA, 25 bp, Homo sapien
ttcagggcaagttgataactgccag

SEQ ID NO: 1901395 - DNA, 25 bp, Homo sapien
tgatggctccaaacatcaacttttc

SEQ ID NO: 1901396 - DNA, 25 bp, Homo sapien
atttgatggctccaaacatcaactt

SEQ ID NO: 1901397 - DNA, 25 bp, Homo sapien
tgaattgttgacattcaaataagcc

SEQ ID NO: 1901398 - DNA, 25 bp, Homo sapien
cttttctgaattgttgacattcaaa

SEQ ID NO: 1901399 - DNA, 25 bp, Homo sapien
tccaacgcacaaagatggtagtgtt

SEQ ID NO: 1901400 - DNA, 25 bp, Homo sapien
tgatggaggttgagttggtggtatg

SEQ ID NO: 1901401 - DNA, 25 bp, Homo sapien
gcacaaagatggtagtgttgacagc

SEQ ID NO: 1901402 - DNA, 25 bp, Homo sapien
tctgtccaacgcacaaagatggtag

SEQ ID NO: 1901403 - DNA, 25 bp, Homo sapien
aggcccatggctacacccaggtaaa

SEQ ID NO: 1901404 - DNA, 25 bp, Homo sapien
tgacaggcccatggctacacccagg

SEQ ID NO: 1901405 - DNA, 25 bp, Homo sapien
ggctacacccaggtaaataagagct

SEQ ID NO: 1901406 - DNA, 25 bp, Homo sapien
agacagctgacaggcccatggctac

SEQ ID NO: 1901407 - DNA, 25 bp, Homo sapien
cttctagagcagctagtgtcacaga

SEQ ID NO: 1901408 - DNA, 25 bp, Homo sapien
ctgcttcaggattcttgcctgctcc

SEQ ID NO: 1901409 - DNA, 25 bp, Homo sapien
tcttctagagcagctagtgtcacag

SEQ ID NO: 1901410 - DNA, 25 bp, Homo sapien
cctcacaatctctgccctcaatttg

SEQ ID NO: 1901411 - DNA, 25 bp, Homo sapien
gatatagtttgactctccggtgttc

SEQ ID NO: 1901412 - DNA, 25 bp, Homo sapien
tcattgtgacaagtgagggatctaa

SEQ ID NO: 1901413 - DNA, 25 bp, Homo sapien
tacgcatgcctaggtttaccagtaa

SEQ ID NO: 1901414 - DNA, 25 bp, Homo sapien
gatctaatgtagatgtcacagtcac

SEQ ID NO: 1901415 - DNA, 25 bp, Homo sapien
cccacagttgaggcagtgaaaattg

SEQ ID NO: 1901416 - DNA, 25 bp, Homo sapien
ccacagttgaggcagtgaaaattgc

SEQ ID NO: 1901417 - DNA, 25 bp, Homo sapien
cacagttgaggcagtgaaaattgct

SEQ ID NO: 1901418 - DNA, 25 bp, Homo sapien
cagttgaggcagtgaaaattgctgt

SEQ ID NO: 1901419 - DNA, 25 bp, Homo sapien
ctggaggacagtcttaggggccata

SEQ ID NO: 1901420 - DNA, 25 bp, Homo sapien
ggccatatgtaagatgtctctgaag

SEQ ID NO: 1901421 - DNA, 25 bp, Homo sapien
gaggacagtcttaggggccatatgt

SEQ ID NO: 1901422 - DNA, 25 bp, Homo sapien
tcttaggggccatatgtaagatgtc

SEQ ID NO: 1901423 - DNA, 25 bp, Homo sapien
gcctgtggggcttttgccaagggcc

SEQ ID NO: 1901424 - DNA, 25 bp, Homo sapien
ccaggttgtgcatgcaggtttgctg

SEQ ID NO: 1901425 - DNA, 25 bp, Homo sapien
ctgtggggcttttgccaagggcctc

SEQ ID NO: 1901426 - DNA, 25 bp, Homo sapien
gtgcctgtggggcttttgccaaggg

SEQ ID NO: 1901427 - DNA, 25 bp, Homo sapien
ttccttgacattgctgtctccccat

SEQ ID NO: 1901428 - DNA, 25 bp, Homo sapien
tgtatcttccttgacattgctgtct

SEQ ID NO: 1901429 - DNA, 25 bp, Homo sapien
tttccatgtcagagatactgtatct

SEQ ID NO: 1901430 - DNA, 25 bp, Homo sapien
tccatgtcagagatactgtatcttc

SEQ ID NO: 1901431 - DNA, 25 bp, Homo sapien
ctgcctaagtaagggggccagcaag

SEQ ID NO: 1901432 - DNA, 25 bp, Homo sapien
aggctgcctaagtaagggggccagc

SEQ ID NO: 1901433 - DNA, 25 bp, Homo sapien
gctgcctaagtaagggggccagcaa

SEQ ID NO: 1901434 - DNA, 25 bp, Homo sapien
cagaggctgcctaagtaagggggcc

SEQ ID NO: 1901435 - DNA, 25 bp, Homo sapien
tgggatcacagtgttgttggaaatg

SEQ ID NO: 1901436 - DNA, 25 bp, Homo sapien
atgttatcaaaacaagtcatcaccc

SEQ ID NO: 1901437 - DNA, 25 bp, Homo sapien
tgttatcaaaacaagtcatcaccct

SEQ ID NO: 1901438 - DNA, 25 bp, Homo sapien
ttatcaaaacaagtcatcaccctag

SEQ ID NO: 1901439 - DNA, 25 bp, Homo sapien
gttatcaaaacaagtcatcacccta

SEQ ID NO: 1901440 - DNA, 25 bp, Homo sapien
gaattcctgatgctggcaatcatcc

SEQ ID NO: 1901441 - DNA, 25 bp, Homo sapien
catccagtgcatttgggtcataaac

SEQ ID NO: 1901442 - DNA, 25 bp, Homo sapien
tcagagatcaggtactgagcccctc

SEQ ID NO: 1901443 - DNA, 25 bp, Homo sapien
gtatttacgggcatgtgaattcctg

SEQ ID NO: 1901444 - DNA, 25 bp, Homo sapien
ctgatctgtagggaatcaatggaaa

SEQ ID NO: 1901445 - DNA, 25 bp, Homo sapien
tctgtagggaatcaatggaaaattt

SEQ ID NO: 1901446 - DNA, 25 bp, Homo sapien
gtctgatctgtagggaatcaatgga

SEQ ID NO: 1901447 - DNA, 25 bp, Homo sapien
ctgtctgatctgtagggaatcaatg

SEQ ID NO: 1901448 - DNA, 25 bp, Homo sapien
aaatgaactggccttagcctaacca

SEQ ID NO: 1901449 - DNA, 25 bp, Homo sapien
ctctgctctcggagaaatccaaatg

SEQ ID NO: 1901450 - DNA, 25 bp, Homo sapien
cttagcctaaccaccgagaagaagg

SEQ ID NO: 1901451 - DNA, 25 bp, Homo sapien
tccactctgctctcggagaaatcca

SEQ ID NO: 1901452 - DNA, 25 bp, Homo sapien
cttttgtagctgattctcttctttc

SEQ ID NO: 1901453 - DNA, 25 bp, Homo sapien
tcttttgtagctgattctcttcttt

SEQ ID NO: 1901454 - DNA, 25 bp, Homo sapien
tggaaatgaggatatggttttgtga

SEQ ID NO: 1901455 - DNA, 25 bp, Homo sapien
tttggaaatgaggatatggttttgt

SEQ ID NO: 1901456 - DNA, 25 bp, Homo sapien
aaatgaggatatggttttgtgatgt

SEQ ID NO: 1901457 - DNA, 25 bp, Homo sapien
gaaatgaggatatggttttgtgatg

SEQ ID NO: 1901458 - DNA, 25 bp, Homo sapien
tgagaagagccaaagacagattcat

SEQ ID NO: 1901459 - DNA, 25 bp, Homo sapien
ggggctgagaagagccaaagacaga

SEQ ID NO: 1901460 - DNA, 25 bp, Homo sapien
gggctgagaagagccaaagacagat

SEQ ID NO: 1901461 - DNA, 25 bp, Homo sapien
gctgagaagagccaaagacagattc

SEQ ID NO: 1901462 - DNA, 25 bp, Homo sapien
tgtggtgaggctcgtaagttcaacc

SEQ ID NO: 1901463 - DNA, 25 bp, Homo sapien
tattatcgcaaacaaggatcctgtg

SEQ ID NO: 1901464 - DNA, 25 bp, Homo sapien
aacaatgagatgtgcacattcggga

SEQ ID NO: 1901465 - DNA, 25 bp, Homo sapien
gttggatgatacagttgctctctcc

SEQ ID NO: 1901466 - DNA, 25 bp, Homo sapien
tgacaatctgccaacacagaataac

SEQ ID NO: 1901467 - DNA, 25 bp, Homo sapien
taacttgcgaatgcaaatattgctc

SEQ ID NO: 1901468 - DNA, 25 bp, Homo sapien
aatattgctcagttcattgttcctg

SEQ ID NO: 1901469 - DNA, 25 bp, Homo sapien
ccttttgaaaaattgcgatatttct

SEQ ID NO: 1901470 - DNA, 25 bp, Homo sapien
taacacagtcgaaaatcataactct

SEQ ID NO: 1901471 - DNA, 25 bp, Homo sapien
ttaacacagtcgaaaatcataactc

SEQ ID NO: 1901472 - DNA, 25 bp, Homo sapien
tcatctctgatgacggatttactga

SEQ ID NO: 1901473 - DNA, 25 bp, Homo sapien
ttactgacttcggatggccgcttct

SEQ ID NO: 1901474 - DNA, 25 bp, Homo sapien
caaagtcgcagtaaaacaagaatgc

SEQ ID NO: 1901475 - DNA, 25 bp, Homo sapien
acttgctcaaagtcgcagtaaaaca

SEQ ID NO: 1901476 - DNA, 25 bp, Homo sapien
cttccagccagcatgtgaatgacag

SEQ ID NO: 1901477 - DNA, 25 bp, Homo sapien
cctggcttgatctgtgctttccaga

SEQ ID NO: 1901478 - DNA, 25 bp, Homo sapien
tgcctggcttgatctgtgctttcca

SEQ ID NO: 1901479 - DNA, 25 bp, Homo sapien
agtgcctggcttgatctgtgctttc

SEQ ID NO: 1901480 - DNA, 25 bp, Homo sapien
gtgcctggcttgatctgtgctttcc

SEQ ID NO: 1901481 - DNA, 25 bp, Homo sapien
acagtagaataatcctcgccatgac

SEQ ID NO: 1901482 - DNA, 25 bp, Homo sapien
tacagtagaataatcctcgccatga

SEQ ID NO: 1901483 - DNA, 25 bp, Homo sapien
tttacagtagaataatcctcgccat

SEQ ID NO: 1901484 - DNA, 25 bp, Homo sapien
gaaatacatgcttttacagtagaat

SEQ ID NO: 1901485 - DNA, 25 bp, Homo sapien
ccttgagaggaaaaagcgtttagat

SEQ ID NO: 1901486 - DNA, 25 bp, Homo sapien
tgagaggaaaaagcgtttagattta

SEQ ID NO: 1901487 - DNA, 25 bp, Homo sapien
cttgagaggaaaaagcgtttagatt

SEQ ID NO: 1901488 - DNA, 25 bp, Homo sapien
acttcccaggattccgatctaacat

SEQ ID NO: 1901489 - DNA, 25 bp, Homo sapien
aacttcccaggattccgatctaaca

SEQ ID NO: 1901490 - DNA, 25 bp, Homo sapien
tcatggtctgaccttggttgccaac

SEQ ID NO: 1901491 - DNA, 25 bp, Homo sapien
ctgcggtcacctgcaatttgcattc

SEQ ID NO: 1901492 - DNA, 25 bp, Homo sapien
tgccaacactcacacgacaacaagg

SEQ ID NO: 1901493 - DNA, 25 bp, Homo sapien
aagttcattcagtacaacagattgc

SEQ ID NO: 1901494 - DNA, 25 bp, Homo sapien
cttccatttcctcctaactgatgag

SEQ ID NO: 1901495 - DNA, 25 bp, Homo sapien
tttcctcctaactgatgagaatgaa

SEQ ID NO: 1901496 - DNA, 25 bp, Homo sapien
tgagaatgaaaataaaccgtagtaa

SEQ ID NO: 1901497 - DNA, 25 bp, Homo sapien
ccatttcctcctaactgatgagaat

SEQ ID NO: 1901498 - DNA, 25 bp, Homo sapien
gttgttctaagttaactccatccga

SEQ ID NO: 1901499 - DNA, 25 bp, Homo sapien
gctatataacgattaacctgattta

SEQ ID NO: 1901500 - DNA, 25 bp, Homo sapien
aactccatccgatctattggtcaag

SEQ ID NO: 1901501 - DNA, 25 bp, Homo sapien
ctattgaacaatgcactgaaattgt

SEQ ID NO: 1901502 - DNA, 25 bp, Homo sapien
tttactgactgatagggcaggaccc

SEQ ID NO: 1901503 - DNA, 25 bp, Homo sapien
tgactccagtgccaagaagacgctc

SEQ ID NO: 1901504 - DNA, 25 bp, Homo sapien
tcataagtgccagacggtcacggtg

SEQ ID NO: 1901505 - DNA, 25 bp, Homo sapien
aaaggattgcatttctccggaaggc

SEQ ID NO: 1901506 - DNA, 25 bp, Homo sapien
ctaaagccgacagaggcctcccggt

SEQ ID NO: 1901507 - DNA, 25 bp, Homo sapien
aagccgacagaggcctcccggtcat

SEQ ID NO: 1901508 - DNA, 25 bp, Homo sapien
aaagccgacagaggcctcccggtca

SEQ ID NO: 1901509 - DNA, 25 bp, Homo sapien
taaagccgacagaggcctcccggtc

SEQ ID NO: 1901510 - DNA, 25 bp, Homo sapien
gttgactgactgtgtacgtgaagtc

SEQ ID NO: 1901511 - DNA, 25 bp, Homo sapien
gactgtgtacgtgaagtcgcgcttc

SEQ ID NO: 1901512 - DNA, 25 bp, Homo sapien
actgactgtgtacgtgaagtcgcgc

SEQ ID NO: 1901513 - DNA, 25 bp, Homo sapien
tgtacgtgaagtcgcgcttcttagc

SEQ ID NO: 1901514 - DNA, 25 bp, Homo sapien
tgttcaggatggctccaagagaaat

SEQ ID NO: 1901515 - DNA, 25 bp, Homo sapien
cttgttcaggatggctccaagagaa

SEQ ID NO: 1901516 - DNA, 25 bp, Homo sapien
tttcttgttcaggatggctccaaga

SEQ ID NO: 1901517 - DNA, 25 bp, Homo sapien
tcaggatggctccaagagaaatggg

SEQ ID NO: 1901518 - DNA, 25 bp, Homo sapien
acaagagcttttccatccacacttg

SEQ ID NO: 1901519 - DNA, 25 bp, Homo sapien
gaaacaagagcttttccatccacac

SEQ ID NO: 1901520 - DNA, 25 bp, Homo sapien
ccaagctttgcagaaacaagagctt

SEQ ID NO: 1901521 - DNA, 25 bp, Homo sapien
ccacacttgtaacttgtttggtcat

SEQ ID NO: 1901522 - DNA, 25 bp, Homo sapien
ggtgttgggtgccttcaatgtgaaa

SEQ ID NO: 1901523 - DNA, 25 bp, Homo sapien
ggtatctgtcattggttgagctatg

SEQ ID NO: 1901524 - DNA, 25 bp, Homo sapien
tggatccacaattccccagaaaaga

SEQ ID NO: 1901525 - DNA, 25 bp, Homo sapien
tggttgagctatgagattattggtc

SEQ ID NO: 1901526 - DNA, 25 bp, Homo sapien
tgtccccttcgaaaatgctcagctg

SEQ ID NO: 1901527 - DNA, 25 bp, Homo sapien
tccaccgtctgttctgggcgggagt

SEQ ID NO: 1901528 - DNA, 25 bp, Homo sapien
ggctggtacgccaggctcccattct

SEQ ID NO: 1901529 - DNA, 25 bp, Homo sapien
cgggagtgtccccttcgaaaatgct

SEQ ID NO: 1901530 - DNA, 25 bp, Homo sapien
acttccataattgcttcctggcctg

SEQ ID NO: 1901531 - DNA, 25 bp, Homo sapien
cttgttcctacaggcatataggaag

SEQ ID NO: 1901532 - DNA, 25 bp, Homo sapien
tacaggcatataggaagtgaaccat

SEQ ID NO: 1901533 - DNA, 25 bp, Homo sapien
gaagtgaaccatatgccctctgatg

SEQ ID NO: 1901534 - DNA, 25 bp, Homo sapien
cagctatcactcttacacagatttg

SEQ ID NO: 1901535 - DNA, 25 bp, Homo sapien
ctcagctatcactcttacacagatt

SEQ ID NO: 1901536 - DNA, 25 bp, Homo sapien
tatcactcttacacagatttgccca

SEQ ID NO: 1901537 - DNA, 25 bp, Homo sapien
gctatcactcttacacagatttgcc

SEQ ID NO: 1901538 - DNA, 25 bp, Homo sapien
tagaggtatccacggcaaaaacttg

SEQ ID NO: 1901539 - DNA, 25 bp, Homo sapien
gaggtatccacggcaaaaacttgga

SEQ ID NO: 1901540 - DNA, 25 bp, Homo sapien
cttagaggtatccacggcaaaaact

SEQ ID NO: 1901541 - DNA, 25 bp, Homo sapien
agaggtatccacggcaaaaacttgg

SEQ ID NO: 1901542 - DNA, 25 bp, Homo sapien
gatgaatctcaatgtgcgcagcacg

SEQ ID NO: 1901543 - DNA, 25 bp, Homo sapien
gaacggttgatacgccatctctaca

SEQ ID NO: 1901544 - DNA, 25 bp, Homo sapien
gagaaggtgccaaagtcatagccac

SEQ ID NO: 1901545 - DNA, 25 bp, Homo sapien
aagatgggacgatttgcaactgcag

SEQ ID NO: 1901546 - DNA, 25 bp, Homo sapien
gtgcagcacaccatgtgcgagctga

SEQ ID NO: 1901547 - DNA, 25 bp, Homo sapien
gcagcacaccatgtgcgagctgaag

SEQ ID NO: 1901548 - DNA, 25 bp, Homo sapien
cacaccatgtgcgagctgaagcagg

SEQ ID NO: 1901549 - DNA, 25 bp, Homo sapien
agcacaccatgtgcgagctgaagca

SEQ ID NO: 1901550 - DNA, 25 bp, Homo sapien
tccacccatgactagactcgaaatc

SEQ ID NO: 1901551 - DNA, 25 bp, Homo sapien
tcagtcagacttttagcttctcctg

SEQ ID NO: 1901552 - DNA, 25 bp, Homo sapien
taaacccatggatttaacggtgatc

SEQ ID NO: 1901553 - DNA, 25 bp, Homo sapien
gagtacttgacccttacatcttcag

SEQ ID NO: 1901554 - DNA, 25 bp, Homo sapien
cagtgctagatcaccccccaccctc

SEQ ID NO: 1901555 - DNA, 25 bp, Homo sapien
ccagtgctagatcaccccccaccct

SEQ ID NO: 1901556 - DNA, 25 bp, Homo sapien
agtgctagatcaccccccaccctct

SEQ ID NO: 1901557 - DNA, 25 bp, Homo sapien
accagtgctagatcaccccccaccc

SEQ ID NO: 1901558 - DNA, 25 bp, Homo sapien
taagtgtttccaggtggtgtccgcc

SEQ ID NO: 1901559 - DNA, 25 bp, Homo sapien
gagtaaatgtatcagggccagaccc

SEQ ID NO: 1901560 - DNA, 25 bp, Homo sapien
caaggcattctagatcaagtggtcc

SEQ ID NO: 1901561 - DNA, 25 bp, Homo sapien
ggtgctacgcctaaagactccttgt

SEQ ID NO: 1901562 - DNA, 25 bp, Homo sapien
gaagcctttagccttatttctgtaa

SEQ ID NO: 1901563 - DNA, 25 bp, Homo sapien
cagtaaatattcagagcattcctct

SEQ ID NO: 1901564 - DNA, 25 bp, Homo sapien
tgtcacccctactgaagcagaagcc

SEQ ID NO: 1901565 - DNA, 25 bp, Homo sapien
gtttagccaccattaactaacatgg

SEQ ID NO: 1901566 - DNA, 25 bp, Homo sapien
caaggctaacgttgctggttccagc

SEQ ID NO: 1901567 - DNA, 25 bp, Homo sapien
caagttccttgcttcggcgaaagca

SEQ ID NO: 1901568 - DNA, 25 bp, Homo sapien
gaggaggtcaccctgtcagctccaa

SEQ ID NO: 1901569 - DNA, 25 bp, Homo sapien
tgtaatcatctctaactggcaaggc

SEQ ID NO: 1901570 - DNA, 25 bp, Homo sapien
catgaggcttttttaggcaatggca

SEQ ID NO: 1901571 - DNA, 25 bp, Homo sapien
cgaagtcagaccttgagagatgggc

SEQ ID NO: 1901572 - DNA, 25 bp, Homo sapien
tacaaccagtgtagatcccagggcc

SEQ ID NO: 1901573 - DNA, 25 bp, Homo sapien
caaaagcgaagtaggattccaacca

SEQ ID NO: 1901574 - DNA, 25 bp, Homo sapien
aaagccacagtggtataatggaaag

SEQ ID NO: 1901575 - DNA, 25 bp, Homo sapien
caagggcaaggtggtataatagaaa

SEQ ID NO: 1901576 - DNA, 25 bp, Homo sapien
taatggaaagaaccatcaagggcaa

SEQ ID NO: 1901577 - DNA, 25 bp, Homo sapien
ttataagacaacaaagccacagtgg

SEQ ID NO: 1901578 - DNA, 25 bp, Homo sapien
ccttcaaataagtatgtatgtgaca

SEQ ID NO: 1901579 - DNA, 25 bp, Homo sapien
cccttcaaataagtatgtatgtgac

SEQ ID NO: 1901580 - DNA, 25 bp, Homo sapien
gcccttcaaataagtatgtatgtga

SEQ ID NO: 1901581 - DNA, 25 bp, Homo sapien
ctgcccttcaaataagtatgtatgt

SEQ ID NO: 1901582 - DNA, 25 bp, Homo sapien
tgttccaggtccgtgattagtctcc

SEQ ID NO: 1901583 - DNA, 25 bp, Homo sapien
tgattcaagtccaagttgttccagg

SEQ ID NO: 1901584 - DNA, 25 bp, Homo sapien
taacaccacagtatacatgggcagg

SEQ ID NO: 1901585 - DNA, 25 bp, Homo sapien
tcacttgaggagtagactgcagtct

SEQ ID NO: 1901586 - DNA, 25 bp, Homo sapien
tctaacttagggtatctcagcacgt

SEQ ID NO: 1901587 - DNA, 25 bp, Homo sapien
taggcaacgtaacactctggagtca

SEQ ID NO: 1901588 - DNA, 25 bp, Homo sapien
tagtcacacagaaatgccaccagtt

SEQ ID NO: 1901589 - DNA, 25 bp, Homo sapien
taaagcgccgtacgaatgttaccac

SEQ ID NO: 1901590 - DNA, 25 bp, Homo sapien
gaaaactctgccaagcacgaagatc

SEQ ID NO: 1901591 - DNA, 25 bp, Homo sapien
aagatctcctcccagctcggatgga

SEQ ID NO: 1901592 - DNA, 25 bp, Homo sapien
tcattacttcaaatcctggtggagg

SEQ ID NO: 1901593 - DNA, 25 bp, Homo sapien
taaagtacaagcagccaccgtaaaa

SEQ ID NO: 1901594 - DNA, 25 bp, Homo sapien
caaagagtgagtgtccagtaaaatc

SEQ ID NO: 1901595 - DNA, 25 bp, Homo sapien
ccatgtccacatccgaatcaaagag

SEQ ID NO: 1901596 - DNA, 25 bp, Homo sapien
ctgttcgtggtctgtatagtcatcc

SEQ ID NO: 1901597 - DNA, 25 bp, Homo sapien
tacatggcaaggttgatcagctcac

SEQ ID NO: 1901598 - DNA, 25 bp, Homo sapien
tgaaacgcctcaccaggtattgctg

SEQ ID NO: 1901599 - DNA, 25 bp, Homo sapien
gggaccaagaattgaataaagatgt

SEQ ID NO: 1901600 - DNA, 25 bp, Homo sapien
ccaggtattgctgccaatcccaggg

SEQ ID NO: 1901601 - DNA, 25 bp, Homo sapien
gggacagtcatgaaacgcctcacca

SEQ ID NO: 1901602 - DNA, 25 bp, Homo sapien
gttgaattcatattaacctcgttag

SEQ ID NO: 1901603 - DNA, 25 bp, Homo sapien
ctgttgaattcatattaacctcgtt

SEQ ID NO: 1901604 - DNA, 25 bp, Homo sapien
tcatattaacctcgttagtcctcat

SEQ ID NO: 1901605 - DNA, 25 bp, Homo sapien
gaattcatattaacctcgttagtcc

SEQ ID NO: 1901606 - DNA, 25 bp, Homo sapien
tgggaattaatagtattgcactacc

SEQ ID NO: 1901607 - DNA, 25 bp, Homo sapien
tggcctgggaattaatagtattgca

SEQ ID NO: 1901608 - DNA, 25 bp, Homo sapien
agcatggcctgggaattaatagtat

SEQ ID NO: 1901609 - DNA, 25 bp, Homo sapien
acctccactcaactctctactgatg

SEQ ID NO: 1901610 - DNA, 25 bp, Homo sapien
atcagctgagccacttaacatgcta

SEQ ID NO: 1901611 - DNA, 25 bp, Homo sapien
catcagctgagccacttaacatgct

SEQ ID NO: 1901612 - DNA, 25 bp, Homo sapien
gctgctggcgtcagcctggtctaac

SEQ ID NO: 1901613 - DNA, 25 bp, Homo sapien
agaaaaccttcgatcaatgcctgac

SEQ ID NO: 1901614 - DNA, 25 bp, Homo sapien
taatgtatctggagctctgtcccca

SEQ ID NO: 1901615 - DNA, 25 bp, Homo sapien
tgtccccaccaataagaggatctgg

SEQ ID NO: 1901616 - DNA, 25 bp, Homo sapien
gtttagactcagagcatctgaaaca

SEQ ID NO: 1901617 - DNA, 25 bp, Homo sapien
gcatctgaaacagccagtgagttca

SEQ ID NO: 1901618 - DNA, 25 bp, Homo sapien
cgtcagcccaccgtagttgatgtag

SEQ ID NO: 1901619 - DNA, 25 bp, Homo sapien
tacatgtgcaacatcgaaaaacagt

SEQ ID NO: 1901620 - DNA, 25 bp, Homo sapien
aagccccaaaacctgaagaagagtg

SEQ ID NO: 1901621 - DNA, 25 bp, Homo sapien
cagtaagccccaaaacctgaagaag

SEQ ID NO: 1901622 - DNA, 25 bp, Homo sapien
caagagtggaaagcttgggccccat

SEQ ID NO: 1901623 - DNA, 25 bp, Homo sapien
tgtccctggtaaggtccacattgcc

SEQ ID NO: 1901624 - DNA, 25 bp, Homo sapien
aagtgtccaaagacagtggcgtcaa

SEQ ID NO: 1901625 - DNA, 25 bp, Homo sapien
tcagccgttcgggtcttgtccctgg

SEQ ID NO: 1901626 - DNA, 25 bp, Homo sapien
aagtcaatgggctggcccacactgc

SEQ ID NO: 1901627 - DNA, 25 bp, Homo sapien
cccagcacaatttatgcctccaact

SEQ ID NO: 1901628 - DNA, 25 bp, Homo sapien
cagcacaatttatgcctccaactgc

SEQ ID NO: 1901629 - DNA, 25 bp, Homo sapien
cacaatttatgcctccaactgctac

SEQ ID NO: 1901630 - DNA, 25 bp, Homo sapien
tccccagcacaatttatgcctccaa

SEQ ID NO: 1901631 - DNA, 25 bp, Homo sapien
cctcacctgagtaacgacgacagat

SEQ ID NO: 1901632 - DNA, 25 bp, Homo sapien
gttgcaaaaatagcacagtgtgtct

SEQ ID NO: 1901633 - DNA, 25 bp, Homo sapien
aatcctaatggttcggtttctctga

SEQ ID NO: 1901634 - DNA, 25 bp, Homo sapien
tgtgtgagccaactccatataataa

SEQ ID NO: 1901635 - DNA, 25 bp, Homo sapien
tcctccactgcatgaaggcttccca

SEQ ID NO: 1901636 - DNA, 25 bp, Homo sapien
ggtcccagtctactggaacctctca

SEQ ID NO: 1901637 - DNA, 25 bp, Homo sapien
cccacacggtcccagtctactggaa

SEQ ID NO: 1901638 - DNA, 25 bp, Homo sapien
ctgcatgaaggcttcccacacggtc

SEQ ID NO: 1901639 - DNA, 25 bp, Homo sapien
ggcatctctatgaggtgctgttgca

SEQ ID NO: 1901640 - DNA, 25 bp, Homo sapien
gccaagacttgaaggcctaatgtgg

SEQ ID NO: 1901641 - DNA, 25 bp, Homo sapien
gttgtaagcaagcagcttctggcca

SEQ ID NO: 1901642 - DNA, 25 bp, Homo sapien
tcatagaaggtatgagtgtgtggct

SEQ ID NO: 1901643 - DNA, 25 bp, Homo sapien
tcttcctcggagaagcggccaatgc

SEQ ID NO: 1901644 - DNA, 25 bp, Homo sapien
caattcctttcgttatgtggcacac

SEQ ID NO: 1901645 - DNA, 25 bp, Homo sapien
tcattgagattgtccacccactggc

SEQ ID NO: 1901646 - DNA, 25 bp, Homo sapien
aaaagccctgctaaagaccgcatgt

SEQ ID NO: 1901647 - DNA, 25 bp, Homo sapien
gaagagcatcagctgcctgacgaac

SEQ ID NO: 1901648 - DNA, 25 bp, Homo sapien
cgaactgcaagaacttctgtaaggg

SEQ ID NO: 1901649 - DNA, 25 bp, Homo sapien
gcctgacgaactgcaagaacttctg

SEQ ID NO: 1901650 - DNA, 25 bp, Homo sapien
tcagctgcctgacgaactgcaagaa

SEQ ID NO: 1901651 - DNA, 25 bp, Homo sapien
gaggtcaccttaggaagtctctaga

SEQ ID NO: 1901652 - DNA, 25 bp, Homo sapien
ctgtagcatttgaaggtcccatgga

SEQ ID NO: 1901653 - DNA, 25 bp, Homo sapien
gacaggtttagactccagatagaga

SEQ ID NO: 1901654 - DNA, 25 bp, Homo sapien
catggaacccctaagtgaagatgtc

SEQ ID NO: 1901655 - DNA, 25 bp, Homo sapien
ccaccccgcatggagtatcagctcg

SEQ ID NO: 1901656 - DNA, 25 bp, Homo sapien
accccgcatggagtatcagctcggg

SEQ ID NO: 1901657 - DNA, 25 bp, Homo sapien
ctccaccccgcatggagtatcagct

SEQ ID NO: 1901658 - DNA, 25 bp, Homo sapien
cactccaccccgcatggagtatcag

SEQ ID NO: 1901659 - DNA, 25 bp, Homo sapien
gtctgattacttccacactaatctg

SEQ ID NO: 1901660 - DNA, 25 bp, Homo sapien
tgagtctgattacttccacactaat

SEQ ID NO: 1901661 - DNA, 25 bp, Homo sapien
gattacttccacactaatctgtacc

SEQ ID NO: 1901662 - DNA, 25 bp, Homo sapien
tgattacttccacactaatctgtac

SEQ ID NO: 1901663 - DNA, 25 bp, Homo sapien
agtcaattatgaattctgtgccaga

SEQ ID NO: 1901664 - DNA, 25 bp, Homo sapien
ctttcatgagggccaaggtttttgt

SEQ ID NO: 1901665 - DNA, 25 bp, Homo sapien
agaaagtcaattatgaattctgtgc

SEQ ID NO: 1901666 - DNA, 25 bp, Homo sapien
caccatcttggtcaccgctctggag

SEQ ID NO: 1901667 - DNA, 25 bp, Homo sapien
gagcagagagttttccaccaaaata

SEQ ID NO: 1901668 - DNA, 25 bp, Homo sapien
tttcccttgagcagagagttttcca

SEQ ID NO: 1901669 - DNA, 25 bp, Homo sapien
tgagcagagagttttccaccaaaat

SEQ ID NO: 1901670 - DNA, 25 bp, Homo sapien
cagagagttttccaccaaaatagtt

SEQ ID NO: 1901671 - DNA, 25 bp, Homo sapien
cattcacgatctaggtaaagggcat

SEQ ID NO: 1901672 - DNA, 25 bp, Homo sapien
tgataataatctccagctcgtagga

SEQ ID NO: 1901673 - DNA, 25 bp, Homo sapien
ggcagacagctccaaaggaaacatt

SEQ ID NO: 1901674 - DNA, 25 bp, Homo sapien
catcaaaagttagggctgacagctg

SEQ ID NO: 1901675 - DNA, 25 bp, Homo sapien
ggaacaccattgttaggtcttgcaa

SEQ ID NO: 1901676 - DNA, 25 bp, Homo sapien
tttagagtcaatctcttgctgtttc

SEQ ID NO: 1901677 - DNA, 25 bp, Homo sapien
gatacggtaagtcagccatccttaa

SEQ ID NO: 1901678 - DNA, 25 bp, Homo sapien
aaaggagataaacttggaacaccat

SEQ ID NO: 1901679 - DNA, 25 bp, Homo sapien
ctaatgaccaggagttcgtggagca

SEQ ID NO: 1901680 - DNA, 25 bp, Homo sapien
gcagatacgcagctgcggccagcaa

SEQ ID NO: 1901681 - DNA, 25 bp, Homo sapien
agatacgcagctgcggccagcaaag

SEQ ID NO: 1901682 - DNA, 25 bp, Homo sapien
caggagttcgtggagcagatacgca

SEQ ID NO: 1901683 - DNA, 25 bp, Homo sapien
ctgcaaagggaaagcgatgatgtcc

SEQ ID NO: 1901684 - DNA, 25 bp, Homo sapien
caccagccgaagaaggagatgctct

SEQ ID NO: 1901685 - DNA, 25 bp, Homo sapien
gatgatgtccccataaaaggagaag

SEQ ID NO: 1901686 - DNA, 25 bp, Homo sapien
gaaagcgatgatgtccccataaaag

SEQ ID NO: 1901687 - DNA, 25 bp, Homo sapien
gcctggacgaagcaaagccaacccc

SEQ ID NO: 1901688 - DNA, 25 bp, Homo sapien
ggcctggacgaagcaaagccaaccc

SEQ ID NO: 1901689 - DNA, 25 bp, Homo sapien
gctgcgcggctggctccgggcgccc

SEQ ID NO: 1901690 - DNA, 25 bp, Homo sapien
ctcccagggcccgcgccgcccgcat

SEQ ID NO: 1901691 - DNA, 25 bp, Homo sapien
ctgcctctccgccccgctctttgtg

SEQ ID NO: 1901692 - DNA, 25 bp, Homo sapien
cctggagaaggccgcgtgatgtcat

SEQ ID NO: 1901693 - DNA, 25 bp, Homo sapien
ccgcgccctgccccctccccgcatc

SEQ ID NO: 1901694 - DNA, 25 bp, Homo sapien
cccgcgccctgccccctccccgcat

SEQ ID NO: 1901695 - DNA, 25 bp, Homo sapien
gctgcgggcaggagacgccaccagg

SEQ ID NO: 1901696 - DNA, 25 bp, Homo sapien
ctgcgggcaggagacgccaccaggc

SEQ ID NO: 1901697 - DNA, 25 bp, Homo sapien
tgcgggcaggagacgccaccaggcg

SEQ ID NO: 1901698 - DNA, 25 bp, Homo sapien
aagtagctattagacgaaataacaa

SEQ ID NO: 1901699 - DNA, 25 bp, Homo sapien
gtagctattagacgaaataacaaaa

SEQ ID NO: 1901700 - DNA, 25 bp, Homo sapien
cttgaaagtagctattagacgaaat

SEQ ID NO: 1901701 - DNA, 25 bp, Homo sapien
gaaagtagctattagacgaaataac

SEQ ID NO: 1901702 - DNA, 25 bp, Homo sapien
gaaaacatcagatatccaagccata

SEQ ID NO: 1901703 - DNA, 25 bp, Homo sapien
tctctctcaaaggataaattgtaca

SEQ ID NO: 1901704 - DNA, 25 bp, Homo sapien
ccaagccatattactatagttctca

SEQ ID NO: 1901705 - DNA, 25 bp, Homo sapien
catattactatagttctcagaaaca

SEQ ID NO: 1901706 - DNA, 25 bp, Homo sapien
gctggattggtgcaggcattagctt

SEQ ID NO: 1901707 - DNA, 25 bp, Homo sapien
ttggtgcaggcattagcttggagct

SEQ ID NO: 1901708 - DNA, 25 bp, Homo sapien
cttcagcttttcatgcacagctgga

SEQ ID NO: 1901709 - DNA, 25 bp, Homo sapien
aggcattagcttggagctcttctgt

SEQ ID NO: 1901710 - DNA, 25 bp, Homo sapien
gggttatagagcattcctaccactg

SEQ ID NO: 1901711 - DNA, 25 bp, Homo sapien
gcataagctgcatagttaaggctgg

SEQ ID NO: 1901712 - DNA, 25 bp, Homo sapien
taccactgtttgaactgacagacca

SEQ ID NO: 1901713 - DNA, 25 bp, Homo sapien
gaccctggatttcacagcataagct

SEQ ID NO: 1901714 - DNA, 25 bp, Homo sapien
tgattccagaatgctctctagtgtt

SEQ ID NO: 1901715 - DNA, 25 bp, Homo sapien
gtaccttttggtacaatacttgcaa

SEQ ID NO: 1901716 - DNA, 25 bp, Homo sapien
ttgattccagaatgctctctagtgt

SEQ ID NO: 1901717 - DNA, 25 bp, Homo sapien
aacttctcccatgtatgagtacctt

SEQ ID NO: 1901718 - DNA, 25 bp, Homo sapien
ggaaagttgtgttttgttgattgta

SEQ ID NO: 1901719 - DNA, 25 bp, Homo sapien
aaacaattcccaaggcataggaaag

SEQ ID NO: 1901720 - DNA, 25 bp, Homo sapien
aattcccaaggcataggaaagttgt

SEQ ID NO: 1901721 - DNA, 25 bp, Homo sapien
gaaagttgtgttttgttgattgtag

SEQ ID NO: 1901722 - DNA, 25 bp, Homo sapien
gccggccgtggtgacttacaaactg

SEQ ID NO: 1901723 - DNA, 25 bp, Homo sapien
taaagagaacaacatgagcaccagg

SEQ ID NO: 1901724 - DNA, 25 bp, Homo sapien
aaaatataaagagtggccggccgtg

SEQ ID NO: 1901725 - DNA, 25 bp, Homo sapien
taactcgtttgttacagcacagagc

SEQ ID NO: 1901726 - DNA, 25 bp, Homo sapien
aaaatgtttctagatcaatcacatg

SEQ ID NO: 1901727 - DNA, 25 bp, Homo sapien
tctcttatccaggactggatcaaat

SEQ ID NO: 1901728 - DNA, 25 bp, Homo sapien
cagggaacacactctgtactctatt

SEQ ID NO: 1901729 - DNA, 25 bp, Homo sapien
caatcacatgttctacaacttcaga

SEQ ID NO: 1901730 - DNA, 25 bp, Homo sapien
ccacagccaacgtcaagaatcttca

SEQ ID NO: 1901731 - DNA, 25 bp, Homo sapien
caccacagccaacgtcaagaatctt

SEQ ID NO: 1901732 - DNA, 25 bp, Homo sapien
cacagccaacgtcaagaatcttcat

SEQ ID NO: 1901733 - DNA, 25 bp, Homo sapien
caccaccacagccaacgtcaagaat

SEQ ID NO: 1901734 - DNA, 25 bp, Homo sapien
gctggtgattaggaattgttttcag

SEQ ID NO: 1901735 - DNA, 25 bp, Homo sapien
tggctggtgattaggaattgttttc

SEQ ID NO: 1901736 - DNA, 25 bp, Homo sapien
ggctggtgattaggaattgttttca

SEQ ID NO: 1901737 - DNA, 25 bp, Homo sapien
ctggctggtgattaggaattgtttt

SEQ ID NO: 1901738 - DNA, 25 bp, Homo sapien
gagatatcatgacacacgttttggc

SEQ ID NO: 1901739 - DNA, 25 bp, Homo sapien
gcagatgggagacctatattttcag

SEQ ID NO: 1901740 - DNA, 25 bp, Homo sapien
tgtatgagcatgtaaacaggcatct

SEQ ID NO: 1901741 - DNA, 25 bp, Homo sapien
tatcaacgaaaagtcacaaagtgtg

SEQ ID NO: 1901742 - DNA, 25 bp, Homo sapien
gcttttctaattcatcacgttaagt

SEQ ID NO: 1901743 - DNA, 25 bp, Homo sapien
gaattctcacgttaagtgagaatgg

SEQ ID NO: 1901744 - DNA, 25 bp, Homo sapien
tcgcccctcatactaaatcttaatg

SEQ ID NO: 1901745 - DNA, 25 bp, Homo sapien
taagtgagaatggtgtccagttttc

SEQ ID NO: 1901746 - DNA, 25 bp, Homo sapien
taataaatggcaccctcaggtcatt

SEQ ID NO: 1901747 - DNA, 25 bp, Homo sapien
tgaagaggtgcatatactccttgtt

SEQ ID NO: 1901748 - DNA, 25 bp, Homo sapien
gttcatcccaccatttgtgagccag

SEQ ID NO: 1901749 - DNA, 25 bp, Homo sapien
ctaataaatggcaccctcaggtcat

SEQ ID NO: 1901750 - DNA, 25 bp, Homo sapien
tactgtacagtctcgcccaagggta

SEQ ID NO: 1901751 - DNA, 25 bp, Homo sapien
ttgggaagtactgtacagtctcgcc

SEQ ID NO: 1901752 - DNA, 25 bp, Homo sapien
accgctgtcgacagtggtttgggaa

SEQ ID NO: 1901753 - DNA, 25 bp, Homo sapien
ctcaccgctgtcgacagtggtttgg

SEQ ID NO: 1901754 - DNA, 25 bp, Homo sapien
attagctggctgtggtggcgggcac

SEQ ID NO: 1901755 - DNA, 25 bp, Homo sapien
aaaattagctggctgtggtggcggg

SEQ ID NO: 1901756 - DNA, 25 bp, Homo sapien
caagagtgaaactcttgtcacaaaa

SEQ ID NO: 1901757 - DNA, 25 bp, Homo sapien
aagagtgaaactcttgtcacaaaaa

SEQ ID NO: 1901758 - DNA, 25 bp, Homo sapien
cccgggaggtggaggttgcagtgag

SEQ ID NO: 1901759 - DNA, 25 bp, Homo sapien
atcccaatgactcgggaggctcagg

SEQ ID NO: 1901760 - DNA, 25 bp, Homo sapien
caggagaatcgcttgaacccgggag

SEQ ID NO: 1901761 - DNA, 25 bp, Homo sapien
ccaagatcgcaccattgtactccag

SEQ ID NO: 1901762 - DNA, 25 bp, Homo sapien
aaacaggaaaagatcgtcctgtagg

SEQ ID NO: 1901763 - DNA, 25 bp, Homo sapien
tcctgtaggatttgaaccatatggt

SEQ ID NO: 1901764 - DNA, 25 bp, Homo sapien
gtttaatctgtagagtcccactgag

SEQ ID NO: 1901765 - DNA, 25 bp, Homo sapien
accatatggttctgtattcattgaa

SEQ ID NO: 1901766 - DNA, 25 bp, Homo sapien
aaagattacaggccgcacagtggct

SEQ ID NO: 1901767 - DNA, 25 bp, Homo sapien
caaagattacaggccgcacagtggc

SEQ ID NO: 1901768 - DNA, 25 bp, Homo sapien
cgccgaggaaattaagggacgcgca

SEQ ID NO: 1901769 - DNA, 25 bp, Homo sapien
ggaggagcccagcttacggccactc

SEQ ID NO: 1901770 - DNA, 25 bp, Homo sapien
gcagcttttgtattacagcctccag

SEQ ID NO: 1901771 - DNA, 25 bp, Homo sapien
gggacgcgcagcttttgtattacag

SEQ ID NO: 1901772 - DNA, 25 bp, Homo sapien
cgcgacaaacgatcccacctctttt

SEQ ID NO: 1901773 - DNA, 25 bp, Homo sapien
caaaaatgtgcatatcatagccaac

SEQ ID NO: 1901774 - DNA, 25 bp, Homo sapien
tttgcattcacatcctaaatcatgg

SEQ ID NO: 1901775 - DNA, 25 bp, Homo sapien
taatcacaaatatcatgacggcttt

SEQ ID NO: 1901776 - DNA, 25 bp, Homo sapien
gataagcttgcaaattacggcagag

SEQ ID NO: 1901777 - DNA, 25 bp, Homo sapien
tccagatgtgatcgatgtctaaact

SEQ ID NO: 1901778 - DNA, 25 bp, Homo sapien
taattctgcaattaggtacactgtg

SEQ ID NO: 1901779 - DNA, 25 bp, Homo sapien
gttagctcgcctacataaaaaatat

SEQ ID NO: 1901780 - DNA, 25 bp, Homo sapien
cacttcaagattgatctaaaaaaca

SEQ ID NO: 1901781 - DNA, 25 bp, Homo sapien
caaataactctactggtgcactggc

SEQ ID NO: 1901782 - DNA, 25 bp, Homo sapien
tggaccctaaagcaactgagttaaa

SEQ ID NO: 1901783 - DNA, 25 bp, Homo sapien
taaagttggaatctggcaaaagtcc

SEQ ID NO: 1901784 - DNA, 25 bp, Homo sapien
tagaggtacaagagcacactataca

SEQ ID NO: 1901785 - DNA, 25 bp, Homo sapien
cagcattggaaaaagtacacctatt

SEQ ID NO: 1901786 - DNA, 25 bp, Homo sapien
tcctattaagtaacttggagcagca

SEQ ID NO: 1901787 - DNA, 25 bp, Homo sapien
cattacagctgaaagagaatggcat

SEQ ID NO: 1901788 - DNA, 25 bp, Homo sapien
gagacaagcccttaaaactcatgga

SEQ ID NO: 1901789 - DNA, 25 bp, Homo sapien
tctaacatttaagactatgattatt

SEQ ID NO: 1901790 - DNA, 25 bp, Homo sapien
ttctaacatttaagactatgattat

SEQ ID NO: 1901791 - DNA, 25 bp, Homo sapien
ttatataggatttctaacatttaag

SEQ ID NO: 1901792 - DNA, 25 bp, Homo sapien
aataatattatataggatttctaac

SEQ ID NO: 1901793 - DNA, 25 bp, Homo sapien
tcaagtaccaaactgagtttattaa

SEQ ID NO: 1901794 - DNA, 25 bp, Homo sapien
agagagagaaaggacactttcaact

SEQ ID NO: 1901795 - DNA, 25 bp, Homo sapien
gaaaggacactttcaactttgaata

SEQ ID NO: 1901796 - DNA, 25 bp, Homo sapien
taccaaactgagtttattaaagaga

SEQ ID NO: 1901797 - DNA, 25 bp, Homo sapien
tttgagatttctccacggatcgcga

SEQ ID NO: 1901798 - DNA, 25 bp, Homo sapien
cggatcgcgatcgactatgtttagg

SEQ ID NO: 1901799 - DNA, 25 bp, Homo sapien
tgccttcttaccagacctttgagat

SEQ ID NO: 1901800 - DNA, 25 bp, Homo sapien
cttagacttgtgtttgcggcttgcc

SEQ ID NO: 1901801 - DNA, 25 bp, Homo sapien
tggtagtacttttcttactatcctg

SEQ ID NO: 1901802 - DNA, 25 bp, Homo sapien
ctgaatgttttttactatctttggt

SEQ ID NO: 1901803 - DNA, 25 bp, Homo sapien
tacttttcttactatcctgtctaga

SEQ ID NO: 1901804 - DNA, 25 bp, Homo sapien
tcttactatcctgtctagaatcatg

SEQ ID NO: 1901805 - DNA, 25 bp, Homo sapien
ttatctatacttcgactcctctcct

SEQ ID NO: 1901806 - DNA, 25 bp, Homo sapien
catcctgactactgaacttaaaatc

SEQ ID NO: 1901807 - DNA, 25 bp, Homo sapien
atcctgttcacgttccctttctttg

SEQ ID NO: 1901808 - DNA, 25 bp, Homo sapien
tatagaaccactcctagaaaatgtt

SEQ ID NO: 1901809 - DNA, 25 bp, Homo sapien
tctctcgggaaggactccgatttcg

SEQ ID NO: 1901810 - DNA, 25 bp, Homo sapien
gattggttcgtctatcccttgagcg

SEQ ID NO: 1901811 - DNA, 25 bp, Homo sapien
tactgcgactggcacgattggttcg

SEQ ID NO: 1901812 - DNA, 25 bp, Homo sapien
tctgcgagaatagcttctactcctg

SEQ ID NO: 1901813 - DNA, 25 bp, Homo sapien
aagaccgagaagaagtacgactact

SEQ ID NO: 1901814 - DNA, 25 bp, Homo sapien
gagaagaagaccgagaagaagtacg

SEQ ID NO: 1901815 - DNA, 25 bp, Homo sapien
gaagaagaccgagaagaagtacgac

SEQ ID NO: 1901816 - DNA, 25 bp, Homo sapien
gaccgagaagaagtacgactactac

SEQ ID NO: 1901817 - DNA, 25 bp, Homo sapien
ctagagacagtactactagtactac

SEQ ID NO: 1901818 - DNA, 25 bp, Homo sapien
tggaactaccactactagaacttcc

SEQ ID NO: 1901819 - DNA, 25 bp, Homo sapien
agtactactagttctgctattgcta

SEQ ID NO: 1901820 - DNA, 25 bp, Homo sapien
tattgctactggaactaccactact

SEQ ID NO: 1901821 - DNA, 25 bp, Homo sapien
aactattttgctctttatggataaa

SEQ ID NO: 1901822 - DNA, 25 bp, Homo sapien
tattttgctctttatggataaattc

SEQ ID NO: 1901823 - DNA, 25 bp, Homo sapien
tcattaaccacatcaccgtctgctt

SEQ ID NO: 1901824 - DNA, 25 bp, Homo sapien
ataaactattttgctctttatggat

SEQ ID NO: 1901825 - DNA, 25 bp, Homo sapien
cactgcaataaatggctcctaaaac

SEQ ID NO: 1901826 - DNA, 25 bp, Homo sapien
caatagaattacgatgcaagccatg

SEQ ID NO: 1901827 - DNA, 25 bp, Homo sapien
taccaaatgtcaagctaccagactg

SEQ ID NO: 1901828 - DNA, 25 bp, Homo sapien
taccagactgtaacaatagaacacc

SEQ ID NO: 1901829 - DNA, 25 bp, Homo sapien
tgtttttgccggattcgatgccgta

SEQ ID NO: 1901830 - DNA, 25 bp, Homo sapien
tgtctcctgatccataaccacccag

SEQ ID NO: 1901831 - DNA, 25 bp, Homo sapien
tcagtgtcagatgactcagatcctc

SEQ ID NO: 1901832 - DNA, 25 bp, Homo sapien
tctgtttatcatgtaatagctgctg

SEQ ID NO: 1901833 - DNA, 25 bp, Homo sapien
tattatggtgctgaaaatactcccc

SEQ ID NO: 1901834 - DNA, 25 bp, Homo sapien
taacagggcagtaacaaagccacgc

SEQ ID NO: 1901835 - DNA, 25 bp, Homo sapien
ttaggccctctcacaaatatggaaa

SEQ ID NO: 1901836 - DNA, 25 bp, Homo sapien
caaacgcttaaggagttcacagaac

SEQ ID NO: 1901837 - DNA, 25 bp, Homo sapien
gaagccagtgcactggactgtgcca

SEQ ID NO: 1901838 - DNA, 25 bp, Homo sapien
tgtactcatgtaggtcagataaaac

SEQ ID NO: 1901839 - DNA, 25 bp, Homo sapien
aaatagccacgatttcatagtcatg

SEQ ID NO: 1901840 - DNA, 25 bp, Homo sapien
gaaattataactctgatgtgagctg

SEQ ID NO: 1901841 - DNA, 25 bp, Homo sapien
gggtaggaaatcacttgcttctgta

SEQ ID NO: 1901842 - DNA, 25 bp, Homo sapien
ttcaaatatctggtagaaatccaac

SEQ ID NO: 1901843 - DNA, 25 bp, Homo sapien
caaatatctggtagaaatccaacaa

SEQ ID NO: 1901844 - DNA, 25 bp, Homo sapien
tcaaatatctggtagaaatccaaca

SEQ ID NO: 1901845 - DNA, 25 bp, Homo sapien
ttctgttagaagcatttttgtcagc

SEQ ID NO: 1901846 - DNA, 25 bp, Homo sapien
ttagaagcatttttgtcagcaacat

SEQ ID NO: 1901847 - DNA, 25 bp, Homo sapien
ctttcgttgctttgcggtgtgcatc

SEQ ID NO: 1901848 - DNA, 25 bp, Homo sapien
catctttggctacgtaataaatttc

SEQ ID NO: 1901849 - DNA, 25 bp, Homo sapien
tactaggattaccccagcctgaaat

SEQ ID NO: 1901850 - DNA, 25 bp, Homo sapien
agtactaggattaccccagcctgaa

SEQ ID NO: 1901851 - DNA, 25 bp, Homo sapien
gtactaggattaccccagcctgaaa

SEQ ID NO: 1901852 - DNA, 25 bp, Homo sapien
ctaggattaccccagcctgaaatca

SEQ ID NO: 1901853 - DNA, 25 bp, Homo sapien
tctggtgactttcccactacttgca

SEQ ID NO: 1901854 - DNA, 25 bp, Homo sapien
tttcccactacttgcagcctcaaca

SEQ ID NO: 1901855 - DNA, 25 bp, Homo sapien
tggtgactttcccactacttgcagc

SEQ ID NO: 1901856 - DNA, 25 bp, Homo sapien
gactttcccactacttgcagcctca

SEQ ID NO: 1901857 - DNA, 25 bp, Homo sapien
aatttacttctctgaggtaaacgag

SEQ ID NO: 1901858 - DNA, 25 bp, Homo sapien
atttacttctctgaggtaaacgagg

SEQ ID NO: 1901859 - DNA, 25 bp, Homo sapien
ttacttctctgaggtaaacgagggc

SEQ ID NO: 1901860 - DNA, 25 bp, Homo sapien
ttttttcaagaccttcgcgaatcca

SEQ ID NO: 1901861 - DNA, 25 bp, Homo sapien
ttcgcgaatccaagcgggaagagtc

SEQ ID NO: 1901862 - DNA, 25 bp, Homo sapien
cttttttggacaattgtgaacgttg

SEQ ID NO: 1901863 - DNA, 25 bp, Homo sapien
caagcgggaagagtcctgcgtttta

SEQ ID NO: 1901864 - DNA, 25 bp, Homo sapien
gtgcttacaatctgccaggacacaa

SEQ ID NO: 1901865 - DNA, 25 bp, Homo sapien
tgtttcacgtgggaaaaatatacgc

SEQ ID NO: 1901866 - DNA, 25 bp, Homo sapien
ttgtcacttgaaataggctggctct

SEQ ID NO: 1901867 - DNA, 25 bp, Homo sapien
ttttagtaacagcagggaccactgc

SEQ ID NO: 1901868 - DNA, 25 bp, Homo sapien
tgcaataggtgaacgctgacgatcc

SEQ ID NO: 1901869 - DNA, 25 bp, Homo sapien
gatccctgaatgatgatggcctttc

SEQ ID NO: 1901870 - DNA, 25 bp, Homo sapien
aatttgtggaggctcctgcttcaca

SEQ ID NO: 1901871 - DNA, 25 bp, Homo sapien
tgcttcacaggaagtgcaataggtg

SEQ ID NO: 1901872 - DNA, 25 bp, Homo sapien
cctggttgccaataaggaggatgaa

SEQ ID NO: 1901873 - DNA, 25 bp, Homo sapien
ttgcggtggaccaaaagcagcccca

SEQ ID NO: 1901874 - DNA, 25 bp, Homo sapien
gaaatccaccttgcggtggaccaaa

SEQ ID NO: 1901875 - DNA, 25 bp, Homo sapien
ggtcctggttgccaataaggaggat

SEQ ID NO: 1901876 - DNA, 25 bp, Homo sapien
aatatactctctgggacacacgtgt

SEQ ID NO: 1901877 - DNA, 25 bp, Homo sapien
cacacgtgtgttatgaactgggaca

SEQ ID NO: 1901878 - DNA, 25 bp, Homo sapien
gagaggattaccatctcaaggtgaa

SEQ ID NO: 1901879 - DNA, 25 bp, Homo sapien
ccacagagttctatgtccctaggaa

SEQ ID NO: 1901880 - DNA, 25 bp, Homo sapien
taggtattcttgatgagacacttcc

SEQ ID NO: 1901881 - DNA, 25 bp, Homo sapien
tacgtgcacatctacaatattaaag

SEQ ID NO: 1901882 - DNA, 25 bp, Homo sapien
aaagtgaaacacgtatcttaggtat

SEQ ID NO: 1901883 - DNA, 25 bp, Homo sapien
ccaaagaatggattacgtgcacatc

SEQ ID NO: 1901884 - DNA, 25 bp, Homo sapien
tgatagtcaaactggttcactggcc

SEQ ID NO: 1901885 - DNA, 25 bp, Homo sapien
ctgcaaaattatcgggtggtccacc

SEQ ID NO: 1901886 - DNA, 25 bp, Homo sapien
ttcagaaggaggaacaatgtccatt

SEQ ID NO: 1901887 - DNA, 25 bp, Homo sapien
ggttaaatatatgcctgttgtcagg

SEQ ID NO: 1901888 - DNA, 25 bp, Homo sapien
gggggtgtgggggttgctgatgcat

SEQ ID NO: 1901889 - DNA, 25 bp, Homo sapien
gtgaggtttccagagtgttcccagc

SEQ ID NO: 1901890 - DNA, 25 bp, Homo sapien
gaaaggaggttatgacttcaccatc

SEQ ID NO: 1901891 - DNA, 25 bp, Homo sapien
catacccaaatgagaggctgattcc

SEQ ID NO: 1901892 - DNA, 25 bp, Homo sapien
ggaaaatcgaggcacacagaggtaa

SEQ ID NO: 1901893 - DNA, 25 bp, Homo sapien
ctgagtgccacaaagctagcagaat

SEQ ID NO: 1901894 - DNA, 25 bp, Homo sapien
caaactgagtgccacaaagctagca

SEQ ID NO: 1901895 - DNA, 25 bp, Homo sapien
aatcaaactgagtgccacaaagcta

SEQ ID NO: 1901896 - DNA, 25 bp, Homo sapien
aactgagtgccacaaagctagcaga

SEQ ID NO: 1901897 - DNA, 25 bp, Homo sapien
tgtagacatatcttgtccatttggc

SEQ ID NO: 1901898 - DNA, 25 bp, Homo sapien
ttccattgtagacatatcttgtcca

SEQ ID NO: 1901899 - DNA, 25 bp, Homo sapien
tcccatgattgtttggaccagattc

SEQ ID NO: 1901900 - DNA, 25 bp, Homo sapien
tttggaccagattccattgtagaca

SEQ ID NO: 1901901 - DNA, 25 bp, Homo sapien
ttctctttgggcaatccaagcttgg

SEQ ID NO: 1901902 - DNA, 25 bp, Homo sapien
tctctttgggcaatccaagcttggg

SEQ ID NO: 1901903 - DNA, 25 bp, Homo sapien
aagcttctctttgggcaatccaagc

SEQ ID NO: 1901904 - DNA, 25 bp, Homo sapien
gcttctctttgggcaatccaagctt

SEQ ID NO: 1901905 - DNA, 25 bp, Homo sapien
tggttcaagggccactgctgccaag

SEQ ID NO: 1901906 - DNA, 25 bp, Homo sapien
ggttcaagggccactgctgccaagg

SEQ ID NO: 1901907 - DNA, 25 bp, Homo sapien
gttgctggttcaagggccactgctg

SEQ ID NO: 1901908 - DNA, 25 bp, Homo sapien
ttgctggttcaagggccactgctgc

SEQ ID NO: 1901909 - DNA, 25 bp, Homo sapien
taggtgtctactatgctcccagaat

SEQ ID NO: 1901910 - DNA, 25 bp, Homo sapien
gggaatcatcacactagcccaactt

SEQ ID NO: 1901911 - DNA, 25 bp, Homo sapien
tcttgtcaatagcttgccagaggca

SEQ ID NO: 1901912 - DNA, 25 bp, Homo sapien
aatgtttaactgagtccaactgagc

SEQ ID NO: 1901913 - DNA, 25 bp, Homo sapien
gaaccagtgactcacataaccaggg

SEQ ID NO: 1901914 - DNA, 25 bp, Homo sapien
tcccaaggcttagttcatagcaggc

SEQ ID NO: 1901915 - DNA, 25 bp, Homo sapien
tttattccaacactgatacacaacc

SEQ ID NO: 1901916 - DNA, 25 bp, Homo sapien
cataaccagggcatggtttcttctt

SEQ ID NO: 1901917 - DNA, 25 bp, Homo sapien
tccagtcttcgcagcattcccagaa

SEQ ID NO: 1901918 - DNA, 25 bp, Homo sapien
caggtatagttctatctgcggcaga

SEQ ID NO: 1901919 - DNA, 25 bp, Homo sapien
gctaaataggttatcagagcccttg

SEQ ID NO: 1901920 - DNA, 25 bp, Homo sapien
tattgcaggatcacaaaaagtaggc

SEQ ID NO: 1901921 - DNA, 25 bp, Homo sapien
tcagaggttcaccttctgtttaaaa

SEQ ID NO: 1901922 - DNA, 25 bp, Homo sapien
gcttcgaagcatagcagcaagatta

SEQ ID NO: 1901923 - DNA, 25 bp, Homo sapien
gcatagcagcaagattatgtatgcc

SEQ ID NO: 1901924 - DNA, 25 bp, Homo sapien
tgattcagactacagcttcgaagca

SEQ ID NO: 1901925 - DNA, 25 bp, Homo sapien
gagaatgtaacatgaccacagtggt

SEQ ID NO: 1901926 - DNA, 25 bp, Homo sapien
gaagagacaagaatcccctacaaag

SEQ ID NO: 1901927 - DNA, 25 bp, Homo sapien
tacaaagccattagagagcatgccc

SEQ ID NO: 1901928 - DNA, 25 bp, Homo sapien
taatgacgggcaaggctgcaagact

SEQ ID NO: 1901929 - DNA, 25 bp, Homo sapien
ccggcaagtgcccacgtataattgt

SEQ ID NO: 1901930 - DNA, 25 bp, Homo sapien
cgttgtaatggtccggcaagtgccc

SEQ ID NO: 1901931 - DNA, 25 bp, Homo sapien
ccaagaacgttgtaatggtccggca

SEQ ID NO: 1901932 - DNA, 25 bp, Homo sapien
cccacgtataattgttctccatcac

SEQ ID NO: 1901933 - DNA, 25 bp, Homo sapien
ctctagttcgggaacacccttgtcg

SEQ ID NO: 1901934 - DNA, 25 bp, Homo sapien
tctagttcgggaacacccttgtcgc

SEQ ID NO: 1901935 - DNA, 25 bp, Homo sapien
tccaacgctttcgatgcttctactt

SEQ ID NO: 1901936 - DNA, 25 bp, Homo sapien
ggtaacacctctccaacgctttcga

SEQ ID NO: 1901937 - DNA, 25 bp, Homo sapien
tactttttaacgtagctggcgccat

SEQ ID NO: 1901938 - DNA, 25 bp, Homo sapien
gccagaaagccaagaacgtaagtgt

SEQ ID NO: 1901939 - DNA, 25 bp, Homo sapien
aagatggcgcccgatttgtctcacc

SEQ ID NO: 1901940 - DNA, 25 bp, Homo sapien
tctctactctggtcaacaccgggca

SEQ ID NO: 1901941 - DNA, 25 bp, Homo sapien
aagtttagacacaaatgggtaggca

SEQ ID NO: 1901942 - DNA, 25 bp, Homo sapien
accctcatgaatgggctgcatggaa

SEQ ID NO: 1901943 - DNA, 25 bp, Homo sapien
acccctgaaaggaagatgatcgtcc

SEQ ID NO: 1901944 - DNA, 25 bp, Homo sapien
taattgctggtgcaagaccttaccc

SEQ ID NO: 1901945 - DNA, 25 bp, Homo sapien
gcctgagtggactaagacataagca

SEQ ID NO: 1901946 - DNA, 25 bp, Homo sapien
tgataaaacattctgtcaataacgt

SEQ ID NO: 1901947 - DNA, 25 bp, Homo sapien
ctgtcaataacgtaaactgtgaaaa

SEQ ID NO: 1901948 - DNA, 25 bp, Homo sapien
tgtcaataacgtaaactgtgaaaat

SEQ ID NO: 1901949 - DNA, 25 bp, Homo sapien
tatcaaaaggcagcactggtaacct

SEQ ID NO: 1901950 - DNA, 25 bp, Homo sapien
tatataccactagatggccctgaga

SEQ ID NO: 1901951 - DNA, 25 bp, Homo sapien
tatgaccagggaactacaccgtatt

SEQ ID NO: 1901952 - DNA, 25 bp, Homo sapien
tgggactaggcatttacctggcact

SEQ ID NO: 1901953 - DNA, 25 bp, Homo sapien
caaggaatgatttgacttagccagc

SEQ ID NO: 1901954 - DNA, 25 bp, Homo sapien
agagttcaggaaggtggcattacat

SEQ ID NO: 1901955 - DNA, 25 bp, Homo sapien
ttcaggaccatttgaggaacatgct

SEQ ID NO: 1901956 - DNA, 25 bp, Homo sapien
taggaatcactgtctcaaggaatga

SEQ ID NO: 1901957 - DNA, 25 bp, Homo sapien
gaaccacctgtaagtaagtgtcact

SEQ ID NO: 1901958 - DNA, 25 bp, Homo sapien
gtgtcactaacatggacccactggc

SEQ ID NO: 1901959 - DNA, 25 bp, Homo sapien
gaaggtaggcttgtgcactaagtgc

SEQ ID NO: 1901960 - DNA, 25 bp, Homo sapien
cccactggcctgctgattcattatc

SEQ ID NO: 1901961 - DNA, 25 bp, Homo sapien
agtatgctttaggttcttactctaa

SEQ ID NO: 1901962 - DNA, 25 bp, Homo sapien
gtaagtatgctttaggttcttactc

SEQ ID NO: 1901963 - DNA, 25 bp, Homo sapien
aatgccaaattttacctgagaagcc

SEQ ID NO: 1901964 - DNA, 25 bp, Homo sapien
catattcattacaaactctatctaa

SEQ ID NO: 1901965 - DNA, 25 bp, Homo sapien
tcgagccactatgttccactatgcc

SEQ ID NO: 1901966 - DNA, 25 bp, Homo sapien
tatgttccgataatttcctggaggg

SEQ ID NO: 1901967 - DNA, 25 bp, Homo sapien
agggtgttctcactttcacataagc

SEQ ID NO: 1901968 - DNA, 25 bp, Homo sapien
cactatgccatagagaccgtagaga

SEQ ID NO: 1901969 - DNA, 25 bp, Homo sapien
tacaagtagcagagcagaatggtgc

SEQ ID NO: 1901970 - DNA, 25 bp, Homo sapien
gcagaatggtgctaaatcgagcata

SEQ ID NO: 1901971 - DNA, 25 bp, Homo sapien
ttactttacgaagactcaagccagc

SEQ ID NO: 1901972 - DNA, 25 bp, Homo sapien
gaaaatctacatgtctgtttacttt

SEQ ID NO: 1901973 - DNA, 25 bp, Homo sapien
ttagaaataaagcattgtctttgtt

SEQ ID NO: 1901974 - DNA, 25 bp, Homo sapien
agaaataaagcattgtctttgttaa

SEQ ID NO: 1901975 - DNA, 25 bp, Homo sapien
tgaaatgcaacaattagaaataaag

SEQ ID NO: 1901976 - DNA, 25 bp, Homo sapien
catttttgaaatgcaacaattagaa

SEQ ID NO: 1901977 - DNA, 25 bp, Homo sapien
cttttcaggtggagaattaggacag

SEQ ID NO: 1901978 - DNA, 25 bp, Homo sapien
aacagcagaaatgagcaattgcttc

SEQ ID NO: 1901979 - DNA, 25 bp, Homo sapien
cttcctggcattagtataaactcct

SEQ ID NO: 1901980 - DNA, 25 bp, Homo sapien
tgagcaattgcttcctggcattagt

SEQ ID NO: 1901981 - DNA, 25 bp, Homo sapien
tggcattagtataaactccttctac

SEQ ID NO: 1901982 - DNA, 25 bp, Homo sapien
tctgtttgtttttagtacaattctc

SEQ ID NO: 1901983 - DNA, 25 bp, Homo sapien
aactggtttcttcttggtacttctg

SEQ ID NO: 1901984 - DNA, 25 bp, Homo sapien
tgtttgtttttagtacaattctcac

SEQ ID NO: 1901985 - DNA, 25 bp, Homo sapien
ctgcaaaactggtttcttcttggta

SEQ ID NO: 1901986 - DNA, 25 bp, Homo sapien
tagaagcttattattccccattagt

SEQ ID NO: 1901987 - DNA, 25 bp, Homo sapien
tattccccattagtaattccataga

SEQ ID NO: 1901988 - DNA, 25 bp, Homo sapien
tagctctgagaaagggtctgaaaag

SEQ ID NO: 1901989 - DNA, 25 bp, Homo sapien
gagacaggactgaattgaacattct

SEQ ID NO: 1901990 - DNA, 25 bp, Homo sapien
caaacgaagttcagaaatagcttct

SEQ ID NO: 1901991 - DNA, 25 bp, Homo sapien
tgaaatatttagtggctgattttct

SEQ ID NO: 1901992 - DNA, 25 bp, Homo sapien
atttccttatcaccactgtcagtct

SEQ ID NO: 1901993 - DNA, 25 bp, Homo sapien
tccttatcaccactgtcagtctcct

SEQ ID NO: 1901994 - DNA, 25 bp, Homo sapien
gctgacagagggtaaaggggtccat

SEQ ID NO: 1901995 - DNA, 25 bp, Homo sapien
aaggggtccatctggctgcacaccg

SEQ ID NO: 1901996 - DNA, 25 bp, Homo sapien
ggtccatctggctgcacaccggatc

SEQ ID NO: 1901997 - DNA, 25 bp, Homo sapien
tgacagagggtaaaggggtccatct

SEQ ID NO: 1901998 - DNA, 25 bp, Homo sapien
ctggatctgaacagcccagtctgct

SEQ ID NO: 1901999 - DNA, 25 bp, Homo sapien
tggatctgaacagcccagtctgctt

SEQ ID NO: 1902000 - DNA, 25 bp, Homo sapien
agattctgaaggctcactgtcagca

SEQ ID NO: 1902001 - DNA, 25 bp, Homo sapien
ggctcactgtcagcatcaacattgc

SEQ ID NO: 1902002 - DNA, 25 bp, Homo sapien
gaattcatgaggctggcaaacatta

SEQ ID NO: 1902003 - DNA, 25 bp, Homo sapien
ggctggcaaacattaaagaatcccc

SEQ ID NO: 1902004 - DNA, 25 bp, Homo sapien
ctggtatgtgacagtttctccagat

SEQ ID NO: 1902005 - DNA, 25 bp, Homo sapien
cattttcggtcatgaattagttgac

SEQ ID NO: 1902006 - DNA, 25 bp, Homo sapien
tgttttgaacagcaatgagatttat

SEQ ID NO: 1902007 - DNA, 25 bp, Homo sapien
cccttgtgtacaagtgtactcaatg

SEQ ID NO: 1902008 - DNA, 25 bp, Homo sapien
tgtctttgttcccttgtgtacaagt

SEQ ID NO: 1902009 - DNA, 25 bp, Homo sapien
ctaagcctagtatccaatattattt

SEQ ID NO: 1902010 - DNA, 25 bp, Homo sapien
caagagtaaattgagccaacaccac

SEQ ID NO: 1902011 - DNA, 25 bp, Homo sapien
gccctgtctgcaatgtggagcacca

SEQ ID NO: 1902012 - DNA, 25 bp, Homo sapien
gagggctacaaggaatatgatgacc

SEQ ID NO: 1902013 - DNA, 25 bp, Homo sapien
aaatactcaggccagatctgttgcc

SEQ ID NO: 1902014 - DNA, 25 bp, Homo sapien
tttaagagccgagtctcaaagagct

SEQ ID NO: 1902015 - DNA, 25 bp, Homo sapien
tctttctgaactaatgagctgaggc

SEQ ID NO: 1902016 - DNA, 25 bp, Homo sapien
ttaattggcaaaacgctgcgcagct

SEQ ID NO: 1902017 - DNA, 25 bp, Homo sapien
taggccagaaattgcacacactagt

SEQ ID NO: 1902018 - DNA, 25 bp, Homo sapien
tttggccagtaccacagaatctcct

SEQ ID NO: 1902019 - DNA, 25 bp, Homo sapien
tcagttcctaaccaatactgtgtgg

SEQ ID NO: 1902020 - DNA, 25 bp, Homo sapien
tttagaaccgtatgcaaacttgcac

SEQ ID NO: 1902021 - DNA, 25 bp, Homo sapien
tgtggtgtccagatctttgaggtac

SEQ ID NO: 1902022 - DNA, 25 bp, Homo sapien
agtcttgtgacttctaacataagtc

SEQ ID NO: 1902023 - DNA, 25 bp, Homo sapien
taaagcatatgctcaaattgaattt

SEQ ID NO: 1902024 - DNA, 25 bp, Homo sapien
cataagtcttctaacagagtaagtt

SEQ ID NO: 1902025 - DNA, 25 bp, Homo sapien
aactgtcctatatatcttatgaagc

SEQ ID NO: 1902026 - DNA, 25 bp, Homo sapien
acaacagccaggtatgtccctagtg

SEQ ID NO: 1902027 - DNA, 25 bp, Homo sapien
tagacaatggttatcagtgactggt

SEQ ID NO: 1902028 - DNA, 25 bp, Homo sapien
aggcctctagatctaaatgtctcag

SEQ ID NO: 1902029 - DNA, 25 bp, Homo sapien
ggaagtatacatgccaccacctaaa

SEQ ID NO: 1902030 - DNA, 25 bp, Homo sapien
tctatagtaacattgccactgtatc

SEQ ID NO: 1902031 - DNA, 25 bp, Homo sapien
ctttagatgaagaatgcttcttggc

SEQ ID NO: 1902032 - DNA, 25 bp, Homo sapien
gatctgtctcccgtaaacttctata

SEQ ID NO: 1902033 - DNA, 25 bp, Homo sapien
tgccactgtatcgatcatgatctgt

SEQ ID NO: 1902034 - DNA, 25 bp, Homo sapien
taaattctggatgtcctcatcttaa

SEQ ID NO: 1902035 - DNA, 25 bp, Homo sapien
attctggatgtcctcatcttaaaat

SEQ ID NO: 1902036 - DNA, 25 bp, Homo sapien
aaattctggatgtcctcatcttaaa

SEQ ID NO: 1902037 - DNA, 25 bp, Homo sapien
aattctggatgtcctcatcttaaaa

SEQ ID NO: 1902038 - DNA, 25 bp, Homo sapien
atgaatggatctttcaccgtggaga

SEQ ID NO: 1902039 - DNA, 25 bp, Homo sapien
caatgaatggatctttcaccgtgga

SEQ ID NO: 1902040 - DNA, 25 bp, Homo sapien
aatgaatggatctttcaccgtggag

SEQ ID NO: 1902041 - DNA, 25 bp, Homo sapien
tgaatggatctttcaccgtggagat

SEQ ID NO: 1902042 - DNA, 25 bp, Homo sapien
tacattttagggcactgcaacgtag

SEQ ID NO: 1902043 - DNA, 25 bp, Homo sapien
cacagttactctcttcacagaagtt

SEQ ID NO: 1902044 - DNA, 25 bp, Homo sapien
tttagggcactgcaacgtagcacag

SEQ ID NO: 1902045 - DNA, 25 bp, Homo sapien
tgcaacgtagcacagttactctctt

SEQ ID NO: 1902046 - DNA, 25 bp, Homo sapien
caataaagatccgatctatgaagtt

SEQ ID NO: 1902047 - DNA, 25 bp, Homo sapien
taaagatccgatctatgaagttcat

SEQ ID NO: 1902048 - DNA, 25 bp, Homo sapien
caccaataaagatccgatctatgaa

SEQ ID NO: 1902049 - DNA, 25 bp, Homo sapien
acacatgaccgtgctagttaattca

SEQ ID NO: 1902050 - DNA, 25 bp, Homo sapien
tttgcaggagtctttggagcactta

SEQ ID NO: 1902051 - DNA, 25 bp, Homo sapien
ggtttatttgcaggagtctttggag

SEQ ID NO: 1902052 - DNA, 25 bp, Homo sapien
cttcaataaacggtttatttgcagg

SEQ ID NO: 1902053 - DNA, 25 bp, Homo sapien
cacttaaacattttgtctagttaca

SEQ ID NO: 1902054 - DNA, 25 bp, Homo sapien
cagcagttttagtagttgggttgtt

SEQ ID NO: 1902055 - DNA, 25 bp, Homo sapien
atcagcagttttagtagttgggttg

SEQ ID NO: 1902056 - DNA, 25 bp, Homo sapien
tcagcagttttagtagttgggttgt

SEQ ID NO: 1902057 - DNA, 25 bp, Homo sapien
ttctggtctaataatagttaactca

SEQ ID NO: 1902058 - DNA, 25 bp, Homo sapien
ctaataatagttaactcaggcctca

SEQ ID NO: 1902059 - DNA, 25 bp, Homo sapien
attctggtctaataatagttaactc

SEQ ID NO: 1902060 - DNA, 25 bp, Homo sapien
taatctctatgctatgtggactacc

SEQ ID NO: 1902061 - DNA, 25 bp, Homo sapien
tatcagtgtacaaaaagcaagcagc

SEQ ID NO: 1902062 - DNA, 25 bp, Homo sapien
gcagctctcagtaaatgacaaggtt

SEQ ID NO: 1902063 - DNA, 25 bp, Homo sapien
ttaatgtccatagcaagaagaatcc

SEQ ID NO: 1902064 - DNA, 25 bp, Homo sapien
tcacaaagaaactagctagtataac

SEQ ID NO: 1902065 - DNA, 25 bp, Homo sapien
aaacaacacagtattatcctgtcgg

SEQ ID NO: 1902066 - DNA, 25 bp, Homo sapien
ggttaagcacatacaactcattcaa

SEQ ID NO: 1902067 - DNA, 25 bp, Homo sapien
cagggagcccggagtggcagctcat

SEQ ID NO: 1902068 - DNA, 25 bp, Homo sapien
aagataatgaagaagctcctgactg

SEQ ID NO: 1902069 - DNA, 25 bp, Homo sapien
taatgaagaagctcctgactgtcct

SEQ ID NO: 1902070 - DNA, 25 bp, Homo sapien
ctttagtaaaagtattgccatgaga

SEQ ID NO: 1902071 - DNA, 25 bp, Homo sapien
gattcccaggaaatgtactttagta

SEQ ID NO: 1902072 - DNA, 25 bp, Homo sapien
gatttctagactctatgatggagcc

SEQ ID NO: 1902073 - DNA, 25 bp, Homo sapien
atctgagctacccatatcaagagag

SEQ ID NO: 1902074 - DNA, 25 bp, Homo sapien
agaactagtaaagcaagttgggtag

SEQ ID NO: 1902075 - DNA, 25 bp, Homo sapien
ccaacgaatcaacataaagctaaga

SEQ ID NO: 1902076 - DNA, 25 bp, Homo sapien
tctacataggaaataccaacgaatc

SEQ ID NO: 1902077 - DNA, 25 bp, Homo sapien
tgccaatgacattgtctacatagga

SEQ ID NO: 1902078 - DNA, 25 bp, Homo sapien
ctagaatagtttgaaaaggatgacc

SEQ ID NO: 1902079 - DNA, 25 bp, Homo sapien
gggtaaagacaagacatgtagatca

SEQ ID NO: 1902080 - DNA, 25 bp, Homo sapien
gagaacttatgctactcaattgcaa

SEQ ID NO: 1902081 - DNA, 25 bp, Homo sapien
aaataaacccaaacacatgtggctt

SEQ ID NO: 1902082 - DNA, 25 bp, Homo sapien
aaacatactgtaataccttgagaaa

SEQ ID NO: 1902083 - DNA, 25 bp, Homo sapien
ttccaggcacataaggatttggttt

SEQ ID NO: 1902084 - DNA, 25 bp, Homo sapien
tgttatcttacggtactttctagat

SEQ ID NO: 1902085 - DNA, 25 bp, Homo sapien
tctatttgcctcacagctcatcttt

SEQ ID NO: 1902086 - DNA, 25 bp, Homo sapien
tgaggataagctgcttcttctgagg

SEQ ID NO: 1902087 - DNA, 25 bp, Homo sapien
gtcaggacagatctccatttgattc

SEQ ID NO: 1902088 - DNA, 25 bp, Homo sapien
cactttatggtattacaacataggc

SEQ ID NO: 1902089 - DNA, 25 bp, Homo sapien
ttagttctcttcatagtcagggcaa

SEQ ID NO: 1902090 - DNA, 25 bp, Homo sapien
ttatattaaatgtagatgcacccac

SEQ ID NO: 1902091 - DNA, 25 bp, Homo sapien
ttctgacaaagctgattaaaaagaa

SEQ ID NO: 1902092 - DNA, 25 bp, Homo sapien
tgacaaagctgattaaaaagaactt

SEQ ID NO: 1902093 - DNA, 25 bp, Homo sapien
gctgattaaaaagaactttaggaga

SEQ ID NO: 1902094 - DNA, 25 bp, Homo sapien
agctgattaaaaagaactttaggag

SEQ ID NO: 1902095 - DNA, 25 bp, Homo sapien
agtggtccaggccttgaaagttcca

SEQ ID NO: 1902096 - DNA, 25 bp, Homo sapien
gaacaaggctgaggtcagtggtcca

SEQ ID NO: 1902097 - DNA, 25 bp, Homo sapien
aggccttgaaagttccaccaccaat

SEQ ID NO: 1902098 - DNA, 25 bp, Homo sapien
gaagaaacaggaacaaggctgaggt

SEQ ID NO: 1902099 - DNA, 25 bp, Homo sapien
cattcatcagatcagtaagagtata

SEQ ID NO: 1902100 - DNA, 25 bp, Homo sapien
cagatcagtaagagtataagtctgt

SEQ ID NO: 1902101 - DNA, 25 bp, Homo sapien
tgatctcattcatcagatcagtaag

SEQ ID NO: 1902102 - DNA, 25 bp, Homo sapien
aatcttgagttttgtactactttct

SEQ ID NO: 1902103 - DNA, 25 bp, Homo sapien
tgtaattcctcttacagataaattt

SEQ ID NO: 1902104 - DNA, 25 bp, Homo sapien
gtaattcctcttacagataaatttc

SEQ ID NO: 1902105 - DNA, 25 bp, Homo sapien
ttttcacctaatactgacatgctgc

SEQ ID NO: 1902106 - DNA, 25 bp, Homo sapien
aaacagcagaactagtgggttagct

SEQ ID NO: 1902107 - DNA, 25 bp, Homo sapien
gaaataaattatgacacctgcccca

SEQ ID NO: 1902108 - DNA, 25 bp, Homo sapien
gggttagcttcttacgtctctgaca

SEQ ID NO: 1902109 - DNA, 25 bp, Homo sapien
tgcatagccaccaaatatggacagc

SEQ ID NO: 1902110 - DNA, 25 bp, Homo sapien
tcaaaccaagatatatccacgcttc

SEQ ID NO: 1902111 - DNA, 25 bp, Homo sapien
aaccaagatatatccacgcttcact

SEQ ID NO: 1902112 - DNA, 25 bp, Homo sapien
tggctctccatgcatagccaccaaa

SEQ ID NO: 1902113 - DNA, 25 bp, Homo sapien
tatctcaggaaaacgtttagacact

SEQ ID NO: 1902114 - DNA, 25 bp, Homo sapien
cggccaagccttaaatttatgataa

SEQ ID NO: 1902115 - DNA, 25 bp, Homo sapien
tcaattacttgacattcatgcaggt

SEQ ID NO: 1902116 - DNA, 25 bp, Homo sapien
tactaagaagctgtcaactgagagt

SEQ ID NO: 1902117 - DNA, 25 bp, Homo sapien
actgtctcattagggtgatggctaa

SEQ ID NO: 1902118 - DNA, 25 bp, Homo sapien
ggtgatggctaacaaaaacagctgt

SEQ ID NO: 1902119 - DNA, 25 bp, Homo sapien
gggtgatggctaacaaaaacagctg

SEQ ID NO: 1902120 - DNA, 25 bp, Homo sapien
cattactgtctcattagggtgatgg

SEQ ID NO: 1902121 - DNA, 25 bp, Homo sapien
taaatcctcggaatttccagagcga

SEQ ID NO: 1902122 - DNA, 25 bp, Homo sapien
tttccagagcgacaagagtgtctgt

SEQ ID NO: 1902123 - DNA, 25 bp, Homo sapien
tgttattcatgatgggtccctcagg

SEQ ID NO: 1902124 - DNA, 25 bp, Homo sapien
ctgggaagtaccctctaaatcctcg

SEQ ID NO: 1902125 - DNA, 25 bp, Homo sapien
cactgtgggcccctagacagtttat

SEQ ID NO: 1902126 - DNA, 25 bp, Homo sapien
atgctgaagagatgaatcaggatgg

SEQ ID NO: 1902127 - DNA, 25 bp, Homo sapien
ccctagacagtttatgctgaagaga

SEQ ID NO: 1902128 - DNA, 25 bp, Homo sapien
tgactcactgtgggcccctagacag

SEQ ID NO: 1902129 - DNA, 25 bp, Homo sapien
acagattcctttagtcatcgcttaa

SEQ ID NO: 1902130 - DNA, 25 bp, Homo sapien
ttcctttagtcatcgcttaacttac

SEQ ID NO: 1902131 - DNA, 25 bp, Homo sapien
gattcctttagtcatcgcttaactt

SEQ ID NO: 1902132 - DNA, 25 bp, Homo sapien
cagattcctttagtcatcgcttaac

SEQ ID NO: 1902133 - DNA, 25 bp, Homo sapien
ccttcttattacaatgcgttgataa

SEQ ID NO: 1902134 - DNA, 25 bp, Homo sapien
aaaccttcttattacaatgcgttga

SEQ ID NO: 1902135 - DNA, 25 bp, Homo sapien
caatgcgttgataatttttcatcac

SEQ ID NO: 1902136 - DNA, 25 bp, Homo sapien
tattacaatgcgttgataatttttc

SEQ ID NO: 1902137 - DNA, 25 bp, Homo sapien
tttatcctcatgagatccagtgatc

SEQ ID NO: 1902138 - DNA, 25 bp, Homo sapien
ctttatcctcatgagatccagtgat

SEQ ID NO: 1902139 - DNA, 25 bp, Homo sapien
cctttatcctcatgagatccagtga

SEQ ID NO: 1902140 - DNA, 25 bp, Homo sapien
aatacaatggggctctgttctggaa

SEQ ID NO: 1902141 - DNA, 25 bp, Homo sapien
cttaaagtgcttcaatgaatgttgg

SEQ ID NO: 1902142 - DNA, 25 bp, Homo sapien
gcttcaatgaatgttggctttctga

SEQ ID NO: 1902143 - DNA, 25 bp, Homo sapien
ggaactcttaaagtgcttcaatgaa

SEQ ID NO: 1902144 - DNA, 25 bp, Homo sapien
tctgagcaaactgaccacagattct

SEQ ID NO: 1902145 - DNA, 25 bp, Homo sapien
gaagccacacttgaggcacaaccaa

SEQ ID NO: 1902146 - DNA, 25 bp, Homo sapien
gattcacgctgatagcatgacttac

SEQ ID NO: 1902147 - DNA, 25 bp, Homo sapien
tatcagaagtaagtactagctgccc

SEQ ID NO: 1902148 - DNA, 25 bp, Homo sapien
gaagagtcttcatcatgaggtacag

SEQ ID NO: 1902149 - DNA, 25 bp, Homo sapien
ggtaaagctttagttggatctttca

SEQ ID NO: 1902150 - DNA, 25 bp, Homo sapien
catgaggtacagtaggccttttact

SEQ ID NO: 1902151 - DNA, 25 bp, Homo sapien
gctttagttggatctttcacccgca

SEQ ID NO: 1902152 - DNA, 25 bp, Homo sapien
agtttccgcgcagggaagcccatta

SEQ ID NO: 1902153 - DNA, 25 bp, Homo sapien
tacagaagctggtaatttcggcata

SEQ ID NO: 1902154 - DNA, 25 bp, Homo sapien
agcccattaaagacttggtgtcccg

SEQ ID NO: 1902155 - DNA, 25 bp, Homo sapien
tctggaggaatcacgtgtaggctcc

SEQ ID NO: 1902156 - DNA, 25 bp, Homo sapien
taatacacgacgcttccagaaaagt

SEQ ID NO: 1902157 - DNA, 25 bp, Homo sapien
gatgtgaagagaaatgcgccgcgat

SEQ ID NO: 1902158 - DNA, 25 bp, Homo sapien
gaagtgacttgcagaggtcccaaag

SEQ ID NO: 1902159 - DNA, 25 bp, Homo sapien
tcattagacaggcttcctccggtca

SEQ ID NO: 1902160 - DNA, 25 bp, Homo sapien
gccgggccgcagcgtctacaacctg

SEQ ID NO: 1902161 - DNA, 25 bp, Homo sapien
ccgggccgcagcgtctacaacctgg

SEQ ID NO: 1902162 - DNA, 25 bp, Homo sapien
ggccgggccgcagcgtctacaacct

SEQ ID NO: 1902163 - DNA, 25 bp, Homo sapien
ccggttcggccggtgcctggctgga

SEQ ID NO: 1902164 - DNA, 25 bp, Homo sapien
caattagacacacctgatgacagga

SEQ ID NO: 1902165 - DNA, 25 bp, Homo sapien
gaaggtagataggtttaatggccaa

SEQ ID NO: 1902166 - DNA, 25 bp, Homo sapien
agggagacgaacacaataggcttta

SEQ ID NO: 1902167 - DNA, 25 bp, Homo sapien
gcatatggacatatatagtgtaagt

SEQ ID NO: 1902168 - DNA, 25 bp, Homo sapien
catgcctagataattttttttgtat

SEQ ID NO: 1902169 - DNA, 25 bp, Homo sapien
acctcctgggttgacaccagtctcc

SEQ ID NO: 1902170 - DNA, 25 bp, Homo sapien
tccacctcctgggttgacaccagtc

SEQ ID NO: 1902171 - DNA, 25 bp, Homo sapien
ccatgcctagataattttttttgta

SEQ ID NO: 1902172 - DNA, 25 bp, Homo sapien
ctgcactgacttatacaacagtctt

SEQ ID NO: 1902173 - DNA, 25 bp, Homo sapien
tctgcttctggacaaattatacttt

SEQ ID NO: 1902174 - DNA, 25 bp, Homo sapien
ctctgcttctggacaaattatactt

SEQ ID NO: 1902175 - DNA, 25 bp, Homo sapien
ctttttaaactgcactgacttatac

SEQ ID NO: 1902176 - DNA, 25 bp, Homo sapien
accgcgcctggccacacctggctaa

SEQ ID NO: 1902177 - DNA, 25 bp, Homo sapien
agctcaggcagtccgcccgcctcgg

SEQ ID NO: 1902178 - DNA, 25 bp, Homo sapien
caccgcgcctggccacacctggcta

SEQ ID NO: 1902179 - DNA, 25 bp, Homo sapien
ctgagctcaggcagtccgcccgcct

SEQ ID NO: 1902180 - DNA, 25 bp, Homo sapien
aagacttggattaccagctaagtac

SEQ ID NO: 1902181 - DNA, 25 bp, Homo sapien
taaaagacttggattaccagctaag

SEQ ID NO: 1902182 - DNA, 25 bp, Homo sapien
ttggattaccagctaagtacagtgg

SEQ ID NO: 1902183 - DNA, 25 bp, Homo sapien
gacttggattaccagctaagtacag

SEQ ID NO: 1902184 - DNA, 25 bp, Homo sapien
tacaaccaaggcaattactacttcc

SEQ ID NO: 1902185 - DNA, 25 bp, Homo sapien
gttatttggacagtagtcagtcctg

SEQ ID NO: 1902186 - DNA, 25 bp, Homo sapien
gaagtcccagtgtaagatcaggttg

SEQ ID NO: 1902187 - DNA, 25 bp, Homo sapien
tagaactcgaagaagtctccctgtg

SEQ ID NO: 1902188 - DNA, 25 bp, Homo sapien
gctatcatactggacaactatggta

SEQ ID NO: 1902189 - DNA, 25 bp, Homo sapien
tgtactatttgaaacccaacatata

SEQ ID NO: 1902190 - DNA, 25 bp, Homo sapien
gaccactacttaatttgtacagtgg

SEQ ID NO: 1902191 - DNA, 25 bp, Homo sapien
tgtctcctgattaaagaccactact

SEQ ID NO: 1902192 - DNA, 25 bp, Homo sapien
gcaaaatccagatggtgagagactc

SEQ ID NO: 1902193 - DNA, 25 bp, Homo sapien
tgagagactcttagtagacaagcaa

SEQ ID NO: 1902194 - DNA, 25 bp, Homo sapien
atttacagaaaatatagaggagaaa

SEQ ID NO: 1902195 - DNA, 25 bp, Homo sapien
taacacattaaatggcatgtcaagg

SEQ ID NO: 1902196 - DNA, 25 bp, Homo sapien
aaaagacttgtcaataaattgtaat

SEQ ID NO: 1902197 - DNA, 25 bp, Homo sapien
agacttgtcaataaattgtaatatg

SEQ ID NO: 1902198 - DNA, 25 bp, Homo sapien
aagacttgtcaataaattgtaatat

SEQ ID NO: 1902199 - DNA, 25 bp, Homo sapien
aaagacttgtcaataaattgtaata

SEQ ID NO: 1902200 - DNA, 25 bp, Homo sapien
caatttttatacttgtgaaataact

SEQ ID NO: 1902201 - DNA, 25 bp, Homo sapien
atttttatacttgtgaaataactga

SEQ ID NO: 1902202 - DNA, 25 bp, Homo sapien
gaaaatctgatattatttttactaa

SEQ ID NO: 1902203 - DNA, 25 bp, Homo sapien
ctctaacaatttttatacttgtgaa

SEQ ID NO: 1902204 - DNA, 25 bp, Homo sapien
taggtcttacctaagcccaacatta

SEQ ID NO: 1902205 - DNA, 25 bp, Homo sapien
aacattaattccttcagacctgagg

SEQ ID NO: 1902206 - DNA, 25 bp, Homo sapien
tgaagctagatgataggtacatgga

SEQ ID NO: 1902207 - DNA, 25 bp, Homo sapien
ttggccataaattgataactactga

SEQ ID NO: 1902208 - DNA, 25 bp, Homo sapien
taagcccaggaaacctatatatgtc

SEQ ID NO: 1902209 - DNA, 25 bp, Homo sapien
gtcatcagtctgactttacacagtc

SEQ ID NO: 1902210 - DNA, 25 bp, Homo sapien
tttacacagtctcgctttccagctc

SEQ ID NO: 1902211 - DNA, 25 bp, Homo sapien
tttccagctcatttgatacgctcca

SEQ ID NO: 1902212 - DNA, 25 bp, Homo sapien
tgtgcatcaatatcctatgactcca

SEQ ID NO: 1902213 - DNA, 25 bp, Homo sapien
aagccatcatccacaattgattaaa

SEQ ID NO: 1902214 - DNA, 25 bp, Homo sapien
tgctaagttccacagacagtacagt

SEQ ID NO: 1902215 - DNA, 25 bp, Homo sapien
gcagttttatactaggaagtcaaca

SEQ ID NO: 1902216 - DNA, 25 bp, Homo sapien
cctggttcagaatacctgtagtaaa

SEQ ID NO: 1902217 - DNA, 25 bp, Homo sapien
tgttcctggttcagaatacctgtag

SEQ ID NO: 1902218 - DNA, 25 bp, Homo sapien
tgtgttcctggttcagaatacctgt

SEQ ID NO: 1902219 - DNA, 25 bp, Homo sapien
attgtgttcctggttcagaatacct

SEQ ID NO: 1902220 - DNA, 25 bp, Homo sapien
ccactgaagacattactgaaatctg

SEQ ID NO: 1902221 - DNA, 25 bp, Homo sapien
tcaaaatgcctgattagctgtgaat

SEQ ID NO: 1902222 - DNA, 25 bp, Homo sapien
tccactatggaattcttcggaatgt

SEQ ID NO: 1902223 - DNA, 25 bp, Homo sapien
ggtccctcaatgaccaaagagaatt

SEQ ID NO: 1902224 - DNA, 25 bp, Homo sapien
ttaagattggctgtagctagagttc

SEQ ID NO: 1902225 - DNA, 25 bp, Homo sapien
ttctgacttccatttggaccctgct

SEQ ID NO: 1902226 - DNA, 25 bp, Homo sapien
gctgtagctagagttctgacttcca

SEQ ID NO: 1902227 - DNA, 25 bp, Homo sapien
tgacttccatttggaccctgctctc

SEQ ID NO: 1902228 - DNA, 25 bp, Homo sapien
catttttacaccctgataagcctac

SEQ ID NO: 1902229 - DNA, 25 bp, Homo sapien
aaaagatccatttttacaccctgat

SEQ ID NO: 1902230 - DNA, 25 bp, Homo sapien
attttataccaattaaaagatccat

SEQ ID NO: 1902231 - DNA, 25 bp, Homo sapien
cctgataagcctactgacttttaaa

SEQ ID NO: 1902232 - DNA, 25 bp, Homo sapien
tattacaggtatcactcaacataga

SEQ ID NO: 1902233 - DNA, 25 bp, Homo sapien
cagcaaacctttataagtcagcaag

SEQ ID NO: 1902234 - DNA, 25 bp, Homo sapien
tttgtgccctcacatataacaagca

SEQ ID NO: 1902235 - DNA, 25 bp, Homo sapien
aataccagtaactttggcaatagga

SEQ ID NO: 1902236 - DNA, 25 bp, Homo sapien
tcaggccctgccactagtggagaat

SEQ ID NO: 1902237 - DNA, 25 bp, Homo sapien
gccactagtggagaatcactcaggg

SEQ ID NO: 1902238 - DNA, 25 bp, Homo sapien
tgccactagtggagaatcactcagg

SEQ ID NO: 1902239 - DNA, 25 bp, Homo sapien
ccctgccactagtggagaatcactc

SEQ ID NO: 1902240 - DNA, 25 bp, Homo sapien
tcaataattaaagtctacaaagtac

SEQ ID NO: 1902241 - DNA, 25 bp, Homo sapien
ttctctcatcgaaattcttccactg

SEQ ID NO: 1902242 - DNA, 25 bp, Homo sapien
ctcttttctctcatcgaaattcttc

SEQ ID NO: 1902243 - DNA, 25 bp, Homo sapien
aagaatggttgccatctcttttctc

SEQ ID NO: 1902244 - DNA, 25 bp, Homo sapien
ttggcatcttactaagaatggttgc

SEQ ID NO: 1902245 - DNA, 25 bp, Homo sapien
gagggaatataccactatagagcac

SEQ ID NO: 1902246 - DNA, 25 bp, Homo sapien
gaataaaggttctaatcatgaggga

SEQ ID NO: 1902247 - DNA, 25 bp, Homo sapien
cattcttatctatctctgcagctga

SEQ ID NO: 1902248 - DNA, 25 bp, Homo sapien
gaaagcagtatttttcaccacagtg

SEQ ID NO: 1902249 - DNA, 25 bp, Homo sapien
tttgtaaccaataatcttcttagcc

SEQ ID NO: 1902250 - DNA, 25 bp, Homo sapien
agattttaggctcatgataagtaaa

SEQ ID NO: 1902251 - DNA, 25 bp, Homo sapien
gcctggtggacatcacaagatttta

SEQ ID NO: 1902252 - DNA, 25 bp, Homo sapien
ttcttagcctggtggacatcacaag

SEQ ID NO: 1902253 - DNA, 25 bp, Homo sapien
tggcatctttctgctgtacaacaca

SEQ ID NO: 1902254 - DNA, 25 bp, Homo sapien
agaaagctcagcaaaccattgcctg

SEQ ID NO: 1902255 - DNA, 25 bp, Homo sapien
gctcagcaaaccattgcctggcatc

SEQ ID NO: 1902256 - DNA, 25 bp, Homo sapien
ctggcatctttctgctgtacaacac

SEQ ID NO: 1902257 - DNA, 25 bp, Homo sapien
aatgagagacaactgtccatgttta

SEQ ID NO: 1902258 - DNA, 25 bp, Homo sapien
atgaaaatgagagacaactgtccat

SEQ ID NO: 1902259 - DNA, 25 bp, Homo sapien
atgagagacaactgtccatgtttaa

SEQ ID NO: 1902260 - DNA, 25 bp, Homo sapien
tgaaatgaaaatgagagacaactgt

SEQ ID NO: 1902261 - DNA, 25 bp, Homo sapien
gagagtcaggcacgttaaagaggaa

SEQ ID NO: 1902262 - DNA, 25 bp, Homo sapien
tacatatgagagttaccactgacca

SEQ ID NO: 1902263 - DNA, 25 bp, Homo sapien
gcgtgctagtcatggtgcagttgcc

SEQ ID NO: 1902264 - DNA, 25 bp, Homo sapien
caaagtagccgttaaactgcaccca

SEQ ID NO: 1902265 - DNA, 25 bp, Homo sapien
tcagccctgatgtaagaaggccaag

SEQ ID NO: 1902266 - DNA, 25 bp, Homo sapien
ttaaagtacccaagaagaagacagc

SEQ ID NO: 1902267 - DNA, 25 bp, Homo sapien
ttaattcttcaaacggctcagtgga

SEQ ID NO: 1902268 - DNA, 25 bp, Homo sapien
agtcctttcagggaactgccagtaa

SEQ ID NO: 1902269 - DNA, 25 bp, Homo sapien
gacagttgcagttcatattattgaa

SEQ ID NO: 1902270 - DNA, 25 bp, Homo sapien
gttcatattattgaaagctcacatg

SEQ ID NO: 1902271 - DNA, 25 bp, Homo sapien
gctcacatgcaaggattagtctatt

SEQ ID NO: 1902272 - DNA, 25 bp, Homo sapien
aataatcctgatttatgacagttgc

SEQ ID NO: 1902273 - DNA, 25 bp, Homo sapien
gttctgtaggtatcattcactatcc

SEQ ID NO: 1902274 - DNA, 25 bp, Homo sapien
gatacagtaggcaaagatccgttct

SEQ ID NO: 1902275 - DNA, 25 bp, Homo sapien
taaagctatcatgaaaggaggatac

SEQ ID NO: 1902276 - DNA, 25 bp, Homo sapien
gtaggcaaagatccgttctgtaggt

SEQ ID NO: 1902277 - DNA, 25 bp, Homo sapien
taaatcatattattactgaaagcag

SEQ ID NO: 1902278 - DNA, 25 bp, Homo sapien
tgtaaatcatattattactgaaagc

SEQ ID NO: 1902279 - DNA, 25 bp, Homo sapien
aatgtaaatcatattattactgaaa

SEQ ID NO: 1902280 - DNA, 25 bp, Homo sapien
atattattactgaaagcagaactac

SEQ ID NO: 1902281 - DNA, 25 bp, Homo sapien
tgattgtatatttcctccagagagg

SEQ ID NO: 1902282 - DNA, 25 bp, Homo sapien
tcatctgattgtatatttcctccag

SEQ ID NO: 1902283 - DNA, 25 bp, Homo sapien
attgtatatttcctccagagagggc

SEQ ID NO: 1902284 - DNA, 25 bp, Homo sapien
tctgattgtatatttcctccagaga

SEQ ID NO: 1902285 - DNA, 25 bp, Homo sapien
cagtctgtgttttgtataaaattaa

SEQ ID NO: 1902286 - DNA, 25 bp, Homo sapien
ccttcctatctaataacatgttaca

SEQ ID NO: 1902287 - DNA, 25 bp, Homo sapien
ggcatttacaccactatagttatta

SEQ ID NO: 1902288 - DNA, 25 bp, Homo sapien
atgttacactattaataacttctgt

SEQ ID NO: 1902289 - DNA, 25 bp, Homo sapien
ggcccatgtcctgcacatactggag

SEQ ID NO: 1902290 - DNA, 25 bp, Homo sapien
ggatgatacactatcaagcaacaat

SEQ ID NO: 1902291 - DNA, 25 bp, Homo sapien
gaagcaacatgtcttcttggcccat

SEQ ID NO: 1902292 - DNA, 25 bp, Homo sapien
catactggagcaaaggtctataagg

SEQ ID NO: 1902293 - DNA, 25 bp, Homo sapien
aaaaatgttatcattacccaactga

SEQ ID NO: 1902294 - DNA, 25 bp, Homo sapien
taagctagcagtatgacagccctaa

SEQ ID NO: 1902295 - DNA, 25 bp, Homo sapien
gaatttcactaactcatgcttgctt

SEQ ID NO: 1902296 - DNA, 25 bp, Homo sapien
gttatcattacccaactgatttgta

SEQ ID NO: 1902297 - DNA, 25 bp, Homo sapien
tgttttaatctattaatcacagaag

SEQ ID NO: 1902298 - DNA, 25 bp, Homo sapien
taaaatgtacctctctaaaatcatt

SEQ ID NO: 1902299 - DNA, 25 bp, Homo sapien
ttaaaatgtacctctctaaaatcat

SEQ ID NO: 1902300 - DNA, 25 bp, Homo sapien
ttaatctattaatcacagaagattt

SEQ ID NO: 1902301 - DNA, 25 bp, Homo sapien
tagttctaacagatagaattcacat

SEQ ID NO: 1902302 - DNA, 25 bp, Homo sapien
cacagtaccaatgttgggagcccca

SEQ ID NO: 1902303 - DNA, 25 bp, Homo sapien
agcagccagggttgataatcgccac

SEQ ID NO: 1902304 - DNA, 25 bp, Homo sapien
gctaaatagtagtatcacctgggac

SEQ ID NO: 1902305 - DNA, 25 bp, Homo sapien
tcccaaggtgatttaatgagcagcc

SEQ ID NO: 1902306 - DNA, 25 bp, Homo sapien
ttggaaaggcatatgaaaatctagt

SEQ ID NO: 1902307 - DNA, 25 bp, Homo sapien
aattcctttggaaaggcatatgaaa

SEQ ID NO: 1902308 - DNA, 25 bp, Homo sapien
atgattcatcctataaggaaattcc

SEQ ID NO: 1902309 - DNA, 25 bp, Homo sapien
catcctataaggaaattcctttgga

SEQ ID NO: 1902310 - DNA, 25 bp, Homo sapien
cacttacggacgcagatttttattt

SEQ ID NO: 1902311 - DNA, 25 bp, Homo sapien
tttcagtaggaattcttggcaacac

SEQ ID NO: 1902312 - DNA, 25 bp, Homo sapien
tttcagctacagaatggtattcttc

SEQ ID NO: 1902313 - DNA, 25 bp, Homo sapien
ccagtgactgagcttagaaggaaca

SEQ ID NO: 1902314 - DNA, 25 bp, Homo sapien
tgtagactcaaacactgagatcatg

SEQ ID NO: 1902315 - DNA, 25 bp, Homo sapien
ctttcttatattagcccaagtggac

SEQ ID NO: 1902316 - DNA, 25 bp, Homo sapien
caagtggactaagacatgccttcac

SEQ ID NO: 1902317 - DNA, 25 bp, Homo sapien
tatacccaccgttattgacttccca

SEQ ID NO: 1902318 - DNA, 25 bp, Homo sapien
tcatagcaccctgtggtaagtgaca

SEQ ID NO: 1902319 - DNA, 25 bp, Homo sapien
taagaactgctgactctatcgctca

SEQ ID NO: 1902320 - DNA, 25 bp, Homo sapien
tgctggctgccaatattcgtttaag

SEQ ID NO: 1902321 - DNA, 25 bp, Homo sapien
cactgggatgacttcagcaacttaa

SEQ ID NO: 1902322 - DNA, 25 bp, Homo sapien
ccaacaacacaggaacgggtttgca

SEQ ID NO: 1902323 - DNA, 25 bp, Homo sapien
tcatttagcatcgaaggccctctat

SEQ ID NO: 1902324 - DNA, 25 bp, Homo sapien
gaaaggtccatgtaagaatagccag

SEQ ID NO: 1902325 - DNA, 25 bp, Homo sapien
tggatttccatgctctaaaactgtg

SEQ ID NO: 1902326 - DNA, 25 bp, Homo sapien
aaaaaaatctatgtactctggagct

SEQ ID NO: 1902327 - DNA, 25 bp, Homo sapien
aaaatctatgtactctggagctttc

SEQ ID NO: 1902328 - DNA, 25 bp, Homo sapien
aatctatgtactctggagctttctt

SEQ ID NO: 1902329 - DNA, 25 bp, Homo sapien
aaaaaatctatgtactctggagctt

SEQ ID NO: 1902330 - DNA, 25 bp, Homo sapien
ttgtatttgaaactactccaaattc

SEQ ID NO: 1902331 - DNA, 25 bp, Homo sapien
tcttgtatttgaaactactccaaat

SEQ ID NO: 1902332 - DNA, 25 bp, Homo sapien
agaagtagcagcagcaatcaatctt

SEQ ID NO: 1902333 - DNA, 25 bp, Homo sapien
cagcagcaatcaatcttgtatttga

SEQ ID NO: 1902334 - DNA, 25 bp, Homo sapien
ctgttcaccttctaactacttgagg

SEQ ID NO: 1902335 - DNA, 25 bp, Homo sapien
gccattctatggtaaaacagttgaa

SEQ ID NO: 1902336 - DNA, 25 bp, Homo sapien
ggctgattaccccttatctgacatg

SEQ ID NO: 1902337 - DNA, 25 bp, Homo sapien
caagccttaaggttacagtgtcagt

SEQ ID NO: 1902338 - DNA, 25 bp, Homo sapien
ctctactttggatgccaaaaacaca

SEQ ID NO: 1902339 - DNA, 25 bp, Homo sapien
catgtaggagccattaatacaggat

SEQ ID NO: 1902340 - DNA, 25 bp, Homo sapien
taggagccattaatacaggatctat

SEQ ID NO: 1902341 - DNA, 25 bp, Homo sapien
gagccattaatacaggatctatact

SEQ ID NO: 1902342 - DNA, 25 bp, Homo sapien
gcagtggcaataacttgttgtctta

SEQ ID NO: 1902343 - DNA, 25 bp, Homo sapien
taatttaagatgttcacctaatgct

SEQ ID NO: 1902344 - DNA, 25 bp, Homo sapien
catagaatctcttgaaatataccgt

SEQ ID NO: 1902345 - DNA, 25 bp, Homo sapien
agatgttcacctaatgcttggataa

SEQ ID NO: 1902346 - DNA, 25 bp, Homo sapien
gagtcacagtggtctaattctagga

SEQ ID NO: 1902347 - DNA, 25 bp, Homo sapien
tacacatgctctatgtgagtcacag

SEQ ID NO: 1902348 - DNA, 25 bp, Homo sapien
tattaacattgaacagtaacttcca

SEQ ID NO: 1902349 - DNA, 25 bp, Homo sapien
cagtaacttccatgtggttaaatca

SEQ ID NO: 1902350 - DNA, 25 bp, Homo sapien
agaggtaaccaactatacaatttga

SEQ ID NO: 1902351 - DNA, 25 bp, Homo sapien
tcagaggtaaccaactatacaattt

SEQ ID NO: 1902352 - DNA, 25 bp, Homo sapien
cagaggtaaccaactatacaatttg

SEQ ID NO: 1902353 - DNA, 25 bp, Homo sapien
gaggtaaccaactatacaatttgaa

SEQ ID NO: 1902354 - DNA, 25 bp, Homo sapien
tggcgctccttcaacagatcttgtt

SEQ ID NO: 1902355 - DNA, 25 bp, Homo sapien
ttaaatccttttggcgctccttcaa

SEQ ID NO: 1902356 - DNA, 25 bp, Homo sapien
atccttttggcgctccttcaacaga

SEQ ID NO: 1902357 - DNA, 25 bp, Homo sapien
tatttgtaacttccaatattcttcc

SEQ ID NO: 1902358 - DNA, 25 bp, Homo sapien
gaattgtcttgtcttccacactcgt

SEQ ID NO: 1902359 - DNA, 25 bp, Homo sapien
taagacaatggcctttcataatctt

SEQ ID NO: 1902360 - DNA, 25 bp, Homo sapien
ttgtcttgtcttccacactcgttac

SEQ ID NO: 1902361 - DNA, 25 bp, Homo sapien
ttttccagaattgtcttgtcttcca

SEQ ID NO: 1902362 - DNA, 25 bp, Homo sapien
tgactgctcaagggatttgagcaag

SEQ ID NO: 1902363 - DNA, 25 bp, Homo sapien
gactgctcaagggatttgagcaagg

SEQ ID NO: 1902364 - DNA, 25 bp, Homo sapien
actgctcaagggatttgagcaaggc

SEQ ID NO: 1902365 - DNA, 25 bp, Homo sapien
ggagctctaactccaatacctaaac

SEQ ID NO: 1902366 - DNA, 25 bp, Homo sapien
aaagggctaaaaaatgaacatcagg

SEQ ID NO: 1902367 - DNA, 25 bp, Homo sapien
ttgcccaagcaatatttcagtgtgt

SEQ ID NO: 1902368 - DNA, 25 bp, Homo sapien
gtcagctacttgtcaattctctcag

SEQ ID NO: 1902369 - DNA, 25 bp, Homo sapien
tgcccactctatccgaccccccgcg

SEQ ID NO: 1902370 - DNA, 25 bp, Homo sapien
tgtgcccactctatccgaccccccg

SEQ ID NO: 1902371 - DNA, 25 bp, Homo sapien
ctgtgcccactctatccgacccccc

SEQ ID NO: 1902372 - DNA, 25 bp, Homo sapien
gtgcccactctatccgaccccccgc

SEQ ID NO: 1902373 - DNA, 25 bp, Homo sapien
tagtgggagctctgccaaaagttcc

SEQ ID NO: 1902374 - DNA, 25 bp, Homo sapien
aaaaaagcaccagccggcggagcgg

SEQ ID NO: 1902375 - DNA, 25 bp, Homo sapien
taaaaaagcaccagccggcggagcg

SEQ ID NO: 1902376 - DNA, 25 bp, Homo sapien
ataaaaaagcaccagccggcggagc

SEQ ID NO: 1902377 - DNA, 25 bp, Homo sapien
aaggaagaggatggccccctagtct

SEQ ID NO: 1902378 - DNA, 25 bp, Homo sapien
tagtctccttcacgccggccgacaa

SEQ ID NO: 1902379 - DNA, 25 bp, Homo sapien
cggtaaccgcgctcctcgatcaaat

SEQ ID NO: 1902380 - DNA, 25 bp, Homo sapien
gatcaaatcagctcggctcgactcc

SEQ ID NO: 1902381 - DNA, 25 bp, Homo sapien
tcctgtcttcagcacgggagttgct

SEQ ID NO: 1902382 - DNA, 25 bp, Homo sapien
ctatcgacaaaagttccggcccgcg

SEQ ID NO: 1902383 - DNA, 25 bp, Homo sapien
aactagtgttcacgagagctcgcgg

SEQ ID NO: 1902384 - DNA, 25 bp, Homo sapien
gagagcgtcttgagaattctggccg

SEQ ID NO: 1902385 - DNA, 25 bp, Homo sapien
gagggcttgctgtgcagaaggcctg

SEQ ID NO: 1902386 - DNA, 25 bp, Homo sapien
ggagggcttgctgtgcagaaggcct

SEQ ID NO: 1902387 - DNA, 25 bp, Homo sapien
ctaggagggcttgctgtgcagaagg

SEQ ID NO: 1902388 - DNA, 25 bp, Homo sapien
taggagggcttgctgtgcagaaggc

SEQ ID NO: 1902389 - DNA, 25 bp, Homo sapien
tcaaggtcattgtgtccaggaaact

SEQ ID NO: 1902390 - DNA, 25 bp, Homo sapien
tgacaccgctgtgcaccatgtgctg

SEQ ID NO: 1902391 - DNA, 25 bp, Homo sapien
gggaccctgttaatactatgttgac

SEQ ID NO: 1902392 - DNA, 25 bp, Homo sapien
cggttcatcatggagtgtgggacta

SEQ ID NO: 1902393 - DNA, 25 bp, Homo sapien
agattagccctaggaagtccctgcc

SEQ ID NO: 1902394 - DNA, 25 bp, Homo sapien
ctggtaagattagccctaggaagtc

SEQ ID NO: 1902395 - DNA, 25 bp, Homo sapien
ctaggaagtccctgcccgaccaggg

SEQ ID NO: 1902396 - DNA, 25 bp, Homo sapien
accagctggtaagattagccctagg

SEQ ID NO: 1902397 - DNA, 25 bp, Homo sapien
gaagagaagggtaggaagccagagc

SEQ ID NO: 1902398 - DNA, 25 bp, Homo sapien
agagaagggtaggaagccagagcca

SEQ ID NO: 1902399 - DNA, 25 bp, Homo sapien
agaagggtaggaagccagagccacc

SEQ ID NO: 1902400 - DNA, 25 bp, Homo sapien
ctcagaagagaagggtaggaagcca

SEQ ID NO: 1902401 - DNA, 25 bp, Homo sapien
cctggttgggtttttaatgtatgag

SEQ ID NO: 1902402 - DNA, 25 bp, Homo sapien
tctcatgacagattatatattaggt

SEQ ID NO: 1902403 - DNA, 25 bp, Homo sapien
gatcaatgtatttacacccaagaga

SEQ ID NO: 1902404 - DNA, 25 bp, Homo sapien
agtttctatgagcttgatcaatgta

SEQ ID NO: 1902405 - DNA, 25 bp, Homo sapien
tccagagatggaacttaaagcttca

SEQ ID NO: 1902406 - DNA, 25 bp, Homo sapien
ttaaccatccataacaaccaaacag

SEQ ID NO: 1902407 - DNA, 25 bp, Homo sapien
cagttacctgggcatacttagccta

SEQ ID NO: 1902408 - DNA, 25 bp, Homo sapien
aaagcttcaccccttgagtatgggc

SEQ ID NO: 1902409 - DNA, 25 bp, Homo sapien
cgagagcggcttgaacgccagatga

SEQ ID NO: 1902410 - DNA, 25 bp, Homo sapien
gaggatgcgccccaggcgttctgcc

SEQ ID NO: 1902411 - DNA, 25 bp, Homo sapien
tgcagatccagcaaaagacccgaga

SEQ ID NO: 1902412 - DNA, 25 bp, Homo sapien
gcgtgcgcgactgcaaagtctggca

SEQ ID NO: 1902413 - DNA, 25 bp, Homo sapien
agctgcggcccaagcctgtgggact

SEQ ID NO: 1902414 - DNA, 25 bp, Homo sapien
ccagctgcggcccaagcctgtggga

SEQ ID NO: 1902415 - DNA, 25 bp, Homo sapien
tgcggcccaagcctgtgggactccg

SEQ ID NO: 1902416 - DNA, 25 bp, Homo sapien
tgtcgaccgcgtcggcccagctgcg

SEQ ID NO: 1902417 - DNA, 25 bp, Homo sapien
cgctctgcggatgggtcgtagattc

SEQ ID NO: 1902418 - DNA, 25 bp, Homo sapien
cgcaagctgctttcatctcggtctg

SEQ ID NO: 1902419 - DNA, 25 bp, Homo sapien
aaagccaaggctgcgctgctttgcg

SEQ ID NO: 1902420 - DNA, 25 bp, Homo sapien
ggtgccggagcagcctccgcaagct

SEQ ID NO: 1902421 - DNA, 25 bp, Homo sapien
aaacagctgcgagagccccagagca

SEQ ID NO: 1902422 - DNA, 25 bp, Homo sapien
taaacctaaacagctgcgagagccc

SEQ ID NO: 1902423 - DNA, 25 bp, Homo sapien
ctaaacagctgcgagagccccagag

SEQ ID NO: 1902424 - DNA, 25 bp, Homo sapien
acctaaacagctgcgagagccccag

SEQ ID NO: 1902425 - DNA, 25 bp, Homo sapien
gcgtcctctcccagcggtgaccagg

SEQ ID NO: 1902426 - DNA, 25 bp, Homo sapien
cgtcctctcccagcggtgaccaggg

SEQ ID NO: 1902427 - DNA, 25 bp, Homo sapien
gggcgtcctctcccagcggtgacca

SEQ ID NO: 1902428 - DNA, 25 bp, Homo sapien
ggcgtcctctcccagcggtgaccag

SEQ ID NO: 1902429 - DNA, 25 bp, Homo sapien
aggcgctctgaagccgaattacgtc

SEQ ID NO: 1902430 - DNA, 25 bp, Homo sapien
aattacgtctgcctggcatcccgaa

SEQ ID NO: 1902431 - DNA, 25 bp, Homo sapien
cttttgcttaagcaaggcgctctga

SEQ ID NO: 1902432 - DNA, 25 bp, Homo sapien
ccgaaacactgacggccctgctatg

SEQ ID NO: 1902433 - DNA, 25 bp, Homo sapien
caaattcaggggtgggggtgtgagg

SEQ ID NO: 1902434 - DNA, 25 bp, Homo sapien
gcaaattcaggggtgggggtgtgag

SEQ ID NO: 1902435 - DNA, 25 bp, Homo sapien
ggcaaattcaggggtgggggtgtga

SEQ ID NO: 1902436 - DNA, 25 bp, Homo sapien
ctgtgggcaaattcaggggtggggg

SEQ ID NO: 1902437 - DNA, 25 bp, Homo sapien
ggacgcagccgcctagctctgccgg

SEQ ID NO: 1902438 - DNA, 25 bp, Homo sapien
acttgcacttcagcgcgcggttctc

SEQ ID NO: 1902439 - DNA, 25 bp, Homo sapien
tctgccggccgtcctgaggcagctg

SEQ ID NO: 1902440 - DNA, 25 bp, Homo sapien
gccgggaggcgcgtggccacttgca

SEQ ID NO: 1902441 - DNA, 25 bp, Homo sapien
gaccactgatcatttgaatcaaggc

SEQ ID NO: 1902442 - DNA, 25 bp, Homo sapien
tcatttgaatcaaggcagtctcccc

SEQ ID NO: 1902443 - DNA, 25 bp, Homo sapien
ccactgatcatttgaatcaaggcag

SEQ ID NO: 1902444 - DNA, 25 bp, Homo sapien
ctgatcatttgaatcaaggcagtct

SEQ ID NO: 1902445 - DNA, 25 bp, Homo sapien
ttgcaattcagcaacacgctcgctg

SEQ ID NO: 1902446 - DNA, 25 bp, Homo sapien
ggaaaatcgaattgagtgcgggctc

SEQ ID NO: 1902447 - DNA, 25 bp, Homo sapien
ggaggtgccccgagacattgcaatt

SEQ ID NO: 1902448 - DNA, 25 bp, Homo sapien
tgcaccatgtcaaccgaaagaacca

SEQ ID NO: 1902449 - DNA, 25 bp, Homo sapien
agtgtggtctgaaagaagccgctca

SEQ ID NO: 1902450 - DNA, 25 bp, Homo sapien
gaaactcaaggcctttgagcgacgg

SEQ ID NO: 1902451 - DNA, 25 bp, Homo sapien
cagccccggagaagtgtggtctgaa

SEQ ID NO: 1902452 - DNA, 25 bp, Homo sapien
ttgggattccgcgttgacctaggag

SEQ ID NO: 1902453 - DNA, 25 bp, Homo sapien
gtgcattccttggagccagggttgc

SEQ ID NO: 1902454 - DNA, 25 bp, Homo sapien
gttgctattggtggcgagctggccg

SEQ ID NO: 1902455 - DNA, 25 bp, Homo sapien
gttgagccgcgttactccgagcgct

SEQ ID NO: 1902456 - DNA, 25 bp, Homo sapien
cggagttacgggagtagtgataaca

SEQ ID NO: 1902457 - DNA, 25 bp, Homo sapien
tcacagcctcgccctccctgggctc

SEQ ID NO: 1902458 - DNA, 25 bp, Homo sapien
acagcctcgccctccctgggctcac

SEQ ID NO: 1902459 - DNA, 25 bp, Homo sapien
cacagcctcgccctccctgggctca

SEQ ID NO: 1902460 - DNA, 25 bp, Homo sapien
atctgccgccttcccaacgggaaga

SEQ ID NO: 1902461 - DNA, 25 bp, Homo sapien
gagtctcgccgcgtttaggtggaca

SEQ ID NO: 1902462 - DNA, 25 bp, Homo sapien
ccttcccaacgggaagagggcagag

SEQ ID NO: 1902463 - DNA, 25 bp, Homo sapien
caggcgtaactggtctttgtggaaa

SEQ ID NO: 1902464 - DNA, 25 bp, Homo sapien
ttaggtgtcctgtaaggcaagctga

SEQ ID NO: 1902465 - DNA, 25 bp, Homo sapien
cagagtgttgagaactgacaggcca

SEQ ID NO: 1902466 - DNA, 25 bp, Homo sapien
tcctcgtgatgacagccaggtcttt

SEQ ID NO: 1902467 - DNA, 25 bp, Homo sapien
taaggcaagctgataaatcctcgtg

SEQ ID NO: 1902468 - DNA, 25 bp, Homo sapien
gaacaattagttgagataacactgt

SEQ ID NO: 1902469 - DNA, 25 bp, Homo sapien
tagttgagataacactgtcttcgaa

SEQ ID NO: 1902470 - DNA, 25 bp, Homo sapien
tgagataacactgtcttcgaaccag

SEQ ID NO: 1902471 - DNA, 25 bp, Homo sapien
caattagttgagataacactgtctt

SEQ ID NO: 1902472 - DNA, 25 bp, Homo sapien
ctgggttatattcatagggggttat

SEQ ID NO: 1902473 - DNA, 25 bp, Homo sapien
tgtcatctgggttatattcataggg

SEQ ID NO: 1902474 - DNA, 25 bp, Homo sapien
catctgggttatattcatagggggt

SEQ ID NO: 1902475 - DNA, 25 bp, Homo sapien
ttgtcatctgggttatattcatagg

SEQ ID NO: 1902476 - DNA, 25 bp, Homo sapien
ctagtcgaaagatgagtaaccagat

SEQ ID NO: 1902477 - DNA, 25 bp, Homo sapien
tgggaatttttgacatcagtgtgtc

SEQ ID NO: 1902478 - DNA, 25 bp, Homo sapien
cttgtcccaggatgaaggtcgcttg

SEQ ID NO: 1902479 - DNA, 25 bp, Homo sapien
cttgacatatgctacttctattggg

SEQ ID NO: 1902480 - DNA, 25 bp, Homo sapien
aagtacttcctaactgcacattttg

SEQ ID NO: 1902481 - DNA, 25 bp, Homo sapien
tgttgatcgtgtagcactgcttctt

SEQ ID NO: 1902482 - DNA, 25 bp, Homo sapien
tttactctcctctcgtttcttctct

SEQ ID NO: 1902483 - DNA, 25 bp, Homo sapien
ctaactgcacattttgttgatcgtg

SEQ ID NO: 1902484 - DNA, 25 bp, Homo sapien
tggaaacataaaccttcatctgcag

SEQ ID NO: 1902485 - DNA, 25 bp, Homo sapien
ttggacctggaaacataaaccttca

SEQ ID NO: 1902486 - DNA, 25 bp, Homo sapien
aacataaaccttcatctgcagtact

SEQ ID NO: 1902487 - DNA, 25 bp, Homo sapien
ggacctggaaacataaaccttcatc

SEQ ID NO: 1902488 - DNA, 25 bp, Homo sapien
ttccacagcagtaaggaggagactg

SEQ ID NO: 1902489 - DNA, 25 bp, Homo sapien
agtctagaaggcccaggcggcatcc

SEQ ID NO: 1902490 - DNA, 25 bp, Homo sapien
tgaagcagggccagttgtagtcagt

SEQ ID NO: 1902491 - DNA, 25 bp, Homo sapien
ggccagttgtagtcagtcttttcct

SEQ ID NO: 1902492 - DNA, 25 bp, Homo sapien
ctcttcaaaagtgcaagatcgatgt

SEQ ID NO: 1902493 - DNA, 25 bp, Homo sapien
gtgcaagatcgatgtcctttttctg

SEQ ID NO: 1902494 - DNA, 25 bp, Homo sapien
aagtgcaagatcgatgtcctttttc

SEQ ID NO: 1902495 - DNA, 25 bp, Homo sapien
tcaaaagtgcaagatcgatgtcctt

SEQ ID NO: 1902496 - DNA, 25 bp, Homo sapien
ttttaaggctgtcatgggggaagga

SEQ ID NO: 1902497 - DNA, 25 bp, Homo sapien
taaggctgtcatgggggaaggatct

SEQ ID NO: 1902498 - DNA, 25 bp, Homo sapien
ctattttaaggctgtcatgggggaa

SEQ ID NO: 1902499 - DNA, 25 bp, Homo sapien
tattttaaggctgtcatgggggaag

SEQ ID NO: 1902500 - DNA, 25 bp, Homo sapien
ctttcctctggcaatctggaagctc

SEQ ID NO: 1902501 - DNA, 25 bp, Homo sapien
gtaaacactgtattgccagatcccc

SEQ ID NO: 1902502 - DNA, 25 bp, Homo sapien
aaggcttgctgagaccctggtggta

SEQ ID NO: 1902503 - DNA, 25 bp, Homo sapien
tggaagctccctaattcagatctgc

SEQ ID NO: 1902504 - DNA, 25 bp, Homo sapien
ccgtttggatgaggattggttgatc

SEQ ID NO: 1902505 - DNA, 25 bp, Homo sapien
gacttcaagttcaggtgtgttacct

SEQ ID NO: 1902506 - DNA, 25 bp, Homo sapien
gcagcaacaacttggggtttgccct

SEQ ID NO: 1902507 - DNA, 25 bp, Homo sapien
tggttgatctaggtttggcttggct

SEQ ID NO: 1902508 - DNA, 25 bp, Homo sapien
catttctatctcttcatgccgccta

SEQ ID NO: 1902509 - DNA, 25 bp, Homo sapien
tctatctcttcatgccgcctatgct

SEQ ID NO: 1902510 - DNA, 25 bp, Homo sapien
tcatgccgcctatgctcagctaaac

SEQ ID NO: 1902511 - DNA, 25 bp, Homo sapien
tcttcatgccgcctatgctcagcta

SEQ ID NO: 1902512 - DNA, 25 bp, Homo sapien
tatatctgatccaataccaggacac

SEQ ID NO: 1902513 - DNA, 25 bp, Homo sapien
taagacaattgcattagagactctc

SEQ ID NO: 1902514 - DNA, 25 bp, Homo sapien
aataccaggacacctcttctatttc

SEQ ID NO: 1902515 - DNA, 25 bp, Homo sapien
ctgcttttgcagaggagggtgcact

SEQ ID NO: 1902516 - DNA, 25 bp, Homo sapien
ctgttggtaaatgtgggttatggct

SEQ ID NO: 1902517 - DNA, 25 bp, Homo sapien
accagttctgttggtaaatgtgggt

SEQ ID NO: 1902518 - DNA, 25 bp, Homo sapien
cagttctgttggtaaatgtgggtta

SEQ ID NO: 1902519 - DNA, 25 bp, Homo sapien
ggtaaatgtgggttatggctgcagc

SEQ ID NO: 1902520 - DNA, 25 bp, Homo sapien
gaatttctgaagtgtgctctctttc

SEQ ID NO: 1902521 - DNA, 25 bp, Homo sapien
gggctgttacggattgtcagataac

SEQ ID NO: 1902522 - DNA, 25 bp, Homo sapien
tacggattgtcagataacacggatg

SEQ ID NO: 1902523 - DNA, 25 bp, Homo sapien
tcagataacacggatggacaatggt

SEQ ID NO: 1902524 - DNA, 25 bp, Homo sapien
gggcataactctttaactcctttga

SEQ ID NO: 1902525 - DNA, 25 bp, Homo sapien
tgatgatgcctgaatttgtctctgg

SEQ ID NO: 1902526 - DNA, 25 bp, Homo sapien
agaacggtctctccctaaagtccat

SEQ ID NO: 1902527 - DNA, 25 bp, Homo sapien
catagctcttcagtaagaacggtct

SEQ ID NO: 1902528 - DNA, 25 bp, Homo sapien
tgttctcttggtgagagtcagacac

SEQ ID NO: 1902529 - DNA, 25 bp, Homo sapien
tgtccgccaccagagctgttctctt

SEQ ID NO: 1902530 - DNA, 25 bp, Homo sapien
cgtgatccacttattctgtgcagaa

SEQ ID NO: 1902531 - DNA, 25 bp, Homo sapien
acatcaggatctcctcgaagctctg

SEQ ID NO: 1902532 - DNA, 25 bp, Homo sapien
tagtcatgaacctgacagactctga

SEQ ID NO: 1902533 - DNA, 25 bp, Homo sapien
tggtgtagtcatgaacctgacagac

SEQ ID NO: 1902534 - DNA, 25 bp, Homo sapien
gatgcatggctaaggttgatgacta

SEQ ID NO: 1902535 - DNA, 25 bp, Homo sapien
ctgacagactctgatgcatggctaa

SEQ ID NO: 1902536 - DNA, 25 bp, Homo sapien
ctgactaaacagtaagattctgcag

SEQ ID NO: 1902537 - DNA, 25 bp, Homo sapien
gactaaacagtaagattctgcaggg

SEQ ID NO: 1902538 - DNA, 25 bp, Homo sapien
tgactaaacagtaagattctgcagg

SEQ ID NO: 1902539 - DNA, 25 bp, Homo sapien
ggagttggtactgctcctttcgtca

SEQ ID NO: 1902540 - DNA, 25 bp, Homo sapien
gatctcttggagctacagattggag

SEQ ID NO: 1902541 - DNA, 25 bp, Homo sapien
tacagattggaggagttggtactgc

SEQ ID NO: 1902542 - DNA, 25 bp, Homo sapien
gctgatctcttggagctacagattg

SEQ ID NO: 1902543 - DNA, 25 bp, Homo sapien
ttttggcaaatagagtttttggcat

SEQ ID NO: 1902544 - DNA, 25 bp, Homo sapien
cttttggcaaatagagtttttggca

SEQ ID NO: 1902545 - DNA, 25 bp, Homo sapien
catcaccggtgcagggaagctgagc

SEQ ID NO: 1902546 - DNA, 25 bp, Homo sapien
gtggtgacatcaccggtgcagggaa

SEQ ID NO: 1902547 - DNA, 25 bp, Homo sapien
caggtggtggtgacatcaccggtgc

SEQ ID NO: 1902548 - DNA, 25 bp, Homo sapien
acatagctgctatttcataggcctc

SEQ ID NO: 1902549 - DNA, 25 bp, Homo sapien
attcttttgccttccgactattttg

SEQ ID NO: 1902550 - DNA, 25 bp, Homo sapien
ccttccgactattttgcatctttcc

SEQ ID NO: 1902551 - DNA, 25 bp, Homo sapien
ttttgccttccgactattttgcatc

SEQ ID NO: 1902552 - DNA, 25 bp, Homo sapien
ttgccttccgactattttgcatctt

SEQ ID NO: 1902553 - DNA, 25 bp, Homo sapien
tctcatgaagggtgcctggcaagaa

SEQ ID NO: 1902554 - DNA, 25 bp, Homo sapien
ttggatctcatgaagggtgcctggc

SEQ ID NO: 1902555 - DNA, 25 bp, Homo sapien
cttgtttggatctcatgaagggtgc

SEQ ID NO: 1902556 - DNA, 25 bp, Homo sapien
catgaagggtgcctggcaagaacta

SEQ ID NO: 1902557 - DNA, 25 bp, Homo sapien
tattaactatgcagccgccttcatt

SEQ ID NO: 1902558 - DNA, 25 bp, Homo sapien
taaattattaactatgcagccgcct

SEQ ID NO: 1902559 - DNA, 25 bp, Homo sapien
aatactgaaaagaggtttgggtcat

SEQ ID NO: 1902560 - DNA, 25 bp, Homo sapien
aagaggtttgggtcattcattaaat

SEQ ID NO: 1902561 - DNA, 25 bp, Homo sapien
gatgatggaggggtgccttcagcca

SEQ ID NO: 1902562 - DNA, 25 bp, Homo sapien
ggtggacggcaagacggagagtggt

SEQ ID NO: 1902563 - DNA, 25 bp, Homo sapien
ctatagcatggtggacggcaagacg

SEQ ID NO: 1902564 - DNA, 25 bp, Homo sapien
agagtggttggccagtgtgcttggg

SEQ ID NO: 1902565 - DNA, 25 bp, Homo sapien
tagcacagacagtgcctgctcagtc

SEQ ID NO: 1902566 - DNA, 25 bp, Homo sapien
cagaggatagcacagacagtgcctg

SEQ ID NO: 1902567 - DNA, 25 bp, Homo sapien
gaggatagcacagacagtgcctgct

SEQ ID NO: 1902568 - DNA, 25 bp, Homo sapien
gcacagacagtgcctgctcagtcat

SEQ ID NO: 1902569 - DNA, 25 bp, Homo sapien
ctgcatctgatcactttccactcaa

SEQ ID NO: 1902570 - DNA, 25 bp, Homo sapien
tctgatcactttccactcaatagaa

SEQ ID NO: 1902571 - DNA, 25 bp, Homo sapien
tccatatgacacctctgtgggtggc

SEQ ID NO: 1902572 - DNA, 25 bp, Homo sapien
atctgggctggataaagtccttcca

SEQ ID NO: 1902573 - DNA, 25 bp, Homo sapien
gcaaaggaaattgctccattcaaac

SEQ ID NO: 1902574 - DNA, 25 bp, Homo sapien
attggtgagtttaggtggaagcaaa

SEQ ID NO: 1902575 - DNA, 25 bp, Homo sapien
tgagtttaggtggaagcaaaggaaa

SEQ ID NO: 1902576 - DNA, 25 bp, Homo sapien
aaacttcccaagctctctctcaaaa

SEQ ID NO: 1902577 - DNA, 25 bp, Homo sapien
tgctttgggctgattccatagagct

SEQ ID NO: 1902578 - DNA, 25 bp, Homo sapien
ttttgctttgggctgattccataga

SEQ ID NO: 1902579 - DNA, 25 bp, Homo sapien
ctattttgctttgggctgattccat

SEQ ID NO: 1902580 - DNA, 25 bp, Homo sapien
tttgctttgggctgattccatagag

SEQ ID NO: 1902581 - DNA, 25 bp, Homo sapien
catgaagcctgggtatctcagacta

SEQ ID NO: 1902582 - DNA, 25 bp, Homo sapien
tcacaagtacacaagaagaatgggc

SEQ ID NO: 1902583 - DNA, 25 bp, Homo sapien
gtgataccctcctaggaaccttgag

SEQ ID NO: 1902584 - DNA, 25 bp, Homo sapien
ccatgctgctaagagtcacaagtac

SEQ ID NO: 1902585 - DNA, 25 bp, Homo sapien
tcaggataaagactaccaccagcac

SEQ ID NO: 1902586 - DNA, 25 bp, Homo sapien
gctgctggcatagctgagacagatg

SEQ ID NO: 1902587 - DNA, 25 bp, Homo sapien
tctttggatttgaggcagacgtttc

SEQ ID NO: 1902588 - DNA, 25 bp, Homo sapien
ggtaataacccacatagaaggccag

SEQ ID NO: 1902589 - DNA, 25 bp, Homo sapien
ctgttttggtacactgggattgcag

SEQ ID NO: 1902590 - DNA, 25 bp, Homo sapien
catccttattctgttgatacatctc

SEQ ID NO: 1902591 - DNA, 25 bp, Homo sapien
tacatctcccaagtatagcataaaa

SEQ ID NO: 1902592 - DNA, 25 bp, Homo sapien
tgttatcgtcaaataaagtgtatac

SEQ ID NO: 1902593 - DNA, 25 bp, Homo sapien
aaagttgttatcgtcaaataaagtg

SEQ ID NO: 1902594 - DNA, 25 bp, Homo sapien
actgaactgaacaagacatgcaagc

SEQ ID NO: 1902595 - DNA, 25 bp, Homo sapien
tgagagtcgcgccttcatgaatggg

SEQ ID NO: 1902596 - DNA, 25 bp, Homo sapien
gagggctgtcatcagaacttgatca

SEQ ID NO: 1902597 - DNA, 25 bp, Homo sapien
ggaactggaagtgcagtcctatcta

SEQ ID NO: 1902598 - DNA, 25 bp, Homo sapien
gcaggtcctttaccgccatctttct

SEQ ID NO: 1902599 - DNA, 25 bp, Homo sapien
ttagcggatttgcaggtcctttacc

SEQ ID NO: 1902600 - DNA, 25 bp, Homo sapien
cggatttgcaggtcctttaccgcca

SEQ ID NO: 1902601 - DNA, 25 bp, Homo sapien
tttgcaggtcctttaccgccatctt

SEQ ID NO: 1902602 - DNA, 25 bp, Homo sapien
ccttgattgtatgtgtggagaaacc

SEQ ID NO: 1902603 - DNA, 25 bp, Homo sapien
gaggctgctcacatgttgacaagga

SEQ ID NO: 1902604 - DNA, 25 bp, Homo sapien
gagatactggcgagaagaggatcca

SEQ ID NO: 1902605 - DNA, 25 bp, Homo sapien
gacaatagtcattgggcccacccta

SEQ ID NO: 1902606 - DNA, 25 bp, Homo sapien
tgtaccttgttctccaacgtgtcag

SEQ ID NO: 1902607 - DNA, 25 bp, Homo sapien
tgatgaccttcgagtagacccagac

SEQ ID NO: 1902608 - DNA, 25 bp, Homo sapien
aacgtgtcagtcgaaatggttggac

SEQ ID NO: 1902609 - DNA, 25 bp, Homo sapien
gcccaaaggcccaaattgatccgga

SEQ ID NO: 1902610 - DNA, 25 bp, Homo sapien
cctcgggcccattggtgaataagaa

SEQ ID NO: 1902611 - DNA, 25 bp, Homo sapien
tccacactcattacagtcatgatgg

SEQ ID NO: 1902612 - DNA, 25 bp, Homo sapien
caaattggttacaagtatccaggga

SEQ ID NO: 1902613 - DNA, 25 bp, Homo sapien
gaaaaggcattccaactatgtggac

SEQ ID NO: 1902614 - DNA, 25 bp, Homo sapien
tatagggctagtgtgcactaattct

SEQ ID NO: 1902615 - DNA, 25 bp, Homo sapien
ccaagtagctatagggctagtgtgc

SEQ ID NO: 1902616 - DNA, 25 bp, Homo sapien
aaatataccaagtagctatagggct

SEQ ID NO: 1902617 - DNA, 25 bp, Homo sapien
taatcaggatagtaaatataccaag

SEQ ID NO: 1902618 - DNA, 25 bp, Homo sapien
tgttccaacaagatgcatgaaatgg

SEQ ID NO: 1902619 - DNA, 25 bp, Homo sapien
taaaagttcggcagaggtgttccaa

SEQ ID NO: 1902620 - DNA, 25 bp, Homo sapien
ccacactggcagtttgataagcaaa

SEQ ID NO: 1902621 - DNA, 25 bp, Homo sapien
tacaatgaggatgttgccaaccagc

SEQ ID NO: 1902622 - DNA, 25 bp, Homo sapien
tgttcgtggactttccagggattaa

SEQ ID NO: 1902623 - DNA, 25 bp, Homo sapien
agttcagcctctttagtccccatgg

SEQ ID NO: 1902624 - DNA, 25 bp, Homo sapien
tctttgccgagtgtgaaaccagccg

SEQ ID NO: 1902625 - DNA, 25 bp, Homo sapien
aaacaagccagtgatcgcctcctcg

SEQ ID NO: 1902626 - DNA, 25 bp, Homo sapien
atggagagccgggatgaactagccc

SEQ ID NO: 1902627 - DNA, 25 bp, Homo sapien
cccttcctctctgcgggactgcagg

SEQ ID NO: 1902628 - DNA, 25 bp, Homo sapien
ggtgctcgcgtcctccccgcgcggc

SEQ ID NO: 1902629 - DNA, 25 bp, Homo sapien
ccgggcgcccttcctctctgcggga

SEQ ID NO: 1902630 - DNA, 25 bp, Homo sapien
gcggacagcccgggcgcccttcctc

SEQ ID NO: 1902631 - DNA, 25 bp, Homo sapien
gcgcgtgaccaaaaacggctctcag

SEQ ID NO: 1902632 - DNA, 25 bp, Homo sapien
cgctaagcgcgcgtgaccaaaaacg

SEQ ID NO: 1902633 - DNA, 25 bp, Homo sapien
ctatccgctaagcgcgcgtgaccaa

SEQ ID NO: 1902634 - DNA, 25 bp, Homo sapien
aaacggctctcagcgggtcccagct

SEQ ID NO: 1902635 - DNA, 25 bp, Homo sapien
aggaacagccaaacgcccgaaccag

SEQ ID NO: 1902636 - DNA, 25 bp, Homo sapien
ctccatttccaaagcgggggtccag

SEQ ID NO: 1902637 - DNA, 25 bp, Homo sapien
ttccaaagcgggggtccaggcacag

SEQ ID NO: 1902638 - DNA, 25 bp, Homo sapien
acagccaaacgcccgaaccagcggg

SEQ ID NO: 1902639 - DNA, 25 bp, Homo sapien
caagtgcttatctagactggtagtc

SEQ ID NO: 1902640 - DNA, 25 bp, Homo sapien
cgggtgcgtcgtgctcttttctagg

SEQ ID NO: 1902641 - DNA, 25 bp, Homo sapien
aggcatctctgctctcgcggagctt

SEQ ID NO: 1902642 - DNA, 25 bp, Homo sapien
gggtgccttcgcgaataaaatctga

SEQ ID NO: 1902643 - DNA, 25 bp, Homo sapien
tttttctccttgagccagttgtgga

SEQ ID NO: 1902644 - DNA, 25 bp, Homo sapien
ttttctccttgagccagttgtggag

SEQ ID NO: 1902645 - DNA, 25 bp, Homo sapien
ctatgaatcttattgggtagtttct

SEQ ID NO: 1902646 - DNA, 25 bp, Homo sapien
tatgaatcttattgggtagtttctc

SEQ ID NO: 1902647 - DNA, 25 bp, Homo sapien
gaatttcctgttgcaatatcctctg

SEQ ID NO: 1902648 - DNA, 25 bp, Homo sapien
gttggtttccaggttagtctctgaa

SEQ ID NO: 1902649 - DNA, 25 bp, Homo sapien
cgaaagtatcctgttctgaagaata

SEQ ID NO: 1902650 - DNA, 25 bp, Homo sapien
gaagtgggttgcttccgaaagtatc

SEQ ID NO: 1902651 - DNA, 25 bp, Homo sapien
ggtagatatgttccacttatggcag

SEQ ID NO: 1902652 - DNA, 25 bp, Homo sapien
gagtaatgagggtacaacatttccc

SEQ ID NO: 1902653 - DNA, 25 bp, Homo sapien
gaagtcagctccatcgatcatgcag

SEQ ID NO: 1902654 - DNA, 25 bp, Homo sapien
tatgcataagcaaccatgtgggatt

SEQ ID NO: 1902655 - DNA, 25 bp, Homo sapien
aaagcatcgccttctagtactggca

SEQ ID NO: 1902656 - DNA, 25 bp, Homo sapien
cagactttgacaggaccacacccgg

SEQ ID NO: 1902657 - DNA, 25 bp, Homo sapien
tgagctaacctccaaagcatcgcct

SEQ ID NO: 1902658 - DNA, 25 bp, Homo sapien
ggaccacacccggttagcctctgag

SEQ ID NO: 1902659 - DNA, 25 bp, Homo sapien
actatgtcctttatgtgtttcagga

SEQ ID NO: 1902660 - DNA, 25 bp, Homo sapien
tgtcctttatgtgtttcaggagttt

SEQ ID NO: 1902661 - DNA, 25 bp, Homo sapien
ttggtgttgactcaaaaggctttga

SEQ ID NO: 1902662 - DNA, 25 bp, Homo sapien
gatcttggtgttgactcaaaaggct

SEQ ID NO: 1902663 - DNA, 25 bp, Homo sapien
agatcgccttccaggtacacttaag

SEQ ID NO: 1902664 - DNA, 25 bp, Homo sapien
gcagatcgccttccaggtacactta

SEQ ID NO: 1902665 - DNA, 25 bp, Homo sapien
atcgccttccaggtacacttaagag

SEQ ID NO: 1902666 - DNA, 25 bp, Homo sapien
gatcgccttccaggtacacttaaga

SEQ ID NO: 1902667 - DNA, 25 bp, Homo sapien
tagtcagtgctgtccagtaatatgc

SEQ ID NO: 1902668 - DNA, 25 bp, Homo sapien
gcttcaattataagaccactggtag

SEQ ID NO: 1902669 - DNA, 25 bp, Homo sapien
tgtccagtaatatgcactgatcctg

SEQ ID NO: 1902670 - DNA, 25 bp, Homo sapien
gatcctgaacaacgcttcaattata

SEQ ID NO: 1902671 - DNA, 25 bp, Homo sapien
agctagtctctgattgataggaggc

SEQ ID NO: 1902672 - DNA, 25 bp, Homo sapien
ctagctagtctctgattgataggag

SEQ ID NO: 1902673 - DNA, 25 bp, Homo sapien
ctagtctctgattgataggaggcaa

SEQ ID NO: 1902674 - DNA, 25 bp, Homo sapien
agtctctgattgataggaggcaaac

SEQ ID NO: 1902675 - DNA, 25 bp, Homo sapien
caagggggctcctttagcctctggg

SEQ ID NO: 1902676 - DNA, 25 bp, Homo sapien
gacaagggggctcctttagcctctg

SEQ ID NO: 1902677 - DNA, 25 bp, Homo sapien
acaagggggctcctttagcctctgg

SEQ ID NO: 1902678 - DNA, 25 bp, Homo sapien
gctcctttagcctctgggtagggta

SEQ ID NO: 1902679 - DNA, 25 bp, Homo sapien
cagagtgggcagtggagtaatgtga

SEQ ID NO: 1902680 - DNA, 25 bp, Homo sapien
ggagtaatgtgaaaatctatcacct

SEQ ID NO: 1902681 - DNA, 25 bp, Homo sapien
ttatttgcgtgtcagagtgggcagt

SEQ ID NO: 1902682 - DNA, 25 bp, Homo sapien
tgggcagtggagtaatgtgaaaatc

SEQ ID NO: 1902683 - DNA, 25 bp, Homo sapien
tggtcatgatatttccatttgtcat

SEQ ID NO: 1902684 - DNA, 25 bp, Homo sapien
tatggtcatgatatttccatttgtc

SEQ ID NO: 1902685 - DNA, 25 bp, Homo sapien
ctatggtcatgatatttccatttgt

SEQ ID NO: 1902686 - DNA, 25 bp, Homo sapien
atggtcatgatatttccatttgtca

SEQ ID NO: 1902687 - DNA, 25 bp, Homo sapien
ctattatcctaaatgtatacttcca

SEQ ID NO: 1902688 - DNA, 25 bp, Homo sapien
tattatcctaaatgtatacttccaa

SEQ ID NO: 1902689 - DNA, 25 bp, Homo sapien
ttatcctaaatgtatacttccaacc

SEQ ID NO: 1902690 - DNA, 25 bp, Homo sapien
tatcctaaatgtatacttccaaccc

SEQ ID NO: 1902691 - DNA, 25 bp, Homo sapien
cagaatttggcctcctaatcatggc

SEQ ID NO: 1902692 - DNA, 25 bp, Homo sapien
ttgcctatatctataggatactggg

SEQ ID NO: 1902693 - DNA, 25 bp, Homo sapien
tattgaagttgattgcctatatcta

SEQ ID NO: 1902694 - DNA, 25 bp, Homo sapien
gatactggggtttccaaatgtgaat

SEQ ID NO: 1902695 - DNA, 25 bp, Homo sapien
catatcctgctttcctaagtggaat

SEQ ID NO: 1902696 - DNA, 25 bp, Homo sapien
tattttggccgggtgatacaggatg

SEQ ID NO: 1902697 - DNA, 25 bp, Homo sapien
aggttggttcttggcgatctcgaag

SEQ ID NO: 1902698 - DNA, 25 bp, Homo sapien
gtggaatattttggccgggtgatac

SEQ ID NO: 1902699 - DNA, 25 bp, Homo sapien
cagggccagcatgcagttgaaggtg

SEQ ID NO: 1902700 - DNA, 25 bp, Homo sapien
gcattctgttgcaacaccaggccag

SEQ ID NO: 1902701 - DNA, 25 bp, Homo sapien
gtcctcagacttgagcacttgctgg

SEQ ID NO: 1902702 - DNA, 25 bp, Homo sapien
ttgagcacttgctggagcagggcca

SEQ ID NO: 1902703 - DNA, 25 bp, Homo sapien
tagtgaagtaccagccccttttctc

SEQ ID NO: 1902704 - DNA, 25 bp, Homo sapien
tgccatagtgaagtaccagcccctt

SEQ ID NO: 1902705 - DNA, 25 bp, Homo sapien
catagtgaagtaccagccccttttc

SEQ ID NO: 1902706 - DNA, 25 bp, Homo sapien
gccatagtgaagtaccagccccttt

SEQ ID NO: 1902707 - DNA, 25 bp, Homo sapien
tcaagacccccgtgaactgttctgc

SEQ ID NO: 1902708 - DNA, 25 bp, Homo sapien
ctgagaaagcccctttgggcatatt

SEQ ID NO: 1902709 - DNA, 25 bp, Homo sapien
gccattattattcttgccaaccttg

SEQ ID NO: 1902710 - DNA, 25 bp, Homo sapien
gaaagcccctttgggcatattgagc

SEQ ID NO: 1902711 - DNA, 25 bp, Homo sapien
tctttttgcttcactctgatgacaa

SEQ ID NO: 1902712 - DNA, 25 bp, Homo sapien
ccagtccaacttccttggttgtcag

SEQ ID NO: 1902713 - DNA, 25 bp, Homo sapien
tcctccagtccaacttccttggttg

SEQ ID NO: 1902714 - DNA, 25 bp, Homo sapien
ttttgcttcactctgatgacaattt

SEQ ID NO: 1902715 - DNA, 25 bp, Homo sapien
cataggcctagtgaccaggatagta

SEQ ID NO: 1902716 - DNA, 25 bp, Homo sapien
caaaacctctcccataggcctagtg

SEQ ID NO: 1902717 - DNA, 25 bp, Homo sapien
tctcccataggcctagtgaccagga

SEQ ID NO: 1902718 - DNA, 25 bp, Homo sapien
ggcctagtgaccaggatagtatgtc

SEQ ID NO: 1902719 - DNA, 25 bp, Homo sapien
aaaataacttttgccctcactgtgt

SEQ ID NO: 1902720 - DNA, 25 bp, Homo sapien
ataacttttgccctcactgtgtttt

SEQ ID NO: 1902721 - DNA, 25 bp, Homo sapien
aaaaataacttttgccctcactgtg

SEQ ID NO: 1902722 - DNA, 25 bp, Homo sapien
cttttgccctcactgtgtttttcat

SEQ ID NO: 1902723 - DNA, 25 bp, Homo sapien
aaacataccgatctttagtgactaa

SEQ ID NO: 1902724 - DNA, 25 bp, Homo sapien
tctctgtagaggagattgacctcca

SEQ ID NO: 1902725 - DNA, 25 bp, Homo sapien
taccaagaatacaccaaagccatta

SEQ ID NO: 1902726 - DNA, 25 bp, Homo sapien
ccaccccttcagcatagcagtgatg

SEQ ID NO: 1902727 - DNA, 25 bp, Homo sapien
ttttctttatgctgtgacatagcca

SEQ ID NO: 1902728 - DNA, 25 bp, Homo sapien
ctagagatgcttcctctccattggg

SEQ ID NO: 1902729 - DNA, 25 bp, Homo sapien
tgttgctaatccatctctccaggaa

SEQ ID NO: 1902730 - DNA, 25 bp, Homo sapien
ctcttagaagcttcaggaacatgca

SEQ ID NO: 1902731 - DNA, 25 bp, Homo sapien
aaagtagacaatactccgactccag

SEQ ID NO: 1902732 - DNA, 25 bp, Homo sapien
caaaagtagacaatactccgactcc

SEQ ID NO: 1902733 - DNA, 25 bp, Homo sapien
tcaaaagtagacaatactccgactc

SEQ ID NO: 1902734 - DNA, 25 bp, Homo sapien
aaaagtagacaatactccgactcca

SEQ ID NO: 1902735 - DNA, 25 bp, Homo sapien
atggcctctcagatgttcctttgtc

SEQ ID NO: 1902736 - DNA, 25 bp, Homo sapien
tgtctgaccttccatatgccccttt

SEQ ID NO: 1902737 - DNA, 25 bp, Homo sapien
cagatgttcctttgtcattgtctga

SEQ ID NO: 1902738 - DNA, 25 bp, Homo sapien
catggaaacatgaagcctcagtttc

SEQ ID NO: 1902739 - DNA, 25 bp, Homo sapien
ttgtgcctacttctgcagtcacatc

SEQ ID NO: 1902740 - DNA, 25 bp, Homo sapien
tttgtgcctacttctgcagtcacat

SEQ ID NO: 1902741 - DNA, 25 bp, Homo sapien
acctgcagccttggttggtccctgt

SEQ ID NO: 1902742 - DNA, 25 bp, Homo sapien
gtacctgcagccttggttggtccct

SEQ ID NO: 1902743 - DNA, 25 bp, Homo sapien
tacctgcagccttggttggtccctg

SEQ ID NO: 1902744 - DNA, 25 bp, Homo sapien
tggagaattcagactaatcggttca

SEQ ID NO: 1902745 - DNA, 25 bp, Homo sapien
attcagactaatcggttcagcttcc

SEQ ID NO: 1902746 - DNA, 25 bp, Homo sapien
gccgctcgggctgacactctgcctc

SEQ ID NO: 1902747 - DNA, 25 bp, Homo sapien
tcgggctgacactctgcctccgggc

SEQ ID NO: 1902748 - DNA, 25 bp, Homo sapien
taaaagtgacacacgatctggtggc

SEQ ID NO: 1902749 - DNA, 25 bp, Homo sapien
agccttggaagttgacctttgttct

SEQ ID NO: 1902750 - DNA, 25 bp, Homo sapien
gaaaagcgatttggcaatgaggtca

SEQ ID NO: 1902751 - DNA, 25 bp, Homo sapien
gcttattgtaggagccttggaagtt

SEQ ID NO: 1902752 - DNA, 25 bp, Homo sapien
cagtcacttcatggtagaaagccat

SEQ ID NO: 1902753 - DNA, 25 bp, Homo sapien
tcatggtagaaagccattaaagcaa

SEQ ID NO: 1902754 - DNA, 25 bp, Homo sapien
ggtagaaagccattaaagcaaccat

SEQ ID NO: 1902755 - DNA, 25 bp, Homo sapien
cacttcatggtagaaagccattaaa

SEQ ID NO: 1902756 - DNA, 25 bp, Homo sapien
tatgaaatcaggtgcagttgaaacc

SEQ ID NO: 1902757 - DNA, 25 bp, Homo sapien
cattacttatgaaatcaggtgcagt

SEQ ID NO: 1902758 - DNA, 25 bp, Homo sapien
gaagtcattacttatgaaatcaggt

SEQ ID NO: 1902759 - DNA, 25 bp, Homo sapien
gtgcagttgaaaccaggacataaac

SEQ ID NO: 1902760 - DNA, 25 bp, Homo sapien
cgcctgcattggagctgccttcttt

SEQ ID NO: 1902761 - DNA, 25 bp, Homo sapien
gagagtgattgaacagataatagtc

SEQ ID NO: 1902762 - DNA, 25 bp, Homo sapien
attggctttgatagacgttataagc

SEQ ID NO: 1902763 - DNA, 25 bp, Homo sapien
gatagacgttataagctttgtgcat

SEQ ID NO: 1902764 - DNA, 25 bp, Homo sapien
gaacagataatagtccactggaaag

SEQ ID NO: 1902765 - DNA, 25 bp, Homo sapien
gatttctctgcaggagatcttgctg

SEQ ID NO: 1902766 - DNA, 25 bp, Homo sapien
gttgatcttgtcagcatcaaggatt

SEQ ID NO: 1902767 - DNA, 25 bp, Homo sapien
gtaggtgttgctatagaaactatac

SEQ ID NO: 1902768 - DNA, 25 bp, Homo sapien
caacaaccagtaggtgttgctatag

SEQ ID NO: 1902769 - DNA, 25 bp, Homo sapien
aatactgcatggataatgtatgacc

SEQ ID NO: 1902770 - DNA, 25 bp, Homo sapien
tttcccattaatactgcatggataa

SEQ ID NO: 1902771 - DNA, 25 bp, Homo sapien
ctgcatggataatgtatgaccagta

SEQ ID NO: 1902772 - DNA, 25 bp, Homo sapien
atgaccagtaataggaacaatataa

SEQ ID NO: 1902773 - DNA, 25 bp, Homo sapien
ctgtattcaagcctttgttccattt

SEQ ID NO: 1902774 - DNA, 25 bp, Homo sapien
tagggctaaatttcaatctggactc

SEQ ID NO: 1902775 - DNA, 25 bp, Homo sapien
ttagggctaaatttcaatctggact

SEQ ID NO: 1902776 - DNA, 25 bp, Homo sapien
ggctaaatttcaatctggactcaaa

SEQ ID NO: 1902777 - DNA, 25 bp, Homo sapien
gggctaaatttcaatctggactcaa

SEQ ID NO: 1902778 - DNA, 25 bp, Homo sapien
ttctccctttagactctttgctgtc

SEQ ID NO: 1902779 - DNA, 25 bp, Homo sapien
tccttctccctttagactctttgct

SEQ ID NO: 1902780 - DNA, 25 bp, Homo sapien
tccctttagactctttgctgtctta

SEQ ID NO: 1902781 - DNA, 25 bp, Homo sapien
ttagactctttgctgtcttactcac

SEQ ID NO: 1902782 - DNA, 25 bp, Homo sapien
cttctgattgtccaccggaaaatcc

SEQ ID NO: 1902783 - DNA, 25 bp, Homo sapien
accggaaaatccaagagccagagac

SEQ ID NO: 1902784 - DNA, 25 bp, Homo sapien
gtccaccggaaaatccaagagccag

SEQ ID NO: 1902785 - DNA, 25 bp, Homo sapien
gattgtccaccggaaaatccaagag

SEQ ID NO: 1902786 - DNA, 25 bp, Homo sapien
caccttttaaagatagaagactcaa

SEQ ID NO: 1902787 - DNA, 25 bp, Homo sapien
tggctgaggatctacattttccaca

SEQ ID NO: 1902788 - DNA, 25 bp, Homo sapien
acagccctactttggagagccgcca

SEQ ID NO: 1902789 - DNA, 25 bp, Homo sapien
tctgaggaggttcaagagtatgagt

SEQ ID NO: 1902790 - DNA, 25 bp, Homo sapien
taacaacactacttgtaccaaatgg

SEQ ID NO: 1902791 - DNA, 25 bp, Homo sapien
caaagatgaagtttaaattcttctg

SEQ ID NO: 1902792 - DNA, 25 bp, Homo sapien
aattcttctgaatcttaataacaac

SEQ ID NO: 1902793 - DNA, 25 bp, Homo sapien
actacttgtaccaaatggatccagc

SEQ ID NO: 1902794 - DNA, 25 bp, Homo sapien
ccacagttaccagattgtgaatgtc

SEQ ID NO: 1902795 - DNA, 25 bp, Homo sapien
tccacagttaccagattgtgaatgt

SEQ ID NO: 1902796 - DNA, 25 bp, Homo sapien
gcatgcctgctggacgacttaattg

SEQ ID NO: 1902797 - DNA, 25 bp, Homo sapien
gctggacgacttaattgtggagcct

SEQ ID NO: 1902798 - DNA, 25 bp, Homo sapien
gggcatgcctgctggacgacttaat

SEQ ID NO: 1902799 - DNA, 25 bp, Homo sapien
gcctgctggacgacttaattgtgga

SEQ ID NO: 1902800 - DNA, 25 bp, Homo sapien
tggctatttccacagatttactcac

SEQ ID NO: 1902801 - DNA, 25 bp, Homo sapien
ctggctatttccacagatttactca

SEQ ID NO: 1902802 - DNA, 25 bp, Homo sapien
caaactctcaaccttgccaagacaa

SEQ ID NO: 1902803 - DNA, 25 bp, Homo sapien
ttcctggcagtagacgactggtctt

SEQ ID NO: 1902804 - DNA, 25 bp, Homo sapien
ccaagacaacaatggcagatgtttc

SEQ ID NO: 1902805 - DNA, 25 bp, Homo sapien
tccattgtcaacatttcctggcagt

SEQ ID NO: 1902806 - DNA, 25 bp, Homo sapien
tgagaaggagctctcaggtgggtca

SEQ ID NO: 1902807 - DNA, 25 bp, Homo sapien
gagaaggagctctcaggtgggtcat

SEQ ID NO: 1902808 - DNA, 25 bp, Homo sapien
ctgagaaggagctctcaggtgggtc

SEQ ID NO: 1902809 - DNA, 25 bp, Homo sapien
tcagtcagcatgaaacctacttagt

SEQ ID NO: 1902810 - DNA, 25 bp, Homo sapien
caggtgagttgtcttgtgggcagcc

SEQ ID NO: 1902811 - DNA, 25 bp, Homo sapien
gcccacccataaattaagaggacag

SEQ ID NO: 1902812 - DNA, 25 bp, Homo sapien
gtcagcatgaaacctacttagtata

SEQ ID NO: 1902813 - DNA, 25 bp, Homo sapien
aacctgactgagtgcatcaccagtg

SEQ ID NO: 1902814 - DNA, 25 bp, Homo sapien
atctacaacctgactgagtgcatca

SEQ ID NO: 1902815 - DNA, 25 bp, Homo sapien
tacaacctgactgagtgcatcacca

SEQ ID NO: 1902816 - DNA, 25 bp, Homo sapien
cctgactgagtgcatcaccagtgtg

SEQ ID NO: 1902817 - DNA, 25 bp, Homo sapien
gcaccagacttcaccaatgatgaat

SEQ ID NO: 1902818 - DNA, 25 bp, Homo sapien
tggagacaccttaccacccatgata

SEQ ID NO: 1902819 - DNA, 25 bp, Homo sapien
tcatcagcatcattgtggagacacc

SEQ ID NO: 1902820 - DNA, 25 bp, Homo sapien
tatgagtttcgagaagcaccagact

SEQ ID NO: 1902821 - DNA, 25 bp, Homo sapien
cagtatgatttggatctccttttat

SEQ ID NO: 1902822 - DNA, 25 bp, Homo sapien
ttcagtctcctttctcagtgccctc

SEQ ID NO: 1902823 - DNA, 25 bp, Homo sapien
cagtctcctttctcagtgccctcac

SEQ ID NO: 1902824 - DNA, 25 bp, Homo sapien
ccttcagtctcctttctcagtgccc

SEQ ID NO: 1902825 - DNA, 25 bp, Homo sapien
cctcaactccttcagtctcctttct

SEQ ID NO: 1902826 - DNA, 25 bp, Homo sapien
gatgatcaatgtggtttctgcatcc

SEQ ID NO: 1902827 - DNA, 25 bp, Homo sapien
tcatcatcattgctgccacccagtg

SEQ ID NO: 1902828 - DNA, 25 bp, Homo sapien
agtcccgcggatcccttctctggga

SEQ ID NO: 1902829 - DNA, 25 bp, Homo sapien
tgcatccatctttctcagtcacagc

SEQ ID NO: 1902830 - DNA, 25 bp, Homo sapien
tctcgcctgatcgtgaacctgaaca

SEQ ID NO: 1902831 - DNA, 25 bp, Homo sapien
tgagagccaatactaaaggatttgc

SEQ ID NO: 1902832 - DNA, 25 bp, Homo sapien
gcattatagtaatcctgagagccaa

SEQ ID NO: 1902833 - DNA, 25 bp, Homo sapien
gaattgacagcgctgtctcgcctga

SEQ ID NO: 1902834 - DNA, 25 bp, Homo sapien
ctgaatatgattatctcagggcttc

SEQ ID NO: 1902835 - DNA, 25 bp, Homo sapien
ttaggagaagctacggctagaaaca

SEQ ID NO: 1902836 - DNA, 25 bp, Homo sapien
aattcaaggagagtgatgtagggct

SEQ ID NO: 1902837 - DNA, 25 bp, Homo sapien
gcagaaacctgaatatgattatctc

SEQ ID NO: 1902838 - DNA, 25 bp, Homo sapien
tttttctctgactgaacggcttgat

SEQ ID NO: 1902839 - DNA, 25 bp, Homo sapien
cactgctggttactccaaatttttc

SEQ ID NO: 1902840 - DNA, 25 bp, Homo sapien
tgctggttactccaaatttttctct

SEQ ID NO: 1902841 - DNA, 25 bp, Homo sapien
tctctgactgaacggcttgatatgc

SEQ ID NO: 1902842 - DNA, 25 bp, Homo sapien
gaaagtgactgcgtgctcttagcac

SEQ ID NO: 1902843 - DNA, 25 bp, Homo sapien
tagcacgggcactgaagagcataga

SEQ ID NO: 1902844 - DNA, 25 bp, Homo sapien
gtgctcttagcacgggcactgaaga

SEQ ID NO: 1902845 - DNA, 25 bp, Homo sapien
tcaaaaacctctcccgctgaaagtg

SEQ ID NO: 1902846 - DNA, 25 bp, Homo sapien
aaagagaaatgaagagcccagtggt

SEQ ID NO: 1902847 - DNA, 25 bp, Homo sapien
gagaaatgaagagcccagtggtgta

SEQ ID NO: 1902848 - DNA, 25 bp, Homo sapien
gaaatgaagagcccagtggtgtaac

SEQ ID NO: 1902849 - DNA, 25 bp, Homo sapien
aagagaaatgaagagcccagtggtg

SEQ ID NO: 1902850 - DNA, 25 bp, Homo sapien
ccaacagccaggagctggatcctca

SEQ ID NO: 1902851 - DNA, 25 bp, Homo sapien
caacagccaggagctggatcctcat

SEQ ID NO: 1902852 - DNA, 25 bp, Homo sapien
tttgatatgaaggagcacagccaac

SEQ ID NO: 1902853 - DNA, 25 bp, Homo sapien
ggctttgatatgaaggagcacagcc

SEQ ID NO: 1902854 - DNA, 25 bp, Homo sapien
atgccaatatcctcatcatggcagt

SEQ ID NO: 1902855 - DNA, 25 bp, Homo sapien
aaatactctggccatccatcctaca

SEQ ID NO: 1902856 - DNA, 25 bp, Homo sapien
agcttctgtggcagtccaggttttc

SEQ ID NO: 1902857 - DNA, 25 bp, Homo sapien
atatcctcatcatggcagtttggca

SEQ ID NO: 1902858 - DNA, 25 bp, Homo sapien
ttaactgtaacctgcctaaaggagc

SEQ ID NO: 1902859 - DNA, 25 bp, Homo sapien
tgtgtataaccctgaatgctagtgc

SEQ ID NO: 1902860 - DNA, 25 bp, Homo sapien
tctatcacagaacatgaacgctggg

SEQ ID NO: 1902861 - DNA, 25 bp, Homo sapien
tagtgcccgatggaaacaatctagc

SEQ ID NO: 1902862 - DNA, 25 bp, Homo sapien
ttggttattataacagatgttccct

SEQ ID NO: 1902863 - DNA, 25 bp, Homo sapien
gttgcatcctcagatgggaagttac

SEQ ID NO: 1902864 - DNA, 25 bp, Homo sapien
cagcttccgttggttattataacag

SEQ ID NO: 1902865 - DNA, 25 bp, Homo sapien
cttgtgtccttgtgctgggtctggt

SEQ ID NO: 1902866 - DNA, 25 bp, Homo sapien
tttgaaatgcgatccgaattgggac

SEQ ID NO: 1902867 - DNA, 25 bp, Homo sapien
tgtgagccattacagcccaaggaat

SEQ ID NO: 1902868 - DNA, 25 bp, Homo sapien
tacttatccgagatagtgcggtggg

SEQ ID NO: 1902869 - DNA, 25 bp, Homo sapien
gctgtcatataagtgctccagggca

SEQ ID NO: 1902870 - DNA, 25 bp, Homo sapien
aaggctgcgcgagagccccaccagg

SEQ ID NO: 1902871 - DNA, 25 bp, Homo sapien
ggcctgcggcgttcccaggaagtac

SEQ ID NO: 1902872 - DNA, 25 bp, Homo sapien
gaggcatgctgttttcataggcttc

SEQ ID NO: 1902873 - DNA, 25 bp, Homo sapien
cctgtggactgaagcgatgtgaggc

SEQ ID NO: 1902874 - DNA, 25 bp, Homo sapien
tcttccaccagcctcgagtggtcaa

SEQ ID NO: 1902875 - DNA, 25 bp, Homo sapien
gtggtcaagcgcaaagccatagcag

SEQ ID NO: 1902876 - DNA, 25 bp, Homo sapien
gagagagctgcggtccgaaaactgt

SEQ ID NO: 1902877 - DNA, 25 bp, Homo sapien
agcagagagagctgcggtccgaaaa

SEQ ID NO: 1902878 - DNA, 25 bp, Homo sapien
ctgtcatgatcagattccgatcttt

SEQ ID NO: 1902879 - DNA, 25 bp, Homo sapien
ctgtaggcgcacgatgcgtcgtgct

SEQ ID NO: 1902880 - DNA, 25 bp, Homo sapien
aagctgcggagaggccgtgtcggtc

SEQ ID NO: 1902881 - DNA, 25 bp, Homo sapien
cctatcggcggggtccagaagctgc

SEQ ID NO: 1902882 - DNA, 25 bp, Homo sapien
gcctcttcactaggatgtgcctctt

SEQ ID NO: 1902883 - DNA, 25 bp, Homo sapien
ttatcctatataagagttgggcctc

SEQ ID NO: 1902884 - DNA, 25 bp, Homo sapien
ttcaactgcaatgtaactcttaaga

SEQ ID NO: 1902885 - DNA, 25 bp, Homo sapien
gtaactcttaagaagtcttatccta

SEQ ID NO: 1902886 - DNA, 25 bp, Homo sapien
tgctatacatgtgttccttgagagt

SEQ ID NO: 1902887 - DNA, 25 bp, Homo sapien
tctagaaactatatagtttcaggcc

SEQ ID NO: 1902888 - DNA, 25 bp, Homo sapien
atcaagacctatgtcaaggagcttt

SEQ ID NO: 1902889 - DNA, 25 bp, Homo sapien
gaaacatcattatcaagacctatgt

SEQ ID NO: 1902890 - DNA, 25 bp, Homo sapien
ttctctcactccaaaggctgcattt

SEQ ID NO: 1902891 - DNA, 25 bp, Homo sapien
gggagcggaatcacaaattgcagca

SEQ ID NO: 1902892 - DNA, 25 bp, Homo sapien
tacgttttgatagtagattcagcca

SEQ ID NO: 1902893 - DNA, 25 bp, Homo sapien
cagaggcttcccatttgatttagca

SEQ ID NO: 1902894 - DNA, 25 bp, Homo sapien
cattaactctagaagggtcaaatcc

SEQ ID NO: 1902895 - DNA, 25 bp, Homo sapien
aaatgtgatgtcctcttccagagag

SEQ ID NO: 1902896 - DNA, 25 bp, Homo sapien
taaatgtgatgtcctcttccagaga

SEQ ID NO: 1902897 - DNA, 25 bp, Homo sapien
ctaaatgtgatgtcctcttccagag

SEQ ID NO: 1902898 - DNA, 25 bp, Homo sapien
aatgtgatgtcctcttccagagagc

SEQ ID NO: 1902899 - DNA, 25 bp, Homo sapien
tcttccttttagcatgtcgttgttg

SEQ ID NO: 1902900 - DNA, 25 bp, Homo sapien
gccaaggcaatctggttaccacggg

SEQ ID NO: 1902901 - DNA, 25 bp, Homo sapien
tgaatcttatctttactgccccaaa

SEQ ID NO: 1902902 - DNA, 25 bp, Homo sapien
gggcaacatctcctatcctcatgaa

SEQ ID NO: 1902903 - DNA, 25 bp, Homo sapien
tgagttctaccctcgacgctaggtc

SEQ ID NO: 1902904 - DNA, 25 bp, Homo sapien
tcagctaggccagagtccatattgc

SEQ ID NO: 1902905 - DNA, 25 bp, Homo sapien
ggtctttcacaacactttcctcagc

SEQ ID NO: 1902906 - DNA, 25 bp, Homo sapien
ccagcaatgtcctttgtatacacca

SEQ ID NO: 1902907 - DNA, 25 bp, Homo sapien
gaacatgcatccttgatcctttgcc

SEQ ID NO: 1902908 - DNA, 25 bp, Homo sapien
tgcatttttctacatcgagctcttg

SEQ ID NO: 1902909 - DNA, 25 bp, Homo sapien
tatgctggctacatcatggtcactc

SEQ ID NO: 1902910 - DNA, 25 bp, Homo sapien
tttagttcctgtcccaagatgcatt

SEQ ID NO: 1902911 - DNA, 25 bp, Homo sapien
tggattttgactttgagctggagag

SEQ ID NO: 1902912 - DNA, 25 bp, Homo sapien
ggatttggccccctttctgttgtca

SEQ ID NO: 1902913 - DNA, 25 bp, Homo sapien
ttggccccctttctgttgtcagtca

SEQ ID NO: 1902914 - DNA, 25 bp, Homo sapien
attttgactttgagctggagagccg

SEQ ID NO: 1902915 - DNA, 25 bp, Homo sapien
ctgctggtataggagaaggctggtt

SEQ ID NO: 1902916 - DNA, 25 bp, Homo sapien
tcataaaggcttcaaccctaagcaa

SEQ ID NO: 1902917 - DNA, 25 bp, Homo sapien
caacttccacaaacattgtacagaa

SEQ ID NO: 1902918 - DNA, 25 bp, Homo sapien
tacagaacacgctttcttcaccagc

SEQ ID NO: 1902919 - DNA, 25 bp, Homo sapien
actggcaaccagaaacgattattgt

SEQ ID NO: 1902920 - DNA, 25 bp, Homo sapien
cgtggcccgagccttgtctaacccg

SEQ ID NO: 1902921 - DNA, 25 bp, Homo sapien
aaaagatgaaagtgttcgatctgcc

SEQ ID NO: 1902922 - DNA, 25 bp, Homo sapien
gagggtcaaaatggcattccccgtg

SEQ ID NO: 1902923 - DNA, 25 bp, Homo sapien
cagcactcgagggtcaaaatggcat

SEQ ID NO: 1902924 - DNA, 25 bp, Homo sapien
tgaggacatagttgacgctgacgat

SEQ ID NO: 1902925 - DNA, 25 bp, Homo sapien
cgctgacgatacagtgtggcctgga

SEQ ID NO: 1902926 - DNA, 25 bp, Homo sapien
gccgtgtttcgccaggaacctgtag

SEQ ID NO: 1902927 - DNA, 25 bp, Homo sapien
gactgttgtgcacgatggtcgcgta

SEQ ID NO: 1902928 - DNA, 25 bp, Homo sapien
ctgacggagagacaggaggcagatg

SEQ ID NO: 1902929 - DNA, 25 bp, Homo sapien
gaggcagatggtggtgaaccagcct

SEQ ID NO: 1902930 - DNA, 25 bp, Homo sapien
caggaggcagatggtggtgaaccag

SEQ ID NO: 1902931 - DNA, 25 bp, Homo sapien
tgacggagagacaggaggcagatgg

SEQ ID NO: 1902932 - DNA, 25 bp, Homo sapien
tggaaggtgtcgcagccgtgcacat

SEQ ID NO: 1902933 - DNA, 25 bp, Homo sapien
tgtcgcagccgtgcacatggtggta

SEQ ID NO: 1902934 - DNA, 25 bp, Homo sapien
tcctgaggttcgtaccccgtcagct

SEQ ID NO: 1902935 - DNA, 25 bp, Homo sapien
gtgcacatggtggtacagagtcttc

SEQ ID NO: 1902936 - DNA, 25 bp, Homo sapien
tactggcggatcttcaagtagccgc

SEQ ID NO: 1902937 - DNA, 25 bp, Homo sapien
gacatgtccaggctgtactggcgga

SEQ ID NO: 1902938 - DNA, 25 bp, Homo sapien
caggctggcgcggaacataaacata

SEQ ID NO: 1902939 - DNA, 25 bp, Homo sapien
tgctgtgtagcttgatctccgtgac

SEQ ID NO: 1902940 - DNA, 25 bp, Homo sapien
cgccacaggtgaggccggcgttacg

SEQ ID NO: 1902941 - DNA, 25 bp, Homo sapien
gaagaaggagcgctcgatctcatac

SEQ ID NO: 1902942 - DNA, 25 bp, Homo sapien
ttacgcttggccaagacgcacttca

SEQ ID NO: 1902943 - DNA, 25 bp, Homo sapien
tcaggaagaaggagcgctcgatctc

SEQ ID NO: 1902944 - DNA, 25 bp, Homo sapien
cctgcacgaagtgagagtggtaggg

SEQ ID NO: 1902945 - DNA, 25 bp, Homo sapien
tcataaatgctgtttccggtcagct

SEQ ID NO: 1902946 - DNA, 25 bp, Homo sapien
tgggcggtgagcaccgccgtcatct

SEQ ID NO: 1902947 - DNA, 25 bp, Homo sapien
ggtctgccgggtgaatgtattcata

SEQ ID NO: 1902948 - DNA, 25 bp, Homo sapien
gatgtacatgatcttcccatctggg

SEQ ID NO: 1902949 - DNA, 25 bp, Homo sapien
tggactgaggctgtctctgagatgt

SEQ ID NO: 1902950 - DNA, 25 bp, Homo sapien
ggctaccacgaagatgaagccatcc

SEQ ID NO: 1902951 - DNA, 25 bp, Homo sapien
tgagaaagacccaagtggactgagg

SEQ ID NO: 1902952 - DNA, 25 bp, Homo sapien
agttctcggccaacgttgtccaggg

SEQ ID NO: 1902953 - DNA, 25 bp, Homo sapien
ttgagtggccccacgcctcgccgag

SEQ ID NO: 1902954 - DNA, 25 bp, Homo sapien
cagggggctggtccgacttgagtgg

SEQ ID NO: 1902955 - DNA, 25 bp, Homo sapien
gagcccagttctcggccaacgttgt

SEQ ID NO: 1902956 - DNA, 25 bp, Homo sapien
cctctcaaagtggacagcgggggat

SEQ ID NO: 1902957 - DNA, 25 bp, Homo sapien
gcgactgtattacccgagtgccggc

SEQ ID NO: 1902958 - DNA, 25 bp, Homo sapien
gcccctttgactggataccataggg

SEQ ID NO: 1902959 - DNA, 25 bp, Homo sapien
agtttgggaccaagtcccgcgactg

SEQ ID NO: 1902960 - DNA, 25 bp, Homo sapien
tccgacatacccactcagaaggagt

SEQ ID NO: 1902961 - DNA, 25 bp, Homo sapien
gccaacctattctccttcgtttctg

SEQ ID NO: 1902962 - DNA, 25 bp, Homo sapien
ggccttatcacatttatcgctcttc

SEQ ID NO: 1902963 - DNA, 25 bp, Homo sapien
tctgtcacgacctgctcttctcttt

SEQ ID NO: 1902964 - DNA, 25 bp, Homo sapien
caagatctaaagattctcttgcaat

SEQ ID NO: 1902965 - DNA, 25 bp, Homo sapien
gcagaaaattcgcaaatcctttgat

SEQ ID NO: 1902966 - DNA, 25 bp, Homo sapien
aaaccagctccctttgcggcgggat

SEQ ID NO: 1902967 - DNA, 25 bp, Homo sapien
cgggattacagtgggaacaagatct

SEQ ID NO: 1902968 - DNA, 25 bp, Homo sapien
gcacctgcgggacctctgatgaggg

SEQ ID NO: 1902969 - DNA, 25 bp, Homo sapien
cacctgcgggacctctgatgagggc

SEQ ID NO: 1902970 - DNA, 25 bp, Homo sapien
tgcacctgcgggacctctgatgagg

SEQ ID NO: 1902971 - DNA, 25 bp, Homo sapien
ctgcacctgcgggacctctgatgag

SEQ ID NO: 1902972 - DNA, 25 bp, Homo sapien
ggacctcgacatgattgtcccctgt

SEQ ID NO: 1902973 - DNA, 25 bp, Homo sapien
agacctggctgactgcgtgcttcgg

SEQ ID NO: 1902974 - DNA, 25 bp, Homo sapien
tgaggccacgagctaggcccttggc

SEQ ID NO: 1902975 - DNA, 25 bp, Homo sapien
agtaaggagactctgtgctgaggcc

SEQ ID NO: 1902976 - DNA, 25 bp, Homo sapien
cggagaagtgcggtgagaatctatg

SEQ ID NO: 1902977 - DNA, 25 bp, Homo sapien
gtgcggtgagaatctatgggctctc

SEQ ID NO: 1902978 - DNA, 25 bp, Homo sapien
gcgggacggagaagtgcggtgagaa

SEQ ID NO: 1902979 - DNA, 25 bp, Homo sapien
ctggcgggacggagaagtgcggtga

SEQ ID NO: 1902980 - DNA, 25 bp, Homo sapien
cagtcactgttaaagtagccagagg

SEQ ID NO: 1902981 - DNA, 25 bp, Homo sapien
gaccgttctggccaccaagaggact

SEQ ID NO: 1902982 - DNA, 25 bp, Homo sapien
ccagaggggaccgttctggccacca

SEQ ID NO: 1902983 - DNA, 25 bp, Homo sapien
caagaggactccagcgggagccttc

SEQ ID NO: 1902984 - DNA, 25 bp, Homo sapien
gccccacaagcaacaccatatgctg

SEQ ID NO: 1902985 - DNA, 25 bp, Homo sapien
tgctgcttctgatcaaacagcgagc

SEQ ID NO: 1902986 - DNA, 25 bp, Homo sapien
cggcaccaataattgacgagaccgg

SEQ ID NO: 1902987 - DNA, 25 bp, Homo sapien
tgatcaaacagcgagcgacatcggc

SEQ ID NO: 1902988 - DNA, 25 bp, Homo sapien
gtctgattatggatgctttgtccag

SEQ ID NO: 1902989 - DNA, 25 bp, Homo sapien
tctcattttgagatagctggtcgtg

SEQ ID NO: 1902990 - DNA, 25 bp, Homo sapien
tgggaacaccactctcattttgaga

SEQ ID NO: 1902991 - DNA, 25 bp, Homo sapien
tagctggtcgtgagtctgattatgg

SEQ ID NO: 1902992 - DNA, 25 bp, Homo sapien
cctagtccgcgcagcatttttggac

SEQ ID NO: 1902993 - DNA, 25 bp, Homo sapien
ctgcgaggtgatagccgagggcaaa

SEQ ID NO: 1902994 - DNA, 25 bp, Homo sapien
aaggcagtaatttagccagttcata

SEQ ID NO: 1902995 - DNA, 25 bp, Homo sapien
tccttctccctcctagtccgcgcag

SEQ ID NO: 1902996 - DNA, 25 bp, Homo sapien
cttctcacaacttaagctccgcaga

SEQ ID NO: 1902997 - DNA, 25 bp, Homo sapien
acaacttaagctccgcagattcatc

SEQ ID NO: 1902998 - DNA, 25 bp, Homo sapien
aaataaactttcaattagagatcat

SEQ ID NO: 1902999 - DNA, 25 bp, Homo sapien
aactttcaattagagatcatatttg

SEQ ID NO: 1903000 - DNA, 25 bp, Homo sapien
gttgctgatccaccgaatttgggcg

SEQ ID NO: 1903001 - DNA, 25 bp, Homo sapien
gaatttgggcaatcctgagggtcgt

SEQ ID NO: 1903002 - DNA, 25 bp, Homo sapien
gaggctgaagtatttgcaccaagaa

SEQ ID NO: 1903003 - DNA, 25 bp, Homo sapien
tattgatggcagtaaaagaccagcg

SEQ ID NO: 1903004 - DNA, 25 bp, Homo sapien
ttctactgccagctgcgaaccctgg

SEQ ID NO: 1903005 - DNA, 25 bp, Homo sapien
cctggtcctcggaaaatcgacataa

SEQ ID NO: 1903006 - DNA, 25 bp, Homo sapien
cgacataataatccctgacgtttgc

SEQ ID NO: 1903007 - DNA, 25 bp, Homo sapien
tgacgtttgctcttcagtctcgcgg

SEQ ID NO: 1903008 - DNA, 25 bp, Homo sapien
aagagcaggaaccccagacaactct

SEQ ID NO: 1903009 - DNA, 25 bp, Homo sapien
gaagagcaggaaccccagacaactc

SEQ ID NO: 1903010 - DNA, 25 bp, Homo sapien
ggaagagcaggaaccccagacaact

SEQ ID NO: 1903011 - DNA, 25 bp, Homo sapien
gagcaggaaccccagacaactcttt

SEQ ID NO: 1903012 - DNA, 25 bp, Homo sapien
tgcgcctagccaggcgttttgggtt

SEQ ID NO: 1903013 - DNA, 25 bp, Homo sapien
aaacgggtaaatcggcagcgagaca

SEQ ID NO: 1903014 - DNA, 25 bp, Homo sapien
aaagggcctcagtgcgcctagccag

SEQ ID NO: 1903015 - DNA, 25 bp, Homo sapien
cccctgcaaataatgctggcattcc

SEQ ID NO: 1903016 - DNA, 25 bp, Homo sapien
tcgggactcccaaggcgacccagcg

SEQ ID NO: 1903017 - DNA, 25 bp, Homo sapien
cccaaggcgacccagcgctctggct

SEQ ID NO: 1903018 - DNA, 25 bp, Homo sapien
gactcccaaggcgacccagcgctct

SEQ ID NO: 1903019 - DNA, 25 bp, Homo sapien
tctctcgggactcccaaggcgaccc

SEQ ID NO: 1903020 - DNA, 25 bp, Homo sapien
tcattggccaatagggctgagtgac

SEQ ID NO: 1903021 - DNA, 25 bp, Homo sapien
agtgacacgagtcggccccgagccg

SEQ ID NO: 1903022 - DNA, 25 bp, Homo sapien
ccaatagggctgagtgacacgagtc

SEQ ID NO: 1903023 - DNA, 25 bp, Homo sapien
tggccaatagggctgagtgacacga

SEQ ID NO: 1903024 - DNA, 25 bp, Homo sapien
tgcgtctttttcgaaatggcttggg

SEQ ID NO: 1903025 - DNA, 25 bp, Homo sapien
tgggccttcccgacgtcgtgcgcga

SEQ ID NO: 1903026 - DNA, 25 bp, Homo sapien
ctcctaatgagctcagggtgccggg

SEQ ID NO: 1903027 - DNA, 25 bp, Homo sapien
tctctgaaaccatggcgacacggaa

SEQ ID NO: 1903028 - DNA, 25 bp, Homo sapien
ttcggctcctagaggtgcgtttgga

SEQ ID NO: 1903029 - DNA, 25 bp, Homo sapien
ctacagactcgactcccggcttggt

SEQ ID NO: 1903030 - DNA, 25 bp, Homo sapien
acagactcgactcccggcttggttt

SEQ ID NO: 1903031 - DNA, 25 bp, Homo sapien
tttggtacgccggtgaccagattcg

SEQ ID NO: 1903032 - DNA, 25 bp, Homo sapien
gtgacagtcgcagcttaaccccgtt

SEQ ID NO: 1903033 - DNA, 25 bp, Homo sapien
caaagatgagctcagagcgagggtt

SEQ ID NO: 1903034 - DNA, 25 bp, Homo sapien
gccccgctgaggtggttgcgtctcc

SEQ ID NO: 1903035 - DNA, 25 bp, Homo sapien
tccaagtcgtgagcctccaatagct

SEQ ID NO: 1903036 - DNA, 25 bp, Homo sapien
tcctgactccacatgacttctaata

SEQ ID NO: 1903037 - DNA, 25 bp, Homo sapien
catgacttctaataactggcatttc

SEQ ID NO: 1903038 - DNA, 25 bp, Homo sapien
tctgctcaatgctggtgctttatat

SEQ ID NO: 1903039 - DNA, 25 bp, Homo sapien
ggttttccctagtttacatctcaga

SEQ ID NO: 1903040 - DNA, 25 bp, Homo sapien
tctccagtttcatgaataagcaccg

SEQ ID NO: 1903041 - DNA, 25 bp, Homo sapien
taatctccagtttcatgaataagca

SEQ ID NO: 1903042 - DNA, 25 bp, Homo sapien
cagtttcatgaataagcaccggcag

SEQ ID NO: 1903043 - DNA, 25 bp, Homo sapien
tttcatgaataagcaccggcagcag

SEQ ID NO: 1903044 - DNA, 25 bp, Homo sapien
aaggaacacaggacttgttttatat

SEQ ID NO: 1903045 - DNA, 25 bp, Homo sapien
taatacaagtaaaagcatgggcctg

SEQ ID NO: 1903046 - DNA, 25 bp, Homo sapien
gctggccagtggacgaaggaacaca

SEQ ID NO: 1903047 - DNA, 25 bp, Homo sapien
cctgtgcaggtataaaatgtgacac

SEQ ID NO: 1903048 - DNA, 25 bp, Homo sapien
ctggcttcacctgcttccaacccac

SEQ ID NO: 1903049 - DNA, 25 bp, Homo sapien
ttctggcttcacctgcttccaaccc

SEQ ID NO: 1903050 - DNA, 25 bp, Homo sapien
tctggcttcacctgcttccaaccca

SEQ ID NO: 1903051 - DNA, 25 bp, Homo sapien
cttcctctgtagcagagaaaaagcc

SEQ ID NO: 1903052 - DNA, 25 bp, Homo sapien
cctctgtagcagagaaaaagcctgc

SEQ ID NO: 1903053 - DNA, 25 bp, Homo sapien
tcctctgtagcagagaaaaagcctg

SEQ ID NO: 1903054 - DNA, 25 bp, Homo sapien
ctctgtagcagagaaaaagcctgcc

SEQ ID NO: 1903055 - DNA, 25 bp, Homo sapien
taacagtaggttagcatggcatcca

SEQ ID NO: 1903056 - DNA, 25 bp, Homo sapien
tagcatggcatccatcgtcctcctt

SEQ ID NO: 1903057 - DNA, 25 bp, Homo sapien
agcatggcatccatcgtcctccttg

SEQ ID NO: 1903058 - DNA, 25 bp, Homo sapien
attaacagtaggttagcatggcatc

SEQ ID NO: 1903059 - DNA, 25 bp, Homo sapien
gtgttttagcctgatgccaatttca

SEQ ID NO: 1903060 - DNA, 25 bp, Homo sapien
tgttttagcctgatgccaatttcag

SEQ ID NO: 1903061 - DNA, 25 bp, Homo sapien
cgtgttttagcctgatgccaatttc

SEQ ID NO: 1903062 - DNA, 25 bp, Homo sapien
tttaatttcctagattctgtgctta

SEQ ID NO: 1903063 - DNA, 25 bp, Homo sapien
ctttaatttcctagattctgtgctt

SEQ ID NO: 1903064 - DNA, 25 bp, Homo sapien
ttaatttcctagattctgtgcttac

SEQ ID NO: 1903065 - DNA, 25 bp, Homo sapien
cagctttcccgccacaggaaggcat

SEQ ID NO: 1903066 - DNA, 25 bp, Homo sapien
tttcatatcagctttcccgccacag

SEQ ID NO: 1903067 - DNA, 25 bp, Homo sapien
gctttcccgccacaggaaggcattt

SEQ ID NO: 1903068 - DNA, 25 bp, Homo sapien
catatcagctttcccgccacaggaa

SEQ ID NO: 1903069 - DNA, 25 bp, Homo sapien
ttatcattggggctgaaggatcccc

SEQ ID NO: 1903070 - DNA, 25 bp, Homo sapien
ttatgaaagttgaattccagttgtt

SEQ ID NO: 1903071 - DNA, 25 bp, Homo sapien
gggctgaaggatccccacacttaaa

SEQ ID NO: 1903072 - DNA, 25 bp, Homo sapien
ggatgtgacggttgtttatgaaagt

SEQ ID NO: 1903073 - DNA, 25 bp, Homo sapien
tgatctgtaagtgctacaacatgaa

SEQ ID NO: 1903074 - DNA, 25 bp, Homo sapien
gaaggaatttgtttggacatagaga

SEQ ID NO: 1903075 - DNA, 25 bp, Homo sapien
tacaggtgaaaacctatccataggg

SEQ ID NO: 1903076 - DNA, 25 bp, Homo sapien
caaaggtagaatttcattccactag

SEQ ID NO: 1903077 - DNA, 25 bp, Homo sapien
ggagtcaatactgcagccactgtca

SEQ ID NO: 1903078 - DNA, 25 bp, Homo sapien
gaagctacttctacatgtgatcata

SEQ ID NO: 1903079 - DNA, 25 bp, Homo sapien
tatttcccagttaaccatgtctaca

SEQ ID NO: 1903080 - DNA, 25 bp, Homo sapien
gacacgctgtgtaccaccttacaga

SEQ ID NO: 1903081 - DNA, 25 bp, Homo sapien
gttgacctgtgcagaaagactcgct

SEQ ID NO: 1903082 - DNA, 25 bp, Homo sapien
caggtcagtcagggaatcagagacc

SEQ ID NO: 1903083 - DNA, 25 bp, Homo sapien
gaaagactcgcttgtgtaacgttga

SEQ ID NO: 1903084 - DNA, 25 bp, Homo sapien
tgtaacgttgagatagatgtcatac

SEQ ID NO: 1903085 - DNA, 25 bp, Homo sapien
caaggtagcagtcactcatgaaata

SEQ ID NO: 1903086 - DNA, 25 bp, Homo sapien
ggccaaggtagcagtcactcatgaa

SEQ ID NO: 1903087 - DNA, 25 bp, Homo sapien
ccaggccaaggtagcagtcactcat

SEQ ID NO: 1903088 - DNA, 25 bp, Homo sapien
tggtccaggccaaggtagcagtcac

SEQ ID NO: 1903089 - DNA, 25 bp, Homo sapien
catccttcgtcttttgatttgggaa

SEQ ID NO: 1903090 - DNA, 25 bp, Homo sapien
aagggaagcaacatgatgatttcga

SEQ ID NO: 1903091 - DNA, 25 bp, Homo sapien
aatatatcctactcttttcaaagca

SEQ ID NO: 1903092 - DNA, 25 bp, Homo sapien
ccacttctcctaatatcaaaaacca

SEQ ID NO: 1903093 - DNA, 25 bp, Homo sapien
taacttacttcaagattctcagagc

SEQ ID NO: 1903094 - DNA, 25 bp, Homo sapien
ccacttggttgtggttaaggctacg

SEQ ID NO: 1903095 - DNA, 25 bp, Homo sapien
gctacgttgtcttacttgaaggcca

SEQ ID NO: 1903096 - DNA, 25 bp, Homo sapien
aaagccaatcaagactagactctgg

SEQ ID NO: 1903097 - DNA, 25 bp, Homo sapien
tttataagttggaatacattaagtc

SEQ ID NO: 1903098 - DNA, 25 bp, Homo sapien
ataagttggaatacattaagtcatc

SEQ ID NO: 1903099 - DNA, 25 bp, Homo sapien
tataagttggaatacattaagtcat

SEQ ID NO: 1903100 - DNA, 25 bp, Homo sapien
aaaatgctcatattgccaggtgcag

SEQ ID NO: 1903101 - DNA, 25 bp, Homo sapien
caaagtggactctctgcaagctcac

SEQ ID NO: 1903102 - DNA, 25 bp, Homo sapien
aacccaaagtggactctctgcaagc

SEQ ID NO: 1903103 - DNA, 25 bp, Homo sapien
gaacccaaagtggactctctgcaag

SEQ ID NO: 1903104 - DNA, 25 bp, Homo sapien
cccaaagtggactctctgcaagctc

SEQ ID NO: 1903105 - DNA, 25 bp, Homo sapien
ggtcagcatgcaatttgatccattt

SEQ ID NO: 1903106 - DNA, 25 bp, Homo sapien
ttcaactaagtcatcccacgagcct

SEQ ID NO: 1903107 - DNA, 25 bp, Homo sapien
cagagagttcattatgtccttcaac

SEQ ID NO: 1903108 - DNA, 25 bp, Homo sapien
cactggcaagtgagataagaaattc

SEQ ID NO: 1903109 - DNA, 25 bp, Homo sapien
tcaaaacacttaagagatggtctta

SEQ ID NO: 1903110 - DNA, 25 bp, Homo sapien
cagagtaggggagccttcaaaacac

SEQ ID NO: 1903111 - DNA, 25 bp, Homo sapien
caaaacacttaagagatggtcttac

SEQ ID NO: 1903112 - DNA, 25 bp, Homo sapien
aactcttggtacaccttctcagagt

SEQ ID NO: 1903113 - DNA, 25 bp, Homo sapien
tttgcagcatgtagctcactttcta

SEQ ID NO: 1903114 - DNA, 25 bp, Homo sapien
tttttgcagcatgtagctcactttc

SEQ ID NO: 1903115 - DNA, 25 bp, Homo sapien
ttgcagcatgtagctcactttctac

SEQ ID NO: 1903116 - DNA, 25 bp, Homo sapien
ttttgcagcatgtagctcactttct

SEQ ID NO: 1903117 - DNA, 25 bp, Homo sapien
caggcatggatcagttcaggaaggg

SEQ ID NO: 1903118 - DNA, 25 bp, Homo sapien
gaggtccgacccctagcatgtgggc

SEQ ID NO: 1903119 - DNA, 25 bp, Homo sapien
tcaggaagggactcgatggaggtcc

SEQ ID NO: 1903120 - DNA, 25 bp, Homo sapien
gcatgtgggcccttcataatcggct

SEQ ID NO: 1903121 - DNA, 25 bp, Homo sapien
caggttggtgatattcaggacagtc

SEQ ID NO: 1903122 - DNA, 25 bp, Homo sapien
cctggtttgcagccacgtccagcat

SEQ ID NO: 1903123 - DNA, 25 bp, Homo sapien
ggatcaccatctgaatcaggttggt

SEQ ID NO: 1903124 - DNA, 25 bp, Homo sapien
tttaaccaccgaccctggatcacca

SEQ ID NO: 1903125 - DNA, 25 bp, Homo sapien
tgcctaagggcacgtttctcagaac

SEQ ID NO: 1903126 - DNA, 25 bp, Homo sapien
tggtaacaactggagagcatgcctg

SEQ ID NO: 1903127 - DNA, 25 bp, Homo sapien
tttgaatacgccaaagggaagctgc

SEQ ID NO: 1903128 - DNA, 25 bp, Homo sapien
ttttcagtttgagtgggcaagccca

SEQ ID NO: 1903129 - DNA, 25 bp, Homo sapien
gaggagatatctgctatcttttggg

SEQ ID NO: 1903130 - DNA, 25 bp, Homo sapien
agtaaagaggagatatctgctatct

SEQ ID NO: 1903131 - DNA, 25 bp, Homo sapien
acattcttcctcaatagtaaagagg

SEQ ID NO: 1903132 - DNA, 25 bp, Homo sapien
tacattcttcctcaatagtaaagag

SEQ ID NO: 1903133 - DNA, 25 bp, Homo sapien
ttgtgatgagccacgaaattcaatc

SEQ ID NO: 1903134 - DNA, 25 bp, Homo sapien
ggttgtgatgagccacgaaattcaa

SEQ ID NO: 1903135 - DNA, 25 bp, Homo sapien
gttgtgatgagccacgaaattcaat

SEQ ID NO: 1903136 - DNA, 25 bp, Homo sapien
cagtgtcataatctgggcagggtag

SEQ ID NO: 1903137 - DNA, 25 bp, Homo sapien
tgccagttcactattcatatgatct

SEQ ID NO: 1903138 - DNA, 25 bp, Homo sapien
ggcagggtagcatggctcggctgag

SEQ ID NO: 1903139 - DNA, 25 bp, Homo sapien
gctcggctgagatgtgcctgtagca

SEQ ID NO: 1903140 - DNA, 25 bp, Homo sapien
aatatctagtgttcacaactaccac

SEQ ID NO: 1903141 - DNA, 25 bp, Homo sapien
atatctagtgttcacaactaccaca

SEQ ID NO: 1903142 - DNA, 25 bp, Homo sapien
tatctagtgttcacaactaccacaa

SEQ ID NO: 1903143 - DNA, 25 bp, Homo sapien
atctagtgttcacaactaccacaac

SEQ ID NO: 1903144 - DNA, 25 bp, Homo sapien
catacacccaccatgtgatctagct

SEQ ID NO: 1903145 - DNA, 25 bp, Homo sapien
tgatctagctattccattcctaggg

SEQ ID NO: 1903146 - DNA, 25 bp, Homo sapien
gatcagctgaacatcatcaagattt

SEQ ID NO: 1903147 - DNA, 25 bp, Homo sapien
gccacagagtgaaagtatctgcaaa

SEQ ID NO: 1903148 - DNA, 25 bp, Homo sapien
tgtaatgtaggcacctatttttgga

SEQ ID NO: 1903149 - DNA, 25 bp, Homo sapien
taggcacctatttttggattgtggt

SEQ ID NO: 1903150 - DNA, 25 bp, Homo sapien
ggggggactgctgtatacaaaggcc

SEQ ID NO: 1903151 - DNA, 25 bp, Homo sapien
aaaatactttgtgtaatgtaggcac

SEQ ID NO: 1903152 - DNA, 25 bp, Homo sapien
gactgaactactgttacctgctgac

SEQ ID NO: 1903153 - DNA, 25 bp, Homo sapien
gaagagaatgactcagaaatctaaa

SEQ ID NO: 1903154 - DNA, 25 bp, Homo sapien
catcaaagtccccatcagaaagttc

SEQ ID NO: 1903155 - DNA, 25 bp, Homo sapien
gactgactcatttcaacctgtttaa

SEQ ID NO: 1903156 - DNA, 25 bp, Homo sapien
tatgatgaactctgcttgtaacccc

SEQ ID NO: 1903157 - DNA, 25 bp, Homo sapien
tgtttcagaatacttacggaggagg

SEQ ID NO: 1903158 - DNA, 25 bp, Homo sapien
taggctggacagactactaactgca

SEQ ID NO: 1903159 - DNA, 25 bp, Homo sapien
tgacagtgatcgacaacctatgatg

SEQ ID NO: 1903160 - DNA, 25 bp, Homo sapien
ctggcaacgtggcaactgctgaaac

SEQ ID NO: 1903161 - DNA, 25 bp, Homo sapien
ggcaacgtggcaactgctgaaacca

SEQ ID NO: 1903162 - DNA, 25 bp, Homo sapien
tggcaacgtggcaactgctgaaacc

SEQ ID NO: 1903163 - DNA, 25 bp, Homo sapien
taaacacattaggatatacttcata

SEQ ID NO: 1903164 - DNA, 25 bp, Homo sapien
tgtttaaagtacatagtgaatgaac

SEQ ID NO: 1903165 - DNA, 25 bp, Homo sapien
tgtcctaatctgtgttaacatagtt

SEQ ID NO: 1903166 - DNA, 25 bp, Homo sapien
taattctagttacaaggtcatacat

SEQ ID NO: 1903167 - DNA, 25 bp, Homo sapien
gacatgaatcatgaatcttttggaa

SEQ ID NO: 1903168 - DNA, 25 bp, Homo sapien
tgtaatcaccattattcatggagga

SEQ ID NO: 1903169 - DNA, 25 bp, Homo sapien
caaagagaccctaacaattttagag

SEQ ID NO: 1903170 - DNA, 25 bp, Homo sapien
tactcaacgtagagtgagaggtggt

SEQ ID NO: 1903171 - DNA, 25 bp, Homo sapien
tcctgtagctcagaatagtttgatc

SEQ ID NO: 1903172 - DNA, 25 bp, Homo sapien
gaagacttcttctctcaaatcatca

SEQ ID NO: 1903173 - DNA, 25 bp, Homo sapien
cctgtagctcagaatagtttgatcg

SEQ ID NO: 1903174 - DNA, 25 bp, Homo sapien
tctgaagacttcttctctcaaatca

SEQ ID NO: 1903175 - DNA, 25 bp, Homo sapien
tgtctgactacactttctccttagt

SEQ ID NO: 1903176 - DNA, 25 bp, Homo sapien
tattatcatcctgcaccctacagct

SEQ ID NO: 1903177 - DNA, 25 bp, Homo sapien
cactaatgttatccccacagctttc

SEQ ID NO: 1903178 - DNA, 25 bp, Homo sapien
gcattttgctggtagctacacatag

SEQ ID NO: 1903179 - DNA, 25 bp, Homo sapien
taggaggcaattcggccataagtta

SEQ ID NO: 1903180 - DNA, 25 bp, Homo sapien
actgcattcaggcttcaagcggtcc

SEQ ID NO: 1903181 - DNA, 25 bp, Homo sapien
ttagaggttcaatgctgcgattatc

SEQ ID NO: 1903182 - DNA, 25 bp, Homo sapien
tcagtactgcattcaggcttcaagc

SEQ ID NO: 1903183 - DNA, 25 bp, Homo sapien
aacttgttcacagaatcatggctca

SEQ ID NO: 1903184 - DNA, 25 bp, Homo sapien
cagggacttctcaatcagatgggac

SEQ ID NO: 1903185 - DNA, 25 bp, Homo sapien
tcatggctcacatcacccaaattgt

SEQ ID NO: 1903186 - DNA, 25 bp, Homo sapien
ggaaagttccaattcaatcagggac

SEQ ID NO: 1903187 - DNA, 25 bp, Homo sapien
ccagaagcgtactgagaaagccagc

SEQ ID NO: 1903188 - DNA, 25 bp, Homo sapien
gaaagccagcgggatcacaattaca

SEQ ID NO: 1903189 - DNA, 25 bp, Homo sapien
gattctaatagccagaagcgtactg

SEQ ID NO: 1903190 - DNA, 25 bp, Homo sapien
caattacaggctgtttgaacacaac

SEQ ID NO: 1903191 - DNA, 25 bp, Homo sapien
tcttcaaagtggctagagtggtgcc

SEQ ID NO: 1903192 - DNA, 25 bp, Homo sapien
gaaatatcagcacccttaatgaggc

SEQ ID NO: 1903193 - DNA, 25 bp, Homo sapien
cttgaatacaccaggcatgccagcc

SEQ ID NO: 1903194 - DNA, 25 bp, Homo sapien
gacttacggcataaatagatcccat

SEQ ID NO: 1903195 - DNA, 25 bp, Homo sapien
gaatgtgccttaacattgaccctcc

SEQ ID NO: 1903196 - DNA, 25 bp, Homo sapien
tagtaatgggacctagaacaagtga

SEQ ID NO: 1903197 - DNA, 25 bp, Homo sapien
cacacagttgtagattatgagtcag

SEQ ID NO: 1903198 - DNA, 25 bp, Homo sapien
cctgacttcgtaagatctggcttta

SEQ ID NO: 1903199 - DNA, 25 bp, Homo sapien
gatctaacatactgtctggagtgac

SEQ ID NO: 1903200 - DNA, 25 bp, Homo sapien
tcaagatttggatgaagtgtcacct

SEQ ID NO: 1903201 - DNA, 25 bp, Homo sapien
gcttgaatatcgttctactagagga

SEQ ID NO: 1903202 - DNA, 25 bp, Homo sapien
cagtaagtgctgaacgaagatctaa

SEQ ID NO: 1903203 - DNA, 25 bp, Homo sapien
cggaaaaagtaagtccaggtgatat

SEQ ID NO: 1903204 - DNA, 25 bp, Homo sapien
ttagatgtaattgtaccaccagcaa

SEQ ID NO: 1903205 - DNA, 25 bp, Homo sapien
ctgggattcatgataagacgtcgga

SEQ ID NO: 1903206 - DNA, 25 bp, Homo sapien
gatataatccaatgcatcttgctta

SEQ ID NO: 1903207 - DNA, 25 bp, Homo sapien
ttggtcatcgaactgcggcctccca

SEQ ID NO: 1903208 - DNA, 25 bp, Homo sapien
ttacagctttgccttggtcatcgaa

SEQ ID NO: 1903209 - DNA, 25 bp, Homo sapien
tgccttggtcatcgaactgcggcct

SEQ ID NO: 1903210 - DNA, 25 bp, Homo sapien
agctttgccttggtcatcgaactgc

SEQ ID NO: 1903211 - DNA, 25 bp, Homo sapien
ttaaaagagagaacaaagagatatt

SEQ ID NO: 1903212 - DNA, 25 bp, Homo sapien
ctttaaaagagagaacaaagagata

SEQ ID NO: 1903213 - DNA, 25 bp, Homo sapien
tttaaaagagagaacaaagagatat

SEQ ID NO: 1903214 - DNA, 25 bp, Homo sapien
aaagtttacaccccaggctaatgtg

SEQ ID NO: 1903215 - DNA, 25 bp, Homo sapien
ctaatgtgcttgtagcaataagaac

SEQ ID NO: 1903216 - DNA, 25 bp, Homo sapien
ccatcatagtattctgttcccttaa

SEQ ID NO: 1903217 - DNA, 25 bp, Homo sapien
cacataacgtcttgtttttccatca

SEQ ID NO: 1903218 - DNA, 25 bp, Homo sapien
gcatgatgcattcctatcccgaaag

SEQ ID NO: 1903219 - DNA, 25 bp, Homo sapien
caaatagttcctctactgtttttcg

SEQ ID NO: 1903220 - DNA, 25 bp, Homo sapien
ttcctatcccgaaagcaagggtcag

SEQ ID NO: 1903221 - DNA, 25 bp, Homo sapien
cctctcatgtagtccagcatgatgc

SEQ ID NO: 1903222 - DNA, 25 bp, Homo sapien
ttgcacttttgtccccatcaaatta

SEQ ID NO: 1903223 - DNA, 25 bp, Homo sapien
gtgctcagcccagctactgattttt

SEQ ID NO: 1903224 - DNA, 25 bp, Homo sapien
ttttattgcacttttgtccccatca

SEQ ID NO: 1903225 - DNA, 25 bp, Homo sapien
tattgcacttttgtccccatcaaat

SEQ ID NO: 1903226 - DNA, 25 bp, Homo sapien
tcttcttttagctacctggatctta

SEQ ID NO: 1903227 - DNA, 25 bp, Homo sapien
tgtattcttcttttagctacctgga

SEQ ID NO: 1903228 - DNA, 25 bp, Homo sapien
caaaagtgaatagcgagttcttgtt

SEQ ID NO: 1903229 - DNA, 25 bp, Homo sapien
ctacttgtaaggacaaaagtgaata

SEQ ID NO: 1903230 - DNA, 25 bp, Homo sapien
catgtttaaccactgctttggatct

SEQ ID NO: 1903231 - DNA, 25 bp, Homo sapien
atgtttaaccactgctttggatctt

SEQ ID NO: 1903232 - DNA, 25 bp, Homo sapien
tccatgtttaaccactgctttggat

SEQ ID NO: 1903233 - DNA, 25 bp, Homo sapien
ccatgtttaaccactgctttggatc

SEQ ID NO: 1903234 - DNA, 25 bp, Homo sapien
cgagtttgacgtcttgatgagacaa

SEQ ID NO: 1903235 - DNA, 25 bp, Homo sapien
ttccaaagcagtaagacgagtttga

SEQ ID NO: 1903236 - DNA, 25 bp, Homo sapien
gaaggcgatcaattccaaagcagta

SEQ ID NO: 1903237 - DNA, 25 bp, Homo sapien
gccaggaaggcgatcaattccaaag

SEQ ID NO: 1903238 - DNA, 25 bp, Homo sapien
ccatacgaggacagtaatgttgacc

SEQ ID NO: 1903239 - DNA, 25 bp, Homo sapien
gatggtcggaagttaaacaagccca

SEQ ID NO: 1903240 - DNA, 25 bp, Homo sapien
gtaatgttgacctggaaagccttga

SEQ ID NO: 1903241 - DNA, 25 bp, Homo sapien
tgcaggcttgttcatactagccata

SEQ ID NO: 1903242 - DNA, 25 bp, Homo sapien
tacaatgacctctagaacagggcct

SEQ ID NO: 1903243 - DNA, 25 bp, Homo sapien
cagcaaggtctctggcattagctaa

SEQ ID NO: 1903244 - DNA, 25 bp, Homo sapien
cattagctaatgcagtagatagtcc

SEQ ID NO: 1903245 - DNA, 25 bp, Homo sapien
gatagtccaactattctaacaggct

SEQ ID NO: 1903246 - DNA, 25 bp, Homo sapien
tgaacatagttcctattttgccagc

SEQ ID NO: 1903247 - DNA, 25 bp, Homo sapien
gatttcatatcaggagtcacatccc

SEQ ID NO: 1903248 - DNA, 25 bp, Homo sapien
tagtgacgataaggtcagccttggc

SEQ ID NO: 1903249 - DNA, 25 bp, Homo sapien
tcccacttctctggcgtagtgacga

SEQ ID NO: 1903250 - DNA, 25 bp, Homo sapien
cttttaggggtgcaatatataccgc

SEQ ID NO: 1903251 - DNA, 25 bp, Homo sapien
catccattctttcacgtactagggc

SEQ ID NO: 1903252 - DNA, 25 bp, Homo sapien
gggcttttaggggtgcaatatatac

SEQ ID NO: 1903253 - DNA, 25 bp, Homo sapien
cattctttcacgtactagggctttt

SEQ ID NO: 1903254 - DNA, 25 bp, Homo sapien
tactctagagcaagccccaaattct

SEQ ID NO: 1903255 - DNA, 25 bp, Homo sapien
gacagaagatcaaatcaaccacgat

SEQ ID NO: 1903256 - DNA, 25 bp, Homo sapien
gaaagtccgagtggtgtagacagaa

SEQ ID NO: 1903257 - DNA, 25 bp, Homo sapien
agtggtgaggacactccagaagaaa

SEQ ID NO: 1903258 - DNA, 25 bp, Homo sapien
gcaacagtctttcccgatccagtag

SEQ ID NO: 1903259 - DNA, 25 bp, Homo sapien
cccaaagctgtgattggtaaaggct

SEQ ID NO: 1903260 - DNA, 25 bp, Homo sapien
ccaagtaggacattacaatccgtgt

SEQ ID NO: 1903261 - DNA, 25 bp, Homo sapien
taaagtggctgaagttgtacagggc

SEQ ID NO: 1903262 - DNA, 25 bp, Homo sapien
tgtatgaggaggatgtctctctggt

SEQ ID NO: 1903263 - DNA, 25 bp, Homo sapien
tgtaaataccagtagttgggcttct

SEQ ID NO: 1903264 - DNA, 25 bp, Homo sapien
ccatctatcagacactgctcggatg

SEQ ID NO: 1903265 - DNA, 25 bp, Homo sapien
tagtattgggaaggcaaaggctcaa

SEQ ID NO: 1903266 - DNA, 25 bp, Homo sapien
gatcatttgtaggatcttctaccca

SEQ ID NO: 1903267 - DNA, 25 bp, Homo sapien
tagagctagaaaatactctgaatga

SEQ ID NO: 1903268 - DNA, 25 bp, Homo sapien
ggatcttctacccaaatccaccaag

SEQ ID NO: 1903269 - DNA, 25 bp, Homo sapien
caaggttctcctactgtcccatgta

SEQ ID NO: 1903270 - DNA, 25 bp, Homo sapien
gataggctgaatggatgcttccatc

SEQ ID NO: 1903271 - DNA, 25 bp, Homo sapien
gaggacagtccttgtgataggctga

SEQ ID NO: 1903272 - DNA, 25 bp, Homo sapien
ttccatcataacagaaggaatctga

SEQ ID NO: 1903273 - DNA, 25 bp, Homo sapien
agcatagatgctgagtgtcactcgg

SEQ ID NO: 1903274 - DNA, 25 bp, Homo sapien
aaagagcacggacaattctagctgc

SEQ ID NO: 1903275 - DNA, 25 bp, Homo sapien
cctgtaggtcatggtaggccaacgt

SEQ ID NO: 1903276 - DNA, 25 bp, Homo sapien
tgactttactaagattcaggagcct

SEQ ID NO: 1903277 - DNA, 25 bp, Homo sapien
aaattgtctcaaagggctagcccaa

SEQ ID NO: 1903278 - DNA, 25 bp, Homo sapien
tctgatataagggagaaactgtcca

SEQ ID NO: 1903279 - DNA, 25 bp, Homo sapien
gctgatataagtttgaagtaagatg

SEQ ID NO: 1903280 - DNA, 25 bp, Homo sapien
tgtccatttctcctcggctgatata

SEQ ID NO: 1903281 - DNA, 25 bp, Homo sapien
taataaggtatctaactcctctatt

SEQ ID NO: 1903282 - DNA, 25 bp, Homo sapien
gttttgtgagcatcaaagagttcat

SEQ ID NO: 1903283 - DNA, 25 bp, Homo sapien
ttcagctttggagactatggcaaag

SEQ ID NO: 1903284 - DNA, 25 bp, Homo sapien
gatatcaccttctgttttgtgagca

SEQ ID NO: 1903285 - DNA, 25 bp, Homo sapien
tttggagactatggcaaagatatca

SEQ ID NO: 1903286 - DNA, 25 bp, Homo sapien
caacttcaatgaccaactgttctcg

SEQ ID NO: 1903287 - DNA, 25 bp, Homo sapien
gctcctcaaaacgaatcatctgagc

SEQ ID NO: 1903288 - DNA, 25 bp, Homo sapien
atggctggcagttctacccaaatca

SEQ ID NO: 1903289 - DNA, 25 bp, Homo sapien
tatttaatatagtaatggctggcag

SEQ ID NO: 1903290 - DNA, 25 bp, Homo sapien
tgctaatggatttgctctcatccgt

SEQ ID NO: 1903291 - DNA, 25 bp, Homo sapien
gtgactgatgccatatgctaatgga

SEQ ID NO: 1903292 - DNA, 25 bp, Homo sapien
ttccacattagtaactgttcccaga

SEQ ID NO: 1903293 - DNA, 25 bp, Homo sapien
tgtaacttatccacttcactgcttc

SEQ ID NO: 1903294 - DNA, 25 bp, Homo sapien
atttgtcaaattgtggtcgtccagc

SEQ ID NO: 1903295 - DNA, 25 bp, Homo sapien
ccagaaactgactctcaattgggtt

SEQ ID NO: 1903296 - DNA, 25 bp, Homo sapien
caattgggtttcgttgagtgagcaa

SEQ ID NO: 1903297 - DNA, 25 bp, Homo sapien
tcgtccagctcgaccaaatatctgc

SEQ ID NO: 1903298 - DNA, 25 bp, Homo sapien
gacaccccaggctaacgtagctgta

SEQ ID NO: 1903299 - DNA, 25 bp, Homo sapien
tacacactaggactttgatatgccc

SEQ ID NO: 1903300 - DNA, 25 bp, Homo sapien
gcatgggcgggaagattgacacccc

SEQ ID NO: 1903301 - DNA, 25 bp, Homo sapien
caactaaatttctgtcctgccgaag

SEQ ID NO: 1903302 - DNA, 25 bp, Homo sapien
tctgggccatactgacaccgaagct

SEQ ID NO: 1903303 - DNA, 25 bp, Homo sapien
gaagagacgattctaatctgggcca

SEQ ID NO: 1903304 - DNA, 25 bp, Homo sapien
catcctatgtggtggtaactgacag

SEQ ID NO: 1903305 - DNA, 25 bp, Homo sapien
taacagataccatctcggaagagac

SEQ ID NO: 1903306 - DNA, 25 bp, Homo sapien
cactgtggcatggtagggatttagc

SEQ ID NO: 1903307 - DNA, 25 bp, Homo sapien
catgtaacagaaggcatgaggctaa

SEQ ID NO: 1903308 - DNA, 25 bp, Homo sapien
cactgtggagggtttcactctttaa

SEQ ID NO: 1903309 - DNA, 25 bp, Homo sapien
tcttcagaaagctccagactggatt

SEQ ID NO: 1903310 - DNA, 25 bp, Homo sapien
tacatagtcatgtccttgggtagga

SEQ ID NO: 1903311 - DNA, 25 bp, Homo sapien
tattagagacatagctgttcttaca

SEQ ID NO: 1903312 - DNA, 25 bp, Homo sapien
tttcgagcatgtacaaacaccatca

SEQ ID NO: 1903313 - DNA, 25 bp, Homo sapien
tcttacagtggcatttcgagcatgt

SEQ ID NO: 1903314 - DNA, 25 bp, Homo sapien
gggacagtcaccaggcacgtgtgaa

SEQ ID NO: 1903315 - DNA, 25 bp, Homo sapien
gcttctgtagaagtacctagaattc

SEQ ID NO: 1903316 - DNA, 25 bp, Homo sapien
aagtacctagaattctctgtgcaag

SEQ ID NO: 1903317 - DNA, 25 bp, Homo sapien
catgaagtgactggggatatctgaa

SEQ ID NO: 1903318 - DNA, 25 bp, Homo sapien
aaaaagatacaacaatatggcagat

SEQ ID NO: 1903319 - DNA, 25 bp, Homo sapien
acaatatggcagatagatgtcccac

SEQ ID NO: 1903320 - DNA, 25 bp, Homo sapien
ctcttttctaggaatactgctaaga

SEQ ID NO: 1903321 - DNA, 25 bp, Homo sapien
ttctaggaatactgctaagaagtga

SEQ ID NO: 1903322 - DNA, 25 bp, Homo sapien
ggagtctggtaaccatagtaaaaga

SEQ ID NO: 1903323 - DNA, 25 bp, Homo sapien
catagtaaaagataaggtccctgca

SEQ ID NO: 1903324 - DNA, 25 bp, Homo sapien
tttccaagatataggccttcctttc

SEQ ID NO: 1903325 - DNA, 25 bp, Homo sapien
cttcctcaagggagtctggtaacca

SEQ ID NO: 1903326 - DNA, 25 bp, Homo sapien
ttagccggaatgataaagctgtact

SEQ ID NO: 1903327 - DNA, 25 bp, Homo sapien
cattctgcaagttacacaggaggag

SEQ ID NO: 1903328 - DNA, 25 bp, Homo sapien
catgcctgagtggaacacaactgcc

SEQ ID NO: 1903329 - DNA, 25 bp, Homo sapien
tattaagtacacgagcacgcaagtt

SEQ ID NO: 1903330 - DNA, 25 bp, Homo sapien
ctggatctgaaagtgcactagcaga

SEQ ID NO: 1903331 - DNA, 25 bp, Homo sapien
gcctctgacctagaacaaatagttt

SEQ ID NO: 1903332 - DNA, 25 bp, Homo sapien
tgttcaaatattgtccatagccgct

SEQ ID NO: 1903333 - DNA, 25 bp, Homo sapien
acaatagttagcagctcatggcctg

SEQ ID NO: 1903334 - DNA, 25 bp, Homo sapien
ttacccattgggctaaagcagttat

SEQ ID NO: 1903335 - DNA, 25 bp, Homo sapien
tatttttatgacttacccattgggc

SEQ ID NO: 1903336 - DNA, 25 bp, Homo sapien
caaacaaaatagcacgacctatcaa

SEQ ID NO: 1903337 - DNA, 25 bp, Homo sapien
tatcaatactgggatgataatatct

SEQ ID NO: 1903338 - DNA, 25 bp, Homo sapien
cagcctttacttgcttcaaaacatt

SEQ ID NO: 1903339 - DNA, 25 bp, Homo sapien
ctggtgtccagcctttacttgcttc

SEQ ID NO: 1903340 - DNA, 25 bp, Homo sapien
cttcatccatgttattcaactgctg

SEQ ID NO: 1903341 - DNA, 25 bp, Homo sapien
atacttcatccatgttattcaactg

SEQ ID NO: 1903342 - DNA, 25 bp, Homo sapien
tcatttcacgtcaaaataacgtaaa

SEQ ID NO: 1903343 - DNA, 25 bp, Homo sapien
tagttgaggaagtatgcttgatttt

SEQ ID NO: 1903344 - DNA, 25 bp, Homo sapien
gattttgtctaggatatcacatctg

SEQ ID NO: 1903345 - DNA, 25 bp, Homo sapien
atagttgaggaagtatgcttgattt

SEQ ID NO: 1903346 - DNA, 25 bp, Homo sapien
cacatctgtaatgtgattcaatgtt

SEQ ID NO: 1903347 - DNA, 25 bp, Homo sapien
cagacagtccgagaatccttatcat

SEQ ID NO: 1903348 - DNA, 25 bp, Homo sapien
gaggtactggtcgaaaacggccatc

SEQ ID NO: 1903349 - DNA, 25 bp, Homo sapien
taaaaatgtggcaacatcgaggtag

SEQ ID NO: 1903350 - DNA, 25 bp, Homo sapien
caaaaatgtctgtccaagaggtact

SEQ ID NO: 1903351 - DNA, 25 bp, Homo sapien
tacaatctgggaaagagctacatcc

SEQ ID NO: 1903352 - DNA, 25 bp, Homo sapien
ttcatgcagcaaatgaacttcatca

SEQ ID NO: 1903353 - DNA, 25 bp, Homo sapien
tactggtcctctatcttcatgcagc

SEQ ID NO: 1903354 - DNA, 25 bp, Homo sapien
tgccgtaaagtacgggcaactatgc

SEQ ID NO: 1903355 - DNA, 25 bp, Homo sapien
cctttgccaaggagtctcttcccaa

SEQ ID NO: 1903356 - DNA, 25 bp, Homo sapien
tctctcctttgccaaggagtctctt

SEQ ID NO: 1903357 - DNA, 25 bp, Homo sapien
aatgaaagcatccatagctgcggat

SEQ ID NO: 1903358 - DNA, 25 bp, Homo sapien
catagctgcggatggcctatgatta

SEQ ID NO: 1903359 - DNA, 25 bp, Homo sapien
cctgtcaaccacaattgctggagct

SEQ ID NO: 1903360 - DNA, 25 bp, Homo sapien
tgtcaaccacaattgctggagcttt

SEQ ID NO: 1903361 - DNA, 25 bp, Homo sapien
caaccacaattgctggagctttgat

SEQ ID NO: 1903362 - DNA, 25 bp, Homo sapien
gtcaaccacaattgctggagctttg

SEQ ID NO: 1903363 - DNA, 25 bp, Homo sapien
ggctttcattggagcaacatataca

SEQ ID NO: 1903364 - DNA, 25 bp, Homo sapien
cacttttggacaactgcatgtcacc

SEQ ID NO: 1903365 - DNA, 25 bp, Homo sapien
atgtcaccagtcaattctttcacaa

SEQ ID NO: 1903366 - DNA, 25 bp, Homo sapien
tagtggctctagacgtctgctgaag

SEQ ID NO: 1903367 - DNA, 25 bp, Homo sapien
taaaaagctgttgtctgatttattt

SEQ ID NO: 1903368 - DNA, 25 bp, Homo sapien
aaaaagctgttgtctgatttattta

SEQ ID NO: 1903369 - DNA, 25 bp, Homo sapien
ttaaaaagctgttgtctgatttatt

SEQ ID NO: 1903370 - DNA, 25 bp, Homo sapien
aaaagctgttgtctgatttatttac

SEQ ID NO: 1903371 - DNA, 25 bp, Homo sapien
tggcgaatttcatgcaagactgtca

SEQ ID NO: 1903372 - DNA, 25 bp, Homo sapien
acactattgactggattctattgag

SEQ ID NO: 1903373 - DNA, 25 bp, Homo sapien
caccttgttgaaaatgttggcgaat

SEQ ID NO: 1903374 - DNA, 25 bp, Homo sapien
tctcattggtgttgtaggcagtctc

SEQ ID NO: 1903375 - DNA, 25 bp, Homo sapien
ccatacaaatcattatgtgttaaca

SEQ ID NO: 1903376 - DNA, 25 bp, Homo sapien
gtaacaatgtgaaggacccatacaa

SEQ ID NO: 1903377 - DNA, 25 bp, Homo sapien
atagtaacaatgtgaaggacccata

SEQ ID NO: 1903378 - DNA, 25 bp, Homo sapien
acaatgtgaaggacccatacaaatc

SEQ ID NO: 1903379 - DNA, 25 bp, Homo sapien
catttagcatatcatggaatttccc

SEQ ID NO: 1903380 - DNA, 25 bp, Homo sapien
tcctgacactaagcactaaaaactc

SEQ ID NO: 1903381 - DNA, 25 bp, Homo sapien
tgactgtttatacccaatcccaatt

SEQ ID NO: 1903382 - DNA, 25 bp, Homo sapien
tccctaagaaactgattgactgttt

SEQ ID NO: 1903383 - DNA, 25 bp, Homo sapien
gctgagtggcattggttcgctgtag

SEQ ID NO: 1903384 - DNA, 25 bp, Homo sapien
tctctttggattccttctggcaaaa

SEQ ID NO: 1903385 - DNA, 25 bp, Homo sapien
tcataaagcttgttattctctcttt

SEQ ID NO: 1903386 - DNA, 25 bp, Homo sapien
ttcgctgtagggaatccttacttct

SEQ ID NO: 1903387 - DNA, 25 bp, Homo sapien
acacttctagcattcagaagtgcct

SEQ ID NO: 1903388 - DNA, 25 bp, Homo sapien
tctagcattcagaagtgcctgttct

SEQ ID NO: 1903389 - DNA, 25 bp, Homo sapien
gcctgggaatcatacacatggggat

SEQ ID NO: 1903390 - DNA, 25 bp, Homo sapien
cttctagcattcagaagtgcctgtt

SEQ ID NO: 1903391 - DNA, 25 bp, Homo sapien
tcttgttcagactgaatagtgactt

SEQ ID NO: 1903392 - DNA, 25 bp, Homo sapien
ggatcaaagcacataagtccttctg

SEQ ID NO: 1903393 - DNA, 25 bp, Homo sapien
tcttcacgtcgatattgtttcatta

SEQ ID NO: 1903394 - DNA, 25 bp, Homo sapien
tagtgacttgacaaccataattggg

SEQ ID NO: 1903395 - DNA, 25 bp, Homo sapien
cctgaaacctatgatcatttgaaga

SEQ ID NO: 1903396 - DNA, 25 bp, Homo sapien
gaattaagaaatctatccacaattg

SEQ ID NO: 1903397 - DNA, 25 bp, Homo sapien
ttgaagagcctgaaacctatgatca

SEQ ID NO: 1903398 - DNA, 25 bp, Homo sapien
aatctatccacaattgtaattctgt

SEQ ID NO: 1903399 - DNA, 25 bp, Homo sapien
ccttcaggtcccagcagttcaaata

SEQ ID NO: 1903400 - DNA, 25 bp, Homo sapien
cttcaggtcccagcagttcaaatag

SEQ ID NO: 1903401 - DNA, 25 bp, Homo sapien
tccttcaggtcccagcagttcaaat

SEQ ID NO: 1903402 - DNA, 25 bp, Homo sapien
gattttcacatttaccctatttaga

SEQ ID NO: 1903403 - DNA, 25 bp, Homo sapien
actaagcatacaccattaatttaac

SEQ ID NO: 1903404 - DNA, 25 bp, Homo sapien
tgtctactaagcatacaccattaat

SEQ ID NO: 1903405 - DNA, 25 bp, Homo sapien
ctttgtgtctactaagcatacacca

SEQ ID NO: 1903406 - DNA, 25 bp, Homo sapien
cgtaagagtctttattgcaatgtta

SEQ ID NO: 1903407 - DNA, 25 bp, Homo sapien
taagagtctttattgcaatgttatt

SEQ ID NO: 1903408 - DNA, 25 bp, Homo sapien
gtaagagtctttattgcaatgttat

SEQ ID NO: 1903409 - DNA, 25 bp, Homo sapien
gcgtaagagtctttattgcaatgtt

SEQ ID NO: 1903410 - DNA, 25 bp, Homo sapien
gaggctacataatgtaatgtgtgat

SEQ ID NO: 1903411 - DNA, 25 bp, Homo sapien
tgtgatatcagaatatactgaatgc

SEQ ID NO: 1903412 - DNA, 25 bp, Homo sapien
ctcatgagtgtaatgtagtggactt

SEQ ID NO: 1903413 - DNA, 25 bp, Homo sapien
aaatatgatataatgccactcttca

SEQ ID NO: 1903414 - DNA, 25 bp, Homo sapien
gaatcactgtattaaagcaagctaa

SEQ ID NO: 1903415 - DNA, 25 bp, Homo sapien
cagaagacaatctaaccaaataact

SEQ ID NO: 1903416 - DNA, 25 bp, Homo sapien
gtcttccctcagaagacaatctaac

SEQ ID NO: 1903417 - DNA, 25 bp, Homo sapien
gcaagctaattattctccaccaaat

SEQ ID NO: 1903418 - DNA, 25 bp, Homo sapien
tcagaaatgaacttgcatgggtcaa

SEQ ID NO: 1903419 - DNA, 25 bp, Homo sapien
acttgcatgggtcaagtaacgccat

SEQ ID NO: 1903420 - DNA, 25 bp, Homo sapien
tgacatcagacacatatctggaggt

SEQ ID NO: 1903421 - DNA, 25 bp, Homo sapien
catcagacacatatctggaggttca

SEQ ID NO: 1903422 - DNA, 25 bp, Homo sapien
ctgcatagagtcaagagataatact

SEQ ID NO: 1903423 - DNA, 25 bp, Homo sapien
tgcacaaaagcaaactacggttgta

SEQ ID NO: 1903424 - DNA, 25 bp, Homo sapien
tgattatacaataactctatcagta

SEQ ID NO: 1903425 - DNA, 25 bp, Homo sapien
taatactaacggcaaatgtcaaatc

SEQ ID NO: 1903426 - DNA, 25 bp, Homo sapien
tgtgaccaacagagtccttcaagtg

SEQ ID NO: 1903427 - DNA, 25 bp, Homo sapien
tattggcagttcgtcaaagtggtcc

SEQ ID NO: 1903428 - DNA, 25 bp, Homo sapien
cctcctggagatgttcattcagaaa

SEQ ID NO: 1903429 - DNA, 25 bp, Homo sapien
agtagcattacaagctgcagtggca

SEQ ID NO: 1903430 - DNA, 25 bp, Homo sapien
tgcagccccactttcaattgcttct

SEQ ID NO: 1903431 - DNA, 25 bp, Homo sapien
tgcttctctcccattatcagttcca

SEQ ID NO: 1903432 - DNA, 25 bp, Homo sapien
agagaaatgcagccccactttcaat

SEQ ID NO: 1903433 - DNA, 25 bp, Homo sapien
gcttctctcccattatcagttccaa

SEQ ID NO: 1903434 - DNA, 25 bp, Homo sapien
agattggagcagacgaaggacccca

SEQ ID NO: 1903435 - DNA, 25 bp, Homo sapien
tatgtaggcgtaagagactggctgt

SEQ ID NO: 1903436 - DNA, 25 bp, Homo sapien
cacactgtccgcatgagatgacgta

SEQ ID NO: 1903437 - DNA, 25 bp, Homo sapien
tgttagcacgctgcccagatgagag

SEQ ID NO: 1903438 - DNA, 25 bp, Homo sapien
cagaggtaggcattttccatgtggc

SEQ ID NO: 1903439 - DNA, 25 bp, Homo sapien
gagtataaactctttccgtgcatga

SEQ ID NO: 1903440 - DNA, 25 bp, Homo sapien
tgaaagcacctttagcaataccttg

SEQ ID NO: 1903441 - DNA, 25 bp, Homo sapien
ttgcaactttaaggcagcaaccagc

SEQ ID NO: 1903442 - DNA, 25 bp, Homo sapien
gctgctgacctacatagggaacttg

SEQ ID NO: 1903443 - DNA, 25 bp, Homo sapien
tagctacccactagtaactgacaga

SEQ ID NO: 1903444 - DNA, 25 bp, Homo sapien
ttaacatcacaacaactacagaggg

SEQ ID NO: 1903445 - DNA, 25 bp, Homo sapien
aaatcattagcacagacttgagccc

SEQ ID NO: 1903446 - DNA, 25 bp, Homo sapien
gatactgtttaccaggacctgagca

SEQ ID NO: 1903447 - DNA, 25 bp, Homo sapien
tgactaccaatgaagctgaagccct

SEQ ID NO: 1903448 - DNA, 25 bp, Homo sapien
tgtatatgcagttgacccagcacca

SEQ ID NO: 1903449 - DNA, 25 bp, Homo sapien
taggagttctcaccatgatagccaa

SEQ ID NO: 1903450 - DNA, 25 bp, Homo sapien
ctcttctggaatggacaattcactt

SEQ ID NO: 1903451 - DNA, 25 bp, Homo sapien
ggttgttccacattaccctgtctgc

SEQ ID NO: 1903452 - DNA, 25 bp, Homo sapien
aaatgccaggatcacattttctggg

SEQ ID NO: 1903453 - DNA, 25 bp, Homo sapien
ttttctaggtattctctgtagaggg

SEQ ID NO: 1903454 - DNA, 25 bp, Homo sapien
gctttgataacttctctgatatagt

SEQ ID NO: 1903455 - DNA, 25 bp, Homo sapien
gttcatgaagtttagatcgctttat

SEQ ID NO: 1903456 - DNA, 25 bp, Homo sapien
ccatgtcaggcccaaatctaaaact

SEQ ID NO: 1903457 - DNA, 25 bp, Homo sapien
ggcccaaatctaaaacttgttcatg

SEQ ID NO: 1903458 - DNA, 25 bp, Homo sapien
tgtcaggcccaaatctaaaacttgt

SEQ ID NO: 1903459 - DNA, 25 bp, Homo sapien
cctggccctagagataaataatttc

SEQ ID NO: 1903460 - DNA, 25 bp, Homo sapien
cagcgcctggccctagagataaata

SEQ ID NO: 1903461 - DNA, 25 bp, Homo sapien
cattcaaatgacatgaatggctaca

SEQ ID NO: 1903462 - DNA, 25 bp, Homo sapien
tcaaatgacatgaatggctacagct

SEQ ID NO: 1903463 - DNA, 25 bp, Homo sapien
ctcctgtgagacgaggtaaagccat

SEQ ID NO: 1903464 - DNA, 25 bp, Homo sapien
tttaagtcagccacttcttcattat

SEQ ID NO: 1903465 - DNA, 25 bp, Homo sapien
aaaggaacgcaaggctcctgtgaga

SEQ ID NO: 1903466 - DNA, 25 bp, Homo sapien
ggtgacatttgaaaaggaacgcaag

SEQ ID NO: 1903467 - DNA, 25 bp, Homo sapien
ctattattcaatcagtgatccatac

SEQ ID NO: 1903468 - DNA, 25 bp, Homo sapien
attattcaatcagtgatccatacag

SEQ ID NO: 1903469 - DNA, 25 bp, Homo sapien
caatcagtgatccatacagcaagaa

SEQ ID NO: 1903470 - DNA, 25 bp, Homo sapien
atcagtgatccatacagcaagaaac

SEQ ID NO: 1903471 - DNA, 25 bp, Homo sapien
gatgtattaatactgtgcctctggc

SEQ ID NO: 1903472 - DNA, 25 bp, Homo sapien
tgaattcagtgcatagcctggctcc

SEQ ID NO: 1903473 - DNA, 25 bp, Homo sapien
taaggtatacaatggatgccaaagc

SEQ ID NO: 1903474 - DNA, 25 bp, Homo sapien
tctcccaagaattgtacacagtaca

SEQ ID NO: 1903475 - DNA, 25 bp, Homo sapien
acagggaaccgcgtgtgaggaccat

SEQ ID NO: 1903476 - DNA, 25 bp, Homo sapien
aacttcccacgccgggtgaggagct

SEQ ID NO: 1903477 - DNA, 25 bp, Homo sapien
ccaaagatgcgagcgggcagctgta

SEQ ID NO: 1903478 - DNA, 25 bp, Homo sapien
gacagacgcaaagacgcacagaccc

SEQ ID NO: 1903479 - DNA, 25 bp, Homo sapien
ttacttcagtctgccgcgtcttctc

SEQ ID NO: 1903480 - DNA, 25 bp, Homo sapien
tttccctgcatttacttcagtctgc

SEQ ID NO: 1903481 - DNA, 25 bp, Homo sapien
ccgcccttctctgtaaggtaaatat

SEQ ID NO: 1903482 - DNA, 25 bp, Homo sapien
ccttctctgtaaggtaaatatgtgg

SEQ ID NO: 1903483 - DNA, 25 bp, Homo sapien
gtactccaccttcggtgccatctgg

SEQ ID NO: 1903484 - DNA, 25 bp, Homo sapien
aatccgagtactccaccttcggtgc

SEQ ID NO: 1903485 - DNA, 25 bp, Homo sapien
gaataatccgagtactccaccttcg

SEQ ID NO: 1903486 - DNA, 25 bp, Homo sapien
gagtactccaccttcggtgccatct

SEQ ID NO: 1903487 - DNA, 25 bp, Homo sapien
tataccaaatatgccctttccagag

SEQ ID NO: 1903488 - DNA, 25 bp, Homo sapien
gctacccagaccatatggtgctacc

SEQ ID NO: 1903489 - DNA, 25 bp, Homo sapien
ggcccatagggccatatcctatacc

SEQ ID NO: 1903490 - DNA, 25 bp, Homo sapien
tttccagagctacccagaccatatg

SEQ ID NO: 1903491 - DNA, 25 bp, Homo sapien
gctatgttttgtacatctactggag

SEQ ID NO: 1903492 - DNA, 25 bp, Homo sapien
gggttttcagttatcagcttctgga

SEQ ID NO: 1903493 - DNA, 25 bp, Homo sapien
ttgaatgatgagtatacctctggtc

SEQ ID NO: 1903494 - DNA, 25 bp, Homo sapien
cccatgagggttttcagttatcagc

SEQ ID NO: 1903495 - DNA, 25 bp, Homo sapien
tgtaactgacattgacctttgctga

SEQ ID NO: 1903496 - DNA, 25 bp, Homo sapien
actgacattgacctttgctgaccat

SEQ ID NO: 1903497 - DNA, 25 bp, Homo sapien
taactgacattgacctttgctgacc

SEQ ID NO: 1903498 - DNA, 25 bp, Homo sapien
aattttcctgatattgtaactgaca

SEQ ID NO: 1903499 - DNA, 25 bp, Homo sapien
tggagacccaggtatatcccctcat

SEQ ID NO: 1903500 - DNA, 25 bp, Homo sapien
agttggagacccaggtatatcccct

SEQ ID NO: 1903501 - DNA, 25 bp, Homo sapien
gttggagacccaggtatatcccctc

SEQ ID NO: 1903502 - DNA, 25 bp, Homo sapien
ttggagacccaggtatatcccctca

SEQ ID NO: 1903503 - DNA, 25 bp, Homo sapien
gcaaattctataatcatcggcagta

SEQ ID NO: 1903504 - DNA, 25 bp, Homo sapien
cagttttcagaatcaactataggca

SEQ ID NO: 1903505 - DNA, 25 bp, Homo sapien
tatcttttctggtaaggaggacagc

SEQ ID NO: 1903506 - DNA, 25 bp, Homo sapien
aataagttcgagatggtgcatatgc

SEQ ID NO: 1903507 - DNA, 25 bp, Homo sapien
actcagatgagttgacacagtgtgc

SEQ ID NO: 1903508 - DNA, 25 bp, Homo sapien
aaagtcttccttttgaaccactcag

SEQ ID NO: 1903509 - DNA, 25 bp, Homo sapien
cctacatcaggatcaaaagtcttcc

SEQ ID NO: 1903510 - DNA, 25 bp, Homo sapien
tgacacagtgtgctaattggcttag

SEQ ID NO: 1903511 - DNA, 25 bp, Homo sapien
ctgagattttgggatcacttgttac

SEQ ID NO: 1903512 - DNA, 25 bp, Homo sapien
tgggatcacttgttaccagagcaga

SEQ ID NO: 1903513 - DNA, 25 bp, Homo sapien
gagattttgggatcacttgttacca

SEQ ID NO: 1903514 - DNA, 25 bp, Homo sapien
ttttgggatcacttgttaccagagc

SEQ ID NO: 1903515 - DNA, 25 bp, Homo sapien
ccaaagttgatctgtacttctgagg

SEQ ID NO: 1903516 - DNA, 25 bp, Homo sapien
tgtacttctgaggactgtggtaatg

SEQ ID NO: 1903517 - DNA, 25 bp, Homo sapien
gaggactgtggtaatgtgatagtca

SEQ ID NO: 1903518 - DNA, 25 bp, Homo sapien
cttctgaggactgtggtaatgtgat

SEQ ID NO: 1903519 - DNA, 25 bp, Homo sapien
cttctttagactagcatcagtggct

SEQ ID NO: 1903520 - DNA, 25 bp, Homo sapien
ctgagtttacaggtgagaagcaata

SEQ ID NO: 1903521 - DNA, 25 bp, Homo sapien
aagcaatatcaaaggtggtccacgt

SEQ ID NO: 1903522 - DNA, 25 bp, Homo sapien
tgttgttcaggcagggtttaaccat

SEQ ID NO: 1903523 - DNA, 25 bp, Homo sapien
catttttgggattgttccaagtcct

SEQ ID NO: 1903524 - DNA, 25 bp, Homo sapien
tcatttttgggattgttccaagtcc

SEQ ID NO: 1903525 - DNA, 25 bp, Homo sapien
aatttactcagtacagcatactgac

SEQ ID NO: 1903526 - DNA, 25 bp, Homo sapien
ttcaatttactcagtacagcatact

SEQ ID NO: 1903527 - DNA, 25 bp, Homo sapien
aacccggtgtgaaagagcatccaca

SEQ ID NO: 1903528 - DNA, 25 bp, Homo sapien
agagcatccacattcaatttactca

SEQ ID NO: 1903529 - DNA, 25 bp, Homo sapien
taaactttaatgagggctcaaggag

SEQ ID NO: 1903530 - DNA, 25 bp, Homo sapien
ccatctgcagtaatagcttcgcttt

SEQ ID NO: 1903531 - DNA, 25 bp, Homo sapien
aggtatgggattgcttgaaggccat

SEQ ID NO: 1903532 - DNA, 25 bp, Homo sapien
taatagcttcgctttttagggccat

SEQ ID NO: 1903533 - DNA, 25 bp, Homo sapien
agtcaagtctccaacagcttgctct

SEQ ID NO: 1903534 - DNA, 25 bp, Homo sapien
ctctgtcccatttacagtatgatgg

SEQ ID NO: 1903535 - DNA, 25 bp, Homo sapien
ttcccagtcaagtctccaacagctt

SEQ ID NO: 1903536 - DNA, 25 bp, Homo sapien
tgctctgtcccatttacagtatgat

SEQ ID NO: 1903537 - DNA, 25 bp, Homo sapien
gtctgacatcctacagacacatatt

SEQ ID NO: 1903538 - DNA, 25 bp, Homo sapien
gacacatattcaggaccaactgaca

SEQ ID NO: 1903539 - DNA, 25 bp, Homo sapien
agacacatattcaggaccaactgac

SEQ ID NO: 1903540 - DNA, 25 bp, Homo sapien
tgacatcctacagacacatattcag

SEQ ID NO: 1903541 - DNA, 25 bp, Homo sapien
ccttatcctcaaatactccactttg

SEQ ID NO: 1903542 - DNA, 25 bp, Homo sapien
ttctttctctaatctgcccatctgc

SEQ ID NO: 1903543 - DNA, 25 bp, Homo sapien
tccttatcctcaaatactccacttt

SEQ ID NO: 1903544 - DNA, 25 bp, Homo sapien
ttatcctcaaatactccactttgtc

SEQ ID NO: 1903545 - DNA, 25 bp, Homo sapien
ctttaagacaaggtccacacaaaca

SEQ ID NO: 1903546 - DNA, 25 bp, Homo sapien
ttaagacaaggtccacacaaacaag

SEQ ID NO: 1903547 - DNA, 25 bp, Homo sapien
taagacaaggtccacacaaacaagt

SEQ ID NO: 1903548 - DNA, 25 bp, Homo sapien
gacaaggtccacacaaacaagtcaa

SEQ ID NO: 1903549 - DNA, 25 bp, Homo sapien
ttatttccaaggtagctgatctagg

SEQ ID NO: 1903550 - DNA, 25 bp, Homo sapien
tagctgatctaggaatgcagcctga

SEQ ID NO: 1903551 - DNA, 25 bp, Homo sapien
gctgatctaggaatgcagcctgaag

SEQ ID NO: 1903552 - DNA, 25 bp, Homo sapien
taaccaactcatttcgagtttcttg

SEQ ID NO: 1903553 - DNA, 25 bp, Homo sapien
ttttcctccaattccgattgctcat

SEQ ID NO: 1903554 - DNA, 25 bp, Homo sapien
attttcctccaattccgattgctca

SEQ ID NO: 1903555 - DNA, 25 bp, Homo sapien
ccagcattggaacagtggaagagca

SEQ ID NO: 1903556 - DNA, 25 bp, Homo sapien
gtggataagattcagtacaaggatc

SEQ ID NO: 1903557 - DNA, 25 bp, Homo sapien
tacaaggatctcttgtcagagcaaa

SEQ ID NO: 1903558 - DNA, 25 bp, Homo sapien
gcattggaacagtggaagagcaaca

SEQ ID NO: 1903559 - DNA, 25 bp, Homo sapien
cttctacccacgtaggaagctctgc

SEQ ID NO: 1903560 - DNA, 25 bp, Homo sapien
tgtatttcctgggtcgccttctacc

SEQ ID NO: 1903561 - DNA, 25 bp, Homo sapien
tgggtcgccttctacccacgtagga

SEQ ID NO: 1903562 - DNA, 25 bp, Homo sapien
tcaggtgtatttcctgggtcgcctt

SEQ ID NO: 1903563 - DNA, 25 bp, Homo sapien
caagccctaagtcttgtgacgagca

SEQ ID NO: 1903564 - DNA, 25 bp, Homo sapien
gttggtgtagtcataagtcctggtt

SEQ ID NO: 1903565 - DNA, 25 bp, Homo sapien
taagtcttgtgacgagcatttgttg

SEQ ID NO: 1903566 - DNA, 25 bp, Homo sapien
taagtcctggtttgtcaagccctaa

SEQ ID NO: 1903567 - DNA, 25 bp, Homo sapien
ctgcattagaggcttgtatttctga

SEQ ID NO: 1903568 - DNA, 25 bp, Homo sapien
gatgacctctcagtggtattcctga

SEQ ID NO: 1903569 - DNA, 25 bp, Homo sapien
agctcagaccaagcccactgtccat

SEQ ID NO: 1903570 - DNA, 25 bp, Homo sapien
cctctcagtggtattcctgagctca

SEQ ID NO: 1903571 - DNA, 25 bp, Homo sapien
tgagctcagaccaagcccactgtcc

SEQ ID NO: 1903572 - DNA, 25 bp, Homo sapien
attatataagtttgctatgtgtgtg

SEQ ID NO: 1903573 - DNA, 25 bp, Homo sapien
aattatcagtttaccactttaacag

SEQ ID NO: 1903574 - DNA, 25 bp, Homo sapien
aatctttgcttaggaaatgttcata

SEQ ID NO: 1903575 - DNA, 25 bp, Homo sapien
tctagcattgaagtattaggaagag

SEQ ID NO: 1903576 - DNA, 25 bp, Homo sapien
ggtgtcataccgacaaatgatcata

SEQ ID NO: 1903577 - DNA, 25 bp, Homo sapien
ttttttcgaagcatcccggtgtcat

SEQ ID NO: 1903578 - DNA, 25 bp, Homo sapien
gaagcatcccggtgtcataccgaca

SEQ ID NO: 1903579 - DNA, 25 bp, Homo sapien
tcccggtgtcataccgacaaatgat

SEQ ID NO: 1903580 - DNA, 25 bp, Homo sapien
aaggaagactgggactatggtttcg

SEQ ID NO: 1903581 - DNA, 25 bp, Homo sapien
gaagaggtgaccaataacatttggt

SEQ ID NO: 1903582 - DNA, 25 bp, Homo sapien
ggcccgtactcccaaaatgtaggca

SEQ ID NO: 1903583 - DNA, 25 bp, Homo sapien
caataacatttggtccaggcccgta

SEQ ID NO: 1903584 - DNA, 25 bp, Homo sapien
ttgttccactttatctttcctctga

SEQ ID NO: 1903585 - DNA, 25 bp, Homo sapien
ctcttggatgcccttgctaacttca

SEQ ID NO: 1903586 - DNA, 25 bp, Homo sapien
taacttcagtcacctctgaggcaat

SEQ ID NO: 1903587 - DNA, 25 bp, Homo sapien
tggatgcccttgctaacttcagtca

SEQ ID NO: 1903588 - DNA, 25 bp, Homo sapien
ttatgctagactgccataaatttca

SEQ ID NO: 1903589 - DNA, 25 bp, Homo sapien
cagcttggtggcgtaggggactttc

SEQ ID NO: 1903590 - DNA, 25 bp, Homo sapien
gctagactgccataaatttcacatt

SEQ ID NO: 1903591 - DNA, 25 bp, Homo sapien
tggtcttcctgctactgaaatgctc

SEQ ID NO: 1903592 - DNA, 25 bp, Homo sapien
gactgtccaggacaactgggctgag

SEQ ID NO: 1903593 - DNA, 25 bp, Homo sapien
tccaggacaactgggctgagtagtt

SEQ ID NO: 1903594 - DNA, 25 bp, Homo sapien
aggactgtccaggacaactgggctg

SEQ ID NO: 1903595 - DNA, 25 bp, Homo sapien
ctacaaaaggactgtccaggacaac

SEQ ID NO: 1903596 - DNA, 25 bp, Homo sapien
tcatgtagccatttactccggaagt

SEQ ID NO: 1903597 - DNA, 25 bp, Homo sapien
gcagaacacatacacctccgggatc

SEQ ID NO: 1903598 - DNA, 25 bp, Homo sapien
gaagttcagtggttccatccttagc

SEQ ID NO: 1903599 - DNA, 25 bp, Homo sapien
ctccgggatccctgtggaagagtgt

SEQ ID NO: 1903600 - DNA, 25 bp, Homo sapien
aaagtgctctcctgtcccacaagcg

SEQ ID NO: 1903601 - DNA, 25 bp, Homo sapien
tgataatcgccttttcaaagtgctc

SEQ ID NO: 1903602 - DNA, 25 bp, Homo sapien
agcctcgttttctcttgataatcgc

SEQ ID NO: 1903603 - DNA, 25 bp, Homo sapien
aagtgctctcctgtcccacaagcgt

SEQ ID NO: 1903604 - DNA, 25 bp, Homo sapien
accgcgcccgtcccagattttctgt

SEQ ID NO: 1903605 - DNA, 25 bp, Homo sapien
ccgcgcccgtcccagattttctgtt

SEQ ID NO: 1903606 - DNA, 25 bp, Homo sapien
ggtgctacatatgtccctggaaact

SEQ ID NO: 1903607 - DNA, 25 bp, Homo sapien
gaatttcagtgatgcgcctgcagca

SEQ ID NO: 1903608 - DNA, 25 bp, Homo sapien
catggcctcagtgcttcgacaaata

SEQ ID NO: 1903609 - DNA, 25 bp, Homo sapien
gctgccagatcagaatgggccgtgt

SEQ ID NO: 1903610 - DNA, 25 bp, Homo sapien
cttgtcaaagttgggagcacccctt

SEQ ID NO: 1903611 - DNA, 25 bp, Homo sapien
ggtaaggtttctatggcccatgggc

SEQ ID NO: 1903612 - DNA, 25 bp, Homo sapien
tcttggtgagtggagcaggctagtc

SEQ ID NO: 1903613 - DNA, 25 bp, Homo sapien
tggacttctagtttctcacaagatg

SEQ ID NO: 1903614 - DNA, 25 bp, Homo sapien
atgaaggcctgggtgtcatgcaagt

SEQ ID NO: 1903615 - DNA, 25 bp, Homo sapien
acagagtttggacctacattggtta

SEQ ID NO: 1903616 - DNA, 25 bp, Homo sapien
tggacctacattggttagcttcaga

SEQ ID NO: 1903617 - DNA, 25 bp, Homo sapien
atttatgaaggcctgggtgtcatgc

SEQ ID NO: 1903618 - DNA, 25 bp, Homo sapien
gactgagacaagtctgaacatatga

SEQ ID NO: 1903619 - DNA, 25 bp, Homo sapien
gaacatatgaagagatcagttgcag

SEQ ID NO: 1903620 - DNA, 25 bp, Homo sapien
caagtctgaacatatgaagagatca

SEQ ID NO: 1903621 - DNA, 25 bp, Homo sapien
ttcgagagactgagacaagtctgaa

SEQ ID NO: 1903622 - DNA, 25 bp, Homo sapien
aatgaataacttctacaccaaagtc

SEQ ID NO: 1903623 - DNA, 25 bp, Homo sapien
tcatgttttcttgcagagtgagatt

SEQ ID NO: 1903624 - DNA, 25 bp, Homo sapien
ttattgtagataaacagcatgatac

SEQ ID NO: 1903625 - DNA, 25 bp, Homo sapien
gatacacgacgaaatattgactatt

SEQ ID NO: 1903626 - DNA, 25 bp, Homo sapien
ctttatattgcaggcaatagaaact

SEQ ID NO: 1903627 - DNA, 25 bp, Homo sapien
tattgcaggcaatagaaactgccaa

SEQ ID NO: 1903628 - DNA, 25 bp, Homo sapien
actgccaaacttaaaatcagttttg

SEQ ID NO: 1903629 - DNA, 25 bp, Homo sapien
tgcaggcaatagaaactgccaaact

SEQ ID NO: 1903630 - DNA, 25 bp, Homo sapien
aaccctgatagagcagcccgtgtga

SEQ ID NO: 1903631 - DNA, 25 bp, Homo sapien
tccaacagtgcacatccacactagg

SEQ ID NO: 1903632 - DNA, 25 bp, Homo sapien
cctgatagagcagcccgtgtgatcc

SEQ ID NO: 1903633 - DNA, 25 bp, Homo sapien
gtgcacatccacactaggccatagc

SEQ ID NO: 1903634 - DNA, 25 bp, Homo sapien
tcttctgatttctggctccaaagcc

SEQ ID NO: 1903635 - DNA, 25 bp, Homo sapien
gctttctctaagagaaagcttcttc

SEQ ID NO: 1903636 - DNA, 25 bp, Homo sapien
tctctaagagaaagcttcttctgat

SEQ ID NO: 1903637 - DNA, 25 bp, Homo sapien
ttttaagctggctttctctaagaga

SEQ ID NO: 1903638 - DNA, 25 bp, Homo sapien
catcaaggtagaatggccctgactg

SEQ ID NO: 1903639 - DNA, 25 bp, Homo sapien
gcaaaacagtcatctgcgtgagagt

SEQ ID NO: 1903640 - DNA, 25 bp, Homo sapien
tatctatggagcaaagtagcccagc

SEQ ID NO: 1903641 - DNA, 25 bp, Homo sapien
ccagcatagggctttggagcgcatg

SEQ ID NO: 1903642 - DNA, 25 bp, Homo sapien
actggaatctgctcgtgctggtgtt

SEQ ID NO: 1903643 - DNA, 25 bp, Homo sapien
ggaatctgctcgtgctggtgttttg

SEQ ID NO: 1903644 - DNA, 25 bp, Homo sapien
tggaatctgctcgtgctggtgtttt

SEQ ID NO: 1903645 - DNA, 25 bp, Homo sapien
ctggaatctgctcgtgctggtgttt

SEQ ID NO: 1903646 - DNA, 25 bp, Homo sapien
cccatggaggaatgggacagaatgg

SEQ ID NO: 1903647 - DNA, 25 bp, Homo sapien
gcattttttcggagcctggcccaaa

SEQ ID NO: 1903648 - DNA, 25 bp, Homo sapien
ttagccagtagacaagttatcttcc

SEQ ID NO: 1903649 - DNA, 25 bp, Homo sapien
gcccaaactcggctgtgcctcgagg

SEQ ID NO: 1903650 - DNA, 25 bp, Homo sapien
aaagactggcggttttggcaggact

SEQ ID NO: 1903651 - DNA, 25 bp, Homo sapien
tgcccgctccaggatgcacaataga

SEQ ID NO: 1903652 - DNA, 25 bp, Homo sapien
gccacccctgggatcttcaaatgac

SEQ ID NO: 1903653 - DNA, 25 bp, Homo sapien
tgacttaattaagggagccgcccag

SEQ ID NO: 1903654 - DNA, 25 bp, Homo sapien
tcagggtgtggaacatggccctgct

SEQ ID NO: 1903655 - DNA, 25 bp, Homo sapien
tggaacatggccctgctgcgccagg

SEQ ID NO: 1903656 - DNA, 25 bp, Homo sapien
aacatggccctgctgcgccagggtc

SEQ ID NO: 1903657 - DNA, 25 bp, Homo sapien
gggtgtggaacatggccctgctgcg

SEQ ID NO: 1903658 - DNA, 25 bp, Homo sapien
aatgtgtttaggttgagagttccgg

SEQ ID NO: 1903659 - DNA, 25 bp, Homo sapien
caagctgcgggaagactctgggact

SEQ ID NO: 1903660 - DNA, 25 bp, Homo sapien
gagtcctcccgagaacttggaccag

SEQ ID NO: 1903661 - DNA, 25 bp, Homo sapien
aggttcggcgcccactagatctcga

SEQ ID NO: 1903662 - DNA, 25 bp, Homo sapien
ctgggcgggagtttggtggggagag

SEQ ID NO: 1903663 - DNA, 25 bp, Homo sapien
ggccacggggaaaggagcgcggcgc

SEQ ID NO: 1903664 - DNA, 25 bp, Homo sapien
ggccaggagcgtgcaggggccacgg

SEQ ID NO: 1903665 - DNA, 25 bp, Homo sapien
ctcgctctagctcctgtggtccagg

SEQ ID NO: 1903666 - DNA, 25 bp, Homo sapien
caggaattctctcgctctagctcct

SEQ ID NO: 1903667 - DNA, 25 bp, Homo sapien
acgggagggactgcgggtgggcgag

SEQ ID NO: 1903668 - DNA, 25 bp, Homo sapien
ctgtgggctgcactccgggctcctt

SEQ ID NO: 1903669 - DNA, 25 bp, Homo sapien
tccgggctccttcacgaggtgtttg

SEQ ID NO: 1903670 - DNA, 25 bp, Homo sapien
ccaggtaaggactccccggctgtgg

SEQ ID NO: 1903671 - DNA, 25 bp, Homo sapien
tgtggctgccggcgggtctgacgaa

SEQ ID NO: 1903672 - DNA, 25 bp, Homo sapien
ctgtgtggctgccggcgggtctgac

SEQ ID NO: 1903673 - DNA, 25 bp, Homo sapien
tggctgccggcgggtctgacgaact

SEQ ID NO: 1903674 - DNA, 25 bp, Homo sapien
gctgccggcgggtctgacgaactcc

SEQ ID NO: 1903675 - DNA, 25 bp, Homo sapien
catgaatatagaggcttgatctttc

SEQ ID NO: 1903676 - DNA, 25 bp, Homo sapien
cacttttccaactagacatccaaat

SEQ ID NO: 1903677 - DNA, 25 bp, Homo sapien
ttccaactagacatccaaataaccc

SEQ ID NO: 1903678 - DNA, 25 bp, Homo sapien
gaatatagaggcttgatctttcact

SEQ ID NO: 1903679 - DNA, 25 bp, Homo sapien
tctttcttgcaactcaaggcgggct

SEQ ID NO: 1903680 - DNA, 25 bp, Homo sapien
catctcgtccgttaccaaggctggg

SEQ ID NO: 1903681 - DNA, 25 bp, Homo sapien
tagcaaagcgccttttgtgccgggc

SEQ ID NO: 1903682 - DNA, 25 bp, Homo sapien
tgcagcagtgcagtagaatagggcc

SEQ ID NO: 1903683 - DNA, 25 bp, Homo sapien
tgccgtgcgtgtgggcacagaaaca

SEQ ID NO: 1903684 - DNA, 25 bp, Homo sapien
tctctatgaccatgccgtgatcgtg

SEQ ID NO: 1903685 - DNA, 25 bp, Homo sapien
tccttggcgcagtgagtgaagaaca

SEQ ID NO: 1903686 - DNA, 25 bp, Homo sapien
cgtgatcgtgtctgcggtcaccact

SEQ ID NO: 1903687 - DNA, 25 bp, Homo sapien
ggctccgtggattctgatctgctca

SEQ ID NO: 1903688 - DNA, 25 bp, Homo sapien
ccaatgtgtggtagtggtctctgca

SEQ ID NO: 1903689 - DNA, 25 bp, Homo sapien
ccaggcagccggatgtaaacaggcg

SEQ ID NO: 1903690 - DNA, 25 bp, Homo sapien
taaacaggcggttcgctctgcctgg

SEQ ID NO: 1903691 - DNA, 25 bp, Homo sapien
gagccttttcgattgttttcaccgc

SEQ ID NO: 1903692 - DNA, 25 bp, Homo sapien
ccacagtagcttgccacggagatga

SEQ ID NO: 1903693 - DNA, 25 bp, Homo sapien
gtgaccagggcagttctcacgtgca

SEQ ID NO: 1903694 - DNA, 25 bp, Homo sapien
cacgtgcaaatgaaaggtactaacc

SEQ ID NO: 1903695 - DNA, 25 bp, Homo sapien
acatagatgcccacagtcaaaaagc

SEQ ID NO: 1903696 - DNA, 25 bp, Homo sapien
atacacatagatgcccacagtcaaa

SEQ ID NO: 1903697 - DNA, 25 bp, Homo sapien
cacatagatgcccacagtcaaaaag

SEQ ID NO: 1903698 - DNA, 25 bp, Homo sapien
cacatacacatagatgcccacagtc

SEQ ID NO: 1903699 - DNA, 25 bp, Homo sapien
gctgccccgaggctctatggcagcg

SEQ ID NO: 1903700 - DNA, 25 bp, Homo sapien
agccgactcccacttggctgcacag

SEQ ID NO: 1903701 - DNA, 25 bp, Homo sapien
ggagcaccgaccctagggtgctgcc

SEQ ID NO: 1903702 - DNA, 25 bp, Homo sapien
tgagaaaaggtatccggagcaccga

SEQ ID NO: 1903703 - DNA, 25 bp, Homo sapien
ccgttattttgctgggcatcccatt

SEQ ID NO: 1903704 - DNA, 25 bp, Homo sapien
aaggtgaacacagccagtttaaggg

SEQ ID NO: 1903705 - DNA, 25 bp, Homo sapien
tgtgggacagcaatcacacagtcac

SEQ ID NO: 1903706 - DNA, 25 bp, Homo sapien
cagtcacctccttgcgtacacgaag

SEQ ID NO: 1903707 - DNA, 25 bp, Homo sapien
tagtgagactgagcttacaagccgc

SEQ ID NO: 1903708 - DNA, 25 bp, Homo sapien
tacaagccgccactctacaaattct

SEQ ID NO: 1903709 - DNA, 25 bp, Homo sapien
ctgcaacatcgaatagtgagactga

SEQ ID NO: 1903710 - DNA, 25 bp, Homo sapien
gactgagcttacaagccgccactct

SEQ ID NO: 1903711 - DNA, 25 bp, Homo sapien
ttaaagcttcaaagaataacttgat

SEQ ID NO: 1903712 - DNA, 25 bp, Homo sapien
gatgtgatccatcaaaagaggcaca

SEQ ID NO: 1903713 - DNA, 25 bp, Homo sapien
tgatgtgatccatcaaaagaggcac

SEQ ID NO: 1903714 - DNA, 25 bp, Homo sapien
taaagtgttgtctatgataacaatg

SEQ ID NO: 1903715 - DNA, 25 bp, Homo sapien
cattacataaagtgttgtctatgat

SEQ ID NO: 1903716 - DNA, 25 bp, Homo sapien
tgataacaatgacataatctttcat

SEQ ID NO: 1903717 - DNA, 25 bp, Homo sapien
tacataaagtgttgtctatgataac

SEQ ID NO: 1903718 - DNA, 25 bp, Homo sapien
catcatagggcttcctgtttttctt

SEQ ID NO: 1903719 - DNA, 25 bp, Homo sapien
ctgataacatcatagggcttcctgt

SEQ ID NO: 1903720 - DNA, 25 bp, Homo sapien
tctgctgacaattttgtaaggtaat

SEQ ID NO: 1903721 - DNA, 25 bp, Homo sapien
ctgaagaggaagatttcaatctgat

SEQ ID NO: 1903722 - DNA, 25 bp, Homo sapien
tcctgtgaagtgttttaggccagtg

SEQ ID NO: 1903723 - DNA, 25 bp, Homo sapien
tgaggtggcctttaggaacacaaag

SEQ ID NO: 1903724 - DNA, 25 bp, Homo sapien
tgttttaggccagtgaggtggcctt

SEQ ID NO: 1903725 - DNA, 25 bp, Homo sapien
agtgaggtggcctttaggaacacaa

SEQ ID NO: 1903726 - DNA, 25 bp, Homo sapien
tattgactactagcgtcagcttctg

SEQ ID NO: 1903727 - DNA, 25 bp, Homo sapien
tctgtgcagctgagatacaaattca

SEQ ID NO: 1903728 - DNA, 25 bp, Homo sapien
tactagcgtcagcttctgtgcagct

SEQ ID NO: 1903729 - DNA, 25 bp, Homo sapien
cagccctaggcttttatccacagat

SEQ ID NO: 1903730 - DNA, 25 bp, Homo sapien
gcttaacacatcctgctattagatt

SEQ ID NO: 1903731 - DNA, 25 bp, Homo sapien
gctcattaggaattaatatctgtgt

SEQ ID NO: 1903732 - DNA, 25 bp, Homo sapien
tatgtactcggaaagtggttctgga

SEQ ID NO: 1903733 - DNA, 25 bp, Homo sapien
tctttaattagctcattaggaatta

SEQ ID NO: 1903734 - DNA, 25 bp, Homo sapien
ggtgttgggtgtccgggcagtgatc

SEQ ID NO: 1903735 - DNA, 25 bp, Homo sapien
ttgggtgtccgggcagtgatctcct

SEQ ID NO: 1903736 - DNA, 25 bp, Homo sapien
cgtggtgttgggtgtccgggcagtg

SEQ ID NO: 1903737 - DNA, 25 bp, Homo sapien
atcttcgtggtgttgggtgtccggg

SEQ ID NO: 1903738 - DNA, 25 bp, Homo sapien
ccaggtatgtgattgtgcctccaga

SEQ ID NO: 1903739 - DNA, 25 bp, Homo sapien
gatgacctagccgtaaatcagcaac

SEQ ID NO: 1903740 - DNA, 25 bp, Homo sapien
gatggcctagggaaaggcatagccc

SEQ ID NO: 1903741 - DNA, 25 bp, Homo sapien
gaaaaaggaaaagcgcctctggaca

SEQ ID NO: 1903742 - DNA, 25 bp, Homo sapien
agagtccatgacaatactagtagta

SEQ ID NO: 1903743 - DNA, 25 bp, Homo sapien
acagcatggccctgggtgccacata

SEQ ID NO: 1903744 - DNA, 25 bp, Homo sapien
cagcatggccctgggtgccacatac

SEQ ID NO: 1903745 - DNA, 25 bp, Homo sapien
ggacagcatggccctgggtgccaca

SEQ ID NO: 1903746 - DNA, 25 bp, Homo sapien
agggacagcatggccctgggtgcca

SEQ ID NO: 1903747 - DNA, 25 bp, Homo sapien
gcagggggtatccaaggtctcaaac

SEQ ID NO: 1903748 - DNA, 25 bp, Homo sapien
ggcagggggtatccaaggtctcaaa

SEQ ID NO: 1903749 - DNA, 25 bp, Homo sapien
tgaaggagtacttcaatgtcaggat

SEQ ID NO: 1903750 - DNA, 25 bp, Homo sapien
catgttgtaccagttggaaataatg

SEQ ID NO: 1903751 - DNA, 25 bp, Homo sapien
cattgcagagggtatgatgccagat

SEQ ID NO: 1903752 - DNA, 25 bp, Homo sapien
taatgctgtgcttgaaggagtactt

SEQ ID NO: 1903753 - DNA, 25 bp, Homo sapien
tcaaggacaagtgctgtgaggctct

SEQ ID NO: 1903754 - DNA, 25 bp, Homo sapien
tcctgtgtgcttactagaaagacaa

SEQ ID NO: 1903755 - DNA, 25 bp, Homo sapien
catgtggcgccattgtcaaggacaa

SEQ ID NO: 1903756 - DNA, 25 bp, Homo sapien
ggaaccttatgctatctctgatgct

SEQ ID NO: 1903757 - DNA, 25 bp, Homo sapien
tacatttcagtgatctccaatagat

SEQ ID NO: 1903758 - DNA, 25 bp, Homo sapien
cctgctattaagatcagaataagaa

SEQ ID NO: 1903759 - DNA, 25 bp, Homo sapien
gcagttttctgtagcatgatagttc

SEQ ID NO: 1903760 - DNA, 25 bp, Homo sapien
tgtactgactctctacatattaaag

SEQ ID NO: 1903761 - DNA, 25 bp, Homo sapien
agatttatccatccctggcaatttc

SEQ ID NO: 1903762 - DNA, 25 bp, Homo sapien
tcagatttatccatccctggcaatt

SEQ ID NO: 1903763 - DNA, 25 bp, Homo sapien
ttcagatttatccatccctggcaat

SEQ ID NO: 1903764 - DNA, 25 bp, Homo sapien
tttatccatccctggcaatttcaag

SEQ ID NO: 1903765 - DNA, 25 bp, Homo sapien
tggaattgccagctttgagggtatt

SEQ ID NO: 1903766 - DNA, 25 bp, Homo sapien
aatgctgccagcctatattatctgc

SEQ ID NO: 1903767 - DNA, 25 bp, Homo sapien
ccagctttgagggtattacactaca

SEQ ID NO: 1903768 - DNA, 25 bp, Homo sapien
tctgctttcttaaatgagtttggaa

SEQ ID NO: 1903769 - DNA, 25 bp, Homo sapien
ctttgattggtatcatcatcaactg

SEQ ID NO: 1903770 - DNA, 25 bp, Homo sapien
gaaggccgattttcctgttgcctcc

SEQ ID NO: 1903771 - DNA, 25 bp, Homo sapien
catcatcaactgaccatttggagca

SEQ ID NO: 1903772 - DNA, 25 bp, Homo sapien
aggacgaaggccgattttcctgttg

SEQ ID NO: 1903773 - DNA, 25 bp, Homo sapien
ctactggatttggttataacaggac

SEQ ID NO: 1903774 - DNA, 25 bp, Homo sapien
ttttggggagtctgtatgtataagg

SEQ ID NO: 1903775 - DNA, 25 bp, Homo sapien
ctgtatgtataagggtagtgggtca

SEQ ID NO: 1903776 - DNA, 25 bp, Homo sapien
tggatttggttataacaggacgaaa

SEQ ID NO: 1903777 - DNA, 25 bp, Homo sapien
agtattctgttgtatgtatgttcca

SEQ ID NO: 1903778 - DNA, 25 bp, Homo sapien
tacacataacgggtacaagtatagt

SEQ ID NO: 1903779 - DNA, 25 bp, Homo sapien
tatcgtgtaggagtgaagtctgagc

SEQ ID NO: 1903780 - DNA, 25 bp, Homo sapien
taatatctgaaagcgaaggatcttg

SEQ ID NO: 1903781 - DNA, 25 bp, Homo sapien
caatgctcacaaatcgaccatttac

SEQ ID NO: 1903782 - DNA, 25 bp, Homo sapien
caaatcgaccatttacaccagttat

SEQ ID NO: 1903783 - DNA, 25 bp, Homo sapien
atcaatgctcacaaatcgaccattt

SEQ ID NO: 1903784 - DNA, 25 bp, Homo sapien
gctcacaaatcgaccatttacacca

SEQ ID NO: 1903785 - DNA, 25 bp, Homo sapien
gctccggtcttgaaggaataaggct

SEQ ID NO: 1903786 - DNA, 25 bp, Homo sapien
gaataaggctgcagaggcatatcat

SEQ ID NO: 1903787 - DNA, 25 bp, Homo sapien
ggaataaggctgcagaggcatatca

SEQ ID NO: 1903788 - DNA, 25 bp, Homo sapien
actgctccggtcttgaaggaataag

SEQ ID NO: 1903789 - DNA, 25 bp, Homo sapien
gttgttccatcttgtgatacttcca

SEQ ID NO: 1903790 - DNA, 25 bp, Homo sapien
tgtgtcgctttccagttgttccatc

SEQ ID NO: 1903791 - DNA, 25 bp, Homo sapien
gtgatacttccatcttaacatgtaa

SEQ ID NO: 1903792 - DNA, 25 bp, Homo sapien
tgctgtcattaatgtgtcgctttcc

SEQ ID NO: 1903793 - DNA, 25 bp, Homo sapien
catggtaaagacgatgctaggaatt

SEQ ID NO: 1903794 - DNA, 25 bp, Homo sapien
atggtaaagacgatgctaggaattt

SEQ ID NO: 1903795 - DNA, 25 bp, Homo sapien
tggtaaagacgatgctaggaatttg

SEQ ID NO: 1903796 - DNA, 25 bp, Homo sapien
ccagaagatgcgactgaaatgatgt

SEQ ID NO: 1903797 - DNA, 25 bp, Homo sapien
aagtatagcaacatatatcaggatc

SEQ ID NO: 1903798 - DNA, 25 bp, Homo sapien
tcatagagatcagcgtggataaacc

SEQ ID NO: 1903799 - DNA, 25 bp, Homo sapien
tagcaacatatatcaggatcataga

SEQ ID NO: 1903800 - DNA, 25 bp, Homo sapien
aagctgaatcctctccgggggttca

SEQ ID NO: 1903801 - DNA, 25 bp, Homo sapien
aggaggcaacacttctcctagcagg

SEQ ID NO: 1903802 - DNA, 25 bp, Homo sapien
gaggaggcaacacttctcctagcag

SEQ ID NO: 1903803 - DNA, 25 bp, Homo sapien
tcagaggaggcaacacttctcctag

SEQ ID NO: 1903804 - DNA, 25 bp, Homo sapien
ttgtgggttgtagcaagctgtgcac

SEQ ID NO: 1903805 - DNA, 25 bp, Homo sapien
tggctttgtgggttgtagcaagctg

SEQ ID NO: 1903806 - DNA, 25 bp, Homo sapien
tgggttgtagcaagctgtgcacagt

SEQ ID NO: 1903807 - DNA, 25 bp, Homo sapien
ctttgtgggttgtagcaagctgtgc

SEQ ID NO: 1903808 - DNA, 25 bp, Homo sapien
ccagtaggtttataagccgtgtact

SEQ ID NO: 1903809 - DNA, 25 bp, Homo sapien
taagccgtgtacttgaacagcaaag

SEQ ID NO: 1903810 - DNA, 25 bp, Homo sapien
ggtttataagccgtgtacttgaaca

SEQ ID NO: 1903811 - DNA, 25 bp, Homo sapien
gccgtgtacttgaacagcaaagcca

SEQ ID NO: 1903812 - DNA, 25 bp, Homo sapien
tgtctgtgaaggaccaggtagttac

SEQ ID NO: 1903813 - DNA, 25 bp, Homo sapien
cctaagggccatagattgctgacat

SEQ ID NO: 1903814 - DNA, 25 bp, Homo sapien
gctggtcaagtttggcctaagggcc

SEQ ID NO: 1903815 - DNA, 25 bp, Homo sapien
gaatctgcttaagatcagtctgtca

SEQ ID NO: 1903816 - DNA, 25 bp, Homo sapien
atgatggctatgtcttctgtgtgaa

SEQ ID NO: 1903817 - DNA, 25 bp, Homo sapien
aatgatggctatgtcttctgtgtga

SEQ ID NO: 1903818 - DNA, 25 bp, Homo sapien
ctgtcacagcttctgcttgattccc

SEQ ID NO: 1903819 - DNA, 25 bp, Homo sapien
tcacagcttctgcttgattccccat

SEQ ID NO: 1903820 - DNA, 25 bp, Homo sapien
tctactgtcacagcttctgcttgat

SEQ ID NO: 1903821 - DNA, 25 bp, Homo sapien
cttctactgtcacagcttctgcttg

SEQ ID NO: 1903822 - DNA, 25 bp, Homo sapien
ctccaccaaacaccacagaagacat

SEQ ID NO: 1903823 - DNA, 25 bp, Homo sapien
tctccaccaaacaccacagaagaca

SEQ ID NO: 1903824 - DNA, 25 bp, Homo sapien
ctctccaccaaacaccacagaagac

SEQ ID NO: 1903825 - DNA, 25 bp, Homo sapien
tccactggttaaaatatactgattg

SEQ ID NO: 1903826 - DNA, 25 bp, Homo sapien
taagagtaaccaaagctctgtatcc

SEQ ID NO: 1903827 - DNA, 25 bp, Homo sapien
ccgatttgtaagagtaaccaaagct

SEQ ID NO: 1903828 - DNA, 25 bp, Homo sapien
tatactgattgacatccacagaagt

SEQ ID NO: 1903829 - DNA, 25 bp, Homo sapien
ttaacgttcagcctttctctcatag

SEQ ID NO: 1903830 - DNA, 25 bp, Homo sapien
gtttgccgtgctgctgaaatacgca

SEQ ID NO: 1903831 - DNA, 25 bp, Homo sapien
aacgttcagcctttctctcataggg

SEQ ID NO: 1903832 - DNA, 25 bp, Homo sapien
tctcataggggtttgccgtgctgct

SEQ ID NO: 1903833 - DNA, 25 bp, Homo sapien
tcagcaccatgctttgttgaagcac

SEQ ID NO: 1903834 - DNA, 25 bp, Homo sapien
tcacaagacgtcctcatgctcagca

SEQ ID NO: 1903835 - DNA, 25 bp, Homo sapien
gctttgttgaagcaccagggtggaa

SEQ ID NO: 1903836 - DNA, 25 bp, Homo sapien
gggtcacaagacgtcctcatgctca

SEQ ID NO: 1903837 - DNA, 25 bp, Homo sapien
caaacaatgtctaacttcactttta

SEQ ID NO: 1903838 - DNA, 25 bp, Homo sapien
tatcacaaacaatgtctaacttcac

SEQ ID NO: 1903839 - DNA, 25 bp, Homo sapien
ttttatcacaaacaatgtctaactt

SEQ ID NO: 1903840 - DNA, 25 bp, Homo sapien
caatgtctaacttcacttttatcat

SEQ ID NO: 1903841 - DNA, 25 bp, Homo sapien
tccaaccacagaacactaaagatgt

SEQ ID NO: 1903842 - DNA, 25 bp, Homo sapien
cttccaaccacagaacactaaagat

SEQ ID NO: 1903843 - DNA, 25 bp, Homo sapien
ccacagaacactaaagatgtatatg

SEQ ID NO: 1903844 - DNA, 25 bp, Homo sapien
caaccacagaacactaaagatgtat

SEQ ID NO: 1903845 - DNA, 25 bp, Homo sapien
ctgtttgtttaattgtgccccaggg

SEQ ID NO: 1903846 - DNA, 25 bp, Homo sapien
tgttggaagatactccaatgttgaa

SEQ ID NO: 1903847 - DNA, 25 bp, Homo sapien
tccattgctccctgttggaagatac

SEQ ID NO: 1903848 - DNA, 25 bp, Homo sapien
tgctccctgttggaagatactccaa

SEQ ID NO: 1903849 - DNA, 25 bp, Homo sapien
gtctctagggccactatctttgaat

SEQ ID NO: 1903850 - DNA, 25 bp, Homo sapien
tagtctctagggccactatctttga

SEQ ID NO: 1903851 - DNA, 25 bp, Homo sapien
atagtctctagggccactatctttg

SEQ ID NO: 1903852 - DNA, 25 bp, Homo sapien
gagttactaggaccatactcctggt

SEQ ID NO: 1903853 - DNA, 25 bp, Homo sapien
agaacaacagttcccactgaagatg

SEQ ID NO: 1903854 - DNA, 25 bp, Homo sapien
tcctggtcttctgagttccatattc

SEQ ID NO: 1903855 - DNA, 25 bp, Homo sapien
gaggattctgctgcagtaagaagag

SEQ ID NO: 1903856 - DNA, 25 bp, Homo sapien
ttgttctggagagtatccatctgaa

SEQ ID NO: 1903857 - DNA, 25 bp, Homo sapien
ttctaaactggttccttgttctgga

SEQ ID NO: 1903858 - DNA, 25 bp, Homo sapien
tatccatctgaagagattaccgctc

SEQ ID NO: 1903859 - DNA, 25 bp, Homo sapien
accgctcttctggtgatcatcgcca

SEQ ID NO: 1903860 - DNA, 25 bp, Homo sapien
aatctccaaagataattctgggcat

SEQ ID NO: 1903861 - DNA, 25 bp, Homo sapien
tgggcatggtcttatcccaccaggg

SEQ ID NO: 1903862 - DNA, 25 bp, Homo sapien
tagccagctatcaaggtatcatcaa

SEQ ID NO: 1903863 - DNA, 25 bp, Homo sapien
ggatccctagattttgcgctgtctt

SEQ ID NO: 1903864 - DNA, 25 bp, Homo sapien
gacgatgagataatttgagagcacg

SEQ ID NO: 1903865 - DNA, 25 bp, Homo sapien
tgaaaaacagggtaagacacttgga

SEQ ID NO: 1903866 - DNA, 25 bp, Homo sapien
cagatactgtcagatatattggacg

SEQ ID NO: 1903867 - DNA, 25 bp, Homo sapien
tgagagcacgtgttctgaaaaacag

SEQ ID NO: 1903868 - DNA, 25 bp, Homo sapien
gtagcccctctcaaagatactcttt

SEQ ID NO: 1903869 - DNA, 25 bp, Homo sapien
agaaatatctttctccgtagcccct

SEQ ID NO: 1903870 - DNA, 25 bp, Homo sapien
actctttccaagcatttcaatgttc

SEQ ID NO: 1903871 - DNA, 25 bp, Homo sapien
gatactctttccaagcatttcaatg

SEQ ID NO: 1903872 - DNA, 25 bp, Homo sapien
ttcttcgttaagtcctttgacattg

SEQ ID NO: 1903873 - DNA, 25 bp, Homo sapien
ttgcagttgctccactggctattac

SEQ ID NO: 1903874 - DNA, 25 bp, Homo sapien
cttgcagttgctccactggctatta

SEQ ID NO: 1903875 - DNA, 25 bp, Homo sapien
caatggtacaaacccaggcgtcttc

SEQ ID NO: 1903876 - DNA, 25 bp, Homo sapien
gctctttgtcatagccaggtaacat

SEQ ID NO: 1903877 - DNA, 25 bp, Homo sapien
gaaggtcatcgacttttccaagccc

SEQ ID NO: 1903878 - DNA, 25 bp, Homo sapien
tattttgtaccgcaagcccaatggt

SEQ ID NO: 1903879 - DNA, 25 bp, Homo sapien
agtattgtgcctcaggactgatgac

SEQ ID NO: 1903880 - DNA, 25 bp, Homo sapien
actgatgactctattgacatggagt

SEQ ID NO: 1903881 - DNA, 25 bp, Homo sapien
gacatggagttaagccacatattca

SEQ ID NO: 1903882 - DNA, 25 bp, Homo sapien
gtattgtgcctcaggactgatgact

SEQ ID NO: 1903883 - DNA, 25 bp, Homo sapien
tatcatctttagaccaactgcatct

SEQ ID NO: 1903884 - DNA, 25 bp, Homo sapien
tattgccatatagcatttgaagctg

SEQ ID NO: 1903885 - DNA, 25 bp, Homo sapien
gcatttgcctaaaactatgtattgg

SEQ ID NO: 1903886 - DNA, 25 bp, Homo sapien
ggttctccccacagtaatgagaatt

SEQ ID NO: 1903887 - DNA, 25 bp, Homo sapien
tgcagaggatgtaatcctaatggta

SEQ ID NO: 1903888 - DNA, 25 bp, Homo sapien
tgagaattgcctgcagaggatgtaa

SEQ ID NO: 1903889 - DNA, 25 bp, Homo sapien
tcagtgttgagaattgcctgcagag

SEQ ID NO: 1903890 - DNA, 25 bp, Homo sapien
ggatgtaatcctaatggtatatttg

SEQ ID NO: 1903891 - DNA, 25 bp, Homo sapien
tctttggaattttcttcctcctctc

SEQ ID NO: 1903892 - DNA, 25 bp, Homo sapien
cttttatcttcctcctccttcttca

SEQ ID NO: 1903893 - DNA, 25 bp, Homo sapien
ttttatcttcctcctccttcttcat

SEQ ID NO: 1903894 - DNA, 25 bp, Homo sapien
taggttctgagctcatgcccaaagc

SEQ ID NO: 1903895 - DNA, 25 bp, Homo sapien
gagcagtagaggatggtgcaaccat

SEQ ID NO: 1903896 - DNA, 25 bp, Homo sapien
tggaatcccctattgactctgctga

SEQ ID NO: 1903897 - DNA, 25 bp, Homo sapien
tctgacagtggaacgcatggaatcc

SEQ ID NO: 1903898 - DNA, 25 bp, Homo sapien
tgaaaaggcctggcgttaagggcca

SEQ ID NO: 1903899 - DNA, 25 bp, Homo sapien
taaaaactggccgagtattggctgt

SEQ ID NO: 1903900 - DNA, 25 bp, Homo sapien
gcatgggcagatttcagtgatacga

SEQ ID NO: 1903901 - DNA, 25 bp, Homo sapien
taaatgaacttgatggagcatgggc

SEQ ID NO: 1903902 - DNA, 25 bp, Homo sapien
gctgtgtggaagactaaagctttca

SEQ ID NO: 1903903 - DNA, 25 bp, Homo sapien
gccagttggatattgttgtttataa

SEQ ID NO: 1903904 - DNA, 25 bp, Homo sapien
agtcccttacgacaatcaggaattg

SEQ ID NO: 1903905 - DNA, 25 bp, Homo sapien
ataaagtcccttacgacaatcagga

SEQ ID NO: 1903906 - DNA, 25 bp, Homo sapien
ctgggatgatgttgctgccatgcca

SEQ ID NO: 1903907 - DNA, 25 bp, Homo sapien
ccagttttaccagcaactttctcca

SEQ ID NO: 1903908 - DNA, 25 bp, Homo sapien
gcaccagttttaccagcaactttct

SEQ ID NO: 1903909 - DNA, 25 bp, Homo sapien
ctagcaccagttttaccagcaactt

SEQ ID NO: 1903910 - DNA, 25 bp, Homo sapien
cagttttaccagcaactttctccat

SEQ ID NO: 1903911 - DNA, 25 bp, Homo sapien
tctctgcatgagtcagtctttacaa

SEQ ID NO: 1903912 - DNA, 25 bp, Homo sapien
tgtacatctctgcatgagtcagtct

SEQ ID NO: 1903913 - DNA, 25 bp, Homo sapien
tgcagttctggcttttagcacagcc

SEQ ID NO: 1903914 - DNA, 25 bp, Homo sapien
ctgctctgtacatctctgcatgagt

SEQ ID NO: 1903915 - DNA, 25 bp, Homo sapien
tgctgtgtagtcagtatttctagac

SEQ ID NO: 1903916 - DNA, 25 bp, Homo sapien
cacttgtgatgtattcctaatccta

SEQ ID NO: 1903917 - DNA, 25 bp, Homo sapien
ttccattgggtattcaggagtccag

SEQ ID NO: 1903918 - DNA, 25 bp, Homo sapien
tgcattactaccatcttttctccct

SEQ ID NO: 1903919 - DNA, 25 bp, Homo sapien
cttctggttatgaatgtcaagaagt

SEQ ID NO: 1903920 - DNA, 25 bp, Homo sapien
agttcccttgttctctgcgcattca

SEQ ID NO: 1903921 - DNA, 25 bp, Homo sapien
tggttatgaatgtcaagaagttccc

SEQ ID NO: 1903922 - DNA, 25 bp, Homo sapien
gaatgtcaagaagttcccttgttct

SEQ ID NO: 1903923 - DNA, 25 bp, Homo sapien
tggctccaccataggctgccatgct

SEQ ID NO: 1903924 - DNA, 25 bp, Homo sapien
ggcttctgtggtataacactggtga

SEQ ID NO: 1903925 - DNA, 25 bp, Homo sapien
tgccatgctgcaccggctcaaatgc

SEQ ID NO: 1903926 - DNA, 25 bp, Homo sapien
tagtacatgccaggttccactccta

SEQ ID NO: 1903927 - DNA, 25 bp, Homo sapien
gtcttttgaagtgtcttaccacgtc

SEQ ID NO: 1903928 - DNA, 25 bp, Homo sapien
tgaatgttcctattcgtaagagaca

SEQ ID NO: 1903929 - DNA, 25 bp, Homo sapien
cacgtcttgaatgttcctattcgta

SEQ ID NO: 1903930 - DNA, 25 bp, Homo sapien
gaagtgtcttaccacgtcttgaatg

SEQ ID NO: 1903931 - DNA, 25 bp, Homo sapien
tcatgaggacgttcagaagcttctc

SEQ ID NO: 1903932 - DNA, 25 bp, Homo sapien
tctgaaagtcatgagacctccgctc

SEQ ID NO: 1903933 - DNA, 25 bp, Homo sapien
gattgtgctgtattcgttgtcctct

SEQ ID NO: 1903934 - DNA, 25 bp, Homo sapien
acttggtgctgagtaaagcctattg

SEQ ID NO: 1903935 - DNA, 25 bp, Homo sapien
gatgagagagttttccaatcgtcta

SEQ ID NO: 1903936 - DNA, 25 bp, Homo sapien
caatcgtctactcaatgctttggga

SEQ ID NO: 1903937 - DNA, 25 bp, Homo sapien
gacacggagaagctttgtagccaga

SEQ ID NO: 1903938 - DNA, 25 bp, Homo sapien
tgggagccataacaggacacggaga

SEQ ID NO: 1903939 - DNA, 25 bp, Homo sapien
gacaaggctgtcagtttaaatccca

SEQ ID NO: 1903940 - DNA, 25 bp, Homo sapien
aaaaacttgtgctggagacaaggct

SEQ ID NO: 1903941 - DNA, 25 bp, Homo sapien
gagacaaggctgtcagtttaaatcc

SEQ ID NO: 1903942 - DNA, 25 bp, Homo sapien
agacaaggctgtcagtttaaatccc

SEQ ID NO: 1903943 - DNA, 25 bp, Homo sapien
tacttttgcgtatctgtctgtttcc

SEQ ID NO: 1903944 - DNA, 25 bp, Homo sapien
ctgtgcacagagagtccctacgtct

SEQ ID NO: 1903945 - DNA, 25 bp, Homo sapien
tgtgaattccacagtaaccaaaaaa

SEQ ID NO: 1903946 - DNA, 25 bp, Homo sapien
gagagtccctacgtctaactcccat

SEQ ID NO: 1903947 - DNA, 25 bp, Homo sapien
tgcttacacttgcattggatatatg

SEQ ID NO: 1903948 - DNA, 25 bp, Homo sapien
tatatgtatgctgattcccttaata

SEQ ID NO: 1903949 - DNA, 25 bp, Homo sapien
cactacagttaccaaatccgctctg

SEQ ID NO: 1903950 - DNA, 25 bp, Homo sapien
gctacctggaaaccaccaaatcttc

SEQ ID NO: 1903951 - DNA, 25 bp, Homo sapien
tccacaaagagactgggcaagctaa

SEQ ID NO: 1903952 - DNA, 25 bp, Homo sapien
ggcaagctaatcatctgcaatgtaa

SEQ ID NO: 1903953 - DNA, 25 bp, Homo sapien
tctgcaatgaccaaagaactgctgc

SEQ ID NO: 1903954 - DNA, 25 bp, Homo sapien
gagttaggaactgtacagtcacacc

SEQ ID NO: 1903955 - DNA, 25 bp, Homo sapien
cagaatagttgacaacgtacaccaa

SEQ ID NO: 1903956 - DNA, 25 bp, Homo sapien
ctacagaatagttgacaacgtacac

SEQ ID NO: 1903957 - DNA, 25 bp, Homo sapien
gaatagttgacaacgtacaccaaat

SEQ ID NO: 1903958 - DNA, 25 bp, Homo sapien
tacagaatagttgacaacgtacacc

SEQ ID NO: 1903959 - DNA, 25 bp, Homo sapien
tggaatcctgtaggggagcccacat

SEQ ID NO: 1903960 - DNA, 25 bp, Homo sapien
agacactggaatcctgtaggggagc

SEQ ID NO: 1903961 - DNA, 25 bp, Homo sapien
cactggaatcctgtaggggagccca

SEQ ID NO: 1903962 - DNA, 25 bp, Homo sapien
acactggaatcctgtaggggagccc

SEQ ID NO: 1903963 - DNA, 25 bp, Homo sapien
ctggaaactggactgtaaccgtggg

SEQ ID NO: 1903964 - DNA, 25 bp, Homo sapien
ggaaactggactgtaaccgtgggca

SEQ ID NO: 1903965 - DNA, 25 bp, Homo sapien
tgtaaccgtgggcagcagcactgtt

SEQ ID NO: 1903966 - DNA, 25 bp, Homo sapien
actggactgtaaccgtgggcagcag

SEQ ID NO: 1903967 - DNA, 25 bp, Homo sapien
aatgggctcataattcttgtctcta

SEQ ID NO: 1903968 - DNA, 25 bp, Homo sapien
caatgggctcataattcttgtctct

SEQ ID NO: 1903969 - DNA, 25 bp, Homo sapien
tcaatgggctcataattcttgtctc

SEQ ID NO: 1903970 - DNA, 25 bp, Homo sapien
tttcaatgggctcataattcttgtc

SEQ ID NO: 1903971 - DNA, 25 bp, Homo sapien
cagacttccattaaggcacctgatg

SEQ ID NO: 1903972 - DNA, 25 bp, Homo sapien
tccattaaggcacctgatgaatttc

SEQ ID NO: 1903973 - DNA, 25 bp, Homo sapien
cttccattaaggcacctgatgaatt

SEQ ID NO: 1903974 - DNA, 25 bp, Homo sapien
gacttccattaaggcacctgatgaa

SEQ ID NO: 1903975 - DNA, 25 bp, Homo sapien
ttgtgcagaatgaatattaggattc

SEQ ID NO: 1903976 - DNA, 25 bp, Homo sapien
tgtgcagaatgaatattaggattca

SEQ ID NO: 1903977 - DNA, 25 bp, Homo sapien
gtgcagaatgaatattaggattcat

SEQ ID NO: 1903978 - DNA, 25 bp, Homo sapien
ttgcttttccaaattgttgaattaa

SEQ ID NO: 1903979 - DNA, 25 bp, Homo sapien
tgttgaattaaagaacatctacttc

SEQ ID NO: 1903980 - DNA, 25 bp, Homo sapien
gaacatctacttcttttagcagaca

SEQ ID NO: 1903981 - DNA, 25 bp, Homo sapien
aattgttgaattaaagaacatctac

SEQ ID NO: 1903982 - DNA, 25 bp, Homo sapien
tcatgtaattccttgaccgatatat

SEQ ID NO: 1903983 - DNA, 25 bp, Homo sapien
gttcatgtaattccttgaccgatat

SEQ ID NO: 1903984 - DNA, 25 bp, Homo sapien
ttcatgtaattccttgaccgatata

SEQ ID NO: 1903985 - DNA, 25 bp, Homo sapien
cacttctatggcttcttctgtgctg

SEQ ID NO: 1903986 - DNA, 25 bp, Homo sapien
gtgttgagaacacttctatggcttc

SEQ ID NO: 1903987 - DNA, 25 bp, Homo sapien
gctgtgacaccctcatcagccaatg

SEQ ID NO: 1903988 - DNA, 25 bp, Homo sapien
tgcagggaaccttcacacagtagct

SEQ ID NO: 1903989 - DNA, 25 bp, Homo sapien
catatcaccttcgtaaagcccactg

SEQ ID NO: 1903990 - DNA, 25 bp, Homo sapien
taaagcccactgttgtgctgtgctc

SEQ ID NO: 1903991 - DNA, 25 bp, Homo sapien
cattttaagcatccatatcaccttc

SEQ ID NO: 1903992 - DNA, 25 bp, Homo sapien
ttgtgctgtgctcccccgcattctg

SEQ ID NO: 1903993 - DNA, 25 bp, Homo sapien
ccatgcaccaacgcatggggattta

SEQ ID NO: 1903994 - DNA, 25 bp, Homo sapien
gcaccaacgcatggggatttaattt

SEQ ID NO: 1903995 - DNA, 25 bp, Homo sapien
tgcaccaacgcatggggatttaatt

SEQ ID NO: 1903996 - DNA, 25 bp, Homo sapien
gactgcccatgcaccaacgcatggg

SEQ ID NO: 1903997 - DNA, 25 bp, Homo sapien
aaagaaataatttcggataccagag

SEQ ID NO: 1903998 - DNA, 25 bp, Homo sapien
gaaagaaataatttcggataccaga

SEQ ID NO: 1903999 - DNA, 25 bp, Homo sapien
cagtaagaccactaacaagttgttc

SEQ ID NO: 1904000 - DNA, 25 bp, Homo sapien
catgtgaaaatgagcctcatcgatc

SEQ ID NO: 1904001 - DNA, 25 bp, Homo sapien
ggacaaatggcataccaagacatat

SEQ ID NO: 1904002 - DNA, 25 bp, Homo sapien
gacatattaccaactgttgcctgag

SEQ ID NO: 1904003 - DNA, 25 bp, Homo sapien
tgaaagacagtttgtgtccacaagt

SEQ ID NO: 1904004 - DNA, 25 bp, Homo sapien
tttgtgtccacaagtggaaattgca

SEQ ID NO: 1904005 - DNA, 25 bp, Homo sapien
ctccactcgataatttgaaagacag

SEQ ID NO: 1904006 - DNA, 25 bp, Homo sapien
attcagtgagtgacactccactcga

SEQ ID NO: 1904007 - DNA, 25 bp, Homo sapien
cagtttattcttgtggtttacataa

SEQ ID NO: 1904008 - DNA, 25 bp, Homo sapien
tagcaagagcatcgtcagtagttac

SEQ ID NO: 1904009 - DNA, 25 bp, Homo sapien
tcaactaccgcttgtgctgatgaga

SEQ ID NO: 1904010 - DNA, 25 bp, Homo sapien
gatgagagaacaactaaccagttta

SEQ ID NO: 1904011 - DNA, 25 bp, Homo sapien
tactcctgtgaacctgtggaatacc

SEQ ID NO: 1904012 - DNA, 25 bp, Homo sapien
ccatccatcacccactactcctgtg

SEQ ID NO: 1904013 - DNA, 25 bp, Homo sapien
tcctgtgaacctgtggaatacctga

SEQ ID NO: 1904014 - DNA, 25 bp, Homo sapien
cccatccatcacccactactcctgt

SEQ ID NO: 1904015 - DNA, 25 bp, Homo sapien
aaggtatgtatgaccttgtttatta

SEQ ID NO: 1904016 - DNA, 25 bp, Homo sapien
gtttagtaaggtatgtatgaccttg

SEQ ID NO: 1904017 - DNA, 25 bp, Homo sapien
tatgtatgaccttgtttattatcta

SEQ ID NO: 1904018 - DNA, 25 bp, Homo sapien
tagtaaggtatgtatgaccttgttt

SEQ ID NO: 1904019 - DNA, 25 bp, Homo sapien
tttcaaaactacctgccctctatta

SEQ ID NO: 1904020 - DNA, 25 bp, Homo sapien
tctctgttgcagtgctctgatgatt

SEQ ID NO: 1904021 - DNA, 25 bp, Homo sapien
tgccctctattattctgagaatgaa

SEQ ID NO: 1904022 - DNA, 25 bp, Homo sapien
ttttccctgtgttactctctgttgc

SEQ ID NO: 1904023 - DNA, 25 bp, Homo sapien
cctctgcttctgttagatgaatcca

SEQ ID NO: 1904024 - DNA, 25 bp, Homo sapien
actgctgcagggacatacttatttc

SEQ ID NO: 1904025 - DNA, 25 bp, Homo sapien
tctgaatatttggatcatctctgtg

SEQ ID NO: 1904026 - DNA, 25 bp, Homo sapien
gatgaatccactccataagcctgct

SEQ ID NO: 1904027 - DNA, 25 bp, Homo sapien
acagagttagggaattagaatgacg

SEQ ID NO: 1904028 - DNA, 25 bp, Homo sapien
cactgacaaggtatgcatgtatgag

SEQ ID NO: 1904029 - DNA, 25 bp, Homo sapien
aggagaaacagcactgacaaggtat

SEQ ID NO: 1904030 - DNA, 25 bp, Homo sapien
ttagaatgacgtgatgtattgagct

SEQ ID NO: 1904031 - DNA, 25 bp, Homo sapien
gccaacaataaccactaaaaccagc

SEQ ID NO: 1904032 - DNA, 25 bp, Homo sapien
gcagaaattcaaaggtaactactgt

SEQ ID NO: 1904033 - DNA, 25 bp, Homo sapien
caatgcagtgcaacaatctccatac

SEQ ID NO: 1904034 - DNA, 25 bp, Homo sapien
cattcttttacaacacactgataca

SEQ ID NO: 1904035 - DNA, 25 bp, Homo sapien
ctatgctttcaatcgtataaaccat

SEQ ID NO: 1904036 - DNA, 25 bp, Homo sapien
tatctatgctttcaatcgtataaac

SEQ ID NO: 1904037 - DNA, 25 bp, Homo sapien
tctatgctttcaatcgtataaacca

SEQ ID NO: 1904038 - DNA, 25 bp, Homo sapien
tcttatctatgctttcaatcgtata

SEQ ID NO: 1904039 - DNA, 25 bp, Homo sapien
tgttgaaaacgtgcagacttctctc

SEQ ID NO: 1904040 - DNA, 25 bp, Homo sapien
ctagtacaagattctgttgaaaacg

SEQ ID NO: 1904041 - DNA, 25 bp, Homo sapien
cgtgcagacttctctcaagttgtgt

SEQ ID NO: 1904042 - DNA, 25 bp, Homo sapien
agtgtctggatactgcttttctggc

SEQ ID NO: 1904043 - DNA, 25 bp, Homo sapien
agtcttcatggagtgattttgtgcc

SEQ ID NO: 1904044 - DNA, 25 bp, Homo sapien
gattttgtgccaaggctgaatgaag

SEQ ID NO: 1904045 - DNA, 25 bp, Homo sapien
catggagtgattttgtgccaaggct

SEQ ID NO: 1904046 - DNA, 25 bp, Homo sapien
ggagtgattttgtgccaaggctgaa

SEQ ID NO: 1904047 - DNA, 25 bp, Homo sapien
tcctctacatgtagctcaagctctt

SEQ ID NO: 1904048 - DNA, 25 bp, Homo sapien
tgattccctacagactttgcttgtc

SEQ ID NO: 1904049 - DNA, 25 bp, Homo sapien
ccttgttagcaatgatcagctgttg

SEQ ID NO: 1904050 - DNA, 25 bp, Homo sapien
ttcgtttagtagaaatccagcttca

SEQ ID NO: 1904051 - DNA, 25 bp, Homo sapien
gtcctgtcctattatagagagattt

SEQ ID NO: 1904052 - DNA, 25 bp, Homo sapien
ctcaacttgcaagaataaacgctga

SEQ ID NO: 1904053 - DNA, 25 bp, Homo sapien
tgagagtcagcaaactgacttgctc

SEQ ID NO: 1904054 - DNA, 25 bp, Homo sapien
tgcaagaataaacgctgagagtcag

SEQ ID NO: 1904055 - DNA, 25 bp, Homo sapien
atcccttgtcttcaaaatcaacaga

SEQ ID NO: 1904056 - DNA, 25 bp, Homo sapien
tcccttgtcttcaaaatcaacagaa

SEQ ID NO: 1904057 - DNA, 25 bp, Homo sapien
cccttgtcttcaaaatcaacagaac

SEQ ID NO: 1904058 - DNA, 25 bp, Homo sapien
gcagtaaggtttctaatgcagagac

SEQ ID NO: 1904059 - DNA, 25 bp, Homo sapien
cacagagctgcaaagcggtacacag

SEQ ID NO: 1904060 - DNA, 25 bp, Homo sapien
acagagctgcaaagcggtacacagg

SEQ ID NO: 1904061 - DNA, 25 bp, Homo sapien
cagagctgcaaagcggtacacagga

SEQ ID NO: 1904062 - DNA, 25 bp, Homo sapien
aaacaatgaccaatttcctgaacca

SEQ ID NO: 1904063 - DNA, 25 bp, Homo sapien
ttctttttaacccatcactagtgtc

SEQ ID NO: 1904064 - DNA, 25 bp, Homo sapien
aaacgctgatactatttcaaatgag

SEQ ID NO: 1904065 - DNA, 25 bp, Homo sapien
tcaaacgctgatactatttcaaatg

SEQ ID NO: 1904066 - DNA, 25 bp, Homo sapien
cgctgatactatttcaaatgagtct

SEQ ID NO: 1904067 - DNA, 25 bp, Homo sapien
tcaatcaaacgctgatactatttca

SEQ ID NO: 1904068 - DNA, 25 bp, Homo sapien
ttttactcattaggtcaactccatc

SEQ ID NO: 1904069 - DNA, 25 bp, Homo sapien
taggtcaactccatcaataagtttg

SEQ ID NO: 1904070 - DNA, 25 bp, Homo sapien
atcacaactttaggcaagtcaaaac

SEQ ID NO: 1904071 - DNA, 25 bp, Homo sapien
gatggaaatcacaactttaggcaag

SEQ ID NO: 1904072 - DNA, 25 bp, Homo sapien
aggcactgcttttttggacatgtct

SEQ ID NO: 1904073 - DNA, 25 bp, Homo sapien
ctgaatttggttctcaggcactgct

SEQ ID NO: 1904074 - DNA, 25 bp, Homo sapien
tgaatttggttctcaggcactgctt

SEQ ID NO: 1904075 - DNA, 25 bp, Homo sapien
gcttttttggacatgtctttctgca

SEQ ID NO: 1904076 - DNA, 25 bp, Homo sapien
tgttatttgctcgactccactcagt

SEQ ID NO: 1904077 - DNA, 25 bp, Homo sapien
ggaagataaacatgaccgagtactg

SEQ ID NO: 1904078 - DNA, 25 bp, Homo sapien
tcagtgccattcttgagactctgtt

SEQ ID NO: 1904079 - DNA, 25 bp, Homo sapien
tagaattcaggcaccaatgatccaa

SEQ ID NO: 1904080 - DNA, 25 bp, Homo sapien
agagtaatgtggaaagaggttgctt

SEQ ID NO: 1904081 - DNA, 25 bp, Homo sapien
taatgtggaaagaggttgcttgcct

SEQ ID NO: 1904082 - DNA, 25 bp, Homo sapien
tcattggtgaatttcagttgaaaga

SEQ ID NO: 1904083 - DNA, 25 bp, Homo sapien
cattggtgaatttcagttgaaagag

SEQ ID NO: 1904084 - DNA, 25 bp, Homo sapien
tctccaattgtatcagcaatctcca

SEQ ID NO: 1904085 - DNA, 25 bp, Homo sapien
tcatctccaattgtatcagcaatct

SEQ ID NO: 1904086 - DNA, 25 bp, Homo sapien
ctccaattgtatcagcaatctccat

SEQ ID NO: 1904087 - DNA, 25 bp, Homo sapien
catctccaattgtatcagcaatctc

SEQ ID NO: 1904088 - DNA, 25 bp, Homo sapien
agtgttaaaaccagagacatggaga

SEQ ID NO: 1904089 - DNA, 25 bp, Homo sapien
tgccagataaatactttgcagagca

SEQ ID NO: 1904090 - DNA, 25 bp, Homo sapien
tttctcagcttatcagttaggtgtg

SEQ ID NO: 1904091 - DNA, 25 bp, Homo sapien
ggtgtgatagttccttcaggtactc

SEQ ID NO: 1904092 - DNA, 25 bp, Homo sapien
ttcaggtactcttgtaaatccaaca

SEQ ID NO: 1904093 - DNA, 25 bp, Homo sapien
taatacccttctttcagacagctca

SEQ ID NO: 1904094 - DNA, 25 bp, Homo sapien
tacccttctttcagacagctcatgc

SEQ ID NO: 1904095 - DNA, 25 bp, Homo sapien
aatacccttctttcagacagctcat

SEQ ID NO: 1904096 - DNA, 25 bp, Homo sapien
atacccttctttcagacagctcatg

SEQ ID NO: 1904097 - DNA, 25 bp, Homo sapien
tcttcaaaggtaacttccaaatgaa

SEQ ID NO: 1904098 - DNA, 25 bp, Homo sapien
tatgacagggcttataagctttttt

SEQ ID NO: 1904099 - DNA, 25 bp, Homo sapien
tatgtccctggaaaatagagctgtt

SEQ ID NO: 1904100 - DNA, 25 bp, Homo sapien
tctgcttgtatccactctttctgcc

SEQ ID NO: 1904101 - DNA, 25 bp, Homo sapien
tcttgtagattaagttattgtccac

SEQ ID NO: 1904102 - DNA, 25 bp, Homo sapien
tctgattgtgccatgaggtgaccct

SEQ ID NO: 1904103 - DNA, 25 bp, Homo sapien
gaaagatccaatgaatgtcacgagc

SEQ ID NO: 1904104 - DNA, 25 bp, Homo sapien
tatgccatgtaacagtcaatcaggg

SEQ ID NO: 1904105 - DNA, 25 bp, Homo sapien
aaattttagcacaatgggaccagcc

SEQ ID NO: 1904106 - DNA, 25 bp, Homo sapien
gtttaattcatattcctcactccca

SEQ ID NO: 1904107 - DNA, 25 bp, Homo sapien
actgttagtacattagtatatgcag

SEQ ID NO: 1904108 - DNA, 25 bp, Homo sapien
ttagtatatgcagtaacatcagtcc

SEQ ID NO: 1904109 - DNA, 25 bp, Homo sapien
ttggtttggcttggctaggttgtac

SEQ ID NO: 1904110 - DNA, 25 bp, Homo sapien
ttgtctcggtcagcaggaaagcttc

SEQ ID NO: 1904111 - DNA, 25 bp, Homo sapien
tacccattcctagtgagtcttgtct

SEQ ID NO: 1904112 - DNA, 25 bp, Homo sapien
aactttactctcatgagccttgcgg

SEQ ID NO: 1904113 - DNA, 25 bp, Homo sapien
ccttgcggtgttctatggctctgga

SEQ ID NO: 1904114 - DNA, 25 bp, Homo sapien
cttgcattaagtattggctgaagca

SEQ ID NO: 1904115 - DNA, 25 bp, Homo sapien
gaagaacaggtattcttgctacttg

SEQ ID NO: 1904116 - DNA, 25 bp, Homo sapien
cttgctacttgcattaagtattggc

SEQ ID NO: 1904117 - DNA, 25 bp, Homo sapien
ggaagaacaggtattcttgctactt

SEQ ID NO: 1904118 - DNA, 25 bp, Homo sapien
agttagatgtaatgacgctgcttgc

SEQ ID NO: 1904119 - DNA, 25 bp, Homo sapien
tagatgtaatgacgctgcttgctac

SEQ ID NO: 1904120 - DNA, 25 bp, Homo sapien
aattaagttagatgtaatgacgctg

SEQ ID NO: 1904121 - DNA, 25 bp, Homo sapien
gatgtaatgacgctgcttgctactt

SEQ ID NO: 1904122 - DNA, 25 bp, Homo sapien
gtgaaatttgattaactgaaatctc

SEQ ID NO: 1904123 - DNA, 25 bp, Homo sapien
gggactctccacagtggaatacagc

SEQ ID NO: 1904124 - DNA, 25 bp, Homo sapien
gctatgtgtcgaagcagaactgagc

SEQ ID NO: 1904125 - DNA, 25 bp, Homo sapien
ctcctgggcagctatgtgtcgaagc

SEQ ID NO: 1904126 - DNA, 25 bp, Homo sapien
tcattttcctcaattttaactctta

SEQ ID NO: 1904127 - DNA, 25 bp, Homo sapien
ctgatgacgctctttcattttcctc

SEQ ID NO: 1904128 - DNA, 25 bp, Homo sapien
cctcaattttaactcttaagttcat

SEQ ID NO: 1904129 - DNA, 25 bp, Homo sapien
cgctctttcattttcctcaatttta

SEQ ID NO: 1904130 - DNA, 25 bp, Homo sapien
tcactggtagctgacaacttctcct

SEQ ID NO: 1904131 - DNA, 25 bp, Homo sapien
tagagcgcctttgcagagaggacat

SEQ ID NO: 1904132 - DNA, 25 bp, Homo sapien
gtttgaatacagtgcaaccttcatc

SEQ ID NO: 1904133 - DNA, 25 bp, Homo sapien
tcaccaaaggcacttcaacatgcat

SEQ ID NO: 1904134 - DNA, 25 bp, Homo sapien
taaagctgcactgtacaggtgtacc

SEQ ID NO: 1904135 - DNA, 25 bp, Homo sapien
cattttgatcaatgacggacggcat

SEQ ID NO: 1904136 - DNA, 25 bp, Homo sapien
cacaagggcgtagtcattctcaggc

SEQ ID NO: 1904137 - DNA, 25 bp, Homo sapien
tgaatgattcgcgagtcaggcagct

SEQ ID NO: 1904138 - DNA, 25 bp, Homo sapien
tatatcaattttggcattcagggcc

SEQ ID NO: 1904139 - DNA, 25 bp, Homo sapien
ctatatcaattttggcattcagggc

SEQ ID NO: 1904140 - DNA, 25 bp, Homo sapien
tatcaattttggcattcagggccat

SEQ ID NO: 1904141 - DNA, 25 bp, Homo sapien
atatcaattttggcattcagggcca

SEQ ID NO: 1904142 - DNA, 25 bp, Homo sapien
tatattgtgccttggctttcatgcc

SEQ ID NO: 1904143 - DNA, 25 bp, Homo sapien
catgccaggaagcatattaacttta

SEQ ID NO: 1904144 - DNA, 25 bp, Homo sapien
tttcatgccaggaagcatattaact

SEQ ID NO: 1904145 - DNA, 25 bp, Homo sapien
acagtctcttaacatatattgtgcc

SEQ ID NO: 1904146 - DNA, 25 bp, Homo sapien
taataagatcatattctgaaccctc

SEQ ID NO: 1904147 - DNA, 25 bp, Homo sapien
agcaaccagcaagtgttgtgaggac

SEQ ID NO: 1904148 - DNA, 25 bp, Homo sapien
cagggaaggacatcttaataagatc

SEQ ID NO: 1904149 - DNA, 25 bp, Homo sapien
gcatacgggataagaagcagcaacc

SEQ ID NO: 1904150 - DNA, 25 bp, Homo sapien
tgcaggagtttgataagaggaaagt

SEQ ID NO: 1904151 - DNA, 25 bp, Homo sapien
tttgcaaatgggagacggtgcagga

SEQ ID NO: 1904152 - DNA, 25 bp, Homo sapien
tgcttgcaacaagagttcatcatgg

SEQ ID NO: 1904153 - DNA, 25 bp, Homo sapien
catcatgggatgttgttttgcaaat

SEQ ID NO: 1904154 - DNA, 25 bp, Homo sapien
tcatttgccgttgctctcagctcgg

SEQ ID NO: 1904155 - DNA, 25 bp, Homo sapien
catttgccgttgctctcagctcgga

SEQ ID NO: 1904156 - DNA, 25 bp, Homo sapien
tttgccgttgctctcagctcggaga

SEQ ID NO: 1904157 - DNA, 25 bp, Homo sapien
tgccgttgctctcagctcggagagc

SEQ ID NO: 1904158 - DNA, 25 bp, Homo sapien
gatgcctttctagtttagatattga

SEQ ID NO: 1904159 - DNA, 25 bp, Homo sapien
tgttctctcattcattggaacaaaa

SEQ ID NO: 1904160 - DNA, 25 bp, Homo sapien
ttcattggaacaaaacgatttagca

SEQ ID NO: 1904161 - DNA, 25 bp, Homo sapien
tgtttttgacaagcctgaaatttct

SEQ ID NO: 1904162 - DNA, 25 bp, Homo sapien
cgatttagcatgaatctttgggtca

SEQ ID NO: 1904163 - DNA, 25 bp, Homo sapien
tttttgtccacctgaattttctcca

SEQ ID NO: 1904164 - DNA, 25 bp, Homo sapien
ttttgtccacctgaattttctccat

SEQ ID NO: 1904165 - DNA, 25 bp, Homo sapien
tgctttttgtccacctgaattttct

SEQ ID NO: 1904166 - DNA, 25 bp, Homo sapien
ctgctttttgtccacctgaattttc

SEQ ID NO: 1904167 - DNA, 25 bp, Homo sapien
accaatagttgccaagcaatctgga

SEQ ID NO: 1904168 - DNA, 25 bp, Homo sapien
agcaatctggacagggtactctttc

SEQ ID NO: 1904169 - DNA, 25 bp, Homo sapien
gaatacccttgatactcttgctatc

SEQ ID NO: 1904170 - DNA, 25 bp, Homo sapien
ttcttgccaagaatacccttgatac

SEQ ID NO: 1904171 - DNA, 25 bp, Homo sapien
ggcaccatcccttctaacttgtcct

SEQ ID NO: 1904172 - DNA, 25 bp, Homo sapien
tgttctgtccacctcttgtacatcc

SEQ ID NO: 1904173 - DNA, 25 bp, Homo sapien
catcccttctaacttgtccttattt

SEQ ID NO: 1904174 - DNA, 25 bp, Homo sapien
gtccacctcttgtacatcccaggtt

SEQ ID NO: 1904175 - DNA, 25 bp, Homo sapien
agagctaaagtgatagcagtatttc

SEQ ID NO: 1904176 - DNA, 25 bp, Homo sapien
acattccacgttgctggcttcttcc

SEQ ID NO: 1904177 - DNA, 25 bp, Homo sapien
ttcctcacatgagggaaatatgaga

SEQ ID NO: 1904178 - DNA, 25 bp, Homo sapien
atgtgccacattccacgttgctggc

SEQ ID NO: 1904179 - DNA, 25 bp, Homo sapien
gcccctggatccaaaagttggagtc

SEQ ID NO: 1904180 - DNA, 25 bp, Homo sapien
tagggacaagttccaagcccctgga

SEQ ID NO: 1904181 - DNA, 25 bp, Homo sapien
caaaagttggagtcagagtgtgagc

SEQ ID NO: 1904182 - DNA, 25 bp, Homo sapien
tcacctagggacaagttccaagccc

SEQ ID NO: 1904183 - DNA, 25 bp, Homo sapien
gaagtggtcacttctaggaactgcc

SEQ ID NO: 1904184 - DNA, 25 bp, Homo sapien
tcagactgaaaaactctcagtatct

SEQ ID NO: 1904185 - DNA, 25 bp, Homo sapien
tgggaagtggtcacttctaggaact

SEQ ID NO: 1904186 - DNA, 25 bp, Homo sapien
cagactgaaaaactctcagtatctg

SEQ ID NO: 1904187 - DNA, 25 bp, Homo sapien
aaattaacttcattcctgctacatc

SEQ ID NO: 1904188 - DNA, 25 bp, Homo sapien
aattaacttcattcctgctacatct

SEQ ID NO: 1904189 - DNA, 25 bp, Homo sapien
ttttatgttctgccctgagatattc

SEQ ID NO: 1904190 - DNA, 25 bp, Homo sapien
ctttttatgttctgccctgagatat

SEQ ID NO: 1904191 - DNA, 25 bp, Homo sapien
tttatgttctgccctgagatattcc

SEQ ID NO: 1904192 - DNA, 25 bp, Homo sapien
tttttatgttctgccctgagatatt

SEQ ID NO: 1904193 - DNA, 25 bp, Homo sapien
tggagttatccattattaggtgaca

SEQ ID NO: 1904194 - DNA, 25 bp, Homo sapien
gggcatgcataccataaatctggag

SEQ ID NO: 1904195 - DNA, 25 bp, Homo sapien
aggatttacactcaggctctcatca

SEQ ID NO: 1904196 - DNA, 25 bp, Homo sapien
cgtaatagctgtctgtgttttgcac

SEQ ID NO: 1904197 - DNA, 25 bp, Homo sapien
gtcagcagcagtccaaaatcaggca

SEQ ID NO: 1904198 - DNA, 25 bp, Homo sapien
ttcctaatattggtcagcagcagtc

SEQ ID NO: 1904199 - DNA, 25 bp, Homo sapien
tcagcagcagtccaaaatcaggcag

SEQ ID NO: 1904200 - DNA, 25 bp, Homo sapien
gctctttcctaatattggtcagcag

SEQ ID NO: 1904201 - DNA, 25 bp, Homo sapien
ttcccaaatccactggaggtagaat

SEQ ID NO: 1904202 - DNA, 25 bp, Homo sapien
cccaaatccactggaggtagaatct

SEQ ID NO: 1904203 - DNA, 25 bp, Homo sapien
caaatccactggaggtagaatcttc

SEQ ID NO: 1904204 - DNA, 25 bp, Homo sapien
aaatccactggaggtagaatcttcc

SEQ ID NO: 1904205 - DNA, 25 bp, Homo sapien
taaggccttacataaactccagctg

SEQ ID NO: 1904206 - DNA, 25 bp, Homo sapien
caaggcagtatccaggccacgaaga

SEQ ID NO: 1904207 - DNA, 25 bp, Homo sapien
ctccagctggtgaaggacaatgctg

SEQ ID NO: 1904208 - DNA, 25 bp, Homo sapien
tagattattgtaactccctgttggc

SEQ ID NO: 1904209 - DNA, 25 bp, Homo sapien
ccagaaatctctagtgggaggtgta

SEQ ID NO: 1904210 - DNA, 25 bp, Homo sapien
cacactgatcagttcagaagcctgc

SEQ ID NO: 1904211 - DNA, 25 bp, Homo sapien
caggccttactcttttcacactgat

SEQ ID NO: 1904212 - DNA, 25 bp, Homo sapien
gcattaagcaaaattccaggcctta

SEQ ID NO: 1904213 - DNA, 25 bp, Homo sapien
cagtaaactgtcgatgtaaggaaaa

SEQ ID NO: 1904214 - DNA, 25 bp, Homo sapien
tgtcgatgtaaggaaaaagtgtttc

SEQ ID NO: 1904215 - DNA, 25 bp, Homo sapien
gtttcctcattggagacaatatata

SEQ ID NO: 1904216 - DNA, 25 bp, Homo sapien
tctctaacagtaaactgtcgatgta

SEQ ID NO: 1904217 - DNA, 25 bp, Homo sapien
tactcttgctccttggagaatctgg

SEQ ID NO: 1904218 - DNA, 25 bp, Homo sapien
ccctctactcttgctccttggagaa

SEQ ID NO: 1904219 - DNA, 25 bp, Homo sapien
gaatctggtctgtgtagtcctccat

SEQ ID NO: 1904220 - DNA, 25 bp, Homo sapien
gctccttggagaatctggtctgtgt

SEQ ID NO: 1904221 - DNA, 25 bp, Homo sapien
aaagaatgttcacagttgggcctcc

SEQ ID NO: 1904222 - DNA, 25 bp, Homo sapien
aaaagaatgttcacagttgggcctc

SEQ ID NO: 1904223 - DNA, 25 bp, Homo sapien
ttgttaatggatacactttgtaaat

SEQ ID NO: 1904224 - DNA, 25 bp, Homo sapien
gggctagatccactatataagtcag

SEQ ID NO: 1904225 - DNA, 25 bp, Homo sapien
tcctgggacaggttctgattcaact

SEQ ID NO: 1904226 - DNA, 25 bp, Homo sapien
gcacaagagtaagaagtgaccagca

SEQ ID NO: 1904227 - DNA, 25 bp, Homo sapien
gctaaatttattcacgtcactacag

SEQ ID NO: 1904228 - DNA, 25 bp, Homo sapien
cccaactgcaggggatccgcccatc

SEQ ID NO: 1904229 - DNA, 25 bp, Homo sapien
cgaactcccaactgcaggggatccg

SEQ ID NO: 1904230 - DNA, 25 bp, Homo sapien
ccaactgcaggggatccgcccatct

SEQ ID NO: 1904231 - DNA, 25 bp, Homo sapien
tcccaactgcaggggatccgcccat

SEQ ID NO: 1904232 - DNA, 25 bp, Homo sapien
caaaactaatctacacctagcatat

SEQ ID NO: 1904233 - DNA, 25 bp, Homo sapien
caaaccacagattcagggagcccag

SEQ ID NO: 1904234 - DNA, 25 bp, Homo sapien
cctagcatatcaccttaaaactcca

SEQ ID NO: 1904235 - DNA, 25 bp, Homo sapien
gaacagtaaactgaataaatcccaa

SEQ ID NO: 1904236 - DNA, 25 bp, Homo sapien
gttccatgggtcacaattatcaact

SEQ ID NO: 1904237 - DNA, 25 bp, Homo sapien
tgcttgaatcaagttccatgggtca

SEQ ID NO: 1904238 - DNA, 25 bp, Homo sapien
caattatcaactgctgacaagatac

SEQ ID NO: 1904239 - DNA, 25 bp, Homo sapien
tatgcatatgcttgaatcaagttcc

SEQ ID NO: 1904240 - DNA, 25 bp, Homo sapien
tacaggtgtaaccatctgctaaaat

SEQ ID NO: 1904241 - DNA, 25 bp, Homo sapien
tatttctgataatatcgccttcctc

SEQ ID NO: 1904242 - DNA, 25 bp, Homo sapien
tgcattgccaagaaatccctctaca

SEQ ID NO: 1904243 - DNA, 25 bp, Homo sapien
tttctgataatatcgccttcctcac

SEQ ID NO: 1904244 - DNA, 25 bp, Homo sapien
tggatccccgttgccaatttccagc

SEQ ID NO: 1904245 - DNA, 25 bp, Homo sapien
tcctggatccccgttgccaatttcc

SEQ ID NO: 1904246 - DNA, 25 bp, Homo sapien
acaccccatttatcagatccagcat

SEQ ID NO: 1904247 - DNA, 25 bp, Homo sapien
accccatttatcagatccagcattc

SEQ ID NO: 1904248 - DNA, 25 bp, Homo sapien
gtgctggctcactccgggatcctca

SEQ ID NO: 1904249 - DNA, 25 bp, Homo sapien
tgctggctcactccgggatcctcag

SEQ ID NO: 1904250 - DNA, 25 bp, Homo sapien
ggtgctggctcactccgggatcctc

SEQ ID NO: 1904251 - DNA, 25 bp, Homo sapien
acacagccatgatggtgtaaaaggc

SEQ ID NO: 1904252 - DNA, 25 bp, Homo sapien
agcaaggtccaagcagttgccattc

SEQ ID NO: 1904253 - DNA, 25 bp, Homo sapien
agccagcaggttagggaacacagcc

SEQ ID NO: 1904254 - DNA, 25 bp, Homo sapien
gcaaggtccaagcagttgccattct

SEQ ID NO: 1904255 - DNA, 25 bp, Homo sapien
tactgtgtaagttgactggtcatgc

SEQ ID NO: 1904256 - DNA, 25 bp, Homo sapien
caagctgcttaaagagtttgtctgc

SEQ ID NO: 1904257 - DNA, 25 bp, Homo sapien
gcctcggtacaggtgatgcccttag

SEQ ID NO: 1904258 - DNA, 25 bp, Homo sapien
tagggagatctgttacctccggccc

SEQ ID NO: 1904259 - DNA, 25 bp, Homo sapien
ctaagagggagtagcacccatcacc

SEQ ID NO: 1904260 - DNA, 25 bp, Homo sapien
gtgctggacccccaggccaggggaa

SEQ ID NO: 1904261 - DNA, 25 bp, Homo sapien
tgtgctggacccccaggccagggga

SEQ ID NO: 1904262 - DNA, 25 bp, Homo sapien
ctgtgctggacccccaggccagggg

SEQ ID NO: 1904263 - DNA, 25 bp, Homo sapien
tgctggacccccaggccaggggaac

SEQ ID NO: 1904264 - DNA, 25 bp, Homo sapien
agtgactccactggacccttgatgg

SEQ ID NO: 1904265 - DNA, 25 bp, Homo sapien
cccctcatggtccatgttgtagtat

SEQ ID NO: 1904266 - DNA, 25 bp, Homo sapien
tagcgaaattcagctcatgaccacc

SEQ ID NO: 1904267 - DNA, 25 bp, Homo sapien
tcaggctccattagcgaaattcagc

SEQ ID NO: 1904268 - DNA, 25 bp, Homo sapien
gacactcttgactgctactgcagca

SEQ ID NO: 1904269 - DNA, 25 bp, Homo sapien
agaaggtgacactcttgactgctac

SEQ ID NO: 1904270 - DNA, 25 bp, Homo sapien
aggtgacactcttgactgctactgc

SEQ ID NO: 1904271 - DNA, 25 bp, Homo sapien
gtgacactcttgactgctactgcag

SEQ ID NO: 1904272 - DNA, 25 bp, Homo sapien
caacagtagggcttgtaccgttctg

SEQ ID NO: 1904273 - DNA, 25 bp, Homo sapien
atgctgtagtacactggtatgcccc

SEQ ID NO: 1904274 - DNA, 25 bp, Homo sapien
aatcatctggtactgctgagaccca

SEQ ID NO: 1904275 - DNA, 25 bp, Homo sapien
gctagaaagggtgctggaccacatt

SEQ ID NO: 1904276 - DNA, 25 bp, Homo sapien
tgctggaccccagtcattccttggt

SEQ ID NO: 1904277 - DNA, 25 bp, Homo sapien
gtcattccttggtaagccacctgct

SEQ ID NO: 1904278 - DNA, 25 bp, Homo sapien
gaaccaccaggccttgcatctgggc

SEQ ID NO: 1904279 - DNA, 25 bp, Homo sapien
gaaggcagtgaagtgtactgaacca

SEQ ID NO: 1904280 - DNA, 25 bp, Homo sapien
gctgggatggccgagccagctattg

SEQ ID NO: 1904281 - DNA, 25 bp, Homo sapien
ctgctgggatggccgagccagctat

SEQ ID NO: 1904282 - DNA, 25 bp, Homo sapien
tgggatggccgagccagctattgac

SEQ ID NO: 1904283 - DNA, 25 bp, Homo sapien
catgggctataaactgggctgctgg

SEQ ID NO: 1904284 - DNA, 25 bp, Homo sapien
gaaaggtcaatattgctggttggaa

SEQ ID NO: 1904285 - DNA, 25 bp, Homo sapien
gaagccatgacgaagttagtccact

SEQ ID NO: 1904286 - DNA, 25 bp, Homo sapien
gaactgttggttgagaaggctgcat

SEQ ID NO: 1904287 - DNA, 25 bp, Homo sapien
gggactgacccatggaagccatgac

SEQ ID NO: 1904288 - DNA, 25 bp, Homo sapien
ggctcatttgtctaaaggacttgct

SEQ ID NO: 1904289 - DNA, 25 bp, Homo sapien
gtctaaaggacttgctgaggtcatc

SEQ ID NO: 1904290 - DNA, 25 bp, Homo sapien
ggctggaacagagctgccgatcagt

SEQ ID NO: 1904291 - DNA, 25 bp, Homo sapien
ccgatcagtcagttgctttagtaga

SEQ ID NO: 1904292 - DNA, 25 bp, Homo sapien
cctgcattggcacatttactgctgc

SEQ ID NO: 1904293 - DNA, 25 bp, Homo sapien
tgcattggcacatttactgctgcca

SEQ ID NO: 1904294 - DNA, 25 bp, Homo sapien
ccttcctgcattggcacatttactg

SEQ ID NO: 1904295 - DNA, 25 bp, Homo sapien
atttctggggcatatagtgccatac

SEQ ID NO: 1904296 - DNA, 25 bp, Homo sapien
tggctttggttacagagggtcgcat

SEQ ID NO: 1904297 - DNA, 25 bp, Homo sapien
gacagagccaccagcgttcgtgctg

SEQ ID NO: 1904298 - DNA, 25 bp, Homo sapien
caccagcgttcgtgctgctccaagg

SEQ ID NO: 1904299 - DNA, 25 bp, Homo sapien
gaagacagagattctgctgaacctg

SEQ ID NO: 1904300 - DNA, 25 bp, Homo sapien
aaatattctctcagacccttggata

SEQ ID NO: 1904301 - DNA, 25 bp, Homo sapien
ggccagtctcttggggggcaaatat

SEQ ID NO: 1904302 - DNA, 25 bp, Homo sapien
ctttctggccagtctcttggggggc

SEQ ID NO: 1904303 - DNA, 25 bp, Homo sapien
tctgcaattcctcctgatgtcattt

SEQ ID NO: 1904304 - DNA, 25 bp, Homo sapien
tttgctttaaggtcttctataggac

SEQ ID NO: 1904305 - DNA, 25 bp, Homo sapien
ttcttcatcagcagtatgttgtact

SEQ ID NO: 1904306 - DNA, 25 bp, Homo sapien
cttcttcatcagcagtatgttgtac

SEQ ID NO: 1904307 - DNA, 25 bp, Homo sapien
tacactgcaattctaagaccatgga

SEQ ID NO: 1904308 - DNA, 25 bp, Homo sapien
catggatagtactatttaaaatctc

SEQ ID NO: 1904309 - DNA, 25 bp, Homo sapien
tccacagcctaaaagtgctgtctac

SEQ ID NO: 1904310 - DNA, 25 bp, Homo sapien
tactttatagtttcacatccgcctc

SEQ ID NO: 1904311 - DNA, 25 bp, Homo sapien
attcttagagataactggtgttcat

SEQ ID NO: 1904312 - DNA, 25 bp, Homo sapien
gttaaagtgatagtctgtcagtctt

SEQ ID NO: 1904313 - DNA, 25 bp, Homo sapien
ctgtcagtctttagttcaccaccaa

SEQ ID NO: 1904314 - DNA, 25 bp, Homo sapien
tgctcaggggatcatgtacatgtcc

SEQ ID NO: 1904315 - DNA, 25 bp, Homo sapien
ggtgctcaggggatcatgtacatgt

SEQ ID NO: 1904316 - DNA, 25 bp, Homo sapien
gctcctgggtaatagaatcattctg

SEQ ID NO: 1904317 - DNA, 25 bp, Homo sapien
agacttgatgttgctcctgggtaat

SEQ ID NO: 1904318 - DNA, 25 bp, Homo sapien
tgctcctgggtaatagaatcattct

SEQ ID NO: 1904319 - DNA, 25 bp, Homo sapien
gattcgggctcactccaaatttcgc

SEQ ID NO: 1904320 - DNA, 25 bp, Homo sapien
tctgccactaggagaggaggtaatt

SEQ ID NO: 1904321 - DNA, 25 bp, Homo sapien
ttagggctggctcgagcaattgttc

SEQ ID NO: 1904322 - DNA, 25 bp, Homo sapien
tgggagcctcgtttaccaggacaga

SEQ ID NO: 1904323 - DNA, 25 bp, Homo sapien
taaatgctatttaccctatactgtg

SEQ ID NO: 1904324 - DNA, 25 bp, Homo sapien
attgtgctgcttatacacatgcatg

SEQ ID NO: 1904325 - DNA, 25 bp, Homo sapien
tctttaaggaacctcccatagacac

SEQ ID NO: 1904326 - DNA, 25 bp, Homo sapien
tactgtgcatcctcctatagacttt

SEQ ID NO: 1904327 - DNA, 25 bp, Homo sapien
cttggttcctgggttcacacttgta

SEQ ID NO: 1904328 - DNA, 25 bp, Homo sapien
tgtaggttttttcatgttcacctcc

SEQ ID NO: 1904329 - DNA, 25 bp, Homo sapien
cacttgtaggttttttcatgttcac

SEQ ID NO: 1904330 - DNA, 25 bp, Homo sapien
tggttcctgggttcacacttgtagg

SEQ ID NO: 1904331 - DNA, 25 bp, Homo sapien
gagtttccaaatttgcacctagaag

SEQ ID NO: 1904332 - DNA, 25 bp, Homo sapien
gggaaactctagcagggagcagaaa

SEQ ID NO: 1904333 - DNA, 25 bp, Homo sapien
aacagaaagctggtgaccacggaaa

SEQ ID NO: 1904334 - DNA, 25 bp, Homo sapien
gatatatttaagctgagccaaaggg

SEQ ID NO: 1904335 - DNA, 25 bp, Homo sapien
aagagactacatcaatttatgtaac

SEQ ID NO: 1904336 - DNA, 25 bp, Homo sapien
cagatgtgaagtgatatatcataaa

SEQ ID NO: 1904337 - DNA, 25 bp, Homo sapien
tgaagtgatatatcataaagatttt

SEQ ID NO: 1904338 - DNA, 25 bp, Homo sapien
tttatgtaactactaaccatgtaca

SEQ ID NO: 1904339 - DNA, 25 bp, Homo sapien
tatgggaccatgcataacaagtaca

SEQ ID NO: 1904340 - DNA, 25 bp, Homo sapien
tttctccttggattgcacacctgct

SEQ ID NO: 1904341 - DNA, 25 bp, Homo sapien
ccattaagtcctgctgtctttacaa

SEQ ID NO: 1904342 - DNA, 25 bp, Homo sapien
gaggttgtaatgtctttccccaatg

SEQ ID NO: 1904343 - DNA, 25 bp, Homo sapien
ttcttaaagagatggcatattgcct

SEQ ID NO: 1904344 - DNA, 25 bp, Homo sapien
catcttgctccctcgatcagttctt

SEQ ID NO: 1904345 - DNA, 25 bp, Homo sapien
caaatcttctttctcgttggctgga

SEQ ID NO: 1904346 - DNA, 25 bp, Homo sapien
tgctccctcgatcagttcttaaaga

SEQ ID NO: 1904347 - DNA, 25 bp, Homo sapien
tgtagacgcctccacaataaagtta

SEQ ID NO: 1904348 - DNA, 25 bp, Homo sapien
tgaggtagtgtttgtagacgcctcc

SEQ ID NO: 1904349 - DNA, 25 bp, Homo sapien
ttcagaacaaagtcactaagcacag

SEQ ID NO: 1904350 - DNA, 25 bp, Homo sapien
caccttcccatgctatattcttcag

SEQ ID NO: 1904351 - DNA, 25 bp, Homo sapien
agattttctacatgtgttcctgctg

SEQ ID NO: 1904352 - DNA, 25 bp, Homo sapien
tcctgtgtcactcagtggacactta

SEQ ID NO: 1904353 - DNA, 25 bp, Homo sapien
actctgtcaatataagtgtatcctg

SEQ ID NO: 1904354 - DNA, 25 bp, Homo sapien
ttcggcattcatggattaccagctt

SEQ ID NO: 1904355 - DNA, 25 bp, Homo sapien
ggtgttcagatagctttcattggta

SEQ ID NO: 1904356 - DNA, 25 bp, Homo sapien
cattggtagtgctgatgaaaactaa

SEQ ID NO: 1904357 - DNA, 25 bp, Homo sapien
taaagatggaacctgggtgttcaga

SEQ ID NO: 1904358 - DNA, 25 bp, Homo sapien
aaagcttccccgcattctaagaatg

SEQ ID NO: 1904359 - DNA, 25 bp, Homo sapien
cagcttcctaggctttcatctgtag

SEQ ID NO: 1904360 - DNA, 25 bp, Homo sapien
aagtagcagatcttaacacttccaa

SEQ ID NO: 1904361 - DNA, 25 bp, Homo sapien
tcctttgacgaaagcttccagggtc

SEQ ID NO: 1904362 - DNA, 25 bp, Homo sapien
agagtcaaagtcacatgcttccttt

SEQ ID NO: 1904363 - DNA, 25 bp, Homo sapien
gagggtttggcagcttcgatcatcc

SEQ ID NO: 1904364 - DNA, 25 bp, Homo sapien
cctgagaccttctgcgggggcagta

SEQ ID NO: 1904365 - DNA, 25 bp, Homo sapien
gtctgagggtttggcagcttcgatc

SEQ ID NO: 1904366 - DNA, 25 bp, Homo sapien
gggaacacccctgagaccttctgcg

SEQ ID NO: 1904367 - DNA, 25 bp, Homo sapien
ctacactagggacccctgatgaaca

SEQ ID NO: 1904368 - DNA, 25 bp, Homo sapien
ccttaagtgcctctagctgtaactg

SEQ ID NO: 1904369 - DNA, 25 bp, Homo sapien
ctgatgaacaagtgtccgttttggg

SEQ ID NO: 1904370 - DNA, 25 bp, Homo sapien
gacaaagccttaagtgcctctagct

SEQ ID NO: 1904371 - DNA, 25 bp, Homo sapien
gcccactcgcctattctgctgtttt

SEQ ID NO: 1904372 - DNA, 25 bp, Homo sapien
ctgtttttgtcgcttgctttaatga

SEQ ID NO: 1904373 - DNA, 25 bp, Homo sapien
ggcccactcgcctattctgctgttt

SEQ ID NO: 1904374 - DNA, 25 bp, Homo sapien
ttgtcgcttgctttaatgattagga

SEQ ID NO: 1904375 - DNA, 25 bp, Homo sapien
ctgctcatgctgtttatttccaaca

SEQ ID NO: 1904376 - DNA, 25 bp, Homo sapien
gaagttgacaaggtgttcatggaca

SEQ ID NO: 1904377 - DNA, 25 bp, Homo sapien
acagaagtgaatctttgaagttgac

SEQ ID NO: 1904378 - DNA, 25 bp, Homo sapien
gctcatgctgtttatttccaacaga

SEQ ID NO: 1904379 - DNA, 25 bp, Homo sapien
atttgttctatactcttgctgttcc

SEQ ID NO: 1904380 - DNA, 25 bp, Homo sapien
aaaaagagagcttgtcagcttcagc

SEQ ID NO: 1904381 - DNA, 25 bp, Homo sapien
agcttgtcagcttcagctccgccat

SEQ ID NO: 1904382 - DNA, 25 bp, Homo sapien
aaagagagcttgtcagcttcagctc

SEQ ID NO: 1904383 - DNA, 25 bp, Homo sapien
gagagcttgtcagcttcagctccgc

SEQ ID NO: 1904384 - DNA, 25 bp, Homo sapien
ccagaaatagcaacactgagtggat

SEQ ID NO: 1904385 - DNA, 25 bp, Homo sapien
cagagtgaggtgatgtaaagacagt

SEQ ID NO: 1904386 - DNA, 25 bp, Homo sapien
gggtattggagatgaatccagaaat

SEQ ID NO: 1904387 - DNA, 25 bp, Homo sapien
cactgagtggatctttcagagtgag

SEQ ID NO: 1904388 - DNA, 25 bp, Homo sapien
tgtcaaagaaggccattgaagctgt

SEQ ID NO: 1904389 - DNA, 25 bp, Homo sapien
caaagaaggccattgaagctgttct

SEQ ID NO: 1904390 - DNA, 25 bp, Homo sapien
agaaggccattgaagctgttcttat

SEQ ID NO: 1904391 - DNA, 25 bp, Homo sapien
gaaggccattgaagctgttcttata

SEQ ID NO: 1904392 - DNA, 25 bp, Homo sapien
agtattgcccttataccaaagtcag

SEQ ID NO: 1904393 - DNA, 25 bp, Homo sapien
acattaaaaggatcagccatcacag

SEQ ID NO: 1904394 - DNA, 25 bp, Homo sapien
catctcattgggtgcagaaaaagca

SEQ ID NO: 1904395 - DNA, 25 bp, Homo sapien
aaaattgggtatagaaggaatgcac

SEQ ID NO: 1904396 - DNA, 25 bp, Homo sapien
tgccacatcattataatggaaggag

SEQ ID NO: 1904397 - DNA, 25 bp, Homo sapien
cattgaggtgatcaatatccacccc

SEQ ID NO: 1904398 - DNA, 25 bp, Homo sapien
tactcagagtggacgtgcacatccc

SEQ ID NO: 1904399 - DNA, 25 bp, Homo sapien
atggaaggagtgtttcaaagttccg

SEQ ID NO: 1904400 - DNA, 25 bp, Homo sapien
gcaatccctgcaaggctgcttaagg

SEQ ID NO: 1904401 - DNA, 25 bp, Homo sapien
tcaaggtgatttctatggtaacccc

SEQ ID NO: 1904402 - DNA, 25 bp, Homo sapien
tcatctactcttaagcccacttggg

SEQ ID NO: 1904403 - DNA, 25 bp, Homo sapien
tagtcggaaatcacagcaatccctg

SEQ ID NO: 1904404 - DNA, 25 bp, Homo sapien
ccttggaacgatagaacctatttgt

SEQ ID NO: 1904405 - DNA, 25 bp, Homo sapien
tgtaacgtccttgactaagaatggc

SEQ ID NO: 1904406 - DNA, 25 bp, Homo sapien
ccagacccgcgcagggcattgctgg

SEQ ID NO: 1904407 - DNA, 25 bp, Homo sapien
ttcatctccgtactcagcaaaggca

SEQ ID NO: 1904408 - DNA, 25 bp, Homo sapien
caatatgaacgattattcccactga

SEQ ID NO: 1904409 - DNA, 25 bp, Homo sapien
tccaatatgaacgattattcccact

SEQ ID NO: 1904410 - DNA, 25 bp, Homo sapien
tatgaacgattattcccactgacat

SEQ ID NO: 1904411 - DNA, 25 bp, Homo sapien
tttccaatatgaacgattattccca

SEQ ID NO: 1904412 - DNA, 25 bp, Homo sapien
ggtttctaaaggtcagcagtgctac

SEQ ID NO: 1904413 - DNA, 25 bp, Homo sapien
gaagactgtacttgccaggctaggt

SEQ ID NO: 1904414 - DNA, 25 bp, Homo sapien
catgctacacgaggtcaagtaaggt

SEQ ID NO: 1904415 - DNA, 25 bp, Homo sapien
tctagaggtagagaaagccgaatgc

SEQ ID NO: 1904416 - DNA, 25 bp, Homo sapien
tattcagggcaatgtaacagacagt

SEQ ID NO: 1904417 - DNA, 25 bp, Homo sapien
tcaacgtttgaggatattcagggca

SEQ ID NO: 1904418 - DNA, 25 bp, Homo sapien
caatgtaacagacagttgcaaggat

SEQ ID NO: 1904419 - DNA, 25 bp, Homo sapien
gggatgtgaaaaagcattggcaagg

SEQ ID NO: 1904420 - DNA, 25 bp, Homo sapien
ggtaccacttctgacagagactaag

SEQ ID NO: 1904421 - DNA, 25 bp, Homo sapien
taattcaactctactgcaaggacag

SEQ ID NO: 1904422 - DNA, 25 bp, Homo sapien
gagactaagttttgcaggcaccact

SEQ ID NO: 1904423 - DNA, 25 bp, Homo sapien
tgtgtgcaaaactccaatgctgttg

SEQ ID NO: 1904424 - DNA, 25 bp, Homo sapien
taactcaaaacccattctgacattg

SEQ ID NO: 1904425 - DNA, 25 bp, Homo sapien
aatgtttagatgtaccttgtcaatc

SEQ ID NO: 1904426 - DNA, 25 bp, Homo sapien
aaacccattctgacattgcagccag

SEQ ID NO: 1904427 - DNA, 25 bp, Homo sapien
tgggggtgatatgctgtccttctcg

SEQ ID NO: 1904428 - DNA, 25 bp, Homo sapien
aaccaaatgacaaggtatctgcttc

SEQ ID NO: 1904429 - DNA, 25 bp, Homo sapien
taaaccaaatgacaaggtatctgct

SEQ ID NO: 1904430 - DNA, 25 bp, Homo sapien
ctataaaccaaatgacaaggtatct

SEQ ID NO: 1904431 - DNA, 25 bp, Homo sapien
tataaaccaaatgacaaggtatctg

SEQ ID NO: 1904432 - DNA, 25 bp, Homo sapien
ttgaactgagccttcttatgcagta

SEQ ID NO: 1904433 - DNA, 25 bp, Homo sapien
tctttaggtgagcttcctgagtcat

SEQ ID NO: 1904434 - DNA, 25 bp, Homo sapien
ttagttgttctttaggtgagcttcc

SEQ ID NO: 1904435 - DNA, 25 bp, Homo sapien
cttttagttgttctttaggtgagct

SEQ ID NO: 1904436 - DNA, 25 bp, Homo sapien
tgttctttaggtgagcttcctgagt

SEQ ID NO: 1904437 - DNA, 25 bp, Homo sapien
tggtccttatccttgcacactaatg

SEQ ID NO: 1904438 - DNA, 25 bp, Homo sapien
gtccttatccttgcacactaatgaa

SEQ ID NO: 1904439 - DNA, 25 bp, Homo sapien
ccttatccttgcacactaatgaaaa

SEQ ID NO: 1904440 - DNA, 25 bp, Homo sapien
ggtccttatccttgcacactaatga

SEQ ID NO: 1904441 - DNA, 25 bp, Homo sapien
gagcttgttagaaatccacatggtg

SEQ ID NO: 1904442 - DNA, 25 bp, Homo sapien
tactgagtgcaagctttccattaaa

SEQ ID NO: 1904443 - DNA, 25 bp, Homo sapien
tatgtaaacgtagccagacttccca

SEQ ID NO: 1904444 - DNA, 25 bp, Homo sapien
cagtgcctggcgtagactaaatcat

SEQ ID NO: 1904445 - DNA, 25 bp, Homo sapien
tgccttatggctgaactgtgctgaa

SEQ ID NO: 1904446 - DNA, 25 bp, Homo sapien
ctttgtgggctcatattcagaacgc

SEQ ID NO: 1904447 - DNA, 25 bp, Homo sapien
ctgtgctgaaaactctctaagcagg

SEQ ID NO: 1904448 - DNA, 25 bp, Homo sapien
gccatttggcctgcaaagttgctgg

SEQ ID NO: 1904449 - DNA, 25 bp, Homo sapien
tgagccatcacagtgcacagttagc

SEQ ID NO: 1904450 - DNA, 25 bp, Homo sapien
accgacctagctgaaagccgtcggg

SEQ ID NO: 1904451 - DNA, 25 bp, Homo sapien
cactgacagctggtcaccgacctag

SEQ ID NO: 1904452 - DNA, 25 bp, Homo sapien
ggtgacctcatcactaactgagcca

SEQ ID NO: 1904453 - DNA, 25 bp, Homo sapien
gcaatgggcctcaaaggctggacca

SEQ ID NO: 1904454 - DNA, 25 bp, Homo sapien
ctgacaggacagcaatgggcctcaa

SEQ ID NO: 1904455 - DNA, 25 bp, Homo sapien
acagcaatgggcctcaaaggctgga

SEQ ID NO: 1904456 - DNA, 25 bp, Homo sapien
gggcctcaaaggctggaccagagcc

SEQ ID NO: 1904457 - DNA, 25 bp, Homo sapien
tgcttcccattgtgaaacctgcaac

SEQ ID NO: 1904458 - DNA, 25 bp, Homo sapien
caccatgatgacaaagtaatgctgc

SEQ ID NO: 1904459 - DNA, 25 bp, Homo sapien
gatgacaaagtaatgctgcttccca

SEQ ID NO: 1904460 - DNA, 25 bp, Homo sapien
tgagacaccatgatgacaaagtaat

SEQ ID NO: 1904461 - DNA, 25 bp, Homo sapien
tttgagaggtagcaccttcacttct

SEQ ID NO: 1904462 - DNA, 25 bp, Homo sapien
caagcctgctccatagaggtggtat

SEQ ID NO: 1904463 - DNA, 25 bp, Homo sapien
gaattctgggaatttaccaagcctg

SEQ ID NO: 1904464 - DNA, 25 bp, Homo sapien
tcttctggataccacagccgtagag

SEQ ID NO: 1904465 - DNA, 25 bp, Homo sapien
gcttcttgcaaaatagaatctctaa

SEQ ID NO: 1904466 - DNA, 25 bp, Homo sapien
tcttgcaaaatagaatctctaaaat

SEQ ID NO: 1904467 - DNA, 25 bp, Homo sapien
gtgttattacttttgcagccactac

SEQ ID NO: 1904468 - DNA, 25 bp, Homo sapien
ggtgttattacttttgcagccacta

SEQ ID NO: 1904469 - DNA, 25 bp, Homo sapien
tcgtgaagccagcatattatgtgag

SEQ ID NO: 1904470 - DNA, 25 bp, Homo sapien
cccaaacattttctactgaacaaag

SEQ ID NO: 1904471 - DNA, 25 bp, Homo sapien
gaaaagcacggtcattacagctcag

SEQ ID NO: 1904472 - DNA, 25 bp, Homo sapien
tcccagtctttattatcgtgaagcc

SEQ ID NO: 1904473 - DNA, 25 bp, Homo sapien
tggctccctgctctaaatctatcat

SEQ ID NO: 1904474 - DNA, 25 bp, Homo sapien
gcacatgctctttgtcttgcctgcc

SEQ ID NO: 1904475 - DNA, 25 bp, Homo sapien
gccacaatgtaacacatgactttgc

SEQ ID NO: 1904476 - DNA, 25 bp, Homo sapien
aattgggtgcccctaataggcatac

SEQ ID NO: 1904477 - DNA, 25 bp, Homo sapien
catggaaccataagtcccttgagcc

SEQ ID NO: 1904478 - DNA, 25 bp, Homo sapien
taacaccatcatttggcatactgac

SEQ ID NO: 1904479 - DNA, 25 bp, Homo sapien
aaatttgctcgacttttactatgaa

SEQ ID NO: 1904480 - DNA, 25 bp, Homo sapien
tattcaatttggataacaacccagt

SEQ ID NO: 1904481 - DNA, 25 bp, Homo sapien
ccagttgctatgtgaactaacttga

SEQ ID NO: 1904482 - DNA, 25 bp, Homo sapien
ctggaccatttggtattctaggttt

SEQ ID NO: 1904483 - DNA, 25 bp, Homo sapien
ccaaactgaatagatggagggcagg

SEQ ID NO: 1904484 - DNA, 25 bp, Homo sapien
gaaacctgaacaataacaactccac

SEQ ID NO: 1904485 - DNA, 25 bp, Homo sapien
tagaaatggaattctcccatctacc

SEQ ID NO: 1904486 - DNA, 25 bp, Homo sapien
tctgctagtcttgcaacaggtttcc

SEQ ID NO: 1904487 - DNA, 25 bp, Homo sapien
cttgaactctagtctaaattgtggc

SEQ ID NO: 1904488 - DNA, 25 bp, Homo sapien
tgggctagagacaaaaccttgctcc

SEQ ID NO: 1904489 - DNA, 25 bp, Homo sapien
tgctcctatgccacagttgacacag

SEQ ID NO: 1904490 - DNA, 25 bp, Homo sapien
gggcactcgatgtcccttgactgaa

SEQ ID NO: 1904491 - DNA, 25 bp, Homo sapien
tctttaacacttgcagtgcctggtt

SEQ ID NO: 1904492 - DNA, 25 bp, Homo sapien
tgcagtgcctggtttgatgccgtac

SEQ ID NO: 1904493 - DNA, 25 bp, Homo sapien
gccgtacttaacaccgggcactcga

SEQ ID NO: 1904494 - DNA, 25 bp, Homo sapien
caaaggcttctggttgctttgggat

SEQ ID NO: 1904495 - DNA, 25 bp, Homo sapien
gatgccgatggttgagtctcctccc

SEQ ID NO: 1904496 - DNA, 25 bp, Homo sapien
taggaaaccaccagccccattatag

SEQ ID NO: 1904497 - DNA, 25 bp, Homo sapien
accagccccattatagatgccgatg

SEQ ID NO: 1904498 - DNA, 25 bp, Homo sapien
aaggctagcctcatatacagtcaga

SEQ ID NO: 1904499 - DNA, 25 bp, Homo sapien
cactctcatgggcaccgatttgcag

SEQ ID NO: 1904500 - DNA, 25 bp, Homo sapien
taacagtaaagcctcagccactctc

SEQ ID NO: 1904501 - DNA, 25 bp, Homo sapien
tgcttggctttgatccaggtcaaaa

SEQ ID NO: 1904502 - DNA, 25 bp, Homo sapien
tcaagcaattcctagcctcccaagt

SEQ ID NO: 1904503 - DNA, 25 bp, Homo sapien
cagtggtgcaatctctgctcaatgc

SEQ ID NO: 1904504 - DNA, 25 bp, Homo sapien
aacctctgcttcctgggttcaagca

SEQ ID NO: 1904505 - DNA, 25 bp, Homo sapien
tgttcttgttgcccaggcaggagtg

SEQ ID NO: 1904506 - DNA, 25 bp, Homo sapien
ggctgccattcacacgaggtatgta

SEQ ID NO: 1904507 - DNA, 25 bp, Homo sapien
gtataggctactgctttcccaagtg

SEQ ID NO: 1904508 - DNA, 25 bp, Homo sapien
tatcagggtctatgctttcagctct

SEQ ID NO: 1904509 - DNA, 25 bp, Homo sapien
gcaaaagatgccttctaaatccagg

SEQ ID NO: 1904510 - DNA, 25 bp, Homo sapien
gttccacctaatgcaaattgctgct

SEQ ID NO: 1904511 - DNA, 25 bp, Homo sapien
tccactgacatattcaacggtattg

SEQ ID NO: 1904512 - DNA, 25 bp, Homo sapien
caacggtattgttgagtgctctgat

SEQ ID NO: 1904513 - DNA, 25 bp, Homo sapien
tcaaaattgatgagttccacctaat

SEQ ID NO: 1904514 - DNA, 25 bp, Homo sapien
tgctcttcgtatgaactttgggaga

SEQ ID NO: 1904515 - DNA, 25 bp, Homo sapien
gtgagtgagaattcagccaggagaa

SEQ ID NO: 1904516 - DNA, 25 bp, Homo sapien
tccaaagtgctcttcgtatgaactt

SEQ ID NO: 1904517 - DNA, 25 bp, Homo sapien
ttgaatctacttctgtgagtgagaa

SEQ ID NO: 1904518 - DNA, 25 bp, Homo sapien
aagagaggaccaaaaaagccaagcg

SEQ ID NO: 1904519 - DNA, 25 bp, Homo sapien
agagaggaccaaaaaagccaagcgt

SEQ ID NO: 1904520 - DNA, 25 bp, Homo sapien
agaggaccaaaaaagccaagcgttg

SEQ ID NO: 1904521 - DNA, 25 bp, Homo sapien
attgattttccattttcagaatcaa

SEQ ID NO: 1904522 - DNA, 25 bp, Homo sapien
tattgattttccattttcagaatca

SEQ ID NO: 1904523 - DNA, 25 bp, Homo sapien
ttattgattttccattttcagaatc

SEQ ID NO: 1904524 - DNA, 25 bp, Homo sapien
ttgattttccattttcagaatcaac

SEQ ID NO: 1904525 - DNA, 25 bp, Homo sapien
cttcgtataagaatggcacattctg

SEQ ID NO: 1904526 - DNA, 25 bp, Homo sapien
tgaaagatgttgcgccaggaagatg

SEQ ID NO: 1904527 - DNA, 25 bp, Homo sapien
aaagatgttgcgccaggaagatgga

SEQ ID NO: 1904528 - DNA, 25 bp, Homo sapien
tcgtataagaatggcacattctgct

SEQ ID NO: 1904529 - DNA, 25 bp, Homo sapien
cagcggcgcctcacaggaagtccgg

SEQ ID NO: 1904530 - DNA, 25 bp, Homo sapien
gcctcacaggaagtccgggtctgta

SEQ ID NO: 1904531 - DNA, 25 bp, Homo sapien
gcgcctcacaggaagtccgggtctg

SEQ ID NO: 1904532 - DNA, 25 bp, Homo sapien
cggcgcctcacaggaagtccgggtc

SEQ ID NO: 1904533 - DNA, 25 bp, Homo sapien
ggcatcctgcgaggaagaatcccca

SEQ ID NO: 1904534 - DNA, 25 bp, Homo sapien
tccctaactgaatacaggcatcctg

SEQ ID NO: 1904535 - DNA, 25 bp, Homo sapien
ttgtcttcaaccatttccctaactg

SEQ ID NO: 1904536 - DNA, 25 bp, Homo sapien
agtcctccgtggcttcttcagtttt

SEQ ID NO: 1904537 - DNA, 25 bp, Homo sapien
tgttctgtttcgatgtagtaagaaa

SEQ ID NO: 1904538 - DNA, 25 bp, Homo sapien
gactgtgactctgacaataccgtta

SEQ ID NO: 1904539 - DNA, 25 bp, Homo sapien
tattttccagactactaataggacg

SEQ ID NO: 1904540 - DNA, 25 bp, Homo sapien
taataggacgcataaagactgtgac

SEQ ID NO: 1904541 - DNA, 25 bp, Homo sapien
gctctaaggcttctagttctaaacg

SEQ ID NO: 1904542 - DNA, 25 bp, Homo sapien
agctctaaggcttctagttctaaac

SEQ ID NO: 1904543 - DNA, 25 bp, Homo sapien
ctctaaggcttctagttctaaacgt

SEQ ID NO: 1904544 - DNA, 25 bp, Homo sapien
aaaatgtagagccatctccaaatat

SEQ ID NO: 1904545 - DNA, 25 bp, Homo sapien
tcctagatactaggaaaacagaaat

SEQ ID NO: 1904546 - DNA, 25 bp, Homo sapien
gaactgagcaagctaataattcacc

SEQ ID NO: 1904547 - DNA, 25 bp, Homo sapien
taaaggaacactgtacacataccat

SEQ ID NO: 1904548 - DNA, 25 bp, Homo sapien
taagggtaaatactgggtcacagtc

SEQ ID NO: 1904549 - DNA, 25 bp, Homo sapien
catgctgggctaagaaaatggcgaa

SEQ ID NO: 1904550 - DNA, 25 bp, Homo sapien
cgaactggtctggtgtggtgacata

SEQ ID NO: 1904551 - DNA, 25 bp, Homo sapien
catagagtagtgaagcatgctgggc

SEQ ID NO: 1904552 - DNA, 25 bp, Homo sapien
tctggtggtgctaccaaattgcctt

SEQ ID NO: 1904553 - DNA, 25 bp, Homo sapien
taggcacatatcacttgaacttgac

SEQ ID NO: 1904554 - DNA, 25 bp, Homo sapien
caacatccaagtgatattaggcaca

SEQ ID NO: 1904555 - DNA, 25 bp, Homo sapien
tatgctgtaactattcaagtacgtc

SEQ ID NO: 1904556 - DNA, 25 bp, Homo sapien
cagatgtgtcagagctcacagataa

SEQ ID NO: 1904557 - DNA, 25 bp, Homo sapien
ttggaagcatcagccctgcctatgg

SEQ ID NO: 1904558 - DNA, 25 bp, Homo sapien
caagacagttacatagcagaggtgg

SEQ ID NO: 1904559 - DNA, 25 bp, Homo sapien
catcagtagtcagaggagttttcca

SEQ ID NO: 1904560 - DNA, 25 bp, Homo sapien
aaactggccactgaaagatgcaaat

SEQ ID NO: 1904561 - DNA, 25 bp, Homo sapien
agaagtctgtccttgagtatttctt

SEQ ID NO: 1904562 - DNA, 25 bp, Homo sapien
tgtgtaaccatagctgccacaatgt

SEQ ID NO: 1904563 - DNA, 25 bp, Homo sapien
tacttgggtattcaggtaacttgag

SEQ ID NO: 1904564 - DNA, 25 bp, Homo sapien
aatgtagtgccacaagaagtctgtc

SEQ ID NO: 1904565 - DNA, 25 bp, Homo sapien
ctatagtcaattaaattgtagggag

SEQ ID NO: 1904566 - DNA, 25 bp, Homo sapien
agtcaattaaattgtagggagttag

SEQ ID NO: 1904567 - DNA, 25 bp, Homo sapien
gtaactttagtgatacttgaactat

SEQ ID NO: 1904568 - DNA, 25 bp, Homo sapien
tagtgatacttgaactatagtcaat

SEQ ID NO: 1904569 - DNA, 25 bp, Homo sapien
ccacttccacccatgatattagcaa

SEQ ID NO: 1904570 - DNA, 25 bp, Homo sapien
tggagtatatggcacagcagcgatt

SEQ ID NO: 1904571 - DNA, 25 bp, Homo sapien
taaaagatttggagtatatggcaca

SEQ ID NO: 1904572 - DNA, 25 bp, Homo sapien
cagcagcgattgtaaagttttgcaa

SEQ ID NO: 1904573 - DNA, 25 bp, Homo sapien
tgtgaaaaatatctaggccctaaag

SEQ ID NO: 1904574 - DNA, 25 bp, Homo sapien
gagggcccaaacaagtcatatttac

SEQ ID NO: 1904575 - DNA, 25 bp, Homo sapien
gattagttagcaagcttccatggag

SEQ ID NO: 1904576 - DNA, 25 bp, Homo sapien
cacggactcaaagaagtatctgcgc

SEQ ID NO: 1904577 - DNA, 25 bp, Homo sapien
aaagaaatcagccggacacagtgat

SEQ ID NO: 1904578 - DNA, 25 bp, Homo sapien
agccggacacagtgattcgcgcctg

SEQ ID NO: 1904579 - DNA, 25 bp, Homo sapien
gaaatcagccggacacagtgattcg

SEQ ID NO: 1904580 - DNA, 25 bp, Homo sapien
aatcagccggacacagtgattcgcg

SEQ ID NO: 1904581 - DNA, 25 bp, Homo sapien
attacaggcactactataaatgtct

SEQ ID NO: 1904582 - DNA, 25 bp, Homo sapien
gattacaggcactactataaatgtc

SEQ ID NO: 1904583 - DNA, 25 bp, Homo sapien
tacaggcactactataaatgtctta

SEQ ID NO: 1904584 - DNA, 25 bp, Homo sapien
ttacaggcactactataaatgtctt

SEQ ID NO: 1904585 - DNA, 25 bp, Homo sapien
ctcttgagtaatgtcttctacaact

SEQ ID NO: 1904586 - DNA, 25 bp, Homo sapien
tcttgagtaatgtcttctacaactt

SEQ ID NO: 1904587 - DNA, 25 bp, Homo sapien
ctgcccgtaacaaactgtaagagaa

SEQ ID NO: 1904588 - DNA, 25 bp, Homo sapien
cttgagtaatgtcttctacaacttc

SEQ ID NO: 1904589 - DNA, 25 bp, Homo sapien
tctggcatgccagaaagcagtagct

SEQ ID NO: 1904590 - DNA, 25 bp, Homo sapien
ggatcttctctttcatagccacttg

SEQ ID NO: 1904591 - DNA, 25 bp, Homo sapien
ttttatccaatcactcacatcaatt

SEQ ID NO: 1904592 - DNA, 25 bp, Homo sapien
caatcactcacatcaatttctggca

SEQ ID NO: 1904593 - DNA, 25 bp, Homo sapien
tatgaaagccctgtaaaaaagcatt

SEQ ID NO: 1904594 - DNA, 25 bp, Homo sapien
tgaacatatgaaagccctgtaaaaa

SEQ ID NO: 1904595 - DNA, 25 bp, Homo sapien
cagtaacaagctggacgtactccgc

SEQ ID NO: 1904596 - DNA, 25 bp, Homo sapien
gctcttgtcattcgaagttcagtaa

SEQ ID NO: 1904597 - DNA, 25 bp, Homo sapien
ttgcaaatttttcgcatattctgga

SEQ ID NO: 1904598 - DNA, 25 bp, Homo sapien
ttttgtgtcacaagaatactcccac

SEQ ID NO: 1904599 - DNA, 25 bp, Homo sapien
atattctggatcaatggatgccaca

SEQ ID NO: 1904600 - DNA, 25 bp, Homo sapien
aaaagttagttctagacccagatca

SEQ ID NO: 1904601 - DNA, 25 bp, Homo sapien
tacataagagttgctattaggctga

SEQ ID NO: 1904602 - DNA, 25 bp, Homo sapien
tgtgaagtaaatattgaccagctgc

SEQ ID NO: 1904603 - DNA, 25 bp, Homo sapien
ggttcaacgctaatcccaagatctg

SEQ ID NO: 1904604 - DNA, 25 bp, Homo sapien
tctgcccagcaaaccgaaaatagtt

SEQ ID NO: 1904605 - DNA, 25 bp, Homo sapien
catcagctgactgggtaaacaatgc

SEQ ID NO: 1904606 - DNA, 25 bp, Homo sapien
taaacaatgcataatcaggattgac

SEQ ID NO: 1904607 - DNA, 25 bp, Homo sapien
gactatctcattggacagaatatca

SEQ ID NO: 1904608 - DNA, 25 bp, Homo sapien
gaatatcaaaccactcacgcacaac

SEQ ID NO: 1904609 - DNA, 25 bp, Homo sapien
agtgatttctacatcatcttctttt

SEQ ID NO: 1904610 - DNA, 25 bp, Homo sapien
ctacatcatcttcttttatacccac

SEQ ID NO: 1904611 - DNA, 25 bp, Homo sapien
ttctacatcatcttcttttataccc

SEQ ID NO: 1904612 - DNA, 25 bp, Homo sapien
atttctacatcatcttcttttatac

SEQ ID NO: 1904613 - DNA, 25 bp, Homo sapien
tggaaccgtacagcaatcccttgct

SEQ ID NO: 1904614 - DNA, 25 bp, Homo sapien
ttctccatggaaccgtacagcaatc

SEQ ID NO: 1904615 - DNA, 25 bp, Homo sapien
tcttctccatggaaccgtacagcaa

SEQ ID NO: 1904616 - DNA, 25 bp, Homo sapien
tccatggaaccgtacagcaatccct

SEQ ID NO: 1904617 - DNA, 25 bp, Homo sapien
gaaccagcaggatatcattttcatt

SEQ ID NO: 1904618 - DNA, 25 bp, Homo sapien
tgttcatagaaccattcacagcgat

SEQ ID NO: 1904619 - DNA, 25 bp, Homo sapien
ggctgtcctgaatgcaaatgttcat

SEQ ID NO: 1904620 - DNA, 25 bp, Homo sapien
ggcctgtgcaccatatctgaatctg

SEQ ID NO: 1904621 - DNA, 25 bp, Homo sapien
cttaatagcatttgtacagcaatac

SEQ ID NO: 1904622 - DNA, 25 bp, Homo sapien
tgtttctccctttaactactggcca

SEQ ID NO: 1904623 - DNA, 25 bp, Homo sapien
aattcacaaaacaggactgattata

SEQ ID NO: 1904624 - DNA, 25 bp, Homo sapien
ggactgattatagaggctcctctta

SEQ ID NO: 1904625 - DNA, 25 bp, Homo sapien
agctacttgaaagactgagctggga

SEQ ID NO: 1904626 - DNA, 25 bp, Homo sapien
gacgttgcagtgagctcagatcaac

SEQ ID NO: 1904627 - DNA, 25 bp, Homo sapien
cgcttcagcccaggaggcagacgtt

SEQ ID NO: 1904628 - DNA, 25 bp, Homo sapien
ggatcgcttcagcccaggaggcaga

SEQ ID NO: 1904629 - DNA, 25 bp, Homo sapien
tgaatcttgacatcaactcaggaca

SEQ ID NO: 1904630 - DNA, 25 bp, Homo sapien
gacatcaactcaggacattcaagga

SEQ ID NO: 1904631 - DNA, 25 bp, Homo sapien
tatgatatgcatgaatcttgacatc

SEQ ID NO: 1904632 - DNA, 25 bp, Homo sapien
tcttgacatcaactcaggacattca

SEQ ID NO: 1904633 - DNA, 25 bp, Homo sapien
acaaattcaatgaaacgaggtgaag

SEQ ID NO: 1904634 - DNA, 25 bp, Homo sapien
ttcaatgaaacgaggtgaagtcatt

SEQ ID NO: 1904635 - DNA, 25 bp, Homo sapien
ttttaaaacttcatcatgtttgcag

SEQ ID NO: 1904636 - DNA, 25 bp, Homo sapien
tttaaaacttcatcatgtttgcaga

SEQ ID NO: 1904637 - DNA, 25 bp, Homo sapien
tagattcccttgtgccagtggacag

SEQ ID NO: 1904638 - DNA, 25 bp, Homo sapien
tcctgtctccctgcaagagcatctg

SEQ ID NO: 1904639 - DNA, 25 bp, Homo sapien
gcttgaatgacagcacttagccggt

SEQ ID NO: 1904640 - DNA, 25 bp, Homo sapien
ataacatcctgacaatctgcactgg

SEQ ID NO: 1904641 - DNA, 25 bp, Homo sapien
aaatagaagtgatctctgttgagtc

SEQ ID NO: 1904642 - DNA, 25 bp, Homo sapien
atagaagtgatctctgttgagtctc

SEQ ID NO: 1904643 - DNA, 25 bp, Homo sapien
tcagtaaaatagaagtgatctctgt

SEQ ID NO: 1904644 - DNA, 25 bp, Homo sapien
taaaatagaagtgatctctgttgag

SEQ ID NO: 1904645 - DNA, 25 bp, Homo sapien
ctaacgagtgccaaagcaattccag

SEQ ID NO: 1904646 - DNA, 25 bp, Homo sapien
taacgagtgccaaagcaattccaga

SEQ ID NO: 1904647 - DNA, 25 bp, Homo sapien
gaagttaaagtaagcatccctctca

SEQ ID NO: 1904648 - DNA, 25 bp, Homo sapien
cgccatggaaggagattatacaacc

SEQ ID NO: 1904649 - DNA, 25 bp, Homo sapien
taaaatactgactagcaggccggag

SEQ ID NO: 1904650 - DNA, 25 bp, Homo sapien
cagtactatgcactaggtagtcggg

SEQ ID NO: 1904651 - DNA, 25 bp, Homo sapien
ggttgacagatttggagtccctgaa

SEQ ID NO: 1904652 - DNA, 25 bp, Homo sapien
tactcacaacggttgacagatttgg

SEQ ID NO: 1904653 - DNA, 25 bp, Homo sapien
ccgtaatgagggctcttccatactc

SEQ ID NO: 1904654 - DNA, 25 bp, Homo sapien
cttccatactcacaacggttgacag

SEQ ID NO: 1904655 - DNA, 25 bp, Homo sapien
gacagataccttcactgaaaattct

SEQ ID NO: 1904656 - DNA, 25 bp, Homo sapien
gctgccataaatactgacagatacc

SEQ ID NO: 1904657 - DNA, 25 bp, Homo sapien
taaatactgacagataccttcactg

SEQ ID NO: 1904658 - DNA, 25 bp, Homo sapien
cccagctgccataaatactgacaga

SEQ ID NO: 1904659 - DNA, 25 bp, Homo sapien
catctcttttacgtctatcttccta

SEQ ID NO: 1904660 - DNA, 25 bp, Homo sapien
ttcatctcttttacgtctatcttcc

SEQ ID NO: 1904661 - DNA, 25 bp, Homo sapien
gctttctgattaatgaatgcatgct

SEQ ID NO: 1904662 - DNA, 25 bp, Homo sapien
aacctgttcatgagctttctgatta

SEQ ID NO: 1904663 - DNA, 25 bp, Homo sapien
cattgtagcccatatcaattccatt

SEQ ID NO: 1904664 - DNA, 25 bp, Homo sapien
ggaccaattcgaaagacgtgacaaa

SEQ ID NO: 1904665 - DNA, 25 bp, Homo sapien
tcgaaagacgtgacaaaacattctc

SEQ ID NO: 1904666 - DNA, 25 bp, Homo sapien
ttattcccattgtagcccatatcaa

SEQ ID NO: 1904667 - DNA, 25 bp, Homo sapien
gcaacttcagcaaggcttgttagaa

SEQ ID NO: 1904668 - DNA, 25 bp, Homo sapien
tttgctgagacaaatgctccagaac

SEQ ID NO: 1904669 - DNA, 25 bp, Homo sapien
gacaaatgctccagaacttgccgta

SEQ ID NO: 1904670 - DNA, 25 bp, Homo sapien
tttatgaccatttgttgtagcaact

SEQ ID NO: 1904671 - DNA, 25 bp, Homo sapien
catgttttctcggaggtcttcattc

SEQ ID NO: 1904672 - DNA, 25 bp, Homo sapien
ctgaaaaagcctcgggtgatattga

SEQ ID NO: 1904673 - DNA, 25 bp, Homo sapien
gcctcgggtgatattgaattaatac

SEQ ID NO: 1904674 - DNA, 25 bp, Homo sapien
gaattaatacttcacaagtctctcc

SEQ ID NO: 1904675 - DNA, 25 bp, Homo sapien
tgaattaatacttcacaagtctctc

SEQ ID NO: 1904676 - DNA, 25 bp, Homo sapien
aatccagaggagttactccattttt

SEQ ID NO: 1904677 - DNA, 25 bp, Homo sapien
gatctgtgctgtatctctctgacca

SEQ ID NO: 1904678 - DNA, 25 bp, Homo sapien
ctcgtaatagtaggatctgtgctgt

SEQ ID NO: 1904679 - DNA, 25 bp, Homo sapien
tatttggctcctcgtaatagtagga

SEQ ID NO: 1904680 - DNA, 25 bp, Homo sapien
agcaccactgtctagcaagcactgc

SEQ ID NO: 1904681 - DNA, 25 bp, Homo sapien
gctcctgatacatttggcctgttaa

SEQ ID NO: 1904682 - DNA, 25 bp, Homo sapien
gcaaagtacaatggagttgctcctg

SEQ ID NO: 1904683 - DNA, 25 bp, Homo sapien
catttggcctgttaatatcagcacc

SEQ ID NO: 1904684 - DNA, 25 bp, Homo sapien
cagtggtaattcactagcatgatcc

SEQ ID NO: 1904685 - DNA, 25 bp, Homo sapien
agctatctggcatcctgagaggtca

SEQ ID NO: 1904686 - DNA, 25 bp, Homo sapien
aaagggatctctccacctaatcttg

SEQ ID NO: 1904687 - DNA, 25 bp, Homo sapien
ttcacctctccttaagctatctggc

SEQ ID NO: 1904688 - DNA, 25 bp, Homo sapien
gtacattctattaccaataatgtta

SEQ ID NO: 1904689 - DNA, 25 bp, Homo sapien
ctttatataaggcagtaaagtctct

SEQ ID NO: 1904690 - DNA, 25 bp, Homo sapien
caggaaagcattgtcataaaacaaa

SEQ ID NO: 1904691 - DNA, 25 bp, Homo sapien
ctcttaatgagagagaaatagcaat

SEQ ID NO: 1904692 - DNA, 25 bp, Homo sapien
aaggcagtaaagtctcttaatgaga

SEQ ID NO: 1904693 - DNA, 25 bp, Homo sapien
ttctgtccgcccattcacagccagc

SEQ ID NO: 1904694 - DNA, 25 bp, Homo sapien
ggagtagttctgtccgcccattcac

SEQ ID NO: 1904695 - DNA, 25 bp, Homo sapien
tgtgaccgttctggcaggcaacatg

SEQ ID NO: 1904696 - DNA, 25 bp, Homo sapien
cacaaggtcatggagtagttctgtc

SEQ ID NO: 1904697 - DNA, 25 bp, Homo sapien
aagatctagaatagcaaaagccatc

SEQ ID NO: 1904698 - DNA, 25 bp, Homo sapien
gatctagaatagcaaaagccatcct

SEQ ID NO: 1904699 - DNA, 25 bp, Homo sapien
atattcctaagggttggaagaatca

SEQ ID NO: 1904700 - DNA, 25 bp, Homo sapien
aaaagatctagaatagcaaaagcca

SEQ ID NO: 1904701 - DNA, 25 bp, Homo sapien
atgttgacatcagcgctatattcta

SEQ ID NO: 1904702 - DNA, 25 bp, Homo sapien
caaatgttgacatcagcgctatatt

SEQ ID NO: 1904703 - DNA, 25 bp, Homo sapien
ttgacatcagcgctatattctaata

SEQ ID NO: 1904704 - DNA, 25 bp, Homo sapien
gacatcagcgctatattctaataat

SEQ ID NO: 1904705 - DNA, 25 bp, Homo sapien
aaccaagcattccaccgatccacaa

SEQ ID NO: 1904706 - DNA, 25 bp, Homo sapien
ccaaatgaaggggtgtacagcctga

SEQ ID NO: 1904707 - DNA, 25 bp, Homo sapien
aaggggtgtacagcctgaaatatct

SEQ ID NO: 1904708 - DNA, 25 bp, Homo sapien
gcaaaaccaagcattccaccgatcc

SEQ ID NO: 1904709 - DNA, 25 bp, Homo sapien
tgcataattgacatcaaattttgaa

SEQ ID NO: 1904710 - DNA, 25 bp, Homo sapien
agcaagcttcttttcacacgtccga

SEQ ID NO: 1904711 - DNA, 25 bp, Homo sapien
aattttgaatttgatagtagttcag

SEQ ID NO: 1904712 - DNA, 25 bp, Homo sapien
tcacacgtccgaatgcataattgac

SEQ ID NO: 1904713 - DNA, 25 bp, Homo sapien
gccataaccattggcattaatgtat

SEQ ID NO: 1904714 - DNA, 25 bp, Homo sapien
tcagccataaccattggcattaatg

SEQ ID NO: 1904715 - DNA, 25 bp, Homo sapien
taaccattggcattaatgtataaac

SEQ ID NO: 1904716 - DNA, 25 bp, Homo sapien
gatcagccataaccattggcattaa

SEQ ID NO: 1904717 - DNA, 25 bp, Homo sapien
acccgaccttgacgcggccggagct

SEQ ID NO: 1904718 - DNA, 25 bp, Homo sapien
ccacccgaccttgacgcggccggag

SEQ ID NO: 1904719 - DNA, 25 bp, Homo sapien
tgggagcgtcgggccaggggagttc

SEQ ID NO: 1904720 - DNA, 25 bp, Homo sapien
ctgccggggtgggagcgtcgggcca

SEQ ID NO: 1904721 - DNA, 25 bp, Homo sapien
cagcgagcgcgtcaggcggttgagt

SEQ ID NO: 1904722 - DNA, 25 bp, Homo sapien
ggcgcagcgagcgcgtcaggcggtt

SEQ ID NO: 1904723 - DNA, 25 bp, Homo sapien
gcgagcgcgtcaggcggttgagttg

SEQ ID NO: 1904724 - DNA, 25 bp, Homo sapien
cgcgtcaggcggttgagttgctcca

SEQ ID NO: 1904725 - DNA, 25 bp, Homo sapien
ctccgcgatcctccgcgatcagccg

SEQ ID NO: 1904726 - DNA, 25 bp, Homo sapien
cctcggcgcgccctccgcgatcctc

SEQ ID NO: 1904727 - DNA, 25 bp, Homo sapien
gcgccctccgcgatcctccgcgatc

SEQ ID NO: 1904728 - DNA, 25 bp, Homo sapien
tcggcgcgccctccgcgatcctccg

SEQ ID NO: 1904729 - DNA, 25 bp, Homo sapien
actgggcgtactcctaagcttctgg

SEQ ID NO: 1904730 - DNA, 25 bp, Homo sapien
caattgttcttaaatccgtcaccac

SEQ ID NO: 1904731 - DNA, 25 bp, Homo sapien
ttgccccggctagagcactgagctg

SEQ ID NO: 1904732 - DNA, 25 bp, Homo sapien
ctgagtatgcgggaagccacgcagc

SEQ ID NO: 1904733 - DNA, 25 bp, Homo sapien
gaactgctctgatcagatacattca

SEQ ID NO: 1904734 - DNA, 25 bp, Homo sapien
agctccctcataagactcctgaaaa

SEQ ID NO: 1904735 - DNA, 25 bp, Homo sapien
tgacactcacaagccagtatgagcc

SEQ ID NO: 1904736 - DNA, 25 bp, Homo sapien
taatgatggctgtgcaaatcagctc

SEQ ID NO: 1904737 - DNA, 25 bp, Homo sapien
attgactctgggtcatagctgctat

SEQ ID NO: 1904738 - DNA, 25 bp, Homo sapien
gactctgggtcatagctgctattgc

SEQ ID NO: 1904739 - DNA, 25 bp, Homo sapien
ctctgggtcatagctgctattgcca

SEQ ID NO: 1904740 - DNA, 25 bp, Homo sapien
tgactctgggtcatagctgctattg

SEQ ID NO: 1904741 - DNA, 25 bp, Homo sapien
gaaggctttattcgcttttgcggca

SEQ ID NO: 1904742 - DNA, 25 bp, Homo sapien
tcttcacgtggtagtctcaggttcc

SEQ ID NO: 1904743 - DNA, 25 bp, Homo sapien
tgattcttccggtctggactggctc

SEQ ID NO: 1904744 - DNA, 25 bp, Homo sapien
ggctcaccttatagctggatgctct

SEQ ID NO: 1904745 - DNA, 25 bp, Homo sapien
gattccactacatatggcccaaagg

SEQ ID NO: 1904746 - DNA, 25 bp, Homo sapien
tattacctctttagtgacgcctgaa

SEQ ID NO: 1904747 - DNA, 25 bp, Homo sapien
tatgtcatggagctcaaaattctgg

SEQ ID NO: 1904748 - DNA, 25 bp, Homo sapien
gaggccctcctgaccaaagtgtggg

SEQ ID NO: 1904749 - DNA, 25 bp, Homo sapien
gccttcagatctgtaagacgttaca

SEQ ID NO: 1904750 - DNA, 25 bp, Homo sapien
gcagcagccatttacaagctaagga

SEQ ID NO: 1904751 - DNA, 25 bp, Homo sapien
tcatcacagtccagaatcgacccgg

SEQ ID NO: 1904752 - DNA, 25 bp, Homo sapien
taaggaatgcccgagtctaccagaa

SEQ ID NO: 1904753 - DNA, 25 bp, Homo sapien
cactggattctgaaatacatgacta

SEQ ID NO: 1904754 - DNA, 25 bp, Homo sapien
ccaaacttctggcattgtctaccat

SEQ ID NO: 1904755 - DNA, 25 bp, Homo sapien
ggcattgtctaccatgctcactgga

SEQ ID NO: 1904756 - DNA, 25 bp, Homo sapien
gaaacagctgacagtaggttcccca

SEQ ID NO: 1904757 - DNA, 25 bp, Homo sapien
tgctgttcggaatgatgtccagggc

SEQ ID NO: 1904758 - DNA, 25 bp, Homo sapien
tgtgctgttcggaatgatgtccagg

SEQ ID NO: 1904759 - DNA, 25 bp, Homo sapien
aattgtgctgttcggaatgatgtcc

SEQ ID NO: 1904760 - DNA, 25 bp, Homo sapien
cttgaattgtgctgttcggaatgat

SEQ ID NO: 1904761 - DNA, 25 bp, Homo sapien
caccagaacaaacggcggcagcggc

SEQ ID NO: 1904762 - DNA, 25 bp, Homo sapien
gcgcccgcggtaaagctccaccgcg

SEQ ID NO: 1904763 - DNA, 25 bp, Homo sapien
cggcagcggccgtgcgcgcccacgg

SEQ ID NO: 1904764 - DNA, 25 bp, Homo sapien
gcggagagccgggagtcacaggccc

SEQ ID NO: 1904765 - DNA, 25 bp, Homo sapien
tgcgttgccacagcggccgcccagg

SEQ ID NO: 1904766 - DNA, 25 bp, Homo sapien
ctaagacgcgggcagtcgatgtact

SEQ ID NO: 1904767 - DNA, 25 bp, Homo sapien
gtgctgctgggtcggcgcccggtgt

SEQ ID NO: 1904768 - DNA, 25 bp, Homo sapien
gacgcgggcagtcgatgtacttccg

SEQ ID NO: 1904769 - DNA, 25 bp, Homo sapien
tgccggctcgtctgggacgcacggg

SEQ ID NO: 1904770 - DNA, 25 bp, Homo sapien
gcggccggtgccggctcgtctggga

SEQ ID NO: 1904771 - DNA, 25 bp, Homo sapien
ggtgccggctcgtctgggacgcacg

SEQ ID NO: 1904772 - DNA, 25 bp, Homo sapien
gggccgcgccgccagagggcgtgcg

SEQ ID NO: 1904773 - DNA, 25 bp, Homo sapien
caggcgtcggggatcgtttttgctt

SEQ ID NO: 1904774 - DNA, 25 bp, Homo sapien
aactgctttgtaccgggcaggcgtc

SEQ ID NO: 1904775 - DNA, 25 bp, Homo sapien
ctttggtatcggtgatgtaaattca

SEQ ID NO: 1904776 - DNA, 25 bp, Homo sapien
gctccgcaagccgaactgctttgta

SEQ ID NO: 1904777 - DNA, 25 bp, Homo sapien
gaagaacgcacttggatttaggttg

SEQ ID NO: 1904778 - DNA, 25 bp, Homo sapien
tttgcaggagcattaactgactact

SEQ ID NO: 1904779 - DNA, 25 bp, Homo sapien
tactgactggaacattggatgcggg

SEQ ID NO: 1904780 - DNA, 25 bp, Homo sapien
gaggaaatgatacgtttgcaggagc

SEQ ID NO: 1904781 - DNA, 25 bp, Homo sapien
cgacaaagtcgctggccacagtgct

SEQ ID NO: 1904782 - DNA, 25 bp, Homo sapien
cacagtgctgaatcaagacagccat

SEQ ID NO: 1904783 - DNA, 25 bp, Homo sapien
catgtacattattgtgttggatttc

SEQ ID NO: 1904784 - DNA, 25 bp, Homo sapien
ttctctgacacaatgatgctcgaca

SEQ ID NO: 1904785 - DNA, 25 bp, Homo sapien
tggttttctgttggggccagttcag

SEQ ID NO: 1904786 - DNA, 25 bp, Homo sapien
tgtggttttctgttggggccagttc

SEQ ID NO: 1904787 - DNA, 25 bp, Homo sapien
gttttctgttggggccagttcagag

SEQ ID NO: 1904788 - DNA, 25 bp, Homo sapien
gtggttttctgttggggccagttca

SEQ ID NO: 1904789 - DNA, 25 bp, Homo sapien
gtcgggcgcgccttgcatttgtctc

SEQ ID NO: 1904790 - DNA, 25 bp, Homo sapien
aaagcgacccaactatattctgaag

SEQ ID NO: 1904791 - DNA, 25 bp, Homo sapien
aagtgcctctgctgcaagacccaag

SEQ ID NO: 1904792 - DNA, 25 bp, Homo sapien
aacgttggaccaattgtgtgaagcc

SEQ ID NO: 1904793 - DNA, 25 bp, Homo sapien
ggaatcaggacagtttgcccgacgg

SEQ ID NO: 1904794 - DNA, 25 bp, Homo sapien
ctttcaggcgggagagatcttgcca

SEQ ID NO: 1904795 - DNA, 25 bp, Homo sapien
gcagagagagatcccgaaaatcgcc

SEQ ID NO: 1904796 - DNA, 25 bp, Homo sapien
tttcttgatcctccgaaggcccagg

SEQ ID NO: 1904797 - DNA, 25 bp, Homo sapien
cagctcagttttaggcatggcccgg

SEQ ID NO: 1904798 - DNA, 25 bp, Homo sapien
ggattccctctctttgaccgcactt

SEQ ID NO: 1904799 - DNA, 25 bp, Homo sapien
gaccgcacttatcttagctttagga

SEQ ID NO: 1904800 - DNA, 25 bp, Homo sapien
acggcgccgggtttgctggaagaca

SEQ ID NO: 1904801 - DNA, 25 bp, Homo sapien
tgctgtaaactcaccacttacttaa

SEQ ID NO: 1904802 - DNA, 25 bp, Homo sapien
gatgttcatatgtcttgtcagaaat

SEQ ID NO: 1904803 - DNA, 25 bp, Homo sapien
gcataattaggcttattgatgttca

SEQ ID NO: 1904804 - DNA, 25 bp, Homo sapien
tacttaaagggcataattaggctta

SEQ ID NO: 1904805 - DNA, 25 bp, Homo sapien
gtagtggtgatggtgtagggaagct

SEQ ID NO: 1904806 - DNA, 25 bp, Homo sapien
tgtagggaagctgaaatttggttgg

SEQ ID NO: 1904807 - DNA, 25 bp, Homo sapien
tcaaaattggtagatggtggtagtg

SEQ ID NO: 1904808 - DNA, 25 bp, Homo sapien
tgatggtgtagggaagctgaaattt

SEQ ID NO: 1904809 - DNA, 25 bp, Homo sapien
gggcacatttggctgctaaaaccat

SEQ ID NO: 1904810 - DNA, 25 bp, Homo sapien
ggggcacatttggctgctaaaacca

SEQ ID NO: 1904811 - DNA, 25 bp, Homo sapien
gggggcacatttggctgctaaaacc

SEQ ID NO: 1904812 - DNA, 25 bp, Homo sapien
tcttaaaatgttcaattctatgcat

SEQ ID NO: 1904813 - DNA, 25 bp, Homo sapien
ggtcttaaaatgttcaattctatgc

SEQ ID NO: 1904814 - DNA, 25 bp, Homo sapien
gtcttaaaatgttcaattctatgca

SEQ ID NO: 1904815 - DNA, 25 bp, Homo sapien
tgcacccaggctgaaagccaatatt

SEQ ID NO: 1904816 - DNA, 25 bp, Homo sapien
aaacagcatgaagtgcagtattgag

SEQ ID NO: 1904817 - DNA, 25 bp, Homo sapien
agaaaacagcatgaagtgcagtatt

SEQ ID NO: 1904818 - DNA, 25 bp, Homo sapien
catgaagtgcagtattgagacctca

SEQ ID NO: 1904819 - DNA, 25 bp, Homo sapien
tctttacagagcaaactattcatgg

SEQ ID NO: 1904820 - DNA, 25 bp, Homo sapien
tgggagcccctgtttaggaagtgaa

SEQ ID NO: 1904821 - DNA, 25 bp, Homo sapien
gagtcaatacgggtaacaggacctg

SEQ ID NO: 1904822 - DNA, 25 bp, Homo sapien
tagaagcctaaaagaaggagaacca

SEQ ID NO: 1904823 - DNA, 25 bp, Homo sapien
caggcatgaattgatagtctagatc

SEQ ID NO: 1904824 - DNA, 25 bp, Homo sapien
gatcctttgaggtctgtctattctg

SEQ ID NO: 1904825 - DNA, 25 bp, Homo sapien
ggcagtttaaagaccagaatggtaa

SEQ ID NO: 1904826 - DNA, 25 bp, Homo sapien
cctattcttacaaggtcaacatctg

SEQ ID NO: 1904827 - DNA, 25 bp, Homo sapien
gtatatgtgctggcaaagcaagcac

SEQ ID NO: 1904828 - DNA, 25 bp, Homo sapien
aattttagtatatgtgctggcaaag

SEQ ID NO: 1904829 - DNA, 25 bp, Homo sapien
atactaatcttctctgtattgttcc

SEQ ID NO: 1904830 - DNA, 25 bp, Homo sapien
tgtatgtcattcttgtataggggcc

SEQ ID NO: 1904831 - DNA, 25 bp, Homo sapien
gagcgcacgagagagttcaacctga

SEQ ID NO: 1904832 - DNA, 25 bp, Homo sapien
tgtcccctgatgagcagaaccgaag

SEQ ID NO: 1904833 - DNA, 25 bp, Homo sapien
cgtgtaaactaaatgggctgcccaa

SEQ ID NO: 1904834 - DNA, 25 bp, Homo sapien
tgtgttcacgttcgcagctctggca

SEQ ID NO: 1904835 - DNA, 25 bp, Homo sapien
tgtatttggagatgccggttcaaaa

SEQ ID NO: 1904836 - DNA, 25 bp, Homo sapien
aatgtatttggagatgccggttcaa

SEQ ID NO: 1904837 - DNA, 25 bp, Homo sapien
tatttggagatgccggttcaaaaac

SEQ ID NO: 1904838 - DNA, 25 bp, Homo sapien
caatgtatttggagatgccggttca

SEQ ID NO: 1904839 - DNA, 25 bp, Homo sapien
tccttcttctatcggtttcatcttg

SEQ ID NO: 1904840 - DNA, 25 bp, Homo sapien
catcttggcagaggctcgctggtgt

SEQ ID NO: 1904841 - DNA, 25 bp, Homo sapien
ctgctccttcttctatcggtttcat

SEQ ID NO: 1904842 - DNA, 25 bp, Homo sapien
cttctatcggtttcatcttggcaga

SEQ ID NO: 1904843 - DNA, 25 bp, Homo sapien
tcaccaccatcactgtcaggatcca

SEQ ID NO: 1904844 - DNA, 25 bp, Homo sapien
caccaccatcactgtcaggatccat

SEQ ID NO: 1904845 - DNA, 25 bp, Homo sapien
gtcaccaccatcactgtcaggatcc

SEQ ID NO: 1904846 - DNA, 25 bp, Homo sapien
agtcaccaccatcactgtcaggatc

SEQ ID NO: 1904847 - DNA, 25 bp, Homo sapien
ggtttccacctgctctgcccacacc

SEQ ID NO: 1904848 - DNA, 25 bp, Homo sapien
gttgtccgggtttccacctgctctg

SEQ ID NO: 1904849 - DNA, 25 bp, Homo sapien
ttgtccgggtttccacctgctctgc

SEQ ID NO: 1904850 - DNA, 25 bp, Homo sapien
ttccacctgctctgcccacacccat

SEQ ID NO: 1904851 - DNA, 25 bp, Homo sapien
ctcccatctctaaccaccaaattcc

SEQ ID NO: 1904852 - DNA, 25 bp, Homo sapien
tcccatctctaaccaccaaattccc

SEQ ID NO: 1904853 - DNA, 25 bp, Homo sapien
tactcggatggaccatcagggccgt

SEQ ID NO: 1904854 - DNA, 25 bp, Homo sapien
ctcggatggaccatcagggccgtga

SEQ ID NO: 1904855 - DNA, 25 bp, Homo sapien
tcggatggaccatcagggccgtgag

SEQ ID NO: 1904856 - DNA, 25 bp, Homo sapien
ctactcggatggaccatcagggccg

SEQ ID NO: 1904857 - DNA, 25 bp, Homo sapien
tcttagagtattctggtgagccact

SEQ ID NO: 1904858 - DNA, 25 bp, Homo sapien
cactttttaactcacggcactcata

SEQ ID NO: 1904859 - DNA, 25 bp, Homo sapien
catactgagataaccagccagcagc

SEQ ID NO: 1904860 - DNA, 25 bp, Homo sapien
aatgtgcctcttggcaggcgtgtga

SEQ ID NO: 1904861 - DNA, 25 bp, Homo sapien
gaagagaggacatgctggaggtacc

SEQ ID NO: 1904862 - DNA, 25 bp, Homo sapien
gaggtaccccgaagaaactggtgca

SEQ ID NO: 1904863 - DNA, 25 bp, Homo sapien
cactggagctggctatactgttcct

SEQ ID NO: 1904864 - DNA, 25 bp, Homo sapien
gtgcaagccgtcgtcactgtcactg

SEQ ID NO: 1904865 - DNA, 25 bp, Homo sapien
catttaaggtgggatcattcaatga

SEQ ID NO: 1904866 - DNA, 25 bp, Homo sapien
tacctaaagatttcatacaagaaag

SEQ ID NO: 1904867 - DNA, 25 bp, Homo sapien
tcttttccaataagatacctaaaga

SEQ ID NO: 1904868 - DNA, 25 bp, Homo sapien
tctgattccagaaagtatgttaatc

SEQ ID NO: 1904869 - DNA, 25 bp, Homo sapien
aatgtcctcgataggagaccttcat

SEQ ID NO: 1904870 - DNA, 25 bp, Homo sapien
gcagaaaatgtcctcgataggagac

SEQ ID NO: 1904871 - DNA, 25 bp, Homo sapien
ttcaggagaatctataaaggcacag

SEQ ID NO: 1904872 - DNA, 25 bp, Homo sapien
ggcacaggggtaaatgttatgcaga

SEQ ID NO: 1904873 - DNA, 25 bp, Homo sapien
ggatcatgcaaaactgtccagttag

SEQ ID NO: 1904874 - DNA, 25 bp, Homo sapien
cttcaagagaatactcagacggtca

SEQ ID NO: 1904875 - DNA, 25 bp, Homo sapien
aaacaatcgccggtacatgccactg

SEQ ID NO: 1904876 - DNA, 25 bp, Homo sapien
ggcacacggagtggttcaaacaatc

SEQ ID NO: 1904877 - DNA, 25 bp, Homo sapien
cggtctcttcttgtataaaagatac

SEQ ID NO: 1904878 - DNA, 25 bp, Homo sapien
cattatatccaaggcacatcggtag

SEQ ID NO: 1904879 - DNA, 25 bp, Homo sapien
tgttgacacccaagaacacagagtt

SEQ ID NO: 1904880 - DNA, 25 bp, Homo sapien
cagatgcaaaatgttgacacccaag

SEQ ID NO: 1904881 - DNA, 25 bp, Homo sapien
gagagtggcccagacgatataaagg

SEQ ID NO: 1904882 - DNA, 25 bp, Homo sapien
gcatcccagcatctgatacgccata

SEQ ID NO: 1904883 - DNA, 25 bp, Homo sapien
gatgaagacggccttcctcagtctt

SEQ ID NO: 1904884 - DNA, 25 bp, Homo sapien
agcccccacaagagtgtctttctca

SEQ ID NO: 1904885 - DNA, 25 bp, Homo sapien
catactgggattgcccatctgtttc

SEQ ID NO: 1904886 - DNA, 25 bp, Homo sapien
ggcagttgattctctcaatgggctg

SEQ ID NO: 1904887 - DNA, 25 bp, Homo sapien
caggtgtaaaacctatggcagttga

SEQ ID NO: 1904888 - DNA, 25 bp, Homo sapien
cacaagtggtcttattggaaggcac

SEQ ID NO: 1904889 - DNA, 25 bp, Homo sapien
ggtatgatactttctaactcaggtg

SEQ ID NO: 1904890 - DNA, 25 bp, Homo sapien
gcacaaatttggtccttgccaaaca

SEQ ID NO: 1904891 - DNA, 25 bp, Homo sapien
aattgcacaaatttggtccttgcca

SEQ ID NO: 1904892 - DNA, 25 bp, Homo sapien
taaaaaacactctattattaattgc

SEQ ID NO: 1904893 - DNA, 25 bp, Homo sapien
ttattaattgcacaaatttggtcct

SEQ ID NO: 1904894 - DNA, 25 bp, Homo sapien
tgaatgaaatgatcaagtcaactga

SEQ ID NO: 1904895 - DNA, 25 bp, Homo sapien
taattctgaaatagctcataaatat

SEQ ID NO: 1904896 - DNA, 25 bp, Homo sapien
aatagttgacttagatattgatttg

SEQ ID NO: 1904897 - DNA, 25 bp, Homo sapien
atgaaatgatcaagtcaactgaaga

SEQ ID NO: 1904898 - DNA, 25 bp, Homo sapien
attgctaagagtcttttcgcactta

SEQ ID NO: 1904899 - DNA, 25 bp, Homo sapien
ttcgcacttattcatgcttcaaagc

SEQ ID NO: 1904900 - DNA, 25 bp, Homo sapien
agagtcttttcgcacttattcatgc

SEQ ID NO: 1904901 - DNA, 25 bp, Homo sapien
gacttgtctggccaacaacccgttc

SEQ ID NO: 1904902 - DNA, 25 bp, Homo sapien
ctcccggggccctctgacctcgctc

SEQ ID NO: 1904903 - DNA, 25 bp, Homo sapien
ctctgacctcgctccttaaaggagg

SEQ ID NO: 1904904 - DNA, 25 bp, Homo sapien
tgacctcgctccttaaaggaggagg

SEQ ID NO: 1904905 - DNA, 25 bp, Homo sapien
gtccgtggcaacggtcctcctcggc

SEQ ID NO: 1904906 - DNA, 25 bp, Homo sapien
ggcggccgctgaccgttgagggtct

SEQ ID NO: 1904907 - DNA, 25 bp, Homo sapien
ggcttgccgccgcagagcgcgggag

SEQ ID NO: 1904908 - DNA, 25 bp, Homo sapien
acctgagcggcggccgctgaccgtt

SEQ ID NO: 1904909 - DNA, 25 bp, Homo sapien
gggctgcctgacctgagcggcggcc

SEQ ID NO: 1904910 - DNA, 25 bp, Homo sapien
cagcgcccagacccggggagaaggg

SEQ ID NO: 1904911 - DNA, 25 bp, Homo sapien
ctgtggccgcagcgcccagacccgg

SEQ ID NO: 1904912 - DNA, 25 bp, Homo sapien
gccgcagcgcccagacccggggaga

SEQ ID NO: 1904913 - DNA, 25 bp, Homo sapien
cgcagcgcccagacccggggagaag

SEQ ID NO: 1904914 - DNA, 25 bp, Homo sapien
ctttcgcttcccgatttagccaggg

SEQ ID NO: 1904915 - DNA, 25 bp, Homo sapien
ctgcccgggcgcgtagaacaagcag

SEQ ID NO: 1904916 - DNA, 25 bp, Homo sapien
agggccgacaaagttgctccccgag

SEQ ID NO: 1904917 - DNA, 25 bp, Homo sapien
gggctgagatccaactttcgcttcc

SEQ ID NO: 1904918 - DNA, 25 bp, Homo sapien
tcagctgctcgacgggagcccgacg

SEQ ID NO: 1904919 - DNA, 25 bp, Homo sapien
ctgggcagcgccgaccaaagttcgg

SEQ ID NO: 1904920 - DNA, 25 bp, Homo sapien
acacgggctcagctgctcgacggga

SEQ ID NO: 1904921 - DNA, 25 bp, Homo sapien
gcagccgctttgactaaaataggca

SEQ ID NO: 1904922 - DNA, 25 bp, Homo sapien
cggcggcaggcggcggcagccaggg

SEQ ID NO: 1904923 - DNA, 25 bp, Homo sapien
tatttgtagcaataaaataggcttc

SEQ ID NO: 1904924 - DNA, 25 bp, Homo sapien
tttgtagcaataaaataggcttcaa

SEQ ID NO: 1904925 - DNA, 25 bp, Homo sapien
caataaaataggcttcaagattcac

SEQ ID NO: 1904926 - DNA, 25 bp, Homo sapien
tttatttgtagcaataaaataggct

SEQ ID NO: 1904927 - DNA, 25 bp, Homo sapien
ttttagtcgcatcaagtaactgcac

SEQ ID NO: 1904928 - DNA, 25 bp, Homo sapien
gcaactcctgagtctatagggcaag

SEQ ID NO: 1904929 - DNA, 25 bp, Homo sapien
tgatgcagaaaagggcaaactgccc

SEQ ID NO: 1904930 - DNA, 25 bp, Homo sapien
gaattccggaaatgcctatgtggac

SEQ ID NO: 1904931 - DNA, 25 bp, Homo sapien
ggcatctcgcttctgaatttgattt

SEQ ID NO: 1904932 - DNA, 25 bp, Homo sapien
acagttggcaatggcatctcgcttc

SEQ ID NO: 1904933 - DNA, 25 bp, Homo sapien
aacagttggcaatggcatctcgctt

SEQ ID NO: 1904934 - DNA, 25 bp, Homo sapien
tcatttatcacagtatcgtctggaa

SEQ ID NO: 1904935 - DNA, 25 bp, Homo sapien
aaatgttgtgtcaggggtgatctgc

SEQ ID NO: 1904936 - DNA, 25 bp, Homo sapien
gttgggtagccgaatatcatagtga

SEQ ID NO: 1904937 - DNA, 25 bp, Homo sapien
tctgcgtatttctggagttgacatt

SEQ ID NO: 1904938 - DNA, 25 bp, Homo sapien
catagagtttatctgcaatgtcact

SEQ ID NO: 1904939 - DNA, 25 bp, Homo sapien
tgagcaaagagcagatataatttct

SEQ ID NO: 1904940 - DNA, 25 bp, Homo sapien
gcactgaaaaaaggcgggagatgta

SEQ ID NO: 1904941 - DNA, 25 bp, Homo sapien
caatgtcactgccaattagcactga

SEQ ID NO: 1904942 - DNA, 25 bp, Homo sapien
gacacatatcgacaatcagtttctg

SEQ ID NO: 1904943 - DNA, 25 bp, Homo sapien
ccaagacacatatcgacaatcagtt

SEQ ID NO: 1904944 - DNA, 25 bp, Homo sapien
tatcgacaatcagtttctgcagtga

SEQ ID NO: 1904945 - DNA, 25 bp, Homo sapien
cacatatcgacaatcagtttctgca

SEQ ID NO: 1904946 - DNA, 25 bp, Homo sapien
aattcgccatcaactgtcactctga

SEQ ID NO: 1904947 - DNA, 25 bp, Homo sapien
gcagaaattcgccatcaactgtcac

SEQ ID NO: 1904948 - DNA, 25 bp, Homo sapien
taatgcagaaattcgccatcaactg

SEQ ID NO: 1904949 - DNA, 25 bp, Homo sapien
gaaattcgccatcaactgtcactct

SEQ ID NO: 1904950 - DNA, 25 bp, Homo sapien
taagtgacataatgtcctgtaagat

SEQ ID NO: 1904951 - DNA, 25 bp, Homo sapien
agaaagagagcacataattggggag

SEQ ID NO: 1904952 - DNA, 25 bp, Homo sapien
tcagatccctgatgactcttgccct

SEQ ID NO: 1904953 - DNA, 25 bp, Homo sapien
tggaatattgagtgaaattcatcag

SEQ ID NO: 1904954 - DNA, 25 bp, Homo sapien
gagagtttatcaatggaagttttcc

SEQ ID NO: 1904955 - DNA, 25 bp, Homo sapien
ccaaagtaaccacttcagagctcaa

SEQ ID NO: 1904956 - DNA, 25 bp, Homo sapien
caaagtaaccacttcagagctcaaa

SEQ ID NO: 1904957 - DNA, 25 bp, Homo sapien
ggagagtttatcaatggaagttttc

SEQ ID NO: 1904958 - DNA, 25 bp, Homo sapien
ggttatgctgcgaacttgatatgca

SEQ ID NO: 1904959 - DNA, 25 bp, Homo sapien
aacacttggaattctcgggcaaagg

SEQ ID NO: 1904960 - DNA, 25 bp, Homo sapien
gacaaacagtacaaaattccaggaa

SEQ ID NO: 1904961 - DNA, 25 bp, Homo sapien
aactgaagacataaaggagcccgaa

SEQ ID NO: 1904962 - DNA, 25 bp, Homo sapien
gactgggtgttcatctattaggttc

SEQ ID NO: 1904963 - DNA, 25 bp, Homo sapien
ctggcaagatgataaatggctcctt

SEQ ID NO: 1904964 - DNA, 25 bp, Homo sapien
gtgttcatctattaggttcttccat

SEQ ID NO: 1904965 - DNA, 25 bp, Homo sapien
taaatggctccttcggcctcttgct

SEQ ID NO: 1904966 - DNA, 25 bp, Homo sapien
tattactgcctgcttcacttttcag

SEQ ID NO: 1904967 - DNA, 25 bp, Homo sapien
actgcctgcttcacttttcagttga

SEQ ID NO: 1904968 - DNA, 25 bp, Homo sapien
ggctgtattactgcctgcttcactt

SEQ ID NO: 1904969 - DNA, 25 bp, Homo sapien
tactgcctgcttcacttttcagttg

SEQ ID NO: 1904970 - DNA, 25 bp, Homo sapien
gagttgatgctgattaaaggcttcg

SEQ ID NO: 1904971 - DNA, 25 bp, Homo sapien
cgtgtgtacggatcttgaaaaacta

SEQ ID NO: 1904972 - DNA, 25 bp, Homo sapien
catctgggctcctgatttggatcca

SEQ ID NO: 1904973 - DNA, 25 bp, Homo sapien
tgaaaaactaagaatcccatgctcg

SEQ ID NO: 1904974 - DNA, 25 bp, Homo sapien
ggatagtgattcttttctcagtaag

SEQ ID NO: 1904975 - DNA, 25 bp, Homo sapien
cttggatagtgattcttttctcagt

SEQ ID NO: 1904976 - DNA, 25 bp, Homo sapien
tttcatcttggatagtgattctttt

SEQ ID NO: 1904977 - DNA, 25 bp, Homo sapien
gattcttttctcagtaagtaatgac

SEQ ID NO: 1904978 - DNA, 25 bp, Homo sapien
tcaaccagggttaagaagtgtcgaa

SEQ ID NO: 1904979 - DNA, 25 bp, Homo sapien
catttacccagcaactatgtgccag

SEQ ID NO: 1904980 - DNA, 25 bp, Homo sapien
tgtccttgaggtggtacatttaccc

SEQ ID NO: 1904981 - DNA, 25 bp, Homo sapien
tatctcatttaacaaccccaggagg

SEQ ID NO: 1904982 - DNA, 25 bp, Homo sapien
ccgtacactcatcagtccaagaggg

SEQ ID NO: 1904983 - DNA, 25 bp, Homo sapien
agcttgtggaaattttgcagcagcc

SEQ ID NO: 1904984 - DNA, 25 bp, Homo sapien
gttttccttccgtacactcatcagt

SEQ ID NO: 1904985 - DNA, 25 bp, Homo sapien
agacgttttccttccgtacactcat

SEQ ID NO: 1904986 - DNA, 25 bp, Homo sapien
ctcagcgtccccctcgtgagtgcct

SEQ ID NO: 1904987 - DNA, 25 bp, Homo sapien
cgggcgcagcgtgaccgcagcgggc

SEQ ID NO: 1904988 - DNA, 25 bp, Homo sapien
cggcggagcgcgcttgacccgggtg

SEQ ID NO: 1904989 - DNA, 25 bp, Homo sapien
tggcccgcgcggaagccctcagcgt

SEQ ID NO: 1904990 - DNA, 25 bp, Homo sapien
tcatagaaagtccttgagcttctct

SEQ ID NO: 1904991 - DNA, 25 bp, Homo sapien
tcctgcaatcttgctcatagaaagt

SEQ ID NO: 1904992 - DNA, 25 bp, Homo sapien
acacgtcagaggcaaggctgtcaga

SEQ ID NO: 1904993 - DNA, 25 bp, Homo sapien
tgctgtaaagactccatccacttcc

SEQ ID NO: 1904994 - DNA, 25 bp, Homo sapien
agagtgacaattgttttttaggtag

SEQ ID NO: 1904995 - DNA, 25 bp, Homo sapien
ttactgatcagaggcttatcactca

SEQ ID NO: 1904996 - DNA, 25 bp, Homo sapien
cattggcctggtggttaagtggggt

SEQ ID NO: 1904997 - DNA, 25 bp, Homo sapien
cagaggggccttactgatcagaggc

SEQ ID NO: 1904998 - DNA, 25 bp, Homo sapien
gggccttactgatcagaggcttatc

SEQ ID NO: 1904999 - DNA, 25 bp, Homo sapien
ccatgtgtgtagacagccagtagca

SEQ ID NO: 1905000 - DNA, 25 bp, Homo sapien
tagacagccagtagcaattctctgc

SEQ ID NO: 1905001 - DNA, 25 bp, Homo sapien
ccagtagcaattctctgccagcact

SEQ ID NO: 1905002 - DNA, 25 bp, Homo sapien
ctggttgccatgtgtgtagacagcc

SEQ ID NO: 1905003 - DNA, 25 bp, Homo sapien
taaggccacagagaataatccccat

SEQ ID NO: 1905004 - DNA, 25 bp, Homo sapien
tgcagtattcgcttcattgtggtgg

SEQ ID NO: 1905005 - DNA, 25 bp, Homo sapien
ggtatggctgtaccttaaattgaat

SEQ ID NO: 1905006 - DNA, 25 bp, Homo sapien
tattttatgccctttagtaatgata

SEQ ID NO: 1905007 - DNA, 25 bp, Homo sapien
tttattccattctgggcagacccaa

SEQ ID NO: 1905008 - DNA, 25 bp, Homo sapien
aataatctgagtaacatgtccctgc

SEQ ID NO: 1905009 - DNA, 25 bp, Homo sapien
ggtgacagttcatgccaaaataatc

SEQ ID NO: 1905010 - DNA, 25 bp, Homo sapien
caagcccgggcttttcatgtgctct

SEQ ID NO: 1905011 - DNA, 25 bp, Homo sapien
tagccgagagtaaagagacagaaag

SEQ ID NO: 1905012 - DNA, 25 bp, Homo sapien
ctagccgagagtaaagagacagaaa

SEQ ID NO: 1905013 - DNA, 25 bp, Homo sapien
cacagattatccattattctgctgt

SEQ ID NO: 1905014 - DNA, 25 bp, Homo sapien
tttaaacacagattatccattattc

SEQ ID NO: 1905015 - DNA, 25 bp, Homo sapien
ctgtttgtcaggattccttcatttt

SEQ ID NO: 1905016 - DNA, 25 bp, Homo sapien
taaacacagattatccattattctg

SEQ ID NO: 1905017 - DNA, 25 bp, Homo sapien
tgtcccaacctgtttgtacagtatt

SEQ ID NO: 1905018 - DNA, 25 bp, Homo sapien
gtcccaacctgtttgtacagtatta

SEQ ID NO: 1905019 - DNA, 25 bp, Homo sapien
gctgtcccaacctgtttgtacagta

SEQ ID NO: 1905020 - DNA, 25 bp, Homo sapien
cccaacctgtttgtacagtattaat

SEQ ID NO: 1905021 - DNA, 25 bp, Homo sapien
ggtaaagccaataccaaggtcatag

SEQ ID NO: 1905022 - DNA, 25 bp, Homo sapien
tttctctagtgcctggccactgcct

SEQ ID NO: 1905023 - DNA, 25 bp, Homo sapien
taccaaggtcatagaccctgtgggc

SEQ ID NO: 1905024 - DNA, 25 bp, Homo sapien
gaccctgtgggcctatcatctttct

SEQ ID NO: 1905025 - DNA, 25 bp, Homo sapien
tccatttatacagccctacaaaggg

SEQ ID NO: 1905026 - DNA, 25 bp, Homo sapien
aagggtactgctgaagactgtcctg

SEQ ID NO: 1905027 - DNA, 25 bp, Homo sapien
gctgaagactgtcctggttcaacct

SEQ ID NO: 1905028 - DNA, 25 bp, Homo sapien
cctggttcaaccttgatatctccta

SEQ ID NO: 1905029 - DNA, 25 bp, Homo sapien
tgtcttcctgggtcgtgcacatctt

SEQ ID NO: 1905030 - DNA, 25 bp, Homo sapien
tttcactttgttccgcttaccacga

SEQ ID NO: 1905031 - DNA, 25 bp, Homo sapien
cgtatttgtcctcataaccttgtcc

SEQ ID NO: 1905032 - DNA, 25 bp, Homo sapien
ttaccacgaccttttccaggacatg

SEQ ID NO: 1905033 - DNA, 25 bp, Homo sapien
agcatttccccagcgcattcaagtg

SEQ ID NO: 1905034 - DNA, 25 bp, Homo sapien
tccccagcgcattcaagtgcaaaac

SEQ ID NO: 1905035 - DNA, 25 bp, Homo sapien
cagcatttccccagcgcattcaagt

SEQ ID NO: 1905036 - DNA, 25 bp, Homo sapien
atttccccagcgcattcaagtgcaa

SEQ ID NO: 1905037 - DNA, 25 bp, Homo sapien
cctcagtttgactctccatagaggt

SEQ ID NO: 1905038 - DNA, 25 bp, Homo sapien
ttttagggtggttatgttttgatgc

SEQ ID NO: 1905039 - DNA, 25 bp, Homo sapien
tcagtttgactctccatagaggtga

SEQ ID NO: 1905040 - DNA, 25 bp, Homo sapien
tctttcctctgatgtttctcaaagc

SEQ ID NO: 1905041 - DNA, 25 bp, Homo sapien
ctttatagaactgccttttcaggat

SEQ ID NO: 1905042 - DNA, 25 bp, Homo sapien
tttcacttaatcagactatacccag

SEQ ID NO: 1905043 - DNA, 25 bp, Homo sapien
taaaggtgctaagcaacctgctctt

SEQ ID NO: 1905044 - DNA, 25 bp, Homo sapien
tcatcccggttagatcctttatgcc

SEQ ID NO: 1905045 - DNA, 25 bp, Homo sapien
cattctatgacttaactgcttgaaa

SEQ ID NO: 1905046 - DNA, 25 bp, Homo sapien
aaggtgaaatgctttattctcacag

SEQ ID NO: 1905047 - DNA, 25 bp, Homo sapien
gcttgaaaactaacttgttgcagaa

SEQ ID NO: 1905048 - DNA, 25 bp, Homo sapien
ttgcccctcaatatgaagaaaccgg

SEQ ID NO: 1905049 - DNA, 25 bp, Homo sapien
gttgcaaagaagtcttctccatgag

SEQ ID NO: 1905050 - DNA, 25 bp, Homo sapien
tattattgttgcaaagaagtcttct

SEQ ID NO: 1905051 - DNA, 25 bp, Homo sapien
tttattattgttgcaaagaagtctt

SEQ ID NO: 1905052 - DNA, 25 bp, Homo sapien
ttattgttgcaaagaagtcttctcc

SEQ ID NO: 1905053 - DNA, 25 bp, Homo sapien
cacatgtgcctagacagggtggaaa

SEQ ID NO: 1905054 - DNA, 25 bp, Homo sapien
gataaaattcccacggcagttctgt

SEQ ID NO: 1905055 - DNA, 25 bp, Homo sapien
tgcccgactatgatccttaattcag

SEQ ID NO: 1905056 - DNA, 25 bp, Homo sapien
ggatatagataagtatgcccgacta

SEQ ID NO: 1905057 - DNA, 25 bp, Homo sapien
tcttggtgtcaacgtgggaaagccc

SEQ ID NO: 1905058 - DNA, 25 bp, Homo sapien
tgtcaacgtgggaaagcccttgagg

SEQ ID NO: 1905059 - DNA, 25 bp, Homo sapien
gctgtcaggaggaagcacgaaaact

SEQ ID NO: 1905060 - DNA, 25 bp, Homo sapien
tgaggttttctgtcgctgtcaggag

SEQ ID NO: 1905061 - DNA, 25 bp, Homo sapien
acttcagggagtgaagcgggaccac

SEQ ID NO: 1905062 - DNA, 25 bp, Homo sapien
tatggaatccagtcgacgttcaggc

SEQ ID NO: 1905063 - DNA, 25 bp, Homo sapien
catggacgggtactggatgtcatct

SEQ ID NO: 1905064 - DNA, 25 bp, Homo sapien
gcgatgaacgcaaacatgtctgaga

SEQ ID NO: 1905065 - DNA, 25 bp, Homo sapien
ctggaaggcaaaaacacctttgtga

SEQ ID NO: 1905066 - DNA, 25 bp, Homo sapien
tggaaggcaaaaacacctttgtgag

SEQ ID NO: 1905067 - DNA, 25 bp, Homo sapien
tagtacgtgagtgaccaccatggac

SEQ ID NO: 1905068 - DNA, 25 bp, Homo sapien
gaaagactgtaggaaggaagctcac

SEQ ID NO: 1905069 - DNA, 25 bp, Homo sapien
gagttttatggcacagggacctagg

SEQ ID NO: 1905070 - DNA, 25 bp, Homo sapien
cgttaccatttaggccatgactggc

SEQ ID NO: 1905071 - DNA, 25 bp, Homo sapien
gcttctaccaatgtgtgtcaatgag

SEQ ID NO: 1905072 - DNA, 25 bp, Homo sapien
tatcgcccagccattcaaacttgga

SEQ ID NO: 1905073 - DNA, 25 bp, Homo sapien
tgtcaatgaggcctgcatgtactga

SEQ ID NO: 1905074 - DNA, 25 bp, Homo sapien
tttcaaactggagaggctagccata

SEQ ID NO: 1905075 - DNA, 25 bp, Homo sapien
agcatgtccattactccaacttggg

SEQ ID NO: 1905076 - DNA, 25 bp, Homo sapien
ggtcaggtctctgatttgcacaagc

SEQ ID NO: 1905077 - DNA, 25 bp, Homo sapien
aatcagtggtccaagcatggccgat

SEQ ID NO: 1905078 - DNA, 25 bp, Homo sapien
tgtccgagcacccataatcagtggt

SEQ ID NO: 1905079 - DNA, 25 bp, Homo sapien
aaagggaggcagtctatcattaaac

SEQ ID NO: 1905080 - DNA, 25 bp, Homo sapien
agggaggcagtctatcattaaacat

SEQ ID NO: 1905081 - DNA, 25 bp, Homo sapien
gaaaagggaggcagtctatcattaa

SEQ ID NO: 1905082 - DNA, 25 bp, Homo sapien
agaaaagggaggcagtctatcatta

SEQ ID NO: 1905083 - DNA, 25 bp, Homo sapien
taaccttccttgatcagatactcag

SEQ ID NO: 1905084 - DNA, 25 bp, Homo sapien
cattaatagtcagcctcttgggaga

SEQ ID NO: 1905085 - DNA, 25 bp, Homo sapien
gttttgtttgttggccaagatacca

SEQ ID NO: 1905086 - DNA, 25 bp, Homo sapien
cactaagaggcctccatttgaacct

SEQ ID NO: 1905087 - DNA, 25 bp, Homo sapien
catagtctactgttagccttagtca

SEQ ID NO: 1905088 - DNA, 25 bp, Homo sapien
tgaacctgcctaatcccaagactgg

SEQ ID NO: 1905089 - DNA, 25 bp, Homo sapien
gcagactaggaccaaattactcttc

SEQ ID NO: 1905090 - DNA, 25 bp, Homo sapien
tctggtcctttcatcatggcctaaa

SEQ ID NO: 1905091 - DNA, 25 bp, Homo sapien
tacaacaggtttaccctcatgttcg

SEQ ID NO: 1905092 - DNA, 25 bp, Homo sapien
cctaacaggtacttaatggaaatct

SEQ ID NO: 1905093 - DNA, 25 bp, Homo sapien
taatggaaatctctttacaacaggt

SEQ ID NO: 1905094 - DNA, 25 bp, Homo sapien
ctaaggtgcacttgaggagtctgct

SEQ ID NO: 1905095 - DNA, 25 bp, Homo sapien
gtcctggtaggccttatgataaatg

SEQ ID NO: 1905096 - DNA, 25 bp, Homo sapien
gctgaccagccccaagcactggggt

SEQ ID NO: 1905097 - DNA, 25 bp, Homo sapien
taggccttatgataaatgatggctg

SEQ ID NO: 1905098 - DNA, 25 bp, Homo sapien
caagcactggggtcctggtaggcct

SEQ ID NO: 1905099 - DNA, 25 bp, Homo sapien
tctccgagattcactcctgacagtg

SEQ ID NO: 1905100 - DNA, 25 bp, Homo sapien
tcagctcattcaaacaggaaggatc

SEQ ID NO: 1905101 - DNA, 25 bp, Homo sapien
ttcgtctagccaaaaagctttcctg

SEQ ID NO: 1905102 - DNA, 25 bp, Homo sapien
gtttcaagacagtcaactaatgctg

SEQ ID NO: 1905103 - DNA, 25 bp, Homo sapien
atgccacgtctctccatattcgcca

SEQ ID NO: 1905104 - DNA, 25 bp, Homo sapien
gccacgtctctccatattcgccacc

SEQ ID NO: 1905105 - DNA, 25 bp, Homo sapien
cacgtctctccatattcgccacctc

SEQ ID NO: 1905106 - DNA, 25 bp, Homo sapien
tctccatattcgccacctcctctga

SEQ ID NO: 1905107 - DNA, 25 bp, Homo sapien
gagccatccaattttatgccttttt

SEQ ID NO: 1905108 - DNA, 25 bp, Homo sapien
gttgaagccgccatagccatataag

SEQ ID NO: 1905109 - DNA, 25 bp, Homo sapien
gccttttttatgcacaatgaacatt

SEQ ID NO: 1905110 - DNA, 25 bp, Homo sapien
acaatgaacattggaatcttcgtac

SEQ ID NO: 1905111 - DNA, 25 bp, Homo sapien
tgcagccagctggactgatacactc

SEQ ID NO: 1905112 - DNA, 25 bp, Homo sapien
agccagctggactgatacactcctc

SEQ ID NO: 1905113 - DNA, 25 bp, Homo sapien
catgcagccagctggactgatacac

SEQ ID NO: 1905114 - DNA, 25 bp, Homo sapien
cccagctgactctcagaccctccat

SEQ ID NO: 1905115 - DNA, 25 bp, Homo sapien
ccaaagtgctctcttgatgcttcat

SEQ ID NO: 1905116 - DNA, 25 bp, Homo sapien
cccaaagtgctctcttgatgcttca

SEQ ID NO: 1905117 - DNA, 25 bp, Homo sapien
tatgcaaaggacctccatgtccaca

SEQ ID NO: 1905118 - DNA, 25 bp, Homo sapien
gttaagaagcccatcaagttgccta

SEQ ID NO: 1905119 - DNA, 25 bp, Homo sapien
gcccatagccagacatgtgtttcct

SEQ ID NO: 1905120 - DNA, 25 bp, Homo sapien
tcatgtggcagatggcctgttcaca

SEQ ID NO: 1905121 - DNA, 25 bp, Homo sapien
gcagccacaagactgtgccacctgg

SEQ ID NO: 1905122 - DNA, 25 bp, Homo sapien
caaggctgtaaggaaccacaccctt

SEQ ID NO: 1905123 - DNA, 25 bp, Homo sapien
cgcaaggctgtaaggaaccacaccc

SEQ ID NO: 1905124 - DNA, 25 bp, Homo sapien
agcagccacaagactgtgccacctg

SEQ ID NO: 1905125 - DNA, 25 bp, Homo sapien
tgtgaagccaaaagcgaaatagaaa

SEQ ID NO: 1905126 - DNA, 25 bp, Homo sapien
gaagccaaaagcgaaatagaaagtg

SEQ ID NO: 1905127 - DNA, 25 bp, Homo sapien
caaaagcgaaatagaaagtggaagt

SEQ ID NO: 1905128 - DNA, 25 bp, Homo sapien
gccaaaagcgaaatagaaagtggaa

SEQ ID NO: 1905129 - DNA, 25 bp, Homo sapien
ttttgttctcttcggccagctctct

SEQ ID NO: 1905130 - DNA, 25 bp, Homo sapien
tctcttcggccagctctcttttatt

SEQ ID NO: 1905131 - DNA, 25 bp, Homo sapien
ttcttttgttctcttcggccagctc

SEQ ID NO: 1905132 - DNA, 25 bp, Homo sapien
ctcttcggccagctctcttttattg

SEQ ID NO: 1905133 - DNA, 25 bp, Homo sapien
tgtgtacttctgcagcgggtacggc

SEQ ID NO: 1905134 - DNA, 25 bp, Homo sapien
gtgtacttctgcagcgggtacggcc

SEQ ID NO: 1905135 - DNA, 25 bp, Homo sapien
tgtacttctgcagcgggtacggccg

SEQ ID NO: 1905136 - DNA, 25 bp, Homo sapien
actgtgtacttctgcagcgggtacg

SEQ ID NO: 1905137 - DNA, 25 bp, Homo sapien
gccagtggcgcaggcgcatgttttc

SEQ ID NO: 1905138 - DNA, 25 bp, Homo sapien
tggcgcaggcgcatgttttctcagg

SEQ ID NO: 1905139 - DNA, 25 bp, Homo sapien
cgcaggcgcatgttttctcaggccg

SEQ ID NO: 1905140 - DNA, 25 bp, Homo sapien
aggcgcatgttttctcaggccgcag

SEQ ID NO: 1905141 - DNA, 25 bp, Homo sapien
ttgtggatgacacggatcttagaga

SEQ ID NO: 1905142 - DNA, 25 bp, Homo sapien
aacacgggcaatggaattgtggatg

SEQ ID NO: 1905143 - DNA, 25 bp, Homo sapien
cgggcaatggaattgtggatgacac

SEQ ID NO: 1905144 - DNA, 25 bp, Homo sapien
ggaattgtggatgacacggatctta

SEQ ID NO: 1905145 - DNA, 25 bp, Homo sapien
ttggagaccgcgccgcctgtcagtg

SEQ ID NO: 1905146 - DNA, 25 bp, Homo sapien
ccgcctgtcagtggcgatgcgcagc

SEQ ID NO: 1905147 - DNA, 25 bp, Homo sapien
cgccgcctgtcagtggcgatgcgca

SEQ ID NO: 1905148 - DNA, 25 bp, Homo sapien
accgcgccgcctgtcagtggcgatg

SEQ ID NO: 1905149 - DNA, 25 bp, Homo sapien
tcgtccagctgtttgagcagcaact

SEQ ID NO: 1905150 - DNA, 25 bp, Homo sapien
gtcgtccagctgtttgagcagcaac

SEQ ID NO: 1905151 - DNA, 25 bp, Homo sapien
gtccagctgtttgagcagcaactct

SEQ ID NO: 1905152 - DNA, 25 bp, Homo sapien
ccagctgtttgagcagcaactcttt

SEQ ID NO: 1905153 - DNA, 25 bp, Homo sapien
caatcccctgtggaatgtactacga

SEQ ID NO: 1905154 - DNA, 25 bp, Homo sapien
tgtgtccccgttctaggcctgtgca

SEQ ID NO: 1905155 - DNA, 25 bp, Homo sapien
cataggctgtatgcaaatgccgtgc

SEQ ID NO: 1905156 - DNA, 25 bp, Homo sapien
taaggaacccaagtcatacatctcg

SEQ ID NO: 1905157 - DNA, 25 bp, Homo sapien
tgtatgaagctgagtgtggccccga

SEQ ID NO: 1905158 - DNA, 25 bp, Homo sapien
caaagaggtggtcaattagaagaga

SEQ ID NO: 1905159 - DNA, 25 bp, Homo sapien
tggccccgaattaaggacagcatca

SEQ ID NO: 1905160 - DNA, 25 bp, Homo sapien
aactagaggcgtagaggcggtatca

SEQ ID NO: 1905161 - DNA, 25 bp, Homo sapien
gatgatagacggcattcaggatggt

SEQ ID NO: 1905162 - DNA, 25 bp, Homo sapien
gaacgttcattcagcgcatttccag

SEQ ID NO: 1905163 - DNA, 25 bp, Homo sapien
caaagtctgtatgtggagtgcaaga

SEQ ID NO: 1905164 - DNA, 25 bp, Homo sapien
gaatactgatgattatgaagcactg

SEQ ID NO: 1905165 - DNA, 25 bp, Homo sapien
tgtaaggaaccccttcattcatgag

SEQ ID NO: 1905166 - DNA, 25 bp, Homo sapien
caatccactgctacctgacattgac

SEQ ID NO: 1905167 - DNA, 25 bp, Homo sapien
ttcctgacccctcacatggtcaatc

SEQ ID NO: 1905168 - DNA, 25 bp, Homo sapien
ctgacattgactggcccctctcata

SEQ ID NO: 1905169 - DNA, 25 bp, Homo sapien
ctgtgacttctctgcaataccacac

SEQ ID NO: 1905170 - DNA, 25 bp, Homo sapien
tgcccagtctatatcccctgtgact

SEQ ID NO: 1905171 - DNA, 25 bp, Homo sapien
agcactgcccagtctatatcccctg

SEQ ID NO: 1905172 - DNA, 25 bp, Homo sapien
agtctatatcccctgtgacttctct

SEQ ID NO: 1905173 - DNA, 25 bp, Homo sapien
tacacactgttggagttttcggctg

SEQ ID NO: 1905174 - DNA, 25 bp, Homo sapien
tgttggagttttcggctgtgcccat

SEQ ID NO: 1905175 - DNA, 25 bp, Homo sapien
acactgttggagttttcggctgtgc

SEQ ID NO: 1905176 - DNA, 25 bp, Homo sapien
atacacactgttggagttttcggct

SEQ ID NO: 1905177 - DNA, 25 bp, Homo sapien
ttctcccgggtcctgaacttaatga

SEQ ID NO: 1905178 - DNA, 25 bp, Homo sapien
gcaaatggagaattcaaggcctgag

SEQ ID NO: 1905179 - DNA, 25 bp, Homo sapien
tgcaccaaggcaatctagtttctct

SEQ ID NO: 1905180 - DNA, 25 bp, Homo sapien
tgcttggattccctgcactgacgcc

SEQ ID NO: 1905181 - DNA, 25 bp, Homo sapien
tctaactccctatttgacactgcca

SEQ ID NO: 1905182 - DNA, 25 bp, Homo sapien
gcatgagactcaaatatctaactcc

SEQ ID NO: 1905183 - DNA, 25 bp, Homo sapien
ggctgccccaggcatagtcctgagc

SEQ ID NO: 1905184 - DNA, 25 bp, Homo sapien
gcatgtgactttgcccttgtccctg

SEQ ID NO: 1905185 - DNA, 25 bp, Homo sapien
tcataagggcaaagacaacatctct

SEQ ID NO: 1905186 - DNA, 25 bp, Homo sapien
ttcacttggttagctcccgctgagc

SEQ ID NO: 1905187 - DNA, 25 bp, Homo sapien
tgctttaacgttctgggccgcctgt

SEQ ID NO: 1905188 - DNA, 25 bp, Homo sapien
gaattgtaaatccaaacaggtgagc

SEQ ID NO: 1905189 - DNA, 25 bp, Homo sapien
agaggtgagtctgagtatggtggtc

SEQ ID NO: 1905190 - DNA, 25 bp, Homo sapien
atggagaaacgaggcagaggtgagt

SEQ ID NO: 1905191 - DNA, 25 bp, Homo sapien
aggtgagtctgagtatggtggtccg

SEQ ID NO: 1905192 - DNA, 25 bp, Homo sapien
gtgagtctgagtatggtggtccggg

SEQ ID NO: 1905193 - DNA, 25 bp, Homo sapien
gacagcccacacgaagctcctattg

SEQ ID NO: 1905194 - DNA, 25 bp, Homo sapien
tctgtgtagcaggtggacagcccac

SEQ ID NO: 1905195 - DNA, 25 bp, Homo sapien
tcacagttgtgtttctagatggcct

SEQ ID NO: 1905196 - DNA, 25 bp, Homo sapien
ccatcagtgtaactccaggcaaagc

SEQ ID NO: 1905197 - DNA, 25 bp, Homo sapien
catgaatgccaatccctgaatatga

SEQ ID NO: 1905198 - DNA, 25 bp, Homo sapien
agaggtcttgggctacaatttccaa

SEQ ID NO: 1905199 - DNA, 25 bp, Homo sapien
gagttagaaggtggctggtgccagc

SEQ ID NO: 1905200 - DNA, 25 bp, Homo sapien
tgccagcgttggcatgaatgccaat

SEQ ID NO: 1905201 - DNA, 25 bp, Homo sapien
ctcattcacaagaaggcaactcctc

SEQ ID NO: 1905202 - DNA, 25 bp, Homo sapien
gaagtttgcccactggttgactcct

SEQ ID NO: 1905203 - DNA, 25 bp, Homo sapien
tggtgtgaagcctctcaagccctgc

SEQ ID NO: 1905204 - DNA, 25 bp, Homo sapien
tctttcaaaactggtgtgaagcctc

SEQ ID NO: 1905205 - DNA, 25 bp, Homo sapien
gcccgagagttcctactgccttggt

SEQ ID NO: 1905206 - DNA, 25 bp, Homo sapien
tcaacctgtcctttggaactttgga

SEQ ID NO: 1905207 - DNA, 25 bp, Homo sapien
tttgtatgggattgcaccacattgc

SEQ ID NO: 1905208 - DNA, 25 bp, Homo sapien
tgaacttttatgttgtgcagatggc

SEQ ID NO: 1905209 - DNA, 25 bp, Homo sapien
gacgatcgtcacatcaaagctcact

SEQ ID NO: 1905210 - DNA, 25 bp, Homo sapien
gtatagctgacggatggagcagtca

SEQ ID NO: 1905211 - DNA, 25 bp, Homo sapien
tctatgagcgcatttgtgatgcccc

SEQ ID NO: 1905212 - DNA, 25 bp, Homo sapien
caagaggcacctatagcttttggct

SEQ ID NO: 1905213 - DNA, 25 bp, Homo sapien
ttgtctgtaaaataagagggctcca

SEQ ID NO: 1905214 - DNA, 25 bp, Homo sapien
tactacagttgtataccaccgtgcc

SEQ ID NO: 1905215 - DNA, 25 bp, Homo sapien
aaggcatataacttgtcctgaggcc

SEQ ID NO: 1905216 - DNA, 25 bp, Homo sapien
gaactctaatgtacgtgcaattgga

SEQ ID NO: 1905217 - DNA, 25 bp, Homo sapien
taggtgggttcgtgccatgcttcca

SEQ ID NO: 1905218 - DNA, 25 bp, Homo sapien
ttctgtaggtgggttcgtgccatgc

SEQ ID NO: 1905219 - DNA, 25 bp, Homo sapien
ggttcgtgccatgcttccattccaa

SEQ ID NO: 1905220 - DNA, 25 bp, Homo sapien
cattccaaacaccaggcccaaggat

SEQ ID NO: 1905221 - DNA, 25 bp, Homo sapien
aaaacctctttgcaaccgagtgtga

SEQ ID NO: 1905222 - DNA, 25 bp, Homo sapien
ggttatgtagtctcaggttgctgca

SEQ ID NO: 1905223 - DNA, 25 bp, Homo sapien
aatttatgtacagtggagcagagac

SEQ ID NO: 1905224 - DNA, 25 bp, Homo sapien
taagacataagcagatagaggatgc

SEQ ID NO: 1905225 - DNA, 25 bp, Homo sapien
tatagcaggtaatccccagaaaagc

SEQ ID NO: 1905226 - DNA, 25 bp, Homo sapien
cacgaacacgctgctatgggaagac

SEQ ID NO: 1905227 - DNA, 25 bp, Homo sapien
gctgcaaagcaaaccgccttaggga

SEQ ID NO: 1905228 - DNA, 25 bp, Homo sapien
caccaaggatgtggatgagtcaaca

SEQ ID NO: 1905229 - DNA, 25 bp, Homo sapien
ttctcggccctgtatgtctatcaag

SEQ ID NO: 1905230 - DNA, 25 bp, Homo sapien
tgacttgccccacgtggatttcagg

SEQ ID NO: 1905231 - DNA, 25 bp, Homo sapien
caaaggaacagagacattcttcgtc

SEQ ID NO: 1905232 - DNA, 25 bp, Homo sapien
taaacacctggtgccctattggtga

SEQ ID NO: 1905233 - DNA, 25 bp, Homo sapien
ctggaagactcagtacccttgggga

SEQ ID NO: 1905234 - DNA, 25 bp, Homo sapien
tggaagactcagtacccttggggag

SEQ ID NO: 1905235 - DNA, 25 bp, Homo sapien
tctggaagactcagtacccttgggg

SEQ ID NO: 1905236 - DNA, 25 bp, Homo sapien
acggtcacctctcggaaaactcttg

SEQ ID NO: 1905237 - DNA, 25 bp, Homo sapien
caattccttttacggtcacctctcg

SEQ ID NO: 1905238 - DNA, 25 bp, Homo sapien
tcacctctcggaaaactcttggctc

SEQ ID NO: 1905239 - DNA, 25 bp, Homo sapien
ggtaatcagaagcatcaattccttt

SEQ ID NO: 1905240 - DNA, 25 bp, Homo sapien
catctgtccactggctgctgctgta

SEQ ID NO: 1905241 - DNA, 25 bp, Homo sapien
tccactggctgctgctgtactccag

SEQ ID NO: 1905242 - DNA, 25 bp, Homo sapien
actggctgctgctgtactccaggtt

SEQ ID NO: 1905243 - DNA, 25 bp, Homo sapien
tcatctgtccactggctgctgctgt

SEQ ID NO: 1905244 - DNA, 25 bp, Homo sapien
aatgctgccgacatcgagcgggaag

SEQ ID NO: 1905245 - DNA, 25 bp, Homo sapien
tcttaaggagagcaccagtagtcag

SEQ ID NO: 1905246 - DNA, 25 bp, Homo sapien
gaagttggacctgacacaagctatc

SEQ ID NO: 1905247 - DNA, 25 bp, Homo sapien
cgtcatggaggtagcataagaccaa

SEQ ID NO: 1905248 - DNA, 25 bp, Homo sapien
catttatctagttctcaacatattc

SEQ ID NO: 1905249 - DNA, 25 bp, Homo sapien
ttttgatgacctagataatgtgtgg

SEQ ID NO: 1905250 - DNA, 25 bp, Homo sapien
ggccaggggcttttgatgacctaga

SEQ ID NO: 1905251 - DNA, 25 bp, Homo sapien
taatcatttatctagttctcaacat

SEQ ID NO: 1905252 - DNA, 25 bp, Homo sapien
tgacacagacagagtatcggtgcct

SEQ ID NO: 1905253 - DNA, 25 bp, Homo sapien
gggactgtgcctggaaatccaaaag

SEQ ID NO: 1905254 - DNA, 25 bp, Homo sapien
tgatccaaacctgcaagttaacggg

SEQ ID NO: 1905255 - DNA, 25 bp, Homo sapien
caggagaatggccaactacttcaga

SEQ ID NO: 1905256 - DNA, 25 bp, Homo sapien
caattttcaagtcacatgtgttctc

SEQ ID NO: 1905257 - DNA, 25 bp, Homo sapien
attttcaagtcacatgtgttctcac

SEQ ID NO: 1905258 - DNA, 25 bp, Homo sapien
gcacaattttcaagtcacatgtgtt

SEQ ID NO: 1905259 - DNA, 25 bp, Homo sapien
cacaattttcaagtcacatgtgttc

SEQ ID NO: 1905260 - DNA, 25 bp, Homo sapien
tcaggatccctgaagtcaatgttga

SEQ ID NO: 1905261 - DNA, 25 bp, Homo sapien
cattggtcacgtagtcatattcccc

SEQ ID NO: 1905262 - DNA, 25 bp, Homo sapien
caatgttgatcacgcgatagttggg

SEQ ID NO: 1905263 - DNA, 25 bp, Homo sapien
tctcatgctcaggaacaagtacttt

SEQ ID NO: 1905264 - DNA, 25 bp, Homo sapien
ctggcaagagaccaagcattctcat

SEQ ID NO: 1905265 - DNA, 25 bp, Homo sapien
aattccatttctatacagtgatgca

SEQ ID NO: 1905266 - DNA, 25 bp, Homo sapien
caggcctaattccatttctatacag

SEQ ID NO: 1905267 - DNA, 25 bp, Homo sapien
atacagtgatgcatgaggtgagtca

SEQ ID NO: 1905268 - DNA, 25 bp, Homo sapien
gatgacaggcctaattccatttcta

SEQ ID NO: 1905269 - DNA, 25 bp, Homo sapien
cagcttgcaacaaatgtgttcatat

SEQ ID NO: 1905270 - DNA, 25 bp, Homo sapien
tcaactgcagttactgggtaaagga

SEQ ID NO: 1905271 - DNA, 25 bp, Homo sapien
tactgggtaaaggatgtgatccaca

SEQ ID NO: 1905272 - DNA, 25 bp, Homo sapien
tgcaacaaatgtgttcatattctta

SEQ ID NO: 1905273 - DNA, 25 bp, Homo sapien
ttattgataacaagacatagcggcc

SEQ ID NO: 1905274 - DNA, 25 bp, Homo sapien
cagagtcggtttactggatcacatc

SEQ ID NO: 1905275 - DNA, 25 bp, Homo sapien
tgtaggtcacagtaccagagtcggt

SEQ ID NO: 1905276 - DNA, 25 bp, Homo sapien
ggatcacatccttcccttattgata

SEQ ID NO: 1905277 - DNA, 25 bp, Homo sapien
tgaacaggagggattcagccagcca

SEQ ID NO: 1905278 - DNA, 25 bp, Homo sapien
gttgatggccttaacagaacactga

SEQ ID NO: 1905279 - DNA, 25 bp, Homo sapien
tgcagggttaggacttgccaaggct

SEQ ID NO: 1905280 - DNA, 25 bp, Homo sapien
cagacttagagtaaagcggaccacc

SEQ ID NO: 1905281 - DNA, 25 bp, Homo sapien
ggtaaggtatacagccccactgcta

SEQ ID NO: 1905282 - DNA, 25 bp, Homo sapien
tgtcagaatgtgaacgtctcccagc

SEQ ID NO: 1905283 - DNA, 25 bp, Homo sapien
cggcagttaattcattggcggatca

SEQ ID NO: 1905284 - DNA, 25 bp, Homo sapien
tctgaggtctaagtgaataccctgg

SEQ ID NO: 1905285 - DNA, 25 bp, Homo sapien
caccagagtggaatcaaggtcgtca

SEQ ID NO: 1905286 - DNA, 25 bp, Homo sapien
tttctataagcagacaaaacctggg

SEQ ID NO: 1905287 - DNA, 25 bp, Homo sapien
caaagctactatcaccagaagtggc

SEQ ID NO: 1905288 - DNA, 25 bp, Homo sapien
ccaggcttcagggagtaattcactc

SEQ ID NO: 1905289 - DNA, 25 bp, Homo sapien
ttttcctgtgtgcttatcagcacgg

SEQ ID NO: 1905290 - DNA, 25 bp, Homo sapien
cggtgaatattatcacataaggcag

SEQ ID NO: 1905291 - DNA, 25 bp, Homo sapien
atccacgtctctagcttggctttct

SEQ ID NO: 1905292 - DNA, 25 bp, Homo sapien
ccacgtctctagcttggctttctga

SEQ ID NO: 1905293 - DNA, 25 bp, Homo sapien
ggggaataaatatggactgtgccaa

SEQ ID NO: 1905294 - DNA, 25 bp, Homo sapien
gtacttggggaataaatatggactg

SEQ ID NO: 1905295 - DNA, 25 bp, Homo sapien
gacacaaggcaagggctaagtactt

SEQ ID NO: 1905296 - DNA, 25 bp, Homo sapien
gcaagggctaagtacttggggaata

SEQ ID NO: 1905297 - DNA, 25 bp, Homo sapien
gacagctggccttgagacatcttga

SEQ ID NO: 1905298 - DNA, 25 bp, Homo sapien
tggagcaagaggtacccaggaagct

SEQ ID NO: 1905299 - DNA, 25 bp, Homo sapien
cgagggaatgcttctgggatcaaaa

SEQ ID NO: 1905300 - DNA, 25 bp, Homo sapien
cagagtaacccatggatatgccttc

SEQ ID NO: 1905301 - DNA, 25 bp, Homo sapien
ctgtccatgcaggaaggcagaggag

SEQ ID NO: 1905302 - DNA, 25 bp, Homo sapien
tgtccatgcaggaaggcagaggagg

SEQ ID NO: 1905303 - DNA, 25 bp, Homo sapien
ccatgcaggaaggcagaggaggtat

SEQ ID NO: 1905304 - DNA, 25 bp, Homo sapien
tccatgcaggaaggcagaggaggta

SEQ ID NO: 1905305 - DNA, 25 bp, Homo sapien
caaaagaatattcactcatgggact

SEQ ID NO: 1905306 - DNA, 25 bp, Homo sapien
taaaggtcaccacataataagaata

SEQ ID NO: 1905307 - DNA, 25 bp, Homo sapien
tacacacatccatgaaacacagtct

SEQ ID NO: 1905308 - DNA, 25 bp, Homo sapien
taagagtcaatctgaataccaatat

SEQ ID NO: 1905309 - DNA, 25 bp, Homo sapien
aaaatatcttctgactgatcggttc

SEQ ID NO: 1905310 - DNA, 25 bp, Homo sapien
tcagctccacccatccatttaggtt

SEQ ID NO: 1905311 - DNA, 25 bp, Homo sapien
cccaagacatggtagtagagctttt

SEQ ID NO: 1905312 - DNA, 25 bp, Homo sapien
agagcttttggtggagattggtaga

SEQ ID NO: 1905313 - DNA, 25 bp, Homo sapien
tgaacttgattgtcacccagtctga

SEQ ID NO: 1905314 - DNA, 25 bp, Homo sapien
tgagccactggcactcagaccatag

SEQ ID NO: 1905315 - DNA, 25 bp, Homo sapien
cactttttccatcctgttgagggta

SEQ ID NO: 1905316 - DNA, 25 bp, Homo sapien
tatgagttgtagaacattcccttcc

SEQ ID NO: 1905317 - DNA, 25 bp, Homo sapien
tggcctcaccctctaaggaatcctg

SEQ ID NO: 1905318 - DNA, 25 bp, Homo sapien
tcggagtgccactgtgccatcgtca

SEQ ID NO: 1905319 - DNA, 25 bp, Homo sapien
tataatactcgctggttctgcaaac

SEQ ID NO: 1905320 - DNA, 25 bp, Homo sapien
tgttggggtccaggaacactctggc

SEQ ID NO: 1905321 - DNA, 25 bp, Homo sapien
ggcaactatacttgggataatcata

SEQ ID NO: 1905322 - DNA, 25 bp, Homo sapien
gaagtggcaactatacttgggataa

SEQ ID NO: 1905323 - DNA, 25 bp, Homo sapien
cttgaagtggcaactatacttggga

SEQ ID NO: 1905324 - DNA, 25 bp, Homo sapien
ttcttgaagtggcaactatacttgg

SEQ ID NO: 1905325 - DNA, 25 bp, Homo sapien
ttgtataaacctctgatgggacact

SEQ ID NO: 1905326 - DNA, 25 bp, Homo sapien
ctttgtataaacctctgatgggaca

SEQ ID NO: 1905327 - DNA, 25 bp, Homo sapien
tgctcaagaaatggcacagtaatct

SEQ ID NO: 1905328 - DNA, 25 bp, Homo sapien
ctgctcaagaaatggcacagtaatc

SEQ ID NO: 1905329 - DNA, 25 bp, Homo sapien
ggtgcccgccaccatgctgggctaa

SEQ ID NO: 1905330 - DNA, 25 bp, Homo sapien
tgcctcagccttccctgggaccaca

SEQ ID NO: 1905331 - DNA, 25 bp, Homo sapien
cagatggggtttcactgtattagcc

SEQ ID NO: 1905332 - DNA, 25 bp, Homo sapien
atgtatttttagtacagatggggtt

SEQ ID NO: 1905333 - DNA, 25 bp, Homo sapien
gaagcctgatatccactaataagtg

SEQ ID NO: 1905334 - DNA, 25 bp, Homo sapien
ctaattggaagcctgatatccacta

SEQ ID NO: 1905335 - DNA, 25 bp, Homo sapien
tgtcatccacgaacctgtcattatc

SEQ ID NO: 1905336 - DNA, 25 bp, Homo sapien
tccactaataagtggcttgtcatcc

SEQ ID NO: 1905337 - DNA, 25 bp, Homo sapien
gaaatcatcaggtccttagagacag

SEQ ID NO: 1905338 - DNA, 25 bp, Homo sapien
caccatcaaaggctgtagaaatcca

SEQ ID NO: 1905339 - DNA, 25 bp, Homo sapien
tttccaagagatgcacaggaacttc

SEQ ID NO: 1905340 - DNA, 25 bp, Homo sapien
tagaaatccaggttatagccgatac

SEQ ID NO: 1905341 - DNA, 25 bp, Homo sapien
gcccatccactactataacccagtg

SEQ ID NO: 1905342 - DNA, 25 bp, Homo sapien
taaagatactcaggtgtttctcact

SEQ ID NO: 1905343 - DNA, 25 bp, Homo sapien
tttctgcccatccactactataacc

SEQ ID NO: 1905344 - DNA, 25 bp, Homo sapien
ttcctaaagatactcaggtgtttct

SEQ ID NO: 1905345 - DNA, 25 bp, Homo sapien
acactggtatatacggtggaaaggg

SEQ ID NO: 1905346 - DNA, 25 bp, Homo sapien
gctctggctaagctcttcactccat

SEQ ID NO: 1905347 - DNA, 25 bp, Homo sapien
atcatgctctggctaagctcttcac

SEQ ID NO: 1905348 - DNA, 25 bp, Homo sapien
ccagagaacactggtatatacggtg

SEQ ID NO: 1905349 - DNA, 25 bp, Homo sapien
caggcgtaagggtcacaaattttat

SEQ ID NO: 1905350 - DNA, 25 bp, Homo sapien
gtctgttcactgtcggggtcttcaa

SEQ ID NO: 1905351 - DNA, 25 bp, Homo sapien
ttttatgaccatgataatcctgtac

SEQ ID NO: 1905352 - DNA, 25 bp, Homo sapien
ggtcttcaagccaggcgtaagggtc

SEQ ID NO: 1905353 - DNA, 25 bp, Homo sapien
tggcaacgtgtctgcccaaattacc

SEQ ID NO: 1905354 - DNA, 25 bp, Homo sapien
ttaccacatgaaccaaagttggcag

SEQ ID NO: 1905355 - DNA, 25 bp, Homo sapien
caagccacccttcatgaaaagaatg

SEQ ID NO: 1905356 - DNA, 25 bp, Homo sapien
aagttggcaggttctcaaaggtgtc

SEQ ID NO: 1905357 - DNA, 25 bp, Homo sapien
ccgggctttccacatctgtccttgt

SEQ ID NO: 1905358 - DNA, 25 bp, Homo sapien
gggctttccacatctgtccttgtct

SEQ ID NO: 1905359 - DNA, 25 bp, Homo sapien
ctttccacatctgtccttgtctgat

SEQ ID NO: 1905360 - DNA, 25 bp, Homo sapien
gctttccacatctgtccttgtctga

SEQ ID NO: 1905361 - DNA, 25 bp, Homo sapien
ggtctcaacgctccaaagctttcag

SEQ ID NO: 1905362 - DNA, 25 bp, Homo sapien
caatggtcgatggtattgcacaaga

SEQ ID NO: 1905363 - DNA, 25 bp, Homo sapien
tatcagagtgtgagtcccctgtgac

SEQ ID NO: 1905364 - DNA, 25 bp, Homo sapien
ctttcagcaggagagtactgagcat

SEQ ID NO: 1905365 - DNA, 25 bp, Homo sapien
gcggtctcgtcgcggtacacgtcgg

SEQ ID NO: 1905366 - DNA, 25 bp, Homo sapien
tctcgtcgcggtacacgtcggggta

SEQ ID NO: 1905367 - DNA, 25 bp, Homo sapien
ggcggtctcgtcgcggtacacgtcg

SEQ ID NO: 1905368 - DNA, 25 bp, Homo sapien
cggtctcgtcgcggtacacgtcggg

SEQ ID NO: 1905369 - DNA, 25 bp, Homo sapien
ctccgggagcggacctgagctagcc

SEQ ID NO: 1905370 - DNA, 25 bp, Homo sapien
agctagccgggctggccgcgaggcg

SEQ ID NO: 1905371 - DNA, 25 bp, Homo sapien
tgagctagccgggctggccgcgagg

SEQ ID NO: 1905372 - DNA, 25 bp, Homo sapien
gggctccgggagcggacctgagcta

SEQ ID NO: 1905373 - DNA, 25 bp, Homo sapien
acggccagagctagcacaaacggac

SEQ ID NO: 1905374 - DNA, 25 bp, Homo sapien
gccagagctagcacaaacggactgg

SEQ ID NO: 1905375 - DNA, 25 bp, Homo sapien
cggctcacggccagagctagcacaa

SEQ ID NO: 1905376 - DNA, 25 bp, Homo sapien
tcacggccagagctagcacaaacgg

SEQ ID NO: 1905377 - DNA, 25 bp, Homo sapien
gcgactctggacttgaagggaagaa

SEQ ID NO: 1905378 - DNA, 25 bp, Homo sapien
gctggaggtggccttatgtccactg

SEQ ID NO: 1905379 - DNA, 25 bp, Homo sapien
cactgcctgcgactctggacttgaa

SEQ ID NO: 1905380 - DNA, 25 bp, Homo sapien
gcggcgaagggagaccttgcctctc

SEQ ID NO: 1905381 - DNA, 25 bp, Homo sapien
gtttagcatccggactatggagatg

SEQ ID NO: 1905382 - DNA, 25 bp, Homo sapien
gaaagaaacacgtctcccttcatcc

SEQ ID NO: 1905383 - DNA, 25 bp, Homo sapien
ggtggtttagcatccggactatgga

SEQ ID NO: 1905384 - DNA, 25 bp, Homo sapien
cgtgaaagaaacacgtctcccttca

SEQ ID NO: 1905385 - DNA, 25 bp, Homo sapien
ggtgttggcaggactacggttgagc

SEQ ID NO: 1905386 - DNA, 25 bp, Homo sapien
gtgttggcaggactacggttgagcc

SEQ ID NO: 1905387 - DNA, 25 bp, Homo sapien
gacaccctttaggttggagacaata

SEQ ID NO: 1905388 - DNA, 25 bp, Homo sapien
tacttaaagccatgctatgggacca

SEQ ID NO: 1905389 - DNA, 25 bp, Homo sapien
ccttggaggcaataggacacccttt

SEQ ID NO: 1905390 - DNA, 25 bp, Homo sapien
tatgggaccaagatccaagaacctg

SEQ ID NO: 1905391 - DNA, 25 bp, Homo sapien
ttgcagattcccgaaagagtgactg

SEQ ID NO: 1905392 - DNA, 25 bp, Homo sapien
ccagttgcagattcccgaaagagtg

SEQ ID NO: 1905393 - DNA, 25 bp, Homo sapien
ctgtgacttgttgtggtccttttcc

SEQ ID NO: 1905394 - DNA, 25 bp, Homo sapien
tcccgaaagagtgactgtgacttgt

SEQ ID NO: 1905395 - DNA, 25 bp, Homo sapien
tattctcttagaacatttggttttg

SEQ ID NO: 1905396 - DNA, 25 bp, Homo sapien
tctgatctgactgccaacaaaaata

SEQ ID NO: 1905397 - DNA, 25 bp, Homo sapien
gttaaaaacagggatgtcagcatgc

SEQ ID NO: 1905398 - DNA, 25 bp, Homo sapien
gctctgatctgactgccaacaaaaa

SEQ ID NO: 1905399 - DNA, 25 bp, Homo sapien
aacagggatgtcagcatgctctgat

SEQ ID NO: 1905400 - DNA, 25 bp, Homo sapien
tcttggctgctctggtacaatgacc

SEQ ID NO: 1905401 - DNA, 25 bp, Homo sapien
gtacaatgacctgatcaaaggccat

SEQ ID NO: 1905402 - DNA, 25 bp, Homo sapien
gctgctctggtacaatgacctgatc

SEQ ID NO: 1905403 - DNA, 25 bp, Homo sapien
tctggtacaatgacctgatcaaagg

SEQ ID NO: 1905404 - DNA, 25 bp, Homo sapien
tagttaggtgcttggtcctgagaaa

SEQ ID NO: 1905405 - DNA, 25 bp, Homo sapien
agttaggtgcttggtcctgagaaaa

SEQ ID NO: 1905406 - DNA, 25 bp, Homo sapien
ttagttaggtgcttggtcctgagaa

SEQ ID NO: 1905407 - DNA, 25 bp, Homo sapien
tgttcccaggagattagtggagaag

SEQ ID NO: 1905408 - DNA, 25 bp, Homo sapien
gcttgttcccaggagattagtggag

SEQ ID NO: 1905409 - DNA, 25 bp, Homo sapien
tcccaggagattagtggagaagact

SEQ ID NO: 1905410 - DNA, 25 bp, Homo sapien
ccaggagattagtggagaagactct

SEQ ID NO: 1905411 - DNA, 25 bp, Homo sapien
ggaaaatttggactgtctctgggaa

SEQ ID NO: 1905412 - DNA, 25 bp, Homo sapien
gctcaggtgatctgaaaggtgtcac

SEQ ID NO: 1905413 - DNA, 25 bp, Homo sapien
tcctaagagtagagcacgtgagcca

SEQ ID NO: 1905414 - DNA, 25 bp, Homo sapien
taggctccttgggacatggttcgaa

SEQ ID NO: 1905415 - DNA, 25 bp, Homo sapien
tactctttgggttaatcaggtccca

SEQ ID NO: 1905416 - DNA, 25 bp, Homo sapien
gtgcgtatctgacaaatggcctcat

SEQ ID NO: 1905417 - DNA, 25 bp, Homo sapien
catagtggacctcgacaatacctga

SEQ ID NO: 1905418 - DNA, 25 bp, Homo sapien
caaacatgccccgactgctttagca

SEQ ID NO: 1905419 - DNA, 25 bp, Homo sapien
tgaaaggcagctggcccaagtccaa

SEQ ID NO: 1905420 - DNA, 25 bp, Homo sapien
catctccacaagttcttaatgatgt

SEQ ID NO: 1905421 - DNA, 25 bp, Homo sapien
acagcatctccacaagttcttaatg

SEQ ID NO: 1905422 - DNA, 25 bp, Homo sapien
ccaagtctggggtttcactgctcag

SEQ ID NO: 1905423 - DNA, 25 bp, Homo sapien
tggaacctgctcaaggacagcacgt

SEQ ID NO: 1905424 - DNA, 25 bp, Homo sapien
taatgcacggtgaagaaagctggtt

SEQ ID NO: 1905425 - DNA, 25 bp, Homo sapien
gaagttagatagcatcaccatggca

SEQ ID NO: 1905426 - DNA, 25 bp, Homo sapien
tggaccacatgccatctgacgaggg

SEQ ID NO: 1905427 - DNA, 25 bp, Homo sapien
gatttctgtgtcagcctaggaccag

SEQ ID NO: 1905428 - DNA, 25 bp, Homo sapien
tgaaccgctgggaaactgacttggt

SEQ ID NO: 1905429 - DNA, 25 bp, Homo sapien
gaaagattacctcggacagtcacaa

SEQ ID NO: 1905430 - DNA, 25 bp, Homo sapien
tctgaggccctggaaataagcgcgt

SEQ ID NO: 1905431 - DNA, 25 bp, Homo sapien
cctccccggagatcctttggcaaat

SEQ ID NO: 1905432 - DNA, 25 bp, Homo sapien
cagcattgtggtcatctaaaccaga

SEQ ID NO: 1905433 - DNA, 25 bp, Homo sapien
ggcagaaagtccaatcgaatacaat

SEQ ID NO: 1905434 - DNA, 25 bp, Homo sapien
aatacaatgggaggccagacttggc

SEQ ID NO: 1905435 - DNA, 25 bp, Homo sapien
ctgttctgtctctcacaaatgcttg

SEQ ID NO: 1905436 - DNA, 25 bp, Homo sapien
acacagcacagtttgcccaatcttt

SEQ ID NO: 1905437 - DNA, 25 bp, Homo sapien
gcacagtttgcccaatctttacatt

SEQ ID NO: 1905438 - DNA, 25 bp, Homo sapien
tgctgttctgtctctcacaaatgct

SEQ ID NO: 1905439 - DNA, 25 bp, Homo sapien
gcacttatgaaataagatgacgtgt

SEQ ID NO: 1905440 - DNA, 25 bp, Homo sapien
tgtcttctacgataagcacttatga

SEQ ID NO: 1905441 - DNA, 25 bp, Homo sapien
gaaatcacagaatgtcctcaccaag

SEQ ID NO: 1905442 - DNA, 25 bp, Homo sapien
tatgtgaagcacatattccgaaatc

SEQ ID NO: 1905443 - DNA, 25 bp, Homo sapien
tctgagactgccaaaggaggattag

SEQ ID NO: 1905444 - DNA, 25 bp, Homo sapien
ttttcatcagtaagagatctgtagg

SEQ ID NO: 1905445 - DNA, 25 bp, Homo sapien
ttcactggcctttgggaagataccg

SEQ ID NO: 1905446 - DNA, 25 bp, Homo sapien
ttaggggaattactggctgaagcca

SEQ ID NO: 1905447 - DNA, 25 bp, Homo sapien
gatgcctgttgttcttatgctgaga

SEQ ID NO: 1905448 - DNA, 25 bp, Homo sapien
cacatgcttgagcaagggcttgaag

SEQ ID NO: 1905449 - DNA, 25 bp, Homo sapien
gtgtgatgcctgttgttcttatgct

SEQ ID NO: 1905450 - DNA, 25 bp, Homo sapien
ggagaatttcagactcactattgtc

SEQ ID NO: 1905451 - DNA, 25 bp, Homo sapien
atggaatattgtttccaggtagtgc

SEQ ID NO: 1905452 - DNA, 25 bp, Homo sapien
tttttgtaccacttaatgcagatta

SEQ ID NO: 1905453 - DNA, 25 bp, Homo sapien
gcagattaatgataaatggtcaaac

SEQ ID NO: 1905454 - DNA, 25 bp, Homo sapien
gccatggaatattgtttccaggtag

SEQ ID NO: 1905455 - DNA, 25 bp, Homo sapien
ttacttataaacagagtcttcaaac

SEQ ID NO: 1905456 - DNA, 25 bp, Homo sapien
catcattaactctgatttcccaaga

SEQ ID NO: 1905457 - DNA, 25 bp, Homo sapien
tcttcaaactttccgggaaatatga

SEQ ID NO: 1905458 - DNA, 25 bp, Homo sapien
tccgggaaatatgaagtggtcatca

SEQ ID NO: 1905459 - DNA, 25 bp, Homo sapien
tctgaacaggttatgccatccatca

SEQ ID NO: 1905460 - DNA, 25 bp, Homo sapien
aacaggttatgccatccatcaaaga

SEQ ID NO: 1905461 - DNA, 25 bp, Homo sapien
gatttctgaacaggttatgccatcc

SEQ ID NO: 1905462 - DNA, 25 bp, Homo sapien
ccctgatttctgaacaggttatgcc

SEQ ID NO: 1905463 - DNA, 25 bp, Homo sapien
tcctggacctgcagacctctttttg

SEQ ID NO: 1905464 - DNA, 25 bp, Homo sapien
ttaagacaatgccatgaggacaggg

SEQ ID NO: 1905465 - DNA, 25 bp, Homo sapien
tcttggagggtttgccacatcctcg

SEQ ID NO: 1905466 - DNA, 25 bp, Homo sapien
ccttgcatgcatgacctgggtccac

SEQ ID NO: 1905467 - DNA, 25 bp, Homo sapien
gcatttttcagccacctcaacacga

SEQ ID NO: 1905468 - DNA, 25 bp, Homo sapien
ggttcttacaggaagcgatctaatt

SEQ ID NO: 1905469 - DNA, 25 bp, Homo sapien
tgttactgtaatcctcaagctcgca

SEQ ID NO: 1905470 - DNA, 25 bp, Homo sapien
agggcagccaatcgaagacggaccc

SEQ ID NO: 1905471 - DNA, 25 bp, Homo sapien
tatctgtctgcagttgggaaattcc

SEQ ID NO: 1905472 - DNA, 25 bp, Homo sapien
gttgggaaattccactagccacttc

SEQ ID NO: 1905473 - DNA, 25 bp, Homo sapien
tagattatctgtctgcagttgggaa

SEQ ID NO: 1905474 - DNA, 25 bp, Homo sapien
cttctagattatctgtctgcagttg

SEQ ID NO: 1905475 - DNA, 25 bp, Homo sapien
gattaaggttgtatcaagaaactca

SEQ ID NO: 1905476 - DNA, 25 bp, Homo sapien
tgaatctgccagaacaacctgtgat

SEQ ID NO: 1905477 - DNA, 25 bp, Homo sapien
gccttcccgggccacatttaagctg

SEQ ID NO: 1905478 - DNA, 25 bp, Homo sapien
aagaccctgagacaaatgtggttaa

SEQ ID NO: 1905479 - DNA, 25 bp, Homo sapien
aaatgtctgtttccggttcacaggg

SEQ ID NO: 1905480 - DNA, 25 bp, Homo sapien
gttggaaagggatacagtaaatgtc

SEQ ID NO: 1905481 - DNA, 25 bp, Homo sapien
gtcaccacatcgtttggacgtctga

SEQ ID NO: 1905482 - DNA, 25 bp, Homo sapien
tctttggaagcgattgagttggaaa

SEQ ID NO: 1905483 - DNA, 25 bp, Homo sapien
tgttgagaaatgcttgttctgtctt

SEQ ID NO: 1905484 - DNA, 25 bp, Homo sapien
tgaatggactatagaatgtacacat

SEQ ID NO: 1905485 - DNA, 25 bp, Homo sapien
gaagctcattttgacgctttatcac

SEQ ID NO: 1905486 - DNA, 25 bp, Homo sapien
caacttggatgaatggactatagaa

SEQ ID NO: 1905487 - DNA, 25 bp, Homo sapien
tctcacaagaaaacaggtaataaac

SEQ ID NO: 1905488 - DNA, 25 bp, Homo sapien
ctgcttcttgttgggttgtgaggtc

SEQ ID NO: 1905489 - DNA, 25 bp, Homo sapien
tcacaagaaaacaggtaataaactc

SEQ ID NO: 1905490 - DNA, 25 bp, Homo sapien
tgcttcttgttgggttgtgaggtca

SEQ ID NO: 1905491 - DNA, 25 bp, Homo sapien
aggcacccagagactagcgacagtg

SEQ ID NO: 1905492 - DNA, 25 bp, Homo sapien
gactagcgacagtgggaagctgttc

SEQ ID NO: 1905493 - DNA, 25 bp, Homo sapien
gacagtgggaagctgttcttgtact

SEQ ID NO: 1905494 - DNA, 25 bp, Homo sapien
ccagagactagcgacagtgggaagc

SEQ ID NO: 1905495 - DNA, 25 bp, Homo sapien
tcttatcaatggaaataaaggacag

SEQ ID NO: 1905496 - DNA, 25 bp, Homo sapien
caatccttgagggtcgatgaaggct

SEQ ID NO: 1905497 - DNA, 25 bp, Homo sapien
aaggcttcatggagccagtgtttcc

SEQ ID NO: 1905498 - DNA, 25 bp, Homo sapien
taggcagatgtagctgttcctttct

SEQ ID NO: 1905499 - DNA, 25 bp, Homo sapien
tcttctgtatggatttctctaggca

SEQ ID NO: 1905500 - DNA, 25 bp, Homo sapien
tcaggtaatatgttaggcacactgc

SEQ ID NO: 1905501 - DNA, 25 bp, Homo sapien
tatcaggtaatatgttaggcacact

SEQ ID NO: 1905502 - DNA, 25 bp, Homo sapien
ccaagagagaaacccgctaatggta

SEQ ID NO: 1905503 - DNA, 25 bp, Homo sapien
aatatcaggtaatatgttaggcaca

SEQ ID NO: 1905504 - DNA, 25 bp, Homo sapien
aaagcttcccctgaaccatgagtca

SEQ ID NO: 1905505 - DNA, 25 bp, Homo sapien
tcactttggagatccgcagagcggg

SEQ ID NO: 1905506 - DNA, 25 bp, Homo sapien
caatgggctcaagcacaagtaccaa

SEQ ID NO: 1905507 - DNA, 25 bp, Homo sapien
gacttgtatccatgaagaggcatcg

SEQ ID NO: 1905508 - DNA, 25 bp, Homo sapien
ggccaaacaatgaccctctgggtgt

SEQ ID NO: 1905509 - DNA, 25 bp, Homo sapien
tgtctatggattctcaattccatgg

SEQ ID NO: 1905510 - DNA, 25 bp, Homo sapien
caattccatggccaaacaatgaccc

SEQ ID NO: 1905511 - DNA, 25 bp, Homo sapien
tctgcagtatgtctatggattctca

SEQ ID NO: 1905512 - DNA, 25 bp, Homo sapien
catcatagcgtctattataccgcat

SEQ ID NO: 1905513 - DNA, 25 bp, Homo sapien
ccatcatagcgtctattataccgca

SEQ ID NO: 1905514 - DNA, 25 bp, Homo sapien
agccatcagatggtaacaattttca

SEQ ID NO: 1905515 - DNA, 25 bp, Homo sapien
gcaatgctcagaatagggcctttat

SEQ ID NO: 1905516 - DNA, 25 bp, Homo sapien
cagtctgagtgtcgcccagacccgt

SEQ ID NO: 1905517 - DNA, 25 bp, Homo sapien
gtgtcgtttgtgaaagctccgccca

SEQ ID NO: 1905518 - DNA, 25 bp, Homo sapien
tgaagacccaggtggttggcacaca

SEQ ID NO: 1905519 - DNA, 25 bp, Homo sapien
ggttggcacacaatcagccaagcct

SEQ ID NO: 1905520 - DNA, 25 bp, Homo sapien
ctgggcaccaatgaagtgattgtct

SEQ ID NO: 1905521 - DNA, 25 bp, Homo sapien
gcaccaatgaagtgattgtctcaaa

SEQ ID NO: 1905522 - DNA, 25 bp, Homo sapien
caaccaaccgtcagctttggaaagg

SEQ ID NO: 1905523 - DNA, 25 bp, Homo sapien
gaacaaccaaccgtcagctttggaa

SEQ ID NO: 1905524 - DNA, 25 bp, Homo sapien
tggaacaaccaaccgtcagctttgg

SEQ ID NO: 1905525 - DNA, 25 bp, Homo sapien
ttcatggaacaaccaaccgtcagct

SEQ ID NO: 1905526 - DNA, 25 bp, Homo sapien
gcgaattctgccttcaaccttcact

SEQ ID NO: 1905527 - DNA, 25 bp, Homo sapien
aagggcagtgccctcatcctccatg

SEQ ID NO: 1905528 - DNA, 25 bp, Homo sapien
atcagggagtgtttctggcgaattc

SEQ ID NO: 1905529 - DNA, 25 bp, Homo sapien
ttcactctcttagaccataaatcac

SEQ ID NO: 1905530 - DNA, 25 bp, Homo sapien
ctggcataaaagtggagagagcaaa

SEQ ID NO: 1905531 - DNA, 25 bp, Homo sapien
ccggaggtgcgtggtcacttgcctt

SEQ ID NO: 1905532 - DNA, 25 bp, Homo sapien
tctctgcccaactaactcagcaaga

SEQ ID NO: 1905533 - DNA, 25 bp, Homo sapien
ccttgaggggcagtgcactctctgc

SEQ ID NO: 1905534 - DNA, 25 bp, Homo sapien
gggctaagagagcagcttaatttgg

SEQ ID NO: 1905535 - DNA, 25 bp, Homo sapien
gatctggcaatactacgggagggtt

SEQ ID NO: 1905536 - DNA, 25 bp, Homo sapien
ccttagtatcgggtgcaactggcac

SEQ ID NO: 1905537 - DNA, 25 bp, Homo sapien
tagatgcaacactgagctgagcctt

SEQ ID NO: 1905538 - DNA, 25 bp, Homo sapien
tcgcccaaggagatctacagaagag

SEQ ID NO: 1905539 - DNA, 25 bp, Homo sapien
ttttctccacgctgcaatgtccttg

SEQ ID NO: 1905540 - DNA, 25 bp, Homo sapien
gagggtcattagaacattgtgccca

SEQ ID NO: 1905541 - DNA, 25 bp, Homo sapien
tgttactctgttgcgtacctttgca

SEQ ID NO: 1905542 - DNA, 25 bp, Homo sapien
tccaggttctactgtcaacccaggc

SEQ ID NO: 1905543 - DNA, 25 bp, Homo sapien
tttaaagactatctgggtgggccac

SEQ ID NO: 1905544 - DNA, 25 bp, Homo sapien
ggtgggccaccattcatactgctct

SEQ ID NO: 1905545 - DNA, 25 bp, Homo sapien
tgaattgtcagaacaccaagagctt

SEQ ID NO: 1905546 - DNA, 25 bp, Homo sapien
aaagaaccaaagaacgtgcagctgg

SEQ ID NO: 1905547 - DNA, 25 bp, Homo sapien
aagacgcgagctggttgcagagcac

SEQ ID NO: 1905548 - DNA, 25 bp, Homo sapien
tcagaggctcggtgaatacagcaac

SEQ ID NO: 1905549 - DNA, 25 bp, Homo sapien
gagcactgatactgttgggtacaaa

SEQ ID NO: 1905550 - DNA, 25 bp, Homo sapien
gggtacaaaaagaggtgctgctgcc

SEQ ID NO: 1905551 - DNA, 25 bp, Homo sapien
tcttcgttgataaacgtcctgttgc

SEQ ID NO: 1905552 - DNA, 25 bp, Homo sapien
tctcacatcttcgttgataaacgtc

SEQ ID NO: 1905553 - DNA, 25 bp, Homo sapien
gttgataaacgtcctgttgcctcct

SEQ ID NO: 1905554 - DNA, 25 bp, Homo sapien
tgggtttctcacatcttcgttgata

SEQ ID NO: 1905555 - DNA, 25 bp, Homo sapien
catgcaacaactagacctgagaagt

SEQ ID NO: 1905556 - DNA, 25 bp, Homo sapien
aacaactagacctgagaagtgtcca

SEQ ID NO: 1905557 - DNA, 25 bp, Homo sapien
tgcaacaactagacctgagaagtgt

SEQ ID NO: 1905558 - DNA, 25 bp, Homo sapien
catctttctgccatcgagacctgcc

SEQ ID NO: 1905559 - DNA, 25 bp, Homo sapien
taaccattcagcatgagcaatacac

SEQ ID NO: 1905560 - DNA, 25 bp, Homo sapien
caatacaccatgacaatttgccaga

SEQ ID NO: 1905561 - DNA, 25 bp, Homo sapien
tctctagtagtttctataccttcct

SEQ ID NO: 1905562 - DNA, 25 bp, Homo sapien
tgccagaatgtttaacttatctcca

SEQ ID NO: 1905563 - DNA, 25 bp, Homo sapien
ttcaccttccactttcttaatatcg

SEQ ID NO: 1905564 - DNA, 25 bp, Homo sapien
tcatttcacttattgggccactttc

SEQ ID NO: 1905565 - DNA, 25 bp, Homo sapien
tatcgctgatcaggccaagtttcat

SEQ ID NO: 1905566 - DNA, 25 bp, Homo sapien
atacaagcagatgtcaacactttca

SEQ ID NO: 1905567 - DNA, 25 bp, Homo sapien
atggtggtaatatacggccttttca

SEQ ID NO: 1905568 - DNA, 25 bp, Homo sapien
catggtggtaatatacggccttttc

SEQ ID NO: 1905569 - DNA, 25 bp, Homo sapien
tgtgcatggtggtaatatacggcct

SEQ ID NO: 1905570 - DNA, 25 bp, Homo sapien
tgcatggtggtaatatacggccttt

SEQ ID NO: 1905571 - DNA, 25 bp, Homo sapien
ggatccgaatggtggccaagtcccg

SEQ ID NO: 1905572 - DNA, 25 bp, Homo sapien
tccggaaaattcaagctgtttgggc

SEQ ID NO: 1905573 - DNA, 25 bp, Homo sapien
gcataagaacgatgagaaccaggag

SEQ ID NO: 1905574 - DNA, 25 bp, Homo sapien
tttcggactttgcaggatccaggcc

SEQ ID NO: 1905575 - DNA, 25 bp, Homo sapien
gcaccaccgccagcctgtattggtt

SEQ ID NO: 1905576 - DNA, 25 bp, Homo sapien
tagcaccaccgccagcctgtattgg

SEQ ID NO: 1905577 - DNA, 25 bp, Homo sapien
cgccagcctgtattggtttaagcca

SEQ ID NO: 1905578 - DNA, 25 bp, Homo sapien
caccgccagcctgtattggtttaag

SEQ ID NO: 1905579 - DNA, 25 bp, Homo sapien
aggaggagcgaccagagcgcttcct

SEQ ID NO: 1905580 - DNA, 25 bp, Homo sapien
ctaaccgcaagcgaagcgaggagga

SEQ ID NO: 1905581 - DNA, 25 bp, Homo sapien
tgggccgcagtccttcctggacgag

SEQ ID NO: 1905582 - DNA, 25 bp, Homo sapien
ttctcctaaccgcaagcgaagcgag

SEQ ID NO: 1905583 - DNA, 25 bp, Homo sapien
tacaataaagagactcactcccaca

SEQ ID NO: 1905584 - DNA, 25 bp, Homo sapien
gtttacaataaagagactcactccc

SEQ ID NO: 1905585 - DNA, 25 bp, Homo sapien
caataaagagactcactcccacatc

SEQ ID NO: 1905586 - DNA, 25 bp, Homo sapien
ataaagagactcactcccacatcct

SEQ ID NO: 1905587 - DNA, 25 bp, Homo sapien
cccacaggttagaggtgagacggaa

SEQ ID NO: 1905588 - DNA, 25 bp, Homo sapien
tgcactcgtactgaactgagtccag

SEQ ID NO: 1905589 - DNA, 25 bp, Homo sapien
agtgataagcgataaggacaggtac

SEQ ID NO: 1905590 - DNA, 25 bp, Homo sapien
tacagacataggaccgctggctggg

SEQ ID NO: 1905591 - DNA, 25 bp, Homo sapien
gtcctcgtcctcccgggagcgcgga

SEQ ID NO: 1905592 - DNA, 25 bp, Homo sapien
tcccgggagcgcggaccctgaacag

SEQ ID NO: 1905593 - DNA, 25 bp, Homo sapien
cgggagcgcggaccctgaacagccc

SEQ ID NO: 1905594 - DNA, 25 bp, Homo sapien
ctcccgggagcgcggaccctgaaca

SEQ ID NO: 1905595 - DNA, 25 bp, Homo sapien
cggctctggattggactgcattcgc

SEQ ID NO: 1905596 - DNA, 25 bp, Homo sapien
cgcatctactgagcggtcgccgaag

SEQ ID NO: 1905597 - DNA, 25 bp, Homo sapien
tgaactctaccaagctcagcgcgta

SEQ ID NO: 1905598 - DNA, 25 bp, Homo sapien
cgcgtacacagctagcggctctgga

SEQ ID NO: 1905599 - DNA, 25 bp, Homo sapien
cagcgcggggatagcttttctatta

SEQ ID NO: 1905600 - DNA, 25 bp, Homo sapien
gtttcttgttctccgagctcgagcc

SEQ ID NO: 1905601 - DNA, 25 bp, Homo sapien
cctacagcgacgcttccgctggaag

SEQ ID NO: 1905602 - DNA, 25 bp, Homo sapien
aaaatacaccactgccaccctacag

SEQ ID NO: 1905603 - DNA, 25 bp, Homo sapien
gacaatgcgagcttttggccagcct

SEQ ID NO: 1905604 - DNA, 25 bp, Homo sapien
gcacttcccggttttgaaagccaga

SEQ ID NO: 1905605 - DNA, 25 bp, Homo sapien
gagatgagtcaagcgcaaaagctcc

SEQ ID NO: 1905606 - DNA, 25 bp, Homo sapien
caaaagctccggagtgacaatgcga

SEQ ID NO: 1905607 - DNA, 25 bp, Homo sapien
tcttttaggtcttcggttcgtgaca

SEQ ID NO: 1905608 - DNA, 25 bp, Homo sapien
ggtcttcggttcgtgacaagtgcat

SEQ ID NO: 1905609 - DNA, 25 bp, Homo sapien
taggtcttcggttcgtgacaagtgc

SEQ ID NO: 1905610 - DNA, 25 bp, Homo sapien
ttaggtcttcggttcgtgacaagtg

SEQ ID NO: 1905611 - DNA, 25 bp, Homo sapien
ggtgtccgattcctctgagcatgga

SEQ ID NO: 1905612 - DNA, 25 bp, Homo sapien
tcacgaaggtgtccgattcctctga

SEQ ID NO: 1905613 - DNA, 25 bp, Homo sapien
ccttctcacgaaggtgtccgattcc

SEQ ID NO: 1905614 - DNA, 25 bp, Homo sapien
cacttccttctcacgaaggtgtccg

SEQ ID NO: 1905615 - DNA, 25 bp, Homo sapien
tgtctaaaatagatgcttggttact

SEQ ID NO: 1905616 - DNA, 25 bp, Homo sapien
ggcagagactagacactggctcttt

SEQ ID NO: 1905617 - DNA, 25 bp, Homo sapien
gacactggctctttatccccgtttc

SEQ ID NO: 1905618 - DNA, 25 bp, Homo sapien
cagggctttcccctgatgctttgtc

SEQ ID NO: 1905619 - DNA, 25 bp, Homo sapien
tctaggaatactcccctttccacaa

SEQ ID NO: 1905620 - DNA, 25 bp, Homo sapien
agactatagtcttcccgcagcggtg

SEQ ID NO: 1905621 - DNA, 25 bp, Homo sapien
aatcacagactatagtcttcccgca

SEQ ID NO: 1905622 - DNA, 25 bp, Homo sapien
ccacaaggttcaaatcacagactat

SEQ ID NO: 1905623 - DNA, 25 bp, Homo sapien
gtggcatctcctcacggttgactct

SEQ ID NO: 1905624 - DNA, 25 bp, Homo sapien
tgaccaaactgaacaatccccattt

SEQ ID NO: 1905625 - DNA, 25 bp, Homo sapien
tcctcacggttgactctgtcagtca

SEQ ID NO: 1905626 - DNA, 25 bp, Homo sapien
catttcaagaccagctgcccagttt

SEQ ID NO: 1905627 - DNA, 25 bp, Homo sapien
tcgtgtgctgttaaagcgatttcct

SEQ ID NO: 1905628 - DNA, 25 bp, Homo sapien
gtcagcttccccctcgtgtgctgtt

SEQ ID NO: 1905629 - DNA, 25 bp, Homo sapien
cccctcgtgtgctgttaaagcgatt

SEQ ID NO: 1905630 - DNA, 25 bp, Homo sapien
ttccccctcgtgtgctgttaaagcg

SEQ ID NO: 1905631 - DNA, 25 bp, Homo sapien
tctgctctggtgctttgaaatctgg

SEQ ID NO: 1905632 - DNA, 25 bp, Homo sapien
tgttctgctctggtgctttgaaatc

SEQ ID NO: 1905633 - DNA, 25 bp, Homo sapien
gtgttctgctctggtgctttgaaat

SEQ ID NO: 1905634 - DNA, 25 bp, Homo sapien
ttctgctctggtgctttgaaatctg

SEQ ID NO: 1905635 - DNA, 25 bp, Homo sapien
gagttcttcccgattttggagtgct

SEQ ID NO: 1905636 - DNA, 25 bp, Homo sapien
tctcttcatccaacgttacttcact

SEQ ID NO: 1905637 - DNA, 25 bp, Homo sapien
gttacttcactatcatactgcccct

SEQ ID NO: 1905638 - DNA, 25 bp, Homo sapien
gattttggagtgctagaaagcttct

SEQ ID NO: 1905639 - DNA, 25 bp, Homo sapien
tgtctctagttgttctcccgcaccg

SEQ ID NO: 1905640 - DNA, 25 bp, Homo sapien
aggtggttggtctccaaggtgatca

SEQ ID NO: 1905641 - DNA, 25 bp, Homo sapien
tgattagcctgatactcaagccgag

SEQ ID NO: 1905642 - DNA, 25 bp, Homo sapien
ccattcaggtaggagaagcagggcc

SEQ ID NO: 1905643 - DNA, 25 bp, Homo sapien
cggcaggaaggagacaaaggctgtg

SEQ ID NO: 1905644 - DNA, 25 bp, Homo sapien
tgtgatcttcctgatagggctgttg

SEQ ID NO: 1905645 - DNA, 25 bp, Homo sapien
atgtgatcttcctgatagggctgtt

SEQ ID NO: 1905646 - DNA, 25 bp, Homo sapien
catgtgatcttcctgatagggctgt

SEQ ID NO: 1905647 - DNA, 25 bp, Homo sapien
ttccaggcggcttgagtggaaaagt

SEQ ID NO: 1905648 - DNA, 25 bp, Homo sapien
ttcatcaccagtgcgagagtcttag

SEQ ID NO: 1905649 - DNA, 25 bp, Homo sapien
ggaaaagtgagtatttcatcaccag

SEQ ID NO: 1905650 - DNA, 25 bp, Homo sapien
tcagaggtcccgaggaagtttccag

SEQ ID NO: 1905651 - DNA, 25 bp, Homo sapien
ctgggatgccatccaaggctcagct

SEQ ID NO: 1905652 - DNA, 25 bp, Homo sapien
agctccgatgacaccttctccacca

SEQ ID NO: 1905653 - DNA, 25 bp, Homo sapien
ccaaggctcagctccgatgacacct

SEQ ID NO: 1905654 - DNA, 25 bp, Homo sapien
tgggatgccatccaaggctcagctc

SEQ ID NO: 1905655 - DNA, 25 bp, Homo sapien
tgttctctcgattgtccgtttctct

SEQ ID NO: 1905656 - DNA, 25 bp, Homo sapien
taaattagattggttccttgttctc

SEQ ID NO: 1905657 - DNA, 25 bp, Homo sapien
gttccttgttctctcgattgtccgt

SEQ ID NO: 1905658 - DNA, 25 bp, Homo sapien
tcgattgtccgtttctctttatttc

SEQ ID NO: 1905659 - DNA, 25 bp, Homo sapien
tcctctctgggtgttgagctgtgga

SEQ ID NO: 1905660 - DNA, 25 bp, Homo sapien
aaggcccaaaagcagttagcctcga

SEQ ID NO: 1905661 - DNA, 25 bp, Homo sapien
gagctgtggacagacgaaatccagg

SEQ ID NO: 1905662 - DNA, 25 bp, Homo sapien
cagttagcctcgatgtctatttggc

SEQ ID NO: 1905663 - DNA, 25 bp, Homo sapien
gatagacttcggattggccatcagc

SEQ ID NO: 1905664 - DNA, 25 bp, Homo sapien
catcagcttgactaccactagccat

SEQ ID NO: 1905665 - DNA, 25 bp, Homo sapien
caggttgtggggatagacttcggat

SEQ ID NO: 1905666 - DNA, 25 bp, Homo sapien
ggccatcagcttgactaccactagc

SEQ ID NO: 1905667 - DNA, 25 bp, Homo sapien
tagttgtaacaatcatggagagaaa

SEQ ID NO: 1905668 - DNA, 25 bp, Homo sapien
gttgtaacaatcatggagagaaagc

SEQ ID NO: 1905669 - DNA, 25 bp, Homo sapien
ttttatagttgtaacaatcatggag

SEQ ID NO: 1905670 - DNA, 25 bp, Homo sapien
tatagttgtaacaatcatggagaga

SEQ ID NO: 1905671 - DNA, 25 bp, Homo sapien
gacgtagcctatgttgtgtacagat

SEQ ID NO: 1905672 - DNA, 25 bp, Homo sapien
gtaggcctttgagcttccctggaag

SEQ ID NO: 1905673 - DNA, 25 bp, Homo sapien
ggaagacgtagcctatgttgtgtac

SEQ ID NO: 1905674 - DNA, 25 bp, Homo sapien
gtgctttgaagggaaccttacgcca

SEQ ID NO: 1905675 - DNA, 25 bp, Homo sapien
gccacaaaggtgcatagttcttgga

SEQ ID NO: 1905676 - DNA, 25 bp, Homo sapien
aaattacactgccaaagaagggatg

SEQ ID NO: 1905677 - DNA, 25 bp, Homo sapien
aacatctcgtttttgctggcaggaa

SEQ ID NO: 1905678 - DNA, 25 bp, Homo sapien
tcttctcagaagtgagccacaaagg

SEQ ID NO: 1905679 - DNA, 25 bp, Homo sapien
aaacatggtgctctaccaggaagga

SEQ ID NO: 1905680 - DNA, 25 bp, Homo sapien
gaaaccgagtaaatgtgctccagca

SEQ ID NO: 1905681 - DNA, 25 bp, Homo sapien
ggtagataggctcaggccacacttt

SEQ ID NO: 1905682 - DNA, 25 bp, Homo sapien
cacttaaattgtgagccaagccatg

SEQ ID NO: 1905683 - DNA, 25 bp, Homo sapien
tcttaggaacacatccgggctcagg

SEQ ID NO: 1905684 - DNA, 25 bp, Homo sapien
tcattcctggaggtgcgttcccaca

SEQ ID NO: 1905685 - DNA, 25 bp, Homo sapien
ggtatggcccgttggacaagtctct

SEQ ID NO: 1905686 - DNA, 25 bp, Homo sapien
cgtgctgagagccaacagattgccc

SEQ ID NO: 1905687 - DNA, 25 bp, Homo sapien
gtgacatttccggtgctttagcaga

SEQ ID NO: 1905688 - DNA, 25 bp, Homo sapien
cagcctcaggccaacagtgttccaa

SEQ ID NO: 1905689 - DNA, 25 bp, Homo sapien
taaagctgagctcattccagatacc

SEQ ID NO: 1905690 - DNA, 25 bp, Homo sapien
ggtgtcaggcgtcagcagttctcca

SEQ ID NO: 1905691 - DNA, 25 bp, Homo sapien
ggtttcagtgactcagcacgaggcc

SEQ ID NO: 1905692 - DNA, 25 bp, Homo sapien
caagacatgtaacctccctgcgtgt

SEQ ID NO: 1905693 - DNA, 25 bp, Homo sapien
tatttcagtgccgtgtggcatccac

SEQ ID NO: 1905694 - DNA, 25 bp, Homo sapien
tagctcttggctcagaactttggga

SEQ ID NO: 1905695 - DNA, 25 bp, Homo sapien
tgtcacactcatgggtgttctctgt

SEQ ID NO: 1905696 - DNA, 25 bp, Homo sapien
cctgagaacctgtgttgtcacactc

SEQ ID NO: 1905697 - DNA, 25 bp, Homo sapien
gagagaaagccggaagattcctcct

SEQ ID NO: 1905698 - DNA, 25 bp, Homo sapien
agaggatttgggaaacgcaggagag

SEQ ID NO: 1905699 - DNA, 25 bp, Homo sapien
gggggacagtgctggaaaccagcac

SEQ ID NO: 1905700 - DNA, 25 bp, Homo sapien
ccagggggacagtgctggaaaccag

SEQ ID NO: 1905701 - DNA, 25 bp, Homo sapien
ctagaaagacaaatgaaaaggcaga

SEQ ID NO: 1905702 - DNA, 25 bp, Homo sapien
aagacaaatgaaaaggcagagccag

SEQ ID NO: 1905703 - DNA, 25 bp, Homo sapien
tgacatcgagaaagacagtagccgt

SEQ ID NO: 1905704 - DNA, 25 bp, Homo sapien
tggaagaggagctttgcagacgccc

SEQ ID NO: 1905705 - DNA, 25 bp, Homo sapien
cagtagccgtgctcatcagcacgtc

SEQ ID NO: 1905706 - DNA, 25 bp, Homo sapien
gacgcccaaatgtcagaccgattca

SEQ ID NO: 1905707 - DNA, 25 bp, Homo sapien
ctcacggaccagctacccaaggagg

SEQ ID NO: 1905708 - DNA, 25 bp, Homo sapien
acactcacggaccagctacccaagg

SEQ ID NO: 1905709 - DNA, 25 bp, Homo sapien
cactcacggaccagctacccaagga

SEQ ID NO: 1905710 - DNA, 25 bp, Homo sapien
actcacggaccagctacccaaggag

SEQ ID NO: 1905711 - DNA, 25 bp, Homo sapien
atgcaccaggccgagctggtgctga

SEQ ID NO: 1905712 - DNA, 25 bp, Homo sapien
aaacacacaggaacgacacgcccag

SEQ ID NO: 1905713 - DNA, 25 bp, Homo sapien
acacacaggaacgacacgcccagag

SEQ ID NO: 1905714 - DNA, 25 bp, Homo sapien
acaggaacgacacgcccagagcgag

SEQ ID NO: 1905715 - DNA, 25 bp, Homo sapien
ggtctgccgagtggggattctagtg

SEQ ID NO: 1905716 - DNA, 25 bp, Homo sapien
ctcttaactttaggggtctgccgag

SEQ ID NO: 1905717 - DNA, 25 bp, Homo sapien
ggattctagtgacaggcacgatggc

SEQ ID NO: 1905718 - DNA, 25 bp, Homo sapien
tggggattctagtgacaggcacgat

SEQ ID NO: 1905719 - DNA, 25 bp, Homo sapien
cactgggaaccacgaatgtgcctga

SEQ ID NO: 1905720 - DNA, 25 bp, Homo sapien
agtcagcactgggaaccacgaatgt

SEQ ID NO: 1905721 - DNA, 25 bp, Homo sapien
tgggaaccacgaatgtgcctgaatc

SEQ ID NO: 1905722 - DNA, 25 bp, Homo sapien
ccacgaatgtgcctgaatcttaact

SEQ ID NO: 1905723 - DNA, 25 bp, Homo sapien
gaagccagtctaggtatcggccaca

SEQ ID NO: 1905724 - DNA, 25 bp, Homo sapien
taaaacctggactggctgattgctg

SEQ ID NO: 1905725 - DNA, 25 bp, Homo sapien
tctgatgactgaatcgggacttccc

SEQ ID NO: 1905726 - DNA, 25 bp, Homo sapien
tccagactggcatatagaatgtgct

SEQ ID NO: 1905727 - DNA, 25 bp, Homo sapien
tcactgactcagtgtgaaacagcgc

SEQ ID NO: 1905728 - DNA, 25 bp, Homo sapien
cttggtcactgactcagtgtgaaac

SEQ ID NO: 1905729 - DNA, 25 bp, Homo sapien
aagtaggcagtgctttgacagcagg

SEQ ID NO: 1905730 - DNA, 25 bp, Homo sapien
gagagaaggtttcctggcccttcac

SEQ ID NO: 1905731 - DNA, 25 bp, Homo sapien
ttgagaaaggatgtcaggcacacag

SEQ ID NO: 1905732 - DNA, 25 bp, Homo sapien
ttacaagtccgtgccaatagacatg

SEQ ID NO: 1905733 - DNA, 25 bp, Homo sapien
tgggtgtgcatgttccttgagaaag

SEQ ID NO: 1905734 - DNA, 25 bp, Homo sapien
agtccgtgccaatagacatgggtgt

SEQ ID NO: 1905735 - DNA, 25 bp, Homo sapien
ccttacagggggcttagcattcccg

SEQ ID NO: 1905736 - DNA, 25 bp, Homo sapien
gcattcccgtaaaaactgactgctc

SEQ ID NO: 1905737 - DNA, 25 bp, Homo sapien
ttccattctgagtgggtaaggatgc

SEQ ID NO: 1905738 - DNA, 25 bp, Homo sapien
ttctgagtgggtaaggatgctgcct

SEQ ID NO: 1905739 - DNA, 25 bp, Homo sapien
gctgagtcaccttgatgtatggccc

SEQ ID NO: 1905740 - DNA, 25 bp, Homo sapien
gccttctccgggtgaggcatgcacc

SEQ ID NO: 1905741 - DNA, 25 bp, Homo sapien
ggtgaggcatgcaccctctgctgag

SEQ ID NO: 1905742 - DNA, 25 bp, Homo sapien
tccgggtgaggcatgcaccctctgc

SEQ ID NO: 1905743 - DNA, 25 bp, Homo sapien
tgacaagtgacagctgcactctgct

SEQ ID NO: 1905744 - DNA, 25 bp, Homo sapien
agtgacagctgcactctgctgagga

SEQ ID NO: 1905745 - DNA, 25 bp, Homo sapien
gacaagtgacagctgcactctgctg

SEQ ID NO: 1905746 - DNA, 25 bp, Homo sapien
caagtgacagctgcactctgctgag

SEQ ID NO: 1905747 - DNA, 25 bp, Homo sapien
ggccctgacccacctaattaatcaa

SEQ ID NO: 1905748 - DNA, 25 bp, Homo sapien
tacggatttcactacaaggttaagc

SEQ ID NO: 1905749 - DNA, 25 bp, Homo sapien
gcacctggctcacataagtgttttg

SEQ ID NO: 1905750 - DNA, 25 bp, Homo sapien
aaaaatctaagacccgcagcttggg

SEQ ID NO: 1905751 - DNA, 25 bp, Homo sapien
tctacagcgtaccttacttggaaaa

SEQ ID NO: 1905752 - DNA, 25 bp, Homo sapien
agatgtgagctttctacagcgtacc

SEQ ID NO: 1905753 - DNA, 25 bp, Homo sapien
tgagctttctacagcgtaccttact

SEQ ID NO: 1905754 - DNA, 25 bp, Homo sapien
acagcgtaccttacttggaaaatat

SEQ ID NO: 1905755 - DNA, 25 bp, Homo sapien
cagtagtactatatctgctcgtaag

SEQ ID NO: 1905756 - DNA, 25 bp, Homo sapien
tgctcgtaagcatgaagaatcaaat

SEQ ID NO: 1905757 - DNA, 25 bp, Homo sapien
gccaaactaatcactttcataggag

SEQ ID NO: 1905758 - DNA, 25 bp, Homo sapien
tacgtcaaagcgtactgacatccct

SEQ ID NO: 1905759 - DNA, 25 bp, Homo sapien
atgattttatcaacaggtaacttgt

SEQ ID NO: 1905760 - DNA, 25 bp, Homo sapien
tatggacagccagctagctcacaag

SEQ ID NO: 1905761 - DNA, 25 bp, Homo sapien
cattgtaggcttgacttacctggga

SEQ ID NO: 1905762 - DNA, 25 bp, Homo sapien
gaaaaggtactgcagtcaagagaca

SEQ ID NO: 1905763 - DNA, 25 bp, Homo sapien
tgaaaaattagacctggagccaatg

SEQ ID NO: 1905764 - DNA, 25 bp, Homo sapien
gagctaaagttcaaccatggtcacc

SEQ ID NO: 1905765 - DNA, 25 bp, Homo sapien
tgatgcaaagtaagaccagcccagt

SEQ ID NO: 1905766 - DNA, 25 bp, Homo sapien
ccggtaagtctttcatgtcacagct

SEQ ID NO: 1905767 - DNA, 25 bp, Homo sapien
tcagaaatacaaatcgagtggcaca

SEQ ID NO: 1905768 - DNA, 25 bp, Homo sapien
aagggtgacatgctctgataaatcc

SEQ ID NO: 1905769 - DNA, 25 bp, Homo sapien
tgattctgttcaggcaaatagttga

SEQ ID NO: 1905770 - DNA, 25 bp, Homo sapien
taaatcccatttaaggatgattctg

SEQ ID NO: 1905771 - DNA, 25 bp, Homo sapien
tctgttcaggcaaatagttgatcct

SEQ ID NO: 1905772 - DNA, 25 bp, Homo sapien
gcagaggtgtttccaacattggctc

SEQ ID NO: 1905773 - DNA, 25 bp, Homo sapien
caacattggctcaattccatgaatc

SEQ ID NO: 1905774 - DNA, 25 bp, Homo sapien
aaaattatccgggtagctcagatgt

SEQ ID NO: 1905775 - DNA, 25 bp, Homo sapien
tgttggctgtgggatgatactaata

SEQ ID NO: 1905776 - DNA, 25 bp, Homo sapien
tgcagtatgtatcacccaaaacaga

SEQ ID NO: 1905777 - DNA, 25 bp, Homo sapien
cctgagggttacaatatattctgat

SEQ ID NO: 1905778 - DNA, 25 bp, Homo sapien
gagaatccttagtgcattaaatgga

SEQ ID NO: 1905779 - DNA, 25 bp, Homo sapien
aacagaaacctgagggttacaatat

SEQ ID NO: 1905780 - DNA, 25 bp, Homo sapien
gagaaaccctcagctatctggaatg

SEQ ID NO: 1905781 - DNA, 25 bp, Homo sapien
gaaagcatagtaccagtactttggg

SEQ ID NO: 1905782 - DNA, 25 bp, Homo sapien
cagttgtgaccatagtgttaatata

SEQ ID NO: 1905783 - DNA, 25 bp, Homo sapien
ttcctcctacttagcactgagtcaa

SEQ ID NO: 1905784 - DNA, 25 bp, Homo sapien
gttgtacaacagaagctggaggaca

SEQ ID NO: 1905785 - DNA, 25 bp, Homo sapien
caaaccctgaataagtagcactgat

SEQ ID NO: 1905786 - DNA, 25 bp, Homo sapien
ccatgttacaaaaggattgctggag

SEQ ID NO: 1905787 - DNA, 25 bp, Homo sapien
aaggcaaaagaccaaccatgttaca

SEQ ID NO: 1905788 - DNA, 25 bp, Homo sapien
gtagaaacccaatatacaacacagg

SEQ ID NO: 1905789 - DNA, 25 bp, Homo sapien
cagtatctgggtcttttacgtctaa

SEQ ID NO: 1905790 - DNA, 25 bp, Homo sapien
gagtagaggatcactaacacgtctc

SEQ ID NO: 1905791 - DNA, 25 bp, Homo sapien
ctgcttgctgatttataacccatga

SEQ ID NO: 1905792 - DNA, 25 bp, Homo sapien
aaaaatagagcgacgagctttctga

SEQ ID NO: 1905793 - DNA, 25 bp, Homo sapien
gctttctgattaccactagcctgaa

SEQ ID NO: 1905794 - DNA, 25 bp, Homo sapien
gcctgaacaattttgttctgtctga

SEQ ID NO: 1905795 - DNA, 25 bp, Homo sapien
atccatcgacatgaaaaaccacagg

SEQ ID NO: 1905796 - DNA, 25 bp, Homo sapien
gagtcattttaactacagctgaaac

SEQ ID NO: 1905797 - DNA, 25 bp, Homo sapien
gcctagcttaccacgttgttataca

SEQ ID NO: 1905798 - DNA, 25 bp, Homo sapien
gctagactgcaatggcgcattccag

SEQ ID NO: 1905799 - DNA, 25 bp, Homo sapien
ctggcacagaagcttagatctctga

SEQ ID NO: 1905800 - DNA, 25 bp, Homo sapien
caaatggcagcatagtaaagtggaa

SEQ ID NO: 1905801 - DNA, 25 bp, Homo sapien
gacgtttggcacaatcatgcaaaaa

SEQ ID NO: 1905802 - DNA, 25 bp, Homo sapien
catgtaggcagattagatactaaac

SEQ ID NO: 1905803 - DNA, 25 bp, Homo sapien
aaacctatttctgcaattaagtggt

SEQ ID NO: 1905804 - DNA, 25 bp, Homo sapien
tttttgaacgaacttgtagattgtc

SEQ ID NO: 1905805 - DNA, 25 bp, Homo sapien
tgaacgaacttgtagattgtcaaag

SEQ ID NO: 1905806 - DNA, 25 bp, Homo sapien
tttgaacgaacttgtagattgtcaa

SEQ ID NO: 1905807 - DNA, 25 bp, Homo sapien
gaacgaacttgtagattgtcaaagc

SEQ ID NO: 1905808 - DNA, 25 bp, Homo sapien
aagacttttcgctgtaagatatgaa

SEQ ID NO: 1905809 - DNA, 25 bp, Homo sapien
aaatattaggtgcttctgtttgaaa

SEQ ID NO: 1905810 - DNA, 25 bp, Homo sapien
cagtcgagtcatcattttgttagtc

SEQ ID NO: 1905811 - DNA, 25 bp, Homo sapien
atatcttcctgaaataacctgttgt

SEQ ID NO: 1905812 - DNA, 25 bp, Homo sapien
agaaatgttttaatgttgctgattg

SEQ ID NO: 1905813 - DNA, 25 bp, Homo sapien
gttttaatgttgctgattgtattac

SEQ ID NO: 1905814 - DNA, 25 bp, Homo sapien
attttacttcagtaacagaaaatga

SEQ ID NO: 1905815 - DNA, 25 bp, Homo sapien
tttacttcagtaacagaaaatgaaa

SEQ ID NO: 1905816 - DNA, 25 bp, Homo sapien
ggacaaacttctttgaggagatctc

SEQ ID NO: 1905817 - DNA, 25 bp, Homo sapien
gaaggacaaacttctttgaggagat

SEQ ID NO: 1905818 - DNA, 25 bp, Homo sapien
tcaatagcagaaggacaaacttctt

SEQ ID NO: 1905819 - DNA, 25 bp, Homo sapien
cttcaggatcaatagcagaaggaca

SEQ ID NO: 1905820 - DNA, 25 bp, Homo sapien
gcagccacaggacgaaacagcttct

SEQ ID NO: 1905821 - DNA, 25 bp, Homo sapien
tgcagccacaggacgaaacagcttc

SEQ ID NO: 1905822 - DNA, 25 bp, Homo sapien
tccaaagttgggtgggacattctaa

SEQ ID NO: 1905823 - DNA, 25 bp, Homo sapien
aaactttatgttggcattaggtgcc

SEQ ID NO: 1905824 - DNA, 25 bp, Homo sapien
aggtgccttttgatacggtgttagc

SEQ ID NO: 1905825 - DNA, 25 bp, Homo sapien
tctaaagataattggctgggaccct

SEQ ID NO: 1905826 - DNA, 25 bp, Homo sapien
tagctaaacgctgtagaatggtaaa

SEQ ID NO: 1905827 - DNA, 25 bp, Homo sapien
aaaatgctcagcaaagtgttgtttc

SEQ ID NO: 1905828 - DNA, 25 bp, Homo sapien
gacaaagccccagtgctattacata

SEQ ID NO: 1905829 - DNA, 25 bp, Homo sapien
tattacatagtgtagctaaacgctg

SEQ ID NO: 1905830 - DNA, 25 bp, Homo sapien
atcaccagggccactagttttagaa

SEQ ID NO: 1905831 - DNA, 25 bp, Homo sapien
catcaccagggccactagttttaga

SEQ ID NO: 1905832 - DNA, 25 bp, Homo sapien
caccagggccactagttttagaaca

SEQ ID NO: 1905833 - DNA, 25 bp, Homo sapien
tcaccagggccactagttttagaac

SEQ ID NO: 1905834 - DNA, 25 bp, Homo sapien
aagaattaaatctagaaaagggatg

SEQ ID NO: 1905835 - DNA, 25 bp, Homo sapien
tcaagaatataattagatttgccta

SEQ ID NO: 1905836 - DNA, 25 bp, Homo sapien
tacaagggttgcttaagtgtatcac

SEQ ID NO: 1905837 - DNA, 25 bp, Homo sapien
taaactataactggaattagcaaag

SEQ ID NO: 1905838 - DNA, 25 bp, Homo sapien
ttagggtagccaagaactcctcatc

SEQ ID NO: 1905839 - DNA, 25 bp, Homo sapien
tgtttgcgagcttttccagaacgct

SEQ ID NO: 1905840 - DNA, 25 bp, Homo sapien
tcactagcttggaacctctggattc

SEQ ID NO: 1905841 - DNA, 25 bp, Homo sapien
agaacgctcgccaccagttagggta

SEQ ID NO: 1905842 - DNA, 25 bp, Homo sapien
tatagatttctgaattagaatctgg

SEQ ID NO: 1905843 - DNA, 25 bp, Homo sapien
gagccaaatcacctagttacctgga

SEQ ID NO: 1905844 - DNA, 25 bp, Homo sapien
gagctattcaccagatatgttccac

SEQ ID NO: 1905845 - DNA, 25 bp, Homo sapien
tacagattataaaatggaggcccag

SEQ ID NO: 1905846 - DNA, 25 bp, Homo sapien
cccagagatgtaaggtgaacgagcc

SEQ ID NO: 1905847 - DNA, 25 bp, Homo sapien
cttgacctctcaaatacaagtgact

SEQ ID NO: 1905848 - DNA, 25 bp, Homo sapien
aaatacaagtgactctcctacctca

SEQ ID NO: 1905849 - DNA, 25 bp, Homo sapien
ttcttacccaaagtataatggcagg

SEQ ID NO: 1905850 - DNA, 25 bp, Homo sapien
ccaatgcctaaggaattcacagtca

SEQ ID NO: 1905851 - DNA, 25 bp, Homo sapien
gcatggcaggcaaatatgtgtgtaa

SEQ ID NO: 1905852 - DNA, 25 bp, Homo sapien
agttgtatcccttgtgcatagcaca

SEQ ID NO: 1905853 - DNA, 25 bp, Homo sapien
ccattttcttctgcaggatattcca

SEQ ID NO: 1905854 - DNA, 25 bp, Homo sapien
tttccgattgatggcccaaaactgg

SEQ ID NO: 1905855 - DNA, 25 bp, Homo sapien
catgagtttccgattgatggcccaa

SEQ ID NO: 1905856 - DNA, 25 bp, Homo sapien
tctgcaggatattccatgagtttcc

SEQ ID NO: 1905857 - DNA, 25 bp, Homo sapien
gactgacatttaagtagtttccgct

SEQ ID NO: 1905858 - DNA, 25 bp, Homo sapien
tttgcatctgggtttttcgcttggc

SEQ ID NO: 1905859 - DNA, 25 bp, Homo sapien
tcagtatattcagagttcagaacat

SEQ ID NO: 1905860 - DNA, 25 bp, Homo sapien
cacttatgaagtgccaactgcagct

SEQ ID NO: 1905861 - DNA, 25 bp, Homo sapien
ctcccatcaatttcactgcattcat

SEQ ID NO: 1905862 - DNA, 25 bp, Homo sapien
gaataagaatggtggtccaagaaca

SEQ ID NO: 1905863 - DNA, 25 bp, Homo sapien
gggaataagaatggtggtccaagaa

SEQ ID NO: 1905864 - DNA, 25 bp, Homo sapien
ctccagccatatcatgtaacggtgg

SEQ ID NO: 1905865 - DNA, 25 bp, Homo sapien
tcatgtaacggtgggaataagaatg

SEQ ID NO: 1905866 - DNA, 25 bp, Homo sapien
taaaactccagctttacagacatca

SEQ ID NO: 1905867 - DNA, 25 bp, Homo sapien
tgtaataaaactccagctttacaga

SEQ ID NO: 1905868 - DNA, 25 bp, Homo sapien
ttcgtatttgtaataaaactccagc

SEQ ID NO: 1905869 - DNA, 25 bp, Homo sapien
tatttgtaataaaactccagcttta

SEQ ID NO: 1905870 - DNA, 25 bp, Homo sapien
tagatggacagtgcagaaggtcttt

SEQ ID NO: 1905871 - DNA, 25 bp, Homo sapien
ccatccagagttgcttgtgatcttt

SEQ ID NO: 1905872 - DNA, 25 bp, Homo sapien
tcattgattacttgacttttatgtt

SEQ ID NO: 1905873 - DNA, 25 bp, Homo sapien
gagcttcaattgcatccttagatgg

SEQ ID NO: 1905874 - DNA, 25 bp, Homo sapien
gtgtggaaattcaatcggcatagca

SEQ ID NO: 1905875 - DNA, 25 bp, Homo sapien
ttagtgtggaaattcaatcggcata

SEQ ID NO: 1905876 - DNA, 25 bp, Homo sapien
cttagtgtggaaattcaatcggcat

SEQ ID NO: 1905877 - DNA, 25 bp, Homo sapien
ttgtgcatcctcagctcaactgaac

SEQ ID NO: 1905878 - DNA, 25 bp, Homo sapien
gataccctgcctagcaagttccaac

SEQ ID NO: 1905879 - DNA, 25 bp, Homo sapien
actccaatttgtgcatcctcagctc

SEQ ID NO: 1905880 - DNA, 25 bp, Homo sapien
gtaccaccgtcaggcaaccgttcca

SEQ ID NO: 1905881 - DNA, 25 bp, Homo sapien
tcagcaccatgttaccaagaggaag

SEQ ID NO: 1905882 - DNA, 25 bp, Homo sapien
tacagagagaaaacgcaaaggtggc

SEQ ID NO: 1905883 - DNA, 25 bp, Homo sapien
tcagcagagttcagcacataagcac

SEQ ID NO: 1905884 - DNA, 25 bp, Homo sapien
taatgtcgctttgcaagcagcatgc

SEQ ID NO: 1905885 - DNA, 25 bp, Homo sapien
tcattgttttggtaaacaaaacata

SEQ ID NO: 1905886 - DNA, 25 bp, Homo sapien
tgagtcactgccctgccgcacaatt

SEQ ID NO: 1905887 - DNA, 25 bp, Homo sapien
caaaacatacatccaaatctatatg

SEQ ID NO: 1905888 - DNA, 25 bp, Homo sapien
cttggtagtctcaccaagtttagga

SEQ ID NO: 1905889 - DNA, 25 bp, Homo sapien
gagctgaacttgatgcaagaagatc

SEQ ID NO: 1905890 - DNA, 25 bp, Homo sapien
ggaagagctgaacttgatgcaagaa

SEQ ID NO: 1905891 - DNA, 25 bp, Homo sapien
gctgaacttgatgcaagaagatcaa

SEQ ID NO: 1905892 - DNA, 25 bp, Homo sapien
gaacttgatgcaagaagatcaaata

SEQ ID NO: 1905893 - DNA, 25 bp, Homo sapien
atttaataattgttgctctgtttac

SEQ ID NO: 1905894 - DNA, 25 bp, Homo sapien
tatttaataattgttgctctgttta

SEQ ID NO: 1905895 - DNA, 25 bp, Homo sapien
ctatttaataattgttgctctgttt

SEQ ID NO: 1905896 - DNA, 25 bp, Homo sapien
tcctttaagtcgccttcccattcca

SEQ ID NO: 1905897 - DNA, 25 bp, Homo sapien
tttgtcagttaccaacgtcaaataa

SEQ ID NO: 1905898 - DNA, 25 bp, Homo sapien
tttcagtggtgtgccttcatattca

SEQ ID NO: 1905899 - DNA, 25 bp, Homo sapien
gtggtgtgccttcatattcaaacca

SEQ ID NO: 1905900 - DNA, 25 bp, Homo sapien
cgtcaaataacttactcttggcaaa

SEQ ID NO: 1905901 - DNA, 25 bp, Homo sapien
tggaaatactgtcagctacaatgga

SEQ ID NO: 1905902 - DNA, 25 bp, Homo sapien
tatctatacagcttaaaagaataca

SEQ ID NO: 1905903 - DNA, 25 bp, Homo sapien
tctcttattcctcatttagccctag

SEQ ID NO: 1905904 - DNA, 25 bp, Homo sapien
ccatgactctgatacaagtgattca

SEQ ID NO: 1905905 - DNA, 25 bp, Homo sapien
gttggaattcgtccaaaccacacat

SEQ ID NO: 1905906 - DNA, 25 bp, Homo sapien
cctgatatagcgtgaaacaagttgg

SEQ ID NO: 1905907 - DNA, 25 bp, Homo sapien
tcagttatctcatcctgatatagcg

SEQ ID NO: 1905908 - DNA, 25 bp, Homo sapien
cgaagcacatctttgtcatctgtca

SEQ ID NO: 1905909 - DNA, 25 bp, Homo sapien
aagcagtacatacaggctaaattct

SEQ ID NO: 1905910 - DNA, 25 bp, Homo sapien
gagttaaagcagtacatacaggcta

SEQ ID NO: 1905911 - DNA, 25 bp, Homo sapien
ttccaggagttaaagcagtacatac

SEQ ID NO: 1905912 - DNA, 25 bp, Homo sapien
caggagttaaagcagtacatacagg

SEQ ID NO: 1905913 - DNA, 25 bp, Homo sapien
ccaggatggactacagtgaaggatc

SEQ ID NO: 1905914 - DNA, 25 bp, Homo sapien
tagttgctcagtccgtaacccttgg

SEQ ID NO: 1905915 - DNA, 25 bp, Homo sapien
ggataaatgcagtcaatggcctact

SEQ ID NO: 1905916 - DNA, 25 bp, Homo sapien
gaatctggtcatttcgcactaccgc

SEQ ID NO: 1905917 - DNA, 25 bp, Homo sapien
tgacgtacacagttggcccttccta

SEQ ID NO: 1905918 - DNA, 25 bp, Homo sapien
catgggttcttcgtccttgtattca

SEQ ID NO: 1905919 - DNA, 25 bp, Homo sapien
tggcacccttctttatcacccgtag

SEQ ID NO: 1905920 - DNA, 25 bp, Homo sapien
agcactttccgccacttgacgtaca

SEQ ID NO: 1905921 - DNA, 25 bp, Homo sapien
gcaacagacatgtaccccaagaggg

SEQ ID NO: 1905922 - DNA, 25 bp, Homo sapien
gtaagcaacagacatgtaccccaag

SEQ ID NO: 1905923 - DNA, 25 bp, Homo sapien
aacagacatgtaccccaagagggac

SEQ ID NO: 1905924 - DNA, 25 bp, Homo sapien
cttagtaagcaacagacatgtaccc

SEQ ID NO: 1905925 - DNA, 25 bp, Homo sapien
gccaactccaccttgcccggaggaa

SEQ ID NO: 1905926 - DNA, 25 bp, Homo sapien
cggaggaaccaccttcacccgccat

SEQ ID NO: 1905927 - DNA, 25 bp, Homo sapien
ctccgggccggcgtctcgccaactc

SEQ ID NO: 1905928 - DNA, 25 bp, Homo sapien
ttcacccgccatcgcggccgggcgg

SEQ ID NO: 1905929 - DNA, 25 bp, Homo sapien
ggcagtacgcttgaactcgcgacca

SEQ ID NO: 1905930 - DNA, 25 bp, Homo sapien
cgtgttctgcctaacccagcaagga

SEQ ID NO: 1905931 - DNA, 25 bp, Homo sapien
tggtatccagcgaatacaaccggca

SEQ ID NO: 1905932 - DNA, 25 bp, Homo sapien
ggaggcccgagtcgctcttgagcat

SEQ ID NO: 1905933 - DNA, 25 bp, Homo sapien
cctccctagagcttgatcgcaacat

SEQ ID NO: 1905934 - DNA, 25 bp, Homo sapien
tgcctccctagagcttgatcgcaac

SEQ ID NO: 1905935 - DNA, 25 bp, Homo sapien
tcaaagcgtagttattggggcttgg

SEQ ID NO: 1905936 - DNA, 25 bp, Homo sapien
cttgcgtcaaagcgtagttattggg

SEQ ID NO: 1905937 - DNA, 25 bp, Homo sapien
tccactgactataacatgaagtttc

SEQ ID NO: 1905938 - DNA, 25 bp, Homo sapien
tcatccactgactataacatgaagt

SEQ ID NO: 1905939 - DNA, 25 bp, Homo sapien
actgactataacatgaagtttctgt

SEQ ID NO: 1905940 - DNA, 25 bp, Homo sapien
tgactataacatgaagtttctgtat

SEQ ID NO: 1905941 - DNA, 25 bp, Homo sapien
cttccagtttggcacagctgtcagt

SEQ ID NO: 1905942 - DNA, 25 bp, Homo sapien
ggtccatgtaaaatgccacgatgct

SEQ ID NO: 1905943 - DNA, 25 bp, Homo sapien
ttccagtttggcacagctgtcagtc

SEQ ID NO: 1905944 - DNA, 25 bp, Homo sapien
aaacgggtccatgtaaaatgccacg

SEQ ID NO: 1905945 - DNA, 25 bp, Homo sapien
gtccatccacaataatggataaatg

SEQ ID NO: 1905946 - DNA, 25 bp, Homo sapien
tcatatcatggaacagtatacaata

SEQ ID NO: 1905947 - DNA, 25 bp, Homo sapien
atatcatggaacagtatacaataat

SEQ ID NO: 1905948 - DNA, 25 bp, Homo sapien
catatcatggaacagtatacaataa

SEQ ID NO: 1905949 - DNA, 25 bp, Homo sapien
ttcacaccccaaccacataaatatg

SEQ ID NO: 1905950 - DNA, 25 bp, Homo sapien
cacatacggaagaattttctaggac

SEQ ID NO: 1905951 - DNA, 25 bp, Homo sapien
tttcacaccccaaccacataaatat

SEQ ID NO: 1905952 - DNA, 25 bp, Homo sapien
aagccacatacggaagaattttcta

SEQ ID NO: 1905953 - DNA, 25 bp, Homo sapien
gagcatcctcattgggcaggcagag

SEQ ID NO: 1905954 - DNA, 25 bp, Homo sapien
gaggaaaagtgtagccagtgtcaag

SEQ ID NO: 1905955 - DNA, 25 bp, Homo sapien
aatcagctcgccttgtttcagttgg

SEQ ID NO: 1905956 - DNA, 25 bp, Homo sapien
ggcagagatctacctctgagtgaag

SEQ ID NO: 1905957 - DNA, 25 bp, Homo sapien
ccaggtctgttaagctttgaagtac

SEQ ID NO: 1905958 - DNA, 25 bp, Homo sapien
tttgtgagtggagtaaaaacttcag

SEQ ID NO: 1905959 - DNA, 25 bp, Homo sapien
cagaggcccagaagtcgtaaccagg

SEQ ID NO: 1905960 - DNA, 25 bp, Homo sapien
gaagtcgtaaccaggtctgttaagc

SEQ ID NO: 1905961 - DNA, 25 bp, Homo sapien
catgaagtgagcggagagtgaggga

SEQ ID NO: 1905962 - DNA, 25 bp, Homo sapien
cacatgaagtgagcggagagtgagg

SEQ ID NO: 1905963 - DNA, 25 bp, Homo sapien
ccacatgaagtgagcggagagtgag

SEQ ID NO: 1905964 - DNA, 25 bp, Homo sapien
tgaagtgagcggagagtgagggagc

SEQ ID NO: 1905965 - DNA, 25 bp, Homo sapien
tgcttcgttcttgcgctccaaattc

SEQ ID NO: 1905966 - DNA, 25 bp, Homo sapien
cactggctagatcacaaaagtggag

SEQ ID NO: 1905967 - DNA, 25 bp, Homo sapien
aattcttgtcattagaggtgctccc

SEQ ID NO: 1905968 - DNA, 25 bp, Homo sapien
acaccacacttgcttcgttcttgcg

SEQ ID NO: 1905969 - DNA, 25 bp, Homo sapien
tctcagtgcgatgaggtttagtccc

SEQ ID NO: 1905970 - DNA, 25 bp, Homo sapien
gatgaggtttagtccccgcgaatct

SEQ ID NO: 1905971 - DNA, 25 bp, Homo sapien
aaagaaggctctcagtgcgatgagg

SEQ ID NO: 1905972 - DNA, 25 bp, Homo sapien
tccccgcgaatctgtgtggctgtgg

SEQ ID NO: 1905973 - DNA, 25 bp, Homo sapien
gtggtgagcaaataagttccctggg

SEQ ID NO: 1905974 - DNA, 25 bp, Homo sapien
aaagggttgtaacgctaacatagtg

SEQ ID NO: 1905975 - DNA, 25 bp, Homo sapien
taacgctaacatagtggtgagcaaa

SEQ ID NO: 1905976 - DNA, 25 bp, Homo sapien
tggggcattcctcctacagccggct

SEQ ID NO: 1905977 - DNA, 25 bp, Homo sapien
gatgtatgattctttgttgacgtct

SEQ ID NO: 1905978 - DNA, 25 bp, Homo sapien
cactgctctcagttttaaagatgta

SEQ ID NO: 1905979 - DNA, 25 bp, Homo sapien
tatgattctttgttgacgtcttcca

SEQ ID NO: 1905980 - DNA, 25 bp, Homo sapien
ctcagttttaaagatgtatgattct

SEQ ID NO: 1905981 - DNA, 25 bp, Homo sapien
caaaggagaattctacaacttttgc

SEQ ID NO: 1905982 - DNA, 25 bp, Homo sapien
tggaatatgtaatttcatttccagc

SEQ ID NO: 1905983 - DNA, 25 bp, Homo sapien
tacaacttttgctggaatatgtaat

SEQ ID NO: 1905984 - DNA, 25 bp, Homo sapien
ctctagcaaaggagaattctacaac

SEQ ID NO: 1905985 - DNA, 25 bp, Homo sapien
ctgctcctacaatctttgagtccag

SEQ ID NO: 1905986 - DNA, 25 bp, Homo sapien
ctacaatctttgagtccaggctttc

SEQ ID NO: 1905987 - DNA, 25 bp, Homo sapien
acaatctttgagtccaggctttcac

SEQ ID NO: 1905988 - DNA, 25 bp, Homo sapien
tcctacaatctttgagtccaggctt

SEQ ID NO: 1905989 - DNA, 25 bp, Homo sapien
tcacatgcctgatgcgtcagctagg

SEQ ID NO: 1905990 - DNA, 25 bp, Homo sapien
catattatctcgtggcctttccctc

SEQ ID NO: 1905991 - DNA, 25 bp, Homo sapien
agttcttgttgtctgttgggttcaa

SEQ ID NO: 1905992 - DNA, 25 bp, Homo sapien
ctagggtggcttgaatagtggcagc

SEQ ID NO: 1905993 - DNA, 25 bp, Homo sapien
tggacaccagggttagagcaatccc

SEQ ID NO: 1905994 - DNA, 25 bp, Homo sapien
ggctaatcctgcacatggtcccaag

SEQ ID NO: 1905995 - DNA, 25 bp, Homo sapien
cattggtcaggactgggccagagaa

SEQ ID NO: 1905996 - DNA, 25 bp, Homo sapien
taagcaagacagttacatatgggca

SEQ ID NO: 1905997 - DNA, 25 bp, Homo sapien
caaattatctacaacgccgtgtagg

SEQ ID NO: 1905998 - DNA, 25 bp, Homo sapien
catgactgtggttccgttctttgca

SEQ ID NO: 1905999 - DNA, 25 bp, Homo sapien
aaatatgtggttcgagactcccagg

SEQ ID NO: 1906000 - DNA, 25 bp, Homo sapien
ggcgcttggttccttacttctagag

SEQ ID NO: 1906001 - DNA, 25 bp, Homo sapien
ggaggctacatccaaggtcgagggg

SEQ ID NO: 1906002 - DNA, 25 bp, Homo sapien
ttctggaggctacatccaaggtcga

SEQ ID NO: 1906003 - DNA, 25 bp, Homo sapien
aattctggaggctacatccaaggtc

SEQ ID NO: 1906004 - DNA, 25 bp, Homo sapien
attctggaggctacatccaaggtcg

SEQ ID NO: 1906005 - DNA, 25 bp, Homo sapien
tagctagagtccgtgctgtgttgga

SEQ ID NO: 1906006 - DNA, 25 bp, Homo sapien
gctagagtccgtgctgtgttggaga

SEQ ID NO: 1906007 - DNA, 25 bp, Homo sapien
agctagagtccgtgctgtgttggag

SEQ ID NO: 1906008 - DNA, 25 bp, Homo sapien
ctagctagagtccgtgctgtgttgg

SEQ ID NO: 1906009 - DNA, 25 bp, Homo sapien
cagtggcttttaagtgctttaaagt

SEQ ID NO: 1906010 - DNA, 25 bp, Homo sapien
caaagttaccgtctcggaagaagag

SEQ ID NO: 1906011 - DNA, 25 bp, Homo sapien
catgtgttcaatcacccataagcag

SEQ ID NO: 1906012 - DNA, 25 bp, Homo sapien
gaatactcctgcctctagtaaaacg

SEQ ID NO: 1906013 - DNA, 25 bp, Homo sapien
taaccgatacagcacaagacatccc

SEQ ID NO: 1906014 - DNA, 25 bp, Homo sapien
caatggcgtgcttcgtgatatctga

SEQ ID NO: 1906015 - DNA, 25 bp, Homo sapien
tgcttggcactatgcgaaaccacca

SEQ ID NO: 1906016 - DNA, 25 bp, Homo sapien
gatatctgagtaccagacgccagag

SEQ ID NO: 1906017 - DNA, 25 bp, Homo sapien
tcagcaggtcatgtttaggtcatca

SEQ ID NO: 1906018 - DNA, 25 bp, Homo sapien
ggcccagtgcagaggtattagaaat

SEQ ID NO: 1906019 - DNA, 25 bp, Homo sapien
taatgttgataccagagaggctaag

SEQ ID NO: 1906020 - DNA, 25 bp, Homo sapien
tagaccaaatcaataggccttggtg

SEQ ID NO: 1906021 - DNA, 25 bp, Homo sapien
caaaaaggacttgagggcttgaagc

SEQ ID NO: 1906022 - DNA, 25 bp, Homo sapien
ctacctgtgtacaacagatgttggg

SEQ ID NO: 1906023 - DNA, 25 bp, Homo sapien
aataggtatggtctacctgtgtaca

SEQ ID NO: 1906024 - DNA, 25 bp, Homo sapien
gttggggtggactacatctatttaa

SEQ ID NO: 1906025 - DNA, 25 bp, Homo sapien
ggtatggtctacctgtgtacaacag

SEQ ID NO: 1906026 - DNA, 25 bp, Homo sapien
taccttgtaacaacagtggaagctg

SEQ ID NO: 1906027 - DNA, 25 bp, Homo sapien
gcccggctagctacaacagttttaa

SEQ ID NO: 1906028 - DNA, 25 bp, Homo sapien
ggtgcacttactagcagaccatgat

SEQ ID NO: 1906029 - DNA, 25 bp, Homo sapien
tctcagactgggagaatggtgccat

SEQ ID NO: 1906030 - DNA, 25 bp, Homo sapien
aatttaatgtcaaagtctggtaaca

SEQ ID NO: 1906031 - DNA, 25 bp, Homo sapien
tgtggacctacaaagcccttacact

SEQ ID NO: 1906032 - DNA, 25 bp, Homo sapien
tagcacaatgggaaagccttaggta

SEQ ID NO: 1906033 - DNA, 25 bp, Homo sapien
ggtagagaactgtttagcatctgag

SEQ ID NO: 1906034 - DNA, 25 bp, Homo sapien
catgggctgccctagaatgtcacaa

SEQ ID NO: 1906035 - DNA, 25 bp, Homo sapien
tgaaaggctcaagaggatgaccagc

SEQ ID NO: 1906036 - DNA, 25 bp, Homo sapien
ccactaaacgaggtgtgaaaggctc

SEQ ID NO: 1906037 - DNA, 25 bp, Homo sapien
caagtcttgatttgaccggagtcaa

SEQ ID NO: 1906038 - DNA, 25 bp, Homo sapien
aaaaaatttgggctcacaggcactc

SEQ ID NO: 1906039 - DNA, 25 bp, Homo sapien
tgctaccaaacgagtgtctaacagg

SEQ ID NO: 1906040 - DNA, 25 bp, Homo sapien
gaactttaagagctgtggtgaccac

SEQ ID NO: 1906041 - DNA, 25 bp, Homo sapien
tgtacattaagacgatcaggcccag

SEQ ID NO: 1906042 - DNA, 25 bp, Homo sapien
tttcctcgtgcgtgtcctctttcca

SEQ ID NO: 1906043 - DNA, 25 bp, Homo sapien
attaattacagtctttcctcgtgcg

SEQ ID NO: 1906044 - DNA, 25 bp, Homo sapien
taaacaacattaattacagtctttc

SEQ ID NO: 1906045 - DNA, 25 bp, Homo sapien
caacattaattacagtctttcctcg

SEQ ID NO: 1906046 - DNA, 25 bp, Homo sapien
ccactccggcattcgaagaccaata

SEQ ID NO: 1906047 - DNA, 25 bp, Homo sapien
tccggcattcgaagaccaatagcat

SEQ ID NO: 1906048 - DNA, 25 bp, Homo sapien
tcctacttagaaccgttcaacagct

SEQ ID NO: 1906049 - DNA, 25 bp, Homo sapien
ttagaaccgttcaacagctcccact

SEQ ID NO: 1906050 - DNA, 25 bp, Homo sapien
gcataagccaactcatacattttac

SEQ ID NO: 1906051 - DNA, 25 bp, Homo sapien
aagccaactcatacattttacgctt

SEQ ID NO: 1906052 - DNA, 25 bp, Homo sapien
gccaactcatacattttacgctttc

SEQ ID NO: 1906053 - DNA, 25 bp, Homo sapien
ggcataagccaactcatacatttta

SEQ ID NO: 1906054 - DNA, 25 bp, Homo sapien
cttcccactgcgcagacacacgagg

SEQ ID NO: 1906055 - DNA, 25 bp, Homo sapien
acacacgaggctcacagccggccag

SEQ ID NO: 1906056 - DNA, 25 bp, Homo sapien
ttataaagcgggcaggctcaacacc

SEQ ID NO: 1906057 - DNA, 25 bp, Homo sapien
gcagcagccctcattcagtcttgga

SEQ ID NO: 1906058 - DNA, 25 bp, Homo sapien
cgcagttccagcactacctcctgga

SEQ ID NO: 1906059 - DNA, 25 bp, Homo sapien
ccagcactacctcctggacaggtat

SEQ ID NO: 1906060 - DNA, 25 bp, Homo sapien
tcctggacaggtatgcccctgacct

SEQ ID NO: 1906061 - DNA, 25 bp, Homo sapien
cctgacctctgtgaaaggttcagta

SEQ ID NO: 1906062 - DNA, 25 bp, Homo sapien
ttgatgatacttcattctcttcttc

SEQ ID NO: 1906063 - DNA, 25 bp, Homo sapien
tcccgcatccaccagttctgcaatg

SEQ ID NO: 1906064 - DNA, 25 bp, Homo sapien
cccgcatccaccagttctgcaatgt

SEQ ID NO: 1906065 - DNA, 25 bp, Homo sapien
ctttcccgcatccaccagttctgca

SEQ ID NO: 1906066 - DNA, 25 bp, Homo sapien
gcatccaccagttctgcaatgtcat

SEQ ID NO: 1906067 - DNA, 25 bp, Homo sapien
taaacatgggccactggccatgaaa

SEQ ID NO: 1906068 - DNA, 25 bp, Homo sapien
ctaaacatgggccactggccatgaa

SEQ ID NO: 1906069 - DNA, 25 bp, Homo sapien
agcaccttggcacaatgactgacag

SEQ ID NO: 1906070 - DNA, 25 bp, Homo sapien
tttctggatgactacaacaaactga

SEQ ID NO: 1906071 - DNA, 25 bp, Homo sapien
attttctggatgactacaacaaact

SEQ ID NO: 1906072 - DNA, 25 bp, Homo sapien
cataaaatctgactaaatgcagatt

SEQ ID NO: 1906073 - DNA, 25 bp, Homo sapien
cactcagtatgatataagctactac

SEQ ID NO: 1906074 - DNA, 25 bp, Homo sapien
gagggtcagccagtaccacagtgct

SEQ ID NO: 1906075 - DNA, 25 bp, Homo sapien
gccattgagcttacactcagtatga

SEQ ID NO: 1906076 - DNA, 25 bp, Homo sapien
cccacaactgcgaggtgagctcaga

SEQ ID NO: 1906077 - DNA, 25 bp, Homo sapien
cagacgctcaagctctgctattagt

SEQ ID NO: 1906078 - DNA, 25 bp, Homo sapien
gatgacaacaggctacgaggtaaag

SEQ ID NO: 1906079 - DNA, 25 bp, Homo sapien
ggtatacaccaacatacctggcaaa

SEQ ID NO: 1906080 - DNA, 25 bp, Homo sapien
cgaggtaaagtagagagcagacgct

SEQ ID NO: 1906081 - DNA, 25 bp, Homo sapien
tacagccctggtaaaagtggccctg

SEQ ID NO: 1906082 - DNA, 25 bp, Homo sapien
gcaatttgggtgagatgtattcagt

SEQ ID NO: 1906083 - DNA, 25 bp, Homo sapien
tcagttttgagctccatacagccct

SEQ ID NO: 1906084 - DNA, 25 bp, Homo sapien
gtaaaagtggccctgtttctgagtc

SEQ ID NO: 1906085 - DNA, 25 bp, Homo sapien
tctgctatgcccaatcggtccatgt

SEQ ID NO: 1906086 - DNA, 25 bp, Homo sapien
aggaaaggagtcaccaaagtcacat

SEQ ID NO: 1906087 - DNA, 25 bp, Homo sapien
gtgactcctgtctgcaacatgccat

SEQ ID NO: 1906088 - DNA, 25 bp, Homo sapien
taatgcctttgaacctacagtgact

SEQ ID NO: 1906089 - DNA, 25 bp, Homo sapien
ccactcccagtgtgaacattgttct

SEQ ID NO: 1906090 - DNA, 25 bp, Homo sapien
tcagacctgcataatcaactgtcct

SEQ ID NO: 1906091 - DNA, 25 bp, Homo sapien
ttcccactcccagtgtgaacattgt

SEQ ID NO: 1906092 - DNA, 25 bp, Homo sapien
gacctgcataatcaactgtccttgt

SEQ ID NO: 1906093 - DNA, 25 bp, Homo sapien
agcaaactgctgtcacatgagcatc

SEQ ID NO: 1906094 - DNA, 25 bp, Homo sapien
ggagcaaactgctgtcacatgagca

SEQ ID NO: 1906095 - DNA, 25 bp, Homo sapien
ctgcaccaagcttccttacaagttc

SEQ ID NO: 1906096 - DNA, 25 bp, Homo sapien
tctgcaccaagcttccttacaagtt

SEQ ID NO: 1906097 - DNA, 25 bp, Homo sapien
caggctggtcctgaatcgctgagct

SEQ ID NO: 1906098 - DNA, 25 bp, Homo sapien
gtgcccagcctatctttttgtttct

SEQ ID NO: 1906099 - DNA, 25 bp, Homo sapien
ctggtcctgaatcgctgagctcaag

SEQ ID NO: 1906100 - DNA, 25 bp, Homo sapien
ggctggtcctgaatcgctgagctca

SEQ ID NO: 1906101 - DNA, 25 bp, Homo sapien
caacactcggttgtggtattcatcc

SEQ ID NO: 1906102 - DNA, 25 bp, Homo sapien
gaacgatataggatgtacttttgca

SEQ ID NO: 1906103 - DNA, 25 bp, Homo sapien
aaacaccactgcttagtttcacttg

SEQ ID NO: 1906104 - DNA, 25 bp, Homo sapien
taatagctttgtatgggatttaacc

SEQ ID NO: 1906105 - DNA, 25 bp, Homo sapien
caactccgcctgaagcgcctaagat

SEQ ID NO: 1906106 - DNA, 25 bp, Homo sapien
gcctgaagcgcctaagattagaaca

SEQ ID NO: 1906107 - DNA, 25 bp, Homo sapien
aaaagtaccaactccgcctgaagcg

SEQ ID NO: 1906108 - DNA, 25 bp, Homo sapien
gtatagcaaaagtaccaactccgcc

SEQ ID NO: 1906109 - DNA, 25 bp, Homo sapien
tatatggccttcaaaattgccccag

SEQ ID NO: 1906110 - DNA, 25 bp, Homo sapien
aagtgtcttagcataatacgccagg

SEQ ID NO: 1906111 - DNA, 25 bp, Homo sapien
ccagggctgggtatctagagtcacg

SEQ ID NO: 1906112 - DNA, 25 bp, Homo sapien
aggtttcaactctctctctaatgga

SEQ ID NO: 1906113 - DNA, 25 bp, Homo sapien
tgatactcagctgctgcagaaaagt

SEQ ID NO: 1906114 - DNA, 25 bp, Homo sapien
tcactgatactcagctgctgcagaa

SEQ ID NO: 1906115 - DNA, 25 bp, Homo sapien
actgatactcagctgctgcagaaaa

SEQ ID NO: 1906116 - DNA, 25 bp, Homo sapien
gatactcagctgctgcagaaaagta

SEQ ID NO: 1906117 - DNA, 25 bp, Homo sapien
tggcaaagaggcagcttgagtatga

SEQ ID NO: 1906118 - DNA, 25 bp, Homo sapien
aactttgtttatagcagaccaggct

SEQ ID NO: 1906119 - DNA, 25 bp, Homo sapien
tagcagaccaggctgtgagagccac

SEQ ID NO: 1906120 - DNA, 25 bp, Homo sapien
tgtttatagcagaccaggctgtgag

SEQ ID NO: 1906121 - DNA, 25 bp, Homo sapien
cacatttaccttcacaggaatccag

SEQ ID NO: 1906122 - DNA, 25 bp, Homo sapien
tgaacacaattaagcacatttacct

SEQ ID NO: 1906123 - DNA, 25 bp, Homo sapien
tagtaacttgaacacaacaaggatg

SEQ ID NO: 1906124 - DNA, 25 bp, Homo sapien
tgacttgcaaacctatgaacacaat

SEQ ID NO: 1906125 - DNA, 25 bp, Homo sapien
attcccactgactacaacaaactct

SEQ ID NO: 1906126 - DNA, 25 bp, Homo sapien
cattcccactgactacaacaaactc

SEQ ID NO: 1906127 - DNA, 25 bp, Homo sapien
ttcccactgactacaacaaactctg

SEQ ID NO: 1906128 - DNA, 25 bp, Homo sapien
aaggatcacgcttcatatttaaagc

SEQ ID NO: 1906129 - DNA, 25 bp, Homo sapien
gaagtatttcacatcaagcccacat

SEQ ID NO: 1906130 - DNA, 25 bp, Homo sapien
gattttcacgtgtaaaggatcacgc

SEQ ID NO: 1906131 - DNA, 25 bp, Homo sapien
cgccagagacatcccgacccagagt

SEQ ID NO: 1906132 - DNA, 25 bp, Homo sapien
catttggatagtgtatgataggcat

SEQ ID NO: 1906133 - DNA, 25 bp, Homo sapien
ttcatttggatagtgtatgataggc

SEQ ID NO: 1906134 - DNA, 25 bp, Homo sapien
tttggatagtgtatgataggcatca

SEQ ID NO: 1906135 - DNA, 25 bp, Homo sapien
gatagtgtatgataggcatcatcat

SEQ ID NO: 1906136 - DNA, 25 bp, Homo sapien
tctgagtgaatcgaagcacttcatt

SEQ ID NO: 1906137 - DNA, 25 bp, Homo sapien
tgagtgaatcgaagcacttcattct

SEQ ID NO: 1906138 - DNA, 25 bp, Homo sapien
gttctgagtgaatcgaagcacttca

SEQ ID NO: 1906139 - DNA, 25 bp, Homo sapien
gtgaatcgaagcacttcattcttcc

SEQ ID NO: 1906140 - DNA, 25 bp, Homo sapien
ctccagaagcaaaccgcagtgcatg

SEQ ID NO: 1906141 - DNA, 25 bp, Homo sapien
agaagcaaaccgcagtgcatgcatt

SEQ ID NO: 1906142 - DNA, 25 bp, Homo sapien
gcaaaccgcagtgcatgcatttctt

SEQ ID NO: 1906143 - DNA, 25 bp, Homo sapien
tccagaagcaaaccgcagtgcatgc

SEQ ID NO: 1906144 - DNA, 25 bp, Homo sapien
gaagctaatctaatggagaaactga

SEQ ID NO: 1906145 - DNA, 25 bp, Homo sapien
caaaattaagcatgcaaaacggagc

SEQ ID NO: 1906146 - DNA, 25 bp, Homo sapien
tcaaattctgccaaaccacgggcta

SEQ ID NO: 1906147 - DNA, 25 bp, Homo sapien
cggagcattcgaaaatgaagctaat

SEQ ID NO: 1906148 - DNA, 25 bp, Homo sapien
tatgaaatgctcgaattaacgttcc

SEQ ID NO: 1906149 - DNA, 25 bp, Homo sapien
cattaaaaagcaggtgcgcaaaccc

SEQ ID NO: 1906150 - DNA, 25 bp, Homo sapien
taacgttccagtcagtattctgtcc

SEQ ID NO: 1906151 - DNA, 25 bp, Homo sapien
agaatcgaacgcttgccgactgccg

SEQ ID NO: 1906152 - DNA, 25 bp, Homo sapien
cgattcttcgggtgtactcgccgta

SEQ ID NO: 1906153 - DNA, 25 bp, Homo sapien
tttgctctggtgtaggtcgggatcc

SEQ ID NO: 1906154 - DNA, 25 bp, Homo sapien
tcgccgtacccattcaggagttagg

SEQ ID NO: 1906155 - DNA, 25 bp, Homo sapien
gaaatctctgcaccgcggatctgta

SEQ ID NO: 1906156 - DNA, 25 bp, Homo sapien
aatggcacaactattatctcatttg

SEQ ID NO: 1906157 - DNA, 25 bp, Homo sapien
tccaataaatcactaagccctcttc

SEQ ID NO: 1906158 - DNA, 25 bp, Homo sapien
taatggcacaactattatctcattt

SEQ ID NO: 1906159 - DNA, 25 bp, Homo sapien
cactaagccctcttcattctatctt

SEQ ID NO: 1906160 - DNA, 25 bp, Homo sapien
ccctggtgaattcgatggatgtgcc

SEQ ID NO: 1906161 - DNA, 25 bp, Homo sapien
tatggcttagtttcccgtcatggtc

SEQ ID NO: 1906162 - DNA, 25 bp, Homo sapien
tggatgtgccaggaatcttaaccag

SEQ ID NO: 1906163 - DNA, 25 bp, Homo sapien
tcagatacaggaggatcgaccagaa

SEQ ID NO: 1906164 - DNA, 25 bp, Homo sapien
cagaataatgaagtttcacaacctc

SEQ ID NO: 1906165 - DNA, 25 bp, Homo sapien
cagtagcaattgagtaatgaataca

SEQ ID NO: 1906166 - DNA, 25 bp, Homo sapien
tggtaattgtttgttgtgggagact

SEQ ID NO: 1906167 - DNA, 25 bp, Homo sapien
ttaggaagataagttaccctgcaga

SEQ ID NO: 1906168 - DNA, 25 bp, Homo sapien
taagaatcttaatggtgcctcctca

SEQ ID NO: 1906169 - DNA, 25 bp, Homo sapien
cctgggctatacctatccgtaaaat

SEQ ID NO: 1906170 - DNA, 25 bp, Homo sapien
cttttagagtggcaacacagtggaa

SEQ ID NO: 1906171 - DNA, 25 bp, Homo sapien
aatactgcatagtctaccgctgtct

SEQ ID NO: 1906172 - DNA, 25 bp, Homo sapien
gaagtctataaatactgcattcaga

SEQ ID NO: 1906173 - DNA, 25 bp, Homo sapien
tagaagtctataaatactgcattca

SEQ ID NO: 1906174 - DNA, 25 bp, Homo sapien
ccttagaagtctataaatactgcat

SEQ ID NO: 1906175 - DNA, 25 bp, Homo sapien
aaccttagaagtctataaatactgc

SEQ ID NO: 1906176 - DNA, 25 bp, Homo sapien
atttcttccttcagagagattagaa

SEQ ID NO: 1906177 - DNA, 25 bp, Homo sapien
cttccttcagagagattagaagacc

SEQ ID NO: 1906178 - DNA, 25 bp, Homo sapien
ccttcagagagattagaagacctac

SEQ ID NO: 1906179 - DNA, 25 bp, Homo sapien
ttaagctatcaggaaatttcttcct

SEQ ID NO: 1906180 - DNA, 25 bp, Homo sapien
tacagaagatatgtctcccagagcc

SEQ ID NO: 1906181 - DNA, 25 bp, Homo sapien
atacagaagatatgtctcccagagc

SEQ ID NO: 1906182 - DNA, 25 bp, Homo sapien
cgtgaaacatagagttccagtaacc

SEQ ID NO: 1906183 - DNA, 25 bp, Homo sapien
gtttctcctggacgtgaaacataga

SEQ ID NO: 1906184 - DNA, 25 bp, Homo sapien
tgaaggcaccatagagatgtttggt

SEQ ID NO: 1906185 - DNA, 25 bp, Homo sapien
catagagatgtttggtgattagaat

SEQ ID NO: 1906186 - DNA, 25 bp, Homo sapien
caccatagagatgtttggtgattag

SEQ ID NO: 1906187 - DNA, 25 bp, Homo sapien
aaggcaccatagagatgtttggtga

SEQ ID NO: 1906188 - DNA, 25 bp, Homo sapien
ctactttgattgggatgcatgtgag

SEQ ID NO: 1906189 - DNA, 25 bp, Homo sapien
ttgattgggatgcatgtgagatgac

SEQ ID NO: 1906190 - DNA, 25 bp, Homo sapien
tactttgattgggatgcatgtgaga

SEQ ID NO: 1906191 - DNA, 25 bp, Homo sapien
tctccattgccatgaaaagatttct

SEQ ID NO: 1906192 - DNA, 25 bp, Homo sapien
gtactaacttggatgggtttctctc

SEQ ID NO: 1906193 - DNA, 25 bp, Homo sapien
caagctttcatttgtactaacttgg

SEQ ID NO: 1906194 - DNA, 25 bp, Homo sapien
tagggtcgcctccaaaagatcctgt

SEQ ID NO: 1906195 - DNA, 25 bp, Homo sapien
tttgacaagaatagtaagacactgg

SEQ ID NO: 1906196 - DNA, 25 bp, Homo sapien
gaagctttcgcaaatgttcacagcc

SEQ ID NO: 1906197 - DNA, 25 bp, Homo sapien
aagacactggttgtttagtcagtga

SEQ ID NO: 1906198 - DNA, 25 bp, Homo sapien
cagtgattcgtgaagctttcgcaaa

SEQ ID NO: 1906199 - DNA, 25 bp, Homo sapien
tttgaccttcctaactgtggcatag

SEQ ID NO: 1906200 - DNA, 25 bp, Homo sapien
ggcatagcattcaaatgggacagca

SEQ ID NO: 1906201 - DNA, 25 bp, Homo sapien
gacagcaggggaatctttattcact

SEQ ID NO: 1906202 - DNA, 25 bp, Homo sapien
ggtggccatataatcaaactttttg

SEQ ID NO: 1906203 - DNA, 25 bp, Homo sapien
cctcaagagtctgtctggtggctgg

SEQ ID NO: 1906204 - DNA, 25 bp, Homo sapien
tctggtggctggctcgcagctagct

SEQ ID NO: 1906205 - DNA, 25 bp, Homo sapien
ttaaatcataggttcagagtcttcc

SEQ ID NO: 1906206 - DNA, 25 bp, Homo sapien
ggctcgcagctagcttctgcacaat

SEQ ID NO: 1906207 - DNA, 25 bp, Homo sapien
ctgcccagagccacccttgacagga

SEQ ID NO: 1906208 - DNA, 25 bp, Homo sapien
acaggagactcagggagaagtgccc

SEQ ID NO: 1906209 - DNA, 25 bp, Homo sapien
ccagagccacccttgacaggagact

SEQ ID NO: 1906210 - DNA, 25 bp, Homo sapien
ccaggaccaaagtaagtagtgccat

SEQ ID NO: 1906211 - DNA, 25 bp, Homo sapien
tctggggccgttgcccattttctcc

SEQ ID NO: 1906212 - DNA, 25 bp, Homo sapien
ttctggggccgttgcccattttctc

SEQ ID NO: 1906213 - DNA, 25 bp, Homo sapien
ccatcatggatggatagccagttcc

SEQ ID NO: 1906214 - DNA, 25 bp, Homo sapien
tactaaaggatgatgccaagccacc

SEQ ID NO: 1906215 - DNA, 25 bp, Homo sapien
taaattcatctcagctaccaaccag

SEQ ID NO: 1906216 - DNA, 25 bp, Homo sapien
caaccagcagtgcaaccttggataa

SEQ ID NO: 1906217 - DNA, 25 bp, Homo sapien
ttaaggaagcctccatgattcctgc

SEQ ID NO: 1906218 - DNA, 25 bp, Homo sapien
cattctcactttcgggtgatgcttt

SEQ ID NO: 1906219 - DNA, 25 bp, Homo sapien
gatgctttccctgtaagtgtgggac

SEQ ID NO: 1906220 - DNA, 25 bp, Homo sapien
ctgttgcagacagacggttaaggaa

SEQ ID NO: 1906221 - DNA, 25 bp, Homo sapien
ttccaggtggattgtagatctaaat

SEQ ID NO: 1906222 - DNA, 25 bp, Homo sapien
aattccaggtggattgtagatctaa

SEQ ID NO: 1906223 - DNA, 25 bp, Homo sapien
caaaaatcaattccaggtggattgt

SEQ ID NO: 1906224 - DNA, 25 bp, Homo sapien
aaatcaattccaggtggattgtaga

SEQ ID NO: 1906225 - DNA, 25 bp, Homo sapien
cactggtgtcttaattctggctgcc

SEQ ID NO: 1906226 - DNA, 25 bp, Homo sapien
tacatccttaggagcaggcaaagat

SEQ ID NO: 1906227 - DNA, 25 bp, Homo sapien
gcagaagtagtaaggatgtccccaa

SEQ ID NO: 1906228 - DNA, 25 bp, Homo sapien
ttcaagaccaaagtgccagtaaggc

SEQ ID NO: 1906229 - DNA, 25 bp, Homo sapien
tgtactataaaagtgcctggcccca

SEQ ID NO: 1906230 - DNA, 25 bp, Homo sapien
ggtggtggcaataacgtaggcatct

SEQ ID NO: 1906231 - DNA, 25 bp, Homo sapien
ccagagagcccttgaggctacaagc

SEQ ID NO: 1906232 - DNA, 25 bp, Homo sapien
aataacgtaggcatctgtcaggccc

SEQ ID NO: 1906233 - DNA, 25 bp, Homo sapien
ggttgggcaatgtgtggataatgca

SEQ ID NO: 1906234 - DNA, 25 bp, Homo sapien
tgtgtggataatgcaggactgccaa

SEQ ID NO: 1906235 - DNA, 25 bp, Homo sapien
tggataatgcaggactgccaagggc

SEQ ID NO: 1906236 - DNA, 25 bp, Homo sapien
ggcaatgtgtggataatgcaggact

SEQ ID NO: 1906237 - DNA, 25 bp, Homo sapien
tgcatatacacacggcatggaatac

SEQ ID NO: 1906238 - DNA, 25 bp, Homo sapien
agacatactcactcaaaagtttgtt

SEQ ID NO: 1906239 - DNA, 25 bp, Homo sapien
gtggtgcatatacacacggcatgga

SEQ ID NO: 1906240 - DNA, 25 bp, Homo sapien
gccataaagacatactcactcaaaa

SEQ ID NO: 1906241 - DNA, 25 bp, Homo sapien
acccaggcccttgttatctattcca

SEQ ID NO: 1906242 - DNA, 25 bp, Homo sapien
taacaggtcttgatgcttccaatca

SEQ ID NO: 1906243 - DNA, 25 bp, Homo sapien
tgatgagtgcgttgatctgtttagc

SEQ ID NO: 1906244 - DNA, 25 bp, Homo sapien
tggctgaagtgcttgtctatccctt

SEQ ID NO: 1906245 - DNA, 25 bp, Homo sapien
tgtaagaccaggtaaaatgttacca

SEQ ID NO: 1906246 - DNA, 25 bp, Homo sapien
aacttggtccagttctgctcagctg

SEQ ID NO: 1906247 - DNA, 25 bp, Homo sapien
ctgataggcgaacttcaattgtaag

SEQ ID NO: 1906248 - DNA, 25 bp, Homo sapien
tgttaccagtaaatagctctcagct

SEQ ID NO: 1906249 - DNA, 25 bp, Homo sapien
ggcaccaggataagtccagaaagga

SEQ ID NO: 1906250 - DNA, 25 bp, Homo sapien
tctcagtggcaccaggataagtcca

SEQ ID NO: 1906251 - DNA, 25 bp, Homo sapien
cagtggcaccaggataagtccagaa

SEQ ID NO: 1906252 - DNA, 25 bp, Homo sapien
agtctcagtggcaccaggataagtc

SEQ ID NO: 1906253 - DNA, 25 bp, Homo sapien
gtttgatcatcagtcctttcattgc

SEQ ID NO: 1906254 - DNA, 25 bp, Homo sapien
tgtatagatgaagatcgacaaaaat

SEQ ID NO: 1906255 - DNA, 25 bp, Homo sapien
agaaatgtagcttggtccctgtttg

SEQ ID NO: 1906256 - DNA, 25 bp, Homo sapien
tttgttgtatagatgaagatcgaca

SEQ ID NO: 1906257 - DNA, 25 bp, Homo sapien
ctttagtcatgcatggggagtgtag

SEQ ID NO: 1906258 - DNA, 25 bp, Homo sapien
cctgcaaatgagactgacaaaaggc

SEQ ID NO: 1906259 - DNA, 25 bp, Homo sapien
gcctgcaaatgagactgacaaaagg

SEQ ID NO: 1906260 - DNA, 25 bp, Homo sapien
cttgctgactcctcctactctttag

SEQ ID NO: 1906261 - DNA, 25 bp, Homo sapien
gcattggcattctcaagctctctaa

SEQ ID NO: 1906262 - DNA, 25 bp, Homo sapien
taatagccttacagccttatacagc

SEQ ID NO: 1906263 - DNA, 25 bp, Homo sapien
caactgcgatgtcacttgttcacag

SEQ ID NO: 1906264 - DNA, 25 bp, Homo sapien
gtaaattgtctgaatatgacaccca

SEQ ID NO: 1906265 - DNA, 25 bp, Homo sapien
tttagtataggtgctaccacagtga

SEQ ID NO: 1906266 - DNA, 25 bp, Homo sapien
tagtataggtgctaccacagtgaga

SEQ ID NO: 1906267 - DNA, 25 bp, Homo sapien
gtataggtgctaccacagtgagaac

SEQ ID NO: 1906268 - DNA, 25 bp, Homo sapien
gttttagtataggtgctaccacagt

SEQ ID NO: 1906269 - DNA, 25 bp, Homo sapien
aggaactgtgacagccttcagggag

SEQ ID NO: 1906270 - DNA, 25 bp, Homo sapien
caggaactgtgacagccttcaggga

SEQ ID NO: 1906271 - DNA, 25 bp, Homo sapien
acaggaactgtgacagccttcaggg

SEQ ID NO: 1906272 - DNA, 25 bp, Homo sapien
cacaggaactgtgacagccttcagg

SEQ ID NO: 1906273 - DNA, 25 bp, Homo sapien
tatgatgtacctatagtaaggcagg

SEQ ID NO: 1906274 - DNA, 25 bp, Homo sapien
taaaatctgttgaggagggacttag

SEQ ID NO: 1906275 - DNA, 25 bp, Homo sapien
ttacccctgagatactgaactatgg

SEQ ID NO: 1906276 - DNA, 25 bp, Homo sapien
gactattgattcaaggagtcgtgag

SEQ ID NO: 1906277 - DNA, 25 bp, Homo sapien
cattggaagggataggcctcactgc

SEQ ID NO: 1906278 - DNA, 25 bp, Homo sapien
ctcaggagggagataaacatggaac

SEQ ID NO: 1906279 - DNA, 25 bp, Homo sapien
aaagatatatgccaccatcgctgca

SEQ ID NO: 1906280 - DNA, 25 bp, Homo sapien
caatggagttggtcttccacagaag

SEQ ID NO: 1906281 - DNA, 25 bp, Homo sapien
gagccagtgattggttgtaccatac

SEQ ID NO: 1906282 - DNA, 25 bp, Homo sapien
tgtcctgtcaggcatagttcagggt

SEQ ID NO: 1906283 - DNA, 25 bp, Homo sapien
ttcagggtgatgagttccctgagag

SEQ ID NO: 1906284 - DNA, 25 bp, Homo sapien
cctttagccttcctatcttagtgca

SEQ ID NO: 1906285 - DNA, 25 bp, Homo sapien
ctgaaatcacctacatagctaaggg

SEQ ID NO: 1906286 - DNA, 25 bp, Homo sapien
tgggcctgaaatcacctacatagct

SEQ ID NO: 1906287 - DNA, 25 bp, Homo sapien
tatctgatatcttcccccttgggcc

SEQ ID NO: 1906288 - DNA, 25 bp, Homo sapien
gcctgaaatcacctacatagctaag

SEQ ID NO: 1906289 - DNA, 25 bp, Homo sapien
tcccctgagggttggtaagaacatg

SEQ ID NO: 1906290 - DNA, 25 bp, Homo sapien
taagaggccctttcatgtagagtgt

SEQ ID NO: 1906291 - DNA, 25 bp, Homo sapien
ggatttctatagagtccaggcagca

SEQ ID NO: 1906292 - DNA, 25 bp, Homo sapien
cagaccaggagacaagtgatcaagc

SEQ ID NO: 1906293 - DNA, 25 bp, Homo sapien
ggcagattttatccctagagaccaa

SEQ ID NO: 1906294 - DNA, 25 bp, Homo sapien
tggtgggcctgaccctattacagaa

SEQ ID NO: 1906295 - DNA, 25 bp, Homo sapien
gagaccaaagtatgaagaggctcca

SEQ ID NO: 1906296 - DNA, 25 bp, Homo sapien
tgaggttcaaatacacatgctgcgg

SEQ ID NO: 1906297 - DNA, 25 bp, Homo sapien
tgtgctgataaaatgacgggtgctg

SEQ ID NO: 1906298 - DNA, 25 bp, Homo sapien
cacttgagaagctagtgacgtgtgc

SEQ ID NO: 1906299 - DNA, 25 bp, Homo sapien
gaaaattctgtcacctgatactggg

SEQ ID NO: 1906300 - DNA, 25 bp, Homo sapien
ttttggaaaatgcagcggcagatgc

SEQ ID NO: 1906301 - DNA, 25 bp, Homo sapien
ttctactgggtagaatttctagaag

SEQ ID NO: 1906302 - DNA, 25 bp, Homo sapien
ggtgcttcttgtttgtcccagtggc

SEQ ID NO: 1906303 - DNA, 25 bp, Homo sapien
cctaaaacagcactgtgtctggtgc

SEQ ID NO: 1906304 - DNA, 25 bp, Homo sapien
cttggccttaaagagtgataataac

SEQ ID NO: 1906305 - DNA, 25 bp, Homo sapien
ttacagtggcgccagacagctgcag

SEQ ID NO: 1906306 - DNA, 25 bp, Homo sapien
gaaaatgtttccaggatgaactcac

SEQ ID NO: 1906307 - DNA, 25 bp, Homo sapien
tgtaaacgtaagacctgtgcatgtc

SEQ ID NO: 1906308 - DNA, 25 bp, Homo sapien
ggagacagcattacagtggcgccag

SEQ ID NO: 1906309 - DNA, 25 bp, Homo sapien
tacaatagtctacaaatcttaaatg

SEQ ID NO: 1906310 - DNA, 25 bp, Homo sapien
atgcatgttgttgcacatatcagtc

SEQ ID NO: 1906311 - DNA, 25 bp, Homo sapien
aaaacatacatacaatagtctacaa

SEQ ID NO: 1906312 - DNA, 25 bp, Homo sapien
tccatggtatgtatttactacaatg

SEQ ID NO: 1906313 - DNA, 25 bp, Homo sapien
tgacatcaacaataaaggcctagcc

SEQ ID NO: 1906314 - DNA, 25 bp, Homo sapien
gaaactggcctggacctatagggtg

SEQ ID NO: 1906315 - DNA, 25 bp, Homo sapien
gacctatagggtgagcaaggaaaga

SEQ ID NO: 1906316 - DNA, 25 bp, Homo sapien
gctcaccgcttctcaaatggacttg

SEQ ID NO: 1906317 - DNA, 25 bp, Homo sapien
gctcaagggacccagttctccacaa

SEQ ID NO: 1906318 - DNA, 25 bp, Homo sapien
cagcctccagcccattatgcattgt

SEQ ID NO: 1906319 - DNA, 25 bp, Homo sapien
cttgatctgcatctgaagcaaagac

SEQ ID NO: 1906320 - DNA, 25 bp, Homo sapien
cagttctccacaacaggttgccaca

SEQ ID NO: 1906321 - DNA, 25 bp, Homo sapien
gagcaatcccaaaaggctacaaacc

SEQ ID NO: 1906322 - DNA, 25 bp, Homo sapien
ggtgatacacataccaacttggatg

SEQ ID NO: 1906323 - DNA, 25 bp, Homo sapien
tatgctgactgaaaagagcaatccc

SEQ ID NO: 1906324 - DNA, 25 bp, Homo sapien
gatgaatccccaagaagttatgctg

SEQ ID NO: 1906325 - DNA, 25 bp, Homo sapien
caagacggaagagggtgtggccata

SEQ ID NO: 1906326 - DNA, 25 bp, Homo sapien
cactcaggatacaattggatagaac

SEQ ID NO: 1906327 - DNA, 25 bp, Homo sapien
tgtggccataaaaggataacaggac

SEQ ID NO: 1906328 - DNA, 25 bp, Homo sapien
gatggtcgatacatgaacccacact

SEQ ID NO: 1906329 - DNA, 25 bp, Homo sapien
atagtcctcacggaaccaacatggg

SEQ ID NO: 1906330 - DNA, 25 bp, Homo sapien
gggttcagacagttactgagtatgt

SEQ ID NO: 1906331 - DNA, 25 bp, Homo sapien
tttggtccttcctaccataatagtc

SEQ ID NO: 1906332 - DNA, 25 bp, Homo sapien
cttacactatacaatctaggacaga

SEQ ID NO: 1906333 - DNA, 25 bp, Homo sapien
tgtcgtataaatctgaaagctctca

SEQ ID NO: 1906334 - DNA, 25 bp, Homo sapien
agcatagaggcaaggcaatatgggt

SEQ ID NO: 1906335 - DNA, 25 bp, Homo sapien
tatgggtggttgagatgatttaagc

SEQ ID NO: 1906336 - DNA, 25 bp, Homo sapien
ggaggaaattctgggctgtcgtata

SEQ ID NO: 1906337 - DNA, 25 bp, Homo sapien
catttgaccttgactttgtattgtc

SEQ ID NO: 1906338 - DNA, 25 bp, Homo sapien
gactttgtattgtcctgcagtgatt

SEQ ID NO: 1906339 - DNA, 25 bp, Homo sapien
gaccttgactttgtattgtcctgca

SEQ ID NO: 1906340 - DNA, 25 bp, Homo sapien
tcatcccatcatttgaccttgactt

SEQ ID NO: 1906341 - DNA, 25 bp, Homo sapien
tttggcttgggtatcccccctctgc

SEQ ID NO: 1906342 - DNA, 25 bp, Homo sapien
tggcttgggtatcccccctctgctt

SEQ ID NO: 1906343 - DNA, 25 bp, Homo sapien
cttgggtatcccccctctgctttca

SEQ ID NO: 1906344 - DNA, 25 bp, Homo sapien
ctttggcttgggtatcccccctctg

SEQ ID NO: 1906345 - DNA, 25 bp, Homo sapien
tgaaaaatgtactttgggcctggtg

SEQ ID NO: 1906346 - DNA, 25 bp, Homo sapien
ccttggatgacgaaacaaattctgc

SEQ ID NO: 1906347 - DNA, 25 bp, Homo sapien
gaagtatactcataccacatagtgg

SEQ ID NO: 1906348 - DNA, 25 bp, Homo sapien
ggctcgcttgagcttgagagattga

SEQ ID NO: 1906349 - DNA, 25 bp, Homo sapien
taattcatcaaattcagtgttccct

SEQ ID NO: 1906350 - DNA, 25 bp, Homo sapien
atcaaattcagtgttccctctttca

SEQ ID NO: 1906351 - DNA, 25 bp, Homo sapien
tttaattcatcaaattcagtgttcc

SEQ ID NO: 1906352 - DNA, 25 bp, Homo sapien
attcatcaaattcagtgttccctct

SEQ ID NO: 1906353 - DNA, 25 bp, Homo sapien
cagttgctgcctaatagaacatgcc

SEQ ID NO: 1906354 - DNA, 25 bp, Homo sapien
catgatacaggcaatcaggaattac

SEQ ID NO: 1906355 - DNA, 25 bp, Homo sapien
gtctaatactagagaaagtcccatg

SEQ ID NO: 1906356 - DNA, 25 bp, Homo sapien
gcttcaacagcaactcaatgggttc

SEQ ID NO: 1906357 - DNA, 25 bp, Homo sapien
tcctgacccatgtaactaagggccc

SEQ ID NO: 1906358 - DNA, 25 bp, Homo sapien
cactcaacccgattcttgataaggg

SEQ ID NO: 1906359 - DNA, 25 bp, Homo sapien
ggactgtcagatccttcagtaggaa

SEQ ID NO: 1906360 - DNA, 25 bp, Homo sapien
gaaagcatcaaaagtgccacaggga

SEQ ID NO: 1906361 - DNA, 25 bp, Homo sapien
gcactgcctctgaatatctgtaccc

SEQ ID NO: 1906362 - DNA, 25 bp, Homo sapien
ccttgtgtcttgtcagtgagttggg

SEQ ID NO: 1906363 - DNA, 25 bp, Homo sapien
tctgagaagaaacctgtggaatttt

SEQ ID NO: 1906364 - DNA, 25 bp, Homo sapien
tcaggccctattatccttgcagaaa

SEQ ID NO: 1906365 - DNA, 25 bp, Homo sapien
ccgttgactggtcttcaagttcact

SEQ ID NO: 1906366 - DNA, 25 bp, Homo sapien
catgcaacttctgcctacttggctc

SEQ ID NO: 1906367 - DNA, 25 bp, Homo sapien
gcaacttctgcctacttggctccag

SEQ ID NO: 1906368 - DNA, 25 bp, Homo sapien
gattaaataatatccgttgactggt

SEQ ID NO: 1906369 - DNA, 25 bp, Homo sapien
caggcatagctggatttagggctca

SEQ ID NO: 1906370 - DNA, 25 bp, Homo sapien
aagtacctggaaagatctcactgcc

SEQ ID NO: 1906371 - DNA, 25 bp, Homo sapien
tgatgggaaaacttggctacactct

SEQ ID NO: 1906372 - DNA, 25 bp, Homo sapien
gaagctcactaaaatgggtactgga

SEQ ID NO: 1906373 - DNA, 25 bp, Homo sapien
ggtgctgtgcgatatcactgcttca

SEQ ID NO: 1906374 - DNA, 25 bp, Homo sapien
aagcaggtgctgtgcgatatcactg

SEQ ID NO: 1906375 - DNA, 25 bp, Homo sapien
gctgtgcgatatcactgcttcatgg

SEQ ID NO: 1906376 - DNA, 25 bp, Homo sapien
cattttgccccttggctccgggctg

SEQ ID NO: 1906377 - DNA, 25 bp, Homo sapien
tctctgccctcctaccgccctgagg

SEQ ID NO: 1906378 - DNA, 25 bp, Homo sapien
tgtttcccccataagattactggac

SEQ ID NO: 1906379 - DNA, 25 bp, Homo sapien
ccccataagattactggacaggtgc

SEQ ID NO: 1906380 - DNA, 25 bp, Homo sapien
tgctgggcagttgcctcggtgcagt

SEQ ID NO: 1906381 - DNA, 25 bp, Homo sapien
taagattactggacaggtgctgtaa

SEQ ID NO: 1906382 - DNA, 25 bp, Homo sapien
aggaattaatcccaccagaacaagc

SEQ ID NO: 1906383 - DNA, 25 bp, Homo sapien
ctgagagtttctgtgttcccaggaa

SEQ ID NO: 1906384 - DNA, 25 bp, Homo sapien
gcctcggtctgttgctaaactctga

SEQ ID NO: 1906385 - DNA, 25 bp, Homo sapien
ggaaaacaaatgtgcccctgcgtct

SEQ ID NO: 1906386 - DNA, 25 bp, Homo sapien
gcacagtttgctacgtacggatccc

SEQ ID NO: 1906387 - DNA, 25 bp, Homo sapien
tggcagactcaaccccagtagggag

SEQ ID NO: 1906388 - DNA, 25 bp, Homo sapien
tatttaaccatgagcgcagtgggcc

SEQ ID NO: 1906389 - DNA, 25 bp, Homo sapien
caaggctgtttgctcactatgggca

SEQ ID NO: 1906390 - DNA, 25 bp, Homo sapien
tgctaccccaacaggggcattgaaa

SEQ ID NO: 1906391 - DNA, 25 bp, Homo sapien
tgggagtcctgctaccccaacaggg

SEQ ID NO: 1906392 - DNA, 25 bp, Homo sapien
gctaccccaacaggggcattgaaaa

SEQ ID NO: 1906393 - DNA, 25 bp, Homo sapien
cagtgggagtcctgctaccccaaca

SEQ ID NO: 1906394 - DNA, 25 bp, Homo sapien
gaggactactagcatccatcagtgg

SEQ ID NO: 1906395 - DNA, 25 bp, Homo sapien
tacggtacactctcatatagggaag

SEQ ID NO: 1906396 - DNA, 25 bp, Homo sapien
gaagaactggttcatacgtcacaca

SEQ ID NO: 1906397 - DNA, 25 bp, Homo sapien
ggacagcctgcgatgtacggtacac

SEQ ID NO: 1906398 - DNA, 25 bp, Homo sapien
tggagcccaggtaactagattttaa

SEQ ID NO: 1906399 - DNA, 25 bp, Homo sapien
cacctgcatcaactgctagtgagta

SEQ ID NO: 1906400 - DNA, 25 bp, Homo sapien
cattctgataggtggccaatttgct

SEQ ID NO: 1906401 - DNA, 25 bp, Homo sapien
gaagggctagagtgatggttcccaa

SEQ ID NO: 1906402 - DNA, 25 bp, Homo sapien
gaggtgtcatgatgagaaacacttg

SEQ ID NO: 1906403 - DNA, 25 bp, Homo sapien
agaggtgtcatgatgagaaacactt

SEQ ID NO: 1906404 - DNA, 25 bp, Homo sapien
ggtgtcatgatgagaaacacttgtg

SEQ ID NO: 1906405 - DNA, 25 bp, Homo sapien
tgtcatgatgagaaacacttgtggg

SEQ ID NO: 1906406 - DNA, 25 bp, Homo sapien
gttctctttgacctctttatcactt

SEQ ID NO: 1906407 - DNA, 25 bp, Homo sapien
tgttctctttgacctctttatcact

SEQ ID NO: 1906408 - DNA, 25 bp, Homo sapien
tcactgtgttctctttgacctcttt

SEQ ID NO: 1906409 - DNA, 25 bp, Homo sapien
ctctttgacctctttatcacttttc

SEQ ID NO: 1906410 - DNA, 25 bp, Homo sapien
ggctccccattgtgccttgagaatg

SEQ ID NO: 1906411 - DNA, 25 bp, Homo sapien
cattgtgccttgagaatgaagtcca

SEQ ID NO: 1906412 - DNA, 25 bp, Homo sapien
gccttgagaatgaagtccatttgcg

SEQ ID NO: 1906413 - DNA, 25 bp, Homo sapien
tccccattgtgccttgagaatgaag

SEQ ID NO: 1906414 - DNA, 25 bp, Homo sapien
aagagagtgcttgctgaagggtgca

SEQ ID NO: 1906415 - DNA, 25 bp, Homo sapien
ggctgaatgaggctcaaagaccagt

SEQ ID NO: 1906416 - DNA, 25 bp, Homo sapien
tgaggctcaaagaccagtgggaaga

SEQ ID NO: 1906417 - DNA, 25 bp, Homo sapien
tgaatgaggctcaaagaccagtggg

SEQ ID NO: 1906418 - DNA, 25 bp, Homo sapien
gcaaatctggccatgacccatcaca

SEQ ID NO: 1906419 - DNA, 25 bp, Homo sapien
ttggagagttacaggaatgcaacat

SEQ ID NO: 1906420 - DNA, 25 bp, Homo sapien
gggctttccatgggcaaatctggcc

SEQ ID NO: 1906421 - DNA, 25 bp, Homo sapien
ttcggtaatttggagagttacagga

SEQ ID NO: 1906422 - DNA, 25 bp, Homo sapien
gatatgattacaagcctccaacagt

SEQ ID NO: 1906423 - DNA, 25 bp, Homo sapien
gaatattcaaccacaaaagcatcag

SEQ ID NO: 1906424 - DNA, 25 bp, Homo sapien
atttggaaaatgaagtgctggcacc

SEQ ID NO: 1906425 - DNA, 25 bp, Homo sapien
gagacctactatttgcatgggcaga

SEQ ID NO: 1906426 - DNA, 25 bp, Homo sapien
cctgccagaccttgagttctctttt

SEQ ID NO: 1906427 - DNA, 25 bp, Homo sapien
gctctattgtacaaggtctacacac

SEQ ID NO: 1906428 - DNA, 25 bp, Homo sapien
tgcattccagctatatgtgttcctg

SEQ ID NO: 1906429 - DNA, 25 bp, Homo sapien
taatcatcccatggctagcgtaagt

SEQ ID NO: 1906430 - DNA, 25 bp, Homo sapien
gctccgaatgcagactgcgaacccg

SEQ ID NO: 1906431 - DNA, 25 bp, Homo sapien
cgtgagtgtcccgtgtcctgccagc

SEQ ID NO: 1906432 - DNA, 25 bp, Homo sapien
gcagggactgtggtaattgagcgcg

SEQ ID NO: 1906433 - DNA, 25 bp, Homo sapien
attgagcgcggcgaagccttccgtt

SEQ ID NO: 1906434 - DNA, 25 bp, Homo sapien
tctagtaccaagttacgtgcaccaa

SEQ ID NO: 1906435 - DNA, 25 bp, Homo sapien
gagggacaccttcatcatacaaact

SEQ ID NO: 1906436 - DNA, 25 bp, Homo sapien
cttgccggtgttttaagaaagccag

SEQ ID NO: 1906437 - DNA, 25 bp, Homo sapien
tcggtatgatgttgtcctgaagacg

SEQ ID NO: 1906438 - DNA, 25 bp, Homo sapien
cccctcttgactgggaaagaagcaa

SEQ ID NO: 1906439 - DNA, 25 bp, Homo sapien
tatacagtcgatctacacagccagg

SEQ ID NO: 1906440 - DNA, 25 bp, Homo sapien
catctctaaatgaacccagtggtca

SEQ ID NO: 1906441 - DNA, 25 bp, Homo sapien
cattaaggctggatctacgagaggc

SEQ ID NO: 1906442 - DNA, 25 bp, Homo sapien
taaatagccaatctattcaccacta

SEQ ID NO: 1906443 - DNA, 25 bp, Homo sapien
ttaaatagccaatctattcaccact

SEQ ID NO: 1906444 - DNA, 25 bp, Homo sapien
aaatagccaatctattcaccactaa

SEQ ID NO: 1906445 - DNA, 25 bp, Homo sapien
tttattccctgtcaaacatttgttg

SEQ ID NO: 1906446 - DNA, 25 bp, Homo sapien
ttattccctgtcaaacatttgttgt

SEQ ID NO: 1906447 - DNA, 25 bp, Homo sapien
tattccctgtcaaacatttgttgtc

SEQ ID NO: 1906448 - DNA, 25 bp, Homo sapien
taaggcatagagaagggcccaagcg

SEQ ID NO: 1906449 - DNA, 25 bp, Homo sapien
gacaccatacagacagggcaaggac

SEQ ID NO: 1906450 - DNA, 25 bp, Homo sapien
gggaagatgccctacacatgtaagg

SEQ ID NO: 1906451 - DNA, 25 bp, Homo sapien
cactggagccacctgtatggatgga

SEQ ID NO: 1906452 - DNA, 25 bp, Homo sapien
tggccaggtataggacagcaggacc

SEQ ID NO: 1906453 - DNA, 25 bp, Homo sapien
tcccagtcgggagggaacgaagaca

SEQ ID NO: 1906454 - DNA, 25 bp, Homo sapien
tgcaggagcctgacattcccagtcg

SEQ ID NO: 1906455 - DNA, 25 bp, Homo sapien
acgaagacatgtgccccccaaggca

SEQ ID NO: 1906456 - DNA, 25 bp, Homo sapien
ctagagagtccaagaggaaagttct

SEQ ID NO: 1906457 - DNA, 25 bp, Homo sapien
agtccaagaggaaagttctgagtgg

SEQ ID NO: 1906458 - DNA, 25 bp, Homo sapien
tccaagaggaaagttctgagtggac

SEQ ID NO: 1906459 - DNA, 25 bp, Homo sapien
agagtccaagaggaaagttctgagt

SEQ ID NO: 1906460 - DNA, 25 bp, Homo sapien
gaagggacatgtgtaccccatctaa

SEQ ID NO: 1906461 - DNA, 25 bp, Homo sapien
ccaatgcatggtatccccaagaggg

SEQ ID NO: 1906462 - DNA, 25 bp, Homo sapien
tactgcctggagtagctaacactga

SEQ ID NO: 1906463 - DNA, 25 bp, Homo sapien
gggaagtcaccacaaagctcccgga

SEQ ID NO: 1906464 - DNA, 25 bp, Homo sapien
tccaaggaaacatgtccactccctc

SEQ ID NO: 1906465 - DNA, 25 bp, Homo sapien
ccaaggaaacatgtccactccctcc

SEQ ID NO: 1906466 - DNA, 25 bp, Homo sapien
cactgcgaacgtgtttccacggctg

SEQ ID NO: 1906467 - DNA, 25 bp, Homo sapien
gtttccacggctgtctacattcata

SEQ ID NO: 1906468 - DNA, 25 bp, Homo sapien
gatggagacactgcgaacgtgtttc

SEQ ID NO: 1906469 - DNA, 25 bp, Homo sapien
tgtttccacggctgtctacattcat

SEQ ID NO: 1906470 - DNA, 25 bp, Homo sapien
tgaaggacaggccaagctgaacgga

SEQ ID NO: 1906471 - DNA, 25 bp, Homo sapien
gattagccactgtgcacgaacatgg

SEQ ID NO: 1906472 - DNA, 25 bp, Homo sapien
aacattctaccaacgcgcctgaagg

SEQ ID NO: 1906473 - DNA, 25 bp, Homo sapien
gcatgtggtcgtaaaggacttcgca

SEQ ID NO: 1906474 - DNA, 25 bp, Homo sapien
aggtgcctgtctgtggatgccatag

SEQ ID NO: 1906475 - DNA, 25 bp, Homo sapien
gtagtaagccactccccacggacat

SEQ ID NO: 1906476 - DNA, 25 bp, Homo sapien
cataggcgtgctcccaagtattgct

SEQ ID NO: 1906477 - DNA, 25 bp, Homo sapien
agtattgctcagtcccaagggtgcc

SEQ ID NO: 1906478 - DNA, 25 bp, Homo sapien
tttctttgctttcttgaggatgtcg

SEQ ID NO: 1906479 - DNA, 25 bp, Homo sapien
ctttgctttcttgaggatgtcgcat

SEQ ID NO: 1906480 - DNA, 25 bp, Homo sapien
ttgctttcttgaggatgtcgcattt

SEQ ID NO: 1906481 - DNA, 25 bp, Homo sapien
tctttgctttcttgaggatgtcgca

SEQ ID NO: 1906482 - DNA, 25 bp, Homo sapien
ctctcatcgatgctggggatacatt

SEQ ID NO: 1906483 - DNA, 25 bp, Homo sapien
aggggaccaccagctcgtccaaggg

SEQ ID NO: 1906484 - DNA, 25 bp, Homo sapien
aggcgaggggaccaccagctcgtcc

SEQ ID NO: 1906485 - DNA, 25 bp, Homo sapien
agagttcgggaaacaggcggacgag

SEQ ID NO: 1906486 - DNA, 25 bp, Homo sapien
tcggcggtgaagagttcgggaaaca

SEQ ID NO: 1906487 - DNA, 25 bp, Homo sapien
tgcactcagggcccggcacgtggac

SEQ ID NO: 1906488 - DNA, 25 bp, Homo sapien
gttgattgcatagctggtcaagtct

SEQ ID NO: 1906489 - DNA, 25 bp, Homo sapien
ctctgcactcagggcccggcacgtg

SEQ ID NO: 1906490 - DNA, 25 bp, Homo sapien
tctgcactcagggcccggcacgtgg

SEQ ID NO: 1906491 - DNA, 25 bp, Homo sapien
gagaagtccacgtcgctgaagagct

SEQ ID NO: 1906492 - DNA, 25 bp, Homo sapien
tgatgcggctcacctcaagggagag

SEQ ID NO: 1906493 - DNA, 25 bp, Homo sapien
ccactgagatgtcgtcgggcagact

SEQ ID NO: 1906494 - DNA, 25 bp, Homo sapien
ttgtcgaagtcgatgggcaccagcc

SEQ ID NO: 1906495 - DNA, 25 bp, Homo sapien
tcccagagtgttaggtgggtgctgt

SEQ ID NO: 1906496 - DNA, 25 bp, Homo sapien
tgctgtggtttatgacactaaacaa

SEQ ID NO: 1906497 - DNA, 25 bp, Homo sapien
ccagagtgttaggtgggtgctgtgg

SEQ ID NO: 1906498 - DNA, 25 bp, Homo sapien
tgtggtttatgacactaaacaaggg

SEQ ID NO: 1906499 - DNA, 25 bp, Homo sapien
gcccagggaggctttgcgctctcac

SEQ ID NO: 1906500 - DNA, 25 bp, Homo sapien
tctccccattccctgagaaaagact

SEQ ID NO: 1906501 - DNA, 25 bp, Homo sapien
gggcccagggaggctttgcgctctc

SEQ ID NO: 1906502 - DNA, 25 bp, Homo sapien
ttccctgagaaaagactcaggctgg

SEQ ID NO: 1906503 - DNA, 25 bp, Homo sapien
gtggacttcctttccgtcagagggc

SEQ ID NO: 1906504 - DNA, 25 bp, Homo sapien
ccgtcagagggctgacactgatgct

SEQ ID NO: 1906505 - DNA, 25 bp, Homo sapien
acactgatgctggcaatactgggca

SEQ ID NO: 1906506 - DNA, 25 bp, Homo sapien
ctttccgtcagagggctgacactga

SEQ ID NO: 1906507 - DNA, 25 bp, Homo sapien
cataggaaggcaacgggcttgtgca

SEQ ID NO: 1906508 - DNA, 25 bp, Homo sapien
ggcttgtgcagctgccggccacggg

SEQ ID NO: 1906509 - DNA, 25 bp, Homo sapien
ggccacgggcaggtcaccccatgga

SEQ ID NO: 1906510 - DNA, 25 bp, Homo sapien
ccgtgccttcgtctgctctcaggaa

SEQ ID NO: 1906511 - DNA, 25 bp, Homo sapien
cagagtggaggcagcctgtcagggg

SEQ ID NO: 1906512 - DNA, 25 bp, Homo sapien
cagcctgtcaggggtggccagccac

SEQ ID NO: 1906513 - DNA, 25 bp, Homo sapien
aggcagcctgtcaggggtggccagc

SEQ ID NO: 1906514 - DNA, 25 bp, Homo sapien
tggaggcagcctgtcaggggtggcc

SEQ ID NO: 1906515 - DNA, 25 bp, Homo sapien
ctctggggtctccttgccaagctgt

SEQ ID NO: 1906516 - DNA, 25 bp, Homo sapien
ggtctccttgccaagctgtccccat

SEQ ID NO: 1906517 - DNA, 25 bp, Homo sapien
tctggggtctccttgccaagctgtc

SEQ ID NO: 1906518 - DNA, 25 bp, Homo sapien
tggggtctccttgccaagctgtccc

SEQ ID NO: 1906519 - DNA, 25 bp, Homo sapien
gcactaagttgcctatgttcacagg

SEQ ID NO: 1906520 - DNA, 25 bp, Homo sapien
tgcctatgttcacaggcgtgacccc

SEQ ID NO: 1906521 - DNA, 25 bp, Homo sapien
taagttgcctatgttcacaggcgtg

SEQ ID NO: 1906522 - DNA, 25 bp, Homo sapien
gggctgcactaagttgcctatgttc

SEQ ID NO: 1906523 - DNA, 25 bp, Homo sapien
acattagtgattgtcagtagctgga

SEQ ID NO: 1906524 - DNA, 25 bp, Homo sapien
gctactgctaatgggcagggactct

SEQ ID NO: 1906525 - DNA, 25 bp, Homo sapien
tgtcctaaaatagcataactctggg

SEQ ID NO: 1906526 - DNA, 25 bp, Homo sapien
tacatgaaatgcctagaattggccg

SEQ ID NO: 1906527 - DNA, 25 bp, Homo sapien
gggatcagccgcctcctcttcacgc

SEQ ID NO: 1906528 - DNA, 25 bp, Homo sapien
ggacagagtctagcaggccatcgct

SEQ ID NO: 1906529 - DNA, 25 bp, Homo sapien
tcagaagtcctggaattcacggagc

SEQ ID NO: 1906530 - DNA, 25 bp, Homo sapien
gctttcgtttgctggagtcctgcag

SEQ ID NO: 1906531 - DNA, 25 bp, Homo sapien
agaagaaatagggctcagtgggaaa

SEQ ID NO: 1906532 - DNA, 25 bp, Homo sapien
agagaagaaatagggctcagtggga

SEQ ID NO: 1906533 - DNA, 25 bp, Homo sapien
gaagaaatagggctcagtgggaaaa

SEQ ID NO: 1906534 - DNA, 25 bp, Homo sapien
gagaagaaatagggctcagtgggaa

SEQ ID NO: 1906535 - DNA, 25 bp, Homo sapien
tcttctacatcttcggtgaattcag

SEQ ID NO: 1906536 - DNA, 25 bp, Homo sapien
cttcttctacatcttcggtgaattc

SEQ ID NO: 1906537 - DNA, 25 bp, Homo sapien
tacatcttcggtgaattcagttgag

SEQ ID NO: 1906538 - DNA, 25 bp, Homo sapien
tctacatcttcggtgaattcagttg

SEQ ID NO: 1906539 - DNA, 25 bp, Homo sapien
gagagatgtgtaggccactccctgc

SEQ ID NO: 1906540 - DNA, 25 bp, Homo sapien
agatgtgtaggccactccctgcatc

SEQ ID NO: 1906541 - DNA, 25 bp, Homo sapien
ctacaagagagatgtgtaggccact

SEQ ID NO: 1906542 - DNA, 25 bp, Homo sapien
caagagagatgtgtaggccactccc

SEQ ID NO: 1906543 - DNA, 25 bp, Homo sapien
gatcagagatgtcctcgccactgtg

SEQ ID NO: 1906544 - DNA, 25 bp, Homo sapien
cagaacaggaatgtgattggaacct

SEQ ID NO: 1906545 - DNA, 25 bp, Homo sapien
gattcccttgagaatgtgggcccca

SEQ ID NO: 1906546 - DNA, 25 bp, Homo sapien
aagcaaactctcactaccagaagat

SEQ ID NO: 1906547 - DNA, 25 bp, Homo sapien
gcgggcgagcgccgtgtattttccc

SEQ ID NO: 1906548 - DNA, 25 bp, Homo sapien
ctgggacgcgagttctgtactttgc

SEQ ID NO: 1906549 - DNA, 25 bp, Homo sapien
gggcccgcgccgagtttgggcgcca

SEQ ID NO: 1906550 - DNA, 25 bp, Homo sapien
tgcgctgcgctctcgcgtgacgtga

SEQ ID NO: 1906551 - DNA, 25 bp, Homo sapien
ggcgccgcgaacaatgtcccctgta

SEQ ID NO: 1906552 - DNA, 25 bp, Homo sapien
gcaggcgccgcgaacaatgtcccct

SEQ ID NO: 1906553 - DNA, 25 bp, Homo sapien
gggcaggcgccgcgaacaatgtccc

SEQ ID NO: 1906554 - DNA, 25 bp, Homo sapien
ccgggcaggcgccgcgaacaatgtc

SEQ ID NO: 1906555 - DNA, 25 bp, Homo sapien
gaaacgtggtttctcagacccgaga

SEQ ID NO: 1906556 - DNA, 25 bp, Homo sapien
tttttggcctttgggccgcagccca

SEQ ID NO: 1906557 - DNA, 25 bp, Homo sapien
cgcgagttcgtcctcggaaacgtgg

SEQ ID NO: 1906558 - DNA, 25 bp, Homo sapien
taaaatctgctcttgcaacccgaag

SEQ ID NO: 1906559 - DNA, 25 bp, Homo sapien
tgagcccacgctgctggctagaggc

SEQ ID NO: 1906560 - DNA, 25 bp, Homo sapien
gctggctagaggcactgtagccact

SEQ ID NO: 1906561 - DNA, 25 bp, Homo sapien
cacgctgctggctagaggcactgta

SEQ ID NO: 1906562 - DNA, 25 bp, Homo sapien
ggcactgtagccactagggccccag

SEQ ID NO: 1906563 - DNA, 25 bp, Homo sapien
atggcaggcccacactacactaact

SEQ ID NO: 1906564 - DNA, 25 bp, Homo sapien
caaaggtaggcagccaattcatggc

SEQ ID NO: 1906565 - DNA, 25 bp, Homo sapien
agtgatccaaaggtaggcagccaat

SEQ ID NO: 1906566 - DNA, 25 bp, Homo sapien
gcagccaattcatggcaggcccaca

SEQ ID NO: 1906567 - DNA, 25 bp, Homo sapien
cccttaaggaaaggcgcgatgagtc

SEQ ID NO: 1906568 - DNA, 25 bp, Homo sapien
gttctagtagcctccatcacatgtg

SEQ ID NO: 1906569 - DNA, 25 bp, Homo sapien
taaaatgtgatggtccttaagccac

SEQ ID NO: 1906570 - DNA, 25 bp, Homo sapien
tgttggtggccctagatccctgggc

SEQ ID NO: 1906571 - DNA, 25 bp, Homo sapien
ccatgcccaaccagggacaaggtca

SEQ ID NO: 1906572 - DNA, 25 bp, Homo sapien
catgcccaaccagggacaaggtcat

SEQ ID NO: 1906573 - DNA, 25 bp, Homo sapien
cctagagcagggatatgtgatgcaa

SEQ ID NO: 1906574 - DNA, 25 bp, Homo sapien
ttgcaaggctgcctagagcagggat

SEQ ID NO: 1906575 - DNA, 25 bp, Homo sapien
gctgcctagagcagggatatgtgat

SEQ ID NO: 1906576 - DNA, 25 bp, Homo sapien
gagcagggatatgtgatgcaaatgc

SEQ ID NO: 1906577 - DNA, 25 bp, Homo sapien
attgccctctacagtcttatacccc

SEQ ID NO: 1906578 - DNA, 25 bp, Homo sapien
tgccctctacagtcttataccccca

SEQ ID NO: 1906579 - DNA, 25 bp, Homo sapien
cattgccctctacagtcttataccc

SEQ ID NO: 1906580 - DNA, 25 bp, Homo sapien
cctctacagtcttatacccccacat

SEQ ID NO: 1906581 - DNA, 25 bp, Homo sapien
gagcacatgctatgaatggaagaag

SEQ ID NO: 1906582 - DNA, 25 bp, Homo sapien
gacataccagaaacggaaagcactt

SEQ ID NO: 1906583 - DNA, 25 bp, Homo sapien
gggtaaacaagtgatacatctagtc

SEQ ID NO: 1906584 - DNA, 25 bp, Homo sapien
gctttcattagaactagctaaaggg

SEQ ID NO: 1906585 - DNA, 25 bp, Homo sapien
ataatttccctctgtgtatatgtgg

SEQ ID NO: 1906586 - DNA, 25 bp, Homo sapien
taatttccctctgtgtatatgtgga

SEQ ID NO: 1906587 - DNA, 25 bp, Homo sapien
aaataatttccctctgtgtatatgt

SEQ ID NO: 1906588 - DNA, 25 bp, Homo sapien
aatttccctctgtgtatatgtggag

SEQ ID NO: 1906589 - DNA, 25 bp, Homo sapien
tgctaacgcagaataagaggcgccc

SEQ ID NO: 1906590 - DNA, 25 bp, Homo sapien
tgattagacaatcctccctggttgg

SEQ ID NO: 1906591 - DNA, 25 bp, Homo sapien
tcaagtgtgcttctggcgtgacaag

SEQ ID NO: 1906592 - DNA, 25 bp, Homo sapien
cattaacgcatcgtgaaagcgctcc

SEQ ID NO: 1906593 - DNA, 25 bp, Homo sapien
cgacacaggtcaatagctgaagtca

SEQ ID NO: 1906594 - DNA, 25 bp, Homo sapien
cagcaaacacaatgttttctaaagc

SEQ ID NO: 1906595 - DNA, 25 bp, Homo sapien
tgtttccatggtaacgacacaggtc

SEQ ID NO: 1906596 - DNA, 25 bp, Homo sapien
ctaaagcagatctggcctccgaggg

SEQ ID NO: 1906597 - DNA, 25 bp, Homo sapien
gatgcgttcaagcttcctcctttag

SEQ ID NO: 1906598 - DNA, 25 bp, Homo sapien
tctttgtgatgcgttcaagcttcct

SEQ ID NO: 1906599 - DNA, 25 bp, Homo sapien
tgtgatgcgttcaagcttcctcctt

SEQ ID NO: 1906600 - DNA, 25 bp, Homo sapien
tttgtgatgcgttcaagcttcctcc

SEQ ID NO: 1906601 - DNA, 25 bp, Homo sapien
ggccacttggctggtagcttcagaa

SEQ ID NO: 1906602 - DNA, 25 bp, Homo sapien
gaacacaacgcaacagctcatttcg

SEQ ID NO: 1906603 - DNA, 25 bp, Homo sapien
tagtctggatggtatgcagcctcct

SEQ ID NO: 1906604 - DNA, 25 bp, Homo sapien
catttcagggtatgagcagacatgc

SEQ ID NO: 1906605 - DNA, 25 bp, Homo sapien
cagcctcctgttgggagtgagactt

SEQ ID NO: 1906606 - DNA, 25 bp, Homo sapien
tagatccaggatagggagatcttcc

SEQ ID NO: 1906607 - DNA, 25 bp, Homo sapien
tcaagccagaatgtcaaggactcgg

SEQ ID NO: 1906608 - DNA, 25 bp, Homo sapien
tgagctatgctgcaggtcccatgat

SEQ ID NO: 1906609 - DNA, 25 bp, Homo sapien
tagctaagatctttcatcaagccag

SEQ ID NO: 1906610 - DNA, 25 bp, Homo sapien
agtgcagagcatccacccgcagagc

SEQ ID NO: 1906611 - DNA, 25 bp, Homo sapien
caaactgggagcaataattgaatcc

SEQ ID NO: 1906612 - DNA, 25 bp, Homo sapien
tgaatccagctatcccacagtgcag

SEQ ID NO: 1906613 - DNA, 25 bp, Homo sapien
tggcttctgacaccacaaactggga

SEQ ID NO: 1906614 - DNA, 25 bp, Homo sapien
tctgagatgtgcacctagggctgca

SEQ ID NO: 1906615 - DNA, 25 bp, Homo sapien
tcaaagctcatttacggcacagtcc

SEQ ID NO: 1906616 - DNA, 25 bp, Homo sapien
taaaagcgactaaggtaggattgcc

SEQ ID NO: 1906617 - DNA, 25 bp, Homo sapien
tgtagaaagtcgaaccataggtgcc

SEQ ID NO: 1906618 - DNA, 25 bp, Homo sapien
ttcagacaaaatttggcttttgagt

SEQ ID NO: 1906619 - DNA, 25 bp, Homo sapien
gctctctaagttccctcctttcgcg

SEQ ID NO: 1906620 - DNA, 25 bp, Homo sapien
gagtttacaaatacctatcacttgg

SEQ ID NO: 1906621 - DNA, 25 bp, Homo sapien
tatggctgcacactttcttgatatc

SEQ ID NO: 1906622 - DNA, 25 bp, Homo sapien
aggtattttttattgcacggcaaga

SEQ ID NO: 1906623 - DNA, 25 bp, Homo sapien
ttttttattgcacggcaagaaaaga

SEQ ID NO: 1906624 - DNA, 25 bp, Homo sapien
acggcaagaaaagactaacacagtg

SEQ ID NO: 1906625 - DNA, 25 bp, Homo sapien
attgcacggcaagaaaagactaaca

SEQ ID NO: 1906626 - DNA, 25 bp, Homo sapien
gattttgcattgagttggtggcaga

SEQ ID NO: 1906627 - DNA, 25 bp, Homo sapien
taccagattttgcattgagttggtg

SEQ ID NO: 1906628 - DNA, 25 bp, Homo sapien
ccattgcttggtccaggggtgctct

SEQ ID NO: 1906629 - DNA, 25 bp, Homo sapien
gggtgctcttatttgtgcaccatat

SEQ ID NO: 1906630 - DNA, 25 bp, Homo sapien
gcagtaagctatgattgtgacactg

SEQ ID NO: 1906631 - DNA, 25 bp, Homo sapien
actccagcctgagtgacagagtgag

SEQ ID NO: 1906632 - DNA, 25 bp, Homo sapien
cagtaagctatgattgtgacactgc

SEQ ID NO: 1906633 - DNA, 25 bp, Homo sapien
tgagtgacagagtgagaccctatct

SEQ ID NO: 1906634 - DNA, 25 bp, Homo sapien
ggttttggttgtcccacggcaagca

SEQ ID NO: 1906635 - DNA, 25 bp, Homo sapien
ttagccaagcagctgtacacatgcc

SEQ ID NO: 1906636 - DNA, 25 bp, Homo sapien
gccatacacctgctaaatgttccat

SEQ ID NO: 1906637 - DNA, 25 bp, Homo sapien
cataaatcagatggttgacatgttc

SEQ ID NO: 1906638 - DNA, 25 bp, Homo sapien
cttagcatagtccaatcttcctttt

SEQ ID NO: 1906639 - DNA, 25 bp, Homo sapien
catttgttgaaagttagaaagttga

SEQ ID NO: 1906640 - DNA, 25 bp, Homo sapien
gcatttgttgaaagttagaaagttg

SEQ ID NO: 1906641 - DNA, 25 bp, Homo sapien
ggattagagacatgagtcaccaagc

SEQ ID NO: 1906642 - DNA, 25 bp, Homo sapien
gattagagacatgagtcaccaagcc

SEQ ID NO: 1906643 - DNA, 25 bp, Homo sapien
attagagacatgagtcaccaagcct

SEQ ID NO: 1906644 - DNA, 25 bp, Homo sapien
gggattagagacatgagtcaccaag

SEQ ID NO: 1906645 - DNA, 25 bp, Homo sapien
gctgagtttagattaaaagtcatgg

SEQ ID NO: 1906646 - DNA, 25 bp, Homo sapien
gatgtaagactacaggagctgagtt

SEQ ID NO: 1906647 - DNA, 25 bp, Homo sapien
gattaaaagtcatggagtcactggt

SEQ ID NO: 1906648 - DNA, 25 bp, Homo sapien
aagaaattcctgatgtaagactaca

SEQ ID NO: 1906649 - DNA, 25 bp, Homo sapien
cttatgactcatggccatgtgcttc

SEQ ID NO: 1906650 - DNA, 25 bp, Homo sapien
catgtgcttcccatactgaaatgcc

SEQ ID NO: 1906651 - DNA, 25 bp, Homo sapien
attccattgcagcttggcagctctt

SEQ ID NO: 1906652 - DNA, 25 bp, Homo sapien
ctttgctagtaaggcaccatgggag

SEQ ID NO: 1906653 - DNA, 25 bp, Homo sapien
ctcaaagccccgatcttccattgtt

SEQ ID NO: 1906654 - DNA, 25 bp, Homo sapien
agtcgacgtcccctgcccaccttca

SEQ ID NO: 1906655 - DNA, 25 bp, Homo sapien
ccctctttctagtcgacgtcccctg

SEQ ID NO: 1906656 - DNA, 25 bp, Homo sapien
tcaaagccccgatcttccattgtta

SEQ ID NO: 1906657 - DNA, 25 bp, Homo sapien
taaaaccagtctttggctggcaact

SEQ ID NO: 1906658 - DNA, 25 bp, Homo sapien
catggccaatgtacccaatagacac

SEQ ID NO: 1906659 - DNA, 25 bp, Homo sapien
tctttcatctggagagtctgccagc

SEQ ID NO: 1906660 - DNA, 25 bp, Homo sapien
gcacttagggtaccagcaatgcaat

SEQ ID NO: 1906661 - DNA, 25 bp, Homo sapien
ggccttagactaaatgctattccag

SEQ ID NO: 1906662 - DNA, 25 bp, Homo sapien
actatattccatatggccaaggagc

SEQ ID NO: 1906663 - DNA, 25 bp, Homo sapien
ccagtcctgcctaataaagcttaaa

SEQ ID NO: 1906664 - DNA, 25 bp, Homo sapien
ccaacccaggaaatgacacagatga

SEQ ID NO: 1906665 - DNA, 25 bp, Homo sapien
atatttagtgagtacagtaagtaac

SEQ ID NO: 1906666 - DNA, 25 bp, Homo sapien
gtctgtgaatccaaagtcaattttg

SEQ ID NO: 1906667 - DNA, 25 bp, Homo sapien
acatgagcgtaatatataaaacagc

SEQ ID NO: 1906668 - DNA, 25 bp, Homo sapien
gaatttagatatacaggtctgtgaa

SEQ ID NO: 1906669 - DNA, 25 bp, Homo sapien
ggaactaagttgaacactctggaaa

SEQ ID NO: 1906670 - DNA, 25 bp, Homo sapien
caggcaaatcacttactacagggtt

SEQ ID NO: 1906671 - DNA, 25 bp, Homo sapien
tagaaaaagcatgggactgagagtc

SEQ ID NO: 1906672 - DNA, 25 bp, Homo sapien
taactgtcgtagctgtcaggtttcc

SEQ ID NO: 1906673 - DNA, 25 bp, Homo sapien
tagaattttcatgatatactccttg

SEQ ID NO: 1906674 - DNA, 25 bp, Homo sapien
aattttcatgatatactccttgtac

SEQ ID NO: 1906675 - DNA, 25 bp, Homo sapien
gaagtagaattttcatgatatactc

SEQ ID NO: 1906676 - DNA, 25 bp, Homo sapien
ctttgaagtagaattttcatgatat

SEQ ID NO: 1906677 - DNA, 25 bp, Homo sapien
caagtccataagagcacttgctaaa

SEQ ID NO: 1906678 - DNA, 25 bp, Homo sapien
cataagagcacttgctaaaagttcc

SEQ ID NO: 1906679 - DNA, 25 bp, Homo sapien
gagcacttgctaaaagttccacaac

SEQ ID NO: 1906680 - DNA, 25 bp, Homo sapien
agtccataagagcacttgctaaaag

SEQ ID NO: 1906681 - DNA, 25 bp, Homo sapien
tagcaatatgagctgcagaggaact

SEQ ID NO: 1906682 - DNA, 25 bp, Homo sapien
tccaggaggactgagtatcgccaat

SEQ ID NO: 1906683 - DNA, 25 bp, Homo sapien
gataagccctattcctaaatccagg

SEQ ID NO: 1906684 - DNA, 25 bp, Homo sapien
tgtaactaaacgcacagcatcagat

SEQ ID NO: 1906685 - DNA, 25 bp, Homo sapien
ttcctcttcaaattgggccacacta

SEQ ID NO: 1906686 - DNA, 25 bp, Homo sapien
caaattccagtgctgccatgtcttt

SEQ ID NO: 1906687 - DNA, 25 bp, Homo sapien
tgggtaacacagttcactttccagc

SEQ ID NO: 1906688 - DNA, 25 bp, Homo sapien
gttcctcttcaaattgggccacact

SEQ ID NO: 1906689 - DNA, 25 bp, Homo sapien
tgccttcgcatctgcagctgcctat

SEQ ID NO: 1906690 - DNA, 25 bp, Homo sapien
ctgagttaggagtttactaagtact

SEQ ID NO: 1906691 - DNA, 25 bp, Homo sapien
actgggtggatagacagctgattcc

SEQ ID NO: 1906692 - DNA, 25 bp, Homo sapien
gcatctgcagctgcctatctcttct

SEQ ID NO: 1906693 - DNA, 25 bp, Homo sapien
taaactatatagatggtgtaaaggg

SEQ ID NO: 1906694 - DNA, 25 bp, Homo sapien
tgtaaagagtacatctgtgccactg

SEQ ID NO: 1906695 - DNA, 25 bp, Homo sapien
aatgcttaatagaacaacctccagg

SEQ ID NO: 1906696 - DNA, 25 bp, Homo sapien
tgtgccactggttatccggaagtat

SEQ ID NO: 1906697 - DNA, 25 bp, Homo sapien
tgtttagacaagatccaggctgact

SEQ ID NO: 1906698 - DNA, 25 bp, Homo sapien
tagcaataggtccattaaatgaaaa

SEQ ID NO: 1906699 - DNA, 25 bp, Homo sapien
gacaatgctcttgggtgtttagaca

SEQ ID NO: 1906700 - DNA, 25 bp, Homo sapien
cacagtctcccatctgatatatagc

SEQ ID NO: 1906701 - DNA, 25 bp, Homo sapien
tagtccaggtctttgtacagtgaag

SEQ ID NO: 1906702 - DNA, 25 bp, Homo sapien
cagaggaagcctgttaatggccagc

SEQ ID NO: 1906703 - DNA, 25 bp, Homo sapien
catgtctcactgatagcttgctgct

SEQ ID NO: 1906704 - DNA, 25 bp, Homo sapien
tatagagcaacttatcccaatggaa

SEQ ID NO: 1906705 - DNA, 25 bp, Homo sapien
cccaacatggcaaaaacacatctac

SEQ ID NO: 1906706 - DNA, 25 bp, Homo sapien
atggcaaaaacacatctactaaaaa

SEQ ID NO: 1906707 - DNA, 25 bp, Homo sapien
aggctgcccaacatggcaaaaacac

SEQ ID NO: 1906708 - DNA, 25 bp, Homo sapien
caggctgcccaacatggcaaaaaca

SEQ ID NO: 1906709 - DNA, 25 bp, Homo sapien
tattagtcccataaagggaagcagt

SEQ ID NO: 1906710 - DNA, 25 bp, Homo sapien
tactgaaatccagtgcctaatggag

SEQ ID NO: 1906711 - DNA, 25 bp, Homo sapien
cacgtttgagattaacaggagggct

SEQ ID NO: 1906712 - DNA, 25 bp, Homo sapien
gaccatgaagttatgaggctcactg

SEQ ID NO: 1906713 - DNA, 25 bp, Homo sapien
tatcatgcaaactgggacacaagag

SEQ ID NO: 1906714 - DNA, 25 bp, Homo sapien
cctcatgagtatatgtgctagccaa

SEQ ID NO: 1906715 - DNA, 25 bp, Homo sapien
ggctagagaaacagtggtgcattca

SEQ ID NO: 1906716 - DNA, 25 bp, Homo sapien
ggctggatccatgatgacctacaat

SEQ ID NO: 1906717 - DNA, 25 bp, Homo sapien
cttctcaatctcatttcgtgtgtct

SEQ ID NO: 1906718 - DNA, 25 bp, Homo sapien
ttctcaatctcatttcgtgtgtctg

SEQ ID NO: 1906719 - DNA, 25 bp, Homo sapien
tgccctgataatttcagggtttcat

SEQ ID NO: 1906720 - DNA, 25 bp, Homo sapien
cctgataatttcagggtttcatcat

SEQ ID NO: 1906721 - DNA, 25 bp, Homo sapien
tctgtagcagagctagtccattgca

SEQ ID NO: 1906722 - DNA, 25 bp, Homo sapien
cagtggaccatcagatgattgcaac

SEQ ID NO: 1906723 - DNA, 25 bp, Homo sapien
cccacgatgtacaaggagagcaata

SEQ ID NO: 1906724 - DNA, 25 bp, Homo sapien
cattgcaggcatttgctagaagaaa

SEQ ID NO: 1906725 - DNA, 25 bp, Homo sapien
caagtcactaggatatcccagacag

SEQ ID NO: 1906726 - DNA, 25 bp, Homo sapien
ctaggatatcccagacagaagttga

SEQ ID NO: 1906727 - DNA, 25 bp, Homo sapien
gtcactaggatatcccagacagaag

SEQ ID NO: 1906728 - DNA, 25 bp, Homo sapien
cacaagtcactaggatatcccagac

SEQ ID NO: 1906729 - DNA, 25 bp, Homo sapien
taaggatcctaaagagggctcccaa

SEQ ID NO: 1906730 - DNA, 25 bp, Homo sapien
gagacttaaggatcctaaagagggc

SEQ ID NO: 1906731 - DNA, 25 bp, Homo sapien
agtagagacttaaggatcctaaaga

SEQ ID NO: 1906732 - DNA, 25 bp, Homo sapien
gacttaaggatcctaaagagggctc

SEQ ID NO: 1906733 - DNA, 25 bp, Homo sapien
aagatgcctttggtggtggtagtca

SEQ ID NO: 1906734 - DNA, 25 bp, Homo sapien
ctgccagccaatctacaaagaagta

SEQ ID NO: 1906735 - DNA, 25 bp, Homo sapien
aagaagtaagatgcctttggtggtg

SEQ ID NO: 1906736 - DNA, 25 bp, Homo sapien
caatctacaaagaagtaagatgcct

SEQ ID NO: 1906737 - DNA, 25 bp, Homo sapien
gagtcacccacaaagcagcaatacc

SEQ ID NO: 1906738 - DNA, 25 bp, Homo sapien
caaaagtgagtcacccacaaagcag

SEQ ID NO: 1906739 - DNA, 25 bp, Homo sapien
tcaaaagtgagtcacccacaaagca

SEQ ID NO: 1906740 - DNA, 25 bp, Homo sapien
acccacaaagcagcaatacctgaac

SEQ ID NO: 1906741 - DNA, 25 bp, Homo sapien
tctcccacacttatctttctctttt

SEQ ID NO: 1906742 - DNA, 25 bp, Homo sapien
tcattctggcattctggatatatcc

SEQ ID NO: 1906743 - DNA, 25 bp, Homo sapien
ctgtgtctgcccatgacttctcatt

SEQ ID NO: 1906744 - DNA, 25 bp, Homo sapien
cttttcctgtgtctgcccatgactt

SEQ ID NO: 1906745 - DNA, 25 bp, Homo sapien
gtctagttaattcctgtgtccacag

SEQ ID NO: 1906746 - DNA, 25 bp, Homo sapien
tgatgactcctctctttacaaatga

SEQ ID NO: 1906747 - DNA, 25 bp, Homo sapien
tattctgaccaaactgtgcaatgtc

SEQ ID NO: 1906748 - DNA, 25 bp, Homo sapien
taatcatcttggcatgttgctacca

SEQ ID NO: 1906749 - DNA, 25 bp, Homo sapien
tgaaactggaatatgggtggagcac

SEQ ID NO: 1906750 - DNA, 25 bp, Homo sapien
catggagtggtataaaaatggctgc

SEQ ID NO: 1906751 - DNA, 25 bp, Homo sapien
cagagtcgacagctgccatggagtg

SEQ ID NO: 1906752 - DNA, 25 bp, Homo sapien
caaaggcttgggtgtctcctctaga

SEQ ID NO: 1906753 - DNA, 25 bp, Homo sapien
agccttctctatgaaaaagactgag

SEQ ID NO: 1906754 - DNA, 25 bp, Homo sapien
ttctctatgaaaaagactgagccag

SEQ ID NO: 1906755 - DNA, 25 bp, Homo sapien
cttaagccttctctatgaaaaagac

SEQ ID NO: 1906756 - DNA, 25 bp, Homo sapien
taagccttctctatgaaaaagactg

SEQ ID NO: 1906757 - DNA, 25 bp, Homo sapien
aaaggacaattttgataggatgtgg

SEQ ID NO: 1906758 - DNA, 25 bp, Homo sapien
ggtaaaagatgaagatacagtgtag

SEQ ID NO: 1906759 - DNA, 25 bp, Homo sapien
cccagccttcaatcagcacatttta

SEQ ID NO: 1906760 - DNA, 25 bp, Homo sapien
ccttgaagagtctataatctgatta

SEQ ID NO: 1906761 - DNA, 25 bp, Homo sapien
ctcgcagcagtgtcagagcagccat

SEQ ID NO: 1906762 - DNA, 25 bp, Homo sapien
caaaagctctggtgaagtaatgact

SEQ ID NO: 1906763 - DNA, 25 bp, Homo sapien
tgtaagaagctgatcctattttgtg

SEQ ID NO: 1906764 - DNA, 25 bp, Homo sapien
gctgtgcaagttgaacataacaata

SEQ ID NO: 1906765 - DNA, 25 bp, Homo sapien
gctgcatttgtgcatgctgtgcaag

SEQ ID NO: 1906766 - DNA, 25 bp, Homo sapien
tttagaccattcccttatatctgtt

SEQ ID NO: 1906767 - DNA, 25 bp, Homo sapien
ctttagaccattcccttatatctgt

SEQ ID NO: 1906768 - DNA, 25 bp, Homo sapien
ttcttcccgatttataagattttca

SEQ ID NO: 1906769 - DNA, 25 bp, Homo sapien
tgatttgtaggttacaacttggctt

SEQ ID NO: 1906770 - DNA, 25 bp, Homo sapien
tttgtccatgtttgtgttgtaattt

SEQ ID NO: 1906771 - DNA, 25 bp, Homo sapien
atgtcttttgtccatgtttgtgttg

SEQ ID NO: 1906772 - DNA, 25 bp, Homo sapien
agcagcagcatattctctacccact

SEQ ID NO: 1906773 - DNA, 25 bp, Homo sapien
cagattggcaggtgtgtctcgcagt

SEQ ID NO: 1906774 - DNA, 25 bp, Homo sapien
ggtccagcaggtccctatgctgcaa

SEQ ID NO: 1906775 - DNA, 25 bp, Homo sapien
gaagcagtgggaacatcatcattgc

SEQ ID NO: 1906776 - DNA, 25 bp, Homo sapien
caaagttaggcatgctgatacagag

SEQ ID NO: 1906777 - DNA, 25 bp, Homo sapien
tactactactgacagggaccaatgg

SEQ ID NO: 1906778 - DNA, 25 bp, Homo sapien
ccaatgggttctgtagtcaaatgac

SEQ ID NO: 1906779 - DNA, 25 bp, Homo sapien
tcagggtcaccttctaagcgtcagc

SEQ ID NO: 1906780 - DNA, 25 bp, Homo sapien
catgaagtgttcacgctgctgggcc

SEQ ID NO: 1906781 - DNA, 25 bp, Homo sapien
caagcccctcaactggaggctattc

SEQ ID NO: 1906782 - DNA, 25 bp, Homo sapien
attccagctgtcatgtacaagcccc

SEQ ID NO: 1906783 - DNA, 25 bp, Homo sapien
ttagagataaggagcaccaccaagc

SEQ ID NO: 1906784 - DNA, 25 bp, Homo sapien
ttgatgagcatgtggcagaagacag

SEQ ID NO: 1906785 - DNA, 25 bp, Homo sapien
aagccctcccaaagcttcaattagg

SEQ ID NO: 1906786 - DNA, 25 bp, Homo sapien
gcttcaattaggtttgatgagcatg

SEQ ID NO: 1906787 - DNA, 25 bp, Homo sapien
caaagccctcccaaagcttcaatta

SEQ ID NO: 1906788 - DNA, 25 bp, Homo sapien
taaacagatggtaaagagtggtcat

SEQ ID NO: 1906789 - DNA, 25 bp, Homo sapien
catggtcttctttatatagcattat

SEQ ID NO: 1906790 - DNA, 25 bp, Homo sapien
ttccatggcaaccaacatggtcttc

SEQ ID NO: 1906791 - DNA, 25 bp, Homo sapien
gcattataaacagatggtaaagagt

SEQ ID NO: 1906792 - DNA, 25 bp, Homo sapien
tccagtgtacttagacattctgaag

SEQ ID NO: 1906793 - DNA, 25 bp, Homo sapien
tgaagaacggactgaaataattagc

SEQ ID NO: 1906794 - DNA, 25 bp, Homo sapien
gagctggttatgatgtattctccac

SEQ ID NO: 1906795 - DNA, 25 bp, Homo sapien
ttcactccttttgggaagccctcag

SEQ ID NO: 1906796 - DNA, 25 bp, Homo sapien
ggataaattgtgttcggaattggtg

SEQ ID NO: 1906797 - DNA, 25 bp, Homo sapien
cacatagacacatcagagacaaact

SEQ ID NO: 1906798 - DNA, 25 bp, Homo sapien
actcaatacaggacaaatacagaga

SEQ ID NO: 1906799 - DNA, 25 bp, Homo sapien
tgctggtcggggaggttcgggccgc

SEQ ID NO: 1906800 - DNA, 25 bp, Homo sapien
cttgtaaactaatgcaacagaagca

SEQ ID NO: 1906801 - DNA, 25 bp, Homo sapien
ggattttaaaatcatacagccagtt

SEQ ID NO: 1906802 - DNA, 25 bp, Homo sapien
tgacaccaatttacacccattagga

SEQ ID NO: 1906803 - DNA, 25 bp, Homo sapien
attctactctacatatacaccaaag

SEQ ID NO: 1906804 - DNA, 25 bp, Homo sapien
ggtgcacctgtagcctctgacctgc

SEQ ID NO: 1906805 - DNA, 25 bp, Homo sapien
caacctgttgcactctgctttggta

SEQ ID NO: 1906806 - DNA, 25 bp, Homo sapien
caaataagtctgaagggtttgtcca

SEQ ID NO: 1906807 - DNA, 25 bp, Homo sapien
ggtatttctccaccattgcggtcca

SEQ ID NO: 1906808 - DNA, 25 bp, Homo sapien
tcgtttattcaggtagaagcttaga

SEQ ID NO: 1906809 - DNA, 25 bp, Homo sapien
taatctaagtgaagttctatgtgca

SEQ ID NO: 1906810 - DNA, 25 bp, Homo sapien
ttaaaaatatcacccagcatatggt

SEQ ID NO: 1906811 - DNA, 25 bp, Homo sapien
aactctgttttcagtcagggaatac

SEQ ID NO: 1906812 - DNA, 25 bp, Homo sapien
ttgtctgtaatttatataagtgaaa

SEQ ID NO: 1906813 - DNA, 25 bp, Homo sapien
tgagatcctcaaaggagcacagtac

SEQ ID NO: 1906814 - DNA, 25 bp, Homo sapien
aaagaagcgactgttaccccagatg

SEQ ID NO: 1906815 - DNA, 25 bp, Homo sapien
tacagtgtctataccagtgaatgca

SEQ ID NO: 1906816 - DNA, 25 bp, Homo sapien
gaaaaaacaaggtgctatgagatcc

SEQ ID NO: 1906817 - DNA, 25 bp, Homo sapien
gaaaagcatcgttatcaaccaagtg

SEQ ID NO: 1906818 - DNA, 25 bp, Homo sapien
catgtagtgtataaggcatcagagt

SEQ ID NO: 1906819 - DNA, 25 bp, Homo sapien
caagtgtgtccaaagattgatctcc

SEQ ID NO: 1906820 - DNA, 25 bp, Homo sapien
tgctgtagaaacctaaaccgaagtc

SEQ ID NO: 1906821 - DNA, 25 bp, Homo sapien
atttgcaaactctatccatctggca

SEQ ID NO: 1906822 - DNA, 25 bp, Homo sapien
tagagataacttgtgatccagcaat

SEQ ID NO: 1906823 - DNA, 25 bp, Homo sapien
agaggactctcatacacgactagtg

SEQ ID NO: 1906824 - DNA, 25 bp, Homo sapien
tcagtatactgaagagatagctata

SEQ ID NO: 1906825 - DNA, 25 bp, Homo sapien
tccagctgcactccataaactaaag

SEQ ID NO: 1906826 - DNA, 25 bp, Homo sapien
taaacactgtcaagagctcgatcat

SEQ ID NO: 1906827 - DNA, 25 bp, Homo sapien
tttcaagagcctttggtgagtcaca

SEQ ID NO: 1906828 - DNA, 25 bp, Homo sapien
tctcctgtcataaagcccctgtaat

SEQ ID NO: 1906829 - DNA, 25 bp, Homo sapien
taactccaggtctagtgaacttgtc

SEQ ID NO: 1906830 - DNA, 25 bp, Homo sapien
agacccacggttccttgaatgaagg

SEQ ID NO: 1906831 - DNA, 25 bp, Homo sapien
gatctgaagcaatctacgcgcctcg

SEQ ID NO: 1906832 - DNA, 25 bp, Homo sapien
cactacagtagagagtcaggaactc

SEQ ID NO: 1906833 - DNA, 25 bp, Homo sapien
tccaaggataaaaggcagcctgagc

SEQ ID NO: 1906834 - DNA, 25 bp, Homo sapien
ttattctgtgaggtctaagcaggca

SEQ ID NO: 1906835 - DNA, 25 bp, Homo sapien
tgaatcttgagcagccatccaagga

SEQ ID NO: 1906836 - DNA, 25 bp, Homo sapien
gaaatacagtagcttactccccagc

SEQ ID NO: 1906837 - DNA, 25 bp, Homo sapien
tgtctatttcccttatttgaatata

SEQ ID NO: 1906838 - DNA, 25 bp, Homo sapien
tatttcccttatttgaatataaatc

SEQ ID NO: 1906839 - DNA, 25 bp, Homo sapien
tctatttcccttatttgaatataaa

SEQ ID NO: 1906840 - DNA, 25 bp, Homo sapien
ttacatgtctatttcccttatttga

SEQ ID NO: 1906841 - DNA, 25 bp, Homo sapien
cactacctgattccagtgggccggg

SEQ ID NO: 1906842 - DNA, 25 bp, Homo sapien
agataacgtggcaagtgcaacagca

SEQ ID NO: 1906843 - DNA, 25 bp, Homo sapien
gaacccgaggctccaagataacgtg

SEQ ID NO: 1906844 - DNA, 25 bp, Homo sapien
cacctgcatagcgatgttgctgagc

SEQ ID NO: 1906845 - DNA, 25 bp, Homo sapien
agaagtgccgcgggaaacaaaccag

SEQ ID NO: 1906846 - DNA, 25 bp, Homo sapien
acctgggggtatccagaagtgccgc

SEQ ID NO: 1906847 - DNA, 25 bp, Homo sapien
ggtctgggacctgggggtatccaga

SEQ ID NO: 1906848 - DNA, 25 bp, Homo sapien
cagaagtgccgcgggaaacaaacca

SEQ ID NO: 1906849 - DNA, 25 bp, Homo sapien
tcctggagcagtgaccagaaacgaa

SEQ ID NO: 1906850 - DNA, 25 bp, Homo sapien
tcttgaccctcagagtaaggtggct

SEQ ID NO: 1906851 - DNA, 25 bp, Homo sapien
aaaggaagcggcaattcttgaccct

SEQ ID NO: 1906852 - DNA, 25 bp, Homo sapien
cctatgtggaggacgccatattgga

SEQ ID NO: 1906853 - DNA, 25 bp, Homo sapien
acgtatggcccaacagcacactgga

SEQ ID NO: 1906854 - DNA, 25 bp, Homo sapien
caccctcagtgttggttgtgagaaa

SEQ ID NO: 1906855 - DNA, 25 bp, Homo sapien
taaaagcatctctcgcctttgtggg

SEQ ID NO: 1906856 - DNA, 25 bp, Homo sapien
ggctgcctcctagtataaccctgtg

SEQ ID NO: 1906857 - DNA, 25 bp, Homo sapien
tgggcagtaccaagccatcgcatgg

SEQ ID NO: 1906858 - DNA, 25 bp, Homo sapien
cctagagtagtgactgtggaagcac

SEQ ID NO: 1906859 - DNA, 25 bp, Homo sapien
tagcttccctcgcagttgggcagag

SEQ ID NO: 1906860 - DNA, 25 bp, Homo sapien
gaagcacagttgatacggatgggca

SEQ ID NO: 1906861 - DNA, 25 bp, Homo sapien
aaagactaacaggatcaaacagaga

SEQ ID NO: 1906862 - DNA, 25 bp, Homo sapien
gttttctcactatttccctcattaa

SEQ ID NO: 1906863 - DNA, 25 bp, Homo sapien
tgtttccacagttttagaatattaa

SEQ ID NO: 1906864 - DNA, 25 bp, Homo sapien
cactatttccctcattaaagactaa

SEQ ID NO: 1906865 - DNA, 25 bp, Homo sapien
tcctctccgcgttattgggtcgtcg

SEQ ID NO: 1906866 - DNA, 25 bp, Homo sapien
tgttgcactatcattccaggagtgg

SEQ ID NO: 1906867 - DNA, 25 bp, Homo sapien
tcacccactggcgaatgttgcacta

SEQ ID NO: 1906868 - DNA, 25 bp, Homo sapien
gcaacagcattagggagatactccc

SEQ ID NO: 1906869 - DNA, 25 bp, Homo sapien
ccttgcaggcgcaaagcctggctcg

SEQ ID NO: 1906870 - DNA, 25 bp, Homo sapien
ggcttgcccaggatctaggcagcca

SEQ ID NO: 1906871 - DNA, 25 bp, Homo sapien
tctcttgactcttgggcgtcccagg

SEQ ID NO: 1906872 - DNA, 25 bp, Homo sapien
gcgtaagtgtttctcgcgcggaccc

SEQ ID NO: 1906873 - DNA, 25 bp, Homo sapien
agagccgcgcgtatcacagaaacat

SEQ ID NO: 1906874 - DNA, 25 bp, Homo sapien
gaagccgggaacgtcaatgtgtcct

SEQ ID NO: 1906875 - DNA, 25 bp, Homo sapien
aataggcaacgtggaggtactcagc

SEQ ID NO: 1906876 - DNA, 25 bp, Homo sapien
gggacagggacagactcaatcagac

SEQ ID NO: 1906877 - DNA, 25 bp, Homo sapien
ccggagggggaaactattctggcag

SEQ ID NO: 1906878 - DNA, 25 bp, Homo sapien
tccccgagaccccagcgttgcaccc

SEQ ID NO: 1906879 - DNA, 25 bp, Homo sapien
agcctccgcgcactctgcggtggcc

SEQ ID NO: 1906880 - DNA, 25 bp, Homo sapien
agtggggggaagctcgtccgggctg

SEQ ID NO: 1906881 - DNA, 25 bp, Homo sapien
atgaacaggcggctgcgagcagccc

SEQ ID NO: 1906882 - DNA, 25 bp, Homo sapien
tcctcagcggctcctaggacgggct

SEQ ID NO: 1906883 - DNA, 25 bp, Homo sapien
gacgggctcaaaaaccaactccaca

SEQ ID NO: 1906884 - DNA, 25 bp, Homo sapien
agcccacctcgcggagctgagaagc

SEQ ID NO: 1906885 - DNA, 25 bp, Homo sapien
gcgacggaagatggctgacgactcc

SEQ ID NO: 1906886 - DNA, 25 bp, Homo sapien
cgagcgacggaagatggctgacgac

SEQ ID NO: 1906887 - DNA, 25 bp, Homo sapien
gacggaagatggctgacgactccac

SEQ ID NO: 1906888 - DNA, 25 bp, Homo sapien
cggaagatggctgacgactccacgg

SEQ ID NO: 1906889 - DNA, 25 bp, Homo sapien
ccgtgacagccactgacgtcctccg

SEQ ID NO: 1906890 - DNA, 25 bp, Homo sapien
gaaaacaatgctgaaacatgcatat

SEQ ID NO: 1906891 - DNA, 25 bp, Homo sapien
attccattatatgcccaaactataa

SEQ ID NO: 1906892 - DNA, 25 bp, Homo sapien
ttttcccacccagacgcaattactg

SEQ ID NO: 1906893 - DNA, 25 bp, Homo sapien
ggattcctattgtttggcatttagt

SEQ ID NO: 1906894 - DNA, 25 bp, Homo sapien
aactgaacaccagtggttttattgg

SEQ ID NO: 1906895 - DNA, 25 bp, Homo sapien
taactgaacaccagtggttttattg

SEQ ID NO: 1906896 - DNA, 25 bp, Homo sapien
ctgtatgtaggttaatgctgcattc

SEQ ID NO: 1906897 - DNA, 25 bp, Homo sapien
gcagcttccttgatagtgaaacgag

SEQ ID NO: 1906898 - DNA, 25 bp, Homo sapien
cactcttaattatccatggctaaag

SEQ ID NO: 1906899 - DNA, 25 bp, Homo sapien
gaaacgaggattccatcactcttaa

SEQ ID NO: 1906900 - DNA, 25 bp, Homo sapien
tctaaaagcgtggatggcccagtag

SEQ ID NO: 1906901 - DNA, 25 bp, Homo sapien
gtggttctaaaagcgtggatggccc

SEQ ID NO: 1906902 - DNA, 25 bp, Homo sapien
ggttctaaaagcgtggatggcccag

SEQ ID NO: 1906903 - DNA, 25 bp, Homo sapien
ctgtggttctaaaagcgtggatggc

SEQ ID NO: 1906904 - DNA, 25 bp, Homo sapien
gcttctctttgagggtaccagaggg

SEQ ID NO: 1906905 - DNA, 25 bp, Homo sapien
ggtgtagcttacttctgggcctgga

SEQ ID NO: 1906906 - DNA, 25 bp, Homo sapien
tgattgggaacacggtgatactgca

SEQ ID NO: 1906907 - DNA, 25 bp, Homo sapien
ggcccagtggaatactcgtgattgg

SEQ ID NO: 1906908 - DNA, 25 bp, Homo sapien
gaaactaaaatcaggcccaggtagc

SEQ ID NO: 1906909 - DNA, 25 bp, Homo sapien
gccagaaagtgggaatcaagcgcta

SEQ ID NO: 1906910 - DNA, 25 bp, Homo sapien
tgccgacgagcctacttcaagagaa

SEQ ID NO: 1906911 - DNA, 25 bp, Homo sapien
tctgcagcgagaagtgctttgcggc

SEQ ID NO: 1906912 - DNA, 25 bp, Homo sapien
gaaatggtcttgttcgggtttcttc

SEQ ID NO: 1906913 - DNA, 25 bp, Homo sapien
gaagaaacccgaacaagaccatttc

SEQ ID NO: 1906914 - DNA, 25 bp, Homo sapien
agaactgctgtagcctttgccacca

SEQ ID NO: 1906915 - DNA, 25 bp, Homo sapien
tactgcggtaacttgctagtcctca

SEQ ID NO: 1906916 - DNA, 25 bp, Homo sapien
gaaatgctaattatgggctcactgc

SEQ ID NO: 1906917 - DNA, 25 bp, Homo sapien
tagtgttagccaccatggatgggaa

SEQ ID NO: 1906918 - DNA, 25 bp, Homo sapien
aaatagcacgtatacttgagagtgg

SEQ ID NO: 1906919 - DNA, 25 bp, Homo sapien
ggagaagtcactggggtgcaagggc

SEQ ID NO: 1906920 - DNA, 25 bp, Homo sapien
ctgcatcctggatgcagtcctccag

SEQ ID NO: 1906921 - DNA, 25 bp, Homo sapien
gtggagaagtcactggggtgcaagg

SEQ ID NO: 1906922 - DNA, 25 bp, Homo sapien
gacaggaaggaagttggcagcttcc

SEQ ID NO: 1906923 - DNA, 25 bp, Homo sapien
caggaaggaagttggcagcttccat

SEQ ID NO: 1906924 - DNA, 25 bp, Homo sapien
tggaaggccagtggggacaggaagg

SEQ ID NO: 1906925 - DNA, 25 bp, Homo sapien
gggacaggaaggaagttggcagctt

SEQ ID NO: 1906926 - DNA, 25 bp, Homo sapien
catagctgtgttgttaaccatggca

SEQ ID NO: 1906927 - DNA, 25 bp, Homo sapien
gttgttaaccatggcacgaggcaca

SEQ ID NO: 1906928 - DNA, 25 bp, Homo sapien
ggcctgttccacatagctgtgttgt

SEQ ID NO: 1906929 - DNA, 25 bp, Homo sapien
ccaggcctgttccacatagctgtgt

SEQ ID NO: 1906930 - DNA, 25 bp, Homo sapien
ccttgacagctgtctaagggctgtt

SEQ ID NO: 1906931 - DNA, 25 bp, Homo sapien
gctgcttagatggagtaattattac

SEQ ID NO: 1906932 - DNA, 25 bp, Homo sapien
gatcccttgaatggtgtgtcacaca

SEQ ID NO: 1906933 - DNA, 25 bp, Homo sapien
gcttccggaagactgagccttgaca

SEQ ID NO: 1906934 - DNA, 25 bp, Homo sapien
tcaaaatccttatgtttgttcactt

SEQ ID NO: 1906935 - DNA, 25 bp, Homo sapien
tttaatctgtaggagcccattcccc

SEQ ID NO: 1906936 - DNA, 25 bp, Homo sapien
atggtgagtcgtggatgagatactt

SEQ ID NO: 1906937 - DNA, 25 bp, Homo sapien
gatacttgattgttttcaaaatcct

SEQ ID NO: 1906938 - DNA, 25 bp, Homo sapien
gctgcagtctcttggtgtattctag

SEQ ID NO: 1906939 - DNA, 25 bp, Homo sapien
tctttgcatccctatagctcatggt

SEQ ID NO: 1906940 - DNA, 25 bp, Homo sapien
tcgccatcgaccagaccagatttct

SEQ ID NO: 1906941 - DNA, 25 bp, Homo sapien
tgcagtgcctctcaacattgtgtcc

SEQ ID NO: 1906942 - DNA, 25 bp, Homo sapien
attctttcagccaccagtctgggag

SEQ ID NO: 1906943 - DNA, 25 bp, Homo sapien
tctttcagccaccagtctgggaggt

SEQ ID NO: 1906944 - DNA, 25 bp, Homo sapien
tttcagccaccagtctgggaggtag

SEQ ID NO: 1906945 - DNA, 25 bp, Homo sapien
ttcagccaccagtctgggaggtagg

SEQ ID NO: 1906946 - DNA, 25 bp, Homo sapien
tcgtgaatgcgaagggatttgctgt

SEQ ID NO: 1906947 - DNA, 25 bp, Homo sapien
tttcgtgaatgcgaagggatttgct

SEQ ID NO: 1906948 - DNA, 25 bp, Homo sapien
gttttcgtgaatgcgaagggatttg

SEQ ID NO: 1906949 - DNA, 25 bp, Homo sapien
ttcgtgaatgcgaagggatttgctg

SEQ ID NO: 1906950 - DNA, 25 bp, Homo sapien
tccattgtgtccctgttggaatctc

SEQ ID NO: 1906951 - DNA, 25 bp, Homo sapien
tgtgtccctgttggaatctccatta

SEQ ID NO: 1906952 - DNA, 25 bp, Homo sapien
cattgtgtccctgttggaatctcca

SEQ ID NO: 1906953 - DNA, 25 bp, Homo sapien
ttgtgtccctgttggaatctccatt

SEQ ID NO: 1906954 - DNA, 25 bp, Homo sapien
ctgtcagccatatgacggggaagag

SEQ ID NO: 1906955 - DNA, 25 bp, Homo sapien
tcagccatatgacggggaagagagc

SEQ ID NO: 1906956 - DNA, 25 bp, Homo sapien
agaggaagaggcctcgtttctaccg

SEQ ID NO: 1906957 - DNA, 25 bp, Homo sapien
tcttttccatcaaagatgtcatttt

SEQ ID NO: 1906958 - DNA, 25 bp, Homo sapien
cctctggtgagaagtctgtcagctt

SEQ ID NO: 1906959 - DNA, 25 bp, Homo sapien
catttgtgggatgtgcacatgaaac

SEQ ID NO: 1906960 - DNA, 25 bp, Homo sapien
aatgagtgagccctctggtgagaag

SEQ ID NO: 1906961 - DNA, 25 bp, Homo sapien
gattatgggatcactaaagatccca

SEQ ID NO: 1906962 - DNA, 25 bp, Homo sapien
aagcccactgagagtaagaccttgc

SEQ ID NO: 1906963 - DNA, 25 bp, Homo sapien
aaagcccactgagagtaagaccttg

SEQ ID NO: 1906964 - DNA, 25 bp, Homo sapien
tttctcctcagccacgactttctca

SEQ ID NO: 1906965 - DNA, 25 bp, Homo sapien
cagccacgactttctcaatttttga

SEQ ID NO: 1906966 - DNA, 25 bp, Homo sapien
tatcatagtcgtcaaaaatgtgggc

SEQ ID NO: 1906967 - DNA, 25 bp, Homo sapien
agtatcatagtcgtcaaaaatgtgg

SEQ ID NO: 1906968 - DNA, 25 bp, Homo sapien
ccccagctggactttatacactgtc

SEQ ID NO: 1906969 - DNA, 25 bp, Homo sapien
ccagctggactttatacactgtcat

SEQ ID NO: 1906970 - DNA, 25 bp, Homo sapien
aacagcaggcagtcccatatgcagg

SEQ ID NO: 1906971 - DNA, 25 bp, Homo sapien
gacactatcctatcgagtctggatt

SEQ ID NO: 1906972 - DNA, 25 bp, Homo sapien
gtaattctgcttcatgggaattcct

SEQ ID NO: 1906973 - DNA, 25 bp, Homo sapien
ggtttcaataactgacactatccta

SEQ ID NO: 1906974 - DNA, 25 bp, Homo sapien
caggcccctggttctaagtgtattc

SEQ ID NO: 1906975 - DNA, 25 bp, Homo sapien
catgttagcctctcacagtagtgag

SEQ ID NO: 1906976 - DNA, 25 bp, Homo sapien
taaagcttggccaatcagacccagt

SEQ ID NO: 1906977 - DNA, 25 bp, Homo sapien
gatgtctttgcaatccagcccaact

SEQ ID NO: 1906978 - DNA, 25 bp, Homo sapien
tgccatagtcttgtagttcaggtcc

SEQ ID NO: 1906979 - DNA, 25 bp, Homo sapien
tcttcagcctgttggctcccatttc

SEQ ID NO: 1906980 - DNA, 25 bp, Homo sapien
cattcctctgttcccatctgtgctg

SEQ ID NO: 1906981 - DNA, 25 bp, Homo sapien
agaccttcttgaccacagttgacca

SEQ ID NO: 1906982 - DNA, 25 bp, Homo sapien
tccactctgcatgttcatcccccat

SEQ ID NO: 1906983 - DNA, 25 bp, Homo sapien
catttgggaggagctgcgagtagaa

SEQ ID NO: 1906984 - DNA, 25 bp, Homo sapien
tcaggcatttgggaggagctgcgag

SEQ ID NO: 1906985 - DNA, 25 bp, Homo sapien
ggtctccgtgagcaagacagcccac

SEQ ID NO: 1906986 - DNA, 25 bp, Homo sapien
ttccacagtgcttattcggtccaga

SEQ ID NO: 1906987 - DNA, 25 bp, Homo sapien
tctggactgtctcctgtaagacgtt

SEQ ID NO: 1906988 - DNA, 25 bp, Homo sapien
gaatcattgctagctcctgaagagg

SEQ ID NO: 1906989 - DNA, 25 bp, Homo sapien
ggacctctctggactgtctcctgta

SEQ ID NO: 1906990 - DNA, 25 bp, Homo sapien
tgtaagacgtttcatggccagaatc

SEQ ID NO: 1906991 - DNA, 25 bp, Homo sapien
tactgcgtatcaagctgcaggaagt

SEQ ID NO: 1906992 - DNA, 25 bp, Homo sapien
tgagtgtgctgaaaaaagtggaacc

SEQ ID NO: 1906993 - DNA, 25 bp, Homo sapien
agtgtgactcccgtttactgcgtat

SEQ ID NO: 1906994 - DNA, 25 bp, Homo sapien
tcgcctttactgttggtgatcatca

SEQ ID NO: 1906995 - DNA, 25 bp, Homo sapien
cgagcccggctgcacaacgtgatcc

SEQ ID NO: 1906996 - DNA, 25 bp, Homo sapien
accgcgcgctgcacgcgcacgtcaa

SEQ ID NO: 1906997 - DNA, 25 bp, Homo sapien
ctgcacgcgcacgtcaaggcggagc

SEQ ID NO: 1906998 - DNA, 25 bp, Homo sapien
acaacgtgatccaccgcgcgctgca

SEQ ID NO: 1906999 - DNA, 25 bp, Homo sapien
gccgctcaaaaggaggtgcctccga

SEQ ID NO: 1907000 - DNA, 25 bp, Homo sapien
tgtgcttccaactgccacctggacg

SEQ ID NO: 1907001 - DNA, 25 bp, Homo sapien
ggaccatgcctatgctctgcggatg

SEQ ID NO: 1907002 - DNA, 25 bp, Homo sapien
gtcggtcaaggagaataactgtgct

SEQ ID NO: 1907003 - DNA, 25 bp, Homo sapien
gactttcctgtctaagagatcgtgc

SEQ ID NO: 1907004 - DNA, 25 bp, Homo sapien
ctaagagatcgtgccaaagggacgg

SEQ ID NO: 1907005 - DNA, 25 bp, Homo sapien
tcctgtctaagagatcgtgccaaag

SEQ ID NO: 1907006 - DNA, 25 bp, Homo sapien
tccagactttcctgtctaagagatc

SEQ ID NO: 1907007 - DNA, 25 bp, Homo sapien
aaaactgtgcagcttgggtgttgtg

SEQ ID NO: 1907008 - DNA, 25 bp, Homo sapien
caaagctctgcatcccatcaacaag

SEQ ID NO: 1907009 - DNA, 25 bp, Homo sapien
taaaaactgtgcagcttgggtgttg

SEQ ID NO: 1907010 - DNA, 25 bp, Homo sapien
tgtgggagcaagaatgatcaggttt

SEQ ID NO: 1907011 - DNA, 25 bp, Homo sapien
tgtctgtccttagaccgaagggcag

SEQ ID NO: 1907012 - DNA, 25 bp, Homo sapien
tggaggttacacagcgatgcctaga

SEQ ID NO: 1907013 - DNA, 25 bp, Homo sapien
ttgcagcagcggacttcacgaatgt

SEQ ID NO: 1907014 - DNA, 25 bp, Homo sapien
tggcctgcggctacttttaagaaag

SEQ ID NO: 1907015 - DNA, 25 bp, Homo sapien
gctgcgattcagaccagagcctaac

SEQ ID NO: 1907016 - DNA, 25 bp, Homo sapien
gctaagatgaaactcacccttggct

SEQ ID NO: 1907017 - DNA, 25 bp, Homo sapien
cagagccatagggtgagtagcatca

SEQ ID NO: 1907018 - DNA, 25 bp, Homo sapien
catcacagtgatgaagctgcgattc

SEQ ID NO: 1907019 - DNA, 25 bp, Homo sapien
gagtgtcccagaatagctgcggcta

SEQ ID NO: 1907020 - DNA, 25 bp, Homo sapien
tctacccttgtgagtgtcccagaat

SEQ ID NO: 1907021 - DNA, 25 bp, Homo sapien
agtgtcccagaatagctgcggctac

SEQ ID NO: 1907022 - DNA, 25 bp, Homo sapien
agataaacagcgttgccgcagccag

SEQ ID NO: 1907023 - DNA, 25 bp, Homo sapien
agcgttgccgcagccagcacgtaat

SEQ ID NO: 1907024 - DNA, 25 bp, Homo sapien
tgtcccagataaacagcgttgccgc

SEQ ID NO: 1907025 - DNA, 25 bp, Homo sapien
gggactcgttattgtcccagataaa

SEQ ID NO: 1907026 - DNA, 25 bp, Homo sapien
tgcccgagtgagtggatctctggta

SEQ ID NO: 1907027 - DNA, 25 bp, Homo sapien
ataagtgatgggcagacgtgcccga

SEQ ID NO: 1907028 - DNA, 25 bp, Homo sapien
tgtgataagtgatgggcagacgtgc

SEQ ID NO: 1907029 - DNA, 25 bp, Homo sapien
cagacgtgcccgagtgagtggatct

SEQ ID NO: 1907030 - DNA, 25 bp, Homo sapien
cacagtggaagaatcgaggctctgg

SEQ ID NO: 1907031 - DNA, 25 bp, Homo sapien
cacagaggaagaatcgaggctctga

SEQ ID NO: 1907032 - DNA, 25 bp, Homo sapien
cactgcacagaggaagaatcgaggc

SEQ ID NO: 1907033 - DNA, 25 bp, Homo sapien
gggatggtggctgaggaacacagtg

SEQ ID NO: 1907034 - DNA, 25 bp, Homo sapien
tgaggaacatggaggaggaatcagg

SEQ ID NO: 1907035 - DNA, 25 bp, Homo sapien
ctgaggaacatggaggaggaatcag

SEQ ID NO: 1907036 - DNA, 25 bp, Homo sapien
gaggaggaatcagggctctgaggga

SEQ ID NO: 1907037 - DNA, 25 bp, Homo sapien
ggaatcagggctctgagggagggtg

SEQ ID NO: 1907038 - DNA, 25 bp, Homo sapien
gaaaagtgaagcccaagcttggttc

SEQ ID NO: 1907039 - DNA, 25 bp, Homo sapien
tcctgtgtcaccaacaagggggctg

SEQ ID NO: 1907040 - DNA, 25 bp, Homo sapien
ttcttcattttcatcgattccagag

SEQ ID NO: 1907041 - DNA, 25 bp, Homo sapien
cattttcatcgattccagagtcttt

SEQ ID NO: 1907042 - DNA, 25 bp, Homo sapien
gaggcagagcctcatatctcggtga

SEQ ID NO: 1907043 - DNA, 25 bp, Homo sapien
gactggcggcaaatgaaagaaggct

SEQ ID NO: 1907044 - DNA, 25 bp, Homo sapien
aagaaggctgcaggtatcaagaggc

SEQ ID NO: 1907045 - DNA, 25 bp, Homo sapien
tcccagaactgactgagtggcctca

SEQ ID NO: 1907046 - DNA, 25 bp, Homo sapien
tgagcagaccgtgaatgaaactcct

SEQ ID NO: 1907047 - DNA, 25 bp, Homo sapien
ggctcatcctaggtctgccctggcg

SEQ ID NO: 1907048 - DNA, 25 bp, Homo sapien
tgaaactcctgttgaaatcacgctg

SEQ ID NO: 1907049 - DNA, 25 bp, Homo sapien
ctggagagtgtgctgctgtctgact

SEQ ID NO: 1907050 - DNA, 25 bp, Homo sapien
tgaagaccaaaatgccctcaaggtg

SEQ ID NO: 1907051 - DNA, 25 bp, Homo sapien
ccaggaagtcagtgagacaatctct

SEQ ID NO: 1907052 - DNA, 25 bp, Homo sapien
tttgctgggcgtcaggaaagactca

SEQ ID NO: 1907053 - DNA, 25 bp, Homo sapien
aaccctgatggttttcggtgatcca

SEQ ID NO: 1907054 - DNA, 25 bp, Homo sapien
tgtgcacttgtacagttgtagctgc

SEQ ID NO: 1907055 - DNA, 25 bp, Homo sapien
gctgcgagtccagaagtcctctaga

SEQ ID NO: 1907056 - DNA, 25 bp, Homo sapien
ccagaagtcctctagagcatgtgta

SEQ ID NO: 1907057 - DNA, 25 bp, Homo sapien
ggtgagacagttgtggagtatccca

SEQ ID NO: 1907058 - DNA, 25 bp, Homo sapien
tccagggcctgcttcctaaccatgc

SEQ ID NO: 1907059 - DNA, 25 bp, Homo sapien
agagcccactccgtccgttccaggg

SEQ ID NO: 1907060 - DNA, 25 bp, Homo sapien
tgctagaccacgcttgtctgcagac

SEQ ID NO: 1907061 - DNA, 25 bp, Homo sapien
gaccacgcttgtctgcagacaagag

SEQ ID NO: 1907062 - DNA, 25 bp, Homo sapien
ctaataagtaagaatgcctaaggag

SEQ ID NO: 1907063 - DNA, 25 bp, Homo sapien
taaattcccatcctctatgagagaa

SEQ ID NO: 1907064 - DNA, 25 bp, Homo sapien
caaacattgccgcttcagaatctaa

SEQ ID NO: 1907065 - DNA, 25 bp, Homo sapien
gcctaaggagatccactctgtggcc

SEQ ID NO: 1907066 - DNA, 25 bp, Homo sapien
gctgtgcctctcatccaccgttgga

SEQ ID NO: 1907067 - DNA, 25 bp, Homo sapien
ttgtttggcgtctagctccctggct

SEQ ID NO: 1907068 - DNA, 25 bp, Homo sapien
tctgcatggacaggcggagttgttt

SEQ ID NO: 1907069 - DNA, 25 bp, Homo sapien
gcaagggtcagggtaaggcatcttt

SEQ ID NO: 1907070 - DNA, 25 bp, Homo sapien
cctgagcctggattccgaacccagt

SEQ ID NO: 1907071 - DNA, 25 bp, Homo sapien
ttgactcagatttagtggtgaaacg

SEQ ID NO: 1907072 - DNA, 25 bp, Homo sapien
ccagattagagattgttgactcaga

SEQ ID NO: 1907073 - DNA, 25 bp, Homo sapien
gagccggactctgttgatggcaagc

SEQ ID NO: 1907074 - DNA, 25 bp, Homo sapien
tttggcaaaccatgtcccgaagcct

SEQ ID NO: 1907075 - DNA, 25 bp, Homo sapien
gtcccgaagcctccacacaatgtga

SEQ ID NO: 1907076 - DNA, 25 bp, Homo sapien
ccatttggcaaaccatgtcccgaag

SEQ ID NO: 1907077 - DNA, 25 bp, Homo sapien
cacacaatgtgactgtagagttcat

SEQ ID NO: 1907078 - DNA, 25 bp, Homo sapien
tgattaaccatttcctgcccaacgt

SEQ ID NO: 1907079 - DNA, 25 bp, Homo sapien
gaagagttgtctcatcaggtgccac

SEQ ID NO: 1907080 - DNA, 25 bp, Homo sapien
tgtagtgtaattaatcgctgcccct

SEQ ID NO: 1907081 - DNA, 25 bp, Homo sapien
tttggcaggaagagtcacttccaca

SEQ ID NO: 1907082 - DNA, 25 bp, Homo sapien
gcttgacgtaattctgagaggaaat

SEQ ID NO: 1907083 - DNA, 25 bp, Homo sapien
gaactctgtttgtcggccacaaggt

SEQ ID NO: 1907084 - DNA, 25 bp, Homo sapien
aatgggcaagaactctgtttgtcgg

SEQ ID NO: 1907085 - DNA, 25 bp, Homo sapien
tcagccaccttgcttgacgtaattc

SEQ ID NO: 1907086 - DNA, 25 bp, Homo sapien
gcctttgcatggctcgtgtccaact

SEQ ID NO: 1907087 - DNA, 25 bp, Homo sapien
tcaagttccgatccagcctgataga

SEQ ID NO: 1907088 - DNA, 25 bp, Homo sapien
catcttccaactagattcttcctgg

SEQ ID NO: 1907089 - DNA, 25 bp, Homo sapien
gctggcagtggatgctcgctcttcc

SEQ ID NO: 1907090 - DNA, 25 bp, Homo sapien
actcatcacctttggagtgagtggg

SEQ ID NO: 1907091 - DNA, 25 bp, Homo sapien
cactcatcacctttggagtgagtgg

SEQ ID NO: 1907092 - DNA, 25 bp, Homo sapien
catcccactcatcacctttggagtg

SEQ ID NO: 1907093 - DNA, 25 bp, Homo sapien
tcccactcatcacctttggagtgag

SEQ ID NO: 1907094 - DNA, 25 bp, Homo sapien
ccaaaaagggcaggtcatgaggacc

SEQ ID NO: 1907095 - DNA, 25 bp, Homo sapien
tccaggcacctcaacatgagctgtt

SEQ ID NO: 1907096 - DNA, 25 bp, Homo sapien
gaaatcacagcttggaatgaggtcc

SEQ ID NO: 1907097 - DNA, 25 bp, Homo sapien
gctgcataatcaaacattagaagcc

SEQ ID NO: 1907098 - DNA, 25 bp, Homo sapien
tacaccagcacgatgcagacaaagg

SEQ ID NO: 1907099 - DNA, 25 bp, Homo sapien
ctggatgcctctttaaagtgtctaa

SEQ ID NO: 1907100 - DNA, 25 bp, Homo sapien
tcactaaggccccttggaaatgtgt

SEQ ID NO: 1907101 - DNA, 25 bp, Homo sapien
caggagacaggtttggaaggaattt

SEQ ID NO: 1907102 - DNA, 25 bp, Homo sapien
ggcccatgatgcactgtactagaaa

SEQ ID NO: 1907103 - DNA, 25 bp, Homo sapien
taatagccctcctgcaaaagttaca

SEQ ID NO: 1907104 - DNA, 25 bp, Homo sapien
taaaatcattaaggccagtagtggt

SEQ ID NO: 1907105 - DNA, 25 bp, Homo sapien
cactgaatcatacacaggcccatga

SEQ ID NO: 1907106 - DNA, 25 bp, Homo sapien
tggattgcagagtgactccgtgcat

SEQ ID NO: 1907107 - DNA, 25 bp, Homo sapien
cccggctttggtcatgaggctgtac

SEQ ID NO: 1907108 - DNA, 25 bp, Homo sapien
tggcattatctgaattgctgctgga

SEQ ID NO: 1907109 - DNA, 25 bp, Homo sapien
gctaactgggtctggacaacgttct

SEQ ID NO: 1907110 - DNA, 25 bp, Homo sapien
caagcgcctagtgcatggaactgac

SEQ ID NO: 1907111 - DNA, 25 bp, Homo sapien
tgtaaagcgacacctagtgaggcgc

SEQ ID NO: 1907112 - DNA, 25 bp, Homo sapien
gattctacggttctacatgtgaggg

SEQ ID NO: 1907113 - DNA, 25 bp, Homo sapien
caaagtagtccgtacattgcagctc

SEQ ID NO: 1907114 - DNA, 25 bp, Homo sapien
aatgtttggaacatgaacacaggca

SEQ ID NO: 1907115 - DNA, 25 bp, Homo sapien
taagtaccacatctgtacaagtgag

SEQ ID NO: 1907116 - DNA, 25 bp, Homo sapien
ccaggtcggctctcatttggacaag

SEQ ID NO: 1907117 - DNA, 25 bp, Homo sapien
gaagcaaagctactgcaatggaata

SEQ ID NO: 1907118 - DNA, 25 bp, Homo sapien
tgagaacatatctctcgcctgaaaa

SEQ ID NO: 1907119 - DNA, 25 bp, Homo sapien
gttccacgtgaacatggatccagtt

SEQ ID NO: 1907120 - DNA, 25 bp, Homo sapien
atgagatagcacctccgcgagagaa

SEQ ID NO: 1907121 - DNA, 25 bp, Homo sapien
tactcaagggatctctttgacattg

SEQ ID NO: 1907122 - DNA, 25 bp, Homo sapien
gaagaggtaccacaagtatcggaag

SEQ ID NO: 1907123 - DNA, 25 bp, Homo sapien
tgagtacataacctgcccatggctg

SEQ ID NO: 1907124 - DNA, 25 bp, Homo sapien
tatctaactctaaaccagcagtgag

SEQ ID NO: 1907125 - DNA, 25 bp, Homo sapien
aattcttaagagacaggccctatca

SEQ ID NO: 1907126 - DNA, 25 bp, Homo sapien
tgtacaacggcagctgatcaagcgg

SEQ ID NO: 1907127 - DNA, 25 bp, Homo sapien
taatgattggatacgaactagaccc

SEQ ID NO: 1907128 - DNA, 25 bp, Homo sapien
caaacaaggctcacatggataggtc

SEQ ID NO: 1907129 - DNA, 25 bp, Homo sapien
caagtactgcacatgaaagtgggcc

SEQ ID NO: 1907130 - DNA, 25 bp, Homo sapien
caatgtggtagcagagtttcagtgc

SEQ ID NO: 1907131 - DNA, 25 bp, Homo sapien
aacagcagagcgttgccatcaatct

SEQ ID NO: 1907132 - DNA, 25 bp, Homo sapien
tcatgaccatgtcactcttcagcaa

SEQ ID NO: 1907133 - DNA, 25 bp, Homo sapien
tcagtttgtcaatgtggtagcagag

SEQ ID NO: 1907134 - DNA, 25 bp, Homo sapien
ctttagctgataacaaagcaactca

SEQ ID NO: 1907135 - DNA, 25 bp, Homo sapien
gctgataacaaagcaactcattcca

SEQ ID NO: 1907136 - DNA, 25 bp, Homo sapien
tagctgataacaaagcaactcattc

SEQ ID NO: 1907137 - DNA, 25 bp, Homo sapien
ttagctgataacaaagcaactcatt

SEQ ID NO: 1907138 - DNA, 25 bp, Homo sapien
acaggcctcagcttgatgttacagg

SEQ ID NO: 1907139 - DNA, 25 bp, Homo sapien
gacaaccaagcggattctccctaga

SEQ ID NO: 1907140 - DNA, 25 bp, Homo sapien
aaatgagtacagtgccatgcgcggt

SEQ ID NO: 1907141 - DNA, 25 bp, Homo sapien
caaagctccttaaacgtggaagagg

SEQ ID NO: 1907142 - DNA, 25 bp, Homo sapien
gtgggtcggcgtccttcacaaacca

SEQ ID NO: 1907143 - DNA, 25 bp, Homo sapien
tggcatcctgcgcatcctgagaagg

SEQ ID NO: 1907144 - DNA, 25 bp, Homo sapien
catcctgcgcatcctgagaagggct

SEQ ID NO: 1907145 - DNA, 25 bp, Homo sapien
agagcctgtgggtcggcgtccttca

SEQ ID NO: 1907146 - DNA, 25 bp, Homo sapien
gatggggcacagagagggagaccat

SEQ ID NO: 1907147 - DNA, 25 bp, Homo sapien
ctggatggggcacagagagggagac

SEQ ID NO: 1907148 - DNA, 25 bp, Homo sapien
ggatggggcacagagagggagacca

SEQ ID NO: 1907149 - DNA, 25 bp, Homo sapien
tggatggggcacagagagggagacc

SEQ ID NO: 1907150 - DNA, 25 bp, Homo sapien
ccagtcgtctggcaagattactcag

SEQ ID NO: 1907151 - DNA, 25 bp, Homo sapien
gattactcagactgtcagggcctga

SEQ ID NO: 1907152 - DNA, 25 bp, Homo sapien
gcctggctggttctaatacttctaa

SEQ ID NO: 1907153 - DNA, 25 bp, Homo sapien
gacagccaggattcagggttcaggt

SEQ ID NO: 1907154 - DNA, 25 bp, Homo sapien
caccagttggactgaacagggcaga

SEQ ID NO: 1907155 - DNA, 25 bp, Homo sapien
caggagctatgctgaagccctctga

SEQ ID NO: 1907156 - DNA, 25 bp, Homo sapien
tgagattgcaccaacgtgagtggga

SEQ ID NO: 1907157 - DNA, 25 bp, Homo sapien
gacatcctagggctcaactggaagg

SEQ ID NO: 1907158 - DNA, 25 bp, Homo sapien
cacagacatgatgcatgtttattga

SEQ ID NO: 1907159 - DNA, 25 bp, Homo sapien
gggcacagacatgatgcatgtttat

SEQ ID NO: 1907160 - DNA, 25 bp, Homo sapien
acactggggacaaacctatgaaatc

SEQ ID NO: 1907161 - DNA, 25 bp, Homo sapien
cactggggacaaacctatgaaatca

SEQ ID NO: 1907162 - DNA, 25 bp, Homo sapien
tacagggtggcaagatgaagactcc

SEQ ID NO: 1907163 - DNA, 25 bp, Homo sapien
ctttggaaaatagggctctgctcac

SEQ ID NO: 1907164 - DNA, 25 bp, Homo sapien
tacaaaatagctcacgtgtgcggct

SEQ ID NO: 1907165 - DNA, 25 bp, Homo sapien
tcactggtggaaggatcctaggctc

SEQ ID NO: 1907166 - DNA, 25 bp, Homo sapien
ccttatagcgcttttgtagactgca

SEQ ID NO: 1907167 - DNA, 25 bp, Homo sapien
ggtgacacttcctatgcaagagaca

SEQ ID NO: 1907168 - DNA, 25 bp, Homo sapien
tctcctgggcagagctaacctacag

SEQ ID NO: 1907169 - DNA, 25 bp, Homo sapien
gagtctacgtatcctgtggcctagc

SEQ ID NO: 1907170 - DNA, 25 bp, Homo sapien
gaagctgatgcatgcattacattac

SEQ ID NO: 1907171 - DNA, 25 bp, Homo sapien
agtgggaagctgatgcatgcattac

SEQ ID NO: 1907172 - DNA, 25 bp, Homo sapien
tgggaagctgatgcatgcattacat

SEQ ID NO: 1907173 - DNA, 25 bp, Homo sapien
cagtgggaagctgatgcatgcatta

SEQ ID NO: 1907174 - DNA, 25 bp, Homo sapien
ccttcaagagaggtcgtgtttctct

SEQ ID NO: 1907175 - DNA, 25 bp, Homo sapien
tccttcaagagaggtcgtgtttctc

SEQ ID NO: 1907176 - DNA, 25 bp, Homo sapien
tttccttcaagagaggtcgtgtttc

SEQ ID NO: 1907177 - DNA, 25 bp, Homo sapien
ttcaagagaggtcgtgtttctcttg

SEQ ID NO: 1907178 - DNA, 25 bp, Homo sapien
acagggttcaccaggtactcttcgg

SEQ ID NO: 1907179 - DNA, 25 bp, Homo sapien
tggaggcggaggtgtccacgctgta

SEQ ID NO: 1907180 - DNA, 25 bp, Homo sapien
tctgcctcttgcagtacagcgagga

SEQ ID NO: 1907181 - DNA, 25 bp, Homo sapien
gtagcggttcatgcccacagggttc

SEQ ID NO: 1907182 - DNA, 25 bp, Homo sapien
gccaatgaagtgctgcgagatgtct

SEQ ID NO: 1907183 - DNA, 25 bp, Homo sapien
aggaccctggaacgctacatctttg

SEQ ID NO: 1907184 - DNA, 25 bp, Homo sapien
tctaaaaaggacctggctatggagc

SEQ ID NO: 1907185 - DNA, 25 bp, Homo sapien
gctatggagctatatactaggctgc

SEQ ID NO: 1907186 - DNA, 25 bp, Homo sapien
tctcctttagagtgaggccattgtg

SEQ ID NO: 1907187 - DNA, 25 bp, Homo sapien
gactgctggacatgtaccctttaca

SEQ ID NO: 1907188 - DNA, 25 bp, Homo sapien
taggtatgcagaactactaggagct

SEQ ID NO: 1907189 - DNA, 25 bp, Homo sapien
tatttggaatgcattgagctagccc

SEQ ID NO: 1907190 - DNA, 25 bp, Homo sapien
acgtggccccatcaaagaaatctgc

SEQ ID NO: 1907191 - DNA, 25 bp, Homo sapien
ctgcttgtggactatggttccctcc

SEQ ID NO: 1907192 - DNA, 25 bp, Homo sapien
gctttcaggacagactgatggtcct

SEQ ID NO: 1907193 - DNA, 25 bp, Homo sapien
tcctttttcaccatcgctaaacctg

SEQ ID NO: 1907194 - DNA, 25 bp, Homo sapien
tccggtttagggatcaaagcttcag

SEQ ID NO: 1907195 - DNA, 25 bp, Homo sapien
gtttgcatatgaacctgaactgtgc

SEQ ID NO: 1907196 - DNA, 25 bp, Homo sapien
tgaactgtgcctaagccttccggtt

SEQ ID NO: 1907197 - DNA, 25 bp, Homo sapien
caaagcttcagggttctgagtccag

SEQ ID NO: 1907198 - DNA, 25 bp, Homo sapien
cgcagatttgtagagctgtggagca

SEQ ID NO: 1907199 - DNA, 25 bp, Homo sapien
cagacacaggtgcttcggtgcctac

SEQ ID NO: 1907200 - DNA, 25 bp, Homo sapien
ggtgccatcacctagatagtacagg

SEQ ID NO: 1907201 - DNA, 25 bp, Homo sapien
tgtggagcagctacccctctttgct

SEQ ID NO: 1907202 - DNA, 25 bp, Homo sapien
cactgtcctctgggggaccgccggt

SEQ ID NO: 1907203 - DNA, 25 bp, Homo sapien
tctgggggaccgccggtttccagca

SEQ ID NO: 1907204 - DNA, 25 bp, Homo sapien
tttctggttcaaagggcacagggcc

SEQ ID NO: 1907205 - DNA, 25 bp, Homo sapien
gggccatactacctatgaggctgag

SEQ ID NO: 1907206 - DNA, 25 bp, Homo sapien
ccattaacttggtctctggccagta

SEQ ID NO: 1907207 - DNA, 25 bp, Homo sapien
gaatctctaacggacttcctggtga

SEQ ID NO: 1907208 - DNA, 25 bp, Homo sapien
tgcgcctcgctgcattaccaacagg

SEQ ID NO: 1907209 - DNA, 25 bp, Homo sapien
taacgggccttacagacagcagaaa

SEQ ID NO: 1907210 - DNA, 25 bp, Homo sapien
gagctcagcactatctgccaactga

SEQ ID NO: 1907211 - DNA, 25 bp, Homo sapien
gctctaaacaagtgacctgggccct

SEQ ID NO: 1907212 - DNA, 25 bp, Homo sapien
tttgtaaagatagacattctccata

SEQ ID NO: 1907213 - DNA, 25 bp, Homo sapien
tgtaaagatagacattctccatata

SEQ ID NO: 1907214 - DNA, 25 bp, Homo sapien
ttgtaaagatagacattctccatat

SEQ ID NO: 1907215 - DNA, 25 bp, Homo sapien
gtaaagatagacattctccatatat

SEQ ID NO: 1907216 - DNA, 25 bp, Homo sapien
ttgtttgaaagtttggcagggccac

SEQ ID NO: 1907217 - DNA, 25 bp, Homo sapien
gctttggtgggtgataacaatgccc

SEQ ID NO: 1907218 - DNA, 25 bp, Homo sapien
tctatgcttctctaatgtgtcttca

SEQ ID NO: 1907219 - DNA, 25 bp, Homo sapien
gtttgaaagtttggcagggccactg

SEQ ID NO: 1907220 - DNA, 25 bp, Homo sapien
ctgacaagcaaaattcacagcactc

SEQ ID NO: 1907221 - DNA, 25 bp, Homo sapien
tccctgacaagcaaaattcacagca

SEQ ID NO: 1907222 - DNA, 25 bp, Homo sapien
gctccctgacaagcaaaattcacag

SEQ ID NO: 1907223 - DNA, 25 bp, Homo sapien
caaggctccctgacaagcaaaattc

SEQ ID NO: 1907224 - DNA, 25 bp, Homo sapien
tcagatggggacatcagcttttagg

SEQ ID NO: 1907225 - DNA, 25 bp, Homo sapien
gatggggacatcagcttttaggaag

SEQ ID NO: 1907226 - DNA, 25 bp, Homo sapien
tccaaacctcccagctgactgggag

SEQ ID NO: 1907227 - DNA, 25 bp, Homo sapien
tttcagatggggacatcagctttta

SEQ ID NO: 1907228 - DNA, 25 bp, Homo sapien
tttgtagcagttactctactttcct

SEQ ID NO: 1907229 - DNA, 25 bp, Homo sapien
tattatttgtagcagttactctact

SEQ ID NO: 1907230 - DNA, 25 bp, Homo sapien
catttgacttatccaaggcagggtc

SEQ ID NO: 1907231 - DNA, 25 bp, Homo sapien
atgcatttgacttatccaaggcagg

SEQ ID NO: 1907232 - DNA, 25 bp, Homo sapien
gctgaagaggtcatcgcacaggagg

SEQ ID NO: 1907233 - DNA, 25 bp, Homo sapien
caggctccgcaggtgctgtttgcca

SEQ ID NO: 1907234 - DNA, 25 bp, Homo sapien
cagcttggcgaggaagcggaggaca

SEQ ID NO: 1907235 - DNA, 25 bp, Homo sapien
catagccgatgctgttcaccacagg

SEQ ID NO: 1907236 - DNA, 25 bp, Homo sapien
gaaatccagtcttcttacccgggca

SEQ ID NO: 1907237 - DNA, 25 bp, Homo sapien
gaaaaccgcaagtcaatcggccgtg

SEQ ID NO: 1907238 - DNA, 25 bp, Homo sapien
ttagagccgggcactggagaaaacc

SEQ ID NO: 1907239 - DNA, 25 bp, Homo sapien
gaggagtgccgtgaccatggaaaaa

SEQ ID NO: 1907240 - DNA, 25 bp, Homo sapien
gtctccaggcctgagtatggctgct

SEQ ID NO: 1907241 - DNA, 25 bp, Homo sapien
tctccaggcctgagtatggctgctt

SEQ ID NO: 1907242 - DNA, 25 bp, Homo sapien
tccaggcctgagtatggctgcttcc

SEQ ID NO: 1907243 - DNA, 25 bp, Homo sapien
aggcctgagtatggctgcttcctct

SEQ ID NO: 1907244 - DNA, 25 bp, Homo sapien
tcgggcccaaaatgctccgggagct

SEQ ID NO: 1907245 - DNA, 25 bp, Homo sapien
gatagggccccgcattggcctgctt

SEQ ID NO: 1907246 - DNA, 25 bp, Homo sapien
tcgatgcaggcttggacggcctgct

SEQ ID NO: 1907247 - DNA, 25 bp, Homo sapien
ccctgcttgaccagggagaagacca

SEQ ID NO: 1907248 - DNA, 25 bp, Homo sapien
cgtggctgcgtcctgagggatggag

SEQ ID NO: 1907249 - DNA, 25 bp, Homo sapien
gtgagagcctgtggggccgccaagc

SEQ ID NO: 1907250 - DNA, 25 bp, Homo sapien
gaggtgagagggctaagggagtcat

SEQ ID NO: 1907251 - DNA, 25 bp, Homo sapien
ggctctggggtactccgcggaggtg

SEQ ID NO: 1907252 - DNA, 25 bp, Homo sapien
cttccagattctgtcctagacggca

SEQ ID NO: 1907253 - DNA, 25 bp, Homo sapien
tagacggcagttaaccattgctctt

SEQ ID NO: 1907254 - DNA, 25 bp, Homo sapien
gcccatttggtcaatgagaatctgg

SEQ ID NO: 1907255 - DNA, 25 bp, Homo sapien
gagaatctggcaattctctctacac

SEQ ID NO: 1907256 - DNA, 25 bp, Homo sapien
gattcaagttcatgctcaggattca

SEQ ID NO: 1907257 - DNA, 25 bp, Homo sapien
gcagattcaagttcatgctcaggat

SEQ ID NO: 1907258 - DNA, 25 bp, Homo sapien
ccatcctgcagtttcggggcctgag

SEQ ID NO: 1907259 - DNA, 25 bp, Homo sapien
catcctgcagtttcggggcctgagc

SEQ ID NO: 1907260 - DNA, 25 bp, Homo sapien
tggggtcacactcagatcacctctc

SEQ ID NO: 1907261 - DNA, 25 bp, Homo sapien
atttggggtcacactcagatcacct

SEQ ID NO: 1907262 - DNA, 25 bp, Homo sapien
tttggggtcacactcagatcacctc

SEQ ID NO: 1907263 - DNA, 25 bp, Homo sapien
gggtcacactcagatcacctctcat

SEQ ID NO: 1907264 - DNA, 25 bp, Homo sapien
ccaacagtctttctgactatggtat

SEQ ID NO: 1907265 - DNA, 25 bp, Homo sapien
cagtctttctgactatggtattgag

SEQ ID NO: 1907266 - DNA, 25 bp, Homo sapien
cctacagtagctgagagatgacagt

SEQ ID NO: 1907267 - DNA, 25 bp, Homo sapien
gtgggaggaccactaacctacagta

SEQ ID NO: 1907268 - DNA, 25 bp, Homo sapien
aacctatccaagctgttctctggca

SEQ ID NO: 1907269 - DNA, 25 bp, Homo sapien
ggggggttctctgcctgtcgcaacc

SEQ ID NO: 1907270 - DNA, 25 bp, Homo sapien
gtcgcaacctatccaagctgttctc

SEQ ID NO: 1907271 - DNA, 25 bp, Homo sapien
ggttctctgcctgtcgcaacctatc

SEQ ID NO: 1907272 - DNA, 25 bp, Homo sapien
catacgacgttcagaggttttgctt

SEQ ID NO: 1907273 - DNA, 25 bp, Homo sapien
tggctcttcatagaacatacgacgt

SEQ ID NO: 1907274 - DNA, 25 bp, Homo sapien
cttcatggtagtcagagtgtggctc

SEQ ID NO: 1907275 - DNA, 25 bp, Homo sapien
taaggacctcaaccaatagcagatg

SEQ ID NO: 1907276 - DNA, 25 bp, Homo sapien
tcttcataggcgtggagtgaagtga

SEQ ID NO: 1907277 - DNA, 25 bp, Homo sapien
aaaggttatgaactgccatcttcat

SEQ ID NO: 1907278 - DNA, 25 bp, Homo sapien
tgaagtgagggtcggcctcgctttc

SEQ ID NO: 1907279 - DNA, 25 bp, Homo sapien
tccccgggatcctttgagactgcat

SEQ ID NO: 1907280 - DNA, 25 bp, Homo sapien
gaatgaggtgacaaatcgctcacag

SEQ ID NO: 1907281 - DNA, 25 bp, Homo sapien
gccagtcttacagaatgaggtgaca

SEQ ID NO: 1907282 - DNA, 25 bp, Homo sapien
acaaatcgctcacaggcagaagagg

SEQ ID NO: 1907283 - DNA, 25 bp, Homo sapien
tctgctggtgccagtcttacagaat

SEQ ID NO: 1907284 - DNA, 25 bp, Homo sapien
ctgagtttgcctgatgggaggtgct

SEQ ID NO: 1907285 - DNA, 25 bp, Homo sapien
tgagtttgcctgatgggaggtgctg

SEQ ID NO: 1907286 - DNA, 25 bp, Homo sapien
ggaggtgctggtctgagtttgcctg

SEQ ID NO: 1907287 - DNA, 25 bp, Homo sapien
gagtttgcctgatgggaggtgctgg

SEQ ID NO: 1907288 - DNA, 25 bp, Homo sapien
ctgagtttgcctgatgggaggtgct

SEQ ID NO: 1907289 - DNA, 25 bp, Homo sapien
agtttgcctgatgggaggtgctggt

SEQ ID NO: 1907290 - DNA, 25 bp, Homo sapien
tgagtttgcctgatgggaggtgctg

SEQ ID NO: 1907291 - DNA, 25 bp, Homo sapien
gagtttgcctgatgggaggtgctgg

SEQ ID NO: 1907292 - DNA, 25 bp, Homo sapien
agtttggaggtagaggttgggatgg

SEQ ID NO: 1907293 - DNA, 25 bp, Homo sapien
tagaggttgggatgggtgaagccca

SEQ ID NO: 1907294 - DNA, 25 bp, Homo sapien
tggaggtagaggttgggatgggtga

SEQ ID NO: 1907295 - DNA, 25 bp, Homo sapien
ggtagaggttgggatgggtgaagcc

SEQ ID NO: 1907296 - DNA, 25 bp, Homo sapien
agctccttgcagcctagtactccaa

SEQ ID NO: 1907297 - DNA, 25 bp, Homo sapien
cagcctagtactccaagggggcctt

SEQ ID NO: 1907298 - DNA, 25 bp, Homo sapien
gcagcctagtactccaagggggcct

SEQ ID NO: 1907299 - DNA, 25 bp, Homo sapien
tccttgcagcctagtactccaaggg

SEQ ID NO: 1907300 - DNA, 25 bp, Homo sapien
tcacaaacacagaatctctggagac

SEQ ID NO: 1907301 - DNA, 25 bp, Homo sapien
tctctgagtcgtccctgaacaagtc

SEQ ID NO: 1907302 - DNA, 25 bp, Homo sapien
tctgagtcgtccctgaacaagtcct

SEQ ID NO: 1907303 - DNA, 25 bp, Homo sapien
agtcgtccctgaacaagtcctcctt

SEQ ID NO: 1907304 - DNA, 25 bp, Homo sapien
tcatctctgagtcgtccctgaacaa

SEQ ID NO: 1907305 - DNA, 25 bp, Homo sapien
tggaagggaggattcccagccttgg

SEQ ID NO: 1907306 - DNA, 25 bp, Homo sapien
gtggaagggaggattcccagccttg

SEQ ID NO: 1907307 - DNA, 25 bp, Homo sapien
tgttctagaagtgtgtatttctcag

SEQ ID NO: 1907308 - DNA, 25 bp, Homo sapien
tttctcagtgtgaatccagtggaat

SEQ ID NO: 1907309 - DNA, 25 bp, Homo sapien
aagtgtgtatttctcagtgtgaatc

SEQ ID NO: 1907310 - DNA, 25 bp, Homo sapien
tcagtgtgaatccagtggaatcctg

SEQ ID NO: 1907311 - DNA, 25 bp, Homo sapien
ctctagattcttggctgtttgccca

SEQ ID NO: 1907312 - DNA, 25 bp, Homo sapien
tttctctagattcttggctgtttgc

SEQ ID NO: 1907313 - DNA, 25 bp, Homo sapien
tagattcttggctgtttgcccacat

SEQ ID NO: 1907314 - DNA, 25 bp, Homo sapien
gccatctgtttctctagattcttgg

SEQ ID NO: 1907315 - DNA, 25 bp, Homo sapien
cactgacagctgagtagctaattgc

SEQ ID NO: 1907316 - DNA, 25 bp, Homo sapien
taagccagatgatgaaaaggtagca

SEQ ID NO: 1907317 - DNA, 25 bp, Homo sapien
agcacagagttattcccaggacctc

SEQ ID NO: 1907318 - DNA, 25 bp, Homo sapien
gcaagaccttttaatggccgctgag

SEQ ID NO: 1907319 - DNA, 25 bp, Homo sapien
cttaattcaagtggcaggtcagact

SEQ ID NO: 1907320 - DNA, 25 bp, Homo sapien
gacacacctgaatttgagacccagt

SEQ ID NO: 1907321 - DNA, 25 bp, Homo sapien
cacagtccctcagtagtgttaatca

SEQ ID NO: 1907322 - DNA, 25 bp, Homo sapien
tggatacccacaatgtctgcaacat

SEQ ID NO: 1907323 - DNA, 25 bp, Homo sapien
ttcagcacatgcaaaccgagtattg

SEQ ID NO: 1907324 - DNA, 25 bp, Homo sapien
ttaccaggtcgggagtgttgactca

SEQ ID NO: 1907325 - DNA, 25 bp, Homo sapien
tcagcacaggcagaaaactcgattt

SEQ ID NO: 1907326 - DNA, 25 bp, Homo sapien
ttccacccgtgttagtagctcacag

SEQ ID NO: 1907327 - DNA, 25 bp, Homo sapien
tgccatagaaaccagactgtaacat

SEQ ID NO: 1907328 - DNA, 25 bp, Homo sapien
ttgccatagaaaccagactgtaaca

SEQ ID NO: 1907329 - DNA, 25 bp, Homo sapien
tctgactcaacgaatgccggaggcc

SEQ ID NO: 1907330 - DNA, 25 bp, Homo sapien
ctaagggagacggtcgggactctgg

SEQ ID NO: 1907331 - DNA, 25 bp, Homo sapien
ctgccgctggaatccggactccggg

SEQ ID NO: 1907332 - DNA, 25 bp, Homo sapien
agggagaagccgcccgctcatttct

SEQ ID NO: 1907333 - DNA, 25 bp, Homo sapien
cagaacgaagcctccggttgacgtc

SEQ ID NO: 1907334 - DNA, 25 bp, Homo sapien
ggtggcagaacgaagcctccggttg

SEQ ID NO: 1907335 - DNA, 25 bp, Homo sapien
tggcagaacgaagcctccggttgac

SEQ ID NO: 1907336 - DNA, 25 bp, Homo sapien
ggagatcccccgtcgctcctgagaa

SEQ ID NO: 1907337 - DNA, 25 bp, Homo sapien
tgtatcatccttaattgctcagcag

SEQ ID NO: 1907338 - DNA, 25 bp, Homo sapien
gccccagctctgtatcatccttaat

SEQ ID NO: 1907339 - DNA, 25 bp, Homo sapien
agcagagatatgctggctctcaggg

SEQ ID NO: 1907340 - DNA, 25 bp, Homo sapien
ccttaattgctcagcagcagagata

SEQ ID NO: 1907341 - DNA, 25 bp, Homo sapien
gaaagccacaggttataccccagac

SEQ ID NO: 1907342 - DNA, 25 bp, Homo sapien
tatatgccatccagcgagttagact

SEQ ID NO: 1907343 - DNA, 25 bp, Homo sapien
gcaactttcagagttcccacactgg

SEQ ID NO: 1907344 - DNA, 25 bp, Homo sapien
tcttaggataagagcacttcccagc

SEQ ID NO: 1907345 - DNA, 25 bp, Homo sapien
catgtagtcgacctccatgggtagc

SEQ ID NO: 1907346 - DNA, 25 bp, Homo sapien
tgtttctatccctacgttccagctc

SEQ ID NO: 1907347 - DNA, 25 bp, Homo sapien
gaggcagtagtctaccccatgtagt

SEQ ID NO: 1907348 - DNA, 25 bp, Homo sapien
tgggtagcatactcaagactaaagt

SEQ ID NO: 1907349 - DNA, 25 bp, Homo sapien
gctaaacaacctcgtgctgaacaga

SEQ ID NO: 1907350 - DNA, 25 bp, Homo sapien
caacctcgtgctgaacagagtggcc

SEQ ID NO: 1907351 - DNA, 25 bp, Homo sapien
gttaacgctaaacaacctcgtgctg

SEQ ID NO: 1907352 - DNA, 25 bp, Homo sapien
ctgataggttaacgctaaacaacct

SEQ ID NO: 1907353 - DNA, 25 bp, Homo sapien
tttggactaatcactacacagctgg

SEQ ID NO: 1907354 - DNA, 25 bp, Homo sapien
ggtaagtctcctcatgaacagctgt

SEQ ID NO: 1907355 - DNA, 25 bp, Homo sapien
ggttacctaaagcactcactagagg

SEQ ID NO: 1907356 - DNA, 25 bp, Homo sapien
caagaaaggctctcactaaactggt

SEQ ID NO: 1907357 - DNA, 25 bp, Homo sapien
tatccttccagttgtactatgaggg

SEQ ID NO: 1907358 - DNA, 25 bp, Homo sapien
tattctgcactgaaagtggcaacct

SEQ ID NO: 1907359 - DNA, 25 bp, Homo sapien
caactattgcagtaacaagatgccg

SEQ ID NO: 1907360 - DNA, 25 bp, Homo sapien
gaaatagcagtcactttagcagtaa

SEQ ID NO: 1907361 - DNA, 25 bp, Homo sapien
gagaatgccaacttatgaccaagat

SEQ ID NO: 1907362 - DNA, 25 bp, Homo sapien
tcatgtggaatgtgagagaatgcca

SEQ ID NO: 1907363 - DNA, 25 bp, Homo sapien
aacgtagccctctatatcatgtgga

SEQ ID NO: 1907364 - DNA, 25 bp, Homo sapien
tataatctgtctgataactctgggc

SEQ ID NO: 1907365 - DNA, 25 bp, Homo sapien
aacatcagttctgtactgtttctgg

SEQ ID NO: 1907366 - DNA, 25 bp, Homo sapien
ggatttattatcatttgcagatgaa

SEQ ID NO: 1907367 - DNA, 25 bp, Homo sapien
catttttcaggttgtaccaaggcac

SEQ ID NO: 1907368 - DNA, 25 bp, Homo sapien
ctccctcaacatcagttctgtactg

SEQ ID NO: 1907369 - DNA, 25 bp, Homo sapien
gctgtatcccactgtgggtgatttt

SEQ ID NO: 1907370 - DNA, 25 bp, Homo sapien
gtatcccactgtgggtgattttctg

SEQ ID NO: 1907371 - DNA, 25 bp, Homo sapien
ccctctattgctgtatcccactgtg

SEQ ID NO: 1907372 - DNA, 25 bp, Homo sapien
tctattgctgtatcccactgtgggt

SEQ ID NO: 1907373 - DNA, 25 bp, Homo sapien
tactgataatttccaggcttgcctg

SEQ ID NO: 1907374 - DNA, 25 bp, Homo sapien
ccaaacccatataggagtctgatct

SEQ ID NO: 1907375 - DNA, 25 bp, Homo sapien
ctcagaaacacagtatactgataat

SEQ ID NO: 1907376 - DNA, 25 bp, Homo sapien
cttcaatggtttaatctgatccaaa

SEQ ID NO: 1907377 - DNA, 25 bp, Homo sapien
tatctgcaatgtaaagccaccacca

SEQ ID NO: 1907378 - DNA, 25 bp, Homo sapien
gtacacacatgatatggcatggata

SEQ ID NO: 1907379 - DNA, 25 bp, Homo sapien
ggcatggatattaatgtctgctcct

SEQ ID NO: 1907380 - DNA, 25 bp, Homo sapien
tgtctgctccttcctatctgcaatg

SEQ ID NO: 1907381 - DNA, 25 bp, Homo sapien
taaactctcaattgtccgaaatggt

SEQ ID NO: 1907382 - DNA, 25 bp, Homo sapien
gaaacctccgtgcattcagcaacaa

SEQ ID NO: 1907383 - DNA, 25 bp, Homo sapien
gaagtctgaaagcacgaaacctccg

SEQ ID NO: 1907384 - DNA, 25 bp, Homo sapien
gacaaactgcttggtacaaaatagg

SEQ ID NO: 1907385 - DNA, 25 bp, Homo sapien
cattaagatggaatcctgggcagac

SEQ ID NO: 1907386 - DNA, 25 bp, Homo sapien
gcacaatgcccctaacagatggact

SEQ ID NO: 1907387 - DNA, 25 bp, Homo sapien
ggctacctctgcaatgggcacaatg

SEQ ID NO: 1907388 - DNA, 25 bp, Homo sapien
gactaaagctcaggacatgccagaa

SEQ ID NO: 1907389 - DNA, 25 bp, Homo sapien
acacaggatgtgttatttttgattt

SEQ ID NO: 1907390 - DNA, 25 bp, Homo sapien
tcaggaaagtaaaggctatacacag

SEQ ID NO: 1907391 - DNA, 25 bp, Homo sapien
ctcaggaaagtaaaggctatacaca

SEQ ID NO: 1907392 - DNA, 25 bp, Homo sapien
ttttcatcttgctctctatcagagt

SEQ ID NO: 1907393 - DNA, 25 bp, Homo sapien
agaatcactgcccttatctgaaact

SEQ ID NO: 1907394 - DNA, 25 bp, Homo sapien
tcactgcccttatctgaaacttctt

SEQ ID NO: 1907395 - DNA, 25 bp, Homo sapien
atcttgctctctatcagagtctctg

SEQ ID NO: 1907396 - DNA, 25 bp, Homo sapien
gaaaggatcaaatacataggagtaa

SEQ ID NO: 1907397 - DNA, 25 bp, Homo sapien
ctacaaatggttagaattattgcca

SEQ ID NO: 1907398 - DNA, 25 bp, Homo sapien
attgccaataagactctttgataca

SEQ ID NO: 1907399 - DNA, 25 bp, Homo sapien
tagaagcaactatttctatacacca

SEQ ID NO: 1907400 - DNA, 25 bp, Homo sapien
ctctgccactggaaattacaaaaca

SEQ ID NO: 1907401 - DNA, 25 bp, Homo sapien
taaaccacaatcatgaataacaaga

SEQ ID NO: 1907402 - DNA, 25 bp, Homo sapien
gtcaattctccccataatgaaccat

SEQ ID NO: 1907403 - DNA, 25 bp, Homo sapien
aagagttggagcacttacactacca

SEQ ID NO: 1907404 - DNA, 25 bp, Homo sapien
tgttaagcttattctaaaaattggc

SEQ ID NO: 1907405 - DNA, 25 bp, Homo sapien
gaggtacgttccatcaatgcctagt

SEQ ID NO: 1907406 - DNA, 25 bp, Homo sapien
tcttattttgaggtacgttccatca

SEQ ID NO: 1907407 - DNA, 25 bp, Homo sapien
agggctgctgaattttgttgaaggc

SEQ ID NO: 1907408 - DNA, 25 bp, Homo sapien
tttgaggtacgttccatcaatgcct

SEQ ID NO: 1907409 - DNA, 25 bp, Homo sapien
gtattctgtcgatttgggctggaga

SEQ ID NO: 1907410 - DNA, 25 bp, Homo sapien
tcaaaaaactagctccttggattca

SEQ ID NO: 1907411 - DNA, 25 bp, Homo sapien
gttgtgcagttctgagcgagtttcc

SEQ ID NO: 1907412 - DNA, 25 bp, Homo sapien
aactagctccttggattcattgatt

SEQ ID NO: 1907413 - DNA, 25 bp, Homo sapien
gctttgactgtggtaatagcacagg

SEQ ID NO: 1907414 - DNA, 25 bp, Homo sapien
gttgctttgactgtggtaatagcac

SEQ ID NO: 1907415 - DNA, 25 bp, Homo sapien
ctgttgctttgactgtggtaatagc

SEQ ID NO: 1907416 - DNA, 25 bp, Homo sapien
tttgactgtggtaatagcacaggtg

SEQ ID NO: 1907417 - DNA, 25 bp, Homo sapien
tttaggtggaaatagctaaactgaa

SEQ ID NO: 1907418 - DNA, 25 bp, Homo sapien
gcaatataagtcaattggaaaagta

SEQ ID NO: 1907419 - DNA, 25 bp, Homo sapien
cagattcaattgaaggttgtagtaa

SEQ ID NO: 1907420 - DNA, 25 bp, Homo sapien
attactctcccagagcaatataagt

SEQ ID NO: 1907421 - DNA, 25 bp, Homo sapien
cccatcttctgctggctgttcctct

SEQ ID NO: 1907422 - DNA, 25 bp, Homo sapien
ctgttcctctgcagcacagatggac

SEQ ID NO: 1907423 - DNA, 25 bp, Homo sapien
tgcagcacagatggactgctccttt

SEQ ID NO: 1907424 - DNA, 25 bp, Homo sapien
gatggactgctccttttcaaatact

SEQ ID NO: 1907425 - DNA, 25 bp, Homo sapien
agccattgtttgccttgtcaactta

SEQ ID NO: 1907426 - DNA, 25 bp, Homo sapien
ccattgtttgccttgtcaacttaac

SEQ ID NO: 1907427 - DNA, 25 bp, Homo sapien
gccattgtttgccttgtcaacttaa

SEQ ID NO: 1907428 - DNA, 25 bp, Homo sapien
cattgtttgccttgtcaacttaacc

SEQ ID NO: 1907429 - DNA, 25 bp, Homo sapien
gagtgtgacgatctgattcttttaa

SEQ ID NO: 1907430 - DNA, 25 bp, Homo sapien
gtgtgacgatctgattcttttaaac

SEQ ID NO: 1907431 - DNA, 25 bp, Homo sapien
gtgacgatctgattcttttaaactc

SEQ ID NO: 1907432 - DNA, 25 bp, Homo sapien
tagagtgtgacgatctgattctttt

SEQ ID NO: 1907433 - DNA, 25 bp, Homo sapien
aaattgctgaagtccctgaacggcc

SEQ ID NO: 1907434 - DNA, 25 bp, Homo sapien
ttctagggatgccaaagttggagca

SEQ ID NO: 1907435 - DNA, 25 bp, Homo sapien
ctgaagtccctgaacggccatctga

SEQ ID NO: 1907436 - DNA, 25 bp, Homo sapien
aaagcttcatgcagttttctaggga

SEQ ID NO: 1907437 - DNA, 25 bp, Homo sapien
tcacggttccgggccattactatta

SEQ ID NO: 1907438 - DNA, 25 bp, Homo sapien
tgaagtagggcaggacactttttta

SEQ ID NO: 1907439 - DNA, 25 bp, Homo sapien
catttcttgaagtagggcaggacac

SEQ ID NO: 1907440 - DNA, 25 bp, Homo sapien
gttggcagattacattaaccatttc

SEQ ID NO: 1907441 - DNA, 25 bp, Homo sapien
ggtaagtggaggctcattcttcttt

SEQ ID NO: 1907442 - DNA, 25 bp, Homo sapien
ttttcattctagcaagatgagacag

SEQ ID NO: 1907443 - DNA, 25 bp, Homo sapien
gagacagtaaaagaactctggcctt

SEQ ID NO: 1907444 - DNA, 25 bp, Homo sapien
ccttcaggctatatgggcaggtaag

SEQ ID NO: 1907445 - DNA, 25 bp, Homo sapien
cgttggtctgcttgtggcatcttta

SEQ ID NO: 1907446 - DNA, 25 bp, Homo sapien
attagaatattatccgttggtctgc

SEQ ID NO: 1907447 - DNA, 25 bp, Homo sapien
gaagctccagccaaaaccatgataa

SEQ ID NO: 1907448 - DNA, 25 bp, Homo sapien
tactgaggatcaaattcagaagctc

SEQ ID NO: 1907449 - DNA, 25 bp, Homo sapien
gtattgagcgataccaccaagagcc

SEQ ID NO: 1907450 - DNA, 25 bp, Homo sapien
tggtctccactatagcgtattgagc

SEQ ID NO: 1907451 - DNA, 25 bp, Homo sapien
catatccatatttcgggttttataa

SEQ ID NO: 1907452 - DNA, 25 bp, Homo sapien
tgttgtgcgtattagaatctggtct

SEQ ID NO: 1907453 - DNA, 25 bp, Homo sapien
aaactacgataggctgggcgagatg

SEQ ID NO: 1907454 - DNA, 25 bp, Homo sapien
aaaaactacgataggctgggcgaga

SEQ ID NO: 1907455 - DNA, 25 bp, Homo sapien
ataaaaactacgataggctgggcga

SEQ ID NO: 1907456 - DNA, 25 bp, Homo sapien
aagtataaaaactacgataggctgg

SEQ ID NO: 1907457 - DNA, 25 bp, Homo sapien
ggattcttgcaacaatcctttgaag

SEQ ID NO: 1907458 - DNA, 25 bp, Homo sapien
tataagcaccaagctggttcttgac

SEQ ID NO: 1907459 - DNA, 25 bp, Homo sapien
cactatgtgactaaaaggaactcca

SEQ ID NO: 1907460 - DNA, 25 bp, Homo sapien
tatcaaattgtatggtatctccgta

SEQ ID NO: 1907461 - DNA, 25 bp, Homo sapien
tttaaaatgttatagggagactcca

SEQ ID NO: 1907462 - DNA, 25 bp, Homo sapien
tcttaaattcaaggatcaatgggtt

SEQ ID NO: 1907463 - DNA, 25 bp, Homo sapien
gactccaaaacatgtcaatctcctt

SEQ ID NO: 1907464 - DNA, 25 bp, Homo sapien
caccttcagtggcaagactcttaaa

SEQ ID NO: 1907465 - DNA, 25 bp, Homo sapien
ggaaggataaccataaatgccaatc

SEQ ID NO: 1907466 - DNA, 25 bp, Homo sapien
acaactggaaggataaccataaatg

SEQ ID NO: 1907467 - DNA, 25 bp, Homo sapien
cataaatgccaatccatatacaagt

SEQ ID NO: 1907468 - DNA, 25 bp, Homo sapien
gataaccataaatgccaatccatat

SEQ ID NO: 1907469 - DNA, 25 bp, Homo sapien
tcaactatccaagctggcagggcaa

SEQ ID NO: 1907470 - DNA, 25 bp, Homo sapien
tctggtcaactatccaagctggcag

SEQ ID NO: 1907471 - DNA, 25 bp, Homo sapien
tttttctggtcaactatccaagctg

SEQ ID NO: 1907472 - DNA, 25 bp, Homo sapien
actatccaagctggcagggcaattc

SEQ ID NO: 1907473 - DNA, 25 bp, Homo sapien
caatttttccgggactcttcatccg

SEQ ID NO: 1907474 - DNA, 25 bp, Homo sapien
caaagttgcaaaattagaaagccac

SEQ ID NO: 1907475 - DNA, 25 bp, Homo sapien
aagttgcaaaattagaaagccacat

SEQ ID NO: 1907476 - DNA, 25 bp, Homo sapien
gaacaaagttgcaaaattagaaagc

SEQ ID NO: 1907477 - DNA, 25 bp, Homo sapien
ctagcatcaaaagaacaaagttgca

SEQ ID NO: 1907478 - DNA, 25 bp, Homo sapien
taaaaatttgtaatggatcctgata

SEQ ID NO: 1907479 - DNA, 25 bp, Homo sapien
ctggcttatctgtaccattcttaaa

SEQ ID NO: 1907480 - DNA, 25 bp, Homo sapien
ggcttatctgtaccattcttaaaaa

SEQ ID NO: 1907481 - DNA, 25 bp, Homo sapien
cttaaaaatttgtaatggatcctga

SEQ ID NO: 1907482 - DNA, 25 bp, Homo sapien
tctggatgatatttaagtgacagca

SEQ ID NO: 1907483 - DNA, 25 bp, Homo sapien
taacctcatcacctcctttatctgg

SEQ ID NO: 1907484 - DNA, 25 bp, Homo sapien
gcataagcttttgctatcctcatga

SEQ ID NO: 1907485 - DNA, 25 bp, Homo sapien
taagtgacagcaaacgatattgttt

SEQ ID NO: 1907486 - DNA, 25 bp, Homo sapien
gaaagacaaaatccatttttcatcc

SEQ ID NO: 1907487 - DNA, 25 bp, Homo sapien
tgaactactcagtattttgagaaag

SEQ ID NO: 1907488 - DNA, 25 bp, Homo sapien
tatgaactactcagtattttgagaa

SEQ ID NO: 1907489 - DNA, 25 bp, Homo sapien
actatgtgccacatagtaaactaag

SEQ ID NO: 1907490 - DNA, 25 bp, Homo sapien
ggaataatctgaggaatacctggtt

SEQ ID NO: 1907491 - DNA, 25 bp, Homo sapien
taatctgaggaatacctggtttcag

SEQ ID NO: 1907492 - DNA, 25 bp, Homo sapien
aaggaataatctgaggaatacctgg

SEQ ID NO: 1907493 - DNA, 25 bp, Homo sapien
tctgaggaatacctggtttcagctg

SEQ ID NO: 1907494 - DNA, 25 bp, Homo sapien
gcccatcctgcaagcagaactattt

SEQ ID NO: 1907495 - DNA, 25 bp, Homo sapien
tggtattctcggtctgttttggaaa

SEQ ID NO: 1907496 - DNA, 25 bp, Homo sapien
gaataagaacaatgcccatcctgca

SEQ ID NO: 1907497 - DNA, 25 bp, Homo sapien
tacttcataaggattgtattcttgg

SEQ ID NO: 1907498 - DNA, 25 bp, Homo sapien
ttaggaaaaaggtaagtgaatcata

SEQ ID NO: 1907499 - DNA, 25 bp, Homo sapien
cataaacaaatacatctgcatagag

SEQ ID NO: 1907500 - DNA, 25 bp, Homo sapien
gaatcataaacaaatacatctgcat

SEQ ID NO: 1907501 - DNA, 25 bp, Homo sapien
gaaaaaggtaagtgaatcataaaca

SEQ ID NO: 1907502 - DNA, 25 bp, Homo sapien
tgttcagactgttcccacattttct

SEQ ID NO: 1907503 - DNA, 25 bp, Homo sapien
ctttacagacacaatgacttattca

SEQ ID NO: 1907504 - DNA, 25 bp, Homo sapien
aacttctaaaccaatctgttcagac

SEQ ID NO: 1907505 - DNA, 25 bp, Homo sapien
cacgtatatgttgtatgacctagca

SEQ ID NO: 1907506 - DNA, 25 bp, Homo sapien
tctgatattctttaatcgaatttgc

SEQ ID NO: 1907507 - DNA, 25 bp, Homo sapien
taataaccgtaaacgataccacata

SEQ ID NO: 1907508 - DNA, 25 bp, Homo sapien
tacaccttccatatacttttctgat

SEQ ID NO: 1907509 - DNA, 25 bp, Homo sapien
gtaaacgataccacatacaccttcc

SEQ ID NO: 1907510 - DNA, 25 bp, Homo sapien
aatggaacatgaaattactgcctat

SEQ ID NO: 1907511 - DNA, 25 bp, Homo sapien
cagctaactggttaactaaccttca

SEQ ID NO: 1907512 - DNA, 25 bp, Homo sapien
taaccttcattaccacgctaatagt

SEQ ID NO: 1907513 - DNA, 25 bp, Homo sapien
cttacaagataggttaaattgtctg

SEQ ID NO: 1907514 - DNA, 25 bp, Homo sapien
agtggcctaagacaacgcagctcca

SEQ ID NO: 1907515 - DNA, 25 bp, Homo sapien
gctccaaaggcagttcaaatgtcct

SEQ ID NO: 1907516 - DNA, 25 bp, Homo sapien
ttcaaatgtcctaggaagaacaccc

SEQ ID NO: 1907517 - DNA, 25 bp, Homo sapien
ctaagacaacgcagctccaaaggca

SEQ ID NO: 1907518 - DNA, 25 bp, Homo sapien
tcaccaggctagatagactacagtg

SEQ ID NO: 1907519 - DNA, 25 bp, Homo sapien
ccaggctagatagactacagtggtg

SEQ ID NO: 1907520 - DNA, 25 bp, Homo sapien
gtcaccaggctagatagactacagt

SEQ ID NO: 1907521 - DNA, 25 bp, Homo sapien
cctccacccaccaaaccattctcca

SEQ ID NO: 1907522 - DNA, 25 bp, Homo sapien
atattccacaaaagccaaactgacc

SEQ ID NO: 1907523 - DNA, 25 bp, Homo sapien
ccacacaatattccacaaaagccaa

SEQ ID NO: 1907524 - DNA, 25 bp, Homo sapien
accaaaccattctccacacaatatt

SEQ ID NO: 1907525 - DNA, 25 bp, Homo sapien
caagtcggcaaattattttgcagca

SEQ ID NO: 1907526 - DNA, 25 bp, Homo sapien
tagcctcctgtcagtacaagtcggc

SEQ ID NO: 1907527 - DNA, 25 bp, Homo sapien
atgaggcagtaattcaagatttctc

SEQ ID NO: 1907528 - DNA, 25 bp, Homo sapien
cttattcagagctttgaatgaggca

SEQ ID NO: 1907529 - DNA, 25 bp, Homo sapien
aaaaatccatcctgacacagtggct

SEQ ID NO: 1907530 - DNA, 25 bp, Homo sapien
ttaggccctcgcagttacatcagct

SEQ ID NO: 1907531 - DNA, 25 bp, Homo sapien
cctcgcagttacatcagctttaaga

SEQ ID NO: 1907532 - DNA, 25 bp, Homo sapien
atcagctttaagaataccatctgcc

SEQ ID NO: 1907533 - DNA, 25 bp, Homo sapien
gcagttacatcagctttaagaatac

SEQ ID NO: 1907534 - DNA, 25 bp, Homo sapien
ccgcgaactggacggactgagagtt

SEQ ID NO: 1907535 - DNA, 25 bp, Homo sapien
ccggctcagagatgccctaaaacat

SEQ ID NO: 1907536 - DNA, 25 bp, Homo sapien
taaaacatctgttaagagcagctgc

SEQ ID NO: 1907537 - DNA, 25 bp, Homo sapien
attggagtcctaagcatgccacccg

SEQ ID NO: 1907538 - DNA, 25 bp, Homo sapien
tccacaacaatggagaagatggagc

SEQ ID NO: 1907539 - DNA, 25 bp, Homo sapien
aaggagcgtccacaacaatggagaa

SEQ ID NO: 1907540 - DNA, 25 bp, Homo sapien
tgcaaggagcgtccacaacaatgga

SEQ ID NO: 1907541 - DNA, 25 bp, Homo sapien
gctgcaaggagcgtccacaacaatg

SEQ ID NO: 1907542 - DNA, 25 bp, Homo sapien
gcgccgagggaaacgctgctgaccc

SEQ ID NO: 1907543 - DNA, 25 bp, Homo sapien
ggagaagcgccgagggaaacgctgc

SEQ ID NO: 1907544 - DNA, 25 bp, Homo sapien
aagcgccgagggaaacgctgctgac

SEQ ID NO: 1907545 - DNA, 25 bp, Homo sapien
gagaagcgccgagggaaacgctgct

SEQ ID NO: 1907546 - DNA, 25 bp, Homo sapien
cactgtcatcgtactggaactgctg

SEQ ID NO: 1907547 - DNA, 25 bp, Homo sapien
cggcattctgatctcggggccagag

SEQ ID NO: 1907548 - DNA, 25 bp, Homo sapien
ccagaggtagtatgtcgccgggatc

SEQ ID NO: 1907549 - DNA, 25 bp, Homo sapien
gggatcacgatgagccccacgaagg

SEQ ID NO: 1907550 - DNA, 25 bp, Homo sapien
cgccgccacgaccacgctctgcact

SEQ ID NO: 1907551 - DNA, 25 bp, Homo sapien
gccgccacgaccacgctctgcactc

SEQ ID NO: 1907552 - DNA, 25 bp, Homo sapien
ccgccacgaccacgctctgcactcc

SEQ ID NO: 1907553 - DNA, 25 bp, Homo sapien
gccacgaccacgctctgcactcccg

SEQ ID NO: 1907554 - DNA, 25 bp, Homo sapien
acgccccggcccgagtggcgtagct

SEQ ID NO: 1907555 - DNA, 25 bp, Homo sapien
gccgtcgccagctctcgcgagagga

SEQ ID NO: 1907556 - DNA, 25 bp, Homo sapien
tggcgtagcttggacactgccgccg

SEQ ID NO: 1907557 - DNA, 25 bp, Homo sapien
gcccgagtggcgtagcttggacact

SEQ ID NO: 1907558 - DNA, 25 bp, Homo sapien
ctaatccactggtctttgaaaacgg

SEQ ID NO: 1907559 - DNA, 25 bp, Homo sapien
gtgaggatcaggtgctcttccagag

SEQ ID NO: 1907560 - DNA, 25 bp, Homo sapien
gcaggcaactgctggcgagttttca

SEQ ID NO: 1907561 - DNA, 25 bp, Homo sapien
ggcgagttttcaggctactaatcca

SEQ ID NO: 1907562 - DNA, 25 bp, Homo sapien
tgcacctggtcagaccgacccgaaa

SEQ ID NO: 1907563 - DNA, 25 bp, Homo sapien
gaccgacccgaaatctggtctagga

SEQ ID NO: 1907564 - DNA, 25 bp, Homo sapien
cacactaagattctccatgatggga

SEQ ID NO: 1907565 - DNA, 25 bp, Homo sapien
gaacaagcaatctgctgctaggatg

SEQ ID NO: 1907566 - DNA, 25 bp, Homo sapien
atcattcttgtccttgaagttgttg

SEQ ID NO: 1907567 - DNA, 25 bp, Homo sapien
tcattcttgtccttgaagttgttgg

SEQ ID NO: 1907568 - DNA, 25 bp, Homo sapien
tctgggcacgttgcttttgaaactt

SEQ ID NO: 1907569 - DNA, 25 bp, Homo sapien
gcctcttaacgctttcttgccagat

SEQ ID NO: 1907570 - DNA, 25 bp, Homo sapien
ttggacaacatgctttctgggcacg

SEQ ID NO: 1907571 - DNA, 25 bp, Homo sapien
gaaacttctgagctttcagaggagg

SEQ ID NO: 1907572 - DNA, 25 bp, Homo sapien
cctgtatattatgagcagagtcctg

SEQ ID NO: 1907573 - DNA, 25 bp, Homo sapien
ccccatgccacgtggacagcgcctg

SEQ ID NO: 1907574 - DNA, 25 bp, Homo sapien
ctcccccatgccacgtggacagcgc

SEQ ID NO: 1907575 - DNA, 25 bp, Homo sapien
gctcccccatgccacgtggacagcg

SEQ ID NO: 1907576 - DNA, 25 bp, Homo sapien
cgccaaccaggatcatgctcaggtt

SEQ ID NO: 1907577 - DNA, 25 bp, Homo sapien
aggtggaagggagcagctatgtgca

SEQ ID NO: 1907578 - DNA, 25 bp, Homo sapien
gcttcattttgaactgccgcgaggt

SEQ ID NO: 1907579 - DNA, 25 bp, Homo sapien
aaagagttttggacttgcaggattc

SEQ ID NO: 1907580 - DNA, 25 bp, Homo sapien
ctgcagcagccaggcagccaacacg

SEQ ID NO: 1907581 - DNA, 25 bp, Homo sapien
gcagcagccaggcagccaacacgga

SEQ ID NO: 1907582 - DNA, 25 bp, Homo sapien
tgcagcagccaggcagccaacacgg

SEQ ID NO: 1907583 - DNA, 25 bp, Homo sapien
cagcagccaggcagccaacacggac

SEQ ID NO: 1907584 - DNA, 25 bp, Homo sapien
gaaaaagaggagccaattctgtgct

SEQ ID NO: 1907585 - DNA, 25 bp, Homo sapien
aaaaagaggagccaattctgtgctc

SEQ ID NO: 1907586 - DNA, 25 bp, Homo sapien
aattctgtgctccaaggcaacacat

SEQ ID NO: 1907587 - DNA, 25 bp, Homo sapien
aagaggagccaattctgtgctccaa

SEQ ID NO: 1907588 - DNA, 25 bp, Homo sapien
tattgagaccacaccagctgcgaaa

SEQ ID NO: 1907589 - DNA, 25 bp, Homo sapien
gaccacaccagctgcgaaatctgtt

SEQ ID NO: 1907590 - DNA, 25 bp, Homo sapien
gagaccacaccagctgcgaaatctg

SEQ ID NO: 1907591 - DNA, 25 bp, Homo sapien
ttttattgagaccacaccagctgcg

SEQ ID NO: 1907592 - DNA, 25 bp, Homo sapien
tccttcttcctttgcaattccgtct

SEQ ID NO: 1907593 - DNA, 25 bp, Homo sapien
cttcttcctttgcaattccgtcttt

SEQ ID NO: 1907594 - DNA, 25 bp, Homo sapien
aagctccttcttcctttgcaattcc

SEQ ID NO: 1907595 - DNA, 25 bp, Homo sapien
gctccttcttcctttgcaattccgt

SEQ ID NO: 1907596 - DNA, 25 bp, Homo sapien
cttctgctccatggtctggaagcag

SEQ ID NO: 1907597 - DNA, 25 bp, Homo sapien
agcagccatggccaaacttggaggt

SEQ ID NO: 1907598 - DNA, 25 bp, Homo sapien
cttgagtggtcccatgaatgctttc

SEQ ID NO: 1907599 - DNA, 25 bp, Homo sapien
cccatgaatgctttcttctgctcca

SEQ ID NO: 1907600 - DNA, 25 bp, Homo sapien
gcaccagcaaggactcgtggagggt

SEQ ID NO: 1907601 - DNA, 25 bp, Homo sapien
cagagcctgccgtttcatctgcacc

SEQ ID NO: 1907602 - DNA, 25 bp, Homo sapien
gagcctgccgtttcatctgcaccag

SEQ ID NO: 1907603 - DNA, 25 bp, Homo sapien
tccagagcctgccgtttcatctgca

SEQ ID NO: 1907604 - DNA, 25 bp, Homo sapien
ttcccaccacacagcctttcagcat

SEQ ID NO: 1907605 - DNA, 25 bp, Homo sapien
gcacccgcttcttggttcccaccac

SEQ ID NO: 1907606 - DNA, 25 bp, Homo sapien
ccgcttcttggttcccaccacacag

SEQ ID NO: 1907607 - DNA, 25 bp, Homo sapien
gttcccaccacacagcctttcagca

SEQ ID NO: 1907608 - DNA, 25 bp, Homo sapien
cagaggattggtgctcttgtcagac

SEQ ID NO: 1907609 - DNA, 25 bp, Homo sapien
aagccacccagaggattggtgctct

SEQ ID NO: 1907610 - DNA, 25 bp, Homo sapien
ccacccagaggattggtgctcttgt

SEQ ID NO: 1907611 - DNA, 25 bp, Homo sapien
cccagaggattggtgctcttgtcag

SEQ ID NO: 1907612 - DNA, 25 bp, Homo sapien
tgctcgagcctctcgcagacccagt

SEQ ID NO: 1907613 - DNA, 25 bp, Homo sapien
gctcgagcctctcgcagacccagtc

SEQ ID NO: 1907614 - DNA, 25 bp, Homo sapien
ctgctcgagcctctcgcagacccag

SEQ ID NO: 1907615 - DNA, 25 bp, Homo sapien
tcgagcctctcgcagacccagtcca

SEQ ID NO: 1907616 - DNA, 25 bp, Homo sapien
gggtgtgggcaatgacgcggatgac

SEQ ID NO: 1907617 - DNA, 25 bp, Homo sapien
tgggtgtgggcaatgacgcggatga

SEQ ID NO: 1907618 - DNA, 25 bp, Homo sapien
ctgggtgtgggcaatgacgcggatg

SEQ ID NO: 1907619 - DNA, 25 bp, Homo sapien
acgcctcttgcattcattactgatg

SEQ ID NO: 1907620 - DNA, 25 bp, Homo sapien
atagaaacgcctcttgcattcatta

SEQ ID NO: 1907621 - DNA, 25 bp, Homo sapien
gaaacgcctcttgcattcattactg

SEQ ID NO: 1907622 - DNA, 25 bp, Homo sapien
aaacgcctcttgcattcattactga

SEQ ID NO: 1907623 - DNA, 25 bp, Homo sapien
ctcaaggggtttccacatagcccac

SEQ ID NO: 1907624 - DNA, 25 bp, Homo sapien
tgctgggctgtcgacttccctcatg

SEQ ID NO: 1907625 - DNA, 25 bp, Homo sapien
tggatgctgggctgtcgacttccct

SEQ ID NO: 1907626 - DNA, 25 bp, Homo sapien
gatgctgggctgtcgacttccctca

SEQ ID NO: 1907627 - DNA, 25 bp, Homo sapien
gctgggctgtcgacttccctcatga

SEQ ID NO: 1907628 - DNA, 25 bp, Homo sapien
cccatgtctgggagcagaaaacttt

SEQ ID NO: 1907629 - DNA, 25 bp, Homo sapien
gcaggaagccgagggacccatgtct

SEQ ID NO: 1907630 - DNA, 25 bp, Homo sapien
ggacccatgtctgggagcagaaaac

SEQ ID NO: 1907631 - DNA, 25 bp, Homo sapien
ctgaggcaggaagccgagggaccca

SEQ ID NO: 1907632 - DNA, 25 bp, Homo sapien
caaatcccgccggtagagcacagcc

SEQ ID NO: 1907633 - DNA, 25 bp, Homo sapien
ccggtagagcacagccacttttcat

SEQ ID NO: 1907634 - DNA, 25 bp, Homo sapien
cgccggtagagcacagccacttttc

SEQ ID NO: 1907635 - DNA, 25 bp, Homo sapien
acgcagtcaaatcccgccggtagag

SEQ ID NO: 1907636 - DNA, 25 bp, Homo sapien
ctgactagagtagagaagggaagtt

SEQ ID NO: 1907637 - DNA, 25 bp, Homo sapien
tgttctctgactagagtagagaagg

SEQ ID NO: 1907638 - DNA, 25 bp, Homo sapien
tgtgtataagatgttctctgactag

SEQ ID NO: 1907639 - DNA, 25 bp, Homo sapien
ctgatgtgtataagatgttctctga

SEQ ID NO: 1907640 - DNA, 25 bp, Homo sapien
caccaaagagtttctcagttctcag

SEQ ID NO: 1907641 - DNA, 25 bp, Homo sapien
aaataccaccaaagagtttctcagt

SEQ ID NO: 1907642 - DNA, 25 bp, Homo sapien
tctgctccaaagttgggtttgaagg

SEQ ID NO: 1907643 - DNA, 25 bp, Homo sapien
tgaagggtagtgtataagaagaaat

SEQ ID NO: 1907644 - DNA, 25 bp, Homo sapien
gaggccaacaggtttgattcagaag

SEQ ID NO: 1907645 - DNA, 25 bp, Homo sapien
gctgccaggctgtaacttagacata

SEQ ID NO: 1907646 - DNA, 25 bp, Homo sapien
catccctggtctgcatggcaggcga

SEQ ID NO: 1907647 - DNA, 25 bp, Homo sapien
ggcaggcgagatttccatcaccatt

SEQ ID NO: 1907648 - DNA, 25 bp, Homo sapien
caaggctcagagaaccaaatcgctt

SEQ ID NO: 1907649 - DNA, 25 bp, Homo sapien
gatctgagtctgaatgtacccttca

SEQ ID NO: 1907650 - DNA, 25 bp, Homo sapien
catttcacaggtgtagaaaccaagg

SEQ ID NO: 1907651 - DNA, 25 bp, Homo sapien
aatatctgccagtccattagatgga

SEQ ID NO: 1907652 - DNA, 25 bp, Homo sapien
tagtagctcaggtgaagggatagcc

SEQ ID NO: 1907653 - DNA, 25 bp, Homo sapien
tagacagctgtctcgaaatagtagc

SEQ ID NO: 1907654 - DNA, 25 bp, Homo sapien
tgcagtagcatcctggaaatacagt

SEQ ID NO: 1907655 - DNA, 25 bp, Homo sapien
cagttacagcaagaggtaaccttca

SEQ ID NO: 1907656 - DNA, 25 bp, Homo sapien
atcaggtaacttgaaatcttggtgt

SEQ ID NO: 1907657 - DNA, 25 bp, Homo sapien
taacttgaaatcttggtgttggtga

SEQ ID NO: 1907658 - DNA, 25 bp, Homo sapien
tgttggtgaagctaatcagggctag

SEQ ID NO: 1907659 - DNA, 25 bp, Homo sapien
tgaagctaatcagggctagaattga

SEQ ID NO: 1907660 - DNA, 25 bp, Homo sapien
ggagataaagaaagttatttgtcat

SEQ ID NO: 1907661 - DNA, 25 bp, Homo sapien
gccctctttaattccaaggagataa

SEQ ID NO: 1907662 - DNA, 25 bp, Homo sapien
agaaagttatttgtcattaaacatg

SEQ ID NO: 1907663 - DNA, 25 bp, Homo sapien
agccctctttaattccaaggagata

SEQ ID NO: 1907664 - DNA, 25 bp, Homo sapien
cattttatagggagcatatcccaga

SEQ ID NO: 1907665 - DNA, 25 bp, Homo sapien
tgtctttggccaggaatgcaatcct

SEQ ID NO: 1907666 - DNA, 25 bp, Homo sapien
ctttttagaagaatccatgcagtgg

SEQ ID NO: 1907667 - DNA, 25 bp, Homo sapien
cagaaagtcagattaggtagtccct

SEQ ID NO: 1907668 - DNA, 25 bp, Homo sapien
atctgatgttatttctatctctcaa

SEQ ID NO: 1907669 - DNA, 25 bp, Homo sapien
gatgttatttctatctctcaagttc

SEQ ID NO: 1907670 - DNA, 25 bp, Homo sapien
atgttatttctatctctcaagttca

SEQ ID NO: 1907671 - DNA, 25 bp, Homo sapien
ctgatgttatttctatctctcaagt

SEQ ID NO: 1907672 - DNA, 25 bp, Homo sapien
catttttatttgcagcaaaatttaa

SEQ ID NO: 1907673 - DNA, 25 bp, Homo sapien
gcaaaatttaagacagacagtactt

SEQ ID NO: 1907674 - DNA, 25 bp, Homo sapien
tttatttgcagcaaaatttaagaca

SEQ ID NO: 1907675 - DNA, 25 bp, Homo sapien
gcagcaaaatttaagacagacagta

SEQ ID NO: 1907676 - DNA, 25 bp, Homo sapien
tcccgggctcaagacatcctcccat

SEQ ID NO: 1907677 - DNA, 25 bp, Homo sapien
cccgggctcaagacatcctcccatc

SEQ ID NO: 1907678 - DNA, 25 bp, Homo sapien
ggcatctaaactcaatacctgaaaa

SEQ ID NO: 1907679 - DNA, 25 bp, Homo sapien
gtccagctgatggtactcataaaag

SEQ ID NO: 1907680 - DNA, 25 bp, Homo sapien
tgtccagctgatggtactcataaaa

SEQ ID NO: 1907681 - DNA, 25 bp, Homo sapien
cataaaagtaggcatctaaactcaa

SEQ ID NO: 1907682 - DNA, 25 bp, Homo sapien
tccaacagtcttacagtgagcatcc

SEQ ID NO: 1907683 - DNA, 25 bp, Homo sapien
tgtaattcacgatgcaaatccttgg

SEQ ID NO: 1907684 - DNA, 25 bp, Homo sapien
cacactttagggtagcgcttaatac

SEQ ID NO: 1907685 - DNA, 25 bp, Homo sapien
tctgctcgctgaaccttaagctggt

SEQ ID NO: 1907686 - DNA, 25 bp, Homo sapien
ttttcctgaatatttgcaaaactgg

SEQ ID NO: 1907687 - DNA, 25 bp, Homo sapien
tcctgaatatttgcaaaactggtac

SEQ ID NO: 1907688 - DNA, 25 bp, Homo sapien
tgaatatttgcaaaactggtactgg

SEQ ID NO: 1907689 - DNA, 25 bp, Homo sapien
tttgaattttcctgaatatttgcaa

SEQ ID NO: 1907690 - DNA, 25 bp, Homo sapien
tagaagacaacaggtagaaagagaa

SEQ ID NO: 1907691 - DNA, 25 bp, Homo sapien
gaatgagtttgcgtttcttttgctc

SEQ ID NO: 1907692 - DNA, 25 bp, Homo sapien
gggactgaacagttgaaagttcgac

SEQ ID NO: 1907693 - DNA, 25 bp, Homo sapien
gaagaaagctactaaggtagaagac

SEQ ID NO: 1907694 - DNA, 25 bp, Homo sapien
cataaatgtgttccaggttcagcct

SEQ ID NO: 1907695 - DNA, 25 bp, Homo sapien
tccacatcaatgcataaatgtgttc

SEQ ID NO: 1907696 - DNA, 25 bp, Homo sapien
caggttcagccttattctcaagttc

SEQ ID NO: 1907697 - DNA, 25 bp, Homo sapien
cagccttattctcaagttcattcat

SEQ ID NO: 1907698 - DNA, 25 bp, Homo sapien
tctgtaaaagactatgtgcattccc

SEQ ID NO: 1907699 - DNA, 25 bp, Homo sapien
tatgcttcacggcagtttttgcata

SEQ ID NO: 1907700 - DNA, 25 bp, Homo sapien
cacggcagtttttgcatacttctga

SEQ ID NO: 1907701 - DNA, 25 bp, Homo sapien
cagactactcagagttttgtatgct

SEQ ID NO: 1907702 - DNA, 25 bp, Homo sapien
gctttcacatggtttatcactgcca

SEQ ID NO: 1907703 - DNA, 25 bp, Homo sapien
tgaaatcaccttttgacagaccaag

SEQ ID NO: 1907704 - DNA, 25 bp, Homo sapien
gaactgacaacttggctttgagcct

SEQ ID NO: 1907705 - DNA, 25 bp, Homo sapien
ggcatcgccaccaatgaactgacaa

SEQ ID NO: 1907706 - DNA, 25 bp, Homo sapien
cagtccactaaaggctctgaagtcc

SEQ ID NO: 1907707 - DNA, 25 bp, Homo sapien
aattgctatttgagtgttacaacac

SEQ ID NO: 1907708 - DNA, 25 bp, Homo sapien
tcttaggctgccaatatagtaattc

SEQ ID NO: 1907709 - DNA, 25 bp, Homo sapien
ggaaagtgaagccatatataaaagg

SEQ ID NO: 1907710 - DNA, 25 bp, Homo sapien
aacctctacttcactacaggcgtgc

SEQ ID NO: 1907711 - DNA, 25 bp, Homo sapien
tgcaacctctacttcactacaggcg

SEQ ID NO: 1907712 - DNA, 25 bp, Homo sapien
gcaacctctacttcactacaggcgt

SEQ ID NO: 1907713 - DNA, 25 bp, Homo sapien
acctctacttcactacaggcgtgca

SEQ ID NO: 1907714 - DNA, 25 bp, Homo sapien
gttcaaagcaggtcagggtgtgatt

SEQ ID NO: 1907715 - DNA, 25 bp, Homo sapien
caaagcaggtcagggtgtgattaaa

SEQ ID NO: 1907716 - DNA, 25 bp, Homo sapien
gcaggtcagggtgtgattaaataga

SEQ ID NO: 1907717 - DNA, 25 bp, Homo sapien
cagggtgtgattaaatagattaagg

SEQ ID NO: 1907718 - DNA, 25 bp, Homo sapien
gtgctgtttgataattcttcactgt

SEQ ID NO: 1907719 - DNA, 25 bp, Homo sapien
tcttcactgttgtttgttaaacaat

SEQ ID NO: 1907720 - DNA, 25 bp, Homo sapien
taattcttcactgttgtttgttaaa

SEQ ID NO: 1907721 - DNA, 25 bp, Homo sapien
tgtgctgtttgataattcttcactg

SEQ ID NO: 1907722 - DNA, 25 bp, Homo sapien
gcctgctatctccaatcgaggttca

SEQ ID NO: 1907723 - DNA, 25 bp, Homo sapien
tccatctgactctcctagaatcctt

SEQ ID NO: 1907724 - DNA, 25 bp, Homo sapien
gaacttgtggtcagtcgtttccatc

SEQ ID NO: 1907725 - DNA, 25 bp, Homo sapien
atcgaggttcaactgcctggttcca

SEQ ID NO: 1907726 - DNA, 25 bp, Homo sapien
caataatatcaagaagtgaggcctt

SEQ ID NO: 1907727 - DNA, 25 bp, Homo sapien
gatgccacccctatttcaagctaaa

SEQ ID NO: 1907728 - DNA, 25 bp, Homo sapien
tctaatagcccctgttatggtctga

SEQ ID NO: 1907729 - DNA, 25 bp, Homo sapien
tgagggttccttcttcacaaatggg

SEQ ID NO: 1907730 - DNA, 25 bp, Homo sapien
tgttgcccttttatacctctgtgac

SEQ ID NO: 1907731 - DNA, 25 bp, Homo sapien
tgttggcccaaatagtatactactc

SEQ ID NO: 1907732 - DNA, 25 bp, Homo sapien
tatactactctgtcagtcaaggtcc

SEQ ID NO: 1907733 - DNA, 25 bp, Homo sapien
tttacctcccactatgcttcctgga

SEQ ID NO: 1907734 - DNA, 25 bp, Homo sapien
aggcgtgagccgcctcactggcgtc

SEQ ID NO: 1907735 - DNA, 25 bp, Homo sapien
caggcgtgagccgcctcactggcgt

SEQ ID NO: 1907736 - DNA, 25 bp, Homo sapien
cctgccatgtggtattaaaaaattc

SEQ ID NO: 1907737 - DNA, 25 bp, Homo sapien
ttgcctcctgccatgtggtattaaa

SEQ ID NO: 1907738 - DNA, 25 bp, Homo sapien
ctcctgccatgtggtattaaaaaat

SEQ ID NO: 1907739 - DNA, 25 bp, Homo sapien
gcctcctgccatgtggtattaaaaa

SEQ ID NO: 1907740 - DNA, 25 bp, Homo sapien
gacttctggcacaactctgactctc

SEQ ID NO: 1907741 - DNA, 25 bp, Homo sapien
tcttttttagaattaccttctgagc

SEQ ID NO: 1907742 - DNA, 25 bp, Homo sapien
ctcttttttagaattaccttctgag

SEQ ID NO: 1907743 - DNA, 25 bp, Homo sapien
actgcacctggccatgaacagaaca

SEQ ID NO: 1907744 - DNA, 25 bp, Homo sapien
gcacctggccatgaacagaacattt

SEQ ID NO: 1907745 - DNA, 25 bp, Homo sapien
gctgaatcacaatgaaactatgtcc

SEQ ID NO: 1907746 - DNA, 25 bp, Homo sapien
aatctgagggggcaaaagcatcctc

SEQ ID NO: 1907747 - DNA, 25 bp, Homo sapien
tcctcaggaccattccgataatgct

SEQ ID NO: 1907748 - DNA, 25 bp, Homo sapien
gaccattccgataatgctgaatcac

SEQ ID NO: 1907749 - DNA, 25 bp, Homo sapien
ccattctgcccacaatagcccttgt

SEQ ID NO: 1907750 - DNA, 25 bp, Homo sapien
gccattctgcccacaatagcccttg

SEQ ID NO: 1907751 - DNA, 25 bp, Homo sapien
cattctgcccacaatagcccttgtt

SEQ ID NO: 1907752 - DNA, 25 bp, Homo sapien
ctacagacgtgtaccgcaattcttc

SEQ ID NO: 1907753 - DNA, 25 bp, Homo sapien
gacgtgtaccgcaattcttctgcct

SEQ ID NO: 1907754 - DNA, 25 bp, Homo sapien
tacagacgtgtaccgcaattcttct

SEQ ID NO: 1907755 - DNA, 25 bp, Homo sapien
cagacgtgtaccgcaattcttctgc

SEQ ID NO: 1907756 - DNA, 25 bp, Homo sapien
taaagtacttaggagcaggaattgt

SEQ ID NO: 1907757 - DNA, 25 bp, Homo sapien
gaagagcagtcttacaatttcttaa

SEQ ID NO: 1907758 - DNA, 25 bp, Homo sapien
agcagctaccacacacctagagaac

SEQ ID NO: 1907759 - DNA, 25 bp, Homo sapien
acttagaggtattactatgtgttgt

SEQ ID NO: 1907760 - DNA, 25 bp, Homo sapien
ctggccgctagctagctccagactg

SEQ ID NO: 1907761 - DNA, 25 bp, Homo sapien
tagctagctccagactgttcacatc

SEQ ID NO: 1907762 - DNA, 25 bp, Homo sapien
ccgctagctagctccagactgttca

SEQ ID NO: 1907763 - DNA, 25 bp, Homo sapien
cacatcactaagatgaagtcacagg

SEQ ID NO: 1907764 - DNA, 25 bp, Homo sapien
agatgttctttccactttatagagg

SEQ ID NO: 1907765 - DNA, 25 bp, Homo sapien
ttaggcagatgttctttccacttta

SEQ ID NO: 1907766 - DNA, 25 bp, Homo sapien
gcagatgttctttccactttataga

SEQ ID NO: 1907767 - DNA, 25 bp, Homo sapien
atgttctttccactttatagaggag

SEQ ID NO: 1907768 - DNA, 25 bp, Homo sapien
caaggttacatagttagaagttggt

SEQ ID NO: 1907769 - DNA, 25 bp, Homo sapien
ccgcggctcggctgatgttgtccat

SEQ ID NO: 1907770 - DNA, 25 bp, Homo sapien
cctgtcagctctgcgctgctgttgg

SEQ ID NO: 1907771 - DNA, 25 bp, Homo sapien
ctgttggcgaagtccagcaggagct

SEQ ID NO: 1907772 - DNA, 25 bp, Homo sapien
cttgctgacgacctgttggaagagg

SEQ ID NO: 1907773 - DNA, 25 bp, Homo sapien
tgctgctccgacaggaggtcgtgga

SEQ ID NO: 1907774 - DNA, 25 bp, Homo sapien
gagggacagggacaagtcctccacc

SEQ ID NO: 1907775 - DNA, 25 bp, Homo sapien
tcgtggaagaccctgtgcggactgc

SEQ ID NO: 1907776 - DNA, 25 bp, Homo sapien
aacacctccgctgcgcggctgtcgg

SEQ ID NO: 1907777 - DNA, 25 bp, Homo sapien
cgcggacagccgccgcttccggttt

SEQ ID NO: 1907778 - DNA, 25 bp, Homo sapien
ccgcggacagccgccgcttccggtt

SEQ ID NO: 1907779 - DNA, 25 bp, Homo sapien
gcggacagccgccgcttccggtttc

SEQ ID NO: 1907780 - DNA, 25 bp, Homo sapien
caccgcggacagccgccgcttccgg

SEQ ID NO: 1907781 - DNA, 25 bp, Homo sapien
cctgtgcctcggcagattttctgca

SEQ ID NO: 1907782 - DNA, 25 bp, Homo sapien
aatggccgtcggctgcgttcgcaga

SEQ ID NO: 1907783 - DNA, 25 bp, Homo sapien
agagaaaccccgctggcctgtgcct

SEQ ID NO: 1907784 - DNA, 25 bp, Homo sapien
gcctccgctgtggaaatggccgtcg

SEQ ID NO: 1907785 - DNA, 25 bp, Homo sapien
agtctacttagcttagggtcctaat

SEQ ID NO: 1907786 - DNA, 25 bp, Homo sapien
cagagctgttgcactaaagtctact

SEQ ID NO: 1907787 - DNA, 25 bp, Homo sapien
cagcctgggggttcttatagttact

SEQ ID NO: 1907788 - DNA, 25 bp, Homo sapien
tagtctcgctagactgcccaggatg

SEQ ID NO: 1907789 - DNA, 25 bp, Homo sapien
agccctgacggtctaggccaggttt

SEQ ID NO: 1907790 - DNA, 25 bp, Homo sapien
tcagccctgacggtctaggccaggt

SEQ ID NO: 1907791 - DNA, 25 bp, Homo sapien
cagccctgacggtctaggccaggtt

SEQ ID NO: 1907792 - DNA, 25 bp, Homo sapien
tctaggccaggtttgtccgcggggc

SEQ ID NO: 1907793 - DNA, 25 bp, Homo sapien
tactaggcgcaaacaaccaaagccc

SEQ ID NO: 1907794 - DNA, 25 bp, Homo sapien
cgaagccaggatgggacattcatct

SEQ ID NO: 1907795 - DNA, 25 bp, Homo sapien
aaccaaagcccactcgcctgcgaag

SEQ ID NO: 1907796 - DNA, 25 bp, Homo sapien
cagccagccagtgtactaggcgcaa

SEQ ID NO: 1907797 - DNA, 25 bp, Homo sapien
aaaacccttcaatcacgccgttgca

SEQ ID NO: 1907798 - DNA, 25 bp, Homo sapien
gccgttgcagtcaatgggctttaat

SEQ ID NO: 1907799 - DNA, 25 bp, Homo sapien
aaacccttcaatcacgccgttgcag

SEQ ID NO: 1907800 - DNA, 25 bp, Homo sapien
cacgccgttgcagtcaatgggcttt

SEQ ID NO: 1907801 - DNA, 25 bp, Homo sapien
cagaataatcctggcggtttagtca

SEQ ID NO: 1907802 - DNA, 25 bp, Homo sapien
gaataatcctggcggtttagtcatc

SEQ ID NO: 1907803 - DNA, 25 bp, Homo sapien
ataatcctggcggtttagtcatcat

SEQ ID NO: 1907804 - DNA, 25 bp, Homo sapien
aatcctggcggtttagtcatcattc

SEQ ID NO: 1907805 - DNA, 25 bp, Homo sapien
ctaagaacagaaattttacatgatt

SEQ ID NO: 1907806 - DNA, 25 bp, Homo sapien
aagaacagaaattttacatgatttt

SEQ ID NO: 1907807 - DNA, 25 bp, Homo sapien
gaacagaaattttacatgattttca

SEQ ID NO: 1907808 - DNA, 25 bp, Homo sapien
cagaaattttacatgattttcatac

SEQ ID NO: 1907809 - DNA, 25 bp, Homo sapien
ggcgagtagggctgtgcgtaaaagg

SEQ ID NO: 1907810 - DNA, 25 bp, Homo sapien
gcttgaggacgggtcgcctagcggt

SEQ ID NO: 1907811 - DNA, 25 bp, Homo sapien
aaatcgcagctacgagggctagagg

SEQ ID NO: 1907812 - DNA, 25 bp, Homo sapien
gaacggaaatcgcagctacgagggc

SEQ ID NO: 1907813 - DNA, 25 bp, Homo sapien
caaattgggcctgcgagaaaggtgt

SEQ ID NO: 1907814 - DNA, 25 bp, Homo sapien
cgacaaaacacctttcactctctat

SEQ ID NO: 1907815 - DNA, 25 bp, Homo sapien
cttgggaaacacaatgcctctcaaa

SEQ ID NO: 1907816 - DNA, 25 bp, Homo sapien
gaaagaagaaatgtcccacaccctc

SEQ ID NO: 1907817 - DNA, 25 bp, Homo sapien
gaggcgccctgacgctttggtcaac

SEQ ID NO: 1907818 - DNA, 25 bp, Homo sapien
tgcttctgcacactcgaagggactc

SEQ ID NO: 1907819 - DNA, 25 bp, Homo sapien
tttggtcaacgagggctgcttctgc

SEQ ID NO: 1907820 - DNA, 25 bp, Homo sapien
aacccaaaactgtccactggaggcg

SEQ ID NO: 1907821 - DNA, 25 bp, Homo sapien
agagtgtcggcctctcggcaagcac

SEQ ID NO: 1907822 - DNA, 25 bp, Homo sapien
ggcaagcaccgtttccagactgcgg

SEQ ID NO: 1907823 - DNA, 25 bp, Homo sapien
caagcggagattcgcattaatgtaa

SEQ ID NO: 1907824 - DNA, 25 bp, Homo sapien
gattgcagagtgtcggcctctcggc

SEQ ID NO: 1907825 - DNA, 25 bp, Homo sapien
ctcccgcggccacgcgaaggcgtct

SEQ ID NO: 1907826 - DNA, 25 bp, Homo sapien
ctccactcccgcggccacgcgaagg

SEQ ID NO: 1907827 - DNA, 25 bp, Homo sapien
cactcccgcggccacgcgaaggcgt

SEQ ID NO: 1907828 - DNA, 25 bp, Homo sapien
ccgcggccacgcgaaggcgtctcac

SEQ ID NO: 1907829 - DNA, 25 bp, Homo sapien
ccttgcagcgggctctggtctagtg

SEQ ID NO: 1907830 - DNA, 25 bp, Homo sapien
tgaagggcgcgagtgcattcaggcc

SEQ ID NO: 1907831 - DNA, 25 bp, Homo sapien
gcacgtgggcgaatgtctggtggcc

SEQ ID NO: 1907832 - DNA, 25 bp, Homo sapien
tctggtggccgggtgagtggaaccc

SEQ ID NO: 1907833 - DNA, 25 bp, Homo sapien
cctgccattcgggacggagccagtc

SEQ ID NO: 1907834 - DNA, 25 bp, Homo sapien
agtccgcgggcacccaagggcgcaa

SEQ ID NO: 1907835 - DNA, 25 bp, Homo sapien
caggtcccacggccaaagtcctcga

SEQ ID NO: 1907836 - DNA, 25 bp, Homo sapien
cctgacctgccattcgggacggagc

SEQ ID NO: 1907837 - DNA, 25 bp, Homo sapien
ccccgactcgggatgacaattgacg

SEQ ID NO: 1907838 - DNA, 25 bp, Homo sapien
ctattggcggtcaaagtggccccga

SEQ ID NO: 1907839 - DNA, 25 bp, Homo sapien
gatcaagggattgcccattctgtgc

SEQ ID NO: 1907840 - DNA, 25 bp, Homo sapien
cttctgaggattagctctgacttcc

SEQ ID NO: 1907841 - DNA, 25 bp, Homo sapien
accgattcgtgccagagaaactcat

SEQ ID NO: 1907842 - DNA, 25 bp, Homo sapien
taagaaccgattcgtgccagagaaa

SEQ ID NO: 1907843 - DNA, 25 bp, Homo sapien
ctgtaagaaccgattcgtgccagag

SEQ ID NO: 1907844 - DNA, 25 bp, Homo sapien
gaaccgattcgtgccagagaaactc

SEQ ID NO: 1907845 - DNA, 25 bp, Homo sapien
taaagacgtctcacttcgcaattgg

SEQ ID NO: 1907846 - DNA, 25 bp, Homo sapien
cgcaattggaatcgaagcgtgggcc

SEQ ID NO: 1907847 - DNA, 25 bp, Homo sapien
gagtccatcaccgtggaagtccggg

SEQ ID NO: 1907848 - DNA, 25 bp, Homo sapien
gaccgagggaggtctaccgcagcac

SEQ ID NO: 1907849 - DNA, 25 bp, Homo sapien
tgtttgtaaaacctgatgaactgtc

SEQ ID NO: 1907850 - DNA, 25 bp, Homo sapien
ccagggagagctccgggagcacaag

SEQ ID NO: 1907851 - DNA, 25 bp, Homo sapien
ttttaagctcaaagagcagatgtag

SEQ ID NO: 1907852 - DNA, 25 bp, Homo sapien
gcagatgtagaagctaatgtttgta

SEQ ID NO: 1907853 - DNA, 25 bp, Homo sapien
ggatttgtacagattcagcccaatt

SEQ ID NO: 1907854 - DNA, 25 bp, Homo sapien
gcaagtcctatgtaccagtggtccc

SEQ ID NO: 1907855 - DNA, 25 bp, Homo sapien
caatttcctaaaccttgtgcatgga

SEQ ID NO: 1907856 - DNA, 25 bp, Homo sapien
tgtgcatggagctcattagcactgc

SEQ ID NO: 1907857 - DNA, 25 bp, Homo sapien
cagccccacccttatgagctaattt

SEQ ID NO: 1907858 - DNA, 25 bp, Homo sapien
ggcagtgattggtatcacctttgta

SEQ ID NO: 1907859 - DNA, 25 bp, Homo sapien
tgattcttatattagtctgctcagg

SEQ ID NO: 1907860 - DNA, 25 bp, Homo sapien
gcacaagtcctattgaattacagcc

SEQ ID NO: 1907861 - DNA, 25 bp, Homo sapien
gatggattcgactctgtcttcgtct

SEQ ID NO: 1907862 - DNA, 25 bp, Homo sapien
tcgactctgtcttcgtctttgttaa

SEQ ID NO: 1907863 - DNA, 25 bp, Homo sapien
tttcgtaggtcacccaggtctccca

SEQ ID NO: 1907864 - DNA, 25 bp, Homo sapien
aggagaaacgatggattcgactctg

SEQ ID NO: 1907865 - DNA, 25 bp, Homo sapien
cttttctggcaacctaagcttaggg

SEQ ID NO: 1907866 - DNA, 25 bp, Homo sapien
tccaaatctagtgctgtacttgtcc

SEQ ID NO: 1907867 - DNA, 25 bp, Homo sapien
tagtcgacctctggataagcccttc

SEQ ID NO: 1907868 - DNA, 25 bp, Homo sapien
gctccgcaattatcagcagtcagat

SEQ ID NO: 1907869 - DNA, 25 bp, Homo sapien
gattgacttataaatctgcccccca

SEQ ID NO: 1907870 - DNA, 25 bp, Homo sapien
ctgtccattgaaggcaaattcgcca

SEQ ID NO: 1907871 - DNA, 25 bp, Homo sapien
gactgattgacttataaatctgccc

SEQ ID NO: 1907872 - DNA, 25 bp, Homo sapien
cacccacttgtctgtccattgaagg

SEQ ID NO: 1907873 - DNA, 25 bp, Homo sapien
gcttccaggcctcgggctgggatct

SEQ ID NO: 1907874 - DNA, 25 bp, Homo sapien
gccaccacctcatcccgcttcttcg

SEQ ID NO: 1907875 - DNA, 25 bp, Homo sapien
acctcatcccgcttcttcgcggctt

SEQ ID NO: 1907876 - DNA, 25 bp, Homo sapien
gagggtgcgacacgcgtcggagcgg

SEQ ID NO: 1907877 - DNA, 25 bp, Homo sapien
ccgcatctctttcccctctcgggca

SEQ ID NO: 1907878 - DNA, 25 bp, Homo sapien
gaagccccccatgcggcaagagcga

SEQ ID NO: 1907879 - DNA, 25 bp, Homo sapien
gcaagagcgagtcgcaggaacaagt

SEQ ID NO: 1907880 - DNA, 25 bp, Homo sapien
caagtggggaatcttggccgcggcc

SEQ ID NO: 1907881 - DNA, 25 bp, Homo sapien
tccagggcagttcgagcggaagttt

SEQ ID NO: 1907882 - DNA, 25 bp, Homo sapien
cgagcggaagtttctcactgacaat

SEQ ID NO: 1907883 - DNA, 25 bp, Homo sapien
gacaatttgccccaaatagatagat

SEQ ID NO: 1907884 - DNA, 25 bp, Homo sapien
cagaagcgaccttcgggaaggaagc

SEQ ID NO: 1907885 - DNA, 25 bp, Homo sapien
tccaccagcgtgtacgacgctcatt

SEQ ID NO: 1907886 - DNA, 25 bp, Homo sapien
cgctggcaagccgtaagtccaagag

SEQ ID NO: 1907887 - DNA, 25 bp, Homo sapien
cgtgtacgacgctcatttcctttct

SEQ ID NO: 1907888 - DNA, 25 bp, Homo sapien
ccgtaagtccaagagctttggctcc

SEQ ID NO: 1907889 - DNA, 25 bp, Homo sapien
ggatcgtgcacgtgctgtttcgcca

SEQ ID NO: 1907890 - DNA, 25 bp, Homo sapien
tcggtcgccgtaatgcggtccggat

SEQ ID NO: 1907891 - DNA, 25 bp, Homo sapien
cgcgacggcgagaaacggtcttgaa

SEQ ID NO: 1907892 - DNA, 25 bp, Homo sapien
tcttgaaggtcggtcggtcgccgta

SEQ ID NO: 1907893 - DNA, 25 bp, Homo sapien
tgaagcatgagatctgattacccct

SEQ ID NO: 1907894 - DNA, 25 bp, Homo sapien
tcatcttagcttgcatagatacaga

SEQ ID NO: 1907895 - DNA, 25 bp, Homo sapien
gaactcctgtacctgaaaggccaaa

SEQ ID NO: 1907896 - DNA, 25 bp, Homo sapien
ggcaatcatcttatgccctgaagca

SEQ ID NO: 1907897 - DNA, 25 bp, Homo sapien
gagctgtacccatggtagccccaag

SEQ ID NO: 1907898 - DNA, 25 bp, Homo sapien
ttaagaccgaacagggtgagaatcc

SEQ ID NO: 1907899 - DNA, 25 bp, Homo sapien
aatccctatctcgtggtttccagcg

SEQ ID NO: 1907900 - DNA, 25 bp, Homo sapien
agaggtctagccactcgcctaaggt

SEQ ID NO: 1907901 - DNA, 25 bp, Homo sapien
tgttgtgcctttcgccagggctgaa

SEQ ID NO: 1907902 - DNA, 25 bp, Homo sapien
gtcatgccagaaagtcatcacgatg

SEQ ID NO: 1907903 - DNA, 25 bp, Homo sapien
aacacaggatgcatatgctgcgggt

SEQ ID NO: 1907904 - DNA, 25 bp, Homo sapien
gtgatttatgcaaagcgcgccgata

SEQ ID NO: 1907905 - DNA, 25 bp, Homo sapien
cctgggacgcccaggcggaggacct

SEQ ID NO: 1907906 - DNA, 25 bp, Homo sapien
tgtcggagcccactggagcgcacag

SEQ ID NO: 1907907 - DNA, 25 bp, Homo sapien
ggcgaactctgattgaaagcccggg

SEQ ID NO: 1907908 - DNA, 25 bp, Homo sapien
tccagcattcacttgcacgcacagg

SEQ ID NO: 1907909 - DNA, 25 bp, Homo sapien
ccgcgaacgtcgagcggagggcggg

SEQ ID NO: 1907910 - DNA, 25 bp, Homo sapien
gcggaattgcagagcgccggccaca

SEQ ID NO: 1907911 - DNA, 25 bp, Homo sapien
gcgggaggtgtaacctctgacctct

SEQ ID NO: 1907912 - DNA, 25 bp, Homo sapien
gactggcaagctcttgttcgacaag

SEQ ID NO: 1907913 - DNA, 25 bp, Homo sapien
cacactttctaactcgtaagctccg

SEQ ID NO: 1907914 - DNA, 25 bp, Homo sapien
tattcacactttctaactcgtaagc

SEQ ID NO: 1907915 - DNA, 25 bp, Homo sapien
actttctaactcgtaagctccgaca

SEQ ID NO: 1907916 - DNA, 25 bp, Homo sapien
taactcgtaagctccgacagcgcct

SEQ ID NO: 1907917 - DNA, 25 bp, Homo sapien
gagcgcttctggagatattacaggg

SEQ ID NO: 1907918 - DNA, 25 bp, Homo sapien
tcagagcgcttctggagatattaca

SEQ ID NO: 1907919 - DNA, 25 bp, Homo sapien
ctggagatattacaggggacccagc

SEQ ID NO: 1907920 - DNA, 25 bp, Homo sapien
ttctggagatattacaggggaccca

SEQ ID NO: 1907921 - DNA, 25 bp, Homo sapien
gccgctgcgtgcgcggctctccccg

SEQ ID NO: 1907922 - DNA, 25 bp, Homo sapien
tggccgcctcttccctcggaagatt

SEQ ID NO: 1907923 - DNA, 25 bp, Homo sapien
gcggagcccgtctgcctctgagact

SEQ ID NO: 1907924 - DNA, 25 bp, Homo sapien
tgagactgcggtagtgttttccttc

SEQ ID NO: 1907925 - DNA, 25 bp, Homo sapien
cactctgcgcttgggttccggcagc

SEQ ID NO: 1907926 - DNA, 25 bp, Homo sapien
ggccgccgtggggcctaggcgcgca

SEQ ID NO: 1907927 - DNA, 25 bp, Homo sapien
gggccgccgtggggcctaggcgcgc

SEQ ID NO: 1907928 - DNA, 25 bp, Homo sapien
tcgggccgccgtggggcctaggcgc

SEQ ID NO: 1907929 - DNA, 25 bp, Homo sapien
gccgccgtggggcctaggcgcgcag

SEQ ID NO: 1907930 - DNA, 25 bp, Homo sapien
cggtgagaaggttacgacccgcgca

SEQ ID NO: 1907931 - DNA, 25 bp, Homo sapien
tgtagaccgtgagttggagcatttc

SEQ ID NO: 1907932 - DNA, 25 bp, Homo sapien
gttgtctccatttagccgccaggtg

SEQ ID NO: 1907933 - DNA, 25 bp, Homo sapien
ggagagccgtttcgttgcctctgga

SEQ ID NO: 1907934 - DNA, 25 bp, Homo sapien
gacgtggtatccagttattgatcca

SEQ ID NO: 1907935 - DNA, 25 bp, Homo sapien
tgcaggtgggcgatatgggatacca

SEQ ID NO: 1907936 - DNA, 25 bp, Homo sapien
ccttatcattgcaagaagtgggcag

SEQ ID NO: 1907937 - DNA, 25 bp, Homo sapien
tattgatccagtcaagcctttgccg

SEQ ID NO: 1907938 - DNA, 25 bp, Homo sapien
gcctccgacttgctgaagaattatc

SEQ ID NO: 1907939 - DNA, 25 bp, Homo sapien
cacgggaaatgttcagcatgttggg

SEQ ID NO: 1907940 - DNA, 25 bp, Homo sapien
agaattatctctactatgcctggtc

SEQ ID NO: 1907941 - DNA, 25 bp, Homo sapien
tgctgcagatggcagaggtcgtcca

SEQ ID NO: 1907942 - DNA, 25 bp, Homo sapien
gcattccagtagctatgacctgccg

SEQ ID NO: 1907943 - DNA, 25 bp, Homo sapien
gaccgcctgcactgaaaactcactg

SEQ ID NO: 1907944 - DNA, 25 bp, Homo sapien
tactgcggccttcaaaactacgtta

SEQ ID NO: 1907945 - DNA, 25 bp, Homo sapien
tctgtgtataacatcgtactgcggc

SEQ ID NO: 1907946 - DNA, 25 bp, Homo sapien
gcagaactgaactacaaaggcaatt

SEQ ID NO: 1907947 - DNA, 25 bp, Homo sapien
tacagctctcaaatgtaattgcatc

SEQ ID NO: 1907948 - DNA, 25 bp, Homo sapien
aactgaagctcggagcactccagca

SEQ ID NO: 1907949 - DNA, 25 bp, Homo sapien
ccttcttacagtgaataccatttgg

SEQ ID NO: 1907950 - DNA, 25 bp, Homo sapien
tggcttcttttcaatgtagtcttca

SEQ ID NO: 1907951 - DNA, 25 bp, Homo sapien
acaaatggcttcttttcaatgtagt

SEQ ID NO: 1907952 - DNA, 25 bp, Homo sapien
accacaaattacaaatggcttcttt

SEQ ID NO: 1907953 - DNA, 25 bp, Homo sapien
aattacaaatggcttcttttcaatg

SEQ ID NO: 1907954 - DNA, 25 bp, Homo sapien
tgaatattgaatattgctgacctca

SEQ ID NO: 1907955 - DNA, 25 bp, Homo sapien
tattgctgacctcaatatagaccat

SEQ ID NO: 1907956 - DNA, 25 bp, Homo sapien
tgaatattgctgacctcaatataga

SEQ ID NO: 1907957 - DNA, 25 bp, Homo sapien
gaatattgaatattgctgacctcaa

SEQ ID NO: 1907958 - DNA, 25 bp, Homo sapien
ccagctgattgtggcgcttatgatt

SEQ ID NO: 1907959 - DNA, 25 bp, Homo sapien
ctgattgtggcgcttatgattgaga

SEQ ID NO: 1907960 - DNA, 25 bp, Homo sapien
gtggcgcttatgattgagaacctct

SEQ ID NO: 1907961 - DNA, 25 bp, Homo sapien
ttgtggcgcttatgattgagaacct

SEQ ID NO: 1907962 - DNA, 25 bp, Homo sapien
cgtctggcagtctctttgacctgtt

SEQ ID NO: 1907963 - DNA, 25 bp, Homo sapien
tcccaagccgaaaccgtctggcagt

SEQ ID NO: 1907964 - DNA, 25 bp, Homo sapien
gtctctttgacctgttcactttcct

SEQ ID NO: 1907965 - DNA, 25 bp, Homo sapien
ggctgcacttgccagcatctcttct

SEQ ID NO: 1907966 - DNA, 25 bp, Homo sapien
tcagcagagagggtcgtcttgtctt

SEQ ID NO: 1907967 - DNA, 25 bp, Homo sapien
ttgcaggcagatcatcccatggagt

SEQ ID NO: 1907968 - DNA, 25 bp, Homo sapien
ggtcgtcttgtcttcccatcgtctc

SEQ ID NO: 1907969 - DNA, 25 bp, Homo sapien
tttgcaggcagatcatcccatggag

SEQ ID NO: 1907970 - DNA, 25 bp, Homo sapien
ttcctccagagaggtacagtcatgg

SEQ ID NO: 1907971 - DNA, 25 bp, Homo sapien
tccagagaggtacagtcatggaggt

SEQ ID NO: 1907972 - DNA, 25 bp, Homo sapien
tcttcctccagagaggtacagtcat

SEQ ID NO: 1907973 - DNA, 25 bp, Homo sapien
cctccagagaggtacagtcatggag

SEQ ID NO: 1907974 - DNA, 25 bp, Homo sapien
aaagctgctacaaaatggcggctcc

SEQ ID NO: 1907975 - DNA, 25 bp, Homo sapien
gactgtcaactctcaaagtgctctt

SEQ ID NO: 1907976 - DNA, 25 bp, Homo sapien
tctctagaaagctgctacaaaatgg

SEQ ID NO: 1907977 - DNA, 25 bp, Homo sapien
tcagtttaagtcagactgtcaactc

SEQ ID NO: 1907978 - DNA, 25 bp, Homo sapien
agtaacagaatgtgcctgtccctcc

SEQ ID NO: 1907979 - DNA, 25 bp, Homo sapien
tattccgcttggtgttctctcagca

SEQ ID NO: 1907980 - DNA, 25 bp, Homo sapien
catacgtagcctttttcaataaaag

SEQ ID NO: 1907981 - DNA, 25 bp, Homo sapien
aggcccactcatacgtagccttttt

SEQ ID NO: 1907982 - DNA, 25 bp, Homo sapien
tctcctgtctgttagcactttgcac

SEQ ID NO: 1907983 - DNA, 25 bp, Homo sapien
gtgttgctagttgagtccactgggt

SEQ ID NO: 1907984 - DNA, 25 bp, Homo sapien
tgactggtgttcgatctctcctgtc

SEQ ID NO: 1907985 - DNA, 25 bp, Homo sapien
caatcaagtgcttggtgttgctagt

SEQ ID NO: 1907986 - DNA, 25 bp, Homo sapien
aatgtattgcttaaggcttattgaa

SEQ ID NO: 1907987 - DNA, 25 bp, Homo sapien
gcttaaggcttattgaatcattttg

SEQ ID NO: 1907988 - DNA, 25 bp, Homo sapien
cacttgttgagagggattatttact

SEQ ID NO: 1907989 - DNA, 25 bp, Homo sapien
ctctatgagtgactacttaagtcac

SEQ ID NO: 1907990 - DNA, 25 bp, Homo sapien
tccctttaaacagtggtgatatcaa

SEQ ID NO: 1907991 - DNA, 25 bp, Homo sapien
tacttaagtcacttgttgagaggga

SEQ ID NO: 1907992 - DNA, 25 bp, Homo sapien
agtaaataatccctctcaacaagtg

SEQ ID NO: 1907993 - DNA, 25 bp, Homo sapien
gtgacttaagtagtcactcatagag

SEQ ID NO: 1907994 - DNA, 25 bp, Homo sapien
tgatatcaccactgtttaaagggaa

SEQ ID NO: 1907995 - DNA, 25 bp, Homo sapien
actcatagagagcaaaaaaagctgg

SEQ ID NO: 1907996 - DNA, 25 bp, Homo sapien
caaaatgattcaataagccttaagc

SEQ ID NO: 1907997 - DNA, 25 bp, Homo sapien
aatccctctcaacaagtgacttaag

SEQ ID NO: 1907998 - DNA, 25 bp, Homo sapien
taatttgtgatgtcacttgacccca

SEQ ID NO: 1907999 - DNA, 25 bp, Homo sapien
cagaaactggtataacatgccttca

SEQ ID NO: 1908000 - DNA, 25 bp, Homo sapien
tattccagtgtaatctgcagtgtcg

SEQ ID NO: 1908001 - DNA, 25 bp, Homo sapien
gaaagtatcttcctccaggcttgta

SEQ ID NO: 1908002 - DNA, 25 bp, Homo sapien
taggagcactacaccattggtttcc

SEQ ID NO: 1908003 - DNA, 25 bp, Homo sapien
gcttgtaatacccttcacatggaag

SEQ ID NO: 1908004 - DNA, 25 bp, Homo sapien
tacgacactgcagattacactggaa

SEQ ID NO: 1908005 - DNA, 25 bp, Homo sapien
gaaaccaatggtgtagtgctcctac

SEQ ID NO: 1908006 - DNA, 25 bp, Homo sapien
tacaagcctggaggaagatactttc

SEQ ID NO: 1908007 - DNA, 25 bp, Homo sapien
gtgtgcaccacattaaaacagcaag

SEQ ID NO: 1908008 - DNA, 25 bp, Homo sapien
tccatgtgaagggtattacaagcct

SEQ ID NO: 1908009 - DNA, 25 bp, Homo sapien
tgtgcaaataagaccaagccagtaa

SEQ ID NO: 1908010 - DNA, 25 bp, Homo sapien
gataaaagctatactccatctaaaa

SEQ ID NO: 1908011 - DNA, 25 bp, Homo sapien
cctctggcacagaacgaacgttgtc

SEQ ID NO: 1908012 - DNA, 25 bp, Homo sapien
tctggcacagaacgaacgttgtctt

SEQ ID NO: 1908013 - DNA, 25 bp, Homo sapien
gcacagaacgaacgttgtcttcaca

SEQ ID NO: 1908014 - DNA, 25 bp, Homo sapien
gaacgaacgttgtcttcacatgttt

SEQ ID NO: 1908015 - DNA, 25 bp, Homo sapien
taatagataaaagctatactccatc

SEQ ID NO: 1908016 - DNA, 25 bp, Homo sapien
ttttagatggagtatagcttttatc

SEQ ID NO: 1908017 - DNA, 25 bp, Homo sapien
gacaacgttcgttctgtgccagagg

SEQ ID NO: 1908018 - DNA, 25 bp, Homo sapien
gaagacaacgttcgttctgtgccag

SEQ ID NO: 1908019 - DNA, 25 bp, Homo sapien
aaaacatgtgaagacaacgttcgtt

SEQ ID NO: 1908020 - DNA, 25 bp, Homo sapien
aacatgtgaagacaacgttcgttct

SEQ ID NO: 1908021 - DNA, 25 bp, Homo sapien
tgtgaagacaacgttcgttctgtgc

SEQ ID NO: 1908022 - DNA, 25 bp, Homo sapien
aagcgtttttgcgtcagcttccttt

SEQ ID NO: 1908023 - DNA, 25 bp, Homo sapien
ctgggaaagcgtttttgcgtcagct

SEQ ID NO: 1908024 - DNA, 25 bp, Homo sapien
gaaagcgtttttgcgtcagcttcct

SEQ ID NO: 1908025 - DNA, 25 bp, Homo sapien
cctgggaaagcgtttttgcgtcagc

SEQ ID NO: 1908026 - DNA, 25 bp, Homo sapien
gggaaagcgtttttgcgtcagcttc

SEQ ID NO: 1908027 - DNA, 25 bp, Homo sapien
ccctgggaaagcgtttttgcgtcag

SEQ ID NO: 1908028 - DNA, 25 bp, Homo sapien
gctgacgcaaaaacgctttcccagg

SEQ ID NO: 1908029 - DNA, 25 bp, Homo sapien
gaagctgacgcaaaaacgctttccc

SEQ ID NO: 1908030 - DNA, 25 bp, Homo sapien
aggaagctgacgcaaaaacgctttc

SEQ ID NO: 1908031 - DNA, 25 bp, Homo sapien
ctgacgcaaaaacgctttcccaggg

SEQ ID NO: 1908032 - DNA, 25 bp, Homo sapien
agctgacgcaaaaacgctttcccag

SEQ ID NO: 1908033 - DNA, 25 bp, Homo sapien
aaaggaagctgacgcaaaaacgctt

SEQ ID NO: 1908034 - DNA, 25 bp, Homo sapien
gagctatgaacaaattaaggtcccc

SEQ ID NO: 1908035 - DNA, 25 bp, Homo sapien
tagctcgtcctttgtgttctaggag

SEQ ID NO: 1908036 - DNA, 25 bp, Homo sapien
tgttctaggagttacaggtagagct

SEQ ID NO: 1908037 - DNA, 25 bp, Homo sapien
tatatcctattaggtaaattgcggg

SEQ ID NO: 1908038 - DNA, 25 bp, Homo sapien
gataaaagtggctgcatatgagcac

SEQ ID NO: 1908039 - DNA, 25 bp, Homo sapien
ccctcttttatggtgcttatatcct

SEQ ID NO: 1908040 - DNA, 25 bp, Homo sapien
ctggcccctctttatttaggtctgg

SEQ ID NO: 1908041 - DNA, 25 bp, Homo sapien
gggaccttaatttgttcatagctct

SEQ ID NO: 1908042 - DNA, 25 bp, Homo sapien
catatgcagccacttttatcttagg

SEQ ID NO: 1908043 - DNA, 25 bp, Homo sapien
aactcctagaacacaaaggacgagc

SEQ ID NO: 1908044 - DNA, 25 bp, Homo sapien
tcatagctctacctgtaactcctag

SEQ ID NO: 1908045 - DNA, 25 bp, Homo sapien
taggatataagcaccataaaagagg

SEQ ID NO: 1908046 - DNA, 25 bp, Homo sapien
acgtggtgtgctcagaatgatgaaa

SEQ ID NO: 1908047 - DNA, 25 bp, Homo sapien
aggacgtggtgtgctcagaatgatg

SEQ ID NO: 1908048 - DNA, 25 bp, Homo sapien
ggacgtggtgtgctcagaatgatga

SEQ ID NO: 1908049 - DNA, 25 bp, Homo sapien
gaaggacgtggtgtgctcagaatga

SEQ ID NO: 1908050 - DNA, 25 bp, Homo sapien
gacgtggtgtgctcagaatgatgaa

SEQ ID NO: 1908051 - DNA, 25 bp, Homo sapien
aaggacgtggtgtgctcagaatgat

SEQ ID NO: 1908052 - DNA, 25 bp, Homo sapien
tcattctgagcacaccacgtccttc

SEQ ID NO: 1908053 - DNA, 25 bp, Homo sapien
ttcatcattctgagcacaccacgtc

SEQ ID NO: 1908054 - DNA, 25 bp, Homo sapien
atcattctgagcacaccacgtcctt

SEQ ID NO: 1908055 - DNA, 25 bp, Homo sapien
tcatcattctgagcacaccacgtcc

SEQ ID NO: 1908056 - DNA, 25 bp, Homo sapien
catcattctgagcacaccacgtcct

SEQ ID NO: 1908057 - DNA, 25 bp, Homo sapien
tttcatcattctgagcacaccacgt

SEQ ID NO: 1908058 - DNA, 25 bp, Homo sapien
ccctgcctcagaatgacatcagagg

SEQ ID NO: 1908059 - DNA, 25 bp, Homo sapien
acgtggtgtgctcagaatgatgaaa

SEQ ID NO: 1908060 - DNA, 25 bp, Homo sapien
gacatcagaggcaaggagtcatgga

SEQ ID NO: 1908061 - DNA, 25 bp, Homo sapien
tgatgaaaagttattttgtgactag

SEQ ID NO: 1908062 - DNA, 25 bp, Homo sapien
gacgtggtgtgctcagaatgatgaa

SEQ ID NO: 1908063 - DNA, 25 bp, Homo sapien
aaggacgtggtgtgctcagaatgat

SEQ ID NO: 1908064 - DNA, 25 bp, Homo sapien
cctctgatgtcattctgaggcaggg

SEQ ID NO: 1908065 - DNA, 25 bp, Homo sapien
tccatgactccttgcctctgatgtc

SEQ ID NO: 1908066 - DNA, 25 bp, Homo sapien
ctagtcacaaaataacttttcatca

SEQ ID NO: 1908067 - DNA, 25 bp, Homo sapien
ttcatcattctgagcacaccacgtc

SEQ ID NO: 1908068 - DNA, 25 bp, Homo sapien
atcattctgagcacaccacgtcctt

SEQ ID NO: 1908069 - DNA, 25 bp, Homo sapien
tttcatcattctgagcacaccacgt

SEQ ID NO: 1908070 - DNA, 25 bp, Homo sapien
tgaatggctgcgaagtgaattagaa

SEQ ID NO: 1908071 - DNA, 25 bp, Homo sapien
ctttgaatggctgcgaagtgaatta

SEQ ID NO: 1908072 - DNA, 25 bp, Homo sapien
gaatctactgttagaagaagataca

SEQ ID NO: 1908073 - DNA, 25 bp, Homo sapien
ggctgcgaagtgaattagaaagaga

SEQ ID NO: 1908074 - DNA, 25 bp, Homo sapien
gaaagaatctactgttagaagaaga

SEQ ID NO: 1908075 - DNA, 25 bp, Homo sapien
aatggctgcgaagtgaattagaaag

SEQ ID NO: 1908076 - DNA, 25 bp, Homo sapien
tcttcttctaacagtagattctttc

SEQ ID NO: 1908077 - DNA, 25 bp, Homo sapien
tctctttctaattcacttcgcagcc

SEQ ID NO: 1908078 - DNA, 25 bp, Homo sapien
tctttctaattcacttcgcagccat

SEQ ID NO: 1908079 - DNA, 25 bp, Homo sapien
taattcacttcgcagccattcaaag

SEQ ID NO: 1908080 - DNA, 25 bp, Homo sapien
tgtatcttcttctaacagtagattc

SEQ ID NO: 1908081 - DNA, 25 bp, Homo sapien
ttctaattcacttcgcagccattca

SEQ ID NO: 1908082 - DNA, 25 bp, Homo sapien
tcagatataatcatgattgtgtcaa

SEQ ID NO: 1908083 - DNA, 25 bp, Homo sapien
catgattgtgtcaaaagttcaaaag

SEQ ID NO: 1908084 - DNA, 25 bp, Homo sapien
agtgaatcagatataatcatgattg

SEQ ID NO: 1908085 - DNA, 25 bp, Homo sapien
gattgtgtcaaaagttcaaaaggga

SEQ ID NO: 1908086 - DNA, 25 bp, Homo sapien
tgattgtgtcaaaagttcaaaaggg

SEQ ID NO: 1908087 - DNA, 25 bp, Homo sapien
taatcatgattgtgtcaaaagttca

SEQ ID NO: 1908088 - DNA, 25 bp, Homo sapien
caatcatgattatatctgattcact

SEQ ID NO: 1908089 - DNA, 25 bp, Homo sapien
cccttttgaacttttgacacaatca

SEQ ID NO: 1908090 - DNA, 25 bp, Homo sapien
tgaacttttgacacaatcatgatta

SEQ ID NO: 1908091 - DNA, 25 bp, Homo sapien
ttttgaacttttgacacaatcatga

SEQ ID NO: 1908092 - DNA, 25 bp, Homo sapien
tcccttttgaacttttgacacaatc

SEQ ID NO: 1908093 - DNA, 25 bp, Homo sapien
tgacacaatcatgattatatctgat

SEQ ID NO: 1908094 - DNA, 25 bp, Homo sapien
tcgtactgttaatgagttccagaaa

SEQ ID NO: 1908095 - DNA, 25 bp, Homo sapien
gaacccgggtctgcttgactaattc

SEQ ID NO: 1908096 - DNA, 25 bp, Homo sapien
ggaaagtaatttggcatgatcgtac

SEQ ID NO: 1908097 - DNA, 25 bp, Homo sapien
catgatcgtactgttaatgagttcc

SEQ ID NO: 1908098 - DNA, 25 bp, Homo sapien
aagaggagtcgaacccgggtctgct

SEQ ID NO: 1908099 - DNA, 25 bp, Homo sapien
tccctgctacttccaggaatcagaa

SEQ ID NO: 1908100 - DNA, 25 bp, Homo sapien
gaattagtcaagcagacccgggttc

SEQ ID NO: 1908101 - DNA, 25 bp, Homo sapien
agcagacccgggttcgactcctctt

SEQ ID NO: 1908102 - DNA, 25 bp, Homo sapien
tacgatcatgccaaattactttcct

SEQ ID NO: 1908103 - DNA, 25 bp, Homo sapien
ggaactcattaacagtacgatcatg

SEQ ID NO: 1908104 - DNA, 25 bp, Homo sapien
ttctgattcctggaagtagcaggga

SEQ ID NO: 1908105 - DNA, 25 bp, Homo sapien
tttctggaactcattaacagtacga

SEQ ID NO: 1908106 - DNA, 25 bp, Homo sapien
ttttttgcacgtgtatcccagaact

SEQ ID NO: 1908107 - DNA, 25 bp, Homo sapien
cacgtgtatcccagaactaaaaaga

SEQ ID NO: 1908108 - DNA, 25 bp, Homo sapien
gacagaatttcttgaacccacgagg

SEQ ID NO: 1908109 - DNA, 25 bp, Homo sapien
taaccccagcagtttaggaggccga

SEQ ID NO: 1908110 - DNA, 25 bp, Homo sapien
ttcttattttcttggccgggcacag

SEQ ID NO: 1908111 - DNA, 25 bp, Homo sapien
tactgggaaagctgagacagaattt

SEQ ID NO: 1908112 - DNA, 25 bp, Homo sapien
cctcgtgggttcaagaaattctgtc

SEQ ID NO: 1908113 - DNA, 25 bp, Homo sapien
gaaattctgtctcagctttcccagt

SEQ ID NO: 1908114 - DNA, 25 bp, Homo sapien
tagttctgggatacacgtgcaaaaa

SEQ ID NO: 1908115 - DNA, 25 bp, Homo sapien
cttccacctcgtgggttcaagaaat

SEQ ID NO: 1908116 - DNA, 25 bp, Homo sapien
tctttttagttctgggatacacgtg

SEQ ID NO: 1908117 - DNA, 25 bp, Homo sapien
tgtgcccggccaagaaaataagaaa

SEQ ID NO: 1908118 - DNA, 25 bp, Homo sapien
tgcactgagttatgatcttgcccct

SEQ ID NO: 1908119 - DNA, 25 bp, Homo sapien
taaactgtcagctttcgtgagaact

SEQ ID NO: 1908120 - DNA, 25 bp, Homo sapien
gagatttggatagggacatacagcc

SEQ ID NO: 1908121 - DNA, 25 bp, Homo sapien
gatatagctaagaaagtctacctgc

SEQ ID NO: 1908122 - DNA, 25 bp, Homo sapien
tcttgccagaagctaatccagtgtg

SEQ ID NO: 1908123 - DNA, 25 bp, Homo sapien
gatctttcctgattcctcttgccag

SEQ ID NO: 1908124 - DNA, 25 bp, Homo sapien
ctggcaagaggaatcaggaaagatc

SEQ ID NO: 1908125 - DNA, 25 bp, Homo sapien
cacactggattagcttctggcaaga

SEQ ID NO: 1908126 - DNA, 25 bp, Homo sapien
gggcaagatcataactcagtgcaga

SEQ ID NO: 1908127 - DNA, 25 bp, Homo sapien
tatatcataaagcatggtcaggatg

SEQ ID NO: 1908128 - DNA, 25 bp, Homo sapien
gatcatcagagtttagcatgggaaa

SEQ ID NO: 1908129 - DNA, 25 bp, Homo sapien
agttctcacgaaagctgacagttta

SEQ ID NO: 1908130 - DNA, 25 bp, Homo sapien
cataatctgtagtgggaacccaggt

SEQ ID NO: 1908131 - DNA, 25 bp, Homo sapien
taataacacatgttactgcattcag

SEQ ID NO: 1908132 - DNA, 25 bp, Homo sapien
tgagtagctcctgtgggtcagttga

SEQ ID NO: 1908133 - DNA, 25 bp, Homo sapien
cagacattgctagatgcttgtttaa

SEQ ID NO: 1908134 - DNA, 25 bp, Homo sapien
cagggctagatttctctgataagtt

SEQ ID NO: 1908135 - DNA, 25 bp, Homo sapien
gcattcagtaagttcacagcagcct

SEQ ID NO: 1908136 - DNA, 25 bp, Homo sapien
tctagctagggggagcacctgtctc

SEQ ID NO: 1908137 - DNA, 25 bp, Homo sapien
taatactggagtgattccttgttac

SEQ ID NO: 1908138 - DNA, 25 bp, Homo sapien
cagaaagtgagccagtagtctagct

SEQ ID NO: 1908139 - DNA, 25 bp, Homo sapien
aagtgagccagtagtctagctaggg

SEQ ID NO: 1908140 - DNA, 25 bp, Homo sapien
ttccttgttactctctgacacaaac

SEQ ID NO: 1908141 - DNA, 25 bp, Homo sapien
gaaagtgagccagtagtctagctag

SEQ ID NO: 1908142 - DNA, 25 bp, Homo sapien
gtttgtgtcagagagtaacaaggaa

SEQ ID NO: 1908143 - DNA, 25 bp, Homo sapien
gagtaacaaggaatcactccagtat

SEQ ID NO: 1908144 - DNA, 25 bp, Homo sapien
taacaaggaatcactccagtattat

SEQ ID NO: 1908145 - DNA, 25 bp, Homo sapien
gagacaggtgctccccctagctaga

SEQ ID NO: 1908146 - DNA, 25 bp, Homo sapien
agctagactactggctcactttctg

SEQ ID NO: 1908147 - DNA, 25 bp, Homo sapien
ccctagctagactactggctcactt

SEQ ID NO: 1908148 - DNA, 25 bp, Homo sapien
tcaactgacccacaggagctactca

SEQ ID NO: 1908149 - DNA, 25 bp, Homo sapien
gtgttattaaacttagcattgcaag

SEQ ID NO: 1908150 - DNA, 25 bp, Homo sapien
cctgggttcccactacagattatgc

SEQ ID NO: 1908151 - DNA, 25 bp, Homo sapien
aggctgctgtgaacttactgaatgc

SEQ ID NO: 1908152 - DNA, 25 bp, Homo sapien
ttaaacaagcatctagcaatgtctg

SEQ ID NO: 1908153 - DNA, 25 bp, Homo sapien
aacttatcagagaaatctagccctg

SEQ ID NO: 1908154 - DNA, 25 bp, Homo sapien
ttctcactcgaaaccttttatgtaa

SEQ ID NO: 1908155 - DNA, 25 bp, Homo sapien
tttgaatacccacataaaggaaaga

SEQ ID NO: 1908156 - DNA, 25 bp, Homo sapien
gttcagggtcggtcagcaaaccagt

SEQ ID NO: 1908157 - DNA, 25 bp, Homo sapien
gaaagaaagttggtgctgataaact

SEQ ID NO: 1908158 - DNA, 25 bp, Homo sapien
ctgataaactagtgggcagcaggtt

SEQ ID NO: 1908159 - DNA, 25 bp, Homo sapien
gccaaacaaaattgactgcaatctg

SEQ ID NO: 1908160 - DNA, 25 bp, Homo sapien
actggtttgctgaccgaccctgaac

SEQ ID NO: 1908161 - DNA, 25 bp, Homo sapien
tacataaaaggtttcgagtgagaaa

SEQ ID NO: 1908162 - DNA, 25 bp, Homo sapien
tagtttatcagcaccaactttcttt

SEQ ID NO: 1908163 - DNA, 25 bp, Homo sapien
cctttatgtgggtattcaaaggagt

SEQ ID NO: 1908164 - DNA, 25 bp, Homo sapien
cagattgcagtcaattttgtttggc

SEQ ID NO: 1908165 - DNA, 25 bp, Homo sapien
aacctgctgcccactagtttatcag

SEQ ID NO: 1908166 - DNA, 25 bp, Homo sapien
cagcaatttcttgaacatcagataa

SEQ ID NO: 1908167 - DNA, 25 bp, Homo sapien
acatcagataagaaagatggtgtcc

SEQ ID NO: 1908168 - DNA, 25 bp, Homo sapien
tcatgtaaatagagccagcaatttc

SEQ ID NO: 1908169 - DNA, 25 bp, Homo sapien
catgtaaatagagccagcaatttct

SEQ ID NO: 1908170 - DNA, 25 bp, Homo sapien
caatttcttgaacatcagataagaa

SEQ ID NO: 1908171 - DNA, 25 bp, Homo sapien
gcaatttcttgaacatcagataaga

SEQ ID NO: 1908172 - DNA, 25 bp, Homo sapien
ggacaccatctttcttatctgatgt

SEQ ID NO: 1908173 - DNA, 25 bp, Homo sapien
tcttatctgatgttcaagaaattgc

SEQ ID NO: 1908174 - DNA, 25 bp, Homo sapien
ttatctgatgttcaagaaattgctg

SEQ ID NO: 1908175 - DNA, 25 bp, Homo sapien
agaaattgctggctctatttacatg

SEQ ID NO: 1908176 - DNA, 25 bp, Homo sapien
gaaattgctggctctatttacatga

SEQ ID NO: 1908177 - DNA, 25 bp, Homo sapien
aaattgctggctctatttacatgaa

SEQ ID NO: 1908178 - DNA, 25 bp, Homo sapien
gttggtagctttgatgggattaaaa

SEQ ID NO: 1908179 - DNA, 25 bp, Homo sapien
ccacaatggttggtagctttgatgg

SEQ ID NO: 1908180 - DNA, 25 bp, Homo sapien
tgaaagcataccaatctctacagct

SEQ ID NO: 1908181 - DNA, 25 bp, Homo sapien
cacagactacattcaatcaagccag

SEQ ID NO: 1908182 - DNA, 25 bp, Homo sapien
ccagtaagggcacttatatgcagca

SEQ ID NO: 1908183 - DNA, 25 bp, Homo sapien
tatcatgctatctgtctcactgaga

SEQ ID NO: 1908184 - DNA, 25 bp, Homo sapien
aagccagatctttttgcccttgtct

SEQ ID NO: 1908185 - DNA, 25 bp, Homo sapien
cttgtcttgcatcatccatgtctat

SEQ ID NO: 1908186 - DNA, 25 bp, Homo sapien
aatcaagccagatctttttgccctt

SEQ ID NO: 1908187 - DNA, 25 bp, Homo sapien
tgcccttgtcttgcatcatccatgt

SEQ ID NO: 1908188 - DNA, 25 bp, Homo sapien
ccatgtctatatccctgtataataa

SEQ ID NO: 1908189 - DNA, 25 bp, Homo sapien
taataatcatgaaagtaagccagaa

SEQ ID NO: 1908190 - DNA, 25 bp, Homo sapien
ttattatacagggatatagacatgg

SEQ ID NO: 1908191 - DNA, 25 bp, Homo sapien
tctggcttactttcatgattattat

SEQ ID NO: 1908192 - DNA, 25 bp, Homo sapien
acatggatgatgcaagacaagggca

SEQ ID NO: 1908193 - DNA, 25 bp, Homo sapien
aagacaagggcaaaaagatctggct

SEQ ID NO: 1908194 - DNA, 25 bp, Homo sapien
tagacatggatgatgcaagacaagg

SEQ ID NO: 1908195 - DNA, 25 bp, Homo sapien
caagggcaaaaagatctggcttgat

SEQ ID NO: 1908196 - DNA, 25 bp, Homo sapien
ctggcttgattgaatgtagtctgtg

SEQ ID NO: 1908197 - DNA, 25 bp, Homo sapien
catcaaagctaccaaccattgtggt

SEQ ID NO: 1908198 - DNA, 25 bp, Homo sapien
tgctgcatataagtgcccttactgg

SEQ ID NO: 1908199 - DNA, 25 bp, Homo sapien
cagtgagacagatagcatgataagc

SEQ ID NO: 1908200 - DNA, 25 bp, Homo sapien
agctgtagagattggtatgctttca

SEQ ID NO: 1908201 - DNA, 25 bp, Homo sapien
ttttaatcccatcaaagctaccaac

SEQ ID NO: 1908202 - DNA, 25 bp, Homo sapien
caccacttacgaaatcagggtcaag

SEQ ID NO: 1908203 - DNA, 25 bp, Homo sapien
gccgcttcaccacttacgaaatcag

SEQ ID NO: 1908204 - DNA, 25 bp, Homo sapien
ttcaccacttacgaaatcagggtca

SEQ ID NO: 1908205 - DNA, 25 bp, Homo sapien
cgcttcaccacttacgaaatcaggg

SEQ ID NO: 1908206 - DNA, 25 bp, Homo sapien
gggccgcttcaccacttacgaaatc

SEQ ID NO: 1908207 - DNA, 25 bp, Homo sapien
gcttcaccacttacgaaatcagggt

SEQ ID NO: 1908208 - DNA, 25 bp, Homo sapien
tgatttcgtaagtggtgaagcggcc

SEQ ID NO: 1908209 - DNA, 25 bp, Homo sapien
ccctgatttcgtaagtggtgaagcg

SEQ ID NO: 1908210 - DNA, 25 bp, Homo sapien
gaccctgatttcgtaagtggtgaag

SEQ ID NO: 1908211 - DNA, 25 bp, Homo sapien
ctgatttcgtaagtggtgaagcggc

SEQ ID NO: 1908212 - DNA, 25 bp, Homo sapien
gatttcgtaagtggtgaagcggccc

SEQ ID NO: 1908213 - DNA, 25 bp, Homo sapien
cttgaccctgatttcgtaagtggtg

SEQ ID NO: 1908214 - DNA, 25 bp, Homo sapien
atgacgcctacggaccccccagcaa

SEQ ID NO: 1908215 - DNA, 25 bp, Homo sapien
tgaatgacgcctacggaccccccag

SEQ ID NO: 1908216 - DNA, 25 bp, Homo sapien
ctgaatgacgcctacggacccccca

SEQ ID NO: 1908217 - DNA, 25 bp, Homo sapien
tgacgcctacggaccccccagcaac

SEQ ID NO: 1908218 - DNA, 25 bp, Homo sapien
gttgctggggggtccgtaggcgtca

SEQ ID NO: 1908219 - DNA, 25 bp, Homo sapien
tggggggtccgtaggcgtcattcag

SEQ ID NO: 1908220 - DNA, 25 bp, Homo sapien
ctggggggtccgtaggcgtcattca

SEQ ID NO: 1908221 - DNA, 25 bp, Homo sapien
ttgctggggggtccgtaggcgtcat

SEQ ID NO: 1908222 - DNA, 25 bp, Homo sapien
atgacgcctacggaccccccagcaa

SEQ ID NO: 1908223 - DNA, 25 bp, Homo sapien
tgaatgacgcctacggaccccccag

SEQ ID NO: 1908224 - DNA, 25 bp, Homo sapien
cgcagaacctgaatgacgcctacgg

SEQ ID NO: 1908225 - DNA, 25 bp, Homo sapien
gcagaacctgaatgacgcctacgga

SEQ ID NO: 1908226 - DNA, 25 bp, Homo sapien
agaacctgaatgacgcctacggacc

SEQ ID NO: 1908227 - DNA, 25 bp, Homo sapien
gaacctgaatgacgcctacggaccc

SEQ ID NO: 1908228 - DNA, 25 bp, Homo sapien
cgtaggcgtcattcaggttctgcgg

SEQ ID NO: 1908229 - DNA, 25 bp, Homo sapien
gggtccgtaggcgtcattcaggttc

SEQ ID NO: 1908230 - DNA, 25 bp, Homo sapien
gttgctggggggtccgtaggcgtca

SEQ ID NO: 1908231 - DNA, 25 bp, Homo sapien
tccgtaggcgtcattcaggttctgc

SEQ ID NO: 1908232 - DNA, 25 bp, Homo sapien
ggtccgtaggcgtcattcaggttct

SEQ ID NO: 1908233 - DNA, 25 bp, Homo sapien
ctggggggtccgtaggcgtcattca

SEQ ID NO: 1908234 - DNA, 25 bp, Homo sapien
ccgtggctgacacccggcggctgat

SEQ ID NO: 1908235 - DNA, 25 bp, Homo sapien
atcagccgccgggtgtcagccacgg

SEQ ID NO: 1908236 - DNA, 25 bp, Homo sapien
ccgtggctgacacccggcggctgat

SEQ ID NO: 1908237 - DNA, 25 bp, Homo sapien
tggctgacacccggcggctgatcac

SEQ ID NO: 1908238 - DNA, 25 bp, Homo sapien
cgtggctgacacccggcggctgatc

SEQ ID NO: 1908239 - DNA, 25 bp, Homo sapien
gtggctgacacccggcggctgatca

SEQ ID NO: 1908240 - DNA, 25 bp, Homo sapien
atggcggagaccgtggctgacaccc

SEQ ID NO: 1908241 - DNA, 25 bp, Homo sapien
tgacacccggcggctgatcaccaag

SEQ ID NO: 1908242 - DNA, 25 bp, Homo sapien
gatcagccgccgggtgtcagccacg

SEQ ID NO: 1908243 - DNA, 25 bp, Homo sapien
gggtgtcagccacggtctccgccat

SEQ ID NO: 1908244 - DNA, 25 bp, Homo sapien
tgatcagccgccgggtgtcagccac

SEQ ID NO: 1908245 - DNA, 25 bp, Homo sapien
cttggtgatcagccgccgggtgtca

SEQ ID NO: 1908246 - DNA, 25 bp, Homo sapien
gtgatcagccgccgggtgtcagcca

SEQ ID NO: 1908247 - DNA, 25 bp, Homo sapien
atcagccgccgggtgtcagccacgg

SEQ ID NO: 1908248 - DNA, 25 bp, Homo sapien
gtgctcgttctcttcgcgaccgctg

SEQ ID NO: 1908249 - DNA, 25 bp, Homo sapien
tgaacgcccgctctacgtgctcgtt

SEQ ID NO: 1908250 - DNA, 25 bp, Homo sapien
cgttccagctagtgagccgtttctc

SEQ ID NO: 1908251 - DNA, 25 bp, Homo sapien
tagtgagccgtttctcccctgggct

SEQ ID NO: 1908252 - DNA, 25 bp, Homo sapien
tacgtgctcgttctcttcgcgaccg

SEQ ID NO: 1908253 - DNA, 25 bp, Homo sapien
cgtggcgttccagctagtgagccgt

SEQ ID NO: 1908254 - DNA, 25 bp, Homo sapien
aacggctcactagctggaacgccac

SEQ ID NO: 1908255 - DNA, 25 bp, Homo sapien
aacgagcacgtagagcgggcgttca

SEQ ID NO: 1908256 - DNA, 25 bp, Homo sapien
gtagagcgggcgttcaccccgcacg

SEQ ID NO: 1908257 - DNA, 25 bp, Homo sapien
gggagaaacggctcactagctggaa

SEQ ID NO: 1908258 - DNA, 25 bp, Homo sapien
gagaagcggtgtcatgggactcggg

SEQ ID NO: 1908259 - DNA, 25 bp, Homo sapien
cggtcgcgaagagaacgagcacgta

SEQ ID NO: 1908260 - DNA, 25 bp, Homo sapien
ctagaggtacgtgctaccaccacac

SEQ ID NO: 1908261 - DNA, 25 bp, Homo sapien
agaggtacgtgctaccaccacactt

SEQ ID NO: 1908262 - DNA, 25 bp, Homo sapien
tagaggtacgtgctaccaccacact

SEQ ID NO: 1908263 - DNA, 25 bp, Homo sapien
gactagaggtacgtgctaccaccac

SEQ ID NO: 1908264 - DNA, 25 bp, Homo sapien
ttctggaattcatctcgcttactgg

SEQ ID NO: 1908265 - DNA, 25 bp, Homo sapien
ctggaattcatctcgcttactggat

SEQ ID NO: 1908266 - DNA, 25 bp, Homo sapien
catctcgcttactggattgccagcc

SEQ ID NO: 1908267 - DNA, 25 bp, Homo sapien
gaattcatctcgcttactggattgc

SEQ ID NO: 1908268 - DNA, 25 bp, Homo sapien
tttaaaatggagttgctcgagttca

SEQ ID NO: 1908269 - DNA, 25 bp, Homo sapien
ctcagtcagaaagcgttggtatggc

SEQ ID NO: 1908270 - DNA, 25 bp, Homo sapien
tccttcatgaagagtacaatagcaa

SEQ ID NO: 1908271 - DNA, 25 bp, Homo sapien
gactaataatgccatagcctcctgg

SEQ ID NO: 1908272 - DNA, 25 bp, Homo sapien
tcatggtaagactgatttgctttgt

SEQ ID NO: 1908273 - DNA, 25 bp, Homo sapien
ttaataacaggtataccacagttct

SEQ ID NO: 1908274 - DNA, 25 bp, Homo sapien
ccagcccgagactagaatttaataa

SEQ ID NO: 1908275 - DNA, 25 bp, Homo sapien
ttgctttgttatacttggcctgaca

SEQ ID NO: 1908276 - DNA, 25 bp, Homo sapien
tgccgtaagttaagatactcactaa

SEQ ID NO: 1908277 - DNA, 25 bp, Homo sapien
gactctggaaatcggagtttcgctc

SEQ ID NO: 1908278 - DNA, 25 bp, Homo sapien
gccgtaagttaagatactcactaat

SEQ ID NO: 1908279 - DNA, 25 bp, Homo sapien
tttccttgactctggaaatcggagt

SEQ ID NO: 1908280 - DNA, 25 bp, Homo sapien
ggtagggcctcagattctgtatgcc

SEQ ID NO: 1908281 - DNA, 25 bp, Homo sapien
gactccttttggcattcgggtgtca

SEQ ID NO: 1908282 - DNA, 25 bp, Homo sapien
cctttaatgtgcatgtaaaacacct

SEQ ID NO: 1908283 - DNA, 25 bp, Homo sapien
tctataaccttaggctgggatgtta

SEQ ID NO: 1908284 - DNA, 25 bp, Homo sapien
ttattccgtatcacaggacagggcc

SEQ ID NO: 1908285 - DNA, 25 bp, Homo sapien
tagtgaagtcctaccaaaaacctgc

SEQ ID NO: 1908286 - DNA, 25 bp, Homo sapien
ggttgtactgacatacgccattggg

SEQ ID NO: 1908287 - DNA, 25 bp, Homo sapien
gatagagatccctgttattgcctgc

SEQ ID NO: 1908288 - DNA, 25 bp, Homo sapien
tatgaaggtcaattaccagagccaa

SEQ ID NO: 1908289 - DNA, 25 bp, Homo sapien
tattttagctatgaaggtcaattac

SEQ ID NO: 1908290 - DNA, 25 bp, Homo sapien
ttatattttagctatgaaggtcaat

SEQ ID NO: 1908291 - DNA, 25 bp, Homo sapien
tagctatgaaggtcaattaccagag

SEQ ID NO: 1908292 - DNA, 25 bp, Homo sapien
gtccattaagtcaaagagtctctta

SEQ ID NO: 1908293 - DNA, 25 bp, Homo sapien
taaaattgttatgtccattaagtca

SEQ ID NO: 1908294 - DNA, 25 bp, Homo sapien
cattaagtcaaagagtctcttaaac

SEQ ID NO: 1908295 - DNA, 25 bp, Homo sapien
tgttatgtccattaagtcaaagagt

SEQ ID NO: 1908296 - DNA, 25 bp, Homo sapien
atctctcagcagaaatccttcaagc

SEQ ID NO: 1908297 - DNA, 25 bp, Homo sapien
ctcagcagaaatccttcaagccaga

SEQ ID NO: 1908298 - DNA, 25 bp, Homo sapien
cagcagaaatccttcaagccagaag

SEQ ID NO: 1908299 - DNA, 25 bp, Homo sapien
cctttacagacaaacaactgctgac

SEQ ID NO: 1908300 - DNA, 25 bp, Homo sapien
cccatcaattaaggttctgctcatc

SEQ ID NO: 1908301 - DNA, 25 bp, Homo sapien
tccaagtaaggagagcaatgccagt

SEQ ID NO: 1908302 - DNA, 25 bp, Homo sapien
catccaagtaaggagagcaatgcca

SEQ ID NO: 1908303 - DNA, 25 bp, Homo sapien
tctgatttcccatcaattaaggttc

SEQ ID NO: 1908304 - DNA, 25 bp, Homo sapien
ctacattacacaagcactgaatgac

SEQ ID NO: 1908305 - DNA, 25 bp, Homo sapien
acagttcctcagatttagaatcctg

SEQ ID NO: 1908306 - DNA, 25 bp, Homo sapien
tcctgcaggttaacatctagcttct

SEQ ID NO: 1908307 - DNA, 25 bp, Homo sapien
tagaatcctgcaggttaacatctag

SEQ ID NO: 1908308 - DNA, 25 bp, Homo sapien
tagcttcttggtatctcctggattc

SEQ ID NO: 1908309 - DNA, 25 bp, Homo sapien
tctggccttgccgtgtccaaataag

SEQ ID NO: 1908310 - DNA, 25 bp, Homo sapien
ctgatttctggccttgccgtgtcca

SEQ ID NO: 1908311 - DNA, 25 bp, Homo sapien
cttgccgtgtccaaataaggtagcc

SEQ ID NO: 1908312 - DNA, 25 bp, Homo sapien
catttttatagcattgctgatctgt

SEQ ID NO: 1908313 - DNA, 25 bp, Homo sapien
accattcctgctgccgacatatgct

SEQ ID NO: 1908314 - DNA, 25 bp, Homo sapien
tatctgatagattcttatatccaag

SEQ ID NO: 1908315 - DNA, 25 bp, Homo sapien
cctgctgccgacatatgcttgtatc

SEQ ID NO: 1908316 - DNA, 25 bp, Homo sapien
ccgacatatgcttgtatctgataga

SEQ ID NO: 1908317 - DNA, 25 bp, Homo sapien
tgtgtcttgagaaaattgtcagttt

SEQ ID NO: 1908318 - DNA, 25 bp, Homo sapien
cagtttcaggatccccagaattaga

SEQ ID NO: 1908319 - DNA, 25 bp, Homo sapien
tggtagatctgattcgatagacctg

SEQ ID NO: 1908320 - DNA, 25 bp, Homo sapien
ttcgatagacctgacttgatgtggc

SEQ ID NO: 1908321 - DNA, 25 bp, Homo sapien
gggtccatgtcttgtattctaaaac

SEQ ID NO: 1908322 - DNA, 25 bp, Homo sapien
gggctggacttgctaatgacttaaa

SEQ ID NO: 1908323 - DNA, 25 bp, Homo sapien
ttcatatcagtttgctctctccctg

SEQ ID NO: 1908324 - DNA, 25 bp, Homo sapien
tagtgttttcgttagctcttgctgc

SEQ ID NO: 1908325 - DNA, 25 bp, Homo sapien
gttgtagacacttgctctccttgca

SEQ ID NO: 1908326 - DNA, 25 bp, Homo sapien
gtcgtaggcactccaacagcagagg

SEQ ID NO: 1908327 - DNA, 25 bp, Homo sapien
aggctccttctcactgttgtagaca

SEQ ID NO: 1908328 - DNA, 25 bp, Homo sapien
tgccgccaactctgccgtgagatgg

SEQ ID NO: 1908329 - DNA, 25 bp, Homo sapien
ggcagagtccaaaaagaagcctctt

SEQ ID NO: 1908330 - DNA, 25 bp, Homo sapien
ctctgagtgcttcctggaaagggca

SEQ ID NO: 1908331 - DNA, 25 bp, Homo sapien
tctgagtgcttcctggaaagggcag

SEQ ID NO: 1908332 - DNA, 25 bp, Homo sapien
aagggcagagtccaaaaagaagcct

SEQ ID NO: 1908333 - DNA, 25 bp, Homo sapien
cagtttgtgccactgagtttcagtc

SEQ ID NO: 1908334 - DNA, 25 bp, Homo sapien
tcagtccccttcaactgtgcctgaa

SEQ ID NO: 1908335 - DNA, 25 bp, Homo sapien
gccactgagtttcagtccccttcaa

SEQ ID NO: 1908336 - DNA, 25 bp, Homo sapien
ctccaaggctctggtttgtccccag

SEQ ID NO: 1908337 - DNA, 25 bp, Homo sapien
agttctgcacaaaaatctgctgagg

SEQ ID NO: 1908338 - DNA, 25 bp, Homo sapien
tcctcgtgtgtgtgcggcagcctct

SEQ ID NO: 1908339 - DNA, 25 bp, Homo sapien
tcatgaccacaagttcagacacctg

SEQ ID NO: 1908340 - DNA, 25 bp, Homo sapien
gaggttttgcatagattctccaggg

SEQ ID NO: 1908341 - DNA, 25 bp, Homo sapien
tccttgaaaagcacaaaccactgaa

SEQ ID NO: 1908342 - DNA, 25 bp, Homo sapien
gatgcagggctggtccaatctaaga

SEQ ID NO: 1908343 - DNA, 25 bp, Homo sapien
aacagtgtatttcaggatgcagggc

SEQ ID NO: 1908344 - DNA, 25 bp, Homo sapien
tagagttgaggtcctagcttgtgca

SEQ ID NO: 1908345 - DNA, 25 bp, Homo sapien
ccccatgacaggtaccagagtcaac

SEQ ID NO: 1908346 - DNA, 25 bp, Homo sapien
taccagagtcaacggagaaagatat

SEQ ID NO: 1908347 - DNA, 25 bp, Homo sapien
catgacaggtaccagagtcaacgga

SEQ ID NO: 1908348 - DNA, 25 bp, Homo sapien
caggtaccagagtcaacggagaaag

SEQ ID NO: 1908349 - DNA, 25 bp, Homo sapien
gcacttggagaaagtttggtggttc

SEQ ID NO: 1908350 - DNA, 25 bp, Homo sapien
acagcaatgttttctggaatgagca

SEQ ID NO: 1908351 - DNA, 25 bp, Homo sapien
tgaaaacacgcccttcttcaacagc

SEQ ID NO: 1908352 - DNA, 25 bp, Homo sapien
ttttctggaatgagcacttggagaa

SEQ ID NO: 1908353 - DNA, 25 bp, Homo sapien
ttgacattagcacggcatgcatggg

SEQ ID NO: 1908354 - DNA, 25 bp, Homo sapien
tagggcttagctccacagccttgac

SEQ ID NO: 1908355 - DNA, 25 bp, Homo sapien
agaatgccttctccgcagggttcct

SEQ ID NO: 1908356 - DNA, 25 bp, Homo sapien
gacagaatgccttctccgcagggtt

SEQ ID NO: 1908357 - DNA, 25 bp, Homo sapien
ggaccctactggtcatggttgtcat

SEQ ID NO: 1908358 - DNA, 25 bp, Homo sapien
aaaaggcgagcctgtgcaggccaca

SEQ ID NO: 1908359 - DNA, 25 bp, Homo sapien
tggttcccaggctccacataggtca

SEQ ID NO: 1908360 - DNA, 25 bp, Homo sapien
ccagagttttcagatctgggggact

SEQ ID NO: 1908361 - DNA, 25 bp, Homo sapien
ggcagatttggccagataaccacta

SEQ ID NO: 1908362 - DNA, 25 bp, Homo sapien
gaagtgtctcgggttatgtttgctt

SEQ ID NO: 1908363 - DNA, 25 bp, Homo sapien
actaaccctattggggcagatttgg

SEQ ID NO: 1908364 - DNA, 25 bp, Homo sapien
aaccactagctttagacaggttggg

SEQ ID NO: 1908365 - DNA, 25 bp, Homo sapien
gggaccaagcgatccgtccttacac

SEQ ID NO: 1908366 - DNA, 25 bp, Homo sapien
gcgatccgtccttacacctcggcct

SEQ ID NO: 1908367 - DNA, 25 bp, Homo sapien
aagcgatccgtccttacacctcggc

SEQ ID NO: 1908368 - DNA, 25 bp, Homo sapien
ccaagcgatccgtccttacacctcg

SEQ ID NO: 1908369 - DNA, 25 bp, Homo sapien
tcacgcgcgtgtggatacgatgaca

SEQ ID NO: 1908370 - DNA, 25 bp, Homo sapien
agcgaatggcgacgcggcggagagc

SEQ ID NO: 1908371 - DNA, 25 bp, Homo sapien
gacatcatctgtttgtacgcgtcga

SEQ ID NO: 1908372 - DNA, 25 bp, Homo sapien
cgtgccttgacgagtaagcggcgca

SEQ ID NO: 1908373 - DNA, 25 bp, Homo sapien
gactgtggtccaccgtccgaggtga

SEQ ID NO: 1908374 - DNA, 25 bp, Homo sapien
gcttatcgaagttgtgcaggcacca

SEQ ID NO: 1908375 - DNA, 25 bp, Homo sapien
gccgttcagtatttccacaccgcga

SEQ ID NO: 1908376 - DNA, 25 bp, Homo sapien
tatctcgggtgttacctggtgtcgc

SEQ ID NO: 1908377 - DNA, 25 bp, Homo sapien
gccgccctgctcgtggaagggagga

SEQ ID NO: 1908378 - DNA, 25 bp, Homo sapien
gagcgcttctccttcgccgaggttg

SEQ ID NO: 1908379 - DNA, 25 bp, Homo sapien
aatgtggaaggtggcggcgcgcgag

SEQ ID NO: 1908380 - DNA, 25 bp, Homo sapien
cgcgcgagctgacaggcggttcctc

SEQ ID NO: 1908381 - DNA, 25 bp, Homo sapien
tagcagcccgggagacttggcgctt

SEQ ID NO: 1908382 - DNA, 25 bp, Homo sapien
acgacgtccgcgagaatgcaaacca

SEQ ID NO: 1908383 - DNA, 25 bp, Homo sapien
gctggtccgggttttctagcagccc

SEQ ID NO: 1908384 - DNA, 25 bp, Homo sapien
aagatttatgttccgactcgctccc

SEQ ID NO: 1908385 - DNA, 25 bp, Homo sapien
ctttggagatgcaaaaccaccgtac

SEQ ID NO: 1908386 - DNA, 25 bp, Homo sapien
gagcttgctttggagatgcaaaacc

SEQ ID NO: 1908387 - DNA, 25 bp, Homo sapien
ttgctttggagatgcaaaaccaccg

SEQ ID NO: 1908388 - DNA, 25 bp, Homo sapien
gatcattttgagcttgctttggaga

SEQ ID NO: 1908389 - DNA, 25 bp, Homo sapien
ctgatgtagatctggccttcctctg

SEQ ID NO: 1908390 - DNA, 25 bp, Homo sapien
tctttggccctggactgatctggga

SEQ ID NO: 1908391 - DNA, 25 bp, Homo sapien
ccacctggattagatagagcacatc

SEQ ID NO: 1908392 - DNA, 25 bp, Homo sapien
tggctcctgtggattgggtctgttt

SEQ ID NO: 1908393 - DNA, 25 bp, Homo sapien
agtaagtccatgaaatctggctgag

SEQ ID NO: 1908394 - DNA, 25 bp, Homo sapien
gttttgtgaactgacagtatggccg

SEQ ID NO: 1908395 - DNA, 25 bp, Homo sapien
aagtccatgaaatctggctgagggc

SEQ ID NO: 1908396 - DNA, 25 bp, Homo sapien
ccgtgcttgttgattgtggacttga

SEQ ID NO: 1908397 - DNA, 25 bp, Homo sapien
tccccaccttaatccttctgactcc

SEQ ID NO: 1908398 - DNA, 25 bp, Homo sapien
ccccaccttaatccttctgactcca

SEQ ID NO: 1908399 - DNA, 25 bp, Homo sapien
atccccaccttaatccttctgactc

SEQ ID NO: 1908400 - DNA, 25 bp, Homo sapien
cccaccttaatccttctgactccat

SEQ ID NO: 1908401 - DNA, 25 bp, Homo sapien
agttgtgctgactctgagtaacagc

SEQ ID NO: 1908402 - DNA, 25 bp, Homo sapien
gctgactctgagtaacagcacctct

SEQ ID NO: 1908403 - DNA, 25 bp, Homo sapien
agagttgtgctgactctgagtaaca

SEQ ID NO: 1908404 - DNA, 25 bp, Homo sapien
tgtgctgactctgagtaacagcacc

SEQ ID NO: 1908405 - DNA, 25 bp, Homo sapien
agaaacctgttggtttggtgattct

SEQ ID NO: 1908406 - DNA, 25 bp, Homo sapien
tttaatgggagagtaggaatggctt

SEQ ID NO: 1908407 - DNA, 25 bp, Homo sapien
tatggcttgagtgctaagcctccga

SEQ ID NO: 1908408 - DNA, 25 bp, Homo sapien
tagtggcattccttttcgtacatga

SEQ ID NO: 1908409 - DNA, 25 bp, Homo sapien
catgaagccatatccaagatgatat

SEQ ID NO: 1908410 - DNA, 25 bp, Homo sapien
aagcctccgaggtacagtgatctgg

SEQ ID NO: 1908411 - DNA, 25 bp, Homo sapien
tgtgtcaacacacgtcagttgctca

SEQ ID NO: 1908412 - DNA, 25 bp, Homo sapien
gaaatgtgtcaacacacgtcagttg

SEQ ID NO: 1908413 - DNA, 25 bp, Homo sapien
caacacacgtcagttgctcatccat

SEQ ID NO: 1908414 - DNA, 25 bp, Homo sapien
aggtgaaatgtgtcaacacacgtca

SEQ ID NO: 1908415 - DNA, 25 bp, Homo sapien
gataatgctaagctcttcttcaggc

SEQ ID NO: 1908416 - DNA, 25 bp, Homo sapien
ttggcactgatagccaaaatgccac

SEQ ID NO: 1908417 - DNA, 25 bp, Homo sapien
gtctcattgccgattattgaaaggt

SEQ ID NO: 1908418 - DNA, 25 bp, Homo sapien
gtttggcagtctctggaataaggaa

SEQ ID NO: 1908419 - DNA, 25 bp, Homo sapien
aatataggtggcaaatctcaggtct

SEQ ID NO: 1908420 - DNA, 25 bp, Homo sapien
caaatcgggccttgttgaatgtggc

SEQ ID NO: 1908421 - DNA, 25 bp, Homo sapien
gctaggcactggcatgcccattcat

SEQ ID NO: 1908422 - DNA, 25 bp, Homo sapien
tgtgtctcagtgacccagtaggtgt

SEQ ID NO: 1908423 - DNA, 25 bp, Homo sapien
tccatctccctcaattggggagggg

SEQ ID NO: 1908424 - DNA, 25 bp, Homo sapien
ttcatcaacttgagtcacctcagcc

SEQ ID NO: 1908425 - DNA, 25 bp, Homo sapien
gcattgctttgtatggcaagatgtg

SEQ ID NO: 1908426 - DNA, 25 bp, Homo sapien
agatgtggatggttgataactcctt

SEQ ID NO: 1908427 - DNA, 25 bp, Homo sapien
tgtggatggttgataactccttgac

SEQ ID NO: 1908428 - DNA, 25 bp, Homo sapien
cattgctttgtatggcaagatgtgg

SEQ ID NO: 1908429 - DNA, 25 bp, Homo sapien
tggtcattggagactgcccacccag

SEQ ID NO: 1908430 - DNA, 25 bp, Homo sapien
gtcattggagactgcccacccaggg

SEQ ID NO: 1908431 - DNA, 25 bp, Homo sapien
ctggtggtcattggagactgcccac

SEQ ID NO: 1908432 - DNA, 25 bp, Homo sapien
gtggtcattggagactgcccaccca

SEQ ID NO: 1908433 - DNA, 25 bp, Homo sapien
cacttggcctaagaagatctttcag

SEQ ID NO: 1908434 - DNA, 25 bp, Homo sapien
ttttgcgtgaagtttgggactctgc

SEQ ID NO: 1908435 - DNA, 25 bp, Homo sapien
gcagcttcatagaacctcagaggat

SEQ ID NO: 1908436 - DNA, 25 bp, Homo sapien
ctttcagagtaacagagatgccacc

SEQ ID NO: 1908437 - DNA, 25 bp, Homo sapien
ccaagggcggtttgttggcaagtct

SEQ ID NO: 1908438 - DNA, 25 bp, Homo sapien
tttctgcatagtaatcaggcctctg

SEQ ID NO: 1908439 - DNA, 25 bp, Homo sapien
tgggttcttgacacacatggcaatg

SEQ ID NO: 1908440 - DNA, 25 bp, Homo sapien
tctgcaattgtgatattcctcccct

SEQ ID NO: 1908441 - DNA, 25 bp, Homo sapien
gagtgggggtgttttcacagaatca

SEQ ID NO: 1908442 - DNA, 25 bp, Homo sapien
gaagagcaggatgagcatgccacta

SEQ ID NO: 1908443 - DNA, 25 bp, Homo sapien
tgccactaatggagagtgggggtgt

SEQ ID NO: 1908444 - DNA, 25 bp, Homo sapien
aatatgaagagcaggatgagcatgc

SEQ ID NO: 1908445 - DNA, 25 bp, Homo sapien
gtctttttcattgatttggttgccg

SEQ ID NO: 1908446 - DNA, 25 bp, Homo sapien
cgtcaatcgtatcttcattctccat

SEQ ID NO: 1908447 - DNA, 25 bp, Homo sapien
tgtctttttcattgatttggttgcc

SEQ ID NO: 1908448 - DNA, 25 bp, Homo sapien
ggaacacgtcaatcgtatcttcatt

SEQ ID NO: 1908449 - DNA, 25 bp, Homo sapien
cttcctggggctttttgtcagccat

SEQ ID NO: 1908450 - DNA, 25 bp, Homo sapien
atgattgttcttagtcttgactcct

SEQ ID NO: 1908451 - DNA, 25 bp, Homo sapien
tgtgaggaactcttactggacgccc

SEQ ID NO: 1908452 - DNA, 25 bp, Homo sapien
caactaccacacaaatcctgacagg

SEQ ID NO: 1908453 - DNA, 25 bp, Homo sapien
tgctgatcttacacatcagtttcca

SEQ ID NO: 1908454 - DNA, 25 bp, Homo sapien
tcagtttccacggatcccatgtgaa

SEQ ID NO: 1908455 - DNA, 25 bp, Homo sapien
aggcttgattaaactcaggttcagc

SEQ ID NO: 1908456 - DNA, 25 bp, Homo sapien
tcccacattctggatatatctgttt

SEQ ID NO: 1908457 - DNA, 25 bp, Homo sapien
gttgggtagtgctgtgtgcttcaca

SEQ ID NO: 1908458 - DNA, 25 bp, Homo sapien
ttatctggttcctctatcgcctgaa

SEQ ID NO: 1908459 - DNA, 25 bp, Homo sapien
tggaagcagaccatgaacaacagca

SEQ ID NO: 1908460 - DNA, 25 bp, Homo sapien
ttgtttttggaagcagaccatgaac

SEQ ID NO: 1908461 - DNA, 25 bp, Homo sapien
cagagattagcaaagtgtaatccca

SEQ ID NO: 1908462 - DNA, 25 bp, Homo sapien
aatcccagctgccttaaatttgttt

SEQ ID NO: 1908463 - DNA, 25 bp, Homo sapien
caggcattaagagcatgatctactc

SEQ ID NO: 1908464 - DNA, 25 bp, Homo sapien
gaactttcactcgtgcactagagag

SEQ ID NO: 1908465 - DNA, 25 bp, Homo sapien
ttctcaagatgaaggaaggtcacgt

SEQ ID NO: 1908466 - DNA, 25 bp, Homo sapien
gagaaactggactaatgaatggctt

SEQ ID NO: 1908467 - DNA, 25 bp, Homo sapien
tttgagaggttacaggaccctggca

SEQ ID NO: 1908468 - DNA, 25 bp, Homo sapien
gggaccttcctttgacatatgccag

SEQ ID NO: 1908469 - DNA, 25 bp, Homo sapien
catatgccaggtgagaaaccacagg

SEQ ID NO: 1908470 - DNA, 25 bp, Homo sapien
cactgtttcgtatgctctagagagc

SEQ ID NO: 1908471 - DNA, 25 bp, Homo sapien
tgaagtccaggacgatgatgcgcct

SEQ ID NO: 1908472 - DNA, 25 bp, Homo sapien
aacaagtataccaagagccgtggcc

SEQ ID NO: 1908473 - DNA, 25 bp, Homo sapien
catagtcgattcatgcgggtccaga

SEQ ID NO: 1908474 - DNA, 25 bp, Homo sapien
gaatgatgggctgactgaaaacctc

SEQ ID NO: 1908475 - DNA, 25 bp, Homo sapien
cagcaacatgggcttgagtgagtcc

SEQ ID NO: 1908476 - DNA, 25 bp, Homo sapien
tcatgatgacacagtcggacccctt

SEQ ID NO: 1908477 - DNA, 25 bp, Homo sapien
tggtaaccagacactccaggacctg

SEQ ID NO: 1908478 - DNA, 25 bp, Homo sapien
attcccgccggaacgtgatgcttcg

SEQ ID NO: 1908479 - DNA, 25 bp, Homo sapien
tctccaaagtgatatatgaagactc

SEQ ID NO: 1908480 - DNA, 25 bp, Homo sapien
gaaattggtataacgatgctctgat

SEQ ID NO: 1908481 - DNA, 25 bp, Homo sapien
ccttctttggtagacggaatagttg

SEQ ID NO: 1908482 - DNA, 25 bp, Homo sapien
aaaagttatggtgctgtataggtgc

SEQ ID NO: 1908483 - DNA, 25 bp, Homo sapien
cacacatgtgtagtacaaggcggac

SEQ ID NO: 1908484 - DNA, 25 bp, Homo sapien
gaaaacatgacatgcgctcttggga

SEQ ID NO: 1908485 - DNA, 25 bp, Homo sapien
gaagtcctccatgttggtgccaagg

SEQ ID NO: 1908486 - DNA, 25 bp, Homo sapien
gacagactttgcctctacctagtga

SEQ ID NO: 1908487 - DNA, 25 bp, Homo sapien
caaatgaggtcttgaagcggatgcc

SEQ ID NO: 1908488 - DNA, 25 bp, Homo sapien
tggaatcatgcctgtcaaatgaggt

SEQ ID NO: 1908489 - DNA, 25 bp, Homo sapien
tccagaaatacgtgtgcggctgctt

SEQ ID NO: 1908490 - DNA, 25 bp, Homo sapien
gatgaatgattggtcatgaggcctc

SEQ ID NO: 1908491 - DNA, 25 bp, Homo sapien
tgccatgaattaactctgccgcctt

SEQ ID NO: 1908492 - DNA, 25 bp, Homo sapien
tcaatgcgaacactatcatatggca

SEQ ID NO: 1908493 - DNA, 25 bp, Homo sapien
gagactttgatttgaagcacctcat

SEQ ID NO: 1908494 - DNA, 25 bp, Homo sapien
taaacacctgagagtcaagcagttg

SEQ ID NO: 1908495 - DNA, 25 bp, Homo sapien
tggttccctgaggaaatgcctcgcg

SEQ ID NO: 1908496 - DNA, 25 bp, Homo sapien
ggtttggccacacggagatatctcc

SEQ ID NO: 1908497 - DNA, 25 bp, Homo sapien
tagaaaatgggatcctccaaatggg

SEQ ID NO: 1908498 - DNA, 25 bp, Homo sapien
tctgctgagagaaacgcgctgtgtt

SEQ ID NO: 1908499 - DNA, 25 bp, Homo sapien
aagcagggagaccagggtgccaggg

SEQ ID NO: 1908500 - DNA, 25 bp, Homo sapien
agccaaaaagcagggagaccagggt

SEQ ID NO: 1908501 - DNA, 25 bp, Homo sapien
ctgagagccaaaaagcagggagacc

SEQ ID NO: 1908502 - DNA, 25 bp, Homo sapien
gggagaccagggtgccaggggcact

SEQ ID NO: 1908503 - DNA, 25 bp, Homo sapien
tgtgcctaccagacagctgtggcag

SEQ ID NO: 1908504 - DNA, 25 bp, Homo sapien
tttccacattgtgcctaccagacag

SEQ ID NO: 1908505 - DNA, 25 bp, Homo sapien
tggagcaggccccagtaacctccac

SEQ ID NO: 1908506 - DNA, 25 bp, Homo sapien
caccccaggtggttggctatttcca

SEQ ID NO: 1908507 - DNA, 25 bp, Homo sapien
tgggaaaggatctgcccactctcca

SEQ ID NO: 1908508 - DNA, 25 bp, Homo sapien
ctccaaggtgacttggaggggctct

SEQ ID NO: 1908509 - DNA, 25 bp, Homo sapien
cttcgccatgatgggtaggctctca

SEQ ID NO: 1908510 - DNA, 25 bp, Homo sapien
tggtatctccaaggtgacttggagg

SEQ ID NO: 1908511 - DNA, 25 bp, Homo sapien
gtgtggcgggtaaccgccctcactc

SEQ ID NO: 1908512 - DNA, 25 bp, Homo sapien
tggcctttgagtttcatttccggtg

SEQ ID NO: 1908513 - DNA, 25 bp, Homo sapien
ggagtgtggcgggtaaccgccctca

SEQ ID NO: 1908514 - DNA, 25 bp, Homo sapien
ctggcctttgagtttcatttccggt

SEQ ID NO: 1908515 - DNA, 25 bp, Homo sapien
ccggtgggtttggaagctgacgcca

SEQ ID NO: 1908516 - DNA, 25 bp, Homo sapien
cctgaccggtgggtttggaagctga

SEQ ID NO: 1908517 - DNA, 25 bp, Homo sapien
cttcccgcccaccagtgaaggcctg

SEQ ID NO: 1908518 - DNA, 25 bp, Homo sapien
ccagtgaaggcctgaccggtgggtt

SEQ ID NO: 1908519 - DNA, 25 bp, Homo sapien
cattccctgtaatctgagatcccgg

SEQ ID NO: 1908520 - DNA, 25 bp, Homo sapien
tccctgtaatctgagatcccggata

SEQ ID NO: 1908521 - DNA, 25 bp, Homo sapien
gagatcccggataatgtctaatgag

SEQ ID NO: 1908522 - DNA, 25 bp, Homo sapien
gtaatctgagatcccggataatgtc

SEQ ID NO: 1908523 - DNA, 25 bp, Homo sapien
gaagcactagcagttgctgagcagc

SEQ ID NO: 1908524 - DNA, 25 bp, Homo sapien
cagctgagcagaactcgtggcagcc

SEQ ID NO: 1908525 - DNA, 25 bp, Homo sapien
acagagaggtgaatggtttgacaac

SEQ ID NO: 1908526 - DNA, 25 bp, Homo sapien
cagaactcgtggcagccttacaggc

SEQ ID NO: 1908527 - DNA, 25 bp, Homo sapien
tcacattccggctgccacccaggct

SEQ ID NO: 1908528 - DNA, 25 bp, Homo sapien
tttccaagttcacattccggctgcc

SEQ ID NO: 1908529 - DNA, 25 bp, Homo sapien
ctgctcgtctgtttccaagttcaca

SEQ ID NO: 1908530 - DNA, 25 bp, Homo sapien
aaagagcctctttcctgctcgtctg

SEQ ID NO: 1908531 - DNA, 25 bp, Homo sapien
gctaccaatcctgtgtcaggctgca

SEQ ID NO: 1908532 - DNA, 25 bp, Homo sapien
cctccttagtgtccagcagggggtc

SEQ ID NO: 1908533 - DNA, 25 bp, Homo sapien
aagcagctcatgtttcccctttgcc

SEQ ID NO: 1908534 - DNA, 25 bp, Homo sapien
cagatgtgagctggctaccaatcct

SEQ ID NO: 1908535 - DNA, 25 bp, Homo sapien
cctgcctgacgcgtgtgcttggagt

SEQ ID NO: 1908536 - DNA, 25 bp, Homo sapien
attcctggtaaccctcgaaagcctg

SEQ ID NO: 1908537 - DNA, 25 bp, Homo sapien
cctggtaaccctcgaaagcctgcag

SEQ ID NO: 1908538 - DNA, 25 bp, Homo sapien
ggccaccctgcctgacgcgtgtgct

SEQ ID NO: 1908539 - DNA, 25 bp, Homo sapien
gttaggtgggggtgaccatctgcac

SEQ ID NO: 1908540 - DNA, 25 bp, Homo sapien
ctgtgaggaaggttaggtgggggtg

SEQ ID NO: 1908541 - DNA, 25 bp, Homo sapien
aaggttaggtgggggtgaccatctg

SEQ ID NO: 1908542 - DNA, 25 bp, Homo sapien
tgtgaggaaggttaggtgggggtga

SEQ ID NO: 1908543 - DNA, 25 bp, Homo sapien
ctgcacgctggtgtcctccaggagg

SEQ ID NO: 1908544 - DNA, 25 bp, Homo sapien
ggttttactagattgctctgggagc

SEQ ID NO: 1908545 - DNA, 25 bp, Homo sapien
cgagcacacggccagggagcccaga

SEQ ID NO: 1908546 - DNA, 25 bp, Homo sapien
tgtggtcggatttgtggttttacta

SEQ ID NO: 1908547 - DNA, 25 bp, Homo sapien
cacgatttgggcgtttggtctgaga

SEQ ID NO: 1908548 - DNA, 25 bp, Homo sapien
gccaggccacgtgagattgagtcca

SEQ ID NO: 1908549 - DNA, 25 bp, Homo sapien
caggagtgttcaagcagtgcctctc

SEQ ID NO: 1908550 - DNA, 25 bp, Homo sapien
taaaatcaaagtgagaccgtgtgca

SEQ ID NO: 1908551 - DNA, 25 bp, Homo sapien
ttcgtccggtttccagtcaagcact

SEQ ID NO: 1908552 - DNA, 25 bp, Homo sapien
gcagcgagaattggccaacaggacc

SEQ ID NO: 1908553 - DNA, 25 bp, Homo sapien
caaaggcctcattcacgtgtatgca

SEQ ID NO: 1908554 - DNA, 25 bp, Homo sapien
catggctgcatttgtgtatgcaaag

SEQ ID NO: 1908555 - DNA, 25 bp, Homo sapien
cgtgtcgcacacagacccgttttac

SEQ ID NO: 1908556 - DNA, 25 bp, Homo sapien
cccattcttcctcttatatacaagg

SEQ ID NO: 1908557 - DNA, 25 bp, Homo sapien
tactctcggattctttttcaataag

SEQ ID NO: 1908558 - DNA, 25 bp, Homo sapien
tcttatatacaaggatggaaaaggg

SEQ ID NO: 1908559 - DNA, 25 bp, Homo sapien
tggacaaagatcgaggaatgtactc

SEQ ID NO: 1908560 - DNA, 25 bp, Homo sapien
ataggatgtgtcaatcattccagct

SEQ ID NO: 1908561 - DNA, 25 bp, Homo sapien
ccctgagcctgaggacgtattgaat

SEQ ID NO: 1908562 - DNA, 25 bp, Homo sapien
gagcctgaggacgtattgaatttaa

SEQ ID NO: 1908563 - DNA, 25 bp, Homo sapien
tgtcaatcattccagcttggcaaat

SEQ ID NO: 1908564 - DNA, 25 bp, Homo sapien
tgactcgccaagtccaccaagtctt

SEQ ID NO: 1908565 - DNA, 25 bp, Homo sapien
tccaccacttcatatctgctaggag

SEQ ID NO: 1908566 - DNA, 25 bp, Homo sapien
tgctaggagcctgactcgccaagtc

SEQ ID NO: 1908567 - DNA, 25 bp, Homo sapien
cacttcatatctgctaggagcctga

SEQ ID NO: 1908568 - DNA, 25 bp, Homo sapien
aagaggattccatagaaagtgggca

SEQ ID NO: 1908569 - DNA, 25 bp, Homo sapien
aggattccatagaaagtgggcacat

SEQ ID NO: 1908570 - DNA, 25 bp, Homo sapien
gaggattccatagaaagtgggcaca

SEQ ID NO: 1908571 - DNA, 25 bp, Homo sapien
agaggattccatagaaagtgggcac

SEQ ID NO: 1908572 - DNA, 25 bp, Homo sapien
gagattcctcgaactttcctagctt

SEQ ID NO: 1908573 - DNA, 25 bp, Homo sapien
ggagaccttggggagattcctcgaa

SEQ ID NO: 1908574 - DNA, 25 bp, Homo sapien
tcctcgtacttgttatttttggcac

SEQ ID NO: 1908575 - DNA, 25 bp, Homo sapien
tttcctagcttcctcgtacttgtta

SEQ ID NO: 1908576 - DNA, 25 bp, Homo sapien
cattgcctggacgtctttgaccata

SEQ ID NO: 1908577 - DNA, 25 bp, Homo sapien
tccaattataccttggcgccagagt

SEQ ID NO: 1908578 - DNA, 25 bp, Homo sapien
tgtgtctgggtcaaagacctgcctc

SEQ ID NO: 1908579 - DNA, 25 bp, Homo sapien
tccccttgaaatatgcgcttgtgct

SEQ ID NO: 1908580 - DNA, 25 bp, Homo sapien
agcaaaagtaggctggagggctccg

SEQ ID NO: 1908581 - DNA, 25 bp, Homo sapien
gccactgctgggcaatgcagccaaa

SEQ ID NO: 1908582 - DNA, 25 bp, Homo sapien
tgtgagtttgatcatgtggactcca

SEQ ID NO: 1908583 - DNA, 25 bp, Homo sapien
cttctgaaatggtgagtggactgct

SEQ ID NO: 1908584 - DNA, 25 bp, Homo sapien
gaggatccaactctctccgtgtagc

SEQ ID NO: 1908585 - DNA, 25 bp, Homo sapien
ccttcagagctgtgcgagggtgagc

SEQ ID NO: 1908586 - DNA, 25 bp, Homo sapien
tgcctgtggtctgcaattacccatt

SEQ ID NO: 1908587 - DNA, 25 bp, Homo sapien
gagtcaatttcattacgtggagagg

SEQ ID NO: 1908588 - DNA, 25 bp, Homo sapien
tccccccatgcatctgcaagagctt

SEQ ID NO: 1908589 - DNA, 25 bp, Homo sapien
gctgttgtcttgctagcctttttcg

SEQ ID NO: 1908590 - DNA, 25 bp, Homo sapien
gcttctctgtagaatgctgttgtct

SEQ ID NO: 1908591 - DNA, 25 bp, Homo sapien
ttgctagcctttttcgctcccaaat

SEQ ID NO: 1908592 - DNA, 25 bp, Homo sapien
catgactgacttaggggaaggggcc

SEQ ID NO: 1908593 - DNA, 25 bp, Homo sapien
tcagacactgatcggcagccatgac

SEQ ID NO: 1908594 - DNA, 25 bp, Homo sapien
tctcagacactgatcggcagccatg

SEQ ID NO: 1908595 - DNA, 25 bp, Homo sapien
agacactgatcggcagccatgactg

SEQ ID NO: 1908596 - DNA, 25 bp, Homo sapien
ttttctgcactagaacacgcacggc

SEQ ID NO: 1908597 - DNA, 25 bp, Homo sapien
aattccaagtctatacttagtcttt

SEQ ID NO: 1908598 - DNA, 25 bp, Homo sapien
gctgctttgctattccttttagatt

SEQ ID NO: 1908599 - DNA, 25 bp, Homo sapien
tcatcaaccagcagcctaggattcc

SEQ ID NO: 1908600 - DNA, 25 bp, Homo sapien
gatgagtatccactcaagtgtggcc

SEQ ID NO: 1908601 - DNA, 25 bp, Homo sapien
ctgccgagtggatgatgagtatcca

SEQ ID NO: 1908602 - DNA, 25 bp, Homo sapien
gagtatccactcaagtgtggccagg

SEQ ID NO: 1908603 - DNA, 25 bp, Homo sapien
tggatgatgagtatccactcaagtg

SEQ ID NO: 1908604 - DNA, 25 bp, Homo sapien
ggaaaagacctgtgacaacacagcc

SEQ ID NO: 1908605 - DNA, 25 bp, Homo sapien
tgacaacacagccacgtggttgttc

SEQ ID NO: 1908606 - DNA, 25 bp, Homo sapien
taatgggcgtatttgcatttgggga

SEQ ID NO: 1908607 - DNA, 25 bp, Homo sapien
acacagccacgtggttgttcctcat

SEQ ID NO: 1908608 - DNA, 25 bp, Homo sapien
caacaatggttaagctttgccgact

SEQ ID NO: 1908609 - DNA, 25 bp, Homo sapien
taggggaaatacactgagagctgga

SEQ ID NO: 1908610 - DNA, 25 bp, Homo sapien
ctgggagatgcagtgctgagtatta

SEQ ID NO: 1908611 - DNA, 25 bp, Homo sapien
taagctttgccgactgggagatgca

SEQ ID NO: 1908612 - DNA, 25 bp, Homo sapien
aatcgcatcgagagtcggcacaacg

SEQ ID NO: 1908613 - DNA, 25 bp, Homo sapien
gagagtcggcacaacgcaggtctcc

SEQ ID NO: 1908614 - DNA, 25 bp, Homo sapien
aattccaaaacaatcgcatcgagag

SEQ ID NO: 1908615 - DNA, 25 bp, Homo sapien
tgccatttacagagcaattctgcaa

SEQ ID NO: 1908616 - DNA, 25 bp, Homo sapien
tcgtttgctagcctccagggatgca

SEQ ID NO: 1908617 - DNA, 25 bp, Homo sapien
tttgtcgtttgctagcctccaggga

SEQ ID NO: 1908618 - DNA, 25 bp, Homo sapien
ttcttttgtcgtttgctagcctcca

SEQ ID NO: 1908619 - DNA, 25 bp, Homo sapien
ttgctagcctccagggatgcaatct

SEQ ID NO: 1908620 - DNA, 25 bp, Homo sapien
gcctcatagccctctgtcttcatgt

SEQ ID NO: 1908621 - DNA, 25 bp, Homo sapien
ttcatgtcattgagctctagctcct

SEQ ID NO: 1908622 - DNA, 25 bp, Homo sapien
tgtcttcatgtcattgagctctagc

SEQ ID NO: 1908623 - DNA, 25 bp, Homo sapien
agccaggcctgcctcatagccctct

SEQ ID NO: 1908624 - DNA, 25 bp, Homo sapien
tataatgctccgccttcatctcagg

SEQ ID NO: 1908625 - DNA, 25 bp, Homo sapien
ataatgctccgccttcatctcagga

SEQ ID NO: 1908626 - DNA, 25 bp, Homo sapien
cttcgatgatctggtccatcttctg

SEQ ID NO: 1908627 - DNA, 25 bp, Homo sapien
tgatctggtccatcttctggctaaa

SEQ ID NO: 1908628 - DNA, 25 bp, Homo sapien
cgatgatctggtccatcttctggct

SEQ ID NO: 1908629 - DNA, 25 bp, Homo sapien
gatctggtccatcttctggctaaac

SEQ ID NO: 1908630 - DNA, 25 bp, Homo sapien
ccaggattggaactgtcgcccagtg

SEQ ID NO: 1908631 - DNA, 25 bp, Homo sapien
aggattggaactgtcgcccagtgtg

SEQ ID NO: 1908632 - DNA, 25 bp, Homo sapien
caggattggaactgtcgcccagtgt

SEQ ID NO: 1908633 - DNA, 25 bp, Homo sapien
ccagtcaaattctggctctgggatt

SEQ ID NO: 1908634 - DNA, 25 bp, Homo sapien
tcccagtcaaattctggctctggga

SEQ ID NO: 1908635 - DNA, 25 bp, Homo sapien
caaattctggctctgggatttccac

SEQ ID NO: 1908636 - DNA, 25 bp, Homo sapien
aattctggctctgggatttccacac

SEQ ID NO: 1908637 - DNA, 25 bp, Homo sapien
tgatgtggagggtgatcctggtgcc

SEQ ID NO: 1908638 - DNA, 25 bp, Homo sapien
tacaagtctcagacttgaggaggtc

SEQ ID NO: 1908639 - DNA, 25 bp, Homo sapien
catatctgagggacctgtgatgtgg

SEQ ID NO: 1908640 - DNA, 25 bp, Homo sapien
gaggtctctggtcatatctgaggga

SEQ ID NO: 1908641 - DNA, 25 bp, Homo sapien
tgcacgcagttcttgtacttggtcc

SEQ ID NO: 1908642 - DNA, 25 bp, Homo sapien
ctcattggtctgatgcacgcagttc

SEQ ID NO: 1908643 - DNA, 25 bp, Homo sapien
cgcagttcttgtacttggtccctcc

SEQ ID NO: 1908644 - DNA, 25 bp, Homo sapien
gtctgatgcacgcagttcttgtact

SEQ ID NO: 1908645 - DNA, 25 bp, Homo sapien
ttgcattctgggccgtttgtgttaa

SEQ ID NO: 1908646 - DNA, 25 bp, Homo sapien
tgcattctgggccgtttgtgttaaa

SEQ ID NO: 1908647 - DNA, 25 bp, Homo sapien
gttggtgcttctgcttggagcccca

SEQ ID NO: 1908648 - DNA, 25 bp, Homo sapien
ttggtgcttctgcttggagccccag

SEQ ID NO: 1908649 - DNA, 25 bp, Homo sapien
tttgttgcccttcgcgcaggctagt

SEQ ID NO: 1908650 - DNA, 25 bp, Homo sapien
gtggcatctttgttgcccttcgcgc

SEQ ID NO: 1908651 - DNA, 25 bp, Homo sapien
atctttgttgcccttcgcgcaggct

SEQ ID NO: 1908652 - DNA, 25 bp, Homo sapien
ggcatctttgttgcccttcgcgcag

SEQ ID NO: 1908653 - DNA, 25 bp, Homo sapien
ggccagagatagcacgggtgatcaa

SEQ ID NO: 1908654 - DNA, 25 bp, Homo sapien
gagatagcacgggtgatcaatcctt

SEQ ID NO: 1908655 - DNA, 25 bp, Homo sapien
acgggtgatcaatccttcaacagtg

SEQ ID NO: 1908656 - DNA, 25 bp, Homo sapien
tagcacgggtgatcaatccttcaac

SEQ ID NO: 1908657 - DNA, 25 bp, Homo sapien
ccctgatgctcaaagtgtagcgcac

SEQ ID NO: 1908658 - DNA, 25 bp, Homo sapien
cttggtgagcaggaggcgcgtcatg

SEQ ID NO: 1908659 - DNA, 25 bp, Homo sapien
tggtgagcaggaggcgcgtcatgcc

SEQ ID NO: 1908660 - DNA, 25 bp, Homo sapien
ttggtgagcaggaggcgcgtcatgc

SEQ ID NO: 1908661 - DNA, 25 bp, Homo sapien
atgcacagtgacttgatctgggtgg

SEQ ID NO: 1908662 - DNA, 25 bp, Homo sapien
gcgctgatgggccagaacagatgac

SEQ ID NO: 1908663 - DNA, 25 bp, Homo sapien
cacagtgacttgatctgggtgggct

SEQ ID NO: 1908664 - DNA, 25 bp, Homo sapien
gatgggccagaacagatgacccagg

SEQ ID NO: 1908665 - DNA, 25 bp, Homo sapien
tgaacacagcaactccccaaagctg

SEQ ID NO: 1908666 - DNA, 25 bp, Homo sapien
tcccaggtccttcttctgtcacaga

SEQ ID NO: 1908667 - DNA, 25 bp, Homo sapien
tgtttttaagggatcatgtgaccca

SEQ ID NO: 1908668 - DNA, 25 bp, Homo sapien
tctgccttgggtccactgaaggtga

SEQ ID NO: 1908669 - DNA, 25 bp, Homo sapien
ctctgccccctggtggccacagaca

SEQ ID NO: 1908670 - DNA, 25 bp, Homo sapien
gccccctggtggccacagacaccat

SEQ ID NO: 1908671 - DNA, 25 bp, Homo sapien
tgctctgccccctggtggccacaga

SEQ ID NO: 1908672 - DNA, 25 bp, Homo sapien
ctctgctctgccccctggtggccac

SEQ ID NO: 1908673 - DNA, 25 bp, Homo sapien
caatcgttcacaccgggccttgctg

SEQ ID NO: 1908674 - DNA, 25 bp, Homo sapien
tgtgagcggacgtgtgagacttcac

SEQ ID NO: 1908675 - DNA, 25 bp, Homo sapien
cagccgtgtgagcactggtgtgagc

SEQ ID NO: 1908676 - DNA, 25 bp, Homo sapien
gacttcaccagactgcgggtcctta

SEQ ID NO: 1908677 - DNA, 25 bp, Homo sapien
tgctagcagaggtctgtcgcttggc

SEQ ID NO: 1908678 - DNA, 25 bp, Homo sapien
agtgagagtgctagcagaggtctgt

SEQ ID NO: 1908679 - DNA, 25 bp, Homo sapien
agagtgctagcagaggtctgtcgct

SEQ ID NO: 1908680 - DNA, 25 bp, Homo sapien
tagcagaggtctgtcgcttggccag

SEQ ID NO: 1908681 - DNA, 25 bp, Homo sapien
ggacctcctttaccaagtgcttggc

SEQ ID NO: 1908682 - DNA, 25 bp, Homo sapien
ttcctccttgcagacatgacctcag

SEQ ID NO: 1908683 - DNA, 25 bp, Homo sapien
agtgcttggcgaacatgaaatgatg

SEQ ID NO: 1908684 - DNA, 25 bp, Homo sapien
ctgtatgtctgcaaaggacctcctt

SEQ ID NO: 1908685 - DNA, 25 bp, Homo sapien
tgctgagtgtagagtgaacaacact

SEQ ID NO: 1908686 - DNA, 25 bp, Homo sapien
gtgtagagtgaacaacactcttgga

SEQ ID NO: 1908687 - DNA, 25 bp, Homo sapien
ggccagttggagacgagatgcaaaa

SEQ ID NO: 1908688 - DNA, 25 bp, Homo sapien
aaaagtgcccaagatggcccggtga

SEQ ID NO: 1908689 - DNA, 25 bp, Homo sapien
ggtacacgtcttggagagcaccatg

SEQ ID NO: 1908690 - DNA, 25 bp, Homo sapien
gagagcaccatgagtctgcgacatg

SEQ ID NO: 1908691 - DNA, 25 bp, Homo sapien
gggtacacgtcttggagagcaccat

SEQ ID NO: 1908692 - DNA, 25 bp, Homo sapien
gagtctgcgacatggggtttttcat

SEQ ID NO: 1908693 - DNA, 25 bp, Homo sapien
gccacttgacatcggaggaaacaga

SEQ ID NO: 1908694 - DNA, 25 bp, Homo sapien
gagccctaacctgagccagtaaatc

SEQ ID NO: 1908695 - DNA, 25 bp, Homo sapien
gaagctcagcaagtggctccaggtt

SEQ ID NO: 1908696 - DNA, 25 bp, Homo sapien
ataacagcccaagacctacctaggt

SEQ ID NO: 1908697 - DNA, 25 bp, Homo sapien
gcccgcctctcccgccctgcagcgg

SEQ ID NO: 1908698 - DNA, 25 bp, Homo sapien
ctctcccgccctgcagcggcctggc

SEQ ID NO: 1908699 - DNA, 25 bp, Homo sapien
cccggcccgcctctcccgccctgca

SEQ ID NO: 1908700 - DNA, 25 bp, Homo sapien
cgcctctcccgccctgcagcggcct

SEQ ID NO: 1908701 - DNA, 25 bp, Homo sapien
tagtcctaccacacaactacaacca

SEQ ID NO: 1908702 - DNA, 25 bp, Homo sapien
gtcctaccacacaactacaaccaac

SEQ ID NO: 1908703 - DNA, 25 bp, Homo sapien
taccacacaactacaaccaaccatt

SEQ ID NO: 1908704 - DNA, 25 bp, Homo sapien
cctaccacacaactacaaccaacca

SEQ ID NO: 1908705 - DNA, 25 bp, Homo sapien
tggctcttgtctgacgctttgacag

SEQ ID NO: 1908706 - DNA, 25 bp, Homo sapien
gcttcgcaaattccttgtgctaggc

SEQ ID NO: 1908707 - DNA, 25 bp, Homo sapien
gacgctttgacagcttcgcaaattc

SEQ ID NO: 1908708 - DNA, 25 bp, Homo sapien
tccttgtgctaggctgacctggatg

SEQ ID NO: 1908709 - DNA, 25 bp, Homo sapien
tccttaagtggaagagaacgacttc

SEQ ID NO: 1908710 - DNA, 25 bp, Homo sapien
cgacttcaaattgggactttgggag

SEQ ID NO: 1908711 - DNA, 25 bp, Homo sapien
cagacaaatcgtttccagttggtga

SEQ ID NO: 1908712 - DNA, 25 bp, Homo sapien
tgtggacctcagagcttaaacataa

SEQ ID NO: 1908713 - DNA, 25 bp, Homo sapien
gttaattgccattaggatatgaaag

SEQ ID NO: 1908714 - DNA, 25 bp, Homo sapien
catcttttatttggaggttaattgc

SEQ ID NO: 1908715 - DNA, 25 bp, Homo sapien
atttggaggttaattgccattagga

SEQ ID NO: 1908716 - DNA, 25 bp, Homo sapien
gaggttaattgccattaggatatga

SEQ ID NO: 1908717 - DNA, 25 bp, Homo sapien
cgatcgagattgtgttcctcacaga

SEQ ID NO: 1908718 - DNA, 25 bp, Homo sapien
aacgatcgagattgtgttcctcaca

SEQ ID NO: 1908719 - DNA, 25 bp, Homo sapien
gcaacgatcgagattgtgttcctca

SEQ ID NO: 1908720 - DNA, 25 bp, Homo sapien
cagaggggctcgggccaaggtcgtg

SEQ ID NO: 1908721 - DNA, 25 bp, Homo sapien
acttgtagtaccagtagtaacctct

SEQ ID NO: 1908722 - DNA, 25 bp, Homo sapien
tccttcactggtacaactgacgcta

SEQ ID NO: 1908723 - DNA, 25 bp, Homo sapien
cgtgcttgagatgcttgtaggaaaa

SEQ ID NO: 1908724 - DNA, 25 bp, Homo sapien
aaacgctccgaaaatgccactaggg

SEQ ID NO: 1908725 - DNA, 25 bp, Homo sapien
tggtgtccgctgtgttcttctgttt

SEQ ID NO: 1908726 - DNA, 25 bp, Homo sapien
cagtgagcagcatagcgcctggtac

SEQ ID NO: 1908727 - DNA, 25 bp, Homo sapien
gaggcacgcactcctcaagtgcaaa

SEQ ID NO: 1908728 - DNA, 25 bp, Homo sapien
tggttctgtgacctatctgaggcac

SEQ ID NO: 1908729 - DNA, 25 bp, Homo sapien
caagagagttgattgagcccacgag

SEQ ID NO: 1908730 - DNA, 25 bp, Homo sapien
ttgtaatgagggcacatattatttc

SEQ ID NO: 1908731 - DNA, 25 bp, Homo sapien
tgtaatgagggcacatattatttcc

SEQ ID NO: 1908732 - DNA, 25 bp, Homo sapien
taatgagggcacatattatttccat

SEQ ID NO: 1908733 - DNA, 25 bp, Homo sapien
ctttgtaatgagggcacatattatt

SEQ ID NO: 1908734 - DNA, 25 bp, Homo sapien
ctattacaagagcagctctccacac

SEQ ID NO: 1908735 - DNA, 25 bp, Homo sapien
ctggacaggctattccatggctatt

SEQ ID NO: 1908736 - DNA, 25 bp, Homo sapien
ggcctggtgcctgttgtcctggaca

SEQ ID NO: 1908737 - DNA, 25 bp, Homo sapien
tgttgtcctggacaggctattccat

SEQ ID NO: 1908738 - DNA, 25 bp, Homo sapien
tagggggcgctgtagaagttcctcc

SEQ ID NO: 1908739 - DNA, 25 bp, Homo sapien
cagcctaaggcctggcatgggtgac

SEQ ID NO: 1908740 - DNA, 25 bp, Homo sapien
gtgggctctgtcattgtctccaaag

SEQ ID NO: 1908741 - DNA, 25 bp, Homo sapien
ttcttggaaccagcctaaggcctgg

SEQ ID NO: 1908742 - DNA, 25 bp, Homo sapien
taaactgtgcatgttcactgaactc

SEQ ID NO: 1908743 - DNA, 25 bp, Homo sapien
tcaaagcgtgaatagccccaggctg

SEQ ID NO: 1908744 - DNA, 25 bp, Homo sapien
aagagtaaagcaggttaaactgtgc

SEQ ID NO: 1908745 - DNA, 25 bp, Homo sapien
cgagtttgtctgtaaagtcgtaaga

SEQ ID NO: 1908746 - DNA, 25 bp, Homo sapien
cctttgttctgatggcagctcactt

SEQ ID NO: 1908747 - DNA, 25 bp, Homo sapien
cctggaggagcagaacacctttgtt

SEQ ID NO: 1908748 - DNA, 25 bp, Homo sapien
gaacacctttgttctgatggcagct

SEQ ID NO: 1908749 - DNA, 25 bp, Homo sapien
cagaccatgtctgtccctggaggag

SEQ ID NO: 1908750 - DNA, 25 bp, Homo sapien
caggaagtgagggcggtggatggcc

SEQ ID NO: 1908751 - DNA, 25 bp, Homo sapien
gggagggtctgattcctgtcccaag

SEQ ID NO: 1908752 - DNA, 25 bp, Homo sapien
cccaagctcaccaatcaggaagtga

SEQ ID NO: 1908753 - DNA, 25 bp, Homo sapien
gtcccaagctcaccaatcaggaagt

SEQ ID NO: 1908754 - DNA, 25 bp, Homo sapien
tgccttctagagcagaatctggtga

SEQ ID NO: 1908755 - DNA, 25 bp, Homo sapien
tctgagcttcaatgagtcacaagct

SEQ ID NO: 1908756 - DNA, 25 bp, Homo sapien
tctagagcagaatctggtgagttcc

SEQ ID NO: 1908757 - DNA, 25 bp, Homo sapien
gagcagaatctggtgagttccttga

SEQ ID NO: 1908758 - DNA, 25 bp, Homo sapien
atttgtattagtcctctttgtggat

SEQ ID NO: 1908759 - DNA, 25 bp, Homo sapien
tagtcctctttgtggattatcagtg

SEQ ID NO: 1908760 - DNA, 25 bp, Homo sapien
cctctttgtggattatcagtgtcat

SEQ ID NO: 1908761 - DNA, 25 bp, Homo sapien
gtattagtcctctttgtggattatc

SEQ ID NO: 1908762 - DNA, 25 bp, Homo sapien
ccatcatcccacagtgagattggtg

SEQ ID NO: 1908763 - DNA, 25 bp, Homo sapien
tcagagctgcatctgcgtggtggcc

SEQ ID NO: 1908764 - DNA, 25 bp, Homo sapien
gtctctcaagatacagggccttcag

SEQ ID NO: 1908765 - DNA, 25 bp, Homo sapien
tcttgccagaggtgtcttaaaggga

SEQ ID NO: 1908766 - DNA, 25 bp, Homo sapien
gcctgaagacaagtgacaatgcttc

SEQ ID NO: 1908767 - DNA, 25 bp, Homo sapien
agagaagatgcctgaagacaagtga

SEQ ID NO: 1908768 - DNA, 25 bp, Homo sapien
ggagagaagatgcctgaagacaagt

SEQ ID NO: 1908769 - DNA, 25 bp, Homo sapien
gatgcctgaagacaagtgacaatgc

SEQ ID NO: 1908770 - DNA, 25 bp, Homo sapien
gaacttacaaacgatttctcattaa

SEQ ID NO: 1908771 - DNA, 25 bp, Homo sapien
gaagaacttacaaacgatttctcat

SEQ ID NO: 1908772 - DNA, 25 bp, Homo sapien
cttacaaacgatttctcattaatca

SEQ ID NO: 1908773 - DNA, 25 bp, Homo sapien
ggaagaacttacaaacgatttctca

SEQ ID NO: 1908774 - DNA, 25 bp, Homo sapien
gcttcacaggaagctgccggtcgct

SEQ ID NO: 1908775 - DNA, 25 bp, Homo sapien
gagcttcacaggaagctgccggtcg

SEQ ID NO: 1908776 - DNA, 25 bp, Homo sapien
tcagcggatggggagcttcacagga

SEQ ID NO: 1908777 - DNA, 25 bp, Homo sapien
gggagcttcacaggaagctgccggt

SEQ ID NO: 1908778 - DNA, 25 bp, Homo sapien
ctgttttgaaccaggtagcaccagg

SEQ ID NO: 1908779 - DNA, 25 bp, Homo sapien
ttttgaaccaggtagcaccagggcc

SEQ ID NO: 1908780 - DNA, 25 bp, Homo sapien
aaccaggtagcaccagggccgtttg

SEQ ID NO: 1908781 - DNA, 25 bp, Homo sapien
tgaaccaggtagcaccagggccgtt

SEQ ID NO: 1908782 - DNA, 25 bp, Homo sapien
gcttcccagtaagtggtaagaacca

SEQ ID NO: 1908783 - DNA, 25 bp, Homo sapien
tcccagtaagtggtaagaaccactg

SEQ ID NO: 1908784 - DNA, 25 bp, Homo sapien
gaaccactggccctttgccttttgc

SEQ ID NO: 1908785 - DNA, 25 bp, Homo sapien
ccagtaagtggtaagaaccactggc

SEQ ID NO: 1908786 - DNA, 25 bp, Homo sapien
aagtcctgggaccaaatctagtttg

SEQ ID NO: 1908787 - DNA, 25 bp, Homo sapien
gaacacaggatggtacattagtctt

SEQ ID NO: 1908788 - DNA, 25 bp, Homo sapien
ttttccacaaattttcgctgccaga

SEQ ID NO: 1908789 - DNA, 25 bp, Homo sapien
gctgccagacttgtgtcaaaataag

SEQ ID NO: 1908790 - DNA, 25 bp, Homo sapien
ctctcattctgtttagacttctata

SEQ ID NO: 1908791 - DNA, 25 bp, Homo sapien
tttagacttctataggcataagctg

SEQ ID NO: 1908792 - DNA, 25 bp, Homo sapien
ctcattctgtttagacttctatagg

SEQ ID NO: 1908793 - DNA, 25 bp, Homo sapien
tctgtttagacttctataggcataa

SEQ ID NO: 1908794 - DNA, 25 bp, Homo sapien
agtaatactgacagacttcaaaagc

SEQ ID NO: 1908795 - DNA, 25 bp, Homo sapien
aaaataccagtaatactgacagact

SEQ ID NO: 1908796 - DNA, 25 bp, Homo sapien
aattcacgcttccagaatacaaagt

SEQ ID NO: 1908797 - DNA, 25 bp, Homo sapien
agcaattcacgcttccagaatacaa

SEQ ID NO: 1908798 - DNA, 25 bp, Homo sapien
cccacaactttggtgctggaaacac

SEQ ID NO: 1908799 - DNA, 25 bp, Homo sapien
gcagtctacagcaacatgtcccaca

SEQ ID NO: 1908800 - DNA, 25 bp, Homo sapien
gagagactgaatgcacccaggactg

SEQ ID NO: 1908801 - DNA, 25 bp, Homo sapien
gcatatcaaaagatcgccagcttct

SEQ ID NO: 1908802 - DNA, 25 bp, Homo sapien
taagtcattatccaagtcccattct

SEQ ID NO: 1908803 - DNA, 25 bp, Homo sapien
aagcaaaatactgtgaatggcagcc

SEQ ID NO: 1908804 - DNA, 25 bp, Homo sapien
tattttgtctaccattggtcctggg

SEQ ID NO: 1908805 - DNA, 25 bp, Homo sapien
caaacagtcactgcttgtgccagca

SEQ ID NO: 1908806 - DNA, 25 bp, Homo sapien
ctataagaagcagattaacatgaac

SEQ ID NO: 1908807 - DNA, 25 bp, Homo sapien
cataaaggagttctgcttgcatcct

SEQ ID NO: 1908808 - DNA, 25 bp, Homo sapien
tatagcgggtaatggctctcagagc

SEQ ID NO: 1908809 - DNA, 25 bp, Homo sapien
gcttgcatcctagcttctataagaa

SEQ ID NO: 1908810 - DNA, 25 bp, Homo sapien
tttttggatagattgagctttcatt

SEQ ID NO: 1908811 - DNA, 25 bp, Homo sapien
ctttttggatagattgagctttcat

SEQ ID NO: 1908812 - DNA, 25 bp, Homo sapien
ttttggatagattgagctttcattt

SEQ ID NO: 1908813 - DNA, 25 bp, Homo sapien
tacaaagtaaataagccacaatagg

SEQ ID NO: 1908814 - DNA, 25 bp, Homo sapien
agcacttctgaagacgggccagccc

SEQ ID NO: 1908815 - DNA, 25 bp, Homo sapien
tactctatcaacataatcaggttcc

SEQ ID NO: 1908816 - DNA, 25 bp, Homo sapien
ggtgaaggagactacgaatcattgc

SEQ ID NO: 1908817 - DNA, 25 bp, Homo sapien
tcagagtgcttgaactgcctccaga

SEQ ID NO: 1908818 - DNA, 25 bp, Homo sapien
taaactttaaagctacgatccaata

SEQ ID NO: 1908819 - DNA, 25 bp, Homo sapien
gatccaatagctggttaatttcacc

SEQ ID NO: 1908820 - DNA, 25 bp, Homo sapien
tggtaaccttttcaggagtgcaaac

SEQ ID NO: 1908821 - DNA, 25 bp, Homo sapien
tataagtaagattgtaagcaatgtg

SEQ ID NO: 1908822 - DNA, 25 bp, Homo sapien
caaattgcccgtctaagcattgagg

SEQ ID NO: 1908823 - DNA, 25 bp, Homo sapien
ggcgatttaccaaagaataaccatg

SEQ ID NO: 1908824 - DNA, 25 bp, Homo sapien
gcattgaggtatcaacatctttgtg

SEQ ID NO: 1908825 - DNA, 25 bp, Homo sapien
ccctaacaatatttgggaacgctgg

SEQ ID NO: 1908826 - DNA, 25 bp, Homo sapien
gccaggccccttagttttttgagca

SEQ ID NO: 1908827 - DNA, 25 bp, Homo sapien
ggaacgctgggagtatcaactcatc

SEQ ID NO: 1908828 - DNA, 25 bp, Homo sapien
ttctgaaacaagacgagatactgcc

SEQ ID NO: 1908829 - DNA, 25 bp, Homo sapien
tgttggaacatgcatcccatgtcta

SEQ ID NO: 1908830 - DNA, 25 bp, Homo sapien
tcaaaatgacgagatacagctcttg

SEQ ID NO: 1908831 - DNA, 25 bp, Homo sapien
tttatagccataactagtatcctca

SEQ ID NO: 1908832 - DNA, 25 bp, Homo sapien
cccatgtctagagaaatctttatag

SEQ ID NO: 1908833 - DNA, 25 bp, Homo sapien
tgtattaggttcgacttattcaaag

SEQ ID NO: 1908834 - DNA, 25 bp, Homo sapien
aactcatagttgaattctctatgcc

SEQ ID NO: 1908835 - DNA, 25 bp, Homo sapien
tctttctctgatactgagtgaccaa

SEQ ID NO: 1908836 - DNA, 25 bp, Homo sapien
tacttgctagtaaacagaatgtagt

SEQ ID NO: 1908837 - DNA, 25 bp, Homo sapien
gagggcactcatatgttaagtgact

SEQ ID NO: 1908838 - DNA, 25 bp, Homo sapien
ggaatacctatgcaatagtctctct

SEQ ID NO: 1908839 - DNA, 25 bp, Homo sapien
cagaatccaaattaaatgtcctccc

SEQ ID NO: 1908840 - DNA, 25 bp, Homo sapien
gaagtaattttagtgccagaatcca

SEQ ID NO: 1908841 - DNA, 25 bp, Homo sapien
tctcgacattcctgtaactgcctca

SEQ ID NO: 1908842 - DNA, 25 bp, Homo sapien
tcttcatctcgacattcctgtaact

SEQ ID NO: 1908843 - DNA, 25 bp, Homo sapien
catctcgacattcctgtaactgcct

SEQ ID NO: 1908844 - DNA, 25 bp, Homo sapien
tcttcttcatctcgacattcctgta

SEQ ID NO: 1908845 - DNA, 25 bp, Homo sapien
caggtagcagcttacatccttgtaa

SEQ ID NO: 1908846 - DNA, 25 bp, Homo sapien
ggcttccacccattgatccttcagg

SEQ ID NO: 1908847 - DNA, 25 bp, Homo sapien
gatattgatttaatgcaggctccct

SEQ ID NO: 1908848 - DNA, 25 bp, Homo sapien
tatcccaagcctagcatagtacctg

SEQ ID NO: 1908849 - DNA, 25 bp, Homo sapien
cattcagatggctgtggtactgctt

SEQ ID NO: 1908850 - DNA, 25 bp, Homo sapien
tgcaggcctataacatgaatctagg

SEQ ID NO: 1908851 - DNA, 25 bp, Homo sapien
tggcagtcctatgatcaaccttggg

SEQ ID NO: 1908852 - DNA, 25 bp, Homo sapien
tctgactgccaagctttgaaaaata

SEQ ID NO: 1908853 - DNA, 25 bp, Homo sapien
tactgcatgtaccaattccgcaagg

SEQ ID NO: 1908854 - DNA, 25 bp, Homo sapien
cagtagttgctaacagaaggaggtc

SEQ ID NO: 1908855 - DNA, 25 bp, Homo sapien
tgagttgaccggcatctcatccaca

SEQ ID NO: 1908856 - DNA, 25 bp, Homo sapien
ttccacagccgaatgtgaatgaggc

SEQ ID NO: 1908857 - DNA, 25 bp, Homo sapien
ggtccccaccaacatgaaggaaatc

SEQ ID NO: 1908858 - DNA, 25 bp, Homo sapien
tggtaataagccaaggtctatgggc

SEQ ID NO: 1908859 - DNA, 25 bp, Homo sapien
tgttaagttctcctaaattctgtag

SEQ ID NO: 1908860 - DNA, 25 bp, Homo sapien
tacatgcaggttcactaagtaggag

SEQ ID NO: 1908861 - DNA, 25 bp, Homo sapien
taatgttatccaaacggcccaaagc

SEQ ID NO: 1908862 - DNA, 25 bp, Homo sapien
cccatccatttgcagtagatagtgc

SEQ ID NO: 1908863 - DNA, 25 bp, Homo sapien
taaatattgtgggtggaaaaccatc

SEQ ID NO: 1908864 - DNA, 25 bp, Homo sapien
ccaatgtagtgacgataatgtaggg

SEQ ID NO: 1908865 - DNA, 25 bp, Homo sapien
cgtcttcactccccacttggaggat

SEQ ID NO: 1908866 - DNA, 25 bp, Homo sapien
ctgtgcgtcttcactccccacttgg

SEQ ID NO: 1908867 - DNA, 25 bp, Homo sapien
tgtgcgtcttcactccccacttgga

SEQ ID NO: 1908868 - DNA, 25 bp, Homo sapien
tgcgtcttcactccccacttggagg

SEQ ID NO: 1908869 - DNA, 25 bp, Homo sapien
tccctgtcctagtggtcgaggaatt

SEQ ID NO: 1908870 - DNA, 25 bp, Homo sapien
gcttggtccctgtcctagtggtcga

SEQ ID NO: 1908871 - DNA, 25 bp, Homo sapien
ctgcttggtccctgtcctagtggtc

SEQ ID NO: 1908872 - DNA, 25 bp, Homo sapien
ttggtccctgtcctagtggtcgagg

SEQ ID NO: 1908873 - DNA, 25 bp, Homo sapien
aaggcaacactctgacagcacctga

SEQ ID NO: 1908874 - DNA, 25 bp, Homo sapien
gaaccaggactctgcacacaaacat

SEQ ID NO: 1908875 - DNA, 25 bp, Homo sapien
taagcgctgtaacaatatgcaagcc

SEQ ID NO: 1908876 - DNA, 25 bp, Homo sapien
gtttccaaagcgatactgtaagaga

SEQ ID NO: 1908877 - DNA, 25 bp, Homo sapien
tgtgcataacgtcatagagcttgca

SEQ ID NO: 1908878 - DNA, 25 bp, Homo sapien
agcttgcaggacacacttattccag

SEQ ID NO: 1908879 - DNA, 25 bp, Homo sapien
ttaatacgcaagagtaaacgctgtg

SEQ ID NO: 1908880 - DNA, 25 bp, Homo sapien
tcagaaaagggatggcttaatacgc

SEQ ID NO: 1908881 - DNA, 25 bp, Homo sapien
tgctgaccgggagcgactgtgagga

SEQ ID NO: 1908882 - DNA, 25 bp, Homo sapien
cgactgtgaggaggcaacgtgacct

SEQ ID NO: 1908883 - DNA, 25 bp, Homo sapien
ccctatctggggagcgttttcggat

SEQ ID NO: 1908884 - DNA, 25 bp, Homo sapien
acgtgacctccgtgttgcacagggc

SEQ ID NO: 1908885 - DNA, 25 bp, Homo sapien
ccgcccaggtacccagcggcccgct

SEQ ID NO: 1908886 - DNA, 25 bp, Homo sapien
cccaggtacccagcggcccgctcag

SEQ ID NO: 1908887 - DNA, 25 bp, Homo sapien
gcggcccgctcagcccctcgcccag

SEQ ID NO: 1908888 - DNA, 25 bp, Homo sapien
aggtacccagcggcccgctcagccc

SEQ ID NO: 1908889 - DNA, 25 bp, Homo sapien
gtgtacgcctcgttcgcggcggcgg

SEQ ID NO: 1908890 - DNA, 25 bp, Homo sapien
cgccaaaggggccgtgtacgcctcg

SEQ ID NO: 1908891 - DNA, 25 bp, Homo sapien
ccgccgcactgcttgcagcccagca

SEQ ID NO: 1908892 - DNA, 25 bp, Homo sapien
agcagccccgagaccgccaaagggg

SEQ ID NO: 1908893 - DNA, 25 bp, Homo sapien
tgggcagccggccgcggctcctggc

SEQ ID NO: 1908894 - DNA, 25 bp, Homo sapien
gacgcgcggaggcggcgagcgctgg

SEQ ID NO: 1908895 - DNA, 25 bp, Homo sapien
ggacgcgcggaggcggcgagcgctg

SEQ ID NO: 1908896 - DNA, 25 bp, Homo sapien
caaacatgaactgttgtagttccca

SEQ ID NO: 1908897 - DNA, 25 bp, Homo sapien
ttaaggctctatttggcattgagcc

SEQ ID NO: 1908898 - DNA, 25 bp, Homo sapien
tataaattggagagggtaacactct

SEQ ID NO: 1908899 - DNA, 25 bp, Homo sapien
tttcagttatagaccagacccagga

SEQ ID NO: 1908900 - DNA, 25 bp, Homo sapien
cagtgaaatgctacaggccaaatcc

SEQ ID NO: 1908901 - DNA, 25 bp, Homo sapien
aatgcaggatcaagcaaactgaaca

SEQ ID NO: 1908902 - DNA, 25 bp, Homo sapien
tatgccagatactgtatacatcaag

SEQ ID NO: 1908903 - DNA, 25 bp, Homo sapien
tgcacagtgcaattctatacaattt

SEQ ID NO: 1908904 - DNA, 25 bp, Homo sapien
ccatttgatggttgtagttccctaa

SEQ ID NO: 1908905 - DNA, 25 bp, Homo sapien
attatcattaataatctccttcacc

SEQ ID NO: 1908906 - DNA, 25 bp, Homo sapien
atcattaataatctccttcacccac

SEQ ID NO: 1908907 - DNA, 25 bp, Homo sapien
accatttgatggttgtagttcccta

SEQ ID NO: 1908908 - DNA, 25 bp, Homo sapien
tcttctagcctcttattaggacctt

SEQ ID NO: 1908909 - DNA, 25 bp, Homo sapien
ttccaattctaggccccattcagaa

SEQ ID NO: 1908910 - DNA, 25 bp, Homo sapien
cttctagcctcttattaggaccttt

SEQ ID NO: 1908911 - DNA, 25 bp, Homo sapien
taagcctaagctaaatacctggagg

SEQ ID NO: 1908912 - DNA, 25 bp, Homo sapien
tgagagagacaaataggcatactgc

SEQ ID NO: 1908913 - DNA, 25 bp, Homo sapien
tgccccatcagtactaacaaaaagg

SEQ ID NO: 1908914 - DNA, 25 bp, Homo sapien
cacctgttccccattagtagagtat

SEQ ID NO: 1908915 - DNA, 25 bp, Homo sapien
aacaacacaagtctttagcacctga

SEQ ID NO: 1908916 - DNA, 25 bp, Homo sapien
tacctacagcacaatgagatgttga

SEQ ID NO: 1908917 - DNA, 25 bp, Homo sapien
gactttattttctagcactagttgg

SEQ ID NO: 1908918 - DNA, 25 bp, Homo sapien
cactagttggagtcactggcttgta

SEQ ID NO: 1908919 - DNA, 25 bp, Homo sapien
taacaactgtccctacttatagatg

SEQ ID NO: 1908920 - DNA, 25 bp, Homo sapien
cactcttacacaacatagtcctgga

SEQ ID NO: 1908921 - DNA, 25 bp, Homo sapien
tcctcttaagattgggaagaaggaa

SEQ ID NO: 1908922 - DNA, 25 bp, Homo sapien
gaacagagtgggagttacctcagct

SEQ ID NO: 1908923 - DNA, 25 bp, Homo sapien
gcgaggcatggtagcgtacaccttt

SEQ ID NO: 1908924 - DNA, 25 bp, Homo sapien
tctgttagctagctaggtgccagtg

SEQ ID NO: 1908925 - DNA, 25 bp, Homo sapien
taaaacaactagagaaaccaccaca

SEQ ID NO: 1908926 - DNA, 25 bp, Homo sapien
tgagacaggaggataacctgtgcct

SEQ ID NO: 1908927 - DNA, 25 bp, Homo sapien
catggattgctaaagcctggaacag

SEQ ID NO: 1908928 - DNA, 25 bp, Homo sapien
atgacatggattgctaaagcctgga

SEQ ID NO: 1908929 - DNA, 25 bp, Homo sapien
tggaacagctccttgatttcgaaac

SEQ ID NO: 1908930 - DNA, 25 bp, Homo sapien
gacatggattgctaaagcctggaac

SEQ ID NO: 1908931 - DNA, 25 bp, Homo sapien
tctgtatcattccaactttggcata

SEQ ID NO: 1908932 - DNA, 25 bp, Homo sapien
tatcattccaactttggcatatgtg

SEQ ID NO: 1908933 - DNA, 25 bp, Homo sapien
atgtcattcttgtgcaggggcatgc

SEQ ID NO: 1908934 - DNA, 25 bp, Homo sapien
tgtgcaggggcatgctaattttctc

SEQ ID NO: 1908935 - DNA, 25 bp, Homo sapien
aatgcaacagccctttaactggtct

SEQ ID NO: 1908936 - DNA, 25 bp, Homo sapien
tttgttgtacctatccatgccccac

SEQ ID NO: 1908937 - DNA, 25 bp, Homo sapien
gccgtgtaccacgacacatagctaa

SEQ ID NO: 1908938 - DNA, 25 bp, Homo sapien
cacctactgctgaaacaatgcaaca

SEQ ID NO: 1908939 - DNA, 25 bp, Homo sapien
taacttcctcgaggttagacaggca

SEQ ID NO: 1908940 - DNA, 25 bp, Homo sapien
tcagaggcacgagctaacatttagt

SEQ ID NO: 1908941 - DNA, 25 bp, Homo sapien
cagaatcgggatatggaccccggca

SEQ ID NO: 1908942 - DNA, 25 bp, Homo sapien
tgagggcctgccagtttaagaccag

SEQ ID NO: 1908943 - DNA, 25 bp, Homo sapien
tagagctcttaatacaacataccca

SEQ ID NO: 1908944 - DNA, 25 bp, Homo sapien
ctgaaccataatgtggtagagctct

SEQ ID NO: 1908945 - DNA, 25 bp, Homo sapien
taaataaatacttaaggccagctgt

SEQ ID NO: 1908946 - DNA, 25 bp, Homo sapien
cccaaattattgcatggctaattca

SEQ ID NO: 1908947 - DNA, 25 bp, Homo sapien
ttttcttcttagctgcagatagtca

SEQ ID NO: 1908948 - DNA, 25 bp, Homo sapien
tcttagctgcagatagtcatgtctg

SEQ ID NO: 1908949 - DNA, 25 bp, Homo sapien
tagctgcagatagtcatgtctgcac

SEQ ID NO: 1908950 - DNA, 25 bp, Homo sapien
ctgtaggaatggagacatcatttgc

SEQ ID NO: 1908951 - DNA, 25 bp, Homo sapien
aagatgctatctcccaatgtgtcca

SEQ ID NO: 1908952 - DNA, 25 bp, Homo sapien
tagactatattaggaaagtgggcca

SEQ ID NO: 1908953 - DNA, 25 bp, Homo sapien
tgaggctgatgctaaaatggtaggc

SEQ ID NO: 1908954 - DNA, 25 bp, Homo sapien
tagctgacctatagcaattaagggc

SEQ ID NO: 1908955 - DNA, 25 bp, Homo sapien
tattctaaagggcttttgccagtaa

SEQ ID NO: 1908956 - DNA, 25 bp, Homo sapien
aaatggctctacagctatgtggagg

SEQ ID NO: 1908957 - DNA, 25 bp, Homo sapien
tgacagaactagaacagcggtatcg

SEQ ID NO: 1908958 - DNA, 25 bp, Homo sapien
tggatgtctcataggcaacttaaac

SEQ ID NO: 1908959 - DNA, 25 bp, Homo sapien
ggcaggaaccataagcataatgctc

SEQ ID NO: 1908960 - DNA, 25 bp, Homo sapien
tcataggctagtaggacaacctcct

SEQ ID NO: 1908961 - DNA, 25 bp, Homo sapien
taaatagcctataagcccctctggg

SEQ ID NO: 1908962 - DNA, 25 bp, Homo sapien
ggcatacctaacattaactgagcat

SEQ ID NO: 1908963 - DNA, 25 bp, Homo sapien
gatcttcattcttacggtcttcact

SEQ ID NO: 1908964 - DNA, 25 bp, Homo sapien
gacgtggataatcatgaagatcttc

SEQ ID NO: 1908965 - DNA, 25 bp, Homo sapien
aagtggacgtggataatcatgaaga

SEQ ID NO: 1908966 - DNA, 25 bp, Homo sapien
cattcttacggtcttcactttgagt

SEQ ID NO: 1908967 - DNA, 25 bp, Homo sapien
tatgtccggaatgtcccctcacaaa

SEQ ID NO: 1908968 - DNA, 25 bp, Homo sapien
cacatgacagtatcgcagccaggtc

SEQ ID NO: 1908969 - DNA, 25 bp, Homo sapien
caaatatgataccacctaacgatgc

SEQ ID NO: 1908970 - DNA, 25 bp, Homo sapien
tctccttggcatgaggccttcatac

SEQ ID NO: 1908971 - DNA, 25 bp, Homo sapien
caagagctctgtgttgttattccca

SEQ ID NO: 1908972 - DNA, 25 bp, Homo sapien
tttatttagtagcttccaggtccca

SEQ ID NO: 1908973 - DNA, 25 bp, Homo sapien
tgtcaaaattgttaccactggtcct

SEQ ID NO: 1908974 - DNA, 25 bp, Homo sapien
tataagtctatagggaaccttccca

SEQ ID NO: 1908975 - DNA, 25 bp, Homo sapien
gttgatatgcataatgatgacccca

SEQ ID NO: 1908976 - DNA, 25 bp, Homo sapien
gagaccaaagtcaagtatcctgacg

SEQ ID NO: 1908977 - DNA, 25 bp, Homo sapien
ggttgttacagtcactacagtctag

SEQ ID NO: 1908978 - DNA, 25 bp, Homo sapien
tattaattcctctcgggtaactctg

SEQ ID NO: 1908979 - DNA, 25 bp, Homo sapien
tattcaacccatccgaagactcggt

SEQ ID NO: 1908980 - DNA, 25 bp, Homo sapien
tagtagttgaatctctgctgcagag

SEQ ID NO: 1908981 - DNA, 25 bp, Homo sapien
tctttcaccgaacgaagatactcgg

SEQ ID NO: 1908982 - DNA, 25 bp, Homo sapien
tgaaagcccgtctgatggacgatga

SEQ ID NO: 1908983 - DNA, 25 bp, Homo sapien
ttcagccgatctacaagctaggtca

SEQ ID NO: 1908984 - DNA, 25 bp, Homo sapien
cagtggatatcctcacgttgtggag

SEQ ID NO: 1908985 - DNA, 25 bp, Homo sapien
tgcaaccttgcagcgctggctttgg

SEQ ID NO: 1908986 - DNA, 25 bp, Homo sapien
cttgtacacgaaagggcagtcttct

SEQ ID NO: 1908987 - DNA, 25 bp, Homo sapien
tgtgcagccaccgggttctctccgg

SEQ ID NO: 1908988 - DNA, 25 bp, Homo sapien
ttaacagctgaacgccctccagcca

SEQ ID NO: 1908989 - DNA, 25 bp, Homo sapien
cagccaccgggttctctccggcgtt

SEQ ID NO: 1908990 - DNA, 25 bp, Homo sapien
cctccagccattcggggcttttttg

SEQ ID NO: 1908991 - DNA, 25 bp, Homo sapien
tggcaatcctcgagcgccaggctgg

SEQ ID NO: 1908992 - DNA, 25 bp, Homo sapien
aagacgctacttctccgatccctga

SEQ ID NO: 1908993 - DNA, 25 bp, Homo sapien
cggcagggaaggctcgccgaaccct

SEQ ID NO: 1908994 - DNA, 25 bp, Homo sapien
gcagtctcgggcagccgtagtctcg

SEQ ID NO: 1908995 - DNA, 25 bp, Homo sapien
caagcacgacaaagaaagagggcgc

SEQ ID NO: 1908996 - DNA, 25 bp, Homo sapien
cgcgaagggactcctggaagaaatt

SEQ ID NO: 1908997 - DNA, 25 bp, Homo sapien
gctgctacgcatgcgtgactgcgaa

SEQ ID NO: 1908998 - DNA, 25 bp, Homo sapien
taagcttgcgccctgaggcggtttc

SEQ ID NO: 1908999 - DNA, 25 bp, Homo sapien
cgacatcataggctgttctctgtgc

SEQ ID NO: 1909000 - DNA, 25 bp, Homo sapien
ggaaggccctcagcactttcagcat

SEQ ID NO: 1909001 - DNA, 25 bp, Homo sapien
tgctggtggtaattggaaggccctc

SEQ ID NO: 1909002 - DNA, 25 bp, Homo sapien
atttcgacatcataggctgttctct

SEQ ID NO: 1909003 - DNA, 25 bp, Homo sapien
ttgagactgtgaatttctaggaccc

SEQ ID NO: 1909004 - DNA, 25 bp, Homo sapien
taattcagttgcagaagctttcctc

SEQ ID NO: 1909005 - DNA, 25 bp, Homo sapien
tccagcagaaattcacggtagtatg

SEQ ID NO: 1909006 - DNA, 25 bp, Homo sapien
ggaagctgggcattaaattacctca

SEQ ID NO: 1909007 - DNA, 25 bp, Homo sapien
ccagtgtttgaagcagcaggtattg

SEQ ID NO: 1909008 - DNA, 25 bp, Homo sapien
tgtagcaacctcacagctgtgctct

SEQ ID NO: 1909009 - DNA, 25 bp, Homo sapien
tgtgctctgtctagcagaaacttgg

SEQ ID NO: 1909010 - DNA, 25 bp, Homo sapien
gagcagtcagtctatggtcagtgta

SEQ ID NO: 1909011 - DNA, 25 bp, Homo sapien
tgtctgggccagagtttgttgttac

SEQ ID NO: 1909012 - DNA, 25 bp, Homo sapien
taggtttattgggagtgttctccat

SEQ ID NO: 1909013 - DNA, 25 bp, Homo sapien
tatagatggatccatttcccatttg

SEQ ID NO: 1909014 - DNA, 25 bp, Homo sapien
tcccatttggggctgagcactgtgt

SEQ ID NO: 1909015 - DNA, 25 bp, Homo sapien
cattgccaagaccagggatatagtt

SEQ ID NO: 1909016 - DNA, 25 bp, Homo sapien
tagtaatttacaggaaaggctcaag

SEQ ID NO: 1909017 - DNA, 25 bp, Homo sapien
tatccttagatatcagcattgccaa

SEQ ID NO: 1909018 - DNA, 25 bp, Homo sapien
tcagtgttttatctcgggtggtccc

SEQ ID NO: 1909019 - DNA, 25 bp, Homo sapien
cagttctagcgtaaggcctcagtca

SEQ ID NO: 1909020 - DNA, 25 bp, Homo sapien
gaatgaccgcccatgtactcctaaa

SEQ ID NO: 1909021 - DNA, 25 bp, Homo sapien
tcacactgatatgtgcgccaggaat

SEQ ID NO: 1909022 - DNA, 25 bp, Homo sapien
tggatgatacacagttctagcgtaa

SEQ ID NO: 1909023 - DNA, 25 bp, Homo sapien
gcatttctgcgtcacccactgggtg

SEQ ID NO: 1909024 - DNA, 25 bp, Homo sapien
gaaactgcatttagcagcagagaca

SEQ ID NO: 1909025 - DNA, 25 bp, Homo sapien
gagacagccctgagttcctaacagg

SEQ ID NO: 1909026 - DNA, 25 bp, Homo sapien
taacaggaaaccactaggatgcaag

SEQ ID NO: 1909027 - DNA, 25 bp, Homo sapien
gatcttcatgttcgtgtcagtccca

SEQ ID NO: 1909028 - DNA, 25 bp, Homo sapien
tttattatgcacagcagagtaggca

SEQ ID NO: 1909029 - DNA, 25 bp, Homo sapien
aggagtgcctcccaacaagcttaac

SEQ ID NO: 1909030 - DNA, 25 bp, Homo sapien
gagagagacattaccttatcactga

SEQ ID NO: 1909031 - DNA, 25 bp, Homo sapien
aagggatcactgtcatagaagttgc

SEQ ID NO: 1909032 - DNA, 25 bp, Homo sapien
agcaaacagtatgattagaacgtat

SEQ ID NO: 1909033 - DNA, 25 bp, Homo sapien
gtgaaacaaagggatcactgtcata

SEQ ID NO: 1909034 - DNA, 25 bp, Homo sapien
gtatgattagaacgtatgccaggtg

SEQ ID NO: 1909035 - DNA, 25 bp, Homo sapien
tccaggaacgggttggaggacacac

SEQ ID NO: 1909036 - DNA, 25 bp, Homo sapien
taggccagttacatcccaagatgtg

SEQ ID NO: 1909037 - DNA, 25 bp, Homo sapien
tagctcaggtcgaacgttttgtcca

SEQ ID NO: 1909038 - DNA, 25 bp, Homo sapien
tccaaagaagccgatcagacagagg

SEQ ID NO: 1909039 - DNA, 25 bp, Homo sapien
ttactgactttgcaaagatgtccgg

SEQ ID NO: 1909040 - DNA, 25 bp, Homo sapien
atgtccggttccagcagtgggttgc

SEQ ID NO: 1909041 - DNA, 25 bp, Homo sapien
tgtccaatttactgactttgcaaag

SEQ ID NO: 1909042 - DNA, 25 bp, Homo sapien
cacgtagatcctgcaccgtgctgtc

SEQ ID NO: 1909043 - DNA, 25 bp, Homo sapien
aattggcctgagtgcacctcctgga

SEQ ID NO: 1909044 - DNA, 25 bp, Homo sapien
tgaaatagccctgcacaaagcgtct

SEQ ID NO: 1909045 - DNA, 25 bp, Homo sapien
actggaagaagagcggcgcctccag

SEQ ID NO: 1909046 - DNA, 25 bp, Homo sapien
agcacggccgtcagcatcatgggcg

SEQ ID NO: 1909047 - DNA, 25 bp, Homo sapien
gacaggtaatgcgacgacgttgtaa

SEQ ID NO: 1909048 - DNA, 25 bp, Homo sapien
cagacaggtaatgcgacgacgttgt

SEQ ID NO: 1909049 - DNA, 25 bp, Homo sapien
acaggtaatgcgacgacgttgtaac

SEQ ID NO: 1909050 - DNA, 25 bp, Homo sapien
caggtaatgcgacgacgttgtaaca

SEQ ID NO: 1909051 - DNA, 25 bp, Homo sapien
gtggacttggatcagtgtagaaaat

SEQ ID NO: 1909052 - DNA, 25 bp, Homo sapien
tacagcagctgggagtaaagggcgc

SEQ ID NO: 1909053 - DNA, 25 bp, Homo sapien
gagtggacttggatcagtgtagaaa

SEQ ID NO: 1909054 - DNA, 25 bp, Homo sapien
aaagggcgcccccaggcaaaatctg

SEQ ID NO: 1909055 - DNA, 25 bp, Homo sapien
tccggagggaggttatatttttgca

SEQ ID NO: 1909056 - DNA, 25 bp, Homo sapien
gctgcagtaaggcatctcatccggt

SEQ ID NO: 1909057 - DNA, 25 bp, Homo sapien
ggctggagcactaatcctgttctag

SEQ ID NO: 1909058 - DNA, 25 bp, Homo sapien
ttcaagagctgcagaacatgattga

SEQ ID NO: 1909059 - DNA, 25 bp, Homo sapien
tttccactgcacttgtgggcatcca

SEQ ID NO: 1909060 - DNA, 25 bp, Homo sapien
aaggtgggggttgcactgaactgtc

SEQ ID NO: 1909061 - DNA, 25 bp, Homo sapien
tgctttccactgcacttgtgggcat

SEQ ID NO: 1909062 - DNA, 25 bp, Homo sapien
ttccactgcacttgtgggcatccat

SEQ ID NO: 1909063 - DNA, 25 bp, Homo sapien
cctgtaaagtcgctgaaaatttggc

SEQ ID NO: 1909064 - DNA, 25 bp, Homo sapien
tgacaggacagtagccctgtaaagt

SEQ ID NO: 1909065 - DNA, 25 bp, Homo sapien
taagggcggcatgcttcacagatga

SEQ ID NO: 1909066 - DNA, 25 bp, Homo sapien
tcatcttgggtactggctatgtgca

SEQ ID NO: 1909067 - DNA, 25 bp, Homo sapien
cgtgaccattggatctgctcttgct

SEQ ID NO: 1909068 - DNA, 25 bp, Homo sapien
taggtggatataggagtcccggctc

SEQ ID NO: 1909069 - DNA, 25 bp, Homo sapien
cagaagacagggtcggaccgtgacc

SEQ ID NO: 1909070 - DNA, 25 bp, Homo sapien
gccctcatttagacccagaagacag

SEQ ID NO: 1909071 - DNA, 25 bp, Homo sapien
ctctaagcctctttttatcataacg

SEQ ID NO: 1909072 - DNA, 25 bp, Homo sapien
ctctttttatcataacgtcatggga

SEQ ID NO: 1909073 - DNA, 25 bp, Homo sapien
taagcctctttttatcataacgtca

SEQ ID NO: 1909074 - DNA, 25 bp, Homo sapien
gcctctttttatcataacgtcatgg

SEQ ID NO: 1909075 - DNA, 25 bp, Homo sapien
cctggacgtgatcctcattttgttc

SEQ ID NO: 1909076 - DNA, 25 bp, Homo sapien
actatgtacaggcagtgggcctgga

SEQ ID NO: 1909077 - DNA, 25 bp, Homo sapien
caaacaaggacctgaataccttgtt

SEQ ID NO: 1909078 - DNA, 25 bp, Homo sapien
actgagacactatgtacaggcagtg

SEQ ID NO: 1909079 - DNA, 25 bp, Homo sapien
gggtgcaagaaccatggcatctcct

SEQ ID NO: 1909080 - DNA, 25 bp, Homo sapien
ctggcggataagctgattgatgcgt

SEQ ID NO: 1909081 - DNA, 25 bp, Homo sapien
gaaagggtgcaagaaccatggcatc

SEQ ID NO: 1909082 - DNA, 25 bp, Homo sapien
aagggtgcaagaaccatggcatctc

SEQ ID NO: 1909083 - DNA, 25 bp, Homo sapien
ttattcttgacctcggattctccat

SEQ ID NO: 1909084 - DNA, 25 bp, Homo sapien
tcttgacctcggattctccatgttt

SEQ ID NO: 1909085 - DNA, 25 bp, Homo sapien
tgacctcggattctccatgtttcaa

SEQ ID NO: 1909086 - DNA, 25 bp, Homo sapien
tattcttgacctcggattctccatg

SEQ ID NO: 1909087 - DNA, 25 bp, Homo sapien
catttcttatctgtatgcttcaccc

SEQ ID NO: 1909088 - DNA, 25 bp, Homo sapien
tcttatctgtatgcttcaccccaac

SEQ ID NO: 1909089 - DNA, 25 bp, Homo sapien
tttcttatctgtatgcttcacccca

SEQ ID NO: 1909090 - DNA, 25 bp, Homo sapien
tcatttcttatctgtatgcttcacc

SEQ ID NO: 1909091 - DNA, 25 bp, Homo sapien
gcccacggaagccacaccggctgct

SEQ ID NO: 1909092 - DNA, 25 bp, Homo sapien
ttaggaaataaattgctccgagagc

SEQ ID NO: 1909093 - DNA, 25 bp, Homo sapien
gaaataaattgctccgagagcccag

SEQ ID NO: 1909094 - DNA, 25 bp, Homo sapien
ccacaccggctgcttcatgtgctgc

SEQ ID NO: 1909095 - DNA, 25 bp, Homo sapien
taggcccagaagaggtcactggcca

SEQ ID NO: 1909096 - DNA, 25 bp, Homo sapien
ctaggcccagaagaggtcactggcc

SEQ ID NO: 1909097 - DNA, 25 bp, Homo sapien
ggcccagaagaggtcactggccaca

SEQ ID NO: 1909098 - DNA, 25 bp, Homo sapien
gcccagaagaggtcactggccacac

SEQ ID NO: 1909099 - DNA, 25 bp, Homo sapien
ggctttcattacagtcaaaccagga

SEQ ID NO: 1909100 - DNA, 25 bp, Homo sapien
tttcaccaggaggtcaaggtccagg

SEQ ID NO: 1909101 - DNA, 25 bp, Homo sapien
ttgtgtcagcaactaaaccatggct

SEQ ID NO: 1909102 - DNA, 25 bp, Homo sapien
tgtcatgaccaaacccgtgtagcct

SEQ ID NO: 1909103 - DNA, 25 bp, Homo sapien
cttaggtttcctagtgccagcctgg

SEQ ID NO: 1909104 - DNA, 25 bp, Homo sapien
ggtgagtgacctaacacaaggaggt

SEQ ID NO: 1909105 - DNA, 25 bp, Homo sapien
caccagcccgtagggaatgaggatc

SEQ ID NO: 1909106 - DNA, 25 bp, Homo sapien
ctggagctctggtaatcttctgaaa

SEQ ID NO: 1909107 - DNA, 25 bp, Homo sapien
ctataggtgcacgccgcgacgcctg

SEQ ID NO: 1909108 - DNA, 25 bp, Homo sapien
aaaatctattcaccacggattagca

SEQ ID NO: 1909109 - DNA, 25 bp, Homo sapien
gtgcacgccgcgacgcctggctgat

SEQ ID NO: 1909110 - DNA, 25 bp, Homo sapien
taaaaatctattcaccacggattag

SEQ ID NO: 1909111 - DNA, 25 bp, Homo sapien
caccccaagcggactaagataaatc

SEQ ID NO: 1909112 - DNA, 25 bp, Homo sapien
ttataagcaaaacgcagtaacacac

SEQ ID NO: 1909113 - DNA, 25 bp, Homo sapien
tctagaggtgcaataaaatgagtag

SEQ ID NO: 1909114 - DNA, 25 bp, Homo sapien
aagcccaccccaagcggactaagat

SEQ ID NO: 1909115 - DNA, 25 bp, Homo sapien
ctaaaaactaacagccatggcacca

SEQ ID NO: 1909116 - DNA, 25 bp, Homo sapien
tctgcctgtgcaacaaatatctgta

SEQ ID NO: 1909117 - DNA, 25 bp, Homo sapien
caccttgggaggaatggaattctgc

SEQ ID NO: 1909118 - DNA, 25 bp, Homo sapien
caaacagctgtaccaacgagtaaca

SEQ ID NO: 1909119 - DNA, 25 bp, Homo sapien
ccaatgagtcaaaggcaagggagaa

SEQ ID NO: 1909120 - DNA, 25 bp, Homo sapien
taaagcctctgcactagtccaatga

SEQ ID NO: 1909121 - DNA, 25 bp, Homo sapien
tgaaaatcaagtgcgaaactcagcc

SEQ ID NO: 1909122 - DNA, 25 bp, Homo sapien
aactgaagacgaccctctaaaggag

SEQ ID NO: 1909123 - DNA, 25 bp, Homo sapien
aaatctggaatgtagttccttgtgt

SEQ ID NO: 1909124 - DNA, 25 bp, Homo sapien
tctggaatgtagttccttgtgtggc

SEQ ID NO: 1909125 - DNA, 25 bp, Homo sapien
ctggaatgtagttccttgtgtggca

SEQ ID NO: 1909126 - DNA, 25 bp, Homo sapien
ggaatgtagttccttgtgtggcatc

SEQ ID NO: 1909127 - DNA, 25 bp, Homo sapien
gttatcaagcacaaaattttaatct

SEQ ID NO: 1909128 - DNA, 25 bp, Homo sapien
tattccacttttgaaatgacagcca

SEQ ID NO: 1909129 - DNA, 25 bp, Homo sapien
gccacaggattcatgcagaatattt

SEQ ID NO: 1909130 - DNA, 25 bp, Homo sapien
ccatgatgttgtctgcacaagacaa

SEQ ID NO: 1909131 - DNA, 25 bp, Homo sapien
acctaattgattctcatttggcacg

SEQ ID NO: 1909132 - DNA, 25 bp, Homo sapien
tggaatagcgtcttccatgtgggac

SEQ ID NO: 1909133 - DNA, 25 bp, Homo sapien
tggcttcagtgagttacacaaatga

SEQ ID NO: 1909134 - DNA, 25 bp, Homo sapien
caaacatcctatatgcatccatgga

SEQ ID NO: 1909135 - DNA, 25 bp, Homo sapien
ttttcttcacggatgatgctcccaa

SEQ ID NO: 1909136 - DNA, 25 bp, Homo sapien
ggtaatttcgttctttagatttgca

SEQ ID NO: 1909137 - DNA, 25 bp, Homo sapien
tggtaatttcgttctttagatttgc

SEQ ID NO: 1909138 - DNA, 25 bp, Homo sapien
caggacaattcctccaatgaaactg

SEQ ID NO: 1909139 - DNA, 25 bp, Homo sapien
gaggttggagtcacagtgttatttg

SEQ ID NO: 1909140 - DNA, 25 bp, Homo sapien
tccaatgaaactggctgcatcaaag

SEQ ID NO: 1909141 - DNA, 25 bp, Homo sapien
caaaggtagactttcgcacaggttg

SEQ ID NO: 1909142 - DNA, 25 bp, Homo sapien
tacagtatcctgtggcgtaacctaa

SEQ ID NO: 1909143 - DNA, 25 bp, Homo sapien
aattgtaaagggcaacatcgtgcac

SEQ ID NO: 1909144 - DNA, 25 bp, Homo sapien
tgtgccctgggaatgtatcaaacac

SEQ ID NO: 1909145 - DNA, 25 bp, Homo sapien
cacccaaggatacaaagtggtcaat

SEQ ID NO: 1909146 - DNA, 25 bp, Homo sapien
tagtaactgtcttggaagttgtaga

SEQ ID NO: 1909147 - DNA, 25 bp, Homo sapien
gatgtagtaactgtcttggaagttg

SEQ ID NO: 1909148 - DNA, 25 bp, Homo sapien
tgtagtaactgtcttggaagttgta

SEQ ID NO: 1909149 - DNA, 25 bp, Homo sapien
gtaactgtcttggaagttgtagaag

SEQ ID NO: 1909150 - DNA, 25 bp, Homo sapien
tatgcttaacccacgaaagacaggg

SEQ ID NO: 1909151 - DNA, 25 bp, Homo sapien
tctcttcggcagacggtacacatgc

SEQ ID NO: 1909152 - DNA, 25 bp, Homo sapien
gaccaggactctcgtaacaggctga

SEQ ID NO: 1909153 - DNA, 25 bp, Homo sapien
caggcttcagagtgcaagggcttca

SEQ ID NO: 1909154 - DNA, 25 bp, Homo sapien
cagataagcccttgctgctttcccc

SEQ ID NO: 1909155 - DNA, 25 bp, Homo sapien
gcagataagcccttgctgctttccc

SEQ ID NO: 1909156 - DNA, 25 bp, Homo sapien
tgcagataagcccttgctgctttcc

SEQ ID NO: 1909157 - DNA, 25 bp, Homo sapien
atggcaattcacaggaggacccagg

SEQ ID NO: 1909158 - DNA, 25 bp, Homo sapien
tacatcaagagtgaacccagttctc

SEQ ID NO: 1909159 - DNA, 25 bp, Homo sapien
gaaagctgcagagaactacatcaag

SEQ ID NO: 1909160 - DNA, 25 bp, Homo sapien
agtttcttgcacatacttctctggg

SEQ ID NO: 1909161 - DNA, 25 bp, Homo sapien
ttcacattgggatggggcaacccct

SEQ ID NO: 1909162 - DNA, 25 bp, Homo sapien
gttcgtgtaccacctaactatatta

SEQ ID NO: 1909163 - DNA, 25 bp, Homo sapien
gcaccctgtgtgaagtaaaactgat

SEQ ID NO: 1909164 - DNA, 25 bp, Homo sapien
taaaactgatctaatactaatgaaa

SEQ ID NO: 1909165 - DNA, 25 bp, Homo sapien
caccaaaagtgccagaatgaggttt

SEQ ID NO: 1909166 - DNA, 25 bp, Homo sapien
catagcggctaaactgtgatgaatt

SEQ ID NO: 1909167 - DNA, 25 bp, Homo sapien
cctgcaagatgcaaacatagcggct

SEQ ID NO: 1909168 - DNA, 25 bp, Homo sapien
tcaatcaacaatccccagtatcgca

SEQ ID NO: 1909169 - DNA, 25 bp, Homo sapien
acttgacaatcactaactgttgagt

SEQ ID NO: 1909170 - DNA, 25 bp, Homo sapien
caatcactaactgttgagttatgtg

SEQ ID NO: 1909171 - DNA, 25 bp, Homo sapien
cggaacagaagtctgtcgtgttccc

SEQ ID NO: 1909172 - DNA, 25 bp, Homo sapien
tcgtgttccccacttgacaatcact

SEQ ID NO: 1909173 - DNA, 25 bp, Homo sapien
ctttacattctatccaaaagcaggt

SEQ ID NO: 1909174 - DNA, 25 bp, Homo sapien
ttaaaacaggaaacgcagctgtttc

SEQ ID NO: 1909175 - DNA, 25 bp, Homo sapien
gcaggtagtattaacaacgctaaca

SEQ ID NO: 1909176 - DNA, 25 bp, Homo sapien
aacaggaaacgcagctgtttcgacc

SEQ ID NO: 1909177 - DNA, 25 bp, Homo sapien
gaacggactataaaattgggctcta

SEQ ID NO: 1909178 - DNA, 25 bp, Homo sapien
tgtcaatagttcatcctaggccaaa

SEQ ID NO: 1909179 - DNA, 25 bp, Homo sapien
caggacaactattggaagacaccca

SEQ ID NO: 1909180 - DNA, 25 bp, Homo sapien
cagtgcctgatggtatctgtctaac

SEQ ID NO: 1909181 - DNA, 25 bp, Homo sapien
cagactcaagtctgagacacgaacg

SEQ ID NO: 1909182 - DNA, 25 bp, Homo sapien
caagtctgagacacgaacgagcatt

SEQ ID NO: 1909183 - DNA, 25 bp, Homo sapien
agtctgagacacgaacgagcattac

SEQ ID NO: 1909184 - DNA, 25 bp, Homo sapien
gactcaagtctgagacacgaacgag

SEQ ID NO: 1909185 - DNA, 25 bp, Homo sapien
gaggcgccgggagggtgaacaacca

SEQ ID NO: 1909186 - DNA, 25 bp, Homo sapien
gagggtgaacaaccagtggcaggga

SEQ ID NO: 1909187 - DNA, 25 bp, Homo sapien
gccaacctcagaggcgcgacgcccg

SEQ ID NO: 1909188 - DNA, 25 bp, Homo sapien
cccaccgccaacctcagaggcgcga

SEQ ID NO: 1909189 - DNA, 25 bp, Homo sapien
tcaccggcgccgaggttacgttgga

SEQ ID NO: 1909190 - DNA, 25 bp, Homo sapien
tggtgccggagtggtgaccagcggg

SEQ ID NO: 1909191 - DNA, 25 bp, Homo sapien
gtgaccagcgggagggacgtcaccg

SEQ ID NO: 1909192 - DNA, 25 bp, Homo sapien
tggagatgggcgctaaagtcgtcac

SEQ ID NO: 1909193 - DNA, 25 bp, Homo sapien
cgggtgctgggtcgtgttcttgtcc

SEQ ID NO: 1909194 - DNA, 25 bp, Homo sapien
ggtggcggcccaaagcagtgagcgg

SEQ ID NO: 1909195 - DNA, 25 bp, Homo sapien
gcagtgagcgggagagccgcgacat

SEQ ID NO: 1909196 - DNA, 25 bp, Homo sapien
ttcttgtccgcggacagcacgcaga

SEQ ID NO: 1909197 - DNA, 25 bp, Homo sapien
cctcagcgctggcgttcgggagaaa

SEQ ID NO: 1909198 - DNA, 25 bp, Homo sapien
cgttcgggagaaagctaaggctcgc

SEQ ID NO: 1909199 - DNA, 25 bp, Homo sapien
ggagaaagctaaggctcgcaacgct

SEQ ID NO: 1909200 - DNA, 25 bp, Homo sapien
taaggctcgcaacgctcagtcaacc

SEQ ID NO: 1909201 - DNA, 25 bp, Homo sapien
acgcttgtcatgtgttttaaccggg

SEQ ID NO: 1909202 - DNA, 25 bp, Homo sapien
acaaagggaccatgaactcgccatc

SEQ ID NO: 1909203 - DNA, 25 bp, Homo sapien
gttttgaatcctggtggcaagccca

SEQ ID NO: 1909204 - DNA, 25 bp, Homo sapien
taaccgggctccttgcaaagaatca

SEQ ID NO: 1909205 - DNA, 25 bp, Homo sapien
taaatttatcgagtgcttacagcag

SEQ ID NO: 1909206 - DNA, 25 bp, Homo sapien
taccgttttgtaagcgtagccactg

SEQ ID NO: 1909207 - DNA, 25 bp, Homo sapien
ggtgaaaggtacacaggactgctct

SEQ ID NO: 1909208 - DNA, 25 bp, Homo sapien
gagaatgtaacataggcggtctgct

SEQ ID NO: 1909209 - DNA, 25 bp, Homo sapien
tggtcccgcagctcaagagactggg

SEQ ID NO: 1909210 - DNA, 25 bp, Homo sapien
gtaacaaaattctcaaccaacagta

SEQ ID NO: 1909211 - DNA, 25 bp, Homo sapien
tggttgctggtattggtcccgcagc

SEQ ID NO: 1909212 - DNA, 25 bp, Homo sapien
taagaagtccagagtaggtggttgc

SEQ ID NO: 1909213 - DNA, 25 bp, Homo sapien
tagatgaggcaacctacagtgtctg

SEQ ID NO: 1909214 - DNA, 25 bp, Homo sapien
ccacccgtggctgcaaaggagtcta

SEQ ID NO: 1909215 - DNA, 25 bp, Homo sapien
gagtctaggaaattgagtaccaccc

SEQ ID NO: 1909216 - DNA, 25 bp, Homo sapien
gggcaggaccactggcgttctattc

SEQ ID NO: 1909217 - DNA, 25 bp, Homo sapien
cacaaacagctgatcagatacaaag

SEQ ID NO: 1909218 - DNA, 25 bp, Homo sapien
caaacagctgatcagatacaaagta

SEQ ID NO: 1909219 - DNA, 25 bp, Homo sapien
ttaaatccacaaacagctgatcaga

SEQ ID NO: 1909220 - DNA, 25 bp, Homo sapien
atccacaaacagctgatcagataca

SEQ ID NO: 1909221 - DNA, 25 bp, Homo sapien
aattctagttgtttaagcacttctg

SEQ ID NO: 1909222 - DNA, 25 bp, Homo sapien
cagtaattctacacatatgtattgg

SEQ ID NO: 1909223 - DNA, 25 bp, Homo sapien
tatgtattggtctttcattctgtgt

SEQ ID NO: 1909224 - DNA, 25 bp, Homo sapien
tcaagcataaggatctccactgtca

SEQ ID NO: 1909225 - DNA, 25 bp, Homo sapien
ttataggagcatggtcagtgccgac

SEQ ID NO: 1909226 - DNA, 25 bp, Homo sapien
caagtgtactctagccctctctttg

SEQ ID NO: 1909227 - DNA, 25 bp, Homo sapien
gacaccaagtgtactctagccctct

SEQ ID NO: 1909228 - DNA, 25 bp, Homo sapien
tggtcagtgccgacaccaagtgtac

SEQ ID NO: 1909229 - DNA, 25 bp, Homo sapien
tggatcagagaggaatattctttat

SEQ ID NO: 1909230 - DNA, 25 bp, Homo sapien
tgtcttggatcagagaggaatattc

SEQ ID NO: 1909231 - DNA, 25 bp, Homo sapien
tcttggatcagagaggaatattctt

SEQ ID NO: 1909232 - DNA, 25 bp, Homo sapien
ttggaaggagtgcctgtcttggatc

SEQ ID NO: 1909233 - DNA, 25 bp, Homo sapien
cagtgtgatatagaattgtgacccg

SEQ ID NO: 1909234 - DNA, 25 bp, Homo sapien
ttttctatctagataaggagttgct

SEQ ID NO: 1909235 - DNA, 25 bp, Homo sapien
gacccgttgctgtgacggcctttgt

SEQ ID NO: 1909236 - DNA, 25 bp, Homo sapien
tgttggccattccaagtactcctct

SEQ ID NO: 1909237 - DNA, 25 bp, Homo sapien
gatactacaacagtctaaggatggg

SEQ ID NO: 1909238 - DNA, 25 bp, Homo sapien
agggataatcagcagagactcaggg

SEQ ID NO: 1909239 - DNA, 25 bp, Homo sapien
tgcctccgagcacaaagcatttggg

SEQ ID NO: 1909240 - DNA, 25 bp, Homo sapien
cagatcagtctcctactggacagga

SEQ ID NO: 1909241 - DNA, 25 bp, Homo sapien
aaaatgagtaagacctcgtatttga

SEQ ID NO: 1909242 - DNA, 25 bp, Homo sapien
tatttgatagaacaagagggcaact

SEQ ID NO: 1909243 - DNA, 25 bp, Homo sapien
tctcaggtacctcataaagatacac

SEQ ID NO: 1909244 - DNA, 25 bp, Homo sapien
agaacaagagggcaactatagtcaa

SEQ ID NO: 1909245 - DNA, 25 bp, Homo sapien
aatagtctgcaatggactagatgcc

SEQ ID NO: 1909246 - DNA, 25 bp, Homo sapien
tccgccagattgtctagtgtcagtt

SEQ ID NO: 1909247 - DNA, 25 bp, Homo sapien
ggaaaggtggtcacactcagtgtta

SEQ ID NO: 1909248 - DNA, 25 bp, Homo sapien
acagttttgatctacagttgaccct

SEQ ID NO: 1909249 - DNA, 25 bp, Homo sapien
cagggagaatgtattgatgtaacca

SEQ ID NO: 1909250 - DNA, 25 bp, Homo sapien
ttcctgccttaaatgatagtgcttg

SEQ ID NO: 1909251 - DNA, 25 bp, Homo sapien
tttctccagcggaaacttgttttga

SEQ ID NO: 1909252 - DNA, 25 bp, Homo sapien
gctttatggttaggagcagtctgga

SEQ ID NO: 1909253 - DNA, 25 bp, Homo sapien
cttttgtctgccataaaacttgttc

SEQ ID NO: 1909254 - DNA, 25 bp, Homo sapien
gtcacttttgtctgccataaaactt

SEQ ID NO: 1909255 - DNA, 25 bp, Homo sapien
tgtctgccataaaacttgttcaggt

SEQ ID NO: 1909256 - DNA, 25 bp, Homo sapien
aggtcacttttgtctgccataaaac

SEQ ID NO: 1909257 - DNA, 25 bp, Homo sapien
ccaaggaaagctatgaacagagaac

SEQ ID NO: 1909258 - DNA, 25 bp, Homo sapien
tgttactgatcgctatagccaagga

SEQ ID NO: 1909259 - DNA, 25 bp, Homo sapien
gggtcaactgtatcctatgagcatg

SEQ ID NO: 1909260 - DNA, 25 bp, Homo sapien
aaggccattgcgaccttatgcagga

SEQ ID NO: 1909261 - DNA, 25 bp, Homo sapien
tgatgccattcccaacagttccatc

SEQ ID NO: 1909262 - DNA, 25 bp, Homo sapien
ttttgatgccattcccaacagttcc

SEQ ID NO: 1909263 - DNA, 25 bp, Homo sapien
ggataattttgatgccattcccaac

SEQ ID NO: 1909264 - DNA, 25 bp, Homo sapien
tatcctggataattttgatgccatt

SEQ ID NO: 1909265 - DNA, 25 bp, Homo sapien
aaatcgactctccattatctccttt

SEQ ID NO: 1909266 - DNA, 25 bp, Homo sapien
taaatcgactctccattatctcctt

SEQ ID NO: 1909267 - DNA, 25 bp, Homo sapien
ctgtactattcgatgaaaaatggaa

SEQ ID NO: 1909268 - DNA, 25 bp, Homo sapien
cctccttgtatccagccattctgta

SEQ ID NO: 1909269 - DNA, 25 bp, Homo sapien
aatgtagtcttatgccacgttgaga

SEQ ID NO: 1909270 - DNA, 25 bp, Homo sapien
tgtaatgtagtcttatgccacgttg

SEQ ID NO: 1909271 - DNA, 25 bp, Homo sapien
ttttgggacacacatcacagtatag

SEQ ID NO: 1909272 - DNA, 25 bp, Homo sapien
atgttttgggacacacatcacagta

SEQ ID NO: 1909273 - DNA, 25 bp, Homo sapien
tacatgttttgggacacacatcaca

SEQ ID NO: 1909274 - DNA, 25 bp, Homo sapien
ttttacatgttttgggacacacatc

SEQ ID NO: 1909275 - DNA, 25 bp, Homo sapien
ttggagaagaatcaatacaaatgtc

SEQ ID NO: 1909276 - DNA, 25 bp, Homo sapien
tcaatcttccaattggagaagaatc

SEQ ID NO: 1909277 - DNA, 25 bp, Homo sapien
caatcttccaattggagaagaatca

SEQ ID NO: 1909278 - DNA, 25 bp, Homo sapien
aaagtgcagagggtttaatgtcaac

SEQ ID NO: 1909279 - DNA, 25 bp, Homo sapien
tcagtgagtgcgtcataaagtgcag

SEQ ID NO: 1909280 - DNA, 25 bp, Homo sapien
gaacttagcggaaaaatcctcagtg

SEQ ID NO: 1909281 - DNA, 25 bp, Homo sapien
ggtgtctcttaagaacttagcggaa

SEQ ID NO: 1909282 - DNA, 25 bp, Homo sapien
tttctgcagatccaatgcatcaccc

SEQ ID NO: 1909283 - DNA, 25 bp, Homo sapien
atttctgcagatccaatgcatcacc

SEQ ID NO: 1909284 - DNA, 25 bp, Homo sapien
ttctgcagatccaatgcatcaccca

SEQ ID NO: 1909285 - DNA, 25 bp, Homo sapien
ctaatataggatcttcaaatttgga

SEQ ID NO: 1909286 - DNA, 25 bp, Homo sapien
cctgtagatattgatgccatgcaaa

SEQ ID NO: 1909287 - DNA, 25 bp, Homo sapien
tctcctgtagatattgatgccatgc

SEQ ID NO: 1909288 - DNA, 25 bp, Homo sapien
gcaaattcttgaagaggaactaata

SEQ ID NO: 1909289 - DNA, 25 bp, Homo sapien
caaaaatcgcttgggccgaggtggc

SEQ ID NO: 1909290 - DNA, 25 bp, Homo sapien
ggattaccttatctcccagcgcggt

SEQ ID NO: 1909291 - DNA, 25 bp, Homo sapien
tcgattggaacgcagtgacggctct

SEQ ID NO: 1909292 - DNA, 25 bp, Homo sapien
taaaaggttgctgatcccgtctgcc

SEQ ID NO: 1909293 - DNA, 25 bp, Homo sapien
cgctcttcgcaatctgaaagttggg

SEQ ID NO: 1909294 - DNA, 25 bp, Homo sapien
ctcagcggcgctcttcgcaatctga

SEQ ID NO: 1909295 - DNA, 25 bp, Homo sapien
ggcgctcttcgcaatctgaaagttg

SEQ ID NO: 1909296 - DNA, 25 bp, Homo sapien
agcggcgctcttcgcaatctgaaag

SEQ ID NO: 1909297 - DNA, 25 bp, Homo sapien
agcgacggcgagccgcacctagcgt

SEQ ID NO: 1909298 - DNA, 25 bp, Homo sapien
cggcgagccgcacctagcgtgcggg

SEQ ID NO: 1909299 - DNA, 25 bp, Homo sapien
gcagcgacggcgagccgcacctagc

SEQ ID NO: 1909300 - DNA, 25 bp, Homo sapien
gacggcgagccgcacctagcgtgcg

SEQ ID NO: 1909301 - DNA, 25 bp, Homo sapien
aaacactgcgcgtcgctccggcaac

SEQ ID NO: 1909302 - DNA, 25 bp, Homo sapien
ttgcgcctgttgctgggccgccggc

SEQ ID NO: 1909303 - DNA, 25 bp, Homo sapien
gcgtcgctccggcaaccgcgcggcc

SEQ ID NO: 1909304 - DNA, 25 bp, Homo sapien
gacgcccggtgaccccaaacactgc

SEQ ID NO: 1909305 - DNA, 25 bp, Homo sapien
ttggcggcccgcctgattgggaaca

SEQ ID NO: 1909306 - DNA, 25 bp, Homo sapien
cggatttcggcagcggatcgccttt

SEQ ID NO: 1909307 - DNA, 25 bp, Homo sapien
tgcgactgcggatcttcaacctcaa

SEQ ID NO: 1909308 - DNA, 25 bp, Homo sapien
tcaactgctggtgagtgcgtctgcg

SEQ ID NO: 1909309 - DNA, 25 bp, Homo sapien
ttccgtacttgagcaagcaccgggc

SEQ ID NO: 1909310 - DNA, 25 bp, Homo sapien
cattccgtacttgagcaagcaccgg

SEQ ID NO: 1909311 - DNA, 25 bp, Homo sapien
gtacttgagcaagcaccgggccgac

SEQ ID NO: 1909312 - DNA, 25 bp, Homo sapien
gggcattccgtacttgagcaagcac

SEQ ID NO: 1909313 - DNA, 25 bp, Homo sapien
aatggcttatatagggcccaggctg

SEQ ID NO: 1909314 - DNA, 25 bp, Homo sapien
gggaagctgccatactgctctggac

SEQ ID NO: 1909315 - DNA, 25 bp, Homo sapien
cttcgctagctatgtgattggcctg

SEQ ID NO: 1909316 - DNA, 25 bp, Homo sapien
attctacctcttccacgtacaggag

SEQ ID NO: 1909317 - DNA, 25 bp, Homo sapien
ctttctttgtgggaacgaaagcaga

SEQ ID NO: 1909318 - DNA, 25 bp, Homo sapien
tgtgggaacgaaagcagacggccca

SEQ ID NO: 1909319 - DNA, 25 bp, Homo sapien
tttgtgggaacgaaagcagacggcc

SEQ ID NO: 1909320 - DNA, 25 bp, Homo sapien
ttctttgtgggaacgaaagcagacg

SEQ ID NO: 1909321 - DNA, 25 bp, Homo sapien
aagcggatgagggcatctctctggt

SEQ ID NO: 1909322 - DNA, 25 bp, Homo sapien
tctctggttgaccaaatccaccagc

SEQ ID NO: 1909323 - DNA, 25 bp, Homo sapien
ctctggttgaccaaatccaccagct

SEQ ID NO: 1909324 - DNA, 25 bp, Homo sapien
catgtagcctcgtagctcctggtcc

SEQ ID NO: 1909325 - DNA, 25 bp, Homo sapien
tcatgtagcctcgtagctcctggtc

SEQ ID NO: 1909326 - DNA, 25 bp, Homo sapien
cccggttcatgtagcctcgtagctc

SEQ ID NO: 1909327 - DNA, 25 bp, Homo sapien
ggttcatgtagcctcgtagctcctg

SEQ ID NO: 1909328 - DNA, 25 bp, Homo sapien
gcagagctgtctaaggtgcccaagg

SEQ ID NO: 1909329 - DNA, 25 bp, Homo sapien
ctgtcctacccatagtttcttttgc

SEQ ID NO: 1909330 - DNA, 25 bp, Homo sapien
gtgatcatgagctcggcctcctcag

SEQ ID NO: 1909331 - DNA, 25 bp, Homo sapien
tcttgtcaacgagctgtagcagctg

SEQ ID NO: 1909332 - DNA, 25 bp, Homo sapien
agctgtcctacccatagtttctttt

SEQ ID NO: 1909333 - DNA, 25 bp, Homo sapien
tctcatttagtcgccgttggatggt

SEQ ID NO: 1909334 - DNA, 25 bp, Homo sapien
aatctcatttagtcgccgttggatg

SEQ ID NO: 1909335 - DNA, 25 bp, Homo sapien
tcaatctcatttagtcgccgttgga

SEQ ID NO: 1909336 - DNA, 25 bp, Homo sapien
caatctcatttagtcgccgttggat

SEQ ID NO: 1909337 - DNA, 25 bp, Homo sapien
catgttgggtagttattcatggtgc

SEQ ID NO: 1909338 - DNA, 25 bp, Homo sapien
cttcgcacggcgcagcagagtccga

SEQ ID NO: 1909339 - DNA, 25 bp, Homo sapien
ctcctcctccttcgcacggcgcagc

SEQ ID NO: 1909340 - DNA, 25 bp, Homo sapien
cgacgccatgttgggtagttattca

SEQ ID NO: 1909341 - DNA, 25 bp, Homo sapien
aggtttctcctgtagtgggctggag

SEQ ID NO: 1909342 - DNA, 25 bp, Homo sapien
gttttgtggctgcacgctggcccac

SEQ ID NO: 1909343 - DNA, 25 bp, Homo sapien
tttgtggctgcacgctggcccactc

SEQ ID NO: 1909344 - DNA, 25 bp, Homo sapien
tgtggctgcacgctggcccactcac

SEQ ID NO: 1909345 - DNA, 25 bp, Homo sapien
ctggagaagggactctctttttcct

SEQ ID NO: 1909346 - DNA, 25 bp, Homo sapien
gaagaactgagacgttctactgcct

SEQ ID NO: 1909347 - DNA, 25 bp, Homo sapien
gaactgagacgttctactgcctcca

SEQ ID NO: 1909348 - DNA, 25 bp, Homo sapien
tgagacgttctactgcctccagcgc

SEQ ID NO: 1909349 - DNA, 25 bp, Homo sapien
agaagaagaactgagacgttctact

SEQ ID NO: 1909350 - DNA, 25 bp, Homo sapien
tggtggtgacggaggccctgcaagt

SEQ ID NO: 1909351 - DNA, 25 bp, Homo sapien
atggtggtgacggaggccctgcaag

SEQ ID NO: 1909352 - DNA, 25 bp, Homo sapien
gcatggtggtgacggaggccctgca

SEQ ID NO: 1909353 - DNA, 25 bp, Homo sapien
agcatggtggtgacggaggccctgc

SEQ ID NO: 1909354 - DNA, 25 bp, Homo sapien
tggtaaagactgaatgtatgtgttg

SEQ ID NO: 1909355 - DNA, 25 bp, Homo sapien
ctggtaaagactgaatgtatgtgtt

SEQ ID NO: 1909356 - DNA, 25 bp, Homo sapien
tctccagggcgtggcgggccaaggc

SEQ ID NO: 1909357 - DNA, 25 bp, Homo sapien
gggaggcttgggtggaggctccatt

SEQ ID NO: 1909358 - DNA, 25 bp, Homo sapien
ttaagggaggacaaccgctggcgct

SEQ ID NO: 1909359 - DNA, 25 bp, Homo sapien
tccgggctggagaggcggatctgcc

SEQ ID NO: 1909360 - DNA, 25 bp, Homo sapien
tggaacaggaccggccccctcctgc

SEQ ID NO: 1909361 - DNA, 25 bp, Homo sapien
tgggatctggaacaggaccggcccc

SEQ ID NO: 1909362 - DNA, 25 bp, Homo sapien
acaggaccggccccctcctgcgagg

SEQ ID NO: 1909363 - DNA, 25 bp, Homo sapien
ctgggatctggaacaggaccggccc

SEQ ID NO: 1909364 - DNA, 25 bp, Homo sapien
ggcctggtggcatgctattctcact

SEQ ID NO: 1909365 - DNA, 25 bp, Homo sapien
gcatgctattctcacttggtgtggg

SEQ ID NO: 1909366 - DNA, 25 bp, Homo sapien
ggtggcatgctattctcacttggtg

SEQ ID NO: 1909367 - DNA, 25 bp, Homo sapien
cctggtggcatgctattctcacttg

SEQ ID NO: 1909368 - DNA, 25 bp, Homo sapien
gagcaaaggtgagccttggcattca

SEQ ID NO: 1909369 - DNA, 25 bp, Homo sapien
gccaccccttcggagcaaaggtgag

SEQ ID NO: 1909370 - DNA, 25 bp, Homo sapien
ctagtagaagacgacattcagttac

SEQ ID NO: 1909371 - DNA, 25 bp, Homo sapien
gcttacatgctagtagaagacgaca

SEQ ID NO: 1909372 - DNA, 25 bp, Homo sapien
aaagcgctggtttgacgagaccctc

SEQ ID NO: 1909373 - DNA, 25 bp, Homo sapien
cccagcaaagcgctggtttgacgag

SEQ ID NO: 1909374 - DNA, 25 bp, Homo sapien
gcaaagcgctggtttgacgagaccc

SEQ ID NO: 1909375 - DNA, 25 bp, Homo sapien
gctggtttgacgagaccctcttcct

SEQ ID NO: 1909376 - DNA, 25 bp, Homo sapien
tcagggcctctatcgctgccttccg

SEQ ID NO: 1909377 - DNA, 25 bp, Homo sapien
tgccttccgctttgtggtctgtctg

SEQ ID NO: 1909378 - DNA, 25 bp, Homo sapien
ctctatcgctgccttccgctttgtg

SEQ ID NO: 1909379 - DNA, 25 bp, Homo sapien
tatcgctgccttccgctttgtggtc

SEQ ID NO: 1909380 - DNA, 25 bp, Homo sapien
gctcgtagccacctggccacagtgt

SEQ ID NO: 1909381 - DNA, 25 bp, Homo sapien
ggtggaagaaatggccgttgacaca

SEQ ID NO: 1909382 - DNA, 25 bp, Homo sapien
cctcacaggtatggcagcggaagca

SEQ ID NO: 1909383 - DNA, 25 bp, Homo sapien
acagaggcgttccaggacatagagg

SEQ ID NO: 1909384 - DNA, 25 bp, Homo sapien
ctttccctcccatgaaacgcccctg

SEQ ID NO: 1909385 - DNA, 25 bp, Homo sapien
gggtcaggtggagccaaggccagct

SEQ ID NO: 1909386 - DNA, 25 bp, Homo sapien
gcctctgcctgcacacaaagcctgg

SEQ ID NO: 1909387 - DNA, 25 bp, Homo sapien
acagggtcaggtggagccaaggcca

SEQ ID NO: 1909388 - DNA, 25 bp, Homo sapien
ggtcaggtggcacctcagtacttgg

SEQ ID NO: 1909389 - DNA, 25 bp, Homo sapien
gggtgtcaggggtacaccaggctct

SEQ ID NO: 1909390 - DNA, 25 bp, Homo sapien
ggggtgtcaggggtacaccaggctc

SEQ ID NO: 1909391 - DNA, 25 bp, Homo sapien
ggggatgcgtacagatgaacacaag

SEQ ID NO: 1909392 - DNA, 25 bp, Homo sapien
ggatgcgtacagatgaacacaaggg

SEQ ID NO: 1909393 - DNA, 25 bp, Homo sapien
gaggggatgcgtacagatgaacaca

SEQ ID NO: 1909394 - DNA, 25 bp, Homo sapien
ctgggaggggatgcgtacagatgaa

SEQ ID NO: 1909395 - DNA, 25 bp, Homo sapien
gaaatagggaagacagtaccaggaa

SEQ ID NO: 1909396 - DNA, 25 bp, Homo sapien
acaagacatgggatgagaaataggg

SEQ ID NO: 1909397 - DNA, 25 bp, Homo sapien
gataaaatgtggggtaggagaccga

SEQ ID NO: 1909398 - DNA, 25 bp, Homo sapien
atgagaaatagggaagacagtacca

SEQ ID NO: 1909399 - DNA, 25 bp, Homo sapien
tccaagcgcagcttcttgccaccag

SEQ ID NO: 1909400 - DNA, 25 bp, Homo sapien
aagcgcagcttcttgccaccagcat

SEQ ID NO: 1909401 - DNA, 25 bp, Homo sapien
ctccaagcgcagcttcttgccacca

SEQ ID NO: 1909402 - DNA, 25 bp, Homo sapien
cgcagcttcttgccaccagcatcct

SEQ ID NO: 1909403 - DNA, 25 bp, Homo sapien
agtgtgatgttttgaggtcccagtc

SEQ ID NO: 1909404 - DNA, 25 bp, Homo sapien
gatgttttgaggtcccagtcctccc

SEQ ID NO: 1909405 - DNA, 25 bp, Homo sapien
taagtgtgatgttttgaggtcccag

SEQ ID NO: 1909406 - DNA, 25 bp, Homo sapien
tgtgatgttttgaggtcccagtcct

SEQ ID NO: 1909407 - DNA, 25 bp, Homo sapien
gatctccactgggtacccccctgcc

SEQ ID NO: 1909408 - DNA, 25 bp, Homo sapien
tctccactgggtacccccctgccca

SEQ ID NO: 1909409 - DNA, 25 bp, Homo sapien
tttactaaggaataatacagcactg

SEQ ID NO: 1909410 - DNA, 25 bp, Homo sapien
aggaataatacagcactggaggtcc

SEQ ID NO: 1909411 - DNA, 25 bp, Homo sapien
gaagtttactaaggaataatacagc

SEQ ID NO: 1909412 - DNA, 25 bp, Homo sapien
gtcctctgaagtttactaaggaata

SEQ ID NO: 1909413 - DNA, 25 bp, Homo sapien
tgtactctcagaacagacagtcact

SEQ ID NO: 1909414 - DNA, 25 bp, Homo sapien
ctcagagggcgccttcttcctcttt

SEQ ID NO: 1909415 - DNA, 25 bp, Homo sapien
tctcagaacagacagtcactctcca

SEQ ID NO: 1909416 - DNA, 25 bp, Homo sapien
tggggggtgccaatactgtactctc

SEQ ID NO: 1909417 - DNA, 25 bp, Homo sapien
gccacctttagtgcccaagcagttg

SEQ ID NO: 1909418 - DNA, 25 bp, Homo sapien
aggtaggcaatgaggcccagtgggt

SEQ ID NO: 1909419 - DNA, 25 bp, Homo sapien
tccctgctaccacggcctgtgcaga

SEQ ID NO: 1909420 - DNA, 25 bp, Homo sapien
accaccggtgtgatgcccagctcat

SEQ ID NO: 1909421 - DNA, 25 bp, Homo sapien
ctgtgggatgtcagggagaaaagcc

SEQ ID NO: 1909422 - DNA, 25 bp, Homo sapien
tgtgggatgtcagggagaaaagcca

SEQ ID NO: 1909423 - DNA, 25 bp, Homo sapien
gtgggatgtcagggagaaaagccaa

SEQ ID NO: 1909424 - DNA, 25 bp, Homo sapien
gggcctgtgccattcacaaagctct

SEQ ID NO: 1909425 - DNA, 25 bp, Homo sapien
tgaaggtaggtgtgtagtctctgct

SEQ ID NO: 1909426 - DNA, 25 bp, Homo sapien
ctagagacaagaacctagccccact

SEQ ID NO: 1909427 - DNA, 25 bp, Homo sapien
tctcacaagactgtcggcagatgca

SEQ ID NO: 1909428 - DNA, 25 bp, Homo sapien
gctgcagccggtacaccagggcaca

SEQ ID NO: 1909429 - DNA, 25 bp, Homo sapien
gggcacacagagctagcccatcagc

SEQ ID NO: 1909430 - DNA, 25 bp, Homo sapien
gaagacaaatcggagacgtggactc

SEQ ID NO: 1909431 - DNA, 25 bp, Homo sapien
gtggactcccgggtacccagctgtc

SEQ ID NO: 1909432 - DNA, 25 bp, Homo sapien
tcccaggcatatagggagcccagct

SEQ ID NO: 1909433 - DNA, 25 bp, Homo sapien
catcccaggcatatagggagcccag

SEQ ID NO: 1909434 - DNA, 25 bp, Homo sapien
caggcatatagggagcccagctgct

SEQ ID NO: 1909435 - DNA, 25 bp, Homo sapien
ccatcccaggcatatagggagccca

SEQ ID NO: 1909436 - DNA, 25 bp, Homo sapien
cactatggctgtaacggtggttcaa

SEQ ID NO: 1909437 - DNA, 25 bp, Homo sapien
catagagggcagcagactaaactgg

SEQ ID NO: 1909438 - DNA, 25 bp, Homo sapien
ggtggttcaaacactaacgcgctta

SEQ ID NO: 1909439 - DNA, 25 bp, Homo sapien
tgaaatcgcaactggccacatagag

SEQ ID NO: 1909440 - DNA, 25 bp, Homo sapien
accagccaacaatgagtgctccggc

SEQ ID NO: 1909441 - DNA, 25 bp, Homo sapien
aacaatgagtgctccggcacgctgc

SEQ ID NO: 1909442 - DNA, 25 bp, Homo sapien
gcctgtgcggtgctgcccctccgtt

SEQ ID NO: 1909443 - DNA, 25 bp, Homo sapien
gagtgctccggcacgctgctcctgt

SEQ ID NO: 1909444 - DNA, 25 bp, Homo sapien
catattttggtcaccccttgggagg

SEQ ID NO: 1909445 - DNA, 25 bp, Homo sapien
tgggtagtacatattttggtcaccc

SEQ ID NO: 1909446 - DNA, 25 bp, Homo sapien
ccccttgggaggaaggcctgctcac

SEQ ID NO: 1909447 - DNA, 25 bp, Homo sapien
tagtacatattttggtcaccccttg

SEQ ID NO: 1909448 - DNA, 25 bp, Homo sapien
tgtcgttgttcctctgcacaggctc

SEQ ID NO: 1909449 - DNA, 25 bp, Homo sapien
ccctgtatctgtcttgtcgttgttc

SEQ ID NO: 1909450 - DNA, 25 bp, Homo sapien
ttgtcgttgttcctctgcacaggct

SEQ ID NO: 1909451 - DNA, 25 bp, Homo sapien
cctgtatctgtcttgtcgttgttcc

SEQ ID NO: 1909452 - DNA, 25 bp, Homo sapien
ctagcacatcatacaggtctcgtac

SEQ ID NO: 1909453 - DNA, 25 bp, Homo sapien
taggattgaccccaaagggcagcga

SEQ ID NO: 1909454 - DNA, 25 bp, Homo sapien
aaggcagccccgctcaggtctcaag

SEQ ID NO: 1909455 - DNA, 25 bp, Homo sapien
tgagtccaggggtaagggcctgccg

SEQ ID NO: 1909456 - DNA, 25 bp, Homo sapien
ctcaggtctcaaggcaggctggcca

SEQ ID NO: 1909457 - DNA, 25 bp, Homo sapien
gctggtgggtgtgtcgggggtctga

SEQ ID NO: 1909458 - DNA, 25 bp, Homo sapien
cttgggaaggctggtgggtgtgtcg

SEQ ID NO: 1909459 - DNA, 25 bp, Homo sapien
aggctggtgggtgtgtcgggggtct

SEQ ID NO: 1909460 - DNA, 25 bp, Homo sapien
tgggaaggctggtgggtgtgtcggg

SEQ ID NO: 1909461 - DNA, 25 bp, Homo sapien
atactgggccacattgcgatgcatg

SEQ ID NO: 1909462 - DNA, 25 bp, Homo sapien
cacattgcgatgcatgttttctggg

SEQ ID NO: 1909463 - DNA, 25 bp, Homo sapien
tcactgcccggaggttcaggttggg

SEQ ID NO: 1909464 - DNA, 25 bp, Homo sapien
tgacagaagctggtacaggctctca

SEQ ID NO: 1909465 - DNA, 25 bp, Homo sapien
aggaagccccgtgccactccagtgc

SEQ ID NO: 1909466 - DNA, 25 bp, Homo sapien
ctctgcccaccgcttcaccatccag

SEQ ID NO: 1909467 - DNA, 25 bp, Homo sapien
tcagccaacacctctagggactcag

SEQ ID NO: 1909468 - DNA, 25 bp, Homo sapien
tccaggctgcatcaaaggctgccag

SEQ ID NO: 1909469 - DNA, 25 bp, Homo sapien
gtgtcagaggaataggaagcagctc

SEQ ID NO: 1909470 - DNA, 25 bp, Homo sapien
cagggagaatccaacaggtgcatcc

SEQ ID NO: 1909471 - DNA, 25 bp, Homo sapien
gcagctcagggagaatccaacaggt

SEQ ID NO: 1909472 - DNA, 25 bp, Homo sapien
tgcaggcagacctttttatcccctc

SEQ ID NO: 1909473 - DNA, 25 bp, Homo sapien
tcttgcacacgagcagaactctctg

SEQ ID NO: 1909474 - DNA, 25 bp, Homo sapien
tctagtttcccgagcttgccatggg

SEQ ID NO: 1909475 - DNA, 25 bp, Homo sapien
catcatgctcgtgaagtcaaaggca

SEQ ID NO: 1909476 - DNA, 25 bp, Homo sapien
ctgcccgggtaaagcgctgcagagc

SEQ ID NO: 1909477 - DNA, 25 bp, Homo sapien
gtgggtgtcgtccttgtagtacaca

SEQ ID NO: 1909478 - DNA, 25 bp, Homo sapien
gtgtcgtccttgtagtacacaatgt

SEQ ID NO: 1909479 - DNA, 25 bp, Homo sapien
aaagtagtgggtgtcgtccttgtag

SEQ ID NO: 1909480 - DNA, 25 bp, Homo sapien
aagtagtgggtgtcgtccttgtagt

SEQ ID NO: 1909481 - DNA, 25 bp, Homo sapien
gcttaggctgcggtgagtgctccac

SEQ ID NO: 1909482 - DNA, 25 bp, Homo sapien
cacctggtcgcatggcagtgcaaaa

SEQ ID NO: 1909483 - DNA, 25 bp, Homo sapien
caactagggctgtgcttgcttaatc

SEQ ID NO: 1909484 - DNA, 25 bp, Homo sapien
ttcatgctgggtgatcaactagggc

SEQ ID NO: 1909485 - DNA, 25 bp, Homo sapien
gagttccttgcagtgaggacaagtt

SEQ ID NO: 1909486 - DNA, 25 bp, Homo sapien
aaacagaaaagtgtggagttccttg

SEQ ID NO: 1909487 - DNA, 25 bp, Homo sapien
gaaaagtgtggagttccttgcagtg

SEQ ID NO: 1909488 - DNA, 25 bp, Homo sapien
gtggagttccttgcagtgaggacaa

SEQ ID NO: 1909489 - DNA, 25 bp, Homo sapien
acaaagttggctgtgatgccaatgg

SEQ ID NO: 1909490 - DNA, 25 bp, Homo sapien
ctggaagaagctctggttgtagatc

SEQ ID NO: 1909491 - DNA, 25 bp, Homo sapien
gtgcgtccattcacaaagttggctg

SEQ ID NO: 1909492 - DNA, 25 bp, Homo sapien
gccagtttgcctcgcatttctcgaa

SEQ ID NO: 1909493 - DNA, 25 bp, Homo sapien
cttcagggacgaatttacctcctgc

SEQ ID NO: 1909494 - DNA, 25 bp, Homo sapien
gttggagctgggcacgccagccact

SEQ ID NO: 1909495 - DNA, 25 bp, Homo sapien
tcctgcagccgagataaggacgtca

SEQ ID NO: 1909496 - DNA, 25 bp, Homo sapien
ggacgtcaaattcatagttggccag

SEQ ID NO: 1909497 - DNA, 25 bp, Homo sapien
gggcagggggtatgagaggcacaaa

SEQ ID NO: 1909498 - DNA, 25 bp, Homo sapien
tgtagaagtcgtaagagcccctata

SEQ ID NO: 1909499 - DNA, 25 bp, Homo sapien
tagaagtcgtaagagcccctatact

SEQ ID NO: 1909500 - DNA, 25 bp, Homo sapien
aggtgtagaagtcgtaagagcccct

SEQ ID NO: 1909501 - DNA, 25 bp, Homo sapien
gaaagtgacaccccagtgaatttcc

SEQ ID NO: 1909502 - DNA, 25 bp, Homo sapien
aaagtgacaccccagtgaatttcca

SEQ ID NO: 1909503 - DNA, 25 bp, Homo sapien
gaagggagaggacattaggaacagg

SEQ ID NO: 1909504 - DNA, 25 bp, Homo sapien
gggagaggacattaggaacagggac

SEQ ID NO: 1909505 - DNA, 25 bp, Homo sapien
ctggaagggagaggacattaggaac

SEQ ID NO: 1909506 - DNA, 25 bp, Homo sapien
ggagaggacattaggaacagggacc

SEQ ID NO: 1909507 - DNA, 25 bp, Homo sapien
gcagaagcgcccgtagaacttctta

SEQ ID NO: 1909508 - DNA, 25 bp, Homo sapien
gcgagagaacttggtgcgcttttcc

SEQ ID NO: 1909509 - DNA, 25 bp, Homo sapien
ttcttagcaccgagtgcccgcaggt

SEQ ID NO: 1909510 - DNA, 25 bp, Homo sapien
cgcaggtcgtggatggtgaagggcc

SEQ ID NO: 1909511 - DNA, 25 bp, Homo sapien
agcccgcaaggtccagcacccacca

SEQ ID NO: 1909512 - DNA, 25 bp, Homo sapien
acccgcagcccgcaaggtccagcac

SEQ ID NO: 1909513 - DNA, 25 bp, Homo sapien
ctccacagcgacccgcagcccgcaa

SEQ ID NO: 1909514 - DNA, 25 bp, Homo sapien
acagcgacccgcagcccgcaaggtc

SEQ ID NO: 1909515 - DNA, 25 bp, Homo sapien
gcatggcatcctgtccgtcctctga

SEQ ID NO: 1909516 - DNA, 25 bp, Homo sapien
cccatcccaggcaccgtgtatccac

SEQ ID NO: 1909517 - DNA, 25 bp, Homo sapien
caccccatcccaggcaccgtgtatc

SEQ ID NO: 1909518 - DNA, 25 bp, Homo sapien
cgtcctctgactccccgcatgctcc

SEQ ID NO: 1909519 - DNA, 25 bp, Homo sapien
tggcctgctcgcttgtccagcttgg

SEQ ID NO: 1909520 - DNA, 25 bp, Homo sapien
caggctggcctgctcgcttgtccag

SEQ ID NO: 1909521 - DNA, 25 bp, Homo sapien
caggaagctctcaaagtgggcatgc

SEQ ID NO: 1909522 - DNA, 25 bp, Homo sapien
gctccagtagttgagctggtccttg

SEQ ID NO: 1909523 - DNA, 25 bp, Homo sapien
ccacagtgacttggcgctccagtag

SEQ ID NO: 1909524 - DNA, 25 bp, Homo sapien
gagctggtccttgatcttgtggtac

SEQ ID NO: 1909525 - DNA, 25 bp, Homo sapien
gggttggtggaggtaggtgaagcca

SEQ ID NO: 1909526 - DNA, 25 bp, Homo sapien
ggttggtggaggtaggtgaagccat

SEQ ID NO: 1909527 - DNA, 25 bp, Homo sapien
agggcagcagctgggcagagatgag

SEQ ID NO: 1909528 - DNA, 25 bp, Homo sapien
gcagcagctgggcagagatgagtgg

SEQ ID NO: 1909529 - DNA, 25 bp, Homo sapien
gaggcctcctggggagggcagcagc

SEQ ID NO: 1909530 - DNA, 25 bp, Homo sapien
ggaggcctcctggggagggcagcag

SEQ ID NO: 1909531 - DNA, 25 bp, Homo sapien
caaactgcctcaacaaacggcggga

SEQ ID NO: 1909532 - DNA, 25 bp, Homo sapien
aaagttttcctcagcactcgtgctt

SEQ ID NO: 1909533 - DNA, 25 bp, Homo sapien
tgcttgcctcctgacagagaaacag

SEQ ID NO: 1909534 - DNA, 25 bp, Homo sapien
cagtgccacgctgtgtctgagaagt

SEQ ID NO: 1909535 - DNA, 25 bp, Homo sapien
cagccggctccgctggacgacttac

SEQ ID NO: 1909536 - DNA, 25 bp, Homo sapien
ccgagcgaccgcagctgcgtttccc

SEQ ID NO: 1909537 - DNA, 25 bp, Homo sapien
tcgcagccggctccgctggacgact

SEQ ID NO: 1909538 - DNA, 25 bp, Homo sapien
gcagctgcgtttccccggaagcgca

SEQ ID NO: 1909539 - DNA, 25 bp, Homo sapien
tggagtcgcgcggagtgtgggcttc

SEQ ID NO: 1909540 - DNA, 25 bp, Homo sapien
ggcgccgcccgggctttattcgcga

SEQ ID NO: 1909541 - DNA, 25 bp, Homo sapien
tgggctggcaaccaggtctgagcgg

SEQ ID NO: 1909542 - DNA, 25 bp, Homo sapien
tattcgcgactcattagcatctcat

SEQ ID NO: 1909543 - DNA, 25 bp, Homo sapien
gtgcttgcgcgtgcaaggctagctc

SEQ ID NO: 1909544 - DNA, 25 bp, Homo sapien
aggctagctctttccccgccgcaag

SEQ ID NO: 1909545 - DNA, 25 bp, Homo sapien
gctccttgccggtgcttgcgcgtgc

SEQ ID NO: 1909546 - DNA, 25 bp, Homo sapien
gtggcgccggaacgtctgcgctctc

SEQ ID NO: 1909547 - DNA, 25 bp, Homo sapien
ggcgccccaggatggatccaagcgc

SEQ ID NO: 1909548 - DNA, 25 bp, Homo sapien
ccgggcgccccaggatggatccaag

SEQ ID NO: 1909549 - DNA, 25 bp, Homo sapien
tggatccaagcgcagagtgcgcctc

SEQ ID NO: 1909550 - DNA, 25 bp, Homo sapien
atggatccaagcgcagagtgcgcct

SEQ ID NO: 1909551 - DNA, 25 bp, Homo sapien
caggtcacgctcagaaaactagggc

SEQ ID NO: 1909552 - DNA, 25 bp, Homo sapien
agttgggcccatcctagcttttgag

SEQ ID NO: 1909553 - DNA, 25 bp, Homo sapien
caaaatgacgcatgaaaggctggca

SEQ ID NO: 1909554 - DNA, 25 bp, Homo sapien
tatctgagacccagtaagacctgaa

SEQ ID NO: 1909555 - DNA, 25 bp, Homo sapien
cacgctagcctagtgtgaccttgga

SEQ ID NO: 1909556 - DNA, 25 bp, Homo sapien
gaaatgaacagactagaagacccaa

SEQ ID NO: 1909557 - DNA, 25 bp, Homo sapien
ggattccagctttgcttcacgctag

SEQ ID NO: 1909558 - DNA, 25 bp, Homo sapien
taaagagtcccattctaaggctggg

SEQ ID NO: 1909559 - DNA, 25 bp, Homo sapien
ggtccctagtactgtaggtggcatg

SEQ ID NO: 1909560 - DNA, 25 bp, Homo sapien
ggtggcatgtttaagtcacctgtaa

SEQ ID NO: 1909561 - DNA, 25 bp, Homo sapien
cccagaaactgggtccctagtactg

SEQ ID NO: 1909562 - DNA, 25 bp, Homo sapien
taagtcacctgtaatatggctttgt

SEQ ID NO: 1909563 - DNA, 25 bp, Homo sapien
ctgcaggccagtatcttcaagcaac

SEQ ID NO: 1909564 - DNA, 25 bp, Homo sapien
tgtggctgcagtatagccagagaca

SEQ ID NO: 1909565 - DNA, 25 bp, Homo sapien
aagctgtggctgcagtatagccaga

SEQ ID NO: 1909566 - DNA, 25 bp, Homo sapien
tcaagcaacaaacccatggtcctgg

SEQ ID NO: 1909567 - DNA, 25 bp, Homo sapien
caggagtacaggcaagtgacatggt

SEQ ID NO: 1909568 - DNA, 25 bp, Homo sapien
tgacatctgcgccaaaggtgtagag

SEQ ID NO: 1909569 - DNA, 25 bp, Homo sapien
gtgaaactgacataacatggccatg

SEQ ID NO: 1909570 - DNA, 25 bp, Homo sapien
ccttgagaggctgcaaagattaaac

SEQ ID NO: 1909571 - DNA, 25 bp, Homo sapien
acctagataagcatctataatgaga

SEQ ID NO: 1909572 - DNA, 25 bp, Homo sapien
tataatgagaatcctaggtaagcat

SEQ ID NO: 1909573 - DNA, 25 bp, Homo sapien
gaatcctaggtaagcatttataatg

SEQ ID NO: 1909574 - DNA, 25 bp, Homo sapien
gcatctataatgagaatcctaggta

SEQ ID NO: 1909575 - DNA, 25 bp, Homo sapien
ggtgagtttcaagaagcactgggca

SEQ ID NO: 1909576 - DNA, 25 bp, Homo sapien
taagagctccaatcatcccaaggca

SEQ ID NO: 1909577 - DNA, 25 bp, Homo sapien
tcacgacatttcttttgggtactca

SEQ ID NO: 1909578 - DNA, 25 bp, Homo sapien
tcaaaacgaggtgtttcaggagccc

SEQ ID NO: 1909579 - DNA, 25 bp, Homo sapien
gtcaggctgccctcgaactcctgac

SEQ ID NO: 1909580 - DNA, 25 bp, Homo sapien
tcaggctgccctcgaactcctgacc

SEQ ID NO: 1909581 - DNA, 25 bp, Homo sapien
gattacaggggtacaccaccacgcc

SEQ ID NO: 1909582 - DNA, 25 bp, Homo sapien
ttacaggggtacaccaccacgccca

SEQ ID NO: 1909583 - DNA, 25 bp, Homo sapien
caggcatgagcctccacgcccggcg

SEQ ID NO: 1909584 - DNA, 25 bp, Homo sapien
aggcatgagcctccacgcccggcgt

SEQ ID NO: 1909585 - DNA, 25 bp, Homo sapien
tgtcccatgcaacaaggaactggat

SEQ ID NO: 1909586 - DNA, 25 bp, Homo sapien
gaatgtatatgtgggacaaagaaag

SEQ ID NO: 1909587 - DNA, 25 bp, Homo sapien
gaggctagattaacaaagctatcat

SEQ ID NO: 1909588 - DNA, 25 bp, Homo sapien
tagctaggactgatgctcaagttag

SEQ ID NO: 1909589 - DNA, 25 bp, Homo sapien
taatcacctagctatccagagtgag

SEQ ID NO: 1909590 - DNA, 25 bp, Homo sapien
taatttagatatactagtgcccacc

SEQ ID NO: 1909591 - DNA, 25 bp, Homo sapien
gttatctttgctctagtcaggcctg

SEQ ID NO: 1909592 - DNA, 25 bp, Homo sapien
caaaacaattgatggaaaggctcta

SEQ ID NO: 1909593 - DNA, 25 bp, Homo sapien
ggttggcaagaccataacctatggc

SEQ ID NO: 1909594 - DNA, 25 bp, Homo sapien
gagcccaatcaagcagtcaaacgtg

SEQ ID NO: 1909595 - DNA, 25 bp, Homo sapien
tacctggatggagggcattataaac

SEQ ID NO: 1909596 - DNA, 25 bp, Homo sapien
taagcccactgtactgcataaagat

SEQ ID NO: 1909597 - DNA, 25 bp, Homo sapien
tgctcctggccaagtggcgttggct

SEQ ID NO: 1909598 - DNA, 25 bp, Homo sapien
gctcctggccaagtggcgttggctg

SEQ ID NO: 1909599 - DNA, 25 bp, Homo sapien
ctcctggccaagtggcgttggctgg

SEQ ID NO: 1909600 - DNA, 25 bp, Homo sapien
aggtgctgagctggatctgaagtac

SEQ ID NO: 1909601 - DNA, 25 bp, Homo sapien
caggtgctgagctggatctgaagta

SEQ ID NO: 1909602 - DNA, 25 bp, Homo sapien
ctgcaggtgctgagctggatctgaa

SEQ ID NO: 1909603 - DNA, 25 bp, Homo sapien
caggctcctgtgtcagctgcaggtg

SEQ ID NO: 1909604 - DNA, 25 bp, Homo sapien
aaatggagctcctctgtttgctctt

SEQ ID NO: 1909605 - DNA, 25 bp, Homo sapien
ttgtagctaaatggagctcctctgt

SEQ ID NO: 1909606 - DNA, 25 bp, Homo sapien
gagccttcaagttgtctaagcgagc

SEQ ID NO: 1909607 - DNA, 25 bp, Homo sapien
cgtgagcagggtaagattagcagcc

SEQ ID NO: 1909608 - DNA, 25 bp, Homo sapien
gctaggaccgggcatgaaattgatg

SEQ ID NO: 1909609 - DNA, 25 bp, Homo sapien
tcacaatgctgattccctggctagg

SEQ ID NO: 1909610 - DNA, 25 bp, Homo sapien
cgatggattctgatgtgggtctgaa

SEQ ID NO: 1909611 - DNA, 25 bp, Homo sapien
gaagagaactctttgctgtgaaaga

SEQ ID NO: 1909612 - DNA, 25 bp, Homo sapien
gatttcacaagtaaatggcttctca

SEQ ID NO: 1909613 - DNA, 25 bp, Homo sapien
ctctttgctgtgaaagatttgccac

SEQ ID NO: 1909614 - DNA, 25 bp, Homo sapien
ctaagcactgtgtgccgagtgccaa

SEQ ID NO: 1909615 - DNA, 25 bp, Homo sapien
ccgagtgccaagagcatacacagaa

SEQ ID NO: 1909616 - DNA, 25 bp, Homo sapien
gaaatcgtaaggcatggttctctta

SEQ ID NO: 1909617 - DNA, 25 bp, Homo sapien
gcatacacagaaatcgtaaggcatg

SEQ ID NO: 1909618 - DNA, 25 bp, Homo sapien
tttgttccctgacagggccatctac

SEQ ID NO: 1909619 - DNA, 25 bp, Homo sapien
tgaactttatcatttgttccctgac

SEQ ID NO: 1909620 - DNA, 25 bp, Homo sapien
ttatcatttgttccctgacagggcc

SEQ ID NO: 1909621 - DNA, 25 bp, Homo sapien
aactttatcatttgttccctgacag

SEQ ID NO: 1909622 - DNA, 25 bp, Homo sapien
gagacacatccatgaatttgcgatg

SEQ ID NO: 1909623 - DNA, 25 bp, Homo sapien
gttcgcagatgtttctttagctgag

SEQ ID NO: 1909624 - DNA, 25 bp, Homo sapien
ggcagtctttgcattccggtaatga

SEQ ID NO: 1909625 - DNA, 25 bp, Homo sapien
tgtgttcgcagatgtttctttagct

SEQ ID NO: 1909626 - DNA, 25 bp, Homo sapien
aagtgtcagtgcatacatgctctcc

SEQ ID NO: 1909627 - DNA, 25 bp, Homo sapien
aaagtgtcagtgcatacatgctctc

SEQ ID NO: 1909628 - DNA, 25 bp, Homo sapien
tgtgttaaagcacttccctgaaaaa

SEQ ID NO: 1909629 - DNA, 25 bp, Homo sapien
tgatcacaggtaaaagacttctgtc

SEQ ID NO: 1909630 - DNA, 25 bp, Homo sapien
atgaactcggtaatggctctttagc

SEQ ID NO: 1909631 - DNA, 25 bp, Homo sapien
tcggtaatggctctttagctgtctg

SEQ ID NO: 1909632 - DNA, 25 bp, Homo sapien
tattttccgcattgatcacaggtaa

SEQ ID NO: 1909633 - DNA, 25 bp, Homo sapien
tgggaatctggtgaagctggccctc

SEQ ID NO: 1909634 - DNA, 25 bp, Homo sapien
tctggtgaagctggccctctgggca

SEQ ID NO: 1909635 - DNA, 25 bp, Homo sapien
tggccctctgggcaagccccactac

SEQ ID NO: 1909636 - DNA, 25 bp, Homo sapien
gggaatgggaatctggtgaagctgg

SEQ ID NO: 1909637 - DNA, 25 bp, Homo sapien
gtagcgagtgcttctgggcaaagcc

SEQ ID NO: 1909638 - DNA, 25 bp, Homo sapien
cagagccttgctgcacacggtgcag

SEQ ID NO: 1909639 - DNA, 25 bp, Homo sapien
cctgtgtgcatcctggtgtggacct

SEQ ID NO: 1909640 - DNA, 25 bp, Homo sapien
acacggtgcaggtgtacggccgctc

SEQ ID NO: 1909641 - DNA, 25 bp, Homo sapien
aggctttattacaatgcccatcaca

SEQ ID NO: 1909642 - DNA, 25 bp, Homo sapien
aaaggctttattacaatgcccatca

SEQ ID NO: 1909643 - DNA, 25 bp, Homo sapien
aaggctttattacaatgcccatcac

SEQ ID NO: 1909644 - DNA, 25 bp, Homo sapien
gcaacacactgcaatcagctttgaa

SEQ ID NO: 1909645 - DNA, 25 bp, Homo sapien
acactgcaatcagctttgaaaacat

SEQ ID NO: 1909646 - DNA, 25 bp, Homo sapien
aacacactgcaatcagctttgaaaa

SEQ ID NO: 1909647 - DNA, 25 bp, Homo sapien
cacactgcaatcagctttgaaaaca

SEQ ID NO: 1909648 - DNA, 25 bp, Homo sapien
gctgtatcgactctggcttgcctgg

SEQ ID NO: 1909649 - DNA, 25 bp, Homo sapien
taccaaaggtgtctgcaaccatgcc

SEQ ID NO: 1909650 - DNA, 25 bp, Homo sapien
tgtgggcccggaaatgtacattctc

SEQ ID NO: 1909651 - DNA, 25 bp, Homo sapien
tataaatggattggccgatttcccc

SEQ ID NO: 1909652 - DNA, 25 bp, Homo sapien
ggggtccgggtcgctgccaactcac

SEQ ID NO: 1909653 - DNA, 25 bp, Homo sapien
gtggggtccgggtcgctgccaactc

SEQ ID NO: 1909654 - DNA, 25 bp, Homo sapien
tggggtccgggtcgctgccaactca

SEQ ID NO: 1909655 - DNA, 25 bp, Homo sapien
agccacagccaacccggaagcgcgg

SEQ ID NO: 1909656 - DNA, 25 bp, Homo sapien
gggcttctgcgccgcaccggtttct

SEQ ID NO: 1909657 - DNA, 25 bp, Homo sapien
gccgaaccacgtggcccgcagaggc

SEQ ID NO: 1909658 - DNA, 25 bp, Homo sapien
gccaagagccgcttgcgcgcggacg

SEQ ID NO: 1909659 - DNA, 25 bp, Homo sapien
tccagaggtcctcaacggcataaga

SEQ ID NO: 1909660 - DNA, 25 bp, Homo sapien
gggttgcagtcaaatcactgtccct

SEQ ID NO: 1909661 - DNA, 25 bp, Homo sapien
tgtttcttgctgctacgagggttgc

SEQ ID NO: 1909662 - DNA, 25 bp, Homo sapien
cagtgccaaggtaagccaggtactt

SEQ ID NO: 1909663 - DNA, 25 bp, Homo sapien
gttcacaaacagttttgtatgtaaa

SEQ ID NO: 1909664 - DNA, 25 bp, Homo sapien
ttattgggaaaatgatagtatctta

SEQ ID NO: 1909665 - DNA, 25 bp, Homo sapien
agttcacaaacagttttgtatgtaa

SEQ ID NO: 1909666 - DNA, 25 bp, Homo sapien
aagttcacaaacagttttgtatgta

SEQ ID NO: 1909667 - DNA, 25 bp, Homo sapien
gcagccatggtaccttgctcaggag

SEQ ID NO: 1909668 - DNA, 25 bp, Homo sapien
gagattcaggctgctatcacctaag

SEQ ID NO: 1909669 - DNA, 25 bp, Homo sapien
tcaaagttcaggcaaagagcaatac

SEQ ID NO: 1909670 - DNA, 25 bp, Homo sapien
ggcagacctttgagttcacctgaag

SEQ ID NO: 1909671 - DNA, 25 bp, Homo sapien
aacttatgatcaaagtcaatggctc

SEQ ID NO: 1909672 - DNA, 25 bp, Homo sapien
gagttcacaactctccataaactgc

SEQ ID NO: 1909673 - DNA, 25 bp, Homo sapien
cttgtgtattcggaacctttgggat

SEQ ID NO: 1909674 - DNA, 25 bp, Homo sapien
tacccattaattgggtctatatttc

SEQ ID NO: 1909675 - DNA, 25 bp, Homo sapien
ctgtagaaaatttcacagaactgtg

SEQ ID NO: 1909676 - DNA, 25 bp, Homo sapien
tcacttatactaccattaatgttaa

SEQ ID NO: 1909677 - DNA, 25 bp, Homo sapien
cacttatactaccattaatgttaaa

SEQ ID NO: 1909678 - DNA, 25 bp, Homo sapien
ctgtattgtatttgctactaacact

SEQ ID NO: 1909679 - DNA, 25 bp, Homo sapien
tgtattgtatttgctactaacactc

SEQ ID NO: 1909680 - DNA, 25 bp, Homo sapien
ttgggctttaagcatcccgctgcat

SEQ ID NO: 1909681 - DNA, 25 bp, Homo sapien
ccgctgcattcattgctttaattag

SEQ ID NO: 1909682 - DNA, 25 bp, Homo sapien
ggctttaagcatcccgctgcattca

SEQ ID NO: 1909683 - DNA, 25 bp, Homo sapien
taagcatcccgctgcattcattgct

SEQ ID NO: 1909684 - DNA, 25 bp, Homo sapien
tgtgtatacttgagtttggtttctt

SEQ ID NO: 1909685 - DNA, 25 bp, Homo sapien
tttcttagtgccaatagataaacag

SEQ ID NO: 1909686 - DNA, 25 bp, Homo sapien
tctgtgtatacttgagtttggtttc

SEQ ID NO: 1909687 - DNA, 25 bp, Homo sapien
tcttagtgccaatagataaacaggc

SEQ ID NO: 1909688 - DNA, 25 bp, Homo sapien
gggtagtcagtgaatgatcctctca

SEQ ID NO: 1909689 - DNA, 25 bp, Homo sapien
aaaggtttgacattgtgccctaagc

SEQ ID NO: 1909690 - DNA, 25 bp, Homo sapien
gatcctctcacggactgaatctgca

SEQ ID NO: 1909691 - DNA, 25 bp, Homo sapien
cactgtaactcttttgggtagtcag

SEQ ID NO: 1909692 - DNA, 25 bp, Homo sapien
gaagactagtaagaagtatcggttc

SEQ ID NO: 1909693 - DNA, 25 bp, Homo sapien
ccttaatgggggaagcttgtgtgga

SEQ ID NO: 1909694 - DNA, 25 bp, Homo sapien
caggcaaaggaagactagtaagaag

SEQ ID NO: 1909695 - DNA, 25 bp, Homo sapien
aaaggaagactagtaagaagtatcg

SEQ ID NO: 1909696 - DNA, 25 bp, Homo sapien
taaagcatagttaatgctaccaggt

SEQ ID NO: 1909697 - DNA, 25 bp, Homo sapien
tagttaatgctaccaggtactagag

SEQ ID NO: 1909698 - DNA, 25 bp, Homo sapien
gcatagttaatgctaccaggtacta

SEQ ID NO: 1909699 - DNA, 25 bp, Homo sapien
tatatatacgattatgatattctaa

SEQ ID NO: 1909700 - DNA, 25 bp, Homo sapien
ctatacttccatgaaggccaggact

SEQ ID NO: 1909701 - DNA, 25 bp, Homo sapien
tttggtttccatccttataggtcac

SEQ ID NO: 1909702 - DNA, 25 bp, Homo sapien
ctttggtttccatccttataggtca

SEQ ID NO: 1909703 - DNA, 25 bp, Homo sapien
ggacagtagccctggagctccgcac

SEQ ID NO: 1909704 - DNA, 25 bp, Homo sapien
tggacagtagccctggagctccgca

SEQ ID NO: 1909705 - DNA, 25 bp, Homo sapien
acagtagccctggagctccgcacac

SEQ ID NO: 1909706 - DNA, 25 bp, Homo sapien
gacagtagccctggagctccgcaca

SEQ ID NO: 1909707 - DNA, 25 bp, Homo sapien
agtcttttggggatcatgtcagcag

SEQ ID NO: 1909708 - DNA, 25 bp, Homo sapien
tcagtcttttggggatcatgtcagc

SEQ ID NO: 1909709 - DNA, 25 bp, Homo sapien
cttttggggatcatgtcagcagatg

SEQ ID NO: 1909710 - DNA, 25 bp, Homo sapien
ttagggaatcgactcttcagctctg

SEQ ID NO: 1909711 - DNA, 25 bp, Homo sapien
gaggcacgtacaattctgggttctc

SEQ ID NO: 1909712 - DNA, 25 bp, Homo sapien
gggaggcacgtacaattctgggttc

SEQ ID NO: 1909713 - DNA, 25 bp, Homo sapien
ctaagggaggcacgtacaattctgg

SEQ ID NO: 1909714 - DNA, 25 bp, Homo sapien
aagggaggcacgtacaattctgggt

SEQ ID NO: 1909715 - DNA, 25 bp, Homo sapien
aactgttcaaattctcccaggcgag

SEQ ID NO: 1909716 - DNA, 25 bp, Homo sapien
gatacataacttgtcaatgcaggca

SEQ ID NO: 1909717 - DNA, 25 bp, Homo sapien
gcagctcttgaggtgtgatacataa

SEQ ID NO: 1909718 - DNA, 25 bp, Homo sapien
ccaaggagtcagttgcagagcaatc

SEQ ID NO: 1909719 - DNA, 25 bp, Homo sapien
ttttattctttccaggtatgtctgc

SEQ ID NO: 1909720 - DNA, 25 bp, Homo sapien
tttattctttccaggtatgtctgca

SEQ ID NO: 1909721 - DNA, 25 bp, Homo sapien
tcttaatgacttcattccataccca

SEQ ID NO: 1909722 - DNA, 25 bp, Homo sapien
caccatttgctgtgaaatccatcaa

SEQ ID NO: 1909723 - DNA, 25 bp, Homo sapien
catttgctgtgaaatccatcaatca

SEQ ID NO: 1909724 - DNA, 25 bp, Homo sapien
tcacataccagttctgatgctgttc

SEQ ID NO: 1909725 - DNA, 25 bp, Homo sapien
gtgcactattgtgcaatggataagg

SEQ ID NO: 1909726 - DNA, 25 bp, Homo sapien
gacagctacaatttgtgcactattg

SEQ ID NO: 1909727 - DNA, 25 bp, Homo sapien
caatttgtgcactattgtgcaatgg

SEQ ID NO: 1909728 - DNA, 25 bp, Homo sapien
cattattgacagctacaatttgtgc

SEQ ID NO: 1909729 - DNA, 25 bp, Homo sapien
tgaccatgggaatgattgacctagc

SEQ ID NO: 1909730 - DNA, 25 bp, Homo sapien
gacctagcttccaagagattcattt

SEQ ID NO: 1909731 - DNA, 25 bp, Homo sapien
tagttacaggatatccatcgatgac

SEQ ID NO: 1909732 - DNA, 25 bp, Homo sapien
tttgatgtttagttacaggatatcc

SEQ ID NO: 1909733 - DNA, 25 bp, Homo sapien
gggcaggacacatccaaacacagtt

SEQ ID NO: 1909734 - DNA, 25 bp, Homo sapien
gaatttctacactcagcatgctgga

SEQ ID NO: 1909735 - DNA, 25 bp, Homo sapien
tcaactggtgctgttaatctaaaca

SEQ ID NO: 1909736 - DNA, 25 bp, Homo sapien
gaatttgacagataactcccacagt

SEQ ID NO: 1909737 - DNA, 25 bp, Homo sapien
gcaaagctcctcctattgataaatg

SEQ ID NO: 1909738 - DNA, 25 bp, Homo sapien
aaagttctaaggcttgaatagccag

SEQ ID NO: 1909739 - DNA, 25 bp, Homo sapien
gattgtttagtacataacgcaaagc

SEQ ID NO: 1909740 - DNA, 25 bp, Homo sapien
tgccagctctgtttccgggtgattg

SEQ ID NO: 1909741 - DNA, 25 bp, Homo sapien
aatatactgacgatggattacagga

SEQ ID NO: 1909742 - DNA, 25 bp, Homo sapien
tataatcctaatgggcacagtaggc

SEQ ID NO: 1909743 - DNA, 25 bp, Homo sapien
tgtagttttcccagattttggaggc

SEQ ID NO: 1909744 - DNA, 25 bp, Homo sapien
tttggaggccccacaattataatcc

SEQ ID NO: 1909745 - DNA, 25 bp, Homo sapien
ttgggctagagtgaagttcatggat

SEQ ID NO: 1909746 - DNA, 25 bp, Homo sapien
aagacagttgttacagatcaatggt

SEQ ID NO: 1909747 - DNA, 25 bp, Homo sapien
gatcaatggtagtgtcaacattata

SEQ ID NO: 1909748 - DNA, 25 bp, Homo sapien
caacattataattcttgggctagag

SEQ ID NO: 1909749 - DNA, 25 bp, Homo sapien
cagggtcccaatagccgaatgagct

SEQ ID NO: 1909750 - DNA, 25 bp, Homo sapien
aatgcttgcacgattttccaccagt

SEQ ID NO: 1909751 - DNA, 25 bp, Homo sapien
tatatacttgtaggtaaaggtgagc

SEQ ID NO: 1909752 - DNA, 25 bp, Homo sapien
tctcaaaaatgcttgcacgattttc

SEQ ID NO: 1909753 - DNA, 25 bp, Homo sapien
tattggtatcaaatacctctcaagt

SEQ ID NO: 1909754 - DNA, 25 bp, Homo sapien
atggaaattattggtatcaaatacc

SEQ ID NO: 1909755 - DNA, 25 bp, Homo sapien
aattattggtatcaaatacctctca

SEQ ID NO: 1909756 - DNA, 25 bp, Homo sapien
ggtatcaaatacctctcaagttcat

SEQ ID NO: 1909757 - DNA, 25 bp, Homo sapien
tttgtaaattatgtgtatctgcttc

SEQ ID NO: 1909758 - DNA, 25 bp, Homo sapien
gcttcaaatttttctcctagttcac

SEQ ID NO: 1909759 - DNA, 25 bp, Homo sapien
aattatgtgtatctgcttcaaattt

SEQ ID NO: 1909760 - DNA, 25 bp, Homo sapien
gtgtatctgcttcaaatttttctcc

SEQ ID NO: 1909761 - DNA, 25 bp, Homo sapien
tctcaggcgctcaattgcatcagtt

SEQ ID NO: 1909762 - DNA, 25 bp, Homo sapien
ctctcaggcgctcaattgcatcagt

SEQ ID NO: 1909763 - DNA, 25 bp, Homo sapien
ggtccagacccttgtttcaacctca

SEQ ID NO: 1909764 - DNA, 25 bp, Homo sapien
cctttgggtctaaacactctgtctt

SEQ ID NO: 1909765 - DNA, 25 bp, Homo sapien
tcttctccctagaggatcctggaga

SEQ ID NO: 1909766 - DNA, 25 bp, Homo sapien
gagccctctgtgtatcaacctttgg

SEQ ID NO: 1909767 - DNA, 25 bp, Homo sapien
gatttaactgaagagtagcaaaggg

SEQ ID NO: 1909768 - DNA, 25 bp, Homo sapien
catctcaggagttgtgctgcgagtt

SEQ ID NO: 1909769 - DNA, 25 bp, Homo sapien
gctgcgagtttgtttgtatcagttt

SEQ ID NO: 1909770 - DNA, 25 bp, Homo sapien
tactcaatgttatacaacctcagcg

SEQ ID NO: 1909771 - DNA, 25 bp, Homo sapien
tctctctaatataagttcagccctt

SEQ ID NO: 1909772 - DNA, 25 bp, Homo sapien
ctctaatataagttcagcccttctt

SEQ ID NO: 1909773 - DNA, 25 bp, Homo sapien
tctctctctaatataagttcagccc

SEQ ID NO: 1909774 - DNA, 25 bp, Homo sapien
tatctctctctaatataagttcagc

SEQ ID NO: 1909775 - DNA, 25 bp, Homo sapien
tcaagaacagtgtggagccacgtat

SEQ ID NO: 1909776 - DNA, 25 bp, Homo sapien
gaactctgcctgtcttgatactgtg

SEQ ID NO: 1909777 - DNA, 25 bp, Homo sapien
tctctcgcatagcagacagtttggc

SEQ ID NO: 1909778 - DNA, 25 bp, Homo sapien
cagtttggcctgaacgtcatcaaga

SEQ ID NO: 1909779 - DNA, 25 bp, Homo sapien
aaaactgggcctcttctggatatcg

SEQ ID NO: 1909780 - DNA, 25 bp, Homo sapien
tgccttcatgtctttgatcagtttc

SEQ ID NO: 1909781 - DNA, 25 bp, Homo sapien
tatcgtgggaaaccatctaatataa

SEQ ID NO: 1909782 - DNA, 25 bp, Homo sapien
gaaggaggcgatcaaaaatatcttg

SEQ ID NO: 1909783 - DNA, 25 bp, Homo sapien
gggtctccttgtaactgatgacaat

SEQ ID NO: 1909784 - DNA, 25 bp, Homo sapien
aattgttaatgtatgtatcctggtt

SEQ ID NO: 1909785 - DNA, 25 bp, Homo sapien
attgttaatgtatgtatcctggttc

SEQ ID NO: 1909786 - DNA, 25 bp, Homo sapien
ccctgggtctccttgtaactgatga

SEQ ID NO: 1909787 - DNA, 25 bp, Homo sapien
gtttcttcctagcatcaatgatctt

SEQ ID NO: 1909788 - DNA, 25 bp, Homo sapien
tcctagcatcaatgatctttacaat

SEQ ID NO: 1909789 - DNA, 25 bp, Homo sapien
cctagcatcaatgatctttacaatt

SEQ ID NO: 1909790 - DNA, 25 bp, Homo sapien
tcttcctagcatcaatgatctttac

SEQ ID NO: 1909791 - DNA, 25 bp, Homo sapien
ttccattagacttgatttgattact

SEQ ID NO: 1909792 - DNA, 25 bp, Homo sapien
tcaggaggcaagggctcattttcca

SEQ ID NO: 1909793 - DNA, 25 bp, Homo sapien
tttcaggaggcaagggctcattttc

SEQ ID NO: 1909794 - DNA, 25 bp, Homo sapien
gccaccactcagaaagaattacttc

SEQ ID NO: 1909795 - DNA, 25 bp, Homo sapien
cttcctcaactttgacattggcctg

SEQ ID NO: 1909796 - DNA, 25 bp, Homo sapien
ttccacacatagttttgccagagcc

SEQ ID NO: 1909797 - DNA, 25 bp, Homo sapien
ggcagcttgctcgttctcagaatct

SEQ ID NO: 1909798 - DNA, 25 bp, Homo sapien
caactttgacattggcctgaattgc

SEQ ID NO: 1909799 - DNA, 25 bp, Homo sapien
caaggcatattcttaatggaggagc

SEQ ID NO: 1909800 - DNA, 25 bp, Homo sapien
cgacaaggcatattcttaatggagg

SEQ ID NO: 1909801 - DNA, 25 bp, Homo sapien
ctgggggccgacaaggcatattctt

SEQ ID NO: 1909802 - DNA, 25 bp, Homo sapien
gggccgacaaggcatattcttaatg

SEQ ID NO: 1909803 - DNA, 25 bp, Homo sapien
tgattggtaatcagtcccaaaaaaa

SEQ ID NO: 1909804 - DNA, 25 bp, Homo sapien
cagattggggatttcacccttaagt

SEQ ID NO: 1909805 - DNA, 25 bp, Homo sapien
cattaagataggaatactgtctcac

SEQ ID NO: 1909806 - DNA, 25 bp, Homo sapien
taaattgatggtgattggtaatcag

SEQ ID NO: 1909807 - DNA, 25 bp, Homo sapien
tagtagatcttttctcgatacttgg

SEQ ID NO: 1909808 - DNA, 25 bp, Homo sapien
cagcacttgaaaagtagtagatctt

SEQ ID NO: 1909809 - DNA, 25 bp, Homo sapien
gatcttttctcgatacttggctgct

SEQ ID NO: 1909810 - DNA, 25 bp, Homo sapien
aaagtagtagatcttttctcgatac

SEQ ID NO: 1909811 - DNA, 25 bp, Homo sapien
aaactccgggatgtgttgatgctgg

SEQ ID NO: 1909812 - DNA, 25 bp, Homo sapien
gagatgtaatgaaaaactccgggat

SEQ ID NO: 1909813 - DNA, 25 bp, Homo sapien
tgtaatgaaaaactccgggatgtgt

SEQ ID NO: 1909814 - DNA, 25 bp, Homo sapien
gaaaaactccgggatgtgttgatgc

SEQ ID NO: 1909815 - DNA, 25 bp, Homo sapien
tcctcttcctctagctcctcatcaa

SEQ ID NO: 1909816 - DNA, 25 bp, Homo sapien
ttcctcttcctctagctcctcatca

SEQ ID NO: 1909817 - DNA, 25 bp, Homo sapien
cctcttcctctagctcctcatcaac

SEQ ID NO: 1909818 - DNA, 25 bp, Homo sapien
taatcttccccagttaactcccatg

SEQ ID NO: 1909819 - DNA, 25 bp, Homo sapien
ttcttcctcataatcttccccagtt

SEQ ID NO: 1909820 - DNA, 25 bp, Homo sapien
taactcccatgcagtatattgaaat

SEQ ID NO: 1909821 - DNA, 25 bp, Homo sapien
agttaactcccatgcagtatattga

SEQ ID NO: 1909822 - DNA, 25 bp, Homo sapien
tttccatagtctcaactactttttg

SEQ ID NO: 1909823 - DNA, 25 bp, Homo sapien
catagtctcaactactttttgaagt

SEQ ID NO: 1909824 - DNA, 25 bp, Homo sapien
ccatagtctcaactactttttgaag

SEQ ID NO: 1909825 - DNA, 25 bp, Homo sapien
tagtctcaactactttttgaagtaa

SEQ ID NO: 1909826 - DNA, 25 bp, Homo sapien
taatgtaagcctcactaattgttgc

SEQ ID NO: 1909827 - DNA, 25 bp, Homo sapien
ctagctgtttccagaggatgatgaa

SEQ ID NO: 1909828 - DNA, 25 bp, Homo sapien
ggatgatgaaagaaccaatcttctc

SEQ ID NO: 1909829 - DNA, 25 bp, Homo sapien
taaatggctccatttcgggaacatc

SEQ ID NO: 1909830 - DNA, 25 bp, Homo sapien
gtagtttcctcgataggctcagata

SEQ ID NO: 1909831 - DNA, 25 bp, Homo sapien
cactgtagtttcctcgataggctca

SEQ ID NO: 1909832 - DNA, 25 bp, Homo sapien
tttctgtttccactgtagtttcctc

SEQ ID NO: 1909833 - DNA, 25 bp, Homo sapien
gtttccactgtagtttcctcgatag

SEQ ID NO: 1909834 - DNA, 25 bp, Homo sapien
gacctcagatgcttcaaactcctca

SEQ ID NO: 1909835 - DNA, 25 bp, Homo sapien
tcaggtaaccatgaccctcgggtat

SEQ ID NO: 1909836 - DNA, 25 bp, Homo sapien
gctcttcgtgaacttccaactcatc

SEQ ID NO: 1909837 - DNA, 25 bp, Homo sapien
tcgtgagatgcctcaggctcttcgt

SEQ ID NO: 1909838 - DNA, 25 bp, Homo sapien
ggaaatgtgatcacccagtctataa

SEQ ID NO: 1909839 - DNA, 25 bp, Homo sapien
tatttagtatacaaactggaacact

SEQ ID NO: 1909840 - DNA, 25 bp, Homo sapien
gacttcaagaatataggcataaacc

SEQ ID NO: 1909841 - DNA, 25 bp, Homo sapien
gctctcatggacaaattgggaaatg

SEQ ID NO: 1909842 - DNA, 25 bp, Homo sapien
ttgaaatactgcaattgcttgcagt

SEQ ID NO: 1909843 - DNA, 25 bp, Homo sapien
taccatgacacatcatcagtcatag

SEQ ID NO: 1909844 - DNA, 25 bp, Homo sapien
atcagtcatagcaatctgtgcttgc

SEQ ID NO: 1909845 - DNA, 25 bp, Homo sapien
attgcttgcagtaacaataccatga

SEQ ID NO: 1909846 - DNA, 25 bp, Homo sapien
ttttcttcttcgagtctcaattcct

SEQ ID NO: 1909847 - DNA, 25 bp, Homo sapien
cttcttcgagtctcaattcctcttc

SEQ ID NO: 1909848 - DNA, 25 bp, Homo sapien
ttcactttcataagttccagtagcc

SEQ ID NO: 1909849 - DNA, 25 bp, Homo sapien
gttccagtagccttcgattttcttc

SEQ ID NO: 1909850 - DNA, 25 bp, Homo sapien
tttaattatctttggaaattcagac

SEQ ID NO: 1909851 - DNA, 25 bp, Homo sapien
aatttaattatctttggaaattcag

SEQ ID NO: 1909852 - DNA, 25 bp, Homo sapien
atctttggaaattcagacttctcac

SEQ ID NO: 1909853 - DNA, 25 bp, Homo sapien
attatctttggaaattcagacttct

SEQ ID NO: 1909854 - DNA, 25 bp, Homo sapien
aatggtcaacatggatgatggcata

SEQ ID NO: 1909855 - DNA, 25 bp, Homo sapien
catgttgagactagttacttttcag

SEQ ID NO: 1909856 - DNA, 25 bp, Homo sapien
tctattaattaggaaacatgtcaaa

SEQ ID NO: 1909857 - DNA, 25 bp, Homo sapien
cctaactgtatgttgaaaaggcaaa

SEQ ID NO: 1909858 - DNA, 25 bp, Homo sapien
ttttctcatactccgcgttctttgc

SEQ ID NO: 1909859 - DNA, 25 bp, Homo sapien
catactccgcgttctttgcatccat

SEQ ID NO: 1909860 - DNA, 25 bp, Homo sapien
tcatactccgcgttctttgcatcca

SEQ ID NO: 1909861 - DNA, 25 bp, Homo sapien
ctgttattttctcatactccgcgtt

SEQ ID NO: 1909862 - DNA, 25 bp, Homo sapien
ttcttttgtagttcttctaataatc

SEQ ID NO: 1909863 - DNA, 25 bp, Homo sapien
tttgtagttcttctaataatctttc

SEQ ID NO: 1909864 - DNA, 25 bp, Homo sapien
tcttttgtagttcttctaataatct

SEQ ID NO: 1909865 - DNA, 25 bp, Homo sapien
cttttgtagttcttctaataatctt

SEQ ID NO: 1909866 - DNA, 25 bp, Homo sapien
tagagtcaatttcagatttcttctg

SEQ ID NO: 1909867 - DNA, 25 bp, Homo sapien
gagtcaatttcagatttcttctgta

SEQ ID NO: 1909868 - DNA, 25 bp, Homo sapien
agagtcaatttcagatttcttctgt

SEQ ID NO: 1909869 - DNA, 25 bp, Homo sapien
aatagatgaccaaatcaggtataat

SEQ ID NO: 1909870 - DNA, 25 bp, Homo sapien
agttgtccacaatccagcctccata

SEQ ID NO: 1909871 - DNA, 25 bp, Homo sapien
tcctttcttgattaaggccatccac

SEQ ID NO: 1909872 - DNA, 25 bp, Homo sapien
ccacaattcttttacaatagggcag

SEQ ID NO: 1909873 - DNA, 25 bp, Homo sapien
tgagacttgccttgtggccttgcat

SEQ ID NO: 1909874 - DNA, 25 bp, Homo sapien
cttggtgctgtggtattcgatgcat

SEQ ID NO: 1909875 - DNA, 25 bp, Homo sapien
taagaatgttccatgggcagatgag

SEQ ID NO: 1909876 - DNA, 25 bp, Homo sapien
gaagtcccctactatgattgcattg

SEQ ID NO: 1909877 - DNA, 25 bp, Homo sapien
tatcagtacagcctcactattacca

SEQ ID NO: 1909878 - DNA, 25 bp, Homo sapien
tacagcctcactattaccaattgtc

SEQ ID NO: 1909879 - DNA, 25 bp, Homo sapien
attgtcaaaaactttgccaattaga

SEQ ID NO: 1909880 - DNA, 25 bp, Homo sapien
gcctcactattaccaattgtcaaaa

SEQ ID NO: 1909881 - DNA, 25 bp, Homo sapien
agtttcttcctagcatcagtggtct

SEQ ID NO: 1909882 - DNA, 25 bp, Homo sapien
ttcttcctagcatcagtggtcttta

SEQ ID NO: 1909883 - DNA, 25 bp, Homo sapien
cttcctagcatcagtggtctttaca

SEQ ID NO: 1909884 - DNA, 25 bp, Homo sapien
ctagcatcagtggtctttacaattt

SEQ ID NO: 1909885 - DNA, 25 bp, Homo sapien
gaaatgaaacatgatgggcatctcc

SEQ ID NO: 1909886 - DNA, 25 bp, Homo sapien
aatggataaagagcaaatactgagc

SEQ ID NO: 1909887 - DNA, 25 bp, Homo sapien
gatttcaatttatcccacatgattc

SEQ ID NO: 1909888 - DNA, 25 bp, Homo sapien
gagctgaatgcattagatgtctttc

SEQ ID NO: 1909889 - DNA, 25 bp, Homo sapien
ctgttgttgaagtagcccaagttgc

SEQ ID NO: 1909890 - DNA, 25 bp, Homo sapien
gttgttgaagtagcccaagttgctc

SEQ ID NO: 1909891 - DNA, 25 bp, Homo sapien
gaggaaaggtttgagggatgaggac

SEQ ID NO: 1909892 - DNA, 25 bp, Homo sapien
ctactgttgttgaagtagcccaagt

SEQ ID NO: 1909893 - DNA, 25 bp, Homo sapien
gaattccagagtatgtggccaggca

SEQ ID NO: 1909894 - DNA, 25 bp, Homo sapien
gggcccctgagaagcctttacatgt

SEQ ID NO: 1909895 - DNA, 25 bp, Homo sapien
tgtccagtctagtatcaccagagag

SEQ ID NO: 1909896 - DNA, 25 bp, Homo sapien
gcaagttttggatgaatcggccaca

SEQ ID NO: 1909897 - DNA, 25 bp, Homo sapien
caaagtttatatcctgtgacatttt

SEQ ID NO: 1909898 - DNA, 25 bp, Homo sapien
tcttcaatcatggtcacaacctctg

SEQ ID NO: 1909899 - DNA, 25 bp, Homo sapien
ctccaaggacttcctgtaagatttc

SEQ ID NO: 1909900 - DNA, 25 bp, Homo sapien
ggatgatctgcagttacctcttcta

SEQ ID NO: 1909901 - DNA, 25 bp, Homo sapien
ttagaaccacaatctaaaagaatca

SEQ ID NO: 1909902 - DNA, 25 bp, Homo sapien
aattctgagggaactacttgtgttt

SEQ ID NO: 1909903 - DNA, 25 bp, Homo sapien
tcttctaaattctgagggaactact

SEQ ID NO: 1909904 - DNA, 25 bp, Homo sapien
tgtgttttttagaaccacaatctaa

SEQ ID NO: 1909905 - DNA, 25 bp, Homo sapien
tacatcttgactagcatcttgagaa

SEQ ID NO: 1909906 - DNA, 25 bp, Homo sapien
actttacatcttgactagcatcttg

SEQ ID NO: 1909907 - DNA, 25 bp, Homo sapien
tgactagcatcttgagaatgccttt

SEQ ID NO: 1909908 - DNA, 25 bp, Homo sapien
tacaactttacatcttgactagcat

SEQ ID NO: 1909909 - DNA, 25 bp, Homo sapien
catacgtgagtttctgacagtgccc

SEQ ID NO: 1909910 - DNA, 25 bp, Homo sapien
ggagttgggaactccacagcagcaa

SEQ ID NO: 1909911 - DNA, 25 bp, Homo sapien
caatgatgtgcttacctcagagaca

SEQ ID NO: 1909912 - DNA, 25 bp, Homo sapien
taatataagcctagggaaccaggac

SEQ ID NO: 1909913 - DNA, 25 bp, Homo sapien
ttatcaactttagcagcttgatcat

SEQ ID NO: 1909914 - DNA, 25 bp, Homo sapien
ggtgtccactaaagagctgcctctg

SEQ ID NO: 1909915 - DNA, 25 bp, Homo sapien
tgttttggcttcttcggtgtccact

SEQ ID NO: 1909916 - DNA, 25 bp, Homo sapien
tctttatcaactttagcagcttgat

SEQ ID NO: 1909917 - DNA, 25 bp, Homo sapien
tccattgggaatactccaaactcca

SEQ ID NO: 1909918 - DNA, 25 bp, Homo sapien
tgaaattctcttaaagctgtttcag

SEQ ID NO: 1909919 - DNA, 25 bp, Homo sapien
gatgagtgtgttgcctccattggga

SEQ ID NO: 1909920 - DNA, 25 bp, Homo sapien
catcaattgatgagtgtgttgcctc

SEQ ID NO: 1909921 - DNA, 25 bp, Homo sapien
tgaaagtccatcagaactagaaagt

SEQ ID NO: 1909922 - DNA, 25 bp, Homo sapien
taaagatggtcagtatcacaaccac

SEQ ID NO: 1909923 - DNA, 25 bp, Homo sapien
gagatcgtcccactttggcttcgca

SEQ ID NO: 1909924 - DNA, 25 bp, Homo sapien
tatatgattagctctctggaaaacc

SEQ ID NO: 1909925 - DNA, 25 bp, Homo sapien
caaaacgtggctgaacaagttgggc

SEQ ID NO: 1909926 - DNA, 25 bp, Homo sapien
gaacaagttgggcatagtcgactac

SEQ ID NO: 1909927 - DNA, 25 bp, Homo sapien
atgtttcacgggctttatcaaaacg

SEQ ID NO: 1909928 - DNA, 25 bp, Homo sapien
cagctatggtattttctactaatgt

SEQ ID NO: 1909929 - DNA, 25 bp, Homo sapien
taattggaagcttcatttgcgtgag

SEQ ID NO: 1909930 - DNA, 25 bp, Homo sapien
gaaactcgtagtcatcagaaggcca

SEQ ID NO: 1909931 - DNA, 25 bp, Homo sapien
taggtgatctggcttggcaattata

SEQ ID NO: 1909932 - DNA, 25 bp, Homo sapien
gccagaagtgtcttttatccgaaaa

SEQ ID NO: 1909933 - DNA, 25 bp, Homo sapien
tgctacagctgtatagggaacttac

SEQ ID NO: 1909934 - DNA, 25 bp, Homo sapien
cacaaacttagagggtacagcttac

SEQ ID NO: 1909935 - DNA, 25 bp, Homo sapien
ctatcaggcagttcagttacagtca

SEQ ID NO: 1909936 - DNA, 25 bp, Homo sapien
ggaacttaccatgaatgaaacttgc

SEQ ID NO: 1909937 - DNA, 25 bp, Homo sapien
tttagcctagccctacatggggtca

SEQ ID NO: 1909938 - DNA, 25 bp, Homo sapien
tcatcaagtatgacataactgtaca

SEQ ID NO: 1909939 - DNA, 25 bp, Homo sapien
cataagtaacttgtgctatgatgct

SEQ ID NO: 1909940 - DNA, 25 bp, Homo sapien
tattgtaaatactaagccattaaca

SEQ ID NO: 1909941 - DNA, 25 bp, Homo sapien
aacagatgaaagaggttcaacctca

SEQ ID NO: 1909942 - DNA, 25 bp, Homo sapien
taaaatggctagaattagaaagacc

SEQ ID NO: 1909943 - DNA, 25 bp, Homo sapien
gagacagagaatagtcctaatgctt

SEQ ID NO: 1909944 - DNA, 25 bp, Homo sapien
tagaaagaccgaccatagtaagagt

SEQ ID NO: 1909945 - DNA, 25 bp, Homo sapien
tgcttccacggcaaaaccataggag

SEQ ID NO: 1909946 - DNA, 25 bp, Homo sapien
ccataaaattctgggcagtggttac

SEQ ID NO: 1909947 - DNA, 25 bp, Homo sapien
tagaaaatgatactccggcgcttaa

SEQ ID NO: 1909948 - DNA, 25 bp, Homo sapien
tcattttgcggtaactcagtgggct

SEQ ID NO: 1909949 - DNA, 25 bp, Homo sapien
gaatactttacatggtggtcctggc

SEQ ID NO: 1909950 - DNA, 25 bp, Homo sapien
cagatagggacgtgggttcaacaaa

SEQ ID NO: 1909951 - DNA, 25 bp, Homo sapien
ttccctgaatattgaggtccaagta

SEQ ID NO: 1909952 - DNA, 25 bp, Homo sapien
tcctggcataggtggaagcagatag

SEQ ID NO: 1909953 - DNA, 25 bp, Homo sapien
tctgtatcttggtgcaataagttta

SEQ ID NO: 1909954 - DNA, 25 bp, Homo sapien
tttaaattcacaggacatgtacgtc

SEQ ID NO: 1909955 - DNA, 25 bp, Homo sapien
gaataatctggtaatcctgaataaa

SEQ ID NO: 1909956 - DNA, 25 bp, Homo sapien
gatgcaagagtacgaaatagctcat

SEQ ID NO: 1909957 - DNA, 25 bp, Homo sapien
ttctgtgtatctcgtataagtggaa

SEQ ID NO: 1909958 - DNA, 25 bp, Homo sapien
aacctctatcctacattctgtctct

SEQ ID NO: 1909959 - DNA, 25 bp, Homo sapien
tgtaaccacctttaagcatacaatt

SEQ ID NO: 1909960 - DNA, 25 bp, Homo sapien
caaacagaactctgtactcatgaaa

SEQ ID NO: 1909961 - DNA, 25 bp, Homo sapien
gatatttaagtcgatccataacaat

SEQ ID NO: 1909962 - DNA, 25 bp, Homo sapien
ttaggttcagatatttaagtcgatc

SEQ ID NO: 1909963 - DNA, 25 bp, Homo sapien
tcagatatttaagtcgatccataac

SEQ ID NO: 1909964 - DNA, 25 bp, Homo sapien
ggttcagatatttaagtcgatccat

SEQ ID NO: 1909965 - DNA, 25 bp, Homo sapien
aaagaagtacaatactgtcaataga

SEQ ID NO: 1909966 - DNA, 25 bp, Homo sapien
gctgtgaagtattcctgcttaacac

SEQ ID NO: 1909967 - DNA, 25 bp, Homo sapien
ttaaaagaagtacaatactgtcaat

SEQ ID NO: 1909968 - DNA, 25 bp, Homo sapien
tttccatgctgtgaagtattcctgc

SEQ ID NO: 1909969 - DNA, 25 bp, Homo sapien
ccatttagctcaatgagatactggg

SEQ ID NO: 1909970 - DNA, 25 bp, Homo sapien
tttccatttagctcaatgagatact

SEQ ID NO: 1909971 - DNA, 25 bp, Homo sapien
gatactggggattgtgttcagccat

SEQ ID NO: 1909972 - DNA, 25 bp, Homo sapien
tagctcaatgagatactggggattg

SEQ ID NO: 1909973 - DNA, 25 bp, Homo sapien
atggtgttggcttagccctgaagca

SEQ ID NO: 1909974 - DNA, 25 bp, Homo sapien
ggtgttggcttagccctgaagcagt

SEQ ID NO: 1909975 - DNA, 25 bp, Homo sapien
ctgaagcagtttgcagaatgtatac

SEQ ID NO: 1909976 - DNA, 25 bp, Homo sapien
ccctgaagcagtttgcagaatgtat

SEQ ID NO: 1909977 - DNA, 25 bp, Homo sapien
cacactgaactttagtggtcttggt

SEQ ID NO: 1909978 - DNA, 25 bp, Homo sapien
ggagacacactgaactttagtggtc

SEQ ID NO: 1909979 - DNA, 25 bp, Homo sapien
gacacactgaactttagtggtcttg

SEQ ID NO: 1909980 - DNA, 25 bp, Homo sapien
gagacacactgaactttagtggtct

SEQ ID NO: 1909981 - DNA, 25 bp, Homo sapien
tactgctttgttgcactagggcaat

SEQ ID NO: 1909982 - DNA, 25 bp, Homo sapien
caacctgtcaaaggatggccataca

SEQ ID NO: 1909983 - DNA, 25 bp, Homo sapien
tattcagcaagtgtcatctaggcct

SEQ ID NO: 1909984 - DNA, 25 bp, Homo sapien
gctgcagggcctagaagttttctac

SEQ ID NO: 1909985 - DNA, 25 bp, Homo sapien
gggataaccatagaccaatcagtgt

SEQ ID NO: 1909986 - DNA, 25 bp, Homo sapien
tatgggaataggcaattggaggact

SEQ ID NO: 1909987 - DNA, 25 bp, Homo sapien
tagtcgtgtacttcacgcttcagaa

SEQ ID NO: 1909988 - DNA, 25 bp, Homo sapien
catagagtctggctaaatgcgcaag

SEQ ID NO: 1909989 - DNA, 25 bp, Homo sapien
tattcattttcagcaatatattttg

SEQ ID NO: 1909990 - DNA, 25 bp, Homo sapien
tcattttcagcaatatattttgttc

SEQ ID NO: 1909991 - DNA, 25 bp, Homo sapien
tcaatattcattttcagcaatatat

SEQ ID NO: 1909992 - DNA, 25 bp, Homo sapien
tttcagcaatatattttgttcttac

SEQ ID NO: 1909993 - DNA, 25 bp, Homo sapien
ttcaggcctctgaactagatgatga

SEQ ID NO: 1909994 - DNA, 25 bp, Homo sapien
tctgaactagatgatgaagaatttc

SEQ ID NO: 1909995 - DNA, 25 bp, Homo sapien
caggcctctgaactagatgatgaag

SEQ ID NO: 1909996 - DNA, 25 bp, Homo sapien
gcctctgaactagatgatgaagaat

SEQ ID NO: 1909997 - DNA, 25 bp, Homo sapien
tatgtatcccgtattattgtgctgt

SEQ ID NO: 1909998 - DNA, 25 bp, Homo sapien
tggtctctactgtatatgtatcccg

SEQ ID NO: 1909999 - DNA, 25 bp, Homo sapien
caatgacttcaggatcccactggtc

SEQ ID NO: 1910000 - DNA, 25 bp, Homo sapien
tctggcacaaatcatagtcaggaca

SEQ ID NO: 1910001 - DNA, 25 bp, Homo sapien
ctgaatccaggtagtaaaaaagcca

SEQ ID NO: 1910002 - DNA, 25 bp, Homo sapien
tacaatgccagtcataaatgggacc

SEQ ID NO: 1910003 - DNA, 25 bp, Homo sapien
tcaggtcagagaagtacagctatgg

SEQ ID NO: 1910004 - DNA, 25 bp, Homo sapien
tgaattctcaactaaccctgtaaga

SEQ ID NO: 1910005 - DNA, 25 bp, Homo sapien
taattctatttgctgtaaggtagtc

SEQ ID NO: 1910006 - DNA, 25 bp, Homo sapien
aattctatttgctgtaaggtagtca

SEQ ID NO: 1910007 - DNA, 25 bp, Homo sapien
attctatttgctgtaaggtagtcat

SEQ ID NO: 1910008 - DNA, 25 bp, Homo sapien
catcctgtgaaagtgatggtatttc

SEQ ID NO: 1910009 - DNA, 25 bp, Homo sapien
tcctgtgaaagtgatggtatttcag

SEQ ID NO: 1910010 - DNA, 25 bp, Homo sapien
tgtgaaagtgatggtatttcagtga

SEQ ID NO: 1910011 - DNA, 25 bp, Homo sapien
cctgtgaaagtgatggtatttcagt

SEQ ID NO: 1910012 - DNA, 25 bp, Homo sapien
tcaggcattccacgtgcaactgttt

SEQ ID NO: 1910013 - DNA, 25 bp, Homo sapien
tcttgaaaggccattgtttgggctg

SEQ ID NO: 1910014 - DNA, 25 bp, Homo sapien
catacttggtctctttactgatgga

SEQ ID NO: 1910015 - DNA, 25 bp, Homo sapien
gcaactgtttgcaggaatgctgaac

SEQ ID NO: 1910016 - DNA, 25 bp, Homo sapien
gaggagtggcgcaccccaagccagt

SEQ ID NO: 1910017 - DNA, 25 bp, Homo sapien
gactttgcatgttctatcataggca

SEQ ID NO: 1910018 - DNA, 25 bp, Homo sapien
tccatgctaacgatggaggagtggc

SEQ ID NO: 1910019 - DNA, 25 bp, Homo sapien
ttgagaccattaccaagcccttgcc

SEQ ID NO: 1910020 - DNA, 25 bp, Homo sapien
ttcttttgcagaggtattagagttt

SEQ ID NO: 1910021 - DNA, 25 bp, Homo sapien
tcaggtggatgattttatcccaaac

SEQ ID NO: 1910022 - DNA, 25 bp, Homo sapien
tttgcagaggtattagagtttgctc

SEQ ID NO: 1910023 - DNA, 25 bp, Homo sapien
agtaccaggagaggtttcaggtcca

SEQ ID NO: 1910024 - DNA, 25 bp, Homo sapien
ggaatgctttgaccgctgatcaaca

SEQ ID NO: 1910025 - DNA, 25 bp, Homo sapien
ttcatctggaatgctttgaccgctg

SEQ ID NO: 1910026 - DNA, 25 bp, Homo sapien
gaccgctgatcaacattgattgcaa

SEQ ID NO: 1910027 - DNA, 25 bp, Homo sapien
attagctttatgacaagttcatctg

SEQ ID NO: 1910028 - DNA, 25 bp, Homo sapien
actcctgattcggtttcagcagcaa

SEQ ID NO: 1910029 - DNA, 25 bp, Homo sapien
tcggtttcagcagcaatctgttctt

SEQ ID NO: 1910030 - DNA, 25 bp, Homo sapien
tgattcggtttcagcagcaatctgt

SEQ ID NO: 1910031 - DNA, 25 bp, Homo sapien
aatctgttcttctaaaattggcaaa

SEQ ID NO: 1910032 - DNA, 25 bp, Homo sapien
catgcctgtgttatgtaacgggcta

SEQ ID NO: 1910033 - DNA, 25 bp, Homo sapien
tttccatgcctgtgttatgtaacgg

SEQ ID NO: 1910034 - DNA, 25 bp, Homo sapien
tgtgttatgtaacgggctaatgttg

SEQ ID NO: 1910035 - DNA, 25 bp, Homo sapien
tatgtaacgggctaatgttgttttc

SEQ ID NO: 1910036 - DNA, 25 bp, Homo sapien
caaagcaaacaggtttggacaacaa

SEQ ID NO: 1910037 - DNA, 25 bp, Homo sapien
acaaagcaaacaggtttggacaaca

SEQ ID NO: 1910038 - DNA, 25 bp, Homo sapien
gaagctttggttaattccatgaaga

SEQ ID NO: 1910039 - DNA, 25 bp, Homo sapien
ctattttgatttgctcttaagcgga

SEQ ID NO: 1910040 - DNA, 25 bp, Homo sapien
tttctaggcacagaagcttgagtcc

SEQ ID NO: 1910041 - DNA, 25 bp, Homo sapien
gtccaactcttttggagtcaatcag

SEQ ID NO: 1910042 - DNA, 25 bp, Homo sapien
gcacaacagatgagggtagacttct

SEQ ID NO: 1910043 - DNA, 25 bp, Homo sapien
cagatgggatctttactagatagac

SEQ ID NO: 1910044 - DNA, 25 bp, Homo sapien
ggtagtcccagttgcaactgctgtg

SEQ ID NO: 1910045 - DNA, 25 bp, Homo sapien
tttttacgcagctgatgatctggca

SEQ ID NO: 1910046 - DNA, 25 bp, Homo sapien
ttgccggggagacctctggccgcca

SEQ ID NO: 1910047 - DNA, 25 bp, Homo sapien
gctgtcgggcggttgccggggagac

SEQ ID NO: 1910048 - DNA, 25 bp, Homo sapien
ctccagggactccgcggggctgtcg

SEQ ID NO: 1910049 - DNA, 25 bp, Homo sapien
acctctggccgccacgcacctgctg

SEQ ID NO: 1910050 - DNA, 25 bp, Homo sapien
gcagcacgcaggtcccgggagcctc

SEQ ID NO: 1910051 - DNA, 25 bp, Homo sapien
ccgggagcctctacccgacctctct

SEQ ID NO: 1910052 - DNA, 25 bp, Homo sapien
ctctacccgacctctctatgatacg

SEQ ID NO: 1910053 - DNA, 25 bp, Homo sapien
gacctctctatgatacgtcctccag

SEQ ID NO: 1910054 - DNA, 25 bp, Homo sapien
cctgaggggttttctcgccgagtct

SEQ ID NO: 1910055 - DNA, 25 bp, Homo sapien
tgcctaatgggtgttgttcctggct

SEQ ID NO: 1910056 - DNA, 25 bp, Homo sapien
ctgatcatctataggtttagtgcct

SEQ ID NO: 1910057 - DNA, 25 bp, Homo sapien
tccggaggctcgtgccctgttgtgg

SEQ ID NO: 1910058 - DNA, 25 bp, Homo sapien
caccttttgagatcacgtagggcat

SEQ ID NO: 1910059 - DNA, 25 bp, Homo sapien
cacgtagggcatttttgcattcagc

SEQ ID NO: 1910060 - DNA, 25 bp, Homo sapien
tgcattcagcatgttttctagtatg

SEQ ID NO: 1910061 - DNA, 25 bp, Homo sapien
ttttctatcaccttttgagatcacg

SEQ ID NO: 1910062 - DNA, 25 bp, Homo sapien
ggcgtgttcagggtggtatggccgt

SEQ ID NO: 1910063 - DNA, 25 bp, Homo sapien
tgttcagggtggtatggccgtagac

SEQ ID NO: 1910064 - DNA, 25 bp, Homo sapien
cagacgagatcgggcgtgttcaggg

SEQ ID NO: 1910065 - DNA, 25 bp, Homo sapien
cgtgttcagggtggtatggccgtag

SEQ ID NO: 1910066 - DNA, 25 bp, Homo sapien
cattactaaggcaaccagggacgtt

SEQ ID NO: 1910067 - DNA, 25 bp, Homo sapien
tctgtgatagcaaggcagtggcacc

SEQ ID NO: 1910068 - DNA, 25 bp, Homo sapien
tcgtgtgatcatgaagtgcccaggt

SEQ ID NO: 1910069 - DNA, 25 bp, Homo sapien
gaacatacacaaaagaccagggcag

SEQ ID NO: 1910070 - DNA, 25 bp, Homo sapien
gaagagcacggctttatgatcacat

SEQ ID NO: 1910071 - DNA, 25 bp, Homo sapien
tgatcacataaaggccatcggcact

SEQ ID NO: 1910072 - DNA, 25 bp, Homo sapien
tctgacatacttcctccggctgcgt

SEQ ID NO: 1910073 - DNA, 25 bp, Homo sapien
gattatacccatctgagggctctag

SEQ ID NO: 1910074 - DNA, 25 bp, Homo sapien
gttcttcactggtatgtagaactga

SEQ ID NO: 1910075 - DNA, 25 bp, Homo sapien
gaactgatttgactacagctgagta

SEQ ID NO: 1910076 - DNA, 25 bp, Homo sapien
gagcgagtgccatggctgcgggtaa

SEQ ID NO: 1910077 - DNA, 25 bp, Homo sapien
catggatgtgctatcagttcttcac

SEQ ID NO: 1910078 - DNA, 25 bp, Homo sapien
gccccagagtacaggagaggtagcc

SEQ ID NO: 1910079 - DNA, 25 bp, Homo sapien
ccccagagtacaggagaggtagccc

SEQ ID NO: 1910080 - DNA, 25 bp, Homo sapien
ggccccagagtacaggagaggtagc

SEQ ID NO: 1910081 - DNA, 25 bp, Homo sapien
cccagagtacaggagaggtagccca

SEQ ID NO: 1910082 - DNA, 25 bp, Homo sapien
ttcctctatccagtcttctgggctc

SEQ ID NO: 1910083 - DNA, 25 bp, Homo sapien
cagaatcctctgaggcccttgagcc

SEQ ID NO: 1910084 - DNA, 25 bp, Homo sapien
cctttccggtggtggcattgtggtt

SEQ ID NO: 1910085 - DNA, 25 bp, Homo sapien
cgggttgatggccttcctctatcca

SEQ ID NO: 1910086 - DNA, 25 bp, Homo sapien
cgtgactgtgggagcacatgcattt

SEQ ID NO: 1910087 - DNA, 25 bp, Homo sapien
gcaggaatgttatcatcggcagact

SEQ ID NO: 1910088 - DNA, 25 bp, Homo sapien
catgcatttccaagtcaagctgtgg

SEQ ID NO: 1910089 - DNA, 25 bp, Homo sapien
ggcagactgctcacaaagtcgctgt

SEQ ID NO: 1910090 - DNA, 25 bp, Homo sapien
gaacatgtgcttctattgcccctgc

SEQ ID NO: 1910091 - DNA, 25 bp, Homo sapien
cagggtgtcagcaaaggtggcacaa

SEQ ID NO: 1910092 - DNA, 25 bp, Homo sapien
ttggccacgggcaactcatgcatcc

SEQ ID NO: 1910093 - DNA, 25 bp, Homo sapien
gcccatgctagagaaccccagaggc

SEQ ID NO: 1910094 - DNA, 25 bp, Homo sapien
tcagcaagagcacgcaggtgcaagg

SEQ ID NO: 1910095 - DNA, 25 bp, Homo sapien
gtgctgctgctaaattctccacagt

SEQ ID NO: 1910096 - DNA, 25 bp, Homo sapien
aggccagcggagttcagacaaggca

SEQ ID NO: 1910097 - DNA, 25 bp, Homo sapien
tttcaatatcaagggagctgttctc

SEQ ID NO: 1910098 - DNA, 25 bp, Homo sapien
tggcctttcaggaagcagagagcgc

SEQ ID NO: 1910099 - DNA, 25 bp, Homo sapien
catgtttcattgtttccccagcaga

SEQ ID NO: 1910100 - DNA, 25 bp, Homo sapien
tctaggaatgctgaacgcgatggaa

SEQ ID NO: 1910101 - DNA, 25 bp, Homo sapien
gggactgtcactcttccaccatgtt

SEQ ID NO: 1910102 - DNA, 25 bp, Homo sapien
tcagtgatttgcatattgtgttggc

SEQ ID NO: 1910103 - DNA, 25 bp, Homo sapien
cctatacagggcagtgcatgctctg

SEQ ID NO: 1910104 - DNA, 25 bp, Homo sapien
tattgtcagtgatttgcatattgtg

SEQ ID NO: 1910105 - DNA, 25 bp, Homo sapien
tattgtgttggcttcctatacaggg

SEQ ID NO: 1910106 - DNA, 25 bp, Homo sapien
tcagggttccaggaagatcccttaa

SEQ ID NO: 1910107 - DNA, 25 bp, Homo sapien
acttaagaatggatacagagtcctc

SEQ ID NO: 1910108 - DNA, 25 bp, Homo sapien
cagacttaagaatggatacagagtc

SEQ ID NO: 1910109 - DNA, 25 bp, Homo sapien
ctgcagacttaagaatggatacaga

SEQ ID NO: 1910110 - DNA, 25 bp, Homo sapien
cctttccaaggtccagtctcacaga

SEQ ID NO: 1910111 - DNA, 25 bp, Homo sapien
caggaccaatatgcatctgcacaga

SEQ ID NO: 1910112 - DNA, 25 bp, Homo sapien
gactggccatgtccagtacttggga

SEQ ID NO: 1910113 - DNA, 25 bp, Homo sapien
tccagtacttgggatgcagcctatg

SEQ ID NO: 1910114 - DNA, 25 bp, Homo sapien
tacatatatacaggggcaggcccct

SEQ ID NO: 1910115 - DNA, 25 bp, Homo sapien
tgacaccagggagagtatcattggc

SEQ ID NO: 1910116 - DNA, 25 bp, Homo sapien
ttaaggactgtccattgcaggccct

SEQ ID NO: 1910117 - DNA, 25 bp, Homo sapien
cctggctgggatgtagcagagtcca

SEQ ID NO: 1910118 - DNA, 25 bp, Homo sapien
tgctgccaagctggcttctttgctc

SEQ ID NO: 1910119 - DNA, 25 bp, Homo sapien
ggctgcaggtggagaattgctgcca

SEQ ID NO: 1910120 - DNA, 25 bp, Homo sapien
caggtggagaattgctgccaagctg

SEQ ID NO: 1910121 - DNA, 25 bp, Homo sapien
tgcaggtggagaattgctgccaagc

SEQ ID NO: 1910122 - DNA, 25 bp, Homo sapien
tcacactgcgggtagccgtgtgccc

SEQ ID NO: 1910123 - DNA, 25 bp, Homo sapien
tctctggcgtgcacacactgtagtg

SEQ ID NO: 1910124 - DNA, 25 bp, Homo sapien
ggagtgttgataggcttcagagaaa

SEQ ID NO: 1910125 - DNA, 25 bp, Homo sapien
tcagcggagctccactacggtcagg

SEQ ID NO: 1910126 - DNA, 25 bp, Homo sapien
tctctctgcgaaagccctacagaaa

SEQ ID NO: 1910127 - DNA, 25 bp, Homo sapien
gtcctctctctgcgaaagccctaca

SEQ ID NO: 1910128 - DNA, 25 bp, Homo sapien
tctctgcgaaagccctacagaaaag

SEQ ID NO: 1910129 - DNA, 25 bp, Homo sapien
cctctctctgcgaaagccctacaga

SEQ ID NO: 1910130 - DNA, 25 bp, Homo sapien
tgaaggtatcgaccagcaattctct

SEQ ID NO: 1910131 - DNA, 25 bp, Homo sapien
agtgcctgattccttcgatgaaggt

SEQ ID NO: 1910132 - DNA, 25 bp, Homo sapien
tgcccctggattccacagtgtgcag

SEQ ID NO: 1910133 - DNA, 25 bp, Homo sapien
tccacagtgtgcagtgcctgattcc

SEQ ID NO: 1910134 - DNA, 25 bp, Homo sapien
gctccttgatctagccatcctgcca

SEQ ID NO: 1910135 - DNA, 25 bp, Homo sapien
gaagcccacaccctgatggggcctc

SEQ ID NO: 1910136 - DNA, 25 bp, Homo sapien
tcaacactagcaaatttggttcagt

SEQ ID NO: 1910137 - DNA, 25 bp, Homo sapien
caatcaacactagcaaatttggttc

SEQ ID NO: 1910138 - DNA, 25 bp, Homo sapien
cgaggcaggagacacagtggggaga

SEQ ID NO: 1910139 - DNA, 25 bp, Homo sapien
ctcgaggcaggagacacagtgggga

SEQ ID NO: 1910140 - DNA, 25 bp, Homo sapien
tcgaggcaggagacacagtggggag

SEQ ID NO: 1910141 - DNA, 25 bp, Homo sapien
aggcaggagacacagtggggagagc

SEQ ID NO: 1910142 - DNA, 25 bp, Homo sapien
catcatactccctacttcccacata

SEQ ID NO: 1910143 - DNA, 25 bp, Homo sapien
gcatgcgaatgccagctccaagagc

SEQ ID NO: 1910144 - DNA, 25 bp, Homo sapien
caagagccccatgatcatcatactc

SEQ ID NO: 1910145 - DNA, 25 bp, Homo sapien
acagagcatgagcatgcgaatgcca

SEQ ID NO: 1910146 - DNA, 25 bp, Homo sapien
ggctgtcacaccctttcaaacagtt

SEQ ID NO: 1910147 - DNA, 25 bp, Homo sapien
acaccctttcaaacagttgccgaag

SEQ ID NO: 1910148 - DNA, 25 bp, Homo sapien
tgccgaagctgatcatgtcactctg

SEQ ID NO: 1910149 - DNA, 25 bp, Homo sapien
caaacagttgccgaagctgatcatg

SEQ ID NO: 1910150 - DNA, 25 bp, Homo sapien
ccctccgcctgttggtgggttgtct

SEQ ID NO: 1910151 - DNA, 25 bp, Homo sapien
ttgtctcttcggacccagaaagtgc

SEQ ID NO: 1910152 - DNA, 25 bp, Homo sapien
tgttggtgggttgtctcttcggacc

SEQ ID NO: 1910153 - DNA, 25 bp, Homo sapien
tgcaaggagcagaaaaaggttagtt

SEQ ID NO: 1910154 - DNA, 25 bp, Homo sapien
catattgtccagcatagtccacagc

SEQ ID NO: 1910155 - DNA, 25 bp, Homo sapien
gccatattgtccagcatagtccaca

SEQ ID NO: 1910156 - DNA, 25 bp, Homo sapien
ccgccatattgtccagcatagtcca

SEQ ID NO: 1910157 - DNA, 25 bp, Homo sapien
tattgtccagcatagtccacagcaa

SEQ ID NO: 1910158 - DNA, 25 bp, Homo sapien
gttcgtctaacagtcgccttctcag

SEQ ID NO: 1910159 - DNA, 25 bp, Homo sapien
caggacagtccaaccttagtgcgat

SEQ ID NO: 1910160 - DNA, 25 bp, Homo sapien
tgagggaatcctggctagagctcct

SEQ ID NO: 1910161 - DNA, 25 bp, Homo sapien
cagaacagtcagagggatccagagc

SEQ ID NO: 1910162 - DNA, 25 bp, Homo sapien
ctcctgaggcctgcgggtttctcag

SEQ ID NO: 1910163 - DNA, 25 bp, Homo sapien
gcctgcgggtttctcaggactccct

SEQ ID NO: 1910164 - DNA, 25 bp, Homo sapien
gggtttctcaggactccctgtacca

SEQ ID NO: 1910165 - DNA, 25 bp, Homo sapien
tgaggcctgcgggtttctcaggact

SEQ ID NO: 1910166 - DNA, 25 bp, Homo sapien
acctccaaggccacgacaccttcgt

SEQ ID NO: 1910167 - DNA, 25 bp, Homo sapien
tccaaggccacgacaccttcgtgtt

SEQ ID NO: 1910168 - DNA, 25 bp, Homo sapien
caaggccacgacaccttcgtgttct

SEQ ID NO: 1910169 - DNA, 25 bp, Homo sapien
ctccaaggccacgacaccttcgtgt

SEQ ID NO: 1910170 - DNA, 25 bp, Homo sapien
tcagttcagggatccaaggagacca

SEQ ID NO: 1910171 - DNA, 25 bp, Homo sapien
attcagttcagggatccaaggagac

SEQ ID NO: 1910172 - DNA, 25 bp, Homo sapien
agttcagggatccaaggagaccatt

SEQ ID NO: 1910173 - DNA, 25 bp, Homo sapien
ttcagttcagggatccaaggagacc

SEQ ID NO: 1910174 - DNA, 25 bp, Homo sapien
tttcttgcagctgaggttctagcct

SEQ ID NO: 1910175 - DNA, 25 bp, Homo sapien
ccttcttagggaattctgtgccaga

SEQ ID NO: 1910176 - DNA, 25 bp, Homo sapien
agaacttggtggctatggtctccca

SEQ ID NO: 1910177 - DNA, 25 bp, Homo sapien
tccactgtcctgatgtgctaacacc

SEQ ID NO: 1910178 - DNA, 25 bp, Homo sapien
gtaggtaccatagagcactgatgcc

SEQ ID NO: 1910179 - DNA, 25 bp, Homo sapien
taccatagagcactgatgcctgagg

SEQ ID NO: 1910180 - DNA, 25 bp, Homo sapien
ggaggtaggaacatccccgatgtgt

SEQ ID NO: 1910181 - DNA, 25 bp, Homo sapien
ccccgatgtgtctggacatgctgaa

SEQ ID NO: 1910182 - DNA, 25 bp, Homo sapien
tgcttatccccaagaatcaagaaca

SEQ ID NO: 1910183 - DNA, 25 bp, Homo sapien
cagatagacttacacttcccagttg

SEQ ID NO: 1910184 - DNA, 25 bp, Homo sapien
caagcacctggataccaccagatag

SEQ ID NO: 1910185 - DNA, 25 bp, Homo sapien
ttcccagttgaacactatactgctt

SEQ ID NO: 1910186 - DNA, 25 bp, Homo sapien
tgtccaacatcagctattgcaccaa

SEQ ID NO: 1910187 - DNA, 25 bp, Homo sapien
tattgcaccaaataattgaactgtc

SEQ ID NO: 1910188 - DNA, 25 bp, Homo sapien
tgaactgtcatatgtcccttgttct

SEQ ID NO: 1910189 - DNA, 25 bp, Homo sapien
ttctgtccaacatcagctattgcac

SEQ ID NO: 1910190 - DNA, 25 bp, Homo sapien
ctgcaggcaattggagcttgaatgc

SEQ ID NO: 1910191 - DNA, 25 bp, Homo sapien
aataccacttggccgaaattctcct

SEQ ID NO: 1910192 - DNA, 25 bp, Homo sapien
taccacttggccgaaattctcctgt

SEQ ID NO: 1910193 - DNA, 25 bp, Homo sapien
ctgaataccacttggccgaaattct

SEQ ID NO: 1910194 - DNA, 25 bp, Homo sapien
acacttcaggaatgaacactccagc

SEQ ID NO: 1910195 - DNA, 25 bp, Homo sapien
agggcagggcacacttcaggaatga

SEQ ID NO: 1910196 - DNA, 25 bp, Homo sapien
agcagggcagggcacacttcaggaa

SEQ ID NO: 1910197 - DNA, 25 bp, Homo sapien
gcagggcacacttcaggaatgaaca

SEQ ID NO: 1910198 - DNA, 25 bp, Homo sapien
ctgacactttccctagacttgtagg

SEQ ID NO: 1910199 - DNA, 25 bp, Homo sapien
tccctagacttgtaggaatgggtgt

SEQ ID NO: 1910200 - DNA, 25 bp, Homo sapien
ggaatgggtgttggccacatccctc

SEQ ID NO: 1910201 - DNA, 25 bp, Homo sapien
aggaatgggtgttggccacatccct

SEQ ID NO: 1910202 - DNA, 25 bp, Homo sapien
caccttgaggtggaaatcagatgct

SEQ ID NO: 1910203 - DNA, 25 bp, Homo sapien
tgcaccttgaggtatgttatccggg

SEQ ID NO: 1910204 - DNA, 25 bp, Homo sapien
gggtcaccttgaggtggaaatcaga

SEQ ID NO: 1910205 - DNA, 25 bp, Homo sapien
tgaacaagaacgttcatatgcacct

SEQ ID NO: 1910206 - DNA, 25 bp, Homo sapien
caccaaaacgcattcctgttggaag

SEQ ID NO: 1910207 - DNA, 25 bp, Homo sapien
tgtgcttctgggcaaccaatggatg

SEQ ID NO: 1910208 - DNA, 25 bp, Homo sapien
ggattcgtcacgttttcacctttca

SEQ ID NO: 1910209 - DNA, 25 bp, Homo sapien
gcagtggggattcgtcacgttttca

SEQ ID NO: 1910210 - DNA, 25 bp, Homo sapien
accttatcacattgcttaagcacca

SEQ ID NO: 1910211 - DNA, 25 bp, Homo sapien
ccttatcacattgcttaagcaccat

SEQ ID NO: 1910212 - DNA, 25 bp, Homo sapien
tgcatttccgggataaaccccactg

SEQ ID NO: 1910213 - DNA, 25 bp, Homo sapien
gcacttatgctgactgactgactta

SEQ ID NO: 1910214 - DNA, 25 bp, Homo sapien
tgtcagtgccctttacctaggtgag

SEQ ID NO: 1910215 - DNA, 25 bp, Homo sapien
taatatgtcagtgcatcctaggcct

SEQ ID NO: 1910216 - DNA, 25 bp, Homo sapien
ccaccttgggatatagccacccctc

SEQ ID NO: 1910217 - DNA, 25 bp, Homo sapien
tttcccctttggcagggctttgatg

SEQ ID NO: 1910218 - DNA, 25 bp, Homo sapien
ccaggcatacaatttcattacacac

SEQ ID NO: 1910219 - DNA, 25 bp, Homo sapien
cacttctttgtgctaggctttctgc

SEQ ID NO: 1910220 - DNA, 25 bp, Homo sapien
caatttcattacacacgcacacgca

SEQ ID NO: 1910221 - DNA, 25 bp, Homo sapien
caagaaaatcttcatgccccaggca

SEQ ID NO: 1910222 - DNA, 25 bp, Homo sapien
agcctctccctctatcgaattttct

SEQ ID NO: 1910223 - DNA, 25 bp, Homo sapien
cccaggagaatatttctagacccac

SEQ ID NO: 1910224 - DNA, 25 bp, Homo sapien
gaatatctaagtcataccagggagg

SEQ ID NO: 1910225 - DNA, 25 bp, Homo sapien
tggtgctgtatatcccatcgcagtc

SEQ ID NO: 1910226 - DNA, 25 bp, Homo sapien
tgcccatcggattctaaaatgttgt

SEQ ID NO: 1910227 - DNA, 25 bp, Homo sapien
caaggccaatatggctactgctgtc

SEQ ID NO: 1910228 - DNA, 25 bp, Homo sapien
aatgttgttagatacacaaggagcc

SEQ ID NO: 1910229 - DNA, 25 bp, Homo sapien
tctgaatgtcctgttagctgcccat

SEQ ID NO: 1910230 - DNA, 25 bp, Homo sapien
tgcttgtgcatgaccctgatgagta

SEQ ID NO: 1910231 - DNA, 25 bp, Homo sapien
caagaaggttgaattgttacccagt

SEQ ID NO: 1910232 - DNA, 25 bp, Homo sapien
ttcttagggtatgaaaattggccac

SEQ ID NO: 1910233 - DNA, 25 bp, Homo sapien
gcaagttaagctaaatatctggatt

SEQ ID NO: 1910234 - DNA, 25 bp, Homo sapien
tagtctgcaggcactttttcatctt

SEQ ID NO: 1910235 - DNA, 25 bp, Homo sapien
cactttttcatcttccaaaaatatt

SEQ ID NO: 1910236 - DNA, 25 bp, Homo sapien
ttagtctgcaggcactttttcatct

SEQ ID NO: 1910237 - DNA, 25 bp, Homo sapien
aggcactttttcatcttccaaaaat

SEQ ID NO: 1910238 - DNA, 25 bp, Homo sapien
tttcaaggaacaagcaccacaaagg

SEQ ID NO: 1910239 - DNA, 25 bp, Homo sapien
taaggctcattagtagacacagctg

SEQ ID NO: 1910240 - DNA, 25 bp, Homo sapien
cacagctgccctcaagatttcaatt

SEQ ID NO: 1910241 - DNA, 25 bp, Homo sapien
taagtcagagtatttcacatggaaa

SEQ ID NO: 1910242 - DNA, 25 bp, Homo sapien
ttcaatgcgttcatgcttagcttcc

SEQ ID NO: 1910243 - DNA, 25 bp, Homo sapien
gctcttctactttgcgtagctgaat

SEQ ID NO: 1910244 - DNA, 25 bp, Homo sapien
gcttcctgttcacgctgctcttcta

SEQ ID NO: 1910245 - DNA, 25 bp, Homo sapien
cagcaatacggcgagacaggatggt

SEQ ID NO: 1910246 - DNA, 25 bp, Homo sapien
tacacatgagaaatacttataggaa

SEQ ID NO: 1910247 - DNA, 25 bp, Homo sapien
aatacacatgagaaatacttatagg

SEQ ID NO: 1910248 - DNA, 25 bp, Homo sapien
gtgaatccaaaccattcatttaaat

SEQ ID NO: 1910249 - DNA, 25 bp, Homo sapien
agtgaatccaaaccattcatttaaa

SEQ ID NO: 1910250 - DNA, 25 bp, Homo sapien
tacaggtagggttgatggatggcgc

SEQ ID NO: 1910251 - DNA, 25 bp, Homo sapien
cagaagcaggtataacttgtgatgg

SEQ ID NO: 1910252 - DNA, 25 bp, Homo sapien
cttttcgtattgcttccagtagcac

SEQ ID NO: 1910253 - DNA, 25 bp, Homo sapien
tggatggcgctttggctcagaagca

SEQ ID NO: 1910254 - DNA, 25 bp, Homo sapien
gaggcattaatggaacatggggacc

SEQ ID NO: 1910255 - DNA, 25 bp, Homo sapien
agtagatggagttggatgtagccca

SEQ ID NO: 1910256 - DNA, 25 bp, Homo sapien
gcattaatggaacatggggacctgg

SEQ ID NO: 1910257 - DNA, 25 bp, Homo sapien
acctggggcagtagatggagttgga

SEQ ID NO: 1910258 - DNA, 25 bp, Homo sapien
gacaggtgatgatggtcgaatgcca

SEQ ID NO: 1910259 - DNA, 25 bp, Homo sapien
tgagcaagagctgtaactgtgacag

SEQ ID NO: 1910260 - DNA, 25 bp, Homo sapien
gcagcccctgaacttcaccttgtgg

SEQ ID NO: 1910261 - DNA, 25 bp, Homo sapien
ctgtactagaggaggtgcaattgga

SEQ ID NO: 1910262 - DNA, 25 bp, Homo sapien
acaaacacaggtgttctgcctgtag

SEQ ID NO: 1910263 - DNA, 25 bp, Homo sapien
gttctgcctgtagctggtgactgag

SEQ ID NO: 1910264 - DNA, 25 bp, Homo sapien
actgagggcgattttctatcaaacc

SEQ ID NO: 1910265 - DNA, 25 bp, Homo sapien
gctggtgactgagggcgattttcta

SEQ ID NO: 1910266 - DNA, 25 bp, Homo sapien
taatacactgcacatgatatgcttg

SEQ ID NO: 1910267 - DNA, 25 bp, Homo sapien
cccatttcttagactgttacccaca

SEQ ID NO: 1910268 - DNA, 25 bp, Homo sapien
ctatggtggctttcatgcaacaatg

SEQ ID NO: 1910269 - DNA, 25 bp, Homo sapien
gagtgtgtcagctctaaccagaaga

SEQ ID NO: 1910270 - DNA, 25 bp, Homo sapien
gtggtctgactaataccctttcctc

SEQ ID NO: 1910271 - DNA, 25 bp, Homo sapien
ctcatctgactaaatggcaaggcag

SEQ ID NO: 1910272 - DNA, 25 bp, Homo sapien
tacaggtgggtatcggttttgcatc

SEQ ID NO: 1910273 - DNA, 25 bp, Homo sapien
gctctagtcagaagctcactcatct

SEQ ID NO: 1910274 - DNA, 25 bp, Homo sapien
gtaagatccatccatatgatccacg

SEQ ID NO: 1910275 - DNA, 25 bp, Homo sapien
gatccatccatatgatccacgtatg

SEQ ID NO: 1910276 - DNA, 25 bp, Homo sapien
atccatccatatgatccacgtatgt

SEQ ID NO: 1910277 - DNA, 25 bp, Homo sapien
aagatccatccatatgatccacgta

SEQ ID NO: 1910278 - DNA, 25 bp, Homo sapien
ggctgggccattagcaacttcaata

SEQ ID NO: 1910279 - DNA, 25 bp, Homo sapien
gccattagcaacttcaatatgctta

SEQ ID NO: 1910280 - DNA, 25 bp, Homo sapien
agaggctgggccattagcaacttca

SEQ ID NO: 1910281 - DNA, 25 bp, Homo sapien
tgggccattagcaacttcaatatgc

SEQ ID NO: 1910282 - DNA, 25 bp, Homo sapien
tcttggcactttttctggttcatga

SEQ ID NO: 1910283 - DNA, 25 bp, Homo sapien
cgcctgtcatgaggtgctcttggca

SEQ ID NO: 1910284 - DNA, 25 bp, Homo sapien
cctgtcatgaggtgctcttggcact

SEQ ID NO: 1910285 - DNA, 25 bp, Homo sapien
ggttcatgaggacgatctagatttt

SEQ ID NO: 1910286 - DNA, 25 bp, Homo sapien
cctcaattttttaatctcttgtaat

SEQ ID NO: 1910287 - DNA, 25 bp, Homo sapien
tcaattttttaatctcttgtaatac

SEQ ID NO: 1910288 - DNA, 25 bp, Homo sapien
ctcaattttttaatctcttgtaata

SEQ ID NO: 1910289 - DNA, 25 bp, Homo sapien
ttatcctctgtatcttgcaacattt

SEQ ID NO: 1910290 - DNA, 25 bp, Homo sapien
caaagaaatacgaaggattggtata

SEQ ID NO: 1910291 - DNA, 25 bp, Homo sapien
gatcaaagaaatacgaaggattggt

SEQ ID NO: 1910292 - DNA, 25 bp, Homo sapien
tccatagatcaaagaaatacgaagg

SEQ ID NO: 1910293 - DNA, 25 bp, Homo sapien
tgttcacaaacatcgtacgtctcct

SEQ ID NO: 1910294 - DNA, 25 bp, Homo sapien
tacgtctcctgtaatggaataggca

SEQ ID NO: 1910295 - DNA, 25 bp, Homo sapien
ggtcttgaattgtagaacttcggaa

SEQ ID NO: 1910296 - DNA, 25 bp, Homo sapien
tcttgcgatcgaaaagctgctggtc

SEQ ID NO: 1910297 - DNA, 25 bp, Homo sapien
cactaacagataaacggtccacacg

SEQ ID NO: 1910298 - DNA, 25 bp, Homo sapien
tcttcctttggatcaagctgtgtaa

SEQ ID NO: 1910299 - DNA, 25 bp, Homo sapien
aatgagttgactctgaaggaaaaac

SEQ ID NO: 1910300 - DNA, 25 bp, Homo sapien
cggtccacacgttcttgcaatgagt

SEQ ID NO: 1910301 - DNA, 25 bp, Homo sapien
ttaatgcctctaggcagtgctgtgt

SEQ ID NO: 1910302 - DNA, 25 bp, Homo sapien
tttgccaaggaaatattggttacac

SEQ ID NO: 1910303 - DNA, 25 bp, Homo sapien
tgctgtgtggcacaagtgcctagga

SEQ ID NO: 1910304 - DNA, 25 bp, Homo sapien
gcctaggatcgatgtttcttttcac

SEQ ID NO: 1910305 - DNA, 25 bp, Homo sapien
tgagattaacctttgtgccagttca

SEQ ID NO: 1910306 - DNA, 25 bp, Homo sapien
gagattaacctttgtgccagttcac

SEQ ID NO: 1910307 - DNA, 25 bp, Homo sapien
cttgagattaacctttgtgccagtt

SEQ ID NO: 1910308 - DNA, 25 bp, Homo sapien
ttgagattaacctttgtgccagttc

SEQ ID NO: 1910309 - DNA, 25 bp, Homo sapien
ttggaatctaccaaatctttattta

SEQ ID NO: 1910310 - DNA, 25 bp, Homo sapien
aatctttatttaactgatcaaaaag

SEQ ID NO: 1910311 - DNA, 25 bp, Homo sapien
gagagacatgttaagactgcccact

SEQ ID NO: 1910312 - DNA, 25 bp, Homo sapien
tggttgcagtggtctacgtatgtcc

SEQ ID NO: 1910313 - DNA, 25 bp, Homo sapien
tttgtagccgtaccagctcttttgg

SEQ ID NO: 1910314 - DNA, 25 bp, Homo sapien
aatgctaacgttctttctgcccaag

SEQ ID NO: 1910315 - DNA, 25 bp, Homo sapien
cctaaacactcataaggatgggtct

SEQ ID NO: 1910316 - DNA, 25 bp, Homo sapien
taagttgacaccaatagccaaaggt

SEQ ID NO: 1910317 - DNA, 25 bp, Homo sapien
gaatatgacctctcgctctctcaaa

SEQ ID NO: 1910318 - DNA, 25 bp, Homo sapien
caattttctgggatacaacttctaa

SEQ ID NO: 1910319 - DNA, 25 bp, Homo sapien
tgcatctattgcttgctctactgta

SEQ ID NO: 1910320 - DNA, 25 bp, Homo sapien
tcagcctcctattagagatgtgagc

SEQ ID NO: 1910321 - DNA, 25 bp, Homo sapien
tttgtagattagcaaacttacctga

SEQ ID NO: 1910322 - DNA, 25 bp, Homo sapien
tgtattctcgacaaattggcctccc

SEQ ID NO: 1910323 - DNA, 25 bp, Homo sapien
gtacctgttggagcctaatgccggg

SEQ ID NO: 1910324 - DNA, 25 bp, Homo sapien
ccagacggtacctgttggagcctaa

SEQ ID NO: 1910325 - DNA, 25 bp, Homo sapien
tccaactgacaccagacggtacctg

SEQ ID NO: 1910326 - DNA, 25 bp, Homo sapien
tcaaatagcaactccaactgacacc

SEQ ID NO: 1910327 - DNA, 25 bp, Homo sapien
cttgaagattttaacgattttgcag

SEQ ID NO: 1910328 - DNA, 25 bp, Homo sapien
tgaagattttaacgattttgcagcc

SEQ ID NO: 1910329 - DNA, 25 bp, Homo sapien
aagattttaacgattttgcagccat

SEQ ID NO: 1910330 - DNA, 25 bp, Homo sapien
gaagattttaacgattttgcagcca

SEQ ID NO: 1910331 - DNA, 25 bp, Homo sapien
gcttccactgcaactttactccaac

SEQ ID NO: 1910332 - DNA, 25 bp, Homo sapien
caacagctatcatcaacagttgttt

SEQ ID NO: 1910333 - DNA, 25 bp, Homo sapien
aactttactccaacagctatcatca

SEQ ID NO: 1910334 - DNA, 25 bp, Homo sapien
ttactccaacagctatcatcaacag

SEQ ID NO: 1910335 - DNA, 25 bp, Homo sapien
tctcacattcctcttcagagatctg

SEQ ID NO: 1910336 - DNA, 25 bp, Homo sapien
tggccagaccacaaggccttatccc

SEQ ID NO: 1910337 - DNA, 25 bp, Homo sapien
tagcatctcacattcctcttcagag

SEQ ID NO: 1910338 - DNA, 25 bp, Homo sapien
cagagatctggccagaccacaaggc

SEQ ID NO: 1910339 - DNA, 25 bp, Homo sapien
gaacaagttcctaataatgttgtca

SEQ ID NO: 1910340 - DNA, 25 bp, Homo sapien
caagtccactgggtgaaagagaaca

SEQ ID NO: 1910341 - DNA, 25 bp, Homo sapien
gagaacaagttcctaataatgttgt

SEQ ID NO: 1910342 - DNA, 25 bp, Homo sapien
aagagaacaagttcctaataatgtt

SEQ ID NO: 1910343 - DNA, 25 bp, Homo sapien
tataaatgatcacaactatgtattt

SEQ ID NO: 1910344 - DNA, 25 bp, Homo sapien
gaacattagacggattgaataacca

SEQ ID NO: 1910345 - DNA, 25 bp, Homo sapien
cctgagagttcaaattgagactgca

SEQ ID NO: 1910346 - DNA, 25 bp, Homo sapien
gaaaaaagaccttagctaatcgtga

SEQ ID NO: 1910347 - DNA, 25 bp, Homo sapien
aaatttaagtcgaatccaccgcaca

SEQ ID NO: 1910348 - DNA, 25 bp, Homo sapien
aattaatcggttatagggcaggacg

SEQ ID NO: 1910349 - DNA, 25 bp, Homo sapien
catcgttattccagttcatcatccg

SEQ ID NO: 1910350 - DNA, 25 bp, Homo sapien
atccgcaagtgcaagagaaggtgtc

SEQ ID NO: 1910351 - DNA, 25 bp, Homo sapien
caggacgtgaatgttgagatcggat

SEQ ID NO: 1910352 - DNA, 25 bp, Homo sapien
ggcaccagaagcgacagcaccgctt

SEQ ID NO: 1910353 - DNA, 25 bp, Homo sapien
gagtgagcggctccgtaactctgcc

SEQ ID NO: 1910354 - DNA, 25 bp, Homo sapien
agtcctgccgacatgagcgctgagt

SEQ ID NO: 1910355 - DNA, 25 bp, Homo sapien
gaaaggtgcaatggatgctgcatag

SEQ ID NO: 1910356 - DNA, 25 bp, Homo sapien
ttcatgcttcggcagcggtcgccgg

SEQ ID NO: 1910357 - DNA, 25 bp, Homo sapien
tgctcgacgcgcgagtgaacaacac

SEQ ID NO: 1910358 - DNA, 25 bp, Homo sapien
tcggctcgcgggactccgcctagag

SEQ ID NO: 1910359 - DNA, 25 bp, Homo sapien
gggcggaacccgctcagggcagcgg

SEQ ID NO: 1910360 - DNA, 25 bp, Homo sapien
ggttctgtggtattgcccaatcctc

SEQ ID NO: 1910361 - DNA, 25 bp, Homo sapien
gccgaggtgggaaatccagcctccg

SEQ ID NO: 1910362 - DNA, 25 bp, Homo sapien
aggtgggaaatccagcctccgccca

SEQ ID NO: 1910363 - DNA, 25 bp, Homo sapien
attagtggggccgaagctcgctctt

SEQ ID NO: 1910364 - DNA, 25 bp, Homo sapien
gcaagcctgagaacgcaaagagcct

SEQ ID NO: 1910365 - DNA, 25 bp, Homo sapien
ccagtagagcccgaggtaggtgatc

SEQ ID NO: 1910366 - DNA, 25 bp, Homo sapien
taccaattggtagtgtaggcccagt

SEQ ID NO: 1910367 - DNA, 25 bp, Homo sapien
taaggcaagagtttccaggcagagg

SEQ ID NO: 1910368 - DNA, 25 bp, Homo sapien
ttaaccaagaaaaagctagcactgt

SEQ ID NO: 1910369 - DNA, 25 bp, Homo sapien
tacttacatagccatatcagctgca

SEQ ID NO: 1910370 - DNA, 25 bp, Homo sapien
tgtaccaggcaaattttaaccaaga

SEQ ID NO: 1910371 - DNA, 25 bp, Homo sapien
ttactaccgcctccaggaagatcta

SEQ ID NO: 1910372 - DNA, 25 bp, Homo sapien
catagttgagaacacctggggtggc

SEQ ID NO: 1910373 - DNA, 25 bp, Homo sapien
tagttgagaacacctggggtggcct

SEQ ID NO: 1910374 - DNA, 25 bp, Homo sapien
atagttgagaacacctggggtggcc

SEQ ID NO: 1910375 - DNA, 25 bp, Homo sapien
cacataatggatagaactcgaagac

SEQ ID NO: 1910376 - DNA, 25 bp, Homo sapien
aaaaatctggctataaaggctgctg

SEQ ID NO: 1910377 - DNA, 25 bp, Homo sapien
gaaccagcactaatgaaattttctc

SEQ ID NO: 1910378 - DNA, 25 bp, Homo sapien
gagaccaaagatcatagaaccagca

SEQ ID NO: 1910379 - DNA, 25 bp, Homo sapien
taatgaagccaaatactcaggtatc

SEQ ID NO: 1910380 - DNA, 25 bp, Homo sapien
caggtatcctcacagttcataatcg

SEQ ID NO: 1910381 - DNA, 25 bp, Homo sapien
gtgtattaatagtgccccagtcatt

SEQ ID NO: 1910382 - DNA, 25 bp, Homo sapien
tgtgaaaagatggagcttaaggctc

SEQ ID NO: 1910383 - DNA, 25 bp, Homo sapien
ctggctacgctttgagaaatcagga

SEQ ID NO: 1910384 - DNA, 25 bp, Homo sapien
tggaagatggctagggttccccagt

SEQ ID NO: 1910385 - DNA, 25 bp, Homo sapien
cctcctcataggagataaagtacga

SEQ ID NO: 1910386 - DNA, 25 bp, Homo sapien
tctcctaggtcattgcttcgcagct

SEQ ID NO: 1910387 - DNA, 25 bp, Homo sapien
gacactgttaggaagaatagaggac

SEQ ID NO: 1910388 - DNA, 25 bp, Homo sapien
catggagcatacagtctgctgggaa

SEQ ID NO: 1910389 - DNA, 25 bp, Homo sapien
tgagccctttttacttagccactgg

SEQ ID NO: 1910390 - DNA, 25 bp, Homo sapien
gacatggcccttatcctcatggagc

SEQ ID NO: 1910391 - DNA, 25 bp, Homo sapien
tgggcatcctgtgagagggtctcca

SEQ ID NO: 1910392 - DNA, 25 bp, Homo sapien
tttattatatagatccacccaggag

SEQ ID NO: 1910393 - DNA, 25 bp, Homo sapien
gatatcagtcctatgcacacttggt

SEQ ID NO: 1910394 - DNA, 25 bp, Homo sapien
caaaatatccaatgacaagtaaggc

SEQ ID NO: 1910395 - DNA, 25 bp, Homo sapien
tacgtttggtacaggctttggaagc

SEQ ID NO: 1910396 - DNA, 25 bp, Homo sapien
gaagctgcattgtggatgggaccaa

SEQ ID NO: 1910397 - DNA, 25 bp, Homo sapien
gggatctgacagaccaaaatgtaaa

SEQ ID NO: 1910398 - DNA, 25 bp, Homo sapien
tcctttggacaaagcatcttacgtt

SEQ ID NO: 1910399 - DNA, 25 bp, Homo sapien
tgcctggtcaatcagcgtggctgga

SEQ ID NO: 1910400 - DNA, 25 bp, Homo sapien
ggtgtgctacatatctaaaagctga

SEQ ID NO: 1910401 - DNA, 25 bp, Homo sapien
aacataataaactctagaggcagga

SEQ ID NO: 1910402 - DNA, 25 bp, Homo sapien
gcaggaaaaccttaacaaccatcag

SEQ ID NO: 1910403 - DNA, 25 bp, Homo sapien
tgaggtcatccaagtctaagacgat

SEQ ID NO: 1910404 - DNA, 25 bp, Homo sapien
aacaaagagctaacctggggaatgt

SEQ ID NO: 1910405 - DNA, 25 bp, Homo sapien
ggtcatccaagtctaagacgatttg

SEQ ID NO: 1910406 - DNA, 25 bp, Homo sapien
ccaagtctaagacgatttgatttct

SEQ ID NO: 1910407 - DNA, 25 bp, Homo sapien
gatttgacagcataggcaagtctgt

SEQ ID NO: 1910408 - DNA, 25 bp, Homo sapien
tcctacgaaagtgagacgatggtct

SEQ ID NO: 1910409 - DNA, 25 bp, Homo sapien
gcatttgaaccgctgagaacctaaa

SEQ ID NO: 1910410 - DNA, 25 bp, Homo sapien
tcatgtaagtgatgccaactgggag

SEQ ID NO: 1910411 - DNA, 25 bp, Homo sapien
gaatttggtgcatccgagttcccag

SEQ ID NO: 1910412 - DNA, 25 bp, Homo sapien
taagtggacctcattcaaccagttg

SEQ ID NO: 1910413 - DNA, 25 bp, Homo sapien
gcactaggctgcatgcccgcaataa

SEQ ID NO: 1910414 - DNA, 25 bp, Homo sapien
acttggtctcgaactggaacttaca

SEQ ID NO: 1910415 - DNA, 25 bp, Homo sapien
tgaggtttagataagtctttgtaac

SEQ ID NO: 1910416 - DNA, 25 bp, Homo sapien
aactcagagtataacagctacttgc

SEQ ID NO: 1910417 - DNA, 25 bp, Homo sapien
taacagctacttgcattgaaaatgt

SEQ ID NO: 1910418 - DNA, 25 bp, Homo sapien
ccatcttgtattcacccaactcaga

SEQ ID NO: 1910419 - DNA, 25 bp, Homo sapien
gaaccgcacaacgctgctgtcactg

SEQ ID NO: 1910420 - DNA, 25 bp, Homo sapien
cagaaccgcacaacgctgctgtcac

SEQ ID NO: 1910421 - DNA, 25 bp, Homo sapien
agaaccgcacaacgctgctgtcact

SEQ ID NO: 1910422 - DNA, 25 bp, Homo sapien
accgcacaacgctgctgtcactgcc

SEQ ID NO: 1910423 - DNA, 25 bp, Homo sapien
ccagatctgccttgagaacgtcaat

SEQ ID NO: 1910424 - DNA, 25 bp, Homo sapien
ctcaaagatgagctgtccaatctgc

SEQ ID NO: 1910425 - DNA, 25 bp, Homo sapien
gatggatctcaaagatgagctgtcc

SEQ ID NO: 1910426 - DNA, 25 bp, Homo sapien
tccagatctgccttgagaacgtcaa

SEQ ID NO: 1910427 - DNA, 25 bp, Homo sapien
taacggtacaagacttctgctatca

SEQ ID NO: 1910428 - DNA, 25 bp, Homo sapien
tgtaacggtacaagacttctgctat

SEQ ID NO: 1910429 - DNA, 25 bp, Homo sapien
gtaacggtacaagacttctgctatc

SEQ ID NO: 1910430 - DNA, 25 bp, Homo sapien
aatgtaacggtacaagacttctgct

SEQ ID NO: 1910431 - DNA, 25 bp, Homo sapien
agggcaatggcagaaccacggacag

SEQ ID NO: 1910432 - DNA, 25 bp, Homo sapien
caatggcagaaccacggacagctcc

SEQ ID NO: 1910433 - DNA, 25 bp, Homo sapien
gacagctcccggcagctgcttttct

SEQ ID NO: 1910434 - DNA, 25 bp, Homo sapien
caggcagaagggcaatggcagaacc

SEQ ID NO: 1910435 - DNA, 25 bp, Homo sapien
ttgcagaaataatcgttcatcagct

SEQ ID NO: 1910436 - DNA, 25 bp, Homo sapien
catcagctctcactggatattgttg

SEQ ID NO: 1910437 - DNA, 25 bp, Homo sapien
gaaataatcgttcatcagctctcac

SEQ ID NO: 1910438 - DNA, 25 bp, Homo sapien
ctcactggatattgttgaaaagttc

SEQ ID NO: 1910439 - DNA, 25 bp, Homo sapien
ggctaattaagagcatacattttca

SEQ ID NO: 1910440 - DNA, 25 bp, Homo sapien
tattaatggtgagcttcttgatctg

SEQ ID NO: 1910441 - DNA, 25 bp, Homo sapien
taaggttatattaatggtgagcttc

SEQ ID NO: 1910442 - DNA, 25 bp, Homo sapien
cctggctaattaagagcatacattt

SEQ ID NO: 1910443 - DNA, 25 bp, Homo sapien
ttgaaaatgtcattaacattgctct

SEQ ID NO: 1910444 - DNA, 25 bp, Homo sapien
ctgacccaaagccagcatcttgaaa

SEQ ID NO: 1910445 - DNA, 25 bp, Homo sapien
cagcatcttgaaaatgtcattaaca

SEQ ID NO: 1910446 - DNA, 25 bp, Homo sapien
gccagcatcttgaaaatgtcattaa

SEQ ID NO: 1910447 - DNA, 25 bp, Homo sapien
tgctgctggttaactctagggtaga

SEQ ID NO: 1910448 - DNA, 25 bp, Homo sapien
tgaaacatcaggagctaaggtctct

SEQ ID NO: 1910449 - DNA, 25 bp, Homo sapien
ggtctctggacgttcaaggctgctg

SEQ ID NO: 1910450 - DNA, 25 bp, Homo sapien
ttcggtaaggtttcctgcccaagca

SEQ ID NO: 1910451 - DNA, 25 bp, Homo sapien
cgtacagtttaaggatattggtcaa

SEQ ID NO: 1910452 - DNA, 25 bp, Homo sapien
ccctaacataggtcagagtgaatga

SEQ ID NO: 1910453 - DNA, 25 bp, Homo sapien
aaatggtataaactctagcctggat

SEQ ID NO: 1910454 - DNA, 25 bp, Homo sapien
gaagctagtagtgaggaatttaccc

SEQ ID NO: 1910455 - DNA, 25 bp, Homo sapien
gcagccacatcctatttaccactgt

SEQ ID NO: 1910456 - DNA, 25 bp, Homo sapien
gaataaatgagtgaaggtgtgaagg

SEQ ID NO: 1910457 - DNA, 25 bp, Homo sapien
tgttagcgtgttttttactatttgc

SEQ ID NO: 1910458 - DNA, 25 bp, Homo sapien
aaggcagaaacgctgacatttgtta

SEQ ID NO: 1910459 - DNA, 25 bp, Homo sapien
gataccaaaggtgctgactctccag

SEQ ID NO: 1910460 - DNA, 25 bp, Homo sapien
gaatgtgagctgacttgacactagg

SEQ ID NO: 1910461 - DNA, 25 bp, Homo sapien
cagtcaatggacaagcggtgatacc

SEQ ID NO: 1910462 - DNA, 25 bp, Homo sapien
gacactaggatcaaaacgatgcact

SEQ ID NO: 1910463 - DNA, 25 bp, Homo sapien
gctaacctcaaaatgggtatcatca

SEQ ID NO: 1910464 - DNA, 25 bp, Homo sapien
cctcaaaatgggtatcatcacttcc

SEQ ID NO: 1910465 - DNA, 25 bp, Homo sapien
acctcaaaatgggtatcatcacttc

SEQ ID NO: 1910466 - DNA, 25 bp, Homo sapien
taacctcaaaatgggtatcatcact

SEQ ID NO: 1910467 - DNA, 25 bp, Homo sapien
ctccctctctatgaggaagaaacaa

SEQ ID NO: 1910468 - DNA, 25 bp, Homo sapien
tccctctctatgaggaagaaacaaa

SEQ ID NO: 1910469 - DNA, 25 bp, Homo sapien
ctctccctctctatgaggaagaaac

SEQ ID NO: 1910470 - DNA, 25 bp, Homo sapien
tctccctctctatgaggaagaaaca

SEQ ID NO: 1910471 - DNA, 25 bp, Homo sapien
ggcactgcttgttgcggatttgatg

SEQ ID NO: 1910472 - DNA, 25 bp, Homo sapien
gaacctgtcgtcaagacacactgac

SEQ ID NO: 1910473 - DNA, 25 bp, Homo sapien
tgtaggactagagtcagtagccagg

SEQ ID NO: 1910474 - DNA, 25 bp, Homo sapien
gagctaaattgaacctgtcgtcaag

SEQ ID NO: 1910475 - DNA, 25 bp, Homo sapien
ttagcagcagacagtgtaccacgga

SEQ ID NO: 1910476 - DNA, 25 bp, Homo sapien
tactgcaaggcatgtttcctggagg

SEQ ID NO: 1910477 - DNA, 25 bp, Homo sapien
cagaactctgtcgtgtatcatggtc

SEQ ID NO: 1910478 - DNA, 25 bp, Homo sapien
gacttcccttagaacagagcactgt

SEQ ID NO: 1910479 - DNA, 25 bp, Homo sapien
tttgctagcacctctcagttcaggg

SEQ ID NO: 1910480 - DNA, 25 bp, Homo sapien
tcctacggaggaaaagcgctttgct

SEQ ID NO: 1910481 - DNA, 25 bp, Homo sapien
ttaagtcactaataaaggcccgtgc

SEQ ID NO: 1910482 - DNA, 25 bp, Homo sapien
gctgggcaggaactaccacaatgtg

SEQ ID NO: 1910483 - DNA, 25 bp, Homo sapien
tcttctctaacttctttgagcctga

SEQ ID NO: 1910484 - DNA, 25 bp, Homo sapien
ctctaacttctttgagcctgaaaca

SEQ ID NO: 1910485 - DNA, 25 bp, Homo sapien
attcttctctaacttctttgagcct

SEQ ID NO: 1910486 - DNA, 25 bp, Homo sapien
tctctaacttctttgagcctgaaac

SEQ ID NO: 1910487 - DNA, 25 bp, Homo sapien
cccaaggctggagatctatatgcca

SEQ ID NO: 1910488 - DNA, 25 bp, Homo sapien
cctgcccaaggctggagatctatat

SEQ ID NO: 1910489 - DNA, 25 bp, Homo sapien
ggctggagatctatatgccaccggg

SEQ ID NO: 1910490 - DNA, 25 bp, Homo sapien
gtggtgctgatatatctcaggaacc

SEQ ID NO: 1910491 - DNA, 25 bp, Homo sapien
cagtgtctgcatacgtagtaaagtt

SEQ ID NO: 1910492 - DNA, 25 bp, Homo sapien
tggatccagtgaaagccgagatttt

SEQ ID NO: 1910493 - DNA, 25 bp, Homo sapien
gaggtggaaactacacagtgtctgc

SEQ ID NO: 1910494 - DNA, 25 bp, Homo sapien
ttcagatgtcaaattatgggtttca

SEQ ID NO: 1910495 - DNA, 25 bp, Homo sapien
tctggttccaggacattccttgcat

SEQ ID NO: 1910496 - DNA, 25 bp, Homo sapien
ctgacaattacagataacgctctgg

SEQ ID NO: 1910497 - DNA, 25 bp, Homo sapien
tacagataacgctctggttccagga

SEQ ID NO: 1910498 - DNA, 25 bp, Homo sapien
caggacattccttgcatgattctat

SEQ ID NO: 1910499 - DNA, 25 bp, Homo sapien
aacctgaggagctagaaactactgc

SEQ ID NO: 1910500 - DNA, 25 bp, Homo sapien
tgaaaatgctttgcctcctaaggac

SEQ ID NO: 1910501 - DNA, 25 bp, Homo sapien
cttaaggcagttggacatatcaggg

SEQ ID NO: 1910502 - DNA, 25 bp, Homo sapien
agaatgctctctgaggaactacggg

SEQ ID NO: 1910503 - DNA, 25 bp, Homo sapien
tttcttcttgatgacaatcacagaa

SEQ ID NO: 1910504 - DNA, 25 bp, Homo sapien
tcttgatgacaatcacagaattaga

SEQ ID NO: 1910505 - DNA, 25 bp, Homo sapien
tctttcttcttgatgacaatcacag

SEQ ID NO: 1910506 - DNA, 25 bp, Homo sapien
cttcttgatgacaatcacagaatta

SEQ ID NO: 1910507 - DNA, 25 bp, Homo sapien
cgtggacaggccattcacggcgata

SEQ ID NO: 1910508 - DNA, 25 bp, Homo sapien
tagtgaatgaactccgcttggccgc

SEQ ID NO: 1910509 - DNA, 25 bp, Homo sapien
aatgagactccagggaaattcggcc

SEQ ID NO: 1910510 - DNA, 25 bp, Homo sapien
ctgggtgctcggcttctcaactggc

SEQ ID NO: 1910511 - DNA, 25 bp, Homo sapien
agccccgagtagacaccggcgcagg

SEQ ID NO: 1910512 - DNA, 25 bp, Homo sapien
gctctgcgcagagccgcaggccgaa

SEQ ID NO: 1910513 - DNA, 25 bp, Homo sapien
tagacaccggcgcaggacgccgcag

SEQ ID NO: 1910514 - DNA, 25 bp, Homo sapien
gaccgctgcgcacgtaggtcacctg

SEQ ID NO: 1910515 - DNA, 25 bp, Homo sapien
gcgctacactcggggtcccgcgggc

SEQ ID NO: 1910516 - DNA, 25 bp, Homo sapien
agggcttaggttaggaatgatcaaa

SEQ ID NO: 1910517 - DNA, 25 bp, Homo sapien
ttctatgacaatgaaagggcttagg

SEQ ID NO: 1910518 - DNA, 25 bp, Homo sapien
gccagaaataatctcccagctacag

SEQ ID NO: 1910519 - DNA, 25 bp, Homo sapien
tcataggaccacctacacagtgtgg

SEQ ID NO: 1910520 - DNA, 25 bp, Homo sapien
taaggtcagaaacgattaccaggca

SEQ ID NO: 1910521 - DNA, 25 bp, Homo sapien
taaaggcaaaaatctcagggctgtg

SEQ ID NO: 1910522 - DNA, 25 bp, Homo sapien
cccagggagttattcaaaggcaggt

SEQ ID NO: 1910523 - DNA, 25 bp, Homo sapien
taagtgtacatgagaataccccagg

SEQ ID NO: 1910524 - DNA, 25 bp, Homo sapien
tattcaaaagagcaggagctccctt

SEQ ID NO: 1910525 - DNA, 25 bp, Homo sapien
aacctctaagcacagttactagcag

SEQ ID NO: 1910526 - DNA, 25 bp, Homo sapien
gggccttcatattcaaaagagcagg

SEQ ID NO: 1910527 - DNA, 25 bp, Homo sapien
gctcccttggcagccattctgttct

SEQ ID NO: 1910528 - DNA, 25 bp, Homo sapien
aggaaggagttgtgattacccatat

SEQ ID NO: 1910529 - DNA, 25 bp, Homo sapien
gggaatttcccaaagctgtagagtg

SEQ ID NO: 1910530 - DNA, 25 bp, Homo sapien
gaaggagttgtgattacccatatgt

SEQ ID NO: 1910531 - DNA, 25 bp, Homo sapien
caaagctgtagagtgaaaggaagga

SEQ ID NO: 1910532 - DNA, 25 bp, Homo sapien
ggatgcaatgcccatccgctcacga

SEQ ID NO: 1910533 - DNA, 25 bp, Homo sapien
gggcacacggtgctatcatatataa

SEQ ID NO: 1910534 - DNA, 25 bp, Homo sapien
gaaatcttcagtgccctagctggga

SEQ ID NO: 1910535 - DNA, 25 bp, Homo sapien
gggcttgggcttaatggatctcaac

SEQ ID NO: 1910536 - DNA, 25 bp, Homo sapien
ctttgcagggaaatgtataaagcta

SEQ ID NO: 1910537 - DNA, 25 bp, Homo sapien
gaaatgtataaagctagaaggcttc

SEQ ID NO: 1910538 - DNA, 25 bp, Homo sapien
tgtataaagctagaaggcttcatcc

SEQ ID NO: 1910539 - DNA, 25 bp, Homo sapien
gcagggaaatgtataaagctagaag

SEQ ID NO: 1910540 - DNA, 25 bp, Homo sapien
gaaagggaccacttaaagatctcaa

SEQ ID NO: 1910541 - DNA, 25 bp, Homo sapien
aaagggaccacttaaagatctcaat

SEQ ID NO: 1910542 - DNA, 25 bp, Homo sapien
agaaagggaccacttaaagatctca

SEQ ID NO: 1910543 - DNA, 25 bp, Homo sapien
aagggaccacttaaagatctcaatt

SEQ ID NO: 1910544 - DNA, 25 bp, Homo sapien
gctgaagaagcacacgctggcaatg

SEQ ID NO: 1910545 - DNA, 25 bp, Homo sapien
gaagcacacgctggcaatgacaggg

SEQ ID NO: 1910546 - DNA, 25 bp, Homo sapien
caatgacagggctcaaagcagcctc

SEQ ID NO: 1910547 - DNA, 25 bp, Homo sapien
gctggcaatgacagggctcaaagca

SEQ ID NO: 1910548 - DNA, 25 bp, Homo sapien
tcttaacaaactgcggagtactctg

SEQ ID NO: 1910549 - DNA, 25 bp, Homo sapien
taatggaatgtacaacccctaggtg

SEQ ID NO: 1910550 - DNA, 25 bp, Homo sapien
aaattagttctttggctgcacatgc

SEQ ID NO: 1910551 - DNA, 25 bp, Homo sapien
tgaccccaggcagctattgaattga

SEQ ID NO: 1910552 - DNA, 25 bp, Homo sapien
tataaatctgcataggtccttggac

SEQ ID NO: 1910553 - DNA, 25 bp, Homo sapien
aaatagagctttatgccctatgcca

SEQ ID NO: 1910554 - DNA, 25 bp, Homo sapien
gctgacttggctataacctaagaag

SEQ ID NO: 1910555 - DNA, 25 bp, Homo sapien
taatgctggacttcctaagtaagcc

SEQ ID NO: 1910556 - DNA, 25 bp, Homo sapien
ggtcctgagggcatggacacactcg

SEQ ID NO: 1910557 - DNA, 25 bp, Homo sapien
tgagggcatggacacactcgctcac

SEQ ID NO: 1910558 - DNA, 25 bp, Homo sapien
tgacttgggaatgggggtcctgagg

SEQ ID NO: 1910559 - DNA, 25 bp, Homo sapien
tcctgagggcatggacacactcgct

SEQ ID NO: 1910560 - DNA, 25 bp, Homo sapien
agcctctgtccatctcgcgcaagga

SEQ ID NO: 1910561 - DNA, 25 bp, Homo sapien
catctcgcgcaaggagctctgtctg

SEQ ID NO: 1910562 - DNA, 25 bp, Homo sapien
tcccatggccatagtggtggactac

SEQ ID NO: 1910563 - DNA, 25 bp, Homo sapien
tgtctgcagtcgcacgcctggcctg

SEQ ID NO: 1910564 - DNA, 25 bp, Homo sapien
gataaatatatgtcagcccactgcc

SEQ ID NO: 1910565 - DNA, 25 bp, Homo sapien
tctattcgccgagtgagtgtccagc

SEQ ID NO: 1910566 - DNA, 25 bp, Homo sapien
cacagcatcgggaaagaatctctct

SEQ ID NO: 1910567 - DNA, 25 bp, Homo sapien
tcaaaggacggatgaagttcccaca

SEQ ID NO: 1910568 - DNA, 25 bp, Homo sapien
tggaggcagaatgcttgtatcctgc

SEQ ID NO: 1910569 - DNA, 25 bp, Homo sapien
aaatggaggcagaatgcttgtatcc

SEQ ID NO: 1910570 - DNA, 25 bp, Homo sapien
gaaaatggaggcagaatgcttgtat

SEQ ID NO: 1910571 - DNA, 25 bp, Homo sapien
gaggcagaatgcttgtatcctgcat

SEQ ID NO: 1910572 - DNA, 25 bp, Homo sapien
ctggtcggacgcaggctccgggctg

SEQ ID NO: 1910573 - DNA, 25 bp, Homo sapien
ttgttcctccaccagcctggtcgga

SEQ ID NO: 1910574 - DNA, 25 bp, Homo sapien
gaggagtcccgtgctgcaaagcctc

SEQ ID NO: 1910575 - DNA, 25 bp, Homo sapien
cgcctgaaatgctcgccctgaaagg

SEQ ID NO: 1910576 - DNA, 25 bp, Homo sapien
taaaagcctgaccaaacacatactg

SEQ ID NO: 1910577 - DNA, 25 bp, Homo sapien
tcacatttcagggttgtaaaagcct

SEQ ID NO: 1910578 - DNA, 25 bp, Homo sapien
catttcagggttgtaaaagcctgac

SEQ ID NO: 1910579 - DNA, 25 bp, Homo sapien
tttctccaaccacgggaggtaggca

SEQ ID NO: 1910580 - DNA, 25 bp, Homo sapien
cagaatggcacttcttcagtcggag

SEQ ID NO: 1910581 - DNA, 25 bp, Homo sapien
cacgtcagcccagaatggcacttct

SEQ ID NO: 1910582 - DNA, 25 bp, Homo sapien
cttcagtcggagtgctctgaaatat

SEQ ID NO: 1910583 - DNA, 25 bp, Homo sapien
ccagaaccacgtcagcccagaatgg

SEQ ID NO: 1910584 - DNA, 25 bp, Homo sapien
ctcaaacgtattaagtgaacatttt

SEQ ID NO: 1910585 - DNA, 25 bp, Homo sapien
tctcggatgaaacaccttgatctgg

SEQ ID NO: 1910586 - DNA, 25 bp, Homo sapien
tcttcctgatggtctcggatgaaac

SEQ ID NO: 1910587 - DNA, 25 bp, Homo sapien
tgcttccatagcaccctagcctctt

SEQ ID NO: 1910588 - DNA, 25 bp, Homo sapien
tcttctccagacatatgcttccata

SEQ ID NO: 1910589 - DNA, 25 bp, Homo sapien
tcagaaggccgcagaaagactgtgt

SEQ ID NO: 1910590 - DNA, 25 bp, Homo sapien
cacccaatgcaagtgtgtacactag

SEQ ID NO: 1910591 - DNA, 25 bp, Homo sapien
tacaagtgtaacatgcaccaatgac

SEQ ID NO: 1910592 - DNA, 25 bp, Homo sapien
ctttgggaaattactgacatcagca

SEQ ID NO: 1910593 - DNA, 25 bp, Homo sapien
gaaccactgcttctgcgtgtgaatg

SEQ ID NO: 1910594 - DNA, 25 bp, Homo sapien
cactgcttctgcgtgtgaatgggtg

SEQ ID NO: 1910595 - DNA, 25 bp, Homo sapien
accactgcttctgcgtgtgaatggg

SEQ ID NO: 1910596 - DNA, 25 bp, Homo sapien
tgcttctgcgtgtgaatgggtgtat

SEQ ID NO: 1910597 - DNA, 25 bp, Homo sapien
tgagcagagcttagttcatggctgt

SEQ ID NO: 1910598 - DNA, 25 bp, Homo sapien
gacaataggaccaaggacagagggc

SEQ ID NO: 1910599 - DNA, 25 bp, Homo sapien
ctgagcagagcttagttcatggctg

SEQ ID NO: 1910600 - DNA, 25 bp, Homo sapien
acacagttgagacaataggaccaag

SEQ ID NO: 1910601 - DNA, 25 bp, Homo sapien
gagcacatggggttggacccagaca

SEQ ID NO: 1910602 - DNA, 25 bp, Homo sapien
ttccacaccatggaatcaggtgcca

SEQ ID NO: 1910603 - DNA, 25 bp, Homo sapien
accatggaatcaggtgccagccaga

SEQ ID NO: 1910604 - DNA, 25 bp, Homo sapien
gggcgtgcagggaccataccatccc

SEQ ID NO: 1910605 - DNA, 25 bp, Homo sapien
agcatggggtaactgtctccatgat

SEQ ID NO: 1910606 - DNA, 25 bp, Homo sapien
catggggtaactgtctccatgattc

SEQ ID NO: 1910607 - DNA, 25 bp, Homo sapien
taagcattccggctgccacatcact

SEQ ID NO: 1910608 - DNA, 25 bp, Homo sapien
tctgaaatgatggtaacggagcatc

SEQ ID NO: 1910609 - DNA, 25 bp, Homo sapien
agcatcggggcaccagtttggagat

SEQ ID NO: 1910610 - DNA, 25 bp, Homo sapien
ctggataagtgtgaggaataagcat

SEQ ID NO: 1910611 - DNA, 25 bp, Homo sapien
actgtcagcatccccgcctgccttt

SEQ ID NO: 1910612 - DNA, 25 bp, Homo sapien
cactgtcagcatccccgcctgcctt

SEQ ID NO: 1910613 - DNA, 25 bp, Homo sapien
ctgtcagcatccccgcctgcctttg

SEQ ID NO: 1910614 - DNA, 25 bp, Homo sapien
ccactgtcagcatccccgcctgcct

SEQ ID NO: 1910615 - DNA, 25 bp, Homo sapien
ttgtttcccagtgcctggctggtct

SEQ ID NO: 1910616 - DNA, 25 bp, Homo sapien
aagccaccaaaatctctggcaccaa

SEQ ID NO: 1910617 - DNA, 25 bp, Homo sapien
tggcaccaaaccttgtttcccagtg

SEQ ID NO: 1910618 - DNA, 25 bp, Homo sapien
accaaaatctctggcaccaaacctt

SEQ ID NO: 1910619 - DNA, 25 bp, Homo sapien
tcaggacagcgacacatgtggagca

SEQ ID NO: 1910620 - DNA, 25 bp, Homo sapien
tccatgagggaggacaacagtgtgt

SEQ ID NO: 1910621 - DNA, 25 bp, Homo sapien
ccttgtaaaatatcgggactgtgca

SEQ ID NO: 1910622 - DNA, 25 bp, Homo sapien
agactgggcaggacacctaatgagg

SEQ ID NO: 1910623 - DNA, 25 bp, Homo sapien
gacatacaaacaacatatgggagat

SEQ ID NO: 1910624 - DNA, 25 bp, Homo sapien
aagattcctctaatacaaaggcatt

SEQ ID NO: 1910625 - DNA, 25 bp, Homo sapien
taatatttcaggtgctagacagcag

SEQ ID NO: 1910626 - DNA, 25 bp, Homo sapien
caacatatgggagatgagaataaga

SEQ ID NO: 1910627 - DNA, 25 bp, Homo sapien
cagcccactattattagttgtgaga

SEQ ID NO: 1910628 - DNA, 25 bp, Homo sapien
ggagggccatagtcccaacaaacaa

SEQ ID NO: 1910629 - DNA, 25 bp, Homo sapien
tctggaagctttagtgttaacactc

SEQ ID NO: 1910630 - DNA, 25 bp, Homo sapien
aagtagttgctagccgtttcccaag

SEQ ID NO: 1910631 - DNA, 25 bp, Homo sapien
cactgtgattactcggtgagatctt

SEQ ID NO: 1910632 - DNA, 25 bp, Homo sapien
cgagttcttttcctcatcaacgagg

SEQ ID NO: 1910633 - DNA, 25 bp, Homo sapien
ttggttacttgtgctggacttcgag

SEQ ID NO: 1910634 - DNA, 25 bp, Homo sapien
taagtgacacatcaagaaaggaacg

SEQ ID NO: 1910635 - DNA, 25 bp, Homo sapien
tggagtgcctccttaattgccagct

SEQ ID NO: 1910636 - DNA, 25 bp, Homo sapien
taattgccagctactgcctgcatta

SEQ ID NO: 1910637 - DNA, 25 bp, Homo sapien
tgcctccttaattgccagctactgc

SEQ ID NO: 1910638 - DNA, 25 bp, Homo sapien
tccttaattgccagctactgcctgc

SEQ ID NO: 1910639 - DNA, 25 bp, Homo sapien
ttactcctgaaggtgctgtcctagg

SEQ ID NO: 1910640 - DNA, 25 bp, Homo sapien
cagtacactatcagggttcagtaaa

SEQ ID NO: 1910641 - DNA, 25 bp, Homo sapien
actgtcttagtcaaccctgtccctg

SEQ ID NO: 1910642 - DNA, 25 bp, Homo sapien
cccagaatcttgtggagaagacaag

SEQ ID NO: 1910643 - DNA, 25 bp, Homo sapien
gaagacaagtaactgagccctgggt

SEQ ID NO: 1910644 - DNA, 25 bp, Homo sapien
ttattctgaagctgacaggggcact

SEQ ID NO: 1910645 - DNA, 25 bp, Homo sapien
tatgaagatccaaatgctgctgagg

SEQ ID NO: 1910646 - DNA, 25 bp, Homo sapien
gtccacagagaacggcgccaggatg

SEQ ID NO: 1910647 - DNA, 25 bp, Homo sapien
ctgtggtatgaagatccaaatgctg

SEQ ID NO: 1910648 - DNA, 25 bp, Homo sapien
tgctggccaggcgacacaccatgct

SEQ ID NO: 1910649 - DNA, 25 bp, Homo sapien
tggaaacagaggagagaggctgaga

SEQ ID NO: 1910650 - DNA, 25 bp, Homo sapien
ctggaaacagaggagagaggctgag

SEQ ID NO: 1910651 - DNA, 25 bp, Homo sapien
ggaaacagaggagagaggctgagac

SEQ ID NO: 1910652 - DNA, 25 bp, Homo sapien
gcccttgtgtgtactgatccagcct

SEQ ID NO: 1910653 - DNA, 25 bp, Homo sapien
ctctataaattaacggtgcctcatc

SEQ ID NO: 1910654 - DNA, 25 bp, Homo sapien
taataaggtcttctagagcaggaat

SEQ ID NO: 1910655 - DNA, 25 bp, Homo sapien
gagtgtggaggtaagccattcttca

SEQ ID NO: 1910656 - DNA, 25 bp, Homo sapien
tagctgtcaccacacccaaaatata

SEQ ID NO: 1910657 - DNA, 25 bp, Homo sapien
tacagctcagctgtataaagataaa

SEQ ID NO: 1910658 - DNA, 25 bp, Homo sapien
taaatgaggccaaatgctgccccga

SEQ ID NO: 1910659 - DNA, 25 bp, Homo sapien
cttacaatggttggatacagctcag

SEQ ID NO: 1910660 - DNA, 25 bp, Homo sapien
gttttggaaggagacacgccctgat

SEQ ID NO: 1910661 - DNA, 25 bp, Homo sapien
tgacgaaagccagttgggaagactg

SEQ ID NO: 1910662 - DNA, 25 bp, Homo sapien
ccatctttacgaaatgtggaggaaa

SEQ ID NO: 1910663 - DNA, 25 bp, Homo sapien
ccatccactttggagggtttgaact

SEQ ID NO: 1910664 - DNA, 25 bp, Homo sapien
gactgttctcctcccgaccttgtcc

SEQ ID NO: 1910665 - DNA, 25 bp, Homo sapien
ctgggggatcaccataacgacacca

SEQ ID NO: 1910666 - DNA, 25 bp, Homo sapien
agagagtaggccaggactgttctcc

SEQ ID NO: 1910667 - DNA, 25 bp, Homo sapien
gggatcaccataacgacaccacagg

SEQ ID NO: 1910668 - DNA, 25 bp, Homo sapien
gtgtaggcgggaatttccactacac

SEQ ID NO: 1910669 - DNA, 25 bp, Homo sapien
ggtgtaggcgggaatttccactaca

SEQ ID NO: 1910670 - DNA, 25 bp, Homo sapien
taaggacacttgaaggttgagaggt

SEQ ID NO: 1910671 - DNA, 25 bp, Homo sapien
aacaatatatagtgagtgatctcat

SEQ ID NO: 1910672 - DNA, 25 bp, Homo sapien
ttgagaggtgccagatagccaaggc

SEQ ID NO: 1910673 - DNA, 25 bp, Homo sapien
caaatatatgaaaatgcgtagaaac

SEQ ID NO: 1910674 - DNA, 25 bp, Homo sapien
gatcagcatagagtactgcagccca

SEQ ID NO: 1910675 - DNA, 25 bp, Homo sapien
cagattagccaaacggtaagtgtcc

SEQ ID NO: 1910676 - DNA, 25 bp, Homo sapien
cactgtggagaggatcatctggtaa

SEQ ID NO: 1910677 - DNA, 25 bp, Homo sapien
tctgagagaagccaaaaaggtgtct

SEQ ID NO: 1910678 - DNA, 25 bp, Homo sapien
taagtgtccttttcgtaatgctcca

SEQ ID NO: 1910679 - DNA, 25 bp, Homo sapien
gagacagctgggtctggtttactta

SEQ ID NO: 1910680 - DNA, 25 bp, Homo sapien
tgagacagctgggtctggtttactt

SEQ ID NO: 1910681 - DNA, 25 bp, Homo sapien
ctgggtctggtttacttagcattac

SEQ ID NO: 1910682 - DNA, 25 bp, Homo sapien
cagctgggtctggtttacttagcat

SEQ ID NO: 1910683 - DNA, 25 bp, Homo sapien
catgctactgcttgtggcccacaag

SEQ ID NO: 1910684 - DNA, 25 bp, Homo sapien
taataatcaactgcaaacgccgctg

SEQ ID NO: 1910685 - DNA, 25 bp, Homo sapien
tggcaagaaaaaagcgagcagccat

SEQ ID NO: 1910686 - DNA, 25 bp, Homo sapien
aacgccgctgctattccaaacaaaa

SEQ ID NO: 1910687 - DNA, 25 bp, Homo sapien
atcactctgagtcatccccgcagga

SEQ ID NO: 1910688 - DNA, 25 bp, Homo sapien
tctgagtcatccccgcaggaccctt

SEQ ID NO: 1910689 - DNA, 25 bp, Homo sapien
gagtcatccccgcaggaccctttaa

SEQ ID NO: 1910690 - DNA, 25 bp, Homo sapien
gatcactctgagtcatccccgcagg

SEQ ID NO: 1910691 - DNA, 25 bp, Homo sapien
cacagatagtgggttgaattagaga

SEQ ID NO: 1910692 - DNA, 25 bp, Homo sapien
cccaagtcccacaatgagtccagat

SEQ ID NO: 1910693 - DNA, 25 bp, Homo sapien
gtctcaggtcctctaatccccaagt

SEQ ID NO: 1910694 - DNA, 25 bp, Homo sapien
gatgacacttcacagatagtgggtt

SEQ ID NO: 1910695 - DNA, 25 bp, Homo sapien
tgcaacactattaagagggatggcc

SEQ ID NO: 1910696 - DNA, 25 bp, Homo sapien
gataaagtcatgacagtagagccct

SEQ ID NO: 1910697 - DNA, 25 bp, Homo sapien
gactggtatacctcaagggcaggga

SEQ ID NO: 1910698 - DNA, 25 bp, Homo sapien
gtagagcccttagcacccttagaaa

SEQ ID NO: 1910699 - DNA, 25 bp, Homo sapien
tattcatagcccaaactcgatgtgt

SEQ ID NO: 1910700 - DNA, 25 bp, Homo sapien
gcattgcaagccattttcggtcaca

SEQ ID NO: 1910701 - DNA, 25 bp, Homo sapien
tgctacaccttgagagctcccagat

SEQ ID NO: 1910702 - DNA, 25 bp, Homo sapien
gaaaagtagccaaaagtcaccgatc

SEQ ID NO: 1910703 - DNA, 25 bp, Homo sapien
attagagtgattatggaaaacaacc

SEQ ID NO: 1910704 - DNA, 25 bp, Homo sapien
tgtcctccaaactccaattagagtg

SEQ ID NO: 1910705 - DNA, 25 bp, Homo sapien
gagtgattatggaaaacaacctgac

SEQ ID NO: 1910706 - DNA, 25 bp, Homo sapien
gattatggaaaacaacctgactcac

SEQ ID NO: 1910707 - DNA, 25 bp, Homo sapien
tctggaaggcacatatgaaatagag

SEQ ID NO: 1910708 - DNA, 25 bp, Homo sapien
tagtgaataccacaagagatgttct

SEQ ID NO: 1910709 - DNA, 25 bp, Homo sapien
cacagaagccaagtagtgaatacca

SEQ ID NO: 1910710 - DNA, 25 bp, Homo sapien
catatgaaatagaggactctctgga

SEQ ID NO: 1910711 - DNA, 25 bp, Homo sapien
ctcattgagttactgtaaggatgag

SEQ ID NO: 1910712 - DNA, 25 bp, Homo sapien
ggatgagaaactgcatgcagagtcc

SEQ ID NO: 1910713 - DNA, 25 bp, Homo sapien
tgagttactgtaaggatgagaaact

SEQ ID NO: 1910714 - DNA, 25 bp, Homo sapien
aaggatgagaaactgcatgcagagt

SEQ ID NO: 1910715 - DNA, 25 bp, Homo sapien
aaatctccggccataacgctgcatg

SEQ ID NO: 1910716 - DNA, 25 bp, Homo sapien
caacggcttatgaccgagccaggca

SEQ ID NO: 1910717 - DNA, 25 bp, Homo sapien
ggaagtaacatgtaccaacggctta

SEQ ID NO: 1910718 - DNA, 25 bp, Homo sapien
catgcgttggctatgagtccttgac

SEQ ID NO: 1910719 - DNA, 25 bp, Homo sapien
aactctgactaacggttgtccctgg

SEQ ID NO: 1910720 - DNA, 25 bp, Homo sapien
gggtcccggtgaacatcaaatgaag

SEQ ID NO: 1910721 - DNA, 25 bp, Homo sapien
tacagtgtacctggcacgtattagg

SEQ ID NO: 1910722 - DNA, 25 bp, Homo sapien
aaatgaagaactatgtgtaagcgcc

SEQ ID NO: 1910723 - DNA, 25 bp, Homo sapien
gagatctggcccctcgagccagatc

SEQ ID NO: 1910724 - DNA, 25 bp, Homo sapien
ccagcatctgctgccgcggagagca

SEQ ID NO: 1910725 - DNA, 25 bp, Homo sapien
acgagtgagatctggcccctcgagc

SEQ ID NO: 1910726 - DNA, 25 bp, Homo sapien
cccctacgagtgagatctggcccct

SEQ ID NO: 1910727 - DNA, 25 bp, Homo sapien
ccggcaacaggcgcactccgagcga

SEQ ID NO: 1910728 - DNA, 25 bp, Homo sapien
ggcaacaggcgcactccgagcgagc

SEQ ID NO: 1910729 - DNA, 25 bp, Homo sapien
tgcccggcaacaggcgcactccgag

SEQ ID NO: 1910730 - DNA, 25 bp, Homo sapien
cctgcccggcaacaggcgcactccg

SEQ ID NO: 1910731 - DNA, 25 bp, Homo sapien
catgccaggtcccgctgccagaggc

SEQ ID NO: 1910732 - DNA, 25 bp, Homo sapien
cagctaggggccggcgtctggacgc

SEQ ID NO: 1910733 - DNA, 25 bp, Homo sapien
ccggcgtctggacgcccgtgtcccg

SEQ ID NO: 1910734 - DNA, 25 bp, Homo sapien
ctaggggccggcgtctggacgcccg

SEQ ID NO: 1910735 - DNA, 25 bp, Homo sapien
gggccggcgtctggacgcccgtgtc

SEQ ID NO: 1910736 - DNA, 25 bp, Homo sapien
aagtggagatgttttcggatcgcga

SEQ ID NO: 1910737 - DNA, 25 bp, Homo sapien
agatgttttcggatcgcgagcgccg

SEQ ID NO: 1910738 - DNA, 25 bp, Homo sapien
tggagatgttttcggatcgcgagcg

SEQ ID NO: 1910739 - DNA, 25 bp, Homo sapien
ggaagtggagatgttttcggatcgc

SEQ ID NO: 1910740 - DNA, 25 bp, Homo sapien
cataaatcccctcgaagtggcggga

SEQ ID NO: 1910741 - DNA, 25 bp, Homo sapien
gtggtcataaatcccctcgaagtgg

SEQ ID NO: 1910742 - DNA, 25 bp, Homo sapien
aagtgccccacgtggtcataaatcc

SEQ ID NO: 1910743 - DNA, 25 bp, Homo sapien
cacgtggtcataaatcccctcgaag

SEQ ID NO: 1910744 - DNA, 25 bp, Homo sapien
gctccggggactgcgggtagcgcgc

SEQ ID NO: 1910745 - DNA, 25 bp, Homo sapien
ccgagttagccgagctccggggact

SEQ ID NO: 1910746 - DNA, 25 bp, Homo sapien
cggccgtgcactgggcgccgagtta

SEQ ID NO: 1910747 - DNA, 25 bp, Homo sapien
ctgggcgccgagttagccgagctcc

SEQ ID NO: 1910748 - DNA, 25 bp, Homo sapien
ctccccgcgcgtcccagtgctcggg

SEQ ID NO: 1910749 - DNA, 25 bp, Homo sapien
ccagcgcgaggctgtattctgttcc

SEQ ID NO: 1910750 - DNA, 25 bp, Homo sapien
ctccctccgtcgcttggcccctcgg

SEQ ID NO: 1910751 - DNA, 25 bp, Homo sapien
tccttcccggcgcgctgtggtcccg

SEQ ID NO: 1910752 - DNA, 25 bp, Homo sapien
gggccgcaagaatatatagccttca

SEQ ID NO: 1910753 - DNA, 25 bp, Homo sapien
ggaatgcaagggctaggctcggtcc

SEQ ID NO: 1910754 - DNA, 25 bp, Homo sapien
ccgacgcctgggaaaagttgtcgct

SEQ ID NO: 1910755 - DNA, 25 bp, Homo sapien
aaagttgtcgctgagagagagccca

SEQ ID NO: 1910756 - DNA, 25 bp, Homo sapien
tccagctaccaagccgaagtccttc

SEQ ID NO: 1910757 - DNA, 25 bp, Homo sapien
ctgctccagctaccaagccgaagtc

SEQ ID NO: 1910758 - DNA, 25 bp, Homo sapien
gctccagctaccaagccgaagtcct

SEQ ID NO: 1910759 - DNA, 25 bp, Homo sapien
aacctgctccagctaccaagccgaa

SEQ ID NO: 1910760 - DNA, 25 bp, Homo sapien
caccagagtttcaacccagagatca

SEQ ID NO: 1910761 - DNA, 25 bp, Homo sapien
ccagagtttcaacccagagatcagg

SEQ ID NO: 1910762 - DNA, 25 bp, Homo sapien
gtttcaacccagagatcaggaagct

SEQ ID NO: 1910763 - DNA, 25 bp, Homo sapien
gagtttcaacccagagatcaggaag

SEQ ID NO: 1910764 - DNA, 25 bp, Homo sapien
tcaggagtctcttcgaaagatgatc

SEQ ID NO: 1910765 - DNA, 25 bp, Homo sapien
gtgctataaaacagggaccaagaga

SEQ ID NO: 1910766 - DNA, 25 bp, Homo sapien
tcgaaagatgatcgcagatttggct

SEQ ID NO: 1910767 - DNA, 25 bp, Homo sapien
ctgcagttattagctttcgacaatg

SEQ ID NO: 1910768 - DNA, 25 bp, Homo sapien
tgtgaagggcccgatggacaacctg

SEQ ID NO: 1910769 - DNA, 25 bp, Homo sapien
gacaacctgggactattcaaccaat

SEQ ID NO: 1910770 - DNA, 25 bp, Homo sapien
gcactggctgtccacgtggcgaatt

SEQ ID NO: 1910771 - DNA, 25 bp, Homo sapien
ggacatttcgatcatttctctgcag

SEQ ID NO: 1910772 - DNA, 25 bp, Homo sapien
ctgtctcacccgcaatcacacctca

SEQ ID NO: 1910773 - DNA, 25 bp, Homo sapien
aatcacacctcaccatcctagccta

SEQ ID NO: 1910774 - DNA, 25 bp, Homo sapien
ccatcctagcctagtgccggctctc

SEQ ID NO: 1910775 - DNA, 25 bp, Homo sapien
ccagtcgaagaaggggtggcctgtc

SEQ ID NO: 1910776 - DNA, 25 bp, Homo sapien
tgtgcaatatgtccctgagccctgc

SEQ ID NO: 1910777 - DNA, 25 bp, Homo sapien
cagtgtcctcagagcacgttccagg

SEQ ID NO: 1910778 - DNA, 25 bp, Homo sapien
tgctgatcttgcttgcttgggacca

SEQ ID NO: 1910779 - DNA, 25 bp, Homo sapien
gaaagcaaaccaacgatgttcaggg

SEQ ID NO: 1910780 - DNA, 25 bp, Homo sapien
taaattcctgtgaagcagcgtgcta

SEQ ID NO: 1910781 - DNA, 25 bp, Homo sapien
ggagtgatcaagcacgtgggccctc

SEQ ID NO: 1910782 - DNA, 25 bp, Homo sapien
tgagaatgtcaatacgcagaccctt

SEQ ID NO: 1910783 - DNA, 25 bp, Homo sapien
ccaggcacggaaacagagtggcttt

SEQ ID NO: 1910784 - DNA, 25 bp, Homo sapien
tccttgtccaatcaatactcttctg

SEQ ID NO: 1910785 - DNA, 25 bp, Homo sapien
tgctttgcagtaaatagcatttggg

SEQ ID NO: 1910786 - DNA, 25 bp, Homo sapien
tctagggccgctgaattttcagaag

SEQ ID NO: 1910787 - DNA, 25 bp, Homo sapien
ccaggacaacccctctggatacaga

SEQ ID NO: 1910788 - DNA, 25 bp, Homo sapien
ctctcccggtccagtgcaagcttgg

SEQ ID NO: 1910789 - DNA, 25 bp, Homo sapien
gcaagcttggacctggaccctgaat

SEQ ID NO: 1910790 - DNA, 25 bp, Homo sapien
tctcccggtccagtgcaagcttgga

SEQ ID NO: 1910791 - DNA, 25 bp, Homo sapien
tccagtgcaagcttggacctggacc

SEQ ID NO: 1910792 - DNA, 25 bp, Homo sapien
gaaatagttcctctagtgcgctggg

SEQ ID NO: 1910793 - DNA, 25 bp, Homo sapien
tccgctttgggaaatagttcctcta

SEQ ID NO: 1910794 - DNA, 25 bp, Homo sapien
cactctcgctttccgctttgggaaa

SEQ ID NO: 1910795 - DNA, 25 bp, Homo sapien
tccactctcgctttccgctttggga

SEQ ID NO: 1910796 - DNA, 25 bp, Homo sapien
ctgtgaggcaggcatcgacgtgcta

SEQ ID NO: 1910797 - DNA, 25 bp, Homo sapien
agggcagagggtcgtaaactaacag

SEQ ID NO: 1910798 - DNA, 25 bp, Homo sapien
aacagggcagcggtagccttctctc

SEQ ID NO: 1910799 - DNA, 25 bp, Homo sapien
tagccttctctctagcggtgtccca

SEQ ID NO: 1910800 - DNA, 25 bp, Homo sapien
tagaaggtggagttggcggtaacac

SEQ ID NO: 1910801 - DNA, 25 bp, Homo sapien
gtggagttggcggtaacacagccac

SEQ ID NO: 1910802 - DNA, 25 bp, Homo sapien
agttggcggtaacacagccacatat

SEQ ID NO: 1910803 - DNA, 25 bp, Homo sapien
tggagttggcggtaacacagccaca

SEQ ID NO: 1910804 - DNA, 25 bp, Homo sapien
gactccccattcatagcttgttgca

SEQ ID NO: 1910805 - DNA, 25 bp, Homo sapien
agctcaggcaaagagtacttctctg

SEQ ID NO: 1910806 - DNA, 25 bp, Homo sapien
agaaagactccccattcatagcttg

SEQ ID NO: 1910807 - DNA, 25 bp, Homo sapien
aggcaaagagtacttctctgtcctc

SEQ ID NO: 1910808 - DNA, 25 bp, Homo sapien
catgtcttctacagtaactccagga

SEQ ID NO: 1910809 - DNA, 25 bp, Homo sapien
gagagtaagctctttgcgcttggcc

SEQ ID NO: 1910810 - DNA, 25 bp, Homo sapien
ggcagctgccacctatccagtgatt

SEQ ID NO: 1910811 - DNA, 25 bp, Homo sapien
tggtggtatccacccattcagggac

SEQ ID NO: 1910812 - DNA, 25 bp, Homo sapien
ccctcggagataaagtagatggaaa

SEQ ID NO: 1910813 - DNA, 25 bp, Homo sapien
catgggtgtgggtccaagagaacaa

SEQ ID NO: 1910814 - DNA, 25 bp, Homo sapien
catttccatcatgggtgtgggtcca

SEQ ID NO: 1910815 - DNA, 25 bp, Homo sapien
caaagacacaatcacagggaccctc

SEQ ID NO: 1910816 - DNA, 25 bp, Homo sapien
tgtacccagatacgcaaacacaggc

SEQ ID NO: 1910817 - DNA, 25 bp, Homo sapien
gagctgtgctgtgccctccagagct

SEQ ID NO: 1910818 - DNA, 25 bp, Homo sapien
tttctctgtacccagatacgcaaac

SEQ ID NO: 1910819 - DNA, 25 bp, Homo sapien
ctccagagctcgccatcaagatggg

SEQ ID NO: 1910820 - DNA, 25 bp, Homo sapien
acatctgtctttgacacacgctgtg

SEQ ID NO: 1910821 - DNA, 25 bp, Homo sapien
ctggttcactctgtcaaacatctgt

SEQ ID NO: 1910822 - DNA, 25 bp, Homo sapien
tctggttcactctgtcaaacatctg

SEQ ID NO: 1910823 - DNA, 25 bp, Homo sapien
tgtctttgacacacgctgtgacccc

SEQ ID NO: 1910824 - DNA, 25 bp, Homo sapien
ttatcgcactgtcttgttgtctcat

SEQ ID NO: 1910825 - DNA, 25 bp, Homo sapien
cttgtttagtccttatcgcactgtc

SEQ ID NO: 1910826 - DNA, 25 bp, Homo sapien
tagtccttatcgcactgtcttgttg

SEQ ID NO: 1910827 - DNA, 25 bp, Homo sapien
gtttagtccttatcgcactgtcttg

SEQ ID NO: 1910828 - DNA, 25 bp, Homo sapien
tcgctccaaagcagtagctcgtcct

SEQ ID NO: 1910829 - DNA, 25 bp, Homo sapien
gggtgcagcggctctgagcacaaac

SEQ ID NO: 1910830 - DNA, 25 bp, Homo sapien
aggaaaccctcgctccaaagcagta

SEQ ID NO: 1910831 - DNA, 25 bp, Homo sapien
gcagtagctcgtcctgcactccatg

SEQ ID NO: 1910832 - DNA, 25 bp, Homo sapien
agtggagcacgaaaagctacagtca

SEQ ID NO: 1910833 - DNA, 25 bp, Homo sapien
taaccatataaagggggatgcgtgc

SEQ ID NO: 1910834 - DNA, 25 bp, Homo sapien
ataaagggggatgcgtgcagaaaat

SEQ ID NO: 1910835 - DNA, 25 bp, Homo sapien
catctctataaccatataaaggggg

SEQ ID NO: 1910836 - DNA, 25 bp, Homo sapien
gagagtatgttctgcctacaaggac

SEQ ID NO: 1910837 - DNA, 25 bp, Homo sapien
tatactgggagcaactgacgaaatc

SEQ ID NO: 1910838 - DNA, 25 bp, Homo sapien
cagtgcagggataggaactcagtca

SEQ ID NO: 1910839 - DNA, 25 bp, Homo sapien
tgtaacacgaagagcagaaagcctt

SEQ ID NO: 1910840 - DNA, 25 bp, Homo sapien
tctcttcagcgttttggtgtgggcc

SEQ ID NO: 1910841 - DNA, 25 bp, Homo sapien
tgggccatcgagactgtacaaagct

SEQ ID NO: 1910842 - DNA, 25 bp, Homo sapien
gctacagcatgagaaaggtgcacca

SEQ ID NO: 1910843 - DNA, 25 bp, Homo sapien
gaaagttactcacgcagacccagat

SEQ ID NO: 1910844 - DNA, 25 bp, Homo sapien
agatgggtggtactgtgagctctgc

SEQ ID NO: 1910845 - DNA, 25 bp, Homo sapien
gactgagaggatccctgaacgctgc

SEQ ID NO: 1910846 - DNA, 25 bp, Homo sapien
gaacgctgctttggtaattcaggcg

SEQ ID NO: 1910847 - DNA, 25 bp, Homo sapien
tctgctgagacgaggaagagtagcc

SEQ ID NO: 1910848 - DNA, 25 bp, Homo sapien
ctctctccaaataccaatccttaga

SEQ ID NO: 1910849 - DNA, 25 bp, Homo sapien
tcctgaattagcactgcaattggtg

SEQ ID NO: 1910850 - DNA, 25 bp, Homo sapien
agacttagctcctttaatttcctga

SEQ ID NO: 1910851 - DNA, 25 bp, Homo sapien
gaattagcactgcaattggtgttct

SEQ ID NO: 1910852 - DNA, 25 bp, Homo sapien
tttccccacttcataaagcatatga

SEQ ID NO: 1910853 - DNA, 25 bp, Homo sapien
acttcataaagcatatgaacattag

SEQ ID NO: 1910854 - DNA, 25 bp, Homo sapien
cataaagcatatgaacattagacat

SEQ ID NO: 1910855 - DNA, 25 bp, Homo sapien
tgaacattagacattcagggagtac

SEQ ID NO: 1910856 - DNA, 25 bp, Homo sapien
cctagccgtggcttcttgtttggag

SEQ ID NO: 1910857 - DNA, 25 bp, Homo sapien
ctgataatccgagggcatcacaggt

SEQ ID NO: 1910858 - DNA, 25 bp, Homo sapien
cttgtttggaggcacctggttcagg

SEQ ID NO: 1910859 - DNA, 25 bp, Homo sapien
ggtccacctgagtttgcgcctgaag

SEQ ID NO: 1910860 - DNA, 25 bp, Homo sapien
tgcggtcccgttggtctgggtgctg

SEQ ID NO: 1910861 - DNA, 25 bp, Homo sapien
ctgcggtcccgttggtctgggtgct

SEQ ID NO: 1910862 - DNA, 25 bp, Homo sapien
tgaaagtataccgtgcagtttatac

SEQ ID NO: 1910863 - DNA, 25 bp, Homo sapien
tatggaacgatacctaaactatctt

SEQ ID NO: 1910864 - DNA, 25 bp, Homo sapien
gaattatggaacgatacctaaacta

SEQ ID NO: 1910865 - DNA, 25 bp, Homo sapien
ggaagtgaaagtataccgtgcagtt

SEQ ID NO: 1910866 - DNA, 25 bp, Homo sapien
atcttcattaaggaattctcgtttg

SEQ ID NO: 1910867 - DNA, 25 bp, Homo sapien
cttcattaaggaattctcgtttggg

SEQ ID NO: 1910868 - DNA, 25 bp, Homo sapien
gggtatggaatctggcagccggcaa

SEQ ID NO: 1910869 - DNA, 25 bp, Homo sapien
tggaatctggcagccggcaaataca

SEQ ID NO: 1910870 - DNA, 25 bp, Homo sapien
ttggcaaagggtcctcctgaaaata

SEQ ID NO: 1910871 - DNA, 25 bp, Homo sapien
tgcagagcttgctccgaggtaattc

SEQ ID NO: 1910872 - DNA, 25 bp, Homo sapien
ggtcctcctgaaaatagggatcctg

SEQ ID NO: 1910873 - DNA, 25 bp, Homo sapien
agagcttgctccgaggtaattctct

SEQ ID NO: 1910874 - DNA, 25 bp, Homo sapien
aagcccttataaagttcattttctg

SEQ ID NO: 1910875 - DNA, 25 bp, Homo sapien
gcccttataaagttcattttctgct

SEQ ID NO: 1910876 - DNA, 25 bp, Homo sapien
agcccttataaagttcattttctgc

SEQ ID NO: 1910877 - DNA, 25 bp, Homo sapien
caggcttgaccttgtgtttctccat

SEQ ID NO: 1910878 - DNA, 25 bp, Homo sapien
tactttatgaggctactgttggcat

SEQ ID NO: 1910879 - DNA, 25 bp, Homo sapien
aggaacactttgctgtcaggcttga

SEQ ID NO: 1910880 - DNA, 25 bp, Homo sapien
ctttatgaggctactgttggcatac

SEQ ID NO: 1910881 - DNA, 25 bp, Homo sapien
ccattttattgtacccttgcgaaca

SEQ ID NO: 1910882 - DNA, 25 bp, Homo sapien
tatagaacattcaggttgggattcc

SEQ ID NO: 1910883 - DNA, 25 bp, Homo sapien
gatacatattgggagttatccacat

SEQ ID NO: 1910884 - DNA, 25 bp, Homo sapien
tgcgaacaagggtacaataaaatgt

SEQ ID NO: 1910885 - DNA, 25 bp, Homo sapien
cagaattgagggctttgctttgagg

SEQ ID NO: 1910886 - DNA, 25 bp, Homo sapien
agtaaaagaggcatcacacagcatc

SEQ ID NO: 1910887 - DNA, 25 bp, Homo sapien
gctaaaatctcagtttctagtttaa

SEQ ID NO: 1910888 - DNA, 25 bp, Homo sapien
agataaggccttccagaattgaggg

SEQ ID NO: 1910889 - DNA, 25 bp, Homo sapien
tctttttgaagtgtgggatattctg

SEQ ID NO: 1910890 - DNA, 25 bp, Homo sapien
ctttttgaagtgtgggatattctgg

SEQ ID NO: 1910891 - DNA, 25 bp, Homo sapien
ttttgaagtgtgggatattctggca

SEQ ID NO: 1910892 - DNA, 25 bp, Homo sapien
tttttgaagtgtgggatattctggc

SEQ ID NO: 1910893 - DNA, 25 bp, Homo sapien
cagcaaatatacaacctattgccca

SEQ ID NO: 1910894 - DNA, 25 bp, Homo sapien
tcttcctgacgacagtgaaaaatag

SEQ ID NO: 1910895 - DNA, 25 bp, Homo sapien
taggttccgaagtcaacaattcagc

SEQ ID NO: 1910896 - DNA, 25 bp, Homo sapien
tgacactaaatatccgatccagttg

SEQ ID NO: 1910897 - DNA, 25 bp, Homo sapien
gcctctgatctgctgccttaccaga

SEQ ID NO: 1910898 - DNA, 25 bp, Homo sapien
atctgctgccttaccagaggcccag

SEQ ID NO: 1910899 - DNA, 25 bp, Homo sapien
agacggctgccactgtccactgatg

SEQ ID NO: 1910900 - DNA, 25 bp, Homo sapien
agcctggccttggtagcctctgatc

SEQ ID NO: 1910901 - DNA, 25 bp, Homo sapien
caagtgtgagagtttcctttgtagc

SEQ ID NO: 1910902 - DNA, 25 bp, Homo sapien
gcagctaaaggtagccaaaactgat

SEQ ID NO: 1910903 - DNA, 25 bp, Homo sapien
tatgagactaatgccagtaaacaga

SEQ ID NO: 1910904 - DNA, 25 bp, Homo sapien
gaactatcccttctaacagctacaa

SEQ ID NO: 1910905 - DNA, 25 bp, Homo sapien
cttaatggagaaactgccattctca

SEQ ID NO: 1910906 - DNA, 25 bp, Homo sapien
aatggagaaactgccattctcataa

SEQ ID NO: 1910907 - DNA, 25 bp, Homo sapien
ttaatggagaaactgccattctcat

SEQ ID NO: 1910908 - DNA, 25 bp, Homo sapien
taatggagaaactgccattctcata

SEQ ID NO: 1910909 - DNA, 25 bp, Homo sapien
ctggagcccgataccaaaatgtcac

SEQ ID NO: 1910910 - DNA, 25 bp, Homo sapien
ccaaaatgtcacaactactggatcc

SEQ ID NO: 1910911 - DNA, 25 bp, Homo sapien
cctttgtataatgccttgcaccaag

SEQ ID NO: 1910912 - DNA, 25 bp, Homo sapien
tataatgccttgcaccaagcaaaag

SEQ ID NO: 1910913 - DNA, 25 bp, Homo sapien
agaattgaataatctggcaaaaccc

SEQ ID NO: 1910914 - DNA, 25 bp, Homo sapien
tatatttaaggtggctgtgcaggac

SEQ ID NO: 1910915 - DNA, 25 bp, Homo sapien
cacatgcttgggttactgtatggga

SEQ ID NO: 1910916 - DNA, 25 bp, Homo sapien
tttaaatatattcgctcagggtggg

SEQ ID NO: 1910917 - DNA, 25 bp, Homo sapien
tctaagagaggcagctaagagagtc

SEQ ID NO: 1910918 - DNA, 25 bp, Homo sapien
cccattactaggatatttgctggtt

SEQ ID NO: 1910919 - DNA, 25 bp, Homo sapien
actctccccctctcaggaccttctc

SEQ ID NO: 1910920 - DNA, 25 bp, Homo sapien
tattttgactctccccctctcagga

SEQ ID NO: 1910921 - DNA, 25 bp, Homo sapien
tcaggaccttctcccattactagga

SEQ ID NO: 1910922 - DNA, 25 bp, Homo sapien
gttcctatggaacaaattgatcagt

SEQ ID NO: 1910923 - DNA, 25 bp, Homo sapien
tggccgaaaccttatcttaaatgac

SEQ ID NO: 1910924 - DNA, 25 bp, Homo sapien
cccatatatatagataagaagattc

SEQ ID NO: 1910925 - DNA, 25 bp, Homo sapien
tgatcagtgggatagagcagagacc

SEQ ID NO: 1910926 - DNA, 25 bp, Homo sapien
catagatcttggcaactgcatgggc

SEQ ID NO: 1910927 - DNA, 25 bp, Homo sapien
gtctctgtgaagcacccaatttgca

SEQ ID NO: 1910928 - DNA, 25 bp, Homo sapien
catcaagaatctggtaaagtaagga

SEQ ID NO: 1910929 - DNA, 25 bp, Homo sapien
caatttgcatggaggtaatggatac

SEQ ID NO: 1910930 - DNA, 25 bp, Homo sapien
tgctctgcataatcaaacagcagcc

SEQ ID NO: 1910931 - DNA, 25 bp, Homo sapien
ccacaagtcatgctctgcataatca

SEQ ID NO: 1910932 - DNA, 25 bp, Homo sapien
gaaaggaacaccttctgcaatgcaa

SEQ ID NO: 1910933 - DNA, 25 bp, Homo sapien
taccttcctgtcactgtgagaaagg

SEQ ID NO: 1910934 - DNA, 25 bp, Homo sapien
caagcagaaacagcactttgcgcat

SEQ ID NO: 1910935 - DNA, 25 bp, Homo sapien
agcagcaagcagaaacagcactttg

SEQ ID NO: 1910936 - DNA, 25 bp, Homo sapien
cagagcagcaagcagaaacagcact

SEQ ID NO: 1910937 - DNA, 25 bp, Homo sapien
cagcaagcagaaacagcactttgcg

SEQ ID NO: 1910938 - DNA, 25 bp, Homo sapien
gatgcatcatacaatacaaccaaga

SEQ ID NO: 1910939 - DNA, 25 bp, Homo sapien
gctgctccttctatggagaatccca

SEQ ID NO: 1910940 - DNA, 25 bp, Homo sapien
gcattgctataagaccctaggcagt

SEQ ID NO: 1910941 - DNA, 25 bp, Homo sapien
cagtcccttgggatttcgataatca

SEQ ID NO: 1910942 - DNA, 25 bp, Homo sapien
gcacagtccttccaagattgtcaag

SEQ ID NO: 1910943 - DNA, 25 bp, Homo sapien
cttgcacagtccttccaagattgtc

SEQ ID NO: 1910944 - DNA, 25 bp, Homo sapien
cagtccttccaagattgtcaagcag

SEQ ID NO: 1910945 - DNA, 25 bp, Homo sapien
acagtccttccaagattgtcaagca

SEQ ID NO: 1910946 - DNA, 25 bp, Homo sapien
agtatcagatgtgatgagctcaaga

SEQ ID NO: 1910947 - DNA, 25 bp, Homo sapien
ataatgctctctaggacactgagga

SEQ ID NO: 1910948 - DNA, 25 bp, Homo sapien
gaacactcctatatttaaggcgcta

SEQ ID NO: 1910949 - DNA, 25 bp, Homo sapien
gccacattttgctaacgtttaacat

SEQ ID NO: 1910950 - DNA, 25 bp, Homo sapien
agtctgcagactggttttagccaca

SEQ ID NO: 1910951 - DNA, 25 bp, Homo sapien
tgctgcggggcatcttggcccactg

SEQ ID NO: 1910952 - DNA, 25 bp, Homo sapien
caaactcgtggacctcacatgatcc

SEQ ID NO: 1910953 - DNA, 25 bp, Homo sapien
ccgagtacttgagatacaggcgtgc

SEQ ID NO: 1910954 - DNA, 25 bp, Homo sapien
tagtgctgcggggcatcttggccca

SEQ ID NO: 1910955 - DNA, 25 bp, Homo sapien
taaatggatatgctagcaatccaca

SEQ ID NO: 1910956 - DNA, 25 bp, Homo sapien
gcaatccacaataccctacacttgt

SEQ ID NO: 1910957 - DNA, 25 bp, Homo sapien
taaaactgcacataatctaaatgga

SEQ ID NO: 1910958 - DNA, 25 bp, Homo sapien
gacatggcaaattttaaacgattcc

SEQ ID NO: 1910959 - DNA, 25 bp, Homo sapien
caattttagtgctgccaaaataagc

SEQ ID NO: 1910960 - DNA, 25 bp, Homo sapien
attccaattttagtgctgccaaaat

SEQ ID NO: 1910961 - DNA, 25 bp, Homo sapien
ccaattttagtgctgccaaaataag

SEQ ID NO: 1910962 - DNA, 25 bp, Homo sapien
tccaattttagtgctgccaaaataa

SEQ ID NO: 1910963 - DNA, 25 bp, Homo sapien
gataaagaattcctagcctaggcaa

SEQ ID NO: 1910964 - DNA, 25 bp, Homo sapien
acaaattcctaagcaattttgactt

SEQ ID NO: 1910965 - DNA, 25 bp, Homo sapien
tcctcaaagtcctggaataagataa

SEQ ID NO: 1910966 - DNA, 25 bp, Homo sapien
tcagtttacagacctctcctcaaag

SEQ ID NO: 1910967 - DNA, 25 bp, Homo sapien
cagtctggtcaacaatgctagccta

SEQ ID NO: 1910968 - DNA, 25 bp, Homo sapien
cactttaacattcgaggccgccagg

SEQ ID NO: 1910969 - DNA, 25 bp, Homo sapien
caaggccacatgaaggcagtctggt

SEQ ID NO: 1910970 - DNA, 25 bp, Homo sapien
gctagcctaggtaccagacatgttg

SEQ ID NO: 1910971 - DNA, 25 bp, Homo sapien
gagcacaatactgtacccaattcag

SEQ ID NO: 1910972 - DNA, 25 bp, Homo sapien
gatggcccaagactaaatagctaca

SEQ ID NO: 1910973 - DNA, 25 bp, Homo sapien
ctccactgttataagcaaggctctg

SEQ ID NO: 1910974 - DNA, 25 bp, Homo sapien
cagactgagagtaatagatggccca

SEQ ID NO: 1910975 - DNA, 25 bp, Homo sapien
gttgcacgacgtgtgaaaacactaa

SEQ ID NO: 1910976 - DNA, 25 bp, Homo sapien
ggaaaaatatactagcactgggtct

SEQ ID NO: 1910977 - DNA, 25 bp, Homo sapien
tctctcatgaaagagtctaactggc

SEQ ID NO: 1910978 - DNA, 25 bp, Homo sapien
gggtaatgggaaatgactactactg

SEQ ID NO: 1910979 - DNA, 25 bp, Homo sapien
gagggtaaccctagttgcagcagtt

SEQ ID NO: 1910980 - DNA, 25 bp, Homo sapien
cagcagttaaataagccccaaaatt

SEQ ID NO: 1910981 - DNA, 25 bp, Homo sapien
tctattctccacacattagtgaggg

SEQ ID NO: 1910982 - DNA, 25 bp, Homo sapien
cacacattagtgagggtaaccctag

SEQ ID NO: 1910983 - DNA, 25 bp, Homo sapien
gaatatgcctgaacacaaagtttaa

SEQ ID NO: 1910984 - DNA, 25 bp, Homo sapien
cactcccttataatgttactaatat

SEQ ID NO: 1910985 - DNA, 25 bp, Homo sapien
caaataagaatatgcctgaacacaa

SEQ ID NO: 1910986 - DNA, 25 bp, Homo sapien
tatttcaaataagaatatgcctgaa

SEQ ID NO: 1910987 - DNA, 25 bp, Homo sapien
aaaatctcagtactaaactttgatt

SEQ ID NO: 1910988 - DNA, 25 bp, Homo sapien
tcttatgactaaaagcgatgaagga

SEQ ID NO: 1910989 - DNA, 25 bp, Homo sapien
tgactaaaagcgatgaaggagtgtt

SEQ ID NO: 1910990 - DNA, 25 bp, Homo sapien
ctaaaagcgatgaaggagtgtttcc

SEQ ID NO: 1910991 - DNA, 25 bp, Homo sapien
aagcgatgaaggagtgtttccatgc

SEQ ID NO: 1910992 - DNA, 25 bp, Homo sapien
tttgcttcaatgcatattccttttc

SEQ ID NO: 1910993 - DNA, 25 bp, Homo sapien
tcaatttgcttcaatgcatattcct

SEQ ID NO: 1910994 - DNA, 25 bp, Homo sapien
caatttgcttcaatgcatattcctt

SEQ ID NO: 1910995 - DNA, 25 bp, Homo sapien
aatttgcttcaatgcatattccttt

SEQ ID NO: 1910996 - DNA, 25 bp, Homo sapien
tcatttttccatatatcactttcag

SEQ ID NO: 1910997 - DNA, 25 bp, Homo sapien
caaaaaaacatcatttttccatata

SEQ ID NO: 1910998 - DNA, 25 bp, Homo sapien
tatatcactttcagattcaaaatta

SEQ ID NO: 1910999 - DNA, 25 bp, Homo sapien
aaacatcatttttccatatatcact

SEQ ID NO: 1911000 - DNA, 25 bp, Homo sapien
cagatagagcagtttaggatgttat

SEQ ID NO: 1911001 - DNA, 25 bp, Homo sapien
gatagagcagtttaggatgttattc

SEQ ID NO: 1911002 - DNA, 25 bp, Homo sapien
ctgcagatagagcagtttaggatgt

SEQ ID NO: 1911003 - DNA, 25 bp, Homo sapien
gcagatagagcagtttaggatgtta

SEQ ID NO: 1911004 - DNA, 25 bp, Homo sapien
taagcacataacatgtgtcaagcac

SEQ ID NO: 1911005 - DNA, 25 bp, Homo sapien
aaatggcaaattcttattgctggga

SEQ ID NO: 1911006 - DNA, 25 bp, Homo sapien
cagacttacttgcaacagaaggtaa

SEQ ID NO: 1911007 - DNA, 25 bp, Homo sapien
ttcaggcattgcttttaaggcttag

SEQ ID NO: 1911008 - DNA, 25 bp, Homo sapien
tcccagtgtctagctcgggcaatgg

SEQ ID NO: 1911009 - DNA, 25 bp, Homo sapien
ggcgtctggacacacatatagttta

SEQ ID NO: 1911010 - DNA, 25 bp, Homo sapien
gaaacagtgtcaacagaacatgtgg

SEQ ID NO: 1911011 - DNA, 25 bp, Homo sapien
tagcacaggcaactggttaagaggc

SEQ ID NO: 1911012 - DNA, 25 bp, Homo sapien
aagaagagaacaggtcagacgcggt

SEQ ID NO: 1911013 - DNA, 25 bp, Homo sapien
ttttgacattttaggaagaaggatc

SEQ ID NO: 1911014 - DNA, 25 bp, Homo sapien
ttgacattttaggaagaaggatcac

SEQ ID NO: 1911015 - DNA, 25 bp, Homo sapien
agagtgagaatccatatcaacgaaa

SEQ ID NO: 1911016 - DNA, 25 bp, Homo sapien
ctcagtattacagcgggaggcaaaa

SEQ ID NO: 1911017 - DNA, 25 bp, Homo sapien
gggaggcctcagtattacagcggga

SEQ ID NO: 1911018 - DNA, 25 bp, Homo sapien
acaattcaagacgaggagatatggg

SEQ ID NO: 1911019 - DNA, 25 bp, Homo sapien
aattcaagacgaggagatatgggtg

SEQ ID NO: 1911020 - DNA, 25 bp, Homo sapien
acaccagaaggcaatactctgcttt

SEQ ID NO: 1911021 - DNA, 25 bp, Homo sapien
caccagaaggcaatactctgcttta

SEQ ID NO: 1911022 - DNA, 25 bp, Homo sapien
accagaaggcaatactctgctttac

SEQ ID NO: 1911023 - DNA, 25 bp, Homo sapien
gacaccagaaggcaatactctgctt

SEQ ID NO: 1911024 - DNA, 25 bp, Homo sapien
tgaaaagtctgctacctccaacgct

SEQ ID NO: 1911025 - DNA, 25 bp, Homo sapien
gtccatacacgaagccctcctggaa

SEQ ID NO: 1911026 - DNA, 25 bp, Homo sapien
aagtctgctacctccaacgcttgag

SEQ ID NO: 1911027 - DNA, 25 bp, Homo sapien
tccaacgcttgaggtccatacacga

SEQ ID NO: 1911028 - DNA, 25 bp, Homo sapien
caaatggcatcatgtgtggtcttta

SEQ ID NO: 1911029 - DNA, 25 bp, Homo sapien
cttctggcatgattagtggcactcc

SEQ ID NO: 1911030 - DNA, 25 bp, Homo sapien
aagcgtgtatctgcaacacttgagc

SEQ ID NO: 1911031 - DNA, 25 bp, Homo sapien
tgctacatccaacttaccagagaga

SEQ ID NO: 1911032 - DNA, 25 bp, Homo sapien
tcttcaccttgtgattaatccgcct

SEQ ID NO: 1911033 - DNA, 25 bp, Homo sapien
cttcaccttgtgattaatccgcctc

SEQ ID NO: 1911034 - DNA, 25 bp, Homo sapien
ccatgccagccaaattttaacttta

SEQ ID NO: 1911035 - DNA, 25 bp, Homo sapien
actgcaggcacacacactgtgccca

SEQ ID NO: 1911036 - DNA, 25 bp, Homo sapien
ctgagactgcaggcacacacactgt

SEQ ID NO: 1911037 - DNA, 25 bp, Homo sapien
tgtgcccagcttggttttttaaata

SEQ ID NO: 1911038 - DNA, 25 bp, Homo sapien
cacacacactgtgcccagcttggtt

SEQ ID NO: 1911039 - DNA, 25 bp, Homo sapien
gggaccacatgtacaaaaaccactg

SEQ ID NO: 1911040 - DNA, 25 bp, Homo sapien
gaatacttgttaatatcctggcaca

SEQ ID NO: 1911041 - DNA, 25 bp, Homo sapien
agactattactgactggcttcccca

SEQ ID NO: 1911042 - DNA, 25 bp, Homo sapien
gcacaaagccagaatgacaaatcca

SEQ ID NO: 1911043 - DNA, 25 bp, Homo sapien
cctacggcaaaggaaatacctaatg

SEQ ID NO: 1911044 - DNA, 25 bp, Homo sapien
cagagagagttcagtaaagcattgc

SEQ ID NO: 1911045 - DNA, 25 bp, Homo sapien
gatttagacacaacaacagctatta

SEQ ID NO: 1911046 - DNA, 25 bp, Homo sapien
taatttgttcacaggaccctacggc

SEQ ID NO: 1911047 - DNA, 25 bp, Homo sapien
caatatagtgagaccatttcaaata

SEQ ID NO: 1911048 - DNA, 25 bp, Homo sapien
aaaatcagaagatggcttcagccca

SEQ ID NO: 1911049 - DNA, 25 bp, Homo sapien
tgcaccccaacctgagcaatatagt

SEQ ID NO: 1911050 - DNA, 25 bp, Homo sapien
tactcggaaggctaaaatcagaaga

SEQ ID NO: 1911051 - DNA, 25 bp, Homo sapien
taatagtacattatgtaagatggca

SEQ ID NO: 1911052 - DNA, 25 bp, Homo sapien
cattatgtaagatggcaactgtatt

SEQ ID NO: 1911053 - DNA, 25 bp, Homo sapien
taagatggcaactgtattaaagaaa

SEQ ID NO: 1911054 - DNA, 25 bp, Homo sapien
gaaggcacttaatagtacattatgt

SEQ ID NO: 1911055 - DNA, 25 bp, Homo sapien
tacaccgagtgattaagagaaggct

SEQ ID NO: 1911056 - DNA, 25 bp, Homo sapien
gaaacacagctgaggagtacaccga

SEQ ID NO: 1911057 - DNA, 25 bp, Homo sapien
aattagccagcacgtgcatctgtgg

SEQ ID NO: 1911058 - DNA, 25 bp, Homo sapien
gactatagtgagagaccaaccagct

SEQ ID NO: 1911059 - DNA, 25 bp, Homo sapien
ttgtaagcccatactattcaaatac

SEQ ID NO: 1911060 - DNA, 25 bp, Homo sapien
ttttgttgtaagcccatactattca

SEQ ID NO: 1911061 - DNA, 25 bp, Homo sapien
gttgtaagcccatactattcaaata

SEQ ID NO: 1911062 - DNA, 25 bp, Homo sapien
ttgttgtaagcccatactattcaaa

SEQ ID NO: 1911063 - DNA, 25 bp, Homo sapien
gaagttagtgcatacgcacacaacg

SEQ ID NO: 1911064 - DNA, 25 bp, Homo sapien
tgtccaaacggaaaactggatgtgc

SEQ ID NO: 1911065 - DNA, 25 bp, Homo sapien
cacgcacaaagataagcggcacttc

SEQ ID NO: 1911066 - DNA, 25 bp, Homo sapien
cacacaacgtactttagtcctagag

SEQ ID NO: 1911067 - DNA, 25 bp, Homo sapien
ggttccaccagtcctgctgtagctg

SEQ ID NO: 1911068 - DNA, 25 bp, Homo sapien
tttaaagtctatgctggacagggca

SEQ ID NO: 1911069 - DNA, 25 bp, Homo sapien
aatggtccgttacaatcctcttccg

SEQ ID NO: 1911070 - DNA, 25 bp, Homo sapien
gacagggcatcttcctgggtcccta

SEQ ID NO: 1911071 - DNA, 25 bp, Homo sapien
tcttaagaggacaaccagtaaaggc

SEQ ID NO: 1911072 - DNA, 25 bp, Homo sapien
ttctcagtacattatccagctcttc

SEQ ID NO: 1911073 - DNA, 25 bp, Homo sapien
taagaggacaaccagtaaaggcttc

SEQ ID NO: 1911074 - DNA, 25 bp, Homo sapien
aggacaggtattctcagtacattat

SEQ ID NO: 1911075 - DNA, 25 bp, Homo sapien
aaacaaaggttcaggcccagctctg

SEQ ID NO: 1911076 - DNA, 25 bp, Homo sapien
gaaaacaaaggttcaggcccagctc

SEQ ID NO: 1911077 - DNA, 25 bp, Homo sapien
aaaacaaaggttcaggcccagctct

SEQ ID NO: 1911078 - DNA, 25 bp, Homo sapien
tgtgagaatgagaaacccgggacgc

SEQ ID NO: 1911079 - DNA, 25 bp, Homo sapien
gacataatacccaagatacccaagg

SEQ ID NO: 1911080 - DNA, 25 bp, Homo sapien
taagttgccgcttgcgaaacgcagc

SEQ ID NO: 1911081 - DNA, 25 bp, Homo sapien
ggactgcatagagaagccaacgggc

SEQ ID NO: 1911082 - DNA, 25 bp, Homo sapien
ctcggagtcggtgtccggacgcaac

SEQ ID NO: 1911083 - DNA, 25 bp, Homo sapien
gcggcaactccgcagcggagctctg

SEQ ID NO: 1911084 - DNA, 25 bp, Homo sapien
ccgcgaggcgctcagccgattggaa

SEQ ID NO: 1911085 - DNA, 25 bp, Homo sapien
gattggaagttccacaacgaccgtc

SEQ ID NO: 1911086 - DNA, 25 bp, Homo sapien
cgccagcttcgccttgaaatcataa

SEQ ID NO: 1911087 - DNA, 25 bp, Homo sapien
tgcacccttcgtactcaaacaaatc

SEQ ID NO: 1911088 - DNA, 25 bp, Homo sapien
tagacgtgaccgtaggtgccgcgtc

SEQ ID NO: 1911089 - DNA, 25 bp, Homo sapien
atctttccgcctcgccttgtagacg

SEQ ID NO: 1911090 - DNA, 25 bp, Homo sapien
ctgcttcccccatagaggcacggga

SEQ ID NO: 1911091 - DNA, 25 bp, Homo sapien
tctgcttcccccatagaggcacggg

SEQ ID NO: 1911092 - DNA, 25 bp, Homo sapien
tgcttcccccatagaggcacgggac

SEQ ID NO: 1911093 - DNA, 25 bp, Homo sapien
gcgggggccgccgccgctcagtccc

SEQ ID NO: 1911094 - DNA, 25 bp, Homo sapien
gggggccgccgccgctcagtccctc

SEQ ID NO: 1911095 - DNA, 25 bp, Homo sapien
cgggggccgccgccgctcagtccct

SEQ ID NO: 1911096 - DNA, 25 bp, Homo sapien
gcgaccgccgctccacttctccaac

SEQ ID NO: 1911097 - DNA, 25 bp, Homo sapien
cgcgaccgccgctccacttctccaa

SEQ ID NO: 1911098 - DNA, 25 bp, Homo sapien
cgaccgccgctccacttctccaaca

SEQ ID NO: 1911099 - DNA, 25 bp, Homo sapien
ggtccgccttcagcaagggactcct

SEQ ID NO: 1911100 - DNA, 25 bp, Homo sapien
cttcagcaagggactcctcggcggc

SEQ ID NO: 1911101 - DNA, 25 bp, Homo sapien
ccttcagcaagggactcctcggcgg

SEQ ID NO: 1911102 - DNA, 25 bp, Homo sapien
tccgcggtccgccttcagcaaggga

SEQ ID NO: 1911103 - DNA, 25 bp, Homo sapien
gcgccgtggcttcctcgagctcatt

SEQ ID NO: 1911104 - DNA, 25 bp, Homo sapien
gtgggccgcgccgtggcttcctcga

SEQ ID NO: 1911105 - DNA, 25 bp, Homo sapien
tcctcgagctcattagcgaactcac

SEQ ID NO: 1911106 - DNA, 25 bp, Homo sapien
gcccgccccatggtcgcggaggctc

SEQ ID NO: 1911107 - DNA, 25 bp, Homo sapien
cccacaaagcatgcgcgcctgcgta

SEQ ID NO: 1911108 - DNA, 25 bp, Homo sapien
gcccccacaaagcatgcgcgcctgc

SEQ ID NO: 1911109 - DNA, 25 bp, Homo sapien
tcgcccccacaaagcatgcgcgcct

SEQ ID NO: 1911110 - DNA, 25 bp, Homo sapien
caccacagcctcgcccccacaaagc

SEQ ID NO: 1911111 - DNA, 25 bp, Homo sapien
cagtgtgctttctgcggttctcggg

SEQ ID NO: 1911112 - DNA, 25 bp, Homo sapien
ctcaggtagcgcacggctcccggtt

SEQ ID NO: 1911113 - DNA, 25 bp, Homo sapien
tgtgaaggtagaaagctcgaagttc

SEQ ID NO: 1911114 - DNA, 25 bp, Homo sapien
aagctcgaagttccagtgtgctttc

SEQ ID NO: 1911115 - DNA, 25 bp, Homo sapien
ttttctagggcagtgggtccgccta

SEQ ID NO: 1911116 - DNA, 25 bp, Homo sapien
ggtgaggacagttgtaccgcagctt

SEQ ID NO: 1911117 - DNA, 25 bp, Homo sapien
tgtttcttttctagggcagtgggtc

SEQ ID NO: 1911118 - DNA, 25 bp, Homo sapien
cagttgtaccgcagcttgtttcttt

SEQ ID NO: 1911119 - DNA, 25 bp, Homo sapien
gatgtgctcggttcttcctgatagg

SEQ ID NO: 1911120 - DNA, 25 bp, Homo sapien
agaggagaacatgcaacttctgagc

SEQ ID NO: 1911121 - DNA, 25 bp, Homo sapien
gcttctttcccgctcttgattggtg

SEQ ID NO: 1911122 - DNA, 25 bp, Homo sapien
tgggtatccccaggctttggcttct

SEQ ID NO: 1911123 - DNA, 25 bp, Homo sapien
taacagtttgtccaagtctaaagga

SEQ ID NO: 1911124 - DNA, 25 bp, Homo sapien
cagtttgtccaagtctaaaggaaag

SEQ ID NO: 1911125 - DNA, 25 bp, Homo sapien
cactgtgtagttgcagaaagcccta

SEQ ID NO: 1911126 - DNA, 25 bp, Homo sapien
tgctttccataaccaccactgtgta

SEQ ID NO: 1911127 - DNA, 25 bp, Homo sapien
taagcgtcttgattgccagagtgct

SEQ ID NO: 1911128 - DNA, 25 bp, Homo sapien
aaattccccacagacaaggctttcg

SEQ ID NO: 1911129 - DNA, 25 bp, Homo sapien
ggagctctgttttgaggaccaatgc

SEQ ID NO: 1911130 - DNA, 25 bp, Homo sapien
ggaccaatgcttaaggtggactttg

SEQ ID NO: 1911131 - DNA, 25 bp, Homo sapien
ctttcactggtgttggacttaaatc

SEQ ID NO: 1911132 - DNA, 25 bp, Homo sapien
gcacagcacctaatattttgaggag

SEQ ID NO: 1911133 - DNA, 25 bp, Homo sapien
tcaagagttatgagtggccctcacc

SEQ ID NO: 1911134 - DNA, 25 bp, Homo sapien
gaagcaactaaactgaggagactcc

SEQ ID NO: 1911135 - DNA, 25 bp, Homo sapien
tacaagagcccctcatagttaggca

SEQ ID NO: 1911136 - DNA, 25 bp, Homo sapien
tagaccgaagcaccacaattggctg

SEQ ID NO: 1911137 - DNA, 25 bp, Homo sapien
cttttttcttatccagacgaagtct

SEQ ID NO: 1911138 - DNA, 25 bp, Homo sapien
ttttcttatccagacgaagtctcgc

SEQ ID NO: 1911139 - DNA, 25 bp, Homo sapien
tttcttatccagacgaagtctcgca

SEQ ID NO: 1911140 - DNA, 25 bp, Homo sapien
gctgccttagaaatcactcctagat

SEQ ID NO: 1911141 - DNA, 25 bp, Homo sapien
gaagaagtggtagcttcagccccag

SEQ ID NO: 1911142 - DNA, 25 bp, Homo sapien
gatttctcctatcgacccaacatga

SEQ ID NO: 1911143 - DNA, 25 bp, Homo sapien
gttgtgaacaggagaaaccaatgca

SEQ ID NO: 1911144 - DNA, 25 bp, Homo sapien
cctgggactgggaactcgagggtgc

SEQ ID NO: 1911145 - DNA, 25 bp, Homo sapien
tgtcgtgtgcctatggtaccagcta

SEQ ID NO: 1911146 - DNA, 25 bp, Homo sapien
ctatggtaccagctactgggcagct

SEQ ID NO: 1911147 - DNA, 25 bp, Homo sapien
tggacatagtgtcgtgtgcctatgg

SEQ ID NO: 1911148 - DNA, 25 bp, Homo sapien
ccaaaaaacattaattccatctgca

SEQ ID NO: 1911149 - DNA, 25 bp, Homo sapien
cccacttgagaaagattattggaag

SEQ ID NO: 1911150 - DNA, 25 bp, Homo sapien
ggtcatttaacatacacaggcatta

SEQ ID NO: 1911151 - DNA, 25 bp, Homo sapien
ggcattaatactagggattagggca

SEQ ID NO: 1911152 - DNA, 25 bp, Homo sapien
tggactgctactgggtgtgtgtgtc

SEQ ID NO: 1911153 - DNA, 25 bp, Homo sapien
ggaattagtggtgatatttgcacat

SEQ ID NO: 1911154 - DNA, 25 bp, Homo sapien
tttgaggtgattaaatattctggaa

SEQ ID NO: 1911155 - DNA, 25 bp, Homo sapien
ggaagtggggcatggactgctactg

SEQ ID NO: 1911156 - DNA, 25 bp, Homo sapien
taactccaggaaagagccggggcaa

SEQ ID NO: 1911157 - DNA, 25 bp, Homo sapien
acttaaaagtattacctcgcacctg

SEQ ID NO: 1911158 - DNA, 25 bp, Homo sapien
gtattacctcgcacctgtaactcca

SEQ ID NO: 1911159 - DNA, 25 bp, Homo sapien
tgtaactccaggaaagagccggggc

SEQ ID NO: 1911160 - DNA, 25 bp, Homo sapien
tggtgtgctattccaaaatgacagc

SEQ ID NO: 1911161 - DNA, 25 bp, Homo sapien
tcagcaaatgaaacacttggtgtgc

SEQ ID NO: 1911162 - DNA, 25 bp, Homo sapien
tgagccaccttactgggcctcgtgt

SEQ ID NO: 1911163 - DNA, 25 bp, Homo sapien
gatagtagtgatatcctgcgagtaa

SEQ ID NO: 1911164 - DNA, 25 bp, Homo sapien
catgccatccttgcgcagggaccat

SEQ ID NO: 1911165 - DNA, 25 bp, Homo sapien
aaaataatggagtgcttcacaaatt

SEQ ID NO: 1911166 - DNA, 25 bp, Homo sapien
taaaataatggagtgcttcacaaat

SEQ ID NO: 1911167 - DNA, 25 bp, Homo sapien
ttgcatgccatccttgcgcagggac

SEQ ID NO: 1911168 - DNA, 25 bp, Homo sapien
ttcaattccatgttagagagctccg

SEQ ID NO: 1911169 - DNA, 25 bp, Homo sapien
caaagcctcgctcatcactggtagg

SEQ ID NO: 1911170 - DNA, 25 bp, Homo sapien
cactaagcaaaagttcgagcctcag

SEQ ID NO: 1911171 - DNA, 25 bp, Homo sapien
gatagctgttactctcctcttgcca

SEQ ID NO: 1911172 - DNA, 25 bp, Homo sapien
cagccatctttgtgaacacaggtct

SEQ ID NO: 1911173 - DNA, 25 bp, Homo sapien
ctacttgttgccccagacagccatc

SEQ ID NO: 1911174 - DNA, 25 bp, Homo sapien
gatgccatacgcgatgaaatccaca

SEQ ID NO: 1911175 - DNA, 25 bp, Homo sapien
ggccagctgcacgtggttgtccaca

SEQ ID NO: 1911176 - DNA, 25 bp, Homo sapien
ggtttctctcaaggatgccatacgc

SEQ ID NO: 1911177 - DNA, 25 bp, Homo sapien
tggttgtccacaagctggttctcca

SEQ ID NO: 1911178 - DNA, 25 bp, Homo sapien
gtacttcttttcctcatagcttaag

SEQ ID NO: 1911179 - DNA, 25 bp, Homo sapien
catgtacttcttttcctcatagctt

SEQ ID NO: 1911180 - DNA, 25 bp, Homo sapien
tgtacttcttttcctcatagcttaa

SEQ ID NO: 1911181 - DNA, 25 bp, Homo sapien
tacttcttttcctcatagcttaagt

SEQ ID NO: 1911182 - DNA, 25 bp, Homo sapien
ggcagacggcgtgggccagccctca

SEQ ID NO: 1911183 - DNA, 25 bp, Homo sapien
agacggcgtgggccagccctcagat

SEQ ID NO: 1911184 - DNA, 25 bp, Homo sapien
agcaggcagacggcgtgggccagcc

SEQ ID NO: 1911185 - DNA, 25 bp, Homo sapien
cggcgtgggccagccctcagatgtc

SEQ ID NO: 1911186 - DNA, 25 bp, Homo sapien
gcctccatttattaacgagatattc

SEQ ID NO: 1911187 - DNA, 25 bp, Homo sapien
tccatttattaacgagatattctgc

SEQ ID NO: 1911188 - DNA, 25 bp, Homo sapien
tgcctccatttattaacgagatatt

SEQ ID NO: 1911189 - DNA, 25 bp, Homo sapien
atttattaacgagatattctgcctc

SEQ ID NO: 1911190 - DNA, 25 bp, Homo sapien
ccaggaagacaccaagactcctgaa

SEQ ID NO: 1911191 - DNA, 25 bp, Homo sapien
gacaccaagactcctgaatcttctc

SEQ ID NO: 1911192 - DNA, 25 bp, Homo sapien
tcatcactctgcaggatggctccct

SEQ ID NO: 1911193 - DNA, 25 bp, Homo sapien
tcctgaatcttctcagacgacatca

SEQ ID NO: 1911194 - DNA, 25 bp, Homo sapien
aggaaaaaggtggtctctcaggcag

SEQ ID NO: 1911195 - DNA, 25 bp, Homo sapien
aaccaggaaaaaggtggtctctcag

SEQ ID NO: 1911196 - DNA, 25 bp, Homo sapien
gggaatagcactgccattcccagaa

SEQ ID NO: 1911197 - DNA, 25 bp, Homo sapien
cagaaccaggaaaaaggtggtctct

SEQ ID NO: 1911198 - DNA, 25 bp, Homo sapien
cgggagcccgctggtaactcgcgtc

SEQ ID NO: 1911199 - DNA, 25 bp, Homo sapien
cctcgcgcttctccggcgcctgagg

SEQ ID NO: 1911200 - DNA, 25 bp, Homo sapien
tcggcctcgttagcccgccaggagc

SEQ ID NO: 1911201 - DNA, 25 bp, Homo sapien
cctcgcctcggcctcgttagcccgc

SEQ ID NO: 1911202 - DNA, 25 bp, Homo sapien
gactccgcgcggggcacgagcgagg

SEQ ID NO: 1911203 - DNA, 25 bp, Homo sapien
caggaggagccggactccgcgcggg

SEQ ID NO: 1911204 - DNA, 25 bp, Homo sapien
ggactccgcgcggggcacgagcgag

SEQ ID NO: 1911205 - DNA, 25 bp, Homo sapien
aggagccggactccgcgcggggcac

SEQ ID NO: 1911206 - DNA, 25 bp, Homo sapien
ggacagccccgaggcggctgtcgag

SEQ ID NO: 1911207 - DNA, 25 bp, Homo sapien
cccgaggcggctgtcgagaaggtgg

SEQ ID NO: 1911208 - DNA, 25 bp, Homo sapien
gccccgaggcggctgtcgagaaggt

SEQ ID NO: 1911209 - DNA, 25 bp, Homo sapien
gaggcggctgtcgagaaggtggagg

SEQ ID NO: 1911210 - DNA, 25 bp, Homo sapien
gctccaaagacgatgacaagatggt

SEQ ID NO: 1911211 - DNA, 25 bp, Homo sapien
tgtccatgctggaaaccttcggctc

SEQ ID NO: 1911212 - DNA, 25 bp, Homo sapien
tgttcggcatccagaacgcttgcgg

SEQ ID NO: 1911213 - DNA, 25 bp, Homo sapien
tgcaacgggtcggtgttcggcatcc

SEQ ID NO: 1911214 - DNA, 25 bp, Homo sapien
tttgcaagcaggtcgcagaacttac

SEQ ID NO: 1911215 - DNA, 25 bp, Homo sapien
gagcagacgctaacagtccacagga

SEQ ID NO: 1911216 - DNA, 25 bp, Homo sapien
cagaacttacttgccgagatcgtcc

SEQ ID NO: 1911217 - DNA, 25 bp, Homo sapien
ggtgcccgtctttatatggaatcca

SEQ ID NO: 1911218 - DNA, 25 bp, Homo sapien
ttttcttccattccgcatcatgttt

SEQ ID NO: 1911219 - DNA, 25 bp, Homo sapien
taggtctttagtatgcatatgagga

SEQ ID NO: 1911220 - DNA, 25 bp, Homo sapien
caaaggtaatgctgggttatgctga

SEQ ID NO: 1911221 - DNA, 25 bp, Homo sapien
aatgggcaagactgtaataaattct

SEQ ID NO: 1911222 - DNA, 25 bp, Homo sapien
aattttagtagattgttgttcaaag

SEQ ID NO: 1911223 - DNA, 25 bp, Homo sapien
ttttagtagattgttgttcaaagtg

SEQ ID NO: 1911224 - DNA, 25 bp, Homo sapien
caattttagtagattgttgttcaaa

SEQ ID NO: 1911225 - DNA, 25 bp, Homo sapien
ttagtagattgttgttcaaagtgct

SEQ ID NO: 1911226 - DNA, 25 bp, Homo sapien
cttgcctaggtagagaggaatcaga

SEQ ID NO: 1911227 - DNA, 25 bp, Homo sapien
tcttcttgcctaggtagagaggaat

SEQ ID NO: 1911228 - DNA, 25 bp, Homo sapien
tgtattcttcttgcctaggtagaga

SEQ ID NO: 1911229 - DNA, 25 bp, Homo sapien
tattcttcttgcctaggtagagagg

SEQ ID NO: 1911230 - DNA, 25 bp, Homo sapien
aatgacagcccatttgtcggcattc

SEQ ID NO: 1911231 - DNA, 25 bp, Homo sapien
cagcccatttgtcggcattcttctg

SEQ ID NO: 1911232 - DNA, 25 bp, Homo sapien
gacagcccatttgtcggcattcttc

SEQ ID NO: 1911233 - DNA, 25 bp, Homo sapien
aaaatgacagcccatttgtcggcat

SEQ ID NO: 1911234 - DNA, 25 bp, Homo sapien
ccttaacaggattgcttgtcctcag

SEQ ID NO: 1911235 - DNA, 25 bp, Homo sapien
ttttctaaaagattggaccatatga

SEQ ID NO: 1911236 - DNA, 25 bp, Homo sapien
actacaggcgggacctactgtgcct

SEQ ID NO: 1911237 - DNA, 25 bp, Homo sapien
tactattggcaacaattagtcataa

SEQ ID NO: 1911238 - DNA, 25 bp, Homo sapien
tacatacggttgcacgctcatggct

SEQ ID NO: 1911239 - DNA, 25 bp, Homo sapien
gctggagtacatacggttgcacgct

SEQ ID NO: 1911240 - DNA, 25 bp, Homo sapien
catgctggagtacatacggttgcac

SEQ ID NO: 1911241 - DNA, 25 bp, Homo sapien
ggagtacatacggttgcacgctcat

SEQ ID NO: 1911242 - DNA, 25 bp, Homo sapien
tctaacagaagagggtatccgaggt

SEQ ID NO: 1911243 - DNA, 25 bp, Homo sapien
tatgctgcacatgctaaatcctgtg

SEQ ID NO: 1911244 - DNA, 25 bp, Homo sapien
tatccgaggtgagagtgtaaggcct

SEQ ID NO: 1911245 - DNA, 25 bp, Homo sapien
gacttctgattgagctgactagaga

SEQ ID NO: 1911246 - DNA, 25 bp, Homo sapien
gcgttaagggtcagcaagacatcaa

SEQ ID NO: 1911247 - DNA, 25 bp, Homo sapien
tgcaaactggtagtctcagagtgac

SEQ ID NO: 1911248 - DNA, 25 bp, Homo sapien
catcaagggcgatgtcaggcaggta

SEQ ID NO: 1911249 - DNA, 25 bp, Homo sapien
caggcaggtaactggaaatgcaaac

SEQ ID NO: 1911250 - DNA, 25 bp, Homo sapien
aggtcctgaattgctctgttgtgac

SEQ ID NO: 1911251 - DNA, 25 bp, Homo sapien
gaactatacaattgatgtaaggctg

SEQ ID NO: 1911252 - DNA, 25 bp, Homo sapien
tctgataggtgaactatacaattga

SEQ ID NO: 1911253 - DNA, 25 bp, Homo sapien
gataatcaaagccaagaaatttcat

SEQ ID NO: 1911254 - DNA, 25 bp, Homo sapien
tgatgtaaggctggcagataatcaa

SEQ ID NO: 1911255 - DNA, 25 bp, Homo sapien
ctatttagccaatacaggatgtggt

SEQ ID NO: 1911256 - DNA, 25 bp, Homo sapien
tagccaatacaggatgtggtaatct

SEQ ID NO: 1911257 - DNA, 25 bp, Homo sapien
tttagccaatacaggatgtggtaat

SEQ ID NO: 1911258 - DNA, 25 bp, Homo sapien
tatttagccaatacaggatgtggta

SEQ ID NO: 1911259 - DNA, 25 bp, Homo sapien
gaaaactgttttaggcttttctgca

SEQ ID NO: 1911260 - DNA, 25 bp, Homo sapien
ctgaaaactgttttaggcttttctg

SEQ ID NO: 1911261 - DNA, 25 bp, Homo sapien
tcaggcactgaaaactgttttaggc

SEQ ID NO: 1911262 - DNA, 25 bp, Homo sapien
aggcactgaaaactgttttaggctt

SEQ ID NO: 1911263 - DNA, 25 bp, Homo sapien
ggagtttactcttagttgctgacag

SEQ ID NO: 1911264 - DNA, 25 bp, Homo sapien
tactcttagttgctgacagtcactc

SEQ ID NO: 1911265 - DNA, 25 bp, Homo sapien
tttactcttagttgctgacagtcac

SEQ ID NO: 1911266 - DNA, 25 bp, Homo sapien
ggttggagtttactcttagttgctg

SEQ ID NO: 1911267 - DNA, 25 bp, Homo sapien
gatctggatcttattaccatgtatg

SEQ ID NO: 1911268 - DNA, 25 bp, Homo sapien
cttggagcctaatgtgatctggatc

SEQ ID NO: 1911269 - DNA, 25 bp, Homo sapien
tttatcgtcaggtgctgctttggac

SEQ ID NO: 1911270 - DNA, 25 bp, Homo sapien
tgttgcatattaactgaaaagatca

SEQ ID NO: 1911271 - DNA, 25 bp, Homo sapien
taagtgctgatgactacatggcaca

SEQ ID NO: 1911272 - DNA, 25 bp, Homo sapien
cagtagatccgtgaatcctgccaaa

SEQ ID NO: 1911273 - DNA, 25 bp, Homo sapien
tcatgggagtggtttggagtaaacc

SEQ ID NO: 1911274 - DNA, 25 bp, Homo sapien
taatgggacggtgaaatacaactag

SEQ ID NO: 1911275 - DNA, 25 bp, Homo sapien
acagctccccatatccaaattgcct

SEQ ID NO: 1911276 - DNA, 25 bp, Homo sapien
cagctccccatatccaaattgcctt

SEQ ID NO: 1911277 - DNA, 25 bp, Homo sapien
gacagctccccatatccaaattgcc

SEQ ID NO: 1911278 - DNA, 25 bp, Homo sapien
tcgagtgtgttaccctcccaccacc

SEQ ID NO: 1911279 - DNA, 25 bp, Homo sapien
cttggacctgggtccgttgggctat

SEQ ID NO: 1911280 - DNA, 25 bp, Homo sapien
cctgggtccgttgggctattatcca

SEQ ID NO: 1911281 - DNA, 25 bp, Homo sapien
tttcctcgagtgtgttaccctccca

SEQ ID NO: 1911282 - DNA, 25 bp, Homo sapien
cctgatttgaaggtggtgctagctg

SEQ ID NO: 1911283 - DNA, 25 bp, Homo sapien
cacgtctggccaaggaccagatttt

SEQ ID NO: 1911284 - DNA, 25 bp, Homo sapien
tacctcagcatgttgctagactagc

SEQ ID NO: 1911285 - DNA, 25 bp, Homo sapien
gagaggattgccaacatgccttaat

SEQ ID NO: 1911286 - DNA, 25 bp, Homo sapien
tggagtctcaggaccactgtgtgaa

SEQ ID NO: 1911287 - DNA, 25 bp, Homo sapien
gcaatatcagggcttctatctagca

SEQ ID NO: 1911288 - DNA, 25 bp, Homo sapien
gcttgggtcttcttaaaagtgtggc

SEQ ID NO: 1911289 - DNA, 25 bp, Homo sapien
ggtggcgaaacaacttgctcagggt

SEQ ID NO: 1911290 - DNA, 25 bp, Homo sapien
gggacaacctcattgaaaagctgat

SEQ ID NO: 1911291 - DNA, 25 bp, Homo sapien
gacagctttctattgcccttgggag

SEQ ID NO: 1911292 - DNA, 25 bp, Homo sapien
cccttgggaggcctataacagaatt

SEQ ID NO: 1911293 - DNA, 25 bp, Homo sapien
tctcaagtctctaaggccaatcaag

SEQ ID NO: 1911294 - DNA, 25 bp, Homo sapien
caggaagctctcttgaacccgtggg

SEQ ID NO: 1911295 - DNA, 25 bp, Homo sapien
aagctctcttgaacccgtgggcaga

SEQ ID NO: 1911296 - DNA, 25 bp, Homo sapien
agctctcttgaacccgtgggcagag

SEQ ID NO: 1911297 - DNA, 25 bp, Homo sapien
ggaagctctcttgaacccgtgggca

SEQ ID NO: 1911298 - DNA, 25 bp, Homo sapien
acttcctctgtggttgatatatgag

SEQ ID NO: 1911299 - DNA, 25 bp, Homo sapien
cttcttcatcagaacaccatgtgat

SEQ ID NO: 1911300 - DNA, 25 bp, Homo sapien
gctgcttttgtactgtggccaccca

SEQ ID NO: 1911301 - DNA, 25 bp, Homo sapien
ggttgatatatgagagctagaggac

SEQ ID NO: 1911302 - DNA, 25 bp, Homo sapien
ggaagccagttctgagtagcagcca

SEQ ID NO: 1911303 - DNA, 25 bp, Homo sapien
ctggaagccagttctgagtagcagc

SEQ ID NO: 1911304 - DNA, 25 bp, Homo sapien
gacacacttcatagccctcccgcat

SEQ ID NO: 1911305 - DNA, 25 bp, Homo sapien
gttttctcagacatacctgctccct

SEQ ID NO: 1911306 - DNA, 25 bp, Homo sapien
gttgtgaaaaccaacactcctgaat

SEQ ID NO: 1911307 - DNA, 25 bp, Homo sapien
tggctgccccgaggtgtactaccaa

SEQ ID NO: 1911308 - DNA, 25 bp, Homo sapien
tcagtggaccacttgtgttaaagtt

SEQ ID NO: 1911309 - DNA, 25 bp, Homo sapien
ccttcagaggccctcagattgtgag

SEQ ID NO: 1911310 - DNA, 25 bp, Homo sapien
tccctagcctgactgctattggagg

SEQ ID NO: 1911311 - DNA, 25 bp, Homo sapien
ctgactgctattggagggcaccctc

SEQ ID NO: 1911312 - DNA, 25 bp, Homo sapien
tagcctgactgctattggagggcac

SEQ ID NO: 1911313 - DNA, 25 bp, Homo sapien
tcctccctagcctgactgctattgg

SEQ ID NO: 1911314 - DNA, 25 bp, Homo sapien
agtacttgatgacacccacttgatc

SEQ ID NO: 1911315 - DNA, 25 bp, Homo sapien
tccgctttccgtgtccagctgaaag

SEQ ID NO: 1911316 - DNA, 25 bp, Homo sapien
tgaaagcccagctgagtcaactcct

SEQ ID NO: 1911317 - DNA, 25 bp, Homo sapien
catcagaagggagctaatggtgatt

SEQ ID NO: 1911318 - DNA, 25 bp, Homo sapien
catgagttatatttggcagagagaa

SEQ ID NO: 1911319 - DNA, 25 bp, Homo sapien
tacattagggtgagattaaacatca

SEQ ID NO: 1911320 - DNA, 25 bp, Homo sapien
cagagagaatggaagcttgctaatc

SEQ ID NO: 1911321 - DNA, 25 bp, Homo sapien
catgcccggctagagaatgacaggt

SEQ ID NO: 1911322 - DNA, 25 bp, Homo sapien
aagatctttacaattgcttggagga

SEQ ID NO: 1911323 - DNA, 25 bp, Homo sapien
ctgaatgctcatgctggatttgacc

SEQ ID NO: 1911324 - DNA, 25 bp, Homo sapien
tgtatgctatacaccgcagtgcagc

SEQ ID NO: 1911325 - DNA, 25 bp, Homo sapien
tgttcaaatgtagatcactatgctg

SEQ ID NO: 1911326 - DNA, 25 bp, Homo sapien
tactgactgacaattttaggggata

SEQ ID NO: 1911327 - DNA, 25 bp, Homo sapien
actcagtgagcttctactgactgac

SEQ ID NO: 1911328 - DNA, 25 bp, Homo sapien
agatgatactcagtgagcttctact

SEQ ID NO: 1911329 - DNA, 25 bp, Homo sapien
gatactcagtgagcttctactgact

SEQ ID NO: 1911330 - DNA, 25 bp, Homo sapien
tgatccaagccatcatgttctcttt

SEQ ID NO: 1911331 - DNA, 25 bp, Homo sapien
ttcccctcggtcttttctccacaca

SEQ ID NO: 1911332 - DNA, 25 bp, Homo sapien
agccatcatgttctcttttgttctt

SEQ ID NO: 1911333 - DNA, 25 bp, Homo sapien
cttgatccaagccatcatgttctct

SEQ ID NO: 1911334 - DNA, 25 bp, Homo sapien
tttgggccgtgaggtctctgtcact

SEQ ID NO: 1911335 - DNA, 25 bp, Homo sapien
tgtaaactcagccatagataatgtg

SEQ ID NO: 1911336 - DNA, 25 bp, Homo sapien
gggacagatggtaaatagcttaggc

SEQ ID NO: 1911337 - DNA, 25 bp, Homo sapien
aattagcttgacagtggaaaagaac

SEQ ID NO: 1911338 - DNA, 25 bp, Homo sapien
actgtaacacgaggtaaaacctgtg

SEQ ID NO: 1911339 - DNA, 25 bp, Homo sapien
aagtcctggtttggcgtcattagtc

SEQ ID NO: 1911340 - DNA, 25 bp, Homo sapien
tctccaaagataggtagaaaagtcc

SEQ ID NO: 1911341 - DNA, 25 bp, Homo sapien
tgtgaaactaaaccagcctcaaggc

SEQ ID NO: 1911342 - DNA, 25 bp, Homo sapien
ggatcccgatttctttcttgagcta

SEQ ID NO: 1911343 - DNA, 25 bp, Homo sapien
gctccacttctttacaacgatggaa

SEQ ID NO: 1911344 - DNA, 25 bp, Homo sapien
tgaaaccacagctttggatcccgat

SEQ ID NO: 1911345 - DNA, 25 bp, Homo sapien
tgttacactgtttatatacggccac

SEQ ID NO: 1911346 - DNA, 25 bp, Homo sapien
gcgattcattgacagatctcaggga

SEQ ID NO: 1911347 - DNA, 25 bp, Homo sapien
gagctcagctaagtatgatgcctag

SEQ ID NO: 1911348 - DNA, 25 bp, Homo sapien
tacttgtggagtgaaagatgcgcga

SEQ ID NO: 1911349 - DNA, 25 bp, Homo sapien
gctacagtgtaattcttggcccctt

SEQ ID NO: 1911350 - DNA, 25 bp, Homo sapien
tagcggttggcgagaggccacattt

SEQ ID NO: 1911351 - DNA, 25 bp, Homo sapien
caacttccggcttgaggcacgatag

SEQ ID NO: 1911352 - DNA, 25 bp, Homo sapien
gagagcgagcgtcttttgccacgaa

SEQ ID NO: 1911353 - DNA, 25 bp, Homo sapien
gcggcagcaagacgacttctccgga

SEQ ID NO: 1911354 - DNA, 25 bp, Homo sapien
tgtttttcttggagcaaagggcaag

SEQ ID NO: 1911355 - DNA, 25 bp, Homo sapien
agaggcgccttttgccaaacccctg

SEQ ID NO: 1911356 - DNA, 25 bp, Homo sapien
gaaacctcctccttatcacttgata

SEQ ID NO: 1911357 - DNA, 25 bp, Homo sapien
caaacccctgggtcgccactcaatt

SEQ ID NO: 1911358 - DNA, 25 bp, Homo sapien
tggtgagtcgtcactgacttgtccg

SEQ ID NO: 1911359 - DNA, 25 bp, Homo sapien
tcgtcactgacttgtccggtcctgt

SEQ ID NO: 1911360 - DNA, 25 bp, Homo sapien
gaaatcacttcagacttttggtgag

SEQ ID NO: 1911361 - DNA, 25 bp, Homo sapien
cagacttttggtgagtcgtcactga

SEQ ID NO: 1911362 - DNA, 25 bp, Homo sapien
caagaacccaatttgtctctggata

SEQ ID NO: 1911363 - DNA, 25 bp, Homo sapien
ttttgctacctgtttacagcctgga

SEQ ID NO: 1911364 - DNA, 25 bp, Homo sapien
gagcaacattggcagcctgacttca

SEQ ID NO: 1911365 - DNA, 25 bp, Homo sapien
ggaaccatgattgtgttgagcaaca

SEQ ID NO: 1911366 - DNA, 25 bp, Homo sapien
ttaggatattaattatctcaagtgt

SEQ ID NO: 1911367 - DNA, 25 bp, Homo sapien
taattatctcaagtgttataatttc

SEQ ID NO: 1911368 - DNA, 25 bp, Homo sapien
taggatattaattatctcaagtgtt

SEQ ID NO: 1911369 - DNA, 25 bp, Homo sapien
gatattaattatctcaagtgttata

SEQ ID NO: 1911370 - DNA, 25 bp, Homo sapien
tctaagcatagctattcttgcctgg

SEQ ID NO: 1911371 - DNA, 25 bp, Homo sapien
ttattgacaggtgaagacttgctct

SEQ ID NO: 1911372 - DNA, 25 bp, Homo sapien
ccatatgtgtgtttacgggtgaagt

SEQ ID NO: 1911373 - DNA, 25 bp, Homo sapien
caggcagcatacagttgggtaatgg

SEQ ID NO: 1911374 - DNA, 25 bp, Homo sapien
tagctatgcataattatgggttccc

SEQ ID NO: 1911375 - DNA, 25 bp, Homo sapien
gaaataactcccttaacatagtgtc

SEQ ID NO: 1911376 - DNA, 25 bp, Homo sapien
ttaccgatgatgagtgatgtcaggc

SEQ ID NO: 1911377 - DNA, 25 bp, Homo sapien
tgggttccctgtgataattcgatac

SEQ ID NO: 1911378 - DNA, 25 bp, Homo sapien
tatgccagtttcagtcatgtttaaa

SEQ ID NO: 1911379 - DNA, 25 bp, Homo sapien
gaaattagtcaagaatctgtccaga

SEQ ID NO: 1911380 - DNA, 25 bp, Homo sapien
cactattctgcatatagatccccag

SEQ ID NO: 1911381 - DNA, 25 bp, Homo sapien
gagtttagaatatgagtgctccaaa

SEQ ID NO: 1911382 - DNA, 25 bp, Homo sapien
gaacatcacgagaaagatccaaccc

SEQ ID NO: 1911383 - DNA, 25 bp, Homo sapien
accatgagaacatcacgagaaagat

SEQ ID NO: 1911384 - DNA, 25 bp, Homo sapien
cgagaaagatccaaccccataattt

SEQ ID NO: 1911385 - DNA, 25 bp, Homo sapien
tcacgagaaagatccaaccccataa

SEQ ID NO: 1911386 - DNA, 25 bp, Homo sapien
ggttgtcgcaaaggtctgacatgcc

SEQ ID NO: 1911387 - DNA, 25 bp, Homo sapien
ttgagaggggttgtcgcaaaggtct

SEQ ID NO: 1911388 - DNA, 25 bp, Homo sapien
tttctcttgcaccatcagtctgcaa

SEQ ID NO: 1911389 - DNA, 25 bp, Homo sapien
cttgcaccatcagtctgcaaatttt

SEQ ID NO: 1911390 - DNA, 25 bp, Homo sapien
gtgctacacttgcacgggtacatgt

SEQ ID NO: 1911391 - DNA, 25 bp, Homo sapien
taaacatagcttcagggttgaatcc

SEQ ID NO: 1911392 - DNA, 25 bp, Homo sapien
gggttgaatccgtgctacacttgca

SEQ ID NO: 1911393 - DNA, 25 bp, Homo sapien
tttctttcagctgctactaagtagt

SEQ ID NO: 1911394 - DNA, 25 bp, Homo sapien
ttccttcaatagctgtgcaatactg

SEQ ID NO: 1911395 - DNA, 25 bp, Homo sapien
cttcaatagctgtgcaatactgtct

SEQ ID NO: 1911396 - DNA, 25 bp, Homo sapien
caatagctgtgcaatactgtctaat

SEQ ID NO: 1911397 - DNA, 25 bp, Homo sapien
gttttccttcaatagctgtgcaata

SEQ ID NO: 1911398 - DNA, 25 bp, Homo sapien
ctgtttactattaatagcggcacag

SEQ ID NO: 1911399 - DNA, 25 bp, Homo sapien
ttatcttctttctaagtagcctaaa

SEQ ID NO: 1911400 - DNA, 25 bp, Homo sapien
tttttcaatctagagaaccgcatcc

SEQ ID NO: 1911401 - DNA, 25 bp, Homo sapien
tactattaatagcggcacaggcgtc

SEQ ID NO: 1911402 - DNA, 25 bp, Homo sapien
gctttgctatctagttagtctagca

SEQ ID NO: 1911403 - DNA, 25 bp, Homo sapien
agctaatggtgtcctttggtattta

SEQ ID NO: 1911404 - DNA, 25 bp, Homo sapien
gccattgctaccagggcccttggac

SEQ ID NO: 1911405 - DNA, 25 bp, Homo sapien
agagcaagctttgctatctagttag

SEQ ID NO: 1911406 - DNA, 25 bp, Homo sapien
taagtctcctcccagccgtgagaga

SEQ ID NO: 1911407 - DNA, 25 bp, Homo sapien
gaaaagttcattgctgttgggtgta

SEQ ID NO: 1911408 - DNA, 25 bp, Homo sapien
aatactgccacacatccactcaggg

SEQ ID NO: 1911409 - DNA, 25 bp, Homo sapien
tcgggagctgacccgcagggacttt

SEQ ID NO: 1911410 - DNA, 25 bp, Homo sapien
accagctataactgtctatgtacgg

SEQ ID NO: 1911411 - DNA, 25 bp, Homo sapien
tctcttaactactgttgcggggaag

SEQ ID NO: 1911412 - DNA, 25 bp, Homo sapien
cagctataactgtctatgtacggaa

SEQ ID NO: 1911413 - DNA, 25 bp, Homo sapien
taaaaccagctataactgtctatgt

SEQ ID NO: 1911414 - DNA, 25 bp, Homo sapien
tgaggcgttccactgtggaaatttc

SEQ ID NO: 1911415 - DNA, 25 bp, Homo sapien
ctctggtgaggcgttccactgtgga

SEQ ID NO: 1911416 - DNA, 25 bp, Homo sapien
ccatgggggcctgctacgggctgct

SEQ ID NO: 1911417 - DNA, 25 bp, Homo sapien
ttcagatatccagactccaaatgcc

SEQ ID NO: 1911418 - DNA, 25 bp, Homo sapien
catagacttagtggccaacctctga

SEQ ID NO: 1911419 - DNA, 25 bp, Homo sapien
ggtcaggcatgagcatagacttagt

SEQ ID NO: 1911420 - DNA, 25 bp, Homo sapien
caggcatgagcatagacttagtggc

SEQ ID NO: 1911421 - DNA, 25 bp, Homo sapien
tgagcatagacttagtggccaacct

SEQ ID NO: 1911422 - DNA, 25 bp, Homo sapien
ctggggcggtaaggatggagtaaga

SEQ ID NO: 1911423 - DNA, 25 bp, Homo sapien
tggggcggtaaggatggagtaagag

SEQ ID NO: 1911424 - DNA, 25 bp, Homo sapien
cagacagtgaacatccttgactcga

SEQ ID NO: 1911425 - DNA, 25 bp, Homo sapien
ggatatctcgaagtaacacgtcttg

SEQ ID NO: 1911426 - DNA, 25 bp, Homo sapien
tgtttcaaaatgctacacgtggtac

SEQ ID NO: 1911427 - DNA, 25 bp, Homo sapien
ttttaaagtattgcaacaggcccac

SEQ ID NO: 1911428 - DNA, 25 bp, Homo sapien
agttcagagaaacacatgggatgtg

SEQ ID NO: 1911429 - DNA, 25 bp, Homo sapien
tctctatttactcgggagagtttga

SEQ ID NO: 1911430 - DNA, 25 bp, Homo sapien
taactgccggagatatggtgccttg

SEQ ID NO: 1911431 - DNA, 25 bp, Homo sapien
tcgatcaaagcaacctgtacagttc

SEQ ID NO: 1911432 - DNA, 25 bp, Homo sapien
gaagcctagactaccctatgttgag

SEQ ID NO: 1911433 - DNA, 25 bp, Homo sapien
tagactaccacagattactggcaga

SEQ ID NO: 1911434 - DNA, 25 bp, Homo sapien
tgcgtgtatgcaaacaacaaatttt

SEQ ID NO: 1911435 - DNA, 25 bp, Homo sapien
tactggcagacatacattacagaaa

SEQ ID NO: 1911436 - DNA, 25 bp, Homo sapien
agtacaaatttccctaaggattcat

SEQ ID NO: 1911437 - DNA, 25 bp, Homo sapien
gagtacaaatttccctaaggattca

SEQ ID NO: 1911438 - DNA, 25 bp, Homo sapien
gccaggatggaattacttgactcac

SEQ ID NO: 1911439 - DNA, 25 bp, Homo sapien
tactttgtagcacatagggaggcag

SEQ ID NO: 1911440 - DNA, 25 bp, Homo sapien
tatcttccagttaaccgaagggcac

SEQ ID NO: 1911441 - DNA, 25 bp, Homo sapien
caaacatgtgcttcagtatgctcca

SEQ ID NO: 1911442 - DNA, 25 bp, Homo sapien
tagttgggagtacaaggctcatgcc

SEQ ID NO: 1911443 - DNA, 25 bp, Homo sapien
tgtatgggagacattcatttgaacg

SEQ ID NO: 1911444 - DNA, 25 bp, Homo sapien
cgatccaagggtatacatgtaggtt

SEQ ID NO: 1911445 - DNA, 25 bp, Homo sapien
cctgttgcccatgcagtaaatgtag

SEQ ID NO: 1911446 - DNA, 25 bp, Homo sapien
tataagaaataagatggccgggcat

SEQ ID NO: 1911447 - DNA, 25 bp, Homo sapien
aagatggccgggcatcatggttcat

SEQ ID NO: 1911448 - DNA, 25 bp, Homo sapien
agatggccgggcatcatggttcatg

SEQ ID NO: 1911449 - DNA, 25 bp, Homo sapien
aagaaataagatggccgggcatcat

SEQ ID NO: 1911450 - DNA, 25 bp, Homo sapien
tatttgaaacgcttaagaccagaag

SEQ ID NO: 1911451 - DNA, 25 bp, Homo sapien
gactgcttgtgattctgggcccatg

SEQ ID NO: 1911452 - DNA, 25 bp, Homo sapien
gcattccctttgagagtcacgttgg

SEQ ID NO: 1911453 - DNA, 25 bp, Homo sapien
gaactctgaaatgctctcatgagca

SEQ ID NO: 1911454 - DNA, 25 bp, Homo sapien
tacaagttgctcctgttgacgttcc

SEQ ID NO: 1911455 - DNA, 25 bp, Homo sapien
tgccatgctgagttaggtcatcaca

SEQ ID NO: 1911456 - DNA, 25 bp, Homo sapien
ttcacttcgcgaggagctggtagct

SEQ ID NO: 1911457 - DNA, 25 bp, Homo sapien
ggttggctccgacatttactacaga

SEQ ID NO: 1911458 - DNA, 25 bp, Homo sapien
aagaatccgatcacccgtgggctag

SEQ ID NO: 1911459 - DNA, 25 bp, Homo sapien
aatgtccagccgctcgtgtgtctgc

SEQ ID NO: 1911460 - DNA, 25 bp, Homo sapien
taacatttgggcatgaaagcaggag

SEQ ID NO: 1911461 - DNA, 25 bp, Homo sapien
tctgctggcgtgctcctcttgacga

SEQ ID NO: 1911462 - DNA, 25 bp, Homo sapien
cagagcgccggtcataagtcagcat

SEQ ID NO: 1911463 - DNA, 25 bp, Homo sapien
cactgggcgccttacaagctggata

SEQ ID NO: 1911464 - DNA, 25 bp, Homo sapien
taaatgatgacgtatggcactcgct

SEQ ID NO: 1911465 - DNA, 25 bp, Homo sapien
tagtaagtagcattcagtctcagag

SEQ ID NO: 1911466 - DNA, 25 bp, Homo sapien
tccagaagcttcatacattgtcgct

SEQ ID NO: 1911467 - DNA, 25 bp, Homo sapien
taaagtcttgtatgctggcctttcc

SEQ ID NO: 1911468 - DNA, 25 bp, Homo sapien
tagcagctttagagaacgctcaagt

SEQ ID NO: 1911469 - DNA, 25 bp, Homo sapien
tatatctctcgtttcaaatagcagc

SEQ ID NO: 1911470 - DNA, 25 bp, Homo sapien
ccagtgtttcatacatgtaacccac

SEQ ID NO: 1911471 - DNA, 25 bp, Homo sapien
ttttgcatcaaatactgggtccttc

SEQ ID NO: 1911472 - DNA, 25 bp, Homo sapien
gggtccttctgatccagtgtttcat

SEQ ID NO: 1911473 - DNA, 25 bp, Homo sapien
ccttttgcatcaaatactgggtcct

SEQ ID NO: 1911474 - DNA, 25 bp, Homo sapien
ttagattactggctcttagagggca

SEQ ID NO: 1911475 - DNA, 25 bp, Homo sapien
ttcgtattccacacagttcctaggc

SEQ ID NO: 1911476 - DNA, 25 bp, Homo sapien
gtcttatgcttcttcgtattccaca

SEQ ID NO: 1911477 - DNA, 25 bp, Homo sapien
tccacacagttcctaggctaagtat

SEQ ID NO: 1911478 - DNA, 25 bp, Homo sapien
gacccgtatactgttagtgattctg

SEQ ID NO: 1911479 - DNA, 25 bp, Homo sapien
aacactttaatagacccgtatactg

SEQ ID NO: 1911480 - DNA, 25 bp, Homo sapien
gacatgagccagtgacccaaattta

SEQ ID NO: 1911481 - DNA, 25 bp, Homo sapien
tggagtgcaccggtcaatcacagtt

SEQ ID NO: 1911482 - DNA, 25 bp, Homo sapien
acttcaatttcactggtttaggatt

SEQ ID NO: 1911483 - DNA, 25 bp, Homo sapien
ggtagcagttacagcttcggcaatt

SEQ ID NO: 1911484 - DNA, 25 bp, Homo sapien
taggattggtagcagttacagcttc

SEQ ID NO: 1911485 - DNA, 25 bp, Homo sapien
gactgctccttagtggctcctttca

SEQ ID NO: 1911486 - DNA, 25 bp, Homo sapien
taaagtaaggtaatgaggaagtcat

SEQ ID NO: 1911487 - DNA, 25 bp, Homo sapien
ataaagtaaggtaatgaggaagtca

SEQ ID NO: 1911488 - DNA, 25 bp, Homo sapien
tgcgcacaagtgaaggatctaggtt

SEQ ID NO: 1911489 - DNA, 25 bp, Homo sapien
tatcccagtagtcaagaaagtcctg

SEQ ID NO: 1911490 - DNA, 25 bp, Homo sapien
tcagtggcagatcagtcagatcagt

SEQ ID NO: 1911491 - DNA, 25 bp, Homo sapien
caaaccacctggtctgcggaaaaat

SEQ ID NO: 1911492 - DNA, 25 bp, Homo sapien
taaaatgttcagatgcaatgatgaa

SEQ ID NO: 1911493 - DNA, 25 bp, Homo sapien
gaacttcatgtgcaactgccaactt

SEQ ID NO: 1911494 - DNA, 25 bp, Homo sapien
tatgttgaacttcatgtgcaactgc

SEQ ID NO: 1911495 - DNA, 25 bp, Homo sapien
agtgtatgttgaacttcatgtgcaa

SEQ ID NO: 1911496 - DNA, 25 bp, Homo sapien
gatggcgttctccatatggtcaggc

SEQ ID NO: 1911497 - DNA, 25 bp, Homo sapien
tagagatggcgttctccatatggtc

SEQ ID NO: 1911498 - DNA, 25 bp, Homo sapien
tttcactccaccaggcattacctat

SEQ ID NO: 1911499 - DNA, 25 bp, Homo sapien
tattatcccaagagcagtgtttctc

SEQ ID NO: 1911500 - DNA, 25 bp, Homo sapien
cctatctggtaaatcaggatctgtg

SEQ ID NO: 1911501 - DNA, 25 bp, Homo sapien
gatcgtaaggactggaaaggactca

SEQ ID NO: 1911502 - DNA, 25 bp, Homo sapien
aactgtctcttacgatcctatctgg

SEQ ID NO: 1911503 - DNA, 25 bp, Homo sapien
tacttggcttagagctacctggagg

SEQ ID NO: 1911504 - DNA, 25 bp, Homo sapien
ggctttgtgaacaatactatcgcca

SEQ ID NO: 1911505 - DNA, 25 bp, Homo sapien
tcattcaccagtttaatagctcgtt

SEQ ID NO: 1911506 - DNA, 25 bp, Homo sapien
ctagccccccatttcttggtatcat

SEQ ID NO: 1911507 - DNA, 25 bp, Homo sapien
tcagtatcgccatatacaaccctag

SEQ ID NO: 1911508 - DNA, 25 bp, Homo sapien
aaaactacagatttgtatcacttac

SEQ ID NO: 1911509 - DNA, 25 bp, Homo sapien
caccgtgcctcactgtattttagtc

SEQ ID NO: 1911510 - DNA, 25 bp, Homo sapien
ggattcaactctgggctgaagaccc

SEQ ID NO: 1911511 - DNA, 25 bp, Homo sapien
gttgtccaggcaggattcaactctg

SEQ ID NO: 1911512 - DNA, 25 bp, Homo sapien
tcaccataaatctagtcttcaaaat

SEQ ID NO: 1911513 - DNA, 25 bp, Homo sapien
aactgacgcgcatcaagcattcgtg

SEQ ID NO: 1911514 - DNA, 25 bp, Homo sapien
gacatttgctatcagcttaagtccc

SEQ ID NO: 1911515 - DNA, 25 bp, Homo sapien
tagcagatgtatagccaaatgtgac

SEQ ID NO: 1911516 - DNA, 25 bp, Homo sapien
gaattgaaacatgctaacaacagag

SEQ ID NO: 1911517 - DNA, 25 bp, Homo sapien
ggccaactgtcaggaattgaaacat

SEQ ID NO: 1911518 - DNA, 25 bp, Homo sapien
tacataattaagaaggaagcataaa

SEQ ID NO: 1911519 - DNA, 25 bp, Homo sapien
tcaggaattgaaacatgctaacaac

SEQ ID NO: 1911520 - DNA, 25 bp, Homo sapien
ccctccggcctacatttattagcaa

SEQ ID NO: 1911521 - DNA, 25 bp, Homo sapien
tcaaatctgatgcttagaccactaa

SEQ ID NO: 1911522 - DNA, 25 bp, Homo sapien
gatgcttagaccactaagccatccc

SEQ ID NO: 1911523 - DNA, 25 bp, Homo sapien
gctgggttgactctgctgacattca

SEQ ID NO: 1911524 - DNA, 25 bp, Homo sapien
tctcaggtataggatattcacacac

SEQ ID NO: 1911525 - DNA, 25 bp, Homo sapien
ttgatgatgattcacagacacgtgc

SEQ ID NO: 1911526 - DNA, 25 bp, Homo sapien
caattaaaatctcaggtataggata

SEQ ID NO: 1911527 - DNA, 25 bp, Homo sapien
gcatgtcagacctaacaattaaaat

SEQ ID NO: 1911528 - DNA, 25 bp, Homo sapien
gggacactgtgatatcatgcctaac

SEQ ID NO: 1911529 - DNA, 25 bp, Homo sapien
gatatcatgcctaacttggtaaagt

SEQ ID NO: 1911530 - DNA, 25 bp, Homo sapien
gagaggtacagccaaatttgaactc

SEQ ID NO: 1911531 - DNA, 25 bp, Homo sapien
tggtaaagtaaatctggaggtactc

SEQ ID NO: 1911532 - DNA, 25 bp, Homo sapien
catctgggatctttgctgaacacta

SEQ ID NO: 1911533 - DNA, 25 bp, Homo sapien
ggtttagcaatacgcaacatcattg

SEQ ID NO: 1911534 - DNA, 25 bp, Homo sapien
tggaaatccaaaacgagaacagagt

SEQ ID NO: 1911535 - DNA, 25 bp, Homo sapien
cagagttgctatagaagcgggattc

SEQ ID NO: 1911536 - DNA, 25 bp, Homo sapien
aaaaagtctagccatctcactggtt

SEQ ID NO: 1911537 - DNA, 25 bp, Homo sapien
cggacacggctaacataatgatcaa

SEQ ID NO: 1911538 - DNA, 25 bp, Homo sapien
atttggagatttccacggacacggc

SEQ ID NO: 1911539 - DNA, 25 bp, Homo sapien
tgtgaaccccttgtcagtacatgta

SEQ ID NO: 1911540 - DNA, 25 bp, Homo sapien
cataatcagcagattaagaattcct

SEQ ID NO: 1911541 - DNA, 25 bp, Homo sapien
taagtgatttgactaagatcaactc

SEQ ID NO: 1911542 - DNA, 25 bp, Homo sapien
tggttttcctaggttgatgttagct

SEQ ID NO: 1911543 - DNA, 25 bp, Homo sapien
tacataactgttacggtgaaaatgg

SEQ ID NO: 1911544 - DNA, 25 bp, Homo sapien
gcaacctctgactcctgctcccggg

SEQ ID NO: 1911545 - DNA, 25 bp, Homo sapien
aacctctgactcctgctcccgggtt

SEQ ID NO: 1911546 - DNA, 25 bp, Homo sapien
cctctgactcctgctcccgggttca

SEQ ID NO: 1911547 - DNA, 25 bp, Homo sapien
gcccagactggagtggagcgcagtg

SEQ ID NO: 1911548 - DNA, 25 bp, Homo sapien
ctgtatagatctgtcttgttatcaa

SEQ ID NO: 1911549 - DNA, 25 bp, Homo sapien
tgacaagactcgaaaggtaaagagg

SEQ ID NO: 1911550 - DNA, 25 bp, Homo sapien
ccagtctgacaagactcgaaaggta

SEQ ID NO: 1911551 - DNA, 25 bp, Homo sapien
gttatcaaaccagtctgacaagact

SEQ ID NO: 1911552 - DNA, 25 bp, Homo sapien
tcaaggatgcaaatattacccagga

SEQ ID NO: 1911553 - DNA, 25 bp, Homo sapien
aattgggtaacttcaaggatgcaaa

SEQ ID NO: 1911554 - DNA, 25 bp, Homo sapien
gaaaatcctatgatcttactttttg

SEQ ID NO: 1911555 - DNA, 25 bp, Homo sapien
ggatagttcattgaaattactctac

SEQ ID NO: 1911556 - DNA, 25 bp, Homo sapien
taactctacttaagtataacagtaa

SEQ ID NO: 1911557 - DNA, 25 bp, Homo sapien
tagacctttctagttattgctacct

SEQ ID NO: 1911558 - DNA, 25 bp, Homo sapien
cagtaattgacaaacgcataagcta

SEQ ID NO: 1911559 - DNA, 25 bp, Homo sapien
tgattaaatcattatattgaccgaa

SEQ ID NO: 1911560 - DNA, 25 bp, Homo sapien
tatgatccatactcatctctttcag

SEQ ID NO: 1911561 - DNA, 25 bp, Homo sapien
gatttagtgtaattcggccaacaat

SEQ ID NO: 1911562 - DNA, 25 bp, Homo sapien
tctcatgattctccaaagatttagt

SEQ ID NO: 1911563 - DNA, 25 bp, Homo sapien
tcagctgcaaatctgttctcaattt

SEQ ID NO: 1911564 - DNA, 25 bp, Homo sapien
tttgttgcctgggatagttttgaac

SEQ ID NO: 1911565 - DNA, 25 bp, Homo sapien
cactgcacctgatctttttattcca

SEQ ID NO: 1911566 - DNA, 25 bp, Homo sapien
cactactttgttttagttagacttg

SEQ ID NO: 1911567 - DNA, 25 bp, Homo sapien
aactttactgtcctggaatcttcca

SEQ ID NO: 1911568 - DNA, 25 bp, Homo sapien
gacataagtcaatacttaaagcggc

SEQ ID NO: 1911569 - DNA, 25 bp, Homo sapien
tggcacccgagagatcatccgacat

SEQ ID NO: 1911570 - DNA, 25 bp, Homo sapien
ttgtaagaggtaaccccaggaatgc

SEQ ID NO: 1911571 - DNA, 25 bp, Homo sapien
aaagcggcagccctttgtaagaggt

SEQ ID NO: 1911572 - DNA, 25 bp, Homo sapien
gaagtgtggatactgaaagcatctg

SEQ ID NO: 1911573 - DNA, 25 bp, Homo sapien
aagtgtggatactgaaagcatctga

SEQ ID NO: 1911574 - DNA, 25 bp, Homo sapien
agtgtggatactgaaagcatctgac

SEQ ID NO: 1911575 - DNA, 25 bp, Homo sapien
agaagtgtggatactgaaagcatct

SEQ ID NO: 1911576 - DNA, 25 bp, Homo sapien
ctgctttcaagggtcataggaaggg

SEQ ID NO: 1911577 - DNA, 25 bp, Homo sapien
tctccattatttcagcaccacagaa

SEQ ID NO: 1911578 - DNA, 25 bp, Homo sapien
cataggaagggattcgctttcttcc

SEQ ID NO: 1911579 - DNA, 25 bp, Homo sapien
ccaacctcaagtacaactgggaagt

SEQ ID NO: 1911580 - DNA, 25 bp, Homo sapien
acttttatcttcactattatctgca

SEQ ID NO: 1911581 - DNA, 25 bp, Homo sapien
gcaatagcatgaaacgactctctga

SEQ ID NO: 1911582 - DNA, 25 bp, Homo sapien
tattatctgcaatagcatgaaacga

SEQ ID NO: 1911583 - DNA, 25 bp, Homo sapien
gaaacgactctctgaataaaactgg

SEQ ID NO: 1911584 - DNA, 25 bp, Homo sapien
taattccagatctaataagtaatgg

SEQ ID NO: 1911585 - DNA, 25 bp, Homo sapien
atcagcagcataggtgacttcgagt

SEQ ID NO: 1911586 - DNA, 25 bp, Homo sapien
cctgtaattccagatctaataagta

SEQ ID NO: 1911587 - DNA, 25 bp, Homo sapien
taggtgacttcgagtcctgtaattc

SEQ ID NO: 1911588 - DNA, 25 bp, Homo sapien
tcaggatccggttctaagtctcgtc

SEQ ID NO: 1911589 - DNA, 25 bp, Homo sapien
ccacactgattagggtaagattttg

SEQ ID NO: 1911590 - DNA, 25 bp, Homo sapien
gcagtggagtgtcagatgagatgca

SEQ ID NO: 1911591 - DNA, 25 bp, Homo sapien
cgtctagttcgagcatgcaactcca

SEQ ID NO: 1911592 - DNA, 25 bp, Homo sapien
aatttataaaaacttctgtagagat

SEQ ID NO: 1911593 - DNA, 25 bp, Homo sapien
tttataaaaacttctgtagagatgg

SEQ ID NO: 1911594 - DNA, 25 bp, Homo sapien
ggcctcactatgttgctcaggctgg

SEQ ID NO: 1911595 - DNA, 25 bp, Homo sapien
cctcactatgttgctcaggctggtc

SEQ ID NO: 1911596 - DNA, 25 bp, Homo sapien
gacatgaagactctgaaaacaattt

SEQ ID NO: 1911597 - DNA, 25 bp, Homo sapien
agacatgaagactctgaaaacaatt

SEQ ID NO: 1911598 - DNA, 25 bp, Homo sapien
acaaaatgcattactgtgcttaggg

SEQ ID NO: 1911599 - DNA, 25 bp, Homo sapien
gcattactgtgcttagggggtattt

SEQ ID NO: 1911600 - DNA, 25 bp, Homo sapien
gaagctgtcagagcaaccagtgaga

SEQ ID NO: 1911601 - DNA, 25 bp, Homo sapien
ccttgagatgaggaaagccggttat

SEQ ID NO: 1911602 - DNA, 25 bp, Homo sapien
ctgtttcaaccaccgggcggcagtt

SEQ ID NO: 1911603 - DNA, 25 bp, Homo sapien
ttaacttccagagggcccatggttc

SEQ ID NO: 1911604 - DNA, 25 bp, Homo sapien
agtattgtttaaagatggtccatca

SEQ ID NO: 1911605 - DNA, 25 bp, Homo sapien
tttaaagatggtccatcaatctgag

SEQ ID NO: 1911606 - DNA, 25 bp, Homo sapien
tggtccatcaatctgagaagtttct

SEQ ID NO: 1911607 - DNA, 25 bp, Homo sapien
gtaagtattgtttaaagatggtcca

SEQ ID NO: 1911608 - DNA, 25 bp, Homo sapien
tctaagagtgtcagtattacttcct

SEQ ID NO: 1911609 - DNA, 25 bp, Homo sapien
tgtgttaacagtactcttctaagag

SEQ ID NO: 1911610 - DNA, 25 bp, Homo sapien
ctttgcttgtgttaacagtactctt

SEQ ID NO: 1911611 - DNA, 25 bp, Homo sapien
cttctaagagtgtcagtattacttc

SEQ ID NO: 1911612 - DNA, 25 bp, Homo sapien
gcagtttgactacatcccgtggttg

SEQ ID NO: 1911613 - DNA, 25 bp, Homo sapien
cacttgaaccagttgtcgacttggg

SEQ ID NO: 1911614 - DNA, 25 bp, Homo sapien
caagtcgagtttctaccatgaggag

SEQ ID NO: 1911615 - DNA, 25 bp, Homo sapien
catccatttttggaggcactacagg

SEQ ID NO: 1911616 - DNA, 25 bp, Homo sapien
tgtcctaacttggtgatgaaagtgg

SEQ ID NO: 1911617 - DNA, 25 bp, Homo sapien
tgtgcgtgcgctcacatgtttgtct

SEQ ID NO: 1911618 - DNA, 25 bp, Homo sapien
gtttgtctatcaattccctgaagag

SEQ ID NO: 1911619 - DNA, 25 bp, Homo sapien
tttaaactttctggattaagccaca

SEQ ID NO: 1911620 - DNA, 25 bp, Homo sapien
aaatacggtatcacagaaaactagc

SEQ ID NO: 1911621 - DNA, 25 bp, Homo sapien
catgacatctttacagtgagcacct

SEQ ID NO: 1911622 - DNA, 25 bp, Homo sapien
aaactagcagtcaggtaaccaaatg

SEQ ID NO: 1911623 - DNA, 25 bp, Homo sapien
aatttctctaggtgtaaccatccag

SEQ ID NO: 1911624 - DNA, 25 bp, Homo sapien
gaaattgcttctgataacgacctcg

SEQ ID NO: 1911625 - DNA, 25 bp, Homo sapien
caggtcacaatcttcggtttcagca

SEQ ID NO: 1911626 - DNA, 25 bp, Homo sapien
gatctacagcagagcccattagtgg

SEQ ID NO: 1911627 - DNA, 25 bp, Homo sapien
ttcttaatctgtgctcttgcgcgac

SEQ ID NO: 1911628 - DNA, 25 bp, Homo sapien
ccaatgtattctcgttagggtgacg

SEQ ID NO: 1911629 - DNA, 25 bp, Homo sapien
ggtacttgtcttgtaacagatggaa

SEQ ID NO: 1911630 - DNA, 25 bp, Homo sapien
gatactgggaggatctctttcttac

SEQ ID NO: 1911631 - DNA, 25 bp, Homo sapien
gaacagtactgcttaaagatccagg

SEQ ID NO: 1911632 - DNA, 25 bp, Homo sapien
ctgaagatgagtcatcatcttcagt

SEQ ID NO: 1911633 - DNA, 25 bp, Homo sapien
gaacttctgtgggtatttctgcaca

SEQ ID NO: 1911634 - DNA, 25 bp, Homo sapien
agttgaacttctgtgggtatttctg

SEQ ID NO: 1911635 - DNA, 25 bp, Homo sapien
aactgttatcactccattccatttc

SEQ ID NO: 1911636 - DNA, 25 bp, Homo sapien
tctctgggacatcaccaaactaagc

SEQ ID NO: 1911637 - DNA, 25 bp, Homo sapien
agagcctcatcaggactactgtcca

SEQ ID NO: 1911638 - DNA, 25 bp, Homo sapien
cagcaagaagatgtaccagagcctc

SEQ ID NO: 1911639 - DNA, 25 bp, Homo sapien
tattatttccaaaggagcgacatgg

SEQ ID NO: 1911640 - DNA, 25 bp, Homo sapien
caagtacaataatcaccaacaaata

SEQ ID NO: 1911641 - DNA, 25 bp, Homo sapien
agtacaataatcaccaacaaataag

SEQ ID NO: 1911642 - DNA, 25 bp, Homo sapien
acaagtacaataatcaccaacaaat

SEQ ID NO: 1911643 - DNA, 25 bp, Homo sapien
tacaataatcaccaacaaataagtt

SEQ ID NO: 1911644 - DNA, 25 bp, Homo sapien
tcttccactttgtgtctagtgtgac

SEQ ID NO: 1911645 - DNA, 25 bp, Homo sapien
ggctgaaaagtctgactattttcca

SEQ ID NO: 1911646 - DNA, 25 bp, Homo sapien
gccataactgggcagaaatagtttt

SEQ ID NO: 1911647 - DNA, 25 bp, Homo sapien
ggtttcccatttcattgccataact

SEQ ID NO: 1911648 - DNA, 25 bp, Homo sapien
gacacatgtgtattggactctcttt

SEQ ID NO: 1911649 - DNA, 25 bp, Homo sapien
agagcttagtgtaatccctaatggg

SEQ ID NO: 1911650 - DNA, 25 bp, Homo sapien
agcagcactattcttaccaggcaaa

SEQ ID NO: 1911651 - DNA, 25 bp, Homo sapien
cagcactattcttaccaggcaaaag

SEQ ID NO: 1911652 - DNA, 25 bp, Homo sapien
gcagcactattcttaccaggcaaaa

SEQ ID NO: 1911653 - DNA, 25 bp, Homo sapien
gcactattcttaccaggcaaaagtg

SEQ ID NO: 1911654 - DNA, 25 bp, Homo sapien
gtgcaatgttaactcagcagagaac

SEQ ID NO: 1911655 - DNA, 25 bp, Homo sapien
ttgtgaacttctaccatattggctg

SEQ ID NO: 1911656 - DNA, 25 bp, Homo sapien
cagaacctcagagtgcaatgttaac

SEQ ID NO: 1911657 - DNA, 25 bp, Homo sapien
cctgggatccatcgctgtagtccac

SEQ ID NO: 1911658 - DNA, 25 bp, Homo sapien
actttctgttgctggcacaaacctg

SEQ ID NO: 1911659 - DNA, 25 bp, Homo sapien
gaaatcattctgtttgagaatttcc

SEQ ID NO: 1911660 - DNA, 25 bp, Homo sapien
tctgttgctggcacaaacctgtgat

SEQ ID NO: 1911661 - DNA, 25 bp, Homo sapien
aatcattctgtttgagaatttcctg

SEQ ID NO: 1911662 - DNA, 25 bp, Homo sapien
gaatgtggcaccatttagcaataaa

SEQ ID NO: 1911663 - DNA, 25 bp, Homo sapien
aattaggcacttaagtcagttcaag

SEQ ID NO: 1911664 - DNA, 25 bp, Homo sapien
tatatctgccttttgaatgatgtcg

SEQ ID NO: 1911665 - DNA, 25 bp, Homo sapien
gaacttcaatataggcttactgctg

SEQ ID NO: 1911666 - DNA, 25 bp, Homo sapien
catcttcccatatggcctgtagacc

SEQ ID NO: 1911667 - DNA, 25 bp, Homo sapien
aggttggctcatttgagaagtttca

SEQ ID NO: 1911668 - DNA, 25 bp, Homo sapien
tatggcctgtagaccagggtttcca

SEQ ID NO: 1911669 - DNA, 25 bp, Homo sapien
catttctgtttcttcgccgttgctt

SEQ ID NO: 1911670 - DNA, 25 bp, Homo sapien
aacatatattaagaataattgtgta

SEQ ID NO: 1911671 - DNA, 25 bp, Homo sapien
atattaagaataattgtgtatgaac

SEQ ID NO: 1911672 - DNA, 25 bp, Homo sapien
caccacacccgccggtcattaattt

SEQ ID NO: 1911673 - DNA, 25 bp, Homo sapien
gccaccacacccgccggtcattaat

SEQ ID NO: 1911674 - DNA, 25 bp, Homo sapien
ctctgtggttcaacaccttccaata

SEQ ID NO: 1911675 - DNA, 25 bp, Homo sapien
caatgtccagacgatttaagatatc

SEQ ID NO: 1911676 - DNA, 25 bp, Homo sapien
cttctaattcacatgtactctgtgg

SEQ ID NO: 1911677 - DNA, 25 bp, Homo sapien
tatcagcagctacagcatccacttc

SEQ ID NO: 1911678 - DNA, 25 bp, Homo sapien
ttatgtgagagcaaactttctaaca

SEQ ID NO: 1911679 - DNA, 25 bp, Homo sapien
tgtacccagaaaacctgatatatta

SEQ ID NO: 1911680 - DNA, 25 bp, Homo sapien
aataattatgtgagagcaaactttc

SEQ ID NO: 1911681 - DNA, 25 bp, Homo sapien
tacatttagcttgtacccagaaaac

SEQ ID NO: 1911682 - DNA, 25 bp, Homo sapien
attccttgtaatacactaatgtcaa

SEQ ID NO: 1911683 - DNA, 25 bp, Homo sapien
tacactaatgtcaaggtttgtttct

SEQ ID NO: 1911684 - DNA, 25 bp, Homo sapien
tgtaatacactaatgtcaaggtttg

SEQ ID NO: 1911685 - DNA, 25 bp, Homo sapien
cactaatgtcaaggtttgtttctgt

SEQ ID NO: 1911686 - DNA, 25 bp, Homo sapien
tcttgcaggatccagttgcatgcaa

SEQ ID NO: 1911687 - DNA, 25 bp, Homo sapien
aaagtatcagcaagagaatttcctg

SEQ ID NO: 1911688 - DNA, 25 bp, Homo sapien
gtatttcatcttgttcccaccgaaa

SEQ ID NO: 1911689 - DNA, 25 bp, Homo sapien
ttgcaggatccagttgcatgcaatg

SEQ ID NO: 1911690 - DNA, 25 bp, Homo sapien
tgggctttgactatcttgcacaggc

SEQ ID NO: 1911691 - DNA, 25 bp, Homo sapien
ggctttgactatcttgcacaggctg

SEQ ID NO: 1911692 - DNA, 25 bp, Homo sapien
gatgggctttgactatcttgcacag

SEQ ID NO: 1911693 - DNA, 25 bp, Homo sapien
agagatgggctttgactatcttgca

SEQ ID NO: 1911694 - DNA, 25 bp, Homo sapien
gcaaactataggaatgttcccttta

SEQ ID NO: 1911695 - DNA, 25 bp, Homo sapien
ttaaggtgtgaagtatgtgacgtat

SEQ ID NO: 1911696 - DNA, 25 bp, Homo sapien
tttctgctagaagtttgataggttc

SEQ ID NO: 1911697 - DNA, 25 bp, Homo sapien
gtcaaagttaagttgactatatggg

SEQ ID NO: 1911698 - DNA, 25 bp, Homo sapien
cgtataaggtgtgaagaacatacaa

SEQ ID NO: 1911699 - DNA, 25 bp, Homo sapien
tataagttgtcatctaaacctgagg

SEQ ID NO: 1911700 - DNA, 25 bp, Homo sapien
tgggtaatgaactccctaaacctca

SEQ ID NO: 1911701 - DNA, 25 bp, Homo sapien
tatagtaagtctcgaaagtgggtaa

SEQ ID NO: 1911702 - DNA, 25 bp, Homo sapien
tgggaattctaaggaccaagggcaa

SEQ ID NO: 1911703 - DNA, 25 bp, Homo sapien
cagcagccagatttattaaattcat

SEQ ID NO: 1911704 - DNA, 25 bp, Homo sapien
taaagattgtagtcaatgaagagct

SEQ ID NO: 1911705 - DNA, 25 bp, Homo sapien
tatgcgcttcatgaggctggtaaaa

SEQ ID NO: 1911706 - DNA, 25 bp, Homo sapien
tcttgcttttcggaacttgacagca

SEQ ID NO: 1911707 - DNA, 25 bp, Homo sapien
gctccgctttgcaaaagttcacata

SEQ ID NO: 1911708 - DNA, 25 bp, Homo sapien
tccgctttgcaaaagttcacatatc

SEQ ID NO: 1911709 - DNA, 25 bp, Homo sapien
tggctccgctttgcaaaagttcaca

SEQ ID NO: 1911710 - DNA, 25 bp, Homo sapien
tatggctccgctttgcaaaagttca

SEQ ID NO: 1911711 - DNA, 25 bp, Homo sapien
accatgaatttacagtggcaccagt

SEQ ID NO: 1911712 - DNA, 25 bp, Homo sapien
gtagacatacagcacgcagggaagg

SEQ ID NO: 1911713 - DNA, 25 bp, Homo sapien
tttctctaagaaggtaaggcctgag

SEQ ID NO: 1911714 - DNA, 25 bp, Homo sapien
tctgggtgaagttgaaaaccatgaa

SEQ ID NO: 1911715 - DNA, 25 bp, Homo sapien
ccccagcttgttgtaagttccctga

SEQ ID NO: 1911716 - DNA, 25 bp, Homo sapien
tgacgttttcatttggcagaccaaa

SEQ ID NO: 1911717 - DNA, 25 bp, Homo sapien
gcataaacaggtctggtatggtggc

SEQ ID NO: 1911718 - DNA, 25 bp, Homo sapien
tccacagagcatcaagtaatgtagg

SEQ ID NO: 1911719 - DNA, 25 bp, Homo sapien
cacaacttgtggacgagaaagggaa

SEQ ID NO: 1911720 - DNA, 25 bp, Homo sapien
gagaataagagtccacagaaattgc

SEQ ID NO: 1911721 - DNA, 25 bp, Homo sapien
aaattgctcttttgtactccacgaa

SEQ ID NO: 1911722 - DNA, 25 bp, Homo sapien
ggaataaccattgggaatagagctg

SEQ ID NO: 1911723 - DNA, 25 bp, Homo sapien
cattgtaggattgtaaagatagatc

SEQ ID NO: 1911724 - DNA, 25 bp, Homo sapien
gtctttccttctcatgataaccata

SEQ ID NO: 1911725 - DNA, 25 bp, Homo sapien
aagtgtctttccttctcatgataac

SEQ ID NO: 1911726 - DNA, 25 bp, Homo sapien
gtaggattgtaaagatagatcttca

SEQ ID NO: 1911727 - DNA, 25 bp, Homo sapien
aagttcccaggtgtgtcagtcccag

SEQ ID NO: 1911728 - DNA, 25 bp, Homo sapien
tgctgggccccaagaatgtagttct

SEQ ID NO: 1911729 - DNA, 25 bp, Homo sapien
gctcatgtggagtgacagactggaa

SEQ ID NO: 1911730 - DNA, 25 bp, Homo sapien
cagtcccagtcctccaagaagtaaa

SEQ ID NO: 1911731 - DNA, 25 bp, Homo sapien
taaagccacattaagtgctctgtcg

SEQ ID NO: 1911732 - DNA, 25 bp, Homo sapien
attcctgatactaatgacactttga

SEQ ID NO: 1911733 - DNA, 25 bp, Homo sapien
aagatggattgcctaaagccacatt

SEQ ID NO: 1911734 - DNA, 25 bp, Homo sapien
gtgctctgtcgatactgaatgccat

SEQ ID NO: 1911735 - DNA, 25 bp, Homo sapien
aaggaaagatgccatgtagatgaag

SEQ ID NO: 1911736 - DNA, 25 bp, Homo sapien
catcgtatggcacatagaggtaagg

SEQ ID NO: 1911737 - DNA, 25 bp, Homo sapien
gatgccatgtagatgaagacatgtc

SEQ ID NO: 1911738 - DNA, 25 bp, Homo sapien
gctgctgtccataaccatcgtatgg

SEQ ID NO: 1911739 - DNA, 25 bp, Homo sapien
gaaagtaatttgagtgagaacccac

SEQ ID NO: 1911740 - DNA, 25 bp, Homo sapien
caatatatcagtcaaggtgcagaag

SEQ ID NO: 1911741 - DNA, 25 bp, Homo sapien
gagcattgtccctagttccccttgg

SEQ ID NO: 1911742 - DNA, 25 bp, Homo sapien
ggtaaatggtgctgacttgccaaca

SEQ ID NO: 1911743 - DNA, 25 bp, Homo sapien
tctcatgaataaatgttataaccat

SEQ ID NO: 1911744 - DNA, 25 bp, Homo sapien
tatctcatgaataaatgttataacc

SEQ ID NO: 1911745 - DNA, 25 bp, Homo sapien
aatatctcatgaataaatgttataa

SEQ ID NO: 1911746 - DNA, 25 bp, Homo sapien
gaatgctttttaaatatctcatgaa

SEQ ID NO: 1911747 - DNA, 25 bp, Homo sapien
aaaagaaacatgtcaagagagttaa

SEQ ID NO: 1911748 - DNA, 25 bp, Homo sapien
caagagggggtatgatactatgata

SEQ ID NO: 1911749 - DNA, 25 bp, Homo sapien
agagttaaaggagagtatgagacca

SEQ ID NO: 1911750 - DNA, 25 bp, Homo sapien
gagaccaacatcttaccaaatagag

SEQ ID NO: 1911751 - DNA, 25 bp, Homo sapien
cacaagcacaagaagctcaagtcgg

SEQ ID NO: 1911752 - DNA, 25 bp, Homo sapien
gcccggtcggacatggacaagaagc

SEQ ID NO: 1911753 - DNA, 25 bp, Homo sapien
gacatggacaagaagcacaagcaca

SEQ ID NO: 1911754 - DNA, 25 bp, Homo sapien
agaagctcaagtcggacaaacacct

SEQ ID NO: 1911755 - DNA, 25 bp, Homo sapien
aataatttagagagagcgcaggagc

SEQ ID NO: 1911756 - DNA, 25 bp, Homo sapien
gcggcttgtgaacagtcagtgcaaa

SEQ ID NO: 1911757 - DNA, 25 bp, Homo sapien
ggagcagcttgaccgcatcgtgaag

SEQ ID NO: 1911758 - DNA, 25 bp, Homo sapien
gccttcaagagtcccagcaaagaaa

SEQ ID NO: 1911759 - DNA, 25 bp, Homo sapien
tgatttaatctattcaacctatggg

SEQ ID NO: 1911760 - DNA, 25 bp, Homo sapien
tatatttgaattatgggccctacag

SEQ ID NO: 1911761 - DNA, 25 bp, Homo sapien
ggccctacagttcttatgcaccgca

SEQ ID NO: 1911762 - DNA, 25 bp, Homo sapien
gcattatgactccacatatgcaaat

SEQ ID NO: 1911763 - DNA, 25 bp, Homo sapien
cttttaaacttatctatactcattg

SEQ ID NO: 1911764 - DNA, 25 bp, Homo sapien
gttttctttagcagttgctaatgag

SEQ ID NO: 1911765 - DNA, 25 bp, Homo sapien
cctggcctattatacaatcttttaa

SEQ ID NO: 1911766 - DNA, 25 bp, Homo sapien
tctcgctaagtgcttagactggtct

SEQ ID NO: 1911767 - DNA, 25 bp, Homo sapien
cagaaatataatcatttgccactac

SEQ ID NO: 1911768 - DNA, 25 bp, Homo sapien
gccactacaaccacttacatatctt

SEQ ID NO: 1911769 - DNA, 25 bp, Homo sapien
agtgtgcaccagtgtacctggcttt

SEQ ID NO: 1911770 - DNA, 25 bp, Homo sapien
tttaatgatgcactaaatatagtat

SEQ ID NO: 1911771 - DNA, 25 bp, Homo sapien
cttccacaacccataggatgcagaa

SEQ ID NO: 1911772 - DNA, 25 bp, Homo sapien
cctgacctcttgccagtggactatg

SEQ ID NO: 1911773 - DNA, 25 bp, Homo sapien
acctgacctcttgccagtggactat

SEQ ID NO: 1911774 - DNA, 25 bp, Homo sapien
ccaccacgccgagtcccaaagcaaa

SEQ ID NO: 1911775 - DNA, 25 bp, Homo sapien
tcttacaattccaatccctatgcct

SEQ ID NO: 1911776 - DNA, 25 bp, Homo sapien
ttcttcacatagaagtaaggtgggt

SEQ ID NO: 1911777 - DNA, 25 bp, Homo sapien
cagaagtccgatgtaatttttgctt

SEQ ID NO: 1911778 - DNA, 25 bp, Homo sapien
tgcttgcattgtttgtgaacagaag

SEQ ID NO: 1911779 - DNA, 25 bp, Homo sapien
tgagagacgggaaacaaacattgta

SEQ ID NO: 1911780 - DNA, 25 bp, Homo sapien
tacacattagacattggccagcata

SEQ ID NO: 1911781 - DNA, 25 bp, Homo sapien
gaggagttagagactcctcaagcaa

SEQ ID NO: 1911782 - DNA, 25 bp, Homo sapien
aacactttggagaggatttaatgct

SEQ ID NO: 1911783 - DNA, 25 bp, Homo sapien
gcaactgtaaactatatgttcaaga

SEQ ID NO: 1911784 - DNA, 25 bp, Homo sapien
tatatcagaaatgccggaattaaag

SEQ ID NO: 1911785 - DNA, 25 bp, Homo sapien
acacaaggtaaaatccaccatgcct

SEQ ID NO: 1911786 - DNA, 25 bp, Homo sapien
tagaaaccgtccaaaatgaagcaca

SEQ ID NO: 1911787 - DNA, 25 bp, Homo sapien
aggccaaggtccttaccttcatgaa

SEQ ID NO: 1911788 - DNA, 25 bp, Homo sapien
gagctactgtgctggacccaatttc

SEQ ID NO: 1911789 - DNA, 25 bp, Homo sapien
aaacaaagctgagtaaacaggccaa

SEQ ID NO: 1911790 - DNA, 25 bp, Homo sapien
gctggacccaatttcaaacacttaa

SEQ ID NO: 1911791 - DNA, 25 bp, Homo sapien
tgacgggttcagtcgtacttcaaac

SEQ ID NO: 1911792 - DNA, 25 bp, Homo sapien
ggttcagtcgtacttcaaacctcag

SEQ ID NO: 1911793 - DNA, 25 bp, Homo sapien
cctaggtgacgggttcagtcgtact

SEQ ID NO: 1911794 - DNA, 25 bp, Homo sapien
ttcagtcgtacttcaaacctcagca

SEQ ID NO: 1911795 - DNA, 25 bp, Homo sapien
gactgcccggtcaaaacgactgatg

SEQ ID NO: 1911796 - DNA, 25 bp, Homo sapien
tactccttggactgcccggtcaaaa

SEQ ID NO: 1911797 - DNA, 25 bp, Homo sapien
aaacgactgatgtcataataaaacc

SEQ ID NO: 1911798 - DNA, 25 bp, Homo sapien
ttatgatcctactccttggactgcc

SEQ ID NO: 1911799 - DNA, 25 bp, Homo sapien
caaataatatgatgacagtttaatt

SEQ ID NO: 1911800 - DNA, 25 bp, Homo sapien
tagtaccagaggaacttgaaaggtc

SEQ ID NO: 1911801 - DNA, 25 bp, Homo sapien
tcttaaagatacagcccaagtcatc

SEQ ID NO: 1911802 - DNA, 25 bp, Homo sapien
cactattagatacagtagggtctca

SEQ ID NO: 1911803 - DNA, 25 bp, Homo sapien
gctgaagagtcaagatccaagatcc

SEQ ID NO: 1911804 - DNA, 25 bp, Homo sapien
ggtgagcagcatccaatacaggtga

SEQ ID NO: 1911805 - DNA, 25 bp, Homo sapien
taggtggcatgttccttcggcaccg

SEQ ID NO: 1911806 - DNA, 25 bp, Homo sapien
tcggcaccgtgaatacaaactccag

SEQ ID NO: 1911807 - DNA, 25 bp, Homo sapien
tgaatacagatagtcaggcctggag

SEQ ID NO: 1911808 - DNA, 25 bp, Homo sapien
acaaaaggcagctgtacactgtggc

SEQ ID NO: 1911809 - DNA, 25 bp, Homo sapien
tcccacaaaaggcagctgtacactg

SEQ ID NO: 1911810 - DNA, 25 bp, Homo sapien
cctttcccacaaaaggcagctgtac

SEQ ID NO: 1911811 - DNA, 25 bp, Homo sapien
cacaaaaggcagctgtacactgtgg

SEQ ID NO: 1911812 - DNA, 25 bp, Homo sapien
catatttccttcacgaagtcttccc

SEQ ID NO: 1911813 - DNA, 25 bp, Homo sapien
acatgactaatccatatttccttca

SEQ ID NO: 1911814 - DNA, 25 bp, Homo sapien
aaattcctttaacatgactaatcca

SEQ ID NO: 1911815 - DNA, 25 bp, Homo sapien
cttgtagctgttcctctatctgaaa

SEQ ID NO: 1911816 - DNA, 25 bp, Homo sapien
tctcagcagggaagctctttgaaag

SEQ ID NO: 1911817 - DNA, 25 bp, Homo sapien
cattacatctccatagcgttcctga

SEQ ID NO: 1911818 - DNA, 25 bp, Homo sapien
gaacctgagttgttgatacacgcta

SEQ ID NO: 1911819 - DNA, 25 bp, Homo sapien
caactaagcaaaagtcgagatgtgg

SEQ ID NO: 1911820 - DNA, 25 bp, Homo sapien
tcaaaacacagaacaatcaaaagtc

SEQ ID NO: 1911821 - DNA, 25 bp, Homo sapien
aaatttcaccaacttaagacatggg

SEQ ID NO: 1911822 - DNA, 25 bp, Homo sapien
ttttgtacagactatgtcgcccagg

SEQ ID NO: 1911823 - DNA, 25 bp, Homo sapien
taaattactcaagatacgtcctcaa

SEQ ID NO: 1911824 - DNA, 25 bp, Homo sapien
gaactacatggcaaattcaatttga

SEQ ID NO: 1911825 - DNA, 25 bp, Homo sapien
taaggtgctggtaatctattgtggg

SEQ ID NO: 1911826 - DNA, 25 bp, Homo sapien
ctgacgtgctaataaaaatgctggc

SEQ ID NO: 1911827 - DNA, 25 bp, Homo sapien
ttttactaagtcagactggcctctc

SEQ ID NO: 1911828 - DNA, 25 bp, Homo sapien
catagggcaattcatagctagaggg

SEQ ID NO: 1911829 - DNA, 25 bp, Homo sapien
gagaacgtaccttctgtcacggctg

SEQ ID NO: 1911830 - DNA, 25 bp, Homo sapien
gacgctcaggcactaaactctaagg

SEQ ID NO: 1911831 - DNA, 25 bp, Homo sapien
gaacagggccatatcaacttcacta

SEQ ID NO: 1911832 - DNA, 25 bp, Homo sapien
gggagcgactgacaacaaggctgac

SEQ ID NO: 1911833 - DNA, 25 bp, Homo sapien
aggctgacacttccccgtttccaga

SEQ ID NO: 1911834 - DNA, 25 bp, Homo sapien
gactgacaacaaggctgacacttcc

SEQ ID NO: 1911835 - DNA, 25 bp, Homo sapien
gagaccatggggagcgactgacaac

SEQ ID NO: 1911836 - DNA, 25 bp, Homo sapien
tgtcacgcacgagagaaaaggcgag

SEQ ID NO: 1911837 - DNA, 25 bp, Homo sapien
tcgcgcggacccacatttttgcggc

SEQ ID NO: 1911838 - DNA, 25 bp, Homo sapien
acacgcagtctaaacacgcggcgct

SEQ ID NO: 1911839 - DNA, 25 bp, Homo sapien
tacgaacccgtccaccgatggacat

SEQ ID NO: 1911840 - DNA, 25 bp, Homo sapien
tgccggggtcgctccgaagactcgc

SEQ ID NO: 1911841 - DNA, 25 bp, Homo sapien
ccggggtcgctccgaagactcgcac

SEQ ID NO: 1911842 - DNA, 25 bp, Homo sapien
ctgccggggtcgctccgaagactcg

SEQ ID NO: 1911843 - DNA, 25 bp, Homo sapien
gccggggtcgctccgaagactcgca

SEQ ID NO: 1911844 - DNA, 25 bp, Homo sapien
cagcgggctggccatgtagtagtct

SEQ ID NO: 1911845 - DNA, 25 bp, Homo sapien
tagtctgcagtcactatccttactg

SEQ ID NO: 1911846 - DNA, 25 bp, Homo sapien
attggcaggtatccagcccctgcag

SEQ ID NO: 1911847 - DNA, 25 bp, Homo sapien
cgggctggccatgtagtagtctgca

SEQ ID NO: 1911848 - DNA, 25 bp, Homo sapien
ccgggaatcacacgggctcctcggt

SEQ ID NO: 1911849 - DNA, 25 bp, Homo sapien
agctttcgtcggtgctggtgctgcc

SEQ ID NO: 1911850 - DNA, 25 bp, Homo sapien
agagaagccctcgagctttcgtcgg

SEQ ID NO: 1911851 - DNA, 25 bp, Homo sapien
ccctcgagctttcgtcggtgctggt

SEQ ID NO: 1911852 - DNA, 25 bp, Homo sapien
catgatgatgatgtcacggacgcaa

SEQ ID NO: 1911853 - DNA, 25 bp, Homo sapien
ttgccatgatgatgatgtcacggac

SEQ ID NO: 1911854 - DNA, 25 bp, Homo sapien
cttgttgccatgatgatgatgtcac

SEQ ID NO: 1911855 - DNA, 25 bp, Homo sapien
gccatgatgatgatgtcacggacgc

SEQ ID NO: 1911856 - DNA, 25 bp, Homo sapien
gctgagacggtttttcacaaggtaa

SEQ ID NO: 1911857 - DNA, 25 bp, Homo sapien
tcgccgaccgccatttcacatccag

SEQ ID NO: 1911858 - DNA, 25 bp, Homo sapien
aggtaagaaaatccgcccgcgtgag

SEQ ID NO: 1911859 - DNA, 25 bp, Homo sapien
gggcagccgctgagacggtttttca

SEQ ID NO: 1911860 - DNA, 25 bp, Homo sapien
gttctgtcgtcgctctctccacttg

SEQ ID NO: 1911861 - DNA, 25 bp, Homo sapien
tatcagagcagtgtaaactctgcac

SEQ ID NO: 1911862 - DNA, 25 bp, Homo sapien
taaggcctcttgttccaacacaggg

SEQ ID NO: 1911863 - DNA, 25 bp, Homo sapien
tgtgtaatgccgttttaaaatgcaa

SEQ ID NO: 1911864 - DNA, 25 bp, Homo sapien
atatggttggtactgcagaaataat

SEQ ID NO: 1911865 - DNA, 25 bp, Homo sapien
tatatggttggtactgcagaaataa

SEQ ID NO: 1911866 - DNA, 25 bp, Homo sapien
ccagatatatggttggtactgcaga

SEQ ID NO: 1911867 - DNA, 25 bp, Homo sapien
accagatatatggttggtactgcag

SEQ ID NO: 1911868 - DNA, 25 bp, Homo sapien
ccgctttctgaggtagacagtgata

SEQ ID NO: 1911869 - DNA, 25 bp, Homo sapien
gatgaccaaatagtgtccgtctagc

SEQ ID NO: 1911870 - DNA, 25 bp, Homo sapien
ttctttgtgtaaaggtcagcctgtc

SEQ ID NO: 1911871 - DNA, 25 bp, Homo sapien
tcagcctgtcaggaaatagcatgct

SEQ ID NO: 1911872 - DNA, 25 bp, Homo sapien
gaatatgtgtgtttttacactttaa

SEQ ID NO: 1911873 - DNA, 25 bp, Homo sapien
tttgaatatgtgtgtttttacactt

SEQ ID NO: 1911874 - DNA, 25 bp, Homo sapien
cctttgaatatgtgtgtttttacac

SEQ ID NO: 1911875 - DNA, 25 bp, Homo sapien
acctttgaatatgtgtgtttttaca

SEQ ID NO: 1911876 - DNA, 25 bp, Homo sapien
gattaatctctaccttatgccaaag

SEQ ID NO: 1911877 - DNA, 25 bp, Homo sapien
catctaatactgttgggaagggaag

SEQ ID NO: 1911878 - DNA, 25 bp, Homo sapien
ccagaggttcttgccaagtctgcaa

SEQ ID NO: 1911879 - DNA, 25 bp, Homo sapien
cttaggaggctgcttacttctgcat

SEQ ID NO: 1911880 - DNA, 25 bp, Homo sapien
gatgatctttgatttagactcacca

SEQ ID NO: 1911881 - DNA, 25 bp, Homo sapien
tatgacgactgttgcctttactgtg

SEQ ID NO: 1911882 - DNA, 25 bp, Homo sapien
tcaccttgatgagtgcactgcatgg

SEQ ID NO: 1911883 - DNA, 25 bp, Homo sapien
caagctgccaggatttattaccctc

SEQ ID NO: 1911884 - DNA, 25 bp, Homo sapien
tggaggagaagagacgctccggttt

SEQ ID NO: 1911885 - DNA, 25 bp, Homo sapien
cttctaacaggtccgtcagctgcag

SEQ ID NO: 1911886 - DNA, 25 bp, Homo sapien
gagaagagacgctccggtttttaga

SEQ ID NO: 1911887 - DNA, 25 bp, Homo sapien
acaggtccgtcagctgcaggactgt

SEQ ID NO: 1911888 - DNA, 25 bp, Homo sapien
tcacctgtcttctgcgtcagtcatg

SEQ ID NO: 1911889 - DNA, 25 bp, Homo sapien
tgtcttctgcgtcagtcatgctggg

SEQ ID NO: 1911890 - DNA, 25 bp, Homo sapien
cctgtcttctgcgtcagtcatgctg

SEQ ID NO: 1911891 - DNA, 25 bp, Homo sapien
cacctgtcttctgcgtcagtcatgc

SEQ ID NO: 1911892 - DNA, 25 bp, Homo sapien
gaattctagggaataccaccactca

SEQ ID NO: 1911893 - DNA, 25 bp, Homo sapien
gagtcaagctctcctgtaataggta

SEQ ID NO: 1911894 - DNA, 25 bp, Homo sapien
taataggtatcttgtctgtgagggc

SEQ ID NO: 1911895 - DNA, 25 bp, Homo sapien
tctcagcaaaagtagcaggaactca

SEQ ID NO: 1911896 - DNA, 25 bp, Homo sapien
ttaatacttctagatctccgaattc

SEQ ID NO: 1911897 - DNA, 25 bp, Homo sapien
ttttctacgtcagtaacttcaaaga

SEQ ID NO: 1911898 - DNA, 25 bp, Homo sapien
tgtcaggtgatcctgcagaggagtc

SEQ ID NO: 1911899 - DNA, 25 bp, Homo sapien
acgtcagtaacttcaaagatagctg

SEQ ID NO: 1911900 - DNA, 25 bp, Homo sapien
ggaacttgttgaaaatacagactct

SEQ ID NO: 1911901 - DNA, 25 bp, Homo sapien
gggaacttgttgaaaatacagactc

SEQ ID NO: 1911902 - DNA, 25 bp, Homo sapien
tgaaatgttccgagctgtatccttg

SEQ ID NO: 1911903 - DNA, 25 bp, Homo sapien
gaatgaaatgttccgagctgtatcc

SEQ ID NO: 1911904 - DNA, 25 bp, Homo sapien
tgaatgaaatgttccgagctgtatc

SEQ ID NO: 1911905 - DNA, 25 bp, Homo sapien
atgaaatgttccgagctgtatcctt

SEQ ID NO: 1911906 - DNA, 25 bp, Homo sapien
tcttctgttcagtgccccacctggg

SEQ ID NO: 1911907 - DNA, 25 bp, Homo sapien
cttcctttcaaaatggcccgctgcc

SEQ ID NO: 1911908 - DNA, 25 bp, Homo sapien
tcatcctccgctcccagttgccctt

SEQ ID NO: 1911909 - DNA, 25 bp, Homo sapien
cccgctgccctcttctgttcagtgc

SEQ ID NO: 1911910 - DNA, 25 bp, Homo sapien
gtgagtgtatagatgctagcatcca

SEQ ID NO: 1911911 - DNA, 25 bp, Homo sapien
tagcatccatagcatataaatacac

SEQ ID NO: 1911912 - DNA, 25 bp, Homo sapien
ggtggtttgtgtgtatcagactgaa

SEQ ID NO: 1911913 - DNA, 25 bp, Homo sapien
tcagactgaatatgcaggtgtggtg

SEQ ID NO: 1911914 - DNA, 25 bp, Homo sapien
ttcagagggagtccctcaagagttc

SEQ ID NO: 1911915 - DNA, 25 bp, Homo sapien
ccagctgctttttgcatgccgattt

SEQ ID NO: 1911916 - DNA, 25 bp, Homo sapien
tgcatgccgatttttcagagggagt

SEQ ID NO: 1911917 - DNA, 25 bp, Homo sapien
ttttcagagggagtccctcaagagt

SEQ ID NO: 1911918 - DNA, 25 bp, Homo sapien
tgtagggatacaatgggtttccttg

SEQ ID NO: 1911919 - DNA, 25 bp, Homo sapien
tcctctgtagggatacaatgggttt

SEQ ID NO: 1911920 - DNA, 25 bp, Homo sapien
ctctgtagggatacaatgggtttcc

SEQ ID NO: 1911921 - DNA, 25 bp, Homo sapien
tagggatacaatgggtttccttgta

SEQ ID NO: 1911922 - DNA, 25 bp, Homo sapien
tccttagtcgcctttagtctgaaac

SEQ ID NO: 1911923 - DNA, 25 bp, Homo sapien
gagacattcccctacataactgcag

SEQ ID NO: 1911924 - DNA, 25 bp, Homo sapien
tgcgatctaatcttcataccccagt

SEQ ID NO: 1911925 - DNA, 25 bp, Homo sapien
tacagttctcgtaatgatactccct

SEQ ID NO: 1911926 - DNA, 25 bp, Homo sapien
aggtaatagtcaaagtccccataat

SEQ ID NO: 1911927 - DNA, 25 bp, Homo sapien
ggtaatagtcaaagtccccataatc

SEQ ID NO: 1911928 - DNA, 25 bp, Homo sapien
cacaggctgctgcttgacgcgcagc

SEQ ID NO: 1911929 - DNA, 25 bp, Homo sapien
agcacaggctgctgcttgacgcgca

SEQ ID NO: 1911930 - DNA, 25 bp, Homo sapien
caggctgctgcttgacgcgcagccc

SEQ ID NO: 1911931 - DNA, 25 bp, Homo sapien
ttagtgctgccgagcacaggctgct

SEQ ID NO: 1911932 - DNA, 25 bp, Homo sapien
gaatttctccgcaggtcattggttt

SEQ ID NO: 1911933 - DNA, 25 bp, Homo sapien
tggagaatttctccgcaggtcattg

SEQ ID NO: 1911934 - DNA, 25 bp, Homo sapien
ggtcattggttttaccacagtcttg

SEQ ID NO: 1911935 - DNA, 25 bp, Homo sapien
tctccgcaggtcattggttttacca

SEQ ID NO: 1911936 - DNA, 25 bp, Homo sapien
atggagaacgggcatcttattttga

SEQ ID NO: 1911937 - DNA, 25 bp, Homo sapien
ggagaacgggcatcttattttgaaa

SEQ ID NO: 1911938 - DNA, 25 bp, Homo sapien
tctaggagcccatggagaacgggca

SEQ ID NO: 1911939 - DNA, 25 bp, Homo sapien
taggagcccatggagaacgggcatc

SEQ ID NO: 1911940 - DNA, 25 bp, Homo sapien
gaggctggcagccaagtctagcgcc

SEQ ID NO: 1911941 - DNA, 25 bp, Homo sapien
caagtctagcgccagccttttcaaa

SEQ ID NO: 1911942 - DNA, 25 bp, Homo sapien
ccagctgctgctcgacgatgaggct

SEQ ID NO: 1911943 - DNA, 25 bp, Homo sapien
aaagcagcccttttgataacactga

SEQ ID NO: 1911944 - DNA, 25 bp, Homo sapien
ggttaattgagcaacagccaacttc

SEQ ID NO: 1911945 - DNA, 25 bp, Homo sapien
ccttgggttaattgagcaacagcca

SEQ ID NO: 1911946 - DNA, 25 bp, Homo sapien
gagccttgggttaattgagcaacag

SEQ ID NO: 1911947 - DNA, 25 bp, Homo sapien
cggagccttgggttaattgagcaac

SEQ ID NO: 1911948 - DNA, 25 bp, Homo sapien
gcaaactcgttatacttcaaggcca

SEQ ID NO: 1911949 - DNA, 25 bp, Homo sapien
tcggtgccggggaggctcatttcca

SEQ ID NO: 1911950 - DNA, 25 bp, Homo sapien
ccggggaggctcatttccatcagtt

SEQ ID NO: 1911951 - DNA, 25 bp, Homo sapien
ttgccatggcaaactcgttatactt

SEQ ID NO: 1911952 - DNA, 25 bp, Homo sapien
ttttctaacaactccaacacaatga

SEQ ID NO: 1911953 - DNA, 25 bp, Homo sapien
gatctggtccttgtcctaccttttc

SEQ ID NO: 1911954 - DNA, 25 bp, Homo sapien
caatgacatggaagcctgcgacagc

SEQ ID NO: 1911955 - DNA, 25 bp, Homo sapien
cctgcgacagcataattgatttctc

SEQ ID NO: 1911956 - DNA, 25 bp, Homo sapien
cccctcaaatcggtgtaagtctgaa

SEQ ID NO: 1911957 - DNA, 25 bp, Homo sapien
cctgaggaccagcataacatctaaa

SEQ ID NO: 1911958 - DNA, 25 bp, Homo sapien
gtagccatgtactgagacctctttg

SEQ ID NO: 1911959 - DNA, 25 bp, Homo sapien
atctaaagatgaatgcctgaggacc

SEQ ID NO: 1911960 - DNA, 25 bp, Homo sapien
taccagctgtaacactttaatgact

SEQ ID NO: 1911961 - DNA, 25 bp, Homo sapien
aacaccagggaccactgctcatcaa

SEQ ID NO: 1911962 - DNA, 25 bp, Homo sapien
aatgactctttgtggaacaccaggg

SEQ ID NO: 1911963 - DNA, 25 bp, Homo sapien
acactttaatgactctttgtggaac

SEQ ID NO: 1911964 - DNA, 25 bp, Homo sapien
aaacggtggactgtcttgtagcaca

SEQ ID NO: 1911965 - DNA, 25 bp, Homo sapien
cctgtgctacatataagagctggac

SEQ ID NO: 1911966 - DNA, 25 bp, Homo sapien
tgagtccctggaatctaagaaaagt

SEQ ID NO: 1911967 - DNA, 25 bp, Homo sapien
ttctaccaggtctcaaaactacgga

SEQ ID NO: 1911968 - DNA, 25 bp, Homo sapien
tctacttgctaagcactgagaggcc

SEQ ID NO: 1911969 - DNA, 25 bp, Homo sapien
cagaatgctgtcagaacaaggcccc

SEQ ID NO: 1911970 - DNA, 25 bp, Homo sapien
aaaaaccagccaggagtgctaccga

SEQ ID NO: 1911971 - DNA, 25 bp, Homo sapien
ggaacatatgggacactggcacctg

SEQ ID NO: 1911972 - DNA, 25 bp, Homo sapien
ccagctgtagacatgagtgttctga

SEQ ID NO: 1911973 - DNA, 25 bp, Homo sapien
gccagctgtagacatgagtgttctg

SEQ ID NO: 1911974 - DNA, 25 bp, Homo sapien
cagctgtagacatgagtgttctgaa

SEQ ID NO: 1911975 - DNA, 25 bp, Homo sapien
gactacctaccctttgcatttcaac

SEQ ID NO: 1911976 - DNA, 25 bp, Homo sapien
ttcagaagaagtatgccagggccgt

SEQ ID NO: 1911977 - DNA, 25 bp, Homo sapien
cagcattttctgtcagtctcccaga

SEQ ID NO: 1911978 - DNA, 25 bp, Homo sapien
taaaaaccacatgtgcacagcattt

SEQ ID NO: 1911979 - DNA, 25 bp, Homo sapien
gatgcccaaatgaaaaggacgcagg

SEQ ID NO: 1911980 - DNA, 25 bp, Homo sapien
tagggactataggacgggacttctc

SEQ ID NO: 1911981 - DNA, 25 bp, Homo sapien
catactgagtactgaggatgcccaa

SEQ ID NO: 1911982 - DNA, 25 bp, Homo sapien
tgtatcggatagtgccctgtaggcc

SEQ ID NO: 1911983 - DNA, 25 bp, Homo sapien
agagcacagggatgaatctgaaatt

SEQ ID NO: 1911984 - DNA, 25 bp, Homo sapien
aagagcacagggatgaatctgaaat

SEQ ID NO: 1911985 - DNA, 25 bp, Homo sapien
gaagagcacagggatgaatctgaaa

SEQ ID NO: 1911986 - DNA, 25 bp, Homo sapien
gggaagagcacagggatgaatctga

SEQ ID NO: 1911987 - DNA, 25 bp, Homo sapien
tcgtccagctgcgactcagcgcctt

SEQ ID NO: 1911988 - DNA, 25 bp, Homo sapien
agcgccttccacgtcctgtttgtat

SEQ ID NO: 1911989 - DNA, 25 bp, Homo sapien
cgccttccacgtcctgtttgtattt

SEQ ID NO: 1911990 - DNA, 25 bp, Homo sapien
tcatcctcgtccagctgcgactcag

SEQ ID NO: 1911991 - DNA, 25 bp, Homo sapien
aacatcaggctgcagacaaaaggaa

SEQ ID NO: 1911992 - DNA, 25 bp, Homo sapien
ccttcagcacaaagcaaacatcagg

SEQ ID NO: 1911993 - DNA, 25 bp, Homo sapien
cagcacaaagcaaacatcaggctgc

SEQ ID NO: 1911994 - DNA, 25 bp, Homo sapien
aaacatcaggctgcagacaaaagga

SEQ ID NO: 1911995 - DNA, 25 bp, Homo sapien
agcctgctgagactcccgtccccca

SEQ ID NO: 1911996 - DNA, 25 bp, Homo sapien
gcctgctgagactcccgtcccccac

SEQ ID NO: 1911997 - DNA, 25 bp, Homo sapien
cccagcctgctgagactcccgtccc

SEQ ID NO: 1911998 - DNA, 25 bp, Homo sapien
ccagcctgctgagactcccgtcccc

SEQ ID NO: 1911999 - DNA, 25 bp, Homo sapien
cctccaaaagaagcagccgacacgg

SEQ ID NO: 1912000 - DNA, 25 bp, Homo sapien
tccaaaagaagcagccgacacggac

SEQ ID NO: 1912001 - DNA, 25 bp, Homo sapien
ggctccctccaaaagaagcagccga

SEQ ID NO: 1912002 - DNA, 25 bp, Homo sapien
tccctccaaaagaagcagccgacac

SEQ ID NO: 1912003 - DNA, 25 bp, Homo sapien
tcaatttcgatcttgttaaagcaca

SEQ ID NO: 1912004 - DNA, 25 bp, Homo sapien
taaagcacaacgtgtcccagtggcc

SEQ ID NO: 1912005 - DNA, 25 bp, Homo sapien
aacgtgtcccagtggccggtataga

SEQ ID NO: 1912006 - DNA, 25 bp, Homo sapien
acgctggcagcaatcaatttcgatc

SEQ ID NO: 1912007 - DNA, 25 bp, Homo sapien
gagaacaaatcacggggctgcacgt

SEQ ID NO: 1912008 - DNA, 25 bp, Homo sapien
agtggagaacaaatcacggggctgc

SEQ ID NO: 1912009 - DNA, 25 bp, Homo sapien
ctgtcagtggagaacaaatcacggg

SEQ ID NO: 1912010 - DNA, 25 bp, Homo sapien
tggagaacaaatcacggggctgcac

SEQ ID NO: 1912011 - DNA, 25 bp, Homo sapien
gaggctgcctaggaaacctcttcag

SEQ ID NO: 1912012 - DNA, 25 bp, Homo sapien
tggtgtgctgtgcagcctgcgaggc

SEQ ID NO: 1912013 - DNA, 25 bp, Homo sapien
cagcctgcgaggctgcctaggaaac

SEQ ID NO: 1912014 - DNA, 25 bp, Homo sapien
cctaggaaacctcttcagcccaatt

SEQ ID NO: 1912015 - DNA, 25 bp, Homo sapien
tttccaagtctttgcacggcttcca

SEQ ID NO: 1912016 - DNA, 25 bp, Homo sapien
tggtttgaccgttatttcctgcctg

SEQ ID NO: 1912017 - DNA, 25 bp, Homo sapien
tgcacggcttccaacaagggaggct

SEQ ID NO: 1912018 - DNA, 25 bp, Homo sapien
gtccaagagggcgactccgtccttc

SEQ ID NO: 1912019 - DNA, 25 bp, Homo sapien
ggtagcgctccatccatttaatgat

SEQ ID NO: 1912020 - DNA, 25 bp, Homo sapien
catttaatgatatcaatgcctcgga

SEQ ID NO: 1912021 - DNA, 25 bp, Homo sapien
atccctaaggtagcgctccatccat

SEQ ID NO: 1912022 - DNA, 25 bp, Homo sapien
tcaatgcctcggattctatcctcaa

SEQ ID NO: 1912023 - DNA, 25 bp, Homo sapien
caattactgaaacggtagggaagag

SEQ ID NO: 1912024 - DNA, 25 bp, Homo sapien
gattgtatgaaacttggagcagagc

SEQ ID NO: 1912025 - DNA, 25 bp, Homo sapien
ctcttaggccttgaaaagactgata

SEQ ID NO: 1912026 - DNA, 25 bp, Homo sapien
aagtcagaagtagaactcttaggcc

SEQ ID NO: 1912027 - DNA, 25 bp, Homo sapien
gcacgtgtgtgtttacgagatgctc

SEQ ID NO: 1912028 - DNA, 25 bp, Homo sapien
tcagctgcactgctcccagattact

SEQ ID NO: 1912029 - DNA, 25 bp, Homo sapien
atgatccagcctcgccatccatgat

SEQ ID NO: 1912030 - DNA, 25 bp, Homo sapien
tatatactggaatgggtgactcagg

SEQ ID NO: 1912031 - DNA, 25 bp, Homo sapien
gccagtatcacccatccagaagcat

SEQ ID NO: 1912032 - DNA, 25 bp, Homo sapien
ttctggagccaagatcacagtgggc

SEQ ID NO: 1912033 - DNA, 25 bp, Homo sapien
gggtcactcaaacagcatacaggaa

SEQ ID NO: 1912034 - DNA, 25 bp, Homo sapien
cactgcgtcaaggtatgaaaatggc

SEQ ID NO: 1912035 - DNA, 25 bp, Homo sapien
aagttcacgaatttcaccacctcca

SEQ ID NO: 1912036 - DNA, 25 bp, Homo sapien
atcgaataagtgataaagactttcc

SEQ ID NO: 1912037 - DNA, 25 bp, Homo sapien
tgtgtccatcgaataagtgataaag

SEQ ID NO: 1912038 - DNA, 25 bp, Homo sapien
tgtccatcgaataagtgataaagac

SEQ ID NO: 1912039 - DNA, 25 bp, Homo sapien
agctgtgtccatcgaataagtgata

SEQ ID NO: 1912040 - DNA, 25 bp, Homo sapien
ttttgcagaaaggccagcaagtttg

SEQ ID NO: 1912041 - DNA, 25 bp, Homo sapien
ccctgggtcagcttagagcagcaga

SEQ ID NO: 1912042 - DNA, 25 bp, Homo sapien
gtttggagtagaccaaagcacagct

SEQ ID NO: 1912043 - DNA, 25 bp, Homo sapien
gcacagctcagatatgttagtaaaa

SEQ ID NO: 1912044 - DNA, 25 bp, Homo sapien
tcctctggctggagggttgctaggg

SEQ ID NO: 1912045 - DNA, 25 bp, Homo sapien
acagcagctggggacggaggctggg

SEQ ID NO: 1912046 - DNA, 25 bp, Homo sapien
gacggaggctggggaacctgtggtc

SEQ ID NO: 1912047 - DNA, 25 bp, Homo sapien
gaggctggggaacctgtggtctcag

SEQ ID NO: 1912048 - DNA, 25 bp, Homo sapien
cggaggctggggaacctgtggtctc

SEQ ID NO: 1912049 - DNA, 25 bp, Homo sapien
agggcactccaaggactccccagga

SEQ ID NO: 1912050 - DNA, 25 bp, Homo sapien
gagcaccagctctattaggtggctg

SEQ ID NO: 1912051 - DNA, 25 bp, Homo sapien
ccaggagcaccagctctattaggtg

SEQ ID NO: 1912052 - DNA, 25 bp, Homo sapien
gctctattaggtggctggtgatgtg

SEQ ID NO: 1912053 - DNA, 25 bp, Homo sapien
ccaggggctgggataattcaggata

SEQ ID NO: 1912054 - DNA, 25 bp, Homo sapien
ttggaagccccggaaaggagcagtc

SEQ ID NO: 1912055 - DNA, 25 bp, Homo sapien
aaaggagcagtctctctgtgcgggc

SEQ ID NO: 1912056 - DNA, 25 bp, Homo sapien
gtgcgggcctctcttcgtggtccca

SEQ ID NO: 1912057 - DNA, 25 bp, Homo sapien
ctggtaggctgctcgagggtagtca

SEQ ID NO: 1912058 - DNA, 25 bp, Homo sapien
ttgctggtaggctgctcgagggtag

SEQ ID NO: 1912059 - DNA, 25 bp, Homo sapien
gctgctcgagggtagtcatggccat

SEQ ID NO: 1912060 - DNA, 25 bp, Homo sapien
taggctgctcgagggtagtcatggc

SEQ ID NO: 1912061 - DNA, 25 bp, Homo sapien
ctacagttccatcaagagagttaat

SEQ ID NO: 1912062 - DNA, 25 bp, Homo sapien
tacagttccatcaagagagttaatt

SEQ ID NO: 1912063 - DNA, 25 bp, Homo sapien
caaccttcgtgggactcattgctgc

SEQ ID NO: 1912064 - DNA, 25 bp, Homo sapien
taaaatctgtgccagtgagtgggat

SEQ ID NO: 1912065 - DNA, 25 bp, Homo sapien
tgcagaactgggctacaggatgctt

SEQ ID NO: 1912066 - DNA, 25 bp, Homo sapien
tcttctctgtggttagatgggagcc

SEQ ID NO: 1912067 - DNA, 25 bp, Homo sapien
agaaaaatatcaggcctcacagccc

SEQ ID NO: 1912068 - DNA, 25 bp, Homo sapien
tattttaaagctgcgcatcaggcct

SEQ ID NO: 1912069 - DNA, 25 bp, Homo sapien
tccagtggcctcagcggagatttaa

SEQ ID NO: 1912070 - DNA, 25 bp, Homo sapien
taacatcaagaatggtagtaggaaa

SEQ ID NO: 1912071 - DNA, 25 bp, Homo sapien
tggcaaacgcatggagatgtgaacc

SEQ ID NO: 1912072 - DNA, 25 bp, Homo sapien
aagagagagaagagcctggcaaacg

SEQ ID NO: 1912073 - DNA, 25 bp, Homo sapien
tattgaaactgggtcaaacacacca

SEQ ID NO: 1912074 - DNA, 25 bp, Homo sapien
gatgtgaaccatcgcgacaagtagg

SEQ ID NO: 1912075 - DNA, 25 bp, Homo sapien
cacatggaaagcccctaagagaagc

SEQ ID NO: 1912076 - DNA, 25 bp, Homo sapien
agaagcagaatgccctccctgcatt

SEQ ID NO: 1912077 - DNA, 25 bp, Homo sapien
tagagaaggagactccaagtgggac

SEQ ID NO: 1912078 - DNA, 25 bp, Homo sapien
tgggacaggctttaggctaagaaaa

SEQ ID NO: 1912079 - DNA, 25 bp, Homo sapien
ccaggacaatggtaatgatagttcc

SEQ ID NO: 1912080 - DNA, 25 bp, Homo sapien
gatcgggacttccaggacaatggta

SEQ ID NO: 1912081 - DNA, 25 bp, Homo sapien
atggcacctggtgatcgggacttcc

SEQ ID NO: 1912082 - DNA, 25 bp, Homo sapien
ggtaatgatagttccatggagcatg

SEQ ID NO: 1912083 - DNA, 25 bp, Homo sapien
ctctgaggttcaaactgagggaact

SEQ ID NO: 1912084 - DNA, 25 bp, Homo sapien
agggaactccctggacctgagaggt

SEQ ID NO: 1912085 - DNA, 25 bp, Homo sapien
tgaggttcaaactgagggaactccc

SEQ ID NO: 1912086 - DNA, 25 bp, Homo sapien
gggaactccctggacctgagaggtc

SEQ ID NO: 1912087 - DNA, 25 bp, Homo sapien
gggctgggaatcatatcccgtgtct

SEQ ID NO: 1912088 - DNA, 25 bp, Homo sapien
ccgtgtctatggttggcagatccag

SEQ ID NO: 1912089 - DNA, 25 bp, Homo sapien
aggcctgctcggttcctgtgaggct

SEQ ID NO: 1912090 - DNA, 25 bp, Homo sapien
gcagatccaggcctgctcggttcct

SEQ ID NO: 1912091 - DNA, 25 bp, Homo sapien
tacaggccgctggtgatttgcaagt

SEQ ID NO: 1912092 - DNA, 25 bp, Homo sapien
cccaaggagtctgctgaggcattag

SEQ ID NO: 1912093 - DNA, 25 bp, Homo sapien
tcaacctccacaggaatgcttcggt

SEQ ID NO: 1912094 - DNA, 25 bp, Homo sapien
tccagaacttgagtgcgcaggcagg

SEQ ID NO: 1912095 - DNA, 25 bp, Homo sapien
tgcctctgcagagctccacctagaa

SEQ ID NO: 1912096 - DNA, 25 bp, Homo sapien
tgcagaataaaggtgatgccatcag

SEQ ID NO: 1912097 - DNA, 25 bp, Homo sapien
gccatcagccagtgtaatgggagca

SEQ ID NO: 1912098 - DNA, 25 bp, Homo sapien
cagccagtgtaatgggagcatctgc

SEQ ID NO: 1912099 - DNA, 25 bp, Homo sapien
cagtctctaccagagggcggtgcct

SEQ ID NO: 1912100 - DNA, 25 bp, Homo sapien
taactctggcatgacctttgctcca

SEQ ID NO: 1912101 - DNA, 25 bp, Homo sapien
aggagacctgccaactaggaccctg

SEQ ID NO: 1912102 - DNA, 25 bp, Homo sapien
gttttccagccatgacccagggagc

SEQ ID NO: 1912103 - DNA, 25 bp, Homo sapien
cagatcctgtgcacttaaccgcttg

SEQ ID NO: 1912104 - DNA, 25 bp, Homo sapien
tataagcggtttggcaccagatcct

SEQ ID NO: 1912105 - DNA, 25 bp, Homo sapien
aacttttccgaggtcacatggctat

SEQ ID NO: 1912106 - DNA, 25 bp, Homo sapien
gaatggtgactacgtgggaaatgct

SEQ ID NO: 1912107 - DNA, 25 bp, Homo sapien
cacgccatcacaagaggatacagat

SEQ ID NO: 1912108 - DNA, 25 bp, Homo sapien
ccttcacgccatcacaagaggatac

SEQ ID NO: 1912109 - DNA, 25 bp, Homo sapien
tggctttccttcacgccatcacaag

SEQ ID NO: 1912110 - DNA, 25 bp, Homo sapien
ccatcacaagaggatacagatgagg

SEQ ID NO: 1912111 - DNA, 25 bp, Homo sapien
agaagttcttccactgggcttgcca

SEQ ID NO: 1912112 - DNA, 25 bp, Homo sapien
tacagagaagttcttccactgggct

SEQ ID NO: 1912113 - DNA, 25 bp, Homo sapien
ttcccatacagagaagttcttccac

SEQ ID NO: 1912114 - DNA, 25 bp, Homo sapien
catacagagaagttcttccactggg

SEQ ID NO: 1912115 - DNA, 25 bp, Homo sapien
cccaaaggctccgtccagcgccagg

SEQ ID NO: 1912116 - DNA, 25 bp, Homo sapien
agtcacaagaagcttgattagcttc

SEQ ID NO: 1912117 - DNA, 25 bp, Homo sapien
caagaagcttgattagcttctaaga

SEQ ID NO: 1912118 - DNA, 25 bp, Homo sapien
gaaagtcacaagaagcttgattagc

SEQ ID NO: 1912119 - DNA, 25 bp, Homo sapien
tcctggcccaaaaatgtgctgttga

SEQ ID NO: 1912120 - DNA, 25 bp, Homo sapien
ttcctggcccaaaaatgtgctgttg

SEQ ID NO: 1912121 - DNA, 25 bp, Homo sapien
cctggcccaaaaatgtgctgttgat

SEQ ID NO: 1912122 - DNA, 25 bp, Homo sapien
tggcccaaaaatgtgctgttgattt

SEQ ID NO: 1912123 - DNA, 25 bp, Homo sapien
tctccgggcccaggtaagtagaaga

SEQ ID NO: 1912124 - DNA, 25 bp, Homo sapien
cgggcccaggtaagtagaagaacag

SEQ ID NO: 1912125 - DNA, 25 bp, Homo sapien
gtagtcggctctcggcggcttctcg

SEQ ID NO: 1912126 - DNA, 25 bp, Homo sapien
cttagatccaccacggacagacaga

SEQ ID NO: 1912127 - DNA, 25 bp, Homo sapien
tatgcaaatttctacggagcctagg

SEQ ID NO: 1912128 - DNA, 25 bp, Homo sapien
tccctgtgggcagtgaatcaacggc

SEQ ID NO: 1912129 - DNA, 25 bp, Homo sapien
aagagggagtcgagcttcttccacc

SEQ ID NO: 1912130 - DNA, 25 bp, Homo sapien
agaacctcagtgtagtcgcagtgcc

SEQ ID NO: 1912131 - DNA, 25 bp, Homo sapien
ctgtggtccggttggtaccaggata

SEQ ID NO: 1912132 - DNA, 25 bp, Homo sapien
gcattttctgtggtccggttggtac

SEQ ID NO: 1912133 - DNA, 25 bp, Homo sapien
ttctgtggtccggttggtaccagga

SEQ ID NO: 1912134 - DNA, 25 bp, Homo sapien
aatagcattttctgtggtccggttg

SEQ ID NO: 1912135 - DNA, 25 bp, Homo sapien
gcaaagaagaatggcaaggggagga

SEQ ID NO: 1912136 - DNA, 25 bp, Homo sapien
gaacggaaaagcaaagaagaatggc

SEQ ID NO: 1912137 - DNA, 25 bp, Homo sapien
aacggaaaagcaaagaagaatggca

SEQ ID NO: 1912138 - DNA, 25 bp, Homo sapien
aaaagcaaagaagaatggcaagggg

SEQ ID NO: 1912139 - DNA, 25 bp, Homo sapien
aggggagcaggaatggaaatatttt

SEQ ID NO: 1912140 - DNA, 25 bp, Homo sapien
gggagcaggaatggaaatatttttc

SEQ ID NO: 1912141 - DNA, 25 bp, Homo sapien
ctagcagggagagcgaggggagcag

SEQ ID NO: 1912142 - DNA, 25 bp, Homo sapien
gcgaggggagcaggaatggaaatat

SEQ ID NO: 1912143 - DNA, 25 bp, Homo sapien
acaaatggagacctcaaccctcacc

SEQ ID NO: 1912144 - DNA, 25 bp, Homo sapien
aaatggagacctcaaccctcacctt

SEQ ID NO: 1912145 - DNA, 25 bp, Homo sapien
tggagacctcaaccctcaccttctc

SEQ ID NO: 1912146 - DNA, 25 bp, Homo sapien
gcacaaatggagacctcaaccctca

SEQ ID NO: 1912147 - DNA, 25 bp, Homo sapien
agtcttctgtttcatgggccatgtg

SEQ ID NO: 1912148 - DNA, 25 bp, Homo sapien
tgtgttctgccagaacttgtctcag

SEQ ID NO: 1912149 - DNA, 25 bp, Homo sapien
cacagtcttctgtttcatgggccat

SEQ ID NO: 1912150 - DNA, 25 bp, Homo sapien
tgtttcatgggccatgtgttctgcc

SEQ ID NO: 1912151 - DNA, 25 bp, Homo sapien
tcaggcaacacccttccgtgtacat

SEQ ID NO: 1912152 - DNA, 25 bp, Homo sapien
ttcaggcaacacccttccgtgtaca

SEQ ID NO: 1912153 - DNA, 25 bp, Homo sapien
cttcaggcaacacccttccgtgtac

SEQ ID NO: 1912154 - DNA, 25 bp, Homo sapien
tcagccagtagctaaaacccatgag

SEQ ID NO: 1912155 - DNA, 25 bp, Homo sapien
gccagtagctaaaacccatgaggga

SEQ ID NO: 1912156 - DNA, 25 bp, Homo sapien
cagtagctaaaacccatgagggaca

SEQ ID NO: 1912157 - DNA, 25 bp, Homo sapien
agccagtagctaaaacccatgaggg

SEQ ID NO: 1912158 - DNA, 25 bp, Homo sapien
tgcagcttctggctggctattagct

SEQ ID NO: 1912159 - DNA, 25 bp, Homo sapien
cagcttctggctggctattagctac

SEQ ID NO: 1912160 - DNA, 25 bp, Homo sapien
ttgcagcttctggctggctattagc

SEQ ID NO: 1912161 - DNA, 25 bp, Homo sapien
gcagcttctggctggctattagcta

SEQ ID NO: 1912162 - DNA, 25 bp, Homo sapien
gcgggtaactttcgcttctctggga

SEQ ID NO: 1912163 - DNA, 25 bp, Homo sapien
taactttcgcttctctgggaatgga

SEQ ID NO: 1912164 - DNA, 25 bp, Homo sapien
ctggcagagcgggtaactttcgctt

SEQ ID NO: 1912165 - DNA, 25 bp, Homo sapien
gcagagcgggtaactttcgcttctc

SEQ ID NO: 1912166 - DNA, 25 bp, Homo sapien
ccctgttgtatcagcgacttgcttt

SEQ ID NO: 1912167 - DNA, 25 bp, Homo sapien
ctttctcagcagttgagtcatgcca

SEQ ID NO: 1912168 - DNA, 25 bp, Homo sapien
tgtgacaggagtcaggtccccagat

SEQ ID NO: 1912169 - DNA, 25 bp, Homo sapien
cagatccccagtccagtttcatggc

SEQ ID NO: 1912170 - DNA, 25 bp, Homo sapien
tgcctggttggcttctccaacagct

SEQ ID NO: 1912171 - DNA, 25 bp, Homo sapien
ttctccaacagctgaaggccccatg

SEQ ID NO: 1912172 - DNA, 25 bp, Homo sapien
ccaacagctgaaggccccatgctga

SEQ ID NO: 1912173 - DNA, 25 bp, Homo sapien
ctgcctggttggcttctccaacagc

SEQ ID NO: 1912174 - DNA, 25 bp, Homo sapien
ggaggatctgcacccgtgccctgga

SEQ ID NO: 1912175 - DNA, 25 bp, Homo sapien
gaggaggatctgcacccgtgccctg

SEQ ID NO: 1912176 - DNA, 25 bp, Homo sapien
aggaggatctgcacccgtgccctgg

SEQ ID NO: 1912177 - DNA, 25 bp, Homo sapien
agatggttgacagggatgcccagaa

SEQ ID NO: 1912178 - DNA, 25 bp, Homo sapien
cagactgtgagatggttgacaggga

SEQ ID NO: 1912179 - DNA, 25 bp, Homo sapien
gggcagactgtgagatggttgacag

SEQ ID NO: 1912180 - DNA, 25 bp, Homo sapien
tgagatggttgacagggatgcccag

SEQ ID NO: 1912181 - DNA, 25 bp, Homo sapien
tccaattgtcatgtttaagaactaa

SEQ ID NO: 1912182 - DNA, 25 bp, Homo sapien
aacatccaattgtcatgtttaagaa

SEQ ID NO: 1912183 - DNA, 25 bp, Homo sapien
catatgcataaacatccaattgtca

SEQ ID NO: 1912184 - DNA, 25 bp, Homo sapien
tatgcataaacatccaattgtcatg

SEQ ID NO: 1912185 - DNA, 25 bp, Homo sapien
tgtgctgtgagttcggactgagctt

SEQ ID NO: 1912186 - DNA, 25 bp, Homo sapien
catgtgctgtgagttcggactgagc

SEQ ID NO: 1912187 - DNA, 25 bp, Homo sapien
cctcatgtgctgtgagttcggactg

SEQ ID NO: 1912188 - DNA, 25 bp, Homo sapien
ctgtgagttcggactgagcttgtca

SEQ ID NO: 1912189 - DNA, 25 bp, Homo sapien
tattccactggagaactcctggaca

SEQ ID NO: 1912190 - DNA, 25 bp, Homo sapien
catgagaaagtttagcgggttgcca

SEQ ID NO: 1912191 - DNA, 25 bp, Homo sapien
taatttaaggttggtacaaacagca

SEQ ID NO: 1912192 - DNA, 25 bp, Homo sapien
gaaagtcattcgttagcagtacagg

SEQ ID NO: 1912193 - DNA, 25 bp, Homo sapien
taacaccggtgctttgatgctgact

SEQ ID NO: 1912194 - DNA, 25 bp, Homo sapien
gaacaaatcgcagtaagttgaagca

SEQ ID NO: 1912195 - DNA, 25 bp, Homo sapien
ccagttctcttggtagtatcagcca

SEQ ID NO: 1912196 - DNA, 25 bp, Homo sapien
gctgacttgcagtaaaatcctccct

SEQ ID NO: 1912197 - DNA, 25 bp, Homo sapien
aagtctgagaaataacaaggttctg

SEQ ID NO: 1912198 - DNA, 25 bp, Homo sapien
catcgatacaatgcattttccaaag

SEQ ID NO: 1912199 - DNA, 25 bp, Homo sapien
tctgagaaataacaaggttctgtct

SEQ ID NO: 1912200 - DNA, 25 bp, Homo sapien
gtttggccttttacataacatcgat

SEQ ID NO: 1912201 - DNA, 25 bp, Homo sapien
gaagttcgtcagcttcagagtcaca

SEQ ID NO: 1912202 - DNA, 25 bp, Homo sapien
caagtgtcattaatgagggccatgg

SEQ ID NO: 1912203 - DNA, 25 bp, Homo sapien
gggacaagtgtcattaatgagggcc

SEQ ID NO: 1912204 - DNA, 25 bp, Homo sapien
tgcaatctgatcctgggcggttccg

SEQ ID NO: 1912205 - DNA, 25 bp, Homo sapien
gacaaggcctctctccgcagacccg

SEQ ID NO: 1912206 - DNA, 25 bp, Homo sapien
gggcagcctctgggacaaggcctct

SEQ ID NO: 1912207 - DNA, 25 bp, Homo sapien
caaggcctctctccgcagacccggg

SEQ ID NO: 1912208 - DNA, 25 bp, Homo sapien
gcagcctctgggacaaggcctctct

SEQ ID NO: 1912209 - DNA, 25 bp, Homo sapien
caggaagctctgcaagtactcaaaa

SEQ ID NO: 1912210 - DNA, 25 bp, Homo sapien
tcaccaggttggtactggggctctg

SEQ ID NO: 1912211 - DNA, 25 bp, Homo sapien
gtactcaaaagtggggcgttcttca

SEQ ID NO: 1912212 - DNA, 25 bp, Homo sapien
ggctctgtcgcggtaaagtagtctt

SEQ ID NO: 1912213 - DNA, 25 bp, Homo sapien
tgttctgtcagggtcaacgggtcaa

SEQ ID NO: 1912214 - DNA, 25 bp, Homo sapien
tttgcaggagcaagaacccgatgtc

SEQ ID NO: 1912215 - DNA, 25 bp, Homo sapien
gaaacttgtcagcacagccagaggc

SEQ ID NO: 1912216 - DNA, 25 bp, Homo sapien
tgcagagggaacactcggacttcgg

SEQ ID NO: 1912217 - DNA, 25 bp, Homo sapien
cagcacacttggtgatgtgaacctc

SEQ ID NO: 1912218 - DNA, 25 bp, Homo sapien
catttttccagtgctcggtccaagc

SEQ ID NO: 1912219 - DNA, 25 bp, Homo sapien
tagcgtctcccgaggcagtctttcc

SEQ ID NO: 1912220 - DNA, 25 bp, Homo sapien
gatgtgaacctcaacatgtagcgtc

SEQ ID NO: 1912221 - DNA, 25 bp, Homo sapien
caatgagggctttgccaggaaagtg

SEQ ID NO: 1912222 - DNA, 25 bp, Homo sapien
tggaatgggactagctcttttccaa

SEQ ID NO: 1912223 - DNA, 25 bp, Homo sapien
gaaagtgggatattttgacaatgca

SEQ ID NO: 1912224 - DNA, 25 bp, Homo sapien
caatgcacttggctgacaatgacaa

SEQ ID NO: 1912225 - DNA, 25 bp, Homo sapien
taaacacgagtttgggcaccagggc

SEQ ID NO: 1912226 - DNA, 25 bp, Homo sapien
ccaggtttcctagtgggagctgcaa

SEQ ID NO: 1912227 - DNA, 25 bp, Homo sapien
gaattgctcaggaaaacaggccatt

SEQ ID NO: 1912228 - DNA, 25 bp, Homo sapien
gaagagccacgttcgagcagtatga

SEQ ID NO: 1912229 - DNA, 25 bp, Homo sapien
aaactctgactctgtagggttgcca

SEQ ID NO: 1912230 - DNA, 25 bp, Homo sapien
aatcactttcattggcagagcaccg

SEQ ID NO: 1912231 - DNA, 25 bp, Homo sapien
gcttctgtgcataaaaggcccggtg

SEQ ID NO: 1912232 - DNA, 25 bp, Homo sapien
tcttgccagataacctcaggacagc

SEQ ID NO: 1912233 - DNA, 25 bp, Homo sapien
ggcttccaggttatcattcagtttg

SEQ ID NO: 1912234 - DNA, 25 bp, Homo sapien
tgttacacatctcgaaagcaacctt

SEQ ID NO: 1912235 - DNA, 25 bp, Homo sapien
tctgaactcttgcttgcagaaaagc

SEQ ID NO: 1912236 - DNA, 25 bp, Homo sapien
gcagagaatgcgttcagctcaggct

SEQ ID NO: 1912237 - DNA, 25 bp, Homo sapien
actgggagtctgtcctgaggtacca

SEQ ID NO: 1912238 - DNA, 25 bp, Homo sapien
tgtgtcaaggaaacagcaggctatt

SEQ ID NO: 1912239 - DNA, 25 bp, Homo sapien
gcacaaagacgcaacgtgggaagct

SEQ ID NO: 1912240 - DNA, 25 bp, Homo sapien
aatggaaatcatgacggaccgggac

SEQ ID NO: 1912241 - DNA, 25 bp, Homo sapien
tcaaaaaagcagatcgtccctgtgc

SEQ ID NO: 1912242 - DNA, 25 bp, Homo sapien
aaactcgtggtttctttggagagca

SEQ ID NO: 1912243 - DNA, 25 bp, Homo sapien
tgccaggctcactccatgggtcagt

SEQ ID NO: 1912244 - DNA, 25 bp, Homo sapien
taagcatggataagccaaactcgtg

SEQ ID NO: 1912245 - DNA, 25 bp, Homo sapien
tctgcaaactccatttgggcagagg

SEQ ID NO: 1912246 - DNA, 25 bp, Homo sapien
tgcaaactccatttgggcagaggca

SEQ ID NO: 1912247 - DNA, 25 bp, Homo sapien
gtctgcaaactccatttgggcagag

SEQ ID NO: 1912248 - DNA, 25 bp, Homo sapien
gcactgccagtgacatttctgctct

SEQ ID NO: 1912249 - DNA, 25 bp, Homo sapien
aatggtgtcaaaaaagcctccaatc

SEQ ID NO: 1912250 - DNA, 25 bp, Homo sapien
gctgctacttacattaatcctggca

SEQ ID NO: 1912251 - DNA, 25 bp, Homo sapien
gggactgaagcatttagaccagctg

SEQ ID NO: 1912252 - DNA, 25 bp, Homo sapien
tctctcgctgaatacctggccatgt

SEQ ID NO: 1912253 - DNA, 25 bp, Homo sapien
ctctgtgagtaagattccaaaagac

SEQ ID NO: 1912254 - DNA, 25 bp, Homo sapien
tggtgaccagctctgtgagtaagat

SEQ ID NO: 1912255 - DNA, 25 bp, Homo sapien
gattgtgaacctcccgtacagggct

SEQ ID NO: 1912256 - DNA, 25 bp, Homo sapien
aaagaccacacgtcagacttgattg

SEQ ID NO: 1912257 - DNA, 25 bp, Homo sapien
tgctagatgattccacataagacct

SEQ ID NO: 1912258 - DNA, 25 bp, Homo sapien
gtgctagatgattccacataagacc

SEQ ID NO: 1912259 - DNA, 25 bp, Homo sapien
acataagacctggtattctctgaat

SEQ ID NO: 1912260 - DNA, 25 bp, Homo sapien
gacctggtattctctgaatagtcag

SEQ ID NO: 1912261 - DNA, 25 bp, Homo sapien
tcacgcagctttggactctgagcca

SEQ ID NO: 1912262 - DNA, 25 bp, Homo sapien
tgttcacgcagctttggactctgag

SEQ ID NO: 1912263 - DNA, 25 bp, Homo sapien
tctgttcacgcagctttggactctg

SEQ ID NO: 1912264 - DNA, 25 bp, Homo sapien
ttcacgcagctttggactctgagcc

SEQ ID NO: 1912265 - DNA, 25 bp, Homo sapien
agtaagagtacataagccggccagg

SEQ ID NO: 1912266 - DNA, 25 bp, Homo sapien
tcagatagtaaaggcctaaagtccc

SEQ ID NO: 1912267 - DNA, 25 bp, Homo sapien
aatgaagtccctctatccctagtgg

SEQ ID NO: 1912268 - DNA, 25 bp, Homo sapien
gagcttccgagtcaggtatccctgt

SEQ ID NO: 1912269 - DNA, 25 bp, Homo sapien
caacggatgtgtgggatgtagctca

SEQ ID NO: 1912270 - DNA, 25 bp, Homo sapien
gcagagggcccgtgtcagtctgact

SEQ ID NO: 1912271 - DNA, 25 bp, Homo sapien
aatgatgccaagaatccagccaccc

SEQ ID NO: 1912272 - DNA, 25 bp, Homo sapien
ctgcatgggcagcactgggtttggg

SEQ ID NO: 1912273 - DNA, 25 bp, Homo sapien
gaccgacatgtaattcagcatttgg

SEQ ID NO: 1912274 - DNA, 25 bp, Homo sapien
taacgcacgggtatgcttgctgtgt

SEQ ID NO: 1912275 - DNA, 25 bp, Homo sapien
tagctgagctgtctgaccgacatgt

SEQ ID NO: 1912276 - DNA, 25 bp, Homo sapien
catttggacagtatcggtagcagcc

SEQ ID NO: 1912277 - DNA, 25 bp, Homo sapien
cgagccattgtcattcaagtgccca

SEQ ID NO: 1912278 - DNA, 25 bp, Homo sapien
gagccattgtcattcaagtgcccac

SEQ ID NO: 1912279 - DNA, 25 bp, Homo sapien
cacgagccattgtcattcaagtgcc

SEQ ID NO: 1912280 - DNA, 25 bp, Homo sapien
tcacgagccattgtcattcaagtgc

SEQ ID NO: 1912281 - DNA, 25 bp, Homo sapien
gtcttctatcaatcgggccaatccg

SEQ ID NO: 1912282 - DNA, 25 bp, Homo sapien
tccccactagaatgtttgctgatcg

SEQ ID NO: 1912283 - DNA, 25 bp, Homo sapien
cagcaatcttgcatatgagtccatt

SEQ ID NO: 1912284 - DNA, 25 bp, Homo sapien
tcgatgtaagccattcctgcagcca

SEQ ID NO: 1912285 - DNA, 25 bp, Homo sapien
tgccatgtccacaagatttggtaat

SEQ ID NO: 1912286 - DNA, 25 bp, Homo sapien
agatttggtaatttcagagctcttc

SEQ ID NO: 1912287 - DNA, 25 bp, Homo sapien
gatttggtaatttcagagctcttcc

SEQ ID NO: 1912288 - DNA, 25 bp, Homo sapien
gtgctgccatgtccacaagatttgg

SEQ ID NO: 1912289 - DNA, 25 bp, Homo sapien
gagctggaccagcttgtcgtgcttc

SEQ ID NO: 1912290 - DNA, 25 bp, Homo sapien
ctttatggctacttttgtgtttcca

SEQ ID NO: 1912291 - DNA, 25 bp, Homo sapien
tcatgatctgcgcttcctcaaggaa

SEQ ID NO: 1912292 - DNA, 25 bp, Homo sapien
ctttgttcatatactcggtgacgat

SEQ ID NO: 1912293 - DNA, 25 bp, Homo sapien
cattcaattgcaaggactctgtcaa

SEQ ID NO: 1912294 - DNA, 25 bp, Homo sapien
tgaccaccagctatttgcataagat

SEQ ID NO: 1912295 - DNA, 25 bp, Homo sapien
tttggctcagtcatatgattacaca

SEQ ID NO: 1912296 - DNA, 25 bp, Homo sapien
tacacatttataccaaaagctctgc

SEQ ID NO: 1912297 - DNA, 25 bp, Homo sapien
gttatccaggttaagtgtctttgtc

SEQ ID NO: 1912298 - DNA, 25 bp, Homo sapien
ctagttatccaggttaagtgtcttt

SEQ ID NO: 1912299 - DNA, 25 bp, Homo sapien
tgtctttgtcccaacggctgtgtgt

SEQ ID NO: 1912300 - DNA, 25 bp, Homo sapien
gtcccaacggctgtgtgtgcatttt

SEQ ID NO: 1912301 - DNA, 25 bp, Homo sapien
cacacttcagcgaaacacccctgac

SEQ ID NO: 1912302 - DNA, 25 bp, Homo sapien
ccacacttcagcgaaacacccctga

SEQ ID NO: 1912303 - DNA, 25 bp, Homo sapien
agccacacttcagcgaaacacccct

SEQ ID NO: 1912304 - DNA, 25 bp, Homo sapien
aagccacacttcagcgaaacacccc

SEQ ID NO: 1912305 - DNA, 25 bp, Homo sapien
tctttagccaatccagaagtttgtg

SEQ ID NO: 1912306 - DNA, 25 bp, Homo sapien
gacgtgcaacttcccaagcatcttt

SEQ ID NO: 1912307 - DNA, 25 bp, Homo sapien
ttctccagacacaacgaacgacgtg

SEQ ID NO: 1912308 - DNA, 25 bp, Homo sapien
gggtacaactcgatgcaatcacagt

SEQ ID NO: 1912309 - DNA, 25 bp, Homo sapien
tattccccactattagtaattcaaa

SEQ ID NO: 1912310 - DNA, 25 bp, Homo sapien
ttcaaactttcttcccggtcacgca

SEQ ID NO: 1912311 - DNA, 25 bp, Homo sapien
tgggatcttccaaacggggaagcta

SEQ ID NO: 1912312 - DNA, 25 bp, Homo sapien
gctaataagagagtaattgagtctc

SEQ ID NO: 1912313 - DNA, 25 bp, Homo sapien
tcaactgcagggattctcgagggat

SEQ ID NO: 1912314 - DNA, 25 bp, Homo sapien
tttgtgacagggaactactaggcgg

SEQ ID NO: 1912315 - DNA, 25 bp, Homo sapien
gttttgacagacagatcggtaagcc

SEQ ID NO: 1912316 - DNA, 25 bp, Homo sapien
gatcggtaagccttggcatcccttt

SEQ ID NO: 1912317 - DNA, 25 bp, Homo sapien
ggcgcacagtgctcctcaaacagtg

SEQ ID NO: 1912318 - DNA, 25 bp, Homo sapien
acacacacggtggaagatcagacgc

SEQ ID NO: 1912319 - DNA, 25 bp, Homo sapien
ttaaacagcgctacaccagcagacg

SEQ ID NO: 1912320 - DNA, 25 bp, Homo sapien
taagtgtaaacccacactagcggcg

SEQ ID NO: 1912321 - DNA, 25 bp, Homo sapien
aatgccaagtaaaaatcagtcaggc

SEQ ID NO: 1912322 - DNA, 25 bp, Homo sapien
tcagggagtgacaaaagctgacaga

SEQ ID NO: 1912323 - DNA, 25 bp, Homo sapien
ttgtgaggtggacagacctcccgct

SEQ ID NO: 1912324 - DNA, 25 bp, Homo sapien
taaaaacaagtctaacgtgagatgg

SEQ ID NO: 1912325 - DNA, 25 bp, Homo sapien
gaatcttcggacaaacatgtggaac

SEQ ID NO: 1912326 - DNA, 25 bp, Homo sapien
tccttgtaggagtccccatgtaagc

SEQ ID NO: 1912327 - DNA, 25 bp, Homo sapien
tgaaatgtacgtgcagctattcctg

SEQ ID NO: 1912328 - DNA, 25 bp, Homo sapien
atgtaagcgccctccgagagactgc

SEQ ID NO: 1912329 - DNA, 25 bp, Homo sapien
ccagcatccaaatggttagtaggta

SEQ ID NO: 1912330 - DNA, 25 bp, Homo sapien
ctctgggcctatccactccctccag

SEQ ID NO: 1912331 - DNA, 25 bp, Homo sapien
tccctccagcatccaaatggttagt

SEQ ID NO: 1912332 - DNA, 25 bp, Homo sapien
tccaaatggttagtaggtagttaga

SEQ ID NO: 1912333 - DNA, 25 bp, Homo sapien
agtaatgttgtacaagctgctgaag

SEQ ID NO: 1912334 - DNA, 25 bp, Homo sapien
ggcccgggtggtaatgtagtatcca

SEQ ID NO: 1912335 - DNA, 25 bp, Homo sapien
ctgaagtgtttcaaactgggcccgg

SEQ ID NO: 1912336 - DNA, 25 bp, Homo sapien
aatgtttgacatggtctcctttcat

SEQ ID NO: 1912337 - DNA, 25 bp, Homo sapien
tggtggtttcactctcgcggataag

SEQ ID NO: 1912338 - DNA, 25 bp, Homo sapien
gtcgctcagcatcttttcggccaag

SEQ ID NO: 1912339 - DNA, 25 bp, Homo sapien
caaaggacaatagctgtcgctcagc

SEQ ID NO: 1912340 - DNA, 25 bp, Homo sapien
ctctcgcggataagaaaggtacctc

SEQ ID NO: 1912341 - DNA, 25 bp, Homo sapien
ggagccatcacggtggaccctgtac

SEQ ID NO: 1912342 - DNA, 25 bp, Homo sapien
tgtagaggctaagagtggtggctca

SEQ ID NO: 1912343 - DNA, 25 bp, Homo sapien
cacggtggaccctgtacatcttttc

SEQ ID NO: 1912344 - DNA, 25 bp, Homo sapien
catcacggtggaccctgtacatctt

SEQ ID NO: 1912345 - DNA, 25 bp, Homo sapien
tttcaagccttaaccaagcctggca

SEQ ID NO: 1912346 - DNA, 25 bp, Homo sapien
gacattgcgtattagctcctcagtg

SEQ ID NO: 1912347 - DNA, 25 bp, Homo sapien
cattaggtggcgtaaagactagtac

SEQ ID NO: 1912348 - DNA, 25 bp, Homo sapien
tagttactatttcagcactaggtgc

SEQ ID NO: 1912349 - DNA, 25 bp, Homo sapien
ttgctgggaatgtaacctgtctctc

SEQ ID NO: 1912350 - DNA, 25 bp, Homo sapien
tcttctgcctggatagagtcaactg

SEQ ID NO: 1912351 - DNA, 25 bp, Homo sapien
agttgtcaaggagcgggcttcccac

SEQ ID NO: 1912352 - DNA, 25 bp, Homo sapien
agagtcaactggagccacataattg

SEQ ID NO: 1912353 - DNA, 25 bp, Homo sapien
gagtcagccatgagatgaacccaca

SEQ ID NO: 1912354 - DNA, 25 bp, Homo sapien
tggtctgaagtgtataactgtcacc

SEQ ID NO: 1912355 - DNA, 25 bp, Homo sapien
tcaacagcttgcagttagagactca

SEQ ID NO: 1912356 - DNA, 25 bp, Homo sapien
agaaggttccagttcgagtcagcca

SEQ ID NO: 1912357 - DNA, 25 bp, Homo sapien
tgaagagcaggaatggagtgtgtac

SEQ ID NO: 1912358 - DNA, 25 bp, Homo sapien
tcccattaacatcggggaggccatg

SEQ ID NO: 1912359 - DNA, 25 bp, Homo sapien
ccagcctgcagtcaacgacatgatt

SEQ ID NO: 1912360 - DNA, 25 bp, Homo sapien
catgattgccctcaagcaaatcaga

SEQ ID NO: 1912361 - DNA, 25 bp, Homo sapien
tggatgtggcgctgcggctctgaca

SEQ ID NO: 1912362 - DNA, 25 bp, Homo sapien
cagtatatatgaaccccgtgaaccc

SEQ ID NO: 1912363 - DNA, 25 bp, Homo sapien
tgctctgaagttccactagatggag

SEQ ID NO: 1912364 - DNA, 25 bp, Homo sapien
taagagctagatcgttaccaactgg

SEQ ID NO: 1912365 - DNA, 25 bp, Homo sapien
aatggctttggagacataatcttca

SEQ ID NO: 1912366 - DNA, 25 bp, Homo sapien
gctgtgaccaatactccactctgtg

SEQ ID NO: 1912367 - DNA, 25 bp, Homo sapien
ccactctgtgtaaaacatgtattac

SEQ ID NO: 1912368 - DNA, 25 bp, Homo sapien
tgttcgtagatggtaaacgactagt

SEQ ID NO: 1912369 - DNA, 25 bp, Homo sapien
taaagagtcactgttcgtagatggt

SEQ ID NO: 1912370 - DNA, 25 bp, Homo sapien
tgcacatcccacggtgtatgttgta

SEQ ID NO: 1912371 - DNA, 25 bp, Homo sapien
atgcacatcccacggtgtatgttgt

SEQ ID NO: 1912372 - DNA, 25 bp, Homo sapien
gcacatcccacggtgtatgttgtac

SEQ ID NO: 1912373 - DNA, 25 bp, Homo sapien
ggacacacactaggaggtgtggcag

SEQ ID NO: 1912374 - DNA, 25 bp, Homo sapien
gaggacacacactaggaggtgtggc

SEQ ID NO: 1912375 - DNA, 25 bp, Homo sapien
agctgccctggcagaacagagcccc

SEQ ID NO: 1912376 - DNA, 25 bp, Homo sapien
gctgccctggcagaacagagcccca

SEQ ID NO: 1912377 - DNA, 25 bp, Homo sapien
ttaaaaacttcctgtggctacagga

SEQ ID NO: 1912378 - DNA, 25 bp, Homo sapien
cttttctgcatgtgttccaacaaaa

SEQ ID NO: 1912379 - DNA, 25 bp, Homo sapien
caggcatgttcagcttgtgaaaatt

SEQ ID NO: 1912380 - DNA, 25 bp, Homo sapien
tgagcggcagtaagtacgttcacac

SEQ ID NO: 1912381 - DNA, 25 bp, Homo sapien
tatttgaaatttttctcctttgtga

SEQ ID NO: 1912382 - DNA, 25 bp, Homo sapien
atttttctcctttgtgaaaactcag

SEQ ID NO: 1912383 - DNA, 25 bp, Homo sapien
tttctcctttgtgaaaactcaggtc

SEQ ID NO: 1912384 - DNA, 25 bp, Homo sapien
gagctgttcaatatttgaaattttt

SEQ ID NO: 1912385 - DNA, 25 bp, Homo sapien
taaagggccacaaagagtgtcactc

SEQ ID NO: 1912386 - DNA, 25 bp, Homo sapien
tcttctgtccgtgcttcatagtcat

SEQ ID NO: 1912387 - DNA, 25 bp, Homo sapien
cataaagggccacaaagagtgtcac

SEQ ID NO: 1912388 - DNA, 25 bp, Homo sapien
tgcttcatagtcataaagggccaca

SEQ ID NO: 1912389 - DNA, 25 bp, Homo sapien
tgccgaaacgaaattcacaagaagg

SEQ ID NO: 1912390 - DNA, 25 bp, Homo sapien
tcacaagaagggagattattacaca

SEQ ID NO: 1912391 - DNA, 25 bp, Homo sapien
ttcacaagaagggagattattacac

SEQ ID NO: 1912392 - DNA, 25 bp, Homo sapien
ctgccgaaacgaaattcacaagaag

SEQ ID NO: 1912393 - DNA, 25 bp, Homo sapien
tagtattcagtctcgtgcaagcccc

SEQ ID NO: 1912394 - DNA, 25 bp, Homo sapien
taattctagcatagtccccagtgac

SEQ ID NO: 1912395 - DNA, 25 bp, Homo sapien
tcaacagaatgtgcagtcccttaag

SEQ ID NO: 1912396 - DNA, 25 bp, Homo sapien
gattctgaaggaccgaactgaccat

SEQ ID NO: 1912397 - DNA, 25 bp, Homo sapien
gatcagttatctacctcagagtcta

SEQ ID NO: 1912398 - DNA, 25 bp, Homo sapien
agaagctagggctaagcagttattt

SEQ ID NO: 1912399 - DNA, 25 bp, Homo sapien
agctgtgtatgatcagttatctacc

SEQ ID NO: 1912400 - DNA, 25 bp, Homo sapien
gaagctagggctaagcagttatttc

SEQ ID NO: 1912401 - DNA, 25 bp, Homo sapien
cccagatgttcaattgccaaaagat

SEQ ID NO: 1912402 - DNA, 25 bp, Homo sapien
gggaacccagatgttcaattgccaa

SEQ ID NO: 1912403 - DNA, 25 bp, Homo sapien
acccctagtcaaagggaagtgatgg

SEQ ID NO: 1912404 - DNA, 25 bp, Homo sapien
agaaacttacatgtgaaacccctag

SEQ ID NO: 1912405 - DNA, 25 bp, Homo sapien
aagagttcacacctccaaagacggt

SEQ ID NO: 1912406 - DNA, 25 bp, Homo sapien
ggtctgtgccatagcggtacccaga

SEQ ID NO: 1912407 - DNA, 25 bp, Homo sapien
gcaaggtccccgtatgagacgaaga

SEQ ID NO: 1912408 - DNA, 25 bp, Homo sapien
ccccggctgcgtggaagttgttgta

SEQ ID NO: 1912409 - DNA, 25 bp, Homo sapien
ctttatccttacattgcacacagcc

SEQ ID NO: 1912410 - DNA, 25 bp, Homo sapien
tctttatccttacattgcacacagc

SEQ ID NO: 1912411 - DNA, 25 bp, Homo sapien
tgtgctcttaactaatctgtgctgg

SEQ ID NO: 1912412 - DNA, 25 bp, Homo sapien
tctgtgctggaaagtaagcagtgag

SEQ ID NO: 1912413 - DNA, 25 bp, Homo sapien
ggtaccaatggacagtgagcctgct

SEQ ID NO: 1912414 - DNA, 25 bp, Homo sapien
tgttgagaggcaactccttctagaa

SEQ ID NO: 1912415 - DNA, 25 bp, Homo sapien
tggatacaatctaggcactcagagg

SEQ ID NO: 1912416 - DNA, 25 bp, Homo sapien
tcccctgttgggaattatcctgaga

SEQ ID NO: 1912417 - DNA, 25 bp, Homo sapien
aatcttgcgctctataccctctatg

SEQ ID NO: 1912418 - DNA, 25 bp, Homo sapien
tactcttggtcaaggacttcccctg

SEQ ID NO: 1912419 - DNA, 25 bp, Homo sapien
ggtgctcaaggaagaacccttgagg

SEQ ID NO: 1912420 - DNA, 25 bp, Homo sapien
tgctcaaggaagaacccttgaggca

SEQ ID NO: 1912421 - DNA, 25 bp, Homo sapien
agccatgatcgtgtcagcctgggtg

SEQ ID NO: 1912422 - DNA, 25 bp, Homo sapien
tgaggtgctcaaggaagaacccttg

SEQ ID NO: 1912423 - DNA, 25 bp, Homo sapien
atcttttacatcgtagttttgatca

SEQ ID NO: 1912424 - DNA, 25 bp, Homo sapien
tcttttacatcgtagttttgatcag

SEQ ID NO: 1912425 - DNA, 25 bp, Homo sapien
cttttacatcgtagttttgatcaga

SEQ ID NO: 1912426 - DNA, 25 bp, Homo sapien
aatcttttacatcgtagttttgatc

SEQ ID NO: 1912427 - DNA, 25 bp, Homo sapien
tgaaacaaagggcatgcgttcccgc

SEQ ID NO: 1912428 - DNA, 25 bp, Homo sapien
ccttcacttttgttgagactggaga

SEQ ID NO: 1912429 - DNA, 25 bp, Homo sapien
acatgaatgagtgcaagcctcagtg

SEQ ID NO: 1912430 - DNA, 25 bp, Homo sapien
gcctcagtgggtctattgtgcaaaa

SEQ ID NO: 1912431 - DNA, 25 bp, Homo sapien
taataatcttgctttaggagggtgg

SEQ ID NO: 1912432 - DNA, 25 bp, Homo sapien
catacaggatgctttcataggagga

SEQ ID NO: 1912433 - DNA, 25 bp, Homo sapien
ggtggaatggaactgggcacttact

SEQ ID NO: 1912434 - DNA, 25 bp, Homo sapien
tcttgcagaagaagtgtcaaggcat

SEQ ID NO: 1912435 - DNA, 25 bp, Homo sapien
cttatgaacaacaggcaagggttac

SEQ ID NO: 1912436 - DNA, 25 bp, Homo sapien
caagggttacagtcgctcattctca

SEQ ID NO: 1912437 - DNA, 25 bp, Homo sapien
gatcctggtgtacatgcttatgaac

SEQ ID NO: 1912438 - DNA, 25 bp, Homo sapien
tttatcttcaggaaaaggatcacac

SEQ ID NO: 1912439 - DNA, 25 bp, Homo sapien
gcccagcatttaggacggcaggaca

SEQ ID NO: 1912440 - DNA, 25 bp, Homo sapien
tgattgttagactggaggacgacct

SEQ ID NO: 1912441 - DNA, 25 bp, Homo sapien
aaattctgggcatgaacaaagctcc

SEQ ID NO: 1912442 - DNA, 25 bp, Homo sapien
ggcttactctcataccatcagcggg

SEQ ID NO: 1912443 - DNA, 25 bp, Homo sapien
gaacgccgcttctctgattagcaac

SEQ ID NO: 1912444 - DNA, 25 bp, Homo sapien
cacaccagtggcctatatcttttcc

SEQ ID NO: 1912445 - DNA, 25 bp, Homo sapien
tagcaactttctccgatctgaagcg

SEQ ID NO: 1912446 - DNA, 25 bp, Homo sapien
ccaggatggaatgcacctccacata

SEQ ID NO: 1912447 - DNA, 25 bp, Homo sapien
cttcacgtaagcctcccttctcagc

SEQ ID NO: 1912448 - DNA, 25 bp, Homo sapien
ccttcacgtaagcctcccttctcag

SEQ ID NO: 1912449 - DNA, 25 bp, Homo sapien
cagtggtgctaaccgaacggaggct

SEQ ID NO: 1912450 - DNA, 25 bp, Homo sapien
ggtgcccattctcatcaaggactgt

SEQ ID NO: 1912451 - DNA, 25 bp, Homo sapien
gctccccgacggcaacgattatctg

SEQ ID NO: 1912452 - DNA, 25 bp, Homo sapien
tgtccacaacggtgctgggtcctct

SEQ ID NO: 1912453 - DNA, 25 bp, Homo sapien
cttcagttttcattcgattattctc

SEQ ID NO: 1912454 - DNA, 25 bp, Homo sapien
tctctccgctgtggtttgactagag

SEQ ID NO: 1912455 - DNA, 25 bp, Homo sapien
cgattattctctccgctgtggtttg

SEQ ID NO: 1912456 - DNA, 25 bp, Homo sapien
gttttcattcgattattctctccgc

SEQ ID NO: 1912457 - DNA, 25 bp, Homo sapien
attctcccaaccagcaagtttgaaa

SEQ ID NO: 1912458 - DNA, 25 bp, Homo sapien
aattctcccaaccagcaagtttgaa

SEQ ID NO: 1912459 - DNA, 25 bp, Homo sapien
tctcccaaccagcaagtttgaaatt

SEQ ID NO: 1912460 - DNA, 25 bp, Homo sapien
ttctcccaaccagcaagtttgaaat

SEQ ID NO: 1912461 - DNA, 25 bp, Homo sapien
taaatatgcctcttggtagcctgac

SEQ ID NO: 1912462 - DNA, 25 bp, Homo sapien
gcttgtctaagaatgggtcaccagg

SEQ ID NO: 1912463 - DNA, 25 bp, Homo sapien
cgtgagcacccttttacagcaagag

SEQ ID NO: 1912464 - DNA, 25 bp, Homo sapien
taatatatgggtcacacggatctct

SEQ ID NO: 1912465 - DNA, 25 bp, Homo sapien
caaaatgtccgccaacgatcacaaa

SEQ ID NO: 1912466 - DNA, 25 bp, Homo sapien
tccgccaacgatcacaaactttata

SEQ ID NO: 1912467 - DNA, 25 bp, Homo sapien
aactttatatacaccacatgtcttc

SEQ ID NO: 1912468 - DNA, 25 bp, Homo sapien
cacatgtcttctacaacagaggcag

SEQ ID NO: 1912469 - DNA, 25 bp, Homo sapien
aagaaaaaccacatcattaaacaga

SEQ ID NO: 1912470 - DNA, 25 bp, Homo sapien
ctgaaaaacaataccacaacaaaag

SEQ ID NO: 1912471 - DNA, 25 bp, Homo sapien
ttaaacagaaataattgaacacata

SEQ ID NO: 1912472 - DNA, 25 bp, Homo sapien
tgaaaaacaataccacaacaaaaga

SEQ ID NO: 1912473 - DNA, 25 bp, Homo sapien
ggtatacacccagtatatacccagt

SEQ ID NO: 1912474 - DNA, 25 bp, Homo sapien
gtatacacccagtatatacccagta

SEQ ID NO: 1912475 - DNA, 25 bp, Homo sapien
gatctgcaatccacagtctgaacag

SEQ ID NO: 1912476 - DNA, 25 bp, Homo sapien
ccaagtagacattctggagtggctc

SEQ ID NO: 1912477 - DNA, 25 bp, Homo sapien
ttgctatgatgcaagcgcagctgct

SEQ ID NO: 1912478 - DNA, 25 bp, Homo sapien
caaaagatatccagctagcacacca

SEQ ID NO: 1912479 - DNA, 25 bp, Homo sapien
tgaaataaatcccttggagcataga

SEQ ID NO: 1912480 - DNA, 25 bp, Homo sapien
tggaatatacatggtcatgaggtcc

SEQ ID NO: 1912481 - DNA, 25 bp, Homo sapien
gcttctggtcagtcaatccattatc

SEQ ID NO: 1912482 - DNA, 25 bp, Homo sapien
ttatcattagccatgtgctccacag

SEQ ID NO: 1912483 - DNA, 25 bp, Homo sapien
ttctgagcccacaacagctcttgag

SEQ ID NO: 1912484 - DNA, 25 bp, Homo sapien
tcttctgagcccacaacagctcttg

SEQ ID NO: 1912485 - DNA, 25 bp, Homo sapien
tttcttctgagcccacaacagctct

SEQ ID NO: 1912486 - DNA, 25 bp, Homo sapien
tctgagcccacaacagctcttgagg

SEQ ID NO: 1912487 - DNA, 25 bp, Homo sapien
tctctatcaatcagggtaccagcag

SEQ ID NO: 1912488 - DNA, 25 bp, Homo sapien
gctgtagcgaatcaggagggacccc

SEQ ID NO: 1912489 - DNA, 25 bp, Homo sapien
tgcctgacagggatagtgaccccat

SEQ ID NO: 1912490 - DNA, 25 bp, Homo sapien
ggacagaaacgctcacggaagggct

SEQ ID NO: 1912491 - DNA, 25 bp, Homo sapien
agagacaagtctcctaccaccagtg

SEQ ID NO: 1912492 - DNA, 25 bp, Homo sapien
ggaagactctacaaaacacagcatg

SEQ ID NO: 1912493 - DNA, 25 bp, Homo sapien
tggttaagagctagcatgcaggact

SEQ ID NO: 1912494 - DNA, 25 bp, Homo sapien
gaataatcatactgcactagcctca

SEQ ID NO: 1912495 - DNA, 25 bp, Homo sapien
gcctcaacctgggtttcaaacaatc

SEQ ID NO: 1912496 - DNA, 25 bp, Homo sapien
tatctgtcttgttcagctactgctg

SEQ ID NO: 1912497 - DNA, 25 bp, Homo sapien
tgtcttgttcagctactgctgaatt

SEQ ID NO: 1912498 - DNA, 25 bp, Homo sapien
gattagcttatagagtacaatccca

SEQ ID NO: 1912499 - DNA, 25 bp, Homo sapien
cacagtgtctgctacatagtaagac

SEQ ID NO: 1912500 - DNA, 25 bp, Homo sapien
tattggatgttcaatgcagtgttgc

SEQ ID NO: 1912501 - DNA, 25 bp, Homo sapien
tcagcaataacctaaatatccactg

SEQ ID NO: 1912502 - DNA, 25 bp, Homo sapien
actgctgactagctttctccgatgc

SEQ ID NO: 1912503 - DNA, 25 bp, Homo sapien
ctggtctgttgccttgctgctgcca

SEQ ID NO: 1912504 - DNA, 25 bp, Homo sapien
tagctttctccgatgctgctgtcat

SEQ ID NO: 1912505 - DNA, 25 bp, Homo sapien
gctgactagctttctccgatgctgc

SEQ ID NO: 1912506 - DNA, 25 bp, Homo sapien
catgatactgaatgggaacccttag

SEQ ID NO: 1912507 - DNA, 25 bp, Homo sapien
caaaatactgtcttagtgagatgcc

SEQ ID NO: 1912508 - DNA, 25 bp, Homo sapien
tatggactgttagtgaccaactgac

SEQ ID NO: 1912509 - DNA, 25 bp, Homo sapien
tgtctcatgcagagggtctggcgat

SEQ ID NO: 1912510 - DNA, 25 bp, Homo sapien
ggtcttgcacacttttactcctaag

SEQ ID NO: 1912511 - DNA, 25 bp, Homo sapien
tgttaccaggtagccacaaaatgag

SEQ ID NO: 1912512 - DNA, 25 bp, Homo sapien
tgaacactagctttcagccaaagtg

SEQ ID NO: 1912513 - DNA, 25 bp, Homo sapien
tactcctaaggttatctgaatcaag

SEQ ID NO: 1912514 - DNA, 25 bp, Homo sapien
ctgtgatgcagaatcaggaggaaag

SEQ ID NO: 1912515 - DNA, 25 bp, Homo sapien
tctgtgatgcagaatcaggaggaaa

SEQ ID NO: 1912516 - DNA, 25 bp, Homo sapien
ctcatttgtaagggctgtaacgtgt

SEQ ID NO: 1912517 - DNA, 25 bp, Homo sapien
taagggctgtaacgtgtgaggaaag

SEQ ID NO: 1912518 - DNA, 25 bp, Homo sapien
aaaacaacctcagcaccacaatggc

SEQ ID NO: 1912519 - DNA, 25 bp, Homo sapien
tgctgtccaaccagtgcagtccaaa

SEQ ID NO: 1912520 - DNA, 25 bp, Homo sapien
tggccgcttcactccgtgtcaagtt

SEQ ID NO: 1912521 - DNA, 25 bp, Homo sapien
tggccagtaaagatgctgtccaacc

SEQ ID NO: 1912522 - DNA, 25 bp, Homo sapien
aagaaagctggtcagttattacgca

SEQ ID NO: 1912523 - DNA, 25 bp, Homo sapien
tacgcatgatacataacaactattt

SEQ ID NO: 1912524 - DNA, 25 bp, Homo sapien
tttcttcttagacagcaccgcttag

SEQ ID NO: 1912525 - DNA, 25 bp, Homo sapien
caccgcttagttttacaatccaggg

SEQ ID NO: 1912526 - DNA, 25 bp, Homo sapien
tagtacatgtatcagggagggcctg

SEQ ID NO: 1912527 - DNA, 25 bp, Homo sapien
tgcacataggaactgccctgtccag

SEQ ID NO: 1912528 - DNA, 25 bp, Homo sapien
catgggttcagaggcaccagaagca

SEQ ID NO: 1912529 - DNA, 25 bp, Homo sapien
ggaacaattcccgtctgcacatagg

SEQ ID NO: 1912530 - DNA, 25 bp, Homo sapien
aggcctctgtgtctatcaaataggc

SEQ ID NO: 1912531 - DNA, 25 bp, Homo sapien
tgtctatcaaataggcagtagtgtt

SEQ ID NO: 1912532 - DNA, 25 bp, Homo sapien
cagtagtgtttgtggccatatttgt

SEQ ID NO: 1912533 - DNA, 25 bp, Homo sapien
tggcctgaacgcagctgtctaaacc

SEQ ID NO: 1912534 - DNA, 25 bp, Homo sapien
gatatctggaactgtaaccctcaag

SEQ ID NO: 1912535 - DNA, 25 bp, Homo sapien
caaacagttggaatgacactgcagg

SEQ ID NO: 1912536 - DNA, 25 bp, Homo sapien
acactgcaggaattctcggtctcac

SEQ ID NO: 1912537 - DNA, 25 bp, Homo sapien
ttaatcacaccagacaaaggccatc

SEQ ID NO: 1912538 - DNA, 25 bp, Homo sapien
cacgtttagatcagcatcctgcttc

SEQ ID NO: 1912539 - DNA, 25 bp, Homo sapien
tttccacgtttagatcagcatcctg

SEQ ID NO: 1912540 - DNA, 25 bp, Homo sapien
tccacgtttagatcagcatcctgct

SEQ ID NO: 1912541 - DNA, 25 bp, Homo sapien
ttttccacgtttagatcagcatcct

SEQ ID NO: 1912542 - DNA, 25 bp, Homo sapien
gagtgctggttctgatgacacccat

SEQ ID NO: 1912543 - DNA, 25 bp, Homo sapien
caagcccctggcgaggctgagtgct

SEQ ID NO: 1912544 - DNA, 25 bp, Homo sapien
gggactaccttagaaccttgtgcca

SEQ ID NO: 1912545 - DNA, 25 bp, Homo sapien
cacttcctatctgactgtgggtggg

SEQ ID NO: 1912546 - DNA, 25 bp, Homo sapien
tggagatgagcaagagaaccaccat

SEQ ID NO: 1912547 - DNA, 25 bp, Homo sapien
ctgcacaacagaggagtggctagga

SEQ ID NO: 1912548 - DNA, 25 bp, Homo sapien
cagtgcaggcaaagcaaccagtaca

SEQ ID NO: 1912549 - DNA, 25 bp, Homo sapien
tgggctgcacgcttagaggcctgac

SEQ ID NO: 1912550 - DNA, 25 bp, Homo sapien
gaggcctgacagtgctgcacaacag

SEQ ID NO: 1912551 - DNA, 25 bp, Homo sapien
tgctagatctcagtgacccatccat

SEQ ID NO: 1912552 - DNA, 25 bp, Homo sapien
tctatcatctcaataaccccgtaag

SEQ ID NO: 1912553 - DNA, 25 bp, Homo sapien
aataaccccgtaagcagaagcccag

SEQ ID NO: 1912554 - DNA, 25 bp, Homo sapien
caggacaactgggtgctagatctca

SEQ ID NO: 1912555 - DNA, 25 bp, Homo sapien
tgttatggcagtcccgggaaaccag

SEQ ID NO: 1912556 - DNA, 25 bp, Homo sapien
ggccctaaattcagcgacaagtttc

SEQ ID NO: 1912557 - DNA, 25 bp, Homo sapien
caaggaaagccaaggtttgccggca

SEQ ID NO: 1912558 - DNA, 25 bp, Homo sapien
gagaagcctgggacagaatctcctt

SEQ ID NO: 1912559 - DNA, 25 bp, Homo sapien
tgctcgctgctactcttgctgatgc

SEQ ID NO: 1912560 - DNA, 25 bp, Homo sapien
gatggcgcaactgcaacgacgcgcc

SEQ ID NO: 1912561 - DNA, 25 bp, Homo sapien
tgaggctccggagcccactcacatg

SEQ ID NO: 1912562 - DNA, 25 bp, Homo sapien
ctcgaaggccttcggctcgcggcga

SEQ ID NO: 1912563 - DNA, 25 bp, Homo sapien
cttgttaaattgtgtccatactgga

SEQ ID NO: 1912564 - DNA, 25 bp, Homo sapien
ttaaattgtgtccatactggacagc

SEQ ID NO: 1912565 - DNA, 25 bp, Homo sapien
ctcttgttaaattgtgtccatactg

SEQ ID NO: 1912566 - DNA, 25 bp, Homo sapien
aaattgtgtccatactggacagctg

SEQ ID NO: 1912567 - DNA, 25 bp, Homo sapien
tattagcttgtgaagttcaagtgcc

SEQ ID NO: 1912568 - DNA, 25 bp, Homo sapien
aaaggtggcttggattattagcttg

SEQ ID NO: 1912569 - DNA, 25 bp, Homo sapien
ttcatagagttatctcccaacacac

SEQ ID NO: 1912570 - DNA, 25 bp, Homo sapien
agaatgggtcttagtcaaccttggg

SEQ ID NO: 1912571 - DNA, 25 bp, Homo sapien
gaggctgttctgtcataagatggcc

SEQ ID NO: 1912572 - DNA, 25 bp, Homo sapien
tctgtcataagatggcctgtccctt

SEQ ID NO: 1912573 - DNA, 25 bp, Homo sapien
tcataagatggcctgtccctttctt

SEQ ID NO: 1912574 - DNA, 25 bp, Homo sapien
tgttctgtcataagatggcctgtcc

SEQ ID NO: 1912575 - DNA, 25 bp, Homo sapien
cctgataatctgcatatgaggttct

SEQ ID NO: 1912576 - DNA, 25 bp, Homo sapien
catatgaggttctgtcagtcttcct

SEQ ID NO: 1912577 - DNA, 25 bp, Homo sapien
acactcttgtgtgggtaccagctca

SEQ ID NO: 1912578 - DNA, 25 bp, Homo sapien
ttatccttctttatgtaggaaacac

SEQ ID NO: 1912579 - DNA, 25 bp, Homo sapien
tgcaaatctgcctatggcatggccg

SEQ ID NO: 1912580 - DNA, 25 bp, Homo sapien
ggcatagaaccctagcagctgtgta

SEQ ID NO: 1912581 - DNA, 25 bp, Homo sapien
gaattagtcatagggctgcaagcga

SEQ ID NO: 1912582 - DNA, 25 bp, Homo sapien
ttggagacaatatgcacggcctggc

SEQ ID NO: 1912583 - DNA, 25 bp, Homo sapien
cacactctccccacgtgaaagagaa

SEQ ID NO: 1912584 - DNA, 25 bp, Homo sapien
aagagcaaaaacaacgaagtctgag

SEQ ID NO: 1912585 - DNA, 25 bp, Homo sapien
ggcctaaggagacgtgatgattgaa

SEQ ID NO: 1912586 - DNA, 25 bp, Homo sapien
ctctccccacgtgaaagagaaagag

SEQ ID NO: 1912587 - DNA, 25 bp, Homo sapien
gagatttggggctgagacaaggggt

SEQ ID NO: 1912588 - DNA, 25 bp, Homo sapien
agatttggggctgagacaaggggtt

SEQ ID NO: 1912589 - DNA, 25 bp, Homo sapien
tcaccatggtctctaaactcatcca

SEQ ID NO: 1912590 - DNA, 25 bp, Homo sapien
ttaaatcctgctttgtccaatcata

SEQ ID NO: 1912591 - DNA, 25 bp, Homo sapien
tgcaatgtaatatagaatacagcag

SEQ ID NO: 1912592 - DNA, 25 bp, Homo sapien
atggtctctaaactcatccaggagg

SEQ ID NO: 1912593 - DNA, 25 bp, Homo sapien
tcagttcctgcaggccccaactctc

SEQ ID NO: 1912594 - DNA, 25 bp, Homo sapien
ctcttcctggcatacccttctctgc

SEQ ID NO: 1912595 - DNA, 25 bp, Homo sapien
tgtgtgtctaccatcttttgcatct

SEQ ID NO: 1912596 - DNA, 25 bp, Homo sapien
ccactagctggagggtcttggcttg

SEQ ID NO: 1912597 - DNA, 25 bp, Homo sapien
acagtggttacagcctctgccagcc

SEQ ID NO: 1912598 - DNA, 25 bp, Homo sapien
gactctggtcgagtgggaaggcctc

SEQ ID NO: 1912599 - DNA, 25 bp, Homo sapien
aggctgcgtgcatctgcttgtacat

SEQ ID NO: 1912600 - DNA, 25 bp, Homo sapien
ttgtccctgtttggcacaggctgcg

SEQ ID NO: 1912601 - DNA, 25 bp, Homo sapien
ttaaaaggctgaacgggagttctga

SEQ ID NO: 1912602 - DNA, 25 bp, Homo sapien
tcagtgctcttagatgctttccctg

SEQ ID NO: 1912603 - DNA, 25 bp, Homo sapien
gatgcatccctctgacccactgagt

SEQ ID NO: 1912604 - DNA, 25 bp, Homo sapien
cccactgagtcaaagctttcatcag

SEQ ID NO: 1912605 - DNA, 25 bp, Homo sapien
agcttggatgagagtccaaatcaca

SEQ ID NO: 1912606 - DNA, 25 bp, Homo sapien
aatcacatacttcccgagaatgtgg

SEQ ID NO: 1912607 - DNA, 25 bp, Homo sapien
tcccgagaatgtgggaaggtctgct

SEQ ID NO: 1912608 - DNA, 25 bp, Homo sapien
aatgtgggaaggtctgcttttgtct

SEQ ID NO: 1912609 - DNA, 25 bp, Homo sapien
caccgatattgggaaactcttggcg

SEQ ID NO: 1912610 - DNA, 25 bp, Homo sapien
cgtttgtttccccatcaatgaatgg

SEQ ID NO: 1912611 - DNA, 25 bp, Homo sapien
tgagttctctgcaatggtccagatt

SEQ ID NO: 1912612 - DNA, 25 bp, Homo sapien
gaaatcctcagcaccgatattggga

SEQ ID NO: 1912613 - DNA, 25 bp, Homo sapien
gagagtaagattcttggccgtgaag

SEQ ID NO: 1912614 - DNA, 25 bp, Homo sapien
caaaggagagtaagattcttggccg

SEQ ID NO: 1912615 - DNA, 25 bp, Homo sapien
agattcttggccgtgaaggacctgg

SEQ ID NO: 1912616 - DNA, 25 bp, Homo sapien
ctaacacaaaggagagtaagattct

SEQ ID NO: 1912617 - DNA, 25 bp, Homo sapien
actttctgtgggactctgaggaatg

SEQ ID NO: 1912618 - DNA, 25 bp, Homo sapien
gatgataatcacaggaaccaatggc

SEQ ID NO: 1912619 - DNA, 25 bp, Homo sapien
cactgaaaggattggcatttttgaa

SEQ ID NO: 1912620 - DNA, 25 bp, Homo sapien
taaacaggagcactgaaaggattgg

SEQ ID NO: 1912621 - DNA, 25 bp, Homo sapien
aacaagaatgttctcgggagtgttg

SEQ ID NO: 1912622 - DNA, 25 bp, Homo sapien
cttgcgagtgatctgacggaaggaa

SEQ ID NO: 1912623 - DNA, 25 bp, Homo sapien
gagtgttgttgcgatgactcgcttg

SEQ ID NO: 1912624 - DNA, 25 bp, Homo sapien
caagaatgttctcgggagtgttgtt

SEQ ID NO: 1912625 - DNA, 25 bp, Homo sapien
tgacagctctcacagatttgtggct

SEQ ID NO: 1912626 - DNA, 25 bp, Homo sapien
gtctgacagctctcacagatttgtg

SEQ ID NO: 1912627 - DNA, 25 bp, Homo sapien
ttgtcctcaagtagacagcctaggg

SEQ ID NO: 1912628 - DNA, 25 bp, Homo sapien
cagcctagggagatttttggtcgag

SEQ ID NO: 1912629 - DNA, 25 bp, Homo sapien
ggtagtttatccatttatgcactgg

SEQ ID NO: 1912630 - DNA, 25 bp, Homo sapien
tgaaaagccacttcttctatgaagg

SEQ ID NO: 1912631 - DNA, 25 bp, Homo sapien
cagatcctttcacgaccttgtgctt

SEQ ID NO: 1912632 - DNA, 25 bp, Homo sapien
tcacgaagcctctgagaaccagctg

SEQ ID NO: 1912633 - DNA, 25 bp, Homo sapien
aatgacgatggagagtgtgtgagga

SEQ ID NO: 1912634 - DNA, 25 bp, Homo sapien
tcccctaacatctcggttgatgaga

SEQ ID NO: 1912635 - DNA, 25 bp, Homo sapien
ttcccctaacatctcggttgatgag

SEQ ID NO: 1912636 - DNA, 25 bp, Homo sapien
tgagcacagcttgatggcaggtaag

SEQ ID NO: 1912637 - DNA, 25 bp, Homo sapien
gcccttcctgagagactaaaaaatg

SEQ ID NO: 1912638 - DNA, 25 bp, Homo sapien
atgacaggaaacacgtccccggtga

SEQ ID NO: 1912639 - DNA, 25 bp, Homo sapien
cttggagaaccaaacctgaacactt

SEQ ID NO: 1912640 - DNA, 25 bp, Homo sapien
gacttgggggccaccctttgtgctg

SEQ ID NO: 1912641 - DNA, 25 bp, Homo sapien
tttcttgtgctcattggatatgcga

SEQ ID NO: 1912642 - DNA, 25 bp, Homo sapien
gatcacagaagatgtatctaggact

SEQ ID NO: 1912643 - DNA, 25 bp, Homo sapien
ttggatatgcgatcacagaagatgt

SEQ ID NO: 1912644 - DNA, 25 bp, Homo sapien
tcctggcccctgctaggctgttgca

SEQ ID NO: 1912645 - DNA, 25 bp, Homo sapien
gctggacttccctctttctcaggct

SEQ ID NO: 1912646 - DNA, 25 bp, Homo sapien
cctcctgtttcagatataaccaatt

SEQ ID NO: 1912647 - DNA, 25 bp, Homo sapien
tgctggacttccctctttctcaggc

SEQ ID NO: 1912648 - DNA, 25 bp, Homo sapien
tcagatataaccaattttctccatt

SEQ ID NO: 1912649 - DNA, 25 bp, Homo sapien
tgatctccacagagtgggttgtcca

SEQ ID NO: 1912650 - DNA, 25 bp, Homo sapien
cctgatctccacagagtgggttgtc

SEQ ID NO: 1912651 - DNA, 25 bp, Homo sapien
acagagtgggttgtccagtcttccc

SEQ ID NO: 1912652 - DNA, 25 bp, Homo sapien
ccacagagtgggttgtccagtcttc

SEQ ID NO: 1912653 - DNA, 25 bp, Homo sapien
caaagtctgaaatgagggccacgca

SEQ ID NO: 1912654 - DNA, 25 bp, Homo sapien
tttgacctcgtctacaatttgggac

SEQ ID NO: 1912655 - DNA, 25 bp, Homo sapien
tgcagtcaagacaatccaagttgcc

SEQ ID NO: 1912656 - DNA, 25 bp, Homo sapien
tttcatcttgaatacgccttctggg

SEQ ID NO: 1912657 - DNA, 25 bp, Homo sapien
tgcctgctcgtatttgcaaagggag

SEQ ID NO: 1912658 - DNA, 25 bp, Homo sapien
tactgtgtaaatgcgcagaagaccg

SEQ ID NO: 1912659 - DNA, 25 bp, Homo sapien
ggaccatatctgacccaagtgctca

SEQ ID NO: 1912660 - DNA, 25 bp, Homo sapien
ccagatgtgtgtacgtttgcaaagc

SEQ ID NO: 1912661 - DNA, 25 bp, Homo sapien
gagaaaaagacatctgattttggtt

SEQ ID NO: 1912662 - DNA, 25 bp, Homo sapien
tgacagcagagaaaaagacatctga

SEQ ID NO: 1912663 - DNA, 25 bp, Homo sapien
cagcagagaaaaagacatctgattt

SEQ ID NO: 1912664 - DNA, 25 bp, Homo sapien
tgtggtcagtgctgacagcagagaa

SEQ ID NO: 1912665 - DNA, 25 bp, Homo sapien
atgactggcacctccaaatctaagg

SEQ ID NO: 1912666 - DNA, 25 bp, Homo sapien
aggaagccagctgatgatgactggc

SEQ ID NO: 1912667 - DNA, 25 bp, Homo sapien
ggcacctccaaatctaagggggcac

SEQ ID NO: 1912668 - DNA, 25 bp, Homo sapien
cacctccaaatctaagggggcacac

SEQ ID NO: 1912669 - DNA, 25 bp, Homo sapien
cttgaacctccgactccaagtaggg

SEQ ID NO: 1912670 - DNA, 25 bp, Homo sapien
gcacttgaacctccgactccaagta

SEQ ID NO: 1912671 - DNA, 25 bp, Homo sapien
tggcacttgaacctccgactccaag

SEQ ID NO: 1912672 - DNA, 25 bp, Homo sapien
ttggcacttgaacctccgactccaa

SEQ ID NO: 1912673 - DNA, 25 bp, Homo sapien
gtgtcggcgcatctagctccaccat

SEQ ID NO: 1912674 - DNA, 25 bp, Homo sapien
agctgccagtgatgaactgttagct

SEQ ID NO: 1912675 - DNA, 25 bp, Homo sapien
ttagctgtccttggactgtgtcggc

SEQ ID NO: 1912676 - DNA, 25 bp, Homo sapien
gccagtgatgaactgttagctgtcc

SEQ ID NO: 1912677 - DNA, 25 bp, Homo sapien
tccagccagggagattggtccctag

SEQ ID NO: 1912678 - DNA, 25 bp, Homo sapien
ggtgccaagatatccctagcagcga

SEQ ID NO: 1912679 - DNA, 25 bp, Homo sapien
gaaggaaccattgcctgtgggctgc

SEQ ID NO: 1912680 - DNA, 25 bp, Homo sapien
aatgttctcatgacccaaggctggt

SEQ ID NO: 1912681 - DNA, 25 bp, Homo sapien
tatgtgtggctcataaagagaggga

SEQ ID NO: 1912682 - DNA, 25 bp, Homo sapien
tcaaatgagacaacatggaggatgc

SEQ ID NO: 1912683 - DNA, 25 bp, Homo sapien
aaacactggtgagtaaatagacaac

SEQ ID NO: 1912684 - DNA, 25 bp, Homo sapien
gggaacaatacagcactctaatcag

SEQ ID NO: 1912685 - DNA, 25 bp, Homo sapien
cacccacggtttagtttcagatcag

SEQ ID NO: 1912686 - DNA, 25 bp, Homo sapien
gagagcccctttgactgcccgttga

SEQ ID NO: 1912687 - DNA, 25 bp, Homo sapien
tgtttgtataggcaggactcctgcg

SEQ ID NO: 1912688 - DNA, 25 bp, Homo sapien
tcagatcagcgcttttcagttccaa

SEQ ID NO: 1912689 - DNA, 25 bp, Homo sapien
ggccgtggttttaaatatcatgaaa

SEQ ID NO: 1912690 - DNA, 25 bp, Homo sapien
tacggccgtggttttaaatatcatg

SEQ ID NO: 1912691 - DNA, 25 bp, Homo sapien
cgtggttttaaatatcatgaaacta

SEQ ID NO: 1912692 - DNA, 25 bp, Homo sapien
atacggccgtggttttaaatatcat

SEQ ID NO: 1912693 - DNA, 25 bp, Homo sapien
gagtctcattcactcattgctcaat

SEQ ID NO: 1912694 - DNA, 25 bp, Homo sapien
tctcattcactcattgctcaatggt

SEQ ID NO: 1912695 - DNA, 25 bp, Homo sapien
gacggagtctcattcactcattgct

SEQ ID NO: 1912696 - DNA, 25 bp, Homo sapien
acggagtctcattcactcattgctc

SEQ ID NO: 1912697 - DNA, 25 bp, Homo sapien
tgctctgtgcgggggagctcaccac

SEQ ID NO: 1912698 - DNA, 25 bp, Homo sapien
gggagctcaccaccattagaggtgt

SEQ ID NO: 1912699 - DNA, 25 bp, Homo sapien
aaaggagtggggtgtgctctgtgcg

SEQ ID NO: 1912700 - DNA, 25 bp, Homo sapien
gctcaccaccattagaggtgtgcat

SEQ ID NO: 1912701 - DNA, 25 bp, Homo sapien
tctgcttcctgcattgaggtcttta

SEQ ID NO: 1912702 - DNA, 25 bp, Homo sapien
taaactgttgtctaccttccaggta

SEQ ID NO: 1912703 - DNA, 25 bp, Homo sapien
cctcagttctatgtgcaattgcaag

SEQ ID NO: 1912704 - DNA, 25 bp, Homo sapien
tgcaagagactctactgtcataaca

SEQ ID NO: 1912705 - DNA, 25 bp, Homo sapien
tggatgctcaagtactcagagttac

SEQ ID NO: 1912706 - DNA, 25 bp, Homo sapien
gaggacagacctctgataagaaggg

SEQ ID NO: 1912707 - DNA, 25 bp, Homo sapien
gatgctgtatccctaataagtctaa

SEQ ID NO: 1912708 - DNA, 25 bp, Homo sapien
caaaaaacattgaggagtacgtgct

SEQ ID NO: 1912709 - DNA, 25 bp, Homo sapien
tatagtaaccggaacaattatagcc

SEQ ID NO: 1912710 - DNA, 25 bp, Homo sapien
tgcaaagtttggaagatatcaagct

SEQ ID NO: 1912711 - DNA, 25 bp, Homo sapien
taaggtgcccattagttgatacatc

SEQ ID NO: 1912712 - DNA, 25 bp, Homo sapien
taaaattaacctgtggatctgaaat

SEQ ID NO: 1912713 - DNA, 25 bp, Homo sapien
aaatcaattggtttgataagaaagc

SEQ ID NO: 1912714 - DNA, 25 bp, Homo sapien
aaaatcaattggtttgataagaaag

SEQ ID NO: 1912715 - DNA, 25 bp, Homo sapien
tgtaataaaacctatgcctgaaaag

SEQ ID NO: 1912716 - DNA, 25 bp, Homo sapien
tgaaaagttggtggctattacacgg

SEQ ID NO: 1912717 - DNA, 25 bp, Homo sapien
agaagcaaaacctccttaacagttg

SEQ ID NO: 1912718 - DNA, 25 bp, Homo sapien
tcttttgggcaaacaagttgttatc

SEQ ID NO: 1912719 - DNA, 25 bp, Homo sapien
cattggtattaccaacaaattgcga

SEQ ID NO: 1912720 - DNA, 25 bp, Homo sapien
tgaagttaaggtactaagatttcac

SEQ ID NO: 1912721 - DNA, 25 bp, Homo sapien
ctaaatatgaggctataaatacagc

SEQ ID NO: 1912722 - DNA, 25 bp, Homo sapien
tgaagacacatcagtgcataaatgc

SEQ ID NO: 1912723 - DNA, 25 bp, Homo sapien
ttagtctgggtaaatcctgcacagg

SEQ ID NO: 1912724 - DNA, 25 bp, Homo sapien
gataaagatgacacagcttctgtga

SEQ ID NO: 1912725 - DNA, 25 bp, Homo sapien
gttggtcatattcctgtatgagtgc

SEQ ID NO: 1912726 - DNA, 25 bp, Homo sapien
acaggcatgttttttgtggcgtcca

SEQ ID NO: 1912727 - DNA, 25 bp, Homo sapien
ggcccacaggaggtacggaacacag

SEQ ID NO: 1912728 - DNA, 25 bp, Homo sapien
tatttgctaaagctaataacgaatg

SEQ ID NO: 1912729 - DNA, 25 bp, Homo sapien
ccacaggaggtacggaacacaggct

SEQ ID NO: 1912730 - DNA, 25 bp, Homo sapien
gctaataacgaatgagaatggccca

SEQ ID NO: 1912731 - DNA, 25 bp, Homo sapien
cactttagtaagtggcactgctaga

SEQ ID NO: 1912732 - DNA, 25 bp, Homo sapien
tactatgccacactgtcccaagcag

SEQ ID NO: 1912733 - DNA, 25 bp, Homo sapien
gtatagctacgattttctgaacact

SEQ ID NO: 1912734 - DNA, 25 bp, Homo sapien
tgaagggcggctgttaactaactac

SEQ ID NO: 1912735 - DNA, 25 bp, Homo sapien
tcctctaaccatgagtgcacaggcg

SEQ ID NO: 1912736 - DNA, 25 bp, Homo sapien
acaggcgaggtaaagactgtgtttg

SEQ ID NO: 1912737 - DNA, 25 bp, Homo sapien
tctacgaagatctgaaatttgtaca

SEQ ID NO: 1912738 - DNA, 25 bp, Homo sapien
ctttcaatatttctacgaagatctg

SEQ ID NO: 1912739 - DNA, 25 bp, Homo sapien
attacttctttctatgtataactat

SEQ ID NO: 1912740 - DNA, 25 bp, Homo sapien
ttacttctttctatgtataactata

SEQ ID NO: 1912741 - DNA, 25 bp, Homo sapien
taggcttgacacgagataatgaagt

SEQ ID NO: 1912742 - DNA, 25 bp, Homo sapien
taggaggaatgttaacatctgtcag

SEQ ID NO: 1912743 - DNA, 25 bp, Homo sapien
cttctaggaggaatgttaacatctg

SEQ ID NO: 1912744 - DNA, 25 bp, Homo sapien
cttgacacgagataatgaagttgag

SEQ ID NO: 1912745 - DNA, 25 bp, Homo sapien
tattagtgaaagttagtatcagaac

SEQ ID NO: 1912746 - DNA, 25 bp, Homo sapien
tcttttgtacactgttcttcagtgc

SEQ ID NO: 1912747 - DNA, 25 bp, Homo sapien
tacactttaaatgtagctcgattta

SEQ ID NO: 1912748 - DNA, 25 bp, Homo sapien
tagctcgatttattcagcaggtagt

SEQ ID NO: 1912749 - DNA, 25 bp, Homo sapien
catggctggccctacagtcattctt

SEQ ID NO: 1912750 - DNA, 25 bp, Homo sapien
tcttttggaccagttaatgaggagg

SEQ ID NO: 1912751 - DNA, 25 bp, Homo sapien
gcaatctctgataccaaaaagccac

SEQ ID NO: 1912752 - DNA, 25 bp, Homo sapien
taaaattctgcgtgatcactccaag

SEQ ID NO: 1912753 - DNA, 25 bp, Homo sapien
tattcattgcatcaaagggcttctt

SEQ ID NO: 1912754 - DNA, 25 bp, Homo sapien
ctcgttaggttgaggagcaaatttg

SEQ ID NO: 1912755 - DNA, 25 bp, Homo sapien
gaagtaaccagactctttggcttca

SEQ ID NO: 1912756 - DNA, 25 bp, Homo sapien
cagaacttgaagtaaccagactctt

SEQ ID NO: 1912757 - DNA, 25 bp, Homo sapien
tgaagagaacgtttcatataaacac

SEQ ID NO: 1912758 - DNA, 25 bp, Homo sapien
tgatattctactaggaaagagaaag

SEQ ID NO: 1912759 - DNA, 25 bp, Homo sapien
ttaagaagagtggatgtagatgata

SEQ ID NO: 1912760 - DNA, 25 bp, Homo sapien
tgaaaagtgaagagaacgtttcata

SEQ ID NO: 1912761 - DNA, 25 bp, Homo sapien
acatttattcataagttccaatgtc

SEQ ID NO: 1912762 - DNA, 25 bp, Homo sapien
ttgattgtcaatgggcaatacacag

SEQ ID NO: 1912763 - DNA, 25 bp, Homo sapien
cagaaggataaatggaagtcacaaa

SEQ ID NO: 1912764 - DNA, 25 bp, Homo sapien
cacaaatctgtatacttctgggaat

SEQ ID NO: 1912765 - DNA, 25 bp, Homo sapien
taaggtgaggttatgacatcatcct

SEQ ID NO: 1912766 - DNA, 25 bp, Homo sapien
aatgtgccaagtccagatcctgttc

SEQ ID NO: 1912767 - DNA, 25 bp, Homo sapien
taagcatgcctacctcgaatttcaa

SEQ ID NO: 1912768 - DNA, 25 bp, Homo sapien
taaaagcagaaactcgaggaatctc

SEQ ID NO: 1912769 - DNA, 25 bp, Homo sapien
cgaataatgccaccacgaaatgggc

SEQ ID NO: 1912770 - DNA, 25 bp, Homo sapien
cacattgttgccagtaagaagcact

SEQ ID NO: 1912771 - DNA, 25 bp, Homo sapien
tttaaagacatggttacacagcaat

SEQ ID NO: 1912772 - DNA, 25 bp, Homo sapien
taaaatcttaatctcaggttggagg

SEQ ID NO: 1912773 - DNA, 25 bp, Homo sapien
tcttaaccgatgattatgaggatct

SEQ ID NO: 1912774 - DNA, 25 bp, Homo sapien
gcaggttaattatactagcacagaa

SEQ ID NO: 1912775 - DNA, 25 bp, Homo sapien
tcaaaagctcatacatcctgaaaag

SEQ ID NO: 1912776 - DNA, 25 bp, Homo sapien
ccagtatagttctgttgactcttaa

SEQ ID NO: 1912777 - DNA, 25 bp, Homo sapien
tagttctatctttatcaagcacagg

SEQ ID NO: 1912778 - DNA, 25 bp, Homo sapien
gacttacgtttgcaaaatgaattcc

SEQ ID NO: 1912779 - DNA, 25 bp, Homo sapien
cctttaacactgttacaggcaaatg

SEQ ID NO: 1912780 - DNA, 25 bp, Homo sapien
taacactgttacaggcaaatgagtg

SEQ ID NO: 1912781 - DNA, 25 bp, Homo sapien
ttatcctttaacactgttacaggca

SEQ ID NO: 1912782 - DNA, 25 bp, Homo sapien
cactgttacaggcaaatgagtgaaa

SEQ ID NO: 1912783 - DNA, 25 bp, Homo sapien
taaagaaacactgcaagcaatcaca

SEQ ID NO: 1912784 - DNA, 25 bp, Homo sapien
actgccgaaaactttgtgacccacg

SEQ ID NO: 1912785 - DNA, 25 bp, Homo sapien
tctggtcttggtaaagactgccgaa

SEQ ID NO: 1912786 - DNA, 25 bp, Homo sapien
tcctcccatggaatgtattataaag

SEQ ID NO: 1912787 - DNA, 25 bp, Homo sapien
gtggtccctgcagaatttcattcac

SEQ ID NO: 1912788 - DNA, 25 bp, Homo sapien
caaatacatctctcagtggtccctg

SEQ ID NO: 1912789 - DNA, 25 bp, Homo sapien
aaatacatctctcagtggtccctgc

SEQ ID NO: 1912790 - DNA, 25 bp, Homo sapien
cagtggtccctgcagaatttcattc

SEQ ID NO: 1912791 - DNA, 25 bp, Homo sapien
tcactacaatgtggctggttccatg

SEQ ID NO: 1912792 - DNA, 25 bp, Homo sapien
gtagttcgttacagacaatcacaga

SEQ ID NO: 1912793 - DNA, 25 bp, Homo sapien
tgttaggtggacacaaatgtctgct

SEQ ID NO: 1912794 - DNA, 25 bp, Homo sapien
tatgggctaagaacctgaagtactt

SEQ ID NO: 1912795 - DNA, 25 bp, Homo sapien
ttcccttggaaatacttccaccatc

SEQ ID NO: 1912796 - DNA, 25 bp, Homo sapien
ccttggaaatacttccaccatcacc

SEQ ID NO: 1912797 - DNA, 25 bp, Homo sapien
tggaaatacttccaccatcaccaac

SEQ ID NO: 1912798 - DNA, 25 bp, Homo sapien
tcccttggaaatacttccaccatca

SEQ ID NO: 1912799 - DNA, 25 bp, Homo sapien
ggtcataagatcttccatggctaat

SEQ ID NO: 1912800 - DNA, 25 bp, Homo sapien
tggtcataagatcttccatggctaa

SEQ ID NO: 1912801 - DNA, 25 bp, Homo sapien
gaaatggtcataagatcttccatgg

SEQ ID NO: 1912802 - DNA, 25 bp, Homo sapien
aatggtcataagatcttccatggct

SEQ ID NO: 1912803 - DNA, 25 bp, Homo sapien
agaagtcacactaaagggaaatctg

SEQ ID NO: 1912804 - DNA, 25 bp, Homo sapien
tgcattaacaagatgccctctggga

SEQ ID NO: 1912805 - DNA, 25 bp, Homo sapien
aacacaacttcgcagctggctattt

SEQ ID NO: 1912806 - DNA, 25 bp, Homo sapien
gaaacttaaagtatcacactgtgac

SEQ ID NO: 1912807 - DNA, 25 bp, Homo sapien
agaagctgcttattgcctcatcata

SEQ ID NO: 1912808 - DNA, 25 bp, Homo sapien
tccacatttctaaagaagctgctta

SEQ ID NO: 1912809 - DNA, 25 bp, Homo sapien
aaagaagctgcttattgcctcatca

SEQ ID NO: 1912810 - DNA, 25 bp, Homo sapien
tttctaaagaagctgcttattgcct

SEQ ID NO: 1912811 - DNA, 25 bp, Homo sapien
tctttactgggaagatcccatgcat

SEQ ID NO: 1912812 - DNA, 25 bp, Homo sapien
cttaaacgggtcagatgaaagctca

SEQ ID NO: 1912813 - DNA, 25 bp, Homo sapien
tttcctgcgtatgggctggaagacc

SEQ ID NO: 1912814 - DNA, 25 bp, Homo sapien
aagctcaagtcgattatttcctgcg

SEQ ID NO: 1912815 - DNA, 25 bp, Homo sapien
cgagggggctcgcggcggcgggcgg

SEQ ID NO: 1912816 - DNA, 25 bp, Homo sapien
gcgagggggctcgcggcggcgggcg

SEQ ID NO: 1912817 - DNA, 25 bp, Homo sapien
aggcgagggggctcgcggcggcggg

SEQ ID NO: 1912818 - DNA, 25 bp, Homo sapien
ggcgagggggctcgcggcggcgggc

SEQ ID NO: 1912819 - DNA, 25 bp, Homo sapien
tgaccgcggcgtgctcccttagtgc

SEQ ID NO: 1912820 - DNA, 25 bp, Homo sapien
ggaaagagaataggacattaagcag

SEQ ID NO: 1912821 - DNA, 25 bp, Homo sapien
taagcaggaaacatggccgctggat

SEQ ID NO: 1912822 - DNA, 25 bp, Homo sapien
gaaacatggccgctggattccgcgg

SEQ ID NO: 1912823 - DNA, 25 bp, Homo sapien
gattccgcggcgaccaggtctctac

SEQ ID NO: 1912824 - DNA, 25 bp, Homo sapien
cctgtacgaccaccgactgggtcat

SEQ ID NO: 1912825 - DNA, 25 bp, Homo sapien
ggagcttgctagcccgcggccgctt

SEQ ID NO: 1912826 - DNA, 25 bp, Homo sapien
gctccgggagcttgctagcccgcgg

SEQ ID NO: 1912827 - DNA, 25 bp, Homo sapien
cgggagcttgctagcccgcggccgc

SEQ ID NO: 1912828 - DNA, 25 bp, Homo sapien
tccgggagcttgctagcccgcggcc

SEQ ID NO: 1912829 - DNA, 25 bp, Homo sapien
cccccagcaacggcgctctgctaga

SEQ ID NO: 1912830 - DNA, 25 bp, Homo sapien
tcccccagcaacggcgctctgctag

SEQ ID NO: 1912831 - DNA, 25 bp, Homo sapien
ccccagcaacggcgctctgctagag

SEQ ID NO: 1912832 - DNA, 25 bp, Homo sapien
aagcctctgccgtcgctaagcacgt

SEQ ID NO: 1912833 - DNA, 25 bp, Homo sapien
ggttttccgtcagaaggccgcgcaa

SEQ ID NO: 1912834 - DNA, 25 bp, Homo sapien
gcacgtctgtaggttcaggctaagg

SEQ ID NO: 1912835 - DNA, 25 bp, Homo sapien
aagtgcacttgcgtgtcaccgttac

SEQ ID NO: 1912836 - DNA, 25 bp, Homo sapien
tctggactgtatatcctagctgcct

SEQ ID NO: 1912837 - DNA, 25 bp, Homo sapien
tgggcttctggactgtatatcctag

SEQ ID NO: 1912838 - DNA, 25 bp, Homo sapien
tggactgtatatcctagctgccttg

SEQ ID NO: 1912839 - DNA, 25 bp, Homo sapien
gcttctggactgtatatcctagctg

SEQ ID NO: 1912840 - DNA, 25 bp, Homo sapien
caactgtttcttccggctgctaggg

SEQ ID NO: 1912841 - DNA, 25 bp, Homo sapien
agctctctgtaaactatggtctggc

SEQ ID NO: 1912842 - DNA, 25 bp, Homo sapien
caaataggtcctagggcaacctggt

SEQ ID NO: 1912843 - DNA, 25 bp, Homo sapien
gctgctagggtcatgctacattcca

SEQ ID NO: 1912844 - DNA, 25 bp, Homo sapien
aagtagttgatttcctgtgtttctt

SEQ ID NO: 1912845 - DNA, 25 bp, Homo sapien
gtagttgatttcctgtgtttcttat

SEQ ID NO: 1912846 - DNA, 25 bp, Homo sapien
gatttcctgtgtttcttatttagaa

SEQ ID NO: 1912847 - DNA, 25 bp, Homo sapien
ttgatttcctgtgtttcttatttag

SEQ ID NO: 1912848 - DNA, 25 bp, Homo sapien
tatgtaagttagtaagtctcttcaa

SEQ ID NO: 1912849 - DNA, 25 bp, Homo sapien
tactgatagaccaaacaaaagggct

SEQ ID NO: 1912850 - DNA, 25 bp, Homo sapien
gattgaaagttatcttccctggaag

SEQ ID NO: 1912851 - DNA, 25 bp, Homo sapien
aatattcttcttatactgatagacc

SEQ ID NO: 1912852 - DNA, 25 bp, Homo sapien
caatacaagtaagtttgccactcct

SEQ ID NO: 1912853 - DNA, 25 bp, Homo sapien
aatttcaccagtaggaattgcgtgt

SEQ ID NO: 1912854 - DNA, 25 bp, Homo sapien
ccagtaggaattgcgtgtgctctca

SEQ ID NO: 1912855 - DNA, 25 bp, Homo sapien
tgcgtgtgctctcaatacaagtaag

SEQ ID NO: 1912856 - DNA, 25 bp, Homo sapien
cattgcagacactttggattcaagg

SEQ ID NO: 1912857 - DNA, 25 bp, Homo sapien
cttccacccgaaggaagagttactg

SEQ ID NO: 1912858 - DNA, 25 bp, Homo sapien
tccggtccctgatgattcgtttaag

SEQ ID NO: 1912859 - DNA, 25 bp, Homo sapien
tgttcaactcgatgaaagcttccac

SEQ ID NO: 1912860 - DNA, 25 bp, Homo sapien
gccaagcgtggtgtcagtagagatt

SEQ ID NO: 1912861 - DNA, 25 bp, Homo sapien
tccatcaatcacaaagtggcgtatg

SEQ ID NO: 1912862 - DNA, 25 bp, Homo sapien
tgggtgtccatcaatcacaaagtgg

SEQ ID NO: 1912863 - DNA, 25 bp, Homo sapien
tcacaaagtggcgtatgcagcctgt

SEQ ID NO: 1912864 - DNA, 25 bp, Homo sapien
tatttgcttgtgaagtcctatggac

SEQ ID NO: 1912865 - DNA, 25 bp, Homo sapien
gcaattgaggtattccaagcccaaa

SEQ ID NO: 1912866 - DNA, 25 bp, Homo sapien
tagaacatagttataattgactcat

SEQ ID NO: 1912867 - DNA, 25 bp, Homo sapien
tacttcctggtaaaagtatacatat

SEQ ID NO: 1912868 - DNA, 25 bp, Homo sapien
atcctttggcttatgagggaaatca

SEQ ID NO: 1912869 - DNA, 25 bp, Homo sapien
catcctttggcttatgagggaaatc

SEQ ID NO: 1912870 - DNA, 25 bp, Homo sapien
tcctttggcttatgagggaaatcat

SEQ ID NO: 1912871 - DNA, 25 bp, Homo sapien
gattcaggggtccaaccacatggtt

SEQ ID NO: 1912872 - DNA, 25 bp, Homo sapien
tgtgatcaattggttttggattcag

SEQ ID NO: 1912873 - DNA, 25 bp, Homo sapien
tccacatccaactgaaccacattag

SEQ ID NO: 1912874 - DNA, 25 bp, Homo sapien
aaccacatggttcacttcagagtcc

SEQ ID NO: 1912875 - DNA, 25 bp, Homo sapien
agactctgcttgggtgtaactgagg

SEQ ID NO: 1912876 - DNA, 25 bp, Homo sapien
ggaaaaatctctgatgccattattg

SEQ ID NO: 1912877 - DNA, 25 bp, Homo sapien
tggaaaaatctctgatgccattatt

SEQ ID NO: 1912878 - DNA, 25 bp, Homo sapien
gcttgggtgtaactgaggtggaaaa

SEQ ID NO: 1912879 - DNA, 25 bp, Homo sapien
ctgcaaaagataggacacattgtat

SEQ ID NO: 1912880 - DNA, 25 bp, Homo sapien
tgcaaaagataggacacattgtatg

SEQ ID NO: 1912881 - DNA, 25 bp, Homo sapien
tttgaagctagacagccagtctcct

SEQ ID NO: 1912882 - DNA, 25 bp, Homo sapien
taggtaaagcttagaatagtaccca

SEQ ID NO: 1912883 - DNA, 25 bp, Homo sapien
tacctacatcatggagataattggg

SEQ ID NO: 1912884 - DNA, 25 bp, Homo sapien
agtattggtgaagaacatggacttt

SEQ ID NO: 1912885 - DNA, 25 bp, Homo sapien
cgtggaccagggttccggaactgct

SEQ ID NO: 1912886 - DNA, 25 bp, Homo sapien
tcatgtgaacatttaggtactcccc

SEQ ID NO: 1912887 - DNA, 25 bp, Homo sapien
ccattgacactgtggccgtggacca

SEQ ID NO: 1912888 - DNA, 25 bp, Homo sapien
cggaactgcttctgggacggacttc

SEQ ID NO: 1912889 - DNA, 25 bp, Homo sapien
cgttgtctgctggtgttgcaagtca

SEQ ID NO: 1912890 - DNA, 25 bp, Homo sapien
catcatctggcatagggactgcctt

SEQ ID NO: 1912891 - DNA, 25 bp, Homo sapien
ggccacggagcagcatagacattct

SEQ ID NO: 1912892 - DNA, 25 bp, Homo sapien
tcatgccaagaaggagcagagcaag

SEQ ID NO: 1912893 - DNA, 25 bp, Homo sapien
gaaccacgtatcctccttctgttga

SEQ ID NO: 1912894 - DNA, 25 bp, Homo sapien
tcaaagcaaggggtcacactgaatg

SEQ ID NO: 1912895 - DNA, 25 bp, Homo sapien
cacgtatcctccttctgttgaaaag

SEQ ID NO: 1912896 - DNA, 25 bp, Homo sapien
ctagaaccacgtatcctccttctgt

SEQ ID NO: 1912897 - DNA, 25 bp, Homo sapien
aagcagaggtgatggaggccccatt

SEQ ID NO: 1912898 - DNA, 25 bp, Homo sapien
gagattgctgagacagccactaaaa

SEQ ID NO: 1912899 - DNA, 25 bp, Homo sapien
cagaggtgatggaggccccattgag

SEQ ID NO: 1912900 - DNA, 25 bp, Homo sapien
ccccattgagctggagattgctgag

SEQ ID NO: 1912901 - DNA, 25 bp, Homo sapien
tcctaatctgtgagacgagggcctc

SEQ ID NO: 1912902 - DNA, 25 bp, Homo sapien
tctggctctaatggtcaatggctct

SEQ ID NO: 1912903 - DNA, 25 bp, Homo sapien
caatggctctacctggtcatgcctg

SEQ ID NO: 1912904 - DNA, 25 bp, Homo sapien
agacaggcagcccataagacagtac

SEQ ID NO: 1912905 - DNA, 25 bp, Homo sapien
gcttcagtaggaggaagactttctt

SEQ ID NO: 1912906 - DNA, 25 bp, Homo sapien
catcaattaccagtcggccactgct

SEQ ID NO: 1912907 - DNA, 25 bp, Homo sapien
tttccaggtagcttcagtaggagga

SEQ ID NO: 1912908 - DNA, 25 bp, Homo sapien
tttcttctaggactcggagaccatc

SEQ ID NO: 1912909 - DNA, 25 bp, Homo sapien
catgccatgggaggaacgagttctc

SEQ ID NO: 1912910 - DNA, 25 bp, Homo sapien
tgggccaaaaatagagtcatgaagt

SEQ ID NO: 1912911 - DNA, 25 bp, Homo sapien
catgtaaaccaagcggccatgggcc

SEQ ID NO: 1912912 - DNA, 25 bp, Homo sapien
ttttttgtgaccaacattaaacatg

SEQ ID NO: 1912913 - DNA, 25 bp, Homo sapien
ctgttttatgaaccttacaattgga

SEQ ID NO: 1912914 - DNA, 25 bp, Homo sapien
aaaacgatgacatgtgacaaacaaa

SEQ ID NO: 1912915 - DNA, 25 bp, Homo sapien
ggagtctaggagtatagtgtgttac

SEQ ID NO: 1912916 - DNA, 25 bp, Homo sapien
cttttgatagcataaatcatgtact

SEQ ID NO: 1912917 - DNA, 25 bp, Homo sapien
ggagtattccgctctgggagtttca

SEQ ID NO: 1912918 - DNA, 25 bp, Homo sapien
aactcttggcggctgttggctgttc

SEQ ID NO: 1912919 - DNA, 25 bp, Homo sapien
taggcgtgctctattgctctagggc

SEQ ID NO: 1912920 - DNA, 25 bp, Homo sapien
cagagcaacaggatcccatgaaggt

SEQ ID NO: 1912921 - DNA, 25 bp, Homo sapien
ttcagtataccgttggaaatcttca

SEQ ID NO: 1912922 - DNA, 25 bp, Homo sapien
caatggtgaagactcaatgggacac

SEQ ID NO: 1912923 - DNA, 25 bp, Homo sapien
aagtgtggaccttttcagtataccg

SEQ ID NO: 1912924 - DNA, 25 bp, Homo sapien
tctgacttgctttaggcttggataa

SEQ ID NO: 1912925 - DNA, 25 bp, Homo sapien
tggtaaagtaggcattacttatgca

SEQ ID NO: 1912926 - DNA, 25 bp, Homo sapien
taaagtaggcattacttatgcagcc

SEQ ID NO: 1912927 - DNA, 25 bp, Homo sapien
agtaggcattacttatgcagccagt

SEQ ID NO: 1912928 - DNA, 25 bp, Homo sapien
aagtaggcattacttatgcagccag

SEQ ID NO: 1912929 - DNA, 25 bp, Homo sapien
cactgattggtgagccaccgaagta

SEQ ID NO: 1912930 - DNA, 25 bp, Homo sapien
gcttttatctactatcagttcatat

SEQ ID NO: 1912931 - DNA, 25 bp, Homo sapien
tggtgagccaccgaagtaaaacttc

SEQ ID NO: 1912932 - DNA, 25 bp, Homo sapien
tgagcactgattggtgagccaccga

SEQ ID NO: 1912933 - DNA, 25 bp, Homo sapien
gacccactctaggttggataagcag

SEQ ID NO: 1912934 - DNA, 25 bp, Homo sapien
tctttacataccacagagctagcat

SEQ ID NO: 1912935 - DNA, 25 bp, Homo sapien
agagctagcattttaccttgaccca

SEQ ID NO: 1912936 - DNA, 25 bp, Homo sapien
tgaaaagacagcgagttgccaaact

SEQ ID NO: 1912937 - DNA, 25 bp, Homo sapien
tgttttctatgtccacaaaagtgga

SEQ ID NO: 1912938 - DNA, 25 bp, Homo sapien
caaaagtggacataggatagcagca

SEQ ID NO: 1912939 - DNA, 25 bp, Homo sapien
taaagatgaagttcgagcttttaaa

SEQ ID NO: 1912940 - DNA, 25 bp, Homo sapien
tattttgatccttactggaagtggg

SEQ ID NO: 1912941 - DNA, 25 bp, Homo sapien
tgggacagcccatcattgtactgct

SEQ ID NO: 1912942 - DNA, 25 bp, Homo sapien
cagagctaatgacgaagtgggacag

SEQ ID NO: 1912943 - DNA, 25 bp, Homo sapien
tctactgactgaactttgattccct

SEQ ID NO: 1912944 - DNA, 25 bp, Homo sapien
cctttacatccatgatgacagtacc

SEQ ID NO: 1912945 - DNA, 25 bp, Homo sapien
aatgcaagcacaggcatgtaagtag

SEQ ID NO: 1912946 - DNA, 25 bp, Homo sapien
tgcaagcacaggcatgtaagtaggg

SEQ ID NO: 1912947 - DNA, 25 bp, Homo sapien
aagcacaggcatgtaagtagggagt

SEQ ID NO: 1912948 - DNA, 25 bp, Homo sapien
gaaatgcaagcacaggcatgtaagt

SEQ ID NO: 1912949 - DNA, 25 bp, Homo sapien
gaagcataatagaatagtaacccat

SEQ ID NO: 1912950 - DNA, 25 bp, Homo sapien
catttggttgtaatgttcggaaatt

SEQ ID NO: 1912951 - DNA, 25 bp, Homo sapien
gaattgaagcaatgaagctctgtcc

SEQ ID NO: 1912952 - DNA, 25 bp, Homo sapien
tgtccattgaaatatgctctgcgag

SEQ ID NO: 1912953 - DNA, 25 bp, Homo sapien
tcttctgggcatccataaccaactc

SEQ ID NO: 1912954 - DNA, 25 bp, Homo sapien
ccttcatgcatcctctgaagttgat

SEQ ID NO: 1912955 - DNA, 25 bp, Homo sapien
tgctccagtaaattgaagtccttct

SEQ ID NO: 1912956 - DNA, 25 bp, Homo sapien
ttttggaactggaagcccttcatgc

SEQ ID NO: 1912957 - DNA, 25 bp, Homo sapien
acatgccttctgtcaactaccaaga

SEQ ID NO: 1912958 - DNA, 25 bp, Homo sapien
gccttctgtcaactaccaagatcat

SEQ ID NO: 1912959 - DNA, 25 bp, Homo sapien
ggaggagctcctccaatgtatatat

SEQ ID NO: 1912960 - DNA, 25 bp, Homo sapien
ctggaggagctcctccaatgtatat

SEQ ID NO: 1912961 - DNA, 25 bp, Homo sapien
tgtgagcatgtgtgttacgcacact

SEQ ID NO: 1912962 - DNA, 25 bp, Homo sapien
tgtgtgttacgcacacttaacatga

SEQ ID NO: 1912963 - DNA, 25 bp, Homo sapien
gagcatgtgtgttacgcacacttaa

SEQ ID NO: 1912964 - DNA, 25 bp, Homo sapien
tgtgttacgcacacttaacatgaga

SEQ ID NO: 1912965 - DNA, 25 bp, Homo sapien
tgtaaaccattctcatgaggctatg

SEQ ID NO: 1912966 - DNA, 25 bp, Homo sapien
gaacttactcacctagcacaactga

SEQ ID NO: 1912967 - DNA, 25 bp, Homo sapien
ggtgacccctattgtattcccaagc

SEQ ID NO: 1912968 - DNA, 25 bp, Homo sapien
gctgtacagcagatttcgagaactt

SEQ ID NO: 1912969 - DNA, 25 bp, Homo sapien
catgtaggtaaccattgcgcatttc

SEQ ID NO: 1912970 - DNA, 25 bp, Homo sapien
taacgtatcttcaagatgcacaggg

SEQ ID NO: 1912971 - DNA, 25 bp, Homo sapien
taatttgagctttctttaacgtatc

SEQ ID NO: 1912972 - DNA, 25 bp, Homo sapien
gtattttgcatcattaatttgagct

SEQ ID NO: 1912973 - DNA, 25 bp, Homo sapien
tagtaggcacagctaatgatatggt

SEQ ID NO: 1912974 - DNA, 25 bp, Homo sapien
caacctttgccacttggtgaatgtg

SEQ ID NO: 1912975 - DNA, 25 bp, Homo sapien
aataaactggacttaggacaagact

SEQ ID NO: 1912976 - DNA, 25 bp, Homo sapien
gatacctggttagcttacaagaact

SEQ ID NO: 1912977 - DNA, 25 bp, Homo sapien
ttctatgtcaaagcgagtcacctga

SEQ ID NO: 1912978 - DNA, 25 bp, Homo sapien
catcgaagaagtaactggcagcccg

SEQ ID NO: 1912979 - DNA, 25 bp, Homo sapien
cattgaccatcaggagaataaggcc

SEQ ID NO: 1912980 - DNA, 25 bp, Homo sapien
gaataaggccgttgtcagctggtgt

SEQ ID NO: 1912981 - DNA, 25 bp, Homo sapien
aagctgatcacatcattattcaaag

SEQ ID NO: 1912982 - DNA, 25 bp, Homo sapien
aagccaggcaggtttaagctggtag

SEQ ID NO: 1912983 - DNA, 25 bp, Homo sapien
gatgtgcttaaagttgtacaagctg

SEQ ID NO: 1912984 - DNA, 25 bp, Homo sapien
gggtccatattatagatgtgcttaa

SEQ ID NO: 1912985 - DNA, 25 bp, Homo sapien
acttttcctctgctgtgctacttag

SEQ ID NO: 1912986 - DNA, 25 bp, Homo sapien
ggaaggcactccaccaacataaaac

SEQ ID NO: 1912987 - DNA, 25 bp, Homo sapien
gctacttagactcgggactgttaaa

SEQ ID NO: 1912988 - DNA, 25 bp, Homo sapien
cttgaagttggaaggcactccacca

SEQ ID NO: 1912989 - DNA, 25 bp, Homo sapien
atgtgcacgttcaacaggtttcttg

SEQ ID NO: 1912990 - DNA, 25 bp, Homo sapien
cacgttcaacaggtttcttgtgata

SEQ ID NO: 1912991 - DNA, 25 bp, Homo sapien
ttcaacaggtttcttgtgatatgtg

SEQ ID NO: 1912992 - DNA, 25 bp, Homo sapien
tgcacgttcaacaggtttcttgtga

SEQ ID NO: 1912993 - DNA, 25 bp, Homo sapien
caggaactgacgggcttggagtcca

SEQ ID NO: 1912994 - DNA, 25 bp, Homo sapien
tgctgaagtaagcaggccaggaact

SEQ ID NO: 1912995 - DNA, 25 bp, Homo sapien
ttgcaagacccatatactctttttt

SEQ ID NO: 1912996 - DNA, 25 bp, Homo sapien
aattatagacgtataccagattatc

SEQ ID NO: 1912997 - DNA, 25 bp, Homo sapien
gatctgcagtctcggtcagttccgg

SEQ ID NO: 1912998 - DNA, 25 bp, Homo sapien
tgcttccgaggtacaggataaactg

SEQ ID NO: 1912999 - DNA, 25 bp, Homo sapien
ggtttcatgtacaggctcagagacg

SEQ ID NO: 1913000 - DNA, 25 bp, Homo sapien
catccatactggttctcgagtgcac

SEQ ID NO: 1913001 - DNA, 25 bp, Homo sapien
tcaaccgtacgaagctgatccagga

SEQ ID NO: 1913002 - DNA, 25 bp, Homo sapien
cagaaacgttgcttgcaggtcgctt

SEQ ID NO: 1913003 - DNA, 25 bp, Homo sapien
ggcaacacttctggtctgagcaatg

SEQ ID NO: 1913004 - DNA, 25 bp, Homo sapien
gcaatgagctctcggatcctctgga

SEQ ID NO: 1913005 - DNA, 25 bp, Homo sapien
taagctcatacttggctcacagcca

SEQ ID NO: 1913006 - DNA, 25 bp, Homo sapien
gagagtaacgctactgacccctgta

SEQ ID NO: 1913007 - DNA, 25 bp, Homo sapien
ggctcaacatggctcaggcgtgctg

SEQ ID NO: 1913008 - DNA, 25 bp, Homo sapien
aaaatgtataactgccctgccgatg

SEQ ID NO: 1913009 - DNA, 25 bp, Homo sapien
gagtgggatccagcagtctgtttaa

SEQ ID NO: 1913010 - DNA, 25 bp, Homo sapien
gtcccgagcccactgaatcagcagt

SEQ ID NO: 1913011 - DNA, 25 bp, Homo sapien
gcacactagtatttgagaaccattg

SEQ ID NO: 1913012 - DNA, 25 bp, Homo sapien
ttttccagagtttcattgactgaac

SEQ ID NO: 1913013 - DNA, 25 bp, Homo sapien
tgttggcttcctcggtgatcagtct

SEQ ID NO: 1913014 - DNA, 25 bp, Homo sapien
tgcacctccatcgtcgtcctgttgg

SEQ ID NO: 1913015 - DNA, 25 bp, Homo sapien
gaccagttggttagattgttggcca

SEQ ID NO: 1913016 - DNA, 25 bp, Homo sapien
tgatcagtctagactgccccaggcg

SEQ ID NO: 1913017 - DNA, 25 bp, Homo sapien
gaagttataccatcacctaagtgaa

SEQ ID NO: 1913018 - DNA, 25 bp, Homo sapien
ggattggttatatgacctaatttgg

SEQ ID NO: 1913019 - DNA, 25 bp, Homo sapien
tgaagttgtgccctaatttggttat

SEQ ID NO: 1913020 - DNA, 25 bp, Homo sapien
tttataaatttgaagttgtgcccta

SEQ ID NO: 1913021 - DNA, 25 bp, Homo sapien
cttgtagttgcttaacggcatcact

SEQ ID NO: 1913022 - DNA, 25 bp, Homo sapien
cacccacacgcctgctagtgtcagc

SEQ ID NO: 1913023 - DNA, 25 bp, Homo sapien
cttttccttgctagggctccaccca

SEQ ID NO: 1913024 - DNA, 25 bp, Homo sapien
actgagtctggttttaagggcactt

SEQ ID NO: 1913025 - DNA, 25 bp, Homo sapien
aacttctcatttgtacgatgcagtc

SEQ ID NO: 1913026 - DNA, 25 bp, Homo sapien
tgaatactctgaacatagatcaaca

SEQ ID NO: 1913027 - DNA, 25 bp, Homo sapien
gatgcctcgaaaaggattccatttc

SEQ ID NO: 1913028 - DNA, 25 bp, Homo sapien
tactagtggagccaagatgcctcga

SEQ ID NO: 1913029 - DNA, 25 bp, Homo sapien
ctctggcttgattgaggaggttctc

SEQ ID NO: 1913030 - DNA, 25 bp, Homo sapien
ctggcttgattgaggaggttctcac

SEQ ID NO: 1913031 - DNA, 25 bp, Homo sapien
agttctctggcttgattgaggaggt

SEQ ID NO: 1913032 - DNA, 25 bp, Homo sapien
cttgcagttctctggcttgattgag

SEQ ID NO: 1913033 - DNA, 25 bp, Homo sapien
aatgatttgagtatcaatcccactc

SEQ ID NO: 1913034 - DNA, 25 bp, Homo sapien
gatttgagtatcaatcccactcacc

SEQ ID NO: 1913035 - DNA, 25 bp, Homo sapien
tttgagtatcaatcccactcaccgc

SEQ ID NO: 1913036 - DNA, 25 bp, Homo sapien
gtaaatgatttgagtatcaatccca

SEQ ID NO: 1913037 - DNA, 25 bp, Homo sapien
cattggcttcactaacataattaac

SEQ ID NO: 1913038 - DNA, 25 bp, Homo sapien
tagacatttgatgcatccaaagcct

SEQ ID NO: 1913039 - DNA, 25 bp, Homo sapien
tcataaattcggtcagtggtgttca

SEQ ID NO: 1913040 - DNA, 25 bp, Homo sapien
ttctgtaccagcccgttcatatctg

SEQ ID NO: 1913041 - DNA, 25 bp, Homo sapien
gtcctgtgcatggtcaatagcttct

SEQ ID NO: 1913042 - DNA, 25 bp, Homo sapien
tatttctgcataaatccctgacgca

SEQ ID NO: 1913043 - DNA, 25 bp, Homo sapien
ttcttggactaaatcatggctgagg

SEQ ID NO: 1913044 - DNA, 25 bp, Homo sapien
ttgtagttcacttttggctccatct

SEQ ID NO: 1913045 - DNA, 25 bp, Homo sapien
tgttaaaactattctgggcagaacc

SEQ ID NO: 1913046 - DNA, 25 bp, Homo sapien
gaataactctataggctctgctcaa

SEQ ID NO: 1913047 - DNA, 25 bp, Homo sapien
cacagctgcttaatactgggactga

SEQ ID NO: 1913048 - DNA, 25 bp, Homo sapien
taagccttacggtgttgcctgtctg

SEQ ID NO: 1913049 - DNA, 25 bp, Homo sapien
gcaacctgttttcaaggccgggcag

SEQ ID NO: 1913050 - DNA, 25 bp, Homo sapien
cataacttgaggagtgaaaccctgc

SEQ ID NO: 1913051 - DNA, 25 bp, Homo sapien
tcaggtaggtacaacagaggaacag

SEQ ID NO: 1913052 - DNA, 25 bp, Homo sapien
aagtgggttcccaccagtcgcatgc

SEQ ID NO: 1913053 - DNA, 25 bp, Homo sapien
gagtccgcagatgtgctcagagaca

SEQ ID NO: 1913054 - DNA, 25 bp, Homo sapien
ctgaaagagttagacgaggtgttgt

SEQ ID NO: 1913055 - DNA, 25 bp, Homo sapien
gtgttgtcagagagtccgcagatgt

SEQ ID NO: 1913056 - DNA, 25 bp, Homo sapien
tgtgctcagagacatgttcaccact

SEQ ID NO: 1913057 - DNA, 25 bp, Homo sapien
ttgttccctcactctttcctgttgt

SEQ ID NO: 1913058 - DNA, 25 bp, Homo sapien
tgttccctcactctttcctgttgtt

SEQ ID NO: 1913059 - DNA, 25 bp, Homo sapien
tatggagaaaggattgaacacaggc

SEQ ID NO: 1913060 - DNA, 25 bp, Homo sapien
caaagagagctagcgccttagagag

SEQ ID NO: 1913061 - DNA, 25 bp, Homo sapien
tcttgggagattagacatacggagg

SEQ ID NO: 1913062 - DNA, 25 bp, Homo sapien
gaacacaggctctatatttgcagtg

SEQ ID NO: 1913063 - DNA, 25 bp, Homo sapien
aggaagaatggaacccatcttctcc

SEQ ID NO: 1913064 - DNA, 25 bp, Homo sapien
aaggaagaatggaacccatcttctc

SEQ ID NO: 1913065 - DNA, 25 bp, Homo sapien
cttctccagatatgttgttatgggg

SEQ ID NO: 1913066 - DNA, 25 bp, Homo sapien
ccagatatgttgttatggggtaggt

SEQ ID NO: 1913067 - DNA, 25 bp, Homo sapien
tcagctttgtaggtgtgggcatgca

SEQ ID NO: 1913068 - DNA, 25 bp, Homo sapien
aagatggcccctcttgatgctggcg

SEQ ID NO: 1913069 - DNA, 25 bp, Homo sapien
gaattctggccccatgagatgacca

SEQ ID NO: 1913070 - DNA, 25 bp, Homo sapien
tgcttgaagcggacacatgaccact

SEQ ID NO: 1913071 - DNA, 25 bp, Homo sapien
ctgatgctgaaatgcattgatggtg

SEQ ID NO: 1913072 - DNA, 25 bp, Homo sapien
tgaaatgcattgatggtgagtgtcc

SEQ ID NO: 1913073 - DNA, 25 bp, Homo sapien
cattgatggtgagtgtccgctgtac

SEQ ID NO: 1913074 - DNA, 25 bp, Homo sapien
atcacactgctgatgctgaaatgca

SEQ ID NO: 1913075 - DNA, 25 bp, Homo sapien
aacagagtgcgggtctcattgtgca

SEQ ID NO: 1913076 - DNA, 25 bp, Homo sapien
ttcggcatccctgacatagttaagg

SEQ ID NO: 1913077 - DNA, 25 bp, Homo sapien
taagggcctggtcaagtgcttcctg

SEQ ID NO: 1913078 - DNA, 25 bp, Homo sapien
tccaggacgacaggaaacagagtgc

SEQ ID NO: 1913079 - DNA, 25 bp, Homo sapien
gttgagttaagaccccacatggagg

SEQ ID NO: 1913080 - DNA, 25 bp, Homo sapien
ggtgacaagcttggaaacatctggc

SEQ ID NO: 1913081 - DNA, 25 bp, Homo sapien
tagtgacagttgtaggaaaacgacc

SEQ ID NO: 1913082 - DNA, 25 bp, Homo sapien
taaagctgccgttatgtgaacaacc

SEQ ID NO: 1913083 - DNA, 25 bp, Homo sapien
tctgctattggacccacaaagaggg

SEQ ID NO: 1913084 - DNA, 25 bp, Homo sapien
caaacatgtgctgggtcagctatga

SEQ ID NO: 1913085 - DNA, 25 bp, Homo sapien
tactactgtgatttggtgcctacac

SEQ ID NO: 1913086 - DNA, 25 bp, Homo sapien
tgtttctggccttgtagcattcctg

SEQ ID NO: 1913087 - DNA, 25 bp, Homo sapien
tgacggcttctaatctcttcaagca

SEQ ID NO: 1913088 - DNA, 25 bp, Homo sapien
cgagctcccgttgggtgaaaaatgg

SEQ ID NO: 1913089 - DNA, 25 bp, Homo sapien
gtgaaaaatggttgacggcttctaa

SEQ ID NO: 1913090 - DNA, 25 bp, Homo sapien
ctcatccacgagctcccgttgggtg

SEQ ID NO: 1913091 - DNA, 25 bp, Homo sapien
cagctgacttgcgtggttaatggtg

SEQ ID NO: 1913092 - DNA, 25 bp, Homo sapien
taccagctgacttgcgtggttaatg

SEQ ID NO: 1913093 - DNA, 25 bp, Homo sapien
gacttgcgtggttaatggtgtccat

SEQ ID NO: 1913094 - DNA, 25 bp, Homo sapien
gctctaccagctgacttgcgtggtt

SEQ ID NO: 1913095 - DNA, 25 bp, Homo sapien
ctttccttctgaacaagttgtcctt

SEQ ID NO: 1913096 - DNA, 25 bp, Homo sapien
gttgtccttttctggaggcttgatt

SEQ ID NO: 1913097 - DNA, 25 bp, Homo sapien
gtccttttctggaggcttgattttc

SEQ ID NO: 1913098 - DNA, 25 bp, Homo sapien
gctttccttctgaacaagttgtcct

SEQ ID NO: 1913099 - DNA, 25 bp, Homo sapien
gaaatgattcaaggctaggacacca

SEQ ID NO: 1913100 - DNA, 25 bp, Homo sapien
taggcagaccttgaaatgcaccatg

SEQ ID NO: 1913101 - DNA, 25 bp, Homo sapien
tatgcacagcatgggcgacatgtac

SEQ ID NO: 1913102 - DNA, 25 bp, Homo sapien
taaacgtaaatcttcctggcatgtg

SEQ ID NO: 1913103 - DNA, 25 bp, Homo sapien
ataacaaacacatgcccagaggctt

SEQ ID NO: 1913104 - DNA, 25 bp, Homo sapien
taacaaacacatgcccagaggcttt

SEQ ID NO: 1913105 - DNA, 25 bp, Homo sapien
ggtcatcagtcccttcataaactgt

SEQ ID NO: 1913106 - DNA, 25 bp, Homo sapien
cagtcccttcataaactgtgggctc

SEQ ID NO: 1913107 - DNA, 25 bp, Homo sapien
actgtgcagcggcaatgtggtcatc

SEQ ID NO: 1913108 - DNA, 25 bp, Homo sapien
agcccactgtgcagcggcaatgtgg

SEQ ID NO: 1913109 - DNA, 25 bp, Homo sapien
ttatactccttcctgcaattccagt

SEQ ID NO: 1913110 - DNA, 25 bp, Homo sapien
tccagtcttcttcttggcttgttcc

SEQ ID NO: 1913111 - DNA, 25 bp, Homo sapien
caattccagtcttcttcttggcttg

SEQ ID NO: 1913112 - DNA, 25 bp, Homo sapien
agtcttcttcttggcttgttccagt

SEQ ID NO: 1913113 - DNA, 25 bp, Homo sapien
gatataggcacgtgggaaaacaggt

SEQ ID NO: 1913114 - DNA, 25 bp, Homo sapien
gcgcctcggtttaagaaaagctgaa

SEQ ID NO: 1913115 - DNA, 25 bp, Homo sapien
tttgcaaagcacaacacccctagtt

SEQ ID NO: 1913116 - DNA, 25 bp, Homo sapien
cgccagagggcgctaagatacaggt

SEQ ID NO: 1913117 - DNA, 25 bp, Homo sapien
gcttgtagcccagtgacactctgac

SEQ ID NO: 1913118 - DNA, 25 bp, Homo sapien
ctgcttgtagcccagtgacactctg

SEQ ID NO: 1913119 - DNA, 25 bp, Homo sapien
tgcttgtagcccagtgacactctga

SEQ ID NO: 1913120 - DNA, 25 bp, Homo sapien
ctctgcttgtagcccagtgacactc

SEQ ID NO: 1913121 - DNA, 25 bp, Homo sapien
gtagaatcttggcacgatctttgga

SEQ ID NO: 1913122 - DNA, 25 bp, Homo sapien
gagcatcttttgagcactgggtatt

SEQ ID NO: 1913123 - DNA, 25 bp, Homo sapien
tcagcagcaccaaagggagcatctt

SEQ ID NO: 1913124 - DNA, 25 bp, Homo sapien
cagtggctctgggaacatggaaaag

SEQ ID NO: 1913125 - DNA, 25 bp, Homo sapien
tcccagacataagtggtgggaaagg

SEQ ID NO: 1913126 - DNA, 25 bp, Homo sapien
ggaatcccagacataagtggtggga

SEQ ID NO: 1913127 - DNA, 25 bp, Homo sapien
ctttaggggaatcccagacataagt

SEQ ID NO: 1913128 - DNA, 25 bp, Homo sapien
taggggaatcccagacataagtggt

SEQ ID NO: 1913129 - DNA, 25 bp, Homo sapien
ggtggtctgcccttcttgtccggga

SEQ ID NO: 1913130 - DNA, 25 bp, Homo sapien
tatcatcaacctcctgtgttggtgg

SEQ ID NO: 1913131 - DNA, 25 bp, Homo sapien
cacgaaagcctgcatttagcttaca

SEQ ID NO: 1913132 - DNA, 25 bp, Homo sapien
gaaattgtacaacaaaaggatcagg

SEQ ID NO: 1913133 - DNA, 25 bp, Homo sapien
tttcaactaattcctctacgtcaga

SEQ ID NO: 1913134 - DNA, 25 bp, Homo sapien
tgtatctttcttagggcgtattggt

SEQ ID NO: 1913135 - DNA, 25 bp, Homo sapien
gacagaaggcttttcatcgtgttct

SEQ ID NO: 1913136 - DNA, 25 bp, Homo sapien
tgatttgtatctttcttagggcgta

SEQ ID NO: 1913137 - DNA, 25 bp, Homo sapien
aggtcccagacgcacttatcacagc

SEQ ID NO: 1913138 - DNA, 25 bp, Homo sapien
gatggtggcgttgatttcattcacg

SEQ ID NO: 1913139 - DNA, 25 bp, Homo sapien
tcctcgatggagagcgctgctaacc

SEQ ID NO: 1913140 - DNA, 25 bp, Homo sapien
tcattcacgtgcctatgagcggcgg

SEQ ID NO: 1913141 - DNA, 25 bp, Homo sapien
caatggtaaggttaatctcgtctgc

SEQ ID NO: 1913142 - DNA, 25 bp, Homo sapien
taatctcgtctgctccgagggactg

SEQ ID NO: 1913143 - DNA, 25 bp, Homo sapien
cgagggactgagagaccaagataca

SEQ ID NO: 1913144 - DNA, 25 bp, Homo sapien
tatggcatcttctaagatgtaatcc

SEQ ID NO: 1913145 - DNA, 25 bp, Homo sapien
tgccctagggaatcaagtggaccac

SEQ ID NO: 1913146 - DNA, 25 bp, Homo sapien
gagctatgcaaatgtaaaccaccca

SEQ ID NO: 1913147 - DNA, 25 bp, Homo sapien
ctgaggtgcagaaagggttaagtcc

SEQ ID NO: 1913148 - DNA, 25 bp, Homo sapien
tcagggacctgaagagacgatatag

SEQ ID NO: 1913149 - DNA, 25 bp, Homo sapien
cttcttccaagcattctccggttac

SEQ ID NO: 1913150 - DNA, 25 bp, Homo sapien
tccaagcattctccggttacactgt

SEQ ID NO: 1913151 - DNA, 25 bp, Homo sapien
gcattctccggttacactgtcacat

SEQ ID NO: 1913152 - DNA, 25 bp, Homo sapien
tctccggttacactgtcacatgggc

SEQ ID NO: 1913153 - DNA, 25 bp, Homo sapien
tgcaagatttcattcagtctcctgg

SEQ ID NO: 1913154 - DNA, 25 bp, Homo sapien
cctagtttattccacccatgagcaa

SEQ ID NO: 1913155 - DNA, 25 bp, Homo sapien
gataaaaatttctatccctgatggg

SEQ ID NO: 1913156 - DNA, 25 bp, Homo sapien
ggcaggtaatccatagaagtccgat

SEQ ID NO: 1913157 - DNA, 25 bp, Homo sapien
tctaaattcagtattggcagagggt

SEQ ID NO: 1913158 - DNA, 25 bp, Homo sapien
gccaggcagctggcttagtatttat

SEQ ID NO: 1913159 - DNA, 25 bp, Homo sapien
gcagctggcttagtatttatgatac

SEQ ID NO: 1913160 - DNA, 25 bp, Homo sapien
tcagtattggcagagggtcatgctg

SEQ ID NO: 1913161 - DNA, 25 bp, Homo sapien
atagtagccaggagcgcaacgttca

SEQ ID NO: 1913162 - DNA, 25 bp, Homo sapien
cagttcttggctatcctggcgtccc

SEQ ID NO: 1913163 - DNA, 25 bp, Homo sapien
gcaacgttcacacttgaatccggtg

SEQ ID NO: 1913164 - DNA, 25 bp, Homo sapien
gaatccggtggtgttgcgtaagcaa

SEQ ID NO: 1913165 - DNA, 25 bp, Homo sapien
gtttccatagtaaccgggagcacat

SEQ ID NO: 1913166 - DNA, 25 bp, Homo sapien
ttcttacaggtgcttccaatgagta

SEQ ID NO: 1913167 - DNA, 25 bp, Homo sapien
tccaatgagtaaggggtttccatag

SEQ ID NO: 1913168 - DNA, 25 bp, Homo sapien
atttccactgcagtcacatttctta

SEQ ID NO: 1913169 - DNA, 25 bp, Homo sapien
tactgcaatgagatgtacctgtagc

SEQ ID NO: 1913170 - DNA, 25 bp, Homo sapien
gggaaatgtcctagccacaacgtta

SEQ ID NO: 1913171 - DNA, 25 bp, Homo sapien
tgtaggccattcagttcagccaggc

SEQ ID NO: 1913172 - DNA, 25 bp, Homo sapien
gccaggcttccagctataggattga

SEQ ID NO: 1913173 - DNA, 25 bp, Homo sapien
agaggaaactctgaagttttagtca

SEQ ID NO: 1913174 - DNA, 25 bp, Homo sapien
tgaagttttagtcaaaactctggac

SEQ ID NO: 1913175 - DNA, 25 bp, Homo sapien
tagaggaaactctgaagttttagtc

SEQ ID NO: 1913176 - DNA, 25 bp, Homo sapien
tgcttcacgattctgcacatcaccc

SEQ ID NO: 1913177 - DNA, 25 bp, Homo sapien
tgggctgcttcacgattctgcacat

SEQ ID NO: 1913178 - DNA, 25 bp, Homo sapien
ggctgcttcacgattctgcacatca

SEQ ID NO: 1913179 - DNA, 25 bp, Homo sapien
gctgcttcacgattctgcacatcac

SEQ ID NO: 1913180 - DNA, 25 bp, Homo sapien
tagaccagtgtttcgcgaatttgca

SEQ ID NO: 1913181 - DNA, 25 bp, Homo sapien
tgtgttcagcatgcaaatccagcca

SEQ ID NO: 1913182 - DNA, 25 bp, Homo sapien
tacagtttgccttgatgtcatgcca

SEQ ID NO: 1913183 - DNA, 25 bp, Homo sapien
tggtgagtagcatgtccaacacggg

SEQ ID NO: 1913184 - DNA, 25 bp, Homo sapien
attcagtggaaagcctctcgtgctc

SEQ ID NO: 1913185 - DNA, 25 bp, Homo sapien
tcattcagtggaaagcctctcgtgc

SEQ ID NO: 1913186 - DNA, 25 bp, Homo sapien
gtggaaagcctctcgtgctctgtgg

SEQ ID NO: 1913187 - DNA, 25 bp, Homo sapien
tcagtggaaagcctctcgtgctctg

SEQ ID NO: 1913188 - DNA, 25 bp, Homo sapien
gttaggtccagcataattttcgtta

SEQ ID NO: 1913189 - DNA, 25 bp, Homo sapien
gttacaaatgcaccgaacagctcca

SEQ ID NO: 1913190 - DNA, 25 bp, Homo sapien
gcaccgaacagctccatttttccta

SEQ ID NO: 1913191 - DNA, 25 bp, Homo sapien
taattttcgttacaaatgcaccgaa

SEQ ID NO: 1913192 - DNA, 25 bp, Homo sapien
tagagatggaggacgtctggccaac

SEQ ID NO: 1913193 - DNA, 25 bp, Homo sapien
tcatccgcctgtagctggtgtcctg

SEQ ID NO: 1913194 - DNA, 25 bp, Homo sapien
caatatgtgcttctcagtgaaaggc

SEQ ID NO: 1913195 - DNA, 25 bp, Homo sapien
ccaataaagtgtgacccgctgctct

SEQ ID NO: 1913196 - DNA, 25 bp, Homo sapien
ggaatctccgatataaccatccaga

SEQ ID NO: 1913197 - DNA, 25 bp, Homo sapien
gaattggggtgctcccctgatggaa

SEQ ID NO: 1913198 - DNA, 25 bp, Homo sapien
gtgctcccctgatggaatctccgat

SEQ ID NO: 1913199 - DNA, 25 bp, Homo sapien
ataaccatccagacacttttcacag

SEQ ID NO: 1913200 - DNA, 25 bp, Homo sapien
gggttaaatttgtctgagttcttgc

SEQ ID NO: 1913201 - DNA, 25 bp, Homo sapien
gccataaacaatctggcagggctgc

SEQ ID NO: 1913202 - DNA, 25 bp, Homo sapien
ccaactaccatgaaactaagccata

SEQ ID NO: 1913203 - DNA, 25 bp, Homo sapien
cttgctggacggatgaagcccctct

SEQ ID NO: 1913204 - DNA, 25 bp, Homo sapien
tatctctcatgtgcttggtcacagg

SEQ ID NO: 1913205 - DNA, 25 bp, Homo sapien
tctgaacttttagccagtggttaag

SEQ ID NO: 1913206 - DNA, 25 bp, Homo sapien
tagacacagcagttaggtatgactt

SEQ ID NO: 1913207 - DNA, 25 bp, Homo sapien
ggtcacaggaccagaataatgtagg

SEQ ID NO: 1913208 - DNA, 25 bp, Homo sapien
gcagatataatagacaatgagccat

SEQ ID NO: 1913209 - DNA, 25 bp, Homo sapien
aacaaagaacaatacagtgtgtgaa

SEQ ID NO: 1913210 - DNA, 25 bp, Homo sapien
taacaaacctgaattaagcagatat

SEQ ID NO: 1913211 - DNA, 25 bp, Homo sapien
ctttgagtaactcacagacttgtga

SEQ ID NO: 1913212 - DNA, 25 bp, Homo sapien
gggaacaagttcaggcacaagagag

SEQ ID NO: 1913213 - DNA, 25 bp, Homo sapien
tgaaagacgtctccattgctgtgtg

SEQ ID NO: 1913214 - DNA, 25 bp, Homo sapien
aactcctggaggattttggaaagtg

SEQ ID NO: 1913215 - DNA, 25 bp, Homo sapien
aaagtatgtttaggtggcagtgtgc

SEQ ID NO: 1913216 - DNA, 25 bp, Homo sapien
gataactcattacttgcattcagtt

SEQ ID NO: 1913217 - DNA, 25 bp, Homo sapien
gagagctctctcctagtttgaattg

SEQ ID NO: 1913218 - DNA, 25 bp, Homo sapien
ccaactcaggtgaggagtatatggg

SEQ ID NO: 1913219 - DNA, 25 bp, Homo sapien
ttggtaggatatgatgtgaaactga

SEQ ID NO: 1913220 - DNA, 25 bp, Homo sapien
aatcctttggacacgaaactttctg

SEQ ID NO: 1913221 - DNA, 25 bp, Homo sapien
ggactccattgagctgtccaacctt

SEQ ID NO: 1913222 - DNA, 25 bp, Homo sapien
gctgtccaaccttagaatcctttgg

SEQ ID NO: 1913223 - DNA, 25 bp, Homo sapien
tggacacgaaactttctgactttct

SEQ ID NO: 1913224 - DNA, 25 bp, Homo sapien
caggcaacctgcaagaactgactga

SEQ ID NO: 1913225 - DNA, 25 bp, Homo sapien
gaatggcttaggtcagctttaccaa

SEQ ID NO: 1913226 - DNA, 25 bp, Homo sapien
gagaaatgaggtaagtcaggcaacc

SEQ ID NO: 1913227 - DNA, 25 bp, Homo sapien
gaaagattagtgttccaccagtaaa

SEQ ID NO: 1913228 - DNA, 25 bp, Homo sapien
agaatgaacgatagggcagaagctg

SEQ ID NO: 1913229 - DNA, 25 bp, Homo sapien
gctgagaatgaacgatagggcagaa

SEQ ID NO: 1913230 - DNA, 25 bp, Homo sapien
cctgagagctgagaatgaacgatag

SEQ ID NO: 1913231 - DNA, 25 bp, Homo sapien
agagctgagaatgaacgatagggca

SEQ ID NO: 1913232 - DNA, 25 bp, Homo sapien
gatgaggtggagaaaccatcattaa

SEQ ID NO: 1913233 - DNA, 25 bp, Homo sapien
aaagatatttttctccggacaggat

SEQ ID NO: 1913234 - DNA, 25 bp, Homo sapien
gcttcactgagtgcacatgtaaatg

SEQ ID NO: 1913235 - DNA, 25 bp, Homo sapien
tctgcgttggaacaaagtagttgga

SEQ ID NO: 1913236 - DNA, 25 bp, Homo sapien
gcataatattgactgcctaacagca

SEQ ID NO: 1913237 - DNA, 25 bp, Homo sapien
tcaccactaggtcagagataaagcc

SEQ ID NO: 1913238 - DNA, 25 bp, Homo sapien
tctttcaatagactctagcaggagg

SEQ ID NO: 1913239 - DNA, 25 bp, Homo sapien
caatgtcattgtaaaaagagtggct

SEQ ID NO: 1913240 - DNA, 25 bp, Homo sapien
ttagaaaggagtagactttggcagc

SEQ ID NO: 1913241 - DNA, 25 bp, Homo sapien
tgcagaagcctacactgtgacagag

SEQ ID NO: 1913242 - DNA, 25 bp, Homo sapien
ggagtagactttggcagctgcagaa

SEQ ID NO: 1913243 - DNA, 25 bp, Homo sapien
gctgcagaagcctacactgtgacag

SEQ ID NO: 1913244 - DNA, 25 bp, Homo sapien
tggcaaactatacgattacagagga

SEQ ID NO: 1913245 - DNA, 25 bp, Homo sapien
tggtctacagcaggcaaccagctgc

SEQ ID NO: 1913246 - DNA, 25 bp, Homo sapien
cacacagctcacgaaggaaaacatg

SEQ ID NO: 1913247 - DNA, 25 bp, Homo sapien
tcatgtacacacctaagaggccatt

SEQ ID NO: 1913248 - DNA, 25 bp, Homo sapien
gaagggtgaacaaaagcacttgatt

SEQ ID NO: 1913249 - DNA, 25 bp, Homo sapien
agttgtttcacaggaaaagctgaag

SEQ ID NO: 1913250 - DNA, 25 bp, Homo sapien
tttatatgagttgtttcacaggaaa

SEQ ID NO: 1913251 - DNA, 25 bp, Homo sapien
aaaatcagaagtagtttatatgagt

SEQ ID NO: 1913252 - DNA, 25 bp, Homo sapien
cacacagtatcctgagccgtccaaa

SEQ ID NO: 1913253 - DNA, 25 bp, Homo sapien
cgacagggtgtgaaagaatccagca

SEQ ID NO: 1913254 - DNA, 25 bp, Homo sapien
cattacagtcgcagggcacacattc

SEQ ID NO: 1913255 - DNA, 25 bp, Homo sapien
caaacactcgttggaattgccatta

SEQ ID NO: 1913256 - DNA, 25 bp, Homo sapien
agacacaccaaaccattttgattat

SEQ ID NO: 1913257 - DNA, 25 bp, Homo sapien
tcttttccacatgagaagcctgtcc

SEQ ID NO: 1913258 - DNA, 25 bp, Homo sapien
ttcgaaggacctggcaaaattggcc

SEQ ID NO: 1913259 - DNA, 25 bp, Homo sapien
tatagtggccagcaatgtcatacaa

SEQ ID NO: 1913260 - DNA, 25 bp, Homo sapien
taacacctgtgctatttagaggcct

SEQ ID NO: 1913261 - DNA, 25 bp, Homo sapien
tattgtaccctcttactctcagcag

SEQ ID NO: 1913262 - DNA, 25 bp, Homo sapien
gctaatcctgcttctttagtgaaaa

SEQ ID NO: 1913263 - DNA, 25 bp, Homo sapien
gaggctattgggtgggaaatctcat

SEQ ID NO: 1913264 - DNA, 25 bp, Homo sapien
tagatttctcaagatgcaaggcaca

SEQ ID NO: 1913265 - DNA, 25 bp, Homo sapien
tattacatacgctacagaggcctgg

SEQ ID NO: 1913266 - DNA, 25 bp, Homo sapien
gaatatcatgctttggcccgccttg

SEQ ID NO: 1913267 - DNA, 25 bp, Homo sapien
taaattctctacacataatgcatgc

SEQ ID NO: 1913268 - DNA, 25 bp, Homo sapien
atgcatgcccttgcgtcctcctggg

SEQ ID NO: 1913269 - DNA, 25 bp, Homo sapien
ggtttatgacagctactcagtgact

SEQ ID NO: 1913270 - DNA, 25 bp, Homo sapien
taactgcgagactggtttaatgaac

SEQ ID NO: 1913271 - DNA, 25 bp, Homo sapien
gaaaacaagaacctggtgcacctgg

SEQ ID NO: 1913272 - DNA, 25 bp, Homo sapien
cagtgactagctgagatatagcaca

SEQ ID NO: 1913273 - DNA, 25 bp, Homo sapien
tcagagccaggaaacttggttgtgg

SEQ ID NO: 1913274 - DNA, 25 bp, Homo sapien
tgtctcaacaagtttccacgctagg

SEQ ID NO: 1913275 - DNA, 25 bp, Homo sapien
cagttctagaaaccctgtgtgggaa

SEQ ID NO: 1913276 - DNA, 25 bp, Homo sapien
tgaattacttagttccaggacacag

SEQ ID NO: 1913277 - DNA, 25 bp, Homo sapien
gcacaccatagagaatggtgtatcc

SEQ ID NO: 1913278 - DNA, 25 bp, Homo sapien
gacatactctgtctaatcatttctc

SEQ ID NO: 1913279 - DNA, 25 bp, Homo sapien
gaatggtgtatccatcccctcattt

SEQ ID NO: 1913280 - DNA, 25 bp, Homo sapien
accttcgttagttgtcctgattgac

SEQ ID NO: 1913281 - DNA, 25 bp, Homo sapien
ccctcaggactgcttgtctatagag

SEQ ID NO: 1913282 - DNA, 25 bp, Homo sapien
ccctataaggcctgaaaggtggaga

SEQ ID NO: 1913283 - DNA, 25 bp, Homo sapien
catcccttgtgtagcatatgatcaa

SEQ ID NO: 1913284 - DNA, 25 bp, Homo sapien
accataaacacagacaaccagcagc

SEQ ID NO: 1913285 - DNA, 25 bp, Homo sapien
gccctgtcagaagagtccttgcctt

SEQ ID NO: 1913286 - DNA, 25 bp, Homo sapien
gaaaagtccctcagagttagtctgc

SEQ ID NO: 1913287 - DNA, 25 bp, Homo sapien
taaggtatgttcatgggcactgatc

SEQ ID NO: 1913288 - DNA, 25 bp, Homo sapien
aagccagtaatagcaccgtcacctc

SEQ ID NO: 1913289 - DNA, 25 bp, Homo sapien
gctcacatggagcaatacagcatgc

SEQ ID NO: 1913290 - DNA, 25 bp, Homo sapien
tttggtcagccaacaatctctatcc

SEQ ID NO: 1913291 - DNA, 25 bp, Homo sapien
ctgggctattgaagagcttaggaga

SEQ ID NO: 1913292 - DNA, 25 bp, Homo sapien
gatggagagtccacaagctgggcta

SEQ ID NO: 1913293 - DNA, 25 bp, Homo sapien
taaaagtatgaggtatgaagcaggc

SEQ ID NO: 1913294 - DNA, 25 bp, Homo sapien
gcttgaaatttcaacttgggaccat

SEQ ID NO: 1913295 - DNA, 25 bp, Homo sapien
aacaactcttggcatatatagggca

SEQ ID NO: 1913296 - DNA, 25 bp, Homo sapien
caatctgaaacactttgctgtgctg

SEQ ID NO: 1913297 - DNA, 25 bp, Homo sapien
tgctcaaagcaacaggtggagataa

SEQ ID NO: 1913298 - DNA, 25 bp, Homo sapien
tcaaagcaacaggtggagataatgc

SEQ ID NO: 1913299 - DNA, 25 bp, Homo sapien
ttacgtgctcaaagcaacaggtgga

SEQ ID NO: 1913300 - DNA, 25 bp, Homo sapien
cgtgctcaaagcaacaggtggagat

SEQ ID NO: 1913301 - DNA, 25 bp, Homo sapien
tctagcggatgaactcagagcacca

SEQ ID NO: 1913302 - DNA, 25 bp, Homo sapien
tttgagcagacacattccgaagcct

SEQ ID NO: 1913303 - DNA, 25 bp, Homo sapien
gacaaaatgactactgggacacgca

SEQ ID NO: 1913304 - DNA, 25 bp, Homo sapien
aaagatcctgcagtagtgttcccac

SEQ ID NO: 1913305 - DNA, 25 bp, Homo sapien
aagtttccgaactgacctagcccag

SEQ ID NO: 1913306 - DNA, 25 bp, Homo sapien
ttcaagtttccgaactgacctagcc

SEQ ID NO: 1913307 - DNA, 25 bp, Homo sapien
atttcaagtttccgaactgacctag

SEQ ID NO: 1913308 - DNA, 25 bp, Homo sapien
caagtttccgaactgacctagccca

SEQ ID NO: 1913309 - DNA, 25 bp, Homo sapien
gagaaggacgagtgtggcacagccc

SEQ ID NO: 1913310 - DNA, 25 bp, Homo sapien
gagagagaaggacgagtgtggcaca

SEQ ID NO: 1913311 - DNA, 25 bp, Homo sapien
ggacgagtgtggcacagcccgcggg

SEQ ID NO: 1913312 - DNA, 25 bp, Homo sapien
gagagagagaaggacgagtgtggca

SEQ ID NO: 1913313 - DNA, 25 bp, Homo sapien
aggcggcaggcgtcccagagccacg

SEQ ID NO: 1913314 - DNA, 25 bp, Homo sapien
gaggcagaaccgagcgccaggctga

SEQ ID NO: 1913315 - DNA, 25 bp, Homo sapien
ggttcgctcgtctcaggcgggtctt

SEQ ID NO: 1913316 - DNA, 25 bp, Homo sapien
aaccgctgagctcccttcaatgtca

SEQ ID NO: 1913317 - DNA, 25 bp, Homo sapien
gtctccgtaggtctcccgcgtggtg

SEQ ID NO: 1913318 - DNA, 25 bp, Homo sapien
tctccgctgacatccagtagtgctc

SEQ ID NO: 1913319 - DNA, 25 bp, Homo sapien
gcagtatcccgaggtggctgcgcaa

SEQ ID NO: 1913320 - DNA, 25 bp, Homo sapien
tggtgcggcggtgcctcgcttattt

SEQ ID NO: 1913321 - DNA, 25 bp, Homo sapien
ttttctccttcccgcagaggttctg

SEQ ID NO: 1913322 - DNA, 25 bp, Homo sapien
aagggaaagtgcgagagtaagggag

SEQ ID NO: 1913323 - DNA, 25 bp, Homo sapien
agtgcgagagtaagggagagttcca

SEQ ID NO: 1913324 - DNA, 25 bp, Homo sapien
tctccttcccgcagaggttctggct

SEQ ID NO: 1913325 - DNA, 25 bp, Homo sapien
gacggattggggtgagccccgccag

SEQ ID NO: 1913326 - DNA, 25 bp, Homo sapien
tggggactgcgctgtcctggcttcc

SEQ ID NO: 1913327 - DNA, 25 bp, Homo sapien
tacggcatcaaaaggcagacggatt

SEQ ID NO: 1913328 - DNA, 25 bp, Homo sapien
tcctctccctggccgttcgggactg

SEQ ID NO: 1913329 - DNA, 25 bp, Homo sapien
agacactgaggtccgcctttccctg

SEQ ID NO: 1913330 - DNA, 25 bp, Homo sapien
ttttcagacactgaggtccgccttt

SEQ ID NO: 1913331 - DNA, 25 bp, Homo sapien
tctcagtttggagcccctccaaggg

SEQ ID NO: 1913332 - DNA, 25 bp, Homo sapien
tgaggtccgcctttccctgcggtct

SEQ ID NO: 1913333 - DNA, 25 bp, Homo sapien
gcagcagaacgacatctgctgtgga

SEQ ID NO: 1913334 - DNA, 25 bp, Homo sapien
tgaaaagtgaagtgttggagtcatt

SEQ ID NO: 1913335 - DNA, 25 bp, Homo sapien
gacatctgctgtggatgttcagcag

SEQ ID NO: 1913336 - DNA, 25 bp, Homo sapien
tggagtcatttagggagcagagcaa

SEQ ID NO: 1913337 - DNA, 25 bp, Homo sapien
caacttggagggatttcatgggcat

SEQ ID NO: 1913338 - DNA, 25 bp, Homo sapien
caaactggtgtgtctatatcatgga

SEQ ID NO: 1913339 - DNA, 25 bp, Homo sapien
gggtaggccctgctcattgctttat

SEQ ID NO: 1913340 - DNA, 25 bp, Homo sapien
ccaactgagtggcaggtaaaaactg

SEQ ID NO: 1913341 - DNA, 25 bp, Homo sapien
tatggtgctgtgtgatacatccctt

SEQ ID NO: 1913342 - DNA, 25 bp, Homo sapien
tatagtggcaacgtctcattgtgct

SEQ ID NO: 1913343 - DNA, 25 bp, Homo sapien
gggcctactagacacaaaaggaatg

SEQ ID NO: 1913344 - DNA, 25 bp, Homo sapien
catgtggtgccttgaaaccaggaca

SEQ ID NO: 1913345 - DNA, 25 bp, Homo sapien
tgagcacttattagagcccaagcac

SEQ ID NO: 1913346 - DNA, 25 bp, Homo sapien
tccagttcagttgccagttggccag

SEQ ID NO: 1913347 - DNA, 25 bp, Homo sapien
cacagagtcagtaggtgttagagcc

SEQ ID NO: 1913348 - DNA, 25 bp, Homo sapien
caatagcttaggactgccgatttgg

SEQ ID NO: 1913349 - DNA, 25 bp, Homo sapien
tgttgtaccctgtgagtttcctgga

SEQ ID NO: 1913350 - DNA, 25 bp, Homo sapien
gaggtctaactccacccaaggctta

SEQ ID NO: 1913351 - DNA, 25 bp, Homo sapien
ccaaggcttaagtttctttcctctg

SEQ ID NO: 1913352 - DNA, 25 bp, Homo sapien
aacacattcatcttgaccccagagg

SEQ ID NO: 1913353 - DNA, 25 bp, Homo sapien
cctgagattcctcccagtattgcac

SEQ ID NO: 1913354 - DNA, 25 bp, Homo sapien
cagcattaacgcctgggcttcctga

SEQ ID NO: 1913355 - DNA, 25 bp, Homo sapien
taggcgagcagcattaacgcctggg

SEQ ID NO: 1913356 - DNA, 25 bp, Homo sapien
gcaccttcatgctcgccttcatagg

SEQ ID NO: 1913357 - DNA, 25 bp, Homo sapien
tctggtagaacaggcagtttaagtc

SEQ ID NO: 1913358 - DNA, 25 bp, Homo sapien
ctggtagaacaggcagtttaagtca

SEQ ID NO: 1913359 - DNA, 25 bp, Homo sapien
tggtagaacaggcagtttaagtcac

SEQ ID NO: 1913360 - DNA, 25 bp, Homo sapien
gatccctctgatggtcactttggag

SEQ ID NO: 1913361 - DNA, 25 bp, Homo sapien
cactttggagcctactgtttttaga

SEQ ID NO: 1913362 - DNA, 25 bp, Homo sapien
gtctattgtgttcccgctgcagggt

SEQ ID NO: 1913363 - DNA, 25 bp, Homo sapien
tggatttccagaagtgcagcacatg

SEQ ID NO: 1913364 - DNA, 25 bp, Homo sapien
aatgcttattccaatcaggtcggcc

SEQ ID NO: 1913365 - DNA, 25 bp, Homo sapien
aaaggcctcgtcacttcacatctgg

SEQ ID NO: 1913366 - DNA, 25 bp, Homo sapien
taataccctgctcctaacaatgctt

SEQ ID NO: 1913367 - DNA, 25 bp, Homo sapien
gcatctccattgctcaaaggttcag

SEQ ID NO: 1913368 - DNA, 25 bp, Homo sapien
ggcgtttattattagtatgatgcat

SEQ ID NO: 1913369 - DNA, 25 bp, Homo sapien
ttggcgtttattattagtatgatgc

SEQ ID NO: 1913370 - DNA, 25 bp, Homo sapien
gtttggcgtttattattagtatgat

SEQ ID NO: 1913371 - DNA, 25 bp, Homo sapien
ctgtttggcgtttattattagtatg

SEQ ID NO: 1913372 - DNA, 25 bp, Homo sapien
aaagttctgattaacctgcatggag

SEQ ID NO: 1913373 - DNA, 25 bp, Homo sapien
tatgtccactgggtacaagttttct

SEQ ID NO: 1913374 - DNA, 25 bp, Homo sapien
gcaaagacgtgtttatatcaagcta

SEQ ID NO: 1913375 - DNA, 25 bp, Homo sapien
cactatgcttgctggaatatgtcca

SEQ ID NO: 1913376 - DNA, 25 bp, Homo sapien
tcatgagaaagttgaagaattccca

SEQ ID NO: 1913377 - DNA, 25 bp, Homo sapien
cttatcatgagaaagttgaagaatt

SEQ ID NO: 1913378 - DNA, 25 bp, Homo sapien
catgagaaagttgaagaattcccat

SEQ ID NO: 1913379 - DNA, 25 bp, Homo sapien
tatcatgagaaagttgaagaattcc

SEQ ID NO: 1913380 - DNA, 25 bp, Homo sapien
tttagccaatcacaggaaccccagg

SEQ ID NO: 1913381 - DNA, 25 bp, Homo sapien
gaaccccaggttttagccaatcaca

SEQ ID NO: 1913382 - DNA, 25 bp, Homo sapien
caaatgtctcatcacacaatgtcca

SEQ ID NO: 1913383 - DNA, 25 bp, Homo sapien
aacagcttactgcttacactgccag

SEQ ID NO: 1913384 - DNA, 25 bp, Homo sapien
tttaggccgcttggccttaggctgt

SEQ ID NO: 1913385 - DNA, 25 bp, Homo sapien
tgctgccattcgcttggcaaaacgc

SEQ ID NO: 1913386 - DNA, 25 bp, Homo sapien
ttctccttggatgccgacttctgga

SEQ ID NO: 1913387 - DNA, 25 bp, Homo sapien
agaggcctctgcactgtccgtctgt

SEQ ID NO: 1913388 - DNA, 25 bp, Homo sapien
aaggcatgggttgtcatcgtggttt

SEQ ID NO: 1913389 - DNA, 25 bp, Homo sapien
tggtgaaggcatgggttgtcatcgt

SEQ ID NO: 1913390 - DNA, 25 bp, Homo sapien
gtgaaggcatgggttgtcatcgtgg

SEQ ID NO: 1913391 - DNA, 25 bp, Homo sapien
tgaaggcatgggttgtcatcgtggt

SEQ ID NO: 1913392 - DNA, 25 bp, Homo sapien
ctgtctggagtggagggactggaat

SEQ ID NO: 1913393 - DNA, 25 bp, Homo sapien
tctggagtggagggactggaattac

SEQ ID NO: 1913394 - DNA, 25 bp, Homo sapien
tgtctggagtggagggactggaatt

SEQ ID NO: 1913395 - DNA, 25 bp, Homo sapien
gtctggagtggagggactggaatta

SEQ ID NO: 1913396 - DNA, 25 bp, Homo sapien
tctggccaaatttagaatcagcatt

SEQ ID NO: 1913397 - DNA, 25 bp, Homo sapien
ttattgattgtagcttgaagtccca

SEQ ID NO: 1913398 - DNA, 25 bp, Homo sapien
tctaaggagtctgctgtttcctgcc

SEQ ID NO: 1913399 - DNA, 25 bp, Homo sapien
tccgccagaagccagttaaaatcat

SEQ ID NO: 1913400 - DNA, 25 bp, Homo sapien
gacaccacgacctccagacctgaag

SEQ ID NO: 1913401 - DNA, 25 bp, Homo sapien
ctgtgacaccacgacctccagacct

SEQ ID NO: 1913402 - DNA, 25 bp, Homo sapien
gtgacaccacgacctccagacctga

SEQ ID NO: 1913403 - DNA, 25 bp, Homo sapien
tgtgacaccacgacctccagacctg

SEQ ID NO: 1913404 - DNA, 25 bp, Homo sapien
gccccccagatgaaatccttatact

SEQ ID NO: 1913405 - DNA, 25 bp, Homo sapien
ctgtctctgggctacaggaatcaaa

SEQ ID NO: 1913406 - DNA, 25 bp, Homo sapien
tgcagccccccagatgaaatcctta

SEQ ID NO: 1913407 - DNA, 25 bp, Homo sapien
cattgctgtctctgggctacaggaa

SEQ ID NO: 1913408 - DNA, 25 bp, Homo sapien
cccattcagtgattgcttttaccca

SEQ ID NO: 1913409 - DNA, 25 bp, Homo sapien
tacccattcagtgattgcttttacc

SEQ ID NO: 1913410 - DNA, 25 bp, Homo sapien
tctacccattcagtgattgctttta

SEQ ID NO: 1913411 - DNA, 25 bp, Homo sapien
acccattcagtgattgcttttaccc

SEQ ID NO: 1913412 - DNA, 25 bp, Homo sapien
cagcagggaactgctgaatagtcac

SEQ ID NO: 1913413 - DNA, 25 bp, Homo sapien
cagggaactgctgaatagtcacaga

SEQ ID NO: 1913414 - DNA, 25 bp, Homo sapien
ttcagcagggaactgctgaatagtc

SEQ ID NO: 1913415 - DNA, 25 bp, Homo sapien
gcagggaactgctgaatagtcacag

SEQ ID NO: 1913416 - DNA, 25 bp, Homo sapien
gaaattctttcttggtcacagcttt

SEQ ID NO: 1913417 - DNA, 25 bp, Homo sapien
attctttcttggtcacagctttttt

SEQ ID NO: 1913418 - DNA, 25 bp, Homo sapien
tctttcttggtcacagcttttttag

SEQ ID NO: 1913419 - DNA, 25 bp, Homo sapien
tttcttggtcacagcttttttagca

SEQ ID NO: 1913420 - DNA, 25 bp, Homo sapien
ctgtagaagtagagatcaggcatga

SEQ ID NO: 1913421 - DNA, 25 bp, Homo sapien
tgtagaagtagagatcaggcatgac

SEQ ID NO: 1913422 - DNA, 25 bp, Homo sapien
ccgagccggtgtccaccacatcaaa

SEQ ID NO: 1913423 - DNA, 25 bp, Homo sapien
caatgtccacatagcacaaggagaa

SEQ ID NO: 1913424 - DNA, 25 bp, Homo sapien
ctcccacgggtgttcgcaggaaatg

SEQ ID NO: 1913425 - DNA, 25 bp, Homo sapien
gaacttcccgagccggtgtccacca

SEQ ID NO: 1913426 - DNA, 25 bp, Homo sapien
tgtgttacagagcaatggtaggtag

SEQ ID NO: 1913427 - DNA, 25 bp, Homo sapien
tgttacagagcaatggtaggtaggt

SEQ ID NO: 1913428 - DNA, 25 bp, Homo sapien
tacagagcaatggtaggtaggttaa

SEQ ID NO: 1913429 - DNA, 25 bp, Homo sapien
ctgtgttacagagcaatggtaggta

SEQ ID NO: 1913430 - DNA, 25 bp, Homo sapien
taagatgcctccgtgagaggctggt

SEQ ID NO: 1913431 - DNA, 25 bp, Homo sapien
ataagatgcctccgtgagaggctgg

SEQ ID NO: 1913432 - DNA, 25 bp, Homo sapien
ggtggtcagccctggggtcagtaac

SEQ ID NO: 1913433 - DNA, 25 bp, Homo sapien
agaggctggtggtcagccctggggt

SEQ ID NO: 1913434 - DNA, 25 bp, Homo sapien
aatggcagcaatggcatgagctgcc

SEQ ID NO: 1913435 - DNA, 25 bp, Homo sapien
gaagccgtggctcccagaaagctgc

SEQ ID NO: 1913436 - DNA, 25 bp, Homo sapien
ttcaatggcagcaatggcatgagct

SEQ ID NO: 1913437 - DNA, 25 bp, Homo sapien
tggcagcaatggcatgagctgccag

SEQ ID NO: 1913438 - DNA, 25 bp, Homo sapien
tcatttgcaggacatcaagggctct

SEQ ID NO: 1913439 - DNA, 25 bp, Homo sapien
cttcatttgcaggacatcaagggct

SEQ ID NO: 1913440 - DNA, 25 bp, Homo sapien
tttgcaggacatcaagggctctgga

SEQ ID NO: 1913441 - DNA, 25 bp, Homo sapien
ttcctgctgcaaggacatcctcctc

SEQ ID NO: 1913442 - DNA, 25 bp, Homo sapien
taagcaccatttccgggtgtgtctg

SEQ ID NO: 1913443 - DNA, 25 bp, Homo sapien
tcaggtgttaactgactggatagct

SEQ ID NO: 1913444 - DNA, 25 bp, Homo sapien
cggctctcattgtgggtgggcatca

SEQ ID NO: 1913445 - DNA, 25 bp, Homo sapien
aagtatgtttgtgtgcgaatccggg

SEQ ID NO: 1913446 - DNA, 25 bp, Homo sapien
cattaagaagattgaagttcttgcc

SEQ ID NO: 1913447 - DNA, 25 bp, Homo sapien
ttaagaagattgaagttcttgccat

SEQ ID NO: 1913448 - DNA, 25 bp, Homo sapien
ccagggcattaagaagattgaagtt

SEQ ID NO: 1913449 - DNA, 25 bp, Homo sapien
gggcattaagaagattgaagttctt

SEQ ID NO: 1913450 - DNA, 25 bp, Homo sapien
tctgttcttccgagacagctcgtta

SEQ ID NO: 1913451 - DNA, 25 bp, Homo sapien
ctgttcttccgagacagctcgttat

SEQ ID NO: 1913452 - DNA, 25 bp, Homo sapien
tgttcttccgagacagctcgttata

SEQ ID NO: 1913453 - DNA, 25 bp, Homo sapien
tttgggggcatctacctccacagtc

SEQ ID NO: 1913454 - DNA, 25 bp, Homo sapien
ccacagtcaacccagagctggcaat

SEQ ID NO: 1913455 - DNA, 25 bp, Homo sapien
tgggggcatctacctccacagtcaa

SEQ ID NO: 1913456 - DNA, 25 bp, Homo sapien
gatttgggggcatctacctccacag

SEQ ID NO: 1913457 - DNA, 25 bp, Homo sapien
tgagcagcagctcctcctttagagc

SEQ ID NO: 1913458 - DNA, 25 bp, Homo sapien
agcagcagctcctcctttagagcct

SEQ ID NO: 1913459 - DNA, 25 bp, Homo sapien
ttcatgagcagcagctcctccttta

SEQ ID NO: 1913460 - DNA, 25 bp, Homo sapien
tcatgagcagcagctcctcctttag

SEQ ID NO: 1913461 - DNA, 25 bp, Homo sapien
caagacaggcattgtctgtctgcag

SEQ ID NO: 1913462 - DNA, 25 bp, Homo sapien
cagcaagacaggcattgtctgtctg

SEQ ID NO: 1913463 - DNA, 25 bp, Homo sapien
agcagcaagacaggcattgtctgtc

SEQ ID NO: 1913464 - DNA, 25 bp, Homo sapien
attgtctgtctgcagaacgatgcgg

SEQ ID NO: 1913465 - DNA, 25 bp, Homo sapien
tgcgaggttctgagcccttaggtcc

SEQ ID NO: 1913466 - DNA, 25 bp, Homo sapien
ccttaggtcctggatagtcttgaag

SEQ ID NO: 1913467 - DNA, 25 bp, Homo sapien
agtatttgcgaggttctgagccctt

SEQ ID NO: 1913468 - DNA, 25 bp, Homo sapien
aggttctgagcccttaggtcctgga

SEQ ID NO: 1913469 - DNA, 25 bp, Homo sapien
gactggccgggcgtgtagctgggca

SEQ ID NO: 1913470 - DNA, 25 bp, Homo sapien
ctgactggccgggcgtgtagctggg

SEQ ID NO: 1913471 - DNA, 25 bp, Homo sapien
ctggccgggcgtgtagctgggcacc

SEQ ID NO: 1913472 - DNA, 25 bp, Homo sapien
ggccgggcgtgtagctgggcacctg

SEQ ID NO: 1913473 - DNA, 25 bp, Homo sapien
gtaggtggaaaaggtggagcgagtg

SEQ ID NO: 1913474 - DNA, 25 bp, Homo sapien
gtagtaggtggaaaaggtggagcga

SEQ ID NO: 1913475 - DNA, 25 bp, Homo sapien
agagcccagggaacggtagtaggtg

SEQ ID NO: 1913476 - DNA, 25 bp, Homo sapien
aggtggagcgagtggtgaagctcat

SEQ ID NO: 1913477 - DNA, 25 bp, Homo sapien
ctttgccgacgaccgacattccctt

SEQ ID NO: 1913478 - DNA, 25 bp, Homo sapien
gctttgccgacgaccgacattccct

SEQ ID NO: 1913479 - DNA, 25 bp, Homo sapien
tccctttttctaagtccagatacag

SEQ ID NO: 1913480 - DNA, 25 bp, Homo sapien
cagatacagagctccaagaacccac

SEQ ID NO: 1913481 - DNA, 25 bp, Homo sapien
aatagaaccgcgtgcagggaggtga

SEQ ID NO: 1913482 - DNA, 25 bp, Homo sapien
gcaaataatagaaccgcgtgcaggg

SEQ ID NO: 1913483 - DNA, 25 bp, Homo sapien
caaataatagaaccgcgtgcaggga

SEQ ID NO: 1913484 - DNA, 25 bp, Homo sapien
ttagcaaataatagaaccgcgtgca

SEQ ID NO: 1913485 - DNA, 25 bp, Homo sapien
ttggtgcacacttgagcaggtggta

SEQ ID NO: 1913486 - DNA, 25 bp, Homo sapien
tagaggatgatgtccagcgccttgg

SEQ ID NO: 1913487 - DNA, 25 bp, Homo sapien
cttggtgaactgggccgcgtcttca

SEQ ID NO: 1913488 - DNA, 25 bp, Homo sapien
ttcctccaacagatacagaaggtag

SEQ ID NO: 1913489 - DNA, 25 bp, Homo sapien
cctggaaacgttccatttgccagac

SEQ ID NO: 1913490 - DNA, 25 bp, Homo sapien
tcctggaaacgttccatttgccaga

SEQ ID NO: 1913491 - DNA, 25 bp, Homo sapien
tgggtcctggaaacgttccatttgc

SEQ ID NO: 1913492 - DNA, 25 bp, Homo sapien
ggtcctggaaacgttccatttgcca

SEQ ID NO: 1913493 - DNA, 25 bp, Homo sapien
gccaatttgtatgcccaagctgctt

SEQ ID NO: 1913494 - DNA, 25 bp, Homo sapien
tcgtgagaacccctatgaggtctgc

SEQ ID NO: 1913495 - DNA, 25 bp, Homo sapien
ggtctgcaaagccaatttgtatgcc

SEQ ID NO: 1913496 - DNA, 25 bp, Homo sapien
ccaagctgcttttggccgcccggtc

SEQ ID NO: 1913497 - DNA, 25 bp, Homo sapien
gcacgtaaggaaagagttccgcgaa

SEQ ID NO: 1913498 - DNA, 25 bp, Homo sapien
gcagcacgtaaggaaagagttccgc

SEQ ID NO: 1913499 - DNA, 25 bp, Homo sapien
tgcagcacgtaaggaaagagttccg

SEQ ID NO: 1913500 - DNA, 25 bp, Homo sapien
cacgtaaggaaagagttccgcgaag

SEQ ID NO: 1913501 - DNA, 25 bp, Homo sapien
aacaggaagtgtcggagtgagaggc

SEQ ID NO: 1913502 - DNA, 25 bp, Homo sapien
gccccagtaacggatgtaacaggaa

SEQ ID NO: 1913503 - DNA, 25 bp, Homo sapien
ccaggtcccacttccgcaagtggat

SEQ ID NO: 1913504 - DNA, 25 bp, Homo sapien
acttccgcaagtggatgcagcgctg

SEQ ID NO: 1913505 - DNA, 25 bp, Homo sapien
aagtcttcggtggtgtggatctccc

SEQ ID NO: 1913506 - DNA, 25 bp, Homo sapien
gaatagccataggccaagaccagcc

SEQ ID NO: 1913507 - DNA, 25 bp, Homo sapien
cgcatctcatctgggtggtttatca

SEQ ID NO: 1913508 - DNA, 25 bp, Homo sapien
ggatctccctggaatagccataggc

SEQ ID NO: 1913509 - DNA, 25 bp, Homo sapien
cttttccacatacgtggctcccaga

SEQ ID NO: 1913510 - DNA, 25 bp, Homo sapien
ttccacatacgtggctcccagaaat

SEQ ID NO: 1913511 - DNA, 25 bp, Homo sapien
ggatcccaagcagatctcgcttctt

SEQ ID NO: 1913512 - DNA, 25 bp, Homo sapien
tttaaggatcccaagcagatctcgc

SEQ ID NO: 1913513 - DNA, 25 bp, Homo sapien
ggagctgcagcatggagtccctgag

SEQ ID NO: 1913514 - DNA, 25 bp, Homo sapien
ggacagcagctttcataggattccc

SEQ ID NO: 1913515 - DNA, 25 bp, Homo sapien
tttcataggattccccgttcagtgg

SEQ ID NO: 1913516 - DNA, 25 bp, Homo sapien
tcagtggttcctccgcggaggagct

SEQ ID NO: 1913517 - DNA, 25 bp, Homo sapien
gctgagcctctctcccggcgtcctg

SEQ ID NO: 1913518 - DNA, 25 bp, Homo sapien
gccttcttgaggtagccctggctga

SEQ ID NO: 1913519 - DNA, 25 bp, Homo sapien
gatgaggtactccactatgctagtg

SEQ ID NO: 1913520 - DNA, 25 bp, Homo sapien
ccactatgctagtgtggcccgtcac

SEQ ID NO: 1913521 - DNA, 25 bp, Homo sapien
tgcgaaggcaatcccatgcgggtct

SEQ ID NO: 1913522 - DNA, 25 bp, Homo sapien
aggcaatcccatgcgggtctgccac

SEQ ID NO: 1913523 - DNA, 25 bp, Homo sapien
cgaaggcaatcccatgcgggtctgc

SEQ ID NO: 1913524 - DNA, 25 bp, Homo sapien
ctgcgaaggcaatcccatgcgggtc

SEQ ID NO: 1913525 - DNA, 25 bp, Homo sapien
ctcagtagtgtagggccgtgttgcc

SEQ ID NO: 1913526 - DNA, 25 bp, Homo sapien
caggctgccagactcggctcagtag

SEQ ID NO: 1913527 - DNA, 25 bp, Homo sapien
actcggctcagtagtgtagggccgt

SEQ ID NO: 1913528 - DNA, 25 bp, Homo sapien
tgccagactcggctcagtagtgtag

SEQ ID NO: 1913529 - DNA, 25 bp, Homo sapien
gtagcacaagatcatgaggcacatg

SEQ ID NO: 1913530 - DNA, 25 bp, Homo sapien
cggtggcccttgtagcacaagatca

SEQ ID NO: 1913531 - DNA, 25 bp, Homo sapien
cttcagcaggtagcgggcgatctct

SEQ ID NO: 1913532 - DNA, 25 bp, Homo sapien
cacatgtggccgtgccggttggcca

SEQ ID NO: 1913533 - DNA, 25 bp, Homo sapien
ggtgctcctggtgcggttcgccgag

SEQ ID NO: 1913534 - DNA, 25 bp, Homo sapien
gctcctggtgcggttcgccgaggcc

SEQ ID NO: 1913535 - DNA, 25 bp, Homo sapien
tggtgctcctggtgcggttcgccga

SEQ ID NO: 1913536 - DNA, 25 bp, Homo sapien
tgctcctggtgcggttcgccgaggc

SEQ ID NO: 1913537 - DNA, 25 bp, Homo sapien
gccaccgaagggtccctagccgtca

SEQ ID NO: 1913538 - DNA, 25 bp, Homo sapien
ggcgagccctcgatggtcccgccac

SEQ ID NO: 1913539 - DNA, 25 bp, Homo sapien
cgaagggtccctagccgtcagcctc

SEQ ID NO: 1913540 - DNA, 25 bp, Homo sapien
tcgatggtcccgccaccgaagggtc

SEQ ID NO: 1913541 - DNA, 25 bp, Homo sapien
cgtacaccgcggtgcggaggtacat

SEQ ID NO: 1913542 - DNA, 25 bp, Homo sapien
tgaacaccttctagagcagctgcag

SEQ ID NO: 1913543 - DNA, 25 bp, Homo sapien
ggttcaccgggtatcctactgcgtc

SEQ ID NO: 1913544 - DNA, 25 bp, Homo sapien
tccgggctccggcaggtgaacacct

SEQ ID NO: 1913545 - DNA, 25 bp, Homo sapien
ggctaccctaacttctagagtctgg

SEQ ID NO: 1913546 - DNA, 25 bp, Homo sapien
ctaccctaacttctagagtctggaa

SEQ ID NO: 1913547 - DNA, 25 bp, Homo sapien
taccctaacttctagagtctggaaa

SEQ ID NO: 1913548 - DNA, 25 bp, Homo sapien
gctaccctaacttctagagtctgga

SEQ ID NO: 1913549 - DNA, 25 bp, Homo sapien
ggaacctcaatgacagcaggacata

SEQ ID NO: 1913550 - DNA, 25 bp, Homo sapien
taagcagtcgtgaccaggaacctca

SEQ ID NO: 1913551 - DNA, 25 bp, Homo sapien
gctattctgtatatcgccatcatca

SEQ ID NO: 1913552 - DNA, 25 bp, Homo sapien
ctggttctcataagcagtcgtgacc

SEQ ID NO: 1913553 - DNA, 25 bp, Homo sapien
tgtcacacacctccagttgaaaggc

SEQ ID NO: 1913554 - DNA, 25 bp, Homo sapien
tgaaggtcactagtccacagactcg

SEQ ID NO: 1913555 - DNA, 25 bp, Homo sapien
cataacaacatgctgcggtgagtca

SEQ ID NO: 1913556 - DNA, 25 bp, Homo sapien
catggactctgggatacttggcagc

SEQ ID NO: 1913557 - DNA, 25 bp, Homo sapien
tggctcctctgtggttcttcagctt

SEQ ID NO: 1913558 - DNA, 25 bp, Homo sapien
gctcctctgtggttcttcagcttca

SEQ ID NO: 1913559 - DNA, 25 bp, Homo sapien
ttgtaatttggctcctctgtggttc

SEQ ID NO: 1913560 - DNA, 25 bp, Homo sapien
gtaatttggctcctctgtggttctt

SEQ ID NO: 1913561 - DNA, 25 bp, Homo sapien
agatactttgcgcaagacaattacc

SEQ ID NO: 1913562 - DNA, 25 bp, Homo sapien
aaaggaagatactttgcgcaagaca

SEQ ID NO: 1913563 - DNA, 25 bp, Homo sapien
ttgcgcaagacaattaccatgattc

SEQ ID NO: 1913564 - DNA, 25 bp, Homo sapien
tactttgcgcaagacaattaccatg

SEQ ID NO: 1913565 - DNA, 25 bp, Homo sapien
gctcctctacagttgtttctctatc

SEQ ID NO: 1913566 - DNA, 25 bp, Homo sapien
tgctcctctacagttgtttctctat

SEQ ID NO: 1913567 - DNA, 25 bp, Homo sapien
ttttgatactatgaattttatcatc

SEQ ID NO: 1913568 - DNA, 25 bp, Homo sapien
taacgtttcagagcctgagttttca

SEQ ID NO: 1913569 - DNA, 25 bp, Homo sapien
gagcctgagttttcaaccagctgac

SEQ ID NO: 1913570 - DNA, 25 bp, Homo sapien
cagagcctgagttttcaaccagctg

SEQ ID NO: 1913571 - DNA, 25 bp, Homo sapien
gcctgagttttcaaccagctgacag

SEQ ID NO: 1913572 - DNA, 25 bp, Homo sapien
ccttgtgtaggagcagcaggatgcc

SEQ ID NO: 1913573 - DNA, 25 bp, Homo sapien
ctcccttgtgtaggagcagcaggat

SEQ ID NO: 1913574 - DNA, 25 bp, Homo sapien
tgtaggagcagcaggatgccttcca

SEQ ID NO: 1913575 - DNA, 25 bp, Homo sapien
tgtgtaggagcagcaggatgccttc

SEQ ID NO: 1913576 - DNA, 25 bp, Homo sapien
tcccagcactaagggtaacatctcc

SEQ ID NO: 1913577 - DNA, 25 bp, Homo sapien
tatttccaatacttgtcccagcact

SEQ ID NO: 1913578 - DNA, 25 bp, Homo sapien
taagggtaacatctcctgtgattgt

SEQ ID NO: 1913579 - DNA, 25 bp, Homo sapien
caatacttgtcccagcactaagggt

SEQ ID NO: 1913580 - DNA, 25 bp, Homo sapien
tttgcctggctgacttttctcttca

SEQ ID NO: 1913581 - DNA, 25 bp, Homo sapien
ctgacttttctcttcataaaaaggc

SEQ ID NO: 1913582 - DNA, 25 bp, Homo sapien
cctggctgacttttctcttcataaa

SEQ ID NO: 1913583 - DNA, 25 bp, Homo sapien
gacttttctcttcataaaaaggcat

SEQ ID NO: 1913584 - DNA, 25 bp, Homo sapien
tcatattgatgcctgcaaaggatgt

SEQ ID NO: 1913585 - DNA, 25 bp, Homo sapien
caacccctgttaacttcaatgtgaa

SEQ ID NO: 1913586 - DNA, 25 bp, Homo sapien
aattcccctgtatctcagcatccag

SEQ ID NO: 1913587 - DNA, 25 bp, Homo sapien
tcagactttctcgatgtattaccat

SEQ ID NO: 1913588 - DNA, 25 bp, Homo sapien
taggctgaaaagaaacccatgactt

SEQ ID NO: 1913589 - DNA, 25 bp, Homo sapien
aacccatggattcggagggctgacg

SEQ ID NO: 1913590 - DNA, 25 bp, Homo sapien
ccttggttggttaaatctaggaatg

SEQ ID NO: 1913591 - DNA, 25 bp, Homo sapien
tcagggactaatacccatcctggtg

SEQ ID NO: 1913592 - DNA, 25 bp, Homo sapien
ggaatgagcaccatacattgttctt

SEQ ID NO: 1913593 - DNA, 25 bp, Homo sapien
ttatctgcttaactaaggaccatcg

SEQ ID NO: 1913594 - DNA, 25 bp, Homo sapien
tccctctttggtttaatcacatttc

SEQ ID NO: 1913595 - DNA, 25 bp, Homo sapien
tcttctctttacaccgtcactgaaa

SEQ ID NO: 1913596 - DNA, 25 bp, Homo sapien
actgtcattatggtgctgtgcttta

SEQ ID NO: 1913597 - DNA, 25 bp, Homo sapien
tcactgtcattatggtgctgtgctt

SEQ ID NO: 1913598 - DNA, 25 bp, Homo sapien
gatcactgtcattatggtgctgtgc

SEQ ID NO: 1913599 - DNA, 25 bp, Homo sapien
gtcattatggtgctgtgctttattt

SEQ ID NO: 1913600 - DNA, 25 bp, Homo sapien
ccattatgcctagcaaagggttctg

SEQ ID NO: 1913601 - DNA, 25 bp, Homo sapien
tactcatgtgcgagatatgctgccc

SEQ ID NO: 1913602 - DNA, 25 bp, Homo sapien
ttccttaggctaccacagaacacag

SEQ ID NO: 1913603 - DNA, 25 bp, Homo sapien
gttaccacatttgcacattacccat

SEQ ID NO: 1913604 - DNA, 25 bp, Homo sapien
tttttgcaggattcaaaggacttcc

SEQ ID NO: 1913605 - DNA, 25 bp, Homo sapien
aacatggcattcttaacctttcttc

SEQ ID NO: 1913606 - DNA, 25 bp, Homo sapien
ctttgtcgtcactgaatggccttta

SEQ ID NO: 1913607 - DNA, 25 bp, Homo sapien
gattcaaaggacttccaacatggca

SEQ ID NO: 1913608 - DNA, 25 bp, Homo sapien
gccattaattgttccgtagctgaaa

SEQ ID NO: 1913609 - DNA, 25 bp, Homo sapien
ccaagactctgtttcgcatcatctg

SEQ ID NO: 1913610 - DNA, 25 bp, Homo sapien
gactctgtttcgcatcatctgcctc

SEQ ID NO: 1913611 - DNA, 25 bp, Homo sapien
gttttcagtacttctcaattctgca

SEQ ID NO: 1913612 - DNA, 25 bp, Homo sapien
caagaaagaatcttcttcaggaccc

SEQ ID NO: 1913613 - DNA, 25 bp, Homo sapien
atttataatagtaaagggatagaca

SEQ ID NO: 1913614 - DNA, 25 bp, Homo sapien
taggacatgcttcaagaaagaatct

SEQ ID NO: 1913615 - DNA, 25 bp, Homo sapien
caggacccaaaggaatgatgctatt

SEQ ID NO: 1913616 - DNA, 25 bp, Homo sapien
gaatttagacacactctttgcacta

SEQ ID NO: 1913617 - DNA, 25 bp, Homo sapien
gctaaattcattaccttgacacaga

SEQ ID NO: 1913618 - DNA, 25 bp, Homo sapien
cctgtggtagatctacagtgtgtga

SEQ ID NO: 1913619 - DNA, 25 bp, Homo sapien
tagcttccatagcaaccagtatcag

SEQ ID NO: 1913620 - DNA, 25 bp, Homo sapien
gtccccgccaaactgatgaattgca

SEQ ID NO: 1913621 - DNA, 25 bp, Homo sapien
tcccaccatctcatatcaaaggcta

SEQ ID NO: 1913622 - DNA, 25 bp, Homo sapien
aaaagtccccgccaaactgatgaat

SEQ ID NO: 1913623 - DNA, 25 bp, Homo sapien
tctcatatcaaaggctattgtatcc

SEQ ID NO: 1913624 - DNA, 25 bp, Homo sapien
tcctgctggtttgcctacttctata

SEQ ID NO: 1913625 - DNA, 25 bp, Homo sapien
ttcctcctgctggtttgcctacttc

SEQ ID NO: 1913626 - DNA, 25 bp, Homo sapien
ggtttgcctacttctatagccacac

SEQ ID NO: 1913627 - DNA, 25 bp, Homo sapien
gctggtttgcctacttctatagcca

SEQ ID NO: 1913628 - DNA, 25 bp, Homo sapien
catacagcctgttctagtacaccac

SEQ ID NO: 1913629 - DNA, 25 bp, Homo sapien
gatggttgaggaccaggtgactcca

SEQ ID NO: 1913630 - DNA, 25 bp, Homo sapien
tccgctgggattcgtactcttgaca

SEQ ID NO: 1913631 - DNA, 25 bp, Homo sapien
ttctagtcgtaagtgtccgctggga

SEQ ID NO: 1913632 - DNA, 25 bp, Homo sapien
ggctcatcatacaatttctcttctt

SEQ ID NO: 1913633 - DNA, 25 bp, Homo sapien
atttctcttcttttttagcattaat

SEQ ID NO: 1913634 - DNA, 25 bp, Homo sapien
aggctcatcatacaatttctcttct

SEQ ID NO: 1913635 - DNA, 25 bp, Homo sapien
tctcttcttttttagcattaatcat

SEQ ID NO: 1913636 - DNA, 25 bp, Homo sapien
aaagctggtgggtaaggaagcatgt

SEQ ID NO: 1913637 - DNA, 25 bp, Homo sapien
aagctggtgggtaaggaagcatgtt

SEQ ID NO: 1913638 - DNA, 25 bp, Homo sapien
tgtactttaagctatatttgttcca

SEQ ID NO: 1913639 - DNA, 25 bp, Homo sapien
ccattaagacagctttaattaacag

SEQ ID NO: 1913640 - DNA, 25 bp, Homo sapien
ataatttttttgctagctgcttgac

SEQ ID NO: 1913641 - DNA, 25 bp, Homo sapien
tttttcatagcctgtactttaagct

SEQ ID NO: 1913642 - DNA, 25 bp, Homo sapien
ctgagaagcaggcatactgatatcg

SEQ ID NO: 1913643 - DNA, 25 bp, Homo sapien
ggtgacaacctgaccacaaaaatga

SEQ ID NO: 1913644 - DNA, 25 bp, Homo sapien
gcaggcatactgatatcggaaatga

SEQ ID NO: 1913645 - DNA, 25 bp, Homo sapien
caggtgacaacctgaccacaaaaat

SEQ ID NO: 1913646 - DNA, 25 bp, Homo sapien
aaagcagtacataatgttaggcctc

SEQ ID NO: 1913647 - DNA, 25 bp, Homo sapien
gtacataatgttaggcctcttcaaa

SEQ ID NO: 1913648 - DNA, 25 bp, Homo sapien
taggcctcttcaaaggagcattcat

SEQ ID NO: 1913649 - DNA, 25 bp, Homo sapien
cagaaaaagcagtacataatgttag

SEQ ID NO: 1913650 - DNA, 25 bp, Homo sapien
tacattctatagtatgaaacttcat

SEQ ID NO: 1913651 - DNA, 25 bp, Homo sapien
gtgtgcctgcttctacactgaacca

SEQ ID NO: 1913652 - DNA, 25 bp, Homo sapien
aaccatacattctatagtatgaaac

SEQ ID NO: 1913653 - DNA, 25 bp, Homo sapien
gccaaattaggagttttatatagga

SEQ ID NO: 1913654 - DNA, 25 bp, Homo sapien
cgacttgcagaactcgagcagggcc

SEQ ID NO: 1913655 - DNA, 25 bp, Homo sapien
gacttgcagaactcgagcagggcct

SEQ ID NO: 1913656 - DNA, 25 bp, Homo sapien
tccgtgcccaggaagcctcgcctcc

SEQ ID NO: 1913657 - DNA, 25 bp, Homo sapien
gaactcgagcagggcctttagctct

SEQ ID NO: 1913658 - DNA, 25 bp, Homo sapien
cttgaggggactactggttatccgc

SEQ ID NO: 1913659 - DNA, 25 bp, Homo sapien
gcttgaggggactactggttatccg

SEQ ID NO: 1913660 - DNA, 25 bp, Homo sapien
caggcttgaggggactactggttat

SEQ ID NO: 1913661 - DNA, 25 bp, Homo sapien
tgaggggactactggttatccgcat

SEQ ID NO: 1913662 - DNA, 25 bp, Homo sapien
gttcatgtttggcacactccaccac

SEQ ID NO: 1913663 - DNA, 25 bp, Homo sapien
cattaaatggttgcagcagttcatg

SEQ ID NO: 1913664 - DNA, 25 bp, Homo sapien
gttgcagcagttcatgtttggcaca

SEQ ID NO: 1913665 - DNA, 25 bp, Homo sapien
acactccaccacacctatccgagcc

SEQ ID NO: 1913666 - DNA, 25 bp, Homo sapien
aacagcatgacatcaaaacgccttt

SEQ ID NO: 1913667 - DNA, 25 bp, Homo sapien
aagtaaacagcatgacatcaaaacg

SEQ ID NO: 1913668 - DNA, 25 bp, Homo sapien
taaacagcatgacatcaaaacgcct

SEQ ID NO: 1913669 - DNA, 25 bp, Homo sapien
cagcatgacatcaaaacgcctttcc

SEQ ID NO: 1913670 - DNA, 25 bp, Homo sapien
ttttcagtccatactcttcaggagt

SEQ ID NO: 1913671 - DNA, 25 bp, Homo sapien
tcagtccatactcttcaggagtgtc

SEQ ID NO: 1913672 - DNA, 25 bp, Homo sapien
tactcttcaggagtgtctcatttgt

SEQ ID NO: 1913673 - DNA, 25 bp, Homo sapien
ccatactcttcaggagtgtctcatt

SEQ ID NO: 1913674 - DNA, 25 bp, Homo sapien
gctggtctgtgggattctggataac

SEQ ID NO: 1913675 - DNA, 25 bp, Homo sapien
taacggttttttctccatcgatgac

SEQ ID NO: 1913676 - DNA, 25 bp, Homo sapien
ctgtgggattctggataacggtttt

SEQ ID NO: 1913677 - DNA, 25 bp, Homo sapien
catctttttcgtggtccttcttctg

SEQ ID NO: 1913678 - DNA, 25 bp, Homo sapien
gtgtgttctgatttccaggtttgac

SEQ ID NO: 1913679 - DNA, 25 bp, Homo sapien
ttgtgtgttctgatttccaggtttg

SEQ ID NO: 1913680 - DNA, 25 bp, Homo sapien
tgtgtgttctgatttccaggtttga

SEQ ID NO: 1913681 - DNA, 25 bp, Homo sapien
tgagctgccttaataacatctgctt

SEQ ID NO: 1913682 - DNA, 25 bp, Homo sapien
aggcgtagggcagcttcagcacaaa

SEQ ID NO: 1913683 - DNA, 25 bp, Homo sapien
gcagcttcagcacaaaggtgagctg

SEQ ID NO: 1913684 - DNA, 25 bp, Homo sapien
cagcacaaaggtgagctgccttaat

SEQ ID NO: 1913685 - DNA, 25 bp, Homo sapien
cacggcatcacttttctcacacagg

SEQ ID NO: 1913686 - DNA, 25 bp, Homo sapien
tcacacaggctcagtaccaatacac

SEQ ID NO: 1913687 - DNA, 25 bp, Homo sapien
agaatataatcctggccactctcca

SEQ ID NO: 1913688 - DNA, 25 bp, Homo sapien
tacttgggtcccctgagccacatca

SEQ ID NO: 1913689 - DNA, 25 bp, Homo sapien
cctaagtacccggtgggcaatgtcg

SEQ ID NO: 1913690 - DNA, 25 bp, Homo sapien
taagtacccggtgggcaatgtcgcc

SEQ ID NO: 1913691 - DNA, 25 bp, Homo sapien
cccggtgggcaatgtcgccccccat

SEQ ID NO: 1913692 - DNA, 25 bp, Homo sapien
ctaagtacccggtgggcaatgtcgc

SEQ ID NO: 1913693 - DNA, 25 bp, Homo sapien
ttggtcacaaccaggtcttcagcga

SEQ ID NO: 1913694 - DNA, 25 bp, Homo sapien
gtcttcagcgatagtttgcttctgc

SEQ ID NO: 1913695 - DNA, 25 bp, Homo sapien
caaccaggtcttcagcgatagtttg

SEQ ID NO: 1913696 - DNA, 25 bp, Homo sapien
tcacaaccaggtcttcagcgatagt

SEQ ID NO: 1913697 - DNA, 25 bp, Homo sapien
tatgaccaatttgagcaggctgaca

SEQ ID NO: 1913698 - DNA, 25 bp, Homo sapien
gattatcgaagcctaaaaagagcag

SEQ ID NO: 1913699 - DNA, 25 bp, Homo sapien
ggtcttgcggccatgaatcccattt

SEQ ID NO: 1913700 - DNA, 25 bp, Homo sapien
cccatttgggcagctatgtctggaa

SEQ ID NO: 1913701 - DNA, 25 bp, Homo sapien
caccccaatggtgtgatgcatgcta

SEQ ID NO: 1913702 - DNA, 25 bp, Homo sapien
caaactcagggatgaatctatgtca

SEQ ID NO: 1913703 - DNA, 25 bp, Homo sapien
tatgtattgttaagcgtctacaccc

SEQ ID NO: 1913704 - DNA, 25 bp, Homo sapien
tatacgtaatacctggcatggctac

SEQ ID NO: 1913705 - DNA, 25 bp, Homo sapien
tttaaatataagacccgaagctgca

SEQ ID NO: 1913706 - DNA, 25 bp, Homo sapien
acgtccccaccggatacagagtgtg

SEQ ID NO: 1913707 - DNA, 25 bp, Homo sapien
gatcggtgcctttacaacccctgag

SEQ ID NO: 1913708 - DNA, 25 bp, Homo sapien
tcagctatgactccaaaagtacagg

SEQ ID NO: 1913709 - DNA, 25 bp, Homo sapien
gattagggactgaactgctgatagg

SEQ ID NO: 1913710 - DNA, 25 bp, Homo sapien
tccaccttccgaatatagggatgtg

SEQ ID NO: 1913711 - DNA, 25 bp, Homo sapien
aaacaggagcgttcactgtctcggg

SEQ ID NO: 1913712 - DNA, 25 bp, Homo sapien
ctgaagggattagggactgaactgc

SEQ ID NO: 1913713 - DNA, 25 bp, Homo sapien
gccaggatttagaattcaccaggcc

SEQ ID NO: 1913714 - DNA, 25 bp, Homo sapien
aaaatgccaggatttagaattcacc

SEQ ID NO: 1913715 - DNA, 25 bp, Homo sapien
aatgccaggatttagaattcaccag

SEQ ID NO: 1913716 - DNA, 25 bp, Homo sapien
ttcaccaggccatttagcttccttt

SEQ ID NO: 1913717 - DNA, 25 bp, Homo sapien
gtaatgtggacagctcgtatctgcc

SEQ ID NO: 1913718 - DNA, 25 bp, Homo sapien
gaaacagcacccaaatagagtgtaa

SEQ ID NO: 1913719 - DNA, 25 bp, Homo sapien
ggcccacatcatctaaggttatttg

SEQ ID NO: 1913720 - DNA, 25 bp, Homo sapien
agcttatggcccacatcatctaagg

SEQ ID NO: 1913721 - DNA, 25 bp, Homo sapien
tctgaatctcccccatgaagacact

SEQ ID NO: 1913722 - DNA, 25 bp, Homo sapien
ggcttctgaatctcccccatgaaga

SEQ ID NO: 1913723 - DNA, 25 bp, Homo sapien
gcttctgaatctcccccatgaagac

SEQ ID NO: 1913724 - DNA, 25 bp, Homo sapien
tgaatctcccccatgaagacactcc

SEQ ID NO: 1913725 - DNA, 25 bp, Homo sapien
gcatgatctatgtcttctctctaac

SEQ ID NO: 1913726 - DNA, 25 bp, Homo sapien
tctctgccctggacatgtctgcatg

SEQ ID NO: 1913727 - DNA, 25 bp, Homo sapien
gcactctagggtcatggcaacttgg

SEQ ID NO: 1913728 - DNA, 25 bp, Homo sapien
tgcacagcttgaccagaaagcccct

SEQ ID NO: 1913729 - DNA, 25 bp, Homo sapien
tgcctcacacagcagaccctggtag

SEQ ID NO: 1913730 - DNA, 25 bp, Homo sapien
gatggctttcagatggtcttgtgaa

SEQ ID NO: 1913731 - DNA, 25 bp, Homo sapien
gcagaccctggtagctggatagagt

SEQ ID NO: 1913732 - DNA, 25 bp, Homo sapien
tggatagagtgagatggctttcaga

SEQ ID NO: 1913733 - DNA, 25 bp, Homo sapien
caatttagtactccatctgacagtg

SEQ ID NO: 1913734 - DNA, 25 bp, Homo sapien
tagacaatttagtactccatctgac

SEQ ID NO: 1913735 - DNA, 25 bp, Homo sapien
gctgtagacaatttagtactccatc

SEQ ID NO: 1913736 - DNA, 25 bp, Homo sapien
gacaatttagtactccatctgacag

SEQ ID NO: 1913737 - DNA, 25 bp, Homo sapien
aactttggaagtctcaaggcctgga

SEQ ID NO: 1913738 - DNA, 25 bp, Homo sapien
aaagtaactacatatggcactgcca

SEQ ID NO: 1913739 - DNA, 25 bp, Homo sapien
tgtgacttagacaaggacaggaact

SEQ ID NO: 1913740 - DNA, 25 bp, Homo sapien
gcaagaagattgtcctctgcccgct

SEQ ID NO: 1913741 - DNA, 25 bp, Homo sapien
accgtgtgggactgcttaaagctcc

SEQ ID NO: 1913742 - DNA, 25 bp, Homo sapien
tgatagctcttaattggaatttttg

SEQ ID NO: 1913743 - DNA, 25 bp, Homo sapien
ttgtttccataaccgtgtgggactg

SEQ ID NO: 1913744 - DNA, 25 bp, Homo sapien
ccataaccgtgtgggactgcttaaa

SEQ ID NO: 1913745 - DNA, 25 bp, Homo sapien
tctgcacatggaaggttcattcacc

SEQ ID NO: 1913746 - DNA, 25 bp, Homo sapien
cgtctgcacatggaaggttcattca

SEQ ID NO: 1913747 - DNA, 25 bp, Homo sapien
tgcacatggaaggttcattcaccac

SEQ ID NO: 1913748 - DNA, 25 bp, Homo sapien
ctgcacatggaaggttcattcacca

SEQ ID NO: 1913749 - DNA, 25 bp, Homo sapien
tgtttcttccacattgtctacagtt

SEQ ID NO: 1913750 - DNA, 25 bp, Homo sapien
aaatagtcccttatacacttcttgt

SEQ ID NO: 1913751 - DNA, 25 bp, Homo sapien
tacagttcatagaatacacacaaac

SEQ ID NO: 1913752 - DNA, 25 bp, Homo sapien
cacaacttggttgatttgattcatg

SEQ ID NO: 1913753 - DNA, 25 bp, Homo sapien
caaaattccctgtctgttctttcca

SEQ ID NO: 1913754 - DNA, 25 bp, Homo sapien
ggtagcactgtccatatccttgata

SEQ ID NO: 1913755 - DNA, 25 bp, Homo sapien
gaggagatctctctacgtggtagca

SEQ ID NO: 1913756 - DNA, 25 bp, Homo sapien
tcagtattggagtttggaggagatc

SEQ ID NO: 1913757 - DNA, 25 bp, Homo sapien
tacacagtgatagtgaggagcccca

SEQ ID NO: 1913758 - DNA, 25 bp, Homo sapien
tgacagcagaggtctaaatccaaaa

SEQ ID NO: 1913759 - DNA, 25 bp, Homo sapien
gaggtctaaatccaaaatgataaag

SEQ ID NO: 1913760 - DNA, 25 bp, Homo sapien
cagcagaggtctaaatccaaaatga

SEQ ID NO: 1913761 - DNA, 25 bp, Homo sapien
tttgacagcagaggtctaaatccaa

SEQ ID NO: 1913762 - DNA, 25 bp, Homo sapien
tttcaccccttggtcttctgttgct

SEQ ID NO: 1913763 - DNA, 25 bp, Homo sapien
ttttcaccccttggtcttctgttgc

SEQ ID NO: 1913764 - DNA, 25 bp, Homo sapien
agtttctgctggaaatctgtaagta

SEQ ID NO: 1913765 - DNA, 25 bp, Homo sapien
gaaatctgtaagtaattgtcataaa

SEQ ID NO: 1913766 - DNA, 25 bp, Homo sapien
tgttatgagcaaaactcttacagag

SEQ ID NO: 1913767 - DNA, 25 bp, Homo sapien
agcagcagttaaaggaaccattgtt

SEQ ID NO: 1913768 - DNA, 25 bp, Homo sapien
ccattgttatgagcaaaactcttac

SEQ ID NO: 1913769 - DNA, 25 bp, Homo sapien
gcagttaaaggaaccattgttatga

SEQ ID NO: 1913770 - DNA, 25 bp, Homo sapien
aggagaggaatttaagagccaaagg

SEQ ID NO: 1913771 - DNA, 25 bp, Homo sapien
ccagggaagacaccttaaaggagag

SEQ ID NO: 1913772 - DNA, 25 bp, Homo sapien
aaggagaggaatttaagagccaaag

SEQ ID NO: 1913773 - DNA, 25 bp, Homo sapien
cctctttataattacgacaacgtca

SEQ ID NO: 1913774 - DNA, 25 bp, Homo sapien
ttataattacgacaacgtcatcatt

SEQ ID NO: 1913775 - DNA, 25 bp, Homo sapien
cgacaacgtcatcatttgtaacatc

SEQ ID NO: 1913776 - DNA, 25 bp, Homo sapien
taattacgacaacgtcatcatttgt

SEQ ID NO: 1913777 - DNA, 25 bp, Homo sapien
tcaaaaaacaattttgagtcattgt

SEQ ID NO: 1913778 - DNA, 25 bp, Homo sapien
caaaaaacaattttgagtcattgtt

SEQ ID NO: 1913779 - DNA, 25 bp, Homo sapien
gatcctgctgtaaagctaaacttaa

SEQ ID NO: 1913780 - DNA, 25 bp, Homo sapien
ttgatcctgctgtaaagctaaactt

SEQ ID NO: 1913781 - DNA, 25 bp, Homo sapien
aaacttaattcactgagtctctgtg

SEQ ID NO: 1913782 - DNA, 25 bp, Homo sapien
cactgagtctctgtggatactgcat

SEQ ID NO: 1913783 - DNA, 25 bp, Homo sapien
cttgggactcgggcttctctgaagt

SEQ ID NO: 1913784 - DNA, 25 bp, Homo sapien
ttgggactcgggcttctctgaagtt

SEQ ID NO: 1913785 - DNA, 25 bp, Homo sapien
tgggactcgggcttctctgaagtta

SEQ ID NO: 1913786 - DNA, 25 bp, Homo sapien
ctctcccaccagtccatgagatgtg

SEQ ID NO: 1913787 - DNA, 25 bp, Homo sapien
ccaccagtccatgagatgtggatat

SEQ ID NO: 1913788 - DNA, 25 bp, Homo sapien
tgagatgtggatatggatgttcagt

SEQ ID NO: 1913789 - DNA, 25 bp, Homo sapien
gtcccggagattctctcccaccagt

SEQ ID NO: 1913790 - DNA, 25 bp, Homo sapien
gctctcattgttgtctgtctctggt

SEQ ID NO: 1913791 - DNA, 25 bp, Homo sapien
taagatgctctcattgttgtctgtc

SEQ ID NO: 1913792 - DNA, 25 bp, Homo sapien
tctcattgttgtctgtctctggtac

SEQ ID NO: 1913793 - DNA, 25 bp, Homo sapien
ctggtacttaagatgctctcattgt

SEQ ID NO: 1913794 - DNA, 25 bp, Homo sapien
tggaccaattttccatctcagctgc

SEQ ID NO: 1913795 - DNA, 25 bp, Homo sapien
ctgctgccatagtgctctgccccat

SEQ ID NO: 1913796 - DNA, 25 bp, Homo sapien
gctgctgccatagtgctctgcccca

SEQ ID NO: 1913797 - DNA, 25 bp, Homo sapien
gaccaattttccatctcagctgctg

SEQ ID NO: 1913798 - DNA, 25 bp, Homo sapien
tgttgggttgaagtcatcatcagag

SEQ ID NO: 1913799 - DNA, 25 bp, Homo sapien
tccagaataagtccaactgttgggt

SEQ ID NO: 1913800 - DNA, 25 bp, Homo sapien
gacttaaggttgtggattattccat

SEQ ID NO: 1913801 - DNA, 25 bp, Homo sapien
gaatctagctgtggaagtgatgtca

SEQ ID NO: 1913802 - DNA, 25 bp, Homo sapien
ttcactgaagtagttgtaaaagtga

SEQ ID NO: 1913803 - DNA, 25 bp, Homo sapien
tcactgaagtagttgtaaaagtgac

SEQ ID NO: 1913804 - DNA, 25 bp, Homo sapien
actgaagtagttgtaaaagtgacat

SEQ ID NO: 1913805 - DNA, 25 bp, Homo sapien
cactgaagtagttgtaaaagtgaca

SEQ ID NO: 1913806 - DNA, 25 bp, Homo sapien
tgctgtcgctcagtaatatttaaat

SEQ ID NO: 1913807 - DNA, 25 bp, Homo sapien
gctgtcgctcagtaatatttaaata

SEQ ID NO: 1913808 - DNA, 25 bp, Homo sapien
aacaacacttttatgagtatgctgc

SEQ ID NO: 1913809 - DNA, 25 bp, Homo sapien
gccaatttgcacctatttcaataga

SEQ ID NO: 1913810 - DNA, 25 bp, Homo sapien
cttatgtgattgacgtggaatttca

SEQ ID NO: 1913811 - DNA, 25 bp, Homo sapien
ttgacgtggaatttcaacaacactt

SEQ ID NO: 1913812 - DNA, 25 bp, Homo sapien
cagattctgttgaggtgcctttagc

SEQ ID NO: 1913813 - DNA, 25 bp, Homo sapien
cagaacaaagttggccacgtgttga

SEQ ID NO: 1913814 - DNA, 25 bp, Homo sapien
tcagctgcacccctcttcgagtgtt

SEQ ID NO: 1913815 - DNA, 25 bp, Homo sapien
tagcgatatgaagcacctgtcccag

SEQ ID NO: 1913816 - DNA, 25 bp, Homo sapien
gcacagttcatcactcttgggcagg

SEQ ID NO: 1913817 - DNA, 25 bp, Homo sapien
gaatctaagtgcctgactaaagtga

SEQ ID NO: 1913818 - DNA, 25 bp, Homo sapien
tctgagttgcagtccagcaatataa

SEQ ID NO: 1913819 - DNA, 25 bp, Homo sapien
tcatgctgagttcctgatgcacagt

SEQ ID NO: 1913820 - DNA, 25 bp, Homo sapien
ctgcactgtcaaatacagtggccac

SEQ ID NO: 1913821 - DNA, 25 bp, Homo sapien
gcactgtcaaatacagtggccacta

SEQ ID NO: 1913822 - DNA, 25 bp, Homo sapien
acagtggccactagccacgtgtggt

SEQ ID NO: 1913823 - DNA, 25 bp, Homo sapien
actgtcaaatacagtggccactagc

SEQ ID NO: 1913824 - DNA, 25 bp, Homo sapien
tgctgcagcacgcataaaccaacac

SEQ ID NO: 1913825 - DNA, 25 bp, Homo sapien
ctttgtccactgagtaaattacatt

SEQ ID NO: 1913826 - DNA, 25 bp, Homo sapien
tgtccactgagtaaattacattcat

SEQ ID NO: 1913827 - DNA, 25 bp, Homo sapien
tacattcattatgcccactgctgca

SEQ ID NO: 1913828 - DNA, 25 bp, Homo sapien
gcaccagaggcaagagtcagtcaga

SEQ ID NO: 1913829 - DNA, 25 bp, Homo sapien
tagggctgccttgacgaagtaccac

SEQ ID NO: 1913830 - DNA, 25 bp, Homo sapien
gaactgcaccgaggctagtgtggct

SEQ ID NO: 1913831 - DNA, 25 bp, Homo sapien
gaaacaggacatccagaggctccag

SEQ ID NO: 1913832 - DNA, 25 bp, Homo sapien
gggcatttccccatgtcccggaagc

SEQ ID NO: 1913833 - DNA, 25 bp, Homo sapien
tattttagcaacattcgggtcagga

SEQ ID NO: 1913834 - DNA, 25 bp, Homo sapien
tgttttcacagtggaccgtactgag

SEQ ID NO: 1913835 - DNA, 25 bp, Homo sapien
tcagctccactcctataagagacca

SEQ ID NO: 1913836 - DNA, 25 bp, Homo sapien
atttgttcacttctgatcctaaagc

SEQ ID NO: 1913837 - DNA, 25 bp, Homo sapien
tgttcacttctgatcctaaagcgaa

SEQ ID NO: 1913838 - DNA, 25 bp, Homo sapien
tcacttctgatcctaaagcgaaggt

SEQ ID NO: 1913839 - DNA, 25 bp, Homo sapien
ttctgatcctaaagcgaaggtggag

SEQ ID NO: 1913840 - DNA, 25 bp, Homo sapien
tgaaacaaaagagttctgaagggtc

SEQ ID NO: 1913841 - DNA, 25 bp, Homo sapien
actgaaacaaaagagttctgaaggg

SEQ ID NO: 1913842 - DNA, 25 bp, Homo sapien
ctggaggtgccaaagactgaaacaa

SEQ ID NO: 1913843 - DNA, 25 bp, Homo sapien
gagttctgaagggtcccttcttcat

SEQ ID NO: 1913844 - DNA, 25 bp, Homo sapien
gtaggaataagcagctccacgtata

SEQ ID NO: 1913845 - DNA, 25 bp, Homo sapien
caagtaggaataagcagctccacgt

SEQ ID NO: 1913846 - DNA, 25 bp, Homo sapien
aagtaggaataagcagctccacgta

SEQ ID NO: 1913847 - DNA, 25 bp, Homo sapien
taggaataagcagctccacgtatac

SEQ ID NO: 1913848 - DNA, 25 bp, Homo sapien
tatatatcacttcacaatatcccat

SEQ ID NO: 1913849 - DNA, 25 bp, Homo sapien
atatatatcacttcacaatatccca

SEQ ID NO: 1913850 - DNA, 25 bp, Homo sapien
aatatatatcacttcacaatatccc

SEQ ID NO: 1913851 - DNA, 25 bp, Homo sapien
ggaggccagcacaccttgacctctg

SEQ ID NO: 1913852 - DNA, 25 bp, Homo sapien
gaattccaggttcctgcttcccaaa

SEQ ID NO: 1913853 - DNA, 25 bp, Homo sapien
cctctgtggctctggtgcctgagga

SEQ ID NO: 1913854 - DNA, 25 bp, Homo sapien
agcatctggattgtctcctctgtgg

SEQ ID NO: 1913855 - DNA, 25 bp, Homo sapien
ttctttctggagttaaatggactat

SEQ ID NO: 1913856 - DNA, 25 bp, Homo sapien
gctttctatgtttgtaaacctgagg

SEQ ID NO: 1913857 - DNA, 25 bp, Homo sapien
ttctatgtttgtaaacctgaggtaa

SEQ ID NO: 1913858 - DNA, 25 bp, Homo sapien
ttctggagttaaatggactatgcat

SEQ ID NO: 1913859 - DNA, 25 bp, Homo sapien
gattattatggacgccccactgtgc

SEQ ID NO: 1913860 - DNA, 25 bp, Homo sapien
ccactcggtgtaacatactgtgtcg

SEQ ID NO: 1913861 - DNA, 25 bp, Homo sapien
gcaacctttttacagttggcataag

SEQ ID NO: 1913862 - DNA, 25 bp, Homo sapien
gtgtcgcctgctgttgtttgcaacc

SEQ ID NO: 1913863 - DNA, 25 bp, Homo sapien
agctctgctctgaacccgatagggt

SEQ ID NO: 1913864 - DNA, 25 bp, Homo sapien
ggcaggggctcaatagactggagag

SEQ ID NO: 1913865 - DNA, 25 bp, Homo sapien
gggcaggggctcaatagactggaga

SEQ ID NO: 1913866 - DNA, 25 bp, Homo sapien
tgctctgaacccgatagggtgtggg

SEQ ID NO: 1913867 - DNA, 25 bp, Homo sapien
aaacagaaagaataccaccagctcc

SEQ ID NO: 1913868 - DNA, 25 bp, Homo sapien
tccagaacagcagttacaaacagaa

SEQ ID NO: 1913869 - DNA, 25 bp, Homo sapien
cagctcctgggaaattttgaggaat

SEQ ID NO: 1913870 - DNA, 25 bp, Homo sapien
gctcctgggaaattttgaggaattc

SEQ ID NO: 1913871 - DNA, 25 bp, Homo sapien
attcatgtcagcggcagcattttcc

SEQ ID NO: 1913872 - DNA, 25 bp, Homo sapien
ttcatgtcagcggcagcattttcct

SEQ ID NO: 1913873 - DNA, 25 bp, Homo sapien
agaatcattgtctggcctctgctat

SEQ ID NO: 1913874 - DNA, 25 bp, Homo sapien
tcatgtcagcggcagcattttcctc

SEQ ID NO: 1913875 - DNA, 25 bp, Homo sapien
ttactgttccctccactggcaccat

SEQ ID NO: 1913876 - DNA, 25 bp, Homo sapien
tcttactgttccctccactggcacc

SEQ ID NO: 1913877 - DNA, 25 bp, Homo sapien
ttactcttactgttccctccactgg

SEQ ID NO: 1913878 - DNA, 25 bp, Homo sapien
ctttactcttactgttccctccact

SEQ ID NO: 1913879 - DNA, 25 bp, Homo sapien
ccccacctttaaagcgatcacccat

SEQ ID NO: 1913880 - DNA, 25 bp, Homo sapien
tccccacctttaaagcgatcaccca

SEQ ID NO: 1913881 - DNA, 25 bp, Homo sapien
gttacatcaccttttttatgataag

SEQ ID NO: 1913882 - DNA, 25 bp, Homo sapien
aaaatactgatgtgtactgtccaac

SEQ ID NO: 1913883 - DNA, 25 bp, Homo sapien
tgtactgtccaaccctccaatcttg

SEQ ID NO: 1913884 - DNA, 25 bp, Homo sapien
gatgtgtactgtccaaccctccaat

SEQ ID NO: 1913885 - DNA, 25 bp, Homo sapien
tcagcaaatctaaatacggcaggaa

SEQ ID NO: 1913886 - DNA, 25 bp, Homo sapien
aattattcatccctcttggctctgc

SEQ ID NO: 1913887 - DNA, 25 bp, Homo sapien
ggcattccagcttacgagtcagact

SEQ ID NO: 1913888 - DNA, 25 bp, Homo sapien
gcttgataagagtgagtcagcctcc

SEQ ID NO: 1913889 - DNA, 25 bp, Homo sapien
gaagttgccatgagcatctgttcac

SEQ ID NO: 1913890 - DNA, 25 bp, Homo sapien
gttgccatgagcatctgttcactgt

SEQ ID NO: 1913891 - DNA, 25 bp, Homo sapien
aagttgccatgagcatctgttcact

SEQ ID NO: 1913892 - DNA, 25 bp, Homo sapien
agttgccatgagcatctgttcactg

SEQ ID NO: 1913893 - DNA, 25 bp, Homo sapien
gttatgatcgaatgttaattagatc

SEQ ID NO: 1913894 - DNA, 25 bp, Homo sapien
cttgagtgtacattccttccttctc

SEQ ID NO: 1913895 - DNA, 25 bp, Homo sapien
cttgtgggaaaacgcagaagggcct

SEQ ID NO: 1913896 - DNA, 25 bp, Homo sapien
attttctcttgtgggaaaacgcaga

SEQ ID NO: 1913897 - DNA, 25 bp, Homo sapien
taccacttactgagctgctgcaaat

SEQ ID NO: 1913898 - DNA, 25 bp, Homo sapien
ctcctggggaaagacaacgtggcag

SEQ ID NO: 1913899 - DNA, 25 bp, Homo sapien
ggaaagacaacgtggcagggccttg

SEQ ID NO: 1913900 - DNA, 25 bp, Homo sapien
tcttgttcccagtctaccacttact

SEQ ID NO: 1913901 - DNA, 25 bp, Homo sapien
cttatcagctaacaccaatggtcta

SEQ ID NO: 1913902 - DNA, 25 bp, Homo sapien
ggtccaggggcttatcagctaacac

SEQ ID NO: 1913903 - DNA, 25 bp, Homo sapien
taacaccaatggtctactggctgtg

SEQ ID NO: 1913904 - DNA, 25 bp, Homo sapien
caatggtctactggctgtgtcctcc

SEQ ID NO: 1913905 - DNA, 25 bp, Homo sapien
ctgaaactcccataggaaaccttgg

SEQ ID NO: 1913906 - DNA, 25 bp, Homo sapien
gaaaccttggtcagactctatgtcc

SEQ ID NO: 1913907 - DNA, 25 bp, Homo sapien
cagactctatgtcccaattttgcat

SEQ ID NO: 1913908 - DNA, 25 bp, Homo sapien
cccataggaaaccttggtcagactc

SEQ ID NO: 1913909 - DNA, 25 bp, Homo sapien
gaacaagcacttctggcgctcacaa

SEQ ID NO: 1913910 - DNA, 25 bp, Homo sapien
ggtcttgtcagttcatgtcataacc

SEQ ID NO: 1913911 - DNA, 25 bp, Homo sapien
gaagtaaagcatcttgacctatcat

SEQ ID NO: 1913912 - DNA, 25 bp, Homo sapien
gctctgtgccttagtatgtttggct

SEQ ID NO: 1913913 - DNA, 25 bp, Homo sapien
ttgcttggtctctagagaggcttca

SEQ ID NO: 1913914 - DNA, 25 bp, Homo sapien
ggtttgaggacattcctagcacaat

SEQ ID NO: 1913915 - DNA, 25 bp, Homo sapien
ggtctcttaacctgaggtccattgg

SEQ ID NO: 1913916 - DNA, 25 bp, Homo sapien
gaggcttcaggtagtctgtgaatcc

SEQ ID NO: 1913917 - DNA, 25 bp, Homo sapien
ggcaatgttagacatccttaagacg

SEQ ID NO: 1913918 - DNA, 25 bp, Homo sapien
taactgtacttgaaggcaatgttag

SEQ ID NO: 1913919 - DNA, 25 bp, Homo sapien
agacgtggcagattttggcaaaagc

SEQ ID NO: 1913920 - DNA, 25 bp, Homo sapien
tagacatccttaagacgtggcagat

SEQ ID NO: 1913921 - DNA, 25 bp, Homo sapien
tcagtgctgcttttcgaataccctt

SEQ ID NO: 1913922 - DNA, 25 bp, Homo sapien
tcagaacttggctacaggagaacag

SEQ ID NO: 1913923 - DNA, 25 bp, Homo sapien
ggagtcactggttgtaaacttcaca

SEQ ID NO: 1913924 - DNA, 25 bp, Homo sapien
ttcgaatacccttgtagcattttct

SEQ ID NO: 1913925 - DNA, 25 bp, Homo sapien
ctgttgtcaactccacctttctaga

SEQ ID NO: 1913926 - DNA, 25 bp, Homo sapien
catcatttggctagacttgattcgt

SEQ ID NO: 1913927 - DNA, 25 bp, Homo sapien
tggctagacttgattcgtccccagc

SEQ ID NO: 1913928 - DNA, 25 bp, Homo sapien
gccacgtccagtctgttgtcaactc

SEQ ID NO: 1913929 - DNA, 25 bp, Homo sapien
gatcatagctcctctgtgcatcatg

SEQ ID NO: 1913930 - DNA, 25 bp, Homo sapien
ctttcatggttgtaagatggtgcca

SEQ ID NO: 1913931 - DNA, 25 bp, Homo sapien
gatggtgccacagttccaggaagta

SEQ ID NO: 1913932 - DNA, 25 bp, Homo sapien
tcccttgacatttcgttggccacag

SEQ ID NO: 1913933 - DNA, 25 bp, Homo sapien
ttgggaccaacccaaatgccaagca

SEQ ID NO: 1913934 - DNA, 25 bp, Homo sapien
tgccaagcaatgatagactgggtaa

SEQ ID NO: 1913935 - DNA, 25 bp, Homo sapien
acttgggaccaacccaaatgccaag

SEQ ID NO: 1913936 - DNA, 25 bp, Homo sapien
aacactggtttagaaataccatttg

SEQ ID NO: 1913937 - DNA, 25 bp, Homo sapien
tcacaatgcagtatgagggtgggct

SEQ ID NO: 1913938 - DNA, 25 bp, Homo sapien
gcagcggtgtccttttgagaatcag

SEQ ID NO: 1913939 - DNA, 25 bp, Homo sapien
tgccacatacttagctgcagagaag

SEQ ID NO: 1913940 - DNA, 25 bp, Homo sapien
gactctgacattgcgagctggacaa

SEQ ID NO: 1913941 - DNA, 25 bp, Homo sapien
taaatgataaacgaattacgtagaa

SEQ ID NO: 1913942 - DNA, 25 bp, Homo sapien
tattttgagtatgcagacaccttaa

SEQ ID NO: 1913943 - DNA, 25 bp, Homo sapien
tatgcagacaccttaaacaataaat

SEQ ID NO: 1913944 - DNA, 25 bp, Homo sapien
gagtatgcagacaccttaaacaata

SEQ ID NO: 1913945 - DNA, 25 bp, Homo sapien
taccaacttgcttacctactgggag

SEQ ID NO: 1913946 - DNA, 25 bp, Homo sapien
aatgggcttagggtcaaatattgcc

SEQ ID NO: 1913947 - DNA, 25 bp, Homo sapien
tgggagtgtgtaacccctctgcgcc

SEQ ID NO: 1913948 - DNA, 25 bp, Homo sapien
ggtgccaggaccagcataagttctg

SEQ ID NO: 1913949 - DNA, 25 bp, Homo sapien
aaagatggcaagcagtttttgatag

SEQ ID NO: 1913950 - DNA, 25 bp, Homo sapien
aggattaagacatggtcactgcaga

SEQ ID NO: 1913951 - DNA, 25 bp, Homo sapien
ggattaagacatggtcactgcagac

SEQ ID NO: 1913952 - DNA, 25 bp, Homo sapien
tatatggcaatacatggatggtgca

SEQ ID NO: 1913953 - DNA, 25 bp, Homo sapien
tgatacgggtggctccaggacaata

SEQ ID NO: 1913954 - DNA, 25 bp, Homo sapien
gtcaataatactgaaggggctgcca

SEQ ID NO: 1913955 - DNA, 25 bp, Homo sapien
catgtgcacgtgtgctgatacgggt

SEQ ID NO: 1913956 - DNA, 25 bp, Homo sapien
gaaaggccttcggtgagtgcaaatg

SEQ ID NO: 1913957 - DNA, 25 bp, Homo sapien
aaggccttcggtgagtgcaaatgca

SEQ ID NO: 1913958 - DNA, 25 bp, Homo sapien
gccttcggtgagtgcaaatgcaact

SEQ ID NO: 1913959 - DNA, 25 bp, Homo sapien
cagagagaaggacactcctcctgag

SEQ ID NO: 1913960 - DNA, 25 bp, Homo sapien
ggccaactgtcagcagcataaagtt

SEQ ID NO: 1913961 - DNA, 25 bp, Homo sapien
gggagctcacgtttgctggttgacc

SEQ ID NO: 1913962 - DNA, 25 bp, Homo sapien
gctcacgtttgctggttgacccctg

SEQ ID NO: 1913963 - DNA, 25 bp, Homo sapien
gttgacccctgaacttcactatcac

SEQ ID NO: 1913964 - DNA, 25 bp, Homo sapien
gagctcacgtttgctggttgacccc

SEQ ID NO: 1913965 - DNA, 25 bp, Homo sapien
cacagacaacggaagaactatggga

SEQ ID NO: 1913966 - DNA, 25 bp, Homo sapien
taagtgtgcggaaactggaagtttc

SEQ ID NO: 1913967 - DNA, 25 bp, Homo sapien
tgcggaaactggaagtttcagggta

SEQ ID NO: 1913968 - DNA, 25 bp, Homo sapien
ttttaagacaatggaagacaatagc

SEQ ID NO: 1913969 - DNA, 25 bp, Homo sapien
tccctgagctcaagtatatgggtgt

SEQ ID NO: 1913970 - DNA, 25 bp, Homo sapien
tgagctcaagtatatgggtgtccac

SEQ ID NO: 1913971 - DNA, 25 bp, Homo sapien
gctcaagtatatgggtgtccactaa

SEQ ID NO: 1913972 - DNA, 25 bp, Homo sapien
gcatccctgagctcaagtatatggg

SEQ ID NO: 1913973 - DNA, 25 bp, Homo sapien
cagcctgaccagtcagttcacagca

SEQ ID NO: 1913974 - DNA, 25 bp, Homo sapien
gcaagcagtgagcatctgccacaga

SEQ ID NO: 1913975 - DNA, 25 bp, Homo sapien
ctgccacagagaggatgcaggcagc

SEQ ID NO: 1913976 - DNA, 25 bp, Homo sapien
tgcaggcagcctgaccagtcagttc

SEQ ID NO: 1913977 - DNA, 25 bp, Homo sapien
ctgtgctcaatcctcagctgttttc

SEQ ID NO: 1913978 - DNA, 25 bp, Homo sapien
cactgtgctcaatcctcagctgttt

SEQ ID NO: 1913979 - DNA, 25 bp, Homo sapien
tctgcttattcaaagatgtgaggaa

SEQ ID NO: 1913980 - DNA, 25 bp, Homo sapien
cttctgcttattcaaagatgtgagg

SEQ ID NO: 1913981 - DNA, 25 bp, Homo sapien
gttgctttcagaaggcttatgttgg

SEQ ID NO: 1913982 - DNA, 25 bp, Homo sapien
ctttcagaaggcttatgttggattt

SEQ ID NO: 1913983 - DNA, 25 bp, Homo sapien
gctttcagaaggcttatgttggatt

SEQ ID NO: 1913984 - DNA, 25 bp, Homo sapien
tcagaaggcttatgttggatttata

SEQ ID NO: 1913985 - DNA, 25 bp, Homo sapien
ctctgatagccagagtcaggctcct

SEQ ID NO: 1913986 - DNA, 25 bp, Homo sapien
aaaactgcctctgatagccagagtc

SEQ ID NO: 1913987 - DNA, 25 bp, Homo sapien
aactgcctctgatagccagagtcag

SEQ ID NO: 1913988 - DNA, 25 bp, Homo sapien
ggctcctacagccaccactgcattc

SEQ ID NO: 1913989 - DNA, 25 bp, Homo sapien
ttgtccttgactccctaaaattcca

SEQ ID NO: 1913990 - DNA, 25 bp, Homo sapien
ccttgactccctaaaattccatgaa

SEQ ID NO: 1913991 - DNA, 25 bp, Homo sapien
gtccttgactccctaaaattccatg

SEQ ID NO: 1913992 - DNA, 25 bp, Homo sapien
cttgactccctaaaattccatgaaa

SEQ ID NO: 1913993 - DNA, 25 bp, Homo sapien
ctgatgacagtagccaagccaaata

SEQ ID NO: 1913994 - DNA, 25 bp, Homo sapien
tagccaagccaaataagggtatagt

SEQ ID NO: 1913995 - DNA, 25 bp, Homo sapien
ccacataacaaggaggtcttgaaat

SEQ ID NO: 1913996 - DNA, 25 bp, Homo sapien
taacaaggaggtcttgaaattgaag

SEQ ID NO: 1913997 - DNA, 25 bp, Homo sapien
cacatccttgtgcttacaagatggc

SEQ ID NO: 1913998 - DNA, 25 bp, Homo sapien
gatcccatcccagatccatacagct

SEQ ID NO: 1913999 - DNA, 25 bp, Homo sapien
cagatccatacagctgttcttcact

SEQ ID NO: 1914000 - DNA, 25 bp, Homo sapien
tcacatccttgtgcttacaagatgg

SEQ ID NO: 1914001 - DNA, 25 bp, Homo sapien
acaaacattttcgcttttcgatcca

SEQ ID NO: 1914002 - DNA, 25 bp, Homo sapien
aacattttcgcttttcgatccacca

SEQ ID NO: 1914003 - DNA, 25 bp, Homo sapien
tatagtagaaggtttgttccaataa

SEQ ID NO: 1914004 - DNA, 25 bp, Homo sapien
ttatagtagaaggtttgttccaata

SEQ ID NO: 1914005 - DNA, 25 bp, Homo sapien
gctgcagctgtccatgtgggacttc

SEQ ID NO: 1914006 - DNA, 25 bp, Homo sapien
atgtgggacttccatctccaacagg

SEQ ID NO: 1914007 - DNA, 25 bp, Homo sapien
caggattatgtgatgctgcagctgt

SEQ ID NO: 1914008 - DNA, 25 bp, Homo sapien
agggctcacaaagccctcatgcaca

SEQ ID NO: 1914009 - DNA, 25 bp, Homo sapien
tcaacacaatgttcaccaaatgaat

SEQ ID NO: 1914010 - DNA, 25 bp, Homo sapien
cagtgcatgattttattgtgtgaaa

SEQ ID NO: 1914011 - DNA, 25 bp, Homo sapien
tggcccaaacctggcatcaacacaa

SEQ ID NO: 1914012 - DNA, 25 bp, Homo sapien
aaattataaaacaggcaaagtcagc

SEQ ID NO: 1914013 - DNA, 25 bp, Homo sapien
ttgtcctggtaatctggaccctggg

SEQ ID NO: 1914014 - DNA, 25 bp, Homo sapien
tcaggtgcgaccttttcagaaagat

SEQ ID NO: 1914015 - DNA, 25 bp, Homo sapien
tgtacccgtcatgtagcttcaagag

SEQ ID NO: 1914016 - DNA, 25 bp, Homo sapien
tatgtcgtgatgttcgggataacca

SEQ ID NO: 1914017 - DNA, 25 bp, Homo sapien
gaagaggacctgtttcttatttggc

SEQ ID NO: 1914018 - DNA, 25 bp, Homo sapien
cttatttggctgttcaaatcacctg

SEQ ID NO: 1914019 - DNA, 25 bp, Homo sapien
gcagattgtacattgaagaggacct

SEQ ID NO: 1914020 - DNA, 25 bp, Homo sapien
acttggcagattgtacattgaagag

SEQ ID NO: 1914021 - DNA, 25 bp, Homo sapien
ctgggccacatagcaagatcccatc

SEQ ID NO: 1914022 - DNA, 25 bp, Homo sapien
cctgggccacatagcaagatcccat

SEQ ID NO: 1914023 - DNA, 25 bp, Homo sapien
gtagtgaatacatatgcatggaatc

SEQ ID NO: 1914024 - DNA, 25 bp, Homo sapien
cagtagtgaatacatatgcatggaa

SEQ ID NO: 1914025 - DNA, 25 bp, Homo sapien
agtagtgaatacatatgcatggaat

SEQ ID NO: 1914026 - DNA, 25 bp, Homo sapien
acaattcgagaaaggtagagacagt

SEQ ID NO: 1914027 - DNA, 25 bp, Homo sapien
tcatattcatcaattcacaagggcc

SEQ ID NO: 1914028 - DNA, 25 bp, Homo sapien
cattctttccatattagacaattcg

SEQ ID NO: 1914029 - DNA, 25 bp, Homo sapien
gagagttgcttattagctgtctttc

SEQ ID NO: 1914030 - DNA, 25 bp, Homo sapien
gacaatagttccactcatggcatcg

SEQ ID NO: 1914031 - DNA, 25 bp, Homo sapien
tgttgtcctcgacctctgatagagc

SEQ ID NO: 1914032 - DNA, 25 bp, Homo sapien
tacttgccaggaagtagaacctatg

SEQ ID NO: 1914033 - DNA, 25 bp, Homo sapien
gaaaacagaaagctgatcgagccgt

SEQ ID NO: 1914034 - DNA, 25 bp, Homo sapien
cacacccagcttgcaaatacttttt

SEQ ID NO: 1914035 - DNA, 25 bp, Homo sapien
gtatttgatcccaccttcttactag

SEQ ID NO: 1914036 - DNA, 25 bp, Homo sapien
gaggagatattagaacctgtcttta

SEQ ID NO: 1914037 - DNA, 25 bp, Homo sapien
tatactgcattgattagagggaaga

SEQ ID NO: 1914038 - DNA, 25 bp, Homo sapien
tagatccatcccttctatttgcttt

SEQ ID NO: 1914039 - DNA, 25 bp, Homo sapien
ctatccatcaatgtgaatctctaga

SEQ ID NO: 1914040 - DNA, 25 bp, Homo sapien
tgctttcctgcaggataaatacatt

SEQ ID NO: 1914041 - DNA, 25 bp, Homo sapien
ctttcctgcaggataaatacatttt

SEQ ID NO: 1914042 - DNA, 25 bp, Homo sapien
aacagcagtgaagagttcaaagtcc

SEQ ID NO: 1914043 - DNA, 25 bp, Homo sapien
acagcagtgaagagttcaaagtcca

SEQ ID NO: 1914044 - DNA, 25 bp, Homo sapien
ccagacttgttcctcttggcagtgt

SEQ ID NO: 1914045 - DNA, 25 bp, Homo sapien
tttcccagacttgttcctcttggca

SEQ ID NO: 1914046 - DNA, 25 bp, Homo sapien
ctcatgtcgtaatttcccagacttg

SEQ ID NO: 1914047 - DNA, 25 bp, Homo sapien
tcgtaatttcccagacttgttcctc

SEQ ID NO: 1914048 - DNA, 25 bp, Homo sapien
ctccagaccaaccatttcttatagt

SEQ ID NO: 1914049 - DNA, 25 bp, Homo sapien
tccagaccaaccatttcttatagtc

SEQ ID NO: 1914050 - DNA, 25 bp, Homo sapien
ccagaccaaccatttcttatagtct

SEQ ID NO: 1914051 - DNA, 25 bp, Homo sapien
tggtgcaaacaagtggcaccttggt

SEQ ID NO: 1914052 - DNA, 25 bp, Homo sapien
cgaccgttgcctaagttgtgcctct

SEQ ID NO: 1914053 - DNA, 25 bp, Homo sapien
ccgtgacatcagactgtgttgacca

SEQ ID NO: 1914054 - DNA, 25 bp, Homo sapien
cttggtggtataggcgaccgttgcc

SEQ ID NO: 1914055 - DNA, 25 bp, Homo sapien
tggcaaatctcttgcctggcatcat

SEQ ID NO: 1914056 - DNA, 25 bp, Homo sapien
atggcaaatctcttgcctggcatca

SEQ ID NO: 1914057 - DNA, 25 bp, Homo sapien
acattcgaatcaggaatggaggcgg

SEQ ID NO: 1914058 - DNA, 25 bp, Homo sapien
tggaggcgggaagtacaggtgagca

SEQ ID NO: 1914059 - DNA, 25 bp, Homo sapien
ttcccacaggaggaataagaaagac

SEQ ID NO: 1914060 - DNA, 25 bp, Homo sapien
gtgagtaagcaaagagatacggaag

SEQ ID NO: 1914061 - DNA, 25 bp, Homo sapien
cccagtgcaggaatagctcttttaa

SEQ ID NO: 1914062 - DNA, 25 bp, Homo sapien
cagagccatggggatttgatataga

SEQ ID NO: 1914063 - DNA, 25 bp, Homo sapien
tagctcttttaacctcagggctccc

SEQ ID NO: 1914064 - DNA, 25 bp, Homo sapien
ttgatatagatccacactccacagg

SEQ ID NO: 1914065 - DNA, 25 bp, Homo sapien
ccagaagccacaggtcccttgagtc

SEQ ID NO: 1914066 - DNA, 25 bp, Homo sapien
agaagccacaggtcccttgagtccc

SEQ ID NO: 1914067 - DNA, 25 bp, Homo sapien
agccacaggtcccttgagtcccata

SEQ ID NO: 1914068 - DNA, 25 bp, Homo sapien
acaggtcccttgagtcccataagca

SEQ ID NO: 1914069 - DNA, 25 bp, Homo sapien
tttcagggctggtctgctttagacc

SEQ ID NO: 1914070 - DNA, 25 bp, Homo sapien
gacctttattaatacacctcttgag

SEQ ID NO: 1914071 - DNA, 25 bp, Homo sapien
ttatgttatagttagtaggccactc

SEQ ID NO: 1914072 - DNA, 25 bp, Homo sapien
tcctccggattcaggctttcagggc

SEQ ID NO: 1914073 - DNA, 25 bp, Homo sapien
gaaataactcgattccatcattgtt

SEQ ID NO: 1914074 - DNA, 25 bp, Homo sapien
gtgaaataactcgattccatcattg

SEQ ID NO: 1914075 - DNA, 25 bp, Homo sapien
gaaaatagtgaaataactcgattcc

SEQ ID NO: 1914076 - DNA, 25 bp, Homo sapien
aatagtgaaataactcgattccatc

SEQ ID NO: 1914077 - DNA, 25 bp, Homo sapien
tgttacctgcattcaacaatgtcac

SEQ ID NO: 1914078 - DNA, 25 bp, Homo sapien
ggtcctgtttggaagggtttgctca

SEQ ID NO: 1914079 - DNA, 25 bp, Homo sapien
tacaatgagttaacattcccagaga

SEQ ID NO: 1914080 - DNA, 25 bp, Homo sapien
tgagggactagaagggttacaatga

SEQ ID NO: 1914081 - DNA, 25 bp, Homo sapien
caaggtccaattgcatcaggagcat

SEQ ID NO: 1914082 - DNA, 25 bp, Homo sapien
ccagtaccaccttggcaaggtccaa

SEQ ID NO: 1914083 - DNA, 25 bp, Homo sapien
ccttggcaaggtccaattgcatcag

SEQ ID NO: 1914084 - DNA, 25 bp, Homo sapien
gtccaattgcatcaggagcatagca

SEQ ID NO: 1914085 - DNA, 25 bp, Homo sapien
agcaccatttgcaatgcggacaaca

SEQ ID NO: 1914086 - DNA, 25 bp, Homo sapien
caggaaaggcaatagtacatgcgaa

SEQ ID NO: 1914087 - DNA, 25 bp, Homo sapien
gaatatccaggaaaggcaatagtac

SEQ ID NO: 1914088 - DNA, 25 bp, Homo sapien
tgcaatgcggacaacaaggtaaaat

SEQ ID NO: 1914089 - DNA, 25 bp, Homo sapien
gagggcgcactgggataaggttgat

SEQ ID NO: 1914090 - DNA, 25 bp, Homo sapien
ttgctcatggggagggcgcactggg

SEQ ID NO: 1914091 - DNA, 25 bp, Homo sapien
ctggggagatataggccccttgctc

SEQ ID NO: 1914092 - DNA, 25 bp, Homo sapien
gagatataggccccttgctcatggg

SEQ ID NO: 1914093 - DNA, 25 bp, Homo sapien
gtgggtgatagtgcagcagttgcac

SEQ ID NO: 1914094 - DNA, 25 bp, Homo sapien
tgggtgatagtgcagcagttgcaca

SEQ ID NO: 1914095 - DNA, 25 bp, Homo sapien
aaataattggcttaactctccacct

SEQ ID NO: 1914096 - DNA, 25 bp, Homo sapien
agggtgtggacatagccccaaagtc

SEQ ID NO: 1914097 - DNA, 25 bp, Homo sapien
tcaagggtgtggacatagccccaaa

SEQ ID NO: 1914098 - DNA, 25 bp, Homo sapien
tagtgcactatgccatttgcttggc

SEQ ID NO: 1914099 - DNA, 25 bp, Homo sapien
aaagttccaatctccttgtatggct

SEQ ID NO: 1914100 - DNA, 25 bp, Homo sapien
gaaagttccaatctccttgtatggc

SEQ ID NO: 1914101 - DNA, 25 bp, Homo sapien
ttccaatctccttgtatggcttctc

SEQ ID NO: 1914102 - DNA, 25 bp, Homo sapien
agttccaatctccttgtatggcttc

SEQ ID NO: 1914103 - DNA, 25 bp, Homo sapien
caggatcaacagaacagaaggcaag

SEQ ID NO: 1914104 - DNA, 25 bp, Homo sapien
tgttgaacaggatcaacagaacaga

SEQ ID NO: 1914105 - DNA, 25 bp, Homo sapien
ctttgttgaacaggatcaacagaac

SEQ ID NO: 1914106 - DNA, 25 bp, Homo sapien
acaggatcaacagaacagaaggcaa

SEQ ID NO: 1914107 - DNA, 25 bp, Homo sapien
caaggtccgtgattctgtgaaataa

SEQ ID NO: 1914108 - DNA, 25 bp, Homo sapien
gtgaaataatctcccaggggaactg

SEQ ID NO: 1914109 - DNA, 25 bp, Homo sapien
atctcccaggggaactggtaatgtc

SEQ ID NO: 1914110 - DNA, 25 bp, Homo sapien
ctgtagcaaggtccgtgattctgtg

SEQ ID NO: 1914111 - DNA, 25 bp, Homo sapien
ctttattaaaggacatcagttgcac

SEQ ID NO: 1914112 - DNA, 25 bp, Homo sapien
tatcaatgatggacagaatgcttta

SEQ ID NO: 1914113 - DNA, 25 bp, Homo sapien
tgcaaaagtttatcaatgatggaca

SEQ ID NO: 1914114 - DNA, 25 bp, Homo sapien
taaaaataatctagagccagcgtgg

SEQ ID NO: 1914115 - DNA, 25 bp, Homo sapien
gtttcagtgtcttgaaccaaggcac

SEQ ID NO: 1914116 - DNA, 25 bp, Homo sapien
gatacacatgtactctctataggag

SEQ ID NO: 1914117 - DNA, 25 bp, Homo sapien
caaatttagcctgccaattgttgaa

SEQ ID NO: 1914118 - DNA, 25 bp, Homo sapien
ggcactacaacttaccactattgaa

SEQ ID NO: 1914119 - DNA, 25 bp, Homo sapien
tcctagtgctctacaaagttggaga

SEQ ID NO: 1914120 - DNA, 25 bp, Homo sapien
ccttctggctcctagtgctctacaa

SEQ ID NO: 1914121 - DNA, 25 bp, Homo sapien
aaagctggcttcacactaaagagag

SEQ ID NO: 1914122 - DNA, 25 bp, Homo sapien
gaaccatagcaatgatgctgggaag

SEQ ID NO: 1914123 - DNA, 25 bp, Homo sapien
taatcagataatgatccaaagcagc

SEQ ID NO: 1914124 - DNA, 25 bp, Homo sapien
cctccttcgtcttggtttctgctct

SEQ ID NO: 1914125 - DNA, 25 bp, Homo sapien
atcttctccctccttcgtcttggtt

SEQ ID NO: 1914126 - DNA, 25 bp, Homo sapien
atccaaagcagccatgggcccactg

SEQ ID NO: 1914127 - DNA, 25 bp, Homo sapien
tattgcagccactcatagactcttg

SEQ ID NO: 1914128 - DNA, 25 bp, Homo sapien
attgacgtgaatccatgttgacccc

SEQ ID NO: 1914129 - DNA, 25 bp, Homo sapien
agttatatagatttgactaggaaag

SEQ ID NO: 1914130 - DNA, 25 bp, Homo sapien
gcagcctgctaattcctgtgatctt

SEQ ID NO: 1914131 - DNA, 25 bp, Homo sapien
tggagatagttatggttcttgacgc

SEQ ID NO: 1914132 - DNA, 25 bp, Homo sapien
acgctgttaaactgagagcatcaag

SEQ ID NO: 1914133 - DNA, 25 bp, Homo sapien
gagcatcaagtgtaggtggagaagg

SEQ ID NO: 1914134 - DNA, 25 bp, Homo sapien
cttccggttcaataaattggagata

SEQ ID NO: 1914135 - DNA, 25 bp, Homo sapien
gatttgtggcacaacagttagcagc

SEQ ID NO: 1914136 - DNA, 25 bp, Homo sapien
actgatttgtggcacaacagttagc

SEQ ID NO: 1914137 - DNA, 25 bp, Homo sapien
ctggcgtgtttcagctgtatgacaa

SEQ ID NO: 1914138 - DNA, 25 bp, Homo sapien
tttcagctgtatgacaacctgggcc

SEQ ID NO: 1914139 - DNA, 25 bp, Homo sapien
cagctggcatctgcataccaatgga

SEQ ID NO: 1914140 - DNA, 25 bp, Homo sapien
atatccaactggctcattatcaagt

SEQ ID NO: 1914141 - DNA, 25 bp, Homo sapien
tgtaagacctactcaagtccttctc

SEQ ID NO: 1914142 - DNA, 25 bp, Homo sapien
ggatgtcaaaaagggttcatatcca

SEQ ID NO: 1914143 - DNA, 25 bp, Homo sapien
cactgtggaaaagatgctgtgtcaa

SEQ ID NO: 1914144 - DNA, 25 bp, Homo sapien
actgtggaaaagatgctgtgtcaaa

SEQ ID NO: 1914145 - DNA, 25 bp, Homo sapien
tactgtaaactagagaccgagaccg

SEQ ID NO: 1914146 - DNA, 25 bp, Homo sapien
gaattgattggctcccttgcgcccc

SEQ ID NO: 1914147 - DNA, 25 bp, Homo sapien
cgtgtgagaacaccaaactcctgag

SEQ ID NO: 1914148 - DNA, 25 bp, Homo sapien
gaaatcccttgcttggacgacgcta

SEQ ID NO: 1914149 - DNA, 25 bp, Homo sapien
ggcagtaggctgaaaacgatccata

SEQ ID NO: 1914150 - DNA, 25 bp, Homo sapien
ccaaatggagggctaaggacgcgtc

SEQ ID NO: 1914151 - DNA, 25 bp, Homo sapien
ggaatttgttgagcgcccaaggcca

SEQ ID NO: 1914152 - DNA, 25 bp, Homo sapien
aaaagcgtctggtacttcggtggca

SEQ ID NO: 1914153 - DNA, 25 bp, Homo sapien
agttaacgctttctccgccccgatg

SEQ ID NO: 1914154 - DNA, 25 bp, Homo sapien
caaagcaagccaatcaagaaatgca

SEQ ID NO: 1914155 - DNA, 25 bp, Homo sapien
atttggaggacattaattctcggtc

SEQ ID NO: 1914156 - DNA, 25 bp, Homo sapien
gagagagacgagtgccatgtatttt

SEQ ID NO: 1914157 - DNA, 25 bp, Homo sapien
gtgcacttgggcgttggaccccgca

SEQ ID NO: 1914158 - DNA, 25 bp, Homo sapien
cctgctttgtgtgcggcgcgcggat

SEQ ID NO: 1914159 - DNA, 25 bp, Homo sapien
catcttattagcaaccagggagatt

SEQ ID NO: 1914160 - DNA, 25 bp, Homo sapien
aaagcgcggctccattgttcgccag

SEQ ID NO: 1914161 - DNA, 25 bp, Homo sapien
tatccggagtgtatttaatcggttc

SEQ ID NO: 1914162 - DNA, 25 bp, Homo sapien
tttaatcggttctgttctgtcctct

SEQ ID NO: 1914163 - DNA, 25 bp, Homo sapien
tacacttgggctcctttttttgtgc

SEQ ID NO: 1914164 - DNA, 25 bp, Homo sapien
ctttttgatctcttcgactaaaatt

SEQ ID NO: 1914165 - DNA, 25 bp, Homo sapien
caaagcgaacggacaggtaaattct

SEQ ID NO: 1914166 - DNA, 25 bp, Homo sapien
gctgtggcctcgtcgccttccaaag

SEQ ID NO: 1914167 - DNA, 25 bp, Homo sapien
tccaagaccgcagcgaagggagaag

SEQ ID NO: 1914168 - DNA, 25 bp, Homo sapien
gtttcccctcttggatctgttgagt

SEQ ID NO: 1914169 - DNA, 25 bp, Homo sapien
gacttcttcgcccaaggccgaggac

SEQ ID NO: 1914170 - DNA, 25 bp, Homo sapien
cggccgagaaaggtgagccggccgc

SEQ ID NO: 1914171 - DNA, 25 bp, Homo sapien
cggaaggcgaggctgccgagcccgg

SEQ ID NO: 1914172 - DNA, 25 bp, Homo sapien
gggccagcccggtagagaaggaggc

SEQ ID NO: 1914173 - DNA, 25 bp, Homo sapien
agtctttcaagctgagcggcttctc

SEQ ID NO: 1914174 - DNA, 25 bp, Homo sapien
ttttccttcaagaagtctttcaagc

SEQ ID NO: 1914175 - DNA, 25 bp, Homo sapien
caagaagtctttcaagctgagcggc

SEQ ID NO: 1914176 - DNA, 25 bp, Homo sapien
aaagaagcgcttttccttcaagaag

SEQ ID NO: 1914177 - DNA, 25 bp, Homo sapien
tgccaggtactggttttggagaact

SEQ ID NO: 1914178 - DNA, 25 bp, Homo sapien
cagcgacgagaccaaggccgccgag

SEQ ID NO: 1914179 - DNA, 25 bp, Homo sapien
tggagaacttgtctacaaccaggga

SEQ ID NO: 1914180 - DNA, 25 bp, Homo sapien
gagataatcgaagaacttttctccc

SEQ ID NO: 1914181 - DNA, 25 bp, Homo sapien
gaggcaggtttacaacactacaagt

SEQ ID NO: 1914182 - DNA, 25 bp, Homo sapien
gatatccagaagcacatgaagtttg

SEQ ID NO: 1914183 - DNA, 25 bp, Homo sapien
caacaggtcgaggagagcttaaaca

SEQ ID NO: 1914184 - DNA, 25 bp, Homo sapien
aattgaagtggtgcataacattgcc

SEQ ID NO: 1914185 - DNA, 25 bp, Homo sapien
tgttactcaaaggataagacagaca

SEQ ID NO: 1914186 - DNA, 25 bp, Homo sapien
gaaccacatgtgtaacaactgaatg

SEQ ID NO: 1914187 - DNA, 25 bp, Homo sapien
taaccaaaggactgatttatgggtc

SEQ ID NO: 1914188 - DNA, 25 bp, Homo sapien
tattcactgcctaaaacactttggg

SEQ ID NO: 1914189 - DNA, 25 bp, Homo sapien
gggtaaggtacttttcacagccata

SEQ ID NO: 1914190 - DNA, 25 bp, Homo sapien
gatagatccttgactagcagttggt

SEQ ID NO: 1914191 - DNA, 25 bp, Homo sapien
ccattgaaggtgagttgtatgcccc

SEQ ID NO: 1914192 - DNA, 25 bp, Homo sapien
taatgtagcctcagtcaagtttgaa

SEQ ID NO: 1914193 - DNA, 25 bp, Homo sapien
gttagcattacatgttgtctgcctg

SEQ ID NO: 1914194 - DNA, 25 bp, Homo sapien
ggactgcatatagcgctagaattct

SEQ ID NO: 1914195 - DNA, 25 bp, Homo sapien
gcctgagaatatctagtaccactgg

SEQ ID NO: 1914196 - DNA, 25 bp, Homo sapien
gcaacagaactatccatcacttagg

SEQ ID NO: 1914197 - DNA, 25 bp, Homo sapien
cagtgtgcccacaatagctgatgct

SEQ ID NO: 1914198 - DNA, 25 bp, Homo sapien
tcatcaatatggacaggcatcatcc

SEQ ID NO: 1914199 - DNA, 25 bp, Homo sapien
tctggtaagcatatctccgaagtgt

SEQ ID NO: 1914200 - DNA, 25 bp, Homo sapien
cccgtgctgatagtagataagtgtc

SEQ ID NO: 1914201 - DNA, 25 bp, Homo sapien
tcactggagacgtatatgttggcac

SEQ ID NO: 1914202 - DNA, 25 bp, Homo sapien
ggcacttggtgaagcagtacactaa

SEQ ID NO: 1914203 - DNA, 25 bp, Homo sapien
gaaaaaatatactcactgcggagcc

SEQ ID NO: 1914204 - DNA, 25 bp, Homo sapien
gaacatgttggtcaataggcaatac

SEQ ID NO: 1914205 - DNA, 25 bp, Homo sapien
atttgcttcctgatattttgaaagc

SEQ ID NO: 1914206 - DNA, 25 bp, Homo sapien
cttcctgatattttgaaagcatgag

SEQ ID NO: 1914207 - DNA, 25 bp, Homo sapien
ccttttctcatttgcttcctgatat

SEQ ID NO: 1914208 - DNA, 25 bp, Homo sapien
catatacaatgaatgtctttttttc

SEQ ID NO: 1914209 - DNA, 25 bp, Homo sapien
cataaagggtgcttcctctagacct

SEQ ID NO: 1914210 - DNA, 25 bp, Homo sapien
gatcaagaatacgaacattgaaacc

SEQ ID NO: 1914211 - DNA, 25 bp, Homo sapien
gagggcttttttgaccagaagttga

SEQ ID NO: 1914212 - DNA, 25 bp, Homo sapien
agcatttctaccataacttcttgag

SEQ ID NO: 1914213 - DNA, 25 bp, Homo sapien
aagtgcacactttgataagcataca

SEQ ID NO: 1914214 - DNA, 25 bp, Homo sapien
attgtcatattacaaaccacctgaa

SEQ ID NO: 1914215 - DNA, 25 bp, Homo sapien
tgaaaactcagtcgtataaaacaac

SEQ ID NO: 1914216 - DNA, 25 bp, Homo sapien
gcacactttgataagcatacatagg

SEQ ID NO: 1914217 - DNA, 25 bp, Homo sapien
tgatacacgatgtttttggccacag

SEQ ID NO: 1914218 - DNA, 25 bp, Homo sapien
gcagagagtttgtccctgatacacg

SEQ ID NO: 1914219 - DNA, 25 bp, Homo sapien
gctagagtgggatcatatgcctgga

SEQ ID NO: 1914220 - DNA, 25 bp, Homo sapien
tgtaggtcaaggattagagcagcca

SEQ ID NO: 1914221 - DNA, 25 bp, Homo sapien
gctgtgctcccaagaaggtattttc

SEQ ID NO: 1914222 - DNA, 25 bp, Homo sapien
cagaggtgtatgcacagctagtacc

SEQ ID NO: 1914223 - DNA, 25 bp, Homo sapien
tcttcagctgcaacggaaactgcac

SEQ ID NO: 1914224 - DNA, 25 bp, Homo sapien
tactgggacatgcaacgcttacacc

SEQ ID NO: 1914225 - DNA, 25 bp, Homo sapien
tcactggtgttgtcctttgaggtgc

SEQ ID NO: 1914226 - DNA, 25 bp, Homo sapien
tggaggttgtctcactgattggacc

SEQ ID NO: 1914227 - DNA, 25 bp, Homo sapien
tgattggacctacctagctctttag

SEQ ID NO: 1914228 - DNA, 25 bp, Homo sapien
gccatttactcagcctcagggtgtt

SEQ ID NO: 1914229 - DNA, 25 bp, Homo sapien
tacactgtcagcaagtactttagag

SEQ ID NO: 1914230 - DNA, 25 bp, Homo sapien
ctttagagttatagttttggatctc

SEQ ID NO: 1914231 - DNA, 25 bp, Homo sapien
taatgacaggtcgtacactgtcagc

SEQ ID NO: 1914232 - DNA, 25 bp, Homo sapien
tgtggtaggtctccatcaggcttat

SEQ ID NO: 1914233 - DNA, 25 bp, Homo sapien
tacaaggccagagggttaagtgact

SEQ ID NO: 1914234 - DNA, 25 bp, Homo sapien
tgaaatcatgcattacctgactggg

SEQ ID NO: 1914235 - DNA, 25 bp, Homo sapien
cccactgagatattctacaaggcca

SEQ ID NO: 1914236 - DNA, 25 bp, Homo sapien
cagtttgctttcaaaatgatgctca

SEQ ID NO: 1914237 - DNA, 25 bp, Homo sapien
ggcagaagagtcattacattaagaa

SEQ ID NO: 1914238 - DNA, 25 bp, Homo sapien
cctaactctagaaataggatggcag

SEQ ID NO: 1914239 - DNA, 25 bp, Homo sapien
aagggaatagcacaggaattatacc

SEQ ID NO: 1914240 - DNA, 25 bp, Homo sapien
cactgaactatacaagtaaatgtgt

SEQ ID NO: 1914241 - DNA, 25 bp, Homo sapien
tatttgttgccagaagtgtaatgac

SEQ ID NO: 1914242 - DNA, 25 bp, Homo sapien
tagtctagccaaaggcaacacaagt

SEQ ID NO: 1914243 - DNA, 25 bp, Homo sapien
caaactttccggctagacttcagaa

SEQ ID NO: 1914244 - DNA, 25 bp, Homo sapien
ggagggctattatctaccacagggc

SEQ ID NO: 1914245 - DNA, 25 bp, Homo sapien
cacactagtaggcatcaaactgcaa

SEQ ID NO: 1914246 - DNA, 25 bp, Homo sapien
catctggcatctaaaggaacactca

SEQ ID NO: 1914247 - DNA, 25 bp, Homo sapien
cataacaatagcaagccaggcgcgg

SEQ ID NO: 1914248 - DNA, 25 bp, Homo sapien
catggccaccaagtgactataagag

SEQ ID NO: 1914249 - DNA, 25 bp, Homo sapien
tgaccttactagacacaagaaccat

SEQ ID NO: 1914250 - DNA, 25 bp, Homo sapien
catttggttaccagttgttgtccca

SEQ ID NO: 1914251 - DNA, 25 bp, Homo sapien
tatttaaatcttctagtggagggca

SEQ ID NO: 1914252 - DNA, 25 bp, Homo sapien
taaagtattagggtattctgacatc

SEQ ID NO: 1914253 - DNA, 25 bp, Homo sapien
gatcatcatggtagacgggaggcat

SEQ ID NO: 1914254 - DNA, 25 bp, Homo sapien
tactccaggatctcataggtgactc

SEQ ID NO: 1914255 - DNA, 25 bp, Homo sapien
tccacagggaggatgccagaacatc

SEQ ID NO: 1914256 - DNA, 25 bp, Homo sapien
caaagggcctttgtctcctggcacc

SEQ ID NO: 1914257 - DNA, 25 bp, Homo sapien
tcaatgtgggcctgacaaaaaggga

SEQ ID NO: 1914258 - DNA, 25 bp, Homo sapien
acatcttagtagcaggagttacccc

SEQ ID NO: 1914259 - DNA, 25 bp, Homo sapien
tgattacttcttaaggctgggaggg

SEQ ID NO: 1914260 - DNA, 25 bp, Homo sapien
ctgttcattacaaaagtctaggtgc

SEQ ID NO: 1914261 - DNA, 25 bp, Homo sapien
aatcattatctttcacctagagtgt

SEQ ID NO: 1914262 - DNA, 25 bp, Homo sapien
aatgatgtcattagccactgaaaca

SEQ ID NO: 1914263 - DNA, 25 bp, Homo sapien
cctagagtgtattgtaagtctacag

SEQ ID NO: 1914264 - DNA, 25 bp, Homo sapien
ctaagctatagagggcaaggtggta

SEQ ID NO: 1914265 - DNA, 25 bp, Homo sapien
aataaagataattacaaaagatgga

SEQ ID NO: 1914266 - DNA, 25 bp, Homo sapien
aagatggaaaaatcagctcagaaag

SEQ ID NO: 1914267 - DNA, 25 bp, Homo sapien
taaagataattacaaaagatggaaa

SEQ ID NO: 1914268 - DNA, 25 bp, Homo sapien
aattacaaaagatggaaaaatcagc

SEQ ID NO: 1914269 - DNA, 25 bp, Homo sapien
tacagtccatgccaaagtagtataa

SEQ ID NO: 1914270 - DNA, 25 bp, Homo sapien
tctgaaattggtgagactgtcaaat

SEQ ID NO: 1914271 - DNA, 25 bp, Homo sapien
tactatcacataaagcatggtggag

SEQ ID NO: 1914272 - DNA, 25 bp, Homo sapien
gacataataactcacatcaatttta

SEQ ID NO: 1914273 - DNA, 25 bp, Homo sapien
tcaggggttgctgagctgttctgat

SEQ ID NO: 1914274 - DNA, 25 bp, Homo sapien
gttgctgagctgttctgatttggtt

SEQ ID NO: 1914275 - DNA, 25 bp, Homo sapien
ggttgctgagctgttctgatttggt

SEQ ID NO: 1914276 - DNA, 25 bp, Homo sapien
ggggttgctgagctgttctgatttg

SEQ ID NO: 1914277 - DNA, 25 bp, Homo sapien
ggtcctgtaggctcatgctaagaaa

SEQ ID NO: 1914278 - DNA, 25 bp, Homo sapien
aagtgtttctggagtaattaatgcc

SEQ ID NO: 1914279 - DNA, 25 bp, Homo sapien
tattccaagttatcctgtaaaggct

SEQ ID NO: 1914280 - DNA, 25 bp, Homo sapien
tgtaaaggctggcacaaaattatgt

SEQ ID NO: 1914281 - DNA, 25 bp, Homo sapien
tcaccactgttgtccttggatttat

SEQ ID NO: 1914282 - DNA, 25 bp, Homo sapien
caccactgttgtccttggatttatc

SEQ ID NO: 1914283 - DNA, 25 bp, Homo sapien
ttcaccactgttgtccttggattta

SEQ ID NO: 1914284 - DNA, 25 bp, Homo sapien
ctcctttcttatgatcagccacatt

SEQ ID NO: 1914285 - DNA, 25 bp, Homo sapien
ttatgatcagccacatttcttcgac

SEQ ID NO: 1914286 - DNA, 25 bp, Homo sapien
cctttcttatgatcagccacatttc

SEQ ID NO: 1914287 - DNA, 25 bp, Homo sapien
ttcttatgatcagccacatttcttc

SEQ ID NO: 1914288 - DNA, 25 bp, Homo sapien
atcacaagctatccgcttgtctgat

SEQ ID NO: 1914289 - DNA, 25 bp, Homo sapien
tcacaagctatccgcttgtctgatg

SEQ ID NO: 1914290 - DNA, 25 bp, Homo sapien
tcatcacaagctatccgcttgtctg

SEQ ID NO: 1914291 - DNA, 25 bp, Homo sapien
catcacaagctatccgcttgtctga

SEQ ID NO: 1914292 - DNA, 25 bp, Homo sapien
catcttctggaatagcttgcatctg

SEQ ID NO: 1914293 - DNA, 25 bp, Homo sapien
aggtgcatgaggtaacatgcgcaaa

SEQ ID NO: 1914294 - DNA, 25 bp, Homo sapien
ggtaacatgcgcaaattttcaaaca

SEQ ID NO: 1914295 - DNA, 25 bp, Homo sapien
gaatagcttgcatctggacaccagg

SEQ ID NO: 1914296 - DNA, 25 bp, Homo sapien
agtctggtccaaaatactcaaagta

SEQ ID NO: 1914297 - DNA, 25 bp, Homo sapien
aaggactaatatgcagtttgaagtc

SEQ ID NO: 1914298 - DNA, 25 bp, Homo sapien
aggactaatatgcagtttgaagtct

SEQ ID NO: 1914299 - DNA, 25 bp, Homo sapien
cattacggattgtgtagccacctcc

SEQ ID NO: 1914300 - DNA, 25 bp, Homo sapien
gggaatctcacaatcaagggcaact

SEQ ID NO: 1914301 - DNA, 25 bp, Homo sapien
tgtccaacatcgagcaacattacgg

SEQ ID NO: 1914302 - DNA, 25 bp, Homo sapien
cagtctcatatgtccaacatcgagc

SEQ ID NO: 1914303 - DNA, 25 bp, Homo sapien
atttgggtaacaacaaaatctgcat

SEQ ID NO: 1914304 - DNA, 25 bp, Homo sapien
tttgggtaacaacaaaatctgcata

SEQ ID NO: 1914305 - DNA, 25 bp, Homo sapien
gctaaacaacatagtttaaccctga

SEQ ID NO: 1914306 - DNA, 25 bp, Homo sapien
tagggttacatggtgaaattcatca

SEQ ID NO: 1914307 - DNA, 25 bp, Homo sapien
acttttctttccctatggacatgtg

SEQ ID NO: 1914308 - DNA, 25 bp, Homo sapien
gcaaatgttactcaaccaaaatggg

SEQ ID NO: 1914309 - DNA, 25 bp, Homo sapien
gaaacaacccagtctatcaccagat

SEQ ID NO: 1914310 - DNA, 25 bp, Homo sapien
tttgactgttagattgaaacaaccc

SEQ ID NO: 1914311 - DNA, 25 bp, Homo sapien
gagtctgcaccacactgtaatacca

SEQ ID NO: 1914312 - DNA, 25 bp, Homo sapien
cacagcactaggttgatacatctcc

SEQ ID NO: 1914313 - DNA, 25 bp, Homo sapien
catctctcattggaaaattgacagc

SEQ ID NO: 1914314 - DNA, 25 bp, Homo sapien
aggcttaaatatctgcccatatgac

SEQ ID NO: 1914315 - DNA, 25 bp, Homo sapien
catcatctataccatctctcattgg

SEQ ID NO: 1914316 - DNA, 25 bp, Homo sapien
aaatatctgcccatatgactcatca

SEQ ID NO: 1914317 - DNA, 25 bp, Homo sapien
gcctcagatttgttcttaattggac

SEQ ID NO: 1914318 - DNA, 25 bp, Homo sapien
gaatgagtaccactccaggcattaa

SEQ ID NO: 1914319 - DNA, 25 bp, Homo sapien
tctctcaaaagacgcaaaggttcca

SEQ ID NO: 1914320 - DNA, 25 bp, Homo sapien
taattggacttggacttcaaacaaa

SEQ ID NO: 1914321 - DNA, 25 bp, Homo sapien
cactgcactccagtgagccaagaca

SEQ ID NO: 1914322 - DNA, 25 bp, Homo sapien
ccagtgagccaagacagcctcctag

SEQ ID NO: 1914323 - DNA, 25 bp, Homo sapien
tgagccaagacagcctcctaggttc

SEQ ID NO: 1914324 - DNA, 25 bp, Homo sapien
agtgagccaagacagcctcctaggt

SEQ ID NO: 1914325 - DNA, 25 bp, Homo sapien
taactagctggcaactcagagctgc

SEQ ID NO: 1914326 - DNA, 25 bp, Homo sapien
tccaaagatacacgtgaattacaca

SEQ ID NO: 1914327 - DNA, 25 bp, Homo sapien
gctgcccttgttagacatagctttc

SEQ ID NO: 1914328 - DNA, 25 bp, Homo sapien
tcagaatacagaaaagttggtcagc

SEQ ID NO: 1914329 - DNA, 25 bp, Homo sapien
ccactaggatgtaatggttgttgac

SEQ ID NO: 1914330 - DNA, 25 bp, Homo sapien
gataaactagcatcacactgcaaag

SEQ ID NO: 1914331 - DNA, 25 bp, Homo sapien
taactgagatgagaccatagtgaca

SEQ ID NO: 1914332 - DNA, 25 bp, Homo sapien
gagaagacttttgcttgacttccac

SEQ ID NO: 1914333 - DNA, 25 bp, Homo sapien
tacacgatctgttgtataaaaagct

SEQ ID NO: 1914334 - DNA, 25 bp, Homo sapien
tatggaatgataccgtcattacacg

SEQ ID NO: 1914335 - DNA, 25 bp, Homo sapien
tatatcaatatataagactctctga

SEQ ID NO: 1914336 - DNA, 25 bp, Homo sapien
aaagtattccccatatttatggaat

SEQ ID NO: 1914337 - DNA, 25 bp, Homo sapien
ctgaaaacaaatccataagttttgg

SEQ ID NO: 1914338 - DNA, 25 bp, Homo sapien
aacaagagtattttctgacgtgtga

SEQ ID NO: 1914339 - DNA, 25 bp, Homo sapien
gattggctaactatggcccatggcc

SEQ ID NO: 1914340 - DNA, 25 bp, Homo sapien
cattcagcctaagaggttattcaaa

SEQ ID NO: 1914341 - DNA, 25 bp, Homo sapien
caggcctttaaatacccacttgtgg

SEQ ID NO: 1914342 - DNA, 25 bp, Homo sapien
taattgaagaattgggcaaatttcc

SEQ ID NO: 1914343 - DNA, 25 bp, Homo sapien
acggcactggccttttatacacttc

SEQ ID NO: 1914344 - DNA, 25 bp, Homo sapien
tggccacacttctaagtcttaataa

SEQ ID NO: 1914345 - DNA, 25 bp, Homo sapien
gaaaacactttatcactgaaaagag

SEQ ID NO: 1914346 - DNA, 25 bp, Homo sapien
catatcagtctgttgtcggtttaac

SEQ ID NO: 1914347 - DNA, 25 bp, Homo sapien
taacgtaacagaatcctgatgcttc

SEQ ID NO: 1914348 - DNA, 25 bp, Homo sapien
tagtaattcaaggatggcaagcaca

SEQ ID NO: 1914349 - DNA, 25 bp, Homo sapien
tcttagcatgatgtaatcctccagc

SEQ ID NO: 1914350 - DNA, 25 bp, Homo sapien
ccgccagttgagagctgacaaaact

SEQ ID NO: 1914351 - DNA, 25 bp, Homo sapien
ccagttgagagctgacaaaactcaa

SEQ ID NO: 1914352 - DNA, 25 bp, Homo sapien
accgccagttgagagctgacaaaac

SEQ ID NO: 1914353 - DNA, 25 bp, Homo sapien
gccagttgagagctgacaaaactca

SEQ ID NO: 1914354 - DNA, 25 bp, Homo sapien
ctgtggaagatggatttcattaatt

SEQ ID NO: 1914355 - DNA, 25 bp, Homo sapien
tctgcaaattaatgaaagccttttc

SEQ ID NO: 1914356 - DNA, 25 bp, Homo sapien
acaaatacttttttgcttgatgcaa

SEQ ID NO: 1914357 - DNA, 25 bp, Homo sapien
aatcatcaaacatacacttcacagt

SEQ ID NO: 1914358 - DNA, 25 bp, Homo sapien
gctggttgcctattcccatggctaa

SEQ ID NO: 1914359 - DNA, 25 bp, Homo sapien
ggctaatcttgatcttgaaagttgc

SEQ ID NO: 1914360 - DNA, 25 bp, Homo sapien
gaattaactaggttcatgggagcca

SEQ ID NO: 1914361 - DNA, 25 bp, Homo sapien
gaactcaatagttgtctaagtacaa

SEQ ID NO: 1914362 - DNA, 25 bp, Homo sapien
cctgttatgttgtttgcccaagggc

SEQ ID NO: 1914363 - DNA, 25 bp, Homo sapien
cctggccaggatcataagcttaata

SEQ ID NO: 1914364 - DNA, 25 bp, Homo sapien
cattacgtagaatcaaaagcttcac

SEQ ID NO: 1914365 - DNA, 25 bp, Homo sapien
aatatgagatgtctagcacctacac

SEQ ID NO: 1914366 - DNA, 25 bp, Homo sapien
catttcttcggcagtggctttatgg

SEQ ID NO: 1914367 - DNA, 25 bp, Homo sapien
cgtagaaatttgatatactcatcac

SEQ ID NO: 1914368 - DNA, 25 bp, Homo sapien
cagacatgttatctggtcttattga

SEQ ID NO: 1914369 - DNA, 25 bp, Homo sapien
ttttgtcatttcttcggcagtggct

SEQ ID NO: 1914370 - DNA, 25 bp, Homo sapien
caaatatacaaattcccctatcggt

SEQ ID NO: 1914371 - DNA, 25 bp, Homo sapien
cagttcgagtaaaaagtcaaatcca

SEQ ID NO: 1914372 - DNA, 25 bp, Homo sapien
gcattacacaggcatatcaactatg

SEQ ID NO: 1914373 - DNA, 25 bp, Homo sapien
tcagaactgtggaattacaaccggt

SEQ ID NO: 1914374 - DNA, 25 bp, Homo sapien
caagttatgggtcatgcggattcta

SEQ ID NO: 1914375 - DNA, 25 bp, Homo sapien
gcggattctatgaggcttcatggga

SEQ ID NO: 1914376 - DNA, 25 bp, Homo sapien
taatttaacagcaagttatgggtca

SEQ ID NO: 1914377 - DNA, 25 bp, Homo sapien
gggatgaccctgtccataataataa

SEQ ID NO: 1914378 - DNA, 25 bp, Homo sapien
cataaagctctaccttacatggtga

SEQ ID NO: 1914379 - DNA, 25 bp, Homo sapien
ttttaatgcaggtgccaacaaggct

SEQ ID NO: 1914380 - DNA, 25 bp, Homo sapien
gaggtttcgtgggatgaccctgccc

SEQ ID NO: 1914381 - DNA, 25 bp, Homo sapien
taacagtacgggataaacaatcagc

SEQ ID NO: 1914382 - DNA, 25 bp, Homo sapien
attcactagaaatggcagggtgaag

SEQ ID NO: 1914383 - DNA, 25 bp, Homo sapien
agattcactagaaatggcagggtga

SEQ ID NO: 1914384 - DNA, 25 bp, Homo sapien
gattcactagaaatggcagggtgaa

SEQ ID NO: 1914385 - DNA, 25 bp, Homo sapien
ttcactagaaatggcagggtgaagg

SEQ ID NO: 1914386 - DNA, 25 bp, Homo sapien
ggtttaaggatacctaatccatcaa

SEQ ID NO: 1914387 - DNA, 25 bp, Homo sapien
taaggatacctaatccatcaatgtc

SEQ ID NO: 1914388 - DNA, 25 bp, Homo sapien
aggtttaaggatacctaatccatca

SEQ ID NO: 1914389 - DNA, 25 bp, Homo sapien
gatacctaatccatcaatgtctgaa

SEQ ID NO: 1914390 - DNA, 25 bp, Homo sapien
ggagagaatgggccgcccccttcgc

SEQ ID NO: 1914391 - DNA, 25 bp, Homo sapien
cggcggccaccttcgaggctgcgga

SEQ ID NO: 1914392 - DNA, 25 bp, Homo sapien
cagcggcggccaccttcgaggctgc

SEQ ID NO: 1914393 - DNA, 25 bp, Homo sapien
gccacgaatggtgggcgggagaagg

SEQ ID NO: 1914394 - DNA, 25 bp, Homo sapien
ccaggaagagggtctcgttctaact

SEQ ID NO: 1914395 - DNA, 25 bp, Homo sapien
ctgcgccaggaagagggtctcgttc

SEQ ID NO: 1914396 - DNA, 25 bp, Homo sapien
gagaggcaggagacaagacgggcgg

SEQ ID NO: 1914397 - DNA, 25 bp, Homo sapien
agagggtctcgttctaactgtgccg

SEQ ID NO: 1914398 - DNA, 25 bp, Homo sapien
tttttgccgcctccttgactgtacg

SEQ ID NO: 1914399 - DNA, 25 bp, Homo sapien
cgtcgtagtagtagcagactttttt

SEQ ID NO: 1914400 - DNA, 25 bp, Homo sapien
tagcagactttttttttgccgcctc

SEQ ID NO: 1914401 - DNA, 25 bp, Homo sapien
tttttttgccgcctccttgactgta

SEQ ID NO: 1914402 - DNA, 25 bp, Homo sapien
ggcgatagtcccgcggggaagggca

SEQ ID NO: 1914403 - DNA, 25 bp, Homo sapien
ctgagggaaacgtgggggcgatagt

SEQ ID NO: 1914404 - DNA, 25 bp, Homo sapien
ggctgagggaaacgtgggggcgata

SEQ ID NO: 1914405 - DNA, 25 bp, Homo sapien
tgagggaaacgtgggggcgatagtc

SEQ ID NO: 1914406 - DNA, 25 bp, Homo sapien
acccggcagaggtgccgaaagctcg

SEQ ID NO: 1914407 - DNA, 25 bp, Homo sapien
cggcagaggtgccgaaagctcggaa

SEQ ID NO: 1914408 - DNA, 25 bp, Homo sapien
cacccggcagaggtgccgaaagctc

SEQ ID NO: 1914409 - DNA, 25 bp, Homo sapien
cagaggtgccgaaagctcggaatcg

SEQ ID NO: 1914410 - DNA, 25 bp, Homo sapien
ttcgggctcgaggttagaggccctg

SEQ ID NO: 1914411 - DNA, 25 bp, Homo sapien
tggcagcggcaccaactcgcgagga

SEQ ID NO: 1914412 - DNA, 25 bp, Homo sapien
gaggtgagcgcatccactgcggcct

SEQ ID NO: 1914413 - DNA, 25 bp, Homo sapien
tagaggccctgttagggtgaacaac

SEQ ID NO: 1914414 - DNA, 25 bp, Homo sapien
ctcccccactgtcgcgaagctcccg

SEQ ID NO: 1914415 - DNA, 25 bp, Homo sapien
gcccaagccgaccacgtgccgcgag

SEQ ID NO: 1914416 - DNA, 25 bp, Homo sapien
gctcccgcccaagccgaccacgtgc

SEQ ID NO: 1914417 - DNA, 25 bp, Homo sapien
actgtcgcgaagctcccgcccaagc

SEQ ID NO: 1914418 - DNA, 25 bp, Homo sapien
gtgatccagattgggccagaatatt

SEQ ID NO: 1914419 - DNA, 25 bp, Homo sapien
ggttgtaaagcacatagcctccatc

SEQ ID NO: 1914420 - DNA, 25 bp, Homo sapien
tataactcctaacatcctgctctgc

SEQ ID NO: 1914421 - DNA, 25 bp, Homo sapien
tcatcttctggttctttgggtgaac

SEQ ID NO: 1914422 - DNA, 25 bp, Homo sapien
ctgctgagacacaagcaggagctgg

SEQ ID NO: 1914423 - DNA, 25 bp, Homo sapien
gacacaagcaggagctggaatccat

SEQ ID NO: 1914424 - DNA, 25 bp, Homo sapien
caagcaggagctggaatccattgtt

SEQ ID NO: 1914425 - DNA, 25 bp, Homo sapien
gcaggagctggaatccattgttcat

SEQ ID NO: 1914426 - DNA, 25 bp, Homo sapien
tcaattagggcaatggtcgtccttc

SEQ ID NO: 1914427 - DNA, 25 bp, Homo sapien
gatcataggcccacgctgaactggt

SEQ ID NO: 1914428 - DNA, 25 bp, Homo sapien
ttgtggcagtgggaaagacatgcac

SEQ ID NO: 1914429 - DNA, 25 bp, Homo sapien
cagagccaggttccttagatgacat

SEQ ID NO: 1914430 - DNA, 25 bp, Homo sapien
tctggtccctcttattagtctcact

SEQ ID NO: 1914431 - DNA, 25 bp, Homo sapien
tgcatcatctgtcccatttccatgg

SEQ ID NO: 1914432 - DNA, 25 bp, Homo sapien
ttcccagtctggtccctcttattag

SEQ ID NO: 1914433 - DNA, 25 bp, Homo sapien
gaaaaacatgaattctttcccagtc

SEQ ID NO: 1914434 - DNA, 25 bp, Homo sapien
cttattagatttatagctgattctt

SEQ ID NO: 1914435 - DNA, 25 bp, Homo sapien
tttatagctgattctttcaaagctg

SEQ ID NO: 1914436 - DNA, 25 bp, Homo sapien
tagatttatagctgattctttcaaa

SEQ ID NO: 1914437 - DNA, 25 bp, Homo sapien
tattagatttatagctgattctttc

SEQ ID NO: 1914438 - DNA, 25 bp, Homo sapien
tcccagctgaggtcacccacagctg

SEQ ID NO: 1914439 - DNA, 25 bp, Homo sapien
tgtctgccagctggctctaccctct

SEQ ID NO: 1914440 - DNA, 25 bp, Homo sapien
tgcttctaactgctggcttccagcc

SEQ ID NO: 1914441 - DNA, 25 bp, Homo sapien
acagctgctgcttctaactgctggc

SEQ ID NO: 1914442 - DNA, 25 bp, Homo sapien
cctctgctcccttggtcctgctcca

SEQ ID NO: 1914443 - DNA, 25 bp, Homo sapien
ctctgctcccttggtcctgctccat

SEQ ID NO: 1914444 - DNA, 25 bp, Homo sapien
gatagtcaactctcccatatacaca

SEQ ID NO: 1914445 - DNA, 25 bp, Homo sapien
tctaatatgtgtgcatagaactgcc

SEQ ID NO: 1914446 - DNA, 25 bp, Homo sapien
gaaataacatgtacagaagtgcttt

SEQ ID NO: 1914447 - DNA, 25 bp, Homo sapien
tagaactgcctgagcatatgagtgc

SEQ ID NO: 1914448 - DNA, 25 bp, Homo sapien
tcagtttgaattcatggatggtccc

SEQ ID NO: 1914449 - DNA, 25 bp, Homo sapien
cagtttgaattcatggatggtccca

SEQ ID NO: 1914450 - DNA, 25 bp, Homo sapien
cttcagtttgaattcatggatggtc

SEQ ID NO: 1914451 - DNA, 25 bp, Homo sapien
tttgaattcatggatggtcccatga

SEQ ID NO: 1914452 - DNA, 25 bp, Homo sapien
tagctggagcgtaaattggcatttc

SEQ ID NO: 1914453 - DNA, 25 bp, Homo sapien
caattctccatcaggttttaaataa

SEQ ID NO: 1914454 - DNA, 25 bp, Homo sapien
actcgacgtataccctatggagagg

SEQ ID NO: 1914455 - DNA, 25 bp, Homo sapien
ccagtgtgggagcaggtcgagcata

SEQ ID NO: 1914456 - DNA, 25 bp, Homo sapien
tcataaagattgtgattggatatca

SEQ ID NO: 1914457 - DNA, 25 bp, Homo sapien
tgggataaacgtgtttacactttga

SEQ ID NO: 1914458 - DNA, 25 bp, Homo sapien
gattggatatcactattctgtgaaa

SEQ ID NO: 1914459 - DNA, 25 bp, Homo sapien
aacactcacgtagatatcataaaga

SEQ ID NO: 1914460 - DNA, 25 bp, Homo sapien
cggttaacaaggtgatgggcagcca

SEQ ID NO: 1914461 - DNA, 25 bp, Homo sapien
ggagcttcccatcagcggttaacaa

SEQ ID NO: 1914462 - DNA, 25 bp, Homo sapien
cagctgcaactgacagagatgagca

SEQ ID NO: 1914463 - DNA, 25 bp, Homo sapien
aagtcagggtaaaccgacagcggct

SEQ ID NO: 1914464 - DNA, 25 bp, Homo sapien
ccttgagggtaggaatgtgtcctag

SEQ ID NO: 1914465 - DNA, 25 bp, Homo sapien
tccttgagggtaggaatgtgtccta

SEQ ID NO: 1914466 - DNA, 25 bp, Homo sapien
atgctgacatccctgatacctcgca

SEQ ID NO: 1914467 - DNA, 25 bp, Homo sapien
atccctgatacctcgcaggtactga

SEQ ID NO: 1914468 - DNA, 25 bp, Homo sapien
gctgacatccctgatacctcgcagg

SEQ ID NO: 1914469 - DNA, 25 bp, Homo sapien
gacatccctgatacctcgcaggtac

SEQ ID NO: 1914470 - DNA, 25 bp, Homo sapien
tccagtgcttccagtactttcaaac

SEQ ID NO: 1914471 - DNA, 25 bp, Homo sapien
gtccagtgcttccagtactttcaaa

SEQ ID NO: 1914472 - DNA, 25 bp, Homo sapien
ccagtgcttccagtactttcaaact

SEQ ID NO: 1914473 - DNA, 25 bp, Homo sapien
cagtgcttccagtactttcaaactc

SEQ ID NO: 1914474 - DNA, 25 bp, Homo sapien
tgacacctctctagagcaagatgtt

SEQ ID NO: 1914475 - DNA, 25 bp, Homo sapien
cacctctctagagcaagatgttacc

SEQ ID NO: 1914476 - DNA, 25 bp, Homo sapien
agcaagatgttacctctttctgtag

SEQ ID NO: 1914477 - DNA, 25 bp, Homo sapien
tctctagagcaagatgttacctctt

SEQ ID NO: 1914478 - DNA, 25 bp, Homo sapien
catttggcctgataagctgcgcttc

SEQ ID NO: 1914479 - DNA, 25 bp, Homo sapien
ccctgtggcaagtctgactttgggt

SEQ ID NO: 1914480 - DNA, 25 bp, Homo sapien
tattgccatgctcaagctactagct

SEQ ID NO: 1914481 - DNA, 25 bp, Homo sapien
gttcttctgtggttggctcagccaa

SEQ ID NO: 1914482 - DNA, 25 bp, Homo sapien
ccactacatagtagaatttgcatct

SEQ ID NO: 1914483 - DNA, 25 bp, Homo sapien
gaccgctcgtttggggcctcagttc

SEQ ID NO: 1914484 - DNA, 25 bp, Homo sapien
aaaatgagtcatggaaacacatggc

SEQ ID NO: 1914485 - DNA, 25 bp, Homo sapien
tttggccagtcctgaaaaatgagtc

SEQ ID NO: 1914486 - DNA, 25 bp, Homo sapien
tcccgtttgcacttgctctattcaa

SEQ ID NO: 1914487 - DNA, 25 bp, Homo sapien
ttttctcccgtttgcacttgctcta

SEQ ID NO: 1914488 - DNA, 25 bp, Homo sapien
cgtttgcacttgctctattcaaaag

SEQ ID NO: 1914489 - DNA, 25 bp, Homo sapien
tttgcacttgctctattcaaaagca

SEQ ID NO: 1914490 - DNA, 25 bp, Homo sapien
gagaagcagtgcatctgcagtgtcc

SEQ ID NO: 1914491 - DNA, 25 bp, Homo sapien
tgagaagcagtgcatctgcagtgtc

SEQ ID NO: 1914492 - DNA, 25 bp, Homo sapien
cctgagaagcagtgcatctgcagtg

SEQ ID NO: 1914493 - DNA, 25 bp, Homo sapien
ccctgagaagcagtgcatctgcagt

SEQ ID NO: 1914494 - DNA, 25 bp, Homo sapien
taaatctatgaaaatggcgggtgac

SEQ ID NO: 1914495 - DNA, 25 bp, Homo sapien
gaaaaatgacttggatagctctgcc

SEQ ID NO: 1914496 - DNA, 25 bp, Homo sapien
taaaagatgcgactatgcagacagc

SEQ ID NO: 1914497 - DNA, 25 bp, Homo sapien
tgtatctgatgttagcgaggcacca

SEQ ID NO: 1914498 - DNA, 25 bp, Homo sapien
tattagggtctatggccagcttctc

SEQ ID NO: 1914499 - DNA, 25 bp, Homo sapien
gcccgccaggcacttattaaagata

SEQ ID NO: 1914500 - DNA, 25 bp, Homo sapien
tggttggctccctgacaatgatcaa

SEQ ID NO: 1914501 - DNA, 25 bp, Homo sapien
gatgaggcgatctccatcgacgaca

SEQ ID NO: 1914502 - DNA, 25 bp, Homo sapien
gaggcgaacctgctccttggaagcg

SEQ ID NO: 1914503 - DNA, 25 bp, Homo sapien
ttgagaggctttgactactgccgga

SEQ ID NO: 1914504 - DNA, 25 bp, Homo sapien
cacgcttaaactgcagggcgcgaag

SEQ ID NO: 1914505 - DNA, 25 bp, Homo sapien
ttgcccttccggaactcgtgcagca

SEQ ID NO: 1914506 - DNA, 25 bp, Homo sapien
tagaacacaccagaaacatttactg

SEQ ID NO: 1914507 - DNA, 25 bp, Homo sapien
gactagacatagaacacaccagaaa

SEQ ID NO: 1914508 - DNA, 25 bp, Homo sapien
caccagaaacatttactgtgaagcc

SEQ ID NO: 1914509 - DNA, 25 bp, Homo sapien
ccattagactagacatagaacacac

SEQ ID NO: 1914510 - DNA, 25 bp, Homo sapien
aggagactcccaacggcaaggcttc

SEQ ID NO: 1914511 - DNA, 25 bp, Homo sapien
tctgtctcagccacgcctgctgttt

SEQ ID NO: 1914512 - DNA, 25 bp, Homo sapien
tctggcgactagatacaggagactc

SEQ ID NO: 1914513 - DNA, 25 bp, Homo sapien
caagctcccaactctggcgactaga

SEQ ID NO: 1914514 - DNA, 25 bp, Homo sapien
ccctccatcaaccttcaggactgct

SEQ ID NO: 1914515 - DNA, 25 bp, Homo sapien
cctccatcaaccttcaggactgctg

SEQ ID NO: 1914516 - DNA, 25 bp, Homo sapien
gccctccatcaaccttcaggactgc

SEQ ID NO: 1914517 - DNA, 25 bp, Homo sapien
ggccctccatcaaccttcaggactg

SEQ ID NO: 1914518 - DNA, 25 bp, Homo sapien
ctgttctcatatacctgaaataagg

SEQ ID NO: 1914519 - DNA, 25 bp, Homo sapien
gaaataaggccagctgaggagcgta

SEQ ID NO: 1914520 - DNA, 25 bp, Homo sapien
aagctctgttctcatatacctgaaa

SEQ ID NO: 1914521 - DNA, 25 bp, Homo sapien
ctgaggagcgtagggctttactagt

SEQ ID NO: 1914522 - DNA, 25 bp, Homo sapien
cactccaatattcagtagggaactg

SEQ ID NO: 1914523 - DNA, 25 bp, Homo sapien
ctgagcactccaatattcagtaggg

SEQ ID NO: 1914524 - DNA, 25 bp, Homo sapien
caggctgagcactccaatattcagt

SEQ ID NO: 1914525 - DNA, 25 bp, Homo sapien
tgagcactccaatattcagtaggga

SEQ ID NO: 1914526 - DNA, 25 bp, Homo sapien
cctcggtcacagcattttcagcagc

SEQ ID NO: 1914527 - DNA, 25 bp, Homo sapien
ctcctcggtcacagcattttcagca

SEQ ID NO: 1914528 - DNA, 25 bp, Homo sapien
tcctcctcggtcacagcattttcag

SEQ ID NO: 1914529 - DNA, 25 bp, Homo sapien
aattcctcctcggtcacagcatttt

SEQ ID NO: 1914530 - DNA, 25 bp, Homo sapien
cacccgctgagtgagctccctcgtt

SEQ ID NO: 1914531 - DNA, 25 bp, Homo sapien
agccggcgtccaccgcatcacaccc

SEQ ID NO: 1914532 - DNA, 25 bp, Homo sapien
cacacccgctgagtgagctccctcg

SEQ ID NO: 1914533 - DNA, 25 bp, Homo sapien
gagccggcgtccaccgcatcacacc

SEQ ID NO: 1914534 - DNA, 25 bp, Homo sapien
ataagatgccttaatgagaggctga

SEQ ID NO: 1914535 - DNA, 25 bp, Homo sapien
gatgccttaatgagaggctgatggt

SEQ ID NO: 1914536 - DNA, 25 bp, Homo sapien
agtgaaggttccaggcgtgaagagg

SEQ ID NO: 1914537 - DNA, 25 bp, Homo sapien
ggttccaggcgtgaagaggccagca

SEQ ID NO: 1914538 - DNA, 25 bp, Homo sapien
caggcgtgaagaggccagcaattgg

SEQ ID NO: 1914539 - DNA, 25 bp, Homo sapien
tccaggcgtgaagaggccagcaatt

SEQ ID NO: 1914540 - DNA, 25 bp, Homo sapien
tccttgatgaggctctaggtctctg

SEQ ID NO: 1914541 - DNA, 25 bp, Homo sapien
ttccttgatgaggctctaggtctct

SEQ ID NO: 1914542 - DNA, 25 bp, Homo sapien
tttccttgatgaggctctaggtctc

SEQ ID NO: 1914543 - DNA, 25 bp, Homo sapien
tgtgtttcttcctatgatgattttt

SEQ ID NO: 1914544 - DNA, 25 bp, Homo sapien
ctgtgtttcttcctatgatgatttt

SEQ ID NO: 1914545 - DNA, 25 bp, Homo sapien
gtgtttcttcctatgatgatttttt

SEQ ID NO: 1914546 - DNA, 25 bp, Homo sapien
ggaagctgagcttgtcttctttgtt

SEQ ID NO: 1914547 - DNA, 25 bp, Homo sapien
tcttctttgttgtctcatccccagt

SEQ ID NO: 1914548 - DNA, 25 bp, Homo sapien
tgtcttctttgttgtctcatcccca

SEQ ID NO: 1914549 - DNA, 25 bp, Homo sapien
gtctcatccccagtacatcacacat

SEQ ID NO: 1914550 - DNA, 25 bp, Homo sapien
cctattgggcttgaggcaggccatt

SEQ ID NO: 1914551 - DNA, 25 bp, Homo sapien
taaggtacagctcagggaataactc

SEQ ID NO: 1914552 - DNA, 25 bp, Homo sapien
catatattgctaggtgatgacccct

SEQ ID NO: 1914553 - DNA, 25 bp, Homo sapien
gattgcagacgatagagaggcatcc

SEQ ID NO: 1914554 - DNA, 25 bp, Homo sapien
tatgttactgcactcctggcttgga

SEQ ID NO: 1914555 - DNA, 25 bp, Homo sapien
cctggcttggaaatggttgcacata

SEQ ID NO: 1914556 - DNA, 25 bp, Homo sapien
aaatggttgcacatagttctttcta

SEQ ID NO: 1914557 - DNA, 25 bp, Homo sapien
tctactgcctaaccattcaatatgt

SEQ ID NO: 1914558 - DNA, 25 bp, Homo sapien
gatgcccagggagaattgtgccatg

SEQ ID NO: 1914559 - DNA, 25 bp, Homo sapien
gaatctctgtcattcggcactgaaa

SEQ ID NO: 1914560 - DNA, 25 bp, Homo sapien
taatgctaacatgctgagccacagg

SEQ ID NO: 1914561 - DNA, 25 bp, Homo sapien
aacgtaagctggttccggaatctct

SEQ ID NO: 1914562 - DNA, 25 bp, Homo sapien
aacatgtcgggcatgaaatatgcag

SEQ ID NO: 1914563 - DNA, 25 bp, Homo sapien
tgtgttcagcaacatgtcgggcatg

SEQ ID NO: 1914564 - DNA, 25 bp, Homo sapien
gcattcctggtaccacgtggacaga

SEQ ID NO: 1914565 - DNA, 25 bp, Homo sapien
tttattctggcactttactcggttg

SEQ ID NO: 1914566 - DNA, 25 bp, Homo sapien
tcaggctcagtgaacacccaaacct

SEQ ID NO: 1914567 - DNA, 25 bp, Homo sapien
gactcattttttgtagcgttgtgta

SEQ ID NO: 1914568 - DNA, 25 bp, Homo sapien
gattaagggttatgtcacgagactc

SEQ ID NO: 1914569 - DNA, 25 bp, Homo sapien
tctgggataccagtcatctttgcgg

SEQ ID NO: 1914570 - DNA, 25 bp, Homo sapien
aattatgaatgaacacttttgcttg

SEQ ID NO: 1914571 - DNA, 25 bp, Homo sapien
aaaggaataattatgaatgaacact

SEQ ID NO: 1914572 - DNA, 25 bp, Homo sapien
ttaaggtcaaaggaataattatgaa

SEQ ID NO: 1914573 - DNA, 25 bp, Homo sapien
ataattatgaatgaacacttttgct

SEQ ID NO: 1914574 - DNA, 25 bp, Homo sapien
aagaagaggcacacagtgaatggat

SEQ ID NO: 1914575 - DNA, 25 bp, Homo sapien
taaaggagtaagaatagcaaagcat

SEQ ID NO: 1914576 - DNA, 25 bp, Homo sapien
ctgattcaaaaagaacgaaggcact

SEQ ID NO: 1914577 - DNA, 25 bp, Homo sapien
gattcaaaaagaacgaaggcactaa

SEQ ID NO: 1914578 - DNA, 25 bp, Homo sapien
gcccatttggcattgtttgactctg

SEQ ID NO: 1914579 - DNA, 25 bp, Homo sapien
gatagcccatttggcattgtttgac

SEQ ID NO: 1914580 - DNA, 25 bp, Homo sapien
gctgacttcttgtcaacacgtgata

SEQ ID NO: 1914581 - DNA, 25 bp, Homo sapien
tgtcaacacgtgatagcccatttgg

SEQ ID NO: 1914582 - DNA, 25 bp, Homo sapien
tcttgagcatgcataggggtccatg

SEQ ID NO: 1914583 - DNA, 25 bp, Homo sapien
ggacagtttccagggaggtgattat

SEQ ID NO: 1914584 - DNA, 25 bp, Homo sapien
aatatgtgcaggacatttcagtagc

SEQ ID NO: 1914585 - DNA, 25 bp, Homo sapien
aggattctggttgagatagggtgca

SEQ ID NO: 1914586 - DNA, 25 bp, Homo sapien
ccagggcacggtttcaagatttagg

SEQ ID NO: 1914587 - DNA, 25 bp, Homo sapien
ccacccagggcacggtttcaagatt

SEQ ID NO: 1914588 - DNA, 25 bp, Homo sapien
cccagggcacggtttcaagatttag

SEQ ID NO: 1914589 - DNA, 25 bp, Homo sapien
tttcaagatttaggtcagatgtcat

SEQ ID NO: 1914590 - DNA, 25 bp, Homo sapien
tctgctccaacggtacacagaagag

SEQ ID NO: 1914591 - DNA, 25 bp, Homo sapien
tgtgaatccaacacagggcattagt

SEQ ID NO: 1914592 - DNA, 25 bp, Homo sapien
cagggcattagtgtcatgttcagat

SEQ ID NO: 1914593 - DNA, 25 bp, Homo sapien
atgttcagatctgctccaacggtac

SEQ ID NO: 1914594 - DNA, 25 bp, Homo sapien
ctgcatttccctggttgttcttttt

SEQ ID NO: 1914595 - DNA, 25 bp, Homo sapien
gctgcatttccctggttgttctttt

SEQ ID NO: 1914596 - DNA, 25 bp, Homo sapien
tgcatttccctggttgttcttttta

SEQ ID NO: 1914597 - DNA, 25 bp, Homo sapien
tctgaatacggtcacgtggcaggct

SEQ ID NO: 1914598 - DNA, 25 bp, Homo sapien
tcattttaacctgttccatgtggaa

SEQ ID NO: 1914599 - DNA, 25 bp, Homo sapien
ctcacgagtgagtcatgggaggtaa

SEQ ID NO: 1914600 - DNA, 25 bp, Homo sapien
catgtggaagctctgaatacggtca

SEQ ID NO: 1914601 - DNA, 25 bp, Homo sapien
ctgttttggactgtacagagacaag

SEQ ID NO: 1914602 - DNA, 25 bp, Homo sapien
cttcactctgttttggactgtacag

SEQ ID NO: 1914603 - DNA, 25 bp, Homo sapien
atgcagcattcccaaacattggcag

SEQ ID NO: 1914604 - DNA, 25 bp, Homo sapien
acaagcatgcagcattcccaaacat

SEQ ID NO: 1914605 - DNA, 25 bp, Homo sapien
tacttcttggcatttgaacctgact

SEQ ID NO: 1914606 - DNA, 25 bp, Homo sapien
gaacctgacttcataccctgtatac

SEQ ID NO: 1914607 - DNA, 25 bp, Homo sapien
accaactaggttctggtattctgtc

SEQ ID NO: 1914608 - DNA, 25 bp, Homo sapien
ttgctgctgacctgacccttacttc

SEQ ID NO: 1914609 - DNA, 25 bp, Homo sapien
acagtgccaaaggattgttgttcaa

SEQ ID NO: 1914610 - DNA, 25 bp, Homo sapien
aagttccagtggcacacagtgccaa

SEQ ID NO: 1914611 - DNA, 25 bp, Homo sapien
cacacaaccgctaatataaaaaaca

SEQ ID NO: 1914612 - DNA, 25 bp, Homo sapien
tagatgtcacatagcctacgttcac

SEQ ID NO: 1914613 - DNA, 25 bp, Homo sapien
ctgaaaaatcatatcctctctccat

SEQ ID NO: 1914614 - DNA, 25 bp, Homo sapien
tgctgaaaaatcatatcctctctcc

SEQ ID NO: 1914615 - DNA, 25 bp, Homo sapien
ctgctgaaaaatcatatcctctctc

SEQ ID NO: 1914616 - DNA, 25 bp, Homo sapien
gctgaaaaatcatatcctctctcca

SEQ ID NO: 1914617 - DNA, 25 bp, Homo sapien
tggtcctcgggtttctcataaatgg

SEQ ID NO: 1914618 - DNA, 25 bp, Homo sapien
gcagatatcaaacggccttcgtgga

SEQ ID NO: 1914619 - DNA, 25 bp, Homo sapien
gacaatagttgtgttggctgccata

SEQ ID NO: 1914620 - DNA, 25 bp, Homo sapien
tcaaggtcagcgatatgagagggca

SEQ ID NO: 1914621 - DNA, 25 bp, Homo sapien
gatcacccagctagtaattggctga

SEQ ID NO: 1914622 - DNA, 25 bp, Homo sapien
gatctcaaacgcaggcagtctagct

SEQ ID NO: 1914623 - DNA, 25 bp, Homo sapien
gtgctacctgactccatcacagcag

SEQ ID NO: 1914624 - DNA, 25 bp, Homo sapien
caaaaaaccttgccaagatcaccca

SEQ ID NO: 1914625 - DNA, 25 bp, Homo sapien
aggtttctatgtgggcaatactgag

SEQ ID NO: 1914626 - DNA, 25 bp, Homo sapien
gggaaggtttctatgtgggcaatac

SEQ ID NO: 1914627 - DNA, 25 bp, Homo sapien
tctatgtgggcaatactgaggcagg

SEQ ID NO: 1914628 - DNA, 25 bp, Homo sapien
aatccatttcattgacggggaaggt

SEQ ID NO: 1914629 - DNA, 25 bp, Homo sapien
aaagtagggaatgccagataatgga

SEQ ID NO: 1914630 - DNA, 25 bp, Homo sapien
tccgagtggctgtgagtgatgagat

SEQ ID NO: 1914631 - DNA, 25 bp, Homo sapien
ggcaggtatataacacggatgaaag

SEQ ID NO: 1914632 - DNA, 25 bp, Homo sapien
ccaccaggggattccgagtggctgt

SEQ ID NO: 1914633 - DNA, 25 bp, Homo sapien
acgtagaagtcttcggcacacatac

SEQ ID NO: 1914634 - DNA, 25 bp, Homo sapien
gagcacgtagaagtcttcggcacac

SEQ ID NO: 1914635 - DNA, 25 bp, Homo sapien
ctgcgagagcacgtagaagtcttcg

SEQ ID NO: 1914636 - DNA, 25 bp, Homo sapien
cgagagcacgtagaagtcttcggca

SEQ ID NO: 1914637 - DNA, 25 bp, Homo sapien
tattccagcgatgattatcttgttg

SEQ ID NO: 1914638 - DNA, 25 bp, Homo sapien
gacaggtccctattattccagcgat

SEQ ID NO: 1914639 - DNA, 25 bp, Homo sapien
tcttgttggcgggtattccatggcc

SEQ ID NO: 1914640 - DNA, 25 bp, Homo sapien
catggcctctcctcacctactggct

SEQ ID NO: 1914641 - DNA, 25 bp, Homo sapien
gaaatttctaatgaactcgccaagg

SEQ ID NO: 1914642 - DNA, 25 bp, Homo sapien
tcgccaaggaatctcaagaaattga

SEQ ID NO: 1914643 - DNA, 25 bp, Homo sapien
gattttgcacttcttatggcaggcc

SEQ ID NO: 1914644 - DNA, 25 bp, Homo sapien
gaaactaactgttgtgactggcagt

SEQ ID NO: 1914645 - DNA, 25 bp, Homo sapien
ccaccagagtgtaagcagcataagg

SEQ ID NO: 1914646 - DNA, 25 bp, Homo sapien
tagatcactatcctaatcagcctgg

SEQ ID NO: 1914647 - DNA, 25 bp, Homo sapien
tcttgcttggatacctataggcacc

SEQ ID NO: 1914648 - DNA, 25 bp, Homo sapien
caatcaaagtccctatcacagagtg

SEQ ID NO: 1914649 - DNA, 25 bp, Homo sapien
aaagtcgatatgggttaacactaat

SEQ ID NO: 1914650 - DNA, 25 bp, Homo sapien
caaagtcgatatgggttaacactaa

SEQ ID NO: 1914651 - DNA, 25 bp, Homo sapien
tttctcataccacctatctctataa

SEQ ID NO: 1914652 - DNA, 25 bp, Homo sapien
tggttatttcatttagctggaacaa

SEQ ID NO: 1914653 - DNA, 25 bp, Homo sapien
tcataccacctatctctataaagca

SEQ ID NO: 1914654 - DNA, 25 bp, Homo sapien
gttatttcatttagctggaacaagt

SEQ ID NO: 1914655 - DNA, 25 bp, Homo sapien
tatacataaatgatccacggttgca

SEQ ID NO: 1914656 - DNA, 25 bp, Homo sapien
gaaattgcattagctgacctcctca

SEQ ID NO: 1914657 - DNA, 25 bp, Homo sapien
gaaggatgttaagctctggaatgcc

SEQ ID NO: 1914658 - DNA, 25 bp, Homo sapien
tacagaatgttatcgtccacagcaa

SEQ ID NO: 1914659 - DNA, 25 bp, Homo sapien
aaattcagtatatttcagacttaaa

SEQ ID NO: 1914660 - DNA, 25 bp, Homo sapien
aattcagtatatttcagacttaaac

SEQ ID NO: 1914661 - DNA, 25 bp, Homo sapien
aaagcattgcacaagccacactaaa

SEQ ID NO: 1914662 - DNA, 25 bp, Homo sapien
taaagcattgcacaagccacactaa

SEQ ID NO: 1914663 - DNA, 25 bp, Homo sapien
tgtccaggaccaggattctatctgt

SEQ ID NO: 1914664 - DNA, 25 bp, Homo sapien
tctgttttataatcctgtgggctca

SEQ ID NO: 1914665 - DNA, 25 bp, Homo sapien
gaccaggattctatctgttttataa

SEQ ID NO: 1914666 - DNA, 25 bp, Homo sapien
caggaccaggattctatctgtttta

SEQ ID NO: 1914667 - DNA, 25 bp, Homo sapien
cacttacttgctacatatgattgag

SEQ ID NO: 1914668 - DNA, 25 bp, Homo sapien
cagttttgggatgcagaaaccagat

SEQ ID NO: 1914669 - DNA, 25 bp, Homo sapien
tcctcctgatgcacaaaacagatag

SEQ ID NO: 1914670 - DNA, 25 bp, Homo sapien
gtctgaatgaagctagcaaattgca

SEQ ID NO: 1914671 - DNA, 25 bp, Homo sapien
aaacaatactatctctgctacaggg

SEQ ID NO: 1914672 - DNA, 25 bp, Homo sapien
catgccaagcattctcagcgagaag

SEQ ID NO: 1914673 - DNA, 25 bp, Homo sapien
taaagcagcctagtggattccccta

SEQ ID NO: 1914674 - DNA, 25 bp, Homo sapien
tggttggacaaaagactcccctgcc

SEQ ID NO: 1914675 - DNA, 25 bp, Homo sapien
actgtccacatttggggttgaagaa

SEQ ID NO: 1914676 - DNA, 25 bp, Homo sapien
ctctaacatgctttcaacataggca

SEQ ID NO: 1914677 - DNA, 25 bp, Homo sapien
tgctttcaacataggcactgtccac

SEQ ID NO: 1914678 - DNA, 25 bp, Homo sapien
catttggggttgaagaactcttcat

SEQ ID NO: 1914679 - DNA, 25 bp, Homo sapien
taacattccaatttaagatatttcc

SEQ ID NO: 1914680 - DNA, 25 bp, Homo sapien
aaggtacaatcccagttttatcata

SEQ ID NO: 1914681 - DNA, 25 bp, Homo sapien
ctcctgtatacctgtccccaggtat

SEQ ID NO: 1914682 - DNA, 25 bp, Homo sapien
ccaggtatctcaagataaggtacaa

SEQ ID NO: 1914683 - DNA, 25 bp, Homo sapien
tatgaagctttatttcgccaactga

SEQ ID NO: 1914684 - DNA, 25 bp, Homo sapien
gctttatttcgccaactgaagtaaa

SEQ ID NO: 1914685 - DNA, 25 bp, Homo sapien
cgccaactgaagtaaagctttcttt

SEQ ID NO: 1914686 - DNA, 25 bp, Homo sapien
tttcgccaactgaagtaaagctttc

SEQ ID NO: 1914687 - DNA, 25 bp, Homo sapien
gaagccagctgctttttcataaagc

SEQ ID NO: 1914688 - DNA, 25 bp, Homo sapien
tcttctcatgattatgagctgacgg

SEQ ID NO: 1914689 - DNA, 25 bp, Homo sapien
gacggacagctgtccagtgtcagtt

SEQ ID NO: 1914690 - DNA, 25 bp, Homo sapien
agctgtccagtgtcagttgaacatg

SEQ ID NO: 1914691 - DNA, 25 bp, Homo sapien
ggatgaaccgaatctcctgcttcat

SEQ ID NO: 1914692 - DNA, 25 bp, Homo sapien
aatttggatgaaccgaatctcctgc

SEQ ID NO: 1914693 - DNA, 25 bp, Homo sapien
ccagctgctcaacaatttggatgaa

SEQ ID NO: 1914694 - DNA, 25 bp, Homo sapien
caacaatttggatgaaccgaatctc

SEQ ID NO: 1914695 - DNA, 25 bp, Homo sapien
aatactaaacagctccgaccctgct

SEQ ID NO: 1914696 - DNA, 25 bp, Homo sapien
atactaaacagctccgaccctgctt

SEQ ID NO: 1914697 - DNA, 25 bp, Homo sapien
gaatatatgtagtggattctctcct

SEQ ID NO: 1914698 - DNA, 25 bp, Homo sapien
ggccaccagaaatgccgttgagaat

SEQ ID NO: 1914699 - DNA, 25 bp, Homo sapien
tgagaatagaagacaccaatgctga

SEQ ID NO: 1914700 - DNA, 25 bp, Homo sapien
tgctgaagacagtgagtatctgatt

SEQ ID NO: 1914701 - DNA, 25 bp, Homo sapien
ggctattaggccatgtccaattttc

SEQ ID NO: 1914702 - DNA, 25 bp, Homo sapien
gtctgtcggaggatacagctgcctc

SEQ ID NO: 1914703 - DNA, 25 bp, Homo sapien
ccagcgaagctttaattacggtgac

SEQ ID NO: 1914704 - DNA, 25 bp, Homo sapien
cctccatgtgccagcgaagctttaa

SEQ ID NO: 1914705 - DNA, 25 bp, Homo sapien
catcgcaaatagtggtgaagtcaat

SEQ ID NO: 1914706 - DNA, 25 bp, Homo sapien
tatgaaccttcatgaagccatcgca

SEQ ID NO: 1914707 - DNA, 25 bp, Homo sapien
taaatgtggtgtatacgtccagtga

SEQ ID NO: 1914708 - DNA, 25 bp, Homo sapien
gctatgcatggagggcttaatacct

SEQ ID NO: 1914709 - DNA, 25 bp, Homo sapien
tctaggtacaccaggtactctttct

SEQ ID NO: 1914710 - DNA, 25 bp, Homo sapien
ttctaggtacaccaggtactctttc

SEQ ID NO: 1914711 - DNA, 25 bp, Homo sapien
ccagggtagggctgcctgatgctcc

SEQ ID NO: 1914712 - DNA, 25 bp, Homo sapien
cattctcaggccctatccagggtag

SEQ ID NO: 1914713 - DNA, 25 bp, Homo sapien
agttgggttcagtcccgcttgccca

SEQ ID NO: 1914714 - DNA, 25 bp, Homo sapien
ccacttagtacaactactagttggg

SEQ ID NO: 1914715 - DNA, 25 bp, Homo sapien
ctagttggggagtgcatgatttcag

SEQ ID NO: 1914716 - DNA, 25 bp, Homo sapien
agccacttagtacaactactagttg

SEQ ID NO: 1914717 - DNA, 25 bp, Homo sapien
ttccatttaaaggtatgcatttctg

SEQ ID NO: 1914718 - DNA, 25 bp, Homo sapien
taccatgcaatgttatatcactgat

SEQ ID NO: 1914719 - DNA, 25 bp, Homo sapien
cactaatgttggctgaaattggtca

SEQ ID NO: 1914720 - DNA, 25 bp, Homo sapien
gctttctcatgatcctgaaacaatg

SEQ ID NO: 1914721 - DNA, 25 bp, Homo sapien
ccaagcggtgtcctgaggcatctgt

SEQ ID NO: 1914722 - DNA, 25 bp, Homo sapien
gaggcatctgtgttagcaccatgag

SEQ ID NO: 1914723 - DNA, 25 bp, Homo sapien
ggtgtcctgaggcatctgtgttagc

SEQ ID NO: 1914724 - DNA, 25 bp, Homo sapien
tagcaccatgagtgacaggaagagg

SEQ ID NO: 1914725 - DNA, 25 bp, Homo sapien
taaacagcaataaagaagatccatc

SEQ ID NO: 1914726 - DNA, 25 bp, Homo sapien
cattctcatttaacacttaagggca

SEQ ID NO: 1914727 - DNA, 25 bp, Homo sapien
caagtatgcatatctagcactgttc

SEQ ID NO: 1914728 - DNA, 25 bp, Homo sapien
gacacattgttttgggaatagtaac

SEQ ID NO: 1914729 - DNA, 25 bp, Homo sapien
gaatccttgacctgatctccatttc

SEQ ID NO: 1914730 - DNA, 25 bp, Homo sapien
cttgacctgatctccatttcaggga

SEQ ID NO: 1914731 - DNA, 25 bp, Homo sapien
gggctgaatccttgacctgatctcc

SEQ ID NO: 1914732 - DNA, 25 bp, Homo sapien
ctggggctgaatccttgacctgatc

SEQ ID NO: 1914733 - DNA, 25 bp, Homo sapien
tcttgctgatgccttgtgaaggcca

SEQ ID NO: 1914734 - DNA, 25 bp, Homo sapien
tctatggctatgtcttgctgatgcc

SEQ ID NO: 1914735 - DNA, 25 bp, Homo sapien
aaagtctatggctatgtcttgctga

SEQ ID NO: 1914736 - DNA, 25 bp, Homo sapien
gctatgtcttgctgatgccttgtga

SEQ ID NO: 1914737 - DNA, 25 bp, Homo sapien
aagacattttgagaagacccctgca

SEQ ID NO: 1914738 - DNA, 25 bp, Homo sapien
acattttgagaagacccctgcaggg

SEQ ID NO: 1914739 - DNA, 25 bp, Homo sapien
attttgagaagacccctgcagggtc

SEQ ID NO: 1914740 - DNA, 25 bp, Homo sapien
ttgagaagacccctgcagggtcttc

SEQ ID NO: 1914741 - DNA, 25 bp, Homo sapien
gggctttcactatgcatcttccttg

SEQ ID NO: 1914742 - DNA, 25 bp, Homo sapien
cttccttgttctttagctatgtcca

SEQ ID NO: 1914743 - DNA, 25 bp, Homo sapien
tggctgtgggctttcactatgcatc

SEQ ID NO: 1914744 - DNA, 25 bp, Homo sapien
tcttccttgttctttagctatgtcc

SEQ ID NO: 1914745 - DNA, 25 bp, Homo sapien
tcatccttgtacaatctgcctgttt

SEQ ID NO: 1914746 - DNA, 25 bp, Homo sapien
catccttgtacaatctgcctgtttt

SEQ ID NO: 1914747 - DNA, 25 bp, Homo sapien
atccttgtacaatctgcctgttttc

SEQ ID NO: 1914748 - DNA, 25 bp, Homo sapien
caccccagaagtgaccgaacgcgaa

SEQ ID NO: 1914749 - DNA, 25 bp, Homo sapien
caaagctgccctcgcgctccaaaca

SEQ ID NO: 1914750 - DNA, 25 bp, Homo sapien
gtcccaaagctgccctcgcgctcca

SEQ ID NO: 1914751 - DNA, 25 bp, Homo sapien
tgccctcgcgctccaaacagctcca

SEQ ID NO: 1914752 - DNA, 25 bp, Homo sapien
tctccctcaaagagagcgctaccca

SEQ ID NO: 1914753 - DNA, 25 bp, Homo sapien
gagagcgctacccagcgctctggga

SEQ ID NO: 1914754 - DNA, 25 bp, Homo sapien
cgcagtaaacgcgtgttccctttct

SEQ ID NO: 1914755 - DNA, 25 bp, Homo sapien
agcgcagtaaacgcgtgttcccttt

SEQ ID NO: 1914756 - DNA, 25 bp, Homo sapien
tcggcggcgggtcgcgtgggggtca

SEQ ID NO: 1914757 - DNA, 25 bp, Homo sapien
tccggacggcagttggtccagtagt

SEQ ID NO: 1914758 - DNA, 25 bp, Homo sapien
tcggcgtgaatgagagcaaaccaac

SEQ ID NO: 1914759 - DNA, 25 bp, Homo sapien
ccagtagtttcggatgcccgggcta

SEQ ID NO: 1914760 - DNA, 25 bp, Homo sapien
ctaggctcggcggagagcgagtcgg

SEQ ID NO: 1914761 - DNA, 25 bp, Homo sapien
cgagaagtagtggagtttagggcgc

SEQ ID NO: 1914762 - DNA, 25 bp, Homo sapien
agaagtagtggagtttagggcgcgt

SEQ ID NO: 1914763 - DNA, 25 bp, Homo sapien
gcaggcgggcgagaagtagtggagt

SEQ ID NO: 1914764 - DNA, 25 bp, Homo sapien
ggagtttagggcgcgtttcctgcac

SEQ ID NO: 1914765 - DNA, 25 bp, Homo sapien
ggcagggcgcgctcccgtggcgcgg

SEQ ID NO: 1914766 - DNA, 25 bp, Homo sapien
gcgcgctcccgtggcgcgggcacgg

SEQ ID NO: 1914767 - DNA, 25 bp, Homo sapien
agggcgcgctcccgtggcgcgggca

SEQ ID NO: 1914768 - DNA, 25 bp, Homo sapien
cggcagggcgcgctcccgtggcgcg

SEQ ID NO: 1914769 - DNA, 25 bp, Homo sapien
accctgcgcgcagagggcgagactt

SEQ ID NO: 1914770 - DNA, 25 bp, Homo sapien
aatccgcccaaaagagcaacactca

SEQ ID NO: 1914771 - DNA, 25 bp, Homo sapien
cactcagtgtgactgggatcttccc

SEQ ID NO: 1914772 - DNA, 25 bp, Homo sapien
agacttcgggcgtcctcggtgacag

SEQ ID NO: 1914773 - DNA, 25 bp, Homo sapien
tcccggagacgtgcccagctgtgtg

SEQ ID NO: 1914774 - DNA, 25 bp, Homo sapien
tgtgtctaagcgaatctcttcccct

SEQ ID NO: 1914775 - DNA, 25 bp, Homo sapien
ctcccggagacgtgcccagctgtgt

SEQ ID NO: 1914776 - DNA, 25 bp, Homo sapien
tgcgcgtgtgtgtgtctaagcgaat

SEQ ID NO: 1914777 - DNA, 25 bp, Homo sapien
gcgcaggagggaccgggtccctggc

SEQ ID NO: 1914778 - DNA, 25 bp, Homo sapien
ggaccgggtccctggcgaccagctg

SEQ ID NO: 1914779 - DNA, 25 bp, Homo sapien
tccctggcgaccagctgcagagtgg

SEQ ID NO: 1914780 - DNA, 25 bp, Homo sapien
gcgcgcaggagggaccgggtccctg

SEQ ID NO: 1914781 - DNA, 25 bp, Homo sapien
tcccgcagctgagccactgcgcgtc

SEQ ID NO: 1914782 - DNA, 25 bp, Homo sapien
gcagctgagccactgcgcgtcccac

SEQ ID NO: 1914783 - DNA, 25 bp, Homo sapien
ggtcccgcagctgagccactgcgcg

SEQ ID NO: 1914784 - DNA, 25 bp, Homo sapien
gcggaggtcccgcagctgagccact

SEQ ID NO: 1914785 - DNA, 25 bp, Homo sapien
aaccgcgggcgagcagcgcagtggg

SEQ ID NO: 1914786 - DNA, 25 bp, Homo sapien
gctcccagttggactgaggtcgcag

SEQ ID NO: 1914787 - DNA, 25 bp, Homo sapien
ccagttggactgaggtcgcagcttg

SEQ ID NO: 1914788 - DNA, 25 bp, Homo sapien
gggcgcgcagggctcccagttggac

SEQ ID NO: 1914789 - DNA, 25 bp, Homo sapien
tgctgaggcgctgagaccggtctct

SEQ ID NO: 1914790 - DNA, 25 bp, Homo sapien
acacagaggtcggagggacccaatt

SEQ ID NO: 1914791 - DNA, 25 bp, Homo sapien
agggacccaattgctgaggcgctga

SEQ ID NO: 1914792 - DNA, 25 bp, Homo sapien
acagaggtcggagggacccaattgc

SEQ ID NO: 1914793 - DNA, 25 bp, Homo sapien
gaaatcacagcattattgcttatga

SEQ ID NO: 1914794 - DNA, 25 bp, Homo sapien
atttcatagtacaaatgcagtacac

SEQ ID NO: 1914795 - DNA, 25 bp, Homo sapien
tatgacggcttgtctgttttcaaat

SEQ ID NO: 1914796 - DNA, 25 bp, Homo sapien
tcaaatgacagtcgcagaatgcaaa

SEQ ID NO: 1914797 - DNA, 25 bp, Homo sapien
ttcccatattgtacatgcagattac

SEQ ID NO: 1914798 - DNA, 25 bp, Homo sapien
gcagattacttctcctccatgtaaa

SEQ ID NO: 1914799 - DNA, 25 bp, Homo sapien
agatctcatcactttaagttctaag

SEQ ID NO: 1914800 - DNA, 25 bp, Homo sapien
tctcctccatgtaaagatctcatca

SEQ ID NO: 1914801 - DNA, 25 bp, Homo sapien
cccatctttgctgataccggtcaat

SEQ ID NO: 1914802 - DNA, 25 bp, Homo sapien
ccaccagatgtacttgatccatttc

SEQ ID NO: 1914803 - DNA, 25 bp, Homo sapien
gataccggtcaatgtccaccagatg

SEQ ID NO: 1914804 - DNA, 25 bp, Homo sapien
tccatttcatcagcgtcttttactt

SEQ ID NO: 1914805 - DNA, 25 bp, Homo sapien
ctacctcttaggcaggagttattcc

SEQ ID NO: 1914806 - DNA, 25 bp, Homo sapien
ttaggcaggagttattccagcaaag

SEQ ID NO: 1914807 - DNA, 25 bp, Homo sapien
ggcaggagttattccagcaaagaga

SEQ ID NO: 1914808 - DNA, 25 bp, Homo sapien
cctcttaggcaggagttattccagc

SEQ ID NO: 1914809 - DNA, 25 bp, Homo sapien
ggatctacaataaactggcatgcct

SEQ ID NO: 1914810 - DNA, 25 bp, Homo sapien
gattaggtgatccttttcataggat

SEQ ID NO: 1914811 - DNA, 25 bp, Homo sapien
ggaagtaggccttaaatttgatgat

SEQ ID NO: 1914812 - DNA, 25 bp, Homo sapien
catgccttcatttagcgcacactta

SEQ ID NO: 1914813 - DNA, 25 bp, Homo sapien
gcagtgcttcaatcagttttatgtt

SEQ ID NO: 1914814 - DNA, 25 bp, Homo sapien
cttttggaagacatgcagtgcttca

SEQ ID NO: 1914815 - DNA, 25 bp, Homo sapien
tcttctggtcgaataagaaagtatg

SEQ ID NO: 1914816 - DNA, 25 bp, Homo sapien
tggtcgaataagaaagtatggtcct

SEQ ID NO: 1914817 - DNA, 25 bp, Homo sapien
tcttaccaccttggcctacatactt

SEQ ID NO: 1914818 - DNA, 25 bp, Homo sapien
cacgcctttgtcatgaacttgtaga

SEQ ID NO: 1914819 - DNA, 25 bp, Homo sapien
gccattctaggtcgtatctgatgaa

SEQ ID NO: 1914820 - DNA, 25 bp, Homo sapien
ccttcaccatgaaagatatctactg

SEQ ID NO: 1914821 - DNA, 25 bp, Homo sapien
ttaaatacatcttctgtggttactg

SEQ ID NO: 1914822 - DNA, 25 bp, Homo sapien
cattaaatacatcttctgtggttac

SEQ ID NO: 1914823 - DNA, 25 bp, Homo sapien
atacatcttctgtggttactgagag

SEQ ID NO: 1914824 - DNA, 25 bp, Homo sapien
aaatacatcttctgtggttactgag

SEQ ID NO: 1914825 - DNA, 25 bp, Homo sapien
catgagggagccaaaactgccactc

SEQ ID NO: 1914826 - DNA, 25 bp, Homo sapien
ttctcaccagggtagtaattcaaga

SEQ ID NO: 1914827 - DNA, 25 bp, Homo sapien
taacatatcaacgatgtccatgagg

SEQ ID NO: 1914828 - DNA, 25 bp, Homo sapien
ttcagagagcacttcataagcttga

SEQ ID NO: 1914829 - DNA, 25 bp, Homo sapien
ctggatggcattgggtatcacccac

SEQ ID NO: 1914830 - DNA, 25 bp, Homo sapien
ggatggcattgggtatcacccacaa

SEQ ID NO: 1914831 - DNA, 25 bp, Homo sapien
tggcattgggtatcacccacaaacc

SEQ ID NO: 1914832 - DNA, 25 bp, Homo sapien
cattgggtatcacccacaaaccatt

SEQ ID NO: 1914833 - DNA, 25 bp, Homo sapien
ttccttcaactatggctgggagggc

SEQ ID NO: 1914834 - DNA, 25 bp, Homo sapien
tgagttggttccttcaactatggct

SEQ ID NO: 1914835 - DNA, 25 bp, Homo sapien
tggttccttcaactatggctgggag

SEQ ID NO: 1914836 - DNA, 25 bp, Homo sapien
cattccactcactgagttggttcct

SEQ ID NO: 1914837 - DNA, 25 bp, Homo sapien
tctttgcccagatatttgtcattct

SEQ ID NO: 1914838 - DNA, 25 bp, Homo sapien
tttctttgcccagatatttgtcatt

SEQ ID NO: 1914839 - DNA, 25 bp, Homo sapien
ttctttgcccagatatttgtcattc

SEQ ID NO: 1914840 - DNA, 25 bp, Homo sapien
taatcttgaagagtgcaggcacctg

SEQ ID NO: 1914841 - DNA, 25 bp, Homo sapien
taccataccaagagctagcaatgca

SEQ ID NO: 1914842 - DNA, 25 bp, Homo sapien
caaaaaagttgcaggagaccatgga

SEQ ID NO: 1914843 - DNA, 25 bp, Homo sapien
tcaagagagagtagtaaccagaatc

SEQ ID NO: 1914844 - DNA, 25 bp, Homo sapien
gatagagacactaaatcaaacccca

SEQ ID NO: 1914845 - DNA, 25 bp, Homo sapien
cagtctctgaagtatttgtgcatga

SEQ ID NO: 1914846 - DNA, 25 bp, Homo sapien
tgtttcctcaaactctctgatagag

SEQ ID NO: 1914847 - DNA, 25 bp, Homo sapien
tagatgtcagatgcatgggtcattc

SEQ ID NO: 1914848 - DNA, 25 bp, Homo sapien
gtgctttttgagccaggatgagcca

SEQ ID NO: 1914849 - DNA, 25 bp, Homo sapien
tgggggtgctttttgagccaggatg

SEQ ID NO: 1914850 - DNA, 25 bp, Homo sapien
gggtcgcaagatgctcagtgggggt

SEQ ID NO: 1914851 - DNA, 25 bp, Homo sapien
tcgcaagatgctcagtgggggtgct

SEQ ID NO: 1914852 - DNA, 25 bp, Homo sapien
gccgtaccctgtagcattccgagaa

SEQ ID NO: 1914853 - DNA, 25 bp, Homo sapien
aagccatctgggcttatatgtgcaa

SEQ ID NO: 1914854 - DNA, 25 bp, Homo sapien
ctaagagtctgaaaaactgctggct

SEQ ID NO: 1914855 - DNA, 25 bp, Homo sapien
caggagcttaaatcggccgtaccct

SEQ ID NO: 1914856 - DNA, 25 bp, Homo sapien
ttgataaggcgtagaccctgaacta

SEQ ID NO: 1914857 - DNA, 25 bp, Homo sapien
gataaggcgtagaccctgaactaac

SEQ ID NO: 1914858 - DNA, 25 bp, Homo sapien
ggttgataaggcgtagaccctgaac

SEQ ID NO: 1914859 - DNA, 25 bp, Homo sapien
tttggttgataaggcgtagaccctg

SEQ ID NO: 1914860 - DNA, 25 bp, Homo sapien
ctatgcaacagggacagctgccgtg

SEQ ID NO: 1914861 - DNA, 25 bp, Homo sapien
agggacagctgccgtgatagcaacc

SEQ ID NO: 1914862 - DNA, 25 bp, Homo sapien
caacagggacagctgccgtgatagc

SEQ ID NO: 1914863 - DNA, 25 bp, Homo sapien
tgcaacagggacagctgccgtgata

SEQ ID NO: 1914864 - DNA, 25 bp, Homo sapien
ctctgaaggcaacattaccatggca

SEQ ID NO: 1914865 - DNA, 25 bp, Homo sapien
tctgaaggcaacattaccatggcaa

SEQ ID NO: 1914866 - DNA, 25 bp, Homo sapien
ccactcccacaccagttgcctctga

SEQ ID NO: 1914867 - DNA, 25 bp, Homo sapien
cactcccacaccagttgcctctgaa

SEQ ID NO: 1914868 - DNA, 25 bp, Homo sapien
tcaagctgccaggtggaccccatgt

SEQ ID NO: 1914869 - DNA, 25 bp, Homo sapien
gctgccaggtggaccccatgtagaa

SEQ ID NO: 1914870 - DNA, 25 bp, Homo sapien
ccaggtggaccccatgtagaaccac

SEQ ID NO: 1914871 - DNA, 25 bp, Homo sapien
aggtggaccccatgtagaaccacag

SEQ ID NO: 1914872 - DNA, 25 bp, Homo sapien
caagagtctggcatggaccaaaggg

SEQ ID NO: 1914873 - DNA, 25 bp, Homo sapien
tttaacatgtgtaggaaaaatatac

SEQ ID NO: 1914874 - DNA, 25 bp, Homo sapien
gtaaaagaagtgtgtttaacatgtg

SEQ ID NO: 1914875 - DNA, 25 bp, Homo sapien
gttggggtagccatgtaaggcagcc

SEQ ID NO: 1914876 - DNA, 25 bp, Homo sapien
taacttgtctctaagccatctgttc

SEQ ID NO: 1914877 - DNA, 25 bp, Homo sapien
tgtgctttgaagtctaggcttgact

SEQ ID NO: 1914878 - DNA, 25 bp, Homo sapien
ttcttctcataggtgtttccatttc

SEQ ID NO: 1914879 - DNA, 25 bp, Homo sapien
acagctgccacaacaacagggagaa

SEQ ID NO: 1914880 - DNA, 25 bp, Homo sapien
tgtccttcaattgatagcgcttcca

SEQ ID NO: 1914881 - DNA, 25 bp, Homo sapien
tttccagatctggtgaaggtagtcg

SEQ ID NO: 1914882 - DNA, 25 bp, Homo sapien
ggctgagctgcaattcaggataggg

SEQ ID NO: 1914883 - DNA, 25 bp, Homo sapien
tatgatgtctggtctattaaaaaga

SEQ ID NO: 1914884 - DNA, 25 bp, Homo sapien
tgtaaatgtatcaaaacctctgaag

SEQ ID NO: 1914885 - DNA, 25 bp, Homo sapien
ctgttgtaaatgtatcaaaacctct

SEQ ID NO: 1914886 - DNA, 25 bp, Homo sapien
tatcaaaacctctgaagacgaggtt

SEQ ID NO: 1914887 - DNA, 25 bp, Homo sapien
aaatgtatcaaaacctctgaagacg

SEQ ID NO: 1914888 - DNA, 25 bp, Homo sapien
tgacacaggcttggcacttatatgc

SEQ ID NO: 1914889 - DNA, 25 bp, Homo sapien
tcaggaaggtttaaatgacacaggc

SEQ ID NO: 1914890 - DNA, 25 bp, Homo sapien
ccacagttgtttgcatcgagatgag

SEQ ID NO: 1914891 - DNA, 25 bp, Homo sapien
ggcattgggtcagagttacagtcac

SEQ ID NO: 1914892 - DNA, 25 bp, Homo sapien
ccaaactggcaaagttactgaatgt

SEQ ID NO: 1914893 - DNA, 25 bp, Homo sapien
tagcatagtgattaagaacattggc

SEQ ID NO: 1914894 - DNA, 25 bp, Homo sapien
agtgctggatactaacaatcgttat

SEQ ID NO: 1914895 - DNA, 25 bp, Homo sapien
cattggctgtagaattagacatatt

SEQ ID NO: 1914896 - DNA, 25 bp, Homo sapien
gaaaaatcacaatagtttacacatt

SEQ ID NO: 1914897 - DNA, 25 bp, Homo sapien
gagaggactgtagctaagaaaaatc

SEQ ID NO: 1914898 - DNA, 25 bp, Homo sapien
cattcagggactttagattgaaact

SEQ ID NO: 1914899 - DNA, 25 bp, Homo sapien
gaaattccaggtgttagcgatttag

SEQ ID NO: 1914900 - DNA, 25 bp, Homo sapien
gacaaacatgtcagcagatcccata

SEQ ID NO: 1914901 - DNA, 25 bp, Homo sapien
taaaccttcatggagggagctcttt

SEQ ID NO: 1914902 - DNA, 25 bp, Homo sapien
gagatgtcattcctttagggccaag

SEQ ID NO: 1914903 - DNA, 25 bp, Homo sapien
tataagagattggactagactcagc

SEQ ID NO: 1914904 - DNA, 25 bp, Homo sapien
ttcacatagcaaacgatctctgggt

SEQ ID NO: 1914905 - DNA, 25 bp, Homo sapien
gtgtcaccaggaaagcacttcatca

SEQ ID NO: 1914906 - DNA, 25 bp, Homo sapien
tggctagggtttagacctgggatct

SEQ ID NO: 1914907 - DNA, 25 bp, Homo sapien
tcatcagcagtaaagggtgagctcc

SEQ ID NO: 1914908 - DNA, 25 bp, Homo sapien
ggtgtgagaaaagtagagtgattcc

SEQ ID NO: 1914909 - DNA, 25 bp, Homo sapien
gagttagtttcttgcactcctctgg

SEQ ID NO: 1914910 - DNA, 25 bp, Homo sapien
aattgacttagagttagtttcttgc

SEQ ID NO: 1914911 - DNA, 25 bp, Homo sapien
aaaagtagagtgattcctgcatgca

SEQ ID NO: 1914912 - DNA, 25 bp, Homo sapien
tcttctaagctttcgaagttttgct

SEQ ID NO: 1914913 - DNA, 25 bp, Homo sapien
gtttacgcttattaaaagcagtgcc

SEQ ID NO: 1914914 - DNA, 25 bp, Homo sapien
aatgtgcttgccaataaggtgtcaa

SEQ ID NO: 1914915 - DNA, 25 bp, Homo sapien
tgaccacagtttatgaagtgtttac

SEQ ID NO: 1914916 - DNA, 25 bp, Homo sapien
tttgatttgttaactgagggctact

SEQ ID NO: 1914917 - DNA, 25 bp, Homo sapien
tttttgatttgttaactgagggcta

SEQ ID NO: 1914918 - DNA, 25 bp, Homo sapien
gaacatgcacttgaacataatccag

SEQ ID NO: 1914919 - DNA, 25 bp, Homo sapien
aatgaacatgcacttgaacataatc

SEQ ID NO: 1914920 - DNA, 25 bp, Homo sapien
tccctatgaagttcttgggaatttc

SEQ ID NO: 1914921 - DNA, 25 bp, Homo sapien
tggtggatttaatcattatggaagc

SEQ ID NO: 1914922 - DNA, 25 bp, Homo sapien
ggcctttatttattactatggtgga

SEQ ID NO: 1914923 - DNA, 25 bp, Homo sapien
tggaagcatagaattatgaaggtat

SEQ ID NO: 1914924 - DNA, 25 bp, Homo sapien
gaagcatagaattatgaaggtataa

SEQ ID NO: 1914925 - DNA, 25 bp, Homo sapien
tgtccaagatgacaattgcagacac

SEQ ID NO: 1914926 - DNA, 25 bp, Homo sapien
ttggcaatggttagctgttcttttc

SEQ ID NO: 1914927 - DNA, 25 bp, Homo sapien
ctatgcattctggttggcaatggtt

SEQ ID NO: 1914928 - DNA, 25 bp, Homo sapien
agcaagggcgaagggcctgagactc

SEQ ID NO: 1914929 - DNA, 25 bp, Homo sapien
caagggcgaagggcctgagactctt

SEQ ID NO: 1914930 - DNA, 25 bp, Homo sapien
tattgtctaataatgtctgcacaga

SEQ ID NO: 1914931 - DNA, 25 bp, Homo sapien
gagtaggtcctccacaaatctttgt

SEQ ID NO: 1914932 - DNA, 25 bp, Homo sapien
catagaagaggatgatgcctcggcc

SEQ ID NO: 1914933 - DNA, 25 bp, Homo sapien
tctgttctctcaatccccaagtata

SEQ ID NO: 1914934 - DNA, 25 bp, Homo sapien
tcagcatcatcagcgccatcacttt

SEQ ID NO: 1914935 - DNA, 25 bp, Homo sapien
tatttaaagcatgacatgaattagt

SEQ ID NO: 1914936 - DNA, 25 bp, Homo sapien
ccgttattgtcataattaccactgt

SEQ ID NO: 1914937 - DNA, 25 bp, Homo sapien
ccatcactttgtacaccgttattgt

SEQ ID NO: 1914938 - DNA, 25 bp, Homo sapien
gagatcagcatattatattctggta

SEQ ID NO: 1914939 - DNA, 25 bp, Homo sapien
taatagaactcttgaatgtatttct

SEQ ID NO: 1914940 - DNA, 25 bp, Homo sapien
atgtgagatcagcatattatattct

SEQ ID NO: 1914941 - DNA, 25 bp, Homo sapien
aactcttgaatgtatttcttgtatc

SEQ ID NO: 1914942 - DNA, 25 bp, Homo sapien
catagcatggtttgagcattagaat

SEQ ID NO: 1914943 - DNA, 25 bp, Homo sapien
ggatagattttatgttaggatcaaa

SEQ ID NO: 1914944 - DNA, 25 bp, Homo sapien
gaaacaatgttcctgaatgagtgaa

SEQ ID NO: 1914945 - DNA, 25 bp, Homo sapien
aataggagtggtacagagattggct

SEQ ID NO: 1914946 - DNA, 25 bp, Homo sapien
cagcatctaccagaaatggcatccc

SEQ ID NO: 1914947 - DNA, 25 bp, Homo sapien
tctaccagaaatggcatcccaagca

SEQ ID NO: 1914948 - DNA, 25 bp, Homo sapien
taccagaaatggcatcccaagcacc

SEQ ID NO: 1914949 - DNA, 25 bp, Homo sapien
gcatctaccagaaatggcatcccaa

SEQ ID NO: 1914950 - DNA, 25 bp, Homo sapien
tcttcccgtgcatgatttttgtcct

SEQ ID NO: 1914951 - DNA, 25 bp, Homo sapien
ttcccgtgcatgatttttgtcctcc

SEQ ID NO: 1914952 - DNA, 25 bp, Homo sapien
cccgtgcatgatttttgtcctccat

SEQ ID NO: 1914953 - DNA, 25 bp, Homo sapien
ttcttcccgtgcatgatttttgtcc

SEQ ID NO: 1914954 - DNA, 25 bp, Homo sapien
tgagtaattccactcccgctccggg

SEQ ID NO: 1914955 - DNA, 25 bp, Homo sapien
tatgatttagggtgaccaattgcag

SEQ ID NO: 1914956 - DNA, 25 bp, Homo sapien
cgctccgggcttcaataattggaat

SEQ ID NO: 1914957 - DNA, 25 bp, Homo sapien
ttaggctgaagctttatgttggcca

SEQ ID NO: 1914958 - DNA, 25 bp, Homo sapien
cacaagagttttgttaggagtaact

SEQ ID NO: 1914959 - DNA, 25 bp, Homo sapien
ggatgtacataccagctaacaagat

SEQ ID NO: 1914960 - DNA, 25 bp, Homo sapien
tagtaagattccatcaatgtccata

SEQ ID NO: 1914961 - DNA, 25 bp, Homo sapien
ttccttgggtgcaatgtttatacca

SEQ ID NO: 1914962 - DNA, 25 bp, Homo sapien
aggctgaccttctcctaagtgagag

SEQ ID NO: 1914963 - DNA, 25 bp, Homo sapien
gagtagaacagattacccttcctaa

SEQ ID NO: 1914964 - DNA, 25 bp, Homo sapien
tgtcaacttgacaggtccaaagggt

SEQ ID NO: 1914965 - DNA, 25 bp, Homo sapien
caaagggtaacactattctggatgc

SEQ ID NO: 1914966 - DNA, 25 bp, Homo sapien
tatgtagtagccactacctttgctt

SEQ ID NO: 1914967 - DNA, 25 bp, Homo sapien
gtagtagccactacctttgcttcat

SEQ ID NO: 1914968 - DNA, 25 bp, Homo sapien
ccactacctttgcttcattattcac

SEQ ID NO: 1914969 - DNA, 25 bp, Homo sapien
gccactacctttgcttcattattca

SEQ ID NO: 1914970 - DNA, 25 bp, Homo sapien
gatgaatatccactgtatttgttac

SEQ ID NO: 1914971 - DNA, 25 bp, Homo sapien
tagcgctacaaatttccatttgaca

SEQ ID NO: 1914972 - DNA, 25 bp, Homo sapien
catttaagattactgaaatgagtgg

SEQ ID NO: 1914973 - DNA, 25 bp, Homo sapien
tctagtatcctaaggttgaaactta

SEQ ID NO: 1914974 - DNA, 25 bp, Homo sapien
ccaggggagctggagctatacttac

SEQ ID NO: 1914975 - DNA, 25 bp, Homo sapien
ttccactaccttgacagctgctgtg

SEQ ID NO: 1914976 - DNA, 25 bp, Homo sapien
tcagagccagcatttccactacctt

SEQ ID NO: 1914977 - DNA, 25 bp, Homo sapien
ggcccacgtccccaccatcagagcc

SEQ ID NO: 1914978 - DNA, 25 bp, Homo sapien
agcatttccactaccttgacagctg

SEQ ID NO: 1914979 - DNA, 25 bp, Homo sapien
tttctaaagtagaagtatgggagct

SEQ ID NO: 1914980 - DNA, 25 bp, Homo sapien
tgcagaaggccactgagcaaagtca

SEQ ID NO: 1914981 - DNA, 25 bp, Homo sapien
ctatttccctgaaggagagtggcca

SEQ ID NO: 1914982 - DNA, 25 bp, Homo sapien
ccctgaaggagagtggccagaatgc

SEQ ID NO: 1914983 - DNA, 25 bp, Homo sapien
tggccagaatgcagaaggccactga

SEQ ID NO: 1914984 - DNA, 25 bp, Homo sapien
gataattaagttctacttcaccatt

SEQ ID NO: 1914985 - DNA, 25 bp, Homo sapien
gtgataattaagttctacttcacca

SEQ ID NO: 1914986 - DNA, 25 bp, Homo sapien
taattaagttctacttcaccattgg

SEQ ID NO: 1914987 - DNA, 25 bp, Homo sapien
aattaagttctacttcaccattggc

SEQ ID NO: 1914988 - DNA, 25 bp, Homo sapien
cctgtgcaggtggagtcttcctggt

SEQ ID NO: 1914989 - DNA, 25 bp, Homo sapien
cagtgcccatcctggtgtggtattt

SEQ ID NO: 1914990 - DNA, 25 bp, Homo sapien
tcttgtctttcaggacacgtaaaga

SEQ ID NO: 1914991 - DNA, 25 bp, Homo sapien
tcaggacacgtaaagatttctgctc

SEQ ID NO: 1914992 - DNA, 25 bp, Homo sapien
tcatccatgtttatttttacgacgt

SEQ ID NO: 1914993 - DNA, 25 bp, Homo sapien
ttgcttttcatagtgcagctgcttg

SEQ ID NO: 1914994 - DNA, 25 bp, Homo sapien
tacgacgttgcttttcatagtgcag

SEQ ID NO: 1914995 - DNA, 25 bp, Homo sapien
atttttacgacgttgcttttcatag

SEQ ID NO: 1914996 - DNA, 25 bp, Homo sapien
tatccgacaaaatggcgcataatca

SEQ ID NO: 1914997 - DNA, 25 bp, Homo sapien
tcagtgtagctctctgtatccgaca

SEQ ID NO: 1914998 - DNA, 25 bp, Homo sapien
tagctctctgtatccgacaaaatgg

SEQ ID NO: 1914999 - DNA, 25 bp, Homo sapien
tctctgtatccgacaaaatggcgca

SEQ ID NO: 1915000 - DNA, 25 bp, Homo sapien
cggtagaccttagggatgacaatga

SEQ ID NO: 1915001 - DNA, 25 bp, Homo sapien
tctgctgagagcgtaggcttctcgg

SEQ ID NO: 1915002 - DNA, 25 bp, Homo sapien
tgagagcgtaggcttctcggtagac

SEQ ID NO: 1915003 - DNA, 25 bp, Homo sapien
taggcttctcggtagaccttaggga

SEQ ID NO: 1915004 - DNA, 25 bp, Homo sapien
tttgcacaggggttatgctaatctt

SEQ ID NO: 1915005 - DNA, 25 bp, Homo sapien
gcatatgtggtgccaaagcaagcac

SEQ ID NO: 1915006 - DNA, 25 bp, Homo sapien
attttagcatatgtggtgccaaagc

SEQ ID NO: 1915007 - DNA, 25 bp, Homo sapien
tagcatatgtggtgccaaagcaagc

SEQ ID NO: 1915008 - DNA, 25 bp, Homo sapien
acattacacggcatcacttgaatac

SEQ ID NO: 1915009 - DNA, 25 bp, Homo sapien
tactcagcatcacattacacggcat

SEQ ID NO: 1915010 - DNA, 25 bp, Homo sapien
tcttgttttgagtctactcagcatc

SEQ ID NO: 1915011 - DNA, 25 bp, Homo sapien
gagtctactcagcatcacattacac

SEQ ID NO: 1915012 - DNA, 25 bp, Homo sapien
aatctttgtgagcaagttgacggta

SEQ ID NO: 1915013 - DNA, 25 bp, Homo sapien
taggtgaccatatccgatcatcaaa

SEQ ID NO: 1915014 - DNA, 25 bp, Homo sapien
ttgacggtacgtctgtaagactgac

SEQ ID NO: 1915015 - DNA, 25 bp, Homo sapien
tctgtaagactgactaggtgaccat

SEQ ID NO: 1915016 - DNA, 25 bp, Homo sapien
aatggtatacaagtcaccctggcac

SEQ ID NO: 1915017 - DNA, 25 bp, Homo sapien
tgcgaaaatggtatacaagtcaccc

SEQ ID NO: 1915018 - DNA, 25 bp, Homo sapien
gaaaatggtatacaagtcaccctgg

SEQ ID NO: 1915019 - DNA, 25 bp, Homo sapien
ctaggtgcgaaaatggtatacaagt

SEQ ID NO: 1915020 - DNA, 25 bp, Homo sapien
gcagttttgccttgctgaatgcttc

SEQ ID NO: 1915021 - DNA, 25 bp, Homo sapien
gaatgcttctttctcaagtccatgc

SEQ ID NO: 1915022 - DNA, 25 bp, Homo sapien
ctgcagttttgccttgctgaatgct

SEQ ID NO: 1915023 - DNA, 25 bp, Homo sapien
aatgcttctttctcaagtccatgca

SEQ ID NO: 1915024 - DNA, 25 bp, Homo sapien
attgttttcagatgctgcccggcat

SEQ ID NO: 1915025 - DNA, 25 bp, Homo sapien
acagagcatacagcatggttgtgga

SEQ ID NO: 1915026 - DNA, 25 bp, Homo sapien
ctgcaataaacagagcatacagcat

SEQ ID NO: 1915027 - DNA, 25 bp, Homo sapien
tgcaataaacagagcatacagcatg

SEQ ID NO: 1915028 - DNA, 25 bp, Homo sapien
gcatacagcatggttgtggatctca

SEQ ID NO: 1915029 - DNA, 25 bp, Homo sapien
tggctgcaagtgataagctgtgtag

SEQ ID NO: 1915030 - DNA, 25 bp, Homo sapien
atgtgaatgcagtgatagtggctgc

SEQ ID NO: 1915031 - DNA, 25 bp, Homo sapien
cagtgatagtggctgcaagtgataa

SEQ ID NO: 1915032 - DNA, 25 bp, Homo sapien
tagtggctgcaagtgataagctgtg

SEQ ID NO: 1915033 - DNA, 25 bp, Homo sapien
cacctggagaagcatatgaaaggga

SEQ ID NO: 1915034 - DNA, 25 bp, Homo sapien
tggagaagcatatgaaagggacacg

SEQ ID NO: 1915035 - DNA, 25 bp, Homo sapien
gaagcatatgaaagggacacggcgc

SEQ ID NO: 1915036 - DNA, 25 bp, Homo sapien
gggacacggcgcctgagagctcagc

SEQ ID NO: 1915037 - DNA, 25 bp, Homo sapien
taagaactattattagcaccagaaa

SEQ ID NO: 1915038 - DNA, 25 bp, Homo sapien
actataagaactattattagcacca

SEQ ID NO: 1915039 - DNA, 25 bp, Homo sapien
tattattagcaccagaaagagagcc

SEQ ID NO: 1915040 - DNA, 25 bp, Homo sapien
gaactattattagcaccagaaagag

SEQ ID NO: 1915041 - DNA, 25 bp, Homo sapien
gatgtcgccttggtagcttgatatc

SEQ ID NO: 1915042 - DNA, 25 bp, Homo sapien
gaaatgtgagccaattgatgtcgcc

SEQ ID NO: 1915043 - DNA, 25 bp, Homo sapien
tgataagtgcctgttacattccgtg

SEQ ID NO: 1915044 - DNA, 25 bp, Homo sapien
tgaaacattacctagcacaccactg

SEQ ID NO: 1915045 - DNA, 25 bp, Homo sapien
ttcactctggtttcataaattttat

SEQ ID NO: 1915046 - DNA, 25 bp, Homo sapien
agctgtcgtaattgcctggtttgta

SEQ ID NO: 1915047 - DNA, 25 bp, Homo sapien
atctgctcttatttgtttggaagag

SEQ ID NO: 1915048 - DNA, 25 bp, Homo sapien
aaattttattatatgggctcatcac

SEQ ID NO: 1915049 - DNA, 25 bp, Homo sapien
ttgcgtttgctgaagagtgctttat

SEQ ID NO: 1915050 - DNA, 25 bp, Homo sapien
tagctcttcttggtgcactcatccc

SEQ ID NO: 1915051 - DNA, 25 bp, Homo sapien
gtttgtttgcactgagaaacagtct

SEQ ID NO: 1915052 - DNA, 25 bp, Homo sapien
tgtttgtttgcactgagaaacagtc

SEQ ID NO: 1915053 - DNA, 25 bp, Homo sapien
agcagcacctgtcaacagaggcctc

SEQ ID NO: 1915054 - DNA, 25 bp, Homo sapien
actgactgtgaggtttccatccaac

SEQ ID NO: 1915055 - DNA, 25 bp, Homo sapien
ttcagactatgtgtttcaaagcctg

SEQ ID NO: 1915056 - DNA, 25 bp, Homo sapien
ccttggatataacatggagtgacac

SEQ ID NO: 1915057 - DNA, 25 bp, Homo sapien
tggaacaccctttcttctttgattc

SEQ ID NO: 1915058 - DNA, 25 bp, Homo sapien
ttttttgtctccagaggttttcata

SEQ ID NO: 1915059 - DNA, 25 bp, Homo sapien
tttgtctccagaggttttcatatcc

SEQ ID NO: 1915060 - DNA, 25 bp, Homo sapien
cctggaacaccctttcttctttgat

SEQ ID NO: 1915061 - DNA, 25 bp, Homo sapien
catcagtgagatggcctttccagaa

SEQ ID NO: 1915062 - DNA, 25 bp, Homo sapien
tacaggtgtccttatcagtgaccac

SEQ ID NO: 1915063 - DNA, 25 bp, Homo sapien
gaatgtgggtcaaaaagcagcctaa

SEQ ID NO: 1915064 - DNA, 25 bp, Homo sapien
gactccgtgcttccagatatcataa

SEQ ID NO: 1915065 - DNA, 25 bp, Homo sapien
ttctgggggtatatgtgcatgcaca

SEQ ID NO: 1915066 - DNA, 25 bp, Homo sapien
gcatgcacatgtgcatgagtgtctg

SEQ ID NO: 1915067 - DNA, 25 bp, Homo sapien
ttttctttctgggggtatatgtgca

SEQ ID NO: 1915068 - DNA, 25 bp, Homo sapien
catgcacatgtgcatgagtgtctgc

SEQ ID NO: 1915069 - DNA, 25 bp, Homo sapien
tggctgatagtcagctgcaggccca

SEQ ID NO: 1915070 - DNA, 25 bp, Homo sapien
tagtcacagatcataagagtagcac

SEQ ID NO: 1915071 - DNA, 25 bp, Homo sapien
tgcaggcccagtagagctaaacagg

SEQ ID NO: 1915072 - DNA, 25 bp, Homo sapien
ttggtcagtgcccagacagaatcag

SEQ ID NO: 1915073 - DNA, 25 bp, Homo sapien
ttagtatcttcagccccccaactct

SEQ ID NO: 1915074 - DNA, 25 bp, Homo sapien
tccaagaattcttgaggctgtccat

SEQ ID NO: 1915075 - DNA, 25 bp, Homo sapien
caactgaaaacgattacttagttct

SEQ ID NO: 1915076 - DNA, 25 bp, Homo sapien
catgcccaactgaaaacgattactt

SEQ ID NO: 1915077 - DNA, 25 bp, Homo sapien
tatagccaataataccatgtttgtc

SEQ ID NO: 1915078 - DNA, 25 bp, Homo sapien
taaaatcatatccaccctttggtga

SEQ ID NO: 1915079 - DNA, 25 bp, Homo sapien
tctgagataaaatcatatccaccct

SEQ ID NO: 1915080 - DNA, 25 bp, Homo sapien
taataccatgtttgtctatgagctc

SEQ ID NO: 1915081 - DNA, 25 bp, Homo sapien
agctgtagggatctcagcagaggtt

SEQ ID NO: 1915082 - DNA, 25 bp, Homo sapien
tgatgtagtgccaaattgtggccaa

SEQ ID NO: 1915083 - DNA, 25 bp, Homo sapien
ccagctcaaccttgatgtagtgcca

SEQ ID NO: 1915084 - DNA, 25 bp, Homo sapien
cagcagaggttggagaaaccagctc

SEQ ID NO: 1915085 - DNA, 25 bp, Homo sapien
gctgccagataagtcatcctggaga

SEQ ID NO: 1915086 - DNA, 25 bp, Homo sapien
gaagaatcaaatgagctgccagata

SEQ ID NO: 1915087 - DNA, 25 bp, Homo sapien
agtcatcctggagaaccctgtcaga

SEQ ID NO: 1915088 - DNA, 25 bp, Homo sapien
catcctggagaaccctgtcagagat

SEQ ID NO: 1915089 - DNA, 25 bp, Homo sapien
ttgacattaagatttgagtcctggc

SEQ ID NO: 1915090 - DNA, 25 bp, Homo sapien
tcctggctgtagaagtaataagcga

SEQ ID NO: 1915091 - DNA, 25 bp, Homo sapien
taatggtatcgatcttacaaagtag

SEQ ID NO: 1915092 - DNA, 25 bp, Homo sapien
cagttcccaatccatagtacagatg

SEQ ID NO: 1915093 - DNA, 25 bp, Homo sapien
ttttttggtctgtatccagaggtga

SEQ ID NO: 1915094 - DNA, 25 bp, Homo sapien
tttttggtctgtatccagaggtgat

SEQ ID NO: 1915095 - DNA, 25 bp, Homo sapien
ttttggtctgtatccagaggtgatt

SEQ ID NO: 1915096 - DNA, 25 bp, Homo sapien
attaattctgttgctgacatctccg

SEQ ID NO: 1915097 - DNA, 25 bp, Homo sapien
tgttgctgacatctccgtattccat

SEQ ID NO: 1915098 - DNA, 25 bp, Homo sapien
tttctgacttcattaattctgttgc

SEQ ID NO: 1915099 - DNA, 25 bp, Homo sapien
gacttcattaattctgttgctgaca

SEQ ID NO: 1915100 - DNA, 25 bp, Homo sapien
aagtctatgacacacgtgactcttc

SEQ ID NO: 1915101 - DNA, 25 bp, Homo sapien
tctatgacacacgtgactcttccca

SEQ ID NO: 1915102 - DNA, 25 bp, Homo sapien
gtctatgacacacgtgactcttccc

SEQ ID NO: 1915103 - DNA, 25 bp, Homo sapien
caaaagtctatgacacacgtgactc

SEQ ID NO: 1915104 - DNA, 25 bp, Homo sapien
tggaaatttgccgtaattccagtga

SEQ ID NO: 1915105 - DNA, 25 bp, Homo sapien
cctgtgggcatgtggaaagcttcag

SEQ ID NO: 1915106 - DNA, 25 bp, Homo sapien
taaactgcatataataagctagctg

SEQ ID NO: 1915107 - DNA, 25 bp, Homo sapien
cgaattgcctgtgggcatgtggaaa

SEQ ID NO: 1915108 - DNA, 25 bp, Homo sapien
tgtgaagagacatattttctgtttg

SEQ ID NO: 1915109 - DNA, 25 bp, Homo sapien
ttctgtttgttaggctctgactgca

SEQ ID NO: 1915110 - DNA, 25 bp, Homo sapien
tttctgtttgttaggctctgactgc

SEQ ID NO: 1915111 - DNA, 25 bp, Homo sapien
tttcacaagtgtgaagagacatatt

SEQ ID NO: 1915112 - DNA, 25 bp, Homo sapien
tcagcgctttccacgtcttcaacct

SEQ ID NO: 1915113 - DNA, 25 bp, Homo sapien
cagtggctcctttgatatcatgatc

SEQ ID NO: 1915114 - DNA, 25 bp, Homo sapien
cacttgcatgacattcttcagtggc

SEQ ID NO: 1915115 - DNA, 25 bp, Homo sapien
tcttcaacctctatccagctgtagt

SEQ ID NO: 1915116 - DNA, 25 bp, Homo sapien
gaagcagactctgatagaaagatcc

SEQ ID NO: 1915117 - DNA, 25 bp, Homo sapien
tgatagaaagatccctagtatactc

SEQ ID NO: 1915118 - DNA, 25 bp, Homo sapien
gcaccaaagaaagttcatgagaaag

SEQ ID NO: 1915119 - DNA, 25 bp, Homo sapien
aggcaccaaagaaagttcatgagaa

SEQ ID NO: 1915120 - DNA, 25 bp, Homo sapien
ttgtccacaggataagcgcagaaca

SEQ ID NO: 1915121 - DNA, 25 bp, Homo sapien
tgtccacaggataagcgcagaacat

SEQ ID NO: 1915122 - DNA, 25 bp, Homo sapien
aaatctactgctttaaccagaacca

SEQ ID NO: 1915123 - DNA, 25 bp, Homo sapien
gaaatctactgctttaaccagaacc

SEQ ID NO: 1915124 - DNA, 25 bp, Homo sapien
gttgttattgtcatacgtttgtacg

SEQ ID NO: 1915125 - DNA, 25 bp, Homo sapien
gctaaaacttggcagatgttgcttt

SEQ ID NO: 1915126 - DNA, 25 bp, Homo sapien
catacgtttgtacgtgtttgctgtg

SEQ ID NO: 1915127 - DNA, 25 bp, Homo sapien
ctgcattctaaacacttcctttgag

SEQ ID NO: 1915128 - DNA, 25 bp, Homo sapien
tctgcactgaccctgtacttgttcc

SEQ ID NO: 1915129 - DNA, 25 bp, Homo sapien
tctctgcactgaccctgtacttgtt

SEQ ID NO: 1915130 - DNA, 25 bp, Homo sapien
atctctgcactgaccctgtacttgt

SEQ ID NO: 1915131 - DNA, 25 bp, Homo sapien
tgcactgaccctgtacttgttcctt

SEQ ID NO: 1915132 - DNA, 25 bp, Homo sapien
gatgctcatccaaccctattttaag

SEQ ID NO: 1915133 - DNA, 25 bp, Homo sapien
gatgaatataatggcctaatagcct

SEQ ID NO: 1915134 - DNA, 25 bp, Homo sapien
tttaagtgatgaatataatggccta

SEQ ID NO: 1915135 - DNA, 25 bp, Homo sapien
tccataaaccatgttcctcgatgct

SEQ ID NO: 1915136 - DNA, 25 bp, Homo sapien
gagaaaagacttccaatcctcctga

SEQ ID NO: 1915137 - DNA, 25 bp, Homo sapien
gtctcaaggctctgaacttcaactg

SEQ ID NO: 1915138 - DNA, 25 bp, Homo sapien
ccttctggattgcaatggatgtgaa

SEQ ID NO: 1915139 - DNA, 25 bp, Homo sapien
cacagctgtgacaactcctggtcca

SEQ ID NO: 1915140 - DNA, 25 bp, Homo sapien
gattaaagctcgtaatagacatccc

SEQ ID NO: 1915141 - DNA, 25 bp, Homo sapien
ttaaagctcgtaatagacatcccat

SEQ ID NO: 1915142 - DNA, 25 bp, Homo sapien
cagattaaagctcgtaatagacatc

SEQ ID NO: 1915143 - DNA, 25 bp, Homo sapien
accagattaaagctcgtaatagaca

SEQ ID NO: 1915144 - DNA, 25 bp, Homo sapien
agaacctctatacaatgctcccctt

SEQ ID NO: 1915145 - DNA, 25 bp, Homo sapien
ctaagcaatgcctagactaaaggct

SEQ ID NO: 1915146 - DNA, 25 bp, Homo sapien
taggtcttacatctttcagaacctc

SEQ ID NO: 1915147 - DNA, 25 bp, Homo sapien
tctgctgatccctcaaaaacattga

SEQ ID NO: 1915148 - DNA, 25 bp, Homo sapien
attctgagtggttaacactgtatag

SEQ ID NO: 1915149 - DNA, 25 bp, Homo sapien
tctgagtggttaacactgtatagtc

SEQ ID NO: 1915150 - DNA, 25 bp, Homo sapien
gattctgagtggttaacactgtata

SEQ ID NO: 1915151 - DNA, 25 bp, Homo sapien
ttctgagtggttaacactgtatagt

SEQ ID NO: 1915152 - DNA, 25 bp, Homo sapien
gaaagctgcctgctaagtcagacat

SEQ ID NO: 1915153 - DNA, 25 bp, Homo sapien
tgaaagctgcctgctaagtcagaca

SEQ ID NO: 1915154 - DNA, 25 bp, Homo sapien
catttttccccccatggtactcatg

SEQ ID NO: 1915155 - DNA, 25 bp, Homo sapien
cccatggtactcatgctccttacag

SEQ ID NO: 1915156 - DNA, 25 bp, Homo sapien
gatcttcttggattgtctcatctgt

SEQ ID NO: 1915157 - DNA, 25 bp, Homo sapien
gctccttacagtatgatcttcttgg

SEQ ID NO: 1915158 - DNA, 25 bp, Homo sapien
cacacagtttgaaaagagtcttgaa

SEQ ID NO: 1915159 - DNA, 25 bp, Homo sapien
aaaactccttaagatcaaagaccat

SEQ ID NO: 1915160 - DNA, 25 bp, Homo sapien
acacagtttgaaaagagtcttgaaa

SEQ ID NO: 1915161 - DNA, 25 bp, Homo sapien
cacagtttgaaaagagtcttgaaaa

SEQ ID NO: 1915162 - DNA, 25 bp, Homo sapien
aagcataattaagattctcaatcca

SEQ ID NO: 1915163 - DNA, 25 bp, Homo sapien
taaatcctgcctcacaataagagaa

SEQ ID NO: 1915164 - DNA, 25 bp, Homo sapien
tctatttgtaagtttgccaaaagca

SEQ ID NO: 1915165 - DNA, 25 bp, Homo sapien
tcttcaagctcagcacaagcaatat

SEQ ID NO: 1915166 - DNA, 25 bp, Homo sapien
ggacatgaccccttacttgagttta

SEQ ID NO: 1915167 - DNA, 25 bp, Homo sapien
tactgcctcaagaagagtactgcag

SEQ ID NO: 1915168 - DNA, 25 bp, Homo sapien
tggtttccagtggattgcaggccac

SEQ ID NO: 1915169 - DNA, 25 bp, Homo sapien
ctgcttgctggacaacagaggaaat

SEQ ID NO: 1915170 - DNA, 25 bp, Homo sapien
atttgagggagattgaaacatcttc

SEQ ID NO: 1915171 - DNA, 25 bp, Homo sapien
cccataagcacaatactaaaagctg

SEQ ID NO: 1915172 - DNA, 25 bp, Homo sapien
gatttccaacccataagcacaatac

SEQ ID NO: 1915173 - DNA, 25 bp, Homo sapien
taagcacaatactaaaagctgtcat

SEQ ID NO: 1915174 - DNA, 25 bp, Homo sapien
caacccataagcacaatactaaaag

SEQ ID NO: 1915175 - DNA, 25 bp, Homo sapien
gaaaattagcaaacaacaattatgc

SEQ ID NO: 1915176 - DNA, 25 bp, Homo sapien
cattgcttgatggattataatcagc

SEQ ID NO: 1915177 - DNA, 25 bp, Homo sapien
taatcagcatgtctagacaaagtga

SEQ ID NO: 1915178 - DNA, 25 bp, Homo sapien
tgtctagacaaagtgagttcatgtt

SEQ ID NO: 1915179 - DNA, 25 bp, Homo sapien
tttcaagccattggtccacgtaggg

SEQ ID NO: 1915180 - DNA, 25 bp, Homo sapien
ccacgtagggtgagaggtcattaaa

SEQ ID NO: 1915181 - DNA, 25 bp, Homo sapien
gccttcgactagttcagcggtggga

SEQ ID NO: 1915182 - DNA, 25 bp, Homo sapien
ccatgctaatccagtggagaaagaa

SEQ ID NO: 1915183 - DNA, 25 bp, Homo sapien
cttttactgctgtactggttcttct

SEQ ID NO: 1915184 - DNA, 25 bp, Homo sapien
tgctgtactggttcttctgtttgaa

SEQ ID NO: 1915185 - DNA, 25 bp, Homo sapien
gaagcctgaaatagactgtcttgca

SEQ ID NO: 1915186 - DNA, 25 bp, Homo sapien
aaatagactgtcttgcaatttcact

SEQ ID NO: 1915187 - DNA, 25 bp, Homo sapien
ctgctgtgtgcacgcctccaggttc

SEQ ID NO: 1915188 - DNA, 25 bp, Homo sapien
gctgtgtgcacgcctccaggttcct

SEQ ID NO: 1915189 - DNA, 25 bp, Homo sapien
tgctgtgtgcacgcctccaggttcc

SEQ ID NO: 1915190 - DNA, 25 bp, Homo sapien
gctgctgtgtgcacgcctccaggtt

SEQ ID NO: 1915191 - DNA, 25 bp, Homo sapien
ctttggtcatgcagctctcattctg

SEQ ID NO: 1915192 - DNA, 25 bp, Homo sapien
tcatgcagctctcattctgggttac

SEQ ID NO: 1915193 - DNA, 25 bp, Homo sapien
gcagctctcattctgggttaccctt

SEQ ID NO: 1915194 - DNA, 25 bp, Homo sapien
tcattctgggttacccttttggcca

SEQ ID NO: 1915195 - DNA, 25 bp, Homo sapien
gaggaatattaataaacatattggg

SEQ ID NO: 1915196 - DNA, 25 bp, Homo sapien
tcatcaatgcttcattgtagccagt

SEQ ID NO: 1915197 - DNA, 25 bp, Homo sapien
tagctctcagagtagagaaaccagc

SEQ ID NO: 1915198 - DNA, 25 bp, Homo sapien
gcaagtctgaataaagcaagtcttt

SEQ ID NO: 1915199 - DNA, 25 bp, Homo sapien
ctttatagcagcaaggtttaatttg

SEQ ID NO: 1915200 - DNA, 25 bp, Homo sapien
tcaataacagttggctatgactgac

SEQ ID NO: 1915201 - DNA, 25 bp, Homo sapien
cacagttaacttagcagaatcacta

SEQ ID NO: 1915202 - DNA, 25 bp, Homo sapien
ccttgataaccatagcacctcagca

SEQ ID NO: 1915203 - DNA, 25 bp, Homo sapien
gaaaaataagcaagtccaaatgcca

SEQ ID NO: 1915204 - DNA, 25 bp, Homo sapien
gatgtgccaacatctgcaagcaaac

SEQ ID NO: 1915205 - DNA, 25 bp, Homo sapien
ttatggtgtccttggaaagtagtac

SEQ ID NO: 1915206 - DNA, 25 bp, Homo sapien
tgatttatattccagcaaagctctt

SEQ ID NO: 1915207 - DNA, 25 bp, Homo sapien
ctttagtgtgagtaactattccagg

SEQ ID NO: 1915208 - DNA, 25 bp, Homo sapien
taacacatagtgcagttatcattca

SEQ ID NO: 1915209 - DNA, 25 bp, Homo sapien
ccataaaactccttgaaaagtctat

SEQ ID NO: 1915210 - DNA, 25 bp, Homo sapien
aactgcttgcctgttttcttgctaa

SEQ ID NO: 1915211 - DNA, 25 bp, Homo sapien
ctattaatctctttggtatccatga

SEQ ID NO: 1915212 - DNA, 25 bp, Homo sapien
gtgaggtcaatgatgagcacctcca

SEQ ID NO: 1915213 - DNA, 25 bp, Homo sapien
gcagtgaggtcaatgatgagcacct

SEQ ID NO: 1915214 - DNA, 25 bp, Homo sapien
ttacccagcagtgaggtcaatgatg

SEQ ID NO: 1915215 - DNA, 25 bp, Homo sapien
cccagcagtgaggtcaatgatgagc

SEQ ID NO: 1915216 - DNA, 25 bp, Homo sapien
gtttcttcacttttaccaagtgctc

SEQ ID NO: 1915217 - DNA, 25 bp, Homo sapien
tcacttttaccaagtgctcacttgc

SEQ ID NO: 1915218 - DNA, 25 bp, Homo sapien
tcttcacttttaccaagtgctcact

SEQ ID NO: 1915219 - DNA, 25 bp, Homo sapien
ttttaccaagtgctcacttgcccag

SEQ ID NO: 1915220 - DNA, 25 bp, Homo sapien
caaaaggtacttgttcctactgtca

SEQ ID NO: 1915221 - DNA, 25 bp, Homo sapien
tttcaactgccagctactgagatga

SEQ ID NO: 1915222 - DNA, 25 bp, Homo sapien
gagatgaccgagataaatagccagc

SEQ ID NO: 1915223 - DNA, 25 bp, Homo sapien
tcttatgtgatggagtttaccctgt

SEQ ID NO: 1915224 - DNA, 25 bp, Homo sapien
gaatgataagcaggtcttcgcaagg

SEQ ID NO: 1915225 - DNA, 25 bp, Homo sapien
gagcagaggtaatggaagtgaccac

SEQ ID NO: 1915226 - DNA, 25 bp, Homo sapien
cccggacagtgtgacgagcattcat

SEQ ID NO: 1915227 - DNA, 25 bp, Homo sapien
tcttcgcaaggctgtgacaagtgtc

SEQ ID NO: 1915228 - DNA, 25 bp, Homo sapien
ccatttgaatactagaagagagctg

SEQ ID NO: 1915229 - DNA, 25 bp, Homo sapien
caacttttaggagatgttgagctct

SEQ ID NO: 1915230 - DNA, 25 bp, Homo sapien
tctgtgcccagaaacaaacttaatt

SEQ ID NO: 1915231 - DNA, 25 bp, Homo sapien
tgtagtccagaccaatgaatgggct

SEQ ID NO: 1915232 - DNA, 25 bp, Homo sapien
cacctagagctactttggttcttct

SEQ ID NO: 1915233 - DNA, 25 bp, Homo sapien
ggttcttctctgataaccctcacag

SEQ ID NO: 1915234 - DNA, 25 bp, Homo sapien
tcagttccacctagagctactttgg

SEQ ID NO: 1915235 - DNA, 25 bp, Homo sapien
taaccctcacagattaactgcacct

SEQ ID NO: 1915236 - DNA, 25 bp, Homo sapien
gagattgagaagttcagtgtgctca

SEQ ID NO: 1915237 - DNA, 25 bp, Homo sapien
ggaaatagggtaagagtatcagtac

SEQ ID NO: 1915238 - DNA, 25 bp, Homo sapien
taatgtgagatgtttggccaatgcc

SEQ ID NO: 1915239 - DNA, 25 bp, Homo sapien
ccaaaagattctatggagattgaga

SEQ ID NO: 1915240 - DNA, 25 bp, Homo sapien
gatattttcatgtacatgaaacacc

SEQ ID NO: 1915241 - DNA, 25 bp, Homo sapien
caagtaagtcagttatgatattttc

SEQ ID NO: 1915242 - DNA, 25 bp, Homo sapien
tttcatgtacatgaaacacctccat

SEQ ID NO: 1915243 - DNA, 25 bp, Homo sapien
gtcagttatgatattttcatgtaca

SEQ ID NO: 1915244 - DNA, 25 bp, Homo sapien
tctgaacaactcagatccctgttca

SEQ ID NO: 1915245 - DNA, 25 bp, Homo sapien
actttctctcgcctctctgaacaac

SEQ ID NO: 1915246 - DNA, 25 bp, Homo sapien
ctcagatccctgttcaagataagaa

SEQ ID NO: 1915247 - DNA, 25 bp, Homo sapien
gaggaacataagaaatgatgcagca

SEQ ID NO: 1915248 - DNA, 25 bp, Homo sapien
gctgtaacgacccactcagagtccc

SEQ ID NO: 1915249 - DNA, 25 bp, Homo sapien
ttttgacaatacaacttgactgcca

SEQ ID NO: 1915250 - DNA, 25 bp, Homo sapien
gactgccatgaccagaagtatccct

SEQ ID NO: 1915251 - DNA, 25 bp, Homo sapien
tacaacttgactgccatgaccagaa

SEQ ID NO: 1915252 - DNA, 25 bp, Homo sapien
agtttcttgactggcctctgcacca

SEQ ID NO: 1915253 - DNA, 25 bp, Homo sapien
ttgagtttcttgactggcctctgca

SEQ ID NO: 1915254 - DNA, 25 bp, Homo sapien
gactggcctctgcaccatctgaatc

SEQ ID NO: 1915255 - DNA, 25 bp, Homo sapien
cctctgcaccatctgaatccggcat

SEQ ID NO: 1915256 - DNA, 25 bp, Homo sapien
tcatggcaccagttctacggatgtc

SEQ ID NO: 1915257 - DNA, 25 bp, Homo sapien
tgacttggctctcaagttgcattca

SEQ ID NO: 1915258 - DNA, 25 bp, Homo sapien
gaggcagaaagtttcgccatttggc

SEQ ID NO: 1915259 - DNA, 25 bp, Homo sapien
caccagctgatctggatataggcaa

SEQ ID NO: 1915260 - DNA, 25 bp, Homo sapien
tttatgtgctacgtttactaccttg

SEQ ID NO: 1915261 - DNA, 25 bp, Homo sapien
ttccctacactggtgtttctcttcc

SEQ ID NO: 1915262 - DNA, 25 bp, Homo sapien
tgctacgtttactaccttggagttg

SEQ ID NO: 1915263 - DNA, 25 bp, Homo sapien
taccttggagttgtcttccctacac

SEQ ID NO: 1915264 - DNA, 25 bp, Homo sapien
tttagatccacaatcaacttgactt

SEQ ID NO: 1915265 - DNA, 25 bp, Homo sapien
aatatgtgtcacatgtaactgtaca

SEQ ID NO: 1915266 - DNA, 25 bp, Homo sapien
tgacttctgaaacagttgactttta

SEQ ID NO: 1915267 - DNA, 25 bp, Homo sapien
aatctcactgtggtagctttaaagt

SEQ ID NO: 1915268 - DNA, 25 bp, Homo sapien
taatgatattgtgcctggagccctc

SEQ ID NO: 1915269 - DNA, 25 bp, Homo sapien
tctaaccgttaattcacctcaggga

SEQ ID NO: 1915270 - DNA, 25 bp, Homo sapien
aaaactctggtctgattgctggcaa

SEQ ID NO: 1915271 - DNA, 25 bp, Homo sapien
gaaaggacatgggtcttcgttcaca

SEQ ID NO: 1915272 - DNA, 25 bp, Homo sapien
ctaggagaaatgcctaatgtagacg

SEQ ID NO: 1915273 - DNA, 25 bp, Homo sapien
gagggctaggggaggaacagcacta

SEQ ID NO: 1915274 - DNA, 25 bp, Homo sapien
atgcctaatgtagacgacgggttga

SEQ ID NO: 1915275 - DNA, 25 bp, Homo sapien
ggaggaacagcactaggagaaatgc

SEQ ID NO: 1915276 - DNA, 25 bp, Homo sapien
tgcagtgttgcccagtcaataaaat

SEQ ID NO: 1915277 - DNA, 25 bp, Homo sapien
tccttcataataacagcctgatggg

SEQ ID NO: 1915278 - DNA, 25 bp, Homo sapien
tactcagaagtctaggccacagcaa

SEQ ID NO: 1915279 - DNA, 25 bp, Homo sapien
gcttaattttaccaggcagtgagga

SEQ ID NO: 1915280 - DNA, 25 bp, Homo sapien
cattccagcactccaacatgatgtt

SEQ ID NO: 1915281 - DNA, 25 bp, Homo sapien
tagtcttcaagtttccaacgcagtg

SEQ ID NO: 1915282 - DNA, 25 bp, Homo sapien
gcggaagtctatagttttgagccaa

SEQ ID NO: 1915283 - DNA, 25 bp, Homo sapien
caacgcagtgtctcaaatgtaggtc

SEQ ID NO: 1915284 - DNA, 25 bp, Homo sapien
tattactacgaatggcttcgggcgc

SEQ ID NO: 1915285 - DNA, 25 bp, Homo sapien
taatgatttcataaagaaggattcc

SEQ ID NO: 1915286 - DNA, 25 bp, Homo sapien
gcagtccacttcaccggcagcttta

SEQ ID NO: 1915287 - DNA, 25 bp, Homo sapien
gaccatacatcggacttaatgctga

SEQ ID NO: 1915288 - DNA, 25 bp, Homo sapien
gaggcaacctgtgccgccatgtcta

SEQ ID NO: 1915289 - DNA, 25 bp, Homo sapien
ttccgagactccagataggccattc

SEQ ID NO: 1915290 - DNA, 25 bp, Homo sapien
cagatctctgtgaatgtagttccga

SEQ ID NO: 1915291 - DNA, 25 bp, Homo sapien
tgttcaccaacgaggacatttctgg

SEQ ID NO: 1915292 - DNA, 25 bp, Homo sapien
ctgtcactagttctgggcaatgcaa

SEQ ID NO: 1915293 - DNA, 25 bp, Homo sapien
ctttatggctagagggatgcatttc

SEQ ID NO: 1915294 - DNA, 25 bp, Homo sapien
tatgatagccaaaatagctaggcct

SEQ ID NO: 1915295 - DNA, 25 bp, Homo sapien
gatgaacatcacttacaagcctggc

SEQ ID NO: 1915296 - DNA, 25 bp, Homo sapien
gacgttgtgaacagtcttggagaac

SEQ ID NO: 1915297 - DNA, 25 bp, Homo sapien
taaatgctgtcgatagatctgagga

SEQ ID NO: 1915298 - DNA, 25 bp, Homo sapien
gagaactccaagatattgaagggtc

SEQ ID NO: 1915299 - DNA, 25 bp, Homo sapien
aatgccattgagtgaagtgtcctga

SEQ ID NO: 1915300 - DNA, 25 bp, Homo sapien
ggagatattcttgcagacttccatg

SEQ ID NO: 1915301 - DNA, 25 bp, Homo sapien
taaagctggataagctttggatgtc

SEQ ID NO: 1915302 - DNA, 25 bp, Homo sapien
aaagtgcaaacagcataaagctgga

SEQ ID NO: 1915303 - DNA, 25 bp, Homo sapien
ctccctcaggaagtcatttggatcc

SEQ ID NO: 1915304 - DNA, 25 bp, Homo sapien
ctacaccgaaaacccatctgtacat

SEQ ID NO: 1915305 - DNA, 25 bp, Homo sapien
atcaccatcatcaaagaccaaaagt

SEQ ID NO: 1915306 - DNA, 25 bp, Homo sapien
aggacatctacaccgaaaacccatc

SEQ ID NO: 1915307 - DNA, 25 bp, Homo sapien
gacatctacaccgaaaacccatctg

SEQ ID NO: 1915308 - DNA, 25 bp, Homo sapien
actggagtggtattgttccacagac

SEQ ID NO: 1915309 - DNA, 25 bp, Homo sapien
ctactggagtggtattgttccacag

SEQ ID NO: 1915310 - DNA, 25 bp, Homo sapien
actgctactggagtggtattgttcc

SEQ ID NO: 1915311 - DNA, 25 bp, Homo sapien
tgctactggagtggtattgttccac

SEQ ID NO: 1915312 - DNA, 25 bp, Homo sapien
tatacgacaaatcaaatggagctgg

SEQ ID NO: 1915313 - DNA, 25 bp, Homo sapien
catacttcgccaaactgaccagatc

SEQ ID NO: 1915314 - DNA, 25 bp, Homo sapien
gaccagatcccaatcgcttcagaag

SEQ ID NO: 1915315 - DNA, 25 bp, Homo sapien
tgcggtctatctcccattggtccac

SEQ ID NO: 1915316 - DNA, 25 bp, Homo sapien
gacacacaggccgtcacttgtcttg

SEQ ID NO: 1915317 - DNA, 25 bp, Homo sapien
tcttcttcgcgtgagaaaaaatccc

SEQ ID NO: 1915318 - DNA, 25 bp, Homo sapien
atggtttccccagcttgacacacag

SEQ ID NO: 1915319 - DNA, 25 bp, Homo sapien
tgtagtggctcacaaattcgttcag

SEQ ID NO: 1915320 - DNA, 25 bp, Homo sapien
ggaattggcacacaccagaaaagct

SEQ ID NO: 1915321 - DNA, 25 bp, Homo sapien
tagtcaggctggtgcaatgctctta

SEQ ID NO: 1915322 - DNA, 25 bp, Homo sapien
ccatatggaggtttactgagggcat

SEQ ID NO: 1915323 - DNA, 25 bp, Homo sapien
tgagggcatgccaatagctaggaat

SEQ ID NO: 1915324 - DNA, 25 bp, Homo sapien
tgatcagatgtcgaatcttctctcc

SEQ ID NO: 1915325 - DNA, 25 bp, Homo sapien
aaggcagcagtggaaacatggtatg

SEQ ID NO: 1915326 - DNA, 25 bp, Homo sapien
ctcggtctggcccgcttcaggcaaa

SEQ ID NO: 1915327 - DNA, 25 bp, Homo sapien
aacatggtatgggtgccttcctctc

SEQ ID NO: 1915328 - DNA, 25 bp, Homo sapien
gagtggccttcctgaagcaccctct

SEQ ID NO: 1915329 - DNA, 25 bp, Homo sapien
cctgagtcaggcacctgtgttctat

SEQ ID NO: 1915330 - DNA, 25 bp, Homo sapien
ggatgctttcaccttctcaacctga

SEQ ID NO: 1915331 - DNA, 25 bp, Homo sapien
tggagagttagctctcagagtggcc

SEQ ID NO: 1915332 - DNA, 25 bp, Homo sapien
caggaataaagggggttccatagtg

SEQ ID NO: 1915333 - DNA, 25 bp, Homo sapien
gaataaagggggttccatagtgtgc

SEQ ID NO: 1915334 - DNA, 25 bp, Homo sapien
ttccatagtgtgccaacagctttct

SEQ ID NO: 1915335 - DNA, 25 bp, Homo sapien
tcttcaagatggatcccaagtggct

SEQ ID NO: 1915336 - DNA, 25 bp, Homo sapien
aaatagaaccaagggtccatttgct

SEQ ID NO: 1915337 - DNA, 25 bp, Homo sapien
caagtggctaactggtcctaaattt

SEQ ID NO: 1915338 - DNA, 25 bp, Homo sapien
atcccaagtggctaactggtcctaa

SEQ ID NO: 1915339 - DNA, 25 bp, Homo sapien
gagggaagcaaagcctctccctcca

SEQ ID NO: 1915340 - DNA, 25 bp, Homo sapien
caggaatagagggaagcaaagcctc

SEQ ID NO: 1915341 - DNA, 25 bp, Homo sapien
ggaatagagggaagcaaagcctctc

SEQ ID NO: 1915342 - DNA, 25 bp, Homo sapien
aatagagggaagcaaagcctctccc

SEQ ID NO: 1915343 - DNA, 25 bp, Homo sapien
gaacagaacgggacaagaagagaga

SEQ ID NO: 1915344 - DNA, 25 bp, Homo sapien
tatgtttaaccagcaaagagaattg

SEQ ID NO: 1915345 - DNA, 25 bp, Homo sapien
tactgagtacattttcaggtcccct

SEQ ID NO: 1915346 - DNA, 25 bp, Homo sapien
ggcagtgtaaacacgtacttgatcc

SEQ ID NO: 1915347 - DNA, 25 bp, Homo sapien
tctgattagaaaggaaccggtcttg

SEQ ID NO: 1915348 - DNA, 25 bp, Homo sapien
ctctgattagaaaggaaccggtctt

SEQ ID NO: 1915349 - DNA, 25 bp, Homo sapien
tcttccgattgctccaaagaaccac

SEQ ID NO: 1915350 - DNA, 25 bp, Homo sapien
ctgattagaaaggaaccggtcttgt

SEQ ID NO: 1915351 - DNA, 25 bp, Homo sapien
atgacacaattgtaaggcagttggg

SEQ ID NO: 1915352 - DNA, 25 bp, Homo sapien
ctccaagagaagaaatgcaggctta

SEQ ID NO: 1915353 - DNA, 25 bp, Homo sapien
gcttttcacaaatgacccctcactg

SEQ ID NO: 1915354 - DNA, 25 bp, Homo sapien
aatgtgagtgccctaacaatgacac

SEQ ID NO: 1915355 - DNA, 25 bp, Homo sapien
gaggtttgaaccattggcaggactg

SEQ ID NO: 1915356 - DNA, 25 bp, Homo sapien
caggcccggatgtccaccacagcca

SEQ ID NO: 1915357 - DNA, 25 bp, Homo sapien
tgcatgtgtgaaaactgtttcttaa

SEQ ID NO: 1915358 - DNA, 25 bp, Homo sapien
gcaggactgtcattctgatcaagtc

SEQ ID NO: 1915359 - DNA, 25 bp, Homo sapien
gagtgctgagaagggatcaagatat

SEQ ID NO: 1915360 - DNA, 25 bp, Homo sapien
tctttaagctacagttcttacgtgc

SEQ ID NO: 1915361 - DNA, 25 bp, Homo sapien
cagttcttacgtgcagtagacagag

SEQ ID NO: 1915362 - DNA, 25 bp, Homo sapien
ttacgtgcagtagacagagagtgct

SEQ ID NO: 1915363 - DNA, 25 bp, Homo sapien
ttggggaatccgagaactcagccaa

SEQ ID NO: 1915364 - DNA, 25 bp, Homo sapien
tttggggaatccgagaactcagcca

SEQ ID NO: 1915365 - DNA, 25 bp, Homo sapien
tgttgcaacaactacccgtaaataa

SEQ ID NO: 1915366 - DNA, 25 bp, Homo sapien
tttttcaacattgctggctaacaag

SEQ ID NO: 1915367 - DNA, 25 bp, Homo sapien
taaatagcgagcaggtgaatatctg

SEQ ID NO: 1915368 - DNA, 25 bp, Homo sapien
acaagtactcagttgttgcaacaac

SEQ ID NO: 1915369 - DNA, 25 bp, Homo sapien
cagttttccattctaggaaaaatgt

SEQ ID NO: 1915370 - DNA, 25 bp, Homo sapien
gtgatttaatttcagttttccattc

SEQ ID NO: 1915371 - DNA, 25 bp, Homo sapien
ctctaagttccattaaaagtgattt

SEQ ID NO: 1915372 - DNA, 25 bp, Homo sapien
taatttcagttttccattctaggaa

SEQ ID NO: 1915373 - DNA, 25 bp, Homo sapien
cactgaggtggtttgcactctcccc

SEQ ID NO: 1915374 - DNA, 25 bp, Homo sapien
gatgaaccgacggaagaagagcctg

SEQ ID NO: 1915375 - DNA, 25 bp, Homo sapien
catggcgacctccaggaagttcgtt

SEQ ID NO: 1915376 - DNA, 25 bp, Homo sapien
gcctataccgactttgccccagaag

SEQ ID NO: 1915377 - DNA, 25 bp, Homo sapien
ccaggaagtacacgagaagttctga

SEQ ID NO: 1915378 - DNA, 25 bp, Homo sapien
actgcaaagccaatcgagggtcctg

SEQ ID NO: 1915379 - DNA, 25 bp, Homo sapien
tttgttttcgagaagaaagaggtca

SEQ ID NO: 1915380 - DNA, 25 bp, Homo sapien
ctagctgaaagggaagtggcatcac

SEQ ID NO: 1915381 - DNA, 25 bp, Homo sapien
gaatgcttcagctaaactctacaac

SEQ ID NO: 1915382 - DNA, 25 bp, Homo sapien
taagcccttataacctcaagccatg

SEQ ID NO: 1915383 - DNA, 25 bp, Homo sapien
gaaattcagcttggtaagcattgag

SEQ ID NO: 1915384 - DNA, 25 bp, Homo sapien
tctacaacttgccattccccgaata

SEQ ID NO: 1915385 - DNA, 25 bp, Homo sapien
tcatcaaaaagcaacactaggatgt

SEQ ID NO: 1915386 - DNA, 25 bp, Homo sapien
ctattcatcaaaaagcaacactagg

SEQ ID NO: 1915387 - DNA, 25 bp, Homo sapien
atcaaaaagcaacactaggatgtat

SEQ ID NO: 1915388 - DNA, 25 bp, Homo sapien
tattcatcaaaaagcaacactagga

SEQ ID NO: 1915389 - DNA, 25 bp, Homo sapien
caaagggcccctggattttcaatca

SEQ ID NO: 1915390 - DNA, 25 bp, Homo sapien
gatagggttctaggtactcccagag

SEQ ID NO: 1915391 - DNA, 25 bp, Homo sapien
cagccctcatgcaaagtgtccagaa

SEQ ID NO: 1915392 - DNA, 25 bp, Homo sapien
gaagtttgtcacctgctcggaagct

SEQ ID NO: 1915393 - DNA, 25 bp, Homo sapien
caaagtcccgtttcagatcagtcca

SEQ ID NO: 1915394 - DNA, 25 bp, Homo sapien
caagaggaagctactaacccctggt

SEQ ID NO: 1915395 - DNA, 25 bp, Homo sapien
tgttcctgtctttcgaccagtccgg

SEQ ID NO: 1915396 - DNA, 25 bp, Homo sapien
tccacgtcttgctttcgccaggagc

SEQ ID NO: 1915397 - DNA, 25 bp, Homo sapien
ttgacattgacttcttcctggaaat

SEQ ID NO: 1915398 - DNA, 25 bp, Homo sapien
gcaacacagaatttctcatcctcat

SEQ ID NO: 1915399 - DNA, 25 bp, Homo sapien
cttgacattgacttcttcctggaaa

SEQ ID NO: 1915400 - DNA, 25 bp, Homo sapien
tcctggaaattccttctgcaacaca

SEQ ID NO: 1915401 - DNA, 25 bp, Homo sapien
ctccttccagtggacaattccagga

SEQ ID NO: 1915402 - DNA, 25 bp, Homo sapien
tctgaggccataggagcccaagtac

SEQ ID NO: 1915403 - DNA, 25 bp, Homo sapien
caagcacggcctgaaagttggtgag

SEQ ID NO: 1915404 - DNA, 25 bp, Homo sapien
gagtggataaccctcaatcatgaca

SEQ ID NO: 1915405 - DNA, 25 bp, Homo sapien
tgctgctttcaaattaattcagcct

SEQ ID NO: 1915406 - DNA, 25 bp, Homo sapien
cttgaaagaatggttgagaacagca

SEQ ID NO: 1915407 - DNA, 25 bp, Homo sapien
agaatggttgagaacagcaaattgc

SEQ ID NO: 1915408 - DNA, 25 bp, Homo sapien
gctttcaaattaattcagcctaaaa

SEQ ID NO: 1915409 - DNA, 25 bp, Homo sapien
gaaggtttgttggtctgatagctca

SEQ ID NO: 1915410 - DNA, 25 bp, Homo sapien
gagaggcttcacatacgtttttacg

SEQ ID NO: 1915411 - DNA, 25 bp, Homo sapien
taacatagcaggacttctttggtga

SEQ ID NO: 1915412 - DNA, 25 bp, Homo sapien
ggcctcagagtagtgcaccatcaga

SEQ ID NO: 1915413 - DNA, 25 bp, Homo sapien
tataaaaccctcaggcatgactgct

SEQ ID NO: 1915414 - DNA, 25 bp, Homo sapien
catttgactcggcattgggaagctg

SEQ ID NO: 1915415 - DNA, 25 bp, Homo sapien
tgagatcgatgatggcactccctga

SEQ ID NO: 1915416 - DNA, 25 bp, Homo sapien
tatacaggcctacccaaacatgagt

SEQ ID NO: 1915417 - DNA, 25 bp, Homo sapien
ccggtgggtccattgaggcccttag

SEQ ID NO: 1915418 - DNA, 25 bp, Homo sapien
cggtgggtccattgaggcccttagt

SEQ ID NO: 1915419 - DNA, 25 bp, Homo sapien
ccattgaggcccttagttgctatgc

SEQ ID NO: 1915420 - DNA, 25 bp, Homo sapien
ttgaggcccttagttgctatgccag

SEQ ID NO: 1915421 - DNA, 25 bp, Homo sapien
caatagggcctctagtacctggtat

SEQ ID NO: 1915422 - DNA, 25 bp, Homo sapien
ttacccttaggaccatcgagacctg

SEQ ID NO: 1915423 - DNA, 25 bp, Homo sapien
tggctacccgggatgccttttggtc

SEQ ID NO: 1915424 - DNA, 25 bp, Homo sapien
ttagccccagggtatcctgcaggcc

SEQ ID NO: 1915425 - DNA, 25 bp, Homo sapien
gaccaggagcaccatatcccatttc

SEQ ID NO: 1915426 - DNA, 25 bp, Homo sapien
cgaccaggagcaccatatcccattt

SEQ ID NO: 1915427 - DNA, 25 bp, Homo sapien
ctggacgaccaggagcaccatatcc

SEQ ID NO: 1915428 - DNA, 25 bp, Homo sapien
gacgaccaggagcaccatatcccat

SEQ ID NO: 1915429 - DNA, 25 bp, Homo sapien
gagtccaggacttccgtagcctggt

SEQ ID NO: 1915430 - DNA, 25 bp, Homo sapien
ggcacacctggtttccctacagctg

SEQ ID NO: 1915431 - DNA, 25 bp, Homo sapien
cttttggtccatatggtcctctctc

SEQ ID NO: 1915432 - DNA, 25 bp, Homo sapien
acctgggtgccctcgaggtccagca

SEQ ID NO: 1915433 - DNA, 25 bp, Homo sapien
gcctgtgggcatttggtatcgttca

SEQ ID NO: 1915434 - DNA, 25 bp, Homo sapien
tgggtagtgggccttttatgcctgt

SEQ ID NO: 1915435 - DNA, 25 bp, Homo sapien
tactctttatggtgtagggaatgaa

SEQ ID NO: 1915436 - DNA, 25 bp, Homo sapien
gcgtaaaacactccatgaaccaagt

SEQ ID NO: 1915437 - DNA, 25 bp, Homo sapien
cactgaaattcggattagggcaaat

SEQ ID NO: 1915438 - DNA, 25 bp, Homo sapien
taatctaggatctttgacatagcct

SEQ ID NO: 1915439 - DNA, 25 bp, Homo sapien
tattgggactatcatccacagactg

SEQ ID NO: 1915440 - DNA, 25 bp, Homo sapien
gaagctatactcaggtaatcaagtg

SEQ ID NO: 1915441 - DNA, 25 bp, Homo sapien
ggagttcctggagatggtgccttgg

SEQ ID NO: 1915442 - DNA, 25 bp, Homo sapien
tcctggagatggtgccttggcagct

SEQ ID NO: 1915443 - DNA, 25 bp, Homo sapien
ctggagatggtgccttggcagcttt

SEQ ID NO: 1915444 - DNA, 25 bp, Homo sapien
agttcctggagatggtgccttggca

SEQ ID NO: 1915445 - DNA, 25 bp, Homo sapien
tagggtctgtgtggcaacacagacc

SEQ ID NO: 1915446 - DNA, 25 bp, Homo sapien
gtctgtgtggcaacacagaccacca

SEQ ID NO: 1915447 - DNA, 25 bp, Homo sapien
tcaccgtctcttcatgccacacata

SEQ ID NO: 1915448 - DNA, 25 bp, Homo sapien
accgtctcttcatgccacacatatt

SEQ ID NO: 1915449 - DNA, 25 bp, Homo sapien
gtctcttcatgccacacatattcac

SEQ ID NO: 1915450 - DNA, 25 bp, Homo sapien
cgtctcttcatgccacacatattca

SEQ ID NO: 1915451 - DNA, 25 bp, Homo sapien
tgaaataccacaaatcggtggggtc

SEQ ID NO: 1915452 - DNA, 25 bp, Homo sapien
gatgaaataccacaaatcggtgggg

SEQ ID NO: 1915453 - DNA, 25 bp, Homo sapien
ataccacaaatcggtggggtctcct

SEQ ID NO: 1915454 - DNA, 25 bp, Homo sapien
atgaaataccacaaatcggtggggt

SEQ ID NO: 1915455 - DNA, 25 bp, Homo sapien
tcgtctccatatagaaaggactgct

SEQ ID NO: 1915456 - DNA, 25 bp, Homo sapien
ccatatagaaaggactgctgtgctc

SEQ ID NO: 1915457 - DNA, 25 bp, Homo sapien
caacatatcgtctccatatagaaag

SEQ ID NO: 1915458 - DNA, 25 bp, Homo sapien
gaccagatttcaacatatcgtctcc

SEQ ID NO: 1915459 - DNA, 25 bp, Homo sapien
caggtcacagggaaatcagatatca

SEQ ID NO: 1915460 - DNA, 25 bp, Homo sapien
ttctcactcacgtagtacacctggc

SEQ ID NO: 1915461 - DNA, 25 bp, Homo sapien
cacagggaaatcagatatcagtgcc

SEQ ID NO: 1915462 - DNA, 25 bp, Homo sapien
aatcagatatcagtgccagcttcag

SEQ ID NO: 1915463 - DNA, 25 bp, Homo sapien
tcagctggcagctagagattctccc

SEQ ID NO: 1915464 - DNA, 25 bp, Homo sapien
gtatttcacagtctcctcaaacatt

SEQ ID NO: 1915465 - DNA, 25 bp, Homo sapien
ctttgtgcagccgagaacagtaggt

SEQ ID NO: 1915466 - DNA, 25 bp, Homo sapien
taggtgccattgagcctctcagctg

SEQ ID NO: 1915467 - DNA, 25 bp, Homo sapien
aataatactgctctgaaacttcttg

SEQ ID NO: 1915468 - DNA, 25 bp, Homo sapien
tataagggtacacccacttggtgtc

SEQ ID NO: 1915469 - DNA, 25 bp, Homo sapien
cctaggagtggtatattaactatgt

SEQ ID NO: 1915470 - DNA, 25 bp, Homo sapien
atgtttttaccagcagggtataagg

SEQ ID NO: 1915471 - DNA, 25 bp, Homo sapien
tcccaactttccagtgggactccaa

SEQ ID NO: 1915472 - DNA, 25 bp, Homo sapien
cctcgttttcctatcacagttaaca

SEQ ID NO: 1915473 - DNA, 25 bp, Homo sapien
ctcgttttcctatcacagttaacat

SEQ ID NO: 1915474 - DNA, 25 bp, Homo sapien
ggatatgaagaaagtagagatcaga

SEQ ID NO: 1915475 - DNA, 25 bp, Homo sapien
cttgtgtaagtagcccctggtgcat

SEQ ID NO: 1915476 - DNA, 25 bp, Homo sapien
cattacatcacaactcttgccacaa

SEQ ID NO: 1915477 - DNA, 25 bp, Homo sapien
tggtgcattgaccagccactcactc

SEQ ID NO: 1915478 - DNA, 25 bp, Homo sapien
ttctgtcagaacttcatggatgctg

SEQ ID NO: 1915479 - DNA, 25 bp, Homo sapien
tcatggatgctgtcagtggtgatcc

SEQ ID NO: 1915480 - DNA, 25 bp, Homo sapien
tcttctgtcagaacttcatggatgc

SEQ ID NO: 1915481 - DNA, 25 bp, Homo sapien
ctgtcagaacttcatggatgctgtc

SEQ ID NO: 1915482 - DNA, 25 bp, Homo sapien
cattttttgtcctccaagcctcttg

SEQ ID NO: 1915483 - DNA, 25 bp, Homo sapien
aaatcttcattgacattttggttct

SEQ ID NO: 1915484 - DNA, 25 bp, Homo sapien
gaagattgcgacttcttaggctctc

SEQ ID NO: 1915485 - DNA, 25 bp, Homo sapien
tctcaacttgacctcttaaatcttc

SEQ ID NO: 1915486 - DNA, 25 bp, Homo sapien
ttgcttagtggataggattttattg

SEQ ID NO: 1915487 - DNA, 25 bp, Homo sapien
tttgcttagtggataggattttatt

SEQ ID NO: 1915488 - DNA, 25 bp, Homo sapien
tgcttagtggataggattttattga

SEQ ID NO: 1915489 - DNA, 25 bp, Homo sapien
ttgatggatagccagctgtatgaca

SEQ ID NO: 1915490 - DNA, 25 bp, Homo sapien
tccaatggtgtaatgagagaggtag

SEQ ID NO: 1915491 - DNA, 25 bp, Homo sapien
gcctgtcagtccctttagagcagag

SEQ ID NO: 1915492 - DNA, 25 bp, Homo sapien
tttggacagcagaacagaatcctcc

SEQ ID NO: 1915493 - DNA, 25 bp, Homo sapien
acactgacggttccttccagctgtg

SEQ ID NO: 1915494 - DNA, 25 bp, Homo sapien
gttcccgctttgagcaacagcaaca

SEQ ID NO: 1915495 - DNA, 25 bp, Homo sapien
ggttcccgctttgagcaacagcaac

SEQ ID NO: 1915496 - DNA, 25 bp, Homo sapien
ttcccgctttgagcaacagcaacac

SEQ ID NO: 1915497 - DNA, 25 bp, Homo sapien
tcccgctttgagcaacagcaacact

SEQ ID NO: 1915498 - DNA, 25 bp, Homo sapien
cagtcttgtgcccataatagagttt

SEQ ID NO: 1915499 - DNA, 25 bp, Homo sapien
gtcctttatggtgcctgttggactt

SEQ ID NO: 1915500 - DNA, 25 bp, Homo sapien
tttcccaaccacatattgtccttta

SEQ ID NO: 1915501 - DNA, 25 bp, Homo sapien
tggtataggatcttaggcccaaagc

SEQ ID NO: 1915502 - DNA, 25 bp, Homo sapien
ctgagatcaggtgacattgggcgca

SEQ ID NO: 1915503 - DNA, 25 bp, Homo sapien
tctgagatcaggtgacattgggcgc

SEQ ID NO: 1915504 - DNA, 25 bp, Homo sapien
tgagatcaggtgacattgggcgcat

SEQ ID NO: 1915505 - DNA, 25 bp, Homo sapien
catgtggtatgtaaaacgtctggaa

SEQ ID NO: 1915506 - DNA, 25 bp, Homo sapien
ggtctctggattcttgacaactgaa

SEQ ID NO: 1915507 - DNA, 25 bp, Homo sapien
acatggctctcattagtggttaccc

SEQ ID NO: 1915508 - DNA, 25 bp, Homo sapien
caagtgacaggtctgctggatttca

SEQ ID NO: 1915509 - DNA, 25 bp, Homo sapien
gctttgcctggttaatgatgtcgat

SEQ ID NO: 1915510 - DNA, 25 bp, Homo sapien
ggccaactgagacttataactgaac

SEQ ID NO: 1915511 - DNA, 25 bp, Homo sapien
catctggccacggatctgctttgcc

SEQ ID NO: 1915512 - DNA, 25 bp, Homo sapien
ctagggtctgaagaggcatgaatct

SEQ ID NO: 1915513 - DNA, 25 bp, Homo sapien
acatttcaactaaatctgcaattgc

SEQ ID NO: 1915514 - DNA, 25 bp, Homo sapien
agtacccacaactttaaaggcattg

SEQ ID NO: 1915515 - DNA, 25 bp, Homo sapien
tgcttactagttctatcatgctctg

SEQ ID NO: 1915516 - DNA, 25 bp, Homo sapien
cagtatgtgttatgaatctagtaac

SEQ ID NO: 1915517 - DNA, 25 bp, Homo sapien
tatgggtaagtctggtcaggacatc

SEQ ID NO: 1915518 - DNA, 25 bp, Homo sapien
ctatgggtaagtctggtcaggacat

SEQ ID NO: 1915519 - DNA, 25 bp, Homo sapien
aagcaaccccgcttcagtgatgcga

SEQ ID NO: 1915520 - DNA, 25 bp, Homo sapien
tctcagaggctatagaatggctccc

SEQ ID NO: 1915521 - DNA, 25 bp, Homo sapien
aatggctcccctagtatagattcca

SEQ ID NO: 1915522 - DNA, 25 bp, Homo sapien
gcctgttctggcctattttgcaccg

SEQ ID NO: 1915523 - DNA, 25 bp, Homo sapien
attggggaccagtatgctcatagct

SEQ ID NO: 1915524 - DNA, 25 bp, Homo sapien
ttggggaccagtatgctcatagctc

SEQ ID NO: 1915525 - DNA, 25 bp, Homo sapien
ttattggggaccagtatgctcatag

SEQ ID NO: 1915526 - DNA, 25 bp, Homo sapien
tattggggaccagtatgctcatagc

SEQ ID NO: 1915527 - DNA, 25 bp, Homo sapien
tctgagttgtaggttatactcctcc

SEQ ID NO: 1915528 - DNA, 25 bp, Homo sapien
tttctagaaggtggtaaactgtata

SEQ ID NO: 1915529 - DNA, 25 bp, Homo sapien
ttggacgatgattgagggactctga

SEQ ID NO: 1915530 - DNA, 25 bp, Homo sapien
tctcatctttggacgatgattgagg

SEQ ID NO: 1915531 - DNA, 25 bp, Homo sapien
caaagtgtgatccatagactaatag

SEQ ID NO: 1915532 - DNA, 25 bp, Homo sapien
tcttacacatatgcctagtccagtg

SEQ ID NO: 1915533 - DNA, 25 bp, Homo sapien
ctatacagtagttttgtgattagaa

SEQ ID NO: 1915534 - DNA, 25 bp, Homo sapien
tctcagtatcctaaaacttagaacc

SEQ ID NO: 1915535 - DNA, 25 bp, Homo sapien
gagacccactggctagaacatatcc

SEQ ID NO: 1915536 - DNA, 25 bp, Homo sapien
taatagtcaagaacattgagtccag

SEQ ID NO: 1915537 - DNA, 25 bp, Homo sapien
ttatatgccctaggaaagtacaacc

SEQ ID NO: 1915538 - DNA, 25 bp, Homo sapien
taattggtctgggtaaatatggctg

SEQ ID NO: 1915539 - DNA, 25 bp, Homo sapien
ccaaatgtttgcagtataggttcct

SEQ ID NO: 1915540 - DNA, 25 bp, Homo sapien
tattagatatggcttgtggacttcc

SEQ ID NO: 1915541 - DNA, 25 bp, Homo sapien
tacaggcatgctacaatccaggact

SEQ ID NO: 1915542 - DNA, 25 bp, Homo sapien
ccaggactgtggtgttctatgtgcc

SEQ ID NO: 1915543 - DNA, 25 bp, Homo sapien
ggtacttacactgcttaggaacata

SEQ ID NO: 1915544 - DNA, 25 bp, Homo sapien
aggtcactcctaggataattgagag

SEQ ID NO: 1915545 - DNA, 25 bp, Homo sapien
tatcaagtaagacaacagagtcgta

SEQ ID NO: 1915546 - DNA, 25 bp, Homo sapien
tactgcacaggacacaaatttggta

SEQ ID NO: 1915547 - DNA, 25 bp, Homo sapien
ggctggagatcttccacaatgcagg

SEQ ID NO: 1915548 - DNA, 25 bp, Homo sapien
ttatcccctacaaggaggctggaga

SEQ ID NO: 1915549 - DNA, 25 bp, Homo sapien
taactaagccttgacggcatcactg

SEQ ID NO: 1915550 - DNA, 25 bp, Homo sapien
tccgtgaaaatccacacagatgctg

SEQ ID NO: 1915551 - DNA, 25 bp, Homo sapien
tattacctcagtcacgcctagcagt

SEQ ID NO: 1915552 - DNA, 25 bp, Homo sapien
cacagatagggtccaagccatgcaa

SEQ ID NO: 1915553 - DNA, 25 bp, Homo sapien
cagctggtcatgacgtagagtaacc

SEQ ID NO: 1915554 - DNA, 25 bp, Homo sapien
agtacatgggtatcaggacacagcc

SEQ ID NO: 1915555 - DNA, 25 bp, Homo sapien
tggataatgaaacttctgcgctgca

SEQ ID NO: 1915556 - DNA, 25 bp, Homo sapien
gcctgggcatttacgtttgacaact

SEQ ID NO: 1915557 - DNA, 25 bp, Homo sapien
gacaactcttgatcgatggcctcca

SEQ ID NO: 1915558 - DNA, 25 bp, Homo sapien
gagccttcgcatgcggccaaacttg

SEQ ID NO: 1915559 - DNA, 25 bp, Homo sapien
ttccttctgcactaccttcttttcc

SEQ ID NO: 1915560 - DNA, 25 bp, Homo sapien
tgctgccgagatggcgcgtttttta

SEQ ID NO: 1915561 - DNA, 25 bp, Homo sapien
agatggcgcgttttttagtcgtcac

SEQ ID NO: 1915562 - DNA, 25 bp, Homo sapien
ctccttttccactgctgccgagatg

SEQ ID NO: 1915563 - DNA, 25 bp, Homo sapien
ttttccactgctgccgagatggcgc

SEQ ID NO: 1915564 - DNA, 25 bp, Homo sapien
cttcttccccggtatcatctgagac

SEQ ID NO: 1915565 - DNA, 25 bp, Homo sapien
ccacggggctctccaagctgacagc

SEQ ID NO: 1915566 - DNA, 25 bp, Homo sapien
cccaagccccctgcgccacaggctt

SEQ ID NO: 1915567 - DNA, 25 bp, Homo sapien
gcttctagagccttctgcccagcag

SEQ ID NO: 1915568 - DNA, 25 bp, Homo sapien
cgccacaggcttctagagccttctg

SEQ ID NO: 1915569 - DNA, 25 bp, Homo sapien
actcccggcaactgggacgcggagc

SEQ ID NO: 1915570 - DNA, 25 bp, Homo sapien
cggggccacagtcgacaggatcctg

SEQ ID NO: 1915571 - DNA, 25 bp, Homo sapien
ctgcccggctttggtcgctgcaccg

SEQ ID NO: 1915572 - DNA, 25 bp, Homo sapien
tttcgtagaaggtggagcatcctcc

SEQ ID NO: 1915573 - DNA, 25 bp, Homo sapien
cttggcactggtctcggtccggatc

SEQ ID NO: 1915574 - DNA, 25 bp, Homo sapien
cctcggtttcttcacggagcccttg

SEQ ID NO: 1915575 - DNA, 25 bp, Homo sapien
tcggtttcttcacggagcccttggc

SEQ ID NO: 1915576 - DNA, 25 bp, Homo sapien
tggcactggtctcggtccggatctc

SEQ ID NO: 1915577 - DNA, 25 bp, Homo sapien
agggagcttgttgcccccatccagg

SEQ ID NO: 1915578 - DNA, 25 bp, Homo sapien
cgagagggagcttgttgcccccatc

SEQ ID NO: 1915579 - DNA, 25 bp, Homo sapien
ccaggccgccggtttgggcgagagg

SEQ ID NO: 1915580 - DNA, 25 bp, Homo sapien
ctgaggcatggtcgggagcagccag

SEQ ID NO: 1915581 - DNA, 25 bp, Homo sapien
agagggagagttccttgtcctccgc

SEQ ID NO: 1915582 - DNA, 25 bp, Homo sapien
tgtcagggcggtagcgtcgtaacat

SEQ ID NO: 1915583 - DNA, 25 bp, Homo sapien
ttactctcggcggtgctaccatggc

SEQ ID NO: 1915584 - DNA, 25 bp, Homo sapien
gagctctgcccgaaacgtctagcac

SEQ ID NO: 1915585 - DNA, 25 bp, Homo sapien
tatcaatccatcgtattcctttgtc

SEQ ID NO: 1915586 - DNA, 25 bp, Homo sapien
gttgactacgcttatcaatccatcg

SEQ ID NO: 1915587 - DNA, 25 bp, Homo sapien
tctgcgcggttgactacgcttatca

SEQ ID NO: 1915588 - DNA, 25 bp, Homo sapien
gcgcgagaactctctgcgcggttga

SEQ ID NO: 1915589 - DNA, 25 bp, Homo sapien
gcaaacaagattcacacagcagaga

SEQ ID NO: 1915590 - DNA, 25 bp, Homo sapien
cactggcagacaatacggagaaaca

SEQ ID NO: 1915591 - DNA, 25 bp, Homo sapien
gtatgcctagtcagcctacccaagg

SEQ ID NO: 1915592 - DNA, 25 bp, Homo sapien
tatatactgagacttctagcgaggg

SEQ ID NO: 1915593 - DNA, 25 bp, Homo sapien
cagctgggaaaatcagcggttggac

SEQ ID NO: 1915594 - DNA, 25 bp, Homo sapien
gctgggaaaatcagcggttggactt

SEQ ID NO: 1915595 - DNA, 25 bp, Homo sapien
agctgggaaaatcagcggttggact

SEQ ID NO: 1915596 - DNA, 25 bp, Homo sapien
gtccttcttcttaatggcataggag

SEQ ID NO: 1915597 - DNA, 25 bp, Homo sapien
gcagcattgatgagctcctctgcca

SEQ ID NO: 1915598 - DNA, 25 bp, Homo sapien
cttcttaatggcataggagttggag

SEQ ID NO: 1915599 - DNA, 25 bp, Homo sapien
ttggcagcattgatgagctcctctg

SEQ ID NO: 1915600 - DNA, 25 bp, Homo sapien
atggcctgattcacacggcgaagtg

SEQ ID NO: 1915601 - DNA, 25 bp, Homo sapien
ggaaggcagcctcacgagcacctgt

SEQ ID NO: 1915602 - DNA, 25 bp, Homo sapien
tcccggcgcacccaatgcgtgtgga

SEQ ID NO: 1915603 - DNA, 25 bp, Homo sapien
cgaagtggggacacgtccacagcct

SEQ ID NO: 1915604 - DNA, 25 bp, Homo sapien
gcctgtgagcaggtgtatgacctcg

SEQ ID NO: 1915605 - DNA, 25 bp, Homo sapien
tgagcaggtgtatgacctcgaaggc

SEQ ID NO: 1915606 - DNA, 25 bp, Homo sapien
cgaaggcatgcttgacgatgcacac

SEQ ID NO: 1915607 - DNA, 25 bp, Homo sapien
ggtgtatgacctcgaaggcatgctt

SEQ ID NO: 1915608 - DNA, 25 bp, Homo sapien
ttcttgccgttgttgcagccgtgca

SEQ ID NO: 1915609 - DNA, 25 bp, Homo sapien
tgtggaagcatttggcggcatacca

SEQ ID NO: 1915610 - DNA, 25 bp, Homo sapien
ttagtaaggcgctccacaatgggac

SEQ ID NO: 1915611 - DNA, 25 bp, Homo sapien
ctgatgtgcacatcatcagtgctcc

SEQ ID NO: 1915612 - DNA, 25 bp, Homo sapien
gtctctgttgctcgacgtagaccat

SEQ ID NO: 1915613 - DNA, 25 bp, Homo sapien
acagcctgagtgtctctgttgctcg

SEQ ID NO: 1915614 - DNA, 25 bp, Homo sapien
cctcataaggtcatagtataactca

SEQ ID NO: 1915615 - DNA, 25 bp, Homo sapien
gaaaatttcctatggcttagtgtca

SEQ ID NO: 1915616 - DNA, 25 bp, Homo sapien
tattggtggtaatgctggtataaac

SEQ ID NO: 1915617 - DNA, 25 bp, Homo sapien
gagtaatgctgtagccctcataagg

SEQ ID NO: 1915618 - DNA, 25 bp, Homo sapien
ggcacatctaaccatgacaaagctt

SEQ ID NO: 1915619 - DNA, 25 bp, Homo sapien
acagttccgtatgcctgaggagccc

SEQ ID NO: 1915620 - DNA, 25 bp, Homo sapien
gccaaaccgtatcaagtagtgtaca

SEQ ID NO: 1915621 - DNA, 25 bp, Homo sapien
tagaccttcacatgcgcttaccact

SEQ ID NO: 1915622 - DNA, 25 bp, Homo sapien
gttaagtgaaacatgactgaactgc

SEQ ID NO: 1915623 - DNA, 25 bp, Homo sapien
gggcactatccctcacattcacgat

SEQ ID NO: 1915624 - DNA, 25 bp, Homo sapien
tgtctgccctcaaagttcaagttta

SEQ ID NO: 1915625 - DNA, 25 bp, Homo sapien
taatgcccttaatgaataccagctg

SEQ ID NO: 1915626 - DNA, 25 bp, Homo sapien
taagcagacttggttgctcaaagtc

SEQ ID NO: 1915627 - DNA, 25 bp, Homo sapien
aaacattctatttctgggagctgca

SEQ ID NO: 1915628 - DNA, 25 bp, Homo sapien
tattttgggctgatagggaaaacaa

SEQ ID NO: 1915629 - DNA, 25 bp, Homo sapien
gacacagtcttctgctctgatagag

SEQ ID NO: 1915630 - DNA, 25 bp, Homo sapien
gaaaccctaattgaatgcagcccat

SEQ ID NO: 1915631 - DNA, 25 bp, Homo sapien
cattaaatggagatagtgacactgc

SEQ ID NO: 1915632 - DNA, 25 bp, Homo sapien
tgcagaattagatatccaaagccca

SEQ ID NO: 1915633 - DNA, 25 bp, Homo sapien
cagcagctgagtttaggacaatggt

SEQ ID NO: 1915634 - DNA, 25 bp, Homo sapien
ggatggtcaactcctctcagccagg

SEQ ID NO: 1915635 - DNA, 25 bp, Homo sapien
cagagagaatggattaagatggccc

SEQ ID NO: 1915636 - DNA, 25 bp, Homo sapien
cagtgtcaggcgcaaagtaagctct

SEQ ID NO: 1915637 - DNA, 25 bp, Homo sapien
tataccaggctctttgcaatagctg

SEQ ID NO: 1915638 - DNA, 25 bp, Homo sapien
agaggtccctccaaagtacactaag

SEQ ID NO: 1915639 - DNA, 25 bp, Homo sapien
ttggaaggtaccaaacataccgtgc

SEQ ID NO: 1915640 - DNA, 25 bp, Homo sapien
gaaagactttggcagaggaattacc

SEQ ID NO: 1915641 - DNA, 25 bp, Homo sapien
gtattggacaacacacatctagagt

SEQ ID NO: 1915642 - DNA, 25 bp, Homo sapien
cattacatttatgggtaaggtgaaa

SEQ ID NO: 1915643 - DNA, 25 bp, Homo sapien
caagcattacatttatgggtaaggt

SEQ ID NO: 1915644 - DNA, 25 bp, Homo sapien
agcattacatttatgggtaaggtga

SEQ ID NO: 1915645 - DNA, 25 bp, Homo sapien
tcaagcattacatttatgggtaagg

SEQ ID NO: 1915646 - DNA, 25 bp, Homo sapien
gaaagctcttaacgacagcacagtc

SEQ ID NO: 1915647 - DNA, 25 bp, Homo sapien
gagtaagtactccttcctcgaaagc

SEQ ID NO: 1915648 - DNA, 25 bp, Homo sapien
taaagaacccttgtctaggcaacat

SEQ ID NO: 1915649 - DNA, 25 bp, Homo sapien
gagctctagcactctattttacagg

SEQ ID NO: 1915650 - DNA, 25 bp, Homo sapien
gcaggtagcaatagaaagtgactag

SEQ ID NO: 1915651 - DNA, 25 bp, Homo sapien
ggaagagcaatgaagtaccataaat

SEQ ID NO: 1915652 - DNA, 25 bp, Homo sapien
ggcaggagccaatgtagggcaggta

SEQ ID NO: 1915653 - DNA, 25 bp, Homo sapien
aaggaagagcaatgaagtaccataa

SEQ ID NO: 1915654 - DNA, 25 bp, Homo sapien
taactgtccacagggcatgtgccca

SEQ ID NO: 1915655 - DNA, 25 bp, Homo sapien
tcctctgagttcattaacgtccagt

SEQ ID NO: 1915656 - DNA, 25 bp, Homo sapien
gcccatactgctcaatgcagagctg

SEQ ID NO: 1915657 - DNA, 25 bp, Homo sapien
gctgagtaggtggaacaggctccca

SEQ ID NO: 1915658 - DNA, 25 bp, Homo sapien
gaaatccaagtgacagcaaccagtt

SEQ ID NO: 1915659 - DNA, 25 bp, Homo sapien
tccaagtgacagcaaccagttcaga

SEQ ID NO: 1915660 - DNA, 25 bp, Homo sapien
ctagaaatccaagtgacagcaacca

SEQ ID NO: 1915661 - DNA, 25 bp, Homo sapien
agtgacagcaaccagttcagaggcc

SEQ ID NO: 1915662 - DNA, 25 bp, Homo sapien
ggtccaagcagtgcagataaaggca

SEQ ID NO: 1915663 - DNA, 25 bp, Homo sapien
tgcagataaaggcagtacaatctac

SEQ ID NO: 1915664 - DNA, 25 bp, Homo sapien
acaatctacagtatcatttgcttgg

SEQ ID NO: 1915665 - DNA, 25 bp, Homo sapien
gaataaacagggtccaagcagtgca

SEQ ID NO: 1915666 - DNA, 25 bp, Homo sapien
gtggagaagcatacccaccaccgtc

SEQ ID NO: 1915667 - DNA, 25 bp, Homo sapien
aagtagtgtgaaggatgacctcgta

SEQ ID NO: 1915668 - DNA, 25 bp, Homo sapien
gaacagcatgaaggtcatatggaag

SEQ ID NO: 1915669 - DNA, 25 bp, Homo sapien
gatgacctcgtagcatgtgatattc

SEQ ID NO: 1915670 - DNA, 25 bp, Homo sapien
cttgtgcaggagtattcccaagggc

SEQ ID NO: 1915671 - DNA, 25 bp, Homo sapien
tatccaaaggaaacagggtgcagaa

SEQ ID NO: 1915672 - DNA, 25 bp, Homo sapien
cagaaggtggtaggagaccttgtgc

SEQ ID NO: 1915673 - DNA, 25 bp, Homo sapien
ttgctgatgcccaagcacaggtcca

SEQ ID NO: 1915674 - DNA, 25 bp, Homo sapien
agtagaaagagacaccactcggccg

SEQ ID NO: 1915675 - DNA, 25 bp, Homo sapien
tacggactccttcacgcaacaggta

SEQ ID NO: 1915676 - DNA, 25 bp, Homo sapien
tctcagcaattttgtcggactctgg

SEQ ID NO: 1915677 - DNA, 25 bp, Homo sapien
gatctctacaggctcccttagcggg

SEQ ID NO: 1915678 - DNA, 25 bp, Homo sapien
ggttctagggtgtctgagttccttc

SEQ ID NO: 1915679 - DNA, 25 bp, Homo sapien
ccttcacctctaaattggttatgta

SEQ ID NO: 1915680 - DNA, 25 bp, Homo sapien
tcatattccttgacaatcagcttgt

SEQ ID NO: 1915681 - DNA, 25 bp, Homo sapien
gaacttgaacttgcaaccggttcta

SEQ ID NO: 1915682 - DNA, 25 bp, Homo sapien
cagctgttggaaggccctgtcggcc

SEQ ID NO: 1915683 - DNA, 25 bp, Homo sapien
gaatgatgtagttcctccgctccag

SEQ ID NO: 1915684 - DNA, 25 bp, Homo sapien
gcccctaatcatggcggacaactgg

SEQ ID NO: 1915685 - DNA, 25 bp, Homo sapien
tggtttcgaaaagcagtcatccaga

SEQ ID NO: 1915686 - DNA, 25 bp, Homo sapien
tcatgcaaaggccagggcccttctt

SEQ ID NO: 1915687 - DNA, 25 bp, Homo sapien
atctatcctcctccgccacttctat

SEQ ID NO: 1915688 - DNA, 25 bp, Homo sapien
tggcggctgctcctctacctccatc

SEQ ID NO: 1915689 - DNA, 25 bp, Homo sapien
tcctccaatctatcctcctccgcca

SEQ ID NO: 1915690 - DNA, 25 bp, Homo sapien
ccttcaccacctcagcgctctccct

SEQ ID NO: 1915691 - DNA, 25 bp, Homo sapien
cctttttcaggctgcggtcggctgc

SEQ ID NO: 1915692 - DNA, 25 bp, Homo sapien
gatttctagggccttctctccaccc

SEQ ID NO: 1915693 - DNA, 25 bp, Homo sapien
ctgccaggccttcggcgggaggctg

SEQ ID NO: 1915694 - DNA, 25 bp, Homo sapien
gccgtcagctcagacgcggatctct

SEQ ID NO: 1915695 - DNA, 25 bp, Homo sapien
ctttgatcgccacatgaccgcgacc

SEQ ID NO: 1915696 - DNA, 25 bp, Homo sapien
ccacatgaccgcgacccccaacaac

SEQ ID NO: 1915697 - DNA, 25 bp, Homo sapien
ttgatcgccacatgaccgcgacccc

SEQ ID NO: 1915698 - DNA, 25 bp, Homo sapien
cgccacatgaccgcgacccccaaca

SEQ ID NO: 1915699 - DNA, 25 bp, Homo sapien
tcggatctggggagtaccgccacgg

SEQ ID NO: 1915700 - DNA, 25 bp, Homo sapien
atctggggagtaccgccacggcccg

SEQ ID NO: 1915701 - DNA, 25 bp, Homo sapien
accgccacggcccgcggcatcctgg

SEQ ID NO: 1915702 - DNA, 25 bp, Homo sapien
ggatctggggagtaccgccacggcc

SEQ ID NO: 1915703 - DNA, 25 bp, Homo sapien
ctgaaggcggtggaggcgggagcgc

SEQ ID NO: 1915704 - DNA, 25 bp, Homo sapien
tgaaggcggtggaggcgggagcgcg

SEQ ID NO: 1915705 - DNA, 25 bp, Homo sapien
tactggtgtgcgtcctggtcgctcg

SEQ ID NO: 1915706 - DNA, 25 bp, Homo sapien
tggtcgctcgggacttggtcagaaa

SEQ ID NO: 1915707 - DNA, 25 bp, Homo sapien
tttggtcgcggagcctcaggtactg

SEQ ID NO: 1915708 - DNA, 25 bp, Homo sapien
catcacctgtgtcgcctcgctttgg

SEQ ID NO: 1915709 - DNA, 25 bp, Homo sapien
ttggaggggagtggtcctcttgacc

SEQ ID NO: 1915710 - DNA, 25 bp, Homo sapien
tggaggggagtggtcctcttgaccc

SEQ ID NO: 1915711 - DNA, 25 bp, Homo sapien
gtttggaggggagtggtcctcttga

SEQ ID NO: 1915712 - DNA, 25 bp, Homo sapien
gaggggagtggtcctcttgacccca

SEQ ID NO: 1915713 - DNA, 25 bp, Homo sapien
gttgctaacagtcggaccaaccgca

SEQ ID NO: 1915714 - DNA, 25 bp, Homo sapien
tcctcagaggccgaactgggagcta

SEQ ID NO: 1915715 - DNA, 25 bp, Homo sapien
aactgggagctaaccgccgctcgca

SEQ ID NO: 1915716 - DNA, 25 bp, Homo sapien
aggcgaacgcccgttttcctcagag

SEQ ID NO: 1915717 - DNA, 25 bp, Homo sapien
atttcagcggcggtgtcgtcaggac

SEQ ID NO: 1915718 - DNA, 25 bp, Homo sapien
gactggagatctcacggtatcgcga

SEQ ID NO: 1915719 - DNA, 25 bp, Homo sapien
gtatcgcgagaacttgctgagcccg

SEQ ID NO: 1915720 - DNA, 25 bp, Homo sapien
tgtgaatttacccatagcaacagta

SEQ ID NO: 1915721 - DNA, 25 bp, Homo sapien
tgccaataatcttgctaacttatgt

SEQ ID NO: 1915722 - DNA, 25 bp, Homo sapien
ctatgccaataatcttgctaactta

SEQ ID NO: 1915723 - DNA, 25 bp, Homo sapien
atgccaataatcttgctaacttatg

SEQ ID NO: 1915724 - DNA, 25 bp, Homo sapien
gccaataatcttgctaacttatgtc

SEQ ID NO: 1915725 - DNA, 25 bp, Homo sapien
gctgctaaccccgaatcatgtctgg

SEQ ID NO: 1915726 - DNA, 25 bp, Homo sapien
gttaggtgtgttttgggaagcagca

SEQ ID NO: 1915727 - DNA, 25 bp, Homo sapien
ccacaagtcactgggaaaaggtgga

SEQ ID NO: 1915728 - DNA, 25 bp, Homo sapien
gtggcatcataggagtccttcagac

SEQ ID NO: 1915729 - DNA, 25 bp, Homo sapien
agaaaaaccctggcgagtgagactc

SEQ ID NO: 1915730 - DNA, 25 bp, Homo sapien
gaaaaaccctggcgagtgagactca

SEQ ID NO: 1915731 - DNA, 25 bp, Homo sapien
aagaaaaaccctggcgagtgagact

SEQ ID NO: 1915732 - DNA, 25 bp, Homo sapien
aaaaaccctggcgagtgagactcat

SEQ ID NO: 1915733 - DNA, 25 bp, Homo sapien
cgagcggaaatggatggctttctcc

SEQ ID NO: 1915734 - DNA, 25 bp, Homo sapien
gactaaactattgacccttgaggta

SEQ ID NO: 1915735 - DNA, 25 bp, Homo sapien
agaagccttctaactcgagcggaaa

SEQ ID NO: 1915736 - DNA, 25 bp, Homo sapien
gttacttagttacacagcacatcag

SEQ ID NO: 1915737 - DNA, 25 bp, Homo sapien
gctagaagctctgttcatctgtatc

SEQ ID NO: 1915738 - DNA, 25 bp, Homo sapien
caagaatctctggacctctgagggc

SEQ ID NO: 1915739 - DNA, 25 bp, Homo sapien
tgtcccagaaatgtttgctccaatc

SEQ ID NO: 1915740 - DNA, 25 bp, Homo sapien
tcttatttgtctcatgcgccctgtg

SEQ ID NO: 1915741 - DNA, 25 bp, Homo sapien
gcaacagagtaacccttgctggtac

SEQ ID NO: 1915742 - DNA, 25 bp, Homo sapien
ggtttggctgtctcataccaagatc

SEQ ID NO: 1915743 - DNA, 25 bp, Homo sapien
cagggcagcaacagagtaacccttg

SEQ ID NO: 1915744 - DNA, 25 bp, Homo sapien
gaacagtcatctgactcggtttggc

SEQ ID NO: 1915745 - DNA, 25 bp, Homo sapien
gattctgtttgcataactaatgcgt

SEQ ID NO: 1915746 - DNA, 25 bp, Homo sapien
tctgtttgcataactaatgcgtcca

SEQ ID NO: 1915747 - DNA, 25 bp, Homo sapien
cagattctgtttgcataactaatgc

SEQ ID NO: 1915748 - DNA, 25 bp, Homo sapien
tgcataactaatgcgtccaaattca

SEQ ID NO: 1915749 - DNA, 25 bp, Homo sapien
cagaatttcttgttgtgcctcataa

SEQ ID NO: 1915750 - DNA, 25 bp, Homo sapien
caggtggaccttttcgttgatgagc

SEQ ID NO: 1915751 - DNA, 25 bp, Homo sapien
gaagagctacgtggtccttggacaa

SEQ ID NO: 1915752 - DNA, 25 bp, Homo sapien
gaagactccagatcaaccaggtgga

SEQ ID NO: 1915753 - DNA, 25 bp, Homo sapien
agaagcttcttgtctaggtttaaat

SEQ ID NO: 1915754 - DNA, 25 bp, Homo sapien
gttgtcaaccatctatgatcaaatt

SEQ ID NO: 1915755 - DNA, 25 bp, Homo sapien
ggtttgcctctatgatatctttcac

SEQ ID NO: 1915756 - DNA, 25 bp, Homo sapien
catgctagactaaatagggaacact

SEQ ID NO: 1915757 - DNA, 25 bp, Homo sapien
cctgcacattctgagtaggcacttg

SEQ ID NO: 1915758 - DNA, 25 bp, Homo sapien
ttggccaatgattcagcaaggagaa

SEQ ID NO: 1915759 - DNA, 25 bp, Homo sapien
aaatctggctaggaatcaggaggct

SEQ ID NO: 1915760 - DNA, 25 bp, Homo sapien
ttaacgctgctaaatgaaaggtgcc

SEQ ID NO: 1915761 - DNA, 25 bp, Homo sapien
tcactgaatcagtaagtacaagtac

SEQ ID NO: 1915762 - DNA, 25 bp, Homo sapien
acagggcagtatggcttgagcaaac

SEQ ID NO: 1915763 - DNA, 25 bp, Homo sapien
aagtacaagtacagggcagtatggc

SEQ ID NO: 1915764 - DNA, 25 bp, Homo sapien
cactgaatcagtaagtacaagtaca

SEQ ID NO: 1915765 - DNA, 25 bp, Homo sapien
aatctataggtgcagggtaaggcag

SEQ ID NO: 1915766 - DNA, 25 bp, Homo sapien
atgagagaatctataggtgcagggt

SEQ ID NO: 1915767 - DNA, 25 bp, Homo sapien
gaagatgagagaatctataggtgca

SEQ ID NO: 1915768 - DNA, 25 bp, Homo sapien
agaatctataggtgcagggtaaggc

SEQ ID NO: 1915769 - DNA, 25 bp, Homo sapien
gacaaggtaacatgtgggtcctcaa

SEQ ID NO: 1915770 - DNA, 25 bp, Homo sapien
caaaagtgccacgtacccatgtaca

SEQ ID NO: 1915771 - DNA, 25 bp, Homo sapien
ccttagtctgaaaccgaggcaagaa

SEQ ID NO: 1915772 - DNA, 25 bp, Homo sapien
tttggagctgcatctaggcgtaagg

SEQ ID NO: 1915773 - DNA, 25 bp, Homo sapien
tgccatggaagctccaaggatatac

SEQ ID NO: 1915774 - DNA, 25 bp, Homo sapien
gctgggtaatattgctgccatggaa

SEQ ID NO: 1915775 - DNA, 25 bp, Homo sapien
gaatcaaggctaggtgtatcctgta

SEQ ID NO: 1915776 - DNA, 25 bp, Homo sapien
aaagctgatggagttaatatgtacc

SEQ ID NO: 1915777 - DNA, 25 bp, Homo sapien
tggtaggttacttgcacacactggg

SEQ ID NO: 1915778 - DNA, 25 bp, Homo sapien
gcaaattagtggttcacctgagtga

SEQ ID NO: 1915779 - DNA, 25 bp, Homo sapien
ttccaaggcccacagtagtaaaagc

SEQ ID NO: 1915780 - DNA, 25 bp, Homo sapien
ggccaaatagaagtgagaacctctg

SEQ ID NO: 1915781 - DNA, 25 bp, Homo sapien
ggcccggctctcagtagcgtcgccc

SEQ ID NO: 1915782 - DNA, 25 bp, Homo sapien
tagcgtcgcccgaggctgcagcagc

SEQ ID NO: 1915783 - DNA, 25 bp, Homo sapien
tctcagtagcgtcgcccgaggctgc

SEQ ID NO: 1915784 - DNA, 25 bp, Homo sapien
cggctctcagtagcgtcgcccgagg

SEQ ID NO: 1915785 - DNA, 25 bp, Homo sapien
ttagtgatagacatactgaaaggat

SEQ ID NO: 1915786 - DNA, 25 bp, Homo sapien
agtcattgagtaagtatttgccagg

SEQ ID NO: 1915787 - DNA, 25 bp, Homo sapien
ctccattgatgacattctctttttc

SEQ ID NO: 1915788 - DNA, 25 bp, Homo sapien
tccattgatgacattctctttttct

SEQ ID NO: 1915789 - DNA, 25 bp, Homo sapien
ttattttccacaagggtgtttgaca

SEQ ID NO: 1915790 - DNA, 25 bp, Homo sapien
ttccttcttcaccttagccagaagt

SEQ ID NO: 1915791 - DNA, 25 bp, Homo sapien
ttttaatgcccaattcagatactac

SEQ ID NO: 1915792 - DNA, 25 bp, Homo sapien
ttcaccttagccagaagtgtcagct

SEQ ID NO: 1915793 - DNA, 25 bp, Homo sapien
tttaatgcccaattcagatactacc

SEQ ID NO: 1915794 - DNA, 25 bp, Homo sapien
aaaaatgtgtcagtccagtgtattc

SEQ ID NO: 1915795 - DNA, 25 bp, Homo sapien
tgtcagtccagtgtattctgctttg

SEQ ID NO: 1915796 - DNA, 25 bp, Homo sapien
aatgtgtcagtccagtgtattctgc

SEQ ID NO: 1915797 - DNA, 25 bp, Homo sapien
taaaaaatgtgtcagtccagtgtat

SEQ ID NO: 1915798 - DNA, 25 bp, Homo sapien
tgttggtttcctgtgaagtcagaaa

SEQ ID NO: 1915799 - DNA, 25 bp, Homo sapien
tgacggtaaacgaatatgctgacat

SEQ ID NO: 1915800 - DNA, 25 bp, Homo sapien
ggtttcctgtgaagtcagaaaatat

SEQ ID NO: 1915801 - DNA, 25 bp, Homo sapien
aatatttcccaatctgcttgacggt

SEQ ID NO: 1915802 - DNA, 25 bp, Homo sapien
tcacttcttgaatgccgtttattaa

SEQ ID NO: 1915803 - DNA, 25 bp, Homo sapien
cacacagccattgggaattcacttc

SEQ ID NO: 1915804 - DNA, 25 bp, Homo sapien
ccgtttattaagcaggttgttgcca

SEQ ID NO: 1915805 - DNA, 25 bp, Homo sapien
ttaagcaggttgttgccatcagtgt

SEQ ID NO: 1915806 - DNA, 25 bp, Homo sapien
ctcgcctacctcccgccctttcagt

SEQ ID NO: 1915807 - DNA, 25 bp, Homo sapien
ttgctcgcctacctcccgccctttc

SEQ ID NO: 1915808 - DNA, 25 bp, Homo sapien
tgctcgcctacctcccgccctttca

SEQ ID NO: 1915809 - DNA, 25 bp, Homo sapien
gctcgcctacctcccgccctttcag

SEQ ID NO: 1915810 - DNA, 25 bp, Homo sapien
atgtccattaagggaacacatttca

SEQ ID NO: 1915811 - DNA, 25 bp, Homo sapien
catgtccattaagggaacacatttc

SEQ ID NO: 1915812 - DNA, 25 bp, Homo sapien
ccatgtccattaagggaacacattt

SEQ ID NO: 1915813 - DNA, 25 bp, Homo sapien
cacaggaggagataccatagtcggg

SEQ ID NO: 1915814 - DNA, 25 bp, Homo sapien
cagtgtcaacatgcgagttctggac

SEQ ID NO: 1915815 - DNA, 25 bp, Homo sapien
tcgggggccagatcattgcttatcc

SEQ ID NO: 1915816 - DNA, 25 bp, Homo sapien
tagtcgggggccagatcattgctta

SEQ ID NO: 1915817 - DNA, 25 bp, Homo sapien
ctcctccctgatcccttgaattttg

SEQ ID NO: 1915818 - DNA, 25 bp, Homo sapien
ctggtctttgaagtattcctcctgc

SEQ ID NO: 1915819 - DNA, 25 bp, Homo sapien
ggtctttgaagtattcctcctgcac

SEQ ID NO: 1915820 - DNA, 25 bp, Homo sapien
cctgatcccttgaattttggtgttc

SEQ ID NO: 1915821 - DNA, 25 bp, Homo sapien
gccacacactaatttgcagaataat

SEQ ID NO: 1915822 - DNA, 25 bp, Homo sapien
tcaaatacatcctgaacagatggga

SEQ ID NO: 1915823 - DNA, 25 bp, Homo sapien
tgcttcctgcttaatgcaagccaca

SEQ ID NO: 1915824 - DNA, 25 bp, Homo sapien
gatttgtttccctcacttggagatt

SEQ ID NO: 1915825 - DNA, 25 bp, Homo sapien
tagcatttgtgtgtcgcatcttcca

SEQ ID NO: 1915826 - DNA, 25 bp, Homo sapien
ggcccaaacccaaggatcacaaatg

SEQ ID NO: 1915827 - DNA, 25 bp, Homo sapien
gcagaaatcatttcgggcccaaacc

SEQ ID NO: 1915828 - DNA, 25 bp, Homo sapien
tagtccatgtagagattagagcaga

SEQ ID NO: 1915829 - DNA, 25 bp, Homo sapien
acatatgcttggttacttgcatgca

SEQ ID NO: 1915830 - DNA, 25 bp, Homo sapien
aatgaatatttccttgatgctggtc

SEQ ID NO: 1915831 - DNA, 25 bp, Homo sapien
ggatggctattcagataacatggca

SEQ ID NO: 1915832 - DNA, 25 bp, Homo sapien
tgttttactacagatctggatggct

SEQ ID NO: 1915833 - DNA, 25 bp, Homo sapien
tttcagttgatggtagatgagacct

SEQ ID NO: 1915834 - DNA, 25 bp, Homo sapien
caaagtcaggtggaagaccgtgttc

SEQ ID NO: 1915835 - DNA, 25 bp, Homo sapien
taccacgtattctaaggttatcaga

SEQ ID NO: 1915836 - DNA, 25 bp, Homo sapien
cattgttttaatcgtcaaagtcagg

SEQ ID NO: 1915837 - DNA, 25 bp, Homo sapien
aagttttgattgagtaatgactacg

SEQ ID NO: 1915838 - DNA, 25 bp, Homo sapien
ccccaacatttagagaagctgttct

SEQ ID NO: 1915839 - DNA, 25 bp, Homo sapien
ttttgattgagtaatgactacggac

SEQ ID NO: 1915840 - DNA, 25 bp, Homo sapien
gagtaatgactacggacatttcccc

SEQ ID NO: 1915841 - DNA, 25 bp, Homo sapien
gattttcattaggatgtagttattt

SEQ ID NO: 1915842 - DNA, 25 bp, Homo sapien
caactcttccaacgctactttcaaa

SEQ ID NO: 1915843 - DNA, 25 bp, Homo sapien
gttcaaagtaaccagtgctatggat

SEQ ID NO: 1915844 - DNA, 25 bp, Homo sapien
tttgttcaaagtaaccagtgctatg

SEQ ID NO: 1915845 - DNA, 25 bp, Homo sapien
attacaatttgaggacacttcatac

SEQ ID NO: 1915846 - DNA, 25 bp, Homo sapien
gagcttcatcttctggacaagaatg

SEQ ID NO: 1915847 - DNA, 25 bp, Homo sapien
ttgaggacacttcatacttgcttct

SEQ ID NO: 1915848 - DNA, 25 bp, Homo sapien
atacttgcttcttttgccagcacca

SEQ ID NO: 1915849 - DNA, 25 bp, Homo sapien
tatagcagacttgatgagatattat

SEQ ID NO: 1915850 - DNA, 25 bp, Homo sapien
ttttatagcagacttgatgagatat

SEQ ID NO: 1915851 - DNA, 25 bp, Homo sapien
ttttttatagcagacttgatgagat

SEQ ID NO: 1915852 - DNA, 25 bp, Homo sapien
attttttatagcagacttgatgaga

SEQ ID NO: 1915853 - DNA, 25 bp, Homo sapien
gctccgggtcgcaggtctgcagcat

SEQ ID NO: 1915854 - DNA, 25 bp, Homo sapien
tgctccgggtcgcaggtctgcagca

SEQ ID NO: 1915855 - DNA, 25 bp, Homo sapien
cttggcaaaagccataaaagttcct

SEQ ID NO: 1915856 - DNA, 25 bp, Homo sapien
tggcaaaagccataaaagttcctac

SEQ ID NO: 1915857 - DNA, 25 bp, Homo sapien
ttggcaaaagccataaaagttccta

SEQ ID NO: 1915858 - DNA, 25 bp, Homo sapien
cacttggcaaaagccataaaagttc

SEQ ID NO: 1915859 - DNA, 25 bp, Homo sapien
aggattccactctctggagggtctt

SEQ ID NO: 1915860 - DNA, 25 bp, Homo sapien
ggattccactctctggagggtcttc

SEQ ID NO: 1915861 - DNA, 25 bp, Homo sapien
tggtaggtggcaatctgagtctcca

SEQ ID NO: 1915862 - DNA, 25 bp, Homo sapien
cgatctccaaggaatggattgtaca

SEQ ID NO: 1915863 - DNA, 25 bp, Homo sapien
acttcgccatccactattgggcggg

SEQ ID NO: 1915864 - DNA, 25 bp, Homo sapien
ggctgctttccaagcggccttcaga

SEQ ID NO: 1915865 - DNA, 25 bp, Homo sapien
aaaacaggcattgatttgcagaacg

SEQ ID NO: 1915866 - DNA, 25 bp, Homo sapien
tcagcagcaaaacaggcattgattt

SEQ ID NO: 1915867 - DNA, 25 bp, Homo sapien
gcaaaacaggcattgatttgcagaa

SEQ ID NO: 1915868 - DNA, 25 bp, Homo sapien
cagcaaaacaggcattgatttgcag

SEQ ID NO: 1915869 - DNA, 25 bp, Homo sapien
tgctctccagcttccagttctcggt

SEQ ID NO: 1915870 - DNA, 25 bp, Homo sapien
ccagcttccagttctcggtctccag

SEQ ID NO: 1915871 - DNA, 25 bp, Homo sapien
gcttccagttctcggtctccaggct

SEQ ID NO: 1915872 - DNA, 25 bp, Homo sapien
tccagttctcggtctccaggctcct

SEQ ID NO: 1915873 - DNA, 25 bp, Homo sapien
tcattctggatgcctgctatccctg

SEQ ID NO: 1915874 - DNA, 25 bp, Homo sapien
gcctgctatccctgccagacccctg

SEQ ID NO: 1915875 - DNA, 25 bp, Homo sapien
atccgggaaccagagtcctgggtgc

SEQ ID NO: 1915876 - DNA, 25 bp, Homo sapien
agagtcctgggtgcctgcatagaca

SEQ ID NO: 1915877 - DNA, 25 bp, Homo sapien
agctgggcgatgaagctgggtgtct

SEQ ID NO: 1915878 - DNA, 25 bp, Homo sapien
cagctgggcgatgaagctgggtgtc

SEQ ID NO: 1915879 - DNA, 25 bp, Homo sapien
ggcgatgaagctgggtgtctggaca

SEQ ID NO: 1915880 - DNA, 25 bp, Homo sapien
ctgggcgatgaagctgggtgtctgg

SEQ ID NO: 1915881 - DNA, 25 bp, Homo sapien
ctcatgatgtgccaacttgcctgtc

SEQ ID NO: 1915882 - DNA, 25 bp, Homo sapien
gatgtgccaacttgcctgtcattct

SEQ ID NO: 1915883 - DNA, 25 bp, Homo sapien
gccaacttgcctgtcattctcaatg

SEQ ID NO: 1915884 - DNA, 25 bp, Homo sapien
tgcctgtcattctcaatgctcccat

SEQ ID NO: 1915885 - DNA, 25 bp, Homo sapien
tgtgtcagaacaacgctgcttgaga

SEQ ID NO: 1915886 - DNA, 25 bp, Homo sapien
tactctccttgtggtgaagcagaca

SEQ ID NO: 1915887 - DNA, 25 bp, Homo sapien
gtaaggctcaatatcacaaaagtgg

SEQ ID NO: 1915888 - DNA, 25 bp, Homo sapien
caaataaggatgctgtgtctcagag

SEQ ID NO: 1915889 - DNA, 25 bp, Homo sapien
ttttacatctgtcacccgatgccta

SEQ ID NO: 1915890 - DNA, 25 bp, Homo sapien
ggagcagcagatccttaaaagtaaa

SEQ ID NO: 1915891 - DNA, 25 bp, Homo sapien
acagagcatgcaactgaattggcaa

SEQ ID NO: 1915892 - DNA, 25 bp, Homo sapien
tgcctatctccagttagttttctgc

SEQ ID NO: 1915893 - DNA, 25 bp, Homo sapien
gtctactgaaggagatacggtgatt

SEQ ID NO: 1915894 - DNA, 25 bp, Homo sapien
gatacggtgattcctgttcttggct

SEQ ID NO: 1915895 - DNA, 25 bp, Homo sapien
tgttcttggctttgtagattcatct

SEQ ID NO: 1915896 - DNA, 25 bp, Homo sapien
gaaggagatacggtgattcctgttc

SEQ ID NO: 1915897 - DNA, 25 bp, Homo sapien
tccaattccgtagggtggtatcaca

SEQ ID NO: 1915898 - DNA, 25 bp, Homo sapien
tgtaggccgcccttgtgtgccagtg

SEQ ID NO: 1915899 - DNA, 25 bp, Homo sapien
caaatcaagggtagcgtcagaaggc

SEQ ID NO: 1915900 - DNA, 25 bp, Homo sapien
tagctatcgtcagtagttctgcagt

SEQ ID NO: 1915901 - DNA, 25 bp, Homo sapien
tagccgccccgtggcattttccgtg

SEQ ID NO: 1915902 - DNA, 25 bp, Homo sapien
aacctttaagccttcatgccctgca

SEQ ID NO: 1915903 - DNA, 25 bp, Homo sapien
aattcctgcctgctatcttgtaagg

SEQ ID NO: 1915904 - DNA, 25 bp, Homo sapien
tagtgtaagatgtggaattcctgcc

SEQ ID NO: 1915905 - DNA, 25 bp, Homo sapien
gaatgtaacatcagccgccaaatga

SEQ ID NO: 1915906 - DNA, 25 bp, Homo sapien
tgtcacactgtcaccttttagtctg

SEQ ID NO: 1915907 - DNA, 25 bp, Homo sapien
ttctcgtctcgcttttttagaaatg

SEQ ID NO: 1915908 - DNA, 25 bp, Homo sapien
caccttttagtctgtcttgcaagaa

SEQ ID NO: 1915909 - DNA, 25 bp, Homo sapien
gataaagggccctttactgagtgtc

SEQ ID NO: 1915910 - DNA, 25 bp, Homo sapien
tgtcctccggagatggtccagctgt

SEQ ID NO: 1915911 - DNA, 25 bp, Homo sapien
agcttgttcgtggataaagggccct

SEQ ID NO: 1915912 - DNA, 25 bp, Homo sapien
agtgtcctccggagatggtccagct

SEQ ID NO: 1915913 - DNA, 25 bp, Homo sapien
ttttgcttgaattgttacaggtcac

SEQ ID NO: 1915914 - DNA, 25 bp, Homo sapien
tgcagtagcacagagaagatcgccc

SEQ ID NO: 1915915 - DNA, 25 bp, Homo sapien
caggtcacacttggtgtaattccca

SEQ ID NO: 1915916 - DNA, 25 bp, Homo sapien
tcttctctagaatcagggaaaattc

SEQ ID NO: 1915917 - DNA, 25 bp, Homo sapien
agcatgagctcgaagtattctctct

SEQ ID NO: 1915918 - DNA, 25 bp, Homo sapien
caaactcgcctttttctctcagcat

SEQ ID NO: 1915919 - DNA, 25 bp, Homo sapien
agacaaactcgcctttttctctcag

SEQ ID NO: 1915920 - DNA, 25 bp, Homo sapien
tgagctcgaagtattctctctgtgc

SEQ ID NO: 1915921 - DNA, 25 bp, Homo sapien
gtggcccaagggtgatcctccagag

SEQ ID NO: 1915922 - DNA, 25 bp, Homo sapien
gctctggaatgtcagatttctcctg

SEQ ID NO: 1915923 - DNA, 25 bp, Homo sapien
aaaactccaggtgaggagtctccag

SEQ ID NO: 1915924 - DNA, 25 bp, Homo sapien
tacactgccgaactgggacattggc

SEQ ID NO: 1915925 - DNA, 25 bp, Homo sapien
cattcagctaactgtgatgccagcc

SEQ ID NO: 1915926 - DNA, 25 bp, Homo sapien
gacattcagctaactgtgatgccag

SEQ ID NO: 1915927 - DNA, 25 bp, Homo sapien
tactcaaaactgctactaaatagga

SEQ ID NO: 1915928 - DNA, 25 bp, Homo sapien
ttgtgttgtgttgggctgtgacttc

SEQ ID NO: 1915929 - DNA, 25 bp, Homo sapien
tacagggattagtaatcttagaaaa

SEQ ID NO: 1915930 - DNA, 25 bp, Homo sapien
gaatgaggcatatacggtgttttac

SEQ ID NO: 1915931 - DNA, 25 bp, Homo sapien
tcaataggctcttacaattaggttt

SEQ ID NO: 1915932 - DNA, 25 bp, Homo sapien
gaaaaacaggacgagcaaagaaaga

SEQ ID NO: 1915933 - DNA, 25 bp, Homo sapien
gttgcaaatctcactagaccctggg

SEQ ID NO: 1915934 - DNA, 25 bp, Homo sapien
ctctgtgcgtggtaaggaatgcctg

SEQ ID NO: 1915935 - DNA, 25 bp, Homo sapien
tgagaactgctctctctgaccgggt

SEQ ID NO: 1915936 - DNA, 25 bp, Homo sapien
tgaccgggtctcctgtttctacctg

SEQ ID NO: 1915937 - DNA, 25 bp, Homo sapien
ctgtgctgctcgaggtaaagtagat

SEQ ID NO: 1915938 - DNA, 25 bp, Homo sapien
acagttagggatttcctgtcaggct

SEQ ID NO: 1915939 - DNA, 25 bp, Homo sapien
gtccaccattcgtatctgccttcag

SEQ ID NO: 1915940 - DNA, 25 bp, Homo sapien
tggagctgagtggaagttgtccacc

SEQ ID NO: 1915941 - DNA, 25 bp, Homo sapien
tcatgagttttatgggtgccatggt

SEQ ID NO: 1915942 - DNA, 25 bp, Homo sapien
caggacagagatcatgagttttatg

SEQ ID NO: 1915943 - DNA, 25 bp, Homo sapien
tctaggtgctcagtacttgagacgg

SEQ ID NO: 1915944 - DNA, 25 bp, Homo sapien
gatgatgatggtgttcggtagaagt

SEQ ID NO: 1915945 - DNA, 25 bp, Homo sapien
ccataactaaagtctgacctttcat

SEQ ID NO: 1915946 - DNA, 25 bp, Homo sapien
tcagtgggcaggtccataactaaag

SEQ ID NO: 1915947 - DNA, 25 bp, Homo sapien
agtgggcaggtccataactaaagtc

SEQ ID NO: 1915948 - DNA, 25 bp, Homo sapien
taactaaagtctgacctttcatctt

SEQ ID NO: 1915949 - DNA, 25 bp, Homo sapien
gaggagcccttaaatgcattgggca

SEQ ID NO: 1915950 - DNA, 25 bp, Homo sapien
cattgtaaggtaaagcgagtagttc

SEQ ID NO: 1915951 - DNA, 25 bp, Homo sapien
ttttaatctggagcattgaaagaac

SEQ ID NO: 1915952 - DNA, 25 bp, Homo sapien
caaggtgaggagcattcgcaggcta

SEQ ID NO: 1915953 - DNA, 25 bp, Homo sapien
ttgacagagataaaaacatagttac

SEQ ID NO: 1915954 - DNA, 25 bp, Homo sapien
attgacagagataaaaacatagtta

SEQ ID NO: 1915955 - DNA, 25 bp, Homo sapien
tattgacagagataaaaacatagtt

SEQ ID NO: 1915956 - DNA, 25 bp, Homo sapien
caaaaagtcttccacaagccgcgtt

SEQ ID NO: 1915957 - DNA, 25 bp, Homo sapien
ctgggcaattatgtctataatttct

SEQ ID NO: 1915958 - DNA, 25 bp, Homo sapien
acaagccgcgttccaatgccgtaac

SEQ ID NO: 1915959 - DNA, 25 bp, Homo sapien
atggcatcttcccacgcaggatcga

SEQ ID NO: 1915960 - DNA, 25 bp, Homo sapien
tgggcaaccagagctccataggtaa

SEQ ID NO: 1915961 - DNA, 25 bp, Homo sapien
cataatccttacacagctgggcaac

SEQ ID NO: 1915962 - DNA, 25 bp, Homo sapien
taaatattggttcacatcttcatcc

SEQ ID NO: 1915963 - DNA, 25 bp, Homo sapien
ttttatctaaatattggttcacatc

SEQ ID NO: 1915964 - DNA, 25 bp, Homo sapien
tggtcttcggtgtgcagggcgagac

SEQ ID NO: 1915965 - DNA, 25 bp, Homo sapien
tattctggtcttcggtgtgcagggc

SEQ ID NO: 1915966 - DNA, 25 bp, Homo sapien
gtcttcggtgtgcagggcgagacat

SEQ ID NO: 1915967 - DNA, 25 bp, Homo sapien
atggtattctggtcttcggtgtgca

SEQ ID NO: 1915968 - DNA, 25 bp, Homo sapien
tgcctgtttcttagaggtgtatcag

SEQ ID NO: 1915969 - DNA, 25 bp, Homo sapien
tgtttcttagaggtgtatcagtcca

SEQ ID NO: 1915970 - DNA, 25 bp, Homo sapien
ttcttagaggtgtatcagtccatgt

SEQ ID NO: 1915971 - DNA, 25 bp, Homo sapien
gtgcttgatagatgaagaatatgat

SEQ ID NO: 1915972 - DNA, 25 bp, Homo sapien
ggtgctactgtacaaagcacaacct

SEQ ID NO: 1915973 - DNA, 25 bp, Homo sapien
tgtacaaagcacaaccttcacgacc

SEQ ID NO: 1915974 - DNA, 25 bp, Homo sapien
gtcaagacacgagcttaaggaagga

SEQ ID NO: 1915975 - DNA, 25 bp, Homo sapien
tctgctccattgaccttccagtcaa

SEQ ID NO: 1915976 - DNA, 25 bp, Homo sapien
tgtgatatatagtgactcgtgcctg

SEQ ID NO: 1915977 - DNA, 25 bp, Homo sapien
cagcctacagtatctggacaatttt

SEQ ID NO: 1915978 - DNA, 25 bp, Homo sapien
tacgttcactgaagcaacttgctca

SEQ ID NO: 1915979 - DNA, 25 bp, Homo sapien
caaaacaatgcttactggacagtgg

SEQ ID NO: 1915980 - DNA, 25 bp, Homo sapien
ggatccaccccgacttattaagcag

SEQ ID NO: 1915981 - DNA, 25 bp, Homo sapien
tcaaggtgccttctggtgcttcagg

SEQ ID NO: 1915982 - DNA, 25 bp, Homo sapien
taaagatctgaaccgagaagccgga

SEQ ID NO: 1915983 - DNA, 25 bp, Homo sapien
gagatctatcatacgtccagctgcg

SEQ ID NO: 1915984 - DNA, 25 bp, Homo sapien
tagcatagtccctgaagtctgtcgg

SEQ ID NO: 1915985 - DNA, 25 bp, Homo sapien
caagggccacgatgacagattacgg

SEQ ID NO: 1915986 - DNA, 25 bp, Homo sapien
tggccaggcagaacgagtcgaacgt

SEQ ID NO: 1915987 - DNA, 25 bp, Homo sapien
gctgcagttaagcaagccgggtctg

SEQ ID NO: 1915988 - DNA, 25 bp, Homo sapien
tcaggaaagctaagtggcttgctct

SEQ ID NO: 1915989 - DNA, 25 bp, Homo sapien
tactgtccgccagcgagttagcggc

SEQ ID NO: 1915990 - DNA, 25 bp, Homo sapien
tactgagttatacgtccagaacgct

SEQ ID NO: 1915991 - DNA, 25 bp, Homo sapien
cggcagggctggtactgagttatac

SEQ ID NO: 1915992 - DNA, 25 bp, Homo sapien
gaaccactgtcctgtagtcgtgaag

SEQ ID NO: 1915993 - DNA, 25 bp, Homo sapien
taaaaggtatgcattcctaggcccc

SEQ ID NO: 1915994 - DNA, 25 bp, Homo sapien
gatgcacaatctgggttaagaacca

SEQ ID NO: 1915995 - DNA, 25 bp, Homo sapien
tagatttatgaacactgatccccag

SEQ ID NO: 1915996 - DNA, 25 bp, Homo sapien
cagatatggttagctggagatagcc

SEQ ID NO: 1915997 - DNA, 25 bp, Homo sapien
gttacttctcaaaaagtcttctcag

SEQ ID NO: 1915998 - DNA, 25 bp, Homo sapien
gagatagccagagacttgacttata

SEQ ID NO: 1915999 - DNA, 25 bp, Homo sapien
aatgatttgctttgcacagatatgg

SEQ ID NO: 1916000 - DNA, 25 bp, Homo sapien
aattcaattaacacaggcattttag

SEQ ID NO: 1916001 - DNA, 25 bp, Homo sapien
caatgaagtatgataggtataattc

SEQ ID NO: 1916002 - DNA, 25 bp, Homo sapien
tgtattaaggagttcaatatctaca

SEQ ID NO: 1916003 - DNA, 25 bp, Homo sapien
gttaagacttaagagaattcacaga

SEQ ID NO: 1916004 - DNA, 25 bp, Homo sapien
tcaaggaatcttctcggctgtaaag

SEQ ID NO: 1916005 - DNA, 25 bp, Homo sapien
gaatcttctcggctgtaaagacttg

SEQ ID NO: 1916006 - DNA, 25 bp, Homo sapien
tcttctcggctgtaaagacttgaga

SEQ ID NO: 1916007 - DNA, 25 bp, Homo sapien
taaagacttgagaagcttgtctcct

SEQ ID NO: 1916008 - DNA, 25 bp, Homo sapien
atgtgttgtcattctaatgtaaaaa

SEQ ID NO: 1916009 - DNA, 25 bp, Homo sapien
tgtgttgtcattctaatgtaaaaaa

SEQ ID NO: 1916010 - DNA, 25 bp, Homo sapien
tagggcttacgcattttctacactt

SEQ ID NO: 1916011 - DNA, 25 bp, Homo sapien
tacacttgatgtgctatcatatagc

SEQ ID NO: 1916012 - DNA, 25 bp, Homo sapien
tatcatatagcttcagttcacacca

SEQ ID NO: 1916013 - DNA, 25 bp, Homo sapien
ttcacaccaagtggaaatttttcaa

SEQ ID NO: 1916014 - DNA, 25 bp, Homo sapien
ctggaatattgtgctcatcacttaa

SEQ ID NO: 1916015 - DNA, 25 bp, Homo sapien
ctaggattcaattcctaggaatttt

SEQ ID NO: 1916016 - DNA, 25 bp, Homo sapien
atttcccatagatttccgaagttgc

SEQ ID NO: 1916017 - DNA, 25 bp, Homo sapien
gccaatatctggtattgcttatgtt

SEQ ID NO: 1916018 - DNA, 25 bp, Homo sapien
agttgcttgagactgctagcctcta

SEQ ID NO: 1916019 - DNA, 25 bp, Homo sapien
gagcaccctctactgccaatatctg

SEQ ID NO: 1916020 - DNA, 25 bp, Homo sapien
aggacatccaggatcaagtattagt

SEQ ID NO: 1916021 - DNA, 25 bp, Homo sapien
caagtattagtaagcataatgttcg

SEQ ID NO: 1916022 - DNA, 25 bp, Homo sapien
tattagtaagcataatgttcggttt

SEQ ID NO: 1916023 - DNA, 25 bp, Homo sapien
ccaggatcaagtattagtaagcata

SEQ ID NO: 1916024 - DNA, 25 bp, Homo sapien
tctaagttctcctaagacgtaagag

SEQ ID NO: 1916025 - DNA, 25 bp, Homo sapien
cagttatacaaatagtctctgtatg

SEQ ID NO: 1916026 - DNA, 25 bp, Homo sapien
gacgtaagagtttagttctacttca

SEQ ID NO: 1916027 - DNA, 25 bp, Homo sapien
tacatacgtcacatctatttacagt

SEQ ID NO: 1916028 - DNA, 25 bp, Homo sapien
taagggatgaacaatgaaggacaag

SEQ ID NO: 1916029 - DNA, 25 bp, Homo sapien
gaaggacaagtgaactaaacacaga

SEQ ID NO: 1916030 - DNA, 25 bp, Homo sapien
aagtattgtactgtcaaaggagctc

SEQ ID NO: 1916031 - DNA, 25 bp, Homo sapien
cctgctattatcagaccagcctggc

SEQ ID NO: 1916032 - DNA, 25 bp, Homo sapien
tctccctctgaagaataatagttca

SEQ ID NO: 1916033 - DNA, 25 bp, Homo sapien
ctgaagatagataggaggtttagat

SEQ ID NO: 1916034 - DNA, 25 bp, Homo sapien
gtttagatgtacacactacctttgg

SEQ ID NO: 1916035 - DNA, 25 bp, Homo sapien
ttcaaataagcgagggtgtgtaccc

SEQ ID NO: 1916036 - DNA, 25 bp, Homo sapien
tacccttagggaggtcaggagtata

SEQ ID NO: 1916037 - DNA, 25 bp, Homo sapien
taacctgttattaagttgagaggcc

SEQ ID NO: 1916038 - DNA, 25 bp, Homo sapien
ggaggtcaggagtatatatacttca

SEQ ID NO: 1916039 - DNA, 25 bp, Homo sapien
tatacttcacatgctccaatccagg

SEQ ID NO: 1916040 - DNA, 25 bp, Homo sapien
atgatgaaagtagcatttggaaatt

SEQ ID NO: 1916041 - DNA, 25 bp, Homo sapien
cttttaagcaatcgttgtaagcatc

SEQ ID NO: 1916042 - DNA, 25 bp, Homo sapien
tttaagcaatcgttgtaagcatcat

SEQ ID NO: 1916043 - DNA, 25 bp, Homo sapien
tgatgaaagtagcatttggaaattt

SEQ ID NO: 1916044 - DNA, 25 bp, Homo sapien
gaatgaaagtgatccaccactgaag

SEQ ID NO: 1916045 - DNA, 25 bp, Homo sapien
tgaaagtgatccaccactgaagaaa

SEQ ID NO: 1916046 - DNA, 25 bp, Homo sapien
gtgatccaccactgaagaaagccac

SEQ ID NO: 1916047 - DNA, 25 bp, Homo sapien
gatgaatgaaagtgatccaccactg

SEQ ID NO: 1916048 - DNA, 25 bp, Homo sapien
ataatacctatgaagtgcttcaata

SEQ ID NO: 1916049 - DNA, 25 bp, Homo sapien
tgataatacctatgaagtgcttcaa

SEQ ID NO: 1916050 - DNA, 25 bp, Homo sapien
ctgataatacctatgaagtgcttca

SEQ ID NO: 1916051 - DNA, 25 bp, Homo sapien
gataatacctatgaagtgcttcaat

SEQ ID NO: 1916052 - DNA, 25 bp, Homo sapien
ccagaattatctaaaccatattgtc

SEQ ID NO: 1916053 - DNA, 25 bp, Homo sapien
ttttccatcgtcaaaaccaagagct

SEQ ID NO: 1916054 - DNA, 25 bp, Homo sapien
tctccatatttcgtagttgttgttg

SEQ ID NO: 1916055 - DNA, 25 bp, Homo sapien
ggcattcttcccctatttacttcta

SEQ ID NO: 1916056 - DNA, 25 bp, Homo sapien
aagctggtgagccaattgtagatca

SEQ ID NO: 1916057 - DNA, 25 bp, Homo sapien
tcttgtcttgattcttcagatctcc

SEQ ID NO: 1916058 - DNA, 25 bp, Homo sapien
tgtcttgattcttcagatctcctct

SEQ ID NO: 1916059 - DNA, 25 bp, Homo sapien
caccagaacactggactctatccat

SEQ ID NO: 1916060 - DNA, 25 bp, Homo sapien
tctaagccaccataatgattattta

SEQ ID NO: 1916061 - DNA, 25 bp, Homo sapien
ccacttctaagccaccataatgatt

SEQ ID NO: 1916062 - DNA, 25 bp, Homo sapien
tttattttcgttcagtgggcttcta

SEQ ID NO: 1916063 - DNA, 25 bp, Homo sapien
gggcttctaacattcatataggatt

SEQ ID NO: 1916064 - DNA, 25 bp, Homo sapien
gcaagtcaacatgttcctgaagaat

SEQ ID NO: 1916065 - DNA, 25 bp, Homo sapien
gtaatttgtacatatgagcccacac

SEQ ID NO: 1916066 - DNA, 25 bp, Homo sapien
ttccaaatgcaagtcaacatgttcc

SEQ ID NO: 1916067 - DNA, 25 bp, Homo sapien
ggacaatcatagagtggttgatcac

SEQ ID NO: 1916068 - DNA, 25 bp, Homo sapien
aatggggagatgtactttgatctaa

SEQ ID NO: 1916069 - DNA, 25 bp, Homo sapien
aatagctattaaagtggtggtgtaa

SEQ ID NO: 1916070 - DNA, 25 bp, Homo sapien
aatgagaaggtctaagttgatgatg

SEQ ID NO: 1916071 - DNA, 25 bp, Homo sapien
aagatgacctgaattaatggggaga

SEQ ID NO: 1916072 - DNA, 25 bp, Homo sapien
caggatctagtgacatacatataac

SEQ ID NO: 1916073 - DNA, 25 bp, Homo sapien
tgtgtacacaccaacaatagagtct

SEQ ID NO: 1916074 - DNA, 25 bp, Homo sapien
cagaacatgaccaagatagctcgtg

SEQ ID NO: 1916075 - DNA, 25 bp, Homo sapien
tctgaacataaacaacaggatctag

SEQ ID NO: 1916076 - DNA, 25 bp, Homo sapien
tgttgtttcataaacagatcctttt

SEQ ID NO: 1916077 - DNA, 25 bp, Homo sapien
cacagaatggacattcaggaggact

SEQ ID NO: 1916078 - DNA, 25 bp, Homo sapien
gatccttttatttcggtcaggctgg

SEQ ID NO: 1916079 - DNA, 25 bp, Homo sapien
ttcaggaggactgtatgttgtttca

SEQ ID NO: 1916080 - DNA, 25 bp, Homo sapien
tcactttccatgtgaacaattaggt

SEQ ID NO: 1916081 - DNA, 25 bp, Homo sapien
tcacacctgacaacttgcaaaatgg

SEQ ID NO: 1916082 - DNA, 25 bp, Homo sapien
gctttcatgtctggttctgaggtta

SEQ ID NO: 1916083 - DNA, 25 bp, Homo sapien
tctgaggttactgtttcaccacaaa

SEQ ID NO: 1916084 - DNA, 25 bp, Homo sapien
gacaagagagtacccaggtgcctca

SEQ ID NO: 1916085 - DNA, 25 bp, Homo sapien
gacatggactcagattaagcgggta

SEQ ID NO: 1916086 - DNA, 25 bp, Homo sapien
ggattaatgtcacacccggagtttc

SEQ ID NO: 1916087 - DNA, 25 bp, Homo sapien
tcttctcttccggtggctgggacac

SEQ ID NO: 1916088 - DNA, 25 bp, Homo sapien
tgaggtcagaagaccgcaaggccga

SEQ ID NO: 1916089 - DNA, 25 bp, Homo sapien
acaagccaggcacacgaaactagca

SEQ ID NO: 1916090 - DNA, 25 bp, Homo sapien
gtcagaagaccgcaaggccgagtct

SEQ ID NO: 1916091 - DNA, 25 bp, Homo sapien
actagcaggcactaactgggtcaaa

SEQ ID NO: 1916092 - DNA, 25 bp, Homo sapien
taagggaggggaccatcaattctta

SEQ ID NO: 1916093 - DNA, 25 bp, Homo sapien
aataagggaggggaccatcaattct

SEQ ID NO: 1916094 - DNA, 25 bp, Homo sapien
gaataagggaggggaccatcaattc

SEQ ID NO: 1916095 - DNA, 25 bp, Homo sapien
ataagggaggggaccatcaattctt

SEQ ID NO: 1916096 - DNA, 25 bp, Homo sapien
tcgctggcagacgagtgcgtgcgcg

SEQ ID NO: 1916097 - DNA, 25 bp, Homo sapien
tccagtacctctcctggcctgatga

SEQ ID NO: 1916098 - DNA, 25 bp, Homo sapien
tgcgtgcgcggcgtccagtacctct

SEQ ID NO: 1916099 - DNA, 25 bp, Homo sapien
agctccgctaggcttcccctttggg

SEQ ID NO: 1916100 - DNA, 25 bp, Homo sapien
agaattaggaacttccaacaccttg

SEQ ID NO: 1916101 - DNA, 25 bp, Homo sapien
cacagttaaccgaggaaagaattag

SEQ ID NO: 1916102 - DNA, 25 bp, Homo sapien
aacaccttggccctcagtacctcat

SEQ ID NO: 1916103 - DNA, 25 bp, Homo sapien
caatacgcagagtttcacagttaac

SEQ ID NO: 1916104 - DNA, 25 bp, Homo sapien
ccacgccggtctctatgcagtgcat

SEQ ID NO: 1916105 - DNA, 25 bp, Homo sapien
atgcgccgctccacgccggtctcta

SEQ ID NO: 1916106 - DNA, 25 bp, Homo sapien
aagaagtaatcccagaatgcgccgc

SEQ ID NO: 1916107 - DNA, 25 bp, Homo sapien
agaagtaatcccagaatgcgccgct

SEQ ID NO: 1916108 - DNA, 25 bp, Homo sapien
gatagccggcttcctcatagacagt

SEQ ID NO: 1916109 - DNA, 25 bp, Homo sapien
catgactttgcccaattgtagccta

SEQ ID NO: 1916110 - DNA, 25 bp, Homo sapien
cttcttagtaccatcactttgaggg

SEQ ID NO: 1916111 - DNA, 25 bp, Homo sapien
cagtacctctacactcacatagtgg

SEQ ID NO: 1916112 - DNA, 25 bp, Homo sapien
tatttggagcttacaatagcaaggg

SEQ ID NO: 1916113 - DNA, 25 bp, Homo sapien
gatatttggctctctctagctggcc

SEQ ID NO: 1916114 - DNA, 25 bp, Homo sapien
taagttattaatcacgtcctggcca

SEQ ID NO: 1916115 - DNA, 25 bp, Homo sapien
catttgtcagagactcaacggcagg

SEQ ID NO: 1916116 - DNA, 25 bp, Homo sapien
tgtccagcagcttatggaaattcca

SEQ ID NO: 1916117 - DNA, 25 bp, Homo sapien
tccaaagaagagacaggttccatcc

SEQ ID NO: 1916118 - DNA, 25 bp, Homo sapien
tcggtagttcttttcagttaatgga

SEQ ID NO: 1916119 - DNA, 25 bp, Homo sapien
caaacgttgccactcatacctggta

SEQ ID NO: 1916120 - DNA, 25 bp, Homo sapien
catcttagtgggtgtaagttgactt

SEQ ID NO: 1916121 - DNA, 25 bp, Homo sapien
ggtgtgtccaccttttgactactgt

SEQ ID NO: 1916122 - DNA, 25 bp, Homo sapien
tacaaggttttgtctcagtactggt

SEQ ID NO: 1916123 - DNA, 25 bp, Homo sapien
cattaatagatggacacttcggtgt

SEQ ID NO: 1916124 - DNA, 25 bp, Homo sapien
tagctagtggtttgacagcagagag

SEQ ID NO: 1916125 - DNA, 25 bp, Homo sapien
gattacagctatgacttagcactac

SEQ ID NO: 1916126 - DNA, 25 bp, Homo sapien
ccttaactcagtgggtagctagtgg

SEQ ID NO: 1916127 - DNA, 25 bp, Homo sapien
ctcttcaattcttagtcaggctgat

SEQ ID NO: 1916128 - DNA, 25 bp, Homo sapien
agaagttgcatctccttggtgcctg

SEQ ID NO: 1916129 - DNA, 25 bp, Homo sapien
cttaagggtgcgctgcctccatgtc

SEQ ID NO: 1916130 - DNA, 25 bp, Homo sapien
gcttaagcgtgtctacctactgtaa

SEQ ID NO: 1916131 - DNA, 25 bp, Homo sapien
taatggacatgcctgagaagttgca

SEQ ID NO: 1916132 - DNA, 25 bp, Homo sapien
taagtatcaggtgacagggtattct

SEQ ID NO: 1916133 - DNA, 25 bp, Homo sapien
actgtatagcagttgggaccagctc

SEQ ID NO: 1916134 - DNA, 25 bp, Homo sapien
ttgattgcaaagagcactgtatagc

SEQ ID NO: 1916135 - DNA, 25 bp, Homo sapien
gattcataaactaaccagctgtgcc

SEQ ID NO: 1916136 - DNA, 25 bp, Homo sapien
tccatagcaggatgcagagctcttc

SEQ ID NO: 1916137 - DNA, 25 bp, Homo sapien
caatcaatcctctactgatggacaa

SEQ ID NO: 1916138 - DNA, 25 bp, Homo sapien
tacagctcccctccgtttactgaat

SEQ ID NO: 1916139 - DNA, 25 bp, Homo sapien
tattctgtagctcattccatagcag

SEQ ID NO: 1916140 - DNA, 25 bp, Homo sapien
gctgtgagcacttttaaccaaatac

SEQ ID NO: 1916141 - DNA, 25 bp, Homo sapien
cacagatggcataaaatctggtctc

SEQ ID NO: 1916142 - DNA, 25 bp, Homo sapien
aatttacccacttgtgcagttgtgc

SEQ ID NO: 1916143 - DNA, 25 bp, Homo sapien
gcagttgtgcattacaacaatccag

SEQ ID NO: 1916144 - DNA, 25 bp, Homo sapien
taaatttggctaggctatcgtaccc

SEQ ID NO: 1916145 - DNA, 25 bp, Homo sapien
ctctctctggagcactgtgatgact

SEQ ID NO: 1916146 - DNA, 25 bp, Homo sapien
ggtttctgatttgccagcccctgca

SEQ ID NO: 1916147 - DNA, 25 bp, Homo sapien
ttgataatctgggtaggtgtcatcc

SEQ ID NO: 1916148 - DNA, 25 bp, Homo sapien
tagcattatatgtagtggccagaaa

SEQ ID NO: 1916149 - DNA, 25 bp, Homo sapien
actgctatgtttgggaggtaatggc

SEQ ID NO: 1916150 - DNA, 25 bp, Homo sapien
ggttacacaggtgttcacgacataa

SEQ ID NO: 1916151 - DNA, 25 bp, Homo sapien
gacaatggatgaactaatggtacac

SEQ ID NO: 1916152 - DNA, 25 bp, Homo sapien
tgcagcttcttcacgccacttagct

SEQ ID NO: 1916153 - DNA, 25 bp, Homo sapien
tcatttagctttagcctgtgcagcc

SEQ ID NO: 1916154 - DNA, 25 bp, Homo sapien
ttagctttagcctgtgcagccaatg

SEQ ID NO: 1916155 - DNA, 25 bp, Homo sapien
atgcagcttcttcacgccacttagc

SEQ ID NO: 1916156 - DNA, 25 bp, Homo sapien
gattcagcactgattcggcagaaga

SEQ ID NO: 1916157 - DNA, 25 bp, Homo sapien
gataagaactacgatgtccactgag

SEQ ID NO: 1916158 - DNA, 25 bp, Homo sapien
gagatttatcagcacccaagcattg

SEQ ID NO: 1916159 - DNA, 25 bp, Homo sapien
gcagctccagtagattgaactcaga

SEQ ID NO: 1916160 - DNA, 25 bp, Homo sapien
tattaataggagttcggacgaagct

SEQ ID NO: 1916161 - DNA, 25 bp, Homo sapien
gaactggaattcatagtggagcctg

SEQ ID NO: 1916162 - DNA, 25 bp, Homo sapien
tcttcagcccatggaaaaaggtgtc

SEQ ID NO: 1916163 - DNA, 25 bp, Homo sapien
tactctgcctgtgccacgaatggaa

SEQ ID NO: 1916164 - DNA, 25 bp, Homo sapien
gtaacaagctttcactcgagctttg

SEQ ID NO: 1916165 - DNA, 25 bp, Homo sapien
tgagtccaatcattatgtaacaagc

SEQ ID NO: 1916166 - DNA, 25 bp, Homo sapien
tgtttcttgcggtgtctatcatttc

SEQ ID NO: 1916167 - DNA, 25 bp, Homo sapien
caaagcaggcgataattgtgagtcc

SEQ ID NO: 1916168 - DNA, 25 bp, Homo sapien
taaacccggagcctagagggctgca

SEQ ID NO: 1916169 - DNA, 25 bp, Homo sapien
tatcatctgtcttggtgggtttagc

SEQ ID NO: 1916170 - DNA, 25 bp, Homo sapien
gaaagtgcctctgtagttgaataaa

SEQ ID NO: 1916171 - DNA, 25 bp, Homo sapien
tgggtttagcatgctgaagaggccc

SEQ ID NO: 1916172 - DNA, 25 bp, Homo sapien
aaagcctggattgcggtctggcgtc

SEQ ID NO: 1916173 - DNA, 25 bp, Homo sapien
cccggccaaagcctggattgcggtc

SEQ ID NO: 1916174 - DNA, 25 bp, Homo sapien
ccaaagcctggattgcggtctggcg

SEQ ID NO: 1916175 - DNA, 25 bp, Homo sapien
gcagccatccggatgctcgcgagga

SEQ ID NO: 1916176 - DNA, 25 bp, Homo sapien
tgcggccggggaccgactctccttc

SEQ ID NO: 1916177 - DNA, 25 bp, Homo sapien
ttcgcgcggcggtcgccacacttac

SEQ ID NO: 1916178 - DNA, 25 bp, Homo sapien
ccgactctccttcgcgcggcggtcg

SEQ ID NO: 1916179 - DNA, 25 bp, Homo sapien
gggaccgactctccttcgcgcggcg

SEQ ID NO: 1916180 - DNA, 25 bp, Homo sapien
tcttgtcgaactgcgaaggcctgcg

SEQ ID NO: 1916181 - DNA, 25 bp, Homo sapien
gatccgaggcgggatctcctccatc

SEQ ID NO: 1916182 - DNA, 25 bp, Homo sapien
ctgcgtggggactcggtgaatctcc

SEQ ID NO: 1916183 - DNA, 25 bp, Homo sapien
tcctccatcgatttgaaacgccctg

SEQ ID NO: 1916184 - DNA, 25 bp, Homo sapien
agcggactgttagcccgcggccaag

SEQ ID NO: 1916185 - DNA, 25 bp, Homo sapien
cggaagagccggtgcgggccgtcgc

SEQ ID NO: 1916186 - DNA, 25 bp, Homo sapien
gtaggctcccgaccgccctgagcat

SEQ ID NO: 1916187 - DNA, 25 bp, Homo sapien
gggccgtcgcgtggcctcgagaggc

SEQ ID NO: 1916188 - DNA, 25 bp, Homo sapien
gcccgcttgtcccgcgccgcacccg

SEQ ID NO: 1916189 - DNA, 25 bp, Homo sapien
agccacaggcgttgtccccgcagct

SEQ ID NO: 1916190 - DNA, 25 bp, Homo sapien
cgcagctctcctcgtcccgccccgg

SEQ ID NO: 1916191 - DNA, 25 bp, Homo sapien
ccgcacctccggacccagccacagg

SEQ ID NO: 1916192 - DNA, 25 bp, Homo sapien
gctggaacccctggcgctcgcacac

SEQ ID NO: 1916193 - DNA, 25 bp, Homo sapien
agctggaacccctggcgctcgcaca

SEQ ID NO: 1916194 - DNA, 25 bp, Homo sapien
cagctggaacccctggcgctcgcac

SEQ ID NO: 1916195 - DNA, 25 bp, Homo sapien
caactacctcttgtcctacatgcat

SEQ ID NO: 1916196 - DNA, 25 bp, Homo sapien
taagacaactacctcttgtcctaca

SEQ ID NO: 1916197 - DNA, 25 bp, Homo sapien
cttaagacaactacctcttgtccta

SEQ ID NO: 1916198 - DNA, 25 bp, Homo sapien
agacaactacctcttgtcctacatg

SEQ ID NO: 1916199 - DNA, 25 bp, Homo sapien
ttccctaaggaagcaatatgtatga

SEQ ID NO: 1916200 - DNA, 25 bp, Homo sapien
tggccaggctggttaaaggacaatt

SEQ ID NO: 1916201 - DNA, 25 bp, Homo sapien
gaatgagggattattgacctgccaa

SEQ ID NO: 1916202 - DNA, 25 bp, Homo sapien
tatgtatgaaagctcggaatgaggg

SEQ ID NO: 1916203 - DNA, 25 bp, Homo sapien
ggctgcaggaagtcttgcttagcaa

SEQ ID NO: 1916204 - DNA, 25 bp, Homo sapien
tttgatatcaacagaccagtgagtc

SEQ ID NO: 1916205 - DNA, 25 bp, Homo sapien
cttaagaatatgaaaactatcctgc

SEQ ID NO: 1916206 - DNA, 25 bp, Homo sapien
gcaactttgctctcatgtcaatagg

SEQ ID NO: 1916207 - DNA, 25 bp, Homo sapien
taaataggtgattgaacagagtgac

SEQ ID NO: 1916208 - DNA, 25 bp, Homo sapien
catatttgctgggaaagtaaattta

SEQ ID NO: 1916209 - DNA, 25 bp, Homo sapien
gaatgtggcatctcctaaggcttat

SEQ ID NO: 1916210 - DNA, 25 bp, Homo sapien
tatcttagatgcaaagaccctggaa

SEQ ID NO: 1916211 - DNA, 25 bp, Homo sapien
tttctgccaggttgcagacttgcca

SEQ ID NO: 1916212 - DNA, 25 bp, Homo sapien
caaagttttagatacacttgtggca

SEQ ID NO: 1916213 - DNA, 25 bp, Homo sapien
acttgacattctttttcgaggcaaa

SEQ ID NO: 1916214 - DNA, 25 bp, Homo sapien
tgcaaatgcttgtgcctgaagatct

SEQ ID NO: 1916215 - DNA, 25 bp, Homo sapien
ggcaatgctgctcacactatgggaa

SEQ ID NO: 1916216 - DNA, 25 bp, Homo sapien
caatgtagcccagcatggtgccaaa

SEQ ID NO: 1916217 - DNA, 25 bp, Homo sapien
ttctccaatgaaaaagctcgtgctg

SEQ ID NO: 1916218 - DNA, 25 bp, Homo sapien
cattgtgacattgccgctcatggag

SEQ ID NO: 1916219 - DNA, 25 bp, Homo sapien
cctaacaggggcccagtgagttttg

SEQ ID NO: 1916220 - DNA, 25 bp, Homo sapien
gttgttgcataaaaggcagtgaggc

SEQ ID NO: 1916221 - DNA, 25 bp, Homo sapien
cattcgtccagtggacatttaatgg

SEQ ID NO: 1916222 - DNA, 25 bp, Homo sapien
ccagtggacatttaatggcctcatc

SEQ ID NO: 1916223 - DNA, 25 bp, Homo sapien
taatggcctcatctaggtatgggag

SEQ ID NO: 1916224 - DNA, 25 bp, Homo sapien
tggacatttaatggcctcatctagg

SEQ ID NO: 1916225 - DNA, 25 bp, Homo sapien
ctagcttatcctccaagttgtcttc

SEQ ID NO: 1916226 - DNA, 25 bp, Homo sapien
tagcttatcctccaagttgtcttca

SEQ ID NO: 1916227 - DNA, 25 bp, Homo sapien
ccatttgttcttggaagcgacttac

SEQ ID NO: 1916228 - DNA, 25 bp, Homo sapien
ctccatttgttcttggaagcgactt

SEQ ID NO: 1916229 - DNA, 25 bp, Homo sapien
cacttggaaggtagttgctagttac

SEQ ID NO: 1916230 - DNA, 25 bp, Homo sapien
attcatagcaacagatgtgttgact

SEQ ID NO: 1916231 - DNA, 25 bp, Homo sapien
ctgtctgattagtgtaatgattttc

SEQ ID NO: 1916232 - DNA, 25 bp, Homo sapien
aggactgcattccttggagcattta

SEQ ID NO: 1916233 - DNA, 25 bp, Homo sapien
gattttcaggacagttctgacattc

SEQ ID NO: 1916234 - DNA, 25 bp, Homo sapien
tcctactctggaacacaactgaagt

SEQ ID NO: 1916235 - DNA, 25 bp, Homo sapien
tttcctactctggaacacaactgaa

SEQ ID NO: 1916236 - DNA, 25 bp, Homo sapien
taatttcctactctggaacacaact

SEQ ID NO: 1916237 - DNA, 25 bp, Homo sapien
tatccataatttcctactctggaac

SEQ ID NO: 1916238 - DNA, 25 bp, Homo sapien
aagctatccagtctttctctggaag

SEQ ID NO: 1916239 - DNA, 25 bp, Homo sapien
ctaagctatccagtctttctctgga

SEQ ID NO: 1916240 - DNA, 25 bp, Homo sapien
agctatccagtctttctctggaaga

SEQ ID NO: 1916241 - DNA, 25 bp, Homo sapien
taagctatccagtctttctctggaa

SEQ ID NO: 1916242 - DNA, 25 bp, Homo sapien
aatgaaaagattcagtaggccctgg

SEQ ID NO: 1916243 - DNA, 25 bp, Homo sapien
aaatgaaaagattcagtaggccctg

SEQ ID NO: 1916244 - DNA, 25 bp, Homo sapien
atgaaaagattcagtaggccctggg

SEQ ID NO: 1916245 - DNA, 25 bp, Homo sapien
cctgatctgggatgatgaagacatc

SEQ ID NO: 1916246 - DNA, 25 bp, Homo sapien
tgaaatgaattccatccatcagtga

SEQ ID NO: 1916247 - DNA, 25 bp, Homo sapien
tcattctgtaggtcatattctgcca

SEQ ID NO: 1916248 - DNA, 25 bp, Homo sapien
cagtatttaaatccccgtgagcatc

SEQ ID NO: 1916249 - DNA, 25 bp, Homo sapien
tgtccttgacatatgcgcaggcaga

SEQ ID NO: 1916250 - DNA, 25 bp, Homo sapien
gagcttgacacagatcccgaatggc

SEQ ID NO: 1916251 - DNA, 25 bp, Homo sapien
taaccaagggcaaacactgcaagct

SEQ ID NO: 1916252 - DNA, 25 bp, Homo sapien
tggctcagcatagtcccagaggaag

SEQ ID NO: 1916253 - DNA, 25 bp, Homo sapien
tgttaagagccaatcgtccatagtc

SEQ ID NO: 1916254 - DNA, 25 bp, Homo sapien
gcacacgttatttgcttcagcctga

SEQ ID NO: 1916255 - DNA, 25 bp, Homo sapien
caatgacattaacctgggcttctaa

SEQ ID NO: 1916256 - DNA, 25 bp, Homo sapien
tgggcacagtccgtaaaaatgaagg

SEQ ID NO: 1916257 - DNA, 25 bp, Homo sapien
gccatagttatttctgagtacccag

SEQ ID NO: 1916258 - DNA, 25 bp, Homo sapien
gaacctatgacagccttaactcttg

SEQ ID NO: 1916259 - DNA, 25 bp, Homo sapien
taccccagtttgactccaggtaaga

SEQ ID NO: 1916260 - DNA, 25 bp, Homo sapien
taaattcaacatcctggagacagcc

SEQ ID NO: 1916261 - DNA, 25 bp, Homo sapien
tttgaaatcagaacataactcttct

SEQ ID NO: 1916262 - DNA, 25 bp, Homo sapien
ttgaaatcagaacataactcttcta

SEQ ID NO: 1916263 - DNA, 25 bp, Homo sapien
tttcatgaatagcaaacaaacctcc

SEQ ID NO: 1916264 - DNA, 25 bp, Homo sapien
attatgatatgtcccggagaagtgg

SEQ ID NO: 1916265 - DNA, 25 bp, Homo sapien
cactcctggatttgtggtcgtctgg

SEQ ID NO: 1916266 - DNA, 25 bp, Homo sapien
ggagagtcttctgaggacaacattt

SEQ ID NO: 1916267 - DNA, 25 bp, Homo sapien
gcaggtaattagtataattaagaat

SEQ ID NO: 1916268 - DNA, 25 bp, Homo sapien
tcacaaagcaggtaattagtataat

SEQ ID NO: 1916269 - DNA, 25 bp, Homo sapien
caagaataatcacaaagcaggtaat

SEQ ID NO: 1916270 - DNA, 25 bp, Homo sapien
taattagtataattaagaatgccat

SEQ ID NO: 1916271 - DNA, 25 bp, Homo sapien
ggctttgtgtactttagcttattaa

SEQ ID NO: 1916272 - DNA, 25 bp, Homo sapien
ttgtactatctgctacccctgcctg

SEQ ID NO: 1916273 - DNA, 25 bp, Homo sapien
gggtaatatatttgtactatctgct

SEQ ID NO: 1916274 - DNA, 25 bp, Homo sapien
atgctttacacatgacctctatgaa

SEQ ID NO: 1916275 - DNA, 25 bp, Homo sapien
ctgggattgcctttccaaagacggt

SEQ ID NO: 1916276 - DNA, 25 bp, Homo sapien
ctctatgacattcccaaggactggg

SEQ ID NO: 1916277 - DNA, 25 bp, Homo sapien
gccaaattttcattggcaagccata

SEQ ID NO: 1916278 - DNA, 25 bp, Homo sapien
tgtatgtggtaatagatttgctcta

SEQ ID NO: 1916279 - DNA, 25 bp, Homo sapien
tttcaagtttccgatgtgcttttcc

SEQ ID NO: 1916280 - DNA, 25 bp, Homo sapien
ttccgatgtgcttttccccagattc

SEQ ID NO: 1916281 - DNA, 25 bp, Homo sapien
agtttccgatgtgcttttccccaga

SEQ ID NO: 1916282 - DNA, 25 bp, Homo sapien
cccttttcaagtttccgatgtgctt

SEQ ID NO: 1916283 - DNA, 25 bp, Homo sapien
gaagacttaaccataccttgcattg

SEQ ID NO: 1916284 - DNA, 25 bp, Homo sapien
tgaagtgtgaagacttaaccatacc

SEQ ID NO: 1916285 - DNA, 25 bp, Homo sapien
taaccataccttgcattggtggcat

SEQ ID NO: 1916286 - DNA, 25 bp, Homo sapien
ttctttgaagtgtgaagacttaacc

SEQ ID NO: 1916287 - DNA, 25 bp, Homo sapien
ctgatccttgaggttaaggatcaac

SEQ ID NO: 1916288 - DNA, 25 bp, Homo sapien
catatttcaatgacagcatctcctt

SEQ ID NO: 1916289 - DNA, 25 bp, Homo sapien
ttgaggttaaggatcaacatcattg

SEQ ID NO: 1916290 - DNA, 25 bp, Homo sapien
tcattcccgttgaaaatagggacca

SEQ ID NO: 1916291 - DNA, 25 bp, Homo sapien
ctctgaccaaatcttcacagatggc

SEQ ID NO: 1916292 - DNA, 25 bp, Homo sapien
tatcttttgtatactgacggaaaca

SEQ ID NO: 1916293 - DNA, 25 bp, Homo sapien
gcaagtttgagtagatgtgataaga

SEQ ID NO: 1916294 - DNA, 25 bp, Homo sapien
tattgaggccatgtttttggatcac

SEQ ID NO: 1916295 - DNA, 25 bp, Homo sapien
gaaatgaattgctatgctcatggcc

SEQ ID NO: 1916296 - DNA, 25 bp, Homo sapien
aaattatgcttgtccgataatgcac

SEQ ID NO: 1916297 - DNA, 25 bp, Homo sapien
gtccgataatgcacttgatgtaggg

SEQ ID NO: 1916298 - DNA, 25 bp, Homo sapien
tgccagggcctgatcgttcctttct

SEQ ID NO: 1916299 - DNA, 25 bp, Homo sapien
tgttgacccctctcaaggctgtttc

SEQ ID NO: 1916300 - DNA, 25 bp, Homo sapien
tgtgtggtcctctccagtccatctg

SEQ ID NO: 1916301 - DNA, 25 bp, Homo sapien
tctggcctcagttcaatgtggtctt

SEQ ID NO: 1916302 - DNA, 25 bp, Homo sapien
tccccatacttcagatgacatgcaa

SEQ ID NO: 1916303 - DNA, 25 bp, Homo sapien
taggctcgtgtaacatggtcagaca

SEQ ID NO: 1916304 - DNA, 25 bp, Homo sapien
agtaggctcgtgtaacatggtcaga

SEQ ID NO: 1916305 - DNA, 25 bp, Homo sapien
ttagtaggctcgtgtaacatggtca

SEQ ID NO: 1916306 - DNA, 25 bp, Homo sapien
aggctcgtgtaacatggtcagacag

SEQ ID NO: 1916307 - DNA, 25 bp, Homo sapien
tgtgggggcctaggaagaatattct

SEQ ID NO: 1916308 - DNA, 25 bp, Homo sapien
gatgtctgaggcaagcccttccaga

SEQ ID NO: 1916309 - DNA, 25 bp, Homo sapien
gaagacttacaagctctgtcattaa

SEQ ID NO: 1916310 - DNA, 25 bp, Homo sapien
taaaagatttcgattggcattacat

SEQ ID NO: 1916311 - DNA, 25 bp, Homo sapien
tcacccctgaataatggtggccaac

SEQ ID NO: 1916312 - DNA, 25 bp, Homo sapien
aaaagaagtctgatctcacccctga

SEQ ID NO: 1916313 - DNA, 25 bp, Homo sapien
ttgtcccaaggcatcagaaccaagg

SEQ ID NO: 1916314 - DNA, 25 bp, Homo sapien
tgggaaaatggcaagcagctctagg

SEQ ID NO: 1916315 - DNA, 25 bp, Homo sapien
tcttccattgttgtcctcctatctt

SEQ ID NO: 1916316 - DNA, 25 bp, Homo sapien
ttatctaccttcaccatcccacatg

SEQ ID NO: 1916317 - DNA, 25 bp, Homo sapien
tgttgtcctcctatcttatctacct

SEQ ID NO: 1916318 - DNA, 25 bp, Homo sapien
cttcaccatcccacatgttggactg

SEQ ID NO: 1916319 - DNA, 25 bp, Homo sapien
ccaagaaacttcaagcctgagggct

SEQ ID NO: 1916320 - DNA, 25 bp, Homo sapien
tcttgatgtgttgataaaggaccta

SEQ ID NO: 1916321 - DNA, 25 bp, Homo sapien
tctaaagatccactagcaagccaag

SEQ ID NO: 1916322 - DNA, 25 bp, Homo sapien
acagagatgacgataaggaaaaagc

SEQ ID NO: 1916323 - DNA, 25 bp, Homo sapien
ggctttggcaaaaagtccttcacta

SEQ ID NO: 1916324 - DNA, 25 bp, Homo sapien
gctgtggctttggcaaaaagtcctt

SEQ ID NO: 1916325 - DNA, 25 bp, Homo sapien
tggcaaaaagtccttcactactcac

SEQ ID NO: 1916326 - DNA, 25 bp, Homo sapien
tttggcaaaaagtccttcactactc

SEQ ID NO: 1916327 - DNA, 25 bp, Homo sapien
actcatgagtattccctgctctggg

SEQ ID NO: 1916328 - DNA, 25 bp, Homo sapien
gcagatttctatcacagcacccctg

SEQ ID NO: 1916329 - DNA, 25 bp, Homo sapien
gcacgggttaccactgctgaggttg

SEQ ID NO: 1916330 - DNA, 25 bp, Homo sapien
tctggtccctgttgtcatgcacggg

SEQ ID NO: 1916331 - DNA, 25 bp, Homo sapien
aattccacattggatccatcatcca

SEQ ID NO: 1916332 - DNA, 25 bp, Homo sapien
catgaatttaggtacacatctttga

SEQ ID NO: 1916333 - DNA, 25 bp, Homo sapien
ctaattccacattggatccatcatc

SEQ ID NO: 1916334 - DNA, 25 bp, Homo sapien
atgaatttaggtacacatctttgat

SEQ ID NO: 1916335 - DNA, 25 bp, Homo sapien
cacagccagttaagctaaagattcc

SEQ ID NO: 1916336 - DNA, 25 bp, Homo sapien
acagccagttaagctaaagattccc

SEQ ID NO: 1916337 - DNA, 25 bp, Homo sapien
acacagccagttaagctaaagattc

SEQ ID NO: 1916338 - DNA, 25 bp, Homo sapien
taagtagtacaaaaagctggcacag

SEQ ID NO: 1916339 - DNA, 25 bp, Homo sapien
tatataagacagttccaatgccctc

SEQ ID NO: 1916340 - DNA, 25 bp, Homo sapien
gaagtcataacttgtacaggcatac

SEQ ID NO: 1916341 - DNA, 25 bp, Homo sapien
cagcactagtacaaggtaaaaccag

SEQ ID NO: 1916342 - DNA, 25 bp, Homo sapien
tactgaccctgtggaatgtgtggag

SEQ ID NO: 1916343 - DNA, 25 bp, Homo sapien
ttctgcctagcaacaaccgtctggt

SEQ ID NO: 1916344 - DNA, 25 bp, Homo sapien
gattcataatccatgcaaacagaga

SEQ ID NO: 1916345 - DNA, 25 bp, Homo sapien
tagacagttggctacagttgtgccc

SEQ ID NO: 1916346 - DNA, 25 bp, Homo sapien
tcccttggtgaacacttctagcttt

SEQ ID NO: 1916347 - DNA, 25 bp, Homo sapien
tacaactgatgtccaggctgaaact

SEQ ID NO: 1916348 - DNA, 25 bp, Homo sapien
ggctgaaactgatcctcataatcct

SEQ ID NO: 1916349 - DNA, 25 bp, Homo sapien
taacacctctgcttgattaacatca

SEQ ID NO: 1916350 - DNA, 25 bp, Homo sapien
tgtagaaaccagaatcttagctgaa

SEQ ID NO: 1916351 - DNA, 25 bp, Homo sapien
catgtacttttaagctactagagaa

SEQ ID NO: 1916352 - DNA, 25 bp, Homo sapien
tttcaactggcctgtaccagggata

SEQ ID NO: 1916353 - DNA, 25 bp, Homo sapien
gggaagcctaagataatgacactaa

SEQ ID NO: 1916354 - DNA, 25 bp, Homo sapien
caggtcggcgctgagtccagccgca

SEQ ID NO: 1916355 - DNA, 25 bp, Homo sapien
tccttctggaatagcgcgtaccagg

SEQ ID NO: 1916356 - DNA, 25 bp, Homo sapien
cgccttcgtctctcgggcgggacgt

SEQ ID NO: 1916357 - DNA, 25 bp, Homo sapien
agactgctccttcccgatgagccag

SEQ ID NO: 1916358 - DNA, 25 bp, Homo sapien
tctaataagggcttgcttttttgcc

SEQ ID NO: 1916359 - DNA, 25 bp, Homo sapien
taagtgcaatcactggctttatagt

SEQ ID NO: 1916360 - DNA, 25 bp, Homo sapien
gatttgacttttcggtttgctttgc

SEQ ID NO: 1916361 - DNA, 25 bp, Homo sapien
ggcttaaagtatttgcaacgtacag

SEQ ID NO: 1916362 - DNA, 25 bp, Homo sapien
tatgacacgcgaaccacagcgtttc

SEQ ID NO: 1916363 - DNA, 25 bp, Homo sapien
cagcgacctggcacgtatgacacgc

SEQ ID NO: 1916364 - DNA, 25 bp, Homo sapien
tgaacagaccgtccagactgctgag

SEQ ID NO: 1916365 - DNA, 25 bp, Homo sapien
gggcggtcctgaacagaccgtccag

SEQ ID NO: 1916366 - DNA, 25 bp, Homo sapien
ccacggctttccctttgcacttggc

SEQ ID NO: 1916367 - DNA, 25 bp, Homo sapien
ccccattggcactagtgtcctcttt

SEQ ID NO: 1916368 - DNA, 25 bp, Homo sapien
ctttgcccacggctttccctttgca

SEQ ID NO: 1916369 - DNA, 25 bp, Homo sapien
cattggcactagtgtcctctttgcc

SEQ ID NO: 1916370 - DNA, 25 bp, Homo sapien
attgttccggttgactgttcccctg

SEQ ID NO: 1916371 - DNA, 25 bp, Homo sapien
ttccggttgactgttcccctgagca

SEQ ID NO: 1916372 - DNA, 25 bp, Homo sapien
tggtacacaagaagttaaccagagt

SEQ ID NO: 1916373 - DNA, 25 bp, Homo sapien
agagtacctaaacacaattgttccg

SEQ ID NO: 1916374 - DNA, 25 bp, Homo sapien
ctgaatctactgttgtaagcctcaa

SEQ ID NO: 1916375 - DNA, 25 bp, Homo sapien
acttcaggacttaaaagatcttcac

SEQ ID NO: 1916376 - DNA, 25 bp, Homo sapien
tattttacagtagtgattaaagaca

SEQ ID NO: 1916377 - DNA, 25 bp, Homo sapien
gacaatatatatcggctaggcatgg

SEQ ID NO: 1916378 - DNA, 25 bp, Homo sapien
ttctactgaaagtcaggcagctggt

SEQ ID NO: 1916379 - DNA, 25 bp, Homo sapien
taagagcctaaagcacctcaaggga

SEQ ID NO: 1916380 - DNA, 25 bp, Homo sapien
gattatctgtagttcagttgacccc

SEQ ID NO: 1916381 - DNA, 25 bp, Homo sapien
caaactgaaaggtgggtaagagcct

SEQ ID NO: 1916382 - DNA, 25 bp, Homo sapien
ggcttgccagaagggcagtaagcca

SEQ ID NO: 1916383 - DNA, 25 bp, Homo sapien
tccactgtgagtgagacaggcatag

SEQ ID NO: 1916384 - DNA, 25 bp, Homo sapien
ctgggagcctagaggaccctcagac

SEQ ID NO: 1916385 - DNA, 25 bp, Homo sapien
tctttgtctgcatgtggttccttct

SEQ ID NO: 1916386 - DNA, 25 bp, Homo sapien
ctggcataatgtcatctgaattcaa

SEQ ID NO: 1916387 - DNA, 25 bp, Homo sapien
caaacaaatcacatcgccatcttca

SEQ ID NO: 1916388 - DNA, 25 bp, Homo sapien
ttccattaaagcaactggcataatg

SEQ ID NO: 1916389 - DNA, 25 bp, Homo sapien
tagcaagtaccatatagtttaaccc

SEQ ID NO: 1916390 - DNA, 25 bp, Homo sapien
ttatgactccactgttgtttgcttc

SEQ ID NO: 1916391 - DNA, 25 bp, Homo sapien
tcaaagctttcatttatgactccac

SEQ ID NO: 1916392 - DNA, 25 bp, Homo sapien
tatgactccactgttgtttgcttca

SEQ ID NO: 1916393 - DNA, 25 bp, Homo sapien
aattctatgaaaagtaggtctttgg

SEQ ID NO: 1916394 - DNA, 25 bp, Homo sapien
ctatgaaaagtaggtctttggtcgg

SEQ ID NO: 1916395 - DNA, 25 bp, Homo sapien
ctgaataactgaagttggtcctgaa

SEQ ID NO: 1916396 - DNA, 25 bp, Homo sapien
gtcctgaattctatgaaaagtaggt

SEQ ID NO: 1916397 - DNA, 25 bp, Homo sapien
aatgagctggataaggctgatgacc

SEQ ID NO: 1916398 - DNA, 25 bp, Homo sapien
catagtttaacacatcaaggttgga

SEQ ID NO: 1916399 - DNA, 25 bp, Homo sapien
tgatgaccaagagttaaaatctccc

SEQ ID NO: 1916400 - DNA, 25 bp, Homo sapien
tccctcctgtttgcacatagtttaa

SEQ ID NO: 1916401 - DNA, 25 bp, Homo sapien
agccatccaccgaactgggagcagg

SEQ ID NO: 1916402 - DNA, 25 bp, Homo sapien
catcagattgagtagtgaagattcc

SEQ ID NO: 1916403 - DNA, 25 bp, Homo sapien
aacaaggcaatttctagctgccaga

SEQ ID NO: 1916404 - DNA, 25 bp, Homo sapien
tatagtctttcacggaaacaaggca

SEQ ID NO: 1916405 - DNA, 25 bp, Homo sapien
catccgttccaagtagacacagcct

SEQ ID NO: 1916406 - DNA, 25 bp, Homo sapien
gacacagccttttgaaatatctaca

SEQ ID NO: 1916407 - DNA, 25 bp, Homo sapien
gtgaatgaaatgcatccgttccaag

SEQ ID NO: 1916408 - DNA, 25 bp, Homo sapien
gtagacacagccttttgaaatatct

SEQ ID NO: 1916409 - DNA, 25 bp, Homo sapien
tcaaccaaggtgagtaaaggaccat

SEQ ID NO: 1916410 - DNA, 25 bp, Homo sapien
gtcaaccaaggtgagtaaaggacca

SEQ ID NO: 1916411 - DNA, 25 bp, Homo sapien
caaccaaggtgagtaaaggaccata

SEQ ID NO: 1916412 - DNA, 25 bp, Homo sapien
ttgccatccgggctttacgcaaata

SEQ ID NO: 1916413 - DNA, 25 bp, Homo sapien
cagaatgttgggatgattaaatttg

SEQ ID NO: 1916414 - DNA, 25 bp, Homo sapien
atgtattggggttcattcagcagac

SEQ ID NO: 1916415 - DNA, 25 bp, Homo sapien
gcaaataagtaagaaggtctcctcc

SEQ ID NO: 1916416 - DNA, 25 bp, Homo sapien
cttcaggaattcaatcttctcctgg

SEQ ID NO: 1916417 - DNA, 25 bp, Homo sapien
ccttcaggaattcaatcttctcctg

SEQ ID NO: 1916418 - DNA, 25 bp, Homo sapien
cttcactgctactttgatttctcca

SEQ ID NO: 1916419 - DNA, 25 bp, Homo sapien
tccttcatacacttctccaaaggct

SEQ ID NO: 1916420 - DNA, 25 bp, Homo sapien
ccaactcctaagatgtccactgctg

SEQ ID NO: 1916421 - DNA, 25 bp, Homo sapien
tttctccacttccaactcctaagat

SEQ ID NO: 1916422 - DNA, 25 bp, Homo sapien
ccagcaagagacgcagagtcagttt

SEQ ID NO: 1916423 - DNA, 25 bp, Homo sapien
cagcaagagacgcagagtcagtttt

SEQ ID NO: 1916424 - DNA, 25 bp, Homo sapien
gcaagagacgcagagtcagtttttc

SEQ ID NO: 1916425 - DNA, 25 bp, Homo sapien
caagagacgcagagtcagtttttcc

SEQ ID NO: 1916426 - DNA, 25 bp, Homo sapien
ctttgcctaggtgctccataatgat

SEQ ID NO: 1916427 - DNA, 25 bp, Homo sapien
tttgcctaggtgctccataatgatg

SEQ ID NO: 1916428 - DNA, 25 bp, Homo sapien
cctttgcctaggtgctccataatga

SEQ ID NO: 1916429 - DNA, 25 bp, Homo sapien
caactctttgtcttcgtttataagc

SEQ ID NO: 1916430 - DNA, 25 bp, Homo sapien
attagccaggcctactccggctgcc

SEQ ID NO: 1916431 - DNA, 25 bp, Homo sapien
tgtattgcatagcaggcattagcca

SEQ ID NO: 1916432 - DNA, 25 bp, Homo sapien
tgccagacctcgcagctcagccaac

SEQ ID NO: 1916433 - DNA, 25 bp, Homo sapien
aaggtcagtgggattgtaacaacca

SEQ ID NO: 1916434 - DNA, 25 bp, Homo sapien
aagtatgaaacttgtttctggtatc

SEQ ID NO: 1916435 - DNA, 25 bp, Homo sapien
gtaacaaccagaaatattccaacta

SEQ ID NO: 1916436 - DNA, 25 bp, Homo sapien
agtatgaaacttgtttctggtatcc

SEQ ID NO: 1916437 - DNA, 25 bp, Homo sapien
cactgattccactatattcaccaaa

SEQ ID NO: 1916438 - DNA, 25 bp, Homo sapien
ggacttccatgtgcaaacactactg

SEQ ID NO: 1916439 - DNA, 25 bp, Homo sapien
acactactgcaggatccattaaatg

SEQ ID NO: 1916440 - DNA, 25 bp, Homo sapien
gattatttgcagctactactctgaa

SEQ ID NO: 1916441 - DNA, 25 bp, Homo sapien
gttctgtaaattatttgaagtgctc

SEQ ID NO: 1916442 - DNA, 25 bp, Homo sapien
tctggttctgtaaattatttgaagt

SEQ ID NO: 1916443 - DNA, 25 bp, Homo sapien
ttctgtaaattatttgaagtgctct

SEQ ID NO: 1916444 - DNA, 25 bp, Homo sapien
tggttctgtaaattatttgaagtgc

SEQ ID NO: 1916445 - DNA, 25 bp, Homo sapien
gatggtttcatagtcctgtgagagg

SEQ ID NO: 1916446 - DNA, 25 bp, Homo sapien
gccagttatggttcacgtgctcccc

SEQ ID NO: 1916447 - DNA, 25 bp, Homo sapien
catcagtggctggttttcatcgacg

SEQ ID NO: 1916448 - DNA, 25 bp, Homo sapien
ccaggtctgaggctgttcatcagtg

SEQ ID NO: 1916449 - DNA, 25 bp, Homo sapien
ctagtaatttgggaatgcctggttt

SEQ ID NO: 1916450 - DNA, 25 bp, Homo sapien
ggatatagtatgtaattctacatcc

SEQ ID NO: 1916451 - DNA, 25 bp, Homo sapien
gtatgtaattctacatccattatct

SEQ ID NO: 1916452 - DNA, 25 bp, Homo sapien
atgcctggtttatttgggactccag

SEQ ID NO: 1916453 - DNA, 25 bp, Homo sapien
ggaccttggctgcatgaagttttaa

SEQ ID NO: 1916454 - DNA, 25 bp, Homo sapien
gtcttataaaccaccactactctga

SEQ ID NO: 1916455 - DNA, 25 bp, Homo sapien
taaggttgtagatttgtgatattac

SEQ ID NO: 1916456 - DNA, 25 bp, Homo sapien
gaagtgaggtgctattttctcccgt

SEQ ID NO: 1916457 - DNA, 25 bp, Homo sapien
ccaattaaattgcaaactagtgttc

SEQ ID NO: 1916458 - DNA, 25 bp, Homo sapien
actagtgttctctggaaccaaggaa

SEQ ID NO: 1916459 - DNA, 25 bp, Homo sapien
ggatgactctctgtacaccacattt

SEQ ID NO: 1916460 - DNA, 25 bp, Homo sapien
tctctggtgtgttaaacatttccac

SEQ ID NO: 1916461 - DNA, 25 bp, Homo sapien
tagtaacaaggagagtgagccttcc

SEQ ID NO: 1916462 - DNA, 25 bp, Homo sapien
gagattgccaactgataacggactg

SEQ ID NO: 1916463 - DNA, 25 bp, Homo sapien
taatgaggctggtgtctgaccgcac

SEQ ID NO: 1916464 - DNA, 25 bp, Homo sapien
tgtattaatgagctgcactgcctct

SEQ ID NO: 1916465 - DNA, 25 bp, Homo sapien
aatcttcaataagagctatactgtc

SEQ ID NO: 1916466 - DNA, 25 bp, Homo sapien
ggttgtaaatcttcaataagagcta

SEQ ID NO: 1916467 - DNA, 25 bp, Homo sapien
aatggttgtaaatcttcaataagag

SEQ ID NO: 1916468 - DNA, 25 bp, Homo sapien
tcttttcctggtggtaaatgttcca

SEQ ID NO: 1916469 - DNA, 25 bp, Homo sapien
ggttccacagtgtctgaagctagag

SEQ ID NO: 1916470 - DNA, 25 bp, Homo sapien
taaaccaggtatgttggagtagggc

SEQ ID NO: 1916471 - DNA, 25 bp, Homo sapien
catgtgaggtttgtcttggccagag

SEQ ID NO: 1916472 - DNA, 25 bp, Homo sapien
ccagaggtaatctgattgtgaggct

SEQ ID NO: 1916473 - DNA, 25 bp, Homo sapien
caatcaatgagcctacaatgacatc

SEQ ID NO: 1916474 - DNA, 25 bp, Homo sapien
tatagttgatatcagccttccccaa

SEQ ID NO: 1916475 - DNA, 25 bp, Homo sapien
tactgtgatagctacctattctagg

SEQ ID NO: 1916476 - DNA, 25 bp, Homo sapien
tctgctctgtctattcgccacttct

SEQ ID NO: 1916477 - DNA, 25 bp, Homo sapien
tgcatctatcaatgtgaccgcctga

SEQ ID NO: 1916478 - DNA, 25 bp, Homo sapien
aagaaattgggagagggaacatcct

SEQ ID NO: 1916479 - DNA, 25 bp, Homo sapien
tgttgcatgctgtgacttccactgc

SEQ ID NO: 1916480 - DNA, 25 bp, Homo sapien
gacagcgttatttcttcattcccaa

SEQ ID NO: 1916481 - DNA, 25 bp, Homo sapien
tagatagatgtccattacagccaat

SEQ ID NO: 1916482 - DNA, 25 bp, Homo sapien
tgagttcatcagtatatccttagtg

SEQ ID NO: 1916483 - DNA, 25 bp, Homo sapien
cccatttctgatagatgtcgtgaag

SEQ ID NO: 1916484 - DNA, 25 bp, Homo sapien
tgaagtcttcaatggtgatagtggc

SEQ ID NO: 1916485 - DNA, 25 bp, Homo sapien
taccaatgaggccatgcaattctgt

SEQ ID NO: 1916486 - DNA, 25 bp, Homo sapien
aatgatatttgcaccttagtggcaa

SEQ ID NO: 1916487 - DNA, 25 bp, Homo sapien
gcaccttagtggcaaagacggcttt

SEQ ID NO: 1916488 - DNA, 25 bp, Homo sapien
tctccagaggagagttatagttaat

SEQ ID NO: 1916489 - DNA, 25 bp, Homo sapien
agaacaacaggacgcaggtttccca

SEQ ID NO: 1916490 - DNA, 25 bp, Homo sapien
tgacaccactgggaggcctaaaata

SEQ ID NO: 1916491 - DNA, 25 bp, Homo sapien
gagaaattatgggactgagaagaga

SEQ ID NO: 1916492 - DNA, 25 bp, Homo sapien
acatagaagtaatttgtgatccagg

SEQ ID NO: 1916493 - DNA, 25 bp, Homo sapien
ttcacctgggaaacgatggccccat

SEQ ID NO: 1916494 - DNA, 25 bp, Homo sapien
actgaactgtaagccaagatatgcc

SEQ ID NO: 1916495 - DNA, 25 bp, Homo sapien
aagatatgcctactccttagggcct

SEQ ID NO: 1916496 - DNA, 25 bp, Homo sapien
tgtcctttgctgtgatgatccagta

SEQ ID NO: 1916497 - DNA, 25 bp, Homo sapien
tggaaacttctgtccaatacaagcg

SEQ ID NO: 1916498 - DNA, 25 bp, Homo sapien
tgataactctccaacactgacagcc

SEQ ID NO: 1916499 - DNA, 25 bp, Homo sapien
tgcagaattcggtgcaaggtgtgac

SEQ ID NO: 1916500 - DNA, 25 bp, Homo sapien
tactgtagtagaacatctggtagcc

SEQ ID NO: 1916501 - DNA, 25 bp, Homo sapien
tgttgaattcctattgtgaatcttc

SEQ ID NO: 1916502 - DNA, 25 bp, Homo sapien
ttgaattcctattgtgaatcttcac

SEQ ID NO: 1916503 - DNA, 25 bp, Homo sapien
gttgaattcctattgtgaatcttca

SEQ ID NO: 1916504 - DNA, 25 bp, Homo sapien
caaagtagaggtgccttgaaatcca

SEQ ID NO: 1916505 - DNA, 25 bp, Homo sapien
ctctctgggatatttcaccttgtgt

SEQ ID NO: 1916506 - DNA, 25 bp, Homo sapien
tgaaatccagtcaattgtaataact

SEQ ID NO: 1916507 - DNA, 25 bp, Homo sapien
caccttgtgttcaagatcaacatca

SEQ ID NO: 1916508 - DNA, 25 bp, Homo sapien
gctgtgtagcaaacggcactgataa

SEQ ID NO: 1916509 - DNA, 25 bp, Homo sapien
gctagagcgattgtgcaagtgcaga

SEQ ID NO: 1916510 - DNA, 25 bp, Homo sapien
caagtgcagaagaaagagtgagtcc

SEQ ID NO: 1916511 - DNA, 25 bp, Homo sapien
gtgagtccccttcagcataatatcc

SEQ ID NO: 1916512 - DNA, 25 bp, Homo sapien
cagcatatggtcctggccccttaga

SEQ ID NO: 1916513 - DNA, 25 bp, Homo sapien
tacaacgtcagcatatggtcctggc

SEQ ID NO: 1916514 - DNA, 25 bp, Homo sapien
gatgttgtagactttacaacgtcag

SEQ ID NO: 1916515 - DNA, 25 bp, Homo sapien
tggccccttagatgtaaaggcccta

SEQ ID NO: 1916516 - DNA, 25 bp, Homo sapien
gcaatccagtcttcacatgttttgt

SEQ ID NO: 1916517 - DNA, 25 bp, Homo sapien
catgcttaggtttgttccacctaaa

SEQ ID NO: 1916518 - DNA, 25 bp, Homo sapien
cacaacttcattcttgttgcagcat

SEQ ID NO: 1916519 - DNA, 25 bp, Homo sapien
gcatctgggactcatgccttcaagt

SEQ ID NO: 1916520 - DNA, 25 bp, Homo sapien
cagcataaatcagagacctaggccc

SEQ ID NO: 1916521 - DNA, 25 bp, Homo sapien
agcataaatcagagacctaggccct

SEQ ID NO: 1916522 - DNA, 25 bp, Homo sapien
tctacatcactacaatcaaatgaaa

SEQ ID NO: 1916523 - DNA, 25 bp, Homo sapien
acatcactacaatcaaatgaaatgg

SEQ ID NO: 1916524 - DNA, 25 bp, Homo sapien
atcaaatgaaatggctgttaagaaa

SEQ ID NO: 1916525 - DNA, 25 bp, Homo sapien
cttctacatcactacaatcaaatga

SEQ ID NO: 1916526 - DNA, 25 bp, Homo sapien
ccccagtaggtataaggagtgacag

SEQ ID NO: 1916527 - DNA, 25 bp, Homo sapien
tgtttcaggtgctcgaagtgacaga

SEQ ID NO: 1916528 - DNA, 25 bp, Homo sapien
taaggcataaggttccagtccttcc

SEQ ID NO: 1916529 - DNA, 25 bp, Homo sapien
aaagagtgttgttcactagccaaga

SEQ ID NO: 1916530 - DNA, 25 bp, Homo sapien
caatcctaaatgaagactcttgaac

SEQ ID NO: 1916531 - DNA, 25 bp, Homo sapien
ttagaatgagcactaaattctacac

SEQ ID NO: 1916532 - DNA, 25 bp, Homo sapien
aacagaatctggaataaccttaggg

SEQ ID NO: 1916533 - DNA, 25 bp, Homo sapien
tacactgtagaaaactacaccccag

SEQ ID NO: 1916534 - DNA, 25 bp, Homo sapien
cactatagtacatcagtgcattctg

SEQ ID NO: 1916535 - DNA, 25 bp, Homo sapien
tctgggaaatttcagaagtactcca

SEQ ID NO: 1916536 - DNA, 25 bp, Homo sapien
tccagaacagccgaccactatagta

SEQ ID NO: 1916537 - DNA, 25 bp, Homo sapien
cttgagttgtgataatcctaaagcc

SEQ ID NO: 1916538 - DNA, 25 bp, Homo sapien
attctgtgatggtggtatccccagt

SEQ ID NO: 1916539 - DNA, 25 bp, Homo sapien
ttctgtgatggtggtatccccagtg

SEQ ID NO: 1916540 - DNA, 25 bp, Homo sapien
caagggtgtttagataggttgcagc

SEQ ID NO: 1916541 - DNA, 25 bp, Homo sapien
tctatgtgctcctacaactcttgca

SEQ ID NO: 1916542 - DNA, 25 bp, Homo sapien
ggtaatactctacaacaaaggcaca

SEQ ID NO: 1916543 - DNA, 25 bp, Homo sapien
tccagcttcaagatactctcctgtt

SEQ ID NO: 1916544 - DNA, 25 bp, Homo sapien
tctgtccccgaagaacagctgtgta

SEQ ID NO: 1916545 - DNA, 25 bp, Homo sapien
tgtcttgaaccaaccaatacaggag

SEQ ID NO: 1916546 - DNA, 25 bp, Homo sapien
gagcccatcactgaggtctaaagtt

SEQ ID NO: 1916547 - DNA, 25 bp, Homo sapien
cagctgtgtacaggtgaatacattg

SEQ ID NO: 1916548 - DNA, 25 bp, Homo sapien
ttgctggaatacaacaaactattca

SEQ ID NO: 1916549 - DNA, 25 bp, Homo sapien
taaacagtcagagggtactccatac

SEQ ID NO: 1916550 - DNA, 25 bp, Homo sapien
gatacactagagtttctacattaca

SEQ ID NO: 1916551 - DNA, 25 bp, Homo sapien
taaacctctctgatctaaactaaaa

SEQ ID NO: 1916552 - DNA, 25 bp, Homo sapien
tcaccaatagcttcacgtgggtaac

SEQ ID NO: 1916553 - DNA, 25 bp, Homo sapien
agtctggtgctttccactgaataga

SEQ ID NO: 1916554 - DNA, 25 bp, Homo sapien
tgtctgtagtacaagggaactttcc

SEQ ID NO: 1916555 - DNA, 25 bp, Homo sapien
gagtgtggtccagtagagatatcca

SEQ ID NO: 1916556 - DNA, 25 bp, Homo sapien
tagaggctgttgttataccaatcca

SEQ ID NO: 1916557 - DNA, 25 bp, Homo sapien
gagaaagtgacccagccactcaaaa

SEQ ID NO: 1916558 - DNA, 25 bp, Homo sapien
caatgctgggtaggtgataattctc

SEQ ID NO: 1916559 - DNA, 25 bp, Homo sapien
aaaaacgtcgcctttcgtgtcactg

SEQ ID NO: 1916560 - DNA, 25 bp, Homo sapien
tatatcagaggataagaactctcct

SEQ ID NO: 1916561 - DNA, 25 bp, Homo sapien
ctgacacatttcctatatcagagga

SEQ ID NO: 1916562 - DNA, 25 bp, Homo sapien
ataagaactctcctgggccaaagct

SEQ ID NO: 1916563 - DNA, 25 bp, Homo sapien
gccaaagctatttaatggtttactc

SEQ ID NO: 1916564 - DNA, 25 bp, Homo sapien
aaccttgtatttcatagcactctgc

SEQ ID NO: 1916565 - DNA, 25 bp, Homo sapien
ctggcctctttggagaacttgctct

SEQ ID NO: 1916566 - DNA, 25 bp, Homo sapien
cagggtagtacccactgagggctct

SEQ ID NO: 1916567 - DNA, 25 bp, Homo sapien
tggagaacttgctctcacagaaacc

SEQ ID NO: 1916568 - DNA, 25 bp, Homo sapien
ggttccacttatgttcaagaaaata

SEQ ID NO: 1916569 - DNA, 25 bp, Homo sapien
tatgagtgacttcaggagggtcttg

SEQ ID NO: 1916570 - DNA, 25 bp, Homo sapien
cataggtccagttctgccaggcaga

SEQ ID NO: 1916571 - DNA, 25 bp, Homo sapien
ggtggatactttcacctcataggtc

SEQ ID NO: 1916572 - DNA, 25 bp, Homo sapien
ataatatcactgatcaggatgacat

SEQ ID NO: 1916573 - DNA, 25 bp, Homo sapien
caataatatcactgatcaggatgac

SEQ ID NO: 1916574 - DNA, 25 bp, Homo sapien
aataatatcactgatcaggatgaca

SEQ ID NO: 1916575 - DNA, 25 bp, Homo sapien
ctgcaagggcaaaccaaggattctc

SEQ ID NO: 1916576 - DNA, 25 bp, Homo sapien
gcaagggcaaaccaaggattctcca

SEQ ID NO: 1916577 - DNA, 25 bp, Homo sapien
tgcaagggcaaaccaaggattctcc

SEQ ID NO: 1916578 - DNA, 25 bp, Homo sapien
tcaaaattgaatcacaacgccaagc

SEQ ID NO: 1916579 - DNA, 25 bp, Homo sapien
ccttcctcttattccagcaaggcca

SEQ ID NO: 1916580 - DNA, 25 bp, Homo sapien
attgaatcacaacgccaagcagttc

SEQ ID NO: 1916581 - DNA, 25 bp, Homo sapien
gaatcacaacgccaagcagttcaaa

SEQ ID NO: 1916582 - DNA, 25 bp, Homo sapien
tgactcaggtcacatcccacgatga

SEQ ID NO: 1916583 - DNA, 25 bp, Homo sapien
tgagagccaaacagcaccgaaagct

SEQ ID NO: 1916584 - DNA, 25 bp, Homo sapien
cattgaacaagagcctggtgagagc

SEQ ID NO: 1916585 - DNA, 25 bp, Homo sapien
tgcacaccggccagatggtacagga

SEQ ID NO: 1916586 - DNA, 25 bp, Homo sapien
ctaatagagggtggagtaatttcct

SEQ ID NO: 1916587 - DNA, 25 bp, Homo sapien
attgtatgaatcagccacaattttt

SEQ ID NO: 1916588 - DNA, 25 bp, Homo sapien
ttcctcgatgtttgagcagttctct

SEQ ID NO: 1916589 - DNA, 25 bp, Homo sapien
tttttgaggtgcactaatagagggt

SEQ ID NO: 1916590 - DNA, 25 bp, Homo sapien
ggcagccttcttcgcccatatgaga

SEQ ID NO: 1916591 - DNA, 25 bp, Homo sapien
tacatcagacatgttggcagccttc

SEQ ID NO: 1916592 - DNA, 25 bp, Homo sapien
gataaagccaatctatggagataga

SEQ ID NO: 1916593 - DNA, 25 bp, Homo sapien
gaaattaatcctgaacctctgtaaa

SEQ ID NO: 1916594 - DNA, 25 bp, Homo sapien
caatgtgcttcatctactaaatgtt

SEQ ID NO: 1916595 - DNA, 25 bp, Homo sapien
tcttagagaagtttttctggataaa

SEQ ID NO: 1916596 - DNA, 25 bp, Homo sapien
gcatccaaccgaaggcaatgtgctt

SEQ ID NO: 1916597 - DNA, 25 bp, Homo sapien
ggtatatagcatccaaccgaaggca

SEQ ID NO: 1916598 - DNA, 25 bp, Homo sapien
gatgaagtggtaatactagattctg

SEQ ID NO: 1916599 - DNA, 25 bp, Homo sapien
gtggtaatactagattctgcttctg

SEQ ID NO: 1916600 - DNA, 25 bp, Homo sapien
cttctggaccctcaccaacttcatt

SEQ ID NO: 1916601 - DNA, 25 bp, Homo sapien
tgaagtggtaatactagattctgct

SEQ ID NO: 1916602 - DNA, 25 bp, Homo sapien
tggttctctgtgtccctgcatctaa

SEQ ID NO: 1916603 - DNA, 25 bp, Homo sapien
tgacttccacagtgtcgggacttga

SEQ ID NO: 1916604 - DNA, 25 bp, Homo sapien
tgaggtggatcccagctgacttcca

SEQ ID NO: 1916605 - DNA, 25 bp, Homo sapien
ccaaaataggtccacctgggaattg

SEQ ID NO: 1916606 - DNA, 25 bp, Homo sapien
gcagctgcgctgtgaagatccaaac

SEQ ID NO: 1916607 - DNA, 25 bp, Homo sapien
caaaccactcggaaaatgtactcag

SEQ ID NO: 1916608 - DNA, 25 bp, Homo sapien
ccacataggacggtctggacacagt

SEQ ID NO: 1916609 - DNA, 25 bp, Homo sapien
ccatgaggatgagtcctgtaactgg

SEQ ID NO: 1916610 - DNA, 25 bp, Homo sapien
caaagggagcagttggtaggtctgc

SEQ ID NO: 1916611 - DNA, 25 bp, Homo sapien
aagtttgcagatttccatcgtaatg

SEQ ID NO: 1916612 - DNA, 25 bp, Homo sapien
tagtataagtccagcttcccagaag

SEQ ID NO: 1916613 - DNA, 25 bp, Homo sapien
catattgtggcttccaatggaagaa

SEQ ID NO: 1916614 - DNA, 25 bp, Homo sapien
tcctcttcatatgcaccttccgcgc

SEQ ID NO: 1916615 - DNA, 25 bp, Homo sapien
tcttcatatgcaccttccgcgctgc

SEQ ID NO: 1916616 - DNA, 25 bp, Homo sapien
ttcatatgcaccttccgcgctgcta

SEQ ID NO: 1916617 - DNA, 25 bp, Homo sapien
ctcttcatatgcaccttccgcgctg

SEQ ID NO: 1916618 - DNA, 25 bp, Homo sapien
cacaaacggtggcataagtatcatt

SEQ ID NO: 1916619 - DNA, 25 bp, Homo sapien
ctcacaaacggtggcataagtatca

SEQ ID NO: 1916620 - DNA, 25 bp, Homo sapien
tcacaaacggtggcataagtatcat

SEQ ID NO: 1916621 - DNA, 25 bp, Homo sapien
agagttccaaaagtgacatccttgg

SEQ ID NO: 1916622 - DNA, 25 bp, Homo sapien
acagagttccaaaagtgacatcctt

SEQ ID NO: 1916623 - DNA, 25 bp, Homo sapien
gagttccaaaagtgacatccttgga

SEQ ID NO: 1916624 - DNA, 25 bp, Homo sapien
cagagttccaaaagtgacatccttg

SEQ ID NO: 1916625 - DNA, 25 bp, Homo sapien
attatgtggtgtgccaaggtcaagc

SEQ ID NO: 1916626 - DNA, 25 bp, Homo sapien
cagattatgtggtgtgccaaggtca

SEQ ID NO: 1916627 - DNA, 25 bp, Homo sapien
ctcagattatgtggtgtgccaaggt

SEQ ID NO: 1916628 - DNA, 25 bp, Homo sapien
tatgtggtgtgccaaggtcaagctg

SEQ ID NO: 1916629 - DNA, 25 bp, Homo sapien
tcctccgcattttgtaactctaaag

SEQ ID NO: 1916630 - DNA, 25 bp, Homo sapien
catcagtactgggttccgtgtaact

SEQ ID NO: 1916631 - DNA, 25 bp, Homo sapien
gaggtagtaaacaccagccatcagt

SEQ ID NO: 1916632 - DNA, 25 bp, Homo sapien
tttgtaactctaaagtaaagagcca

SEQ ID NO: 1916633 - DNA, 25 bp, Homo sapien
cagattagttacacacgactttagg

SEQ ID NO: 1916634 - DNA, 25 bp, Homo sapien
agattagttacacacgactttaggc

SEQ ID NO: 1916635 - DNA, 25 bp, Homo sapien
gacaagcttcggaataagacagtaa

SEQ ID NO: 1916636 - DNA, 25 bp, Homo sapien
cagccaagagttgcaaaattgacaa

SEQ ID NO: 1916637 - DNA, 25 bp, Homo sapien
ccataggcagccaagagttgcaaaa

SEQ ID NO: 1916638 - DNA, 25 bp, Homo sapien
taggcagccaagagttgcaaaattg

SEQ ID NO: 1916639 - DNA, 25 bp, Homo sapien
tcatcacttcaattggaggagtagc

SEQ ID NO: 1916640 - DNA, 25 bp, Homo sapien
tcagcaagggtgtgacacatgcagt

SEQ ID NO: 1916641 - DNA, 25 bp, Homo sapien
tagatggccggtctaattttctcca

SEQ ID NO: 1916642 - DNA, 25 bp, Homo sapien
gcttgtaacagttccataagagcta

SEQ ID NO: 1916643 - DNA, 25 bp, Homo sapien
gttccttacacccagtgtatctcat

SEQ ID NO: 1916644 - DNA, 25 bp, Homo sapien
ttaagttccttacacccagtgtatc

SEQ ID NO: 1916645 - DNA, 25 bp, Homo sapien
ctgatattgtcctaatttaagttcc

SEQ ID NO: 1916646 - DNA, 25 bp, Homo sapien
tgatattgtcctaatttaagttcct

SEQ ID NO: 1916647 - DNA, 25 bp, Homo sapien
tctggatcccttgcaggtgagttct

SEQ ID NO: 1916648 - DNA, 25 bp, Homo sapien
cctgtcgagctctctggatcccttg

SEQ ID NO: 1916649 - DNA, 25 bp, Homo sapien
aaattcagccgcctgtcgagctctc

SEQ ID NO: 1916650 - DNA, 25 bp, Homo sapien
ctgtgaaattaaattcagccgcctg

SEQ ID NO: 1916651 - DNA, 25 bp, Homo sapien
cagccacgttgattcagacatttat

SEQ ID NO: 1916652 - DNA, 25 bp, Homo sapien
tctgtgtcaaatcatgatgtccatg

SEQ ID NO: 1916653 - DNA, 25 bp, Homo sapien
tcaatcttagtggtgtttctttcag

SEQ ID NO: 1916654 - DNA, 25 bp, Homo sapien
tctaggagtcttcagttcaatctta

SEQ ID NO: 1916655 - DNA, 25 bp, Homo sapien
ttgaacctgggcctgatacttacct

SEQ ID NO: 1916656 - DNA, 25 bp, Homo sapien
gacagaggcttgtatgggaaatacc

SEQ ID NO: 1916657 - DNA, 25 bp, Homo sapien
ggaaagctcagtgacctactcagtg

SEQ ID NO: 1916658 - DNA, 25 bp, Homo sapien
ccaagaagcagtaaggcagtgacat

SEQ ID NO: 1916659 - DNA, 25 bp, Homo sapien
catgctctggcagcaagtgtctgtg

SEQ ID NO: 1916660 - DNA, 25 bp, Homo sapien
actgctggttacacatgctctggca

SEQ ID NO: 1916661 - DNA, 25 bp, Homo sapien
caggtatggtgaacaaaggactgct

SEQ ID NO: 1916662 - DNA, 25 bp, Homo sapien
ggtttcctaacaatgattgaagcag

SEQ ID NO: 1916663 - DNA, 25 bp, Homo sapien
attttagcatatgcactgctgccga

SEQ ID NO: 1916664 - DNA, 25 bp, Homo sapien
tttagcatatgcactgctgccgaag

SEQ ID NO: 1916665 - DNA, 25 bp, Homo sapien
tcaattttagcatatgcactgctgc

SEQ ID NO: 1916666 - DNA, 25 bp, Homo sapien
aaaaaatgtggaacacgtcacaaat

SEQ ID NO: 1916667 - DNA, 25 bp, Homo sapien
tcagatctgagaacgaactcactat

SEQ ID NO: 1916668 - DNA, 25 bp, Homo sapien
tcacagggtgtcaggagtaagagag

SEQ ID NO: 1916669 - DNA, 25 bp, Homo sapien
ggtgtcaggagtaagagagagcatg

SEQ ID NO: 1916670 - DNA, 25 bp, Homo sapien
gaaaacacccctatgtgtcaatcac

SEQ ID NO: 1916671 - DNA, 25 bp, Homo sapien
tgggcaattgttgaaaccaagctaa

SEQ ID NO: 1916672 - DNA, 25 bp, Homo sapien
tagatgattccaatacctgcccaga

SEQ ID NO: 1916673 - DNA, 25 bp, Homo sapien
accaagctaatatggagtcactaga

SEQ ID NO: 1916674 - DNA, 25 bp, Homo sapien
ttgttggttcacaagaataagcggg

SEQ ID NO: 1916675 - DNA, 25 bp, Homo sapien
cattgttaccagatcctaaatcttt

SEQ ID NO: 1916676 - DNA, 25 bp, Homo sapien
tgttaccagatcctaaatctttccc

SEQ ID NO: 1916677 - DNA, 25 bp, Homo sapien
tcaggattcaggtgtacagcagata

SEQ ID NO: 1916678 - DNA, 25 bp, Homo sapien
cccttatctggctcaggattcaggt

SEQ ID NO: 1916679 - DNA, 25 bp, Homo sapien
agcagggcgcgccagatacgtggag

SEQ ID NO: 1916680 - DNA, 25 bp, Homo sapien
gcttcgccgtcggtcactgcctggg

SEQ ID NO: 1916681 - DNA, 25 bp, Homo sapien
gctgcctagcaggttcacgtgtact

SEQ ID NO: 1916682 - DNA, 25 bp, Homo sapien
actgcctgggaacgcgacttcctcc

SEQ ID NO: 1916683 - DNA, 25 bp, Homo sapien
tgctggccccgtgagaagtgacctg

SEQ ID NO: 1916684 - DNA, 25 bp, Homo sapien
tgactctgctggccccgtgagaagt

SEQ ID NO: 1916685 - DNA, 25 bp, Homo sapien
tctgctggccccgtgagaagtgacc

SEQ ID NO: 1916686 - DNA, 25 bp, Homo sapien
ctggccccgtgagaagtgacctgac

SEQ ID NO: 1916687 - DNA, 25 bp, Homo sapien
ctcccgcgcggaattggaatcccgg

SEQ ID NO: 1916688 - DNA, 25 bp, Homo sapien
cacgtttgccgaggttggccttgga

SEQ ID NO: 1916689 - DNA, 25 bp, Homo sapien
tgccttttgacaaagccgctcctcg

SEQ ID NO: 1916690 - DNA, 25 bp, Homo sapien
ttggacgctggcgagcaggcggtgc

SEQ ID NO: 1916691 - DNA, 25 bp, Homo sapien
ctgctggcgccgcaagttggaatcg

SEQ ID NO: 1916692 - DNA, 25 bp, Homo sapien
tggcgccgcaagttggaatcgtgtg

SEQ ID NO: 1916693 - DNA, 25 bp, Homo sapien
tgctggcgccgcaagttggaatcgt

SEQ ID NO: 1916694 - DNA, 25 bp, Homo sapien
ctggcgccgcaagttggaatcgtgt

SEQ ID NO: 1916695 - DNA, 25 bp, Homo sapien
taatggcgctgagtctatccggagt

SEQ ID NO: 1916696 - DNA, 25 bp, Homo sapien
ttgctcctggccgtatatgcctgag

SEQ ID NO: 1916697 - DNA, 25 bp, Homo sapien
ggtactgtagcacaatactaggcag

SEQ ID NO: 1916698 - DNA, 25 bp, Homo sapien
tatccggagtactttgacagctccc

SEQ ID NO: 1916699 - DNA, 25 bp, Homo sapien
ctttttgctgtctatattggcctct

SEQ ID NO: 1916700 - DNA, 25 bp, Homo sapien
tggcctctgtgttgcaatcatttct

SEQ ID NO: 1916701 - DNA, 25 bp, Homo sapien
ttctggactgaacaaggccttggtg

SEQ ID NO: 1916702 - DNA, 25 bp, Homo sapien
cctctgtgttgcaatcatttctgga

SEQ ID NO: 1916703 - DNA, 25 bp, Homo sapien
tcttggtaggaaccagacgctggcc

SEQ ID NO: 1916704 - DNA, 25 bp, Homo sapien
aaaggtgacctccacactggatgga

SEQ ID NO: 1916705 - DNA, 25 bp, Homo sapien
gggtgggtccgggactgcctgaaga

SEQ ID NO: 1916706 - DNA, 25 bp, Homo sapien
gacgctggccagtcttcataggcat

SEQ ID NO: 1916707 - DNA, 25 bp, Homo sapien
catctgttcctgtggcttgtgcata

SEQ ID NO: 1916708 - DNA, 25 bp, Homo sapien
gaaatcacttacgtagagttccagt

SEQ ID NO: 1916709 - DNA, 25 bp, Homo sapien
ccacaggagtatccggagaataaag

SEQ ID NO: 1916710 - DNA, 25 bp, Homo sapien
cttgttcgtcacttgctggaagaaa

SEQ ID NO: 1916711 - DNA, 25 bp, Homo sapien
tgggccacgagaagtaccactcgcc

SEQ ID NO: 1916712 - DNA, 25 bp, Homo sapien
gtaccactcgcctggcagccaaata

SEQ ID NO: 1916713 - DNA, 25 bp, Homo sapien
agtaccactcgcctggcagccaaat

SEQ ID NO: 1916714 - DNA, 25 bp, Homo sapien
acgagaagtaccactcgcctggcag

SEQ ID NO: 1916715 - DNA, 25 bp, Homo sapien
gactggacatggtttagctgggttc

SEQ ID NO: 1916716 - DNA, 25 bp, Homo sapien
tataaaggtgcaacaaaggtgtcag

SEQ ID NO: 1916717 - DNA, 25 bp, Homo sapien
ggattttggctggaggccatcctca

SEQ ID NO: 1916718 - DNA, 25 bp, Homo sapien
gcaatctcattggaggctcagctgg

SEQ ID NO: 1916719 - DNA, 25 bp, Homo sapien
tacagtaggtaggagtgtggccgtg

SEQ ID NO: 1916720 - DNA, 25 bp, Homo sapien
gagtaacactgctgaaacatcctca

SEQ ID NO: 1916721 - DNA, 25 bp, Homo sapien
tggtgctggttgctacagtaggtag

SEQ ID NO: 1916722 - DNA, 25 bp, Homo sapien
aacatcctcagtgagagtcacgaga

SEQ ID NO: 1916723 - DNA, 25 bp, Homo sapien
ttaaatatccctttgccagacatca

SEQ ID NO: 1916724 - DNA, 25 bp, Homo sapien
tttattccagactgttggaagcaga

SEQ ID NO: 1916725 - DNA, 25 bp, Homo sapien
attaaatatccctttgccagacatc

SEQ ID NO: 1916726 - DNA, 25 bp, Homo sapien
tgttggaagcagattaaatatccct

SEQ ID NO: 1916727 - DNA, 25 bp, Homo sapien
taatggcttctcgactgcacatccc

SEQ ID NO: 1916728 - DNA, 25 bp, Homo sapien
catgaagggagaacctaatttctgt

SEQ ID NO: 1916729 - DNA, 25 bp, Homo sapien
tccttaaatgtgcaatgacccgggt

SEQ ID NO: 1916730 - DNA, 25 bp, Homo sapien
tcagtccccagtccataattctcag

SEQ ID NO: 1916731 - DNA, 25 bp, Homo sapien
tagagggcacctagtgagcatgaca

SEQ ID NO: 1916732 - DNA, 25 bp, Homo sapien
tctactgcagttggcaagcatggaa

SEQ ID NO: 1916733 - DNA, 25 bp, Homo sapien
caagggtccatcaaaccgtgcacct

SEQ ID NO: 1916734 - DNA, 25 bp, Homo sapien
caaaactgtatcaagccaagggtcc

SEQ ID NO: 1916735 - DNA, 25 bp, Homo sapien
tttatttaaaaaaatgagatcaata

SEQ ID NO: 1916736 - DNA, 25 bp, Homo sapien
atttaaaaaaatgagatcaatatca

SEQ ID NO: 1916737 - DNA, 25 bp, Homo sapien
atgtttatttaaaaaaatgagatca

SEQ ID NO: 1916738 - DNA, 25 bp, Homo sapien
tatttaaaaaaatgagatcaatatc

SEQ ID NO: 1916739 - DNA, 25 bp, Homo sapien
taagactggatagatggaataggga

SEQ ID NO: 1916740 - DNA, 25 bp, Homo sapien
gacaagctgtgctaactttcgatag

SEQ ID NO: 1916741 - DNA, 25 bp, Homo sapien
gaggccaaccataagtgtaagactg

SEQ ID NO: 1916742 - DNA, 25 bp, Homo sapien
acatgaaaacagcataagtccactg

SEQ ID NO: 1916743 - DNA, 25 bp, Homo sapien
ggtaaatgctccagtactgcgcaca

SEQ ID NO: 1916744 - DNA, 25 bp, Homo sapien
ttaagaggcctaccctgtcaagagc

SEQ ID NO: 1916745 - DNA, 25 bp, Homo sapien
tgttcacatgaagccctgaggtacc

SEQ ID NO: 1916746 - DNA, 25 bp, Homo sapien
tactttctaacaccggacaggaagc

SEQ ID NO: 1916747 - DNA, 25 bp, Homo sapien
cattttcatgtgtgtcagttactgc

SEQ ID NO: 1916748 - DNA, 25 bp, Homo sapien
tcatctagcggagtttcacttgcag

SEQ ID NO: 1916749 - DNA, 25 bp, Homo sapien
gatacagagtgtgcagatcatctaa

SEQ ID NO: 1916750 - DNA, 25 bp, Homo sapien
gatcatctaattttgaagcaccgtc

SEQ ID NO: 1916751 - DNA, 25 bp, Homo sapien
ggctcatacctgtaatcccagcact

SEQ ID NO: 1916752 - DNA, 25 bp, Homo sapien
aaaagttggttttggtcaggtgcag

SEQ ID NO: 1916753 - DNA, 25 bp, Homo sapien
ttgagaggccaaggtgggtggataa

SEQ ID NO: 1916754 - DNA, 25 bp, Homo sapien
agcagacactttctggtttaaaaag

SEQ ID NO: 1916755 - DNA, 25 bp, Homo sapien
catgattacggctcactgctgcctt

SEQ ID NO: 1916756 - DNA, 25 bp, Homo sapien
ttttttgaagagacagggttcacta

SEQ ID NO: 1916757 - DNA, 25 bp, Homo sapien
caccatgtccagctatattttaaaa

SEQ ID NO: 1916758 - DNA, 25 bp, Homo sapien
ccatgtccagctatattttaaaaat

SEQ ID NO: 1916759 - DNA, 25 bp, Homo sapien
taatactttgatttccccacttgtg

SEQ ID NO: 1916760 - DNA, 25 bp, Homo sapien
caaacggtaacgatgtccactctca

SEQ ID NO: 1916761 - DNA, 25 bp, Homo sapien
taactcatcaaggtacaaacggtaa

SEQ ID NO: 1916762 - DNA, 25 bp, Homo sapien
tttgcaactagcaccagggttacca

SEQ ID NO: 1916763 - DNA, 25 bp, Homo sapien
tccgttgactgccaaaatagcatcc

SEQ ID NO: 1916764 - DNA, 25 bp, Homo sapien
gccctccgcatctatcagcaggttg

SEQ ID NO: 1916765 - DNA, 25 bp, Homo sapien
tatgctttgtgtcccttaggttaac

SEQ ID NO: 1916766 - DNA, 25 bp, Homo sapien
tatcagcaggttgccccggatggat

SEQ ID NO: 1916767 - DNA, 25 bp, Homo sapien
ctcagagatgaggattggaacacca

SEQ ID NO: 1916768 - DNA, 25 bp, Homo sapien
tcagagatgaggattggaacaccat

SEQ ID NO: 1916769 - DNA, 25 bp, Homo sapien
gatgaggattggaacaccatgttct

SEQ ID NO: 1916770 - DNA, 25 bp, Homo sapien
tgaggattggaacaccatgttcttt

SEQ ID NO: 1916771 - DNA, 25 bp, Homo sapien
aattgaaatgccaaggccttcatga

SEQ ID NO: 1916772 - DNA, 25 bp, Homo sapien
tgatcttccttaaggaggagaactt

SEQ ID NO: 1916773 - DNA, 25 bp, Homo sapien
gagaacttttctaattggaccaaca

SEQ ID NO: 1916774 - DNA, 25 bp, Homo sapien
attgaaatgccaaggccttcatgat

SEQ ID NO: 1916775 - DNA, 25 bp, Homo sapien
cagtgaatgccagatctcactcagt

SEQ ID NO: 1916776 - DNA, 25 bp, Homo sapien
cagttgctcaaactaaaagcccaga

SEQ ID NO: 1916777 - DNA, 25 bp, Homo sapien
tctccttggatgaccatagtatctt

SEQ ID NO: 1916778 - DNA, 25 bp, Homo sapien
taaccaaaagcagttagtcaccaat

SEQ ID NO: 1916779 - DNA, 25 bp, Homo sapien
tcaagtcattacgtcctctgcaggc

SEQ ID NO: 1916780 - DNA, 25 bp, Homo sapien
ggtcccttcatatctcgtcctagca

SEQ ID NO: 1916781 - DNA, 25 bp, Homo sapien
tgcaggctcggatcacagttttgtg

SEQ ID NO: 1916782 - DNA, 25 bp, Homo sapien
tcctagcaattgtatctgttggacc

SEQ ID NO: 1916783 - DNA, 25 bp, Homo sapien
ttcctgccagttccttatccaagta

SEQ ID NO: 1916784 - DNA, 25 bp, Homo sapien
tatccaagtacttggcagctagtct

SEQ ID NO: 1916785 - DNA, 25 bp, Homo sapien
cagctatatgtctacgaagggcttc

SEQ ID NO: 1916786 - DNA, 25 bp, Homo sapien
ggcagctagtctcgccccatatact

SEQ ID NO: 1916787 - DNA, 25 bp, Homo sapien
tttcttttttgtttgcctcaagctc

SEQ ID NO: 1916788 - DNA, 25 bp, Homo sapien
ttttgtttgcctcaagctctctttc

SEQ ID NO: 1916789 - DNA, 25 bp, Homo sapien
ttcttttttgtttgcctcaagctct

SEQ ID NO: 1916790 - DNA, 25 bp, Homo sapien
ttttttgtttgcctcaagctctctt

SEQ ID NO: 1916791 - DNA, 25 bp, Homo sapien
taattgcacgccatgggttaccctg

SEQ ID NO: 1916792 - DNA, 25 bp, Homo sapien
gaaaacttgcatttatcctgagcag

SEQ ID NO: 1916793 - DNA, 25 bp, Homo sapien
ctttagcactagaccatgttcctga

SEQ ID NO: 1916794 - DNA, 25 bp, Homo sapien
cctaccttagcaccagagaaattgt

SEQ ID NO: 1916795 - DNA, 25 bp, Homo sapien
cacatgttggatatcatttgggtaa

SEQ ID NO: 1916796 - DNA, 25 bp, Homo sapien
gaatgttaatgtcaaatagctcgaa

SEQ ID NO: 1916797 - DNA, 25 bp, Homo sapien
tcaacataactggtacagtgttctt

SEQ ID NO: 1916798 - DNA, 25 bp, Homo sapien
taacacatcagtactaggaactaat

SEQ ID NO: 1916799 - DNA, 25 bp, Homo sapien
ggtaccagagtcagcactttgacca

SEQ ID NO: 1916800 - DNA, 25 bp, Homo sapien
gggtttctgtcagttcagatttcag

SEQ ID NO: 1916801 - DNA, 25 bp, Homo sapien
tgaatagagtgcagctgtaaaagct

SEQ ID NO: 1916802 - DNA, 25 bp, Homo sapien
caattttgccttaatggtaccagag

SEQ ID NO: 1916803 - DNA, 25 bp, Homo sapien
tcattgctaataaggtttaactgcc

SEQ ID NO: 1916804 - DNA, 25 bp, Homo sapien
gaccatttgaataccctcttttgtg

SEQ ID NO: 1916805 - DNA, 25 bp, Homo sapien
gcctatttttctagagagttgtcca

SEQ ID NO: 1916806 - DNA, 25 bp, Homo sapien
gaagtacctgtgttagtctcttgcc

SEQ ID NO: 1916807 - DNA, 25 bp, Homo sapien
gatacatcataggagggatacccaa

SEQ ID NO: 1916808 - DNA, 25 bp, Homo sapien
tacccaaatgtcagatcatgcagag

SEQ ID NO: 1916809 - DNA, 25 bp, Homo sapien
ctgtctgccaaaattaagagcttga

SEQ ID NO: 1916810 - DNA, 25 bp, Homo sapien
caggctgcgggttagacaagcttga

SEQ ID NO: 1916811 - DNA, 25 bp, Homo sapien
tatgcaatcataggcgctgacctgg

SEQ ID NO: 1916812 - DNA, 25 bp, Homo sapien
taagagctttgatcagattccccta

SEQ ID NO: 1916813 - DNA, 25 bp, Homo sapien
ccaactatggatgtaaaccgagaca

SEQ ID NO: 1916814 - DNA, 25 bp, Homo sapien
tcagttgtcaaaaggtggcctacgg

SEQ ID NO: 1916815 - DNA, 25 bp, Homo sapien
ggtcatcttctgtcgcccctcataa

SEQ ID NO: 1916816 - DNA, 25 bp, Homo sapien
tccgcttggtctggatcgatctctc

SEQ ID NO: 1916817 - DNA, 25 bp, Homo sapien
ctggatcgatctctcccaggagcag

SEQ ID NO: 1916818 - DNA, 25 bp, Homo sapien
cataagtgatgtccgcttggtctgg

SEQ ID NO: 1916819 - DNA, 25 bp, Homo sapien
atccacaaaagctttgtcgaactcc

SEQ ID NO: 1916820 - DNA, 25 bp, Homo sapien
aagctttgtcgaactccttctccag

SEQ ID NO: 1916821 - DNA, 25 bp, Homo sapien
aaagctttgtcgaactccttctcca

SEQ ID NO: 1916822 - DNA, 25 bp, Homo sapien
ctgggcatggaccgcccgccgacat

SEQ ID NO: 1916823 - DNA, 25 bp, Homo sapien
gctgggcatggaccgcccgccgaca

SEQ ID NO: 1916824 - DNA, 25 bp, Homo sapien
tgctgggcatggaccgcccgccgac

SEQ ID NO: 1916825 - DNA, 25 bp, Homo sapien
agcacagtcacagaaccgcaggagt

SEQ ID NO: 1916826 - DNA, 25 bp, Homo sapien
cggcgacacacggaagactcagtca

SEQ ID NO: 1916827 - DNA, 25 bp, Homo sapien
tcgcgccgttaacgccagcagcaca

SEQ ID NO: 1916828 - DNA, 25 bp, Homo sapien
ccgcaggagtaacgaggctgaagct

SEQ ID NO: 1916829 - DNA, 25 bp, Homo sapien
gctcctggccaatcggttttattgc

SEQ ID NO: 1916830 - DNA, 25 bp, Homo sapien
taattccagatcagggaaaatttga

SEQ ID NO: 1916831 - DNA, 25 bp, Homo sapien
tttagaagtcttctgtttagctcct

SEQ ID NO: 1916832 - DNA, 25 bp, Homo sapien
gcttgtaattccagatcagggaaaa

SEQ ID NO: 1916833 - DNA, 25 bp, Homo sapien
tctcctgttaaagcgaactaaatat

SEQ ID NO: 1916834 - DNA, 25 bp, Homo sapien
tagcgagtgtatcctttctacagaa

SEQ ID NO: 1916835 - DNA, 25 bp, Homo sapien
ttgttctcatctacctttacttctt

SEQ ID NO: 1916836 - DNA, 25 bp, Homo sapien
gctagcgagtgtatcctttctacag

SEQ ID NO: 1916837 - DNA, 25 bp, Homo sapien
ttcttgtgcaaccaacctacagaag

SEQ ID NO: 1916838 - DNA, 25 bp, Homo sapien
tatcctcaaggtttatgtatgctgt

SEQ ID NO: 1916839 - DNA, 25 bp, Homo sapien
cagtgatgttaagtgtggtcacatt

SEQ ID NO: 1916840 - DNA, 25 bp, Homo sapien
aactttaggtttctatgaatgtgac

SEQ ID NO: 1916841 - DNA, 25 bp, Homo sapien
agctggagaccaggattgggatgca

SEQ ID NO: 1916842 - DNA, 25 bp, Homo sapien
tggagaccaggattgggatgcaggg

SEQ ID NO: 1916843 - DNA, 25 bp, Homo sapien
caatcttggaaagcagctggagacc

SEQ ID NO: 1916844 - DNA, 25 bp, Homo sapien
ctatcaatcttggaaagcagctgga

SEQ ID NO: 1916845 - DNA, 25 bp, Homo sapien
tctgggaaggagtcgatcagagcct

SEQ ID NO: 1916846 - DNA, 25 bp, Homo sapien
ggaaggagtcgatcagagccttggg

SEQ ID NO: 1916847 - DNA, 25 bp, Homo sapien
ccactgacccgggtctttggcacca

SEQ ID NO: 1916848 - DNA, 25 bp, Homo sapien
gtctccaaaaggagtcccactgacc

SEQ ID NO: 1916849 - DNA, 25 bp, Homo sapien
gactggtctccaaaaggagtcccac

SEQ ID NO: 1916850 - DNA, 25 bp, Homo sapien
ttggcaccaaatgtttcatgtgtcc

SEQ ID NO: 1916851 - DNA, 25 bp, Homo sapien
tctagaagagactggaacagagcct

SEQ ID NO: 1916852 - DNA, 25 bp, Homo sapien
gaactgttctgtatgagaccctcca

SEQ ID NO: 1916853 - DNA, 25 bp, Homo sapien
acttcttagggaggatggcgtctca

SEQ ID NO: 1916854 - DNA, 25 bp, Homo sapien
gacactggtgtctagggagcttcct

SEQ ID NO: 1916855 - DNA, 25 bp, Homo sapien
tcatgtagctgcataaactacagca

SEQ ID NO: 1916856 - DNA, 25 bp, Homo sapien
cataaactacagcaatgggcagtga

SEQ ID NO: 1916857 - DNA, 25 bp, Homo sapien
gtccatcatcagaggagctaccgca

SEQ ID NO: 1916858 - DNA, 25 bp, Homo sapien
gactgtaggcttccctgatcatggc

SEQ ID NO: 1916859 - DNA, 25 bp, Homo sapien
cggtcattgaagtcaggcacaattt

SEQ ID NO: 1916860 - DNA, 25 bp, Homo sapien
aaaaccattctagaggaccacgtcg

SEQ ID NO: 1916861 - DNA, 25 bp, Homo sapien
cttggatgggcagtttgcttcaaat

SEQ ID NO: 1916862 - DNA, 25 bp, Homo sapien
gaggaccacgtcgaagtccacatgg

SEQ ID NO: 1916863 - DNA, 25 bp, Homo sapien
ccattcagacaagtcccgggtcgtt

SEQ ID NO: 1916864 - DNA, 25 bp, Homo sapien
tggaagcgcccatcgcattgaagac

SEQ ID NO: 1916865 - DNA, 25 bp, Homo sapien
tgaagaccacgtgtgccttgctggg

SEQ ID NO: 1916866 - DNA, 25 bp, Homo sapien
gacagtataagacttcctggaccca

SEQ ID NO: 1916867 - DNA, 25 bp, Homo sapien
cagaattccacgctggccaatcgga

SEQ ID NO: 1916868 - DNA, 25 bp, Homo sapien
acgctggccaatcggaactgtccat

SEQ ID NO: 1916869 - DNA, 25 bp, Homo sapien
tcggacccagaagccgcgtcagaat

SEQ ID NO: 1916870 - DNA, 25 bp, Homo sapien
cgggccacgttctcggacccagaag

SEQ ID NO: 1916871 - DNA, 25 bp, Homo sapien
gaagcaggagtatagtttgagttca

SEQ ID NO: 1916872 - DNA, 25 bp, Homo sapien
ccaagatcgcatcagtacactctag

SEQ ID NO: 1916873 - DNA, 25 bp, Homo sapien
caagatcgcatcagtacactctagc

SEQ ID NO: 1916874 - DNA, 25 bp, Homo sapien
tatagtttgagttcaagaggcagag

SEQ ID NO: 1916875 - DNA, 25 bp, Homo sapien
taaacattggattaggcagtcaaaa

SEQ ID NO: 1916876 - DNA, 25 bp, Homo sapien
tgtttgatgggcagtatgccatatt

SEQ ID NO: 1916877 - DNA, 25 bp, Homo sapien
tctgagagttgctctgtattctggg

SEQ ID NO: 1916878 - DNA, 25 bp, Homo sapien
taactcctactacattgaaatgcag

SEQ ID NO: 1916879 - DNA, 25 bp, Homo sapien
tgctagtacaatctccacaacttga

SEQ ID NO: 1916880 - DNA, 25 bp, Homo sapien
ccttctctttatgagttcacctgct

SEQ ID NO: 1916881 - DNA, 25 bp, Homo sapien
cctgctagtacaatctccacaactt

SEQ ID NO: 1916882 - DNA, 25 bp, Homo sapien
aaccttctctttatgagttcacctg

SEQ ID NO: 1916883 - DNA, 25 bp, Homo sapien
caagattaatgtgagcagttctcca

SEQ ID NO: 1916884 - DNA, 25 bp, Homo sapien
tccaagatcctaactggtgggacat

SEQ ID NO: 1916885 - DNA, 25 bp, Homo sapien
gactattcacctcctaacttgaagg

SEQ ID NO: 1916886 - DNA, 25 bp, Homo sapien
aataactgcttactaggaacttcct

SEQ ID NO: 1916887 - DNA, 25 bp, Homo sapien
tggggatgtttgacatggcattcat

SEQ ID NO: 1916888 - DNA, 25 bp, Homo sapien
ctggggatgtttgacatggcattca

SEQ ID NO: 1916889 - DNA, 25 bp, Homo sapien
gctttgaaaggctcgttcatcaaag

SEQ ID NO: 1916890 - DNA, 25 bp, Homo sapien
gttttggcaaactctgagctacagc

SEQ ID NO: 1916891 - DNA, 25 bp, Homo sapien
gagctacagctttaattagcatcat

SEQ ID NO: 1916892 - DNA, 25 bp, Homo sapien
ctttgaaaggctcgttcatcaaagc

SEQ ID NO: 1916893 - DNA, 25 bp, Homo sapien
tggaggcaaccacagagattctgct

SEQ ID NO: 1916894 - DNA, 25 bp, Homo sapien
aattttgtcaagtatggaggcaacc

SEQ ID NO: 1916895 - DNA, 25 bp, Homo sapien
gctttctcggatcagttgtattttc

SEQ ID NO: 1916896 - DNA, 25 bp, Homo sapien
tacttcttcttcgatgtcatgttgc

SEQ ID NO: 1916897 - DNA, 25 bp, Homo sapien
cttgccaacatctgtcattgccagc

SEQ ID NO: 1916898 - DNA, 25 bp, Homo sapien
tgccaacatctgtcattgccagcat

SEQ ID NO: 1916899 - DNA, 25 bp, Homo sapien
ttgccaacatctgtcattgccagca

SEQ ID NO: 1916900 - DNA, 25 bp, Homo sapien
caaatgaagccaccattcatcataa

SEQ ID NO: 1916901 - DNA, 25 bp, Homo sapien
gcaagtggctgctaaaaaatagact

SEQ ID NO: 1916902 - DNA, 25 bp, Homo sapien
catatcgacagcagcgcaagtggct

SEQ ID NO: 1916903 - DNA, 25 bp, Homo sapien
agtccccagtcatgtgcaactgaaa

SEQ ID NO: 1916904 - DNA, 25 bp, Homo sapien
tcactccttctctcttcctgcccct

SEQ ID NO: 1916905 - DNA, 25 bp, Homo sapien
gggtgtagcctctgcgtgacagtag

SEQ ID NO: 1916906 - DNA, 25 bp, Homo sapien
ggtgtagcctctgcgtgacagtaga

SEQ ID NO: 1916907 - DNA, 25 bp, Homo sapien
catcattcacatggcagatggtaac

SEQ ID NO: 1916908 - DNA, 25 bp, Homo sapien
cccaagaagcatcattcacatggca

SEQ ID NO: 1916909 - DNA, 25 bp, Homo sapien
aggagggactctggcatcccaagaa

SEQ ID NO: 1916910 - DNA, 25 bp, Homo sapien
tgcccagttttctgattggtgttgt

SEQ ID NO: 1916911 - DNA, 25 bp, Homo sapien
ttacaacagcacctcactacctggt

SEQ ID NO: 1916912 - DNA, 25 bp, Homo sapien
tttacaacagcacctcactacctgg

SEQ ID NO: 1916913 - DNA, 25 bp, Homo sapien
tacaacagcacctcactacctggta

SEQ ID NO: 1916914 - DNA, 25 bp, Homo sapien
gaaggtaataaattataatactcac

SEQ ID NO: 1916915 - DNA, 25 bp, Homo sapien
ggaaggtaataaattataatactca

SEQ ID NO: 1916916 - DNA, 25 bp, Homo sapien
tctaggaaggtaataaattataata

SEQ ID NO: 1916917 - DNA, 25 bp, Homo sapien
tgccttgaggccttccattctctgt

SEQ ID NO: 1916918 - DNA, 25 bp, Homo sapien
cagccttgaataagcctaaatggaa

SEQ ID NO: 1916919 - DNA, 25 bp, Homo sapien
gaatgtttaagtctgagtccgaaaa

SEQ ID NO: 1916920 - DNA, 25 bp, Homo sapien
gttaggcacaaaattaggagctcat

SEQ ID NO: 1916921 - DNA, 25 bp, Homo sapien
ctgggttggaggtagactattcagc

SEQ ID NO: 1916922 - DNA, 25 bp, Homo sapien
tagtggctatagagtgattaggctc

SEQ ID NO: 1916923 - DNA, 25 bp, Homo sapien
tgccataattatgtcaatgagagcc

SEQ ID NO: 1916924 - DNA, 25 bp, Homo sapien
gcagagtgcttggatgtggctcccc

SEQ ID NO: 1916925 - DNA, 25 bp, Homo sapien
tatttagcatgctgatgggcttggc

SEQ ID NO: 1916926 - DNA, 25 bp, Homo sapien
tataggatgcgtcaatacaaaggga

SEQ ID NO: 1916927 - DNA, 25 bp, Homo sapien
ccgttcatggaagtaagagattggg

SEQ ID NO: 1916928 - DNA, 25 bp, Homo sapien
aatgacatgatcagagatgtgccca

SEQ ID NO: 1916929 - DNA, 25 bp, Homo sapien
gatgtgcccaaatatgatactctgg

SEQ ID NO: 1916930 - DNA, 25 bp, Homo sapien
gtctttgacaggactaggacactgt

SEQ ID NO: 1916931 - DNA, 25 bp, Homo sapien
tcagatggtggaattcaaagcatgg

SEQ ID NO: 1916932 - DNA, 25 bp, Homo sapien
caggtctgtgtgcttatgggaatgc

SEQ ID NO: 1916933 - DNA, 25 bp, Homo sapien
tccatagtacagaggagacactgag

SEQ ID NO: 1916934 - DNA, 25 bp, Homo sapien
ggggaagcccagatgccagcgggct

SEQ ID NO: 1916935 - DNA, 25 bp, Homo sapien
agctctttgtgacgccgggttcccg

SEQ ID NO: 1916936 - DNA, 25 bp, Homo sapien
gaggggaagcccagatgccagcggg

SEQ ID NO: 1916937 - DNA, 25 bp, Homo sapien
cagcgggctcagtggagctctttgt

SEQ ID NO: 1916938 - DNA, 25 bp, Homo sapien
tgtcctccacagatagccccgcaga

SEQ ID NO: 1916939 - DNA, 25 bp, Homo sapien
ccctgtcctccacagatagccccgc

SEQ ID NO: 1916940 - DNA, 25 bp, Homo sapien
cagaccctcggaacgcgggtggacg

SEQ ID NO: 1916941 - DNA, 25 bp, Homo sapien
agatagccccgcagaccctcggaac

SEQ ID NO: 1916942 - DNA, 25 bp, Homo sapien
tgccagctcggcgaatggccttcaa

SEQ ID NO: 1916943 - DNA, 25 bp, Homo sapien
cacaactgccagctcggcgaatggc

SEQ ID NO: 1916944 - DNA, 25 bp, Homo sapien
ctttgtagctttgcgaaattaaccg

SEQ ID NO: 1916945 - DNA, 25 bp, Homo sapien
agctcggcgaatggccttcaagccc

SEQ ID NO: 1916946 - DNA, 25 bp, Homo sapien
tatgttgcttcactaaagcagggtg

SEQ ID NO: 1916947 - DNA, 25 bp, Homo sapien
tcttttcctctctcgagtatatgtt

SEQ ID NO: 1916948 - DNA, 25 bp, Homo sapien
gtgtgatgtgatagaaacttgcttt

SEQ ID NO: 1916949 - DNA, 25 bp, Homo sapien
cctctctcgagtatatgttgcttca

SEQ ID NO: 1916950 - DNA, 25 bp, Homo sapien
tgggctctatggtaggtgtcatcca

SEQ ID NO: 1916951 - DNA, 25 bp, Homo sapien
atgtgcagggtggtttgcccaagat

SEQ ID NO: 1916952 - DNA, 25 bp, Homo sapien
tgcccaagatgtagttctgctgagg

SEQ ID NO: 1916953 - DNA, 25 bp, Homo sapien
ttctttcagtctggacacatctgtc

SEQ ID NO: 1916954 - DNA, 25 bp, Homo sapien
ctcttctgcatatagggactttctg

SEQ ID NO: 1916955 - DNA, 25 bp, Homo sapien
tgacagtccaagtccctccaaagtc

SEQ ID NO: 1916956 - DNA, 25 bp, Homo sapien
agtctactgtcctcacatgctgtgt

SEQ ID NO: 1916957 - DNA, 25 bp, Homo sapien
gatgtgctgccaagtgtggtgttta

SEQ ID NO: 1916958 - DNA, 25 bp, Homo sapien
tcctgctgagtcactaaggctcctg

SEQ ID NO: 1916959 - DNA, 25 bp, Homo sapien
acctgcccccctgattggcattttg

SEQ ID NO: 1916960 - DNA, 25 bp, Homo sapien
gagtcactaaggctcctgagaagct

SEQ ID NO: 1916961 - DNA, 25 bp, Homo sapien
gaggggcggattcctgctgagtcac

SEQ ID NO: 1916962 - DNA, 25 bp, Homo sapien
tcctttttggtaattctcagtggtg

SEQ ID NO: 1916963 - DNA, 25 bp, Homo sapien
cctttttggtaattctcagtggtga

SEQ ID NO: 1916964 - DNA, 25 bp, Homo sapien
ctttttggtaattctcagtggtgaa

SEQ ID NO: 1916965 - DNA, 25 bp, Homo sapien
aggtcatacttagttctttgcctgc

SEQ ID NO: 1916966 - DNA, 25 bp, Homo sapien
agagttgagtgggatggctttgcca

SEQ ID NO: 1916967 - DNA, 25 bp, Homo sapien
ggcagagttgagtgggatggctttg

SEQ ID NO: 1916968 - DNA, 25 bp, Homo sapien
ttgccaggtcatacttagttctttg

SEQ ID NO: 1916969 - DNA, 25 bp, Homo sapien
aatttgatccctggtcatggtttat

SEQ ID NO: 1916970 - DNA, 25 bp, Homo sapien
gatccctggtcatggtttatctcct

SEQ ID NO: 1916971 - DNA, 25 bp, Homo sapien
ttgatccctggtcatggtttatctc

SEQ ID NO: 1916972 - DNA, 25 bp, Homo sapien
tatctccttcttcgttattttaaga

SEQ ID NO: 1916973 - DNA, 25 bp, Homo sapien
ttcagttctaacacagtcaatagtc

SEQ ID NO: 1916974 - DNA, 25 bp, Homo sapien
gggtcttgccgatcctgttaatgga

SEQ ID NO: 1916975 - DNA, 25 bp, Homo sapien
cctgtcaaatgtaccgatcttgtta

SEQ ID NO: 1916976 - DNA, 25 bp, Homo sapien
tcaatagtcaagtgcctctgagaca

SEQ ID NO: 1916977 - DNA, 25 bp, Homo sapien
tctgcattccgatggattgagtcct

SEQ ID NO: 1916978 - DNA, 25 bp, Homo sapien
gattgccaatggactgcgcctaaag

SEQ ID NO: 1916979 - DNA, 25 bp, Homo sapien
taaagctatccattaagcccaaggg

SEQ ID NO: 1916980 - DNA, 25 bp, Homo sapien
gcttccatggtgtgatctgcattcc

SEQ ID NO: 1916981 - DNA, 25 bp, Homo sapien
gcatccaggccttattaacgggcca

SEQ ID NO: 1916982 - DNA, 25 bp, Homo sapien
cagtgcctggaatctagtcagttca

SEQ ID NO: 1916983 - DNA, 25 bp, Homo sapien
taaaactcgaggttgaaagcatgac

SEQ ID NO: 1916984 - DNA, 25 bp, Homo sapien
gagtgctgctttactaggcaacgcg

SEQ ID NO: 1916985 - DNA, 25 bp, Homo sapien
tgttggagatgtgatcattacccaa

SEQ ID NO: 1916986 - DNA, 25 bp, Homo sapien
tagctgatggctgaagctatggtac

SEQ ID NO: 1916987 - DNA, 25 bp, Homo sapien
caagcatcattggagggcttctgca

SEQ ID NO: 1916988 - DNA, 25 bp, Homo sapien
aatgcctctgtatggttctattccc

SEQ ID NO: 1916989 - DNA, 25 bp, Homo sapien
gaagtgcactgaacatctgcacata

SEQ ID NO: 1916990 - DNA, 25 bp, Homo sapien
gcttgtggaagtgcactgaacatct

SEQ ID NO: 1916991 - DNA, 25 bp, Homo sapien
aaaagcttgtggaagtgcactgaac

SEQ ID NO: 1916992 - DNA, 25 bp, Homo sapien
gaacatctgcacataatgcaaccat

SEQ ID NO: 1916993 - DNA, 25 bp, Homo sapien
agtcagctgcaagctcgatcgacat

SEQ ID NO: 1916994 - DNA, 25 bp, Homo sapien
gagtcagctgcaagctcgatcgaca

SEQ ID NO: 1916995 - DNA, 25 bp, Homo sapien
tcacagagctaattagaggcaaggc

SEQ ID NO: 1916996 - DNA, 25 bp, Homo sapien
tacaggtggttaaatggcagttcac

SEQ ID NO: 1916997 - DNA, 25 bp, Homo sapien
caagtggacagttttgcccagggtc

SEQ ID NO: 1916998 - DNA, 25 bp, Homo sapien
tgctcagtaaatcccagaatgccac

SEQ ID NO: 1916999 - DNA, 25 bp, Homo sapien
gggactttgaagctcgtccaggtgc

SEQ ID NO: 1917000 - DNA, 25 bp, Homo sapien
tttctgtgtatatgacattcttggt

SEQ ID NO: 1917001 - DNA, 25 bp, Homo sapien
cgtccaggtgccagttttctgtgta

SEQ ID NO: 1917002 - DNA, 25 bp, Homo sapien
gactttgaagctcgtccaggtgcca

SEQ ID NO: 1917003 - DNA, 25 bp, Homo sapien
tcttgggggttggtgtggtcatgac

SEQ ID NO: 1917004 - DNA, 25 bp, Homo sapien
cagatatcttcttgggggttggtgt

SEQ ID NO: 1917005 - DNA, 25 bp, Homo sapien
gggttggtgtggtcatgacaggagg

SEQ ID NO: 1917006 - DNA, 25 bp, Homo sapien
ttggtgtggtcatgacaggaggcag

SEQ ID NO: 1917007 - DNA, 25 bp, Homo sapien
tgagttctacttcttgagaattcag

SEQ ID NO: 1917008 - DNA, 25 bp, Homo sapien
agctcaacctttgctgtttcccaca

SEQ ID NO: 1917009 - DNA, 25 bp, Homo sapien
tacttcttgagaattcagctcaacc

SEQ ID NO: 1917010 - DNA, 25 bp, Homo sapien
tcagtgagttctacttcttgagaat

SEQ ID NO: 1917011 - DNA, 25 bp, Homo sapien
gtaactggttcaagctatcaggcat

SEQ ID NO: 1917012 - DNA, 25 bp, Homo sapien
ttccacatgtaactggttcaagcta

SEQ ID NO: 1917013 - DNA, 25 bp, Homo sapien
cacatgtaactggttcaagctatca

SEQ ID NO: 1917014 - DNA, 25 bp, Homo sapien
catgtaactggttcaagctatcagg

SEQ ID NO: 1917015 - DNA, 25 bp, Homo sapien
gttaatactctctttgggaatccca

SEQ ID NO: 1917016 - DNA, 25 bp, Homo sapien
gaaaggccactatgggagaagtcag

SEQ ID NO: 1917017 - DNA, 25 bp, Homo sapien
tattgacatcactcttggttctctg

SEQ ID NO: 1917018 - DNA, 25 bp, Homo sapien
tcccagcgttgttgaaattttgcag

SEQ ID NO: 1917019 - DNA, 25 bp, Homo sapien
aactgaagcgtgcaggtgatgtgcc

SEQ ID NO: 1917020 - DNA, 25 bp, Homo sapien
gtgccattaatcttgcatctttttt

SEQ ID NO: 1917021 - DNA, 25 bp, Homo sapien
tctcttgggaactgaagcgtgcagg

SEQ ID NO: 1917022 - DNA, 25 bp, Homo sapien
tgaagcgtgcaggtgatgtgccatt

SEQ ID NO: 1917023 - DNA, 25 bp, Homo sapien
tcacatgcacataaaagccctcgca

SEQ ID NO: 1917024 - DNA, 25 bp, Homo sapien
cataaaagccctcgcaactgattcc

SEQ ID NO: 1917025 - DNA, 25 bp, Homo sapien
tgattcccgtgtctttgggatttac

SEQ ID NO: 1917026 - DNA, 25 bp, Homo sapien
ttgggatttactggggatcttctgc

SEQ ID NO: 1917027 - DNA, 25 bp, Homo sapien
ctgtgttaaccagatgagagcccca

SEQ ID NO: 1917028 - DNA, 25 bp, Homo sapien
ttaaccagatgagagccccatgagg

SEQ ID NO: 1917029 - DNA, 25 bp, Homo sapien
tgtgttaaccagatgagagccccat

SEQ ID NO: 1917030 - DNA, 25 bp, Homo sapien
tgttaaccagatgagagccccatga

SEQ ID NO: 1917031 - DNA, 25 bp, Homo sapien
tctgttttggttgtttaacattgta

SEQ ID NO: 1917032 - DNA, 25 bp, Homo sapien
ctgttctgttttggttgtttaacat

SEQ ID NO: 1917033 - DNA, 25 bp, Homo sapien
cctttcagcattggtgcagcttggt

SEQ ID NO: 1917034 - DNA, 25 bp, Homo sapien
gctggcatttgagtccctgctggcc

SEQ ID NO: 1917035 - DNA, 25 bp, Homo sapien
gagacatctgatgttcctctgttcc

SEQ ID NO: 1917036 - DNA, 25 bp, Homo sapien
tggaaatgtcactcagcctgcctga

SEQ ID NO: 1917037 - DNA, 25 bp, Homo sapien
ctgaagtaatagtttcatcaattca

SEQ ID NO: 1917038 - DNA, 25 bp, Homo sapien
tagtttcatcaattcagtaagtggg

SEQ ID NO: 1917039 - DNA, 25 bp, Homo sapien
cagctcctgaagtaatagtttcatc

SEQ ID NO: 1917040 - DNA, 25 bp, Homo sapien
gtttcatcaattcagtaagtgggga

SEQ ID NO: 1917041 - DNA, 25 bp, Homo sapien
tctttagcagctggtagcaaaagtc

SEQ ID NO: 1917042 - DNA, 25 bp, Homo sapien
tttagcagctggtagcaaaagtcag

SEQ ID NO: 1917043 - DNA, 25 bp, Homo sapien
tagcagctggtagcaaaagtcagaa

SEQ ID NO: 1917044 - DNA, 25 bp, Homo sapien
ctctttagcagctggtagcaaaagt

SEQ ID NO: 1917045 - DNA, 25 bp, Homo sapien
aaggttcatccttacgtatgcccaa

SEQ ID NO: 1917046 - DNA, 25 bp, Homo sapien
ttggagccccatagagcagccatga

SEQ ID NO: 1917047 - DNA, 25 bp, Homo sapien
agaaggttcatccttacgtatgccc

SEQ ID NO: 1917048 - DNA, 25 bp, Homo sapien
ggttcatccttacgtatgcccaaaa

SEQ ID NO: 1917049 - DNA, 25 bp, Homo sapien
tgcacctcagaagctcatccgtggg

SEQ ID NO: 1917050 - DNA, 25 bp, Homo sapien
agaagctcatccgtgggctttgagg

SEQ ID NO: 1917051 - DNA, 25 bp, Homo sapien
ggctttgaggctaaattcctcctct

SEQ ID NO: 1917052 - DNA, 25 bp, Homo sapien
cactgctgtgcacctcagaagctca

SEQ ID NO: 1917053 - DNA, 25 bp, Homo sapien
gaagcctgacagggcacattccatc

SEQ ID NO: 1917054 - DNA, 25 bp, Homo sapien
acattccatccacttgccgaacaca

SEQ ID NO: 1917055 - DNA, 25 bp, Homo sapien
agcctgacagggcacattccatcca

SEQ ID NO: 1917056 - DNA, 25 bp, Homo sapien
cctgacagggcacattccatccact

SEQ ID NO: 1917057 - DNA, 25 bp, Homo sapien
aatgcttcatattccttcacaagaa

SEQ ID NO: 1917058 - DNA, 25 bp, Homo sapien
aaacacattgaaatgcttcatattc

SEQ ID NO: 1917059 - DNA, 25 bp, Homo sapien
aaaagtaaacacattgaaatgcttc

SEQ ID NO: 1917060 - DNA, 25 bp, Homo sapien
tgcttcatattccttcacaagaata

SEQ ID NO: 1917061 - DNA, 25 bp, Homo sapien
tgaccacatagcaggcatgcacaga

SEQ ID NO: 1917062 - DNA, 25 bp, Homo sapien
tagaaacaaggtgcactgaccacat

SEQ ID NO: 1917063 - DNA, 25 bp, Homo sapien
ctgctagaaacaaggtgcactgacc

SEQ ID NO: 1917064 - DNA, 25 bp, Homo sapien
aactatctgcagcaacaggagatga

SEQ ID NO: 1917065 - DNA, 25 bp, Homo sapien
aatcctatgagggagagatttcccc

SEQ ID NO: 1917066 - DNA, 25 bp, Homo sapien
agtgttgccatgaaatcctatgagg

SEQ ID NO: 1917067 - DNA, 25 bp, Homo sapien
tagagtgcaattaaagggctgttga

SEQ ID NO: 1917068 - DNA, 25 bp, Homo sapien
gggctgttgataattttgtgtctca

SEQ ID NO: 1917069 - DNA, 25 bp, Homo sapien
ccttgtcacagtctctggaactgtg

SEQ ID NO: 1917070 - DNA, 25 bp, Homo sapien
tgatttggccaaagccaggacagga

SEQ ID NO: 1917071 - DNA, 25 bp, Homo sapien
ggctcagagcactagggtaccaatc

SEQ ID NO: 1917072 - DNA, 25 bp, Homo sapien
catttggcctgctgaccgaggtaca

SEQ ID NO: 1917073 - DNA, 25 bp, Homo sapien
tacatgtcaactgcagaaggtgagg

SEQ ID NO: 1917074 - DNA, 25 bp, Homo sapien
gagaattccataggtgcagaaaccc

SEQ ID NO: 1917075 - DNA, 25 bp, Homo sapien
aagcaaggtaggactggagaactga

SEQ ID NO: 1917076 - DNA, 25 bp, Homo sapien
agaattccataggtgcagaaaccct

SEQ ID NO: 1917077 - DNA, 25 bp, Homo sapien
agagagaattccataggtgcagaaa

SEQ ID NO: 1917078 - DNA, 25 bp, Homo sapien
catatgtggagcagatttcccagaa

SEQ ID NO: 1917079 - DNA, 25 bp, Homo sapien
ctggctctaccatatgtggagcaga

SEQ ID NO: 1917080 - DNA, 25 bp, Homo sapien
tccaagctccaccacagtgtggaat

SEQ ID NO: 1917081 - DNA, 25 bp, Homo sapien
aaatccagtccaaggaatttccaag

SEQ ID NO: 1917082 - DNA, 25 bp, Homo sapien
taaagctgccaacagaccactctgc

SEQ ID NO: 1917083 - DNA, 25 bp, Homo sapien
gccacacttgaagcacaggtatact

SEQ ID NO: 1917084 - DNA, 25 bp, Homo sapien
ttaaagctgccaacagaccactctg

SEQ ID NO: 1917085 - DNA, 25 bp, Homo sapien
acacttgaagcacaggtatactttt

SEQ ID NO: 1917086 - DNA, 25 bp, Homo sapien
tgcaatatacaaggttgagcagagt

SEQ ID NO: 1917087 - DNA, 25 bp, Homo sapien
tctgggtcacgatatctgggctgct

SEQ ID NO: 1917088 - DNA, 25 bp, Homo sapien
tgagcagagtgagtcttctcctcag

SEQ ID NO: 1917089 - DNA, 25 bp, Homo sapien
gaaatactcatatgacctcctgggc

SEQ ID NO: 1917090 - DNA, 25 bp, Homo sapien
cccaaaatgccaatgctgaaattgc

SEQ ID NO: 1917091 - DNA, 25 bp, Homo sapien
tgccaatgctgaaattgcttctctg

SEQ ID NO: 1917092 - DNA, 25 bp, Homo sapien
aatgccaatgctgaaattgcttctc

SEQ ID NO: 1917093 - DNA, 25 bp, Homo sapien
aatgctgaaattgcttctctgtcaa

SEQ ID NO: 1917094 - DNA, 25 bp, Homo sapien
tttctatttctttctccctcaccat

SEQ ID NO: 1917095 - DNA, 25 bp, Homo sapien
tttgagagcttgtttttatttctat

SEQ ID NO: 1917096 - DNA, 25 bp, Homo sapien
attttgagagcttgtttttatttct

SEQ ID NO: 1917097 - DNA, 25 bp, Homo sapien
tatttctatttctttctccctcacc

SEQ ID NO: 1917098 - DNA, 25 bp, Homo sapien
cagaaaataataccccaagtgtggc

SEQ ID NO: 1917099 - DNA, 25 bp, Homo sapien
tgtggcatgctgagtactttaatct

SEQ ID NO: 1917100 - DNA, 25 bp, Homo sapien
ctttaatctgaaggagattggaagg

SEQ ID NO: 1917101 - DNA, 25 bp, Homo sapien
taccccaagtgtggcgctgtggcat

SEQ ID NO: 1917102 - DNA, 25 bp, Homo sapien
gacaccaggcttgatttatctgaga

SEQ ID NO: 1917103 - DNA, 25 bp, Homo sapien
ccactgcggaatggctccactgcct

SEQ ID NO: 1917104 - DNA, 25 bp, Homo sapien
ctcatggtgcactgccagcaagaag

SEQ ID NO: 1917105 - DNA, 25 bp, Homo sapien
gtggctgccatcatgctcaactgca

SEQ ID NO: 1917106 - DNA, 25 bp, Homo sapien
tcattggaatacagctaagagcaga

SEQ ID NO: 1917107 - DNA, 25 bp, Homo sapien
cacctcattatcatggtcattggaa

SEQ ID NO: 1917108 - DNA, 25 bp, Homo sapien
gattctgagagtggtccaaatacag

SEQ ID NO: 1917109 - DNA, 25 bp, Homo sapien
ttcatagggttggaaagaccacctc

SEQ ID NO: 1917110 - DNA, 25 bp, Homo sapien
caagaagccactctgatgttcaggg

SEQ ID NO: 1917111 - DNA, 25 bp, Homo sapien
tccatgtagcagaggatgttagctc

SEQ ID NO: 1917112 - DNA, 25 bp, Homo sapien
gaagttcaagcagtggagctcctcc

SEQ ID NO: 1917113 - DNA, 25 bp, Homo sapien
gagtgtacataagtgaaggccctgg

SEQ ID NO: 1917114 - DNA, 25 bp, Homo sapien
ccccgaaccaaagatgttcccatgg

SEQ ID NO: 1917115 - DNA, 25 bp, Homo sapien
ttataagacctctgcaccctcatct

SEQ ID NO: 1917116 - DNA, 25 bp, Homo sapien
tcccattcccggatctactcgtaaa

SEQ ID NO: 1917117 - DNA, 25 bp, Homo sapien
ggctgggtgtactgtccccgaacca

SEQ ID NO: 1917118 - DNA, 25 bp, Homo sapien
ggcatcgttgtctgcatcctgggaa

SEQ ID NO: 1917119 - DNA, 25 bp, Homo sapien
caaggctgtgcatttcatcggcatc

SEQ ID NO: 1917120 - DNA, 25 bp, Homo sapien
tcttcctgctgatccggtacaaggc

SEQ ID NO: 1917121 - DNA, 25 bp, Homo sapien
gagtcttcggatgttcaccaggttc

SEQ ID NO: 1917122 - DNA, 25 bp, Homo sapien
tgcgggtgaggccaaggcaagaaat

SEQ ID NO: 1917123 - DNA, 25 bp, Homo sapien
ccaaggcaagaaatggaatgttcat

SEQ ID NO: 1917124 - DNA, 25 bp, Homo sapien
cgggtgaggccaaggcaagaaatgg

SEQ ID NO: 1917125 - DNA, 25 bp, Homo sapien
aggccaaggcaagaaatggaatgtt

SEQ ID NO: 1917126 - DNA, 25 bp, Homo sapien
gatttgaggatgagagattggccac

SEQ ID NO: 1917127 - DNA, 25 bp, Homo sapien
cagcaatgaattcgtccacccaagg

SEQ ID NO: 1917128 - DNA, 25 bp, Homo sapien
tgagagttcacagtatgccaggaca

SEQ ID NO: 1917129 - DNA, 25 bp, Homo sapien
tagctgtaaactcctgcttgggacc

SEQ ID NO: 1917130 - DNA, 25 bp, Homo sapien
gctgactggacagtaaagccccatg

SEQ ID NO: 1917131 - DNA, 25 bp, Homo sapien
tgctgactggacagtaaagccccat

SEQ ID NO: 1917132 - DNA, 25 bp, Homo sapien
tcattccgctgtctgcaacagctct

SEQ ID NO: 1917133 - DNA, 25 bp, Homo sapien
tgcctcttgcgctgactgctgtgct

SEQ ID NO: 1917134 - DNA, 25 bp, Homo sapien
gcagtaaatctatagccatccacag

SEQ ID NO: 1917135 - DNA, 25 bp, Homo sapien
tattgaatccagagcagtaaatcta

SEQ ID NO: 1917136 - DNA, 25 bp, Homo sapien
acaacattattgaatccagagcagt

SEQ ID NO: 1917137 - DNA, 25 bp, Homo sapien
taaatctatagccatccacagaaag

SEQ ID NO: 1917138 - DNA, 25 bp, Homo sapien
tgctcatgaaaccagacattccagg

SEQ ID NO: 1917139 - DNA, 25 bp, Homo sapien
tgttggtgatcagtttcacacccgc

SEQ ID NO: 1917140 - DNA, 25 bp, Homo sapien
tataaccattctgtgagtcctcagc

SEQ ID NO: 1917141 - DNA, 25 bp, Homo sapien
cttacagtcatatgcctggtttcct

SEQ ID NO: 1917142 - DNA, 25 bp, Homo sapien
tttggcattctgactaaggcactcg

SEQ ID NO: 1917143 - DNA, 25 bp, Homo sapien
gatacgaatacagaatccatttggc

SEQ ID NO: 1917144 - DNA, 25 bp, Homo sapien
gaggccaagggccatggttgctact

SEQ ID NO: 1917145 - DNA, 25 bp, Homo sapien
gaaggcctcataaaccaaactggga

SEQ ID NO: 1917146 - DNA, 25 bp, Homo sapien
agaggcaggggtttgtgggggtcat

SEQ ID NO: 1917147 - DNA, 25 bp, Homo sapien
tggagaaagaaggagaggcaggggt

SEQ ID NO: 1917148 - DNA, 25 bp, Homo sapien
aagaaggagaggcaggggtttgtgg

SEQ ID NO: 1917149 - DNA, 25 bp, Homo sapien
gagaggcaggggtttgtgggggtca

SEQ ID NO: 1917150 - DNA, 25 bp, Homo sapien
ttggtatttgtcagtagattctgta

SEQ ID NO: 1917151 - DNA, 25 bp, Homo sapien
attctgtagctttcccatgtttaat

SEQ ID NO: 1917152 - DNA, 25 bp, Homo sapien
tggtatttgtcagtagattctgtag

SEQ ID NO: 1917153 - DNA, 25 bp, Homo sapien
agattctgtagctttcccatgttta

SEQ ID NO: 1917154 - DNA, 25 bp, Homo sapien
cctctggtctcagtatcaataaaag

SEQ ID NO: 1917155 - DNA, 25 bp, Homo sapien
aatggatcatatttccctgctaaac

SEQ ID NO: 1917156 - DNA, 25 bp, Homo sapien
gtacgttctcaattgcaacccacag

SEQ ID NO: 1917157 - DNA, 25 bp, Homo sapien
tcttgtaatggatcatatttccctg

SEQ ID NO: 1917158 - DNA, 25 bp, Homo sapien
accatccaagataaagagcatgaca

SEQ ID NO: 1917159 - DNA, 25 bp, Homo sapien
taccatccaagataaagagcatgac

SEQ ID NO: 1917160 - DNA, 25 bp, Homo sapien
gctaccatccaagataaagagcatg

SEQ ID NO: 1917161 - DNA, 25 bp, Homo sapien
cagctaccatccaagataaagagca

SEQ ID NO: 1917162 - DNA, 25 bp, Homo sapien
cccaccagtgtccagggaactgatg

SEQ ID NO: 1917163 - DNA, 25 bp, Homo sapien
ctgtgatgtggccatcactgctgat

SEQ ID NO: 1917164 - DNA, 25 bp, Homo sapien
gtatggctagtgacacccaccagtg

SEQ ID NO: 1917165 - DNA, 25 bp, Homo sapien
tgtctcctgatagtcccactccagg

SEQ ID NO: 1917166 - DNA, 25 bp, Homo sapien
gttctgcctctccgggagtgctctc

SEQ ID NO: 1917167 - DNA, 25 bp, Homo sapien
cccaccctaccaggtctgaattctc

SEQ ID NO: 1917168 - DNA, 25 bp, Homo sapien
gaattctcccggtgtctctgcaggt

SEQ ID NO: 1917169 - DNA, 25 bp, Homo sapien
aatcccattaggtccaagacactgg

SEQ ID NO: 1917170 - DNA, 25 bp, Homo sapien
agttttacagacatccgagggtggg

SEQ ID NO: 1917171 - DNA, 25 bp, Homo sapien
ccagcgtcttcagggttgcgtaaga

SEQ ID NO: 1917172 - DNA, 25 bp, Homo sapien
gcagtccggcaatgaaaacaggcac

SEQ ID NO: 1917173 - DNA, 25 bp, Homo sapien
aaggccagcggttgtgtttgagcca

SEQ ID NO: 1917174 - DNA, 25 bp, Homo sapien
acacatagcaggcatcctatgaatt

SEQ ID NO: 1917175 - DNA, 25 bp, Homo sapien
ttatcttcctagcaccagacacata

SEQ ID NO: 1917176 - DNA, 25 bp, Homo sapien
tcttcctagcaccagacacatagca

SEQ ID NO: 1917177 - DNA, 25 bp, Homo sapien
acatagcaggcatcctatgaatttc

SEQ ID NO: 1917178 - DNA, 25 bp, Homo sapien
tttgggtatcaaggtcatgctgatg

SEQ ID NO: 1917179 - DNA, 25 bp, Homo sapien
ctttcattatgtcaaggtatgttcc

SEQ ID NO: 1917180 - DNA, 25 bp, Homo sapien
tccctattaagtatggcactagctg

SEQ ID NO: 1917181 - DNA, 25 bp, Homo sapien
cattctgctgatatgttgtatcact

SEQ ID NO: 1917182 - DNA, 25 bp, Homo sapien
cctgctacaggccattggtgtggaa

SEQ ID NO: 1917183 - DNA, 25 bp, Homo sapien
tgcactttatttctagagggctctg

SEQ ID NO: 1917184 - DNA, 25 bp, Homo sapien
gcataggcatcttacccaattgagt

SEQ ID NO: 1917185 - DNA, 25 bp, Homo sapien
taggctgagatcttcattggtggca

SEQ ID NO: 1917186 - DNA, 25 bp, Homo sapien
catgcgagtatgtagggtcagcagc

SEQ ID NO: 1917187 - DNA, 25 bp, Homo sapien
ggagtatccagatcctaagctgcca

SEQ ID NO: 1917188 - DNA, 25 bp, Homo sapien
gagaacagtcttccatacaggcaag

SEQ ID NO: 1917189 - DNA, 25 bp, Homo sapien
caatggacctggtagtggatggcat

SEQ ID NO: 1917190 - DNA, 25 bp, Homo sapien
agcctagaaaggtgtgtgatgtaag

SEQ ID NO: 1917191 - DNA, 25 bp, Homo sapien
cataatggatcttggtatctgtcag

SEQ ID NO: 1917192 - DNA, 25 bp, Homo sapien
atgtaagagatgttgttggcaaaca

SEQ ID NO: 1917193 - DNA, 25 bp, Homo sapien
tgtgtgatgtaagagatgttgttgg

SEQ ID NO: 1917194 - DNA, 25 bp, Homo sapien
tggacttgcccctcgtgccaacctt

SEQ ID NO: 1917195 - DNA, 25 bp, Homo sapien
ccttggacttgcccctcgtgccaac

SEQ ID NO: 1917196 - DNA, 25 bp, Homo sapien
cttgtgggggtcaatgaccttggac

SEQ ID NO: 1917197 - DNA, 25 bp, Homo sapien
ttgtgggggtcaatgaccttggact

SEQ ID NO: 1917198 - DNA, 25 bp, Homo sapien
gaaggtcgagtttggcagttttgtc

SEQ ID NO: 1917199 - DNA, 25 bp, Homo sapien
gagaaggtcgagtttggcagttttg

SEQ ID NO: 1917200 - DNA, 25 bp, Homo sapien
gtcgagtttggcagttttgtccatt

SEQ ID NO: 1917201 - DNA, 25 bp, Homo sapien
aggtcgagtttggcagttttgtcca

SEQ ID NO: 1917202 - DNA, 25 bp, Homo sapien
gatgtaccagcatcactgcgacaca

SEQ ID NO: 1917203 - DNA, 25 bp, Homo sapien
taattcccataaacttggctgcagc

SEQ ID NO: 1917204 - DNA, 25 bp, Homo sapien
gcttgaacggctgatcacaatatca

SEQ ID NO: 1917205 - DNA, 25 bp, Homo sapien
aatatgccaccgaacaaaatagcag

SEQ ID NO: 1917206 - DNA, 25 bp, Homo sapien
gcaggtgatgttttagatgtccttt

SEQ ID NO: 1917207 - DNA, 25 bp, Homo sapien
ttgccattcaactcttgttttgaca

SEQ ID NO: 1917208 - DNA, 25 bp, Homo sapien
cctttacaggtagcaactttgccat

SEQ ID NO: 1917209 - DNA, 25 bp, Homo sapien
tcaggaccagtccaagcaggtgatg

SEQ ID NO: 1917210 - DNA, 25 bp, Homo sapien
aagaaagttctttaccagcatcatc

SEQ ID NO: 1917211 - DNA, 25 bp, Homo sapien
agggaagaaagttctttaccagcat

SEQ ID NO: 1917212 - DNA, 25 bp, Homo sapien
catcatcatcatagaagaacagcac

SEQ ID NO: 1917213 - DNA, 25 bp, Homo sapien
gcatcatcatcatagaagaacagca

SEQ ID NO: 1917214 - DNA, 25 bp, Homo sapien
gctctggccttgttgggtggtactc

SEQ ID NO: 1917215 - DNA, 25 bp, Homo sapien
tccagccttgcttagtgatccagtc

SEQ ID NO: 1917216 - DNA, 25 bp, Homo sapien
ggtggtactctagccttagctcagc

SEQ ID NO: 1917217 - DNA, 25 bp, Homo sapien
tcagctctggactcagttctgggct

SEQ ID NO: 1917218 - DNA, 25 bp, Homo sapien
agagttttcccatatcctgtctcag

SEQ ID NO: 1917219 - DNA, 25 bp, Homo sapien
tactccagcactgccaatactgctt

SEQ ID NO: 1917220 - DNA, 25 bp, Homo sapien
gacaagagttttcccatatcctgtc

SEQ ID NO: 1917221 - DNA, 25 bp, Homo sapien
gccaatactgcttgaatcactggaa

SEQ ID NO: 1917222 - DNA, 25 bp, Homo sapien
gatacattcaccttctagtcaggca

SEQ ID NO: 1917223 - DNA, 25 bp, Homo sapien
gggtcaggacaaatcataccatctc

SEQ ID NO: 1917224 - DNA, 25 bp, Homo sapien
gcttcttagactggtgtaggtgcag

SEQ ID NO: 1917225 - DNA, 25 bp, Homo sapien
catctccgatttggctctggttcag

SEQ ID NO: 1917226 - DNA, 25 bp, Homo sapien
aattcttggcagaggggaccaacca

SEQ ID NO: 1917227 - DNA, 25 bp, Homo sapien
ggcagaggggaccaaccagtaatct

SEQ ID NO: 1917228 - DNA, 25 bp, Homo sapien
ggggaccaaccagtaatctcagttc

SEQ ID NO: 1917229 - DNA, 25 bp, Homo sapien
aggaattcttggcagaggggaccaa

SEQ ID NO: 1917230 - DNA, 25 bp, Homo sapien
catttccccacaatcttgattcctt

SEQ ID NO: 1917231 - DNA, 25 bp, Homo sapien
tctgaaacttccaatagtttgatgg

SEQ ID NO: 1917232 - DNA, 25 bp, Homo sapien
atttgggtctaccttcacttgcttc

SEQ ID NO: 1917233 - DNA, 25 bp, Homo sapien
tagtttgatggttttgatcttgatt

SEQ ID NO: 1917234 - DNA, 25 bp, Homo sapien
ttggagatggttatcacagctcctt

SEQ ID NO: 1917235 - DNA, 25 bp, Homo sapien
gggtactcttcacagcttggtccta

SEQ ID NO: 1917236 - DNA, 25 bp, Homo sapien
gagtttccagctcactacacaggga

SEQ ID NO: 1917237 - DNA, 25 bp, Homo sapien
tctgggatgcaggagcactacaatg

SEQ ID NO: 1917238 - DNA, 25 bp, Homo sapien
taaatattgaatcctaggtgccaca

SEQ ID NO: 1917239 - DNA, 25 bp, Homo sapien
catcaatgtctcttcgtaactggca

SEQ ID NO: 1917240 - DNA, 25 bp, Homo sapien
tctgtgctgtggtcattctcagtct

SEQ ID NO: 1917241 - DNA, 25 bp, Homo sapien
tcagtctcttcagctgaacagttca

SEQ ID NO: 1917242 - DNA, 25 bp, Homo sapien
ccatgtcctgagcatagcggtctga

SEQ ID NO: 1917243 - DNA, 25 bp, Homo sapien
gaccacagagcagtgtaggcattag

SEQ ID NO: 1917244 - DNA, 25 bp, Homo sapien
caaactgtgacaaaggagagtacca

SEQ ID NO: 1917245 - DNA, 25 bp, Homo sapien
gtagctacctatcttgaccacagag

SEQ ID NO: 1917246 - DNA, 25 bp, Homo sapien
ggcacaggcgccagatgaaggaaaa

SEQ ID NO: 1917247 - DNA, 25 bp, Homo sapien
gctgcctagattggtcaggttcctg

SEQ ID NO: 1917248 - DNA, 25 bp, Homo sapien
gaaagattaggctccttgccctgag

SEQ ID NO: 1917249 - DNA, 25 bp, Homo sapien
cctgagcacgctgattaagaatact

SEQ ID NO: 1917250 - DNA, 25 bp, Homo sapien
tcacagtcaaatcaaatagtggccg

SEQ ID NO: 1917251 - DNA, 25 bp, Homo sapien
ctctttagaaagctttccttgcata

SEQ ID NO: 1917252 - DNA, 25 bp, Homo sapien
tctttagaaagctttccttgcatag

SEQ ID NO: 1917253 - DNA, 25 bp, Homo sapien
ctttagaaagctttccttgcataga

SEQ ID NO: 1917254 - DNA, 25 bp, Homo sapien
tctctttagaaagctttccttgcat

SEQ ID NO: 1917255 - DNA, 25 bp, Homo sapien
tctcatcttgttggctgtctattat

SEQ ID NO: 1917256 - DNA, 25 bp, Homo sapien
taaaatcattctgtcaatctcatct

SEQ ID NO: 1917257 - DNA, 25 bp, Homo sapien
tcattctgtcaatctcatcttgttg

SEQ ID NO: 1917258 - DNA, 25 bp, Homo sapien
tttctaaaatcattctgtcaatctc

SEQ ID NO: 1917259 - DNA, 25 bp, Homo sapien
catctaacatgggaaggcggattcc

SEQ ID NO: 1917260 - DNA, 25 bp, Homo sapien
atctaacatgggaaggcggattcca

SEQ ID NO: 1917261 - DNA, 25 bp, Homo sapien
tctaacatgggaaggcggattccat

SEQ ID NO: 1917262 - DNA, 25 bp, Homo sapien
tgcatctaacatgggaaggcggatt

SEQ ID NO: 1917263 - DNA, 25 bp, Homo sapien
ttctggcatattaactgtgtctctt

SEQ ID NO: 1917264 - DNA, 25 bp, Homo sapien
ctctgaacggtagttactaactcct

SEQ ID NO: 1917265 - DNA, 25 bp, Homo sapien
ggaagatcagccagatacttttcca

SEQ ID NO: 1917266 - DNA, 25 bp, Homo sapien
tctgtacatcatctagagttggaag

SEQ ID NO: 1917267 - DNA, 25 bp, Homo sapien
agactactgatgtatcgatctctag

SEQ ID NO: 1917268 - DNA, 25 bp, Homo sapien
ttttccaaggtctcaattcttctct

SEQ ID NO: 1917269 - DNA, 25 bp, Homo sapien
gatctacttatgacctctggtaagg

SEQ ID NO: 1917270 - DNA, 25 bp, Homo sapien
gctggtgtgacagtttaccctgtga

SEQ ID NO: 1917271 - DNA, 25 bp, Homo sapien
tctggtaaggagcaacactggtaag

SEQ ID NO: 1917272 - DNA, 25 bp, Homo sapien
cactggtaagacaaacacatcctat

SEQ ID NO: 1917273 - DNA, 25 bp, Homo sapien
gatatcattcctagaaggtaatagg

SEQ ID NO: 1917274 - DNA, 25 bp, Homo sapien
gccaagttttgtgctgtcccataca

SEQ ID NO: 1917275 - DNA, 25 bp, Homo sapien
tcttttcaaagaggtatgacgcaat

SEQ ID NO: 1917276 - DNA, 25 bp, Homo sapien
tacaaacagaggttactgaagtctg

SEQ ID NO: 1917277 - DNA, 25 bp, Homo sapien
taacctggcatgacacctgacaggg

SEQ ID NO: 1917278 - DNA, 25 bp, Homo sapien
gatatacaagagcatttctatcctc

SEQ ID NO: 1917279 - DNA, 25 bp, Homo sapien
taaatgtatacataacctggcatga

SEQ ID NO: 1917280 - DNA, 25 bp, Homo sapien
gacagggtaaatgacagacaaataa

SEQ ID NO: 1917281 - DNA, 25 bp, Homo sapien
tgttgttgacctaattcaactttat

SEQ ID NO: 1917282 - DNA, 25 bp, Homo sapien
tggtgtctggagtgaagtgttctca

SEQ ID NO: 1917283 - DNA, 25 bp, Homo sapien
gcttagtctttgtttgagaaactca

SEQ ID NO: 1917284 - DNA, 25 bp, Homo sapien
gggaaactgattcctctgaaaatgg

SEQ ID NO: 1917285 - DNA, 25 bp, Homo sapien
ctttctcagtagatgcaagcttttg

SEQ ID NO: 1917286 - DNA, 25 bp, Homo sapien
atattccccagcattcaatctagtg

SEQ ID NO: 1917287 - DNA, 25 bp, Homo sapien
gaattccaagaattgtgaacttggc

SEQ ID NO: 1917288 - DNA, 25 bp, Homo sapien
ccccagcattcaatctagtgtctag

SEQ ID NO: 1917289 - DNA, 25 bp, Homo sapien
taggttgcagccttcctgtagaatt

SEQ ID NO: 1917290 - DNA, 25 bp, Homo sapien
tagcccagcgtgtaaagatatcaga

SEQ ID NO: 1917291 - DNA, 25 bp, Homo sapien
gatatcagaagtcgccactcagtcc

SEQ ID NO: 1917292 - DNA, 25 bp, Homo sapien
gaaatgaggttacagggcaaactgc

SEQ ID NO: 1917293 - DNA, 25 bp, Homo sapien
ggacaccaggcagaaagatagatat

SEQ ID NO: 1917294 - DNA, 25 bp, Homo sapien
tcttgatctcgcttatttttgtcct

SEQ ID NO: 1917295 - DNA, 25 bp, Homo sapien
ctccacatggtcttgatctcgctta

SEQ ID NO: 1917296 - DNA, 25 bp, Homo sapien
cacatggtcttgatctcgcttattt

SEQ ID NO: 1917297 - DNA, 25 bp, Homo sapien
gtcttgatctcgcttatttttgtcc

SEQ ID NO: 1917298 - DNA, 25 bp, Homo sapien
caattctgctttctccccttttctt

SEQ ID NO: 1917299 - DNA, 25 bp, Homo sapien
tcaattctgctttctccccttttct

SEQ ID NO: 1917300 - DNA, 25 bp, Homo sapien
tctctcctttctttctctttttcca

SEQ ID NO: 1917301 - DNA, 25 bp, Homo sapien
tggcttctctcctttctttctcttt

SEQ ID NO: 1917302 - DNA, 25 bp, Homo sapien
gagctcagtaactgctttccctcct

SEQ ID NO: 1917303 - DNA, 25 bp, Homo sapien
ctgcccgtggagagctcagtaactg

SEQ ID NO: 1917304 - DNA, 25 bp, Homo sapien
tccaaactgcccgtggagagctcag

SEQ ID NO: 1917305 - DNA, 25 bp, Homo sapien
ggagcagtgctccaaactgcccgtg

SEQ ID NO: 1917306 - DNA, 25 bp, Homo sapien
tctttgtagaggtgcttctctgact

SEQ ID NO: 1917307 - DNA, 25 bp, Homo sapien
catactctttgtagaggtgcttctc

SEQ ID NO: 1917308 - DNA, 25 bp, Homo sapien
tttgtagaggtgcttctctgacttg

SEQ ID NO: 1917309 - DNA, 25 bp, Homo sapien
tttccacatactctttgtagaggtg

SEQ ID NO: 1917310 - DNA, 25 bp, Homo sapien
tatcaggcctcactttagatcccaa

SEQ ID NO: 1917311 - DNA, 25 bp, Homo sapien
tattcatatggcgtagacactgtct

SEQ ID NO: 1917312 - DNA, 25 bp, Homo sapien
tagatcccaataagtacgccaacag

SEQ ID NO: 1917313 - DNA, 25 bp, Homo sapien
gttaacgggcctcatagactctata

SEQ ID NO: 1917314 - DNA, 25 bp, Homo sapien
tgttgagcccgtaattcattatccc

SEQ ID NO: 1917315 - DNA, 25 bp, Homo sapien
gtcctaacatggcatgttgagcccg

SEQ ID NO: 1917316 - DNA, 25 bp, Homo sapien
attcattatcccttatcctctcatg

SEQ ID NO: 1917317 - DNA, 25 bp, Homo sapien
catggcatgttgagcccgtaattca

SEQ ID NO: 1917318 - DNA, 25 bp, Homo sapien
agacgacgcaggtttctaaatatac

SEQ ID NO: 1917319 - DNA, 25 bp, Homo sapien
gagacgacgcaggtttctaaatata

SEQ ID NO: 1917320 - DNA, 25 bp, Homo sapien
tgagacgacgcaggtttctaaatat

SEQ ID NO: 1917321 - DNA, 25 bp, Homo sapien
gctgagacgacgcaggtttctaaat

SEQ ID NO: 1917322 - DNA, 25 bp, Homo sapien
tcaattccatccaattggacaccaa

SEQ ID NO: 1917323 - DNA, 25 bp, Homo sapien
gaccacaccatatcccaaactaaaa

SEQ ID NO: 1917324 - DNA, 25 bp, Homo sapien
ttaagtgatttgaaaggtatcgctg

SEQ ID NO: 1917325 - DNA, 25 bp, Homo sapien
ttccatccaattggacaccaaatcc

SEQ ID NO: 1917326 - DNA, 25 bp, Homo sapien
tattttcaacattgattcccactta

SEQ ID NO: 1917327 - DNA, 25 bp, Homo sapien
tctttctgccttagaagtccttctt

SEQ ID NO: 1917328 - DNA, 25 bp, Homo sapien
cgatcgattacaatttctttctgcc

SEQ ID NO: 1917329 - DNA, 25 bp, Homo sapien
tctgccttagaagtccttcttttat

SEQ ID NO: 1917330 - DNA, 25 bp, Homo sapien
ctttgacgagatgatccagtcaaaa

SEQ ID NO: 1917331 - DNA, 25 bp, Homo sapien
aactttgacgagatgatccagtcaa

SEQ ID NO: 1917332 - DNA, 25 bp, Homo sapien
aataactttgacgagatgatccagt

SEQ ID NO: 1917333 - DNA, 25 bp, Homo sapien
taactttgacgagatgatccagtca

SEQ ID NO: 1917334 - DNA, 25 bp, Homo sapien
taatagtaattatggcagtggttcc

SEQ ID NO: 1917335 - DNA, 25 bp, Homo sapien
tcaaagatcagtatgcaaacctatg

SEQ ID NO: 1917336 - DNA, 25 bp, Homo sapien
gatgagtagctagaacaccctaggg

SEQ ID NO: 1917337 - DNA, 25 bp, Homo sapien
cactggcctatagtacacaattaac

SEQ ID NO: 1917338 - DNA, 25 bp, Homo sapien
gatactgcatccctattctacaatt

SEQ ID NO: 1917339 - DNA, 25 bp, Homo sapien
tgcacatcctctatatactgatcag

SEQ ID NO: 1917340 - DNA, 25 bp, Homo sapien
ttggcagaagtttaggttttgtcac

SEQ ID NO: 1917341 - DNA, 25 bp, Homo sapien
tgatcagcatggcttaaagtaaacc

SEQ ID NO: 1917342 - DNA, 25 bp, Homo sapien
gactcctgtatatgcttcatgataa

SEQ ID NO: 1917343 - DNA, 25 bp, Homo sapien
cctgtatatgcttcatgataaactc

SEQ ID NO: 1917344 - DNA, 25 bp, Homo sapien
tatatgcttcatgataaactcctgg

SEQ ID NO: 1917345 - DNA, 25 bp, Homo sapien
gggatgactcctgtatatgcttcat

SEQ ID NO: 1917346 - DNA, 25 bp, Homo sapien
gataatactacttggaggctccaag

SEQ ID NO: 1917347 - DNA, 25 bp, Homo sapien
taagtcctaggaagagcaaaccttc

SEQ ID NO: 1917348 - DNA, 25 bp, Homo sapien
aatcacaatttatcagacggcctgg

SEQ ID NO: 1917349 - DNA, 25 bp, Homo sapien
gattatgactttcagccaaattcct

SEQ ID NO: 1917350 - DNA, 25 bp, Homo sapien
tggaatagcatactcagccccactg

SEQ ID NO: 1917351 - DNA, 25 bp, Homo sapien
taaaagcgctataaagagaccatcc

SEQ ID NO: 1917352 - DNA, 25 bp, Homo sapien
ttctgtgtaaagacaccagctggag

SEQ ID NO: 1917353 - DNA, 25 bp, Homo sapien
taaaccagagatttgtccaagcaga

SEQ ID NO: 1917354 - DNA, 25 bp, Homo sapien
gcaaaacaatctgtgaacacttgtt

SEQ ID NO: 1917355 - DNA, 25 bp, Homo sapien
tgtactcataacatccactggaggg

SEQ ID NO: 1917356 - DNA, 25 bp, Homo sapien
tctgcctattaacttgcagggaaaa

SEQ ID NO: 1917357 - DNA, 25 bp, Homo sapien
tactgtaagtgtgctactgtactca

SEQ ID NO: 1917358 - DNA, 25 bp, Homo sapien
tacaggctgtctcctaagagtagag

SEQ ID NO: 1917359 - DNA, 25 bp, Homo sapien
ggctgaatgggaactccacctactg

SEQ ID NO: 1917360 - DNA, 25 bp, Homo sapien
ccaaaggatttgtccgcagctgctc

SEQ ID NO: 1917361 - DNA, 25 bp, Homo sapien
ccacatctgagtccttacggaaggc

SEQ ID NO: 1917362 - DNA, 25 bp, Homo sapien
ttgaagcgctggaattagacggcat

SEQ ID NO: 1917363 - DNA, 25 bp, Homo sapien
taaagatgaccatttccgaagtggc

SEQ ID NO: 1917364 - DNA, 25 bp, Homo sapien
cagttgtgatgttaaagccttagcc

SEQ ID NO: 1917365 - DNA, 25 bp, Homo sapien
tgtaaacagctaggcccaattgtcc

SEQ ID NO: 1917366 - DNA, 25 bp, Homo sapien
aagataatgtgccacttgaagttga

SEQ ID NO: 1917367 - DNA, 25 bp, Homo sapien
caatgattgactaggcttaaaagat

SEQ ID NO: 1917368 - DNA, 25 bp, Homo sapien
aaaagataatgtgccacttgaagtt

SEQ ID NO: 1917369 - DNA, 25 bp, Homo sapien
atcaatgattgactaggcttaaaag

SEQ ID NO: 1917370 - DNA, 25 bp, Homo sapien
cccttggtctcttgctttgtacaca

SEQ ID NO: 1917371 - DNA, 25 bp, Homo sapien
aagcaagatgaaaagctggtgttaa

SEQ ID NO: 1917372 - DNA, 25 bp, Homo sapien
tggtgttaaggacaataagttcttc

SEQ ID NO: 1917373 - DNA, 25 bp, Homo sapien
ttcaaagctcccttggtctcttgct

SEQ ID NO: 1917374 - DNA, 25 bp, Homo sapien
caagggtatacgtggatgagcagaa

SEQ ID NO: 1917375 - DNA, 25 bp, Homo sapien
taaaaaggagttctctatttgctta

SEQ ID NO: 1917376 - DNA, 25 bp, Homo sapien
ggtgtgtacaaatataggttaccac

SEQ ID NO: 1917377 - DNA, 25 bp, Homo sapien
taattgtataaatttggtgtgtaca

SEQ ID NO: 1917378 - DNA, 25 bp, Homo sapien
tttttatgaacaagtcaccaccagc

SEQ ID NO: 1917379 - DNA, 25 bp, Homo sapien
tgtgtacttcgcctatcgtaacgct

SEQ ID NO: 1917380 - DNA, 25 bp, Homo sapien
gttgtctatccctaccaccctgtgt

SEQ ID NO: 1917381 - DNA, 25 bp, Homo sapien
gaccaagctactctctcagcctaga

SEQ ID NO: 1917382 - DNA, 25 bp, Homo sapien
aatgaattgcctgagagcctgccta

SEQ ID NO: 1917383 - DNA, 25 bp, Homo sapien
caagagccctacgatttctcagtaa

SEQ ID NO: 1917384 - DNA, 25 bp, Homo sapien
tgtcctgaggaaggttacgagccaa

SEQ ID NO: 1917385 - DNA, 25 bp, Homo sapien
ctatatttaagaactcgccgggcac

SEQ ID NO: 1917386 - DNA, 25 bp, Homo sapien
taaatttgtccccagatgggcccca

SEQ ID NO: 1917387 - DNA, 25 bp, Homo sapien
aagttcaggcggctgtttctcagta

SEQ ID NO: 1917388 - DNA, 25 bp, Homo sapien
tccaaactccgacttaagagtttca

SEQ ID NO: 1917389 - DNA, 25 bp, Homo sapien
tttgtccccagatgggccccatcat

SEQ ID NO: 1917390 - DNA, 25 bp, Homo sapien
gggttttaggccactccatatagtc

SEQ ID NO: 1917391 - DNA, 25 bp, Homo sapien
gaccaaatggtatcagcttgagggc

SEQ ID NO: 1917392 - DNA, 25 bp, Homo sapien
tgtccagcctagtaagaaagtcttt

SEQ ID NO: 1917393 - DNA, 25 bp, Homo sapien
tgcacgttccgagaaagatttggcc

SEQ ID NO: 1917394 - DNA, 25 bp, Homo sapien
ccgcgcccggtcgattagagggaca

SEQ ID NO: 1917395 - DNA, 25 bp, Homo sapien
cggtcgattagagggacaattttat

SEQ ID NO: 1917396 - DNA, 25 bp, Homo sapien
cgcccggtcgattagagggacaatt

SEQ ID NO: 1917397 - DNA, 25 bp, Homo sapien
cgcgcccggtcgattagagggacaa

SEQ ID NO: 1917398 - DNA, 25 bp, Homo sapien
gaaacaataaaacatatcccctgaa

SEQ ID NO: 1917399 - DNA, 25 bp, Homo sapien
cctgaaaattcttgtaccacaacca

SEQ ID NO: 1917400 - DNA, 25 bp, Homo sapien
tagatggaacagttgtggcctgcca

SEQ ID NO: 1917401 - DNA, 25 bp, Homo sapien
tagccatgctgatgaataatctggg

SEQ ID NO: 1917402 - DNA, 25 bp, Homo sapien
tccactgtcagaagctatactgtgt

SEQ ID NO: 1917403 - DNA, 25 bp, Homo sapien
acaatgattcattagcaggtagcca

SEQ ID NO: 1917404 - DNA, 25 bp, Homo sapien
tattgcttggcctcagattaattta

SEQ ID NO: 1917405 - DNA, 25 bp, Homo sapien
tgcttggcctcagattaatttacca

SEQ ID NO: 1917406 - DNA, 25 bp, Homo sapien
attgcttggcctcagattaatttac

SEQ ID NO: 1917407 - DNA, 25 bp, Homo sapien
ttgcttggcctcagattaatttacc

SEQ ID NO: 1917408 - DNA, 25 bp, Homo sapien
aattattaatcaagttcatttcacc

SEQ ID NO: 1917409 - DNA, 25 bp, Homo sapien
gatcaaattccaattattaatcaag

SEQ ID NO: 1917410 - DNA, 25 bp, Homo sapien
tcattcaagccaggaagtgatcaaa

SEQ ID NO: 1917411 - DNA, 25 bp, Homo sapien
catcactaaagttaagattcacccc

SEQ ID NO: 1917412 - DNA, 25 bp, Homo sapien
gggtttaggccagagttatgtttca

SEQ ID NO: 1917413 - DNA, 25 bp, Homo sapien
taggccagagttatgtttcattgtt

SEQ ID NO: 1917414 - DNA, 25 bp, Homo sapien
agaacatgttcagttgggtttaggc

SEQ ID NO: 1917415 - DNA, 25 bp, Homo sapien
tgttcagttgggtttaggccagagt

SEQ ID NO: 1917416 - DNA, 25 bp, Homo sapien
tccgccggggctatcccggccgctg

SEQ ID NO: 1917417 - DNA, 25 bp, Homo sapien
gggctatcccggccgctggcctccg

SEQ ID NO: 1917418 - DNA, 25 bp, Homo sapien
ctatcccggccgctggcctccggag

SEQ ID NO: 1917419 - DNA, 25 bp, Homo sapien
ctgcgggctccgccggggctatccc

SEQ ID NO: 1917420 - DNA, 25 bp, Homo sapien
tcccgccctgcgagttgagtagagg

SEQ ID NO: 1917421 - DNA, 25 bp, Homo sapien
tcaaaggctccaggcgaagttgcag

SEQ ID NO: 1917422 - DNA, 25 bp, Homo sapien
ttaacggctgctcagctacgggcgg

SEQ ID NO: 1917423 - DNA, 25 bp, Homo sapien
tcgggcaatgacttcaggcgtgcgc

SEQ ID NO: 1917424 - DNA, 25 bp, Homo sapien
aatatggtgatgcttccaacgttta

SEQ ID NO: 1917425 - DNA, 25 bp, Homo sapien
tatggtgatgcttccaacgtttagt

SEQ ID NO: 1917426 - DNA, 25 bp, Homo sapien
gatgcttccaacgtttagttacgaa

SEQ ID NO: 1917427 - DNA, 25 bp, Homo sapien
ggtgatgcttccaacgtttagttac

SEQ ID NO: 1917428 - DNA, 25 bp, Homo sapien
cacatccgtgttgtaatttatctga

SEQ ID NO: 1917429 - DNA, 25 bp, Homo sapien
taatttatctgattggagttttaca

SEQ ID NO: 1917430 - DNA, 25 bp, Homo sapien
tggagttttacatttagtctccctg

SEQ ID NO: 1917431 - DNA, 25 bp, Homo sapien
tctccctgtggtagacttccaatta

SEQ ID NO: 1917432 - DNA, 25 bp, Homo sapien
gtaatgttagccaagggtcagctgt

SEQ ID NO: 1917433 - DNA, 25 bp, Homo sapien
taatgttagccaagggtcagctgtt

SEQ ID NO: 1917434 - DNA, 25 bp, Homo sapien
aatgttagccaagggtcagctgttt

SEQ ID NO: 1917435 - DNA, 25 bp, Homo sapien
gagcccttctaatcatcagtccttg

SEQ ID NO: 1917436 - DNA, 25 bp, Homo sapien
tctagcttgctgttgagttgactgg

SEQ ID NO: 1917437 - DNA, 25 bp, Homo sapien
cagccgagatacttgggcctggcca

SEQ ID NO: 1917438 - DNA, 25 bp, Homo sapien
gccagtgacaaagctcagccgagat

SEQ ID NO: 1917439 - DNA, 25 bp, Homo sapien
cataacaacatgataaagaatagta

SEQ ID NO: 1917440 - DNA, 25 bp, Homo sapien
caagaatttcacatgcagcttccca

SEQ ID NO: 1917441 - DNA, 25 bp, Homo sapien
gcatgctaagtgagcactgtgccaa

SEQ ID NO: 1917442 - DNA, 25 bp, Homo sapien
agaatagtatgaattggccgggtgc

SEQ ID NO: 1917443 - DNA, 25 bp, Homo sapien
cagccactggttgaattcacagttg

SEQ ID NO: 1917444 - DNA, 25 bp, Homo sapien
tcctgagatcatggtataagccact

SEQ ID NO: 1917445 - DNA, 25 bp, Homo sapien
ccaaacagttataatcagccactgg

SEQ ID NO: 1917446 - DNA, 25 bp, Homo sapien
aaccaatggatactaatagccacct

SEQ ID NO: 1917447 - DNA, 25 bp, Homo sapien
gaaggggagatctgtcaggctgggg

SEQ ID NO: 1917448 - DNA, 25 bp, Homo sapien
ggaaggggagatctgtcaggctggg

SEQ ID NO: 1917449 - DNA, 25 bp, Homo sapien
ggaatgcttcacgaaggagggacta

SEQ ID NO: 1917450 - DNA, 25 bp, Homo sapien
gggactatcagtggacttcagtaat

SEQ ID NO: 1917451 - DNA, 25 bp, Homo sapien
aaggagggactatcagtggacttca

SEQ ID NO: 1917452 - DNA, 25 bp, Homo sapien
tgcttcacgaaggagggactatcag

SEQ ID NO: 1917453 - DNA, 25 bp, Homo sapien
ctggaagcccattttgttccttcag

SEQ ID NO: 1917454 - DNA, 25 bp, Homo sapien
gctcctccagaaacgtagccctagt

SEQ ID NO: 1917455 - DNA, 25 bp, Homo sapien
tagccctagtactcctggaagccca

SEQ ID NO: 1917456 - DNA, 25 bp, Homo sapien
ttcagggagtatgctttctttgtgc

SEQ ID NO: 1917457 - DNA, 25 bp, Homo sapien
ccttatagagggcattagggaaact

SEQ ID NO: 1917458 - DNA, 25 bp, Homo sapien
caaaaagggctgtaagcaataccat

SEQ ID NO: 1917459 - DNA, 25 bp, Homo sapien
tgaggagtaagccaaacacacagcc

SEQ ID NO: 1917460 - DNA, 25 bp, Homo sapien
cacagaggtaacagatagggctcca

SEQ ID NO: 1917461 - DNA, 25 bp, Homo sapien
taaggatctggcgtttctctattct

SEQ ID NO: 1917462 - DNA, 25 bp, Homo sapien
ggatctggcgtttctctattctgaa

SEQ ID NO: 1917463 - DNA, 25 bp, Homo sapien
aggatctggcgtttctctattctga

SEQ ID NO: 1917464 - DNA, 25 bp, Homo sapien
atctggcgtttctctattctgaaat

SEQ ID NO: 1917465 - DNA, 25 bp, Homo sapien
ggcaccagaacaatgccaaaccagg

SEQ ID NO: 1917466 - DNA, 25 bp, Homo sapien
tgtgtctagagcttggatctagaag

SEQ ID NO: 1917467 - DNA, 25 bp, Homo sapien
gagcttggatctagaagtttatgtc

SEQ ID NO: 1917468 - DNA, 25 bp, Homo sapien
tgaagttcctgggtcgtaataacca

SEQ ID NO: 1917469 - DNA, 25 bp, Homo sapien
ttttattggctgcattgtaaggagt

SEQ ID NO: 1917470 - DNA, 25 bp, Homo sapien
tattggctgcattgtaaggagtcat

SEQ ID NO: 1917471 - DNA, 25 bp, Homo sapien
gctgcattgtaaggagtcatttggc

SEQ ID NO: 1917472 - DNA, 25 bp, Homo sapien
tggctgcattgtaaggagtcatttg

SEQ ID NO: 1917473 - DNA, 25 bp, Homo sapien
tccatgaagcttgtcgttattacca

SEQ ID NO: 1917474 - DNA, 25 bp, Homo sapien
gttcggctatgtccctagagatgtc

SEQ ID NO: 1917475 - DNA, 25 bp, Homo sapien
gaagcttgtcgttattaccaggatc

SEQ ID NO: 1917476 - DNA, 25 bp, Homo sapien
ctacttggagtaggattgcttgggt

SEQ ID NO: 1917477 - DNA, 25 bp, Homo sapien
aagactaaggtacttcaggagagac

SEQ ID NO: 1917478 - DNA, 25 bp, Homo sapien
aacgttctaagatagggtggtgcaa

SEQ ID NO: 1917479 - DNA, 25 bp, Homo sapien
gccatcctgagcatattaccttagc

SEQ ID NO: 1917480 - DNA, 25 bp, Homo sapien
ggagagacatcttcacactaacatc

SEQ ID NO: 1917481 - DNA, 25 bp, Homo sapien
cagaacgactgagttaacgaacaca

SEQ ID NO: 1917482 - DNA, 25 bp, Homo sapien
cagccactaatcctggagtattttc

SEQ ID NO: 1917483 - DNA, 25 bp, Homo sapien
aacaccaaagctacagccactaatc

SEQ ID NO: 1917484 - DNA, 25 bp, Homo sapien
gactgagttaacgaacacaacacca

SEQ ID NO: 1917485 - DNA, 25 bp, Homo sapien
gatgtatcattttgaatgccatacc

SEQ ID NO: 1917486 - DNA, 25 bp, Homo sapien
aggatgtatcattttgaatgccata

SEQ ID NO: 1917487 - DNA, 25 bp, Homo sapien
tgtatcattttgaatgccataccag

SEQ ID NO: 1917488 - DNA, 25 bp, Homo sapien
tatcattttgaatgccataccagct

SEQ ID NO: 1917489 - DNA, 25 bp, Homo sapien
catagtaaggattctgaggcaaggt

SEQ ID NO: 1917490 - DNA, 25 bp, Homo sapien
cagtgctacatgcaggttctggccc

SEQ ID NO: 1917491 - DNA, 25 bp, Homo sapien
gctttgtcctcaggagggaatccct

SEQ ID NO: 1917492 - DNA, 25 bp, Homo sapien
tcttggttgttagggtggccaccag

SEQ ID NO: 1917493 - DNA, 25 bp, Homo sapien
tattttcacctttctttcagtggct

SEQ ID NO: 1917494 - DNA, 25 bp, Homo sapien
ttctggctattttcacctttctttc

SEQ ID NO: 1917495 - DNA, 25 bp, Homo sapien
ggctattttcacctttctttcagtg

SEQ ID NO: 1917496 - DNA, 25 bp, Homo sapien
ctggctattttcacctttctttcag

SEQ ID NO: 1917497 - DNA, 25 bp, Homo sapien
aatcagggtgtagtttgtcatcatc

SEQ ID NO: 1917498 - DNA, 25 bp, Homo sapien
caaggacaccatcatagcaatctag

SEQ ID NO: 1917499 - DNA, 25 bp, Homo sapien
cattctcaggagtacgcagagttca

SEQ ID NO: 1917500 - DNA, 25 bp, Homo sapien
gggctgcttatcaggactccagcaa

SEQ ID NO: 1917501 - DNA, 25 bp, Homo sapien
tcaaacctcctcaaggaacgtcttc

SEQ ID NO: 1917502 - DNA, 25 bp, Homo sapien
caaacctcctcaaggaacgtcttca

SEQ ID NO: 1917503 - DNA, 25 bp, Homo sapien
tcctcaaggaacgtcttcaaatgat

SEQ ID NO: 1917504 - DNA, 25 bp, Homo sapien
ggccttatgacagctcaagaagtat

SEQ ID NO: 1917505 - DNA, 25 bp, Homo sapien
caagtgtgaatctcaaggcttcggc

SEQ ID NO: 1917506 - DNA, 25 bp, Homo sapien
tacacattgactggatgttctccat

SEQ ID NO: 1917507 - DNA, 25 bp, Homo sapien
tcaagaagtatctgtcaggatgcag

SEQ ID NO: 1917508 - DNA, 25 bp, Homo sapien
cagctgagttcgtgatgagttgaga

SEQ ID NO: 1917509 - DNA, 25 bp, Homo sapien
tgttcataacaggatcgtgacacct

SEQ ID NO: 1917510 - DNA, 25 bp, Homo sapien
ccctgtgctcaattgttgttgcagc

SEQ ID NO: 1917511 - DNA, 25 bp, Homo sapien
gtgacacctgttcattccctgtgct

SEQ ID NO: 1917512 - DNA, 25 bp, Homo sapien
atatgtcccacaggaggtatgcgac

SEQ ID NO: 1917513 - DNA, 25 bp, Homo sapien
ttcctgaagttatttgcatgtcctg

SEQ ID NO: 1917514 - DNA, 25 bp, Homo sapien
ccaaatatgtcccacaggaggtatg

SEQ ID NO: 1917515 - DNA, 25 bp, Homo sapien
tggttccaaatatgtcccacaggag

SEQ ID NO: 1917516 - DNA, 25 bp, Homo sapien
gctctgagactggatctgggtgcat

SEQ ID NO: 1917517 - DNA, 25 bp, Homo sapien
gctgcttcttatgctggaggtctgt

SEQ ID NO: 1917518 - DNA, 25 bp, Homo sapien
ggaggtctgtttgtcccaccacagc

SEQ ID NO: 1917519 - DNA, 25 bp, Homo sapien
catgtggaagcctgatggaagtttc

SEQ ID NO: 1917520 - DNA, 25 bp, Homo sapien
tcataagctgtccacccaagggtct

SEQ ID NO: 1917521 - DNA, 25 bp, Homo sapien
atcataagctgtccacccaagggtc

SEQ ID NO: 1917522 - DNA, 25 bp, Homo sapien
tgcggacaaagccaattcccaggtt

SEQ ID NO: 1917523 - DNA, 25 bp, Homo sapien
gaggccctgatatgcaaaatttccc

SEQ ID NO: 1917524 - DNA, 25 bp, Homo sapien
caggcagcagaagtgctcgggattc

SEQ ID NO: 1917525 - DNA, 25 bp, Homo sapien
attcagcaccatgactctccagagg

SEQ ID NO: 1917526 - DNA, 25 bp, Homo sapien
caaaccatccagagtccaatatttc

SEQ ID NO: 1917527 - DNA, 25 bp, Homo sapien
ccaaaccatccagagtccaatattt

SEQ ID NO: 1917528 - DNA, 25 bp, Homo sapien
tttctttatagcctgtgtgacagcc

SEQ ID NO: 1917529 - DNA, 25 bp, Homo sapien
agcctgtgtgacagccttatgggaa

SEQ ID NO: 1917530 - DNA, 25 bp, Homo sapien
tgcactgagagaaagtcgcactggt

SEQ ID NO: 1917531 - DNA, 25 bp, Homo sapien
ggtgcctcggaagaccctcttgtct

SEQ ID NO: 1917532 - DNA, 25 bp, Homo sapien
cttctgtggtatggaaaggccccag

SEQ ID NO: 1917533 - DNA, 25 bp, Homo sapien
ggccccagaaagacttacaagcttc

SEQ ID NO: 1917534 - DNA, 25 bp, Homo sapien
ctcttttgtcagagggctgtgcttc

SEQ ID NO: 1917535 - DNA, 25 bp, Homo sapien
tttcagaccttcctcttttgtcaga

SEQ ID NO: 1917536 - DNA, 25 bp, Homo sapien
gaccttcctcttttgtcagagggct

SEQ ID NO: 1917537 - DNA, 25 bp, Homo sapien
cttcctcttttgtcagagggctgtg

SEQ ID NO: 1917538 - DNA, 25 bp, Homo sapien
ctgctgctccagctgctgttgctgc

SEQ ID NO: 1917539 - DNA, 25 bp, Homo sapien
tgagtctgggcttcaaaagtcagct

SEQ ID NO: 1917540 - DNA, 25 bp, Homo sapien
gctgctccagctgctgttgctgcgc

SEQ ID NO: 1917541 - DNA, 25 bp, Homo sapien
cctgagtctgggcttcaaaagtcag

SEQ ID NO: 1917542 - DNA, 25 bp, Homo sapien
tccagcggcatctgtcgcttggttt

SEQ ID NO: 1917543 - DNA, 25 bp, Homo sapien
tagaggtattagtttggattgatcc

SEQ ID NO: 1917544 - DNA, 25 bp, Homo sapien
tttctaggacagagcatagaggtat

SEQ ID NO: 1917545 - DNA, 25 bp, Homo sapien
tggtgtgacaaagacaagctctggg

SEQ ID NO: 1917546 - DNA, 25 bp, Homo sapien
ggaattaactgcacttctagagaca

SEQ ID NO: 1917547 - DNA, 25 bp, Homo sapien
ccaaggccaaaacaaacagctgtgg

SEQ ID NO: 1917548 - DNA, 25 bp, Homo sapien
gagacacttatggaggtctcgctca

SEQ ID NO: 1917549 - DNA, 25 bp, Homo sapien
catgccaaagctttcccaaggccaa

SEQ ID NO: 1917550 - DNA, 25 bp, Homo sapien
gccgagaatcagcatgtacacgtcc

SEQ ID NO: 1917551 - DNA, 25 bp, Homo sapien
tgtcgtgccgagaatcagcatgtac

SEQ ID NO: 1917552 - DNA, 25 bp, Homo sapien
gcatgtacacgtccctgtattctgg

SEQ ID NO: 1917553 - DNA, 25 bp, Homo sapien
gaatcagcatgtacacgtccctgta

SEQ ID NO: 1917554 - DNA, 25 bp, Homo sapien
tgcgtctgagcttccagccatgctt

SEQ ID NO: 1917555 - DNA, 25 bp, Homo sapien
ggaaacaggatggtatcgtcagctt

SEQ ID NO: 1917556 - DNA, 25 bp, Homo sapien
cagcttcacggtttactgcgtctga

SEQ ID NO: 1917557 - DNA, 25 bp, Homo sapien
cagcagtgtgacccagcactggttt

SEQ ID NO: 1917558 - DNA, 25 bp, Homo sapien
ccagtggaacaagtttaaagctgat

SEQ ID NO: 1917559 - DNA, 25 bp, Homo sapien
ctaccagtggaacaagtttaaagct

SEQ ID NO: 1917560 - DNA, 25 bp, Homo sapien
taccagtggaacaagtttaaagctg

SEQ ID NO: 1917561 - DNA, 25 bp, Homo sapien
agtggaacaagtttaaagctgatat

SEQ ID NO: 1917562 - DNA, 25 bp, Homo sapien
tgcagagaatgcgttttgctctgtt

SEQ ID NO: 1917563 - DNA, 25 bp, Homo sapien
aatgcgttttgctctgttcagtgtc

SEQ ID NO: 1917564 - DNA, 25 bp, Homo sapien
gagaatgcgttttgctctgttcagt

SEQ ID NO: 1917565 - DNA, 25 bp, Homo sapien
cagagaatgcgttttgctctgttca

SEQ ID NO: 1917566 - DNA, 25 bp, Homo sapien
ggcatctgaaggaaccagcgataag

SEQ ID NO: 1917567 - DNA, 25 bp, Homo sapien
aggaaccagcgataagaccctctct

SEQ ID NO: 1917568 - DNA, 25 bp, Homo sapien
gctagagaggacgtttgtggcatct

SEQ ID NO: 1917569 - DNA, 25 bp, Homo sapien
ctgtgtcctgtctcgatgacgggga

SEQ ID NO: 1917570 - DNA, 25 bp, Homo sapien
tggtaggaaccggaaggttatgcca

SEQ ID NO: 1917571 - DNA, 25 bp, Homo sapien
gtaggaaccggaaggttatgccata

SEQ ID NO: 1917572 - DNA, 25 bp, Homo sapien
aggaaccggaaggttatgccatatt

SEQ ID NO: 1917573 - DNA, 25 bp, Homo sapien
agatggtaggaaccggaaggttatg

SEQ ID NO: 1917574 - DNA, 25 bp, Homo sapien
tcgccataagcatctgctgtgagag

SEQ ID NO: 1917575 - DNA, 25 bp, Homo sapien
actgtggcaccctcgccataagcat

SEQ ID NO: 1917576 - DNA, 25 bp, Homo sapien
accctcgccataagcatctgctgtg

SEQ ID NO: 1917577 - DNA, 25 bp, Homo sapien
gttcgactgtggcaccctcgccata

SEQ ID NO: 1917578 - DNA, 25 bp, Homo sapien
tatccataagaatggtccaggaggc

SEQ ID NO: 1917579 - DNA, 25 bp, Homo sapien
gtgacagtggaatatccataagaat

SEQ ID NO: 1917580 - DNA, 25 bp, Homo sapien
gtggaatatccataagaatggtcca

SEQ ID NO: 1917581 - DNA, 25 bp, Homo sapien
aatatccataagaatggtccaggag

SEQ ID NO: 1917582 - DNA, 25 bp, Homo sapien
tgtttaaagagcacaaccttgagag

SEQ ID NO: 1917583 - DNA, 25 bp, Homo sapien
gaaagaatgcggttggagaaaacac

SEQ ID NO: 1917584 - DNA, 25 bp, Homo sapien
taaagtaagacagggatcagcacag

SEQ ID NO: 1917585 - DNA, 25 bp, Homo sapien
ggtattctcactaaaggccagcatt

SEQ ID NO: 1917586 - DNA, 25 bp, Homo sapien
agaggaaggcaactggaaactgctg

SEQ ID NO: 1917587 - DNA, 25 bp, Homo sapien
acagggaactagtctctgaatgagg

SEQ ID NO: 1917588 - DNA, 25 bp, Homo sapien
taggtgacatatgatagaagaaagc

SEQ ID NO: 1917589 - DNA, 25 bp, Homo sapien
cccacagggaactagtctctgaatg

SEQ ID NO: 1917590 - DNA, 25 bp, Homo sapien
cagtgtcatctacccttttcaacag

SEQ ID NO: 1917591 - DNA, 25 bp, Homo sapien
cttggacagtacttgaaggtttgct

SEQ ID NO: 1917592 - DNA, 25 bp, Homo sapien
tttcaacagcatccgtaaatccagt

SEQ ID NO: 1917593 - DNA, 25 bp, Homo sapien
ctatttttggaagctctacacatct

SEQ ID NO: 1917594 - DNA, 25 bp, Homo sapien
gaaaacactcagcacctagggagct

SEQ ID NO: 1917595 - DNA, 25 bp, Homo sapien
tcaggaaaacactcagcacctaggg

SEQ ID NO: 1917596 - DNA, 25 bp, Homo sapien
ggaagcaagtgtctctcaggaaaac

SEQ ID NO: 1917597 - DNA, 25 bp, Homo sapien
agtgtctctcaggaaaacactcagc

SEQ ID NO: 1917598 - DNA, 25 bp, Homo sapien
gagagagtaatccatgacctcagct

SEQ ID NO: 1917599 - DNA, 25 bp, Homo sapien
ccaggaaatgggacttcgattactt

SEQ ID NO: 1917600 - DNA, 25 bp, Homo sapien
gggcttcatacatgtccaccggaaa

SEQ ID NO: 1917601 - DNA, 25 bp, Homo sapien
aacctaagttaggagtgcactctcc

SEQ ID NO: 1917602 - DNA, 25 bp, Homo sapien
aaaatatcggttcatgaaatgacgg

SEQ ID NO: 1917603 - DNA, 25 bp, Homo sapien
gatgcaagaagaccagagtcagagg

SEQ ID NO: 1917604 - DNA, 25 bp, Homo sapien
aaatgacggaattgatccaagtcac

SEQ ID NO: 1917605 - DNA, 25 bp, Homo sapien
tgtggctaatcaagaaggcccagtg

SEQ ID NO: 1917606 - DNA, 25 bp, Homo sapien
gcggaccgctttctgattgatgtga

SEQ ID NO: 1917607 - DNA, 25 bp, Homo sapien
tctctggcatcttctacacacagtc

SEQ ID NO: 1917608 - DNA, 25 bp, Homo sapien
agcccaggcagctgcggaccgcttt

SEQ ID NO: 1917609 - DNA, 25 bp, Homo sapien
tgtgaatcctcctcactgcacgtct

SEQ ID NO: 1917610 - DNA, 25 bp, Homo sapien
atcattgatggcatctattggtcgg

SEQ ID NO: 1917611 - DNA, 25 bp, Homo sapien
ttgatggcatctattggtcggctca

SEQ ID NO: 1917612 - DNA, 25 bp, Homo sapien
tcaataagtccatgctctctcatca

SEQ ID NO: 1917613 - DNA, 25 bp, Homo sapien
cattgatggcatctattggtcggct

SEQ ID NO: 1917614 - DNA, 25 bp, Homo sapien
tagtagatgcttcaaggggcttgtc

SEQ ID NO: 1917615 - DNA, 25 bp, Homo sapien
gtccggcgtagtacatgctaacata

SEQ ID NO: 1917616 - DNA, 25 bp, Homo sapien
tgaacctcactgtccggcgtagtac

SEQ ID NO: 1917617 - DNA, 25 bp, Homo sapien
cccaattatatagactactgaagtc

SEQ ID NO: 1917618 - DNA, 25 bp, Homo sapien
gctgccaccctgcaatgtcactgta

SEQ ID NO: 1917619 - DNA, 25 bp, Homo sapien
tcaatgtgctctacgtggacggctc

SEQ ID NO: 1917620 - DNA, 25 bp, Homo sapien
gccatcctccagggttgtcattctc

SEQ ID NO: 1917621 - DNA, 25 bp, Homo sapien
ctgtatttcttagatgctgaaccaa

SEQ ID NO: 1917622 - DNA, 25 bp, Homo sapien
tctatctactaacctctgccttcga

SEQ ID NO: 1917623 - DNA, 25 bp, Homo sapien
aaaatgctgccagctaccccggaag

SEQ ID NO: 1917624 - DNA, 25 bp, Homo sapien
ccccggaagatgctctatctactaa

SEQ ID NO: 1917625 - DNA, 25 bp, Homo sapien
tccatcccactgaaacagggagcat

SEQ ID NO: 1917626 - DNA, 25 bp, Homo sapien
catgcaagacagaacactgacagga

SEQ ID NO: 1917627 - DNA, 25 bp, Homo sapien
taatgtgagccagggcgcttttatc

SEQ ID NO: 1917628 - DNA, 25 bp, Homo sapien
actgacaggaacaccccaattggag

SEQ ID NO: 1917629 - DNA, 25 bp, Homo sapien
tgtgggtaatggctccccgtatacc

SEQ ID NO: 1917630 - DNA, 25 bp, Homo sapien
cattcaggtcaacataaagggactc

SEQ ID NO: 1917631 - DNA, 25 bp, Homo sapien
aacagcagtggaagaacttttgccc

SEQ ID NO: 1917632 - DNA, 25 bp, Homo sapien
ttttgcccattagtgactctcctga

SEQ ID NO: 1917633 - DNA, 25 bp, Homo sapien
gcaggataaaacatgacctcaggac

SEQ ID NO: 1917634 - DNA, 25 bp, Homo sapien
taaccagctgggtagatgagacatg

SEQ ID NO: 1917635 - DNA, 25 bp, Homo sapien
catgatgtttgattgagactaccac

SEQ ID NO: 1917636 - DNA, 25 bp, Homo sapien
tattctatgtccaaaagtccctctg

SEQ ID NO: 1917637 - DNA, 25 bp, Homo sapien
gaaaggtactgtttgaccagtggcc

SEQ ID NO: 1917638 - DNA, 25 bp, Homo sapien
aacaatcagtttctcggtggaccca

SEQ ID NO: 1917639 - DNA, 25 bp, Homo sapien
taatgtgcaggcatgaaccttgccg

SEQ ID NO: 1917640 - DNA, 25 bp, Homo sapien
ggtggacccacggagctgaaaagat

SEQ ID NO: 1917641 - DNA, 25 bp, Homo sapien
tctcgttcccaagctctaattcagg

SEQ ID NO: 1917642 - DNA, 25 bp, Homo sapien
gctattttagttgcaccaggtgaca

SEQ ID NO: 1917643 - DNA, 25 bp, Homo sapien
cacatggctgtgatcttcaaaggag

SEQ ID NO: 1917644 - DNA, 25 bp, Homo sapien
tctgggctatgtacaggagtggact

SEQ ID NO: 1917645 - DNA, 25 bp, Homo sapien
ccacttgcgcaagggatttcggtct

SEQ ID NO: 1917646 - DNA, 25 bp, Homo sapien
ccttaccctgagatgtgctgttaga

SEQ ID NO: 1917647 - DNA, 25 bp, Homo sapien
tagtctctacctccaatacccgtgg

SEQ ID NO: 1917648 - DNA, 25 bp, Homo sapien
gatctattaggctccagatgcggtg

SEQ ID NO: 1917649 - DNA, 25 bp, Homo sapien
atacccgtggttgggattggtgcac

SEQ ID NO: 1917650 - DNA, 25 bp, Homo sapien
tctaacttatctgcatagagttgtt

SEQ ID NO: 1917651 - DNA, 25 bp, Homo sapien
ctgcttcattagtatggctagcggt

SEQ ID NO: 1917652 - DNA, 25 bp, Homo sapien
ggctctgcagctctagcttttccag

SEQ ID NO: 1917653 - DNA, 25 bp, Homo sapien
gaagtgtggagggcattcacacctc

SEQ ID NO: 1917654 - DNA, 25 bp, Homo sapien
taagttcacactgtctctggtactg

SEQ ID NO: 1917655 - DNA, 25 bp, Homo sapien
agctcttcactcaagaggctctgca

SEQ ID NO: 1917656 - DNA, 25 bp, Homo sapien
taatagcgtcttccagagttacagt

SEQ ID NO: 1917657 - DNA, 25 bp, Homo sapien
tcacgaaacatcaggcgagcatgag

SEQ ID NO: 1917658 - DNA, 25 bp, Homo sapien
ccagagttacagtatcacgaaacat

SEQ ID NO: 1917659 - DNA, 25 bp, Homo sapien
atgactgacaccaccgtaatagcgt

SEQ ID NO: 1917660 - DNA, 25 bp, Homo sapien
tgcctttgcatctggtagtaccgga

SEQ ID NO: 1917661 - DNA, 25 bp, Homo sapien
caacagccgaatggtggtccgggca

SEQ ID NO: 1917662 - DNA, 25 bp, Homo sapien
tgtgggctgcagattccttatgagg

SEQ ID NO: 1917663 - DNA, 25 bp, Homo sapien
tagtaccggagaagaacctgattgc

SEQ ID NO: 1917664 - DNA, 25 bp, Homo sapien
ggtatcaagcaaaaccaggatcagg

SEQ ID NO: 1917665 - DNA, 25 bp, Homo sapien
aaatcgacttaagagtgggctgccg

SEQ ID NO: 1917666 - DNA, 25 bp, Homo sapien
ggaggaaatgatacgatcccagtct

SEQ ID NO: 1917667 - DNA, 25 bp, Homo sapien
aatgttcacagacacggactcctgg

SEQ ID NO: 1917668 - DNA, 25 bp, Homo sapien
ctgccaggagagacagtacaattca

SEQ ID NO: 1917669 - DNA, 25 bp, Homo sapien
gatagaaaagatgaacacagaagca

SEQ ID NO: 1917670 - DNA, 25 bp, Homo sapien
aacactgtgaagcagcttttgaact

SEQ ID NO: 1917671 - DNA, 25 bp, Homo sapien
gtggatagaaaagatgaacacagaa

SEQ ID NO: 1917672 - DNA, 25 bp, Homo sapien
agaaaagatgaacacagaagcaaac

SEQ ID NO: 1917673 - DNA, 25 bp, Homo sapien
aataggccattgataacactaaggg

SEQ ID NO: 1917674 - DNA, 25 bp, Homo sapien
tataagcattgcagctaccaggccc

SEQ ID NO: 1917675 - DNA, 25 bp, Homo sapien
tacaggtatttctcaagtgttgcct

SEQ ID NO: 1917676 - DNA, 25 bp, Homo sapien
gaaaaaccattgatcggtccattcc

SEQ ID NO: 1917677 - DNA, 25 bp, Homo sapien
catagtcgatgtgccaccacattgg

SEQ ID NO: 1917678 - DNA, 25 bp, Homo sapien
gttgtgattatagtgagcccactgc

SEQ ID NO: 1917679 - DNA, 25 bp, Homo sapien
ggccaccgtttttcatactttcatc

SEQ ID NO: 1917680 - DNA, 25 bp, Homo sapien
ttttgcctcaagtctcaaagcagag

SEQ ID NO: 1917681 - DNA, 25 bp, Homo sapien
cagccactctatgtgataattctta

SEQ ID NO: 1917682 - DNA, 25 bp, Homo sapien
tcacttggctagtttagtacctttc

SEQ ID NO: 1917683 - DNA, 25 bp, Homo sapien
aattcttagtcttatcctcacttgg

SEQ ID NO: 1917684 - DNA, 25 bp, Homo sapien
tgcgcccagccactctatgtgataa

SEQ ID NO: 1917685 - DNA, 25 bp, Homo sapien
gttacacaaaaatggccacacatgg

SEQ ID NO: 1917686 - DNA, 25 bp, Homo sapien
accctttgggagtgcttgtgtaaca

SEQ ID NO: 1917687 - DNA, 25 bp, Homo sapien
catggtggcactaactagattgtca

SEQ ID NO: 1917688 - DNA, 25 bp, Homo sapien
tagattgtcatgagtgacccagaaa

SEQ ID NO: 1917689 - DNA, 25 bp, Homo sapien
tagttgagctaggttaacagatacg

SEQ ID NO: 1917690 - DNA, 25 bp, Homo sapien
tgcaaatttactaccccactaggta

SEQ ID NO: 1917691 - DNA, 25 bp, Homo sapien
ggatctataccaaggcttcagacat

SEQ ID NO: 1917692 - DNA, 25 bp, Homo sapien
tttgttcttagataccactgagagt

SEQ ID NO: 1917693 - DNA, 25 bp, Homo sapien
gatgcattaccttcagcatcaaagg

SEQ ID NO: 1917694 - DNA, 25 bp, Homo sapien
tgtgaccacctaccatccctttagt

SEQ ID NO: 1917695 - DNA, 25 bp, Homo sapien
cctgaaattccgtaagtacatagtc

SEQ ID NO: 1917696 - DNA, 25 bp, Homo sapien
catcaaagggatggtccacatcaga

SEQ ID NO: 1917697 - DNA, 25 bp, Homo sapien
tgtgaagcaaagttttgccagatgt

SEQ ID NO: 1917698 - DNA, 25 bp, Homo sapien
tattgtccattaactagttcataga

SEQ ID NO: 1917699 - DNA, 25 bp, Homo sapien
catatgatgcaggttatgcagtgcc

SEQ ID NO: 1917700 - DNA, 25 bp, Homo sapien
gaaaagggcatttgtctaaacatgg

SEQ ID NO: 1917701 - DNA, 25 bp, Homo sapien
gttgctgagtcttgataaaatgcca

SEQ ID NO: 1917702 - DNA, 25 bp, Homo sapien
taatctgactcccttaacaagtagc

SEQ ID NO: 1917703 - DNA, 25 bp, Homo sapien
gaactctagaacactgggtcatacg

SEQ ID NO: 1917704 - DNA, 25 bp, Homo sapien
tgagcattcattagcccaatggaag

SEQ ID NO: 1917705 - DNA, 25 bp, Homo sapien
taagatgcaaagtgaaggtggagct

SEQ ID NO: 1917706 - DNA, 25 bp, Homo sapien
tgaaggtaatcactagagaatgaga

SEQ ID NO: 1917707 - DNA, 25 bp, Homo sapien
taggattgttcaaaactaagatgca

SEQ ID NO: 1917708 - DNA, 25 bp, Homo sapien
gcaagatattttcttagagctacca

SEQ ID NO: 1917709 - DNA, 25 bp, Homo sapien
caggatccccaaccaataaaagatg

SEQ ID NO: 1917710 - DNA, 25 bp, Homo sapien
cactagtagatccaattcctgtggt

SEQ ID NO: 1917711 - DNA, 25 bp, Homo sapien
tgtgccaggatccccaaccaataaa

SEQ ID NO: 1917712 - DNA, 25 bp, Homo sapien
actagtagatccaattcctgtggtc

SEQ ID NO: 1917713 - DNA, 25 bp, Homo sapien
taataacccgtatgccagactctgg

SEQ ID NO: 1917714 - DNA, 25 bp, Homo sapien
ttattatggcccacgtacagggccg

SEQ ID NO: 1917715 - DNA, 25 bp, Homo sapien
tgtgctatttccagatgttcaggcc

SEQ ID NO: 1917716 - DNA, 25 bp, Homo sapien
tggagagacgctgactggagacatt

SEQ ID NO: 1917717 - DNA, 25 bp, Homo sapien
tctgacccgtgttcctgtagcatca

SEQ ID NO: 1917718 - DNA, 25 bp, Homo sapien
cacttgagggcacaagctagccaat

SEQ ID NO: 1917719 - DNA, 25 bp, Homo sapien
catggccacagcaagctttactaga

SEQ ID NO: 1917720 - DNA, 25 bp, Homo sapien
gcatcagtcctttgaatcccaccag

SEQ ID NO: 1917721 - DNA, 25 bp, Homo sapien
gcacatcttgctgaaagggcttcca

SEQ ID NO: 1917722 - DNA, 25 bp, Homo sapien
caatcccgtaaatagtgaggtcatc

SEQ ID NO: 1917723 - DNA, 25 bp, Homo sapien
cttggatgtaatttgctttcaggac

SEQ ID NO: 1917724 - DNA, 25 bp, Homo sapien
caaagggatcgctcttatagtattc

SEQ ID NO: 1917725 - DNA, 25 bp, Homo sapien
tcaagtgagtccagcagtagcatcc

SEQ ID NO: 1917726 - DNA, 25 bp, Homo sapien
taggcaccaataagacacgcagcag

SEQ ID NO: 1917727 - DNA, 25 bp, Homo sapien
gaagctgagcctatgtctgcaccat

SEQ ID NO: 1917728 - DNA, 25 bp, Homo sapien
aacacagggtgttggatgtgcccca

SEQ ID NO: 1917729 - DNA, 25 bp, Homo sapien
gcaactatccactaagtcatcttcc

SEQ ID NO: 1917730 - DNA, 25 bp, Homo sapien
tacttccaacagatagcctttgaac

SEQ ID NO: 1917731 - DNA, 25 bp, Homo sapien
tccagaataaccttcatagatcgtg

SEQ ID NO: 1917732 - DNA, 25 bp, Homo sapien
cagatttgcaactatccactaagtc

SEQ ID NO: 1917733 - DNA, 25 bp, Homo sapien
gatggccggcaaaaggtgtaatact

SEQ ID NO: 1917734 - DNA, 25 bp, Homo sapien
catgtaatcccgctcaaactccaga

SEQ ID NO: 1917735 - DNA, 25 bp, Homo sapien
tgtcccagtgacagataaaaagtgt

SEQ ID NO: 1917736 - DNA, 25 bp, Homo sapien
cctggttggagacgaagacaagcct

SEQ ID NO: 1917737 - DNA, 25 bp, Homo sapien
gtgttccctcaccagctcaggacag

SEQ ID NO: 1917738 - DNA, 25 bp, Homo sapien
tccctcaccagctcaggacagacag

SEQ ID NO: 1917739 - DNA, 25 bp, Homo sapien
ggtatgtgttccctcaccagctcag

SEQ ID NO: 1917740 - DNA, 25 bp, Homo sapien
ctcaccagctcaggacagacaggca

SEQ ID NO: 1917741 - DNA, 25 bp, Homo sapien
gactcaaacacttgaccaaccagtg

SEQ ID NO: 1917742 - DNA, 25 bp, Homo sapien
aatattccccgatttccatgttggt

SEQ ID NO: 1917743 - DNA, 25 bp, Homo sapien
tgttggtctcaaacagagtcatggc

SEQ ID NO: 1917744 - DNA, 25 bp, Homo sapien
caaaaattgtaagcacttcactggg

SEQ ID NO: 1917745 - DNA, 25 bp, Homo sapien
atcagactgacagccagttctgaca

SEQ ID NO: 1917746 - DNA, 25 bp, Homo sapien
gacagccagttctgacatgaataat

SEQ ID NO: 1917747 - DNA, 25 bp, Homo sapien
catgaataattaacagactgtcctt

SEQ ID NO: 1917748 - DNA, 25 bp, Homo sapien
catacttggaagtgaatttgtttcc

SEQ ID NO: 1917749 - DNA, 25 bp, Homo sapien
cgtaggaaatctactgggttctgca

SEQ ID NO: 1917750 - DNA, 25 bp, Homo sapien
gaaatctactgggttctgcagaaac

SEQ ID NO: 1917751 - DNA, 25 bp, Homo sapien
taggaaatctactgggttctgcaga

SEQ ID NO: 1917752 - DNA, 25 bp, Homo sapien
aatctactgggttctgcagaaacag

SEQ ID NO: 1917753 - DNA, 25 bp, Homo sapien
tcatttgtccaacatttattgtact

SEQ ID NO: 1917754 - DNA, 25 bp, Homo sapien
catttgtccaacatttattgtactg

SEQ ID NO: 1917755 - DNA, 25 bp, Homo sapien
tgtccaacatttattgtactggact

SEQ ID NO: 1917756 - DNA, 25 bp, Homo sapien
tttgtccaacatttattgtactgga

SEQ ID NO: 1917757 - DNA, 25 bp, Homo sapien
tcacagggtctttgcacgcagcccc

SEQ ID NO: 1917758 - DNA, 25 bp, Homo sapien
gcacgcagcccctgccccacaacac

SEQ ID NO: 1917759 - DNA, 25 bp, Homo sapien
ttgcacgcagcccctgccccacaac

SEQ ID NO: 1917760 - DNA, 25 bp, Homo sapien
acagggtctttgcacgcagcccctg

SEQ ID NO: 1917761 - DNA, 25 bp, Homo sapien
tgcctgtccggtcccggagttgaat

SEQ ID NO: 1917762 - DNA, 25 bp, Homo sapien
tgaagtaatgagacgggaacgagac

SEQ ID NO: 1917763 - DNA, 25 bp, Homo sapien
aacgagacttgggacgaactggaga

SEQ ID NO: 1917764 - DNA, 25 bp, Homo sapien
aacataaccgcgaaaggaggaggcg

SEQ ID NO: 1917765 - DNA, 25 bp, Homo sapien
cagccaggcagcgggttcgtctccg

SEQ ID NO: 1917766 - DNA, 25 bp, Homo sapien
gaacgcgttgctcccgaggccgaag

SEQ ID NO: 1917767 - DNA, 25 bp, Homo sapien
agcgggttcgtctccggcgcaagaa

SEQ ID NO: 1917768 - DNA, 25 bp, Homo sapien
tggctgtgtcagaagtcgccgggaa

SEQ ID NO: 1917769 - DNA, 25 bp, Homo sapien
tgcacgtggccgctcgaggcgccac

SEQ ID NO: 1917770 - DNA, 25 bp, Homo sapien
acgcgcgggctgtgtcgggcggcct

SEQ ID NO: 1917771 - DNA, 25 bp, Homo sapien
tagcgcctgcggctctgccgggcct

SEQ ID NO: 1917772 - DNA, 25 bp, Homo sapien
ctggtgaggcggagtgcgcgcgtgc

SEQ ID NO: 1917773 - DNA, 25 bp, Homo sapien
accggcaagtcatgcagctctacaa

SEQ ID NO: 1917774 - DNA, 25 bp, Homo sapien
ggtgcataactaggctcttctttgg

SEQ ID NO: 1917775 - DNA, 25 bp, Homo sapien
gctctacaatgatgctttggggtgc

SEQ ID NO: 1917776 - DNA, 25 bp, Homo sapien
gctttggggtgcataactaggctct

SEQ ID NO: 1917777 - DNA, 25 bp, Homo sapien
tttcatcataactagtgatgctgag

SEQ ID NO: 1917778 - DNA, 25 bp, Homo sapien
agtagttgagacaaccagtgtgtac

SEQ ID NO: 1917779 - DNA, 25 bp, Homo sapien
ctagtagttgagacaaccagtgtgt

SEQ ID NO: 1917780 - DNA, 25 bp, Homo sapien
cctagtagttgagacaaccagtgtg

SEQ ID NO: 1917781 - DNA, 25 bp, Homo sapien
atttgatatgacatgattataatgc

SEQ ID NO: 1917782 - DNA, 25 bp, Homo sapien
tctatttccctatcctgattctatt

SEQ ID NO: 1917783 - DNA, 25 bp, Homo sapien
gatatgacatgattataatgcagta

SEQ ID NO: 1917784 - DNA, 25 bp, Homo sapien
ctatttccctatcctgattctatta

SEQ ID NO: 1917785 - DNA, 25 bp, Homo sapien
taaagtcatgctcttagtaacagtc

SEQ ID NO: 1917786 - DNA, 25 bp, Homo sapien
tcaagttggagagacaaatactttc

SEQ ID NO: 1917787 - DNA, 25 bp, Homo sapien
cagtgtttgacataggaaagcctat

SEQ ID NO: 1917788 - DNA, 25 bp, Homo sapien
gaaagcctatttacataacaatctg

SEQ ID NO: 1917789 - DNA, 25 bp, Homo sapien
agtaccgggcaaaccactcctggcg

SEQ ID NO: 1917790 - DNA, 25 bp, Homo sapien
gaatgtgaagtaccgggcaaaccac

SEQ ID NO: 1917791 - DNA, 25 bp, Homo sapien
tgaagtaccgggcaaaccactcctg

SEQ ID NO: 1917792 - DNA, 25 bp, Homo sapien
tcagaatgtgaagtaccgggcaaac

SEQ ID NO: 1917793 - DNA, 25 bp, Homo sapien
gaatcggttctccactccatgagag

SEQ ID NO: 1917794 - DNA, 25 bp, Homo sapien
cgggttccccatgttgtaagtcgtg

SEQ ID NO: 1917795 - DNA, 25 bp, Homo sapien
tcagcatagattaccacaacgggtt

SEQ ID NO: 1917796 - DNA, 25 bp, Homo sapien
taaggaggagccacatcacaacaat

SEQ ID NO: 1917797 - DNA, 25 bp, Homo sapien
gggaaaattacaaggcacgcaacaa

SEQ ID NO: 1917798 - DNA, 25 bp, Homo sapien
caaggcacgcaacaatgtgtaatgg

SEQ ID NO: 1917799 - DNA, 25 bp, Homo sapien
gttccttgagctcatgcacatgcat

SEQ ID NO: 1917800 - DNA, 25 bp, Homo sapien
caatgtgtaatggaaactccagtag

SEQ ID NO: 1917801 - DNA, 25 bp, Homo sapien
ttagcaggagacaaattcagaggtg

SEQ ID NO: 1917802 - DNA, 25 bp, Homo sapien
catttaatcaacaactgcaaggtaa

SEQ ID NO: 1917803 - DNA, 25 bp, Homo sapien
tactagtgacactgctaagatttag

SEQ ID NO: 1917804 - DNA, 25 bp, Homo sapien
tgaacatacccatgcacaagggaaa

SEQ ID NO: 1917805 - DNA, 25 bp, Homo sapien
tgctgttgaactcaatatcgtggac

SEQ ID NO: 1917806 - DNA, 25 bp, Homo sapien
tccagagcacttagattgggaacac

SEQ ID NO: 1917807 - DNA, 25 bp, Homo sapien
gatccaggcggttaggatgtccatt

SEQ ID NO: 1917808 - DNA, 25 bp, Homo sapien
tgtcttgggccctttaggtggcact

SEQ ID NO: 1917809 - DNA, 25 bp, Homo sapien
gtttgttggtgatttatcattcttc

SEQ ID NO: 1917810 - DNA, 25 bp, Homo sapien
attaaaaataatacatgtgaggata

SEQ ID NO: 1917811 - DNA, 25 bp, Homo sapien
aaaataatacatgtgaggatagtcc

SEQ ID NO: 1917812 - DNA, 25 bp, Homo sapien
taaaaataatacatgtgaggatagt

SEQ ID NO: 1917813 - DNA, 25 bp, Homo sapien
gcattaaaaataatacatgtgagga

SEQ ID NO: 1917814 - DNA, 25 bp, Homo sapien
aacatttaggagtcattcacgagga

SEQ ID NO: 1917815 - DNA, 25 bp, Homo sapien
tctctgacgattggtaggcaacaaa

SEQ ID NO: 1917816 - DNA, 25 bp, Homo sapien
caaactgtggtctgggaatccttgg

SEQ ID NO: 1917817 - DNA, 25 bp, Homo sapien
ccaaaaagaacggtcagaaggctga

SEQ ID NO: 1917818 - DNA, 25 bp, Homo sapien
tgttgaagttagtttctcgattgac

SEQ ID NO: 1917819 - DNA, 25 bp, Homo sapien
ataacaccaacagtaggacttgagt

SEQ ID NO: 1917820 - DNA, 25 bp, Homo sapien
aggacttgagttaaacactttgttg

SEQ ID NO: 1917821 - DNA, 25 bp, Homo sapien
agtttctcgattgactaattccagc

SEQ ID NO: 1917822 - DNA, 25 bp, Homo sapien
gatgcagcaatctataaggcctgtg

SEQ ID NO: 1917823 - DNA, 25 bp, Homo sapien
tggtggattgaagcagcacacactc

SEQ ID NO: 1917824 - DNA, 25 bp, Homo sapien
tagtctcagacaacaggctgcctct

SEQ ID NO: 1917825 - DNA, 25 bp, Homo sapien
aattttccatgagtctgctgctacc

SEQ ID NO: 1917826 - DNA, 25 bp, Homo sapien
atctggtctctttctgtaagcatgg

SEQ ID NO: 1917827 - DNA, 25 bp, Homo sapien
ctggttttgattctctcattagata

SEQ ID NO: 1917828 - DNA, 25 bp, Homo sapien
gatctggtctctttctgtaagcatg

SEQ ID NO: 1917829 - DNA, 25 bp, Homo sapien
tatccatttcaagccaagactagtc

SEQ ID NO: 1917830 - DNA, 25 bp, Homo sapien
aaatttagtccaggtgtgaacaact

SEQ ID NO: 1917831 - DNA, 25 bp, Homo sapien
gaaaacttgatactattccgatatc

SEQ ID NO: 1917832 - DNA, 25 bp, Homo sapien
ggtatacatgggtttgctgcaccca

SEQ ID NO: 1917833 - DNA, 25 bp, Homo sapien
agtcttattaaaatctgcccgcatg

SEQ ID NO: 1917834 - DNA, 25 bp, Homo sapien
tctctgaggtggtctgctgtcatga

SEQ ID NO: 1917835 - DNA, 25 bp, Homo sapien
tccttgagtagctcgttagtcttat

SEQ ID NO: 1917836 - DNA, 25 bp, Homo sapien
taaagcggcatttatttccttgagt

SEQ ID NO: 1917837 - DNA, 25 bp, Homo sapien
gaaggtgctgaacctccttatccaa

SEQ ID NO: 1917838 - DNA, 25 bp, Homo sapien
ttatctgttggttagattcacttcg

SEQ ID NO: 1917839 - DNA, 25 bp, Homo sapien
ccagttctttggttagggcacttat

SEQ ID NO: 1917840 - DNA, 25 bp, Homo sapien
tcagagatgtgatgctctctgtgtc

SEQ ID NO: 1917841 - DNA, 25 bp, Homo sapien
tctgctgatgtctatgcttctctct

SEQ ID NO: 1917842 - DNA, 25 bp, Homo sapien
tgctgatgtctatgcttctctctaa

SEQ ID NO: 1917843 - DNA, 25 bp, Homo sapien
gctgatgtctatgcttctctctaat

SEQ ID NO: 1917844 - DNA, 25 bp, Homo sapien
ttctgctgatgtctatgcttctctc

SEQ ID NO: 1917845 - DNA, 25 bp, Homo sapien
tgttgatggttgagttctgagcgca

SEQ ID NO: 1917846 - DNA, 25 bp, Homo sapien
ttgatggttgagttctgagcgcaag

SEQ ID NO: 1917847 - DNA, 25 bp, Homo sapien
gtaacaaatcaattgcagctgcatg

SEQ ID NO: 1917848 - DNA, 25 bp, Homo sapien
gatgatgattatgccgtaacaaatc

SEQ ID NO: 1917849 - DNA, 25 bp, Homo sapien
cctgttccatttctatccggaagcc

SEQ ID NO: 1917850 - DNA, 25 bp, Homo sapien
tgttccatttctatccggaagccct

SEQ ID NO: 1917851 - DNA, 25 bp, Homo sapien
ttccatttctatccggaagccctcc

SEQ ID NO: 1917852 - DNA, 25 bp, Homo sapien
tcctgttccatttctatccggaagc

SEQ ID NO: 1917853 - DNA, 25 bp, Homo sapien
tttgaaatgcaaggacatgtgcttc

SEQ ID NO: 1917854 - DNA, 25 bp, Homo sapien
cctcttccatagtttgaaatgcaag

SEQ ID NO: 1917855 - DNA, 25 bp, Homo sapien
aatgcaaggacatgtgcttctttta

SEQ ID NO: 1917856 - DNA, 25 bp, Homo sapien
atagtttgaaatgcaaggacatgtg

SEQ ID NO: 1917857 - DNA, 25 bp, Homo sapien
gatgttgctcctctaattcttcaag

SEQ ID NO: 1917858 - DNA, 25 bp, Homo sapien
gttgctcctctaattcttcaagctc

SEQ ID NO: 1917859 - DNA, 25 bp, Homo sapien
ctctaattcttcaagctcttgcgta

SEQ ID NO: 1917860 - DNA, 25 bp, Homo sapien
gctcctctaattcttcaagctcttg

SEQ ID NO: 1917861 - DNA, 25 bp, Homo sapien
tgagactgggaaagctgtatctcca

SEQ ID NO: 1917862 - DNA, 25 bp, Homo sapien
gtctgagactgggaaagctgtatct

SEQ ID NO: 1917863 - DNA, 25 bp, Homo sapien
tctgagactgggaaagctgtatctc

SEQ ID NO: 1917864 - DNA, 25 bp, Homo sapien
ttcttgcgtaaactgggcttgcagt

SEQ ID NO: 1917865 - DNA, 25 bp, Homo sapien
attgctgatagatttatgcaaagct

SEQ ID NO: 1917866 - DNA, 25 bp, Homo sapien
ttgctgatagatttatgcaaagctt

SEQ ID NO: 1917867 - DNA, 25 bp, Homo sapien
tgctgatagatttatgcaaagcttc

SEQ ID NO: 1917868 - DNA, 25 bp, Homo sapien
tccccaagcgctgtggactaaaagt

SEQ ID NO: 1917869 - DNA, 25 bp, Homo sapien
actaaaagtgttcccttagcctcag

SEQ ID NO: 1917870 - DNA, 25 bp, Homo sapien
cagaccttggtaacagtggcttgga

SEQ ID NO: 1917871 - DNA, 25 bp, Homo sapien
ccacagactggttgagatccccaag

SEQ ID NO: 1917872 - DNA, 25 bp, Homo sapien
tctggaactacattattgagctgct

SEQ ID NO: 1917873 - DNA, 25 bp, Homo sapien
cctatttaatgacttgctctgcgga

SEQ ID NO: 1917874 - DNA, 25 bp, Homo sapien
gagctgcttcttgtctaagttctgc

SEQ ID NO: 1917875 - DNA, 25 bp, Homo sapien
tagacacaaattggcaggccccaag

SEQ ID NO: 1917876 - DNA, 25 bp, Homo sapien
cttcacgaagtttagaacactcttg

SEQ ID NO: 1917877 - DNA, 25 bp, Homo sapien
ctggtttaagagatcttctactttc

SEQ ID NO: 1917878 - DNA, 25 bp, Homo sapien
aactgcaaaagttgagacattgctg

SEQ ID NO: 1917879 - DNA, 25 bp, Homo sapien
ttttctctcgatctttcaactgcaa

SEQ ID NO: 1917880 - DNA, 25 bp, Homo sapien
tctaagtcatgggccattttgtcca

SEQ ID NO: 1917881 - DNA, 25 bp, Homo sapien
tttctaagtcatgggccattttgtc

SEQ ID NO: 1917882 - DNA, 25 bp, Homo sapien
ctaagtcatgggccattttgtccac

SEQ ID NO: 1917883 - DNA, 25 bp, Homo sapien
ttctaagtcatgggccattttgtcc

SEQ ID NO: 1917884 - DNA, 25 bp, Homo sapien
caaagctacacactatgtggtggat

SEQ ID NO: 1917885 - DNA, 25 bp, Homo sapien
caattgttatcggttgaactgggtc

SEQ ID NO: 1917886 - DNA, 25 bp, Homo sapien
tactagtaaaagaattgcacgttcc

SEQ ID NO: 1917887 - DNA, 25 bp, Homo sapien
ttatgtatgccccacacacaaggta

SEQ ID NO: 1917888 - DNA, 25 bp, Homo sapien
ttaagttaagatgatgtcaaactgg

SEQ ID NO: 1917889 - DNA, 25 bp, Homo sapien
tgagcccttgttccaatatgcctgg

SEQ ID NO: 1917890 - DNA, 25 bp, Homo sapien
atatgcctggtatccttttaagatg

SEQ ID NO: 1917891 - DNA, 25 bp, Homo sapien
tggaaattatgttgccgaatgccaa

SEQ ID NO: 1917892 - DNA, 25 bp, Homo sapien
tcctgggagtcctgaagactagcaa

SEQ ID NO: 1917893 - DNA, 25 bp, Homo sapien
cttggtctcctttaggctgtcttta

SEQ ID NO: 1917894 - DNA, 25 bp, Homo sapien
ggctgtctttagtcaagtcaagctc

SEQ ID NO: 1917895 - DNA, 25 bp, Homo sapien
tctgcagagccaagaccttgttcac

SEQ ID NO: 1917896 - DNA, 25 bp, Homo sapien
ggaactttgccgatatgagattgaa

SEQ ID NO: 1917897 - DNA, 25 bp, Homo sapien
ctggaactttgccgatatgagattg

SEQ ID NO: 1917898 - DNA, 25 bp, Homo sapien
tggaactttgccgatatgagattga

SEQ ID NO: 1917899 - DNA, 25 bp, Homo sapien
gaactttgccgatatgagattgaag

SEQ ID NO: 1917900 - DNA, 25 bp, Homo sapien
tgagacttacctacctatacaatgt

SEQ ID NO: 1917901 - DNA, 25 bp, Homo sapien
cctatacaatgtcaccagaataagt

SEQ ID NO: 1917902 - DNA, 25 bp, Homo sapien
tgttacctttactgagacttaccta

SEQ ID NO: 1917903 - DNA, 25 bp, Homo sapien
tacctacctatacaatgtcaccaga

SEQ ID NO: 1917904 - DNA, 25 bp, Homo sapien
ctcttgattggctgtattcaacttg

SEQ ID NO: 1917905 - DNA, 25 bp, Homo sapien
ttagtttatctttgttatgttgttc

SEQ ID NO: 1917906 - DNA, 25 bp, Homo sapien
gattggctgtattcaacttgtcttc

SEQ ID NO: 1917907 - DNA, 25 bp, Homo sapien
cttgattggctgtattcaacttgtc

SEQ ID NO: 1917908 - DNA, 25 bp, Homo sapien
cgtttaattgagtcacctcctcttc

SEQ ID NO: 1917909 - DNA, 25 bp, Homo sapien
tgccatatggtgcttccaagctaat

SEQ ID NO: 1917910 - DNA, 25 bp, Homo sapien
tccaaagtcttagaatgggcctcgt

SEQ ID NO: 1917911 - DNA, 25 bp, Homo sapien
taattgcattactgtggacagcttc

SEQ ID NO: 1917912 - DNA, 25 bp, Homo sapien
tctcattgactctcgatttttctga

SEQ ID NO: 1917913 - DNA, 25 bp, Homo sapien
tcctgggtcatttgagttgcttgaa

SEQ ID NO: 1917914 - DNA, 25 bp, Homo sapien
ccagttctagaatctgttgcttctg

SEQ ID NO: 1917915 - DNA, 25 bp, Homo sapien
cagactttgggttttgcttcgcaaa

SEQ ID NO: 1917916 - DNA, 25 bp, Homo sapien
atgctaccttaaattaacatttaag

SEQ ID NO: 1917917 - DNA, 25 bp, Homo sapien
ataaatgctaccttaaattaacatt

SEQ ID NO: 1917918 - DNA, 25 bp, Homo sapien
aataaatgctaccttaaattaacat

SEQ ID NO: 1917919 - DNA, 25 bp, Homo sapien
ttagctaagcattacatcaaaaact

SEQ ID NO: 1917920 - DNA, 25 bp, Homo sapien
aataaagtgttgattttagctaagc

SEQ ID NO: 1917921 - DNA, 25 bp, Homo sapien
ttgattttagctaagcattacatca

SEQ ID NO: 1917922 - DNA, 25 bp, Homo sapien
catcaaaaactgtggtcacacatac

SEQ ID NO: 1917923 - DNA, 25 bp, Homo sapien
ggacaagatctgaagcttgctgttg

SEQ ID NO: 1917924 - DNA, 25 bp, Homo sapien
gttgtaaacgttctctggcagctgc

SEQ ID NO: 1917925 - DNA, 25 bp, Homo sapien
gcttgcttaatagggccatttctcc

SEQ ID NO: 1917926 - DNA, 25 bp, Homo sapien
ggcagctgctagctcactttccact

SEQ ID NO: 1917927 - DNA, 25 bp, Homo sapien
tcataaacatgacccaatcaggaaa

SEQ ID NO: 1917928 - DNA, 25 bp, Homo sapien
aacaaaacttgtggacttccggcat

SEQ ID NO: 1917929 - DNA, 25 bp, Homo sapien
cagacttgtgcaatacccctattaa

SEQ ID NO: 1917930 - DNA, 25 bp, Homo sapien
ttctaaatatcagctagcaggcaaa

SEQ ID NO: 1917931 - DNA, 25 bp, Homo sapien
caagcattttgtttagggactccac

SEQ ID NO: 1917932 - DNA, 25 bp, Homo sapien
tagctcttgtatctcccgtctgtga

SEQ ID NO: 1917933 - DNA, 25 bp, Homo sapien
ggcatttgtcaagaagacttccagc

SEQ ID NO: 1917934 - DNA, 25 bp, Homo sapien
tcactatgcgttggacatgctgggc

SEQ ID NO: 1917935 - DNA, 25 bp, Homo sapien
tctttcttctaaggtctagctcctc

SEQ ID NO: 1917936 - DNA, 25 bp, Homo sapien
gaattgcagattcatgctcatcatt

SEQ ID NO: 1917937 - DNA, 25 bp, Homo sapien
gatcttctaatgatgattctaaaac

SEQ ID NO: 1917938 - DNA, 25 bp, Homo sapien
catctttgagggcttgaattgcaga

SEQ ID NO: 1917939 - DNA, 25 bp, Homo sapien
tgagtaataacagctgtctctgtgg

SEQ ID NO: 1917940 - DNA, 25 bp, Homo sapien
tcctgtgtggcaagccctttaggag

SEQ ID NO: 1917941 - DNA, 25 bp, Homo sapien
taagacaaaccaacgtactcctgtg

SEQ ID NO: 1917942 - DNA, 25 bp, Homo sapien
cctttaggagggctcgcctgagtaa

SEQ ID NO: 1917943 - DNA, 25 bp, Homo sapien
caccatctgcccgtttctcaaacaa

SEQ ID NO: 1917944 - DNA, 25 bp, Homo sapien
tctgacacaactactactcatgtca

SEQ ID NO: 1917945 - DNA, 25 bp, Homo sapien
acaactactactcatgtcaccatct

SEQ ID NO: 1917946 - DNA, 25 bp, Homo sapien
tgacacaactactactcatgtcacc

SEQ ID NO: 1917947 - DNA, 25 bp, Homo sapien
aaacatcatacgtaccccatcaata

SEQ ID NO: 1917948 - DNA, 25 bp, Homo sapien
taatttatgaagaagtgtggctgca

SEQ ID NO: 1917949 - DNA, 25 bp, Homo sapien
gaaataagagctctacaaaggactt

SEQ ID NO: 1917950 - DNA, 25 bp, Homo sapien
ttttcaactaaagtgaggagactga

SEQ ID NO: 1917951 - DNA, 25 bp, Homo sapien
tagaccatgcaatacaacgaccacg

SEQ ID NO: 1917952 - DNA, 25 bp, Homo sapien
gactggcaagtcacacaaaagatta

SEQ ID NO: 1917953 - DNA, 25 bp, Homo sapien
taagagtcatagtcacttaggcccc

SEQ ID NO: 1917954 - DNA, 25 bp, Homo sapien
ccagagggtgtcaggaacctagctc

SEQ ID NO: 1917955 - DNA, 25 bp, Homo sapien
tacttaatgtcctttacattctgaa

SEQ ID NO: 1917956 - DNA, 25 bp, Homo sapien
aattctgacatttacttaatgtcct

SEQ ID NO: 1917957 - DNA, 25 bp, Homo sapien
tatctaatcctgaaatcagttagtg

SEQ ID NO: 1917958 - DNA, 25 bp, Homo sapien
ttagtgattgtctcccataggtgtc

SEQ ID NO: 1917959 - DNA, 25 bp, Homo sapien
cacaagatcaattgaaagggcaaaa

SEQ ID NO: 1917960 - DNA, 25 bp, Homo sapien
agaatggcgttacgaactcccgtca

SEQ ID NO: 1917961 - DNA, 25 bp, Homo sapien
tatttgaatgcttatgaagattttc

SEQ ID NO: 1917962 - DNA, 25 bp, Homo sapien
caaactaattagctttatagaccca

SEQ ID NO: 1917963 - DNA, 25 bp, Homo sapien
gaagcagtttaaagggcagtcaata

SEQ ID NO: 1917964 - DNA, 25 bp, Homo sapien
tatcattaacccagaagagtagcag

SEQ ID NO: 1917965 - DNA, 25 bp, Homo sapien
taagctttggtactatgtgcaaacc

SEQ ID NO: 1917966 - DNA, 25 bp, Homo sapien
aaaagatacagtccctagagctgag

SEQ ID NO: 1917967 - DNA, 25 bp, Homo sapien
gctgtctagcttaaattcatgttgc

SEQ ID NO: 1917968 - DNA, 25 bp, Homo sapien
tgtctccggctgttgcttcggcgga

SEQ ID NO: 1917969 - DNA, 25 bp, Homo sapien
tcggcggaggagtagagttcccctc

SEQ ID NO: 1917970 - DNA, 25 bp, Homo sapien
tttgcagggttttggaggtgtctcc

SEQ ID NO: 1917971 - DNA, 25 bp, Homo sapien
cttggtgagctgggcgattttcttg

SEQ ID NO: 1917972 - DNA, 25 bp, Homo sapien
gtgagctgggcgattttcttgctca

SEQ ID NO: 1917973 - DNA, 25 bp, Homo sapien
ggtgagctgggcgattttcttgctc

SEQ ID NO: 1917974 - DNA, 25 bp, Homo sapien
gagctgggcgattttcttgctcatt

SEQ ID NO: 1917975 - DNA, 25 bp, Homo sapien
gagggcgcgaatttggccgccgagc

SEQ ID NO: 1917976 - DNA, 25 bp, Homo sapien
gagccgccgtaatagtgctgctgcc

SEQ ID NO: 1917977 - DNA, 25 bp, Homo sapien
tcctggctgtagtccatgctgtgcc

SEQ ID NO: 1917978 - DNA, 25 bp, Homo sapien
tgctgccagctcatgcccggggtcg

SEQ ID NO: 1917979 - DNA, 25 bp, Homo sapien
ggaggcaagagtcgcggcggccgct

SEQ ID NO: 1917980 - DNA, 25 bp, Homo sapien
acgcccgggaggcaagagtcgcggc

SEQ ID NO: 1917981 - DNA, 25 bp, Homo sapien
acctgtccccgcgggtggaggcagg

SEQ ID NO: 1917982 - DNA, 25 bp, Homo sapien
aggcccgtggagcaacgacgcccgg

SEQ ID NO: 1917983 - DNA, 25 bp, Homo sapien
gcgggtcccgctcgcagcccgcacc

SEQ ID NO: 1917984 - DNA, 25 bp, Homo sapien
cgcgggtcccgctcgcagcccgcac

SEQ ID NO: 1917985 - DNA, 25 bp, Homo sapien
cggggacaacggcgcggggcagatg

SEQ ID NO: 1917986 - DNA, 25 bp, Homo sapien
gggcagatgcccggggttgggcggc

SEQ ID NO: 1917987 - DNA, 25 bp, Homo sapien
caagaagtggctcttccccaagaag

SEQ ID NO: 1917988 - DNA, 25 bp, Homo sapien
acatgcgtcctcgtgtgtgcagggc

SEQ ID NO: 1917989 - DNA, 25 bp, Homo sapien
cttcggttagcagaacgggtgtcga

SEQ ID NO: 1917990 - DNA, 25 bp, Homo sapien
agaggcaagcccaatccagagacat

SEQ ID NO: 1917991 - DNA, 25 bp, Homo sapien
tcaaccaacactatcattagctttt

SEQ ID NO: 1917992 - DNA, 25 bp, Homo sapien
cataaaatgctggtatgttccttct

SEQ ID NO: 1917993 - DNA, 25 bp, Homo sapien
aaaatgctggtatgttccttcttac

SEQ ID NO: 1917994 - DNA, 25 bp, Homo sapien
tcataaaatgctggtatgttccttc

SEQ ID NO: 1917995 - DNA, 25 bp, Homo sapien
taaaatgctggtatgttccttctta

SEQ ID NO: 1917996 - DNA, 25 bp, Homo sapien
tacggtatgctagaacttgacacat

SEQ ID NO: 1917997 - DNA, 25 bp, Homo sapien
tcccatagaagaaacagtaccttcc

SEQ ID NO: 1917998 - DNA, 25 bp, Homo sapien
tcctattcaatttaacactttcaga

SEQ ID NO: 1917999 - DNA, 25 bp, Homo sapien
cagatttattcccatagatcttttc

SEQ ID NO: 1918000 - DNA, 25 bp, Homo sapien
aaatgtaagatattggccctttagg

SEQ ID NO: 1918001 - DNA, 25 bp, Homo sapien
ttaggatttgctgtaggccagcagt

SEQ ID NO: 1918002 - DNA, 25 bp, Homo sapien
gctgtaggccagcagttagtggaat

SEQ ID NO: 1918003 - DNA, 25 bp, Homo sapien
tccatccctcatcagaagattggga

SEQ ID NO: 1918004 - DNA, 25 bp, Homo sapien
catgaatatttgctgccacctgcag

SEQ ID NO: 1918005 - DNA, 25 bp, Homo sapien
ttatgttgaacataggcgacctggg

SEQ ID NO: 1918006 - DNA, 25 bp, Homo sapien
taactgaagtgtggcccagcaaatg

SEQ ID NO: 1918007 - DNA, 25 bp, Homo sapien
aaggttgcgatgagtatcctcgtca

SEQ ID NO: 1918008 - DNA, 25 bp, Homo sapien
gcaaattattttggcggtgtcgaga

SEQ ID NO: 1918009 - DNA, 25 bp, Homo sapien
gcggtgtcgagaatgcagcagttta

SEQ ID NO: 1918010 - DNA, 25 bp, Homo sapien
aatgtactacgaaaaatgcatgtag

SEQ ID NO: 1918011 - DNA, 25 bp, Homo sapien
gttctagtcacaatgcaaattattt

SEQ ID NO: 1918012 - DNA, 25 bp, Homo sapien
ttttagggcccagatgcatttcact

SEQ ID NO: 1918013 - DNA, 25 bp, Homo sapien
tcttttagggcccagatgcatttca

SEQ ID NO: 1918014 - DNA, 25 bp, Homo sapien
tcctgatcttttagggcccagatgc

SEQ ID NO: 1918015 - DNA, 25 bp, Homo sapien
tgaagcagatgtggtggggctttcc

SEQ ID NO: 1918016 - DNA, 25 bp, Homo sapien
gccaggctggcttgtttgagtctat

SEQ ID NO: 1918017 - DNA, 25 bp, Homo sapien
ctcctggaccaagaaaccctgtcct

SEQ ID NO: 1918018 - DNA, 25 bp, Homo sapien
ttactattctgtagttcagctccac

SEQ ID NO: 1918019 - DNA, 25 bp, Homo sapien
tctccgatgtctacgtgccaggctg

SEQ ID NO: 1918020 - DNA, 25 bp, Homo sapien
ttcagtccttgtaatcagcatcatc

SEQ ID NO: 1918021 - DNA, 25 bp, Homo sapien
cattttcggaaccatgctctccgct

SEQ ID NO: 1918022 - DNA, 25 bp, Homo sapien
tttctttcagtccttgtaatcagca

SEQ ID NO: 1918023 - DNA, 25 bp, Homo sapien
ttcggaaccatgctctccgctttct

SEQ ID NO: 1918024 - DNA, 25 bp, Homo sapien
tctcaagggcaccagcagaacagag

SEQ ID NO: 1918025 - DNA, 25 bp, Homo sapien
tttcccacactccaagcaggaaaac

SEQ ID NO: 1918026 - DNA, 25 bp, Homo sapien
aatgcctgcaatctggttccctcgc

SEQ ID NO: 1918027 - DNA, 25 bp, Homo sapien
aagtctcaagggcaccagcagaaca

SEQ ID NO: 1918028 - DNA, 25 bp, Homo sapien
gcaaagatgcctctgtaaataaatc

SEQ ID NO: 1918029 - DNA, 25 bp, Homo sapien
aaagatgcctctgtaaataaatcac

SEQ ID NO: 1918030 - DNA, 25 bp, Homo sapien
agcaaagatgcctctgtaaataaat

SEQ ID NO: 1918031 - DNA, 25 bp, Homo sapien
caaagatgcctctgtaaataaatca

SEQ ID NO: 1918032 - DNA, 25 bp, Homo sapien
gcagctcgacagtcgagtgcagcgt

SEQ ID NO: 1918033 - DNA, 25 bp, Homo sapien
cagtcgagtgcagcgttggcaccaa

SEQ ID NO: 1918034 - DNA, 25 bp, Homo sapien
gagtgcagcgttggcaccaaccgga

SEQ ID NO: 1918035 - DNA, 25 bp, Homo sapien
tcgacagtcgagtgcagcgttggca

SEQ ID NO: 1918036 - DNA, 25 bp, Homo sapien
tttgacatgaaaggccctttggctt

SEQ ID NO: 1918037 - DNA, 25 bp, Homo sapien
catgaaaggccctttggcttggttt

SEQ ID NO: 1918038 - DNA, 25 bp, Homo sapien
ttttgacatgaaaggccctttggct

SEQ ID NO: 1918039 - DNA, 25 bp, Homo sapien
tgacatgaaaggccctttggcttgg

SEQ ID NO: 1918040 - DNA, 25 bp, Homo sapien
tggtccatcattatgctaaataaac

SEQ ID NO: 1918041 - DNA, 25 bp, Homo sapien
gtccatcattatgctaaataaacgg

SEQ ID NO: 1918042 - DNA, 25 bp, Homo sapien
tttccctcttcacacgcagagctga

SEQ ID NO: 1918043 - DNA, 25 bp, Homo sapien
ttttggtccatcattatgctaaata

SEQ ID NO: 1918044 - DNA, 25 bp, Homo sapien
tgaccccaaacctgggtgctctgga

SEQ ID NO: 1918045 - DNA, 25 bp, Homo sapien
gaatactgtagccttgtgaccagct

SEQ ID NO: 1918046 - DNA, 25 bp, Homo sapien
gaactgtatctttaacacagccagg

SEQ ID NO: 1918047 - DNA, 25 bp, Homo sapien
ctttcttgaaagatagcggcccaat

SEQ ID NO: 1918048 - DNA, 25 bp, Homo sapien
tgtgcagacgatccacatctggctt

SEQ ID NO: 1918049 - DNA, 25 bp, Homo sapien
tgcatgatctcccacggtgctaagg

SEQ ID NO: 1918050 - DNA, 25 bp, Homo sapien
caaaccagagtacagctgagaggct

SEQ ID NO: 1918051 - DNA, 25 bp, Homo sapien
ctaagggagatagcacatgggtgct

SEQ ID NO: 1918052 - DNA, 25 bp, Homo sapien
acagcaaacacacaagtcatcagca

SEQ ID NO: 1918053 - DNA, 25 bp, Homo sapien
gtacagcaaacacacaagtcatcag

SEQ ID NO: 1918054 - DNA, 25 bp, Homo sapien
tacagcaaacacacaagtcatcagc

SEQ ID NO: 1918055 - DNA, 25 bp, Homo sapien
ggtacagcaaacacacaagtcatca

SEQ ID NO: 1918056 - DNA, 25 bp, Homo sapien
ggatgtatcccctgcagtttttctg

SEQ ID NO: 1918057 - DNA, 25 bp, Homo sapien
ctcttggatgtatcccctgcagttt

SEQ ID NO: 1918058 - DNA, 25 bp, Homo sapien
ttggatgtatcccctgcagtttttc

SEQ ID NO: 1918059 - DNA, 25 bp, Homo sapien
gatgtatcccctgcagtttttctgc

SEQ ID NO: 1918060 - DNA, 25 bp, Homo sapien
agtctggctgccgtaggctcccatc

SEQ ID NO: 1918061 - DNA, 25 bp, Homo sapien
gaaattgcgcatttggcagtctggc

SEQ ID NO: 1918062 - DNA, 25 bp, Homo sapien
tttgccacaagaaattgcgcatttg

SEQ ID NO: 1918063 - DNA, 25 bp, Homo sapien
gcagtaggaagacgactcttctccc

SEQ ID NO: 1918064 - DNA, 25 bp, Homo sapien
gaagttattctggatcacagacaca

SEQ ID NO: 1918065 - DNA, 25 bp, Homo sapien
tgccactgagagagcaacatatagt

SEQ ID NO: 1918066 - DNA, 25 bp, Homo sapien
taaactgccatacaacttacatgtg

SEQ ID NO: 1918067 - DNA, 25 bp, Homo sapien
cagcttcttgtctattcacaccagg

SEQ ID NO: 1918068 - DNA, 25 bp, Homo sapien
gatctttctgaccattctcggctga

SEQ ID NO: 1918069 - DNA, 25 bp, Homo sapien
ggtcataaagatggtcctgtccgat

SEQ ID NO: 1918070 - DNA, 25 bp, Homo sapien
caaaaaactggtggatacactggct

SEQ ID NO: 1918071 - DNA, 25 bp, Homo sapien
tatagtgggccaatgtaagcaaaca

SEQ ID NO: 1918072 - DNA, 25 bp, Homo sapien
gaagatcgtcgtcagaaaatattag

SEQ ID NO: 1918073 - DNA, 25 bp, Homo sapien
gatgtgcctcgctattgaagatcca

SEQ ID NO: 1918074 - DNA, 25 bp, Homo sapien
gatagggagaagatgtgcctcgcta

SEQ ID NO: 1918075 - DNA, 25 bp, Homo sapien
gaagatccaatgctccagtggaaga

SEQ ID NO: 1918076 - DNA, 25 bp, Homo sapien
ttaggcctgaatagcctccattcac

SEQ ID NO: 1918077 - DNA, 25 bp, Homo sapien
cctccattcactctgcaatggtttt

SEQ ID NO: 1918078 - DNA, 25 bp, Homo sapien
atcccttaggcctgaatagcctcca

SEQ ID NO: 1918079 - DNA, 25 bp, Homo sapien
aaacatcccttaggcctgaatagcc

SEQ ID NO: 1918080 - DNA, 25 bp, Homo sapien
catttcagtaaactgattgtcacta

SEQ ID NO: 1918081 - DNA, 25 bp, Homo sapien
cacatttcagtaaactgattgtcac

SEQ ID NO: 1918082 - DNA, 25 bp, Homo sapien
ttattattagattgtcaagttcaga

SEQ ID NO: 1918083 - DNA, 25 bp, Homo sapien
tattagattgtcaagttcagataaa

SEQ ID NO: 1918084 - DNA, 25 bp, Homo sapien
gagagactgctaatgtcaactggga

SEQ ID NO: 1918085 - DNA, 25 bp, Homo sapien
tcaactgggatcataaaccactggt

SEQ ID NO: 1918086 - DNA, 25 bp, Homo sapien
gcctgatattgtctggcccttaaca

SEQ ID NO: 1918087 - DNA, 25 bp, Homo sapien
ccactggttgagaaaccgtactgga

SEQ ID NO: 1918088 - DNA, 25 bp, Homo sapien
gatgactccactgacaactctctag

SEQ ID NO: 1918089 - DNA, 25 bp, Homo sapien
tggttaccactaagatggctgctgt

SEQ ID NO: 1918090 - DNA, 25 bp, Homo sapien
tattctgcatcctcactaagactga

SEQ ID NO: 1918091 - DNA, 25 bp, Homo sapien
tccagctttaccgatgtatgacaaa

SEQ ID NO: 1918092 - DNA, 25 bp, Homo sapien
catcgtacaaaaattgccatctgca

SEQ ID NO: 1918093 - DNA, 25 bp, Homo sapien
gccttatcagttgagaaaaaccttc

SEQ ID NO: 1918094 - DNA, 25 bp, Homo sapien
tttaatccaactaccaagaagatgg

SEQ ID NO: 1918095 - DNA, 25 bp, Homo sapien
ttcccctgtggatcataattctgtc

SEQ ID NO: 1918096 - DNA, 25 bp, Homo sapien
tatataaatggctgatccgtggagt

SEQ ID NO: 1918097 - DNA, 25 bp, Homo sapien
tgcttgagtgtcgtctgaactcaag

SEQ ID NO: 1918098 - DNA, 25 bp, Homo sapien
tggagtaaggctgtctgcttgagtg

SEQ ID NO: 1918099 - DNA, 25 bp, Homo sapien
tgtcgtctgaactcaaggatagaac

SEQ ID NO: 1918100 - DNA, 25 bp, Homo sapien
aagtcacttcctgagagtcgaaatg

SEQ ID NO: 1918101 - DNA, 25 bp, Homo sapien
agtcacttcctgagagtcgaaatgt

SEQ ID NO: 1918102 - DNA, 25 bp, Homo sapien
aagagaggttcacactattcagccc

SEQ ID NO: 1918103 - DNA, 25 bp, Homo sapien
gaaaaaatcacactgcgaagagaga

SEQ ID NO: 1918104 - DNA, 25 bp, Homo sapien
gaacctgctgtcttcggataattga

SEQ ID NO: 1918105 - DNA, 25 bp, Homo sapien
caagttggaccataagctgtgaaaa

SEQ ID NO: 1918106 - DNA, 25 bp, Homo sapien
tcttgtagcgatggcttcaacacca

SEQ ID NO: 1918107 - DNA, 25 bp, Homo sapien
catcaaatctgaaagcttctggtcc

SEQ ID NO: 1918108 - DNA, 25 bp, Homo sapien
taacttctggccgtaagatgtagta

SEQ ID NO: 1918109 - DNA, 25 bp, Homo sapien
ggatcatgagtcagtctccacatat

SEQ ID NO: 1918110 - DNA, 25 bp, Homo sapien
atttcagccccgagttcaaggtagt

SEQ ID NO: 1918111 - DNA, 25 bp, Homo sapien
gttcgattatatgattcatgacaag

SEQ ID NO: 1918112 - DNA, 25 bp, Homo sapien
tatatgattcatgacaagtacgggc

SEQ ID NO: 1918113 - DNA, 25 bp, Homo sapien
caaggtagtgttgggccatgccttc

SEQ ID NO: 1918114 - DNA, 25 bp, Homo sapien
cgatataagttagtccgctgctaga

SEQ ID NO: 1918115 - DNA, 25 bp, Homo sapien
tgcggatcaaatgagtctcgatagc

SEQ ID NO: 1918116 - DNA, 25 bp, Homo sapien
cccctttccactctgcgatataagt

SEQ ID NO: 1918117 - DNA, 25 bp, Homo sapien
gtcaggtggcccatcttgtgctcca

SEQ ID NO: 1918118 - DNA, 25 bp, Homo sapien
tgtcagacattaaccaggccttcag

SEQ ID NO: 1918119 - DNA, 25 bp, Homo sapien
agaagctgtctccaagtcctccaac

SEQ ID NO: 1918120 - DNA, 25 bp, Homo sapien
ccaagtcctccaactgatacatgat

SEQ ID NO: 1918121 - DNA, 25 bp, Homo sapien
tcagcaaatactcatagaagctgtc

SEQ ID NO: 1918122 - DNA, 25 bp, Homo sapien
ggtttggcattgtcaaaacaacact

SEQ ID NO: 1918123 - DNA, 25 bp, Homo sapien
caggatccagacgtgtcatttggag

SEQ ID NO: 1918124 - DNA, 25 bp, Homo sapien
cactgactcgatgaagtgataggaa

SEQ ID NO: 1918125 - DNA, 25 bp, Homo sapien
tgatggccaggatccagacgtgtca

SEQ ID NO: 1918126 - DNA, 25 bp, Homo sapien
tcaaatattacgctcttctctgaag

SEQ ID NO: 1918127 - DNA, 25 bp, Homo sapien
ttcttcataagaataggtcccataa

SEQ ID NO: 1918128 - DNA, 25 bp, Homo sapien
caaatattacgctcttctctgaagg

SEQ ID NO: 1918129 - DNA, 25 bp, Homo sapien
tatcagtgaccaggaccggatactg

SEQ ID NO: 1918130 - DNA, 25 bp, Homo sapien
tgaccaggaccggatactgcctttc

SEQ ID NO: 1918131 - DNA, 25 bp, Homo sapien
tcatattatcagtgaccaggaccgg

SEQ ID NO: 1918132 - DNA, 25 bp, Homo sapien
ggatactgcctttcagccacaactg

SEQ ID NO: 1918133 - DNA, 25 bp, Homo sapien
ttgaccccactgtccactactggga

SEQ ID NO: 1918134 - DNA, 25 bp, Homo sapien
ctgggattcagatagttaggataaa

SEQ ID NO: 1918135 - DNA, 25 bp, Homo sapien
tcagtactgttcgaatattcattac

SEQ ID NO: 1918136 - DNA, 25 bp, Homo sapien
agtttgttcagtactgttcgaatat

SEQ ID NO: 1918137 - DNA, 25 bp, Homo sapien
aaatgcagggttccaaattctgcca

SEQ ID NO: 1918138 - DNA, 25 bp, Homo sapien
gggtttcctgataagtggctcaagt

SEQ ID NO: 1918139 - DNA, 25 bp, Homo sapien
tctgccagaatactgctgcctccag

SEQ ID NO: 1918140 - DNA, 25 bp, Homo sapien
agtggctcaagtgcataaactccaa

SEQ ID NO: 1918141 - DNA, 25 bp, Homo sapien
aacaaagctgcgacataaggcaata

SEQ ID NO: 1918142 - DNA, 25 bp, Homo sapien
ttattaggctctgggaatgtgagtc

SEQ ID NO: 1918143 - DNA, 25 bp, Homo sapien
gtttactaacatatggcaaatgcac

SEQ ID NO: 1918144 - DNA, 25 bp, Homo sapien
taaggcaatatcagggtaagaggag

SEQ ID NO: 1918145 - DNA, 25 bp, Homo sapien
taaagctaacttatgttcagacaaa

SEQ ID NO: 1918146 - DNA, 25 bp, Homo sapien
aaagatgccagctggaagatgtcag

SEQ ID NO: 1918147 - DNA, 25 bp, Homo sapien
gggaatgtgtattagagacataaac

SEQ ID NO: 1918148 - DNA, 25 bp, Homo sapien
caattcagtggtgtctagtttcttt

SEQ ID NO: 1918149 - DNA, 25 bp, Homo sapien
tttccagtgtgggccaatgatatcc

SEQ ID NO: 1918150 - DNA, 25 bp, Homo sapien
ccagtgtgggccaatgatatcccac

SEQ ID NO: 1918151 - DNA, 25 bp, Homo sapien
ctctttccagtgtgggccaatgata

SEQ ID NO: 1918152 - DNA, 25 bp, Homo sapien
tccagtgtgggccaatgatatccca

SEQ ID NO: 1918153 - DNA, 25 bp, Homo sapien
atatggtagcctccatagcccttgg

SEQ ID NO: 1918154 - DNA, 25 bp, Homo sapien
tcatatggtagcctccatagccctt

SEQ ID NO: 1918155 - DNA, 25 bp, Homo sapien
catagcccttgggatattgcacatc

SEQ ID NO: 1918156 - DNA, 25 bp, Homo sapien
tagcccttgggatattgcacatcca

SEQ ID NO: 1918157 - DNA, 25 bp, Homo sapien
gtaaatcatcatattgagtcttttt

SEQ ID NO: 1918158 - DNA, 25 bp, Homo sapien
taaatcatcatattgagtcttttta

SEQ ID NO: 1918159 - DNA, 25 bp, Homo sapien
ttctaataagcttcaagttggaata

SEQ ID NO: 1918160 - DNA, 25 bp, Homo sapien
taataagcttcaagttggaatagaa

SEQ ID NO: 1918161 - DNA, 25 bp, Homo sapien
aataagcttcaagttggaatagaag

SEQ ID NO: 1918162 - DNA, 25 bp, Homo sapien
tctaataagcttcaagttggaatag

SEQ ID NO: 1918163 - DNA, 25 bp, Homo sapien
gggcccagctgaattaccagagcaa

SEQ ID NO: 1918164 - DNA, 25 bp, Homo sapien
tcagcaacttaagactgagccagtc

SEQ ID NO: 1918165 - DNA, 25 bp, Homo sapien
aagtctggcaccattagtctcaggg

SEQ ID NO: 1918166 - DNA, 25 bp, Homo sapien
gagccagtcagtcaggcataattta

SEQ ID NO: 1918167 - DNA, 25 bp, Homo sapien
tgaagaataaagctaccaaactact

SEQ ID NO: 1918168 - DNA, 25 bp, Homo sapien
tgtgcgcatagcttgtgataaaaac

SEQ ID NO: 1918169 - DNA, 25 bp, Homo sapien
cagagattactctcaaacagatgct

SEQ ID NO: 1918170 - DNA, 25 bp, Homo sapien
tctgcctacaacttatggtttggag

SEQ ID NO: 1918171 - DNA, 25 bp, Homo sapien
tacattttcagtgattaagattata

SEQ ID NO: 1918172 - DNA, 25 bp, Homo sapien
acattttcagtgattaagattatat

SEQ ID NO: 1918173 - DNA, 25 bp, Homo sapien
cattttcagtgattaagattatatt

SEQ ID NO: 1918174 - DNA, 25 bp, Homo sapien
ttcagtgattaagattatattatta

SEQ ID NO: 1918175 - DNA, 25 bp, Homo sapien
tctcctctcacctaagattatgttt

SEQ ID NO: 1918176 - DNA, 25 bp, Homo sapien
ttttcctaattaggttcaggagaga

SEQ ID NO: 1918177 - DNA, 25 bp, Homo sapien
tcaggagagaaagttatagtagtat

SEQ ID NO: 1918178 - DNA, 25 bp, Homo sapien
cctctcacctaagattatgtttaaa

SEQ ID NO: 1918179 - DNA, 25 bp, Homo sapien
tataaggtttgtaaaggacatcatg

SEQ ID NO: 1918180 - DNA, 25 bp, Homo sapien
gcaggtggctaagtaatcaactatg

SEQ ID NO: 1918181 - DNA, 25 bp, Homo sapien
gccaaaacttgttcattacgacaac

SEQ ID NO: 1918182 - DNA, 25 bp, Homo sapien
tcatgatatttggagttgctgatcc

SEQ ID NO: 1918183 - DNA, 25 bp, Homo sapien
tcaacaacagttacaagcccagtgc

SEQ ID NO: 1918184 - DNA, 25 bp, Homo sapien
aattagccaatttcctgagccaagg

SEQ ID NO: 1918185 - DNA, 25 bp, Homo sapien
tataggttagcagttaaattagcca

SEQ ID NO: 1918186 - DNA, 25 bp, Homo sapien
ttttttcagatactacaggatgtca

SEQ ID NO: 1918187 - DNA, 25 bp, Homo sapien
cttgacctcttgggctcaagcaatc

SEQ ID NO: 1918188 - DNA, 25 bp, Homo sapien
tggtgtggtcatggcttactgtagc

SEQ ID NO: 1918189 - DNA, 25 bp, Homo sapien
gtggtgtggtcatggcttactgtag

SEQ ID NO: 1918190 - DNA, 25 bp, Homo sapien
tgtggtcatggcttactgtagcctt

SEQ ID NO: 1918191 - DNA, 25 bp, Homo sapien
cttgccactgggattccatttggta

SEQ ID NO: 1918192 - DNA, 25 bp, Homo sapien
tgccactgggattccatttggtact

SEQ ID NO: 1918193 - DNA, 25 bp, Homo sapien
ccactgggattccatttggtactcc

SEQ ID NO: 1918194 - DNA, 25 bp, Homo sapien
ctgggattccatttggtactcccat

SEQ ID NO: 1918195 - DNA, 25 bp, Homo sapien
cacaggacagagttaaaggctggca

SEQ ID NO: 1918196 - DNA, 25 bp, Homo sapien
gacatgctataagggagacactggg

SEQ ID NO: 1918197 - DNA, 25 bp, Homo sapien
gaaaccagagggatagctacctttg

SEQ ID NO: 1918198 - DNA, 25 bp, Homo sapien
cataggtggcactgaaaactggcac

SEQ ID NO: 1918199 - DNA, 25 bp, Homo sapien
gctacatgtggatgaacatagggtt

SEQ ID NO: 1918200 - DNA, 25 bp, Homo sapien
gaaaccaagtgttatgagaaggagg

SEQ ID NO: 1918201 - DNA, 25 bp, Homo sapien
gcttatactggcaatgggaaaccaa

SEQ ID NO: 1918202 - DNA, 25 bp, Homo sapien
acatagggttacagagtgcagtgcc

SEQ ID NO: 1918203 - DNA, 25 bp, Homo sapien
gcctcctcaaggctggaggcttgag

SEQ ID NO: 1918204 - DNA, 25 bp, Homo sapien
gcttgaggagtcaggacaaggtgga

SEQ ID NO: 1918205 - DNA, 25 bp, Homo sapien
gagggaagagcaaaggtctcctcat

SEQ ID NO: 1918206 - DNA, 25 bp, Homo sapien
ctaatacaattactgaggagctttc

SEQ ID NO: 1918207 - DNA, 25 bp, Homo sapien
gaagaatggcttacacctgagaggt

SEQ ID NO: 1918208 - DNA, 25 bp, Homo sapien
tggagcagtaagctgaggttgtacc

SEQ ID NO: 1918209 - DNA, 25 bp, Homo sapien
tcatgcctgctaacataatgtctgt

SEQ ID NO: 1918210 - DNA, 25 bp, Homo sapien
tctgttctgcaactcatggattgag

SEQ ID NO: 1918211 - DNA, 25 bp, Homo sapien
ggtgagttaactgcttaaactgtgg

SEQ ID NO: 1918212 - DNA, 25 bp, Homo sapien
gagttaactgcttaaactgtggtag

SEQ ID NO: 1918213 - DNA, 25 bp, Homo sapien
cctggtgagttaactgcttaaactg

SEQ ID NO: 1918214 - DNA, 25 bp, Homo sapien
ttaactgcttaaactgtggtagatg

SEQ ID NO: 1918215 - DNA, 25 bp, Homo sapien
tatcagggttctccaccaaagagga

SEQ ID NO: 1918216 - DNA, 25 bp, Homo sapien
taacatggcccagaggtgtgaactc

SEQ ID NO: 1918217 - DNA, 25 bp, Homo sapien
caaacctcgagtagctgtaaagacc

SEQ ID NO: 1918218 - DNA, 25 bp, Homo sapien
gaatgactctgttgaggtcacgcca

SEQ ID NO: 1918219 - DNA, 25 bp, Homo sapien
atgcaggtagcaattttaccccaag

SEQ ID NO: 1918220 - DNA, 25 bp, Homo sapien
tattccagagggagtatgaaatgca

SEQ ID NO: 1918221 - DNA, 25 bp, Homo sapien
ttcagcaatgcccaaggtattccag

SEQ ID NO: 1918222 - DNA, 25 bp, Homo sapien
catattcagcaatgcccaaggtatt

SEQ ID NO: 1918223 - DNA, 25 bp, Homo sapien
tgagcatggtggactggaagcgtac

SEQ ID NO: 1918224 - DNA, 25 bp, Homo sapien
ggtggactggaagcgtaccatttcc

SEQ ID NO: 1918225 - DNA, 25 bp, Homo sapien
gactggaagcgtaccatttcctcct

SEQ ID NO: 1918226 - DNA, 25 bp, Homo sapien
catggtggactggaagcgtaccatt

SEQ ID NO: 1918227 - DNA, 25 bp, Homo sapien
cagatagtatcagacaaggctgtaa

SEQ ID NO: 1918228 - DNA, 25 bp, Homo sapien
gctgtaaacaagacatatggttttc

SEQ ID NO: 1918229 - DNA, 25 bp, Homo sapien
ctgtaaacaagacatatggttttct

SEQ ID NO: 1918230 - DNA, 25 bp, Homo sapien
gacagatagtatcagacaaggctgt

SEQ ID NO: 1918231 - DNA, 25 bp, Homo sapien
taagagtcaggagccctaggttctg

SEQ ID NO: 1918232 - DNA, 25 bp, Homo sapien
tcgataagacacttcctgaggaacg

SEQ ID NO: 1918233 - DNA, 25 bp, Homo sapien
gttcagggcttgctactcaccagtt

SEQ ID NO: 1918234 - DNA, 25 bp, Homo sapien
tgagcatcagcgtggtcaaggctgc

SEQ ID NO: 1918235 - DNA, 25 bp, Homo sapien
cacataaataagtagcgggctggga

SEQ ID NO: 1918236 - DNA, 25 bp, Homo sapien
cagtagctctcattggttatgggac

SEQ ID NO: 1918237 - DNA, 25 bp, Homo sapien
tttcatgatagcgagcaggtggaga

SEQ ID NO: 1918238 - DNA, 25 bp, Homo sapien
tggttaaaagagcacatcagatgtc

SEQ ID NO: 1918239 - DNA, 25 bp, Homo sapien
ctatcttacggtgaagggcacaagc

SEQ ID NO: 1918240 - DNA, 25 bp, Homo sapien
tcttacggtgaagggcacaagcttc

SEQ ID NO: 1918241 - DNA, 25 bp, Homo sapien
tacggtgaagggcacaagcttcagg

SEQ ID NO: 1918242 - DNA, 25 bp, Homo sapien
acggtgaagggcacaagcttcagga

SEQ ID NO: 1918243 - DNA, 25 bp, Homo sapien
gaattgcttgcataattgacctttt

SEQ ID NO: 1918244 - DNA, 25 bp, Homo sapien
ctgcgccccgcctattgctttttaa

SEQ ID NO: 1918245 - DNA, 25 bp, Homo sapien
aaaggaattgcttgcataattgacc

SEQ ID NO: 1918246 - DNA, 25 bp, Homo sapien
aaaaaggaattgcttgcataattga

SEQ ID NO: 1918247 - DNA, 25 bp, Homo sapien
ccttaccacatacaattggcaaatt

SEQ ID NO: 1918248 - DNA, 25 bp, Homo sapien
aaccttaccacatacaattggcaaa

SEQ ID NO: 1918249 - DNA, 25 bp, Homo sapien
atcaaccttaccacatacaattggc

SEQ ID NO: 1918250 - DNA, 25 bp, Homo sapien
tcaaccttaccacatacaattggca

SEQ ID NO: 1918251 - DNA, 25 bp, Homo sapien
catgtctgtgaaggttaatactgag

SEQ ID NO: 1918252 - DNA, 25 bp, Homo sapien
cacatgcatgtatctattgtgcact

SEQ ID NO: 1918253 - DNA, 25 bp, Homo sapien
ccataaaaaatgagaccatgtctgt

SEQ ID NO: 1918254 - DNA, 25 bp, Homo sapien
ctaaatgctcatcagcagtagacta

SEQ ID NO: 1918255 - DNA, 25 bp, Homo sapien
tccttgggattctgatgtacactac

SEQ ID NO: 1918256 - DNA, 25 bp, Homo sapien
ctttcctaaagagtggtgacagcca

SEQ ID NO: 1918257 - DNA, 25 bp, Homo sapien
tcttcagggattttaagagggctct

SEQ ID NO: 1918258 - DNA, 25 bp, Homo sapien
taacaggcccaacccagatttactg

SEQ ID NO: 1918259 - DNA, 25 bp, Homo sapien
caggatggaaatataaactagagat

SEQ ID NO: 1918260 - DNA, 25 bp, Homo sapien
gatggaaatataaactagagatgta

SEQ ID NO: 1918261 - DNA, 25 bp, Homo sapien
gaaatataaactagagatgtatgta

SEQ ID NO: 1918262 - DNA, 25 bp, Homo sapien
aacaggatggaaatataaactagag

SEQ ID NO: 1918263 - DNA, 25 bp, Homo sapien
taagtgagtattgcaagatttcagg

SEQ ID NO: 1918264 - DNA, 25 bp, Homo sapien
tgtgagcacacacctaaaaaatgaa

SEQ ID NO: 1918265 - DNA, 25 bp, Homo sapien
tgtacaagatccatatgaagaaaac

SEQ ID NO: 1918266 - DNA, 25 bp, Homo sapien
tcaaagaacagatggagatattcca

SEQ ID NO: 1918267 - DNA, 25 bp, Homo sapien
gggcctgtttacatagcctcataag

SEQ ID NO: 1918268 - DNA, 25 bp, Homo sapien
gcagtgggatcccattaaacacctt

SEQ ID NO: 1918269 - DNA, 25 bp, Homo sapien
aaccaggcaccccagataggcaaat

SEQ ID NO: 1918270 - DNA, 25 bp, Homo sapien
gcttggtcttgcgaagcagcatgcc

SEQ ID NO: 1918271 - DNA, 25 bp, Homo sapien
tcaagcggtctgccaaaagatgcag

SEQ ID NO: 1918272 - DNA, 25 bp, Homo sapien
caaaagatgcagatggggggcctca

SEQ ID NO: 1918273 - DNA, 25 bp, Homo sapien
gggcctcaggaagggttggtgttca

SEQ ID NO: 1918274 - DNA, 25 bp, Homo sapien
ggcctcaggaagggttggtgttcat

SEQ ID NO: 1918275 - DNA, 25 bp, Homo sapien
gtgaaggaaggccaggtactccaac

SEQ ID NO: 1918276 - DNA, 25 bp, Homo sapien
ttgtgaaggaaggccaggtactcca

SEQ ID NO: 1918277 - DNA, 25 bp, Homo sapien
tgtgaaggaaggccaggtactccaa

SEQ ID NO: 1918278 - DNA, 25 bp, Homo sapien
gatgcctttgcagtgcacgaccacc

SEQ ID NO: 1918279 - DNA, 25 bp, Homo sapien
tgttgatgcctttgcagtgcacgac

SEQ ID NO: 1918280 - DNA, 25 bp, Homo sapien
ggaaagtgccaaaaatgttgatgcc

SEQ ID NO: 1918281 - DNA, 25 bp, Homo sapien
ctgtggaaagtgccaaaaatgttga

SEQ ID NO: 1918282 - DNA, 25 bp, Homo sapien
ctgcctatccaggacggctgtcagg

SEQ ID NO: 1918283 - DNA, 25 bp, Homo sapien
tgcctatccaggacggctgtcaggc

SEQ ID NO: 1918284 - DNA, 25 bp, Homo sapien
catagctactggtttcatactgttt

SEQ ID NO: 1918285 - DNA, 25 bp, Homo sapien
gagtcctttgaccttactctagcag

SEQ ID NO: 1918286 - DNA, 25 bp, Homo sapien
tgtgttagagatgctcatagctact

SEQ ID NO: 1918287 - DNA, 25 bp, Homo sapien
aatattaattcaagcccgcactctg

SEQ ID NO: 1918288 - DNA, 25 bp, Homo sapien
agactgtgtccttccgttttaatag

SEQ ID NO: 1918289 - DNA, 25 bp, Homo sapien
tttacacatggcttcaatatcggtg

SEQ ID NO: 1918290 - DNA, 25 bp, Homo sapien
taaagcctcacgagtttctggtaga

SEQ ID NO: 1918291 - DNA, 25 bp, Homo sapien
cagtttccatggtaaagtgagtcta

SEQ ID NO: 1918292 - DNA, 25 bp, Homo sapien
gaaatcttgttactatcagcagcct

SEQ ID NO: 1918293 - DNA, 25 bp, Homo sapien
tgagactgtgcaaggatttatgacc

SEQ ID NO: 1918294 - DNA, 25 bp, Homo sapien
tgtgccaggtatctcagtagcccaa

SEQ ID NO: 1918295 - DNA, 25 bp, Homo sapien
gaaggatcacataccaaccggaagc

SEQ ID NO: 1918296 - DNA, 25 bp, Homo sapien
gtggacactcaaacgatattcataa

SEQ ID NO: 1918297 - DNA, 25 bp, Homo sapien
tagtggacactcaaacgatattcat

SEQ ID NO: 1918298 - DNA, 25 bp, Homo sapien
ggacactcaaacgatattcataaag

SEQ ID NO: 1918299 - DNA, 25 bp, Homo sapien
ttagtggacactcaaacgatattca

SEQ ID NO: 1918300 - DNA, 25 bp, Homo sapien
caccaacaaagcgtatatttacttc

SEQ ID NO: 1918301 - DNA, 25 bp, Homo sapien
gagtagtccaccaacaaagcgtata

SEQ ID NO: 1918302 - DNA, 25 bp, Homo sapien
cagacagatagtaggctgagagtag

SEQ ID NO: 1918303 - DNA, 25 bp, Homo sapien
tagtaggctgagagtagtccaccaa

SEQ ID NO: 1918304 - DNA, 25 bp, Homo sapien
gaatcgacttcctatgccctaatga

SEQ ID NO: 1918305 - DNA, 25 bp, Homo sapien
tgtttatacttaggagcaccatagg

SEQ ID NO: 1918306 - DNA, 25 bp, Homo sapien
taaatgctccataagggtaaatgcc

SEQ ID NO: 1918307 - DNA, 25 bp, Homo sapien
tcttccctcctgagatagcctggct

SEQ ID NO: 1918308 - DNA, 25 bp, Homo sapien
tggtctgaggacagccaactgcctt

SEQ ID NO: 1918309 - DNA, 25 bp, Homo sapien
gagctcctcagactaccacaggttg

SEQ ID NO: 1918310 - DNA, 25 bp, Homo sapien
tggtaatacccaaagagacctgcaa

SEQ ID NO: 1918311 - DNA, 25 bp, Homo sapien
ccacaggttgcacaggtcgtgaaaa

SEQ ID NO: 1918312 - DNA, 25 bp, Homo sapien
ggtcccttaatattgatcggaatat

SEQ ID NO: 1918313 - DNA, 25 bp, Homo sapien
tagaagggtttaacacattgatccc

SEQ ID NO: 1918314 - DNA, 25 bp, Homo sapien
gcaaatcactagctccttatgcctg

SEQ ID NO: 1918315 - DNA, 25 bp, Homo sapien
ggtccacagaagtattattaagaaa

SEQ ID NO: 1918316 - DNA, 25 bp, Homo sapien
tgagagaacaagagtgccacaaagc

SEQ ID NO: 1918317 - DNA, 25 bp, Homo sapien
gataagacgtagtcctccccagtca

SEQ ID NO: 1918318 - DNA, 25 bp, Homo sapien
tgaacgactaaaaacttccatggcc

SEQ ID NO: 1918319 - DNA, 25 bp, Homo sapien
tgcttacccgaaagacaagagactt

SEQ ID NO: 1918320 - DNA, 25 bp, Homo sapien
aattttcttcaacccatgattttgc

SEQ ID NO: 1918321 - DNA, 25 bp, Homo sapien
gtgtatccagggcatctactatagt

SEQ ID NO: 1918322 - DNA, 25 bp, Homo sapien
cttcaacccatgattttgcttcttc

SEQ ID NO: 1918323 - DNA, 25 bp, Homo sapien
tccagggcatctactatagttgctc

SEQ ID NO: 1918324 - DNA, 25 bp, Homo sapien
catacccggcctgtgattgcattct

SEQ ID NO: 1918325 - DNA, 25 bp, Homo sapien
gaataggcctaaaaccaaggagcaa

SEQ ID NO: 1918326 - DNA, 25 bp, Homo sapien
cccgtatgaattctgactgatgcta

SEQ ID NO: 1918327 - DNA, 25 bp, Homo sapien
gacatggagacttcctgttgccctg

SEQ ID NO: 1918328 - DNA, 25 bp, Homo sapien
gcctccttttgatataggtttgagt

SEQ ID NO: 1918329 - DNA, 25 bp, Homo sapien
actgcttgaatggcctccttttgat

SEQ ID NO: 1918330 - DNA, 25 bp, Homo sapien
taatccccaggcataacctttataa

SEQ ID NO: 1918331 - DNA, 25 bp, Homo sapien
catttaatccccaggcataaccttt

SEQ ID NO: 1918332 - DNA, 25 bp, Homo sapien
tttttgctgcttgcaaacctcagac

SEQ ID NO: 1918333 - DNA, 25 bp, Homo sapien
gcttgcaaacctcagacagtcatct

SEQ ID NO: 1918334 - DNA, 25 bp, Homo sapien
ttgctgcttgcaaacctcagacagt

SEQ ID NO: 1918335 - DNA, 25 bp, Homo sapien
aaacctcagacagtcatctgaggcc

SEQ ID NO: 1918336 - DNA, 25 bp, Homo sapien
gaaacaagctatccctagagtcaag

SEQ ID NO: 1918337 - DNA, 25 bp, Homo sapien
gaattgtagggcacaagtatttccc

SEQ ID NO: 1918338 - DNA, 25 bp, Homo sapien
cacgagaatcgtacgcttattacaa

SEQ ID NO: 1918339 - DNA, 25 bp, Homo sapien
tcactatcaacattacgcacgagaa

SEQ ID NO: 1918340 - DNA, 25 bp, Homo sapien
gtggaatatccgttgtcatctagaa

SEQ ID NO: 1918341 - DNA, 25 bp, Homo sapien
cagaaatgctggttcctaaggataa

SEQ ID NO: 1918342 - DNA, 25 bp, Homo sapien
tccttgtcacagaaatagcatttac

SEQ ID NO: 1918343 - DNA, 25 bp, Homo sapien
gagtagcaactagtgattccacaag

SEQ ID NO: 1918344 - DNA, 25 bp, Homo sapien
tctgtagtgctagtaaaaactgaat

SEQ ID NO: 1918345 - DNA, 25 bp, Homo sapien
gggttccaggattcactcagaaaac

SEQ ID NO: 1918346 - DNA, 25 bp, Homo sapien
tacttgcattaaatactacgtttct

SEQ ID NO: 1918347 - DNA, 25 bp, Homo sapien
tacgtttctagtcagcaaaactgat

SEQ ID NO: 1918348 - DNA, 25 bp, Homo sapien
cagtggcccactcctatagaactca

SEQ ID NO: 1918349 - DNA, 25 bp, Homo sapien
gcagcagggtggaacctgtcctagt

SEQ ID NO: 1918350 - DNA, 25 bp, Homo sapien
tgtcctagtactggactctccagac

SEQ ID NO: 1918351 - DNA, 25 bp, Homo sapien
ttgagcacccacagctacatggcct

SEQ ID NO: 1918352 - DNA, 25 bp, Homo sapien
acagctgtatgtctgtgatgatctt

SEQ ID NO: 1918353 - DNA, 25 bp, Homo sapien
tatgtctgtgatgatcttatccaca

SEQ ID NO: 1918354 - DNA, 25 bp, Homo sapien
tctgtgatgatcttatccacattac

SEQ ID NO: 1918355 - DNA, 25 bp, Homo sapien
tgatgatcttatccacattactaag

SEQ ID NO: 1918356 - DNA, 25 bp, Homo sapien
tgctttttttcttctcctaggcttg

SEQ ID NO: 1918357 - DNA, 25 bp, Homo sapien
ttctgctttttttcttctcctaggc

SEQ ID NO: 1918358 - DNA, 25 bp, Homo sapien
gctttttttcttctcctaggcttga

SEQ ID NO: 1918359 - DNA, 25 bp, Homo sapien
ctggttccatttctgctttttttct

SEQ ID NO: 1918360 - DNA, 25 bp, Homo sapien
tctgcaaagacggaaaagacggaca

SEQ ID NO: 1918361 - DNA, 25 bp, Homo sapien
tctgggcacgagcacctgtatagcg

SEQ ID NO: 1918362 - DNA, 25 bp, Homo sapien
aatggagtatgcacctgtgccctaa

SEQ ID NO: 1918363 - DNA, 25 bp, Homo sapien
tctggacataagcaggccgagctgt

SEQ ID NO: 1918364 - DNA, 25 bp, Homo sapien
gattagctgaatttggccattccac

SEQ ID NO: 1918365 - DNA, 25 bp, Homo sapien
ggtgactatagctaagaacactgta

SEQ ID NO: 1918366 - DNA, 25 bp, Homo sapien
tgaagggagcaaactgacgaagaat

SEQ ID NO: 1918367 - DNA, 25 bp, Homo sapien
ggtaacagatatggtgattagctga

SEQ ID NO: 1918368 - DNA, 25 bp, Homo sapien
gcaaacagttgtgcatccgctcact

SEQ ID NO: 1918369 - DNA, 25 bp, Homo sapien
gcaaaggtttcctagcatgcaaaca

SEQ ID NO: 1918370 - DNA, 25 bp, Homo sapien
tggcagacagggatttagaaacccg

SEQ ID NO: 1918371 - DNA, 25 bp, Homo sapien
gagaaaccaaacaaggccactctga

SEQ ID NO: 1918372 - DNA, 25 bp, Homo sapien
ttcaacctcgcaggagctgctcgac

SEQ ID NO: 1918373 - DNA, 25 bp, Homo sapien
gctgctcgaccctgggcaatttgct

SEQ ID NO: 1918374 - DNA, 25 bp, Homo sapien
ggcaatttgcttgccccttcctggc

SEQ ID NO: 1918375 - DNA, 25 bp, Homo sapien
ctggatttcaacctcgcaggagctg

SEQ ID NO: 1918376 - DNA, 25 bp, Homo sapien
tttcctgccataggaagtgagaaat

SEQ ID NO: 1918377 - DNA, 25 bp, Homo sapien
acattttgttgatatacttaatctg

SEQ ID NO: 1918378 - DNA, 25 bp, Homo sapien
cattttgttgatatacttaatctgg

SEQ ID NO: 1918379 - DNA, 25 bp, Homo sapien
aacattttgttgatatacttaatct

SEQ ID NO: 1918380 - DNA, 25 bp, Homo sapien
attttgttgatatacttaatctggg

SEQ ID NO: 1918381 - DNA, 25 bp, Homo sapien
taggatgaattgccttttattgtca

SEQ ID NO: 1918382 - DNA, 25 bp, Homo sapien
tttaggatgaattgccttttattgt

SEQ ID NO: 1918383 - DNA, 25 bp, Homo sapien
ttaggatgaattgccttttattgtc

SEQ ID NO: 1918384 - DNA, 25 bp, Homo sapien
aggatgaattgccttttattgtcaa

SEQ ID NO: 1918385 - DNA, 25 bp, Homo sapien
cttctggcagttggcctgccattta

SEQ ID NO: 1918386 - DNA, 25 bp, Homo sapien
ctggcagttggcctgccatttaggg

SEQ ID NO: 1918387 - DNA, 25 bp, Homo sapien
tcagtggggcttctggcagttggcc

SEQ ID NO: 1918388 - DNA, 25 bp, Homo sapien
gggcttctggcagttggcctgccat

SEQ ID NO: 1918389 - DNA, 25 bp, Homo sapien
tggcacaggcaagcaacctaaggat

SEQ ID NO: 1918390 - DNA, 25 bp, Homo sapien
tgggtggagcaatcccacactagcc

SEQ ID NO: 1918391 - DNA, 25 bp, Homo sapien
tgtgtcacggcacagtggcacaggc

SEQ ID NO: 1918392 - DNA, 25 bp, Homo sapien
cacactagcctatgttcagtaggga

SEQ ID NO: 1918393 - DNA, 25 bp, Homo sapien
gtatctcccctaagacacgaagttg

SEQ ID NO: 1918394 - DNA, 25 bp, Homo sapien
caggttgactcaaattacaatccag

SEQ ID NO: 1918395 - DNA, 25 bp, Homo sapien
ccaacatgttagacttgagtgcact

SEQ ID NO: 1918396 - DNA, 25 bp, Homo sapien
tgcattcaggtgtgatagagaacct

SEQ ID NO: 1918397 - DNA, 25 bp, Homo sapien
gcggtttcaaaacatctaggtgcta

SEQ ID NO: 1918398 - DNA, 25 bp, Homo sapien
tgtactagctaactggcagctcgta

SEQ ID NO: 1918399 - DNA, 25 bp, Homo sapien
gatctactggatggatatgcacact

SEQ ID NO: 1918400 - DNA, 25 bp, Homo sapien
cactgctttatgcaagactgagcgg

SEQ ID NO: 1918401 - DNA, 25 bp, Homo sapien
tagaaaattgaaccaagatttggaa

SEQ ID NO: 1918402 - DNA, 25 bp, Homo sapien
ctatgtaaaacgcaggctggcaccg

SEQ ID NO: 1918403 - DNA, 25 bp, Homo sapien
gctggcaccgtttcacacagggaag

SEQ ID NO: 1918404 - DNA, 25 bp, Homo sapien
cctacagcttttctatgtaaaacgc

SEQ ID NO: 1918405 - DNA, 25 bp, Homo sapien
caagtcctgactcatcactaacggg

SEQ ID NO: 1918406 - DNA, 25 bp, Homo sapien
cacagaccgcgtggtgacaggtgac

SEQ ID NO: 1918407 - DNA, 25 bp, Homo sapien
ggcatgtccacagaccgcgtggtga

SEQ ID NO: 1918408 - DNA, 25 bp, Homo sapien
gttctagagctctgggcccttcgat

SEQ ID NO: 1918409 - DNA, 25 bp, Homo sapien
ttctaactgaaaattacgagaagga

SEQ ID NO: 1918410 - DNA, 25 bp, Homo sapien
tacggcccccttcagctttaagctg

SEQ ID NO: 1918411 - DNA, 25 bp, Homo sapien
aatcacatgtttcaagttctaactg

SEQ ID NO: 1918412 - DNA, 25 bp, Homo sapien
ctggtcctgacctaatcacatgttt

SEQ ID NO: 1918413 - DNA, 25 bp, Homo sapien
tcagtgccgtcgctgttactggtgg

SEQ ID NO: 1918414 - DNA, 25 bp, Homo sapien
gattaaccgtgtagcggccagagaa

SEQ ID NO: 1918415 - DNA, 25 bp, Homo sapien
tactggtggggcgattaaccgtgta

SEQ ID NO: 1918416 - DNA, 25 bp, Homo sapien
gggctgatcagtgccgtcgctgtta

SEQ ID NO: 1918417 - DNA, 25 bp, Homo sapien
ctgcccatgtatttatacccacctc

SEQ ID NO: 1918418 - DNA, 25 bp, Homo sapien
gcccatgtatttatacccacctcgt

SEQ ID NO: 1918419 - DNA, 25 bp, Homo sapien
ccatgtatttatacccacctcgtgt

SEQ ID NO: 1918420 - DNA, 25 bp, Homo sapien
catgtatttatacccacctcgtgtg

SEQ ID NO: 1918421 - DNA, 25 bp, Homo sapien
caaaggcttgccgtttctccctgaa

SEQ ID NO: 1918422 - DNA, 25 bp, Homo sapien
tacattgcattgttgcagtcttcag

SEQ ID NO: 1918423 - DNA, 25 bp, Homo sapien
tccatctccccatacattgcattgt

SEQ ID NO: 1918424 - DNA, 25 bp, Homo sapien
ggagggatttctggcgcggcccact

SEQ ID NO: 1918425 - DNA, 25 bp, Homo sapien
gctcgtggttttcgcggatcctggc

SEQ ID NO: 1918426 - DNA, 25 bp, Homo sapien
gatctttgcccttttctcgcggatg

SEQ ID NO: 1918427 - DNA, 25 bp, Homo sapien
tttggatctcctcgggcagcttctg

SEQ ID NO: 1918428 - DNA, 25 bp, Homo sapien
gccttgtcacgcagctggtcctggg

SEQ ID NO: 1918429 - DNA, 25 bp, Homo sapien
tgaaggcgctgaataccagcagcag

SEQ ID NO: 1918430 - DNA, 25 bp, Homo sapien
ctggcaggaagaagatcgccccgaa

SEQ ID NO: 1918431 - DNA, 25 bp, Homo sapien
tcgccccgaagcagagcgtgatgaa

SEQ ID NO: 1918432 - DNA, 25 bp, Homo sapien
gcagcagcacgaacttctccgtcag

SEQ ID NO: 1918433 - DNA, 25 bp, Homo sapien
aggcacgcgcgacagaccgctggct

SEQ ID NO: 1918434 - DNA, 25 bp, Homo sapien
gcgccgctcagcagccaaacttcgc

SEQ ID NO: 1918435 - DNA, 25 bp, Homo sapien
ctgggtcctgcgtagccaggccgcc

SEQ ID NO: 1918436 - DNA, 25 bp, Homo sapien
tcccgctgtccagtggtccggcgcc

SEQ ID NO: 1918437 - DNA, 25 bp, Homo sapien
gggagactcgtcaacttcgcccgct

SEQ ID NO: 1918438 - DNA, 25 bp, Homo sapien
tgggcgggagactcgtcaacttcgc

SEQ ID NO: 1918439 - DNA, 25 bp, Homo sapien
cgtgggcgggagactcgtcaacttc

SEQ ID NO: 1918440 - DNA, 25 bp, Homo sapien
cagcgtgggcgggagactcgtcaac

SEQ ID NO: 1918441 - DNA, 25 bp, Homo sapien
gggctgagcgcgctgtcccacggtc

SEQ ID NO: 1918442 - DNA, 25 bp, Homo sapien
cactaatctcactgccggtcttggg

SEQ ID NO: 1918443 - DNA, 25 bp, Homo sapien
agcgcgccgacctgcgggcgaatgg

SEQ ID NO: 1918444 - DNA, 25 bp, Homo sapien
cgaatggcagcgagtagagcagcac

SEQ ID NO: 1918445 - DNA, 25 bp, Homo sapien
cgaggcgaggagggggatgcgcggg

SEQ ID NO: 1918446 - DNA, 25 bp, Homo sapien
cggagagtgacggcgcggccgggcc

SEQ ID NO: 1918447 - DNA, 25 bp, Homo sapien
gcggggagtttacgggaagcgcagc

SEQ ID NO: 1918448 - DNA, 25 bp, Homo sapien
cggccggagagtgacggcgcggccg

SEQ ID NO: 1918449 - DNA, 25 bp, Homo sapien
cgaagacgagttttatgctgcggta

SEQ ID NO: 1918450 - DNA, 25 bp, Homo sapien
ggtagcttcaagcaataagtcgaac

SEQ ID NO: 1918451 - DNA, 25 bp, Homo sapien
ggtcaaattttccattcgaagacga

SEQ ID NO: 1918452 - DNA, 25 bp, Homo sapien
gaaattaagtcttggatccgactac

SEQ ID NO: 1918453 - DNA, 25 bp, Homo sapien
gctccacaaataaggggttatcaga

SEQ ID NO: 1918454 - DNA, 25 bp, Homo sapien
ggaaaacgttgactgacttcgcatt

SEQ ID NO: 1918455 - DNA, 25 bp, Homo sapien
tgttgctccacaaataaggggttat

SEQ ID NO: 1918456 - DNA, 25 bp, Homo sapien
cagagaggaaaacgttgactgactt

SEQ ID NO: 1918457 - DNA, 25 bp, Homo sapien
ccaatactagggctcattgaaggca

SEQ ID NO: 1918458 - DNA, 25 bp, Homo sapien
aactattacacggaatgggggatgt

SEQ ID NO: 1918459 - DNA, 25 bp, Homo sapien
tgttcccaatactagggctcattga

SEQ ID NO: 1918460 - DNA, 25 bp, Homo sapien
cagcagtgttcccaatactagggct

SEQ ID NO: 1918461 - DNA, 25 bp, Homo sapien
aatctcagttactctcagggctcac

SEQ ID NO: 1918462 - DNA, 25 bp, Homo sapien
tgattgtagcatttgaagccacgta

SEQ ID NO: 1918463 - DNA, 25 bp, Homo sapien
ctctttaagctggagtaaacctcat

SEQ ID NO: 1918464 - DNA, 25 bp, Homo sapien
tggtgccacattgccaagtaaatgt

SEQ ID NO: 1918465 - DNA, 25 bp, Homo sapien
aagtgcagtgtggtgctgagaagga

SEQ ID NO: 1918466 - DNA, 25 bp, Homo sapien
ggttaattttggaataagtgcagtg

SEQ ID NO: 1918467 - DNA, 25 bp, Homo sapien
gcagtgtggtgctgagaaggatgta

SEQ ID NO: 1918468 - DNA, 25 bp, Homo sapien
tgcagtgtggtgctgagaaggatgt

SEQ ID NO: 1918469 - DNA, 25 bp, Homo sapien
taggacatatacctaatgttaaacg

SEQ ID NO: 1918470 - DNA, 25 bp, Homo sapien
tgttaaacgacgagttactgggtgc

SEQ ID NO: 1918471 - DNA, 25 bp, Homo sapien
catatacctaatgttaaacgacgag

SEQ ID NO: 1918472 - DNA, 25 bp, Homo sapien
cctaatgttaaacgacgagttactg

SEQ ID NO: 1918473 - DNA, 25 bp, Homo sapien
tataaagttcttcatgtcgtagatc

SEQ ID NO: 1918474 - DNA, 25 bp, Homo sapien
gttcttcatgtcgtagatcttgcag

SEQ ID NO: 1918475 - DNA, 25 bp, Homo sapien
catgtcgtagatcttgcagctcaaa

SEQ ID NO: 1918476 - DNA, 25 bp, Homo sapien
tcgtagatcttgcagctcaaagaga

SEQ ID NO: 1918477 - DNA, 25 bp, Homo sapien
caggagatctgaccgtggcatgcct

SEQ ID NO: 1918478 - DNA, 25 bp, Homo sapien
ttagcattcagactggtgcccagct

SEQ ID NO: 1918479 - DNA, 25 bp, Homo sapien
gtgcccagctggtctaccaagaaag

SEQ ID NO: 1918480 - DNA, 25 bp, Homo sapien
gctttagagttaggattcatcggct

SEQ ID NO: 1918481 - DNA, 25 bp, Homo sapien
gaacaaagggttcatctgaaggcac

SEQ ID NO: 1918482 - DNA, 25 bp, Homo sapien
ctgcagctgattgaacaaagggttc

SEQ ID NO: 1918483 - DNA, 25 bp, Homo sapien
tgccctgcagctgattgaacaaagg

SEQ ID NO: 1918484 - DNA, 25 bp, Homo sapien
ctgtgatttgccctgcagctgattg

SEQ ID NO: 1918485 - DNA, 25 bp, Homo sapien
ctcataggctgtttcataatgccta

SEQ ID NO: 1918486 - DNA, 25 bp, Homo sapien
gatatccctggcttacagctttcga

SEQ ID NO: 1918487 - DNA, 25 bp, Homo sapien
cattcaggggagatatccctggctt

SEQ ID NO: 1918488 - DNA, 25 bp, Homo sapien
tttcataatgcctaggctgactcat

SEQ ID NO: 1918489 - DNA, 25 bp, Homo sapien
cccgaccccattatctcctcaccag

SEQ ID NO: 1918490 - DNA, 25 bp, Homo sapien
atctcctcaccagcaaccagtctca

SEQ ID NO: 1918491 - DNA, 25 bp, Homo sapien
tctcctcaccagcaaccagtctcat

SEQ ID NO: 1918492 - DNA, 25 bp, Homo sapien
ctgcagatgttcccccgaccccatt

SEQ ID NO: 1918493 - DNA, 25 bp, Homo sapien
cacaattcatagatggagggcctct

SEQ ID NO: 1918494 - DNA, 25 bp, Homo sapien
ggaccccagtgcagatgaaccattt

SEQ ID NO: 1918495 - DNA, 25 bp, Homo sapien
tctggctcttacatggaggacccca

SEQ ID NO: 1918496 - DNA, 25 bp, Homo sapien
tagctgatcctagaagaatggcacg

SEQ ID NO: 1918497 - DNA, 25 bp, Homo sapien
cacagtgcttacacagtgccctgtt

SEQ ID NO: 1918498 - DNA, 25 bp, Homo sapien
gaatgtgttcataggtggtcactct

SEQ ID NO: 1918499 - DNA, 25 bp, Homo sapien
gaacttgaaaaggtctgtccactgg

SEQ ID NO: 1918500 - DNA, 25 bp, Homo sapien
caaagcaagccaacgtcaagaggag

SEQ ID NO: 1918501 - DNA, 25 bp, Homo sapien
cattcccaggcaatgttggtaaggt

SEQ ID NO: 1918502 - DNA, 25 bp, Homo sapien
taatctctactttggaattgacgct

SEQ ID NO: 1918503 - DNA, 25 bp, Homo sapien
tataactctgacagaggatagcccc

SEQ ID NO: 1918504 - DNA, 25 bp, Homo sapien
cactgttagccacacttacgctgat

SEQ ID NO: 1918505 - DNA, 25 bp, Homo sapien
tagaaaacaggatctgaagctcgga

SEQ ID NO: 1918506 - DNA, 25 bp, Homo sapien
atctctcttagtgcagcatttctgc

SEQ ID NO: 1918507 - DNA, 25 bp, Homo sapien
ctcggagaaatataacaaagctggc

SEQ ID NO: 1918508 - DNA, 25 bp, Homo sapien
gaaaatgaaatctaggccttaaatc

SEQ ID NO: 1918509 - DNA, 25 bp, Homo sapien
aagagacatcatgtatatataagta

SEQ ID NO: 1918510 - DNA, 25 bp, Homo sapien
agagacatcatgtatatataagtat

SEQ ID NO: 1918511 - DNA, 25 bp, Homo sapien
cattttatgccacggctctggttac

SEQ ID NO: 1918512 - DNA, 25 bp, Homo sapien
gctgctcagtggaagtatatgaacc

SEQ ID NO: 1918513 - DNA, 25 bp, Homo sapien
gtattctgaaggttatgagtctcca

SEQ ID NO: 1918514 - DNA, 25 bp, Homo sapien
gaagtgtataaaatgcaatgctgct

SEQ ID NO: 1918515 - DNA, 25 bp, Homo sapien
gaacgggaacaagaccaggatgcct

SEQ ID NO: 1918516 - DNA, 25 bp, Homo sapien
acgggaacaagaccaggatgcctac

SEQ ID NO: 1918517 - DNA, 25 bp, Homo sapien
ccctctgagaacgggaacaagacca

SEQ ID NO: 1918518 - DNA, 25 bp, Homo sapien
gaccaggatgcctactctcaccgtt

SEQ ID NO: 1918519 - DNA, 25 bp, Homo sapien
cttatctaggaacaagcaggtttct

SEQ ID NO: 1918520 - DNA, 25 bp, Homo sapien
gcaacaagaaggtgaggatcctgaa

SEQ ID NO: 1918521 - DNA, 25 bp, Homo sapien
tagaatcatattgcaggagaagggc

SEQ ID NO: 1918522 - DNA, 25 bp, Homo sapien
taaatgcccttggtgctctagaatc

SEQ ID NO: 1918523 - DNA, 25 bp, Homo sapien
ccttttaactctgaccccatgtgcc

SEQ ID NO: 1918524 - DNA, 25 bp, Homo sapien
ttttaactctgaccccatgtgccag

SEQ ID NO: 1918525 - DNA, 25 bp, Homo sapien
ccagacttgcctactggggagactt

SEQ ID NO: 1918526 - DNA, 25 bp, Homo sapien
gatgccagacttgcctactggggag

SEQ ID NO: 1918527 - DNA, 25 bp, Homo sapien
ttcaccactatgaggaatcccagga

SEQ ID NO: 1918528 - DNA, 25 bp, Homo sapien
aatcccgtgaaaatctgcctgaaag

SEQ ID NO: 1918529 - DNA, 25 bp, Homo sapien
gctcagatccttgaacaatcccgtg

SEQ ID NO: 1918530 - DNA, 25 bp, Homo sapien
acattggtaattgccatggagcctc

SEQ ID NO: 1918531 - DNA, 25 bp, Homo sapien
tggaatgaaatcttcttaactttca

SEQ ID NO: 1918532 - DNA, 25 bp, Homo sapien
gtggaatgaaatcttcttaactttc

SEQ ID NO: 1918533 - DNA, 25 bp, Homo sapien
gagaaaccaatagaggaagctggca

SEQ ID NO: 1918534 - DNA, 25 bp, Homo sapien
gatacctgcaagagacttaacctgc

SEQ ID NO: 1918535 - DNA, 25 bp, Homo sapien
tttcatggatgctaaagagcaactt

SEQ ID NO: 1918536 - DNA, 25 bp, Homo sapien
taagtttagagaggacttgaagggc

SEQ ID NO: 1918537 - DNA, 25 bp, Homo sapien
tgtgacaccagcacaggcgacagtc

SEQ ID NO: 1918538 - DNA, 25 bp, Homo sapien
ctgtgacaccagcacaggcgacagt

SEQ ID NO: 1918539 - DNA, 25 bp, Homo sapien
tgacaccagcacaggcgacagtcat

SEQ ID NO: 1918540 - DNA, 25 bp, Homo sapien
gtgacaccagcacaggcgacagtca

SEQ ID NO: 1918541 - DNA, 25 bp, Homo sapien
tttaactgttagacttatctctgtc

SEQ ID NO: 1918542 - DNA, 25 bp, Homo sapien
actgttagacttatctctgtctttg

SEQ ID NO: 1918543 - DNA, 25 bp, Homo sapien
tcatggttcagagagtagagtttaa

SEQ ID NO: 1918544 - DNA, 25 bp, Homo sapien
gttagacttatctctgtctttgtgt

SEQ ID NO: 1918545 - DNA, 25 bp, Homo sapien
ctggtgtgttatcaaatgctgtgtg

SEQ ID NO: 1918546 - DNA, 25 bp, Homo sapien
gagctgcaacatgcaattctatctg

SEQ ID NO: 1918547 - DNA, 25 bp, Homo sapien
gagagctgcaacatgcaattctatc

SEQ ID NO: 1918548 - DNA, 25 bp, Homo sapien
tgcaacatgcaattctatctgctca

SEQ ID NO: 1918549 - DNA, 25 bp, Homo sapien
ggttgagagctgcaacatgcaattc

SEQ ID NO: 1918550 - DNA, 25 bp, Homo sapien
ctagaatcaccagataagatatttt

SEQ ID NO: 1918551 - DNA, 25 bp, Homo sapien
tagaatcaccagataagatattttg

SEQ ID NO: 1918552 - DNA, 25 bp, Homo sapien
aatgattcctctgaatgggatttta

SEQ ID NO: 1918553 - DNA, 25 bp, Homo sapien
tgattcctctgaatgggattttaga

SEQ ID NO: 1918554 - DNA, 25 bp, Homo sapien
atgattcctctgaatgggattttag

SEQ ID NO: 1918555 - DNA, 25 bp, Homo sapien
cttggagtatagtgaaaagcaacat

SEQ ID NO: 1918556 - DNA, 25 bp, Homo sapien
cttcacttggagtatagtgaaaagc

SEQ ID NO: 1918557 - DNA, 25 bp, Homo sapien
ctataagtcttcacttggagtatag

SEQ ID NO: 1918558 - DNA, 25 bp, Homo sapien
gagtatagtgaaaagcaacatttga

SEQ ID NO: 1918559 - DNA, 25 bp, Homo sapien
cagcaactgtgtcagactttgccat

SEQ ID NO: 1918560 - DNA, 25 bp, Homo sapien
tgtttccctgttgacggtcatagga

SEQ ID NO: 1918561 - DNA, 25 bp, Homo sapien
ttgacggtcataggaggaaatgcat

SEQ ID NO: 1918562 - DNA, 25 bp, Homo sapien
cataggaggaaatgcatgcatttgg

SEQ ID NO: 1918563 - DNA, 25 bp, Homo sapien
ccctgttgacggtcataggaggaaa

SEQ ID NO: 1918564 - DNA, 25 bp, Homo sapien
tggctgccctgagtatcacagtatc

SEQ ID NO: 1918565 - DNA, 25 bp, Homo sapien
gatggactattgcacctcaaatcaa

SEQ ID NO: 1918566 - DNA, 25 bp, Homo sapien
tcaatcaaattcttacctggatgaa

SEQ ID NO: 1918567 - DNA, 25 bp, Homo sapien
cacagtatctttgaggagatgatgg

SEQ ID NO: 1918568 - DNA, 25 bp, Homo sapien
agaaattctttcctgtgggcctcat

SEQ ID NO: 1918569 - DNA, 25 bp, Homo sapien
cttggtatgccagaaattctttcct

SEQ ID NO: 1918570 - DNA, 25 bp, Homo sapien
gtatgccagaaattctttcctgtgg

SEQ ID NO: 1918571 - DNA, 25 bp, Homo sapien
atgccagaaattctttcctgtgggc

SEQ ID NO: 1918572 - DNA, 25 bp, Homo sapien
gatttaggtgtttagtgctgtaaac

SEQ ID NO: 1918573 - DNA, 25 bp, Homo sapien
cttgatttaggtgtttagtgctgta

SEQ ID NO: 1918574 - DNA, 25 bp, Homo sapien
gttttgctatgttgtatctccattt

SEQ ID NO: 1918575 - DNA, 25 bp, Homo sapien
ttttgctatgttgtatctccatttc

SEQ ID NO: 1918576 - DNA, 25 bp, Homo sapien
tgtgttggatttgttcactttcagc

SEQ ID NO: 1918577 - DNA, 25 bp, Homo sapien
gtgttggatttgttcactttcagcc

SEQ ID NO: 1918578 - DNA, 25 bp, Homo sapien
gttggatttgttcactttcagccat

SEQ ID NO: 1918579 - DNA, 25 bp, Homo sapien
tgttggatttgttcactttcagcca

SEQ ID NO: 1918580 - DNA, 25 bp, Homo sapien
cgtacagagcccactggggggccat

SEQ ID NO: 1918581 - DNA, 25 bp, Homo sapien
agttcaacttaatgtctcctgctac

SEQ ID NO: 1918582 - DNA, 25 bp, Homo sapien
aaatctctggttactcctttctgcc

SEQ ID NO: 1918583 - DNA, 25 bp, Homo sapien
agttcagcccagctcgacaaagggc

SEQ ID NO: 1918584 - DNA, 25 bp, Homo sapien
tactgccatatcctttccggtatag

SEQ ID NO: 1918585 - DNA, 25 bp, Homo sapien
gattcaaactgattgtgctcagttt

SEQ ID NO: 1918586 - DNA, 25 bp, Homo sapien
tgattcaaactgattgtgctcagtt

SEQ ID NO: 1918587 - DNA, 25 bp, Homo sapien
cttgtctgtcaaattcagcaacctg

SEQ ID NO: 1918588 - DNA, 25 bp, Homo sapien
ctgctctggcttgtctgtcaaattc

SEQ ID NO: 1918589 - DNA, 25 bp, Homo sapien
ctgtcaaattcagcaacctgactgt

SEQ ID NO: 1918590 - DNA, 25 bp, Homo sapien
tcaaattcagcaacctgactgtcat

SEQ ID NO: 1918591 - DNA, 25 bp, Homo sapien
tgtctgactccataatgtgacttag

SEQ ID NO: 1918592 - DNA, 25 bp, Homo sapien
caatccaaaggaagttgtctgactc

SEQ ID NO: 1918593 - DNA, 25 bp, Homo sapien
tgaattcctcctactcgccttagtg

SEQ ID NO: 1918594 - DNA, 25 bp, Homo sapien
tcattcatttccagacagctggctt

SEQ ID NO: 1918595 - DNA, 25 bp, Homo sapien
gacactttgtgctgggcctccgtgc

SEQ ID NO: 1918596 - DNA, 25 bp, Homo sapien
tgacactttgtgctgggcctccgtg

SEQ ID NO: 1918597 - DNA, 25 bp, Homo sapien
ttctctttgcctgggcccactaaac

SEQ ID NO: 1918598 - DNA, 25 bp, Homo sapien
acactttgtgctgggcctccgtgct

SEQ ID NO: 1918599 - DNA, 25 bp, Homo sapien
atgctcttccctagaacttctggat

SEQ ID NO: 1918600 - DNA, 25 bp, Homo sapien
gctcttccctagaacttctggattc

SEQ ID NO: 1918601 - DNA, 25 bp, Homo sapien
tgctcttccctagaacttctggatt

SEQ ID NO: 1918602 - DNA, 25 bp, Homo sapien
aagcccagtgatctggaaactcata

SEQ ID NO: 1918603 - DNA, 25 bp, Homo sapien
ggttgttaccttgacatagtgacat

SEQ ID NO: 1918604 - DNA, 25 bp, Homo sapien
agcccagtgatctggaaactcatat

SEQ ID NO: 1918605 - DNA, 25 bp, Homo sapien
ggtgtgtagtggttgttaccttgac

SEQ ID NO: 1918606 - DNA, 25 bp, Homo sapien
gtatcagatctttccaggtcccctt

SEQ ID NO: 1918607 - DNA, 25 bp, Homo sapien
tttggaatttacatcctgtggcttt

SEQ ID NO: 1918608 - DNA, 25 bp, Homo sapien
ttttggaatttacatcctgtggctt

SEQ ID NO: 1918609 - DNA, 25 bp, Homo sapien
cttttggaatttacatcctgtggct

SEQ ID NO: 1918610 - DNA, 25 bp, Homo sapien
cagtcagtagtgcaacaatctgttg

SEQ ID NO: 1918611 - DNA, 25 bp, Homo sapien
catatttcagtcagtagtgcaacaa

SEQ ID NO: 1918612 - DNA, 25 bp, Homo sapien
caatctgttgctcaaaagttgtcat

SEQ ID NO: 1918613 - DNA, 25 bp, Homo sapien
cttacatatttcagtcagtagtgca

SEQ ID NO: 1918614 - DNA, 25 bp, Homo sapien
tactttcttatcctctatagatgac

SEQ ID NO: 1918615 - DNA, 25 bp, Homo sapien
tgttctgcccgtatatgtactaggg

SEQ ID NO: 1918616 - DNA, 25 bp, Homo sapien
gatgctggtcgcagccatttaatac

SEQ ID NO: 1918617 - DNA, 25 bp, Homo sapien
catctgattggccatgatgctggtc

SEQ ID NO: 1918618 - DNA, 25 bp, Homo sapien
tgccaaatttcttgtcttttagaag

SEQ ID NO: 1918619 - DNA, 25 bp, Homo sapien
gaatactgtagcatgagcctttctg

SEQ ID NO: 1918620 - DNA, 25 bp, Homo sapien
actgtagcatgagcctttctgccaa

SEQ ID NO: 1918621 - DNA, 25 bp, Homo sapien
tagcatgagcctttctgccaaattt

SEQ ID NO: 1918622 - DNA, 25 bp, Homo sapien
ggctggatctatgaagagtcttacc

SEQ ID NO: 1918623 - DNA, 25 bp, Homo sapien
tgttgacagctgcttcatagcctcg

SEQ ID NO: 1918624 - DNA, 25 bp, Homo sapien
cactggcctgtttacactggctgga

SEQ ID NO: 1918625 - DNA, 25 bp, Homo sapien
catagcctcgattgagaatcactgg

SEQ ID NO: 1918626 - DNA, 25 bp, Homo sapien
tgcagctcgggatgtgtcacgtcac

SEQ ID NO: 1918627 - DNA, 25 bp, Homo sapien
tgttcgtagttttgagtgcagctcg

SEQ ID NO: 1918628 - DNA, 25 bp, Homo sapien
tacttgatgggatttggacagccaa

SEQ ID NO: 1918629 - DNA, 25 bp, Homo sapien
tgagaagtgagcagaaactgtgact

SEQ ID NO: 1918630 - DNA, 25 bp, Homo sapien
cttatagctgaatagaatatgcctt

SEQ ID NO: 1918631 - DNA, 25 bp, Homo sapien
tagaatatgccttcactgaaagcag

SEQ ID NO: 1918632 - DNA, 25 bp, Homo sapien
aagcagacaggttaaaatgatgaaa

SEQ ID NO: 1918633 - DNA, 25 bp, Homo sapien
tatgccttcactgaaagcagacagg

SEQ ID NO: 1918634 - DNA, 25 bp, Homo sapien
cacagtttcaccaccccaaagcgtt

SEQ ID NO: 1918635 - DNA, 25 bp, Homo sapien
tggtgtcatagcccacagtttcacc

SEQ ID NO: 1918636 - DNA, 25 bp, Homo sapien
tattggtgtcatagcccacagtttc

SEQ ID NO: 1918637 - DNA, 25 bp, Homo sapien
ccacagtttcaccaccccaaagcgt

SEQ ID NO: 1918638 - DNA, 25 bp, Homo sapien
catggttctaaggtccagggtgcag

SEQ ID NO: 1918639 - DNA, 25 bp, Homo sapien
gatgtttgaggccttcatgttcccg

SEQ ID NO: 1918640 - DNA, 25 bp, Homo sapien
gggacatgagagcaaccatggttct

SEQ ID NO: 1918641 - DNA, 25 bp, Homo sapien
cagggtgcagctagcccatagccac

SEQ ID NO: 1918642 - DNA, 25 bp, Homo sapien
gtcaatgtttcttttatcacgatat

SEQ ID NO: 1918643 - DNA, 25 bp, Homo sapien
ggaccatcctatttaactggcttca

SEQ ID NO: 1918644 - DNA, 25 bp, Homo sapien
cctcgccgtctgtgaattggaccat

SEQ ID NO: 1918645 - DNA, 25 bp, Homo sapien
tagcctgcgctgttttttagtttgg

SEQ ID NO: 1918646 - DNA, 25 bp, Homo sapien
ccacacctagcatctcatgagtgcc

SEQ ID NO: 1918647 - DNA, 25 bp, Homo sapien
gaccttttatccacttacctagatt

SEQ ID NO: 1918648 - DNA, 25 bp, Homo sapien
caccacttcttttataactagtcct

SEQ ID NO: 1918649 - DNA, 25 bp, Homo sapien
tttatgagacccattcctatttctt

SEQ ID NO: 1918650 - DNA, 25 bp, Homo sapien
ctcttcctggcttcttactgaaagg

SEQ ID NO: 1918651 - DNA, 25 bp, Homo sapien
tagtcctttactaatccaacccatg

SEQ ID NO: 1918652 - DNA, 25 bp, Homo sapien
ttttcagttggctgacttccacacc

SEQ ID NO: 1918653 - DNA, 25 bp, Homo sapien
catgggttggattagtaaaggacta

SEQ ID NO: 1918654 - DNA, 25 bp, Homo sapien
atatcgtgataaaagaaacattgac

SEQ ID NO: 1918655 - DNA, 25 bp, Homo sapien
aagaaataggaatgggtctcataaa

SEQ ID NO: 1918656 - DNA, 25 bp, Homo sapien
atggtccaattcacagacggcgagg

SEQ ID NO: 1918657 - DNA, 25 bp, Homo sapien
tgaagccagttaaataggatggtcc

SEQ ID NO: 1918658 - DNA, 25 bp, Homo sapien
aatctaggtaagtggataaaaggtc

SEQ ID NO: 1918659 - DNA, 25 bp, Homo sapien
ggtgtggaagtcagccaactgaaaa

SEQ ID NO: 1918660 - DNA, 25 bp, Homo sapien
ccaaactaaaaaacagcgcaggcta

SEQ ID NO: 1918661 - DNA, 25 bp, Homo sapien
cctttcagtaagaagccaggaagag

SEQ ID NO: 1918662 - DNA, 25 bp, Homo sapien
ggcactcatgagatgctaggtgtgg

SEQ ID NO: 1918663 - DNA, 25 bp, Homo sapien
aggactagttataaaagaagtggtg

SEQ ID NO: 1918664 - DNA, 25 bp, Homo sapien
tgtttgaaattctttcaagtgatga

SEQ ID NO: 1918665 - DNA, 25 bp, Homo sapien
tttgaaattctttcaagtgatgatt

SEQ ID NO: 1918666 - DNA, 25 bp, Homo sapien
gaaattctttcaagtgatgatttac

SEQ ID NO: 1918667 - DNA, 25 bp, Homo sapien
ctattgtttgaaattctttcaagtg

SEQ ID NO: 1918668 - DNA, 25 bp, Homo sapien
tcttcagtgtgcttttcaataatta

SEQ ID NO: 1918669 - DNA, 25 bp, Homo sapien
gaactctgtggcagttttgcatatg

SEQ ID NO: 1918670 - DNA, 25 bp, Homo sapien
tttgcatatggtggctcttcagtgt

SEQ ID NO: 1918671 - DNA, 25 bp, Homo sapien
cctgtctgttgaactctgtggcagt

SEQ ID NO: 1918672 - DNA, 25 bp, Homo sapien
tttgtctgtaagttcattgtaattc

SEQ ID NO: 1918673 - DNA, 25 bp, Homo sapien
caaaaaaggctgaaagatgccgaac

SEQ ID NO: 1918674 - DNA, 25 bp, Homo sapien
gcaaacttatgataaggccgggcat

SEQ ID NO: 1918675 - DNA, 25 bp, Homo sapien
catggatgtaattttctatagcaaa

SEQ ID NO: 1918676 - DNA, 25 bp, Homo sapien
aaaaggctgaaagatgccgaacatg

SEQ ID NO: 1918677 - DNA, 25 bp, Homo sapien
ggaccttcacggcccttttcatgaa

SEQ ID NO: 1918678 - DNA, 25 bp, Homo sapien
catcagtaaggaccttcacggccct

SEQ ID NO: 1918679 - DNA, 25 bp, Homo sapien
cattccatcagtaaggaccttcacg

SEQ ID NO: 1918680 - DNA, 25 bp, Homo sapien
cagacccattccatcagtaaggacc

SEQ ID NO: 1918681 - DNA, 25 bp, Homo sapien
aacactcatgagctgtctcctcatc

SEQ ID NO: 1918682 - DNA, 25 bp, Homo sapien
caaacactcatgagctgtctcctca

SEQ ID NO: 1918683 - DNA, 25 bp, Homo sapien
gcaaacactcatgagctgtctcctc

SEQ ID NO: 1918684 - DNA, 25 bp, Homo sapien
actcatgagctgtctcctcatccat

SEQ ID NO: 1918685 - DNA, 25 bp, Homo sapien
taataacagaagacttggaagttct

SEQ ID NO: 1918686 - DNA, 25 bp, Homo sapien
gaaaagttgacagcaacttcactga

SEQ ID NO: 1918687 - DNA, 25 bp, Homo sapien
ataataacagaagacttggaagttc

SEQ ID NO: 1918688 - DNA, 25 bp, Homo sapien
ctatcgcaggttggaaaagttgaca

SEQ ID NO: 1918689 - DNA, 25 bp, Homo sapien
gaacagcagttgaacgtgtgtcagt

SEQ ID NO: 1918690 - DNA, 25 bp, Homo sapien
gtcctgagagaagggccagcgccat

SEQ ID NO: 1918691 - DNA, 25 bp, Homo sapien
gttgaacgtgtgtcagtcagtcctg

SEQ ID NO: 1918692 - DNA, 25 bp, Homo sapien
cagcagttgaacgtgtgtcagtcag

SEQ ID NO: 1918693 - DNA, 25 bp, Homo sapien
gctcttctgtttggtaaactttcac

SEQ ID NO: 1918694 - DNA, 25 bp, Homo sapien
taaactttcacaatcagtagtaagg

SEQ ID NO: 1918695 - DNA, 25 bp, Homo sapien
tttatatctttggattgctcttctg

SEQ ID NO: 1918696 - DNA, 25 bp, Homo sapien
gtagtaagggtattcccactctcat

SEQ ID NO: 1918697 - DNA, 25 bp, Homo sapien
tcacaccagctaaatgtagcaaaga

SEQ ID NO: 1918698 - DNA, 25 bp, Homo sapien
atgtagcaaagaggcatcacctcca

SEQ ID NO: 1918699 - DNA, 25 bp, Homo sapien
cacaccagctaaatgtagcaaagag

SEQ ID NO: 1918700 - DNA, 25 bp, Homo sapien
aatgtagcaaagaggcatcacctcc

SEQ ID NO: 1918701 - DNA, 25 bp, Homo sapien
ggacattctgtgaagatatccacca

SEQ ID NO: 1918702 - DNA, 25 bp, Homo sapien
gatctccaacattgctgcagctaga

SEQ ID NO: 1918703 - DNA, 25 bp, Homo sapien
gttgtgacttgatgaaacctggaca

SEQ ID NO: 1918704 - DNA, 25 bp, Homo sapien
gcagctagagtcttgcagttgtgac

SEQ ID NO: 1918705 - DNA, 25 bp, Homo sapien
tattaactgacagggtatgaacttt

SEQ ID NO: 1918706 - DNA, 25 bp, Homo sapien
tgaactttcaagtgctgcttgtatt

SEQ ID NO: 1918707 - DNA, 25 bp, Homo sapien
aactttcaagtgctgcttgtatttc

SEQ ID NO: 1918708 - DNA, 25 bp, Homo sapien
ttctttaatattaactgacagggta

SEQ ID NO: 1918709 - DNA, 25 bp, Homo sapien
caaattcctagtcatatagtggtgg

SEQ ID NO: 1918710 - DNA, 25 bp, Homo sapien
tctcacagaggattacccatttggg

SEQ ID NO: 1918711 - DNA, 25 bp, Homo sapien
gacagtgtgaagctataaaaccaag

SEQ ID NO: 1918712 - DNA, 25 bp, Homo sapien
gacagatttgggtggagttcacaac

SEQ ID NO: 1918713 - DNA, 25 bp, Homo sapien
ctgctttactgttactgctctgcat

SEQ ID NO: 1918714 - DNA, 25 bp, Homo sapien
ctctgcatctttctaattttagtgt

SEQ ID NO: 1918715 - DNA, 25 bp, Homo sapien
gtgtatgtgctgccaaagtgagcac

SEQ ID NO: 1918716 - DNA, 25 bp, Homo sapien
tctctgcatctttctaattttagtg

SEQ ID NO: 1918717 - DNA, 25 bp, Homo sapien
ttagtgtatgtgctgccaaagtgag

SEQ ID NO: 1918718 - DNA, 25 bp, Homo sapien
cactgtagttgtctgctgctctttt

SEQ ID NO: 1918719 - DNA, 25 bp, Homo sapien
agcccactgtagttgtctgctgctc

SEQ ID NO: 1918720 - DNA, 25 bp, Homo sapien
tcagcccactgtagttgtctgctgc

SEQ ID NO: 1918721 - DNA, 25 bp, Homo sapien
cccactgtagttgtctgctgctctt

SEQ ID NO: 1918722 - DNA, 25 bp, Homo sapien
gagtaatataactgcttggttcata

SEQ ID NO: 1918723 - DNA, 25 bp, Homo sapien
aacccaggttgctgtgtctggaagt

SEQ ID NO: 1918724 - DNA, 25 bp, Homo sapien
tttgacctttctatgtttccctgta

SEQ ID NO: 1918725 - DNA, 25 bp, Homo sapien
tcataatctgaaggtgaagtacatt

SEQ ID NO: 1918726 - DNA, 25 bp, Homo sapien
gaaatactcataattattccactga

SEQ ID NO: 1918727 - DNA, 25 bp, Homo sapien
taattattccactgagctctagtga

SEQ ID NO: 1918728 - DNA, 25 bp, Homo sapien
atggctttgcatggtctattcagga

SEQ ID NO: 1918729 - DNA, 25 bp, Homo sapien
tgagctctagtgatgatgaatgtgt

SEQ ID NO: 1918730 - DNA, 25 bp, Homo sapien
agctcagctgagtcttaggctgagg

SEQ ID NO: 1918731 - DNA, 25 bp, Homo sapien
tcagctgagtcttaggctgaggcat

SEQ ID NO: 1918732 - DNA, 25 bp, Homo sapien
acaagctcagctgagtcttaggctg

SEQ ID NO: 1918733 - DNA, 25 bp, Homo sapien
caagctcagctgagtcttaggctga

SEQ ID NO: 1918734 - DNA, 25 bp, Homo sapien
tccagctgacaattcacactcagta

SEQ ID NO: 1918735 - DNA, 25 bp, Homo sapien
ctccagctgacaattcacactcagt

SEQ ID NO: 1918736 - DNA, 25 bp, Homo sapien
taaagcaggactgttccacacaatg

SEQ ID NO: 1918737 - DNA, 25 bp, Homo sapien
ttgttcataaactttgagctgctcc

SEQ ID NO: 1918738 - DNA, 25 bp, Homo sapien
gagaagttgttcataaactttgagc

SEQ ID NO: 1918739 - DNA, 25 bp, Homo sapien
cacacaatgacctgacagatacaca

SEQ ID NO: 1918740 - DNA, 25 bp, Homo sapien
tcagcatttcctaacccaaagcaag

SEQ ID NO: 1918741 - DNA, 25 bp, Homo sapien
tgagacaagtgaagatcctttcgtc

SEQ ID NO: 1918742 - DNA, 25 bp, Homo sapien
taacccaaagcaagtcatgctgttt

SEQ ID NO: 1918743 - DNA, 25 bp, Homo sapien
tttcgtccatagaataaagctgact

SEQ ID NO: 1918744 - DNA, 25 bp, Homo sapien
tctggctgcagtcccctgtcattat

SEQ ID NO: 1918745 - DNA, 25 bp, Homo sapien
gacggccttgatatttggtgaagct

SEQ ID NO: 1918746 - DNA, 25 bp, Homo sapien
tataaaacatatcacacaactctgg

SEQ ID NO: 1918747 - DNA, 25 bp, Homo sapien
tcatggtgtcaagacggccttgata

SEQ ID NO: 1918748 - DNA, 25 bp, Homo sapien
tggtgatggtttcaccacttgtatc

SEQ ID NO: 1918749 - DNA, 25 bp, Homo sapien
gtccttggcagattccgagaaggca

SEQ ID NO: 1918750 - DNA, 25 bp, Homo sapien
tagcttcttaagttgctgacaaagc

SEQ ID NO: 1918751 - DNA, 25 bp, Homo sapien
gggtcatttttgcaagtagcttctt

SEQ ID NO: 1918752 - DNA, 25 bp, Homo sapien
cttgcatttcagtgtatccacagca

SEQ ID NO: 1918753 - DNA, 25 bp, Homo sapien
tagccatgcacctcttgcatttcag

SEQ ID NO: 1918754 - DNA, 25 bp, Homo sapien
acctcttgcatttcagtgtatccac

SEQ ID NO: 1918755 - DNA, 25 bp, Homo sapien
gcatttcagtgtatccacagcaggc

SEQ ID NO: 1918756 - DNA, 25 bp, Homo sapien
atgcattgctctccaaagggaccac

SEQ ID NO: 1918757 - DNA, 25 bp, Homo sapien
tcatatgcattgctctccaaaggga

SEQ ID NO: 1918758 - DNA, 25 bp, Homo sapien
catatgcattgctctccaaagggac

SEQ ID NO: 1918759 - DNA, 25 bp, Homo sapien
tatgcattgctctccaaagggacca

SEQ ID NO: 1918760 - DNA, 25 bp, Homo sapien
gaagcagccttttgcatgggaagga

SEQ ID NO: 1918761 - DNA, 25 bp, Homo sapien
tgccaccatgttcaaacaaagaagc

SEQ ID NO: 1918762 - DNA, 25 bp, Homo sapien
aggaggagatttctgatcgtttttt

SEQ ID NO: 1918763 - DNA, 25 bp, Homo sapien
gagggcaaatggaggaggagatttc

SEQ ID NO: 1918764 - DNA, 25 bp, Homo sapien
gcaataagcttgctgaatgtgttcc

SEQ ID NO: 1918765 - DNA, 25 bp, Homo sapien
cattgtgctccccaaggtggcaata

SEQ ID NO: 1918766 - DNA, 25 bp, Homo sapien
tgtgctccccaaggtggcaataagc

SEQ ID NO: 1918767 - DNA, 25 bp, Homo sapien
aaggtggcaataagcttgctgaatg

SEQ ID NO: 1918768 - DNA, 25 bp, Homo sapien
aatcataaacatctactggaatctc

SEQ ID NO: 1918769 - DNA, 25 bp, Homo sapien
ctgagaaccagtgtaccacagaata

SEQ ID NO: 1918770 - DNA, 25 bp, Homo sapien
ttaatcataaacatctactggaatc

SEQ ID NO: 1918771 - DNA, 25 bp, Homo sapien
gaaccagtgtaccacagaatatatt

SEQ ID NO: 1918772 - DNA, 25 bp, Homo sapien
gatgatctttcaaacaggtggtttc

SEQ ID NO: 1918773 - DNA, 25 bp, Homo sapien
gaaactgactttggtgaagggagag

SEQ ID NO: 1918774 - DNA, 25 bp, Homo sapien
gagaggtgatgatctttcaaacagg

SEQ ID NO: 1918775 - DNA, 25 bp, Homo sapien
gaagggagaggtgatgatctttcaa

SEQ ID NO: 1918776 - DNA, 25 bp, Homo sapien
tttgcagaagtattccaaagtttct

SEQ ID NO: 1918777 - DNA, 25 bp, Homo sapien
ctttttgctttacagccccacacat

SEQ ID NO: 1918778 - DNA, 25 bp, Homo sapien
tctttttgctttacagccccacaca

SEQ ID NO: 1918779 - DNA, 25 bp, Homo sapien
caactatggaagaacccatattcat

SEQ ID NO: 1918780 - DNA, 25 bp, Homo sapien
tccacaactatggaagaacccatat

SEQ ID NO: 1918781 - DNA, 25 bp, Homo sapien
cttccacaactatggaagaacccat

SEQ ID NO: 1918782 - DNA, 25 bp, Homo sapien
cacaactatggaagaacccatattc

SEQ ID NO: 1918783 - DNA, 25 bp, Homo sapien
tacctaatgctagatgacaagttag

SEQ ID NO: 1918784 - DNA, 25 bp, Homo sapien
gatgacaagttagtgggtgcagcgc

SEQ ID NO: 1918785 - DNA, 25 bp, Homo sapien
gggggaacatcacactctggagact

SEQ ID NO: 1918786 - DNA, 25 bp, Homo sapien
gagggggaacatcacactctggaga

SEQ ID NO: 1918787 - DNA, 25 bp, Homo sapien
tttccactctctgaatcaatggctc

SEQ ID NO: 1918788 - DNA, 25 bp, Homo sapien
ggctcctctgggatacccatatctt

SEQ ID NO: 1918789 - DNA, 25 bp, Homo sapien
cttacagctttacctgactctgaca

SEQ ID NO: 1918790 - DNA, 25 bp, Homo sapien
tgctccatcctgctgttatcccatt

SEQ ID NO: 1918791 - DNA, 25 bp, Homo sapien
aatgaaagttgtgtcttagcctgcc

SEQ ID NO: 1918792 - DNA, 25 bp, Homo sapien
cctccagtgtggaatctaaggttcc

SEQ ID NO: 1918793 - DNA, 25 bp, Homo sapien
aaggttccaaagagttcacttagca

SEQ ID NO: 1918794 - DNA, 25 bp, Homo sapien
ggcatcatctggttaacctccagtg

SEQ ID NO: 1918795 - DNA, 25 bp, Homo sapien
tccattcagactcttaagatcttct

SEQ ID NO: 1918796 - DNA, 25 bp, Homo sapien
ttcagactcttaagatcttctaggg

SEQ ID NO: 1918797 - DNA, 25 bp, Homo sapien
tcttaagatcttctagggtagaagc

SEQ ID NO: 1918798 - DNA, 25 bp, Homo sapien
agccacgggcattcctttaaattca

SEQ ID NO: 1918799 - DNA, 25 bp, Homo sapien
caacacaacaacactcatgactgct

SEQ ID NO: 1918800 - DNA, 25 bp, Homo sapien
tagcttgacagatgttcagccattc

SEQ ID NO: 1918801 - DNA, 25 bp, Homo sapien
aagcacttcttagcttgacagatgt

SEQ ID NO: 1918802 - DNA, 25 bp, Homo sapien
tcctcagaaaagttaggggatactg

SEQ ID NO: 1918803 - DNA, 25 bp, Homo sapien
taatgttaaatgacgagttactagg

SEQ ID NO: 1918804 - DNA, 25 bp, Homo sapien
aatgttaaatgacgagttactaggt

SEQ ID NO: 1918805 - DNA, 25 bp, Homo sapien
tgttaaatgacgagttactaggtgc

SEQ ID NO: 1918806 - DNA, 25 bp, Homo sapien
ttaaatgacgagttactaggtgcag

SEQ ID NO: 1918807 - DNA, 25 bp, Homo sapien
gagttgatgcggcataaagagagcc

SEQ ID NO: 1918808 - DNA, 25 bp, Homo sapien
tcccttcctgattcaatttgatcaa

SEQ ID NO: 1918809 - DNA, 25 bp, Homo sapien
tcataccaagttgcagtaactggag

SEQ ID NO: 1918810 - DNA, 25 bp, Homo sapien
taaatgctccctctatacagttagc

SEQ ID NO: 1918811 - DNA, 25 bp, Homo sapien
tatcatcagccataacccacagagg

SEQ ID NO: 1918812 - DNA, 25 bp, Homo sapien
ggactccagttctgtaacaccaatt

SEQ ID NO: 1918813 - DNA, 25 bp, Homo sapien
aatggtttaaatactgtaagctggc

SEQ ID NO: 1918814 - DNA, 25 bp, Homo sapien
gctggttcctttcacgagaacatta

SEQ ID NO: 1918815 - DNA, 25 bp, Homo sapien
ctctgtaaagtattgccaatcagtt

SEQ ID NO: 1918816 - DNA, 25 bp, Homo sapien
ttttgacgttttaacaacacatctg

SEQ ID NO: 1918817 - DNA, 25 bp, Homo sapien
gttttaacaacacatctgacagcta

SEQ ID NO: 1918818 - DNA, 25 bp, Homo sapien
tctgacagctatctctgtaaagtat

SEQ ID NO: 1918819 - DNA, 25 bp, Homo sapien
cagtgatgaggggttccagtaggct

SEQ ID NO: 1918820 - DNA, 25 bp, Homo sapien
cttctcagtgatgaggggttccagt

SEQ ID NO: 1918821 - DNA, 25 bp, Homo sapien
tctcagtgatgaggggttccagtag

SEQ ID NO: 1918822 - DNA, 25 bp, Homo sapien
tgatgaggggttccagtaggcttac

SEQ ID NO: 1918823 - DNA, 25 bp, Homo sapien
caatagcacccacacttctgtgact

SEQ ID NO: 1918824 - DNA, 25 bp, Homo sapien
atagcacccacacttctgtgactgg

SEQ ID NO: 1918825 - DNA, 25 bp, Homo sapien
gcacccacacttctgtgactggatg

SEQ ID NO: 1918826 - DNA, 25 bp, Homo sapien
tagcacccacacttctgtgactgga

SEQ ID NO: 1918827 - DNA, 25 bp, Homo sapien
gcaaggcagagaaagtgcgcgtcaa

SEQ ID NO: 1918828 - DNA, 25 bp, Homo sapien
gatttccggtgtcggtcagcatggc

SEQ ID NO: 1918829 - DNA, 25 bp, Homo sapien
actgcacgttggctctggcagggaa

SEQ ID NO: 1918830 - DNA, 25 bp, Homo sapien
ttggctttcacactagcaaggcaga

SEQ ID NO: 1918831 - DNA, 25 bp, Homo sapien
tagactgggatagagttggcaccac

SEQ ID NO: 1918832 - DNA, 25 bp, Homo sapien
tactgtttctttcgacgctccggga

SEQ ID NO: 1918833 - DNA, 25 bp, Homo sapien
ggaacctggtgatgataccctccct

SEQ ID NO: 1918834 - DNA, 25 bp, Homo sapien
gttaacgcggatgttgaaccactcc

SEQ ID NO: 1918835 - DNA, 25 bp, Homo sapien
cattgcttgacccagatgtgagcac

SEQ ID NO: 1918836 - DNA, 25 bp, Homo sapien
cagaaggtgggaccaaccccattgc

SEQ ID NO: 1918837 - DNA, 25 bp, Homo sapien
caatgactggtagaaagagccccac

SEQ ID NO: 1918838 - DNA, 25 bp, Homo sapien
gtctggccccacagtttccaagaag

SEQ ID NO: 1918839 - DNA, 25 bp, Homo sapien
ctcatagaactgcatttcaaatacc

SEQ ID NO: 1918840 - DNA, 25 bp, Homo sapien
cgctcatagaactgcatttcaaata

SEQ ID NO: 1918841 - DNA, 25 bp, Homo sapien
gtcgctcatagaactgcatttcaaa

SEQ ID NO: 1918842 - DNA, 25 bp, Homo sapien
catagaactgcatttcaaataccat

SEQ ID NO: 1918843 - DNA, 25 bp, Homo sapien
catggtcaaccccttctaaaatctc

SEQ ID NO: 1918844 - DNA, 25 bp, Homo sapien
ggtaactccagtatccaaaaagaca

SEQ ID NO: 1918845 - DNA, 25 bp, Homo sapien
tccttgtcacaattttggtaactcc

SEQ ID NO: 1918846 - DNA, 25 bp, Homo sapien
taagaaatgccagactaatcaaagg

SEQ ID NO: 1918847 - DNA, 25 bp, Homo sapien
taatcttaccggtgcagagacatct

SEQ ID NO: 1918848 - DNA, 25 bp, Homo sapien
taagacaaatcatagtgttagccat

SEQ ID NO: 1918849 - DNA, 25 bp, Homo sapien
gatatgggtatcaaaagcaactcct

SEQ ID NO: 1918850 - DNA, 25 bp, Homo sapien
gagtagaatgcttatcagtatgaaa

SEQ ID NO: 1918851 - DNA, 25 bp, Homo sapien
gactacaggcgcatcactgcaccca

SEQ ID NO: 1918852 - DNA, 25 bp, Homo sapien
acaggcgcatcactgcacccagcta

SEQ ID NO: 1918853 - DNA, 25 bp, Homo sapien
agggactacaggcgcatcactgcac

SEQ ID NO: 1918854 - DNA, 25 bp, Homo sapien
cacccagctaatttcagtattgtta

SEQ ID NO: 1918855 - DNA, 25 bp, Homo sapien
taaatttaaaccgtgtgtctcatga

SEQ ID NO: 1918856 - DNA, 25 bp, Homo sapien
gaactaaaagtaagctagatctgat

SEQ ID NO: 1918857 - DNA, 25 bp, Homo sapien
ggccaggactaactcttaaacatga

SEQ ID NO: 1918858 - DNA, 25 bp, Homo sapien
tgaattcacaaattgagctcatacc

SEQ ID NO: 1918859 - DNA, 25 bp, Homo sapien
aataatcactcactcgaaacccatg

SEQ ID NO: 1918860 - DNA, 25 bp, Homo sapien
actcgaaacccatgcagtgcttctt

SEQ ID NO: 1918861 - DNA, 25 bp, Homo sapien
tcagcagcactgttcggtagttttg

SEQ ID NO: 1918862 - DNA, 25 bp, Homo sapien
tgcagtctaatgttccgcatgtctc

SEQ ID NO: 1918863 - DNA, 25 bp, Homo sapien
tctgagtgtgctgtagaatgtcttg

SEQ ID NO: 1918864 - DNA, 25 bp, Homo sapien
aacttgcagatcttgagtctgagtg

SEQ ID NO: 1918865 - DNA, 25 bp, Homo sapien
gatatacacttgataatcaggacca

SEQ ID NO: 1918866 - DNA, 25 bp, Homo sapien
cacaagtagcaatataatggcagat

SEQ ID NO: 1918867 - DNA, 25 bp, Homo sapien
aattccttaattgcctgttgccctg

SEQ ID NO: 1918868 - DNA, 25 bp, Homo sapien
cctgtaatatggctctagtggactg

SEQ ID NO: 1918869 - DNA, 25 bp, Homo sapien
cacttgtgatattggattacggtcc

SEQ ID NO: 1918870 - DNA, 25 bp, Homo sapien
tctcgactaggcagactgaagcagt

SEQ ID NO: 1918871 - DNA, 25 bp, Homo sapien
gaaagtcaccctagaatctgcaaca

SEQ ID NO: 1918872 - DNA, 25 bp, Homo sapien
tcagcttctgtccaccatatgcatt

SEQ ID NO: 1918873 - DNA, 25 bp, Homo sapien
tatgcattggttaaaggaaagtcac

SEQ ID NO: 1918874 - DNA, 25 bp, Homo sapien
catatgaccctctttgcttggtaga

SEQ ID NO: 1918875 - DNA, 25 bp, Homo sapien
ggaagaatgctgagctatgagtcat

SEQ ID NO: 1918876 - DNA, 25 bp, Homo sapien
tatccctggaagaatgctgagctat

SEQ ID NO: 1918877 - DNA, 25 bp, Homo sapien
attgaaacagcagaattccaaaaca

SEQ ID NO: 1918878 - DNA, 25 bp, Homo sapien
gaattccaaaacaccatatccctgg

SEQ ID NO: 1918879 - DNA, 25 bp, Homo sapien
actgccataatttttgaacttatta

SEQ ID NO: 1918880 - DNA, 25 bp, Homo sapien
tactgccataatttttgaacttatt

SEQ ID NO: 1918881 - DNA, 25 bp, Homo sapien
ttactgccataatttttgaacttat

SEQ ID NO: 1918882 - DNA, 25 bp, Homo sapien
attactgccataatttttgaactta

SEQ ID NO: 1918883 - DNA, 25 bp, Homo sapien
gatggtgcaaaaccagacatgtgaa

SEQ ID NO: 1918884 - DNA, 25 bp, Homo sapien
tgatggtgcaaaaccagacatgtga

SEQ ID NO: 1918885 - DNA, 25 bp, Homo sapien
ggtgcaaaaccagacatgtgaaaag

SEQ ID NO: 1918886 - DNA, 25 bp, Homo sapien
ctgtgatggtgcaaaaccagacatg

SEQ ID NO: 1918887 - DNA, 25 bp, Homo sapien
tctacagtgtcattaggaaggtaac

SEQ ID NO: 1918888 - DNA, 25 bp, Homo sapien
taatgggtgctgcaaaaatatactg

SEQ ID NO: 1918889 - DNA, 25 bp, Homo sapien
ataatgggtgctgcaaaaatatact

SEQ ID NO: 1918890 - DNA, 25 bp, Homo sapien
tgcacagtatgcaatcattagtgtt

SEQ ID NO: 1918891 - DNA, 25 bp, Homo sapien
taaaactagatcaatagtgagagct

SEQ ID NO: 1918892 - DNA, 25 bp, Homo sapien
ggtctattaattaccatttcatgcc

SEQ ID NO: 1918893 - DNA, 25 bp, Homo sapien
aatacactaatgattgcacacacag

SEQ ID NO: 1918894 - DNA, 25 bp, Homo sapien
gtcataatctgaacactaaaggcag

SEQ ID NO: 1918895 - DNA, 25 bp, Homo sapien
ggcagaactgttaagactagtggaa

SEQ ID NO: 1918896 - DNA, 25 bp, Homo sapien
cacagaagaatgaatgattggacac

SEQ ID NO: 1918897 - DNA, 25 bp, Homo sapien
tatggttcaatatgattcactggtg

SEQ ID NO: 1918898 - DNA, 25 bp, Homo sapien
tgccccagtgaatgtaagtataatg

SEQ ID NO: 1918899 - DNA, 25 bp, Homo sapien
tcagaagcctggagaattgatgaag

SEQ ID NO: 1918900 - DNA, 25 bp, Homo sapien
agaagcctggagaattgatgaagaa

SEQ ID NO: 1918901 - DNA, 25 bp, Homo sapien
cagaagcctggagaattgatgaaga

SEQ ID NO: 1918902 - DNA, 25 bp, Homo sapien
tagccttggcaaccaaagaaaagca

SEQ ID NO: 1918903 - DNA, 25 bp, Homo sapien
agatacaaaccagtcatggccagca

SEQ ID NO: 1918904 - DNA, 25 bp, Homo sapien
cagtcatggccagcataattccctt

SEQ ID NO: 1918905 - DNA, 25 bp, Homo sapien
gaagatacaaaccagtcatggccag

SEQ ID NO: 1918906 - DNA, 25 bp, Homo sapien
cagagaagatacaaaccagtcatgg

SEQ ID NO: 1918907 - DNA, 25 bp, Homo sapien
gaagagaagattttatggaagtttg

SEQ ID NO: 1918908 - DNA, 25 bp, Homo sapien
atcattttctgcaccatcttttaag

SEQ ID NO: 1918909 - DNA, 25 bp, Homo sapien
atgctttaaaacccaggtaagatca

SEQ ID NO: 1918910 - DNA, 25 bp, Homo sapien
tcattttaatgccaagctgctgcac

SEQ ID NO: 1918911 - DNA, 25 bp, Homo sapien
ctgacagtcattttaatgccaagct

SEQ ID NO: 1918912 - DNA, 25 bp, Homo sapien
agtcattttaatgccaagctgctgc

SEQ ID NO: 1918913 - DNA, 25 bp, Homo sapien
gacagtcattttaatgccaagctgc

SEQ ID NO: 1918914 - DNA, 25 bp, Homo sapien
gaaaactgagttataaagtgcagaa

SEQ ID NO: 1918915 - DNA, 25 bp, Homo sapien
ctaaagacaacagaaaactgagtta

SEQ ID NO: 1918916 - DNA, 25 bp, Homo sapien
tgcagaaaagtttgcataataatca

SEQ ID NO: 1918917 - DNA, 25 bp, Homo sapien
ataaagtgcagaaaagtttgcataa

SEQ ID NO: 1918918 - DNA, 25 bp, Homo sapien
gccattgacccaaaaagtggtctag

SEQ ID NO: 1918919 - DNA, 25 bp, Homo sapien
tgtaatcatctaaccaaaagtgaag

SEQ ID NO: 1918920 - DNA, 25 bp, Homo sapien
ctgcaggccaagttttctttgcgaa

SEQ ID NO: 1918921 - DNA, 25 bp, Homo sapien
ttgcgaagtagttgttgtaatcatc

SEQ ID NO: 1918922 - DNA, 25 bp, Homo sapien
taataaagttatgcagcaaggtgag

SEQ ID NO: 1918923 - DNA, 25 bp, Homo sapien
cttactggtaaaggatgagtgtgca

SEQ ID NO: 1918924 - DNA, 25 bp, Homo sapien
gatctgtgtgcctatagtaatacta

SEQ ID NO: 1918925 - DNA, 25 bp, Homo sapien
ccacagtggattctatcaggaaaca

SEQ ID NO: 1918926 - DNA, 25 bp, Homo sapien
ttcctcagttgcaacgggggggtca

SEQ ID NO: 1918927 - DNA, 25 bp, Homo sapien
gggtcagagctgatactacgctcct

SEQ ID NO: 1918928 - DNA, 25 bp, Homo sapien
gcacaagtgggggtagttcctcagt

SEQ ID NO: 1918929 - DNA, 25 bp, Homo sapien
gctgatactacgctcctcaagatct

SEQ ID NO: 1918930 - DNA, 25 bp, Homo sapien
tagcattcagatgggctttcagtga

SEQ ID NO: 1918931 - DNA, 25 bp, Homo sapien
cagtgagatgaagcacaaatttttc

SEQ ID NO: 1918932 - DNA, 25 bp, Homo sapien
agtagcattcagatgggctttcagt

SEQ ID NO: 1918933 - DNA, 25 bp, Homo sapien
gctttcagtgagatgaagcacaaat

SEQ ID NO: 1918934 - DNA, 25 bp, Homo sapien
gtatctcacacaggaaaaacctaaa

SEQ ID NO: 1918935 - DNA, 25 bp, Homo sapien
cattttatactctcgatggtatctc

SEQ ID NO: 1918936 - DNA, 25 bp, Homo sapien
tatactctcgatggtatctcacaca

SEQ ID NO: 1918937 - DNA, 25 bp, Homo sapien
tctcgatggtatctcacacaggaaa

SEQ ID NO: 1918938 - DNA, 25 bp, Homo sapien
ctccactgattatatcaggtttggc

SEQ ID NO: 1918939 - DNA, 25 bp, Homo sapien
cctctccactgattatatcaggttt

SEQ ID NO: 1918940 - DNA, 25 bp, Homo sapien
actgattatatcaggtttggctttc

SEQ ID NO: 1918941 - DNA, 25 bp, Homo sapien
cactgattatatcaggtttggcttt

SEQ ID NO: 1918942 - DNA, 25 bp, Homo sapien
ttttgaggcataataaaagcttgtc

SEQ ID NO: 1918943 - DNA, 25 bp, Homo sapien
taataaaagcttgtcaagatcattg

SEQ ID NO: 1918944 - DNA, 25 bp, Homo sapien
ggcataataaaagcttgtcaagatc

SEQ ID NO: 1918945 - DNA, 25 bp, Homo sapien
cagtttgtttatcagatattttgag

SEQ ID NO: 1918946 - DNA, 25 bp, Homo sapien
gggagtatccaaattctgacaagtc

SEQ ID NO: 1918947 - DNA, 25 bp, Homo sapien
gcacctgcactagtagaagatctat

SEQ ID NO: 1918948 - DNA, 25 bp, Homo sapien
cttactatgggagaaatcggtggaa

SEQ ID NO: 1918949 - DNA, 25 bp, Homo sapien
gggaaaaaccataatctcagtcata

SEQ ID NO: 1918950 - DNA, 25 bp, Homo sapien
taacctcttgatgaaagccatagga

SEQ ID NO: 1918951 - DNA, 25 bp, Homo sapien
tcactcaagggttataaagagctag

SEQ ID NO: 1918952 - DNA, 25 bp, Homo sapien
ttttgctaactctggagtcaggtgg

SEQ ID NO: 1918953 - DNA, 25 bp, Homo sapien
gccataggactataaacttatctct

SEQ ID NO: 1918954 - DNA, 25 bp, Homo sapien
gatgaaaacattggccaaggatatg

SEQ ID NO: 1918955 - DNA, 25 bp, Homo sapien
tataccagcatttcttgtaatgtct

SEQ ID NO: 1918956 - DNA, 25 bp, Homo sapien
aatgtctgacagatagcagtttggc

SEQ ID NO: 1918957 - DNA, 25 bp, Homo sapien
gcagtttggcaatggatatgatgaa

SEQ ID NO: 1918958 - DNA, 25 bp, Homo sapien
ttcgagtaacctcggaggcaaaatc

SEQ ID NO: 1918959 - DNA, 25 bp, Homo sapien
gttccaatggcccaccaacaagatt

SEQ ID NO: 1918960 - DNA, 25 bp, Homo sapien
ggcccaccaacaagatttattctaa

SEQ ID NO: 1918961 - DNA, 25 bp, Homo sapien
tcggaggcaaaatccgttccaatgg

SEQ ID NO: 1918962 - DNA, 25 bp, Homo sapien
ttcagaccggcttaagaaacggcgc

SEQ ID NO: 1918963 - DNA, 25 bp, Homo sapien
cagaccggcttaagaaacggcgcac

SEQ ID NO: 1918964 - DNA, 25 bp, Homo sapien
cgaatattgcgcttttcagaccggc

SEQ ID NO: 1918965 - DNA, 25 bp, Homo sapien
ttgcgcttttcagaccggcttaaga

SEQ ID NO: 1918966 - DNA, 25 bp, Homo sapien
aacatttcagatacctgatactgag

SEQ ID NO: 1918967 - DNA, 25 bp, Homo sapien
cttcttgagcatttagtaacatttc

SEQ ID NO: 1918968 - DNA, 25 bp, Homo sapien
ggtcagcttgccgataaaattgtgt

SEQ ID NO: 1918969 - DNA, 25 bp, Homo sapien
tataggaggcctgctcacttactct

SEQ ID NO: 1918970 - DNA, 25 bp, Homo sapien
tagaaaatgttctggattgcctgca

SEQ ID NO: 1918971 - DNA, 25 bp, Homo sapien
acacacagagtatggttttcgggca

SEQ ID NO: 1918972 - DNA, 25 bp, Homo sapien
catagttgaataaagaacgaatctt

SEQ ID NO: 1918973 - DNA, 25 bp, Homo sapien
gaattcaaaattataagtctatcaa

SEQ ID NO: 1918974 - DNA, 25 bp, Homo sapien
gttgaataaagaacgaatcttagct

SEQ ID NO: 1918975 - DNA, 25 bp, Homo sapien
aagaacgaatcttagcttcagaatt

SEQ ID NO: 1918976 - DNA, 25 bp, Homo sapien
gatcttgattccttacaagctcata

SEQ ID NO: 1918977 - DNA, 25 bp, Homo sapien
aataacacatgttgggacttcacga

SEQ ID NO: 1918978 - DNA, 25 bp, Homo sapien
ctgttttattaggaagatcttgatt

SEQ ID NO: 1918979 - DNA, 25 bp, Homo sapien
tcataaatagcaggataggataaca

SEQ ID NO: 1918980 - DNA, 25 bp, Homo sapien
tagcgcctaaatgttctgactttac

SEQ ID NO: 1918981 - DNA, 25 bp, Homo sapien
tggggggatataaggatgacactct

SEQ ID NO: 1918982 - DNA, 25 bp, Homo sapien
cctaaatgttctgactttactgcaa

SEQ ID NO: 1918983 - DNA, 25 bp, Homo sapien
gatataaggatgacactcttcagca

SEQ ID NO: 1918984 - DNA, 25 bp, Homo sapien
cagagatgtgctacattaatgagca

SEQ ID NO: 1918985 - DNA, 25 bp, Homo sapien
gcagtcaggcagagatgtgctacat

SEQ ID NO: 1918986 - DNA, 25 bp, Homo sapien
cattaatgagcagtatctttatcct

SEQ ID NO: 1918987 - DNA, 25 bp, Homo sapien
ctgtataagtagcaggcaggcagtc

SEQ ID NO: 1918988 - DNA, 25 bp, Homo sapien
gaatggacatatgtttctgaaggta

SEQ ID NO: 1918989 - DNA, 25 bp, Homo sapien
tatgtatgagctatacctctttgca

SEQ ID NO: 1918990 - DNA, 25 bp, Homo sapien
tgtatagctgcatagggcaattgtc

SEQ ID NO: 1918991 - DNA, 25 bp, Homo sapien
cactagctacatgtgctattgagca

SEQ ID NO: 1918992 - DNA, 25 bp, Homo sapien
ggtagcactgtctttcaacatgaag

SEQ ID NO: 1918993 - DNA, 25 bp, Homo sapien
aatccagctatccatctggtagcac

SEQ ID NO: 1918994 - DNA, 25 bp, Homo sapien
catcctgaaaatccagctatccatc

SEQ ID NO: 1918995 - DNA, 25 bp, Homo sapien
tctggtagcactgtctttcaacatg

SEQ ID NO: 1918996 - DNA, 25 bp, Homo sapien
tttacagttcacaggcatacttgag

SEQ ID NO: 1918997 - DNA, 25 bp, Homo sapien
taaatttagcagttacattggccag

SEQ ID NO: 1918998 - DNA, 25 bp, Homo sapien
gattctattatactccctgacaaag

SEQ ID NO: 1918999 - DNA, 25 bp, Homo sapien
tgtgagatacgccatagagatcctg

SEQ ID NO: 1919000 - DNA, 25 bp, Homo sapien
gatgggttaccctaacatcatctct

SEQ ID NO: 1919001 - DNA, 25 bp, Homo sapien
ctggagtagttctgggatgggttac

SEQ ID NO: 1919002 - DNA, 25 bp, Homo sapien
tattccagattggaccataattcag

SEQ ID NO: 1919003 - DNA, 25 bp, Homo sapien
agcttcggtcaataggatccactgg

SEQ ID NO: 1919004 - DNA, 25 bp, Homo sapien
tatattgttcagagctcagataacc

SEQ ID NO: 1919005 - DNA, 25 bp, Homo sapien
tgttataattcaactctaagccttg

SEQ ID NO: 1919006 - DNA, 25 bp, Homo sapien
tagcatctctatcagggattatata

SEQ ID NO: 1919007 - DNA, 25 bp, Homo sapien
caagtagtccaaattagttcagccc

SEQ ID NO: 1919008 - DNA, 25 bp, Homo sapien
cgtgtaaccaaaactccatagccaa

SEQ ID NO: 1919009 - DNA, 25 bp, Homo sapien
tgctgctgttgatgccactcgtgta

SEQ ID NO: 1919010 - DNA, 25 bp, Homo sapien
tgatgccactcgtgtaaccaaaact

SEQ ID NO: 1919011 - DNA, 25 bp, Homo sapien
aaactccatagccaaattttttatg

SEQ ID NO: 1919012 - DNA, 25 bp, Homo sapien
catatcgattgaatataaatgtcac

SEQ ID NO: 1919013 - DNA, 25 bp, Homo sapien
tatcgattgaatataaatgtcacac

SEQ ID NO: 1919014 - DNA, 25 bp, Homo sapien
aatttttttgcatatcgattgaata

SEQ ID NO: 1919015 - DNA, 25 bp, Homo sapien
tttgcatatcgattgaatataaatg

SEQ ID NO: 1919016 - DNA, 25 bp, Homo sapien
cctgttctttgaagaagtagtaatc

SEQ ID NO: 1919017 - DNA, 25 bp, Homo sapien
aaatgtagtaaatcatctaacaaat

SEQ ID NO: 1919018 - DNA, 25 bp, Homo sapien
cacctgttctttgaagaagtagtaa

SEQ ID NO: 1919019 - DNA, 25 bp, Homo sapien
agtagtaatcctttgggggtggcag

SEQ ID NO: 1919020 - DNA, 25 bp, Homo sapien
aaacacttcgagatgggataagtaa

SEQ ID NO: 1919021 - DNA, 25 bp, Homo sapien
ttacttatcccatctcgaagtgttt

SEQ ID NO: 1919022 - DNA, 25 bp, Homo sapien
tgttttgggattcctggcttactga

SEQ ID NO: 1919023 - DNA, 25 bp, Homo sapien
acagaatcagaaccctctactggag

SEQ ID NO: 1919024 - DNA, 25 bp, Homo sapien
gaaacagaatcagaaccctctactg

SEQ ID NO: 1919025 - DNA, 25 bp, Homo sapien
gggattcctggcttactgaagaaac

SEQ ID NO: 1919026 - DNA, 25 bp, Homo sapien
ggcaattatatgagcacctgtagga

SEQ ID NO: 1919027 - DNA, 25 bp, Homo sapien
tgtactatatatgtgacgacacaca

SEQ ID NO: 1919028 - DNA, 25 bp, Homo sapien
tataagtgattaacacctgcaaacc

SEQ ID NO: 1919029 - DNA, 25 bp, Homo sapien
cctttaaccacaggcaacatttctg

SEQ ID NO: 1919030 - DNA, 25 bp, Homo sapien
tacaaaaggtagcattctattaaca

SEQ ID NO: 1919031 - DNA, 25 bp, Homo sapien
cccttttatagacagctcagtgctc

SEQ ID NO: 1919032 - DNA, 25 bp, Homo sapien
gagtccaaagtcaaatctaagtata

SEQ ID NO: 1919033 - DNA, 25 bp, Homo sapien
taatcctagatatcttgtttccata

SEQ ID NO: 1919034 - DNA, 25 bp, Homo sapien
gaagcaagcactaaatagggagagg

SEQ ID NO: 1919035 - DNA, 25 bp, Homo sapien
tgaagcaagcactaaatagggagag

SEQ ID NO: 1919036 - DNA, 25 bp, Homo sapien
tatggcacccagccattgaacattc

SEQ ID NO: 1919037 - DNA, 25 bp, Homo sapien
gctatggcacccagccattgaacat

SEQ ID NO: 1919038 - DNA, 25 bp, Homo sapien
taaataagtcgattgcacaacagta

SEQ ID NO: 1919039 - DNA, 25 bp, Homo sapien
cacaacagtattgcaccgatggaga

SEQ ID NO: 1919040 - DNA, 25 bp, Homo sapien
aaagattaactccagagaaggcaaa

SEQ ID NO: 1919041 - DNA, 25 bp, Homo sapien
tagatggcttagcactgcagtgaca

SEQ ID NO: 1919042 - DNA, 25 bp, Homo sapien
tgctccataaaggagtaaaataagc

SEQ ID NO: 1919043 - DNA, 25 bp, Homo sapien
tcttctacagatgcaattcttgcca

SEQ ID NO: 1919044 - DNA, 25 bp, Homo sapien
aaataagcccttcttctacagatgc

SEQ ID NO: 1919045 - DNA, 25 bp, Homo sapien
gctccataaaggagtaaaataagcc

SEQ ID NO: 1919046 - DNA, 25 bp, Homo sapien
attaaattgtgaataggctgaagaa

SEQ ID NO: 1919047 - DNA, 25 bp, Homo sapien
tacaatgttgttatataagcattcc

SEQ ID NO: 1919048 - DNA, 25 bp, Homo sapien
ttacaatgttgttatataagcattc

SEQ ID NO: 1919049 - DNA, 25 bp, Homo sapien
ttaaattgtgaataggctgaagaag

SEQ ID NO: 1919050 - DNA, 25 bp, Homo sapien
agttgggtaaaaagaacaagcagat

SEQ ID NO: 1919051 - DNA, 25 bp, Homo sapien
agcagatctatgagggataccaaac

SEQ ID NO: 1919052 - DNA, 25 bp, Homo sapien
tttggacaacttggtgagtaataga

SEQ ID NO: 1919053 - DNA, 25 bp, Homo sapien
ggtgagtaatagataagttgggtaa

SEQ ID NO: 1919054 - DNA, 25 bp, Homo sapien
tgtaattcttgtcctaagtagtaga

SEQ ID NO: 1919055 - DNA, 25 bp, Homo sapien
agatcaataatcttcctaaaaggca

SEQ ID NO: 1919056 - DNA, 25 bp, Homo sapien
aattcttgtcctaagtagtagaaag

SEQ ID NO: 1919057 - DNA, 25 bp, Homo sapien
ttttattcttcagcttaataggaaa

SEQ ID NO: 1919058 - DNA, 25 bp, Homo sapien
cacatttcaaagtactgaacacact

SEQ ID NO: 1919059 - DNA, 25 bp, Homo sapien
tgcaatgctttgaatgtcccaaagt

SEQ ID NO: 1919060 - DNA, 25 bp, Homo sapien
cacactgttgaatggctgtagttac

SEQ ID NO: 1919061 - DNA, 25 bp, Homo sapien
tcatcagctttcctagtcttacaca

SEQ ID NO: 1919062 - DNA, 25 bp, Homo sapien
tttcaagaagtcttaatactgtagt

SEQ ID NO: 1919063 - DNA, 25 bp, Homo sapien
cagagacttatatttcgtttcaaga

SEQ ID NO: 1919064 - DNA, 25 bp, Homo sapien
ttcgtttcaagaagtcttaatactg

SEQ ID NO: 1919065 - DNA, 25 bp, Homo sapien
tatatttcgtttcaagaagtcttaa

SEQ ID NO: 1919066 - DNA, 25 bp, Homo sapien
tgttaacaaggacaaagtactctcc

SEQ ID NO: 1919067 - DNA, 25 bp, Homo sapien
cttttgtgagacaacatggctttga

SEQ ID NO: 1919068 - DNA, 25 bp, Homo sapien
tccactttttgaaccacacagcctt

SEQ ID NO: 1919069 - DNA, 25 bp, Homo sapien
tgcaaaaaagtagatcggatccaaa

SEQ ID NO: 1919070 - DNA, 25 bp, Homo sapien
ctttctgatattcatttagaagacg

SEQ ID NO: 1919071 - DNA, 25 bp, Homo sapien
ttctctggatgacgaatccagaaag

SEQ ID NO: 1919072 - DNA, 25 bp, Homo sapien
tctggatgacgaatccagaaagatg

SEQ ID NO: 1919073 - DNA, 25 bp, Homo sapien
gatgacgaatccagaaagatggagc

SEQ ID NO: 1919074 - DNA, 25 bp, Homo sapien
aaagagtaggaatatgattttccct

SEQ ID NO: 1919075 - DNA, 25 bp, Homo sapien
ggattagttatatctacaccagctg

SEQ ID NO: 1919076 - DNA, 25 bp, Homo sapien
agaaagtatgactccaaatacttag

SEQ ID NO: 1919077 - DNA, 25 bp, Homo sapien
ttttaagtaagcgagtcatattagg

SEQ ID NO: 1919078 - DNA, 25 bp, Homo sapien
cttggtcatatgtaatggagaaagc

SEQ ID NO: 1919079 - DNA, 25 bp, Homo sapien
taaatttccttggtcatatgtaatg

SEQ ID NO: 1919080 - DNA, 25 bp, Homo sapien
agaaagcaaaaatgtctgtgcacag

SEQ ID NO: 1919081 - DNA, 25 bp, Homo sapien
tttccttggtcatatgtaatggaga

SEQ ID NO: 1919082 - DNA, 25 bp, Homo sapien
tttcgcagagagtagtccaattttc

SEQ ID NO: 1919083 - DNA, 25 bp, Homo sapien
caattttcacagttgaggacatcag

SEQ ID NO: 1919084 - DNA, 25 bp, Homo sapien
tggaggagctgaacataatgtttgc

SEQ ID NO: 1919085 - DNA, 25 bp, Homo sapien
ggatctgaaagagacacggtcagtt

SEQ ID NO: 1919086 - DNA, 25 bp, Homo sapien
ggatccaactggtctaaaatcaatt

SEQ ID NO: 1919087 - DNA, 25 bp, Homo sapien
tctttaggttgcccaggatccaact

SEQ ID NO: 1919088 - DNA, 25 bp, Homo sapien
tccaactggtctaaaatcaattgta

SEQ ID NO: 1919089 - DNA, 25 bp, Homo sapien
cccaggatccaactggtctaaaatc

SEQ ID NO: 1919090 - DNA, 25 bp, Homo sapien
gaaattctgcagagatttttaagat

SEQ ID NO: 1919091 - DNA, 25 bp, Homo sapien
ttaagattttatgactccatctttt

SEQ ID NO: 1919092 - DNA, 25 bp, Homo sapien
agaagtgaaattctgcagagatttt

SEQ ID NO: 1919093 - DNA, 25 bp, Homo sapien
cctgtcccaggcctaactctaggca

SEQ ID NO: 1919094 - DNA, 25 bp, Homo sapien
ttgtctgtgcggtaactatggcttt

SEQ ID NO: 1919095 - DNA, 25 bp, Homo sapien
tgtgcggtaactatggcttttctcc

SEQ ID NO: 1919096 - DNA, 25 bp, Homo sapien
gcaattgtctgtgcggtaactatgg

SEQ ID NO: 1919097 - DNA, 25 bp, Homo sapien
agagcaattgtctgtgcggtaacta

SEQ ID NO: 1919098 - DNA, 25 bp, Homo sapien
gactcgaccacagctatcataatgt

SEQ ID NO: 1919099 - DNA, 25 bp, Homo sapien
gcctttcttgatttcgtgtctcatc

SEQ ID NO: 1919100 - DNA, 25 bp, Homo sapien
tatcataatgttcttcaggtaatgc

SEQ ID NO: 1919101 - DNA, 25 bp, Homo sapien
tcttcttcaaacttgttaatcatag

SEQ ID NO: 1919102 - DNA, 25 bp, Homo sapien
tgtacaactgtatcatagccgcatt

SEQ ID NO: 1919103 - DNA, 25 bp, Homo sapien
gctgcctgaggtatttcacaaattc

SEQ ID NO: 1919104 - DNA, 25 bp, Homo sapien
caccctgattccgatcagatgtgca

SEQ ID NO: 1919105 - DNA, 25 bp, Homo sapien
caaagtgttgcctatatgctgcctg

SEQ ID NO: 1919106 - DNA, 25 bp, Homo sapien
gaatctcttcggcacactccaggga

SEQ ID NO: 1919107 - DNA, 25 bp, Homo sapien
aaaagaatctcttcggcacactcca

SEQ ID NO: 1919108 - DNA, 25 bp, Homo sapien
cagatgtaaaagaatctcttcggca

SEQ ID NO: 1919109 - DNA, 25 bp, Homo sapien
tgtaaaagaatctcttcggcacact

SEQ ID NO: 1919110 - DNA, 25 bp, Homo sapien
ctctggaacaaccgcctcagcatcg

SEQ ID NO: 1919111 - DNA, 25 bp, Homo sapien
ctggaacaaccgcctcagcatcgcc

SEQ ID NO: 1919112 - DNA, 25 bp, Homo sapien
tggaacaaccgcctcagcatcgcct

SEQ ID NO: 1919113 - DNA, 25 bp, Homo sapien
tctggaacaaccgcctcagcatcgc

SEQ ID NO: 1919114 - DNA, 25 bp, Homo sapien
tggtcctcgctggagaaatgggcca

SEQ ID NO: 1919115 - DNA, 25 bp, Homo sapien
ggtcctcgctggagaaatgggccat

SEQ ID NO: 1919116 - DNA, 25 bp, Homo sapien
cgcctggtcctcgctggagaaatgg

SEQ ID NO: 1919117 - DNA, 25 bp, Homo sapien
cctggtcctcgctggagaaatgggc

SEQ ID NO: 1919118 - DNA, 25 bp, Homo sapien
aatcaaacgtccactctcattactc

SEQ ID NO: 1919119 - DNA, 25 bp, Homo sapien
aaacgtccactctcattactccagg

SEQ ID NO: 1919120 - DNA, 25 bp, Homo sapien
aacgtccactctcattactccaggt

SEQ ID NO: 1919121 - DNA, 25 bp, Homo sapien
tcaaacgtccactctcattactcca

SEQ ID NO: 1919122 - DNA, 25 bp, Homo sapien
ataccgcggcgagcgcctgtgcctg

SEQ ID NO: 1919123 - DNA, 25 bp, Homo sapien
gtgcctgcgccctcagctgccagtg

SEQ ID NO: 1919124 - DNA, 25 bp, Homo sapien
agccccggctacgtgcggcgtcgtt

SEQ ID NO: 1919125 - DNA, 25 bp, Homo sapien
gtcgttcccagggataccgcggcga

SEQ ID NO: 1919126 - DNA, 25 bp, Homo sapien
ggtactcttagttgctagccttcag

SEQ ID NO: 1919127 - DNA, 25 bp, Homo sapien
cttcagtaccagcagacctcaggct

SEQ ID NO: 1919128 - DNA, 25 bp, Homo sapien
aggctctcccgactaacaacaaaag

SEQ ID NO: 1919129 - DNA, 25 bp, Homo sapien
ggtccgcgaggtctcgcctctggta

SEQ ID NO: 1919130 - DNA, 25 bp, Homo sapien
gacggaacgccacgatgcgcgtgac

SEQ ID NO: 1919131 - DNA, 25 bp, Homo sapien
gaacgccacgatgcgcgtgacgtca

SEQ ID NO: 1919132 - DNA, 25 bp, Homo sapien
gccacgatgcgcgtgacgtcagctc

SEQ ID NO: 1919133 - DNA, 25 bp, Homo sapien
ccacgatgcgcgtgacgtcagctcg

SEQ ID NO: 1919134 - DNA, 25 bp, Homo sapien
cgcttgtggtcattgtccgtttctt

SEQ ID NO: 1919135 - DNA, 25 bp, Homo sapien
gctgagcacaatctgtgcatggaga

SEQ ID NO: 1919136 - DNA, 25 bp, Homo sapien
gcttcctgtgctgagcacaatctgt

SEQ ID NO: 1919137 - DNA, 25 bp, Homo sapien
caatctgtgcatggagaagacttct

SEQ ID NO: 1919138 - DNA, 25 bp, Homo sapien
atggagacaggggcctcgcaggcat

SEQ ID NO: 1919139 - DNA, 25 bp, Homo sapien
aatggagacaggggcctcgcaggca

SEQ ID NO: 1919140 - DNA, 25 bp, Homo sapien
tggagacaggggcctcgcaggcatc

SEQ ID NO: 1919141 - DNA, 25 bp, Homo sapien
gatcattgatactcattacaacttt

SEQ ID NO: 1919142 - DNA, 25 bp, Homo sapien
aatatctgggctttacttcgaatgt

SEQ ID NO: 1919143 - DNA, 25 bp, Homo sapien
cttcgaatgtgaagacatacaatac

SEQ ID NO: 1919144 - DNA, 25 bp, Homo sapien
aagacatacaatacaacaacaatga

SEQ ID NO: 1919145 - DNA, 25 bp, Homo sapien
ctggctagagttgccatttttatca

SEQ ID NO: 1919146 - DNA, 25 bp, Homo sapien
cttgctttctggctagagttgccat

SEQ ID NO: 1919147 - DNA, 25 bp, Homo sapien
tttttatcaatggtgtaacaacttg

SEQ ID NO: 1919148 - DNA, 25 bp, Homo sapien
gctttctggctagagttgccatttt

SEQ ID NO: 1919149 - DNA, 25 bp, Homo sapien
ggtgttgagcaaaccctttgtcatt

SEQ ID NO: 1919150 - DNA, 25 bp, Homo sapien
ctgaacctctggaacgccagaccat

SEQ ID NO: 1919151 - DNA, 25 bp, Homo sapien
aggctgtgctgtaggtgttgagcaa

SEQ ID NO: 1919152 - DNA, 25 bp, Homo sapien
cctttgtcattcacctgaacctctg

SEQ ID NO: 1919153 - DNA, 25 bp, Homo sapien
taatgctagttttgtgaagcagtgg

SEQ ID NO: 1919154 - DNA, 25 bp, Homo sapien
gaaatgtgtaactagttttgatcaa

SEQ ID NO: 1919155 - DNA, 25 bp, Homo sapien
atgctagttttgtgaagcagtggga

SEQ ID NO: 1919156 - DNA, 25 bp, Homo sapien
ttgtgaacaccactgcattcagatc

SEQ ID NO: 1919157 - DNA, 25 bp, Homo sapien
ttctgcactgccacaacggtgtgca

SEQ ID NO: 1919158 - DNA, 25 bp, Homo sapien
ggataactccgtgtactctcccttc

SEQ ID NO: 1919159 - DNA, 25 bp, Homo sapien
cacaaaaagtcctcattggttcttt

SEQ ID NO: 1919160 - DNA, 25 bp, Homo sapien
ggtttattctggataactccgtgta

SEQ ID NO: 1919161 - DNA, 25 bp, Homo sapien
gaactctaatgcactggacatattt

SEQ ID NO: 1919162 - DNA, 25 bp, Homo sapien
ctgaactctaatgcactggacatat

SEQ ID NO: 1919163 - DNA, 25 bp, Homo sapien
tgaactctaatgcactggacatatt

SEQ ID NO: 1919164 - DNA, 25 bp, Homo sapien
actctaatgcactggacatatttgc

SEQ ID NO: 1919165 - DNA, 25 bp, Homo sapien
gccccaggaccaaagcaggaggtgt

SEQ ID NO: 1919166 - DNA, 25 bp, Homo sapien
catgggccagttgttgtctgtcccc

SEQ ID NO: 1919167 - DNA, 25 bp, Homo sapien
tgctggagggacctgaaccagtcaa

SEQ ID NO: 1919168 - DNA, 25 bp, Homo sapien
tgagtttgctgctctctacaccctg

SEQ ID NO: 1919169 - DNA, 25 bp, Homo sapien
tctggtcactgaaccctcctgactt

SEQ ID NO: 1919170 - DNA, 25 bp, Homo sapien
tccgcaaggttgtatgctaaacccg

SEQ ID NO: 1919171 - DNA, 25 bp, Homo sapien
gcaaggttgtatgctaaacccgctc

SEQ ID NO: 1919172 - DNA, 25 bp, Homo sapien
atccgcaaggttgtatgctaaaccc

SEQ ID NO: 1919173 - DNA, 25 bp, Homo sapien
acccgctcctccaaagccaaagcca

SEQ ID NO: 1919174 - DNA, 25 bp, Homo sapien
acttctgtacacagtttgtaccgtt

SEQ ID NO: 1919175 - DNA, 25 bp, Homo sapien
tgtacacagtttgtaccgtttgaaa

SEQ ID NO: 1919176 - DNA, 25 bp, Homo sapien
ttctgtacacagtttgtaccgtttg

SEQ ID NO: 1919177 - DNA, 25 bp, Homo sapien
tacacagtttgtaccgtttgaaata

SEQ ID NO: 1919178 - DNA, 25 bp, Homo sapien
agacttcattgcgtcttttattggc

SEQ ID NO: 1919179 - DNA, 25 bp, Homo sapien
atgaagacttcattgcgtcttttat

SEQ ID NO: 1919180 - DNA, 25 bp, Homo sapien
gcgtcttttattggctttctgattt

SEQ ID NO: 1919181 - DNA, 25 bp, Homo sapien
tcattgcgtcttttattggctttct

SEQ ID NO: 1919182 - DNA, 25 bp, Homo sapien
gggtttctgataacgctcatcgata

SEQ ID NO: 1919183 - DNA, 25 bp, Homo sapien
atctccgcgttggtaagaaaacctg

SEQ ID NO: 1919184 - DNA, 25 bp, Homo sapien
tgaaacttcccgagaatgaggcggg

SEQ ID NO: 1919185 - DNA, 25 bp, Homo sapien
taaattgcacttgcaactcccctgg

SEQ ID NO: 1919186 - DNA, 25 bp, Homo sapien
ttcctcacccttggcgactgtgata

SEQ ID NO: 1919187 - DNA, 25 bp, Homo sapien
ttggcgactgtgataccaacaatgc

SEQ ID NO: 1919188 - DNA, 25 bp, Homo sapien
ccagccactgagttcctcacccttg

SEQ ID NO: 1919189 - DNA, 25 bp, Homo sapien
gccttctgagggttctcaacccagc

SEQ ID NO: 1919190 - DNA, 25 bp, Homo sapien
tttaaaattcagacaaggcccacag

SEQ ID NO: 1919191 - DNA, 25 bp, Homo sapien
ggattgtccttaagtccctgctaaa

SEQ ID NO: 1919192 - DNA, 25 bp, Homo sapien
gaaggtaagctttctaggcctgacc

SEQ ID NO: 1919193 - DNA, 25 bp, Homo sapien
ctaaagtcagggaatcaagccatgc

SEQ ID NO: 1919194 - DNA, 25 bp, Homo sapien
tagtccatcagatcatgtgttctgg

SEQ ID NO: 1919195 - DNA, 25 bp, Homo sapien
gaaagaggattcagtagtacacata

SEQ ID NO: 1919196 - DNA, 25 bp, Homo sapien
tgcatgtaatgtagacctagtccat

SEQ ID NO: 1919197 - DNA, 25 bp, Homo sapien
taaactacggtcatgttcagcttca

SEQ ID NO: 1919198 - DNA, 25 bp, Homo sapien
tatgaaaatggctgaacctctcaat

SEQ ID NO: 1919199 - DNA, 25 bp, Homo sapien
ttttatgaaaatggctgaacctctc

SEQ ID NO: 1919200 - DNA, 25 bp, Homo sapien
tttgcctagggtgctagttctctgc

SEQ ID NO: 1919201 - DNA, 25 bp, Homo sapien
aacctctcaatttgcctagggtgct

SEQ ID NO: 1919202 - DNA, 25 bp, Homo sapien
aacctcattgactacgatcatgcca

SEQ ID NO: 1919203 - DNA, 25 bp, Homo sapien
aaacctcattgactacgatcatgcc

SEQ ID NO: 1919204 - DNA, 25 bp, Homo sapien
acctcattgactacgatcatgccac

SEQ ID NO: 1919205 - DNA, 25 bp, Homo sapien
tctgaagctacgggacttggagaga

SEQ ID NO: 1919206 - DNA, 25 bp, Homo sapien
actctgaagctacgggacttggaga

SEQ ID NO: 1919207 - DNA, 25 bp, Homo sapien
caactctgaagctacgggacttgga

SEQ ID NO: 1919208 - DNA, 25 bp, Homo sapien
gtcaactctgaagctacgggacttg

SEQ ID NO: 1919209 - DNA, 25 bp, Homo sapien
caagttccatggaggcattttaggg

SEQ ID NO: 1919210 - DNA, 25 bp, Homo sapien
tgttggatgaaagagcgaaaacaga

SEQ ID NO: 1919211 - DNA, 25 bp, Homo sapien
aaaccaagttccatggaggcatttt

SEQ ID NO: 1919212 - DNA, 25 bp, Homo sapien
gatgaaagagcgaaaacagatgcag

SEQ ID NO: 1919213 - DNA, 25 bp, Homo sapien
tcatattagaaaaggtagcaccatc

SEQ ID NO: 1919214 - DNA, 25 bp, Homo sapien
tgtcctagaaccaaacatctggagc

SEQ ID NO: 1919215 - DNA, 25 bp, Homo sapien
tctatgcagcaaagagtgacaactt

SEQ ID NO: 1919216 - DNA, 25 bp, Homo sapien
tacaaatatcttctgcatggtctga

SEQ ID NO: 1919217 - DNA, 25 bp, Homo sapien
ctttagcaagttaaatacatacttg

SEQ ID NO: 1919218 - DNA, 25 bp, Homo sapien
ttacaatcattaacattgcctgtga

SEQ ID NO: 1919219 - DNA, 25 bp, Homo sapien
tataagctgagcaaagtcttttcag

SEQ ID NO: 1919220 - DNA, 25 bp, Homo sapien
cttggaagctttcagatataaaaat

SEQ ID NO: 1919221 - DNA, 25 bp, Homo sapien
atggcttggagatagctgttcatga

SEQ ID NO: 1919222 - DNA, 25 bp, Homo sapien
tatggcttggagatagctgttcatg

SEQ ID NO: 1919223 - DNA, 25 bp, Homo sapien
atatggcttggagatagctgttcat

SEQ ID NO: 1919224 - DNA, 25 bp, Homo sapien
gatatggcttggagatagctgttca

SEQ ID NO: 1919225 - DNA, 25 bp, Homo sapien
tatgtgggcatatacatcaaacagg

SEQ ID NO: 1919226 - DNA, 25 bp, Homo sapien
aatcaaagatatgaagtcaaaggct

SEQ ID NO: 1919227 - DNA, 25 bp, Homo sapien
caagatggatgaaaactatgtgggc

SEQ ID NO: 1919228 - DNA, 25 bp, Homo sapien
gcttctttggataattagccaagat

SEQ ID NO: 1919229 - DNA, 25 bp, Homo sapien
aaatggcagtgcactgacatggcgt

SEQ ID NO: 1919230 - DNA, 25 bp, Homo sapien
taccagatatgaaaatacgatgtga

SEQ ID NO: 1919231 - DNA, 25 bp, Homo sapien
tcctcattgagtggtcaaacactta

SEQ ID NO: 1919232 - DNA, 25 bp, Homo sapien
gtttatacactagccaagaaatggc

SEQ ID NO: 1919233 - DNA, 25 bp, Homo sapien
agcaatcgtctatgattagaagaac

SEQ ID NO: 1919234 - DNA, 25 bp, Homo sapien
tgttgacctctttgagaagcaatcg

SEQ ID NO: 1919235 - DNA, 25 bp, Homo sapien
aataaggggaggattgatgttgacc

SEQ ID NO: 1919236 - DNA, 25 bp, Homo sapien
tctgtttggaagttaattgtgggaa

SEQ ID NO: 1919237 - DNA, 25 bp, Homo sapien
tcccaccctagggttgcatacatac

SEQ ID NO: 1919238 - DNA, 25 bp, Homo sapien
ccacactcataggagaccaactttc

SEQ ID NO: 1919239 - DNA, 25 bp, Homo sapien
gcctgcttctaatcatgaacccaca

SEQ ID NO: 1919240 - DNA, 25 bp, Homo sapien
tgtctgcacgatgctgtatcccacc

SEQ ID NO: 1919241 - DNA, 25 bp, Homo sapien
gtagaaaatcatgggtggcacttgg

SEQ ID NO: 1919242 - DNA, 25 bp, Homo sapien
aatgtgttcttccacttatgctgca

SEQ ID NO: 1919243 - DNA, 25 bp, Homo sapien
tccccaaagcctagaggatcggtct

SEQ ID NO: 1919244 - DNA, 25 bp, Homo sapien
catcccatgaataagctgaagagtc

SEQ ID NO: 1919245 - DNA, 25 bp, Homo sapien
gattcttgaaaatgattcacagagt

SEQ ID NO: 1919246 - DNA, 25 bp, Homo sapien
agagagggatgaggaagtgatgtca

SEQ ID NO: 1919247 - DNA, 25 bp, Homo sapien
cacagagtgtggtagagagggatga

SEQ ID NO: 1919248 - DNA, 25 bp, Homo sapien
gaaaatgattcacagagtgtggtag

SEQ ID NO: 1919249 - DNA, 25 bp, Homo sapien
ctgaggtgtcgatcaacagtatggc

SEQ ID NO: 1919250 - DNA, 25 bp, Homo sapien
tgaggtgtcgatcaacagtatggct

SEQ ID NO: 1919251 - DNA, 25 bp, Homo sapien
gtcgatcaacagtatggctcccctc

SEQ ID NO: 1919252 - DNA, 25 bp, Homo sapien
ggtgtcgatcaacagtatggctccc

SEQ ID NO: 1919253 - DNA, 25 bp, Homo sapien
gcttcccggtaatatctatcagaac

SEQ ID NO: 1919254 - DNA, 25 bp, Homo sapien
caggtcctaactgggccaaggccat

SEQ ID NO: 1919255 - DNA, 25 bp, Homo sapien
ctgcttcccggtaatatctatcaga

SEQ ID NO: 1919256 - DNA, 25 bp, Homo sapien
atcagaacaggtcctaactgggcca

SEQ ID NO: 1919257 - DNA, 25 bp, Homo sapien
tcagagtccgaggttgttggttcag

SEQ ID NO: 1919258 - DNA, 25 bp, Homo sapien
aagagggctggtaatctggctgcca

SEQ ID NO: 1919259 - DNA, 25 bp, Homo sapien
tcagtctgagtaatgcacagtccag

SEQ ID NO: 1919260 - DNA, 25 bp, Homo sapien
tcaaacgggtacagatgaatcacca

SEQ ID NO: 1919261 - DNA, 25 bp, Homo sapien
tgacagcgttttagcctgtcatggt

SEQ ID NO: 1919262 - DNA, 25 bp, Homo sapien
aatacaaatagctgtgggcttcaag

SEQ ID NO: 1919263 - DNA, 25 bp, Homo sapien
gcttcaagagaaagcgcctcttggg

SEQ ID NO: 1919264 - DNA, 25 bp, Homo sapien
gttttagcctgtcatggtcagaagc

SEQ ID NO: 1919265 - DNA, 25 bp, Homo sapien
tgattggtcatattcatcaggttta

SEQ ID NO: 1919266 - DNA, 25 bp, Homo sapien
tttttcccctgattggtcatattca

SEQ ID NO: 1919267 - DNA, 25 bp, Homo sapien
caggtttagatgagaagtaagctct

SEQ ID NO: 1919268 - DNA, 25 bp, Homo sapien
tctgggccagggtactattactaca

SEQ ID NO: 1919269 - DNA, 25 bp, Homo sapien
tgtaaacttcattattaccatgatt

SEQ ID NO: 1919270 - DNA, 25 bp, Homo sapien
ttgtaaacttcattattaccatgat

SEQ ID NO: 1919271 - DNA, 25 bp, Homo sapien
attgtaaacttcattattaccatga

SEQ ID NO: 1919272 - DNA, 25 bp, Homo sapien
ccaaagattatctgttggtatcctg

SEQ ID NO: 1919273 - DNA, 25 bp, Homo sapien
gctcttcccaacacttttacaactg

SEQ ID NO: 1919274 - DNA, 25 bp, Homo sapien
tactgtcactcattagaggataaat

SEQ ID NO: 1919275 - DNA, 25 bp, Homo sapien
tttacaactgaagattctaatagca

SEQ ID NO: 1919276 - DNA, 25 bp, Homo sapien
taaagacactcaaaaattgcccatg

SEQ ID NO: 1919277 - DNA, 25 bp, Homo sapien
tccataaagacactcaaaaattgcc

SEQ ID NO: 1919278 - DNA, 25 bp, Homo sapien
taacaataatcacacattggataaa

SEQ ID NO: 1919279 - DNA, 25 bp, Homo sapien
agtctccataaagacactcaaaaat

SEQ ID NO: 1919280 - DNA, 25 bp, Homo sapien
aaaatagctcccgttcacagcctgg

SEQ ID NO: 1919281 - DNA, 25 bp, Homo sapien
taaaatagctcccgttcacagcctg

SEQ ID NO: 1919282 - DNA, 25 bp, Homo sapien
tataaaatagctcccgttcacagcc

SEQ ID NO: 1919283 - DNA, 25 bp, Homo sapien
ataaaatagctcccgttcacagcct

SEQ ID NO: 1919284 - DNA, 25 bp, Homo sapien
ctggaggcactgcaatactaggtag

SEQ ID NO: 1919285 - DNA, 25 bp, Homo sapien
caatactaggtagatgtatggaatg

SEQ ID NO: 1919286 - DNA, 25 bp, Homo sapien
ctgcaatactaggtagatgtatgga

SEQ ID NO: 1919287 - DNA, 25 bp, Homo sapien
ggcactgcaatactaggtagatgta

SEQ ID NO: 1919288 - DNA, 25 bp, Homo sapien
tgggaatcctcggttccatgctata

SEQ ID NO: 1919289 - DNA, 25 bp, Homo sapien
ggttccatgctatacactttgtcag

SEQ ID NO: 1919290 - DNA, 25 bp, Homo sapien
gctatacactttgtcagaacagtta

SEQ ID NO: 1919291 - DNA, 25 bp, Homo sapien
tcctttgggaatcctcggttccatg

SEQ ID NO: 1919292 - DNA, 25 bp, Homo sapien
gcccgggccatcacatgttgtgatg

SEQ ID NO: 1919293 - DNA, 25 bp, Homo sapien
cccgggccatcacatgttgtgatgt

SEQ ID NO: 1919294 - DNA, 25 bp, Homo sapien
tctgaggtgccaaacacacacctac

SEQ ID NO: 1919295 - DNA, 25 bp, Homo sapien
gtgtctctgaggtgccaaacacaca

SEQ ID NO: 1919296 - DNA, 25 bp, Homo sapien
cttcaaagatgctgatacttttcat

SEQ ID NO: 1919297 - DNA, 25 bp, Homo sapien
ctcttcaaagatgctgatacttttc

SEQ ID NO: 1919298 - DNA, 25 bp, Homo sapien
tcttcaaagatgctgatacttttca

SEQ ID NO: 1919299 - DNA, 25 bp, Homo sapien
gctcttcaaagatgctgatactttt

SEQ ID NO: 1919300 - DNA, 25 bp, Homo sapien
gatgcttggccagaatatcacgcat

SEQ ID NO: 1919301 - DNA, 25 bp, Homo sapien
ctgtggaaatctgcacttgtcttct

SEQ ID NO: 1919302 - DNA, 25 bp, Homo sapien
gcaagcctaagggatacaacaaatg

SEQ ID NO: 1919303 - DNA, 25 bp, Homo sapien
ggccagaatatcacgcatctgaaat

SEQ ID NO: 1919304 - DNA, 25 bp, Homo sapien
taacacctaatctcagtgtgtgcgt

SEQ ID NO: 1919305 - DNA, 25 bp, Homo sapien
tagtacttctacatagctcacgcca

SEQ ID NO: 1919306 - DNA, 25 bp, Homo sapien
catttagactgcaccattccacgga

SEQ ID NO: 1919307 - DNA, 25 bp, Homo sapien
aattattacagccacgccaaactgc

SEQ ID NO: 1919308 - DNA, 25 bp, Homo sapien
gccacgagaatgtacacttcagtag

SEQ ID NO: 1919309 - DNA, 25 bp, Homo sapien
tgccctagaattccctcacagagct

SEQ ID NO: 1919310 - DNA, 25 bp, Homo sapien
tatgaaccctcatcatgcagagtca

SEQ ID NO: 1919311 - DNA, 25 bp, Homo sapien
tcttatgtttgtctcctgccacgag

SEQ ID NO: 1919312 - DNA, 25 bp, Homo sapien
ttgttggcaacttccaaagcattga

SEQ ID NO: 1919313 - DNA, 25 bp, Homo sapien
ttggcaacttccaaagcattgatat

SEQ ID NO: 1919314 - DNA, 25 bp, Homo sapien
gcaacttccaaagcattgatatcag

SEQ ID NO: 1919315 - DNA, 25 bp, Homo sapien
ttgatatcaggagccagttgaacat

SEQ ID NO: 1919316 - DNA, 25 bp, Homo sapien
tggcagactcagcggtcagcagaaa

SEQ ID NO: 1919317 - DNA, 25 bp, Homo sapien
tcatggcagactcagcggtcagcag

SEQ ID NO: 1919318 - DNA, 25 bp, Homo sapien
tcttcatagcctgtttgatccggtg

SEQ ID NO: 1919319 - DNA, 25 bp, Homo sapien
tcatagcctgtttgatccggtgctt

SEQ ID NO: 1919320 - DNA, 25 bp, Homo sapien
tgcctccggagtcacagtatcttgg

SEQ ID NO: 1919321 - DNA, 25 bp, Homo sapien
ggctgcctccggagtcacagtatct

SEQ ID NO: 1919322 - DNA, 25 bp, Homo sapien
gcctccggagtcacagtatcttggg

SEQ ID NO: 1919323 - DNA, 25 bp, Homo sapien
ctgggggcgctcttccaaggatatt

SEQ ID NO: 1919324 - DNA, 25 bp, Homo sapien
ttttcttttttgtggctatggacac

SEQ ID NO: 1919325 - DNA, 25 bp, Homo sapien
tttttcttttttgtggctatggaca

SEQ ID NO: 1919326 - DNA, 25 bp, Homo sapien
ctgccttcttggcctttaaagcctt

SEQ ID NO: 1919327 - DNA, 25 bp, Homo sapien
acactgccttcttggcctttaaagc

SEQ ID NO: 1919328 - DNA, 25 bp, Homo sapien
caacactgccttcttggcctttaaa

SEQ ID NO: 1919329 - DNA, 25 bp, Homo sapien
gccttcttggcctttaaagccttca

SEQ ID NO: 1919330 - DNA, 25 bp, Homo sapien
attccttcttcgctttcagcgccat

SEQ ID NO: 1919331 - DNA, 25 bp, Homo sapien
ttggcttcggctttaggaagaacta

SEQ ID NO: 1919332 - DNA, 25 bp, Homo sapien
tggcttcggctttaggaagaactaa

SEQ ID NO: 1919333 - DNA, 25 bp, Homo sapien
agccgaaggaaattccttcttcgct

SEQ ID NO: 1919334 - DNA, 25 bp, Homo sapien
ccatgttaggtctgaggcggctgcc

SEQ ID NO: 1919335 - DNA, 25 bp, Homo sapien
taaagctgatttagcggagctggcg

SEQ ID NO: 1919336 - DNA, 25 bp, Homo sapien
tgccacaggcgcgacggatactgtg

SEQ ID NO: 1919337 - DNA, 25 bp, Homo sapien
tcaagatcgttctttggagttttca

SEQ ID NO: 1919338 - DNA, 25 bp, Homo sapien
tgcggtggcaccatgagcggggtca

SEQ ID NO: 1919339 - DNA, 25 bp, Homo sapien
gcggtggcaccatgagcggggtcac

SEQ ID NO: 1919340 - DNA, 25 bp, Homo sapien
ctgcggtggcaccatgagcggggtc

SEQ ID NO: 1919341 - DNA, 25 bp, Homo sapien
tttcctccacagcaagatcagccac

SEQ ID NO: 1919342 - DNA, 25 bp, Homo sapien
tcctctgcaccatcgacacgtagaa

SEQ ID NO: 1919343 - DNA, 25 bp, Homo sapien
caccgtagccctcgctaaaattcaa

SEQ ID NO: 1919344 - DNA, 25 bp, Homo sapien
ggcacagatctgctacgagggcatc

SEQ ID NO: 1919345 - DNA, 25 bp, Homo sapien
tgagaaaaagcccaaccactgaaca

SEQ ID NO: 1919346 - DNA, 25 bp, Homo sapien
tgaagactgtctcggcccatttacc

SEQ ID NO: 1919347 - DNA, 25 bp, Homo sapien
cccaaagtagtatggttgactctgc

SEQ ID NO: 1919348 - DNA, 25 bp, Homo sapien
ctctgccttaacacaggatacaaga

SEQ ID NO: 1919349 - DNA, 25 bp, Homo sapien
ggctgtgggagacgcagaggcagag

SEQ ID NO: 1919350 - DNA, 25 bp, Homo sapien
tgtccaaatcgtggctgtgggagac

SEQ ID NO: 1919351 - DNA, 25 bp, Homo sapien
ccaaatcgtggctgtgggagacgca

SEQ ID NO: 1919352 - DNA, 25 bp, Homo sapien
tttgtccaaatcgtggctgtgggag

SEQ ID NO: 1919353 - DNA, 25 bp, Homo sapien
ctcgtcggggaggatcaggctgcac

SEQ ID NO: 1919354 - DNA, 25 bp, Homo sapien
tcgtcggggaggatcaggctgcaca

SEQ ID NO: 1919355 - DNA, 25 bp, Homo sapien
ggatcaggctgcacaggagcccacg

SEQ ID NO: 1919356 - DNA, 25 bp, Homo sapien
ggaggatcaggctgcacaggagccc

SEQ ID NO: 1919357 - DNA, 25 bp, Homo sapien
taatgtctacttctagtattagaga

SEQ ID NO: 1919358 - DNA, 25 bp, Homo sapien
aatgtaggaaaatgaacagatcgtc

SEQ ID NO: 1919359 - DNA, 25 bp, Homo sapien
tgctcaacaatacatttgagctggc

SEQ ID NO: 1919360 - DNA, 25 bp, Homo sapien
taccattaagcacactgacgaaggc

SEQ ID NO: 1919361 - DNA, 25 bp, Homo sapien
cttcagtagccgatttgattaagtg

SEQ ID NO: 1919362 - DNA, 25 bp, Homo sapien
cagtagccgatttgattaagtggaa

SEQ ID NO: 1919363 - DNA, 25 bp, Homo sapien
gtagccgatttgattaagtggaaga

SEQ ID NO: 1919364 - DNA, 25 bp, Homo sapien
gccgatttgattaagtggaagaaaa

SEQ ID NO: 1919365 - DNA, 25 bp, Homo sapien
ttaacagtggtgttgatgctcagtg

SEQ ID NO: 1919366 - DNA, 25 bp, Homo sapien
ggacaatggctggaaatcctctttg

SEQ ID NO: 1919367 - DNA, 25 bp, Homo sapien
caatggctggaaatcctctttgttt

SEQ ID NO: 1919368 - DNA, 25 bp, Homo sapien
tggaaatcgttagtttcacattttc

SEQ ID NO: 1919369 - DNA, 25 bp, Homo sapien
ggccagaagccatcatggaaatcgt

SEQ ID NO: 1919370 - DNA, 25 bp, Homo sapien
gcaagacccctgaaactttagatga

SEQ ID NO: 1919371 - DNA, 25 bp, Homo sapien
caagacccctgaaactttagatgac

SEQ ID NO: 1919372 - DNA, 25 bp, Homo sapien
agacccctgaaactttagatgactc

SEQ ID NO: 1919373 - DNA, 25 bp, Homo sapien
aagacccctgaaactttagatgact

SEQ ID NO: 1919374 - DNA, 25 bp, Homo sapien
aattgtccctctcagatttatcaca

SEQ ID NO: 1919375 - DNA, 25 bp, Homo sapien
attgtccctctcagatttatcacat

SEQ ID NO: 1919376 - DNA, 25 bp, Homo sapien
ttgtccctctcagatttatcacatg

SEQ ID NO: 1919377 - DNA, 25 bp, Homo sapien
tgtccctctcagatttatcacatgc

SEQ ID NO: 1919378 - DNA, 25 bp, Homo sapien
tgggcaccagtgtatgtgtctctgc

SEQ ID NO: 1919379 - DNA, 25 bp, Homo sapien
gttgggcaccagtgtatgtgtctct

SEQ ID NO: 1919380 - DNA, 25 bp, Homo sapien
gctgttgggcaccagtgtatgtgtc

SEQ ID NO: 1919381 - DNA, 25 bp, Homo sapien
tgttgggcaccagtgtatgtgtctc

SEQ ID NO: 1919382 - DNA, 25 bp, Homo sapien
ggccctctgttgacagaccacagta

SEQ ID NO: 1919383 - DNA, 25 bp, Homo sapien
aggatctacagcagcgccataccaa

SEQ ID NO: 1919384 - DNA, 25 bp, Homo sapien
tgttcatgggaaagatacacccctg

SEQ ID NO: 1919385 - DNA, 25 bp, Homo sapien
caaaagccctcttggcaggatctac

SEQ ID NO: 1919386 - DNA, 25 bp, Homo sapien
tcacatatcaagctctgccactggt

SEQ ID NO: 1919387 - DNA, 25 bp, Homo sapien
agataagccctttcatccagtctcc

SEQ ID NO: 1919388 - DNA, 25 bp, Homo sapien
tcccactcactaggcttgaggcaag

SEQ ID NO: 1919389 - DNA, 25 bp, Homo sapien
gctctctattctgctgacccaatct

SEQ ID NO: 1919390 - DNA, 25 bp, Homo sapien
tttttttccgttctgcagttatctc

SEQ ID NO: 1919391 - DNA, 25 bp, Homo sapien
tgaagcatagcttttccaaggtgct

SEQ ID NO: 1919392 - DNA, 25 bp, Homo sapien
ttttccaaggtgctctcctgactca

SEQ ID NO: 1919393 - DNA, 25 bp, Homo sapien
agtccctctcgaagtggcctctact

SEQ ID NO: 1919394 - DNA, 25 bp, Homo sapien
gcttgtgatgcatagctagccccac

SEQ ID NO: 1919395 - DNA, 25 bp, Homo sapien
gagtatcaactccttagtaaggtcc

SEQ ID NO: 1919396 - DNA, 25 bp, Homo sapien
gagaacaccacacccttgatatgaa

SEQ ID NO: 1919397 - DNA, 25 bp, Homo sapien
gaagcactaagtgatgtggtactgc

SEQ ID NO: 1919398 - DNA, 25 bp, Homo sapien
ggctccttttgacttttgatcaaat

SEQ ID NO: 1919399 - DNA, 25 bp, Homo sapien
gccaagttccttagcaagagcatgt

SEQ ID NO: 1919400 - DNA, 25 bp, Homo sapien
aattaggtacagtcgcaatgccaag

SEQ ID NO: 1919401 - DNA, 25 bp, Homo sapien
ttagcaagagcatgtgaaaaggctc

SEQ ID NO: 1919402 - DNA, 25 bp, Homo sapien
ttagttcataccaccatgctccgct

SEQ ID NO: 1919403 - DNA, 25 bp, Homo sapien
ataccaccatgctccgctactgttg

SEQ ID NO: 1919404 - DNA, 25 bp, Homo sapien
gttcataccaccatgctccgctact

SEQ ID NO: 1919405 - DNA, 25 bp, Homo sapien
tcataccaccatgctccgctactgt

SEQ ID NO: 1919406 - DNA, 25 bp, Homo sapien
cttgaccacttcatgtaaagagttt

SEQ ID NO: 1919407 - DNA, 25 bp, Homo sapien
gacccacttgaccacttcatgtaaa

SEQ ID NO: 1919408 - DNA, 25 bp, Homo sapien
cacttgaccacttcatgtaaagagt

SEQ ID NO: 1919409 - DNA, 25 bp, Homo sapien
tctagacccacttgaccacttcatg

SEQ ID NO: 1919410 - DNA, 25 bp, Homo sapien
ttgagaaacaacaatatgatcataa

SEQ ID NO: 1919411 - DNA, 25 bp, Homo sapien
tttgagaaacaacaatatgatcata

SEQ ID NO: 1919412 - DNA, 25 bp, Homo sapien
ttagtggaaccctttgggccatcaa

SEQ ID NO: 1919413 - DNA, 25 bp, Homo sapien
tagtggaaccctttgggccatcaaa

SEQ ID NO: 1919414 - DNA, 25 bp, Homo sapien
agctgtgccaccttagtgatgtaag

SEQ ID NO: 1919415 - DNA, 25 bp, Homo sapien
tacttcttcagctgtgccaccttag

SEQ ID NO: 1919416 - DNA, 25 bp, Homo sapien
tcttcagctgtgccaccttagtgat

SEQ ID NO: 1919417 - DNA, 25 bp, Homo sapien
tctcatacttcttcagctgtgccac

SEQ ID NO: 1919418 - DNA, 25 bp, Homo sapien
gatcttgtggcagaattctgaatag

SEQ ID NO: 1919419 - DNA, 25 bp, Homo sapien
ccttagctggttcttaattctttat

SEQ ID NO: 1919420 - DNA, 25 bp, Homo sapien
tctttatctcccaatcatagtgtac

SEQ ID NO: 1919421 - DNA, 25 bp, Homo sapien
ttaattctttatctcccaatcatag

SEQ ID NO: 1919422 - DNA, 25 bp, Homo sapien
atctgccttcgccatttcgtcaaat

SEQ ID NO: 1919423 - DNA, 25 bp, Homo sapien
tctgccttcgccatttcgtcaaatt

SEQ ID NO: 1919424 - DNA, 25 bp, Homo sapien
ttatctgccttcgccatttcgtcaa

SEQ ID NO: 1919425 - DNA, 25 bp, Homo sapien
tgccttcgccatttcgtcaaattta

SEQ ID NO: 1919426 - DNA, 25 bp, Homo sapien
tctgtaaaattaatagggaactcta

SEQ ID NO: 1919427 - DNA, 25 bp, Homo sapien
tgtaaaattaatagggaactctaga

SEQ ID NO: 1919428 - DNA, 25 bp, Homo sapien
ctgtaaaattaatagggaactctag

SEQ ID NO: 1919429 - DNA, 25 bp, Homo sapien
aatgcatctgcagagcctgctgctg

SEQ ID NO: 1919430 - DNA, 25 bp, Homo sapien
tctgcagagcctgctgctgggggcc

SEQ ID NO: 1919431 - DNA, 25 bp, Homo sapien
catctgcagagcctgctgctggggg

SEQ ID NO: 1919432 - DNA, 25 bp, Homo sapien
ctaatgcatctgcagagcctgctgc

SEQ ID NO: 1919433 - DNA, 25 bp, Homo sapien
gtaatggtggagtactcagctgtct

SEQ ID NO: 1919434 - DNA, 25 bp, Homo sapien
tgtgtaatggtggagtactcagctg

SEQ ID NO: 1919435 - DNA, 25 bp, Homo sapien
gagtggcagggagttgctctgtgta

SEQ ID NO: 1919436 - DNA, 25 bp, Homo sapien
tgtaatggtggagtactcagctgtc

SEQ ID NO: 1919437 - DNA, 25 bp, Homo sapien
tacaggtggatttcctgctgaagag

SEQ ID NO: 1919438 - DNA, 25 bp, Homo sapien
tggatttcctgctgaagagtcatat

SEQ ID NO: 1919439 - DNA, 25 bp, Homo sapien
tttcctgctgaagagtcatattctc

SEQ ID NO: 1919440 - DNA, 25 bp, Homo sapien
gatttcctgctgaagagtcatattc

SEQ ID NO: 1919441 - DNA, 25 bp, Homo sapien
gccacattcttgcttcattgaattt

SEQ ID NO: 1919442 - DNA, 25 bp, Homo sapien
ttcccaactcttctggaaccatttc

SEQ ID NO: 1919443 - DNA, 25 bp, Homo sapien
tttgggccagcatggcaggcaaagc

SEQ ID NO: 1919444 - DNA, 25 bp, Homo sapien
ggcaaagccattgcctcatatcctg

SEQ ID NO: 1919445 - DNA, 25 bp, Homo sapien
tagcaaaatgatcaatacggtatcc

SEQ ID NO: 1919446 - DNA, 25 bp, Homo sapien
ggcagaaacttgtcactccatatac

SEQ ID NO: 1919447 - DNA, 25 bp, Homo sapien
ccatatacacgtgtagatttggaac

SEQ ID NO: 1919448 - DNA, 25 bp, Homo sapien
tataactgccaagccaataaacagg

SEQ ID NO: 1919449 - DNA, 25 bp, Homo sapien
gagtattctagtccctggactccca

SEQ ID NO: 1919450 - DNA, 25 bp, Homo sapien
gctttgaaaatgagtattctagtcc

SEQ ID NO: 1919451 - DNA, 25 bp, Homo sapien
tctcccgggtccaatgtcaggcttt

SEQ ID NO: 1919452 - DNA, 25 bp, Homo sapien
gtctcccgggtccaatgtcaggctt

SEQ ID NO: 1919453 - DNA, 25 bp, Homo sapien
tctgaggtccttttcaggtgtctcc

SEQ ID NO: 1919454 - DNA, 25 bp, Homo sapien
ttgtatcctagtgactcctcaacac

SEQ ID NO: 1919455 - DNA, 25 bp, Homo sapien
tatcctagtgactcctcaacaccca

SEQ ID NO: 1919456 - DNA, 25 bp, Homo sapien
cctagtgactcctcaacacccattt

SEQ ID NO: 1919457 - DNA, 25 bp, Homo sapien
tgtatcctagtgactcctcaacacc

SEQ ID NO: 1919458 - DNA, 25 bp, Homo sapien
gaggagatgacccacccttaataaa

SEQ ID NO: 1919459 - DNA, 25 bp, Homo sapien
taataaaacaccgtctgccggacat

SEQ ID NO: 1919460 - DNA, 25 bp, Homo sapien
agcagtcacacgactccagagggac

SEQ ID NO: 1919461 - DNA, 25 bp, Homo sapien
ggaagcatgtagaaccgcaggctgt

SEQ ID NO: 1919462 - DNA, 25 bp, Homo sapien
ttagcactcagcttagcataacttt

SEQ ID NO: 1919463 - DNA, 25 bp, Homo sapien
ctttagcactcagcttagcataact

SEQ ID NO: 1919464 - DNA, 25 bp, Homo sapien
aggaaaggcagtcctcggccagtaa

SEQ ID NO: 1919465 - DNA, 25 bp, Homo sapien
agtcctcggccagtaaagtggtgtt

SEQ ID NO: 1919466 - DNA, 25 bp, Homo sapien
cactatgtgagtctccacgcgctgc

SEQ ID NO: 1919467 - DNA, 25 bp, Homo sapien
gcagcagtgattccgttccttcaaa

SEQ ID NO: 1919468 - DNA, 25 bp, Homo sapien
tctgtgcatctgggcaggaactgca

SEQ ID NO: 1919469 - DNA, 25 bp, Homo sapien
agttcactatgtgagtctccacgcg

SEQ ID NO: 1919470 - DNA, 25 bp, Homo sapien
gacatcatagtgtcatgctctcaat

SEQ ID NO: 1919471 - DNA, 25 bp, Homo sapien
gaccctgcgtatgtgttagctaatg

SEQ ID NO: 1919472 - DNA, 25 bp, Homo sapien
ttaatcatataaactagaccctgcg

SEQ ID NO: 1919473 - DNA, 25 bp, Homo sapien
gaagaactgagtctatgctgcctaa

SEQ ID NO: 1919474 - DNA, 25 bp, Homo sapien
tctgggtacccttctgcgcataagg

SEQ ID NO: 1919475 - DNA, 25 bp, Homo sapien
tgttttcacgttccacttcaggtaa

SEQ ID NO: 1919476 - DNA, 25 bp, Homo sapien
ggactgtgctgtttaatcacacgag

SEQ ID NO: 1919477 - DNA, 25 bp, Homo sapien
cttcaggtaaacgagggactgtgct

SEQ ID NO: 1919478 - DNA, 25 bp, Homo sapien
tagcagtttctcatcagtgtggggc

SEQ ID NO: 1919479 - DNA, 25 bp, Homo sapien
agtttctcatcagtgtggggctttc

SEQ ID NO: 1919480 - DNA, 25 bp, Homo sapien
ctagcagtttctcatcagtgtgggg

SEQ ID NO: 1919481 - DNA, 25 bp, Homo sapien
gcagtttctcatcagtgtggggctt

SEQ ID NO: 1919482 - DNA, 25 bp, Homo sapien
cttatttctctcagtacttttgaac

SEQ ID NO: 1919483 - DNA, 25 bp, Homo sapien
tatttctctcagtacttttgaactc

SEQ ID NO: 1919484 - DNA, 25 bp, Homo sapien
ttctctcagtacttttgaactccat

SEQ ID NO: 1919485 - DNA, 25 bp, Homo sapien
tttctctcagtacttttgaactcca

SEQ ID NO: 1919486 - DNA, 25 bp, Homo sapien
tcttttggctgtaactctaacttca

SEQ ID NO: 1919487 - DNA, 25 bp, Homo sapien
tcaatctccattttaagggccaagg

SEQ ID NO: 1919488 - DNA, 25 bp, Homo sapien
tacacgaagagtgttgggaagcttc

SEQ ID NO: 1919489 - DNA, 25 bp, Homo sapien
tctccattttaagggccaaggatgc

SEQ ID NO: 1919490 - DNA, 25 bp, Homo sapien
ctgggacatcttagctgggttccct

SEQ ID NO: 1919491 - DNA, 25 bp, Homo sapien
ttcctaatgctcctggagaatacat

SEQ ID NO: 1919492 - DNA, 25 bp, Homo sapien
tctccttttcctaatgctcctggag

SEQ ID NO: 1919493 - DNA, 25 bp, Homo sapien
tgggacatcttagctgggttccctt

SEQ ID NO: 1919494 - DNA, 25 bp, Homo sapien
tgatatcagaagtagagttttcttt

SEQ ID NO: 1919495 - DNA, 25 bp, Homo sapien
atgatatcagaagtagagttttctt

SEQ ID NO: 1919496 - DNA, 25 bp, Homo sapien
ggtcacttcatactcaaggttatag

SEQ ID NO: 1919497 - DNA, 25 bp, Homo sapien
ggttatagacagcattcctaagctt

SEQ ID NO: 1919498 - DNA, 25 bp, Homo sapien
tatagacagcattcctaagctttgt

SEQ ID NO: 1919499 - DNA, 25 bp, Homo sapien
ctcaaggttatagacagcattccta

SEQ ID NO: 1919500 - DNA, 25 bp, Homo sapien
gctcattaaggagcgtagaacataa

SEQ ID NO: 1919501 - DNA, 25 bp, Homo sapien
ttaaggagcgtagaacataatggaa

SEQ ID NO: 1919502 - DNA, 25 bp, Homo sapien
ggagctcattaaggagcgtagaaca

SEQ ID NO: 1919503 - DNA, 25 bp, Homo sapien
cattaaggagcgtagaacataatgg

SEQ ID NO: 1919504 - DNA, 25 bp, Homo sapien
taggtttgaccataagttgggacca

SEQ ID NO: 1919505 - DNA, 25 bp, Homo sapien
aggtttgaccataagttgggaccat

SEQ ID NO: 1919506 - DNA, 25 bp, Homo sapien
gtttgaccataagttgggaccatac

SEQ ID NO: 1919507 - DNA, 25 bp, Homo sapien
ggtttgaccataagttgggaccata

SEQ ID NO: 1919508 - DNA, 25 bp, Homo sapien
tgtgctttcataagagttgcactgc

SEQ ID NO: 1919509 - DNA, 25 bp, Homo sapien
tcacactagagttatctaaggagcc

SEQ ID NO: 1919510 - DNA, 25 bp, Homo sapien
gccagaatccaccagaactaagaca

SEQ ID NO: 1919511 - DNA, 25 bp, Homo sapien
gacaccaaaggtaatagcatagcca

SEQ ID NO: 1919512 - DNA, 25 bp, Homo sapien
aaagatgtcctcttggcacaggatc

SEQ ID NO: 1919513 - DNA, 25 bp, Homo sapien
tgtcctcttggcacaggatcaggac

SEQ ID NO: 1919514 - DNA, 25 bp, Homo sapien
atgtcctcttggcacaggatcagga

SEQ ID NO: 1919515 - DNA, 25 bp, Homo sapien
agatgtcctcttggcacaggatcag

SEQ ID NO: 1919516 - DNA, 25 bp, Homo sapien
agagtcagaggcacactagggaagc

SEQ ID NO: 1919517 - DNA, 25 bp, Homo sapien
gtcagaggcacactagggaagccca

SEQ ID NO: 1919518 - DNA, 25 bp, Homo sapien
caaagagagtcagaggcacactagg

SEQ ID NO: 1919519 - DNA, 25 bp, Homo sapien
aagagagtcagaggcacactaggga

SEQ ID NO: 1919520 - DNA, 25 bp, Homo sapien
tgtgggcactctttctgagctccgc

SEQ ID NO: 1919521 - DNA, 25 bp, Homo sapien
actctttctgagctccgcatcgaac

SEQ ID NO: 1919522 - DNA, 25 bp, Homo sapien
ttctgagctccgcatcgaacatggg

SEQ ID NO: 1919523 - DNA, 25 bp, Homo sapien
gcactctttctgagctccgcatcga

SEQ ID NO: 1919524 - DNA, 25 bp, Homo sapien
cagcagttatggaagttccctttgc

SEQ ID NO: 1919525 - DNA, 25 bp, Homo sapien
gcattgtcagcagttatggaagttc

SEQ ID NO: 1919526 - DNA, 25 bp, Homo sapien
ttgtcagcagttatggaagttccct

SEQ ID NO: 1919527 - DNA, 25 bp, Homo sapien
cagttatggaagttccctttgcatt

SEQ ID NO: 1919528 - DNA, 25 bp, Homo sapien
cttccacagattgccgatcacaccc

SEQ ID NO: 1919529 - DNA, 25 bp, Homo sapien
cccatgcctcctgcgctaaagttga

SEQ ID NO: 1919530 - DNA, 25 bp, Homo sapien
gcctcctgcgctaaagttgaaatat

SEQ ID NO: 1919531 - DNA, 25 bp, Homo sapien
ttaagcagcatcatgcgctacttcc

SEQ ID NO: 1919532 - DNA, 25 bp, Homo sapien
catctgcacctgatgttgatacaca

SEQ ID NO: 1919533 - DNA, 25 bp, Homo sapien
atctgcacctgatgttgatacacat

SEQ ID NO: 1919534 - DNA, 25 bp, Homo sapien
actcttccagattcataatcctggg

SEQ ID NO: 1919535 - DNA, 25 bp, Homo sapien
cttccagattcataatcctgggaca

SEQ ID NO: 1919536 - DNA, 25 bp, Homo sapien
taatcctgggacaccttcacatcta

SEQ ID NO: 1919537 - DNA, 25 bp, Homo sapien
ataatcctgggacaccttcacatct

SEQ ID NO: 1919538 - DNA, 25 bp, Homo sapien
tatttaattgtagcatgtgtatctt

SEQ ID NO: 1919539 - DNA, 25 bp, Homo sapien
taattgtagcatgtgtatctttaca

SEQ ID NO: 1919540 - DNA, 25 bp, Homo sapien
gagcaaagcggtttgcaaataaata

SEQ ID NO: 1919541 - DNA, 25 bp, Homo sapien
tatttttggagcaaagcggtttgca

SEQ ID NO: 1919542 - DNA, 25 bp, Homo sapien
cagttggtaatagctcctgtgggtg

SEQ ID NO: 1919543 - DNA, 25 bp, Homo sapien
caggagtgaggatctctgagaaccg

SEQ ID NO: 1919544 - DNA, 25 bp, Homo sapien
tgagaaccgtttgcaaggtttccag

SEQ ID NO: 1919545 - DNA, 25 bp, Homo sapien
tgaggttagtgaccatgtagtatgg

SEQ ID NO: 1919546 - DNA, 25 bp, Homo sapien
ggtagtgaccataaatatccatgag

SEQ ID NO: 1919547 - DNA, 25 bp, Homo sapien
tatccatgaggatcacccattcact

SEQ ID NO: 1919548 - DNA, 25 bp, Homo sapien
gaatacttaataagatccttctggt

SEQ ID NO: 1919549 - DNA, 25 bp, Homo sapien
tctttttgacagtaaggtagtgacc

SEQ ID NO: 1919550 - DNA, 25 bp, Homo sapien
tctggaatacacagttcattatcag

SEQ ID NO: 1919551 - DNA, 25 bp, Homo sapien
gaatacacagttcattatcagtcat

SEQ ID NO: 1919552 - DNA, 25 bp, Homo sapien
ggaatacacagttcattatcagtca

SEQ ID NO: 1919553 - DNA, 25 bp, Homo sapien
tggaatacacagttcattatcagtc

SEQ ID NO: 1919554 - DNA, 25 bp, Homo sapien
ctgatcaacttgacagtctgctcat

SEQ ID NO: 1919555 - DNA, 25 bp, Homo sapien
gatgcggtcatttgtaatccacccc

SEQ ID NO: 1919556 - DNA, 25 bp, Homo sapien
taatgattgtaatgtggaaagatgc

SEQ ID NO: 1919557 - DNA, 25 bp, Homo sapien
catcatgactgatcaacttgacagt

SEQ ID NO: 1919558 - DNA, 25 bp, Homo sapien
gaagtacaagataaaatcaatgcca

SEQ ID NO: 1919559 - DNA, 25 bp, Homo sapien
gaaatccatttgagatcagacaatt

SEQ ID NO: 1919560 - DNA, 25 bp, Homo sapien
gagatcagacaattaggcctaaaaa

SEQ ID NO: 1919561 - DNA, 25 bp, Homo sapien
caaacggaagtacaagataaaatca

SEQ ID NO: 1919562 - DNA, 25 bp, Homo sapien
tggcttttgttagtgtcttaaggcc

SEQ ID NO: 1919563 - DNA, 25 bp, Homo sapien
ttcctcttgagtcctgccagagtat

SEQ ID NO: 1919564 - DNA, 25 bp, Homo sapien
gtgtcttaaggccaggtttctcaaa

SEQ ID NO: 1919565 - DNA, 25 bp, Homo sapien
ctcttgagtcctgccagagtatctg

SEQ ID NO: 1919566 - DNA, 25 bp, Homo sapien
gccagaattgcataatatcttctaa

SEQ ID NO: 1919567 - DNA, 25 bp, Homo sapien
ttttgccagaattgcataatatctt

SEQ ID NO: 1919568 - DNA, 25 bp, Homo sapien
ttgccagaattgcataatatcttct

SEQ ID NO: 1919569 - DNA, 25 bp, Homo sapien
cagaattgcataatatcttctaagc

SEQ ID NO: 1919570 - DNA, 25 bp, Homo sapien
tgcattagagtttccagatcccgta

SEQ ID NO: 1919571 - DNA, 25 bp, Homo sapien
cagaaaggccaaagctgcattagag

SEQ ID NO: 1919572 - DNA, 25 bp, Homo sapien
cctgtgaaagagagcctccgcactg

SEQ ID NO: 1919573 - DNA, 25 bp, Homo sapien
cagctagctgttggagtgcctgtga

SEQ ID NO: 1919574 - DNA, 25 bp, Homo sapien
gaaacccacactaacgagttcatca

SEQ ID NO: 1919575 - DNA, 25 bp, Homo sapien
ggacgcttgtggaggaaacccacac

SEQ ID NO: 1919576 - DNA, 25 bp, Homo sapien
ctgtggacgcttgtggaggaaaccc

SEQ ID NO: 1919577 - DNA, 25 bp, Homo sapien
cgcttgtggaggaaacccacactaa

SEQ ID NO: 1919578 - DNA, 25 bp, Homo sapien
aatttagtaaccacgtatcttactg

SEQ ID NO: 1919579 - DNA, 25 bp, Homo sapien
ttgatctatatgtttgtcagtatgc

SEQ ID NO: 1919580 - DNA, 25 bp, Homo sapien
cgtatcttactgaattcttaaaggg

SEQ ID NO: 1919581 - DNA, 25 bp, Homo sapien
tataaaatggtacttcctctcaaaa

SEQ ID NO: 1919582 - DNA, 25 bp, Homo sapien
aaaagttgggatctatagccaggca

SEQ ID NO: 1919583 - DNA, 25 bp, Homo sapien
gccaggcaagtttggtacttatcac

SEQ ID NO: 1919584 - DNA, 25 bp, Homo sapien
tctttagacggtggttctacggtgc

SEQ ID NO: 1919585 - DNA, 25 bp, Homo sapien
tctacggtgcgtctggatttcaagt

SEQ ID NO: 1919586 - DNA, 25 bp, Homo sapien
tacttctaaacactaatggagccca

SEQ ID NO: 1919587 - DNA, 25 bp, Homo sapien
tgtttcagcacatagtcaaagaacc

SEQ ID NO: 1919588 - DNA, 25 bp, Homo sapien
gatcagagctttatggccttaacta

SEQ ID NO: 1919589 - DNA, 25 bp, Homo sapien
catagagttgtgtggttcggtaagc

SEQ ID NO: 1919590 - DNA, 25 bp, Homo sapien
tgagccccatccagttagttggact

SEQ ID NO: 1919591 - DNA, 25 bp, Homo sapien
tgcagagctttcaggtgttactcag

SEQ ID NO: 1919592 - DNA, 25 bp, Homo sapien
tcagatactgtggaataaaagcacc

SEQ ID NO: 1919593 - DNA, 25 bp, Homo sapien
gacaaagtgtacgtgaatgctcgct

SEQ ID NO: 1919594 - DNA, 25 bp, Homo sapien
tataaggtacactgcccaagaagca

SEQ ID NO: 1919595 - DNA, 25 bp, Homo sapien
tgcaatataaggatggcctgccaca

SEQ ID NO: 1919596 - DNA, 25 bp, Homo sapien
gaagatagacatgtaatcccacagc

SEQ ID NO: 1919597 - DNA, 25 bp, Homo sapien
taaatctatactgcaaacacaaggg

SEQ ID NO: 1919598 - DNA, 25 bp, Homo sapien
taacacgtgttgttaagcctgcagg

SEQ ID NO: 1919599 - DNA, 25 bp, Homo sapien
tgctcagctctaaagggcccaagta

SEQ ID NO: 1919600 - DNA, 25 bp, Homo sapien
ccataagccttggtggctaacacgt

SEQ ID NO: 1919601 - DNA, 25 bp, Homo sapien
tgtgcagggcacaagccataagcct

SEQ ID NO: 1919602 - DNA, 25 bp, Homo sapien
tgacagtggcattttagatacaaca

SEQ ID NO: 1919603 - DNA, 25 bp, Homo sapien
tagtcaactgatacctagcgaaagg

SEQ ID NO: 1919604 - DNA, 25 bp, Homo sapien
caaacaacctggaatagcaaacaca

SEQ ID NO: 1919605 - DNA, 25 bp, Homo sapien
caacaccaaaggcatagttcatgat

SEQ ID NO: 1919606 - DNA, 25 bp, Homo sapien
taaatgttattatggccacctaaag

SEQ ID NO: 1919607 - DNA, 25 bp, Homo sapien
aacaggcagttactttctagtgcca

SEQ ID NO: 1919608 - DNA, 25 bp, Homo sapien
gccaggtcctttttcacataggaag

SEQ ID NO: 1919609 - DNA, 25 bp, Homo sapien
acaagcatcaaaactggcaaccaga

SEQ ID NO: 1919610 - DNA, 25 bp, Homo sapien
cagagagaatgctattattggccaa

SEQ ID NO: 1919611 - DNA, 25 bp, Homo sapien
acactggagaagttacatgggaagc

SEQ ID NO: 1919612 - DNA, 25 bp, Homo sapien
caggcatatgctacaaagcccagat

SEQ ID NO: 1919613 - DNA, 25 bp, Homo sapien
tgtgtaaattccgtatcaagggtaa

SEQ ID NO: 1919614 - DNA, 25 bp, Homo sapien
gcacgatgccaatccaactggaaga

SEQ ID NO: 1919615 - DNA, 25 bp, Homo sapien
gtgccacgagtgtccaaacatacag

SEQ ID NO: 1919616 - DNA, 25 bp, Homo sapien
gaagagattttcacccagacagctg

SEQ ID NO: 1919617 - DNA, 25 bp, Homo sapien
tttgtaagaacaagtggtgccacga

SEQ ID NO: 1919618 - DNA, 25 bp, Homo sapien
atctacagctcggtgaacatcgtcc

SEQ ID NO: 1919619 - DNA, 25 bp, Homo sapien
tcatcacttgttagagtcagtttat

SEQ ID NO: 1919620 - DNA, 25 bp, Homo sapien
gaataactgtaagtgacaccatccc

SEQ ID NO: 1919621 - DNA, 25 bp, Homo sapien
catcatgatataaagtgaagccagg

SEQ ID NO: 1919622 - DNA, 25 bp, Homo sapien
gccaattatgcttagtagacttggg

SEQ ID NO: 1919623 - DNA, 25 bp, Homo sapien
acaaaaagagaattagtcctataat

SEQ ID NO: 1919624 - DNA, 25 bp, Homo sapien
tgttgtattgtagccaattatgctt

SEQ ID NO: 1919625 - DNA, 25 bp, Homo sapien
tatgcttagtagacttgggttgcaa

SEQ ID NO: 1919626 - DNA, 25 bp, Homo sapien
gaaagtagctacactggtcaggcat

SEQ ID NO: 1919627 - DNA, 25 bp, Homo sapien
caattgtaaggtagtcacaggctaa

SEQ ID NO: 1919628 - DNA, 25 bp, Homo sapien
ccagttagctgagttgcgaatgcaa

SEQ ID NO: 1919629 - DNA, 25 bp, Homo sapien
gaagctacagcaagtcatcctaaaa

SEQ ID NO: 1919630 - DNA, 25 bp, Homo sapien
aatacattgtgtagactgtaattac

SEQ ID NO: 1919631 - DNA, 25 bp, Homo sapien
cattgtgtagactgtaattactgaa

SEQ ID NO: 1919632 - DNA, 25 bp, Homo sapien
ctggttcattggtcatagctgacca

SEQ ID NO: 1919633 - DNA, 25 bp, Homo sapien
ggtcatagctgaccatgtcaaatac

SEQ ID NO: 1919634 - DNA, 25 bp, Homo sapien
tgtaacaaaccagatcttggttgtg

SEQ ID NO: 1919635 - DNA, 25 bp, Homo sapien
taacaaaccagatcttggttgtgat

SEQ ID NO: 1919636 - DNA, 25 bp, Homo sapien
acaaaccagatcttggttgtgattc

SEQ ID NO: 1919637 - DNA, 25 bp, Homo sapien
ctgtaacaaaccagatcttggttgt

SEQ ID NO: 1919638 - DNA, 25 bp, Homo sapien
gacaaagaacaggacgatagcaact

SEQ ID NO: 1919639 - DNA, 25 bp, Homo sapien
ttcagagctgtagctgataacaagg

SEQ ID NO: 1919640 - DNA, 25 bp, Homo sapien
tgttgacactgatgaacgccttgtt

SEQ ID NO: 1919641 - DNA, 25 bp, Homo sapien
ttacagaagcaccaacgcagaggag

SEQ ID NO: 1919642 - DNA, 25 bp, Homo sapien
tgcataccaacatctcgagttccct

SEQ ID NO: 1919643 - DNA, 25 bp, Homo sapien
ggcacctgccatgcctacataaaac

SEQ ID NO: 1919644 - DNA, 25 bp, Homo sapien
ttttcaacccacgattcattccatg

SEQ ID NO: 1919645 - DNA, 25 bp, Homo sapien
cattccatgaatgtgcaaaatcaat

SEQ ID NO: 1919646 - DNA, 25 bp, Homo sapien
cagttgtaaaagttccttctggaat

SEQ ID NO: 1919647 - DNA, 25 bp, Homo sapien
gcaattgctgcagcaaatttaaaga

SEQ ID NO: 1919648 - DNA, 25 bp, Homo sapien
tgaagaatgccccaataataattgc

SEQ ID NO: 1919649 - DNA, 25 bp, Homo sapien
ataattgcaattgctgcagcaaatt

SEQ ID NO: 1919650 - DNA, 25 bp, Homo sapien
gagagaagaagatagaacatagcca

SEQ ID NO: 1919651 - DNA, 25 bp, Homo sapien
caaaatgttacaagggacaacacct

SEQ ID NO: 1919652 - DNA, 25 bp, Homo sapien
cactgcagctctaggatcactgcta

SEQ ID NO: 1919653 - DNA, 25 bp, Homo sapien
gatatacagctttatagccaaccaa

SEQ ID NO: 1919654 - DNA, 25 bp, Homo sapien
tacttgaatagcacgatagacttgt

SEQ ID NO: 1919655 - DNA, 25 bp, Homo sapien
aactacaataccaactctatgctgg

SEQ ID NO: 1919656 - DNA, 25 bp, Homo sapien
tgaatatgtactcaagatgagtctg

SEQ ID NO: 1919657 - DNA, 25 bp, Homo sapien
agttaaatccccatctgcgcaaatc

SEQ ID NO: 1919658 - DNA, 25 bp, Homo sapien
catagatcaatctagttacagtgga

SEQ ID NO: 1919659 - DNA, 25 bp, Homo sapien
ttgtttccactaggacagcatcggc

SEQ ID NO: 1919660 - DNA, 25 bp, Homo sapien
caaacacggggcacttccacacaaa

SEQ ID NO: 1919661 - DNA, 25 bp, Homo sapien
ggacagcatcggcatagcaaacacg

SEQ ID NO: 1919662 - DNA, 25 bp, Homo sapien
ctagaaggtggatgaaccagatctt

SEQ ID NO: 1919663 - DNA, 25 bp, Homo sapien
caactagagtgaggcaaaaaggata

SEQ ID NO: 1919664 - DNA, 25 bp, Homo sapien
aacagtatctaagaaagccacagag

SEQ ID NO: 1919665 - DNA, 25 bp, Homo sapien
aagggaatgttgtagaagccagacc

SEQ ID NO: 1919666 - DNA, 25 bp, Homo sapien
gatttgagtccaaatacctcgccta

SEQ ID NO: 1919667 - DNA, 25 bp, Homo sapien
tccaggcttccgtgcaagaagaaat

SEQ ID NO: 1919668 - DNA, 25 bp, Homo sapien
caaggcatgcgtgtgtcatctgaaa

SEQ ID NO: 1919669 - DNA, 25 bp, Homo sapien
gacacacgcatgttttgtgcctaaa

SEQ ID NO: 1919670 - DNA, 25 bp, Homo sapien
tggagcacagccccaggacgctccc

SEQ ID NO: 1919671 - DNA, 25 bp, Homo sapien
ccagctcgccatggagcacagcccc

SEQ ID NO: 1919672 - DNA, 25 bp, Homo sapien
agcacagccccaggacgctccccat

SEQ ID NO: 1919673 - DNA, 25 bp, Homo sapien
cagctcgccatggagcacagcccca

SEQ ID NO: 1919674 - DNA, 25 bp, Homo sapien
aacgtcacaagagcagcggatacag

SEQ ID NO: 1919675 - DNA, 25 bp, Homo sapien
acaacgtcacaagagcagcggatac

SEQ ID NO: 1919676 - DNA, 25 bp, Homo sapien
caacgtcacaagagcagcggataca

SEQ ID NO: 1919677 - DNA, 25 bp, Homo sapien
agatggagacagcttctttctcgcc

SEQ ID NO: 1919678 - DNA, 25 bp, Homo sapien
ggagacagcttctttctcgcctttc

SEQ ID NO: 1919679 - DNA, 25 bp, Homo sapien
gatggagacagcttctttctcgcct

SEQ ID NO: 1919680 - DNA, 25 bp, Homo sapien
agacagcttctttctcgcctttccg

SEQ ID NO: 1919681 - DNA, 25 bp, Homo sapien
ctgcgagacacttccggacgcacag

SEQ ID NO: 1919682 - DNA, 25 bp, Homo sapien
acgcacagcgcaacccgcccctcag

SEQ ID NO: 1919683 - DNA, 25 bp, Homo sapien
tactatctgcgagacacttccggac

SEQ ID NO: 1919684 - DNA, 25 bp, Homo sapien
agacacttccggacgcacagcgcaa

SEQ ID NO: 1919685 - DNA, 25 bp, Homo sapien
ctgataagtcactggtaaggtctta

SEQ ID NO: 1919686 - DNA, 25 bp, Homo sapien
tattttctagtattaaggtcttcat

SEQ ID NO: 1919687 - DNA, 25 bp, Homo sapien
ccataaagcttcctaatattttcta

SEQ ID NO: 1919688 - DNA, 25 bp, Homo sapien
tcatatcccgtaacccgctttgcat

SEQ ID NO: 1919689 - DNA, 25 bp, Homo sapien
tgtttggtagcatctggctgtgtca

SEQ ID NO: 1919690 - DNA, 25 bp, Homo sapien
gcttagctgtttggtagcatctggc

SEQ ID NO: 1919691 - DNA, 25 bp, Homo sapien
tgcagaaatcctaggcttagctgtt

SEQ ID NO: 1919692 - DNA, 25 bp, Homo sapien
tagctgtttggtagcatctggctgt

SEQ ID NO: 1919693 - DNA, 25 bp, Homo sapien
gtttcatattttggtggactgataa

SEQ ID NO: 1919694 - DNA, 25 bp, Homo sapien
tcatattttggtggactgataatca

SEQ ID NO: 1919695 - DNA, 25 bp, Homo sapien
tcatccttggtgatttaaagtttca

SEQ ID NO: 1919696 - DNA, 25 bp, Homo sapien
attttggtggactgataatcacaga

SEQ ID NO: 1919697 - DNA, 25 bp, Homo sapien
tgcttcttgggggactggtttttgc

SEQ ID NO: 1919698 - DNA, 25 bp, Homo sapien
ttgctttaatataactccataggag

SEQ ID NO: 1919699 - DNA, 25 bp, Homo sapien
gctttaatataactccataggagac

SEQ ID NO: 1919700 - DNA, 25 bp, Homo sapien
tcaggcttcagatctgcttcttggg

SEQ ID NO: 1919701 - DNA, 25 bp, Homo sapien
tatgttttcctgaatctttctatta

SEQ ID NO: 1919702 - DNA, 25 bp, Homo sapien
ttttcctgaatctttctattaaaga

SEQ ID NO: 1919703 - DNA, 25 bp, Homo sapien
ttatgttttcctgaatctttctatt

SEQ ID NO: 1919704 - DNA, 25 bp, Homo sapien
tcctgaatctttctattaaagactc

SEQ ID NO: 1919705 - DNA, 25 bp, Homo sapien
aataaatgttgtcctcaaaaacact

SEQ ID NO: 1919706 - DNA, 25 bp, Homo sapien
agagccattggataaagagacattt

SEQ ID NO: 1919707 - DNA, 25 bp, Homo sapien
tcatggagtgacagcataataaatg

SEQ ID NO: 1919708 - DNA, 25 bp, Homo sapien
gagccattggataaagagacatttc

SEQ ID NO: 1919709 - DNA, 25 bp, Homo sapien
ttccaagattccctctagggtgcca

SEQ ID NO: 1919710 - DNA, 25 bp, Homo sapien
agattccctctagggtgccattcat

SEQ ID NO: 1919711 - DNA, 25 bp, Homo sapien
caagattccctctagggtgccattc

SEQ ID NO: 1919712 - DNA, 25 bp, Homo sapien
tccaagattccctctagggtgccat

SEQ ID NO: 1919713 - DNA, 25 bp, Homo sapien
ccacaaggctcagtgctaaaggaga

SEQ ID NO: 1919714 - DNA, 25 bp, Homo sapien
cacaaggctcagtgctaaaggagag

SEQ ID NO: 1919715 - DNA, 25 bp, Homo sapien
tcatgtttatgtgcctagcagctaa

SEQ ID NO: 1919716 - DNA, 25 bp, Homo sapien
ctttcgtttaaagatgacacactct

SEQ ID NO: 1919717 - DNA, 25 bp, Homo sapien
tagcagctaatagaatgcctggtgc

SEQ ID NO: 1919718 - DNA, 25 bp, Homo sapien
tgagaacttggacatacatacttcc

SEQ ID NO: 1919719 - DNA, 25 bp, Homo sapien
caagtaggataaaagagctcgcccc

SEQ ID NO: 1919720 - DNA, 25 bp, Homo sapien
gcagcgagctagagcccgagtcgca

SEQ ID NO: 1919721 - DNA, 25 bp, Homo sapien
agaaaaaagctaccgtggcacgtgc

SEQ ID NO: 1919722 - DNA, 25 bp, Homo sapien
ccgcatcccggtggactgtagaggc

SEQ ID NO: 1919723 - DNA, 25 bp, Homo sapien
catgcgtgaactaggcatgtgggaa

SEQ ID NO: 1919724 - DNA, 25 bp, Homo sapien
cgcagccaacggaactcgggtcctt

SEQ ID NO: 1919725 - DNA, 25 bp, Homo sapien
gaacgcagccaacggaactcgggtc

SEQ ID NO: 1919726 - DNA, 25 bp, Homo sapien
tcctttagaaaagtgcatgcgtgaa

SEQ ID NO: 1919727 - DNA, 25 bp, Homo sapien
gaggtgggtaattaattcatctcca

SEQ ID NO: 1919728 - DNA, 25 bp, Homo sapien
gggtctgttgttgaaaccattgatg

SEQ ID NO: 1919729 - DNA, 25 bp, Homo sapien
aaccattgatgtgggaagggttcgc

SEQ ID NO: 1919730 - DNA, 25 bp, Homo sapien
ctgagttgattggtcataagtggga

SEQ ID NO: 1919731 - DNA, 25 bp, Homo sapien
taatgacggcatggtctccagtgtg

SEQ ID NO: 1919732 - DNA, 25 bp, Homo sapien
gaaagtccaaccgagctagtaggct

SEQ ID NO: 1919733 - DNA, 25 bp, Homo sapien
aattggaacttgtttccgctgatgg

SEQ ID NO: 1919734 - DNA, 25 bp, Homo sapien
gatgggagaaagtccaaccgagcta

SEQ ID NO: 1919735 - DNA, 25 bp, Homo sapien
aacaaatttctggataaatgagaag

SEQ ID NO: 1919736 - DNA, 25 bp, Homo sapien
ttctggataaatgagaaggctaagc

SEQ ID NO: 1919737 - DNA, 25 bp, Homo sapien
aatgagaaggctaagcactgaatca

SEQ ID NO: 1919738 - DNA, 25 bp, Homo sapien
gataaatgagaaggctaagcactga

SEQ ID NO: 1919739 - DNA, 25 bp, Homo sapien
ttgtggacaatatggtcaagagtaa

SEQ ID NO: 1919740 - DNA, 25 bp, Homo sapien
tatgcacttccactattgtggacaa

SEQ ID NO: 1919741 - DNA, 25 bp, Homo sapien
ttctcatagtcatatgcacttccac

SEQ ID NO: 1919742 - DNA, 25 bp, Homo sapien
aaggtgggtttctcatagtcatatg

SEQ ID NO: 1919743 - DNA, 25 bp, Homo sapien
acttctgggcatgggtaattgtggt

SEQ ID NO: 1919744 - DNA, 25 bp, Homo sapien
tctgggcatgggtaattgtggtgat

SEQ ID NO: 1919745 - DNA, 25 bp, Homo sapien
cttcatggaaattggactctggtga

SEQ ID NO: 1919746 - DNA, 25 bp, Homo sapien
tgggcatgggtaattgtggtgatag

SEQ ID NO: 1919747 - DNA, 25 bp, Homo sapien
cggtgtagcctatcaccacattcca

SEQ ID NO: 1919748 - DNA, 25 bp, Homo sapien
atcattctccctcattcggtgtagc

SEQ ID NO: 1919749 - DNA, 25 bp, Homo sapien
gtggttccagtattgtcctagttcc

SEQ ID NO: 1919750 - DNA, 25 bp, Homo sapien
gtattgtcctagttccctgggcata

SEQ ID NO: 1919751 - DNA, 25 bp, Homo sapien
gctctatgaaagtgagagcatcttc

SEQ ID NO: 1919752 - DNA, 25 bp, Homo sapien
tctatgaaagtgagagcatcttcct

SEQ ID NO: 1919753 - DNA, 25 bp, Homo sapien
tatgaaagtgagagcatcttccttc

SEQ ID NO: 1919754 - DNA, 25 bp, Homo sapien
tccagctctatgaaagtgagagcat

SEQ ID NO: 1919755 - DNA, 25 bp, Homo sapien
tcagattctattaatctatcctggg

SEQ ID NO: 1919756 - DNA, 25 bp, Homo sapien
tctattaatctatcctgggtgctgc

SEQ ID NO: 1919757 - DNA, 25 bp, Homo sapien
tttttagtattacccatacagagtg

SEQ ID NO: 1919758 - DNA, 25 bp, Homo sapien
gtgtttctgacaaccctcagattct

SEQ ID NO: 1919759 - DNA, 25 bp, Homo sapien
tgagcctgctacagttctctctggt

SEQ ID NO: 1919760 - DNA, 25 bp, Homo sapien
agcaaagacatcactaggatgatta

SEQ ID NO: 1919761 - DNA, 25 bp, Homo sapien
acatcactaggatgattatggtgca

SEQ ID NO: 1919762 - DNA, 25 bp, Homo sapien
ggtgcatagtaaactttaccaagcc

SEQ ID NO: 1919763 - DNA, 25 bp, Homo sapien
cctggaatcgagtcaataattctct

SEQ ID NO: 1919764 - DNA, 25 bp, Homo sapien
ttgatttaattatgtgctgcctccc

SEQ ID NO: 1919765 - DNA, 25 bp, Homo sapien
tatgtgctgcctccctggaatcgag

SEQ ID NO: 1919766 - DNA, 25 bp, Homo sapien
taattatgtgctgcctccctggaat

SEQ ID NO: 1919767 - DNA, 25 bp, Homo sapien
cagcaatctggtctcctatatacat

SEQ ID NO: 1919768 - DNA, 25 bp, Homo sapien
tatttgattgttgacttaggctatg

SEQ ID NO: 1919769 - DNA, 25 bp, Homo sapien
acttaggctatgtctgtatacagta

SEQ ID NO: 1919770 - DNA, 25 bp, Homo sapien
gctatgtctgtatacagtaaccaaa

SEQ ID NO: 1919771 - DNA, 25 bp, Homo sapien
gattgttgacttaggctatgtctgt

SEQ ID NO: 1919772 - DNA, 25 bp, Homo sapien
gaaacatctgcttccctatagcaac

SEQ ID NO: 1919773 - DNA, 25 bp, Homo sapien
tcactcttctgatgaaacatctgct

SEQ ID NO: 1919774 - DNA, 25 bp, Homo sapien
caaggagataccttattagttactt

SEQ ID NO: 1919775 - DNA, 25 bp, Homo sapien
caacggatgtttaggcggttggcta

SEQ ID NO: 1919776 - DNA, 25 bp, Homo sapien
tgctgcctgtctgagtacaggtata

SEQ ID NO: 1919777 - DNA, 25 bp, Homo sapien
tgtctgagtacaggtatatacaacg

SEQ ID NO: 1919778 - DNA, 25 bp, Homo sapien
tacaggtatatacaacgatgacggg

SEQ ID NO: 1919779 - DNA, 25 bp, Homo sapien
gagtacaggtatatacaacgatgac

SEQ ID NO: 1919780 - DNA, 25 bp, Homo sapien
cagtcatagtagttatgagcaccat

SEQ ID NO: 1919781 - DNA, 25 bp, Homo sapien
tgtcagtcatagtagttatgagcac

SEQ ID NO: 1919782 - DNA, 25 bp, Homo sapien
tcagtcatagtagttatgagcacca

SEQ ID NO: 1919783 - DNA, 25 bp, Homo sapien
gtcagtcatagtagttatgagcacc

SEQ ID NO: 1919784 - DNA, 25 bp, Homo sapien
tcctacttgtgtggattgcaggctt

SEQ ID NO: 1919785 - DNA, 25 bp, Homo sapien
tacttgtgtggattgcaggctttct

SEQ ID NO: 1919786 - DNA, 25 bp, Homo sapien
tctctcctacttgtgtggattgcag

SEQ ID NO: 1919787 - DNA, 25 bp, Homo sapien
gcttctctcctacttgtgtggattg

SEQ ID NO: 1919788 - DNA, 25 bp, Homo sapien
gcattttgttgttggtctcagtctg

SEQ ID NO: 1919789 - DNA, 25 bp, Homo sapien
caaaatggttatggtaagtaatgac

SEQ ID NO: 1919790 - DNA, 25 bp, Homo sapien
cagtctgttgttagcctggatggag

SEQ ID NO: 1919791 - DNA, 25 bp, Homo sapien
aaaatcacatcgtcttccgtatcag

SEQ ID NO: 1919792 - DNA, 25 bp, Homo sapien
caacatggctgatcattaattagaa

SEQ ID NO: 1919793 - DNA, 25 bp, Homo sapien
taattagaaggttatccttggtgtg

SEQ ID NO: 1919794 - DNA, 25 bp, Homo sapien
aaaacttgttactccaagcaacttg

SEQ ID NO: 1919795 - DNA, 25 bp, Homo sapien
acttgttactccaagcaacttgccc

SEQ ID NO: 1919796 - DNA, 25 bp, Homo sapien
cattggttcgatctagacgggcagg

SEQ ID NO: 1919797 - DNA, 25 bp, Homo sapien
tacaggatccagcacagtttcggga

SEQ ID NO: 1919798 - DNA, 25 bp, Homo sapien
tgaaaacacaaactgctgggctcca

SEQ ID NO: 1919799 - DNA, 25 bp, Homo sapien
taaattttagagtgccctgactggg

SEQ ID NO: 1919800 - DNA, 25 bp, Homo sapien
gatgcctggacgtctaattgctcaa

SEQ ID NO: 1919801 - DNA, 25 bp, Homo sapien
ggcgaccaagggactacagcgttag

SEQ ID NO: 1919802 - DNA, 25 bp, Homo sapien
cgataggtgagttgtccgcgaccct

SEQ ID NO: 1919803 - DNA, 25 bp, Homo sapien
tgcctttgcacgtgatcagtcggac

SEQ ID NO: 1919804 - DNA, 25 bp, Homo sapien
gatgtctgagatctaactctggaga

SEQ ID NO: 1919805 - DNA, 25 bp, Homo sapien
cacctcacagtttcggaaatgtcaa

SEQ ID NO: 1919806 - DNA, 25 bp, Homo sapien
tccccacccatgacatcagaagtag

SEQ ID NO: 1919807 - DNA, 25 bp, Homo sapien
tgcagcatagctacataaatataca

SEQ ID NO: 1919808 - DNA, 25 bp, Homo sapien
ctcccacattggccttccaaattgc

SEQ ID NO: 1919809 - DNA, 25 bp, Homo sapien
gatcctcccacattggccttccaaa

SEQ ID NO: 1919810 - DNA, 25 bp, Homo sapien
cacattggccttccaaattgctggt

SEQ ID NO: 1919811 - DNA, 25 bp, Homo sapien
tcctcccacattggccttccaaatt

SEQ ID NO: 1919812 - DNA, 25 bp, Homo sapien
gagtatatcctgacccagacctacg

SEQ ID NO: 1919813 - DNA, 25 bp, Homo sapien
gcgccaagcctaaaatgtcacagaa

SEQ ID NO: 1919814 - DNA, 25 bp, Homo sapien
cgacattgaagatttgcagccggaa

SEQ ID NO: 1919815 - DNA, 25 bp, Homo sapien
tatgtgccaaaaagtgaaccaggtt

SEQ ID NO: 1919816 - DNA, 25 bp, Homo sapien
tggtactgcctaaaccacgctagac

SEQ ID NO: 1919817 - DNA, 25 bp, Homo sapien
ggtactgcctaaaccacgctagaca

SEQ ID NO: 1919818 - DNA, 25 bp, Homo sapien
tctggtactgcctaaaccacgctag

SEQ ID NO: 1919819 - DNA, 25 bp, Homo sapien
gccccatcccttctggtactgccta

SEQ ID NO: 1919820 - DNA, 25 bp, Homo sapien
tcaccgccattaattctgagcaaat

SEQ ID NO: 1919821 - DNA, 25 bp, Homo sapien
tctcgaggccatcgtagcactttac

SEQ ID NO: 1919822 - DNA, 25 bp, Homo sapien
cagtgcttgacaaataggtaaggaa

SEQ ID NO: 1919823 - DNA, 25 bp, Homo sapien
agtagtgccactgatcacacctcct

SEQ ID NO: 1919824 - DNA, 25 bp, Homo sapien
caatgccccaacagactggtatgaa

SEQ ID NO: 1919825 - DNA, 25 bp, Homo sapien
attaactaaccgtctgcccagggag

SEQ ID NO: 1919826 - DNA, 25 bp, Homo sapien
taattaattgagttcaccagaagcc

SEQ ID NO: 1919827 - DNA, 25 bp, Homo sapien
cagggccacattaagtcagagctgg

SEQ ID NO: 1919828 - DNA, 25 bp, Homo sapien
aagccgccattgtcatcctggcccg

SEQ ID NO: 1919829 - DNA, 25 bp, Homo sapien
agccgccattgtcatcctggcccgt

SEQ ID NO: 1919830 - DNA, 25 bp, Homo sapien
caatcaaggctttgagtaagtcaca

SEQ ID NO: 1919831 - DNA, 25 bp, Homo sapien
cagcaccagggtcttttccacaagg

SEQ ID NO: 1919832 - DNA, 25 bp, Homo sapien
acttggcgtagtaccaaaatgtggc

SEQ ID NO: 1919833 - DNA, 25 bp, Homo sapien
tctctccgacataaaaccacataac

SEQ ID NO: 1919834 - DNA, 25 bp, Homo sapien
caggagcaggtcaggtgccagatct

SEQ ID NO: 1919835 - DNA, 25 bp, Homo sapien
ctgcttccagggcaaagtgaggaag

SEQ ID NO: 1919836 - DNA, 25 bp, Homo sapien
tgccagatctttttgaatgtgcagt

SEQ ID NO: 1919837 - DNA, 25 bp, Homo sapien
cagatctttttgaatgtgcagttca

SEQ ID NO: 1919838 - DNA, 25 bp, Homo sapien
agctgcctcgacctttgagtttcct

SEQ ID NO: 1919839 - DNA, 25 bp, Homo sapien
tcactatttccaccccctgacccgc

SEQ ID NO: 1919840 - DNA, 25 bp, Homo sapien
ctgcctcgacctttgagtttccttc

SEQ ID NO: 1919841 - DNA, 25 bp, Homo sapien
caaagtctataatcaagcccagaag

SEQ ID NO: 1919842 - DNA, 25 bp, Homo sapien
cagacactttccaaggattttggag

SEQ ID NO: 1919843 - DNA, 25 bp, Homo sapien
gccagcagccttgagcctttagtct

SEQ ID NO: 1919844 - DNA, 25 bp, Homo sapien
cccttctgtcacaacaaagtctata

SEQ ID NO: 1919845 - DNA, 25 bp, Homo sapien
ttccagagacccaagttcagtacat

SEQ ID NO: 1919846 - DNA, 25 bp, Homo sapien
ctattttccagagacccaagttcag

SEQ ID NO: 1919847 - DNA, 25 bp, Homo sapien
ccagagacccaagttcagtacatat

SEQ ID NO: 1919848 - DNA, 25 bp, Homo sapien
attttccagagacccaagttcagta

SEQ ID NO: 1919849 - DNA, 25 bp, Homo sapien
ttacatggcacagtgttcatctgat

SEQ ID NO: 1919850 - DNA, 25 bp, Homo sapien
tacatggcacagtgttcatctgatt

SEQ ID NO: 1919851 - DNA, 25 bp, Homo sapien
acatggcacagtgttcatctgattc

SEQ ID NO: 1919852 - DNA, 25 bp, Homo sapien
catggcacagtgttcatctgattca

SEQ ID NO: 1919853 - DNA, 25 bp, Homo sapien
cctgaactccagtatagcactaatg

SEQ ID NO: 1919854 - DNA, 25 bp, Homo sapien
tacagatagagtcgattgatttcca

SEQ ID NO: 1919855 - DNA, 25 bp, Homo sapien
ggagcatgcttattatacagataga

SEQ ID NO: 1919856 - DNA, 25 bp, Homo sapien
ttccattcagtgtgagtcatgttca

SEQ ID NO: 1919857 - DNA, 25 bp, Homo sapien
ttccgtactccttctacatcaaaat

SEQ ID NO: 1919858 - DNA, 25 bp, Homo sapien
aatatctctgtctacaacaaatgcg

SEQ ID NO: 1919859 - DNA, 25 bp, Homo sapien
ctgtctacaacaaatgcgaaaagta

SEQ ID NO: 1919860 - DNA, 25 bp, Homo sapien
gtttccgtactccttctacatcaaa

SEQ ID NO: 1919861 - DNA, 25 bp, Homo sapien
ggagaggccagcgccgcgcagcagc

SEQ ID NO: 1919862 - DNA, 25 bp, Homo sapien
ccctgactcggaccgctcgggagag

SEQ ID NO: 1919863 - DNA, 25 bp, Homo sapien
caaccctgactcggaccgctcggga

SEQ ID NO: 1919864 - DNA, 25 bp, Homo sapien
tgactcggaccgctcgggagagccc

SEQ ID NO: 1919865 - DNA, 25 bp, Homo sapien
ctccccggctgctcccggagggctc

SEQ ID NO: 1919866 - DNA, 25 bp, Homo sapien
tccccggctgctcccggagggctca

SEQ ID NO: 1919867 - DNA, 25 bp, Homo sapien
ccccggctgctcccggagggctcac

SEQ ID NO: 1919868 - DNA, 25 bp, Homo sapien
cagggccaggcgagaacctgggaca

SEQ ID NO: 1919869 - DNA, 25 bp, Homo sapien
ctcctgctaggagaggctgcgggct

SEQ ID NO: 1919870 - DNA, 25 bp, Homo sapien
acagcggtggccctagccctgcgat

SEQ ID NO: 1919871 - DNA, 25 bp, Homo sapien
ttctctcccgaaggcgaaaatggca

SEQ ID NO: 1919872 - DNA, 25 bp, Homo sapien
ggtgtgaccagttctcatgcatcgt

SEQ ID NO: 1919873 - DNA, 25 bp, Homo sapien
tgcatcgtcctacgtggagaaaggc

SEQ ID NO: 1919874 - DNA, 25 bp, Homo sapien
caaagtaaaaactgcgcaagcgctg

SEQ ID NO: 1919875 - DNA, 25 bp, Homo sapien
tcataggtagcaaggagcctggcat

SEQ ID NO: 1919876 - DNA, 25 bp, Homo sapien
tcagcaggagtgggctgagattcag

SEQ ID NO: 1919877 - DNA, 25 bp, Homo sapien
tattcagcaggagtgggctgagatt

SEQ ID NO: 1919878 - DNA, 25 bp, Homo sapien
ctattcagcaggagtgggctgagat

SEQ ID NO: 1919879 - DNA, 25 bp, Homo sapien
ttcagcaggagtgggctgagattca

SEQ ID NO: 1919880 - DNA, 25 bp, Homo sapien
cattgacatagtcgccaatgtattc

SEQ ID NO: 1919881 - DNA, 25 bp, Homo sapien
tgacatagtcgccaatgtattccca

SEQ ID NO: 1919882 - DNA, 25 bp, Homo sapien
acttcattgacatagtcgccaatgt

SEQ ID NO: 1919883 - DNA, 25 bp, Homo sapien
catagtcgccaatgtattcccaaac

SEQ ID NO: 1919884 - DNA, 25 bp, Homo sapien
taaggcatcaggttttcttacaggc

SEQ ID NO: 1919885 - DNA, 25 bp, Homo sapien
ctcttgtttacaagtacaacccaag

SEQ ID NO: 1919886 - DNA, 25 bp, Homo sapien
caggttttcttacaggctcttgttt

SEQ ID NO: 1919887 - DNA, 25 bp, Homo sapien
ggcatcaggttttcttacaggctct

SEQ ID NO: 1919888 - DNA, 25 bp, Homo sapien
gacaagcctcattcttcagcactgc

SEQ ID NO: 1919889 - DNA, 25 bp, Homo sapien
caagcctcattcttcagcactgcca

SEQ ID NO: 1919890 - DNA, 25 bp, Homo sapien
cagacaagcctcattcttcagcact

SEQ ID NO: 1919891 - DNA, 25 bp, Homo sapien
aagcctcattcttcagcactgccat

SEQ ID NO: 1919892 - DNA, 25 bp, Homo sapien
tttccttttaaaatgtaaggcatca

SEQ ID NO: 1919893 - DNA, 25 bp, Homo sapien
tttaaaatgtaaggcatcaaacttg

SEQ ID NO: 1919894 - DNA, 25 bp, Homo sapien
tccttttaaaatgtaaggcatcaaa

SEQ ID NO: 1919895 - DNA, 25 bp, Homo sapien
cttttaaaatgtaaggcatcaaact

SEQ ID NO: 1919896 - DNA, 25 bp, Homo sapien
cttaattgcctgaactactgtggac

SEQ ID NO: 1919897 - DNA, 25 bp, Homo sapien
gaaccgtagttagtggcaatccttg

SEQ ID NO: 1919898 - DNA, 25 bp, Homo sapien
ttcccagggatgcactgtcgagtag

SEQ ID NO: 1919899 - DNA, 25 bp, Homo sapien
ttaatctggttcatgtgacactggc

SEQ ID NO: 1919900 - DNA, 25 bp, Homo sapien
tggagaatttgcttgaccagagctc

SEQ ID NO: 1919901 - DNA, 25 bp, Homo sapien
aatccatagccattgtacccatcca

SEQ ID NO: 1919902 - DNA, 25 bp, Homo sapien
ccatccaagtagacacactggaaga

SEQ ID NO: 1919903 - DNA, 25 bp, Homo sapien
agagctctctccagggcggtctgca

SEQ ID NO: 1919904 - DNA, 25 bp, Homo sapien
actggagaatcaagagacgtcattt

SEQ ID NO: 1919905 - DNA, 25 bp, Homo sapien
gaatcttagaagtgagtttccaagc

SEQ ID NO: 1919906 - DNA, 25 bp, Homo sapien
gcagtagttccagcatccaaagaag

SEQ ID NO: 1919907 - DNA, 25 bp, Homo sapien
aatacagagtaggaggcatttgcta

SEQ ID NO: 1919908 - DNA, 25 bp, Homo sapien
tttctgctttgtgggagacacatct

SEQ ID NO: 1919909 - DNA, 25 bp, Homo sapien
ttttctgctttgtgggagacacatc

SEQ ID NO: 1919910 - DNA, 25 bp, Homo sapien
tgctttgtgggagacacatcttcag

SEQ ID NO: 1919911 - DNA, 25 bp, Homo sapien
tctgctttgtgggagacacatcttc

SEQ ID NO: 1919912 - DNA, 25 bp, Homo sapien
tatatatgggactgagaatgtctaa

SEQ ID NO: 1919913 - DNA, 25 bp, Homo sapien
atatatatgggactgagaatgtcta

SEQ ID NO: 1919914 - DNA, 25 bp, Homo sapien
aatatatatgggactgagaatgtct

SEQ ID NO: 1919915 - DNA, 25 bp, Homo sapien
ctttctttgaagctggtacatcttc

SEQ ID NO: 1919916 - DNA, 25 bp, Homo sapien
ttagctttctttgaagctggtacat

SEQ ID NO: 1919917 - DNA, 25 bp, Homo sapien
tctttgaagctggtacatcttcaac

SEQ ID NO: 1919918 - DNA, 25 bp, Homo sapien
tagctttctttgaagctggtacatc

SEQ ID NO: 1919919 - DNA, 25 bp, Homo sapien
cttttgtcacattgtgtaattgaag

SEQ ID NO: 1919920 - DNA, 25 bp, Homo sapien
tttgtcacattgtgtaattgaagac

SEQ ID NO: 1919921 - DNA, 25 bp, Homo sapien
tgtcacattgtgtaattgaagactt

SEQ ID NO: 1919922 - DNA, 25 bp, Homo sapien
ttgtcacattgtgtaattgaagact

SEQ ID NO: 1919923 - DNA, 25 bp, Homo sapien
tcttctctaagatgcttcatgtctg

SEQ ID NO: 1919924 - DNA, 25 bp, Homo sapien
ttctctaagatgcttcatgtctgct

SEQ ID NO: 1919925 - DNA, 25 bp, Homo sapien
tctctaagatgcttcatgtctgctt

SEQ ID NO: 1919926 - DNA, 25 bp, Homo sapien
cttctctaagatgcttcatgtctgc

SEQ ID NO: 1919927 - DNA, 25 bp, Homo sapien
gaactgtaatgtactataattatga

SEQ ID NO: 1919928 - DNA, 25 bp, Homo sapien
aatttagtagtaacaggtagagtct

SEQ ID NO: 1919929 - DNA, 25 bp, Homo sapien
agtaacaggtagagtctgctttcag

SEQ ID NO: 1919930 - DNA, 25 bp, Homo sapien
ttttgcatgatgaactgtaatgtac

SEQ ID NO: 1919931 - DNA, 25 bp, Homo sapien
tttactttctttttcagatatttca

SEQ ID NO: 1919932 - DNA, 25 bp, Homo sapien
ttctttttcagatatttcagttttc

SEQ ID NO: 1919933 - DNA, 25 bp, Homo sapien
ctttttcagatatttcagttttctt

SEQ ID NO: 1919934 - DNA, 25 bp, Homo sapien
tttcagatatttcagttttcttctt

SEQ ID NO: 1919935 - DNA, 25 bp, Homo sapien
aaacagttggagatgagacttaatc

SEQ ID NO: 1919936 - DNA, 25 bp, Homo sapien
tcttggagtaaacagttggagatga

SEQ ID NO: 1919937 - DNA, 25 bp, Homo sapien
gagacttaatcttatgagtggaggg

SEQ ID NO: 1919938 - DNA, 25 bp, Homo sapien
tatgagtggagggagtcagggctct

SEQ ID NO: 1919939 - DNA, 25 bp, Homo sapien
ctgattctgtgacttctgatgttcc

SEQ ID NO: 1919940 - DNA, 25 bp, Homo sapien
tgattctgtgacttctgatgttcct

SEQ ID NO: 1919941 - DNA, 25 bp, Homo sapien
gattctgtgacttctgatgttcctt

SEQ ID NO: 1919942 - DNA, 25 bp, Homo sapien
tagccatacgaactacagagaaatc

SEQ ID NO: 1919943 - DNA, 25 bp, Homo sapien
gccaagtttgagatgactgactcca

SEQ ID NO: 1919944 - DNA, 25 bp, Homo sapien
tgtgaacatcgtcaaaatcacaaca

SEQ ID NO: 1919945 - DNA, 25 bp, Homo sapien
gttgataaagcagaagccaagtttg

SEQ ID NO: 1919946 - DNA, 25 bp, Homo sapien
ttctctttctcgatgttcagctttt

SEQ ID NO: 1919947 - DNA, 25 bp, Homo sapien
ctgtttttatagatggaggttctct

SEQ ID NO: 1919948 - DNA, 25 bp, Homo sapien
tctctttctcgatgttcagcttttt

SEQ ID NO: 1919949 - DNA, 25 bp, Homo sapien
tgtttttatagatggaggttctctt

SEQ ID NO: 1919950 - DNA, 25 bp, Homo sapien
tggccatattaataccttagggtgc

SEQ ID NO: 1919951 - DNA, 25 bp, Homo sapien
tataaacttaggcagtggtcggaag

SEQ ID NO: 1919952 - DNA, 25 bp, Homo sapien
tgttgatcattctctaaggcagact

SEQ ID NO: 1919953 - DNA, 25 bp, Homo sapien
catatgaagtaatgtgaaaacggcc

SEQ ID NO: 1919954 - DNA, 25 bp, Homo sapien
cagcttttacctgcttgagaacttt

SEQ ID NO: 1919955 - DNA, 25 bp, Homo sapien
tattgtgacagcttttacctgcttg

SEQ ID NO: 1919956 - DNA, 25 bp, Homo sapien
tgacagcttttacctgcttgagaac

SEQ ID NO: 1919957 - DNA, 25 bp, Homo sapien
tttttctattgtgacagcttttacc

SEQ ID NO: 1919958 - DNA, 25 bp, Homo sapien
gtttaccatgagaaacagtcttttc

SEQ ID NO: 1919959 - DNA, 25 bp, Homo sapien
agtcttttctggtttcactatgtct

SEQ ID NO: 1919960 - DNA, 25 bp, Homo sapien
ttttctggtttcactatgtcttgtt

SEQ ID NO: 1919961 - DNA, 25 bp, Homo sapien
ctggtttaccatgagaaacagtctt

SEQ ID NO: 1919962 - DNA, 25 bp, Homo sapien
tgtatttgcactttttcagatatag

SEQ ID NO: 1919963 - DNA, 25 bp, Homo sapien
gtgtatttgcactttttcagatata

SEQ ID NO: 1919964 - DNA, 25 bp, Homo sapien
tgtgtatttgcactttttcagatat

SEQ ID NO: 1919965 - DNA, 25 bp, Homo sapien
ctggcttctcttccttttttccttg

SEQ ID NO: 1919966 - DNA, 25 bp, Homo sapien
taatgaagttatcatcattctgtct

SEQ ID NO: 1919967 - DNA, 25 bp, Homo sapien
cagtatatgcataagtaatctttag

SEQ ID NO: 1919968 - DNA, 25 bp, Homo sapien
caacactgtttacagtatatgcata

SEQ ID NO: 1919969 - DNA, 25 bp, Homo sapien
tatctgaatagtggtcaacactgtt

SEQ ID NO: 1919970 - DNA, 25 bp, Homo sapien
ctgtcatagactggttcggaagcta

SEQ ID NO: 1919971 - DNA, 25 bp, Homo sapien
tcggaagctattaatgacactatac

SEQ ID NO: 1919972 - DNA, 25 bp, Homo sapien
cttctaagctcctgaagataaattc

SEQ ID NO: 1919973 - DNA, 25 bp, Homo sapien
gattcaagactatagcactcaagtc

SEQ ID NO: 1919974 - DNA, 25 bp, Homo sapien
caacacttcttatatctgggacagt

SEQ ID NO: 1919975 - DNA, 25 bp, Homo sapien
tattggtcacctttataggagagga

SEQ ID NO: 1919976 - DNA, 25 bp, Homo sapien
taagcaagaaaaccatcctccggat

SEQ ID NO: 1919977 - DNA, 25 bp, Homo sapien
tcctccggatttggcaataaatgtt

SEQ ID NO: 1919978 - DNA, 25 bp, Homo sapien
cacaggcctgaaggaatatgtaaca

SEQ ID NO: 1919979 - DNA, 25 bp, Homo sapien
tttaaagcacaagtactcacaggcc

SEQ ID NO: 1919980 - DNA, 25 bp, Homo sapien
gccattataacacagtacagagaga

SEQ ID NO: 1919981 - DNA, 25 bp, Homo sapien
tcccatgcttcagaccttgtagtta

SEQ ID NO: 1919982 - DNA, 25 bp, Homo sapien
tcgaggtacacgtctcctacgtaac

SEQ ID NO: 1919983 - DNA, 25 bp, Homo sapien
gttacgtaggagacgtgtacctcga

SEQ ID NO: 1919984 - DNA, 25 bp, Homo sapien
ctttagggaagctggaactttctct

SEQ ID NO: 1919985 - DNA, 25 bp, Homo sapien
tctttcagaattgaagaagtcttcc

SEQ ID NO: 1919986 - DNA, 25 bp, Homo sapien
gaattgaagaagtcttcccagattt

SEQ ID NO: 1919987 - DNA, 25 bp, Homo sapien
ttcagaattgaagaagtcttcccag

SEQ ID NO: 1919988 - DNA, 25 bp, Homo sapien
ttatctttcagaattgaagaagtct

SEQ ID NO: 1919989 - DNA, 25 bp, Homo sapien
tacaaatattttgttggagctttct

SEQ ID NO: 1919990 - DNA, 25 bp, Homo sapien
cattgctctgaatgatcaagtataa

SEQ ID NO: 1919991 - DNA, 25 bp, Homo sapien
aatacaaatattttgttggagcttt

SEQ ID NO: 1919992 - DNA, 25 bp, Homo sapien
gctttctggcttggtgtcaacattg

SEQ ID NO: 1919993 - DNA, 25 bp, Homo sapien
ttcatgattagccattttccaattt

SEQ ID NO: 1919994 - DNA, 25 bp, Homo sapien
tttccaatttgtaatctttgtgtgg

SEQ ID NO: 1919995 - DNA, 25 bp, Homo sapien
gtgtggcaaaagtgtcaagtaaaat

SEQ ID NO: 1919996 - DNA, 25 bp, Homo sapien
ttgtgtggcaaaagtgtcaagtaaa

SEQ ID NO: 1919997 - DNA, 25 bp, Homo sapien
taaatttagactcaggaacacgcat

SEQ ID NO: 1919998 - DNA, 25 bp, Homo sapien
ggaatatgtctaccagttaccctgg

SEQ ID NO: 1919999 - DNA, 25 bp, Homo sapien
cacacttgagctctaagagaagcca

SEQ ID NO: 1920000 - DNA, 25 bp, Homo sapien
taaaggttattgtcttccgcctgtc

SEQ ID NO: 1920001 - DNA, 25 bp, Homo sapien
tgctccactgtcttggttgttttct

SEQ ID NO: 1920002 - DNA, 25 bp, Homo sapien
cttgctccactgtcttggttgtttt

SEQ ID NO: 1920003 - DNA, 25 bp, Homo sapien
tgtcttggttgttttctcttccttc

SEQ ID NO: 1920004 - DNA, 25 bp, Homo sapien
ttgctccactgtcttggttgttttc

SEQ ID NO: 1920005 - DNA, 25 bp, Homo sapien
aatctcctctttggctcgttcagtt

SEQ ID NO: 1920006 - DNA, 25 bp, Homo sapien
ccaatctcctctttggctcgttcag

SEQ ID NO: 1920007 - DNA, 25 bp, Homo sapien
caatctcctctttggctcgttcagt

SEQ ID NO: 1920008 - DNA, 25 bp, Homo sapien
atctcctctttggctcgttcagttt

SEQ ID NO: 1920009 - DNA, 25 bp, Homo sapien
ggagatgaatatagtcaggctcggt

SEQ ID NO: 1920010 - DNA, 25 bp, Homo sapien
agatgaatatagtcaggctcggtgg

SEQ ID NO: 1920011 - DNA, 25 bp, Homo sapien
taaggagatgaatatagtcaggctc

SEQ ID NO: 1920012 - DNA, 25 bp, Homo sapien
gtggttaaggagatgaatatagtca

SEQ ID NO: 1920013 - DNA, 25 bp, Homo sapien
ttgcttttacttgtttgtcacttgg

SEQ ID NO: 1920014 - DNA, 25 bp, Homo sapien
tgcttttacttgtttgtcacttgga

SEQ ID NO: 1920015 - DNA, 25 bp, Homo sapien
gcttttacttgtttgtcacttggaa

SEQ ID NO: 1920016 - DNA, 25 bp, Homo sapien
gagtgttctttctttggtgactttg

SEQ ID NO: 1920017 - DNA, 25 bp, Homo sapien
tgagtgttctttctttggtgacttt

SEQ ID NO: 1920018 - DNA, 25 bp, Homo sapien
ctgagtgttctttctttggtgactt

SEQ ID NO: 1920019 - DNA, 25 bp, Homo sapien
tccttcttttcatccttcttagctg

SEQ ID NO: 1920020 - DNA, 25 bp, Homo sapien
ttccttcttttcatccttcttagct

SEQ ID NO: 1920021 - DNA, 25 bp, Homo sapien
cttccttcttttcatccttcttagc

SEQ ID NO: 1920022 - DNA, 25 bp, Homo sapien
ttacagtcccttgtttggtttcaga

SEQ ID NO: 1920023 - DNA, 25 bp, Homo sapien
gtgctgcaatttttacagtcccttg

SEQ ID NO: 1920024 - DNA, 25 bp, Homo sapien
gctgcaatttttacagtcccttgtt

SEQ ID NO: 1920025 - DNA, 25 bp, Homo sapien
tgcaatttttacagtcccttgtttg

SEQ ID NO: 1920026 - DNA, 25 bp, Homo sapien
tagtgggctcctaccacacagactt

SEQ ID NO: 1920027 - DNA, 25 bp, Homo sapien
gttattgacaatacccagcccactg

SEQ ID NO: 1920028 - DNA, 25 bp, Homo sapien
cacagactttatcctggttattgac

SEQ ID NO: 1920029 - DNA, 25 bp, Homo sapien
cagtgaagtggctggccattagaga

SEQ ID NO: 1920030 - DNA, 25 bp, Homo sapien
tcaatattggcttccctaaaaggga

SEQ ID NO: 1920031 - DNA, 25 bp, Homo sapien
tgaggaacagtagtccccaatgtta

SEQ ID NO: 1920032 - DNA, 25 bp, Homo sapien
tcaaatgctttaactgtcagctcac

SEQ ID NO: 1920033 - DNA, 25 bp, Homo sapien
cacatgctaatgctctagataaata

SEQ ID NO: 1920034 - DNA, 25 bp, Homo sapien
gggaaatccaaaactcaggatgtga

SEQ ID NO: 1920035 - DNA, 25 bp, Homo sapien
aatccaaaactcaggatgtgagaac

SEQ ID NO: 1920036 - DNA, 25 bp, Homo sapien
tgtatgacctagttggaaagtttgg

SEQ ID NO: 1920037 - DNA, 25 bp, Homo sapien
tgaattgctttgtatgacctagttg

SEQ ID NO: 1920038 - DNA, 25 bp, Homo sapien
catgtttaccactgtctgcaatatc

SEQ ID NO: 1920039 - DNA, 25 bp, Homo sapien
ttttcctacatgtttaccactgtct

SEQ ID NO: 1920040 - DNA, 25 bp, Homo sapien
tcctacatgtttaccactgtctgca

SEQ ID NO: 1920041 - DNA, 25 bp, Homo sapien
tgtttaccactgtctgcaatatcat

SEQ ID NO: 1920042 - DNA, 25 bp, Homo sapien
ttttccacatcaatggcagtttcct

SEQ ID NO: 1920043 - DNA, 25 bp, Homo sapien
tttccacatcaatggcagtttcctt

SEQ ID NO: 1920044 - DNA, 25 bp, Homo sapien
tttttttccacatcaatggcagttt

SEQ ID NO: 1920045 - DNA, 25 bp, Homo sapien
taagcctttacctgtttaacttgca

SEQ ID NO: 1920046 - DNA, 25 bp, Homo sapien
cttgcaaatatttcagggcatgcat

SEQ ID NO: 1920047 - DNA, 25 bp, Homo sapien
taacttgcaaatatttcagggcatg

SEQ ID NO: 1920048 - DNA, 25 bp, Homo sapien
ctttacctgtttaacttgcaaatat

SEQ ID NO: 1920049 - DNA, 25 bp, Homo sapien
ttcagaagtaactttcttctcagcc

SEQ ID NO: 1920050 - DNA, 25 bp, Homo sapien
cagaagtaactttcttctcagcctt

SEQ ID NO: 1920051 - DNA, 25 bp, Homo sapien
ttgtttcagaagtaactttcttctc

SEQ ID NO: 1920052 - DNA, 25 bp, Homo sapien
gtttcagaagtaactttcttctcag

SEQ ID NO: 1920053 - DNA, 25 bp, Homo sapien
tacaatagagatctttaagaaaaaa

SEQ ID NO: 1920054 - DNA, 25 bp, Homo sapien
ctacaatagagatctttaagaaaaa

SEQ ID NO: 1920055 - DNA, 25 bp, Homo sapien
tctacaatagagatctttaagaaaa

SEQ ID NO: 1920056 - DNA, 25 bp, Homo sapien
ggtctggaagcttgttctgtcggta

SEQ ID NO: 1920057 - DNA, 25 bp, Homo sapien
tgttctgtcggtaagggaggtggaa

SEQ ID NO: 1920058 - DNA, 25 bp, Homo sapien
ttcaagggcaggtgatgccggagtg

SEQ ID NO: 1920059 - DNA, 25 bp, Homo sapien
caggtgatgccggagtgggtctgga

SEQ ID NO: 1920060 - DNA, 25 bp, Homo sapien
tggaaaaaagcaattcactacactg

SEQ ID NO: 1920061 - DNA, 25 bp, Homo sapien
cacccagtgcatggcagatactcaa

SEQ ID NO: 1920062 - DNA, 25 bp, Homo sapien
gattaagtgatgaagcacccagtgc

SEQ ID NO: 1920063 - DNA, 25 bp, Homo sapien
tacattcgaactctaaaggtgccct

SEQ ID NO: 1920064 - DNA, 25 bp, Homo sapien
gaagtacggagagttacatccagag

SEQ ID NO: 1920065 - DNA, 25 bp, Homo sapien
gagagttacatccagagaactctga

SEQ ID NO: 1920066 - DNA, 25 bp, Homo sapien
tttcctggaagtacggagagttaca

SEQ ID NO: 1920067 - DNA, 25 bp, Homo sapien
tccagagaactctgaacattttgga

SEQ ID NO: 1920068 - DNA, 25 bp, Homo sapien
ccactgtactttgcgtttcttttct

SEQ ID NO: 1920069 - DNA, 25 bp, Homo sapien
tcaaccccaaggcaaccataaagtc

SEQ ID NO: 1920070 - DNA, 25 bp, Homo sapien
aatgtcaccactgtactttgcgttt

SEQ ID NO: 1920071 - DNA, 25 bp, Homo sapien
tcaccactgtactttgcgtttcttt

SEQ ID NO: 1920072 - DNA, 25 bp, Homo sapien
accattgacaaatctataggtattc

SEQ ID NO: 1920073 - DNA, 25 bp, Homo sapien
accataaatgactcataaccattga

SEQ ID NO: 1920074 - DNA, 25 bp, Homo sapien
tgacaaatctataggtattcacttc

SEQ ID NO: 1920075 - DNA, 25 bp, Homo sapien
tcataaccattgacaaatctatagg

SEQ ID NO: 1920076 - DNA, 25 bp, Homo sapien
aaaactgttgagcaacgggttgaat

SEQ ID NO: 1920077 - DNA, 25 bp, Homo sapien
gaatagtctataatcagtacaatca

SEQ ID NO: 1920078 - DNA, 25 bp, Homo sapien
gcaacgggttgaatagtctataatc

SEQ ID NO: 1920079 - DNA, 25 bp, Homo sapien
tagtctataatcagtacaatcagta

SEQ ID NO: 1920080 - DNA, 25 bp, Homo sapien
tacagttaggtacataaaaagccca

SEQ ID NO: 1920081 - DNA, 25 bp, Homo sapien
ggttttattctagatctacacatgc

SEQ ID NO: 1920082 - DNA, 25 bp, Homo sapien
gttttattctagatctacacatgca

SEQ ID NO: 1920083 - DNA, 25 bp, Homo sapien
tcatatatcgacagaatgcatactg

SEQ ID NO: 1920084 - DNA, 25 bp, Homo sapien
aaatatgtcaatcatatatcgacag

SEQ ID NO: 1920085 - DNA, 25 bp, Homo sapien
catatatcgacagaatgcatactga

SEQ ID NO: 1920086 - DNA, 25 bp, Homo sapien
atatatcgacagaatgcatactgat

SEQ ID NO: 1920087 - DNA, 25 bp, Homo sapien
tcattttgggcagacctggtcttca

SEQ ID NO: 1920088 - DNA, 25 bp, Homo sapien
tatcaggagaactaacctctttgca

SEQ ID NO: 1920089 - DNA, 25 bp, Homo sapien
tctttgcaacctgttaggtggcctc

SEQ ID NO: 1920090 - DNA, 25 bp, Homo sapien
ttaatccaccaaatccgaaggcagc

SEQ ID NO: 1920091 - DNA, 25 bp, Homo sapien
gcaggccaaaactcataaagttcca

SEQ ID NO: 1920092 - DNA, 25 bp, Homo sapien
gttactaaacagatacacctctaag

SEQ ID NO: 1920093 - DNA, 25 bp, Homo sapien
taattgctccaaattatgcatatca

SEQ ID NO: 1920094 - DNA, 25 bp, Homo sapien
cattaatacctaaataagggcaggc

SEQ ID NO: 1920095 - DNA, 25 bp, Homo sapien
tttcccacaggagaggtagggaatg

SEQ ID NO: 1920096 - DNA, 25 bp, Homo sapien
gtcctcaggtcattccatgcattga

SEQ ID NO: 1920097 - DNA, 25 bp, Homo sapien
ttgttgaaattggagcacattttcc

SEQ ID NO: 1920098 - DNA, 25 bp, Homo sapien
tactggcagtaatagctggagtttc

SEQ ID NO: 1920099 - DNA, 25 bp, Homo sapien
atgattgggaaagacataaggttaa

SEQ ID NO: 1920100 - DNA, 25 bp, Homo sapien
tatgattgggaaagacataaggtta

SEQ ID NO: 1920101 - DNA, 25 bp, Homo sapien
tgattgggaaagacataaggttaag

SEQ ID NO: 1920102 - DNA, 25 bp, Homo sapien
ctatgattgggaaagacataaggtt

SEQ ID NO: 1920103 - DNA, 25 bp, Homo sapien
aagtttgaagtcagaccagtgtgga

SEQ ID NO: 1920104 - DNA, 25 bp, Homo sapien
ccttaaatgaaaagtttgaagtcag

SEQ ID NO: 1920105 - DNA, 25 bp, Homo sapien
gtttgaagtcagaccagtgtggact

SEQ ID NO: 1920106 - DNA, 25 bp, Homo sapien
ttgaagtcagaccagtgtggacttt

SEQ ID NO: 1920107 - DNA, 25 bp, Homo sapien
ttctcaaagggcaacttaaacacga

SEQ ID NO: 1920108 - DNA, 25 bp, Homo sapien
ccttaagtgactgtactctttttag

SEQ ID NO: 1920109 - DNA, 25 bp, Homo sapien
gtactctttttagatttgttctgcc

SEQ ID NO: 1920110 - DNA, 25 bp, Homo sapien
acttaaacacgagaaagagagagga

SEQ ID NO: 1920111 - DNA, 25 bp, Homo sapien
tattttaaagtgttccggtgatgag

SEQ ID NO: 1920112 - DNA, 25 bp, Homo sapien
tacattcacattcctagttgttaga

SEQ ID NO: 1920113 - DNA, 25 bp, Homo sapien
tgaaatacaatatttgtggcctgga

SEQ ID NO: 1920114 - DNA, 25 bp, Homo sapien
gtaatcataccagtgaatccaaaga

SEQ ID NO: 1920115 - DNA, 25 bp, Homo sapien
tagatccccgtattctgtaaaggag

SEQ ID NO: 1920116 - DNA, 25 bp, Homo sapien
taaaggagtctcaggattatacagc

SEQ ID NO: 1920117 - DNA, 25 bp, Homo sapien
aaatgcccctttagatctgtgaaca

SEQ ID NO: 1920118 - DNA, 25 bp, Homo sapien
ccagagatgtggtacgataagaccc

SEQ ID NO: 1920119 - DNA, 25 bp, Homo sapien
gcagcctcctgctctgaatgtttac

SEQ ID NO: 1920120 - DNA, 25 bp, Homo sapien
caatattctcttagaacctccggca

SEQ ID NO: 1920121 - DNA, 25 bp, Homo sapien
catgtgcttcttgcccaatattctc

SEQ ID NO: 1920122 - DNA, 25 bp, Homo sapien
tctcttagaacctccggcagcctcc

SEQ ID NO: 1920123 - DNA, 25 bp, Homo sapien
tgggttttgatggtgttttctgtac

SEQ ID NO: 1920124 - DNA, 25 bp, Homo sapien
tctgtacttcttttacttttgcagc

SEQ ID NO: 1920125 - DNA, 25 bp, Homo sapien
tgcagctgtttgcttcactttctcc

SEQ ID NO: 1920126 - DNA, 25 bp, Homo sapien
tgttcatgctttgacacagctgctt

SEQ ID NO: 1920127 - DNA, 25 bp, Homo sapien
tctgtgactgaaaccagcagctttc

SEQ ID NO: 1920128 - DNA, 25 bp, Homo sapien
ctgcggatgactttaaattgaaatc

SEQ ID NO: 1920129 - DNA, 25 bp, Homo sapien
gctctttcctgcagtaaactcatat

SEQ ID NO: 1920130 - DNA, 25 bp, Homo sapien
cagtaaactcatatgtttctgtgac

SEQ ID NO: 1920131 - DNA, 25 bp, Homo sapien
agcctcagattttgtggtaatgctt

SEQ ID NO: 1920132 - DNA, 25 bp, Homo sapien
ttaaaatgtccactagatttcatac

SEQ ID NO: 1920133 - DNA, 25 bp, Homo sapien
ctcaatgtatactgactgcacctgg

SEQ ID NO: 1920134 - DNA, 25 bp, Homo sapien
taccagttttatgacctggcaaaaa

SEQ ID NO: 1920135 - DNA, 25 bp, Homo sapien
tcgccagtgtctttgtttctggttt

SEQ ID NO: 1920136 - DNA, 25 bp, Homo sapien
ctttcgccagtgtctttgtttctgg

SEQ ID NO: 1920137 - DNA, 25 bp, Homo sapien
tttcgccagtgtctttgtttctggt

SEQ ID NO: 1920138 - DNA, 25 bp, Homo sapien
ttctcaattttttccttgtgagttg

SEQ ID NO: 1920139 - DNA, 25 bp, Homo sapien
gtttaccaacccaatgtcatctaca

SEQ ID NO: 1920140 - DNA, 25 bp, Homo sapien
cccatgtttaccaacccaatgtcat

SEQ ID NO: 1920141 - DNA, 25 bp, Homo sapien
cattataactaaatgctagtagctc

SEQ ID NO: 1920142 - DNA, 25 bp, Homo sapien
taaatgctagtagctccacaagcac

SEQ ID NO: 1920143 - DNA, 25 bp, Homo sapien
ccaccttggacagctggttgtccat

SEQ ID NO: 1920144 - DNA, 25 bp, Homo sapien
tatcttaagggaatgatggcactac

SEQ ID NO: 1920145 - DNA, 25 bp, Homo sapien
cactacattggccatacacaaactg

SEQ ID NO: 1920146 - DNA, 25 bp, Homo sapien
cacaaactgtgtcctattgtcaagg

SEQ ID NO: 1920147 - DNA, 25 bp, Homo sapien
tcatcttgctgcctaaggaaaaagc

SEQ ID NO: 1920148 - DNA, 25 bp, Homo sapien
aaaggcatattctttagctccataa

SEQ ID NO: 1920149 - DNA, 25 bp, Homo sapien
aaacagtatttatccacatacaaga

SEQ ID NO: 1920150 - DNA, 25 bp, Homo sapien
tacaaccataactgacatggaacat

SEQ ID NO: 1920151 - DNA, 25 bp, Homo sapien
taactatccatcacatacaaccata

SEQ ID NO: 1920152 - DNA, 25 bp, Homo sapien
tggaacatggcatacagaaaacagt

SEQ ID NO: 1920153 - DNA, 25 bp, Homo sapien
tgtggaaaacataagctctctctga

SEQ ID NO: 1920154 - DNA, 25 bp, Homo sapien
cagttcagtcatggttcgcttagtc

SEQ ID NO: 1920155 - DNA, 25 bp, Homo sapien
aaagagcaggcattagtctacccca

SEQ ID NO: 1920156 - DNA, 25 bp, Homo sapien
cagggacccaaatggtgtggaacca

SEQ ID NO: 1920157 - DNA, 25 bp, Homo sapien
aagagaacagtaaggagacattagt

SEQ ID NO: 1920158 - DNA, 25 bp, Homo sapien
gaaagagaacagtaaggagacatta

SEQ ID NO: 1920159 - DNA, 25 bp, Homo sapien
agaacagtaaggagacattagtttc

SEQ ID NO: 1920160 - DNA, 25 bp, Homo sapien
ggaaagagaacagtaaggagacatt

SEQ ID NO: 1920161 - DNA, 25 bp, Homo sapien
tataaataggtttcaactgagtgag

SEQ ID NO: 1920162 - DNA, 25 bp, Homo sapien
gagcttcaatgttctgattgttgaa

SEQ ID NO: 1920163 - DNA, 25 bp, Homo sapien
aaatataaataggtttcaactgagt

SEQ ID NO: 1920164 - DNA, 25 bp, Homo sapien
ctgagtgagcttcaatgttctgatt

SEQ ID NO: 1920165 - DNA, 25 bp, Homo sapien
cttgtttttcagtcttatctttgtg

SEQ ID NO: 1920166 - DNA, 25 bp, Homo sapien
ctttcaggtttctcttgtttttcag

SEQ ID NO: 1920167 - DNA, 25 bp, Homo sapien
ctcttgtttttcagtcttatctttg

SEQ ID NO: 1920168 - DNA, 25 bp, Homo sapien
gtttttcagtcttatctttgtgtat

SEQ ID NO: 1920169 - DNA, 25 bp, Homo sapien
tgttgtcctggcccatagtcatcac

SEQ ID NO: 1920170 - DNA, 25 bp, Homo sapien
attcctcaaattccagctcatattg

SEQ ID NO: 1920171 - DNA, 25 bp, Homo sapien
ttcctcaaattccagctcatattgg

SEQ ID NO: 1920172 - DNA, 25 bp, Homo sapien
tcctcaaattccagctcatattggt

SEQ ID NO: 1920173 - DNA, 25 bp, Homo sapien
tcattcctcaaattccagctcatat

SEQ ID NO: 1920174 - DNA, 25 bp, Homo sapien
tttctcaagggaggctcatctattt

SEQ ID NO: 1920175 - DNA, 25 bp, Homo sapien
ctttttttctcaagggaggctcatc

SEQ ID NO: 1920176 - DNA, 25 bp, Homo sapien
ctcaagggaggctcatctatttctc

SEQ ID NO: 1920177 - DNA, 25 bp, Homo sapien
tttttctcaagggaggctcatctat

SEQ ID NO: 1920178 - DNA, 25 bp, Homo sapien
cctccatagcatcacgtaccagttt

SEQ ID NO: 1920179 - DNA, 25 bp, Homo sapien
cagatgagatgatgtcagataacaa

SEQ ID NO: 1920180 - DNA, 25 bp, Homo sapien
gccatagatccagtccgtggtttcc

SEQ ID NO: 1920181 - DNA, 25 bp, Homo sapien
ctttatcagtatcttcgtcaccatc

SEQ ID NO: 1920182 - DNA, 25 bp, Homo sapien
gatggcaacagctgaccacgtgatt

SEQ ID NO: 1920183 - DNA, 25 bp, Homo sapien
tccactaaatcaaacataacgatgg

SEQ ID NO: 1920184 - DNA, 25 bp, Homo sapien
gaacgtcgtcactatgtcttctgtg

SEQ ID NO: 1920185 - DNA, 25 bp, Homo sapien
cacgtgattatcagggcaatgacca

SEQ ID NO: 1920186 - DNA, 25 bp, Homo sapien
tcctttcaggtatgtctagcttttc

SEQ ID NO: 1920187 - DNA, 25 bp, Homo sapien
tttcaggtatgtctagcttttccat

SEQ ID NO: 1920188 - DNA, 25 bp, Homo sapien
ctttcaggtatgtctagcttttcca

SEQ ID NO: 1920189 - DNA, 25 bp, Homo sapien
cctttcaggtatgtctagcttttcc

SEQ ID NO: 1920190 - DNA, 25 bp, Homo sapien
caaaatgtcagagggcactatgtac

SEQ ID NO: 1920191 - DNA, 25 bp, Homo sapien
taagataagccattccaggatttgc

SEQ ID NO: 1920192 - DNA, 25 bp, Homo sapien
tctcacggatatagtagcaaggctc

SEQ ID NO: 1920193 - DNA, 25 bp, Homo sapien
caaattatgtgggttcaatctcacg

SEQ ID NO: 1920194 - DNA, 25 bp, Homo sapien
aaaaaatactaagctgaatgcttca

SEQ ID NO: 1920195 - DNA, 25 bp, Homo sapien
ttgagtaatgacatgccatttcaat

SEQ ID NO: 1920196 - DNA, 25 bp, Homo sapien
tgacatgccatttcaatttggaaaa

SEQ ID NO: 1920197 - DNA, 25 bp, Homo sapien
aaacagaaaagccttgagtaatgac

SEQ ID NO: 1920198 - DNA, 25 bp, Homo sapien
cagttgacttcacaagtgaacggaa

SEQ ID NO: 1920199 - DNA, 25 bp, Homo sapien
catgcaatagctattaagagtctcc

SEQ ID NO: 1920200 - DNA, 25 bp, Homo sapien
gaatgatttcttgcatgcaatagct

SEQ ID NO: 1920201 - DNA, 25 bp, Homo sapien
cttcacaagtgaacggaatgatttc

SEQ ID NO: 1920202 - DNA, 25 bp, Homo sapien
tagagtttctcatagttgaggattt

SEQ ID NO: 1920203 - DNA, 25 bp, Homo sapien
tttcaatcccatctcctttgaagct

SEQ ID NO: 1920204 - DNA, 25 bp, Homo sapien
tatgttcttgttaactgtggtgtag

SEQ ID NO: 1920205 - DNA, 25 bp, Homo sapien
gcatctatactcatctttatgttct

SEQ ID NO: 1920206 - DNA, 25 bp, Homo sapien
gaagttggccacatcgatggactcc

SEQ ID NO: 1920207 - DNA, 25 bp, Homo sapien
aaataagacaagagtgaagttggcc

SEQ ID NO: 1920208 - DNA, 25 bp, Homo sapien
tgataggattttacccataggagaa

SEQ ID NO: 1920209 - DNA, 25 bp, Homo sapien
ggagtggctgaagcaattacttaaa

SEQ ID NO: 1920210 - DNA, 25 bp, Homo sapien
aaaaatagcctcatctccctaggac

SEQ ID NO: 1920211 - DNA, 25 bp, Homo sapien
tgaaaagttcccgtcaagttgcact

SEQ ID NO: 1920212 - DNA, 25 bp, Homo sapien
gtcctgttgaactttgcctctcctc

SEQ ID NO: 1920213 - DNA, 25 bp, Homo sapien
cacttgtggctcagctagaagtatc

SEQ ID NO: 1920214 - DNA, 25 bp, Homo sapien
aaaggccatcgcctttgttgcccct

SEQ ID NO: 1920215 - DNA, 25 bp, Homo sapien
tgcagtatcctgcagtagttggtcc

SEQ ID NO: 1920216 - DNA, 25 bp, Homo sapien
ccattctctgaagagctggcgtctg

SEQ ID NO: 1920217 - DNA, 25 bp, Homo sapien
taccattatcctgtttaagaagatc

SEQ ID NO: 1920218 - DNA, 25 bp, Homo sapien
cataattcagattactgctttctat

SEQ ID NO: 1920219 - DNA, 25 bp, Homo sapien
ctgtggagtccataattcagattac

SEQ ID NO: 1920220 - DNA, 25 bp, Homo sapien
tgtggagtccataattcagattact

SEQ ID NO: 1920221 - DNA, 25 bp, Homo sapien
gtccataattcagattactgctttc

SEQ ID NO: 1920222 - DNA, 25 bp, Homo sapien
ggttcttatgatgaatcgcagtgcc

SEQ ID NO: 1920223 - DNA, 25 bp, Homo sapien
gggagtcagagggactgattgagaa

SEQ ID NO: 1920224 - DNA, 25 bp, Homo sapien
gactgattgagaaggttgagatctc

SEQ ID NO: 1920225 - DNA, 25 bp, Homo sapien
gcagtgccatgagcttgaaaaggga

SEQ ID NO: 1920226 - DNA, 25 bp, Homo sapien
gcaagagtacccaatgcagtcaggt

SEQ ID NO: 1920227 - DNA, 25 bp, Homo sapien
ccatttgcaagagtacccaatgcag

SEQ ID NO: 1920228 - DNA, 25 bp, Homo sapien
cgtaacagccagtagtctcctttaa

SEQ ID NO: 1920229 - DNA, 25 bp, Homo sapien
ccaatgcagtcaggtcgtaacagcc

SEQ ID NO: 1920230 - DNA, 25 bp, Homo sapien
aagttttggtcaggtatcaaccatg

SEQ ID NO: 1920231 - DNA, 25 bp, Homo sapien
agaagtgccaactgtccaagttttg

SEQ ID NO: 1920232 - DNA, 25 bp, Homo sapien
catcaagagttgaagtaacagaaca

SEQ ID NO: 1920233 - DNA, 25 bp, Homo sapien
tcatcaagagttgaagtaacagaac

SEQ ID NO: 1920234 - DNA, 25 bp, Homo sapien
agaacataggtgcattggagatttc

SEQ ID NO: 1920235 - DNA, 25 bp, Homo sapien
cacctcttacttcactggtgtgaaa

SEQ ID NO: 1920236 - DNA, 25 bp, Homo sapien
ttaagtgcacctcttacttcactgg

SEQ ID NO: 1920237 - DNA, 25 bp, Homo sapien
tcttacttcactggtgtgaaatcca

SEQ ID NO: 1920238 - DNA, 25 bp, Homo sapien
cttcactggtgtgaaatccaatcat

SEQ ID NO: 1920239 - DNA, 25 bp, Homo sapien
ccaatattggctccatttaagcaca

SEQ ID NO: 1920240 - DNA, 25 bp, Homo sapien
tccaatattggctccatttaagcac

SEQ ID NO: 1920241 - DNA, 25 bp, Homo sapien
tcctccaatattggctccatttaag

SEQ ID NO: 1920242 - DNA, 25 bp, Homo sapien
ctccaatattggctccatttaagca

SEQ ID NO: 1920243 - DNA, 25 bp, Homo sapien
cataggtctggatctcaagagctac

SEQ ID NO: 1920244 - DNA, 25 bp, Homo sapien
gacacagtgaggagtgtgagggcag

SEQ ID NO: 1920245 - DNA, 25 bp, Homo sapien
gagggcagctgctagtacaggatct

SEQ ID NO: 1920246 - DNA, 25 bp, Homo sapien
ttgtcataggtctggatctcaagag

SEQ ID NO: 1920247 - DNA, 25 bp, Homo sapien
taagagccttaagagtggactcacc

SEQ ID NO: 1920248 - DNA, 25 bp, Homo sapien
ctggccaactgggagataaaacaat

SEQ ID NO: 1920249 - DNA, 25 bp, Homo sapien
aactgggagataaaacaatgtttgc

SEQ ID NO: 1920250 - DNA, 25 bp, Homo sapien
tgtttgctcaaattgcatgttatac

SEQ ID NO: 1920251 - DNA, 25 bp, Homo sapien
gactggttaagggaactattcagac

SEQ ID NO: 1920252 - DNA, 25 bp, Homo sapien
ggttaagggaactattcagactgaa

SEQ ID NO: 1920253 - DNA, 25 bp, Homo sapien
cagctcagactggttaagggaacta

SEQ ID NO: 1920254 - DNA, 25 bp, Homo sapien
ttacagctcagactggttaagggaa

SEQ ID NO: 1920255 - DNA, 25 bp, Homo sapien
tctgcccacgttcaccttccaaatg

SEQ ID NO: 1920256 - DNA, 25 bp, Homo sapien
gcccacgttcaccttccaaatgtta

SEQ ID NO: 1920257 - DNA, 25 bp, Homo sapien
atttttagaatctctgcccacgttc

SEQ ID NO: 1920258 - DNA, 25 bp, Homo sapien
tgcccacgttcaccttccaaatgtt

SEQ ID NO: 1920259 - DNA, 25 bp, Homo sapien
gcagatgttaacaagtataataaca

SEQ ID NO: 1920260 - DNA, 25 bp, Homo sapien
gttaacaagtataataacattgttg

SEQ ID NO: 1920261 - DNA, 25 bp, Homo sapien
gatgttaacaagtataataacattg

SEQ ID NO: 1920262 - DNA, 25 bp, Homo sapien
cagatgttaacaagtataataacat

SEQ ID NO: 1920263 - DNA, 25 bp, Homo sapien
ttcgcgggccagatgcccgagggcg

SEQ ID NO: 1920264 - DNA, 25 bp, Homo sapien
ggccagatgcccgagggcgcggcgg

SEQ ID NO: 1920265 - DNA, 25 bp, Homo sapien
gtgaaggtatgtgtggcgggcgcgg

SEQ ID NO: 1920266 - DNA, 25 bp, Homo sapien
gcggcgtgtgcaccgagcgagtgaa

SEQ ID NO: 1920267 - DNA, 25 bp, Homo sapien
catgttttacagatgctagtgtgat

SEQ ID NO: 1920268 - DNA, 25 bp, Homo sapien
tcatcatgttgagtatcatcattga

SEQ ID NO: 1920269 - DNA, 25 bp, Homo sapien
taagcactatgattcagagtcctca

SEQ ID NO: 1920270 - DNA, 25 bp, Homo sapien
tgtgatagccccaagcattctgtag

SEQ ID NO: 1920271 - DNA, 25 bp, Homo sapien
ccagcattgccactcaggtgttctt

SEQ ID NO: 1920272 - DNA, 25 bp, Homo sapien
agttgtgtgcccaggtatcttccca

SEQ ID NO: 1920273 - DNA, 25 bp, Homo sapien
tcagaatgcccgcagtatgccagtt

SEQ ID NO: 1920274 - DNA, 25 bp, Homo sapien
tgccactcaggtgttcttcacaggt

SEQ ID NO: 1920275 - DNA, 25 bp, Homo sapien
aggattagagacactaggtgggtcc

SEQ ID NO: 1920276 - DNA, 25 bp, Homo sapien
catcgatgggctcccaaatctgtgt

SEQ ID NO: 1920277 - DNA, 25 bp, Homo sapien
tagagacactaggtgggtccacatc

SEQ ID NO: 1920278 - DNA, 25 bp, Homo sapien
cactaggtgggtccacatcgatggg

SEQ ID NO: 1920279 - DNA, 25 bp, Homo sapien
tttgtactgtaatattgccagttag

SEQ ID NO: 1920280 - DNA, 25 bp, Homo sapien
gttatttgtactgtaatattgccag

SEQ ID NO: 1920281 - DNA, 25 bp, Homo sapien
tatttgtactgtaatattgccagtt

SEQ ID NO: 1920282 - DNA, 25 bp, Homo sapien
ttatttgtactgtaatattgccagt

SEQ ID NO: 1920283 - DNA, 25 bp, Homo sapien
caatatccattgttactatccattt

SEQ ID NO: 1920284 - DNA, 25 bp, Homo sapien
tactatccatttctcataacctgtc

SEQ ID NO: 1920285 - DNA, 25 bp, Homo sapien
gttctttctgcccacaatatccatt

SEQ ID NO: 1920286 - DNA, 25 bp, Homo sapien
tccatttctcataacctgtctccat

SEQ ID NO: 1920287 - DNA, 25 bp, Homo sapien
tcatgtcccaaataaagtctgtgat

SEQ ID NO: 1920288 - DNA, 25 bp, Homo sapien
aatcctaaaacatccgaagaactgg

SEQ ID NO: 1920289 - DNA, 25 bp, Homo sapien
aaaacatccgaagaactggaagatc

SEQ ID NO: 1920290 - DNA, 25 bp, Homo sapien
gattgattggtcatctttaaatcct

SEQ ID NO: 1920291 - DNA, 25 bp, Homo sapien
tgaagagttatttagttctaaatat

SEQ ID NO: 1920292 - DNA, 25 bp, Homo sapien
ctgaagagttatttagttctaaata

SEQ ID NO: 1920293 - DNA, 25 bp, Homo sapien
tactactcagaagttcactccaaaa

SEQ ID NO: 1920294 - DNA, 25 bp, Homo sapien
ctactcagaagttcactccaaaatg

SEQ ID NO: 1920295 - DNA, 25 bp, Homo sapien
actcagaagttcactccaaaatgac

SEQ ID NO: 1920296 - DNA, 25 bp, Homo sapien
aactactactcagaagttcactcca

SEQ ID NO: 1920297 - DNA, 25 bp, Homo sapien
gggattgtgacttgtgtgtctttac

SEQ ID NO: 1920298 - DNA, 25 bp, Homo sapien
ggattgtgacttgtgtgtctttaca

SEQ ID NO: 1920299 - DNA, 25 bp, Homo sapien
gtcttaggcccttgttcagcatata

SEQ ID NO: 1920300 - DNA, 25 bp, Homo sapien
ttggggtcttaggcccttgttcagc

SEQ ID NO: 1920301 - DNA, 25 bp, Homo sapien
accctcaacccaatggtccctctca

SEQ ID NO: 1920302 - DNA, 25 bp, Homo sapien
tgttggcctggaaccctcaacccaa

SEQ ID NO: 1920303 - DNA, 25 bp, Homo sapien
atggtccctctcacagtgctaggtg

SEQ ID NO: 1920304 - DNA, 25 bp, Homo sapien
tccctctcacagtgctaggtgtcat

SEQ ID NO: 1920305 - DNA, 25 bp, Homo sapien
caggatgctgtaccattcatttcaa

SEQ ID NO: 1920306 - DNA, 25 bp, Homo sapien
caatggcagccatgggataatatgt

SEQ ID NO: 1920307 - DNA, 25 bp, Homo sapien
aatggcctttcataacaggatgctg

SEQ ID NO: 1920308 - DNA, 25 bp, Homo sapien
gttctgaagccatgatattgataaa

SEQ ID NO: 1920309 - DNA, 25 bp, Homo sapien
caagaatctgttgctctgcttcggg

SEQ ID NO: 1920310 - DNA, 25 bp, Homo sapien
tacatgcatagcttccaggaatagc

SEQ ID NO: 1920311 - DNA, 25 bp, Homo sapien
aaacaattcatctgccctgctgtta

SEQ ID NO: 1920312 - DNA, 25 bp, Homo sapien
tttccaagaatctgttgctctgctt

SEQ ID NO: 1920313 - DNA, 25 bp, Homo sapien
aagttcctcaaaattaggcctggca

SEQ ID NO: 1920314 - DNA, 25 bp, Homo sapien
ctaaagttcctcaaaattaggcctg

SEQ ID NO: 1920315 - DNA, 25 bp, Homo sapien
agttcctcaaaattaggcctggcac

SEQ ID NO: 1920316 - DNA, 25 bp, Homo sapien
gtaatgctgaagtcagcttggcagc

SEQ ID NO: 1920317 - DNA, 25 bp, Homo sapien
gtgactatgaacatgtactctgtgg

SEQ ID NO: 1920318 - DNA, 25 bp, Homo sapien
tgaagtcagcttggcagcttcacca

SEQ ID NO: 1920319 - DNA, 25 bp, Homo sapien
cttcttcctcaatgactgagtgact

SEQ ID NO: 1920320 - DNA, 25 bp, Homo sapien
taatgtgtgaagctgacttactccc

SEQ ID NO: 1920321 - DNA, 25 bp, Homo sapien
tgctttaatgtgtgaagctgactta

SEQ ID NO: 1920322 - DNA, 25 bp, Homo sapien
gaagctgacttactcccttctcctt

SEQ ID NO: 1920323 - DNA, 25 bp, Homo sapien
tgtgtgaagctgacttactcccttc

SEQ ID NO: 1920324 - DNA, 25 bp, Homo sapien
ggtggctcgctcagatttcagtagt

SEQ ID NO: 1920325 - DNA, 25 bp, Homo sapien
ctccttaggccccagggtggcgtat

SEQ ID NO: 1920326 - DNA, 25 bp, Homo sapien
tttcagtagttcagccgtgggccag

SEQ ID NO: 1920327 - DNA, 25 bp, Homo sapien
tcaggcaggctgatttttgggcctc

SEQ ID NO: 1920328 - DNA, 25 bp, Homo sapien
ttaatccgttgaagttgcaaggtgc

SEQ ID NO: 1920329 - DNA, 25 bp, Homo sapien
tggtctaaagagtgaatctgcttct

SEQ ID NO: 1920330 - DNA, 25 bp, Homo sapien
gctgtggtctaaagagtgaatctgc

SEQ ID NO: 1920331 - DNA, 25 bp, Homo sapien
cgttgaagttgcaaggtgctgagtc

SEQ ID NO: 1920332 - DNA, 25 bp, Homo sapien
tgtcagctggatccagggaatactg

SEQ ID NO: 1920333 - DNA, 25 bp, Homo sapien
tggtgattcctcttttgtcagctgg

SEQ ID NO: 1920334 - DNA, 25 bp, Homo sapien
ctggaactgccaggacgatggtagc

SEQ ID NO: 1920335 - DNA, 25 bp, Homo sapien
gacgatggtagcaatttcaggaatc

SEQ ID NO: 1920336 - DNA, 25 bp, Homo sapien
cccagaaaaatgaatgcgttgttga

SEQ ID NO: 1920337 - DNA, 25 bp, Homo sapien
ctactctttctcgtagtctcctagt

SEQ ID NO: 1920338 - DNA, 25 bp, Homo sapien
actctttctcgtagtctcctagtct

SEQ ID NO: 1920339 - DNA, 25 bp, Homo sapien
cagaaaaatgaatgcgttgttgaac

SEQ ID NO: 1920340 - DNA, 25 bp, Homo sapien
tctgattattcagagaacctttcag

SEQ ID NO: 1920341 - DNA, 25 bp, Homo sapien
tctgcatgccccacggtgctaaatt

SEQ ID NO: 1920342 - DNA, 25 bp, Homo sapien
tgccccacggtgctaaattttggct

SEQ ID NO: 1920343 - DNA, 25 bp, Homo sapien
gttcttgtacatctgcatgccccac

SEQ ID NO: 1920344 - DNA, 25 bp, Homo sapien
agtgcagtagtttccgtcagttcca

SEQ ID NO: 1920345 - DNA, 25 bp, Homo sapien
ggaataaggaatgccccagcttgca

SEQ ID NO: 1920346 - DNA, 25 bp, Homo sapien
tccacagatttaccacggaacaagg

SEQ ID NO: 1920347 - DNA, 25 bp, Homo sapien
ggtactctcagatacggtgagtgca

SEQ ID NO: 1920348 - DNA, 25 bp, Homo sapien
cttgttcatggaatgtattagttca

SEQ ID NO: 1920349 - DNA, 25 bp, Homo sapien
gcagagaaatatgatcaatacaaag

SEQ ID NO: 1920350 - DNA, 25 bp, Homo sapien
atatgacttaagtaaaatttccagc

SEQ ID NO: 1920351 - DNA, 25 bp, Homo sapien
ggaaggcaaataataagcaggtact

SEQ ID NO: 1920352 - DNA, 25 bp, Homo sapien
gatttcaggtatagagccagattga

SEQ ID NO: 1920353 - DNA, 25 bp, Homo sapien
gaagatttcaggtatagagccagat

SEQ ID NO: 1920354 - DNA, 25 bp, Homo sapien
agtgaagatttcaggtatagagcca

SEQ ID NO: 1920355 - DNA, 25 bp, Homo sapien
tttcaggtatagagccagattgacc

SEQ ID NO: 1920356 - DNA, 25 bp, Homo sapien
tgcctgtaaccactgcctgttgaca

SEQ ID NO: 1920357 - DNA, 25 bp, Homo sapien
catataaggccaagccaatgaggtt

SEQ ID NO: 1920358 - DNA, 25 bp, Homo sapien
aacagagttgcctgtaaccactgcc

SEQ ID NO: 1920359 - DNA, 25 bp, Homo sapien
aaaatgtaacatataaggccaagcc

SEQ ID NO: 1920360 - DNA, 25 bp, Homo sapien
cattctcagggcagcaaaacagctg

SEQ ID NO: 1920361 - DNA, 25 bp, Homo sapien
gcattctcagggcagcaaaacagct

SEQ ID NO: 1920362 - DNA, 25 bp, Homo sapien
gcagcagggatctcaacaggtgaat

SEQ ID NO: 1920363 - DNA, 25 bp, Homo sapien
tgcattctcagggcagcaaaacagc

SEQ ID NO: 1920364 - DNA, 25 bp, Homo sapien
tgagtaattcctggccagtcataaa

SEQ ID NO: 1920365 - DNA, 25 bp, Homo sapien
ctgagtaattcctggccagtcataa

SEQ ID NO: 1920366 - DNA, 25 bp, Homo sapien
tatagcgtctttagaaccagaattt

SEQ ID NO: 1920367 - DNA, 25 bp, Homo sapien
aatgagatgcactttctatagcgtc

SEQ ID NO: 1920368 - DNA, 25 bp, Homo sapien
gatgcactttctatagcgtctttag

SEQ ID NO: 1920369 - DNA, 25 bp, Homo sapien
cttgagaaatgagatgcactttcta

SEQ ID NO: 1920370 - DNA, 25 bp, Homo sapien
gatacttccagtggtgtcacaaagg

SEQ ID NO: 1920371 - DNA, 25 bp, Homo sapien
ttaaacctgagctctccgatcgcgc

SEQ ID NO: 1920372 - DNA, 25 bp, Homo sapien
tggccttgctgacccagtgatgacc

SEQ ID NO: 1920373 - DNA, 25 bp, Homo sapien
gcgctgctttggtcagatacttcca

SEQ ID NO: 1920374 - DNA, 25 bp, Homo sapien
cagagcacccttggtaaaaggaaat

SEQ ID NO: 1920375 - DNA, 25 bp, Homo sapien
cacccttggtaaaaggaaatggcat

SEQ ID NO: 1920376 - DNA, 25 bp, Homo sapien
gcacccttggtaaaaggaaatggca

SEQ ID NO: 1920377 - DNA, 25 bp, Homo sapien
agagcacccttggtaaaaggaaatg

SEQ ID NO: 1920378 - DNA, 25 bp, Homo sapien
tcctctgatccagggtggaccactc

SEQ ID NO: 1920379 - DNA, 25 bp, Homo sapien
aggaagagcaatgtctttggtgaga

SEQ ID NO: 1920380 - DNA, 25 bp, Homo sapien
tctaattgagaggttgctgtctgag

SEQ ID NO: 1920381 - DNA, 25 bp, Homo sapien
ccatttctaattgagaggttgctgt

SEQ ID NO: 1920382 - DNA, 25 bp, Homo sapien
gcacataccccagttcttctctata

SEQ ID NO: 1920383 - DNA, 25 bp, Homo sapien
gcagtaattgacagcatttgaaaag

SEQ ID NO: 1920384 - DNA, 25 bp, Homo sapien
aaagtagggccgcagtaattgacag

SEQ ID NO: 1920385 - DNA, 25 bp, Homo sapien
tagggccgcagtaattgacagcatt

SEQ ID NO: 1920386 - DNA, 25 bp, Homo sapien
gacaaactgactttcggatagcatg

SEQ ID NO: 1920387 - DNA, 25 bp, Homo sapien
actgactttcggatagcatgactgg

SEQ ID NO: 1920388 - DNA, 25 bp, Homo sapien
agcatgactggacctcatatagtaa

SEQ ID NO: 1920389 - DNA, 25 bp, Homo sapien
atagcatgactggacctcatatagt

SEQ ID NO: 1920390 - DNA, 25 bp, Homo sapien
gacagcaagattgaatggataaaca

SEQ ID NO: 1920391 - DNA, 25 bp, Homo sapien
aagtaagggtcatatgaattccgta

SEQ ID NO: 1920392 - DNA, 25 bp, Homo sapien
ttagaagttagcgacagcaagattg

SEQ ID NO: 1920393 - DNA, 25 bp, Homo sapien
gaattccgtaagttgtctggtgagg

SEQ ID NO: 1920394 - DNA, 25 bp, Homo sapien
ggtgtttaaccagcagtgtcttctc

SEQ ID NO: 1920395 - DNA, 25 bp, Homo sapien
ggaatctctgataactctgacaatt

SEQ ID NO: 1920396 - DNA, 25 bp, Homo sapien
cagaacgagggtgtttaaccagcag

SEQ ID NO: 1920397 - DNA, 25 bp, Homo sapien
aatcaaagttctctttcagacaagt

SEQ ID NO: 1920398 - DNA, 25 bp, Homo sapien
tgcagacattgagttctagggtctt

SEQ ID NO: 1920399 - DNA, 25 bp, Homo sapien
gcagacattgagttctagggtcttc

SEQ ID NO: 1920400 - DNA, 25 bp, Homo sapien
cagtaggagttctatggtgtacatc

SEQ ID NO: 1920401 - DNA, 25 bp, Homo sapien
aagctgccaaggagtacagtaggag

SEQ ID NO: 1920402 - DNA, 25 bp, Homo sapien
agtcattactctaatcaagagtacg

SEQ ID NO: 1920403 - DNA, 25 bp, Homo sapien
tagttaggacgttcatccacttggg

SEQ ID NO: 1920404 - DNA, 25 bp, Homo sapien
tctggctagagtcattactctaatc

SEQ ID NO: 1920405 - DNA, 25 bp, Homo sapien
ttagttaggacgttcatccacttgg

SEQ ID NO: 1920406 - DNA, 25 bp, Homo sapien
caaggacatctcttgatggctactg

SEQ ID NO: 1920407 - DNA, 25 bp, Homo sapien
caaccaaggacatctcttgatggct

SEQ ID NO: 1920408 - DNA, 25 bp, Homo sapien
accaaggacatctcttgatggctac

SEQ ID NO: 1920409 - DNA, 25 bp, Homo sapien
ctcaaccaaggacatctcttgatgg

SEQ ID NO: 1920410 - DNA, 25 bp, Homo sapien
aactgttctatatttaaggacagtg

SEQ ID NO: 1920411 - DNA, 25 bp, Homo sapien
taaagatcaataaaagctaaaccga

SEQ ID NO: 1920412 - DNA, 25 bp, Homo sapien
ataaaagctaaaccgaatgttcctg

SEQ ID NO: 1920413 - DNA, 25 bp, Homo sapien
agctaaaccgaatgttcctgaaatc

SEQ ID NO: 1920414 - DNA, 25 bp, Homo sapien
caagattgttcggaaagagaggtca

SEQ ID NO: 1920415 - DNA, 25 bp, Homo sapien
ggtcatagagaaggattcttagaac

SEQ ID NO: 1920416 - DNA, 25 bp, Homo sapien
tcttagaacctgcttcatgatggcc

SEQ ID NO: 1920417 - DNA, 25 bp, Homo sapien
tcacaagattgttcggaaagagagg

SEQ ID NO: 1920418 - DNA, 25 bp, Homo sapien
catgctgcggacttttagaaaatat

SEQ ID NO: 1920419 - DNA, 25 bp, Homo sapien
ttcaggatacactggaaagcgtgac

SEQ ID NO: 1920420 - DNA, 25 bp, Homo sapien
gagtgttcaggtcatccctcactaa

SEQ ID NO: 1920421 - DNA, 25 bp, Homo sapien
tctgatccatcattatgagtgttca

SEQ ID NO: 1920422 - DNA, 25 bp, Homo sapien
taaaattggtttcgatgattcacgc

SEQ ID NO: 1920423 - DNA, 25 bp, Homo sapien
tatgcagtttttaccagagtagagg

SEQ ID NO: 1920424 - DNA, 25 bp, Homo sapien
gatacagctatcctacataccagga

SEQ ID NO: 1920425 - DNA, 25 bp, Homo sapien
cagacaagttaagggctactgtagg

SEQ ID NO: 1920426 - DNA, 25 bp, Homo sapien
ccatgtaccacgtgaaggctaggat

SEQ ID NO: 1920427 - DNA, 25 bp, Homo sapien
tgtttagtacttcatgctccgcccg

SEQ ID NO: 1920428 - DNA, 25 bp, Homo sapien
taggattgcagttccaagagtttcc

SEQ ID NO: 1920429 - DNA, 25 bp, Homo sapien
tttcttagtatgaatccgctggccc

SEQ ID NO: 1920430 - DNA, 25 bp, Homo sapien
caatattcgttttcacgtcctttca

SEQ ID NO: 1920431 - DNA, 25 bp, Homo sapien
aaacctcaaggagtgagaaggatag

SEQ ID NO: 1920432 - DNA, 25 bp, Homo sapien
tgtcaacgtaattactctcgtaatt

SEQ ID NO: 1920433 - DNA, 25 bp, Homo sapien
aggatagtacgtcagtcctgtggcc

SEQ ID NO: 1920434 - DNA, 25 bp, Homo sapien
tctgaatacttttactctactggta

SEQ ID NO: 1920435 - DNA, 25 bp, Homo sapien
ctgaatacttttactctactggtac

SEQ ID NO: 1920436 - DNA, 25 bp, Homo sapien
ttctgaatacttttactctactggt

SEQ ID NO: 1920437 - DNA, 25 bp, Homo sapien
gagtctgcatataaacaaaacttct

SEQ ID NO: 1920438 - DNA, 25 bp, Homo sapien
tctctccaagaagtatcccaattgt

SEQ ID NO: 1920439 - DNA, 25 bp, Homo sapien
tccttttacccagtcatcaaaatag

SEQ ID NO: 1920440 - DNA, 25 bp, Homo sapien
ttttttcactaagtcgttcatatcc

SEQ ID NO: 1920441 - DNA, 25 bp, Homo sapien
agacttggtggcagctttcagtagg

SEQ ID NO: 1920442 - DNA, 25 bp, Homo sapien
gacttggtggcagctttcagtagga

SEQ ID NO: 1920443 - DNA, 25 bp, Homo sapien
tccaaaagctttacaataatctgaa

SEQ ID NO: 1920444 - DNA, 25 bp, Homo sapien
aagctttacaataatctgaattcat

SEQ ID NO: 1920445 - DNA, 25 bp, Homo sapien
ttccaaaagctttacaataatctga

SEQ ID NO: 1920446 - DNA, 25 bp, Homo sapien
caaaagctttacaataatctgaatt

SEQ ID NO: 1920447 - DNA, 25 bp, Homo sapien
atcctgagggtttatgttgaactct

SEQ ID NO: 1920448 - DNA, 25 bp, Homo sapien
tcatcctgagggtttatgttgaact

SEQ ID NO: 1920449 - DNA, 25 bp, Homo sapien
catcctgagggtttatgttgaactc

SEQ ID NO: 1920450 - DNA, 25 bp, Homo sapien
ttcatcctgagggtttatgttgaac

SEQ ID NO: 1920451 - DNA, 25 bp, Homo sapien
cagacattctgtggcgctggtgtct

SEQ ID NO: 1920452 - DNA, 25 bp, Homo sapien
ttttcgtttatctacccaagtcaca

SEQ ID NO: 1920453 - DNA, 25 bp, Homo sapien
cacagacattctgtggcgctggtgt

SEQ ID NO: 1920454 - DNA, 25 bp, Homo sapien
gtcctttgatttagaaatcccacag

SEQ ID NO: 1920455 - DNA, 25 bp, Homo sapien
gatgacatcttgtgaatactgcttg

SEQ ID NO: 1920456 - DNA, 25 bp, Homo sapien
aaatcatccctgaaaggcttgtagg

SEQ ID NO: 1920457 - DNA, 25 bp, Homo sapien
ggtgtctatagatccacagattcca

SEQ ID NO: 1920458 - DNA, 25 bp, Homo sapien
aaagatgacatcttgtgaatactgc

SEQ ID NO: 1920459 - DNA, 25 bp, Homo sapien
taaaagtgaaatccaactgtgtttc

SEQ ID NO: 1920460 - DNA, 25 bp, Homo sapien
aaagtgaaatccaactgtgtttcag

SEQ ID NO: 1920461 - DNA, 25 bp, Homo sapien
gtgaaatccaactgtgtttcagtta

SEQ ID NO: 1920462 - DNA, 25 bp, Homo sapien
aagtgaaatccaactgtgtttcagt

SEQ ID NO: 1920463 - DNA, 25 bp, Homo sapien
ttcgaattactaggaatgaaacatt

SEQ ID NO: 1920464 - DNA, 25 bp, Homo sapien
tgtgtggtgagaaactgctgcgcta

SEQ ID NO: 1920465 - DNA, 25 bp, Homo sapien
actgctgcgctaaagatgttccaaa

SEQ ID NO: 1920466 - DNA, 25 bp, Homo sapien
tgttgtcatgattcgaattactagg

SEQ ID NO: 1920467 - DNA, 25 bp, Homo sapien
tatgctttcactacacttctgccct

SEQ ID NO: 1920468 - DNA, 25 bp, Homo sapien
gccctcttccttgctattctgggat

SEQ ID NO: 1920469 - DNA, 25 bp, Homo sapien
tctgccctcttccttgctattctgg

SEQ ID NO: 1920470 - DNA, 25 bp, Homo sapien
ccttgctattctgggatttcttctt

SEQ ID NO: 1920471 - DNA, 25 bp, Homo sapien
aaatttctccaattgtacactctgg

SEQ ID NO: 1920472 - DNA, 25 bp, Homo sapien
atttctccaattgtacactctgggt

SEQ ID NO: 1920473 - DNA, 25 bp, Homo sapien
tgtacactctgggtggccggtttcc

SEQ ID NO: 1920474 - DNA, 25 bp, Homo sapien
cactctgggtggccggtttccccat

SEQ ID NO: 1920475 - DNA, 25 bp, Homo sapien
tgttgtttccttaaaggatctttca

SEQ ID NO: 1920476 - DNA, 25 bp, Homo sapien
tttccttaaaggatctttcaatagc

SEQ ID NO: 1920477 - DNA, 25 bp, Homo sapien
gctggctctttgacagagtatctgt

SEQ ID NO: 1920478 - DNA, 25 bp, Homo sapien
cttaaaggatctttcaatagcctca

SEQ ID NO: 1920479 - DNA, 25 bp, Homo sapien
catttgttgtaatacttgtaaatag

SEQ ID NO: 1920480 - DNA, 25 bp, Homo sapien
actttcttggctaatgaagtttgct

SEQ ID NO: 1920481 - DNA, 25 bp, Homo sapien
tcttggctaatgaagtttgctggtt

SEQ ID NO: 1920482 - DNA, 25 bp, Homo sapien
ggttggatttgttctgatcatcctt

SEQ ID NO: 1920483 - DNA, 25 bp, Homo sapien
gctaatgaagtttgctggttggatt

SEQ ID NO: 1920484 - DNA, 25 bp, Homo sapien
tgaatctcaggtacttttatttgct

SEQ ID NO: 1920485 - DNA, 25 bp, Homo sapien
tgcgagtgctaaaatgttattatac

SEQ ID NO: 1920486 - DNA, 25 bp, Homo sapien
ttatgcttcccgaagtatggcaatc

SEQ ID NO: 1920487 - DNA, 25 bp, Homo sapien
tttcatgacctccagtaactgcgag

SEQ ID NO: 1920488 - DNA, 25 bp, Homo sapien
ttgtctagatctacaaatacagctg

SEQ ID NO: 1920489 - DNA, 25 bp, Homo sapien
ctccactattgcatggataatgagg

SEQ ID NO: 1920490 - DNA, 25 bp, Homo sapien
tacatctctcacgtcgattccagca

SEQ ID NO: 1920491 - DNA, 25 bp, Homo sapien
gataatgaggtctacatctctcacg

SEQ ID NO: 1920492 - DNA, 25 bp, Homo sapien
gactgcagagccagtactgtatttg

SEQ ID NO: 1920493 - DNA, 25 bp, Homo sapien
ctgcagagccagtactgtatttgat

SEQ ID NO: 1920494 - DNA, 25 bp, Homo sapien
tgactgcagagccagtactgtattt

SEQ ID NO: 1920495 - DNA, 25 bp, Homo sapien
gcagagccagtactgtatttgatta

SEQ ID NO: 1920496 - DNA, 25 bp, Homo sapien
tgcccagaaaataatgataggtttc

SEQ ID NO: 1920497 - DNA, 25 bp, Homo sapien
atgataggtttctctgtctacctca

SEQ ID NO: 1920498 - DNA, 25 bp, Homo sapien
tctctgtctacctcagcacccatct

SEQ ID NO: 1920499 - DNA, 25 bp, Homo sapien
aataatgataggtttctctgtctac

SEQ ID NO: 1920500 - DNA, 25 bp, Homo sapien
aaaaattgggctccatgagatcatc

SEQ ID NO: 1920501 - DNA, 25 bp, Homo sapien
tctgcagagatctggacatctgttc

SEQ ID NO: 1920502 - DNA, 25 bp, Homo sapien
taagcacctaagagtgtctgcagag

SEQ ID NO: 1920503 - DNA, 25 bp, Homo sapien
ggagtttgataagcacactttctca

SEQ ID NO: 1920504 - DNA, 25 bp, Homo sapien
tcagtggtaaacacataatgttgca

SEQ ID NO: 1920505 - DNA, 25 bp, Homo sapien
ggttataagtggatatcatagatac

SEQ ID NO: 1920506 - DNA, 25 bp, Homo sapien
caagtcataggtgattccagagaga

SEQ ID NO: 1920507 - DNA, 25 bp, Homo sapien
cacaggatgaacatccaaactccat

SEQ ID NO: 1920508 - DNA, 25 bp, Homo sapien
gaagcactgaattggactgggccac

SEQ ID NO: 1920509 - DNA, 25 bp, Homo sapien
aaaacctggtatggcctcaatatca

SEQ ID NO: 1920510 - DNA, 25 bp, Homo sapien
tagaaaaagggcataattgtattcc

SEQ ID NO: 1920511 - DNA, 25 bp, Homo sapien
tgaaattaggcggtggaagcactga

SEQ ID NO: 1920512 - DNA, 25 bp, Homo sapien
agaaatgttgtgaaacagcattagt

SEQ ID NO: 1920513 - DNA, 25 bp, Homo sapien
ttagttttcttccattcgccaggag

SEQ ID NO: 1920514 - DNA, 25 bp, Homo sapien
tagttttcttccattcgccaggagc

SEQ ID NO: 1920515 - DNA, 25 bp, Homo sapien
tgtgcatgcagtgcactaattcact

SEQ ID NO: 1920516 - DNA, 25 bp, Homo sapien
tgtttttgctgctccggctggtggt

SEQ ID NO: 1920517 - DNA, 25 bp, Homo sapien
tgaaaaatgaccacttgtaaaccac

SEQ ID NO: 1920518 - DNA, 25 bp, Homo sapien
tccggctggtggtatattcctcttg

SEQ ID NO: 1920519 - DNA, 25 bp, Homo sapien
gttccactttttgcagctgaatctg

SEQ ID NO: 1920520 - DNA, 25 bp, Homo sapien
aactcagggcttactacctttcact

SEQ ID NO: 1920521 - DNA, 25 bp, Homo sapien
aatggcctccctgtcactaactaaa

SEQ ID NO: 1920522 - DNA, 25 bp, Homo sapien
cttgatgatattaccaatggcctcc

SEQ ID NO: 1920523 - DNA, 25 bp, Homo sapien
tattctacctagcatggacacacag

SEQ ID NO: 1920524 - DNA, 25 bp, Homo sapien
tgtccaagtggatcacctagtttcc

SEQ ID NO: 1920525 - DNA, 25 bp, Homo sapien
gattttgagatataacgggacactt

SEQ ID NO: 1920526 - DNA, 25 bp, Homo sapien
cctagaattatggagacaggaagca

SEQ ID NO: 1920527 - DNA, 25 bp, Homo sapien
ttttctcattcttttccggtgccat

SEQ ID NO: 1920528 - DNA, 25 bp, Homo sapien
agcttcttccttttttctcattctt

SEQ ID NO: 1920529 - DNA, 25 bp, Homo sapien
cccagcttcttccttttttctcatt

SEQ ID NO: 1920530 - DNA, 25 bp, Homo sapien
tttttctcattcttttccggtgcca

SEQ ID NO: 1920531 - DNA, 25 bp, Homo sapien
caactaggttgatgtcttgaagaca

SEQ ID NO: 1920532 - DNA, 25 bp, Homo sapien
tgatcccaaagtttcccttccatgg

SEQ ID NO: 1920533 - DNA, 25 bp, Homo sapien
tgtgaggtgtacaggcaactaggtt

SEQ ID NO: 1920534 - DNA, 25 bp, Homo sapien
cagggtgatgactgactgaaagcct

SEQ ID NO: 1920535 - DNA, 25 bp, Homo sapien
taatctattcgtgacaaatctatcc

SEQ ID NO: 1920536 - DNA, 25 bp, Homo sapien
ccccattaggctccacctacaacat

SEQ ID NO: 1920537 - DNA, 25 bp, Homo sapien
caaactatagcacttccctacttca

SEQ ID NO: 1920538 - DNA, 25 bp, Homo sapien
ttcgtgacaaatctatccccatgac

SEQ ID NO: 1920539 - DNA, 25 bp, Homo sapien
tctgataacctccttctaccatcaa

SEQ ID NO: 1920540 - DNA, 25 bp, Homo sapien
cgtttttaatctcctgattgcctct

SEQ ID NO: 1920541 - DNA, 25 bp, Homo sapien
ctctacctttagcatctgataacct

SEQ ID NO: 1920542 - DNA, 25 bp, Homo sapien
tttaatctcctgattgcctctacct

SEQ ID NO: 1920543 - DNA, 25 bp, Homo sapien
gagatataagtggaaaaccacagac

SEQ ID NO: 1920544 - DNA, 25 bp, Homo sapien
agtagagtgggttgtggcatcctcc

SEQ ID NO: 1920545 - DNA, 25 bp, Homo sapien
cacaatgggctaatatctgacttgc

SEQ ID NO: 1920546 - DNA, 25 bp, Homo sapien
taagagaatatgattgtgggagctg

SEQ ID NO: 1920547 - DNA, 25 bp, Homo sapien
tcctttagttcccagatatggtccc

SEQ ID NO: 1920548 - DNA, 25 bp, Homo sapien
tagttcccagatatggtccctcagt

SEQ ID NO: 1920549 - DNA, 25 bp, Homo sapien
aatttcctttagttcccagatatgg

SEQ ID NO: 1920550 - DNA, 25 bp, Homo sapien
ttcccagatatggtccctcagttcc

SEQ ID NO: 1920551 - DNA, 25 bp, Homo sapien
tcattgctggcagactctgttatca

SEQ ID NO: 1920552 - DNA, 25 bp, Homo sapien
cagtgtcaactcctgtccattcctt

SEQ ID NO: 1920553 - DNA, 25 bp, Homo sapien
gtcaactcctgtccattcctttcta

SEQ ID NO: 1920554 - DNA, 25 bp, Homo sapien
gactctgttatcacttttcacccac

SEQ ID NO: 1920555 - DNA, 25 bp, Homo sapien
gaaggacaaaattatcatagagata

SEQ ID NO: 1920556 - DNA, 25 bp, Homo sapien
gacaaaattatcatagagataggaa

SEQ ID NO: 1920557 - DNA, 25 bp, Homo sapien
ttcagtttgaaggacaaaattatca

SEQ ID NO: 1920558 - DNA, 25 bp, Homo sapien
tttgaaggacaaaattatcatagag

SEQ ID NO: 1920559 - DNA, 25 bp, Homo sapien
taccttccgaccataatctagcctt

SEQ ID NO: 1920560 - DNA, 25 bp, Homo sapien
aagctaccttccgaccataatctag

SEQ ID NO: 1920561 - DNA, 25 bp, Homo sapien
gaccataatctagcctttcatgcat

SEQ ID NO: 1920562 - DNA, 25 bp, Homo sapien
tccgaccataatctagcctttcatg

SEQ ID NO: 1920563 - DNA, 25 bp, Homo sapien
ttaaatgtctacaggaaaatagatg

SEQ ID NO: 1920564 - DNA, 25 bp, Homo sapien
gttaaaacattgaatatgtgcacat

SEQ ID NO: 1920565 - DNA, 25 bp, Homo sapien
gtagttaaaacattgaatatgtgca

SEQ ID NO: 1920566 - DNA, 25 bp, Homo sapien
taaaacattgaatatgtgcacatac

SEQ ID NO: 1920567 - DNA, 25 bp, Homo sapien
aatttggcaggtaacatcctctaac

SEQ ID NO: 1920568 - DNA, 25 bp, Homo sapien
tgtgaggtagaggaccaaaaactgg

SEQ ID NO: 1920569 - DNA, 25 bp, Homo sapien
gaacaggtagcttgccttagcctct

SEQ ID NO: 1920570 - DNA, 25 bp, Homo sapien
caatggtctccacatcaggcttctc

SEQ ID NO: 1920571 - DNA, 25 bp, Homo sapien
taaatgctgacatgaaccagtaggg

SEQ ID NO: 1920572 - DNA, 25 bp, Homo sapien
gtcacttacctgagttaggctccta

SEQ ID NO: 1920573 - DNA, 25 bp, Homo sapien
gaacactttactcaagaccattgca

SEQ ID NO: 1920574 - DNA, 25 bp, Homo sapien
ggctcctactctcctacacagattg

SEQ ID NO: 1920575 - DNA, 25 bp, Homo sapien
gccctaagaataggtgatggtaaag

SEQ ID NO: 1920576 - DNA, 25 bp, Homo sapien
aagaataggtgatggtaaagattca

SEQ ID NO: 1920577 - DNA, 25 bp, Homo sapien
cctaagaataggtgatggtaaagat

SEQ ID NO: 1920578 - DNA, 25 bp, Homo sapien
atggtaaagattcagccatcacccc

SEQ ID NO: 1920579 - DNA, 25 bp, Homo sapien
cactgtcaggataaatatcatcatc

SEQ ID NO: 1920580 - DNA, 25 bp, Homo sapien
ctgtcaggataaatatcatcatccc

SEQ ID NO: 1920581 - DNA, 25 bp, Homo sapien
actgtcaggataaatatcatcatcc

SEQ ID NO: 1920582 - DNA, 25 bp, Homo sapien
tctcacttgacatatcaaaccacgt

SEQ ID NO: 1920583 - DNA, 25 bp, Homo sapien
acatatcaaaccacgtctgacgagg

SEQ ID NO: 1920584 - DNA, 25 bp, Homo sapien
cacgtctgacgaggaagtggctccc

SEQ ID NO: 1920585 - DNA, 25 bp, Homo sapien
gctttactcaggttctcacttgaca

SEQ ID NO: 1920586 - DNA, 25 bp, Homo sapien
ttaaatcatcaatgcttattagcct

SEQ ID NO: 1920587 - DNA, 25 bp, Homo sapien
caaatgccctgacatcggtcattac

SEQ ID NO: 1920588 - DNA, 25 bp, Homo sapien
aaattttgaaagcccaactgccagc

SEQ ID NO: 1920589 - DNA, 25 bp, Homo sapien
acatcggtcattacaattccacgcc

SEQ ID NO: 1920590 - DNA, 25 bp, Homo sapien
tctctggagccctctagaatacaga

SEQ ID NO: 1920591 - DNA, 25 bp, Homo sapien
ctggagccctctagaatacagacat

SEQ ID NO: 1920592 - DNA, 25 bp, Homo sapien
tttctcttctagccagatcacactg

SEQ ID NO: 1920593 - DNA, 25 bp, Homo sapien
agatcacactggttatcctccctaa

SEQ ID NO: 1920594 - DNA, 25 bp, Homo sapien
tccagtttattatgggagaagacct

SEQ ID NO: 1920595 - DNA, 25 bp, Homo sapien
tccaaaatgacagcgggtaggaaca

SEQ ID NO: 1920596 - DNA, 25 bp, Homo sapien
ccttagctatttgggaaggttccag

SEQ ID NO: 1920597 - DNA, 25 bp, Homo sapien
gagaagaccttagggaccaaaatga

SEQ ID NO: 1920598 - DNA, 25 bp, Homo sapien
ggctgttccaagcttctagtggcca

SEQ ID NO: 1920599 - DNA, 25 bp, Homo sapien
gacccaagctgggaaagcgtctctg

SEQ ID NO: 1920600 - DNA, 25 bp, Homo sapien
cttgctatcaactgagggctgttcc

SEQ ID NO: 1920601 - DNA, 25 bp, Homo sapien
ccagcaacagctagtggagatcttc

SEQ ID NO: 1920602 - DNA, 25 bp, Homo sapien
cattagtagcaggttccaaagaact

SEQ ID NO: 1920603 - DNA, 25 bp, Homo sapien
gagactcttacctgagaacctggaa

SEQ ID NO: 1920604 - DNA, 25 bp, Homo sapien
gaacctggaaacctgaagtcatttg

SEQ ID NO: 1920605 - DNA, 25 bp, Homo sapien
aaagcgcttgttgaatcccttctgc

SEQ ID NO: 1920606 - DNA, 25 bp, Homo sapien
gaaagattcttgctgacccttagta

SEQ ID NO: 1920607 - DNA, 25 bp, Homo sapien
catggcccagattggagaaactgca

SEQ ID NO: 1920608 - DNA, 25 bp, Homo sapien
ttgcttgcatatctgctgacacagt

SEQ ID NO: 1920609 - DNA, 25 bp, Homo sapien
tatgtttccgatgaaagattcttgc

SEQ ID NO: 1920610 - DNA, 25 bp, Homo sapien
tgaagtcaaggtccagtccgatgag

SEQ ID NO: 1920611 - DNA, 25 bp, Homo sapien
gaggtctggtgttggtgcctttttc

SEQ ID NO: 1920612 - DNA, 25 bp, Homo sapien
gagccctaagtctggttgtaaactg

SEQ ID NO: 1920613 - DNA, 25 bp, Homo sapien
tgagccatgttggttggagccctaa

SEQ ID NO: 1920614 - DNA, 25 bp, Homo sapien
agccaaggcatgagaactacgtgaa

SEQ ID NO: 1920615 - DNA, 25 bp, Homo sapien
tgaaagccaaggcatgagaactacg

SEQ ID NO: 1920616 - DNA, 25 bp, Homo sapien
gagctgaaagccaaggcatgagaac

SEQ ID NO: 1920617 - DNA, 25 bp, Homo sapien
aaagccaaggcatgagaactacgtg

SEQ ID NO: 1920618 - DNA, 25 bp, Homo sapien
gctgaattgcaagcgaagatcaaaa

SEQ ID NO: 1920619 - DNA, 25 bp, Homo sapien
aatagaaagtaagattccaattcat

SEQ ID NO: 1920620 - DNA, 25 bp, Homo sapien
tatatatcagcatcaagtgatatgc

SEQ ID NO: 1920621 - DNA, 25 bp, Homo sapien
ctttgaagatatgtgtttgttgtcg

SEQ ID NO: 1920622 - DNA, 25 bp, Homo sapien
tactttagaccttagcccattcgga

SEQ ID NO: 1920623 - DNA, 25 bp, Homo sapien
caaaagttataaattggcatggagc

SEQ ID NO: 1920624 - DNA, 25 bp, Homo sapien
cattactgtgtttgcatggatgtct

SEQ ID NO: 1920625 - DNA, 25 bp, Homo sapien
gagttatcattggaacataaactat

SEQ ID NO: 1920626 - DNA, 25 bp, Homo sapien
cttgaactagataatacattcgagg

SEQ ID NO: 1920627 - DNA, 25 bp, Homo sapien
tacattcgaggatcacatctaccac

SEQ ID NO: 1920628 - DNA, 25 bp, Homo sapien
gagacgtgactacccatgacaacaa

SEQ ID NO: 1920629 - DNA, 25 bp, Homo sapien
aaatctgcaccggtgttaggagacg

SEQ ID NO: 1920630 - DNA, 25 bp, Homo sapien
ccagtctgataatgtactgtgccat

SEQ ID NO: 1920631 - DNA, 25 bp, Homo sapien
cccagtctgataatgtactgtgcca

SEQ ID NO: 1920632 - DNA, 25 bp, Homo sapien
ccaccacctctcagttgccctgttt

SEQ ID NO: 1920633 - DNA, 25 bp, Homo sapien
ctgttaacatgacatccatcatcat

SEQ ID NO: 1920634 - DNA, 25 bp, Homo sapien
tttccctcaggcgacagctgcagct

SEQ ID NO: 1920635 - DNA, 25 bp, Homo sapien
aatactgatgcatctggttttccct

SEQ ID NO: 1920636 - DNA, 25 bp, Homo sapien
gagagatcacagagcctagatcatt

SEQ ID NO: 1920637 - DNA, 25 bp, Homo sapien
ggagagtctgaagtgacagccccct

SEQ ID NO: 1920638 - DNA, 25 bp, Homo sapien
tcttcctctcaatgcgcagaggaat

SEQ ID NO: 1920639 - DNA, 25 bp, Homo sapien
caatgcgcagaggaatacctgaatc

SEQ ID NO: 1920640 - DNA, 25 bp, Homo sapien
gcagaggaatacctgaatcagattt

SEQ ID NO: 1920641 - DNA, 25 bp, Homo sapien
cctctcaatgcgcagaggaatacct

SEQ ID NO: 1920642 - DNA, 25 bp, Homo sapien
tccatataccacactttccatcagt

SEQ ID NO: 1920643 - DNA, 25 bp, Homo sapien
gaactctacattgccaattgtattc

SEQ ID NO: 1920644 - DNA, 25 bp, Homo sapien
cccttgaactctacattgccaattg

SEQ ID NO: 1920645 - DNA, 25 bp, Homo sapien
ttccatataccacactttccatcag

SEQ ID NO: 1920646 - DNA, 25 bp, Homo sapien
caactactgagtgctgtggctagga

SEQ ID NO: 1920647 - DNA, 25 bp, Homo sapien
gatttgcccaagtagtaaacagact

SEQ ID NO: 1920648 - DNA, 25 bp, Homo sapien
tgcagtttagcataacccaggaagt

SEQ ID NO: 1920649 - DNA, 25 bp, Homo sapien
taagaggatcattccacagggcggt

SEQ ID NO: 1920650 - DNA, 25 bp, Homo sapien
gtagtatctataatttgtctcttca

SEQ ID NO: 1920651 - DNA, 25 bp, Homo sapien
aataattccacaaatgttttcaaca

SEQ ID NO: 1920652 - DNA, 25 bp, Homo sapien
gtatctataatttgtctcttcatgt

SEQ ID NO: 1920653 - DNA, 25 bp, Homo sapien
ctataatttgtctcttcatgtactt

SEQ ID NO: 1920654 - DNA, 25 bp, Homo sapien
gcttttaactcatctattcctcatc

SEQ ID NO: 1920655 - DNA, 25 bp, Homo sapien
cagtcactttactaagcactttgct

SEQ ID NO: 1920656 - DNA, 25 bp, Homo sapien
aggaattaacatcctcaccttatag

SEQ ID NO: 1920657 - DNA, 25 bp, Homo sapien
tgcagcatttattgaaccttttcca

SEQ ID NO: 1920658 - DNA, 25 bp, Homo sapien
gtaaatatggtttcctctgggcaat

SEQ ID NO: 1920659 - DNA, 25 bp, Homo sapien
tgtaaatatggtttcctctgggcaa

SEQ ID NO: 1920660 - DNA, 25 bp, Homo sapien
aaggttccaggagtcatcattagtc

SEQ ID NO: 1920661 - DNA, 25 bp, Homo sapien
tgttccccatgaattaaggttccag

SEQ ID NO: 1920662 - DNA, 25 bp, Homo sapien
tacaccagtctggaagacactctcc

SEQ ID NO: 1920663 - DNA, 25 bp, Homo sapien
gttgctggacattggtacatacacc

SEQ ID NO: 1920664 - DNA, 25 bp, Homo sapien
gagctgcgcctgcatgatctagacc

SEQ ID NO: 1920665 - DNA, 25 bp, Homo sapien
tcatcaaaaaatcccgacagcatgc

SEQ ID NO: 1920666 - DNA, 25 bp, Homo sapien
cacagacaagccaaccaaggaattt

SEQ ID NO: 1920667 - DNA, 25 bp, Homo sapien
aagcagccaagagcaaacacagaca

SEQ ID NO: 1920668 - DNA, 25 bp, Homo sapien
ccaaaatgctgtcgtgcagtgcacg

SEQ ID NO: 1920669 - DNA, 25 bp, Homo sapien
acagtaggttcatttgtgccagcat

SEQ ID NO: 1920670 - DNA, 25 bp, Homo sapien
tccttgagagtcatgatacctgcat

SEQ ID NO: 1920671 - DNA, 25 bp, Homo sapien
cacaatttgtcccactgtgaggtct

SEQ ID NO: 1920672 - DNA, 25 bp, Homo sapien
gttccgcagagtgaacaagaagcat

SEQ ID NO: 1920673 - DNA, 25 bp, Homo sapien
ttccgcagagtgaacaagaagcatg

SEQ ID NO: 1920674 - DNA, 25 bp, Homo sapien
agttccgcagagtgaacaagaagca

SEQ ID NO: 1920675 - DNA, 25 bp, Homo sapien
aaggggaagcaggagccttcttcac

SEQ ID NO: 1920676 - DNA, 25 bp, Homo sapien
tcttcacaaggcaacaggaaggagt

SEQ ID NO: 1920677 - DNA, 25 bp, Homo sapien
gtgaaggggaagcaggagccttctt

SEQ ID NO: 1920678 - DNA, 25 bp, Homo sapien
gaagcaggagccttcttcacaaggc

SEQ ID NO: 1920679 - DNA, 25 bp, Homo sapien
cattagaaataggataactagcaaa

SEQ ID NO: 1920680 - DNA, 25 bp, Homo sapien
accagtattctttaaggctcagaga

SEQ ID NO: 1920681 - DNA, 25 bp, Homo sapien
tgcagactagtgatgcttcaacaga

SEQ ID NO: 1920682 - DNA, 25 bp, Homo sapien
cagaagctaggttaaatatataccc

SEQ ID NO: 1920683 - DNA, 25 bp, Homo sapien
gaaaactgctgtgttggaggtaagc

SEQ ID NO: 1920684 - DNA, 25 bp, Homo sapien
aaaaactaagaacatggtgctgttg

SEQ ID NO: 1920685 - DNA, 25 bp, Homo sapien
tgagggaaccccttgcttaaagaca

SEQ ID NO: 1920686 - DNA, 25 bp, Homo sapien
tgtgtagaatattgatacccaggaa

SEQ ID NO: 1920687 - DNA, 25 bp, Homo sapien
ttgtcttctggttcaagggtaattg

SEQ ID NO: 1920688 - DNA, 25 bp, Homo sapien
caagggtaattgtgagatagtgtac

SEQ ID NO: 1920689 - DNA, 25 bp, Homo sapien
gatagtgtactgatagctggaaagt

SEQ ID NO: 1920690 - DNA, 25 bp, Homo sapien
gcatgtcatagactatgccatctgt

SEQ ID NO: 1920691 - DNA, 25 bp, Homo sapien
tcttcaaattttattggctctttcc

SEQ ID NO: 1920692 - DNA, 25 bp, Homo sapien
catatattgtcttcttctgctagaa

SEQ ID NO: 1920693 - DNA, 25 bp, Homo sapien
tttggttctgttttcaagtatctgt

SEQ ID NO: 1920694 - DNA, 25 bp, Homo sapien
tttctgctgtcattcccaggaaatg

SEQ ID NO: 1920695 - DNA, 25 bp, Homo sapien
tcttagttgtgaaaagcctgtgctg

SEQ ID NO: 1920696 - DNA, 25 bp, Homo sapien
ggcaccatgatggacagtctcttag

SEQ ID NO: 1920697 - DNA, 25 bp, Homo sapien
taactggagattagcagatcacgac

SEQ ID NO: 1920698 - DNA, 25 bp, Homo sapien
agatcacgaccccatatgcctgtag

SEQ ID NO: 1920699 - DNA, 25 bp, Homo sapien
tacaacctgagatggagcagatggt

SEQ ID NO: 1920700 - DNA, 25 bp, Homo sapien
tagggaaggtacacagttcactgca

SEQ ID NO: 1920701 - DNA, 25 bp, Homo sapien
gagaaaattcattgtggaaccacga

SEQ ID NO: 1920702 - DNA, 25 bp, Homo sapien
caatcattactggtgcttcatgcac

SEQ ID NO: 1920703 - DNA, 25 bp, Homo sapien
tcgccaagagacaagtcttctgctc

SEQ ID NO: 1920704 - DNA, 25 bp, Homo sapien
ccgacggactggtcctggacgtgct

SEQ ID NO: 1920705 - DNA, 25 bp, Homo sapien
cgtccctcgccaagagacaagtctt

SEQ ID NO: 1920706 - DNA, 25 bp, Homo sapien
gacgtgctgggtcagcggcgcccgt

SEQ ID NO: 1920707 - DNA, 25 bp, Homo sapien
cgtgtgcgaggagtgcctcaaagtc

SEQ ID NO: 1920708 - DNA, 25 bp, Homo sapien
ggatccctatgtgcccctcatggtg

SEQ ID NO: 1920709 - DNA, 25 bp, Homo sapien
aaagtctacctgagcgcccaggtaa

SEQ ID NO: 1920710 - DNA, 25 bp, Homo sapien
tgttgggagctccaccctactctgg

SEQ ID NO: 1920711 - DNA, 25 bp, Homo sapien
aaggcatcagctgatacctttagag

SEQ ID NO: 1920712 - DNA, 25 bp, Homo sapien
aagtactgctgacctaaggcatcag

SEQ ID NO: 1920713 - DNA, 25 bp, Homo sapien
tcctagagcttttatacctgaaggc

SEQ ID NO: 1920714 - DNA, 25 bp, Homo sapien
ttccctcctagagcttttatacctg

SEQ ID NO: 1920715 - DNA, 25 bp, Homo sapien
atcataaagtgtctgcttctggtca

SEQ ID NO: 1920716 - DNA, 25 bp, Homo sapien
gacaagatggaggaattactgttaa

SEQ ID NO: 1920717 - DNA, 25 bp, Homo sapien
cacagtcatatcataaagtgtctgc

SEQ ID NO: 1920718 - DNA, 25 bp, Homo sapien
ttaaccgtgcacagtcatatcataa

SEQ ID NO: 1920719 - DNA, 25 bp, Homo sapien
agtacattgaagagctgtgaaggga

SEQ ID NO: 1920720 - DNA, 25 bp, Homo sapien
ctttgatgagtacattgaagagctg

SEQ ID NO: 1920721 - DNA, 25 bp, Homo sapien
gatgagtacattgaagagctgtgaa

SEQ ID NO: 1920722 - DNA, 25 bp, Homo sapien
tgagtacattgaagagctgtgaagg

SEQ ID NO: 1920723 - DNA, 25 bp, Homo sapien
cctgactccggcattccttttctga

SEQ ID NO: 1920724 - DNA, 25 bp, Homo sapien
tgacggtgactccaaaatttccatg

SEQ ID NO: 1920725 - DNA, 25 bp, Homo sapien
gagcaaggggcatctcctaattgac

SEQ ID NO: 1920726 - DNA, 25 bp, Homo sapien
ctgttcttatgtgacggtgactcca

SEQ ID NO: 1920727 - DNA, 25 bp, Homo sapien
gctcaattccccatattgaactgaa

SEQ ID NO: 1920728 - DNA, 25 bp, Homo sapien
tgtgtagctggtggagagattttcc

SEQ ID NO: 1920729 - DNA, 25 bp, Homo sapien
tgtttcaagcttaattaggtagtaa

SEQ ID NO: 1920730 - DNA, 25 bp, Homo sapien
aaattactttcctatgccaccagca

SEQ ID NO: 1920731 - DNA, 25 bp, Homo sapien
catagagcctggaagagtagatttt

SEQ ID NO: 1920732 - DNA, 25 bp, Homo sapien
taaagtacatagatgaagaagccac

SEQ ID NO: 1920733 - DNA, 25 bp, Homo sapien
tgccagcacttgagtaaagataaag

SEQ ID NO: 1920734 - DNA, 25 bp, Homo sapien
gctgcaggagcccttgtaatctctt

SEQ ID NO: 1920735 - DNA, 25 bp, Homo sapien
tagaacaaaagcatgcggaggagcc

SEQ ID NO: 1920736 - DNA, 25 bp, Homo sapien
caaatatgattgaggcatagcctgc

SEQ ID NO: 1920737 - DNA, 25 bp, Homo sapien
tatcctgaacacaagggcattattg

SEQ ID NO: 1920738 - DNA, 25 bp, Homo sapien
cttgtgttgtaaaaagagtgctcca

SEQ ID NO: 1920739 - DNA, 25 bp, Homo sapien
gttgtctaaatgctgcctgaccccg

SEQ ID NO: 1920740 - DNA, 25 bp, Homo sapien
tgtaaattaccgcagtagcagccag

SEQ ID NO: 1920741 - DNA, 25 bp, Homo sapien
tctgaatgctgtctaaccctgcagt

SEQ ID NO: 1920742 - DNA, 25 bp, Homo sapien
aaatgtgcccagagtttagtgctga

SEQ ID NO: 1920743 - DNA, 25 bp, Homo sapien
gacttttcgtaatgtcccaatgacc

SEQ ID NO: 1920744 - DNA, 25 bp, Homo sapien
tgctgctggcggtaaaagcaaccca

SEQ ID NO: 1920745 - DNA, 25 bp, Homo sapien
ccttctcagtaagtacagtgtcaca

SEQ ID NO: 1920746 - DNA, 25 bp, Homo sapien
gaatataaagacactcactcggatg

SEQ ID NO: 1920747 - DNA, 25 bp, Homo sapien
ttcgctctcggacagaacagattgg

SEQ ID NO: 1920748 - DNA, 25 bp, Homo sapien
cagaacagattggtgccgtgttgca

SEQ ID NO: 1920749 - DNA, 25 bp, Homo sapien
gattggtgccgtgttgcacatccag

SEQ ID NO: 1920750 - DNA, 25 bp, Homo sapien
cgtgttgcacatccagaactccact

SEQ ID NO: 1920751 - DNA, 25 bp, Homo sapien
gaccttctctggattagattttcac

SEQ ID NO: 1920752 - DNA, 25 bp, Homo sapien
gcttttgatctatcttggctttcac

SEQ ID NO: 1920753 - DNA, 25 bp, Homo sapien
ctccctatcagcaattagtctattt

SEQ ID NO: 1920754 - DNA, 25 bp, Homo sapien
gaatagcatgctacgtttctttcaa

SEQ ID NO: 1920755 - DNA, 25 bp, Homo sapien
ggcatccacagggtaggaaagcccc

SEQ ID NO: 1920756 - DNA, 25 bp, Homo sapien
tcagtcagaagacatgtgattacat

SEQ ID NO: 1920757 - DNA, 25 bp, Homo sapien
taccagtaggagaagacaccaagac

SEQ ID NO: 1920758 - DNA, 25 bp, Homo sapien
tcgtgcagtgcttaacacatgcact

SEQ ID NO: 1920759 - DNA, 25 bp, Homo sapien
gatgctgatacttctcgtttaaaga

SEQ ID NO: 1920760 - DNA, 25 bp, Homo sapien
cagattcttcagaccactcagtctt

SEQ ID NO: 1920761 - DNA, 25 bp, Homo sapien
tcttcagaccactcagtcttaacag

SEQ ID NO: 1920762 - DNA, 25 bp, Homo sapien
gattcttcagaccactcagtcttaa

SEQ ID NO: 1920763 - DNA, 25 bp, Homo sapien
tcagattcttcagaccactcagtct

SEQ ID NO: 1920764 - DNA, 25 bp, Homo sapien
tgcatgaagaacactgaagcaccca

SEQ ID NO: 1920765 - DNA, 25 bp, Homo sapien
gacagggctatgcaggagaactttt

SEQ ID NO: 1920766 - DNA, 25 bp, Homo sapien
gcacccagaagatttcagtgtggcc

SEQ ID NO: 1920767 - DNA, 25 bp, Homo sapien
gaccagtctttatacaataagtagg

SEQ ID NO: 1920768 - DNA, 25 bp, Homo sapien
gcaaaggcaggtatgtccacacaga

SEQ ID NO: 1920769 - DNA, 25 bp, Homo sapien
caaaggcaggtatgtccacacagag

SEQ ID NO: 1920770 - DNA, 25 bp, Homo sapien
gccagcttccagcactttgcagcaa

SEQ ID NO: 1920771 - DNA, 25 bp, Homo sapien
aaaggcaggtatgtccacacagaga

SEQ ID NO: 1920772 - DNA, 25 bp, Homo sapien
tgtttttctgcatctagatggtctc

SEQ ID NO: 1920773 - DNA, 25 bp, Homo sapien
tttttctgcatctagatggtctcat

SEQ ID NO: 1920774 - DNA, 25 bp, Homo sapien
cctaatgtagtcagtgggagtcctg

SEQ ID NO: 1920775 - DNA, 25 bp, Homo sapien
taatgtagtcagtgggagtcctgag

SEQ ID NO: 1920776 - DNA, 25 bp, Homo sapien
tgctgaatgattttgcagaagaaca

SEQ ID NO: 1920777 - DNA, 25 bp, Homo sapien
gtaatactcttagcccaatttcctg

SEQ ID NO: 1920778 - DNA, 25 bp, Homo sapien
ggcatttgcacctgtatgtcgctca

SEQ ID NO: 1920779 - DNA, 25 bp, Homo sapien
tgtcgctcattgtccacttgcttga

SEQ ID NO: 1920780 - DNA, 25 bp, Homo sapien
cccagtgacagctggatctatcaca

SEQ ID NO: 1920781 - DNA, 25 bp, Homo sapien
cagtgacagctggatctatcacaaa

SEQ ID NO: 1920782 - DNA, 25 bp, Homo sapien
accttgttgataaagcccagtgaca

SEQ ID NO: 1920783 - DNA, 25 bp, Homo sapien
ccttgttgataaagcccagtgacag

SEQ ID NO: 1920784 - DNA, 25 bp, Homo sapien
tgaaacagcacaggcgctagtgtct

SEQ ID NO: 1920785 - DNA, 25 bp, Homo sapien
caaagtcctttccttcattgtccat

SEQ ID NO: 1920786 - DNA, 25 bp, Homo sapien
ttcaaagtcctttccttcattgtcc

SEQ ID NO: 1920787 - DNA, 25 bp, Homo sapien
tagagatgggagaatttcaaagtcc

SEQ ID NO: 1920788 - DNA, 25 bp, Homo sapien
gagatgggagaatttcaaagtcctt

SEQ ID NO: 1920789 - DNA, 25 bp, Homo sapien
gcagaggaagacgaacatagcttaa

SEQ ID NO: 1920790 - DNA, 25 bp, Homo sapien
ggtctctccagggatattcactata

SEQ ID NO: 1920791 - DNA, 25 bp, Homo sapien
tattcactatagtcccagaagggtc

SEQ ID NO: 1920792 - DNA, 25 bp, Homo sapien
cacagtcatgaggtctatgccaagc

SEQ ID NO: 1920793 - DNA, 25 bp, Homo sapien
ttccaggtaaactattgaaaggcca

SEQ ID NO: 1920794 - DNA, 25 bp, Homo sapien
tccaggtaaactattgaaaggccac

SEQ ID NO: 1920795 - DNA, 25 bp, Homo sapien
ccaggtaaactattgaaaggccaca

SEQ ID NO: 1920796 - DNA, 25 bp, Homo sapien
caggtaaactattgaaaggccacat

SEQ ID NO: 1920797 - DNA, 25 bp, Homo sapien
tcacagatagaattcccagttacca

SEQ ID NO: 1920798 - DNA, 25 bp, Homo sapien
tccctacagaggtgtaaatgccagc

SEQ ID NO: 1920799 - DNA, 25 bp, Homo sapien
ccagggacccctttgtatttgaatg

SEQ ID NO: 1920800 - DNA, 25 bp, Homo sapien
taaaaccggcagaaacttccatggc

SEQ ID NO: 1920801 - DNA, 25 bp, Homo sapien
caattctgcctaaaggtttgttgga

SEQ ID NO: 1920802 - DNA, 25 bp, Homo sapien
cagtgctgacttctctagcatgctc

SEQ ID NO: 1920803 - DNA, 25 bp, Homo sapien
gaaccgttgcaaggaacagacgaag

SEQ ID NO: 1920804 - DNA, 25 bp, Homo sapien
tttgttggagactgaaccgttgcaa

SEQ ID NO: 1920805 - DNA, 25 bp, Homo sapien
taacaccagactctttgttactgtg

SEQ ID NO: 1920806 - DNA, 25 bp, Homo sapien
ctaagagtttttgagcctgacttct

SEQ ID NO: 1920807 - DNA, 25 bp, Homo sapien
gagtttttgagcctgacttctggaa

SEQ ID NO: 1920808 - DNA, 25 bp, Homo sapien
cttctggaaataacaccagactctt

SEQ ID NO: 1920809 - DNA, 25 bp, Homo sapien
tatttctgggttcttcggagatgaa

SEQ ID NO: 1920810 - DNA, 25 bp, Homo sapien
gatgaagaagtaccgcatgctgcca

SEQ ID NO: 1920811 - DNA, 25 bp, Homo sapien
aagtgtatctttgcgatttttcttc

SEQ ID NO: 1920812 - DNA, 25 bp, Homo sapien
catgctgccaaaggtagcgtcgtga

SEQ ID NO: 1920813 - DNA, 25 bp, Homo sapien
ggctccatggctatgaggttgagaa

SEQ ID NO: 1920814 - DNA, 25 bp, Homo sapien
taatacacttatggggctccatggc

SEQ ID NO: 1920815 - DNA, 25 bp, Homo sapien
taaggtgttcaagcctctttctcct

SEQ ID NO: 1920816 - DNA, 25 bp, Homo sapien
aaaatttaatggcagctctgaatcc

SEQ ID NO: 1920817 - DNA, 25 bp, Homo sapien
ggcaagttcaaggaaggcttctagc

SEQ ID NO: 1920818 - DNA, 25 bp, Homo sapien
gtcaagtttgtgcaaggtctgccag

SEQ ID NO: 1920819 - DNA, 25 bp, Homo sapien
ccaggcctgagggtttcgtataaca

SEQ ID NO: 1920820 - DNA, 25 bp, Homo sapien
tcctcctgggactggaaatagagct

SEQ ID NO: 1920821 - DNA, 25 bp, Homo sapien
gagttagtgtgacctttcatgggtg

SEQ ID NO: 1920822 - DNA, 25 bp, Homo sapien
tttggatccattcctagggagttag

SEQ ID NO: 1920823 - DNA, 25 bp, Homo sapien
tcatgggtgttatagaaccctggtt

SEQ ID NO: 1920824 - DNA, 25 bp, Homo sapien
tctccttgagtagcacaattctgaa

SEQ ID NO: 1920825 - DNA, 25 bp, Homo sapien
gagctcttcatgactgtctccagca

SEQ ID NO: 1920826 - DNA, 25 bp, Homo sapien
gatgatggaccacttgaccatcaca

SEQ ID NO: 1920827 - DNA, 25 bp, Homo sapien
caactggtcataattcctgtctgtg

SEQ ID NO: 1920828 - DNA, 25 bp, Homo sapien
tgttattcaaatggcccctccagaa

SEQ ID NO: 1920829 - DNA, 25 bp, Homo sapien
tcaagatttataagtcagacaggga

SEQ ID NO: 1920830 - DNA, 25 bp, Homo sapien
gaagcagtctgcagtgaaattcaaa

SEQ ID NO: 1920831 - DNA, 25 bp, Homo sapien
gaagaaatcgggttgatatattccc

SEQ ID NO: 1920832 - DNA, 25 bp, Homo sapien
tatattccctacctgaggctcaatg

SEQ ID NO: 1920833 - DNA, 25 bp, Homo sapien
tcttttagtgcccaagttgtatcac

SEQ ID NO: 1920834 - DNA, 25 bp, Homo sapien
tagttcataaacaggcactgccacc

SEQ ID NO: 1920835 - DNA, 25 bp, Homo sapien
gtgttcatccatggcactttcatga

SEQ ID NO: 1920836 - DNA, 25 bp, Homo sapien
tttcatgaccgcttcctgttctgtg

SEQ ID NO: 1920837 - DNA, 25 bp, Homo sapien
taatgtttgttacaggagtgcagca

SEQ ID NO: 1920838 - DNA, 25 bp, Homo sapien
ggagtgcagcaatttagagagtgtc

SEQ ID NO: 1920839 - DNA, 25 bp, Homo sapien
ttgttacaggagtgcagcaatttag

SEQ ID NO: 1920840 - DNA, 25 bp, Homo sapien
aaaataatgtttgttacaggagtgc

SEQ ID NO: 1920841 - DNA, 25 bp, Homo sapien
gcagctgcagctatgttagtgcttc

SEQ ID NO: 1920842 - DNA, 25 bp, Homo sapien
actatctcagggtgattgaattttc

SEQ ID NO: 1920843 - DNA, 25 bp, Homo sapien
agttcagaaacaagctggactatct

SEQ ID NO: 1920844 - DNA, 25 bp, Homo sapien
tctttctgcctcaagttcagaaaca

SEQ ID NO: 1920845 - DNA, 25 bp, Homo sapien
tatgggaaaactcaggtgtgagagc

SEQ ID NO: 1920846 - DNA, 25 bp, Homo sapien
ccaaacctgcaattaagtaaggaga

SEQ ID NO: 1920847 - DNA, 25 bp, Homo sapien
agtgcctctaccaggaactatggga

SEQ ID NO: 1920848 - DNA, 25 bp, Homo sapien
ttccaaacctgcaattaagtaagga

SEQ ID NO: 1920849 - DNA, 25 bp, Homo sapien
ggctaggctggctcatgatgtaaac

SEQ ID NO: 1920850 - DNA, 25 bp, Homo sapien
ggctcatgatgtaaacaaggatgca

SEQ ID NO: 1920851 - DNA, 25 bp, Homo sapien
taggctggctcatgatgtaaacaag

SEQ ID NO: 1920852 - DNA, 25 bp, Homo sapien
gctggctcatgatgtaaacaaggat

SEQ ID NO: 1920853 - DNA, 25 bp, Homo sapien
gtcactacactgagtaagccaaact

SEQ ID NO: 1920854 - DNA, 25 bp, Homo sapien
taagccaaactaaaatggactcttg

SEQ ID NO: 1920855 - DNA, 25 bp, Homo sapien
aatattaacattagtcactacactg

SEQ ID NO: 1920856 - DNA, 25 bp, Homo sapien
tcttgttgaaaatggtgttgagtac

SEQ ID NO: 1920857 - DNA, 25 bp, Homo sapien
catttcacattggtctagctgcttc

SEQ ID NO: 1920858 - DNA, 25 bp, Homo sapien
catattcagatgcttgaagaatcat

SEQ ID NO: 1920859 - DNA, 25 bp, Homo sapien
cccaggtttgtgttcaaggtcttca

SEQ ID NO: 1920860 - DNA, 25 bp, Homo sapien
gctgtggaatcatagaagtcttgca

SEQ ID NO: 1920861 - DNA, 25 bp, Homo sapien
ttccaggagagggcccacatgagga

SEQ ID NO: 1920862 - DNA, 25 bp, Homo sapien
aggagagggcccacatgaggagaaa

SEQ ID NO: 1920863 - DNA, 25 bp, Homo sapien
tggggctgctttccaggagagggcc

SEQ ID NO: 1920864 - DNA, 25 bp, Homo sapien
ggggctgctttccaggagagggccc

SEQ ID NO: 1920865 - DNA, 25 bp, Homo sapien
acggcacagagtctctgaatcagtg

SEQ ID NO: 1920866 - DNA, 25 bp, Homo sapien
tgtttcgcagccttctggtaggaca

SEQ ID NO: 1920867 - DNA, 25 bp, Homo sapien
cgcagccttctggtaggacaggaga

SEQ ID NO: 1920868 - DNA, 25 bp, Homo sapien
ggcacagagtctctgaatcagtgtt

SEQ ID NO: 1920869 - DNA, 25 bp, Homo sapien
ctctggtaggagctgggttatctgc

SEQ ID NO: 1920870 - DNA, 25 bp, Homo sapien
ccaaagttcatagagctcctttctg

SEQ ID NO: 1920871 - DNA, 25 bp, Homo sapien
aagttcatagagctcctttctgagg

SEQ ID NO: 1920872 - DNA, 25 bp, Homo sapien
ttcccaaagttcatagagctccttt

SEQ ID NO: 1920873 - DNA, 25 bp, Homo sapien
tctttaattatattgacatttatca

SEQ ID NO: 1920874 - DNA, 25 bp, Homo sapien
ctttaattatattgacatttatcac

SEQ ID NO: 1920875 - DNA, 25 bp, Homo sapien
tttaattatattgacatttatcaca

SEQ ID NO: 1920876 - DNA, 25 bp, Homo sapien
atctttaattatattgacatttatc

SEQ ID NO: 1920877 - DNA, 25 bp, Homo sapien
tgcaacagacaaataggttcggatt

SEQ ID NO: 1920878 - DNA, 25 bp, Homo sapien
cagacaaataggttcggattcttac

SEQ ID NO: 1920879 - DNA, 25 bp, Homo sapien
caacagacaaataggttcggattct

SEQ ID NO: 1920880 - DNA, 25 bp, Homo sapien
ctgcaacagacaaataggttcggat

SEQ ID NO: 1920881 - DNA, 25 bp, Homo sapien
ggcttcgcttagcacctcttttgtg

SEQ ID NO: 1920882 - DNA, 25 bp, Homo sapien
gggcagcagagtaaattggcctata

SEQ ID NO: 1920883 - DNA, 25 bp, Homo sapien
gagtaaattggcctatactggacaa

SEQ ID NO: 1920884 - DNA, 25 bp, Homo sapien
aataagtgtaatcattcatatgggc

SEQ ID NO: 1920885 - DNA, 25 bp, Homo sapien
tacagaaatatcagaggtgttcaag

SEQ ID NO: 1920886 - DNA, 25 bp, Homo sapien
caaaacaaacctgagtggggagaat

SEQ ID NO: 1920887 - DNA, 25 bp, Homo sapien
caatcataagcatatgagagttcaa

SEQ ID NO: 1920888 - DNA, 25 bp, Homo sapien
gtggataaatcacaacatacccaca

SEQ ID NO: 1920889 - DNA, 25 bp, Homo sapien
tataattcaaaccaggcattcaggg

SEQ ID NO: 1920890 - DNA, 25 bp, Homo sapien
ttccccaccacaaggagaagcgttg

SEQ ID NO: 1920891 - DNA, 25 bp, Homo sapien
catttgtcaagcagaggctaggaga

SEQ ID NO: 1920892 - DNA, 25 bp, Homo sapien
tagggagcctagtacctcaagaggc

SEQ ID NO: 1920893 - DNA, 25 bp, Homo sapien
tccagggtacacagctgagtatgcc

SEQ ID NO: 1920894 - DNA, 25 bp, Homo sapien
caaaaatctgcctaaagtgccgagc

SEQ ID NO: 1920895 - DNA, 25 bp, Homo sapien
ttcctggcaagcgatgagccctgac

SEQ ID NO: 1920896 - DNA, 25 bp, Homo sapien
tatgtatgatctgaccaaggtggaa

SEQ ID NO: 1920897 - DNA, 25 bp, Homo sapien
tgtagccagcaagggcaaatgaggt

SEQ ID NO: 1920898 - DNA, 25 bp, Homo sapien
cctactttagtttagaggctcactg

SEQ ID NO: 1920899 - DNA, 25 bp, Homo sapien
ggttttgcattaacggattcaacca

SEQ ID NO: 1920900 - DNA, 25 bp, Homo sapien
cagccttccaggtttatcaagtata

SEQ ID NO: 1920901 - DNA, 25 bp, Homo sapien
tcagctcttgtagggacagtcgtag

SEQ ID NO: 1920902 - DNA, 25 bp, Homo sapien
tagggacagtcgtaggtcctcctca

SEQ ID NO: 1920903 - DNA, 25 bp, Homo sapien
tcttgtagggacagtcgtaggtcct

SEQ ID NO: 1920904 - DNA, 25 bp, Homo sapien
gacagtcgtaggtcctcctcacttc

SEQ ID NO: 1920905 - DNA, 25 bp, Homo sapien
agtctacaggtgtacagatcaaaat

SEQ ID NO: 1920906 - DNA, 25 bp, Homo sapien
tactgagcccgttagtctacaggtg

SEQ ID NO: 1920907 - DNA, 25 bp, Homo sapien
gctactgagcccgttagtctacagg

SEQ ID NO: 1920908 - DNA, 25 bp, Homo sapien
tagtctacaggtgtacagatcaaaa

SEQ ID NO: 1920909 - DNA, 25 bp, Homo sapien
gcttatttagcatggagaattccta

SEQ ID NO: 1920910 - DNA, 25 bp, Homo sapien
gggtttagagtccaaactgatgtta

SEQ ID NO: 1920911 - DNA, 25 bp, Homo sapien
aaacatatcttcctcgtttgccctg

SEQ ID NO: 1920912 - DNA, 25 bp, Homo sapien
tattggcttactatcagggtgacag

SEQ ID NO: 1920913 - DNA, 25 bp, Homo sapien
tatgtccccaacgatgcattctgcc

SEQ ID NO: 1920914 - DNA, 25 bp, Homo sapien
atgaaccagggctaggcgtacacat

SEQ ID NO: 1920915 - DNA, 25 bp, Homo sapien
cattctgccatatcatgaaccaggg

SEQ ID NO: 1920916 - DNA, 25 bp, Homo sapien
tgttatctgctggtgctatgtcccc

SEQ ID NO: 1920917 - DNA, 25 bp, Homo sapien
cggttaaggaatagtggttgtgata

SEQ ID NO: 1920918 - DNA, 25 bp, Homo sapien
aaaaacgagattacatttgacaact

SEQ ID NO: 1920919 - DNA, 25 bp, Homo sapien
cagtacaaggcccaacagtgtcctc

SEQ ID NO: 1920920 - DNA, 25 bp, Homo sapien
cagtatgttttaggctccccacact

SEQ ID NO: 1920921 - DNA, 25 bp, Homo sapien
gcaggctctatcacttgccaacaga

SEQ ID NO: 1920922 - DNA, 25 bp, Homo sapien
aagtttcccctgataccctaggcag

SEQ ID NO: 1920923 - DNA, 25 bp, Homo sapien
tctctcacgagcatcaaagtccagc

SEQ ID NO: 1920924 - DNA, 25 bp, Homo sapien
ggtgcacacccatagaccagaatct

SEQ ID NO: 1920925 - DNA, 25 bp, Homo sapien
tttgatcaccatagccataactgcc

SEQ ID NO: 1920926 - DNA, 25 bp, Homo sapien
catgtgatctgaaacgctctccggc

SEQ ID NO: 1920927 - DNA, 25 bp, Homo sapien
tgtatacccagccagttcgtgggac

SEQ ID NO: 1920928 - DNA, 25 bp, Homo sapien
cataactgccatccggtacatgtga

SEQ ID NO: 1920929 - DNA, 25 bp, Homo sapien
aacgcgcggccgcatccgcaggact

SEQ ID NO: 1920930 - DNA, 25 bp, Homo sapien
gcggcgccaggctctaggctcagac

SEQ ID NO: 1920931 - DNA, 25 bp, Homo sapien
cttcctccgtccaccgtcggcaacg

SEQ ID NO: 1920932 - DNA, 25 bp, Homo sapien
ggcgccaggctctaggctcagactc

SEQ ID NO: 1920933 - DNA, 25 bp, Homo sapien
actgcagtagggaccgagccccgtg

SEQ ID NO: 1920934 - DNA, 25 bp, Homo sapien
gaaggtcgcagaggagaccgaagcc

SEQ ID NO: 1920935 - DNA, 25 bp, Homo sapien
ccgcaggaactgcagtagggaccga

SEQ ID NO: 1920936 - DNA, 25 bp, Homo sapien
ggcccgagaaggtcgcagaggagac

SEQ ID NO: 1920937 - DNA, 25 bp, Homo sapien
ccggctgggcggagcaggccgcggc

SEQ ID NO: 1920938 - DNA, 25 bp, Homo sapien
cgaccccggctgggcggagcaggcc

SEQ ID NO: 1920939 - DNA, 25 bp, Homo sapien
ctgggcggagcaggccgcggcgaag

SEQ ID NO: 1920940 - DNA, 25 bp, Homo sapien
ggctgggcggagcaggccgcggcga

SEQ ID NO: 1920941 - DNA, 25 bp, Homo sapien
ttctatctctttctcctccccctct

SEQ ID NO: 1920942 - DNA, 25 bp, Homo sapien
tgcccctcttcctgctccccctctt

SEQ ID NO: 1920943 - DNA, 25 bp, Homo sapien
tcttctatctctttctcctccccct

SEQ ID NO: 1920944 - DNA, 25 bp, Homo sapien
tcttccttctgcccctcttcctgct

SEQ ID NO: 1920945 - DNA, 25 bp, Homo sapien
cactggaggaacacgaaagcaaatg

SEQ ID NO: 1920946 - DNA, 25 bp, Homo sapien
ggcaaagtcagacagtccactggag

SEQ ID NO: 1920947 - DNA, 25 bp, Homo sapien
aaatgaccaaaaagatccaggagaa

SEQ ID NO: 1920948 - DNA, 25 bp, Homo sapien
aagatgaggatgttggatttgctga

SEQ ID NO: 1920949 - DNA, 25 bp, Homo sapien
ttgccaacaatgcattgatttcctt

SEQ ID NO: 1920950 - DNA, 25 bp, Homo sapien
attcttttgcaagtttctggtgaga

SEQ ID NO: 1920951 - DNA, 25 bp, Homo sapien
gagagtgaccatcagaaagccagaa

SEQ ID NO: 1920952 - DNA, 25 bp, Homo sapien
tccattaagcagttcggtgaagcat

SEQ ID NO: 1920953 - DNA, 25 bp, Homo sapien
tctggtgagattggcgctcttcctg

SEQ ID NO: 1920954 - DNA, 25 bp, Homo sapien
gaagtatgttgactaccatcggctg

SEQ ID NO: 1920955 - DNA, 25 bp, Homo sapien
gcagcattatcctagcagccagtta

SEQ ID NO: 1920956 - DNA, 25 bp, Homo sapien
tacacatcttagcaccaggaattgg

SEQ ID NO: 1920957 - DNA, 25 bp, Homo sapien
tcctaaaatttggtgcgctgaaaca

SEQ ID NO: 1920958 - DNA, 25 bp, Homo sapien
tatgcaatggtcagagaaagtgtca

SEQ ID NO: 1920959 - DNA, 25 bp, Homo sapien
tatctagtggacacatgtgcttggt

SEQ ID NO: 1920960 - DNA, 25 bp, Homo sapien
tattctgagcatagaagccattgag

SEQ ID NO: 1920961 - DNA, 25 bp, Homo sapien
tgagggcccaatagtgtagggacat

SEQ ID NO: 1920962 - DNA, 25 bp, Homo sapien
taattgtttgcctaggtgttttgcc

SEQ ID NO: 1920963 - DNA, 25 bp, Homo sapien
tctattgtgtttcatctaagtggct

SEQ ID NO: 1920964 - DNA, 25 bp, Homo sapien
tgtccaatcagaataccttttagtc

SEQ ID NO: 1920965 - DNA, 25 bp, Homo sapien
tctagtttgtggagtcatctaattc

SEQ ID NO: 1920966 - DNA, 25 bp, Homo sapien
ggtgcaaacgtatcctgtgactggt

SEQ ID NO: 1920967 - DNA, 25 bp, Homo sapien
tcacagggagtacagagctgggtcc

SEQ ID NO: 1920968 - DNA, 25 bp, Homo sapien
tgtgaacccaagttccctgtatgga

SEQ ID NO: 1920969 - DNA, 25 bp, Homo sapien
cagcatggtgtactaggagcagaac

SEQ ID NO: 1920970 - DNA, 25 bp, Homo sapien
tatgatacagttgcagggaaacgaa

SEQ ID NO: 1920971 - DNA, 25 bp, Homo sapien
ggctgcaacattggacatgaagaca

SEQ ID NO: 1920972 - DNA, 25 bp, Homo sapien
ggctcttctaggcactaggctgcaa

SEQ ID NO: 1920973 - DNA, 25 bp, Homo sapien
agtcattgagcatcactgcactaga

SEQ ID NO: 1920974 - DNA, 25 bp, Homo sapien
atcaaggctttcagctttcctcggg

SEQ ID NO: 1920975 - DNA, 25 bp, Homo sapien
ggacaccttgggaggaatttctgcc

SEQ ID NO: 1920976 - DNA, 25 bp, Homo sapien
gagagtcggcaactcagacctgctg

SEQ ID NO: 1920977 - DNA, 25 bp, Homo sapien
tgcaaagccatcaaggctttcagct

SEQ ID NO: 1920978 - DNA, 25 bp, Homo sapien
ctgggggtgagagtgccggggcgga

SEQ ID NO: 1920979 - DNA, 25 bp, Homo sapien
ctcggctgcagcttccttgagagaa

SEQ ID NO: 1920980 - DNA, 25 bp, Homo sapien
caaactcaagggagccttgggggct

SEQ ID NO: 1920981 - DNA, 25 bp, Homo sapien
agagaaaacaaactcaagggagcct

SEQ ID NO: 1920982 - DNA, 25 bp, Homo sapien
gacgtagaggaactagatccagaga

SEQ ID NO: 1920983 - DNA, 25 bp, Homo sapien
cagagagtttctcatgggaatccgg

SEQ ID NO: 1920984 - DNA, 25 bp, Homo sapien
gggaatccgggatgcttcggcataa

SEQ ID NO: 1920985 - DNA, 25 bp, Homo sapien
actatatatggccagggaaatctcc

SEQ ID NO: 1920986 - DNA, 25 bp, Homo sapien
cttgtgacactctcagtagtggcat

SEQ ID NO: 1920987 - DNA, 25 bp, Homo sapien
tgtgttaacccattttgtactgctg

SEQ ID NO: 1920988 - DNA, 25 bp, Homo sapien
ttgtgttaacccattttgtactgct

SEQ ID NO: 1920989 - DNA, 25 bp, Homo sapien
agaacagagagccaaacttatcctt

SEQ ID NO: 1920990 - DNA, 25 bp, Homo sapien
ggcagtggagcaaactcttgggttc

SEQ ID NO: 1920991 - DNA, 25 bp, Homo sapien
tgccaaggcaagtgatatctaagac

SEQ ID NO: 1920992 - DNA, 25 bp, Homo sapien
ggatacttcaataccaccgagaatg

SEQ ID NO: 1920993 - DNA, 25 bp, Homo sapien
tctgtgaagtagaagtcccagttct

SEQ ID NO: 1920994 - DNA, 25 bp, Homo sapien
ccagttctgacatagcagtagagtc

SEQ ID NO: 1920995 - DNA, 25 bp, Homo sapien
ggcccaagtgtcaactgatgcatta

SEQ ID NO: 1920996 - DNA, 25 bp, Homo sapien
tgagtccgattttcatggaatagca

SEQ ID NO: 1920997 - DNA, 25 bp, Homo sapien
tgcccctggctttcattagtgccta

SEQ ID NO: 1920998 - DNA, 25 bp, Homo sapien
tttacttcacagatcagtgactaag

SEQ ID NO: 1920999 - DNA, 25 bp, Homo sapien
gatgataacgcctttgcagagcaga

SEQ ID NO: 1921000 - DNA, 25 bp, Homo sapien
ggaagccaacttccaacggcaggag

SEQ ID NO: 1921001 - DNA, 25 bp, Homo sapien
tgttctgaaaacgtgaccaggctct

SEQ ID NO: 1921002 - DNA, 25 bp, Homo sapien
gaaaggtctctgtcagacacagcgg

SEQ ID NO: 1921003 - DNA, 25 bp, Homo sapien
tctctgaaattaagatgcatcctcc

SEQ ID NO: 1921004 - DNA, 25 bp, Homo sapien
tgccggtgctccagattgctttcag

SEQ ID NO: 1921005 - DNA, 25 bp, Homo sapien
tgagaacgaaaaaatccccatttgc

SEQ ID NO: 1921006 - DNA, 25 bp, Homo sapien
tacgaggtacgtatctttactgcat

SEQ ID NO: 1921007 - DNA, 25 bp, Homo sapien
catgaaatcataagtcctccctcag

SEQ ID NO: 1921008 - DNA, 25 bp, Homo sapien
ggaatgaagaagttcatacactctg

SEQ ID NO: 1921009 - DNA, 25 bp, Homo sapien
tcatgaaatcataagtcctccctca

SEQ ID NO: 1921010 - DNA, 25 bp, Homo sapien
ttcatacactctgcatttaaatcca

SEQ ID NO: 1921011 - DNA, 25 bp, Homo sapien
ggctcagtttttcaggcaacaatca

SEQ ID NO: 1921012 - DNA, 25 bp, Homo sapien
ggcgatcttgccttccagggattca

SEQ ID NO: 1921013 - DNA, 25 bp, Homo sapien
tccacaagagaccagaatggcgatc

SEQ ID NO: 1921014 - DNA, 25 bp, Homo sapien
tgactgccgtgcatcagaagctgag

SEQ ID NO: 1921015 - DNA, 25 bp, Homo sapien
cagcctgttggccaatgatctcaga

SEQ ID NO: 1921016 - DNA, 25 bp, Homo sapien
gcagggccgctcacaatatggcatt

SEQ ID NO: 1921017 - DNA, 25 bp, Homo sapien
tctggcccgtgatatcttaacaagg

SEQ ID NO: 1921018 - DNA, 25 bp, Homo sapien
ggcattcagacctccctcagagtaa

SEQ ID NO: 1921019 - DNA, 25 bp, Homo sapien
ccagcacagagatagtggcaggttt

SEQ ID NO: 1921020 - DNA, 25 bp, Homo sapien
gcacagagatagtggcaggttttct

SEQ ID NO: 1921021 - DNA, 25 bp, Homo sapien
cagcacagagatagtggcaggtttt

SEQ ID NO: 1921022 - DNA, 25 bp, Homo sapien
cagagatagtggcaggttttcttca

SEQ ID NO: 1921023 - DNA, 25 bp, Homo sapien
tcaattaaaccatgggtcactggcc

SEQ ID NO: 1921024 - DNA, 25 bp, Homo sapien
caatgaatcattggcctagagagaa

SEQ ID NO: 1921025 - DNA, 25 bp, Homo sapien
gactgaaagctcagggtcaactgag

SEQ ID NO: 1921026 - DNA, 25 bp, Homo sapien
tacagtccgatcttcaccagtgata

SEQ ID NO: 1921027 - DNA, 25 bp, Homo sapien
ggttgaaagtgggaaagtgcctctg

SEQ ID NO: 1921028 - DNA, 25 bp, Homo sapien
tctcatgcagatgtccaaaaggctg

SEQ ID NO: 1921029 - DNA, 25 bp, Homo sapien
tctgctgctcaagactcctcatggc

SEQ ID NO: 1921030 - DNA, 25 bp, Homo sapien
cacatctgcaagctcagttgctgga

SEQ ID NO: 1921031 - DNA, 25 bp, Homo sapien
ctcttcgctcccgttgcaatcacat

SEQ ID NO: 1921032 - DNA, 25 bp, Homo sapien
tcccgttgcaatcacattcatccat

SEQ ID NO: 1921033 - DNA, 25 bp, Homo sapien
tcttcgctcccgttgcaatcacatt

SEQ ID NO: 1921034 - DNA, 25 bp, Homo sapien
tcgctcccgttgcaatcacattcat

SEQ ID NO: 1921035 - DNA, 25 bp, Homo sapien
tctgcagatctgcatggaacttggt

SEQ ID NO: 1921036 - DNA, 25 bp, Homo sapien
tgcatggaacttggtccttttagga

SEQ ID NO: 1921037 - DNA, 25 bp, Homo sapien
gaacttggtccttttaggactatga

SEQ ID NO: 1921038 - DNA, 25 bp, Homo sapien
ttctgcagatctgcatggaacttgg

SEQ ID NO: 1921039 - DNA, 25 bp, Homo sapien
actttttgtatccatagatatttgg

SEQ ID NO: 1921040 - DNA, 25 bp, Homo sapien
gaacagtagatcttgtcatgctgaa

SEQ ID NO: 1921041 - DNA, 25 bp, Homo sapien
gtagatcttgtcatgctgaactttt

SEQ ID NO: 1921042 - DNA, 25 bp, Homo sapien
cagtagatcttgtcatgctgaactt

SEQ ID NO: 1921043 - DNA, 25 bp, Homo sapien
taacctactgcatcatgtctcatcc

SEQ ID NO: 1921044 - DNA, 25 bp, Homo sapien
gtcctgccctaacttggaaactctg

SEQ ID NO: 1921045 - DNA, 25 bp, Homo sapien
gtctcatccagtcgctgatacagag

SEQ ID NO: 1921046 - DNA, 25 bp, Homo sapien
tcgctgatacagagtcctgccctaa

SEQ ID NO: 1921047 - DNA, 25 bp, Homo sapien
gaggcctcgggcatatccagtgggt

SEQ ID NO: 1921048 - DNA, 25 bp, Homo sapien
catatccagtgggtaccgtgcgctg

SEQ ID NO: 1921049 - DNA, 25 bp, Homo sapien
tagcaggcccatatgcagttcctgt

SEQ ID NO: 1921050 - DNA, 25 bp, Homo sapien
cattttgacacaagtagcaggccca

SEQ ID NO: 1921051 - DNA, 25 bp, Homo sapien
tctggatgcgttcagatattccctc

SEQ ID NO: 1921052 - DNA, 25 bp, Homo sapien
atgaagtcctttagctaccgccggg

SEQ ID NO: 1921053 - DNA, 25 bp, Homo sapien
gatgccccttatgactaaacccagg

SEQ ID NO: 1921054 - DNA, 25 bp, Homo sapien
agtgtggattttaaggctcatctcc

SEQ ID NO: 1921055 - DNA, 25 bp, Homo sapien
gatttcatgacattcagcaaccccc

SEQ ID NO: 1921056 - DNA, 25 bp, Homo sapien
ccatccagagagtcaacttgtagtc

SEQ ID NO: 1921057 - DNA, 25 bp, Homo sapien
tcttccaagtggatgttagcaacca

SEQ ID NO: 1921058 - DNA, 25 bp, Homo sapien
tgtagtcatcttccaagtggatgtt

SEQ ID NO: 1921059 - DNA, 25 bp, Homo sapien
aggcattcccaattctcgagtggtt

SEQ ID NO: 1921060 - DNA, 25 bp, Homo sapien
gtgacagttgcctataggcattccc

SEQ ID NO: 1921061 - DNA, 25 bp, Homo sapien
tggcagcggctctttgtgacagttg

SEQ ID NO: 1921062 - DNA, 25 bp, Homo sapien
ttccaccactgagcggtcttggcag

SEQ ID NO: 1921063 - DNA, 25 bp, Homo sapien
gtgcttcacttaggtgagtacttct

SEQ ID NO: 1921064 - DNA, 25 bp, Homo sapien
ctttgtgcttcacttaggtgagtac

SEQ ID NO: 1921065 - DNA, 25 bp, Homo sapien
gctctgcaggcccacaggaatctgc

SEQ ID NO: 1921066 - DNA, 25 bp, Homo sapien
agctctgcaggcccacaggaatctg

SEQ ID NO: 1921067 - DNA, 25 bp, Homo sapien
tcagttggcatgagttgacgtttca

SEQ ID NO: 1921068 - DNA, 25 bp, Homo sapien
gccccacgtgtggatgatggaaatt

SEQ ID NO: 1921069 - DNA, 25 bp, Homo sapien
gatggaaattgtcccgtcagttggc

SEQ ID NO: 1921070 - DNA, 25 bp, Homo sapien
tgtcccgtcagttggcatgagttga

SEQ ID NO: 1921071 - DNA, 25 bp, Homo sapien
gtcaaagaaaggtcagaaggaggag

SEQ ID NO: 1921072 - DNA, 25 bp, Homo sapien
agaaggagcagcttggggctgcttt

SEQ ID NO: 1921073 - DNA, 25 bp, Homo sapien
ctgtcaaagaaaggtcagaaggagg

SEQ ID NO: 1921074 - DNA, 25 bp, Homo sapien
gagaaggagcagcttggggctgctt

SEQ ID NO: 1921075 - DNA, 25 bp, Homo sapien
gcagttctaccatcttccagatgag

SEQ ID NO: 1921076 - DNA, 25 bp, Homo sapien
tctttcctatgcaacaactccaagg

SEQ ID NO: 1921077 - DNA, 25 bp, Homo sapien
tccaaggtcaacatttcaggccatg

SEQ ID NO: 1921078 - DNA, 25 bp, Homo sapien
ctccaaggtcactctagtcttcaca

SEQ ID NO: 1921079 - DNA, 25 bp, Homo sapien
tatgacagtgaggttgcttcactca

SEQ ID NO: 1921080 - DNA, 25 bp, Homo sapien
caagagtgctgggagactgcaaacg

SEQ ID NO: 1921081 - DNA, 25 bp, Homo sapien
gcaaacgttctcatgcaaccagtga

SEQ ID NO: 1921082 - DNA, 25 bp, Homo sapien
ggctgtgctcagtataactttagga

SEQ ID NO: 1921083 - DNA, 25 bp, Homo sapien
ctgagatgccgggatcttgttctcc

SEQ ID NO: 1921084 - DNA, 25 bp, Homo sapien
ggcactgagatgccgggatcttgtt

SEQ ID NO: 1921085 - DNA, 25 bp, Homo sapien
gggatcttgttctccaagtgcctgc

SEQ ID NO: 1921086 - DNA, 25 bp, Homo sapien
gatgccgggatcttgttctccaagt

SEQ ID NO: 1921087 - DNA, 25 bp, Homo sapien
ggtttctccacatcgtgataccagg

SEQ ID NO: 1921088 - DNA, 25 bp, Homo sapien
acatcgtgataccaggtgaatttag

SEQ ID NO: 1921089 - DNA, 25 bp, Homo sapien
tccacatcgtgataccaggtgaatt

SEQ ID NO: 1921090 - DNA, 25 bp, Homo sapien
tttctccacatcgtgataccaggtg

SEQ ID NO: 1921091 - DNA, 25 bp, Homo sapien
cttttgaagttatttctatcagtat

SEQ ID NO: 1921092 - DNA, 25 bp, Homo sapien
cagcttttgaagttatttctatcag

SEQ ID NO: 1921093 - DNA, 25 bp, Homo sapien
gcttttgaagttatttctatcagta

SEQ ID NO: 1921094 - DNA, 25 bp, Homo sapien
agcttttgaagttatttctatcagt

SEQ ID NO: 1921095 - DNA, 25 bp, Homo sapien
gtgaggagcctgaggaattcctcag

SEQ ID NO: 1921096 - DNA, 25 bp, Homo sapien
ttatgctgtgaggagcctgaggaat

SEQ ID NO: 1921097 - DNA, 25 bp, Homo sapien
gaggagcctgaggaattcctcagag

SEQ ID NO: 1921098 - DNA, 25 bp, Homo sapien
ggagcctgaggaattcctcagagac

SEQ ID NO: 1921099 - DNA, 25 bp, Homo sapien
gttgagttgagcagttccacttttg

SEQ ID NO: 1921100 - DNA, 25 bp, Homo sapien
ggttgagttgagcagttccactttt

SEQ ID NO: 1921101 - DNA, 25 bp, Homo sapien
agttgagcagttccacttttgatct

SEQ ID NO: 1921102 - DNA, 25 bp, Homo sapien
cataaggttttatttgaagaaagat

SEQ ID NO: 1921103 - DNA, 25 bp, Homo sapien
aggttttatttgaagaaagatccat

SEQ ID NO: 1921104 - DNA, 25 bp, Homo sapien
aacaatagaagtgagcacacccaca

SEQ ID NO: 1921105 - DNA, 25 bp, Homo sapien
tgctcattctaacaatgtccatggc

SEQ ID NO: 1921106 - DNA, 25 bp, Homo sapien
ctgagactcatgtgtttccttttgc

SEQ ID NO: 1921107 - DNA, 25 bp, Homo sapien
gccatagccttgctctttacaggaa

SEQ ID NO: 1921108 - DNA, 25 bp, Homo sapien
ttgagatattagtgtgagcaccagc

SEQ ID NO: 1921109 - DNA, 25 bp, Homo sapien
tgtttccaggaaagaaatgctagtg

SEQ ID NO: 1921110 - DNA, 25 bp, Homo sapien
catgtatggtgaaaacctttaagga

SEQ ID NO: 1921111 - DNA, 25 bp, Homo sapien
ttaagtacatactcaagaagggtca

SEQ ID NO: 1921112 - DNA, 25 bp, Homo sapien
tcaacagagtctatagtacctcaag

SEQ ID NO: 1921113 - DNA, 25 bp, Homo sapien
aaattcacaccctaatatactggag

SEQ ID NO: 1921114 - DNA, 25 bp, Homo sapien
catctaagatggtatggaactttta

SEQ ID NO: 1921115 - DNA, 25 bp, Homo sapien
aacagaccactgaaactgttttggt

SEQ ID NO: 1921116 - DNA, 25 bp, Homo sapien
tcacaaagaaacttgcggggcagtt

SEQ ID NO: 1921117 - DNA, 25 bp, Homo sapien
gcactgaagcggttaacttttagga

SEQ ID NO: 1921118 - DNA, 25 bp, Homo sapien
ccaccagcactgaagcggttaactt

SEQ ID NO: 1921119 - DNA, 25 bp, Homo sapien
accagcactgaagcggttaactttt

SEQ ID NO: 1921120 - DNA, 25 bp, Homo sapien
caagatgaaggcctgagactttcgt

SEQ ID NO: 1921121 - DNA, 25 bp, Homo sapien
cactcttgttcgtatgatcctgtgt

SEQ ID NO: 1921122 - DNA, 25 bp, Homo sapien
tgagactttcgtccctcatagctgt

SEQ ID NO: 1921123 - DNA, 25 bp, Homo sapien
gtgttcacttgaacttggaccaaga

SEQ ID NO: 1921124 - DNA, 25 bp, Homo sapien
aactatgaggctctgaggtcagctt

SEQ ID NO: 1921125 - DNA, 25 bp, Homo sapien
catgagggagctgttagagccctgg

SEQ ID NO: 1921126 - DNA, 25 bp, Homo sapien
agggagctgttagagccctggagtc

SEQ ID NO: 1921127 - DNA, 25 bp, Homo sapien
tgagggagctgttagagccctggag

SEQ ID NO: 1921128 - DNA, 25 bp, Homo sapien
gctggacttgacagggtttattata

SEQ ID NO: 1921129 - DNA, 25 bp, Homo sapien
cttgacagggtttattatagaagaa

SEQ ID NO: 1921130 - DNA, 25 bp, Homo sapien
gacttgacagggtttattatagaag

SEQ ID NO: 1921131 - DNA, 25 bp, Homo sapien
ggacttgacagggtttattatagaa

SEQ ID NO: 1921132 - DNA, 25 bp, Homo sapien
gattaggtaacaatcagatgactcc

SEQ ID NO: 1921133 - DNA, 25 bp, Homo sapien
tgaccagaggcaaggtattgaccac

SEQ ID NO: 1921134 - DNA, 25 bp, Homo sapien
ctacattgcaggtggtttatgagca

SEQ ID NO: 1921135 - DNA, 25 bp, Homo sapien
actccagttcaagtccaggatcagg

SEQ ID NO: 1921136 - DNA, 25 bp, Homo sapien
tggccagagagtgcaataaagacct

SEQ ID NO: 1921137 - DNA, 25 bp, Homo sapien
tgagtacaccccaaaggccaaaatc

SEQ ID NO: 1921138 - DNA, 25 bp, Homo sapien
acgaggcatcaagggaggacggtct

SEQ ID NO: 1921139 - DNA, 25 bp, Homo sapien
tgggattatcacaagtgcacgaggc

SEQ ID NO: 1921140 - DNA, 25 bp, Homo sapien
tattgcctattctgtgacccctctc

SEQ ID NO: 1921141 - DNA, 25 bp, Homo sapien
tcaccacagggcgagtaagaagagg

SEQ ID NO: 1921142 - DNA, 25 bp, Homo sapien
tgtccccaaagcttcagtgaaagct

SEQ ID NO: 1921143 - DNA, 25 bp, Homo sapien
gctgctgcatgacaaacccttgtag

SEQ ID NO: 1921144 - DNA, 25 bp, Homo sapien
ggttacttggcaatgacgagctgcc

SEQ ID NO: 1921145 - DNA, 25 bp, Homo sapien
cttcgaggaagcagtatggcacgct

SEQ ID NO: 1921146 - DNA, 25 bp, Homo sapien
ggatatctgcgctgcttcctgcaat

SEQ ID NO: 1921147 - DNA, 25 bp, Homo sapien
cacgctagagagtgggcagtttctc

SEQ ID NO: 1921148 - DNA, 25 bp, Homo sapien
gccatgcttcctcccgatgatcaag

SEQ ID NO: 1921149 - DNA, 25 bp, Homo sapien
tacgactgggtattatatgtgagca

SEQ ID NO: 1921150 - DNA, 25 bp, Homo sapien
gatcaagaagaattcctcctgccag

SEQ ID NO: 1921151 - DNA, 25 bp, Homo sapien
tgtgagcaataatcatattctttcc

SEQ ID NO: 1921152 - DNA, 25 bp, Homo sapien
catagttagaatacctccattagat

SEQ ID NO: 1921153 - DNA, 25 bp, Homo sapien
gaatacctccattagattccgcaaa

SEQ ID NO: 1921154 - DNA, 25 bp, Homo sapien
gcaaaataagcaagacgctccctgc

SEQ ID NO: 1921155 - DNA, 25 bp, Homo sapien
cattagattccgcaaaataagcaag

SEQ ID NO: 1921156 - DNA, 25 bp, Homo sapien
accagcaggccataaattgctttgc

SEQ ID NO: 1921157 - DNA, 25 bp, Homo sapien
tcccaccagcaggccataaattgct

SEQ ID NO: 1921158 - DNA, 25 bp, Homo sapien
ccaccagcaggccataaattgcttt

SEQ ID NO: 1921159 - DNA, 25 bp, Homo sapien
cagcaggccataaattgctttgctt

SEQ ID NO: 1921160 - DNA, 25 bp, Homo sapien
cctgttcaagaaccaataacaactt

SEQ ID NO: 1921161 - DNA, 25 bp, Homo sapien
cttggcaatgtatgattgtcacatt

SEQ ID NO: 1921162 - DNA, 25 bp, Homo sapien
taaatcattggcctgttcaagaacc

SEQ ID NO: 1921163 - DNA, 25 bp, Homo sapien
aagtggaattacttcaaataaatca

SEQ ID NO: 1921164 - DNA, 25 bp, Homo sapien
gggctggccaaggccagagcctact

SEQ ID NO: 1921165 - DNA, 25 bp, Homo sapien
ctggccaaggccagagcctactccc

SEQ ID NO: 1921166 - DNA, 25 bp, Homo sapien
cacagccgtcgctcgctctcggcgc

SEQ ID NO: 1921167 - DNA, 25 bp, Homo sapien
tcctcacagccgtcgctcgctctcg

SEQ ID NO: 1921168 - DNA, 25 bp, Homo sapien
gaacccaccaattccggacacacac

SEQ ID NO: 1921169 - DNA, 25 bp, Homo sapien
tttttctcccttccacgcatatctc

SEQ ID NO: 1921170 - DNA, 25 bp, Homo sapien
gcaaacaatggttctgaaccacaac

SEQ ID NO: 1921171 - DNA, 25 bp, Homo sapien
ccacacactgggatattcttaaatt

SEQ ID NO: 1921172 - DNA, 25 bp, Homo sapien
ggttctgaaccacaactgtcttctc

SEQ ID NO: 1921173 - DNA, 25 bp, Homo sapien
tttttgagatgtcttggcagagtag

SEQ ID NO: 1921174 - DNA, 25 bp, Homo sapien
tttgagatgtcttggcagagtagtc

SEQ ID NO: 1921175 - DNA, 25 bp, Homo sapien
ttgagatgtcttggcagagtagtct

SEQ ID NO: 1921176 - DNA, 25 bp, Homo sapien
gagatgtcttggcagagtagtcttc

SEQ ID NO: 1921177 - DNA, 25 bp, Homo sapien
attacattttgtagttgggcacatg

SEQ ID NO: 1921178 - DNA, 25 bp, Homo sapien
caattacattttgtagttgggcaca

SEQ ID NO: 1921179 - DNA, 25 bp, Homo sapien
ccaattacattttgtagttgggcac

SEQ ID NO: 1921180 - DNA, 25 bp, Homo sapien
tcccaattacattttgtagttgggc

SEQ ID NO: 1921181 - DNA, 25 bp, Homo sapien
gaagttttaatatagcatccttttc

SEQ ID NO: 1921182 - DNA, 25 bp, Homo sapien
taagaagttttaatatagcatcctt

SEQ ID NO: 1921183 - DNA, 25 bp, Homo sapien
aagaagttttaatatagcatccttt

SEQ ID NO: 1921184 - DNA, 25 bp, Homo sapien
agaagttttaatatagcatcctttt

SEQ ID NO: 1921185 - DNA, 25 bp, Homo sapien
ggtgctcagtgggggtgctttttga

SEQ ID NO: 1921186 - DNA, 25 bp, Homo sapien
aaggtgctcagtgggggtgcttttt

SEQ ID NO: 1921187 - DNA, 25 bp, Homo sapien
gtgggggtgctttttgagccaggat

SEQ ID NO: 1921188 - DNA, 25 bp, Homo sapien
ctcagtgggggtgctttttgagcca

SEQ ID NO: 1921189 - DNA, 25 bp, Homo sapien
aggggggttctctggcgggcaggag

SEQ ID NO: 1921190 - DNA, 25 bp, Homo sapien
gtgggggtgctttttgagccaggat

SEQ ID NO: 1921191 - DNA, 25 bp, Homo sapien
tcaaaggggggttctctggcgggca

SEQ ID NO: 1921192 - DNA, 25 bp, Homo sapien
ggtgctcagtgggggtgctttttga

SEQ ID NO: 1921193 - DNA, 25 bp, Homo sapien
tgttgatccctaatgaatatccggc

SEQ ID NO: 1921194 - DNA, 25 bp, Homo sapien
caggaaacttatggccaatggtagc

SEQ ID NO: 1921195 - DNA, 25 bp, Homo sapien
gactccagagctccctatcaagtgg

SEQ ID NO: 1921196 - DNA, 25 bp, Homo sapien
gatagtgacttctcccttggcccaa

SEQ ID NO: 1921197 - DNA, 25 bp, Homo sapien
tctgtgtcattagaccaatcaattg

SEQ ID NO: 1921198 - DNA, 25 bp, Homo sapien
tagatctgtgtcattagaccaatca

SEQ ID NO: 1921199 - DNA, 25 bp, Homo sapien
tcattagaccaatcaattgacctct

SEQ ID NO: 1921200 - DNA, 25 bp, Homo sapien
tagaccaatcaattgacctctctgt

SEQ ID NO: 1921201 - DNA, 25 bp, Homo sapien
gcaaaatcctgctagccagccttga

SEQ ID NO: 1921202 - DNA, 25 bp, Homo sapien
tattcaaggcacagtacactgccct

SEQ ID NO: 1921203 - DNA, 25 bp, Homo sapien
ttgacaagtaaatcctgcagcgctg

SEQ ID NO: 1921204 - DNA, 25 bp, Homo sapien
ccaaagagattgtgttgccctaatg

SEQ ID NO: 1921205 - DNA, 25 bp, Homo sapien
tatttgtagtctagtggaaaagaca

SEQ ID NO: 1921206 - DNA, 25 bp, Homo sapien
aaataatcagataagggcaaaaatg

SEQ ID NO: 1921207 - DNA, 25 bp, Homo sapien
ataatgccaaacaagcagatccagg

SEQ ID NO: 1921208 - DNA, 25 bp, Homo sapien
gatatttcagaaacctgtagagcct

SEQ ID NO: 1921209 - DNA, 25 bp, Homo sapien
gaacaaggcaagcatgaagttcttt

SEQ ID NO: 1921210 - DNA, 25 bp, Homo sapien
tataattaacagagacacatgagaa

SEQ ID NO: 1921211 - DNA, 25 bp, Homo sapien
tcaattaatcttgacagcttagtag

SEQ ID NO: 1921212 - DNA, 25 bp, Homo sapien
tacagctattagaagatatactatt

SEQ ID NO: 1921213 - DNA, 25 bp, Homo sapien
tgcacggttgcttacttctatttta

SEQ ID NO: 1921214 - DNA, 25 bp, Homo sapien
catagctttttaatgcacggttgct

SEQ ID NO: 1921215 - DNA, 25 bp, Homo sapien
accaggaagttccatgttgaactag

SEQ ID NO: 1921216 - DNA, 25 bp, Homo sapien
ctaggtcttattcacagttaagtat

SEQ ID NO: 1921217 - DNA, 25 bp, Homo sapien
gccgcgaaagtagcctcaggagttg

SEQ ID NO: 1921218 - DNA, 25 bp, Homo sapien
ccagtcagcagtttggatccagaca

SEQ ID NO: 1921219 - DNA, 25 bp, Homo sapien
gcaaattggaaatcgtaacgtggcc

SEQ ID NO: 1921220 - DNA, 25 bp, Homo sapien
ttatatgaaacagccccgaggccgc

SEQ ID NO: 1921221 - DNA, 25 bp, Homo sapien
cttgcggcgggcattggcgagcgcg

SEQ ID NO: 1921222 - DNA, 25 bp, Homo sapien
gggcggaaggcctgggccggtgcgc

SEQ ID NO: 1921223 - DNA, 25 bp, Homo sapien
aatcgcgagccacgccgaccagcga

SEQ ID NO: 1921224 - DNA, 25 bp, Homo sapien
ctggcccagccaatcgcgagccacg

SEQ ID NO: 1921225 - DNA, 25 bp, Homo sapien
aagttgcgcggtacctgagctccgt

SEQ ID NO: 1921226 - DNA, 25 bp, Homo sapien
gccacgtttgcccatgcggattcag

SEQ ID NO: 1921227 - DNA, 25 bp, Homo sapien
gagagtgcctaacagaagttgcgcg

SEQ ID NO: 1921228 - DNA, 25 bp, Homo sapien
tggactcctcggatccgctgcgggt

SEQ ID NO: 1921229 - DNA, 25 bp, Homo sapien
gggccgcggcggtgagagcgccgaa

SEQ ID NO: 1921230 - DNA, 25 bp, Homo sapien
gccgcggcggtgagagcgccgaatc

SEQ ID NO: 1921231 - DNA, 25 bp, Homo sapien
atcgaacccgggccgcggcggtgag

SEQ ID NO: 1921232 - DNA, 25 bp, Homo sapien
cccgggccgcggcggtgagagcgcc

SEQ ID NO: 1921233 - DNA, 25 bp, Homo sapien
cctgtgcttgaatctcgtttctttt

SEQ ID NO: 1921234 - DNA, 25 bp, Homo sapien
gatggagtttaaatcattgatatac

SEQ ID NO: 1921235 - DNA, 25 bp, Homo sapien
ttaccacaaaattaggtgagcctgt

SEQ ID NO: 1921236 - DNA, 25 bp, Homo sapien
atccgccgccactgtgacttgcagt

SEQ ID NO: 1921237 - DNA, 25 bp, Homo sapien
gtatctcccagaaataatctatgca

SEQ ID NO: 1921238 - DNA, 25 bp, Homo sapien
cacatacaacacatatctggttcat

SEQ ID NO: 1921239 - DNA, 25 bp, Homo sapien
ttcttcccagaagtaaccagtgtta

SEQ ID NO: 1921240 - DNA, 25 bp, Homo sapien
tcttctgtatctcccagaaataatc

SEQ ID NO: 1921241 - DNA, 25 bp, Homo sapien
gagggaacagcacccaactggggat

SEQ ID NO: 1921242 - DNA, 25 bp, Homo sapien
gtcatgggaccgcagagggaacagc

SEQ ID NO: 1921243 - DNA, 25 bp, Homo sapien
catgttgcagtgctggtcatgggac

SEQ ID NO: 1921244 - DNA, 25 bp, Homo sapien
tcatgttgcagtgctggtcatggga

SEQ ID NO: 1921245 - DNA, 25 bp, Homo sapien
tggtgggcccctctgttaaacgcaa

SEQ ID NO: 1921246 - DNA, 25 bp, Homo sapien
ggagggcccaactgctatgttctta

SEQ ID NO: 1921247 - DNA, 25 bp, Homo sapien
aaggttctctcgagtctctgccaag

SEQ ID NO: 1921248 - DNA, 25 bp, Homo sapien
tgaatttattgtggccatcggtcct

SEQ ID NO: 1921249 - DNA, 25 bp, Homo sapien
ggaggatgccgcaactgcagtccga

SEQ ID NO: 1921250 - DNA, 25 bp, Homo sapien
gtctgcacagcgtcgcgccacccgt

SEQ ID NO: 1921251 - DNA, 25 bp, Homo sapien
cgcaaccgctgtgaggcgcagcgcg

SEQ ID NO: 1921252 - DNA, 25 bp, Homo sapien
agcgcgcgccactggccgggaggag

SEQ ID NO: 1921253 - DNA, 25 bp, Homo sapien
gtggcaactttgatacaggtgtcgg

SEQ ID NO: 1921254 - DNA, 25 bp, Homo sapien
agtggcaactttgatacaggtgtcg

SEQ ID NO: 1921255 - DNA, 25 bp, Homo sapien
tggcaactttgatacaggtgtcggg

SEQ ID NO: 1921256 - DNA, 25 bp, Homo sapien
ggcaactttgatacaggtgtcggga

SEQ ID NO: 1921257 - DNA, 25 bp, Homo sapien
tggaccctgagagattcatctcctg

SEQ ID NO: 1921258 - DNA, 25 bp, Homo sapien
gtctgtatccctccttgtcatgcat

SEQ ID NO: 1921259 - DNA, 25 bp, Homo sapien
tcatctcctgtctgtatccctcctt

SEQ ID NO: 1921260 - DNA, 25 bp, Homo sapien
cctggtctcttggaccctgagagat

SEQ ID NO: 1921261 - DNA, 25 bp, Homo sapien
gaccctgatagatgacatgagccat

SEQ ID NO: 1921262 - DNA, 25 bp, Homo sapien
gatatggagggccacctgtgcatgt

SEQ ID NO: 1921263 - DNA, 25 bp, Homo sapien
gtacataaagggacgaaagcctcca

SEQ ID NO: 1921264 - DNA, 25 bp, Homo sapien
gattagccaggcaaaaagggtactc

SEQ ID NO: 1921265 - DNA, 25 bp, Homo sapien
ttggcactcgtgattcttctctgag

SEQ ID NO: 1921266 - DNA, 25 bp, Homo sapien
taatactgacttcatggcatcaaag

SEQ ID NO: 1921267 - DNA, 25 bp, Homo sapien
caaaacaggaacttaagatggccaa

SEQ ID NO: 1921268 - DNA, 25 bp, Homo sapien
tgtgtttagctcacgaagggtaggc

SEQ ID NO: 1921269 - DNA, 25 bp, Homo sapien
ggagcagtatcctattgcaacagtg

SEQ ID NO: 1921270 - DNA, 25 bp, Homo sapien
gggagccatgacaaagtaccagaag

SEQ ID NO: 1921271 - DNA, 25 bp, Homo sapien
cagcggtatagctccaagtgtggcc

SEQ ID NO: 1921272 - DNA, 25 bp, Homo sapien
tggagttccttagcttgcagcggta

SEQ ID NO: 1921273 - DNA, 25 bp, Homo sapien
aaggttaagccggatgccaaagctg

SEQ ID NO: 1921274 - DNA, 25 bp, Homo sapien
ggttgactgtggtttagctactcct

SEQ ID NO: 1921275 - DNA, 25 bp, Homo sapien
aagctgaggttcaagttcgggttct

SEQ ID NO: 1921276 - DNA, 25 bp, Homo sapien
gttcaagttcgggttctgttccaca

SEQ ID NO: 1921277 - DNA, 25 bp, Homo sapien
gattgagttctgtaccagtctagag

SEQ ID NO: 1921278 - DNA, 25 bp, Homo sapien
cagtctagagactccagaagtttgc

SEQ ID NO: 1921279 - DNA, 25 bp, Homo sapien
tctttggaccggagctagaatatgt

SEQ ID NO: 1921280 - DNA, 25 bp, Homo sapien
cacattggcacatattctctgcaag

SEQ ID NO: 1921281 - DNA, 25 bp, Homo sapien
attccccgaacaccacacattcctg

SEQ ID NO: 1921282 - DNA, 25 bp, Homo sapien
aggattccccgaacaccacacattc

SEQ ID NO: 1921283 - DNA, 25 bp, Homo sapien
gattccccgaacaccacacattcct

SEQ ID NO: 1921284 - DNA, 25 bp, Homo sapien
tcaggattccccgaacaccacacat

SEQ ID NO: 1921285 - DNA, 25 bp, Homo sapien
cagtctggtgtacactccagtgtct

SEQ ID NO: 1921286 - DNA, 25 bp, Homo sapien
cactagctgtggtacggcagttatt

SEQ ID NO: 1921287 - DNA, 25 bp, Homo sapien
cagttatttaaatccagtctggtgt

SEQ ID NO: 1921288 - DNA, 25 bp, Homo sapien
ctgacaggctgagaggtattaatta

SEQ ID NO: 1921289 - DNA, 25 bp, Homo sapien
ctgcctagttttgggtgctcctccc

SEQ ID NO: 1921290 - DNA, 25 bp, Homo sapien
gtaacccacgcagttcctgaagcag

SEQ ID NO: 1921291 - DNA, 25 bp, Homo sapien
gctcctccctcaattagtttgactg

SEQ ID NO: 1921292 - DNA, 25 bp, Homo sapien
tagatcttcggtgccgtaacccacg

SEQ ID NO: 1921293 - DNA, 25 bp, Homo sapien
tgtagtaaaggtaactgccggttca

SEQ ID NO: 1921294 - DNA, 25 bp, Homo sapien
tcagcctgaatccaaagtgattcct

SEQ ID NO: 1921295 - DNA, 25 bp, Homo sapien
ggttcatgaacaacctgctcaatgt

SEQ ID NO: 1921296 - DNA, 25 bp, Homo sapien
cctgctcaatgttaacctcttcttg

SEQ ID NO: 1921297 - DNA, 25 bp, Homo sapien
gtttagctcttacaatgcagtggaa

SEQ ID NO: 1921298 - DNA, 25 bp, Homo sapien
tagctcttacaatgcagtggaagcc

SEQ ID NO: 1921299 - DNA, 25 bp, Homo sapien
ctcttacaatgcagtggaagccaga

SEQ ID NO: 1921300 - DNA, 25 bp, Homo sapien
gtagtttagctcttacaatgcagtg

SEQ ID NO: 1921301 - DNA, 25 bp, Homo sapien
cgtacttaagggcagtccaagcaag

SEQ ID NO: 1921302 - DNA, 25 bp, Homo sapien
ctctggagcagcgtacttaagggca

SEQ ID NO: 1921303 - DNA, 25 bp, Homo sapien
gagcagcgtacttaagggcagtcca

SEQ ID NO: 1921304 - DNA, 25 bp, Homo sapien
cttaagggcagtccaagcaagatct

SEQ ID NO: 1921305 - DNA, 25 bp, Homo sapien
ccctctgataaggtgtgagagcctg

SEQ ID NO: 1921306 - DNA, 25 bp, Homo sapien
tattccctggttgtcatgaaaagca

SEQ ID NO: 1921307 - DNA, 25 bp, Homo sapien
gactgggtgttcatgtaggtccctt

SEQ ID NO: 1921308 - DNA, 25 bp, Homo sapien
taatatagacgaagacacagactgg

SEQ ID NO: 1921309 - DNA, 25 bp, Homo sapien
caaagatactttgctataagcacag

SEQ ID NO: 1921310 - DNA, 25 bp, Homo sapien
gaagaaggaacacttaacgacaatc

SEQ ID NO: 1921311 - DNA, 25 bp, Homo sapien
ttgctataagcacagttagttaggt

SEQ ID NO: 1921312 - DNA, 25 bp, Homo sapien
ccaaattggaaccatatcatttccc

SEQ ID NO: 1921313 - DNA, 25 bp, Homo sapien
acttgagtggcttgatgaaccgtca

SEQ ID NO: 1921314 - DNA, 25 bp, Homo sapien
cacttgagtggcttgatgaaccgtc

SEQ ID NO: 1921315 - DNA, 25 bp, Homo sapien
cttgagtggcttgatgaaccgtcat

SEQ ID NO: 1921316 - DNA, 25 bp, Homo sapien
gaggaaccgctggatctctcagcca

SEQ ID NO: 1921317 - DNA, 25 bp, Homo sapien
tacagtgaaactcagcaccaagctt

SEQ ID NO: 1921318 - DNA, 25 bp, Homo sapien
aagtgctgctacaaagtggatgttc

SEQ ID NO: 1921319 - DNA, 25 bp, Homo sapien
aagtggatgttctttggcaggacac

SEQ ID NO: 1921320 - DNA, 25 bp, Homo sapien
tctgtgggacatcgccacactgttg

SEQ ID NO: 1921321 - DNA, 25 bp, Homo sapien
tttcaggtctgtgggacatcgccac

SEQ ID NO: 1921322 - DNA, 25 bp, Homo sapien
gggacatcgccacactgttgtgtca

SEQ ID NO: 1921323 - DNA, 25 bp, Homo sapien
catcgccacactgttgtgtcacagc

SEQ ID NO: 1921324 - DNA, 25 bp, Homo sapien
gtctccagacctcctttctcccctg

SEQ ID NO: 1921325 - DNA, 25 bp, Homo sapien
ccagacctcctttctcccctgccat

SEQ ID NO: 1921326 - DNA, 25 bp, Homo sapien
tccagacctcctttctcccctgcca

SEQ ID NO: 1921327 - DNA, 25 bp, Homo sapien
tctccagacctcctttctcccctgc

SEQ ID NO: 1921328 - DNA, 25 bp, Homo sapien
tgaaacctgataggtggcagccatc

SEQ ID NO: 1921329 - DNA, 25 bp, Homo sapien
taagagctctgttgtaagtcccagg

SEQ ID NO: 1921330 - DNA, 25 bp, Homo sapien
cagccatcagagaggataggtggta

SEQ ID NO: 1921331 - DNA, 25 bp, Homo sapien
tagcctcagactccacagatttaag

SEQ ID NO: 1921332 - DNA, 25 bp, Homo sapien
gtgatgaatctgatatgaagaaggc

SEQ ID NO: 1921333 - DNA, 25 bp, Homo sapien
ctgagactagggcttaggggaaggg

SEQ ID NO: 1921334 - DNA, 25 bp, Homo sapien
catttagtttaccatcaactctgtg

SEQ ID NO: 1921335 - DNA, 25 bp, Homo sapien
aaggggcacaccgaaggggcacaca

SEQ ID NO: 1921336 - DNA, 25 bp, Homo sapien
taataccacacacttgtgggtgagg

SEQ ID NO: 1921337 - DNA, 25 bp, Homo sapien
gagtgtgttgagagcccatatcctc

SEQ ID NO: 1921338 - DNA, 25 bp, Homo sapien
agatgacctaaccacccctcaatgg

SEQ ID NO: 1921339 - DNA, 25 bp, Homo sapien
cccatccatgagagtactgccaaga

SEQ ID NO: 1921340 - DNA, 25 bp, Homo sapien
tcttcccttcctatatctaagtaga

SEQ ID NO: 1921341 - DNA, 25 bp, Homo sapien
gagaattcacagatgtctgtacgga

SEQ ID NO: 1921342 - DNA, 25 bp, Homo sapien
gctccggtttgaaggacattatgta

SEQ ID NO: 1921343 - DNA, 25 bp, Homo sapien
ctgtacggattctgttttcaagcac

SEQ ID NO: 1921344 - DNA, 25 bp, Homo sapien
tctccaggaggcaatcacttaccta

SEQ ID NO: 1921345 - DNA, 25 bp, Homo sapien
tacagttcacccaattacagtgtaa

SEQ ID NO: 1921346 - DNA, 25 bp, Homo sapien
tccataaccattagtagttactccc

SEQ ID NO: 1921347 - DNA, 25 bp, Homo sapien
tagtttcttcacatagttgtgcaac

SEQ ID NO: 1921348 - DNA, 25 bp, Homo sapien
cgatcgggtaagcacttgggcagcc

SEQ ID NO: 1921349 - DNA, 25 bp, Homo sapien
tcagctggttgcctcagtgagccac

SEQ ID NO: 1921350 - DNA, 25 bp, Homo sapien
aatctgagacgtgcatgtgagaacc

SEQ ID NO: 1921351 - DNA, 25 bp, Homo sapien
tgtgatagaaccaggctcagctggt

SEQ ID NO: 1921352 - DNA, 25 bp, Homo sapien
cattagaatctggtccactcagccc

SEQ ID NO: 1921353 - DNA, 25 bp, Homo sapien
ggtttatgcaagtagattcccctgg

SEQ ID NO: 1921354 - DNA, 25 bp, Homo sapien
cagtaaagagggaaactagcccttg

SEQ ID NO: 1921355 - DNA, 25 bp, Homo sapien
catgggccctgaagtagtttccaaa

SEQ ID NO: 1921356 - DNA, 25 bp, Homo sapien
caagctaggtagagaaggtgaagaa

SEQ ID NO: 1921357 - DNA, 25 bp, Homo sapien
taacttgtttgactctaggatggaa

SEQ ID NO: 1921358 - DNA, 25 bp, Homo sapien
tttgttgcaggacttcttacaggct

SEQ ID NO: 1921359 - DNA, 25 bp, Homo sapien
tgtgtttgcaagttcctgcagaaca

SEQ ID NO: 1921360 - DNA, 25 bp, Homo sapien
tgactaagctcagcaaggaaccttc

SEQ ID NO: 1921361 - DNA, 25 bp, Homo sapien
tcaaactggtggtggaatgcacaaa

SEQ ID NO: 1921362 - DNA, 25 bp, Homo sapien
aaattatgacttcggattccagacc

SEQ ID NO: 1921363 - DNA, 25 bp, Homo sapien
tgacccagaggaacgaaagaaagct

SEQ ID NO: 1921364 - DNA, 25 bp, Homo sapien
tatttggtgcatacttcctggcagg

SEQ ID NO: 1921365 - DNA, 25 bp, Homo sapien
gaaaagctaaagcagtccttgaccc

SEQ ID NO: 1921366 - DNA, 25 bp, Homo sapien
tcaatgcagaggataccttacacat

SEQ ID NO: 1921367 - DNA, 25 bp, Homo sapien
ccttgacccctggtttggcagtgaa

SEQ ID NO: 1921368 - DNA, 25 bp, Homo sapien
tatgtactgaagtccacactagcac

SEQ ID NO: 1921369 - DNA, 25 bp, Homo sapien
ttatgtactgaagtccacactagca

SEQ ID NO: 1921370 - DNA, 25 bp, Homo sapien
taagctccttcgtggcatcagggct

SEQ ID NO: 1921371 - DNA, 25 bp, Homo sapien
ttctccagccaatgtgaacccagaa

SEQ ID NO: 1921372 - DNA, 25 bp, Homo sapien
agttttaagctccttcgtggcatca

SEQ ID NO: 1921373 - DNA, 25 bp, Homo sapien
cttctccagccaatgtgaacccaga

SEQ ID NO: 1921374 - DNA, 25 bp, Homo sapien
tgggttcgatcagccctcctaaagc

SEQ ID NO: 1921375 - DNA, 25 bp, Homo sapien
gaagacttcatagttcaggatctgg

SEQ ID NO: 1921376 - DNA, 25 bp, Homo sapien
ttctggaaggtccatgtagagggca

SEQ ID NO: 1921377 - DNA, 25 bp, Homo sapien
tataccacggacgaagcaactcttg

SEQ ID NO: 1921378 - DNA, 25 bp, Homo sapien
tagggtgataggtcttaagcagcat

SEQ ID NO: 1921379 - DNA, 25 bp, Homo sapien
ttgactattataggccagctttcca

SEQ ID NO: 1921380 - DNA, 25 bp, Homo sapien
tacttaccttgaacatattcgtgtg

SEQ ID NO: 1921381 - DNA, 25 bp, Homo sapien
tacattaacgagcaggcctctgtct

SEQ ID NO: 1921382 - DNA, 25 bp, Homo sapien
gcatactggcagtttcaccttaacc

SEQ ID NO: 1921383 - DNA, 25 bp, Homo sapien
gaacaaattgtccagtggcctcctg

SEQ ID NO: 1921384 - DNA, 25 bp, Homo sapien
ccaaagctgaaaaatggtctgtcat

SEQ ID NO: 1921385 - DNA, 25 bp, Homo sapien
tgggtgtacgtttcactcaagttct

SEQ ID NO: 1921386 - DNA, 25 bp, Homo sapien
tgttctacttcatcacctgttggct

SEQ ID NO: 1921387 - DNA, 25 bp, Homo sapien
tctttatatgtgaccatcgtttgca

SEQ ID NO: 1921388 - DNA, 25 bp, Homo sapien
aacattgagcgcaccaaggtcctgg

SEQ ID NO: 1921389 - DNA, 25 bp, Homo sapien
cctggtgctgaccacggacatctgc

SEQ ID NO: 1921390 - DNA, 25 bp, Homo sapien
ctctatcctcctggagttgtttact

SEQ ID NO: 1921391 - DNA, 25 bp, Homo sapien
cctcctggagttgtttactgcaaga

SEQ ID NO: 1921392 - DNA, 25 bp, Homo sapien
ccagcgagggcctctatcctcctgg

SEQ ID NO: 1921393 - DNA, 25 bp, Homo sapien
tggagttgtttactgcaagagacat

SEQ ID NO: 1921394 - DNA, 25 bp, Homo sapien
catgctacttgtggtgtactctacg

SEQ ID NO: 1921395 - DNA, 25 bp, Homo sapien
actgcgccgggccttttcaaatgtt

SEQ ID NO: 1921396 - DNA, 25 bp, Homo sapien
tctgtgacccaagcaggtataatgg

SEQ ID NO: 1921397 - DNA, 25 bp, Homo sapien
gacatgccatttagcctctccaaga

SEQ ID NO: 1921398 - DNA, 25 bp, Homo sapien
acaaattctgttaatcaacaagggc

SEQ ID NO: 1921399 - DNA, 25 bp, Homo sapien
attctgttaatcaacaagggctctg

SEQ ID NO: 1921400 - DNA, 25 bp, Homo sapien
tttgttactgacttgtttcaatggt

SEQ ID NO: 1921401 - DNA, 25 bp, Homo sapien
gtttcaatggttacttgtataagga

SEQ ID NO: 1921402 - DNA, 25 bp, Homo sapien
gaatatgactagcttcagggaagga

SEQ ID NO: 1921403 - DNA, 25 bp, Homo sapien
cagatgccttatggacctcttcaaa

SEQ ID NO: 1921404 - DNA, 25 bp, Homo sapien
aatgtggttagccaattgattcaac

SEQ ID NO: 1921405 - DNA, 25 bp, Homo sapien
gggttatgggctctcaaaagtagat

SEQ ID NO: 1921406 - DNA, 25 bp, Homo sapien
ttgagaatagggactgatttcagaa

SEQ ID NO: 1921407 - DNA, 25 bp, Homo sapien
tagacaatagaaagttgtcatggga

SEQ ID NO: 1921408 - DNA, 25 bp, Homo sapien
aatagggactgatttcagaaaggtg

SEQ ID NO: 1921409 - DNA, 25 bp, Homo sapien
gttgtcatgggactaaagatttgag

SEQ ID NO: 1921410 - DNA, 25 bp, Homo sapien
gccaggagctaaatgcattagccaa

SEQ ID NO: 1921411 - DNA, 25 bp, Homo sapien
ttcaactagttggtgtgccaggagc

SEQ ID NO: 1921412 - DNA, 25 bp, Homo sapien
tttaaaaacacgtgagagaggactg

SEQ ID NO: 1921413 - DNA, 25 bp, Homo sapien
ccaggcagagagaatagcactggaa

SEQ ID NO: 1921414 - DNA, 25 bp, Homo sapien
tagctgaggctgcttgaattaaggc

SEQ ID NO: 1921415 - DNA, 25 bp, Homo sapien
tacactgtggtaagagattgcccag

SEQ ID NO: 1921416 - DNA, 25 bp, Homo sapien
tagaaaccttcctgaccctgactga

SEQ ID NO: 1921417 - DNA, 25 bp, Homo sapien
gaattaaggcattgacaccacaaag

SEQ ID NO: 1921418 - DNA, 25 bp, Homo sapien
acggtgtaggcctgctgaagagcaa

SEQ ID NO: 1921419 - DNA, 25 bp, Homo sapien
aataaagattgtgggttgccagctc

SEQ ID NO: 1921420 - DNA, 25 bp, Homo sapien
catgtttgtccttatctccaaggca

SEQ ID NO: 1921421 - DNA, 25 bp, Homo sapien
gcttctccgctccaagacaaatgag

SEQ ID NO: 1921422 - DNA, 25 bp, Homo sapien
aggaaggacagcatggaatcctcta

SEQ ID NO: 1921423 - DNA, 25 bp, Homo sapien
acccattactaatgaggatgagagg

SEQ ID NO: 1921424 - DNA, 25 bp, Homo sapien
tatgccagccagcaaccactatgaa

SEQ ID NO: 1921425 - DNA, 25 bp, Homo sapien
ggcacatggcacttcactcatctaa

SEQ ID NO: 1921426 - DNA, 25 bp, Homo sapien
aatcatagtgtctggttgaatgaaa

SEQ ID NO: 1921427 - DNA, 25 bp, Homo sapien
ctgaggcattcattggcatggaact

SEQ ID NO: 1921428 - DNA, 25 bp, Homo sapien
catagtgtctggttgaatgaaatta

SEQ ID NO: 1921429 - DNA, 25 bp, Homo sapien
cattcattggcatggaactgcatgt

SEQ ID NO: 1921430 - DNA, 25 bp, Homo sapien
agcacggggacttttcctcttcatg

SEQ ID NO: 1921431 - DNA, 25 bp, Homo sapien
aagcacggggacttttcctcttcat

SEQ ID NO: 1921432 - DNA, 25 bp, Homo sapien
ttcaggcaactcagaccgagtgtag

SEQ ID NO: 1921433 - DNA, 25 bp, Homo sapien
gaatggctccatcactcagtgcgta

SEQ ID NO: 1921434 - DNA, 25 bp, Homo sapien
tgtgacacaacgcagatcaaagggc

SEQ ID NO: 1921435 - DNA, 25 bp, Homo sapien
taagagccctgttgactctgccctc

SEQ ID NO: 1921436 - DNA, 25 bp, Homo sapien
caaagtgaggttaactggacaccct

SEQ ID NO: 1921437 - DNA, 25 bp, Homo sapien
tcatatagtcctctctcctccgatg

SEQ ID NO: 1921438 - DNA, 25 bp, Homo sapien
tggtggagctgtctcatatagtcct

SEQ ID NO: 1921439 - DNA, 25 bp, Homo sapien
cctccaaagtgaggttaactggaca

SEQ ID NO: 1921440 - DNA, 25 bp, Homo sapien
gaggcatgggatgttggatcaaaac

SEQ ID NO: 1921441 - DNA, 25 bp, Homo sapien
aatctgggaggatccgagccttctg

SEQ ID NO: 1921442 - DNA, 25 bp, Homo sapien
gctgccattgcagggttccttcagt

SEQ ID NO: 1921443 - DNA, 25 bp, Homo sapien
cttgaatgtgtcatcagagtgggac

SEQ ID NO: 1921444 - DNA, 25 bp, Homo sapien
gctggggtagccaagagccttgggc

SEQ ID NO: 1921445 - DNA, 25 bp, Homo sapien
cttctattctcaaaacaggattcaa

SEQ ID NO: 1921446 - DNA, 25 bp, Homo sapien
agagccttgggctcctggattgagg

SEQ ID NO: 1921447 - DNA, 25 bp, Homo sapien
aaatgtaatacacagctgctggggt

SEQ ID NO: 1921448 - DNA, 25 bp, Homo sapien
tgttgggccacatgctacaacagca

SEQ ID NO: 1921449 - DNA, 25 bp, Homo sapien
tggctttgccttaaccacctgtaag

SEQ ID NO: 1921450 - DNA, 25 bp, Homo sapien
tacaacagcagtagaccaatggctt

SEQ ID NO: 1921451 - DNA, 25 bp, Homo sapien
tgactaagcacacagctgaaccagg

SEQ ID NO: 1921452 - DNA, 25 bp, Homo sapien
caggatcaagagacgagttggttcc

SEQ ID NO: 1921453 - DNA, 25 bp, Homo sapien
gcagttagagggtcctgtgaaagca

SEQ ID NO: 1921454 - DNA, 25 bp, Homo sapien
agttcagagaacttcggcagtgtgc

SEQ ID NO: 1921455 - DNA, 25 bp, Homo sapien
taagatatggctactttccaactgg

SEQ ID NO: 1921456 - DNA, 25 bp, Homo sapien
tgagggtctgacttcaatctgagct

SEQ ID NO: 1921457 - DNA, 25 bp, Homo sapien
tcacttgcacctagttcagagcagg

SEQ ID NO: 1921458 - DNA, 25 bp, Homo sapien
tctgaagttgaactaatgctgccct

SEQ ID NO: 1921459 - DNA, 25 bp, Homo sapien
taacagcatctactaggatcccagc

SEQ ID NO: 1921460 - DNA, 25 bp, Homo sapien
tataaaacttccgtcaacttgagcg

SEQ ID NO: 1921461 - DNA, 25 bp, Homo sapien
gacagtgtatgatggccacgtcaca

SEQ ID NO: 1921462 - DNA, 25 bp, Homo sapien
tcagaggagccgaaggtataaaact

SEQ ID NO: 1921463 - DNA, 25 bp, Homo sapien
cacgtcacacttttgtaggaagaac

SEQ ID NO: 1921464 - DNA, 25 bp, Homo sapien
ttcctattggcatctccgtttccct

SEQ ID NO: 1921465 - DNA, 25 bp, Homo sapien
atttcctattggcatctccgtttcc

SEQ ID NO: 1921466 - DNA, 25 bp, Homo sapien
aggaagctgccgcatttccagttct

SEQ ID NO: 1921467 - DNA, 25 bp, Homo sapien
tcatctgaggaagctgccgcatttc

SEQ ID NO: 1921468 - DNA, 25 bp, Homo sapien
tgccttatcttctacaagttctaaa

SEQ ID NO: 1921469 - DNA, 25 bp, Homo sapien
gttgccttatcttctacaagttcta

SEQ ID NO: 1921470 - DNA, 25 bp, Homo sapien
cttatcttctacaagttctaaaagt

SEQ ID NO: 1921471 - DNA, 25 bp, Homo sapien
gccttatcttctacaagttctaaaa

SEQ ID NO: 1921472 - DNA, 25 bp, Homo sapien
tttgatccagtttccacacagttct

SEQ ID NO: 1921473 - DNA, 25 bp, Homo sapien
ttctgccctgttttcactttgatcc

SEQ ID NO: 1921474 - DNA, 25 bp, Homo sapien
gctctcttggtctacagcctcctct

SEQ ID NO: 1921475 - DNA, 25 bp, Homo sapien
tacagcctcctctgaattgcttctg

SEQ ID NO: 1921476 - DNA, 25 bp, Homo sapien
catgaatgtaggtagctactgctac

SEQ ID NO: 1921477 - DNA, 25 bp, Homo sapien
gctgtgtttcatgaatgtaggtagc

SEQ ID NO: 1921478 - DNA, 25 bp, Homo sapien
taggtagctactgctacacaggatc

SEQ ID NO: 1921479 - DNA, 25 bp, Homo sapien
tgtttcatgaatgtaggtagctact

SEQ ID NO: 1921480 - DNA, 25 bp, Homo sapien
catccaaattggaggttcttatttg

SEQ ID NO: 1921481 - DNA, 25 bp, Homo sapien
tttgatggggctattatcacttcca

SEQ ID NO: 1921482 - DNA, 25 bp, Homo sapien
atcacttccacagggctaacatcca

SEQ ID NO: 1921483 - DNA, 25 bp, Homo sapien
cacagggctaacatccaaattggag

SEQ ID NO: 1921484 - DNA, 25 bp, Homo sapien
ctttaatagattggtgctgggatgc

SEQ ID NO: 1921485 - DNA, 25 bp, Homo sapien
ttaatagattggtgctgggatgctg

SEQ ID NO: 1921486 - DNA, 25 bp, Homo sapien
gaactttaatagattggtgctggga

SEQ ID NO: 1921487 - DNA, 25 bp, Homo sapien
aatagattggtgctgggatgctgaa

SEQ ID NO: 1921488 - DNA, 25 bp, Homo sapien
gaagttgcctagctctaatatggac

SEQ ID NO: 1921489 - DNA, 25 bp, Homo sapien
cttttccagcagaagttgcctagct

SEQ ID NO: 1921490 - DNA, 25 bp, Homo sapien
tccagcagaagttgcctagctctaa

SEQ ID NO: 1921491 - DNA, 25 bp, Homo sapien
gcctagctctaatatggacactgag

SEQ ID NO: 1921492 - DNA, 25 bp, Homo sapien
ccggccacttctcagtaaagggcat

SEQ ID NO: 1921493 - DNA, 25 bp, Homo sapien
cggccacttctcagtaaagggcatc

SEQ ID NO: 1921494 - DNA, 25 bp, Homo sapien
catttcaaagcccggccacttctca

SEQ ID NO: 1921495 - DNA, 25 bp, Homo sapien
attccaaatgcagagtttctctgaa

SEQ ID NO: 1921496 - DNA, 25 bp, Homo sapien
cattgtgaggttgtaccattccaaa

SEQ ID NO: 1921497 - DNA, 25 bp, Homo sapien
tccaaatgcagagtttctctgaaag

SEQ ID NO: 1921498 - DNA, 25 bp, Homo sapien
ttccaaatgcagagtttctctgaaa

SEQ ID NO: 1921499 - DNA, 25 bp, Homo sapien
gatacctcgtccacacttcctcttc

SEQ ID NO: 1921500 - DNA, 25 bp, Homo sapien
tgatacctcgtccacacttcctctt

SEQ ID NO: 1921501 - DNA, 25 bp, Homo sapien
ctctgatacctcgtccacacttcct

SEQ ID NO: 1921502 - DNA, 25 bp, Homo sapien
ctgatacctcgtccacacttcctct

SEQ ID NO: 1921503 - DNA, 25 bp, Homo sapien
ggtcgctgatcttaggagttgtcct

SEQ ID NO: 1921504 - DNA, 25 bp, Homo sapien
ccattctctgaacatgagaggaatg

SEQ ID NO: 1921505 - DNA, 25 bp, Homo sapien
tgagaaggttatttggaaggtcgct

SEQ ID NO: 1921506 - DNA, 25 bp, Homo sapien
agttgtcctgctacagttaccggag

SEQ ID NO: 1921507 - DNA, 25 bp, Homo sapien
tcttgggctccctcaactgaaggaa

SEQ ID NO: 1921508 - DNA, 25 bp, Homo sapien
gattgtagacccagccagtgttgta

SEQ ID NO: 1921509 - DNA, 25 bp, Homo sapien
agtagctgagaaagattgtagaccc

SEQ ID NO: 1921510 - DNA, 25 bp, Homo sapien
ttgtaggaggattctgtgggttcca

SEQ ID NO: 1921511 - DNA, 25 bp, Homo sapien
aaatggcttgtgatctgaggctagg

SEQ ID NO: 1921512 - DNA, 25 bp, Homo sapien
gacagattgaagcaagtcgctctgc

SEQ ID NO: 1921513 - DNA, 25 bp, Homo sapien
cacagtcctgatcgttttaaatggc

SEQ ID NO: 1921514 - DNA, 25 bp, Homo sapien
ttagtggccatagaagtccagtgtc

SEQ ID NO: 1921515 - DNA, 25 bp, Homo sapien
cagcaggtcagggatgaaggcctcg

SEQ ID NO: 1921516 - DNA, 25 bp, Homo sapien
caggtcagggatgaaggcctcggtg

SEQ ID NO: 1921517 - DNA, 25 bp, Homo sapien
gtcagggatgaaggcctcggtgggt

SEQ ID NO: 1921518 - DNA, 25 bp, Homo sapien
ggatgaaggcctcggtgggtttgta

SEQ ID NO: 1921519 - DNA, 25 bp, Homo sapien
tggcagtcggggagttgtgtcagct

SEQ ID NO: 1921520 - DNA, 25 bp, Homo sapien
cttttcctggcagtcggggagttgt

SEQ ID NO: 1921521 - DNA, 25 bp, Homo sapien
ccttttcctggcagtcggggagttg

SEQ ID NO: 1921522 - DNA, 25 bp, Homo sapien
tcctggcagtcggggagttgtgtca

SEQ ID NO: 1921523 - DNA, 25 bp, Homo sapien
gtaaacacgtggtcctgagccacca

SEQ ID NO: 1921524 - DNA, 25 bp, Homo sapien
cactgggcccttatcgtctgtgccg

SEQ ID NO: 1921525 - DNA, 25 bp, Homo sapien
tacgtgcatcagtcccctcactgtg

SEQ ID NO: 1921526 - DNA, 25 bp, Homo sapien
ggctgccagggccatgtacgtgcat

SEQ ID NO: 1921527 - DNA, 25 bp, Homo sapien
tccacggagattacagtgggggtgc

SEQ ID NO: 1921528 - DNA, 25 bp, Homo sapien
tggctccgctctgcgcagctccacg

SEQ ID NO: 1921529 - DNA, 25 bp, Homo sapien
ctgctggctccgctctgcgcagctc

SEQ ID NO: 1921530 - DNA, 25 bp, Homo sapien
tccgctctgcgcagctccacggaga

SEQ ID NO: 1921531 - DNA, 25 bp, Homo sapien
tgacttctctgcaatctccaaggag

SEQ ID NO: 1921532 - DNA, 25 bp, Homo sapien
ggttgagacagctttgaacacgatt

SEQ ID NO: 1921533 - DNA, 25 bp, Homo sapien
agctgattcccaaaaagggcctatt

SEQ ID NO: 1921534 - DNA, 25 bp, Homo sapien
tagaatcactgcatgtagtcacacc

SEQ ID NO: 1921535 - DNA, 25 bp, Homo sapien
ttgttccattttatcccagggtatc

SEQ ID NO: 1921536 - DNA, 25 bp, Homo sapien
tctttgctgaactagtccccattcc

SEQ ID NO: 1921537 - DNA, 25 bp, Homo sapien
agatttagccctctgacctacacca

SEQ ID NO: 1921538 - DNA, 25 bp, Homo sapien
catgtggcccattcagatttagccc

SEQ ID NO: 1921539 - DNA, 25 bp, Homo sapien
tgtttgaggttaacttctctgattt

SEQ ID NO: 1921540 - DNA, 25 bp, Homo sapien
gactcctgatacttgcttaatacag

SEQ ID NO: 1921541 - DNA, 25 bp, Homo sapien
ctcctgatacttgcttaatacaggt

SEQ ID NO: 1921542 - DNA, 25 bp, Homo sapien
gcttaatacaggttttcaacgtcat

SEQ ID NO: 1921543 - DNA, 25 bp, Homo sapien
gggtttctaggacataataagcaca

SEQ ID NO: 1921544 - DNA, 25 bp, Homo sapien
tctattagtcaaagatggctccatg

SEQ ID NO: 1921545 - DNA, 25 bp, Homo sapien
tgttagtgccaagctggttcaatgc

SEQ ID NO: 1921546 - DNA, 25 bp, Homo sapien
ggaaaaaccaacacagggtgcattg

SEQ ID NO: 1921547 - DNA, 25 bp, Homo sapien
tttcttcgtctttgtgcctatccct

SEQ ID NO: 1921548 - DNA, 25 bp, Homo sapien
ttctcagtctttctgtgaaggcctt

SEQ ID NO: 1921549 - DNA, 25 bp, Homo sapien
gataactattgcatatccaggtatc

SEQ ID NO: 1921550 - DNA, 25 bp, Homo sapien
tgtgcctatccctctagttgaaaga

SEQ ID NO: 1921551 - DNA, 25 bp, Homo sapien
cacagtggaggttttcgtaatccca

SEQ ID NO: 1921552 - DNA, 25 bp, Homo sapien
gcactttgggttcataaaacaggga

SEQ ID NO: 1921553 - DNA, 25 bp, Homo sapien
taaaaaatatactggtcgtgagcac

SEQ ID NO: 1921554 - DNA, 25 bp, Homo sapien
cagcttgactttagcaccctcaggg

SEQ ID NO: 1921555 - DNA, 25 bp, Homo sapien
ggcctggagtccgagtatgtgtgat

SEQ ID NO: 1921556 - DNA, 25 bp, Homo sapien
ctgggcctggagtccgagtatgtgt

SEQ ID NO: 1921557 - DNA, 25 bp, Homo sapien
tggagtccgagtatgtgtgattatt

SEQ ID NO: 1921558 - DNA, 25 bp, Homo sapien
cctggagtccgagtatgtgtgatta

SEQ ID NO: 1921559 - DNA, 25 bp, Homo sapien
gcagtatttgattccgttcctgtgt

SEQ ID NO: 1921560 - DNA, 25 bp, Homo sapien
tccagctgcattcatgttccaaaga

SEQ ID NO: 1921561 - DNA, 25 bp, Homo sapien
tgcagtatttgattccgttcctgtg

SEQ ID NO: 1921562 - DNA, 25 bp, Homo sapien
gctgcattcatgttccaaagaacat

SEQ ID NO: 1921563 - DNA, 25 bp, Homo sapien
cctattcttcagctcataggctttc

SEQ ID NO: 1921564 - DNA, 25 bp, Homo sapien
ttcctattcttcagctcataggctt

SEQ ID NO: 1921565 - DNA, 25 bp, Homo sapien
tattcttcagctcataggctttcac

SEQ ID NO: 1921566 - DNA, 25 bp, Homo sapien
attcttcagctcataggctttcaca

SEQ ID NO: 1921567 - DNA, 25 bp, Homo sapien
ttctcccatacaggggctgatacca

SEQ ID NO: 1921568 - DNA, 25 bp, Homo sapien
ctctgctttctcccatacaggggct

SEQ ID NO: 1921569 - DNA, 25 bp, Homo sapien
gctttctcccatacaggggctgata

SEQ ID NO: 1921570 - DNA, 25 bp, Homo sapien
tgctttctcccatacaggggctgat

SEQ ID NO: 1921571 - DNA, 25 bp, Homo sapien
tctgatataaggtcaaattttggta

SEQ ID NO: 1921572 - DNA, 25 bp, Homo sapien
attttggtattgtaggaacacccat

SEQ ID NO: 1921573 - DNA, 25 bp, Homo sapien
gtgggtctgatataaggtcaaattt

SEQ ID NO: 1921574 - DNA, 25 bp, Homo sapien
ggtctgatataaggtcaaattttgg

SEQ ID NO: 1921575 - DNA, 25 bp, Homo sapien
cctgtggagcaatgataaaatatct

SEQ ID NO: 1921576 - DNA, 25 bp, Homo sapien
taaaattcatgctatcagagtgcca

SEQ ID NO: 1921577 - DNA, 25 bp, Homo sapien
tgacaggccataaagaagtgggacc

SEQ ID NO: 1921578 - DNA, 25 bp, Homo sapien
taaatttaggcaacctcaagcatga

SEQ ID NO: 1921579 - DNA, 25 bp, Homo sapien
ctgtgtgattttccttccccaaact

SEQ ID NO: 1921580 - DNA, 25 bp, Homo sapien
cattcatgtgttgagggacatctgg

SEQ ID NO: 1921581 - DNA, 25 bp, Homo sapien
ccattcatgtgttgagggacatctg

SEQ ID NO: 1921582 - DNA, 25 bp, Homo sapien
taacaggctgggatttggatagaga

SEQ ID NO: 1921583 - DNA, 25 bp, Homo sapien
tccttccagcaagtataatacctgg

SEQ ID NO: 1921584 - DNA, 25 bp, Homo sapien
agccagataagtgctttccagcaag

SEQ ID NO: 1921585 - DNA, 25 bp, Homo sapien
tttcccagtgcaacatttctgagag

SEQ ID NO: 1921586 - DNA, 25 bp, Homo sapien
tctaatttctccttaagtgtaagga

SEQ ID NO: 1921587 - DNA, 25 bp, Homo sapien
ctaatttctccttaagtgtaaggat

SEQ ID NO: 1921588 - DNA, 25 bp, Homo sapien
ccagtgaagtcccatggtatgtcat

SEQ ID NO: 1921589 - DNA, 25 bp, Homo sapien
tgaagtcccatggtatgtcatctgc

SEQ ID NO: 1921590 - DNA, 25 bp, Homo sapien
ggccagtgaagtcccatggtatgtc

SEQ ID NO: 1921591 - DNA, 25 bp, Homo sapien
aaggccagtgaagtcccatggtatg

SEQ ID NO: 1921592 - DNA, 25 bp, Homo sapien
catgctgattggaagcagatccatg

SEQ ID NO: 1921593 - DNA, 25 bp, Homo sapien
gtctgcatgctgattggaagcagat

SEQ ID NO: 1921594 - DNA, 25 bp, Homo sapien
tctgcatgctgattggaagcagatc

SEQ ID NO: 1921595 - DNA, 25 bp, Homo sapien
accatggccaacctcaatgaagttt

SEQ ID NO: 1921596 - DNA, 25 bp, Homo sapien
caccatggccaacctcaatgaagtt

SEQ ID NO: 1921597 - DNA, 25 bp, Homo sapien
tggccaacctcaatgaagttttgat

SEQ ID NO: 1921598 - DNA, 25 bp, Homo sapien
atcatcacaattttagtatatttgc

SEQ ID NO: 1921599 - DNA, 25 bp, Homo sapien
tgtatcatcacaattttagtatatt

SEQ ID NO: 1921600 - DNA, 25 bp, Homo sapien
catctttgtgtaggggccatggtaa

SEQ ID NO: 1921601 - DNA, 25 bp, Homo sapien
tcttctctgtatcatcacaatttta

SEQ ID NO: 1921602 - DNA, 25 bp, Homo sapien
tggtctagccattatatccatctgg

SEQ ID NO: 1921603 - DNA, 25 bp, Homo sapien
tggcagaacagtgccaattaaacat

SEQ ID NO: 1921604 - DNA, 25 bp, Homo sapien
tctcttagattctatggtctagcca

SEQ ID NO: 1921605 - DNA, 25 bp, Homo sapien
gcttactttctaagtgtgcatgaaa

SEQ ID NO: 1921606 - DNA, 25 bp, Homo sapien
aaaatcgttgttgtttgctggttgg

SEQ ID NO: 1921607 - DNA, 25 bp, Homo sapien
taaaatcgttgttgtttgctggttg

SEQ ID NO: 1921608 - DNA, 25 bp, Homo sapien
tagaaacaagttagtccaatacttg

SEQ ID NO: 1921609 - DNA, 25 bp, Homo sapien
tatgagtggctgtcaaccagaggga

SEQ ID NO: 1921610 - DNA, 25 bp, Homo sapien
tctgagagtaaaagtttggaagaga

SEQ ID NO: 1921611 - DNA, 25 bp, Homo sapien
ttttaaatgtcagaagggtcctgta

SEQ ID NO: 1921612 - DNA, 25 bp, Homo sapien
gaggctgagaaggttcattgataac

SEQ ID NO: 1921613 - DNA, 25 bp, Homo sapien
atctcaaagtcaagggctctgtgag

SEQ ID NO: 1921614 - DNA, 25 bp, Homo sapien
tcctgacattgattaaggtggcagg

SEQ ID NO: 1921615 - DNA, 25 bp, Homo sapien
tctcaaagtcaagggctctgtgagc

SEQ ID NO: 1921616 - DNA, 25 bp, Homo sapien
ggtggcaggccttaattatttcttc

SEQ ID NO: 1921617 - DNA, 25 bp, Homo sapien
tagtgtcttgatagttcacagcaaa

SEQ ID NO: 1921618 - DNA, 25 bp, Homo sapien
gtgtcttgatagttcacagcaaagt

SEQ ID NO: 1921619 - DNA, 25 bp, Homo sapien
gccaatagtgtcttgatagttcaca

SEQ ID NO: 1921620 - DNA, 25 bp, Homo sapien
caatagtgtcttgatagttcacagc

SEQ ID NO: 1921621 - DNA, 25 bp, Homo sapien
agttcctttgagtgcttggccagtg

SEQ ID NO: 1921622 - DNA, 25 bp, Homo sapien
gatttctaagggtgctctcagcttc

SEQ ID NO: 1921623 - DNA, 25 bp, Homo sapien
caaggaagagattgccagaagtcat

SEQ ID NO: 1921624 - DNA, 25 bp, Homo sapien
gaagtcatggagtgtcaaagaagca

SEQ ID NO: 1921625 - DNA, 25 bp, Homo sapien
tgctaacacacatcacgcagtgcag

SEQ ID NO: 1921626 - DNA, 25 bp, Homo sapien
caccttgtcgatgtgtatgaaacca

SEQ ID NO: 1921627 - DNA, 25 bp, Homo sapien
ttttggaccaagaagtgcaccttgt

SEQ ID NO: 1921628 - DNA, 25 bp, Homo sapien
ccattttcctgttggtgcgggcatt

SEQ ID NO: 1921629 - DNA, 25 bp, Homo sapien
cagcagtatcttgttcttttggacc

SEQ ID NO: 1921630 - DNA, 25 bp, Homo sapien
gcttgcaagtgtggtggacatcgtc

SEQ ID NO: 1921631 - DNA, 25 bp, Homo sapien
gaaggaggatgaaggctccaatctg

SEQ ID NO: 1921632 - DNA, 25 bp, Homo sapien
acaagataaagaagctgcaactgct

SEQ ID NO: 1921633 - DNA, 25 bp, Homo sapien
gacatcgtcatgtagctctggctgg

SEQ ID NO: 1921634 - DNA, 25 bp, Homo sapien
ggaaccatatctaatactaagcatt

SEQ ID NO: 1921635 - DNA, 25 bp, Homo sapien
gatcttggaaccatatctaatacta

SEQ ID NO: 1921636 - DNA, 25 bp, Homo sapien
catagttttagatcttggaaccata

SEQ ID NO: 1921637 - DNA, 25 bp, Homo sapien
tagttttagatcttggaaccatatc

SEQ ID NO: 1921638 - DNA, 25 bp, Homo sapien
tgttgactgagctacgagcctggcg

SEQ ID NO: 1921639 - DNA, 25 bp, Homo sapien
caggaatttggacttgccggttcaa

SEQ ID NO: 1921640 - DNA, 25 bp, Homo sapien
gctgagccgagcgactgtttcctgc

SEQ ID NO: 1921641 - DNA, 25 bp, Homo sapien
gcggtacccgaatccctatagcaaa

SEQ ID NO: 1921642 - DNA, 25 bp, Homo sapien
tgaatatatcttggcgaagctgcaa

SEQ ID NO: 1921643 - DNA, 25 bp, Homo sapien
ttggcgaagctgcaaggcgaggccc

SEQ ID NO: 1921644 - DNA, 25 bp, Homo sapien
gcgaagctgcaaggcgaggcccctt

SEQ ID NO: 1921645 - DNA, 25 bp, Homo sapien
tcttggcgaagctgcaaggcgaggc

SEQ ID NO: 1921646 - DNA, 25 bp, Homo sapien
aagccaaggagaaggcaaaggagac

SEQ ID NO: 1921647 - DNA, 25 bp, Homo sapien
cttgttgggacagccaaggaagcca

SEQ ID NO: 1921648 - DNA, 25 bp, Homo sapien
aggagaaggcaaaggagacggcact

SEQ ID NO: 1921649 - DNA, 25 bp, Homo sapien
aaggcaaaggagacggcactggcag

SEQ ID NO: 1921650 - DNA, 25 bp, Homo sapien
gctgcattccaaagaatttcataag

SEQ ID NO: 1921651 - DNA, 25 bp, Homo sapien
attactggtccaagttaatgctggg

SEQ ID NO: 1921652 - DNA, 25 bp, Homo sapien
gaaatgcacttaaaggcacaaagac

SEQ ID NO: 1921653 - DNA, 25 bp, Homo sapien
tgtctgcttagcctctccctttgtt

SEQ ID NO: 1921654 - DNA, 25 bp, Homo sapien
ttaagtctaaggacctccagaggtc

SEQ ID NO: 1921655 - DNA, 25 bp, Homo sapien
gcagccaaatctcctgatccgaagg

SEQ ID NO: 1921656 - DNA, 25 bp, Homo sapien
tgcaagttctaagagccacctggga

SEQ ID NO: 1921657 - DNA, 25 bp, Homo sapien
ggataacatatagggccaccatgca

SEQ ID NO: 1921658 - DNA, 25 bp, Homo sapien
cagtgtatactctgtagtgcagcca

SEQ ID NO: 1921659 - DNA, 25 bp, Homo sapien
tgcacaccaagcctgagaattattg

SEQ ID NO: 1921660 - DNA, 25 bp, Homo sapien
accaatgtcaagttgggaaaactgc

SEQ ID NO: 1921661 - DNA, 25 bp, Homo sapien
gccctgggatgtatttaacgatgcc

SEQ ID NO: 1921662 - DNA, 25 bp, Homo sapien
ccactaccatgagagggctgctcct

SEQ ID NO: 1921663 - DNA, 25 bp, Homo sapien
cagtactacctgccagtgtgtctga

SEQ ID NO: 1921664 - DNA, 25 bp, Homo sapien
agtactacctgccagtgtgtctgaa

SEQ ID NO: 1921665 - DNA, 25 bp, Homo sapien
aagtcgtaatgtagaagagagcctc

SEQ ID NO: 1921666 - DNA, 25 bp, Homo sapien
gattggactggccaaaggcttgaaa

SEQ ID NO: 1921667 - DNA, 25 bp, Homo sapien
gcttgtcccagttggaattccagac

SEQ ID NO: 1921668 - DNA, 25 bp, Homo sapien
tgaaaccttgtggatttgtggctct

SEQ ID NO: 1921669 - DNA, 25 bp, Homo sapien
aactttccagactcccaggccctca

SEQ ID NO: 1921670 - DNA, 25 bp, Homo sapien
cccagggatgcccattgggtagcca

SEQ ID NO: 1921671 - DNA, 25 bp, Homo sapien
aaatacctctgccattactttagac

SEQ ID NO: 1921672 - DNA, 25 bp, Homo sapien
gggtagccacagatattaccatctg

SEQ ID NO: 1921673 - DNA, 25 bp, Homo sapien
tacacaggaatcaggatttagtggc

SEQ ID NO: 1921674 - DNA, 25 bp, Homo sapien
tttagtgacagggtgaggtacacag

SEQ ID NO: 1921675 - DNA, 25 bp, Homo sapien
gatttagtggcagggcatacctcat

SEQ ID NO: 1921676 - DNA, 25 bp, Homo sapien
tctaaaggtttctctaaatcatatt

SEQ ID NO: 1921677 - DNA, 25 bp, Homo sapien
tacagggtatgcctgccaagaaccg

SEQ ID NO: 1921678 - DNA, 25 bp, Homo sapien
gctttgtacatgagtggccccaggc

SEQ ID NO: 1921679 - DNA, 25 bp, Homo sapien
ttcacggaattgcaagacagcaagg

SEQ ID NO: 1921680 - DNA, 25 bp, Homo sapien
tgggccactgattaatcctttgaac

SEQ ID NO: 1921681 - DNA, 25 bp, Homo sapien
tgtgttcccatctacaatgtttatt

SEQ ID NO: 1921682 - DNA, 25 bp, Homo sapien
aaccggcgctgatctttcagcactg

SEQ ID NO: 1921683 - DNA, 25 bp, Homo sapien
ccagaaccggcgctgatctttcagc

SEQ ID NO: 1921684 - DNA, 25 bp, Homo sapien
aaggaaaaccagaaccggcgctgat

SEQ ID NO: 1921685 - DNA, 25 bp, Homo sapien
cccaaatgcacactgtttgagtata

SEQ ID NO: 1921686 - DNA, 25 bp, Homo sapien
ctcatgataaatttcggactatgcc

SEQ ID NO: 1921687 - DNA, 25 bp, Homo sapien
catgataaatttcggactatgccct

SEQ ID NO: 1921688 - DNA, 25 bp, Homo sapien
gataaatttcggactatgccctcta

SEQ ID NO: 1921689 - DNA, 25 bp, Homo sapien
aaagggttccagagaccatccacaa

SEQ ID NO: 1921690 - DNA, 25 bp, Homo sapien
tcatggaacccattcaaagggttcc

SEQ ID NO: 1921691 - DNA, 25 bp, Homo sapien
catccacaaaggctgtcacattgtt

SEQ ID NO: 1921692 - DNA, 25 bp, Homo sapien
acaaaggctgtcacattgttatacc

SEQ ID NO: 1921693 - DNA, 25 bp, Homo sapien
ttcactgtccttattagaggcagga

SEQ ID NO: 1921694 - DNA, 25 bp, Homo sapien
actgtccttattagaggcaggaaag

SEQ ID NO: 1921695 - DNA, 25 bp, Homo sapien
cactgtccttattagaggcaggaaa

SEQ ID NO: 1921696 - DNA, 25 bp, Homo sapien
tgtccttattagaggcaggaaagtc

SEQ ID NO: 1921697 - DNA, 25 bp, Homo sapien
cggaaactgaagtctccaaaattct

SEQ ID NO: 1921698 - DNA, 25 bp, Homo sapien
tcctctgagcggaaactgaagtctc

SEQ ID NO: 1921699 - DNA, 25 bp, Homo sapien
tgagcggaaactgaagtctccaaaa

SEQ ID NO: 1921700 - DNA, 25 bp, Homo sapien
tggttagttcctctgagcggaaact

SEQ ID NO: 1921701 - DNA, 25 bp, Homo sapien
catgtctattactgctaagctgaga

SEQ ID NO: 1921702 - DNA, 25 bp, Homo sapien
gaaaggcgacatccatcaatcagct

SEQ ID NO: 1921703 - DNA, 25 bp, Homo sapien
tagggagcaggtcatgtctattact

SEQ ID NO: 1921704 - DNA, 25 bp, Homo sapien
agataagagtgtctgcagtgggaaa

SEQ ID NO: 1921705 - DNA, 25 bp, Homo sapien
actcctcttttccacggctgatatt

SEQ ID NO: 1921706 - DNA, 25 bp, Homo sapien
aactcctcttttccacggctgatat

SEQ ID NO: 1921707 - DNA, 25 bp, Homo sapien
caactcctcttttccacggctgata

SEQ ID NO: 1921708 - DNA, 25 bp, Homo sapien
ttggtaatactgtgtatatctttcc

SEQ ID NO: 1921709 - DNA, 25 bp, Homo sapien
tcatttgcacgtggccagggctggc

SEQ ID NO: 1921710 - DNA, 25 bp, Homo sapien
gccactgggtcaacaaggatgcctg

SEQ ID NO: 1921711 - DNA, 25 bp, Homo sapien
tggctgtgccactgggtcaacaagg

SEQ ID NO: 1921712 - DNA, 25 bp, Homo sapien
tgtgccactgggtcaacaaggatgc

SEQ ID NO: 1921713 - DNA, 25 bp, Homo sapien
aagaggcaagaagacagatgttatg

SEQ ID NO: 1921714 - DNA, 25 bp, Homo sapien
tgtttcttgtcccttcaaagcataa

SEQ ID NO: 1921715 - DNA, 25 bp, Homo sapien
aagacagatgttatggggccaggat

SEQ ID NO: 1921716 - DNA, 25 bp, Homo sapien
cttgtcccttcaaagcataatgagg

SEQ ID NO: 1921717 - DNA, 25 bp, Homo sapien
ggactgcctactgtgttgaattaca

SEQ ID NO: 1921718 - DNA, 25 bp, Homo sapien
atagaccactgaccctagggaccgg

SEQ ID NO: 1921719 - DNA, 25 bp, Homo sapien
tagggaccgggctaagactattcat

SEQ ID NO: 1921720 - DNA, 25 bp, Homo sapien
caaaggtttatctgccatagaccac

SEQ ID NO: 1921721 - DNA, 25 bp, Homo sapien
tagtttgaggtaacctctcgagatc

SEQ ID NO: 1921722 - DNA, 25 bp, Homo sapien
tgaggtaacctctcgagatccagta

SEQ ID NO: 1921723 - DNA, 25 bp, Homo sapien
aaatagtttgaggtaacctctcgag

SEQ ID NO: 1921724 - DNA, 25 bp, Homo sapien
taacctctcgagatccagtatctga

SEQ ID NO: 1921725 - DNA, 25 bp, Homo sapien
attgcgttccaagccaaacaacata

SEQ ID NO: 1921726 - DNA, 25 bp, Homo sapien
caagccaaacaacatagccttttta

SEQ ID NO: 1921727 - DNA, 25 bp, Homo sapien
tccaagccaaacaacatagcctttt

SEQ ID NO: 1921728 - DNA, 25 bp, Homo sapien
ctgattgcgttccaagccaaacaac

SEQ ID NO: 1921729 - DNA, 25 bp, Homo sapien
tgggtaaacctccacttgttccatc

SEQ ID NO: 1921730 - DNA, 25 bp, Homo sapien
tatgggtaaacctccacttgttcca

SEQ ID NO: 1921731 - DNA, 25 bp, Homo sapien
ggtaaacctccacttgttccatcca

SEQ ID NO: 1921732 - DNA, 25 bp, Homo sapien
gtaaacctccacttgttccatccat

SEQ ID NO: 1921733 - DNA, 25 bp, Homo sapien
atctctttgcactgtggtcctctta

SEQ ID NO: 1921734 - DNA, 25 bp, Homo sapien
tctttgcactgtggtcctcttactt

SEQ ID NO: 1921735 - DNA, 25 bp, Homo sapien
ttacatctctttgcactgtggtcct

SEQ ID NO: 1921736 - DNA, 25 bp, Homo sapien
tacatctctttgcactgtggtcctc

SEQ ID NO: 1921737 - DNA, 25 bp, Homo sapien
cccatgcccccactccacaacaggc

SEQ ID NO: 1921738 - DNA, 25 bp, Homo sapien
cgccatagtgtcttccacaatggat

SEQ ID NO: 1921739 - DNA, 25 bp, Homo sapien
tcgccatagtgtcttccacaatgga

SEQ ID NO: 1921740 - DNA, 25 bp, Homo sapien
tatccctccccatgcccccactcca

SEQ ID NO: 1921741 - DNA, 25 bp, Homo sapien
gaggattattggtccaacattctct

SEQ ID NO: 1921742 - DNA, 25 bp, Homo sapien
tgaggattattggtccaacattctc

SEQ ID NO: 1921743 - DNA, 25 bp, Homo sapien
catgaggattattggtccaacattc

SEQ ID NO: 1921744 - DNA, 25 bp, Homo sapien
ttcatgaggattattggtccaacat

SEQ ID NO: 1921745 - DNA, 25 bp, Homo sapien
ttacagaagggcttgttaattgaac

SEQ ID NO: 1921746 - DNA, 25 bp, Homo sapien
gaagggcttgttaattgaacactgt

SEQ ID NO: 1921747 - DNA, 25 bp, Homo sapien
cagaagggcttgttaattgaacact

SEQ ID NO: 1921748 - DNA, 25 bp, Homo sapien
gcttgttaattgaacactgtttccc

SEQ ID NO: 1921749 - DNA, 25 bp, Homo sapien
cctctgtcattgcttgtgtgctcca

SEQ ID NO: 1921750 - DNA, 25 bp, Homo sapien
gagagatgttttggcccttccagtt

SEQ ID NO: 1921751 - DNA, 25 bp, Homo sapien
tgagataggagtagctaaggcagcc

SEQ ID NO: 1921752 - DNA, 25 bp, Homo sapien
ctgtgcagtagcttgtggagcaacc

SEQ ID NO: 1921753 - DNA, 25 bp, Homo sapien
gtaggacattaaggttgatttagaa

SEQ ID NO: 1921754 - DNA, 25 bp, Homo sapien
aaaaagcataccgttatgctggaga

SEQ ID NO: 1921755 - DNA, 25 bp, Homo sapien
tgaatattattgtaggacattaagg

SEQ ID NO: 1921756 - DNA, 25 bp, Homo sapien
tgcatacagtgcaaccaaaagttag

SEQ ID NO: 1921757 - DNA, 25 bp, Homo sapien
taaggactatttgctaagggccagg

SEQ ID NO: 1921758 - DNA, 25 bp, Homo sapien
ggttttgtgtagcttgcaggcccca

SEQ ID NO: 1921759 - DNA, 25 bp, Homo sapien
taagactgtcccacgcaaactggga

SEQ ID NO: 1921760 - DNA, 25 bp, Homo sapien
cagtaggcccagtttgcagagttca

SEQ ID NO: 1921761 - DNA, 25 bp, Homo sapien
cccaacaatcatcccaaaggcagcc

SEQ ID NO: 1921762 - DNA, 25 bp, Homo sapien
tttcaagaagcacactgtcccctct

SEQ ID NO: 1921763 - DNA, 25 bp, Homo sapien
aagaagcacactgtcccctctaaca

SEQ ID NO: 1921764 - DNA, 25 bp, Homo sapien
acactgtcccctctaacaccactgg

SEQ ID NO: 1921765 - DNA, 25 bp, Homo sapien
tcttggtgcaattcagcagcttcaa

SEQ ID NO: 1921766 - DNA, 25 bp, Homo sapien
tgacaggatgggccattgctataac

SEQ ID NO: 1921767 - DNA, 25 bp, Homo sapien
tactgctttgagtatagtacccact

SEQ ID NO: 1921768 - DNA, 25 bp, Homo sapien
gaatgtcagggtgattattggccaa

SEQ ID NO: 1921769 - DNA, 25 bp, Homo sapien
acttctggagcacatagttaggctc

SEQ ID NO: 1921770 - DNA, 25 bp, Homo sapien
tgttctcaggtttagtttgtcttca

SEQ ID NO: 1921771 - DNA, 25 bp, Homo sapien
tgtcttcattagtaactccttttgc

SEQ ID NO: 1921772 - DNA, 25 bp, Homo sapien
tcacagcaaaggtgtctcaagggtc

SEQ ID NO: 1921773 - DNA, 25 bp, Homo sapien
ggctcctggagtagcagaacctggc

SEQ ID NO: 1921774 - DNA, 25 bp, Homo sapien
aaggtcagggccctgcaaaagcagc

SEQ ID NO: 1921775 - DNA, 25 bp, Homo sapien
tggcagcagcatgtcttgaccccag

SEQ ID NO: 1921776 - DNA, 25 bp, Homo sapien
caggaggagtgtcttttggtatgca

SEQ ID NO: 1921777 - DNA, 25 bp, Homo sapien
gctggcaagggattttgggaaattc

SEQ ID NO: 1921778 - DNA, 25 bp, Homo sapien
tcagcagagcttaaacagtatccag

SEQ ID NO: 1921779 - DNA, 25 bp, Homo sapien
tcatgtgaataaccctcatcagcag

SEQ ID NO: 1921780 - DNA, 25 bp, Homo sapien
gcttaaacagtatccagagttctgc

SEQ ID NO: 1921781 - DNA, 25 bp, Homo sapien
tcatgtggtagtctatggccattaa

SEQ ID NO: 1921782 - DNA, 25 bp, Homo sapien
tccttgggataaattgaagtgttac

SEQ ID NO: 1921783 - DNA, 25 bp, Homo sapien
gccattaagtcagtatccaaatagg

SEQ ID NO: 1921784 - DNA, 25 bp, Homo sapien
taggaattaaggactgttgaagtca

SEQ ID NO: 1921785 - DNA, 25 bp, Homo sapien
tcttctatgccagattatatcggaa

SEQ ID NO: 1921786 - DNA, 25 bp, Homo sapien
aggtgtgataaccactcttctatgc

SEQ ID NO: 1921787 - DNA, 25 bp, Homo sapien
ctaaattctcagtatggttgtaggg

SEQ ID NO: 1921788 - DNA, 25 bp, Homo sapien
attatatcggaagatgtccccaggg

SEQ ID NO: 1921789 - DNA, 25 bp, Homo sapien
gtaatccactagaattactttcttc

SEQ ID NO: 1921790 - DNA, 25 bp, Homo sapien
tgagtaatccactagaattactttc

SEQ ID NO: 1921791 - DNA, 25 bp, Homo sapien
tcttctgagtaatccactagaatta

SEQ ID NO: 1921792 - DNA, 25 bp, Homo sapien
tctgagtaatccactagaattactt

SEQ ID NO: 1921793 - DNA, 25 bp, Homo sapien
taactcttcttgtctactttaaata

SEQ ID NO: 1921794 - DNA, 25 bp, Homo sapien
tgtggctctctttatattactattg

SEQ ID NO: 1921795 - DNA, 25 bp, Homo sapien
ttaaatatagcaatgttggtagact

SEQ ID NO: 1921796 - DNA, 25 bp, Homo sapien
gtggctctctttatattactattga

SEQ ID NO: 1921797 - DNA, 25 bp, Homo sapien
aaaatgtcagtcagtaaagctacag

SEQ ID NO: 1921798 - DNA, 25 bp, Homo sapien
tgtcagtcagtaaagctacagtcat

SEQ ID NO: 1921799 - DNA, 25 bp, Homo sapien
atgtcagtcagtaaagctacagtca

SEQ ID NO: 1921800 - DNA, 25 bp, Homo sapien
gcaacctctgtttgacctctcagct

SEQ ID NO: 1921801 - DNA, 25 bp, Homo sapien
ctccttaaatcccagcagggcaaag

SEQ ID NO: 1921802 - DNA, 25 bp, Homo sapien
cagcagggcaaagggtaaaggaatt

SEQ ID NO: 1921803 - DNA, 25 bp, Homo sapien
tgaccctgcctctccttaaatccca

SEQ ID NO: 1921804 - DNA, 25 bp, Homo sapien
ttcttttggtcatgtccatgatcta

SEQ ID NO: 1921805 - DNA, 25 bp, Homo sapien
tttggtcatgtccatgatctatggc

SEQ ID NO: 1921806 - DNA, 25 bp, Homo sapien
cttcttcagtgggactcactgagtg

SEQ ID NO: 1921807 - DNA, 25 bp, Homo sapien
gtgggactcactgagtgcatgctct

SEQ ID NO: 1921808 - DNA, 25 bp, Homo sapien
cctggacgttgagtctaccaatttc

SEQ ID NO: 1921809 - DNA, 25 bp, Homo sapien
cagaaggcttgggatagcagattcg

SEQ ID NO: 1921810 - DNA, 25 bp, Homo sapien
cttgggatagcagattcgtaggttc

SEQ ID NO: 1921811 - DNA, 25 bp, Homo sapien
gattcgtaggttccctggacgttga

SEQ ID NO: 1921812 - DNA, 25 bp, Homo sapien
tgagagatacttggaagttcctgtt

SEQ ID NO: 1921813 - DNA, 25 bp, Homo sapien
catcctccctagtgtgactaaatga

SEQ ID NO: 1921814 - DNA, 25 bp, Homo sapien
gtgtgactaaatgagagatacttgg

SEQ ID NO: 1921815 - DNA, 25 bp, Homo sapien
cctagtgtgactaaatgagagatac

SEQ ID NO: 1921816 - DNA, 25 bp, Homo sapien
ttgcaggatactggcatcggtaatg

SEQ ID NO: 1921817 - DNA, 25 bp, Homo sapien
tagctcatcaatagttagttggttc

SEQ ID NO: 1921818 - DNA, 25 bp, Homo sapien
aatagttagttggttctcagcccag

SEQ ID NO: 1921819 - DNA, 25 bp, Homo sapien
ggcatcggtaatgaaatttgtttag

SEQ ID NO: 1921820 - DNA, 25 bp, Homo sapien
tattttaatatcgaatgtagtcaaa

SEQ ID NO: 1921821 - DNA, 25 bp, Homo sapien
tttattttaatatcgaatgtagtca

SEQ ID NO: 1921822 - DNA, 25 bp, Homo sapien
gtttattttaatatcgaatgtagtc

SEQ ID NO: 1921823 - DNA, 25 bp, Homo sapien
ttattttaatatcgaatgtagtcaa

SEQ ID NO: 1921824 - DNA, 25 bp, Homo sapien
tgtttctggttttacttttgctgac

SEQ ID NO: 1921825 - DNA, 25 bp, Homo sapien
ttacttttgctgactgtgctaacat

SEQ ID NO: 1921826 - DNA, 25 bp, Homo sapien
ctttttctcttataactgtttctgg

SEQ ID NO: 1921827 - DNA, 25 bp, Homo sapien
tgctttttctcttataactgtttct

SEQ ID NO: 1921828 - DNA, 25 bp, Homo sapien
ctaaattatgatgcctacccttaag

SEQ ID NO: 1921829 - DNA, 25 bp, Homo sapien
gctttctatcaacctgggacaagtt

SEQ ID NO: 1921830 - DNA, 25 bp, Homo sapien
ctgtgagtgagggagataatcaaat

SEQ ID NO: 1921831 - DNA, 25 bp, Homo sapien
tatggaagcccaaacaatcttcaat

SEQ ID NO: 1921832 - DNA, 25 bp, Homo sapien
taagcatccctcatgagatgactgg

SEQ ID NO: 1921833 - DNA, 25 bp, Homo sapien
tcaacctagcaaccctattactgga

SEQ ID NO: 1921834 - DNA, 25 bp, Homo sapien
ggtatataggttccgagcaagatgg

SEQ ID NO: 1921835 - DNA, 25 bp, Homo sapien
tgtttttacctgagtggcacctgga

SEQ ID NO: 1921836 - DNA, 25 bp, Homo sapien
agtctctgtataaaaactacatata

SEQ ID NO: 1921837 - DNA, 25 bp, Homo sapien
gcaaaatcttgtgtggtaggtatta

SEQ ID NO: 1921838 - DNA, 25 bp, Homo sapien
taacttacctaagaggacacagttg

SEQ ID NO: 1921839 - DNA, 25 bp, Homo sapien
tgtatatagctacacattattaagt

SEQ ID NO: 1921840 - DNA, 25 bp, Homo sapien
cagcacttagctttggtaacttttc

SEQ ID NO: 1921841 - DNA, 25 bp, Homo sapien
cacagccgtaggtgaaagtccttcc

SEQ ID NO: 1921842 - DNA, 25 bp, Homo sapien
acttttctgatttagtgtgtaccac

SEQ ID NO: 1921843 - DNA, 25 bp, Homo sapien
aagtccttccttaagccatagcctg

SEQ ID NO: 1921844 - DNA, 25 bp, Homo sapien
tctggatcccctgaaagtctcttct

SEQ ID NO: 1921845 - DNA, 25 bp, Homo sapien
ggatcccctgaaagtctcttctgag

SEQ ID NO: 1921846 - DNA, 25 bp, Homo sapien
tggatcccctgaaagtctcttctga

SEQ ID NO: 1921847 - DNA, 25 bp, Homo sapien
ctggatcccctgaaagtctcttctg

SEQ ID NO: 1921848 - DNA, 25 bp, Homo sapien
gctgaatgtcggatgtcatacaatt

SEQ ID NO: 1921849 - DNA, 25 bp, Homo sapien
gaatgtcggatgtcatacaattcat

SEQ ID NO: 1921850 - DNA, 25 bp, Homo sapien
aaactgaagctgaatgtcggatgtc

SEQ ID NO: 1921851 - DNA, 25 bp, Homo sapien
gaagctgaatgtcggatgtcataca

SEQ ID NO: 1921852 - DNA, 25 bp, Homo sapien
gagttccaatgaagtcttcgtagac

SEQ ID NO: 1921853 - DNA, 25 bp, Homo sapien
tgcgagaccgaaaacctcaaagtag

SEQ ID NO: 1921854 - DNA, 25 bp, Homo sapien
caaacttcaatttgtggccgaaggc

SEQ ID NO: 1921855 - DNA, 25 bp, Homo sapien
ttgttacacatgaagctgccagtct

SEQ ID NO: 1921856 - DNA, 25 bp, Homo sapien
tccttctgtcctaaggtatggctga

SEQ ID NO: 1921857 - DNA, 25 bp, Homo sapien
tgtcctaaggtatggctgataacac

SEQ ID NO: 1921858 - DNA, 25 bp, Homo sapien
ggtatggctgataacacatgtgtgg

SEQ ID NO: 1921859 - DNA, 25 bp, Homo sapien
gctgataacacatgtgtgggcctgt

SEQ ID NO: 1921860 - DNA, 25 bp, Homo sapien
tcctgaagtcagtggattccatatg

SEQ ID NO: 1921861 - DNA, 25 bp, Homo sapien
tcccctgggatgttaacgtcttgaa

SEQ ID NO: 1921862 - DNA, 25 bp, Homo sapien
aaaagaaaactggagtacctgccat

SEQ ID NO: 1921863 - DNA, 25 bp, Homo sapien
acgtcttgaagaaatatgtgtgtgc

SEQ ID NO: 1921864 - DNA, 25 bp, Homo sapien
tgcccagcctacaacttatactttc

SEQ ID NO: 1921865 - DNA, 25 bp, Homo sapien
ctctgtggtataatgactgatgtca

SEQ ID NO: 1921866 - DNA, 25 bp, Homo sapien
gaatctgcatattcgctctgtggta

SEQ ID NO: 1921867 - DNA, 25 bp, Homo sapien
cacatatttgcagtatggattcaac

SEQ ID NO: 1921868 - DNA, 25 bp, Homo sapien
gatgcatccagatctgagtaactgg

SEQ ID NO: 1921869 - DNA, 25 bp, Homo sapien
ccgccgcagcttctgagcccaaggg

SEQ ID NO: 1921870 - DNA, 25 bp, Homo sapien
tatggacggcgtctttcacccttgc

SEQ ID NO: 1921871 - DNA, 25 bp, Homo sapien
gttagactcgcacccgggatttgtg

SEQ ID NO: 1921872 - DNA, 25 bp, Homo sapien
catggtaacttcaggttcgcgggaa

SEQ ID NO: 1921873 - DNA, 25 bp, Homo sapien
tctgaccgctgagtaaatgacaagg

SEQ ID NO: 1921874 - DNA, 25 bp, Homo sapien
ggaggaaggtcatcacagcgagctt

SEQ ID NO: 1921875 - DNA, 25 bp, Homo sapien
caatgagtcactaggccaaatccca

SEQ ID NO: 1921876 - DNA, 25 bp, Homo sapien
gctctttgggataatatgggttcca

SEQ ID NO: 1921877 - DNA, 25 bp, Homo sapien
caataaccgcagttgccaaaagtaa

SEQ ID NO: 1921878 - DNA, 25 bp, Homo sapien
atttgactgtagtgagaaaaatccc

SEQ ID NO: 1921879 - DNA, 25 bp, Homo sapien
ttgactgtagtgagaaaaatcccac

SEQ ID NO: 1921880 - DNA, 25 bp, Homo sapien
cttgatttgactgtagtgagaaaaa

SEQ ID NO: 1921881 - DNA, 25 bp, Homo sapien
tttcttgatttgactgtagtgagaa

SEQ ID NO: 1921882 - DNA, 25 bp, Homo sapien
ggcacattgactaatttctatagct

SEQ ID NO: 1921883 - DNA, 25 bp, Homo sapien
taagtaagccttgtaatggtgtggc

SEQ ID NO: 1921884 - DNA, 25 bp, Homo sapien
tatagctgaactttcacaatagttc

SEQ ID NO: 1921885 - DNA, 25 bp, Homo sapien
ggcatagcttggctgagtgaatttc

SEQ ID NO: 1921886 - DNA, 25 bp, Homo sapien
tcttcaattccgttagcaattggag

SEQ ID NO: 1921887 - DNA, 25 bp, Homo sapien
ttcttcttcaattccgttagcaatt

SEQ ID NO: 1921888 - DNA, 25 bp, Homo sapien
ttcaattccgttagcaattggagcc

SEQ ID NO: 1921889 - DNA, 25 bp, Homo sapien
caattccgttagcaattggagccat

SEQ ID NO: 1921890 - DNA, 25 bp, Homo sapien
ggaagcgtacagtcaatgtgagcac

SEQ ID NO: 1921891 - DNA, 25 bp, Homo sapien
gaaattatcaaaccatgagacctct

SEQ ID NO: 1921892 - DNA, 25 bp, Homo sapien
aaagagaaggcatggaagaaaggac

SEQ ID NO: 1921893 - DNA, 25 bp, Homo sapien
gcagacaagtatgctttggagagat

SEQ ID NO: 1921894 - DNA, 25 bp, Homo sapien
catttgaaggcacaaagaattattc

SEQ ID NO: 1921895 - DNA, 25 bp, Homo sapien
ttgccgaaacctctttgacataggg

SEQ ID NO: 1921896 - DNA, 25 bp, Homo sapien
cttgctttttatatcctccagcagc

SEQ ID NO: 1921897 - DNA, 25 bp, Homo sapien
actccttaaaactgctagtgttgcc

SEQ ID NO: 1921898 - DNA, 25 bp, Homo sapien
gttgcatgtttgaccctgagacagc

SEQ ID NO: 1921899 - DNA, 25 bp, Homo sapien
tacaagcaggcaggagttgcatgtt

SEQ ID NO: 1921900 - DNA, 25 bp, Homo sapien
tgtttgaccctgagacagcaaaggg

SEQ ID NO: 1921901 - DNA, 25 bp, Homo sapien
caggcaggagttgcatgtttgaccc

SEQ ID NO: 1921902 - DNA, 25 bp, Homo sapien
cacaagagtgcataccagaattgaa

SEQ ID NO: 1921903 - DNA, 25 bp, Homo sapien
tatgttagcactatgtggctcagcc

SEQ ID NO: 1921904 - DNA, 25 bp, Homo sapien
aaaactgtgaaggattgtggtcacc

SEQ ID NO: 1921905 - DNA, 25 bp, Homo sapien
ggctcagcctctgttaccccttgga

SEQ ID NO: 1921906 - DNA, 25 bp, Homo sapien
tggcttctggctgcttatctctgga

SEQ ID NO: 1921907 - DNA, 25 bp, Homo sapien
tgtccactgtgattcctagccctct

SEQ ID NO: 1921908 - DNA, 25 bp, Homo sapien
cagttcatgtaatctacttggctta

SEQ ID NO: 1921909 - DNA, 25 bp, Homo sapien
tgaagaatttgcaatgactctggct

SEQ ID NO: 1921910 - DNA, 25 bp, Homo sapien
tcttgcccatactggctctcaagta

SEQ ID NO: 1921911 - DNA, 25 bp, Homo sapien
tgcccatactggctctcaagtaatt

SEQ ID NO: 1921912 - DNA, 25 bp, Homo sapien
cttttcttgcccatactggctctca

SEQ ID NO: 1921913 - DNA, 25 bp, Homo sapien
catactggctctcaagtaattttga

SEQ ID NO: 1921914 - DNA, 25 bp, Homo sapien
caacacctaacttacttcttgactt

SEQ ID NO: 1921915 - DNA, 25 bp, Homo sapien
cttgacttgaatgtcacattgcgtc

SEQ ID NO: 1921916 - DNA, 25 bp, Homo sapien
acacctaacttacttcttgacttga

SEQ ID NO: 1921917 - DNA, 25 bp, Homo sapien
tgaatgtcacattgcgtccggaatt

SEQ ID NO: 1921918 - DNA, 25 bp, Homo sapien
taaggtgaagactattataccctca

SEQ ID NO: 1921919 - DNA, 25 bp, Homo sapien
tggtccccggcaattgggctccagt

SEQ ID NO: 1921920 - DNA, 25 bp, Homo sapien
gatgtgaaaaaatttgctcgaggtc

SEQ ID NO: 1921921 - DNA, 25 bp, Homo sapien
agaaaaccccaacaacactaagatg

SEQ ID NO: 1921922 - DNA, 25 bp, Homo sapien
cttgactgcctacatgactttcccg

SEQ ID NO: 1921923 - DNA, 25 bp, Homo sapien
gcctacatgactttcccgttctgct

SEQ ID NO: 1921924 - DNA, 25 bp, Homo sapien
tgcctacatgactttcccgttctgc

SEQ ID NO: 1921925 - DNA, 25 bp, Homo sapien
gactgcctacatgactttcccgttc

SEQ ID NO: 1921926 - DNA, 25 bp, Homo sapien
gtttttgttgcccaagatcaagatg

SEQ ID NO: 1921927 - DNA, 25 bp, Homo sapien
tagtatagatgcaagatgagagtgc

SEQ ID NO: 1921928 - DNA, 25 bp, Homo sapien
atctggccagcagagtaaacttcaa

SEQ ID NO: 1921929 - DNA, 25 bp, Homo sapien
tgctagagtgaaagaaagcacttct

SEQ ID NO: 1921930 - DNA, 25 bp, Homo sapien
cagctatcagatggttgccggcatg

SEQ ID NO: 1921931 - DNA, 25 bp, Homo sapien
tgccggcatgtgaaaagggaagaaa

SEQ ID NO: 1921932 - DNA, 25 bp, Homo sapien
ggtctcaggaccctttgacagtgct

SEQ ID NO: 1921933 - DNA, 25 bp, Homo sapien
tctgctagctataatgactggtaca

SEQ ID NO: 1921934 - DNA, 25 bp, Homo sapien
gaacctctttaagtgtgtcaggcac

SEQ ID NO: 1921935 - DNA, 25 bp, Homo sapien
tctgagcacatatggagggagcatg

SEQ ID NO: 1921936 - DNA, 25 bp, Homo sapien
tgcaaagactatgaggttggcagct

SEQ ID NO: 1921937 - DNA, 25 bp, Homo sapien
ctttgagcaaaggagtggtacgatc

SEQ ID NO: 1921938 - DNA, 25 bp, Homo sapien
aagctggatttttgagcagcaccac

SEQ ID NO: 1921939 - DNA, 25 bp, Homo sapien
cacctgctggtcctacacacgtttt

SEQ ID NO: 1921940 - DNA, 25 bp, Homo sapien
agcctctgggccctaatacaaagca

SEQ ID NO: 1921941 - DNA, 25 bp, Homo sapien
ggccctaatacaaagcaagcacact

SEQ ID NO: 1921942 - DNA, 25 bp, Homo sapien
acggccgcgcgcgttcccggcagct

SEQ ID NO: 1921943 - DNA, 25 bp, Homo sapien
gtgacggccgcgcgcgttcccggca

SEQ ID NO: 1921944 - DNA, 25 bp, Homo sapien
cagctgcgggctccgaggccagaga

SEQ ID NO: 1921945 - DNA, 25 bp, Homo sapien
gctgcgggctccgaggccagagaga

SEQ ID NO: 1921946 - DNA, 25 bp, Homo sapien
gtgaacgccggccactctaggatcc

SEQ ID NO: 1921947 - DNA, 25 bp, Homo sapien
ggaggcatagctcgcggtgtcacct

SEQ ID NO: 1921948 - DNA, 25 bp, Homo sapien
acgtactccgggtcggccttgcgct

SEQ ID NO: 1921949 - DNA, 25 bp, Homo sapien
gtacgtagatggacgcccttgggct

SEQ ID NO: 1921950 - DNA, 25 bp, Homo sapien
ggcaggcaagacgaccgtgacagcc

SEQ ID NO: 1921951 - DNA, 25 bp, Homo sapien
gcgggatgggacagttcagcccttt

SEQ ID NO: 1921952 - DNA, 25 bp, Homo sapien
gcgcagaggcgggatgggacagttc

SEQ ID NO: 1921953 - DNA, 25 bp, Homo sapien
ggcaagacgaccgtgacagcccctg

SEQ ID NO: 1921954 - DNA, 25 bp, Homo sapien
gcggcgatggtttttcggcggtagc

SEQ ID NO: 1921955 - DNA, 25 bp, Homo sapien
tctggcctcgaggtgtaggggcggc

SEQ ID NO: 1921956 - DNA, 25 bp, Homo sapien
cgatggtttttcggcggtagcctgc

SEQ ID NO: 1921957 - DNA, 25 bp, Homo sapien
gtttttcggcggtagcctgctccat

SEQ ID NO: 1921958 - DNA, 25 bp, Homo sapien
tcagatcgaagccagggcgtacagt

SEQ ID NO: 1921959 - DNA, 25 bp, Homo sapien
ttgccttttcccggagtgtctctgg

SEQ ID NO: 1921960 - DNA, 25 bp, Homo sapien
gtcagacagtttgggccttgggtca

SEQ ID NO: 1921961 - DNA, 25 bp, Homo sapien
ctcctgctcagtgtctcggtcttgc

SEQ ID NO: 1921962 - DNA, 25 bp, Homo sapien
tctttgattaaagataatcgcttgc

SEQ ID NO: 1921963 - DNA, 25 bp, Homo sapien
cgcttgcttgaatctattacctgaa

SEQ ID NO: 1921964 - DNA, 25 bp, Homo sapien
gtaaaatttacaggtcattcattcc

SEQ ID NO: 1921965 - DNA, 25 bp, Homo sapien
cattgataatccctaaacccctttg

SEQ ID NO: 1921966 - DNA, 25 bp, Homo sapien
gtaaggcccctaacatcagtagatg

SEQ ID NO: 1921967 - DNA, 25 bp, Homo sapien
cagtagatggtcagttaacaagccc

SEQ ID NO: 1921968 - DNA, 25 bp, Homo sapien
taccgtaaacctagcaagagagagc

SEQ ID NO: 1921969 - DNA, 25 bp, Homo sapien
tacgatgagcgcactagtagagagc

SEQ ID NO: 1921970 - DNA, 25 bp, Homo sapien
taaacagaatctataggcagtgtgt

SEQ ID NO: 1921971 - DNA, 25 bp, Homo sapien
tatctgtgcattaatggtcctcatc

SEQ ID NO: 1921972 - DNA, 25 bp, Homo sapien
tctgcatggattggcataagaccat

SEQ ID NO: 1921973 - DNA, 25 bp, Homo sapien
gttttcagcttaatcacctgctcag

SEQ ID NO: 1921974 - DNA, 25 bp, Homo sapien
gattacgcagtaaatacccaagtga

SEQ ID NO: 1921975 - DNA, 25 bp, Homo sapien
tatgaaaagtaacgccaggaatagg

SEQ ID NO: 1921976 - DNA, 25 bp, Homo sapien
tagctaaatgttccagattacgcag

SEQ ID NO: 1921977 - DNA, 25 bp, Homo sapien
gatgcttcatgagtcccttcaagtg

SEQ ID NO: 1921978 - DNA, 25 bp, Homo sapien
tattagtcactggagctttacttgg

SEQ ID NO: 1921979 - DNA, 25 bp, Homo sapien
ggagtacatccacacgaaaaaccaa

SEQ ID NO: 1921980 - DNA, 25 bp, Homo sapien
tacttggagtacatccacacgaaaa

SEQ ID NO: 1921981 - DNA, 25 bp, Homo sapien
tcactggagctttacttggagtaca

SEQ ID NO: 1921982 - DNA, 25 bp, Homo sapien
ttagcaatagcctctaaatttgcag

SEQ ID NO: 1921983 - DNA, 25 bp, Homo sapien
aatagcctctaaatttgcaggccca

SEQ ID NO: 1921984 - DNA, 25 bp, Homo sapien
ttcttagcaatagcctctaaatttg

SEQ ID NO: 1921985 - DNA, 25 bp, Homo sapien
cctttcttagcaatagcctctaaat

SEQ ID NO: 1921986 - DNA, 25 bp, Homo sapien
tgaatccagtttaagggccccactc

SEQ ID NO: 1921987 - DNA, 25 bp, Homo sapien
gattatttcaactagccgggtggtg

SEQ ID NO: 1921988 - DNA, 25 bp, Homo sapien
ccggtggcccttggatgaattgctt

SEQ ID NO: 1921989 - DNA, 25 bp, Homo sapien
ccaaatatagctctctgcctgaaca

SEQ ID NO: 1921990 - DNA, 25 bp, Homo sapien
ctgatcttactctctggagtcatta

SEQ ID NO: 1921991 - DNA, 25 bp, Homo sapien
ggacgaatctgatcttactctctgg

SEQ ID NO: 1921992 - DNA, 25 bp, Homo sapien
gatcttactctctggagtcattaac

SEQ ID NO: 1921993 - DNA, 25 bp, Homo sapien
gacgaatctgatcttactctctgga

SEQ ID NO: 1921994 - DNA, 25 bp, Homo sapien
gctctaatcataaagtactatccat

SEQ ID NO: 1921995 - DNA, 25 bp, Homo sapien
catgatctgatgtgaattctccata

SEQ ID NO: 1921996 - DNA, 25 bp, Homo sapien
taactctctctgtatgctctaatca

SEQ ID NO: 1921997 - DNA, 25 bp, Homo sapien
gaaaagcttaattgtaactctctct

SEQ ID NO: 1921998 - DNA, 25 bp, Homo sapien
tcaacagactgagtaaagctacacg

SEQ ID NO: 1921999 - DNA, 25 bp, Homo sapien
gatagcagtgagtttccctaacggg

SEQ ID NO: 1922000 - DNA, 25 bp, Homo sapien
aaaactcagtctttgacccgagaga

SEQ ID NO: 1922001 - DNA, 25 bp, Homo sapien
tacacataatagctagacgaggtgg

SEQ ID NO: 1922002 - DNA, 25 bp, Homo sapien
aaactttctcttcacagctgtgaat

SEQ ID NO: 1922003 - DNA, 25 bp, Homo sapien
tgggaaactttctcttcacagctgt

SEQ ID NO: 1922004 - DNA, 25 bp, Homo sapien
actttctcttcacagctgtgaattt

SEQ ID NO: 1922005 - DNA, 25 bp, Homo sapien
ggaaactttctcttcacagctgtga

SEQ ID NO: 1922006 - DNA, 25 bp, Homo sapien
ctacaaaggaaaatatgcctccatt

SEQ ID NO: 1922007 - DNA, 25 bp, Homo sapien
caaaggaaaatatgcctccattatg

SEQ ID NO: 1922008 - DNA, 25 bp, Homo sapien
aatatgcctccattatgaacaattg

SEQ ID NO: 1922009 - DNA, 25 bp, Homo sapien
atgcctccattatgaacaattgctt

SEQ ID NO: 1922010 - DNA, 25 bp, Homo sapien
caatattgtaagaggagtactgcct

SEQ ID NO: 1922011 - DNA, 25 bp, Homo sapien
taatgtagatgagcttatgacaaca

SEQ ID NO: 1922012 - DNA, 25 bp, Homo sapien
actggttaaagtcctagatgttgga

SEQ ID NO: 1922013 - DNA, 25 bp, Homo sapien
cagagctgtgcctataatggagtaa

SEQ ID NO: 1922014 - DNA, 25 bp, Homo sapien
aatagtttcctgatagaccctacag

SEQ ID NO: 1922015 - DNA, 25 bp, Homo sapien
taaacagagcattcagatggtaacc

SEQ ID NO: 1922016 - DNA, 25 bp, Homo sapien
cgtagagtaatggaagacttagctc

SEQ ID NO: 1922017 - DNA, 25 bp, Homo sapien
tattgcaagggataatctacgtaga

SEQ ID NO: 1922018 - DNA, 25 bp, Homo sapien
gatgattggcttcatgagtttccat

SEQ ID NO: 1922019 - DNA, 25 bp, Homo sapien
agtctcagatgattggcttcatgag

SEQ ID NO: 1922020 - DNA, 25 bp, Homo sapien
gatttccaagtctcagatgattggc

SEQ ID NO: 1922021 - DNA, 25 bp, Homo sapien
ctttctgatttccaagtctcagatg

SEQ ID NO: 1922022 - DNA, 25 bp, Homo sapien
cttgatgtcacagctctaaagtaag

SEQ ID NO: 1922023 - DNA, 25 bp, Homo sapien
cagtgtgactacttcctgaggtgga

SEQ ID NO: 1922024 - DNA, 25 bp, Homo sapien
catttagtaatcctggcatgatcag

SEQ ID NO: 1922025 - DNA, 25 bp, Homo sapien
gaggtggacatctcctattcagagt

SEQ ID NO: 1922026 - DNA, 25 bp, Homo sapien
tataaccttgatatatggaaaggct

SEQ ID NO: 1922027 - DNA, 25 bp, Homo sapien
gacattatccctaatacttgaagaa

SEQ ID NO: 1922028 - DNA, 25 bp, Homo sapien
tagctgcaactacacgtgcgccatc

SEQ ID NO: 1922029 - DNA, 25 bp, Homo sapien
gacagggtcttattactccattgcc

SEQ ID NO: 1922030 - DNA, 25 bp, Homo sapien
tagagtgttattttacttttatatg

SEQ ID NO: 1922031 - DNA, 25 bp, Homo sapien
atactttttatgttattttagagtg

SEQ ID NO: 1922032 - DNA, 25 bp, Homo sapien
ctatactttttatgttattttagag

SEQ ID NO: 1922033 - DNA, 25 bp, Homo sapien
agtgttattttacttttatatgtag

SEQ ID NO: 1922034 - DNA, 25 bp, Homo sapien
actcacttacccagagagactttca

SEQ ID NO: 1922035 - DNA, 25 bp, Homo sapien
cagtcctgcaagctcgattcaccat

SEQ ID NO: 1922036 - DNA, 25 bp, Homo sapien
gctcgattcaccataaataccctat

SEQ ID NO: 1922037 - DNA, 25 bp, Homo sapien
taccctatatgagcattcaattttt

SEQ ID NO: 1922038 - DNA, 25 bp, Homo sapien
tatgccaagcccatacgtggtaggt

SEQ ID NO: 1922039 - DNA, 25 bp, Homo sapien
gatgacctaatctctggcaactgtg

SEQ ID NO: 1922040 - DNA, 25 bp, Homo sapien
tagattggccccgaagagatgacct

SEQ ID NO: 1922041 - DNA, 25 bp, Homo sapien
gccgaggtatgtagtaagctgcacc

SEQ ID NO: 1922042 - DNA, 25 bp, Homo sapien
aaaatctgacgccagcagaggttgg

SEQ ID NO: 1922043 - DNA, 25 bp, Homo sapien
gaataataaggaagcgaaacagtct

SEQ ID NO: 1922044 - DNA, 25 bp, Homo sapien
tcttcaacactacaaaggctgagag

SEQ ID NO: 1922045 - DNA, 25 bp, Homo sapien
taaaggtgcaaactgaagcagtaag

SEQ ID NO: 1922046 - DNA, 25 bp, Homo sapien
tgccagcgcagaatcactttctctt

SEQ ID NO: 1922047 - DNA, 25 bp, Homo sapien
tacatgccagcgcagaatcactttc

SEQ ID NO: 1922048 - DNA, 25 bp, Homo sapien
tagagcactacatgccagcgcagaa

SEQ ID NO: 1922049 - DNA, 25 bp, Homo sapien
tgaaatatgtagagcactacatgcc

SEQ ID NO: 1922050 - DNA, 25 bp, Homo sapien
ggagttttgctaatatggatttgct

SEQ ID NO: 1922051 - DNA, 25 bp, Homo sapien
gaaaatgcatagtaatgaagtgatc

SEQ ID NO: 1922052 - DNA, 25 bp, Homo sapien
gttaattatatttgtgcaagaaatt

SEQ ID NO: 1922053 - DNA, 25 bp, Homo sapien
tgaagtgatcatgaaattttattag

SEQ ID NO: 1922054 - DNA, 25 bp, Homo sapien
cacatgctgtagtaaattctgctcc

SEQ ID NO: 1922055 - DNA, 25 bp, Homo sapien
tgctgtagtaaattctgctcctcca

SEQ ID NO: 1922056 - DNA, 25 bp, Homo sapien
catgctgtagtaaattctgctcctc

SEQ ID NO: 1922057 - DNA, 25 bp, Homo sapien
tcacatgctgtagtaaattctgctc

SEQ ID NO: 1922058 - DNA, 25 bp, Homo sapien
ccagcgcaacacttattaaaggaag

SEQ ID NO: 1922059 - DNA, 25 bp, Homo sapien
tgaaccagcgcaacacttattaaag

SEQ ID NO: 1922060 - DNA, 25 bp, Homo sapien
aaccagcgcaacacttattaaagga

SEQ ID NO: 1922061 - DNA, 25 bp, Homo sapien
cttgaaccagcgcaacacttattaa

SEQ ID NO: 1922062 - DNA, 25 bp, Homo sapien
cacatcaaaggatagcagaagcttg

SEQ ID NO: 1922063 - DNA, 25 bp, Homo sapien
aatgtgttacagaagatagggctcc

SEQ ID NO: 1922064 - DNA, 25 bp, Homo sapien
taggttctgacctacaatgcaaagg

SEQ ID NO: 1922065 - DNA, 25 bp, Homo sapien
cactgctcccatgtagaaaggatta

SEQ ID NO: 1922066 - DNA, 25 bp, Homo sapien
ccaagaagaatttttcctctttgct

SEQ ID NO: 1922067 - DNA, 25 bp, Homo sapien
cttgataggccaagaagaatttttc

SEQ ID NO: 1922068 - DNA, 25 bp, Homo sapien
gccaagaagaatttttcctctttgc

SEQ ID NO: 1922069 - DNA, 25 bp, Homo sapien
agaagaatttttcctctttgcttct

SEQ ID NO: 1922070 - DNA, 25 bp, Homo sapien
ttctcatctcctctggatacagacc

SEQ ID NO: 1922071 - DNA, 25 bp, Homo sapien
caatccatagttctttttctcatct

SEQ ID NO: 1922072 - DNA, 25 bp, Homo sapien
ttttctcatctcctctggatacaga

SEQ ID NO: 1922073 - DNA, 25 bp, Homo sapien
ttccaatccatagttctttttctca

SEQ ID NO: 1922074 - DNA, 25 bp, Homo sapien
atgtatatacttcattaacatgtaa

SEQ ID NO: 1922075 - DNA, 25 bp, Homo sapien
tgattatcctctacggcacaaaaaa

SEQ ID NO: 1922076 - DNA, 25 bp, Homo sapien
taaatgattatcctctacggcacaa

SEQ ID NO: 1922077 - DNA, 25 bp, Homo sapien
gtaattaaatgattatcctctacgg

SEQ ID NO: 1922078 - DNA, 25 bp, Homo sapien
tgttaaggtgttttgcatgaacatg

SEQ ID NO: 1922079 - DNA, 25 bp, Homo sapien
tagggctccttgagctcagctttgc

SEQ ID NO: 1922080 - DNA, 25 bp, Homo sapien
tgactgttgatatcctagggctcct

SEQ ID NO: 1922081 - DNA, 25 bp, Homo sapien
gatcactatggagttctactcaggg

SEQ ID NO: 1922082 - DNA, 25 bp, Homo sapien
taagagtagtccaaactcattgcct

SEQ ID NO: 1922083 - DNA, 25 bp, Homo sapien
acccaaggactaatcagacccaaca

SEQ ID NO: 1922084 - DNA, 25 bp, Homo sapien
attaacttctgagatcggcaagatt

SEQ ID NO: 1922085 - DNA, 25 bp, Homo sapien
aggactaatcagacccaacactgat

SEQ ID NO: 1922086 - DNA, 25 bp, Homo sapien
gacccaacactgattaacttctgag

SEQ ID NO: 1922087 - DNA, 25 bp, Homo sapien
gttgaattatgactaacaggtaaaa

SEQ ID NO: 1922088 - DNA, 25 bp, Homo sapien
aaggccctgacatatacactacctc

SEQ ID NO: 1922089 - DNA, 25 bp, Homo sapien
tcaaggccctgacatatacactacc

SEQ ID NO: 1922090 - DNA, 25 bp, Homo sapien
actctcaaggccctgacatatacac

SEQ ID NO: 1922091 - DNA, 25 bp, Homo sapien
tggatgcagggtgtacaggaactct

SEQ ID NO: 1922092 - DNA, 25 bp, Homo sapien
aactggatgcagggtgtacaggaac

SEQ ID NO: 1922093 - DNA, 25 bp, Homo sapien
actggatgcagggtgtacaggaact

SEQ ID NO: 1922094 - DNA, 25 bp, Homo sapien
ctggatgcagggtgtacaggaactc

SEQ ID NO: 1922095 - DNA, 25 bp, Homo sapien
tataaatgtatctgccatacatgtc

SEQ ID NO: 1922096 - DNA, 25 bp, Homo sapien
catcataaccattagtaaaatataa

SEQ ID NO: 1922097 - DNA, 25 bp, Homo sapien
agtcatcataaccattagtaaaata

SEQ ID NO: 1922098 - DNA, 25 bp, Homo sapien
aaatataaatgtatctgccatacat

SEQ ID NO: 1922099 - DNA, 25 bp, Homo sapien
tgccccacggacaatgaggcctttc

SEQ ID NO: 1922100 - DNA, 25 bp, Homo sapien
tattttttgccccacggacaatgag

SEQ ID NO: 1922101 - DNA, 25 bp, Homo sapien
ttttgccccacggacaatgaggcct

SEQ ID NO: 1922102 - DNA, 25 bp, Homo sapien
ttttttgccccacggacaatgaggc

SEQ ID NO: 1922103 - DNA, 25 bp, Homo sapien
tccaccaggaaactgctgaagtgtt

SEQ ID NO: 1922104 - DNA, 25 bp, Homo sapien
tgtactataaagtgacaatcctgtt

SEQ ID NO: 1922105 - DNA, 25 bp, Homo sapien
tccttctgaaggtcaatggatccac

SEQ ID NO: 1922106 - DNA, 25 bp, Homo sapien
gttcagagtaagaatgccaatgcca

SEQ ID NO: 1922107 - DNA, 25 bp, Homo sapien
tgcaaagctttcaggcaaaaagctg

SEQ ID NO: 1922108 - DNA, 25 bp, Homo sapien
tctgcaaagctttcaggcaaaaagc

SEQ ID NO: 1922109 - DNA, 25 bp, Homo sapien
ttcaggcaaaaagctggaaagggtc

SEQ ID NO: 1922110 - DNA, 25 bp, Homo sapien
cttctgcaaagctttcaggcaaaaa

SEQ ID NO: 1922111 - DNA, 25 bp, Homo sapien
ttcactacccttagaccgaagttca

SEQ ID NO: 1922112 - DNA, 25 bp, Homo sapien
actacccttagaccgaagttcagtg

SEQ ID NO: 1922113 - DNA, 25 bp, Homo sapien
cattcataatcataaccctcccata

SEQ ID NO: 1922114 - DNA, 25 bp, Homo sapien
tcccatactcaaccattattctttc

SEQ ID NO: 1922115 - DNA, 25 bp, Homo sapien
tgtctgtgccagaaaaacctgagaa

SEQ ID NO: 1922116 - DNA, 25 bp, Homo sapien
cagcaattagtatgaacgccatcag

SEQ ID NO: 1922117 - DNA, 25 bp, Homo sapien
ctctcattgtaaagggtctgtctgc

SEQ ID NO: 1922118 - DNA, 25 bp, Homo sapien
tagattcactgaccccaagtttaga

SEQ ID NO: 1922119 - DNA, 25 bp, Homo sapien
gctgaacaagctcactaccaagcca

SEQ ID NO: 1922120 - DNA, 25 bp, Homo sapien
caggctggcttcccttcctggaatg

SEQ ID NO: 1922121 - DNA, 25 bp, Homo sapien
gcttcttcacaggctggcttccctt

SEQ ID NO: 1922122 - DNA, 25 bp, Homo sapien
ggctggcttcccttcctggaatgtt

SEQ ID NO: 1922123 - DNA, 25 bp, Homo sapien
ttcttcacaggctggcttcccttcc

SEQ ID NO: 1922124 - DNA, 25 bp, Homo sapien
aaagtgtaatctcgcgacctcgcgg

SEQ ID NO: 1922125 - DNA, 25 bp, Homo sapien
gcacagggcctcgaatgtattccga

SEQ ID NO: 1922126 - DNA, 25 bp, Homo sapien
ctctgggaagaccgattcatctctt

SEQ ID NO: 1922127 - DNA, 25 bp, Homo sapien
aatcagcatgtagaaagcaagcctc

SEQ ID NO: 1922128 - DNA, 25 bp, Homo sapien
ggtacagtccattccacggcgacat

SEQ ID NO: 1922129 - DNA, 25 bp, Homo sapien
acggcgacattttaggattctccca

SEQ ID NO: 1922130 - DNA, 25 bp, Homo sapien
cttgcaagggacaagccgcggagcc

SEQ ID NO: 1922131 - DNA, 25 bp, Homo sapien
cacgtttggagaagcgagcggtaca

SEQ ID NO: 1922132 - DNA, 25 bp, Homo sapien
caggccacggtggtgacttcctttt

SEQ ID NO: 1922133 - DNA, 25 bp, Homo sapien
cctacacacgcttttccgttttgcg

SEQ ID NO: 1922134 - DNA, 25 bp, Homo sapien
tttgcgtgcctttgtttccgctccc

SEQ ID NO: 1922135 - DNA, 25 bp, Homo sapien
tctccgcgtcttctcttttactatc

SEQ ID NO: 1922136 - DNA, 25 bp, Homo sapien
gatttctcaaaatgaatgagaacac

SEQ ID NO: 1922137 - DNA, 25 bp, Homo sapien
ttggttttcagatttctcaaaatga

SEQ ID NO: 1922138 - DNA, 25 bp, Homo sapien
aatgaatgagaacacttaataacat

SEQ ID NO: 1922139 - DNA, 25 bp, Homo sapien
caaaatgaatgagaacacttaataa

SEQ ID NO: 1922140 - DNA, 25 bp, Homo sapien
agcagagaaaactgcgtacatattg

SEQ ID NO: 1922141 - DNA, 25 bp, Homo sapien
cagagaaaactgcgtacatattggt

SEQ ID NO: 1922142 - DNA, 25 bp, Homo sapien
gcagagaaaactgcgtacatattgg

SEQ ID NO: 1922143 - DNA, 25 bp, Homo sapien
ttggtggccatgtacttggaaaaag

SEQ ID NO: 1922144 - DNA, 25 bp, Homo sapien
ggtggccatgtacttggaaaaaggc

SEQ ID NO: 1922145 - DNA, 25 bp, Homo sapien
ggccatgtacttggaaaaaggccgc

SEQ ID NO: 1922146 - DNA, 25 bp, Homo sapien
ccatgtacttggaaaaaggccgcat

SEQ ID NO: 1922147 - DNA, 25 bp, Homo sapien
caagttcaggatgtgaggttacaga

SEQ ID NO: 1922148 - DNA, 25 bp, Homo sapien
taacaagcagatcattcaccagaca

SEQ ID NO: 1922149 - DNA, 25 bp, Homo sapien
tacaagcaccctgtgatcagaacct

SEQ ID NO: 1922150 - DNA, 25 bp, Homo sapien
cagaaccttgtccttaggtcagatg

SEQ ID NO: 1922151 - DNA, 25 bp, Homo sapien
tattgtgacgttagagagggagctc

SEQ ID NO: 1922152 - DNA, 25 bp, Homo sapien
tatttatgctggcttgttacaacgc

SEQ ID NO: 1922153 - DNA, 25 bp, Homo sapien
catgttagctgtgatttgaccagag

SEQ ID NO: 1922154 - DNA, 25 bp, Homo sapien
tacaacgccttgtcctttaggcaca

SEQ ID NO: 1922155 - DNA, 25 bp, Homo sapien
tgacaatagtatggccaatcaatct

SEQ ID NO: 1922156 - DNA, 25 bp, Homo sapien
caaaatgcgcataatacagtgacaa

SEQ ID NO: 1922157 - DNA, 25 bp, Homo sapien
caaacactcctatgttactgcttgg

SEQ ID NO: 1922158 - DNA, 25 bp, Homo sapien
ttaaagatacgtgaaaaaacagagc

SEQ ID NO: 1922159 - DNA, 25 bp, Homo sapien
tattcaacgtaatctctgctggcat

SEQ ID NO: 1922160 - DNA, 25 bp, Homo sapien
cttaatttattcaacgtaatctctg

SEQ ID NO: 1922161 - DNA, 25 bp, Homo sapien
ttcaacgtaatctctgctggcattt

SEQ ID NO: 1922162 - DNA, 25 bp, Homo sapien
aatttattcaacgtaatctctgctg

SEQ ID NO: 1922163 - DNA, 25 bp, Homo sapien
gcagagcacaattgcagtcacattg

SEQ ID NO: 1922164 - DNA, 25 bp, Homo sapien
taggcttgaaagtatgatctattgc

SEQ ID NO: 1922165 - DNA, 25 bp, Homo sapien
tttcatcactgagcgaacatcacag

SEQ ID NO: 1922166 - DNA, 25 bp, Homo sapien
ggatatgatctgagaaacgtgttct

SEQ ID NO: 1922167 - DNA, 25 bp, Homo sapien
tcagttgacgctagagatgaatact

SEQ ID NO: 1922168 - DNA, 25 bp, Homo sapien
aatcagagcataggcattaaaagtg

SEQ ID NO: 1922169 - DNA, 25 bp, Homo sapien
gcagcacaaatgagccaagataata

SEQ ID NO: 1922170 - DNA, 25 bp, Homo sapien
gaaactcccaatgagagcaagataa

SEQ ID NO: 1922171 - DNA, 25 bp, Homo sapien
gcagatcatgagtgagcccaggctt

SEQ ID NO: 1922172 - DNA, 25 bp, Homo sapien
catgggacatttatacaggagagca

SEQ ID NO: 1922173 - DNA, 25 bp, Homo sapien
ggattctgtccctgcaatcttggca

SEQ ID NO: 1922174 - DNA, 25 bp, Homo sapien
tgctttgcaaacaataaggtcatag

SEQ ID NO: 1922175 - DNA, 25 bp, Homo sapien
gaaaagtgaccacccaagggcatcc

SEQ ID NO: 1922176 - DNA, 25 bp, Homo sapien
cagtgtacgagaagccatatggagt

SEQ ID NO: 1922177 - DNA, 25 bp, Homo sapien
cagataggttgcacagtccttgggc

SEQ ID NO: 1922178 - DNA, 25 bp, Homo sapien
tagtgacagtagagagcaaagttcc

SEQ ID NO: 1922179 - DNA, 25 bp, Homo sapien
tgtaatatagcaatccaggccaaag

SEQ ID NO: 1922180 - DNA, 25 bp, Homo sapien
gcttgtcggaagagaacaggtccgc

SEQ ID NO: 1922181 - DNA, 25 bp, Homo sapien
ctgcaaatgccttaagtggatacct

SEQ ID NO: 1922182 - DNA, 25 bp, Homo sapien
ggtccgcctgtaaacactcagaatg

SEQ ID NO: 1922183 - DNA, 25 bp, Homo sapien
ttaaaccatcaatgcttcggatcgc

SEQ ID NO: 1922184 - DNA, 25 bp, Homo sapien
ttgtgggtagttctccgcaaggcag

SEQ ID NO: 1922185 - DNA, 25 bp, Homo sapien
tcggatcgcagagaaatggtatagt

SEQ ID NO: 1922186 - DNA, 25 bp, Homo sapien
aatggtatagttgtgggtagttctc

SEQ ID NO: 1922187 - DNA, 25 bp, Homo sapien
tctggaggggagacgacgatttgct

SEQ ID NO: 1922188 - DNA, 25 bp, Homo sapien
ttttccatgtgaggcgttcactgac

SEQ ID NO: 1922189 - DNA, 25 bp, Homo sapien
atccttttccatgtgaggcgttcac

SEQ ID NO: 1922190 - DNA, 25 bp, Homo sapien
tggtctagcaggtcgggaaaatcct

SEQ ID NO: 1922191 - DNA, 25 bp, Homo sapien
tttctaaatgctgacttaatgtggc

SEQ ID NO: 1922192 - DNA, 25 bp, Homo sapien
tgttatctttttcggatctattcct

SEQ ID NO: 1922193 - DNA, 25 bp, Homo sapien
tatctttttcggatctattccttgc

SEQ ID NO: 1922194 - DNA, 25 bp, Homo sapien
gacttaatgtggcaccaccactgac

SEQ ID NO: 1922195 - DNA, 25 bp, Homo sapien
ccacaacaccataatttgacctggg

SEQ ID NO: 1922196 - DNA, 25 bp, Homo sapien
tcggacggccagacaaattactcgg

SEQ ID NO: 1922197 - DNA, 25 bp, Homo sapien
tactcggtctccagtcatgctcgtg

SEQ ID NO: 1922198 - DNA, 25 bp, Homo sapien
tatcctggaagcacttagaattttg

SEQ ID NO: 1922199 - DNA, 25 bp, Homo sapien
gataactgcgaggacttaggtgtcc

SEQ ID NO: 1922200 - DNA, 25 bp, Homo sapien
tcgataactgcgaggacttaggtgt

SEQ ID NO: 1922201 - DNA, 25 bp, Homo sapien
tttcgataactgcgaggacttaggt

SEQ ID NO: 1922202 - DNA, 25 bp, Homo sapien
cgataactgcgaggacttaggtgtc

SEQ ID NO: 1922203 - DNA, 25 bp, Homo sapien
tggttttccaaataccggacacatc

SEQ ID NO: 1922204 - DNA, 25 bp, Homo sapien
tttcttggtgggattatcaggcaca

SEQ ID NO: 1922205 - DNA, 25 bp, Homo sapien
tgcatttgtcttactaggcctgttg

SEQ ID NO: 1922206 - DNA, 25 bp, Homo sapien
caggcatgtgggcattggttttcca

SEQ ID NO: 1922207 - DNA, 25 bp, Homo sapien
gagatcctccgatgattttgagcag

SEQ ID NO: 1922208 - DNA, 25 bp, Homo sapien
aactgattggaagaatgcactggtc

SEQ ID NO: 1922209 - DNA, 25 bp, Homo sapien
gggctactgctctctgctactgagg

SEQ ID NO: 1922210 - DNA, 25 bp, Homo sapien
tcataggcttgttcagaatccgagc

SEQ ID NO: 1922211 - DNA, 25 bp, Homo sapien
acattatattaggtgtgatttgtaa

SEQ ID NO: 1922212 - DNA, 25 bp, Homo sapien
gaacattatattaggtgtgatttgt

SEQ ID NO: 1922213 - DNA, 25 bp, Homo sapien
aacattatattaggtgtgatttgta

SEQ ID NO: 1922214 - DNA, 25 bp, Homo sapien
tcccaccctagatagtacattttaa

SEQ ID NO: 1922215 - DNA, 25 bp, Homo sapien
ttttaataactcattagttcttaca

SEQ ID NO: 1922216 - DNA, 25 bp, Homo sapien
ctatctcccaccctagatagtacat

SEQ ID NO: 1922217 - DNA, 25 bp, Homo sapien
tagttcttacatgtaaggaggaggc

SEQ ID NO: 1922218 - DNA, 25 bp, Homo sapien
tatggttagaccgctttcgaatttc

SEQ ID NO: 1922219 - DNA, 25 bp, Homo sapien
tcaccttcgcaagttcttcaagagc

SEQ ID NO: 1922220 - DNA, 25 bp, Homo sapien
ttcactcaccttcgcaagttcttca

SEQ ID NO: 1922221 - DNA, 25 bp, Homo sapien
gaaagctgcataattcttcactcac

SEQ ID NO: 1922222 - DNA, 25 bp, Homo sapien
gtcttcctcagaagtcctcaggtca

SEQ ID NO: 1922223 - DNA, 25 bp, Homo sapien
tcttcctcagaagtcctcaggtcag

SEQ ID NO: 1922224 - DNA, 25 bp, Homo sapien
gccagaacagctcttgctgtcttcc

SEQ ID NO: 1922225 - DNA, 25 bp, Homo sapien
tgtactgagggcgccagaacagctc

SEQ ID NO: 1922226 - DNA, 25 bp, Homo sapien
catctttgtgattcgtccttataaa

SEQ ID NO: 1922227 - DNA, 25 bp, Homo sapien
gattcgtccttataaattcactttg

SEQ ID NO: 1922228 - DNA, 25 bp, Homo sapien
cagaccatctttgtgattcgtcctt

SEQ ID NO: 1922229 - DNA, 25 bp, Homo sapien
ggtaatttggggaagattctatcac

SEQ ID NO: 1922230 - DNA, 25 bp, Homo sapien
cttctcatggtaaagatcaatgatc

SEQ ID NO: 1922231 - DNA, 25 bp, Homo sapien
atggtcttctcatggtaaagatcaa

SEQ ID NO: 1922232 - DNA, 25 bp, Homo sapien
catggtaaagatcaatgatcttagc

SEQ ID NO: 1922233 - DNA, 25 bp, Homo sapien
ggtcttctcatggtaaagatcaatg

SEQ ID NO: 1922234 - DNA, 25 bp, Homo sapien
tatgagatcttagttgaacctgcac

SEQ ID NO: 1922235 - DNA, 25 bp, Homo sapien
caaatgactctatgtttaacagccg

SEQ ID NO: 1922236 - DNA, 25 bp, Homo sapien
tttagtagggcaacacatggatgct

SEQ ID NO: 1922237 - DNA, 25 bp, Homo sapien
tgggtattaatgcttcggcctccaa

SEQ ID NO: 1922238 - DNA, 25 bp, Homo sapien
cagttgagagaagcactagagttga

SEQ ID NO: 1922239 - DNA, 25 bp, Homo sapien
tcagttgagagaagcactagagttg

SEQ ID NO: 1922240 - DNA, 25 bp, Homo sapien
ttgagagaagcactagagttgatgc

SEQ ID NO: 1922241 - DNA, 25 bp, Homo sapien
cgataactcagttgagagaagcact

SEQ ID NO: 1922242 - DNA, 25 bp, Homo sapien
atcttttccttatgccagttagtct

SEQ ID NO: 1922243 - DNA, 25 bp, Homo sapien
catcttttccttatgccagttagtc

SEQ ID NO: 1922244 - DNA, 25 bp, Homo sapien
tccatcttttccttatgccagttag

SEQ ID NO: 1922245 - DNA, 25 bp, Homo sapien
ttccatcttttccttatgccagtta

SEQ ID NO: 1922246 - DNA, 25 bp, Homo sapien
tgttctcccactgcttatgtaggtc

SEQ ID NO: 1922247 - DNA, 25 bp, Homo sapien
tctcccactgcttatgtaggtccat

SEQ ID NO: 1922248 - DNA, 25 bp, Homo sapien
ctgtgttctcccactgcttatgtag

SEQ ID NO: 1922249 - DNA, 25 bp, Homo sapien
tgtgttctcccactgcttatgtagg

SEQ ID NO: 1922250 - DNA, 25 bp, Homo sapien
ggaagcttgaagttgttttatttga

SEQ ID NO: 1922251 - DNA, 25 bp, Homo sapien
taagtgtcagcaaagaagtgtttct

SEQ ID NO: 1922252 - DNA, 25 bp, Homo sapien
aacagtgtaagtgtcagcaaagaag

SEQ ID NO: 1922253 - DNA, 25 bp, Homo sapien
ttcttggaagcttgaagttgtttta

SEQ ID NO: 1922254 - DNA, 25 bp, Homo sapien
tataaacataacaagagagagttcc

SEQ ID NO: 1922255 - DNA, 25 bp, Homo sapien
tgcgcatgtgagatgtaatcatccc

SEQ ID NO: 1922256 - DNA, 25 bp, Homo sapien
tagtggacaagatgattaaatgcgc

SEQ ID NO: 1922257 - DNA, 25 bp, Homo sapien
gatgacaacagtctacttaagaaga

SEQ ID NO: 1922258 - DNA, 25 bp, Homo sapien
ggacaaagatcccaacagtcaatag

SEQ ID NO: 1922259 - DNA, 25 bp, Homo sapien
gtcaatagctttgtgggtgctggca

SEQ ID NO: 1922260 - DNA, 25 bp, Homo sapien
ggtgctggcactgccgaattaaggc

SEQ ID NO: 1922261 - DNA, 25 bp, Homo sapien
gaattaaggccacatacccaagcag

SEQ ID NO: 1922262 - DNA, 25 bp, Homo sapien
aataagtccaaccattccacagagc

SEQ ID NO: 1922263 - DNA, 25 bp, Homo sapien
aaagtctcagctcggtgaatctcga

SEQ ID NO: 1922264 - DNA, 25 bp, Homo sapien
tccacagagcagtactgacaagtcc

SEQ ID NO: 1922265 - DNA, 25 bp, Homo sapien
gaaatcctatggatgctcgaccact

SEQ ID NO: 1922266 - DNA, 25 bp, Homo sapien
gagtctctcctaggagtacccacag

SEQ ID NO: 1922267 - DNA, 25 bp, Homo sapien
tctgtgccaggttagaccaagagga

SEQ ID NO: 1922268 - DNA, 25 bp, Homo sapien
tgtcttcaacaggtctggtcagctc

SEQ ID NO: 1922269 - DNA, 25 bp, Homo sapien
gcattccaccaaggagatcacggtt

SEQ ID NO: 1922270 - DNA, 25 bp, Homo sapien
gggcttatgcgcaggcatttccaga

SEQ ID NO: 1922271 - DNA, 25 bp, Homo sapien
tgggaatgcttgtccaccacaagag

SEQ ID NO: 1922272 - DNA, 25 bp, Homo sapien
ttttctttagtgaccagcagagtcc

SEQ ID NO: 1922273 - DNA, 25 bp, Homo sapien
tacagattcttgacttggaggatac

SEQ ID NO: 1922274 - DNA, 25 bp, Homo sapien
tccatattgccccagggagtaacta

SEQ ID NO: 1922275 - DNA, 25 bp, Homo sapien
taatccacctatatcttctacgaga

SEQ ID NO: 1922276 - DNA, 25 bp, Homo sapien
cagcagtaaagcatggctcaggctt

SEQ ID NO: 1922277 - DNA, 25 bp, Homo sapien
tagatttatcactaccgggtggcag

SEQ ID NO: 1922278 - DNA, 25 bp, Homo sapien
ggtgttagattttgagcccctggag

SEQ ID NO: 1922279 - DNA, 25 bp, Homo sapien
tacagaacgggaggcctaaagtcac

SEQ ID NO: 1922280 - DNA, 25 bp, Homo sapien
tactcaccacttcggcacagaaaag

SEQ ID NO: 1922281 - DNA, 25 bp, Homo sapien
gaagaggtagcacatactaaggact

SEQ ID NO: 1922282 - DNA, 25 bp, Homo sapien
gcagaatcagccagacccattttca

SEQ ID NO: 1922283 - DNA, 25 bp, Homo sapien
tgcagacccattttccatggccaag

SEQ ID NO: 1922284 - DNA, 25 bp, Homo sapien
gggtcttctgcagaaccatgcagac

SEQ ID NO: 1922285 - DNA, 25 bp, Homo sapien
ggtccctcagtaagtccatattagc

SEQ ID NO: 1922286 - DNA, 25 bp, Homo sapien
ctataagcacaataccttgatgggt

SEQ ID NO: 1922287 - DNA, 25 bp, Homo sapien
taagcacaataccttgatgggtaat

SEQ ID NO: 1922288 - DNA, 25 bp, Homo sapien
tataagcacaataccttgatgggta

SEQ ID NO: 1922289 - DNA, 25 bp, Homo sapien
ataagcacaataccttgatgggtaa

SEQ ID NO: 1922290 - DNA, 25 bp, Homo sapien
tcagtatgccaattatttatcaaga

SEQ ID NO: 1922291 - DNA, 25 bp, Homo sapien
tgtgaatgtccgtccagcttttgaa

SEQ ID NO: 1922292 - DNA, 25 bp, Homo sapien
tggaaatgtgaccaaattgtgaatg

SEQ ID NO: 1922293 - DNA, 25 bp, Homo sapien
gatgcaacctggcaaagatacttta

SEQ ID NO: 1922294 - DNA, 25 bp, Homo sapien
tatagcattggttactacagaaatt

SEQ ID NO: 1922295 - DNA, 25 bp, Homo sapien
ttagtgtttgggcttcttattgaat

SEQ ID NO: 1922296 - DNA, 25 bp, Homo sapien
taaagaaataagcagtcttcagtgt

SEQ ID NO: 1922297 - DNA, 25 bp, Homo sapien
tggtcttggtaagatgagttgtatc

SEQ ID NO: 1922298 - DNA, 25 bp, Homo sapien
tactacaatgaatggtaaatgatga

SEQ ID NO: 1922299 - DNA, 25 bp, Homo sapien
aaaatactacaatgaatggtaaatg

SEQ ID NO: 1922300 - DNA, 25 bp, Homo sapien
tacaatgaatggtaaatgatgaaag

SEQ ID NO: 1922301 - DNA, 25 bp, Homo sapien
aaatactacaatgaatggtaaatga

SEQ ID NO: 1922302 - DNA, 25 bp, Homo sapien
atattgttgtgtaagaaagtgatga

SEQ ID NO: 1922303 - DNA, 25 bp, Homo sapien
tattgttgtgtaagaaagtgatgaa

SEQ ID NO: 1922304 - DNA, 25 bp, Homo sapien
gccgtggctcgcaataggcagaact

SEQ ID NO: 1922305 - DNA, 25 bp, Homo sapien
gctccacgggccagcctggccaccg

SEQ ID NO: 1922306 - DNA, 25 bp, Homo sapien
ggccaccgccgtggctcgcaatagg

SEQ ID NO: 1922307 - DNA, 25 bp, Homo sapien
gggcgcggcagtccgggcgccgaga

SEQ ID NO: 1922308 - DNA, 25 bp, Homo sapien
ttgcggaaggccttcatctgagcgt

SEQ ID NO: 1922309 - DNA, 25 bp, Homo sapien
acttgggcacctcgaggcggtcgat

SEQ ID NO: 1922310 - DNA, 25 bp, Homo sapien
cgcggtcgtccgcagacttgggcac

SEQ ID NO: 1922311 - DNA, 25 bp, Homo sapien
catctgagcgttgatgcggtagagc

SEQ ID NO: 1922312 - DNA, 25 bp, Homo sapien
agttcgacgattttcctgcccagga

SEQ ID NO: 1922313 - DNA, 25 bp, Homo sapien
tggccgccggacttgtacttgtact

SEQ ID NO: 1922314 - DNA, 25 bp, Homo sapien
catgttggacataagcacgcggttc

SEQ ID NO: 1922315 - DNA, 25 bp, Homo sapien
tgtacttgttgagctccgccgtgat

SEQ ID NO: 1922316 - DNA, 25 bp, Homo sapien
gggcaaaggactgtccagatcccca

SEQ ID NO: 1922317 - DNA, 25 bp, Homo sapien
catcaaagcggcttcttccttaaca

SEQ ID NO: 1922318 - DNA, 25 bp, Homo sapien
agatccccataaaaggatctgtact

SEQ ID NO: 1922319 - DNA, 25 bp, Homo sapien
tctggagctcgtgttcaaatctgtc

SEQ ID NO: 1922320 - DNA, 25 bp, Homo sapien
ttcttcagatcacttaaattctctg

SEQ ID NO: 1922321 - DNA, 25 bp, Homo sapien
cagatcacttaaattctctggcaaa

SEQ ID NO: 1922322 - DNA, 25 bp, Homo sapien
gatcacttaaattctctggcaaatt

SEQ ID NO: 1922323 - DNA, 25 bp, Homo sapien
ttcagatcacttaaattctctggca

SEQ ID NO: 1922324 - DNA, 25 bp, Homo sapien
tgtactagttgaaattttatttcca

SEQ ID NO: 1922325 - DNA, 25 bp, Homo sapien
tactagttgaaattttatttccaca

SEQ ID NO: 1922326 - DNA, 25 bp, Homo sapien
tagttgaaattttatttccacatac

SEQ ID NO: 1922327 - DNA, 25 bp, Homo sapien
ctagttgaaattttatttccacata

SEQ ID NO: 1922328 - DNA, 25 bp, Homo sapien
attttggcaaatctttgcttcctct

SEQ ID NO: 1922329 - DNA, 25 bp, Homo sapien
cagattttggcaaatctttgcttcc

SEQ ID NO: 1922330 - DNA, 25 bp, Homo sapien
tgtgggagtctgttgagcctttttt

SEQ ID NO: 1922331 - DNA, 25 bp, Homo sapien
ctctgtgggagtctgttgagccttt

SEQ ID NO: 1922332 - DNA, 25 bp, Homo sapien
acaattaactctttcatcattgtag

SEQ ID NO: 1922333 - DNA, 25 bp, Homo sapien
gctaccagtgaagtagtttatgata

SEQ ID NO: 1922334 - DNA, 25 bp, Homo sapien
ctgtattttctaagcttctctggga

SEQ ID NO: 1922335 - DNA, 25 bp, Homo sapien
tcaagggactcaaggctaccagtga

SEQ ID NO: 1922336 - DNA, 25 bp, Homo sapien
taagatatgtctccctcagagtcag

SEQ ID NO: 1922337 - DNA, 25 bp, Homo sapien
tatgtctccctcagagtcagtgtac

SEQ ID NO: 1922338 - DNA, 25 bp, Homo sapien
agatatgtctccctcagagtcagtg

SEQ ID NO: 1922339 - DNA, 25 bp, Homo sapien
ctaagatatgtctccctcagagtca

SEQ ID NO: 1922340 - DNA, 25 bp, Homo sapien
tgtgcacgtcaagctgttctatatc

SEQ ID NO: 1922341 - DNA, 25 bp, Homo sapien
tactatcatcagtaattgagctgga

SEQ ID NO: 1922342 - DNA, 25 bp, Homo sapien
cgtcaagctgttctatatcttggct

SEQ ID NO: 1922343 - DNA, 25 bp, Homo sapien
tgagctggaattgtgcacgtcaagc

SEQ ID NO: 1922344 - DNA, 25 bp, Homo sapien
tcaaatgaggtccttagggaagacc

SEQ ID NO: 1922345 - DNA, 25 bp, Homo sapien
cactcaaggaatatgagagagcaca

SEQ ID NO: 1922346 - DNA, 25 bp, Homo sapien
gaatggcgcctatgagactgacaat

SEQ ID NO: 1922347 - DNA, 25 bp, Homo sapien
taacgtatgaatagggaatggcgcc

SEQ ID NO: 1922348 - DNA, 25 bp, Homo sapien
tctactatagcacagagcgactcct

SEQ ID NO: 1922349 - DNA, 25 bp, Homo sapien
gacatattcttaatcagactgttga

SEQ ID NO: 1922350 - DNA, 25 bp, Homo sapien
gtttactccactgaaactgtattct

SEQ ID NO: 1922351 - DNA, 25 bp, Homo sapien
gctagtagccaaggattttatatca

SEQ ID NO: 1922352 - DNA, 25 bp, Homo sapien
cagttcattctgtaaagcttgcttt

SEQ ID NO: 1922353 - DNA, 25 bp, Homo sapien
gtctcacagatacatcctttgcaac

SEQ ID NO: 1922354 - DNA, 25 bp, Homo sapien
ttttctaattcatggtgaagtctca

SEQ ID NO: 1922355 - DNA, 25 bp, Homo sapien
gcttgctttgcaatttcaacttcta

SEQ ID NO: 1922356 - DNA, 25 bp, Homo sapien
tcgatttccccggtctgggcgtagc

SEQ ID NO: 1922357 - DNA, 25 bp, Homo sapien
tgttggctctctccaactcgtggcg

SEQ ID NO: 1922358 - DNA, 25 bp, Homo sapien
gccttttgcgctcggctttgcggag

SEQ ID NO: 1922359 - DNA, 25 bp, Homo sapien
gcatcctcctcgaagaaagtgtccc

SEQ ID NO: 1922360 - DNA, 25 bp, Homo sapien
gtgacaggccgcgtgtcaaaatcaa

SEQ ID NO: 1922361 - DNA, 25 bp, Homo sapien
gtcaaaatcaaactcgcttccagcc

SEQ ID NO: 1922362 - DNA, 25 bp, Homo sapien
gacaggccgcgtgtcaaaatcaaac

SEQ ID NO: 1922363 - DNA, 25 bp, Homo sapien
tccagcccttccgacacacaccgta

SEQ ID NO: 1922364 - DNA, 25 bp, Homo sapien
tcttagcgtgcatctgagccgcggc

SEQ ID NO: 1922365 - DNA, 25 bp, Homo sapien
tcttgagatggaactggatgagctc

SEQ ID NO: 1922366 - DNA, 25 bp, Homo sapien
gcaacgccgcttccggagtttctgc

SEQ ID NO: 1922367 - DNA, 25 bp, Homo sapien
gagagtctcgttttcctctcgcagc

SEQ ID NO: 1922368 - DNA, 25 bp, Homo sapien
cccgagtttcgagggcacggactct

SEQ ID NO: 1922369 - DNA, 25 bp, Homo sapien
cggagcggcccctttgggcgccagg

SEQ ID NO: 1922370 - DNA, 25 bp, Homo sapien
gtttcgagggcacggactctagctc

SEQ ID NO: 1922371 - DNA, 25 bp, Homo sapien
acggactctagctcccgaggcggct

SEQ ID NO: 1922372 - DNA, 25 bp, Homo sapien
cggccccgtgcggctcccggtcttg

SEQ ID NO: 1922373 - DNA, 25 bp, Homo sapien
gcctcctcggatgctggcgggcggc

SEQ ID NO: 1922374 - DNA, 25 bp, Homo sapien
ctcctcggatgctggcgggcggccc

SEQ ID NO: 1922375 - DNA, 25 bp, Homo sapien
ctccgcctcctcggatgctggcggg

SEQ ID NO: 1922376 - DNA, 25 bp, Homo sapien
gaattgagtttagtgccggccccca

SEQ ID NO: 1922377 - DNA, 25 bp, Homo sapien
gattgtctgtcgcagcgaactgtcc

SEQ ID NO: 1922378 - DNA, 25 bp, Homo sapien
tctagcgggtgactgagctcgctgc

SEQ ID NO: 1922379 - DNA, 25 bp, Homo sapien
ctccgggtgcagacgagcctcagtg

SEQ ID NO: 1922380 - DNA, 25 bp, Homo sapien
cgaactgtccctcggtctagcgggt

SEQ ID NO: 1922381 - DNA, 25 bp, Homo sapien
gaacctaccagatgcgatttggaag

SEQ ID NO: 1922382 - DNA, 25 bp, Homo sapien
gatgcgatttggaagagcccattac

SEQ ID NO: 1922383 - DNA, 25 bp, Homo sapien
tggaagagcccattactagatcatc

SEQ ID NO: 1922384 - DNA, 25 bp, Homo sapien
ggctatgaacctaccagatgcgatt

SEQ ID NO: 1922385 - DNA, 25 bp, Homo sapien
tccctcatggtggtaagatcaattt

SEQ ID NO: 1922386 - DNA, 25 bp, Homo sapien
gaacccagaaggctggtgcatcttc

SEQ ID NO: 1922387 - DNA, 25 bp, Homo sapien
cttcttacatcgcatatcataggca

SEQ ID NO: 1922388 - DNA, 25 bp, Homo sapien
aagtgcccatttcctcctatatagc

SEQ ID NO: 1922389 - DNA, 25 bp, Homo sapien
cctagtttatcatcatgggtggcac

SEQ ID NO: 1922390 - DNA, 25 bp, Homo sapien
tgggtggcactaacatgggctatct

SEQ ID NO: 1922391 - DNA, 25 bp, Homo sapien
ccaggcgaaagcttgtgttccagta

SEQ ID NO: 1922392 - DNA, 25 bp, Homo sapien
tcagacagcattaacccaggcgaaa

SEQ ID NO: 1922393 - DNA, 25 bp, Homo sapien
catcattcatccccaaccctttaga

SEQ ID NO: 1922394 - DNA, 25 bp, Homo sapien
cattcatccccaaccctttagaaat

SEQ ID NO: 1922395 - DNA, 25 bp, Homo sapien
tcattcatccccaaccctttagaaa

SEQ ID NO: 1922396 - DNA, 25 bp, Homo sapien
cccatcattcatccccaacccttta

SEQ ID NO: 1922397 - DNA, 25 bp, Homo sapien
tctgcgccgaggaaagttcaacttc

SEQ ID NO: 1922398 - DNA, 25 bp, Homo sapien
tattgtatgcgactttccggctgag

SEQ ID NO: 1922399 - DNA, 25 bp, Homo sapien
gcagaggcgaggtttccaagtagct

SEQ ID NO: 1922400 - DNA, 25 bp, Homo sapien
ggctaacacgcgaggtaccaagctg

SEQ ID NO: 1922401 - DNA, 25 bp, Homo sapien
catatactttcccactaaacatggg

SEQ ID NO: 1922402 - DNA, 25 bp, Homo sapien
tagactgttacaaatgcttcctctg

SEQ ID NO: 1922403 - DNA, 25 bp, Homo sapien
gatccgcactgcttaatgctgcctg

SEQ ID NO: 1922404 - DNA, 25 bp, Homo sapien
gcagatcctcataattctagtttag

SEQ ID NO: 1922405 - DNA, 25 bp, Homo sapien
gtatcacatcctcatagtacaaaat

SEQ ID NO: 1922406 - DNA, 25 bp, Homo sapien
tggactgttgtcctggcttgaagta

SEQ ID NO: 1922407 - DNA, 25 bp, Homo sapien
catcttgaggtagtggactgttgtc

SEQ ID NO: 1922408 - DNA, 25 bp, Homo sapien
tgtcctggcttgaagtatcacatcc

SEQ ID NO: 1922409 - DNA, 25 bp, Homo sapien
ggaatagagattatcttcagtcaga

SEQ ID NO: 1922410 - DNA, 25 bp, Homo sapien
aagggaatagagattatcttcagtc

SEQ ID NO: 1922411 - DNA, 25 bp, Homo sapien
gggaatagagattatcttcagtcag

SEQ ID NO: 1922412 - DNA, 25 bp, Homo sapien
agggaatagagattatcttcagtca

SEQ ID NO: 1922413 - DNA, 25 bp, Homo sapien
agatgacactgttgtgaacgggagt

SEQ ID NO: 1922414 - DNA, 25 bp, Homo sapien
tgacactgttgtgaacgggagtggg

SEQ ID NO: 1922415 - DNA, 25 bp, Homo sapien
gaagatgacactgttgtgaacggga

SEQ ID NO: 1922416 - DNA, 25 bp, Homo sapien
ttccgtttgtttggggaagatgaca

SEQ ID NO: 1922417 - DNA, 25 bp, Homo sapien
ccagggatgtactagctactcctaa

SEQ ID NO: 1922418 - DNA, 25 bp, Homo sapien
gcattttacattgtgctgctcccac

SEQ ID NO: 1922419 - DNA, 25 bp, Homo sapien
catctgcattttacattgtgctgct

SEQ ID NO: 1922420 - DNA, 25 bp, Homo sapien
cccactaccagggatgtactagcta

SEQ ID NO: 1922421 - DNA, 25 bp, Homo sapien
gagtggcatttggtcatagtgccct

SEQ ID NO: 1922422 - DNA, 25 bp, Homo sapien
tcatagtgccctgattgaggaaagc

SEQ ID NO: 1922423 - DNA, 25 bp, Homo sapien
gagcctgaaagagtggcatttggtc

SEQ ID NO: 1922424 - DNA, 25 bp, Homo sapien
cctgattgaggaaagcgtactggtg

SEQ ID NO: 1922425 - DNA, 25 bp, Homo sapien
agcctgagattgggatttttgcaac

SEQ ID NO: 1922426 - DNA, 25 bp, Homo sapien
gatttttgcaacccttgatgaccat

SEQ ID NO: 1922427 - DNA, 25 bp, Homo sapien
tctttattaaactgctgtttccacc

SEQ ID NO: 1922428 - DNA, 25 bp, Homo sapien
ggatttttgcaacccttgatgacca

SEQ ID NO: 1922429 - DNA, 25 bp, Homo sapien
ttcacaatctgaagcagggcacact

SEQ ID NO: 1922430 - DNA, 25 bp, Homo sapien
gatggatgatatcagaacacttcac

SEQ ID NO: 1922431 - DNA, 25 bp, Homo sapien
aaccttggagatggatgatatcaga

SEQ ID NO: 1922432 - DNA, 25 bp, Homo sapien
tcactcctatctccagaaccttgga

SEQ ID NO: 1922433 - DNA, 25 bp, Homo sapien
agggaagttcttcactgggctactt

SEQ ID NO: 1922434 - DNA, 25 bp, Homo sapien
tcttcactgggctactttgtttcgc

SEQ ID NO: 1922435 - DNA, 25 bp, Homo sapien
gagggccactcagggaagttcttca

SEQ ID NO: 1922436 - DNA, 25 bp, Homo sapien
ctatccgtcagagggccactcaggg

SEQ ID NO: 1922437 - DNA, 25 bp, Homo sapien
cccaacttctttaacccatacgcag

SEQ ID NO: 1922438 - DNA, 25 bp, Homo sapien
ccaacttctttaacccatacgcaga

SEQ ID NO: 1922439 - DNA, 25 bp, Homo sapien
caacttctttaacccatacgcagac

SEQ ID NO: 1922440 - DNA, 25 bp, Homo sapien
tcccaacttctttaacccatacgca

SEQ ID NO: 1922441 - DNA, 25 bp, Homo sapien
ttaaaattcaaattgatgagattca

SEQ ID NO: 1922442 - DNA, 25 bp, Homo sapien
tcaaattgatgagattcatacgtaa

SEQ ID NO: 1922443 - DNA, 25 bp, Homo sapien
aaattcaaattgatgagattcatac

SEQ ID NO: 1922444 - DNA, 25 bp, Homo sapien
ttcaaattgatgagattcatacgta

SEQ ID NO: 1922445 - DNA, 25 bp, Homo sapien
taacaagtattcgtggtgccaggtc

SEQ ID NO: 1922446 - DNA, 25 bp, Homo sapien
gttggaaaagtcaccgatgaagtgg

SEQ ID NO: 1922447 - DNA, 25 bp, Homo sapien
gggctttatctccactaacaagtat

SEQ ID NO: 1922448 - DNA, 25 bp, Homo sapien
tgtatgcttatgcactttgtgcagg

SEQ ID NO: 1922449 - DNA, 25 bp, Homo sapien
aaagttgtaggaaagcgtgttggag

SEQ ID NO: 1922450 - DNA, 25 bp, Homo sapien
caaagttgtaggaaagcgtgttgga

SEQ ID NO: 1922451 - DNA, 25 bp, Homo sapien
acccagtttcttttacgatctgctt

SEQ ID NO: 1922452 - DNA, 25 bp, Homo sapien
cttttacgatctgcttcttgcttaa

SEQ ID NO: 1922453 - DNA, 25 bp, Homo sapien
aatagaaatgtagggtaaaagtatg

SEQ ID NO: 1922454 - DNA, 25 bp, Homo sapien
tagaaatgtagggtaaaagtatgca

SEQ ID NO: 1922455 - DNA, 25 bp, Homo sapien
ttcagggttgagacatgtgcagtcc

SEQ ID NO: 1922456 - DNA, 25 bp, Homo sapien
cagggttgagacatgtgcagtccct

SEQ ID NO: 1922457 - DNA, 25 bp, Homo sapien
ccttcagggttgagacatgtgcagt

SEQ ID NO: 1922458 - DNA, 25 bp, Homo sapien
gggttgagacatgtgcagtccctaa

SEQ ID NO: 1922459 - DNA, 25 bp, Homo sapien
ggacgacattgtctgatgatatccc

SEQ ID NO: 1922460 - DNA, 25 bp, Homo sapien
cgatcacagcaagatacagcagaaa

SEQ ID NO: 1922461 - DNA, 25 bp, Homo sapien
catctgatccttagatggtggtaga

SEQ ID NO: 1922462 - DNA, 25 bp, Homo sapien
cccattatgccagagtcgatcacag

SEQ ID NO: 1922463 - DNA, 25 bp, Homo sapien
gtttgggtgagaccagctaatctgc

SEQ ID NO: 1922464 - DNA, 25 bp, Homo sapien
acagatgatccccagagtcatggcc

SEQ ID NO: 1922465 - DNA, 25 bp, Homo sapien
catggccaccatctgtcgtttgggt

SEQ ID NO: 1922466 - DNA, 25 bp, Homo sapien
cagatgatccccagagtcatggcca

SEQ ID NO: 1922467 - DNA, 25 bp, Homo sapien
tagaagcagtaattcataacttgcc

SEQ ID NO: 1922468 - DNA, 25 bp, Homo sapien
ctagaagcagtaattcataacttgc

SEQ ID NO: 1922469 - DNA, 25 bp, Homo sapien
cagaattcacaagctgtgacaaaac

SEQ ID NO: 1922470 - DNA, 25 bp, Homo sapien
tccagcacttggtgaacagaattca

SEQ ID NO: 1922471 - DNA, 25 bp, Homo sapien
tggtgaacagaattcacaagctgtg

SEQ ID NO: 1922472 - DNA, 25 bp, Homo sapien
agattagattccagcacttggtgaa

SEQ ID NO: 1922473 - DNA, 25 bp, Homo sapien
tggccatggttcaagtgggactata

SEQ ID NO: 1922474 - DNA, 25 bp, Homo sapien
ctggccatggttcaagtgggactat

SEQ ID NO: 1922475 - DNA, 25 bp, Homo sapien
tcccctacagtgtgaactagagcac

SEQ ID NO: 1922476 - DNA, 25 bp, Homo sapien
ccatctgttcccctacagtgtgaac

SEQ ID NO: 1922477 - DNA, 25 bp, Homo sapien
agaattgctggccagataccggcca

SEQ ID NO: 1922478 - DNA, 25 bp, Homo sapien
gctggccagataccggccatcagga

SEQ ID NO: 1922479 - DNA, 25 bp, Homo sapien
tgtacacaggcttctcattcagcat

SEQ ID NO: 1922480 - DNA, 25 bp, Homo sapien
acactgtacacaggcttctcattca

SEQ ID NO: 1922481 - DNA, 25 bp, Homo sapien
tacactgtacacaggcttctcattc

SEQ ID NO: 1922482 - DNA, 25 bp, Homo sapien
actgtacacaggcttctcattcagc

SEQ ID NO: 1922483 - DNA, 25 bp, Homo sapien
gtcagtccaatataaatggtgccct

SEQ ID NO: 1922484 - DNA, 25 bp, Homo sapien
gccgtatcagtcagtccaatataaa

SEQ ID NO: 1922485 - DNA, 25 bp, Homo sapien
tatagaaagccgtatcagtcagtcc

SEQ ID NO: 1922486 - DNA, 25 bp, Homo sapien
ttcggtatagaaagccgtatcagtc

SEQ ID NO: 1922487 - DNA, 25 bp, Homo sapien
gtcatcagaacaagaggccaggaga

SEQ ID NO: 1922488 - DNA, 25 bp, Homo sapien
tcttatgtccctggaatgttttaat

SEQ ID NO: 1922489 - DNA, 25 bp, Homo sapien
tcatgtcatcagaacaagaggccag

SEQ ID NO: 1922490 - DNA, 25 bp, Homo sapien
catgtcatcagaacaagaggccagg

SEQ ID NO: 1922491 - DNA, 25 bp, Homo sapien
tgctttgactttcctagtgctttac

SEQ ID NO: 1922492 - DNA, 25 bp, Homo sapien
attgctttgactttcctagtgcttt

SEQ ID NO: 1922493 - DNA, 25 bp, Homo sapien
ttgctttgactttcctagtgcttta

SEQ ID NO: 1922494 - DNA, 25 bp, Homo sapien
tctccttgatggcaggattgatcat

SEQ ID NO: 1922495 - DNA, 25 bp, Homo sapien
tgtgtgtccttgacctaacactttg

SEQ ID NO: 1922496 - DNA, 25 bp, Homo sapien
actttgtatcgatggatatttcagc

SEQ ID NO: 1922497 - DNA, 25 bp, Homo sapien
gatggcaggattgatcatcacaacc

SEQ ID NO: 1922498 - DNA, 25 bp, Homo sapien
ttaacttaatcgttacaggaagata

SEQ ID NO: 1922499 - DNA, 25 bp, Homo sapien
taacttaatcgttacaggaagatag

SEQ ID NO: 1922500 - DNA, 25 bp, Homo sapien
gaagatagttattctagagttaaac

SEQ ID NO: 1922501 - DNA, 25 bp, Homo sapien
gagttaaacatagaagagaacacat

SEQ ID NO: 1922502 - DNA, 25 bp, Homo sapien
tatgagtctaaaaacacctatggtg

SEQ ID NO: 1922503 - DNA, 25 bp, Homo sapien
taagattcgctgtggccttcaataa

SEQ ID NO: 1922504 - DNA, 25 bp, Homo sapien
caaatctccaataggtgagcatgaa

SEQ ID NO: 1922505 - DNA, 25 bp, Homo sapien
tgttcttatctgcacaaacaggcaa

SEQ ID NO: 1922506 - DNA, 25 bp, Homo sapien
ggaatactcgtttttcagctagaag

SEQ ID NO: 1922507 - DNA, 25 bp, Homo sapien
tatgtaacattaaccagatagcctg

SEQ ID NO: 1922508 - DNA, 25 bp, Homo sapien
ggaaaactcctatgactctcaatgg

SEQ ID NO: 1922509 - DNA, 25 bp, Homo sapien
cctttgcagcgatgaatcaagtttc

SEQ ID NO: 1922510 - DNA, 25 bp, Homo sapien
cttgattgtggtttcttggagtctc

SEQ ID NO: 1922511 - DNA, 25 bp, Homo sapien
cttggagtctcttctgaacagtttc

SEQ ID NO: 1922512 - DNA, 25 bp, Homo sapien
taggatgcaacttgattgtggtttc

SEQ ID NO: 1922513 - DNA, 25 bp, Homo sapien
ctcttttaggatgcaacttgattgt

SEQ ID NO: 1922514 - DNA, 25 bp, Homo sapien
aaaggttgctttgcctagagaactg

SEQ ID NO: 1922515 - DNA, 25 bp, Homo sapien
gaaggcttgcgagtaagatttccat

SEQ ID NO: 1922516 - DNA, 25 bp, Homo sapien
tttgccttcataattagcattctgc

SEQ ID NO: 1922517 - DNA, 25 bp, Homo sapien
ttttccctctcaatatggtacacgg

SEQ ID NO: 1922518 - DNA, 25 bp, Homo sapien
atgtggacagttaaaccaccgtggt

SEQ ID NO: 1922519 - DNA, 25 bp, Homo sapien
tttgtcatgtggacagttaaaccac

SEQ ID NO: 1922520 - DNA, 25 bp, Homo sapien
tcatgtggacagttaaaccaccgtg

SEQ ID NO: 1922521 - DNA, 25 bp, Homo sapien
tgtcatgtggacagttaaaccaccg

SEQ ID NO: 1922522 - DNA, 25 bp, Homo sapien
tcttggttatgtctacgtgatgacg

SEQ ID NO: 1922523 - DNA, 25 bp, Homo sapien
gccagcttgatttgggtgaagtttc

SEQ ID NO: 1922524 - DNA, 25 bp, Homo sapien
tgctattgctgtggccccacggttg

SEQ ID NO: 1922525 - DNA, 25 bp, Homo sapien
atcagtacttttgaatccaggccag

SEQ ID NO: 1922526 - DNA, 25 bp, Homo sapien
atgcataagcaagtttgtgtatatc

SEQ ID NO: 1922527 - DNA, 25 bp, Homo sapien
tgcataagcaagtttgtgtatatca

SEQ ID NO: 1922528 - DNA, 25 bp, Homo sapien
gcataagcaagtttgtgtatatcat

SEQ ID NO: 1922529 - DNA, 25 bp, Homo sapien
ttgtttacagagggtttgctcaagc

SEQ ID NO: 1922530 - DNA, 25 bp, Homo sapien
tgtttacagagggtttgctcaagcc

SEQ ID NO: 1922531 - DNA, 25 bp, Homo sapien
ctgtgtttggcaggacttggttcat

SEQ ID NO: 1922532 - DNA, 25 bp, Homo sapien
gttgtttacagagggtttgctcaag

SEQ ID NO: 1922533 - DNA, 25 bp, Homo sapien
ttcaaatgtgaccttgctggcttgg

SEQ ID NO: 1922534 - DNA, 25 bp, Homo sapien
gggctggcagttgatcaggaacttc

SEQ ID NO: 1922535 - DNA, 25 bp, Homo sapien
caggaacttcaccagcagtcacagg

SEQ ID NO: 1922536 - DNA, 25 bp, Homo sapien
tcttattcaaatgtgaccttgctgg

SEQ ID NO: 1922537 - DNA, 25 bp, Homo sapien
cacaatggactatgatgaacaaata

SEQ ID NO: 1922538 - DNA, 25 bp, Homo sapien
gagagagcattacaagtgataccac

SEQ ID NO: 1922539 - DNA, 25 bp, Homo sapien
gaaaacttgagccaaccaattatga

SEQ ID NO: 1922540 - DNA, 25 bp, Homo sapien
gaattagtaatcaaaacctctcaac

SEQ ID NO: 1922541 - DNA, 25 bp, Homo sapien
aagatcagttcaatcaggcaagaga

SEQ ID NO: 1922542 - DNA, 25 bp, Homo sapien
agctctaatattggtggctaccgaa

SEQ ID NO: 1922543 - DNA, 25 bp, Homo sapien
ttttgtacagtcagaagcactcaca

SEQ ID NO: 1922544 - DNA, 25 bp, Homo sapien
gaattatgccctggaatgtacttcc

SEQ ID NO: 1922545 - DNA, 25 bp, Homo sapien
cattctgtgaatcaactaggcccaa

SEQ ID NO: 1922546 - DNA, 25 bp, Homo sapien
gttatatctgcaggatgtacatagt

SEQ ID NO: 1922547 - DNA, 25 bp, Homo sapien
tatctgcaggatgtacatagtcagt

SEQ ID NO: 1922548 - DNA, 25 bp, Homo sapien
caggatgtacatagtcagttgttac

SEQ ID NO: 1922549 - DNA, 25 bp, Homo sapien
tgtacatagtcagttgttacaacat

SEQ ID NO: 1922550 - DNA, 25 bp, Homo sapien
tcatgggaccataagtacccgtgtt

SEQ ID NO: 1922551 - DNA, 25 bp, Homo sapien
ggcatcatgggaccataagtacccg

SEQ ID NO: 1922552 - DNA, 25 bp, Homo sapien
ttaaatagcttttacagcaggcatc

SEQ ID NO: 1922553 - DNA, 25 bp, Homo sapien
aatagcttttacagcaggcatcatg

SEQ ID NO: 1922554 - DNA, 25 bp, Homo sapien
ttcccaagcctggtcatgatgtcaa

SEQ ID NO: 1922555 - DNA, 25 bp, Homo sapien
taaccatatttcctgtagctgcaca

SEQ ID NO: 1922556 - DNA, 25 bp, Homo sapien
caatcaggctgagatgtgcttttac

SEQ ID NO: 1922557 - DNA, 25 bp, Homo sapien
cagaaccaattataagtgaacaggt

SEQ ID NO: 1922558 - DNA, 25 bp, Homo sapien
agctcattggcaagacctccaaatg

SEQ ID NO: 1922559 - DNA, 25 bp, Homo sapien
agatcccatcacataacttgaagtg

SEQ ID NO: 1922560 - DNA, 25 bp, Homo sapien
aaatggatcacctgaagatcccatc

SEQ ID NO: 1922561 - DNA, 25 bp, Homo sapien
catctcttacccataatgccaggga

SEQ ID NO: 1922562 - DNA, 25 bp, Homo sapien
cacggactatgattttctctggcca

SEQ ID NO: 1922563 - DNA, 25 bp, Homo sapien
tcatattcccgaagaaggagccaat

SEQ ID NO: 1922564 - DNA, 25 bp, Homo sapien
cctctactttcaggcttaagggaag

SEQ ID NO: 1922565 - DNA, 25 bp, Homo sapien
gggaaggttacactttcacactcga

SEQ ID NO: 1922566 - DNA, 25 bp, Homo sapien
ccaatgaagagaatagcttggatag

SEQ ID NO: 1922567 - DNA, 25 bp, Homo sapien
cattgtgagaatttggttgaagcag

SEQ ID NO: 1922568 - DNA, 25 bp, Homo sapien
tgaagcagagtctagtatgaatgga

SEQ ID NO: 1922569 - DNA, 25 bp, Homo sapien
gcttggatagggtggttctcagcct

SEQ ID NO: 1922570 - DNA, 25 bp, Homo sapien
cccctggcctattcccactcctttg

SEQ ID NO: 1922571 - DNA, 25 bp, Homo sapien
ttgtttagattccatacattatcct

SEQ ID NO: 1922572 - DNA, 25 bp, Homo sapien
tttctgcattatgtcataaacctaa

SEQ ID NO: 1922573 - DNA, 25 bp, Homo sapien
gcattatgtcataaacctaaagaaa

SEQ ID NO: 1922574 - DNA, 25 bp, Homo sapien
aattctaaagtttctacaccaatct

SEQ ID NO: 1922575 - DNA, 25 bp, Homo sapien
ttctaaagtttctacaccaatctat

SEQ ID NO: 1922576 - DNA, 25 bp, Homo sapien
ctaaagtttctacaccaatctattt

SEQ ID NO: 1922577 - DNA, 25 bp, Homo sapien
tctaaagtttctacaccaatctatt

SEQ ID NO: 1922578 - DNA, 25 bp, Homo sapien
ggatgtgaggctgagctttcatatc

SEQ ID NO: 1922579 - DNA, 25 bp, Homo sapien
ggagacttgggcaggtctaccgtcc

SEQ ID NO: 1922580 - DNA, 25 bp, Homo sapien
ctgctaaggttagcagggttaactt

SEQ ID NO: 1922581 - DNA, 25 bp, Homo sapien
aggtctaccgtcctttcttctgcta

SEQ ID NO: 1922582 - DNA, 25 bp, Homo sapien
taatattgctcttcagtgatctctt

SEQ ID NO: 1922583 - DNA, 25 bp, Homo sapien
gatctctaggtcataggccgttggg

SEQ ID NO: 1922584 - DNA, 25 bp, Homo sapien
gagcagcgcagcctcataggacttt

SEQ ID NO: 1922585 - DNA, 25 bp, Homo sapien
gaacagtcatattcaagcggcccac

SEQ ID NO: 1922586 - DNA, 25 bp, Homo sapien
ctttgacttcgacatctagactggg

SEQ ID NO: 1922587 - DNA, 25 bp, Homo sapien
tgtacttcaaaacgtttgctgtgag

SEQ ID NO: 1922588 - DNA, 25 bp, Homo sapien
tcaaaacgtttgctgtgagatactc

SEQ ID NO: 1922589 - DNA, 25 bp, Homo sapien
tttgtacttcaaaacgtttgctgtg

SEQ ID NO: 1922590 - DNA, 25 bp, Homo sapien
gctgtgagatactctcctgatgcca

SEQ ID NO: 1922591 - DNA, 25 bp, Homo sapien
actgtcctgattctcatgttaaata

SEQ ID NO: 1922592 - DNA, 25 bp, Homo sapien
gattctcatgttaaatattcctgtg

SEQ ID NO: 1922593 - DNA, 25 bp, Homo sapien
tcatgttaaatattcctgtgcttat

SEQ ID NO: 1922594 - DNA, 25 bp, Homo sapien
gtacgatcactgtcctgattctcat

SEQ ID NO: 1922595 - DNA, 25 bp, Homo sapien
taaagacagactcccattcttcagg

SEQ ID NO: 1922596 - DNA, 25 bp, Homo sapien
tttcccaaaccccataatgctcatg

SEQ ID NO: 1922597 - DNA, 25 bp, Homo sapien
tgatgaggaatctaactctcacagg

SEQ ID NO: 1922598 - DNA, 25 bp, Homo sapien
gaacatcattctcagtggatactca

SEQ ID NO: 1922599 - DNA, 25 bp, Homo sapien
gatgatagaagcaaggatgccctag

SEQ ID NO: 1922600 - DNA, 25 bp, Homo sapien
tgagaatcagggtaccataaaagtc

SEQ ID NO: 1922601 - DNA, 25 bp, Homo sapien
ctacttggtccaatatgaatggtcc

SEQ ID NO: 1922602 - DNA, 25 bp, Homo sapien
ggaaatggattcgttgagtcccact

SEQ ID NO: 1922603 - DNA, 25 bp, Homo sapien
aggtatggagttttatcagccacaa

SEQ ID NO: 1922604 - DNA, 25 bp, Homo sapien
ggagttttatcagccacaatcttaa

SEQ ID NO: 1922605 - DNA, 25 bp, Homo sapien
tatggagttttatcagccacaatct

SEQ ID NO: 1922606 - DNA, 25 bp, Homo sapien
tttatcagccacaatcttaaaaaga

SEQ ID NO: 1922607 - DNA, 25 bp, Homo sapien
aaaaggcaggagctctatttagggc

SEQ ID NO: 1922608 - DNA, 25 bp, Homo sapien
gatagcgaattatctaaaaggcagg

SEQ ID NO: 1922609 - DNA, 25 bp, Homo sapien
gaaaaatagcccctgattccttgga

SEQ ID NO: 1922610 - DNA, 25 bp, Homo sapien
gcccctgattccttggatagcgaat

SEQ ID NO: 1922611 - DNA, 25 bp, Homo sapien
atgttttatcataacatccagatgg

SEQ ID NO: 1922612 - DNA, 25 bp, Homo sapien
ttgatgtatgctttctatggaatgc

SEQ ID NO: 1922613 - DNA, 25 bp, Homo sapien
ttgcttttgcatcatggtaaagctg

SEQ ID NO: 1922614 - DNA, 25 bp, Homo sapien
cttttgcatcatggtaaagctgaaa

SEQ ID NO: 1922615 - DNA, 25 bp, Homo sapien
tataatcatgtcatcatacgtcggg

SEQ ID NO: 1922616 - DNA, 25 bp, Homo sapien
tagagactcacaaccttcaatctgc

SEQ ID NO: 1922617 - DNA, 25 bp, Homo sapien
aggcagttcaaatggctgtagagac

SEQ ID NO: 1922618 - DNA, 25 bp, Homo sapien
ttcaatctgctcacaaatttcagct

SEQ ID NO: 1922619 - DNA, 25 bp, Homo sapien
tcacttctcctgttgaaaaacagca

SEQ ID NO: 1922620 - DNA, 25 bp, Homo sapien
aagtggttgtcatgatagaagtcat

SEQ ID NO: 1922621 - DNA, 25 bp, Homo sapien
tggttgtcatgatagaagtcatcat

SEQ ID NO: 1922622 - DNA, 25 bp, Homo sapien
agtggttgtcatgatagaagtcatc

SEQ ID NO: 1922623 - DNA, 25 bp, Homo sapien
gtggttgtcatgatagaagtcatca

SEQ ID NO: 1922624 - DNA, 25 bp, Homo sapien
ctgaacgtccagcaaaattatgttt

SEQ ID NO: 1922625 - DNA, 25 bp, Homo sapien
cctggtgctcacagaaacttgtggc

SEQ ID NO: 1922626 - DNA, 25 bp, Homo sapien
aggaatgtcacactacagccagagt

SEQ ID NO: 1922627 - DNA, 25 bp, Homo sapien
gagtggacgaattcttccagtgata

SEQ ID NO: 1922628 - DNA, 25 bp, Homo sapien
gataatgccattgctatgccttggg

SEQ ID NO: 1922629 - DNA, 25 bp, Homo sapien
tggggaggacaatgaagagggaggg

SEQ ID NO: 1922630 - DNA, 25 bp, Homo sapien
ggaagcaggagacaaaaaatgttat

SEQ ID NO: 1922631 - DNA, 25 bp, Homo sapien
ctatgtggggaggacaatgaagagg

SEQ ID NO: 1922632 - DNA, 25 bp, Homo sapien
gggaagcaggagacaaaaaatgtta

SEQ ID NO: 1922633 - DNA, 25 bp, Homo sapien
cattttcaataatcagtccagcttc

SEQ ID NO: 1922634 - DNA, 25 bp, Homo sapien
gtagaatttacgattgaccacatca

SEQ ID NO: 1922635 - DNA, 25 bp, Homo sapien
tgtcctacccttgatctgtctgcct

SEQ ID NO: 1922636 - DNA, 25 bp, Homo sapien
catcaacaggtttactatcattaga

SEQ ID NO: 1922637 - DNA, 25 bp, Homo sapien
agcatcccaggtgttttcctcctct

SEQ ID NO: 1922638 - DNA, 25 bp, Homo sapien
agaaaataagggatccaggaagagc

SEQ ID NO: 1922639 - DNA, 25 bp, Homo sapien
ggctgatgttaatgatcattatctg

SEQ ID NO: 1922640 - DNA, 25 bp, Homo sapien
tctgcgtaagagcactggagcatcc

SEQ ID NO: 1922641 - DNA, 25 bp, Homo sapien
tggtgaatgcataaacattaagagg

SEQ ID NO: 1922642 - DNA, 25 bp, Homo sapien
agtggtgaatgcataaacattaaga

SEQ ID NO: 1922643 - DNA, 25 bp, Homo sapien
taagctactcatttagtggtgaatg

SEQ ID NO: 1922644 - DNA, 25 bp, Homo sapien
ggaataagctactcatttagtggtg

SEQ ID NO: 1922645 - DNA, 25 bp, Homo sapien
taaatctttataagcaccatgtcat

SEQ ID NO: 1922646 - DNA, 25 bp, Homo sapien
attaaatctttataagcaccatgtc

SEQ ID NO: 1922647 - DNA, 25 bp, Homo sapien
aatctttataagcaccatgtcatga

SEQ ID NO: 1922648 - DNA, 25 bp, Homo sapien
taattaaatctttataagcaccatg

SEQ ID NO: 1922649 - DNA, 25 bp, Homo sapien
ttatagtcagaacgcaaagcttgtg

SEQ ID NO: 1922650 - DNA, 25 bp, Homo sapien
ctacgtggagcatgtgaacaagacc

SEQ ID NO: 1922651 - DNA, 25 bp, Homo sapien
tggcaatctagaaagaggacactgg

SEQ ID NO: 1922652 - DNA, 25 bp, Homo sapien
tgacaatgcgcaaaacaggaatctg

SEQ ID NO: 1922653 - DNA, 25 bp, Homo sapien
tgctggctcaatagatggacaggtt

SEQ ID NO: 1922654 - DNA, 25 bp, Homo sapien
tagctgctctactgaaaccatgaga

SEQ ID NO: 1922655 - DNA, 25 bp, Homo sapien
aactcatgcaacatgtggtagctgc

SEQ ID NO: 1922656 - DNA, 25 bp, Homo sapien
gatgcactttaaagagtctcaccca

SEQ ID NO: 1922657 - DNA, 25 bp, Homo sapien
tacatcatagcagaaacggtattgc

SEQ ID NO: 1922658 - DNA, 25 bp, Homo sapien
catcatagcagaaacggtattgctc

SEQ ID NO: 1922659 - DNA, 25 bp, Homo sapien
ccaaagctacatcatagcagaaacg

SEQ ID NO: 1922660 - DNA, 25 bp, Homo sapien
aagctacatcatagcagaaacggta

SEQ ID NO: 1922661 - DNA, 25 bp, Homo sapien
tgctaagacgatctgagagttctcc

SEQ ID NO: 1922662 - DNA, 25 bp, Homo sapien
ggtgttcaggattcacgggacatga

SEQ ID NO: 1922663 - DNA, 25 bp, Homo sapien
tcttcaaatcgcaaagtttagagac

SEQ ID NO: 1922664 - DNA, 25 bp, Homo sapien
taagacttgacctgaaaaatggagg

SEQ ID NO: 1922665 - DNA, 25 bp, Homo sapien
gccctctacagttggtaaaagctga

SEQ ID NO: 1922666 - DNA, 25 bp, Homo sapien
tatgttctgactttacgagccttga

SEQ ID NO: 1922667 - DNA, 25 bp, Homo sapien
tatatcccttagacatacagccttg

SEQ ID NO: 1922668 - DNA, 25 bp, Homo sapien
tcaagtagcatgatatgaactgccc

SEQ ID NO: 1922669 - DNA, 25 bp, Homo sapien
atagcacagaacatgccacttcgcc

SEQ ID NO: 1922670 - DNA, 25 bp, Homo sapien
ctgcatggaaaacatcgacaacatt

SEQ ID NO: 1922671 - DNA, 25 bp, Homo sapien
caccatgtttggcttgctgttcctc

SEQ ID NO: 1922672 - DNA, 25 bp, Homo sapien
ttcaacaacgatgcctatagcacag

SEQ ID NO: 1922673 - DNA, 25 bp, Homo sapien
tctcgatgagaagcccatcctaggt

SEQ ID NO: 1922674 - DNA, 25 bp, Homo sapien
gcagtggataatcgtccggccttcc

SEQ ID NO: 1922675 - DNA, 25 bp, Homo sapien
ttcaagaatgaccttttggatccag

SEQ ID NO: 1922676 - DNA, 25 bp, Homo sapien
catcctaggtactgaaactgttgca

SEQ ID NO: 1922677 - DNA, 25 bp, Homo sapien
tcttgttagattgcatatcctaaaa

SEQ ID NO: 1922678 - DNA, 25 bp, Homo sapien
atcacatcacagtccattgaacaag

SEQ ID NO: 1922679 - DNA, 25 bp, Homo sapien
taaaaatccggttgatcacatcaca

SEQ ID NO: 1922680 - DNA, 25 bp, Homo sapien
tatcctaaaaatccggttgatcaca

SEQ ID NO: 1922681 - DNA, 25 bp, Homo sapien
tacattccacttggatggggccata

SEQ ID NO: 1922682 - DNA, 25 bp, Homo sapien
cattccacttggatggggccatatc

SEQ ID NO: 1922683 - DNA, 25 bp, Homo sapien
ttccacttggatggggccatatcgt

SEQ ID NO: 1922684 - DNA, 25 bp, Homo sapien
cttggatggggccatatcgtagcat

SEQ ID NO: 1922685 - DNA, 25 bp, Homo sapien
taagtacataaaagcaatccatagc

SEQ ID NO: 1922686 - DNA, 25 bp, Homo sapien
gtacataaaagcaatccatagccat

SEQ ID NO: 1922687 - DNA, 25 bp, Homo sapien
aagttgtatataagtacataaaagc

SEQ ID NO: 1922688 - DNA, 25 bp, Homo sapien
ataagtacataaaagcaatccatag

SEQ ID NO: 1922689 - DNA, 25 bp, Homo sapien
tgggacaagtcgacttcgtttaaca

SEQ ID NO: 1922690 - DNA, 25 bp, Homo sapien
acaagtcgacttcgtttaacatcac

SEQ ID NO: 1922691 - DNA, 25 bp, Homo sapien
gacaagtcgacttcgtttaacatca

SEQ ID NO: 1922692 - DNA, 25 bp, Homo sapien
ggacaagtcgacttcgtttaacatc

SEQ ID NO: 1922693 - DNA, 25 bp, Homo sapien
tattgtgtgacgatgaaagcagctg

SEQ ID NO: 1922694 - DNA, 25 bp, Homo sapien
cagagggtattgtgtgacgatgaaa

SEQ ID NO: 1922695 - DNA, 25 bp, Homo sapien
aatggaggtacagccataatcatac

SEQ ID NO: 1922696 - DNA, 25 bp, Homo sapien
taatcatacactaatctccagaagt

SEQ ID NO: 1922697 - DNA, 25 bp, Homo sapien
gtagttactgctctccccatcaatt

SEQ ID NO: 1922698 - DNA, 25 bp, Homo sapien
gctctccccatcaattgtaattaaa

SEQ ID NO: 1922699 - DNA, 25 bp, Homo sapien
tactgctctccccatcaattgtaat

SEQ ID NO: 1922700 - DNA, 25 bp, Homo sapien
agttactgctctccccatcaattgt

SEQ ID NO: 1922701 - DNA, 25 bp, Homo sapien
tgaaacggttcttgtcatggttcct

SEQ ID NO: 1922702 - DNA, 25 bp, Homo sapien
cttcagcttgtagtcgaggggtgac

SEQ ID NO: 1922703 - DNA, 25 bp, Homo sapien
tcttgtcatggttccttggcaggca

SEQ ID NO: 1922704 - DNA, 25 bp, Homo sapien
ggcacgctatactgcagtcttcagc

SEQ ID NO: 1922705 - DNA, 25 bp, Homo sapien
ttaaattcacagacaggtatggcag

SEQ ID NO: 1922706 - DNA, 25 bp, Homo sapien
tgtgaagagttagtctgggagtcta

SEQ ID NO: 1922707 - DNA, 25 bp, Homo sapien
taagcaggcttctaaaatggcatca

SEQ ID NO: 1922708 - DNA, 25 bp, Homo sapien
gggagtctattctaatcatatcaaa

SEQ ID NO: 1922709 - DNA, 25 bp, Homo sapien
tttcagccatgtctagcatgatgtc

SEQ ID NO: 1922710 - DNA, 25 bp, Homo sapien
tgtctggaccatattaatacgccga

SEQ ID NO: 1922711 - DNA, 25 bp, Homo sapien
aatgtagcagccagttcgtccagca

SEQ ID NO: 1922712 - DNA, 25 bp, Homo sapien
tacgccgagatcttaaggctttgac

SEQ ID NO: 1922713 - DNA, 25 bp, Homo sapien
tgactcgccggataaaggaaagcag

SEQ ID NO: 1922714 - DNA, 25 bp, Homo sapien
ggccagcccgtgaaatggaactgtt

SEQ ID NO: 1922715 - DNA, 25 bp, Homo sapien
ccctgtagcatggtagggcactcca

SEQ ID NO: 1922716 - DNA, 25 bp, Homo sapien
cactgggagggtttgataacttgac

SEQ ID NO: 1922717 - DNA, 25 bp, Homo sapien
tgctactaggtattgttgaatcacc

SEQ ID NO: 1922718 - DNA, 25 bp, Homo sapien
catattatgcgtatccgtaagtaca

SEQ ID NO: 1922719 - DNA, 25 bp, Homo sapien
gaacatggtgcatgtctccactcat

SEQ ID NO: 1922720 - DNA, 25 bp, Homo sapien
tcattccttaacatggctgctacta

SEQ ID NO: 1922721 - DNA, 25 bp, Homo sapien
catttgtcagaaaatccgtgtccta

SEQ ID NO: 1922722 - DNA, 25 bp, Homo sapien
aacctctgctttcccaactcggatg

SEQ ID NO: 1922723 - DNA, 25 bp, Homo sapien
gtataatggctatgtccctctgtgt

SEQ ID NO: 1922724 - DNA, 25 bp, Homo sapien
tcattcaaggattattcagaagagg

SEQ ID NO: 1922725 - DNA, 25 bp, Homo sapien
tcatcaggccaatatttatagcatt

SEQ ID NO: 1922726 - DNA, 25 bp, Homo sapien
gaatgtcctaactacatattcagca

SEQ ID NO: 1922727 - DNA, 25 bp, Homo sapien
ttcagtatcatcaggccaatattta

SEQ ID NO: 1922728 - DNA, 25 bp, Homo sapien
ccagggtgaatgtcctaactacata

SEQ ID NO: 1922729 - DNA, 25 bp, Homo sapien
tgcagttagattccagtacaaaatt

SEQ ID NO: 1922730 - DNA, 25 bp, Homo sapien
tcttacatgttgcttctcaactatg

SEQ ID NO: 1922731 - DNA, 25 bp, Homo sapien
tttttcagccagtcaaggtctactt

SEQ ID NO: 1922732 - DNA, 25 bp, Homo sapien
aagtactcaactaaaatgttgtgcc

SEQ ID NO: 1922733 - DNA, 25 bp, Homo sapien
catcacaatgcaagcagattgttct

SEQ ID NO: 1922734 - DNA, 25 bp, Homo sapien
aatttgtaaccatcacaatgcaagc

SEQ ID NO: 1922735 - DNA, 25 bp, Homo sapien
caacctcaactaaatttgtaaccat

SEQ ID NO: 1922736 - DNA, 25 bp, Homo sapien
tgtaaccatcacaatgcaagcagat

SEQ ID NO: 1922737 - DNA, 25 bp, Homo sapien
tcatacactgtttcatgaacgggac

SEQ ID NO: 1922738 - DNA, 25 bp, Homo sapien
tccagaaatcatacactgtttcatg

SEQ ID NO: 1922739 - DNA, 25 bp, Homo sapien
cctccagaaatcatacactgtttca

SEQ ID NO: 1922740 - DNA, 25 bp, Homo sapien
aatcatacactgtttcatgaacggg

SEQ ID NO: 1922741 - DNA, 25 bp, Homo sapien
tgaatattgttcaccactatggtcg

SEQ ID NO: 1922742 - DNA, 25 bp, Homo sapien
catatctaaattcccacaataggca

SEQ ID NO: 1922743 - DNA, 25 bp, Homo sapien
gctgggctgttctctaccgaatacc

SEQ ID NO: 1922744 - DNA, 25 bp, Homo sapien
aactgcaaaagcatgtgctgggctg

SEQ ID NO: 1922745 - DNA, 25 bp, Homo sapien
cagtgttaatcagaagggctgattt

SEQ ID NO: 1922746 - DNA, 25 bp, Homo sapien
aggagcagtgttaatcagaagggct

SEQ ID NO: 1922747 - DNA, 25 bp, Homo sapien
ccacatagatgaataagcaagtttg

SEQ ID NO: 1922748 - DNA, 25 bp, Homo sapien
aaaccaccacatagatgaataagca

SEQ ID NO: 1922749 - DNA, 25 bp, Homo sapien
ttgcaatgtaatgacttggtctctg

SEQ ID NO: 1922750 - DNA, 25 bp, Homo sapien
tgcaatgtaatgacttggtctctgg

SEQ ID NO: 1922751 - DNA, 25 bp, Homo sapien
tgggttgcaatgtaatgacttggtc

SEQ ID NO: 1922752 - DNA, 25 bp, Homo sapien
ggttgcaatgtaatgacttggtctc

SEQ ID NO: 1922753 - DNA, 25 bp, Homo sapien
cacactgcattacaaatggacgagg

SEQ ID NO: 1922754 - DNA, 25 bp, Homo sapien
tgtttgccatggaataacctcatag

SEQ ID NO: 1922755 - DNA, 25 bp, Homo sapien
ggacgaggacatattagaaccataa

SEQ ID NO: 1922756 - DNA, 25 bp, Homo sapien
gaacattccaatgttagagctggac

SEQ ID NO: 1922757 - DNA, 25 bp, Homo sapien
atcaatatagttggcattaatataa

SEQ ID NO: 1922758 - DNA, 25 bp, Homo sapien
tcaatatagttggcattaatataat

SEQ ID NO: 1922759 - DNA, 25 bp, Homo sapien
ttttgatcttttttagctacatccc

SEQ ID NO: 1922760 - DNA, 25 bp, Homo sapien
tttgctctattttgatcttttttag

SEQ ID NO: 1922761 - DNA, 25 bp, Homo sapien
tgctctattttgatcttttttagct

SEQ ID NO: 1922762 - DNA, 25 bp, Homo sapien
ctctattttgatcttttttagctac

SEQ ID NO: 1922763 - DNA, 25 bp, Homo sapien
gagaagtagaagtagcaaagtatca

SEQ ID NO: 1922764 - DNA, 25 bp, Homo sapien
gaggaaagcagtcctacagtagtaa

SEQ ID NO: 1922765 - DNA, 25 bp, Homo sapien
tgtgtgcaatacatcgcatctgagt

SEQ ID NO: 1922766 - DNA, 25 bp, Homo sapien
caaagccgctttgttggattcatac

SEQ ID NO: 1922767 - DNA, 25 bp, Homo sapien
tcttcatgagattaatgtgctgcag

SEQ ID NO: 1922768 - DNA, 25 bp, Homo sapien
cccctcacagaggtagcgaggtacg

SEQ ID NO: 1922769 - DNA, 25 bp, Homo sapien
tcctctttgaacccatagctgtctg

SEQ ID NO: 1922770 - DNA, 25 bp, Homo sapien
cagtaaatcagctaccctgatggct

SEQ ID NO: 1922771 - DNA, 25 bp, Homo sapien
tctgctgtagcactgtggttctcat

SEQ ID NO: 1922772 - DNA, 25 bp, Homo sapien
tggactctgctgtagcactgtggtt

SEQ ID NO: 1922773 - DNA, 25 bp, Homo sapien
gactctgctgtagcactgtggttct

SEQ ID NO: 1922774 - DNA, 25 bp, Homo sapien
ctggactctgctgtagcactgtggt

SEQ ID NO: 1922775 - DNA, 25 bp, Homo sapien
tccctcagagatacccgatctaggt

SEQ ID NO: 1922776 - DNA, 25 bp, Homo sapien
atctaggtgacccatccccaaaggg

SEQ ID NO: 1922777 - DNA, 25 bp, Homo sapien
tctgcactgggaaacatgggcattc

SEQ ID NO: 1922778 - DNA, 25 bp, Homo sapien
tcttgttctcgtggccctattctct

SEQ ID NO: 1922779 - DNA, 25 bp, Homo sapien
tatcaccaactctacaaataggata

SEQ ID NO: 1922780 - DNA, 25 bp, Homo sapien
cctgttctatcaccaactctacaaa

SEQ ID NO: 1922781 - DNA, 25 bp, Homo sapien
gttctatcaccaactctacaaatag

SEQ ID NO: 1922782 - DNA, 25 bp, Homo sapien
ccaactctacaaataggatatagca

SEQ ID NO: 1922783 - DNA, 25 bp, Homo sapien
taagctgaatgctctttttgtagca

SEQ ID NO: 1922784 - DNA, 25 bp, Homo sapien
tactccctcttattaagctgaatgc

SEQ ID NO: 1922785 - DNA, 25 bp, Homo sapien
gcatttatctttactccctcttatt

SEQ ID NO: 1922786 - DNA, 25 bp, Homo sapien
ccctcttattaagctgaatgctctt

SEQ ID NO: 1922787 - DNA, 25 bp, Homo sapien
caagtgaattcatgtcttttactca

SEQ ID NO: 1922788 - DNA, 25 bp, Homo sapien
aaaatccctgatagattctgttgtg

SEQ ID NO: 1922789 - DNA, 25 bp, Homo sapien
aatacactgaatcaaaaaatccctg

SEQ ID NO: 1922790 - DNA, 25 bp, Homo sapien
gttgtgacctaaccactcaagtgaa

SEQ ID NO: 1922791 - DNA, 25 bp, Homo sapien
tgtgactagtagtgagggtacacgt

SEQ ID NO: 1922792 - DNA, 25 bp, Homo sapien
cagtagtacaatgagcagtaaggtc

SEQ ID NO: 1922793 - DNA, 25 bp, Homo sapien
gggtacacgtactaatcattatcct

SEQ ID NO: 1922794 - DNA, 25 bp, Homo sapien
ttaaaccacctaataatgtgactag

SEQ ID NO: 1922795 - DNA, 25 bp, Homo sapien
aaaagatgataaagatttagggcct

SEQ ID NO: 1922796 - DNA, 25 bp, Homo sapien
agatgataaagatttagggcctcac

SEQ ID NO: 1922797 - DNA, 25 bp, Homo sapien
tgggcaaacccatgcaaggaggtgt

SEQ ID NO: 1922798 - DNA, 25 bp, Homo sapien
caaggaggtgtgatccatgcaatga

SEQ ID NO: 1922799 - DNA, 25 bp, Homo sapien
agtcggtacaagtggatcattgggc

SEQ ID NO: 1922800 - DNA, 25 bp, Homo sapien
gcagtcggtacaagtggatcattgg

SEQ ID NO: 1922801 - DNA, 25 bp, Homo sapien
gtcggtacaagtggatcattgggca

SEQ ID NO: 1922802 - DNA, 25 bp, Homo sapien
cagtcggtacaagtggatcattggg

SEQ ID NO: 1922803 - DNA, 25 bp, Homo sapien
ggtgagcatatctctgcgatctgag

SEQ ID NO: 1922804 - DNA, 25 bp, Homo sapien
taaacagatgcactatagaacagaa

SEQ ID NO: 1922805 - DNA, 25 bp, Homo sapien
tacaaggccagtatactcaagagat

SEQ ID NO: 1922806 - DNA, 25 bp, Homo sapien
ccataaggcccaagttatacaaggc

SEQ ID NO: 1922807 - DNA, 25 bp, Homo sapien
ctgcttttaaatggtacttcagcgg

SEQ ID NO: 1922808 - DNA, 25 bp, Homo sapien
gatgaatttcactatgccttgcaaa

SEQ ID NO: 1922809 - DNA, 25 bp, Homo sapien
aagccttgccttcatagaccaacat

SEQ ID NO: 1922810 - DNA, 25 bp, Homo sapien
gaccaacattaggaattttcaagac

SEQ ID NO: 1922811 - DNA, 25 bp, Homo sapien
tatttccacttaaagcaatgacacg

SEQ ID NO: 1922812 - DNA, 25 bp, Homo sapien
tattgcaattttccaggagtctaca

SEQ ID NO: 1922813 - DNA, 25 bp, Homo sapien
cattactcaaaaggtatcgtgtaga

SEQ ID NO: 1922814 - DNA, 25 bp, Homo sapien
caatgacacgtgctatggactgagt

SEQ ID NO: 1922815 - DNA, 25 bp, Homo sapien
gagttgtaacatcatttattaaaat

SEQ ID NO: 1922816 - DNA, 25 bp, Homo sapien
agttgtaacatcatttattaaaatt

SEQ ID NO: 1922817 - DNA, 25 bp, Homo sapien
tgagttgtaacatcatttattaaaa

SEQ ID NO: 1922818 - DNA, 25 bp, Homo sapien
tgtgagtcatctcctgccgggtatt

SEQ ID NO: 1922819 - DNA, 25 bp, Homo sapien
catggcatctttgcgttttttagca

SEQ ID NO: 1922820 - DNA, 25 bp, Homo sapien
tccattgcattcaccatgtgagtca

SEQ ID NO: 1922821 - DNA, 25 bp, Homo sapien
tgcagagtgctctgatcagcataac

SEQ ID NO: 1922822 - DNA, 25 bp, Homo sapien
aggtagtaggagtaagaatagtagc

SEQ ID NO: 1922823 - DNA, 25 bp, Homo sapien
ggtagtaggagtaagaatagtagct

SEQ ID NO: 1922824 - DNA, 25 bp, Homo sapien
gtaggagtaagaatagtagctcctc

SEQ ID NO: 1922825 - DNA, 25 bp, Homo sapien
tagtaggagtaagaatagtagctcc

SEQ ID NO: 1922826 - DNA, 25 bp, Homo sapien
ctaatgtttctaatgcagatgtgtc

SEQ ID NO: 1922827 - DNA, 25 bp, Homo sapien
ttctaatgcagatgtgtcttctcca

SEQ ID NO: 1922828 - DNA, 25 bp, Homo sapien
atgtttctaatgcagatgtgtcttc

SEQ ID NO: 1922829 - DNA, 25 bp, Homo sapien
gtttctaatgcagatgtgtcttctc

SEQ ID NO: 1922830 - DNA, 25 bp, Homo sapien
ttctaggtcaacttaacaaaaagca

SEQ ID NO: 1922831 - DNA, 25 bp, Homo sapien
aataattcctagaccacagcccaag

SEQ ID NO: 1922832 - DNA, 25 bp, Homo sapien
gataaatgatctcaagtacctttgc

SEQ ID NO: 1922833 - DNA, 25 bp, Homo sapien
tattagaaagcatgtccaatagact

SEQ ID NO: 1922834 - DNA, 25 bp, Homo sapien
taaatggtaagtgagtgggacagga

SEQ ID NO: 1922835 - DNA, 25 bp, Homo sapien
gacataaatggtaagtgagtgggac

SEQ ID NO: 1922836 - DNA, 25 bp, Homo sapien
aaatggtaagtgagtgggacaggac

SEQ ID NO: 1922837 - DNA, 25 bp, Homo sapien
cataaatggtaagtgagtgggacag

SEQ ID NO: 1922838 - DNA, 25 bp, Homo sapien
tatgacaactaggagaaggaggatg

SEQ ID NO: 1922839 - DNA, 25 bp, Homo sapien
ttaatatgacaactaggagaaggag

SEQ ID NO: 1922840 - DNA, 25 bp, Homo sapien
cttggcgggatctgggatcacttct

SEQ ID NO: 1922841 - DNA, 25 bp, Homo sapien
tctgtctgtctgcttggcgggatct

SEQ ID NO: 1922842 - DNA, 25 bp, Homo sapien
aaaatttctcaatgtctccagatcc

SEQ ID NO: 1922843 - DNA, 25 bp, Homo sapien
atatcttctgtcttttaacacaaaa

SEQ ID NO: 1922844 - DNA, 25 bp, Homo sapien
aatttctcaatgtctccagatccat

SEQ ID NO: 1922845 - DNA, 25 bp, Homo sapien
tctgtcttttaacacaaaatttctc

SEQ ID NO: 1922846 - DNA, 25 bp, Homo sapien
tatacatccaagtatctgctccact

SEQ ID NO: 1922847 - DNA, 25 bp, Homo sapien
caacccatagttctatacatccaag

SEQ ID NO: 1922848 - DNA, 25 bp, Homo sapien
tccccgcaacccatagttctataca

SEQ ID NO: 1922849 - DNA, 25 bp, Homo sapien
tagttctatacatccaagtatctgc

SEQ ID NO: 1922850 - DNA, 25 bp, Homo sapien
ggtaagttaaccactgctcctcact

SEQ ID NO: 1922851 - DNA, 25 bp, Homo sapien
tatctggtacttcataaagcctcag

SEQ ID NO: 1922852 - DNA, 25 bp, Homo sapien
taaagtgctaaggacaatatctggt

SEQ ID NO: 1922853 - DNA, 25 bp, Homo sapien
gctttgccacaagttgaccttaggt

SEQ ID NO: 1922854 - DNA, 25 bp, Homo sapien
gcaattatgagaaatgtttaagtaa

SEQ ID NO: 1922855 - DNA, 25 bp, Homo sapien
tttgcaattatgagaaatgtttaag

SEQ ID NO: 1922856 - DNA, 25 bp, Homo sapien
ttatgagaaatgtttaagtaagcac

SEQ ID NO: 1922857 - DNA, 25 bp, Homo sapien
tctttgcaattatgagaaatgttta

SEQ ID NO: 1922858 - DNA, 25 bp, Homo sapien
tactggacactatcacatctgtgaa

SEQ ID NO: 1922859 - DNA, 25 bp, Homo sapien
tattagacacttactaggttcaaaa

SEQ ID NO: 1922860 - DNA, 25 bp, Homo sapien
ataaaatcatacgtagggacccaat

SEQ ID NO: 1922861 - DNA, 25 bp, Homo sapien
acgtagggacccaatatatgaaaca

SEQ ID NO: 1922862 - DNA, 25 bp, Homo sapien
tcccaaattgcaagtgtcacaggct

SEQ ID NO: 1922863 - DNA, 25 bp, Homo sapien
cagtgtattcgcagtcacaacagca

SEQ ID NO: 1922864 - DNA, 25 bp, Homo sapien
agggtcctccggctgtgataagctc

SEQ ID NO: 1922865 - DNA, 25 bp, Homo sapien
aagtgtcacaggcttcagtggacca

SEQ ID NO: 1922866 - DNA, 25 bp, Homo sapien
gcttgggtgcaaatctgttcactgt

SEQ ID NO: 1922867 - DNA, 25 bp, Homo sapien
tctcagtcaacaggactacatactt

SEQ ID NO: 1922868 - DNA, 25 bp, Homo sapien
tacatacttgatctccagacttagg

SEQ ID NO: 1922869 - DNA, 25 bp, Homo sapien
gatctccagacttaggcctctgtca

SEQ ID NO: 1922870 - DNA, 25 bp, Homo sapien
catctgctccccatattttagtata

SEQ ID NO: 1922871 - DNA, 25 bp, Homo sapien
tgttaacttgtactccaccatcata

SEQ ID NO: 1922872 - DNA, 25 bp, Homo sapien
cacatcttcctagtgtggttggctc

SEQ ID NO: 1922873 - DNA, 25 bp, Homo sapien
gcagatacacaccaagacatgttaa

SEQ ID NO: 1922874 - DNA, 25 bp, Homo sapien
tgtgttttttaactttctccctgca

SEQ ID NO: 1922875 - DNA, 25 bp, Homo sapien
ttaactttctccctgcacccccaca

SEQ ID NO: 1922876 - DNA, 25 bp, Homo sapien
taactttctccctgcacccccacac

SEQ ID NO: 1922877 - DNA, 25 bp, Homo sapien
caggcaaccggcacatgatcaacct

SEQ ID NO: 1922878 - DNA, 25 bp, Homo sapien
acacacgtaatctctgccatctctg

SEQ ID NO: 1922879 - DNA, 25 bp, Homo sapien
ggctgtgctcctcactccatgcaga

SEQ ID NO: 1922880 - DNA, 25 bp, Homo sapien
acctccttccctgtgcggctgtgct

SEQ ID NO: 1922881 - DNA, 25 bp, Homo sapien
ctgatactctgtgagactgcctcct

SEQ ID NO: 1922882 - DNA, 25 bp, Homo sapien
tgacaaggtctgtgggaccactgct

SEQ ID NO: 1922883 - DNA, 25 bp, Homo sapien
tgacttctgaaatgccacacgaggc

SEQ ID NO: 1922884 - DNA, 25 bp, Homo sapien
gcttctgaatctaactgacttctga

SEQ ID NO: 1922885 - DNA, 25 bp, Homo sapien
ctgcatacatattgggtgtagaaag

SEQ ID NO: 1922886 - DNA, 25 bp, Homo sapien
aagtatgaatgggtaatggataaac

SEQ ID NO: 1922887 - DNA, 25 bp, Homo sapien
catattgggtgtagaaagatagtaa

SEQ ID NO: 1922888 - DNA, 25 bp, Homo sapien
actcaagtaagagtttgaaaacctg

SEQ ID NO: 1922889 - DNA, 25 bp, Homo sapien
tatctcctgtctaaaaaatccttgc

SEQ ID NO: 1922890 - DNA, 25 bp, Homo sapien
taaaaaatggtgaacgtgtgtgtgc

SEQ ID NO: 1922891 - DNA, 25 bp, Homo sapien
cttaagtgctcaagtgttttctcca

SEQ ID NO: 1922892 - DNA, 25 bp, Homo sapien
tattttcctgttgagcaccatttca

SEQ ID NO: 1922893 - DNA, 25 bp, Homo sapien
gctgaccatacttgcatgttagttt

SEQ ID NO: 1922894 - DNA, 25 bp, Homo sapien
accaaagctgaccatacttgcatgt

SEQ ID NO: 1922895 - DNA, 25 bp, Homo sapien
caggcaataagttgatgttacttta

SEQ ID NO: 1922896 - DNA, 25 bp, Homo sapien
aatgtagtcaggcaataagttgatg

SEQ ID NO: 1922897 - DNA, 25 bp, Homo sapien
cgatcatagctcaacgtaaactgga

SEQ ID NO: 1922898 - DNA, 25 bp, Homo sapien
tgtcctagcaatctcgatcacgaaa

SEQ ID NO: 1922899 - DNA, 25 bp, Homo sapien
tatattagaccagggcagaaacatt

SEQ ID NO: 1922900 - DNA, 25 bp, Homo sapien
gataagatagttaacacatgtactg

SEQ ID NO: 1922901 - DNA, 25 bp, Homo sapien
ggtcaatgtgggacacttttacaat

SEQ ID NO: 1922902 - DNA, 25 bp, Homo sapien
ctcagttacagaaacatagcatgac

SEQ ID NO: 1922903 - DNA, 25 bp, Homo sapien
tcagaggtcaatgtgggacactttt

SEQ ID NO: 1922904 - DNA, 25 bp, Homo sapien
tgacatatctaaagaacttcagagg

SEQ ID NO: 1922905 - DNA, 25 bp, Homo sapien
tctgctactaattccggcagcaaac

SEQ ID NO: 1922906 - DNA, 25 bp, Homo sapien
gggtctgctactaattccggcagca

SEQ ID NO: 1922907 - DNA, 25 bp, Homo sapien
cacaaatgtgggtctgctactaatt

SEQ ID NO: 1922908 - DNA, 25 bp, Homo sapien
aatgtgggtctgctactaattccgg

SEQ ID NO: 1922909 - DNA, 25 bp, Homo sapien
tcataacaagattccttcagtcaag

SEQ ID NO: 1922910 - DNA, 25 bp, Homo sapien
gcagcacaagatttttcagacacta

SEQ ID NO: 1922911 - DNA, 25 bp, Homo sapien
tgctgacgctttcctaagatattgg

SEQ ID NO: 1922912 - DNA, 25 bp, Homo sapien
gaagatatggactaatctctatccc

SEQ ID NO: 1922913 - DNA, 25 bp, Homo sapien
cacatgagtcacagaactaactata

SEQ ID NO: 1922914 - DNA, 25 bp, Homo sapien
gttgttaaagacacccacatgagtc

SEQ ID NO: 1922915 - DNA, 25 bp, Homo sapien
ctagaggatgggaagtagcacccca

SEQ ID NO: 1922916 - DNA, 25 bp, Homo sapien
gaagcagggaacaaagtccttccat

SEQ ID NO: 1922917 - DNA, 25 bp, Homo sapien
caatgcgtacgcactgggttttagt

SEQ ID NO: 1922918 - DNA, 25 bp, Homo sapien
tagcaatgcgtacgcactgggtttt

SEQ ID NO: 1922919 - DNA, 25 bp, Homo sapien
ttgtagcaatgcgtacgcactgggt

SEQ ID NO: 1922920 - DNA, 25 bp, Homo sapien
cttttgtagcaatgcgtacgcactg

SEQ ID NO: 1922921 - DNA, 25 bp, Homo sapien
cctgtttcataaactataattatta

SEQ ID NO: 1922922 - DNA, 25 bp, Homo sapien
aaaagagtcaatgtacagataatgt

SEQ ID NO: 1922923 - DNA, 25 bp, Homo sapien
catctggggtcataaaaagggatta

SEQ ID NO: 1922924 - DNA, 25 bp, Homo sapien
gtcaatgtacagataatgtttcctg

SEQ ID NO: 1922925 - DNA, 25 bp, Homo sapien
tcctgaggaaggctcgagtagaagc

SEQ ID NO: 1922926 - DNA, 25 bp, Homo sapien
gctcgagtagaagcagttactagga

SEQ ID NO: 1922927 - DNA, 25 bp, Homo sapien
tcaattgctattgtgggctttcctg

SEQ ID NO: 1922928 - DNA, 25 bp, Homo sapien
tgctattgtgggctttcctgaggaa

SEQ ID NO: 1922929 - DNA, 25 bp, Homo sapien
attcataaaatttgacttcagcttt

SEQ ID NO: 1922930 - DNA, 25 bp, Homo sapien
gcagcaaagtaatacggtgcacccc

SEQ ID NO: 1922931 - DNA, 25 bp, Homo sapien
taggtccgattgtcacccacagtga

SEQ ID NO: 1922932 - DNA, 25 bp, Homo sapien
caggaacctggtagcattccatggc

SEQ ID NO: 1922933 - DNA, 25 bp, Homo sapien
tgttgtatcctttgcgcggagccaa

SEQ ID NO: 1922934 - DNA, 25 bp, Homo sapien
cttggttcggtgtgggtgcagttct

SEQ ID NO: 1922935 - DNA, 25 bp, Homo sapien
tggttcggtgtgggtgcagttcttc

SEQ ID NO: 1922936 - DNA, 25 bp, Homo sapien
ggttcggtgtgggtgcagttcttcc

SEQ ID NO: 1922937 - DNA, 25 bp, Homo sapien
ttggttcggtgtgggtgcagttctt

SEQ ID NO: 1922938 - DNA, 25 bp, Homo sapien
aggcatcaactccttcatagtcagg

SEQ ID NO: 1922939 - DNA, 25 bp, Homo sapien
cctttggcttgtgctggtctcaaca

SEQ ID NO: 1922940 - DNA, 25 bp, Homo sapien
ccttcatagtcaggtaaagttggag

SEQ ID NO: 1922941 - DNA, 25 bp, Homo sapien
ggtctcaacaatacagttattgtgg

SEQ ID NO: 1922942 - DNA, 25 bp, Homo sapien
ttggtggtgacattgatggctgtgg

SEQ ID NO: 1922943 - DNA, 25 bp, Homo sapien
tatgaaaaactggtacgtggttcca

SEQ ID NO: 1922944 - DNA, 25 bp, Homo sapien
ctggaccaaagcctttgaccgtgct

SEQ ID NO: 1922945 - DNA, 25 bp, Homo sapien
gaccgtgctggctcttatgaaaaac

SEQ ID NO: 1922946 - DNA, 25 bp, Homo sapien
ggaactgcaggatcaaatgatctta

SEQ ID NO: 1922947 - DNA, 25 bp, Homo sapien
tcaaatgatcttatactgctatagc

SEQ ID NO: 1922948 - DNA, 25 bp, Homo sapien
gtgtactgttccataaatttgatac

SEQ ID NO: 1922949 - DNA, 25 bp, Homo sapien
aagacatggtgtgtactgttccata

SEQ ID NO: 1922950 - DNA, 25 bp, Homo sapien
gggtattattccttactctgaaaca

SEQ ID NO: 1922951 - DNA, 25 bp, Homo sapien
taatcaacgctatgtaggaacagaa

SEQ ID NO: 1922952 - DNA, 25 bp, Homo sapien
gataatgactatcctgcttccctaa

SEQ ID NO: 1922953 - DNA, 25 bp, Homo sapien
cataattcactctgtagccattaga

SEQ ID NO: 1922954 - DNA, 25 bp, Homo sapien
caagaagatcttattttcaaaggat

SEQ ID NO: 1922955 - DNA, 25 bp, Homo sapien
tccttgaagagattttactggtacg

SEQ ID NO: 1922956 - DNA, 25 bp, Homo sapien
gattttactggtacgggaccaggca

SEQ ID NO: 1922957 - DNA, 25 bp, Homo sapien
gattccatttggatccaaaggttct

SEQ ID NO: 1922958 - DNA, 25 bp, Homo sapien
gagagaaggaactatacttagatga

SEQ ID NO: 1922959 - DNA, 25 bp, Homo sapien
tgatcatagatgagagaaggaacta

SEQ ID NO: 1922960 - DNA, 25 bp, Homo sapien
tacttggatgatcatagatgagaga

SEQ ID NO: 1922961 - DNA, 25 bp, Homo sapien
tcatactacttgtcgtgtacttgga

SEQ ID NO: 1922962 - DNA, 25 bp, Homo sapien
tgaccacggaagtaatggtagcaga

SEQ ID NO: 1922963 - DNA, 25 bp, Homo sapien
gccttgctctcgttgtgaccacgga

SEQ ID NO: 1922964 - DNA, 25 bp, Homo sapien
cgcgtaatgttgtaacccaaggatt

SEQ ID NO: 1922965 - DNA, 25 bp, Homo sapien
gctgacatttgtataaggtggcaga

SEQ ID NO: 1922966 - DNA, 25 bp, Homo sapien
gggtcatcagtcaatccactacacc

SEQ ID NO: 1922967 - DNA, 25 bp, Homo sapien
accactgatccctttatcttctggg

SEQ ID NO: 1922968 - DNA, 25 bp, Homo sapien
ttcatggcccttaaaaaactctcag

SEQ ID NO: 1922969 - DNA, 25 bp, Homo sapien
tctaggaattaggatgtggacacat

SEQ ID NO: 1922970 - DNA, 25 bp, Homo sapien
tggtggtttctcaggaatagtttag

SEQ ID NO: 1922971 - DNA, 25 bp, Homo sapien
tcttcagacttggtgatatagcttg

SEQ ID NO: 1922972 - DNA, 25 bp, Homo sapien
atgtaagacacctgcctcccttttg

SEQ ID NO: 1922973 - DNA, 25 bp, Homo sapien
ctgtgatactgtcctcatgatagtg

SEQ ID NO: 1922974 - DNA, 25 bp, Homo sapien
taagtctaaacagtaaggtgccttg

SEQ ID NO: 1922975 - DNA, 25 bp, Homo sapien
tattttctcaaaggataggctctca

SEQ ID NO: 1922976 - DNA, 25 bp, Homo sapien
catttctttacatagctagaatatc

SEQ ID NO: 1922977 - DNA, 25 bp, Homo sapien
ccttgatgtggaatgtaatttgttc

SEQ ID NO: 1922978 - DNA, 25 bp, Homo sapien
cactgatgttgtgggccctcacata

SEQ ID NO: 1922979 - DNA, 25 bp, Homo sapien
cgtcttgccttccaacgtgctagga

SEQ ID NO: 1922980 - DNA, 25 bp, Homo sapien
aaaacagttttgacaacctatgagc

SEQ ID NO: 1922981 - DNA, 25 bp, Homo sapien
ctacacctagcctaaagaaagattt

SEQ ID NO: 1922982 - DNA, 25 bp, Homo sapien
gaaatctcagtatacctttgcagta

SEQ ID NO: 1922983 - DNA, 25 bp, Homo sapien
gctgctagccagacaccacttaaaa

SEQ ID NO: 1922984 - DNA, 25 bp, Homo sapien
tggcagtaagcgacaatcagtctat

SEQ ID NO: 1922985 - DNA, 25 bp, Homo sapien
tcttttagaagtaatgggaggctca

SEQ ID NO: 1922986 - DNA, 25 bp, Homo sapien
catgcctagtagagatggctttctg

SEQ ID NO: 1922987 - DNA, 25 bp, Homo sapien
gatgtgcaacctggcttactgagca

SEQ ID NO: 1922988 - DNA, 25 bp, Homo sapien
agagctaatatatacctggtcccga

SEQ ID NO: 1922989 - DNA, 25 bp, Homo sapien
gatgtgtatttggacctgtgccaca

SEQ ID NO: 1922990 - DNA, 25 bp, Homo sapien
gattagtcaaagtatgtaaggtgat

SEQ ID NO: 1922991 - DNA, 25 bp, Homo sapien
gatatttcaggctgtgaagccttac

SEQ ID NO: 1922992 - DNA, 25 bp, Homo sapien
gtaaggtgattagcatgcatagtat

SEQ ID NO: 1922993 - DNA, 25 bp, Homo sapien
tgtccattagtaatgtacttggaac

SEQ ID NO: 1922994 - DNA, 25 bp, Homo sapien
taataactgtgtgacccaaaagaag

SEQ ID NO: 1922995 - DNA, 25 bp, Homo sapien
acacgatttgtaaagtcagactgcc

SEQ ID NO: 1922996 - DNA, 25 bp, Homo sapien
gaagtaagcacatttaaccatggtg

SEQ ID NO: 1922997 - DNA, 25 bp, Homo sapien
aatggactcacagttgcataggctt

SEQ ID NO: 1922998 - DNA, 25 bp, Homo sapien
tccccattctcttgggtagatttat

SEQ ID NO: 1922999 - DNA, 25 bp, Homo sapien
aacattaaggctaatcttccaaagc

SEQ ID NO: 1923000 - DNA, 25 bp, Homo sapien
tacaaatgcatgattaaacctaagc

SEQ ID NO: 1923001 - DNA, 25 bp, Homo sapien
tttcgactggttttggactgggatg

SEQ ID NO: 1923002 - DNA, 25 bp, Homo sapien
tgaagggtgcatatacagcatatga

SEQ ID NO: 1923003 - DNA, 25 bp, Homo sapien
tatacagcatatgagcaccaggaac

SEQ ID NO: 1923004 - DNA, 25 bp, Homo sapien
cttagggtgacataaaaggcatgaa

SEQ ID NO: 1923005 - DNA, 25 bp, Homo sapien
ctaggccatatcatatgtagtgaca

SEQ ID NO: 1923006 - DNA, 25 bp, Homo sapien
tttgcacagatcttgcttagggtga

SEQ ID NO: 1923007 - DNA, 25 bp, Homo sapien
cagatcttgcttagggtgacataaa

SEQ ID NO: 1923008 - DNA, 25 bp, Homo sapien
taataataatagcattgccttttaa

SEQ ID NO: 1923009 - DNA, 25 bp, Homo sapien
cagaagtattctctacagaatctaa

SEQ ID NO: 1923010 - DNA, 25 bp, Homo sapien
cttctaggagcttaagtgtgaggca

SEQ ID NO: 1923011 - DNA, 25 bp, Homo sapien
gcttaagtgtgaggcattggttgta

SEQ ID NO: 1923012 - DNA, 25 bp, Homo sapien
gcagttccacaatgggttacccaga

SEQ ID NO: 1923013 - DNA, 25 bp, Homo sapien
tgtcagttaatcataaagcagttcc

SEQ ID NO: 1923014 - DNA, 25 bp, Homo sapien
gaactattgaccttccctatgagag

SEQ ID NO: 1923015 - DNA, 25 bp, Homo sapien
gagagagatgctgctaaaatgtcag

SEQ ID NO: 1923016 - DNA, 25 bp, Homo sapien
tagtttgggcacaggaagtcaagag

SEQ ID NO: 1923017 - DNA, 25 bp, Homo sapien
gaaacaatttgtcacatgacctcga

SEQ ID NO: 1923018 - DNA, 25 bp, Homo sapien
tgacctcgattgaaaggacatagac

SEQ ID NO: 1923019 - DNA, 25 bp, Homo sapien
tcaagagggaaatcactggaatacc

SEQ ID NO: 1923020 - DNA, 25 bp, Homo sapien
ggtgggtagcccaacaatactgtca

SEQ ID NO: 1923021 - DNA, 25 bp, Homo sapien
tgtcaatgataaacagatgctcaag

SEQ ID NO: 1923022 - DNA, 25 bp, Homo sapien
tgaggtaatcctcaacaacaggaca

SEQ ID NO: 1923023 - DNA, 25 bp, Homo sapien
tctgcagctgggtgtcaagctcctg

SEQ ID NO: 1923024 - DNA, 25 bp, Homo sapien
gcttgagaatagagaagcactccca

SEQ ID NO: 1923025 - DNA, 25 bp, Homo sapien
tttggactgaatatgtagcaggctc

SEQ ID NO: 1923026 - DNA, 25 bp, Homo sapien
caacgaggcattgtccagagtaact

SEQ ID NO: 1923027 - DNA, 25 bp, Homo sapien
tagcaggctcaccaaaactaccatg

SEQ ID NO: 1923028 - DNA, 25 bp, Homo sapien
tctttcaggatgataggaccatcgc

SEQ ID NO: 1923029 - DNA, 25 bp, Homo sapien
tccaggatcctgatgtcattcggta

SEQ ID NO: 1923030 - DNA, 25 bp, Homo sapien
tattcggtatctggatctaaatgcc

SEQ ID NO: 1923031 - DNA, 25 bp, Homo sapien
ggatcagcaaatatgtaggcccaac

SEQ ID NO: 1923032 - DNA, 25 bp, Homo sapien
cttatgtgagtatatcaaatggtaa

SEQ ID NO: 1923033 - DNA, 25 bp, Homo sapien
gaacttatgtgagtatatcaaatgg

SEQ ID NO: 1923034 - DNA, 25 bp, Homo sapien
aacctgaacttatgtgagtatatca

SEQ ID NO: 1923035 - DNA, 25 bp, Homo sapien
ctgaaacctgaacttatgtgagtat

SEQ ID NO: 1923036 - DNA, 25 bp, Homo sapien
gcacactcttgctatggaaaataag

SEQ ID NO: 1923037 - DNA, 25 bp, Homo sapien
ctcttgctatggaaaataaggagaa

SEQ ID NO: 1923038 - DNA, 25 bp, Homo sapien
tctgcacactcttgctatggaaaat

SEQ ID NO: 1923039 - DNA, 25 bp, Homo sapien
aaaactctgcacactcttgctatgg

SEQ ID NO: 1923040 - DNA, 25 bp, Homo sapien
tattcacactggcttgactgtggcc

SEQ ID NO: 1923041 - DNA, 25 bp, Homo sapien
taataggttcctctagaacagctca

SEQ ID NO: 1923042 - DNA, 25 bp, Homo sapien
tacacgaattgctcacaggcaagtg

SEQ ID NO: 1923043 - DNA, 25 bp, Homo sapien
tcaaaagggcaatggagcagaattt

SEQ ID NO: 1923044 - DNA, 25 bp, Homo sapien
tccatattagcatagcttacaagtt

SEQ ID NO: 1923045 - DNA, 25 bp, Homo sapien
ccatattagcatagcttacaagttc

SEQ ID NO: 1923046 - DNA, 25 bp, Homo sapien
tgtagacaccacaattgtcatcatc

SEQ ID NO: 1923047 - DNA, 25 bp, Homo sapien
tttatgccagcaaacttgactccat

SEQ ID NO: 1923048 - DNA, 25 bp, Homo sapien
tgacaaaggaaagagtctggtgtag

SEQ ID NO: 1923049 - DNA, 25 bp, Homo sapien
tcacttcctttatgccagcaaactt

SEQ ID NO: 1923050 - DNA, 25 bp, Homo sapien
tatagtgacttgacatcagaaacac

SEQ ID NO: 1923051 - DNA, 25 bp, Homo sapien
caatcaaaatatctacagagttgct

SEQ ID NO: 1923052 - DNA, 25 bp, Homo sapien
tgttctaataaagccatgcaatttc

SEQ ID NO: 1923053 - DNA, 25 bp, Homo sapien
ccatgcaatttcgtgaagtgaaaac

SEQ ID NO: 1923054 - DNA, 25 bp, Homo sapien
ataagttgagcaaaattggacacac

SEQ ID NO: 1923055 - DNA, 25 bp, Homo sapien
aataagttgagcaaaattggacaca

SEQ ID NO: 1923056 - DNA, 25 bp, Homo sapien
gcaatctgaaggaagcggcaaacct

SEQ ID NO: 1923057 - DNA, 25 bp, Homo sapien
tagtctgggctactggtatatcttc

SEQ ID NO: 1923058 - DNA, 25 bp, Homo sapien
gagttacacagcgatacaaatcctg

SEQ ID NO: 1923059 - DNA, 25 bp, Homo sapien
ggaacctcgttctgactgagttaca

SEQ ID NO: 1923060 - DNA, 25 bp, Homo sapien
tgtgctgtgacagtttcctctcgaa

SEQ ID NO: 1923061 - DNA, 25 bp, Homo sapien
gaagtaaattatttctagatatcga

SEQ ID NO: 1923062 - DNA, 25 bp, Homo sapien
acaggagagcatattgttcttgcac

SEQ ID NO: 1923063 - DNA, 25 bp, Homo sapien
cttgaacttccatgactgccaggct

SEQ ID NO: 1923064 - DNA, 25 bp, Homo sapien
tatcgataaaaagcaatccttgaac

SEQ ID NO: 1923065 - DNA, 25 bp, Homo sapien
ctccactcctcatggtgaaccttcc

SEQ ID NO: 1923066 - DNA, 25 bp, Homo sapien
agatccttctccttcggttcctatc

SEQ ID NO: 1923067 - DNA, 25 bp, Homo sapien
cttccacttcagtaagatccttctc

SEQ ID NO: 1923068 - DNA, 25 bp, Homo sapien
actcctcatggtgaaccttccactt

SEQ ID NO: 1923069 - DNA, 25 bp, Homo sapien
cgtatcattgaacgttcctcaggaa

SEQ ID NO: 1923070 - DNA, 25 bp, Homo sapien
cccataagtagagctttatcatagc

SEQ ID NO: 1923071 - DNA, 25 bp, Homo sapien
gggcagttgcagttaccttctgtca

SEQ ID NO: 1923072 - DNA, 25 bp, Homo sapien
tatccaaggtcgcactttgggcagt

SEQ ID NO: 1923073 - DNA, 25 bp, Homo sapien
tgaataaattaaggtgaatatgcac

SEQ ID NO: 1923074 - DNA, 25 bp, Homo sapien
gggaagactgatgtaagtgaataag

SEQ ID NO: 1923075 - DNA, 25 bp, Homo sapien
gaggcaatgtccatgtcaaagtgga

SEQ ID NO: 1923076 - DNA, 25 bp, Homo sapien
tcaccattctgtagcaaacgccaaa

SEQ ID NO: 1923077 - DNA, 25 bp, Homo sapien
tttgctacaaaaatggcaggaggaa

SEQ ID NO: 1923078 - DNA, 25 bp, Homo sapien
ttaaaaccatcatgaaatggactat

SEQ ID NO: 1923079 - DNA, 25 bp, Homo sapien
ctctcatctttgctacaaaaatggc

SEQ ID NO: 1923080 - DNA, 25 bp, Homo sapien
ttttaaaaccatcatgaaatggact

SEQ ID NO: 1923081 - DNA, 25 bp, Homo sapien
tctttcctcattctgatgcagagaa

SEQ ID NO: 1923082 - DNA, 25 bp, Homo sapien
atctctttcctcattctgatgcaga

SEQ ID NO: 1923083 - DNA, 25 bp, Homo sapien
ctttcctcattctgatgcagagaac

SEQ ID NO: 1923084 - DNA, 25 bp, Homo sapien
taaatctctttcctcattctgatgc

SEQ ID NO: 1923085 - DNA, 25 bp, Homo sapien
aatgtagcgttttgccctgcattca

SEQ ID NO: 1923086 - DNA, 25 bp, Homo sapien
aatgcactgaaatgtagcgttttgc

SEQ ID NO: 1923087 - DNA, 25 bp, Homo sapien
ctggagccataacttgttatgcaca

SEQ ID NO: 1923088 - DNA, 25 bp, Homo sapien
aacttgttatgcacagcatctctcc

SEQ ID NO: 1923089 - DNA, 25 bp, Homo sapien
acatcccctagacggaggaaatgag

SEQ ID NO: 1923090 - DNA, 25 bp, Homo sapien
tcccctagacggaggaaatgaggag

SEQ ID NO: 1923091 - DNA, 25 bp, Homo sapien
tctacatcccctagacggaggaaat

SEQ ID NO: 1923092 - DNA, 25 bp, Homo sapien
ctctacatcccctagacggaggaaa

SEQ ID NO: 1923093 - DNA, 25 bp, Homo sapien
cttttaaaactgaagcctcatccat

SEQ ID NO: 1923094 - DNA, 25 bp, Homo sapien
aagcagcagttctcaatttacgaac

SEQ ID NO: 1923095 - DNA, 25 bp, Homo sapien
cttgagttagaacatgaactaaagc

SEQ ID NO: 1923096 - DNA, 25 bp, Homo sapien
agaacatgaactaaagcagcagttc

SEQ ID NO: 1923097 - DNA, 25 bp, Homo sapien
aaggaattcttgagttagaacatga

SEQ ID NO: 1923098 - DNA, 25 bp, Homo sapien
catcaatggcaatataaccacttct

SEQ ID NO: 1923099 - DNA, 25 bp, Homo sapien
caaggataactcagtacttggatgt

SEQ ID NO: 1923100 - DNA, 25 bp, Homo sapien
cagtacttggatgtcatcaatggca

SEQ ID NO: 1923101 - DNA, 25 bp, Homo sapien
cacaaggataactcagtacttggat

SEQ ID NO: 1923102 - DNA, 25 bp, Homo sapien
agagaagtccagtactgatagtgat

SEQ ID NO: 1923103 - DNA, 25 bp, Homo sapien
gtactgatagtgatgagcttccttg

SEQ ID NO: 1923104 - DNA, 25 bp, Homo sapien
caaaggaagggaagcgagtgctcac

SEQ ID NO: 1923105 - DNA, 25 bp, Homo sapien
agcgagtgctcaccccacaggaacg

SEQ ID NO: 1923106 - DNA, 25 bp, Homo sapien
ggaaatcagaaactgtatggttaac

SEQ ID NO: 1923107 - DNA, 25 bp, Homo sapien
atcagaaactgtatggttaacattc

SEQ ID NO: 1923108 - DNA, 25 bp, Homo sapien
cttggtaggaaatcagaaactgtat

SEQ ID NO: 1923109 - DNA, 25 bp, Homo sapien
ggtaggaaatcagaaactgtatggt

SEQ ID NO: 1923110 - DNA, 25 bp, Homo sapien
tatgaacccgaatctccaaaactcc

SEQ ID NO: 1923111 - DNA, 25 bp, Homo sapien
gcaaagtcctatacccattctatga

SEQ ID NO: 1923112 - DNA, 25 bp, Homo sapien
gattgaactccagacgaaaacgtgt

SEQ ID NO: 1923113 - DNA, 25 bp, Homo sapien
ctaaacaacctactgagatccactg

SEQ ID NO: 1923114 - DNA, 25 bp, Homo sapien
tctaatgttctcaggccacgctggt

SEQ ID NO: 1923115 - DNA, 25 bp, Homo sapien
tatcgaaatgtcataggaggccagg

SEQ ID NO: 1923116 - DNA, 25 bp, Homo sapien
cgctggtcatgatctgagaatctga

SEQ ID NO: 1923117 - DNA, 25 bp, Homo sapien
ccttaagtctcaagttatgggctag

SEQ ID NO: 1923118 - DNA, 25 bp, Homo sapien
gcactgcataaatgtcatgtggcaa

SEQ ID NO: 1923119 - DNA, 25 bp, Homo sapien
gaagcagtaacacaatcagatggaa

SEQ ID NO: 1923120 - DNA, 25 bp, Homo sapien
cagatgcgcttctttggttagaaag

SEQ ID NO: 1923121 - DNA, 25 bp, Homo sapien
tatccactgatgacatacactgatg

SEQ ID NO: 1923122 - DNA, 25 bp, Homo sapien
gagtactataccctttctcaactgg

SEQ ID NO: 1923123 - DNA, 25 bp, Homo sapien
catatttatgctacagtgtggccct

SEQ ID NO: 1923124 - DNA, 25 bp, Homo sapien
agtcctttacctgcatcaagcttgc

SEQ ID NO: 1923125 - DNA, 25 bp, Homo sapien
gagcaatctcttcaggagtactata

SEQ ID NO: 1923126 - DNA, 25 bp, Homo sapien
atggttgtgtcacagccccacgact

SEQ ID NO: 1923127 - DNA, 25 bp, Homo sapien
gacttatgcaattttggagcccagg

SEQ ID NO: 1923128 - DNA, 25 bp, Homo sapien
aaagcaacactgcagtcagactgaa

SEQ ID NO: 1923129 - DNA, 25 bp, Homo sapien
gaaatgtgctccatattttgcctgt

SEQ ID NO: 1923130 - DNA, 25 bp, Homo sapien
gaatgaaacctttacatatttgcaa

SEQ ID NO: 1923131 - DNA, 25 bp, Homo sapien
gcaaagagacaggtaggcatcagtg

SEQ ID NO: 1923132 - DNA, 25 bp, Homo sapien
aaactttcgccaagctttgcagctg

SEQ ID NO: 1923133 - DNA, 25 bp, Homo sapien
catcagtggacacgtggtgtacacc

SEQ ID NO: 1923134 - DNA, 25 bp, Homo sapien
tcggaccctacacaaggcaatggct

SEQ ID NO: 1923135 - DNA, 25 bp, Homo sapien
caaagtctgttacctcagcagctga

SEQ ID NO: 1923136 - DNA, 25 bp, Homo sapien
gtctgcaaccaacgttcggacccta

SEQ ID NO: 1923137 - DNA, 25 bp, Homo sapien
tctcttaacccctggtgcaaggaca

SEQ ID NO: 1923138 - DNA, 25 bp, Homo sapien
aggtccatttgtgaacagcaaccca

SEQ ID NO: 1923139 - DNA, 25 bp, Homo sapien
taactgggctgcattaaaaccagca

SEQ ID NO: 1923140 - DNA, 25 bp, Homo sapien
cccttctatggcacaatgaatctta

SEQ ID NO: 1923141 - DNA, 25 bp, Homo sapien
gatcttggggagtagcatgcccttc

SEQ ID NO: 1923142 - DNA, 25 bp, Homo sapien
acttgtccgacttggaaccacttgg

SEQ ID NO: 1923143 - DNA, 25 bp, Homo sapien
cacagaacttgtccgacttggaacc

SEQ ID NO: 1923144 - DNA, 25 bp, Homo sapien
cagaacttgtccgacttggaaccac

SEQ ID NO: 1923145 - DNA, 25 bp, Homo sapien
ggacacagaacttgtccgacttgga

SEQ ID NO: 1923146 - DNA, 25 bp, Homo sapien
tcaattcttggatacacaacccatg

SEQ ID NO: 1923147 - DNA, 25 bp, Homo sapien
gactagaatttcacaagagagagga

SEQ ID NO: 1923148 - DNA, 25 bp, Homo sapien
ccaatatacagtctggcacaggaga

SEQ ID NO: 1923149 - DNA, 25 bp, Homo sapien
caccaaagttctgagcattccatga

SEQ ID NO: 1923150 - DNA, 25 bp, Homo sapien
gcccggctaatttcaggattctaag

SEQ ID NO: 1923151 - DNA, 25 bp, Homo sapien
gaaataatattgctccaccactacg

SEQ ID NO: 1923152 - DNA, 25 bp, Homo sapien
ccgtgttaggtaaatcctgttgccg

SEQ ID NO: 1923153 - DNA, 25 bp, Homo sapien
gtaaaaataagccacgatgaccgtg

SEQ ID NO: 1923154 - DNA, 25 bp, Homo sapien
tctgcaacaatgagacatttaccca

SEQ ID NO: 1923155 - DNA, 25 bp, Homo sapien
tgaacagggttgaatacaggcaatc

SEQ ID NO: 1923156 - DNA, 25 bp, Homo sapien
tacaccacaagcacatataacgaag

SEQ ID NO: 1923157 - DNA, 25 bp, Homo sapien
gatgacagccatcaacccacttttg

SEQ ID NO: 1923158 - DNA, 25 bp, Homo sapien
tctttccagtgctaagttaagctcc

SEQ ID NO: 1923159 - DNA, 25 bp, Homo sapien
catccagggacggaacctcatagtg

SEQ ID NO: 1923160 - DNA, 25 bp, Homo sapien
gctccggaataatagaatcaacttg

SEQ ID NO: 1923161 - DNA, 25 bp, Homo sapien
tacctgtggaaccatgcctacaatg

SEQ ID NO: 1923162 - DNA, 25 bp, Homo sapien
tgagggttactgaacaaactctcca

SEQ ID NO: 1923163 - DNA, 25 bp, Homo sapien
ccagggtcgtgatctgaagagtcca

SEQ ID NO: 1923164 - DNA, 25 bp, Homo sapien
tccaaattggattggcaagaggtcc

SEQ ID NO: 1923165 - DNA, 25 bp, Homo sapien
tcaatgcagtgagtgtcgttctcct

SEQ ID NO: 1923166 - DNA, 25 bp, Homo sapien
ttcattgggccaaaaggtgctcact

SEQ ID NO: 1923167 - DNA, 25 bp, Homo sapien
tgaaatgacattacaaataataatg

SEQ ID NO: 1923168 - DNA, 25 bp, Homo sapien
ctgaaatgacattacaaataataat

SEQ ID NO: 1923169 - DNA, 25 bp, Homo sapien
tagtgatctacagaaagctgatact

SEQ ID NO: 1923170 - DNA, 25 bp, Homo sapien
agtgatctacagaaagctgatactc

SEQ ID NO: 1923171 - DNA, 25 bp, Homo sapien
gtagtgatctacagaaagctgatac

SEQ ID NO: 1923172 - DNA, 25 bp, Homo sapien
aattgcaactaattgtgattgaaac

SEQ ID NO: 1923173 - DNA, 25 bp, Homo sapien
tctggagaggcaaaattgcaactaa

SEQ ID NO: 1923174 - DNA, 25 bp, Homo sapien
aaattgcaactaattgtgattgaaa

SEQ ID NO: 1923175 - DNA, 25 bp, Homo sapien
aaaattgcaactaattgtgattgaa

SEQ ID NO: 1923176 - DNA, 25 bp, Homo sapien
ttgaaacatgtaaagaaccatcact

SEQ ID NO: 1923177 - DNA, 25 bp, Homo sapien
tgaaacatgtaaagaaccatcactt

SEQ ID NO: 1923178 - DNA, 25 bp, Homo sapien
gaacttgatgctaggaaaggctttc

SEQ ID NO: 1923179 - DNA, 25 bp, Homo sapien
aggtttagaacttgatgctaggaaa

SEQ ID NO: 1923180 - DNA, 25 bp, Homo sapien
gaggtgcccactgcaatattttagg

SEQ ID NO: 1923181 - DNA, 25 bp, Homo sapien
taaagaactcaaatctgatgtccag

SEQ ID NO: 1923182 - DNA, 25 bp, Homo sapien
ttcactgtcaacctagagcaatgga

SEQ ID NO: 1923183 - DNA, 25 bp, Homo sapien
aaacaagccagcatatcctcagaag

SEQ ID NO: 1923184 - DNA, 25 bp, Homo sapien
tggtgcaaccacaaaatgtagagcc

SEQ ID NO: 1923185 - DNA, 25 bp, Homo sapien
gagcctcagtcagcatgagtttgtg

SEQ ID NO: 1923186 - DNA, 25 bp, Homo sapien
tcctgcttgcagttagatggtataa

SEQ ID NO: 1923187 - DNA, 25 bp, Homo sapien
taaataaggcttcggaacacccatg

SEQ ID NO: 1923188 - DNA, 25 bp, Homo sapien
gtcttggctcataaactgcagtctc

SEQ ID NO: 1923189 - DNA, 25 bp, Homo sapien
ctgcagtctcactggaaacagacat

SEQ ID NO: 1923190 - DNA, 25 bp, Homo sapien
atgtcttggctcataaactgcagtc

SEQ ID NO: 1923191 - DNA, 25 bp, Homo sapien
aactgcagtctcactggaaacagac

SEQ ID NO: 1923192 - DNA, 25 bp, Homo sapien
ccaacaccaagcaaacttctcgttt

SEQ ID NO: 1923193 - DNA, 25 bp, Homo sapien
actccagcgttagaagatagatatc

SEQ ID NO: 1923194 - DNA, 25 bp, Homo sapien
gaggatgactccagcgttagaagat

SEQ ID NO: 1923195 - DNA, 25 bp, Homo sapien
tctcgtttgatgctcagcagcccca

SEQ ID NO: 1923196 - DNA, 25 bp, Homo sapien
ccaaccaatcaccatctttatcttt

SEQ ID NO: 1923197 - DNA, 25 bp, Homo sapien
caaccaatcaccatctttatctttt

SEQ ID NO: 1923198 - DNA, 25 bp, Homo sapien
tatggcaacaatcagctcttcccac

SEQ ID NO: 1923199 - DNA, 25 bp, Homo sapien
tgacatatggcaacaatcagctctt

SEQ ID NO: 1923200 - DNA, 25 bp, Homo sapien
tagtcaccactgctaagctaagaag

SEQ ID NO: 1923201 - DNA, 25 bp, Homo sapien
acttcaattttgagtcaaagagaac

SEQ ID NO: 1923202 - DNA, 25 bp, Homo sapien
gggacttctcatagatatgttccac

SEQ ID NO: 1923203 - DNA, 25 bp, Homo sapien
cacacgcacgatagtccacaaaatg

SEQ ID NO: 1923204 - DNA, 25 bp, Homo sapien
tgacaactggttgaagggggacttc

SEQ ID NO: 1923205 - DNA, 25 bp, Homo sapien
tcatagatatgttccacacgcacga

SEQ ID NO: 1923206 - DNA, 25 bp, Homo sapien
gatacctatagagccctcccagtaa

SEQ ID NO: 1923207 - DNA, 25 bp, Homo sapien
tatagtttgacaaatcaagtgtaca

SEQ ID NO: 1923208 - DNA, 25 bp, Homo sapien
caaaggctgtgtatttcatatgtgg

SEQ ID NO: 1923209 - DNA, 25 bp, Homo sapien
taaaacacatatgataagctcacca

SEQ ID NO: 1923210 - DNA, 25 bp, Homo sapien
ttttggagaggagaagtataaggtc

SEQ ID NO: 1923211 - DNA, 25 bp, Homo sapien
cataactgtattttcggtcacactc

SEQ ID NO: 1923212 - DNA, 25 bp, Homo sapien
tagtacctacctatcttgagtcaag

SEQ ID NO: 1923213 - DNA, 25 bp, Homo sapien
ggtcacactcctaccagggaaaaga

SEQ ID NO: 1923214 - DNA, 25 bp, Homo sapien
gaagagcacattgaaataagcccat

SEQ ID NO: 1923215 - DNA, 25 bp, Homo sapien
gcttaaacagacacgcagcaagtgt

SEQ ID NO: 1923216 - DNA, 25 bp, Homo sapien
tacctcactgcaaacaaagacttaa

SEQ ID NO: 1923217 - DNA, 25 bp, Homo sapien
catacatgctctaatgagacagcag

SEQ ID NO: 1923218 - DNA, 25 bp, Homo sapien
cactgactaaacagagtgactctca

SEQ ID NO: 1923219 - DNA, 25 bp, Homo sapien
aaaggcaaagaataaggctcttaga

SEQ ID NO: 1923220 - DNA, 25 bp, Homo sapien
gaaaatcatagatactgcaaaacta

SEQ ID NO: 1923221 - DNA, 25 bp, Homo sapien
ggctcttagaagtgatccagtagca

SEQ ID NO: 1923222 - DNA, 25 bp, Homo sapien
cttgagcactaacatgcacccattc

SEQ ID NO: 1923223 - DNA, 25 bp, Homo sapien
ttgagcactaacatgcacccattca

SEQ ID NO: 1923224 - DNA, 25 bp, Homo sapien
ttcaaagtcatcatacagatcctgg

SEQ ID NO: 1923225 - DNA, 25 bp, Homo sapien
aagagtgaaagttgtcttcctctac

SEQ ID NO: 1923226 - DNA, 25 bp, Homo sapien
ttctaggacgtcaggtgaatcagcc

SEQ ID NO: 1923227 - DNA, 25 bp, Homo sapien
tttgcaaagggagtacgctgtggtc

SEQ ID NO: 1923228 - DNA, 25 bp, Homo sapien
cacctggagtctaaatcgtttttag

SEQ ID NO: 1923229 - DNA, 25 bp, Homo sapien
caagaacctttaacttctgcatcac

SEQ ID NO: 1923230 - DNA, 25 bp, Homo sapien
agaacctttaacttctgcatcacct

SEQ ID NO: 1923231 - DNA, 25 bp, Homo sapien
aaccaagaacctttaacttctgcat

SEQ ID NO: 1923232 - DNA, 25 bp, Homo sapien
gaacctttaacttctgcatcacctc

SEQ ID NO: 1923233 - DNA, 25 bp, Homo sapien
atgcatcttgaaatcaaaaaacaaa

SEQ ID NO: 1923234 - DNA, 25 bp, Homo sapien
gcccagagttggagactaccctggg

SEQ ID NO: 1923235 - DNA, 25 bp, Homo sapien
actttgaaatacacttcaagaaaat

SEQ ID NO: 1923236 - DNA, 25 bp, Homo sapien
cccagagttggagactaccctgggc

SEQ ID NO: 1923237 - DNA, 25 bp, Homo sapien
taacatagaaggcatatgggccaat

SEQ ID NO: 1923238 - DNA, 25 bp, Homo sapien
gatatcatcctcattacaaccagta

SEQ ID NO: 1923239 - DNA, 25 bp, Homo sapien
acagtttagccttctgtctggtcca

SEQ ID NO: 1923240 - DNA, 25 bp, Homo sapien
gtccagagcaaacaagccactcaca

SEQ ID NO: 1923241 - DNA, 25 bp, Homo sapien
tgtgcactacagaccacggaaagat

SEQ ID NO: 1923242 - DNA, 25 bp, Homo sapien
taccacatgatgtctacagagctgt

SEQ ID NO: 1923243 - DNA, 25 bp, Homo sapien
tatcaggactttacggagaaacctc

SEQ ID NO: 1923244 - DNA, 25 bp, Homo sapien
aatgatcccctctagctctgtaaag

SEQ ID NO: 1923245 - DNA, 25 bp, Homo sapien
tgactcttcactctgacgttcaggc

SEQ ID NO: 1923246 - DNA, 25 bp, Homo sapien
gttcaggcactctaccaccttgact

SEQ ID NO: 1923247 - DNA, 25 bp, Homo sapien
tacaggcttacatttcccaataagc

SEQ ID NO: 1923248 - DNA, 25 bp, Homo sapien
catctacttttacaggcttacattt

SEQ ID NO: 1923249 - DNA, 25 bp, Homo sapien
gccacaatatcagaaagcaataatg

SEQ ID NO: 1923250 - DNA, 25 bp, Homo sapien
tttgtgccattgctgacaatcagaa

SEQ ID NO: 1923251 - DNA, 25 bp, Homo sapien
gacaatcagaagatatgccacaata

SEQ ID NO: 1923252 - DNA, 25 bp, Homo sapien
tgccacaatatcagaaagcaataat

SEQ ID NO: 1923253 - DNA, 25 bp, Homo sapien
gtcaaaatatcctcacaaagggctc

SEQ ID NO: 1923254 - DNA, 25 bp, Homo sapien
gaaaaagcacggttgaaaatacagc

SEQ ID NO: 1923255 - DNA, 25 bp, Homo sapien
taacggtttgcctactaagcagagc

SEQ ID NO: 1923256 - DNA, 25 bp, Homo sapien
gctcagctgagtcttttgaacacag

SEQ ID NO: 1923257 - DNA, 25 bp, Homo sapien
gaagatacttgagcacagcagagaa

SEQ ID NO: 1923258 - DNA, 25 bp, Homo sapien
gcaacggtggctgacaaacccatct

SEQ ID NO: 1923259 - DNA, 25 bp, Homo sapien
gacaacagtctaggaactacatgga

SEQ ID NO: 1923260 - DNA, 25 bp, Homo sapien
tctccaaggctatactgcagtggct

SEQ ID NO: 1923261 - DNA, 25 bp, Homo sapien
agtccccaaaagactggtagatagt

SEQ ID NO: 1923262 - DNA, 25 bp, Homo sapien
gctctttgggtctcgaccaacattt

SEQ ID NO: 1923263 - DNA, 25 bp, Homo sapien
tatttcacctaatggagcttaaaga

SEQ ID NO: 1923264 - DNA, 25 bp, Homo sapien
ttttgcggaggaggaatattcagag

SEQ ID NO: 1923265 - DNA, 25 bp, Homo sapien
cttttccttcaatggtggtgggatc

SEQ ID NO: 1923266 - DNA, 25 bp, Homo sapien
tccttttgcagctccctctttcatc

SEQ ID NO: 1923267 - DNA, 25 bp, Homo sapien
ccttcaatggtggtgggatcagcat

SEQ ID NO: 1923268 - DNA, 25 bp, Homo sapien
catcattttatctctgtccaccttc

SEQ ID NO: 1923269 - DNA, 25 bp, Homo sapien
cctggcccgccagttttataaaatg

SEQ ID NO: 1923270 - DNA, 25 bp, Homo sapien
gcccaaaaagtactagccaagcaga

SEQ ID NO: 1923271 - DNA, 25 bp, Homo sapien
tgactctcccagtagatgacggccc

SEQ ID NO: 1923272 - DNA, 25 bp, Homo sapien
cagccatgttggatgcccctttatg

SEQ ID NO: 1923273 - DNA, 25 bp, Homo sapien
tcattcttcaatgttgcttttttct

SEQ ID NO: 1923274 - DNA, 25 bp, Homo sapien
caatgttgcttttttctccaaaacg

SEQ ID NO: 1923275 - DNA, 25 bp, Homo sapien
ttcttcaatgttgcttttttctcca

SEQ ID NO: 1923276 - DNA, 25 bp, Homo sapien
cattcttcaatgttgcttttttctc

SEQ ID NO: 1923277 - DNA, 25 bp, Homo sapien
gcatttattacagatctcaattcag

SEQ ID NO: 1923278 - DNA, 25 bp, Homo sapien
tgagatagtaacactcttttgttct

SEQ ID NO: 1923279 - DNA, 25 bp, Homo sapien
aatacttatgtaatccaatatagcc

SEQ ID NO: 1923280 - DNA, 25 bp, Homo sapien
catacccgtgatgtaacttagcatt

SEQ ID NO: 1923281 - DNA, 25 bp, Homo sapien
cagttttactgggacaaaatcatgc

SEQ ID NO: 1923282 - DNA, 25 bp, Homo sapien
tttccagtctaggattcaacccagg

SEQ ID NO: 1923283 - DNA, 25 bp, Homo sapien
catgagacaacagtattgcctgcaa

SEQ ID NO: 1923284 - DNA, 25 bp, Homo sapien
gaattggatagttgttgcatgagac

SEQ ID NO: 1923285 - DNA, 25 bp, Homo sapien
tgtagggaagtgctttaagaccatg

SEQ ID NO: 1923286 - DNA, 25 bp, Homo sapien
gaatgcctgaacgaatgttctgaag

SEQ ID NO: 1923287 - DNA, 25 bp, Homo sapien
taaccagaatctcctgctgatcagc

SEQ ID NO: 1923288 - DNA, 25 bp, Homo sapien
gtctctcagagtacagaatgcctga

SEQ ID NO: 1923289 - DNA, 25 bp, Homo sapien
taataaaacaaggtgtagggactga

SEQ ID NO: 1923290 - DNA, 25 bp, Homo sapien
taaccactgtcttaggctcgagaaa

SEQ ID NO: 1923291 - DNA, 25 bp, Homo sapien
ttccatgtaacctaacgggccacag

SEQ ID NO: 1923292 - DNA, 25 bp, Homo sapien
tcctaattcaaagggagagcaggat

SEQ ID NO: 1923293 - DNA, 25 bp, Homo sapien
gtttatttaaagcagaggtgacatc

SEQ ID NO: 1923294 - DNA, 25 bp, Homo sapien
aaccctgaaagtcatgttgtaagag

SEQ ID NO: 1923295 - DNA, 25 bp, Homo sapien
tgacatcacgggacatgagagctgt

SEQ ID NO: 1923296 - DNA, 25 bp, Homo sapien
aataaatggcaaggagttggcaaca

SEQ ID NO: 1923297 - DNA, 25 bp, Homo sapien
gcaaggcaggccacattcattggta

SEQ ID NO: 1923298 - DNA, 25 bp, Homo sapien
actttctgttggcaatagggaggca

SEQ ID NO: 1923299 - DNA, 25 bp, Homo sapien
tcatcagactgcttgggccgaatcc

SEQ ID NO: 1923300 - DNA, 25 bp, Homo sapien
tacacacagggcatctatcatcaga

SEQ ID NO: 1923301 - DNA, 25 bp, Homo sapien
attacacgaaagtgctgccccgact

SEQ ID NO: 1923302 - DNA, 25 bp, Homo sapien
tccagacatgttggctctgaattac

SEQ ID NO: 1923303 - DNA, 25 bp, Homo sapien
cacaccttaggccaatgttcttttt

SEQ ID NO: 1923304 - DNA, 25 bp, Homo sapien
ttccaacttccagacatgttggctc

SEQ ID NO: 1923305 - DNA, 25 bp, Homo sapien
catcaccaggcttgacctctctcat

SEQ ID NO: 1923306 - DNA, 25 bp, Homo sapien
aaacccaggagccatcaccaggctt

SEQ ID NO: 1923307 - DNA, 25 bp, Homo sapien
ggagccatcaccaggcttgacctct

SEQ ID NO: 1923308 - DNA, 25 bp, Homo sapien
acccaggagccatcaccaggcttga

SEQ ID NO: 1923309 - DNA, 25 bp, Homo sapien
caaccctaatgtagatatgtatgca

SEQ ID NO: 1923310 - DNA, 25 bp, Homo sapien
tatgtatgcagtataatccattctg

SEQ ID NO: 1923311 - DNA, 25 bp, Homo sapien
taaattacactatatgaaaggcaca

SEQ ID NO: 1923312 - DNA, 25 bp, Homo sapien
acctcattaaaaggaggatcaggaa

SEQ ID NO: 1923313 - DNA, 25 bp, Homo sapien
tgtaatgcagtttcggctacaccaa

SEQ ID NO: 1923314 - DNA, 25 bp, Homo sapien
gaggaagcagacaaaagcagcctgg

SEQ ID NO: 1923315 - DNA, 25 bp, Homo sapien
ctatctcaattcaaaacatgggtgg

SEQ ID NO: 1923316 - DNA, 25 bp, Homo sapien
cattcccagtgggacacaaaggctt

SEQ ID NO: 1923317 - DNA, 25 bp, Homo sapien
tagatggcgaatggaatggcagaca

SEQ ID NO: 1923318 - DNA, 25 bp, Homo sapien
ttcaatcgcccttcatgatcctggc

SEQ ID NO: 1923319 - DNA, 25 bp, Homo sapien
ccagggttctgtgtgcgtgatagat

SEQ ID NO: 1923320 - DNA, 25 bp, Homo sapien
aaaagttaccgaccacaagcacaga

SEQ ID NO: 1923321 - DNA, 25 bp, Homo sapien
tttgtgatccgccagacttgcagtg

SEQ ID NO: 1923322 - DNA, 25 bp, Homo sapien
ggctagagccaaacacaatagtaca

SEQ ID NO: 1923323 - DNA, 25 bp, Homo sapien
acttcaatggaagtggcaccacgcc

SEQ ID NO: 1923324 - DNA, 25 bp, Homo sapien
tgtcataacgccctgaaagtatagg

SEQ ID NO: 1923325 - DNA, 25 bp, Homo sapien
tatgttccagtcagtagcagaacac

SEQ ID NO: 1923326 - DNA, 25 bp, Homo sapien
caagtgttcacattagagggaaata

SEQ ID NO: 1923327 - DNA, 25 bp, Homo sapien
tattctatactaccagcaagtgttc

SEQ ID NO: 1923328 - DNA, 25 bp, Homo sapien
aattgccttatgtcaactgtcggaa

SEQ ID NO: 1923329 - DNA, 25 bp, Homo sapien
tgaacagcgcttggagaatcggcct

SEQ ID NO: 1923330 - DNA, 25 bp, Homo sapien
caaggaactgttgccagtctgtcac

SEQ ID NO: 1923331 - DNA, 25 bp, Homo sapien
ccaggacaccttgcagtgaggaatc

SEQ ID NO: 1923332 - DNA, 25 bp, Homo sapien
gaagcaatcagtcatcaatccctgg

SEQ ID NO: 1923333 - DNA, 25 bp, Homo sapien
acatgccaatgtccaaacagcagcc

SEQ ID NO: 1923334 - DNA, 25 bp, Homo sapien
gcacacatgccaatgtccaaacagc

SEQ ID NO: 1923335 - DNA, 25 bp, Homo sapien
cagcacacatgccaatgtccaaaca

SEQ ID NO: 1923336 - DNA, 25 bp, Homo sapien
cagcagcacacatgccaatgtccaa

SEQ ID NO: 1923337 - DNA, 25 bp, Homo sapien
tatacaacatcatgtcaaatgttat

SEQ ID NO: 1923338 - DNA, 25 bp, Homo sapien
tttctgggcatacattcctaaaggg

SEQ ID NO: 1923339 - DNA, 25 bp, Homo sapien
tactgtactttttaggaatgcacat

SEQ ID NO: 1923340 - DNA, 25 bp, Homo sapien
tcttgagatgcaatcctgtgattac

SEQ ID NO: 1923341 - DNA, 25 bp, Homo sapien
taatctctgcctgaatgtacgacac

SEQ ID NO: 1923342 - DNA, 25 bp, Homo sapien
tcaagcacggtttcaatgctaacgg

SEQ ID NO: 1923343 - DNA, 25 bp, Homo sapien
aagtaagttatttgcgtcctgcggc

SEQ ID NO: 1923344 - DNA, 25 bp, Homo sapien
gaaaatatatccatcgctgttgaga

SEQ ID NO: 1923345 - DNA, 25 bp, Homo sapien
atctgcaccgcgaaccccagcagca

SEQ ID NO: 1923346 - DNA, 25 bp, Homo sapien
agatgcgctcgccagccaagcgaag

SEQ ID NO: 1923347 - DNA, 25 bp, Homo sapien
tcagccaggagcgtggctgtcgctt

SEQ ID NO: 1923348 - DNA, 25 bp, Homo sapien
tggctgtcgcttttcccgtcttctc

SEQ ID NO: 1923349 - DNA, 25 bp, Homo sapien
ggacttctctgagcggcttgaccga

SEQ ID NO: 1923350 - DNA, 25 bp, Homo sapien
tttcaacacatcttacagggctccg

SEQ ID NO: 1923351 - DNA, 25 bp, Homo sapien
gaacgctcagagtgggtccttagaa

SEQ ID NO: 1923352 - DNA, 25 bp, Homo sapien
ttcggagaggaacaatgggtgcccc

SEQ ID NO: 1923353 - DNA, 25 bp, Homo sapien
gggccgatcccaggagaggccaagg

SEQ ID NO: 1923354 - DNA, 25 bp, Homo sapien
ccttgggccgatcccaggagaggcc

SEQ ID NO: 1923355 - DNA, 25 bp, Homo sapien
ttgggccgatcccaggagaggccaa

SEQ ID NO: 1923356 - DNA, 25 bp, Homo sapien
cttgggccgatcccaggagaggcca

SEQ ID NO: 1923357 - DNA, 25 bp, Homo sapien
gccgagtttgggagaagtttcaagc

SEQ ID NO: 1923358 - DNA, 25 bp, Homo sapien
ccgcgaaatccacgacggaggagcg

SEQ ID NO: 1923359 - DNA, 25 bp, Homo sapien
ttccttcttcgcggtcgccaaacta

SEQ ID NO: 1923360 - DNA, 25 bp, Homo sapien
tgaggacggtgagaggacagccgcc

SEQ ID NO: 1923361 - DNA, 25 bp, Homo sapien
ctcaggggcgaaagcgtcgccagcg

SEQ ID NO: 1923362 - DNA, 25 bp, Homo sapien
gggcgaaagcgtcgccagcgtcgcc

SEQ ID NO: 1923363 - DNA, 25 bp, Homo sapien
gaaagcgtcgccagcgtcgccggcc

SEQ ID NO: 1923364 - DNA, 25 bp, Homo sapien
tcaggggcgaaagcgtcgccagcgt

SEQ ID NO: 1923365 - DNA, 25 bp, Homo sapien
gctccgggcgcttctgaggaatgcg

SEQ ID NO: 1923366 - DNA, 25 bp, Homo sapien
tccgggcgcttctgaggaatgcggg

SEQ ID NO: 1923367 - DNA, 25 bp, Homo sapien
gggctccgggcgcttctgaggaatg

SEQ ID NO: 1923368 - DNA, 25 bp, Homo sapien
gcgggctccgggcgcttctgaggaa

SEQ ID NO: 1923369 - DNA, 25 bp, Homo sapien
gaagtctgaacacaggatgcggtgc

SEQ ID NO: 1923370 - DNA, 25 bp, Homo sapien
gatgcggtgcttccaaagctttgga

SEQ ID NO: 1923371 - DNA, 25 bp, Homo sapien
catatggaaccctgtggatcttgcc

SEQ ID NO: 1923372 - DNA, 25 bp, Homo sapien
gccgccacagcattcataaccaggg

SEQ ID NO: 1923373 - DNA, 25 bp, Homo sapien
gaatccttaagcatggcttattaac

SEQ ID NO: 1923374 - DNA, 25 bp, Homo sapien
atccaaaatttcagagtgaatcctt

SEQ ID NO: 1923375 - DNA, 25 bp, Homo sapien
ccaggtcacaggagggtagggtgtc

SEQ ID NO: 1923376 - DNA, 25 bp, Homo sapien
caggagggtagggtgtcttatccaa

SEQ ID NO: 1923377 - DNA, 25 bp, Homo sapien
taacttaatatagtgaaggagcagt

SEQ ID NO: 1923378 - DNA, 25 bp, Homo sapien
gcagtttagtgaccaattctccgta

SEQ ID NO: 1923379 - DNA, 25 bp, Homo sapien
gacaatttgggatctgggttgtcag

SEQ ID NO: 1923380 - DNA, 25 bp, Homo sapien
tctgatgtcaaccacagaagctgct

SEQ ID NO: 1923381 - DNA, 25 bp, Homo sapien
gagctctatcaagaaccttgtagac

SEQ ID NO: 1923382 - DNA, 25 bp, Homo sapien
ctgagctctatcaagaaccttgtag

SEQ ID NO: 1923383 - DNA, 25 bp, Homo sapien
tgagctctatcaagaaccttgtaga

SEQ ID NO: 1923384 - DNA, 25 bp, Homo sapien
gaagtttgccatcagtatatttagt

SEQ ID NO: 1923385 - DNA, 25 bp, Homo sapien
ggataccatagcccacggacgccag

SEQ ID NO: 1923386 - DNA, 25 bp, Homo sapien
gaatctgcatcttccggataccata

SEQ ID NO: 1923387 - DNA, 25 bp, Homo sapien
tgcatcttccggataccatagccca

SEQ ID NO: 1923388 - DNA, 25 bp, Homo sapien
ttccggataccatagcccacggacg

SEQ ID NO: 1923389 - DNA, 25 bp, Homo sapien
tcatgtccgtcttattgtcccaagg

SEQ ID NO: 1923390 - DNA, 25 bp, Homo sapien
acttggccaccagcgagggattctt

SEQ ID NO: 1923391 - DNA, 25 bp, Homo sapien
ggattcttggccttcttggcgtaca

SEQ ID NO: 1923392 - DNA, 25 bp, Homo sapien
tcccgcagccgccttgcctccttgt

SEQ ID NO: 1923393 - DNA, 25 bp, Homo sapien
cgtgctgtgtctgcgggactgtgga

SEQ ID NO: 1923394 - DNA, 25 bp, Homo sapien
atcgtcctcgttatcctctgcttct

SEQ ID NO: 1923395 - DNA, 25 bp, Homo sapien
actgtggaccatggccaggcgagct

SEQ ID NO: 1923396 - DNA, 25 bp, Homo sapien
tcgtcctcgttatcctctgcttctt

SEQ ID NO: 1923397 - DNA, 25 bp, Homo sapien
cctccaggttggagaccgcctgctg

SEQ ID NO: 1923398 - DNA, 25 bp, Homo sapien
ccaggttggagaccgcctgctgcag

SEQ ID NO: 1923399 - DNA, 25 bp, Homo sapien
tccaggttggagaccgcctgctgca

SEQ ID NO: 1923400 - DNA, 25 bp, Homo sapien
ctccaggttggagaccgcctgctgc

SEQ ID NO: 1923401 - DNA, 25 bp, Homo sapien
attcatctgcttgtagaatttcctt

SEQ ID NO: 1923402 - DNA, 25 bp, Homo sapien
cctttctgtatcttcatatttgaat

SEQ ID NO: 1923403 - DNA, 25 bp, Homo sapien
ttccctggggccgagctctggcggg

SEQ ID NO: 1923404 - DNA, 25 bp, Homo sapien
ttcatatttgaatttgtcgagccag

SEQ ID NO: 1923405 - DNA, 25 bp, Homo sapien
gactgcataggggacaggttccagc

SEQ ID NO: 1923406 - DNA, 25 bp, Homo sapien
ttcttctaagtttgcatgtacatgg

SEQ ID NO: 1923407 - DNA, 25 bp, Homo sapien
tagactggagaacatgtatcagtgc

SEQ ID NO: 1923408 - DNA, 25 bp, Homo sapien
tgtatcagtgcctatcctctttccc

SEQ ID NO: 1923409 - DNA, 25 bp, Homo sapien
aaagatagactactcaggcctaaag

SEQ ID NO: 1923410 - DNA, 25 bp, Homo sapien
atattctttcctctatgatcaaaga

SEQ ID NO: 1923411 - DNA, 25 bp, Homo sapien
gatagactactcaggcctaaagaaa

SEQ ID NO: 1923412 - DNA, 25 bp, Homo sapien
cctctatgatcaaagatagactact

SEQ ID NO: 1923413 - DNA, 25 bp, Homo sapien
tcagctgtaaagcgtaggaaggcag

SEQ ID NO: 1923414 - DNA, 25 bp, Homo sapien
taggagtacggtggccacaatagca

SEQ ID NO: 1923415 - DNA, 25 bp, Homo sapien
gtgtctaggagtacggtggccacaa

SEQ ID NO: 1923416 - DNA, 25 bp, Homo sapien
gtaggtgtctaggagtacggtggcc

SEQ ID NO: 1923417 - DNA, 25 bp, Homo sapien
tgctattatcactttctggctcctc

SEQ ID NO: 1923418 - DNA, 25 bp, Homo sapien
ccatatttgacagctatagctgctc

SEQ ID NO: 1923419 - DNA, 25 bp, Homo sapien
tattatcactttctggctcctcttg

SEQ ID NO: 1923420 - DNA, 25 bp, Homo sapien
gctatagctgctctgctattatcac

SEQ ID NO: 1923421 - DNA, 25 bp, Homo sapien
tcagacttctcgaaaccttcaggca

SEQ ID NO: 1923422 - DNA, 25 bp, Homo sapien
tgctcagacttctcgaaaccttcag

SEQ ID NO: 1923423 - DNA, 25 bp, Homo sapien
atgctcagacttctcgaaaccttca

SEQ ID NO: 1923424 - DNA, 25 bp, Homo sapien
gctcagacttctcgaaaccttcagg

SEQ ID NO: 1923425 - DNA, 25 bp, Homo sapien
cgtcaggcacacgacacaaatggca

SEQ ID NO: 1923426 - DNA, 25 bp, Homo sapien
tagaagcttgcagtcttcttgaaga

SEQ ID NO: 1923427 - DNA, 25 bp, Homo sapien
cacccttgcctgaaatagtatgtgg

SEQ ID NO: 1923428 - DNA, 25 bp, Homo sapien
tctgagtttaacgaagaaggcctta

SEQ ID NO: 1923429 - DNA, 25 bp, Homo sapien
tcttgaagatagagattctgagttg

SEQ ID NO: 1923430 - DNA, 25 bp, Homo sapien
caaaaccaggaagagctatattcat

SEQ ID NO: 1923431 - DNA, 25 bp, Homo sapien
gtgcttcaatttcgtcatcttcaaa

SEQ ID NO: 1923432 - DNA, 25 bp, Homo sapien
agctctgtggcctgttgtgcttcaa

SEQ ID NO: 1923433 - DNA, 25 bp, Homo sapien
atcttcaaaaccaggaagagctata

SEQ ID NO: 1923434 - DNA, 25 bp, Homo sapien
ccgtacaagtacaaggaagtggcag

SEQ ID NO: 1923435 - DNA, 25 bp, Homo sapien
tcagcacaaactttgcctaagcgtc

SEQ ID NO: 1923436 - DNA, 25 bp, Homo sapien
gtttcatcgccatattccaattcct

SEQ ID NO: 1923437 - DNA, 25 bp, Homo sapien
taagcgtctcttatgccactttggc

SEQ ID NO: 1923438 - DNA, 25 bp, Homo sapien
tgtttgcccacgacatttttactca

SEQ ID NO: 1923439 - DNA, 25 bp, Homo sapien
cagtctagttacaaaatctgccaat

SEQ ID NO: 1923440 - DNA, 25 bp, Homo sapien
cccatgtttgcccacgacattttta

SEQ ID NO: 1923441 - DNA, 25 bp, Homo sapien
gctgctcctgtttacacctcatcag

SEQ ID NO: 1923442 - DNA, 25 bp, Homo sapien
cgatttgagctagcttcccgggact

SEQ ID NO: 1923443 - DNA, 25 bp, Homo sapien
cactttgtcagtgtgattgtctcag

SEQ ID NO: 1923444 - DNA, 25 bp, Homo sapien
gaagagttgctccttgcccactttg

SEQ ID NO: 1923445 - DNA, 25 bp, Homo sapien
tgatgcttttgctcgcccactaata

SEQ ID NO: 1923446 - DNA, 25 bp, Homo sapien
tgatagtgggtactaaaatccgtaa

SEQ ID NO: 1923447 - DNA, 25 bp, Homo sapien
ggcaaatattgatagtgggtactaa

SEQ ID NO: 1923448 - DNA, 25 bp, Homo sapien
cagttgacaataggcaaatattgat

SEQ ID NO: 1923449 - DNA, 25 bp, Homo sapien
tattgatagtgggtactaaaatccg

SEQ ID NO: 1923450 - DNA, 25 bp, Homo sapien
tgcacaccacaagttccccattatt

SEQ ID NO: 1923451 - DNA, 25 bp, Homo sapien
cccattattaaagtaagcaggaagc

SEQ ID NO: 1923452 - DNA, 25 bp, Homo sapien
agttccccattattaaagtaagcag

SEQ ID NO: 1923453 - DNA, 25 bp, Homo sapien
ttccccattattaaagtaagcagga

SEQ ID NO: 1923454 - DNA, 25 bp, Homo sapien
tagaaaagccagaggcagtggagaa

SEQ ID NO: 1923455 - DNA, 25 bp, Homo sapien
aactggctgtgagcaattaattgta

SEQ ID NO: 1923456 - DNA, 25 bp, Homo sapien
tggctgtgagcaattaattgtaaac

SEQ ID NO: 1923457 - DNA, 25 bp, Homo sapien
gtaactggctgtgagcaattaattg

SEQ ID NO: 1923458 - DNA, 25 bp, Homo sapien
ggctttttctcgtaataccagattc

SEQ ID NO: 1923459 - DNA, 25 bp, Homo sapien
gctttttctcgtaataccagattct

SEQ ID NO: 1923460 - DNA, 25 bp, Homo sapien
ctaatgaggcaaaggctattggtct

SEQ ID NO: 1923461 - DNA, 25 bp, Homo sapien
taatgaggcaaaggctattggtctt

SEQ ID NO: 1923462 - DNA, 25 bp, Homo sapien
atgaggcaaaggctattggtcttga

SEQ ID NO: 1923463 - DNA, 25 bp, Homo sapien
gaggcaaaggctattggtcttgact

SEQ ID NO: 1923464 - DNA, 25 bp, Homo sapien
ggtcagtgcctcctgaagttactga

SEQ ID NO: 1923465 - DNA, 25 bp, Homo sapien
gtcagtgcctcctgaagttactgaa

SEQ ID NO: 1923466 - DNA, 25 bp, Homo sapien
tggtcagtgcctcctgaagttactg

SEQ ID NO: 1923467 - DNA, 25 bp, Homo sapien
ccagtattgatgtagaggttgtcca

SEQ ID NO: 1923468 - DNA, 25 bp, Homo sapien
acccagtattgatgtagaggttgtc

SEQ ID NO: 1923469 - DNA, 25 bp, Homo sapien
cacccagtattgatgtagaggttgt

SEQ ID NO: 1923470 - DNA, 25 bp, Homo sapien
cccagtattgatgtagaggttgtcc

SEQ ID NO: 1923471 - DNA, 25 bp, Homo sapien
cctttccacgtaaaatgacctgatt

SEQ ID NO: 1923472 - DNA, 25 bp, Homo sapien
gaccatttttgtctaatagcagccc

SEQ ID NO: 1923473 - DNA, 25 bp, Homo sapien
gcagcccttgtgttgttgaatccat

SEQ ID NO: 1923474 - DNA, 25 bp, Homo sapien
ttgatggtgttttgcccatatcccc

SEQ ID NO: 1923475 - DNA, 25 bp, Homo sapien
agtggatccggtcgcggccactacg

SEQ ID NO: 1923476 - DNA, 25 bp, Homo sapien
ctcccgagaagtggatccggtcgcg

SEQ ID NO: 1923477 - DNA, 25 bp, Homo sapien
tcgcggccactacgatgccgggagc

SEQ ID NO: 1923478 - DNA, 25 bp, Homo sapien
ggctcccgagaagtggatccggtcg

SEQ ID NO: 1923479 - DNA, 25 bp, Homo sapien
aaagaggtacagtcgaggcatgggc

SEQ ID NO: 1923480 - DNA, 25 bp, Homo sapien
gggttgcatcctttgccgggaccga

SEQ ID NO: 1923481 - DNA, 25 bp, Homo sapien
tcttgcttcgccttcagagagtgcg

SEQ ID NO: 1923482 - DNA, 25 bp, Homo sapien
gcagcagcggcagtcacaggcacat

SEQ ID NO: 1923483 - DNA, 25 bp, Homo sapien
aattccttctcctctacggtagctc

SEQ ID NO: 1923484 - DNA, 25 bp, Homo sapien
ggtctccccatctaataacagtaaa

SEQ ID NO: 1923485 - DNA, 25 bp, Homo sapien
ctgtaaagtacaggaaatactgagc

SEQ ID NO: 1923486 - DNA, 25 bp, Homo sapien
gacttggactacacaacaattcctt

SEQ ID NO: 1923487 - DNA, 25 bp, Homo sapien
cagagccaagtacacggcccaaaga

SEQ ID NO: 1923488 - DNA, 25 bp, Homo sapien
accgtcaatggctaagttcccgtca

SEQ ID NO: 1923489 - DNA, 25 bp, Homo sapien
gcagcagcgttttcccgtacagatc

SEQ ID NO: 1923490 - DNA, 25 bp, Homo sapien
ccaagtccatacatttgatcagttg

SEQ ID NO: 1923491 - DNA, 25 bp, Homo sapien
gacagactctttatggtatgccgac

SEQ ID NO: 1923492 - DNA, 25 bp, Homo sapien
agacagactctttatggtatgccga

SEQ ID NO: 1923493 - DNA, 25 bp, Homo sapien
ccatagtcatgagacttgatcctgc

SEQ ID NO: 1923494 - DNA, 25 bp, Homo sapien
catagtcatgagacttgatcctgca

SEQ ID NO: 1923495 - DNA, 25 bp, Homo sapien
gagcgacaattatctccatagtcat

SEQ ID NO: 1923496 - DNA, 25 bp, Homo sapien
gagaaactcctgagcgacaattatc

SEQ ID NO: 1923497 - DNA, 25 bp, Homo sapien
aagccaacgccaagaaatcaagggc

SEQ ID NO: 1923498 - DNA, 25 bp, Homo sapien
ctgaagccaacgccaagaaatcaag

SEQ ID NO: 1923499 - DNA, 25 bp, Homo sapien
agccaacgccaagaaatcaagggca

SEQ ID NO: 1923500 - DNA, 25 bp, Homo sapien
tagctggatattggaaaacgtgtaa

SEQ ID NO: 1923501 - DNA, 25 bp, Homo sapien
cgtagctggatattggaaaacgtgt

SEQ ID NO: 1923502 - DNA, 25 bp, Homo sapien
agctggatattggaaaacgtgtaaa

SEQ ID NO: 1923503 - DNA, 25 bp, Homo sapien
gtagctggatattggaaaacgtgta

SEQ ID NO: 1923504 - DNA, 25 bp, Homo sapien
gaagacttccacgagtgaagatcag

SEQ ID NO: 1923505 - DNA, 25 bp, Homo sapien
ttccacgagtgaagatcaggtgaca

SEQ ID NO: 1923506 - DNA, 25 bp, Homo sapien
gacttccacgagtgaagatcaggtg

SEQ ID NO: 1923507 - DNA, 25 bp, Homo sapien
cagctgagtgtatgggatgtgcagg

SEQ ID NO: 1923508 - DNA, 25 bp, Homo sapien
cctgcggaggcgatctttgcgcacg

SEQ ID NO: 1923509 - DNA, 25 bp, Homo sapien
aaatcttcagtaggagtgactgggc

SEQ ID NO: 1923510 - DNA, 25 bp, Homo sapien
ctctgttgtgaggagaatattgccc

SEQ ID NO: 1923511 - DNA, 25 bp, Homo sapien
gccttgtgcaaatctctccagtagt

SEQ ID NO: 1923512 - DNA, 25 bp, Homo sapien
cattgcaagggctatgtctcctctg

SEQ ID NO: 1923513 - DNA, 25 bp, Homo sapien
taaccgaaaagtgtgggagctgagg

SEQ ID NO: 1923514 - DNA, 25 bp, Homo sapien
ccaatcgtagtttcagtgaggaaga

SEQ ID NO: 1923515 - DNA, 25 bp, Homo sapien
ggcagtgtgactgctccaatcgtag

SEQ ID NO: 1923516 - DNA, 25 bp, Homo sapien
ggtattgtttgagagcctgtgggca

SEQ ID NO: 1923517 - DNA, 25 bp, Homo sapien
tctccgtggctggatgagttgtctc

SEQ ID NO: 1923518 - DNA, 25 bp, Homo sapien
gagttgtctcgaagagcagtttaca

SEQ ID NO: 1923519 - DNA, 25 bp, Homo sapien
tgaccaggtccttgagagctcttag

SEQ ID NO: 1923520 - DNA, 25 bp, Homo sapien
cagtttacactcagtagtgaccagg

SEQ ID NO: 1923521 - DNA, 25 bp, Homo sapien
ctactgctggcatgtggaatgctct

SEQ ID NO: 1923522 - DNA, 25 bp, Homo sapien
ctgctggcatgtggaatgctctttt

SEQ ID NO: 1923523 - DNA, 25 bp, Homo sapien
tttcctgctccatgccagtctctca

SEQ ID NO: 1923524 - DNA, 25 bp, Homo sapien
gaatgctcttttcctgctccatgcc

SEQ ID NO: 1923525 - DNA, 25 bp, Homo sapien
gcgtccttagctttgaccatcaaga

SEQ ID NO: 1923526 - DNA, 25 bp, Homo sapien
ttcctgtgcctggtacctgaaagac

SEQ ID NO: 1923527 - DNA, 25 bp, Homo sapien
tcaagaagagtccatctcctttgcc

SEQ ID NO: 1923528 - DNA, 25 bp, Homo sapien
gatttagaaagatttgtgcgtcctt

SEQ ID NO: 1923529 - DNA, 25 bp, Homo sapien
cgcagtgtggctatccttgcaaatt

SEQ ID NO: 1923530 - DNA, 25 bp, Homo sapien
ttcgcagtgtggctatccttgcaaa

SEQ ID NO: 1923531 - DNA, 25 bp, Homo sapien
gcagtgtggctatccttgcaaattt

SEQ ID NO: 1923532 - DNA, 25 bp, Homo sapien
ctttcgcagtgtggctatccttgca

SEQ ID NO: 1923533 - DNA, 25 bp, Homo sapien
cttcttaagggcccattcgtatgta

SEQ ID NO: 1923534 - DNA, 25 bp, Homo sapien
tcttcttaagggcccattcgtatgt

SEQ ID NO: 1923535 - DNA, 25 bp, Homo sapien
tctcttcttaagggcccattcgtat

SEQ ID NO: 1923536 - DNA, 25 bp, Homo sapien
ctctcttcttaagggcccattcgta

SEQ ID NO: 1923537 - DNA, 25 bp, Homo sapien
tatttgcatgggtaacatgtcctca

SEQ ID NO: 1923538 - DNA, 25 bp, Homo sapien
atatttgcatgggtaacatgtcctc

SEQ ID NO: 1923539 - DNA, 25 bp, Homo sapien
atttgcatgggtaacatgtcctcac

SEQ ID NO: 1923540 - DNA, 25 bp, Homo sapien
catatttgcatgggtaacatgtcct

SEQ ID NO: 1923541 - DNA, 25 bp, Homo sapien
agaatttcctgaagctctccctgac

SEQ ID NO: 1923542 - DNA, 25 bp, Homo sapien
taagaatttcctgaagctctccctg

SEQ ID NO: 1923543 - DNA, 25 bp, Homo sapien
cctgattcctgaacaaccacccctt

SEQ ID NO: 1923544 - DNA, 25 bp, Homo sapien
cagaacagctagcagaacctcaggg

SEQ ID NO: 1923545 - DNA, 25 bp, Homo sapien
tcagggaataccactgactttatgg

SEQ ID NO: 1923546 - DNA, 25 bp, Homo sapien
tgtgaacatccccatgtaactgtgt

SEQ ID NO: 1923547 - DNA, 25 bp, Homo sapien
gaaatgccagggtaacataagcgag

SEQ ID NO: 1923548 - DNA, 25 bp, Homo sapien
ggttatgctactgaagatcttcctg

SEQ ID NO: 1923549 - DNA, 25 bp, Homo sapien
catggactcagtttatagtgtctgg

SEQ ID NO: 1923550 - DNA, 25 bp, Homo sapien
taataaggctttgccaatggctgca

SEQ ID NO: 1923551 - DNA, 25 bp, Homo sapien
tagactcactgcaggcataaaccct

SEQ ID NO: 1923552 - DNA, 25 bp, Homo sapien
aatgttcgaattctaagttcttgtc

SEQ ID NO: 1923553 - DNA, 25 bp, Homo sapien
tttttcttgagagtatggctagccg

SEQ ID NO: 1923554 - DNA, 25 bp, Homo sapien
tgctggtgttccgtgctaagaaaag

SEQ ID NO: 1923555 - DNA, 25 bp, Homo sapien
tagaattgcagtgtgttagcccctc

SEQ ID NO: 1923556 - DNA, 25 bp, Homo sapien
tgtctcaggctgtccaggttggtaa

SEQ ID NO: 1923557 - DNA, 25 bp, Homo sapien
ctcaggctgtccaggttggtaacag

SEQ ID NO: 1923558 - DNA, 25 bp, Homo sapien
tattcatgttgtctcaggctgtcca

SEQ ID NO: 1923559 - DNA, 25 bp, Homo sapien
ttattcatgttgtctcaggctgtcc

SEQ ID NO: 1923560 - DNA, 25 bp, Homo sapien
agaacatggttataggcacttacat

SEQ ID NO: 1923561 - DNA, 25 bp, Homo sapien
ttcatggcaatagaagctccaactt

SEQ ID NO: 1923562 - DNA, 25 bp, Homo sapien
acttacattgctatcaaatgcagga

SEQ ID NO: 1923563 - DNA, 25 bp, Homo sapien
gttcatggcaatagaagctccaact

SEQ ID NO: 1923564 - DNA, 25 bp, Homo sapien
gtaaatggcttgtatgagattggcg

SEQ ID NO: 1923565 - DNA, 25 bp, Homo sapien
aaagctggtggggaagctatctcac

SEQ ID NO: 1923566 - DNA, 25 bp, Homo sapien
gaagctatctcacttgcaaagtaaa

SEQ ID NO: 1923567 - DNA, 25 bp, Homo sapien
tgagattggcgaatcttggtcagat

SEQ ID NO: 1923568 - DNA, 25 bp, Homo sapien
atcttgggattcaaccatcttggca

SEQ ID NO: 1923569 - DNA, 25 bp, Homo sapien
catcttgggattcaaccatcttggc

SEQ ID NO: 1923570 - DNA, 25 bp, Homo sapien
ttgggattcaaccatcttggcaagc

SEQ ID NO: 1923571 - DNA, 25 bp, Homo sapien
tcttgggattcaaccatcttggcaa

SEQ ID NO: 1923572 - DNA, 25 bp, Homo sapien
cctgttccaaatcacgattgtaacg

SEQ ID NO: 1923573 - DNA, 25 bp, Homo sapien
aaatcacgattgtaacgacgtctgc

SEQ ID NO: 1923574 - DNA, 25 bp, Homo sapien
cgattgtaacgacgtctgcttgaga

SEQ ID NO: 1923575 - DNA, 25 bp, Homo sapien
tgtaacgacgtctgcttgagatgct

SEQ ID NO: 1923576 - DNA, 25 bp, Homo sapien
cgaatgctgccatcaaaaaacggac

SEQ ID NO: 1923577 - DNA, 25 bp, Homo sapien
gcagacagccatagaaatgagcaaa

SEQ ID NO: 1923578 - DNA, 25 bp, Homo sapien
agcaaaaccagccatcgaatgctgc

SEQ ID NO: 1923579 - DNA, 25 bp, Homo sapien
agcaattatgcagacagccatagaa

SEQ ID NO: 1923580 - DNA, 25 bp, Homo sapien
gacaacagggggcatgtgggttgca

SEQ ID NO: 1923581 - DNA, 25 bp, Homo sapien
catgtgggttgcaaatactggttac

SEQ ID NO: 1923582 - DNA, 25 bp, Homo sapien
cagggggcatgtgggttgcaaatac

SEQ ID NO: 1923583 - DNA, 25 bp, Homo sapien
gggcatgtgggttgcaaatactggt

SEQ ID NO: 1923584 - DNA, 25 bp, Homo sapien
tattgtccggcgtagctgggctttt

SEQ ID NO: 1923585 - DNA, 25 bp, Homo sapien
catatttcatacaccctgaagctaa

SEQ ID NO: 1923586 - DNA, 25 bp, Homo sapien
attctattgtccggcgtagctgggc

SEQ ID NO: 1923587 - DNA, 25 bp, Homo sapien
ctgaagctaatgtggtttctccctg

SEQ ID NO: 1923588 - DNA, 25 bp, Homo sapien
caaagcaacgtccattagttatgca

SEQ ID NO: 1923589 - DNA, 25 bp, Homo sapien
gttattaatagcatcatctgggcag

SEQ ID NO: 1923590 - DNA, 25 bp, Homo sapien
cgtccattagttatgcatgtgttat

SEQ ID NO: 1923591 - DNA, 25 bp, Homo sapien
ctatgatggcaaagcaacgtccatt

SEQ ID NO: 1923592 - DNA, 25 bp, Homo sapien
ctgactttttctggtcggagtctga

SEQ ID NO: 1923593 - DNA, 25 bp, Homo sapien
tctggtcggagtctgatttcatccc

SEQ ID NO: 1923594 - DNA, 25 bp, Homo sapien
ctggtgctaaggttactccattttc

SEQ ID NO: 1923595 - DNA, 25 bp, Homo sapien
aaaaaaggcaaggtatcctctggtg

SEQ ID NO: 1923596 - DNA, 25 bp, Homo sapien
ttgaacacgagaaatgatgaacaaa

SEQ ID NO: 1923597 - DNA, 25 bp, Homo sapien
cttgaacacgagaaatgatgaacaa

SEQ ID NO: 1923598 - DNA, 25 bp, Homo sapien
aatgatgaacaaataggctcccaat

SEQ ID NO: 1923599 - DNA, 25 bp, Homo sapien
gatgaacaaataggctcccaataat

SEQ ID NO: 1923600 - DNA, 25 bp, Homo sapien
ccagcggttgctttccactgaattt

SEQ ID NO: 1923601 - DNA, 25 bp, Homo sapien
gtttccagcggttgctttccactga

SEQ ID NO: 1923602 - DNA, 25 bp, Homo sapien
cagtttccagcggttgctttccact

SEQ ID NO: 1923603 - DNA, 25 bp, Homo sapien
tgttcagtttccagcggttgctttc

SEQ ID NO: 1923604 - DNA, 25 bp, Homo sapien
gcatcatcagcattagcgtttgtgg

SEQ ID NO: 1923605 - DNA, 25 bp, Homo sapien
cagcattagcgtttgtggaaatttc

SEQ ID NO: 1923606 - DNA, 25 bp, Homo sapien
ttcttctcaatgtagcatcatcagc

SEQ ID NO: 1923607 - DNA, 25 bp, Homo sapien
tcatcagcattagcgtttgtggaaa

SEQ ID NO: 1923608 - DNA, 25 bp, Homo sapien
cataaagtctggatgcacgggctga

SEQ ID NO: 1923609 - DNA, 25 bp, Homo sapien
taagcataagctacgaccataaagt

SEQ ID NO: 1923610 - DNA, 25 bp, Homo sapien
gcctttctgctagtccctgtacatg

SEQ ID NO: 1923611 - DNA, 25 bp, Homo sapien
taacaatgtgtagttcaacaggctg

SEQ ID NO: 1923612 - DNA, 25 bp, Homo sapien
gataaagcagccgtgcagaagcaga

SEQ ID NO: 1923613 - DNA, 25 bp, Homo sapien
catagtatgtttcacgagcaagccg

SEQ ID NO: 1923614 - DNA, 25 bp, Homo sapien
gcagagcaacaccagtacagctttg

SEQ ID NO: 1923615 - DNA, 25 bp, Homo sapien
tgctggccgacattctgctgcttac

SEQ ID NO: 1923616 - DNA, 25 bp, Homo sapien
gggctggtatcctctggctagagct

SEQ ID NO: 1923617 - DNA, 25 bp, Homo sapien
aaaagctgtgagcaatgggcctcca

SEQ ID NO: 1923618 - DNA, 25 bp, Homo sapien
tgggcctccataaatggctgaacaa

SEQ ID NO: 1923619 - DNA, 25 bp, Homo sapien
tcagagatgtgcagggctggtatcc

SEQ ID NO: 1923620 - DNA, 25 bp, Homo sapien
tcttcattgttcatagctacaggct

SEQ ID NO: 1923621 - DNA, 25 bp, Homo sapien
caatttggaattggccatagacacc

SEQ ID NO: 1923622 - DNA, 25 bp, Homo sapien
tgaggtttaaagactggaacagaac

SEQ ID NO: 1923623 - DNA, 25 bp, Homo sapien
taaaccactccaatagaattaggga

SEQ ID NO: 1923624 - DNA, 25 bp, Homo sapien
cagttagctttcctaagcctggttt

SEQ ID NO: 1923625 - DNA, 25 bp, Homo sapien
taagcctggttttgtggagctctcc

SEQ ID NO: 1923626 - DNA, 25 bp, Homo sapien
tcagcaccaagaatgagtccggcat

SEQ ID NO: 1923627 - DNA, 25 bp, Homo sapien
ctcccctgtgccaattgatgtagga

SEQ ID NO: 1923628 - DNA, 25 bp, Homo sapien
tctcatcttggctagcaaggactga

SEQ ID NO: 1923629 - DNA, 25 bp, Homo sapien
ctgctctcatcttggctagcaagga

SEQ ID NO: 1923630 - DNA, 25 bp, Homo sapien
tagtttcgtatcatttatttctgct

SEQ ID NO: 1923631 - DNA, 25 bp, Homo sapien
catcttggctagcaaggactgaaca

SEQ ID NO: 1923632 - DNA, 25 bp, Homo sapien
tttcccagttgcacaagctgaagta

SEQ ID NO: 1923633 - DNA, 25 bp, Homo sapien
taatagtcttttgggcctgactcat

SEQ ID NO: 1923634 - DNA, 25 bp, Homo sapien
aagtaatagtcttttgggcctgact

SEQ ID NO: 1923635 - DNA, 25 bp, Homo sapien
cccagttgcacaagctgaagtaata

SEQ ID NO: 1923636 - DNA, 25 bp, Homo sapien
ctcaatgaaagggttcataggaatt

SEQ ID NO: 1923637 - DNA, 25 bp, Homo sapien
ttttctcaatgaaagggttcatagg

SEQ ID NO: 1923638 - DNA, 25 bp, Homo sapien
tagtttttctcaatgaaagggttca

SEQ ID NO: 1923639 - DNA, 25 bp, Homo sapien
caatgaaagggttcataggaattat

SEQ ID NO: 1923640 - DNA, 25 bp, Homo sapien
ttctgtgaatcatgacagcttattc

SEQ ID NO: 1923641 - DNA, 25 bp, Homo sapien
tctgtgaatcatgacagcttattct

SEQ ID NO: 1923642 - DNA, 25 bp, Homo sapien
tgtgaatcatgacagcttattctaa

SEQ ID NO: 1923643 - DNA, 25 bp, Homo sapien
tctaaaatttatatcaaagatgaaa

SEQ ID NO: 1923644 - DNA, 25 bp, Homo sapien
tgaatgtgaatcaccagctttcagg

SEQ ID NO: 1923645 - DNA, 25 bp, Homo sapien
atgaatgtgaatcaccagctttcag

SEQ ID NO: 1923646 - DNA, 25 bp, Homo sapien
aatgaatgtgaatcaccagctttca

SEQ ID NO: 1923647 - DNA, 25 bp, Homo sapien
aaaattgtgatcagaccagagccga

SEQ ID NO: 1923648 - DNA, 25 bp, Homo sapien
aatcttcaataaccacttgctgttg

SEQ ID NO: 1923649 - DNA, 25 bp, Homo sapien
taagccataaatgagacttctgttt

SEQ ID NO: 1923650 - DNA, 25 bp, Homo sapien
tattatgcaatactcctcaacaggg

SEQ ID NO: 1923651 - DNA, 25 bp, Homo sapien
atcagaaaagatcggatgctttcag

SEQ ID NO: 1923652 - DNA, 25 bp, Homo sapien
cagaaaagatcggatgctttcaggg

SEQ ID NO: 1923653 - DNA, 25 bp, Homo sapien
gctttcagggtgatttggccataga

SEQ ID NO: 1923654 - DNA, 25 bp, Homo sapien
ctttcagggtgatttggccatagac

SEQ ID NO: 1923655 - DNA, 25 bp, Homo sapien
tctcttccttagtgtccacgatgga

SEQ ID NO: 1923656 - DNA, 25 bp, Homo sapien
ccacgatggaattggttgagcaatg

SEQ ID NO: 1923657 - DNA, 25 bp, Homo sapien
tgtttcttccacaggctatgccaat

SEQ ID NO: 1923658 - DNA, 25 bp, Homo sapien
tattccataccagtaatgggtgggc

SEQ ID NO: 1923659 - DNA, 25 bp, Homo sapien
catcatccttagtgacaagatcatt

SEQ ID NO: 1923660 - DNA, 25 bp, Homo sapien
attccatctcacttgttcccccttt

SEQ ID NO: 1923661 - DNA, 25 bp, Homo sapien
acatcatccttagtgacaagatcat

SEQ ID NO: 1923662 - DNA, 25 bp, Homo sapien
cctaaatttcaagtggatgtaacct

SEQ ID NO: 1923663 - DNA, 25 bp, Homo sapien
tgcagaaacggaggatctaatccag

SEQ ID NO: 1923664 - DNA, 25 bp, Homo sapien
tctaatccaggaggtgttcttcttc

SEQ ID NO: 1923665 - DNA, 25 bp, Homo sapien
cctgcttcttgagggctgcccgttg

SEQ ID NO: 1923666 - DNA, 25 bp, Homo sapien
tattcttaaagaattacgctaatat

SEQ ID NO: 1923667 - DNA, 25 bp, Homo sapien
gaattacgctaatatgtaagaaaca

SEQ ID NO: 1923668 - DNA, 25 bp, Homo sapien
taaagaattacgctaatatgtaaga

SEQ ID NO: 1923669 - DNA, 25 bp, Homo sapien
ttacgctaatatgtaagaaacaatt

SEQ ID NO: 1923670 - DNA, 25 bp, Homo sapien
gcagttcgggctttcaagaaacagt

SEQ ID NO: 1923671 - DNA, 25 bp, Homo sapien
cagaaccagctcttttgatagggag

SEQ ID NO: 1923672 - DNA, 25 bp, Homo sapien
aaaccggtatgtatcatcctgagac

SEQ ID NO: 1923673 - DNA, 25 bp, Homo sapien
ttaaagaacagtccataatctcctg

SEQ ID NO: 1923674 - DNA, 25 bp, Homo sapien
gcaaaagcctgttatgcaaactcca

SEQ ID NO: 1923675 - DNA, 25 bp, Homo sapien
cacctgtgacatgaaacgggctcca

SEQ ID NO: 1923676 - DNA, 25 bp, Homo sapien
tataaggttcagtcagaactctcac

SEQ ID NO: 1923677 - DNA, 25 bp, Homo sapien
tttaccttgtcgaatgtcttgccaa

SEQ ID NO: 1923678 - DNA, 25 bp, Homo sapien
cataacgatggctccagaaaactaa

SEQ ID NO: 1923679 - DNA, 25 bp, Homo sapien
tctgtgttgcttcataacgatggct

SEQ ID NO: 1923680 - DNA, 25 bp, Homo sapien
cgatggctccagaaaactaatatgg

SEQ ID NO: 1923681 - DNA, 25 bp, Homo sapien
gtttatgccacccagtctgtgttgc

SEQ ID NO: 1923682 - DNA, 25 bp, Homo sapien
ctcggcttctgctgagggcttcggg

SEQ ID NO: 1923683 - DNA, 25 bp, Homo sapien
atggtgccaacatctgctcggcttc

SEQ ID NO: 1923684 - DNA, 25 bp, Homo sapien
ctgctcggcttctgctgagggcttc

SEQ ID NO: 1923685 - DNA, 25 bp, Homo sapien
cggcttctgctgagggcttcgggaa

SEQ ID NO: 1923686 - DNA, 25 bp, Homo sapien
ctgttttacaactccatacgggcaa

SEQ ID NO: 1923687 - DNA, 25 bp, Homo sapien
catacgggcaaaggttaacttgtag

SEQ ID NO: 1923688 - DNA, 25 bp, Homo sapien
tctagcagggatgcaaacaagttct

SEQ ID NO: 1923689 - DNA, 25 bp, Homo sapien
tttttgtctagcagggatgcaaaca

SEQ ID NO: 1923690 - DNA, 25 bp, Homo sapien
actctgactctagcagatagcaagg

SEQ ID NO: 1923691 - DNA, 25 bp, Homo sapien
taatatagaccataaagctgtactc

SEQ ID NO: 1923692 - DNA, 25 bp, Homo sapien
gatagcaagggcttcagttgaatcc

SEQ ID NO: 1923693 - DNA, 25 bp, Homo sapien
gctgtactctcaaacctcactagga

SEQ ID NO: 1923694 - DNA, 25 bp, Homo sapien
aaactatcagggctcgtggcagcta

SEQ ID NO: 1923695 - DNA, 25 bp, Homo sapien
tatacaggccctcttgagacaagaa

SEQ ID NO: 1923696 - DNA, 25 bp, Homo sapien
gttaagtagtgattgggagcccagt

SEQ ID NO: 1923697 - DNA, 25 bp, Homo sapien
ggacatgcagtcaaggcctgaaact

SEQ ID NO: 1923698 - DNA, 25 bp, Homo sapien
ctccatctttgcttccttcccattg

SEQ ID NO: 1923699 - DNA, 25 bp, Homo sapien
tccatctttgcttccttcccattgt

SEQ ID NO: 1923700 - DNA, 25 bp, Homo sapien
ctctccagatgggatgcctggcttt

SEQ ID NO: 1923701 - DNA, 25 bp, Homo sapien
ttctctctctccagatgggatgcct

SEQ ID NO: 1923702 - DNA, 25 bp, Homo sapien
aacttataatcatggctgaaggcac

SEQ ID NO: 1923703 - DNA, 25 bp, Homo sapien
ggccagctttccagcactctcgttt

SEQ ID NO: 1923704 - DNA, 25 bp, Homo sapien
agcactctcgttttgggcagcttcc

SEQ ID NO: 1923705 - DNA, 25 bp, Homo sapien
gggatctgaagtgcctcactgcggc

SEQ ID NO: 1923706 - DNA, 25 bp, Homo sapien
gcagatggtgcagttgtttcaacag

SEQ ID NO: 1923707 - DNA, 25 bp, Homo sapien
gcctttatcctcttggcccaaatag

SEQ ID NO: 1923708 - DNA, 25 bp, Homo sapien
taggtgtaggtaaatttaatctcac

SEQ ID NO: 1923709 - DNA, 25 bp, Homo sapien
gctccaattatttctctaggtgtag

SEQ ID NO: 1923710 - DNA, 25 bp, Homo sapien
cctctactggcctttatcctcttgg

SEQ ID NO: 1923711 - DNA, 25 bp, Homo sapien
ccctatcataaatgatggtaaatgt

SEQ ID NO: 1923712 - DNA, 25 bp, Homo sapien
caaaatatttggaaccatccttgag

SEQ ID NO: 1923713 - DNA, 25 bp, Homo sapien
tctccctaaaggcttccctatcata

SEQ ID NO: 1923714 - DNA, 25 bp, Homo sapien
tcagtctctcaagccaaaatatttg

SEQ ID NO: 1923715 - DNA, 25 bp, Homo sapien
aatacaccatgttgcagttggtgtt

SEQ ID NO: 1923716 - DNA, 25 bp, Homo sapien
aaatacaccatgttgcagttggtgt

SEQ ID NO: 1923717 - DNA, 25 bp, Homo sapien
tttctgctgttcagtaaggggtggc

SEQ ID NO: 1923718 - DNA, 25 bp, Homo sapien
tcagtaaggggtggctgtgacattt

SEQ ID NO: 1923719 - DNA, 25 bp, Homo sapien
caaagggtatagcatgggtgtgata

SEQ ID NO: 1923720 - DNA, 25 bp, Homo sapien
taatgaatcaaagggtatagcatgg

SEQ ID NO: 1923721 - DNA, 25 bp, Homo sapien
gcatgggtgtgatactctaattgct

SEQ ID NO: 1923722 - DNA, 25 bp, Homo sapien
acagaaaaacagagcaagctaatga

SEQ ID NO: 1923723 - DNA, 25 bp, Homo sapien
atcagtatatgccatggctctgctc

SEQ ID NO: 1923724 - DNA, 25 bp, Homo sapien
gataaacgagaacaccgggcatact

SEQ ID NO: 1923725 - DNA, 25 bp, Homo sapien
gagaacaccgggcatactcttgaac

SEQ ID NO: 1923726 - DNA, 25 bp, Homo sapien
gaggaggaggataaacgagaacacc

SEQ ID NO: 1923727 - DNA, 25 bp, Homo sapien
ccgggcatactcttgaactgcagct

SEQ ID NO: 1923728 - DNA, 25 bp, Homo sapien
tgaaaatacaggcacattaactctc

SEQ ID NO: 1923729 - DNA, 25 bp, Homo sapien
ctgaaaatacaggcacattaactct

SEQ ID NO: 1923730 - DNA, 25 bp, Homo sapien
gtttgcagtcttttccagagaggat

SEQ ID NO: 1923731 - DNA, 25 bp, Homo sapien
aaggggaaagaaactctgtttgcag

SEQ ID NO: 1923732 - DNA, 25 bp, Homo sapien
gggaaagaaactctgtttgcagtct

SEQ ID NO: 1923733 - DNA, 25 bp, Homo sapien
ttttccagagaggattgagtgcctc

SEQ ID NO: 1923734 - DNA, 25 bp, Homo sapien
gggatgttcagggtgcaggttctct

SEQ ID NO: 1923735 - DNA, 25 bp, Homo sapien
gtgtagatgccagtgcacatgtcat

SEQ ID NO: 1923736 - DNA, 25 bp, Homo sapien
cttcctaagcttaaagggcatggct

SEQ ID NO: 1923737 - DNA, 25 bp, Homo sapien
ggctcttagtaaaagtgacaaaatc

SEQ ID NO: 1923738 - DNA, 25 bp, Homo sapien
cactcaggatgatgcaatactgctc

SEQ ID NO: 1923739 - DNA, 25 bp, Homo sapien
actctcactcaggatgatgcaatac

SEQ ID NO: 1923740 - DNA, 25 bp, Homo sapien
cttcactctcactcaggatgatgca

SEQ ID NO: 1923741 - DNA, 25 bp, Homo sapien
ctcaggatgatgcaatactgctcca

SEQ ID NO: 1923742 - DNA, 25 bp, Homo sapien
ggcagtagccctataaaactcccac

SEQ ID NO: 1923743 - DNA, 25 bp, Homo sapien
gactcctgtgcctcttgactgggag

SEQ ID NO: 1923744 - DNA, 25 bp, Homo sapien
gtagcctcttctggtgacacccagg

SEQ ID NO: 1923745 - DNA, 25 bp, Homo sapien
ccttacagtgtatacaaagctgctg

SEQ ID NO: 1923746 - DNA, 25 bp, Homo sapien
caaaagcagtaggttaacatcagga

SEQ ID NO: 1923747 - DNA, 25 bp, Homo sapien
tttcaggtaggtagcaaacgttgcg

SEQ ID NO: 1923748 - DNA, 25 bp, Homo sapien
agttagccgcgaatgcactgctgta

SEQ ID NO: 1923749 - DNA, 25 bp, Homo sapien
tattcaaggctctatggtatcaagt

SEQ ID NO: 1923750 - DNA, 25 bp, Homo sapien
gactgttctcattaacagcattccc

SEQ ID NO: 1923751 - DNA, 25 bp, Homo sapien
gagacatcaagagcttctgagaatg

SEQ ID NO: 1923752 - DNA, 25 bp, Homo sapien
tcatttaagtgatcatatccacagg

SEQ ID NO: 1923753 - DNA, 25 bp, Homo sapien
taaaaaagcaatggcacgaatcacc

SEQ ID NO: 1923754 - DNA, 25 bp, Homo sapien
cctgggaatagtactttcaagaaca

SEQ ID NO: 1923755 - DNA, 25 bp, Homo sapien
tacagtagacagaaagtgctttggc

SEQ ID NO: 1923756 - DNA, 25 bp, Homo sapien
tatttacagtacagaggctcatctc

SEQ ID NO: 1923757 - DNA, 25 bp, Homo sapien
tgacaacacgtaaagccagctatga

SEQ ID NO: 1923758 - DNA, 25 bp, Homo sapien
ttttcttggtcgctgatacggttct

SEQ ID NO: 1923759 - DNA, 25 bp, Homo sapien
gtaataactggcagcttctgacagt

SEQ ID NO: 1923760 - DNA, 25 bp, Homo sapien
tcgctgatacggttctgtgaacata

SEQ ID NO: 1923761 - DNA, 25 bp, Homo sapien
taataactggcagcttctgacagtc

SEQ ID NO: 1923762 - DNA, 25 bp, Homo sapien
aatactaacattctgtcgtgacagg

SEQ ID NO: 1923763 - DNA, 25 bp, Homo sapien
tggcagcagcacaaatctatgactt

SEQ ID NO: 1923764 - DNA, 25 bp, Homo sapien
cctaactgggaaagggtagatgtga

SEQ ID NO: 1923765 - DNA, 25 bp, Homo sapien
tgtcttcacaacttgccatacctgg

SEQ ID NO: 1923766 - DNA, 25 bp, Homo sapien
cactcttgactcagcaagaattatg

SEQ ID NO: 1923767 - DNA, 25 bp, Homo sapien
agaagtccacatggttatctgcagc

SEQ ID NO: 1923768 - DNA, 25 bp, Homo sapien
tcttttatttacactcttgactcag

SEQ ID NO: 1923769 - DNA, 25 bp, Homo sapien
catggttatctgcagcttgttaagt

SEQ ID NO: 1923770 - DNA, 25 bp, Homo sapien
gtgtcatcatcaaggcagcgttccc

SEQ ID NO: 1923771 - DNA, 25 bp, Homo sapien
ctttataacccactcagcatttggg

SEQ ID NO: 1923772 - DNA, 25 bp, Homo sapien
gggttaagctgatataaatccttca

SEQ ID NO: 1923773 - DNA, 25 bp, Homo sapien
ggctttgactttataacccactcag

SEQ ID NO: 1923774 - DNA, 25 bp, Homo sapien
tacttcctttactatgtgacatgag

SEQ ID NO: 1923775 - DNA, 25 bp, Homo sapien
catagatgggcatttgtacaggcgc

SEQ ID NO: 1923776 - DNA, 25 bp, Homo sapien
aacttgcatcattaaccattccagg

SEQ ID NO: 1923777 - DNA, 25 bp, Homo sapien
attcttactgtatagggaacttgcc

SEQ ID NO: 1923778 - DNA, 25 bp, Homo sapien
aaaacttctcctttcttgagagtct

SEQ ID NO: 1923779 - DNA, 25 bp, Homo sapien
atatttcctccaatttcatacaaaa

SEQ ID NO: 1923780 - DNA, 25 bp, Homo sapien
tttcttgagagtctgggcaacccca

SEQ ID NO: 1923781 - DNA, 25 bp, Homo sapien
tcctttcttgagagtctgggcaacc

SEQ ID NO: 1923782 - DNA, 25 bp, Homo sapien
tctgggccctcacgctatgttccac

SEQ ID NO: 1923783 - DNA, 25 bp, Homo sapien
catggaatggctcatctggttctcc

SEQ ID NO: 1923784 - DNA, 25 bp, Homo sapien
tccctggcacactggacagtcaggg

SEQ ID NO: 1923785 - DNA, 25 bp, Homo sapien
gctgcactgcatctgatccactttg

SEQ ID NO: 1923786 - DNA, 25 bp, Homo sapien
ttcagttagctgtattgccatggaa

SEQ ID NO: 1923787 - DNA, 25 bp, Homo sapien
gaatcactccctgaggaacgtcagc

SEQ ID NO: 1923788 - DNA, 25 bp, Homo sapien
aacctggcaagtacatcactggctt

SEQ ID NO: 1923789 - DNA, 25 bp, Homo sapien
gccatggaaactttcgaaagatggg

SEQ ID NO: 1923790 - DNA, 25 bp, Homo sapien
tgcaaagcaataatgacactggaac

SEQ ID NO: 1923791 - DNA, 25 bp, Homo sapien
ataatgacactggaacaaagctggc

SEQ ID NO: 1923792 - DNA, 25 bp, Homo sapien
tgacactggaacaaagctggcagca

SEQ ID NO: 1923793 - DNA, 25 bp, Homo sapien
aatgacactggaacaaagctggcag

SEQ ID NO: 1923794 - DNA, 25 bp, Homo sapien
tggaacgtgtaactctacaatgcat

SEQ ID NO: 1923795 - DNA, 25 bp, Homo sapien
ctggaacgtgtaactctacaatgca

SEQ ID NO: 1923796 - DNA, 25 bp, Homo sapien
gactgcaaacaacagctagacctgc

SEQ ID NO: 1923797 - DNA, 25 bp, Homo sapien
catgactttgctgggctaaccttgg

SEQ ID NO: 1923798 - DNA, 25 bp, Homo sapien
ccagggccttacactcatgactttg

SEQ ID NO: 1923799 - DNA, 25 bp, Homo sapien
ggtatcacaaaggacctgaccatca

SEQ ID NO: 1923800 - DNA, 25 bp, Homo sapien
ttcagggtggtaaaaggacttgcac

SEQ ID NO: 1923801 - DNA, 25 bp, Homo sapien
tagagagtcccaagatactagcttc

SEQ ID NO: 1923802 - DNA, 25 bp, Homo sapien
gagcagaggatgaggttaagccacc

SEQ ID NO: 1923803 - DNA, 25 bp, Homo sapien
gctttctaaatgagctcaggtacca

SEQ ID NO: 1923804 - DNA, 25 bp, Homo sapien
cacagtaggcacatatcaagtaact

SEQ ID NO: 1923805 - DNA, 25 bp, Homo sapien
tcaagaaactacagcaaccagacag

SEQ ID NO: 1923806 - DNA, 25 bp, Homo sapien
tgatttggaggagagtcaagaaact

SEQ ID NO: 1923807 - DNA, 25 bp, Homo sapien
tcatgccctatagtttcatattgca

SEQ ID NO: 1923808 - DNA, 25 bp, Homo sapien
aattgctaccctgatggaaagcagg

SEQ ID NO: 1923809 - DNA, 25 bp, Homo sapien
agcaaagtagatggtccatgttcca

SEQ ID NO: 1923810 - DNA, 25 bp, Homo sapien
tgttccatgcaaaaggaacggctcc

SEQ ID NO: 1923811 - DNA, 25 bp, Homo sapien
ggaacggctcctactcaaatccagg

SEQ ID NO: 1923812 - DNA, 25 bp, Homo sapien
tgtaactgaacaacttcaatggtgg

SEQ ID NO: 1923813 - DNA, 25 bp, Homo sapien
catttcatgaacttacgctacagct

SEQ ID NO: 1923814 - DNA, 25 bp, Homo sapien
aagcaggccaaaaccgaaaattcag

SEQ ID NO: 1923815 - DNA, 25 bp, Homo sapien
tccacaagatgtcagcatgtaactg

SEQ ID NO: 1923816 - DNA, 25 bp, Homo sapien
tcagtaggcgactagagtctccgca

SEQ ID NO: 1923817 - DNA, 25 bp, Homo sapien
ggcgactagagtctccgcacgagag

SEQ ID NO: 1923818 - DNA, 25 bp, Homo sapien
ttatatattcagtaggcgactagag

SEQ ID NO: 1923819 - DNA, 25 bp, Homo sapien
tctccgcacgagaggtagaggtagg

SEQ ID NO: 1923820 - DNA, 25 bp, Homo sapien
tttcatatttttctcggtcataagc

SEQ ID NO: 1923821 - DNA, 25 bp, Homo sapien
ttttgcttcctcacttggtttacaa

SEQ ID NO: 1923822 - DNA, 25 bp, Homo sapien
tcatatttttctcggtcataagcca

SEQ ID NO: 1923823 - DNA, 25 bp, Homo sapien
ctcacttggtttacaataaacttgg

SEQ ID NO: 1923824 - DNA, 25 bp, Homo sapien
taatttgccacccactgtggaaggt

SEQ ID NO: 1923825 - DNA, 25 bp, Homo sapien
aggtgtacagggcatccacgtggta

SEQ ID NO: 1923826 - DNA, 25 bp, Homo sapien
aagttcaaggacatagtggccgttt

SEQ ID NO: 1923827 - DNA, 25 bp, Homo sapien
gccgttttctatgccagactggaga

SEQ ID NO: 1923828 - DNA, 25 bp, Homo sapien
tacaaattctcgctgttcactggac

SEQ ID NO: 1923829 - DNA, 25 bp, Homo sapien
gggccatgaccattgctacattcat

SEQ ID NO: 1923830 - DNA, 25 bp, Homo sapien
ggacttcaatcccaatgcatgacac

SEQ ID NO: 1923831 - DNA, 25 bp, Homo sapien
cacagaagtttttggtacttaatca

SEQ ID NO: 1923832 - DNA, 25 bp, Homo sapien
ccattaaccgacgaacctcaatcgt

SEQ ID NO: 1923833 - DNA, 25 bp, Homo sapien
tccattaaccgacgaacctcaatcg

SEQ ID NO: 1923834 - DNA, 25 bp, Homo sapien
ttccattaaccgacgaacctcaatc

SEQ ID NO: 1923835 - DNA, 25 bp, Homo sapien
taggaggatgacaagaaggttcaaa

SEQ ID NO: 1923836 - DNA, 25 bp, Homo sapien
tttgagatactccacactgagcagt

SEQ ID NO: 1923837 - DNA, 25 bp, Homo sapien
ggggcaactcccgaatgaagagctt

SEQ ID NO: 1923838 - DNA, 25 bp, Homo sapien
gctggcggcatcatgctgtttgaca

SEQ ID NO: 1923839 - DNA, 25 bp, Homo sapien
cagtggctggggcaactcccgaatg

SEQ ID NO: 1923840 - DNA, 25 bp, Homo sapien
acagtttcagggagctctaagtacc

SEQ ID NO: 1923841 - DNA, 25 bp, Homo sapien
gagctctaagtaccagacaccaaac

SEQ ID NO: 1923842 - DNA, 25 bp, Homo sapien
caccacagtttcagggagctctaag

SEQ ID NO: 1923843 - DNA, 25 bp, Homo sapien
aaacaccacagtttcagggagctct

SEQ ID NO: 1923844 - DNA, 25 bp, Homo sapien
tgccacatgggactcctgggttcag

SEQ ID NO: 1923845 - DNA, 25 bp, Homo sapien
gaactccaggtgaccaccacaatgc

SEQ ID NO: 1923846 - DNA, 25 bp, Homo sapien
atgacagctcactgccacatgggac

SEQ ID NO: 1923847 - DNA, 25 bp, Homo sapien
tggaactccaggtgaccaccacaat

SEQ ID NO: 1923848 - DNA, 25 bp, Homo sapien
tagagaggacaagttagcttttaaa

SEQ ID NO: 1923849 - DNA, 25 bp, Homo sapien
tacattagtagaacccagagattac

SEQ ID NO: 1923850 - DNA, 25 bp, Homo sapien
atgtttacattagtagaacccagag

SEQ ID NO: 1923851 - DNA, 25 bp, Homo sapien
gtagagaggacaagttagcttttaa

SEQ ID NO: 1923852 - DNA, 25 bp, Homo sapien
tctgtttccaaacctctctcttcaa

SEQ ID NO: 1923853 - DNA, 25 bp, Homo sapien
cagctccagggatccgtaagaggcc

SEQ ID NO: 1923854 - DNA, 25 bp, Homo sapien
ctctctcttcaattcgagaaatcag

SEQ ID NO: 1923855 - DNA, 25 bp, Homo sapien
ggatccgtaagaggccttctgtttc

SEQ ID NO: 1923856 - DNA, 25 bp, Homo sapien
tatttgtaacaggtacaattccgaa

SEQ ID NO: 1923857 - DNA, 25 bp, Homo sapien
tgtaacaggtacaattccgaattta

SEQ ID NO: 1923858 - DNA, 25 bp, Homo sapien
tccgtatttgtaacaggtacaattc

SEQ ID NO: 1923859 - DNA, 25 bp, Homo sapien
acaggtacaattccgaatttaacat

SEQ ID NO: 1923860 - DNA, 25 bp, Homo sapien
ctgtttcacatataaataaaactga

SEQ ID NO: 1923861 - DNA, 25 bp, Homo sapien
ttcacatataaataaaactgattac

SEQ ID NO: 1923862 - DNA, 25 bp, Homo sapien
tataaataaaactgattacaatgac

SEQ ID NO: 1923863 - DNA, 25 bp, Homo sapien
cacatataaataaaactgattacaa

SEQ ID NO: 1923864 - DNA, 25 bp, Homo sapien
taggctttggtgtatagtaaattgc

SEQ ID NO: 1923865 - DNA, 25 bp, Homo sapien
acatatttcagacttgtgagcccca

SEQ ID NO: 1923866 - DNA, 25 bp, Homo sapien
gctgagatccctgctttgtataggc

SEQ ID NO: 1923867 - DNA, 25 bp, Homo sapien
gtaaattgcaactgctactgacaga

SEQ ID NO: 1923868 - DNA, 25 bp, Homo sapien
tttgaaagatcaagggtattcgcat

SEQ ID NO: 1923869 - DNA, 25 bp, Homo sapien
cgctgtcaatggaacgcaaaaaaga

SEQ ID NO: 1923870 - DNA, 25 bp, Homo sapien
ctctgatcttgttctaatagcgctg

SEQ ID NO: 1923871 - DNA, 25 bp, Homo sapien
ggtattcgcattcctggtactttcc

SEQ ID NO: 1923872 - DNA, 25 bp, Homo sapien
gagtggacggttagcaccaaagtga

SEQ ID NO: 1923873 - DNA, 25 bp, Homo sapien
ccatcactgagtggacggttagcac

SEQ ID NO: 1923874 - DNA, 25 bp, Homo sapien
gacggttagcaccaaagtgataact

SEQ ID NO: 1923875 - DNA, 25 bp, Homo sapien
ttatgacgtacatcagcatggaaat

SEQ ID NO: 1923876 - DNA, 25 bp, Homo sapien
caattagggctaaatggcaaacttt

SEQ ID NO: 1923877 - DNA, 25 bp, Homo sapien
catcatagagggcagtcagctcaat

SEQ ID NO: 1923878 - DNA, 25 bp, Homo sapien
tgttgtttcagctcaatacccaata

SEQ ID NO: 1923879 - DNA, 25 bp, Homo sapien
ggtgcgaggtcaccaatccttgtgg

SEQ ID NO: 1923880 - DNA, 25 bp, Homo sapien
gagagccttcaagtccactgtaaga

SEQ ID NO: 1923881 - DNA, 25 bp, Homo sapien
ggagtcagtctcctacagcaactcg

SEQ ID NO: 1923882 - DNA, 25 bp, Homo sapien
gagtcagactacaggtggcaaatgc

SEQ ID NO: 1923883 - DNA, 25 bp, Homo sapien
cacagggctcaagagagtggagtca

SEQ ID NO: 1923884 - DNA, 25 bp, Homo sapien
gcaggcgtctcctcaggtgggatca

SEQ ID NO: 1923885 - DNA, 25 bp, Homo sapien
aatgatacctccaggttgatgtctg

SEQ ID NO: 1923886 - DNA, 25 bp, Homo sapien
tctgattgagtgcttgctcggcaaa

SEQ ID NO: 1923887 - DNA, 25 bp, Homo sapien
taatgtggcatcatcgcctttgctc

SEQ ID NO: 1923888 - DNA, 25 bp, Homo sapien
ttgttctaagtgactgcgattcagt

SEQ ID NO: 1923889 - DNA, 25 bp, Homo sapien
gtgactgcgattcagtgccacctgg

SEQ ID NO: 1923890 - DNA, 25 bp, Homo sapien
taagtgactgcgattcagtgccacc

SEQ ID NO: 1923891 - DNA, 25 bp, Homo sapien
ttcatttgttctaagtgactgcgat

SEQ ID NO: 1923892 - DNA, 25 bp, Homo sapien
tgtggccagagagtacttcctcctt

SEQ ID NO: 1923893 - DNA, 25 bp, Homo sapien
gccttccaaaggtttatggagatgg

SEQ ID NO: 1923894 - DNA, 25 bp, Homo sapien
ctctgctcagcagtaaatgtggcca

SEQ ID NO: 1923895 - DNA, 25 bp, Homo sapien
ggagatggtaaaccatggccgactc

SEQ ID NO: 1923896 - DNA, 25 bp, Homo sapien
aactggcttatttgagtagcactga

SEQ ID NO: 1923897 - DNA, 25 bp, Homo sapien
taagctcctgatgcccttacaggta

SEQ ID NO: 1923898 - DNA, 25 bp, Homo sapien
tacaggtaagtaataggcaatccac

SEQ ID NO: 1923899 - DNA, 25 bp, Homo sapien
actgatctgagccacacagttcttg

SEQ ID NO: 1923900 - DNA, 25 bp, Homo sapien
cctgggtccgcgtcaatgttgataa

SEQ ID NO: 1923901 - DNA, 25 bp, Homo sapien
gagattggataaaccggcctcttta

SEQ ID NO: 1923902 - DNA, 25 bp, Homo sapien
ccagcagactctccgaagagattgg

SEQ ID NO: 1923903 - DNA, 25 bp, Homo sapien
ggagaccgtctctactcgcttctga

SEQ ID NO: 1923904 - DNA, 25 bp, Homo sapien
tatctggcagttgcatccataaatc

SEQ ID NO: 1923905 - DNA, 25 bp, Homo sapien
ccacttgtatctggcagttgcatcc

SEQ ID NO: 1923906 - DNA, 25 bp, Homo sapien
taaatctgcctcaaacaagtatttt

SEQ ID NO: 1923907 - DNA, 25 bp, Homo sapien
tatgccacttgtatctggcagttgc

SEQ ID NO: 1923908 - DNA, 25 bp, Homo sapien
tgatcgatcaaatggaggcttctcc

SEQ ID NO: 1923909 - DNA, 25 bp, Homo sapien
catcaggctctttgacaacaaccac

SEQ ID NO: 1923910 - DNA, 25 bp, Homo sapien
ccaaagaatcctgggaaattgatcg

SEQ ID NO: 1923911 - DNA, 25 bp, Homo sapien
cataactttgatggtggtgctttcc

SEQ ID NO: 1923912 - DNA, 25 bp, Homo sapien
tctgccttaccaggatagctaatgt

SEQ ID NO: 1923913 - DNA, 25 bp, Homo sapien
ttctgccttaccaggatagctaatg

SEQ ID NO: 1923914 - DNA, 25 bp, Homo sapien
ccttaccaggatagctaatgttaat

SEQ ID NO: 1923915 - DNA, 25 bp, Homo sapien
tgccttaccaggatagctaatgtta

SEQ ID NO: 1923916 - DNA, 25 bp, Homo sapien
tcaaacatttagtgtgaggtagatg

SEQ ID NO: 1923917 - DNA, 25 bp, Homo sapien
agacaccagcaccagtgatgggtgg

SEQ ID NO: 1923918 - DNA, 25 bp, Homo sapien
cactgaactagtggcccagacaact

SEQ ID NO: 1923919 - DNA, 25 bp, Homo sapien
ctggttgggtgccttatcacagatg

SEQ ID NO: 1923920 - DNA, 25 bp, Homo sapien
ctggatcctcctctctgcccagttc

SEQ ID NO: 1923921 - DNA, 25 bp, Homo sapien
acttaatacatgttgggccagactg

SEQ ID NO: 1923922 - DNA, 25 bp, Homo sapien
tgtgctgcattaggctgcaacacag

SEQ ID NO: 1923923 - DNA, 25 bp, Homo sapien
tatgcatgacagaaaagagaccgac

SEQ ID NO: 1923924 - DNA, 25 bp, Homo sapien
gggcaaccatctgcatcgcaaaata

SEQ ID NO: 1923925 - DNA, 25 bp, Homo sapien
tgttcagaacccaacagctgtttag

SEQ ID NO: 1923926 - DNA, 25 bp, Homo sapien
cagcgaacaattttcctggagtttt

SEQ ID NO: 1923927 - DNA, 25 bp, Homo sapien
gtttagagctggtttcaagtccacc

SEQ ID NO: 1923928 - DNA, 25 bp, Homo sapien
gagctggtttcaagtccaccaagca

SEQ ID NO: 1923929 - DNA, 25 bp, Homo sapien
ggcaatgccagatctaaaacgtaaa

SEQ ID NO: 1923930 - DNA, 25 bp, Homo sapien
ccgggacagtaacaccgctgaattt

SEQ ID NO: 1923931 - DNA, 25 bp, Homo sapien
aaacgtaaattcagggagactgtca

SEQ ID NO: 1923932 - DNA, 25 bp, Homo sapien
gaatttttgtatcactaagcctaga

SEQ ID NO: 1923933 - DNA, 25 bp, Homo sapien
tgcacacaagttataccagctcagc

SEQ ID NO: 1923934 - DNA, 25 bp, Homo sapien
gagccgctggcatctgtacttatgg

SEQ ID NO: 1923935 - DNA, 25 bp, Homo sapien
tgccccattgaaccccagaggtctg

SEQ ID NO: 1923936 - DNA, 25 bp, Homo sapien
tacaacacactcaacggatgcctgg

SEQ ID NO: 1923937 - DNA, 25 bp, Homo sapien
aaatctgggcaaggccgaagcctgg

SEQ ID NO: 1923938 - DNA, 25 bp, Homo sapien
tggagccagatcgtttccagaactg

SEQ ID NO: 1923939 - DNA, 25 bp, Homo sapien
caggagcctttaggatcagaggtaa

SEQ ID NO: 1923940 - DNA, 25 bp, Homo sapien
aagcctggtctggtggtaccctgga

SEQ ID NO: 1923941 - DNA, 25 bp, Homo sapien
tgtgagacagtccaaagacaacaca

SEQ ID NO: 1923942 - DNA, 25 bp, Homo sapien
gcagaagtttcaggcagctacacaa

SEQ ID NO: 1923943 - DNA, 25 bp, Homo sapien
tgatgtagggtaagcactgtgagac

SEQ ID NO: 1923944 - DNA, 25 bp, Homo sapien
caggttaggcaatccattatccctt

SEQ ID NO: 1923945 - DNA, 25 bp, Homo sapien
gatgcatgcgatagctaagaaacac

SEQ ID NO: 1923946 - DNA, 25 bp, Homo sapien
cactgacagcgcgagatgattgaag

SEQ ID NO: 1923947 - DNA, 25 bp, Homo sapien
ttaagatagcatgcctaggaatgtg

SEQ ID NO: 1923948 - DNA, 25 bp, Homo sapien
ctcagatgtcaggagtggcaaggca

SEQ ID NO: 1923949 - DNA, 25 bp, Homo sapien
ttaggtgtcatggagcctgcggcac

SEQ ID NO: 1923950 - DNA, 25 bp, Homo sapien
cagcattaatatatccgtagaagtc

SEQ ID NO: 1923951 - DNA, 25 bp, Homo sapien
taatatatccgtagaagtccatggg

SEQ ID NO: 1923952 - DNA, 25 bp, Homo sapien
cagaacgcatccaccaacattaggt

SEQ ID NO: 1923953 - DNA, 25 bp, Homo sapien
tagttaatacttgagttcccagaag

SEQ ID NO: 1923954 - DNA, 25 bp, Homo sapien
gaaacgaagaagtctttttgcaaca

SEQ ID NO: 1923955 - DNA, 25 bp, Homo sapien
cccctctgatctacacacaaaaatg

SEQ ID NO: 1923956 - DNA, 25 bp, Homo sapien
tactcaagccctcctctaggaaacg

SEQ ID NO: 1923957 - DNA, 25 bp, Homo sapien
taacaccgagctctcccgtgatgca

SEQ ID NO: 1923958 - DNA, 25 bp, Homo sapien
ccgttcatttgcatggtaagtacca

SEQ ID NO: 1923959 - DNA, 25 bp, Homo sapien
tgtaaaatatgaactcccacgctcc

SEQ ID NO: 1923960 - DNA, 25 bp, Homo sapien
cgtgatgcagcacagcttctcggaa

SEQ ID NO: 1923961 - DNA, 25 bp, Homo sapien
taacctcaggttattcacacaactc

SEQ ID NO: 1923962 - DNA, 25 bp, Homo sapien
ctaacctcaggttattcacacaact

SEQ ID NO: 1923963 - DNA, 25 bp, Homo sapien
tgtaagttaccagtttccaacattc

SEQ ID NO: 1923964 - DNA, 25 bp, Homo sapien
tctagttcacgggtctcagagaagt

SEQ ID NO: 1923965 - DNA, 25 bp, Homo sapien
gacttgcaactctagttcacgggtc

SEQ ID NO: 1923966 - DNA, 25 bp, Homo sapien
ctttaggacttgcaactctagttca

SEQ ID NO: 1923967 - DNA, 25 bp, Homo sapien
ccagttcagtagacccagtgatcca

SEQ ID NO: 1923968 - DNA, 25 bp, Homo sapien
tgggcagttcacaagcagacatgga

SEQ ID NO: 1923969 - DNA, 25 bp, Homo sapien
aacacgtcttatcagctgggtgccg

SEQ ID NO: 1923970 - DNA, 25 bp, Homo sapien
tgttttgtaactcacccacggtcag

SEQ ID NO: 1923971 - DNA, 25 bp, Homo sapien
tcactcagaaaaggcacgcatttgc

SEQ ID NO: 1923972 - DNA, 25 bp, Homo sapien
tgttctgcccatgtaaacgtgtgtg

SEQ ID NO: 1923973 - DNA, 25 bp, Homo sapien
gcagtgcctaaagtgtaaccgttca

SEQ ID NO: 1923974 - DNA, 25 bp, Homo sapien
tgccctttcagcataattgcaggaa

SEQ ID NO: 1923975 - DNA, 25 bp, Homo sapien
ctgttcttgcaagccacctccattg

SEQ ID NO: 1923976 - DNA, 25 bp, Homo sapien
acctccattgccaggagtgcctcag

SEQ ID NO: 1923977 - DNA, 25 bp, Homo sapien
tgcctcaggcagtatcctctcaggg

SEQ ID NO: 1923978 - DNA, 25 bp, Homo sapien
tgtccatgcatctgacatccccgtt

SEQ ID NO: 1923979 - DNA, 25 bp, Homo sapien
tccttccataattgttctcctcttc

SEQ ID NO: 1923980 - DNA, 25 bp, Homo sapien
ctttccttccataattgttctcctc

SEQ ID NO: 1923981 - DNA, 25 bp, Homo sapien
tttccttccataattgttctcctct

SEQ ID NO: 1923982 - DNA, 25 bp, Homo sapien
ccttccataattgttctcctcttcc

SEQ ID NO: 1923983 - DNA, 25 bp, Homo sapien
tgaatgacaacctctgggcctactg

SEQ ID NO: 1923984 - DNA, 25 bp, Homo sapien
tctttctttgaatgacaacctctgg

SEQ ID NO: 1923985 - DNA, 25 bp, Homo sapien
aatgacaacctctgggcctactggc

SEQ ID NO: 1923986 - DNA, 25 bp, Homo sapien
ctttgaatgacaacctctgggccta

SEQ ID NO: 1923987 - DNA, 25 bp, Homo sapien
ggctgtccagggagttaagctcgcc

SEQ ID NO: 1923988 - DNA, 25 bp, Homo sapien
cagcaacagtttgagtggacacaga

SEQ ID NO: 1923989 - DNA, 25 bp, Homo sapien
cagaactctacagggaaaaggcagc

SEQ ID NO: 1923990 - DNA, 25 bp, Homo sapien
tgcctgggtacggagaaatgatatc

SEQ ID NO: 1923991 - DNA, 25 bp, Homo sapien
cttggttcctgtggcccccactaca

SEQ ID NO: 1923992 - DNA, 25 bp, Homo sapien
ttcctgtggcccccactacagccat

SEQ ID NO: 1923993 - DNA, 25 bp, Homo sapien
gttcctgtggcccccactacagcca

SEQ ID NO: 1923994 - DNA, 25 bp, Homo sapien
tggttcctgtggcccccactacagc

SEQ ID NO: 1923995 - DNA, 25 bp, Homo sapien
acgcccggcctaaggcctggctaat

SEQ ID NO: 1923996 - DNA, 25 bp, Homo sapien
cattcttaggtggtcaccgaggacc

SEQ ID NO: 1923997 - DNA, 25 bp, Homo sapien
cttgcaccttggagcagcttcccag

SEQ ID NO: 1923998 - DNA, 25 bp, Homo sapien
ctttcaggctaaacagggtatctcc

SEQ ID NO: 1923999 - DNA, 25 bp, Homo sapien
taggcatcaaccatcaaccttgcac

SEQ ID NO: 1924000 - DNA, 25 bp, Homo sapien
acacagggcacttgccgtgtgggca

SEQ ID NO: 1924001 - DNA, 25 bp, Homo sapien
ggaacgatccctagaactaattcag

SEQ ID NO: 1924002 - DNA, 25 bp, Homo sapien
tctggtatgggcaggctacgtgaca

SEQ ID NO: 1924003 - DNA, 25 bp, Homo sapien
catcttctccggtcaatatcaggaa

SEQ ID NO: 1924004 - DNA, 25 bp, Homo sapien
ggtggtaggctgttagtaccactcc

SEQ ID NO: 1924005 - DNA, 25 bp, Homo sapien
tttgcatggctgttcccgacggtct

SEQ ID NO: 1924006 - DNA, 25 bp, Homo sapien
gtaggctgttagtaccactccctgg

SEQ ID NO: 1924007 - DNA, 25 bp, Homo sapien
ccgacggtctggtccttgccgctgg

SEQ ID NO: 1924008 - DNA, 25 bp, Homo sapien
gaagttcctgtctcgcctggcaact

SEQ ID NO: 1924009 - DNA, 25 bp, Homo sapien
gaaagaagttcctgtctcgcctggc

SEQ ID NO: 1924010 - DNA, 25 bp, Homo sapien
aagaagttcctgtctcgcctggcaa

SEQ ID NO: 1924011 - DNA, 25 bp, Homo sapien
gggaaagaagttcctgtctcgcctg

SEQ ID NO: 1924012 - DNA, 25 bp, Homo sapien
tcaaaaaatgctaggccaggtgaat

SEQ ID NO: 1924013 - DNA, 25 bp, Homo sapien
tccaaaaaggatgtagtgtatgaca

SEQ ID NO: 1924014 - DNA, 25 bp, Homo sapien
tatatgacctcaaaccaattttctg

SEQ ID NO: 1924015 - DNA, 25 bp, Homo sapien
tagaggcccatccttgtttacagga

SEQ ID NO: 1924016 - DNA, 25 bp, Homo sapien
actctgggattgtcccttggctgac

SEQ ID NO: 1924017 - DNA, 25 bp, Homo sapien
gactctgggattgtcccttggctga

SEQ ID NO: 1924018 - DNA, 25 bp, Homo sapien
tggcttggtttttgggctcctggaa

SEQ ID NO: 1924019 - DNA, 25 bp, Homo sapien
tggcaatgactcagtttacatcctt

SEQ ID NO: 1924020 - DNA, 25 bp, Homo sapien
tctgtcttctaggagtacacctgaa

SEQ ID NO: 1924021 - DNA, 25 bp, Homo sapien
gtttctgttttgcaccaatcaatga

SEQ ID NO: 1924022 - DNA, 25 bp, Homo sapien
gctatgccctggatcacttggcaat

SEQ ID NO: 1924023 - DNA, 25 bp, Homo sapien
gcaaatatgccgaagtgccaaagta

SEQ ID NO: 1924024 - DNA, 25 bp, Homo sapien
gtaaaagccactgatctgcccaagg

SEQ ID NO: 1924025 - DNA, 25 bp, Homo sapien
gacacgagtaaatgcctcgagagct

SEQ ID NO: 1924026 - DNA, 25 bp, Homo sapien
tgccgaagtgccaaagtaaaagcca

SEQ ID NO: 1924027 - DNA, 25 bp, Homo sapien
aaaggaaggctttcgtgctagaggt

SEQ ID NO: 1924028 - DNA, 25 bp, Homo sapien
tcttgttggccaggcaaatataaag

SEQ ID NO: 1924029 - DNA, 25 bp, Homo sapien
aatataaaggaaggctttcgtgcta

SEQ ID NO: 1924030 - DNA, 25 bp, Homo sapien
aaggctttcgtgctagaggtgctca

SEQ ID NO: 1924031 - DNA, 25 bp, Homo sapien
ctccttttgtctttgagagccttta

SEQ ID NO: 1924032 - DNA, 25 bp, Homo sapien
cttttgtctttgagagcctttacca

SEQ ID NO: 1924033 - DNA, 25 bp, Homo sapien
tccttttgtctttgagagcctttac

SEQ ID NO: 1924034 - DNA, 25 bp, Homo sapien
tttctgaatgaaaacctgggtgtca

SEQ ID NO: 1924035 - DNA, 25 bp, Homo sapien
catactttgggagtttgtgagcaca

SEQ ID NO: 1924036 - DNA, 25 bp, Homo sapien
tcggtactgtgagatggacaagccc

SEQ ID NO: 1924037 - DNA, 25 bp, Homo sapien
tctaaactgcacatgaaggtaccag

SEQ ID NO: 1924038 - DNA, 25 bp, Homo sapien
aacttatccaatctggaaggacaga

SEQ ID NO: 1924039 - DNA, 25 bp, Homo sapien
tcttctatgagcacaaaacttatcc

SEQ ID NO: 1924040 - DNA, 25 bp, Homo sapien
tgagcacaaaacttatccaatctgg

SEQ ID NO: 1924041 - DNA, 25 bp, Homo sapien
cactcttctatgagcacaaaactta

SEQ ID NO: 1924042 - DNA, 25 bp, Homo sapien
ttgtccccttctagctttgttagaa

SEQ ID NO: 1924043 - DNA, 25 bp, Homo sapien
cctttcttactaggggatgtgtcct

SEQ ID NO: 1924044 - DNA, 25 bp, Homo sapien
ggatgtgtcctcaggtttgtcccct

SEQ ID NO: 1924045 - DNA, 25 bp, Homo sapien
tttgttagaatttcctgactggttc

SEQ ID NO: 1924046 - DNA, 25 bp, Homo sapien
atacccgtgcgagcgctgagccggc

SEQ ID NO: 1924047 - DNA, 25 bp, Homo sapien
gccgctgcagctgaccgtgcgaaag

SEQ ID NO: 1924048 - DNA, 25 bp, Homo sapien
cgaaagccgcatgttattgggtaga

SEQ ID NO: 1924049 - DNA, 25 bp, Homo sapien
catttcggcttattcatccagcagc

SEQ ID NO: 1924050 - DNA, 25 bp, Homo sapien
tcatccagctgacttaatggacccc

SEQ ID NO: 1924051 - DNA, 25 bp, Homo sapien
tcttttgaattccttgacgtcacac

SEQ ID NO: 1924052 - DNA, 25 bp, Homo sapien
gcatttctgtctaaccagtcaccct

SEQ ID NO: 1924053 - DNA, 25 bp, Homo sapien
tggcccctacaatgccaaacctggg

SEQ ID NO: 1924054 - DNA, 25 bp, Homo sapien
taaagaatttgtctcctggtcagac

SEQ ID NO: 1924055 - DNA, 25 bp, Homo sapien
cagtatacttctctgggtttcctga

SEQ ID NO: 1924056 - DNA, 25 bp, Homo sapien
gaagtgaatcttacggctatctgac

SEQ ID NO: 1924057 - DNA, 25 bp, Homo sapien
ctggaactcccaacactggcagtat

SEQ ID NO: 1924058 - DNA, 25 bp, Homo sapien
tgtgggtttccagaggaacgtcgct

SEQ ID NO: 1924059 - DNA, 25 bp, Homo sapien
gggtgttctacaatgccaatgatgt

SEQ ID NO: 1924060 - DNA, 25 bp, Homo sapien
cacgatccttattaccagtcttggg

SEQ ID NO: 1924061 - DNA, 25 bp, Homo sapien
gaccgagttgtcagtgtgagtttcc

SEQ ID NO: 1924062 - DNA, 25 bp, Homo sapien
gcagaacgggaagaggcccccttca

SEQ ID NO: 1924063 - DNA, 25 bp, Homo sapien
gcccccttcattgttcactagagtc

SEQ ID NO: 1924064 - DNA, 25 bp, Homo sapien
cagaacgggaagaggcccccttcat

SEQ ID NO: 1924065 - DNA, 25 bp, Homo sapien
cctgtatgtctatgtatgcgtaagc

SEQ ID NO: 1924066 - DNA, 25 bp, Homo sapien
ccaggaggttatagacctgtatgtc

SEQ ID NO: 1924067 - DNA, 25 bp, Homo sapien
tggcaggcaactccaggaggttata

SEQ ID NO: 1924068 - DNA, 25 bp, Homo sapien
agccacaggacctaacagttaccag

SEQ ID NO: 1924069 - DNA, 25 bp, Homo sapien
gaagacttgtcagacaggaatattg

SEQ ID NO: 1924070 - DNA, 25 bp, Homo sapien
tccgcaggagctgacagaactgtgg

SEQ ID NO: 1924071 - DNA, 25 bp, Homo sapien
cccacagtattctccgcaggagctg

SEQ ID NO: 1924072 - DNA, 25 bp, Homo sapien
gacaggaatattgtcttccccacag

SEQ ID NO: 1924073 - DNA, 25 bp, Homo sapien
cccaggccattcgtatcatgaattt

SEQ ID NO: 1924074 - DNA, 25 bp, Homo sapien
ggccattcgtatcatgaatttgatg

SEQ ID NO: 1924075 - DNA, 25 bp, Homo sapien
caccccaggccattcgtatcatgaa

SEQ ID NO: 1924076 - DNA, 25 bp, Homo sapien
tgcaccccaggccattcgtatcatg

SEQ ID NO: 1924077 - DNA, 25 bp, Homo sapien
tgtggctccttgaaaattgaaagcc

SEQ ID NO: 1924078 - DNA, 25 bp, Homo sapien
gaattgccaggtaacactcagggct

SEQ ID NO: 1924079 - DNA, 25 bp, Homo sapien
attgaaagccctttattcacgttag

SEQ ID NO: 1924080 - DNA, 25 bp, Homo sapien
tcacgttaggtccttggggaattgc

SEQ ID NO: 1924081 - DNA, 25 bp, Homo sapien
agattagatctagcgttgaccacgg

SEQ ID NO: 1924082 - DNA, 25 bp, Homo sapien
gaaggaagcacgttgattaccgccg

SEQ ID NO: 1924083 - DNA, 25 bp, Homo sapien
tccaccgcaatcacaaacagtaagt

SEQ ID NO: 1924084 - DNA, 25 bp, Homo sapien
taccccatgctatggaatggactct

SEQ ID NO: 1924085 - DNA, 25 bp, Homo sapien
gaaaagcactgtgttagaagaccac

SEQ ID NO: 1924086 - DNA, 25 bp, Homo sapien
tggcttcagggattcacagtagttt

SEQ ID NO: 1924087 - DNA, 25 bp, Homo sapien
aatatgatcccaatcgcttagaccc

SEQ ID NO: 1924088 - DNA, 25 bp, Homo sapien
gcttctaaagcatgcctctggtcaa

SEQ ID NO: 1924089 - DNA, 25 bp, Homo sapien
taaagtctggcctccacatatcatt

SEQ ID NO: 1924090 - DNA, 25 bp, Homo sapien
tgaacaaatagtatgctaaagtctg

SEQ ID NO: 1924091 - DNA, 25 bp, Homo sapien
taaaaattatccagatctggataga

SEQ ID NO: 1924092 - DNA, 25 bp, Homo sapien
catatcattgaaattaagccggatc

SEQ ID NO: 1924093 - DNA, 25 bp, Homo sapien
aacattatttctgtgcattagagaa

SEQ ID NO: 1924094 - DNA, 25 bp, Homo sapien
taaaatatatttccacagttattct

SEQ ID NO: 1924095 - DNA, 25 bp, Homo sapien
ttaacattatttctgtgcattagag

SEQ ID NO: 1924096 - DNA, 25 bp, Homo sapien
tttccacagttattctatttaacat

SEQ ID NO: 1924097 - DNA, 25 bp, Homo sapien
cagcccaccaatgtgatgtcaaggg

SEQ ID NO: 1924098 - DNA, 25 bp, Homo sapien
ctaaacaagcaattttgatatacct

SEQ ID NO: 1924099 - DNA, 25 bp, Homo sapien
gcaattttgatatacctaaagcagc

SEQ ID NO: 1924100 - DNA, 25 bp, Homo sapien
acaagcaattttgatatacctaaag

SEQ ID NO: 1924101 - DNA, 25 bp, Homo sapien
ggcaacatgaagaatagtgactgaa

SEQ ID NO: 1924102 - DNA, 25 bp, Homo sapien
gaaatagcataatcccaaacccatt

SEQ ID NO: 1924103 - DNA, 25 bp, Homo sapien
cacaaacaaagtaggtgacctctgt

SEQ ID NO: 1924104 - DNA, 25 bp, Homo sapien
cccattcttccacaactggaacaaa

SEQ ID NO: 1924105 - DNA, 25 bp, Homo sapien
tatgttgagccatgagggatttgtt

SEQ ID NO: 1924106 - DNA, 25 bp, Homo sapien
ttatagtttatgttgagccatgagg

SEQ ID NO: 1924107 - DNA, 25 bp, Homo sapien
tttatgttgagccatgagggatttg

SEQ ID NO: 1924108 - DNA, 25 bp, Homo sapien
tagtttatgttgagccatgagggat

SEQ ID NO: 1924109 - DNA, 25 bp, Homo sapien
tcaaacatcacgcagcccatgctca

SEQ ID NO: 1924110 - DNA, 25 bp, Homo sapien
ccatgctcagggacacatagtacac

SEQ ID NO: 1924111 - DNA, 25 bp, Homo sapien
gcccatgctcagggacacatagtac

SEQ ID NO: 1924112 - DNA, 25 bp, Homo sapien
atcacgcagcccatgctcagggaca

SEQ ID NO: 1924113 - DNA, 25 bp, Homo sapien
ttcagaaaacggtctgctacaactg

SEQ ID NO: 1924114 - DNA, 25 bp, Homo sapien
tgtgcacatttatgatgtaatgaat

SEQ ID NO: 1924115 - DNA, 25 bp, Homo sapien
gctacaactgatctttacatctttg

SEQ ID NO: 1924116 - DNA, 25 bp, Homo sapien
gtgaaataaatgtgcaccagtctgc

SEQ ID NO: 1924117 - DNA, 25 bp, Homo sapien
gagtccaggccacactgaacagtac

SEQ ID NO: 1924118 - DNA, 25 bp, Homo sapien
gaacagtaccccagataaaagcaat

SEQ ID NO: 1924119 - DNA, 25 bp, Homo sapien
cagttatgattggtcagagtccagg

SEQ ID NO: 1924120 - DNA, 25 bp, Homo sapien
gcaatctttgctgcacagtgagaga

SEQ ID NO: 1924121 - DNA, 25 bp, Homo sapien
tcttcccagttcttgtgctattttc

SEQ ID NO: 1924122 - DNA, 25 bp, Homo sapien
aattaattaaatggcctttggccat

SEQ ID NO: 1924123 - DNA, 25 bp, Homo sapien
agttcttgtgctattttcccagaca

SEQ ID NO: 1924124 - DNA, 25 bp, Homo sapien
cagacagcaaattaattaaatggcc

SEQ ID NO: 1924125 - DNA, 25 bp, Homo sapien
tctaaacagcgactatttacatgtt

SEQ ID NO: 1924126 - DNA, 25 bp, Homo sapien
ttgggcatgggtgcctttatattgc

SEQ ID NO: 1924127 - DNA, 25 bp, Homo sapien
tgggcatgggtgcctttatattgcc

SEQ ID NO: 1924128 - DNA, 25 bp, Homo sapien
cttctaaacagcgactatttacatg

SEQ ID NO: 1924129 - DNA, 25 bp, Homo sapien
taccacaagatgcaagccgtgcagc

SEQ ID NO: 1924130 - DNA, 25 bp, Homo sapien
aagatgcaagccgtgcagcagaatg

SEQ ID NO: 1924131 - DNA, 25 bp, Homo sapien
ctattaccacaagatgcaagccgtg

SEQ ID NO: 1924132 - DNA, 25 bp, Homo sapien
gatgcaagccgtgcagcagaatgtt

SEQ ID NO: 1924133 - DNA, 25 bp, Homo sapien
cttgcttggagcaactctgacctgg

SEQ ID NO: 1924134 - DNA, 25 bp, Homo sapien
cttggagcaactctgacctggagag

SEQ ID NO: 1924135 - DNA, 25 bp, Homo sapien
gagcaactctgacctggagagccat

SEQ ID NO: 1924136 - DNA, 25 bp, Homo sapien
tggagcaactctgacctggagagcc

SEQ ID NO: 1924137 - DNA, 25 bp, Homo sapien
cctacgtcaaggaggtgatgaaagc

SEQ ID NO: 1924138 - DNA, 25 bp, Homo sapien
agccccactccttatagcgatgaca

SEQ ID NO: 1924139 - DNA, 25 bp, Homo sapien
gccccactccttatagcgatgacat

SEQ ID NO: 1924140 - DNA, 25 bp, Homo sapien
gtacacatcctacgtcaaggaggtg

SEQ ID NO: 1924141 - DNA, 25 bp, Homo sapien
gaagaagacacaattgtcaccgtga

SEQ ID NO: 1924142 - DNA, 25 bp, Homo sapien
gaagacacaattgtcaccgtgagct

SEQ ID NO: 1924143 - DNA, 25 bp, Homo sapien
acaattgtcaccgtgagcttttcaa

SEQ ID NO: 1924144 - DNA, 25 bp, Homo sapien
tcaccgtgagcttttcaattactcc

SEQ ID NO: 1924145 - DNA, 25 bp, Homo sapien
gaccctgggtaagtgaattcactgt

SEQ ID NO: 1924146 - DNA, 25 bp, Homo sapien
aattcactgttttttactttgcagg

SEQ ID NO: 1924147 - DNA, 25 bp, Homo sapien
ggtgggttctagcttctcaaaagga

SEQ ID NO: 1924148 - DNA, 25 bp, Homo sapien
ttttactttgcaggtgggttctagc

SEQ ID NO: 1924149 - DNA, 25 bp, Homo sapien
ctacagcaccttgcacatcgcccat

SEQ ID NO: 1924150 - DNA, 25 bp, Homo sapien
tctacagcaccttgcacatcgccca

SEQ ID NO: 1924151 - DNA, 25 bp, Homo sapien
tgtgtttctacagcaccttgcacat

SEQ ID NO: 1924152 - DNA, 25 bp, Homo sapien
gtttctacagcaccttgcacatcgc

SEQ ID NO: 1924153 - DNA, 25 bp, Homo sapien
gatatcgactataaaatttacttct

SEQ ID NO: 1924154 - DNA, 25 bp, Homo sapien
caatcccaagaggagctgtagatat

SEQ ID NO: 1924155 - DNA, 25 bp, Homo sapien
caagaggagctgtagatatcgacta

SEQ ID NO: 1924156 - DNA, 25 bp, Homo sapien
ggagctgtagatatcgactataaaa

SEQ ID NO: 1924157 - DNA, 25 bp, Homo sapien
cttggctgatacagacttcctctaa

SEQ ID NO: 1924158 - DNA, 25 bp, Homo sapien
ctcacaatgttcacttggctgatac

SEQ ID NO: 1924159 - DNA, 25 bp, Homo sapien
ttggctgatacagacttcctctaac

SEQ ID NO: 1924160 - DNA, 25 bp, Homo sapien
tcacaatgttcacttggctgataca

SEQ ID NO: 1924161 - DNA, 25 bp, Homo sapien
tgagattctccgaatgcaggttttt

SEQ ID NO: 1924162 - DNA, 25 bp, Homo sapien
cattgggctacctgtttgtgctcta

SEQ ID NO: 1924163 - DNA, 25 bp, Homo sapien
ctttctgagcatcacattgggctac

SEQ ID NO: 1924164 - DNA, 25 bp, Homo sapien
ttcaggatccactgaactttctgag

SEQ ID NO: 1924165 - DNA, 25 bp, Homo sapien
taacttccatttgcgtgtggctctg

SEQ ID NO: 1924166 - DNA, 25 bp, Homo sapien
tctgcaagcaacatgtggttggttc

SEQ ID NO: 1924167 - DNA, 25 bp, Homo sapien
taactctgtcatgcgagacctcagc

SEQ ID NO: 1924168 - DNA, 25 bp, Homo sapien
gatcaccagccaatctgtggatggg

SEQ ID NO: 1924169 - DNA, 25 bp, Homo sapien
gtagtttcttcaccggcagactcag

SEQ ID NO: 1924170 - DNA, 25 bp, Homo sapien
tgctttctggcacaacacattgctg

SEQ ID NO: 1924171 - DNA, 25 bp, Homo sapien
tgaagtcttcctacaggctcaatgc

SEQ ID NO: 1924172 - DNA, 25 bp, Homo sapien
tattcccgagtctgtataaccaccc

SEQ ID NO: 1924173 - DNA, 25 bp, Homo sapien
gttgtggtacacttcaggtcaccaa

SEQ ID NO: 1924174 - DNA, 25 bp, Homo sapien
ggaaatgatctattggtggctgctg

SEQ ID NO: 1924175 - DNA, 25 bp, Homo sapien
ggtcaccaaggacttttactgattc

SEQ ID NO: 1924176 - DNA, 25 bp, Homo sapien
cattttggaaatgatctattggtgg

SEQ ID NO: 1924177 - DNA, 25 bp, Homo sapien
ctggaaaagaccatcacacaagact

SEQ ID NO: 1924178 - DNA, 25 bp, Homo sapien
ctggtatggaaaagtatatgaaact

SEQ ID NO: 1924179 - DNA, 25 bp, Homo sapien
tatggaaaagtatatgaaactgcct

SEQ ID NO: 1924180 - DNA, 25 bp, Homo sapien
ggaaaagtatatgaaactgcctttc

SEQ ID NO: 1924181 - DNA, 25 bp, Homo sapien
gtatggaaaagtatatgaaactgcc

SEQ ID NO: 1924182 - DNA, 25 bp, Homo sapien
tagcattcattttggtttacggcca

SEQ ID NO: 1924183 - DNA, 25 bp, Homo sapien
aacatccatccctgagaatgtcatg

SEQ ID NO: 1924184 - DNA, 25 bp, Homo sapien
gaatgtcatgggagctaaggagaca

SEQ ID NO: 1924185 - DNA, 25 bp, Homo sapien
ggtattcaaccctgatcagcacaac

SEQ ID NO: 1924186 - DNA, 25 bp, Homo sapien
attgttgaaaatctgttcttcctca

SEQ ID NO: 1924187 - DNA, 25 bp, Homo sapien
ggattgttgaaaatctgttcttcct

SEQ ID NO: 1924188 - DNA, 25 bp, Homo sapien
aggattgttgaaaatctgttcttcc

SEQ ID NO: 1924189 - DNA, 25 bp, Homo sapien
gattgttgaaaatctgttcttcctc

SEQ ID NO: 1924190 - DNA, 25 bp, Homo sapien
tggtaagtccttgcccctgtgatgc

SEQ ID NO: 1924191 - DNA, 25 bp, Homo sapien
aagcagcagcccttaaggttcagtc

SEQ ID NO: 1924192 - DNA, 25 bp, Homo sapien
ggttcagtcccaggactccacatgc

SEQ ID NO: 1924193 - DNA, 25 bp, Homo sapien
gatgcttgctttggtcgtcaaagca

SEQ ID NO: 1924194 - DNA, 25 bp, Homo sapien
ccagatatgacggagcattcctgaa

SEQ ID NO: 1924195 - DNA, 25 bp, Homo sapien
cattcctgaaaaccttctggtgagt

SEQ ID NO: 1924196 - DNA, 25 bp, Homo sapien
tatgatcactatggtgaaagcccca

SEQ ID NO: 1924197 - DNA, 25 bp, Homo sapien
taccactgagatccagatatgacgg

SEQ ID NO: 1924198 - DNA, 25 bp, Homo sapien
tgccatcttgggctactctagctag

SEQ ID NO: 1924199 - DNA, 25 bp, Homo sapien
tcttgggctactctagctagaactt

SEQ ID NO: 1924200 - DNA, 25 bp, Homo sapien
ctctgccatcttgggctactctagc

SEQ ID NO: 1924201 - DNA, 25 bp, Homo sapien
catcttgggctactctagctagaac

SEQ ID NO: 1924202 - DNA, 25 bp, Homo sapien
ttctaacaactttgagaagctagag

SEQ ID NO: 1924203 - DNA, 25 bp, Homo sapien
gagaagaatgacaaatggtccctcc

SEQ ID NO: 1924204 - DNA, 25 bp, Homo sapien
gggtagcttgaagtgattccatgca

SEQ ID NO: 1924205 - DNA, 25 bp, Homo sapien
tggtccctccaattctgactttgtc

SEQ ID NO: 1924206 - DNA, 25 bp, Homo sapien
tcatattgtggcttatagagcaggg

SEQ ID NO: 1924207 - DNA, 25 bp, Homo sapien
tctcattagtgacaacagagcccac

SEQ ID NO: 1924208 - DNA, 25 bp, Homo sapien
ccctaaatctgactgaagctgaaag

SEQ ID NO: 1924209 - DNA, 25 bp, Homo sapien
tcgagtgtgcacctatcccagcgtg

SEQ ID NO: 1924210 - DNA, 25 bp, Homo sapien
ttccctcactgggaagttagccttg

SEQ ID NO: 1924211 - DNA, 25 bp, Homo sapien
ccctcactgggaagttagccttggc

SEQ ID NO: 1924212 - DNA, 25 bp, Homo sapien
ggctggaataagcagtcctggtgaa

SEQ ID NO: 1924213 - DNA, 25 bp, Homo sapien
tcactgggaagttagccttggctgg

SEQ ID NO: 1924214 - DNA, 25 bp, Homo sapien
gcagatttattgcttgggaatggag

SEQ ID NO: 1924215 - DNA, 25 bp, Homo sapien
ctttgttgtgcagatttattgcttg

SEQ ID NO: 1924216 - DNA, 25 bp, Homo sapien
tgttgtgcagatttattgcttggga

SEQ ID NO: 1924217 - DNA, 25 bp, Homo sapien
tgtgcagatttattgcttgggaatg

SEQ ID NO: 1924218 - DNA, 25 bp, Homo sapien
gaccctgatgttatttgccttattg

SEQ ID NO: 1924219 - DNA, 25 bp, Homo sapien
ccctgatgttatttgccttattggc

SEQ ID NO: 1924220 - DNA, 25 bp, Homo sapien
accctgatgttatttgccttattgg

SEQ ID NO: 1924221 - DNA, 25 bp, Homo sapien
cctgatgttatttgccttattggcc

SEQ ID NO: 1924222 - DNA, 25 bp, Homo sapien
ccttgatgtcgggaagcttgagaat

SEQ ID NO: 1924223 - DNA, 25 bp, Homo sapien
tcgggaagcttgagaatggacagac

SEQ ID NO: 1924224 - DNA, 25 bp, Homo sapien
aagcttgagaatggacagaccccaa

SEQ ID NO: 1924225 - DNA, 25 bp, Homo sapien
atgtcgggaagcttgagaatggaca

SEQ ID NO: 1924226 - DNA, 25 bp, Homo sapien
ggctggatggtacctaagcccaccc

SEQ ID NO: 1924227 - DNA, 25 bp, Homo sapien
agtgggctggatggtacctaagccc

SEQ ID NO: 1924228 - DNA, 25 bp, Homo sapien
tggatggtacctaagcccacccatc

SEQ ID NO: 1924229 - DNA, 25 bp, Homo sapien
taagtgggctggatggtacctaagc

SEQ ID NO: 1924230 - DNA, 25 bp, Homo sapien
ggcttgaagtagtttacattgggat

SEQ ID NO: 1924231 - DNA, 25 bp, Homo sapien
tacattgggatagagaggcaacact

SEQ ID NO: 1924232 - DNA, 25 bp, Homo sapien
gtgtcaagattggtaaacagctggt

SEQ ID NO: 1924233 - DNA, 25 bp, Homo sapien
tggtgtcaagattggtaaacagctg

SEQ ID NO: 1924234 - DNA, 25 bp, Homo sapien
tcagcttcacaggatttgtccgttt

SEQ ID NO: 1924235 - DNA, 25 bp, Homo sapien
ggtctgcttctatagggtaatttca

SEQ ID NO: 1924236 - DNA, 25 bp, Homo sapien
gagtacatgttaaggcatatggcct

SEQ ID NO: 1924237 - DNA, 25 bp, Homo sapien
cattagatatatcgggtggtctgct

SEQ ID NO: 1924238 - DNA, 25 bp, Homo sapien
aaatagcgaacgtgcaaaactggcc

SEQ ID NO: 1924239 - DNA, 25 bp, Homo sapien
ccggaaagtttcaagtgcagcaaaa

SEQ ID NO: 1924240 - DNA, 25 bp, Homo sapien
tatgctggctatctcggtcgcgtgg

SEQ ID NO: 1924241 - DNA, 25 bp, Homo sapien
gagacctctagtggttgaacgcgtc

SEQ ID NO: 1924242 - DNA, 25 bp, Homo sapien
taaaccaatgctagaacccttagga

SEQ ID NO: 1924243 - DNA, 25 bp, Homo sapien
cttgagagtggacagcaattgtgaa

SEQ ID NO: 1924244 - DNA, 25 bp, Homo sapien
tctgtgtttcatcaccgccgaaagg

SEQ ID NO: 1924245 - DNA, 25 bp, Homo sapien
caattgtgaagatcgccagagagtt

SEQ ID NO: 1924246 - DNA, 25 bp, Homo sapien
ttttagagcagaactaacaaccttc

SEQ ID NO: 1924247 - DNA, 25 bp, Homo sapien
ctttttagagcagaactaacaacct

SEQ ID NO: 1924248 - DNA, 25 bp, Homo sapien
gattagttcacactcaggtgtctcc

SEQ ID NO: 1924249 - DNA, 25 bp, Homo sapien
aataagatggaaccgctgtaatgac

SEQ ID NO: 1924250 - DNA, 25 bp, Homo sapien
aaatatcaataagatggaaccgctg

SEQ ID NO: 1924251 - DNA, 25 bp, Homo sapien
tgtttaaaggcagcatggattagtt

SEQ ID NO: 1924252 - DNA, 25 bp, Homo sapien
cctgtgtaccagctctcttgaaagc

SEQ ID NO: 1924253 - DNA, 25 bp, Homo sapien
ccctttggggatgatgacgcagagc

SEQ ID NO: 1924254 - DNA, 25 bp, Homo sapien
tccagtgctcctatagagaaacact

SEQ ID NO: 1924255 - DNA, 25 bp, Homo sapien
tcatactggcctcttgctttaatct

SEQ ID NO: 1924256 - DNA, 25 bp, Homo sapien
tgctgcccacctttcctgtcctcat

SEQ ID NO: 1924257 - DNA, 25 bp, Homo sapien
cattgttcttgactgccctgctgcc

SEQ ID NO: 1924258 - DNA, 25 bp, Homo sapien
gccctgctgcccacctttcctgtcc

SEQ ID NO: 1924259 - DNA, 25 bp, Homo sapien
cctgctgcccacctttcctgtcctc

SEQ ID NO: 1924260 - DNA, 25 bp, Homo sapien
tgaagggtgtaaattcctcagttcc

SEQ ID NO: 1924261 - DNA, 25 bp, Homo sapien
tcatactgtcccgacaaaccagggc

SEQ ID NO: 1924262 - DNA, 25 bp, Homo sapien
tgccctaggcacacagcttaacttt

SEQ ID NO: 1924263 - DNA, 25 bp, Homo sapien
tatactctaccttagcctgttccag

SEQ ID NO: 1924264 - DNA, 25 bp, Homo sapien
tctgcaatgtagaaagaagagcatg

SEQ ID NO: 1924265 - DNA, 25 bp, Homo sapien
ccaaagaaggatattgggcctttat

SEQ ID NO: 1924266 - DNA, 25 bp, Homo sapien
aacaaaaccgaatgtgcctgaatgc

SEQ ID NO: 1924267 - DNA, 25 bp, Homo sapien
tggagggatctggaactgtcattct

SEQ ID NO: 1924268 - DNA, 25 bp, Homo sapien
aaccgtttcggtgttctgtcttctg

SEQ ID NO: 1924269 - DNA, 25 bp, Homo sapien
ctgtaaatccatataagagtagagt

SEQ ID NO: 1924270 - DNA, 25 bp, Homo sapien
taatctttataatgagtctaaccgt

SEQ ID NO: 1924271 - DNA, 25 bp, Homo sapien
caaagaagtggttagtttggatgat

SEQ ID NO: 1924272 - DNA, 25 bp, Homo sapien
caatggtgtggacttccaaaacgtc

SEQ ID NO: 1924273 - DNA, 25 bp, Homo sapien
cccagtgctgagtcgtatatagtga

SEQ ID NO: 1924274 - DNA, 25 bp, Homo sapien
ggtggacttgacctgattaagccag

SEQ ID NO: 1924275 - DNA, 25 bp, Homo sapien
gaaatcacttcagcgggtggacttg

SEQ ID NO: 1924276 - DNA, 25 bp, Homo sapien
ttaagtccccaattccatgtctgcc

SEQ ID NO: 1924277 - DNA, 25 bp, Homo sapien
cacaggtgttagacgtgagatgcaa

SEQ ID NO: 1924278 - DNA, 25 bp, Homo sapien
tgctgcccgacaccagatacaggat

SEQ ID NO: 1924279 - DNA, 25 bp, Homo sapien
tatctgggagatgcacggcatttgg

SEQ ID NO: 1924280 - DNA, 25 bp, Homo sapien
gacaggtgtcagaatttatacagag

SEQ ID NO: 1924281 - DNA, 25 bp, Homo sapien
cctgtagcatttagattctgactgt

SEQ ID NO: 1924282 - DNA, 25 bp, Homo sapien
taactaatgcatatgggttaaatgt

SEQ ID NO: 1924283 - DNA, 25 bp, Homo sapien
ggttaaatgttttgaacctgtagca

SEQ ID NO: 1924284 - DNA, 25 bp, Homo sapien
tagctcaccttgtcatcctgtcatg

SEQ ID NO: 1924285 - DNA, 25 bp, Homo sapien
cattcaacttcagccatagggatgt

SEQ ID NO: 1924286 - DNA, 25 bp, Homo sapien
tagggatgtataccttataaggaaa

SEQ ID NO: 1924287 - DNA, 25 bp, Homo sapien
actgcagtttccttgtagctcacct

SEQ ID NO: 1924288 - DNA, 25 bp, Homo sapien
aatgaagtagaattttattacagaa

SEQ ID NO: 1924289 - DNA, 25 bp, Homo sapien
cccagaggtaaattccagtacaata

SEQ ID NO: 1924290 - DNA, 25 bp, Homo sapien
tatctaagtgtaaagatagaaagca

SEQ ID NO: 1924291 - DNA, 25 bp, Homo sapien
gattttctcatacctacctctacca

SEQ ID NO: 1924292 - DNA, 25 bp, Homo sapien
aaagaaaattcgcagacctccatgt

SEQ ID NO: 1924293 - DNA, 25 bp, Homo sapien
gaaagtttgggacagtcttcttgga

SEQ ID NO: 1924294 - DNA, 25 bp, Homo sapien
gaaaatcagcgtttctaggaagttg

SEQ ID NO: 1924295 - DNA, 25 bp, Homo sapien
tacatgaaaggcagctactagcgca

SEQ ID NO: 1924296 - DNA, 25 bp, Homo sapien
tgacaaaaaggctgggatcatcccc

SEQ ID NO: 1924297 - DNA, 25 bp, Homo sapien
aaggctgggatcatccccaaaaaca

SEQ ID NO: 1924298 - DNA, 25 bp, Homo sapien
caaaaaggctgggatcatccccaaa

SEQ ID NO: 1924299 - DNA, 25 bp, Homo sapien
gatgacaaaaaggctgggatcatcc

SEQ ID NO: 1924300 - DNA, 25 bp, Homo sapien
ggagtaaacatgtggctgtcatctt

SEQ ID NO: 1924301 - DNA, 25 bp, Homo sapien
gaggagtaaacatgtggctgtcatc

SEQ ID NO: 1924302 - DNA, 25 bp, Homo sapien
gagtaaacatgtggctgtcatcttc

SEQ ID NO: 1924303 - DNA, 25 bp, Homo sapien
gggaggagtaaacatgtggctgtca

SEQ ID NO: 1924304 - DNA, 25 bp, Homo sapien
caatacaatattgattggattgtcc

SEQ ID NO: 1924305 - DNA, 25 bp, Homo sapien
attgattggattgtccaccactgaa

SEQ ID NO: 1924306 - DNA, 25 bp, Homo sapien
tggattgtccaccactgaaaaagaa

SEQ ID NO: 1924307 - DNA, 25 bp, Homo sapien
tatattttctgaataggattccaaa

SEQ ID NO: 1924308 - DNA, 25 bp, Homo sapien
gttcttgtaagaagttggaattctc

SEQ ID NO: 1924309 - DNA, 25 bp, Homo sapien
cttgtaagaagttggaattctctga

SEQ ID NO: 1924310 - DNA, 25 bp, Homo sapien
ctgttcttgtaagaagttggaattc

SEQ ID NO: 1924311 - DNA, 25 bp, Homo sapien
tcttgtaagaagttggaattctctg

SEQ ID NO: 1924312 - DNA, 25 bp, Homo sapien
ttcagaggtgttcggctgccaatca

SEQ ID NO: 1924313 - DNA, 25 bp, Homo sapien
ccttcagaggtgttcggctgccaat

SEQ ID NO: 1924314 - DNA, 25 bp, Homo sapien
tcagaggtgttcggctgccaatcat

SEQ ID NO: 1924315 - DNA, 25 bp, Homo sapien
cttcagaggtgttcggctgccaatc

SEQ ID NO: 1924316 - DNA, 25 bp, Homo sapien
cacgtattcttgctggaaccactta

SEQ ID NO: 1924317 - DNA, 25 bp, Homo sapien
tgttcatctagctcagaatcaaaac

SEQ ID NO: 1924318 - DNA, 25 bp, Homo sapien
gaaccacttaatatgttcatctagc

SEQ ID NO: 1924319 - DNA, 25 bp, Homo sapien
aaagtttggctcattctcttgtcaa

SEQ ID NO: 1924320 - DNA, 25 bp, Homo sapien
gagctagccagagcttgtcctggtg

SEQ ID NO: 1924321 - DNA, 25 bp, Homo sapien
aggatgcttccccaagagctagcca

SEQ ID NO: 1924322 - DNA, 25 bp, Homo sapien
cctgtgctggccgatgctcagaacc

SEQ ID NO: 1924323 - DNA, 25 bp, Homo sapien
tgctggccgatgctcagaaccttct

SEQ ID NO: 1924324 - DNA, 25 bp, Homo sapien
ccagactcctgtgtcttgcctgcat

SEQ ID NO: 1924325 - DNA, 25 bp, Homo sapien
gctattatttattatcccttaatca

SEQ ID NO: 1924326 - DNA, 25 bp, Homo sapien
taatttcatcaaatcttatatcagc

SEQ ID NO: 1924327 - DNA, 25 bp, Homo sapien
ttttatctggacaagtttaatttca

SEQ ID NO: 1924328 - DNA, 25 bp, Homo sapien
atcagcaagagatttccttgtctgg

SEQ ID NO: 1924329 - DNA, 25 bp, Homo sapien
tcatcaaatcttatatcagcaagag

SEQ ID NO: 1924330 - DNA, 25 bp, Homo sapien
cctcttcggtgtccaaatttacact

SEQ ID NO: 1924331 - DNA, 25 bp, Homo sapien
aagcgatctttgagggctcgtttcc

SEQ ID NO: 1924332 - DNA, 25 bp, Homo sapien
gggtcttcgaacatatttaaagcga

SEQ ID NO: 1924333 - DNA, 25 bp, Homo sapien
tacacttatttctaatcacttgctc

SEQ ID NO: 1924334 - DNA, 25 bp, Homo sapien
gagctggtgccccttagagaactac

SEQ ID NO: 1924335 - DNA, 25 bp, Homo sapien
gttgggtagatgcacagaagttccg

SEQ ID NO: 1924336 - DNA, 25 bp, Homo sapien
gaactaccaagagttgcgcgaggct

SEQ ID NO: 1924337 - DNA, 25 bp, Homo sapien
taggtcttagggtcaggtaactgca

SEQ ID NO: 1924338 - DNA, 25 bp, Homo sapien
ggaaaattaggtggctgcagaagca

SEQ ID NO: 1924339 - DNA, 25 bp, Homo sapien
tgtaatttattcaaacagtaaatgt

SEQ ID NO: 1924340 - DNA, 25 bp, Homo sapien
tctagagggactctaatagtattgg

SEQ ID NO: 1924341 - DNA, 25 bp, Homo sapien
tctaatagtattggttacttatggg

SEQ ID NO: 1924342 - DNA, 25 bp, Homo sapien
cagccgtggttgtacattagaataa

SEQ ID NO: 1924343 - DNA, 25 bp, Homo sapien
caaactttgtgttgaaacgtcagcg

SEQ ID NO: 1924344 - DNA, 25 bp, Homo sapien
taggaatcctaatgtgcaaccagag

SEQ ID NO: 1924345 - DNA, 25 bp, Homo sapien
tattcttaggtacagttcaatagtg

SEQ ID NO: 1924346 - DNA, 25 bp, Homo sapien
gggcattaaccacgtcattgtactg

SEQ ID NO: 1924347 - DNA, 25 bp, Homo sapien
cagcagggcattaaccacgtcattg

SEQ ID NO: 1924348 - DNA, 25 bp, Homo sapien
ttaaccacgtcattgtactgctggg

SEQ ID NO: 1924349 - DNA, 25 bp, Homo sapien
acgtcattgtactgctgggtgctgg

SEQ ID NO: 1924350 - DNA, 25 bp, Homo sapien
agtgagccttccagatacttagtca

SEQ ID NO: 1924351 - DNA, 25 bp, Homo sapien
gtgagccttccagatacttagtcat

SEQ ID NO: 1924352 - DNA, 25 bp, Homo sapien
tcatgctgtgatccgggcacttctg

SEQ ID NO: 1924353 - DNA, 25 bp, Homo sapien
caatgatccttatcctcatgctgtg

SEQ ID NO: 1924354 - DNA, 25 bp, Homo sapien
ggacttcgtccactgtaatgctttg

SEQ ID NO: 1924355 - DNA, 25 bp, Homo sapien
gcatttgacatcatagggaaactct

SEQ ID NO: 1924356 - DNA, 25 bp, Homo sapien
tgaaattctattccaaatatatgca

SEQ ID NO: 1924357 - DNA, 25 bp, Homo sapien
tgcatagctcaaaactagacaatat

SEQ ID NO: 1924358 - DNA, 25 bp, Homo sapien
tcagcaaagcaaatgaggcctacca

SEQ ID NO: 1924359 - DNA, 25 bp, Homo sapien
tttgctacatcctgagaacttatga

SEQ ID NO: 1924360 - DNA, 25 bp, Homo sapien
tatcagtggcgaaattatgtcctgg

SEQ ID NO: 1924361 - DNA, 25 bp, Homo sapien
tatttccagatgtaagtctccgctg

SEQ ID NO: 1924362 - DNA, 25 bp, Homo sapien
tatgtcctggctaaaataagcacac

SEQ ID NO: 1924363 - DNA, 25 bp, Homo sapien
tacttgacccaataccacaacagga

SEQ ID NO: 1924364 - DNA, 25 bp, Homo sapien
gaaccaggctcttcgacaaaatcag

SEQ ID NO: 1924365 - DNA, 25 bp, Homo sapien
tatactctgatgaggctcacacagg

SEQ ID NO: 1924366 - DNA, 25 bp, Homo sapien
gaagtagctacctaagcagggctga

SEQ ID NO: 1924367 - DNA, 25 bp, Homo sapien
tgagcaccagctctctaaggaacaa

SEQ ID NO: 1924368 - DNA, 25 bp, Homo sapien
tacttgaccatactagatatctgcc

SEQ ID NO: 1924369 - DNA, 25 bp, Homo sapien
gaccaagtatatagaagacctgcaa

SEQ ID NO: 1924370 - DNA, 25 bp, Homo sapien
catgataatcttcctgtttgccgac

SEQ ID NO: 1924371 - DNA, 25 bp, Homo sapien
gacaccgtgagagtttactatgcag

SEQ ID NO: 1924372 - DNA, 25 bp, Homo sapien
ttcagctggatagaaagatggcatc

SEQ ID NO: 1924373 - DNA, 25 bp, Homo sapien
ttggtcaattagtccattatcaagg

SEQ ID NO: 1924374 - DNA, 25 bp, Homo sapien
caattagtccattatcaaggttttc

SEQ ID NO: 1924375 - DNA, 25 bp, Homo sapien
tcagctggatagaaagatggcatct

SEQ ID NO: 1924376 - DNA, 25 bp, Homo sapien
tctttaccagttgctgaaccatccg

SEQ ID NO: 1924377 - DNA, 25 bp, Homo sapien
gacttcagtccttgagtgttctgct

SEQ ID NO: 1924378 - DNA, 25 bp, Homo sapien
taattaaatccatcagaacagcctg

SEQ ID NO: 1924379 - DNA, 25 bp, Homo sapien
gaaccatccgatcattaagtgcaag

SEQ ID NO: 1924380 - DNA, 25 bp, Homo sapien
tctatgaactagctctcctaaattt

SEQ ID NO: 1924381 - DNA, 25 bp, Homo sapien
aactgcagacctgctcaactgacca

SEQ ID NO: 1924382 - DNA, 25 bp, Homo sapien
cttgaaatctatgaactagctctcc

SEQ ID NO: 1924383 - DNA, 25 bp, Homo sapien
aatctatgaactagctctcctaaat

SEQ ID NO: 1924384 - DNA, 25 bp, Homo sapien
tgcatatgtgacaagctggaaagat

SEQ ID NO: 1924385 - DNA, 25 bp, Homo sapien
cttgcatatgtgacaagctggaaag

SEQ ID NO: 1924386 - DNA, 25 bp, Homo sapien
tatgtgacaagctggaaagatagtc

SEQ ID NO: 1924387 - DNA, 25 bp, Homo sapien
gacaagctggaaagatagtcttcaa

SEQ ID NO: 1924388 - DNA, 25 bp, Homo sapien
tacagtactgttacaataaaatgag

SEQ ID NO: 1924389 - DNA, 25 bp, Homo sapien
aaaatgttattaagcaaataacaag

SEQ ID NO: 1924390 - DNA, 25 bp, Homo sapien
aaatgttattaagcaaataacaagg

SEQ ID NO: 1924391 - DNA, 25 bp, Homo sapien
gatcttcatactcgtcgtcttgcag

SEQ ID NO: 1924392 - DNA, 25 bp, Homo sapien
ttcatactcgtcgtcttgcagtgag

SEQ ID NO: 1924393 - DNA, 25 bp, Homo sapien
cataaagatcttcatactcgtcgtc

SEQ ID NO: 1924394 - DNA, 25 bp, Homo sapien
tcgtcgtcttgcagtgagtaggctg

SEQ ID NO: 1924395 - DNA, 25 bp, Homo sapien
ggcaaatccgatcagtggatgtggt

SEQ ID NO: 1924396 - DNA, 25 bp, Homo sapien
caaatccgatcagtggatgtggttc

SEQ ID NO: 1924397 - DNA, 25 bp, Homo sapien
cccaggcaaatccgatcagtggatg

SEQ ID NO: 1924398 - DNA, 25 bp, Homo sapien
caggcaaatccgatcagtggatgtg

SEQ ID NO: 1924399 - DNA, 25 bp, Homo sapien
atcaaaagttctggtgatactgggt

SEQ ID NO: 1924400 - DNA, 25 bp, Homo sapien
ggtgatactgggttcatatttctga

SEQ ID NO: 1924401 - DNA, 25 bp, Homo sapien
aaaatggaagatatcacctacaaat

SEQ ID NO: 1924402 - DNA, 25 bp, Homo sapien
gaagatatcacctacaaatctggaa

SEQ ID NO: 1924403 - DNA, 25 bp, Homo sapien
gtctgttgacaggttgtgagaactc

SEQ ID NO: 1924404 - DNA, 25 bp, Homo sapien
cctcacttgtttaacccgttgtgca

SEQ ID NO: 1924405 - DNA, 25 bp, Homo sapien
aactcgattgttctctttgctgcag

SEQ ID NO: 1924406 - DNA, 25 bp, Homo sapien
ttgctgcagctagagctccttccag

SEQ ID NO: 1924407 - DNA, 25 bp, Homo sapien
cctagccaatacagtgtaggaaagg

SEQ ID NO: 1924408 - DNA, 25 bp, Homo sapien
tggggaattccattgcaactagagg

SEQ ID NO: 1924409 - DNA, 25 bp, Homo sapien
aggcctagccaatacagtgtaggaa

SEQ ID NO: 1924410 - DNA, 25 bp, Homo sapien
gaattccattgcaactagaggccat

SEQ ID NO: 1924411 - DNA, 25 bp, Homo sapien
gctgggcagccaatatcatgtaaat

SEQ ID NO: 1924412 - DNA, 25 bp, Homo sapien
gagaccagggctccctattcttaat

SEQ ID NO: 1924413 - DNA, 25 bp, Homo sapien
aagccaaatccattctgtataaagc

SEQ ID NO: 1924414 - DNA, 25 bp, Homo sapien
ccggaagacaagctagttgagacca

SEQ ID NO: 1924415 - DNA, 25 bp, Homo sapien
gagttagctgcccacttaacagcca

SEQ ID NO: 1924416 - DNA, 25 bp, Homo sapien
gattttgttcatgcaaagccagttg

SEQ ID NO: 1924417 - DNA, 25 bp, Homo sapien
tagatcaatctgcaaattgagttag

SEQ ID NO: 1924418 - DNA, 25 bp, Homo sapien
cagttgcagggaagcatagatcaat

SEQ ID NO: 1924419 - DNA, 25 bp, Homo sapien
ggtaatatgataaccctgtttcatc

SEQ ID NO: 1924420 - DNA, 25 bp, Homo sapien
gaatgcaggtttgaatttctccaca

SEQ ID NO: 1924421 - DNA, 25 bp, Homo sapien
gacacatctctgtatgcatctatgg

SEQ ID NO: 1924422 - DNA, 25 bp, Homo sapien
tccattatggatagagacacatctc

SEQ ID NO: 1924423 - DNA, 25 bp, Homo sapien
taattgcatgcaaatatctctatac

SEQ ID NO: 1924424 - DNA, 25 bp, Homo sapien
aagcagttctgataataaggtattc

SEQ ID NO: 1924425 - DNA, 25 bp, Homo sapien
tatgcttctgtgttgcacttcagca

SEQ ID NO: 1924426 - DNA, 25 bp, Homo sapien
tatacttttactccccgctacacaa

SEQ ID NO: 1924427 - DNA, 25 bp, Homo sapien
gcttatgtaatctaggtgggcttaa

SEQ ID NO: 1924428 - DNA, 25 bp, Homo sapien
cagggtccttataacagggaaacag

SEQ ID NO: 1924429 - DNA, 25 bp, Homo sapien
ggaactcaggcctaatgataccttg

SEQ ID NO: 1924430 - DNA, 25 bp, Homo sapien
aggctggataatggccctgcaagga

SEQ ID NO: 1924431 - DNA, 25 bp, Homo sapien
tttcttccatgctatgccgtgcctc

SEQ ID NO: 1924432 - DNA, 25 bp, Homo sapien
ctttcttccatgctatgccgtgcct

SEQ ID NO: 1924433 - DNA, 25 bp, Homo sapien
atgctatgccgtgcctcctgtggca

SEQ ID NO: 1924434 - DNA, 25 bp, Homo sapien
ttccatgctatgccgtgcctcctgt

SEQ ID NO: 1924435 - DNA, 25 bp, Homo sapien
cagcccaatgcgagggcactggcga

SEQ ID NO: 1924436 - DNA, 25 bp, Homo sapien
tgtatcagcaccagcccaatgcgag

SEQ ID NO: 1924437 - DNA, 25 bp, Homo sapien
cactggcgaggtgtaccttggatgt

SEQ ID NO: 1924438 - DNA, 25 bp, Homo sapien
ccttggatgtatggctccagcgctg

SEQ ID NO: 1924439 - DNA, 25 bp, Homo sapien
ttattgccctcctgaaggcacaggc

SEQ ID NO: 1924440 - DNA, 25 bp, Homo sapien
tattgccctcctgaaggcacaggca

SEQ ID NO: 1924441 - DNA, 25 bp, Homo sapien
tgccctcctgaaggcacaggcaagg

SEQ ID NO: 1924442 - DNA, 25 bp, Homo sapien
gcaaggaggggttcctccagcctac

SEQ ID NO: 1924443 - DNA, 25 bp, Homo sapien
ctccctggtcgctgttgcagacact

SEQ ID NO: 1924444 - DNA, 25 bp, Homo sapien
gctgttgcagacactctcatggttc

SEQ ID NO: 1924445 - DNA, 25 bp, Homo sapien
tctgtgtgcccatagagcagtattc

SEQ ID NO: 1924446 - DNA, 25 bp, Homo sapien
ccatagagcagtattccgaagtttt

SEQ ID NO: 1924447 - DNA, 25 bp, Homo sapien
aaatttgtgaagacatctgccagac

SEQ ID NO: 1924448 - DNA, 25 bp, Homo sapien
cctctgtccacatttaccagggcaa

SEQ ID NO: 1924449 - DNA, 25 bp, Homo sapien
aggtggctgcgctgagatggtctcc

SEQ ID NO: 1924450 - DNA, 25 bp, Homo sapien
gcccagtagttgaacaagtttaaga

SEQ ID NO: 1924451 - DNA, 25 bp, Homo sapien
tagcttcctaacagcagtggttcag

SEQ ID NO: 1924452 - DNA, 25 bp, Homo sapien
gtagcttcctaacagcagtggttca

SEQ ID NO: 1924453 - DNA, 25 bp, Homo sapien
gcagtggttcagtagtggttcaaac

SEQ ID NO: 1924454 - DNA, 25 bp, Homo sapien
ttcagtagtggttcaaactgtgact

SEQ ID NO: 1924455 - DNA, 25 bp, Homo sapien
cagaggatagccagactcctcagtg

SEQ ID NO: 1924456 - DNA, 25 bp, Homo sapien
caggaatcttttctaaggctgcaga

SEQ ID NO: 1924457 - DNA, 25 bp, Homo sapien
tcatctatagtcacgcttcaagcct

SEQ ID NO: 1924458 - DNA, 25 bp, Homo sapien
tagtcacgcttcaagcctgtgtgct

SEQ ID NO: 1924459 - DNA, 25 bp, Homo sapien
cctcacggcattgggttttggtcta

SEQ ID NO: 1924460 - DNA, 25 bp, Homo sapien
tctgttgacctcaaaggcactgctt

SEQ ID NO: 1924461 - DNA, 25 bp, Homo sapien
tatctcagtggaagatcttgcaaca

SEQ ID NO: 1924462 - DNA, 25 bp, Homo sapien
cacttctacataagccatgggcata

SEQ ID NO: 1924463 - DNA, 25 bp, Homo sapien
tcctattcccaaagatgagccaagt

SEQ ID NO: 1924464 - DNA, 25 bp, Homo sapien
cagcaaagggttaggctcccagccg

SEQ ID NO: 1924465 - DNA, 25 bp, Homo sapien
gctcccagccgctatttttctcaaa

SEQ ID NO: 1924466 - DNA, 25 bp, Homo sapien
tggctttcctattcccaaagatgag

SEQ ID NO: 1924467 - DNA, 25 bp, Homo sapien
gaaggcagttctgttagttccatga

SEQ ID NO: 1924468 - DNA, 25 bp, Homo sapien
tcatgggtcatgtgtcattgtgcct

SEQ ID NO: 1924469 - DNA, 25 bp, Homo sapien
gcctgttcccaaattaactgtcagg

SEQ ID NO: 1924470 - DNA, 25 bp, Homo sapien
tgttagttccatgagaagggttttg

SEQ ID NO: 1924471 - DNA, 25 bp, Homo sapien
aatatccggtaattagttttacatg

SEQ ID NO: 1924472 - DNA, 25 bp, Homo sapien
tatccggtaattagttttacatgaa

SEQ ID NO: 1924473 - DNA, 25 bp, Homo sapien
atatccggtaattagttttacatga

SEQ ID NO: 1924474 - DNA, 25 bp, Homo sapien
tgccgaattagagacgacatatttt

SEQ ID NO: 1924475 - DNA, 25 bp, Homo sapien
gtctttgccgaattagagacgacat

SEQ ID NO: 1924476 - DNA, 25 bp, Homo sapien
cgaattagagacgacatattttact

SEQ ID NO: 1924477 - DNA, 25 bp, Homo sapien
ggaattggcctgcatatatacagtc

SEQ ID NO: 1924478 - DNA, 25 bp, Homo sapien
ctgtgaacaggccagtctccactca

SEQ ID NO: 1924479 - DNA, 25 bp, Homo sapien
ggctttgatgtttggagtcgaacat

SEQ ID NO: 1924480 - DNA, 25 bp, Homo sapien
taacctgaacctctcgttggctttg

SEQ ID NO: 1924481 - DNA, 25 bp, Homo sapien
aggagtaacctgaacctctcgttgg

SEQ ID NO: 1924482 - DNA, 25 bp, Homo sapien
ggagtcgaacatccgcactgctcat

SEQ ID NO: 1924483 - DNA, 25 bp, Homo sapien
tctggagccgagcagaaaacttttc

SEQ ID NO: 1924484 - DNA, 25 bp, Homo sapien
ccaggtttggtttagctcgcgcagc

SEQ ID NO: 1924485 - DNA, 25 bp, Homo sapien
aatactgcgagtcggctggagctcc

SEQ ID NO: 1924486 - DNA, 25 bp, Homo sapien
aagtgcaactttgtggccgggacgc

SEQ ID NO: 1924487 - DNA, 25 bp, Homo sapien
ccctcgcctgactcatccgcccgcg

SEQ ID NO: 1924488 - DNA, 25 bp, Homo sapien
cgcctgactcatccgcccgcggtgg

SEQ ID NO: 1924489 - DNA, 25 bp, Homo sapien
cctgactcatccgcccgcggtggcc

SEQ ID NO: 1924490 - DNA, 25 bp, Homo sapien
ctcgcctgactcatccgcccgcggt

SEQ ID NO: 1924491 - DNA, 25 bp, Homo sapien
cgaccctgccgccttcttcgtccgc

SEQ ID NO: 1924492 - DNA, 25 bp, Homo sapien
ccagaggcgcccgacgtcccgacag

SEQ ID NO: 1924493 - DNA, 25 bp, Homo sapien
ccgcggcggccgagattcccgctga

SEQ ID NO: 1924494 - DNA, 25 bp, Homo sapien
ggcggccgagattcccgctgacgcc

SEQ ID NO: 1924495 - DNA, 25 bp, Homo sapien
gagagttggttgcaccttccagcac

SEQ ID NO: 1924496 - DNA, 25 bp, Homo sapien
ttctgtctctatcctaaacccaggg

SEQ ID NO: 1924497 - DNA, 25 bp, Homo sapien
tgctttgctcatgccagcagataag

SEQ ID NO: 1924498 - DNA, 25 bp, Homo sapien
catctctttcgtggagtcttctctg

SEQ ID NO: 1924499 - DNA, 25 bp, Homo sapien
ctataagtagtagaagtggacttaa

SEQ ID NO: 1924500 - DNA, 25 bp, Homo sapien
ataagtagtagaagtggacttaatc

SEQ ID NO: 1924501 - DNA, 25 bp, Homo sapien
aagtagtagaagtggacttaatctc

SEQ ID NO: 1924502 - DNA, 25 bp, Homo sapien
taagtagtagaagtggacttaatct

SEQ ID NO: 1924503 - DNA, 25 bp, Homo sapien
cagtccttacccttttcaaacatca

SEQ ID NO: 1924504 - DNA, 25 bp, Homo sapien
ggatgcaaaattgttccagtcctta

SEQ ID NO: 1924505 - DNA, 25 bp, Homo sapien
tgcaaaattgttccagtccttaccc

SEQ ID NO: 1924506 - DNA, 25 bp, Homo sapien
ttccttccacatggatgcaaaattg

SEQ ID NO: 1924507 - DNA, 25 bp, Homo sapien
tatgctcaaaggcatattccttttt

SEQ ID NO: 1924508 - DNA, 25 bp, Homo sapien
aaaactatgctcaaaggcatattcc

SEQ ID NO: 1924509 - DNA, 25 bp, Homo sapien
taaggcactcctgcattactcccag

SEQ ID NO: 1924510 - DNA, 25 bp, Homo sapien
tggaagccagatctttttataaggc

SEQ ID NO: 1924511 - DNA, 25 bp, Homo sapien
gcccctagagggtagtgtgatgtct

SEQ ID NO: 1924512 - DNA, 25 bp, Homo sapien
tgccagcccctagagggtagtgtga

SEQ ID NO: 1924513 - DNA, 25 bp, Homo sapien
accagactgccagcccctagagggt

SEQ ID NO: 1924514 - DNA, 25 bp, Homo sapien
ctggtgccacagctcggacacccat

SEQ ID NO: 1924515 - DNA, 25 bp, Homo sapien
tgccagcaggtttctgttgggagct

SEQ ID NO: 1924516 - DNA, 25 bp, Homo sapien
tttggcagaggctcgaatattggca

SEQ ID NO: 1924517 - DNA, 25 bp, Homo sapien
tccccgtaaatactcagagtggcag

SEQ ID NO: 1924518 - DNA, 25 bp, Homo sapien
tgttgggagctggaatgcatccccg

SEQ ID NO: 1924519 - DNA, 25 bp, Homo sapien
gatagagcctccatcggtatcctag

SEQ ID NO: 1924520 - DNA, 25 bp, Homo sapien
taaggccctttagtgaacagtgaat

SEQ ID NO: 1924521 - DNA, 25 bp, Homo sapien
tgaagactgcgtttacattctggag

SEQ ID NO: 1924522 - DNA, 25 bp, Homo sapien
gagcttccagtaggcatgcatgaga

SEQ ID NO: 1924523 - DNA, 25 bp, Homo sapien
gctccttcctgcatataggatggga

SEQ ID NO: 1924524 - DNA, 25 bp, Homo sapien
tagctccttcctgcatataggatgg

SEQ ID NO: 1924525 - DNA, 25 bp, Homo sapien
tccttcctgcatataggatgggaaa

SEQ ID NO: 1924526 - DNA, 25 bp, Homo sapien
ccttcctgcatataggatgggaaaa

SEQ ID NO: 1924527 - DNA, 25 bp, Homo sapien
cacagaagattctgacaagctatcc

SEQ ID NO: 1924528 - DNA, 25 bp, Homo sapien
gaagattctgacaagctatccagcc

SEQ ID NO: 1924529 - DNA, 25 bp, Homo sapien
tctgacaagctatccagccatactg

SEQ ID NO: 1924530 - DNA, 25 bp, Homo sapien
tatccagccatactggttggattgc

SEQ ID NO: 1924531 - DNA, 25 bp, Homo sapien
cattcttcagcatatatcatagcca

SEQ ID NO: 1924532 - DNA, 25 bp, Homo sapien
ccattcttcagcatatatcatagcc

SEQ ID NO: 1924533 - DNA, 25 bp, Homo sapien
attcttcagcatatatcatagccaa

SEQ ID NO: 1924534 - DNA, 25 bp, Homo sapien
tccattcttcagcatatatcatagc

SEQ ID NO: 1924535 - DNA, 25 bp, Homo sapien
cataagcagtatgggctgttattac

SEQ ID NO: 1924536 - DNA, 25 bp, Homo sapien
tctcttagcctcagtaacctgaaaa

SEQ ID NO: 1924537 - DNA, 25 bp, Homo sapien
tccccatctcaaatgggaggctctg

SEQ ID NO: 1924538 - DNA, 25 bp, Homo sapien
caaatgaaagcaaatctggaggccc

SEQ ID NO: 1924539 - DNA, 25 bp, Homo sapien
caactgatgataagaccagcggctc

SEQ ID NO: 1924540 - DNA, 25 bp, Homo sapien
gcagttttcgaatggacagctccgt

SEQ ID NO: 1924541 - DNA, 25 bp, Homo sapien
gattggcagcaaatacgatcgcctc

SEQ ID NO: 1924542 - DNA, 25 bp, Homo sapien
caattgtgtcatcgtccatcagtgc

SEQ ID NO: 1924543 - DNA, 25 bp, Homo sapien
gaacatcagtattgcagttgtggaa

SEQ ID NO: 1924544 - DNA, 25 bp, Homo sapien
ggaagagcagaaggaggatacattt

SEQ ID NO: 1924545 - DNA, 25 bp, Homo sapien
tcccaatacctaaacatttctgaac

SEQ ID NO: 1924546 - DNA, 25 bp, Homo sapien
gaagtttaccttgtgctggagagcc

SEQ ID NO: 1924547 - DNA, 25 bp, Homo sapien
gaagtagagaaagaaccagcggcat

SEQ ID NO: 1924548 - DNA, 25 bp, Homo sapien
gctagaagcctattaagatggctca

SEQ ID NO: 1924549 - DNA, 25 bp, Homo sapien
gggatatttcgaaggcgcaggttca

SEQ ID NO: 1924550 - DNA, 25 bp, Homo sapien
acttggaggaaatcagctagaagcc

SEQ ID NO: 1924551 - DNA, 25 bp, Homo sapien
gagagtgaccaagaataggcctatc

SEQ ID NO: 1924552 - DNA, 25 bp, Homo sapien
gagcatgctggcctcatgtacccag

SEQ ID NO: 1924553 - DNA, 25 bp, Homo sapien
taggcctatccatgatgggggaaca

SEQ ID NO: 1924554 - DNA, 25 bp, Homo sapien
tttgtcagagaactcatgtttgacc

SEQ ID NO: 1924555 - DNA, 25 bp, Homo sapien
ttcaagctgggatagcctagatgtc

SEQ ID NO: 1924556 - DNA, 25 bp, Homo sapien
caagctgggatagcctagatgtcat

SEQ ID NO: 1924557 - DNA, 25 bp, Homo sapien
tcttcaagctgggatagcctagatg

SEQ ID NO: 1924558 - DNA, 25 bp, Homo sapien
tcaagctgggatagcctagatgtca

SEQ ID NO: 1924559 - DNA, 25 bp, Homo sapien
taatcacattaactacataatggcc

SEQ ID NO: 1924560 - DNA, 25 bp, Homo sapien
atcacattaactacataatggccaa

SEQ ID NO: 1924561 - DNA, 25 bp, Homo sapien
catattaatcacattaactacataa

SEQ ID NO: 1924562 - DNA, 25 bp, Homo sapien
cctgaagcatcttgtttgttattca

SEQ ID NO: 1924563 - DNA, 25 bp, Homo sapien
gcttaagtttgagaggaaactcatc

SEQ ID NO: 1924564 - DNA, 25 bp, Homo sapien
cactgatcataagctatttttcctc

SEQ ID NO: 1924565 - DNA, 25 bp, Homo sapien
agagttcccagttgttaagttccag

SEQ ID NO: 1924566 - DNA, 25 bp, Homo sapien
tctctgagcacactgatcataagct

SEQ ID NO: 1924567 - DNA, 25 bp, Homo sapien
tcatacactgtatgggcaataaaac

SEQ ID NO: 1924568 - DNA, 25 bp, Homo sapien
tggactgaatgatggaagcaatgtg

SEQ ID NO: 1924569 - DNA, 25 bp, Homo sapien
tgtctctaatgaatgcatgctcctt

SEQ ID NO: 1924570 - DNA, 25 bp, Homo sapien
ggctcctttcataaaggctcttgga

SEQ ID NO: 1924571 - DNA, 25 bp, Homo sapien
ggcaagaacagtttgcatggagtag

SEQ ID NO: 1924572 - DNA, 25 bp, Homo sapien
gaagtaagatcccagatgtcaagag

SEQ ID NO: 1924573 - DNA, 25 bp, Homo sapien
caagaacagtttgcatggagtagtt

SEQ ID NO: 1924574 - DNA, 25 bp, Homo sapien
agtagttggagtggaagtaagatcc

SEQ ID NO: 1924575 - DNA, 25 bp, Homo sapien
ctgccgaaaggagggtagcctaatt

SEQ ID NO: 1924576 - DNA, 25 bp, Homo sapien
cgaaaggagggtagcctaattattg

SEQ ID NO: 1924577 - DNA, 25 bp, Homo sapien
tagcctaattattgtatcagctgct

SEQ ID NO: 1924578 - DNA, 25 bp, Homo sapien
gagggtagcctaattattgtatcag

SEQ ID NO: 1924579 - DNA, 25 bp, Homo sapien
taggcaaatgacaacgttaggaaat

SEQ ID NO: 1924580 - DNA, 25 bp, Homo sapien
cctggcatgaggcaagattggaatt

SEQ ID NO: 1924581 - DNA, 25 bp, Homo sapien
ggcttaaatagcaccctgcagtggg

SEQ ID NO: 1924582 - DNA, 25 bp, Homo sapien
tctttgacctggcaactaacattgt

SEQ ID NO: 1924583 - DNA, 25 bp, Homo sapien
tgttctgttcactctggtctctaat

SEQ ID NO: 1924584 - DNA, 25 bp, Homo sapien
ttctgttcactctggtctctaatag

SEQ ID NO: 1924585 - DNA, 25 bp, Homo sapien
gttctgttcactctggtctctaata

SEQ ID NO: 1924586 - DNA, 25 bp, Homo sapien
gaaatactgccctttcctcaactac

SEQ ID NO: 1924587 - DNA, 25 bp, Homo sapien
ggaaattgagagaatacagttccca

SEQ ID NO: 1924588 - DNA, 25 bp, Homo sapien
ggttcttggaaattgagagaataca

SEQ ID NO: 1924589 - DNA, 25 bp, Homo sapien
cttagagcaagtttaagtgagcttt

SEQ ID NO: 1924590 - DNA, 25 bp, Homo sapien
tcaccgatagtattgcctggcttct

SEQ ID NO: 1924591 - DNA, 25 bp, Homo sapien
gatagtattgcctggcttctgagtt

SEQ ID NO: 1924592 - DNA, 25 bp, Homo sapien
accgatagtattgcctggcttctga

SEQ ID NO: 1924593 - DNA, 25 bp, Homo sapien
cgatagtattgcctggcttctgagt

SEQ ID NO: 1924594 - DNA, 25 bp, Homo sapien
gcaatctgacctccatccccacaga

SEQ ID NO: 1924595 - DNA, 25 bp, Homo sapien
ctttcagcaatctgacctccatccc

SEQ ID NO: 1924596 - DNA, 25 bp, Homo sapien
tttcagcaatctgacctccatcccc

SEQ ID NO: 1924597 - DNA, 25 bp, Homo sapien
tctgacctccatccccacagagcat

SEQ ID NO: 1924598 - DNA, 25 bp, Homo sapien
cctgtcagagtagcaatgacgtcct

SEQ ID NO: 1924599 - DNA, 25 bp, Homo sapien
gaactgagtagcctgtcagagtagc

SEQ ID NO: 1924600 - DNA, 25 bp, Homo sapien
gagtagcctgtcagagtagcaatga

SEQ ID NO: 1924601 - DNA, 25 bp, Homo sapien
gtcagagtagcaatgacgtccttca

SEQ ID NO: 1924602 - DNA, 25 bp, Homo sapien
cactctatcagtggtggttgtggag

SEQ ID NO: 1924603 - DNA, 25 bp, Homo sapien
cacactctatcagtggtggttgtgg

SEQ ID NO: 1924604 - DNA, 25 bp, Homo sapien
ctctatcagtggtggttgtggagat

SEQ ID NO: 1924605 - DNA, 25 bp, Homo sapien
ccccacactctatcagtggtggttg

SEQ ID NO: 1924606 - DNA, 25 bp, Homo sapien
ttatttttcatgtgactcaggatgg

SEQ ID NO: 1924607 - DNA, 25 bp, Homo sapien
ttcatgtgactcaggatgggtacag

SEQ ID NO: 1924608 - DNA, 25 bp, Homo sapien
cattgtgcatgtaagtcttttcttg

SEQ ID NO: 1924609 - DNA, 25 bp, Homo sapien
caccctacattgtgcatgtaagtct

SEQ ID NO: 1924610 - DNA, 25 bp, Homo sapien
tcagctggaagcagttctctaactg

SEQ ID NO: 1924611 - DNA, 25 bp, Homo sapien
atgagtgaacggctagaataatagg

SEQ ID NO: 1924612 - DNA, 25 bp, Homo sapien
aagaacaaactttttcctgctggtg

SEQ ID NO: 1924613 - DNA, 25 bp, Homo sapien
gctaaagcaagattgatgagtgaac

SEQ ID NO: 1924614 - DNA, 25 bp, Homo sapien
gttcatcatgaaatggagatgccat

SEQ ID NO: 1924615 - DNA, 25 bp, Homo sapien
acaggaagttcatcatgaaatggag

SEQ ID NO: 1924616 - DNA, 25 bp, Homo sapien
aaatgtgacaggaagttcatcatga

SEQ ID NO: 1924617 - DNA, 25 bp, Homo sapien
ggaaataaaatgtgacaggaagttc

SEQ ID NO: 1924618 - DNA, 25 bp, Homo sapien
ttagggccctggaatactcttctgg

SEQ ID NO: 1924619 - DNA, 25 bp, Homo sapien
ggccctggaatactcttctggaaag

SEQ ID NO: 1924620 - DNA, 25 bp, Homo sapien
gggccctggaatactcttctggaaa

SEQ ID NO: 1924621 - DNA, 25 bp, Homo sapien
tagggccctggaatactcttctgga

SEQ ID NO: 1924622 - DNA, 25 bp, Homo sapien
cctcagctgaaggctctgcatccac

SEQ ID NO: 1924623 - DNA, 25 bp, Homo sapien
gctgaaggctctgcatccacacttc

SEQ ID NO: 1924624 - DNA, 25 bp, Homo sapien
tcagctgaaggctctgcatccacac

SEQ ID NO: 1924625 - DNA, 25 bp, Homo sapien
tgaaggctctgcatccacacttccc

SEQ ID NO: 1924626 - DNA, 25 bp, Homo sapien
gcccaatgtggctttatcattacca

SEQ ID NO: 1924627 - DNA, 25 bp, Homo sapien
caccttgagttcctgctacttctgc

SEQ ID NO: 1924628 - DNA, 25 bp, Homo sapien
tgctacagaaactactttgctgccc

SEQ ID NO: 1924629 - DNA, 25 bp, Homo sapien
atcattaccaccttgagttcctgct

SEQ ID NO: 1924630 - DNA, 25 bp, Homo sapien
ttaggcttagatttatcatggcctt

SEQ ID NO: 1924631 - DNA, 25 bp, Homo sapien
tttaggcttagatttatcatggcct

SEQ ID NO: 1924632 - DNA, 25 bp, Homo sapien
cgaggagcatgacccattagttggg

SEQ ID NO: 1924633 - DNA, 25 bp, Homo sapien
tgggtcatgacccttagcttagtgg

SEQ ID NO: 1924634 - DNA, 25 bp, Homo sapien
tgaattaccgaaaagaggaaggctg

SEQ ID NO: 1924635 - DNA, 25 bp, Homo sapien
tcagtattatcaaaccgaggagcat

SEQ ID NO: 1924636 - DNA, 25 bp, Homo sapien
tagtagtgctgctcctgaacaactg

SEQ ID NO: 1924637 - DNA, 25 bp, Homo sapien
ggctcatctgatcacgtggacactg

SEQ ID NO: 1924638 - DNA, 25 bp, Homo sapien
aatctttgttgtcaacaccgggaat

SEQ ID NO: 1924639 - DNA, 25 bp, Homo sapien
ctgagctgacaccaaaaggcttaga

SEQ ID NO: 1924640 - DNA, 25 bp, Homo sapien
tcagaatccaccatcagaaattctg

SEQ ID NO: 1924641 - DNA, 25 bp, Homo sapien
ctgagcgactttcaggaggcttccc

SEQ ID NO: 1924642 - DNA, 25 bp, Homo sapien
catcttgacgggcaggcttctggtg

SEQ ID NO: 1924643 - DNA, 25 bp, Homo sapien
tcccagacttctgagcagacgagta

SEQ ID NO: 1924644 - DNA, 25 bp, Homo sapien
cagacgagtaacttgataaaaagca

SEQ ID NO: 1924645 - DNA, 25 bp, Homo sapien
agaaaatatcaagattttccagcac

SEQ ID NO: 1924646 - DNA, 25 bp, Homo sapien
cacccagaaaatctttgagctgctc

SEQ ID NO: 1924647 - DNA, 25 bp, Homo sapien
cctacacccagaaaatctttgagct

SEQ ID NO: 1924648 - DNA, 25 bp, Homo sapien
cagcctacacccagaaaatctttga

SEQ ID NO: 1924649 - DNA, 25 bp, Homo sapien
cagaaaatctttgagctgctcttgc

SEQ ID NO: 1924650 - DNA, 25 bp, Homo sapien
tcccaagttgaagtaagacagcagc

SEQ ID NO: 1924651 - DNA, 25 bp, Homo sapien
ccaagttgaagtaagacagcagctc

SEQ ID NO: 1924652 - DNA, 25 bp, Homo sapien
ttttatgtcccaagttgaagtaaga

SEQ ID NO: 1924653 - DNA, 25 bp, Homo sapien
tatgtcccaagttgaagtaagacag

SEQ ID NO: 1924654 - DNA, 25 bp, Homo sapien
gactgggactaaagacctgaatacc

SEQ ID NO: 1924655 - DNA, 25 bp, Homo sapien
tctgagacctttgcatgctgtgggc

SEQ ID NO: 1924656 - DNA, 25 bp, Homo sapien
aaagccttttatatccctgcgtcag

SEQ ID NO: 1924657 - DNA, 25 bp, Homo sapien
tatatggaagacctgactactagcc

SEQ ID NO: 1924658 - DNA, 25 bp, Homo sapien
tctttacccagtacagtgcacaggc

SEQ ID NO: 1924659 - DNA, 25 bp, Homo sapien
taatgacagtgtccgtataagagac

SEQ ID NO: 1924660 - DNA, 25 bp, Homo sapien
tataggctgtgagcgctttagggca

SEQ ID NO: 1924661 - DNA, 25 bp, Homo sapien
gggcaggaacctatgtactctttac

SEQ ID NO: 1924662 - DNA, 25 bp, Homo sapien
agacacacagaggagaggtccatgt

SEQ ID NO: 1924663 - DNA, 25 bp, Homo sapien
gattggagcaatggtgccacaagcc

SEQ ID NO: 1924664 - DNA, 25 bp, Homo sapien
aggagattggagcaatggtgccaca

SEQ ID NO: 1924665 - DNA, 25 bp, Homo sapien
cagaggaggagattggagcaatggt

SEQ ID NO: 1924666 - DNA, 25 bp, Homo sapien
gcttacactgacactgacccttgga

SEQ ID NO: 1924667 - DNA, 25 bp, Homo sapien
cttggacctcgcacagagaagtcga

SEQ ID NO: 1924668 - DNA, 25 bp, Homo sapien
cagagtttctcatggaatgatggga

SEQ ID NO: 1924669 - DNA, 25 bp, Homo sapien
ccctttactgcaggcccacatttag

SEQ ID NO: 1924670 - DNA, 25 bp, Homo sapien
actgctggtaattcttaatgtgtcg

SEQ ID NO: 1924671 - DNA, 25 bp, Homo sapien
taatgtgtcgtagaaccagtatttg

SEQ ID NO: 1924672 - DNA, 25 bp, Homo sapien
cacagggattataagcactgctggt

SEQ ID NO: 1924673 - DNA, 25 bp, Homo sapien
agtatttgaatccaacgctgcaggg

SEQ ID NO: 1924674 - DNA, 25 bp, Homo sapien
tcaggacaattccgtggaccgaggg

SEQ ID NO: 1924675 - DNA, 25 bp, Homo sapien
ggggtcaagcctttagtgatttcat

SEQ ID NO: 1924676 - DNA, 25 bp, Homo sapien
caattccgtggaccgaggggtcaag

SEQ ID NO: 1924677 - DNA, 25 bp, Homo sapien
gaggggtcaagcctttagtgatttc

SEQ ID NO: 1924678 - DNA, 25 bp, Homo sapien
aaagatttggcacttgttcagtgaa

SEQ ID NO: 1924679 - DNA, 25 bp, Homo sapien
caaatatgatgcaacggagtaagca

SEQ ID NO: 1924680 - DNA, 25 bp, Homo sapien
gctaccatgaaactaatgccagtga

SEQ ID NO: 1924681 - DNA, 25 bp, Homo sapien
caaggcactatatgaagagagctac

SEQ ID NO: 1924682 - DNA, 25 bp, Homo sapien
caactgcgcagtgcatagaaccatc

SEQ ID NO: 1924683 - DNA, 25 bp, Homo sapien
cagtgcatagaaccatctttgtgtc

SEQ ID NO: 1924684 - DNA, 25 bp, Homo sapien
tgacctgtttccttgcaactccaca

SEQ ID NO: 1924685 - DNA, 25 bp, Homo sapien
cttgcaactccacaactgcgcagtg

SEQ ID NO: 1924686 - DNA, 25 bp, Homo sapien
cagttactggcctcaatacaatctt

SEQ ID NO: 1924687 - DNA, 25 bp, Homo sapien
gttactggcctcaatacaatctttt

SEQ ID NO: 1924688 - DNA, 25 bp, Homo sapien
tactggcctcaatacaatcttttct

SEQ ID NO: 1924689 - DNA, 25 bp, Homo sapien
ttactggcctcaatacaatcttttc

SEQ ID NO: 1924690 - DNA, 25 bp, Homo sapien
tgtggccatagcatatacttaagat

SEQ ID NO: 1924691 - DNA, 25 bp, Homo sapien
tagagcatcattagcatgtacctga

SEQ ID NO: 1924692 - DNA, 25 bp, Homo sapien
caaattgctctaagttgtggccata

SEQ ID NO: 1924693 - DNA, 25 bp, Homo sapien
cgtctactgctggatacttgggttg

SEQ ID NO: 1924694 - DNA, 25 bp, Homo sapien
ataagagttaagataatgcaaaatg

SEQ ID NO: 1924695 - DNA, 25 bp, Homo sapien
tctaatatatcaacttttaaaattc

SEQ ID NO: 1924696 - DNA, 25 bp, Homo sapien
gagttaagataatgcaaaatgtaaa

SEQ ID NO: 1924697 - DNA, 25 bp, Homo sapien
gttaagataatgcaaaatgtaaaac

SEQ ID NO: 1924698 - DNA, 25 bp, Homo sapien
ttgtaaatggttgccacgaatttcc

SEQ ID NO: 1924699 - DNA, 25 bp, Homo sapien
ggttgccacgaatttccaaattcag

SEQ ID NO: 1924700 - DNA, 25 bp, Homo sapien
aaatggttgccacgaatttccaaat

SEQ ID NO: 1924701 - DNA, 25 bp, Homo sapien
ttactcttgtaaatggttgccacga

SEQ ID NO: 1924702 - DNA, 25 bp, Homo sapien
tcacccactcatgttttgcaaggaa

SEQ ID NO: 1924703 - DNA, 25 bp, Homo sapien
cacccactcatgttttgcaaggaag

SEQ ID NO: 1924704 - DNA, 25 bp, Homo sapien
actttcacccactcatgttttgcaa

SEQ ID NO: 1924705 - DNA, 25 bp, Homo sapien
tttcacccactcatgttttgcaagg

SEQ ID NO: 1924706 - DNA, 25 bp, Homo sapien
cttcctcaagaacagagaccccaac

SEQ ID NO: 1924707 - DNA, 25 bp, Homo sapien
gcttcctcaagaacagagaccccaa

SEQ ID NO: 1924708 - DNA, 25 bp, Homo sapien
tgcttcctcaagaacagagacccca

SEQ ID NO: 1924709 - DNA, 25 bp, Homo sapien
ctgcttcctcaagaacagagacccc

SEQ ID NO: 1924710 - DNA, 25 bp, Homo sapien
tttcctactattactctggcacttt

SEQ ID NO: 1924711 - DNA, 25 bp, Homo sapien
ttcctactattactctggcactttc

SEQ ID NO: 1924712 - DNA, 25 bp, Homo sapien
cctactattactctggcactttctg

SEQ ID NO: 1924713 - DNA, 25 bp, Homo sapien
tcctactattactctggcactttct

SEQ ID NO: 1924714 - DNA, 25 bp, Homo sapien
agccacggctgggccgcgcgtatat

SEQ ID NO: 1924715 - DNA, 25 bp, Homo sapien
gattcgcactccgtattagccacgg

SEQ ID NO: 1924716 - DNA, 25 bp, Homo sapien
gcactccgtattagccacggctggg

SEQ ID NO: 1924717 - DNA, 25 bp, Homo sapien
ccggattcgcactccgtattagcca

SEQ ID NO: 1924718 - DNA, 25 bp, Homo sapien
caggaatgcactgtctggaccaaca

SEQ ID NO: 1924719 - DNA, 25 bp, Homo sapien
tgcatgccagttcaggaatgcactg

SEQ ID NO: 1924720 - DNA, 25 bp, Homo sapien
ctgcatgccagttcaggaatgcact

SEQ ID NO: 1924721 - DNA, 25 bp, Homo sapien
gtctggaccaacatttgccctgcat

SEQ ID NO: 1924722 - DNA, 25 bp, Homo sapien
tcagttgtctgcaaacgctcaggct

SEQ ID NO: 1924723 - DNA, 25 bp, Homo sapien
tctctaagcggcagccttctgacag

SEQ ID NO: 1924724 - DNA, 25 bp, Homo sapien
tatggtagccatgaatctctaagcg

SEQ ID NO: 1924725 - DNA, 25 bp, Homo sapien
aactcgctctgctaaggaaagaacg

SEQ ID NO: 1924726 - DNA, 25 bp, Homo sapien
tttgtttaggcattcaatgaaggct

SEQ ID NO: 1924727 - DNA, 25 bp, Homo sapien
ttgtttaggcattcaatgaaggctt

SEQ ID NO: 1924728 - DNA, 25 bp, Homo sapien
tgtttaggcattcaatgaaggcttg

SEQ ID NO: 1924729 - DNA, 25 bp, Homo sapien
ctttgtttaggcattcaatgaaggc

SEQ ID NO: 1924730 - DNA, 25 bp, Homo sapien
agccaccactaaagggcgccaggga

SEQ ID NO: 1924731 - DNA, 25 bp, Homo sapien
gggctaagactgcatgaccatgcaa

SEQ ID NO: 1924732 - DNA, 25 bp, Homo sapien
taaattagggtgcaaactttacagc

SEQ ID NO: 1924733 - DNA, 25 bp, Homo sapien
ggcttgcccttgatagactcctcca

SEQ ID NO: 1924734 - DNA, 25 bp, Homo sapien
cagagaagtattctgagtaggatat

SEQ ID NO: 1924735 - DNA, 25 bp, Homo sapien
tcttctttgtatacccagcatctag

SEQ ID NO: 1924736 - DNA, 25 bp, Homo sapien
tgtatacccagcatctagttcagaa

SEQ ID NO: 1924737 - DNA, 25 bp, Homo sapien
tctcagagaagtattctgagtagga

SEQ ID NO: 1924738 - DNA, 25 bp, Homo sapien
ggtacagtggcataactattaagaa

SEQ ID NO: 1924739 - DNA, 25 bp, Homo sapien
gacataagtacttaggtacagtggc

SEQ ID NO: 1924740 - DNA, 25 bp, Homo sapien
taggtacagtggcataactattaag

SEQ ID NO: 1924741 - DNA, 25 bp, Homo sapien
tacagtggcataactattaagaaat

SEQ ID NO: 1924742 - DNA, 25 bp, Homo sapien
agagcttggaagatggacctttcaa

SEQ ID NO: 1924743 - DNA, 25 bp, Homo sapien
tgtggttggcaatgagctctgtgct

SEQ ID NO: 1924744 - DNA, 25 bp, Homo sapien
tcagctttcatgagggagctccctg

SEQ ID NO: 1924745 - DNA, 25 bp, Homo sapien
gagttacagagtaacctgccagcaa

SEQ ID NO: 1924746 - DNA, 25 bp, Homo sapien
gactatgtgttaatactgtgccaag

SEQ ID NO: 1924747 - DNA, 25 bp, Homo sapien
aactgggctgtaactagatagacta

SEQ ID NO: 1924748 - DNA, 25 bp, Homo sapien
taacctaacagaagtgcaatgaggg

SEQ ID NO: 1924749 - DNA, 25 bp, Homo sapien
gacattcgggtcttggattgacact

SEQ ID NO: 1924750 - DNA, 25 bp, Homo sapien
gataggcctgctcaataacaaaagg

SEQ ID NO: 1924751 - DNA, 25 bp, Homo sapien
taataagtccctatcgggtctctgg

SEQ ID NO: 1924752 - DNA, 25 bp, Homo sapien
gaggctgctataaatctaatctggc

SEQ ID NO: 1924753 - DNA, 25 bp, Homo sapien
cgtaactatacatagggtcaaaggc

SEQ ID NO: 1924754 - DNA, 25 bp, Homo sapien
gttctacccaagtgttcaaataatg

SEQ ID NO: 1924755 - DNA, 25 bp, Homo sapien
ttctacccaagtgttcaaataatgg

SEQ ID NO: 1924756 - DNA, 25 bp, Homo sapien
tgggtatgttaagaaagaaagcact

SEQ ID NO: 1924757 - DNA, 25 bp, Homo sapien
gaattgaaatgtgggtatgttaaga

SEQ ID NO: 1924758 - DNA, 25 bp, Homo sapien
ccgaagggcatgtgtctgacaagca

SEQ ID NO: 1924759 - DNA, 25 bp, Homo sapien
agtgaacagcaccttaccagcttgg

SEQ ID NO: 1924760 - DNA, 25 bp, Homo sapien
taaaagcaggtagttgcacacaaag

SEQ ID NO: 1924761 - DNA, 25 bp, Homo sapien
tgcggcagggtctctaagcacagtg

SEQ ID NO: 1924762 - DNA, 25 bp, Homo sapien
tgtgatgaataagctgaagccggca

SEQ ID NO: 1924763 - DNA, 25 bp, Homo sapien
ggcaatctactacaatggtccaggg

SEQ ID NO: 1924764 - DNA, 25 bp, Homo sapien
catttggacgaaaagaccagttggc

SEQ ID NO: 1924765 - DNA, 25 bp, Homo sapien
cagtcaggagaccagtgcaggagtc

SEQ ID NO: 1924766 - DNA, 25 bp, Homo sapien
ccggcagtaccgcagaaccaaaaat

SEQ ID NO: 1924767 - DNA, 25 bp, Homo sapien
tggtctctccggcagtaccgcagaa

SEQ ID NO: 1924768 - DNA, 25 bp, Homo sapien
cccatgacagttggtctctccggca

SEQ ID NO: 1924769 - DNA, 25 bp, Homo sapien
tcctccagaattcccatgacagttg

SEQ ID NO: 1924770 - DNA, 25 bp, Homo sapien
gacttgggaggttcgtcctctgcag

SEQ ID NO: 1924771 - DNA, 25 bp, Homo sapien
ggacttgggaggttcgtcctctgca

SEQ ID NO: 1924772 - DNA, 25 bp, Homo sapien
cttgggaggttcgtcctctgcaggt

SEQ ID NO: 1924773 - DNA, 25 bp, Homo sapien
tgggaggttcgtcctctgcaggttg

SEQ ID NO: 1924774 - DNA, 25 bp, Homo sapien
caaaggatcagtatgtagaatctat

SEQ ID NO: 1924775 - DNA, 25 bp, Homo sapien
gagcagggatagacgcatggaccaa

SEQ ID NO: 1924776 - DNA, 25 bp, Homo sapien
gaagggctcttcaatacagtgctgg

SEQ ID NO: 1924777 - DNA, 25 bp, Homo sapien
gagacatgcataccatgtatcaaga

SEQ ID NO: 1924778 - DNA, 25 bp, Homo sapien
tagcagcccctcaataaatcagagt

SEQ ID NO: 1924779 - DNA, 25 bp, Homo sapien
gataggtggaatcagctcatctccc

SEQ ID NO: 1924780 - DNA, 25 bp, Homo sapien
tagcatcttccagaaagggtcaatg

SEQ ID NO: 1924781 - DNA, 25 bp, Homo sapien
tatgaatgtcaatcattagcagccc

SEQ ID NO: 1924782 - DNA, 25 bp, Homo sapien
tctgtttctttgtgtaccaccactc

SEQ ID NO: 1924783 - DNA, 25 bp, Homo sapien
gcttccctgatcgcctgagccagtg

SEQ ID NO: 1924784 - DNA, 25 bp, Homo sapien
ccactcttgtgaccgacatgtcagg

SEQ ID NO: 1924785 - DNA, 25 bp, Homo sapien
tctttgtgtaccaccactcttgtga

SEQ ID NO: 1924786 - DNA, 25 bp, Homo sapien
gaacggctgtgagctggggaacagc

SEQ ID NO: 1924787 - DNA, 25 bp, Homo sapien
cagggtcaggacagagaacggctgt

SEQ ID NO: 1924788 - DNA, 25 bp, Homo sapien
gggtcaggacagagaacggctgtga

SEQ ID NO: 1924789 - DNA, 25 bp, Homo sapien
cagagaacggctgtgagctggggaa

SEQ ID NO: 1924790 - DNA, 25 bp, Homo sapien
gaaagcaggaagatttgaaatgggt

SEQ ID NO: 1924791 - DNA, 25 bp, Homo sapien
ccaattcttcagtccactttcaaat

SEQ ID NO: 1924792 - DNA, 25 bp, Homo sapien
gaaatgggttcactgtcattttaca

SEQ ID NO: 1924793 - DNA, 25 bp, Homo sapien
catttcctaaatctcccaattcttc

SEQ ID NO: 1924794 - DNA, 25 bp, Homo sapien
gactccagtggtttatggtccttcc

SEQ ID NO: 1924795 - DNA, 25 bp, Homo sapien
gaacagagactgactaatcttcagg

SEQ ID NO: 1924796 - DNA, 25 bp, Homo sapien
gttgtggcacaatggaaagatccta

SEQ ID NO: 1924797 - DNA, 25 bp, Homo sapien
caggtccctatttgacagttgacaa

SEQ ID NO: 1924798 - DNA, 25 bp, Homo sapien
gctgcaactacaggtgcccgccact

SEQ ID NO: 1924799 - DNA, 25 bp, Homo sapien
gccatctccgctcactgtaagctct

SEQ ID NO: 1924800 - DNA, 25 bp, Homo sapien
agtggcgccatctccgctcactgta

SEQ ID NO: 1924801 - DNA, 25 bp, Homo sapien
tgcctcccaggttcacaccattctc

SEQ ID NO: 1924802 - DNA, 25 bp, Homo sapien
cctttcagaagcagtactatctaga

SEQ ID NO: 1924803 - DNA, 25 bp, Homo sapien
gagattactgtccttgcaacagcag

SEQ ID NO: 1924804 - DNA, 25 bp, Homo sapien
ttcatttggatatctgacctcagtt

SEQ ID NO: 1924805 - DNA, 25 bp, Homo sapien
gggctgaaacatgacatcatataca

SEQ ID NO: 1924806 - DNA, 25 bp, Homo sapien
atgatcaatatctccatctcctgtg

SEQ ID NO: 1924807 - DNA, 25 bp, Homo sapien
ctggtcatgatcaatatctccatct

SEQ ID NO: 1924808 - DNA, 25 bp, Homo sapien
tcacaatgcgtttctcaattcttgt

SEQ ID NO: 1924809 - DNA, 25 bp, Homo sapien
cctgtgatcacaatgcgtttctcaa

SEQ ID NO: 1924810 - DNA, 25 bp, Homo sapien
catatgatcccctgcattgctttac

SEQ ID NO: 1924811 - DNA, 25 bp, Homo sapien
gaatgcatttgtcaatggagcctaa

SEQ ID NO: 1924812 - DNA, 25 bp, Homo sapien
ggcattttgattccgctggcactgt

SEQ ID NO: 1924813 - DNA, 25 bp, Homo sapien
gcactgtctgtatcttacttggaag

SEQ ID NO: 1924814 - DNA, 25 bp, Homo sapien
tgttgacacggactcagatgtgatg

SEQ ID NO: 1924815 - DNA, 25 bp, Homo sapien
tcagatgtgatggtttgtgcggtca

SEQ ID NO: 1924816 - DNA, 25 bp, Homo sapien
tgtgtgtggttgtcgttgttgacac

SEQ ID NO: 1924817 - DNA, 25 bp, Homo sapien
ggtcagtaacgtgcccgaatcacca

SEQ ID NO: 1924818 - DNA, 25 bp, Homo sapien
taattaccatccaggagagcggctg

SEQ ID NO: 1924819 - DNA, 25 bp, Homo sapien
cactgacacgaggaaataactggac

SEQ ID NO: 1924820 - DNA, 25 bp, Homo sapien
tgaaaccgagtagaggcaaaaggct

SEQ ID NO: 1924821 - DNA, 25 bp, Homo sapien
tccacagtgaccagaagcgctgagt

SEQ ID NO: 1924822 - DNA, 25 bp, Homo sapien
cctttgtgaggcatcagaaattgtt

SEQ ID NO: 1924823 - DNA, 25 bp, Homo sapien
tcctttgtgaggcatcagaaattgt

SEQ ID NO: 1924824 - DNA, 25 bp, Homo sapien
tgtcctttgtgaggcatcagaaatt

SEQ ID NO: 1924825 - DNA, 25 bp, Homo sapien
tttgtgaggcatcagaaattgttac

SEQ ID NO: 1924826 - DNA, 25 bp, Homo sapien
gaaacatatccaaacacacactcat

SEQ ID NO: 1924827 - DNA, 25 bp, Homo sapien
tcacaaataatagtaagaaacatat

SEQ ID NO: 1924828 - DNA, 25 bp, Homo sapien
aactgggcgggcagaaaatccacaa

SEQ ID NO: 1924829 - DNA, 25 bp, Homo sapien
catttagtgtgaggaagcagtgcaa

SEQ ID NO: 1924830 - DNA, 25 bp, Homo sapien
gaaccacggtaatcagagactgctg

SEQ ID NO: 1924831 - DNA, 25 bp, Homo sapien
gaagcagctctagagtttggctccc

SEQ ID NO: 1924832 - DNA, 25 bp, Homo sapien
gacacctctccgttaactttctgtg

SEQ ID NO: 1924833 - DNA, 25 bp, Homo sapien
ctctccgttaactttctgtggctct

SEQ ID NO: 1924834 - DNA, 25 bp, Homo sapien
catgggacacctctccgttaacttt

SEQ ID NO: 1924835 - DNA, 25 bp, Homo sapien
acatgggacacctctccgttaactt

SEQ ID NO: 1924836 - DNA, 25 bp, Homo sapien
gagcgccttcgtgtacactcttctc

SEQ ID NO: 1924837 - DNA, 25 bp, Homo sapien
cttctctccgggtatcttttgggca

SEQ ID NO: 1924838 - DNA, 25 bp, Homo sapien
gtcttgcttaagagcgccttcgtgt

SEQ ID NO: 1924839 - DNA, 25 bp, Homo sapien
tcttctctccgggtatcttttgggc

SEQ ID NO: 1924840 - DNA, 25 bp, Homo sapien
tactgtgattacactggcacctgct

SEQ ID NO: 1924841 - DNA, 25 bp, Homo sapien
tttctactgtgattacactggcacc

SEQ ID NO: 1924842 - DNA, 25 bp, Homo sapien
tctactgtgattacactggcacctg

SEQ ID NO: 1924843 - DNA, 25 bp, Homo sapien
attttcctggatcactgtttctact

SEQ ID NO: 1924844 - DNA, 25 bp, Homo sapien
tctccccaggaccactcccaggtga

SEQ ID NO: 1924845 - DNA, 25 bp, Homo sapien
cagggaggtggagtctttttgtgtc

SEQ ID NO: 1924846 - DNA, 25 bp, Homo sapien
gtgtcacaggctccaccttacgaat

SEQ ID NO: 1924847 - DNA, 25 bp, Homo sapien
gtgccctcggtcactcggtggtggg

SEQ ID NO: 1924848 - DNA, 25 bp, Homo sapien
cctccactatattcagagtctcatg

SEQ ID NO: 1924849 - DNA, 25 bp, Homo sapien
tccactatattcagagtctcatgtg

SEQ ID NO: 1924850 - DNA, 25 bp, Homo sapien
tctcctccactatattcagagtctc

SEQ ID NO: 1924851 - DNA, 25 bp, Homo sapien
ctatattcagagtctcatgtgaact

SEQ ID NO: 1924852 - DNA, 25 bp, Homo sapien
cagtgcaaggcccttctgactcggg

SEQ ID NO: 1924853 - DNA, 25 bp, Homo sapien
ggctccagtgcaaggcccttctgac

SEQ ID NO: 1924854 - DNA, 25 bp, Homo sapien
gcccttctgactcgggagcacgtgt

SEQ ID NO: 1924855 - DNA, 25 bp, Homo sapien
gcaaggcccttctgactcgggagca

SEQ ID NO: 1924856 - DNA, 25 bp, Homo sapien
caacaaccactgaaacaaacatctg

SEQ ID NO: 1924857 - DNA, 25 bp, Homo sapien
caaccactgaaacaaacatctgaca

SEQ ID NO: 1924858 - DNA, 25 bp, Homo sapien
aacaaccactgaaacaaacatctga

SEQ ID NO: 1924859 - DNA, 25 bp, Homo sapien
ctcaacaaccactgaaacaaacatc

SEQ ID NO: 1924860 - DNA, 25 bp, Homo sapien
gccaggagccctatttattcacgaa

SEQ ID NO: 1924861 - DNA, 25 bp, Homo sapien
caaggtactaactggactggagcct

SEQ ID NO: 1924862 - DNA, 25 bp, Homo sapien
gactataaagtctagcctggaacgc

SEQ ID NO: 1924863 - DNA, 25 bp, Homo sapien
gacaaccatgagctgaagatcctaa

SEQ ID NO: 1924864 - DNA, 25 bp, Homo sapien
agaagcaggagaaacatccaatcta

SEQ ID NO: 1924865 - DNA, 25 bp, Homo sapien
tgaaaatctctctcatatgtggctt

SEQ ID NO: 1924866 - DNA, 25 bp, Homo sapien
ggagggaatggtgcctgaatattta

SEQ ID NO: 1924867 - DNA, 25 bp, Homo sapien
tatgtggcttttagtaacaggggaa

SEQ ID NO: 1924868 - DNA, 25 bp, Homo sapien
ctgtccaagtggtggctgaagtgaa

SEQ ID NO: 1924869 - DNA, 25 bp, Homo sapien
ctgaagtgaaggtggctttcatgct

SEQ ID NO: 1924870 - DNA, 25 bp, Homo sapien
gaaggtgcattagcgctcacaacag

SEQ ID NO: 1924871 - DNA, 25 bp, Homo sapien
caagtgtgagaagggcgaggaagaa

SEQ ID NO: 1924872 - DNA, 25 bp, Homo sapien
gattctggagcaggcttatgaagag

SEQ ID NO: 1924873 - DNA, 25 bp, Homo sapien
gaattagcaataagtcagaacagac

SEQ ID NO: 1924874 - DNA, 25 bp, Homo sapien
agcagtgacctattggaagaaagga

SEQ ID NO: 1924875 - DNA, 25 bp, Homo sapien
ctggagcaggcttatgaagaggttt

SEQ ID NO: 1924876 - DNA, 25 bp, Homo sapien
gcttattcctgtgttacagcttggg

SEQ ID NO: 1924877 - DNA, 25 bp, Homo sapien
aatggcctcttcagtggcccctaca

SEQ ID NO: 1924878 - DNA, 25 bp, Homo sapien
ggcccctacacttgaaatgcttatt

SEQ ID NO: 1924879 - DNA, 25 bp, Homo sapien
ctttgcccttatctgcacattctgg

SEQ ID NO: 1924880 - DNA, 25 bp, Homo sapien
accactccaactcctacaatctccc

SEQ ID NO: 1924881 - DNA, 25 bp, Homo sapien
ccctcaccactccaactcctacaat

SEQ ID NO: 1924882 - DNA, 25 bp, Homo sapien
tcaccactccaactcctacaatctc

SEQ ID NO: 1924883 - DNA, 25 bp, Homo sapien
ttccctcaccactccaactcctaca

SEQ ID NO: 1924884 - DNA, 25 bp, Homo sapien
caacaaacattctgacagcagccca

SEQ ID NO: 1924885 - DNA, 25 bp, Homo sapien
gtacaacaaacattctgacagcagc

SEQ ID NO: 1924886 - DNA, 25 bp, Homo sapien
ctgtacaacaaacattctgacagca

SEQ ID NO: 1924887 - DNA, 25 bp, Homo sapien
caaacattctgacagcagcccacat

SEQ ID NO: 1924888 - DNA, 25 bp, Homo sapien
gctgtgtctggctcttaaacaatgg

SEQ ID NO: 1924889 - DNA, 25 bp, Homo sapien
cagcagaactgtccttagaaacttg

SEQ ID NO: 1924890 - DNA, 25 bp, Homo sapien
taaacaatggctcccaacctgcctg

SEQ ID NO: 1924891 - DNA, 25 bp, Homo sapien
gctcaatgagcaacgtgaaaattat

SEQ ID NO: 1924892 - DNA, 25 bp, Homo sapien
taaagtcctcattatacacatggag

SEQ ID NO: 1924893 - DNA, 25 bp, Homo sapien
tactctggtaaagtcaaaacactcc

SEQ ID NO: 1924894 - DNA, 25 bp, Homo sapien
cgagaacccctgcagaattaacagt

SEQ ID NO: 1924895 - DNA, 25 bp, Homo sapien
agtttcctactgcaaaaatccaagg

SEQ ID NO: 1924896 - DNA, 25 bp, Homo sapien
tagcttcatgacattatctttctca

SEQ ID NO: 1924897 - DNA, 25 bp, Homo sapien
tctcatttgcaatgttctgaaaata

SEQ ID NO: 1924898 - DNA, 25 bp, Homo sapien
aatatgtcacttggtttagcttcat

SEQ ID NO: 1924899 - DNA, 25 bp, Homo sapien
cacttggtttagcttcatgacatta

SEQ ID NO: 1924900 - DNA, 25 bp, Homo sapien
taagatcgtgacatgacctagggtc

SEQ ID NO: 1924901 - DNA, 25 bp, Homo sapien
caaccctgctacgtgttctgatgaa

SEQ ID NO: 1924902 - DNA, 25 bp, Homo sapien
aaattttctaatcaccagccgggtg

SEQ ID NO: 1924903 - DNA, 25 bp, Homo sapien
tgtggctcgtccttacacgtggata

SEQ ID NO: 1924904 - DNA, 25 bp, Homo sapien
tggctgtggatagaaacaaaaggaa

SEQ ID NO: 1924905 - DNA, 25 bp, Homo sapien
aaaaaattttagtatgacacacagg

SEQ ID NO: 1924906 - DNA, 25 bp, Homo sapien
aaagaaatcttatggctgtggatag

SEQ ID NO: 1924907 - DNA, 25 bp, Homo sapien
caagagtagatccaagggtgcaagg

SEQ ID NO: 1924908 - DNA, 25 bp, Homo sapien
gaaaaccttggcatggcatcagacc

SEQ ID NO: 1924909 - DNA, 25 bp, Homo sapien
ctggaatagactgctgaaattgaca

SEQ ID NO: 1924910 - DNA, 25 bp, Homo sapien
gacccagtgtgggtcaatgacacac

SEQ ID NO: 1924911 - DNA, 25 bp, Homo sapien
catattgtcggcatcaggtacttct

SEQ ID NO: 1924912 - DNA, 25 bp, Homo sapien
gaagttcttggtcaataacaggagg

SEQ ID NO: 1924913 - DNA, 25 bp, Homo sapien
tatgatcactgtccgctcaagtatg

SEQ ID NO: 1924914 - DNA, 25 bp, Homo sapien
caagctttcaacagggctcatcggt

SEQ ID NO: 1924915 - DNA, 25 bp, Homo sapien
caagtatgataaacgagcccatgga

SEQ ID NO: 1924916 - DNA, 25 bp, Homo sapien
cggctcaggtgtggattccataaaa

SEQ ID NO: 1924917 - DNA, 25 bp, Homo sapien
aaattgcgcttgagttcactaatgc

SEQ ID NO: 1924918 - DNA, 25 bp, Homo sapien
cagaggtgtgatacgtcgtttttcc

SEQ ID NO: 1924919 - DNA, 25 bp, Homo sapien
cccattcattagggcgcggctcagg

SEQ ID NO: 1924920 - DNA, 25 bp, Homo sapien
tatacaagaaaaactaccaggtcca

SEQ ID NO: 1924921 - DNA, 25 bp, Homo sapien
gcaactgccagatcgtccttataca

SEQ ID NO: 1924922 - DNA, 25 bp, Homo sapien
aataacacttccttccagtacctgg

SEQ ID NO: 1924923 - DNA, 25 bp, Homo sapien
cagactggtctcatgtacttgccaa

SEQ ID NO: 1924924 - DNA, 25 bp, Homo sapien
gccgggcagccattaggacagagtt

SEQ ID NO: 1924925 - DNA, 25 bp, Homo sapien
caccgtgcttgaagaacattgccag

SEQ ID NO: 1924926 - DNA, 25 bp, Homo sapien
ctggtaacatgcactcccgagctga

SEQ ID NO: 1924927 - DNA, 25 bp, Homo sapien
cttgaaaggaacaccgtcaggctgg

SEQ ID NO: 1924928 - DNA, 25 bp, Homo sapien
tattatccccttctactctcaagga

SEQ ID NO: 1924929 - DNA, 25 bp, Homo sapien
aatattatccccttctactctcaag

SEQ ID NO: 1924930 - DNA, 25 bp, Homo sapien
taaatattatccccttctactctca

SEQ ID NO: 1924931 - DNA, 25 bp, Homo sapien
atattatccccttctactctcaagg

SEQ ID NO: 1924932 - DNA, 25 bp, Homo sapien
ttatgaacttaaagccacaacaaac

SEQ ID NO: 1924933 - DNA, 25 bp, Homo sapien
cagagttcgacagtctaagacatta

SEQ ID NO: 1924934 - DNA, 25 bp, Homo sapien
aaagaggaatacaaatcttatgaac

SEQ ID NO: 1924935 - DNA, 25 bp, Homo sapien
caaaatgacccagagttcgacagtc

SEQ ID NO: 1924936 - DNA, 25 bp, Homo sapien
ctcttccagctgcgtttcctcttct

SEQ ID NO: 1924937 - DNA, 25 bp, Homo sapien
tcttccagctgcgtttcctcttctt

SEQ ID NO: 1924938 - DNA, 25 bp, Homo sapien
ccagctgcgtttcctcttcttccat

SEQ ID NO: 1924939 - DNA, 25 bp, Homo sapien
ttccagctgcgtttcctcttcttcc

SEQ ID NO: 1924940 - DNA, 25 bp, Homo sapien
gtttgcaaaatggagagaccctgta

SEQ ID NO: 1924941 - DNA, 25 bp, Homo sapien
gaggccctcagaagatgcagaatat

SEQ ID NO: 1924942 - DNA, 25 bp, Homo sapien
gaatatgaggcactaaatcaccagg

SEQ ID NO: 1924943 - DNA, 25 bp, Homo sapien
taaataaaggagcactatgaggccc

SEQ ID NO: 1924944 - DNA, 25 bp, Homo sapien
gaatccaagaccaaatcaggcatag

SEQ ID NO: 1924945 - DNA, 25 bp, Homo sapien
ccagatagcagagggatagagccag

SEQ ID NO: 1924946 - DNA, 25 bp, Homo sapien
cataagaaacattaaaggaggcggc

SEQ ID NO: 1924947 - DNA, 25 bp, Homo sapien
cagacagaagtagcccaaagatgag

SEQ ID NO: 1924948 - DNA, 25 bp, Homo sapien
gtacggtggatgagaggtgaaggtg

SEQ ID NO: 1924949 - DNA, 25 bp, Homo sapien
ttcagggacaggcaataggtttggg

SEQ ID NO: 1924950 - DNA, 25 bp, Homo sapien
aaaaagatgaagtacggtggatgag

SEQ ID NO: 1924951 - DNA, 25 bp, Homo sapien
tgaagtacggtggatgagaggtgaa

SEQ ID NO: 1924952 - DNA, 25 bp, Homo sapien
gacaagtccaggtccataggctgaa

SEQ ID NO: 1924953 - DNA, 25 bp, Homo sapien
aggtccataggctgaaatctcccca

SEQ ID NO: 1924954 - DNA, 25 bp, Homo sapien
tcataagactttggtccatgacacc

SEQ ID NO: 1924955 - DNA, 25 bp, Homo sapien
catcttgtaccacggcaatgctgac

SEQ ID NO: 1924956 - DNA, 25 bp, Homo sapien
tagaagtgcgctcaaagtgtggtgc

SEQ ID NO: 1924957 - DNA, 25 bp, Homo sapien
tggagacccgtttactagaagtgcg

SEQ ID NO: 1924958 - DNA, 25 bp, Homo sapien
tccatctagactcctggagacccgt

SEQ ID NO: 1924959 - DNA, 25 bp, Homo sapien
gggtgcggccactatagcgaaattt

SEQ ID NO: 1924960 - DNA, 25 bp, Homo sapien
cagagaggttggtatcacggtgaca

SEQ ID NO: 1924961 - DNA, 25 bp, Homo sapien
cagcacaggtccaaaactggtgagg

SEQ ID NO: 1924962 - DNA, 25 bp, Homo sapien
tgcctagggactcacgaggaccatg

SEQ ID NO: 1924963 - DNA, 25 bp, Homo sapien
gacacagctcgtatttggtagaaca

SEQ ID NO: 1924964 - DNA, 25 bp, Homo sapien
tagaaagtatgatgctccacgcaca

SEQ ID NO: 1924965 - DNA, 25 bp, Homo sapien
tccatagtcttttcgctgcccggtg

SEQ ID NO: 1924966 - DNA, 25 bp, Homo sapien
gaatccaatggtactctcaaactgt

SEQ ID NO: 1924967 - DNA, 25 bp, Homo sapien
gcccggtggtttggcagtttgaatc

SEQ ID NO: 1924968 - DNA, 25 bp, Homo sapien
ataaatccgtaaaacaaatcagcat

SEQ ID NO: 1924969 - DNA, 25 bp, Homo sapien
aataaatccgtaaaacaaatcagca

SEQ ID NO: 1924970 - DNA, 25 bp, Homo sapien
tggaataaatccgtaaaacaaatca

SEQ ID NO: 1924971 - DNA, 25 bp, Homo sapien
gaataaatccgtaaaacaaatcagc

SEQ ID NO: 1924972 - DNA, 25 bp, Homo sapien
tcgcagtctgtctttgtaaatgaga

SEQ ID NO: 1924973 - DNA, 25 bp, Homo sapien
gtagaagttactgcgtttataggaa

SEQ ID NO: 1924974 - DNA, 25 bp, Homo sapien
tctgccggtctgactttaatgtaga

SEQ ID NO: 1924975 - DNA, 25 bp, Homo sapien
ttttcggccaagcaaaacgattgat

SEQ ID NO: 1924976 - DNA, 25 bp, Homo sapien
gaagagttacggcaacatgaccata

SEQ ID NO: 1924977 - DNA, 25 bp, Homo sapien
agtgtccttcaaaaggcgtaatgca

SEQ ID NO: 1924978 - DNA, 25 bp, Homo sapien
taatgcatatgttctcaagctccac

SEQ ID NO: 1924979 - DNA, 25 bp, Homo sapien
catgaccataagacacagtgtcctt

SEQ ID NO: 1924980 - DNA, 25 bp, Homo sapien
taggtcaacaccatacatggaaagc

SEQ ID NO: 1924981 - DNA, 25 bp, Homo sapien
gaactgggaatcagcttgtgctggc

SEQ ID NO: 1924982 - DNA, 25 bp, Homo sapien
aactgggaatcagcttgtgctggcg

SEQ ID NO: 1924983 - DNA, 25 bp, Homo sapien
cttggcatgatgtaggtcaacacca

SEQ ID NO: 1924984 - DNA, 25 bp, Homo sapien
gaattcactgaggtcgatgctgcca

SEQ ID NO: 1924985 - DNA, 25 bp, Homo sapien
ttccagctccttagtctgagtaggg

SEQ ID NO: 1924986 - DNA, 25 bp, Homo sapien
tgttcttctgggtcatagtcaccaa

SEQ ID NO: 1924987 - DNA, 25 bp, Homo sapien
tgagtcacaaaagagcagggcaggc

SEQ ID NO: 1924988 - DNA, 25 bp, Homo sapien
aaggatcaggaggataaaacttcac

SEQ ID NO: 1924989 - DNA, 25 bp, Homo sapien
ttaaaagtgaatagccatggaaggt

SEQ ID NO: 1924990 - DNA, 25 bp, Homo sapien
tcacattaaaagtgaatagccatgg

SEQ ID NO: 1924991 - DNA, 25 bp, Homo sapien
ttcagtcaattgagaaggatcagga

SEQ ID NO: 1924992 - DNA, 25 bp, Homo sapien
gctgtattgtgccataaagaatgaa

SEQ ID NO: 1924993 - DNA, 25 bp, Homo sapien
aatccaaataattccactagcctga

SEQ ID NO: 1924994 - DNA, 25 bp, Homo sapien
tgaagaaggtgttaaaagagatccc

SEQ ID NO: 1924995 - DNA, 25 bp, Homo sapien
tcgtatataacatacacttggctgt

SEQ ID NO: 1924996 - DNA, 25 bp, Homo sapien
tttgggtcacttggcaggtctggtt

SEQ ID NO: 1924997 - DNA, 25 bp, Homo sapien
cacttggcaggtctggtttcagaga

SEQ ID NO: 1924998 - DNA, 25 bp, Homo sapien
cgtaacctttttgaatgcatgcact

SEQ ID NO: 1924999 - DNA, 25 bp, Homo sapien
gaaagtgtaagaactaagcatccgt

SEQ ID NO: 1925000 - DNA, 25 bp, Homo sapien
tttctttagcaggatctaaccagtt

SEQ ID NO: 1925001 - DNA, 25 bp, Homo sapien
ctctttatttctttagcaggatcta

SEQ ID NO: 1925002 - DNA, 25 bp, Homo sapien
tttatttctttagcaggatctaacc

SEQ ID NO: 1925003 - DNA, 25 bp, Homo sapien
agttgtctctttatttctttagcag

SEQ ID NO: 1925004 - DNA, 25 bp, Homo sapien
gcagagccgcatggcccctcgggtt

SEQ ID NO: 1925005 - DNA, 25 bp, Homo sapien
taaaacagtaagatgctgtgaaagc

SEQ ID NO: 1925006 - DNA, 25 bp, Homo sapien
tgctgtgaaagcagagccgcatggc

SEQ ID NO: 1925007 - DNA, 25 bp, Homo sapien
tcgggtttcactactgttcatggcc

SEQ ID NO: 1925008 - DNA, 25 bp, Homo sapien
tagctaaagtcaaagttatttccat

SEQ ID NO: 1925009 - DNA, 25 bp, Homo sapien
atagctaaagtcaaagttatttcca

SEQ ID NO: 1925010 - DNA, 25 bp, Homo sapien
gagattgaggtgttcacacactttg

SEQ ID NO: 1925011 - DNA, 25 bp, Homo sapien
aaataacacttgtcccttggcatgt

SEQ ID NO: 1925012 - DNA, 25 bp, Homo sapien
ttctccaagagattgaggtgttcac

SEQ ID NO: 1925013 - DNA, 25 bp, Homo sapien
gtctttctccaagagattgaggtgt

SEQ ID NO: 1925014 - DNA, 25 bp, Homo sapien
cacagctgcgccaagaatatgatat

SEQ ID NO: 1925015 - DNA, 25 bp, Homo sapien
gctacctcagagctcacgtgagaat

SEQ ID NO: 1925016 - DNA, 25 bp, Homo sapien
ggaccagttcctctatcggacctag

SEQ ID NO: 1925017 - DNA, 25 bp, Homo sapien
tcaacgaactcaaaatctggaagga

SEQ ID NO: 1925018 - DNA, 25 bp, Homo sapien
caaatggacaggatatgacaaagct

SEQ ID NO: 1925019 - DNA, 25 bp, Homo sapien
gggtctacaaatatctcatcagagt

SEQ ID NO: 1925020 - DNA, 25 bp, Homo sapien
gaaagaacttcacagacatggagaa

SEQ ID NO: 1925021 - DNA, 25 bp, Homo sapien
taagaaagctcaatgaatccctagc

SEQ ID NO: 1925022 - DNA, 25 bp, Homo sapien
gggtttcctagtcttgcacattcct

SEQ ID NO: 1925023 - DNA, 25 bp, Homo sapien
tgcacattcctccactaagacatca

SEQ ID NO: 1925024 - DNA, 25 bp, Homo sapien
tatgcagaaaggacagggggtttcc

SEQ ID NO: 1925025 - DNA, 25 bp, Homo sapien
acatcactttcgctgtcatttcttc

SEQ ID NO: 1925026 - DNA, 25 bp, Homo sapien
ccggcagattgtagtgaatgccaca

SEQ ID NO: 1925027 - DNA, 25 bp, Homo sapien
tgaatgccacacaccactggcgttt

SEQ ID NO: 1925028 - DNA, 25 bp, Homo sapien
cacaccactggcgttttataaacac

SEQ ID NO: 1925029 - DNA, 25 bp, Homo sapien
tgtagtgaatgccacacaccactgg

SEQ ID NO: 1925030 - DNA, 25 bp, Homo sapien
cactgtctccgtgtagggccctcca

SEQ ID NO: 1925031 - DNA, 25 bp, Homo sapien
ctgtctccgtgtagggccctccaca

SEQ ID NO: 1925032 - DNA, 25 bp, Homo sapien
actgtctccgtgtagggccctccac

SEQ ID NO: 1925033 - DNA, 25 bp, Homo sapien
catggccctgaaccgtgcctttcaa

SEQ ID NO: 1925034 - DNA, 25 bp, Homo sapien
gacaagcaacttctaggcaatctag

SEQ ID NO: 1925035 - DNA, 25 bp, Homo sapien
tcttagaaggcagtacaggtaattc

SEQ ID NO: 1925036 - DNA, 25 bp, Homo sapien
tacaactatgtaaggaggaaactct

SEQ ID NO: 1925037 - DNA, 25 bp, Homo sapien
gctcaaccccatgatggctgtactc

SEQ ID NO: 1925038 - DNA, 25 bp, Homo sapien
aacattagcctgctcaaccccatga

SEQ ID NO: 1925039 - DNA, 25 bp, Homo sapien
cactggaattgggaaacattagcct

SEQ ID NO: 1925040 - DNA, 25 bp, Homo sapien
gatggctgtactctgggctccactc

SEQ ID NO: 1925041 - DNA, 25 bp, Homo sapien
tagattacaacattagcgggttaga

SEQ ID NO: 1925042 - DNA, 25 bp, Homo sapien
tatccaaggcttttctaggtaatgg

SEQ ID NO: 1925043 - DNA, 25 bp, Homo sapien
taattgctgtaactaactcgggaaa

SEQ ID NO: 1925044 - DNA, 25 bp, Homo sapien
actttatgaggatagaatacaaccc

SEQ ID NO: 1925045 - DNA, 25 bp, Homo sapien
ctctgccccatggagtcaagtgatt

SEQ ID NO: 1925046 - DNA, 25 bp, Homo sapien
cactttacactggacagttttggtc

SEQ ID NO: 1925047 - DNA, 25 bp, Homo sapien
cttggtgactttttgagatgccttc

SEQ ID NO: 1925048 - DNA, 25 bp, Homo sapien
tccaggtcacagctgtattcggtgc

SEQ ID NO: 1925049 - DNA, 25 bp, Homo sapien
tattcggtgccatctaagagggtca

SEQ ID NO: 1925050 - DNA, 25 bp, Homo sapien
ctttatctaagacctgttcttcaac

SEQ ID NO: 1925051 - DNA, 25 bp, Homo sapien
ttatctaagacctgttcttcaacaa

SEQ ID NO: 1925052 - DNA, 25 bp, Homo sapien
ctctttatctaagacctgttcttca

SEQ ID NO: 1925053 - DNA, 25 bp, Homo sapien
tctttatctaagacctgttcttcaa

SEQ ID NO: 1925054 - DNA, 25 bp, Homo sapien
tcctccatctttggccactactaag

SEQ ID NO: 1925055 - DNA, 25 bp, Homo sapien
cactactaaggtatatgacttttgc

SEQ ID NO: 1925056 - DNA, 25 bp, Homo sapien
catggcggtatgaaccgagaaatac

SEQ ID NO: 1925057 - DNA, 25 bp, Homo sapien
ttttgcttcttaagccatggcggta

SEQ ID NO: 1925058 - DNA, 25 bp, Homo sapien
tctctctcttctggcggcgtagact

SEQ ID NO: 1925059 - DNA, 25 bp, Homo sapien
cggcgtagactactttggctttcag

SEQ ID NO: 1925060 - DNA, 25 bp, Homo sapien
ccctgctctccgatgtttccttctc

SEQ ID NO: 1925061 - DNA, 25 bp, Homo sapien
tcttctggcggcgtagactactttg

SEQ ID NO: 1925062 - DNA, 25 bp, Homo sapien
ctggatcggaagactgattctgctg

SEQ ID NO: 1925063 - DNA, 25 bp, Homo sapien
gatcggaagactgattctgctgatt

SEQ ID NO: 1925064 - DNA, 25 bp, Homo sapien
tcggaagactgattctgctgatttt

SEQ ID NO: 1925065 - DNA, 25 bp, Homo sapien
tggatcggaagactgattctgctga

SEQ ID NO: 1925066 - DNA, 25 bp, Homo sapien
gttcctaactggctagagtccttct

SEQ ID NO: 1925067 - DNA, 25 bp, Homo sapien
tctgttcctaactggctagagtcct

SEQ ID NO: 1925068 - DNA, 25 bp, Homo sapien
ttgcatctgttcctaactggctaga

SEQ ID NO: 1925069 - DNA, 25 bp, Homo sapien
cctaactggctagagtccttcttca

SEQ ID NO: 1925070 - DNA, 25 bp, Homo sapien
ggagactgttgctcgaacttttaga

SEQ ID NO: 1925071 - DNA, 25 bp, Homo sapien
tagaattctctatcagcatcacaga

SEQ ID NO: 1925072 - DNA, 25 bp, Homo sapien
gacccaaaactagcatcacaataga

SEQ ID NO: 1925073 - DNA, 25 bp, Homo sapien
tctgtgttccaatattaaatcccgt

SEQ ID NO: 1925074 - DNA, 25 bp, Homo sapien
catgctccatctgggttgataaaag

SEQ ID NO: 1925075 - DNA, 25 bp, Homo sapien
gttggcatgctccatctgggttgat

SEQ ID NO: 1925076 - DNA, 25 bp, Homo sapien
gcatgctccatctgggttgataaaa

SEQ ID NO: 1925077 - DNA, 25 bp, Homo sapien
catgttggcatgctccatctgggtt

SEQ ID NO: 1925078 - DNA, 25 bp, Homo sapien
gatatagagcatccctaacagtgtc

SEQ ID NO: 1925079 - DNA, 25 bp, Homo sapien
ggcattcaacgtctggagtccacca

SEQ ID NO: 1925080 - DNA, 25 bp, Homo sapien
cagtaagtcgcaatgaagcaaggat

SEQ ID NO: 1925081 - DNA, 25 bp, Homo sapien
taaaaaaggaatcgcagaggtcatc

SEQ ID NO: 1925082 - DNA, 25 bp, Homo sapien
ttaagcacatcaagcccgctgtctg

SEQ ID NO: 1925083 - DNA, 25 bp, Homo sapien
atcaagcccgctgtctgctatttcc

SEQ ID NO: 1925084 - DNA, 25 bp, Homo sapien
taagcacatcaagcccgctgtctgc

SEQ ID NO: 1925085 - DNA, 25 bp, Homo sapien
cacatcaagcccgctgtctgctatt

SEQ ID NO: 1925086 - DNA, 25 bp, Homo sapien
cacttaacggaagcacctgatggct

SEQ ID NO: 1925087 - DNA, 25 bp, Homo sapien
gcttctacaacatggagccactggg

SEQ ID NO: 1925088 - DNA, 25 bp, Homo sapien
tactaagtaactgacaagtggctgc

SEQ ID NO: 1925089 - DNA, 25 bp, Homo sapien
atagtcagtctgatcaccaagccgg

SEQ ID NO: 1925090 - DNA, 25 bp, Homo sapien
tttgttacaatatacttaacttgga

SEQ ID NO: 1925091 - DNA, 25 bp, Homo sapien
tttactacccatcataaagttttca

SEQ ID NO: 1925092 - DNA, 25 bp, Homo sapien
gcatcatcccttatgcagattaagt

SEQ ID NO: 1925093 - DNA, 25 bp, Homo sapien
tactgctagtgtaactgtaaatttg

SEQ ID NO: 1925094 - DNA, 25 bp, Homo sapien
tgaacttcccagtcggtctataaaa

SEQ ID NO: 1925095 - DNA, 25 bp, Homo sapien
tcccatctaccaatcgtcatgcaag

SEQ ID NO: 1925096 - DNA, 25 bp, Homo sapien
tacttcctgaacaaacatggacagg

SEQ ID NO: 1925097 - DNA, 25 bp, Homo sapien
ggacaggagtttcatgactcttcaa

SEQ ID NO: 1925098 - DNA, 25 bp, Homo sapien
gatgtcagattcttactaataatct

SEQ ID NO: 1925099 - DNA, 25 bp, Homo sapien
aggatagatgtcagattcttactaa

SEQ ID NO: 1925100 - DNA, 25 bp, Homo sapien
ttactaataatctcaatgccttttc

SEQ ID NO: 1925101 - DNA, 25 bp, Homo sapien
gattcttactaataatctcaatgcc

SEQ ID NO: 1925102 - DNA, 25 bp, Homo sapien
tcatgttctgagatagtagtaatgg

SEQ ID NO: 1925103 - DNA, 25 bp, Homo sapien
ctgagatagtagtaatggttgaaca

SEQ ID NO: 1925104 - DNA, 25 bp, Homo sapien
gctcatgttctgagatagtagtaat

SEQ ID NO: 1925105 - DNA, 25 bp, Homo sapien
tgttctgagatagtagtaatggttg

SEQ ID NO: 1925106 - DNA, 25 bp, Homo sapien
aaaataggctcaggtggaagtacca

SEQ ID NO: 1925107 - DNA, 25 bp, Homo sapien
ccataggagttgaagtctaaatagc

SEQ ID NO: 1925108 - DNA, 25 bp, Homo sapien
tactgagtttgaagtgatgtaacac

SEQ ID NO: 1925109 - DNA, 25 bp, Homo sapien
aaataatgccaagattcaaggccag

SEQ ID NO: 1925110 - DNA, 25 bp, Homo sapien
ccaatcagtgtagtataccaaggag

SEQ ID NO: 1925111 - DNA, 25 bp, Homo sapien
cccatctgccatgttagtaatgtgt

SEQ ID NO: 1925112 - DNA, 25 bp, Homo sapien
tcagctctgttggacttgatatagc

SEQ ID NO: 1925113 - DNA, 25 bp, Homo sapien
gaaaggtcttactactgggcatcca

SEQ ID NO: 1925114 - DNA, 25 bp, Homo sapien
taaaccatagatctcctcagaactc

SEQ ID NO: 1925115 - DNA, 25 bp, Homo sapien
tgggtaaaccatagatctcctcaga

SEQ ID NO: 1925116 - DNA, 25 bp, Homo sapien
atttatcagtaataaattcgctggg

SEQ ID NO: 1925117 - DNA, 25 bp, Homo sapien
taaattcgctgggtaaaccatagat

SEQ ID NO: 1925118 - DNA, 25 bp, Homo sapien
tctggcaggcctgtgaacgacttgt

SEQ ID NO: 1925119 - DNA, 25 bp, Homo sapien
gatgtcattaccagccatgggtctg

SEQ ID NO: 1925120 - DNA, 25 bp, Homo sapien
tgggtctgaactgtccctggaatgc

SEQ ID NO: 1925121 - DNA, 25 bp, Homo sapien
tatttgactggctctgcttaggaag

SEQ ID NO: 1925122 - DNA, 25 bp, Homo sapien
tcagcatcatcaaagtacatctgta

SEQ ID NO: 1925123 - DNA, 25 bp, Homo sapien
gtttatcagcttatcagcatcatca

SEQ ID NO: 1925124 - DNA, 25 bp, Homo sapien
ccaggctatctttcatctccataaa

SEQ ID NO: 1925125 - DNA, 25 bp, Homo sapien
aaaatgttggtaaaccaggctatct

SEQ ID NO: 1925126 - DNA, 25 bp, Homo sapien
tatcctttaagagtatacaaaagtc

SEQ ID NO: 1925127 - DNA, 25 bp, Homo sapien
gaaataccgtacaagcagcaaagca

SEQ ID NO: 1925128 - DNA, 25 bp, Homo sapien
ttcaaattgtatgcagtacacaggg

SEQ ID NO: 1925129 - DNA, 25 bp, Homo sapien
aagtggatcaaagcaaagccgttca

SEQ ID NO: 1925130 - DNA, 25 bp, Homo sapien
tgaccaatggatagaggaacctctc

SEQ ID NO: 1925131 - DNA, 25 bp, Homo sapien
tcaagaataaagtcggcaagaggca

SEQ ID NO: 1925132 - DNA, 25 bp, Homo sapien
tcatagcacgacatggccaggctga

SEQ ID NO: 1925133 - DNA, 25 bp, Homo sapien
aggaccccgtgctctatgcttacag

SEQ ID NO: 1925134 - DNA, 25 bp, Homo sapien
tttcctaacacgcagaagaagggag

SEQ ID NO: 1925135 - DNA, 25 bp, Homo sapien
gaaaagcatccgagacctctgttgg

SEQ ID NO: 1925136 - DNA, 25 bp, Homo sapien
gcttaagcatgctaccagtttggga

SEQ ID NO: 1925137 - DNA, 25 bp, Homo sapien
taagctggcacaatatcctacaggg

SEQ ID NO: 1925138 - DNA, 25 bp, Homo sapien
gcatgtactaccaattcataggatg

SEQ ID NO: 1925139 - DNA, 25 bp, Homo sapien
taggtatactctttgagtggtttta

SEQ ID NO: 1925140 - DNA, 25 bp, Homo sapien
gaaaagcctctgcatgtactaccaa

SEQ ID NO: 1925141 - DNA, 25 bp, Homo sapien
gaaccagaagatgatgaaaagcctc

SEQ ID NO: 1925142 - DNA, 25 bp, Homo sapien
gatgacatgcctgggaattgcttcc

SEQ ID NO: 1925143 - DNA, 25 bp, Homo sapien
ggacagaaccaatagattaaagaga

SEQ ID NO: 1925144 - DNA, 25 bp, Homo sapien
gaagagacctatcacaatcgcaatg

SEQ ID NO: 1925145 - DNA, 25 bp, Homo sapien
caatgtatgtacctaacttggatcc

SEQ ID NO: 1925146 - DNA, 25 bp, Homo sapien
atttctaaaacaattgagacatttt

SEQ ID NO: 1925147 - DNA, 25 bp, Homo sapien
caggcactggtcaccatgcctaact

SEQ ID NO: 1925148 - DNA, 25 bp, Homo sapien
aaacaattgagacatttttgacaaa

SEQ ID NO: 1925149 - DNA, 25 bp, Homo sapien
atgcctaactaagtttactttgtat

SEQ ID NO: 1925150 - DNA, 25 bp, Homo sapien
accattaattggctgagtgaccctg

SEQ ID NO: 1925151 - DNA, 25 bp, Homo sapien
tctgattcaagatagttacccgtgg

SEQ ID NO: 1925152 - DNA, 25 bp, Homo sapien
catttcaaggtactcaagtggagac

SEQ ID NO: 1925153 - DNA, 25 bp, Homo sapien
gaaattccggtcactacagattcag

SEQ ID NO: 1925154 - DNA, 25 bp, Homo sapien
tagaagcaactaaacagagtactgg

SEQ ID NO: 1925155 - DNA, 25 bp, Homo sapien
aaatggtccccaaaagcgaaggctg

SEQ ID NO: 1925156 - DNA, 25 bp, Homo sapien
agctctgtctaccttcagggctcaa

SEQ ID NO: 1925157 - DNA, 25 bp, Homo sapien
cattgtctagcgtataaccactgcc

SEQ ID NO: 1925158 - DNA, 25 bp, Homo sapien
cctgagagcctgaagaattggaggt

SEQ ID NO: 1925159 - DNA, 25 bp, Homo sapien
gagaaagagcatccttcaaatggct

SEQ ID NO: 1925160 - DNA, 25 bp, Homo sapien
taagagcaaccaaactgagagtgga

SEQ ID NO: 1925161 - DNA, 25 bp, Homo sapien
gggcctacgagaaacaagttgattg

SEQ ID NO: 1925162 - DNA, 25 bp, Homo sapien
tataaagcaccctggagaatgccat

SEQ ID NO: 1925163 - DNA, 25 bp, Homo sapien
caagatggtgctgcaaaaaagaagc

SEQ ID NO: 1925164 - DNA, 25 bp, Homo sapien
gatactgcagatgccaacaaattgc

SEQ ID NO: 1925165 - DNA, 25 bp, Homo sapien
caaaaaactacatgggcgaacccag

SEQ ID NO: 1925166 - DNA, 25 bp, Homo sapien
cgctcgccgcgggacccgtccctct

SEQ ID NO: 1925167 - DNA, 25 bp, Homo sapien
tccctccgctaggtttcaaattgaa

SEQ ID NO: 1925168 - DNA, 25 bp, Homo sapien
ctcaggagctcgctcgccgcgggac

SEQ ID NO: 1925169 - DNA, 25 bp, Homo sapien
ctgactggggccgtcagaggactct

SEQ ID NO: 1925170 - DNA, 25 bp, Homo sapien
gcaggcacgtttgagctccattaca

SEQ ID NO: 1925171 - DNA, 25 bp, Homo sapien
aacattgaaccaccctgatggagcc

SEQ ID NO: 1925172 - DNA, 25 bp, Homo sapien
tctgcgttgaagtacatgaatcact

SEQ ID NO: 1925173 - DNA, 25 bp, Homo sapien
taaagtcatataagcttttgggccc

SEQ ID NO: 1925174 - DNA, 25 bp, Homo sapien
aaattactagccctcctatacacag

SEQ ID NO: 1925175 - DNA, 25 bp, Homo sapien
actagccctcctatacacagtcaag

SEQ ID NO: 1925176 - DNA, 25 bp, Homo sapien
aattactagccctcctatacacagt

SEQ ID NO: 1925177 - DNA, 25 bp, Homo sapien
ttactagccctcctatacacagtca

SEQ ID NO: 1925178 - DNA, 25 bp, Homo sapien
ttttactctcagtggtatgataacc

SEQ ID NO: 1925179 - DNA, 25 bp, Homo sapien
cttttactctcagtggtatgataac

SEQ ID NO: 1925180 - DNA, 25 bp, Homo sapien
tttactctcagtggtatgataaccc

SEQ ID NO: 1925181 - DNA, 25 bp, Homo sapien
ttactctcagtggtatgataaccct

SEQ ID NO: 1925182 - DNA, 25 bp, Homo sapien
caatcttcgttcagaactatcatac

SEQ ID NO: 1925183 - DNA, 25 bp, Homo sapien
tcaatcttcgttcagaactatcata

SEQ ID NO: 1925184 - DNA, 25 bp, Homo sapien
tcttgccaggaccttccaaggagcc

SEQ ID NO: 1925185 - DNA, 25 bp, Homo sapien
ccaggaccttccaaggagcctcaga

SEQ ID NO: 1925186 - DNA, 25 bp, Homo sapien
accttccaaggagcctcagaattgt

SEQ ID NO: 1925187 - DNA, 25 bp, Homo sapien
ctatcttgccaggaccttccaagga

SEQ ID NO: 1925188 - DNA, 25 bp, Homo sapien
tcgcttgaatgccaggtaggtctct

SEQ ID NO: 1925189 - DNA, 25 bp, Homo sapien
tccagtgtgcactcgcttgaatgcc

SEQ ID NO: 1925190 - DNA, 25 bp, Homo sapien
ctgattccctcacacttccagtgtg

SEQ ID NO: 1925191 - DNA, 25 bp, Homo sapien
ccaaccaggcaaggggactgtccat

SEQ ID NO: 1925192 - DNA, 25 bp, Homo sapien
tgagattgactgatgaaaagtatga

SEQ ID NO: 1925193 - DNA, 25 bp, Homo sapien
gtgagattgactgatgaaaagtatg

SEQ ID NO: 1925194 - DNA, 25 bp, Homo sapien
gagattgactgatgaaaagtatgac

SEQ ID NO: 1925195 - DNA, 25 bp, Homo sapien
ttggccgtgtcttgtagaactgcat

SEQ ID NO: 1925196 - DNA, 25 bp, Homo sapien
tgtactgatatttggccgtgtcttg

SEQ ID NO: 1925197 - DNA, 25 bp, Homo sapien
aagggtcccagttagctttgtactg

SEQ ID NO: 1925198 - DNA, 25 bp, Homo sapien
ttagctttgtactgatatttggccg

SEQ ID NO: 1925199 - DNA, 25 bp, Homo sapien
taaatgagggctgccaaaggccgtc

SEQ ID NO: 1925200 - DNA, 25 bp, Homo sapien
caatctcgcccttgaaagcgtggga

SEQ ID NO: 1925201 - DNA, 25 bp, Homo sapien
gaagacccagcgtcgcattgcagag

SEQ ID NO: 1925202 - DNA, 25 bp, Homo sapien
gctgcgccacgggaaataaatgagg

SEQ ID NO: 1925203 - DNA, 25 bp, Homo sapien
cctgactctctgtttaactatgttt

SEQ ID NO: 1925204 - DNA, 25 bp, Homo sapien
ctcaatgtatcttctcagctttctt

SEQ ID NO: 1925205 - DNA, 25 bp, Homo sapien
atacttctctcaatgtatcttctca

SEQ ID NO: 1925206 - DNA, 25 bp, Homo sapien
ttttagatttctggacctgactctc

SEQ ID NO: 1925207 - DNA, 25 bp, Homo sapien
gttctggtagatggaagctttctcc

SEQ ID NO: 1925208 - DNA, 25 bp, Homo sapien
gtggcacctccaacttccttcaggg

SEQ ID NO: 1925209 - DNA, 25 bp, Homo sapien
gatatggacggagtgagacagtaca

SEQ ID NO: 1925210 - DNA, 25 bp, Homo sapien
tctccttcaacaggtccagacacag

SEQ ID NO: 1925211 - DNA, 25 bp, Homo sapien
tgctcgatgcattgccagcagtatg

SEQ ID NO: 1925212 - DNA, 25 bp, Homo sapien
ccgcagatatcgcaacatttgtgct

SEQ ID NO: 1925213 - DNA, 25 bp, Homo sapien
gccatgatcgcagcatcacaaaagc

SEQ ID NO: 1925214 - DNA, 25 bp, Homo sapien
ttcgtagccatgatcgcagcatcac

SEQ ID NO: 1925215 - DNA, 25 bp, Homo sapien
cctgagcagccacagtcgaaacagg

SEQ ID NO: 1925216 - DNA, 25 bp, Homo sapien
gagcagccacagtcgaaacaggaca

SEQ ID NO: 1925217 - DNA, 25 bp, Homo sapien
gcagccacagtcgaaacaggacacc

SEQ ID NO: 1925218 - DNA, 25 bp, Homo sapien
tgagcagccacagtcgaaacaggac

SEQ ID NO: 1925219 - DNA, 25 bp, Homo sapien
gagtgggcatagtggtaactgaggc

SEQ ID NO: 1925220 - DNA, 25 bp, Homo sapien
tgggcatagtggtaactgaggcctg

SEQ ID NO: 1925221 - DNA, 25 bp, Homo sapien
ctgaggcctggtcggttcttgtaac

SEQ ID NO: 1925222 - DNA, 25 bp, Homo sapien
gtaactgaggcctggtcggttcttg

SEQ ID NO: 1925223 - DNA, 25 bp, Homo sapien
tactcatcatcgaggtcatccagga

SEQ ID NO: 1925224 - DNA, 25 bp, Homo sapien
ctttccccgatgcttgggagcatct

SEQ ID NO: 1925225 - DNA, 25 bp, Homo sapien
tctaggatccgctttcgtgcttgac

SEQ ID NO: 1925226 - DNA, 25 bp, Homo sapien
caggaagtcatctggttctaggatc

SEQ ID NO: 1925227 - DNA, 25 bp, Homo sapien
ggatctggggtacctcgcttcccca

SEQ ID NO: 1925228 - DNA, 25 bp, Homo sapien
gaacctctaaactgctgctgtcctg

SEQ ID NO: 1925229 - DNA, 25 bp, Homo sapien
tgctgtcctgagagatcagcccctc

SEQ ID NO: 1925230 - DNA, 25 bp, Homo sapien
gctgtcatcatcaactcggggatct

SEQ ID NO: 1925231 - DNA, 25 bp, Homo sapien
aagaaaaattgtggatcttcacagg

SEQ ID NO: 1925232 - DNA, 25 bp, Homo sapien
aggtgggaagaaaaattgtggatct

SEQ ID NO: 1925233 - DNA, 25 bp, Homo sapien
gggaagaaaaattgtggatcttcac

SEQ ID NO: 1925234 - DNA, 25 bp, Homo sapien
agaaaaattgtggatcttcacaggg

SEQ ID NO: 1925235 - DNA, 25 bp, Homo sapien
gaggccaatcctagaacctggttac

SEQ ID NO: 1925236 - DNA, 25 bp, Homo sapien
agctgtaataattgttctgggctac

SEQ ID NO: 1925237 - DNA, 25 bp, Homo sapien
tttccgccagtgctgggcagggtac

SEQ ID NO: 1925238 - DNA, 25 bp, Homo sapien
ggtacgagtagttgtccagaggcca

SEQ ID NO: 1925239 - DNA, 25 bp, Homo sapien
gctcccaaggaacttcattgcattc

SEQ ID NO: 1925240 - DNA, 25 bp, Homo sapien
ccaccagcactttggacagtgcctg

SEQ ID NO: 1925241 - DNA, 25 bp, Homo sapien
accagcactttggacagtgcctgtc

SEQ ID NO: 1925242 - DNA, 25 bp, Homo sapien
ccagcactttggacagtgcctgtct

SEQ ID NO: 1925243 - DNA, 25 bp, Homo sapien
ttattgcaagcctgttttaccaggc

SEQ ID NO: 1925244 - DNA, 25 bp, Homo sapien
aatgtgagtgcatgttcttattgca

SEQ ID NO: 1925245 - DNA, 25 bp, Homo sapien
cgtggctccgtaagaatgtgagtgc

SEQ ID NO: 1925246 - DNA, 25 bp, Homo sapien
gtcaaaatcaccgtggctccgtaag

SEQ ID NO: 1925247 - DNA, 25 bp, Homo sapien
agcctcgaggtggtgccagagttca

SEQ ID NO: 1925248 - DNA, 25 bp, Homo sapien
ttcatcccctgaagagcctcgaggt

SEQ ID NO: 1925249 - DNA, 25 bp, Homo sapien
ctattcttgcttgtggttatttgca

SEQ ID NO: 1925250 - DNA, 25 bp, Homo sapien
ggtggtgccagagttcacttttgct

SEQ ID NO: 1925251 - DNA, 25 bp, Homo sapien
gacttccgtctaggttcatgagcat

SEQ ID NO: 1925252 - DNA, 25 bp, Homo sapien
cttttgacttccgtctaggttcatg

SEQ ID NO: 1925253 - DNA, 25 bp, Homo sapien
gcagaagtcggagcaacttttgact

SEQ ID NO: 1925254 - DNA, 25 bp, Homo sapien
aggccaccccttcttcccgcagaag

SEQ ID NO: 1925255 - DNA, 25 bp, Homo sapien
taatgactgttccatatttagctat

SEQ ID NO: 1925256 - DNA, 25 bp, Homo sapien
tgaaaggcttgtatcattgagcacc

SEQ ID NO: 1925257 - DNA, 25 bp, Homo sapien
tatctgttacgatgtccagggaaca

SEQ ID NO: 1925258 - DNA, 25 bp, Homo sapien
ttaagggctacacatgattcttggg

SEQ ID NO: 1925259 - DNA, 25 bp, Homo sapien
gtattgagcctgcaactttgagaac

SEQ ID NO: 1925260 - DNA, 25 bp, Homo sapien
aaaggcattgcagtgttctagcgct

SEQ ID NO: 1925261 - DNA, 25 bp, Homo sapien
tgcagtgttctagcgctgtgcttgt

SEQ ID NO: 1925262 - DNA, 25 bp, Homo sapien
tcttgggtgccagtgacctgttgtt

SEQ ID NO: 1925263 - DNA, 25 bp, Homo sapien
ggccttagtcagtataaatgaacca

SEQ ID NO: 1925264 - DNA, 25 bp, Homo sapien
tagtcagtataaatgaaccaaatgt

SEQ ID NO: 1925265 - DNA, 25 bp, Homo sapien
tttgtgaaccagagccatgtttctt

SEQ ID NO: 1925266 - DNA, 25 bp, Homo sapien
ccaaatgtttgtgaaccagagccat

SEQ ID NO: 1925267 - DNA, 25 bp, Homo sapien
taaacagaagatattcagtatgtcg

SEQ ID NO: 1925268 - DNA, 25 bp, Homo sapien
gaagatattcagtatgtcgtttgaa

SEQ ID NO: 1925269 - DNA, 25 bp, Homo sapien
ttttaaacagaagatattcagtatg

SEQ ID NO: 1925270 - DNA, 25 bp, Homo sapien
aaagacttcagctattttaaacaga

SEQ ID NO: 1925271 - DNA, 25 bp, Homo sapien
gagctacttactcgagttgggtgaa

SEQ ID NO: 1925272 - DNA, 25 bp, Homo sapien
agtttactttcagctgtcagacata

SEQ ID NO: 1925273 - DNA, 25 bp, Homo sapien
caccttttgtaagattgatgagcaa

SEQ ID NO: 1925274 - DNA, 25 bp, Homo sapien
tgagcaatttagtgcttgcaaagac

SEQ ID NO: 1925275 - DNA, 25 bp, Homo sapien
tactgaacatgtacgatgtgcctac

SEQ ID NO: 1925276 - DNA, 25 bp, Homo sapien
ttaagagtgatacagaagcaccgga

SEQ ID NO: 1925277 - DNA, 25 bp, Homo sapien
aagcaccggacagcaaaggctacat

SEQ ID NO: 1925278 - DNA, 25 bp, Homo sapien
tctctctcgggtatcatgtgataca

SEQ ID NO: 1925279 - DNA, 25 bp, Homo sapien
tgccatgagctgtatccaaaagccc

SEQ ID NO: 1925280 - DNA, 25 bp, Homo sapien
ccagcccccagtagagccattgact

SEQ ID NO: 1925281 - DNA, 25 bp, Homo sapien
gtgatgtggtctgtcctgtgtcatc

SEQ ID NO: 1925282 - DNA, 25 bp, Homo sapien
agtagagccattgactgccatgagc

SEQ ID NO: 1925283 - DNA, 25 bp, Homo sapien
gcaggttcacttcaattaatgttgt

SEQ ID NO: 1925284 - DNA, 25 bp, Homo sapien
cttcaattaatgttgttgagcccat

SEQ ID NO: 1925285 - DNA, 25 bp, Homo sapien
tgttaaggaatagcaggttcacttc

SEQ ID NO: 1925286 - DNA, 25 bp, Homo sapien
gctgctgttaaggaatagcaggttc

SEQ ID NO: 1925287 - DNA, 25 bp, Homo sapien
caactcttgttgtaatatgcacctc

SEQ ID NO: 1925288 - DNA, 25 bp, Homo sapien
ctttgagtttctcgatttgaggata

SEQ ID NO: 1925289 - DNA, 25 bp, Homo sapien
actttcctactgcatctaccatggt

SEQ ID NO: 1925290 - DNA, 25 bp, Homo sapien
ccctaattaaattggtgccatggtt

SEQ ID NO: 1925291 - DNA, 25 bp, Homo sapien
tatgatcatcagtttgcaatgtaac

SEQ ID NO: 1925292 - DNA, 25 bp, Homo sapien
ttttggctcttgagctcccaatggc

SEQ ID NO: 1925293 - DNA, 25 bp, Homo sapien
ggccaacttttggtatgatcatcag

SEQ ID NO: 1925294 - DNA, 25 bp, Homo sapien
gatgttgggattgggctctgcttcc

SEQ ID NO: 1925295 - DNA, 25 bp, Homo sapien
aacctttatatccctcacggtcctg

SEQ ID NO: 1925296 - DNA, 25 bp, Homo sapien
tttatatccctcacggtcctgcgtc

SEQ ID NO: 1925297 - DNA, 25 bp, Homo sapien
cacggtcctgcgtcttcaagaaaag

SEQ ID NO: 1925298 - DNA, 25 bp, Homo sapien
cctcacggtcctgcgtcttcaagaa

SEQ ID NO: 1925299 - DNA, 25 bp, Homo sapien
cacaataaagcagttgatttcatat

SEQ ID NO: 1925300 - DNA, 25 bp, Homo sapien
catataacatctgtcgctatggtga

SEQ ID NO: 1925301 - DNA, 25 bp, Homo sapien
cccacagggagtatatcaaaattga

SEQ ID NO: 1925302 - DNA, 25 bp, Homo sapien
caaggccagttttcaaccgacattg

SEQ ID NO: 1925303 - DNA, 25 bp, Homo sapien
tttaggctgccgaagctgagctgca

SEQ ID NO: 1925304 - DNA, 25 bp, Homo sapien
gcaatgatgtctacagcaccatggt

SEQ ID NO: 1925305 - DNA, 25 bp, Homo sapien
catgcagtgcgtagggagaataacc

SEQ ID NO: 1925306 - DNA, 25 bp, Homo sapien
atggttagcgcccacacagaaacgc

SEQ ID NO: 1925307 - DNA, 25 bp, Homo sapien
tatcaccctcgccagattagatgat

SEQ ID NO: 1925308 - DNA, 25 bp, Homo sapien
gagccttgcacaaaagaggcactta

SEQ ID NO: 1925309 - DNA, 25 bp, Homo sapien
ggagaggtcctgtctatcaccctcg

SEQ ID NO: 1925310 - DNA, 25 bp, Homo sapien
caagagccttgcacaaaagaggcac

SEQ ID NO: 1925311 - DNA, 25 bp, Homo sapien
ggcttcttgccagaactcaaactga

SEQ ID NO: 1925312 - DNA, 25 bp, Homo sapien
tgcaggaacactccacttcactttc

SEQ ID NO: 1925313 - DNA, 25 bp, Homo sapien
ccagaactcaaactgaaccttgcag

SEQ ID NO: 1925314 - DNA, 25 bp, Homo sapien
gattccaggtaccactgggcaacca

SEQ ID NO: 1925315 - DNA, 25 bp, Homo sapien
tggtgatgctagtgtgtaatgagaa

SEQ ID NO: 1925316 - DNA, 25 bp, Homo sapien
ctggtgatgctagtgtgtaatgaga

SEQ ID NO: 1925317 - DNA, 25 bp, Homo sapien
ccagcatcagagcagctggctaacg

SEQ ID NO: 1925318 - DNA, 25 bp, Homo sapien
ctctctttgctccagcatcagagca

SEQ ID NO: 1925319 - DNA, 25 bp, Homo sapien
tctctttgctccagcatcagagcag

SEQ ID NO: 1925320 - DNA, 25 bp, Homo sapien
gcatcagagcagctggctaacgcac

SEQ ID NO: 1925321 - DNA, 25 bp, Homo sapien
ctcatctggtagtcattgaacacca

SEQ ID NO: 1925322 - DNA, 25 bp, Homo sapien
agtcattgaacaccagcccttgggt

SEQ ID NO: 1925323 - DNA, 25 bp, Homo sapien
atcaaagtttgaagtgtgccttcca

SEQ ID NO: 1925324 - DNA, 25 bp, Homo sapien
tgcaggggacactcatcaaagtttg

SEQ ID NO: 1925325 - DNA, 25 bp, Homo sapien
tggcgggtaaaggattcaacaagat

SEQ ID NO: 1925326 - DNA, 25 bp, Homo sapien
aagaaacctttatacgcatggcggg

SEQ ID NO: 1925327 - DNA, 25 bp, Homo sapien
gtaaagaaacctttatacgcatggc

SEQ ID NO: 1925328 - DNA, 25 bp, Homo sapien
acgcatggcgggtaaaggattcaac

SEQ ID NO: 1925329 - DNA, 25 bp, Homo sapien
gagggttcagtcctcctatgccctc

SEQ ID NO: 1925330 - DNA, 25 bp, Homo sapien
gctttttggcagtacagaacagctg

SEQ ID NO: 1925331 - DNA, 25 bp, Homo sapien
tctccacggctatctgctttttggc

SEQ ID NO: 1925332 - DNA, 25 bp, Homo sapien
ccctgttcatgctgtctcagctggt

SEQ ID NO: 1925333 - DNA, 25 bp, Homo sapien
atctggtgatgggagtcccgacccc

SEQ ID NO: 1925334 - DNA, 25 bp, Homo sapien
atgggagtcccgaccccagctctag

SEQ ID NO: 1925335 - DNA, 25 bp, Homo sapien
ggtgatgggagtcccgaccccagct

SEQ ID NO: 1925336 - DNA, 25 bp, Homo sapien
aaatctggtgatgggagtcccgacc

SEQ ID NO: 1925337 - DNA, 25 bp, Homo sapien
taacatgcttgggaacctttcagca

SEQ ID NO: 1925338 - DNA, 25 bp, Homo sapien
cacgggatggataccgttccaaaag

SEQ ID NO: 1925339 - DNA, 25 bp, Homo sapien
gcaccgatacgtgttctctaggcct

SEQ ID NO: 1925340 - DNA, 25 bp, Homo sapien
tttcagcaggaactgggatcttcca

SEQ ID NO: 1925341 - DNA, 25 bp, Homo sapien
tcctcacagtcatgttgaataaaca

SEQ ID NO: 1925342 - DNA, 25 bp, Homo sapien
cctcacagtcatgttgaataaacac

SEQ ID NO: 1925343 - DNA, 25 bp, Homo sapien
taattccatagggatgaaggagtgt

SEQ ID NO: 1925344 - DNA, 25 bp, Homo sapien
tagggtgactatgaatctaaccaaa

SEQ ID NO: 1925345 - DNA, 25 bp, Homo sapien
aaaattatatcgtaattccataggg

SEQ ID NO: 1925346 - DNA, 25 bp, Homo sapien
tgtgtggcagatgcgccagaatgca

SEQ ID NO: 1925347 - DNA, 25 bp, Homo sapien
gagaggtactactttaaccacgtga

SEQ ID NO: 1925348 - DNA, 25 bp, Homo sapien
caatggatgctaagcttagtgggtc

SEQ ID NO: 1925349 - DNA, 25 bp, Homo sapien
taatgggacagtaatgggacagacc

SEQ ID NO: 1925350 - DNA, 25 bp, Homo sapien
gatacactgagaagtacaccacatt

SEQ ID NO: 1925351 - DNA, 25 bp, Homo sapien
ccagatttccttacagccacgagct

SEQ ID NO: 1925352 - DNA, 25 bp, Homo sapien
gcctgggcacacttattctagtaaa

SEQ ID NO: 1925353 - DNA, 25 bp, Homo sapien
taatttggaacccttgctgtgtact

SEQ ID NO: 1925354 - DNA, 25 bp, Homo sapien
tgtgatgacagaacaccttagactt

SEQ ID NO: 1925355 - DNA, 25 bp, Homo sapien
actgtgtctatgggaatctggcaca

SEQ ID NO: 1925356 - DNA, 25 bp, Homo sapien
aggaagtaaccaaggccataagaag

SEQ ID NO: 1925357 - DNA, 25 bp, Homo sapien
cacaggtcttgttgaataactgtgt

SEQ ID NO: 1925358 - DNA, 25 bp, Homo sapien
aaagcattgacctatattttatatc

SEQ ID NO: 1925359 - DNA, 25 bp, Homo sapien
tagcaaccatttcaaccagaattga

SEQ ID NO: 1925360 - DNA, 25 bp, Homo sapien
cagaattgaaaatctggcacatttc

SEQ ID NO: 1925361 - DNA, 25 bp, Homo sapien
tattatagaaacagacttcgctcaa

SEQ ID NO: 1925362 - DNA, 25 bp, Homo sapien
ggtaattgtacttctctagcaacca

SEQ ID NO: 1925363 - DNA, 25 bp, Homo sapien
aatatttactcccaaggcctaggat

SEQ ID NO: 1925364 - DNA, 25 bp, Homo sapien
caccaaggcctctgtatcaaaactg

SEQ ID NO: 1925365 - DNA, 25 bp, Homo sapien
taatccatacctgaacgttaaggca

SEQ ID NO: 1925366 - DNA, 25 bp, Homo sapien
ggataattttaccagaaaggcctga

SEQ ID NO: 1925367 - DNA, 25 bp, Homo sapien
gtgaagcaagggctagcaccaggtc

SEQ ID NO: 1925368 - DNA, 25 bp, Homo sapien
tcatttataaacaggtcagtggagg

SEQ ID NO: 1925369 - DNA, 25 bp, Homo sapien
tgcccaagatatatgccaagcctat

SEQ ID NO: 1925370 - DNA, 25 bp, Homo sapien
tatttactgggagaagcacctatct

SEQ ID NO: 1925371 - DNA, 25 bp, Homo sapien
ggagacaaagctaccacatgtggaa

SEQ ID NO: 1925372 - DNA, 25 bp, Homo sapien
ggaaaggtactatgtgtccatgtca

SEQ ID NO: 1925373 - DNA, 25 bp, Homo sapien
ttcggacttgctcgggagggtaatc

SEQ ID NO: 1925374 - DNA, 25 bp, Homo sapien
tagagtgggactcttggaatcagga

SEQ ID NO: 1925375 - DNA, 25 bp, Homo sapien
cattcagcagactttactcattagt

SEQ ID NO: 1925376 - DNA, 25 bp, Homo sapien
gttttcaagtctttcgcaatgccaa

SEQ ID NO: 1925377 - DNA, 25 bp, Homo sapien
aagtctttcgcaatgccaattcccc

SEQ ID NO: 1925378 - DNA, 25 bp, Homo sapien
cagcagactttactcattagttttc

SEQ ID NO: 1925379 - DNA, 25 bp, Homo sapien
gaagccttgtttgctcctacaatgc

SEQ ID NO: 1925380 - DNA, 25 bp, Homo sapien
gagtccactctcaaagacggatata

SEQ ID NO: 1925381 - DNA, 25 bp, Homo sapien
cactacagtgtgatcgcattcagat

SEQ ID NO: 1925382 - DNA, 25 bp, Homo sapien
gtaagttcaagtccatagcaaaggt

SEQ ID NO: 1925383 - DNA, 25 bp, Homo sapien
ctgagttactggtaaagacacgggc

SEQ ID NO: 1925384 - DNA, 25 bp, Homo sapien
gagttactggtaaagacacgggcac

SEQ ID NO: 1925385 - DNA, 25 bp, Homo sapien
cactgagttactggtaaagacacgg

SEQ ID NO: 1925386 - DNA, 25 bp, Homo sapien
tgagttactggtaaagacacgggca

SEQ ID NO: 1925387 - DNA, 25 bp, Homo sapien
taatgtgtgtgatgaatcgaagacg

SEQ ID NO: 1925388 - DNA, 25 bp, Homo sapien
ctggctccatcttgctaatgtgtgt

SEQ ID NO: 1925389 - DNA, 25 bp, Homo sapien
gatgaatcgaagacgaagttttaaa

SEQ ID NO: 1925390 - DNA, 25 bp, Homo sapien
gctggttttaagttacagataatct

SEQ ID NO: 1925391 - DNA, 25 bp, Homo sapien
cgctgtcaccagtaaacatatactt

SEQ ID NO: 1925392 - DNA, 25 bp, Homo sapien
tcacgctgtcaccagtaaacatata

SEQ ID NO: 1925393 - DNA, 25 bp, Homo sapien
cacgctgtcaccagtaaacatatac

SEQ ID NO: 1925394 - DNA, 25 bp, Homo sapien
tgtcaccagtaaacatatacttcat

SEQ ID NO: 1925395 - DNA, 25 bp, Homo sapien
aatgggtgctacactggtcaacatt

SEQ ID NO: 1925396 - DNA, 25 bp, Homo sapien
ggtgctacactggtcaacattcagc

SEQ ID NO: 1925397 - DNA, 25 bp, Homo sapien
agcatgtcataaaacgccacaccaa

SEQ ID NO: 1925398 - DNA, 25 bp, Homo sapien
gcatgtcataaaacgccacaccaat

SEQ ID NO: 1925399 - DNA, 25 bp, Homo sapien
catacaacgagttctctcttgctga

SEQ ID NO: 1925400 - DNA, 25 bp, Homo sapien
ggtccaacaagatggtatacataaa

SEQ ID NO: 1925401 - DNA, 25 bp, Homo sapien
cggtcttcactataggaagaagtac

SEQ ID NO: 1925402 - DNA, 25 bp, Homo sapien
tacataaagcaactggaattcggtc

SEQ ID NO: 1925403 - DNA, 25 bp, Homo sapien
tccgatgctagaatggtgccacaca

SEQ ID NO: 1925404 - DNA, 25 bp, Homo sapien
actctgtttcagacgtcaagctggg

SEQ ID NO: 1925405 - DNA, 25 bp, Homo sapien
gaggcggaatggatagccaacccac

SEQ ID NO: 1925406 - DNA, 25 bp, Homo sapien
cacacagcatgtgcaagagctaacg

SEQ ID NO: 1925407 - DNA, 25 bp, Homo sapien
cagaaaatgcagagacccgtaagtc

SEQ ID NO: 1925408 - DNA, 25 bp, Homo sapien
gcttctgcacaatacagctgggtgg

SEQ ID NO: 1925409 - DNA, 25 bp, Homo sapien
tttgcatgacgtcccgtacaagggc

SEQ ID NO: 1925410 - DNA, 25 bp, Homo sapien
taagtggccaagagtagatcaagct

SEQ ID NO: 1925411 - DNA, 25 bp, Homo sapien
tgttctctcttggcactaaaggctg

SEQ ID NO: 1925412 - DNA, 25 bp, Homo sapien
gtgatgatcaaaccaattgcattca

SEQ ID NO: 1925413 - DNA, 25 bp, Homo sapien
cattttagatggctgacaacggatc

SEQ ID NO: 1925414 - DNA, 25 bp, Homo sapien
atgagtagaagtaggaacaaacccg

SEQ ID NO: 1925415 - DNA, 25 bp, Homo sapien
gccttgcggcaacaggtttgtctta

SEQ ID NO: 1925416 - DNA, 25 bp, Homo sapien
gaaaacagtcatcatccaatgtgca

SEQ ID NO: 1925417 - DNA, 25 bp, Homo sapien
tcattgaatctccagtcacagtttg

SEQ ID NO: 1925418 - DNA, 25 bp, Homo sapien
cagctgggttgggaaactcattgaa

SEQ ID NO: 1925419 - DNA, 25 bp, Homo sapien
ggccatgagctccacacaagtaaca

SEQ ID NO: 1925420 - DNA, 25 bp, Homo sapien
catttagaagggcattcccaacttc

SEQ ID NO: 1925421 - DNA, 25 bp, Homo sapien
ttaacagaatttcagcctaattggc

SEQ ID NO: 1925422 - DNA, 25 bp, Homo sapien
gtaacaagatcctacgttctccagt

SEQ ID NO: 1925423 - DNA, 25 bp, Homo sapien
ttctccagtagcacacagatgcatg

SEQ ID NO: 1925424 - DNA, 25 bp, Homo sapien
cagaatttcagcctaattggcatga

SEQ ID NO: 1925425 - DNA, 25 bp, Homo sapien
tttctgggagtctaaaatcacaata

SEQ ID NO: 1925426 - DNA, 25 bp, Homo sapien
ttatttctgggagtctaaaatcaca

SEQ ID NO: 1925427 - DNA, 25 bp, Homo sapien
agtctaaaatcacaataaaaaggat

SEQ ID NO: 1925428 - DNA, 25 bp, Homo sapien
gtctaaaatcacaataaaaaggata

SEQ ID NO: 1925429 - DNA, 25 bp, Homo sapien
taggtgtcatctggaacccaaggat

SEQ ID NO: 1925430 - DNA, 25 bp, Homo sapien
ggtcgattatccttcagagagccaa

SEQ ID NO: 1925431 - DNA, 25 bp, Homo sapien
agaaatgcgcggtctctcaggtgca

SEQ ID NO: 1925432 - DNA, 25 bp, Homo sapien
gagagccaatgatcgcatggacgag

SEQ ID NO: 1925433 - DNA, 25 bp, Homo sapien
ccagtgatttggataccggaagcaa

SEQ ID NO: 1925434 - DNA, 25 bp, Homo sapien
caggaggatccacctgttccgcgag

SEQ ID NO: 1925435 - DNA, 25 bp, Homo sapien
ctggaaggaatcgaagacacacatt

SEQ ID NO: 1925436 - DNA, 25 bp, Homo sapien
tatataagcctcctagatgatccag

SEQ ID NO: 1925437 - DNA, 25 bp, Homo sapien
tttgaaataccaattaggactagta

SEQ ID NO: 1925438 - DNA, 25 bp, Homo sapien
tattctcaacattatagaaactctc

SEQ ID NO: 1925439 - DNA, 25 bp, Homo sapien
gagaaaacggccaaatcacttcatc

SEQ ID NO: 1925440 - DNA, 25 bp, Homo sapien
gaagtccttatgtccactaaaactg

SEQ ID NO: 1925441 - DNA, 25 bp, Homo sapien
caaagtcacttactcgatttctaaa

SEQ ID NO: 1925442 - DNA, 25 bp, Homo sapien
catttccttcgtgactacgcatggc

SEQ ID NO: 1925443 - DNA, 25 bp, Homo sapien
gtcattctgtaaccagtgctctggg

SEQ ID NO: 1925444 - DNA, 25 bp, Homo sapien
ggtttgagtaacagcaactgaatta

SEQ ID NO: 1925445 - DNA, 25 bp, Homo sapien
aactatgccactccaaatgtcaccg

SEQ ID NO: 1925446 - DNA, 25 bp, Homo sapien
ttcaaagtatcacaaggctaggacc

SEQ ID NO: 1925447 - DNA, 25 bp, Homo sapien
tatatctatgctccacagctaaggg

SEQ ID NO: 1925448 - DNA, 25 bp, Homo sapien
ttttggagaatcaactcagggtcta

SEQ ID NO: 1925449 - DNA, 25 bp, Homo sapien
agcttagaaatgtatttattcttac

SEQ ID NO: 1925450 - DNA, 25 bp, Homo sapien
ctaagagaataagcttagaaatgta

SEQ ID NO: 1925451 - DNA, 25 bp, Homo sapien
agagaataagcttagaaatgtattt

SEQ ID NO: 1925452 - DNA, 25 bp, Homo sapien
aagcttagaaatgtatttattctta

SEQ ID NO: 1925453 - DNA, 25 bp, Homo sapien
tcacatgggctaccaaggccctggc

SEQ ID NO: 1925454 - DNA, 25 bp, Homo sapien
cccctgctgatgtagaaaactcata

SEQ ID NO: 1925455 - DNA, 25 bp, Homo sapien
caggaaatctgcaaatgtcctcaca

SEQ ID NO: 1925456 - DNA, 25 bp, Homo sapien
ggcagagaattaatctgtccagtgt

SEQ ID NO: 1925457 - DNA, 25 bp, Homo sapien
tatagccaatctgattaatatgatc

SEQ ID NO: 1925458 - DNA, 25 bp, Homo sapien
ttaaaacggctttcctgaggcacat

SEQ ID NO: 1925459 - DNA, 25 bp, Homo sapien
gggagccctgcatagagaagtgggt

SEQ ID NO: 1925460 - DNA, 25 bp, Homo sapien
cgttttcgttgctcattgacttcca

SEQ ID NO: 1925461 - DNA, 25 bp, Homo sapien
tattcagaagtcaccaagactcact

SEQ ID NO: 1925462 - DNA, 25 bp, Homo sapien
gaccatagttccttgtgaacctgaa

SEQ ID NO: 1925463 - DNA, 25 bp, Homo sapien
gaacaccattgtgaatgggaagaag

SEQ ID NO: 1925464 - DNA, 25 bp, Homo sapien
cagttaagactagaggcttgtgcca

SEQ ID NO: 1925465 - DNA, 25 bp, Homo sapien
gcccaattatgaggagtgaaactca

SEQ ID NO: 1925466 - DNA, 25 bp, Homo sapien
agggtgtgtgaagcccaattatgag

SEQ ID NO: 1925467 - DNA, 25 bp, Homo sapien
tatgtctttacaccaagttccctga

SEQ ID NO: 1925468 - DNA, 25 bp, Homo sapien
gagtgaaactcatgatggtctgaag

SEQ ID NO: 1925469 - DNA, 25 bp, Homo sapien
aactagttatattcagcttagaacc

SEQ ID NO: 1925470 - DNA, 25 bp, Homo sapien
cataaacaaatagatgtaatccaga

SEQ ID NO: 1925471 - DNA, 25 bp, Homo sapien
tatgtacactgagaatttcactgca

SEQ ID NO: 1925472 - DNA, 25 bp, Homo sapien
agtgcattcactgcttaactagtta

SEQ ID NO: 1925473 - DNA, 25 bp, Homo sapien
caaggtcaatatcaaggctcggttc

SEQ ID NO: 1925474 - DNA, 25 bp, Homo sapien
taaactgcggttgtacctctgagct

SEQ ID NO: 1925475 - DNA, 25 bp, Homo sapien
cactaaggaagcgtgtaaactgcgg

SEQ ID NO: 1925476 - DNA, 25 bp, Homo sapien
tacatgagttgctctagccaaggtc

SEQ ID NO: 1925477 - DNA, 25 bp, Homo sapien
catccggtagctaaacatctcaagg

SEQ ID NO: 1925478 - DNA, 25 bp, Homo sapien
tctcaaggagtgtgtgtaagatccc

SEQ ID NO: 1925479 - DNA, 25 bp, Homo sapien
caactgcagccaaagtatgaagatg

SEQ ID NO: 1925480 - DNA, 25 bp, Homo sapien
gagctggttctggtttgtttgtgca

SEQ ID NO: 1925481 - DNA, 25 bp, Homo sapien
aagactatgctgtattcgtgaaaag

SEQ ID NO: 1925482 - DNA, 25 bp, Homo sapien
gaaaaacacttctatatcagaaagt

SEQ ID NO: 1925483 - DNA, 25 bp, Homo sapien
cgtgaaaagctggaattaccatgaa

SEQ ID NO: 1925484 - DNA, 25 bp, Homo sapien
cctgggatttggcaattgataatca

SEQ ID NO: 1925485 - DNA, 25 bp, Homo sapien
aagtttccactagggctggagccaa

SEQ ID NO: 1925486 - DNA, 25 bp, Homo sapien
caccctggttgcaatgctgtgaata

SEQ ID NO: 1925487 - DNA, 25 bp, Homo sapien
tcctttgatgcccaaagactctatt

SEQ ID NO: 1925488 - DNA, 25 bp, Homo sapien
tccatatagaccaataaacgactgt

SEQ ID NO: 1925489 - DNA, 25 bp, Homo sapien
gaatccaggaggttcataggtaagg

SEQ ID NO: 1925490 - DNA, 25 bp, Homo sapien
tgaagccatacagtttgttccaggg

SEQ ID NO: 1925491 - DNA, 25 bp, Homo sapien
ggcatgaactgtcagtgaatccagg

SEQ ID NO: 1925492 - DNA, 25 bp, Homo sapien
ccagagctcccatgggtaatgtaaa

SEQ ID NO: 1925493 - DNA, 25 bp, Homo sapien
tattggaatctgtagcttggagttg

SEQ ID NO: 1925494 - DNA, 25 bp, Homo sapien
tcttagggaatgaggtattggaatc

SEQ ID NO: 1925495 - DNA, 25 bp, Homo sapien
gtttgttaatatcaggaactgggat

SEQ ID NO: 1925496 - DNA, 25 bp, Homo sapien
cattgcaaaggcatgggttgactgg

SEQ ID NO: 1925497 - DNA, 25 bp, Homo sapien
tctgggtatagcaagtcgaagagct

SEQ ID NO: 1925498 - DNA, 25 bp, Homo sapien
catcacagggagaaaatcagctagt

SEQ ID NO: 1925499 - DNA, 25 bp, Homo sapien
ctttaatcagtcctcgccctgctaa

SEQ ID NO: 1925500 - DNA, 25 bp, Homo sapien
gaattgcaggagaacccacataaga

SEQ ID NO: 1925501 - DNA, 25 bp, Homo sapien
tcatgctgtggagatgttatgtaaa

SEQ ID NO: 1925502 - DNA, 25 bp, Homo sapien
tattcccattcaatatgtctaaaat

SEQ ID NO: 1925503 - DNA, 25 bp, Homo sapien
cattataacagaaactaatggtggt

SEQ ID NO: 1925504 - DNA, 25 bp, Homo sapien
gtatctttttagaacaaggatagag

SEQ ID NO: 1925505 - DNA, 25 bp, Homo sapien
ggtgaagtcactccgaccataagat

SEQ ID NO: 1925506 - DNA, 25 bp, Homo sapien
tctaaaatcactagggaatgcccac

SEQ ID NO: 1925507 - DNA, 25 bp, Homo sapien
gcctgcactgagaatacatagaatg

SEQ ID NO: 1925508 - DNA, 25 bp, Homo sapien
tcttgtatctgctggtgcctgcact

SEQ ID NO: 1925509 - DNA, 25 bp, Homo sapien
catcgtcaaacttctcctcggtctc

SEQ ID NO: 1925510 - DNA, 25 bp, Homo sapien
gatgaagagaaagcaccatatgtgg

SEQ ID NO: 1925511 - DNA, 25 bp, Homo sapien
tccatggcataaacaaccagatcca

SEQ ID NO: 1925512 - DNA, 25 bp, Homo sapien
agttggcttgttcccccatcgtcaa

SEQ ID NO: 1925513 - DNA, 25 bp, Homo sapien
agattaaatacagtattccaaaagc

SEQ ID NO: 1925514 - DNA, 25 bp, Homo sapien
tgtagggcagagattaaatacagta

SEQ ID NO: 1925515 - DNA, 25 bp, Homo sapien
cagagattaaatacagtattccaaa

SEQ ID NO: 1925516 - DNA, 25 bp, Homo sapien
ctgtagggcagagattaaatacagt

SEQ ID NO: 1925517 - DNA, 25 bp, Homo sapien
ctcggttagtttcagaagttaccag

SEQ ID NO: 1925518 - DNA, 25 bp, Homo sapien
tctcggttagtttcagaagttacca

SEQ ID NO: 1925519 - DNA, 25 bp, Homo sapien
tagtttcagaagttaccagttaatg

SEQ ID NO: 1925520 - DNA, 25 bp, Homo sapien
cagatggttttacaaagtggaacaa

SEQ ID NO: 1925521 - DNA, 25 bp, Homo sapien
gatgctatccctatgactgttcaca

SEQ ID NO: 1925522 - DNA, 25 bp, Homo sapien
aaaatgatctgtgttgctacttcag

SEQ ID NO: 1925523 - DNA, 25 bp, Homo sapien
gttaactgtcaatcactaggctaag

SEQ ID NO: 1925524 - DNA, 25 bp, Homo sapien
gcagcatatctctattaaagtgcct

SEQ ID NO: 1925525 - DNA, 25 bp, Homo sapien
tagtcaatccccatgtttccaaaaa

SEQ ID NO: 1925526 - DNA, 25 bp, Homo sapien
gagtctgacatttcttagtcaatcc

SEQ ID NO: 1925527 - DNA, 25 bp, Homo sapien
gctccagttgagaggagctcactct

SEQ ID NO: 1925528 - DNA, 25 bp, Homo sapien
ataaggctgctccaatacatatctc

SEQ ID NO: 1925529 - DNA, 25 bp, Homo sapien
gcatattgcagaccatatccctgga

SEQ ID NO: 1925530 - DNA, 25 bp, Homo sapien
tatttaaacctagcatattgcagac

SEQ ID NO: 1925531 - DNA, 25 bp, Homo sapien
atatctcaacaaagcagtctgtggt

SEQ ID NO: 1925532 - DNA, 25 bp, Homo sapien
caggatccagtttccatgaattaca

SEQ ID NO: 1925533 - DNA, 25 bp, Homo sapien
tacaactggcagaagactacagcga

SEQ ID NO: 1925534 - DNA, 25 bp, Homo sapien
gaaaacgaagagtagcaggatccag

SEQ ID NO: 1925535 - DNA, 25 bp, Homo sapien
ggcacccgaattatttacaactggc

SEQ ID NO: 1925536 - DNA, 25 bp, Homo sapien
cttgctgtgggcctgaaggtatcca

SEQ ID NO: 1925537 - DNA, 25 bp, Homo sapien
tgggcctgaaggtatccacaaagtc

SEQ ID NO: 1925538 - DNA, 25 bp, Homo sapien
tccacaaagtctgatactaggtttc

SEQ ID NO: 1925539 - DNA, 25 bp, Homo sapien
caaagtctgatactaggtttccaag

SEQ ID NO: 1925540 - DNA, 25 bp, Homo sapien
ttgccttcaggatacagtttcctga

SEQ ID NO: 1925541 - DNA, 25 bp, Homo sapien
ctgcaaaataggctggtaataagca

SEQ ID NO: 1925542 - DNA, 25 bp, Homo sapien
cttcaggatacagtttcctgatctc

SEQ ID NO: 1925543 - DNA, 25 bp, Homo sapien
taggctggtaataagcaggcatttc

SEQ ID NO: 1925544 - DNA, 25 bp, Homo sapien
tgctgtacaacagcagagctcactg

SEQ ID NO: 1925545 - DNA, 25 bp, Homo sapien
gtattaggaattgtcaaaatcttct

SEQ ID NO: 1925546 - DNA, 25 bp, Homo sapien
agctcactgtattaggaattgtcaa

SEQ ID NO: 1925547 - DNA, 25 bp, Homo sapien
tgccagaagctgctgtacaacagca

SEQ ID NO: 1925548 - DNA, 25 bp, Homo sapien
cttgtaatccactcccccaattatt

SEQ ID NO: 1925549 - DNA, 25 bp, Homo sapien
gtttatcagggattcacaaaccagc

SEQ ID NO: 1925550 - DNA, 25 bp, Homo sapien
cactcaagagtgtcagagtttatca

SEQ ID NO: 1925551 - DNA, 25 bp, Homo sapien
tctttcccactcaagagtgtcagag

SEQ ID NO: 1925552 - DNA, 25 bp, Homo sapien
tgctgaccatgaataaacttaacaa

SEQ ID NO: 1925553 - DNA, 25 bp, Homo sapien
gaccagtctcaactgccattgctaa

SEQ ID NO: 1925554 - DNA, 25 bp, Homo sapien
cattgctaagcagtcataaagaaaa

SEQ ID NO: 1925555 - DNA, 25 bp, Homo sapien
aattcttttaggactatgctgacca

SEQ ID NO: 1925556 - DNA, 25 bp, Homo sapien
cacactgtgcagtatcaacttgact

SEQ ID NO: 1925557 - DNA, 25 bp, Homo sapien
tttgtatcaatgctgtgccaattcc

SEQ ID NO: 1925558 - DNA, 25 bp, Homo sapien
gtgtaccaaataaatccgaatagga

SEQ ID NO: 1925559 - DNA, 25 bp, Homo sapien
tatccttgacaagtaaagcttaaca

SEQ ID NO: 1925560 - DNA, 25 bp, Homo sapien
tcatcttcaggagtatccataaaca

SEQ ID NO: 1925561 - DNA, 25 bp, Homo sapien
gaccaccccaaaactgtctgaaggc

SEQ ID NO: 1925562 - DNA, 25 bp, Homo sapien
tctcatcttcaggagtatccataaa

SEQ ID NO: 1925563 - DNA, 25 bp, Homo sapien
catcttcaggagtatccataaacat

SEQ ID NO: 1925564 - DNA, 25 bp, Homo sapien
ccaggaaaagcctcttctataactt

SEQ ID NO: 1925565 - DNA, 25 bp, Homo sapien
caggaaaagcctcttctataacttc

SEQ ID NO: 1925566 - DNA, 25 bp, Homo sapien
gaaaatgctctgcagttgcgtctcc

SEQ ID NO: 1925567 - DNA, 25 bp, Homo sapien
ttcgaaaatgctctgcagttgcgtc

SEQ ID NO: 1925568 - DNA, 25 bp, Homo sapien
tcgaaaatgctctgcagttgcgtct

SEQ ID NO: 1925569 - DNA, 25 bp, Homo sapien
aaatgctctgcagttgcgtctccat

SEQ ID NO: 1925570 - DNA, 25 bp, Homo sapien
gcaaggcccggatcagactcgagct

SEQ ID NO: 1925571 - DNA, 25 bp, Homo sapien
tgcccggcaaggcccggatcagact

SEQ ID NO: 1925572 - DNA, 25 bp, Homo sapien
tatcacccccgcctttccagggtgc

SEQ ID NO: 1925573 - DNA, 25 bp, Homo sapien
agggtgcccggcaaggcccggatca

SEQ ID NO: 1925574 - DNA, 25 bp, Homo sapien
tggaggaaaccgtagctcctcggcg

SEQ ID NO: 1925575 - DNA, 25 bp, Homo sapien
acctctggaggaaaccgtagctcct

SEQ ID NO: 1925576 - DNA, 25 bp, Homo sapien
aaaccgtagctcctcggcgtcgctt

SEQ ID NO: 1925577 - DNA, 25 bp, Homo sapien
agacctctggaggaaaccgtagctc

SEQ ID NO: 1925578 - DNA, 25 bp, Homo sapien
ctggagcgttccctcccgagcccag

SEQ ID NO: 1925579 - DNA, 25 bp, Homo sapien
ttgcaaaccccgcagaaaccagcgg

SEQ ID NO: 1925580 - DNA, 25 bp, Homo sapien
ttgagcccaaggaccccggaggcat

SEQ ID NO: 1925581 - DNA, 25 bp, Homo sapien
gcggcgccaccagaaggttccgtct

SEQ ID NO: 1925582 - DNA, 25 bp, Homo sapien
ttccgtctgtggagaagggcggccc

SEQ ID NO: 1925583 - DNA, 25 bp, Homo sapien
tggatgggcaccgtgggagcactgt

SEQ ID NO: 1925584 - DNA, 25 bp, Homo sapien
ggcaccgtgggagcactgtgacact

SEQ ID NO: 1925585 - DNA, 25 bp, Homo sapien
ttcatggatgggcaccgtgggagca

SEQ ID NO: 1925586 - DNA, 25 bp, Homo sapien
caccgtgggagcactgtgacactga

SEQ ID NO: 1925587 - DNA, 25 bp, Homo sapien
cactgttaaaatggctggacctgcc

SEQ ID NO: 1925588 - DNA, 25 bp, Homo sapien
gaggatttctacactgttaaaatgg

SEQ ID NO: 1925589 - DNA, 25 bp, Homo sapien
tacactgttaaaatggctggacctg

SEQ ID NO: 1925590 - DNA, 25 bp, Homo sapien
ttgaagagaggatttctacactgtt

SEQ ID NO: 1925591 - DNA, 25 bp, Homo sapien
agaacctgattcctctggacatgca

SEQ ID NO: 1925592 - DNA, 25 bp, Homo sapien
gaagaacctgattcctctggacatg

SEQ ID NO: 1925593 - DNA, 25 bp, Homo sapien
tttgaagaacctgattcctctggac

SEQ ID NO: 1925594 - DNA, 25 bp, Homo sapien
tctggacatgcaggtggaccagtca

SEQ ID NO: 1925595 - DNA, 25 bp, Homo sapien
gaaggcctgaagcagcggaatttgc

SEQ ID NO: 1925596 - DNA, 25 bp, Homo sapien
taattaaagccttacaggtagtaga

SEQ ID NO: 1925597 - DNA, 25 bp, Homo sapien
caggtagtagatcatgcttttggga

SEQ ID NO: 1925598 - DNA, 25 bp, Homo sapien
gcttttgggatgttgatggaaggcc

SEQ ID NO: 1925599 - DNA, 25 bp, Homo sapien
tgtaacaagatggaatacatgactg

SEQ ID NO: 1925600 - DNA, 25 bp, Homo sapien
gaatggaccagacttattgtaacaa

SEQ ID NO: 1925601 - DNA, 25 bp, Homo sapien
ttctacatgtacgaagggcctgccc

SEQ ID NO: 1925602 - DNA, 25 bp, Homo sapien
ccgcatccgagctcataatatacct

SEQ ID NO: 1925603 - DNA, 25 bp, Homo sapien
attctgaggaaattgttagaaacct

SEQ ID NO: 1925604 - DNA, 25 bp, Homo sapien
ttaattctgaggaaattgttagaaa

SEQ ID NO: 1925605 - DNA, 25 bp, Homo sapien
ttctgaggaaattgttagaaacctc

SEQ ID NO: 1925606 - DNA, 25 bp, Homo sapien
ctgaggaaattgttagaaacctcag

SEQ ID NO: 1925607 - DNA, 25 bp, Homo sapien
cgaaaacctgatcagcatttcaagc

SEQ ID NO: 1925608 - DNA, 25 bp, Homo sapien
ccgaaaacctgatcagcatttcaag

SEQ ID NO: 1925609 - DNA, 25 bp, Homo sapien
gccgaaaacctgatcagcatttcaa

SEQ ID NO: 1925610 - DNA, 25 bp, Homo sapien
tgccgaaaacctgatcagcatttca

SEQ ID NO: 1925611 - DNA, 25 bp, Homo sapien
tttttcttttgatgttccaggtgac

SEQ ID NO: 1925612 - DNA, 25 bp, Homo sapien
cagcttttctttttcttttgatgtt

SEQ ID NO: 1925613 - DNA, 25 bp, Homo sapien
tacagcttttctttttcttttgatg

SEQ ID NO: 1925614 - DNA, 25 bp, Homo sapien
tctttttcttttgatgttccaggtg

SEQ ID NO: 1925615 - DNA, 25 bp, Homo sapien
tacagactgatcgaggcataatgct

SEQ ID NO: 1925616 - DNA, 25 bp, Homo sapien
gaattgtgatccctagacagaggca

SEQ ID NO: 1925617 - DNA, 25 bp, Homo sapien
taaaggtagggcaggagatagctcc

SEQ ID NO: 1925618 - DNA, 25 bp, Homo sapien
gggtccctcacggtctgtatccaaa

SEQ ID NO: 1925619 - DNA, 25 bp, Homo sapien
cttctgagttcctaagactacagat

SEQ ID NO: 1925620 - DNA, 25 bp, Homo sapien
gactacagataaggggattgagcat

SEQ ID NO: 1925621 - DNA, 25 bp, Homo sapien
acttctgagttcctaagactacaga

SEQ ID NO: 1925622 - DNA, 25 bp, Homo sapien
cctaagactacagataaggggattg

SEQ ID NO: 1925623 - DNA, 25 bp, Homo sapien
aacgagtccaatcacacagaggtgg

SEQ ID NO: 1925624 - DNA, 25 bp, Homo sapien
gaagcaggtgcggaaggctttcctc

SEQ ID NO: 1925625 - DNA, 25 bp, Homo sapien
tcctctgaacttcccttgattggat

SEQ ID NO: 1925626 - DNA, 25 bp, Homo sapien
ggctgtgccataaacgagtccaatc

SEQ ID NO: 1925627 - DNA, 25 bp, Homo sapien
gaggatgcacatatatgaaactaca

SEQ ID NO: 1925628 - DNA, 25 bp, Homo sapien
tatgaaactacaattgtggacaagg

SEQ ID NO: 1925629 - DNA, 25 bp, Homo sapien
atagcacagaggatgcacatatatg

SEQ ID NO: 1925630 - DNA, 25 bp, Homo sapien
ctacaattgtggacaagggtcccac

SEQ ID NO: 1925631 - DNA, 25 bp, Homo sapien
cattctgtgacagcaaaagtggaaa

SEQ ID NO: 1925632 - DNA, 25 bp, Homo sapien
tccaggaagtcaccgcgagggtgat

SEQ ID NO: 1925633 - DNA, 25 bp, Homo sapien
aggtctgcatcatgcggcccgcaaa

SEQ ID NO: 1925634 - DNA, 25 bp, Homo sapien
ggtcatgatggccaaatatcggagg

SEQ ID NO: 1925635 - DNA, 25 bp, Homo sapien
ttcccacaatgtttagatgagcatt

SEQ ID NO: 1925636 - DNA, 25 bp, Homo sapien
gatgagcatttatgtgaatgactga

SEQ ID NO: 1925637 - DNA, 25 bp, Homo sapien
gactgaatagatttgcactgtgtca

SEQ ID NO: 1925638 - DNA, 25 bp, Homo sapien
tatgtgaatgactgaatagatttgc

SEQ ID NO: 1925639 - DNA, 25 bp, Homo sapien
aaagtgcccttgcattaggcctggc

SEQ ID NO: 1925640 - DNA, 25 bp, Homo sapien
catcagtgatatagggatctgggcc

SEQ ID NO: 1925641 - DNA, 25 bp, Homo sapien
ttatgtggacgtgcttatgctgccc

SEQ ID NO: 1925642 - DNA, 25 bp, Homo sapien
tatcagctggttggaaggacctagg

SEQ ID NO: 1925643 - DNA, 25 bp, Homo sapien
cagttcttggcatgaagacaccaca

SEQ ID NO: 1925644 - DNA, 25 bp, Homo sapien
catgaagacaccacaacctttagaa

SEQ ID NO: 1925645 - DNA, 25 bp, Homo sapien
ggcatgaagacaccacaacctttag

SEQ ID NO: 1925646 - DNA, 25 bp, Homo sapien
tcttggcatgaagacaccacaacct

SEQ ID NO: 1925647 - DNA, 25 bp, Homo sapien
ggaatcaatcctgaagggaactcgc

SEQ ID NO: 1925648 - DNA, 25 bp, Homo sapien
tctcggatgaaggtaaggaggtaaa

SEQ ID NO: 1925649 - DNA, 25 bp, Homo sapien
gggtaaaatccaggtctcggatgaa

SEQ ID NO: 1925650 - DNA, 25 bp, Homo sapien
tccaggtctcggatgaaggtaagga

SEQ ID NO: 1925651 - DNA, 25 bp, Homo sapien
taaaatccaggtctcggatgaaggt

SEQ ID NO: 1925652 - DNA, 25 bp, Homo sapien
ggtcaccgcagtaacactggccaca

SEQ ID NO: 1925653 - DNA, 25 bp, Homo sapien
atgcgcacgtgacaaccaaccggag

SEQ ID NO: 1925654 - DNA, 25 bp, Homo sapien
ttgggtctggaacccgaatgcgcac

SEQ ID NO: 1925655 - DNA, 25 bp, Homo sapien
cacaacaagcggtggagaacacgca

SEQ ID NO: 1925656 - DNA, 25 bp, Homo sapien
ggacattgtctaggtgtccctctcc

SEQ ID NO: 1925657 - DNA, 25 bp, Homo sapien
tttgcaggacattgtctaggtgtcc

SEQ ID NO: 1925658 - DNA, 25 bp, Homo sapien
tctcgttttgcaggacattgtctag

SEQ ID NO: 1925659 - DNA, 25 bp, Homo sapien
agtatttctcgttttgcaggacatt

SEQ ID NO: 1925660 - DNA, 25 bp, Homo sapien
tagctgcccagcgaaaccaccagta

SEQ ID NO: 1925661 - DNA, 25 bp, Homo sapien
ggtggagcttatggcccttccaagg

SEQ ID NO: 1925662 - DNA, 25 bp, Homo sapien
tgcccagcgaaaccaccagtagtgt

SEQ ID NO: 1925663 - DNA, 25 bp, Homo sapien
tgtattcgcggtaacggcggagcta

SEQ ID NO: 1925664 - DNA, 25 bp, Homo sapien
ctggtttttggtgatccgtcgggtg

SEQ ID NO: 1925665 - DNA, 25 bp, Homo sapien
ttttggtgatccgtcgggtgtcagg

SEQ ID NO: 1925666 - DNA, 25 bp, Homo sapien
gtttttggtgatccgtcgggtgtca

SEQ ID NO: 1925667 - DNA, 25 bp, Homo sapien
tggactggtttttggtgatccgtcg

SEQ ID NO: 1925668 - DNA, 25 bp, Homo sapien
attgaggattcttagagccccaaag

SEQ ID NO: 1925669 - DNA, 25 bp, Homo sapien
aattgaggattcttagagccccaaa

SEQ ID NO: 1925670 - DNA, 25 bp, Homo sapien
ctacaaaggactgaaggcttcgagc

SEQ ID NO: 1925671 - DNA, 25 bp, Homo sapien
aaaggactgaaggcttcgagcaaag

SEQ ID NO: 1925672 - DNA, 25 bp, Homo sapien
acaaaggactgaaggcttcgagcaa

SEQ ID NO: 1925673 - DNA, 25 bp, Homo sapien
aggactgaaggcttcgagcaaagtt

SEQ ID NO: 1925674 - DNA, 25 bp, Homo sapien
atggacaggcttgccgtaagttaca

SEQ ID NO: 1925675 - DNA, 25 bp, Homo sapien
gacaggcttgccgtaagttacaccc

SEQ ID NO: 1925676 - DNA, 25 bp, Homo sapien
tggacaggcttgccgtaagttacac

SEQ ID NO: 1925677 - DNA, 25 bp, Homo sapien
caggcttgccgtaagttacaccctt

SEQ ID NO: 1925678 - DNA, 25 bp, Homo sapien
tagcccagtcggcgtgcttttatca

SEQ ID NO: 1925679 - DNA, 25 bp, Homo sapien
gtagcccagtcggcgtgcttttatc

SEQ ID NO: 1925680 - DNA, 25 bp, Homo sapien
cccagtcggcgtgcttttatcaggg

SEQ ID NO: 1925681 - DNA, 25 bp, Homo sapien
ggtggtactcagctgagcagcggac

SEQ ID NO: 1925682 - DNA, 25 bp, Homo sapien
agctggtggtactcagctgagcagc

SEQ ID NO: 1925683 - DNA, 25 bp, Homo sapien
tggtggtactcagctgagcagcgga

SEQ ID NO: 1925684 - DNA, 25 bp, Homo sapien
gctggtggtactcagctgagcagcg

SEQ ID NO: 1925685 - DNA, 25 bp, Homo sapien
tgcatgacatcagacagtttctttc

SEQ ID NO: 1925686 - DNA, 25 bp, Homo sapien
aagtgcatgacatcagacagtttct

SEQ ID NO: 1925687 - DNA, 25 bp, Homo sapien
aagaaagtgcatgacatcagacagt

SEQ ID NO: 1925688 - DNA, 25 bp, Homo sapien
agaaagtgcatgacatcagacagtt

SEQ ID NO: 1925689 - DNA, 25 bp, Homo sapien
gatggttgccaccagatggaaaggc

SEQ ID NO: 1925690 - DNA, 25 bp, Homo sapien
tgatggttgccaccagatggaaagg

SEQ ID NO: 1925691 - DNA, 25 bp, Homo sapien
ctgatggttgccaccagatggaaag

SEQ ID NO: 1925692 - DNA, 25 bp, Homo sapien
tggttgccaccagatggaaaggcat

SEQ ID NO: 1925693 - DNA, 25 bp, Homo sapien
ataattcattttggatgcagtccat

SEQ ID NO: 1925694 - DNA, 25 bp, Homo sapien
acagctgcagaagcccccgaaataa

SEQ ID NO: 1925695 - DNA, 25 bp, Homo sapien
ctgtatttacaaacagctgcagaag

SEQ ID NO: 1925696 - DNA, 25 bp, Homo sapien
cagaagcccccgaaataattcattt

SEQ ID NO: 1925697 - DNA, 25 bp, Homo sapien
cgccgcgaggccacgcagggcgatt

SEQ ID NO: 1925698 - DNA, 25 bp, Homo sapien
cggcatcggcggctgcatccttctc

SEQ ID NO: 1925699 - DNA, 25 bp, Homo sapien
tgcagaccacacgctgcaattccag

SEQ ID NO: 1925700 - DNA, 25 bp, Homo sapien
cgcctttgagaagccggaccggcat

SEQ ID NO: 1925701 - DNA, 25 bp, Homo sapien
gtcatccttagaaatactcgacccc

SEQ ID NO: 1925702 - DNA, 25 bp, Homo sapien
gcaggatggttcactctcacttgaa

SEQ ID NO: 1925703 - DNA, 25 bp, Homo sapien
tatggatgcctgtgaaagcaggctg

SEQ ID NO: 1925704 - DNA, 25 bp, Homo sapien
caggctgttcaaaacggtcatcctt

SEQ ID NO: 1925705 - DNA, 25 bp, Homo sapien
cagtgtgtaactcttgtgtaaaacc

SEQ ID NO: 1925706 - DNA, 25 bp, Homo sapien
tcgataattgtatatggaatcagtg

SEQ ID NO: 1925707 - DNA, 25 bp, Homo sapien
cttgaggtgtttcacacacgatgag

SEQ ID NO: 1925708 - DNA, 25 bp, Homo sapien
cacacgatgaggtagtcgataattg

SEQ ID NO: 1925709 - DNA, 25 bp, Homo sapien
acagacactccaagtgtggcagtcg

SEQ ID NO: 1925710 - DNA, 25 bp, Homo sapien
cggcatgtatgaaggagagcctcct

SEQ ID NO: 1925711 - DNA, 25 bp, Homo sapien
tacagacactccaagtgtggcagtc

SEQ ID NO: 1925712 - DNA, 25 bp, Homo sapien
gtggcagtcggcatgtatgaaggag

SEQ ID NO: 1925713 - DNA, 25 bp, Homo sapien
tgctgccacaccctgaattcagtct

SEQ ID NO: 1925714 - DNA, 25 bp, Homo sapien
tctgccttgaatcttgttctggtat

SEQ ID NO: 1925715 - DNA, 25 bp, Homo sapien
aactttgctgccacaccctgaattc

SEQ ID NO: 1925716 - DNA, 25 bp, Homo sapien
ccttgaatcttgttctggtatttct

SEQ ID NO: 1925717 - DNA, 25 bp, Homo sapien
cgcaaatgattgattcgaccaattc

SEQ ID NO: 1925718 - DNA, 25 bp, Homo sapien
tgattgattcgaccaattctctggg

SEQ ID NO: 1925719 - DNA, 25 bp, Homo sapien
cacgcaaatgattgattcgaccaat

SEQ ID NO: 1925720 - DNA, 25 bp, Homo sapien
aatgattgattcgaccaattctctg

SEQ ID NO: 1925721 - DNA, 25 bp, Homo sapien
ctgtccagcacttgtccatttgcga

SEQ ID NO: 1925722 - DNA, 25 bp, Homo sapien
cagcacttgtccatttgcgatgtaa

SEQ ID NO: 1925723 - DNA, 25 bp, Homo sapien
gtccagcacttgtccatttgcgatg

SEQ ID NO: 1925724 - DNA, 25 bp, Homo sapien
ccagcacttgtccatttgcgatgta

SEQ ID NO: 1925725 - DNA, 25 bp, Homo sapien
agctctgctttagggactgatatcc

SEQ ID NO: 1925726 - DNA, 25 bp, Homo sapien
gctctgctttagggactgatatcct

SEQ ID NO: 1925727 - DNA, 25 bp, Homo sapien
cagctctgctttagggactgatatc

SEQ ID NO: 1925728 - DNA, 25 bp, Homo sapien
aatgaaggtcaagtggttatagctt

SEQ ID NO: 1925729 - DNA, 25 bp, Homo sapien
tgaaggtcaagtggttatagcttag

SEQ ID NO: 1925730 - DNA, 25 bp, Homo sapien
ggaatgaaggtcaagtggttatagc

SEQ ID NO: 1925731 - DNA, 25 bp, Homo sapien
gaaggtcaagtggttatagcttaga

SEQ ID NO: 1925732 - DNA, 25 bp, Homo sapien
gattctcaatattaataggacccca

SEQ ID NO: 1925733 - DNA, 25 bp, Homo sapien
tccaggaatgtaagtaatgttattg

SEQ ID NO: 1925734 - DNA, 25 bp, Homo sapien
taggaccccaaaagagctgctctag

SEQ ID NO: 1925735 - DNA, 25 bp, Homo sapien
tagataatgccccagtttatccagg

SEQ ID NO: 1925736 - DNA, 25 bp, Homo sapien
ccataagtttaagcaggaaagattc

SEQ ID NO: 1925737 - DNA, 25 bp, Homo sapien
cataagtttaagcaggaaagattct

SEQ ID NO: 1925738 - DNA, 25 bp, Homo sapien
aagcaggaaagattctgaagatgct

SEQ ID NO: 1925739 - DNA, 25 bp, Homo sapien
caggaaagattctgaagatgctgac

SEQ ID NO: 1925740 - DNA, 25 bp, Homo sapien
ctcatgcaaattattcaggctgaaa

SEQ ID NO: 1925741 - DNA, 25 bp, Homo sapien
ttaggtctaactcatgcaaattatt

SEQ ID NO: 1925742 - DNA, 25 bp, Homo sapien
taactcatgcaaattattcaggctg

SEQ ID NO: 1925743 - DNA, 25 bp, Homo sapien
tccaggtcacagctgatcagttcta

SEQ ID NO: 1925744 - DNA, 25 bp, Homo sapien
gtgaaggcaagaggtctgcaatgac

SEQ ID NO: 1925745 - DNA, 25 bp, Homo sapien
agtgaaggcaagaggtctgcaatga

SEQ ID NO: 1925746 - DNA, 25 bp, Homo sapien
ctgggagaggctactctgcaagtag

SEQ ID NO: 1925747 - DNA, 25 bp, Homo sapien
caagtagagggtccttggatatttt

SEQ ID NO: 1925748 - DNA, 25 bp, Homo sapien
gcaagtagagggtccttggatattt

SEQ ID NO: 1925749 - DNA, 25 bp, Homo sapien
tgcaagtagagggtccttggatatt

SEQ ID NO: 1925750 - DNA, 25 bp, Homo sapien
tgtggggcagaaaagtttctcacat

SEQ ID NO: 1925751 - DNA, 25 bp, Homo sapien
tcccatttcaggatgcttcaggcag

SEQ ID NO: 1925752 - DNA, 25 bp, Homo sapien
tctaactgcacagtactgaactgtt

SEQ ID NO: 1925753 - DNA, 25 bp, Homo sapien
ctgaaagccgtctaactgcacagta

SEQ ID NO: 1925754 - DNA, 25 bp, Homo sapien
tttgaggttgaccagctgtgagacg

SEQ ID NO: 1925755 - DNA, 25 bp, Homo sapien
gtctgctccaggcttagcacctcca

SEQ ID NO: 1925756 - DNA, 25 bp, Homo sapien
ctgtgagacggcagacggcagcttc

SEQ ID NO: 1925757 - DNA, 25 bp, Homo sapien
agatgaatggtccacatctttgagg

SEQ ID NO: 1925758 - DNA, 25 bp, Homo sapien
tatcttgtcttggacattttccaca

SEQ ID NO: 1925759 - DNA, 25 bp, Homo sapien
gactgttgagcataaaaagatgcag

SEQ ID NO: 1925760 - DNA, 25 bp, Homo sapien
ttcggtgaactcaaagacatttgtc

SEQ ID NO: 1925761 - DNA, 25 bp, Homo sapien
gacatttgtctggaagactgttgag

SEQ ID NO: 1925762 - DNA, 25 bp, Homo sapien
cattactgaggttgatctgtttcag

SEQ ID NO: 1925763 - DNA, 25 bp, Homo sapien
ttcattactgaggttgatctgtttc

SEQ ID NO: 1925764 - DNA, 25 bp, Homo sapien
tactgaggttgatctgtttcagttt

SEQ ID NO: 1925765 - DNA, 25 bp, Homo sapien
ccattcattactgaggttgatctgt

SEQ ID NO: 1925766 - DNA, 25 bp, Homo sapien
ggaggtcagactgtagagtacatcc

SEQ ID NO: 1925767 - DNA, 25 bp, Homo sapien
gaggtcagactgtagagtacatcca

SEQ ID NO: 1925768 - DNA, 25 bp, Homo sapien
aggtcagactgtagagtacatccaa

SEQ ID NO: 1925769 - DNA, 25 bp, Homo sapien
cctgtaaaagcctacatgtcaactg

SEQ ID NO: 1925770 - DNA, 25 bp, Homo sapien
gtcaactgaacagtcaatttaaaga

SEQ ID NO: 1925771 - DNA, 25 bp, Homo sapien
atcctgtaaaagcctacatgtcaac

SEQ ID NO: 1925772 - DNA, 25 bp, Homo sapien
tacatgtcaactgaacagtcaattt

SEQ ID NO: 1925773 - DNA, 25 bp, Homo sapien
actattatctgcttcagatacacac

SEQ ID NO: 1925774 - DNA, 25 bp, Homo sapien
tgctctacgtgcatgcggaatcttc

SEQ ID NO: 1925775 - DNA, 25 bp, Homo sapien
tctggaatctatgtcagttgaacac

SEQ ID NO: 1925776 - DNA, 25 bp, Homo sapien
ggccacaaaatgctcaagcttggag

SEQ ID NO: 1925777 - DNA, 25 bp, Homo sapien
caggtggggcaatgactgctttctg

SEQ ID NO: 1925778 - DNA, 25 bp, Homo sapien
caaagaacagtgtgtgcaagagcac

SEQ ID NO: 1925779 - DNA, 25 bp, Homo sapien
gcaaagaacagtgtgtgcaagagca

SEQ ID NO: 1925780 - DNA, 25 bp, Homo sapien
ctgcaaagaacagtgtgtgcaagag

SEQ ID NO: 1925781 - DNA, 25 bp, Homo sapien
tgcaaagaacagtgtgtgcaagagc

SEQ ID NO: 1925782 - DNA, 25 bp, Homo sapien
cagacagcgttgatgtaggagtcct

SEQ ID NO: 1925783 - DNA, 25 bp, Homo sapien
taacagacagcgttgatgtaggagt

SEQ ID NO: 1925784 - DNA, 25 bp, Homo sapien
tcgtaacagacagcgttgatgtagg

SEQ ID NO: 1925785 - DNA, 25 bp, Homo sapien
tttctcgtaacagacagcgttgatg

SEQ ID NO: 1925786 - DNA, 25 bp, Homo sapien
ctgatgtcccgggattagaggatgt

SEQ ID NO: 1925787 - DNA, 25 bp, Homo sapien
tgactgggtgtctgctagtaaacat

SEQ ID NO: 1925788 - DNA, 25 bp, Homo sapien
cgagtgggatcggaaactgatgtcc

SEQ ID NO: 1925789 - DNA, 25 bp, Homo sapien
ccaaggcatggtgcaatgattgtca

SEQ ID NO: 1925790 - DNA, 25 bp, Homo sapien
tgcacaaaagagacactggatgctt

SEQ ID NO: 1925791 - DNA, 25 bp, Homo sapien
gatagatgttatcatgaagccacag

SEQ ID NO: 1925792 - DNA, 25 bp, Homo sapien
ctggatgcttcttggtagtagaggc

SEQ ID NO: 1925793 - DNA, 25 bp, Homo sapien
gaccttctaacattccttggatgga

SEQ ID NO: 1925794 - DNA, 25 bp, Homo sapien
attataggcgagagctgctgtgtgc

SEQ ID NO: 1925795 - DNA, 25 bp, Homo sapien
catagagtacaaggactggtaggcc

SEQ ID NO: 1925796 - DNA, 25 bp, Homo sapien
cttaagtgaggtaagtaacttccat

SEQ ID NO: 1925797 - DNA, 25 bp, Homo sapien
gagaagaaggcagctgctcatttcc

SEQ ID NO: 1925798 - DNA, 25 bp, Homo sapien
tttaaggagacaagatgggcatgga

SEQ ID NO: 1925799 - DNA, 25 bp, Homo sapien
gatgggcatggaacagggaccaccc

SEQ ID NO: 1925800 - DNA, 25 bp, Homo sapien
tcctctgggagaagctgttaccccc

SEQ ID NO: 1925801 - DNA, 25 bp, Homo sapien
tctgggagaagctgttacccccttc

SEQ ID NO: 1925802 - DNA, 25 bp, Homo sapien
gcttctctgcagacatgaaactgag

SEQ ID NO: 1925803 - DNA, 25 bp, Homo sapien
gatcatgggcgatggtgcttctctg

SEQ ID NO: 1925804 - DNA, 25 bp, Homo sapien
ggttgttgacagttaaccacagctg

SEQ ID NO: 1925805 - DNA, 25 bp, Homo sapien
aaactgagtccgagggttgttgaca

SEQ ID NO: 1925806 - DNA, 25 bp, Homo sapien
cttgaatatgctcttgtccttccat

SEQ ID NO: 1925807 - DNA, 25 bp, Homo sapien
tgtaattcccacctctgtactgctt

SEQ ID NO: 1925808 - DNA, 25 bp, Homo sapien
ctgtaattcccacctctgtactgct

SEQ ID NO: 1925809 - DNA, 25 bp, Homo sapien
ccatctctcttcttgaatatgctct

SEQ ID NO: 1925810 - DNA, 25 bp, Homo sapien
tgttctggacttcaggcttgaaata

SEQ ID NO: 1925811 - DNA, 25 bp, Homo sapien
cgtgcaaggcacatagactagtttg

SEQ ID NO: 1925812 - DNA, 25 bp, Homo sapien
gaaactaacctataacggccagaga

SEQ ID NO: 1925813 - DNA, 25 bp, Homo sapien
tacaaatgccaaaaggaccaagtgt

SEQ ID NO: 1925814 - DNA, 25 bp, Homo sapien
tgtaaacattttccacgtgcaaggc

SEQ ID NO: 1925815 - DNA, 25 bp, Homo sapien
aactgtccgaaaaacagtcatatca

SEQ ID NO: 1925816 - DNA, 25 bp, Homo sapien
cgaaaaacagtcatatcaaagtaga

SEQ ID NO: 1925817 - DNA, 25 bp, Homo sapien
aataaactgtccgaaaaacagtcat

SEQ ID NO: 1925818 - DNA, 25 bp, Homo sapien
gtccgaaaaacagtcatatcaaagt

SEQ ID NO: 1925819 - DNA, 25 bp, Homo sapien
gctatatagagtcactcagttttta

SEQ ID NO: 1925820 - DNA, 25 bp, Homo sapien
gatcagctatatagagtcactcagt

SEQ ID NO: 1925821 - DNA, 25 bp, Homo sapien
actgatcagctatatagagtcactc

SEQ ID NO: 1925822 - DNA, 25 bp, Homo sapien
tatagagtcactcagtttttaataa

SEQ ID NO: 1925823 - DNA, 25 bp, Homo sapien
aatgcacatcctagctgtcactggg

SEQ ID NO: 1925824 - DNA, 25 bp, Homo sapien
gcaggtcagtgagcacgctaaaatt

SEQ ID NO: 1925825 - DNA, 25 bp, Homo sapien
gacggactgtcattctatctgagca

SEQ ID NO: 1925826 - DNA, 25 bp, Homo sapien
tcttgatggctggagaatgcacatc

SEQ ID NO: 1925827 - DNA, 25 bp, Homo sapien
ttcttcatgacctcgccgtcagggc

SEQ ID NO: 1925828 - DNA, 25 bp, Homo sapien
cacttgaactccaccggcagggtgg

SEQ ID NO: 1925829 - DNA, 25 bp, Homo sapien
gagattttgggagtacggatgcact

SEQ ID NO: 1925830 - DNA, 25 bp, Homo sapien
gcagcatcggccgtcggtacatact

SEQ ID NO: 1925831 - DNA, 25 bp, Homo sapien
gaaaactggtggttgctattacaca

SEQ ID NO: 1925832 - DNA, 25 bp, Homo sapien
tactaacaagcgtggcaagagccct

SEQ ID NO: 1925833 - DNA, 25 bp, Homo sapien
caagaggagtggctttcttcaaccc

SEQ ID NO: 1925834 - DNA, 25 bp, Homo sapien
tcttgaattaactaaccctgtggaa

SEQ ID NO: 1925835 - DNA, 25 bp, Homo sapien
caggaggcgttgtcattggtaaccc

SEQ ID NO: 1925836 - DNA, 25 bp, Homo sapien
agatgcccatcccacaggtcttgga

SEQ ID NO: 1925837 - DNA, 25 bp, Homo sapien
gccaaacgtgtcttccagtcggtaa

SEQ ID NO: 1925838 - DNA, 25 bp, Homo sapien
tggtaacccgggtggagatgcccat

SEQ ID NO: 1925839 - DNA, 25 bp, Homo sapien
caggcacgtgcactggtacttgcag

SEQ ID NO: 1925840 - DNA, 25 bp, Homo sapien
gcagacgaacgtccatgctgcacag

SEQ ID NO: 1925841 - DNA, 25 bp, Homo sapien
cacggtttggtccttgggctcgtca

SEQ ID NO: 1925842 - DNA, 25 bp, Homo sapien
accgtaccaccgaagatgcagggag

SEQ ID NO: 1925843 - DNA, 25 bp, Homo sapien
ggcattggggcactctcacatccag

SEQ ID NO: 1925844 - DNA, 25 bp, Homo sapien
aggcattggggcactctcacatcca

SEQ ID NO: 1925845 - DNA, 25 bp, Homo sapien
tgcgagttgggatctgggctgcagg

SEQ ID NO: 1925846 - DNA, 25 bp, Homo sapien
gatgcgagttgggatctgggctgca

SEQ ID NO: 1925847 - DNA, 25 bp, Homo sapien
gggatgcgagttgggatctgggctg

SEQ ID NO: 1925848 - DNA, 25 bp, Homo sapien
agggatgcgagttgggatctgggct

SEQ ID NO: 1925849 - DNA, 25 bp, Homo sapien
gagaaagaaactcagtccgagcggt

SEQ ID NO: 1925850 - DNA, 25 bp, Homo sapien
agaaagaaactcagtccgagcggtt

SEQ ID NO: 1925851 - DNA, 25 bp, Homo sapien
gccggacacctagcggtgggggctg

SEQ ID NO: 1925852 - DNA, 25 bp, Homo sapien
cggacacctagcggtgggggctgcg

SEQ ID NO: 1925853 - DNA, 25 bp, Homo sapien
aggaggcggccggacacctagcggt

SEQ ID NO: 1925854 - DNA, 25 bp, Homo sapien
aggcggccggacacctagcggtggg

SEQ ID NO: 1925855 - DNA, 25 bp, Homo sapien
acagaataggcccttgtgcgggtcg

SEQ ID NO: 1925856 - DNA, 25 bp, Homo sapien
tgtgcgggtcgcatgggtcgcgctc

SEQ ID NO: 1925857 - DNA, 25 bp, Homo sapien
atgggtcgcgctcggtgcacagctc

SEQ ID NO: 1925858 - DNA, 25 bp, Homo sapien
gagccgaagtgacagaataggccct

SEQ ID NO: 1925859 - DNA, 25 bp, Homo sapien
gcgccggctcgtccgggcaccggca

SEQ ID NO: 1925860 - DNA, 25 bp, Homo sapien
gctcgtccgggcaccggcacggccc

SEQ ID NO: 1925861 - DNA, 25 bp, Homo sapien
gcggcgccggctcgtccgggcaccg

SEQ ID NO: 1925862 - DNA, 25 bp, Homo sapien
ccgggcaccggcacggcccgctgca

SEQ ID NO: 1925863 - DNA, 25 bp, Homo sapien
gtcagcggcgctcggtcggcgcgca

SEQ ID NO: 1925864 - DNA, 25 bp, Homo sapien
acagggcggtcagcggcgctcggtc

SEQ ID NO: 1925865 - DNA, 25 bp, Homo sapien
ggcggtcagcggcgctcggtcggcg

SEQ ID NO: 1925866 - DNA, 25 bp, Homo sapien
cggtcagcggcgctcggtcggcgcg

SEQ ID NO: 1925867 - DNA, 25 bp, Homo sapien
gggcgaggaggaccacgaaggcgac

SEQ ID NO: 1925868 - DNA, 25 bp, Homo sapien
gcactgcgggcggagcggagggcgc

SEQ ID NO: 1925869 - DNA, 25 bp, Homo sapien
ggcggagcggagggcgcggtggcgg

SEQ ID NO: 1925870 - DNA, 25 bp, Homo sapien
ggttggcactgcgggcggagcggag

SEQ ID NO: 1925871 - DNA, 25 bp, Homo sapien
gcggagcggagggcgcggtggcggc

SEQ ID NO: 1925872 - DNA, 25 bp, Homo sapien
gccgggctgtcgtctcggggctgtc

SEQ ID NO: 1925873 - DNA, 25 bp, Homo sapien
gggcggctgccgtcgagctggaggg

SEQ ID NO: 1925874 - DNA, 25 bp, Homo sapien
ggctgccgtcgagctggagggtgga

SEQ ID NO: 1925875 - DNA, 25 bp, Homo sapien
gctggagggtggagtcgcactggct

SEQ ID NO: 1925876 - DNA, 25 bp, Homo sapien
caaggacgaggagaattcttagacc

SEQ ID NO: 1925877 - DNA, 25 bp, Homo sapien
aatgaccttatgttgagcagaaacg

SEQ ID NO: 1925878 - DNA, 25 bp, Homo sapien
tatgttgagcagaaacggccatctg

SEQ ID NO: 1925879 - DNA, 25 bp, Homo sapien
gaagccattttgtctaccgtaagcg

SEQ ID NO: 1925880 - DNA, 25 bp, Homo sapien
tttctggcagcccaatattccacca

SEQ ID NO: 1925881 - DNA, 25 bp, Homo sapien
agcccaatattccaccaagctaggc

SEQ ID NO: 1925882 - DNA, 25 bp, Homo sapien
tagggaaatactcctgttgtactgt

SEQ ID NO: 1925883 - DNA, 25 bp, Homo sapien
gcattgctggtggtagggaaatact

SEQ ID NO: 1925884 - DNA, 25 bp, Homo sapien
caaattgccacaggggggagtataa

SEQ ID NO: 1925885 - DNA, 25 bp, Homo sapien
ttatgaattgtgattctgtcttcag

SEQ ID NO: 1925886 - DNA, 25 bp, Homo sapien
atgaattgtgattctgtcttcagga

SEQ ID NO: 1925887 - DNA, 25 bp, Homo sapien
atcaaattgccacaggggggagtat

SEQ ID NO: 1925888 - DNA, 25 bp, Homo sapien
tgactttggggatgccgtggcacat

SEQ ID NO: 1925889 - DNA, 25 bp, Homo sapien
cagtcctgactttggggatgccgtg

SEQ ID NO: 1925890 - DNA, 25 bp, Homo sapien
tcctgactttggggatgccgtggca

SEQ ID NO: 1925891 - DNA, 25 bp, Homo sapien
cacatggaagagagtaaatgggcca

SEQ ID NO: 1925892 - DNA, 25 bp, Homo sapien
ctatctttgccaaaattggacaact

SEQ ID NO: 1925893 - DNA, 25 bp, Homo sapien
attgagtacaagattctgaggagta

SEQ ID NO: 1925894 - DNA, 25 bp, Homo sapien
gagaattgagtacaagattctgagg

SEQ ID NO: 1925895 - DNA, 25 bp, Homo sapien
acttctgaaaagagaattgagtaca

SEQ ID NO: 1925896 - DNA, 25 bp, Homo sapien
gctagttctgagctacagatcctcc

SEQ ID NO: 1925897 - DNA, 25 bp, Homo sapien
gctttgccttgtctggacctctgca

SEQ ID NO: 1925898 - DNA, 25 bp, Homo sapien
ggcctgcttggttcttgctgtgatc

SEQ ID NO: 1925899 - DNA, 25 bp, Homo sapien
ttggtggagaacttgccttgggcta

SEQ ID NO: 1925900 - DNA, 25 bp, Homo sapien
taatatataaaatatgtttctggat

SEQ ID NO: 1925901 - DNA, 25 bp, Homo sapien
tataaaatatgtttctggatatatt

SEQ ID NO: 1925902 - DNA, 25 bp, Homo sapien
tatgtttctggatatattttaaaat

SEQ ID NO: 1925903 - DNA, 25 bp, Homo sapien
aatatgtttctggatatattttaaa

SEQ ID NO: 1925904 - DNA, 25 bp, Homo sapien
tattccatattgtttggtgttttag

SEQ ID NO: 1925905 - DNA, 25 bp, Homo sapien
ttattccatattgtttggtgtttta

SEQ ID NO: 1925906 - DNA, 25 bp, Homo sapien
tgcatgaactacaaagaatacgtcc

SEQ ID NO: 1925907 - DNA, 25 bp, Homo sapien
gcattgcttacgtaaaacattccat

SEQ ID NO: 1925908 - DNA, 25 bp, Homo sapien
cctcccagggataaccagacttaga

SEQ ID NO: 1925909 - DNA, 25 bp, Homo sapien
cagacttagagtttagcttgtagct

SEQ ID NO: 1925910 - DNA, 25 bp, Homo sapien
catccaaagggggtgtgtccaattt

SEQ ID NO: 1925911 - DNA, 25 bp, Homo sapien
tcatccaaagggggtgtgtccaatt

SEQ ID NO: 1925912 - DNA, 25 bp, Homo sapien
gtgtggctgctgtttatacctgctg

SEQ ID NO: 1925913 - DNA, 25 bp, Homo sapien
ttctgtgtttgagttggcgctgcca

SEQ ID NO: 1925914 - DNA, 25 bp, Homo sapien
tatacctgctgaagtgctttctgtg

SEQ ID NO: 1925915 - DNA, 25 bp, Homo sapien
gcaagggctgctgactggtttcccc

SEQ ID NO: 1925916 - DNA, 25 bp, Homo sapien
cgtcagtctgtaaagatttttagaa

SEQ ID NO: 1925917 - DNA, 25 bp, Homo sapien
ctgaaaactgacacctacttgttcc

SEQ ID NO: 1925918 - DNA, 25 bp, Homo sapien
ttctgaaaactgacacctacttgtt

SEQ ID NO: 1925919 - DNA, 25 bp, Homo sapien
gctcctttcgtcagtctgtaaagat

SEQ ID NO: 1925920 - DNA, 25 bp, Homo sapien
cagtccgtactggattagtcattat

SEQ ID NO: 1925921 - DNA, 25 bp, Homo sapien
cactgttcggcagtcactgtggtta

SEQ ID NO: 1925922 - DNA, 25 bp, Homo sapien
ctattccttgccagtccgtactgga

SEQ ID NO: 1925923 - DNA, 25 bp, Homo sapien
aaagtgtcagtcacgattgtcactg

SEQ ID NO: 1925924 - DNA, 25 bp, Homo sapien
ttctttggtcttcaagccaggtagg

SEQ ID NO: 1925925 - DNA, 25 bp, Homo sapien
ctttggtcttcaagccaggtaggac

SEQ ID NO: 1925926 - DNA, 25 bp, Homo sapien
ctctttctttggtcttcaagccagg

SEQ ID NO: 1925927 - DNA, 25 bp, Homo sapien
ctttctttggtcttcaagccaggta

SEQ ID NO: 1925928 - DNA, 25 bp, Homo sapien
ccacatcagtgacaaatattatttt

SEQ ID NO: 1925929 - DNA, 25 bp, Homo sapien
ctaccacatcagtgacaaatattat

SEQ ID NO: 1925930 - DNA, 25 bp, Homo sapien
cccagcggtgatgaacctataattc

SEQ ID NO: 1925931 - DNA, 25 bp, Homo sapien
gatgaacctataattcccaaattgt

SEQ ID NO: 1925932 - DNA, 25 bp, Homo sapien
tcatctgtttaaatccctgattcat

SEQ ID NO: 1925933 - DNA, 25 bp, Homo sapien
ctccatcatctgtttaaatccctga

SEQ ID NO: 1925934 - DNA, 25 bp, Homo sapien
tttcctccatcatctgtttaaatcc

SEQ ID NO: 1925935 - DNA, 25 bp, Homo sapien
tccatcatctgtttaaatccctgat

SEQ ID NO: 1925936 - DNA, 25 bp, Homo sapien
cctgcagctggctcatggttaactg

SEQ ID NO: 1925937 - DNA, 25 bp, Homo sapien
gcctcactgaagatgtaaatactgt

SEQ ID NO: 1925938 - DNA, 25 bp, Homo sapien
tcctggctggaaagagctacacgag

SEQ ID NO: 1925939 - DNA, 25 bp, Homo sapien
tggttaactgctggagcctcactga

SEQ ID NO: 1925940 - DNA, 25 bp, Homo sapien
tcagttgatcgaagctttgagcaaa

SEQ ID NO: 1925941 - DNA, 25 bp, Homo sapien
taaatcttgtgaggtcattccagac

SEQ ID NO: 1925942 - DNA, 25 bp, Homo sapien
accattcgcctttccctgttatgca

SEQ ID NO: 1925943 - DNA, 25 bp, Homo sapien
aaactgcttaaatcttgtgaggtca

SEQ ID NO: 1925944 - DNA, 25 bp, Homo sapien
agatgctgatgatatcatattccat

SEQ ID NO: 1925945 - DNA, 25 bp, Homo sapien
tagatgctgatgatatcatattcca

SEQ ID NO: 1925946 - DNA, 25 bp, Homo sapien
ttagatgctgatgatatcatattcc

SEQ ID NO: 1925947 - DNA, 25 bp, Homo sapien
tagaggtactctcctttggtagaac

SEQ ID NO: 1925948 - DNA, 25 bp, Homo sapien
agaggtactctcctttggtagaact

SEQ ID NO: 1925949 - DNA, 25 bp, Homo sapien
gaggtactctcctttggtagaacta

SEQ ID NO: 1925950 - DNA, 25 bp, Homo sapien
ttagaggtactctcctttggtagaa

SEQ ID NO: 1925951 - DNA, 25 bp, Homo sapien
gttgctgcagcaggtattttccaag

SEQ ID NO: 1925952 - DNA, 25 bp, Homo sapien
cacagttgctgcagcaggtattttc

SEQ ID NO: 1925953 - DNA, 25 bp, Homo sapien
cagttgctgcagcaggtattttcca

SEQ ID NO: 1925954 - DNA, 25 bp, Homo sapien
ccacagttgctgcagcaggtatttt

SEQ ID NO: 1925955 - DNA, 25 bp, Homo sapien
tcaccacctgtacagagccttccag

SEQ ID NO: 1925956 - DNA, 25 bp, Homo sapien
caccacctgtacagagccttccagg

SEQ ID NO: 1925957 - DNA, 25 bp, Homo sapien
catcaccacctgtacagagccttcc

SEQ ID NO: 1925958 - DNA, 25 bp, Homo sapien
atcaccacctgtacagagccttcca

SEQ ID NO: 1925959 - DNA, 25 bp, Homo sapien
gttcagggtccagctcaagtctttc

SEQ ID NO: 1925960 - DNA, 25 bp, Homo sapien
ccagctcaagtctttccttcgccat

SEQ ID NO: 1925961 - DNA, 25 bp, Homo sapien
ggtccagctcaagtctttccttcgc

SEQ ID NO: 1925962 - DNA, 25 bp, Homo sapien
cagggtccagctcaagtctttcctt

SEQ ID NO: 1925963 - DNA, 25 bp, Homo sapien
tgtccctgtatcttgccctagctta

SEQ ID NO: 1925964 - DNA, 25 bp, Homo sapien
tggtggcaactaggcagctgtcaca

SEQ ID NO: 1925965 - DNA, 25 bp, Homo sapien
tatatgagaaggatataggctggtg

SEQ ID NO: 1925966 - DNA, 25 bp, Homo sapien
gccctagcttagttgcactgtcttc

SEQ ID NO: 1925967 - DNA, 25 bp, Homo sapien
tacagaaaattgaactggtgatagc

SEQ ID NO: 1925968 - DNA, 25 bp, Homo sapien
gagatcttaccctcttgcaaagttg

SEQ ID NO: 1925969 - DNA, 25 bp, Homo sapien
tggtgatagcatattggccatcagt

SEQ ID NO: 1925970 - DNA, 25 bp, Homo sapien
ccaggcaggcctaatctaatgacgt

SEQ ID NO: 1925971 - DNA, 25 bp, Homo sapien
taaacagaagtgagagctctggcac

SEQ ID NO: 1925972 - DNA, 25 bp, Homo sapien
gtaaacagaagtgagagctctggca

SEQ ID NO: 1925973 - DNA, 25 bp, Homo sapien
atgtaaacagaagtgagagctctgg

SEQ ID NO: 1925974 - DNA, 25 bp, Homo sapien
tgtaaacagaagtgagagctctggc

SEQ ID NO: 1925975 - DNA, 25 bp, Homo sapien
aaaggatggatgcttgtttatataa

SEQ ID NO: 1925976 - DNA, 25 bp, Homo sapien
acattatgggagaattaggcatttt

SEQ ID NO: 1925977 - DNA, 25 bp, Homo sapien
ggatggatgcttgtttatataactg

SEQ ID NO: 1925978 - DNA, 25 bp, Homo sapien
cattatgggagaattaggcattttc

SEQ ID NO: 1925979 - DNA, 25 bp, Homo sapien
aatacacactggtattgcatgcagt

SEQ ID NO: 1925980 - DNA, 25 bp, Homo sapien
gatgcctccacctatcttttcaata

SEQ ID NO: 1925981 - DNA, 25 bp, Homo sapien
tcggacacccaggacaagaatgttg

SEQ ID NO: 1925982 - DNA, 25 bp, Homo sapien
tccttctccaaattgatcggacacc

SEQ ID NO: 1925983 - DNA, 25 bp, Homo sapien
gatcaatttcctcacttccagtaga

SEQ ID NO: 1925984 - DNA, 25 bp, Homo sapien
ggccagttctcattggccagcatct

SEQ ID NO: 1925985 - DNA, 25 bp, Homo sapien
ttggtaatgttacgctcctcagctt

SEQ ID NO: 1925986 - DNA, 25 bp, Homo sapien
tcctgtggaaatagaacttacgggc

SEQ ID NO: 1925987 - DNA, 25 bp, Homo sapien
gcaaaatgtcaagggaaaaaatatc

SEQ ID NO: 1925988 - DNA, 25 bp, Homo sapien
tgtcaagggaaaaaatatccctcca

SEQ ID NO: 1925989 - DNA, 25 bp, Homo sapien
tgcaaaatgtcaagggaaaaaatat

SEQ ID NO: 1925990 - DNA, 25 bp, Homo sapien
ctgcaaaatgtcaagggaaaaaata

SEQ ID NO: 1925991 - DNA, 25 bp, Homo sapien
gccacaggcactactaggagacact

SEQ ID NO: 1925992 - DNA, 25 bp, Homo sapien
caggcactactaggagacactgtgt

SEQ ID NO: 1925993 - DNA, 25 bp, Homo sapien
cactactaggagacactgtgttcac

SEQ ID NO: 1925994 - DNA, 25 bp, Homo sapien
gtaagccacaggcactactaggaga

SEQ ID NO: 1925995 - DNA, 25 bp, Homo sapien
aaatgcgatgatctttactaaaaag

SEQ ID NO: 1925996 - DNA, 25 bp, Homo sapien
aagcacttatttccgttggctttct

SEQ ID NO: 1925997 - DNA, 25 bp, Homo sapien
agcaccaaatgcgatgatctttact

SEQ ID NO: 1925998 - DNA, 25 bp, Homo sapien
caccaaatgcgatgatctttactaa

SEQ ID NO: 1925999 - DNA, 25 bp, Homo sapien
ggttttgctcctcaacagtccaagg

SEQ ID NO: 1926000 - DNA, 25 bp, Homo sapien
caaggtttgtgctacttccatggtg

SEQ ID NO: 1926001 - DNA, 25 bp, Homo sapien
tccatggtgatcatctgttaggtca

SEQ ID NO: 1926002 - DNA, 25 bp, Homo sapien
ttctccaacaggcacgaaggcatcc

SEQ ID NO: 1926003 - DNA, 25 bp, Homo sapien
gaaaactgtgctagttggcatccag

SEQ ID NO: 1926004 - DNA, 25 bp, Homo sapien
caaaggagagctacacttggatact

SEQ ID NO: 1926005 - DNA, 25 bp, Homo sapien
ccagcagtgcccaagtattatttaa

SEQ ID NO: 1926006 - DNA, 25 bp, Homo sapien
cactagaacctgtgactgcatcagc

SEQ ID NO: 1926007 - DNA, 25 bp, Homo sapien
tttcagcaaatttcccagaagctgc

SEQ ID NO: 1926008 - DNA, 25 bp, Homo sapien
tgcccactactgctaaaaaggaaat

SEQ ID NO: 1926009 - DNA, 25 bp, Homo sapien
aagctgctgtaaaatcccgtatctg

SEQ ID NO: 1926010 - DNA, 25 bp, Homo sapien
aatcccgtatctgttgtctgttcca

SEQ ID NO: 1926011 - DNA, 25 bp, Homo sapien
ctaaattataaacgagcaaaggatt

SEQ ID NO: 1926012 - DNA, 25 bp, Homo sapien
tataaacgagcaaaggatttccatt

SEQ ID NO: 1926013 - DNA, 25 bp, Homo sapien
caaaccccacaggttcctccatgta

SEQ ID NO: 1926014 - DNA, 25 bp, Homo sapien
catgtacagatttccataagcctca

SEQ ID NO: 1926015 - DNA, 25 bp, Homo sapien
cacagagtagtgctgcaagaacttg

SEQ ID NO: 1926016 - DNA, 25 bp, Homo sapien
ccatgactctttgtgaacattgcac

SEQ ID NO: 1926017 - DNA, 25 bp, Homo sapien
ggcaaggatcggtgccagtttctgc

SEQ ID NO: 1926018 - DNA, 25 bp, Homo sapien
gtttttgccgccttcaacagtctgc

SEQ ID NO: 1926019 - DNA, 25 bp, Homo sapien
gagctggaatcatcaggttgacttt

SEQ ID NO: 1926020 - DNA, 25 bp, Homo sapien
cttttccggtcattctcattcacat

SEQ ID NO: 1926021 - DNA, 25 bp, Homo sapien
aaagatgaggctgatatttacttca

SEQ ID NO: 1926022 - DNA, 25 bp, Homo sapien
tatatatgtgtctttccaaaatctg

SEQ ID NO: 1926023 - DNA, 25 bp, Homo sapien
gtttctaaagtggtcacttcaatag

SEQ ID NO: 1926024 - DNA, 25 bp, Homo sapien
gctctaggggtttctaaagtggtca

SEQ ID NO: 1926025 - DNA, 25 bp, Homo sapien
tcaagcaaacgcagagaggctctag

SEQ ID NO: 1926026 - DNA, 25 bp, Homo sapien
taaagcattgcttgtccacgggaga

SEQ ID NO: 1926027 - DNA, 25 bp, Homo sapien
atgtttgtcggcatgtctttcttcc

SEQ ID NO: 1926028 - DNA, 25 bp, Homo sapien
tcatttcataacatgtttgtcggca

SEQ ID NO: 1926029 - DNA, 25 bp, Homo sapien
ttcataacatgtttgtcggcatgtc

SEQ ID NO: 1926030 - DNA, 25 bp, Homo sapien
taacatgtttgtcggcatgtctttc

SEQ ID NO: 1926031 - DNA, 25 bp, Homo sapien
aacagcagtacaaagtgagctatct

SEQ ID NO: 1926032 - DNA, 25 bp, Homo sapien
acagcagtacaaagtgagctatctt

SEQ ID NO: 1926033 - DNA, 25 bp, Homo sapien
cagcagtacaaagtgagctatcttc

SEQ ID NO: 1926034 - DNA, 25 bp, Homo sapien
catttggtatcaggtcgcagagagc

SEQ ID NO: 1926035 - DNA, 25 bp, Homo sapien
ctgaaagccacacctaagtcagctt

SEQ ID NO: 1926036 - DNA, 25 bp, Homo sapien
ccagcatttggtatcaggtcgcaga

SEQ ID NO: 1926037 - DNA, 25 bp, Homo sapien
aagccacacctaagtcagcttccat

SEQ ID NO: 1926038 - DNA, 25 bp, Homo sapien
ttggcctatatgtaattatctgcag

SEQ ID NO: 1926039 - DNA, 25 bp, Homo sapien
tatatgtaattatctgcaggtagcc

SEQ ID NO: 1926040 - DNA, 25 bp, Homo sapien
cctttatactcagttctaggtggtt

SEQ ID NO: 1926041 - DNA, 25 bp, Homo sapien
ctaggtggttttggcctatatgtaa

SEQ ID NO: 1926042 - DNA, 25 bp, Homo sapien
actcagcaactgacatttgctggcc

SEQ ID NO: 1926043 - DNA, 25 bp, Homo sapien
caggtttgactcagcaactgacatt

SEQ ID NO: 1926044 - DNA, 25 bp, Homo sapien
tcaggtttgactcagcaactgacat

SEQ ID NO: 1926045 - DNA, 25 bp, Homo sapien
ttgactcagcaactgacatttgctg

SEQ ID NO: 1926046 - DNA, 25 bp, Homo sapien
tgtagctaggatctccttatcacag

SEQ ID NO: 1926047 - DNA, 25 bp, Homo sapien
agactgacagcctgtagctaggatc

SEQ ID NO: 1926048 - DNA, 25 bp, Homo sapien
agctaggatctccttatcacagcag

SEQ ID NO: 1926049 - DNA, 25 bp, Homo sapien
tagctaggatctccttatcacagca

SEQ ID NO: 1926050 - DNA, 25 bp, Homo sapien
tagtccctaaggcaatgacgcacag

SEQ ID NO: 1926051 - DNA, 25 bp, Homo sapien
gcagaagtaactcctttagaatccg

SEQ ID NO: 1926052 - DNA, 25 bp, Homo sapien
ttagaatccgttcccataatagtcc

SEQ ID NO: 1926053 - DNA, 25 bp, Homo sapien
tcccataatagtccctaaggcaatg

SEQ ID NO: 1926054 - DNA, 25 bp, Homo sapien
tgcctctgtctcctcagcatccacc

SEQ ID NO: 1926055 - DNA, 25 bp, Homo sapien
gcctctgtctcctcagcatccacct

SEQ ID NO: 1926056 - DNA, 25 bp, Homo sapien
tctgtctcctcagcatccacctcct

SEQ ID NO: 1926057 - DNA, 25 bp, Homo sapien
cctgaggatgaccactgcctctgtc

SEQ ID NO: 1926058 - DNA, 25 bp, Homo sapien
agctctgttggacttctaacacatc

SEQ ID NO: 1926059 - DNA, 25 bp, Homo sapien
tagctctgttggacttctaacacat

SEQ ID NO: 1926060 - DNA, 25 bp, Homo sapien
ttagctctgttggacttctaacaca

SEQ ID NO: 1926061 - DNA, 25 bp, Homo sapien
gaatgacagagagccgtttttccag

SEQ ID NO: 1926062 - DNA, 25 bp, Homo sapien
gcagcctgttccctgaagatgcaca

SEQ ID NO: 1926063 - DNA, 25 bp, Homo sapien
aataaggccactcttccgtgggagg

SEQ ID NO: 1926064 - DNA, 25 bp, Homo sapien
gatgcacacatccagagaatgacag

SEQ ID NO: 1926065 - DNA, 25 bp, Homo sapien
ctgaaaatgcaagccacacaggttt

SEQ ID NO: 1926066 - DNA, 25 bp, Homo sapien
tgcaagccacacaggtttgtcccca

SEQ ID NO: 1926067 - DNA, 25 bp, Homo sapien
aatgcaagccacacaggtttgtccc

SEQ ID NO: 1926068 - DNA, 25 bp, Homo sapien
caagccacacaggtttgtccccagt

SEQ ID NO: 1926069 - DNA, 25 bp, Homo sapien
gttcaaactcggcacagacccttcc

SEQ ID NO: 1926070 - DNA, 25 bp, Homo sapien
ccagttcaaactcggcacagaccct

SEQ ID NO: 1926071 - DNA, 25 bp, Homo sapien
agttcaaactcggcacagacccttc

SEQ ID NO: 1926072 - DNA, 25 bp, Homo sapien
cagttcaaactcggcacagaccctt

SEQ ID NO: 1926073 - DNA, 25 bp, Homo sapien
gaggtcacgggcatccttactgccc

SEQ ID NO: 1926074 - DNA, 25 bp, Homo sapien
acagtgcccggtgccgggaggtcac

SEQ ID NO: 1926075 - DNA, 25 bp, Homo sapien
cgttctcagtgtgaggaaaagccat

SEQ ID NO: 1926076 - DNA, 25 bp, Homo sapien
ctctctgcggcagcgggaaaccagc

SEQ ID NO: 1926077 - DNA, 25 bp, Homo sapien
ggtagaggtagaattgtgggtggca

SEQ ID NO: 1926078 - DNA, 25 bp, Homo sapien
ggtggcagcccagtgtgtgtgcaga

SEQ ID NO: 1926079 - DNA, 25 bp, Homo sapien
tgtgtgtgcagagcttggagaagag

SEQ ID NO: 1926080 - DNA, 25 bp, Homo sapien
ctgggtggtagaggtagaattgtgg

SEQ ID NO: 1926081 - DNA, 25 bp, Homo sapien
gagatgatgtgcctttcgaagtgag

SEQ ID NO: 1926082 - DNA, 25 bp, Homo sapien
cctcctttgagtgactgctgccagc

SEQ ID NO: 1926083 - DNA, 25 bp, Homo sapien
tgacactggctaatcacaggttcct

SEQ ID NO: 1926084 - DNA, 25 bp, Homo sapien
cctgcgggctgatatctgagatgat

SEQ ID NO: 1926085 - DNA, 25 bp, Homo sapien
catgaatgtaggagtgggaatttga

SEQ ID NO: 1926086 - DNA, 25 bp, Homo sapien
caaaagcatgaatgtaggagtggga

SEQ ID NO: 1926087 - DNA, 25 bp, Homo sapien
aggagtgggaatttgaagaatccat

SEQ ID NO: 1926088 - DNA, 25 bp, Homo sapien
aaagcatgaatgtaggagtgggaat

SEQ ID NO: 1926089 - DNA, 25 bp, Homo sapien
aacattattacaggcacatcccagg

SEQ ID NO: 1926090 - DNA, 25 bp, Homo sapien
ggcttgcatgccagatgtgtaacaa

SEQ ID NO: 1926091 - DNA, 25 bp, Homo sapien
tcccaggtagaatgcgctgccttga

SEQ ID NO: 1926092 - DNA, 25 bp, Homo sapien
cactgagccaccctatagcagaaga

SEQ ID NO: 1926093 - DNA, 25 bp, Homo sapien
cagcccttacactgaggcatttgtg

SEQ ID NO: 1926094 - DNA, 25 bp, Homo sapien
ttacactgaggcatttgtgccaatt

SEQ ID NO: 1926095 - DNA, 25 bp, Homo sapien
tgggccacagcccttacactgaggc

SEQ ID NO: 1926096 - DNA, 25 bp, Homo sapien
tgggatggtagcaacatgctggagc

SEQ ID NO: 1926097 - DNA, 25 bp, Homo sapien
atgtccgttaaaatgcaccatgaag

SEQ ID NO: 1926098 - DNA, 25 bp, Homo sapien
tcaacatcacaactgaagtaatgtc

SEQ ID NO: 1926099 - DNA, 25 bp, Homo sapien
aattgacaagcccttgcgtctgccc

SEQ ID NO: 1926100 - DNA, 25 bp, Homo sapien
ctcaaaccagtagcgtaaacactct

SEQ ID NO: 1926101 - DNA, 25 bp, Homo sapien
tcaagaatgtgtctggcaaagctgt

SEQ ID NO: 1926102 - DNA, 25 bp, Homo sapien
aatgtgtctggcaaagctgttcgtc

SEQ ID NO: 1926103 - DNA, 25 bp, Homo sapien
ctggcaaagctgttcgtcgtggcaa

SEQ ID NO: 1926104 - DNA, 25 bp, Homo sapien
tgtctggcaaagctgttcgtcgtgg

SEQ ID NO: 1926105 - DNA, 25 bp, Homo sapien
tccggtgattatcctgcatcctcca

SEQ ID NO: 1926106 - DNA, 25 bp, Homo sapien
cagggtgaatcacgctggctgtgta

SEQ ID NO: 1926107 - DNA, 25 bp, Homo sapien
ctgtactggattgtcacacggcgca

SEQ ID NO: 1926108 - DNA, 25 bp, Homo sapien
tcacacggcgcacattgcttgcaag

SEQ ID NO: 1926109 - DNA, 25 bp, Homo sapien
acgggatagcagttgcggtcctgca

SEQ ID NO: 1926110 - DNA, 25 bp, Homo sapien
tctgagaccagttcagaggcacccc

SEQ ID NO: 1926111 - DNA, 25 bp, Homo sapien
tttgccccacgggatagcagttgcg

SEQ ID NO: 1926112 - DNA, 25 bp, Homo sapien
ggaagtttgccccacgggatagcag

SEQ ID NO: 1926113 - DNA, 25 bp, Homo sapien
cttctgctgacaaaacattcccatg

SEQ ID NO: 1926114 - DNA, 25 bp, Homo sapien
gatttcccccgaactcttattggca

SEQ ID NO: 1926115 - DNA, 25 bp, Homo sapien
aactcttattggcataatggttcat

SEQ ID NO: 1926116 - DNA, 25 bp, Homo sapien
taattcactccgaaagaagcaaaca

SEQ ID NO: 1926117 - DNA, 25 bp, Homo sapien
cactgtgctcctaattcactccgaa

SEQ ID NO: 1926118 - DNA, 25 bp, Homo sapien
gcaaagtgccagatctaccagaaga

SEQ ID NO: 1926119 - DNA, 25 bp, Homo sapien
ggaaagaatttacgactctctttgc

SEQ ID NO: 1926120 - DNA, 25 bp, Homo sapien
tcatttttcgtccatgccacacggt

SEQ ID NO: 1926121 - DNA, 25 bp, Homo sapien
cacggtggcgcctcttcatcaatta

SEQ ID NO: 1926122 - DNA, 25 bp, Homo sapien
tttttcgtccatgccacacggtggc

SEQ ID NO: 1926123 - DNA, 25 bp, Homo sapien
acacggtggcgcctcttcatcaatt

SEQ ID NO: 1926124 - DNA, 25 bp, Homo sapien
tactgttaatactagtactgaatca

SEQ ID NO: 1926125 - DNA, 25 bp, Homo sapien
taaaaggcaatacgttttgtgttga

SEQ ID NO: 1926126 - DNA, 25 bp, Homo sapien
cattatggggcaaaaagggcttcaa

SEQ ID NO: 1926127 - DNA, 25 bp, Homo sapien
tgttgaagacattatggggcaaaaa

SEQ ID NO: 1926128 - DNA, 25 bp, Homo sapien
taaaacaagatttggctgagctata

SEQ ID NO: 1926129 - DNA, 25 bp, Homo sapien
tttattaatatgatccaaacagatt

SEQ ID NO: 1926130 - DNA, 25 bp, Homo sapien
tgatccaaacagatttagcttaaga

SEQ ID NO: 1926131 - DNA, 25 bp, Homo sapien
gagatgaggacaggacataaaacaa

SEQ ID NO: 1926132 - DNA, 25 bp, Homo sapien
tcatctggccagtactaaacaggga

SEQ ID NO: 1926133 - DNA, 25 bp, Homo sapien
cacacggcctgtctttgatctggaa

SEQ ID NO: 1926134 - DNA, 25 bp, Homo sapien
ccagagtgggcatcaacaaaaagca

SEQ ID NO: 1926135 - DNA, 25 bp, Homo sapien
tgtgtcacccaaagtcagcaaggaa

SEQ ID NO: 1926136 - DNA, 25 bp, Homo sapien
ttcttttattcccacatgacagccc

SEQ ID NO: 1926137 - DNA, 25 bp, Homo sapien
tttattcccacatgacagcccaatt

SEQ ID NO: 1926138 - DNA, 25 bp, Homo sapien
tcccacatgacagcccaatttttta

SEQ ID NO: 1926139 - DNA, 25 bp, Homo sapien
gaaagaattcttttattcccacatg

SEQ ID NO: 1926140 - DNA, 25 bp, Homo sapien
caaagtggacacagtctttaacctg

SEQ ID NO: 1926141 - DNA, 25 bp, Homo sapien
gattgatgtctctcatgtaacatgg

SEQ ID NO: 1926142 - DNA, 25 bp, Homo sapien
aagagaagagaacctgattgatgtc

SEQ ID NO: 1926143 - DNA, 25 bp, Homo sapien
ctttaacctgtacttcaaatgacag

SEQ ID NO: 1926144 - DNA, 25 bp, Homo sapien
gaaaacattgtcaagtccaacagaa

SEQ ID NO: 1926145 - DNA, 25 bp, Homo sapien
tcagatcatagaaaacattgtcaag

SEQ ID NO: 1926146 - DNA, 25 bp, Homo sapien
catagaaaacattgtcaagtccaac

SEQ ID NO: 1926147 - DNA, 25 bp, Homo sapien
aaacattgtcaagtccaacagaatt

SEQ ID NO: 1926148 - DNA, 25 bp, Homo sapien
tcagcgtgcagctgagtagcagaag

SEQ ID NO: 1926149 - DNA, 25 bp, Homo sapien
ctcttggtgctcagcgtgcagctga

SEQ ID NO: 1926150 - DNA, 25 bp, Homo sapien
aacaagcaagttgatggagaaatct

SEQ ID NO: 1926151 - DNA, 25 bp, Homo sapien
cagaaggcaaacaagcaagttgatg

SEQ ID NO: 1926152 - DNA, 25 bp, Homo sapien
gaagaggaagaagacgtgccacaca

SEQ ID NO: 1926153 - DNA, 25 bp, Homo sapien
gggaagaggaagaagacgtgccaca

SEQ ID NO: 1926154 - DNA, 25 bp, Homo sapien
aagaggaagaagacgtgccacacac

SEQ ID NO: 1926155 - DNA, 25 bp, Homo sapien
cagggaagaggaagaagacgtgcca

SEQ ID NO: 1926156 - DNA, 25 bp, Homo sapien
caaaggttctgctttatagggtctt

SEQ ID NO: 1926157 - DNA, 25 bp, Homo sapien
cttgggacttttgataatgaaaggc

SEQ ID NO: 1926158 - DNA, 25 bp, Homo sapien
tttttatattgcttgggacttttga

SEQ ID NO: 1926159 - DNA, 25 bp, Homo sapien
acttttgataatgaaaggccaggtc

SEQ ID NO: 1926160 - DNA, 25 bp, Homo sapien
gtcttggaacatctcacattcactg

SEQ ID NO: 1926161 - DNA, 25 bp, Homo sapien
gtgactggtctgtagatctccttaa

SEQ ID NO: 1926162 - DNA, 25 bp, Homo sapien
tctggaatacttgcacatcgagtaa

SEQ ID NO: 1926163 - DNA, 25 bp, Homo sapien
ccttaaccccaatgaactgaagttg

SEQ ID NO: 1926164 - DNA, 25 bp, Homo sapien
catcgagtaagattaattcttgggt

SEQ ID NO: 1926165 - DNA, 25 bp, Homo sapien
tctttcgtgttgtagcgacactcag

SEQ ID NO: 1926166 - DNA, 25 bp, Homo sapien
tcagctctatctttcgtgttgtagc

SEQ ID NO: 1926167 - DNA, 25 bp, Homo sapien
cgacactcagtaattaggttatctc

SEQ ID NO: 1926168 - DNA, 25 bp, Homo sapien
tgttgtagcgacactcagtaattag

SEQ ID NO: 1926169 - DNA, 25 bp, Homo sapien
ttcctttagatactgaaactcctgg

SEQ ID NO: 1926170 - DNA, 25 bp, Homo sapien
catcataggcaagtaatttcatttc

SEQ ID NO: 1926171 - DNA, 25 bp, Homo sapien
gaaaatgacgcagcctgatgcctct

SEQ ID NO: 1926172 - DNA, 25 bp, Homo sapien
tccttcccttttcgaaaatgacgca

SEQ ID NO: 1926173 - DNA, 25 bp, Homo sapien
aaagtgcagtgaccctcagactgga

SEQ ID NO: 1926174 - DNA, 25 bp, Homo sapien
tccaaagtgcagtgaccctcagact

SEQ ID NO: 1926175 - DNA, 25 bp, Homo sapien
ctccaaagtgcagtgaccctcagac

SEQ ID NO: 1926176 - DNA, 25 bp, Homo sapien
agtgcagtgaccctcagactggaac

SEQ ID NO: 1926177 - DNA, 25 bp, Homo sapien
aatcaccccagcatcatatttcctt

SEQ ID NO: 1926178 - DNA, 25 bp, Homo sapien
cctcaatcaccccagcatcatattt

SEQ ID NO: 1926179 - DNA, 25 bp, Homo sapien
cagcctcaatcaccccagcatcata

SEQ ID NO: 1926180 - DNA, 25 bp, Homo sapien
aggccagcctcaatcaccccagcat

SEQ ID NO: 1926181 - DNA, 25 bp, Homo sapien
agtgggattatcataatggacttct

SEQ ID NO: 1926182 - DNA, 25 bp, Homo sapien
gagtgccaagggataatccaacatg

SEQ ID NO: 1926183 - DNA, 25 bp, Homo sapien
gacttctaggagcacataatgcgga

SEQ ID NO: 1926184 - DNA, 25 bp, Homo sapien
cataatgcggatctaatggagtgcc

SEQ ID NO: 1926185 - DNA, 25 bp, Homo sapien
tcacaggtgaggaatgcatcgggca

SEQ ID NO: 1926186 - DNA, 25 bp, Homo sapien
cacaggtgaggaatgcatcgggcat

SEQ ID NO: 1926187 - DNA, 25 bp, Homo sapien
ggtgatagcactcgtggccggactc

SEQ ID NO: 1926188 - DNA, 25 bp, Homo sapien
tgtggtgcaccagactctcatggcc

SEQ ID NO: 1926189 - DNA, 25 bp, Homo sapien
gccggactccagaacgctgtcgtta

SEQ ID NO: 1926190 - DNA, 25 bp, Homo sapien
gttgctgcactgatagagcaggatg

SEQ ID NO: 1926191 - DNA, 25 bp, Homo sapien
aaggacacgaacacgaactcatccg

SEQ ID NO: 1926192 - DNA, 25 bp, Homo sapien
acaaaggacacgaacacgaactcat

SEQ ID NO: 1926193 - DNA, 25 bp, Homo sapien
gacacgaacacgaactcatccgttt

SEQ ID NO: 1926194 - DNA, 25 bp, Homo sapien
cgaacacgaactcatccgtttttat

SEQ ID NO: 1926195 - DNA, 25 bp, Homo sapien
ttcagctcttttctcctatggcttt

SEQ ID NO: 1926196 - DNA, 25 bp, Homo sapien
agctcttttctcctatggctttgtt

SEQ ID NO: 1926197 - DNA, 25 bp, Homo sapien
tcttttctcctatggctttgttttc

SEQ ID NO: 1926198 - DNA, 25 bp, Homo sapien
tctcctatggctttgttttccattt

SEQ ID NO: 1926199 - DNA, 25 bp, Homo sapien
acgaccgtttttcctaatctcatca

SEQ ID NO: 1926200 - DNA, 25 bp, Homo sapien
cgaccgtttttcctaatctcatcat

SEQ ID NO: 1926201 - DNA, 25 bp, Homo sapien
caacgaccgtttttcctaatctcat

SEQ ID NO: 1926202 - DNA, 25 bp, Homo sapien
gttgctgcccacataaaagcccgta

SEQ ID NO: 1926203 - DNA, 25 bp, Homo sapien
gcacaagttgctgcccacataaaag

SEQ ID NO: 1926204 - DNA, 25 bp, Homo sapien
gcccacataaaagcccgtaatccat

SEQ ID NO: 1926205 - DNA, 25 bp, Homo sapien
ctgaggcacaagttgctgcccacat

SEQ ID NO: 1926206 - DNA, 25 bp, Homo sapien
tgtaatcccgaattctcatgcgtct

SEQ ID NO: 1926207 - DNA, 25 bp, Homo sapien
tcccgaattctcatgcgtctaccat

SEQ ID NO: 1926208 - DNA, 25 bp, Homo sapien
tctcatgcgtctaccatcttcaaac

SEQ ID NO: 1926209 - DNA, 25 bp, Homo sapien
gaattctcatgcgtctaccatcttc

SEQ ID NO: 1926210 - DNA, 25 bp, Homo sapien
ttaacacgtattcttagtggcaggc

SEQ ID NO: 1926211 - DNA, 25 bp, Homo sapien
taccaaggacattacacaagttatc

SEQ ID NO: 1926212 - DNA, 25 bp, Homo sapien
tctttatacgacactgagactggta

SEQ ID NO: 1926213 - DNA, 25 bp, Homo sapien
ggcttagatttgcaccctggtccaa

SEQ ID NO: 1926214 - DNA, 25 bp, Homo sapien
gcttgcaacttttcctcattcatta

SEQ ID NO: 1926215 - DNA, 25 bp, Homo sapien
tgttccttgtatgccgactttgcta

SEQ ID NO: 1926216 - DNA, 25 bp, Homo sapien
tcaaggtaaatgatatcaacagcaa

SEQ ID NO: 1926217 - DNA, 25 bp, Homo sapien
tcattcattattatgctggttgtgg

SEQ ID NO: 1926218 - DNA, 25 bp, Homo sapien
tctggtggggtctgctcacacagtc

SEQ ID NO: 1926219 - DNA, 25 bp, Homo sapien
tagatctaagtcactttccaggatc

SEQ ID NO: 1926220 - DNA, 25 bp, Homo sapien
gtgtactcatatgtgactagatcta

SEQ ID NO: 1926221 - DNA, 25 bp, Homo sapien
gaagattctggtggggtctgctcac

SEQ ID NO: 1926222 - DNA, 25 bp, Homo sapien
aacacaggaatcttaaacatttggc

SEQ ID NO: 1926223 - DNA, 25 bp, Homo sapien
ttggcaccaatatgttgtatctttg

SEQ ID NO: 1926224 - DNA, 25 bp, Homo sapien
catttggcaccaatatgttgtatct

SEQ ID NO: 1926225 - DNA, 25 bp, Homo sapien
ggaatcttaaacatttggcaccaat

SEQ ID NO: 1926226 - DNA, 25 bp, Homo sapien
gagtcatggtacttgggaccagctt

SEQ ID NO: 1926227 - DNA, 25 bp, Homo sapien
ccagatcaaagtatggtaaggctgt

SEQ ID NO: 1926228 - DNA, 25 bp, Homo sapien
tcaataaccgcaaactcttggtgcc

SEQ ID NO: 1926229 - DNA, 25 bp, Homo sapien
tcttggtgcccctattggagtcatg

SEQ ID NO: 1926230 - DNA, 25 bp, Homo sapien
gcatattctagatggtaatcttgct

SEQ ID NO: 1926231 - DNA, 25 bp, Homo sapien
catattctagatggtaatcttgctg

SEQ ID NO: 1926232 - DNA, 25 bp, Homo sapien
gtatgcagctctctggtaaattcaa

SEQ ID NO: 1926233 - DNA, 25 bp, Homo sapien
tcacatgtatgcagctctctggtaa

SEQ ID NO: 1926234 - DNA, 25 bp, Homo sapien
aaatatggaaaagaaaaatcaggat

SEQ ID NO: 1926235 - DNA, 25 bp, Homo sapien
atatggaaaagaaaaatcaggatac

SEQ ID NO: 1926236 - DNA, 25 bp, Homo sapien
aatatggaaaagaaaaatcaggata

SEQ ID NO: 1926237 - DNA, 25 bp, Homo sapien
tggaaaatatggaaaagaaaaatca

SEQ ID NO: 1926238 - DNA, 25 bp, Homo sapien
ctaaatacagagagaaaagaattca

SEQ ID NO: 1926239 - DNA, 25 bp, Homo sapien
taaatacagagagaaaagaattcat

SEQ ID NO: 1926240 - DNA, 25 bp, Homo sapien
cctgggaaactagtccatctttgaa

SEQ ID NO: 1926241 - DNA, 25 bp, Homo sapien
tatcgtagagcatcaagagatggaa

SEQ ID NO: 1926242 - DNA, 25 bp, Homo sapien
caggaaagcatagtgtagactgata

SEQ ID NO: 1926243 - DNA, 25 bp, Homo sapien
gaacatttgataccattgtgtgcct

SEQ ID NO: 1926244 - DNA, 25 bp, Homo sapien
tattgacctcacaggactatcacga

SEQ ID NO: 1926245 - DNA, 25 bp, Homo sapien
gtccccagcatctcgaagtgttcaa

SEQ ID NO: 1926246 - DNA, 25 bp, Homo sapien
taaggacttatcacaaggtatggca

SEQ ID NO: 1926247 - DNA, 25 bp, Homo sapien
tacgggctccgtgataccaatggtt

SEQ ID NO: 1926248 - DNA, 25 bp, Homo sapien
aatatgccattggttgcctaaagcc

SEQ ID NO: 1926249 - DNA, 25 bp, Homo sapien
tctcttaacaaagcaccagctgagc

SEQ ID NO: 1926250 - DNA, 25 bp, Homo sapien
cagcattactgtggagcatgtgtcc

SEQ ID NO: 1926251 - DNA, 25 bp, Homo sapien
acatttctttgtcgccgttggctgg

SEQ ID NO: 1926252 - DNA, 25 bp, Homo sapien
aagacacttcgcatcacaggcctca

SEQ ID NO: 1926253 - DNA, 25 bp, Homo sapien
gctgctgaagacacttcgcatcaca

SEQ ID NO: 1926254 - DNA, 25 bp, Homo sapien
tccaagcacttcctcagcaagtggc

SEQ ID NO: 1926255 - DNA, 25 bp, Homo sapien
gtggcccggcagcaattaccctgct

SEQ ID NO: 1926256 - DNA, 25 bp, Homo sapien
gcactcacagttgctaaatgattcg

SEQ ID NO: 1926257 - DNA, 25 bp, Homo sapien
acagttgctaaatgattcgggcggg

SEQ ID NO: 1926258 - DNA, 25 bp, Homo sapien
agcattcatcggctgcattacttgc

SEQ ID NO: 1926259 - DNA, 25 bp, Homo sapien
gctgcattacttgcctcaaatgggc

SEQ ID NO: 1926260 - DNA, 25 bp, Homo sapien
tcctctttgcggaaatatctccaga

SEQ ID NO: 1926261 - DNA, 25 bp, Homo sapien
gcagcgcaaatttccatatgccagg

SEQ ID NO: 1926262 - DNA, 25 bp, Homo sapien
cacaggtctgcaggtaaatgtcaca

SEQ ID NO: 1926263 - DNA, 25 bp, Homo sapien
gccaggtccctggatatagttttaa

SEQ ID NO: 1926264 - DNA, 25 bp, Homo sapien
ggatctaaccctgaattaatgattg

SEQ ID NO: 1926265 - DNA, 25 bp, Homo sapien
gatctaaccctgaattaatgattgc

SEQ ID NO: 1926266 - DNA, 25 bp, Homo sapien
atctaaccctgaattaatgattgcc

SEQ ID NO: 1926267 - DNA, 25 bp, Homo sapien
tggatctaaccctgaattaatgatt

SEQ ID NO: 1926268 - DNA, 25 bp, Homo sapien
taagaagcgcactctaaatccacgg

SEQ ID NO: 1926269 - DNA, 25 bp, Homo sapien
tcacgatcaagcaaggatgtccagg

SEQ ID NO: 1926270 - DNA, 25 bp, Homo sapien
taacaaagcgtgtacgttcaccgcc

SEQ ID NO: 1926271 - DNA, 25 bp, Homo sapien
tagcaaagggcagtatgttcggatg

SEQ ID NO: 1926272 - DNA, 25 bp, Homo sapien
gtcacttcataggatattttgcctg

SEQ ID NO: 1926273 - DNA, 25 bp, Homo sapien
caggcaaggtggttacttaggctcc

SEQ ID NO: 1926274 - DNA, 25 bp, Homo sapien
atcagcagcggtcaaattaacttta

SEQ ID NO: 1926275 - DNA, 25 bp, Homo sapien
ttaggctccttcaaagtaaatcagc

SEQ ID NO: 1926276 - DNA, 25 bp, Homo sapien
gagctgtcccattaggtccccaaag

SEQ ID NO: 1926277 - DNA, 25 bp, Homo sapien
ggtgtattgcaggtgtgtaggcggg

SEQ ID NO: 1926278 - DNA, 25 bp, Homo sapien
agccaaagcctaggtccttctccct

SEQ ID NO: 1926279 - DNA, 25 bp, Homo sapien
gtccgcgacgtactaaagcgctctg

SEQ ID NO: 1926280 - DNA, 25 bp, Homo sapien
ccacgacgatgtcggcggacgccat

SEQ ID NO: 1926281 - DNA, 25 bp, Homo sapien
acgtagcctgcagtgcgcacctgga

SEQ ID NO: 1926282 - DNA, 25 bp, Homo sapien
tgcggataggttcggcccgagcccc

SEQ ID NO: 1926283 - DNA, 25 bp, Homo sapien
agtacttgccctccgagtccaggag

SEQ ID NO: 1926284 - DNA, 25 bp, Homo sapien
ggtaccggcctccagccgctgggga

SEQ ID NO: 1926285 - DNA, 25 bp, Homo sapien
ccggtaccggcctccagccgctggg

SEQ ID NO: 1926286 - DNA, 25 bp, Homo sapien
gtaccggcctccagccgctggggag

SEQ ID NO: 1926287 - DNA, 25 bp, Homo sapien
cgccggtaccggcctccagccgctg

SEQ ID NO: 1926288 - DNA, 25 bp, Homo sapien
cttggatgaataaaggccctctcag

SEQ ID NO: 1926289 - DNA, 25 bp, Homo sapien
tttgacatcacttccaaagcactcg

SEQ ID NO: 1926290 - DNA, 25 bp, Homo sapien
cttgagtgttgactgcttgggatcc

SEQ ID NO: 1926291 - DNA, 25 bp, Homo sapien
gatccttgaatttgacttggatgaa

SEQ ID NO: 1926292 - DNA, 25 bp, Homo sapien
aatgtatcttgttgtacacaagatt

SEQ ID NO: 1926293 - DNA, 25 bp, Homo sapien
ttatgaacctatcaagtgttcacct

SEQ ID NO: 1926294 - DNA, 25 bp, Homo sapien
caaatttgttactctattgataact

SEQ ID NO: 1926295 - DNA, 25 bp, Homo sapien
ttctgaggtcacatatctatatcca

SEQ ID NO: 1926296 - DNA, 25 bp, Homo sapien
ttggcaattgcagaatgaggaacat

SEQ ID NO: 1926297 - DNA, 25 bp, Homo sapien
tgaggaacatagagctgggcatttc

SEQ ID NO: 1926298 - DNA, 25 bp, Homo sapien
tccctgccacatgttctagaagact

SEQ ID NO: 1926299 - DNA, 25 bp, Homo sapien
cataacccagtgatagctgatggtg

SEQ ID NO: 1926300 - DNA, 25 bp, Homo sapien
caattgttacagaggtgaaaggcag

SEQ ID NO: 1926301 - DNA, 25 bp, Homo sapien
tacatagtagcagccatcggtgtcc

SEQ ID NO: 1926302 - DNA, 25 bp, Homo sapien
tttccgagcactgcctgaaccagaa

SEQ ID NO: 1926303 - DNA, 25 bp, Homo sapien
tatcaaagagctggagttttcccac

SEQ ID NO: 1926304 - DNA, 25 bp, Homo sapien
gacttctgattctctacataaatag

SEQ ID NO: 1926305 - DNA, 25 bp, Homo sapien
taactgtttttgcataccgatcttg

SEQ ID NO: 1926306 - DNA, 25 bp, Homo sapien
tcccatccagatacctttcgttttc

SEQ ID NO: 1926307 - DNA, 25 bp, Homo sapien
ccattatagatgatgttagctttga

SEQ ID NO: 1926308 - DNA, 25 bp, Homo sapien
tagctgggattcgaagctcaatagc

SEQ ID NO: 1926309 - DNA, 25 bp, Homo sapien
tattaaagatgaaagctagtaccct

SEQ ID NO: 1926310 - DNA, 25 bp, Homo sapien
gatcattcatcttctcgaggccaag

SEQ ID NO: 1926311 - DNA, 25 bp, Homo sapien
tgcaaaagctttgccctcctgcaag

SEQ ID NO: 1926312 - DNA, 25 bp, Homo sapien
gtatcaggatcttggagcactcaca

SEQ ID NO: 1926313 - DNA, 25 bp, Homo sapien
tactgatacagctatcctaaccagg

SEQ ID NO: 1926314 - DNA, 25 bp, Homo sapien
tttagaactgttatacctacttcag

SEQ ID NO: 1926315 - DNA, 25 bp, Homo sapien
tattaatctggtgagataggcaatt

SEQ ID NO: 1926316 - DNA, 25 bp, Homo sapien
ggcagaacaattttcaagtgctgaa

SEQ ID NO: 1926317 - DNA, 25 bp, Homo sapien
aagtctatgtctaatgtaaatattc

SEQ ID NO: 1926318 - DNA, 25 bp, Homo sapien
gtggcagaacaattttcaagtgctg

SEQ ID NO: 1926319 - DNA, 25 bp, Homo sapien
agaactataaacctacaagtctatg

SEQ ID NO: 1926320 - DNA, 25 bp, Homo sapien
gatcatgatcgggaaggcttaacat

SEQ ID NO: 1926321 - DNA, 25 bp, Homo sapien
gatatagacccacacgaatgtgccc

SEQ ID NO: 1926322 - DNA, 25 bp, Homo sapien
ggaagacaaaggaactaagtggcta

SEQ ID NO: 1926323 - DNA, 25 bp, Homo sapien
gacatgctactgactgggaggaaat

SEQ ID NO: 1926324 - DNA, 25 bp, Homo sapien
gatccctgtgctagaaaaagttctg

SEQ ID NO: 1926325 - DNA, 25 bp, Homo sapien
gaagtgggtatggtcatcaaaagca

SEQ ID NO: 1926326 - DNA, 25 bp, Homo sapien
tgaaaggtacacgaaagaggtctct

SEQ ID NO: 1926327 - DNA, 25 bp, Homo sapien
caaaagcaagatgagggatccctgt

SEQ ID NO: 1926328 - DNA, 25 bp, Homo sapien
gaaaactccctcgtcaacaagtaga

SEQ ID NO: 1926329 - DNA, 25 bp, Homo sapien
tgcgtgtaacgactggacaggaaat

SEQ ID NO: 1926330 - DNA, 25 bp, Homo sapien
gatctgagagcttttcaccgtcaag

SEQ ID NO: 1926331 - DNA, 25 bp, Homo sapien
tgaacattaaatctggccctgggaa

SEQ ID NO: 1926332 - DNA, 25 bp, Homo sapien
agatttgccaagggatgggtagggt

SEQ ID NO: 1926333 - DNA, 25 bp, Homo sapien
atttctttatatggagcatacttac

SEQ ID NO: 1926334 - DNA, 25 bp, Homo sapien
aagatttgccaagggatgggtaggg

SEQ ID NO: 1926335 - DNA, 25 bp, Homo sapien
attccccttggatctcacccttctg

SEQ ID NO: 1926336 - DNA, 25 bp, Homo sapien
gcattctgatgaaatatagattcca

SEQ ID NO: 1926337 - DNA, 25 bp, Homo sapien
gggcagtaattctatacatatcctg

SEQ ID NO: 1926338 - DNA, 25 bp, Homo sapien
gtaaatgtctgtcctgatgatcagg

SEQ ID NO: 1926339 - DNA, 25 bp, Homo sapien
ccaccaagagaacggctcctttttg

SEQ ID NO: 1926340 - DNA, 25 bp, Homo sapien
ctgccaccaagagaacggctccttt

SEQ ID NO: 1926341 - DNA, 25 bp, Homo sapien
caagagaacggctcctttttggagc

SEQ ID NO: 1926342 - DNA, 25 bp, Homo sapien
ccaagagaacggctcctttttggag

SEQ ID NO: 1926343 - DNA, 25 bp, Homo sapien
agatcatcactcaaatcagtagttt

SEQ ID NO: 1926344 - DNA, 25 bp, Homo sapien
cagatcatcactcaaatcagtagtt

SEQ ID NO: 1926345 - DNA, 25 bp, Homo sapien
gatcatcactcaaatcagtagtttc

SEQ ID NO: 1926346 - DNA, 25 bp, Homo sapien
acagatcatcactcaaatcagtagt

SEQ ID NO: 1926347 - DNA, 25 bp, Homo sapien
ttatatttagacattccctttcttc

SEQ ID NO: 1926348 - DNA, 25 bp, Homo sapien
cttagaacactatgcccaggcatgt

SEQ ID NO: 1926349 - DNA, 25 bp, Homo sapien
gcttattcttttggttcactcttag

SEQ ID NO: 1926350 - DNA, 25 bp, Homo sapien
gaaaatgaaattcagttacttagta

SEQ ID NO: 1926351 - DNA, 25 bp, Homo sapien
caattatgctagactgtcaactcac

SEQ ID NO: 1926352 - DNA, 25 bp, Homo sapien
cacttcacgtggtttgaactgtaca

SEQ ID NO: 1926353 - DNA, 25 bp, Homo sapien
cttctgtctctggttctaagttgag

SEQ ID NO: 1926354 - DNA, 25 bp, Homo sapien
ccagaagcttagtatatgtattttt

SEQ ID NO: 1926355 - DNA, 25 bp, Homo sapien
cccttttgatgtctaattccctatg

SEQ ID NO: 1926356 - DNA, 25 bp, Homo sapien
aacactttacacttataatccatca

SEQ ID NO: 1926357 - DNA, 25 bp, Homo sapien
tgtctaattccctatgttaaaacac

SEQ ID NO: 1926358 - DNA, 25 bp, Homo sapien
cacccacccttttgatgtctaattc

SEQ ID NO: 1926359 - DNA, 25 bp, Homo sapien
aagataatcgtgcatgtctggcaac

SEQ ID NO: 1926360 - DNA, 25 bp, Homo sapien
gtctggcaaccaggtaatttctttc

SEQ ID NO: 1926361 - DNA, 25 bp, Homo sapien
gctgacaagtcaaactgttcaaatg

SEQ ID NO: 1926362 - DNA, 25 bp, Homo sapien
tgacctcagtgaatgagatgctgct

SEQ ID NO: 1926363 - DNA, 25 bp, Homo sapien
caacttacttcagcccattctgaaa

SEQ ID NO: 1926364 - DNA, 25 bp, Homo sapien
tgaaacttcatattgcagcaaacca

SEQ ID NO: 1926365 - DNA, 25 bp, Homo sapien
gacagatgttatttaccaccaatga

SEQ ID NO: 1926366 - DNA, 25 bp, Homo sapien
tgtcattcaactcaaatccctcaat

SEQ ID NO: 1926367 - DNA, 25 bp, Homo sapien
tgtggtcccaccagagcatagtcct

SEQ ID NO: 1926368 - DNA, 25 bp, Homo sapien
ccagtggcgacctcttcaaagtgca

SEQ ID NO: 1926369 - DNA, 25 bp, Homo sapien
catggctgtcctagactgagttgca

SEQ ID NO: 1926370 - DNA, 25 bp, Homo sapien
cacagtgcatgtggtgatgtctcca

SEQ ID NO: 1926371 - DNA, 25 bp, Homo sapien
gcaaagatgtggtttacttagctac

SEQ ID NO: 1926372 - DNA, 25 bp, Homo sapien
tgttcccatttgaagtctcagagct

SEQ ID NO: 1926373 - DNA, 25 bp, Homo sapien
tcagagcttgccaagttaaacaccg

SEQ ID NO: 1926374 - DNA, 25 bp, Homo sapien
taccgagctgctatacaagaacatt

SEQ ID NO: 1926375 - DNA, 25 bp, Homo sapien
tactaggcaatctacagcaaaagct

SEQ ID NO: 1926376 - DNA, 25 bp, Homo sapien
agaaaagtattcaccgacttcaggg

SEQ ID NO: 1926377 - DNA, 25 bp, Homo sapien
tcttaagaatccaaacgcaataggt

SEQ ID NO: 1926378 - DNA, 25 bp, Homo sapien
gatgacacaaaatggcacgcaaggt

SEQ ID NO: 1926379 - DNA, 25 bp, Homo sapien
acacacatctaggtgtgtcacagtg

SEQ ID NO: 1926380 - DNA, 25 bp, Homo sapien
gaagtaacacacatctaggtgtgtc

SEQ ID NO: 1926381 - DNA, 25 bp, Homo sapien
caaaactaagtcaagcagggtaaat

SEQ ID NO: 1926382 - DNA, 25 bp, Homo sapien
taaattgaagaccaagggagttatg

SEQ ID NO: 1926383 - DNA, 25 bp, Homo sapien
aatttagacaatgtagtgcgacagt

SEQ ID NO: 1926384 - DNA, 25 bp, Homo sapien
gggaaccatcctttatacaatagct

SEQ ID NO: 1926385 - DNA, 25 bp, Homo sapien
gtgcgacagtgtgctcctttataac

SEQ ID NO: 1926386 - DNA, 25 bp, Homo sapien
ggaatcttcctacataatttagaca

SEQ ID NO: 1926387 - DNA, 25 bp, Homo sapien
tgatgagactgataatcgcaactcc

SEQ ID NO: 1926388 - DNA, 25 bp, Homo sapien
gactgataatcgcaactccaatgac

SEQ ID NO: 1926389 - DNA, 25 bp, Homo sapien
tccaatgacaaggataagaatgatg

SEQ ID NO: 1926390 - DNA, 25 bp, Homo sapien
aaggataagaatgatgatgcacagg

SEQ ID NO: 1926391 - DNA, 25 bp, Homo sapien
gttctctgaagatatcagtaagtac

SEQ ID NO: 1926392 - DNA, 25 bp, Homo sapien
agatatcagtaagtacaaattggca

SEQ ID NO: 1926393 - DNA, 25 bp, Homo sapien
agtacaaattggcaacttttcttca

SEQ ID NO: 1926394 - DNA, 25 bp, Homo sapien
cagtaagtacaaattggcaactttt

SEQ ID NO: 1926395 - DNA, 25 bp, Homo sapien
attttgttccgttcttcattcctgg

SEQ ID NO: 1926396 - DNA, 25 bp, Homo sapien
gctgtcattgaaaaccgaatggtta

SEQ ID NO: 1926397 - DNA, 25 bp, Homo sapien
cagcccctcacacatatttcttgtt

SEQ ID NO: 1926398 - DNA, 25 bp, Homo sapien
cattcctggttcagttgtagatttc

SEQ ID NO: 1926399 - DNA, 25 bp, Homo sapien
tcacatcaacatgcaggaatccttt

SEQ ID NO: 1926400 - DNA, 25 bp, Homo sapien
cacatcaacatgcaggaatcctttt

SEQ ID NO: 1926401 - DNA, 25 bp, Homo sapien
acatcaacatgcaggaatccttttt

SEQ ID NO: 1926402 - DNA, 25 bp, Homo sapien
gagtcatcacgggtatcccacaatg

SEQ ID NO: 1926403 - DNA, 25 bp, Homo sapien
ccctagcgtggggtaatgagaccct

SEQ ID NO: 1926404 - DNA, 25 bp, Homo sapien
gggcaatgtggtgataagtgaactt

SEQ ID NO: 1926405 - DNA, 25 bp, Homo sapien
tcccacaatggtgtgtttgttgcct

SEQ ID NO: 1926406 - DNA, 25 bp, Homo sapien
gcatggccatctcgtcccgcttcgg

SEQ ID NO: 1926407 - DNA, 25 bp, Homo sapien
ctgcatggccatctcgtcccgcttc

SEQ ID NO: 1926408 - DNA, 25 bp, Homo sapien
cttgtgctgcatggccatctcgtcc

SEQ ID NO: 1926409 - DNA, 25 bp, Homo sapien
cacttgtgctgcatggccatctcgt

SEQ ID NO: 1926410 - DNA, 25 bp, Homo sapien
gatttgcttgctgaacgtgcacctc

SEQ ID NO: 1926411 - DNA, 25 bp, Homo sapien
ctgataatctgctgcccttgacagc

SEQ ID NO: 1926412 - DNA, 25 bp, Homo sapien
tgcttgctgaacgtgcacctctgca

SEQ ID NO: 1926413 - DNA, 25 bp, Homo sapien
gaacgtgcacctctgcattttccac

SEQ ID NO: 1926414 - DNA, 25 bp, Homo sapien
catggattgatgctccagtaacaaa

SEQ ID NO: 1926415 - DNA, 25 bp, Homo sapien
cctggcaacccctgaaaagtactgt

SEQ ID NO: 1926416 - DNA, 25 bp, Homo sapien
tgtctcagtgtcaaactccacagct

SEQ ID NO: 1926417 - DNA, 25 bp, Homo sapien
tcagtgtcagcacaagagatgtctc

SEQ ID NO: 1926418 - DNA, 25 bp, Homo sapien
tcttggcctaacagcagcacttgaa

SEQ ID NO: 1926419 - DNA, 25 bp, Homo sapien
tcccttctaggacgatgcattcatt

SEQ ID NO: 1926420 - DNA, 25 bp, Homo sapien
caacacagctcgtattgaggtcacc

SEQ ID NO: 1926421 - DNA, 25 bp, Homo sapien
gaggtcacctatgccctacacactg

SEQ ID NO: 1926422 - DNA, 25 bp, Homo sapien
tccttgttcatgaatcatcattccc

SEQ ID NO: 1926423 - DNA, 25 bp, Homo sapien
ccttgttcatgaatcatcattccca

SEQ ID NO: 1926424 - DNA, 25 bp, Homo sapien
cttgttcatgaatcatcattcccaa

SEQ ID NO: 1926425 - DNA, 25 bp, Homo sapien
tctctcatgaataagacggaggtca

SEQ ID NO: 1926426 - DNA, 25 bp, Homo sapien
tctctctcatgaataagacggaggt

SEQ ID NO: 1926427 - DNA, 25 bp, Homo sapien
tcatgaataagacggaggtcatcct

SEQ ID NO: 1926428 - DNA, 25 bp, Homo sapien
tctcatgaataagacggaggtcatc

SEQ ID NO: 1926429 - DNA, 25 bp, Homo sapien
tcctttcttttgagctgtcctcagg

SEQ ID NO: 1926430 - DNA, 25 bp, Homo sapien
aagattcctttcttttgagctgtcc

SEQ ID NO: 1926431 - DNA, 25 bp, Homo sapien
ctttcccaggatacaagattccttt

SEQ ID NO: 1926432 - DNA, 25 bp, Homo sapien
ttgagctgtcctcaggaaaactgcc

SEQ ID NO: 1926433 - DNA, 25 bp, Homo sapien
tattgatacaacatacttgcgccat

SEQ ID NO: 1926434 - DNA, 25 bp, Homo sapien
taccaagacgatgtgagaatactac

SEQ ID NO: 1926435 - DNA, 25 bp, Homo sapien
tacactagcgtgtacacaagcagaa

SEQ ID NO: 1926436 - DNA, 25 bp, Homo sapien
gagctgatttccaagatattcacag

SEQ ID NO: 1926437 - DNA, 25 bp, Homo sapien
tgaactctgccactaagcgatcctt

SEQ ID NO: 1926438 - DNA, 25 bp, Homo sapien
gaactctgccactaagcgatccttc

SEQ ID NO: 1926439 - DNA, 25 bp, Homo sapien
gtgaactctgccactaagcgatcct

SEQ ID NO: 1926440 - DNA, 25 bp, Homo sapien
aactctgccactaagcgatccttct

SEQ ID NO: 1926441 - DNA, 25 bp, Homo sapien
ctaacttaattatgggtcagggcaa

SEQ ID NO: 1926442 - DNA, 25 bp, Homo sapien
tgaggcaaaagacccattatgctgg

SEQ ID NO: 1926443 - DNA, 25 bp, Homo sapien
cggaaggccaggaaataattactca

SEQ ID NO: 1926444 - DNA, 25 bp, Homo sapien
tacagggccttacagattaactctc

SEQ ID NO: 1926445 - DNA, 25 bp, Homo sapien
gtacttatctgtttctttggcaagc

SEQ ID NO: 1926446 - DNA, 25 bp, Homo sapien
gctggttagtatactgctgcttctg

SEQ ID NO: 1926447 - DNA, 25 bp, Homo sapien
ctttggcaagctggttagtatactg

SEQ ID NO: 1926448 - DNA, 25 bp, Homo sapien
aaactctttaatgtacttatctgtt

SEQ ID NO: 1926449 - DNA, 25 bp, Homo sapien
ggagagactgttagatgtctgatcc

SEQ ID NO: 1926450 - DNA, 25 bp, Homo sapien
agatgtctgatcctttatgtttgag

SEQ ID NO: 1926451 - DNA, 25 bp, Homo sapien
gatcctttatgtttgagatactggg

SEQ ID NO: 1926452 - DNA, 25 bp, Homo sapien
gagactgttagatgtctgatccttt

SEQ ID NO: 1926453 - DNA, 25 bp, Homo sapien
taaaaagaagaccttaggctggaca

SEQ ID NO: 1926454 - DNA, 25 bp, Homo sapien
taaatatggtctggtcacacttggg

SEQ ID NO: 1926455 - DNA, 25 bp, Homo sapien
cagagtgctgactacatatccatat

SEQ ID NO: 1926456 - DNA, 25 bp, Homo sapien
tataatctatggatacagagtgctg

SEQ ID NO: 1926457 - DNA, 25 bp, Homo sapien
tctaaatgacattgggtaactcgtt

SEQ ID NO: 1926458 - DNA, 25 bp, Homo sapien
taaacggaagctaatgctctctgaa

SEQ ID NO: 1926459 - DNA, 25 bp, Homo sapien
tcgttaaacccgtaagagacatgaa

SEQ ID NO: 1926460 - DNA, 25 bp, Homo sapien
cacgtagctggttatgtattggatc

SEQ ID NO: 1926461 - DNA, 25 bp, Homo sapien
caaatgtatggataaggtagcagaa

SEQ ID NO: 1926462 - DNA, 25 bp, Homo sapien
taatatactacatactgtaaaagca

SEQ ID NO: 1926463 - DNA, 25 bp, Homo sapien
tctacacaaaagcttggtacaaatg

SEQ ID NO: 1926464 - DNA, 25 bp, Homo sapien
gcaacagaataatagcaatagagtt

SEQ ID NO: 1926465 - DNA, 25 bp, Homo sapien
ctgttgcctcaattcaggtgaatct

SEQ ID NO: 1926466 - DNA, 25 bp, Homo sapien
gtgaatcttgaggtgttccaagttg

SEQ ID NO: 1926467 - DNA, 25 bp, Homo sapien
gaggtgttccaagttgattcagagt

SEQ ID NO: 1926468 - DNA, 25 bp, Homo sapien
tgcctcaattcaggtgaatcttgag

SEQ ID NO: 1926469 - DNA, 25 bp, Homo sapien
cagacgtgacttcaaagagtatgtt

SEQ ID NO: 1926470 - DNA, 25 bp, Homo sapien
cacagacgtgacttcaaagagtatg

SEQ ID NO: 1926471 - DNA, 25 bp, Homo sapien
ttccacagacgtgacttcaaagagt

SEQ ID NO: 1926472 - DNA, 25 bp, Homo sapien
gacgtgacttcaaagagtatgttac

SEQ ID NO: 1926473 - DNA, 25 bp, Homo sapien
atgcactactgggtcatcaaaaaca

SEQ ID NO: 1926474 - DNA, 25 bp, Homo sapien
ggctcttctacagcaatgaagatcc

SEQ ID NO: 1926475 - DNA, 25 bp, Homo sapien
gaagatccattctgttccacgtggg

SEQ ID NO: 1926476 - DNA, 25 bp, Homo sapien
tttcctacacatccgaaaaagatgc

SEQ ID NO: 1926477 - DNA, 25 bp, Homo sapien
taatagtggtatccgtgcttttaat

SEQ ID NO: 1926478 - DNA, 25 bp, Homo sapien
gcacttggtatgctccgtcttttaa

SEQ ID NO: 1926479 - DNA, 25 bp, Homo sapien
ttttatgtcctatttgtcatctgta

SEQ ID NO: 1926480 - DNA, 25 bp, Homo sapien
tgatgccactttacacttccacctg

SEQ ID NO: 1926481 - DNA, 25 bp, Homo sapien
tctttcagtattaaaccaaccctga

SEQ ID NO: 1926482 - DNA, 25 bp, Homo sapien
tcttttgtcaggttaaagagctcac

SEQ ID NO: 1926483 - DNA, 25 bp, Homo sapien
caccattaagtgtgacactctgtaa

SEQ ID NO: 1926484 - DNA, 25 bp, Homo sapien
tgggatatactccacttgttacatc

SEQ ID NO: 1926485 - DNA, 25 bp, Homo sapien
tttggaacagtttgtgtacaattag

SEQ ID NO: 1926486 - DNA, 25 bp, Homo sapien
tggaacctcctgctgccagttcaag

SEQ ID NO: 1926487 - DNA, 25 bp, Homo sapien
ggattatgctgacctgctaaaacga

SEQ ID NO: 1926488 - DNA, 25 bp, Homo sapien
gctgacctgctaaaacgaattcttc

SEQ ID NO: 1926489 - DNA, 25 bp, Homo sapien
gaagagaacacttgtcttctttgtg

SEQ ID NO: 1926490 - DNA, 25 bp, Homo sapien
agagaacacttgtcttctttgtgag

SEQ ID NO: 1926491 - DNA, 25 bp, Homo sapien
ttgtgagcaaaagcactgatccaaa

SEQ ID NO: 1926492 - DNA, 25 bp, Homo sapien
ctgaagagaacacttgtcttctttg

SEQ ID NO: 1926493 - DNA, 25 bp, Homo sapien
gtcatccactcgagggcccaataat

SEQ ID NO: 1926494 - DNA, 25 bp, Homo sapien
aataattctcctactgctccaaaag

SEQ ID NO: 1926495 - DNA, 25 bp, Homo sapien
gcaacaacggttccataacaatgtg

SEQ ID NO: 1926496 - DNA, 25 bp, Homo sapien
tctgaggtagtctggaatcagaagc

SEQ ID NO: 1926497 - DNA, 25 bp, Homo sapien
ttccacgtgatttctgcatagccct

SEQ ID NO: 1926498 - DNA, 25 bp, Homo sapien
tagcccttatcagtacacatacttg

SEQ ID NO: 1926499 - DNA, 25 bp, Homo sapien
gaagagaacctaaatgtggtgcaaa

SEQ ID NO: 1926500 - DNA, 25 bp, Homo sapien
tatcattttattcaatcgcacccag

SEQ ID NO: 1926501 - DNA, 25 bp, Homo sapien
aggaatctcattcctcctgagggag

SEQ ID NO: 1926502 - DNA, 25 bp, Homo sapien
cctgagggaggcaattctaccttaa

SEQ ID NO: 1926503 - DNA, 25 bp, Homo sapien
taaactacaatgagagcaggacctt

SEQ ID NO: 1926504 - DNA, 25 bp, Homo sapien
cctacagtttggaacagtatctagc

SEQ ID NO: 1926505 - DNA, 25 bp, Homo sapien
gtcttcttaacagctcttcacatag

SEQ ID NO: 1926506 - DNA, 25 bp, Homo sapien
tgtggagtatcatagccagaccttc

SEQ ID NO: 1926507 - DNA, 25 bp, Homo sapien
tgccccggatgtactcgcacactta

SEQ ID NO: 1926508 - DNA, 25 bp, Homo sapien
ttcacatgatccaatactgccccgg

SEQ ID NO: 1926509 - DNA, 25 bp, Homo sapien
aacctgttgttagaggaatgctcct

SEQ ID NO: 1926510 - DNA, 25 bp, Homo sapien
gcctggccctgacttcctatagaaa

SEQ ID NO: 1926511 - DNA, 25 bp, Homo sapien
cattcattctaaagagttcgagccc

SEQ ID NO: 1926512 - DNA, 25 bp, Homo sapien
ccttaagcccttggtagtgctacct

SEQ ID NO: 1926513 - DNA, 25 bp, Homo sapien
aacactgtgtgatcttctggatgtt

SEQ ID NO: 1926514 - DNA, 25 bp, Homo sapien
atcttctggatgttagaagagatcc

SEQ ID NO: 1926515 - DNA, 25 bp, Homo sapien
actgtgtgatcttctggatgttaga

SEQ ID NO: 1926516 - DNA, 25 bp, Homo sapien
tgtgatcttctggatgttagaagag

SEQ ID NO: 1926517 - DNA, 25 bp, Homo sapien
gttgatgttcttattcgctaatttc

SEQ ID NO: 1926518 - DNA, 25 bp, Homo sapien
ggttgatgttcttattcgctaattt

SEQ ID NO: 1926519 - DNA, 25 bp, Homo sapien
gttcttattcgctaatttcatcaga

SEQ ID NO: 1926520 - DNA, 25 bp, Homo sapien
caacttccctctcaggtacagctga

SEQ ID NO: 1926521 - DNA, 25 bp, Homo sapien
gcctggccacgctgaaagtcctggt

SEQ ID NO: 1926522 - DNA, 25 bp, Homo sapien
ggtacagctgatctattctgggctc

SEQ ID NO: 1926523 - DNA, 25 bp, Homo sapien
ctatgcctggaactctggtgcactt

SEQ ID NO: 1926524 - DNA, 25 bp, Homo sapien
aatgtttaacatcagtaagcaccag

SEQ ID NO: 1926525 - DNA, 25 bp, Homo sapien
cagcatggcaagtcatcaaagaact

SEQ ID NO: 1926526 - DNA, 25 bp, Homo sapien
taatatttgatccagtaacctcgtt

SEQ ID NO: 1926527 - DNA, 25 bp, Homo sapien
ctaagtgcccatcaagtgtctatta

SEQ ID NO: 1926528 - DNA, 25 bp, Homo sapien
gcaagacacttagcatttgggccca

SEQ ID NO: 1926529 - DNA, 25 bp, Homo sapien
tgtgcggcacaccatggaagtagca

SEQ ID NO: 1926530 - DNA, 25 bp, Homo sapien
gcccactgccagaatcaaaatgaga

SEQ ID NO: 1926531 - DNA, 25 bp, Homo sapien
aagaactcagccattgcctgtgcgg

SEQ ID NO: 1926532 - DNA, 25 bp, Homo sapien
tcatttggtcgtgtctggattcctg

SEQ ID NO: 1926533 - DNA, 25 bp, Homo sapien
ctccgccagccgtgcgcctccggag

SEQ ID NO: 1926534 - DNA, 25 bp, Homo sapien
tctatattcgggaagtttagtgtgt

SEQ ID NO: 1926535 - DNA, 25 bp, Homo sapien
tcagttcctctatattcgggaagtt

SEQ ID NO: 1926536 - DNA, 25 bp, Homo sapien
cgccgcgcccttgcacccggccggg

SEQ ID NO: 1926537 - DNA, 25 bp, Homo sapien
ccgcccttcctagcctcccgagtgc

SEQ ID NO: 1926538 - DNA, 25 bp, Homo sapien
acagccgcgcgcacccggaatgcgg

SEQ ID NO: 1926539 - DNA, 25 bp, Homo sapien
ggaatgcggaacgcgccgcgccctt

SEQ ID NO: 1926540 - DNA, 25 bp, Homo sapien
tacacctccgaccgccgtcacccac

SEQ ID NO: 1926541 - DNA, 25 bp, Homo sapien
tcctacacctccgaccgccgtcacc

SEQ ID NO: 1926542 - DNA, 25 bp, Homo sapien
cctcctacacctccgaccgccgtca

SEQ ID NO: 1926543 - DNA, 25 bp, Homo sapien
ctacacctccgaccgccgtcaccca

SEQ ID NO: 1926544 - DNA, 25 bp, Homo sapien
taccccggagccctcagctgcaatt

SEQ ID NO: 1926545 - DNA, 25 bp, Homo sapien
ccccggagccctcagctgcaattct

SEQ ID NO: 1926546 - DNA, 25 bp, Homo sapien
tcagctgcaattctcagctgatggg

SEQ ID NO: 1926547 - DNA, 25 bp, Homo sapien
ctcagctgatgggcggtggcgtggg

SEQ ID NO: 1926548 - DNA, 25 bp, Homo sapien
ccttttctattggcccgcggggctg

SEQ ID NO: 1926549 - DNA, 25 bp, Homo sapien
ttttctattggcccgcggggctgag

SEQ ID NO: 1926550 - DNA, 25 bp, Homo sapien
cttttctattggcccgcggggctga

SEQ ID NO: 1926551 - DNA, 25 bp, Homo sapien
ttctattggcccgcggggctgagtg

SEQ ID NO: 1926552 - DNA, 25 bp, Homo sapien
gggtatcagcaaaattgcaagggag

SEQ ID NO: 1926553 - DNA, 25 bp, Homo sapien
aaattgcaagggagctgttctttga

SEQ ID NO: 1926554 - DNA, 25 bp, Homo sapien
gctgttctttgaagcctgacgtaga

SEQ ID NO: 1926555 - DNA, 25 bp, Homo sapien
gtagagatggtgaacgcctcttagc

SEQ ID NO: 1926556 - DNA, 25 bp, Homo sapien
atcttggcaagaatcatgccgttaa

SEQ ID NO: 1926557 - DNA, 25 bp, Homo sapien
ccttgagatccttttctgatcgttt

SEQ ID NO: 1926558 - DNA, 25 bp, Homo sapien
gtctcggcacttagagtacttaata

SEQ ID NO: 1926559 - DNA, 25 bp, Homo sapien
cacgtgtttgaggaagctgtctcgg

SEQ ID NO: 1926560 - DNA, 25 bp, Homo sapien
cattccatggtgacttgaaggttta

SEQ ID NO: 1926561 - DNA, 25 bp, Homo sapien
tctgggtatggagacgtccacacat

SEQ ID NO: 1926562 - DNA, 25 bp, Homo sapien
gctctgggtatggagacgtccacac

SEQ ID NO: 1926563 - DNA, 25 bp, Homo sapien
tatggagacgtccacacattccatg

SEQ ID NO: 1926564 - DNA, 25 bp, Homo sapien
tgctcccgcaatcaatagctgccat

SEQ ID NO: 1926565 - DNA, 25 bp, Homo sapien
atgttgctcccgcaatcaatagctg

SEQ ID NO: 1926566 - DNA, 25 bp, Homo sapien
gctgggagtaaagtttatgttgctc

SEQ ID NO: 1926567 - DNA, 25 bp, Homo sapien
aggctgggagtaaagtttatgttgc

SEQ ID NO: 1926568 - DNA, 25 bp, Homo sapien
ggtagatgaatgaactaactgaacc

SEQ ID NO: 1926569 - DNA, 25 bp, Homo sapien
ttgactgaaagtcctaaagaaatct

SEQ ID NO: 1926570 - DNA, 25 bp, Homo sapien
tatgaactttgctgtactttcttct

SEQ ID NO: 1926571 - DNA, 25 bp, Homo sapien
tcttcttttttatatgcctgctctt

SEQ ID NO: 1926572 - DNA, 25 bp, Homo sapien
taaagtgaaggaggctgtcgaccat

SEQ ID NO: 1926573 - DNA, 25 bp, Homo sapien
cacaagaggtatatgcccacagcaa

SEQ ID NO: 1926574 - DNA, 25 bp, Homo sapien
caatgtggtaatctgctgagcctgt

SEQ ID NO: 1926575 - DNA, 25 bp, Homo sapien
tcttggtacaaatcaacagtgcgtg

SEQ ID NO: 1926576 - DNA, 25 bp, Homo sapien
tgatcataatgaggcaggggacaaa

SEQ ID NO: 1926577 - DNA, 25 bp, Homo sapien
aacgaagtgtatgctgcgggcaccc

SEQ ID NO: 1926578 - DNA, 25 bp, Homo sapien
tctgtgtagaggaataacgaagtgt

SEQ ID NO: 1926579 - DNA, 25 bp, Homo sapien
tgtctctaccacatctgtgtagagg

SEQ ID NO: 1926580 - DNA, 25 bp, Homo sapien
tctccactgagcgaatggtgctgag

SEQ ID NO: 1926581 - DNA, 25 bp, Homo sapien
gatgcccagagtatgtactgtcctg

SEQ ID NO: 1926582 - DNA, 25 bp, Homo sapien
gaagcgctttgaagtaggacacagc

SEQ ID NO: 1926583 - DNA, 25 bp, Homo sapien
gtagatgaccaactggatgcccaga

SEQ ID NO: 1926584 - DNA, 25 bp, Homo sapien
gctcttcagcaccttggatgaagac

SEQ ID NO: 1926585 - DNA, 25 bp, Homo sapien
ggtagcagaatgccgcagggtgctc

SEQ ID NO: 1926586 - DNA, 25 bp, Homo sapien
tgctcttcagcaccttggatgaaga

SEQ ID NO: 1926587 - DNA, 25 bp, Homo sapien
ctggtagcagaatgccgcagggtgc

SEQ ID NO: 1926588 - DNA, 25 bp, Homo sapien
catgactatgcctaaggtcctggtg

SEQ ID NO: 1926589 - DNA, 25 bp, Homo sapien
tgaaatagcctagccagaggaagac

SEQ ID NO: 1926590 - DNA, 25 bp, Homo sapien
ctaagcatgggcagaaaacaggctt

SEQ ID NO: 1926591 - DNA, 25 bp, Homo sapien
gggtggaagatcatgcctgtgacaa

SEQ ID NO: 1926592 - DNA, 25 bp, Homo sapien
tctggtgacatattgcaatgggtct

SEQ ID NO: 1926593 - DNA, 25 bp, Homo sapien
tgtatgtaaattcccaccgtggttg

SEQ ID NO: 1926594 - DNA, 25 bp, Homo sapien
tagtcctagaacctgtgccaatttg

SEQ ID NO: 1926595 - DNA, 25 bp, Homo sapien
cacaaacctgtgcaatcaatggctg

SEQ ID NO: 1926596 - DNA, 25 bp, Homo sapien
tatagacccgatcatgaccaggtac

SEQ ID NO: 1926597 - DNA, 25 bp, Homo sapien
cagcaggactcgatggatgtgatca

SEQ ID NO: 1926598 - DNA, 25 bp, Homo sapien
gatcacactgaagggcatgaccaca

SEQ ID NO: 1926599 - DNA, 25 bp, Homo sapien
tcgtaacggtcaactgagatgaagc

SEQ ID NO: 1926600 - DNA, 25 bp, Homo sapien
caaaagtgctgtgttcctctcagtt

SEQ ID NO: 1926601 - DNA, 25 bp, Homo sapien
gaatcttgttcaaaagtgctgtgtt

SEQ ID NO: 1926602 - DNA, 25 bp, Homo sapien
catctttgtctcatgggtactatga

SEQ ID NO: 1926603 - DNA, 25 bp, Homo sapien
ctcatgggtactatgaatcttgttc

SEQ ID NO: 1926604 - DNA, 25 bp, Homo sapien
gaagatagagtaagacacccacata

SEQ ID NO: 1926605 - DNA, 25 bp, Homo sapien
ggtgaattgttaaggtaatgtcaaa

SEQ ID NO: 1926606 - DNA, 25 bp, Homo sapien
gttatgaaaacaagtaaccacatga

SEQ ID NO: 1926607 - DNA, 25 bp, Homo sapien
actcctatcttaagctcttggtgaa

SEQ ID NO: 1926608 - DNA, 25 bp, Homo sapien
tagtaactgtaggaggcatctacct

SEQ ID NO: 1926609 - DNA, 25 bp, Homo sapien
ccctgatgaggttactactaatagt

SEQ ID NO: 1926610 - DNA, 25 bp, Homo sapien
cagctacagctggttcctcgagagt

SEQ ID NO: 1926611 - DNA, 25 bp, Homo sapien
tcctgagggaaggatgctacccagc

SEQ ID NO: 1926612 - DNA, 25 bp, Homo sapien
catttacatgccttctttgagggag

SEQ ID NO: 1926613 - DNA, 25 bp, Homo sapien
caatcggccatgaggaggaactgct

SEQ ID NO: 1926614 - DNA, 25 bp, Homo sapien
gaactgctctgacagcaatgctgga

SEQ ID NO: 1926615 - DNA, 25 bp, Homo sapien
caatgctggagctccatggagaata

SEQ ID NO: 1926616 - DNA, 25 bp, Homo sapien
caagtagagttgaagtaccggagcc

SEQ ID NO: 1926617 - DNA, 25 bp, Homo sapien
gaaaacaaggcaaccagcaagccag

SEQ ID NO: 1926618 - DNA, 25 bp, Homo sapien
taggtatgggtcaatcagaacagca

SEQ ID NO: 1926619 - DNA, 25 bp, Homo sapien
taccggagccacactaaaagatcca

SEQ ID NO: 1926620 - DNA, 25 bp, Homo sapien
taccggaaacatcggcctcagatag

SEQ ID NO: 1926621 - DNA, 25 bp, Homo sapien
taaataccaaccatgatggagccag

SEQ ID NO: 1926622 - DNA, 25 bp, Homo sapien
tcttatagctctgcataccggaaac

SEQ ID NO: 1926623 - DNA, 25 bp, Homo sapien
gactcgagcatgctgtttggaaacg

SEQ ID NO: 1926624 - DNA, 25 bp, Homo sapien
taatgtaaagggtaacacacggcat

SEQ ID NO: 1926625 - DNA, 25 bp, Homo sapien
gacaaaacccagcagaaagtccgtg

SEQ ID NO: 1926626 - DNA, 25 bp, Homo sapien
caggaactgaccagcaaaatgccag

SEQ ID NO: 1926627 - DNA, 25 bp, Homo sapien
cacggcataaaatcggtcaatagca

SEQ ID NO: 1926628 - DNA, 25 bp, Homo sapien
cgatatggaaaccattataaccaag

SEQ ID NO: 1926629 - DNA, 25 bp, Homo sapien
tgtttgaaatgcgatatggaaacca

SEQ ID NO: 1926630 - DNA, 25 bp, Homo sapien
atagtgataatcatggctccagtca

SEQ ID NO: 1926631 - DNA, 25 bp, Homo sapien
ttataaccaagtttccgaatagtga

SEQ ID NO: 1926632 - DNA, 25 bp, Homo sapien
gatccatggtgctttatcccttgaa

SEQ ID NO: 1926633 - DNA, 25 bp, Homo sapien
tctttccaggaggatgagtcactgt

SEQ ID NO: 1926634 - DNA, 25 bp, Homo sapien
ggacaactggataggtcttcgggaa

SEQ ID NO: 1926635 - DNA, 25 bp, Homo sapien
tcttcgggaatataagttagatcca

SEQ ID NO: 1926636 - DNA, 25 bp, Homo sapien
agtagagaactcagatccaggagct

SEQ ID NO: 1926637 - DNA, 25 bp, Homo sapien
tgcaggtgcgacatcaggaaattcc

SEQ ID NO: 1926638 - DNA, 25 bp, Homo sapien
gttagttgtgaatcaatgaccgtcc

SEQ ID NO: 1926639 - DNA, 25 bp, Homo sapien
gagcttccagataggcactaactgt

SEQ ID NO: 1926640 - DNA, 25 bp, Homo sapien
gttgctgatgcttcaaagtacatct

SEQ ID NO: 1926641 - DNA, 25 bp, Homo sapien
gattacatgtggagttaaaatagcc

SEQ ID NO: 1926642 - DNA, 25 bp, Homo sapien
tgctctgcgaaaccagggatagaag

SEQ ID NO: 1926643 - DNA, 25 bp, Homo sapien
tagccaaaccatgtcaaggcatcaa

SEQ ID NO: 1926644 - DNA, 25 bp, Homo sapien
tcactattcctaaagttttggcagc

SEQ ID NO: 1926645 - DNA, 25 bp, Homo sapien
cagggaccgaccaacatagaagtag

SEQ ID NO: 1926646 - DNA, 25 bp, Homo sapien
gcaaccaagatgtcatagccctcta

SEQ ID NO: 1926647 - DNA, 25 bp, Homo sapien
caccatcatagacccaggagtgaag

SEQ ID NO: 1926648 - DNA, 25 bp, Homo sapien
catagcttgttgaacatcactgggc

SEQ ID NO: 1926649 - DNA, 25 bp, Homo sapien
actcggacacccagagatctttcat

SEQ ID NO: 1926650 - DNA, 25 bp, Homo sapien
ccactcggacacccagagatctttc

SEQ ID NO: 1926651 - DNA, 25 bp, Homo sapien
ctcggacacccagagatctttcatt

SEQ ID NO: 1926652 - DNA, 25 bp, Homo sapien
cactcggacacccagagatctttca

SEQ ID NO: 1926653 - DNA, 25 bp, Homo sapien
catctaatgacctctaattatctgg

SEQ ID NO: 1926654 - DNA, 25 bp, Homo sapien
attcatacgaatgttgttttaaggg

SEQ ID NO: 1926655 - DNA, 25 bp, Homo sapien
tgattgtgatctattacctgtggga

SEQ ID NO: 1926656 - DNA, 25 bp, Homo sapien
gagtcaatctataaggcaaatcatg

SEQ ID NO: 1926657 - DNA, 25 bp, Homo sapien
ttttgtctgtgttcttttgaaatgt

SEQ ID NO: 1926658 - DNA, 25 bp, Homo sapien
tttttgtctgtgttcttttgaaatg

SEQ ID NO: 1926659 - DNA, 25 bp, Homo sapien
cttttgaaatgtgaaagttcatgtt

SEQ ID NO: 1926660 - DNA, 25 bp, Homo sapien
ttgaaatgtgaaagttcatgttgct

SEQ ID NO: 1926661 - DNA, 25 bp, Homo sapien
tggctgttgcctttatcaccagtct

SEQ ID NO: 1926662 - DNA, 25 bp, Homo sapien
taggagtccctgtgcttttactttc

SEQ ID NO: 1926663 - DNA, 25 bp, Homo sapien
caccagtctctagtggattgtgact

SEQ ID NO: 1926664 - DNA, 25 bp, Homo sapien
actttccttgatggttggcactgac

SEQ ID NO: 1926665 - DNA, 25 bp, Homo sapien
gccactagggcaattgaaaagctga

SEQ ID NO: 1926666 - DNA, 25 bp, Homo sapien
cttgttgccccaaacacctttcttg

SEQ ID NO: 1926667 - DNA, 25 bp, Homo sapien
acctttcttgccactagggcaattg

SEQ ID NO: 1926668 - DNA, 25 bp, Homo sapien
cttctcaagcccactataagatctt

SEQ ID NO: 1926669 - DNA, 25 bp, Homo sapien
caagatgagccttttcagttgagta

SEQ ID NO: 1926670 - DNA, 25 bp, Homo sapien
cctgaggggataacagaatgcttcc

SEQ ID NO: 1926671 - DNA, 25 bp, Homo sapien
tcctggagagtaatcctcaagatga

SEQ ID NO: 1926672 - DNA, 25 bp, Homo sapien
tcagccagttacagcgagggacctg

SEQ ID NO: 1926673 - DNA, 25 bp, Homo sapien
atgaactcaattccaaaaataattt

SEQ ID NO: 1926674 - DNA, 25 bp, Homo sapien
tatgaactcaattccaaaaataatt

SEQ ID NO: 1926675 - DNA, 25 bp, Homo sapien
ctatgaactcaattccaaaaataat

SEQ ID NO: 1926676 - DNA, 25 bp, Homo sapien
tgaactcaattccaaaaataattta

SEQ ID NO: 1926677 - DNA, 25 bp, Homo sapien
ctggatgaatctttttggaaaattt

SEQ ID NO: 1926678 - DNA, 25 bp, Homo sapien
gaagtcataaaggtcagtaccccag

SEQ ID NO: 1926679 - DNA, 25 bp, Homo sapien
cagattgccaacgagtgtggtcaga

SEQ ID NO: 1926680 - DNA, 25 bp, Homo sapien
gaaagggcaccagcatattaggaaa

SEQ ID NO: 1926681 - DNA, 25 bp, Homo sapien
tggatcacacacagcatagtagcgg

SEQ ID NO: 1926682 - DNA, 25 bp, Homo sapien
ctgtacagggaagcacggacatcat

SEQ ID NO: 1926683 - DNA, 25 bp, Homo sapien
ttatattgtggcaaaagggcatcat

SEQ ID NO: 1926684 - DNA, 25 bp, Homo sapien
taattatattgtggcaaaagggcat

SEQ ID NO: 1926685 - DNA, 25 bp, Homo sapien
catttgaccagttgtttttcacaca

SEQ ID NO: 1926686 - DNA, 25 bp, Homo sapien
caataataggcaagtgtacccaaag

SEQ ID NO: 1926687 - DNA, 25 bp, Homo sapien
caggagattaaggagtttggtgccc

SEQ ID NO: 1926688 - DNA, 25 bp, Homo sapien
taaaatgcaggtatcatatcccctg

SEQ ID NO: 1926689 - DNA, 25 bp, Homo sapien
tctctgaggactacacccactaata

SEQ ID NO: 1926690 - DNA, 25 bp, Homo sapien
ttcactacaccagcagactccggca

SEQ ID NO: 1926691 - DNA, 25 bp, Homo sapien
agcagactccggcaactggaaccct

SEQ ID NO: 1926692 - DNA, 25 bp, Homo sapien
tgttgaatattttgcaggaccgggg

SEQ ID NO: 1926693 - DNA, 25 bp, Homo sapien
gtgggggcatttttgtacttcacaa

SEQ ID NO: 1926694 - DNA, 25 bp, Homo sapien
gagtagggggactgtcacacacttt

SEQ ID NO: 1926695 - DNA, 25 bp, Homo sapien
tattgccaagcagcaccaagctgtg

SEQ ID NO: 1926696 - DNA, 25 bp, Homo sapien
tacaaactatatcagtgtgaagctt

SEQ ID NO: 1926697 - DNA, 25 bp, Homo sapien
caagctgtgaaagccgcatccccat

SEQ ID NO: 1926698 - DNA, 25 bp, Homo sapien
caagggagacctactatagttgaca

SEQ ID NO: 1926699 - DNA, 25 bp, Homo sapien
ggcaattcattacaccacaagggag

SEQ ID NO: 1926700 - DNA, 25 bp, Homo sapien
tatcattgctctaggagaagccaga

SEQ ID NO: 1926701 - DNA, 25 bp, Homo sapien
tctagcatcctaaagaatggaggcc

SEQ ID NO: 1926702 - DNA, 25 bp, Homo sapien
ctgtttctaaatacattatgggctt

SEQ ID NO: 1926703 - DNA, 25 bp, Homo sapien
gcctatcaccaacacatcaatatgt

SEQ ID NO: 1926704 - DNA, 25 bp, Homo sapien
caaatgtcagttaatgtcacccaaa

SEQ ID NO: 1926705 - DNA, 25 bp, Homo sapien
agaacaagggattttactcaaatat

SEQ ID NO: 1926706 - DNA, 25 bp, Homo sapien
tatgtaattgtccatcatcacagca

SEQ ID NO: 1926707 - DNA, 25 bp, Homo sapien
caagtgccttgctctcctgtgcaga

SEQ ID NO: 1926708 - DNA, 25 bp, Homo sapien
gttttgctggcatagatcactactg

SEQ ID NO: 1926709 - DNA, 25 bp, Homo sapien
cacagtgcatggctgttatcggtac

SEQ ID NO: 1926710 - DNA, 25 bp, Homo sapien
tcagcaatccttctctaagagtgtc

SEQ ID NO: 1926711 - DNA, 25 bp, Homo sapien
tattggagtcttgaggacccagacc

SEQ ID NO: 1926712 - DNA, 25 bp, Homo sapien
ggtttcactatcaatccatcagcaa

SEQ ID NO: 1926713 - DNA, 25 bp, Homo sapien
cactgagttgtgtaatgtcaagaga

SEQ ID NO: 1926714 - DNA, 25 bp, Homo sapien
aaagtggtaacaagagcagcctcct

SEQ ID NO: 1926715 - DNA, 25 bp, Homo sapien
gagacattatcaacccacaagagaa

SEQ ID NO: 1926716 - DNA, 25 bp, Homo sapien
tagaggataatattaacccggacca

SEQ ID NO: 1926717 - DNA, 25 bp, Homo sapien
tataattagctcacgtccaagaaag

SEQ ID NO: 1926718 - DNA, 25 bp, Homo sapien
gctgtgaggcctgatgaagcatttg

SEQ ID NO: 1926719 - DNA, 25 bp, Homo sapien
tgtgaggcctgatgaagcatttgat

SEQ ID NO: 1926720 - DNA, 25 bp, Homo sapien
gtgctgtgaggcctgatgaagcatt

SEQ ID NO: 1926721 - DNA, 25 bp, Homo sapien
ttgtgctgtgaggcctgatgaagca

SEQ ID NO: 1926722 - DNA, 25 bp, Homo sapien
agacaggtccggatgttggcttcag

SEQ ID NO: 1926723 - DNA, 25 bp, Homo sapien
caaacagagttactgttaagacagg

SEQ ID NO: 1926724 - DNA, 25 bp, Homo sapien
tctcatacaacctcccaaacagagt

SEQ ID NO: 1926725 - DNA, 25 bp, Homo sapien
tggcttcagactaaacaagcgtccg

SEQ ID NO: 1926726 - DNA, 25 bp, Homo sapien
agtgagatgcccgtaatcaatgtct

SEQ ID NO: 1926727 - DNA, 25 bp, Homo sapien
atttattagtgagatgcccgtaatc

SEQ ID NO: 1926728 - DNA, 25 bp, Homo sapien
gagatgcccgtaatcaatgtcttct

SEQ ID NO: 1926729 - DNA, 25 bp, Homo sapien
tattagtgagatgcccgtaatcaat

SEQ ID NO: 1926730 - DNA, 25 bp, Homo sapien
gaacttgcaggaagtcagcgaaaga

SEQ ID NO: 1926731 - DNA, 25 bp, Homo sapien
tgcaggaagtcagcgaaagaatgtg

SEQ ID NO: 1926732 - DNA, 25 bp, Homo sapien
cctcctcaccattccattgtcctcc

SEQ ID NO: 1926733 - DNA, 25 bp, Homo sapien
tgggaggagaacttgcaggaagtca

SEQ ID NO: 1926734 - DNA, 25 bp, Homo sapien
caaacctggtagaagctgtttcagc

SEQ ID NO: 1926735 - DNA, 25 bp, Homo sapien
aagacatactgggttccgaaagtgc

SEQ ID NO: 1926736 - DNA, 25 bp, Homo sapien
ccactgagggagaacatttcaaacc

SEQ ID NO: 1926737 - DNA, 25 bp, Homo sapien
gctgagtcaccgcaagtgtttaaat

SEQ ID NO: 1926738 - DNA, 25 bp, Homo sapien
tagaaaaatgcctatgccactttat

SEQ ID NO: 1926739 - DNA, 25 bp, Homo sapien
catttcacggtgtgtacacatatca

SEQ ID NO: 1926740 - DNA, 25 bp, Homo sapien
taaataaactgctagatgctcttaa

SEQ ID NO: 1926741 - DNA, 25 bp, Homo sapien
gagaaagtcaactgaaatactctct

SEQ ID NO: 1926742 - DNA, 25 bp, Homo sapien
tgactaaagcagcagccgctaactg

SEQ ID NO: 1926743 - DNA, 25 bp, Homo sapien
agtttccaaaaggagatccatattc

SEQ ID NO: 1926744 - DNA, 25 bp, Homo sapien
agcagcagccgctaactggtcttat

SEQ ID NO: 1926745 - DNA, 25 bp, Homo sapien
ccactttgcaggtggaaagtaatca

SEQ ID NO: 1926746 - DNA, 25 bp, Homo sapien
tccccaagagttaccagacatgtga

SEQ ID NO: 1926747 - DNA, 25 bp, Homo sapien
cacctttgaattccatgcccaggga

SEQ ID NO: 1926748 - DNA, 25 bp, Homo sapien
tttccccgcagcaaaaggtccagct

SEQ ID NO: 1926749 - DNA, 25 bp, Homo sapien
ggcaagtgttactcacatggtcaga

SEQ ID NO: 1926750 - DNA, 25 bp, Homo sapien
tcactgttgtttgcttaattgcccc

SEQ ID NO: 1926751 - DNA, 25 bp, Homo sapien
tatctcccttaagcatcagaccaaa

SEQ ID NO: 1926752 - DNA, 25 bp, Homo sapien
taattgccccttgtatcttgctgat

SEQ ID NO: 1926753 - DNA, 25 bp, Homo sapien
gggtccagctgaatgtctcataact

SEQ ID NO: 1926754 - DNA, 25 bp, Homo sapien
cacagtgtgcagtccgtcaaatgcc

SEQ ID NO: 1926755 - DNA, 25 bp, Homo sapien
gataatagcgcccttccacagtgtg

SEQ ID NO: 1926756 - DNA, 25 bp, Homo sapien
ccagttgcgagaggaggagttttcc

SEQ ID NO: 1926757 - DNA, 25 bp, Homo sapien
gtcaaatgcccctagagcgtacact

SEQ ID NO: 1926758 - DNA, 25 bp, Homo sapien
gaatactatggtgtccacgtggaaa

SEQ ID NO: 1926759 - DNA, 25 bp, Homo sapien
caggctccttgggtacattgaattg

SEQ ID NO: 1926760 - DNA, 25 bp, Homo sapien
ggaaattgaccctcatgcccatagc

SEQ ID NO: 1926761 - DNA, 25 bp, Homo sapien
ttgaaagtcacaatctcaggctcct

SEQ ID NO: 1926762 - DNA, 25 bp, Homo sapien
gaggatcactggtatcgcatggctt

SEQ ID NO: 1926763 - DNA, 25 bp, Homo sapien
gatcactggtatcgcatggcttctt

SEQ ID NO: 1926764 - DNA, 25 bp, Homo sapien
atggcttcttgtccccaatatttgc

SEQ ID NO: 1926765 - DNA, 25 bp, Homo sapien
gcttcttgtccccaatatttgccac

SEQ ID NO: 1926766 - DNA, 25 bp, Homo sapien
gcttcaattgatatctgaaatgcat

SEQ ID NO: 1926767 - DNA, 25 bp, Homo sapien
gcatagatataaattacaacacatt

SEQ ID NO: 1926768 - DNA, 25 bp, Homo sapien
ctttgcttcaattgatatctgaaat

SEQ ID NO: 1926769 - DNA, 25 bp, Homo sapien
atgcatagatataaattacaacaca

SEQ ID NO: 1926770 - DNA, 25 bp, Homo sapien
gaagttccagccataaatagcatct

SEQ ID NO: 1926771 - DNA, 25 bp, Homo sapien
gagagagtccctgttgaagttccag

SEQ ID NO: 1926772 - DNA, 25 bp, Homo sapien
cagtttacttcagggtctgggatgt

SEQ ID NO: 1926773 - DNA, 25 bp, Homo sapien
tgtcctccaaatatgggtagagaga

SEQ ID NO: 1926774 - DNA, 25 bp, Homo sapien
aaagcctcctcacgagacactggtg

SEQ ID NO: 1926775 - DNA, 25 bp, Homo sapien
cattgggcaatatcgctgcatgctc

SEQ ID NO: 1926776 - DNA, 25 bp, Homo sapien
tgatgtgatcgctccttccaaaatg

SEQ ID NO: 1926777 - DNA, 25 bp, Homo sapien
cagctgcagtgaaagtgtcctggca

SEQ ID NO: 1926778 - DNA, 25 bp, Homo sapien
tagaaaagcaaaattgccacgtaag

SEQ ID NO: 1926779 - DNA, 25 bp, Homo sapien
ctggctcttgagacatagaaaagca

SEQ ID NO: 1926780 - DNA, 25 bp, Homo sapien
aagcaaaattgccacgtaagctggc

SEQ ID NO: 1926781 - DNA, 25 bp, Homo sapien
cgtaagctggcaactgagtagtcat

SEQ ID NO: 1926782 - DNA, 25 bp, Homo sapien
cctaaaagggctctgctaaaggaga

SEQ ID NO: 1926783 - DNA, 25 bp, Homo sapien
taaacagacactaacggatctcttt

SEQ ID NO: 1926784 - DNA, 25 bp, Homo sapien
tataacatcttttctaaacagacac

SEQ ID NO: 1926785 - DNA, 25 bp, Homo sapien
tcctttcttagccaggctaatccta

SEQ ID NO: 1926786 - DNA, 25 bp, Homo sapien
tctcaaacactcttccatacagggc

SEQ ID NO: 1926787 - DNA, 25 bp, Homo sapien
ggctcctcaagcgtccatctcttga

SEQ ID NO: 1926788 - DNA, 25 bp, Homo sapien
cctaagcgtggagggtccttctcaa

SEQ ID NO: 1926789 - DNA, 25 bp, Homo sapien
gcaaaggggctccacttcggctcct

SEQ ID NO: 1926790 - DNA, 25 bp, Homo sapien
gactttgtgcgaaagtgcagccaac

SEQ ID NO: 1926791 - DNA, 25 bp, Homo sapien
ggcaagatcactccctcctaaagca

SEQ ID NO: 1926792 - DNA, 25 bp, Homo sapien
cacaggatttggtgttggaagaccc

SEQ ID NO: 1926793 - DNA, 25 bp, Homo sapien
tttaatttgcaccttctacaccatg

SEQ ID NO: 1926794 - DNA, 25 bp, Homo sapien
aaggaatttatcatcctgcacacct

SEQ ID NO: 1926795 - DNA, 25 bp, Homo sapien
aatttatcatcctgcacacctccta

SEQ ID NO: 1926796 - DNA, 25 bp, Homo sapien
atttatcatcctgcacacctcctac

SEQ ID NO: 1926797 - DNA, 25 bp, Homo sapien
tcaaaggaatttatcatcctgcaca

SEQ ID NO: 1926798 - DNA, 25 bp, Homo sapien
tctgtgggaaaacataacgcgttcc

SEQ ID NO: 1926799 - DNA, 25 bp, Homo sapien
ggcaagctgactcccacttagaatg

SEQ ID NO: 1926800 - DNA, 25 bp, Homo sapien
ggttctccacacgtttccaggtcag

SEQ ID NO: 1926801 - DNA, 25 bp, Homo sapien
tggtaaaagctgaccccacaggttc

SEQ ID NO: 1926802 - DNA, 25 bp, Homo sapien
gcatatttaaattgcctcataagaa

SEQ ID NO: 1926803 - DNA, 25 bp, Homo sapien
aacaacttattaatgaatcctaaag

SEQ ID NO: 1926804 - DNA, 25 bp, Homo sapien
aagtcaatatagtgggtcaggatta

SEQ ID NO: 1926805 - DNA, 25 bp, Homo sapien
taaattgcctcataagaagtatttt

SEQ ID NO: 1926806 - DNA, 25 bp, Homo sapien
ggaaaatggcttgacactgctggca

SEQ ID NO: 1926807 - DNA, 25 bp, Homo sapien
gcacctagggcatagatctcgtctg

SEQ ID NO: 1926808 - DNA, 25 bp, Homo sapien
gcatacgcatgccagtcaacagctg

SEQ ID NO: 1926809 - DNA, 25 bp, Homo sapien
tactgtgtgcagtccatcaaaagca

SEQ ID NO: 1926810 - DNA, 25 bp, Homo sapien
tgcatgctggtgttgtgggtatttg

SEQ ID NO: 1926811 - DNA, 25 bp, Homo sapien
tatttgcagcaagtagattgactcc

SEQ ID NO: 1926812 - DNA, 25 bp, Homo sapien
gcaagtagattgactcccatggcct

SEQ ID NO: 1926813 - DNA, 25 bp, Homo sapien
tgggtatttgcagcaagtagattga

SEQ ID NO: 1926814 - DNA, 25 bp, Homo sapien
cagccgagaggaggggcagcgtgtt

SEQ ID NO: 1926815 - DNA, 25 bp, Homo sapien
gaatggaagggaacagccgagagga

SEQ ID NO: 1926816 - DNA, 25 bp, Homo sapien
ctgaatggaagggaacagccgagag

SEQ ID NO: 1926817 - DNA, 25 bp, Homo sapien
aagggaacagccgagaggaggggca

SEQ ID NO: 1926818 - DNA, 25 bp, Homo sapien
tgaatttcaggtgcaaaaagattgt

SEQ ID NO: 1926819 - DNA, 25 bp, Homo sapien
tcaaaagtcacaagttctgaatcct

SEQ ID NO: 1926820 - DNA, 25 bp, Homo sapien
ttcccaaagggagtgtcaaaagtca

SEQ ID NO: 1926821 - DNA, 25 bp, Homo sapien
gaatttcaggtgcaaaaagattgta

SEQ ID NO: 1926822 - DNA, 25 bp, Homo sapien
gagtcactggcattgcatggcttct

SEQ ID NO: 1926823 - DNA, 25 bp, Homo sapien
gtcactggcattgcatggcttcttg

SEQ ID NO: 1926824 - DNA, 25 bp, Homo sapien
tgagagtcactggcattgcatggct

SEQ ID NO: 1926825 - DNA, 25 bp, Homo sapien
gagagtcactggcattgcatggctt

SEQ ID NO: 1926826 - DNA, 25 bp, Homo sapien
aattcaatagacatttcctcaaact

SEQ ID NO: 1926827 - DNA, 25 bp, Homo sapien
agacatttcctcaaacttactatat

SEQ ID NO: 1926828 - DNA, 25 bp, Homo sapien
gacatttcctcaaacttactatatt

SEQ ID NO: 1926829 - DNA, 25 bp, Homo sapien
caatagacatttcctcaaacttact

SEQ ID NO: 1926830 - DNA, 25 bp, Homo sapien
tcagctaggtggtcgtaaaatgtgg

SEQ ID NO: 1926831 - DNA, 25 bp, Homo sapien
taggtggtcgtaaaatgtggtccca

SEQ ID NO: 1926832 - DNA, 25 bp, Homo sapien
tggtcgtaaaatgtggtcccagaag

SEQ ID NO: 1926833 - DNA, 25 bp, Homo sapien
atcactcagctaggtggtcgtaaaa

SEQ ID NO: 1926834 - DNA, 25 bp, Homo sapien
tgaatgacagtgatagcaaagctct

SEQ ID NO: 1926835 - DNA, 25 bp, Homo sapien
cctatacaatttccattggccatat

SEQ ID NO: 1926836 - DNA, 25 bp, Homo sapien
gccatattgattgcattctgaatga

SEQ ID NO: 1926837 - DNA, 25 bp, Homo sapien
ctttggaaacaggctcattcatctt

SEQ ID NO: 1926838 - DNA, 25 bp, Homo sapien
tggccaaaaaacacgtgaacaaaca

SEQ ID NO: 1926839 - DNA, 25 bp, Homo sapien
aataataaaagatgctatggagaaa

SEQ ID NO: 1926840 - DNA, 25 bp, Homo sapien
aaataataaaagatgctatggagaa

SEQ ID NO: 1926841 - DNA, 25 bp, Homo sapien
gggtctctacatggaatccagttca

SEQ ID NO: 1926842 - DNA, 25 bp, Homo sapien
gctctccctggtgaagatccaacca

SEQ ID NO: 1926843 - DNA, 25 bp, Homo sapien
ggtctggtatatcctctagataggg

SEQ ID NO: 1926844 - DNA, 25 bp, Homo sapien
tagataggggtaaatgctctccctg

SEQ ID NO: 1926845 - DNA, 25 bp, Homo sapien
gcaagtctcctttacaagtataaaa

SEQ ID NO: 1926846 - DNA, 25 bp, Homo sapien
tactctttgaccaaactgcaagtct

SEQ ID NO: 1926847 - DNA, 25 bp, Homo sapien
gtttgtcatgaattccaaatactct

SEQ ID NO: 1926848 - DNA, 25 bp, Homo sapien
tccaaatactctttgaccaaactgc

SEQ ID NO: 1926849 - DNA, 25 bp, Homo sapien
tctgtttggtaatatcaccgcatgc

SEQ ID NO: 1926850 - DNA, 25 bp, Homo sapien
cagtgcaccaacactcagagcaagg

SEQ ID NO: 1926851 - DNA, 25 bp, Homo sapien
cagcaataaaagtgtccagtgcacc

SEQ ID NO: 1926852 - DNA, 25 bp, Homo sapien
tgttcatcaggagcaaagcttcttc

SEQ ID NO: 1926853 - DNA, 25 bp, Homo sapien
acacattttggaaaatgtgatataa

SEQ ID NO: 1926854 - DNA, 25 bp, Homo sapien
tgccacacattttggaaaatgtgat

SEQ ID NO: 1926855 - DNA, 25 bp, Homo sapien
ctgccacacattttggaaaatgtga

SEQ ID NO: 1926856 - DNA, 25 bp, Homo sapien
cattttggaaaatgtgatataatca

SEQ ID NO: 1926857 - DNA, 25 bp, Homo sapien
aacaaactcagattcttacgttttg

SEQ ID NO: 1926858 - DNA, 25 bp, Homo sapien
gattcttacgttttgtttcactgga

SEQ ID NO: 1926859 - DNA, 25 bp, Homo sapien
actttacattaaatccctcctggca

SEQ ID NO: 1926860 - DNA, 25 bp, Homo sapien
ctttacattaaatccctcctggcaa

SEQ ID NO: 1926861 - DNA, 25 bp, Homo sapien
ggatattgaatctttgtcagaagga

SEQ ID NO: 1926862 - DNA, 25 bp, Homo sapien
gagaatgcatagaccactgtctcag

SEQ ID NO: 1926863 - DNA, 25 bp, Homo sapien
gcaaagcaggttgtgagcatatcat

SEQ ID NO: 1926864 - DNA, 25 bp, Homo sapien
gaaccacaagggactcaagaactaa

SEQ ID NO: 1926865 - DNA, 25 bp, Homo sapien
gagcaatgagccaacactatgagga

SEQ ID NO: 1926866 - DNA, 25 bp, Homo sapien
cacaaagtctcaagcaaatgaggct

SEQ ID NO: 1926867 - DNA, 25 bp, Homo sapien
caagggcacagctatgtttgcaatg

SEQ ID NO: 1926868 - DNA, 25 bp, Homo sapien
gactcactggtctatactactgaaa

SEQ ID NO: 1926869 - DNA, 25 bp, Homo sapien
tcttagtaaacttgggaagccgata

SEQ ID NO: 1926870 - DNA, 25 bp, Homo sapien
tgaatattagcaggtaagttattgc

SEQ ID NO: 1926871 - DNA, 25 bp, Homo sapien
tttgcaaagctatgatcattaataa

SEQ ID NO: 1926872 - DNA, 25 bp, Homo sapien
caaagctatgatcattaataatatg

SEQ ID NO: 1926873 - DNA, 25 bp, Homo sapien
gttattgctgaattgctggtcccac

SEQ ID NO: 1926874 - DNA, 25 bp, Homo sapien
cctttgtgtaccacctcccaaagag

SEQ ID NO: 1926875 - DNA, 25 bp, Homo sapien
gctgtaaagtgagtcctttgtgtac

SEQ ID NO: 1926876 - DNA, 25 bp, Homo sapien
ttgtttaccaaacgcccatctttca

SEQ ID NO: 1926877 - DNA, 25 bp, Homo sapien
gacactgttagtataggcccagatg

SEQ ID NO: 1926878 - DNA, 25 bp, Homo sapien
gccataatgagcatgactgatgtaa

SEQ ID NO: 1926879 - DNA, 25 bp, Homo sapien
agaagccataatgagcatgactgat

SEQ ID NO: 1926880 - DNA, 25 bp, Homo sapien
taatgagcatgactgatgtaaaaca

SEQ ID NO: 1926881 - DNA, 25 bp, Homo sapien
acaacatattcacagaagggccatg

SEQ ID NO: 1926882 - DNA, 25 bp, Homo sapien
atctttggattttatggccttaagg

SEQ ID NO: 1926883 - DNA, 25 bp, Homo sapien
tggattttatggccttaaggttaca

SEQ ID NO: 1926884 - DNA, 25 bp, Homo sapien
gcaaagcattcctgatctttggatt

SEQ ID NO: 1926885 - DNA, 25 bp, Homo sapien
aaagcattcctgatctttggatttt

SEQ ID NO: 1926886 - DNA, 25 bp, Homo sapien
tagcacttcaggaaaaacatactct

SEQ ID NO: 1926887 - DNA, 25 bp, Homo sapien
tagttttgcacttcagcagtgtgca

SEQ ID NO: 1926888 - DNA, 25 bp, Homo sapien
tgacagatgaatttcggtaagtagc

SEQ ID NO: 1926889 - DNA, 25 bp, Homo sapien
tactggccgtccacaagttgtcaaa

SEQ ID NO: 1926890 - DNA, 25 bp, Homo sapien
cttgaatgccctttcatttgaactg

SEQ ID NO: 1926891 - DNA, 25 bp, Homo sapien
ctttcacttgaatgccctttcattt

SEQ ID NO: 1926892 - DNA, 25 bp, Homo sapien
cacttgaatgccctttcatttgaac

SEQ ID NO: 1926893 - DNA, 25 bp, Homo sapien
gaatgccctttcatttgaactgaaa

SEQ ID NO: 1926894 - DNA, 25 bp, Homo sapien
taatcctgtaaaagctcctagaacg

SEQ ID NO: 1926895 - DNA, 25 bp, Homo sapien
tgaagttgaacccatccctggaaat

SEQ ID NO: 1926896 - DNA, 25 bp, Homo sapien
tctccttcggccatgtaatcctgta

SEQ ID NO: 1926897 - DNA, 25 bp, Homo sapien
gcaaagctccttttgacagactgta

SEQ ID NO: 1926898 - DNA, 25 bp, Homo sapien
tcataatgatacactttgggaccat

SEQ ID NO: 1926899 - DNA, 25 bp, Homo sapien
cactttgggaccatttggtgcataa

SEQ ID NO: 1926900 - DNA, 25 bp, Homo sapien
ctgtcttcatgtcataatgatacac

SEQ ID NO: 1926901 - DNA, 25 bp, Homo sapien
ctgttgggtaggcaagcgaggatag

SEQ ID NO: 1926902 - DNA, 25 bp, Homo sapien
cagtaagaatttccaataagcaaaa

SEQ ID NO: 1926903 - DNA, 25 bp, Homo sapien
acagtaagaatttccaataagcaaa

SEQ ID NO: 1926904 - DNA, 25 bp, Homo sapien
ccacaagaagattaactcccattcc

SEQ ID NO: 1926905 - DNA, 25 bp, Homo sapien
tcatatttaggctgacatgatgtgt

SEQ ID NO: 1926906 - DNA, 25 bp, Homo sapien
gacatgatgtgtgttggccacaaga

SEQ ID NO: 1926907 - DNA, 25 bp, Homo sapien
ctgtcatatttaggctgacatgatg

SEQ ID NO: 1926908 - DNA, 25 bp, Homo sapien
aagctgaatggaattcaatagctgt

SEQ ID NO: 1926909 - DNA, 25 bp, Homo sapien
tggaattcaatagctgtcaaaaggg

SEQ ID NO: 1926910 - DNA, 25 bp, Homo sapien
tgtcaaaaggggcaaaacgttcatc

SEQ ID NO: 1926911 - DNA, 25 bp, Homo sapien
gctgaatggaattcaatagctgtca

SEQ ID NO: 1926912 - DNA, 25 bp, Homo sapien
tgggaaacagtatggtgtccacatg

SEQ ID NO: 1926913 - DNA, 25 bp, Homo sapien
ggaaacagtatggtgtccacatgga

SEQ ID NO: 1926914 - DNA, 25 bp, Homo sapien
ccaggatcatagaagaatatatcaa

SEQ ID NO: 1926915 - DNA, 25 bp, Homo sapien
accagggtaacaccaggatcataga

SEQ ID NO: 1926916 - DNA, 25 bp, Homo sapien
cttccaaatgcggtgttgaaagtca

SEQ ID NO: 1926917 - DNA, 25 bp, Homo sapien
ttccaaatgcggtgttgaaagtcac

SEQ ID NO: 1926918 - DNA, 25 bp, Homo sapien
tcagggacattaaactgaggctcag

SEQ ID NO: 1926919 - DNA, 25 bp, Homo sapien
ttcagggacattaaactgaggctca

SEQ ID NO: 1926920 - DNA, 25 bp, Homo sapien
caaatggataggagaaaaccagtaa

SEQ ID NO: 1926921 - DNA, 25 bp, Homo sapien
atttgttgaagaaatgactcataaa

SEQ ID NO: 1926922 - DNA, 25 bp, Homo sapien
gaagaaatgactcataaaaaccctc

SEQ ID NO: 1926923 - DNA, 25 bp, Homo sapien
tacaacaaatggataggagaaaacc

SEQ ID NO: 1926924 - DNA, 25 bp, Homo sapien
tgtcattttctttattgcccacttt

SEQ ID NO: 1926925 - DNA, 25 bp, Homo sapien
tcctgcttcagctcccacatagctg

SEQ ID NO: 1926926 - DNA, 25 bp, Homo sapien
cacgcccagccaaaagtgtcatttt

SEQ ID NO: 1926927 - DNA, 25 bp, Homo sapien
tcattttctttattgcccactttca

SEQ ID NO: 1926928 - DNA, 25 bp, Homo sapien
cattttacacgtccgtcactctctc

SEQ ID NO: 1926929 - DNA, 25 bp, Homo sapien
aacacgctccattttacacgtccgt

SEQ ID NO: 1926930 - DNA, 25 bp, Homo sapien
tcacaacacgctccattttacacgt

SEQ ID NO: 1926931 - DNA, 25 bp, Homo sapien
tttacacgtccgtcactctctctta

SEQ ID NO: 1926932 - DNA, 25 bp, Homo sapien
cattggtattgtattgaaagtagcc

SEQ ID NO: 1926933 - DNA, 25 bp, Homo sapien
tggagtcacgggaattacatggctt

SEQ ID NO: 1926934 - DNA, 25 bp, Homo sapien
ccattaggaggacatgtggagtcac

SEQ ID NO: 1926935 - DNA, 25 bp, Homo sapien
taacgtgccacgagttttccttctg

SEQ ID NO: 1926936 - DNA, 25 bp, Homo sapien
ctgtgggggtcttgacacggaatcc

SEQ ID NO: 1926937 - DNA, 25 bp, Homo sapien
ggtcttgacacggaatccagttcac

SEQ ID NO: 1926938 - DNA, 25 bp, Homo sapien
ggggtcttgacacggaatccagttc

SEQ ID NO: 1926939 - DNA, 25 bp, Homo sapien
tgggggtcttgacacggaatccagt

SEQ ID NO: 1926940 - DNA, 25 bp, Homo sapien
ctgagggtctgggatatcctccaga

SEQ ID NO: 1926941 - DNA, 25 bp, Homo sapien
gagggtctgggatatcctccagata

SEQ ID NO: 1926942 - DNA, 25 bp, Homo sapien
ttctggagtcacaatgattcgagca

SEQ ID NO: 1926943 - DNA, 25 bp, Homo sapien
ctggagtcacaatgattcgagcacc

SEQ ID NO: 1926944 - DNA, 25 bp, Homo sapien
ctgcttgatcgctgtctccagaatg

SEQ ID NO: 1926945 - DNA, 25 bp, Homo sapien
gcttgatcgctgtctccagaatgtc

SEQ ID NO: 1926946 - DNA, 25 bp, Homo sapien
tgcttgatcgctgtctccagaatgt

SEQ ID NO: 1926947 - DNA, 25 bp, Homo sapien
cctgcttgatcgctgtctccagaat

SEQ ID NO: 1926948 - DNA, 25 bp, Homo sapien
caaggcatcctcctgagaaactggt

SEQ ID NO: 1926949 - DNA, 25 bp, Homo sapien
gagattcaaggcatcctcctgagaa

SEQ ID NO: 1926950 - DNA, 25 bp, Homo sapien
aggcatcctcctgagaaactggtgt

SEQ ID NO: 1926951 - DNA, 25 bp, Homo sapien
ttcaaggcatcctcctgagaaactg

SEQ ID NO: 1926952 - DNA, 25 bp, Homo sapien
aatgacagcatgttcatacactgca

SEQ ID NO: 1926953 - DNA, 25 bp, Homo sapien
tgacagcatgttcatacactgcagc

SEQ ID NO: 1926954 - DNA, 25 bp, Homo sapien
tcatacactgcagctataaaactgt

SEQ ID NO: 1926955 - DNA, 25 bp, Homo sapien
gcatgttcatacactgcagctataa

SEQ ID NO: 1926956 - DNA, 25 bp, Homo sapien
ctgccacagagattggaaaagagga

SEQ ID NO: 1926957 - DNA, 25 bp, Homo sapien
agattggaaaagaggaagtgaccat

SEQ ID NO: 1926958 - DNA, 25 bp, Homo sapien
acagagattggaaaagaggaagtga

SEQ ID NO: 1926959 - DNA, 25 bp, Homo sapien
agagattggaaaagaggaagtgacc

SEQ ID NO: 1926960 - DNA, 25 bp, Homo sapien
tcattgatctagtatcaccaattag

SEQ ID NO: 1926961 - DNA, 25 bp, Homo sapien
gaagtggggacaatcatatctgtta

SEQ ID NO: 1926962 - DNA, 25 bp, Homo sapien
taagtagtcaggtaagctgatgagg

SEQ ID NO: 1926963 - DNA, 25 bp, Homo sapien
ttataattttggcagtagaagtggg

SEQ ID NO: 1926964 - DNA, 25 bp, Homo sapien
tgtaattcgttgctaaaagagccta

SEQ ID NO: 1926965 - DNA, 25 bp, Homo sapien
taaggttattttgccacagggaaca

SEQ ID NO: 1926966 - DNA, 25 bp, Homo sapien
atataggaaaatccctgagatgtga

SEQ ID NO: 1926967 - DNA, 25 bp, Homo sapien
ggacatacagtttcaatagttgact

SEQ ID NO: 1926968 - DNA, 25 bp, Homo sapien
taggtccacccactatgccagtcta

SEQ ID NO: 1926969 - DNA, 25 bp, Homo sapien
aagtccctttgagttagtagcatcc

SEQ ID NO: 1926970 - DNA, 25 bp, Homo sapien
ggtaaagtcgggatgactgtcacca

SEQ ID NO: 1926971 - DNA, 25 bp, Homo sapien
gaactggatccaagtcactcgttga

SEQ ID NO: 1926972 - DNA, 25 bp, Homo sapien
gggagccttccactcctctggatct

SEQ ID NO: 1926973 - DNA, 25 bp, Homo sapien
tttcctttccaaggcctgtgctcct

SEQ ID NO: 1926974 - DNA, 25 bp, Homo sapien
ctctggatctcagctgctttccttt

SEQ ID NO: 1926975 - DNA, 25 bp, Homo sapien
gctttagtcaagggggagccttcca

SEQ ID NO: 1926976 - DNA, 25 bp, Homo sapien
taacaaccaagacacgaaccaccaa

SEQ ID NO: 1926977 - DNA, 25 bp, Homo sapien
cgaaccaccaagccattcgcatttt

SEQ ID NO: 1926978 - DNA, 25 bp, Homo sapien
caaccaagacacgaaccaccaagcc

SEQ ID NO: 1926979 - DNA, 25 bp, Homo sapien
aacaaccaagacacgaaccaccaag

SEQ ID NO: 1926980 - DNA, 25 bp, Homo sapien
gacatgaaggtcaaaaaagtcctgg

SEQ ID NO: 1926981 - DNA, 25 bp, Homo sapien
tcaaggcccagatctgcatgccaca

SEQ ID NO: 1926982 - DNA, 25 bp, Homo sapien
catgctttaatagtggccccaagtg

SEQ ID NO: 1926983 - DNA, 25 bp, Homo sapien
gatgacttaaggcaatcaaggccca

SEQ ID NO: 1926984 - DNA, 25 bp, Homo sapien
tgtcctcctcagacattggatcgcc

SEQ ID NO: 1926985 - DNA, 25 bp, Homo sapien
gcactgctccgggaagggaattgca

SEQ ID NO: 1926986 - DNA, 25 bp, Homo sapien
aagggaattgcaggccatttgtcct

SEQ ID NO: 1926987 - DNA, 25 bp, Homo sapien
ctggcactgctccgggaagggaatt

SEQ ID NO: 1926988 - DNA, 25 bp, Homo sapien
gtcttccaaagccatcctctcctac

SEQ ID NO: 1926989 - DNA, 25 bp, Homo sapien
catcctctcctaccctgggtattgt

SEQ ID NO: 1926990 - DNA, 25 bp, Homo sapien
agagatcacaagacagatgtacatc

SEQ ID NO: 1926991 - DNA, 25 bp, Homo sapien
acagatgtacatccagtcttgacac

SEQ ID NO: 1926992 - DNA, 25 bp, Homo sapien
gtaagtacagcccaatacaggatca

SEQ ID NO: 1926993 - DNA, 25 bp, Homo sapien
tcacaatttcacacgaagttggagg

SEQ ID NO: 1926994 - DNA, 25 bp, Homo sapien
cctacggtgatgtttaaggccagga

SEQ ID NO: 1926995 - DNA, 25 bp, Homo sapien
agcaggacagcttttcagtatcaca

SEQ ID NO: 1926996 - DNA, 25 bp, Homo sapien
ctaggtttcattaggcaagagagta

SEQ ID NO: 1926997 - DNA, 25 bp, Homo sapien
cattaggcaagagagtagttcgttc

SEQ ID NO: 1926998 - DNA, 25 bp, Homo sapien
gcaagagagtagttcgttcctcctc

SEQ ID NO: 1926999 - DNA, 25 bp, Homo sapien
gtttcattaggcaagagagtagttc

SEQ ID NO: 1927000 - DNA, 25 bp, Homo sapien
gtatctaccaactgatgagcctcag

SEQ ID NO: 1927001 - DNA, 25 bp, Homo sapien
caactgatgagcctcagagtgctta

SEQ ID NO: 1927002 - DNA, 25 bp, Homo sapien
tattttccacttgcactggctaact

SEQ ID NO: 1927003 - DNA, 25 bp, Homo sapien
atttattttccacttgcactggcta

SEQ ID NO: 1927004 - DNA, 25 bp, Homo sapien
ccttgaatactccagtagataaaac

SEQ ID NO: 1927005 - DNA, 25 bp, Homo sapien
tactccagtagataaaacaagccca

SEQ ID NO: 1927006 - DNA, 25 bp, Homo sapien
ctttttctccttgaatactccagta

SEQ ID NO: 1927007 - DNA, 25 bp, Homo sapien
gtagataaaacaagcccatggctaa

SEQ ID NO: 1927008 - DNA, 25 bp, Homo sapien
ctgattaatgtaaattttccaagtc

SEQ ID NO: 1927009 - DNA, 25 bp, Homo sapien
tgcaaataaaagactgattactcac

SEQ ID NO: 1927010 - DNA, 25 bp, Homo sapien
attaatgtaaattttccaagtcaag

SEQ ID NO: 1927011 - DNA, 25 bp, Homo sapien
ttccacaaatataaggaaaatgcaa

SEQ ID NO: 1927012 - DNA, 25 bp, Homo sapien
tgtatagctgctgcccattcaaaac

SEQ ID NO: 1927013 - DNA, 25 bp, Homo sapien
atcagagcccatagaccttgtatag

SEQ ID NO: 1927014 - DNA, 25 bp, Homo sapien
tagaccttgtatagctgctgcccat

SEQ ID NO: 1927015 - DNA, 25 bp, Homo sapien
gagcccatagaccttgtatagctgc

SEQ ID NO: 1927016 - DNA, 25 bp, Homo sapien
gctacatgatccttcaattgtaagt

SEQ ID NO: 1927017 - DNA, 25 bp, Homo sapien
aaagataaagctaattcctgggcac

SEQ ID NO: 1927018 - DNA, 25 bp, Homo sapien
tgtaagtcttcattacattggaaga

SEQ ID NO: 1927019 - DNA, 25 bp, Homo sapien
cattgttagcatagttacccttctg

SEQ ID NO: 1927020 - DNA, 25 bp, Homo sapien
tattaaactgttggtataggcattg

SEQ ID NO: 1927021 - DNA, 25 bp, Homo sapien
tgtctttgagaaactcatctgatcc

SEQ ID NO: 1927022 - DNA, 25 bp, Homo sapien
ggctttcccctagatgaactgtttg

SEQ ID NO: 1927023 - DNA, 25 bp, Homo sapien
aaagggtatggattagaactctggc

SEQ ID NO: 1927024 - DNA, 25 bp, Homo sapien
ggctgagatagaagaatctcttgga

SEQ ID NO: 1927025 - DNA, 25 bp, Homo sapien
gatagaagaatctcttggacctggg

SEQ ID NO: 1927026 - DNA, 25 bp, Homo sapien
tgagatagaagaatctcttggacct

SEQ ID NO: 1927027 - DNA, 25 bp, Homo sapien
agatagaagaatctcttggacctgg

SEQ ID NO: 1927028 - DNA, 25 bp, Homo sapien
aagaaagaaattaaatgactactca

SEQ ID NO: 1927029 - DNA, 25 bp, Homo sapien
agaaagaaattaaatgactactcac

SEQ ID NO: 1927030 - DNA, 25 bp, Homo sapien
caattgaccacattgcactaaaaag

SEQ ID NO: 1927031 - DNA, 25 bp, Homo sapien
gacctgatacaagtcccaatgtact

SEQ ID NO: 1927032 - DNA, 25 bp, Homo sapien
cactaaaaagacctgatacaagtcc

SEQ ID NO: 1927033 - DNA, 25 bp, Homo sapien
ccaatgtacttaatccctcttcaaa

SEQ ID NO: 1927034 - DNA, 25 bp, Homo sapien
aaaaagagacatgagtgtatccatt

SEQ ID NO: 1927035 - DNA, 25 bp, Homo sapien
gataaaccaaggataatctggaaaa

SEQ ID NO: 1927036 - DNA, 25 bp, Homo sapien
gacatgagtgtatccattattaaaa

SEQ ID NO: 1927037 - DNA, 25 bp, Homo sapien
tatgatagatcaattaagataaacc

SEQ ID NO: 1927038 - DNA, 25 bp, Homo sapien
cacaactgagaatttccgggaaagt

SEQ ID NO: 1927039 - DNA, 25 bp, Homo sapien
gttggaattatactcattccagcag

SEQ ID NO: 1927040 - DNA, 25 bp, Homo sapien
aggccacttacaactaatatcagca

SEQ ID NO: 1927041 - DNA, 25 bp, Homo sapien
ccgggaaagttggaattatactcat

SEQ ID NO: 1927042 - DNA, 25 bp, Homo sapien
tgtaaactcaggtctgaaggactct

SEQ ID NO: 1927043 - DNA, 25 bp, Homo sapien
aaccgaggctcttggaagttaagtg

SEQ ID NO: 1927044 - DNA, 25 bp, Homo sapien
ttgttccatgtgaggagactatgcc

SEQ ID NO: 1927045 - DNA, 25 bp, Homo sapien
ccaggttactatgttttatcccaga

SEQ ID NO: 1927046 - DNA, 25 bp, Homo sapien
ccggctgtgattaagttgccaaaca

SEQ ID NO: 1927047 - DNA, 25 bp, Homo sapien
taatatgcaagattgggacaggccc

SEQ ID NO: 1927048 - DNA, 25 bp, Homo sapien
cttttaatatgcaagattgggacag

SEQ ID NO: 1927049 - DNA, 25 bp, Homo sapien
ggacaggccctaagagcatgtagca

SEQ ID NO: 1927050 - DNA, 25 bp, Homo sapien
ataggacagtgccatacccaggaat

SEQ ID NO: 1927051 - DNA, 25 bp, Homo sapien
tacccaggaatactagtcccacata

SEQ ID NO: 1927052 - DNA, 25 bp, Homo sapien
tggtgaagagatggcataggacagt

SEQ ID NO: 1927053 - DNA, 25 bp, Homo sapien
tcacttaggagaccaaatagtggtg

SEQ ID NO: 1927054 - DNA, 25 bp, Homo sapien
ctagttcacagggacggtagagagg

SEQ ID NO: 1927055 - DNA, 25 bp, Homo sapien
cacgcaagggtctttccacagagca

SEQ ID NO: 1927056 - DNA, 25 bp, Homo sapien
tacctcggtgtgtagtgcccattct

SEQ ID NO: 1927057 - DNA, 25 bp, Homo sapien
gggcccaagaacaagcagttacatc

SEQ ID NO: 1927058 - DNA, 25 bp, Homo sapien
ggaagccaaaacacgagctgagtga

SEQ ID NO: 1927059 - DNA, 25 bp, Homo sapien
tcagtttccagaatgagtgttcacc

SEQ ID NO: 1927060 - DNA, 25 bp, Homo sapien
gacagagtaggatcgaggaagccaa

SEQ ID NO: 1927061 - DNA, 25 bp, Homo sapien
cgaaggctataaggccaactttggg

SEQ ID NO: 1927062 - DNA, 25 bp, Homo sapien
tattagccccagtccagaaaaagtc

SEQ ID NO: 1927063 - DNA, 25 bp, Homo sapien
gcaaaacgacgcatcccagaacaat

SEQ ID NO: 1927064 - DNA, 25 bp, Homo sapien
tatacatattgagtggtaccatcag

SEQ ID NO: 1927065 - DNA, 25 bp, Homo sapien
acttcatagccaaaggattgataca

SEQ ID NO: 1927066 - DNA, 25 bp, Homo sapien
ccaggatagaagaagatgcagtcat

SEQ ID NO: 1927067 - DNA, 25 bp, Homo sapien
agcctttgccaggatagaagaagat

SEQ ID NO: 1927068 - DNA, 25 bp, Homo sapien
cctttgccaggatagaagaagatgc

SEQ ID NO: 1927069 - DNA, 25 bp, Homo sapien
tgccaggatagaagaagatgcagtc

SEQ ID NO: 1927070 - DNA, 25 bp, Homo sapien
caataaatactggcccatctggaac

SEQ ID NO: 1927071 - DNA, 25 bp, Homo sapien
ggcccatctggaactcggtccaata

SEQ ID NO: 1927072 - DNA, 25 bp, Homo sapien
gcaataaatactggcccatctggaa

SEQ ID NO: 1927073 - DNA, 25 bp, Homo sapien
tagcaataaatactggcccatctgg

SEQ ID NO: 1927074 - DNA, 25 bp, Homo sapien
cataatgacagcttagtcgcccttt

SEQ ID NO: 1927075 - DNA, 25 bp, Homo sapien
tagaataaaccgctttagaatatga

SEQ ID NO: 1927076 - DNA, 25 bp, Homo sapien
tttgagtcataatgacagcttagtc

SEQ ID NO: 1927077 - DNA, 25 bp, Homo sapien
aaaagaatagtacctcactcatggt

SEQ ID NO: 1927078 - DNA, 25 bp, Homo sapien
tgagactctgtctcaaaaaaaagaa

SEQ ID NO: 1927079 - DNA, 25 bp, Homo sapien
tggcatgaacctgggcggcgcagtt

SEQ ID NO: 1927080 - DNA, 25 bp, Homo sapien
ctactcgggaggctgaggcaggaga

SEQ ID NO: 1927081 - DNA, 25 bp, Homo sapien
tggtggtggccacctgtagttccag

SEQ ID NO: 1927082 - DNA, 25 bp, Homo sapien
tcataatgacagcttagttgccctt

SEQ ID NO: 1927083 - DNA, 25 bp, Homo sapien
ctaaaaagaatagtacctcacccat

SEQ ID NO: 1927084 - DNA, 25 bp, Homo sapien
agacaattctcaaatgccaagcttg

SEQ ID NO: 1927085 - DNA, 25 bp, Homo sapien
tggtccaatacactaaaaaggaata

SEQ ID NO: 1927086 - DNA, 25 bp, Homo sapien
ttactgaagctagtaagtttccgtg

SEQ ID NO: 1927087 - DNA, 25 bp, Homo sapien
gctagtaagtttccgtgactcagaa

SEQ ID NO: 1927088 - DNA, 25 bp, Homo sapien
gttaagtttctgtcactcacaatca

SEQ ID NO: 1927089 - DNA, 25 bp, Homo sapien
tgagttaagtttctgtcactcacaa

SEQ ID NO: 1927090 - DNA, 25 bp, Homo sapien
ccaaagagaattgtaactcctcctg

SEQ ID NO: 1927091 - DNA, 25 bp, Homo sapien
aaagagaattgtaactcctcctgag

SEQ ID NO: 1927092 - DNA, 25 bp, Homo sapien
caaagagaattgtaactcctcctga

SEQ ID NO: 1927093 - DNA, 25 bp, Homo sapien
caaacataaattttgctccaatatg

SEQ ID NO: 1927094 - DNA, 25 bp, Homo sapien
tcctgctacaaacataaattttgct

SEQ ID NO: 1927095 - DNA, 25 bp, Homo sapien
gctacaaacataaattttgctccaa

SEQ ID NO: 1927096 - DNA, 25 bp, Homo sapien
cataaattttgctccaatatgtaca

SEQ ID NO: 1927097 - DNA, 25 bp, Homo sapien
gatgccagcaactcgaacaaagcaa

SEQ ID NO: 1927098 - DNA, 25 bp, Homo sapien
caaggatgccagcaactcgaacaaa

SEQ ID NO: 1927099 - DNA, 25 bp, Homo sapien
aggatgccagcaactcgaacaaagc

SEQ ID NO: 1927100 - DNA, 25 bp, Homo sapien
gccagcaactcgaacaaagcaaaac

SEQ ID NO: 1927101 - DNA, 25 bp, Homo sapien
aagatcataccgataattgtattgc

SEQ ID NO: 1927102 - DNA, 25 bp, Homo sapien
ataattgtattgctggctcccttct

SEQ ID NO: 1927103 - DNA, 25 bp, Homo sapien
aattgtattgctggctcccttcttt

SEQ ID NO: 1927104 - DNA, 25 bp, Homo sapien
atccaaagatcataccgataattgt

SEQ ID NO: 1927105 - DNA, 25 bp, Homo sapien
gacagtttggagaagacagttttcc

SEQ ID NO: 1927106 - DNA, 25 bp, Homo sapien
ctgacagtttggagaagacagtttt

SEQ ID NO: 1927107 - DNA, 25 bp, Homo sapien
cagtttggagaagacagttttccat

SEQ ID NO: 1927108 - DNA, 25 bp, Homo sapien
tgacagtttggagaagacagttttc

SEQ ID NO: 1927109 - DNA, 25 bp, Homo sapien
tagcacatcatggaacctaagttca

SEQ ID NO: 1927110 - DNA, 25 bp, Homo sapien
tgccgatatcagtacaaaaacctgt

SEQ ID NO: 1927111 - DNA, 25 bp, Homo sapien
taagttcaccgaagctgccgatatc

SEQ ID NO: 1927112 - DNA, 25 bp, Homo sapien
aacggtccaagtatagaatagcaca

SEQ ID NO: 1927113 - DNA, 25 bp, Homo sapien
ctcctggtgcgcgtggtccctccag

SEQ ID NO: 1927114 - DNA, 25 bp, Homo sapien
tcctggtgcgcgtggtccctccagg

SEQ ID NO: 1927115 - DNA, 25 bp, Homo sapien
cctggtgcgcgtggtccctccaggt

SEQ ID NO: 1927116 - DNA, 25 bp, Homo sapien
ggagccactggcactctggcgggcg

SEQ ID NO: 1927117 - DNA, 25 bp, Homo sapien
gcttcaagccacgtccttggactcg

SEQ ID NO: 1927118 - DNA, 25 bp, Homo sapien
tggactcgacctccaaggagccact

SEQ ID NO: 1927119 - DNA, 25 bp, Homo sapien
gcggccgctgctcagctggaacctg

SEQ ID NO: 1927120 - DNA, 25 bp, Homo sapien
tgccttaaagaacacgcggacacac

SEQ ID NO: 1927121 - DNA, 25 bp, Homo sapien
ctggaagagtgaaagcatgtaggct

SEQ ID NO: 1927122 - DNA, 25 bp, Homo sapien
cgaaggaacaaagtgcgctgcctgg

SEQ ID NO: 1927123 - DNA, 25 bp, Homo sapien
tgtaggctctcgtttcatgaagaca

SEQ ID NO: 1927124 - DNA, 25 bp, Homo sapien
tgcaggtgtaaacattacgtgcacc

SEQ ID NO: 1927125 - DNA, 25 bp, Homo sapien
tacgtgcacctgatactgtcggcca

SEQ ID NO: 1927126 - DNA, 25 bp, Homo sapien
acaactggctccctctactgaactg

SEQ ID NO: 1927127 - DNA, 25 bp, Homo sapien
ggaaactgccatgtcacccttctga

SEQ ID NO: 1927128 - DNA, 25 bp, Homo sapien
gtggttggttgcagttgtgtagtag

SEQ ID NO: 1927129 - DNA, 25 bp, Homo sapien
ggttggttgcagttgtgtagtagtt

SEQ ID NO: 1927130 - DNA, 25 bp, Homo sapien
cccgtaaagtggttggttgcagttg

SEQ ID NO: 1927131 - DNA, 25 bp, Homo sapien
taaagtggttggttgcagttgtgta

SEQ ID NO: 1927132 - DNA, 25 bp, Homo sapien
gccaaggatgtcattgaagagtatt

SEQ ID NO: 1927133 - DNA, 25 bp, Homo sapien
gtctcaggccaaggatgtcattgaa

SEQ ID NO: 1927134 - DNA, 25 bp, Homo sapien
cattgaagagtatttcaaatgcaag

SEQ ID NO: 1927135 - DNA, 25 bp, Homo sapien
ggactatggcaaggagtctcaggcc

SEQ ID NO: 1927136 - DNA, 25 bp, Homo sapien
tactgaggactagcccttaatggag

SEQ ID NO: 1927137 - DNA, 25 bp, Homo sapien
taatcacaagtactcctgagagcca

SEQ ID NO: 1927138 - DNA, 25 bp, Homo sapien
gaaacatctgctaggcttactgagg

SEQ ID NO: 1927139 - DNA, 25 bp, Homo sapien
catagacagcttataaaccgtagga

SEQ ID NO: 1927140 - DNA, 25 bp, Homo sapien
gctcatcacactcatgaccagaaag

SEQ ID NO: 1927141 - DNA, 25 bp, Homo sapien
tctagagaaggacttggatgagccc

SEQ ID NO: 1927142 - DNA, 25 bp, Homo sapien
ggctgaaattatggccaccaggaac

SEQ ID NO: 1927143 - DNA, 25 bp, Homo sapien
gtaactcagtgttagtctctctgct

SEQ ID NO: 1927144 - DNA, 25 bp, Homo sapien
aaaaaccctcaacgtcaggccagat

SEQ ID NO: 1927145 - DNA, 25 bp, Homo sapien
ttgagcaattgattgaggtcaaggc

SEQ ID NO: 1927146 - DNA, 25 bp, Homo sapien
ttgagctgaagggttggagaccagc

SEQ ID NO: 1927147 - DNA, 25 bp, Homo sapien
aagcattgcttgagcaattgattga

SEQ ID NO: 1927148 - DNA, 25 bp, Homo sapien
agttaggtggcatattcctcctgga

SEQ ID NO: 1927149 - DNA, 25 bp, Homo sapien
agcacataagccttccagttaggtg

SEQ ID NO: 1927150 - DNA, 25 bp, Homo sapien
taagccttccagttaggtggcatat

SEQ ID NO: 1927151 - DNA, 25 bp, Homo sapien
ttccagttaggtggcatattcctcc

SEQ ID NO: 1927152 - DNA, 25 bp, Homo sapien
tgcagctgtgtcgttccacagattt

SEQ ID NO: 1927153 - DNA, 25 bp, Homo sapien
ttcctttagcttgttgtggagcaat

SEQ ID NO: 1927154 - DNA, 25 bp, Homo sapien
ctctttaactgcctcaggttttcct

SEQ ID NO: 1927155 - DNA, 25 bp, Homo sapien
gcttgttgtggagcaatatcctttt

SEQ ID NO: 1927156 - DNA, 25 bp, Homo sapien
aagggatacaggttctcatttctct

SEQ ID NO: 1927157 - DNA, 25 bp, Homo sapien
gagaaattgaccgaagcatctttgt

SEQ ID NO: 1927158 - DNA, 25 bp, Homo sapien
agaagggatacaggttctcatttct

SEQ ID NO: 1927159 - DNA, 25 bp, Homo sapien
gaaattgaccgaagcatctttgtgc

SEQ ID NO: 1927160 - DNA, 25 bp, Homo sapien
caggagaaagggctgtatacccgtt

SEQ ID NO: 1927161 - DNA, 25 bp, Homo sapien
cacaggagaaagggctgtatacccg

SEQ ID NO: 1927162 - DNA, 25 bp, Homo sapien
ccagtacacaggagaaagggctgta

SEQ ID NO: 1927163 - DNA, 25 bp, Homo sapien
gtacacaggagaaagggctgtatac

SEQ ID NO: 1927164 - DNA, 25 bp, Homo sapien
tgaggacaagagattctgaagcagc

SEQ ID NO: 1927165 - DNA, 25 bp, Homo sapien
cagggctaaaggaattatttgggag

SEQ ID NO: 1927166 - DNA, 25 bp, Homo sapien
ggtgtgtaccagacaatgaaaaact

SEQ ID NO: 1927167 - DNA, 25 bp, Homo sapien
gattggcagtggacaaatttgtgga

SEQ ID NO: 1927168 - DNA, 25 bp, Homo sapien
gtttactcctgcgacgatgtcttta

SEQ ID NO: 1927169 - DNA, 25 bp, Homo sapien
cgacgatgtctttagtctcaggcat

SEQ ID NO: 1927170 - DNA, 25 bp, Homo sapien
tgtttcgtttactcctgcgacgatg

SEQ ID NO: 1927171 - DNA, 25 bp, Homo sapien
tctctttgtttcgtttactcctgcg

SEQ ID NO: 1927172 - DNA, 25 bp, Homo sapien
taatcttgagatactcaaatgattg

SEQ ID NO: 1927173 - DNA, 25 bp, Homo sapien
gatactcaaatgattgtaaaccacc

SEQ ID NO: 1927174 - DNA, 25 bp, Homo sapien
tcctctgggtaatttgttattatgc

SEQ ID NO: 1927175 - DNA, 25 bp, Homo sapien
tgtttgaatgggttaccaagttata

SEQ ID NO: 1927176 - DNA, 25 bp, Homo sapien
tctgctcagggtgttcagcaggccg

SEQ ID NO: 1927177 - DNA, 25 bp, Homo sapien
gcaggccgggctgtacccactgaat

SEQ ID NO: 1927178 - DNA, 25 bp, Homo sapien
gatggactccaggtgtttatcgcta

SEQ ID NO: 1927179 - DNA, 25 bp, Homo sapien
taaaaaacatattcctgctcaagtc

SEQ ID NO: 1927180 - DNA, 25 bp, Homo sapien
cccaaagatggtggaggactgacaa

SEQ ID NO: 1927181 - DNA, 25 bp, Homo sapien
atggagagtatgcaccgctggagcc

SEQ ID NO: 1927182 - DNA, 25 bp, Homo sapien
caaagccggctgaaaacttagcagt

SEQ ID NO: 1927183 - DNA, 25 bp, Homo sapien
tcactgggtatgtaacactgcttcc

SEQ ID NO: 1927184 - DNA, 25 bp, Homo sapien
tctctgttctatgagcttccaccac

SEQ ID NO: 1927185 - DNA, 25 bp, Homo sapien
ttctctgttctatgagcttccacca

SEQ ID NO: 1927186 - DNA, 25 bp, Homo sapien
ttccactgttacaactcttctctgt

SEQ ID NO: 1927187 - DNA, 25 bp, Homo sapien
cttctctgttctatgagcttccacc

SEQ ID NO: 1927188 - DNA, 25 bp, Homo sapien
ctcgaatccttggattattaatcag

SEQ ID NO: 1927189 - DNA, 25 bp, Homo sapien
tgtcctcgaatccttggattattaa

SEQ ID NO: 1927190 - DNA, 25 bp, Homo sapien
taatcagtttgagagggtccagaga

SEQ ID NO: 1927191 - DNA, 25 bp, Homo sapien
gagagagcctttcctgttgcagatt

SEQ ID NO: 1927192 - DNA, 25 bp, Homo sapien
tctgaggccataggactctaccaca

SEQ ID NO: 1927193 - DNA, 25 bp, Homo sapien
tagttcaagcatgttggaagaatca

SEQ ID NO: 1927194 - DNA, 25 bp, Homo sapien
taggactctaccacaccataaactc

SEQ ID NO: 1927195 - DNA, 25 bp, Homo sapien
caaagcatctaactctgccagaaag

SEQ ID NO: 1927196 - DNA, 25 bp, Homo sapien
ctatgatggtcctttcgtgtactcc

SEQ ID NO: 1927197 - DNA, 25 bp, Homo sapien
gtaattttagcccaactatgacaca

SEQ ID NO: 1927198 - DNA, 25 bp, Homo sapien
cagctgtcagaggtgaccacgcaga

SEQ ID NO: 1927199 - DNA, 25 bp, Homo sapien
tctctgcccgctgggactgtcattg

SEQ ID NO: 1927200 - DNA, 25 bp, Homo sapien
cgtgtcttactgctggtccccagag

SEQ ID NO: 1927201 - DNA, 25 bp, Homo sapien
gaagttcagaaaacgagaggcagct

SEQ ID NO: 1927202 - DNA, 25 bp, Homo sapien
ttcactggcagccatgaataaaatg

SEQ ID NO: 1927203 - DNA, 25 bp, Homo sapien
cgttcactggcagccatgaataaaa

SEQ ID NO: 1927204 - DNA, 25 bp, Homo sapien
tcactggcagccatgaataaaatgt

SEQ ID NO: 1927205 - DNA, 25 bp, Homo sapien
cacgttcactggcagccatgaataa

SEQ ID NO: 1927206 - DNA, 25 bp, Homo sapien
gaaaaaggattgtgtgctctttgaa

SEQ ID NO: 1927207 - DNA, 25 bp, Homo sapien
tggtctgctgaacgcctgccaagtg

SEQ ID NO: 1927208 - DNA, 25 bp, Homo sapien
tttgaatcttggtctgctgaacgcc

SEQ ID NO: 1927209 - DNA, 25 bp, Homo sapien
ctgaacgcctgccaagtgaaggctg

SEQ ID NO: 1927210 - DNA, 25 bp, Homo sapien
tggctagaagaggactttgatggcc

SEQ ID NO: 1927211 - DNA, 25 bp, Homo sapien
cagtttactccgaaaatgctcagct

SEQ ID NO: 1927212 - DNA, 25 bp, Homo sapien
gacccacgggatcagtttactccga

SEQ ID NO: 1927213 - DNA, 25 bp, Homo sapien
cagcttcacaaagggtcagagtcac

SEQ ID NO: 1927214 - DNA, 25 bp, Homo sapien
gactggaagcttccttaggccctta

SEQ ID NO: 1927215 - DNA, 25 bp, Homo sapien
taaaaagagtgtggcatctctcccc

SEQ ID NO: 1927216 - DNA, 25 bp, Homo sapien
ttctcaccacgtgataggtctgcac

SEQ ID NO: 1927217 - DNA, 25 bp, Homo sapien
ggcaatgagtttacatgaggtctgg

SEQ ID NO: 1927218 - DNA, 25 bp, Homo sapien
catttgttctgcgtggtctgggcac

SEQ ID NO: 1927219 - DNA, 25 bp, Homo sapien
ttttggcagctgagagctattattg

SEQ ID NO: 1927220 - DNA, 25 bp, Homo sapien
catcccctcgttacagtcatttgtt

SEQ ID NO: 1927221 - DNA, 25 bp, Homo sapien
gagagctattattgggccccacaac

SEQ ID NO: 1927222 - DNA, 25 bp, Homo sapien
taggtgtgccaatcggtaatgatcc

SEQ ID NO: 1927223 - DNA, 25 bp, Homo sapien
cagtagttcgctctataggtgtgcc

SEQ ID NO: 1927224 - DNA, 25 bp, Homo sapien
aatgatccatggctgcataccctgc

SEQ ID NO: 1927225 - DNA, 25 bp, Homo sapien
gcagagcacgtctttgagcaaacat

SEQ ID NO: 1927226 - DNA, 25 bp, Homo sapien
acgggttggcaaacaacagggccag

SEQ ID NO: 1927227 - DNA, 25 bp, Homo sapien
tgtgtgttgtagaaacgggttggca

SEQ ID NO: 1927228 - DNA, 25 bp, Homo sapien
tttggcacctagacgaactattatt

SEQ ID NO: 1927229 - DNA, 25 bp, Homo sapien
gacgaactattattggcagcagaga

SEQ ID NO: 1927230 - DNA, 25 bp, Homo sapien
agcattcggatttgagagccctgac

SEQ ID NO: 1927231 - DNA, 25 bp, Homo sapien
agaaggcctgaatcagcattcggat

SEQ ID NO: 1927232 - DNA, 25 bp, Homo sapien
ctgccttctaaagaggagcctggct

SEQ ID NO: 1927233 - DNA, 25 bp, Homo sapien
tgccttctaaagaggagcctggctt

SEQ ID NO: 1927234 - DNA, 25 bp, Homo sapien
gatgtgttgttctgcgattaaataa

SEQ ID NO: 1927235 - DNA, 25 bp, Homo sapien
tgttagcagactgctcttttggttt

SEQ ID NO: 1927236 - DNA, 25 bp, Homo sapien
aggattccatattcctggtgttagg

SEQ ID NO: 1927237 - DNA, 25 bp, Homo sapien
caggattccatattcctggtgttag

SEQ ID NO: 1927238 - DNA, 25 bp, Homo sapien
aatggcttgtttacactgtggtaaa

SEQ ID NO: 1927239 - DNA, 25 bp, Homo sapien
ttaaatggcttgtttacactgtggt

SEQ ID NO: 1927240 - DNA, 25 bp, Homo sapien
tggcttgtttacactgtggtaaaca

SEQ ID NO: 1927241 - DNA, 25 bp, Homo sapien
tacactgtggtaaacaaattttata

SEQ ID NO: 1927242 - DNA, 25 bp, Homo sapien
tccagcgtactccagaggtgcaact

SEQ ID NO: 1927243 - DNA, 25 bp, Homo sapien
tactgtatggtagaagtgagcagcc

SEQ ID NO: 1927244 - DNA, 25 bp, Homo sapien
taaagggctataaagtggaggcatc

SEQ ID NO: 1927245 - DNA, 25 bp, Homo sapien
ccagttgtcgaaggtgagtttccaa

SEQ ID NO: 1927246 - DNA, 25 bp, Homo sapien
tctgccaattttgtggctgtcccga

SEQ ID NO: 1927247 - DNA, 25 bp, Homo sapien
ttttgtggctgtcccgatgaaagga

SEQ ID NO: 1927248 - DNA, 25 bp, Homo sapien
ctgtcccgatgaaaggagagctgac

SEQ ID NO: 1927249 - DNA, 25 bp, Homo sapien
gagctgaccaacttcccaagaaaaa

SEQ ID NO: 1927250 - DNA, 25 bp, Homo sapien
ttgtaatcaggaggcagttgaacgt

SEQ ID NO: 1927251 - DNA, 25 bp, Homo sapien
attgtaatcaggaggcagttgaacg

SEQ ID NO: 1927252 - DNA, 25 bp, Homo sapien
gaggcagttgaacgtatgccttctt

SEQ ID NO: 1927253 - DNA, 25 bp, Homo sapien
gcagttgaacgtatgccttcttctc

SEQ ID NO: 1927254 - DNA, 25 bp, Homo sapien
cgtctgtcttctccgtggcagactc

SEQ ID NO: 1927255 - DNA, 25 bp, Homo sapien
ttctcctgggaatgcttttctgagg

SEQ ID NO: 1927256 - DNA, 25 bp, Homo sapien
tcgtctgtcttctccgtggcagact

SEQ ID NO: 1927257 - DNA, 25 bp, Homo sapien
cttttctgaggatatttttgctgcc

SEQ ID NO: 1927258 - DNA, 25 bp, Homo sapien
ccagaatgtgggtgacgtgcgatct

SEQ ID NO: 1927259 - DNA, 25 bp, Homo sapien
ccgccagaatgtgggtgacgtgcga

SEQ ID NO: 1927260 - DNA, 25 bp, Homo sapien
gccagaatgtgggtgacgtgcgatc

SEQ ID NO: 1927261 - DNA, 25 bp, Homo sapien
agaatgtgggtgacgtgcgatcttt

SEQ ID NO: 1927262 - DNA, 25 bp, Homo sapien
gagatagcattcattttgtagacga

SEQ ID NO: 1927263 - DNA, 25 bp, Homo sapien
cgaatggccacactgttgtgatcat

SEQ ID NO: 1927264 - DNA, 25 bp, Homo sapien
tgaagagtctgctgagatagcattc

SEQ ID NO: 1927265 - DNA, 25 bp, Homo sapien
aatgatagtcactatataagagaat

SEQ ID NO: 1927266 - DNA, 25 bp, Homo sapien
caaatctgctgttatacctatgcac

SEQ ID NO: 1927267 - DNA, 25 bp, Homo sapien
tcttttgctaggtcaaatctgctgt

SEQ ID NO: 1927268 - DNA, 25 bp, Homo sapien
ggtcaaatctgctgttatacctatg

SEQ ID NO: 1927269 - DNA, 25 bp, Homo sapien
taccaattcatcttttgctaggtca

SEQ ID NO: 1927270 - DNA, 25 bp, Homo sapien
gaggtctggagatgacaaattcaat

SEQ ID NO: 1927271 - DNA, 25 bp, Homo sapien
gtctggagatgacaaattcaattct

SEQ ID NO: 1927272 - DNA, 25 bp, Homo sapien
tctggagatgacaaattcaattctg

SEQ ID NO: 1927273 - DNA, 25 bp, Homo sapien
ggtctggagatgacaaattcaattc

SEQ ID NO: 1927274 - DNA, 25 bp, Homo sapien
aagtgactgcatttcacccagagaa

SEQ ID NO: 1927275 - DNA, 25 bp, Homo sapien
aaagtgactgcatttcacccagaga

SEQ ID NO: 1927276 - DNA, 25 bp, Homo sapien
agtgactgcatttcacccagagaac

SEQ ID NO: 1927277 - DNA, 25 bp, Homo sapien
cccacaggtgcagtagtcaatttgc

SEQ ID NO: 1927278 - DNA, 25 bp, Homo sapien
tcccacaggtgcagtagtcaatttg

SEQ ID NO: 1927279 - DNA, 25 bp, Homo sapien
caggtgcagtagtcaatttgcacat

SEQ ID NO: 1927280 - DNA, 25 bp, Homo sapien
cacaggtgcagtagtcaatttgcac

SEQ ID NO: 1927281 - DNA, 25 bp, Homo sapien
ttaagtcattaacgacgaagcccca

SEQ ID NO: 1927282 - DNA, 25 bp, Homo sapien
aagtcattaacgacgaagccccaga

SEQ ID NO: 1927283 - DNA, 25 bp, Homo sapien
ggttgtcttcactttccagaggatc

SEQ ID NO: 1927284 - DNA, 25 bp, Homo sapien
gttgtcttcactttccagaggatct

SEQ ID NO: 1927285 - DNA, 25 bp, Homo sapien
ttgtcttcactttccagaggatctg

SEQ ID NO: 1927286 - DNA, 25 bp, Homo sapien
ccaaggataagagtcatcggtaaca

SEQ ID NO: 1927287 - DNA, 25 bp, Homo sapien
tacataagcatttagaagaacccag

SEQ ID NO: 1927288 - DNA, 25 bp, Homo sapien
tatgtgtcacaaagtgggtcagagg

SEQ ID NO: 1927289 - DNA, 25 bp, Homo sapien
tggcaaccttggctactcttcagca

SEQ ID NO: 1927290 - DNA, 25 bp, Homo sapien
cactgtgggatgagatatgtacaag

SEQ ID NO: 1927291 - DNA, 25 bp, Homo sapien
tatttgcggtgaggtcaaagaaaca

SEQ ID NO: 1927292 - DNA, 25 bp, Homo sapien
aaggcatcatttccctctaaggcaa

SEQ ID NO: 1927293 - DNA, 25 bp, Homo sapien
gcattgcctgaaatggacgcattca

SEQ ID NO: 1927294 - DNA, 25 bp, Homo sapien
acagcacagttggcagttggtagct

SEQ ID NO: 1927295 - DNA, 25 bp, Homo sapien
gacagcacagttggcagttggtagc

SEQ ID NO: 1927296 - DNA, 25 bp, Homo sapien
tgacagcacagttggcagttggtag

SEQ ID NO: 1927297 - DNA, 25 bp, Homo sapien
gctgacagcacagttggcagttggt

SEQ ID NO: 1927298 - DNA, 25 bp, Homo sapien
acctgctggttcatggttccacagt

SEQ ID NO: 1927299 - DNA, 25 bp, Homo sapien
ggttcatggttccacagtgagctac

SEQ ID NO: 1927300 - DNA, 25 bp, Homo sapien
gctggttcatggttccacagtgagc

SEQ ID NO: 1927301 - DNA, 25 bp, Homo sapien
catggttccacagtgagctaccatg

SEQ ID NO: 1927302 - DNA, 25 bp, Homo sapien
tctgttgaaggatcaatggcaactc

SEQ ID NO: 1927303 - DNA, 25 bp, Homo sapien
aagtcactgggatgttggtactcac

SEQ ID NO: 1927304 - DNA, 25 bp, Homo sapien
cattgaacacccagtattccttgaa

SEQ ID NO: 1927305 - DNA, 25 bp, Homo sapien
taaaattctgagtgcctgagaccac

SEQ ID NO: 1927306 - DNA, 25 bp, Homo sapien
tagatccaaatgtttttatatttac

SEQ ID NO: 1927307 - DNA, 25 bp, Homo sapien
ttagatccaaatgtttttatattta

SEQ ID NO: 1927308 - DNA, 25 bp, Homo sapien
cctattatcatagtatttagtcagt

SEQ ID NO: 1927309 - DNA, 25 bp, Homo sapien
catagtatttagtcagtttatagat

SEQ ID NO: 1927310 - DNA, 25 bp, Homo sapien
tagctagtaagaggcttaaatttcc

SEQ ID NO: 1927311 - DNA, 25 bp, Homo sapien
tagttggttcctttactggacttgc

SEQ ID NO: 1927312 - DNA, 25 bp, Homo sapien
gatgtttgttcaaatgtctcttctt

SEQ ID NO: 1927313 - DNA, 25 bp, Homo sapien
ctcctccttcggatgtttgttcaaa

SEQ ID NO: 1927314 - DNA, 25 bp, Homo sapien
taaaaatatcaaaggcatacttatc

SEQ ID NO: 1927315 - DNA, 25 bp, Homo sapien
aatgaaacatattccccaatgggtt

SEQ ID NO: 1927316 - DNA, 25 bp, Homo sapien
aaaggcatacttatcggtggctgag

SEQ ID NO: 1927317 - DNA, 25 bp, Homo sapien
tggtctgggctctaagaaatgaaac

SEQ ID NO: 1927318 - DNA, 25 bp, Homo sapien
gattaacttgcgaacaaagaccaag

SEQ ID NO: 1927319 - DNA, 25 bp, Homo sapien
caaagaccaagttggacaagagcct

SEQ ID NO: 1927320 - DNA, 25 bp, Homo sapien
aagctaaaatgattaacttgcgaac

SEQ ID NO: 1927321 - DNA, 25 bp, Homo sapien
agaccaagttggacaagagcctttt

SEQ ID NO: 1927322 - DNA, 25 bp, Homo sapien
ctaatctggttcaggctctccaagg

SEQ ID NO: 1927323 - DNA, 25 bp, Homo sapien
ccaaggacaggtggatctgaacctt

SEQ ID NO: 1927324 - DNA, 25 bp, Homo sapien
gacaggtggatctgaaccttttctc

SEQ ID NO: 1927325 - DNA, 25 bp, Homo sapien
tctggttcaggctctccaaggacag

SEQ ID NO: 1927326 - DNA, 25 bp, Homo sapien
gaggactagagaggacactagcaaa

SEQ ID NO: 1927327 - DNA, 25 bp, Homo sapien
gagaggacactagcaaagcacaagc

SEQ ID NO: 1927328 - DNA, 25 bp, Homo sapien
tctgcaaggctcttgccatgtgtca

SEQ ID NO: 1927329 - DNA, 25 bp, Homo sapien
cccctgaagctggactgtcgtctgc

SEQ ID NO: 1927330 - DNA, 25 bp, Homo sapien
aatgactgggttgcgtttcttatag

SEQ ID NO: 1927331 - DNA, 25 bp, Homo sapien
taaggagtaatgactgggttgcgtt

SEQ ID NO: 1927332 - DNA, 25 bp, Homo sapien
gactgggttgcgtttcttataggaa

SEQ ID NO: 1927333 - DNA, 25 bp, Homo sapien
gaaggggttctatttagcatgccca

SEQ ID NO: 1927334 - DNA, 25 bp, Homo sapien
gccaaatctgattccaatccttaaa

SEQ ID NO: 1927335 - DNA, 25 bp, Homo sapien
gtttttgtaatactgccagccatgc

SEQ ID NO: 1927336 - DNA, 25 bp, Homo sapien
ccaaatctgattccaatccttaaaa

SEQ ID NO: 1927337 - DNA, 25 bp, Homo sapien
tttttgtaatactgccagccatgca

SEQ ID NO: 1927338 - DNA, 25 bp, Homo sapien
caggctcttcccgtactgactggaa

SEQ ID NO: 1927339 - DNA, 25 bp, Homo sapien
ggctcttcccgtactgactggaaat

SEQ ID NO: 1927340 - DNA, 25 bp, Homo sapien
cgtactgactggaaatattcagctt

SEQ ID NO: 1927341 - DNA, 25 bp, Homo sapien
cccagaatcaggctcttcccgtact

SEQ ID NO: 1927342 - DNA, 25 bp, Homo sapien
actggtggcatctgacaacacaaca

SEQ ID NO: 1927343 - DNA, 25 bp, Homo sapien
tatctcttattcagggggcactggt

SEQ ID NO: 1927344 - DNA, 25 bp, Homo sapien
aacagaactcatagctactcaatcc

SEQ ID NO: 1927345 - DNA, 25 bp, Homo sapien
tggctttaaatatctcttattcagg

SEQ ID NO: 1927346 - DNA, 25 bp, Homo sapien
agtgacacctatcagtatccagctg

SEQ ID NO: 1927347 - DNA, 25 bp, Homo sapien
gctgtgttcttgatggagactgaca

SEQ ID NO: 1927348 - DNA, 25 bp, Homo sapien
ccaaaatgcttattcccaagtgaca

SEQ ID NO: 1927349 - DNA, 25 bp, Homo sapien
catgttcagtccaattgacttcaaa

SEQ ID NO: 1927350 - DNA, 25 bp, Homo sapien
cattatgcctggcaatgcctacacc

SEQ ID NO: 1927351 - DNA, 25 bp, Homo sapien
catgctccaaatccgctttgtgcca

SEQ ID NO: 1927352 - DNA, 25 bp, Homo sapien
cattcctcgttaggccagaatgtgc

SEQ ID NO: 1927353 - DNA, 25 bp, Homo sapien
ggcaatgcctacaccctccaaaata

SEQ ID NO: 1927354 - DNA, 25 bp, Homo sapien
taacatatatctccacggaaaaggg

SEQ ID NO: 1927355 - DNA, 25 bp, Homo sapien
tatttcctcccgtcagaaaaagcgc

SEQ ID NO: 1927356 - DNA, 25 bp, Homo sapien
gaaaaagcgccccagtctggtctgg

SEQ ID NO: 1927357 - DNA, 25 bp, Homo sapien
tcacgttgttgcaagtaggcgaagt

SEQ ID NO: 1927358 - DNA, 25 bp, Homo sapien
gcccgcagtggcctgcacaggggaa

SEQ ID NO: 1927359 - DNA, 25 bp, Homo sapien
aaggagtccggcagggggcccgcag

SEQ ID NO: 1927360 - DNA, 25 bp, Homo sapien
aggagtccggcagggggcccgcagt

SEQ ID NO: 1927361 - DNA, 25 bp, Homo sapien
gggggcccgcagtggcctgcacagg

SEQ ID NO: 1927362 - DNA, 25 bp, Homo sapien
cctgtccacgtgaagttgtcgctgc

SEQ ID NO: 1927363 - DNA, 25 bp, Homo sapien
aagtgcgaggctgccggcagcgcgg

SEQ ID NO: 1927364 - DNA, 25 bp, Homo sapien
gcttccgcgcaaaacttccatcctg

SEQ ID NO: 1927365 - DNA, 25 bp, Homo sapien
ccctgcgcaagtgcgaggctgccgg

SEQ ID NO: 1927366 - DNA, 25 bp, Homo sapien
cccctgtcgcagtccggagttttgg

SEQ ID NO: 1927367 - DNA, 25 bp, Homo sapien
ccccgcttgtgtacgctatttgttg

SEQ ID NO: 1927368 - DNA, 25 bp, Homo sapien
tgttttcaccagaggcacagcgcga

SEQ ID NO: 1927369 - DNA, 25 bp, Homo sapien
ggagtgacgactgcggcggctgggc

SEQ ID NO: 1927370 - DNA, 25 bp, Homo sapien
ctgcaccccgcctccacctggcaga

SEQ ID NO: 1927371 - DNA, 25 bp, Homo sapien
cagaggcgcgagcatcggggtctcc

SEQ ID NO: 1927372 - DNA, 25 bp, Homo sapien
tccacctggcagaggcgcgagcatc

SEQ ID NO: 1927373 - DNA, 25 bp, Homo sapien
gaggcgcgagcatcggggtctcccc

SEQ ID NO: 1927374 - DNA, 25 bp, Homo sapien
atttttagcgtggtgaagcgaggtt

SEQ ID NO: 1927375 - DNA, 25 bp, Homo sapien
gggaggcagtggaacttgaaatggc

SEQ ID NO: 1927376 - DNA, 25 bp, Homo sapien
gaagcgaggtttggaagtagacgtg

SEQ ID NO: 1927377 - DNA, 25 bp, Homo sapien
cttgaaatggctcggatttttagcg

SEQ ID NO: 1927378 - DNA, 25 bp, Homo sapien
ctccctttgtttgcgagattctgaa

SEQ ID NO: 1927379 - DNA, 25 bp, Homo sapien
cgaactttcgtttggtagcacttga

SEQ ID NO: 1927380 - DNA, 25 bp, Homo sapien
agctcggagcgattagggaatttgc

SEQ ID NO: 1927381 - DNA, 25 bp, Homo sapien
aatttgcggaccgagtccggtggca

SEQ ID NO: 1927382 - DNA, 25 bp, Homo sapien
catctcttccctgcttgggaggata

SEQ ID NO: 1927383 - DNA, 25 bp, Homo sapien
cagagagcgcaatttaatttttgtc

SEQ ID NO: 1927384 - DNA, 25 bp, Homo sapien
aagcagagagcgcaatttaattttt

SEQ ID NO: 1927385 - DNA, 25 bp, Homo sapien
cctgcttgggaggatagtgtttccc

SEQ ID NO: 1927386 - DNA, 25 bp, Homo sapien
ggcaccctgggatcaacgtaattgt

SEQ ID NO: 1927387 - DNA, 25 bp, Homo sapien
tggccactttgtgaaccctcgggtg

SEQ ID NO: 1927388 - DNA, 25 bp, Homo sapien
tgttggagcgaaatacacctcctgg

SEQ ID NO: 1927389 - DNA, 25 bp, Homo sapien
tgtttgtcagtttcagtgcgggctc

SEQ ID NO: 1927390 - DNA, 25 bp, Homo sapien
tccaaaataaaacgtctcacatata

SEQ ID NO: 1927391 - DNA, 25 bp, Homo sapien
ttgtataaaaaggagtgattgtata

SEQ ID NO: 1927392 - DNA, 25 bp, Homo sapien
cattgtaactaccggttggttcaca

SEQ ID NO: 1927393 - DNA, 25 bp, Homo sapien
tgtatgtactcacaattaacacttc

SEQ ID NO: 1927394 - DNA, 25 bp, Homo sapien
aaccacaagttcaagatcttgagtt

SEQ ID NO: 1927395 - DNA, 25 bp, Homo sapien
ccacaagttcaagatcttgagttaa

SEQ ID NO: 1927396 - DNA, 25 bp, Homo sapien
caagttcaagatcttgagttaataa

SEQ ID NO: 1927397 - DNA, 25 bp, Homo sapien
gttcaagatcttgagttaataacat

SEQ ID NO: 1927398 - DNA, 25 bp, Homo sapien
ggcatattctcaccacccttatcct

SEQ ID NO: 1927399 - DNA, 25 bp, Homo sapien
ttataatgccgtcagtcacttcctt

SEQ ID NO: 1927400 - DNA, 25 bp, Homo sapien
cctggcatattctcaccacccttat

SEQ ID NO: 1927401 - DNA, 25 bp, Homo sapien
ttcttataatgccgtcagtcacttc

SEQ ID NO: 1927402 - DNA, 25 bp, Homo sapien
ggtttctgcttgtatggctctccat

SEQ ID NO: 1927403 - DNA, 25 bp, Homo sapien
gacttggtttctgcttgtatggctc

SEQ ID NO: 1927404 - DNA, 25 bp, Homo sapien
aggtccaagagcatttggacccctg

SEQ ID NO: 1927405 - DNA, 25 bp, Homo sapien
catttggacccctgggagatgaact

SEQ ID NO: 1927406 - DNA, 25 bp, Homo sapien
gagcgtcacagcagcctttaagttg

SEQ ID NO: 1927407 - DNA, 25 bp, Homo sapien
tcttggcttctcacttggagcgtca

SEQ ID NO: 1927408 - DNA, 25 bp, Homo sapien
tcacttggagcgtcacagcagcctt

SEQ ID NO: 1927409 - DNA, 25 bp, Homo sapien
tggcttctcacttggagcgtcacag

SEQ ID NO: 1927410 - DNA, 25 bp, Homo sapien
cagaactactacttgggacggtggt

SEQ ID NO: 1927411 - DNA, 25 bp, Homo sapien
gagagaatggcgagaacaatggaac

SEQ ID NO: 1927412 - DNA, 25 bp, Homo sapien
gaagaggaatcgtccccagaactac

SEQ ID NO: 1927413 - DNA, 25 bp, Homo sapien
ggccttttggcagagcggtactacc

SEQ ID NO: 1927414 - DNA, 25 bp, Homo sapien
ccagagtggtcttggttacttgggc

SEQ ID NO: 1927415 - DNA, 25 bp, Homo sapien
ccaggggacagttcacaggaccaag

SEQ ID NO: 1927416 - DNA, 25 bp, Homo sapien
acaggaccaaggatcaatgggtcag

SEQ ID NO: 1927417 - DNA, 25 bp, Homo sapien
gcatcatttccaaggtgaacctgag

SEQ ID NO: 1927418 - DNA, 25 bp, Homo sapien
taaggcacccgatgctgatgctcat

SEQ ID NO: 1927419 - DNA, 25 bp, Homo sapien
tgggttaaggcacccgatgctgatg

SEQ ID NO: 1927420 - DNA, 25 bp, Homo sapien
tgtgggaggagccaaacgctgggtt

SEQ ID NO: 1927421 - DNA, 25 bp, Homo sapien
caaacgctgggttaaggcacccgat

SEQ ID NO: 1927422 - DNA, 25 bp, Homo sapien
ctttggagatttatgccgtttctgc

SEQ ID NO: 1927423 - DNA, 25 bp, Homo sapien
gagatttatgccgtttctgcttaat

SEQ ID NO: 1927424 - DNA, 25 bp, Homo sapien
gatttatgccgtttctgcttaatga

SEQ ID NO: 1927425 - DNA, 25 bp, Homo sapien
ttggagatttatgccgtttctgctt

SEQ ID NO: 1927426 - DNA, 25 bp, Homo sapien
ttgccttcaagggagaggctcaagt

SEQ ID NO: 1927427 - DNA, 25 bp, Homo sapien
gccttcaagggagaggctcaagtgt

SEQ ID NO: 1927428 - DNA, 25 bp, Homo sapien
ccttcaagggagaggctcaagtgtg

SEQ ID NO: 1927429 - DNA, 25 bp, Homo sapien
tgccttcaagggagaggctcaagtg

SEQ ID NO: 1927430 - DNA, 25 bp, Homo sapien
gcttgcaatgtattcccgtggtctc

SEQ ID NO: 1927431 - DNA, 25 bp, Homo sapien
ttttgcagaaatttagctgtctttg

SEQ ID NO: 1927432 - DNA, 25 bp, Homo sapien
gaaatttgttggtcattcgttggcc

SEQ ID NO: 1927433 - DNA, 25 bp, Homo sapien
tttgttatgccctcaccatccaatg

SEQ ID NO: 1927434 - DNA, 25 bp, Homo sapien
tgtcatagcaccttaactgctctga

SEQ ID NO: 1927435 - DNA, 25 bp, Homo sapien
cttaactgctctgaacctctttcct

SEQ ID NO: 1927436 - DNA, 25 bp, Homo sapien
catataacctgtcatagcaccttaa

SEQ ID NO: 1927437 - DNA, 25 bp, Homo sapien
ctctttcctcgtctataaccttcat

SEQ ID NO: 1927438 - DNA, 25 bp, Homo sapien
aaataatttcatgcggttcatcctg

SEQ ID NO: 1927439 - DNA, 25 bp, Homo sapien
acagaaataatttcatgcggttcat

SEQ ID NO: 1927440 - DNA, 25 bp, Homo sapien
gaaataatttcatgcggttcatcct

SEQ ID NO: 1927441 - DNA, 25 bp, Homo sapien
aatttcatgcggttcatcctgataa

SEQ ID NO: 1927442 - DNA, 25 bp, Homo sapien
ttcattgaccgaatgccttttaggg

SEQ ID NO: 1927443 - DNA, 25 bp, Homo sapien
cttcattgaccgaatgccttttagg

SEQ ID NO: 1927444 - DNA, 25 bp, Homo sapien
ccttttaggggcagcaccctttgct

SEQ ID NO: 1927445 - DNA, 25 bp, Homo sapien
gcagcaccctttgctttaaggtcca

SEQ ID NO: 1927446 - DNA, 25 bp, Homo sapien
ctgcatcctgaatcgtttcttccac

SEQ ID NO: 1927447 - DNA, 25 bp, Homo sapien
gcatcctgaatcgtttcttccacgg

SEQ ID NO: 1927448 - DNA, 25 bp, Homo sapien
tgaatcgtttcttccacggtttgaa

SEQ ID NO: 1927449 - DNA, 25 bp, Homo sapien
cctgaatcgtttcttccacggtttg

SEQ ID NO: 1927450 - DNA, 25 bp, Homo sapien
ctaggcagcatgtactccagaaagc

SEQ ID NO: 1927451 - DNA, 25 bp, Homo sapien
taggcagcatgtactccagaaagca

SEQ ID NO: 1927452 - DNA, 25 bp, Homo sapien
aagcacttctgctttcccgtagggc

SEQ ID NO: 1927453 - DNA, 25 bp, Homo sapien
tgctttcccgtagggcatcccgcag

SEQ ID NO: 1927454 - DNA, 25 bp, Homo sapien
cctagtggcttactaggacctagta

SEQ ID NO: 1927455 - DNA, 25 bp, Homo sapien
gcctagcttagcatagaagccttcc

SEQ ID NO: 1927456 - DNA, 25 bp, Homo sapien
gaagccttccttcggcctgcataga

SEQ ID NO: 1927457 - DNA, 25 bp, Homo sapien
tcctttggcctgcatagaagcctag

SEQ ID NO: 1927458 - DNA, 25 bp, Homo sapien
tcaaacagctgctcaaaactgtaca

SEQ ID NO: 1927459 - DNA, 25 bp, Homo sapien
caaacagctgctcaaaactgtacag

SEQ ID NO: 1927460 - DNA, 25 bp, Homo sapien
ttcaaacagctgctcaaaactgtac

SEQ ID NO: 1927461 - DNA, 25 bp, Homo sapien
aaacagctgctcaaaactgtacagc

SEQ ID NO: 1927462 - DNA, 25 bp, Homo sapien
ctcactgaccttcttgtaggagaag

SEQ ID NO: 1927463 - DNA, 25 bp, Homo sapien
tgttcctcacatatggaggcagtga

SEQ ID NO: 1927464 - DNA, 25 bp, Homo sapien
atgcctttcacccttctggccagag

SEQ ID NO: 1927465 - DNA, 25 bp, Homo sapien
gggttcgttctgctgtatgctgtat

SEQ ID NO: 1927466 - DNA, 25 bp, Homo sapien
cctggacacagggaccgattgttcc

SEQ ID NO: 1927467 - DNA, 25 bp, Homo sapien
tgtgtaactggcaaactggaccctc

SEQ ID NO: 1927468 - DNA, 25 bp, Homo sapien
tcctctgcagggagtgggaccttgc

SEQ ID NO: 1927469 - DNA, 25 bp, Homo sapien
gaccttgccggcttgcctggacaca

SEQ ID NO: 1927470 - DNA, 25 bp, Homo sapien
tcttatttgcagttgtttagtcagt

SEQ ID NO: 1927471 - DNA, 25 bp, Homo sapien
ttatttgcagttgtttagtcagttc

SEQ ID NO: 1927472 - DNA, 25 bp, Homo sapien
ctttcttatttgcagttgtttagtc

SEQ ID NO: 1927473 - DNA, 25 bp, Homo sapien
tgaggctttcttatttgcagttgtt

SEQ ID NO: 1927474 - DNA, 25 bp, Homo sapien
tggatacctccagcgggaacctggg

SEQ ID NO: 1927475 - DNA, 25 bp, Homo sapien
atctgcgaaattctccaggttctga

SEQ ID NO: 1927476 - DNA, 25 bp, Homo sapien
tgctgacatcggcagcgtaaatgtg

SEQ ID NO: 1927477 - DNA, 25 bp, Homo sapien
cgtaaatgtgtgttgtgtggtctga

SEQ ID NO: 1927478 - DNA, 25 bp, Homo sapien
aacctggagaatttcgcagattggg

SEQ ID NO: 1927479 - DNA, 25 bp, Homo sapien
tgtattcagaacctggagaatttcg

SEQ ID NO: 1927480 - DNA, 25 bp, Homo sapien
atttacgctgccgatgtcagcacag

SEQ ID NO: 1927481 - DNA, 25 bp, Homo sapien
tggtgaaagatttacccaacagctg

SEQ ID NO: 1927482 - DNA, 25 bp, Homo sapien
tgatttcagcaattcccttatctgt

SEQ ID NO: 1927483 - DNA, 25 bp, Homo sapien
ttcagcaattcccttatctgttttt

SEQ ID NO: 1927484 - DNA, 25 bp, Homo sapien
atttcagcaattcccttatctgttt

SEQ ID NO: 1927485 - DNA, 25 bp, Homo sapien
tcagcaattcccttatctgtttttg

SEQ ID NO: 1927486 - DNA, 25 bp, Homo sapien
ccatacacccataggtacaaaggtc

SEQ ID NO: 1927487 - DNA, 25 bp, Homo sapien
gcattctcgatgctcctctttctct

SEQ ID NO: 1927488 - DNA, 25 bp, Homo sapien
ttctcttatcccatacacccatagg

SEQ ID NO: 1927489 - DNA, 25 bp, Homo sapien
tcagaaaccgggatggcattctcga

SEQ ID NO: 1927490 - DNA, 25 bp, Homo sapien
gacagcgccgtcttcagttcctaaa

SEQ ID NO: 1927491 - DNA, 25 bp, Homo sapien
ctgacactagtagggagacagcgcc

SEQ ID NO: 1927492 - DNA, 25 bp, Homo sapien
tagtagggagacagcgccgtcttca

SEQ ID NO: 1927493 - DNA, 25 bp, Homo sapien
gcagctgacactagtagggagacag

SEQ ID NO: 1927494 - DNA, 25 bp, Homo sapien
tggggcgtctgtgtgctgtccaaac

SEQ ID NO: 1927495 - DNA, 25 bp, Homo sapien
cttttctggggtgtgctgacagatt

SEQ ID NO: 1927496 - DNA, 25 bp, Homo sapien
ttttctggggtgtgctgacagattc

SEQ ID NO: 1927497 - DNA, 25 bp, Homo sapien
tttccaaaacgcctacatttccagc

SEQ ID NO: 1927498 - DNA, 25 bp, Homo sapien
agttggtttcccagtaacatcattt

SEQ ID NO: 1927499 - DNA, 25 bp, Homo sapien
gaagaagagcagtgtgaggcttcaa

SEQ ID NO: 1927500 - DNA, 25 bp, Homo sapien
ttgactgtaggtgctgcttagaaag

SEQ ID NO: 1927501 - DNA, 25 bp, Homo sapien
cataaaaatcattctcggtattcta

SEQ ID NO: 1927502 - DNA, 25 bp, Homo sapien
aaatcattctcggtattctatattc

SEQ ID NO: 1927503 - DNA, 25 bp, Homo sapien
cgtgatgatgtgactgatttccaca

SEQ ID NO: 1927504 - DNA, 25 bp, Homo sapien
ttattcttgcattgtcgtgatgatg

SEQ ID NO: 1927505 - DNA, 25 bp, Homo sapien
gacaattttgcattgcctggccagg

SEQ ID NO: 1927506 - DNA, 25 bp, Homo sapien
aaggccttagtgagagctgggtctc

SEQ ID NO: 1927507 - DNA, 25 bp, Homo sapien
tacaaaacagtatattagaggtggt

SEQ ID NO: 1927508 - DNA, 25 bp, Homo sapien
tggagagaggcaagcaataataaag

SEQ ID NO: 1927509 - DNA, 25 bp, Homo sapien
tattcagcatagatctcatggctca

SEQ ID NO: 1927510 - DNA, 25 bp, Homo sapien
ctattcagcatagatctcatggctc

SEQ ID NO: 1927511 - DNA, 25 bp, Homo sapien
attcagcatagatctcatggctcac

SEQ ID NO: 1927512 - DNA, 25 bp, Homo sapien
cagtcttaagttcctgtctcctttt

SEQ ID NO: 1927513 - DNA, 25 bp, Homo sapien
tgctggttgtttttgctgtcctctt

SEQ ID NO: 1927514 - DNA, 25 bp, Homo sapien
ttttcaaccactaatcttccaacag

SEQ ID NO: 1927515 - DNA, 25 bp, Homo sapien
tggctgctggttgtttttgctgtcc

SEQ ID NO: 1927516 - DNA, 25 bp, Homo sapien
gtggctatttccatactcaccacag

SEQ ID NO: 1927517 - DNA, 25 bp, Homo sapien
tggtgggtttgaagtggctatttcc

SEQ ID NO: 1927518 - DNA, 25 bp, Homo sapien
tcctttggtgggtttgaagtggcta

SEQ ID NO: 1927519 - DNA, 25 bp, Homo sapien
gtgggtttgaagtggctatttccat

SEQ ID NO: 1927520 - DNA, 25 bp, Homo sapien
tcccttccattagataggatgcagt

SEQ ID NO: 1927521 - DNA, 25 bp, Homo sapien
ttccattagataggatgcagtcatg

SEQ ID NO: 1927522 - DNA, 25 bp, Homo sapien
tccattagataggatgcagtcatgt

SEQ ID NO: 1927523 - DNA, 25 bp, Homo sapien
ccttccattagataggatgcagtca

SEQ ID NO: 1927524 - DNA, 25 bp, Homo sapien
ccatagtgtttagagatgtagtgca

SEQ ID NO: 1927525 - DNA, 25 bp, Homo sapien
agctattggtttcctctgtttgaca

SEQ ID NO: 1927526 - DNA, 25 bp, Homo sapien
tgtttgacagcatacaccatagtgt

SEQ ID NO: 1927527 - DNA, 25 bp, Homo sapien
gatttaagttgccttaagctattgg

SEQ ID NO: 1927528 - DNA, 25 bp, Homo sapien
gtttctgggccactgttatattgtc

SEQ ID NO: 1927529 - DNA, 25 bp, Homo sapien
ctgggccactgttatattgtctaat

SEQ ID NO: 1927530 - DNA, 25 bp, Homo sapien
ccctctagtttctgggccactgtta

SEQ ID NO: 1927531 - DNA, 25 bp, Homo sapien
tagtttctgggccactgttatattg

SEQ ID NO: 1927532 - DNA, 25 bp, Homo sapien
gacagctctgtaattgaatcccagc

SEQ ID NO: 1927533 - DNA, 25 bp, Homo sapien
cacggcgcaaggagattggccataa

SEQ ID NO: 1927534 - DNA, 25 bp, Homo sapien
ttgagttgcactaaacacacggcgc

SEQ ID NO: 1927535 - DNA, 25 bp, Homo sapien
aaagatctccaagggtcagcctgcc

SEQ ID NO: 1927536 - DNA, 25 bp, Homo sapien
tgatatagacactgtgccgcggaga

SEQ ID NO: 1927537 - DNA, 25 bp, Homo sapien
cagatgggtcacttgcactgcaagc

SEQ ID NO: 1927538 - DNA, 25 bp, Homo sapien
tctcaagtctagagctgtaggccct

SEQ ID NO: 1927539 - DNA, 25 bp, Homo sapien
atttgctgttagtccgaggcctgag

SEQ ID NO: 1927540 - DNA, 25 bp, Homo sapien
cagctttgcaggcaataaggatata

SEQ ID NO: 1927541 - DNA, 25 bp, Homo sapien
tctaagatggttatggcttacacac

SEQ ID NO: 1927542 - DNA, 25 bp, Homo sapien
aaactactttttcaggcagctttgc

SEQ ID NO: 1927543 - DNA, 25 bp, Homo sapien
gcttacacaccatttcactcattca

SEQ ID NO: 1927544 - DNA, 25 bp, Homo sapien
cttactttgaagatacagaataata

SEQ ID NO: 1927545 - DNA, 25 bp, Homo sapien
tcaaaacatttggtgtgtaagcttg

SEQ ID NO: 1927546 - DNA, 25 bp, Homo sapien
caaaactcttcaacctaggacatta

SEQ ID NO: 1927547 - DNA, 25 bp, Homo sapien
tgcatttggttgagaaatacggtgc

SEQ ID NO: 1927548 - DNA, 25 bp, Homo sapien
cacttagtatgaatgcagcttattt

SEQ ID NO: 1927549 - DNA, 25 bp, Homo sapien
gctcacttagtatgaatgcagctta

SEQ ID NO: 1927550 - DNA, 25 bp, Homo sapien
agaggtgcttgttgatgctcactta

SEQ ID NO: 1927551 - DNA, 25 bp, Homo sapien
ggtgcttgttgatgctcacttagta

SEQ ID NO: 1927552 - DNA, 25 bp, Homo sapien
aaaacagagcccttgaacagcagtg

SEQ ID NO: 1927553 - DNA, 25 bp, Homo sapien
tactgggtcaggtaaagcctttagc

SEQ ID NO: 1927554 - DNA, 25 bp, Homo sapien
cacagccacgactggagatggagcg

SEQ ID NO: 1927555 - DNA, 25 bp, Homo sapien
gatggagcgcttgacacttttactg

SEQ ID NO: 1927556 - DNA, 25 bp, Homo sapien
tcgaaaatcgagttctgatgcttac

SEQ ID NO: 1927557 - DNA, 25 bp, Homo sapien
tgtggttcagccgatgtttgacatt

SEQ ID NO: 1927558 - DNA, 25 bp, Homo sapien
gaagcaatagggtggtggtgaaagg

SEQ ID NO: 1927559 - DNA, 25 bp, Homo sapien
cagataaacttaagttcgaaaatcg

SEQ ID NO: 1927560 - DNA, 25 bp, Homo sapien
taaggtgcccataattctacaaaca

SEQ ID NO: 1927561 - DNA, 25 bp, Homo sapien
aagcaactcttgattcataaggtgc

SEQ ID NO: 1927562 - DNA, 25 bp, Homo sapien
ttcctctatccaagattttgctatc

SEQ ID NO: 1927563 - DNA, 25 bp, Homo sapien
gaccctaaactcaacattcactaca

SEQ ID NO: 1927564 - DNA, 25 bp, Homo sapien
tgctaaggctacacccaccaaatgt

SEQ ID NO: 1927565 - DNA, 25 bp, Homo sapien
caagatggagggtgcccagcattgc

SEQ ID NO: 1927566 - DNA, 25 bp, Homo sapien
tccctcacagcagtttggcaagatg

SEQ ID NO: 1927567 - DNA, 25 bp, Homo sapien
ggatctgtgagtcctttagctggaa

SEQ ID NO: 1927568 - DNA, 25 bp, Homo sapien
gaagagtcagcatccattactgaga

SEQ ID NO: 1927569 - DNA, 25 bp, Homo sapien
gaagacggatgaatccggcagcaca

SEQ ID NO: 1927570 - DNA, 25 bp, Homo sapien
tgaaaccccttgagacacaaactgg

SEQ ID NO: 1927571 - DNA, 25 bp, Homo sapien
gcagcacagtcaagctaccggatga

SEQ ID NO: 1927572 - DNA, 25 bp, Homo sapien
tttctttacaggatccccccatggc

SEQ ID NO: 1927573 - DNA, 25 bp, Homo sapien
aaatagttgtatccaacaccagacc

SEQ ID NO: 1927574 - DNA, 25 bp, Homo sapien
agacctcctagatggtttctgtatc

SEQ ID NO: 1927575 - DNA, 25 bp, Homo sapien
gctgtaacccttggactccgcatgg

SEQ ID NO: 1927576 - DNA, 25 bp, Homo sapien
aatttgaagcagatttgcgtggctc

SEQ ID NO: 1927577 - DNA, 25 bp, Homo sapien
tttgaagcagatttgcgtggctcca

SEQ ID NO: 1927578 - DNA, 25 bp, Homo sapien
gcacatacttctgacccatcctttg

SEQ ID NO: 1927579 - DNA, 25 bp, Homo sapien
agagcacatacttctgacccatcct

SEQ ID NO: 1927580 - DNA, 25 bp, Homo sapien
gccaagttattgagttacttaaata

SEQ ID NO: 1927581 - DNA, 25 bp, Homo sapien
tttaatgctctaagttctggagtac

SEQ ID NO: 1927582 - DNA, 25 bp, Homo sapien
tcagacagaggaactaaccgaggca

SEQ ID NO: 1927583 - DNA, 25 bp, Homo sapien
tgcaccaccgtcacataaattggga

SEQ ID NO: 1927584 - DNA, 25 bp, Homo sapien
tttgtgtaaccttgtgcccagatgt

SEQ ID NO: 1927585 - DNA, 25 bp, Homo sapien
gcctcaatcattgaaggacggtggt

SEQ ID NO: 1927586 - DNA, 25 bp, Homo sapien
taaattaaattagcaagtgcgctgg

SEQ ID NO: 1927587 - DNA, 25 bp, Homo sapien
tgtattgtcactgcgcaacggatgg

SEQ ID NO: 1927588 - DNA, 25 bp, Homo sapien
agagcccatcatcgttgtgtttgca

SEQ ID NO: 1927589 - DNA, 25 bp, Homo sapien
aatgcaggttctcctcgtaacagac

SEQ ID NO: 1927590 - DNA, 25 bp, Homo sapien
gatttaattataacacccacgagag

SEQ ID NO: 1927591 - DNA, 25 bp, Homo sapien
cataagagcgggcagtaatatctgg

SEQ ID NO: 1927592 - DNA, 25 bp, Homo sapien
ggaaaatccagcctgacctctaggt

SEQ ID NO: 1927593 - DNA, 25 bp, Homo sapien
tgtatagttgaagtgacctcccaag

SEQ ID NO: 1927594 - DNA, 25 bp, Homo sapien
tatagctcaagcatggtacagtgtg

SEQ ID NO: 1927595 - DNA, 25 bp, Homo sapien
tggagcaagctagcaagagagcacc

SEQ ID NO: 1927596 - DNA, 25 bp, Homo sapien
tcacatagcgttagagggtcaggga

SEQ ID NO: 1927597 - DNA, 25 bp, Homo sapien
ggaagctgcagtcttttaccctaac

SEQ ID NO: 1927598 - DNA, 25 bp, Homo sapien
gaatccatacttattgggcccaaat

SEQ ID NO: 1927599 - DNA, 25 bp, Homo sapien
ctctagggtcccaccaggactttag

SEQ ID NO: 1927600 - DNA, 25 bp, Homo sapien
aaatgcagaatccatacttattggg

SEQ ID NO: 1927601 - DNA, 25 bp, Homo sapien
cacactttgaaccttacctctaggg

SEQ ID NO: 1927602 - DNA, 25 bp, Homo sapien
tagaggaagttggtcggatgattac

SEQ ID NO: 1927603 - DNA, 25 bp, Homo sapien
gcaattcccaagcagtagaggaagt

SEQ ID NO: 1927604 - DNA, 25 bp, Homo sapien
ttggtcggatgattacttgcaggtt

SEQ ID NO: 1927605 - DNA, 25 bp, Homo sapien
attcccaagcagtagaggaagttgg

SEQ ID NO: 1927606 - DNA, 25 bp, Homo sapien
cacggagcatgcatcatcctgagga

SEQ ID NO: 1927607 - DNA, 25 bp, Homo sapien
agctctttgtagtcaccccagcagg

SEQ ID NO: 1927608 - DNA, 25 bp, Homo sapien
cagaaagttattagccccaatgtcc

SEQ ID NO: 1927609 - DNA, 25 bp, Homo sapien
tgtgtcatatgagggccacggagca

SEQ ID NO: 1927610 - DNA, 25 bp, Homo sapien
gggaccaggatgagagaactctcct

SEQ ID NO: 1927611 - DNA, 25 bp, Homo sapien
cctgatctattggttgaggaccttc

SEQ ID NO: 1927612 - DNA, 25 bp, Homo sapien
ttaaaaaagcacagacgcctccatg

SEQ ID NO: 1927613 - DNA, 25 bp, Homo sapien
cctccatggttgaagcctggtgctt

SEQ ID NO: 1927614 - DNA, 25 bp, Homo sapien
gctatttgataagatggaaccttcc

SEQ ID NO: 1927615 - DNA, 25 bp, Homo sapien
aaagccaactgctatttgataagat

SEQ ID NO: 1927616 - DNA, 25 bp, Homo sapien
catggactacaaagccaactgctat

SEQ ID NO: 1927617 - DNA, 25 bp, Homo sapien
ccatggactacaaagccaactgcta

SEQ ID NO: 1927618 - DNA, 25 bp, Homo sapien
tgactttagcaccatcagatgatca

SEQ ID NO: 1927619 - DNA, 25 bp, Homo sapien
cctcttctttgggatgatgctaagt

SEQ ID NO: 1927620 - DNA, 25 bp, Homo sapien
cttgcttcgatgtcccagtttgtgg

SEQ ID NO: 1927621 - DNA, 25 bp, Homo sapien
gatgctaagtgcaaactacttgccc

SEQ ID NO: 1927622 - DNA, 25 bp, Homo sapien
caagggatctttgtcaggtctaaca

SEQ ID NO: 1927623 - DNA, 25 bp, Homo sapien
acacaacacaatctctctggcatgg

SEQ ID NO: 1927624 - DNA, 25 bp, Homo sapien
gtattcatgcccttgcaagggatct

SEQ ID NO: 1927625 - DNA, 25 bp, Homo sapien
agtctctgtcggacttttctctgcc

SEQ ID NO: 1927626 - DNA, 25 bp, Homo sapien
caagtgacaaattgttcacgtctat

SEQ ID NO: 1927627 - DNA, 25 bp, Homo sapien
tgactgctgaagttgttctatagca

SEQ ID NO: 1927628 - DNA, 25 bp, Homo sapien
tctatagcagttcattaaaggaccc

SEQ ID NO: 1927629 - DNA, 25 bp, Homo sapien
cagtggttgtccaattgtatatcaa

SEQ ID NO: 1927630 - DNA, 25 bp, Homo sapien
ccttttactacagcaattgttattc

SEQ ID NO: 1927631 - DNA, 25 bp, Homo sapien
tattcttgtaaaacgatctttgaaa

SEQ ID NO: 1927632 - DNA, 25 bp, Homo sapien
tccttttactacagcaattgttatt

SEQ ID NO: 1927633 - DNA, 25 bp, Homo sapien
aattgttattcttgtaaaacgatct

SEQ ID NO: 1927634 - DNA, 25 bp, Homo sapien
aaagcccccattagtgagcccactg

SEQ ID NO: 1927635 - DNA, 25 bp, Homo sapien
tcttctgttcagctgggttcagcgg

SEQ ID NO: 1927636 - DNA, 25 bp, Homo sapien
ctgtggatggacagctcagggtgtc

SEQ ID NO: 1927637 - DNA, 25 bp, Homo sapien
gacagctcagggtgtcttggctttc

SEQ ID NO: 1927638 - DNA, 25 bp, Homo sapien
catggctttgtaaatatcggtgttc

SEQ ID NO: 1927639 - DNA, 25 bp, Homo sapien
tctcagacactgttgtcctggatgt

SEQ ID NO: 1927640 - DNA, 25 bp, Homo sapien
ttgtaaatatcggtgttctcagaca

SEQ ID NO: 1927641 - DNA, 25 bp, Homo sapien
tggctttgtaaatatcggtgttctc

SEQ ID NO: 1927642 - DNA, 25 bp, Homo sapien
ttgtggttatctccctagaatcatc

SEQ ID NO: 1927643 - DNA, 25 bp, Homo sapien
ttgttgtggttatctccctagaatc

SEQ ID NO: 1927644 - DNA, 25 bp, Homo sapien
tggttatctccctagaatcatctcc

SEQ ID NO: 1927645 - DNA, 25 bp, Homo sapien
tgttgtggttatctccctagaatca

SEQ ID NO: 1927646 - DNA, 25 bp, Homo sapien
tctgggtccatctgaggatcattct

SEQ ID NO: 1927647 - DNA, 25 bp, Homo sapien
aagccacaagaccatggctgaaaga

SEQ ID NO: 1927648 - DNA, 25 bp, Homo sapien
agtgtgtccttcagtggctcctgca

SEQ ID NO: 1927649 - DNA, 25 bp, Homo sapien
catggctgaaagagatagtgtgtcc

SEQ ID NO: 1927650 - DNA, 25 bp, Homo sapien
aaatgatgtaacctggacatcaggc

SEQ ID NO: 1927651 - DNA, 25 bp, Homo sapien
gacaaggttattactgccacatgaa

SEQ ID NO: 1927652 - DNA, 25 bp, Homo sapien
tgaggaaccagtgtctgagcaaaga

SEQ ID NO: 1927653 - DNA, 25 bp, Homo sapien
tcagagcatgcgaccctgaggaacc

SEQ ID NO: 1927654 - DNA, 25 bp, Homo sapien
catgaacttcctctgcaaagatctg

SEQ ID NO: 1927655 - DNA, 25 bp, Homo sapien
atgaacttcctctgcaaagatctgc

SEQ ID NO: 1927656 - DNA, 25 bp, Homo sapien
gaacttcctctgcaaagatctgcat

SEQ ID NO: 1927657 - DNA, 25 bp, Homo sapien
tgaacttcctctgcaaagatctgca

SEQ ID NO: 1927658 - DNA, 25 bp, Homo sapien
gactgagcttgggtgtctacagttc

SEQ ID NO: 1927659 - DNA, 25 bp, Homo sapien
gtgtctacagttccccgaccagagt

SEQ ID NO: 1927660 - DNA, 25 bp, Homo sapien
acagttccccgaccagagtctggag

SEQ ID NO: 1927661 - DNA, 25 bp, Homo sapien
taaatgagtagcaaggagccttgtt

SEQ ID NO: 1927662 - DNA, 25 bp, Homo sapien
aggatggagttcagcgggcagcgga

SEQ ID NO: 1927663 - DNA, 25 bp, Homo sapien
gccccagctgcagatatgaagcgga

SEQ ID NO: 1927664 - DNA, 25 bp, Homo sapien
cgggcagcggagctgtctcagtctt

SEQ ID NO: 1927665 - DNA, 25 bp, Homo sapien
cgcccgaccgccgggaggatggagt

SEQ ID NO: 1927666 - DNA, 25 bp, Homo sapien
aacgggccaggatgacaatggcggc

SEQ ID NO: 1927667 - DNA, 25 bp, Homo sapien
ggctttgtggaatagaaaggcggga

SEQ ID NO: 1927668 - DNA, 25 bp, Homo sapien
cgggccaggatgacaatggcggctt

SEQ ID NO: 1927669 - DNA, 25 bp, Homo sapien
ggcggctttgtggaatagaaaggcg

SEQ ID NO: 1927670 - DNA, 25 bp, Homo sapien
tttctgaaactcctgcaactggaga

SEQ ID NO: 1927671 - DNA, 25 bp, Homo sapien
tgtgatttaagtgctcccgatgaaa

SEQ ID NO: 1927672 - DNA, 25 bp, Homo sapien
caggtttgtaagactaaatgctgtg

SEQ ID NO: 1927673 - DNA, 25 bp, Homo sapien
gagagatgattctgtccctgggtgt

SEQ ID NO: 1927674 - DNA, 25 bp, Homo sapien
taagaaggtatatcctctccatcaa

SEQ ID NO: 1927675 - DNA, 25 bp, Homo sapien
aatgtaagaaggtatatcctctcca

SEQ ID NO: 1927676 - DNA, 25 bp, Homo sapien
tgtaagaaggtatatcctctccatc

SEQ ID NO: 1927677 - DNA, 25 bp, Homo sapien
gtaagaaggtatatcctctccatca

SEQ ID NO: 1927678 - DNA, 25 bp, Homo sapien
gccagataactgcaatattgaatgc

SEQ ID NO: 1927679 - DNA, 25 bp, Homo sapien
ctctgtaagactccagaggtggaag

SEQ ID NO: 1927680 - DNA, 25 bp, Homo sapien
ccttgtctctgtcggcagttgtgcc

SEQ ID NO: 1927681 - DNA, 25 bp, Homo sapien
aggttgtccacactgccagataact

SEQ ID NO: 1927682 - DNA, 25 bp, Homo sapien
caacctaaggttaagctgtcagcat

SEQ ID NO: 1927683 - DNA, 25 bp, Homo sapien
tggctatgagggaaccaacctaagg

SEQ ID NO: 1927684 - DNA, 25 bp, Homo sapien
tcgaagacatacttggccgtgccag

SEQ ID NO: 1927685 - DNA, 25 bp, Homo sapien
agggcccctatctcatgcaagctgg

SEQ ID NO: 1927686 - DNA, 25 bp, Homo sapien
aacaagacattgacaggtagatggg

SEQ ID NO: 1927687 - DNA, 25 bp, Homo sapien
caaagccacataatcgcagttaaaa

SEQ ID NO: 1927688 - DNA, 25 bp, Homo sapien
aagttctggtggtagttcttgtgca

SEQ ID NO: 1927689 - DNA, 25 bp, Homo sapien
gggaccagtcaccatggcaggtgac

SEQ ID NO: 1927690 - DNA, 25 bp, Homo sapien
gagaaagttgtaagcagccagccat

SEQ ID NO: 1927691 - DNA, 25 bp, Homo sapien
gtgcacaaatggagccagaacgcat

SEQ ID NO: 1927692 - DNA, 25 bp, Homo sapien
tgtgcacaaatggagccagaacgca

SEQ ID NO: 1927693 - DNA, 25 bp, Homo sapien
tttgcacacataagcagcttgtgta

SEQ ID NO: 1927694 - DNA, 25 bp, Homo sapien
cataagcagcttgtgtacacacatg

SEQ ID NO: 1927695 - DNA, 25 bp, Homo sapien
cctggcattcttcctcctctaatca

SEQ ID NO: 1927696 - DNA, 25 bp, Homo sapien
ctggcattcttcctcctctaatcat

SEQ ID NO: 1927697 - DNA, 25 bp, Homo sapien
gaactctccctaatatctgaagcat

SEQ ID NO: 1927698 - DNA, 25 bp, Homo sapien
gaagcataacatttgccagtcaccc

SEQ ID NO: 1927699 - DNA, 25 bp, Homo sapien
tgtccctaacatgcttctccctgaa

SEQ ID NO: 1927700 - DNA, 25 bp, Homo sapien
tctggattagcatcaccatctttgt

SEQ ID NO: 1927701 - DNA, 25 bp, Homo sapien
cctcagaggggctaggtcaccttct

SEQ ID NO: 1927702 - DNA, 25 bp, Homo sapien
caagagaaattcagctgagatttca

SEQ ID NO: 1927703 - DNA, 25 bp, Homo sapien
gaccagggcaccaggctcttttttc

SEQ ID NO: 1927704 - DNA, 25 bp, Homo sapien
ttttttcacccaagagaaattcagc

SEQ ID NO: 1927705 - DNA, 25 bp, Homo sapien
tgactctgggaagaattccatgctc

SEQ ID NO: 1927706 - DNA, 25 bp, Homo sapien
cccaattgtccccaggctgtgccat

SEQ ID NO: 1927707 - DNA, 25 bp, Homo sapien
ccaggtgattcccaattgtccccag

SEQ ID NO: 1927708 - DNA, 25 bp, Homo sapien
gctgtgccatcttctgtgactctgg

SEQ ID NO: 1927709 - DNA, 25 bp, Homo sapien
ttgattggtctctttgtagcagcat

SEQ ID NO: 1927710 - DNA, 25 bp, Homo sapien
ggtctattgcacttctgtgcttcag

SEQ ID NO: 1927711 - DNA, 25 bp, Homo sapien
tctgctgagcagttgttgattggtc

SEQ ID NO: 1927712 - DNA, 25 bp, Homo sapien
ggaaggtctattgcacttctgtgct

SEQ ID NO: 1927713 - DNA, 25 bp, Homo sapien
taatataccttctcggcgcctgtga

SEQ ID NO: 1927714 - DNA, 25 bp, Homo sapien
cataatatgaactagagagggtgga

SEQ ID NO: 1927715 - DNA, 25 bp, Homo sapien
ttgcagattcacaaccaagaggtgg

SEQ ID NO: 1927716 - DNA, 25 bp, Homo sapien
caaattcctcttgcgtggtgaagac

SEQ ID NO: 1927717 - DNA, 25 bp, Homo sapien
tccaccactgcctttggatctaaca

SEQ ID NO: 1927718 - DNA, 25 bp, Homo sapien
cccaatttcctataggtgcagatgg

SEQ ID NO: 1927719 - DNA, 25 bp, Homo sapien
cccaggtgggtagggtcatgtcctt

SEQ ID NO: 1927720 - DNA, 25 bp, Homo sapien
tgcctttggatctaacacccaattt

SEQ ID NO: 1927721 - DNA, 25 bp, Homo sapien
gctgatgtcacataaatgccatgta

SEQ ID NO: 1927722 - DNA, 25 bp, Homo sapien
tctgctgatgtcacataaatgccat

SEQ ID NO: 1927723 - DNA, 25 bp, Homo sapien
ctctgctgatgtcacataaatgcca

SEQ ID NO: 1927724 - DNA, 25 bp, Homo sapien
tgctgatgtcacataaatgccatgt

SEQ ID NO: 1927725 - DNA, 25 bp, Homo sapien
gtatatataatccagtctttgtctc

SEQ ID NO: 1927726 - DNA, 25 bp, Homo sapien
tcaggtatatataatccagtctttg

SEQ ID NO: 1927727 - DNA, 25 bp, Homo sapien
cttcttcatcgaatatatcaggtat

SEQ ID NO: 1927728 - DNA, 25 bp, Homo sapien
tgaacacactacttcttcatcgaat

SEQ ID NO: 1927729 - DNA, 25 bp, Homo sapien
tacatgatcctgaccgggaacctac

SEQ ID NO: 1927730 - DNA, 25 bp, Homo sapien
gtacatgatcctgaccgggaaccta

SEQ ID NO: 1927731 - DNA, 25 bp, Homo sapien
tactggttcttcgaagccctactgg

SEQ ID NO: 1927732 - DNA, 25 bp, Homo sapien
tactggttcttcgaagacctgcttc

SEQ ID NO: 1927733 - DNA, 25 bp, Homo sapien
tcatccatttcactgattccacgtg

SEQ ID NO: 1927734 - DNA, 25 bp, Homo sapien
ttccacgtgtatggccatggatggg

SEQ ID NO: 1927735 - DNA, 25 bp, Homo sapien
tcaggtaagggatccggagcactgt

SEQ ID NO: 1927736 - DNA, 25 bp, Homo sapien
cactgtttttcctgatacacctcca

SEQ ID NO: 1927737 - DNA, 25 bp, Homo sapien
ctgtttttcctgatacacctccatc

SEQ ID NO: 1927738 - DNA, 25 bp, Homo sapien
taagggatccggagcactgtttttc

SEQ ID NO: 1927739 - DNA, 25 bp, Homo sapien
cttgcccttcttgctgcaatctcac

SEQ ID NO: 1927740 - DNA, 25 bp, Homo sapien
tggtctgcccctttcttggattgtt

SEQ ID NO: 1927741 - DNA, 25 bp, Homo sapien
aagaccgctcttgtctcctaagtag

SEQ ID NO: 1927742 - DNA, 25 bp, Homo sapien
ttggattgtttaagatcggcaagga

SEQ ID NO: 1927743 - DNA, 25 bp, Homo sapien
attgtttaagatcggcaaggaacgg

SEQ ID NO: 1927744 - DNA, 25 bp, Homo sapien
tcagttgcttgttttagacacgctc

SEQ ID NO: 1927745 - DNA, 25 bp, Homo sapien
taggtcagttgcttgttttagacac

SEQ ID NO: 1927746 - DNA, 25 bp, Homo sapien
ctttaggtcagttgcttgttttaga

SEQ ID NO: 1927747 - DNA, 25 bp, Homo sapien
gcttgttttagacacgctcttattt

SEQ ID NO: 1927748 - DNA, 25 bp, Homo sapien
tatttggcatcccatttaaaccata

SEQ ID NO: 1927749 - DNA, 25 bp, Homo sapien
atgtcctgccatttacccttaattg

SEQ ID NO: 1927750 - DNA, 25 bp, Homo sapien
tgtcatgctaacatccatctcagaa

SEQ ID NO: 1927751 - DNA, 25 bp, Homo sapien
tgtcttcaagatgtaagtgtcagca

SEQ ID NO: 1927752 - DNA, 25 bp, Homo sapien
tcctgctgtctcagattggtctcag

SEQ ID NO: 1927753 - DNA, 25 bp, Homo sapien
ttggtctcaggaaagcccagtggac

SEQ ID NO: 1927754 - DNA, 25 bp, Homo sapien
aagcccagtggaccagagccatctc

SEQ ID NO: 1927755 - DNA, 25 bp, Homo sapien
ctcctgctgtctcagattggtctca

SEQ ID NO: 1927756 - DNA, 25 bp, Homo sapien
cttcttatcaggagagagactgatc

SEQ ID NO: 1927757 - DNA, 25 bp, Homo sapien
gttgcagatgttcctcttggtgact

SEQ ID NO: 1927758 - DNA, 25 bp, Homo sapien
cagatgttcctcttggtgactcttc

SEQ ID NO: 1927759 - DNA, 25 bp, Homo sapien
caggagagagactgatctgtcttct

SEQ ID NO: 1927760 - DNA, 25 bp, Homo sapien
taaggattgctgctaaaagaatact

SEQ ID NO: 1927761 - DNA, 25 bp, Homo sapien
tactgggcactcatgcttttagaca

SEQ ID NO: 1927762 - DNA, 25 bp, Homo sapien
tagacaataatagagctcaggttcc

SEQ ID NO: 1927763 - DNA, 25 bp, Homo sapien
gttactacagagtggcaagttcaag

SEQ ID NO: 1927764 - DNA, 25 bp, Homo sapien
taacatccggattgattggccgaag

SEQ ID NO: 1927765 - DNA, 25 bp, Homo sapien
ggagctgtaagcctgcggatcaaag

SEQ ID NO: 1927766 - DNA, 25 bp, Homo sapien
tcccagaggaaatcggtaacatccg

SEQ ID NO: 1927767 - DNA, 25 bp, Homo sapien
tgagcaggcatctagagggatccca

SEQ ID NO: 1927768 - DNA, 25 bp, Homo sapien
tcagcagatagtgccagcgtgcagg

SEQ ID NO: 1927769 - DNA, 25 bp, Homo sapien
cagccaggggagctgacgatctcgc

SEQ ID NO: 1927770 - DNA, 25 bp, Homo sapien
ccagtcagcagatagtgccagcgtg

SEQ ID NO: 1927771 - DNA, 25 bp, Homo sapien
gatctcgcagaagccgcggcgagtc

SEQ ID NO: 1927772 - DNA, 25 bp, Homo sapien
atgcccagcgggagcgcatcttcac

SEQ ID NO: 1927773 - DNA, 25 bp, Homo sapien
cctccaagggagatttccgctcact

SEQ ID NO: 1927774 - DNA, 25 bp, Homo sapien
ctctcccggcttgaggggttcgtat

SEQ ID NO: 1927775 - DNA, 25 bp, Homo sapien
cttcacctgcggacgtgaggctgca

SEQ ID NO: 1927776 - DNA, 25 bp, Homo sapien
ctgggacggtcaccaaatctgagat

SEQ ID NO: 1927777 - DNA, 25 bp, Homo sapien
gataaaagtcgtttggtctggcagc

SEQ ID NO: 1927778 - DNA, 25 bp, Homo sapien
taaaagtcgtttggtctggcagcat

SEQ ID NO: 1927779 - DNA, 25 bp, Homo sapien
tgcaggtgacccagtacccccgaag

SEQ ID NO: 1927780 - DNA, 25 bp, Homo sapien
cacctggataaaagtcgtttggtct

SEQ ID NO: 1927781 - DNA, 25 bp, Homo sapien
attactcactcaatttcggagctca

SEQ ID NO: 1927782 - DNA, 25 bp, Homo sapien
ggtgtggttagaggtgttcttagta

SEQ ID NO: 1927783 - DNA, 25 bp, Homo sapien
gatcctgagcttttttcagttggta

SEQ ID NO: 1927784 - DNA, 25 bp, Homo sapien
gtgaatccattagatcctgagcttt

SEQ ID NO: 1927785 - DNA, 25 bp, Homo sapien
cagttctgtcagaaccattggtttc

SEQ ID NO: 1927786 - DNA, 25 bp, Homo sapien
tttatactggctatattgtccttca

SEQ ID NO: 1927787 - DNA, 25 bp, Homo sapien
actggctatattgtccttcagctcc

SEQ ID NO: 1927788 - DNA, 25 bp, Homo sapien
cttcagctcctatattactttatca

SEQ ID NO: 1927789 - DNA, 25 bp, Homo sapien
actatagagttacccacagcgctca

SEQ ID NO: 1927790 - DNA, 25 bp, Homo sapien
ctatagagttacccacagcgctcat

SEQ ID NO: 1927791 - DNA, 25 bp, Homo sapien
tggcaggatgcggttgatactccct

SEQ ID NO: 1927792 - DNA, 25 bp, Homo sapien
caaccagttgtgacgtcttaagaga

SEQ ID NO: 1927793 - DNA, 25 bp, Homo sapien
cagatggacagaacatgctgcttct

SEQ ID NO: 1927794 - DNA, 25 bp, Homo sapien
ggaagatctcggtaaagccttggag

SEQ ID NO: 1927795 - DNA, 25 bp, Homo sapien
tagcccaggaacatgacaacgtgac

SEQ ID NO: 1927796 - DNA, 25 bp, Homo sapien
agagcaaagtcagagcctggcacct

SEQ ID NO: 1927797 - DNA, 25 bp, Homo sapien
gcacctgcagataggataacactgg

SEQ ID NO: 1927798 - DNA, 25 bp, Homo sapien
caggtccccatggttgtccattgaa

SEQ ID NO: 1927799 - DNA, 25 bp, Homo sapien
ctggaatcacgtcccctgcaagaga

SEQ ID NO: 1927800 - DNA, 25 bp, Homo sapien
ttggtccattctcgggccagaaaaa

SEQ ID NO: 1927801 - DNA, 25 bp, Homo sapien
gagtcccttggtccattctcgggcc

SEQ ID NO: 1927802 - DNA, 25 bp, Homo sapien
gctccctggaatcacgtcccctgca

SEQ ID NO: 1927803 - DNA, 25 bp, Homo sapien
cactgtgtgcgtcgggaagtcggcc

SEQ ID NO: 1927804 - DNA, 25 bp, Homo sapien
ggctggtggcgagcgcagcaggagt

SEQ ID NO: 1927805 - DNA, 25 bp, Homo sapien
tcactccagtgcgagtggttggcct

SEQ ID NO: 1927806 - DNA, 25 bp, Homo sapien
gacgccacggctggtggcgagcgca

SEQ ID NO: 1927807 - DNA, 25 bp, Homo sapien
tggaagtaggcgagacggggaagga

SEQ ID NO: 1927808 - DNA, 25 bp, Homo sapien
aaggagttctgagcctcagtccgca

SEQ ID NO: 1927809 - DNA, 25 bp, Homo sapien
agaagagtttttggaagtaggcgag

SEQ ID NO: 1927810 - DNA, 25 bp, Homo sapien
gggaaggagttctgagcctcagtcc

SEQ ID NO: 1927811 - DNA, 25 bp, Homo sapien
agcattcttcagagtccgccgggct

SEQ ID NO: 1927812 - DNA, 25 bp, Homo sapien
gcaggttctgggttacgtccccaca

SEQ ID NO: 1927813 - DNA, 25 bp, Homo sapien
cgtttggaggaacacgcctttgatc

SEQ ID NO: 1927814 - DNA, 25 bp, Homo sapien
tgcccttggaaactcgctggttgcc

SEQ ID NO: 1927815 - DNA, 25 bp, Homo sapien
gtggagatcccattacatagtcatg

SEQ ID NO: 1927816 - DNA, 25 bp, Homo sapien
cccagtaagcggatgtgttcaccaa

SEQ ID NO: 1927817 - DNA, 25 bp, Homo sapien
caattggccataagggattgaactc

SEQ ID NO: 1927818 - DNA, 25 bp, Homo sapien
tgagcatgagatcttctgttcccat

SEQ ID NO: 1927819 - DNA, 25 bp, Homo sapien
tctgaactatcgatttcacataggt

SEQ ID NO: 1927820 - DNA, 25 bp, Homo sapien
ctgaattcagttgcaaactccacta

SEQ ID NO: 1927821 - DNA, 25 bp, Homo sapien
ttattaagttgctgactatggcccc

SEQ ID NO: 1927822 - DNA, 25 bp, Homo sapien
cactatccaaagcttacatctccat

SEQ ID NO: 1927823 - DNA, 25 bp, Homo sapien
tgaccacttttggatcaattttcaa

SEQ ID NO: 1927824 - DNA, 25 bp, Homo sapien
catgaccacttttggatcaattttc

SEQ ID NO: 1927825 - DNA, 25 bp, Homo sapien
ccacttttggatcaattttcaactt

SEQ ID NO: 1927826 - DNA, 25 bp, Homo sapien
gaccacttttggatcaattttcaac

SEQ ID NO: 1927827 - DNA, 25 bp, Homo sapien
cactatccaagatctcctatttata

SEQ ID NO: 1927828 - DNA, 25 bp, Homo sapien
tatttatagggctattggggagccc

SEQ ID NO: 1927829 - DNA, 25 bp, Homo sapien
gatctcctatttatagggctattgg

SEQ ID NO: 1927830 - DNA, 25 bp, Homo sapien
ccaagatctcctatttatagggcta

SEQ ID NO: 1927831 - DNA, 25 bp, Homo sapien
tttttgaattttgggcgttgctctc

SEQ ID NO: 1927832 - DNA, 25 bp, Homo sapien
tctttttgaattttgggcgttgctc

SEQ ID NO: 1927833 - DNA, 25 bp, Homo sapien
ctttttgaattttgggcgttgctct

SEQ ID NO: 1927834 - DNA, 25 bp, Homo sapien
aattttgggcgttgctctcctccga

SEQ ID NO: 1927835 - DNA, 25 bp, Homo sapien
acaaaaaagtctagtccgatgccca

SEQ ID NO: 1927836 - DNA, 25 bp, Homo sapien
caggattccaattcgcctagtgagg

SEQ ID NO: 1927837 - DNA, 25 bp, Homo sapien
cagaagtggcatacggtcctgcgtt

SEQ ID NO: 1927838 - DNA, 25 bp, Homo sapien
tatcgcgacatcataaattaacggg

SEQ ID NO: 1927839 - DNA, 25 bp, Homo sapien
aagcaaggaagacggagtccgagcc

SEQ ID NO: 1927840 - DNA, 25 bp, Homo sapien
acaaagcaaggaagacggagtccga

SEQ ID NO: 1927841 - DNA, 25 bp, Homo sapien
caaagcaaggaagacggagtccgag

SEQ ID NO: 1927842 - DNA, 25 bp, Homo sapien
caaggaagacggagtccgagcctcg

SEQ ID NO: 1927843 - DNA, 25 bp, Homo sapien
gcatccgacgcaaccggcagcagcg

SEQ ID NO: 1927844 - DNA, 25 bp, Homo sapien
ggccggggcgggagttccatggaga

SEQ ID NO: 1927845 - DNA, 25 bp, Homo sapien
cagcttctccttcgcatccgacgca

SEQ ID NO: 1927846 - DNA, 25 bp, Homo sapien
gggcgggagttccatggagactggg

SEQ ID NO: 1927847 - DNA, 25 bp, Homo sapien
ggctgagcggcctgagcaccgggtg

SEQ ID NO: 1927848 - DNA, 25 bp, Homo sapien
cggctgagcggcctgagcaccgggt

SEQ ID NO: 1927849 - DNA, 25 bp, Homo sapien
gagcggcctgagcaccgggtgcggg

SEQ ID NO: 1927850 - DNA, 25 bp, Homo sapien
ctgagcggcctgagcaccgggtgcg

SEQ ID NO: 1927851 - DNA, 25 bp, Homo sapien
aaacagtcgaaactatgaaaatagg

SEQ ID NO: 1927852 - DNA, 25 bp, Homo sapien
tatgctagagcattttatatgaggg

SEQ ID NO: 1927853 - DNA, 25 bp, Homo sapien
tcttgatgagttatcagtgcttcaa

SEQ ID NO: 1927854 - DNA, 25 bp, Homo sapien
catgacatagaccttaaacaggttg

SEQ ID NO: 1927855 - DNA, 25 bp, Homo sapien
tactgtgatttgagagtgctgccac

SEQ ID NO: 1927856 - DNA, 25 bp, Homo sapien
cagtctctctgaagtagagggtgat

SEQ ID NO: 1927857 - DNA, 25 bp, Homo sapien
gagaggcttgagttgtactgtgatt

SEQ ID NO: 1927858 - DNA, 25 bp, Homo sapien
cactttgcggtttcctggctttgcg

SEQ ID NO: 1927859 - DNA, 25 bp, Homo sapien
tgatgcccaagcctatactaagagt

SEQ ID NO: 1927860 - DNA, 25 bp, Homo sapien
gaatatgggcaccaaagaacctgta

SEQ ID NO: 1927861 - DNA, 25 bp, Homo sapien
ttctggaaagactcaacacctgtag

SEQ ID NO: 1927862 - DNA, 25 bp, Homo sapien
tcatgtccccataagcagagctgtc

SEQ ID NO: 1927863 - DNA, 25 bp, Homo sapien
ctgtcatttaggtttaggagtttag

SEQ ID NO: 1927864 - DNA, 25 bp, Homo sapien
ccaggagccctgatgtggtaataca

SEQ ID NO: 1927865 - DNA, 25 bp, Homo sapien
tcaagctgtagttgtgccctgtcat

SEQ ID NO: 1927866 - DNA, 25 bp, Homo sapien
taggagtttagtgtaaccaacagtg

SEQ ID NO: 1927867 - DNA, 25 bp, Homo sapien
gaaaacctagcttaggcactgcact

SEQ ID NO: 1927868 - DNA, 25 bp, Homo sapien
gaaataaagctgagtggagagtcca

SEQ ID NO: 1927869 - DNA, 25 bp, Homo sapien
gaaaaattgcaacatcctaatctcc

SEQ ID NO: 1927870 - DNA, 25 bp, Homo sapien
gagtccaattagcttctcaggagaa

SEQ ID NO: 1927871 - DNA, 25 bp, Homo sapien
ttcgctaaccttaacaaagatggga

SEQ ID NO: 1927872 - DNA, 25 bp, Homo sapien
tatagccaaggtacagatccagatg

SEQ ID NO: 1927873 - DNA, 25 bp, Homo sapien
gatccaggccttttagtcagtctcc

SEQ ID NO: 1927874 - DNA, 25 bp, Homo sapien
cagtgtccatgggtaattcgctaac

SEQ ID NO: 1927875 - DNA, 25 bp, Homo sapien
cagttcatcgttgtgtgggtgaaac

SEQ ID NO: 1927876 - DNA, 25 bp, Homo sapien
gaacagttcatcgttgtgtgggtga

SEQ ID NO: 1927877 - DNA, 25 bp, Homo sapien
aagagaacagttcatcgttgtgtgg

SEQ ID NO: 1927878 - DNA, 25 bp, Homo sapien
tcatcgttgtgtgggtgaaacccac

SEQ ID NO: 1927879 - DNA, 25 bp, Homo sapien
tggtacaggtggccatcatagaaaa

SEQ ID NO: 1927880 - DNA, 25 bp, Homo sapien
ggtacaggtggccatcatagaaaag

SEQ ID NO: 1927881 - DNA, 25 bp, Homo sapien
ctggtacaggtggccatcatagaaa

SEQ ID NO: 1927882 - DNA, 25 bp, Homo sapien
gtacaggtggccatcatagaaaaga

SEQ ID NO: 1927883 - DNA, 25 bp, Homo sapien
accgtaacctgaggtagtgatattc

SEQ ID NO: 1927884 - DNA, 25 bp, Homo sapien
tcatcaattatagcctgtgtaccgt

SEQ ID NO: 1927885 - DNA, 25 bp, Homo sapien
cctgtgtaccgtaacctgaggtagt

SEQ ID NO: 1927886 - DNA, 25 bp, Homo sapien
catcatcatcaattatagcctgtgt

SEQ ID NO: 1927887 - DNA, 25 bp, Homo sapien
caacctaattgcttagagatttgga

SEQ ID NO: 1927888 - DNA, 25 bp, Homo sapien
tatacattgtcatgaaagccttaca

SEQ ID NO: 1927889 - DNA, 25 bp, Homo sapien
gatttggataaataacctaatggcc

SEQ ID NO: 1927890 - DNA, 25 bp, Homo sapien
tgtgaagaattggacactgtggatt

SEQ ID NO: 1927891 - DNA, 25 bp, Homo sapien
cataataaagctgcgactggcctcc

SEQ ID NO: 1927892 - DNA, 25 bp, Homo sapien
tacatacatagcttaaggcggaggt

SEQ ID NO: 1927893 - DNA, 25 bp, Homo sapien
ccacgttcagaaggtgttgaggcca

SEQ ID NO: 1927894 - DNA, 25 bp, Homo sapien
tggtccaaagacaccctcctaagtg

SEQ ID NO: 1927895 - DNA, 25 bp, Homo sapien
tgaggctgttttggcactaattctt

SEQ ID NO: 1927896 - DNA, 25 bp, Homo sapien
gcttgttacactccaagagctgctc

SEQ ID NO: 1927897 - DNA, 25 bp, Homo sapien
gaaagctgcctggattggcccctac

SEQ ID NO: 1927898 - DNA, 25 bp, Homo sapien
taccacacagcttgttacactccaa

SEQ ID NO: 1927899 - DNA, 25 bp, Homo sapien
tgaaagagaaagaggcactaatgaa

SEQ ID NO: 1927900 - DNA, 25 bp, Homo sapien
gaaagaggcactaatgaaaatgtca

SEQ ID NO: 1927901 - DNA, 25 bp, Homo sapien
agagaaagaggcactaatgaaaatg

SEQ ID NO: 1927902 - DNA, 25 bp, Homo sapien
gaaagagaaagaggcactaatgaaa

SEQ ID NO: 1927903 - DNA, 25 bp, Homo sapien
ctactcagggcttcgaggatgagta

SEQ ID NO: 1927904 - DNA, 25 bp, Homo sapien
cagggcttcgaggatgagtacttga

SEQ ID NO: 1927905 - DNA, 25 bp, Homo sapien
tgtagagctgaatcttcaaagttag

SEQ ID NO: 1927906 - DNA, 25 bp, Homo sapien
cttcgaggatgagtacttgagttgg

SEQ ID NO: 1927907 - DNA, 25 bp, Homo sapien
tgctagactcatgattgtatatata

SEQ ID NO: 1927908 - DNA, 25 bp, Homo sapien
gctagactcatgattgtatatataa

SEQ ID NO: 1927909 - DNA, 25 bp, Homo sapien
tagactcatgattgtatatataaag

SEQ ID NO: 1927910 - DNA, 25 bp, Homo sapien
gactcatgattgtatatataaagca

SEQ ID NO: 1927911 - DNA, 25 bp, Homo sapien
agtaggtctgggaaatgatcatcaa

SEQ ID NO: 1927912 - DNA, 25 bp, Homo sapien
cacacttcaggatagccaaatagct

SEQ ID NO: 1927913 - DNA, 25 bp, Homo sapien
cgactcattggtcagttttcgtgga

SEQ ID NO: 1927914 - DNA, 25 bp, Homo sapien
caatgacaaacagcgagacaaccag

SEQ ID NO: 1927915 - DNA, 25 bp, Homo sapien
cagttacagtcaaaaatgtcagcga

SEQ ID NO: 1927916 - DNA, 25 bp, Homo sapien
tgatgccccagttcatgctagaagt

SEQ ID NO: 1927917 - DNA, 25 bp, Homo sapien
tcccaccaggaaagatctcgctgag

SEQ ID NO: 1927918 - DNA, 25 bp, Homo sapien
gcgagatgaggagattgatgcccca

SEQ ID NO: 1927919 - DNA, 25 bp, Homo sapien
gacagtaaagggacgtgctgcctcc

SEQ ID NO: 1927920 - DNA, 25 bp, Homo sapien
tgggcatgaggaagccggctactct

SEQ ID NO: 1927921 - DNA, 25 bp, Homo sapien
catgaggtgctggtatctgtcacag

SEQ ID NO: 1927922 - DNA, 25 bp, Homo sapien
acagaaacattaggagagctgggcc

SEQ ID NO: 1927923 - DNA, 25 bp, Homo sapien
ctctctgactgcaaaggagtaattc

SEQ ID NO: 1927924 - DNA, 25 bp, Homo sapien
gtgaatttgagagggactgtgccca

SEQ ID NO: 1927925 - DNA, 25 bp, Homo sapien
atgtgaatttgagagggactgtgcc

SEQ ID NO: 1927926 - DNA, 25 bp, Homo sapien
aggagtaattcaaatgtgaatttga

SEQ ID NO: 1927927 - DNA, 25 bp, Homo sapien
gacgtattatgtgagcagttgccca

SEQ ID NO: 1927928 - DNA, 25 bp, Homo sapien
gctgctgcatcatctaactccgagg

SEQ ID NO: 1927929 - DNA, 25 bp, Homo sapien
tagttctattagatactgctgctgc

SEQ ID NO: 1927930 - DNA, 25 bp, Homo sapien
gatagtattaaagccttagcctgac

SEQ ID NO: 1927931 - DNA, 25 bp, Homo sapien
taagattacatgagtacccctcctg

SEQ ID NO: 1927932 - DNA, 25 bp, Homo sapien
attaaccaggcctggtggtagtgca

SEQ ID NO: 1927933 - DNA, 25 bp, Homo sapien
gaaacactttcctggcagaagaaaa

SEQ ID NO: 1927934 - DNA, 25 bp, Homo sapien
taaggaatgttgttctaagccaatc

SEQ ID NO: 1927935 - DNA, 25 bp, Homo sapien
gaaggacaagagatgctagcagaag

SEQ ID NO: 1927936 - DNA, 25 bp, Homo sapien
cacctgaagtttatcaaatgagcaa

SEQ ID NO: 1927937 - DNA, 25 bp, Homo sapien
ggtacaagactgcacctatatctcg

SEQ ID NO: 1927938 - DNA, 25 bp, Homo sapien
tggaacagtaactaccacctgaagt

SEQ ID NO: 1927939 - DNA, 25 bp, Homo sapien
ggaccatgacccaatcttgccacag

SEQ ID NO: 1927940 - DNA, 25 bp, Homo sapien
ccaagcagtcttatagcgggaaata

SEQ ID NO: 1927941 - DNA, 25 bp, Homo sapien
caggtttaaggttcaggagcaggtc

SEQ ID NO: 1927942 - DNA, 25 bp, Homo sapien
taatgtttactctatctgcccaagc

SEQ ID NO: 1927943 - DNA, 25 bp, Homo sapien
aatcagatttcacctaacccttctc

SEQ ID NO: 1927944 - DNA, 25 bp, Homo sapien
agcaaagagcagcgtcaatcagatt

SEQ ID NO: 1927945 - DNA, 25 bp, Homo sapien
caaagagcagcgtcaatcagatttc

SEQ ID NO: 1927946 - DNA, 25 bp, Homo sapien
aagagcagcgtcaatcagatttcac

SEQ ID NO: 1927947 - DNA, 25 bp, Homo sapien
cagggtctgtgactatctggtattc

SEQ ID NO: 1927948 - DNA, 25 bp, Homo sapien
gcaacataaacaagcaagctggcta

SEQ ID NO: 1927949 - DNA, 25 bp, Homo sapien
ttagcaaggatgctgaggtcgtctc

SEQ ID NO: 1927950 - DNA, 25 bp, Homo sapien
aaagctgggacgtccccagggtctg

SEQ ID NO: 1927951 - DNA, 25 bp, Homo sapien
tctgtgttgaggagcaatctctgcg

SEQ ID NO: 1927952 - DNA, 25 bp, Homo sapien
tagtcctatcattattcgggtccgc

SEQ ID NO: 1927953 - DNA, 25 bp, Homo sapien
gctgccgacatggtctacaagaaga

SEQ ID NO: 1927954 - DNA, 25 bp, Homo sapien
ccctttgaagtggtctctgagagta

SEQ ID NO: 1927955 - DNA, 25 bp, Homo sapien
caatgacgagggagctcacaaccat

SEQ ID NO: 1927956 - DNA, 25 bp, Homo sapien
ccaagttcataacccaccaggaggc

SEQ ID NO: 1927957 - DNA, 25 bp, Homo sapien
caatgcgtcccactataagaaccgt

SEQ ID NO: 1927958 - DNA, 25 bp, Homo sapien
taagcttccgagtccaagcaggcag

SEQ ID NO: 1927959 - DNA, 25 bp, Homo sapien
tataacctcccagagggcatgtccc

SEQ ID NO: 1927960 - DNA, 25 bp, Homo sapien
gcatgtcccagggagagttctggtg

SEQ ID NO: 1927961 - DNA, 25 bp, Homo sapien
tggtgtggtgtttccagcccaccaa

SEQ ID NO: 1927962 - DNA, 25 bp, Homo sapien
cttggcattggaccctgcatggcca

SEQ ID NO: 1927963 - DNA, 25 bp, Homo sapien
taactcattgacaaatattcgggct

SEQ ID NO: 1927964 - DNA, 25 bp, Homo sapien
tgaaaaccgacatctccgaaaggat

SEQ ID NO: 1927965 - DNA, 25 bp, Homo sapien
taaacccgcagctgtctttcctaga

SEQ ID NO: 1927966 - DNA, 25 bp, Homo sapien
tgagccatggacatttgaaaaccga

SEQ ID NO: 1927967 - DNA, 25 bp, Homo sapien
atcatgttgataatggacaggtggc

SEQ ID NO: 1927968 - DNA, 25 bp, Homo sapien
tgaatggccacctgaacactaaggg

SEQ ID NO: 1927969 - DNA, 25 bp, Homo sapien
gttaagctcaccgttatcatgttga

SEQ ID NO: 1927970 - DNA, 25 bp, Homo sapien
tgaacactaagggttaagctcaccg

SEQ ID NO: 1927971 - DNA, 25 bp, Homo sapien
tctgctgagcagaagcgtgtatttc

SEQ ID NO: 1927972 - DNA, 25 bp, Homo sapien
tcagctgagttcgtgagtcccgttc

SEQ ID NO: 1927973 - DNA, 25 bp, Homo sapien
taaaagcgttttgagaacaactgcc

SEQ ID NO: 1927974 - DNA, 25 bp, Homo sapien
tgctgacaacctgcactcatacagt

SEQ ID NO: 1927975 - DNA, 25 bp, Homo sapien
ctccactcatccagcgcgcccacat

SEQ ID NO: 1927976 - DNA, 25 bp, Homo sapien
cctcggtgttttcaacaggtaccat

SEQ ID NO: 1927977 - DNA, 25 bp, Homo sapien
ctgccctccgtctccacggctgtcc

SEQ ID NO: 1927978 - DNA, 25 bp, Homo sapien
ccgctcccaggagtggtcactttcc

SEQ ID NO: 1927979 - DNA, 25 bp, Homo sapien
tccccataatagcatgctaaagaag

SEQ ID NO: 1927980 - DNA, 25 bp, Homo sapien
agctaatgtgatttgtgaccaactt

SEQ ID NO: 1927981 - DNA, 25 bp, Homo sapien
ggtcacgtagaagttacagccgctt

SEQ ID NO: 1927982 - DNA, 25 bp, Homo sapien
aaatctgcgttaagtccttcgtggg

SEQ ID NO: 1927983 - DNA, 25 bp, Homo sapien
gtaggccacgaacctgaattttctc

SEQ ID NO: 1927984 - DNA, 25 bp, Homo sapien
gttgctcagctcacagtaggccacg

SEQ ID NO: 1927985 - DNA, 25 bp, Homo sapien
caatggacagaagagggagcctgca

SEQ ID NO: 1927986 - DNA, 25 bp, Homo sapien
gcagtcagagtctagcctctcccca

SEQ ID NO: 1927987 - DNA, 25 bp, Homo sapien
agtcagagtctagcctctccccaaa

SEQ ID NO: 1927988 - DNA, 25 bp, Homo sapien
agagtctagcctctccccaaacttc

SEQ ID NO: 1927989 - DNA, 25 bp, Homo sapien
cagcagtcagagtctagcctctccc

SEQ ID NO: 1927990 - DNA, 25 bp, Homo sapien
gcacatagtagacaccgtcgtcttg

SEQ ID NO: 1927991 - DNA, 25 bp, Homo sapien
gtggcaattgccatgatcttcctga

SEQ ID NO: 1927992 - DNA, 25 bp, Homo sapien
cgtcgtcttgctggcaccaaataag

SEQ ID NO: 1927993 - DNA, 25 bp, Homo sapien
aaataagaaggccatcccctctgga

SEQ ID NO: 1927994 - DNA, 25 bp, Homo sapien
agaagggccccacagactgcagctt

SEQ ID NO: 1927995 - DNA, 25 bp, Homo sapien
agactgcagcttttcacccctcttt

SEQ ID NO: 1927996 - DNA, 25 bp, Homo sapien
gggccccacagactgcagcttttca

SEQ ID NO: 1927997 - DNA, 25 bp, Homo sapien
gactgcagcttttcacccctctttt

SEQ ID NO: 1927998 - DNA, 25 bp, Homo sapien
catggctctcctttccaacaaagca

SEQ ID NO: 1927999 - DNA, 25 bp, Homo sapien
gcagggcaaggaagctattactcac

SEQ ID NO: 1928000 - DNA, 25 bp, Homo sapien
ttactcacttccatgaatacaggag

SEQ ID NO: 1928001 - DNA, 25 bp, Homo sapien
ctttccaacaaagcaggtgaaggag

SEQ ID NO: 1928002 - DNA, 25 bp, Homo sapien
tagatgggaatttaccacagcaaca

SEQ ID NO: 1928003 - DNA, 25 bp, Homo sapien
ctagacatggatgggttaacttcag

SEQ ID NO: 1928004 - DNA, 25 bp, Homo sapien
ttcagtagtccatgtcttgcttgct

SEQ ID NO: 1928005 - DNA, 25 bp, Homo sapien
tgtgatagatgggaatttaccacag

SEQ ID NO: 1928006 - DNA, 25 bp, Homo sapien
ctgatgaaccggcagctagactggg

SEQ ID NO: 1928007 - DNA, 25 bp, Homo sapien
tccttgaaaaagtggcctggaatcc

SEQ ID NO: 1928008 - DNA, 25 bp, Homo sapien
caagtgaagcaactgcaccgtggag

SEQ ID NO: 1928009 - DNA, 25 bp, Homo sapien
gaccaggagcccagtttagtaggaa

SEQ ID NO: 1928010 - DNA, 25 bp, Homo sapien
gcatggagccaaagctaaaaggcta

SEQ ID NO: 1928011 - DNA, 25 bp, Homo sapien
gattgtaactggatccatctggaag

SEQ ID NO: 1928012 - DNA, 25 bp, Homo sapien
taagctgatgccatgtatgagggca

SEQ ID NO: 1928013 - DNA, 25 bp, Homo sapien
gagattgccatgaaccacatgggca

SEQ ID NO: 1928014 - DNA, 25 bp, Homo sapien
aaccctgagtccatgcaccattgct

SEQ ID NO: 1928015 - DNA, 25 bp, Homo sapien
gaaaccctgagtccatgcaccattg

SEQ ID NO: 1928016 - DNA, 25 bp, Homo sapien
tgagtccatgcaccattgctcccat

SEQ ID NO: 1928017 - DNA, 25 bp, Homo sapien
atgcctgccacttgtcaaccctcct

SEQ ID NO: 1928018 - DNA, 25 bp, Homo sapien
ttttctgtaggatcatgccctttcc

SEQ ID NO: 1928019 - DNA, 25 bp, Homo sapien
atcatgccctttccggtgtaaattt

SEQ ID NO: 1928020 - DNA, 25 bp, Homo sapien
ctttccggtgtaaatttgcctatct

SEQ ID NO: 1928021 - DNA, 25 bp, Homo sapien
tttttctgtaggatcatgccctttc

SEQ ID NO: 1928022 - DNA, 25 bp, Homo sapien
atgaaccgcttgaaagttgtggcct

SEQ ID NO: 1928023 - DNA, 25 bp, Homo sapien
ctccatgaaccgcttgaaagttgtg

SEQ ID NO: 1928024 - DNA, 25 bp, Homo sapien
ccatgaaccgcttgaaagttgtggc

SEQ ID NO: 1928025 - DNA, 25 bp, Homo sapien
catgaaccgcttgaaagttgtggcc

SEQ ID NO: 1928026 - DNA, 25 bp, Homo sapien
gggtcaatttgagtgcccctcctca

SEQ ID NO: 1928027 - DNA, 25 bp, Homo sapien
caatgatagatgttgaagaatggaa

SEQ ID NO: 1928028 - DNA, 25 bp, Homo sapien
cccctgtctcatggaggctatcttg

SEQ ID NO: 1928029 - DNA, 25 bp, Homo sapien
taactgcaagtaggaagctagaggc

SEQ ID NO: 1928030 - DNA, 25 bp, Homo sapien
tgaacaacccgtgactctacatctc

SEQ ID NO: 1928031 - DNA, 25 bp, Homo sapien
ctgaacaacccgtgactctacatct

SEQ ID NO: 1928032 - DNA, 25 bp, Homo sapien
caacctggtgcaggaactaggaaag

SEQ ID NO: 1928033 - DNA, 25 bp, Homo sapien
ttcctgtactacaaagggagctgtc

SEQ ID NO: 1928034 - DNA, 25 bp, Homo sapien
tcctgtactacaaagggagctgtcc

SEQ ID NO: 1928035 - DNA, 25 bp, Homo sapien
ggagctgtccaacctggtgcaggaa

SEQ ID NO: 1928036 - DNA, 25 bp, Homo sapien
cagaaagcaaagtccccaccaacaa

SEQ ID NO: 1928037 - DNA, 25 bp, Homo sapien
gcagcagcgtgaagtgggctgttac

SEQ ID NO: 1928038 - DNA, 25 bp, Homo sapien
ccccaaagcagaaacccagaaagca

SEQ ID NO: 1928039 - DNA, 25 bp, Homo sapien
aacagtggaggagccgagaaggagc

SEQ ID NO: 1928040 - DNA, 25 bp, Homo sapien
tgcttcctttcggttgcccagggtc

SEQ ID NO: 1928041 - DNA, 25 bp, Homo sapien
gttttccgggtcgtggcagcatcct

SEQ ID NO: 1928042 - DNA, 25 bp, Homo sapien
gcccagggtcttaggtgttagcacg

SEQ ID NO: 1928043 - DNA, 25 bp, Homo sapien
tgagcaaaactgtccggtcccagaa

SEQ ID NO: 1928044 - DNA, 25 bp, Homo sapien
gaggcagaggcggtcactaaccaca

SEQ ID NO: 1928045 - DNA, 25 bp, Homo sapien
agaggcggtcactaaccacaggagc

SEQ ID NO: 1928046 - DNA, 25 bp, Homo sapien
ggcggtcactaaccacaggagcagt

SEQ ID NO: 1928047 - DNA, 25 bp, Homo sapien
ctaaccacaggagcagtggaagtgg

SEQ ID NO: 1928048 - DNA, 25 bp, Homo sapien
acactggctgccacagggacgtctc

SEQ ID NO: 1928049 - DNA, 25 bp, Homo sapien
tggggaaggaagcagctgacactgg

SEQ ID NO: 1928050 - DNA, 25 bp, Homo sapien
gacactggctgccacagggacgtct

SEQ ID NO: 1928051 - DNA, 25 bp, Homo sapien
gaagcagctgacactggctgccaca

SEQ ID NO: 1928052 - DNA, 25 bp, Homo sapien
catcctgagacagggcctgagccat

SEQ ID NO: 1928053 - DNA, 25 bp, Homo sapien
ccatggtcccatcctgagacagggc

SEQ ID NO: 1928054 - DNA, 25 bp, Homo sapien
ccatcctgagacagggcctgagcca

SEQ ID NO: 1928055 - DNA, 25 bp, Homo sapien
tggtcccatcctgagacagggcctg

SEQ ID NO: 1928056 - DNA, 25 bp, Homo sapien
aacttgagggacaatggccagtcgc

SEQ ID NO: 1928057 - DNA, 25 bp, Homo sapien
gtctggaaacgataatgctgtgtcc

SEQ ID NO: 1928058 - DNA, 25 bp, Homo sapien
cagggggtctggaaacgataatgct

SEQ ID NO: 1928059 - DNA, 25 bp, Homo sapien
gctgtgtccaggatctggtagccct

SEQ ID NO: 1928060 - DNA, 25 bp, Homo sapien
aatattggttatctccagccagaag

SEQ ID NO: 1928061 - DNA, 25 bp, Homo sapien
gaaacatctgtgttactggaagcct

SEQ ID NO: 1928062 - DNA, 25 bp, Homo sapien
ggaagccttcatgcttgtacttgca

SEQ ID NO: 1928063 - DNA, 25 bp, Homo sapien
aagcctgagaagtgattcccttaaa

SEQ ID NO: 1928064 - DNA, 25 bp, Homo sapien
atatttccttgtgaacagtctgtac

SEQ ID NO: 1928065 - DNA, 25 bp, Homo sapien
ccttgtgaacagtctgtacttggca

SEQ ID NO: 1928066 - DNA, 25 bp, Homo sapien
gtctactgctcccacgaagtgcttg

SEQ ID NO: 1928067 - DNA, 25 bp, Homo sapien
tgctcccacgaagtgcttgtctact

SEQ ID NO: 1928068 - DNA, 25 bp, Homo sapien
tctcattgacgtgggaacgtggaaa

SEQ ID NO: 1928069 - DNA, 25 bp, Homo sapien
gtctcattgacgtgggaacgtggaa

SEQ ID NO: 1928070 - DNA, 25 bp, Homo sapien
taagtctcattgacgtgggaacgtg

SEQ ID NO: 1928071 - DNA, 25 bp, Homo sapien
aagtctcattgacgtgggaacgtgg

SEQ ID NO: 1928072 - DNA, 25 bp, Homo sapien
ggttcacacagcatatccacaaggg

SEQ ID NO: 1928073 - DNA, 25 bp, Homo sapien
tggcggctccaccaaaaggctaact

SEQ ID NO: 1928074 - DNA, 25 bp, Homo sapien
gtttcagagatagcaccacgttgga

SEQ ID NO: 1928075 - DNA, 25 bp, Homo sapien
tgaaaaacaccaacggctctgactg

SEQ ID NO: 1928076 - DNA, 25 bp, Homo sapien
gcctcggcagcttccttgacgctgg

SEQ ID NO: 1928077 - DNA, 25 bp, Homo sapien
tcaaagtgccgtaggtcgttgggcc

SEQ ID NO: 1928078 - DNA, 25 bp, Homo sapien
cgctggctgtgacgaggacgctgtc

SEQ ID NO: 1928079 - DNA, 25 bp, Homo sapien
gaaaagcctaggaaagcctcggcag

SEQ ID NO: 1928080 - DNA, 25 bp, Homo sapien
gccttttggtgcttcgaattgataa

SEQ ID NO: 1928081 - DNA, 25 bp, Homo sapien
gaagggaaaaacactcttgtcaaga

SEQ ID NO: 1928082 - DNA, 25 bp, Homo sapien
caggacagggaaatcttgaccaggc

SEQ ID NO: 1928083 - DNA, 25 bp, Homo sapien
aattatgggagccttgttgggacac

SEQ ID NO: 1928084 - DNA, 25 bp, Homo sapien
atgagatcatcccagttaattaagg

SEQ ID NO: 1928085 - DNA, 25 bp, Homo sapien
gaagaagacatgactcttaatctcc

SEQ ID NO: 1928086 - DNA, 25 bp, Homo sapien
tcttcttattaatgagatcatccca

SEQ ID NO: 1928087 - DNA, 25 bp, Homo sapien
catcccagttaattaaggagaagaa

SEQ ID NO: 1928088 - DNA, 25 bp, Homo sapien
gacaggtgcattcaataagggcagg

SEQ ID NO: 1928089 - DNA, 25 bp, Homo sapien
tgttgataagaaacccaagattaat

SEQ ID NO: 1928090 - DNA, 25 bp, Homo sapien
ctgttgataagaaacccaagattaa

SEQ ID NO: 1928091 - DNA, 25 bp, Homo sapien
ccaggaggacaggaaaacatcactc

SEQ ID NO: 1928092 - DNA, 25 bp, Homo sapien
tcccggccggcccaggaggacagga

SEQ ID NO: 1928093 - DNA, 25 bp, Homo sapien
gcccaggaggacaggaaaacatcac

SEQ ID NO: 1928094 - DNA, 25 bp, Homo sapien
aggaggacaggaaaacatcactcac

SEQ ID NO: 1928095 - DNA, 25 bp, Homo sapien
ctgtgtttcggctataaaaaggcgg

SEQ ID NO: 1928096 - DNA, 25 bp, Homo sapien
tgttgtcgtacatttcagctgtgtt

SEQ ID NO: 1928097 - DNA, 25 bp, Homo sapien
ccaggaggtgtcttgcggaatttgt

SEQ ID NO: 1928098 - DNA, 25 bp, Homo sapien
ttggccccgagccgctttgtcctgt

SEQ ID NO: 1928099 - DNA, 25 bp, Homo sapien
taggctcgatttgagaaactctccc

SEQ ID NO: 1928100 - DNA, 25 bp, Homo sapien
tatggcacacattaccagtagagaa

SEQ ID NO: 1928101 - DNA, 25 bp, Homo sapien
gtgtctactttgcaacccgtgtgtg

SEQ ID NO: 1928102 - DNA, 25 bp, Homo sapien
taagggcaagacaccatggccaagc

SEQ ID NO: 1928103 - DNA, 25 bp, Homo sapien
atacagcatctcatacaagacagct

SEQ ID NO: 1928104 - DNA, 25 bp, Homo sapien
ggccatacagcatctcatacaagac

SEQ ID NO: 1928105 - DNA, 25 bp, Homo sapien
aggccatacagcatctcatacaaga

SEQ ID NO: 1928106 - DNA, 25 bp, Homo sapien
ccatacagcatctcatacaagacag

SEQ ID NO: 1928107 - DNA, 25 bp, Homo sapien
tatgaagcacctcaggtgcgagata

SEQ ID NO: 1928108 - DNA, 25 bp, Homo sapien
ttatgaagcacctcaggtgcgagat

SEQ ID NO: 1928109 - DNA, 25 bp, Homo sapien
cttatgaagcacctcaggtgcgaga

SEQ ID NO: 1928110 - DNA, 25 bp, Homo sapien
aacagaccagggaaacagcgtttag

SEQ ID NO: 1928111 - DNA, 25 bp, Homo sapien
aactgctggactttttgagggtgac

SEQ ID NO: 1928112 - DNA, 25 bp, Homo sapien
gactggctacctatgtgtactgaca

SEQ ID NO: 1928113 - DNA, 25 bp, Homo sapien
tagaacctgcgaaagcaagcaatcc

SEQ ID NO: 1928114 - DNA, 25 bp, Homo sapien
gatgttgtgctgttgtgttcaatgt

SEQ ID NO: 1928115 - DNA, 25 bp, Homo sapien
gtggatgttgtgctgttgtgttcaa

SEQ ID NO: 1928116 - DNA, 25 bp, Homo sapien
ggatgttgtgctgttgtgttcaatg

SEQ ID NO: 1928117 - DNA, 25 bp, Homo sapien
tgttgtgctgttgtgttcaatgttc

SEQ ID NO: 1928118 - DNA, 25 bp, Homo sapien
caatgtgtccctgtgaatctagcaa

SEQ ID NO: 1928119 - DNA, 25 bp, Homo sapien
aggacaatgtgtccctgtgaatcta

SEQ ID NO: 1928120 - DNA, 25 bp, Homo sapien
agtaaggacaatgtgtccctgtgaa

SEQ ID NO: 1928121 - DNA, 25 bp, Homo sapien
tgtccctgtgaatctagcaaaatat

SEQ ID NO: 1928122 - DNA, 25 bp, Homo sapien
cagtgctacgtctcctttataccaa

SEQ ID NO: 1928123 - DNA, 25 bp, Homo sapien
taagtcaagccagctcacgtgctag

SEQ ID NO: 1928124 - DNA, 25 bp, Homo sapien
taaggccctatgaaacagccagtgc

SEQ ID NO: 1928125 - DNA, 25 bp, Homo sapien
ccaaaactggtagcctgaagagctc

SEQ ID NO: 1928126 - DNA, 25 bp, Homo sapien
cagcagcatagaaacgagcccgtgg

SEQ ID NO: 1928127 - DNA, 25 bp, Homo sapien
gcatagaaacgagcccgtggttcca

SEQ ID NO: 1928128 - DNA, 25 bp, Homo sapien
cgatgttcagtgaatgcaggtagcc

SEQ ID NO: 1928129 - DNA, 25 bp, Homo sapien
ggtagcccaaggcactggctatttc

SEQ ID NO: 1928130 - DNA, 25 bp, Homo sapien
gaagtggccccaagtaatctattaa

SEQ ID NO: 1928131 - DNA, 25 bp, Homo sapien
gaacaaagtcattctgggttgcaaa

SEQ ID NO: 1928132 - DNA, 25 bp, Homo sapien
gcagagacactaagagttgacttct

SEQ ID NO: 1928133 - DNA, 25 bp, Homo sapien
gctaattctggtaacattctcccca

SEQ ID NO: 1928134 - DNA, 25 bp, Homo sapien
tacaatttgtcagcagtctggaaag

SEQ ID NO: 1928135 - DNA, 25 bp, Homo sapien
gaacattccgctccgacataatatg

SEQ ID NO: 1928136 - DNA, 25 bp, Homo sapien
tctccaccattaatgtagtctagga

SEQ ID NO: 1928137 - DNA, 25 bp, Homo sapien
gaaagagaagtgaaggcccaccagg

SEQ ID NO: 1928138 - DNA, 25 bp, Homo sapien
ggcatgtttcaacttggcaccaaca

SEQ ID NO: 1928139 - DNA, 25 bp, Homo sapien
aaggagtgtctaccgccaatgccag

SEQ ID NO: 1928140 - DNA, 25 bp, Homo sapien
aaatgacgattcagatttagtggca

SEQ ID NO: 1928141 - DNA, 25 bp, Homo sapien
tcaagattattcaaggagtgtctac

SEQ ID NO: 1928142 - DNA, 25 bp, Homo sapien
ctgccttgtgtcttgctagaagaac

SEQ ID NO: 1928143 - DNA, 25 bp, Homo sapien
gtaaaactttgactgcatagaacac

SEQ ID NO: 1928144 - DNA, 25 bp, Homo sapien
gactgcatagaacacttcttctgcc

SEQ ID NO: 1928145 - DNA, 25 bp, Homo sapien
tcttctgccttgtgtcttgctagaa

SEQ ID NO: 1928146 - DNA, 25 bp, Homo sapien
catccagggagaatacaaaagagga

SEQ ID NO: 1928147 - DNA, 25 bp, Homo sapien
tcatccagggagaatacaaaagagg

SEQ ID NO: 1928148 - DNA, 25 bp, Homo sapien
cagggagaatacaaaagaggacatg

SEQ ID NO: 1928149 - DNA, 25 bp, Homo sapien
tccagggagaatacaaaagaggaca

SEQ ID NO: 1928150 - DNA, 25 bp, Homo sapien
gccctttccgatcactttcaagaag

SEQ ID NO: 1928151 - DNA, 25 bp, Homo sapien
gcatgaggattggacgacgggccaa

SEQ ID NO: 1928152 - DNA, 25 bp, Homo sapien
tcagatggtttagcatgaggattgg

SEQ ID NO: 1928153 - DNA, 25 bp, Homo sapien
ccaaggttgatttgctgagaaggac

SEQ ID NO: 1928154 - DNA, 25 bp, Homo sapien
ggaatactaactgactcccttacag

SEQ ID NO: 1928155 - DNA, 25 bp, Homo sapien
cacacagtcatgttgtttcagacag

SEQ ID NO: 1928156 - DNA, 25 bp, Homo sapien
tacagttctccacagatgcacggca

SEQ ID NO: 1928157 - DNA, 25 bp, Homo sapien
aaatgagtatggaaactgcacacag

SEQ ID NO: 1928158 - DNA, 25 bp, Homo sapien
gggttggcattcataagctcaggct

SEQ ID NO: 1928159 - DNA, 25 bp, Homo sapien
gttggcattcataagctcaggctcc

SEQ ID NO: 1928160 - DNA, 25 bp, Homo sapien
aagggttggcattcataagctcagg

SEQ ID NO: 1928161 - DNA, 25 bp, Homo sapien
ttggcattcataagctcaggctcct

SEQ ID NO: 1928162 - DNA, 25 bp, Homo sapien
gggcacaccaacatcaaaagtgagt

SEQ ID NO: 1928163 - DNA, 25 bp, Homo sapien
tttagaatccagctcgccactaggg

SEQ ID NO: 1928164 - DNA, 25 bp, Homo sapien
ggctctaccgacttctacccggata

SEQ ID NO: 1928165 - DNA, 25 bp, Homo sapien
gaaaggccgtgaattcggccaacac

SEQ ID NO: 1928166 - DNA, 25 bp, Homo sapien
cagaagaagtcttcgccttcccgat

SEQ ID NO: 1928167 - DNA, 25 bp, Homo sapien
tgatgagaatgtttaccgctggcaa

SEQ ID NO: 1928168 - DNA, 25 bp, Homo sapien
tacatctccagttcaagccaaatca

SEQ ID NO: 1928169 - DNA, 25 bp, Homo sapien
gccttcccgataaacgccgtgatga

SEQ ID NO: 1928170 - DNA, 25 bp, Homo sapien
ggcaatcttctgaataaagtcgttc

SEQ ID NO: 1928171 - DNA, 25 bp, Homo sapien
gtttgcatgcataggagttattggc

SEQ ID NO: 1928172 - DNA, 25 bp, Homo sapien
cataggagttattggcaatcttctg

SEQ ID NO: 1928173 - DNA, 25 bp, Homo sapien
gaataaagtcgttcagacccatcct

SEQ ID NO: 1928174 - DNA, 25 bp, Homo sapien
atgaaggaggagaaataaagaaacg

SEQ ID NO: 1928175 - DNA, 25 bp, Homo sapien
gtggatgaaggaggagaaataaaga

SEQ ID NO: 1928176 - DNA, 25 bp, Homo sapien
tggatgaaggaggagaaataaagaa

SEQ ID NO: 1928177 - DNA, 25 bp, Homo sapien
gatgaaggaggagaaataaagaaac

SEQ ID NO: 1928178 - DNA, 25 bp, Homo sapien
tcaaaaaatttccactttgcgtctc

SEQ ID NO: 1928179 - DNA, 25 bp, Homo sapien
tcctggagcagaagtcccgcaagat

SEQ ID NO: 1928180 - DNA, 25 bp, Homo sapien
aagtcccgcaagattcctgcactca

SEQ ID NO: 1928181 - DNA, 25 bp, Homo sapien
cactaatctgatccgggactttcaa

SEQ ID NO: 1928182 - DNA, 25 bp, Homo sapien
tagcagcctcagttttcaccgtcat

SEQ ID NO: 1928183 - DNA, 25 bp, Homo sapien
agtgagggtgcccttagcagcctca

SEQ ID NO: 1928184 - DNA, 25 bp, Homo sapien
cgatgagaattgccaccatgcccct

SEQ ID NO: 1928185 - DNA, 25 bp, Homo sapien
gagggtgcccttagcagcctcagtt

SEQ ID NO: 1928186 - DNA, 25 bp, Homo sapien
acgttagcgctcaaagaccggctcg

SEQ ID NO: 1928187 - DNA, 25 bp, Homo sapien
ctcaaagaccggctcggcgtatgct

SEQ ID NO: 1928188 - DNA, 25 bp, Homo sapien
cagaaagacgttagcgctcaaagac

SEQ ID NO: 1928189 - DNA, 25 bp, Homo sapien
gagacagaaagacgttagcgctcaa

SEQ ID NO: 1928190 - DNA, 25 bp, Homo sapien
ctgcgcctcggccctctttttgtgg

SEQ ID NO: 1928191 - DNA, 25 bp, Homo sapien
gggctctggccagcgcgccctgcat

SEQ ID NO: 1928192 - DNA, 25 bp, Homo sapien
agcagggactcgagccgggctctgg

SEQ ID NO: 1928193 - DNA, 25 bp, Homo sapien
cagtccgctcagcaggaaggactcg

SEQ ID NO: 1928194 - DNA, 25 bp, Homo sapien
ccgccgtgactcaggccgggcaaga

SEQ ID NO: 1928195 - DNA, 25 bp, Homo sapien
aacaaatggcccttgtgcacggtcg

SEQ ID NO: 1928196 - DNA, 25 bp, Homo sapien
ggcgagcactgacgtttccttgaag

SEQ ID NO: 1928197 - DNA, 25 bp, Homo sapien
gggcaagatttcctgccccgagtcc

SEQ ID NO: 1928198 - DNA, 25 bp, Homo sapien
tggaataagcctccctgctacatgc

SEQ ID NO: 1928199 - DNA, 25 bp, Homo sapien
atgacatgagagcacgagccagaga

SEQ ID NO: 1928200 - DNA, 25 bp, Homo sapien
gctacatgcctctgataagctggaa

SEQ ID NO: 1928201 - DNA, 25 bp, Homo sapien
taagctggaactctgagatgacatg

SEQ ID NO: 1928202 - DNA, 25 bp, Homo sapien
tcttccaaccggatacgtgatgggt

SEQ ID NO: 1928203 - DNA, 25 bp, Homo sapien
ccagcaacctactaagacttccgaa

SEQ ID NO: 1928204 - DNA, 25 bp, Homo sapien
gaatcaagttgttgagactggcttt

SEQ ID NO: 1928205 - DNA, 25 bp, Homo sapien
taagacttccgaacaggaaggtgac

SEQ ID NO: 1928206 - DNA, 25 bp, Homo sapien
tctcaggctgaaaacttacccatct

SEQ ID NO: 1928207 - DNA, 25 bp, Homo sapien
gaggaatgagaatctacatagcaag

SEQ ID NO: 1928208 - DNA, 25 bp, Homo sapien
cagatctttctcaggctgaaaactt

SEQ ID NO: 1928209 - DNA, 25 bp, Homo sapien
gagaatctacatagcaagaaacaaa

SEQ ID NO: 1928210 - DNA, 25 bp, Homo sapien
gactgggtaaaagcatgtggcttta

SEQ ID NO: 1928211 - DNA, 25 bp, Homo sapien
tatgctgtgcactgctcaccttagc

SEQ ID NO: 1928212 - DNA, 25 bp, Homo sapien
agttactgtctacacgaaagttggg

SEQ ID NO: 1928213 - DNA, 25 bp, Homo sapien
tataaaggacagttcatagtcagca

SEQ ID NO: 1928214 - DNA, 25 bp, Homo sapien
attataagcttcatggttcagcaga

SEQ ID NO: 1928215 - DNA, 25 bp, Homo sapien
taaatgactaggcaactaaggttcg

SEQ ID NO: 1928216 - DNA, 25 bp, Homo sapien
tagttagtaaatcccatgaaagtgt

SEQ ID NO: 1928217 - DNA, 25 bp, Homo sapien
tttctccaggtaaaaagagctaaca

SEQ ID NO: 1928218 - DNA, 25 bp, Homo sapien
tcacacttataaacgacaaagggat

SEQ ID NO: 1928219 - DNA, 25 bp, Homo sapien
atcacacttataaacgacaaaggga

SEQ ID NO: 1928220 - DNA, 25 bp, Homo sapien
gtgtagagctttactacagaatgta

SEQ ID NO: 1928221 - DNA, 25 bp, Homo sapien
tgtgtagagctttactacagaatgt

SEQ ID NO: 1928222 - DNA, 25 bp, Homo sapien
tcatcattagtccagaaggttcttg

SEQ ID NO: 1928223 - DNA, 25 bp, Homo sapien
aaggttcttggatcgggcttggtca

SEQ ID NO: 1928224 - DNA, 25 bp, Homo sapien
gcttggtcaggatgttggcatgatt

SEQ ID NO: 1928225 - DNA, 25 bp, Homo sapien
tggcatgattacatggctctctcac

SEQ ID NO: 1928226 - DNA, 25 bp, Homo sapien
tggttttctcaggaccgtgctgggt

SEQ ID NO: 1928227 - DNA, 25 bp, Homo sapien
gcatgtctgtgctctaattagggtg

SEQ ID NO: 1928228 - DNA, 25 bp, Homo sapien
ggattccaaggctgaaactagtaca

SEQ ID NO: 1928229 - DNA, 25 bp, Homo sapien
ttaggcttatagttctagagaaagg

SEQ ID NO: 1928230 - DNA, 25 bp, Homo sapien
ttctcaagaaccaaagcatccgcgg

SEQ ID NO: 1928231 - DNA, 25 bp, Homo sapien
cgttgaagctgctcctgatgaagtc

SEQ ID NO: 1928232 - DNA, 25 bp, Homo sapien
cgcggcaaattacccggagagctca

SEQ ID NO: 1928233 - DNA, 25 bp, Homo sapien
tatcagataaagtcttggccgggta

SEQ ID NO: 1928234 - DNA, 25 bp, Homo sapien
tgagaatatcacatttagggagatg

SEQ ID NO: 1928235 - DNA, 25 bp, Homo sapien
catctagaagtattgtcataggtta

SEQ ID NO: 1928236 - DNA, 25 bp, Homo sapien
cagttgtccagaagttttgcagaga

SEQ ID NO: 1928237 - DNA, 25 bp, Homo sapien
accgttgaatgtttaatcactattg

SEQ ID NO: 1928238 - DNA, 25 bp, Homo sapien
tgcacccggtcagaacttgttttct

SEQ ID NO: 1928239 - DNA, 25 bp, Homo sapien
gcacccggtcagaacttgttttctg

SEQ ID NO: 1928240 - DNA, 25 bp, Homo sapien
tctgatgctggtagttgaggtgggt

SEQ ID NO: 1928241 - DNA, 25 bp, Homo sapien
tcttgttcgtcatcttgacttggtc

SEQ ID NO: 1928242 - DNA, 25 bp, Homo sapien
tgttcgtcatcttgacttggtctgt

SEQ ID NO: 1928243 - DNA, 25 bp, Homo sapien
cgcacatatattgttcttgttcgtc

SEQ ID NO: 1928244 - DNA, 25 bp, Homo sapien
aaggctttgtcgcacatatattgtt

SEQ ID NO: 1928245 - DNA, 25 bp, Homo sapien
ttcacaatcatgtcaggaggcaaag

SEQ ID NO: 1928246 - DNA, 25 bp, Homo sapien
gaaattcacaatcatgtcaggaggc

SEQ ID NO: 1928247 - DNA, 25 bp, Homo sapien
ggggaagcaagatgccttcctcaca

SEQ ID NO: 1928248 - DNA, 25 bp, Homo sapien
aaaggggaagcaagatgccttcctc

SEQ ID NO: 1928249 - DNA, 25 bp, Homo sapien
taatgagagtatgatgtgaaggagc

SEQ ID NO: 1928250 - DNA, 25 bp, Homo sapien
gcttgtaactagaaggagagacaaa

SEQ ID NO: 1928251 - DNA, 25 bp, Homo sapien
gatctcaaattaatggtgctcagaa

SEQ ID NO: 1928252 - DNA, 25 bp, Homo sapien
gcagttgtattcaaaacaagtccaa

SEQ ID NO: 1928253 - DNA, 25 bp, Homo sapien
tagctgacctggatctaaaaccatg

SEQ ID NO: 1928254 - DNA, 25 bp, Homo sapien
tcccaggaagctctagatgttgctc

SEQ ID NO: 1928255 - DNA, 25 bp, Homo sapien
gttaccaattttccaacctgcatga

SEQ ID NO: 1928256 - DNA, 25 bp, Homo sapien
gcgcccggccataacgtgcagtttt

SEQ ID NO: 1928257 - DNA, 25 bp, Homo sapien
attatactgcctgacttattcccag

SEQ ID NO: 1928258 - DNA, 25 bp, Homo sapien
catgatgggctgacaaagtattgac

SEQ ID NO: 1928259 - DNA, 25 bp, Homo sapien
ggaaacttaaagacacagctggcaa

SEQ ID NO: 1928260 - DNA, 25 bp, Homo sapien
gcctggccaagttcgtattatgatt

SEQ ID NO: 1928261 - DNA, 25 bp, Homo sapien
ccatgcttgatgcatagtagggcca

SEQ ID NO: 1928262 - DNA, 25 bp, Homo sapien
tttgtctcctcatatacaaccaatc

SEQ ID NO: 1928263 - DNA, 25 bp, Homo sapien
gtctcctcatatacaaccaatctca

SEQ ID NO: 1928264 - DNA, 25 bp, Homo sapien
agagaactccctaactctgatccag

SEQ ID NO: 1928265 - DNA, 25 bp, Homo sapien
ctcaacatagagaactccctaactc

SEQ ID NO: 1928266 - DNA, 25 bp, Homo sapien
tcaaggtcgataagaaaagcgtggt

SEQ ID NO: 1928267 - DNA, 25 bp, Homo sapien
cgtggttttcttacggaacagagct

SEQ ID NO: 1928268 - DNA, 25 bp, Homo sapien
tatcactgtctgctactcaaggtcg

SEQ ID NO: 1928269 - DNA, 25 bp, Homo sapien
catagaaatctagatgaatcccctg

SEQ ID NO: 1928270 - DNA, 25 bp, Homo sapien
gcagcaccgtggctaataacttcaa

SEQ ID NO: 1928271 - DNA, 25 bp, Homo sapien
taaaacagcacacagtgccttggct

SEQ ID NO: 1928272 - DNA, 25 bp, Homo sapien
agcatttggtcgctgactaagcacc

SEQ ID NO: 1928273 - DNA, 25 bp, Homo sapien
tcaattgaaagacggacagcggact

SEQ ID NO: 1928274 - DNA, 25 bp, Homo sapien
gtacaatggcatgatcctgggtcac

SEQ ID NO: 1928275 - DNA, 25 bp, Homo sapien
cctccaccacctcccaggttcaagc

SEQ ID NO: 1928276 - DNA, 25 bp, Homo sapien
accacctcccaggttcaagcgattc

SEQ ID NO: 1928277 - DNA, 25 bp, Homo sapien
atggcatgatcctgggtcactacaa

SEQ ID NO: 1928278 - DNA, 25 bp, Homo sapien
gatgacattacatggtcaggctgcc

SEQ ID NO: 1928279 - DNA, 25 bp, Homo sapien
tccagcttggttgatctagatacta

SEQ ID NO: 1928280 - DNA, 25 bp, Homo sapien
tcaggctgccatcttgatacgatcc

SEQ ID NO: 1928281 - DNA, 25 bp, Homo sapien
tagatactaaaggtgccgtgggaga

SEQ ID NO: 1928282 - DNA, 25 bp, Homo sapien
gaagggcagagctaaatagaagtta

SEQ ID NO: 1928283 - DNA, 25 bp, Homo sapien
agagactgtattttaggcaaaggct

SEQ ID NO: 1928284 - DNA, 25 bp, Homo sapien
aagggcagagctaaatagaagttag

SEQ ID NO: 1928285 - DNA, 25 bp, Homo sapien
gagactgtattttaggcaaaggcta

SEQ ID NO: 1928286 - DNA, 25 bp, Homo sapien
tagatccagagcgaacatgaactta

SEQ ID NO: 1928287 - DNA, 25 bp, Homo sapien
tattttttgggtatactctggcaga

SEQ ID NO: 1928288 - DNA, 25 bp, Homo sapien
taatgagctaacaaagaccacaatt

SEQ ID NO: 1928289 - DNA, 25 bp, Homo sapien
aaaataacataatgagctaacaaag

SEQ ID NO: 1928290 - DNA, 25 bp, Homo sapien
ccatgaacatgactcgttctcctga

SEQ ID NO: 1928291 - DNA, 25 bp, Homo sapien
cccagattgagtttcccatgaacat

SEQ ID NO: 1928292 - DNA, 25 bp, Homo sapien
ctcgttctcctgagggagaacccct

SEQ ID NO: 1928293 - DNA, 25 bp, Homo sapien
ttcacacccagattgagtttcccat

SEQ ID NO: 1928294 - DNA, 25 bp, Homo sapien
caaggaagactcgaagtctggctcc

SEQ ID NO: 1928295 - DNA, 25 bp, Homo sapien
gatgcttgtccacactgaccattgg

SEQ ID NO: 1928296 - DNA, 25 bp, Homo sapien
tcacccaggcatgtttgacacaagg

SEQ ID NO: 1928297 - DNA, 25 bp, Homo sapien
caccatggaggagccggtgtacttc

SEQ ID NO: 1928298 - DNA, 25 bp, Homo sapien
acttgtcttgcttgcttgtaaaatc

SEQ ID NO: 1928299 - DNA, 25 bp, Homo sapien
cacttgtcttgcttgcttgtaaaat

SEQ ID NO: 1928300 - DNA, 25 bp, Homo sapien
cttgtcttgcttgcttgtaaaatcc

SEQ ID NO: 1928301 - DNA, 25 bp, Homo sapien
cttctatgctgttgtccttgggatc

SEQ ID NO: 1928302 - DNA, 25 bp, Homo sapien
ttgggatctcccagtcctttcctct

SEQ ID NO: 1928303 - DNA, 25 bp, Homo sapien
tcctctcaccttgacctagttgcat

SEQ ID NO: 1928304 - DNA, 25 bp, Homo sapien
gctgttgtccttgggatctcccagt

SEQ ID NO: 1928305 - DNA, 25 bp, Homo sapien
tggcctcataattccttgatgacgc

SEQ ID NO: 1928306 - DNA, 25 bp, Homo sapien
gcctcataattccttgatgacgcat

SEQ ID NO: 1928307 - DNA, 25 bp, Homo sapien
cctcaaatggcctcataattccttg

SEQ ID NO: 1928308 - DNA, 25 bp, Homo sapien
caaatggcctcataattccttgatg

SEQ ID NO: 1928309 - DNA, 25 bp, Homo sapien
ggagctagagttcaggccgtagctg

SEQ ID NO: 1928310 - DNA, 25 bp, Homo sapien
tggtacacacgcagctatcgcgcca

SEQ ID NO: 1928311 - DNA, 25 bp, Homo sapien
gctcctggtacacacgcagctatcg

SEQ ID NO: 1928312 - DNA, 25 bp, Homo sapien
gactccagccggcatttctagccct

SEQ ID NO: 1928313 - DNA, 25 bp, Homo sapien
tacacacgcagctatcgcgccatgt

SEQ ID NO: 1928314 - DNA, 25 bp, Homo sapien
gctcggcatctgcgatggcagtctc

SEQ ID NO: 1928315 - DNA, 25 bp, Homo sapien
ctgctcggcatctgcgatggcagtc

SEQ ID NO: 1928316 - DNA, 25 bp, Homo sapien
cggcatctgcgatggcagtctccag

SEQ ID NO: 1928317 - DNA, 25 bp, Homo sapien
atctgcgatggcagtctccagggaa

SEQ ID NO: 1928318 - DNA, 25 bp, Homo sapien
tttgagaccctcagtctcagcctgg

SEQ ID NO: 1928319 - DNA, 25 bp, Homo sapien
gagaccctcagtctcagcctggagc

SEQ ID NO: 1928320 - DNA, 25 bp, Homo sapien
ctttgagaccctcagtctcagcctg

SEQ ID NO: 1928321 - DNA, 25 bp, Homo sapien
accctcagtctcagcctggagccag

SEQ ID NO: 1928322 - DNA, 25 bp, Homo sapien
atgttccggttcatcttggagatct

SEQ ID NO: 1928323 - DNA, 25 bp, Homo sapien
ctgatgttccggttcatcttggaga

SEQ ID NO: 1928324 - DNA, 25 bp, Homo sapien
gatgttccggttcatcttggagatc

SEQ ID NO: 1928325 - DNA, 25 bp, Homo sapien
tgatgttccggttcatcttggagat

SEQ ID NO: 1928326 - DNA, 25 bp, Homo sapien
catccccgtgcttcccagccagcat

SEQ ID NO: 1928327 - DNA, 25 bp, Homo sapien
tcatccccgtgcttcccagccagca

SEQ ID NO: 1928328 - DNA, 25 bp, Homo sapien
gcagctcctcatatttgatctggta

SEQ ID NO: 1928329 - DNA, 25 bp, Homo sapien
tgcagctcctcatatttgatctggt

SEQ ID NO: 1928330 - DNA, 25 bp, Homo sapien
cagctcctcatatttgatctggtac

SEQ ID NO: 1928331 - DNA, 25 bp, Homo sapien
ctgcagctcctcatatttgatctgg

SEQ ID NO: 1928332 - DNA, 25 bp, Homo sapien
tccggctgcggttggtgatctcctc

SEQ ID NO: 1928333 - DNA, 25 bp, Homo sapien
agtgatgatgccgtccatgtccggg

SEQ ID NO: 1928334 - DNA, 25 bp, Homo sapien
ggttggtgatctcctcgtactgcgc

SEQ ID NO: 1928335 - DNA, 25 bp, Homo sapien
tcagtgatgatgccgtccatgtccg

SEQ ID NO: 1928336 - DNA, 25 bp, Homo sapien
tcgtcagtcagcccttccaggtgag

SEQ ID NO: 1928337 - DNA, 25 bp, Homo sapien
gctgcctcaggaagttgatctcgtc

SEQ ID NO: 1928338 - DNA, 25 bp, Homo sapien
ctgcagctcccgatctcttcataca

SEQ ID NO: 1928339 - DNA, 25 bp, Homo sapien
acagctgcctcaggaagttgatctc

SEQ ID NO: 1928340 - DNA, 25 bp, Homo sapien
gattcattctccatctctgtaagct

SEQ ID NO: 1928341 - DNA, 25 bp, Homo sapien
acagattcattctccatctctgtaa

SEQ ID NO: 1928342 - DNA, 25 bp, Homo sapien
gtaagcttattgatctcatcctcac

SEQ ID NO: 1928343 - DNA, 25 bp, Homo sapien
cttgatgaggacagattcattctcc

SEQ ID NO: 1928344 - DNA, 25 bp, Homo sapien
gctgccgcctaaggttgttgaagta

SEQ ID NO: 1928345 - DNA, 25 bp, Homo sapien
tggccccgagtctccagctgccgcc

SEQ ID NO: 1928346 - DNA, 25 bp, Homo sapien
ttgtccatgttgctccaagctgtct

SEQ ID NO: 1928347 - DNA, 25 bp, Homo sapien
gtccatgttgctccaagctgtcttc

SEQ ID NO: 1928348 - DNA, 25 bp, Homo sapien
tatgaaggaggcaaacttgttgctg

SEQ ID NO: 1928349 - DNA, 25 bp, Homo sapien
gaaggaggcaaacttgttgctgagg

SEQ ID NO: 1928350 - DNA, 25 bp, Homo sapien
gaggcaaacttgttgctgagggtct

SEQ ID NO: 1928351 - DNA, 25 bp, Homo sapien
ctatgaaggaggcaaacttgttgct

SEQ ID NO: 1928352 - DNA, 25 bp, Homo sapien
cttccccttcttttgggtgcgcagg

SEQ ID NO: 1928353 - DNA, 25 bp, Homo sapien
ttccccttcttttgggtgcgcaggc

SEQ ID NO: 1928354 - DNA, 25 bp, Homo sapien
gttgggatccacctccagattaagt

SEQ ID NO: 1928355 - DNA, 25 bp, Homo sapien
atccacctccagattaagtgggctc

SEQ ID NO: 1928356 - DNA, 25 bp, Homo sapien
tgggatccacctccagattaagtgg

SEQ ID NO: 1928357 - DNA, 25 bp, Homo sapien
tgtgacggcagtgatgcctcccatg

SEQ ID NO: 1928358 - DNA, 25 bp, Homo sapien
tcaggaggagcttgaggagctgatg

SEQ ID NO: 1928359 - DNA, 25 bp, Homo sapien
aggaggagcttgaggagctgatgca

SEQ ID NO: 1928360 - DNA, 25 bp, Homo sapien
gaggagcttgaggagctgatgcagg

SEQ ID NO: 1928361 - DNA, 25 bp, Homo sapien
ggagcttgaggagctgatgcaggta

SEQ ID NO: 1928362 - DNA, 25 bp, Homo sapien
aggcccgggggccagagatggacaa

SEQ ID NO: 1928363 - DNA, 25 bp, Homo sapien
tgaaggcccgggggccagagatgga

SEQ ID NO: 1928364 - DNA, 25 bp, Homo sapien
gcccgggggccagagatggacaact

SEQ ID NO: 1928365 - DNA, 25 bp, Homo sapien
cccgggggccagagatggacaactt

SEQ ID NO: 1928366 - DNA, 25 bp, Homo sapien
cgggctgaaccaggcagagattcca

SEQ ID NO: 1928367 - DNA, 25 bp, Homo sapien
aggcagagattccagaaggagtgaa

SEQ ID NO: 1928368 - DNA, 25 bp, Homo sapien
ggcagagattccagaaggagtgaag

SEQ ID NO: 1928369 - DNA, 25 bp, Homo sapien
aggcgggctgaaccaggcagagatt

SEQ ID NO: 1928370 - DNA, 25 bp, Homo sapien
acactatatgacacccaggactcgg

SEQ ID NO: 1928371 - DNA, 25 bp, Homo sapien
tatgagatcgtcagcttccacaggc

SEQ ID NO: 1928372 - DNA, 25 bp, Homo sapien
gaaagactcagccaacgtcacaggg

SEQ ID NO: 1928373 - DNA, 25 bp, Homo sapien
agcactccctgttagaagccggcag

SEQ ID NO: 1928374 - DNA, 25 bp, Homo sapien
gtgagcaatcatcgcaccactactc

SEQ ID NO: 1928375 - DNA, 25 bp, Homo sapien
aaggttaaagtgagcaatcatcgca

SEQ ID NO: 1928376 - DNA, 25 bp, Homo sapien
ggttaaagtgagcaatcatcgcacc

SEQ ID NO: 1928377 - DNA, 25 bp, Homo sapien
taaagtgagcaatcatcgcaccact

SEQ ID NO: 1928378 - DNA, 25 bp, Homo sapien
agcccaaaaggtcaagaccaccctg

SEQ ID NO: 1928379 - DNA, 25 bp, Homo sapien
cttgagcccaaaaggtcaagaccac

SEQ ID NO: 1928380 - DNA, 25 bp, Homo sapien
cctgggcaatatagcaagaccccgt

SEQ ID NO: 1928381 - DNA, 25 bp, Homo sapien
tgggcaatatagcaagaccccgtct

SEQ ID NO: 1928382 - DNA, 25 bp, Homo sapien
cagcccaccctgaaattcactgtgt

SEQ ID NO: 1928383 - DNA, 25 bp, Homo sapien
tcccagcttgcccatttggtgcagg

SEQ ID NO: 1928384 - DNA, 25 bp, Homo sapien
gtgcagggagatagtccagcccacc

SEQ ID NO: 1928385 - DNA, 25 bp, Homo sapien
tcagtcaagggtgcttgggagcctt

SEQ ID NO: 1928386 - DNA, 25 bp, Homo sapien
ctgcggatgagttaactgaagggct

SEQ ID NO: 1928387 - DNA, 25 bp, Homo sapien
tgtttcaggagtggcacagaaagga

SEQ ID NO: 1928388 - DNA, 25 bp, Homo sapien
taactgaagggctgtgtttcaggag

SEQ ID NO: 1928389 - DNA, 25 bp, Homo sapien
gctgtgtttcaggagtggcacagaa

SEQ ID NO: 1928390 - DNA, 25 bp, Homo sapien
tgtataaatttgcagatttacacag

SEQ ID NO: 1928391 - DNA, 25 bp, Homo sapien
gatttacacagaccaccagtgtggc

SEQ ID NO: 1928392 - DNA, 25 bp, Homo sapien
ctcccgcttgtgtataaatttgcag

SEQ ID NO: 1928393 - DNA, 25 bp, Homo sapien
tttgcagatttacacagaccaccag

SEQ ID NO: 1928394 - DNA, 25 bp, Homo sapien
cgcttcttaaaaaattggaaggctg

SEQ ID NO: 1928395 - DNA, 25 bp, Homo sapien
aaaattggaaggctgagcatttctt

SEQ ID NO: 1928396 - DNA, 25 bp, Homo sapien
ttcttaaaaaattggaaggctgagc

SEQ ID NO: 1928397 - DNA, 25 bp, Homo sapien
aaaaaattggaaggctgagcatttc

SEQ ID NO: 1928398 - DNA, 25 bp, Homo sapien
tgattgtgcaagttccagtgggagc

SEQ ID NO: 1928399 - DNA, 25 bp, Homo sapien
gagatgctgtggctcttaccgagcg

SEQ ID NO: 1928400 - DNA, 25 bp, Homo sapien
gaaacatatgcatcaccgctgcagg

SEQ ID NO: 1928401 - DNA, 25 bp, Homo sapien
ttatagatccaggttggcacccgcc

SEQ ID NO: 1928402 - DNA, 25 bp, Homo sapien
ggcaatttcagggttatgtgatgag

SEQ ID NO: 1928403 - DNA, 25 bp, Homo sapien
tggtggcagtaagcacagagtgtct

SEQ ID NO: 1928404 - DNA, 25 bp, Homo sapien
cacatgctggtgaataagacattct

SEQ ID NO: 1928405 - DNA, 25 bp, Homo sapien
taagagttagactgcaagtctggct

SEQ ID NO: 1928406 - DNA, 25 bp, Homo sapien
tacatcttgagactcaaactgcata

SEQ ID NO: 1928407 - DNA, 25 bp, Homo sapien
catcttgagactcaaactgcataat

SEQ ID NO: 1928408 - DNA, 25 bp, Homo sapien
ttttacatcttgagactcaaactgc

SEQ ID NO: 1928409 - DNA, 25 bp, Homo sapien
tatatgcagtctcttcagacctttt

SEQ ID NO: 1928410 - DNA, 25 bp, Homo sapien
tgaaaagggatgtgccaactgccac

SEQ ID NO: 1928411 - DNA, 25 bp, Homo sapien
ctgaaaagggatgtgccaactgcca

SEQ ID NO: 1928412 - DNA, 25 bp, Homo sapien
ctgattggcagtttctctaatactg

SEQ ID NO: 1928413 - DNA, 25 bp, Homo sapien
gtctggaatcagctcctccgggtgt

SEQ ID NO: 1928414 - DNA, 25 bp, Homo sapien
tggaatcagctcctccgggtgttac

SEQ ID NO: 1928415 - DNA, 25 bp, Homo sapien
ctccgggtgttaccccaggatggct

SEQ ID NO: 1928416 - DNA, 25 bp, Homo sapien
ttaccccaggatggctacgcaccat

SEQ ID NO: 1928417 - DNA, 25 bp, Homo sapien
cattgtctggcacttccagtctgct

SEQ ID NO: 1928418 - DNA, 25 bp, Homo sapien
tagttctggtttgaaggccacggta

SEQ ID NO: 1928419 - DNA, 25 bp, Homo sapien
gaatgcagatgtggagagttgggca

SEQ ID NO: 1928420 - DNA, 25 bp, Homo sapien
ggcagctctcaggtgaaggaatgca

SEQ ID NO: 1928421 - DNA, 25 bp, Homo sapien
gtgaatttcaatatcaacatcatgg

SEQ ID NO: 1928422 - DNA, 25 bp, Homo sapien
gctggaggccctgtgaatttcaata

SEQ ID NO: 1928423 - DNA, 25 bp, Homo sapien
ttcaggtgctcaaggatttcatagt

SEQ ID NO: 1928424 - DNA, 25 bp, Homo sapien
caatatcaacatcatggttcaggtg

SEQ ID NO: 1928425 - DNA, 25 bp, Homo sapien
gacacattcatggagccaacaacta

SEQ ID NO: 1928426 - DNA, 25 bp, Homo sapien
ttcatggagccaacaactaattatc

SEQ ID NO: 1928427 - DNA, 25 bp, Homo sapien
gaacgcatagaacactcattccaga

SEQ ID NO: 1928428 - DNA, 25 bp, Homo sapien
gctcacctcaatagaacgcatagaa

SEQ ID NO: 1928429 - DNA, 25 bp, Homo sapien
aaacaaaaaccgtgagggagagcag

SEQ ID NO: 1928430 - DNA, 25 bp, Homo sapien
tggcagcacccttgagttgtacaaa

SEQ ID NO: 1928431 - DNA, 25 bp, Homo sapien
ttgagttgtacaaaccgtgactcac

SEQ ID NO: 1928432 - DNA, 25 bp, Homo sapien
aacaaaaaccgtgagggagagcaga

SEQ ID NO: 1928433 - DNA, 25 bp, Homo sapien
gcctgaacggaaggagagctcttct

SEQ ID NO: 1928434 - DNA, 25 bp, Homo sapien
acgtgctttgccgtgagcctgaacg

SEQ ID NO: 1928435 - DNA, 25 bp, Homo sapien
cctgcgtcctctggttggcttcgga

SEQ ID NO: 1928436 - DNA, 25 bp, Homo sapien
aaggctgaagcatctccgtagcatc

SEQ ID NO: 1928437 - DNA, 25 bp, Homo sapien
atagagaacacttggcttccacacc

SEQ ID NO: 1928438 - DNA, 25 bp, Homo sapien
tgttctggcgtgttcactacactaa

SEQ ID NO: 1928439 - DNA, 25 bp, Homo sapien
cacccctgttctggcgtgttcacta

SEQ ID NO: 1928440 - DNA, 25 bp, Homo sapien
ttcactacactaacaacctcttctg

SEQ ID NO: 1928441 - DNA, 25 bp, Homo sapien
tcccggatttgtatactctgctgaa

SEQ ID NO: 1928442 - DNA, 25 bp, Homo sapien
tgatagtcagtggatgctcccggat

SEQ ID NO: 1928443 - DNA, 25 bp, Homo sapien
taagagtcgtttgctgatagtcagt

SEQ ID NO: 1928444 - DNA, 25 bp, Homo sapien
gtaagtctaagagtcgtttgctgat

SEQ ID NO: 1928445 - DNA, 25 bp, Homo sapien
gaacaccttcagctgcgaggagagc

SEQ ID NO: 1928446 - DNA, 25 bp, Homo sapien
tgactgcctcggataatgattccac

SEQ ID NO: 1928447 - DNA, 25 bp, Homo sapien
gatggagggcaggttcattgaacac

SEQ ID NO: 1928448 - DNA, 25 bp, Homo sapien
ggcttttgcggacagtgactgcctc

SEQ ID NO: 1928449 - DNA, 25 bp, Homo sapien
tgaacttcttggagagcccaaggaa

SEQ ID NO: 1928450 - DNA, 25 bp, Homo sapien
tttatgagagaaagttgtgaacttc

SEQ ID NO: 1928451 - DNA, 25 bp, Homo sapien
aaagttgtgaacttcttggagagcc

SEQ ID NO: 1928452 - DNA, 25 bp, Homo sapien
ttggagagcccaaggaatacaactt

SEQ ID NO: 1928453 - DNA, 25 bp, Homo sapien
atcacttaataactgcacctttgcc

SEQ ID NO: 1928454 - DNA, 25 bp, Homo sapien
aaccggggcacttgcatttggcagc

SEQ ID NO: 1928455 - DNA, 25 bp, Homo sapien
ttggcagctgcaatcacttaataac

SEQ ID NO: 1928456 - DNA, 25 bp, Homo sapien
cttgtcctgtggaaccggggcactt

SEQ ID NO: 1928457 - DNA, 25 bp, Homo sapien
ttctgagtagctacaggagccttca

SEQ ID NO: 1928458 - DNA, 25 bp, Homo sapien
gggcttttaaagctctcacgctgcc

SEQ ID NO: 1928459 - DNA, 25 bp, Homo sapien
ttgagtcgtagaacaggaggacctg

SEQ ID NO: 1928460 - DNA, 25 bp, Homo sapien
tccctagcagcagggtaggctctgc

SEQ ID NO: 1928461 - DNA, 25 bp, Homo sapien
gccataggccatagcttctcaaggg

SEQ ID NO: 1928462 - DNA, 25 bp, Homo sapien
cacatcccgcaacaactaaattgtc

SEQ ID NO: 1928463 - DNA, 25 bp, Homo sapien
aagggcatctgacactcccaagggc

SEQ ID NO: 1928464 - DNA, 25 bp, Homo sapien
caaaagctggtggactttgacaaca

SEQ ID NO: 1928465 - DNA, 25 bp, Homo sapien
ggtctgcactgtttcagcacctcac

SEQ ID NO: 1928466 - DNA, 25 bp, Homo sapien
ggccaatccatttgcaggtctgcac

SEQ ID NO: 1928467 - DNA, 25 bp, Homo sapien
agcacctcactgaaaccctcacgga

SEQ ID NO: 1928468 - DNA, 25 bp, Homo sapien
tgcactgtttcagcacctcactgaa

SEQ ID NO: 1928469 - DNA, 25 bp, Homo sapien
gatggtatgacccaccgtgtacccc

SEQ ID NO: 1928470 - DNA, 25 bp, Homo sapien
ttatgtcacccggttccgggcacac

SEQ ID NO: 1928471 - DNA, 25 bp, Homo sapien
caaaaacggttttatctcatagaag

SEQ ID NO: 1928472 - DNA, 25 bp, Homo sapien
acttccttcattgaagcccccagtg

SEQ ID NO: 1928473 - DNA, 25 bp, Homo sapien
ctgggcccagcagcaggagggccag

SEQ ID NO: 1928474 - DNA, 25 bp, Homo sapien
aaagggggatgccgctgctggcagc

SEQ ID NO: 1928475 - DNA, 25 bp, Homo sapien
tgcaaagggggatgccgctgctggc

SEQ ID NO: 1928476 - DNA, 25 bp, Homo sapien
gcaaagggggatgccgctgctggca

SEQ ID NO: 1928477 - DNA, 25 bp, Homo sapien
ctgcaaagggggatgccgctgctgg

SEQ ID NO: 1928478 - DNA, 25 bp, Homo sapien
tgagatacccggctggcctgaatgg

SEQ ID NO: 1928479 - DNA, 25 bp, Homo sapien
gtgcggttctcatgtgagatacccg

SEQ ID NO: 1928480 - DNA, 25 bp, Homo sapien
ctcatgtgagatacccggctggcct

SEQ ID NO: 1928481 - DNA, 25 bp, Homo sapien
agatacccggctggcctgaatggcc

SEQ ID NO: 1928482 - DNA, 25 bp, Homo sapien
caggaagtccaagatagggcagact

SEQ ID NO: 1928483 - DNA, 25 bp, Homo sapien
gcagactttagtgttccttgtcttc

SEQ ID NO: 1928484 - DNA, 25 bp, Homo sapien
gatagggcagactttagtgttcctt

SEQ ID NO: 1928485 - DNA, 25 bp, Homo sapien
tccaagatagggcagactttagtgt

SEQ ID NO: 1928486 - DNA, 25 bp, Homo sapien
cttgccccaacttggccatgccgct

SEQ ID NO: 1928487 - DNA, 25 bp, Homo sapien
caacttggccatgccgctgtctcac

SEQ ID NO: 1928488 - DNA, 25 bp, Homo sapien
ccccaacttggccatgccgctgtct

SEQ ID NO: 1928489 - DNA, 25 bp, Homo sapien
ttgccccaacttggccatgccgctg

SEQ ID NO: 1928490 - DNA, 25 bp, Homo sapien
tccactctgccactgtcatccccct

SEQ ID NO: 1928491 - DNA, 25 bp, Homo sapien
actctgccactgtcatcccccttgc

SEQ ID NO: 1928492 - DNA, 25 bp, Homo sapien
cactctgccactgtcatcccccttg

SEQ ID NO: 1928493 - DNA, 25 bp, Homo sapien
tctgccactgtcatcccccttgccc

SEQ ID NO: 1928494 - DNA, 25 bp, Homo sapien
tctggataccggagatagcacctgc

SEQ ID NO: 1928495 - DNA, 25 bp, Homo sapien
catggccgattttgcctgcgtctgc

SEQ ID NO: 1928496 - DNA, 25 bp, Homo sapien
ctcctagtttcatggccgattttgc

SEQ ID NO: 1928497 - DNA, 25 bp, Homo sapien
tgcctgcgtctgcttcactggttgt

SEQ ID NO: 1928498 - DNA, 25 bp, Homo sapien
tcaagaaggacaggtataggtttcc

SEQ ID NO: 1928499 - DNA, 25 bp, Homo sapien
ggttatgaatgcgaaggagaagcac

SEQ ID NO: 1928500 - DNA, 25 bp, Homo sapien
tgaggttatgaatgcgaaggagaag

SEQ ID NO: 1928501 - DNA, 25 bp, Homo sapien
ggacaggtataggtttccaggtatg

SEQ ID NO: 1928502 - DNA, 25 bp, Homo sapien
tgacatgagggatatcttcacactt

SEQ ID NO: 1928503 - DNA, 25 bp, Homo sapien
ctgaaagcttttcctgtggaccgat

SEQ ID NO: 1928504 - DNA, 25 bp, Homo sapien
gcttttcctgtggaccgatgaaggt

SEQ ID NO: 1928505 - DNA, 25 bp, Homo sapien
cctgtggaccgatgaaggtgtagaa

SEQ ID NO: 1928506 - DNA, 25 bp, Homo sapien
gaggacccaggacctatgccaggac

SEQ ID NO: 1928507 - DNA, 25 bp, Homo sapien
ccacattgccattaatagaaacatt

SEQ ID NO: 1928508 - DNA, 25 bp, Homo sapien
acattgccattaatagaaacattca

SEQ ID NO: 1928509 - DNA, 25 bp, Homo sapien
aaagaccacggccacattgccatta

SEQ ID NO: 1928510 - DNA, 25 bp, Homo sapien
ctaaaagaccacggccacattgcca

SEQ ID NO: 1928511 - DNA, 25 bp, Homo sapien
tcaaggataccaattctaagaactg

SEQ ID NO: 1928512 - DNA, 25 bp, Homo sapien
gctgggagatctgcctattatataa

SEQ ID NO: 1928513 - DNA, 25 bp, Homo sapien
tgctcaatagccacccaggactagt

SEQ ID NO: 1928514 - DNA, 25 bp, Homo sapien
tactgcctttgaaatacagtgtgct

SEQ ID NO: 1928515 - DNA, 25 bp, Homo sapien
gaccacttgcatcgcataggccagg

SEQ ID NO: 1928516 - DNA, 25 bp, Homo sapien
tccctaggcggagatcagttagacc

SEQ ID NO: 1928517 - DNA, 25 bp, Homo sapien
tcaaacttgtgtagccacaggacct

SEQ ID NO: 1928518 - DNA, 25 bp, Homo sapien
cacgcagtcagtgctcctttggacc

SEQ ID NO: 1928519 - DNA, 25 bp, Homo sapien
tgggaggatccaagcatcaggaaga

SEQ ID NO: 1928520 - DNA, 25 bp, Homo sapien
tgagcttccagggatttcatcggac

SEQ ID NO: 1928521 - DNA, 25 bp, Homo sapien
gaggttctcattgttcccaccggta

SEQ ID NO: 1928522 - DNA, 25 bp, Homo sapien
catcggacctcctcccaagttgtag

SEQ ID NO: 1928523 - DNA, 25 bp, Homo sapien
tgaaatcttgagtgtttgcacctgc

SEQ ID NO: 1928524 - DNA, 25 bp, Homo sapien
gtgtttgcacctgctgtggaataag

SEQ ID NO: 1928525 - DNA, 25 bp, Homo sapien
gtttgcacctgctgtggaataagtc

SEQ ID NO: 1928526 - DNA, 25 bp, Homo sapien
ttgcacctgctgtggaataagtcat

SEQ ID NO: 1928527 - DNA, 25 bp, Homo sapien
gacagtggcaaatggaatgcagtca

SEQ ID NO: 1928528 - DNA, 25 bp, Homo sapien
ggcaaatggaatgcagtcacttctg

SEQ ID NO: 1928529 - DNA, 25 bp, Homo sapien
ttctgcactggcataggagactgtt

SEQ ID NO: 1928530 - DNA, 25 bp, Homo sapien
ggtggacagtggcaaatggaatgca

SEQ ID NO: 1928531 - DNA, 25 bp, Homo sapien
taagttgcggaaagtaccagagtca

SEQ ID NO: 1928532 - DNA, 25 bp, Homo sapien
tgtttaccacacctgataagttgcc

SEQ ID NO: 1928533 - DNA, 25 bp, Homo sapien
caaggccctgtggtacttggaagca

SEQ ID NO: 1928534 - DNA, 25 bp, Homo sapien
caggtttccattgtcaacgttgcag

SEQ ID NO: 1928535 - DNA, 25 bp, Homo sapien
ccagcattcagatgatcatttgaaa

SEQ ID NO: 1928536 - DNA, 25 bp, Homo sapien
gtggaaggtggaaacccagcattca

SEQ ID NO: 1928537 - DNA, 25 bp, Homo sapien
accatatgacttcctggtggaaggt

SEQ ID NO: 1928538 - DNA, 25 bp, Homo sapien
tcctggtggaaggtggaaacccagc

SEQ ID NO: 1928539 - DNA, 25 bp, Homo sapien
cttagcgtggcatctgtcctctctg

SEQ ID NO: 1928540 - DNA, 25 bp, Homo sapien
cttagtcttagcgtggcatctgtcc

SEQ ID NO: 1928541 - DNA, 25 bp, Homo sapien
tcctctctggcagcattggttggcc

SEQ ID NO: 1928542 - DNA, 25 bp, Homo sapien
gtcctctctggcagcattggttggc

SEQ ID NO: 1928543 - DNA, 25 bp, Homo sapien
tttccatgtgttgatggttgtgtgt

SEQ ID NO: 1928544 - DNA, 25 bp, Homo sapien
tgtgttgatggttgtgtgtgaagat

SEQ ID NO: 1928545 - DNA, 25 bp, Homo sapien
ccatgtgttgatggttgtgtgtgaa

SEQ ID NO: 1928546 - DNA, 25 bp, Homo sapien
tccatgtgttgatggttgtgtgtga

SEQ ID NO: 1928547 - DNA, 25 bp, Homo sapien
tccacccgtggtagcgccgtgtcaa

SEQ ID NO: 1928548 - DNA, 25 bp, Homo sapien
ctgtgattcagcaatgcaggctcct

SEQ ID NO: 1928549 - DNA, 25 bp, Homo sapien
tcaatacgtagcttctcaggtcact

SEQ ID NO: 1928550 - DNA, 25 bp, Homo sapien
gaggctggcagggattcgccttcat

SEQ ID NO: 1928551 - DNA, 25 bp, Homo sapien
ggaagacatgcagggagcttttcat

SEQ ID NO: 1928552 - DNA, 25 bp, Homo sapien
ttgaaattccaatgaggtaggctca

SEQ ID NO: 1928553 - DNA, 25 bp, Homo sapien
gctggctggccgagctttaagagta

SEQ ID NO: 1928554 - DNA, 25 bp, Homo sapien
tgagctgtccaacaatgatgccggc

SEQ ID NO: 1928555 - DNA, 25 bp, Homo sapien
cactggagtcttcaccaatgtaata

SEQ ID NO: 1928556 - DNA, 25 bp, Homo sapien
cggagttactcaatatttcactgga

SEQ ID NO: 1928557 - DNA, 25 bp, Homo sapien
tgcaaaatggtaagacacaaggtca

SEQ ID NO: 1928558 - DNA, 25 bp, Homo sapien
tccaatgcgacagcgttaagaggtg

SEQ ID NO: 1928559 - DNA, 25 bp, Homo sapien
attaaactaagccattggtgatcaa

SEQ ID NO: 1928560 - DNA, 25 bp, Homo sapien
gatgctctgaactcaggttaaacat

SEQ ID NO: 1928561 - DNA, 25 bp, Homo sapien
tcaagttattcccacgttagtgacc

SEQ ID NO: 1928562 - DNA, 25 bp, Homo sapien
gttaatgttcagttgtcctttcctg

SEQ ID NO: 1928563 - DNA, 25 bp, Homo sapien
cattcttcaagttattcccacattt

SEQ ID NO: 1928564 - DNA, 25 bp, Homo sapien
gtatagcttgctaattcctgcttta

SEQ ID NO: 1928565 - DNA, 25 bp, Homo sapien
gcaggcagtgggctgatttgactca

SEQ ID NO: 1928566 - DNA, 25 bp, Homo sapien
ggctgatttgactcacaggtggtat

SEQ ID NO: 1928567 - DNA, 25 bp, Homo sapien
gaaaatattcttagcttacatctac

SEQ ID NO: 1928568 - DNA, 25 bp, Homo sapien
tggacttggcttcattcagttcgac

SEQ ID NO: 1928569 - DNA, 25 bp, Homo sapien
ttcgactatcagattcttcacagtg

SEQ ID NO: 1928570 - DNA, 25 bp, Homo sapien
ggcttcattcagttcgactatcaga

SEQ ID NO: 1928571 - DNA, 25 bp, Homo sapien
ttccgtaaagactggacttggcttc

SEQ ID NO: 1928572 - DNA, 25 bp, Homo sapien
actcagcaaatctctagggctctga

SEQ ID NO: 1928573 - DNA, 25 bp, Homo sapien
caggcttccaggaggcatatgcttc

SEQ ID NO: 1928574 - DNA, 25 bp, Homo sapien
tgggaggtgttagaaccaggcttcc

SEQ ID NO: 1928575 - DNA, 25 bp, Homo sapien
ccccataagcaaaccttggaacaga

SEQ ID NO: 1928576 - DNA, 25 bp, Homo sapien
cagattaccagttccttgcatgtga

SEQ ID NO: 1928577 - DNA, 25 bp, Homo sapien
tgggcataggccttcatcagagagt

SEQ ID NO: 1928578 - DNA, 25 bp, Homo sapien
tcagggcacttttgtactcacaggt

SEQ ID NO: 1928579 - DNA, 25 bp, Homo sapien
catatctcgggctgttgacaacatg

SEQ ID NO: 1928580 - DNA, 25 bp, Homo sapien
gacctcagccatttgcctccttatt

SEQ ID NO: 1928581 - DNA, 25 bp, Homo sapien
aactgaggggacctcagccatttgc

SEQ ID NO: 1928582 - DNA, 25 bp, Homo sapien
tgaggggacctcagccatttgcctc

SEQ ID NO: 1928583 - DNA, 25 bp, Homo sapien
ggacctcagccatttgcctccttat

SEQ ID NO: 1928584 - DNA, 25 bp, Homo sapien
tcagagcattgtgagatgacggtaa

SEQ ID NO: 1928585 - DNA, 25 bp, Homo sapien
gggctcgtgtctgcctctccgtctg

SEQ ID NO: 1928586 - DNA, 25 bp, Homo sapien
gctgagtgacgaagagcaaactgca

SEQ ID NO: 1928587 - DNA, 25 bp, Homo sapien
ccgtctgccgctgagtgacgaagag

SEQ ID NO: 1928588 - DNA, 25 bp, Homo sapien
agctggccagttagcgttggcagac

SEQ ID NO: 1928589 - DNA, 25 bp, Homo sapien
tggccagttagcgttggcagacaac

SEQ ID NO: 1928590 - DNA, 25 bp, Homo sapien
agagctggccagttagcgttggcag

SEQ ID NO: 1928591 - DNA, 25 bp, Homo sapien
gctggccagttagcgttggcagaca

SEQ ID NO: 1928592 - DNA, 25 bp, Homo sapien
ttacgagacaaaagttgacatcagt

SEQ ID NO: 1928593 - DNA, 25 bp, Homo sapien
catagattcgtgtattacgagacaa

SEQ ID NO: 1928594 - DNA, 25 bp, Homo sapien
tctgagagaaactcatagattcgtg

SEQ ID NO: 1928595 - DNA, 25 bp, Homo sapien
cgtgtattacgagacaaaagttgac

SEQ ID NO: 1928596 - DNA, 25 bp, Homo sapien
aatggtggaatgtccttttggagac

SEQ ID NO: 1928597 - DNA, 25 bp, Homo sapien
taggatgcaaagtatgctctagatc

SEQ ID NO: 1928598 - DNA, 25 bp, Homo sapien
gggtggaaataggacaggatcttct

SEQ ID NO: 1928599 - DNA, 25 bp, Homo sapien
cttagccagaactcatgcgtacggg

SEQ ID NO: 1928600 - DNA, 25 bp, Homo sapien
cagcaccatcggcatgtgaattcag

SEQ ID NO: 1928601 - DNA, 25 bp, Homo sapien
tccccagcaccatcggcatgtgaat

SEQ ID NO: 1928602 - DNA, 25 bp, Homo sapien
catcggcatgtgaattcagcagccc

SEQ ID NO: 1928603 - DNA, 25 bp, Homo sapien
gcatgtgaattcagcagccccagag

SEQ ID NO: 1928604 - DNA, 25 bp, Homo sapien
taaagggcatcgcattgtgctgggc

SEQ ID NO: 1928605 - DNA, 25 bp, Homo sapien
tcttaccgagcaagaggaagcgggc

SEQ ID NO: 1928606 - DNA, 25 bp, Homo sapien
cacaggaaggctcgataagatctcc

SEQ ID NO: 1928607 - DNA, 25 bp, Homo sapien
ttcttacaagacacaactggagctc

SEQ ID NO: 1928608 - DNA, 25 bp, Homo sapien
taatggttgtcccattgcttatgta

SEQ ID NO: 1928609 - DNA, 25 bp, Homo sapien
gcaagatcccaatctgagccaagtg

SEQ ID NO: 1928610 - DNA, 25 bp, Homo sapien
tgcttatgtacttgcaagatcccaa

SEQ ID NO: 1928611 - DNA, 25 bp, Homo sapien
aatctgagccaagtgatcctgaaca

SEQ ID NO: 1928612 - DNA, 25 bp, Homo sapien
ccattagagtccgggactgagagaa

SEQ ID NO: 1928613 - DNA, 25 bp, Homo sapien
attagagtccgggactgagagaaat

SEQ ID NO: 1928614 - DNA, 25 bp, Homo sapien
tcccattagagtccgggactgagag

SEQ ID NO: 1928615 - DNA, 25 bp, Homo sapien
actcccattagagtccgggactgag

SEQ ID NO: 1928616 - DNA, 25 bp, Homo sapien
gattatgggaacaaacccatttgct

SEQ ID NO: 1928617 - DNA, 25 bp, Homo sapien
cccagaggcctaggattatgggaac

SEQ ID NO: 1928618 - DNA, 25 bp, Homo sapien
tttgctttatgaggtttgccaaacc

SEQ ID NO: 1928619 - DNA, 25 bp, Homo sapien
tgccaaaccttgtacttgttacaat

SEQ ID NO: 1928620 - DNA, 25 bp, Homo sapien
aaattattggtctctctgtgagaac

SEQ ID NO: 1928621 - DNA, 25 bp, Homo sapien
catgaataggatgagtgtttgaaca

SEQ ID NO: 1928622 - DNA, 25 bp, Homo sapien
ggtataaacagtggccatgaatagg

SEQ ID NO: 1928623 - DNA, 25 bp, Homo sapien
caataaaggccaatggtacagcacc

SEQ ID NO: 1928624 - DNA, 25 bp, Homo sapien
gataacatgaatgtccagttccagc

SEQ ID NO: 1928625 - DNA, 25 bp, Homo sapien
aagtgaacagttgcaaaagagccat

SEQ ID NO: 1928626 - DNA, 25 bp, Homo sapien
gagacaccaacagccaaagtgaaca

SEQ ID NO: 1928627 - DNA, 25 bp, Homo sapien
catggcagaatgcaatggagctaca

SEQ ID NO: 1928628 - DNA, 25 bp, Homo sapien
gaagccatccagtggagctccaagt

SEQ ID NO: 1928629 - DNA, 25 bp, Homo sapien
tgttccatgcccaacaaatgccctc

SEQ ID NO: 1928630 - DNA, 25 bp, Homo sapien
aaggaatgggtattggtgagaagcc

SEQ ID NO: 1928631 - DNA, 25 bp, Homo sapien
tattgtacctctgtttaaactgtgt

SEQ ID NO: 1928632 - DNA, 25 bp, Homo sapien
ggataattataccaagtgatgtcat

SEQ ID NO: 1928633 - DNA, 25 bp, Homo sapien
gatagcaggccgtgaaccgttgtca

SEQ ID NO: 1928634 - DNA, 25 bp, Homo sapien
catggcttatcttttgggacaggga

SEQ ID NO: 1928635 - DNA, 25 bp, Homo sapien
ccaagtgatgtcatgatggatggct

SEQ ID NO: 1928636 - DNA, 25 bp, Homo sapien
aagaggagacatgcttttaacccat

SEQ ID NO: 1928637 - DNA, 25 bp, Homo sapien
ccagttttaggccctggtctctctc

SEQ ID NO: 1928638 - DNA, 25 bp, Homo sapien
agatgttccccagttttaggccctg

SEQ ID NO: 1928639 - DNA, 25 bp, Homo sapien
ccacacagaccagaatggatcagaa

SEQ ID NO: 1928640 - DNA, 25 bp, Homo sapien
cacagaccagaatggatcagaaggt

SEQ ID NO: 1928641 - DNA, 25 bp, Homo sapien
cctgtggcaatttgacagctccaat

SEQ ID NO: 1928642 - DNA, 25 bp, Homo sapien
ccttgttgttgagtccaaattgcca

SEQ ID NO: 1928643 - DNA, 25 bp, Homo sapien
tggcaattcattccttgttgttgag

SEQ ID NO: 1928644 - DNA, 25 bp, Homo sapien
aaggaaagactctggttggcccagc

SEQ ID NO: 1928645 - DNA, 25 bp, Homo sapien
gagtcccaggttaaagtcttgccat

SEQ ID NO: 1928646 - DNA, 25 bp, Homo sapien
gaaaggcggaggcagatggtgtatg

SEQ ID NO: 1928647 - DNA, 25 bp, Homo sapien
taaatagaatcacactaagatatac

SEQ ID NO: 1928648 - DNA, 25 bp, Homo sapien
taaaagcaaatacaggtgccaaggc

SEQ ID NO: 1928649 - DNA, 25 bp, Homo sapien
aggctgctcagcagtttttgggctg

SEQ ID NO: 1928650 - DNA, 25 bp, Homo sapien
gtttttgggctgaagagtttctgct

SEQ ID NO: 1928651 - DNA, 25 bp, Homo sapien
tgggctgaagagtttctgctctgcc

SEQ ID NO: 1928652 - DNA, 25 bp, Homo sapien
gaggctgctcagcagtttttgggct

SEQ ID NO: 1928653 - DNA, 25 bp, Homo sapien
tctcgtcccatgctctgtgggggct

SEQ ID NO: 1928654 - DNA, 25 bp, Homo sapien
tcatgactccctctcgtcccatgct

SEQ ID NO: 1928655 - DNA, 25 bp, Homo sapien
cagggtagggggagcctgacactcc

SEQ ID NO: 1928656 - DNA, 25 bp, Homo sapien
tgtttctgactacctgggctgggtg

SEQ ID NO: 1928657 - DNA, 25 bp, Homo sapien
aactctcttgatctgaactctctgc

SEQ ID NO: 1928658 - DNA, 25 bp, Homo sapien
cttcatgtgaatctctacgtaaact

SEQ ID NO: 1928659 - DNA, 25 bp, Homo sapien
ttattaccaagctccacatcaaaac

SEQ ID NO: 1928660 - DNA, 25 bp, Homo sapien
tccttattaccaagctccacatcaa

SEQ ID NO: 1928661 - DNA, 25 bp, Homo sapien
tcataggtttttcgattatgctgaa

SEQ ID NO: 1928662 - DNA, 25 bp, Homo sapien
tgtcataggtttttcgattatgctg

SEQ ID NO: 1928663 - DNA, 25 bp, Homo sapien
ataagcactgatgtcacaactcgaa

SEQ ID NO: 1928664 - DNA, 25 bp, Homo sapien
aataagcactgatgtcacaactcga

SEQ ID NO: 1928665 - DNA, 25 bp, Homo sapien
aagagatatcctctatcccactaag

SEQ ID NO: 1928666 - DNA, 25 bp, Homo sapien
aggcttcaccaaggggccatggatc

SEQ ID NO: 1928667 - DNA, 25 bp, Homo sapien
tctcgcccagtctcgctcaggcttc

SEQ ID NO: 1928668 - DNA, 25 bp, Homo sapien
caatggttgcctttacaaaaagaga

SEQ ID NO: 1928669 - DNA, 25 bp, Homo sapien
gagagaagcgccacccgaagagaag

SEQ ID NO: 1928670 - DNA, 25 bp, Homo sapien
tcaggccccactgtccggagagaag

SEQ ID NO: 1928671 - DNA, 25 bp, Homo sapien
tgtccggagagaagcgccacccgaa

SEQ ID NO: 1928672 - DNA, 25 bp, Homo sapien
gccacccgaagagaagctctgtggg

SEQ ID NO: 1928673 - DNA, 25 bp, Homo sapien
cagccagactgccacagccagccat

SEQ ID NO: 1928674 - DNA, 25 bp, Homo sapien
gggaaggtgaccaggcaccaggcca

SEQ ID NO: 1928675 - DNA, 25 bp, Homo sapien
taggcggggaaggtgaccaggcacc

SEQ ID NO: 1928676 - DNA, 25 bp, Homo sapien
ctgcagtaggcggggaaggtgacca

SEQ ID NO: 1928677 - DNA, 25 bp, Homo sapien
ccacagtgccatagcttcgggcact

SEQ ID NO: 1928678 - DNA, 25 bp, Homo sapien
gtgccatagcttcgggcactttgca

SEQ ID NO: 1928679 - DNA, 25 bp, Homo sapien
catagcttcgggcactttgcagccc

SEQ ID NO: 1928680 - DNA, 25 bp, Homo sapien
tagcttcgggcactttgcagcccgc

SEQ ID NO: 1928681 - DNA, 25 bp, Homo sapien
gccccacacgggagccagaggccat

SEQ ID NO: 1928682 - DNA, 25 bp, Homo sapien
cggccccgaggcctgcggctgtgag

SEQ ID NO: 1928683 - DNA, 25 bp, Homo sapien
gcccctcagaaaagggatgggcttg

SEQ ID NO: 1928684 - DNA, 25 bp, Homo sapien
cgaggcctgcggctgtgagccagcc

SEQ ID NO: 1928685 - DNA, 25 bp, Homo sapien
cagaaaagggatgggcttgtggtcc

SEQ ID NO: 1928686 - DNA, 25 bp, Homo sapien
ctgggagggtggcctcgtgccccct

SEQ ID NO: 1928687 - DNA, 25 bp, Homo sapien
tgggagggtggcctcgtgccccctc

SEQ ID NO: 1928688 - DNA, 25 bp, Homo sapien
cagctccagatgtcatttgctcacg

SEQ ID NO: 1928689 - DNA, 25 bp, Homo sapien
tctctaaaatattggagatcagctc

SEQ ID NO: 1928690 - DNA, 25 bp, Homo sapien
tggccatattgggtaagtttgagtc

SEQ ID NO: 1928691 - DNA, 25 bp, Homo sapien
cagtggccatattgggtaagtttga

SEQ ID NO: 1928692 - DNA, 25 bp, Homo sapien
ttgatgcccatagtaaattgctgct

SEQ ID NO: 1928693 - DNA, 25 bp, Homo sapien
gagtgttgtgatagccagcctccaa

SEQ ID NO: 1928694 - DNA, 25 bp, Homo sapien
cattcgacgtatctgtttgatgccc

SEQ ID NO: 1928695 - DNA, 25 bp, Homo sapien
tacagtagacgtgacaaaggtaact

SEQ ID NO: 1928696 - DNA, 25 bp, Homo sapien
acaaactcaagttcacgctgatctt

SEQ ID NO: 1928697 - DNA, 25 bp, Homo sapien
aaactcaagttcacgctgatctttg

SEQ ID NO: 1928698 - DNA, 25 bp, Homo sapien
cacgctgatctttgatgcaataaaa

SEQ ID NO: 1928699 - DNA, 25 bp, Homo sapien
gctgatctttgatgcaataaaaaat

SEQ ID NO: 1928700 - DNA, 25 bp, Homo sapien
gggcttaaagccagaggcgattctc

SEQ ID NO: 1928701 - DNA, 25 bp, Homo sapien
actgctgacatattctgtgtggtgg

SEQ ID NO: 1928702 - DNA, 25 bp, Homo sapien
tctgactgctgacatattctgtgtg

SEQ ID NO: 1928703 - DNA, 25 bp, Homo sapien
aggcgattctccataggtggcatgc

SEQ ID NO: 1928704 - DNA, 25 bp, Homo sapien
aaatagtttgctgattcacttgttc

SEQ ID NO: 1928705 - DNA, 25 bp, Homo sapien
tcctaaatagtttgctgattcactt

SEQ ID NO: 1928706 - DNA, 25 bp, Homo sapien
tttcctaaatagtttgctgattcac

SEQ ID NO: 1928707 - DNA, 25 bp, Homo sapien
ctaaatagtttgctgattcacttgt

SEQ ID NO: 1928708 - DNA, 25 bp, Homo sapien
agactgtgcttctatggttcgtcct

SEQ ID NO: 1928709 - DNA, 25 bp, Homo sapien
gaagactgtgcttctatggttcgtc

SEQ ID NO: 1928710 - DNA, 25 bp, Homo sapien
ttggaagacagctgaagactgtgct

SEQ ID NO: 1928711 - DNA, 25 bp, Homo sapien
ctgaagactgtgcttctatggttcg

SEQ ID NO: 1928712 - DNA, 25 bp, Homo sapien
tgtaatgcttgggtaagattagaaa

SEQ ID NO: 1928713 - DNA, 25 bp, Homo sapien
ttgtgtaatgcttgggtaagattag

SEQ ID NO: 1928714 - DNA, 25 bp, Homo sapien
gattagaaaggcaatgacctccaat

SEQ ID NO: 1928715 - DNA, 25 bp, Homo sapien
tagaaaggcaatgacctccaatcat

SEQ ID NO: 1928716 - DNA, 25 bp, Homo sapien
ggtcagctccagagcggcaatggag

SEQ ID NO: 1928717 - DNA, 25 bp, Homo sapien
tgcaactgatcacagatcctggttt

SEQ ID NO: 1928718 - DNA, 25 bp, Homo sapien
gagcggcaatggagggaaattccca

SEQ ID NO: 1928719 - DNA, 25 bp, Homo sapien
ttccaaggcctgcaactgatcacag

SEQ ID NO: 1928720 - DNA, 25 bp, Homo sapien
cagctgggcctacacttttgacaca

SEQ ID NO: 1928721 - DNA, 25 bp, Homo sapien
catgttcatgacaccgctgagtcct

SEQ ID NO: 1928722 - DNA, 25 bp, Homo sapien
agagatgagttctccggagctcgga

SEQ ID NO: 1928723 - DNA, 25 bp, Homo sapien
ggagctcggaaagctagtcttacaa

SEQ ID NO: 1928724 - DNA, 25 bp, Homo sapien
gaagagtattggtgctgagagccac

SEQ ID NO: 1928725 - DNA, 25 bp, Homo sapien
gagccacaggttccactttctatta

SEQ ID NO: 1928726 - DNA, 25 bp, Homo sapien
cagcagtaaatcctcaccacgggtt

SEQ ID NO: 1928727 - DNA, 25 bp, Homo sapien
gactgctgactgtgatactgcactc

SEQ ID NO: 1928728 - DNA, 25 bp, Homo sapien
gagatgtgctaactccatcctgctt

SEQ ID NO: 1928729 - DNA, 25 bp, Homo sapien
gatgtgctaactccatcctgctttc

SEQ ID NO: 1928730 - DNA, 25 bp, Homo sapien
agatgtgctaactccatcctgcttt

SEQ ID NO: 1928731 - DNA, 25 bp, Homo sapien
tgcaatggtgtgatcttggctcact

SEQ ID NO: 1928732 - DNA, 25 bp, Homo sapien
aacctccacctcccaggttcaagct

SEQ ID NO: 1928733 - DNA, 25 bp, Homo sapien
tctcgctgttttgcccaggttgaag

SEQ ID NO: 1928734 - DNA, 25 bp, Homo sapien
aagctattcttccacctcagccttc

SEQ ID NO: 1928735 - DNA, 25 bp, Homo sapien
gacaaaatccatctattatgttggt

SEQ ID NO: 1928736 - DNA, 25 bp, Homo sapien
catctattatgttggtaatgtttct

SEQ ID NO: 1928737 - DNA, 25 bp, Homo sapien
tacagaagtattgcatgtgtactgt

SEQ ID NO: 1928738 - DNA, 25 bp, Homo sapien
tgtgcccggccgatgatggctttaa

SEQ ID NO: 1928739 - DNA, 25 bp, Homo sapien
gagcacggagcataggataatacac

SEQ ID NO: 1928740 - DNA, 25 bp, Homo sapien
tccatgaaggcaggcatccgtctgt

SEQ ID NO: 1928741 - DNA, 25 bp, Homo sapien
tatgaaatgcgcgttggtgtggcca

SEQ ID NO: 1928742 - DNA, 25 bp, Homo sapien
cccaggctttgtgtaacggtgatct

SEQ ID NO: 1928743 - DNA, 25 bp, Homo sapien
ccctctcgccttttgttctctcaag

SEQ ID NO: 1928744 - DNA, 25 bp, Homo sapien
tccctctcgccttttgttctctcaa

SEQ ID NO: 1928745 - DNA, 25 bp, Homo sapien
cctctccctctcgccttttgttctc

SEQ ID NO: 1928746 - DNA, 25 bp, Homo sapien
tccaggtaactttgctgtgaagttc

SEQ ID NO: 1928747 - DNA, 25 bp, Homo sapien
tggaaagttccagtgaccctgtttc

SEQ ID NO: 1928748 - DNA, 25 bp, Homo sapien
gaattcaggctgtttgtcgagatca

SEQ ID NO: 1928749 - DNA, 25 bp, Homo sapien
tcagttctgcctgatctttggccag

SEQ ID NO: 1928750 - DNA, 25 bp, Homo sapien
gatgctgcaatattgggagttccaa

SEQ ID NO: 1928751 - DNA, 25 bp, Homo sapien
tgctgatacgtttattgatgctgca

SEQ ID NO: 1928752 - DNA, 25 bp, Homo sapien
aacctgagatgctctgtaatccaaa

SEQ ID NO: 1928753 - DNA, 25 bp, Homo sapien
caacagctccggaaataattgctga

SEQ ID NO: 1928754 - DNA, 25 bp, Homo sapien
tactgtaactcggtgacttcaaaca

SEQ ID NO: 1928755 - DNA, 25 bp, Homo sapien
caccaaagtcttggagaaactagcc

SEQ ID NO: 1928756 - DNA, 25 bp, Homo sapien
ctaagtacaatagacagctgcaggg

SEQ ID NO: 1928757 - DNA, 25 bp, Homo sapien
ggcttttacagacgcagtggagtta

SEQ ID NO: 1928758 - DNA, 25 bp, Homo sapien
tctgaggtttctgaactcggcgaca

SEQ ID NO: 1928759 - DNA, 25 bp, Homo sapien
ccagggctgataggcaccacaggtg

SEQ ID NO: 1928760 - DNA, 25 bp, Homo sapien
ggagctttgccagcggagacgacat

SEQ ID NO: 1928761 - DNA, 25 bp, Homo sapien
cacaggtgtgatgctcactccagag

SEQ ID NO: 1928762 - DNA, 25 bp, Homo sapien
tctccagctgctcagtgtgctaaag

SEQ ID NO: 1928763 - DNA, 25 bp, Homo sapien
ctccagctgctcagtgtgctaaaga

SEQ ID NO: 1928764 - DNA, 25 bp, Homo sapien
tgcagcacctatggggctccagtaa

SEQ ID NO: 1928765 - DNA, 25 bp, Homo sapien
gctccagtaattcagcaaagtcagt

SEQ ID NO: 1928766 - DNA, 25 bp, Homo sapien
tcagttcccaatagaagaccgtcat

SEQ ID NO: 1928767 - DNA, 25 bp, Homo sapien
aaagtcagttcccaatagaagaccg

SEQ ID NO: 1928768 - DNA, 25 bp, Homo sapien
tatagcaaagattcatgccccactt

SEQ ID NO: 1928769 - DNA, 25 bp, Homo sapien
ttatctattcatgtcggaaggatga

SEQ ID NO: 1928770 - DNA, 25 bp, Homo sapien
gagcaactcagagggaggcattccc

SEQ ID NO: 1928771 - DNA, 25 bp, Homo sapien
cacttccctgttgcacttgataggg

SEQ ID NO: 1928772 - DNA, 25 bp, Homo sapien
gctgatcttgcatgagccttcattt

SEQ ID NO: 1928773 - DNA, 25 bp, Homo sapien
cataacctggaccttgtgacttgct

SEQ ID NO: 1928774 - DNA, 25 bp, Homo sapien
tgtaggagaacaggaacgtgtcctc

SEQ ID NO: 1928775 - DNA, 25 bp, Homo sapien
ccttcaatggactctctgtgcctgt

SEQ ID NO: 1928776 - DNA, 25 bp, Homo sapien
tgcaagcttctggttggttgagcca

SEQ ID NO: 1928777 - DNA, 25 bp, Homo sapien
gaattctagccatcatctcatcttt

SEQ ID NO: 1928778 - DNA, 25 bp, Homo sapien
ctcattcaagaatccatatccagat

SEQ ID NO: 1928779 - DNA, 25 bp, Homo sapien
ccttccgcaaatgaattctagccat

SEQ ID NO: 1928780 - DNA, 25 bp, Homo sapien
tcagagacccgggcctcttccatct

SEQ ID NO: 1928781 - DNA, 25 bp, Homo sapien
catctttatgtttccctgatcatca

SEQ ID NO: 1928782 - DNA, 25 bp, Homo sapien
tccctgatcatcaaaaatggctact

SEQ ID NO: 1928783 - DNA, 25 bp, Homo sapien
tctcaatgcattttgagtaataacc

SEQ ID NO: 1928784 - DNA, 25 bp, Homo sapien
tagtgaagatatcttctcaatgcat

SEQ ID NO: 1928785 - DNA, 25 bp, Homo sapien
gcattttgagtaataaccaaggtaa

SEQ ID NO: 1928786 - DNA, 25 bp, Homo sapien
ggttagtgaagatatcttctcaatg

SEQ ID NO: 1928787 - DNA, 25 bp, Homo sapien
cgtgcccagcccaaatggtcagttt

SEQ ID NO: 1928788 - DNA, 25 bp, Homo sapien
gcccagcccaaatggtcagttttta

SEQ ID NO: 1928789 - DNA, 25 bp, Homo sapien
tcagaaaacctccaaaaccaagctg

SEQ ID NO: 1928790 - DNA, 25 bp, Homo sapien
cagaaaacctccaaaaccaagctgt

SEQ ID NO: 1928791 - DNA, 25 bp, Homo sapien
cctttgtgcatgtaaatattgaata

SEQ ID NO: 1928792 - DNA, 25 bp, Homo sapien
tccggacacaatagtataaagcccc

SEQ ID NO: 1928793 - DNA, 25 bp, Homo sapien
ttccggacacaatagtataaagccc

SEQ ID NO: 1928794 - DNA, 25 bp, Homo sapien
tatgaaaacctttgtgcatgtaaat

SEQ ID NO: 1928795 - DNA, 25 bp, Homo sapien
tgggaagttcttctactctagtgtc

SEQ ID NO: 1928796 - DNA, 25 bp, Homo sapien
cagcattgcacggaaggtcctgagc

SEQ ID NO: 1928797 - DNA, 25 bp, Homo sapien
tatctcaggctttgtgcctggagct

SEQ ID NO: 1928798 - DNA, 25 bp, Homo sapien
tggagctccattagaggcattcctg

SEQ ID NO: 1928799 - DNA, 25 bp, Homo sapien
tattcctaagaggatggggataagg

SEQ ID NO: 1928800 - DNA, 25 bp, Homo sapien
agtaaaacgtccatattcctaagag

SEQ ID NO: 1928801 - DNA, 25 bp, Homo sapien
tagtaaaacgtccatattcctaaga

SEQ ID NO: 1928802 - DNA, 25 bp, Homo sapien
acgtccatattcctaagaggatggg

SEQ ID NO: 1928803 - DNA, 25 bp, Homo sapien
caagttgtaagcctcattagatgca

SEQ ID NO: 1928804 - DNA, 25 bp, Homo sapien
gactcgaccgtaggaatggatcaaa

SEQ ID NO: 1928805 - DNA, 25 bp, Homo sapien
aaatggaattgattagactcgaccg

SEQ ID NO: 1928806 - DNA, 25 bp, Homo sapien
tagtagagcttaccacatagccttc

SEQ ID NO: 1928807 - DNA, 25 bp, Homo sapien
tatgaaaacataacctgggaggagc

SEQ ID NO: 1928808 - DNA, 25 bp, Homo sapien
ggagcctgacaactggcatcattgt

SEQ ID NO: 1928809 - DNA, 25 bp, Homo sapien
ggcattggccatagtggctccacca

SEQ ID NO: 1928810 - DNA, 25 bp, Homo sapien
agagataaccttctgccaagtcaag

SEQ ID NO: 1928811 - DNA, 25 bp, Homo sapien
gtcgtaagagtccttggctccctct

SEQ ID NO: 1928812 - DNA, 25 bp, Homo sapien
ttaacggtgatggttttgatctcag

SEQ ID NO: 1928813 - DNA, 25 bp, Homo sapien
cagtgtttaacggtgatggttttga

SEQ ID NO: 1928814 - DNA, 25 bp, Homo sapien
tcagtgaagaagtcgtaagagtcct

SEQ ID NO: 1928815 - DNA, 25 bp, Homo sapien
tagccgccagcccatacttaacgtt

SEQ ID NO: 1928816 - DNA, 25 bp, Homo sapien
gatgagccagcagttggtccagacc

SEQ ID NO: 1928817 - DNA, 25 bp, Homo sapien
gacgacacacgtcactggaccaaat

SEQ ID NO: 1928818 - DNA, 25 bp, Homo sapien
tccagaccaagccagactgcagctt

SEQ ID NO: 1928819 - DNA, 25 bp, Homo sapien
ctgttatcaccgtgggaagcataaa

SEQ ID NO: 1928820 - DNA, 25 bp, Homo sapien
gagctctcttgacgtaacttctgac

SEQ ID NO: 1928821 - DNA, 25 bp, Homo sapien
tggcagggaggctcaacttatccac

SEQ ID NO: 1928822 - DNA, 25 bp, Homo sapien
ataaagtagcctgcctggttcctgg

SEQ ID NO: 1928823 - DNA, 25 bp, Homo sapien
taaaaatcataattagcaatgtctt

SEQ ID NO: 1928824 - DNA, 25 bp, Homo sapien
gggtaaaaatcataattagcaatgt

SEQ ID NO: 1928825 - DNA, 25 bp, Homo sapien
ctgcgtgggtaaaaatcataattag

SEQ ID NO: 1928826 - DNA, 25 bp, Homo sapien
aaaatcataattagcaatgtcttac

SEQ ID NO: 1928827 - DNA, 25 bp, Homo sapien
gcatcatttgggcagtcacctttca

SEQ ID NO: 1928828 - DNA, 25 bp, Homo sapien
gcagaggcgctccaagcatcatttg

SEQ ID NO: 1928829 - DNA, 25 bp, Homo sapien
tttctaatcatctcggaaggaggga

SEQ ID NO: 1928830 - DNA, 25 bp, Homo sapien
gccctttaatagatgagcttccaga

SEQ ID NO: 1928831 - DNA, 25 bp, Homo sapien
ccatgtccaaaatctttcccctttg

SEQ ID NO: 1928832 - DNA, 25 bp, Homo sapien
catgtccaaaatctttcccctttga

SEQ ID NO: 1928833 - DNA, 25 bp, Homo sapien
gctttctgagatgagtgcaaactat

SEQ ID NO: 1928834 - DNA, 25 bp, Homo sapien
ggagctttctgagatgagtgcaaac

SEQ ID NO: 1928835 - DNA, 25 bp, Homo sapien
gagcctgctgaaaggtactctagga

SEQ ID NO: 1928836 - DNA, 25 bp, Homo sapien
cacaactgttggtctccctggacat

SEQ ID NO: 1928837 - DNA, 25 bp, Homo sapien
gcagggagccctagtgtccaaaaga

SEQ ID NO: 1928838 - DNA, 25 bp, Homo sapien
cacactgaagtactgcctgagcctg

SEQ ID NO: 1928839 - DNA, 25 bp, Homo sapien
aaatgctctgtctctcattggctgg

SEQ ID NO: 1928840 - DNA, 25 bp, Homo sapien
gctgatggggacaagtttccctcag

SEQ ID NO: 1928841 - DNA, 25 bp, Homo sapien
gtaaatgctctgtctctcattggct

SEQ ID NO: 1928842 - DNA, 25 bp, Homo sapien
cattggctggctgatggggacaagt

SEQ ID NO: 1928843 - DNA, 25 bp, Homo sapien
accctaaattgccatcaagggccag

SEQ ID NO: 1928844 - DNA, 25 bp, Homo sapien
tttcagagtctgattgtgctatgcc

SEQ ID NO: 1928845 - DNA, 25 bp, Homo sapien
tcatatccacaatgtttagactctg

SEQ ID NO: 1928846 - DNA, 25 bp, Homo sapien
tgctatgcctgtactgagcttctct

SEQ ID NO: 1928847 - DNA, 25 bp, Homo sapien
ttcatgtggatgcactttcaccggg

SEQ ID NO: 1928848 - DNA, 25 bp, Homo sapien
ccaaatgtgctttacttatcagagc

SEQ ID NO: 1928849 - DNA, 25 bp, Homo sapien
tccaaatgtgctttacttatcagag

SEQ ID NO: 1928850 - DNA, 25 bp, Homo sapien
aaatgtgctttacttatcagagcac

SEQ ID NO: 1928851 - DNA, 25 bp, Homo sapien
tctccaaatgtgctttacttatcag

SEQ ID NO: 1928852 - DNA, 25 bp, Homo sapien
tggacaaagatcctgctggtacaga

SEQ ID NO: 1928853 - DNA, 25 bp, Homo sapien
gggaatgccgactttccactttctg

SEQ ID NO: 1928854 - DNA, 25 bp, Homo sapien
aattcactatagatgctcttctgga

SEQ ID NO: 1928855 - DNA, 25 bp, Homo sapien
cctgctggtacagagacagatttca

SEQ ID NO: 1928856 - DNA, 25 bp, Homo sapien
tccagaagtccagatgcgtgtaggt

SEQ ID NO: 1928857 - DNA, 25 bp, Homo sapien
tataccttaaagacagaaccaacag

SEQ ID NO: 1928858 - DNA, 25 bp, Homo sapien
cctccgaagtgtgatgaagttggca

SEQ ID NO: 1928859 - DNA, 25 bp, Homo sapien
gaaaaggacccactgagttcaacag

SEQ ID NO: 1928860 - DNA, 25 bp, Homo sapien
ggttggcgtcctcaaagatgatggc

SEQ ID NO: 1928861 - DNA, 25 bp, Homo sapien
gacctgacggttgccggaatgcact

SEQ ID NO: 1928862 - DNA, 25 bp, Homo sapien
tcagctgggtgatccgctcagcggt

SEQ ID NO: 1928863 - DNA, 25 bp, Homo sapien
ctgggcccggttccaaacacaatat

SEQ ID NO: 1928864 - DNA, 25 bp, Homo sapien
gacacagatgtggttcgcattcctt

SEQ ID NO: 1928865 - DNA, 25 bp, Homo sapien
tgtggttcgcattccttccaatccc

SEQ ID NO: 1928866 - DNA, 25 bp, Homo sapien
gttgctctaaagcagatgacacaga

SEQ ID NO: 1928867 - DNA, 25 bp, Homo sapien
ttgctctaaagcagatgacacagat

SEQ ID NO: 1928868 - DNA, 25 bp, Homo sapien
ccgggcattctgtggatacaggaga

SEQ ID NO: 1928869 - DNA, 25 bp, Homo sapien
cattctgtggatacaggagagccca

SEQ ID NO: 1928870 - DNA, 25 bp, Homo sapien
ccaccgggcattctgtggatacagg

SEQ ID NO: 1928871 - DNA, 25 bp, Homo sapien
gagcccagcagtgcctctctatggg

SEQ ID NO: 1928872 - DNA, 25 bp, Homo sapien
tttatccaggagtttgcacaacatc

SEQ ID NO: 1928873 - DNA, 25 bp, Homo sapien
cagcaagtagagtggcaaattccag

SEQ ID NO: 1928874 - DNA, 25 bp, Homo sapien
catccacgcagtcactgaagtcagc

SEQ ID NO: 1928875 - DNA, 25 bp, Homo sapien
agctcactgggcttggctatcacag

SEQ ID NO: 1928876 - DNA, 25 bp, Homo sapien
cagaatgtgacgcattttgagattt

SEQ ID NO: 1928877 - DNA, 25 bp, Homo sapien
ccccattattttaacggtctggctg

SEQ ID NO: 1928878 - DNA, 25 bp, Homo sapien
tgggttgagacataaaatctcaagc

SEQ ID NO: 1928879 - DNA, 25 bp, Homo sapien
cactaaacagttccagaatgtgacg

SEQ ID NO: 1928880 - DNA, 25 bp, Homo sapien
tccttgaggacaatgccatagaatg

SEQ ID NO: 1928881 - DNA, 25 bp, Homo sapien
ccatagaatgttgtgagcatctgca

SEQ ID NO: 1928882 - DNA, 25 bp, Homo sapien
tctttgaggccaatggattttagaa

SEQ ID NO: 1928883 - DNA, 25 bp, Homo sapien
ataaccgggaggtgggctctcactg

SEQ ID NO: 1928884 - DNA, 25 bp, Homo sapien
tccatctgcgtgcactctgacgtgt

SEQ ID NO: 1928885 - DNA, 25 bp, Homo sapien
gaatgtccatggttcttgccagtgc

SEQ ID NO: 1928886 - DNA, 25 bp, Homo sapien
tgcatgcagcccaggtggtccatct

SEQ ID NO: 1928887 - DNA, 25 bp, Homo sapien
gaagcgaagaacctgaagttctgca

SEQ ID NO: 1928888 - DNA, 25 bp, Homo sapien
tggtctttagactcggcctgggcaa

SEQ ID NO: 1928889 - DNA, 25 bp, Homo sapien
cttggtctttagactcggcctgggc

SEQ ID NO: 1928890 - DNA, 25 bp, Homo sapien
ctttagactcggcctgggcaaactc

SEQ ID NO: 1928891 - DNA, 25 bp, Homo sapien
ggtctttagactcggcctgggcaaa

SEQ ID NO: 1928892 - DNA, 25 bp, Homo sapien
ttcaggacccgtgagcgctcctggg

SEQ ID NO: 1928893 - DNA, 25 bp, Homo sapien
gggactgctccagcaaatccgccac

SEQ ID NO: 1928894 - DNA, 25 bp, Homo sapien
tggcggccttgaccgcggcttcgat

SEQ ID NO: 1928895 - DNA, 25 bp, Homo sapien
aaaggcttctctggcggccttgacc

SEQ ID NO: 1928896 - DNA, 25 bp, Homo sapien
ccaccagctgcagccatgaggaagc

SEQ ID NO: 1928897 - DNA, 25 bp, Homo sapien
accagctgcagccatgaggaagccc

SEQ ID NO: 1928898 - DNA, 25 bp, Homo sapien
ctgcagccatgaggaagccccactg

SEQ ID NO: 1928899 - DNA, 25 bp, Homo sapien
cactgccagccagcaagaggagcat

SEQ ID NO: 1928900 - DNA, 25 bp, Homo sapien
cacatgcccatggatctaagcatca

SEQ ID NO: 1928901 - DNA, 25 bp, Homo sapien
taatgcaaatgtgctatgcacacag

SEQ ID NO: 1928902 - DNA, 25 bp, Homo sapien
gccatagataccaagtggtgcagct

SEQ ID NO: 1928903 - DNA, 25 bp, Homo sapien
gactgaggcatgcaaaagttcagct

SEQ ID NO: 1928904 - DNA, 25 bp, Homo sapien
tcaaaagtgcgtttgttccagccat

SEQ ID NO: 1928905 - DNA, 25 bp, Homo sapien
cactatttggcactctgcaatacac

SEQ ID NO: 1928906 - DNA, 25 bp, Homo sapien
gaatctatatatgagctacaaggta

SEQ ID NO: 1928907 - DNA, 25 bp, Homo sapien
tgcaatacacttcccctgttgatgg

SEQ ID NO: 1928908 - DNA, 25 bp, Homo sapien
tctttacgactgagcactcaggttg

SEQ ID NO: 1928909 - DNA, 25 bp, Homo sapien
tacgactgagcactcaggttgtccc

SEQ ID NO: 1928910 - DNA, 25 bp, Homo sapien
ctctttacgactgagcactcaggtt

SEQ ID NO: 1928911 - DNA, 25 bp, Homo sapien
tttacgactgagcactcaggttgtc

SEQ ID NO: 1928912 - DNA, 25 bp, Homo sapien
tctggagctggcgccgttgcctgtc

SEQ ID NO: 1928913 - DNA, 25 bp, Homo sapien
gacagaaggtagtctcaggcttttt

SEQ ID NO: 1928914 - DNA, 25 bp, Homo sapien
tcgctggagagtcgctgacagggac

SEQ ID NO: 1928915 - DNA, 25 bp, Homo sapien
tgagacttctgacaagcatggtgtg

SEQ ID NO: 1928916 - DNA, 25 bp, Homo sapien
tttacccaggatagcatgagagagg

SEQ ID NO: 1928917 - DNA, 25 bp, Homo sapien
ccacgtgacagtagaagaggacaga

SEQ ID NO: 1928918 - DNA, 25 bp, Homo sapien
tgtctgtcagttacagtggcctcct

SEQ ID NO: 1928919 - DNA, 25 bp, Homo sapien
cacaagatcagtcccagtggcagag

SEQ ID NO: 1928920 - DNA, 25 bp, Homo sapien
tgacccatgggtgaaacgtactccc

SEQ ID NO: 1928921 - DNA, 25 bp, Homo sapien
cctgaattattctggctggctccat

SEQ ID NO: 1928922 - DNA, 25 bp, Homo sapien
cactggacatgtgggtatcacctgc

SEQ ID NO: 1928923 - DNA, 25 bp, Homo sapien
gtactcccatttgcggtcacagaat

SEQ ID NO: 1928924 - DNA, 25 bp, Homo sapien
ggacaggggactcaagaccttgagt

SEQ ID NO: 1928925 - DNA, 25 bp, Homo sapien
caggggactcaagaccttgagtgca

SEQ ID NO: 1928926 - DNA, 25 bp, Homo sapien
gaggacaggggactcaagaccttga

SEQ ID NO: 1928927 - DNA, 25 bp, Homo sapien
tgaggacaggggactcaagaccttg

SEQ ID NO: 1928928 - DNA, 25 bp, Homo sapien
gcaagacttaaagctgtggtcagtg

SEQ ID NO: 1928929 - DNA, 25 bp, Homo sapien
ggtgtacacctcctccagtatggaa

SEQ ID NO: 1928930 - DNA, 25 bp, Homo sapien
agaggcaagacttaaagctgtggtc

SEQ ID NO: 1928931 - DNA, 25 bp, Homo sapien
gtaagagccttcagagcgaaggtgt

SEQ ID NO: 1928932 - DNA, 25 bp, Homo sapien
tatgtcgccccagctgatcttaact

SEQ ID NO: 1928933 - DNA, 25 bp, Homo sapien
tagattaggatagcttcaatggcac

SEQ ID NO: 1928934 - DNA, 25 bp, Homo sapien
cccgacctgtggagaatactttgta

SEQ ID NO: 1928935 - DNA, 25 bp, Homo sapien
catgtggcaacatggtttaggaaaa

SEQ ID NO: 1928936 - DNA, 25 bp, Homo sapien
taagccctcttatgaatggcacaga

SEQ ID NO: 1928937 - DNA, 25 bp, Homo sapien
catttgttgctgtgaacctttctca

SEQ ID NO: 1928938 - DNA, 25 bp, Homo sapien
tagcagctcgaacagactgagagac

SEQ ID NO: 1928939 - DNA, 25 bp, Homo sapien
tctagaacgttaagacataaatggc

SEQ ID NO: 1928940 - DNA, 25 bp, Homo sapien
cgcccggccgagagttctatataga

SEQ ID NO: 1928941 - DNA, 25 bp, Homo sapien
gagtttgagagcaaaaccagcacca

SEQ ID NO: 1928942 - DNA, 25 bp, Homo sapien
tgtgagctgctcgatctaaatggaa

SEQ ID NO: 1928943 - DNA, 25 bp, Homo sapien
tatgataccctgtcccctggttgga

SEQ ID NO: 1928944 - DNA, 25 bp, Homo sapien
gtgctttggccagaagtagagttca

SEQ ID NO: 1928945 - DNA, 25 bp, Homo sapien
caaactaaggcattttattagctgg

SEQ ID NO: 1928946 - DNA, 25 bp, Homo sapien
gagaaaactgcaaatacattgtgct

SEQ ID NO: 1928947 - DNA, 25 bp, Homo sapien
aaaggaacagcttccactaattcca

SEQ ID NO: 1928948 - DNA, 25 bp, Homo sapien
tttctttgccagttggcaacttaga

SEQ ID NO: 1928949 - DNA, 25 bp, Homo sapien
ttaacattagactttctttgccagt

SEQ ID NO: 1928950 - DNA, 25 bp, Homo sapien
tttgccagttggcaacttagaattt

SEQ ID NO: 1928951 - DNA, 25 bp, Homo sapien
tccatttattaacgtttcaaaggca

SEQ ID NO: 1928952 - DNA, 25 bp, Homo sapien
tgcacattgttcctttgacttaata

SEQ ID NO: 1928953 - DNA, 25 bp, Homo sapien
cattcttgaaacagaggttagctat

SEQ ID NO: 1928954 - DNA, 25 bp, Homo sapien
aaacatatcaattgcacattgttcc

SEQ ID NO: 1928955 - DNA, 25 bp, Homo sapien
cactgtatccagaaacgtggtagaa

SEQ ID NO: 1928956 - DNA, 25 bp, Homo sapien
tattgtagaaccaccgtaacgtagc

SEQ ID NO: 1928957 - DNA, 25 bp, Homo sapien
agctcaagagctattggtctttgtg

SEQ ID NO: 1928958 - DNA, 25 bp, Homo sapien
taacgtagcatgaacctccccagct

SEQ ID NO: 1928959 - DNA, 25 bp, Homo sapien
tgtagctctaccaatgcattctggc

SEQ ID NO: 1928960 - DNA, 25 bp, Homo sapien
aatgccctatgtctttcctagtaaa

SEQ ID NO: 1928961 - DNA, 25 bp, Homo sapien
tttgcaaagaggaatataatgccct

SEQ ID NO: 1928962 - DNA, 25 bp, Homo sapien
tcattccctcaagaaagtgagttca

SEQ ID NO: 1928963 - DNA, 25 bp, Homo sapien
ggacaatcaatctgttgttgctaag

SEQ ID NO: 1928964 - DNA, 25 bp, Homo sapien
aatgggtttcacttaccacaaagag

SEQ ID NO: 1928965 - DNA, 25 bp, Homo sapien
gacactaatcaatcgtttaataacg

SEQ ID NO: 1928966 - DNA, 25 bp, Homo sapien
tttgtgacttcacccgtgcttttgt

SEQ ID NO: 1928967 - DNA, 25 bp, Homo sapien
tgacagtttggtagtgtaacagcac

SEQ ID NO: 1928968 - DNA, 25 bp, Homo sapien
taataacggcgggttcactgacagt

SEQ ID NO: 1928969 - DNA, 25 bp, Homo sapien
taagtcccaccactctaatcaggtg

SEQ ID NO: 1928970 - DNA, 25 bp, Homo sapien
caattcagtgctactgcttggagtc

SEQ ID NO: 1928971 - DNA, 25 bp, Homo sapien
tctgtaaagatggagggtaacaaca

SEQ ID NO: 1928972 - DNA, 25 bp, Homo sapien
ttagttcagtgcataacctgtcagc

SEQ ID NO: 1928973 - DNA, 25 bp, Homo sapien
aaggaggtttcctcccaaggatgca

SEQ ID NO: 1928974 - DNA, 25 bp, Homo sapien
gttcaataaactaggcaaagaggaa

SEQ ID NO: 1928975 - DNA, 25 bp, Homo sapien
atcatgatcaaggaggtttcctccc

SEQ ID NO: 1928976 - DNA, 25 bp, Homo sapien
tccaggatcccttaatgataaaatg

SEQ ID NO: 1928977 - DNA, 25 bp, Homo sapien
caatattaaagatgaggattcgggc

SEQ ID NO: 1928978 - DNA, 25 bp, Homo sapien
cgagtgcaagctttaatgggtactt

SEQ ID NO: 1928979 - DNA, 25 bp, Homo sapien
tattaaagatgaggattcgggctct

SEQ ID NO: 1928980 - DNA, 25 bp, Homo sapien
gattcgggctctgaaacgagtgcaa

SEQ ID NO: 1928981 - DNA, 25 bp, Homo sapien
acaggttcatcatgcagagtgattc

SEQ ID NO: 1928982 - DNA, 25 bp, Homo sapien
accaaagtaagactaacatgatcgc

SEQ ID NO: 1928983 - DNA, 25 bp, Homo sapien
aagtaagactaacatgatcgcctgc

SEQ ID NO: 1928984 - DNA, 25 bp, Homo sapien
tgctgccgcccagtcgacaggttca

SEQ ID NO: 1928985 - DNA, 25 bp, Homo sapien
tcagaagtcagaggcttagttggaa

SEQ ID NO: 1928986 - DNA, 25 bp, Homo sapien
aaatctgctgtctcaacttaaggct

SEQ ID NO: 1928987 - DNA, 25 bp, Homo sapien
ggcttgtttagcaaaagcatcttgc

SEQ ID NO: 1928988 - DNA, 25 bp, Homo sapien
tgccactgactagttagggtaaggc

SEQ ID NO: 1928989 - DNA, 25 bp, Homo sapien
tataaccagcttctattttaccagt

SEQ ID NO: 1928990 - DNA, 25 bp, Homo sapien
agtcggtcaccagtttggatataac

SEQ ID NO: 1928991 - DNA, 25 bp, Homo sapien
aggaggcattgccagtagtcggtca

SEQ ID NO: 1928992 - DNA, 25 bp, Homo sapien
ggatataaccagcttctattttacc

SEQ ID NO: 1928993 - DNA, 25 bp, Homo sapien
tgcaaaacataccaaaatcttatgg

SEQ ID NO: 1928994 - DNA, 25 bp, Homo sapien
ctgcaaaacataccaaaatcttatg

SEQ ID NO: 1928995 - DNA, 25 bp, Homo sapien
caaaacataccaaaatcttatggtt

SEQ ID NO: 1928996 - DNA, 25 bp, Homo sapien
aacataccaaaatcttatggttcat

SEQ ID NO: 1928997 - DNA, 25 bp, Homo sapien
gatgggctaagagtcatgtgtcact

SEQ ID NO: 1928998 - DNA, 25 bp, Homo sapien
gccagtaaatattgtgaccggagaa

SEQ ID NO: 1928999 - DNA, 25 bp, Homo sapien
gcagttaagtaataggaagccagta

SEQ ID NO: 1929000 - DNA, 25 bp, Homo sapien
gggtctcataaatcacgcttagggt

SEQ ID NO: 1929001 - DNA, 25 bp, Homo sapien
ctttgaaaacatcggacacacataa

SEQ ID NO: 1929002 - DNA, 25 bp, Homo sapien
acacataatctaaaaggtttgtcaa

SEQ ID NO: 1929003 - DNA, 25 bp, Homo sapien
aaaaggtttgtcaatagatcgctgg

SEQ ID NO: 1929004 - DNA, 25 bp, Homo sapien
caatagatcgctggggaggcttaaa

SEQ ID NO: 1929005 - DNA, 25 bp, Homo sapien
gagttcacttgactgagatcttgtg

SEQ ID NO: 1929006 - DNA, 25 bp, Homo sapien
taataaacatagtcctttataccat

SEQ ID NO: 1929007 - DNA, 25 bp, Homo sapien
tgagaccacttgtaggaataaaacc

SEQ ID NO: 1929008 - DNA, 25 bp, Homo sapien
tagattttcaccactgagaccactt

SEQ ID NO: 1929009 - DNA, 25 bp, Homo sapien
caagttttccagtaatctcttgaaa

SEQ ID NO: 1929010 - DNA, 25 bp, Homo sapien
tgaaacctttcttgttgccaattaa

SEQ ID NO: 1929011 - DNA, 25 bp, Homo sapien
ttgaaacctttcttgttgccaatta

SEQ ID NO: 1929012 - DNA, 25 bp, Homo sapien
tgataaagatccaatttatttttaa

SEQ ID NO: 1929013 - DNA, 25 bp, Homo sapien
ctgataaagatccaatttattttta

SEQ ID NO: 1929014 - DNA, 25 bp, Homo sapien
ttattaactgcaactgcaagctgcg

SEQ ID NO: 1929015 - DNA, 25 bp, Homo sapien
cctgctggcatctacaactaaaaca

SEQ ID NO: 1929016 - DNA, 25 bp, Homo sapien
ccatgctctcgtgtttgtcctccag

SEQ ID NO: 1929017 - DNA, 25 bp, Homo sapien
cgtcactcccagagaacggaccaag

SEQ ID NO: 1929018 - DNA, 25 bp, Homo sapien
tggtttcaaactttgtcataccaac

SEQ ID NO: 1929019 - DNA, 25 bp, Homo sapien
cattaatgtaataactttggttgtg

SEQ ID NO: 1929020 - DNA, 25 bp, Homo sapien
atttggaatgaagtccttatggcct

SEQ ID NO: 1929021 - DNA, 25 bp, Homo sapien
gaatgaagtccttatggcctggagc

SEQ ID NO: 1929022 - DNA, 25 bp, Homo sapien
ttagactcctgttcatacttatgca

SEQ ID NO: 1929023 - DNA, 25 bp, Homo sapien
ggcccatcagagtacttttcccagc

SEQ ID NO: 1929024 - DNA, 25 bp, Homo sapien
tcgccagtttcatccaagacccatg

SEQ ID NO: 1929025 - DNA, 25 bp, Homo sapien
tatgcaaacgaagctttgccagcct

SEQ ID NO: 1929026 - DNA, 25 bp, Homo sapien
ctgacgatccagagggacaaagagc

SEQ ID NO: 1929027 - DNA, 25 bp, Homo sapien
tctgtccattccacccatggagaaa

SEQ ID NO: 1929028 - DNA, 25 bp, Homo sapien
gcatggctggctgacgatccagagg

SEQ ID NO: 1929029 - DNA, 25 bp, Homo sapien
gagaaactcagagtttccatgctgc

SEQ ID NO: 1929030 - DNA, 25 bp, Homo sapien
gaacatcggaagaagcaatggcatc

SEQ ID NO: 1929031 - DNA, 25 bp, Homo sapien
tcttctgatgcttgaatcgtgtggg

SEQ ID NO: 1929032 - DNA, 25 bp, Homo sapien
ttagaagcagtctcaagaacatcgg

SEQ ID NO: 1929033 - DNA, 25 bp, Homo sapien
gccttcacatctatttgctgcctca

SEQ ID NO: 1929034 - DNA, 25 bp, Homo sapien
cctgtaatagtacaacttggttggc

SEQ ID NO: 1929035 - DNA, 25 bp, Homo sapien
gactaacccagaataggctaagtgc

SEQ ID NO: 1929036 - DNA, 25 bp, Homo sapien
ggctaagtgctatccctattataaa

SEQ ID NO: 1929037 - DNA, 25 bp, Homo sapien
gaatcacactacgtagaaacctatg

SEQ ID NO: 1929038 - DNA, 25 bp, Homo sapien
tctctttcttacagaagcaacagtg

SEQ ID NO: 1929039 - DNA, 25 bp, Homo sapien
aattgaaacagtctctttcttacag

SEQ ID NO: 1929040 - DNA, 25 bp, Homo sapien
tttcttacagaagcaacagtgattt

SEQ ID NO: 1929041 - DNA, 25 bp, Homo sapien
gatatattatgcgaaattgaaacag

SEQ ID NO: 1929042 - DNA, 25 bp, Homo sapien
cagtcattttagcaacttttggcac

SEQ ID NO: 1929043 - DNA, 25 bp, Homo sapien
tgcttctttccagatacagtcattt

SEQ ID NO: 1929044 - DNA, 25 bp, Homo sapien
caggcacttcaaatcccatagtttg

SEQ ID NO: 1929045 - DNA, 25 bp, Homo sapien
ggcacaatttcagattcacttcgcg

SEQ ID NO: 1929046 - DNA, 25 bp, Homo sapien
agaggtcacaaggtagtttctgcac

SEQ ID NO: 1929047 - DNA, 25 bp, Homo sapien
taagtttcagtattaagaggtcaca

SEQ ID NO: 1929048 - DNA, 25 bp, Homo sapien
tgttaagtttcagtattaagaggtc

SEQ ID NO: 1929049 - DNA, 25 bp, Homo sapien
tctgcactgagccttgttctgacat

SEQ ID NO: 1929050 - DNA, 25 bp, Homo sapien
gctttgtccagatcacgattttgtg

SEQ ID NO: 1929051 - DNA, 25 bp, Homo sapien
gtttaagtgaggttaaccatcatta

SEQ ID NO: 1929052 - DNA, 25 bp, Homo sapien
aatatacatagttaaagcctagcag

SEQ ID NO: 1929053 - DNA, 25 bp, Homo sapien
catcattaacatctactcagatact

SEQ ID NO: 1929054 - DNA, 25 bp, Homo sapien
caacataaagaatagaaacgcatag

SEQ ID NO: 1929055 - DNA, 25 bp, Homo sapien
tagagatgtgaaacactaatgtaga

SEQ ID NO: 1929056 - DNA, 25 bp, Homo sapien
aaactgttgcctagggataatgttc

SEQ ID NO: 1929057 - DNA, 25 bp, Homo sapien
tgcaatccaaaccatcaagttcggt

SEQ ID NO: 1929058 - DNA, 25 bp, Homo sapien
catgttcaatgcactagggacacaa

SEQ ID NO: 1929059 - DNA, 25 bp, Homo sapien
gaaagtacaccacctcggctatgga

SEQ ID NO: 1929060 - DNA, 25 bp, Homo sapien
tgttggactagaaataggacagcct

SEQ ID NO: 1929061 - DNA, 25 bp, Homo sapien
ttttcagggacacaaggtaattgcc

SEQ ID NO: 1929062 - DNA, 25 bp, Homo sapien
gaaccattatacgtaagctcctaaa

SEQ ID NO: 1929063 - DNA, 25 bp, Homo sapien
tcttcttccggaatgcttagtggca

SEQ ID NO: 1929064 - DNA, 25 bp, Homo sapien
tcaagttgacatgatactggaacca

SEQ ID NO: 1929065 - DNA, 25 bp, Homo sapien
gacaaggcctgctgtatcacatact

SEQ ID NO: 1929066 - DNA, 25 bp, Homo sapien
cagcataggtaaagtggcaagatcc

SEQ ID NO: 1929067 - DNA, 25 bp, Homo sapien
ttcgagaccagcataggtaaagtgg

SEQ ID NO: 1929068 - DNA, 25 bp, Homo sapien
tcagcctattgccaatccaaaaaaa

SEQ ID NO: 1929069 - DNA, 25 bp, Homo sapien
taagaataatgaacaggccgggtgg

SEQ ID NO: 1929070 - DNA, 25 bp, Homo sapien
gtcatctctgcaattacatcaccaa

SEQ ID NO: 1929071 - DNA, 25 bp, Homo sapien
gaaattcatattaatccctccctgt

SEQ ID NO: 1929072 - DNA, 25 bp, Homo sapien
taaagagtgtttctatgtgagtcct

SEQ ID NO: 1929073 - DNA, 25 bp, Homo sapien
tcatcacaacctatacttaaagagt

SEQ ID NO: 1929074 - DNA, 25 bp, Homo sapien
catgtacatgcctgacagaccagca

SEQ ID NO: 1929075 - DNA, 25 bp, Homo sapien
tttaccaaggatcgatggccaaggg

SEQ ID NO: 1929076 - DNA, 25 bp, Homo sapien
caatggtccacatacagattcaggg

SEQ ID NO: 1929077 - DNA, 25 bp, Homo sapien
tagtgccaacaatcatcacaaggag

SEQ ID NO: 1929078 - DNA, 25 bp, Homo sapien
tctccatcattttatgcaaagggcc

SEQ ID NO: 1929079 - DNA, 25 bp, Homo sapien
gcaaagggccattaattcctaagta

SEQ ID NO: 1929080 - DNA, 25 bp, Homo sapien
tgcacagtaaagtagctgccagaga

SEQ ID NO: 1929081 - DNA, 25 bp, Homo sapien
atatttactaggaaaagaccagcct

SEQ ID NO: 1929082 - DNA, 25 bp, Homo sapien
tgtatttcaacaatctccacagtac

SEQ ID NO: 1929083 - DNA, 25 bp, Homo sapien
aacatctcagttatgctgtgccaca

SEQ ID NO: 1929084 - DNA, 25 bp, Homo sapien
tatcaactaatcaactgacctacga

SEQ ID NO: 1929085 - DNA, 25 bp, Homo sapien
caagtgctggcattttcgtttaaga

SEQ ID NO: 1929086 - DNA, 25 bp, Homo sapien
agtgggtaacgaagacacagtgttg

SEQ ID NO: 1929087 - DNA, 25 bp, Homo sapien
tacaatgtcatcaggtgatgctgat

SEQ ID NO: 1929088 - DNA, 25 bp, Homo sapien
tcaagggtgcgtcgcttgcagcttt

SEQ ID NO: 1929089 - DNA, 25 bp, Homo sapien
gaagacacagtgttgaggcaaaagc

SEQ ID NO: 1929090 - DNA, 25 bp, Homo sapien
tgaaatgccaatgacgacagagatc

SEQ ID NO: 1929091 - DNA, 25 bp, Homo sapien
tttatgaaatgccaatgacgacaga

SEQ ID NO: 1929092 - DNA, 25 bp, Homo sapien
tttgaatctattccaggagacctca

SEQ ID NO: 1929093 - DNA, 25 bp, Homo sapien
tcagataaactgacctcaaaggact

SEQ ID NO: 1929094 - DNA, 25 bp, Homo sapien
agttcagttagggatggactttcac

SEQ ID NO: 1929095 - DNA, 25 bp, Homo sapien
ttcagttagggatggactttcacac

SEQ ID NO: 1929096 - DNA, 25 bp, Homo sapien
cagttagggatggactttcacactg

SEQ ID NO: 1929097 - DNA, 25 bp, Homo sapien
aaacagttcagttagggatggactt

SEQ ID NO: 1929098 - DNA, 25 bp, Homo sapien
tgcatgaggtctcaacaaatcggca

SEQ ID NO: 1929099 - DNA, 25 bp, Homo sapien
taaagaattattcggtgttgtgccc

SEQ ID NO: 1929100 - DNA, 25 bp, Homo sapien
catgaggtctcaacaaatcggcatc

SEQ ID NO: 1929101 - DNA, 25 bp, Homo sapien
gccctttatgattatggtctttaaa

SEQ ID NO: 1929102 - DNA, 25 bp, Homo sapien
cttttgctatctttcctgtagatac

SEQ ID NO: 1929103 - DNA, 25 bp, Homo sapien
ttcaaactctgcactctatcttgtt

SEQ ID NO: 1929104 - DNA, 25 bp, Homo sapien
tatttcatctggcacagcatctcca

SEQ ID NO: 1929105 - DNA, 25 bp, Homo sapien
caaactctgcactctatcttgttcc

SEQ ID NO: 1929106 - DNA, 25 bp, Homo sapien
tggcacagcatctccaagtacctct

SEQ ID NO: 1929107 - DNA, 25 bp, Homo sapien
tacagctgtactagaatattcaact

SEQ ID NO: 1929108 - DNA, 25 bp, Homo sapien
tctctttggcaaaaattatctctaa

SEQ ID NO: 1929109 - DNA, 25 bp, Homo sapien
tctcctgaataatagtgactaatgt

SEQ ID NO: 1929110 - DNA, 25 bp, Homo sapien
ggtcaaaagctatactaaatggtgc

SEQ ID NO: 1929111 - DNA, 25 bp, Homo sapien
tcataatcatattcttccacaggct

SEQ ID NO: 1929112 - DNA, 25 bp, Homo sapien
taatcatattcttccacaggctcaa

SEQ ID NO: 1929113 - DNA, 25 bp, Homo sapien
atggtttgaaacagaattggaagat

SEQ ID NO: 1929114 - DNA, 25 bp, Homo sapien
tcatattcttccacaggctcaacgg

SEQ ID NO: 1929115 - DNA, 25 bp, Homo sapien
tctctaagaggacaacttttttcac

SEQ ID NO: 1929116 - DNA, 25 bp, Homo sapien
ctctataggtggagtggtttgtcct

SEQ ID NO: 1929117 - DNA, 25 bp, Homo sapien
tgtgcaagtagataacaacactggt

SEQ ID NO: 1929118 - DNA, 25 bp, Homo sapien
taaggtcagcatggctaaatagcag

SEQ ID NO: 1929119 - DNA, 25 bp, Homo sapien
gttgacggcgaaatacaataatcat

SEQ ID NO: 1929120 - DNA, 25 bp, Homo sapien
ctggccgtagagatcatcatcttca

SEQ ID NO: 1929121 - DNA, 25 bp, Homo sapien
ctgttgacggcgaaatacaataatc

SEQ ID NO: 1929122 - DNA, 25 bp, Homo sapien
tctacagactggccgtagagatcat

SEQ ID NO: 1929123 - DNA, 25 bp, Homo sapien
tcatcgtagttatagcctcgaacat

SEQ ID NO: 1929124 - DNA, 25 bp, Homo sapien
catcgtagttatagcctcgaacatt

SEQ ID NO: 1929125 - DNA, 25 bp, Homo sapien
tcgtagttatagcctcgaacattcc

SEQ ID NO: 1929126 - DNA, 25 bp, Homo sapien
cttcatcgtagttatagcctcgaac

SEQ ID NO: 1929127 - DNA, 25 bp, Homo sapien
cggagagggcgtttgccacagcccc

SEQ ID NO: 1929128 - DNA, 25 bp, Homo sapien
tggagaacccctatgcgccatcttg

SEQ ID NO: 1929129 - DNA, 25 bp, Homo sapien
tagatactgataaggcgccaactgc

SEQ ID NO: 1929130 - DNA, 25 bp, Homo sapien
caagcgcgacgtcttagctgtgcac

SEQ ID NO: 1929131 - DNA, 25 bp, Homo sapien
ttgccaaagttacccatggctgctg

SEQ ID NO: 1929132 - DNA, 25 bp, Homo sapien
gccccttggcaagggtgtctggaat

SEQ ID NO: 1929133 - DNA, 25 bp, Homo sapien
gtctggaatggccacttgacatccc

SEQ ID NO: 1929134 - DNA, 25 bp, Homo sapien
gaatggccacttgacatccccagca

SEQ ID NO: 1929135 - DNA, 25 bp, Homo sapien
gcagagcattaaggcaaacacaggg

SEQ ID NO: 1929136 - DNA, 25 bp, Homo sapien
taaagtagactgtgggaagaccctg

SEQ ID NO: 1929137 - DNA, 25 bp, Homo sapien
gcttacgtaatctgtgaggcccagt

SEQ ID NO: 1929138 - DNA, 25 bp, Homo sapien
taaactgcagtgagaaactacggaa

SEQ ID NO: 1929139 - DNA, 25 bp, Homo sapien
aaaagcaggaaagcagaggagtcat

SEQ ID NO: 1929140 - DNA, 25 bp, Homo sapien
gaaagcagaggagtcatctctacac

SEQ ID NO: 1929141 - DNA, 25 bp, Homo sapien
aggaaagcagaggagtcatctctac

SEQ ID NO: 1929142 - DNA, 25 bp, Homo sapien
ctaaaagcaggaaagcagaggagtc

SEQ ID NO: 1929143 - DNA, 25 bp, Homo sapien
gtgacaatgacaaagggcagttttg

SEQ ID NO: 1929144 - DNA, 25 bp, Homo sapien
tttgtccatcgcaaacacgggcctc

SEQ ID NO: 1929145 - DNA, 25 bp, Homo sapien
ctctggaaaagagcacccattgtga

SEQ ID NO: 1929146 - DNA, 25 bp, Homo sapien
gaaaagagcacccattgtgacaatg

SEQ ID NO: 1929147 - DNA, 25 bp, Homo sapien
gatctaacaacaggaagccagcgga

SEQ ID NO: 1929148 - DNA, 25 bp, Homo sapien
tgagggtaggagaccttgtcagact

SEQ ID NO: 1929149 - DNA, 25 bp, Homo sapien
gaaagcttcatggtcacgccacgta

SEQ ID NO: 1929150 - DNA, 25 bp, Homo sapien
ccacgtatgggatgctcggcagctg

SEQ ID NO: 1929151 - DNA, 25 bp, Homo sapien
tctgcaacttctagataagtaaatt

SEQ ID NO: 1929152 - DNA, 25 bp, Homo sapien
ttttttgatttatcaggaagtgtct

SEQ ID NO: 1929153 - DNA, 25 bp, Homo sapien
tggtctctcagtcaattcgattcta

SEQ ID NO: 1929154 - DNA, 25 bp, Homo sapien
gctgtatatcctgatcacgctgact

SEQ ID NO: 1929155 - DNA, 25 bp, Homo sapien
tcgtttatcgttacaggaataggaa

SEQ ID NO: 1929156 - DNA, 25 bp, Homo sapien
aatgattggctttatgtcgtttatc

SEQ ID NO: 1929157 - DNA, 25 bp, Homo sapien
acaggcatgtagagtgctcagtgac

SEQ ID NO: 1929158 - DNA, 25 bp, Homo sapien
ttttttccaataccgcacctgtgct

SEQ ID NO: 1929159 - DNA, 25 bp, Homo sapien
ggtttgagaatatctagaagaatcc

SEQ ID NO: 1929160 - DNA, 25 bp, Homo sapien
tctagaagaatccaggctccaacaa

SEQ ID NO: 1929161 - DNA, 25 bp, Homo sapien
gaagaatccaggctccaacaataca

SEQ ID NO: 1929162 - DNA, 25 bp, Homo sapien
gaatatctagaagaatccaggctcc

SEQ ID NO: 1929163 - DNA, 25 bp, Homo sapien
tggctgtgaagccacagctgccgta

SEQ ID NO: 1929164 - DNA, 25 bp, Homo sapien
tttcttcttacacctgtagcctacg

SEQ ID NO: 1929165 - DNA, 25 bp, Homo sapien
tcttacacctgtagcctacggtcat

SEQ ID NO: 1929166 - DNA, 25 bp, Homo sapien
gccatccagtctcttctgtgatttg

SEQ ID NO: 1929167 - DNA, 25 bp, Homo sapien
tccccatgccatccagtctcttctg

SEQ ID NO: 1929168 - DNA, 25 bp, Homo sapien
actaatcaggtcttgtgatgtttgc

SEQ ID NO: 1929169 - DNA, 25 bp, Homo sapien
ttttctgatgtctcaacttgactgc

SEQ ID NO: 1929170 - DNA, 25 bp, Homo sapien
aaagcgtgaagatccactaatcagg

SEQ ID NO: 1929171 - DNA, 25 bp, Homo sapien
tgttcagctttagggaatccatctt

SEQ ID NO: 1929172 - DNA, 25 bp, Homo sapien
aagaatcggcgccatcaagaacttt

SEQ ID NO: 1929173 - DNA, 25 bp, Homo sapien
tttcgcctgccgatctcaatacaca

SEQ ID NO: 1929174 - DNA, 25 bp, Homo sapien
tataattaaagcagagttgaagagg

SEQ ID NO: 1929175 - DNA, 25 bp, Homo sapien
taaagcagagttgaagaggattgtc

SEQ ID NO: 1929176 - DNA, 25 bp, Homo sapien
caactggaccaactgagagagagac

SEQ ID NO: 1929177 - DNA, 25 bp, Homo sapien
caaatgaagttagtctcatcactcc

SEQ ID NO: 1929178 - DNA, 25 bp, Homo sapien
tgggctggtagagatttgaagattc

SEQ ID NO: 1929179 - DNA, 25 bp, Homo sapien
tcctgctttattacctctgggctgg

SEQ ID NO: 1929180 - DNA, 25 bp, Homo sapien
acattaaaccccactacaaagtcag

SEQ ID NO: 1929181 - DNA, 25 bp, Homo sapien
cattaaaccccactacaaagtcaga

SEQ ID NO: 1929182 - DNA, 25 bp, Homo sapien
aaccccactacaaagtcagactcct

SEQ ID NO: 1929183 - DNA, 25 bp, Homo sapien
taaaccccactacaaagtcagactc

SEQ ID NO: 1929184 - DNA, 25 bp, Homo sapien
actgtaggtctgtgggcccatccat

SEQ ID NO: 1929185 - DNA, 25 bp, Homo sapien
agaacacactccctgatcgtgctat

SEQ ID NO: 1929186 - DNA, 25 bp, Homo sapien
cagaactaaccattttcggagtgtg

SEQ ID NO: 1929187 - DNA, 25 bp, Homo sapien
gagtgtgttattggccaagattgcc

SEQ ID NO: 1929188 - DNA, 25 bp, Homo sapien
tttgtttgggcctgagagtgtttaa

SEQ ID NO: 1929189 - DNA, 25 bp, Homo sapien
tgggcctgagagtgtttaaaaagat

SEQ ID NO: 1929190 - DNA, 25 bp, Homo sapien
acatgttttgtttgggcctgagagt

SEQ ID NO: 1929191 - DNA, 25 bp, Homo sapien
gtttggacattttacagaacttcta

SEQ ID NO: 1929192 - DNA, 25 bp, Homo sapien
catcctgcatggcagcaaacagtca

SEQ ID NO: 1929193 - DNA, 25 bp, Homo sapien
ttcactaacattgggcccacatcct

SEQ ID NO: 1929194 - DNA, 25 bp, Homo sapien
tgcatggcagcaaacagtcaaagct

SEQ ID NO: 1929195 - DNA, 25 bp, Homo sapien
aatggaagattcactaacattgggc

SEQ ID NO: 1929196 - DNA, 25 bp, Homo sapien
taaccacaccgggtctagcaggtgg

SEQ ID NO: 1929197 - DNA, 25 bp, Homo sapien
cgtttcttgcaagggcgagcgtcaa

SEQ ID NO: 1929198 - DNA, 25 bp, Homo sapien
caactcggcagggattatattaacc

SEQ ID NO: 1929199 - DNA, 25 bp, Homo sapien
ggagtcgagtgcatcaaccctgaaa

SEQ ID NO: 1929200 - DNA, 25 bp, Homo sapien
cagagtcttggccagcaatctatta

SEQ ID NO: 1929201 - DNA, 25 bp, Homo sapien
gtcccctgaagcatatgtagccctg

SEQ ID NO: 1929202 - DNA, 25 bp, Homo sapien
tgtagccctgaatgacgtggccttt

SEQ ID NO: 1929203 - DNA, 25 bp, Homo sapien
tcagtcccagaacgaaacctcagga

SEQ ID NO: 1929204 - DNA, 25 bp, Homo sapien
cagagacactataatgatgaagacc

SEQ ID NO: 1929205 - DNA, 25 bp, Homo sapien
gatttctgcaggagccaaatttggt

SEQ ID NO: 1929206 - DNA, 25 bp, Homo sapien
ttgtcacagtgaggctctttgggct

SEQ ID NO: 1929207 - DNA, 25 bp, Homo sapien
tgtgcggcacctcatgaccatattg

SEQ ID NO: 1929208 - DNA, 25 bp, Homo sapien
tttcctaaccacgttgatttggcag

SEQ ID NO: 1929209 - DNA, 25 bp, Homo sapien
gatcaaagcaactctaactcctgag

SEQ ID NO: 1929210 - DNA, 25 bp, Homo sapien
tatgtgcacatgctagttcgaccac

SEQ ID NO: 1929211 - DNA, 25 bp, Homo sapien
gcaaataggacagttcttcagttct

SEQ ID NO: 1929212 - DNA, 25 bp, Homo sapien
aaggtgcatgatcgtccaccagggc

SEQ ID NO: 1929213 - DNA, 25 bp, Homo sapien
ggcaccattctggataatgttaaga

SEQ ID NO: 1929214 - DNA, 25 bp, Homo sapien
atgttaagaacctcttagaatttgc

SEQ ID NO: 1929215 - DNA, 25 bp, Homo sapien
tgaagaaagcgcctcgccagcaagg

SEQ ID NO: 1929216 - DNA, 25 bp, Homo sapien
tgaagaacataggaactgcgcaatt

SEQ ID NO: 1929217 - DNA, 25 bp, Homo sapien
taatccaatttgacctaattaggca

SEQ ID NO: 1929218 - DNA, 25 bp, Homo sapien
gggattttagccaaaccatctagac

SEQ ID NO: 1929219 - DNA, 25 bp, Homo sapien
aatgtttgcaactggtgtaatgcag

SEQ ID NO: 1929220 - DNA, 25 bp, Homo sapien
tgaaggaaatatctaatatgctgct

SEQ ID NO: 1929221 - DNA, 25 bp, Homo sapien
tagaacttctacagtgatgtgaagg

SEQ ID NO: 1929222 - DNA, 25 bp, Homo sapien
tactctctagtccagtgctgtctaa

SEQ ID NO: 1929223 - DNA, 25 bp, Homo sapien
tgtacttccagatgtgtctctaaaa

SEQ ID NO: 1929224 - DNA, 25 bp, Homo sapien
gactgtttatagttcacttctgccc

SEQ ID NO: 1929225 - DNA, 25 bp, Homo sapien
gccagcagatactgggtgaagttgc

SEQ ID NO: 1929226 - DNA, 25 bp, Homo sapien
gaaccgtttttgttcagcttgatga

SEQ ID NO: 1929227 - DNA, 25 bp, Homo sapien
aggataagcgagatgactccccggc

SEQ ID NO: 1929228 - DNA, 25 bp, Homo sapien
caggtaaccttgagtatggcgccta

SEQ ID NO: 1929229 - DNA, 25 bp, Homo sapien
aaccttgagtatggcgcctaaatcc

SEQ ID NO: 1929230 - DNA, 25 bp, Homo sapien
caggggtgtggtcccatgggtgaca

SEQ ID NO: 1929231 - DNA, 25 bp, Homo sapien
agtatggcgcctaaatcctctcttc

SEQ ID NO: 1929232 - DNA, 25 bp, Homo sapien
tacattgtacccgttcattcctgta

SEQ ID NO: 1929233 - DNA, 25 bp, Homo sapien
aggctgtgagtgtatttatcgttgg

SEQ ID NO: 1929234 - DNA, 25 bp, Homo sapien
catagtggtcaaagtcgaggctgtg

SEQ ID NO: 1929235 - DNA, 25 bp, Homo sapien
tttatcgttggaataatgtacattg

SEQ ID NO: 1929236 - DNA, 25 bp, Homo sapien
ggccctgctgggtctatagaatgag

SEQ ID NO: 1929237 - DNA, 25 bp, Homo sapien
gctgggtctatagaatgagcttctt

SEQ ID NO: 1929238 - DNA, 25 bp, Homo sapien
ttgtctgacgctcctgttgccatcc

SEQ ID NO: 1929239 - DNA, 25 bp, Homo sapien
gagcttctttgtctgacgctcctgt

SEQ ID NO: 1929240 - DNA, 25 bp, Homo sapien
tagccagtcactgccttaagaacat

SEQ ID NO: 1929241 - DNA, 25 bp, Homo sapien
gagatatgacggtgtacttactgcc

SEQ ID NO: 1929242 - DNA, 25 bp, Homo sapien
gacagaaactgtggttgatagccag

SEQ ID NO: 1929243 - DNA, 25 bp, Homo sapien
atttgatgcaagatggccagcactg

SEQ ID NO: 1929244 - DNA, 25 bp, Homo sapien
cagcctgaaggaggtcgaaagctga

SEQ ID NO: 1929245 - DNA, 25 bp, Homo sapien
gcctccattttgaccctgtgagacc

SEQ ID NO: 1929246 - DNA, 25 bp, Homo sapien
agataagcgcgccatccagcatctg

SEQ ID NO: 1929247 - DNA, 25 bp, Homo sapien
tcttcttctcaaggacgtccagata

SEQ ID NO: 1929248 - DNA, 25 bp, Homo sapien
agagagcctgtcctatccacgtcgt

SEQ ID NO: 1929249 - DNA, 25 bp, Homo sapien
taatggtcatccgttgtgtcatgga

SEQ ID NO: 1929250 - DNA, 25 bp, Homo sapien
taagcgtgtgtctcacactcgcagg

SEQ ID NO: 1929251 - DNA, 25 bp, Homo sapien
tatataacttgtatgacaccctccc

SEQ ID NO: 1929252 - DNA, 25 bp, Homo sapien
cgccttggtgaagccaagggctaag

SEQ ID NO: 1929253 - DNA, 25 bp, Homo sapien
tggtgaagccaagggctaagtttcg

SEQ ID NO: 1929254 - DNA, 25 bp, Homo sapien
ccaagggctaagtttcggggcactg

SEQ ID NO: 1929255 - DNA, 25 bp, Homo sapien
ccttggtgaagccaagggctaagtt

SEQ ID NO: 1929256 - DNA, 25 bp, Homo sapien
cacacccagatacacacacctgaga

SEQ ID NO: 1929257 - DNA, 25 bp, Homo sapien
gagcaatcggctctgtacgcccagc

SEQ ID NO: 1929258 - DNA, 25 bp, Homo sapien
agcaatcggctctgtacgcccagct

SEQ ID NO: 1929259 - DNA, 25 bp, Homo sapien
aatcggctctgtacgcccagctctg

SEQ ID NO: 1929260 - DNA, 25 bp, Homo sapien
ttgtggttagataaatcctcagaaa

SEQ ID NO: 1929261 - DNA, 25 bp, Homo sapien
caatgtatttgtggttagataaatc

SEQ ID NO: 1929262 - DNA, 25 bp, Homo sapien
cagctgctatagactagtttattat

SEQ ID NO: 1929263 - DNA, 25 bp, Homo sapien
tgcagaaatggcaacgctccagcag

SEQ ID NO: 1929264 - DNA, 25 bp, Homo sapien
tggatctattgcttggagggcactg

SEQ ID NO: 1929265 - DNA, 25 bp, Homo sapien
gactgggctttcagtagagccaaat

SEQ ID NO: 1929266 - DNA, 25 bp, Homo sapien
taaccctagtcttactttgtcagcg

SEQ ID NO: 1929267 - DNA, 25 bp, Homo sapien
tttaatgccgtacatcatcaaatgg

SEQ ID NO: 1929268 - DNA, 25 bp, Homo sapien
gggaacattgttgccagtccagcca

SEQ ID NO: 1929269 - DNA, 25 bp, Homo sapien
ttaaagttctacacagcgggacatg

SEQ ID NO: 1929270 - DNA, 25 bp, Homo sapien
tactgagactgttttgaatgcgcca

SEQ ID NO: 1929271 - DNA, 25 bp, Homo sapien
tctacatgtgcagggataagagcca

SEQ ID NO: 1929272 - DNA, 25 bp, Homo sapien
gtaccaatactttgaccaacaatag

SEQ ID NO: 1929273 - DNA, 25 bp, Homo sapien
tttcacctctgtgcatttcggcagc

SEQ ID NO: 1929274 - DNA, 25 bp, Homo sapien
gaacaagaagtagtggatcctttct

SEQ ID NO: 1929275 - DNA, 25 bp, Homo sapien
ggccacgttgatttttccacccaca

SEQ ID NO: 1929276 - DNA, 25 bp, Homo sapien
gaagagcaggcaatcagagtatatg

SEQ ID NO: 1929277 - DNA, 25 bp, Homo sapien
tcattagcaattgtttaaggcctgc

SEQ ID NO: 1929278 - DNA, 25 bp, Homo sapien
ggcaacagcacaggtaataaaggac

SEQ ID NO: 1929279 - DNA, 25 bp, Homo sapien
ccaaatcttagtgtgctcaggcaac

SEQ ID NO: 1929280 - DNA, 25 bp, Homo sapien
acggcagtttcagaacgatggcaaa

SEQ ID NO: 1929281 - DNA, 25 bp, Homo sapien
cgatggcaaatctggttaaggtagc

SEQ ID NO: 1929282 - DNA, 25 bp, Homo sapien
ctggttgtccttagaaaacacacgg

SEQ ID NO: 1929283 - DNA, 25 bp, Homo sapien
taaggtagcagtcaactccatcgac

SEQ ID NO: 1929284 - DNA, 25 bp, Homo sapien
cagcaaaaggacctgaaagctagga

SEQ ID NO: 1929285 - DNA, 25 bp, Homo sapien
caagagtggcacactggcttgatga

SEQ ID NO: 1929286 - DNA, 25 bp, Homo sapien
ggacctgaaagctaggagacagcag

SEQ ID NO: 1929287 - DNA, 25 bp, Homo sapien
cttgatgaacgctaacagcaaaagg

SEQ ID NO: 1929288 - DNA, 25 bp, Homo sapien
ttgttcttcctcatccgtgtatcca

SEQ ID NO: 1929289 - DNA, 25 bp, Homo sapien
gtgtatccattatgtgtccttggtc

SEQ ID NO: 1929290 - DNA, 25 bp, Homo sapien
ccattatgtgtccttggtcctcatg

SEQ ID NO: 1929291 - DNA, 25 bp, Homo sapien
tcctcatccgtgtatccattatgtg

SEQ ID NO: 1929292 - DNA, 25 bp, Homo sapien
tcatctaaaggaggcagtctatctc

SEQ ID NO: 1929293 - DNA, 25 bp, Homo sapien
aatgtagagctgtggtccagaactc

SEQ ID NO: 1929294 - DNA, 25 bp, Homo sapien
tacagcagagacaacgatacaatgg

SEQ ID NO: 1929295 - DNA, 25 bp, Homo sapien
tggtctgagggtatcccaggcactg

SEQ ID NO: 1929296 - DNA, 25 bp, Homo sapien
gattcaaaggtccatccacaaaggt

SEQ ID NO: 1929297 - DNA, 25 bp, Homo sapien
ggctaaattagaaggactgaccata

SEQ ID NO: 1929298 - DNA, 25 bp, Homo sapien
cagaactcatacatgttggtaggac

SEQ ID NO: 1929299 - DNA, 25 bp, Homo sapien
tgtagtagccgcaaagtggaaatga

SEQ ID NO: 1929300 - DNA, 25 bp, Homo sapien
ctttatctagaggccttctctagct

SEQ ID NO: 1929301 - DNA, 25 bp, Homo sapien
ttatctagaggccttctctagctat

SEQ ID NO: 1929302 - DNA, 25 bp, Homo sapien
tttatctagaggccttctctagcta

SEQ ID NO: 1929303 - DNA, 25 bp, Homo sapien
tgagcctagtctgaagtcctgggac

SEQ ID NO: 1929304 - DNA, 25 bp, Homo sapien
gattctgagcctagtctgaagtcct

SEQ ID NO: 1929305 - DNA, 25 bp, Homo sapien
aagtcctgggacttgttcttattga

SEQ ID NO: 1929306 - DNA, 25 bp, Homo sapien
gtgtcatagattctgagcctagtct

SEQ ID NO: 1929307 - DNA, 25 bp, Homo sapien
tcagctttcaggtatgtgaccaaaa

SEQ ID NO: 1929308 - DNA, 25 bp, Homo sapien
atttgctcccatgaaaaaccaagga

SEQ ID NO: 1929309 - DNA, 25 bp, Homo sapien
gagagaatatgcctgttctgaacag

SEQ ID NO: 1929310 - DNA, 25 bp, Homo sapien
ttcacatgctgaaaacccaccaact

SEQ ID NO: 1929311 - DNA, 25 bp, Homo sapien
tggcaccttcgtgagaaaaacaata

SEQ ID NO: 1929312 - DNA, 25 bp, Homo sapien
taccaaattttaccctgagcatcgg

SEQ ID NO: 1929313 - DNA, 25 bp, Homo sapien
gaaaggattcgtttaacactcacaa

SEQ ID NO: 1929314 - DNA, 25 bp, Homo sapien
caataagcactttcaagggtaccaa

SEQ ID NO: 1929315 - DNA, 25 bp, Homo sapien
cacaatcagatttctgcaagatcat

SEQ ID NO: 1929316 - DNA, 25 bp, Homo sapien
gctttcctggtgttatctctactga

SEQ ID NO: 1929317 - DNA, 25 bp, Homo sapien
tctactgaagcttgtttggcctttt

SEQ ID NO: 1929318 - DNA, 25 bp, Homo sapien
cttgtttgagtaactgctttcctgg

SEQ ID NO: 1929319 - DNA, 25 bp, Homo sapien
agtacatacacacgggaaatttcag

SEQ ID NO: 1929320 - DNA, 25 bp, Homo sapien
cagaggcagcttagcctgtgttcaa

SEQ ID NO: 1929321 - DNA, 25 bp, Homo sapien
cagtggaattgctctgactcagtta

SEQ ID NO: 1929322 - DNA, 25 bp, Homo sapien
ggtgagtgttgcaacaggtgaccca

SEQ ID NO: 1929323 - DNA, 25 bp, Homo sapien
ctcagcagcagcacgtcatataggt

SEQ ID NO: 1929324 - DNA, 25 bp, Homo sapien
tcatataggtagttactcatggagg

SEQ ID NO: 1929325 - DNA, 25 bp, Homo sapien
gcagcagcacgtcatataggtagtt

SEQ ID NO: 1929326 - DNA, 25 bp, Homo sapien
cacgtcatataggtagttactcatg

SEQ ID NO: 1929327 - DNA, 25 bp, Homo sapien
tcgacaacgccaaagaacatgactg

SEQ ID NO: 1929328 - DNA, 25 bp, Homo sapien
tggtgttcaatcagcccgcaaataa

SEQ ID NO: 1929329 - DNA, 25 bp, Homo sapien
gaatctagagacttgcgctttccaa

SEQ ID NO: 1929330 - DNA, 25 bp, Homo sapien
tgggtaaaccacttagcctctcttg

SEQ ID NO: 1929331 - DNA, 25 bp, Homo sapien
aaactaggtttgcatggcctggcac

SEQ ID NO: 1929332 - DNA, 25 bp, Homo sapien
tattgctacaactctgtttccggga

SEQ ID NO: 1929333 - DNA, 25 bp, Homo sapien
gatccctgaggaatagggctctgta

SEQ ID NO: 1929334 - DNA, 25 bp, Homo sapien
ggagtatacaagctctaaacaagac

SEQ ID NO: 1929335 - DNA, 25 bp, Homo sapien
gcttgagtgagaaacgtggacattc

SEQ ID NO: 1929336 - DNA, 25 bp, Homo sapien
aaagcacaactggagaggtctgcca

SEQ ID NO: 1929337 - DNA, 25 bp, Homo sapien
caacttggagtaagaaatcagcagc

SEQ ID NO: 1929338 - DNA, 25 bp, Homo sapien
aaatgccaatgctggtaggtgagtg

SEQ ID NO: 1929339 - DNA, 25 bp, Homo sapien
gaaatctggccgtgtctgaaagaca

SEQ ID NO: 1929340 - DNA, 25 bp, Homo sapien
ccaacaatggcactaaccatgttat

SEQ ID NO: 1929341 - DNA, 25 bp, Homo sapien
gaggtgcatctagtggacagaggcc

SEQ ID NO: 1929342 - DNA, 25 bp, Homo sapien
tgagaaaccctggaatagaatggtt

SEQ ID NO: 1929343 - DNA, 25 bp, Homo sapien
cattcctggtacagggatcagtaaa

SEQ ID NO: 1929344 - DNA, 25 bp, Homo sapien
actactggctatttggaaaacctgt

SEQ ID NO: 1929345 - DNA, 25 bp, Homo sapien
caaaaatctgcactgtctattataa

SEQ ID NO: 1929346 - DNA, 25 bp, Homo sapien
tagtatatattaactaactactggc

SEQ ID NO: 1929347 - DNA, 25 bp, Homo sapien
tatgacatactttctgggctctgcc

SEQ ID NO: 1929348 - DNA, 25 bp, Homo sapien
cagtgaatatttctatctgggagca

SEQ ID NO: 1929349 - DNA, 25 bp, Homo sapien
tgggagcactacagatactactaac

SEQ ID NO: 1929350 - DNA, 25 bp, Homo sapien
gactgtcccttaatactagtgttta

SEQ ID NO: 1929351 - DNA, 25 bp, Homo sapien
aaggaggggatcgctcctttatctc

SEQ ID NO: 1929352 - DNA, 25 bp, Homo sapien
aggaggggatcgctcctttatctca

SEQ ID NO: 1929353 - DNA, 25 bp, Homo sapien
aaaggaggggatcgctcctttatct

SEQ ID NO: 1929354 - DNA, 25 bp, Homo sapien
taaaggaggggatcgctcctttatc

SEQ ID NO: 1929355 - DNA, 25 bp, Homo sapien
ttttgtgcttacagaagaaaagctt

SEQ ID NO: 1929356 - DNA, 25 bp, Homo sapien
ggcccgcctatactacattttgaat

SEQ ID NO: 1929357 - DNA, 25 bp, Homo sapien
tgcctggcccgcctatactacattt

SEQ ID NO: 1929358 - DNA, 25 bp, Homo sapien
cagaatttttgtgcttacagaagaa

SEQ ID NO: 1929359 - DNA, 25 bp, Homo sapien
tatgctgccataccaccagtcttca

SEQ ID NO: 1929360 - DNA, 25 bp, Homo sapien
taatgtctccgcgatggatggttag

SEQ ID NO: 1929361 - DNA, 25 bp, Homo sapien
gattagctggaaaataaccttcctg

SEQ ID NO: 1929362 - DNA, 25 bp, Homo sapien
gatcgattcgctgtgtagtcataaa

SEQ ID NO: 1929363 - DNA, 25 bp, Homo sapien
ctttgttctccaaatttctctttca

SEQ ID NO: 1929364 - DNA, 25 bp, Homo sapien
gttctccaaatttctctttcagtct

SEQ ID NO: 1929365 - DNA, 25 bp, Homo sapien
ctccaaatttctctttcagtctctt

SEQ ID NO: 1929366 - DNA, 25 bp, Homo sapien
tgttctccaaatttctctttcagtc

SEQ ID NO: 1929367 - DNA, 25 bp, Homo sapien
taaagacacgagctaatatgtccat

SEQ ID NO: 1929368 - DNA, 25 bp, Homo sapien
cagcaatatgactcaaatcttgagc

SEQ ID NO: 1929369 - DNA, 25 bp, Homo sapien
aatcttgagctgacagagtaattaa

SEQ ID NO: 1929370 - DNA, 25 bp, Homo sapien
cctgtggtttggcatgtaggagaat

SEQ ID NO: 1929371 - DNA, 25 bp, Homo sapien
gacttcagggtactccttaggatta

SEQ ID NO: 1929372 - DNA, 25 bp, Homo sapien
tacgaagttttgctccacacatgtg

SEQ ID NO: 1929373 - DNA, 25 bp, Homo sapien
tagccctatttctagcatcatgtgg

SEQ ID NO: 1929374 - DNA, 25 bp, Homo sapien
tcatgtggtagaaacatacagtccc

SEQ ID NO: 1929375 - DNA, 25 bp, Homo sapien
gaaatatataaacaggaccggcgtg

SEQ ID NO: 1929376 - DNA, 25 bp, Homo sapien
aatagtaccaaggtgcatgcagata

SEQ ID NO: 1929377 - DNA, 25 bp, Homo sapien
tgtaatcccaacctaggtgggtgga

SEQ ID NO: 1929378 - DNA, 25 bp, Homo sapien
gctcaaactgcaactaggagtatag

SEQ ID NO: 1929379 - DNA, 25 bp, Homo sapien
ggatatccattgtgaagaacctgca

SEQ ID NO: 1929380 - DNA, 25 bp, Homo sapien
ctgttactctggtctagcaaaacgc

SEQ ID NO: 1929381 - DNA, 25 bp, Homo sapien
tacccatctataaactgtgtgtaca

SEQ ID NO: 1929382 - DNA, 25 bp, Homo sapien
tactatctcatctacgctgctgcag

SEQ ID NO: 1929383 - DNA, 25 bp, Homo sapien
gaaaattcaatttatgctgctgtta

SEQ ID NO: 1929384 - DNA, 25 bp, Homo sapien
gccagtggagtatgctaatgggaaa

SEQ ID NO: 1929385 - DNA, 25 bp, Homo sapien
gctgctgttatatcttccagtaata

SEQ ID NO: 1929386 - DNA, 25 bp, Homo sapien
ctaggtatggtactatcctatgtat

SEQ ID NO: 1929387 - DNA, 25 bp, Homo sapien
taaaggaatacttaagacacatggc

SEQ ID NO: 1929388 - DNA, 25 bp, Homo sapien
aagaagctttgttctctctaccggg

SEQ ID NO: 1929389 - DNA, 25 bp, Homo sapien
cctgttgtgatagatgtgtaggcct

SEQ ID NO: 1929390 - DNA, 25 bp, Homo sapien
cacatggcaagcgtttcatagttgg

SEQ ID NO: 1929391 - DNA, 25 bp, Homo sapien
atctacctgatggttacaaggcttt

SEQ ID NO: 1929392 - DNA, 25 bp, Homo sapien
gttggtgctgtatctacctgatggt

SEQ ID NO: 1929393 - DNA, 25 bp, Homo sapien
cctgatggttacaaggctttctttc

SEQ ID NO: 1929394 - DNA, 25 bp, Homo sapien
cgttggtgctgtatctacctgatgg

SEQ ID NO: 1929395 - DNA, 25 bp, Homo sapien
acggtgatacgggattcatagaatg

SEQ ID NO: 1929396 - DNA, 25 bp, Homo sapien
ttggtattacggtgatacgggattc

SEQ ID NO: 1929397 - DNA, 25 bp, Homo sapien
ggaaagattcccttgttctctatct

SEQ ID NO: 1929398 - DNA, 25 bp, Homo sapien
tatgctgttttatccagaaggatag

SEQ ID NO: 1929399 - DNA, 25 bp, Homo sapien
atcactattatcatccagttcaaag

SEQ ID NO: 1929400 - DNA, 25 bp, Homo sapien
gcctgtgctctttcagatgattgta

SEQ ID NO: 1929401 - DNA, 25 bp, Homo sapien
tcccagcagttttgacaagttgcat

SEQ ID NO: 1929402 - DNA, 25 bp, Homo sapien
ctgatgatgtgactaggtgatgatc

SEQ ID NO: 1929403 - DNA, 25 bp, Homo sapien
caagattttttgatacctctgggga

SEQ ID NO: 1929404 - DNA, 25 bp, Homo sapien
gaggctagcaaatggagttctgttg

SEQ ID NO: 1929405 - DNA, 25 bp, Homo sapien
tagagatggtcaaattctaagagaa

SEQ ID NO: 1929406 - DNA, 25 bp, Homo sapien
ccaaggggatcataaggcatgagcc

SEQ ID NO: 1929407 - DNA, 25 bp, Homo sapien
ctatgaagtaggaaatgtggagaca

SEQ ID NO: 1929408 - DNA, 25 bp, Homo sapien
acagttaggaagtggtgggatccca

SEQ ID NO: 1929409 - DNA, 25 bp, Homo sapien
gagagaaagtgaactacctaacaaa

SEQ ID NO: 1929410 - DNA, 25 bp, Homo sapien
tgggatcccaggtcggctcagttct

SEQ ID NO: 1929411 - DNA, 25 bp, Homo sapien
atacatgtgttgaattcagcaaagt

SEQ ID NO: 1929412 - DNA, 25 bp, Homo sapien
gctttttccaccataatatacatgt

SEQ ID NO: 1929413 - DNA, 25 bp, Homo sapien
ttttccaccataatatacatgtgtt

SEQ ID NO: 1929414 - DNA, 25 bp, Homo sapien
ctttttccaccataatatacatgtg

SEQ ID NO: 1929415 - DNA, 25 bp, Homo sapien
taaccaataccacagtcactgaata

SEQ ID NO: 1929416 - DNA, 25 bp, Homo sapien
caataccacagtcactgaataattt

SEQ ID NO: 1929417 - DNA, 25 bp, Homo sapien
accaataccacagtcactgaataat

SEQ ID NO: 1929418 - DNA, 25 bp, Homo sapien
ttaaccaataccacagtcactgaat

SEQ ID NO: 1929419 - DNA, 25 bp, Homo sapien
gacaacgaatgaaggagtggctcta

SEQ ID NO: 1929420 - DNA, 25 bp, Homo sapien
catgtaccgtcgtctaggaataggc

SEQ ID NO: 1929421 - DNA, 25 bp, Homo sapien
aagtactgagctagacatgactgcc

SEQ ID NO: 1929422 - DNA, 25 bp, Homo sapien
tattagcgtatcttatgtgcggccc

SEQ ID NO: 1929423 - DNA, 25 bp, Homo sapien
gagtaatcacgagtggctcctagtt

SEQ ID NO: 1929424 - DNA, 25 bp, Homo sapien
ggctcctagttatctctaaacaact

SEQ ID NO: 1929425 - DNA, 25 bp, Homo sapien
taaacaactgggtgaatggtgctgt

SEQ ID NO: 1929426 - DNA, 25 bp, Homo sapien
agagaaaaggagtaatcacgagtgg

SEQ ID NO: 1929427 - DNA, 25 bp, Homo sapien
tccaaaggcaaatatcgacagatgt

SEQ ID NO: 1929428 - DNA, 25 bp, Homo sapien
tactccacatgctaaatagatggcc

SEQ ID NO: 1929429 - DNA, 25 bp, Homo sapien
cctagccagactagaggttcctgaa

SEQ ID NO: 1929430 - DNA, 25 bp, Homo sapien
tcttaagtctcctagcatgagcgct

SEQ ID NO: 1929431 - DNA, 25 bp, Homo sapien
ttctgttcagtgatatctcaatgac

SEQ ID NO: 1929432 - DNA, 25 bp, Homo sapien
tctgaaaactagctcacctggttcc

SEQ ID NO: 1929433 - DNA, 25 bp, Homo sapien
tttaaagcagaaactcaccatagcc

SEQ ID NO: 1929434 - DNA, 25 bp, Homo sapien
gattattcgtacaatcaacacttaa

SEQ ID NO: 1929435 - DNA, 25 bp, Homo sapien
gaaataagtgatattcatcaacaca

SEQ ID NO: 1929436 - DNA, 25 bp, Homo sapien
aaataagtgatattcatcaacacaa

SEQ ID NO: 1929437 - DNA, 25 bp, Homo sapien
attgtcaaagtaagaaaggggctca

SEQ ID NO: 1929438 - DNA, 25 bp, Homo sapien
gtgaaaccaaactgatgtagaatct

SEQ ID NO: 1929439 - DNA, 25 bp, Homo sapien
aaactgatgtagaatctcttgagcg

SEQ ID NO: 1929440 - DNA, 25 bp, Homo sapien
tgatgtagaatctcttgagcggtca

SEQ ID NO: 1929441 - DNA, 25 bp, Homo sapien
cggtctgagtgaaaccaaactgatg

SEQ ID NO: 1929442 - DNA, 25 bp, Homo sapien
ttaacttagactgttgtgaggaaac

SEQ ID NO: 1929443 - DNA, 25 bp, Homo sapien
gactgctttaacttagactgttgtg

SEQ ID NO: 1929444 - DNA, 25 bp, Homo sapien
gtttgactgctttaacttagactgt

SEQ ID NO: 1929445 - DNA, 25 bp, Homo sapien
aggaaactgctggtggtgaagtaaa

SEQ ID NO: 1929446 - DNA, 25 bp, Homo sapien
cagatgttttctttacaagccagga

SEQ ID NO: 1929447 - DNA, 25 bp, Homo sapien
gatttggaagacaacactgtaactg

SEQ ID NO: 1929448 - DNA, 25 bp, Homo sapien
tgaccctctgataggtaccaaggac

SEQ ID NO: 1929449 - DNA, 25 bp, Homo sapien
taccaaggactggtggttcacagat

SEQ ID NO: 1929450 - DNA, 25 bp, Homo sapien
taaagccttgctcaatctgtgcagg

SEQ ID NO: 1929451 - DNA, 25 bp, Homo sapien
tggcatgatccttcacccttgggga

SEQ ID NO: 1929452 - DNA, 25 bp, Homo sapien
gggagtttccagattagtagaggct

SEQ ID NO: 1929453 - DNA, 25 bp, Homo sapien
tagtagaggctgttctccataaagc

SEQ ID NO: 1929454 - DNA, 25 bp, Homo sapien
ttgcagcacaggaacgtatcacctc

SEQ ID NO: 1929455 - DNA, 25 bp, Homo sapien
tttgcagcacaggaacgtatcacct

SEQ ID NO: 1929456 - DNA, 25 bp, Homo sapien
ttttgcagcacaggaacgtatcacc

SEQ ID NO: 1929457 - DNA, 25 bp, Homo sapien
aattcaggttgtctgttgcaattaa

SEQ ID NO: 1929458 - DNA, 25 bp, Homo sapien
caggttgtctgttgcaattaaggtt

SEQ ID NO: 1929459 - DNA, 25 bp, Homo sapien
ttatcctaaattcaggttgtctgtt

SEQ ID NO: 1929460 - DNA, 25 bp, Homo sapien
tgtctgttgcaattaaggttttagg

SEQ ID NO: 1929461 - DNA, 25 bp, Homo sapien
cgttgaagaactttcagtgtggaca

SEQ ID NO: 1929462 - DNA, 25 bp, Homo sapien
catcttgactttggtgtattccagg

SEQ ID NO: 1929463 - DNA, 25 bp, Homo sapien
tactagctgcatcttcgttgaagaa

SEQ ID NO: 1929464 - DNA, 25 bp, Homo sapien
ttttggacaggtacatagggcatct

SEQ ID NO: 1929465 - DNA, 25 bp, Homo sapien
ttaacacttcaattctggtagcctg

SEQ ID NO: 1929466 - DNA, 25 bp, Homo sapien
gagaatagctacaatttcccgactg

SEQ ID NO: 1929467 - DNA, 25 bp, Homo sapien
gattcaagtctcacagtcaaccaaa

SEQ ID NO: 1929468 - DNA, 25 bp, Homo sapien
gatactgaggtgatggatccaagaa

SEQ ID NO: 1929469 - DNA, 25 bp, Homo sapien
tctataaatctgagtatgcattgca

SEQ ID NO: 1929470 - DNA, 25 bp, Homo sapien
tatgcattgcagaaatgatttcttc

SEQ ID NO: 1929471 - DNA, 25 bp, Homo sapien
tgttgcttggcaattctaccattac

SEQ ID NO: 1929472 - DNA, 25 bp, Homo sapien
ctaccattactaacagtgttctata

SEQ ID NO: 1929473 - DNA, 25 bp, Homo sapien
ttttgcccaaatgcacagaatgcaa

SEQ ID NO: 1929474 - DNA, 25 bp, Homo sapien
tacagaagaattggctcattttgcc

SEQ ID NO: 1929475 - DNA, 25 bp, Homo sapien
ctcgaatgggtgacttgaatggcaa

SEQ ID NO: 1929476 - DNA, 25 bp, Homo sapien
gaatggcaagtcagaatacatggct

SEQ ID NO: 1929477 - DNA, 25 bp, Homo sapien
ccaaacatacactataccatcctca

SEQ ID NO: 1929478 - DNA, 25 bp, Homo sapien
caaacatacactataccatcctcac

SEQ ID NO: 1929479 - DNA, 25 bp, Homo sapien
tctcccgataatttgctgctcctac

SEQ ID NO: 1929480 - DNA, 25 bp, Homo sapien
catggagtcaaagtactatgaatct

SEQ ID NO: 1929481 - DNA, 25 bp, Homo sapien
tatgaatcttctcccgataatttgc

SEQ ID NO: 1929482 - DNA, 25 bp, Homo sapien
caaagtactatgaatcttctcccga

SEQ ID NO: 1929483 - DNA, 25 bp, Homo sapien
acgttttccattgggatgaatctcc

SEQ ID NO: 1929484 - DNA, 25 bp, Homo sapien
aaacgttttccattgggatgaatct

SEQ ID NO: 1929485 - DNA, 25 bp, Homo sapien
aacgttttccattgggatgaatctc

SEQ ID NO: 1929486 - DNA, 25 bp, Homo sapien
caaacgttttccattgggatgaatc

SEQ ID NO: 1929487 - DNA, 25 bp, Homo sapien
tattccaaacaacaatcacccctgt

SEQ ID NO: 1929488 - DNA, 25 bp, Homo sapien
tcttgacataggtattccaaacaac

SEQ ID NO: 1929489 - DNA, 25 bp, Homo sapien
aatcacccctgtacaatctcctgaa

SEQ ID NO: 1929490 - DNA, 25 bp, Homo sapien
tccaaatcattaatcttgacatagg

SEQ ID NO: 1929491 - DNA, 25 bp, Homo sapien
cttacagctggatggaatttagccg

SEQ ID NO: 1929492 - DNA, 25 bp, Homo sapien
ttcagtatcaaaacaaagtgagttg

SEQ ID NO: 1929493 - DNA, 25 bp, Homo sapien
tcatagcatcctgtaactactagct

SEQ ID NO: 1929494 - DNA, 25 bp, Homo sapien
caaactgtcggaccaatatggcaga

SEQ ID NO: 1929495 - DNA, 25 bp, Homo sapien
cctgtcctctaaataatggctaact

SEQ ID NO: 1929496 - DNA, 25 bp, Homo sapien
aaaagactatcctacattaagcacg

SEQ ID NO: 1929497 - DNA, 25 bp, Homo sapien
actgctacagtcttgacaaatgagt

SEQ ID NO: 1929498 - DNA, 25 bp, Homo sapien
caaattgagtctgttacaagattac

SEQ ID NO: 1929499 - DNA, 25 bp, Homo sapien
gaagtaaggatgtagtgatcatctt

SEQ ID NO: 1929500 - DNA, 25 bp, Homo sapien
tgatattgaggtggccacacaattc

SEQ ID NO: 1929501 - DNA, 25 bp, Homo sapien
gatcatcttttgaccaggaaagatc

SEQ ID NO: 1929502 - DNA, 25 bp, Homo sapien
aaatgatattgaggtggccacacaa

SEQ ID NO: 1929503 - DNA, 25 bp, Homo sapien
gaaacgtccagaaggaatttcatat

SEQ ID NO: 1929504 - DNA, 25 bp, Homo sapien
aaacgtccagaaggaatttcatata

SEQ ID NO: 1929505 - DNA, 25 bp, Homo sapien
cctcgttctcctgcatttagtgaga

SEQ ID NO: 1929506 - DNA, 25 bp, Homo sapien
ttggatatccatcccggctggcaca

SEQ ID NO: 1929507 - DNA, 25 bp, Homo sapien
cacaagctgctgctaatattcttcc

SEQ ID NO: 1929508 - DNA, 25 bp, Homo sapien
cgttctcctgcatttagtgagaaga

SEQ ID NO: 1929509 - DNA, 25 bp, Homo sapien
gactcatggtgacgttcacaatgca

SEQ ID NO: 1929510 - DNA, 25 bp, Homo sapien
tgcccagggagtcgtttccacttta

SEQ ID NO: 1929511 - DNA, 25 bp, Homo sapien
tgtctactgagcttgactcatggtg

SEQ ID NO: 1929512 - DNA, 25 bp, Homo sapien
tgactcttctaatccaggttctgtg

SEQ ID NO: 1929513 - DNA, 25 bp, Homo sapien
cgaggcttagtaggtgggtaatata

SEQ ID NO: 1929514 - DNA, 25 bp, Homo sapien
cagttacgtacagtgttgatgggta

SEQ ID NO: 1929515 - DNA, 25 bp, Homo sapien
ggaactttcagtcctcttacagtta

SEQ ID NO: 1929516 - DNA, 25 bp, Homo sapien
tacagtgttgatgggtaatgatttc

SEQ ID NO: 1929517 - DNA, 25 bp, Homo sapien
ttgcatttccattggctcccagaag

SEQ ID NO: 1929518 - DNA, 25 bp, Homo sapien
caagcgaagttttgagttgatgttt

SEQ ID NO: 1929519 - DNA, 25 bp, Homo sapien
gcaagcgaagttttgagttgatgtt

SEQ ID NO: 1929520 - DNA, 25 bp, Homo sapien
ctgcaagcgaagttttgagttgatg

SEQ ID NO: 1929521 - DNA, 25 bp, Homo sapien
taaaataagaattcatataaaatgt

SEQ ID NO: 1929522 - DNA, 25 bp, Homo sapien
ttaaaataagaattcatataaaatg

SEQ ID NO: 1929523 - DNA, 25 bp, Homo sapien
aaataagaattcatataaaatgtta

SEQ ID NO: 1929524 - DNA, 25 bp, Homo sapien
aataagaattcatataaaatgttac

SEQ ID NO: 1929525 - DNA, 25 bp, Homo sapien
tttgaacctcagaattattcttaat

SEQ ID NO: 1929526 - DNA, 25 bp, Homo sapien
cttaatttcatccacgcttaagaaa

SEQ ID NO: 1929527 - DNA, 25 bp, Homo sapien
tcatccacgcttaagaaatcaagaa

SEQ ID NO: 1929528 - DNA, 25 bp, Homo sapien
gcccaggcaattttccgaaagccac

SEQ ID NO: 1929529 - DNA, 25 bp, Homo sapien
tcataataggaagaatataatccac

SEQ ID NO: 1929530 - DNA, 25 bp, Homo sapien
caggatgactttaggactctcatca

SEQ ID NO: 1929531 - DNA, 25 bp, Homo sapien
aatcatatggctgggtcataatagg

SEQ ID NO: 1929532 - DNA, 25 bp, Homo sapien
cagagcctcgaagcaaatagggaaa

SEQ ID NO: 1929533 - DNA, 25 bp, Homo sapien
caagcaaacatttgggataaaccgg

SEQ ID NO: 1929534 - DNA, 25 bp, Homo sapien
gataaaccgggctatctcggcttgt

SEQ ID NO: 1929535 - DNA, 25 bp, Homo sapien
gacttaagtctatcagttcggtgaa

SEQ ID NO: 1929536 - DNA, 25 bp, Homo sapien
tgaatgtaaactcccaagacaaggt

SEQ ID NO: 1929537 - DNA, 25 bp, Homo sapien
cttttgttcaccttcaactgtgtca

SEQ ID NO: 1929538 - DNA, 25 bp, Homo sapien
atctgaagaaactgatctaactgaa

SEQ ID NO: 1929539 - DNA, 25 bp, Homo sapien
aactgatctaactgaagattctttc

SEQ ID NO: 1929540 - DNA, 25 bp, Homo sapien
tgaagaaactgatctaactgaagat

SEQ ID NO: 1929541 - DNA, 25 bp, Homo sapien
ttaagactgggtttcgcgctgtcgc

SEQ ID NO: 1929542 - DNA, 25 bp, Homo sapien
ggacttatcaaagcatgcccaccct

SEQ ID NO: 1929543 - DNA, 25 bp, Homo sapien
ggtaagaagtagcaacccagaagca

SEQ ID NO: 1929544 - DNA, 25 bp, Homo sapien
taggtttgttccgtcttcaagaggc

SEQ ID NO: 1929545 - DNA, 25 bp, Homo sapien
cagctttagagaagactggaacttc

SEQ ID NO: 1929546 - DNA, 25 bp, Homo sapien
tcagctttagagaagactggaactt

SEQ ID NO: 1929547 - DNA, 25 bp, Homo sapien
ctttagagaagactggaacttcctt

SEQ ID NO: 1929548 - DNA, 25 bp, Homo sapien
cttgtttcagctttagagaagactg

SEQ ID NO: 1929549 - DNA, 25 bp, Homo sapien
aataaagtatctgagggaaagtaag

SEQ ID NO: 1929550 - DNA, 25 bp, Homo sapien
tttgtcatcatggaataaagtatct

SEQ ID NO: 1929551 - DNA, 25 bp, Homo sapien
tcatcatggaataaagtatctgagg

SEQ ID NO: 1929552 - DNA, 25 bp, Homo sapien
catggaataaagtatctgagggaaa

SEQ ID NO: 1929553 - DNA, 25 bp, Homo sapien
ccggtttcaggtcttgtgtagtcaa

SEQ ID NO: 1929554 - DNA, 25 bp, Homo sapien
agtgactctcgtgctcttcttcagg

SEQ ID NO: 1929555 - DNA, 25 bp, Homo sapien
tctgatgatcaacgcctggctgtgg

SEQ ID NO: 1929556 - DNA, 25 bp, Homo sapien
caaccttattctcaggagtttccgg

SEQ ID NO: 1929557 - DNA, 25 bp, Homo sapien
gaagattgcttctaatagtgtcagg

SEQ ID NO: 1929558 - DNA, 25 bp, Homo sapien
ttcatatagtgaagattgcttctaa

SEQ ID NO: 1929559 - DNA, 25 bp, Homo sapien
tagtcaaatgcagtactgagagtat

SEQ ID NO: 1929560 - DNA, 25 bp, Homo sapien
gtcaaatgcagtactgagagtatga

SEQ ID NO: 1929561 - DNA, 25 bp, Homo sapien
agtcaaatgcagtactgagagtatg

SEQ ID NO: 1929562 - DNA, 25 bp, Homo sapien
tcaaatgcagtactgagagtatgag

SEQ ID NO: 1929563 - DNA, 25 bp, Homo sapien
tgaactgacagtatattcctgacat

SEQ ID NO: 1929564 - DNA, 25 bp, Homo sapien
tctaattcaatctttggatatggtg

SEQ ID NO: 1929565 - DNA, 25 bp, Homo sapien
cattggatgctttttctaacactga

SEQ ID NO: 1929566 - DNA, 25 bp, Homo sapien
ttgctggtttaagaatgagtaataa

SEQ ID NO: 1929567 - DNA, 25 bp, Homo sapien
ccacacccagcccatttaaggcttt

SEQ ID NO: 1929568 - DNA, 25 bp, Homo sapien
accacacccagcccatttaaggctt

SEQ ID NO: 1929569 - DNA, 25 bp, Homo sapien
cacacccagcccatttaaggctttt

SEQ ID NO: 1929570 - DNA, 25 bp, Homo sapien
ttaatctggaaacaactggtatata

SEQ ID NO: 1929571 - DNA, 25 bp, Homo sapien
tgggataacaggtacacaacatcat

SEQ ID NO: 1929572 - DNA, 25 bp, Homo sapien
tatgtaggtgatatctatctgttaa

SEQ ID NO: 1929573 - DNA, 25 bp, Homo sapien
gcaacctatgtgtaatatctactaa

SEQ ID NO: 1929574 - DNA, 25 bp, Homo sapien
agaacctgtaggctaggtgtctccc

SEQ ID NO: 1929575 - DNA, 25 bp, Homo sapien
cagttacgatgaaaagacatcttcc

SEQ ID NO: 1929576 - DNA, 25 bp, Homo sapien
tattatggtgcctgctatgcaacaa

SEQ ID NO: 1929577 - DNA, 25 bp, Homo sapien
caaagggacccatggaaaactatcg

SEQ ID NO: 1929578 - DNA, 25 bp, Homo sapien
taaaaagtgcaactcaagtagggag

SEQ ID NO: 1929579 - DNA, 25 bp, Homo sapien
gataggtataaagagggcatagagc

SEQ ID NO: 1929580 - DNA, 25 bp, Homo sapien
ttaactgtggatgccaatacagact

SEQ ID NO: 1929581 - DNA, 25 bp, Homo sapien
ggatcaggttgtagttagttgctga

SEQ ID NO: 1929582 - DNA, 25 bp, Homo sapien
ttaccatacggccattgatttctcc

SEQ ID NO: 1929583 - DNA, 25 bp, Homo sapien
taccatacggccattgatttctcct

SEQ ID NO: 1929584 - DNA, 25 bp, Homo sapien
tgaccatgacatagtgttactgttt

SEQ ID NO: 1929585 - DNA, 25 bp, Homo sapien
tgtaaatcactattacccaatgatc

SEQ ID NO: 1929586 - DNA, 25 bp, Homo sapien
gccatatctgcattttatgcgcata

SEQ ID NO: 1929587 - DNA, 25 bp, Homo sapien
ttttatgcgcatatgtaaatcacta

SEQ ID NO: 1929588 - DNA, 25 bp, Homo sapien
gcaattcttcaaagcgaactttggt

SEQ ID NO: 1929589 - DNA, 25 bp, Homo sapien
tgttttcttcagacctgacaagttt

SEQ ID NO: 1929590 - DNA, 25 bp, Homo sapien
tttcttttcacgcattagatcactg

SEQ ID NO: 1929591 - DNA, 25 bp, Homo sapien
cattagatcactgtgggtcttaagc

SEQ ID NO: 1929592 - DNA, 25 bp, Homo sapien
gctctagagcaagtgtcggcaaact

SEQ ID NO: 1929593 - DNA, 25 bp, Homo sapien
taaatatcggcatgagttctctagc

SEQ ID NO: 1929594 - DNA, 25 bp, Homo sapien
cacctggctggtgttaacctgtctg

SEQ ID NO: 1929595 - DNA, 25 bp, Homo sapien
gaagataatgcttaagcccctgaaa

SEQ ID NO: 1929596 - DNA, 25 bp, Homo sapien
atgcaaagcattgactcaatcagga

SEQ ID NO: 1929597 - DNA, 25 bp, Homo sapien
actgagaatgcaaagcattgactca

SEQ ID NO: 1929598 - DNA, 25 bp, Homo sapien
gagaatgcaaagcattgactcaatc

SEQ ID NO: 1929599 - DNA, 25 bp, Homo sapien
gaatgcaaagcattgactcaatcag

SEQ ID NO: 1929600 - DNA, 25 bp, Homo sapien
taacttaggcaacaactacgtggca

SEQ ID NO: 1929601 - DNA, 25 bp, Homo sapien
ccagtgccgactcaaagggttgttg

SEQ ID NO: 1929602 - DNA, 25 bp, Homo sapien
taaagcatgcttgtgggtagcacac

SEQ ID NO: 1929603 - DNA, 25 bp, Homo sapien
taacaggttgttagggtgcagtcac

SEQ ID NO: 1929604 - DNA, 25 bp, Homo sapien
tgcaggccttcacgtgtgccaagtt

SEQ ID NO: 1929605 - DNA, 25 bp, Homo sapien
tccagggtgccttaatctttgtagc

SEQ ID NO: 1929606 - DNA, 25 bp, Homo sapien
gaggtccaaggccatttatgaaatg

SEQ ID NO: 1929607 - DNA, 25 bp, Homo sapien
gagagcattctcaccttgaagggca

SEQ ID NO: 1929608 - DNA, 25 bp, Homo sapien
agctacttaatttctaatccttggt

SEQ ID NO: 1929609 - DNA, 25 bp, Homo sapien
cttgtctgggaatttaaaatggcac

SEQ ID NO: 1929610 - DNA, 25 bp, Homo sapien
gggcaagctacttaatttctaatcc

SEQ ID NO: 1929611 - DNA, 25 bp, Homo sapien
tccttgtctgggaatttaaaatggc

SEQ ID NO: 1929612 - DNA, 25 bp, Homo sapien
tactattaacagcttaatacacaac

SEQ ID NO: 1929613 - DNA, 25 bp, Homo sapien
ctaatattatgtaatgataacacag

SEQ ID NO: 1929614 - DNA, 25 bp, Homo sapien
atattatgtaatgataacacagcaa

SEQ ID NO: 1929615 - DNA, 25 bp, Homo sapien
taatattatgtaatgataacacagc

SEQ ID NO: 1929616 - DNA, 25 bp, Homo sapien
caggagcgtctaagagatattacac

SEQ ID NO: 1929617 - DNA, 25 bp, Homo sapien
ggcttgataattcgctccttaacca

SEQ ID NO: 1929618 - DNA, 25 bp, Homo sapien
taaccaaatgttatcgcaagggaaa

SEQ ID NO: 1929619 - DNA, 25 bp, Homo sapien
tcacaaaccctttcacaggagcgtc

SEQ ID NO: 1929620 - DNA, 25 bp, Homo sapien
tatttttatgcatctcgaaacaacc

SEQ ID NO: 1929621 - DNA, 25 bp, Homo sapien
aatttcccagagtactcataagaag

SEQ ID NO: 1929622 - DNA, 25 bp, Homo sapien
taaacgcagcacaacctttgataag

SEQ ID NO: 1929623 - DNA, 25 bp, Homo sapien
tttttacaggaatgctaaacgcagc

SEQ ID NO: 1929624 - DNA, 25 bp, Homo sapien
ggctttgacaggttgaagattcagc

SEQ ID NO: 1929625 - DNA, 25 bp, Homo sapien
ttaagaaggctttgacaggttgaag

SEQ ID NO: 1929626 - DNA, 25 bp, Homo sapien
ttctcagacataattaagaaggctt

SEQ ID NO: 1929627 - DNA, 25 bp, Homo sapien
ctcagacataattaagaaggctttg

SEQ ID NO: 1929628 - DNA, 25 bp, Homo sapien
aacacactcagtacacatctgattt

SEQ ID NO: 1929629 - DNA, 25 bp, Homo sapien
taaacacactcagtacacatctgat

SEQ ID NO: 1929630 - DNA, 25 bp, Homo sapien
agaatcgggagtaggaaaggcaaag

SEQ ID NO: 1929631 - DNA, 25 bp, Homo sapien
gcatttaaataagaatcgggagtag

SEQ ID NO: 1929632 - DNA, 25 bp, Homo sapien
aagaagcgcaaaagtacggtgagga

SEQ ID NO: 1929633 - DNA, 25 bp, Homo sapien
tcagaaatcgcattcccccgggaca

SEQ ID NO: 1929634 - DNA, 25 bp, Homo sapien
cagaaatcgcattcccccgggacac

SEQ ID NO: 1929635 - DNA, 25 bp, Homo sapien
agccccgacacgccgcccaggagag

SEQ ID NO: 1929636 - DNA, 25 bp, Homo sapien
actacgctatcagcctccgcgctct

SEQ ID NO: 1929637 - DNA, 25 bp, Homo sapien
ccaggagagggccgggcaggccgag

SEQ ID NO: 1929638 - DNA, 25 bp, Homo sapien
gctcgtcggtcactacgctatcagc

SEQ ID NO: 1929639 - DNA, 25 bp, Homo sapien
gtgaggcggccacgcagccacctaa

SEQ ID NO: 1929640 - DNA, 25 bp, Homo sapien
cggagccgacacccggagcagtgca

SEQ ID NO: 1929641 - DNA, 25 bp, Homo sapien
ccagcgacccgtgtcctgaaagcaa

SEQ ID NO: 1929642 - DNA, 25 bp, Homo sapien
tcctgaaagcaagccgcggctctgt

SEQ ID NO: 1929643 - DNA, 25 bp, Homo sapien
tagcgcagggaaaaactgactgggc

SEQ ID NO: 1929644 - DNA, 25 bp, Homo sapien
agagctatctccctgtgtgtgaaaa

SEQ ID NO: 1929645 - DNA, 25 bp, Homo sapien
gaaacagatttgtcactccccacgc

SEQ ID NO: 1929646 - DNA, 25 bp, Homo sapien
cgggtgcccctacagagtcttgagt

SEQ ID NO: 1929647 - DNA, 25 bp, Homo sapien
ctggatgatgcagaagtccctggaa

SEQ ID NO: 1929648 - DNA, 25 bp, Homo sapien
agtccctggaaacagaaggtctcac

SEQ ID NO: 1929649 - DNA, 25 bp, Homo sapien
acagaaggtctcacccttctttatc

SEQ ID NO: 1929650 - DNA, 25 bp, Homo sapien
gaagtccctggaaacagaaggtctc

SEQ ID NO: 1929651 - DNA, 25 bp, Homo sapien
ttcactcatgttgattattgttttg

SEQ ID NO: 1929652 - DNA, 25 bp, Homo sapien
ggctttgcactcacagtccatcctc

SEQ ID NO: 1929653 - DNA, 25 bp, Homo sapien
ttcatcttcactcatgttgattatt

SEQ ID NO: 1929654 - DNA, 25 bp, Homo sapien
tgcactcacagtccatcctccttct

SEQ ID NO: 1929655 - DNA, 25 bp, Homo sapien
ctgtccatttaaagggcacatcctc

SEQ ID NO: 1929656 - DNA, 25 bp, Homo sapien
gctgtccatttaaagggcacatcct

SEQ ID NO: 1929657 - DNA, 25 bp, Homo sapien
ggctgtccatttaaagggcacatcc

SEQ ID NO: 1929658 - DNA, 25 bp, Homo sapien
tcataactgttagatttttattgtg

SEQ ID NO: 1929659 - DNA, 25 bp, Homo sapien
gatatcactatcttgaccctgcttc

SEQ ID NO: 1929660 - DNA, 25 bp, Homo sapien
gagttgaattccacattgtctgata

SEQ ID NO: 1929661 - DNA, 25 bp, Homo sapien
ttgtgggttgtaggaattgttccaa

SEQ ID NO: 1929662 - DNA, 25 bp, Homo sapien
ggatctattacttgaggggcctgag

SEQ ID NO: 1929663 - DNA, 25 bp, Homo sapien
aaggatctattacttgaggggcctg

SEQ ID NO: 1929664 - DNA, 25 bp, Homo sapien
tcaaggatctattacttgaggggcc

SEQ ID NO: 1929665 - DNA, 25 bp, Homo sapien
caaggatctattacttgaggggcct

SEQ ID NO: 1929666 - DNA, 25 bp, Homo sapien
cactgagaatgtagcaaacttgatg

SEQ ID NO: 1929667 - DNA, 25 bp, Homo sapien
aaaacagctccagcatttgtgagat

SEQ ID NO: 1929668 - DNA, 25 bp, Homo sapien
aacagctccagcatttgtgagatga

SEQ ID NO: 1929669 - DNA, 25 bp, Homo sapien
agaatgtagcaaacttgatgtcttc

SEQ ID NO: 1929670 - DNA, 25 bp, Homo sapien
caaaggtggaagactgtgtgtcact

SEQ ID NO: 1929671 - DNA, 25 bp, Homo sapien
gatgcccttgataggatcctctgaa

SEQ ID NO: 1929672 - DNA, 25 bp, Homo sapien
ccttgataggatcctctgaagcctg

SEQ ID NO: 1929673 - DNA, 25 bp, Homo sapien
atcaaaggtggaagactgtgtgtca

SEQ ID NO: 1929674 - DNA, 25 bp, Homo sapien
agatggcaggtcgggtccacgacca

SEQ ID NO: 1929675 - DNA, 25 bp, Homo sapien
aggttttccagatggcaggtcgggt

SEQ ID NO: 1929676 - DNA, 25 bp, Homo sapien
ttccagatggcaggtcgggtccacg

SEQ ID NO: 1929677 - DNA, 25 bp, Homo sapien
ggcaggtcgggtccacgaccaacac

SEQ ID NO: 1929678 - DNA, 25 bp, Homo sapien
tgacatggactgtaatcatgagtct

SEQ ID NO: 1929679 - DNA, 25 bp, Homo sapien
gactgtaatcatgagtctttcaaca

SEQ ID NO: 1929680 - DNA, 25 bp, Homo sapien
catcaggccgcagtttcctgcaagg

SEQ ID NO: 1929681 - DNA, 25 bp, Homo sapien
ccattgccttggcagtgctagtaga

SEQ ID NO: 1929682 - DNA, 25 bp, Homo sapien
ttcagtagagggggcaaagatcatg

SEQ ID NO: 1929683 - DNA, 25 bp, Homo sapien
tagagggggcaaagatcatgaccct

SEQ ID NO: 1929684 - DNA, 25 bp, Homo sapien
cactttcatcatgaacatgatggct

SEQ ID NO: 1929685 - DNA, 25 bp, Homo sapien
cagtagagggggcaaagatcatgac

SEQ ID NO: 1929686 - DNA, 25 bp, Homo sapien
gtactcagtgccagcatcgccccat

SEQ ID NO: 1929687 - DNA, 25 bp, Homo sapien
tcagtgccagcatcgccccatttga

SEQ ID NO: 1929688 - DNA, 25 bp, Homo sapien
ctggtggactccacaacgtactcag

SEQ ID NO: 1929689 - DNA, 25 bp, Homo sapien
ggtggactccacaacgtactcagtg

SEQ ID NO: 1929690 - DNA, 25 bp, Homo sapien
ctggaagatggtaatgggatttcca

SEQ ID NO: 1929691 - DNA, 25 bp, Homo sapien
ggaagatggtaatgggatttccatt

SEQ ID NO: 1929692 - DNA, 25 bp, Homo sapien
tcctggaagatggtaatgggatttc

SEQ ID NO: 1929693 - DNA, 25 bp, Homo sapien
tggtaatgggatttccattgatgac

SEQ ID NO: 1929694 - DNA, 25 bp, Homo sapien
tagccaaattcgttgactctggcct

SEQ ID NO: 1929695 - DNA, 25 bp, Homo sapien
ccaggcacccagtatagccaaattc

SEQ ID NO: 1929696 - DNA, 25 bp, Homo sapien
aatcatactggagcatgtaggccag

SEQ ID NO: 1929697 - DNA, 25 bp, Homo sapien
catactggagcatgtaggccaggta

SEQ ID NO: 1929698 - DNA, 25 bp, Homo sapien
tgacttttggcacaagatcttttaa

SEQ ID NO: 1929699 - DNA, 25 bp, Homo sapien
tcatatgaagcaatgttgtgacatg

SEQ ID NO: 1929700 - DNA, 25 bp, Homo sapien
taactgccacaagtcaactgtgtga

SEQ ID NO: 1929701 - DNA, 25 bp, Homo sapien
aattttgtagttctatggcgtcgag

SEQ ID NO: 1929702 - DNA, 25 bp, Homo sapien
ccctcacaaggatgatgttcaggca

SEQ ID NO: 1929703 - DNA, 25 bp, Homo sapien
ggcactcacaggtgcttccatctta

SEQ ID NO: 1929704 - DNA, 25 bp, Homo sapien
taattgcagtgttccagtagtaaac

SEQ ID NO: 1929705 - DNA, 25 bp, Homo sapien
attgctttgtgatgaaacgatttcc

SEQ ID NO: 1929706 - DNA, 25 bp, Homo sapien
ttgcaacccccatactgtgccaggt

SEQ ID NO: 1929707 - DNA, 25 bp, Homo sapien
taatttgtgcagtgcaccagaaaga

SEQ ID NO: 1929708 - DNA, 25 bp, Homo sapien
ctaatttgtgcagtgcaccagaaag

SEQ ID NO: 1929709 - DNA, 25 bp, Homo sapien
gcaacccccatactgtgccaggtaa

SEQ ID NO: 1929710 - DNA, 25 bp, Homo sapien
tggctacatcagtctttcctttagc

SEQ ID NO: 1929711 - DNA, 25 bp, Homo sapien
ttttggctacatcagtctttccttt

SEQ ID NO: 1929712 - DNA, 25 bp, Homo sapien
tttggctacatcagtctttccttta

SEQ ID NO: 1929713 - DNA, 25 bp, Homo sapien
ttggctacatcagtctttcctttag

SEQ ID NO: 1929714 - DNA, 25 bp, Homo sapien
ttctttgcaacaatggataggctgg

SEQ ID NO: 1929715 - DNA, 25 bp, Homo sapien
ttcaaatttttctttcttcttggca

SEQ ID NO: 1929716 - DNA, 25 bp, Homo sapien
caaatttttctttcttcttggcaga

SEQ ID NO: 1929717 - DNA, 25 bp, Homo sapien
atttttctttcttcttggcagacat

SEQ ID NO: 1929718 - DNA, 25 bp, Homo sapien
ctttgccatgtcttcaaatttttct

SEQ ID NO: 1929719 - DNA, 25 bp, Homo sapien
gagaaattgaccgaacatttgggtg

SEQ ID NO: 1929720 - DNA, 25 bp, Homo sapien
ccagcaagtttacacaaagaatgct

SEQ ID NO: 1929721 - DNA, 25 bp, Homo sapien
cagcaagtttacacaaagaatgctg

SEQ ID NO: 1929722 - DNA, 25 bp, Homo sapien
gaaattgaccgaacatttgggtgct

SEQ ID NO: 1929723 - DNA, 25 bp, Homo sapien
tgttgggtactttgactagaacacc

SEQ ID NO: 1929724 - DNA, 25 bp, Homo sapien
tgatgactggacttgactacacaag

SEQ ID NO: 1929725 - DNA, 25 bp, Homo sapien
catggccaactctctgctgatgact

SEQ ID NO: 1929726 - DNA, 25 bp, Homo sapien
tcaggtgtggcagagacggaaaaca

SEQ ID NO: 1929727 - DNA, 25 bp, Homo sapien
tctggtagggttctgtgatggagcc

SEQ ID NO: 1929728 - DNA, 25 bp, Homo sapien
gaaaggactttgagatcttccatgt

SEQ ID NO: 1929729 - DNA, 25 bp, Homo sapien
tggtcccttctggtagggttctgtg

SEQ ID NO: 1929730 - DNA, 25 bp, Homo sapien
ccatggctttgagcacctttggtcc

SEQ ID NO: 1929731 - DNA, 25 bp, Homo sapien
tataaccatgagatcactgtgttct

SEQ ID NO: 1929732 - DNA, 25 bp, Homo sapien
gaaaagtgatataaccatgagatca

SEQ ID NO: 1929733 - DNA, 25 bp, Homo sapien
gtgatataaccatgagatcactgtg

SEQ ID NO: 1929734 - DNA, 25 bp, Homo sapien
gggaaaagtgatataaccatgagat

SEQ ID NO: 1929735 - DNA, 25 bp, Homo sapien
cttgccttgtttgtactttgtgtcc

SEQ ID NO: 1929736 - DNA, 25 bp, Homo sapien
aattgtagtgcagctgaccactgct

SEQ ID NO: 1929737 - DNA, 25 bp, Homo sapien
tgccttgtttgtactttgtgtcctt

SEQ ID NO: 1929738 - DNA, 25 bp, Homo sapien
tctcagaagcaaattgtagtgcagc

SEQ ID NO: 1929739 - DNA, 25 bp, Homo sapien
gctgtaggaggtacaacttggctga

SEQ ID NO: 1929740 - DNA, 25 bp, Homo sapien
tggcaggaggattggaacctcaatc

SEQ ID NO: 1929741 - DNA, 25 bp, Homo sapien
tctgtagatagagtaagccttttcc

SEQ ID NO: 1929742 - DNA, 25 bp, Homo sapien
ttcccaacagtgcaggtggctgtag

SEQ ID NO: 1929743 - DNA, 25 bp, Homo sapien
taaagaaatttcatgtggtggattc

SEQ ID NO: 1929744 - DNA, 25 bp, Homo sapien
ttcatttgcagctgaaggtaaagaa

SEQ ID NO: 1929745 - DNA, 25 bp, Homo sapien
tgctttcatttgcagctgaaggtaa

SEQ ID NO: 1929746 - DNA, 25 bp, Homo sapien
cttaaaatctttggcttgctttcat

SEQ ID NO: 1929747 - DNA, 25 bp, Homo sapien
ctctgttcaaatacacaccaaggga

SEQ ID NO: 1929748 - DNA, 25 bp, Homo sapien
aaggcccaaactctgttcaaataca

SEQ ID NO: 1929749 - DNA, 25 bp, Homo sapien
gaaatcttgccactgatgacacagt

SEQ ID NO: 1929750 - DNA, 25 bp, Homo sapien
taagttctcatgttgagggttcctg

SEQ ID NO: 1929751 - DNA, 25 bp, Homo sapien
gcaatgcccgtgttcattatctctt

SEQ ID NO: 1929752 - DNA, 25 bp, Homo sapien
tatttctggatgagggaccacatgc

SEQ ID NO: 1929753 - DNA, 25 bp, Homo sapien
ttgagattgttgcaggcaatgcccg

SEQ ID NO: 1929754 - DNA, 25 bp, Homo sapien
agatttaacctcacacaacatctgg

SEQ ID NO: 1929755 - DNA, 25 bp, Homo sapien
caactcgtatgctctcctccagtgg

SEQ ID NO: 1929756 - DNA, 25 bp, Homo sapien
cacagtgatctttcccctgagctgc

SEQ ID NO: 1929757 - DNA, 25 bp, Homo sapien
attttgtgaaagcaactcgtatgct

SEQ ID NO: 1929758 - DNA, 25 bp, Homo sapien
gctgcaacgattgtgaggcatattt

SEQ ID NO: 1929759 - DNA, 25 bp, Homo sapien
aaccagctggaaacaaatagagtga

SEQ ID NO: 1929760 - DNA, 25 bp, Homo sapien
tggttctgatttcaaggagtggctg

SEQ ID NO: 1929761 - DNA, 25 bp, Homo sapien
tgaattttgcgagctaaaaaaccag

SEQ ID NO: 1929762 - DNA, 25 bp, Homo sapien
tactcatggcaaaacgctaatggcc

SEQ ID NO: 1929763 - DNA, 25 bp, Homo sapien
gcattgttagtgtttcagaaccata

SEQ ID NO: 1929764 - DNA, 25 bp, Homo sapien
tttagagcccaatgtttcatggcag

SEQ ID NO: 1929765 - DNA, 25 bp, Homo sapien
taatataaacgagaaaatgtaccac

SEQ ID NO: 1929766 - DNA, 25 bp, Homo sapien
tctgattgagtatggtagcaagaca

SEQ ID NO: 1929767 - DNA, 25 bp, Homo sapien
tctttggtgagccttgatatcggac

SEQ ID NO: 1929768 - DNA, 25 bp, Homo sapien
catctcaggtagcaggttgggcact

SEQ ID NO: 1929769 - DNA, 25 bp, Homo sapien
cagcagtggcagttgtcagatcagc

SEQ ID NO: 1929770 - DNA, 25 bp, Homo sapien
tatgcctgatgtgatctatgccaag

SEQ ID NO: 1929771 - DNA, 25 bp, Homo sapien
ctttataagggatagcacgggaact

SEQ ID NO: 1929772 - DNA, 25 bp, Homo sapien
cacgggaactatatttttatctcca

SEQ ID NO: 1929773 - DNA, 25 bp, Homo sapien
aaacttcatgaagtatgccttcagc

SEQ ID NO: 1929774 - DNA, 25 bp, Homo sapien
tcagagtcagaacccgcattcagaa

SEQ ID NO: 1929775 - DNA, 25 bp, Homo sapien
actctgtagatttaggaaggaccct

SEQ ID NO: 1929776 - DNA, 25 bp, Homo sapien
cagagtcagaacgtttgcaatttcc

SEQ ID NO: 1929777 - DNA, 25 bp, Homo sapien
catgttcaggtacctaaactccaga

SEQ ID NO: 1929778 - DNA, 25 bp, Homo sapien
caagtgaattaggtttgttgcccac

SEQ ID NO: 1929779 - DNA, 25 bp, Homo sapien
aaagtccacatttctacttcagcag

SEQ ID NO: 1929780 - DNA, 25 bp, Homo sapien
ccaaaagtccacatttctacttcag

SEQ ID NO: 1929781 - DNA, 25 bp, Homo sapien
atttctacttcagcaggccacatca

SEQ ID NO: 1929782 - DNA, 25 bp, Homo sapien
tcccaaaagtccacatttctacttc

SEQ ID NO: 1929783 - DNA, 25 bp, Homo sapien
tgcaggcagtctgctctggagtctg

SEQ ID NO: 1929784 - DNA, 25 bp, Homo sapien
ctctaactagagtggatggggaggg

SEQ ID NO: 1929785 - DNA, 25 bp, Homo sapien
tattgctccacaaatcatagtattt

SEQ ID NO: 1929786 - DNA, 25 bp, Homo sapien
cacatgataacaacaatgcgtagcg

SEQ ID NO: 1929787 - DNA, 25 bp, Homo sapien
cgtagcgcctaaaagctctaatgac

SEQ ID NO: 1929788 - DNA, 25 bp, Homo sapien
gtgtatggtaacacatgataacaac

SEQ ID NO: 1929789 - DNA, 25 bp, Homo sapien
gctctagattctatcctatgcctct

SEQ ID NO: 1929790 - DNA, 25 bp, Homo sapien
tctagattctatcctatgcctcttt

SEQ ID NO: 1929791 - DNA, 25 bp, Homo sapien
tagattctatcctatgcctctttcc

SEQ ID NO: 1929792 - DNA, 25 bp, Homo sapien
gattctatcctatgcctctttccca

SEQ ID NO: 1929793 - DNA, 25 bp, Homo sapien
aggctcttctcagagctttctccat

SEQ ID NO: 1929794 - DNA, 25 bp, Homo sapien
caggctcttctcagagctttctcca

SEQ ID NO: 1929795 - DNA, 25 bp, Homo sapien
ccgcaatgttacaggctcttctcag

SEQ ID NO: 1929796 - DNA, 25 bp, Homo sapien
caatgttacaggctcttctcagagc

SEQ ID NO: 1929797 - DNA, 25 bp, Homo sapien
ctctttctcggtagcttgttttcac

SEQ ID NO: 1929798 - DNA, 25 bp, Homo sapien
ctgggctctttctcggtagcttgtt

SEQ ID NO: 1929799 - DNA, 25 bp, Homo sapien
ggctctttctcggtagcttgttttc

SEQ ID NO: 1929800 - DNA, 25 bp, Homo sapien
gctctttctcggtagcttgttttca

SEQ ID NO: 1929801 - DNA, 25 bp, Homo sapien
tcccatttcctgtagcagcttcagt

SEQ ID NO: 1929802 - DNA, 25 bp, Homo sapien
cttcccatttcctgtagcagcttca

SEQ ID NO: 1929803 - DNA, 25 bp, Homo sapien
atttcctgtagcagcttcagttttc

SEQ ID NO: 1929804 - DNA, 25 bp, Homo sapien
ccatttcctgtagcagcttcagttt

SEQ ID NO: 1929805 - DNA, 25 bp, Homo sapien
ctcaaagtgggaatgtaccacctgg

SEQ ID NO: 1929806 - DNA, 25 bp, Homo sapien
tcctcaaagtgggaatgtaccacct

SEQ ID NO: 1929807 - DNA, 25 bp, Homo sapien
catttcaaacactgacactttattt

SEQ ID NO: 1929808 - DNA, 25 bp, Homo sapien
attttcagcctaaggacatcttaaa

SEQ ID NO: 1929809 - DNA, 25 bp, Homo sapien
catttggaaatgtgaggtctctctc

SEQ ID NO: 1929810 - DNA, 25 bp, Homo sapien
tcagctctgtatcccctcaaaaatc

SEQ ID NO: 1929811 - DNA, 25 bp, Homo sapien
tgcctcagcctagtaattattcgtc

SEQ ID NO: 1929812 - DNA, 25 bp, Homo sapien
ggtagtctaagtagttgacctcaca

SEQ ID NO: 1929813 - DNA, 25 bp, Homo sapien
aatgtgattaattaagtgcattgtt

SEQ ID NO: 1929814 - DNA, 25 bp, Homo sapien
tgtgattaattaagtgcattgttat

SEQ ID NO: 1929815 - DNA, 25 bp, Homo sapien
tgattaattaagtgcattgttatta

SEQ ID NO: 1929816 - DNA, 25 bp, Homo sapien
tatatgatgatctataatgtgatta

SEQ ID NO: 1929817 - DNA, 25 bp, Homo sapien
aaaattagaatgttaaagagagcca

SEQ ID NO: 1929818 - DNA, 25 bp, Homo sapien
cataggttgattcagctgctgtaca

SEQ ID NO: 1929819 - DNA, 25 bp, Homo sapien
ggtaaatcaaatccgtacattggcg

SEQ ID NO: 1929820 - DNA, 25 bp, Homo sapien
gctgtacaggcctgatttggtaaat

SEQ ID NO: 1929821 - DNA, 25 bp, Homo sapien
cccagcaggcatctgatacaagcca

SEQ ID NO: 1929822 - DNA, 25 bp, Homo sapien
tctttagagagcactatgggcagcc

SEQ ID NO: 1929823 - DNA, 25 bp, Homo sapien
actgtaggagttatggaaagctgga

SEQ ID NO: 1929824 - DNA, 25 bp, Homo sapien
agcactatgggcagccaaggtccca

SEQ ID NO: 1929825 - DNA, 25 bp, Homo sapien
tgaacactggcgcaaggtggtgtca

SEQ ID NO: 1929826 - DNA, 25 bp, Homo sapien
actggcgcaaggtggtgtcaacatg

SEQ ID NO: 1929827 - DNA, 25 bp, Homo sapien
caaggtggtgtcaacatggtaggaa

SEQ ID NO: 1929828 - DNA, 25 bp, Homo sapien
gtcttgaacactggcgcaaggtggt

SEQ ID NO: 1929829 - DNA, 25 bp, Homo sapien
cttcaagattacttgtgggagtgaa

SEQ ID NO: 1929830 - DNA, 25 bp, Homo sapien
tcttcatctttaaggctgttggatg

SEQ ID NO: 1929831 - DNA, 25 bp, Homo sapien
aaggctgttggatgccctttttctt

SEQ ID NO: 1929832 - DNA, 25 bp, Homo sapien
atggtggctcggaacttcaagatta

SEQ ID NO: 1929833 - DNA, 25 bp, Homo sapien
ggctgcatctgcataatggtgtgca

SEQ ID NO: 1929834 - DNA, 25 bp, Homo sapien
ggcccagggctgcatctgcataatg

SEQ ID NO: 1929835 - DNA, 25 bp, Homo sapien
agggctgcatctgcataatggtgtg

SEQ ID NO: 1929836 - DNA, 25 bp, Homo sapien
ccagggctgcatctgcataatggtg

SEQ ID NO: 1929837 - DNA, 25 bp, Homo sapien
catcagtccattctacactcaaatg

SEQ ID NO: 1929838 - DNA, 25 bp, Homo sapien
aatgtttgaaataccactcttccca

SEQ ID NO: 1929839 - DNA, 25 bp, Homo sapien
agtgatctctcgggcatcatcagtc

SEQ ID NO: 1929840 - DNA, 25 bp, Homo sapien
agtccattctacactcaaatgtttg

SEQ ID NO: 1929841 - DNA, 25 bp, Homo sapien
tgtagggttgtgaatcaatagcacc

SEQ ID NO: 1929842 - DNA, 25 bp, Homo sapien
acctttatcatgcaggtgtgcaaga

SEQ ID NO: 1929843 - DNA, 25 bp, Homo sapien
taccgttgagtgcttttaaggacac

SEQ ID NO: 1929844 - DNA, 25 bp, Homo sapien
taaacagcagtagtcaaatggcagc

SEQ ID NO: 1929845 - DNA, 25 bp, Homo sapien
ggtgatgccagttaaggaaattact

SEQ ID NO: 1929846 - DNA, 25 bp, Homo sapien
taggccactaaggtgataggtgatg

SEQ ID NO: 1929847 - DNA, 25 bp, Homo sapien
catagcaggtatctaattgtagact

SEQ ID NO: 1929848 - DNA, 25 bp, Homo sapien
ttacaccatcgtcattgaagtgaaa

SEQ ID NO: 1929849 - DNA, 25 bp, Homo sapien
ccaaatagagtttgggaaggcttat

SEQ ID NO: 1929850 - DNA, 25 bp, Homo sapien
caaatagagtttgggaaggcttatt

SEQ ID NO: 1929851 - DNA, 25 bp, Homo sapien
tttctgtaccaaatagagtttggga

SEQ ID NO: 1929852 - DNA, 25 bp, Homo sapien
tgtaccaaatagagtttgggaaggc

SEQ ID NO: 1929853 - DNA, 25 bp, Homo sapien
tttctgctcctgtgtcatgaaaggc

SEQ ID NO: 1929854 - DNA, 25 bp, Homo sapien
tccatttctttcacgtctttctgct

SEQ ID NO: 1929855 - DNA, 25 bp, Homo sapien
tctgctcctgtgtcatgaaaggcat

SEQ ID NO: 1929856 - DNA, 25 bp, Homo sapien
ccaattcttgcttggttttcatcct

SEQ ID NO: 1929857 - DNA, 25 bp, Homo sapien
gaagagtcccacatgttcggaaaac

SEQ ID NO: 1929858 - DNA, 25 bp, Homo sapien
tgtgcccacaatgacatgagttagg

SEQ ID NO: 1929859 - DNA, 25 bp, Homo sapien
tgacggttcaggaagtgtgcccaca

SEQ ID NO: 1929860 - DNA, 25 bp, Homo sapien
tctggttgcttggaagtgacggttc

SEQ ID NO: 1929861 - DNA, 25 bp, Homo sapien
tctgtgcttagatggtgttgggaca

SEQ ID NO: 1929862 - DNA, 25 bp, Homo sapien
gcttagatggtgttgggacaatctt

SEQ ID NO: 1929863 - DNA, 25 bp, Homo sapien
caatatctgtgcttagatggtgttg

SEQ ID NO: 1929864 - DNA, 25 bp, Homo sapien
ggtgttgggacaatcttggtatcca

SEQ ID NO: 1929865 - DNA, 25 bp, Homo sapien
cagtatcacagtcagcactttagaa

SEQ ID NO: 1929866 - DNA, 25 bp, Homo sapien
ctagaagccagtatcacagtcagca

SEQ ID NO: 1929867 - DNA, 25 bp, Homo sapien
gccagtatcacagtcagcactttag

SEQ ID NO: 1929868 - DNA, 25 bp, Homo sapien
agaagccagtatcacagtcagcact

SEQ ID NO: 1929869 - DNA, 25 bp, Homo sapien
agactgagaacaagcagtttagaac

SEQ ID NO: 1929870 - DNA, 25 bp, Homo sapien
tagactgagaacaagcagtttagaa

SEQ ID NO: 1929871 - DNA, 25 bp, Homo sapien
gactgagaacaagcagtttagaact

SEQ ID NO: 1929872 - DNA, 25 bp, Homo sapien
aacaagcagtttagaactctctccc

SEQ ID NO: 1929873 - DNA, 25 bp, Homo sapien
tagagctttgagggtggccccacat

SEQ ID NO: 1929874 - DNA, 25 bp, Homo sapien
agctttgagggtggccccacattct

SEQ ID NO: 1929875 - DNA, 25 bp, Homo sapien
gagctttgagggtggccccacattc

SEQ ID NO: 1929876 - DNA, 25 bp, Homo sapien
agagctttgagggtggccccacatt

SEQ ID NO: 1929877 - DNA, 25 bp, Homo sapien
tcaagtcaaggaatgattttcttga

SEQ ID NO: 1929878 - DNA, 25 bp, Homo sapien
aagtgcagcatgctcttccagcagt

SEQ ID NO: 1929879 - DNA, 25 bp, Homo sapien
cttccaggatccagaggcctgactg

SEQ ID NO: 1929880 - DNA, 25 bp, Homo sapien
gaggcctgactgttcatcaccactt

SEQ ID NO: 1929881 - DNA, 25 bp, Homo sapien
gaagagagggcatttgttccaggac

SEQ ID NO: 1929882 - DNA, 25 bp, Homo sapien
agagagggcatttgttccaggaccc

SEQ ID NO: 1929883 - DNA, 25 bp, Homo sapien
cttccgcaaaaccagatacacagca

SEQ ID NO: 1929884 - DNA, 25 bp, Homo sapien
cgcaaaaccagatacacagcaggcc

SEQ ID NO: 1929885 - DNA, 25 bp, Homo sapien
tccgcaaaaccagatacacagcagg

SEQ ID NO: 1929886 - DNA, 25 bp, Homo sapien
ttccgcaaaaccagatacacagcag

SEQ ID NO: 1929887 - DNA, 25 bp, Homo sapien
tgcagcacccgataatccagcaggg

SEQ ID NO: 1929888 - DNA, 25 bp, Homo sapien
gcgaaggctggataaacactggcat

SEQ ID NO: 1929889 - DNA, 25 bp, Homo sapien
tgtggcttagcccagttaatctcgt

SEQ ID NO: 1929890 - DNA, 25 bp, Homo sapien
ttttctgaaacgtagaccctgtggc

SEQ ID NO: 1929891 - DNA, 25 bp, Homo sapien
caggcatgctgacaatggccaagac

SEQ ID NO: 1929892 - DNA, 25 bp, Homo sapien
aatcctgtagactggaatagttatg

SEQ ID NO: 1929893 - DNA, 25 bp, Homo sapien
tcctgtagactggaatagttatgga

SEQ ID NO: 1929894 - DNA, 25 bp, Homo sapien
caaatcctgtagactggaatagtta

SEQ ID NO: 1929895 - DNA, 25 bp, Homo sapien
gaattctgaaaaattacgttgaata

SEQ ID NO: 1929896 - DNA, 25 bp, Homo sapien
atcgatgttgaagttaaaatacaca

SEQ ID NO: 1929897 - DNA, 25 bp, Homo sapien
aaaattacgttgaatatcgatgttg

SEQ ID NO: 1929898 - DNA, 25 bp, Homo sapien
ttacgttgaatatcgatgttgaagt

SEQ ID NO: 1929899 - DNA, 25 bp, Homo sapien
tgagtcaagcctgcagaatgaagcc

SEQ ID NO: 1929900 - DNA, 25 bp, Homo sapien
gagtcagcaaaccacaacagacgtc

SEQ ID NO: 1929901 - DNA, 25 bp, Homo sapien
gaattttaagcccaaaagcagcacc

SEQ ID NO: 1929902 - DNA, 25 bp, Homo sapien
gtattagtaatctttacttgggcag

SEQ ID NO: 1929903 - DNA, 25 bp, Homo sapien
cattgctagcggaaatctgcacttt

SEQ ID NO: 1929904 - DNA, 25 bp, Homo sapien
ctttagcatcattgctagcggaaat

SEQ ID NO: 1929905 - DNA, 25 bp, Homo sapien
gcatcattgctagcggaaatctgca

SEQ ID NO: 1929906 - DNA, 25 bp, Homo sapien
tagcatcattgctagcggaaatctg

SEQ ID NO: 1929907 - DNA, 25 bp, Homo sapien
tatagctccaaccacaaagcaaagt

SEQ ID NO: 1929908 - DNA, 25 bp, Homo sapien
tggagcacccatagtctacaagatt

SEQ ID NO: 1929909 - DNA, 25 bp, Homo sapien
tatctgcctagtgactggagcaccc

SEQ ID NO: 1929910 - DNA, 25 bp, Homo sapien
gatttttacatagccctcagaacac

SEQ ID NO: 1929911 - DNA, 25 bp, Homo sapien
ttccagtcagggcatcaccggggct

SEQ ID NO: 1929912 - DNA, 25 bp, Homo sapien
gatggcactattctcttcacagatg

SEQ ID NO: 1929913 - DNA, 25 bp, Homo sapien
aggtcctctttggtacctgaagctg

SEQ ID NO: 1929914 - DNA, 25 bp, Homo sapien
cactggtggggcagcttgtaatagt

SEQ ID NO: 1929915 - DNA, 25 bp, Homo sapien
cagtcacctgctcattgtcagtaag

SEQ ID NO: 1929916 - DNA, 25 bp, Homo sapien
gctcctcaaagtaacctcgaagcca

SEQ ID NO: 1929917 - DNA, 25 bp, Homo sapien
cccagctcctcaaagtaacctcgaa

SEQ ID NO: 1929918 - DNA, 25 bp, Homo sapien
cctcaaagtaacctcgaagccatga

SEQ ID NO: 1929919 - DNA, 25 bp, Homo sapien
ccagctcctcaaagtaacctcgaag

SEQ ID NO: 1929920 - DNA, 25 bp, Homo sapien
tttgggacggttgtggagaacttca

SEQ ID NO: 1929921 - DNA, 25 bp, Homo sapien
gttgtggagaacttcactgtgtttc

SEQ ID NO: 1929922 - DNA, 25 bp, Homo sapien
agtggatacaaccaccaccaagaca

SEQ ID NO: 1929923 - DNA, 25 bp, Homo sapien
gaatgtgctgtgtttgggacggttg

SEQ ID NO: 1929924 - DNA, 25 bp, Homo sapien
tactcatcctattcctgatgctgca

SEQ ID NO: 1929925 - DNA, 25 bp, Homo sapien
ttcttccttactcatcctattcctg

SEQ ID NO: 1929926 - DNA, 25 bp, Homo sapien
tccttactcatcctattcctgatgc

SEQ ID NO: 1929927 - DNA, 25 bp, Homo sapien
cttactcatcctattcctgatgctg

SEQ ID NO: 1929928 - DNA, 25 bp, Homo sapien
taatatcccgctcgtatgctagccc

SEQ ID NO: 1929929 - DNA, 25 bp, Homo sapien
gagtactcatattccacccagacaa

SEQ ID NO: 1929930 - DNA, 25 bp, Homo sapien
gaatccctcctgagattactgaagg

SEQ ID NO: 1929931 - DNA, 25 bp, Homo sapien
taagatctgttgcatgtcagccact

SEQ ID NO: 1929932 - DNA, 25 bp, Homo sapien
tggaggatggtattcccaagatctc

SEQ ID NO: 1929933 - DNA, 25 bp, Homo sapien
aagatctctgctcgttctctgcaaa

SEQ ID NO: 1929934 - DNA, 25 bp, Homo sapien
tgcaaaactaatatgagacagctct

SEQ ID NO: 1929935 - DNA, 25 bp, Homo sapien
tgtgtgtttacccagccctacgaat

SEQ ID NO: 1929936 - DNA, 25 bp, Homo sapien
tggttttcacattgagagctgagct

SEQ ID NO: 1929937 - DNA, 25 bp, Homo sapien
ttctggtcaggtctgatacattttc

SEQ ID NO: 1929938 - DNA, 25 bp, Homo sapien
gtattgtattctggtcaggtctgat

SEQ ID NO: 1929939 - DNA, 25 bp, Homo sapien
gaattgtggtcctaatcatacaatg

SEQ ID NO: 1929940 - DNA, 25 bp, Homo sapien
tgccgaacacatgctgctaatccca

SEQ ID NO: 1929941 - DNA, 25 bp, Homo sapien
ccagagctcagttcttgtgggtgta

SEQ ID NO: 1929942 - DNA, 25 bp, Homo sapien
ccatgtgggaaaagtgcaagtctcc

SEQ ID NO: 1929943 - DNA, 25 bp, Homo sapien
cattggctccccatggaagagtgca

SEQ ID NO: 1929944 - DNA, 25 bp, Homo sapien
tctttgtattagtaagacactggac

SEQ ID NO: 1929945 - DNA, 25 bp, Homo sapien
tcctttgtacaaagaacaagcttct

SEQ ID NO: 1929946 - DNA, 25 bp, Homo sapien
cagaaacgaaacaaggttcttgctc

SEQ ID NO: 1929947 - DNA, 25 bp, Homo sapien
gggctgcccatgtggcatgggcaag

SEQ ID NO: 1929948 - DNA, 25 bp, Homo sapien
caggaaggcacagtcgcttgaaaca

SEQ ID NO: 1929949 - DNA, 25 bp, Homo sapien
cagaatgacaactttggcaaggagg

SEQ ID NO: 1929950 - DNA, 25 bp, Homo sapien
ttgctatgccgatgtaaactttcct

SEQ ID NO: 1929951 - DNA, 25 bp, Homo sapien
agatctgagctgtggtggaaccctg

SEQ ID NO: 1929952 - DNA, 25 bp, Homo sapien
caagttcattgaatgccaggctagg

SEQ ID NO: 1929953 - DNA, 25 bp, Homo sapien
cattcgtccccttgcctggttctga

SEQ ID NO: 1929954 - DNA, 25 bp, Homo sapien
taggctgttacccagtgttctcaaa

SEQ ID NO: 1929955 - DNA, 25 bp, Homo sapien
gaatccgtaggagaccacttaggct

SEQ ID NO: 1929956 - DNA, 25 bp, Homo sapien
aagtggattaagtccttgaattcca

SEQ ID NO: 1929957 - DNA, 25 bp, Homo sapien
caacaggaacagtgtaattaaaagt

SEQ ID NO: 1929958 - DNA, 25 bp, Homo sapien
ggagaggaaatccaatatatttgaa

SEQ ID NO: 1929959 - DNA, 25 bp, Homo sapien
acaggaacagtgtaattaaaagtgg

SEQ ID NO: 1929960 - DNA, 25 bp, Homo sapien
ctgagatccctgtggtcggcccttt

SEQ ID NO: 1929961 - DNA, 25 bp, Homo sapien
gaagctccaggaatctcatcagaag

SEQ ID NO: 1929962 - DNA, 25 bp, Homo sapien
tgcagctcaacacttccaaacagag

SEQ ID NO: 1929963 - DNA, 25 bp, Homo sapien
catcagaagccttgactccaggagg

SEQ ID NO: 1929964 - DNA, 25 bp, Homo sapien
taagagtactgacttctctcatgac

SEQ ID NO: 1929965 - DNA, 25 bp, Homo sapien
gtactgacttctctcatgacagctg

SEQ ID NO: 1929966 - DNA, 25 bp, Homo sapien
ttccactgtaagaaacttggctggg

SEQ ID NO: 1929967 - DNA, 25 bp, Homo sapien
gggccagtcaagatggttcagttta

SEQ ID NO: 1929968 - DNA, 25 bp, Homo sapien
tgtactactgagagcttttctggac

SEQ ID NO: 1929969 - DNA, 25 bp, Homo sapien
acagatggctgtactactgagagct

SEQ ID NO: 1929970 - DNA, 25 bp, Homo sapien
gccaccttgtaggttagagtatttc

SEQ ID NO: 1929971 - DNA, 25 bp, Homo sapien
ggttagagtatttcggacagatggc

SEQ ID NO: 1929972 - DNA, 25 bp, Homo sapien
tggttttgacagagtgatgctgttg

SEQ ID NO: 1929973 - DNA, 25 bp, Homo sapien
ctgttggtatttagaatcctgactt

SEQ ID NO: 1929974 - DNA, 25 bp, Homo sapien
atccttttcggtggagctgcgggac

SEQ ID NO: 1929975 - DNA, 25 bp, Homo sapien
gacacatgtgcgatggaaactggcc

SEQ ID NO: 1929976 - DNA, 25 bp, Homo sapien
ggtatattagattgcacatggtggt

SEQ ID NO: 1929977 - DNA, 25 bp, Homo sapien
aacctccatgttaaagtagacttca

SEQ ID NO: 1929978 - DNA, 25 bp, Homo sapien
tatctagcatactagttccagaaaa

SEQ ID NO: 1929979 - DNA, 25 bp, Homo sapien
tagacttcaatatctagcatactag

SEQ ID NO: 1929980 - DNA, 25 bp, Homo sapien
taaactttaactttctcaacaatgc

SEQ ID NO: 1929981 - DNA, 25 bp, Homo sapien
actttaactttctcaacaatgccct

SEQ ID NO: 1929982 - DNA, 25 bp, Homo sapien
tttcctttcagcacgtcttcctcca

SEQ ID NO: 1929983 - DNA, 25 bp, Homo sapien
cagaggtttcctttcagcacgtctt

SEQ ID NO: 1929984 - DNA, 25 bp, Homo sapien
ggtttcctttcagcacgtcttcctc

SEQ ID NO: 1929985 - DNA, 25 bp, Homo sapien
gaggtttcctttcagcacgtcttcc

SEQ ID NO: 1929986 - DNA, 25 bp, Homo sapien
cattgggcattgctgtcgctgttgc

SEQ ID NO: 1929987 - DNA, 25 bp, Homo sapien
ttgctgcagttacggcacttgagga

SEQ ID NO: 1929988 - DNA, 25 bp, Homo sapien
ctgcagttacggcacttgaggaggt

SEQ ID NO: 1929989 - DNA, 25 bp, Homo sapien
gttgctccatacgttgctgcagtta

SEQ ID NO: 1929990 - DNA, 25 bp, Homo sapien
cgtggtaccgtaactgactaggcca

SEQ ID NO: 1929991 - DNA, 25 bp, Homo sapien
agttattgcccccacattaatccct

SEQ ID NO: 1929992 - DNA, 25 bp, Homo sapien
ccacattaatccctggctccgtggt

SEQ ID NO: 1929993 - DNA, 25 bp, Homo sapien
agctccacttccaataccgggaagt

SEQ ID NO: 1929994 - DNA, 25 bp, Homo sapien
gaggagcacaggccaacaacaaaca

SEQ ID NO: 1929995 - DNA, 25 bp, Homo sapien
gctcaagcagtattttacaattcat

SEQ ID NO: 1929996 - DNA, 25 bp, Homo sapien
acaacaaacacttcaggctcaagca

SEQ ID NO: 1929997 - DNA, 25 bp, Homo sapien
ggagcacaggccaacaacaaacact

SEQ ID NO: 1929998 - DNA, 25 bp, Homo sapien
tagttggattgcgtgtctgggtaac

SEQ ID NO: 1929999 - DNA, 25 bp, Homo sapien
actcctgtgcttggcgaatattcta

SEQ ID NO: 1930000 - DNA, 25 bp, Homo sapien
gtaactggagttataactcctgtgc

SEQ ID NO: 1930001 - DNA, 25 bp, Homo sapien
gcgaatattctagtactcagtgtca

SEQ ID NO: 1930002 - DNA, 25 bp, Homo sapien
acagtggaggtctgacttggcaaat

SEQ ID NO: 1930003 - DNA, 25 bp, Homo sapien
aaacaaacgatgctgcttgtcaggg

SEQ ID NO: 1930004 - DNA, 25 bp, Homo sapien
cctatcgtgagttagtgaggcccag

SEQ ID NO: 1930005 - DNA, 25 bp, Homo sapien
tatgacccagtcaatcctatcgtga

SEQ ID NO: 1930006 - DNA, 25 bp, Homo sapien
tatagacctagtcatgcagacaagg

SEQ ID NO: 1930007 - DNA, 25 bp, Homo sapien
aaacatccagttggtctacagtcca

SEQ ID NO: 1930008 - DNA, 25 bp, Homo sapien
cagacaaggatgcaaagggtgatga

SEQ ID NO: 1930009 - DNA, 25 bp, Homo sapien
taacatactgaagcgtctgagaaat

SEQ ID NO: 1930010 - DNA, 25 bp, Homo sapien
ggtctgtctccatactcactggcca

SEQ ID NO: 1930011 - DNA, 25 bp, Homo sapien
tgataatagcactgatctaagggag

SEQ ID NO: 1930012 - DNA, 25 bp, Homo sapien
taacagctttgtctctcagaggatg

SEQ ID NO: 1930013 - DNA, 25 bp, Homo sapien
tactcactggccatgtcatctgggc

SEQ ID NO: 1930014 - DNA, 25 bp, Homo sapien
caagtctaggtttttccatctgttt

SEQ ID NO: 1930015 - DNA, 25 bp, Homo sapien
tttcttgcagtatttggcaagtttg

SEQ ID NO: 1930016 - DNA, 25 bp, Homo sapien
tgagtgggctccagcggagagtgtg

SEQ ID NO: 1930017 - DNA, 25 bp, Homo sapien
ctatccgtgatcagcaacatctttt

SEQ ID NO: 1930018 - DNA, 25 bp, Homo sapien
ggagtatttcctatccgtgatcagc

SEQ ID NO: 1930019 - DNA, 25 bp, Homo sapien
tccattccggataactctttcaccc

SEQ ID NO: 1930020 - DNA, 25 bp, Homo sapien
aattccctttagggtctcctcagca

SEQ ID NO: 1930021 - DNA, 25 bp, Homo sapien
tgctggccatccacccggaaattcc

SEQ ID NO: 1930022 - DNA, 25 bp, Homo sapien
ctcctcagcattccattccggataa

SEQ ID NO: 1930023 - DNA, 25 bp, Homo sapien
gcgaaactctaacccactcaaagta

SEQ ID NO: 1930024 - DNA, 25 bp, Homo sapien
tcagcatagtggcttctttggattt

SEQ ID NO: 1930025 - DNA, 25 bp, Homo sapien
gcacttccttgagcgaaactctaac

SEQ ID NO: 1930026 - DNA, 25 bp, Homo sapien
tactacagcacttccttgagcgaaa

SEQ ID NO: 1930027 - DNA, 25 bp, Homo sapien
ctttgtgaagagtttagctttctta

SEQ ID NO: 1930028 - DNA, 25 bp, Homo sapien
ctggaacttcaaaacaatctttgtg

SEQ ID NO: 1930029 - DNA, 25 bp, Homo sapien
tgctgaaccaattaaggccagtggt

SEQ ID NO: 1930030 - DNA, 25 bp, Homo sapien
ccatttgctgaaccaattaaggcca

SEQ ID NO: 1930031 - DNA, 25 bp, Homo sapien
actgagaggggtgttctctaggaca

SEQ ID NO: 1930032 - DNA, 25 bp, Homo sapien
cactgaaaatgtcgggcaggtcttg

SEQ ID NO: 1930033 - DNA, 25 bp, Homo sapien
gactgccacttgtcattactgagag

SEQ ID NO: 1930034 - DNA, 25 bp, Homo sapien
cgggcaggtcttgctttttaccaag

SEQ ID NO: 1930035 - DNA, 25 bp, Homo sapien
tcattctgagcaatccagtgttaac

SEQ ID NO: 1930036 - DNA, 25 bp, Homo sapien
ttaaactcttcattctgagcaatcc

SEQ ID NO: 1930037 - DNA, 25 bp, Homo sapien
cagcaattaaactcttcattctgag

SEQ ID NO: 1930038 - DNA, 25 bp, Homo sapien
cttcagacacagcaattaaactctt

SEQ ID NO: 1930039 - DNA, 25 bp, Homo sapien
tcatagagcgcaactctcaagccca

SEQ ID NO: 1930040 - DNA, 25 bp, Homo sapien
cagtccattaccagaaaggatacag

SEQ ID NO: 1930041 - DNA, 25 bp, Homo sapien
aggatacagtctcatagagcgcaac

SEQ ID NO: 1930042 - DNA, 25 bp, Homo sapien
caggacccagtccattaccagaaag

SEQ ID NO: 1930043 - DNA, 25 bp, Homo sapien
cacatggtgacaggaaggagaagtg

SEQ ID NO: 1930044 - DNA, 25 bp, Homo sapien
cttcttcacatggtgacaggaagga

SEQ ID NO: 1930045 - DNA, 25 bp, Homo sapien
tccttcttcacatggtgacaggaag

SEQ ID NO: 1930046 - DNA, 25 bp, Homo sapien
ttcacatggtgacaggaaggagaag

SEQ ID NO: 1930047 - DNA, 25 bp, Homo sapien
ggtaacagcaccctgtcggagaaca

SEQ ID NO: 1930048 - DNA, 25 bp, Homo sapien
tcggagaacatgctgggccacctcg

SEQ ID NO: 1930049 - DNA, 25 bp, Homo sapien
ccgctcttccgggaatgggcccatt

SEQ ID NO: 1930050 - DNA, 25 bp, Homo sapien
ctaggtttcatgagctacatcgtgg

SEQ ID NO: 1930051 - DNA, 25 bp, Homo sapien
cgtgtccgccttgttccgggtcgca

SEQ ID NO: 1930052 - DNA, 25 bp, Homo sapien
taacgtgggagctgatcccacgggc

SEQ ID NO: 1930053 - DNA, 25 bp, Homo sapien
cctgctccaggagaagactaggagg

SEQ ID NO: 1930054 - DNA, 25 bp, Homo sapien
ctcagcattcgctgccgaaatgagc

SEQ ID NO: 1930055 - DNA, 25 bp, Homo sapien
tctgtcttttatggattctgtgaca

SEQ ID NO: 1930056 - DNA, 25 bp, Homo sapien
tgtgacatgtttatattcacccatg

SEQ ID NO: 1930057 - DNA, 25 bp, Homo sapien
tctgtaaataccaaacgctactgat

SEQ ID NO: 1930058 - DNA, 25 bp, Homo sapien
tttgcaccattagccaatctgtctt

SEQ ID NO: 1930059 - DNA, 25 bp, Homo sapien
ttagtggctgtcttgcaatatttca

SEQ ID NO: 1930060 - DNA, 25 bp, Homo sapien
ctagttaaaacactggcggggtgcg

SEQ ID NO: 1930061 - DNA, 25 bp, Homo sapien
ttttcttggctattagtggctgtct

SEQ ID NO: 1930062 - DNA, 25 bp, Homo sapien
caataggagtccaattactagttaa

SEQ ID NO: 1930063 - DNA, 25 bp, Homo sapien
caggcctgataggaaaaatctgctc

SEQ ID NO: 1930064 - DNA, 25 bp, Homo sapien
tatggctccccgcaaagggacttgc

SEQ ID NO: 1930065 - DNA, 25 bp, Homo sapien
tccctgctaggctaagtagaaacca

SEQ ID NO: 1930066 - DNA, 25 bp, Homo sapien
gaatacatatcactgccaggcctga

SEQ ID NO: 1930067 - DNA, 25 bp, Homo sapien
ggtccacagttgctatctggtagac

SEQ ID NO: 1930068 - DNA, 25 bp, Homo sapien
gacttgatatccaaagatctctaga

SEQ ID NO: 1930069 - DNA, 25 bp, Homo sapien
tctggtagacctttagcgttttgaa

SEQ ID NO: 1930070 - DNA, 25 bp, Homo sapien
aatccaaacaagtaaactccaattg

SEQ ID NO: 1930071 - DNA, 25 bp, Homo sapien
gctttcagaccacgctgtcacagga

SEQ ID NO: 1930072 - DNA, 25 bp, Homo sapien
gaggcatcctggcaaggctacagct

SEQ ID NO: 1930073 - DNA, 25 bp, Homo sapien
tcaaatcggaagtcccgtagcctgg

SEQ ID NO: 1930074 - DNA, 25 bp, Homo sapien
ggatggcaacctcagtcaccaggta

SEQ ID NO: 1930075 - DNA, 25 bp, Homo sapien
cagtcataatcccaatcattctgcc

SEQ ID NO: 1930076 - DNA, 25 bp, Homo sapien
caaagcccctctggtagtggtccac

SEQ ID NO: 1930077 - DNA, 25 bp, Homo sapien
tgaggtcatcgccaaagcccctctg

SEQ ID NO: 1930078 - DNA, 25 bp, Homo sapien
gtcataatcccaatcattctgccca

SEQ ID NO: 1930079 - DNA, 25 bp, Homo sapien
ctcacaatcatggtggaagccaaag

SEQ ID NO: 1930080 - DNA, 25 bp, Homo sapien
cacaatcatggtggaagccaaagga

SEQ ID NO: 1930081 - DNA, 25 bp, Homo sapien
caatcatggtggaagccaaaggagg

SEQ ID NO: 1930082 - DNA, 25 bp, Homo sapien
catggtggaagccaaaggaggagca

SEQ ID NO: 1930083 - DNA, 25 bp, Homo sapien
taagctctatgtacagaagaacaga

SEQ ID NO: 1930084 - DNA, 25 bp, Homo sapien
caagtgtaggcaaaatgtgtcaaga

SEQ ID NO: 1930085 - DNA, 25 bp, Homo sapien
caagaagagtctttaaatacatcta

SEQ ID NO: 1930086 - DNA, 25 bp, Homo sapien
cagtccaaatcagtttctaagaata

SEQ ID NO: 1930087 - DNA, 25 bp, Homo sapien
gagtttagaaggcttgtgttgctga

SEQ ID NO: 1930088 - DNA, 25 bp, Homo sapien
tttagaaggcttgtgttgctgatac

SEQ ID NO: 1930089 - DNA, 25 bp, Homo sapien
cttgagtttagaaggcttgtgttgc

SEQ ID NO: 1930090 - DNA, 25 bp, Homo sapien
aaatccttgagtttagaaggcttgt

SEQ ID NO: 1930091 - DNA, 25 bp, Homo sapien
tcttctttagttcgctgtccttctg

SEQ ID NO: 1930092 - DNA, 25 bp, Homo sapien
ttctttagttcgctgtccttctgac

SEQ ID NO: 1930093 - DNA, 25 bp, Homo sapien
ttcttctttagttcgctgtccttct

SEQ ID NO: 1930094 - DNA, 25 bp, Homo sapien
ctttagttcgctgtccttctgactg

SEQ ID NO: 1930095 - DNA, 25 bp, Homo sapien
gggaagattcccaagatctattctc

SEQ ID NO: 1930096 - DNA, 25 bp, Homo sapien
tgaagtttctggactagaaaatggg

SEQ ID NO: 1930097 - DNA, 25 bp, Homo sapien
tattaaagaaactggatcccaatgt

SEQ ID NO: 1930098 - DNA, 25 bp, Homo sapien
gattcccaagatctattctctttct

SEQ ID NO: 1930099 - DNA, 25 bp, Homo sapien
gttgctggattatctgagtcacaaa

SEQ ID NO: 1930100 - DNA, 25 bp, Homo sapien
gctcaattgcacgaagcttaacctt

SEQ ID NO: 1930101 - DNA, 25 bp, Homo sapien
tataattggtcttattagcagccgg

SEQ ID NO: 1930102 - DNA, 25 bp, Homo sapien
cctttagaacgtccaacatgtttgg

SEQ ID NO: 1930103 - DNA, 25 bp, Homo sapien
cgggaggaaaacacggtggctggag

SEQ ID NO: 1930104 - DNA, 25 bp, Homo sapien
gaggaaaacacggtggctggagaga

SEQ ID NO: 1930105 - DNA, 25 bp, Homo sapien
gggaggaaaacacggtggctggaga

SEQ ID NO: 1930106 - DNA, 25 bp, Homo sapien
ggaaaacacggtggctggagagatg

SEQ ID NO: 1930107 - DNA, 25 bp, Homo sapien
ggcagcccgcgatgatgacagctga

SEQ ID NO: 1930108 - DNA, 25 bp, Homo sapien
gacagctgacccaaactaatgcgct

SEQ ID NO: 1930109 - DNA, 25 bp, Homo sapien
gcgctcgtcactcaagccaaaggaa

SEQ ID NO: 1930110 - DNA, 25 bp, Homo sapien
actcagatgggcagcccgcgatgat

SEQ ID NO: 1930111 - DNA, 25 bp, Homo sapien
caatttctgtaatgctagtagcgat

SEQ ID NO: 1930112 - DNA, 25 bp, Homo sapien
ctaattagaaccaaaacaggagcaa

SEQ ID NO: 1930113 - DNA, 25 bp, Homo sapien
tagcaaggaaagagtgtcaatccca

SEQ ID NO: 1930114 - DNA, 25 bp, Homo sapien
taagcaaagcttaagatgggtactg

SEQ ID NO: 1930115 - DNA, 25 bp, Homo sapien
actatttttcagttcctgcatttcc

SEQ ID NO: 1930116 - DNA, 25 bp, Homo sapien
tatttttcagttcctgcatttccac

SEQ ID NO: 1930117 - DNA, 25 bp, Homo sapien
tagaatttgtactatttttcagttc

SEQ ID NO: 1930118 - DNA, 25 bp, Homo sapien
atttgtactatttttcagttcctgc

SEQ ID NO: 1930119 - DNA, 25 bp, Homo sapien
agtcagctcattttcaagggcagct

SEQ ID NO: 1930120 - DNA, 25 bp, Homo sapien
gaaaagtcagctcattttcaagggc

SEQ ID NO: 1930121 - DNA, 25 bp, Homo sapien
aaagtcagctcattttcaagggcag

SEQ ID NO: 1930122 - DNA, 25 bp, Homo sapien
tctgagagcgaagaaaagtcagctc

SEQ ID NO: 1930123 - DNA, 25 bp, Homo sapien
cgaactagtcgcaaaggatgaaaaa

SEQ ID NO: 1930124 - DNA, 25 bp, Homo sapien
gtgacagtggatcccgaactagtcg

SEQ ID NO: 1930125 - DNA, 25 bp, Homo sapien
tggatcccgaactagtcgcaaagga

SEQ ID NO: 1930126 - DNA, 25 bp, Homo sapien
gcaggtgacagtggatcccgaacta

SEQ ID NO: 1930127 - DNA, 25 bp, Homo sapien
aatctgagataactggcttcttcat

SEQ ID NO: 1930128 - DNA, 25 bp, Homo sapien
ctacagagttcaagagcgggatcaa

SEQ ID NO: 1930129 - DNA, 25 bp, Homo sapien
cagcaaaagatggaaccatagatcc

SEQ ID NO: 1930130 - DNA, 25 bp, Homo sapien
agagtctacagagttcaagagcggg

SEQ ID NO: 1930131 - DNA, 25 bp, Homo sapien
caaaagatggaaccatagatccaca

SEQ ID NO: 1930132 - DNA, 25 bp, Homo sapien
aattaggtcttcgacaaggttccag

SEQ ID NO: 1930133 - DNA, 25 bp, Homo sapien
ttcgacaaggttccagtggaagcat

SEQ ID NO: 1930134 - DNA, 25 bp, Homo sapien
ggtcttcgacaaggttccagtggaa

SEQ ID NO: 1930135 - DNA, 25 bp, Homo sapien
ctcaaaattaggtcttcgacaaggt

SEQ ID NO: 1930136 - DNA, 25 bp, Homo sapien
agtctttattttcccaaatcagcaa

SEQ ID NO: 1930137 - DNA, 25 bp, Homo sapien
tctttattttcccaaatcagcaaaa

SEQ ID NO: 1930138 - DNA, 25 bp, Homo sapien
gtctttattttcccaaatcagcaaa

SEQ ID NO: 1930139 - DNA, 25 bp, Homo sapien
aaaggcggtgctcaatcctctctca

SEQ ID NO: 1930140 - DNA, 25 bp, Homo sapien
tcaaaggcggtgctcaatcctctct

SEQ ID NO: 1930141 - DNA, 25 bp, Homo sapien
ttctcaaaggcggtgctcaatcctc

SEQ ID NO: 1930142 - DNA, 25 bp, Homo sapien
cggtgctcaatcctctctcatgtgg

SEQ ID NO: 1930143 - DNA, 25 bp, Homo sapien
gttctacaggaacgccaaaatattc

SEQ ID NO: 1930144 - DNA, 25 bp, Homo sapien
ctgttctacaggaacgccaaaatat

SEQ ID NO: 1930145 - DNA, 25 bp, Homo sapien
tctacaggaacgccaaaatattcca

SEQ ID NO: 1930146 - DNA, 25 bp, Homo sapien
tacaggaacgccaaaatattccagc

SEQ ID NO: 1930147 - DNA, 25 bp, Homo sapien
ttaagatattcagtatgagagacat

SEQ ID NO: 1930148 - DNA, 25 bp, Homo sapien
cttaagatattcagtatgagagaca

SEQ ID NO: 1930149 - DNA, 25 bp, Homo sapien
acagaagccaattcaaaggaacatt

SEQ ID NO: 1930150 - DNA, 25 bp, Homo sapien
ttcaaaggaacattatcagtttctt

SEQ ID NO: 1930151 - DNA, 25 bp, Homo sapien
gaagccaattcaaaggaacattatc

SEQ ID NO: 1930152 - DNA, 25 bp, Homo sapien
gccaattcaaaggaacattatcagt

SEQ ID NO: 1930153 - DNA, 25 bp, Homo sapien
cacgctcagccagggtaatgttatg

SEQ ID NO: 1930154 - DNA, 25 bp, Homo sapien
tccttgtgcagatcgctcagacgtc

SEQ ID NO: 1930155 - DNA, 25 bp, Homo sapien
tcagcgaggaataagaggtcaaccc

SEQ ID NO: 1930156 - DNA, 25 bp, Homo sapien
tcaccagaacatcaagcggagggcg

SEQ ID NO: 1930157 - DNA, 25 bp, Homo sapien
tgctagtccctaggaccggactgct

SEQ ID NO: 1930158 - DNA, 25 bp, Homo sapien
aggaccggactgctacttccgcatg

SEQ ID NO: 1930159 - DNA, 25 bp, Homo sapien
tacttccgcatgacaggactgctac

SEQ ID NO: 1930160 - DNA, 25 bp, Homo sapien
tgacaggactgctacttccgcatcc

SEQ ID NO: 1930161 - DNA, 25 bp, Homo sapien
gaacataagtttgcagtaggatggg

SEQ ID NO: 1930162 - DNA, 25 bp, Homo sapien
taagttccagcagaactatccaggg

SEQ ID NO: 1930163 - DNA, 25 bp, Homo sapien
gtttggagtgtttaagttccagcag

SEQ ID NO: 1930164 - DNA, 25 bp, Homo sapien
aaagaacataagtttgcagtaggat

SEQ ID NO: 1930165 - DNA, 25 bp, Homo sapien
gataaggtcccagattaacgtaaga

SEQ ID NO: 1930166 - DNA, 25 bp, Homo sapien
tgtaatcactatgacagtaccaagc

SEQ ID NO: 1930167 - DNA, 25 bp, Homo sapien
ttctaaaacaataggagtccagctc

SEQ ID NO: 1930168 - DNA, 25 bp, Homo sapien
ttaaaactgacaggatggcacatgg

SEQ ID NO: 1930169 - DNA, 25 bp, Homo sapien
ggagtttataaagcatttatcaagc

SEQ ID NO: 1930170 - DNA, 25 bp, Homo sapien
catttatcaagccttaccacaccag

SEQ ID NO: 1930171 - DNA, 25 bp, Homo sapien
tcaagccttaccacaccagtaatct

SEQ ID NO: 1930172 - DNA, 25 bp, Homo sapien
aggtttgagggagtttataaagcat

SEQ ID NO: 1930173 - DNA, 25 bp, Homo sapien
gaaataagatgtgtgaaatagacac

SEQ ID NO: 1930174 - DNA, 25 bp, Homo sapien
tatgacaatttacaagggtccctgt

SEQ ID NO: 1930175 - DNA, 25 bp, Homo sapien
tcctaggatgctgaaaggtacacat

SEQ ID NO: 1930176 - DNA, 25 bp, Homo sapien
cacactgagtaagaatcgtttagcc

SEQ ID NO: 1930177 - DNA, 25 bp, Homo sapien
caaagtatgttaacgcaggtatcag

SEQ ID NO: 1930178 - DNA, 25 bp, Homo sapien
acaataaaagggtcatgaaaattct

SEQ ID NO: 1930179 - DNA, 25 bp, Homo sapien
gcactgcaaatcctcgaaagtgttt

SEQ ID NO: 1930180 - DNA, 25 bp, Homo sapien
cacaatactaaggatctgagggcca

SEQ ID NO: 1930181 - DNA, 25 bp, Homo sapien
taatctaggtgctagacgcactgca

SEQ ID NO: 1930182 - DNA, 25 bp, Homo sapien
ggaaaaaggttagatcaatgccgca

SEQ ID NO: 1930183 - DNA, 25 bp, Homo sapien
tcaacttattctgcaggatagacct

SEQ ID NO: 1930184 - DNA, 25 bp, Homo sapien
gttacactacaaactaatgttcagc

SEQ ID NO: 1930185 - DNA, 25 bp, Homo sapien
tccaggatttatatgtagagctaac

SEQ ID NO: 1930186 - DNA, 25 bp, Homo sapien
cataccaaccccaggattacagttt

SEQ ID NO: 1930187 - DNA, 25 bp, Homo sapien
ctatagactacttgcaaacagtaaa

SEQ ID NO: 1930188 - DNA, 25 bp, Homo sapien
tatagactacttgcaaacagtaaaa

SEQ ID NO: 1930189 - DNA, 25 bp, Homo sapien
atagactacttgcaaacagtaaaat

SEQ ID NO: 1930190 - DNA, 25 bp, Homo sapien
tagactacttgcaaacagtaaaatt

SEQ ID NO: 1930191 - DNA, 25 bp, Homo sapien
aaaaaatggtgggtgcaagttctgc

SEQ ID NO: 1930192 - DNA, 25 bp, Homo sapien
tgggtgcaagttctgctctgttgta

SEQ ID NO: 1930193 - DNA, 25 bp, Homo sapien
gcaagttctgctctgttgtaatctt

SEQ ID NO: 1930194 - DNA, 25 bp, Homo sapien
ctgctctgttgtaatcttacttcat

SEQ ID NO: 1930195 - DNA, 25 bp, Homo sapien
aaagattaacaaaagatgcggagag

SEQ ID NO: 1930196 - DNA, 25 bp, Homo sapien
caaaagatgcggagagtgaaaagga

SEQ ID NO: 1930197 - DNA, 25 bp, Homo sapien
ttaacaaaagatgcggagagtgaaa

SEQ ID NO: 1930198 - DNA, 25 bp, Homo sapien
tcacccaccaaacctatatcaaaaa

SEQ ID NO: 1930199 - DNA, 25 bp, Homo sapien
cacgttgaaaagtaccacgacctct

SEQ ID NO: 1930200 - DNA, 25 bp, Homo sapien
tctgccacgttgaaaagtaccacga

SEQ ID NO: 1930201 - DNA, 25 bp, Homo sapien
ggtatttgtcatgagtccatttagg

SEQ ID NO: 1930202 - DNA, 25 bp, Homo sapien
tccatttaggactgctacctgattt

SEQ ID NO: 1930203 - DNA, 25 bp, Homo sapien
ggtaaatcatgacacggtccctaga

SEQ ID NO: 1930204 - DNA, 25 bp, Homo sapien
tacacaatacaccatggattctggg

SEQ ID NO: 1930205 - DNA, 25 bp, Homo sapien
tattcatacaaaaggccaagggagt

SEQ ID NO: 1930206 - DNA, 25 bp, Homo sapien
gagtaccagtagtgagcaaccatcc

SEQ ID NO: 1930207 - DNA, 25 bp, Homo sapien
gcaccaaattagtgtatctagcagc

SEQ ID NO: 1930208 - DNA, 25 bp, Homo sapien
tagtctctgaagcataaattctctg

SEQ ID NO: 1930209 - DNA, 25 bp, Homo sapien
cctctaagtaggtatgtcatggaca

SEQ ID NO: 1930210 - DNA, 25 bp, Homo sapien
tataatgcaggagagacccttttcc

SEQ ID NO: 1930211 - DNA, 25 bp, Homo sapien
tgagttgtttggaccagtatttgtc

SEQ ID NO: 1930212 - DNA, 25 bp, Homo sapien
gttgtttggaccagtatttgtccca

SEQ ID NO: 1930213 - DNA, 25 bp, Homo sapien
gtttggaccagtatttgtcccagca

SEQ ID NO: 1930214 - DNA, 25 bp, Homo sapien
tggaccagtatttgtcccagcaaaa

SEQ ID NO: 1930215 - DNA, 25 bp, Homo sapien
cattaacaaagttgtttagtgatgc

SEQ ID NO: 1930216 - DNA, 25 bp, Homo sapien
gtgatgcaatcaaaaggtatttagt

SEQ ID NO: 1930217 - DNA, 25 bp, Homo sapien
acattaacaaagttgtttagtgatg

SEQ ID NO: 1930218 - DNA, 25 bp, Homo sapien
ttagtgatgcaatcaaaaggtattt

SEQ ID NO: 1930219 - DNA, 25 bp, Homo sapien
tgatctcgaagtcaagaaaagtacc

SEQ ID NO: 1930220 - DNA, 25 bp, Homo sapien
cttggtctttaaggactaggtacag

SEQ ID NO: 1930221 - DNA, 25 bp, Homo sapien
gaaaagtacctagtttatacagatg

SEQ ID NO: 1930222 - DNA, 25 bp, Homo sapien
cagatgcttctagacctcaaaatgg

SEQ ID NO: 1930223 - DNA, 25 bp, Homo sapien
aacaatcaaagataattttttcact

SEQ ID NO: 1930224 - DNA, 25 bp, Homo sapien
acaatcaaagataattttttcactt

SEQ ID NO: 1930225 - DNA, 25 bp, Homo sapien
caatcaaagataattttttcactta

SEQ ID NO: 1930226 - DNA, 25 bp, Homo sapien
caaacaatcaaagataattttttca

SEQ ID NO: 1930227 - DNA, 25 bp, Homo sapien
tgcaaagcctgagtattctttcatt

SEQ ID NO: 1930228 - DNA, 25 bp, Homo sapien
ggtcggctaactcctgcaaagcctg

SEQ ID NO: 1930229 - DNA, 25 bp, Homo sapien
gttcctcgtggtcggctaactcctg

SEQ ID NO: 1930230 - DNA, 25 bp, Homo sapien
tcgtggtcggctaactcctgcaaag

SEQ ID NO: 1930231 - DNA, 25 bp, Homo sapien
gaagatcgagaatgatcttgctctc

SEQ ID NO: 1930232 - DNA, 25 bp, Homo sapien
tgaagatcgagaatgatcttgctct

SEQ ID NO: 1930233 - DNA, 25 bp, Homo sapien
ggatgaagatcgagaatgatcttgc

SEQ ID NO: 1930234 - DNA, 25 bp, Homo sapien
agaggatgaagatcgagaatgatct

SEQ ID NO: 1930235 - DNA, 25 bp, Homo sapien
ctgcagtttgtacaccctgggtgaa

SEQ ID NO: 1930236 - DNA, 25 bp, Homo sapien
caacacccgaaaaggtcatacctgt

SEQ ID NO: 1930237 - DNA, 25 bp, Homo sapien
aatgaaaaacatgctagggcctgcc

SEQ ID NO: 1930238 - DNA, 25 bp, Homo sapien
gtgcggaatcaagcataacgaacca

SEQ ID NO: 1930239 - DNA, 25 bp, Homo sapien
tcagtgttagcttgctattccaaag

SEQ ID NO: 1930240 - DNA, 25 bp, Homo sapien
ttttgtcctcatccaccataagccg

SEQ ID NO: 1930241 - DNA, 25 bp, Homo sapien
tgaagtccaacctcctgatgtagcc

SEQ ID NO: 1930242 - DNA, 25 bp, Homo sapien
tgatgtagcctggataataggacac

SEQ ID NO: 1930243 - DNA, 25 bp, Homo sapien
tgaaagcaattaagctgacaattat

SEQ ID NO: 1930244 - DNA, 25 bp, Homo sapien
tttaaacattcgattacacagtcaa

SEQ ID NO: 1930245 - DNA, 25 bp, Homo sapien
gattacacagtcaaaattgaaagca

SEQ ID NO: 1930246 - DNA, 25 bp, Homo sapien
ggctaattagaagctaaaacctatc

SEQ ID NO: 1930247 - DNA, 25 bp, Homo sapien
gatcaatgtcatgccgaaggtcagc

SEQ ID NO: 1930248 - DNA, 25 bp, Homo sapien
gtcagcagagtcacaccttaatttt

SEQ ID NO: 1930249 - DNA, 25 bp, Homo sapien
gatccactggattccctggagccct

SEQ ID NO: 1930250 - DNA, 25 bp, Homo sapien
tctttcttttctacggcgatcaatg

SEQ ID NO: 1930251 - DNA, 25 bp, Homo sapien
aatacagatttcaggggagaaatag

SEQ ID NO: 1930252 - DNA, 25 bp, Homo sapien
cacatattatagagttaaattttat

SEQ ID NO: 1930253 - DNA, 25 bp, Homo sapien
atattatagagttaaattttatgcc

SEQ ID NO: 1930254 - DNA, 25 bp, Homo sapien
ttatagagttaaattttatgccagc

SEQ ID NO: 1930255 - DNA, 25 bp, Homo sapien
acaatatcattaactaagctgaact

SEQ ID NO: 1930256 - DNA, 25 bp, Homo sapien
taactaagctgaacttaacacgaaa

SEQ ID NO: 1930257 - DNA, 25 bp, Homo sapien
cattaactaagctgaacttaacacg

SEQ ID NO: 1930258 - DNA, 25 bp, Homo sapien
tatcattaactaagctgaacttaac

SEQ ID NO: 1930259 - DNA, 25 bp, Homo sapien
ggtatgcttcctcagggtacttggt

SEQ ID NO: 1930260 - DNA, 25 bp, Homo sapien
gtatgcttcctcagggtacttggtg

SEQ ID NO: 1930261 - DNA, 25 bp, Homo sapien
gggtatgcttcctcagggtacttgg

SEQ ID NO: 1930262 - DNA, 25 bp, Homo sapien
tcaaaaacatccacacgattatcca

SEQ ID NO: 1930263 - DNA, 25 bp, Homo sapien
ccacacgattatccattttcctaag

SEQ ID NO: 1930264 - DNA, 25 bp, Homo sapien
caactaatttagcacaccaagacta

SEQ ID NO: 1930265 - DNA, 25 bp, Homo sapien
cagttatttctctcccaatcaacta

SEQ ID NO: 1930266 - DNA, 25 bp, Homo sapien
taagttgttcatcacaatgcaacga

SEQ ID NO: 1930267 - DNA, 25 bp, Homo sapien
cagtgtcttcctatcaaaacaacgt

SEQ ID NO: 1930268 - DNA, 25 bp, Homo sapien
attcgaaggtaactctaggcctcca

SEQ ID NO: 1930269 - DNA, 25 bp, Homo sapien
aacgtttttatatgccagttcagca

SEQ ID NO: 1930270 - DNA, 25 bp, Homo sapien
cagtggctttctgatacgaagtgaa

SEQ ID NO: 1930271 - DNA, 25 bp, Homo sapien
gatacgaagtgaaccgctcgtttag

SEQ ID NO: 1930272 - DNA, 25 bp, Homo sapien
gctttctgatacgaagtgaaccgct

SEQ ID NO: 1930273 - DNA, 25 bp, Homo sapien
tctgatacgaagtgaaccgctcgtt

SEQ ID NO: 1930274 - DNA, 25 bp, Homo sapien
tctatggatgctctaataccttgcc

SEQ ID NO: 1930275 - DNA, 25 bp, Homo sapien
gaatcaagtgttacaaggaactcct

SEQ ID NO: 1930276 - DNA, 25 bp, Homo sapien
tttcgaaagttgctcacaggtccct

SEQ ID NO: 1930277 - DNA, 25 bp, Homo sapien
caatttcttgtacctcaacaggaga

SEQ ID NO: 1930278 - DNA, 25 bp, Homo sapien
gctagcaactcagtttttatgccat

SEQ ID NO: 1930279 - DNA, 25 bp, Homo sapien
ttgagctagcaactcagtttttatg

SEQ ID NO: 1930280 - DNA, 25 bp, Homo sapien
tgcctgtatctttcaacagctattt

SEQ ID NO: 1930281 - DNA, 25 bp, Homo sapien
agaagattcaactttgcctgtatct

SEQ ID NO: 1930282 - DNA, 25 bp, Homo sapien
gccatttcaaaacatattccaggac

SEQ ID NO: 1930283 - DNA, 25 bp, Homo sapien
tgccatttcaaaacatattccagga

SEQ ID NO: 1930284 - DNA, 25 bp, Homo sapien
gcataaagaactgctagaggcaagt

SEQ ID NO: 1930285 - DNA, 25 bp, Homo sapien
aagagctgttcagatcggttgcaca

SEQ ID NO: 1930286 - DNA, 25 bp, Homo sapien
tgagctgttctcatgtcaaacgaca

SEQ ID NO: 1930287 - DNA, 25 bp, Homo sapien
gccaacagtctttgaagttcctgag

SEQ ID NO: 1930288 - DNA, 25 bp, Homo sapien
ttaattcacgatactaaacatacta

SEQ ID NO: 1930289 - DNA, 25 bp, Homo sapien
tttaattcacgatactaaacatact

SEQ ID NO: 1930290 - DNA, 25 bp, Homo sapien
aatttaattcacgatactaaacata

SEQ ID NO: 1930291 - DNA, 25 bp, Homo sapien
atttaattcacgatactaaacatac

SEQ ID NO: 1930292 - DNA, 25 bp, Homo sapien
tgactctgaagtgcttttgctggcc

SEQ ID NO: 1930293 - DNA, 25 bp, Homo sapien
tcttgacagaatggacaagtgtact

SEQ ID NO: 1930294 - DNA, 25 bp, Homo sapien
aacttaatgtggtcaaagatggatc

SEQ ID NO: 1930295 - DNA, 25 bp, Homo sapien
gctggcctgtggcaacttaatgtgg

SEQ ID NO: 1930296 - DNA, 25 bp, Homo sapien
gactgcccacagattatttactggg

SEQ ID NO: 1930297 - DNA, 25 bp, Homo sapien
actgactgcccacagattatttact

SEQ ID NO: 1930298 - DNA, 25 bp, Homo sapien
tatttactgggcatcaatatggaat

SEQ ID NO: 1930299 - DNA, 25 bp, Homo sapien
taagataattaactggaatactgac

SEQ ID NO: 1930300 - DNA, 25 bp, Homo sapien
ctgaaggtagacttttctcgtgcat

SEQ ID NO: 1930301 - DNA, 25 bp, Homo sapien
gacttttctcgtgcatccagattct

SEQ ID NO: 1930302 - DNA, 25 bp, Homo sapien
ggacggtgagaatcactcgctatca

SEQ ID NO: 1930303 - DNA, 25 bp, Homo sapien
cggtgagaatcactcgctatcattt

SEQ ID NO: 1930304 - DNA, 25 bp, Homo sapien
cctgaactgtctataatcctctgtc

SEQ ID NO: 1930305 - DNA, 25 bp, Homo sapien
tcttttgtagtgctaggcctttcca

SEQ ID NO: 1930306 - DNA, 25 bp, Homo sapien
tcctcctcagtattccggtgagatg

SEQ ID NO: 1930307 - DNA, 25 bp, Homo sapien
tatcaagcaggaatactctagactc

SEQ ID NO: 1930308 - DNA, 25 bp, Homo sapien
gcttccaaagttcaccagataagag

SEQ ID NO: 1930309 - DNA, 25 bp, Homo sapien
gccagactgtttatgccacctaaga

SEQ ID NO: 1930310 - DNA, 25 bp, Homo sapien
taacacgaacttctagagattgcct

SEQ ID NO: 1930311 - DNA, 25 bp, Homo sapien
taactctggattgcattcactgtag

SEQ ID NO: 1930312 - DNA, 25 bp, Homo sapien
ctccaccatcaggataaaacgagga

SEQ ID NO: 1930313 - DNA, 25 bp, Homo sapien
catttccaacagaaccagacccaga

SEQ ID NO: 1930314 - DNA, 25 bp, Homo sapien
ggccaggccaaatatcaccggatgt

SEQ ID NO: 1930315 - DNA, 25 bp, Homo sapien
tactgagcatgggagcatcagagca

SEQ ID NO: 1930316 - DNA, 25 bp, Homo sapien
caagatgaactctgactaggtggtg

SEQ ID NO: 1930317 - DNA, 25 bp, Homo sapien
gacctagaagatctatatgaccggc

SEQ ID NO: 1930318 - DNA, 25 bp, Homo sapien
cctagaagatctatatgaccggcga

SEQ ID NO: 1930319 - DNA, 25 bp, Homo sapien
agatctatatgaccggcgagatctg

SEQ ID NO: 1930320 - DNA, 25 bp, Homo sapien
tagaagatctatatgaccggcgaga

SEQ ID NO: 1930321 - DNA, 25 bp, Homo sapien
tatttctgtaatcgcgacgataatc

SEQ ID NO: 1930322 - DNA, 25 bp, Homo sapien
tattatttctgtaatcgcgacgata

SEQ ID NO: 1930323 - DNA, 25 bp, Homo sapien
attatttctgtaatcgcgacgataa

SEQ ID NO: 1930324 - DNA, 25 bp, Homo sapien
atttctgtaatcgcgacgataatct

SEQ ID NO: 1930325 - DNA, 25 bp, Homo sapien
tctactacgagaccttgaatatgtt

SEQ ID NO: 1930326 - DNA, 25 bp, Homo sapien
tacgatctctactacgagaccttga

SEQ ID NO: 1930327 - DNA, 25 bp, Homo sapien
tagaatacatacgatctctactacg

SEQ ID NO: 1930328 - DNA, 25 bp, Homo sapien
tacatacgatctctactacgagacc

SEQ ID NO: 1930329 - DNA, 25 bp, Homo sapien
tagactgtgatctagactttgacct

SEQ ID NO: 1930330 - DNA, 25 bp, Homo sapien
gatcttgatcgagaactagactgtg

SEQ ID NO: 1930331 - DNA, 25 bp, Homo sapien
ttctttctagaatgagatcttgatc

SEQ ID NO: 1930332 - DNA, 25 bp, Homo sapien
tgtgatctagaattggagcgaccca

SEQ ID NO: 1930333 - DNA, 25 bp, Homo sapien
tttactaagagctacagatgctgtg

SEQ ID NO: 1930334 - DNA, 25 bp, Homo sapien
gacaccttgtagaacacaaatttgg

SEQ ID NO: 1930335 - DNA, 25 bp, Homo sapien
gaactgtgacattctcttgcatctg

SEQ ID NO: 1930336 - DNA, 25 bp, Homo sapien
tctcaatcccaagtaagcaagaaat

SEQ ID NO: 1930337 - DNA, 25 bp, Homo sapien
ggatcaagaagtcaagtgaagtctt

SEQ ID NO: 1930338 - DNA, 25 bp, Homo sapien
caagaagtcaagtgaagtctttgag

SEQ ID NO: 1930339 - DNA, 25 bp, Homo sapien
gatactgtaaaaattcttcctggag

SEQ ID NO: 1930340 - DNA, 25 bp, Homo sapien
agatactgtaaaaattcttcctgga

SEQ ID NO: 1930341 - DNA, 25 bp, Homo sapien
aactagccggcctttgtggtgtgca

SEQ ID NO: 1930342 - DNA, 25 bp, Homo sapien
tgctatgactgaggtaacacttatt

SEQ ID NO: 1930343 - DNA, 25 bp, Homo sapien
cagccttagggacagtcagataaaa

SEQ ID NO: 1930344 - DNA, 25 bp, Homo sapien
atcttcgtgttagtatattcgttgg

SEQ ID NO: 1930345 - DNA, 25 bp, Homo sapien
tcactaagagaaggtgctccaaggt

SEQ ID NO: 1930346 - DNA, 25 bp, Homo sapien
taccatgagctaccttttttaagtg

SEQ ID NO: 1930347 - DNA, 25 bp, Homo sapien
ccaactaaagtcgaactgaaatgag

SEQ ID NO: 1930348 - DNA, 25 bp, Homo sapien
gaagggctctggctaaacagcttcc

SEQ ID NO: 1930349 - DNA, 25 bp, Homo sapien
tgacacgccgaatcgcggttccggg

SEQ ID NO: 1930350 - DNA, 25 bp, Homo sapien
tatctccgttgcaaccacacagcgg

SEQ ID NO: 1930351 - DNA, 25 bp, Homo sapien
acagcggccatttcccgactcaaga

SEQ ID NO: 1930352 - DNA, 25 bp, Homo sapien
caagaacgcgaggaaaaccatagag

SEQ ID NO: 1930353 - DNA, 25 bp, Homo sapien
acgtctccgtcacttccgatctggg

SEQ ID NO: 1930354 - DNA, 25 bp, Homo sapien
cctcgggtgccgctaaatatgcggg

SEQ ID NO: 1930355 - DNA, 25 bp, Homo sapien
taagatgttgcctgcggccttctgg

SEQ ID NO: 1930356 - DNA, 25 bp, Homo sapien
tctcgcgggaagatgtgacggctcc

SEQ ID NO: 1930357 - DNA, 25 bp, Homo sapien
cagttgagctttcagcctgtgacga

SEQ ID NO: 1930358 - DNA, 25 bp, Homo sapien
ggaacacagcccaacgtagcttggt

SEQ ID NO: 1930359 - DNA, 25 bp, Homo sapien
cacatcggcaacgttggcataggca

SEQ ID NO: 1930360 - DNA, 25 bp, Homo sapien
aataaagagcacgaagcagttgagc

SEQ ID NO: 1930361 - DNA, 25 bp, Homo sapien
cggactttggctgtagttcctgctg

SEQ ID NO: 1930362 - DNA, 25 bp, Homo sapien
tgaaaatactggcattgggaaccca

SEQ ID NO: 1930363 - DNA, 25 bp, Homo sapien
gattccctaactagagtgctgatgg

SEQ ID NO: 1930364 - DNA, 25 bp, Homo sapien
gcagcagaggaaacgtgaccaacag

SEQ ID NO: 1930365 - DNA, 25 bp, Homo sapien
tgctgttcatgatgtgagacacaca

SEQ ID NO: 1930366 - DNA, 25 bp, Homo sapien
tgaatagtatccctcatacctgccc

SEQ ID NO: 1930367 - DNA, 25 bp, Homo sapien
ggtatcatcgaagcagtgcccaaga

SEQ ID NO: 1930368 - DNA, 25 bp, Homo sapien
caaagtcactgagtctgcccggaaa

SEQ ID NO: 1930369 - DNA, 25 bp, Homo sapien
gtcatgacaacccttgtcacttcca

SEQ ID NO: 1930370 - DNA, 25 bp, Homo sapien
gagtgatgacgtcattatcaagaga

SEQ ID NO: 1930371 - DNA, 25 bp, Homo sapien
agggtgagtgatgacgtcattatca

SEQ ID NO: 1930372 - DNA, 25 bp, Homo sapien
tgtttgttttgtcatgacaaccctt

SEQ ID NO: 1930373 - DNA, 25 bp, Homo sapien
ttggagtaggagatcattcgctgtg

SEQ ID NO: 1930374 - DNA, 25 bp, Homo sapien
taggagatcattcgctgtgcaaggc

SEQ ID NO: 1930375 - DNA, 25 bp, Homo sapien
gagatcattcgctgtgcaaggctgt

SEQ ID NO: 1930376 - DNA, 25 bp, Homo sapien
tcattcgctgtgcaaggctgtttag

SEQ ID NO: 1930377 - DNA, 25 bp, Homo sapien
gattatatggaaatggacacggtac

SEQ ID NO: 1930378 - DNA, 25 bp, Homo sapien
acacggtacagaaggtctgtggcac

SEQ ID NO: 1930379 - DNA, 25 bp, Homo sapien
agggccgcctttgcctgggcttcag

SEQ ID NO: 1930380 - DNA, 25 bp, Homo sapien
gaaatggacacggtacagaaggtct

SEQ ID NO: 1930381 - DNA, 25 bp, Homo sapien
tattgtagtttctgtgaacctctgg

SEQ ID NO: 1930382 - DNA, 25 bp, Homo sapien
agtttctgtgaacctctgggttttg

SEQ ID NO: 1930383 - DNA, 25 bp, Homo sapien
tttggtcccactgttgtcgagagcc

SEQ ID NO: 1930384 - DNA, 25 bp, Homo sapien
ccttgaccaagtgtaaacgaatcca

SEQ ID NO: 1930385 - DNA, 25 bp, Homo sapien
aagttgcagccttggagggtgtcac

SEQ ID NO: 1930386 - DNA, 25 bp, Homo sapien
cagccttggagggtgtcacagcaga

SEQ ID NO: 1930387 - DNA, 25 bp, Homo sapien
ccttggagggtgtcacagcagagaa

SEQ ID NO: 1930388 - DNA, 25 bp, Homo sapien
ttgcagccttggagggtgtcacagc

SEQ ID NO: 1930389 - DNA, 25 bp, Homo sapien
cacagatgtccctagatatgctcct

SEQ ID NO: 1930390 - DNA, 25 bp, Homo sapien
gaaacatgagccttctctcgacaga

SEQ ID NO: 1930391 - DNA, 25 bp, Homo sapien
tcaggacagcatcttagtttggaca

SEQ ID NO: 1930392 - DNA, 25 bp, Homo sapien
caggcgaacataagcgtggaccagc

SEQ ID NO: 1930393 - DNA, 25 bp, Homo sapien
catgtggaagtgaacacacactcac

SEQ ID NO: 1930394 - DNA, 25 bp, Homo sapien
gataacaggcttatggccatgtgga

SEQ ID NO: 1930395 - DNA, 25 bp, Homo sapien
taacaggcttatggccatgtggaag

SEQ ID NO: 1930396 - DNA, 25 bp, Homo sapien
gccatgtggaagtgaacacacactc

SEQ ID NO: 1930397 - DNA, 25 bp, Homo sapien
caagactaactgaaattatgctgaa

SEQ ID NO: 1930398 - DNA, 25 bp, Homo sapien
aatttacatccaagactaactgaaa

SEQ ID NO: 1930399 - DNA, 25 bp, Homo sapien
tacatccaagactaactgaaattat

SEQ ID NO: 1930400 - DNA, 25 bp, Homo sapien
aacattattcactggctggtgcata

SEQ ID NO: 1930401 - DNA, 25 bp, Homo sapien
cactgatagtcctcagttcaggttt

SEQ ID NO: 1930402 - DNA, 25 bp, Homo sapien
aaaattctgagctatgttattgtta

SEQ ID NO: 1930403 - DNA, 25 bp, Homo sapien
tgacagaacactaagagttcttcca

SEQ ID NO: 1930404 - DNA, 25 bp, Homo sapien
ttttataaaactacactgatagtcc

SEQ ID NO: 1930405 - DNA, 25 bp, Homo sapien
tagagtgaagatcccacttacaggg

SEQ ID NO: 1930406 - DNA, 25 bp, Homo sapien
tgcaatactgccctgaagaaaacag

SEQ ID NO: 1930407 - DNA, 25 bp, Homo sapien
gacatttaaggccactattagagtg

SEQ ID NO: 1930408 - DNA, 25 bp, Homo sapien
tatactactacctagaatgggcatc

SEQ ID NO: 1930409 - DNA, 25 bp, Homo sapien
tcctatggttaattactggcaaacc

SEQ ID NO: 1930410 - DNA, 25 bp, Homo sapien
taaccacctaagtgtaactccagat

SEQ ID NO: 1930411 - DNA, 25 bp, Homo sapien
gtaattcaaaagtgattgtcagtcc

SEQ ID NO: 1930412 - DNA, 25 bp, Homo sapien
tccacaaggtatttagagatccagt

SEQ ID NO: 1930413 - DNA, 25 bp, Homo sapien
ttaaaatcgtcccttctgttcacac

SEQ ID NO: 1930414 - DNA, 25 bp, Homo sapien
tctgttcacacgctggtccttttct

SEQ ID NO: 1930415 - DNA, 25 bp, Homo sapien
tcgtcccttctgttcacacgctggt

SEQ ID NO: 1930416 - DNA, 25 bp, Homo sapien
cttctgttcacacgctggtcctttt

SEQ ID NO: 1930417 - DNA, 25 bp, Homo sapien
tgctggccttgagtgatcctcctgc

SEQ ID NO: 1930418 - DNA, 25 bp, Homo sapien
gagggtcttgcgatgctgcccaagc

SEQ ID NO: 1930419 - DNA, 25 bp, Homo sapien
tgaactgctggccttgagtgatcct

SEQ ID NO: 1930420 - DNA, 25 bp, Homo sapien
gggagggtcttgcgatgctgcccaa

SEQ ID NO: 1930421 - DNA, 25 bp, Homo sapien
tttatagtaacacaccacgaggtgg

SEQ ID NO: 1930422 - DNA, 25 bp, Homo sapien
tgactgtggcctgatccaaccaagc

SEQ ID NO: 1930423 - DNA, 25 bp, Homo sapien
tatacgccagagtgttcatcagcat

SEQ ID NO: 1930424 - DNA, 25 bp, Homo sapien
caatgcacagaatagatagaggcca

SEQ ID NO: 1930425 - DNA, 25 bp, Homo sapien
tgtagggtgaatactgaagacctcc

SEQ ID NO: 1930426 - DNA, 25 bp, Homo sapien
tcagggtcattctctggcagcgctg

SEQ ID NO: 1930427 - DNA, 25 bp, Homo sapien
ccagccattgtaaaggtcagggtca

SEQ ID NO: 1930428 - DNA, 25 bp, Homo sapien
tatgcttaatcaacaggaggctagg

SEQ ID NO: 1930429 - DNA, 25 bp, Homo sapien
taatgactatgtgtacatggacaac

SEQ ID NO: 1930430 - DNA, 25 bp, Homo sapien
tatgtgtacatggacaactgaaaac

SEQ ID NO: 1930431 - DNA, 25 bp, Homo sapien
taaagaccatatgcctggattaaaa

SEQ ID NO: 1930432 - DNA, 25 bp, Homo sapien
tgttttcacaaattacaagccatta

SEQ ID NO: 1930433 - DNA, 25 bp, Homo sapien
cagatgccacgcagagcaaggactt

SEQ ID NO: 1930434 - DNA, 25 bp, Homo sapien
cataatttgtgatcaggtaaggcaa

SEQ ID NO: 1930435 - DNA, 25 bp, Homo sapien
taacattctatcgtggtaacatcag

SEQ ID NO: 1930436 - DNA, 25 bp, Homo sapien
caaagataagtccaccatcactggg

SEQ ID NO: 1930437 - DNA, 25 bp, Homo sapien
taatttatttgattagtttatctgg

SEQ ID NO: 1930438 - DNA, 25 bp, Homo sapien
ttatttgattagtttatctggaaaa

SEQ ID NO: 1930439 - DNA, 25 bp, Homo sapien
aatgttgtcacattattctaattta

SEQ ID NO: 1930440 - DNA, 25 bp, Homo sapien
tgttgtcacattattctaatttatt

SEQ ID NO: 1930441 - DNA, 25 bp, Homo sapien
aatacattatgtaagagggcagtaa

SEQ ID NO: 1930442 - DNA, 25 bp, Homo sapien
atacattatgtaagagggcagtaaa

SEQ ID NO: 1930443 - DNA, 25 bp, Homo sapien
tacattatgtaagagggcagtaaat

SEQ ID NO: 1930444 - DNA, 25 bp, Homo sapien
tgaagaatgagacgtatttcttttt

SEQ ID NO: 1930445 - DNA, 25 bp, Homo sapien
aaaggagttgcaagaaaaatgtgac

SEQ ID NO: 1930446 - DNA, 25 bp, Homo sapien
agctgtatttataagaacctggtaa

SEQ ID NO: 1930447 - DNA, 25 bp, Homo sapien
taaactcttctcctattcattctac

SEQ ID NO: 1930448 - DNA, 25 bp, Homo sapien
tcaagaactctagaaaacgggtgga

SEQ ID NO: 1930449 - DNA, 25 bp, Homo sapien
ggatgctcctttatagcaggaaagg

SEQ ID NO: 1930450 - DNA, 25 bp, Homo sapien
tcttttcaaaatgatggtcaagaac

SEQ ID NO: 1930451 - DNA, 25 bp, Homo sapien
ctcattaaatttcagctttggttct

SEQ ID NO: 1930452 - DNA, 25 bp, Homo sapien
aatatgacatttatctaaaatctta

SEQ ID NO: 1930453 - DNA, 25 bp, Homo sapien
gattaatatgacatttatctaaaat

SEQ ID NO: 1930454 - DNA, 25 bp, Homo sapien
agaataccatagtaataccttaaat

SEQ ID NO: 1930455 - DNA, 25 bp, Homo sapien
tgacatttatctaaaatcttatttc

SEQ ID NO: 1930456 - DNA, 25 bp, Homo sapien
cagattgtacttttctcggttaggg

SEQ ID NO: 1930457 - DNA, 25 bp, Homo sapien
tttctttacatcagcttaggccaca

SEQ ID NO: 1930458 - DNA, 25 bp, Homo sapien
tctgttactcataggaaacatatgt

SEQ ID NO: 1930459 - DNA, 25 bp, Homo sapien
tctcttgtatcctcagtatctgatg

SEQ ID NO: 1930460 - DNA, 25 bp, Homo sapien
gtttccatcaacataccattagtcg

SEQ ID NO: 1930461 - DNA, 25 bp, Homo sapien
tcccttcctgtaaatctgtaacatg

SEQ ID NO: 1930462 - DNA, 25 bp, Homo sapien
ccattagtcggattgttcccaaagg

SEQ ID NO: 1930463 - DNA, 25 bp, Homo sapien
tcctgtaaatctgtaacatgagtag

SEQ ID NO: 1930464 - DNA, 25 bp, Homo sapien
ttaagaatcagaaagtcagacaggg

SEQ ID NO: 1930465 - DNA, 25 bp, Homo sapien
agaatcagaaagtcagacaggggag

SEQ ID NO: 1930466 - DNA, 25 bp, Homo sapien
taagaatcagaaagtcagacagggg

SEQ ID NO: 1930467 - DNA, 25 bp, Homo sapien
cttaagaatcagaaagtcagacagg

SEQ ID NO: 1930468 - DNA, 25 bp, Homo sapien
caatcatactgtagaaggcagcagt

SEQ ID NO: 1930469 - DNA, 25 bp, Homo sapien
tcctttgaagaacaaagtgttacca

SEQ ID NO: 1930470 - DNA, 25 bp, Homo sapien
tgaagaacaaagtgttaccacaatc

SEQ ID NO: 1930471 - DNA, 25 bp, Homo sapien
aagtgttaccacaatcatactgtag

SEQ ID NO: 1930472 - DNA, 25 bp, Homo sapien
catctaatctggatggtttagatcc

SEQ ID NO: 1930473 - DNA, 25 bp, Homo sapien
tctcactgttggtgacatctaatct

SEQ ID NO: 1930474 - DNA, 25 bp, Homo sapien
gaacagatacaccattttcatttgg

SEQ ID NO: 1930475 - DNA, 25 bp, Homo sapien
gtgtctgaacaccatctacctgagg

SEQ ID NO: 1930476 - DNA, 25 bp, Homo sapien
cagtccaaaatgtgtacaggcaggg

SEQ ID NO: 1930477 - DNA, 25 bp, Homo sapien
gcacgctttgctccagtccaaaatg

SEQ ID NO: 1930478 - DNA, 25 bp, Homo sapien
gaagactgatgtaagacttttgaag

SEQ ID NO: 1930479 - DNA, 25 bp, Homo sapien
ttttgaagaccgcacgctttgctcc

SEQ ID NO: 1930480 - DNA, 25 bp, Homo sapien
taatgacatgaaccagctgaactgc

SEQ ID NO: 1930481 - DNA, 25 bp, Homo sapien
tgcaaaagggatcaatcagtaccat

SEQ ID NO: 1930482 - DNA, 25 bp, Homo sapien
catactgatatcaggtagcaccagc

SEQ ID NO: 1930483 - DNA, 25 bp, Homo sapien
tagcaccagcttatttgacaagggc

SEQ ID NO: 1930484 - DNA, 25 bp, Homo sapien
ccacatgtgggctgccaactggctt

SEQ ID NO: 1930485 - DNA, 25 bp, Homo sapien
atttcccggagcgtttgttgtacat

SEQ ID NO: 1930486 - DNA, 25 bp, Homo sapien
cccggagcgtttgttgtacatggaa

SEQ ID NO: 1930487 - DNA, 25 bp, Homo sapien
atgtgggctgccaactggctttcca

SEQ ID NO: 1930488 - DNA, 25 bp, Homo sapien
gagctatctactaaccacctgcatg

SEQ ID NO: 1930489 - DNA, 25 bp, Homo sapien
caatgatgagctatctactaaccac

SEQ ID NO: 1930490 - DNA, 25 bp, Homo sapien
ccacctgcatgtacaatcatgaaga

SEQ ID NO: 1930491 - DNA, 25 bp, Homo sapien
tactaaccacctgcatgtacaatca

SEQ ID NO: 1930492 - DNA, 25 bp, Homo sapien
gacagacccctaagcttctgtgagt

SEQ ID NO: 1930493 - DNA, 25 bp, Homo sapien
cactacttgagcagacagtatgtga

SEQ ID NO: 1930494 - DNA, 25 bp, Homo sapien
gaaggaaggactcgatgacagaccc

SEQ ID NO: 1930495 - DNA, 25 bp, Homo sapien
ctgaatatcttcacccctggagagt

SEQ ID NO: 1930496 - DNA, 25 bp, Homo sapien
tgttcctccagtgagagctcccttg

SEQ ID NO: 1930497 - DNA, 25 bp, Homo sapien
gagctcccttggctatatcaccgtt

SEQ ID NO: 1930498 - DNA, 25 bp, Homo sapien
tatatcaccgtttctctgatcactg

SEQ ID NO: 1930499 - DNA, 25 bp, Homo sapien
ccagtgagagctcccttggctatat

SEQ ID NO: 1930500 - DNA, 25 bp, Homo sapien
ttatctgtagcttctgttctcctgg

SEQ ID NO: 1930501 - DNA, 25 bp, Homo sapien
ctgtagcttctgttctcctggttct

SEQ ID NO: 1930502 - DNA, 25 bp, Homo sapien
ttcttttcataatctcctcaagtcg

SEQ ID NO: 1930503 - DNA, 25 bp, Homo sapien
gttcttttcataatctcctcaagtc

SEQ ID NO: 1930504 - DNA, 25 bp, Homo sapien
tgcttcttcacgaacgcgagcttct

SEQ ID NO: 1930505 - DNA, 25 bp, Homo sapien
cacgaacgcgagcttcttcttcttt

SEQ ID NO: 1930506 - DNA, 25 bp, Homo sapien
ttctttctctccaggcgctcttgct

SEQ ID NO: 1930507 - DNA, 25 bp, Homo sapien
cttcacgaacgcgagcttcttcttc

SEQ ID NO: 1930508 - DNA, 25 bp, Homo sapien
gaaaacagaaggtcggcgtctgcct

SEQ ID NO: 1930509 - DNA, 25 bp, Homo sapien
ctgaaaacagaaggtcggcgtctgc

SEQ ID NO: 1930510 - DNA, 25 bp, Homo sapien
tgaaaacagaaggtcggcgtctgcc

SEQ ID NO: 1930511 - DNA, 25 bp, Homo sapien
ggtgtggaaagcgggagcaccagca

SEQ ID NO: 1930512 - DNA, 25 bp, Homo sapien
cggatggagaaggtgtggaaagcgg

SEQ ID NO: 1930513 - DNA, 25 bp, Homo sapien
gcagtccagtccgcaccctcctctg

SEQ ID NO: 1930514 - DNA, 25 bp, Homo sapien
ggtggcggatggagaaggtgtggaa

SEQ ID NO: 1930515 - DNA, 25 bp, Homo sapien
tcttcagccacacgttgagccaatt

SEQ ID NO: 1930516 - DNA, 25 bp, Homo sapien
tcctcacggcgagtcgtcctctctt

SEQ ID NO: 1930517 - DNA, 25 bp, Homo sapien
tcacggcgagtcgtcctctcttcag

SEQ ID NO: 1930518 - DNA, 25 bp, Homo sapien
cacgttgagccaattcctctctctt

SEQ ID NO: 1930519 - DNA, 25 bp, Homo sapien
accaaagacacctgaggagaaatct

SEQ ID NO: 1930520 - DNA, 25 bp, Homo sapien
agaggcctccgtcggtggttctgta

SEQ ID NO: 1930521 - DNA, 25 bp, Homo sapien
cacctgaggagaaatctttgaagag

SEQ ID NO: 1930522 - DNA, 25 bp, Homo sapien
taggcgtccagtagaaaaatcccca

SEQ ID NO: 1930523 - DNA, 25 bp, Homo sapien
tcttctcagctagaagccttgtggc

SEQ ID NO: 1930524 - DNA, 25 bp, Homo sapien
tctcagctagaagccttgtggcctc

SEQ ID NO: 1930525 - DNA, 25 bp, Homo sapien
agctagaagccttgtggcctcctct

SEQ ID NO: 1930526 - DNA, 25 bp, Homo sapien
gtggcctcctctgggtcggtggtgc

SEQ ID NO: 1930527 - DNA, 25 bp, Homo sapien
tggcattcacagtggatgacggggc

SEQ ID NO: 1930528 - DNA, 25 bp, Homo sapien
agtggatgacggggctgagaccatg

SEQ ID NO: 1930529 - DNA, 25 bp, Homo sapien
cacagtggatgacggggctgagacc

SEQ ID NO: 1930530 - DNA, 25 bp, Homo sapien
gcattcacagtggatgacggggctg

SEQ ID NO: 1930531 - DNA, 25 bp, Homo sapien
ctggagctggggccgaggctggagc

SEQ ID NO: 1930532 - DNA, 25 bp, Homo sapien
gaggctggagctggggccatggctg

SEQ ID NO: 1930533 - DNA, 25 bp, Homo sapien
ggctggagctggggccatggctgga

SEQ ID NO: 1930534 - DNA, 25 bp, Homo sapien
tggagctggggccatggctggagca

SEQ ID NO: 1930535 - DNA, 25 bp, Homo sapien
cattctgcatgagggtgaggtgacc

SEQ ID NO: 1930536 - DNA, 25 bp, Homo sapien
ccaatgttgacatggggagcctcat

SEQ ID NO: 1930537 - DNA, 25 bp, Homo sapien
tgcattctgcataaggctcggccct

SEQ ID NO: 1930538 - DNA, 25 bp, Homo sapien
ttctgagctcgcctgcattctgcat

SEQ ID NO: 1930539 - DNA, 25 bp, Homo sapien
ctgcaatggaggagctcgtggacct

SEQ ID NO: 1930540 - DNA, 25 bp, Homo sapien
gaggagctcgtggacctgcaccagc

SEQ ID NO: 1930541 - DNA, 25 bp, Homo sapien
caatggaggagctcgtggacctgca

SEQ ID NO: 1930542 - DNA, 25 bp, Homo sapien
tggaggagctcgtggacctgcacca

SEQ ID NO: 1930543 - DNA, 25 bp, Homo sapien
ggttcagcaggtgtccgctcttcaa

SEQ ID NO: 1930544 - DNA, 25 bp, Homo sapien
agcaggtgtccgctcttcaactgtg

SEQ ID NO: 1930545 - DNA, 25 bp, Homo sapien
tgtccgctcttcaactgtggcttct

SEQ ID NO: 1930546 - DNA, 25 bp, Homo sapien
tctggttcagcaggtgtccgctctt

SEQ ID NO: 1930547 - DNA, 25 bp, Homo sapien
tgagggctcattggcaactttctga

SEQ ID NO: 1930548 - DNA, 25 bp, Homo sapien
ctgccctttagtgagggctcattgg

SEQ ID NO: 1930549 - DNA, 25 bp, Homo sapien
ctttagtgagggctcattggcaact

SEQ ID NO: 1930550 - DNA, 25 bp, Homo sapien
cattggcaactttctgaggttcctt

SEQ ID NO: 1930551 - DNA, 25 bp, Homo sapien
gacttccctcttgacagggcggatg

SEQ ID NO: 1930552 - DNA, 25 bp, Homo sapien
ttccctcttgacagggcggatgttg

SEQ ID NO: 1930553 - DNA, 25 bp, Homo sapien
tgacttccctcttgacagggcggat

SEQ ID NO: 1930554 - DNA, 25 bp, Homo sapien
tttgacttccctcttgacagggcgg

SEQ ID NO: 1930555 - DNA, 25 bp, Homo sapien
aggaggatgtcggtctgggtgtgcc

SEQ ID NO: 1930556 - DNA, 25 bp, Homo sapien
gtctgggtgtgccaggcaaatgagg

SEQ ID NO: 1930557 - DNA, 25 bp, Homo sapien
tggcaaggaggatgtcggtctgggt

SEQ ID NO: 1930558 - DNA, 25 bp, Homo sapien
ctgggtgtgccaggcaaatgaggaa

SEQ ID NO: 1930559 - DNA, 25 bp, Homo sapien
ttagatggagatacagcccttcggg

SEQ ID NO: 1930560 - DNA, 25 bp, Homo sapien
gtgccagatgtgaggaagagtacat

SEQ ID NO: 1930561 - DNA, 25 bp, Homo sapien
cccttcgggtgccagatgtgaggaa

SEQ ID NO: 1930562 - DNA, 25 bp, Homo sapien
gagatacagcccttcgggtgccaga

SEQ ID NO: 1930563 - DNA, 25 bp, Homo sapien
tgaagaaaagtcaggtttaaagtga

SEQ ID NO: 1930564 - DNA, 25 bp, Homo sapien
ctgatacaataggtgattttgaaga

SEQ ID NO: 1930565 - DNA, 25 bp, Homo sapien
taaagtgaggaatttcagctattta

SEQ ID NO: 1930566 - DNA, 25 bp, Homo sapien
gcctgctatattagacataaactca

SEQ ID NO: 1930567 - DNA, 25 bp, Homo sapien
ccctccctgattgccaactaggaat

SEQ ID NO: 1930568 - DNA, 25 bp, Homo sapien
ctccctgattgccaactaggaattc

SEQ ID NO: 1930569 - DNA, 25 bp, Homo sapien
atctgaaggtgggccaaaacatcac

SEQ ID NO: 1930570 - DNA, 25 bp, Homo sapien
tgaaggtgggccaaaacatcacccc

SEQ ID NO: 1930571 - DNA, 25 bp, Homo sapien
ttccactactctaaagtcaatgaag

SEQ ID NO: 1930572 - DNA, 25 bp, Homo sapien
tgttccactactctaaagtcaatga

SEQ ID NO: 1930573 - DNA, 25 bp, Homo sapien
actactctaaagtcaatgaagacca

SEQ ID NO: 1930574 - DNA, 25 bp, Homo sapien
ccactactctaaagtcaatgaagac

SEQ ID NO: 1930575 - DNA, 25 bp, Homo sapien
gggatcagggaatgaacctatataa

SEQ ID NO: 1930576 - DNA, 25 bp, Homo sapien
caagagggacaatttttgatgtggc

SEQ ID NO: 1930577 - DNA, 25 bp, Homo sapien
agaattacagtacctttgagccaat

SEQ ID NO: 1930578 - DNA, 25 bp, Homo sapien
tatctgtgccttgataatacaggga

SEQ ID NO: 1930579 - DNA, 25 bp, Homo sapien
ctgtgtgcagggattagaagattta

SEQ ID NO: 1930580 - DNA, 25 bp, Homo sapien
cagattccatgcattccctattgaa

SEQ ID NO: 1930581 - DNA, 25 bp, Homo sapien
taggatgtcactactaccaaaaggg

SEQ ID NO: 1930582 - DNA, 25 bp, Homo sapien
ggaggctaaagatctgcatactgaa

SEQ ID NO: 1930583 - DNA, 25 bp, Homo sapien
cactgattccagaaaggccgatgga

SEQ ID NO: 1930584 - DNA, 25 bp, Homo sapien
cagtgcagctccagggtataaatga

SEQ ID NO: 1930585 - DNA, 25 bp, Homo sapien
tctgtctacagctaaggaggatctc

SEQ ID NO: 1930586 - DNA, 25 bp, Homo sapien
tgacagggattagccaagcaggata

SEQ ID NO: 1930587 - DNA, 25 bp, Homo sapien
cgagaagagccctcaggtggtgtta

SEQ ID NO: 1930588 - DNA, 25 bp, Homo sapien
caaagagttttggtcgatccatcga

SEQ ID NO: 1930589 - DNA, 25 bp, Homo sapien
tgaatgatcctcctgcgagaagagc

SEQ ID NO: 1930590 - DNA, 25 bp, Homo sapien
ctagagtgtgcagctttgtagggca

SEQ ID NO: 1930591 - DNA, 25 bp, Homo sapien
aaatgcatgcttccgggttttccca

SEQ ID NO: 1930592 - DNA, 25 bp, Homo sapien
tattacctaaaggtgcccagaacca

SEQ ID NO: 1930593 - DNA, 25 bp, Homo sapien
taccaggtgttaagacttgtcacga

SEQ ID NO: 1930594 - DNA, 25 bp, Homo sapien
caaaaggaaggcatgtccacgtaaa

SEQ ID NO: 1930595 - DNA, 25 bp, Homo sapien
gcaatcactctatatcccagggcta

SEQ ID NO: 1930596 - DNA, 25 bp, Homo sapien
tgtttaatctgctgatgtaacccag

SEQ ID NO: 1930597 - DNA, 25 bp, Homo sapien
cccagtacaggacatattataggtt

SEQ ID NO: 1930598 - DNA, 25 bp, Homo sapien
caactactgtattgtttgtgcaggg

SEQ ID NO: 1930599 - DNA, 25 bp, Homo sapien
ttgccttcgtgactgtctcccaggg

SEQ ID NO: 1930600 - DNA, 25 bp, Homo sapien
ctgagatttattcgctcattgggca

SEQ ID NO: 1930601 - DNA, 25 bp, Homo sapien
gatttaggactgagatttattcgct

SEQ ID NO: 1930602 - DNA, 25 bp, Homo sapien
ggttgtgggaatgcccacgcttgcc

SEQ ID NO: 1930603 - DNA, 25 bp, Homo sapien
gggtatgaaaccaacaccgacagac

SEQ ID NO: 1930604 - DNA, 25 bp, Homo sapien
gcttcatcagcctgcctggcgtctg

SEQ ID NO: 1930605 - DNA, 25 bp, Homo sapien
acagaagcctctgaagccatcggag

SEQ ID NO: 1930606 - DNA, 25 bp, Homo sapien
agatgctaaggcagatgcccagagg

SEQ ID NO: 1930607 - DNA, 25 bp, Homo sapien
ggacttgacctcatggggaaagttc

SEQ ID NO: 1930608 - DNA, 25 bp, Homo sapien
caaagggaggacttgacctcatggg

SEQ ID NO: 1930609 - DNA, 25 bp, Homo sapien
cttcaaagggaggacttgacctcat

SEQ ID NO: 1930610 - DNA, 25 bp, Homo sapien
gacttgacctcatggggaaagttcc

SEQ ID NO: 1930611 - DNA, 25 bp, Homo sapien
cttctggccaggaacgaatgtgtgg

SEQ ID NO: 1930612 - DNA, 25 bp, Homo sapien
tcaggagtctgttaacaacgctgct

SEQ ID NO: 1930613 - DNA, 25 bp, Homo sapien
caacgctgctctcccatgggctgag

SEQ ID NO: 1930614 - DNA, 25 bp, Homo sapien
tgtgggcgtcaggagtctgttaaca

SEQ ID NO: 1930615 - DNA, 25 bp, Homo sapien
attgcttccatacgctgggccttca

SEQ ID NO: 1930616 - DNA, 25 bp, Homo sapien
ctattgcttccatacgctgggcctt

SEQ ID NO: 1930617 - DNA, 25 bp, Homo sapien
tgcttccatacgctgggccttcaca

SEQ ID NO: 1930618 - DNA, 25 bp, Homo sapien
gcttccatacgctgggccttcacag

SEQ ID NO: 1930619 - DNA, 25 bp, Homo sapien
gaaaaactgtacgatgactgtggct

SEQ ID NO: 1930620 - DNA, 25 bp, Homo sapien
ggagacagagcgtccgtaagataac

SEQ ID NO: 1930621 - DNA, 25 bp, Homo sapien
taactctcatggaacaacgctatgg

SEQ ID NO: 1930622 - DNA, 25 bp, Homo sapien
catgagtctgaaggcatcgaccaaa

SEQ ID NO: 1930623 - DNA, 25 bp, Homo sapien
atgaagaggagagccgcttgctaat

SEQ ID NO: 1930624 - DNA, 25 bp, Homo sapien
gacgggatcaacatatttcgaaaga

SEQ ID NO: 1930625 - DNA, 25 bp, Homo sapien
gagagccgcttgctaatgacgggat

SEQ ID NO: 1930626 - DNA, 25 bp, Homo sapien
cgcttgctaatgacgggatcaacat

SEQ ID NO: 1930627 - DNA, 25 bp, Homo sapien
gtggaaactgaccgcctgtctggat

SEQ ID NO: 1930628 - DNA, 25 bp, Homo sapien
ggtggaaactgaccgcctgtctgga

SEQ ID NO: 1930629 - DNA, 25 bp, Homo sapien
tacaggtcaggcaattggcaatcac

SEQ ID NO: 1930630 - DNA, 25 bp, Homo sapien
caattggcaatcacagggatgtctg

SEQ ID NO: 1930631 - DNA, 25 bp, Homo sapien
ctagctacaggtcaggcaattggca

SEQ ID NO: 1930632 - DNA, 25 bp, Homo sapien
tcaggcaattggcaatcacagggat

SEQ ID NO: 1930633 - DNA, 25 bp, Homo sapien
cagcttttctagtaccaccaaaagt

SEQ ID NO: 1930634 - DNA, 25 bp, Homo sapien
ggtccaggcctgctaaatccagaga

SEQ ID NO: 1930635 - DNA, 25 bp, Homo sapien
ggtggtccaggcctgctaaatccag

SEQ ID NO: 1930636 - DNA, 25 bp, Homo sapien
tagtaccaccaaaagttatgaagtg

SEQ ID NO: 1930637 - DNA, 25 bp, Homo sapien
gccgtacaacagcttcgtggcgttc

SEQ ID NO: 1930638 - DNA, 25 bp, Homo sapien
ccacgaccaacggttatgcttctgt

SEQ ID NO: 1930639 - DNA, 25 bp, Homo sapien
caacggttatgcttctgttttggct

SEQ ID NO: 1930640 - DNA, 25 bp, Homo sapien
gctcctttccattgtgcgccgtaca

SEQ ID NO: 1930641 - DNA, 25 bp, Homo sapien
tctctttctaaccacactatttctc

SEQ ID NO: 1930642 - DNA, 25 bp, Homo sapien
gtgctgcctggctcgctcttctctt

SEQ ID NO: 1930643 - DNA, 25 bp, Homo sapien
aggtgcttctcgtagtgctgcctgg

SEQ ID NO: 1930644 - DNA, 25 bp, Homo sapien
tcttcttccgctcttccaggtgctt

SEQ ID NO: 1930645 - DNA, 25 bp, Homo sapien
aagagatccagaagccaacaagaga

SEQ ID NO: 1930646 - DNA, 25 bp, Homo sapien
gaagaatcagatgtgtaccttgaga

SEQ ID NO: 1930647 - DNA, 25 bp, Homo sapien
tatgatggtcataggcagaagaatc

SEQ ID NO: 1930648 - DNA, 25 bp, Homo sapien
taaactcctctgatttgtacagtcc

SEQ ID NO: 1930649 - DNA, 25 bp, Homo sapien
taatatgtcagaattactgttggaa

SEQ ID NO: 1930650 - DNA, 25 bp, Homo sapien
ccatgttttgagaaggcatactcat

SEQ ID NO: 1930651 - DNA, 25 bp, Homo sapien
tcctgttgggaaagctgtcatcatt

SEQ ID NO: 1930652 - DNA, 25 bp, Homo sapien
cattttttatccaagcagatccatg

SEQ ID NO: 1930653 - DNA, 25 bp, Homo sapien
tctggttgttaatgctttgtcgaat

SEQ ID NO: 1930654 - DNA, 25 bp, Homo sapien
tattctggttgttaatgctttgtcg

SEQ ID NO: 1930655 - DNA, 25 bp, Homo sapien
tgctttgtcgaataaatagtttgca

SEQ ID NO: 1930656 - DNA, 25 bp, Homo sapien
tgttaatgctttgtcgaataaatag

SEQ ID NO: 1930657 - DNA, 25 bp, Homo sapien
tgtcactgagttacagaaacactga

SEQ ID NO: 1930658 - DNA, 25 bp, Homo sapien
gaattaatttatccatacttagaga

SEQ ID NO: 1930659 - DNA, 25 bp, Homo sapien
gaccatgttgtctgcaagcagggac

SEQ ID NO: 1930660 - DNA, 25 bp, Homo sapien
ttttatgttaattttgtaccttgca

SEQ ID NO: 1930661 - DNA, 25 bp, Homo sapien
tactggacactaacgagtcagtccc

SEQ ID NO: 1930662 - DNA, 25 bp, Homo sapien
tacacagtgatgctgtacaaaaagg

SEQ ID NO: 1930663 - DNA, 25 bp, Homo sapien
cctggcctatgggatcacattataa

SEQ ID NO: 1930664 - DNA, 25 bp, Homo sapien
gaggacagtttctggcttcatatga

SEQ ID NO: 1930665 - DNA, 25 bp, Homo sapien
taattgttgtgattacttatattca

SEQ ID NO: 1930666 - DNA, 25 bp, Homo sapien
tatgctttatctcaataattgttgt

SEQ ID NO: 1930667 - DNA, 25 bp, Homo sapien
gaagtacaatgggatagtaatggct

SEQ ID NO: 1930668 - DNA, 25 bp, Homo sapien
caatgggatagtaatggctcactgc

SEQ ID NO: 1930669 - DNA, 25 bp, Homo sapien
agggccatggacacggggcctgggg

SEQ ID NO: 1930670 - DNA, 25 bp, Homo sapien
gccatggacacggggcctggggtac

SEQ ID NO: 1930671 - DNA, 25 bp, Homo sapien
ggccatggacacggggcctggggta

SEQ ID NO: 1930672 - DNA, 25 bp, Homo sapien
tcaacacgtaacacaggcggagggt

SEQ ID NO: 1930673 - DNA, 25 bp, Homo sapien
tgccggtcatcaacacgtaacacag

SEQ ID NO: 1930674 - DNA, 25 bp, Homo sapien
tagctgtttctcccgttcctcacgt

SEQ ID NO: 1930675 - DNA, 25 bp, Homo sapien
agccgctgccggtcatcaacacgta

SEQ ID NO: 1930676 - DNA, 25 bp, Homo sapien
ctataacttggtttctgagtgtctg

SEQ ID NO: 1930677 - DNA, 25 bp, Homo sapien
tataacttggtttctgagtgtctgg

SEQ ID NO: 1930678 - DNA, 25 bp, Homo sapien
taacttggtttctgagtgtctggtt

SEQ ID NO: 1930679 - DNA, 25 bp, Homo sapien
acttggtttctgagtgtctggttac

SEQ ID NO: 1930680 - DNA, 25 bp, Homo sapien
gtgggcccccagatgactggatctt

SEQ ID NO: 1930681 - DNA, 25 bp, Homo sapien
aggaaattataaatgctttgggagc

SEQ ID NO: 1930682 - DNA, 25 bp, Homo sapien
aaggaaattataaatgctttgggag

SEQ ID NO: 1930683 - DNA, 25 bp, Homo sapien
gccaccaccacttgatgctgataaa

SEQ ID NO: 1930684 - DNA, 25 bp, Homo sapien
ctggtttatttcctgagtggttgtt

SEQ ID NO: 1930685 - DNA, 25 bp, Homo sapien
tggtttatttcctgagtggttgtta

SEQ ID NO: 1930686 - DNA, 25 bp, Homo sapien
tggacatagacttgtgaggacacag

SEQ ID NO: 1930687 - DNA, 25 bp, Homo sapien
ttcaactggactttgtgggcataca

SEQ ID NO: 1930688 - DNA, 25 bp, Homo sapien
gactttgtgggcatacagccccttt

SEQ ID NO: 1930689 - DNA, 25 bp, Homo sapien
tgcttctcggctacagtcttcaact

SEQ ID NO: 1930690 - DNA, 25 bp, Homo sapien
tggggaagcagctgcttcatggggc

SEQ ID NO: 1930691 - DNA, 25 bp, Homo sapien
ttaatggggaagcagctgcttcatg

SEQ ID NO: 1930692 - DNA, 25 bp, Homo sapien
aatggggaagcagctgcttcatggg

SEQ ID NO: 1930693 - DNA, 25 bp, Homo sapien
gggaagcagctgcttcatggggcat

SEQ ID NO: 1930694 - DNA, 25 bp, Homo sapien
ctacagtgagaatctcaggaattag

SEQ ID NO: 1930695 - DNA, 25 bp, Homo sapien
cagtgagaatctcaggaattagagt

SEQ ID NO: 1930696 - DNA, 25 bp, Homo sapien
tacagtgagaatctcaggaattaga

SEQ ID NO: 1930697 - DNA, 25 bp, Homo sapien
gtgagaatctcaggaattagagtga

SEQ ID NO: 1930698 - DNA, 25 bp, Homo sapien
ctttctgacacattgcgctgacagg

SEQ ID NO: 1930699 - DNA, 25 bp, Homo sapien
tcctcgattcacatcacaaatgctt

SEQ ID NO: 1930700 - DNA, 25 bp, Homo sapien
ttctgacacattgcgctgacaggaa

SEQ ID NO: 1930701 - DNA, 25 bp, Homo sapien
aaaagcagctcctcgattcacatca

SEQ ID NO: 1930702 - DNA, 25 bp, Homo sapien
caataaagtagtggagcaaaagggt

SEQ ID NO: 1930703 - DNA, 25 bp, Homo sapien
agcatcgtgggctgctgaaattgta

SEQ ID NO: 1930704 - DNA, 25 bp, Homo sapien
ccttctctagcaccttctctggata

SEQ ID NO: 1930705 - DNA, 25 bp, Homo sapien
ttctgccaactctgatgggaaagca

SEQ ID NO: 1930706 - DNA, 25 bp, Homo sapien
tgaaaaactggtgaaggtgctgatg

SEQ ID NO: 1930707 - DNA, 25 bp, Homo sapien
gccacaacctggcaaacagtagcag

SEQ ID NO: 1930708 - DNA, 25 bp, Homo sapien
caaagtgtgctatgtggcaggcgcc

SEQ ID NO: 1930709 - DNA, 25 bp, Homo sapien
gactgagtggcccatcagggagcat

SEQ ID NO: 1930710 - DNA, 25 bp, Homo sapien
taaatctgcctaagctatgggccct

SEQ ID NO: 1930711 - DNA, 25 bp, Homo sapien
ttccattgggtattaaatatgacat

SEQ ID NO: 1930712 - DNA, 25 bp, Homo sapien
caataccattccattgggtattaaa

SEQ ID NO: 1930713 - DNA, 25 bp, Homo sapien
cattccattgggtattaaatatgac

SEQ ID NO: 1930714 - DNA, 25 bp, Homo sapien
taccattccattgggtattaaatat

SEQ ID NO: 1930715 - DNA, 25 bp, Homo sapien
ccacagcagcttgatggtgaaaaca

SEQ ID NO: 1930716 - DNA, 25 bp, Homo sapien
catgctgttcattattccacagcag

SEQ ID NO: 1930717 - DNA, 25 bp, Homo sapien
aaacaggttctgctcccacaaccat

SEQ ID NO: 1930718 - DNA, 25 bp, Homo sapien
agcagcttgatggtgaaaacaggtt

SEQ ID NO: 1930719 - DNA, 25 bp, Homo sapien
ccatgcccagcttttttggaggggg

SEQ ID NO: 1930720 - DNA, 25 bp, Homo sapien
catgcccagcttttttggagggggg

SEQ ID NO: 1930721 - DNA, 25 bp, Homo sapien
acttgctctggacacccttcttaat

SEQ ID NO: 1930722 - DNA, 25 bp, Homo sapien
tccaaatcccaatgacaacccaggg

SEQ ID NO: 1930723 - DNA, 25 bp, Homo sapien
cttaatcgtagttctttatttgcca

SEQ ID NO: 1930724 - DNA, 25 bp, Homo sapien
ctgaattgttccaaatcccaatgac

SEQ ID NO: 1930725 - DNA, 25 bp, Homo sapien
cttcctttatgagcgcagcctgctg

SEQ ID NO: 1930726 - DNA, 25 bp, Homo sapien
caatgatctttgttatggtccagtc

SEQ ID NO: 1930727 - DNA, 25 bp, Homo sapien
taagatcctccttgcgcatgtggca

SEQ ID NO: 1930728 - DNA, 25 bp, Homo sapien
gaaagcatagcattaagcagaaagc

SEQ ID NO: 1930729 - DNA, 25 bp, Homo sapien
ttctattacaactgtcttgctgtaa

SEQ ID NO: 1930730 - DNA, 25 bp, Homo sapien
ccttctccatttctattacaactgt

SEQ ID NO: 1930731 - DNA, 25 bp, Homo sapien
tctattacaactgtcttgctgtaaa

SEQ ID NO: 1930732 - DNA, 25 bp, Homo sapien
tctccatttctattacaactgtctt

SEQ ID NO: 1930733 - DNA, 25 bp, Homo sapien
ggacagaaggctaccacatgtaaga

SEQ ID NO: 1930734 - DNA, 25 bp, Homo sapien
aagcaagaacaggacagaaggctac

SEQ ID NO: 1930735 - DNA, 25 bp, Homo sapien
ttatgtgcccggcaaaatcatgaac

SEQ ID NO: 1930736 - DNA, 25 bp, Homo sapien
catgaacaccagaatgaaggctcct

SEQ ID NO: 1930737 - DNA, 25 bp, Homo sapien
gatctgcctgccttggtatcccaaa

SEQ ID NO: 1930738 - DNA, 25 bp, Homo sapien
tctgcctgccttggtatcccaaaat

SEQ ID NO: 1930739 - DNA, 25 bp, Homo sapien
tgcctgccttggtatcccaaaatgc

SEQ ID NO: 1930740 - DNA, 25 bp, Homo sapien
gctggagagtggtggtgcgatcttg

SEQ ID NO: 1930741 - DNA, 25 bp, Homo sapien
caggtacctgatttcagacgtcagc

SEQ ID NO: 1930742 - DNA, 25 bp, Homo sapien
attcagtacactcttaatgcccttt

SEQ ID NO: 1930743 - DNA, 25 bp, Homo sapien
caagccacaaaggatctgatgagtg

SEQ ID NO: 1930744 - DNA, 25 bp, Homo sapien
gcaaaaatgggatccctcaggtacc

SEQ ID NO: 1930745 - DNA, 25 bp, Homo sapien
gctcggcactaaggtatattcccat

SEQ ID NO: 1930746 - DNA, 25 bp, Homo sapien
caagctcggcactaaggtatattcc

SEQ ID NO: 1930747 - DNA, 25 bp, Homo sapien
cggcactaaggtatattcccatcat

SEQ ID NO: 1930748 - DNA, 25 bp, Homo sapien
gccaagctcggcactaaggtatatt

SEQ ID NO: 1930749 - DNA, 25 bp, Homo sapien
gctgccaggaacatatctctctctt

SEQ ID NO: 1930750 - DNA, 25 bp, Homo sapien
gtagtgatatttccctgggccagag

SEQ ID NO: 1930751 - DNA, 25 bp, Homo sapien
gccaggaacatatctctctcttgct

SEQ ID NO: 1930752 - DNA, 25 bp, Homo sapien
tcatgtagtgatatttccctgggcc

SEQ ID NO: 1930753 - DNA, 25 bp, Homo sapien
cagctctcagataaggctccagatg

SEQ ID NO: 1930754 - DNA, 25 bp, Homo sapien
ggctccagatgaagccattaagttc

SEQ ID NO: 1930755 - DNA, 25 bp, Homo sapien
taaggctccagatgaagccattaag

SEQ ID NO: 1930756 - DNA, 25 bp, Homo sapien
gcagctctcagataaggctccagat

SEQ ID NO: 1930757 - DNA, 25 bp, Homo sapien
ctgtgaattcagagggccacaggca

SEQ ID NO: 1930758 - DNA, 25 bp, Homo sapien
gcagccatggcttcatggaccagag

SEQ ID NO: 1930759 - DNA, 25 bp, Homo sapien
tccaaaccaagaactagaaaatgct

SEQ ID NO: 1930760 - DNA, 25 bp, Homo sapien
tagtatttgccactagattccaaac

SEQ ID NO: 1930761 - DNA, 25 bp, Homo sapien
ttacacaaaccacacttgaaagtca

SEQ ID NO: 1930762 - DNA, 25 bp, Homo sapien
tacacaaaccacacttgaaagtcac

SEQ ID NO: 1930763 - DNA, 25 bp, Homo sapien
tattagtcaagagctcagtgggagt

SEQ ID NO: 1930764 - DNA, 25 bp, Homo sapien
tatgccacaaacacgaaatgaacgt

SEQ ID NO: 1930765 - DNA, 25 bp, Homo sapien
ttgtgtatgcaagttctccctggct

SEQ ID NO: 1930766 - DNA, 25 bp, Homo sapien
cacggctgtaatgaggatatgccac

SEQ ID NO: 1930767 - DNA, 25 bp, Homo sapien
tagagtatagtgctacgatcatggc

SEQ ID NO: 1930768 - DNA, 25 bp, Homo sapien
gctagagtatagtgctacgatcatg

SEQ ID NO: 1930769 - DNA, 25 bp, Homo sapien
ctagagtatagtgctacgatcatgg

SEQ ID NO: 1930770 - DNA, 25 bp, Homo sapien
ggctagagtatagtgctacgatcat

SEQ ID NO: 1930771 - DNA, 25 bp, Homo sapien
gacacaaattcagaacgtaacaatg

SEQ ID NO: 1930772 - DNA, 25 bp, Homo sapien
cagtaaggacgaacgaaccagagaa

SEQ ID NO: 1930773 - DNA, 25 bp, Homo sapien
catatccaacgtcaggaagcagtaa

SEQ ID NO: 1930774 - DNA, 25 bp, Homo sapien
acccaaccatatccaacgtcaggaa

SEQ ID NO: 1930775 - DNA, 25 bp, Homo sapien
ggagagctgtagctgatccaggcat

SEQ ID NO: 1930776 - DNA, 25 bp, Homo sapien
cattcttttgctgttcgtcttcctc

SEQ ID NO: 1930777 - DNA, 25 bp, Homo sapien
cctcattaatggtgaataaaccaag

SEQ ID NO: 1930778 - DNA, 25 bp, Homo sapien
ttggccttgcattggtcttcttcag

SEQ ID NO: 1930779 - DNA, 25 bp, Homo sapien
agaaaagccctactacagacacgca

SEQ ID NO: 1930780 - DNA, 25 bp, Homo sapien
gcacttgtaatagatcccctatggg

SEQ ID NO: 1930781 - DNA, 25 bp, Homo sapien
agacacgcagggtctgatgcctccc

SEQ ID NO: 1930782 - DNA, 25 bp, Homo sapien
cacatgcgctggtgattgctccggc

SEQ ID NO: 1930783 - DNA, 25 bp, Homo sapien
cagggttggcagcaccagtcatgag

SEQ ID NO: 1930784 - DNA, 25 bp, Homo sapien
gcaccagtcatgagggccaccagtg

SEQ ID NO: 1930785 - DNA, 25 bp, Homo sapien
gagcatgtataagaacagggttggc

SEQ ID NO: 1930786 - DNA, 25 bp, Homo sapien
catgtataagaacagggttggcagc

SEQ ID NO: 1930787 - DNA, 25 bp, Homo sapien
gaggcttaaatcagtccccatggga

SEQ ID NO: 1930788 - DNA, 25 bp, Homo sapien
cctccaacaatcagtaaggttttgc

SEQ ID NO: 1930789 - DNA, 25 bp, Homo sapien
ccccatgggaaatgggcatgcagcc

SEQ ID NO: 1930790 - DNA, 25 bp, Homo sapien
gatgtggcacaactatccttgcatg

SEQ ID NO: 1930791 - DNA, 25 bp, Homo sapien
gggaagtaagctcatgacttgggcc

SEQ ID NO: 1930792 - DNA, 25 bp, Homo sapien
gaagtaagctcatgacttgggccta

SEQ ID NO: 1930793 - DNA, 25 bp, Homo sapien
taagctcatgacttgggcctagctg

SEQ ID NO: 1930794 - DNA, 25 bp, Homo sapien
agctcatgacttgggcctagctgtc

SEQ ID NO: 1930795 - DNA, 25 bp, Homo sapien
caagaaatctgcttaaccagtgaga

SEQ ID NO: 1930796 - DNA, 25 bp, Homo sapien
catcagggtccagaagtgccaaaat

SEQ ID NO: 1930797 - DNA, 25 bp, Homo sapien
catacgcacacatagagtcagcttt

SEQ ID NO: 1930798 - DNA, 25 bp, Homo sapien
tcttcaaaactaccggacttcagca

SEQ ID NO: 1930799 - DNA, 25 bp, Homo sapien
aatattcctaatgcatcaataattt

SEQ ID NO: 1930800 - DNA, 25 bp, Homo sapien
taatttccaagaagtagatattact

SEQ ID NO: 1930801 - DNA, 25 bp, Homo sapien
aaatattcctaatgcatcaataatt

SEQ ID NO: 1930802 - DNA, 25 bp, Homo sapien
taaaatttgtaactgctaagcaaaa

SEQ ID NO: 1930803 - DNA, 25 bp, Homo sapien
taaacccgtggatggcagcttagga

SEQ ID NO: 1930804 - DNA, 25 bp, Homo sapien
ggctatactccagacacatgcaatg

SEQ ID NO: 1930805 - DNA, 25 bp, Homo sapien
ggcttgactgatctagagccatcaa

SEQ ID NO: 1930806 - DNA, 25 bp, Homo sapien
gacacttgcccctaagttcctgaaa

SEQ ID NO: 1930807 - DNA, 25 bp, Homo sapien
cttccttgctaaattcaaggatcat

SEQ ID NO: 1930808 - DNA, 25 bp, Homo sapien
tgctgaccacagccggaagtgattc

SEQ ID NO: 1930809 - DNA, 25 bp, Homo sapien
tgcaactgtttgttggtgaattttg

SEQ ID NO: 1930810 - DNA, 25 bp, Homo sapien
aactcctcataacctgcaactgttt

SEQ ID NO: 1930811 - DNA, 25 bp, Homo sapien
tgccagtcgcacctggccgacgact

SEQ ID NO: 1930812 - DNA, 25 bp, Homo sapien
ctgccccacaccgaccccgctgagg

SEQ ID NO: 1930813 - DNA, 25 bp, Homo sapien
cagaaactgctcgtcctgccagtcg

SEQ ID NO: 1930814 - DNA, 25 bp, Homo sapien
ttggtctgggggatacgatttccca

SEQ ID NO: 1930815 - DNA, 25 bp, Homo sapien
tgtttcgcttcgcactgcgccgtcg

SEQ ID NO: 1930816 - DNA, 25 bp, Homo sapien
ctgtttcgcttcgcactgcgccgtc

SEQ ID NO: 1930817 - DNA, 25 bp, Homo sapien
ccgtcgccgcccctgtggccgtcgc

SEQ ID NO: 1930818 - DNA, 25 bp, Homo sapien
ggccgtcgccgccagctcctagctc

SEQ ID NO: 1930819 - DNA, 25 bp, Homo sapien
tgctccgatgacgcgcccggagagc

SEQ ID NO: 1930820 - DNA, 25 bp, Homo sapien
cggagagccgctccgccctttcctc

SEQ ID NO: 1930821 - DNA, 25 bp, Homo sapien
gatgacgcgcccggagagccgctcc

SEQ ID NO: 1930822 - DNA, 25 bp, Homo sapien
ggtgctccgatgacgcgcccggaga

SEQ ID NO: 1930823 - DNA, 25 bp, Homo sapien
tacctcagtccggagcttccggtcg

SEQ ID NO: 1930824 - DNA, 25 bp, Homo sapien
agcggcgggcggaaccagtacctca

SEQ ID NO: 1930825 - DNA, 25 bp, Homo sapien
cggcccagacaggtgagcgcagtcc

SEQ ID NO: 1930826 - DNA, 25 bp, Homo sapien
ccgctgccgagtctcggctggaaga

SEQ ID NO: 1930827 - DNA, 25 bp, Homo sapien
tgggacgagcggcggtccgaggagc

SEQ ID NO: 1930828 - DNA, 25 bp, Homo sapien
ggacgagcggcggtccgaggagcag

SEQ ID NO: 1930829 - DNA, 25 bp, Homo sapien
acgagcggcggtccgaggagcagcc

SEQ ID NO: 1930830 - DNA, 25 bp, Homo sapien
ctgggacgagcggcggtccgaggag

SEQ ID NO: 1930831 - DNA, 25 bp, Homo sapien
tttaaaagccttccaaggactgcag

SEQ ID NO: 1930832 - DNA, 25 bp, Homo sapien
tgaagataaccagcaagctctgaac

SEQ ID NO: 1930833 - DNA, 25 bp, Homo sapien
cacacaagagagtcgagaacagtat

SEQ ID NO: 1930834 - DNA, 25 bp, Homo sapien
ggttacactaaaatgcactgcactc

SEQ ID NO: 1930835 - DNA, 25 bp, Homo sapien
ttatccatctaggagcatcagactt

SEQ ID NO: 1930836 - DNA, 25 bp, Homo sapien
tcaatatgggcaggctcataaaaat

SEQ ID NO: 1930837 - DNA, 25 bp, Homo sapien
tcatttatccatctaggagcatcag

SEQ ID NO: 1930838 - DNA, 25 bp, Homo sapien
ctttgatcaatatgggcaggctcat

SEQ ID NO: 1930839 - DNA, 25 bp, Homo sapien
gatggtctttgcagaccccttaaga

SEQ ID NO: 1930840 - DNA, 25 bp, Homo sapien
aagcagtattctccattaagatggt

SEQ ID NO: 1930841 - DNA, 25 bp, Homo sapien
accatagttatccaagataacttgg

SEQ ID NO: 1930842 - DNA, 25 bp, Homo sapien
gaccccttaagatataccatagtta

SEQ ID NO: 1930843 - DNA, 25 bp, Homo sapien
tgaggaacaacctgaatgtcagttg

SEQ ID NO: 1930844 - DNA, 25 bp, Homo sapien
cagctggagaaatgactggaaattt

SEQ ID NO: 1930845 - DNA, 25 bp, Homo sapien
ctgactgcttgaatagaagacagat

SEQ ID NO: 1930846 - DNA, 25 bp, Homo sapien
gattttacttaatgttacagctgga

SEQ ID NO: 1930847 - DNA, 25 bp, Homo sapien
gttcaagcatgtgcaactggtacag

SEQ ID NO: 1930848 - DNA, 25 bp, Homo sapien
tcaaacaaatgtacgacaggtcaga

SEQ ID NO: 1930849 - DNA, 25 bp, Homo sapien
gatttaaagtgcagcgcctttctcc

SEQ ID NO: 1930850 - DNA, 25 bp, Homo sapien
tgttccagtggtgcacgatcacatg

SEQ ID NO: 1930851 - DNA, 25 bp, Homo sapien
gtctgtttgtttcgaaagtcaatga

SEQ ID NO: 1930852 - DNA, 25 bp, Homo sapien
tgtttgtttcgaaagtcaatgatag

SEQ ID NO: 1930853 - DNA, 25 bp, Homo sapien
aagtctgtttgtttcgaaagtcaat

SEQ ID NO: 1930854 - DNA, 25 bp, Homo sapien
tctgtttgtttcgaaagtcaatgat

SEQ ID NO: 1930855 - DNA, 25 bp, Homo sapien
agagcagctaagagctagagagctc

SEQ ID NO: 1930856 - DNA, 25 bp, Homo sapien
tgcctggtgctctttccatagtgac

SEQ ID NO: 1930857 - DNA, 25 bp, Homo sapien
cctggtgctctttccatagtgacaa

SEQ ID NO: 1930858 - DNA, 25 bp, Homo sapien
tgtccagaactacaaagctaattag

SEQ ID NO: 1930859 - DNA, 25 bp, Homo sapien
taagtcatcacgtgtaacatagtag

SEQ ID NO: 1930860 - DNA, 25 bp, Homo sapien
tagtctcaagcattttaagtcatca

SEQ ID NO: 1930861 - DNA, 25 bp, Homo sapien
catccaatagtgtataatcttcagc

SEQ ID NO: 1930862 - DNA, 25 bp, Homo sapien
taacatagtagagaacatccaatag

SEQ ID NO: 1930863 - DNA, 25 bp, Homo sapien
attaacatacaaagaattagaaaca

SEQ ID NO: 1930864 - DNA, 25 bp, Homo sapien
cccactctttctggttttcatttca

SEQ ID NO: 1930865 - DNA, 25 bp, Homo sapien
tgatcactgccctccagccagggta

SEQ ID NO: 1930866 - DNA, 25 bp, Homo sapien
ttctggttttcatttcaaatacata

SEQ ID NO: 1930867 - DNA, 25 bp, Homo sapien
tagatgaaatacaggcaattcagga

SEQ ID NO: 1930868 - DNA, 25 bp, Homo sapien
tgaaatacaggcaattcaggaattt

SEQ ID NO: 1930869 - DNA, 25 bp, Homo sapien
cattcactctcagccagtcggtaag

SEQ ID NO: 1930870 - DNA, 25 bp, Homo sapien
cagtatttgtgccagaagaatttag

SEQ ID NO: 1930871 - DNA, 25 bp, Homo sapien
ctctttccgaaccaattcttccagt

SEQ ID NO: 1930872 - DNA, 25 bp, Homo sapien
tttcttcaatagctcgatgaaggag

SEQ ID NO: 1930873 - DNA, 25 bp, Homo sapien
tcgatgaaggagtgcttgtaattct

SEQ ID NO: 1930874 - DNA, 25 bp, Homo sapien
gcttcaggtgtttaatttcttggtc

SEQ ID NO: 1930875 - DNA, 25 bp, Homo sapien
tacagatactggtccagtgccccgg

SEQ ID NO: 1930876 - DNA, 25 bp, Homo sapien
caggcctaggatgaccttctagaca

SEQ ID NO: 1930877 - DNA, 25 bp, Homo sapien
tttataatgagctcccagatgacac

SEQ ID NO: 1930878 - DNA, 25 bp, Homo sapien
tgttgcaggttcacagaccctcagg

SEQ ID NO: 1930879 - DNA, 25 bp, Homo sapien
tagaaggaccaatatggacaggact

SEQ ID NO: 1930880 - DNA, 25 bp, Homo sapien
tatgagagctacaacctttcctgaa

SEQ ID NO: 1930881 - DNA, 25 bp, Homo sapien
tcatgcatgaagcaaacatcgtccc

SEQ ID NO: 1930882 - DNA, 25 bp, Homo sapien
ggacaggactggtcccttatttcaa

SEQ ID NO: 1930883 - DNA, 25 bp, Homo sapien
tgtgggtgatggaaagccgtgggag

SEQ ID NO: 1930884 - DNA, 25 bp, Homo sapien
ttttctgtgggtgatggaaagccgt

SEQ ID NO: 1930885 - DNA, 25 bp, Homo sapien
ttctgtgggtgatggaaagccgtgg

SEQ ID NO: 1930886 - DNA, 25 bp, Homo sapien
tctgtgggtgatggaaagccgtggg

SEQ ID NO: 1930887 - DNA, 25 bp, Homo sapien
ggaaaaacgaggctgattatctgta

SEQ ID NO: 1930888 - DNA, 25 bp, Homo sapien
aaaacgaggctgattatctgtagat

SEQ ID NO: 1930889 - DNA, 25 bp, Homo sapien
aaaggaaaaacgaggctgattatct

SEQ ID NO: 1930890 - DNA, 25 bp, Homo sapien
gaggctgattatctgtagatttcac

SEQ ID NO: 1930891 - DNA, 25 bp, Homo sapien
gcctgaggtcttcggacagtttgat

SEQ ID NO: 1930892 - DNA, 25 bp, Homo sapien
tcagatgcaaggctgaaatgtggcc

SEQ ID NO: 1930893 - DNA, 25 bp, Homo sapien
tacattcagtgaccggtgagcactc

SEQ ID NO: 1930894 - DNA, 25 bp, Homo sapien
gcactctgggaatcatgagacacag

SEQ ID NO: 1930895 - DNA, 25 bp, Homo sapien
catttatcggatcatggaacctact

SEQ ID NO: 1930896 - DNA, 25 bp, Homo sapien
gtctccctagaagtatacaaccaag

SEQ ID NO: 1930897 - DNA, 25 bp, Homo sapien
tacatgttttcaggacctccggaag

SEQ ID NO: 1930898 - DNA, 25 bp, Homo sapien
gcttcggcacatagaacatttatcg

SEQ ID NO: 1930899 - DNA, 25 bp, Homo sapien
tgaaataattttaggataacagaga

SEQ ID NO: 1930900 - DNA, 25 bp, Homo sapien
gaaataattttaggataacagagaa

SEQ ID NO: 1930901 - DNA, 25 bp, Homo sapien
taattttaggataacagagaagttg

SEQ ID NO: 1930902 - DNA, 25 bp, Homo sapien
aataattttaggataacagagaagt

SEQ ID NO: 1930903 - DNA, 25 bp, Homo sapien
cacactgcctggggtgatctcaaac

SEQ ID NO: 1930904 - DNA, 25 bp, Homo sapien
gatgcggttttgccacactgcctgg

SEQ ID NO: 1930905 - DNA, 25 bp, Homo sapien
gagatgcggttttgccacactgcct

SEQ ID NO: 1930906 - DNA, 25 bp, Homo sapien
tatttttcatgtagagatgcggttt

SEQ ID NO: 1930907 - DNA, 25 bp, Homo sapien
tctggcttggactgtttggaacatt

SEQ ID NO: 1930908 - DNA, 25 bp, Homo sapien
ggttggctctagtgtcctttcaata

SEQ ID NO: 1930909 - DNA, 25 bp, Homo sapien
catcacaaggtgttccaggtattta

SEQ ID NO: 1930910 - DNA, 25 bp, Homo sapien
attttcaggttggctctagtgtcct

SEQ ID NO: 1930911 - DNA, 25 bp, Homo sapien
taagcaatgcatattgtactagcga

SEQ ID NO: 1930912 - DNA, 25 bp, Homo sapien
gccataccataaggcctgcgcatct

SEQ ID NO: 1930913 - DNA, 25 bp, Homo sapien
tgcgcatctagtaggctctgccatc

SEQ ID NO: 1930914 - DNA, 25 bp, Homo sapien
accatacaaatttgtagcccgggag

SEQ ID NO: 1930915 - DNA, 25 bp, Homo sapien
tgtgctggacagtatgctaggctca

SEQ ID NO: 1930916 - DNA, 25 bp, Homo sapien
tcagggatccgctgttttccagaca

SEQ ID NO: 1930917 - DNA, 25 bp, Homo sapien
catgtgcttcaaaggctctctagaa

SEQ ID NO: 1930918 - DNA, 25 bp, Homo sapien
cacaaacagttaccctctggtgagg

SEQ ID NO: 1930919 - DNA, 25 bp, Homo sapien
tgggtagactatcaaaacacgttgg

SEQ ID NO: 1930920 - DNA, 25 bp, Homo sapien
tcatcgacatgacctgagagctgta

SEQ ID NO: 1930921 - DNA, 25 bp, Homo sapien
tgtaaccaatataccactctgtggg

SEQ ID NO: 1930922 - DNA, 25 bp, Homo sapien
aatgtgaactatggactcttggtga

SEQ ID NO: 1930923 - DNA, 25 bp, Homo sapien
gatggtaatggctgtctgtaccgcc

SEQ ID NO: 1930924 - DNA, 25 bp, Homo sapien
ccgccttccgaatgatactgtctaa

SEQ ID NO: 1930925 - DNA, 25 bp, Homo sapien
tatgattccgaagaactttattgac

SEQ ID NO: 1930926 - DNA, 25 bp, Homo sapien
taaggcaaacatccagtgcggcttg

SEQ ID NO: 1930927 - DNA, 25 bp, Homo sapien
tctgaatgcagtacagaagactggc

SEQ ID NO: 1930928 - DNA, 25 bp, Homo sapien
tgggtttccctagttgcagcataag

SEQ ID NO: 1930929 - DNA, 25 bp, Homo sapien
aaggcccaggagtacaacccaatag

SEQ ID NO: 1930930 - DNA, 25 bp, Homo sapien
taaagaccaagtggcttacacagtg

SEQ ID NO: 1930931 - DNA, 25 bp, Homo sapien
aattctctgaggcttgcaatgaggg

SEQ ID NO: 1930932 - DNA, 25 bp, Homo sapien
tgagggttgtgatgtgttcccattt

SEQ ID NO: 1930933 - DNA, 25 bp, Homo sapien
ggctaatgccatggctgtcgaagtc

SEQ ID NO: 1930934 - DNA, 25 bp, Homo sapien
gatttttcggtcagtggatctcaca

SEQ ID NO: 1930935 - DNA, 25 bp, Homo sapien
ggcagcaggcaaaaagagagagctt

SEQ ID NO: 1930936 - DNA, 25 bp, Homo sapien
cagcaggcaaaaagagagagcttgt

SEQ ID NO: 1930937 - DNA, 25 bp, Homo sapien
cttacttggatggcagcaggcaaaa

SEQ ID NO: 1930938 - DNA, 25 bp, Homo sapien
acttggatggcagcaggcaaaaaga

SEQ ID NO: 1930939 - DNA, 25 bp, Homo sapien
gggtagctcgcctctcactgtcctt

SEQ ID NO: 1930940 - DNA, 25 bp, Homo sapien
tgagctaaagattccattaggtttc

SEQ ID NO: 1930941 - DNA, 25 bp, Homo sapien
ttggtcttccgtcaggatcctgtga

SEQ ID NO: 1930942 - DNA, 25 bp, Homo sapien
tgtgaagggtagctcgcctctcact

SEQ ID NO: 1930943 - DNA, 25 bp, Homo sapien
tccactttcaactccgtgtcgggtg

SEQ ID NO: 1930944 - DNA, 25 bp, Homo sapien
caaaaagagtgtccgaattcccttg

SEQ ID NO: 1930945 - DNA, 25 bp, Homo sapien
tgtcgggtgaaactgagccgtactc

SEQ ID NO: 1930946 - DNA, 25 bp, Homo sapien
cacaggtaccggcaaggatatactc

SEQ ID NO: 1930947 - DNA, 25 bp, Homo sapien
gagaggagggaaaagataattgaca

SEQ ID NO: 1930948 - DNA, 25 bp, Homo sapien
cttgtgatgagaggagggaaaagat

SEQ ID NO: 1930949 - DNA, 25 bp, Homo sapien
tgtgatgagaggagggaaaagataa

SEQ ID NO: 1930950 - DNA, 25 bp, Homo sapien
atgagaggagggaaaagataattga

SEQ ID NO: 1930951 - DNA, 25 bp, Homo sapien
ttcctagttatgatccgcaaaagcc

SEQ ID NO: 1930952 - DNA, 25 bp, Homo sapien
gagcaaatctactttctctaccttc

SEQ ID NO: 1930953 - DNA, 25 bp, Homo sapien
gatccgcaaaagccaacgttagaaa

SEQ ID NO: 1930954 - DNA, 25 bp, Homo sapien
actttctctaccttcctagttatga

SEQ ID NO: 1930955 - DNA, 25 bp, Homo sapien
tgaaagcttaggttgtgtctttttc

SEQ ID NO: 1930956 - DNA, 25 bp, Homo sapien
tgtgtctttttctttttgcttgaaa

SEQ ID NO: 1930957 - DNA, 25 bp, Homo sapien
ctgaaagcttaggttgtgtcttttt

SEQ ID NO: 1930958 - DNA, 25 bp, Homo sapien
gttgtgtctttttctttttgcttga

SEQ ID NO: 1930959 - DNA, 25 bp, Homo sapien
cttgtcaggatctggttcaaaacat

SEQ ID NO: 1930960 - DNA, 25 bp, Homo sapien
catttcagtatgaatgccttggcct

SEQ ID NO: 1930961 - DNA, 25 bp, Homo sapien
aagcaagtcgttagcacaggctctc

SEQ ID NO: 1930962 - DNA, 25 bp, Homo sapien
tcagggtggactttaaacattccca

SEQ ID NO: 1930963 - DNA, 25 bp, Homo sapien
gattgtacagcccagagaccagatg

SEQ ID NO: 1930964 - DNA, 25 bp, Homo sapien
cctgtggccatttcaatgattgtac

SEQ ID NO: 1930965 - DNA, 25 bp, Homo sapien
tgaacatagctgcttgtggttctcc

SEQ ID NO: 1930966 - DNA, 25 bp, Homo sapien
tgctgcttttccgtagcctcttggt

SEQ ID NO: 1930967 - DNA, 25 bp, Homo sapien
tataatagaaagaattaagtggagg

SEQ ID NO: 1930968 - DNA, 25 bp, Homo sapien
gctttaagcctgcatggaatcagag

SEQ ID NO: 1930969 - DNA, 25 bp, Homo sapien
gggccacgagcccttagtctgcttc

SEQ ID NO: 1930970 - DNA, 25 bp, Homo sapien
tagtctgcttctggcctagtatacc

SEQ ID NO: 1930971 - DNA, 25 bp, Homo sapien
cagcaagcctctttgatgttccgaa

SEQ ID NO: 1930972 - DNA, 25 bp, Homo sapien
tacaggggtttatgccagcaagcct

SEQ ID NO: 1930973 - DNA, 25 bp, Homo sapien
agtcagagatcttgagaacaccact

SEQ ID NO: 1930974 - DNA, 25 bp, Homo sapien
taggtattaatcaacacattgtcac

SEQ ID NO: 1930975 - DNA, 25 bp, Homo sapien
gattgtcatggagatattttaatcc

SEQ ID NO: 1930976 - DNA, 25 bp, Homo sapien
tgtcttttaatggaccccatttgga

SEQ ID NO: 1930977 - DNA, 25 bp, Homo sapien
tatgtcccggtgaactatctgattg

SEQ ID NO: 1930978 - DNA, 25 bp, Homo sapien
ccatttggaacgaaggagagcagaa

SEQ ID NO: 1930979 - DNA, 25 bp, Homo sapien
gcttcaggtgtttatgcaatgctat

SEQ ID NO: 1930980 - DNA, 25 bp, Homo sapien
gatagtgatgacctcgttaaatttc

SEQ ID NO: 1930981 - DNA, 25 bp, Homo sapien
gcaatttgatagtgatgacctcgtt

SEQ ID NO: 1930982 - DNA, 25 bp, Homo sapien
ttgatagtgatgacctcgttaaatt

SEQ ID NO: 1930983 - DNA, 25 bp, Homo sapien
aatttgatagtgatgacctcgttaa

SEQ ID NO: 1930984 - DNA, 25 bp, Homo sapien
tttgggacagtcagagaagacctct

SEQ ID NO: 1930985 - DNA, 25 bp, Homo sapien
tatgcccgatagagagacaccagtg

SEQ ID NO: 1930986 - DNA, 25 bp, Homo sapien
aatgaaactacacatgcggcaggca

SEQ ID NO: 1930987 - DNA, 25 bp, Homo sapien
ttctggactgacatatggagcctgg

SEQ ID NO: 1930988 - DNA, 25 bp, Homo sapien
ggatttccttaatagcaattctgac

SEQ ID NO: 1930989 - DNA, 25 bp, Homo sapien
gtctctctctgggatttccttaata

SEQ ID NO: 1930990 - DNA, 25 bp, Homo sapien
ctctctgggatttccttaatagcaa

SEQ ID NO: 1930991 - DNA, 25 bp, Homo sapien
ctctctctgggatttccttaatagc

SEQ ID NO: 1930992 - DNA, 25 bp, Homo sapien
gccttttcctaaaacgactctgtca

SEQ ID NO: 1930993 - DNA, 25 bp, Homo sapien
tagactatcccataagtgccttttc

SEQ ID NO: 1930994 - DNA, 25 bp, Homo sapien
taaaacgactctgtcaccattttca

SEQ ID NO: 1930995 - DNA, 25 bp, Homo sapien
ttggttgctcaagtcccgacctgcg

SEQ ID NO: 1930996 - DNA, 25 bp, Homo sapien
agaaaaaaccatgcactttcggcgg

SEQ ID NO: 1930997 - DNA, 25 bp, Homo sapien
caatcaaaactggtagcgggaagag

SEQ ID NO: 1930998 - DNA, 25 bp, Homo sapien
tgacaaggccaaacaacgaagtggt

SEQ ID NO: 1930999 - DNA, 25 bp, Homo sapien
tcacctcaaagacccaaatggcagc

SEQ ID NO: 1931000 - DNA, 25 bp, Homo sapien
aaagtttgtgaggttgggcgtctgc

SEQ ID NO: 1931001 - DNA, 25 bp, Homo sapien
taaggctttggtcactaagtgggac

SEQ ID NO: 1931002 - DNA, 25 bp, Homo sapien
ccagaggccggagaagcatggccac

SEQ ID NO: 1931003 - DNA, 25 bp, Homo sapien
ggcgtctgcatgtcaagcccagagg

SEQ ID NO: 1931004 - DNA, 25 bp, Homo sapien
gatttcaccatcctccagtccagag

SEQ ID NO: 1931005 - DNA, 25 bp, Homo sapien
tgttctgggccaaggtagccaaagg

SEQ ID NO: 1931006 - DNA, 25 bp, Homo sapien
caatatcactagctggcacaatggc

SEQ ID NO: 1931007 - DNA, 25 bp, Homo sapien
caggctctaaagtccattgggaata

SEQ ID NO: 1931008 - DNA, 25 bp, Homo sapien
gcagagcagggtaacattagtggcc

SEQ ID NO: 1931009 - DNA, 25 bp, Homo sapien
aacagggcaccttctatgaggaaca

SEQ ID NO: 1931010 - DNA, 25 bp, Homo sapien
aaatggtggccatgtgtcaagcctg

SEQ ID NO: 1931011 - DNA, 25 bp, Homo sapien
taagtatgccaattagactggtgag

SEQ ID NO: 1931012 - DNA, 25 bp, Homo sapien
catagtgctctgtgtccattagaca

SEQ ID NO: 1931013 - DNA, 25 bp, Homo sapien
ggcaacataacgagaacaagtctct

SEQ ID NO: 1931014 - DNA, 25 bp, Homo sapien
tcaggttctctgtgtagcatattaa

SEQ ID NO: 1931015 - DNA, 25 bp, Homo sapien
taatgcctgccacaagggtgctatc

SEQ ID NO: 1931016 - DNA, 25 bp, Homo sapien
cagcaagtcactttcacagtctcct

SEQ ID NO: 1931017 - DNA, 25 bp, Homo sapien
tctcttcggtaatggtgttcaccat

SEQ ID NO: 1931018 - DNA, 25 bp, Homo sapien
tctccccttctcttcggtaatggtg

SEQ ID NO: 1931019 - DNA, 25 bp, Homo sapien
gcaagtcactttcacagtctccttc

SEQ ID NO: 1931020 - DNA, 25 bp, Homo sapien
gtttcccacagtcaatcatagtgtt

SEQ ID NO: 1931021 - DNA, 25 bp, Homo sapien
tttcacacacaatgactaatacgta

SEQ ID NO: 1931022 - DNA, 25 bp, Homo sapien
ttgaaaataatgatcaggtaagaag

SEQ ID NO: 1931023 - DNA, 25 bp, Homo sapien
gatcaggtaagaagaatctttttca

SEQ ID NO: 1931024 - DNA, 25 bp, Homo sapien
ggtaagaagaatctttttcacacac

SEQ ID NO: 1931025 - DNA, 25 bp, Homo sapien
aatgaagttctgtacagaaatagat

SEQ ID NO: 1931026 - DNA, 25 bp, Homo sapien
gcacataaagaaagcagcatctttc

SEQ ID NO: 1931027 - DNA, 25 bp, Homo sapien
gaagttctgtacagaaatagatttg

SEQ ID NO: 1931028 - DNA, 25 bp, Homo sapien
aatcatcagaattgtgaagcacata

SEQ ID NO: 1931029 - DNA, 25 bp, Homo sapien
cattattcagagaactatcaattct

SEQ ID NO: 1931030 - DNA, 25 bp, Homo sapien
ggcattattcagagaactatcaatt

SEQ ID NO: 1931031 - DNA, 25 bp, Homo sapien
aggcattattcagagaactatcaat

SEQ ID NO: 1931032 - DNA, 25 bp, Homo sapien
gcattattcagagaactatcaattc

SEQ ID NO: 1931033 - DNA, 25 bp, Homo sapien
gacagaagaggcactaaaattccac

SEQ ID NO: 1931034 - DNA, 25 bp, Homo sapien
cagaagaggcactaaaattccactc

SEQ ID NO: 1931035 - DNA, 25 bp, Homo sapien
acagaagaggcactaaaattccact

SEQ ID NO: 1931036 - DNA, 25 bp, Homo sapien
gaagaggcactaaaattccactcat

SEQ ID NO: 1931037 - DNA, 25 bp, Homo sapien
atacaatgcagccttatcctcagag

SEQ ID NO: 1931038 - DNA, 25 bp, Homo sapien
ttgcatacaatgcagccttatcctc

SEQ ID NO: 1931039 - DNA, 25 bp, Homo sapien
ctacttgcatacaatgcagccttat

SEQ ID NO: 1931040 - DNA, 25 bp, Homo sapien
gcatacaatgcagccttatcctcag

SEQ ID NO: 1931041 - DNA, 25 bp, Homo sapien
cctgctctcgtctccataatgttca

SEQ ID NO: 1931042 - DNA, 25 bp, Homo sapien
acttcattgttgatagacaaataag

SEQ ID NO: 1931043 - DNA, 25 bp, Homo sapien
ggaagcacgtgccaaatagagattg

SEQ ID NO: 1931044 - DNA, 25 bp, Homo sapien
taagaaggttgatagattttggttg

SEQ ID NO: 1931045 - DNA, 25 bp, Homo sapien
atcaggaagcacgtgccaaatagag

SEQ ID NO: 1931046 - DNA, 25 bp, Homo sapien
gctgtcatatttgcttcgaaatgtt

SEQ ID NO: 1931047 - DNA, 25 bp, Homo sapien
tgtcatatttgcttcgaaatgtttt

SEQ ID NO: 1931048 - DNA, 25 bp, Homo sapien
actcgcagataactaagtgttaaca

SEQ ID NO: 1931049 - DNA, 25 bp, Homo sapien
cactcgcagataactaagtgttaac

SEQ ID NO: 1931050 - DNA, 25 bp, Homo sapien
ttgcttggccacaggctgttctgtg

SEQ ID NO: 1931051 - DNA, 25 bp, Homo sapien
taaaattgtctctacaatagacttg

SEQ ID NO: 1931052 - DNA, 25 bp, Homo sapien
aaatccatccaaaagtccacaagtt

SEQ ID NO: 1931053 - DNA, 25 bp, Homo sapien
tgtctttgtggcctcgaccaggaaa

SEQ ID NO: 1931054 - DNA, 25 bp, Homo sapien
ttcagatgcttgaatgactctcatg

SEQ ID NO: 1931055 - DNA, 25 bp, Homo sapien
ttaccaagaagactacttagcttca

SEQ ID NO: 1931056 - DNA, 25 bp, Homo sapien
taccaagaagactacttagcttcac

SEQ ID NO: 1931057 - DNA, 25 bp, Homo sapien
tttaccaagaagactacttagcttc

SEQ ID NO: 1931058 - DNA, 25 bp, Homo sapien
catctttaccaatatgacagaggaa

SEQ ID NO: 1931059 - DNA, 25 bp, Homo sapien
caatttatactttcactggaggcat

SEQ ID NO: 1931060 - DNA, 25 bp, Homo sapien
cttttttaaccgctgagattggctc

SEQ ID NO: 1931061 - DNA, 25 bp, Homo sapien
tgacaataaggtcttacccacaccc

SEQ ID NO: 1931062 - DNA, 25 bp, Homo sapien
tcagagttctgaccatcttaataag

SEQ ID NO: 1931063 - DNA, 25 bp, Homo sapien
gaggcttcaacaaaacctcaccttg

SEQ ID NO: 1931064 - DNA, 25 bp, Homo sapien
aatgtaccttctccgatttcactga

SEQ ID NO: 1931065 - DNA, 25 bp, Homo sapien
tcaattcctgcaacaatttagaggc

SEQ ID NO: 1931066 - DNA, 25 bp, Homo sapien
gacagaaagcaaaagatttatctat

SEQ ID NO: 1931067 - DNA, 25 bp, Homo sapien
agacagaaagcaaaagatttatcta

SEQ ID NO: 1931068 - DNA, 25 bp, Homo sapien
aagacagaaagcaaaagatttatct

SEQ ID NO: 1931069 - DNA, 25 bp, Homo sapien
tgcaccaagttgggtccagtttctt

SEQ ID NO: 1931070 - DNA, 25 bp, Homo sapien
ttgcaccaagttgggtccagtttct

SEQ ID NO: 1931071 - DNA, 25 bp, Homo sapien
tttgcaccaagttgggtccagtttc

SEQ ID NO: 1931072 - DNA, 25 bp, Homo sapien
tctttgcaccaagttgggtccagtt

SEQ ID NO: 1931073 - DNA, 25 bp, Homo sapien
caactttccggagctcaaaggaaga

SEQ ID NO: 1931074 - DNA, 25 bp, Homo sapien
gagctcaaaggaagattcaaactgg

SEQ ID NO: 1931075 - DNA, 25 bp, Homo sapien
ggaggaccgcataattaattcctga

SEQ ID NO: 1931076 - DNA, 25 bp, Homo sapien
ggaggaggaccgcataattaattcc

SEQ ID NO: 1931077 - DNA, 25 bp, Homo sapien
ctcagattcaaatgcctttttgaac

SEQ ID NO: 1931078 - DNA, 25 bp, Homo sapien
ggctcagattcaaatgcctttttga

SEQ ID NO: 1931079 - DNA, 25 bp, Homo sapien
ctgtagtgttggctcagattcaaat

SEQ ID NO: 1931080 - DNA, 25 bp, Homo sapien
ttggctcagattcaaatgccttttt

SEQ ID NO: 1931081 - DNA, 25 bp, Homo sapien
gaagacactgagctcaagtcaagtt

SEQ ID NO: 1931082 - DNA, 25 bp, Homo sapien
caaagcaggacagcatgtgaagaaa

SEQ ID NO: 1931083 - DNA, 25 bp, Homo sapien
taatgctgaatcaccctgctgctgt

SEQ ID NO: 1931084 - DNA, 25 bp, Homo sapien
gatttgagggccttatgcttagcaa

SEQ ID NO: 1931085 - DNA, 25 bp, Homo sapien
agatgggaagagatacccttggaag

SEQ ID NO: 1931086 - DNA, 25 bp, Homo sapien
aaagatgggaagagatacccttgga

SEQ ID NO: 1931087 - DNA, 25 bp, Homo sapien
gcaaacccatattctgagaaggctg

SEQ ID NO: 1931088 - DNA, 25 bp, Homo sapien
atgcaaacccatattctgagaaggc

SEQ ID NO: 1931089 - DNA, 25 bp, Homo sapien
tcgacactggtgcagctaatctggg

SEQ ID NO: 1931090 - DNA, 25 bp, Homo sapien
ccattggagtaaggtgttctgctac

SEQ ID NO: 1931091 - DNA, 25 bp, Homo sapien
tagccatcttgcaatcccgagtagg

SEQ ID NO: 1931092 - DNA, 25 bp, Homo sapien
tgctggttcaacctgcacttgagcc

SEQ ID NO: 1931093 - DNA, 25 bp, Homo sapien
tcctctaactagcatgtgacgggca

SEQ ID NO: 1931094 - DNA, 25 bp, Homo sapien
taactagcatgtgacgggcaccact

SEQ ID NO: 1931095 - DNA, 25 bp, Homo sapien
agttgtcctctaactagcatgtgac

SEQ ID NO: 1931096 - DNA, 25 bp, Homo sapien
ccactgctgcctttaactgatttaa

SEQ ID NO: 1931097 - DNA, 25 bp, Homo sapien
tggaacaatgggaacatgccaccac

SEQ ID NO: 1931098 - DNA, 25 bp, Homo sapien
tatgcggtgcccttcatccaaggat

SEQ ID NO: 1931099 - DNA, 25 bp, Homo sapien
cactctcaggccaataagactgtga

SEQ ID NO: 1931100 - DNA, 25 bp, Homo sapien
ccagggaatgtcttgagggaaaagc

SEQ ID NO: 1931101 - DNA, 25 bp, Homo sapien
caactaggcaatacatatctgaagc

SEQ ID NO: 1931102 - DNA, 25 bp, Homo sapien
tctttgtagattcgaccaactaggc

SEQ ID NO: 1931103 - DNA, 25 bp, Homo sapien
gaagcaacttgtccttcgctttgca

SEQ ID NO: 1931104 - DNA, 25 bp, Homo sapien
cagtgtccgtgaaattagagtccaa

SEQ ID NO: 1931105 - DNA, 25 bp, Homo sapien
tattcagtgcaaatgcataatgaaa

SEQ ID NO: 1931106 - DNA, 25 bp, Homo sapien
attcagtgcaaatgcataatgaaac

SEQ ID NO: 1931107 - DNA, 25 bp, Homo sapien
ctattcagtgcaaatgcataatgaa

SEQ ID NO: 1931108 - DNA, 25 bp, Homo sapien
ggaggccaaatcaaaggttggcagt

SEQ ID NO: 1931109 - DNA, 25 bp, Homo sapien
gaggccaaatcaaaggttggcagtt

SEQ ID NO: 1931110 - DNA, 25 bp, Homo sapien
tttctaaagtctctaccagcttcac

SEQ ID NO: 1931111 - DNA, 25 bp, Homo sapien
taaagtctctaccagcttcacaata

SEQ ID NO: 1931112 - DNA, 25 bp, Homo sapien
tgccgaattcttgccaactcagctg

SEQ ID NO: 1931113 - DNA, 25 bp, Homo sapien
taaattacgagctttcctgatgtca

SEQ ID NO: 1931114 - DNA, 25 bp, Homo sapien
gatgtcattgagtatagattcccgg

SEQ ID NO: 1931115 - DNA, 25 bp, Homo sapien
tcgatattatctactcgctgccgaa

SEQ ID NO: 1931116 - DNA, 25 bp, Homo sapien
gagctctgtcaaccccttcatgaag

SEQ ID NO: 1931117 - DNA, 25 bp, Homo sapien
tccaagaagcagctcgaagttcggt

SEQ ID NO: 1931118 - DNA, 25 bp, Homo sapien
cacaagaggtaagcagatgggtcca

SEQ ID NO: 1931119 - DNA, 25 bp, Homo sapien
gcttgtgccaccttcaaaagttgaa

SEQ ID NO: 1931120 - DNA, 25 bp, Homo sapien
tctgaaggacactgacataatggct

SEQ ID NO: 1931121 - DNA, 25 bp, Homo sapien
tccacaagtccaagctgggctaggc

SEQ ID NO: 1931122 - DNA, 25 bp, Homo sapien
cagggagtgctaccttctctgaagg

SEQ ID NO: 1931123 - DNA, 25 bp, Homo sapien
tctgccattccggtctcagggagtg

SEQ ID NO: 1931124 - DNA, 25 bp, Homo sapien
tttctaccaattagactgtctacac

SEQ ID NO: 1931125 - DNA, 25 bp, Homo sapien
gactgtctacacaacagttacacat

SEQ ID NO: 1931126 - DNA, 25 bp, Homo sapien
tctttgttcgctgattttctaccaa

SEQ ID NO: 1931127 - DNA, 25 bp, Homo sapien
tctgcttctttgttcgctgattttc

SEQ ID NO: 1931128 - DNA, 25 bp, Homo sapien
aaaacagtgcattgaagcatgaagc

SEQ ID NO: 1931129 - DNA, 25 bp, Homo sapien
gcagcgcatgtccaatcagtatttg

SEQ ID NO: 1931130 - DNA, 25 bp, Homo sapien
tgtgagaaccctgaggtaccaagcc

SEQ ID NO: 1931131 - DNA, 25 bp, Homo sapien
gcaataattgctcatttcctgttga

SEQ ID NO: 1931132 - DNA, 25 bp, Homo sapien
tgaactatgtgggaaaatttgtatt

SEQ ID NO: 1931133 - DNA, 25 bp, Homo sapien
aaattttaggaactgtagattcagt

SEQ ID NO: 1931134 - DNA, 25 bp, Homo sapien
tagagaaaaggttgcctctgttgcc

SEQ ID NO: 1931135 - DNA, 25 bp, Homo sapien
taacaatgatattagcaattagaaa

SEQ ID NO: 1931136 - DNA, 25 bp, Homo sapien
gagaagcaggaataggaaccaggat

SEQ ID NO: 1931137 - DNA, 25 bp, Homo sapien
caggaataggaaccaggatttcacc

SEQ ID NO: 1931138 - DNA, 25 bp, Homo sapien
tgggagaagcaggaataggaaccag

SEQ ID NO: 1931139 - DNA, 25 bp, Homo sapien
gaagcaggaataggaaccaggattt

SEQ ID NO: 1931140 - DNA, 25 bp, Homo sapien
agagtccgagttagtatcacagtag

SEQ ID NO: 1931141 - DNA, 25 bp, Homo sapien
tagaggatgatgttgttggccatgc

SEQ ID NO: 1931142 - DNA, 25 bp, Homo sapien
cagtgactgcagagagtccgagtta

SEQ ID NO: 1931143 - DNA, 25 bp, Homo sapien
tggtaaaacaaggacggctgccgga

SEQ ID NO: 1931144 - DNA, 25 bp, Homo sapien
attataaagaagctgcatgataacg

SEQ ID NO: 1931145 - DNA, 25 bp, Homo sapien
gaatgagcccaaaggattctccaaa

SEQ ID NO: 1931146 - DNA, 25 bp, Homo sapien
catgataacgaaggtaagtacaaca

SEQ ID NO: 1931147 - DNA, 25 bp, Homo sapien
agggaatgagcccaaaggattctcc

SEQ ID NO: 1931148 - DNA, 25 bp, Homo sapien
ggcttcttatcacgctgcccaggag

SEQ ID NO: 1931149 - DNA, 25 bp, Homo sapien
caaggagccctttgacggcttctta

SEQ ID NO: 1931150 - DNA, 25 bp, Homo sapien
gcccaggaggctccggtttcttcgc

SEQ ID NO: 1931151 - DNA, 25 bp, Homo sapien
ggctccggtttcttcgcctcagctt

SEQ ID NO: 1931152 - DNA, 25 bp, Homo sapien
ccaacaataacaatagtctttgtca

SEQ ID NO: 1931153 - DNA, 25 bp, Homo sapien
caacaataacaatagtctttgtcac

SEQ ID NO: 1931154 - DNA, 25 bp, Homo sapien
aacaataacaatagtctttgtcaca

SEQ ID NO: 1931155 - DNA, 25 bp, Homo sapien
aacattaagatacggctgggcgcag

SEQ ID NO: 1931156 - DNA, 25 bp, Homo sapien
aaacattaagatacggctgggcgca

SEQ ID NO: 1931157 - DNA, 25 bp, Homo sapien
aaaacattaagatacggctgggcgc

SEQ ID NO: 1931158 - DNA, 25 bp, Homo sapien
acattaagatacggctgggcgcagt

SEQ ID NO: 1931159 - DNA, 25 bp, Homo sapien
aaataaaattccttgtgccgctgcc

SEQ ID NO: 1931160 - DNA, 25 bp, Homo sapien
gttcacagggtggactctaaaaata

SEQ ID NO: 1931161 - DNA, 25 bp, Homo sapien
tacaagaacactgacgtgacctaga

SEQ ID NO: 1931162 - DNA, 25 bp, Homo sapien
ggagtagaggaatgcagtgactccc

SEQ ID NO: 1931163 - DNA, 25 bp, Homo sapien
tcacggaaagaatgccggatacaca

SEQ ID NO: 1931164 - DNA, 25 bp, Homo sapien
ggtctgtgaaaaacgatacaggtgg

SEQ ID NO: 1931165 - DNA, 25 bp, Homo sapien
actagcgaggcactgaacatcacgg

SEQ ID NO: 1931166 - DNA, 25 bp, Homo sapien
caaatacgttcatgtctgtaggtct

SEQ ID NO: 1931167 - DNA, 25 bp, Homo sapien
catggacgtcgactgaaagactgag

SEQ ID NO: 1931168 - DNA, 25 bp, Homo sapien
tcatctctcaaaagggagggctcaa

SEQ ID NO: 1931169 - DNA, 25 bp, Homo sapien
tgagcagctatatcggtaaaccacc

SEQ ID NO: 1931170 - DNA, 25 bp, Homo sapien
tgatgtctataagcccacatggacg

SEQ ID NO: 1931171 - DNA, 25 bp, Homo sapien
aaagaacatactgataaaggcctgc

SEQ ID NO: 1931172 - DNA, 25 bp, Homo sapien
catgacttataaccccagtgagttg

SEQ ID NO: 1931173 - DNA, 25 bp, Homo sapien
tattaggtcatcagaaggcccatta

SEQ ID NO: 1931174 - DNA, 25 bp, Homo sapien
tcatccccgagtagcattcttttgc

SEQ ID NO: 1931175 - DNA, 25 bp, Homo sapien
ggatggtgccgaggaaacaacacag

SEQ ID NO: 1931176 - DNA, 25 bp, Homo sapien
ctttcaaatcaataagggctgtatt

SEQ ID NO: 1931177 - DNA, 25 bp, Homo sapien
gctgtattagaaacagggatggtgc

SEQ ID NO: 1931178 - DNA, 25 bp, Homo sapien
tgggaaggtgggtcatatctgccat

SEQ ID NO: 1931179 - DNA, 25 bp, Homo sapien
taggttctatctaatattatcatgg

SEQ ID NO: 1931180 - DNA, 25 bp, Homo sapien
gatagtccaattgcaataaggtggc

SEQ ID NO: 1931181 - DNA, 25 bp, Homo sapien
aatttcttcaattaggatagtccaa

SEQ ID NO: 1931182 - DNA, 25 bp, Homo sapien
tctcatgcttaaatagtaaagacta

SEQ ID NO: 1931183 - DNA, 25 bp, Homo sapien
aaatgcctacaaggatgacctctgg

SEQ ID NO: 1931184 - DNA, 25 bp, Homo sapien
caggtcatgaggtgtgcaagaatct

SEQ ID NO: 1931185 - DNA, 25 bp, Homo sapien
tatctttcagaacaaggccaagcaa

SEQ ID NO: 1931186 - DNA, 25 bp, Homo sapien
gaatagctgggcaccactgatccca

SEQ ID NO: 1931187 - DNA, 25 bp, Homo sapien
tactgtggtaagcatggcacagaag

SEQ ID NO: 1931188 - DNA, 25 bp, Homo sapien
tgtggtaagcatggcacagaagacc

SEQ ID NO: 1931189 - DNA, 25 bp, Homo sapien
accctgtagaagatatcatcagaaa

SEQ ID NO: 1931190 - DNA, 25 bp, Homo sapien
cctgtagaagatatcatcagaaaca

SEQ ID NO: 1931191 - DNA, 25 bp, Homo sapien
cacagttcttatagccaccagaggg

SEQ ID NO: 1931192 - DNA, 25 bp, Homo sapien
gaatgggcctctaaccagacctctg

SEQ ID NO: 1931193 - DNA, 25 bp, Homo sapien
actgctccacaaagaaagtgtgaac

SEQ ID NO: 1931194 - DNA, 25 bp, Homo sapien
gagagacttgcacatttcccggact

SEQ ID NO: 1931195 - DNA, 25 bp, Homo sapien
taaccaggcttcttacaggctagtc

SEQ ID NO: 1931196 - DNA, 25 bp, Homo sapien
tgctctaatacaagaaaagtcccgg

SEQ ID NO: 1931197 - DNA, 25 bp, Homo sapien
gcttctcctacatctggccaagatg

SEQ ID NO: 1931198 - DNA, 25 bp, Homo sapien
gccaagatgctactcagaggtggat

SEQ ID NO: 1931199 - DNA, 25 bp, Homo sapien
aagaggcttccgagagcatgccctc

SEQ ID NO: 1931200 - DNA, 25 bp, Homo sapien
ggtaagatctttgccagctcactca

SEQ ID NO: 1931201 - DNA, 25 bp, Homo sapien
tgagagtaactcagcccacctaaat

SEQ ID NO: 1931202 - DNA, 25 bp, Homo sapien
tgagagggcactcatcctgggagtt

SEQ ID NO: 1931203 - DNA, 25 bp, Homo sapien
attataatccaaaaataagagtgct

SEQ ID NO: 1931204 - DNA, 25 bp, Homo sapien
tccaaaaataagagtgctacaattt

SEQ ID NO: 1931205 - DNA, 25 bp, Homo sapien
aatccaaaaataagagtgctacaat

SEQ ID NO: 1931206 - DNA, 25 bp, Homo sapien
tataatccaaaaataagagtgctac

SEQ ID NO: 1931207 - DNA, 25 bp, Homo sapien
ctgacataagcccacttcaggtgtt

SEQ ID NO: 1931208 - DNA, 25 bp, Homo sapien
ataagcccacttcaggtgtttggaa

SEQ ID NO: 1931209 - DNA, 25 bp, Homo sapien
gacataagcccacttcaggtgtttg

SEQ ID NO: 1931210 - DNA, 25 bp, Homo sapien
aaaactgacataagcccacttcagg

SEQ ID NO: 1931211 - DNA, 25 bp, Homo sapien
cgcgggtcccgaccgcgcgggatgg

SEQ ID NO: 1931212 - DNA, 25 bp, Homo sapien
acgcgggtcccgaccgcgcgggatg

SEQ ID NO: 1931213 - DNA, 25 bp, Homo sapien
aaagtcgagtttcccaaaatgcagg

SEQ ID NO: 1931214 - DNA, 25 bp, Homo sapien
ggctcgcttcgttgatcacatatgc

SEQ ID NO: 1931215 - DNA, 25 bp, Homo sapien
ttgtaaaagcggtccagcacggtgg

SEQ ID NO: 1931216 - DNA, 25 bp, Homo sapien
agcggcgctctccacgttccagaag

SEQ ID NO: 1931217 - DNA, 25 bp, Homo sapien
cggcggcggtggcagctggtgctcc

SEQ ID NO: 1931218 - DNA, 25 bp, Homo sapien
tggtgctcctcgccctcgcccaccg

SEQ ID NO: 1931219 - DNA, 25 bp, Homo sapien
gcggcggtggcagctggtgctcctc

SEQ ID NO: 1931220 - DNA, 25 bp, Homo sapien
gtgctcctcgccctcgcccaccgcc

SEQ ID NO: 1931221 - DNA, 25 bp, Homo sapien
cggggatggtgcagaagcccgaggg

SEQ ID NO: 1931222 - DNA, 25 bp, Homo sapien
ctcggggatggtgcagaagcccgag

SEQ ID NO: 1931223 - DNA, 25 bp, Homo sapien
cagaagcccgagggggcgaagggtg

SEQ ID NO: 1931224 - DNA, 25 bp, Homo sapien
tcggggatggtgcagaagcccgagg

SEQ ID NO: 1931225 - DNA, 25 bp, Homo sapien
atgccctcgtccgcctccgtgctca

SEQ ID NO: 1931226 - DNA, 25 bp, Homo sapien
gatgccctcgtccgcctccgtgctc

SEQ ID NO: 1931227 - DNA, 25 bp, Homo sapien
tgccctcgtccgcctccgtgctcat

SEQ ID NO: 1931228 - DNA, 25 bp, Homo sapien
cgcccagccgcaccgcctggccagc

SEQ ID NO: 1931229 - DNA, 25 bp, Homo sapien
ccgcccagccgcaccgcctggccag

SEQ ID NO: 1931230 - DNA, 25 bp, Homo sapien
cccgcccagccgcaccgcctggcca

SEQ ID NO: 1931231 - DNA, 25 bp, Homo sapien
ctgccatcgcgcgccgcgccctcgc

SEQ ID NO: 1931232 - DNA, 25 bp, Homo sapien
acctgcgccgcggtgcagctcaagg

SEQ ID NO: 1931233 - DNA, 25 bp, Homo sapien
ctgcagagtttagagtacaaggggt

SEQ ID NO: 1931234 - DNA, 25 bp, Homo sapien
ggtgagcgggaagggacggagcttc

SEQ ID NO: 1931235 - DNA, 25 bp, Homo sapien
tttcttggccggctgacaagtcggc

SEQ ID NO: 1931236 - DNA, 25 bp, Homo sapien
tccttgcctggcctcgtttctcttt

SEQ ID NO: 1931237 - DNA, 25 bp, Homo sapien
gcggcagctcgccttcatcgggtgg

SEQ ID NO: 1931238 - DNA, 25 bp, Homo sapien
tttcgatcgcctccgccgcgtggtc

SEQ ID NO: 1931239 - DNA, 25 bp, Homo sapien
cagcagcggcagccgaaaggaccct

SEQ ID NO: 1931240 - DNA, 25 bp, Homo sapien
ttccttccagatcctttcagagcca

SEQ ID NO: 1931241 - DNA, 25 bp, Homo sapien
tccttccagatcctttcagagccat

SEQ ID NO: 1931242 - DNA, 25 bp, Homo sapien
tttccttccagatcctttcagagcc

SEQ ID NO: 1931243 - DNA, 25 bp, Homo sapien
gaatgaccagtaaagacatacatcc

SEQ ID NO: 1931244 - DNA, 25 bp, Homo sapien
agacatacatccagttggcaaagtg

SEQ ID NO: 1931245 - DNA, 25 bp, Homo sapien
aggatacatgaccatgacaaacacc

SEQ ID NO: 1931246 - DNA, 25 bp, Homo sapien
tcgtttgccccactggaatgaccag

SEQ ID NO: 1931247 - DNA, 25 bp, Homo sapien
tagcatcttgaggtccttccctgtc

SEQ ID NO: 1931248 - DNA, 25 bp, Homo sapien
tccctgtcaaggacatagaacttca

SEQ ID NO: 1931249 - DNA, 25 bp, Homo sapien
caggagcagtttggttgtggacacc

SEQ ID NO: 1931250 - DNA, 25 bp, Homo sapien
gtggacaccatgcatttgggtcttg

SEQ ID NO: 1931251 - DNA, 25 bp, Homo sapien
gtaccaatctcattgcagatgccat

SEQ ID NO: 1931252 - DNA, 25 bp, Homo sapien
aatgtaccaatctcattgcagatgc

SEQ ID NO: 1931253 - DNA, 25 bp, Homo sapien
tgtaccaatctcattgcagatgcca

SEQ ID NO: 1931254 - DNA, 25 bp, Homo sapien
ggaatgtaccaatctcattgcagat

SEQ ID NO: 1931255 - DNA, 25 bp, Homo sapien
tgcctttcccttgacagcgcagtca

SEQ ID NO: 1931256 - DNA, 25 bp, Homo sapien
aaggtgatggtggtgtgggtcatcc

SEQ ID NO: 1931257 - DNA, 25 bp, Homo sapien
catcctgtgaaccagtcttgccttt

SEQ ID NO: 1931258 - DNA, 25 bp, Homo sapien
cctttcccttgacagcgcagtcagg

SEQ ID NO: 1931259 - DNA, 25 bp, Homo sapien
tgggccaagtctctgcctcttctct

SEQ ID NO: 1931260 - DNA, 25 bp, Homo sapien
ctcagcctgggccaagtctctgcct

SEQ ID NO: 1931261 - DNA, 25 bp, Homo sapien
agcctgggccaagtctctgcctctt

SEQ ID NO: 1931262 - DNA, 25 bp, Homo sapien
cctgggccaagtctctgcctcttct

SEQ ID NO: 1931263 - DNA, 25 bp, Homo sapien
ctgtattatgggccagcttatgtag

SEQ ID NO: 1931264 - DNA, 25 bp, Homo sapien
tattatgggccagcttatgtagttg

SEQ ID NO: 1931265 - DNA, 25 bp, Homo sapien
ttatgggccagcttatgtagttgag

SEQ ID NO: 1931266 - DNA, 25 bp, Homo sapien
tgtattatgggccagcttatgtagt

SEQ ID NO: 1931267 - DNA, 25 bp, Homo sapien
tttggtggtcccagggcctgggtga

SEQ ID NO: 1931268 - DNA, 25 bp, Homo sapien
ctgtttggtggtcccagggcctggg

SEQ ID NO: 1931269 - DNA, 25 bp, Homo sapien
ttggtggtcccagggcctgggtgaa

SEQ ID NO: 1931270 - DNA, 25 bp, Homo sapien
tttaggctcttgtagaggataactc

SEQ ID NO: 1931271 - DNA, 25 bp, Homo sapien
ttttaggctcttgtagaggataact

SEQ ID NO: 1931272 - DNA, 25 bp, Homo sapien
ttaggctcttgtagaggataactct

SEQ ID NO: 1931273 - DNA, 25 bp, Homo sapien
ggcctgttgcttcaagatagcaggg

SEQ ID NO: 1931274 - DNA, 25 bp, Homo sapien
ttggcctgttgcttcaagatagcag

SEQ ID NO: 1931275 - DNA, 25 bp, Homo sapien
aattcttaggcctttactcaacagg

SEQ ID NO: 1931276 - DNA, 25 bp, Homo sapien
gcctttactcaacaggggattcacc

SEQ ID NO: 1931277 - DNA, 25 bp, Homo sapien
gatgtttagtttagtatttataagc

SEQ ID NO: 1931278 - DNA, 25 bp, Homo sapien
ggctgaaggcatcgttttctttgaa

SEQ ID NO: 1931279 - DNA, 25 bp, Homo sapien
tataagctggatacaagtttacata

SEQ ID NO: 1931280 - DNA, 25 bp, Homo sapien
tctagacctataatacacctattta

SEQ ID NO: 1931281 - DNA, 25 bp, Homo sapien
tcctttttcagtgtcagtatctgga

SEQ ID NO: 1931282 - DNA, 25 bp, Homo sapien
ctggacgtttgaccttatgttctac

SEQ ID NO: 1931283 - DNA, 25 bp, Homo sapien
cagtgtcagtatctggacgtttgac

SEQ ID NO: 1931284 - DNA, 25 bp, Homo sapien
gacgtttgaccttatgttctactta

SEQ ID NO: 1931285 - DNA, 25 bp, Homo sapien
tgtcctgtcacactatcagtaagtt

SEQ ID NO: 1931286 - DNA, 25 bp, Homo sapien
caaaaaggtcaccagtaaactcctg

SEQ ID NO: 1931287 - DNA, 25 bp, Homo sapien
gagttcccaggaatgagcatctttt

SEQ ID NO: 1931288 - DNA, 25 bp, Homo sapien
gaatctacactctcttttaaacctg

SEQ ID NO: 1931289 - DNA, 25 bp, Homo sapien
tccctccaaaagtagatgttctcca

SEQ ID NO: 1931290 - DNA, 25 bp, Homo sapien
tacttgccctatgtatccagcagac

SEQ ID NO: 1931291 - DNA, 25 bp, Homo sapien
aatcttagccctcttactttggtgc

SEQ ID NO: 1931292 - DNA, 25 bp, Homo sapien
cctggtcagttgattgcatttcggg

SEQ ID NO: 1931293 - DNA, 25 bp, Homo sapien
tacatatgatttgatccactattgg

SEQ ID NO: 1931294 - DNA, 25 bp, Homo sapien
cagtagattgaacaagtttcccaag

SEQ ID NO: 1931295 - DNA, 25 bp, Homo sapien
caagggcaaaagcaattgtccacga

SEQ ID NO: 1931296 - DNA, 25 bp, Homo sapien
taaagtggagggaattgatgcaatt

SEQ ID NO: 1931297 - DNA, 25 bp, Homo sapien
tacaatcaagatctgtggagccaga

SEQ ID NO: 1931298 - DNA, 25 bp, Homo sapien
caacaaatgctgtctagcgggttcc

SEQ ID NO: 1931299 - DNA, 25 bp, Homo sapien
tacttccacctgaaagcaggcactt

SEQ ID NO: 1931300 - DNA, 25 bp, Homo sapien
tattacgctacagtataggtgtctc

SEQ ID NO: 1931301 - DNA, 25 bp, Homo sapien
tatttaggtctgtggtgcatctcaa

SEQ ID NO: 1931302 - DNA, 25 bp, Homo sapien
tacccggagacattgctatattcac

SEQ ID NO: 1931303 - DNA, 25 bp, Homo sapien
gagtctggaagtcagctagtgttaa

SEQ ID NO: 1931304 - DNA, 25 bp, Homo sapien
cagtagtttcgtgctgagtctggaa

SEQ ID NO: 1931305 - DNA, 25 bp, Homo sapien
ggcagaatgtccctacaatgtggca

SEQ ID NO: 1931306 - DNA, 25 bp, Homo sapien
tgagtctagacccttggtaccctga

SEQ ID NO: 1931307 - DNA, 25 bp, Homo sapien
gaagcgggtatcactggagactatc

SEQ ID NO: 1931308 - DNA, 25 bp, Homo sapien
ccaaccctggtacagcgtgggagga

SEQ ID NO: 1931309 - DNA, 25 bp, Homo sapien
cccagagaaccggaagcacgtgttt

SEQ ID NO: 1931310 - DNA, 25 bp, Homo sapien
caaaaacagagtcacttaaacagcc

SEQ ID NO: 1931311 - DNA, 25 bp, Homo sapien
tttcagtataatgctttccagctat

SEQ ID NO: 1931312 - DNA, 25 bp, Homo sapien
taaacagccaatagtgtgtaaccac

SEQ ID NO: 1931313 - DNA, 25 bp, Homo sapien
agagctgcctaaccgcaagaacgcc

SEQ ID NO: 1931314 - DNA, 25 bp, Homo sapien
ggacgcagagctgcctaaccgcaag

SEQ ID NO: 1931315 - DNA, 25 bp, Homo sapien
gagctgcggggcagtcggacgcaga

SEQ ID NO: 1931316 - DNA, 25 bp, Homo sapien
gctgcctaaccgcaagaacgcctgg

SEQ ID NO: 1931317 - DNA, 25 bp, Homo sapien
caaagtaaggcaacgtttctgcttc

SEQ ID NO: 1931318 - DNA, 25 bp, Homo sapien
tacagtttttatcgccagctgggca

SEQ ID NO: 1931319 - DNA, 25 bp, Homo sapien
taaatatctgcatgtaccaagagtc

SEQ ID NO: 1931320 - DNA, 25 bp, Homo sapien
tgacttcacctgaggcatcacagag

SEQ ID NO: 1931321 - DNA, 25 bp, Homo sapien
tctttcaagcaaatgcaatggctgg

SEQ ID NO: 1931322 - DNA, 25 bp, Homo sapien
gccagaagagggaccacctgtaaag

SEQ ID NO: 1931323 - DNA, 25 bp, Homo sapien
ttattattgaatgccaaacctgttc

SEQ ID NO: 1931324 - DNA, 25 bp, Homo sapien
catgttacaaaaagagcaactgcta

SEQ ID NO: 1931325 - DNA, 25 bp, Homo sapien
agatttactgaacgcttgatgccac

SEQ ID NO: 1931326 - DNA, 25 bp, Homo sapien
tactctagactcaaggacccagttc

SEQ ID NO: 1931327 - DNA, 25 bp, Homo sapien
tatgctgagtggagacttaccctgg

SEQ ID NO: 1931328 - DNA, 25 bp, Homo sapien
tattcaggtacaagcagcaatggga

SEQ ID NO: 1931329 - DNA, 25 bp, Homo sapien
tctgtattttggagttaatatctgt

SEQ ID NO: 1931330 - DNA, 25 bp, Homo sapien
gttctgtattttggagttaatatct

SEQ ID NO: 1931331 - DNA, 25 bp, Homo sapien
ttctgtattttggagttaatatctg

SEQ ID NO: 1931332 - DNA, 25 bp, Homo sapien
tataacaactgtcgccacacggtgg

SEQ ID NO: 1931333 - DNA, 25 bp, Homo sapien
gggctggacagaggtaatataacaa

SEQ ID NO: 1931334 - DNA, 25 bp, Homo sapien
cacacggtggcagcaatatcttctt

SEQ ID NO: 1931335 - DNA, 25 bp, Homo sapien
tgtgctcacctagcctagtgggtgc

SEQ ID NO: 1931336 - DNA, 25 bp, Homo sapien
aagattgctatggaacttggcagca

SEQ ID NO: 1931337 - DNA, 25 bp, Homo sapien
gattgctatggaacttggcagcaac

SEQ ID NO: 1931338 - DNA, 25 bp, Homo sapien
gaagattgctatggaacttggcagc

SEQ ID NO: 1931339 - DNA, 25 bp, Homo sapien
agattgctatggaacttggcagcaa

SEQ ID NO: 1931340 - DNA, 25 bp, Homo sapien
tgccactgttcctgtgggcccgggt

SEQ ID NO: 1931341 - DNA, 25 bp, Homo sapien
atgccactgttcctgtgggcccggg

SEQ ID NO: 1931342 - DNA, 25 bp, Homo sapien
catgccactgttcctgtgggcccgg

SEQ ID NO: 1931343 - DNA, 25 bp, Homo sapien
caggaatcattgtgttgctctttgc

SEQ ID NO: 1931344 - DNA, 25 bp, Homo sapien
tggaggctccgcttatagccagcaa

SEQ ID NO: 1931345 - DNA, 25 bp, Homo sapien
ttgctgccaggaatcattgtgttgc

SEQ ID NO: 1931346 - DNA, 25 bp, Homo sapien
tgtatgctccctttggttctggagg

SEQ ID NO: 1931347 - DNA, 25 bp, Homo sapien
cagccttccagacgtatttcctttt

SEQ ID NO: 1931348 - DNA, 25 bp, Homo sapien
ccacagccttccagacgtatttcct

SEQ ID NO: 1931349 - DNA, 25 bp, Homo sapien
ttttaagaagtcctgttcccagcag

SEQ ID NO: 1931350 - DNA, 25 bp, Homo sapien
cttttaagaagtcctgttcccagca

SEQ ID NO: 1931351 - DNA, 25 bp, Homo sapien
gagatactgctcttgattcaggatg

SEQ ID NO: 1931352 - DNA, 25 bp, Homo sapien
cagtggtgttacgaaacttgcaaag

SEQ ID NO: 1931353 - DNA, 25 bp, Homo sapien
ttcaggatgtgagttaatcaggcac

SEQ ID NO: 1931354 - DNA, 25 bp, Homo sapien
tttctggcaccccataaaataagtg

SEQ ID NO: 1931355 - DNA, 25 bp, Homo sapien
cagtgtaactacagctgcctgtctg

SEQ ID NO: 1931356 - DNA, 25 bp, Homo sapien
ggtaatcaaatcacctcaagggaca

SEQ ID NO: 1931357 - DNA, 25 bp, Homo sapien
tcatctttagccagcaaggtccaat

SEQ ID NO: 1931358 - DNA, 25 bp, Homo sapien
gcgtccggccgtgacgggtaatcaa

SEQ ID NO: 1931359 - DNA, 25 bp, Homo sapien
caagccagggtgtgatatcagagtc

SEQ ID NO: 1931360 - DNA, 25 bp, Homo sapien
gaagaccaccctgactagggcaagg

SEQ ID NO: 1931361 - DNA, 25 bp, Homo sapien
gttaagaatagatcccaggccgggc

SEQ ID NO: 1931362 - DNA, 25 bp, Homo sapien
tgacgcagtgcctaaccaaaagagt

SEQ ID NO: 1931363 - DNA, 25 bp, Homo sapien
gcttgttgctgcatgattgcgagat

SEQ ID NO: 1931364 - DNA, 25 bp, Homo sapien
cagcttctcgatgttatcagtcaac

SEQ ID NO: 1931365 - DNA, 25 bp, Homo sapien
cagtccaggattaatatagcagctt

SEQ ID NO: 1931366 - DNA, 25 bp, Homo sapien
gaagttcagagattggcagtccagg

SEQ ID NO: 1931367 - DNA, 25 bp, Homo sapien
tgtggagagaggcaagttgtggcac

SEQ ID NO: 1931368 - DNA, 25 bp, Homo sapien
ggtgtggagagaggcaagttgtggc

SEQ ID NO: 1931369 - DNA, 25 bp, Homo sapien
tggggtgtggagagaggcaagttgt

SEQ ID NO: 1931370 - DNA, 25 bp, Homo sapien
ttagcttcctgactggctctggggt

SEQ ID NO: 1931371 - DNA, 25 bp, Homo sapien
acaggcactcggcatgctgacaggt

SEQ ID NO: 1931372 - DNA, 25 bp, Homo sapien
cacaggcactcggcatgctgacagg

SEQ ID NO: 1931373 - DNA, 25 bp, Homo sapien
gatgctttcccactcgctcagcggg

SEQ ID NO: 1931374 - DNA, 25 bp, Homo sapien
agcgggcgccgctcactggaaactc

SEQ ID NO: 1931375 - DNA, 25 bp, Homo sapien
aaaggcacgcgcgatgctttcccac

SEQ ID NO: 1931376 - DNA, 25 bp, Homo sapien
ctccggattccgaacccgagagcag

SEQ ID NO: 1931377 - DNA, 25 bp, Homo sapien
caatgaacgcgctgaaatcccagag

SEQ ID NO: 1931378 - DNA, 25 bp, Homo sapien
tttaattcggaggcgttgccttcca

SEQ ID NO: 1931379 - DNA, 25 bp, Homo sapien
tgtgcattctcagatcagttctggg

SEQ ID NO: 1931380 - DNA, 25 bp, Homo sapien
gccaagtttgtgcattctcagatca

SEQ ID NO: 1931381 - DNA, 25 bp, Homo sapien
cctcttcgctgtacacaaagggcat

SEQ ID NO: 1931382 - DNA, 25 bp, Homo sapien
gctcctcttcgctgtacacaaaggg

SEQ ID NO: 1931383 - DNA, 25 bp, Homo sapien
ttggctcctcttcgctgtacacaaa

SEQ ID NO: 1931384 - DNA, 25 bp, Homo sapien
tcctcttcgctgtacacaaagggca

SEQ ID NO: 1931385 - DNA, 25 bp, Homo sapien
tgcccagcacaggtctaagtacctt

SEQ ID NO: 1931386 - DNA, 25 bp, Homo sapien
tagattccccttttacgaagccaga

SEQ ID NO: 1931387 - DNA, 25 bp, Homo sapien
ctttctggcagttagtaatgggacc

SEQ ID NO: 1931388 - DNA, 25 bp, Homo sapien
gatgacaaacacttagggagcactc

SEQ ID NO: 1931389 - DNA, 25 bp, Homo sapien
tgctatgtgcatatgggaagtaccc

SEQ ID NO: 1931390 - DNA, 25 bp, Homo sapien
gagtctttgaacgactgcctattcg

SEQ ID NO: 1931391 - DNA, 25 bp, Homo sapien
ttttgagagacaataagcccctact

SEQ ID NO: 1931392 - DNA, 25 bp, Homo sapien
gataatcacgaaaggtcatgacccc

SEQ ID NO: 1931393 - DNA, 25 bp, Homo sapien
tgcatgaaccaatcacacacgtgct

SEQ ID NO: 1931394 - DNA, 25 bp, Homo sapien
tctctgcatagaacaaccggccagc

SEQ ID NO: 1931395 - DNA, 25 bp, Homo sapien
gggtgactcacttgtttgcacagga

SEQ ID NO: 1931396 - DNA, 25 bp, Homo sapien
caggtactttatggctgggatcaaa

SEQ ID NO: 1931397 - DNA, 25 bp, Homo sapien
agttttccatctgcacatataaccc

SEQ ID NO: 1931398 - DNA, 25 bp, Homo sapien
ctcctcatagagtctagatagaaga

SEQ ID NO: 1931399 - DNA, 25 bp, Homo sapien
tctagatagaagaccctcctctccg

SEQ ID NO: 1931400 - DNA, 25 bp, Homo sapien
tgaatcctggtcgaagctggacagc

SEQ ID NO: 1931401 - DNA, 25 bp, Homo sapien
ggtcgtcgatggctcttcctccggc

SEQ ID NO: 1931402 - DNA, 25 bp, Homo sapien
cagtcgaccagggtcgtcgatggct

SEQ ID NO: 1931403 - DNA, 25 bp, Homo sapien
gggatcccagtcgaccagggtcgtc

SEQ ID NO: 1931404 - DNA, 25 bp, Homo sapien
agcctgccagtttggggatcccagt

SEQ ID NO: 1931405 - DNA, 25 bp, Homo sapien
ttgctgggtgagagaagtaccttcc

SEQ ID NO: 1931406 - DNA, 25 bp, Homo sapien
tcaggccccgcacaaatgtcagtgg

SEQ ID NO: 1931407 - DNA, 25 bp, Homo sapien
tcattaaggctggatacatcactgc

SEQ ID NO: 1931408 - DNA, 25 bp, Homo sapien
gagtactgtaacgtttgcgggccca

SEQ ID NO: 1931409 - DNA, 25 bp, Homo sapien
cagctgttaggtagaatatcttgtc

SEQ ID NO: 1931410 - DNA, 25 bp, Homo sapien
gattcgctgggtgggtatttctcca

SEQ ID NO: 1931411 - DNA, 25 bp, Homo sapien
cacaaaagatagttggaagcgagaa

SEQ ID NO: 1931412 - DNA, 25 bp, Homo sapien
tcttctaactggcagaggagttgct

SEQ ID NO: 1931413 - DNA, 25 bp, Homo sapien
tgaaattctagtcctcgactaggct

SEQ ID NO: 1931414 - DNA, 25 bp, Homo sapien
aattctagtcctcgactaggcttga

SEQ ID NO: 1931415 - DNA, 25 bp, Homo sapien
tttgaaattctagtcctcgactagg

SEQ ID NO: 1931416 - DNA, 25 bp, Homo sapien
ctagtcctcgactaggcttgaactt

SEQ ID NO: 1931417 - DNA, 25 bp, Homo sapien
gaaacacggtaatagatacgggcaa

SEQ ID NO: 1931418 - DNA, 25 bp, Homo sapien
ggtagatggaatagcccatcacaga

SEQ ID NO: 1931419 - DNA, 25 bp, Homo sapien
tgggtgtttctctttgccaacgtgg

SEQ ID NO: 1931420 - DNA, 25 bp, Homo sapien
tctttgccaacgtggatatatcggt

SEQ ID NO: 1931421 - DNA, 25 bp, Homo sapien
gaggtcgtcggcctctgtctctaga

SEQ ID NO: 1931422 - DNA, 25 bp, Homo sapien
catggctggtgatagagccaaggca

SEQ ID NO: 1931423 - DNA, 25 bp, Homo sapien
tactttcggacagtttcatcgtgaa

SEQ ID NO: 1931424 - DNA, 25 bp, Homo sapien
aagcaggggttatggattcctatcc

SEQ ID NO: 1931425 - DNA, 25 bp, Homo sapien
tgtggttggtcacacactgggacca

SEQ ID NO: 1931426 - DNA, 25 bp, Homo sapien
cgcagtaaagagtgttcggctccag

SEQ ID NO: 1931427 - DNA, 25 bp, Homo sapien
caccagcgtgtggttggtcacacac

SEQ ID NO: 1931428 - DNA, 25 bp, Homo sapien
cctgggacgaaggactccacgtgta

SEQ ID NO: 1931429 - DNA, 25 bp, Homo sapien
ggaactggaccaatgctgagaacaa

SEQ ID NO: 1931430 - DNA, 25 bp, Homo sapien
gcggcgtatcttttgaacatcatga

SEQ ID NO: 1931431 - DNA, 25 bp, Homo sapien
gaattgcaaacattggttagagcca

SEQ ID NO: 1931432 - DNA, 25 bp, Homo sapien
caatgcatcagggttgtttgttccc

SEQ ID NO: 1931433 - DNA, 25 bp, Homo sapien
aatgtatgccccattccatttcagg

SEQ ID NO: 1931434 - DNA, 25 bp, Homo sapien
ttagctacagagtggtacatgaatg

SEQ ID NO: 1931435 - DNA, 25 bp, Homo sapien
ggtacatgaatgtatgccccattcc

SEQ ID NO: 1931436 - DNA, 25 bp, Homo sapien
cagagtggtacatgaatgtatgccc

SEQ ID NO: 1931437 - DNA, 25 bp, Homo sapien
gtttgatttagtattcaacacagac

SEQ ID NO: 1931438 - DNA, 25 bp, Homo sapien
cagattggagtatatttgttgcatg

SEQ ID NO: 1931439 - DNA, 25 bp, Homo sapien
agacacgttatacttcagattggag

SEQ ID NO: 1931440 - DNA, 25 bp, Homo sapien
agtatatttgttgcatggaaacagg

SEQ ID NO: 1931441 - DNA, 25 bp, Homo sapien
ctgtagtcagtgccacctctggtgg

SEQ ID NO: 1931442 - DNA, 25 bp, Homo sapien
taatactggtgttcgtagtcagaag

SEQ ID NO: 1931443 - DNA, 25 bp, Homo sapien
gatagaaccgtccactttcagccca

SEQ ID NO: 1931444 - DNA, 25 bp, Homo sapien
aaggatagaaccgtccactttcagc

SEQ ID NO: 1931445 - DNA, 25 bp, Homo sapien
ccaaatggccttaactttggcataa

SEQ ID NO: 1931446 - DNA, 25 bp, Homo sapien
gatttattcagccatttcttttgcc

SEQ ID NO: 1931447 - DNA, 25 bp, Homo sapien
attcagccatttcttttgcccatat

SEQ ID NO: 1931448 - DNA, 25 bp, Homo sapien
gatatttctgcattctgatttattc

SEQ ID NO: 1931449 - DNA, 25 bp, Homo sapien
ctattgatatttctgcattctgatt

SEQ ID NO: 1931450 - DNA, 25 bp, Homo sapien
tgatgggttacaagtggcagcctag

SEQ ID NO: 1931451 - DNA, 25 bp, Homo sapien
catgtgataagccagtgaaagggac

SEQ ID NO: 1931452 - DNA, 25 bp, Homo sapien
gctgagaggacactacagtggtcca

SEQ ID NO: 1931453 - DNA, 25 bp, Homo sapien
gatgtaggtcgcttggacaaggaca

SEQ ID NO: 1931454 - DNA, 25 bp, Homo sapien
catgcacaggcatgtaagaactcca

SEQ ID NO: 1931455 - DNA, 25 bp, Homo sapien
ggaggcaaggacatgctcacgagcc

SEQ ID NO: 1931456 - DNA, 25 bp, Homo sapien
tcagggagattaagggatccactca

SEQ ID NO: 1931457 - DNA, 25 bp, Homo sapien
cagtaatgacactcacgcatggcaa

SEQ ID NO: 1931458 - DNA, 25 bp, Homo sapien
caaacacatttaataccacggagag

SEQ ID NO: 1931459 - DNA, 25 bp, Homo sapien
gagtttatctttacacaattcacaa

SEQ ID NO: 1931460 - DNA, 25 bp, Homo sapien
tttatctttacacaattcacaagag

SEQ ID NO: 1931461 - DNA, 25 bp, Homo sapien
taataccacggagagtttatcttta

SEQ ID NO: 1931462 - DNA, 25 bp, Homo sapien
actgcacagtgtaagtaactttaac

SEQ ID NO: 1931463 - DNA, 25 bp, Homo sapien
ctctggtggagtccattgtaggaca

SEQ ID NO: 1931464 - DNA, 25 bp, Homo sapien
actttaactccttgaagaccctctg

SEQ ID NO: 1931465 - DNA, 25 bp, Homo sapien
tgaaatactgcacagtgtaagtaac

SEQ ID NO: 1931466 - DNA, 25 bp, Homo sapien
tgatgtttgcaggtttaggcaaacc

SEQ ID NO: 1931467 - DNA, 25 bp, Homo sapien
ttaggcaaaccaccagagacacagg

SEQ ID NO: 1931468 - DNA, 25 bp, Homo sapien
gcaggtttaggcaaaccaccagaga

SEQ ID NO: 1931469 - DNA, 25 bp, Homo sapien
tttgcaggtttaggcaaaccaccag

SEQ ID NO: 1931470 - DNA, 25 bp, Homo sapien
aattgaggtcttagtagcagaaaag

SEQ ID NO: 1931471 - DNA, 25 bp, Homo sapien
attgaggtcttagtagcagaaaagg

SEQ ID NO: 1931472 - DNA, 25 bp, Homo sapien
gagaaaaaagctgcacaactgtcgt

SEQ ID NO: 1931473 - DNA, 25 bp, Homo sapien
tgagaaaaaagctgcacaactgtcg

SEQ ID NO: 1931474 - DNA, 25 bp, Homo sapien
ctgagaaaaaagctgcacaactgtc

SEQ ID NO: 1931475 - DNA, 25 bp, Homo sapien
attgttattatatgaataactgcca

SEQ ID NO: 1931476 - DNA, 25 bp, Homo sapien
ttgttattatatgaataactgccat

SEQ ID NO: 1931477 - DNA, 25 bp, Homo sapien
tgagattgacggcatgatctcaact

SEQ ID NO: 1931478 - DNA, 25 bp, Homo sapien
gaagtgttcggtagccatcaagaac

SEQ ID NO: 1931479 - DNA, 25 bp, Homo sapien
gatctcaactggaatctcagacttt

SEQ ID NO: 1931480 - DNA, 25 bp, Homo sapien
tcagactttccaatcacacaccagg

SEQ ID NO: 1931481 - DNA, 25 bp, Homo sapien
cagggtagtgagtatcctgtgatga

SEQ ID NO: 1931482 - DNA, 25 bp, Homo sapien
tgaaatctgcagtgacaggacatcc

SEQ ID NO: 1931483 - DNA, 25 bp, Homo sapien
tctgcagtgacaggacatcctgcct

SEQ ID NO: 1931484 - DNA, 25 bp, Homo sapien
cagcagacaggtcattacttggaag

SEQ ID NO: 1931485 - DNA, 25 bp, Homo sapien
tgtagccataagcttggatgttggg

SEQ ID NO: 1931486 - DNA, 25 bp, Homo sapien
ctgtagccataagcttggatgttgg

SEQ ID NO: 1931487 - DNA, 25 bp, Homo sapien
agataatccttcaattacgagcagg

SEQ ID NO: 1931488 - DNA, 25 bp, Homo sapien
gcagtccttagaccttagcccaaag

SEQ ID NO: 1931489 - DNA, 25 bp, Homo sapien
tacgagcaggtagtatccaggtaac

SEQ ID NO: 1931490 - DNA, 25 bp, Homo sapien
taagcccacgttgtacagaagacat

SEQ ID NO: 1931491 - DNA, 25 bp, Homo sapien
ttcttcctgcattcactcttactgt

SEQ ID NO: 1931492 - DNA, 25 bp, Homo sapien
attcactcttactgttcagttctgg

SEQ ID NO: 1931493 - DNA, 25 bp, Homo sapien
agacagcggggcctgaacgaagtgt

SEQ ID NO: 1931494 - DNA, 25 bp, Homo sapien
cagttctgggttaaaagacagcggg

SEQ ID NO: 1931495 - DNA, 25 bp, Homo sapien
gagtttggcttttaaagcgcggatc

SEQ ID NO: 1931496 - DNA, 25 bp, Homo sapien
gacgcgcggcttgcaggactgcggg

SEQ ID NO: 1931497 - DNA, 25 bp, Homo sapien
cggcggccgagacgcggcatccaca

SEQ ID NO: 1931498 - DNA, 25 bp, Homo sapien
tttaaagcgcggatctcgcgacgcg

SEQ ID NO: 1931499 - DNA, 25 bp, Homo sapien
accgtccccgaccgcaagtcatagg

SEQ ID NO: 1931500 - DNA, 25 bp, Homo sapien
aaccgtccccgaccgcaagtcatag

SEQ ID NO: 1931501 - DNA, 25 bp, Homo sapien
taaccgtccccgaccgcaagtcata

SEQ ID NO: 1931502 - DNA, 25 bp, Homo sapien
ctgcccgtccccaaggcgccgccag

SEQ ID NO: 1931503 - DNA, 25 bp, Homo sapien
caggccggtctgatggtcagttaaa

SEQ ID NO: 1931504 - DNA, 25 bp, Homo sapien
gcggatttatagtccccagccactc

SEQ ID NO: 1931505 - DNA, 25 bp, Homo sapien
caaagagattctggtattcaggccg

SEQ ID NO: 1931506 - DNA, 25 bp, Homo sapien
gggttcatgcccagaccaaccaggt

SEQ ID NO: 1931507 - DNA, 25 bp, Homo sapien
aacacattgtgcagcagtatgaaaa

SEQ ID NO: 1931508 - DNA, 25 bp, Homo sapien
gcgtgaaccacgacacccgacctaa

SEQ ID NO: 1931509 - DNA, 25 bp, Homo sapien
gcacagggtcaggattgtcagtgcc

SEQ ID NO: 1931510 - DNA, 25 bp, Homo sapien
tataatcgtatgagaccacctttgt

SEQ ID NO: 1931511 - DNA, 25 bp, Homo sapien
cttcccttatctcctaagtcttctg

SEQ ID NO: 1931512 - DNA, 25 bp, Homo sapien
ttcccttatctcctaagtcttctga

SEQ ID NO: 1931513 - DNA, 25 bp, Homo sapien
tcccttatctcctaagtcttctgaa

SEQ ID NO: 1931514 - DNA, 25 bp, Homo sapien
cctccagctggaaagtgggaacggg

SEQ ID NO: 1931515 - DNA, 25 bp, Homo sapien
gatggagtaactgcgacttggagtt

SEQ ID NO: 1931516 - DNA, 25 bp, Homo sapien
cccatgagtgggctgtcaattgtct

SEQ ID NO: 1931517 - DNA, 25 bp, Homo sapien
aattgtctgagaacaaacagttttc

SEQ ID NO: 1931518 - DNA, 25 bp, Homo sapien
cattccagtcgctgaacagtttgac

SEQ ID NO: 1931519 - DNA, 25 bp, Homo sapien
tccagtcgctgaacagtttgacaat

SEQ ID NO: 1931520 - DNA, 25 bp, Homo sapien
tcattccagtcgctgaacagtttga

SEQ ID NO: 1931521 - DNA, 25 bp, Homo sapien
gtctcattccagtcgctgaacagtt

SEQ ID NO: 1931522 - DNA, 25 bp, Homo sapien
ctttttggagcaccctgtttattgc

SEQ ID NO: 1931523 - DNA, 25 bp, Homo sapien
gtcaaaggaggcatgggcacccatt

SEQ ID NO: 1931524 - DNA, 25 bp, Homo sapien
catatcagtatgactacccggaatc

SEQ ID NO: 1931525 - DNA, 25 bp, Homo sapien
ggtatgttgctcaatatcatatcag

SEQ ID NO: 1931526 - DNA, 25 bp, Homo sapien
ttcgactctttgacccctggctgct

SEQ ID NO: 1931527 - DNA, 25 bp, Homo sapien
tctgaagatgggtgagggacagggc

SEQ ID NO: 1931528 - DNA, 25 bp, Homo sapien
tgtccctcgccgcaatggaagtcaa

SEQ ID NO: 1931529 - DNA, 25 bp, Homo sapien
tgtgcttctggatgcccagtatcct

SEQ ID NO: 1931530 - DNA, 25 bp, Homo sapien
cctggccttgggaatgaagtggtca

SEQ ID NO: 1931531 - DNA, 25 bp, Homo sapien
tctcctcataaatgtctgatgaaaa

SEQ ID NO: 1931532 - DNA, 25 bp, Homo sapien
gaagtggtcagagaaaatgatctcc

SEQ ID NO: 1931533 - DNA, 25 bp, Homo sapien
gtctgatgaaaatcggcttgccacc

SEQ ID NO: 1931534 - DNA, 25 bp, Homo sapien
tcttttctgcacgtggatattcagg

SEQ ID NO: 1931535 - DNA, 25 bp, Homo sapien
tggatattcaggctgacctatttcc

SEQ ID NO: 1931536 - DNA, 25 bp, Homo sapien
gcacgtggatattcaggctgaccta

SEQ ID NO: 1931537 - DNA, 25 bp, Homo sapien
gccactgaccactctcaatgttctt

SEQ ID NO: 1931538 - DNA, 25 bp, Homo sapien
cctgtttgaatcgtaggtaccttga

SEQ ID NO: 1931539 - DNA, 25 bp, Homo sapien
ctgtttgaatcgtaggtaccttgaa

SEQ ID NO: 1931540 - DNA, 25 bp, Homo sapien
tcctgtttgaatcgtaggtaccttg

SEQ ID NO: 1931541 - DNA, 25 bp, Homo sapien
tgtttgaatcgtaggtaccttgaag

SEQ ID NO: 1931542 - DNA, 25 bp, Homo sapien
tgttttctgagcatacagggaagca

SEQ ID NO: 1931543 - DNA, 25 bp, Homo sapien
gagtattttgcacttgcctaagcac

SEQ ID NO: 1931544 - DNA, 25 bp, Homo sapien
gctctatagtctctgtaggcaccta

SEQ ID NO: 1931545 - DNA, 25 bp, Homo sapien
cacactgagccttaggtcaccagat

SEQ ID NO: 1931546 - DNA, 25 bp, Homo sapien
gggtcgaccccagcagttcccaata

SEQ ID NO: 1931547 - DNA, 25 bp, Homo sapien
gagttctctgtatggggtcgacccc

SEQ ID NO: 1931548 - DNA, 25 bp, Homo sapien
caataaaccatcattcatgggatcc

SEQ ID NO: 1931549 - DNA, 25 bp, Homo sapien
gcttcaagctgagttctctgtatgg

SEQ ID NO: 1931550 - DNA, 25 bp, Homo sapien
gaaggattgagtaatgaggtttcct

SEQ ID NO: 1931551 - DNA, 25 bp, Homo sapien
tcttttaaatgagggacaattgtac

SEQ ID NO: 1931552 - DNA, 25 bp, Homo sapien
ctcttggccagaaggattgagtaat

SEQ ID NO: 1931553 - DNA, 25 bp, Homo sapien
aggaaggcgccacaagcaagacact

SEQ ID NO: 1931554 - DNA, 25 bp, Homo sapien
cctgttcttatttacataaagtaga

SEQ ID NO: 1931555 - DNA, 25 bp, Homo sapien
accattgcttcaggaccgcctcagt

SEQ ID NO: 1931556 - DNA, 25 bp, Homo sapien
agttttaattcagatatcaatccag

SEQ ID NO: 1931557 - DNA, 25 bp, Homo sapien
cgcctcagtctgtaatgctatttta

SEQ ID NO: 1931558 - DNA, 25 bp, Homo sapien
gggagctttagaatttccacattgc

SEQ ID NO: 1931559 - DNA, 25 bp, Homo sapien
gatccttcaaacacgagtcatcctg

SEQ ID NO: 1931560 - DNA, 25 bp, Homo sapien
cacattgctgaatgccaaattccac

SEQ ID NO: 1931561 - DNA, 25 bp, Homo sapien
gaagtccccaaggtgtaacagtgaa

SEQ ID NO: 1931562 - DNA, 25 bp, Homo sapien
ctggagtgtggtgttagagcttcaa

SEQ ID NO: 1931563 - DNA, 25 bp, Homo sapien
tgttagagcttcaatttcaaccgct

SEQ ID NO: 1931564 - DNA, 25 bp, Homo sapien
tcagccactacacagtagctggagt

SEQ ID NO: 1931565 - DNA, 25 bp, Homo sapien
tctgacttcttctgtctaacatggg

SEQ ID NO: 1931566 - DNA, 25 bp, Homo sapien
ccttttggtatctatatggtaaatt

SEQ ID NO: 1931567 - DNA, 25 bp, Homo sapien
gagccattgacttgggttatattca

SEQ ID NO: 1931568 - DNA, 25 bp, Homo sapien
ctcggtatagtagttcatagtaatc

SEQ ID NO: 1931569 - DNA, 25 bp, Homo sapien
gagaattaccaacaaagagccattg

SEQ ID NO: 1931570 - DNA, 25 bp, Homo sapien
aacatgctgtcttgaggaactagaa

SEQ ID NO: 1931571 - DNA, 25 bp, Homo sapien
cttgaggaactagaaacgtgctttt

SEQ ID NO: 1931572 - DNA, 25 bp, Homo sapien
tgctgtcttgaggaactagaaacgt

SEQ ID NO: 1931573 - DNA, 25 bp, Homo sapien
tgtcttgaggaactagaaacgtgct

SEQ ID NO: 1931574 - DNA, 25 bp, Homo sapien
caaagttggtctgacctgcagagtg

SEQ ID NO: 1931575 - DNA, 25 bp, Homo sapien
agtaaggaagatcaatgttgaaccc

SEQ ID NO: 1931576 - DNA, 25 bp, Homo sapien
gagtgtccaactttccagtaaggaa

SEQ ID NO: 1931577 - DNA, 25 bp, Homo sapien
tggtctgacctgcagagtgtccaac

SEQ ID NO: 1931578 - DNA, 25 bp, Homo sapien
caccagggagtgaaccgcggcgtca

SEQ ID NO: 1931579 - DNA, 25 bp, Homo sapien
ggcgtcatgctccattctgagtagc

SEQ ID NO: 1931580 - DNA, 25 bp, Homo sapien
gtgaaccgcggcgtcatgctccatt

SEQ ID NO: 1931581 - DNA, 25 bp, Homo sapien
ccgcggcgtcatgctccattctgag

SEQ ID NO: 1931582 - DNA, 25 bp, Homo sapien
ctgaggtttcactggtaaggtcaca

SEQ ID NO: 1931583 - DNA, 25 bp, Homo sapien
aagagagttcttgagtaccccaaca

SEQ ID NO: 1931584 - DNA, 25 bp, Homo sapien
cctcccgtaataaggttcctgtatg

SEQ ID NO: 1931585 - DNA, 25 bp, Homo sapien
aataaggttcctgtatgtctgaggt

SEQ ID NO: 1931586 - DNA, 25 bp, Homo sapien
ttagccaatgttctgcagcctggga

SEQ ID NO: 1931587 - DNA, 25 bp, Homo sapien
ttctggtgagagcttttcatgctgc

SEQ ID NO: 1931588 - DNA, 25 bp, Homo sapien
gtgctgccagcatccacttggcttc

SEQ ID NO: 1931589 - DNA, 25 bp, Homo sapien
gcctgggaagttacaagaaatgtgc

SEQ ID NO: 1931590 - DNA, 25 bp, Homo sapien
ggcttcagagactcatgcgttgact

SEQ ID NO: 1931591 - DNA, 25 bp, Homo sapien
gactgaaattgtaccctctgaggct

SEQ ID NO: 1931592 - DNA, 25 bp, Homo sapien
aaatgttgtgaaaatttcgggactg

SEQ ID NO: 1931593 - DNA, 25 bp, Homo sapien
ttcgggactgaaattgtaccctctg

SEQ ID NO: 1931594 - DNA, 25 bp, Homo sapien
gtgacatcaaaagctgcagccttta

SEQ ID NO: 1931595 - DNA, 25 bp, Homo sapien
gccatttccaacagatccttgattg

SEQ ID NO: 1931596 - DNA, 25 bp, Homo sapien
agatccttgattggactcagatgac

SEQ ID NO: 1931597 - DNA, 25 bp, Homo sapien
catttagtgacatcaaaagctgcag

SEQ ID NO: 1931598 - DNA, 25 bp, Homo sapien
caccagtaaggaagaaactgatgag

SEQ ID NO: 1931599 - DNA, 25 bp, Homo sapien
ctgctacaccagtaaggaagaaact

SEQ ID NO: 1931600 - DNA, 25 bp, Homo sapien
cagtaaggaagaaactgatgaggaa

SEQ ID NO: 1931601 - DNA, 25 bp, Homo sapien
tacaccagtaaggaagaaactgatg

SEQ ID NO: 1931602 - DNA, 25 bp, Homo sapien
caaccagtgttccttttaaccagct

SEQ ID NO: 1931603 - DNA, 25 bp, Homo sapien
tgttcaggcaaccagtgttcctttt

SEQ ID NO: 1931604 - DNA, 25 bp, Homo sapien
tgactgttcaggcaaccagtgttcc

SEQ ID NO: 1931605 - DNA, 25 bp, Homo sapien
tcaggcaaccagtgttccttttaac

SEQ ID NO: 1931606 - DNA, 25 bp, Homo sapien
attgatgttcaatggcttcaatacc

SEQ ID NO: 1931607 - DNA, 25 bp, Homo sapien
aatagatctcattttgaagccacca

SEQ ID NO: 1931608 - DNA, 25 bp, Homo sapien
atagatctcattttgaagccaccaa

SEQ ID NO: 1931609 - DNA, 25 bp, Homo sapien
tgttcaatggcttcaataccaatag

SEQ ID NO: 1931610 - DNA, 25 bp, Homo sapien
ctccgcagcagggagagtccacctt

SEQ ID NO: 1931611 - DNA, 25 bp, Homo sapien
caccttgacggtgacaacgggtatt

SEQ ID NO: 1931612 - DNA, 25 bp, Homo sapien
cggtgacaacgggtatttccatcat

SEQ ID NO: 1931613 - DNA, 25 bp, Homo sapien
cagggagagtccaccttgacggtga

SEQ ID NO: 1931614 - DNA, 25 bp, Homo sapien
cttatgaagtctaggagattggtat

SEQ ID NO: 1931615 - DNA, 25 bp, Homo sapien
gagagaacttgaccagggctctata

SEQ ID NO: 1931616 - DNA, 25 bp, Homo sapien
tgtctttgttaatcctcttatgaag

SEQ ID NO: 1931617 - DNA, 25 bp, Homo sapien
gatctaataattatgggacgccatg

SEQ ID NO: 1931618 - DNA, 25 bp, Homo sapien
cctggaaaggtgcacaggaacagac

SEQ ID NO: 1931619 - DNA, 25 bp, Homo sapien
tagttgatcaaatcctatgggagaa

SEQ ID NO: 1931620 - DNA, 25 bp, Homo sapien
tagagccctggcacaagattgctct

SEQ ID NO: 1931621 - DNA, 25 bp, Homo sapien
tgccttccctatcggaaactagctg

SEQ ID NO: 1931622 - DNA, 25 bp, Homo sapien
gggcatcacctgctcacctaggaac

SEQ ID NO: 1931623 - DNA, 25 bp, Homo sapien
tacactaagtcactccatttggttg

SEQ ID NO: 1931624 - DNA, 25 bp, Homo sapien
tgaagtggctacaaaggtccctggg

SEQ ID NO: 1931625 - DNA, 25 bp, Homo sapien
aacatatgctataccaaggcagaga

SEQ ID NO: 1931626 - DNA, 25 bp, Homo sapien
ttctgttggtctataaccaatcaag

SEQ ID NO: 1931627 - DNA, 25 bp, Homo sapien
atcttctgttggtctataaccaatc

SEQ ID NO: 1931628 - DNA, 25 bp, Homo sapien
gttggtctataaccaatcaaggact

SEQ ID NO: 1931629 - DNA, 25 bp, Homo sapien
tgttggtctataaccaatcaaggac

SEQ ID NO: 1931630 - DNA, 25 bp, Homo sapien
ttacggttatgagctcttgtccttc

SEQ ID NO: 1931631 - DNA, 25 bp, Homo sapien
cgctatcatccacaagtagatccac

SEQ ID NO: 1931632 - DNA, 25 bp, Homo sapien
gcacatgtggtttatcataaccaaa

SEQ ID NO: 1931633 - DNA, 25 bp, Homo sapien
caagtagatccactagcacatgtgg

SEQ ID NO: 1931634 - DNA, 25 bp, Homo sapien
gatacgagtttaaagcgatgctgcc

SEQ ID NO: 1931635 - DNA, 25 bp, Homo sapien
cgggaccacgtcaggaatattttct

SEQ ID NO: 1931636 - DNA, 25 bp, Homo sapien
tgttgctggagacaacggctcttca

SEQ ID NO: 1931637 - DNA, 25 bp, Homo sapien
gattgtcttcggtatgcatgcctgg

SEQ ID NO: 1931638 - DNA, 25 bp, Homo sapien
caggttttgtctctaaagtagcact

SEQ ID NO: 1931639 - DNA, 25 bp, Homo sapien
tatgacgtgatgagtgatacatatt

SEQ ID NO: 1931640 - DNA, 25 bp, Homo sapien
aaaatggctggtatgacgtgatgag

SEQ ID NO: 1931641 - DNA, 25 bp, Homo sapien
aagtagcacttcttaccacagagat

SEQ ID NO: 1931642 - DNA, 25 bp, Homo sapien
tgttaagcttaagtgcctaccctca

SEQ ID NO: 1931643 - DNA, 25 bp, Homo sapien
tggaccaccaaatggcacatttagg

SEQ ID NO: 1931644 - DNA, 25 bp, Homo sapien
gataatgggtgaatcagatgttgcc

SEQ ID NO: 1931645 - DNA, 25 bp, Homo sapien
caaaggtctgaagtaatggaccacc

SEQ ID NO: 1931646 - DNA, 25 bp, Homo sapien
gtcaaactcctacgttagtctcatt

SEQ ID NO: 1931647 - DNA, 25 bp, Homo sapien
tgttggacattaaaatcgtcaaact

SEQ ID NO: 1931648 - DNA, 25 bp, Homo sapien
tcatactccaaccataatgaagtgt

SEQ ID NO: 1931649 - DNA, 25 bp, Homo sapien
gactcaaatagatactattctgtta

SEQ ID NO: 1931650 - DNA, 25 bp, Homo sapien
aagagtagtaaagcagcaacaactg

SEQ ID NO: 1931651 - DNA, 25 bp, Homo sapien
atgaataccaggctaagcactagaa

SEQ ID NO: 1931652 - DNA, 25 bp, Homo sapien
ggctaagcactagaaagagtagtaa

SEQ ID NO: 1931653 - DNA, 25 bp, Homo sapien
caaggacttgggtaatattatgctt

SEQ ID NO: 1931654 - DNA, 25 bp, Homo sapien
accgtgtggccatactatcagtgca

SEQ ID NO: 1931655 - DNA, 25 bp, Homo sapien
gatagcaatatggttcttcccagct

SEQ ID NO: 1931656 - DNA, 25 bp, Homo sapien
acaatgtccggcatcctttagggca

SEQ ID NO: 1931657 - DNA, 25 bp, Homo sapien
tgttagaagtcccacgggctgagca

SEQ ID NO: 1931658 - DNA, 25 bp, Homo sapien
agttactgctccctctatatttaga

SEQ ID NO: 1931659 - DNA, 25 bp, Homo sapien
ctgcaaatgagtttgctttcctcac

SEQ ID NO: 1931660 - DNA, 25 bp, Homo sapien
ccaaattagttgttctatatcttta

SEQ ID NO: 1931661 - DNA, 25 bp, Homo sapien
ctctaaggaatggaactaatgcaaa

SEQ ID NO: 1931662 - DNA, 25 bp, Homo sapien
tactgagaattcagtgaggatactg

SEQ ID NO: 1931663 - DNA, 25 bp, Homo sapien
tggcactgaatctcgtcacaatcat

SEQ ID NO: 1931664 - DNA, 25 bp, Homo sapien
tgtaacaccccacacatgtaagact

SEQ ID NO: 1931665 - DNA, 25 bp, Homo sapien
tactggaatcgctaactggcactga

SEQ ID NO: 1931666 - DNA, 25 bp, Homo sapien
ctatgatctgtgagtcttgcttgaa

SEQ ID NO: 1931667 - DNA, 25 bp, Homo sapien
tactttacgtcaccgccaatgagga

SEQ ID NO: 1931668 - DNA, 25 bp, Homo sapien
gaacaacttttgctagctacacaag

SEQ ID NO: 1931669 - DNA, 25 bp, Homo sapien
caatggaggtgtactgggaaaaatc

SEQ ID NO: 1931670 - DNA, 25 bp, Homo sapien
tgtaacaggtagtttcgggatcata

SEQ ID NO: 1931671 - DNA, 25 bp, Homo sapien
gggatcataatcgacttcctgctcg

SEQ ID NO: 1931672 - DNA, 25 bp, Homo sapien
cattgtacaccctaatgtaacaggt

SEQ ID NO: 1931673 - DNA, 25 bp, Homo sapien
tctgatatccagtttaggtggtcca

SEQ ID NO: 1931674 - DNA, 25 bp, Homo sapien
ttcttctgactttgcataggcagat

SEQ ID NO: 1931675 - DNA, 25 bp, Homo sapien
atctcggcatacagcaaattcttct

SEQ ID NO: 1931676 - DNA, 25 bp, Homo sapien
catctcggcatacagcaaattcttc

SEQ ID NO: 1931677 - DNA, 25 bp, Homo sapien
gcaggcatcaatccattctgaattc

SEQ ID NO: 1931678 - DNA, 25 bp, Homo sapien
ttgatgcaggcatcaatccattctg

SEQ ID NO: 1931679 - DNA, 25 bp, Homo sapien
gagaatttgatggatcaccaacatg

SEQ ID NO: 1931680 - DNA, 25 bp, Homo sapien
ccaaagagaatttgatggatcacca

SEQ ID NO: 1931681 - DNA, 25 bp, Homo sapien
ttatttgtcatgctaatctcagaag

SEQ ID NO: 1931682 - DNA, 25 bp, Homo sapien
ttttggacctctataagcagtttag

SEQ ID NO: 1931683 - DNA, 25 bp, Homo sapien
tttagaatgttttgccacgtgggaa

SEQ ID NO: 1931684 - DNA, 25 bp, Homo sapien
gaaagaacacagttgtggaatttcc

SEQ ID NO: 1931685 - DNA, 25 bp, Homo sapien
gacctgtggcatgatctggtactcc

SEQ ID NO: 1931686 - DNA, 25 bp, Homo sapien
ctggtactcccaatatacgataggg

SEQ ID NO: 1931687 - DNA, 25 bp, Homo sapien
aattgtaacattagttggtgtaggc

SEQ ID NO: 1931688 - DNA, 25 bp, Homo sapien
tacgatagggttcatgttataggat

SEQ ID NO: 1931689 - DNA, 25 bp, Homo sapien
tttaaattggaattggagaagacta

SEQ ID NO: 1931690 - DNA, 25 bp, Homo sapien
atttaaattggaattggagaagact

SEQ ID NO: 1931691 - DNA, 25 bp, Homo sapien
ctgcttcaggtaatgtttcctgatt

SEQ ID NO: 1931692 - DNA, 25 bp, Homo sapien
tcaggtaatgtttcctgattttatt

SEQ ID NO: 1931693 - DNA, 25 bp, Homo sapien
cattatcacaattatattatggcca

SEQ ID NO: 1931694 - DNA, 25 bp, Homo sapien
ggtaatgtttcctgattttattaca

SEQ ID NO: 1931695 - DNA, 25 bp, Homo sapien
tcagtctctgcacctctggttccaa

SEQ ID NO: 1931696 - DNA, 25 bp, Homo sapien
agtctctgcacctctggttccaaca

SEQ ID NO: 1931697 - DNA, 25 bp, Homo sapien
ctctgcacctctggttccaacactg

SEQ ID NO: 1931698 - DNA, 25 bp, Homo sapien
tctctgcacctctggttccaacact

SEQ ID NO: 1931699 - DNA, 25 bp, Homo sapien
tgcgtcacttaacgatggagatccg

SEQ ID NO: 1931700 - DNA, 25 bp, Homo sapien
tataatctttgagaccacgctgtcc

SEQ ID NO: 1931701 - DNA, 25 bp, Homo sapien
ccttaggcaatttcttcgggcagta

SEQ ID NO: 1931702 - DNA, 25 bp, Homo sapien
caggcaaccgtagcatactagtgag

SEQ ID NO: 1931703 - DNA, 25 bp, Homo sapien
ctgaggacggccccagatccgcggt

SEQ ID NO: 1931704 - DNA, 25 bp, Homo sapien
ccctgcatgacaaggggtaggagaa

SEQ ID NO: 1931705 - DNA, 25 bp, Homo sapien
cagatccgcggtgcccatctcagcc

SEQ ID NO: 1931706 - DNA, 25 bp, Homo sapien
cacaccctgcatgacaaggggtagg

SEQ ID NO: 1931707 - DNA, 25 bp, Homo sapien
accggggtctgtgccggcgtcggca

SEQ ID NO: 1931708 - DNA, 25 bp, Homo sapien
tccagccccggccttacgtcacttc

SEQ ID NO: 1931709 - DNA, 25 bp, Homo sapien
tcacttccgtcaccggggtctgtgc

SEQ ID NO: 1931710 - DNA, 25 bp, Homo sapien
tgctaccgacggtcgctggctccaa

SEQ ID NO: 1931711 - DNA, 25 bp, Homo sapien
tgaccttgaatcctgcctgcaattg

SEQ ID NO: 1931712 - DNA, 25 bp, Homo sapien
tgaagtgtggcagagcgacccattc

SEQ ID NO: 1931713 - DNA, 25 bp, Homo sapien
gccttacacaggtgctgagccatat

SEQ ID NO: 1931714 - DNA, 25 bp, Homo sapien
tgagactcagggacatagaaacaga

SEQ ID NO: 1931715 - DNA, 25 bp, Homo sapien
ccccactgaggttcatcacttttct

SEQ ID NO: 1931716 - DNA, 25 bp, Homo sapien
tccacctgcgagaaagggctataaa

SEQ ID NO: 1931717 - DNA, 25 bp, Homo sapien
cacctgcgagaaagggctataaaag

SEQ ID NO: 1931718 - DNA, 25 bp, Homo sapien
acaaaccccactgaggttcatcact

SEQ ID NO: 1931719 - DNA, 25 bp, Homo sapien
tatgtcctgatccatcatccacttt

SEQ ID NO: 1931720 - DNA, 25 bp, Homo sapien
tgccatagatcctggctggtgatga

SEQ ID NO: 1931721 - DNA, 25 bp, Homo sapien
tcttctgctccaaccctgggataca

SEQ ID NO: 1931722 - DNA, 25 bp, Homo sapien
gcctctgacaagtgccatagatcct

SEQ ID NO: 1931723 - DNA, 25 bp, Homo sapien
aatgcagagaggacatagcgagaac

SEQ ID NO: 1931724 - DNA, 25 bp, Homo sapien
gcagagtctttgagtgggcctgaag

SEQ ID NO: 1931725 - DNA, 25 bp, Homo sapien
ggcctgaagctggcacccgagagcc

SEQ ID NO: 1931726 - DNA, 25 bp, Homo sapien
tgtgcccgaggcagagtgtgtgaat

SEQ ID NO: 1931727 - DNA, 25 bp, Homo sapien
ctgcagtgaggagtttcagacttgt

SEQ ID NO: 1931728 - DNA, 25 bp, Homo sapien
tgcagtgaggagtttcagacttgtc

SEQ ID NO: 1931729 - DNA, 25 bp, Homo sapien
tcagtgagagggagcaaccagatta

SEQ ID NO: 1931730 - DNA, 25 bp, Homo sapien
cagatggtggagacaagcgagattc

SEQ ID NO: 1931731 - DNA, 25 bp, Homo sapien
gagattccgaaggtgctgcaatgac

SEQ ID NO: 1931732 - DNA, 25 bp, Homo sapien
gactaggaacccagcgtagtgttca

SEQ ID NO: 1931733 - DNA, 25 bp, Homo sapien
taatataatctttgacgtgggcaag

SEQ ID NO: 1931734 - DNA, 25 bp, Homo sapien
tgagcttttggtcttgccaactgtg

SEQ ID NO: 1931735 - DNA, 25 bp, Homo sapien
aagagcttactgaagttattgttcc

SEQ ID NO: 1931736 - DNA, 25 bp, Homo sapien
ttgctctctgtagtccatctttgta

SEQ ID NO: 1931737 - DNA, 25 bp, Homo sapien
catgaagacatttccactggatgga

SEQ ID NO: 1931738 - DNA, 25 bp, Homo sapien
gtcttccccacgaagactgctaata

SEQ ID NO: 1931739 - DNA, 25 bp, Homo sapien
tgctaataccggtgagggtggtaac

SEQ ID NO: 1931740 - DNA, 25 bp, Homo sapien
actgaagtcatgaagacatttccac

SEQ ID NO: 1931741 - DNA, 25 bp, Homo sapien
aagcagccatcgctgacccacggag

SEQ ID NO: 1931742 - DNA, 25 bp, Homo sapien
ctgacccacggagaaagggctgtga

SEQ ID NO: 1931743 - DNA, 25 bp, Homo sapien
gaaccagcccgcctgaagcagccat

SEQ ID NO: 1931744 - DNA, 25 bp, Homo sapien
gttaatactagaaactatggaggag

SEQ ID NO: 1931745 - DNA, 25 bp, Homo sapien
tatgacagggtttctgcttttaagg

SEQ ID NO: 1931746 - DNA, 25 bp, Homo sapien
tctggaacagcatgtggagcacaca

SEQ ID NO: 1931747 - DNA, 25 bp, Homo sapien
ctgcttttaaggagtttgtaagcat

SEQ ID NO: 1931748 - DNA, 25 bp, Homo sapien
gaacagcatgtggagcacacattca

SEQ ID NO: 1931749 - DNA, 25 bp, Homo sapien
gtggctgatccaccagcaccataat

SEQ ID NO: 1931750 - DNA, 25 bp, Homo sapien
caccagcaccataatcacataaagt

SEQ ID NO: 1931751 - DNA, 25 bp, Homo sapien
ccaggaggtggctgatccaccagca

SEQ ID NO: 1931752 - DNA, 25 bp, Homo sapien
gatccaccagcaccataatcacata

SEQ ID NO: 1931753 - DNA, 25 bp, Homo sapien
caggcttctaagtgttttcaaacac

SEQ ID NO: 1931754 - DNA, 25 bp, Homo sapien
aggcttctaagtgttttcaaacaca

SEQ ID NO: 1931755 - DNA, 25 bp, Homo sapien
gcttctaagtgttttcaaacacatc

SEQ ID NO: 1931756 - DNA, 25 bp, Homo sapien
ttctaagtgttttcaaacacatcat

SEQ ID NO: 1931757 - DNA, 25 bp, Homo sapien
gttttacagaacatcggcgattgtc

SEQ ID NO: 1931758 - DNA, 25 bp, Homo sapien
gcccatcaggtcaaccgttgtttta

SEQ ID NO: 1931759 - DNA, 25 bp, Homo sapien
gtttgagaacctgacgaacagcttg

SEQ ID NO: 1931760 - DNA, 25 bp, Homo sapien
tgtggcacccacagcgagtggctct

SEQ ID NO: 1931761 - DNA, 25 bp, Homo sapien
tgccatgcctgttactgcagtgctt

SEQ ID NO: 1931762 - DNA, 25 bp, Homo sapien
ggtgaataagggtcaatgtggacaa

SEQ ID NO: 1931763 - DNA, 25 bp, Homo sapien
gaacacagactgattgagcaaaaac

SEQ ID NO: 1931764 - DNA, 25 bp, Homo sapien
caaaaacaaggaattctgccatgcc

SEQ ID NO: 1931765 - DNA, 25 bp, Homo sapien
aatgtaactgtcagtctcaacaaca

SEQ ID NO: 1931766 - DNA, 25 bp, Homo sapien
tattcagtaacacaatgtaactgtc

SEQ ID NO: 1931767 - DNA, 25 bp, Homo sapien
taacacaatgtaactgtcagtctca

SEQ ID NO: 1931768 - DNA, 25 bp, Homo sapien
cagtaacacaatgtaactgtcagtc

SEQ ID NO: 1931769 - DNA, 25 bp, Homo sapien
gagcactcttaaggggactctgcaa

SEQ ID NO: 1931770 - DNA, 25 bp, Homo sapien
aaaaaagaatcaggctttgctcctc

SEQ ID NO: 1931771 - DNA, 25 bp, Homo sapien
taaaaaagaatcaggctttgctcct

SEQ ID NO: 1931772 - DNA, 25 bp, Homo sapien
actcttaaggggactctgcaaagaa

SEQ ID NO: 1931773 - DNA, 25 bp, Homo sapien
tcaaatgcaaatgttcctccctctg

SEQ ID NO: 1931774 - DNA, 25 bp, Homo sapien
tttttatcagcagaagtcaaatgca

SEQ ID NO: 1931775 - DNA, 25 bp, Homo sapien
agtcaaatgcaaatgttcctccctc

SEQ ID NO: 1931776 - DNA, 25 bp, Homo sapien
agaagtcaaatgcaaatgttcctcc

SEQ ID NO: 1931777 - DNA, 25 bp, Homo sapien
gatggacacccagagatggcattgt

SEQ ID NO: 1931778 - DNA, 25 bp, Homo sapien
caagatgggaagagttgtgcattca

SEQ ID NO: 1931779 - DNA, 25 bp, Homo sapien
tgtgcattcagcagtccgtgatgag

SEQ ID NO: 1931780 - DNA, 25 bp, Homo sapien
cgtattgagccagacaacgctgtgc

SEQ ID NO: 1931781 - DNA, 25 bp, Homo sapien
aactaagctgttttgattgtctgaa

SEQ ID NO: 1931782 - DNA, 25 bp, Homo sapien
gaaaacagctagtctaagaatttca

SEQ ID NO: 1931783 - DNA, 25 bp, Homo sapien
cctttctctgaggtatattctgatc

SEQ ID NO: 1931784 - DNA, 25 bp, Homo sapien
aataagacaacgttccatttgagac

SEQ ID NO: 1931785 - DNA, 25 bp, Homo sapien
ggtccatgtaaatgtgccatattgc

SEQ ID NO: 1931786 - DNA, 25 bp, Homo sapien
tctctctgacagtggaccgttttat

SEQ ID NO: 1931787 - DNA, 25 bp, Homo sapien
catattgccgcccatctgctcagag

SEQ ID NO: 1931788 - DNA, 25 bp, Homo sapien
tctgacagtggaccgttttattgaa

SEQ ID NO: 1931789 - DNA, 25 bp, Homo sapien
caatcccaggtaaaatggagtacag

SEQ ID NO: 1931790 - DNA, 25 bp, Homo sapien
tccagccctgtgctgtgttaaacca

SEQ ID NO: 1931791 - DNA, 25 bp, Homo sapien
tatttagtgtgaatgtcaccctgca

SEQ ID NO: 1931792 - DNA, 25 bp, Homo sapien
gatttcatggctctccaatcccagg

SEQ ID NO: 1931793 - DNA, 25 bp, Homo sapien
ttataggcgagttggatctggggtc

SEQ ID NO: 1931794 - DNA, 25 bp, Homo sapien
taatgagtcacggattgcctgttta

SEQ ID NO: 1931795 - DNA, 25 bp, Homo sapien
gttttaatgagtcacggattgcctg

SEQ ID NO: 1931796 - DNA, 25 bp, Homo sapien
cacggattgcctgtttatcttctgc

SEQ ID NO: 1931797 - DNA, 25 bp, Homo sapien
atgcttgttttaatgagtcacggat

SEQ ID NO: 1931798 - DNA, 25 bp, Homo sapien
ctagaaacacatgctgctacagacg

SEQ ID NO: 1931799 - DNA, 25 bp, Homo sapien
ttgagccaaattattataaagaact

SEQ ID NO: 1931800 - DNA, 25 bp, Homo sapien
attattataaagaactctttcttct

SEQ ID NO: 1931801 - DNA, 25 bp, Homo sapien
agccaaattattataaagaactctt

SEQ ID NO: 1931802 - DNA, 25 bp, Homo sapien
caaattattataaagaactctttct

SEQ ID NO: 1931803 - DNA, 25 bp, Homo sapien
cttggaagtagagaacggtagagag

SEQ ID NO: 1931804 - DNA, 25 bp, Homo sapien
gaagtagagaacggtagagaggata

SEQ ID NO: 1931805 - DNA, 25 bp, Homo sapien
gtagagaacggtagagaggatacaa

SEQ ID NO: 1931806 - DNA, 25 bp, Homo sapien
agagaacggtagagaggatacaaag

SEQ ID NO: 1931807 - DNA, 25 bp, Homo sapien
tgtagtcagagcgttagcaagcaca

SEQ ID NO: 1931808 - DNA, 25 bp, Homo sapien
cgtcagctgatcttctgtggcctta

SEQ ID NO: 1931809 - DNA, 25 bp, Homo sapien
tgtggccttacactctaggctgctg

SEQ ID NO: 1931810 - DNA, 25 bp, Homo sapien
gccacactgtgtcaccgtcagctga

SEQ ID NO: 1931811 - DNA, 25 bp, Homo sapien
tgtgatcccaggaccgagatggaga

SEQ ID NO: 1931812 - DNA, 25 bp, Homo sapien
cctttgctgtatgccattggatctg

SEQ ID NO: 1931813 - DNA, 25 bp, Homo sapien
cgtttctgggtagcgtgagggcctg

SEQ ID NO: 1931814 - DNA, 25 bp, Homo sapien
gtgggccaggcagtgcatctcacca

SEQ ID NO: 1931815 - DNA, 25 bp, Homo sapien
caattgtatgaggtcactctggcag

SEQ ID NO: 1931816 - DNA, 25 bp, Homo sapien
taagcatcaggacatggtaggagag

SEQ ID NO: 1931817 - DNA, 25 bp, Homo sapien
gagtaagtctggctcctgaccatga

SEQ ID NO: 1931818 - DNA, 25 bp, Homo sapien
tggcagcactgaccaagtagaaaat

SEQ ID NO: 1931819 - DNA, 25 bp, Homo sapien
aacaggagatccatacttacattcc

SEQ ID NO: 1931820 - DNA, 25 bp, Homo sapien
ttcaacaggagatccatacttacat

SEQ ID NO: 1931821 - DNA, 25 bp, Homo sapien
caggagatccatacttacattccca

SEQ ID NO: 1931822 - DNA, 25 bp, Homo sapien
gagatccatacttacattcccatgt

SEQ ID NO: 1931823 - DNA, 25 bp, Homo sapien
ttctttgccgaaagcgttcccagcc

SEQ ID NO: 1931824 - DNA, 25 bp, Homo sapien
tgggatatcccgcagaagaagggaa

SEQ ID NO: 1931825 - DNA, 25 bp, Homo sapien
aattctttgccgaaagcgttcccag

SEQ ID NO: 1931826 - DNA, 25 bp, Homo sapien
cagaagaagggaattctttgccgaa

SEQ ID NO: 1931827 - DNA, 25 bp, Homo sapien
tcccatgaacgggatccctgggcca

SEQ ID NO: 1931828 - DNA, 25 bp, Homo sapien
tttatgcatcccatgaacgggatcc

SEQ ID NO: 1931829 - DNA, 25 bp, Homo sapien
gcatcccatgaacgggatccctggg

SEQ ID NO: 1931830 - DNA, 25 bp, Homo sapien
cttctttatgcatcccatgaacggg

SEQ ID NO: 1931831 - DNA, 25 bp, Homo sapien
tcaggatgtgatgtgtttgtggttt

SEQ ID NO: 1931832 - DNA, 25 bp, Homo sapien
caccccagagtgacgtaaccaaggt

SEQ ID NO: 1931833 - DNA, 25 bp, Homo sapien
tatggagatagccttgcagaggact

SEQ ID NO: 1931834 - DNA, 25 bp, Homo sapien
tgtggaatctgaggatgctgcgtat

SEQ ID NO: 1931835 - DNA, 25 bp, Homo sapien
gtctgtcccacagttgactctctgg

SEQ ID NO: 1931836 - DNA, 25 bp, Homo sapien
taaacgaaaggcttccatggacagg

SEQ ID NO: 1931837 - DNA, 25 bp, Homo sapien
gatggcatcgtctaggacttcccac

SEQ ID NO: 1931838 - DNA, 25 bp, Homo sapien
caggtatgtaactgtggagacagca

SEQ ID NO: 1931839 - DNA, 25 bp, Homo sapien
tttgacatgacttgctgaataggag

SEQ ID NO: 1931840 - DNA, 25 bp, Homo sapien
tgacatgacttgctgaataggagtt

SEQ ID NO: 1931841 - DNA, 25 bp, Homo sapien
ctttgacatgacttgctgaatagga

SEQ ID NO: 1931842 - DNA, 25 bp, Homo sapien
catgacttgctgaataggagtttgt

SEQ ID NO: 1931843 - DNA, 25 bp, Homo sapien
cagccataggccatgcaaagtaaat

SEQ ID NO: 1931844 - DNA, 25 bp, Homo sapien
ttcagccataggccatgcaaagtaa

SEQ ID NO: 1931845 - DNA, 25 bp, Homo sapien
tcagccataggccatgcaaagtaaa

SEQ ID NO: 1931846 - DNA, 25 bp, Homo sapien
tccagggcctctcagttggcatctt

SEQ ID NO: 1931847 - DNA, 25 bp, Homo sapien
gatcccacatgtgcattccagggcc

SEQ ID NO: 1931848 - DNA, 25 bp, Homo sapien
attcctcctagatcccacatgtgca

SEQ ID NO: 1931849 - DNA, 25 bp, Homo sapien
gaaattcctccctgcatcctctgca

SEQ ID NO: 1931850 - DNA, 25 bp, Homo sapien
tcaagtcattgtagcatcctgagac

SEQ ID NO: 1931851 - DNA, 25 bp, Homo sapien
cttgtcctttgagaaataccactga

SEQ ID NO: 1931852 - DNA, 25 bp, Homo sapien
tgagacattcactctatccatataa

SEQ ID NO: 1931853 - DNA, 25 bp, Homo sapien
attggccatttcttgtcctttgaga

SEQ ID NO: 1931854 - DNA, 25 bp, Homo sapien
cgaagatctgcacggccctgggctt

SEQ ID NO: 1931855 - DNA, 25 bp, Homo sapien
tctgcgtcaggctgacctctcccac

SEQ ID NO: 1931856 - DNA, 25 bp, Homo sapien
tgaataacttccgagaggtagtccc

SEQ ID NO: 1931857 - DNA, 25 bp, Homo sapien
tgggcttccacgttggaccacctgc

SEQ ID NO: 1931858 - DNA, 25 bp, Homo sapien
gatgtgctcgcctcatcccgggcag

SEQ ID NO: 1931859 - DNA, 25 bp, Homo sapien
atctttgcggcccagagctcagtag

SEQ ID NO: 1931860 - DNA, 25 bp, Homo sapien
cctttgtgctccgtgtggggcttga

SEQ ID NO: 1931861 - DNA, 25 bp, Homo sapien
ccagggagatagatgtgatgtgctc

SEQ ID NO: 1931862 - DNA, 25 bp, Homo sapien
aagcgttgttccttggagggcaggg

SEQ ID NO: 1931863 - DNA, 25 bp, Homo sapien
catattgggcacagatacaaaggga

SEQ ID NO: 1931864 - DNA, 25 bp, Homo sapien
tctttaccccatctgcaagtccatt

SEQ ID NO: 1931865 - DNA, 25 bp, Homo sapien
cccttgttcgctttctgtccttcct

SEQ ID NO: 1931866 - DNA, 25 bp, Homo sapien
ttttggtgaggtcaaaccatggcta

SEQ ID NO: 1931867 - DNA, 25 bp, Homo sapien
tggtgaggtcaaaccatggctaaaa

SEQ ID NO: 1931868 - DNA, 25 bp, Homo sapien
gattctaagataagtagtaactgtg

SEQ ID NO: 1931869 - DNA, 25 bp, Homo sapien
caggattctaagataagtagtaact

SEQ ID NO: 1931870 - DNA, 25 bp, Homo sapien
agtgctcctgatgccttcagcccac

SEQ ID NO: 1931871 - DNA, 25 bp, Homo sapien
cagtgctcctgatgccttcagccca

SEQ ID NO: 1931872 - DNA, 25 bp, Homo sapien
tgctcctgatgccttcagcccacat

SEQ ID NO: 1931873 - DNA, 25 bp, Homo sapien
ctcagtgctcctgatgccttcagcc

SEQ ID NO: 1931874 - DNA, 25 bp, Homo sapien
tgttgtaagagcattgcagtagtga

SEQ ID NO: 1931875 - DNA, 25 bp, Homo sapien
tgtaagagcattgcagtagtgaatc

SEQ ID NO: 1931876 - DNA, 25 bp, Homo sapien
taagagcattgcagtagtgaatcgg

SEQ ID NO: 1931877 - DNA, 25 bp, Homo sapien
aagagcattgcagtagtgaatcggg

SEQ ID NO: 1931878 - DNA, 25 bp, Homo sapien
ctcatcagagccacatgaccagaag

SEQ ID NO: 1931879 - DNA, 25 bp, Homo sapien
ttatgtctgcccaaattggcagctc

SEQ ID NO: 1931880 - DNA, 25 bp, Homo sapien
attatgtctgcccaaattggcagct

SEQ ID NO: 1931881 - DNA, 25 bp, Homo sapien
gctctcatcagagccacatgaccag

SEQ ID NO: 1931882 - DNA, 25 bp, Homo sapien
ccaagcctggtccaggaccctgatc

SEQ ID NO: 1931883 - DNA, 25 bp, Homo sapien
caagcctggtccaggaccctgatcc

SEQ ID NO: 1931884 - DNA, 25 bp, Homo sapien
gccaagcctggtccaggaccctgat

SEQ ID NO: 1931885 - DNA, 25 bp, Homo sapien
taattctgtgtgatgagtgaggctg

SEQ ID NO: 1931886 - DNA, 25 bp, Homo sapien
tgtgatgagtgaggctggcggcagc

SEQ ID NO: 1931887 - DNA, 25 bp, Homo sapien
gagatgggatgattgctggatccat

SEQ ID NO: 1931888 - DNA, 25 bp, Homo sapien
ggtgcaaacatattgagatgggatg

SEQ ID NO: 1931889 - DNA, 25 bp, Homo sapien
tctcgtttgttccacattgtgtcct

SEQ ID NO: 1931890 - DNA, 25 bp, Homo sapien
actttatggactctcgtttgttcca

SEQ ID NO: 1931891 - DNA, 25 bp, Homo sapien
tcaaattctggttccagttcagcct

SEQ ID NO: 1931892 - DNA, 25 bp, Homo sapien
gcccagactcgtataactttatgga

SEQ ID NO: 1931893 - DNA, 25 bp, Homo sapien
gctttaatggagaacgccacctctc

SEQ ID NO: 1931894 - DNA, 25 bp, Homo sapien
gaagtggcaagctttaatggagaac

SEQ ID NO: 1931895 - DNA, 25 bp, Homo sapien
tatggtctcaagaagtggcaagctt

SEQ ID NO: 1931896 - DNA, 25 bp, Homo sapien
aagtaaaaggaagatatggtctcaa

SEQ ID NO: 1931897 - DNA, 25 bp, Homo sapien
gcttcatccgaagcttctttgatgg

SEQ ID NO: 1931898 - DNA, 25 bp, Homo sapien
ttgttcccaactgttgtgcaaaaga

SEQ ID NO: 1931899 - DNA, 25 bp, Homo sapien
gcaaaagatgctttccattgaattg

SEQ ID NO: 1931900 - DNA, 25 bp, Homo sapien
tggcttcatccgaagcttctttgat

SEQ ID NO: 1931901 - DNA, 25 bp, Homo sapien
tgaaccctcataagtggcacagatg

SEQ ID NO: 1931902 - DNA, 25 bp, Homo sapien
tatacgcatgaatgacttgtctact

SEQ ID NO: 1931903 - DNA, 25 bp, Homo sapien
tgtatccagacaccaaaatgatccc

SEQ ID NO: 1931904 - DNA, 25 bp, Homo sapien
gttgccagcaacatgtttaccatga

SEQ ID NO: 1931905 - DNA, 25 bp, Homo sapien
tctagtgccctattggtctggagcc

SEQ ID NO: 1931906 - DNA, 25 bp, Homo sapien
tggtttgggtacatcttctagtgcc

SEQ ID NO: 1931907 - DNA, 25 bp, Homo sapien
cctattggtctggagccaaaagttc

SEQ ID NO: 1931908 - DNA, 25 bp, Homo sapien
gactgcttcaggtggtcgatctggt

SEQ ID NO: 1931909 - DNA, 25 bp, Homo sapien
tatgccttaataggaactcgctgat

SEQ ID NO: 1931910 - DNA, 25 bp, Homo sapien
tgactaagagttcccaatgcttcac

SEQ ID NO: 1931911 - DNA, 25 bp, Homo sapien
taggaactcgctgatttgactaaga

SEQ ID NO: 1931912 - DNA, 25 bp, Homo sapien
cccaatgcttcacgattagaataag

SEQ ID NO: 1931913 - DNA, 25 bp, Homo sapien
tctcacttaagctaaggcaacggtg

SEQ ID NO: 1931914 - DNA, 25 bp, Homo sapien
taagggactgccactgttgtaatct

SEQ ID NO: 1931915 - DNA, 25 bp, Homo sapien
taaagatgggtgtctagcctacagg

SEQ ID NO: 1931916 - DNA, 25 bp, Homo sapien
gaatcagtgaatagctgtgcctgca

SEQ ID NO: 1931917 - DNA, 25 bp, Homo sapien
cagtattgcaatgaatattcgcatt

SEQ ID NO: 1931918 - DNA, 25 bp, Homo sapien
tgaatattcgcatttatggtagaat

SEQ ID NO: 1931919 - DNA, 25 bp, Homo sapien
ctcctgccaacattgtataagtgtt

SEQ ID NO: 1931920 - DNA, 25 bp, Homo sapien
tcaatccatcatttacgggcattta

SEQ ID NO: 1931921 - DNA, 25 bp, Homo sapien
gtaaacatacttgaataatgatgac

SEQ ID NO: 1931922 - DNA, 25 bp, Homo sapien
atgtctgtaaacatacttgaataat

SEQ ID NO: 1931923 - DNA, 25 bp, Homo sapien
taaacatacttgaataatgatgacc

SEQ ID NO: 1931924 - DNA, 25 bp, Homo sapien
gtctgtaaacatacttgaataatga

SEQ ID NO: 1931925 - DNA, 25 bp, Homo sapien
gctatgtgctttctgtaggaaagcc

SEQ ID NO: 1931926 - DNA, 25 bp, Homo sapien
gccttgagctgtttatggtatgaaa

SEQ ID NO: 1931927 - DNA, 25 bp, Homo sapien
aatatgatgtgctgatggtctttga

SEQ ID NO: 1931928 - DNA, 25 bp, Homo sapien
ggaaagccatccctggcgccttgag

SEQ ID NO: 1931929 - DNA, 25 bp, Homo sapien
ttcatttgaccttgcagccaatcgt

SEQ ID NO: 1931930 - DNA, 25 bp, Homo sapien
ccttgctggttaatctgcatgttca

SEQ ID NO: 1931931 - DNA, 25 bp, Homo sapien
tgcatgttcatttgaccttgcagcc

SEQ ID NO: 1931932 - DNA, 25 bp, Homo sapien
cagcaccttgctggttaatctgcat

SEQ ID NO: 1931933 - DNA, 25 bp, Homo sapien
gatacgtccgtgacccaacttcaac

SEQ ID NO: 1931934 - DNA, 25 bp, Homo sapien
ttcaaccaaccacgcaacgtcaatg

SEQ ID NO: 1931935 - DNA, 25 bp, Homo sapien
ttcttcccatgagctaaaacgtaga

SEQ ID NO: 1931936 - DNA, 25 bp, Homo sapien
accacgcaacgtcaatgacccaggg

SEQ ID NO: 1931937 - DNA, 25 bp, Homo sapien
ttccaatatctgctagaattccaca

SEQ ID NO: 1931938 - DNA, 25 bp, Homo sapien
aaggaaatctcagtgccttggaggg

SEQ ID NO: 1931939 - DNA, 25 bp, Homo sapien
tgctaatttgccaccaaaatttcca

SEQ ID NO: 1931940 - DNA, 25 bp, Homo sapien
ctgtgtggctgtagacagaaggcca

SEQ ID NO: 1931941 - DNA, 25 bp, Homo sapien
cattttccggaagggaccatgtttg

SEQ ID NO: 1931942 - DNA, 25 bp, Homo sapien
ccatgtttgactggtggagtgattc

SEQ ID NO: 1931943 - DNA, 25 bp, Homo sapien
tgagccatgcatgggtacccaagaa

SEQ ID NO: 1931944 - DNA, 25 bp, Homo sapien
gcatggccttactccctttagtggg

SEQ ID NO: 1931945 - DNA, 25 bp, Homo sapien
gatttgaaggcagtaaaaataatgt

SEQ ID NO: 1931946 - DNA, 25 bp, Homo sapien
tttgaaggcagtaaaaataatgtga

SEQ ID NO: 1931947 - DNA, 25 bp, Homo sapien
atagcatatgacacatttcatcagg

SEQ ID NO: 1931948 - DNA, 25 bp, Homo sapien
aaataatgtgaaatagcatatgaca

SEQ ID NO: 1931949 - DNA, 25 bp, Homo sapien
aggcagacaaacactcactgacagc

SEQ ID NO: 1931950 - DNA, 25 bp, Homo sapien
cagacaaacactcactgacagccat

SEQ ID NO: 1931951 - DNA, 25 bp, Homo sapien
tcagatgctgttatcagcgaagtca

SEQ ID NO: 1931952 - DNA, 25 bp, Homo sapien
gcgaagtcagagctggtacactctc

SEQ ID NO: 1931953 - DNA, 25 bp, Homo sapien
tatgaccaggacagaatggaacgac

SEQ ID NO: 1931954 - DNA, 25 bp, Homo sapien
acacagcaatggttctccactcaag

SEQ ID NO: 1931955 - DNA, 25 bp, Homo sapien
tggaacgacgttctgtgctctcaca

SEQ ID NO: 1931956 - DNA, 25 bp, Homo sapien
gctctcacacagcaatggttctcca

SEQ ID NO: 1931957 - DNA, 25 bp, Homo sapien
gtgaccagcaacaggacatggccac

SEQ ID NO: 1931958 - DNA, 25 bp, Homo sapien
cagcattatgaaagtgaccagcaac

SEQ ID NO: 1931959 - DNA, 25 bp, Homo sapien
tgaaagtgaccagcaacaggacatg

SEQ ID NO: 1931960 - DNA, 25 bp, Homo sapien
cactgccacagcattatgaaagtga

SEQ ID NO: 1931961 - DNA, 25 bp, Homo sapien
gggcagtgagttttctagcatctga

SEQ ID NO: 1931962 - DNA, 25 bp, Homo sapien
gctcctgtcctttccagtagaggga

SEQ ID NO: 1931963 - DNA, 25 bp, Homo sapien
aactgccacgaaaccaagtactgcc

SEQ ID NO: 1931964 - DNA, 25 bp, Homo sapien
aataaatctctaaacaactgccacg

SEQ ID NO: 1931965 - DNA, 25 bp, Homo sapien
gagaaacccgaccactctgcttcta

SEQ ID NO: 1931966 - DNA, 25 bp, Homo sapien
gacgcaacagtaaaatcaaggcccg

SEQ ID NO: 1931967 - DNA, 25 bp, Homo sapien
tgtcctcctgcggtgcgagaaaccc

SEQ ID NO: 1931968 - DNA, 25 bp, Homo sapien
tgccaggcacgatggcctgcaatgg

SEQ ID NO: 1931969 - DNA, 25 bp, Homo sapien
tccttttgccggtgcctggctgcga

SEQ ID NO: 1931970 - DNA, 25 bp, Homo sapien
ctggctgcgaggacaaacgtccgta

SEQ ID NO: 1931971 - DNA, 25 bp, Homo sapien
ggttagaagcaacggctctcttcca

SEQ ID NO: 1931972 - DNA, 25 bp, Homo sapien
ggcttgggttagaagcaacggctct

SEQ ID NO: 1931973 - DNA, 25 bp, Homo sapien
ctgtgaggtccccagcgaagagacg

SEQ ID NO: 1931974 - DNA, 25 bp, Homo sapien
tctgtgaggtccccagcgaagagac

SEQ ID NO: 1931975 - DNA, 25 bp, Homo sapien
tgaggtccccagcgaagagacgcag

SEQ ID NO: 1931976 - DNA, 25 bp, Homo sapien
tgtgaggtccccagcgaagagacgc

SEQ ID NO: 1931977 - DNA, 25 bp, Homo sapien
gacgctcgacggaaaactgactctg

SEQ ID NO: 1931978 - DNA, 25 bp, Homo sapien
cttaaacgggcactgggtacaggag

SEQ ID NO: 1931979 - DNA, 25 bp, Homo sapien
tggcgggctccttcgtcgtccaacg

SEQ ID NO: 1931980 - DNA, 25 bp, Homo sapien
tctgcaggcccgagctttcggagtt

SEQ ID NO: 1931981 - DNA, 25 bp, Homo sapien
ttaagatatctagcctgggtgcgga

SEQ ID NO: 1931982 - DNA, 25 bp, Homo sapien
tggccttaagatatctagcctgggt

SEQ ID NO: 1931983 - DNA, 25 bp, Homo sapien
gatatctagcctgggtgcggagact

SEQ ID NO: 1931984 - DNA, 25 bp, Homo sapien
gggtggccttaagatatctagcctg

SEQ ID NO: 1931985 - DNA, 25 bp, Homo sapien
cgtggaacgcgaagttaaatgttgg

SEQ ID NO: 1931986 - DNA, 25 bp, Homo sapien
tggaacgcgaagttaaatgttggtg

SEQ ID NO: 1931987 - DNA, 25 bp, Homo sapien
ctggaagggacgtggaacgcgaagt

SEQ ID NO: 1931988 - DNA, 25 bp, Homo sapien
acgtggaacgcgaagttaaatgttg

SEQ ID NO: 1931989 - DNA, 25 bp, Homo sapien
tcgataattcgagtatttaaaggga

SEQ ID NO: 1931990 - DNA, 25 bp, Homo sapien
gaaatcttttttctggcgtcgataa

SEQ ID NO: 1931991 - DNA, 25 bp, Homo sapien
ttttttctggcgtcgataattcgag

SEQ ID NO: 1931992 - DNA, 25 bp, Homo sapien
taaagggaagtgcaatgacagtaaa

SEQ ID NO: 1931993 - DNA, 25 bp, Homo sapien
tccttgtttgttgccaacacagtca

SEQ ID NO: 1931994 - DNA, 25 bp, Homo sapien
tgcttcatccttgtttgttgccaac

SEQ ID NO: 1931995 - DNA, 25 bp, Homo sapien
gcttcatccttgtttgttgccaaca

SEQ ID NO: 1931996 - DNA, 25 bp, Homo sapien
tcatccttgtttgttgccaacacag

SEQ ID NO: 1931997 - DNA, 25 bp, Homo sapien
ttttgcacaaaagggatggccgtct

SEQ ID NO: 1931998 - DNA, 25 bp, Homo sapien
gacaggtatcgtctttgaggcccta

SEQ ID NO: 1931999 - DNA, 25 bp, Homo sapien
tacactgcgtcgaaaggaaaaccca

SEQ ID NO: 1932000 - DNA, 25 bp, Homo sapien
ctgataatagagagagccaaccccg

SEQ ID NO: 1932001 - DNA, 25 bp, Homo sapien
cgttcgcgtccgttgatcttcagcc

SEQ ID NO: 1932002 - DNA, 25 bp, Homo sapien
acggtcccgcagtgaaaggccgagt

SEQ ID NO: 1932003 - DNA, 25 bp, Homo sapien
gcaagtccttggactcggccgacag

SEQ ID NO: 1932004 - DNA, 25 bp, Homo sapien
gtagggcatgacttcgcgcagcccg

SEQ ID NO: 1932005 - DNA, 25 bp, Homo sapien
acgagaccgagttgagacggctctc

SEQ ID NO: 1932006 - DNA, 25 bp, Homo sapien
ctgcgtggacgagaccgagttgaga

SEQ ID NO: 1932007 - DNA, 25 bp, Homo sapien
tggtggtggtccctcaggtacatct

SEQ ID NO: 1932008 - DNA, 25 bp, Homo sapien
ggtccctcaggtacatctcatccat

SEQ ID NO: 1932009 - DNA, 25 bp, Homo sapien
tccggagatgaagctctgctggaga

SEQ ID NO: 1932010 - DNA, 25 bp, Homo sapien
gtccggagatgaagctctgctggag

SEQ ID NO: 1932011 - DNA, 25 bp, Homo sapien
ccggagatgaagctctgctggagac

SEQ ID NO: 1932012 - DNA, 25 bp, Homo sapien
aaagcggagacgctgcttttccccg

SEQ ID NO: 1932013 - DNA, 25 bp, Homo sapien
aggaacccacttctccgcggcaaga

SEQ ID NO: 1932014 - DNA, 25 bp, Homo sapien
gcttcctggacagctagttggtgtg

SEQ ID NO: 1932015 - DNA, 25 bp, Homo sapien
tccgcggcaagacgtgagaagaaaa

SEQ ID NO: 1932016 - DNA, 25 bp, Homo sapien
cttccctaagggttttcagctccag

SEQ ID NO: 1932017 - DNA, 25 bp, Homo sapien
ttgagccctgaacccgagaaggagc

SEQ ID NO: 1932018 - DNA, 25 bp, Homo sapien
ccccagacttgtacggaaggagaga

SEQ ID NO: 1932019 - DNA, 25 bp, Homo sapien
ctttgcccgaacagaccaggacatt

SEQ ID NO: 1932020 - DNA, 25 bp, Homo sapien
acagcaccttgaaacttcaggatat

SEQ ID NO: 1932021 - DNA, 25 bp, Homo sapien
tcaggatattgacgtgatgtgcgtt

SEQ ID NO: 1932022 - DNA, 25 bp, Homo sapien
gaaacttcaggatattgacgtgatg

SEQ ID NO: 1932023 - DNA, 25 bp, Homo sapien
tattgacgtgatgtgcgttgtctca

SEQ ID NO: 1932024 - DNA, 25 bp, Homo sapien
caagtgcttctttgtatgtggaggc

SEQ ID NO: 1932025 - DNA, 25 bp, Homo sapien
cctctcttgaaggtgctgaaatgca

SEQ ID NO: 1932026 - DNA, 25 bp, Homo sapien
aaatgtcccagtgtgagagatgcga

SEQ ID NO: 1932027 - DNA, 25 bp, Homo sapien
tctaagtaaaagtggccataatcct

SEQ ID NO: 1932028 - DNA, 25 bp, Homo sapien
ctgggaaattcacccagcggctgct

SEQ ID NO: 1932029 - DNA, 25 bp, Homo sapien
gctgctttcagtggcctgagcccag

SEQ ID NO: 1932030 - DNA, 25 bp, Homo sapien
tacacttgagcaaacttaacagaac

SEQ ID NO: 1932031 - DNA, 25 bp, Homo sapien
acagaactgagacagtttccaaagg

SEQ ID NO: 1932032 - DNA, 25 bp, Homo sapien
agttgaggctctcctaatcccgttg

SEQ ID NO: 1932033 - DNA, 25 bp, Homo sapien
gaggctctcctaatcccgttgctct

SEQ ID NO: 1932034 - DNA, 25 bp, Homo sapien
gggaagttgaggctctcctaatccc

SEQ ID NO: 1932035 - DNA, 25 bp, Homo sapien
gaagttgaggctctcctaatcccgt

SEQ ID NO: 1932036 - DNA, 25 bp, Homo sapien
ccaagcatggtaaacagacacagtc

SEQ ID NO: 1932037 - DNA, 25 bp, Homo sapien
gtgctgtgtttaatacaacaccaag

SEQ ID NO: 1932038 - DNA, 25 bp, Homo sapien
cagacacagtctttgaccttctgag

SEQ ID NO: 1932039 - DNA, 25 bp, Homo sapien
cattcatctgtgtatagtgctgtgt

SEQ ID NO: 1932040 - DNA, 25 bp, Homo sapien
ccaagttccaaatcacagcttttcc

SEQ ID NO: 1932041 - DNA, 25 bp, Homo sapien
tgctccaagttccaaatcacagctt

SEQ ID NO: 1932042 - DNA, 25 bp, Homo sapien
gttccaaatcacagcttttccctgg

SEQ ID NO: 1932043 - DNA, 25 bp, Homo sapien
aaatcacagcttttccctggagtgc

SEQ ID NO: 1932044 - DNA, 25 bp, Homo sapien
ctgaacgtaggtggccctggtttgc

SEQ ID NO: 1932045 - DNA, 25 bp, Homo sapien
tctggatgattcatgcccagtggag

SEQ ID NO: 1932046 - DNA, 25 bp, Homo sapien
catactgtacaagctctgaacgtag

SEQ ID NO: 1932047 - DNA, 25 bp, Homo sapien
ctttttatctggatgattcatgccc

SEQ ID NO: 1932048 - DNA, 25 bp, Homo sapien
agctaacttcttaaggattgttaag

SEQ ID NO: 1932049 - DNA, 25 bp, Homo sapien
gatttttctacaggatctagaacat

SEQ ID NO: 1932050 - DNA, 25 bp, Homo sapien
agatttttctacaggatctagaaca

SEQ ID NO: 1932051 - DNA, 25 bp, Homo sapien
ttcttaaggattgttaagctgtcag

SEQ ID NO: 1932052 - DNA, 25 bp, Homo sapien
tgtcattagctatagctgttctacg

SEQ ID NO: 1932053 - DNA, 25 bp, Homo sapien
gtcattagctatagctgttctacgt

SEQ ID NO: 1932054 - DNA, 25 bp, Homo sapien
tcattagctatagctgttctacgta

SEQ ID NO: 1932055 - DNA, 25 bp, Homo sapien
tttgtcattagctatagctgttcta

SEQ ID NO: 1932056 - DNA, 25 bp, Homo sapien
ccctttccggacctgagcctgaagt

SEQ ID NO: 1932057 - DNA, 25 bp, Homo sapien
ttccggacctgagcctgaagtttgg

SEQ ID NO: 1932058 - DNA, 25 bp, Homo sapien
cctgaagtttggctaacttttcttg

SEQ ID NO: 1932059 - DNA, 25 bp, Homo sapien
cggacctgagcctgaagtttggcta

SEQ ID NO: 1932060 - DNA, 25 bp, Homo sapien
ggtcctccaataccagcacatggca

SEQ ID NO: 1932061 - DNA, 25 bp, Homo sapien
ctacggcagttcacaaaggaaggca

SEQ ID NO: 1932062 - DNA, 25 bp, Homo sapien
ttctcaacatcagaacaaggggcag

SEQ ID NO: 1932063 - DNA, 25 bp, Homo sapien
ctttctcaacatcagaacaaggggc

SEQ ID NO: 1932064 - DNA, 25 bp, Homo sapien
tttctcaacatcagaacaaggggca

SEQ ID NO: 1932065 - DNA, 25 bp, Homo sapien
tgtcacacacatgcctcatttccat

SEQ ID NO: 1932066 - DNA, 25 bp, Homo sapien
aacagctactgcctctttggaaacg

SEQ ID NO: 1932067 - DNA, 25 bp, Homo sapien
tactaatggtccagcagtggcaggc

SEQ ID NO: 1932068 - DNA, 25 bp, Homo sapien
tgtgctctctgcagtaacagctact

SEQ ID NO: 1932069 - DNA, 25 bp, Homo sapien
tgctctggggtaagcaccaagtcca

SEQ ID NO: 1932070 - DNA, 25 bp, Homo sapien
gaataatcttctatatagccaaccc

SEQ ID NO: 1932071 - DNA, 25 bp, Homo sapien
tgtggggatgctgtaaatgctgctc

SEQ ID NO: 1932072 - DNA, 25 bp, Homo sapien
accaagtccatggtgaacctgctgg

SEQ ID NO: 1932073 - DNA, 25 bp, Homo sapien
tactggttgcagatgacaagtgttg

SEQ ID NO: 1932074 - DNA, 25 bp, Homo sapien
tgtaagctacatagcgacctggagg

SEQ ID NO: 1932075 - DNA, 25 bp, Homo sapien
aacaaggccatatttgtaggctgag

SEQ ID NO: 1932076 - DNA, 25 bp, Homo sapien
taggctgagtccttgtactggttgc

SEQ ID NO: 1932077 - DNA, 25 bp, Homo sapien
aatcaattgctatatgagcagagtg

SEQ ID NO: 1932078 - DNA, 25 bp, Homo sapien
gaagtcaagtgtttggcctgaggtc

SEQ ID NO: 1932079 - DNA, 25 bp, Homo sapien
aagtcaagtgtttggcctgaggtct

SEQ ID NO: 1932080 - DNA, 25 bp, Homo sapien
gcccggcctcactgctgttgcttta

SEQ ID NO: 1932081 - DNA, 25 bp, Homo sapien
gcacgtgccaagatgcctggccaat

SEQ ID NO: 1932082 - DNA, 25 bp, Homo sapien
tacccctgcttgctttaggtgtcca

SEQ ID NO: 1932083 - DNA, 25 bp, Homo sapien
ttgtttgatctaagaatagctaccc

SEQ ID NO: 1932084 - DNA, 25 bp, Homo sapien
gcttagttgttaagacgatgatcac

SEQ ID NO: 1932085 - DNA, 25 bp, Homo sapien
ctccaagcttagttgttaagacgat

SEQ ID NO: 1932086 - DNA, 25 bp, Homo sapien
ttgttaagacgatgatcacgggcat

SEQ ID NO: 1932087 - DNA, 25 bp, Homo sapien
tagttgttaagacgatgatcacggg

SEQ ID NO: 1932088 - DNA, 25 bp, Homo sapien
tactgtgcacaatatcaaatgcaaa

SEQ ID NO: 1932089 - DNA, 25 bp, Homo sapien
gatcatcattagcatatctccctgc

SEQ ID NO: 1932090 - DNA, 25 bp, Homo sapien
taataacccagtttactgtgcacaa

SEQ ID NO: 1932091 - DNA, 25 bp, Homo sapien
aaaaaccaagacgatcatcattagc

SEQ ID NO: 1932092 - DNA, 25 bp, Homo sapien
cgccttctaggctgaaaatccctgg

SEQ ID NO: 1932093 - DNA, 25 bp, Homo sapien
gagagcaaatcagtgtgtgagagct

SEQ ID NO: 1932094 - DNA, 25 bp, Homo sapien
tgccctagccatttgctgcagggag

SEQ ID NO: 1932095 - DNA, 25 bp, Homo sapien
gtcaagcctgttgccctagccattt

SEQ ID NO: 1932096 - DNA, 25 bp, Homo sapien
ggttccaaagtcagctgccagtccc

SEQ ID NO: 1932097 - DNA, 25 bp, Homo sapien
ccaaagtcagctgccagtcccaatt

SEQ ID NO: 1932098 - DNA, 25 bp, Homo sapien
aagtcagctgccagtcccaattcca

SEQ ID NO: 1932099 - DNA, 25 bp, Homo sapien
tccactgtgggaagtggttccaaag

SEQ ID NO: 1932100 - DNA, 25 bp, Homo sapien
gaaacaactcgtagcttgaaagagg

SEQ ID NO: 1932101 - DNA, 25 bp, Homo sapien
gcccacggcttaagctgattctagg

SEQ ID NO: 1932102 - DNA, 25 bp, Homo sapien
ctcaggagtgaatacgcccacggct

SEQ ID NO: 1932103 - DNA, 25 bp, Homo sapien
taatgtaaaagcagaggtagtcctg

SEQ ID NO: 1932104 - DNA, 25 bp, Homo sapien
gaatcgctaaatcaactctgagcct

SEQ ID NO: 1932105 - DNA, 25 bp, Homo sapien
cactccgctttgtgaatcaaagttg

SEQ ID NO: 1932106 - DNA, 25 bp, Homo sapien
tgagcctgctcctttaacgtggaaa

SEQ ID NO: 1932107 - DNA, 25 bp, Homo sapien
tatttttgtcatgatagaatcgcta

SEQ ID NO: 1932108 - DNA, 25 bp, Homo sapien
agcagattgctatgccccaactttc

SEQ ID NO: 1932109 - DNA, 25 bp, Homo sapien
gggagaagaagagcggcatatggcc

SEQ ID NO: 1932110 - DNA, 25 bp, Homo sapien
ccatgcacacagcagattgctatgc

SEQ ID NO: 1932111 - DNA, 25 bp, Homo sapien
gactcgtgtccccacaacgtggctg

SEQ ID NO: 1932112 - DNA, 25 bp, Homo sapien
ggcttgctgttttggaccttggagc

SEQ ID NO: 1932113 - DNA, 25 bp, Homo sapien
actgggcaccagaattatgttgttg

SEQ ID NO: 1932114 - DNA, 25 bp, Homo sapien
caggtgactgggcaccagaattatg

SEQ ID NO: 1932115 - DNA, 25 bp, Homo sapien
ttggtggcaatcatgaaccgggctt

SEQ ID NO: 1932116 - DNA, 25 bp, Homo sapien
gaaaaatgatacttgcatacttctc

SEQ ID NO: 1932117 - DNA, 25 bp, Homo sapien
tgaatttggtatggaggtggtccac

SEQ ID NO: 1932118 - DNA, 25 bp, Homo sapien
tctggaagaatttggtggatctgtt

SEQ ID NO: 1932119 - DNA, 25 bp, Homo sapien
gacttcatagtaagatattttgaat

SEQ ID NO: 1932120 - DNA, 25 bp, Homo sapien
tgcttccatctgttagcaggtaact

SEQ ID NO: 1932121 - DNA, 25 bp, Homo sapien
ggtgaagtacccattgataaattat

SEQ ID NO: 1932122 - DNA, 25 bp, Homo sapien
tacggcagcgtaacatagtaggtga

SEQ ID NO: 1932123 - DNA, 25 bp, Homo sapien
ggttttgagacattgctacggcagc

SEQ ID NO: 1932124 - DNA, 25 bp, Homo sapien
ttgggcatcatcaggccctccccac

SEQ ID NO: 1932125 - DNA, 25 bp, Homo sapien
ggcttgggcatcatcaggccctccc

SEQ ID NO: 1932126 - DNA, 25 bp, Homo sapien
aggagctgtttttcgattttccact

SEQ ID NO: 1932127 - DNA, 25 bp, Homo sapien
gcttgggcatcatcaggccctcccc

SEQ ID NO: 1932128 - DNA, 25 bp, Homo sapien
gcagtgagagctctggactttccca

SEQ ID NO: 1932129 - DNA, 25 bp, Homo sapien
ttatcaccataagccattgttttca

SEQ ID NO: 1932130 - DNA, 25 bp, Homo sapien
agtttatcaccataagccattgttt

SEQ ID NO: 1932131 - DNA, 25 bp, Homo sapien
acagcagtgagagctctggactttc

SEQ ID NO: 1932132 - DNA, 25 bp, Homo sapien
cagatctctgagacatcccgttgtc

SEQ ID NO: 1932133 - DNA, 25 bp, Homo sapien
aaagtttcagctacaggatgaggat

SEQ ID NO: 1932134 - DNA, 25 bp, Homo sapien
ttctatgaagggctggttggcagct

SEQ ID NO: 1932135 - DNA, 25 bp, Homo sapien
cccttcgtgtgctcttttctatgaa

SEQ ID NO: 1932136 - DNA, 25 bp, Homo sapien
catcgggtttcacccacaggtctgt

SEQ ID NO: 1932137 - DNA, 25 bp, Homo sapien
tcttgctctctaggaaccagaacat

SEQ ID NO: 1932138 - DNA, 25 bp, Homo sapien
cacaggtctgtgcaccatgtcttgc

SEQ ID NO: 1932139 - DNA, 25 bp, Homo sapien
ccatgggtctccatcgggtttcacc

SEQ ID NO: 1932140 - DNA, 25 bp, Homo sapien
ttgtatcaggtccacgttttcacag

SEQ ID NO: 1932141 - DNA, 25 bp, Homo sapien
gttgtatcaggtccacgttttcaca

SEQ ID NO: 1932142 - DNA, 25 bp, Homo sapien
tgttgtatcaggtccacgttttcac

SEQ ID NO: 1932143 - DNA, 25 bp, Homo sapien
agggtggcgctgcagtgcaaggcgg

SEQ ID NO: 1932144 - DNA, 25 bp, Homo sapien
tggcgctgcagtgcaaggcgggagg

SEQ ID NO: 1932145 - DNA, 25 bp, Homo sapien
ggtggcgctgcagtgcaaggcggga

SEQ ID NO: 1932146 - DNA, 25 bp, Homo sapien
ggcgctgcagtgcaaggcgggaggg

SEQ ID NO: 1932147 - DNA, 25 bp, Homo sapien
aaggtcaatgttgcagttaatacct

SEQ ID NO: 1932148 - DNA, 25 bp, Homo sapien
ttaatcacaatgaacctccctgtat

SEQ ID NO: 1932149 - DNA, 25 bp, Homo sapien
agaaggtcaatgttgcagttaatac

SEQ ID NO: 1932150 - DNA, 25 bp, Homo sapien
aatgaacctccctgtatggccaatt

SEQ ID NO: 1932151 - DNA, 25 bp, Homo sapien
tggagtacagcttgtccaacctttg

SEQ ID NO: 1932152 - DNA, 25 bp, Homo sapien
tctcgccatattcccctggagtaca

SEQ ID NO: 1932153 - DNA, 25 bp, Homo sapien
tagtcatgaacagcacttcctttga

SEQ ID NO: 1932154 - DNA, 25 bp, Homo sapien
gaccccatattcttgtagagcatcc

SEQ ID NO: 1932155 - DNA, 25 bp, Homo sapien
taggctcattgggatcatcatcgtg

SEQ ID NO: 1932156 - DNA, 25 bp, Homo sapien
aattcaggcatgatggtgtttgcac

SEQ ID NO: 1932157 - DNA, 25 bp, Homo sapien
ggtgtttgcactgatgtaatctgaa

SEQ ID NO: 1932158 - DNA, 25 bp, Homo sapien
tctgaaataggctcattgggatcat

SEQ ID NO: 1932159 - DNA, 25 bp, Homo sapien
cctggtatgatcaaagggcaggatg

SEQ ID NO: 1932160 - DNA, 25 bp, Homo sapien
ctcctgtggttgtagtgtctcaaat

SEQ ID NO: 1932161 - DNA, 25 bp, Homo sapien
gcctttgaccctcttttcggctgta

SEQ ID NO: 1932162 - DNA, 25 bp, Homo sapien
aaagccttgttggactttgtctgtg

SEQ ID NO: 1932163 - DNA, 25 bp, Homo sapien
gacatgggtcactttacacttgctg

SEQ ID NO: 1932164 - DNA, 25 bp, Homo sapien
tgacatgggtcactttacacttgct

SEQ ID NO: 1932165 - DNA, 25 bp, Homo sapien
cccaaagaggtgtccgtgaaaccat

SEQ ID NO: 1932166 - DNA, 25 bp, Homo sapien
ggatatttaagctcaacaacatctc

SEQ ID NO: 1932167 - DNA, 25 bp, Homo sapien
tccgcacagttcagaggatatttaa

SEQ ID NO: 1932168 - DNA, 25 bp, Homo sapien
caggatccgcacagttcagaggata

SEQ ID NO: 1932169 - DNA, 25 bp, Homo sapien
ctttcagaggcaggatccgcacagt

SEQ ID NO: 1932170 - DNA, 25 bp, Homo sapien
taatactggaccaactcagccgaag

SEQ ID NO: 1932171 - DNA, 25 bp, Homo sapien
tggaccaactcagccgaagtggcaa

SEQ ID NO: 1932172 - DNA, 25 bp, Homo sapien
gtaatactggaccaactcagccgaa

SEQ ID NO: 1932173 - DNA, 25 bp, Homo sapien
aactcagccgaagtggcaaactttt

SEQ ID NO: 1932174 - DNA, 25 bp, Homo sapien
ggtgacagctctatttcttctaatg

SEQ ID NO: 1932175 - DNA, 25 bp, Homo sapien
ctcctcttgtcgacaataggttttt

SEQ ID NO: 1932176 - DNA, 25 bp, Homo sapien
cctcttgtcgacaataggtttttct

SEQ ID NO: 1932177 - DNA, 25 bp, Homo sapien
tgacagctctatttcttctaatgga

SEQ ID NO: 1932178 - DNA, 25 bp, Homo sapien
tgcagccatggcaaccacgggcagt

SEQ ID NO: 1932179 - DNA, 25 bp, Homo sapien
aggcatcatgcttcactgtggcttc

SEQ ID NO: 1932180 - DNA, 25 bp, Homo sapien
accacgggcagttccccaaaggcat

SEQ ID NO: 1932181 - DNA, 25 bp, Homo sapien
ccaaaggcatcatgcttcactgtgg

SEQ ID NO: 1932182 - DNA, 25 bp, Homo sapien
tgacagtggtgcacgctcaagcttg

SEQ ID NO: 1932183 - DNA, 25 bp, Homo sapien
tgaaccagtagcatccaggaatttg

SEQ ID NO: 1932184 - DNA, 25 bp, Homo sapien
caaagccagcgggtctcagagtgtg

SEQ ID NO: 1932185 - DNA, 25 bp, Homo sapien
gggcccagtgcagacctaataaatc

SEQ ID NO: 1932186 - DNA, 25 bp, Homo sapien
tggctaggagttttatttttgatag

SEQ ID NO: 1932187 - DNA, 25 bp, Homo sapien
ctaggagttttatttttgataggat

SEQ ID NO: 1932188 - DNA, 25 bp, Homo sapien
ctggctaggagttttatttttgata

SEQ ID NO: 1932189 - DNA, 25 bp, Homo sapien
gctaggagttttatttttgatagga

SEQ ID NO: 1932190 - DNA, 25 bp, Homo sapien
tacaccacttgttagtagcagagct

SEQ ID NO: 1932191 - DNA, 25 bp, Homo sapien
tagggcacttgcttaacggtacacc

SEQ ID NO: 1932192 - DNA, 25 bp, Homo sapien
gggatttgcaccagggttgttccaa

SEQ ID NO: 1932193 - DNA, 25 bp, Homo sapien
gatatatggctgagactttaaaccc

SEQ ID NO: 1932194 - DNA, 25 bp, Homo sapien
ttcctttgaaccgctttttgccaca

SEQ ID NO: 1932195 - DNA, 25 bp, Homo sapien
gaaccgctttttgccacagattcac

SEQ ID NO: 1932196 - DNA, 25 bp, Homo sapien
tcctttgaaccgctttttgccacag

SEQ ID NO: 1932197 - DNA, 25 bp, Homo sapien
tttgaaccgctttttgccacagatt

SEQ ID NO: 1932198 - DNA, 25 bp, Homo sapien
aatagaagagcggacttcccgtgag

SEQ ID NO: 1932199 - DNA, 25 bp, Homo sapien
gataagccaattgatcccctttccc

SEQ ID NO: 1932200 - DNA, 25 bp, Homo sapien
agcggacttcccgtgagagagtgca

SEQ ID NO: 1932201 - DNA, 25 bp, Homo sapien
gtgcagataagccaattgatcccct

SEQ ID NO: 1932202 - DNA, 25 bp, Homo sapien
ttgataggtaagtcttagttcttcc

SEQ ID NO: 1932203 - DNA, 25 bp, Homo sapien
cttgataggtaagtcttagttcttc

SEQ ID NO: 1932204 - DNA, 25 bp, Homo sapien
tgataggtaagtcttagttcttcca

SEQ ID NO: 1932205 - DNA, 25 bp, Homo sapien
gataggtaagtcttagttcttccat

SEQ ID NO: 1932206 - DNA, 25 bp, Homo sapien
ccctggtagcaagaaggccaagtct

SEQ ID NO: 1932207 - DNA, 25 bp, Homo sapien
gacaaagctcacatggaaatccaca

SEQ ID NO: 1932208 - DNA, 25 bp, Homo sapien
tacctaagttgttgtgaagctcaaa

SEQ ID NO: 1932209 - DNA, 25 bp, Homo sapien
caagacacttgggttgagaacaatc

SEQ ID NO: 1932210 - DNA, 25 bp, Homo sapien
ttctttttacatcactgaaaacatg

SEQ ID NO: 1932211 - DNA, 25 bp, Homo sapien
tctgcaactcaattcatgggtgttc

SEQ ID NO: 1932212 - DNA, 25 bp, Homo sapien
tgttcatagcataataaatatctgc

SEQ ID NO: 1932213 - DNA, 25 bp, Homo sapien
ctctgttctttaacgtattatgttc

SEQ ID NO: 1932214 - DNA, 25 bp, Homo sapien
cctgtctccgttctgcttctttgta

SEQ ID NO: 1932215 - DNA, 25 bp, Homo sapien
ggatttgaacttgacttccaaggtc

SEQ ID NO: 1932216 - DNA, 25 bp, Homo sapien
caaatccactttaatcatttccgat

SEQ ID NO: 1932217 - DNA, 25 bp, Homo sapien
gattccctctcacatgtccttggga

SEQ ID NO: 1932218 - DNA, 25 bp, Homo sapien
caaggtctctgactcaccgatccaa

SEQ ID NO: 1932219 - DNA, 25 bp, Homo sapien
gacagaccccgcaaactggcaatta

SEQ ID NO: 1932220 - DNA, 25 bp, Homo sapien
taccttggtgaacttgttgctctcc

SEQ ID NO: 1932221 - DNA, 25 bp, Homo sapien
gaacttgttgctctccaaaatctgg

SEQ ID NO: 1932222 - DNA, 25 bp, Homo sapien
actggcaattaccttggtgaacttg

SEQ ID NO: 1932223 - DNA, 25 bp, Homo sapien
cggtggaccctatttgatttttgct

SEQ ID NO: 1932224 - DNA, 25 bp, Homo sapien
tggctgggagacccggtggacccta

SEQ ID NO: 1932225 - DNA, 25 bp, Homo sapien
ctgccttggctgggagacccggtgg

SEQ ID NO: 1932226 - DNA, 25 bp, Homo sapien
ggtggaccctatttgatttttgcta

SEQ ID NO: 1932227 - DNA, 25 bp, Homo sapien
tgccttcaaggtctccaagacaggg

SEQ ID NO: 1932228 - DNA, 25 bp, Homo sapien
cagggatcataggaagcttgtaacc

SEQ ID NO: 1932229 - DNA, 25 bp, Homo sapien
gcagaaggccagtctagcaagggtc

SEQ ID NO: 1932230 - DNA, 25 bp, Homo sapien
gataggctgatctgacctctcggct

SEQ ID NO: 1932231 - DNA, 25 bp, Homo sapien
ccctccaggaagtcgctgtgaaatc

SEQ ID NO: 1932232 - DNA, 25 bp, Homo sapien
caggaagtcgctgtgaaatctttca

SEQ ID NO: 1932233 - DNA, 25 bp, Homo sapien
tccaggaagtcgctgtgaaatcttt

SEQ ID NO: 1932234 - DNA, 25 bp, Homo sapien
cgctgtgaaatctttcacttcttgc

SEQ ID NO: 1932235 - DNA, 25 bp, Homo sapien
ggctttctaagtctccattcaaatc

SEQ ID NO: 1932236 - DNA, 25 bp, Homo sapien
gaactgcttgcgatgggttatccaa

SEQ ID NO: 1932237 - DNA, 25 bp, Homo sapien
gaatcccagctctaactttctcagg

SEQ ID NO: 1932238 - DNA, 25 bp, Homo sapien
caagtggaaaggataaccgtgtcca

SEQ ID NO: 1932239 - DNA, 25 bp, Homo sapien
ccaaagcggacaaccacactgacaa

SEQ ID NO: 1932240 - DNA, 25 bp, Homo sapien
gacaaccacactgacaaagccaatg

SEQ ID NO: 1932241 - DNA, 25 bp, Homo sapien
ttctgcttcacaattcggcatgtga

SEQ ID NO: 1932242 - DNA, 25 bp, Homo sapien
ttcacaattcggcatgtgaccgtcc

SEQ ID NO: 1932243 - DNA, 25 bp, Homo sapien
ctctgcgtgtgaggcgaccaggaga

SEQ ID NO: 1932244 - DNA, 25 bp, Homo sapien
ttgctgcacagcacgttcagtgagg

SEQ ID NO: 1932245 - DNA, 25 bp, Homo sapien
ggacagacttgagctatcagacctc

SEQ ID NO: 1932246 - DNA, 25 bp, Homo sapien
cgtgagtcacgtcgttgctgcacag

SEQ ID NO: 1932247 - DNA, 25 bp, Homo sapien
catccccagccaaggattgagcagg

SEQ ID NO: 1932248 - DNA, 25 bp, Homo sapien
ccaaggattgagcaggtttaggcat

SEQ ID NO: 1932249 - DNA, 25 bp, Homo sapien
cagccaaggattgagcaggtttagg

SEQ ID NO: 1932250 - DNA, 25 bp, Homo sapien
aacagcaccctggattttcctgaaa

SEQ ID NO: 1932251 - DNA, 25 bp, Homo sapien
gttcagtgtgagtctcaggatctct

SEQ ID NO: 1932252 - DNA, 25 bp, Homo sapien
tgctttggaatacaagacgaagttc

SEQ ID NO: 1932253 - DNA, 25 bp, Homo sapien
ccatttgttcagtgtgagtctcagg

SEQ ID NO: 1932254 - DNA, 25 bp, Homo sapien
tggaatacaagacgaagttcctctc

SEQ ID NO: 1932255 - DNA, 25 bp, Homo sapien
tttgggtctccgtggcaacaaggct

SEQ ID NO: 1932256 - DNA, 25 bp, Homo sapien
gaggcttattccataacaggaggga

SEQ ID NO: 1932257 - DNA, 25 bp, Homo sapien
gtaacacgtcaacagcaatgcctcg

SEQ ID NO: 1932258 - DNA, 25 bp, Homo sapien
gaagagtccttatagttcccctgga

SEQ ID NO: 1932259 - DNA, 25 bp, Homo sapien
caaatttgtccctgaagcaaggtga

SEQ ID NO: 1932260 - DNA, 25 bp, Homo sapien
agcaccccatcaagagaacttcagg

SEQ ID NO: 1932261 - DNA, 25 bp, Homo sapien
gaactgtatgctaagttagagcctc

SEQ ID NO: 1932262 - DNA, 25 bp, Homo sapien
tctgttggttaaacaggatacctcc

SEQ ID NO: 1932263 - DNA, 25 bp, Homo sapien
tctacaccttgtttagctatggagg

SEQ ID NO: 1932264 - DNA, 25 bp, Homo sapien
atttaccagttgctggtggcaatgg

SEQ ID NO: 1932265 - DNA, 25 bp, Homo sapien
agtatagctaagtgacgggacattc

SEQ ID NO: 1932266 - DNA, 25 bp, Homo sapien
aactagccaggctagccaagactgg

SEQ ID NO: 1932267 - DNA, 25 bp, Homo sapien
atctaagctcctccttagggctgtc

SEQ ID NO: 1932268 - DNA, 25 bp, Homo sapien
atttagaccagtgccaatccctagg

SEQ ID NO: 1932269 - DNA, 25 bp, Homo sapien
atttaaccttgcagttttatccctg

SEQ ID NO: 1932270 - DNA, 25 bp, Homo sapien
atgaatctggtatctaagctcctcc

SEQ ID NO: 1932271 - DNA, 25 bp, Homo sapien
gtgcttgacacttatgatcttgaac

SEQ ID NO: 1932272 - DNA, 25 bp, Homo sapien
gcttgacacttatgatcttgaacca

SEQ ID NO: 1932273 - DNA, 25 bp, Homo sapien
ttgacacttatgatcttgaaccatg

SEQ ID NO: 1932274 - DNA, 25 bp, Homo sapien
gacacttatgatcttgaaccatgct

SEQ ID NO: 1932275 - DNA, 25 bp, Homo sapien
ccacctgaagcaggttctcttggaa

SEQ ID NO: 1932276 - DNA, 25 bp, Homo sapien
ttagaccacctgaagcaggttctct

SEQ ID NO: 1932277 - DNA, 25 bp, Homo sapien
tagaccacctgaagcaggttctctt

SEQ ID NO: 1932278 - DNA, 25 bp, Homo sapien
gaccacctgaagcaggttctcttgg

SEQ ID NO: 1932279 - DNA, 25 bp, Homo sapien
ttcagtggtcctttcttcagtccca

SEQ ID NO: 1932280 - DNA, 25 bp, Homo sapien
catggacattttcagtggtcctttc

SEQ ID NO: 1932281 - DNA, 25 bp, Homo sapien
cagtggtcctttcttcagtcccaaa

SEQ ID NO: 1932282 - DNA, 25 bp, Homo sapien
ggacattttcagtggtcctttcttc

SEQ ID NO: 1932283 - DNA, 25 bp, Homo sapien
tctgcctgaatctctagaccatttc

SEQ ID NO: 1932284 - DNA, 25 bp, Homo sapien
catggttcgggtaatacatgttcag

SEQ ID NO: 1932285 - DNA, 25 bp, Homo sapien
tttccacccaagtcgtcatcattga

SEQ ID NO: 1932286 - DNA, 25 bp, Homo sapien
ttcccttataggatggtgatgcagc

SEQ ID NO: 1932287 - DNA, 25 bp, Homo sapien
gtaggtgtttatggctatgaacatt

SEQ ID NO: 1932288 - DNA, 25 bp, Homo sapien
gaacattcctcttaacaccgcctta

SEQ ID NO: 1932289 - DNA, 25 bp, Homo sapien
attcctcttaacaccgccttagctg

SEQ ID NO: 1932290 - DNA, 25 bp, Homo sapien
acattcctcttaacaccgccttagc

SEQ ID NO: 1932291 - DNA, 25 bp, Homo sapien
tgcaattcatacaacagactaaggg

SEQ ID NO: 1932292 - DNA, 25 bp, Homo sapien
actttgataagaaggccaataccca

SEQ ID NO: 1932293 - DNA, 25 bp, Homo sapien
actctgcttggtactttggaaagac

SEQ ID NO: 1932294 - DNA, 25 bp, Homo sapien
tgcacaaaagatgagcggttacaga

SEQ ID NO: 1932295 - DNA, 25 bp, Homo sapien
tcttatgaagtgagagaaaccccac

SEQ ID NO: 1932296 - DNA, 25 bp, Homo sapien
tgcattccgatttacctcactgagg

SEQ ID NO: 1932297 - DNA, 25 bp, Homo sapien
cccacttggcaaaagcacgttggta

SEQ ID NO: 1932298 - DNA, 25 bp, Homo sapien
tatataaagccaacggaagcaaggc

SEQ ID NO: 1932299 - DNA, 25 bp, Homo sapien
atggtttcgaagatctcaaactgta

SEQ ID NO: 1932300 - DNA, 25 bp, Homo sapien
cagaaaatgatcagtcctgatggtt

SEQ ID NO: 1932301 - DNA, 25 bp, Homo sapien
aaagtagccagaaaatgatcagtcc

SEQ ID NO: 1932302 - DNA, 25 bp, Homo sapien
ggtttcgaagatctcaaactgtacc

SEQ ID NO: 1932303 - DNA, 25 bp, Homo sapien
caagggaataagacatagcaggctg

SEQ ID NO: 1932304 - DNA, 25 bp, Homo sapien
ttttcagccacccaagaagtataat

SEQ ID NO: 1932305 - DNA, 25 bp, Homo sapien
attattgctaaaatgcctaaggcca

SEQ ID NO: 1932306 - DNA, 25 bp, Homo sapien
taattttctcgaagttcaaagccag

SEQ ID NO: 1932307 - DNA, 25 bp, Homo sapien
agggagggtcggacatgcttcatta

SEQ ID NO: 1932308 - DNA, 25 bp, Homo sapien
tatgggaaaacagccaacttgctgt

SEQ ID NO: 1932309 - DNA, 25 bp, Homo sapien
tgtgaggaaactctccattccgtag

SEQ ID NO: 1932310 - DNA, 25 bp, Homo sapien
gaaatgacctggcaaagctgtctgt

SEQ ID NO: 1932311 - DNA, 25 bp, Homo sapien
tggcagaaggtcagtgcatctctcc

SEQ ID NO: 1932312 - DNA, 25 bp, Homo sapien
agaaggtcagtgcatctctcccttg

SEQ ID NO: 1932313 - DNA, 25 bp, Homo sapien
gcagaaggtcagtgcatctctccct

SEQ ID NO: 1932314 - DNA, 25 bp, Homo sapien
ctggcagaaggtcagtgcatctctc

SEQ ID NO: 1932315 - DNA, 25 bp, Homo sapien
aaaagcctcaaatgccagggagtga

SEQ ID NO: 1932316 - DNA, 25 bp, Homo sapien
ggtttagtctttctcaggaacacac

SEQ ID NO: 1932317 - DNA, 25 bp, Homo sapien
catgaacgtgtttggactctcaaaa

SEQ ID NO: 1932318 - DNA, 25 bp, Homo sapien
taacccaacacttaggctcaatcaa

SEQ ID NO: 1932319 - DNA, 25 bp, Homo sapien
aaaggactatctctatttccagcag

SEQ ID NO: 1932320 - DNA, 25 bp, Homo sapien
cagcctatctgagcactgcagtaca

SEQ ID NO: 1932321 - DNA, 25 bp, Homo sapien
caagaagccttcgaatcaaacatga

SEQ ID NO: 1932322 - DNA, 25 bp, Homo sapien
ccagaagaggcagattactgcaaac

SEQ ID NO: 1932323 - DNA, 25 bp, Homo sapien
cagtcccgggaaacaggtctctgaa

SEQ ID NO: 1932324 - DNA, 25 bp, Homo sapien
ggtctctgaaagaatggaagccttt

SEQ ID NO: 1932325 - DNA, 25 bp, Homo sapien
gccaaaggagcaggattatagagac

SEQ ID NO: 1932326 - DNA, 25 bp, Homo sapien
caggattatagagaccccaaactag

SEQ ID NO: 1932327 - DNA, 25 bp, Homo sapien
gacagcaagacatgagccagatagg

SEQ ID NO: 1932328 - DNA, 25 bp, Homo sapien
gcttgtcactcctctttactgcact

SEQ ID NO: 1932329 - DNA, 25 bp, Homo sapien
cagtggcaggtatgaacgtggcccc

SEQ ID NO: 1932330 - DNA, 25 bp, Homo sapien
gacaaagcagttacatcaggacagt

SEQ ID NO: 1932331 - DNA, 25 bp, Homo sapien
caaacttttcagagccggcccgagg

SEQ ID NO: 1932332 - DNA, 25 bp, Homo sapien
cacagttgatgattttctgcagaaa

SEQ ID NO: 1932333 - DNA, 25 bp, Homo sapien
gagatggggaccaaaggctgtcacc

SEQ ID NO: 1932334 - DNA, 25 bp, Homo sapien
tcatcacgtgcacagcccaaacttt

SEQ ID NO: 1932335 - DNA, 25 bp, Homo sapien
agccgaccctgccagcgagcgagcc

SEQ ID NO: 1932336 - DNA, 25 bp, Homo sapien
gaccccaggcgtccatggagcgtcg

SEQ ID NO: 1932337 - DNA, 25 bp, Homo sapien
caggacttgggactttgcgaaagga

SEQ ID NO: 1932338 - DNA, 25 bp, Homo sapien
aggcgtccatggagcgtcgcctccg

SEQ ID NO: 1932339 - DNA, 25 bp, Homo sapien
gcgggtgcatgttgggcagcgaccc

SEQ ID NO: 1932340 - DNA, 25 bp, Homo sapien
tgcatgttgggcagcgacccccggg

SEQ ID NO: 1932341 - DNA, 25 bp, Homo sapien
tcaagggctgcgggtgcatgttggg

SEQ ID NO: 1932342 - DNA, 25 bp, Homo sapien
aagggctgcgggtgcatgttgggca

SEQ ID NO: 1932343 - DNA, 25 bp, Homo sapien
taatgcacggaacttaagctgcagc

SEQ ID NO: 1932344 - DNA, 25 bp, Homo sapien
gttttgcagcgctcctggactggga

SEQ ID NO: 1932345 - DNA, 25 bp, Homo sapien
gctgttcctttcagataatgcacgg

SEQ ID NO: 1932346 - DNA, 25 bp, Homo sapien
tttttggagccaagcgttgcatgct

SEQ ID NO: 1932347 - DNA, 25 bp, Homo sapien
tttgtcagctggagtcgtcccacat

SEQ ID NO: 1932348 - DNA, 25 bp, Homo sapien
taagagaagtatgcatgtagacgtg

SEQ ID NO: 1932349 - DNA, 25 bp, Homo sapien
ctaccccacggttagactgtctttg

SEQ ID NO: 1932350 - DNA, 25 bp, Homo sapien
gaccttgcagaagcgctgcggcttt

SEQ ID NO: 1932351 - DNA, 25 bp, Homo sapien
cctgataggagggttcttcaaaggc

SEQ ID NO: 1932352 - DNA, 25 bp, Homo sapien
ggctgcagcgatttcacttgtataa

SEQ ID NO: 1932353 - DNA, 25 bp, Homo sapien
cccacttggaaagtccagggtgcac

SEQ ID NO: 1932354 - DNA, 25 bp, Homo sapien
tgaaaaattccagcgtctattggct

SEQ ID NO: 1932355 - DNA, 25 bp, Homo sapien
tagcaggccataggtaattccgtgt

SEQ ID NO: 1932356 - DNA, 25 bp, Homo sapien
gtcaatacgactttccacaccagga

SEQ ID NO: 1932357 - DNA, 25 bp, Homo sapien
ttttgagagccggactagcaggcca

SEQ ID NO: 1932358 - DNA, 25 bp, Homo sapien
tacagttactaacaagcaggtttgc

SEQ ID NO: 1932359 - DNA, 25 bp, Homo sapien
gaaagataagctcttcgtggtgccc

SEQ ID NO: 1932360 - DNA, 25 bp, Homo sapien
gatgtcagattcagcccaaggttcc

SEQ ID NO: 1932361 - DNA, 25 bp, Homo sapien
gaaaagacacacaagtcgcgtgggt

SEQ ID NO: 1932362 - DNA, 25 bp, Homo sapien
tgaccacagggagtaaattggcctc

SEQ ID NO: 1932363 - DNA, 25 bp, Homo sapien
gctgaaacactcagaccaggtgcca

SEQ ID NO: 1932364 - DNA, 25 bp, Homo sapien
ccaggtgccatctgcagtgcgagtc

SEQ ID NO: 1932365 - DNA, 25 bp, Homo sapien
tgtgttagggaaacaacagaatccc

SEQ ID NO: 1932366 - DNA, 25 bp, Homo sapien
gctacaaagcaggtccattggcaga

SEQ ID NO: 1932367 - DNA, 25 bp, Homo sapien
tggacatctgctagaacactcccgc

SEQ ID NO: 1932368 - DNA, 25 bp, Homo sapien
cctgactcagaataaagtggtaaag

SEQ ID NO: 1932369 - DNA, 25 bp, Homo sapien
ttcctctcaggcctccggctgtgtg

SEQ ID NO: 1932370 - DNA, 25 bp, Homo sapien
gactgggacccccaaagtgtcctgc

SEQ ID NO: 1932371 - DNA, 25 bp, Homo sapien
ttttgctgatatttgtaggtggccc

SEQ ID NO: 1932372 - DNA, 25 bp, Homo sapien
tagttgggcaaccatagattctctt

SEQ ID NO: 1932373 - DNA, 25 bp, Homo sapien
gagatggcacatcccttagctttaa

SEQ ID NO: 1932374 - DNA, 25 bp, Homo sapien
taaattagccccacaatcttgacgg

SEQ ID NO: 1932375 - DNA, 25 bp, Homo sapien
aaaacacaggttggcaattcaggct

SEQ ID NO: 1932376 - DNA, 25 bp, Homo sapien
tcacaacgattctgctagaaggcag

SEQ ID NO: 1932377 - DNA, 25 bp, Homo sapien
tcacaaatttgttgtctcacaggtc

SEQ ID NO: 1932378 - DNA, 25 bp, Homo sapien
gacttgacagggctttagcgagatc

SEQ ID NO: 1932379 - DNA, 25 bp, Homo sapien
gaaacgtcagccaagaatctgtctg

SEQ ID NO: 1932380 - DNA, 25 bp, Homo sapien
catctgggcatctgtttctctaggt

SEQ ID NO: 1932381 - DNA, 25 bp, Homo sapien
ttcatctgggcatctgtttctctag

SEQ ID NO: 1932382 - DNA, 25 bp, Homo sapien
tctgggcatctgtttctctaggttt

SEQ ID NO: 1932383 - DNA, 25 bp, Homo sapien
ccctcttcatctgggcatctgtttc

SEQ ID NO: 1932384 - DNA, 25 bp, Homo sapien
ggaggtctctcggtaggtaggtgtg

SEQ ID NO: 1932385 - DNA, 25 bp, Homo sapien
tgcatatggagatctggttatctct

SEQ ID NO: 1932386 - DNA, 25 bp, Homo sapien
gatctggttatctctgcggaggttt

SEQ ID NO: 1932387 - DNA, 25 bp, Homo sapien
cggaggtttctgtgttgatgtctct

SEQ ID NO: 1932388 - DNA, 25 bp, Homo sapien
gggcagcgcactctgtaggactcct

SEQ ID NO: 1932389 - DNA, 25 bp, Homo sapien
tggaagggactgttgcagtaattga

SEQ ID NO: 1932390 - DNA, 25 bp, Homo sapien
gctggccttgaaagtcagactgtgg

SEQ ID NO: 1932391 - DNA, 25 bp, Homo sapien
caaacgttgcatcggcagtcacagc

SEQ ID NO: 1932392 - DNA, 25 bp, Homo sapien
actttttgacgctttctcttgcctt

SEQ ID NO: 1932393 - DNA, 25 bp, Homo sapien
ttaagcacgagtttcttcatgttac

SEQ ID NO: 1932394 - DNA, 25 bp, Homo sapien
tcttcatgttacttcccgaccccaa

SEQ ID NO: 1932395 - DNA, 25 bp, Homo sapien
ttcttctttaagcacgagtttcttc

SEQ ID NO: 1932396 - DNA, 25 bp, Homo sapien
taggcggcagcttaaagttctcatg

SEQ ID NO: 1932397 - DNA, 25 bp, Homo sapien
tgagataacacctgacacagatggt

SEQ ID NO: 1932398 - DNA, 25 bp, Homo sapien
ccaggatctgcgatgtggagcaact

SEQ ID NO: 1932399 - DNA, 25 bp, Homo sapien
gaagggcacctgatacaagttgggc

SEQ ID NO: 1932400 - DNA, 25 bp, Homo sapien
cataatgaaggctccaacctcctga

SEQ ID NO: 1932401 - DNA, 25 bp, Homo sapien
tctggtgtcaggtgacggcctgcat

SEQ ID NO: 1932402 - DNA, 25 bp, Homo sapien
gatggtgctagctcttcttataaga

SEQ ID NO: 1932403 - DNA, 25 bp, Homo sapien
tacattagggctacggtttcaaata

SEQ ID NO: 1932404 - DNA, 25 bp, Homo sapien
catataggaatgttggccagcaggc

SEQ ID NO: 1932405 - DNA, 25 bp, Homo sapien
attgttgccattgaataccctgcca

SEQ ID NO: 1932406 - DNA, 25 bp, Homo sapien
ggaaacttcactagccagatctagg

SEQ ID NO: 1932407 - DNA, 25 bp, Homo sapien
gagtcgtcttatgttaacctgccta

SEQ ID NO: 1932408 - DNA, 25 bp, Homo sapien
ctctgtgtgacacagattctcctct

SEQ ID NO: 1932409 - DNA, 25 bp, Homo sapien
tgtgtgacacagattctcctctgca

SEQ ID NO: 1932410 - DNA, 25 bp, Homo sapien
tgctctgtgtgacacagattctcct

SEQ ID NO: 1932411 - DNA, 25 bp, Homo sapien
tctgtgtgacacagattctcctctg

SEQ ID NO: 1932412 - DNA, 25 bp, Homo sapien
tgtagactggccacgctgccaactc

SEQ ID NO: 1932413 - DNA, 25 bp, Homo sapien
ctgtagactggccacgctgccaact

SEQ ID NO: 1932414 - DNA, 25 bp, Homo sapien
atcctgtagactggccacgctgcca

SEQ ID NO: 1932415 - DNA, 25 bp, Homo sapien
agaatcctgtagactggccacgctg

SEQ ID NO: 1932416 - DNA, 25 bp, Homo sapien
tggcatattccttaatatgaagcat

SEQ ID NO: 1932417 - DNA, 25 bp, Homo sapien
tatggcatattccttaatatgaagc

SEQ ID NO: 1932418 - DNA, 25 bp, Homo sapien
ggcatttagatgaatctatggcata

SEQ ID NO: 1932419 - DNA, 25 bp, Homo sapien
catttagatgaatctatggcatatt

SEQ ID NO: 1932420 - DNA, 25 bp, Homo sapien
cctggttatccatagtaggagagaa

SEQ ID NO: 1932421 - DNA, 25 bp, Homo sapien
aatggcctcgtagcaaccacgttcc

SEQ ID NO: 1932422 - DNA, 25 bp, Homo sapien
agtaccacacagaaggaactccaca

SEQ ID NO: 1932423 - DNA, 25 bp, Homo sapien
agagcaagtaccacacagaaggaac

SEQ ID NO: 1932424 - DNA, 25 bp, Homo sapien
ccattgtggtggcagatgagttcgt

SEQ ID NO: 1932425 - DNA, 25 bp, Homo sapien
tactgggtaacaagcaaataattct

SEQ ID NO: 1932426 - DNA, 25 bp, Homo sapien
gaattaataaccacgtcctgtcaag

SEQ ID NO: 1932427 - DNA, 25 bp, Homo sapien
tagtgatgaagacaatccattgtgg

SEQ ID NO: 1932428 - DNA, 25 bp, Homo sapien
cgatgaatcataatcctcataactg

SEQ ID NO: 1932429 - DNA, 25 bp, Homo sapien
tcaaaggcccattcctgagatgaag

SEQ ID NO: 1932430 - DNA, 25 bp, Homo sapien
tcatcatcgataatttactgtcaaa

SEQ ID NO: 1932431 - DNA, 25 bp, Homo sapien
agaggtggtcttcacaatcgatgaa

SEQ ID NO: 1932432 - DNA, 25 bp, Homo sapien
tccttggccttagctggtgctatag

SEQ ID NO: 1932433 - DNA, 25 bp, Homo sapien
ccttggccttagctggtgctatagg

SEQ ID NO: 1932434 - DNA, 25 bp, Homo sapien
gctggtgctataggaacctgtagct

SEQ ID NO: 1932435 - DNA, 25 bp, Homo sapien
ctggtgctataggaacctgtagctc

SEQ ID NO: 1932436 - DNA, 25 bp, Homo sapien
tatatgatgactcattatcacgaag

SEQ ID NO: 1932437 - DNA, 25 bp, Homo sapien
taattaccttgagtctttgcactgg

SEQ ID NO: 1932438 - DNA, 25 bp, Homo sapien
tcttgtgccatttaaatcagcagga

SEQ ID NO: 1932439 - DNA, 25 bp, Homo sapien
ccagagaactatctctaaatacaca

SEQ ID NO: 1932440 - DNA, 25 bp, Homo sapien
taacatgactggataggaacctctt

SEQ ID NO: 1932441 - DNA, 25 bp, Homo sapien
ggttaacaacgaagcacaggatagt

SEQ ID NO: 1932442 - DNA, 25 bp, Homo sapien
taagtgccacttagcatgtctggct

SEQ ID NO: 1932443 - DNA, 25 bp, Homo sapien
gcaaagggctctgaccatcgactga

SEQ ID NO: 1932444 - DNA, 25 bp, Homo sapien
gaggaggcttcagctacactgcaca

SEQ ID NO: 1932445 - DNA, 25 bp, Homo sapien
gaaaatagagagactgctaccccac

SEQ ID NO: 1932446 - DNA, 25 bp, Homo sapien
aaaattcactgccaaggactagctg

SEQ ID NO: 1932447 - DNA, 25 bp, Homo sapien
gactagctggccaacagtagcccta

SEQ ID NO: 1932448 - DNA, 25 bp, Homo sapien
aaaaaatcataatgacctatccgat

SEQ ID NO: 1932449 - DNA, 25 bp, Homo sapien
tgacctatccgatgcatcatatata

SEQ ID NO: 1932450 - DNA, 25 bp, Homo sapien
tgtaagtcgaaatggtaaaaaatca

SEQ ID NO: 1932451 - DNA, 25 bp, Homo sapien
tcataatgacctatccgatgcatca

SEQ ID NO: 1932452 - DNA, 25 bp, Homo sapien
tgacaagaatgaccctcctaatgct

SEQ ID NO: 1932453 - DNA, 25 bp, Homo sapien
gtactttcctagatgacatatcgag

SEQ ID NO: 1932454 - DNA, 25 bp, Homo sapien
aaggaaagccttaccaactatggca

SEQ ID NO: 1932455 - DNA, 25 bp, Homo sapien
tatcgagtcaacatgaagccttagc

SEQ ID NO: 1932456 - DNA, 25 bp, Homo sapien
aaatgggttcaaagtcgcctggaga

SEQ ID NO: 1932457 - DNA, 25 bp, Homo sapien
aatgggttcaaagtcgcctggagaa

SEQ ID NO: 1932458 - DNA, 25 bp, Homo sapien
atgggttcaaagtcgcctggagaaa

SEQ ID NO: 1932459 - DNA, 25 bp, Homo sapien
taagtgacagcagggttggcatgaa

SEQ ID NO: 1932460 - DNA, 25 bp, Homo sapien
gtaagtgacagcagggttggcatga

SEQ ID NO: 1932461 - DNA, 25 bp, Homo sapien
tctggttaggcagaggccaaaaaag

SEQ ID NO: 1932462 - DNA, 25 bp, Homo sapien
tgagcagcatcacacacatatgcca

SEQ ID NO: 1932463 - DNA, 25 bp, Homo sapien
tactgtgtgtaagagatgcctggca

SEQ ID NO: 1932464 - DNA, 25 bp, Homo sapien
tacacattagcgacagattacctcc

SEQ ID NO: 1932465 - DNA, 25 bp, Homo sapien
gcatgatcatatagaccccttagag

SEQ ID NO: 1932466 - DNA, 25 bp, Homo sapien
tcaaatgtgccgtgaagaaggccag

SEQ ID NO: 1932467 - DNA, 25 bp, Homo sapien
caggactgtgcatgtaccagctggt

SEQ ID NO: 1932468 - DNA, 25 bp, Homo sapien
taaggcttctgacctgtttccaaga

SEQ ID NO: 1932469 - DNA, 25 bp, Homo sapien
tctgaatctaactccgtggctaggg

SEQ ID NO: 1932470 - DNA, 25 bp, Homo sapien
ttggtcccataagcctaaactggta

SEQ ID NO: 1932471 - DNA, 25 bp, Homo sapien
tgaggcctcgctttgccgctgtcag

SEQ ID NO: 1932472 - DNA, 25 bp, Homo sapien
tggtaagaaatgacctgaggcctcg

SEQ ID NO: 1932473 - DNA, 25 bp, Homo sapien
tttcaggacccacatcataagatca

SEQ ID NO: 1932474 - DNA, 25 bp, Homo sapien
gatcacaagcctctttcaacaaggg

SEQ ID NO: 1932475 - DNA, 25 bp, Homo sapien
ttgacagatttccttagtgccacag

SEQ ID NO: 1932476 - DNA, 25 bp, Homo sapien
cacggcagaacaccatttcaggacc

SEQ ID NO: 1932477 - DNA, 25 bp, Homo sapien
ggaccacaacggagagcactgcttt

SEQ ID NO: 1932478 - DNA, 25 bp, Homo sapien
tttccagggctgacatagcctagtt

SEQ ID NO: 1932479 - DNA, 25 bp, Homo sapien
ggcatgtagagtgacaatccctgtc

SEQ ID NO: 1932480 - DNA, 25 bp, Homo sapien
tagtttctcgggtagaggagtcagt

SEQ ID NO: 1932481 - DNA, 25 bp, Homo sapien
cagaacactgcgtgagccacaagag

SEQ ID NO: 1932482 - DNA, 25 bp, Homo sapien
gggaaccagatcttaaaacacatct

SEQ ID NO: 1932483 - DNA, 25 bp, Homo sapien
cattactaagtcgatgcccactgaa

SEQ ID NO: 1932484 - DNA, 25 bp, Homo sapien
taacagtcacgggtcttctttgtgg

SEQ ID NO: 1932485 - DNA, 25 bp, Homo sapien
atgaaacagatcaccaggatgatga

SEQ ID NO: 1932486 - DNA, 25 bp, Homo sapien
tcaggaagacaagcatctggggtcc

SEQ ID NO: 1932487 - DNA, 25 bp, Homo sapien
ccacagagggcgaagaaggagagga

SEQ ID NO: 1932488 - DNA, 25 bp, Homo sapien
ggagacctccaatcactctcaggaa

SEQ ID NO: 1932489 - DNA, 25 bp, Homo sapien
tataacaagcttgggagcaaaccac

SEQ ID NO: 1932490 - DNA, 25 bp, Homo sapien
gaatatttttatcgccccgcaaaga

SEQ ID NO: 1932491 - DNA, 25 bp, Homo sapien
gaagacctacatgggtacctccagc

SEQ ID NO: 1932492 - DNA, 25 bp, Homo sapien
gctgctggacctcgtttggaccctg

SEQ ID NO: 1932493 - DNA, 25 bp, Homo sapien
attttcttctacattcgcaaggttc

SEQ ID NO: 1932494 - DNA, 25 bp, Homo sapien
tttcttctacattcgcaaggttctg

SEQ ID NO: 1932495 - DNA, 25 bp, Homo sapien
cttctacattcgcaaggttctgcac

SEQ ID NO: 1932496 - DNA, 25 bp, Homo sapien
ttttcttctacattcgcaaggttct

SEQ ID NO: 1932497 - DNA, 25 bp, Homo sapien
tctcttttcatctgttagagacaaa

SEQ ID NO: 1932498 - DNA, 25 bp, Homo sapien
ttaaagattgtttctcaatcatctg

SEQ ID NO: 1932499 - DNA, 25 bp, Homo sapien
tttctcttttcatctgttagagaca

SEQ ID NO: 1932500 - DNA, 25 bp, Homo sapien
gattgtttctcaatcatctgatgca

SEQ ID NO: 1932501 - DNA, 25 bp, Homo sapien
tgagctaaggctccacatgcccttc

SEQ ID NO: 1932502 - DNA, 25 bp, Homo sapien
ctgagctaaggctccacatgccctt

SEQ ID NO: 1932503 - DNA, 25 bp, Homo sapien
agctaaggctccacatgcccttctc

SEQ ID NO: 1932504 - DNA, 25 bp, Homo sapien
ctccaactcccatgcaccttccagg

SEQ ID NO: 1932505 - DNA, 25 bp, Homo sapien
cctccagacctatggaatcagagct

SEQ ID NO: 1932506 - DNA, 25 bp, Homo sapien
tcagagcttgagtggtagcacccaa

SEQ ID NO: 1932507 - DNA, 25 bp, Homo sapien
aatgatactgattcctgtgcctccc

SEQ ID NO: 1932508 - DNA, 25 bp, Homo sapien
ggcaaaataagcagtagtgctcctt

SEQ ID NO: 1932509 - DNA, 25 bp, Homo sapien
caaaaaaaagtcaagctagaaatga

SEQ ID NO: 1932510 - DNA, 25 bp, Homo sapien
aaaaaaaagtcaagctagaaatgat

SEQ ID NO: 1932511 - DNA, 25 bp, Homo sapien
gaagtagttaaaatgccgattccga

SEQ ID NO: 1932512 - DNA, 25 bp, Homo sapien
caaccacccagataattctgctgtc

SEQ ID NO: 1932513 - DNA, 25 bp, Homo sapien
tggacgtccaacaaccacccagata

SEQ ID NO: 1932514 - DNA, 25 bp, Homo sapien
gccagcatgagacactggacgtcca

SEQ ID NO: 1932515 - DNA, 25 bp, Homo sapien
ctggtttgcgacacttagagcagca

SEQ ID NO: 1932516 - DNA, 25 bp, Homo sapien
gtttgcgacacttagagcagcaaaa

SEQ ID NO: 1932517 - DNA, 25 bp, Homo sapien
ttgcgacacttagagcagcaaaaat

SEQ ID NO: 1932518 - DNA, 25 bp, Homo sapien
tggtttgcgacacttagagcagcaa

SEQ ID NO: 1932519 - DNA, 25 bp, Homo sapien
ttaaatggctcaacagagagatggc

SEQ ID NO: 1932520 - DNA, 25 bp, Homo sapien
agtaggaattacacagctctgtcag

SEQ ID NO: 1932521 - DNA, 25 bp, Homo sapien
cacagatggtgtgagattctttaca

SEQ ID NO: 1932522 - DNA, 25 bp, Homo sapien
cagggagaatacacgggagagcatt

SEQ ID NO: 1932523 - DNA, 25 bp, Homo sapien
ggcccatcacgcgcggcggcttttg

SEQ ID NO: 1932524 - DNA, 25 bp, Homo sapien
gctcgtcctaaacaggcattctgaa

SEQ ID NO: 1932525 - DNA, 25 bp, Homo sapien
catttggttcaggtcggatgcatga

SEQ ID NO: 1932526 - DNA, 25 bp, Homo sapien
tgcatgagcccgagctcgtcctaaa

SEQ ID NO: 1932527 - DNA, 25 bp, Homo sapien
gacagccctcctcgtaggacccgct

SEQ ID NO: 1932528 - DNA, 25 bp, Homo sapien
acagccctcctcgtaggacccgctg

SEQ ID NO: 1932529 - DNA, 25 bp, Homo sapien
accacagcgaggacgtctggccgtg

SEQ ID NO: 1932530 - DNA, 25 bp, Homo sapien
ttccaccacagcgaggacgtctggc

SEQ ID NO: 1932531 - DNA, 25 bp, Homo sapien
caccacagcgaggacgtctggccgt

SEQ ID NO: 1932532 - DNA, 25 bp, Homo sapien
catttccaccacagcgaggacgtct

SEQ ID NO: 1932533 - DNA, 25 bp, Homo sapien
ccagcgcgatgatgtcgaaggcgat

SEQ ID NO: 1932534 - DNA, 25 bp, Homo sapien
cggccagcgcgatgatgtcgaaggc

SEQ ID NO: 1932535 - DNA, 25 bp, Homo sapien
gccagcgcgatgatgtcgaaggcga

SEQ ID NO: 1932536 - DNA, 25 bp, Homo sapien
gccggccagcgcgatgatgtcgaag

SEQ ID NO: 1932537 - DNA, 25 bp, Homo sapien
gcagcgctcgcaggccaggccgcag

SEQ ID NO: 1932538 - DNA, 25 bp, Homo sapien
cgccacaaaagcgaagaggccgcgg

SEQ ID NO: 1932539 - DNA, 25 bp, Homo sapien
cgcgggacgggcgacagcagagagt

SEQ ID NO: 1932540 - DNA, 25 bp, Homo sapien
cgcgggcgccgccacaaaagcgaag

SEQ ID NO: 1932541 - DNA, 25 bp, Homo sapien
agcgggtcggaggagcgcgcgggac

SEQ ID NO: 1932542 - DNA, 25 bp, Homo sapien
ggtcatatgtattctctcctctgta

SEQ ID NO: 1932543 - DNA, 25 bp, Homo sapien
tgctacacgatataaagttgtgatc

SEQ ID NO: 1932544 - DNA, 25 bp, Homo sapien
acattatctgctgcggcgtttttac

SEQ ID NO: 1932545 - DNA, 25 bp, Homo sapien
tcctagtttgcagcttaaacgaaat

SEQ ID NO: 1932546 - DNA, 25 bp, Homo sapien
catggagcgggcgtgattcatcagc

SEQ ID NO: 1932547 - DNA, 25 bp, Homo sapien
gtgattcatcagcatccgcgccggg

SEQ ID NO: 1932548 - DNA, 25 bp, Homo sapien
cgggcgtgattcatcagcatccgcg

SEQ ID NO: 1932549 - DNA, 25 bp, Homo sapien
gagcgggcgtgattcatcagcatcc

SEQ ID NO: 1932550 - DNA, 25 bp, Homo sapien
aagccatcaaggagagctgcacctg

SEQ ID NO: 1932551 - DNA, 25 bp, Homo sapien
cgtccgggagcaagtacaaagccat

SEQ ID NO: 1932552 - DNA, 25 bp, Homo sapien
tcatgggtgccgttctggcgattgc

SEQ ID NO: 1932553 - DNA, 25 bp, Homo sapien
cgattgcgagagtcgcctcgggaaa

SEQ ID NO: 1932554 - DNA, 25 bp, Homo sapien
agagatcccgtgactgggaagggca

SEQ ID NO: 1932555 - DNA, 25 bp, Homo sapien
ttatttcagaggctgttggtaggac

SEQ ID NO: 1932556 - DNA, 25 bp, Homo sapien
aggaaactgggtccagctgtgcttg

SEQ ID NO: 1932557 - DNA, 25 bp, Homo sapien
atttcagaggctgttggtaggacag

SEQ ID NO: 1932558 - DNA, 25 bp, Homo sapien
cctctctcatggcagtccatggatg

SEQ ID NO: 1932559 - DNA, 25 bp, Homo sapien
tctctcatggcagtccatggatgag

SEQ ID NO: 1932560 - DNA, 25 bp, Homo sapien
aagaaatttctttgagctggcctct

SEQ ID NO: 1932561 - DNA, 25 bp, Homo sapien
ctcatggcagtccatggatgagggt

SEQ ID NO: 1932562 - DNA, 25 bp, Homo sapien
cataaccaatctgaagagctgctgg

SEQ ID NO: 1932563 - DNA, 25 bp, Homo sapien
ggatagccccggcatgtgcagctgc

SEQ ID NO: 1932564 - DNA, 25 bp, Homo sapien
gatcatgacccgtagggatccagag

SEQ ID NO: 1932565 - DNA, 25 bp, Homo sapien
gatgcaccctccctaaaggaatgat

SEQ ID NO: 1932566 - DNA, 25 bp, Homo sapien
catgttgctatttaaagggtgtagg

SEQ ID NO: 1932567 - DNA, 25 bp, Homo sapien
tatagctgagtgtgcgattcgaaca

SEQ ID NO: 1932568 - DNA, 25 bp, Homo sapien
ctgggtggtttgtgtgaagaacata

SEQ ID NO: 1932569 - DNA, 25 bp, Homo sapien
caataaaagagtgaagggtacagat

SEQ ID NO: 1932570 - DNA, 25 bp, Homo sapien
ttaataatgtattctgtccttttcc

SEQ ID NO: 1932571 - DNA, 25 bp, Homo sapien
gaacatatgttgagaaatattcagg

SEQ ID NO: 1932572 - DNA, 25 bp, Homo sapien
cttttagggatagcatctctccctc

SEQ ID NO: 1932573 - DNA, 25 bp, Homo sapien
gagtgtgtcatattctctgagtgaa

SEQ ID NO: 1932574 - DNA, 25 bp, Homo sapien
ttaatggttatgtcaacagtcgcac

SEQ ID NO: 1932575 - DNA, 25 bp, Homo sapien
gcacaagcagaacgtttaatggtta

SEQ ID NO: 1932576 - DNA, 25 bp, Homo sapien
ctatgcacaagcagaacgtttaatg

SEQ ID NO: 1932577 - DNA, 25 bp, Homo sapien
cagaacgtttaatggttatgtcaac

SEQ ID NO: 1932578 - DNA, 25 bp, Homo sapien
tgacacaggttaactccaccagaaa

SEQ ID NO: 1932579 - DNA, 25 bp, Homo sapien
ccttgccgaagataggagttgacac

SEQ ID NO: 1932580 - DNA, 25 bp, Homo sapien
gaaatcgtggaaagcctcttaatgg

SEQ ID NO: 1932581 - DNA, 25 bp, Homo sapien
agtgccttctgctagccttgccgaa

SEQ ID NO: 1932582 - DNA, 25 bp, Homo sapien
tctctgacgagagtagttaggactt

SEQ ID NO: 1932583 - DNA, 25 bp, Homo sapien
ccgaatggaattatggctggctgtt

SEQ ID NO: 1932584 - DNA, 25 bp, Homo sapien
gaggttattaactgatacagctggc

SEQ ID NO: 1932585 - DNA, 25 bp, Homo sapien
tacagctggctgagtcttcaaaggc

SEQ ID NO: 1932586 - DNA, 25 bp, Homo sapien
gatggagcagaaaagccaagtcaca

SEQ ID NO: 1932587 - DNA, 25 bp, Homo sapien
ggcttgtgggtgctagtcactgcta

SEQ ID NO: 1932588 - DNA, 25 bp, Homo sapien
ggtgctagtcactgctattcttctt

SEQ ID NO: 1932589 - DNA, 25 bp, Homo sapien
gtgtagatgatggagcagaaaagcc

SEQ ID NO: 1932590 - DNA, 25 bp, Homo sapien
tactgtcgtcagtgccttggtctgg

SEQ ID NO: 1932591 - DNA, 25 bp, Homo sapien
ttatccctctggtgcctagcggagc

SEQ ID NO: 1932592 - DNA, 25 bp, Homo sapien
gactgtttgagtcccctctcggtaa

SEQ ID NO: 1932593 - DNA, 25 bp, Homo sapien
gcatataaatgcagaggccctcatc

SEQ ID NO: 1932594 - DNA, 25 bp, Homo sapien
tagaatgcctggtagccttgggaag

SEQ ID NO: 1932595 - DNA, 25 bp, Homo sapien
tgaggaacctttcatggtcaagtgt

SEQ ID NO: 1932596 - DNA, 25 bp, Homo sapien
ctagggtctgagttaactgcaaagt

SEQ ID NO: 1932597 - DNA, 25 bp, Homo sapien
aagacagcattccagacctagggtc

SEQ ID NO: 1932598 - DNA, 25 bp, Homo sapien
catcaattagccacctcgatatatt

SEQ ID NO: 1932599 - DNA, 25 bp, Homo sapien
tagccacctcgatatatttaaggtc

SEQ ID NO: 1932600 - DNA, 25 bp, Homo sapien
attatacatcaattagccacctcga

SEQ ID NO: 1932601 - DNA, 25 bp, Homo sapien
caattagccacctcgatatatttaa

SEQ ID NO: 1932602 - DNA, 25 bp, Homo sapien
tggtttgcagaataaggagcagctg

SEQ ID NO: 1932603 - DNA, 25 bp, Homo sapien
gagggaaagcccaagttgcctgcag

SEQ ID NO: 1932604 - DNA, 25 bp, Homo sapien
aaagcccaagttgcctgcaggactc

SEQ ID NO: 1932605 - DNA, 25 bp, Homo sapien
ttctggttgagtgatggtcttacgg

SEQ ID NO: 1932606 - DNA, 25 bp, Homo sapien
cagtttgttctccataagggttgga

SEQ ID NO: 1932607 - DNA, 25 bp, Homo sapien
ccataagggttggaattagtagatc

SEQ ID NO: 1932608 - DNA, 25 bp, Homo sapien
taagggttggaattagtagatctca

SEQ ID NO: 1932609 - DNA, 25 bp, Homo sapien
tctccataagggttggaattagtag

SEQ ID NO: 1932610 - DNA, 25 bp, Homo sapien
tgaggctccagttagccatgtttcc

SEQ ID NO: 1932611 - DNA, 25 bp, Homo sapien
gctccagttagccatgtttccacca

SEQ ID NO: 1932612 - DNA, 25 bp, Homo sapien
gaggctccagttagccatgtttcca

SEQ ID NO: 1932613 - DNA, 25 bp, Homo sapien
ccagttagccatgtttccaccactg

SEQ ID NO: 1932614 - DNA, 25 bp, Homo sapien
aagggtcatcggcactgactttgga

SEQ ID NO: 1932615 - DNA, 25 bp, Homo sapien
cttagagtagcggttttcagttgca

SEQ ID NO: 1932616 - DNA, 25 bp, Homo sapien
ggttcgctgcaagcaatattttata

SEQ ID NO: 1932617 - DNA, 25 bp, Homo sapien
tttgaccaaatgtaaggttcgctgc

SEQ ID NO: 1932618 - DNA, 25 bp, Homo sapien
ctaaatcagtgatgttgcaggaaga

SEQ ID NO: 1932619 - DNA, 25 bp, Homo sapien
attgattgagtgttactgtaggagc

SEQ ID NO: 1932620 - DNA, 25 bp, Homo sapien
cagagtgggccatctaaatcagtga

SEQ ID NO: 1932621 - DNA, 25 bp, Homo sapien
gaattgattgagtgttactgtagga

SEQ ID NO: 1932622 - DNA, 25 bp, Homo sapien
tgtcaacactcacattagtggcctt

SEQ ID NO: 1932623 - DNA, 25 bp, Homo sapien
ctttcctattgggtgtctccaccag

SEQ ID NO: 1932624 - DNA, 25 bp, Homo sapien
gattttgatctccatgtcaacactc

SEQ ID NO: 1932625 - DNA, 25 bp, Homo sapien
taacctgacaaagtctttcctattg

SEQ ID NO: 1932626 - DNA, 25 bp, Homo sapien
gcagcttgatgcaaagtagtctcta

SEQ ID NO: 1932627 - DNA, 25 bp, Homo sapien
tttacagacctaagcagaatgagag

SEQ ID NO: 1932628 - DNA, 25 bp, Homo sapien
gatttcaaccagaaccatcactgag

SEQ ID NO: 1932629 - DNA, 25 bp, Homo sapien
tgacagcagtacttctcagaggtat

SEQ ID NO: 1932630 - DNA, 25 bp, Homo sapien
caagaggttacaaatagcagggagg

SEQ ID NO: 1932631 - DNA, 25 bp, Homo sapien
ggtgtttctgaattcaagggccata

SEQ ID NO: 1932632 - DNA, 25 bp, Homo sapien
taatagatacccttgactttgccag

SEQ ID NO: 1932633 - DNA, 25 bp, Homo sapien
gagagtcaagtagccttcgctgtga

SEQ ID NO: 1932634 - DNA, 25 bp, Homo sapien
tatgcttgggcaccacttaggtgac

SEQ ID NO: 1932635 - DNA, 25 bp, Homo sapien
tcagaataaagtgccctgtagccaa

SEQ ID NO: 1932636 - DNA, 25 bp, Homo sapien
tgctaagggcatcaggtcgacatcc

SEQ ID NO: 1932637 - DNA, 25 bp, Homo sapien
ccccagggagatttagtgtggcctt

SEQ ID NO: 1932638 - DNA, 25 bp, Homo sapien
cccaaaggcttcacggaaatttgca

SEQ ID NO: 1932639 - DNA, 25 bp, Homo sapien
ggctcctggcttacagatttttgaa

SEQ ID NO: 1932640 - DNA, 25 bp, Homo sapien
gatgagactacttgttgtaccttca

SEQ ID NO: 1932641 - DNA, 25 bp, Homo sapien
tctgtaaagagtctacccaaaggct

SEQ ID NO: 1932642 - DNA, 25 bp, Homo sapien
cactctagataaagccagtgggtgg

SEQ ID NO: 1932643 - DNA, 25 bp, Homo sapien
gtgagcatccctggctacctcggga

SEQ ID NO: 1932644 - DNA, 25 bp, Homo sapien
tacctcgggattatgtgcaagctgc

SEQ ID NO: 1932645 - DNA, 25 bp, Homo sapien
tattgccctaatcatgctaagagac

SEQ ID NO: 1932646 - DNA, 25 bp, Homo sapien
tctcttgaaggacaagctgctctta

SEQ ID NO: 1932647 - DNA, 25 bp, Homo sapien
tatgctctccactctactatcaacg

SEQ ID NO: 1932648 - DNA, 25 bp, Homo sapien
gaaaggcaatttcgtcttcttggaa

SEQ ID NO: 1932649 - DNA, 25 bp, Homo sapien
gcgcccttgtcgctgcaggcattga

SEQ ID NO: 1932650 - DNA, 25 bp, Homo sapien
cctcctgtccgttggctttcgcgtg

SEQ ID NO: 1932651 - DNA, 25 bp, Homo sapien
ctcctgtccgttggctttcgcgtgg

SEQ ID NO: 1932652 - DNA, 25 bp, Homo sapien
ttcgcgtggggagtgcctgctgcct

SEQ ID NO: 1932653 - DNA, 25 bp, Homo sapien
gctttcgcgtggggagtgcctgctg

SEQ ID NO: 1932654 - DNA, 25 bp, Homo sapien
taaactggcagtaggatcatgcccc

SEQ ID NO: 1932655 - DNA, 25 bp, Homo sapien
tggaatcagcatcgcatgcaggctg

SEQ ID NO: 1932656 - DNA, 25 bp, Homo sapien
ttctgtgaataaaggctggccgctg

SEQ ID NO: 1932657 - DNA, 25 bp, Homo sapien
gaaagtggcgcaacaatcaggtcca

SEQ ID NO: 1932658 - DNA, 25 bp, Homo sapien
cacacacgtgtgtcccatgtctaaa

SEQ ID NO: 1932659 - DNA, 25 bp, Homo sapien
tagattcagaccaagactctccgca

SEQ ID NO: 1932660 - DNA, 25 bp, Homo sapien
cataatgatttgacccatgcagtcc

SEQ ID NO: 1932661 - DNA, 25 bp, Homo sapien
gatagccaggccctaccaattttta

SEQ ID NO: 1932662 - DNA, 25 bp, Homo sapien
cacctgggagagttacgttcttggc

SEQ ID NO: 1932663 - DNA, 25 bp, Homo sapien
gggcaagtgccaggtgagtcctaaa

SEQ ID NO: 1932664 - DNA, 25 bp, Homo sapien
agcaattaccgcctagaccagagga

SEQ ID NO: 1932665 - DNA, 25 bp, Homo sapien
cagctgctactcaaggaggaaattc

SEQ ID NO: 1932666 - DNA, 25 bp, Homo sapien
aactctcctcgctcagagaaccgcc

SEQ ID NO: 1932667 - DNA, 25 bp, Homo sapien
ctaactctcctcgctcagagaaccg

SEQ ID NO: 1932668 - DNA, 25 bp, Homo sapien
ctctcctcgctcagagaaccgccac

SEQ ID NO: 1932669 - DNA, 25 bp, Homo sapien
taactctcctcgctcagagaaccgc

SEQ ID NO: 1932670 - DNA, 25 bp, Homo sapien
tctccctccgagatgacggtcatgg

SEQ ID NO: 1932671 - DNA, 25 bp, Homo sapien
tgacctcgacctctggaatctaggg

SEQ ID NO: 1932672 - DNA, 25 bp, Homo sapien
gaaaaggacagactccgaggcatca

SEQ ID NO: 1932673 - DNA, 25 bp, Homo sapien
catctgaatctctacggccgaggac

SEQ ID NO: 1932674 - DNA, 25 bp, Homo sapien
ggacaaattacccatgcatgccatg

SEQ ID NO: 1932675 - DNA, 25 bp, Homo sapien
gaagctagctacataactcccactg

SEQ ID NO: 1932676 - DNA, 25 bp, Homo sapien
tcttcatgacaacaactcagtctgt

SEQ ID NO: 1932677 - DNA, 25 bp, Homo sapien
tgtgtctcttagctaagtgcaggag

SEQ ID NO: 1932678 - DNA, 25 bp, Homo sapien
tccattcttctggtcaaaaagatgc

SEQ ID NO: 1932679 - DNA, 25 bp, Homo sapien
gaaccggctgcgttggtctccggca

SEQ ID NO: 1932680 - DNA, 25 bp, Homo sapien
ggtcgactgggggtcattacctcat

SEQ ID NO: 1932681 - DNA, 25 bp, Homo sapien
tgggggtcattacctcatcattccc

SEQ ID NO: 1932682 - DNA, 25 bp, Homo sapien
ctctgaggatgaaccggctgcgttg

SEQ ID NO: 1932683 - DNA, 25 bp, Homo sapien
cacgtgtgagcattcaacaacccta

SEQ ID NO: 1932684 - DNA, 25 bp, Homo sapien
gaatctgatctacctgggttctttc

SEQ ID NO: 1932685 - DNA, 25 bp, Homo sapien
tgctagctttaacaggaatctgatc

SEQ ID NO: 1932686 - DNA, 25 bp, Homo sapien
ttcagctgcatatgggcagagggca

SEQ ID NO: 1932687 - DNA, 25 bp, Homo sapien
tgctccgtcctgttgagataggcag

SEQ ID NO: 1932688 - DNA, 25 bp, Homo sapien
ctgctccgtcctgttgagataggca

SEQ ID NO: 1932689 - DNA, 25 bp, Homo sapien
tatccgcactgttctcggctggctc

SEQ ID NO: 1932690 - DNA, 25 bp, Homo sapien
cccatcgcccccagtatccgcactg

SEQ ID NO: 1932691 - DNA, 25 bp, Homo sapien
tcgcccccagtatccgcactgttct

SEQ ID NO: 1932692 - DNA, 25 bp, Homo sapien
ttctcggctggctcctcctgcttgg

SEQ ID NO: 1932693 - DNA, 25 bp, Homo sapien
ctcaagaaccgaggtgccagggtgc

SEQ ID NO: 1932694 - DNA, 25 bp, Homo sapien
ggtgcgtggcatgagagccagcttg

SEQ ID NO: 1932695 - DNA, 25 bp, Homo sapien
gacatcaggctgaaccatggggaca

SEQ ID NO: 1932696 - DNA, 25 bp, Homo sapien
cactctgctgggagacatggatcct

SEQ ID NO: 1932697 - DNA, 25 bp, Homo sapien
cggaagcgagcttgtcacagaggca

SEQ ID NO: 1932698 - DNA, 25 bp, Homo sapien
tgcaatgcttccgtggttatcaggg

SEQ ID NO: 1932699 - DNA, 25 bp, Homo sapien
caaaatctttctgcggaggtggtac

SEQ ID NO: 1932700 - DNA, 25 bp, Homo sapien
tggtaccaccaggaacagtttgggc

SEQ ID NO: 1932701 - DNA, 25 bp, Homo sapien
ctttcatgaatttggggtcaagagg

SEQ ID NO: 1932702 - DNA, 25 bp, Homo sapien
gtgaaaggcggcctggtgtctttca

SEQ ID NO: 1932703 - DNA, 25 bp, Homo sapien
gcagaaaggaatgagagcttctggc

SEQ ID NO: 1932704 - DNA, 25 bp, Homo sapien
aaaggcaccaatcaggtggggagca

SEQ ID NO: 1932705 - DNA, 25 bp, Homo sapien
tgacaggaggtgggggaggaaggaa

SEQ ID NO: 1932706 - DNA, 25 bp, Homo sapien
ctgtgacaggaggtgggggaggaag

SEQ ID NO: 1932707 - DNA, 25 bp, Homo sapien
tgtgacaggaggtgggggaggaagg

SEQ ID NO: 1932708 - DNA, 25 bp, Homo sapien
gtgacaggaggtgggggaggaagga

SEQ ID NO: 1932709 - DNA, 25 bp, Homo sapien
ctgcaggacaagggaatggaggaga

SEQ ID NO: 1932710 - DNA, 25 bp, Homo sapien
caggacaagggaatggaggagaggg

SEQ ID NO: 1932711 - DNA, 25 bp, Homo sapien
ggaggaggagccgggggagagccca

SEQ ID NO: 1932712 - DNA, 25 bp, Homo sapien
gaggaggagccgggggagagcccac

SEQ ID NO: 1932713 - DNA, 25 bp, Homo sapien
ggctggatccagcttcttcatagtg

SEQ ID NO: 1932714 - DNA, 25 bp, Homo sapien
gctggatccagcttcttcatagtgc

SEQ ID NO: 1932715 - DNA, 25 bp, Homo sapien
tggatccagcttcttcatagtgcca

SEQ ID NO: 1932716 - DNA, 25 bp, Homo sapien
ggatccagcttcttcatagtgccac

SEQ ID NO: 1932717 - DNA, 25 bp, Homo sapien
tccttcagtagaagtactagaagaa

SEQ ID NO: 1932718 - DNA, 25 bp, Homo sapien
ttccttcagtagaagtactagaaga

SEQ ID NO: 1932719 - DNA, 25 bp, Homo sapien
ttcagtagaagtactagaagaaaga

SEQ ID NO: 1932720 - DNA, 25 bp, Homo sapien
ccttcagtagaagtactagaagaaa

SEQ ID NO: 1932721 - DNA, 25 bp, Homo sapien
ccttcttggacatggcggactggcc

SEQ ID NO: 1932722 - DNA, 25 bp, Homo sapien
aaaacattgatcacgctgtgcctgg

SEQ ID NO: 1932723 - DNA, 25 bp, Homo sapien
gtttgactgaaccaccgggcacttg

SEQ ID NO: 1932724 - DNA, 25 bp, Homo sapien
tgtagtcaatgtaataaccccaggg

SEQ ID NO: 1932725 - DNA, 25 bp, Homo sapien
tgttggacgtttggtccaaactgca

SEQ ID NO: 1932726 - DNA, 25 bp, Homo sapien
gtttggtccaaactgcagctgctca

SEQ ID NO: 1932727 - DNA, 25 bp, Homo sapien
ttacttgtgggagtggaatagccag

SEQ ID NO: 1932728 - DNA, 25 bp, Homo sapien
ccaggagttgctaaatgcggcttca

SEQ ID NO: 1932729 - DNA, 25 bp, Homo sapien
catttagagggacggctgagtcaca

SEQ ID NO: 1932730 - DNA, 25 bp, Homo sapien
tgtgaaagaatggtggcatggccct

SEQ ID NO: 1932731 - DNA, 25 bp, Homo sapien
gaggatttgtattcccagggctccg

SEQ ID NO: 1932732 - DNA, 25 bp, Homo sapien
cagagggacaacagtgcgggttcac

SEQ ID NO: 1932733 - DNA, 25 bp, Homo sapien
tggtctctggattttatccttgcat

SEQ ID NO: 1932734 - DNA, 25 bp, Homo sapien
ggtggtctctggattttatccttgc

SEQ ID NO: 1932735 - DNA, 25 bp, Homo sapien
gaggtggtctctggattttatcctt

SEQ ID NO: 1932736 - DNA, 25 bp, Homo sapien
gcatgtgatgagccagaacttttac

SEQ ID NO: 1932737 - DNA, 25 bp, Homo sapien
caaaagtgttccagtccctgaggca

SEQ ID NO: 1932738 - DNA, 25 bp, Homo sapien
cagaacgcggaagactatggaagcc

SEQ ID NO: 1932739 - DNA, 25 bp, Homo sapien
cacagacatgttgccagaggaacct

SEQ ID NO: 1932740 - DNA, 25 bp, Homo sapien
tcaaggcgggaagggaatacgatcc

SEQ ID NO: 1932741 - DNA, 25 bp, Homo sapien
gataaagcagaaagaggcttgttac

SEQ ID NO: 1932742 - DNA, 25 bp, Homo sapien
gagataaagcagaaagaggcttgtt

SEQ ID NO: 1932743 - DNA, 25 bp, Homo sapien
ctggagataaagcagaaagaggctt

SEQ ID NO: 1932744 - DNA, 25 bp, Homo sapien
tggagataaagcagaaagaggcttg

SEQ ID NO: 1932745 - DNA, 25 bp, Homo sapien
gttaaccgagctgtgactgcaaagg

SEQ ID NO: 1932746 - DNA, 25 bp, Homo sapien
tcaaagctacaagaggaggagtcaa

SEQ ID NO: 1932747 - DNA, 25 bp, Homo sapien
ggtggctatactcgacaacaggttt

SEQ ID NO: 1932748 - DNA, 25 bp, Homo sapien
caaatgctgacggaaaagctgcaga

SEQ ID NO: 1932749 - DNA, 25 bp, Homo sapien
gctggcctggcgatcgaaattctcc

SEQ ID NO: 1932750 - DNA, 25 bp, Homo sapien
tgtaaattagagaccgccgaaggct

SEQ ID NO: 1932751 - DNA, 25 bp, Homo sapien
ccttctgtatgttgtcagggactcc

SEQ ID NO: 1932752 - DNA, 25 bp, Homo sapien
ttcggtcgtcttaccagagtgtctg

SEQ ID NO: 1932753 - DNA, 25 bp, Homo sapien
aatgtagagtagtagaacaagcaaa

SEQ ID NO: 1932754 - DNA, 25 bp, Homo sapien
taatgtagagtagtagaacaagcaa

SEQ ID NO: 1932755 - DNA, 25 bp, Homo sapien
ctaatgtagagtagtagaacaagca

SEQ ID NO: 1932756 - DNA, 25 bp, Homo sapien
atgtagagtagtagaacaagcaaag

SEQ ID NO: 1932757 - DNA, 25 bp, Homo sapien
tgtactttagcatcccctatggcac

SEQ ID NO: 1932758 - DNA, 25 bp, Homo sapien
cattttttgagggtacagactgtga

SEQ ID NO: 1932759 - DNA, 25 bp, Homo sapien
caaaccatttgaggatgaacaccta

SEQ ID NO: 1932760 - DNA, 25 bp, Homo sapien
gacacacgtcattgaaggcaccaaa

SEQ ID NO: 1932761 - DNA, 25 bp, Homo sapien
tcaccagtgccatggcaaaaagctt

SEQ ID NO: 1932762 - DNA, 25 bp, Homo sapien
taagggccctgctttgtatgacttg

SEQ ID NO: 1932763 - DNA, 25 bp, Homo sapien
ggatgctatgggtttccagagtaaa

SEQ ID NO: 1932764 - DNA, 25 bp, Homo sapien
tattagccccttacaagctcaccag

SEQ ID NO: 1932765 - DNA, 25 bp, Homo sapien
aaccactaacccatgctccttgtgg

SEQ ID NO: 1932766 - DNA, 25 bp, Homo sapien
tccttgtgggctatggaggtgataa

SEQ ID NO: 1932767 - DNA, 25 bp, Homo sapien
gctatggaggtgataaggcaggaaa

SEQ ID NO: 1932768 - DNA, 25 bp, Homo sapien
ggtgataaggcaggaaaattttgat

SEQ ID NO: 1932769 - DNA, 25 bp, Homo sapien
gacaccagtgtttggcgacatagtc

SEQ ID NO: 1932770 - DNA, 25 bp, Homo sapien
tggttggaccactgagttctttgac

SEQ ID NO: 1932771 - DNA, 25 bp, Homo sapien
cactcttaagatgaatggttggacc

SEQ ID NO: 1932772 - DNA, 25 bp, Homo sapien
catagtcttcgaacccaacaagcag

SEQ ID NO: 1932773 - DNA, 25 bp, Homo sapien
aacctgtctggctagcaaagcgtac

SEQ ID NO: 1932774 - DNA, 25 bp, Homo sapien
caaaaagctgtagtcattctcccaa

SEQ ID NO: 1932775 - DNA, 25 bp, Homo sapien
tctcccaagtacattctgaacctgt

SEQ ID NO: 1932776 - DNA, 25 bp, Homo sapien
gcataaaacaaaaagctgtagtcat

SEQ ID NO: 1932777 - DNA, 25 bp, Homo sapien
tgagtattaaggtcggagaagtcac

SEQ ID NO: 1932778 - DNA, 25 bp, Homo sapien
tgtttgggcttgctgtcgcatcttc

SEQ ID NO: 1932779 - DNA, 25 bp, Homo sapien
tgttaataggcaccacgtcagcctg

SEQ ID NO: 1932780 - DNA, 25 bp, Homo sapien
cgacttggtccagttcgtctgagta

SEQ ID NO: 1932781 - DNA, 25 bp, Homo sapien
tcagtggcagaacacatgattagcc

SEQ ID NO: 1932782 - DNA, 25 bp, Homo sapien
cccagacaagcagggcacagataaa

SEQ ID NO: 1932783 - DNA, 25 bp, Homo sapien
tagtctactctcaatacagcaggcg

SEQ ID NO: 1932784 - DNA, 25 bp, Homo sapien
tcatgcctcccagtgtgtataaaca

SEQ ID NO: 1932785 - DNA, 25 bp, Homo sapien
agcacagttcatggttcatccagca

SEQ ID NO: 1932786 - DNA, 25 bp, Homo sapien
gggtagtggaaatgaatccatgtag

SEQ ID NO: 1932787 - DNA, 25 bp, Homo sapien
tgacttccacatccatattattaag

SEQ ID NO: 1932788 - DNA, 25 bp, Homo sapien
catgatggccaacaggtgacttcca

SEQ ID NO: 1932789 - DNA, 25 bp, Homo sapien
gataactgacctgccttcaaatgca

SEQ ID NO: 1932790 - DNA, 25 bp, Homo sapien
agtaagtattttcgcactgataact

SEQ ID NO: 1932791 - DNA, 25 bp, Homo sapien
cctctttggcagtacttggcatatg

SEQ ID NO: 1932792 - DNA, 25 bp, Homo sapien
tcaaatgcaagaacctctttggcag

SEQ ID NO: 1932793 - DNA, 25 bp, Homo sapien
cagcagggcattacaatggcgggaa

SEQ ID NO: 1932794 - DNA, 25 bp, Homo sapien
gatggttatgatgcaatcaagacag

SEQ ID NO: 1932795 - DNA, 25 bp, Homo sapien
gaggttggccttattcatcccactg

SEQ ID NO: 1932796 - DNA, 25 bp, Homo sapien
taccaagggaagagtctgagtctgt

SEQ ID NO: 1932797 - DNA, 25 bp, Homo sapien
tatgtcactcggtagtctgctctaa

SEQ ID NO: 1932798 - DNA, 25 bp, Homo sapien
tcataacacgtatcaccacctggtg

SEQ ID NO: 1932799 - DNA, 25 bp, Homo sapien
tgctctagaactccccttaccattg

SEQ ID NO: 1932800 - DNA, 25 bp, Homo sapien
cttggacactcaatctaaaatggca

SEQ ID NO: 1932801 - DNA, 25 bp, Homo sapien
gaggtcaggtgttcagctatcctca

SEQ ID NO: 1932802 - DNA, 25 bp, Homo sapien
aggtcaggtgttcagctatcctcac

SEQ ID NO: 1932803 - DNA, 25 bp, Homo sapien
ggtcctcgatctcactccgttgttt

SEQ ID NO: 1932804 - DNA, 25 bp, Homo sapien
tctggtcctcgatctcactccgttg

SEQ ID NO: 1932805 - DNA, 25 bp, Homo sapien
cgctatctggtcctcgatctcactc

SEQ ID NO: 1932806 - DNA, 25 bp, Homo sapien
tatctggtcctcgatctcactccgt

SEQ ID NO: 1932807 - DNA, 25 bp, Homo sapien
ctgatgggaagcagtacagttatac

SEQ ID NO: 1932808 - DNA, 25 bp, Homo sapien
gccagcttggccatcacggccggca

SEQ ID NO: 1932809 - DNA, 25 bp, Homo sapien
catcttgcaggtggtcgccatcgct

SEQ ID NO: 1932810 - DNA, 25 bp, Homo sapien
gtgtcgtgggcggactgggccctca

SEQ ID NO: 1932811 - DNA, 25 bp, Homo sapien
tgctttggcagaccctggtgtcgtg

SEQ ID NO: 1932812 - DNA, 25 bp, Homo sapien
gggcaggaaggccgaggatgggagc

SEQ ID NO: 1932813 - DNA, 25 bp, Homo sapien
agggcaggaaggccgaggatgggag

SEQ ID NO: 1932814 - DNA, 25 bp, Homo sapien
ggcaggaaggccgaggatgggagcg

SEQ ID NO: 1932815 - DNA, 25 bp, Homo sapien
ttcgctgtttggaataattacgttc

SEQ ID NO: 1932816 - DNA, 25 bp, Homo sapien
cacttagcgctaaacaaattctgtc

SEQ ID NO: 1932817 - DNA, 25 bp, Homo sapien
tctcagcagcatttgcacttagcgc

SEQ ID NO: 1932818 - DNA, 25 bp, Homo sapien
acagcagccctaggccgctggagaa

SEQ ID NO: 1932819 - DNA, 25 bp, Homo sapien
ttccacaccaatttcaggatctttg

SEQ ID NO: 1932820 - DNA, 25 bp, Homo sapien
gagaaaacataaggcttatgcgttt

SEQ ID NO: 1932821 - DNA, 25 bp, Homo sapien
tccacaccaatttcaggatctttgt

SEQ ID NO: 1932822 - DNA, 25 bp, Homo sapien
gcttatgcgtttaatttccacacca

SEQ ID NO: 1932823 - DNA, 25 bp, Homo sapien
aggtggcactacaggtgcgctacca

SEQ ID NO: 1932824 - DNA, 25 bp, Homo sapien
agtggtgcaaacacgtctcactgta

SEQ ID NO: 1932825 - DNA, 25 bp, Homo sapien
tggtgcaaacacgtctcactgtagc

SEQ ID NO: 1932826 - DNA, 25 bp, Homo sapien
tgcaaacacgtctcactgtagcctt

SEQ ID NO: 1932827 - DNA, 25 bp, Homo sapien
tggcgttggccgcaaaggtgggtcc

SEQ ID NO: 1932828 - DNA, 25 bp, Homo sapien
tcttcatcttggtaatcatcacaga

SEQ ID NO: 1932829 - DNA, 25 bp, Homo sapien
gccatcatgccgcaacttatcgcat

SEQ ID NO: 1932830 - DNA, 25 bp, Homo sapien
tgggtccctgagagtagtactgaga

SEQ ID NO: 1932831 - DNA, 25 bp, Homo sapien
ttagatacagggactcactatgtta

SEQ ID NO: 1932832 - DNA, 25 bp, Homo sapien
gtgcagtagcatgatgatcacggct

SEQ ID NO: 1932833 - DNA, 25 bp, Homo sapien
gccatcacacctggcattattttat

SEQ ID NO: 1932834 - DNA, 25 bp, Homo sapien
ggaactataggtacatgccatcaca

SEQ ID NO: 1932835 - DNA, 25 bp, Homo sapien
atggtagtagaacaaatgaaatatg

SEQ ID NO: 1932836 - DNA, 25 bp, Homo sapien
cagtataataaatggtagtagaaca

SEQ ID NO: 1932837 - DNA, 25 bp, Homo sapien
ccaccgcgctggccataaaaatgtt

SEQ ID NO: 1932838 - DNA, 25 bp, Homo sapien
gaaatatgatgctgatctaagataa

SEQ ID NO: 1932839 - DNA, 25 bp, Homo sapien
tctgcagcgtggatccgatggacaa

SEQ ID NO: 1932840 - DNA, 25 bp, Homo sapien
tggctacaaactgactgatggacgg

SEQ ID NO: 1932841 - DNA, 25 bp, Homo sapien
gatgctgacaggcaatctgataacc

SEQ ID NO: 1932842 - DNA, 25 bp, Homo sapien
caaagggaggtttcatgtcttaggc

SEQ ID NO: 1932843 - DNA, 25 bp, Homo sapien
gagagtaggtggaacagaatgaata

SEQ ID NO: 1932844 - DNA, 25 bp, Homo sapien
tttgagtaataagaggatgagagga

SEQ ID NO: 1932845 - DNA, 25 bp, Homo sapien
taaggaagatgatgtctggtgcacc

SEQ ID NO: 1932846 - DNA, 25 bp, Homo sapien
atatttgagtaataagaggatgaga

SEQ ID NO: 1932847 - DNA, 25 bp, Homo sapien
tggccatgagattcccagggtgagc

SEQ ID NO: 1932848 - DNA, 25 bp, Homo sapien
gggcatcaaagggacaggtctcttc

SEQ ID NO: 1932849 - DNA, 25 bp, Homo sapien
tgtgaacttccataaagtggagggc

SEQ ID NO: 1932850 - DNA, 25 bp, Homo sapien
ggtgagctttgtccctgtgaacttc

SEQ ID NO: 1932851 - DNA, 25 bp, Homo sapien
tcttcaaagtctatacataggtcct

SEQ ID NO: 1932852 - DNA, 25 bp, Homo sapien
gaggagcccagttgggtgatacccc

SEQ ID NO: 1932853 - DNA, 25 bp, Homo sapien
aaatcaaaccatttagcatgtcttc

SEQ ID NO: 1932854 - DNA, 25 bp, Homo sapien
tacttgaccaagtataccttgctca

SEQ ID NO: 1932855 - DNA, 25 bp, Homo sapien
cctcagtactgatttgaggttgagc

SEQ ID NO: 1932856 - DNA, 25 bp, Homo sapien
cagtgtagtggactgtccatcggct

SEQ ID NO: 1932857 - DNA, 25 bp, Homo sapien
ggcggtgcaggtcctcaacacaggg

SEQ ID NO: 1932858 - DNA, 25 bp, Homo sapien
tgcaggtcctcaacacaggggggtc

SEQ ID NO: 1932859 - DNA, 25 bp, Homo sapien
caatcttatgaatctgaacaggata

SEQ ID NO: 1932860 - DNA, 25 bp, Homo sapien
caggataactcattttcaaaaggac

SEQ ID NO: 1932861 - DNA, 25 bp, Homo sapien
gaacaggataactcattttcaaaag

SEQ ID NO: 1932862 - DNA, 25 bp, Homo sapien
tctgaacaggataactcattttcaa

SEQ ID NO: 1932863 - DNA, 25 bp, Homo sapien
ttgagaactagatatcaagttaaaa

SEQ ID NO: 1932864 - DNA, 25 bp, Homo sapien
attgagaactagatatcaagttaaa

SEQ ID NO: 1932865 - DNA, 25 bp, Homo sapien
agctcctcttaccaatgcccctacc

SEQ ID NO: 1932866 - DNA, 25 bp, Homo sapien
aagctcctcttaccaatgcccctac

SEQ ID NO: 1932867 - DNA, 25 bp, Homo sapien
gctcctcttaccaatgcccctaccc

SEQ ID NO: 1932868 - DNA, 25 bp, Homo sapien
tctttgcattaatgaagaccaccat

SEQ ID NO: 1932869 - DNA, 25 bp, Homo sapien
aatctttgcattaatgaagaccacc

SEQ ID NO: 1932870 - DNA, 25 bp, Homo sapien
aaagacttaatctttgcattaatga

SEQ ID NO: 1932871 - DNA, 25 bp, Homo sapien
cttaatctttgcattaatgaagacc

SEQ ID NO: 1932872 - DNA, 25 bp, Homo sapien
tccagggcacctacatagagcttag

SEQ ID NO: 1932873 - DNA, 25 bp, Homo sapien
tattgtcaggcagttacaaaccatt

SEQ ID NO: 1932874 - DNA, 25 bp, Homo sapien
catatccttagacatctgcccaggc

SEQ ID NO: 1932875 - DNA, 25 bp, Homo sapien
gctcagcccagtaggcaggtggcaa

SEQ ID NO: 1932876 - DNA, 25 bp, Homo sapien
tagatgtgttcaatggcaacgtgaa

SEQ ID NO: 1932877 - DNA, 25 bp, Homo sapien
agagaaacaaaatgtgtagaatgtc

SEQ ID NO: 1932878 - DNA, 25 bp, Homo sapien
tgtgttcaatggcaacgtgaatgct

SEQ ID NO: 1932879 - DNA, 25 bp, Homo sapien
cgtgaatgcttcattcagagagaaa

SEQ ID NO: 1932880 - DNA, 25 bp, Homo sapien
gtgatcattttgctggtaaggtaca

SEQ ID NO: 1932881 - DNA, 25 bp, Homo sapien
ggaagcaaggcatgtagtgatcatt

SEQ ID NO: 1932882 - DNA, 25 bp, Homo sapien
tgctcctgcggcttcggctgtttct

SEQ ID NO: 1932883 - DNA, 25 bp, Homo sapien
taactgaagtctcagtgtgccatcc

SEQ ID NO: 1932884 - DNA, 25 bp, Homo sapien
ggatgaatatttcagttcctgatta

SEQ ID NO: 1932885 - DNA, 25 bp, Homo sapien
tttttctacaagtagggtttgcaga

SEQ ID NO: 1932886 - DNA, 25 bp, Homo sapien
gactctctgatttcatgttgttgga

SEQ ID NO: 1932887 - DNA, 25 bp, Homo sapien
caagtagggtttgcagaaactggat

SEQ ID NO: 1932888 - DNA, 25 bp, Homo sapien
agcccatgaatggaaagtaacaatg

SEQ ID NO: 1932889 - DNA, 25 bp, Homo sapien
ccatgaatggaaagtaacaatgaca

SEQ ID NO: 1932890 - DNA, 25 bp, Homo sapien
gaatggaaagtaacaatgacataaa

SEQ ID NO: 1932891 - DNA, 25 bp, Homo sapien
taaagcccatgaatggaaagtaaca

SEQ ID NO: 1932892 - DNA, 25 bp, Homo sapien
aaacccagagcatttcatgggttgt

SEQ ID NO: 1932893 - DNA, 25 bp, Homo sapien
gaacattctagaatgccactgaagg

SEQ ID NO: 1932894 - DNA, 25 bp, Homo sapien
gggttgttgcaatctcacttcagaa

SEQ ID NO: 1932895 - DNA, 25 bp, Homo sapien
tcactacatactacgttctaatggg

SEQ ID NO: 1932896 - DNA, 25 bp, Homo sapien
ggcagtgaattaaagagagttttta

SEQ ID NO: 1932897 - DNA, 25 bp, Homo sapien
gccatcttcccgctttggcgtccca

SEQ ID NO: 1932898 - DNA, 25 bp, Homo sapien
ctgtttaaactttttgtcgagacag

SEQ ID NO: 1932899 - DNA, 25 bp, Homo sapien
ctacaagtgcgagccaccacccagc

SEQ ID NO: 1932900 - DNA, 25 bp, Homo sapien
gaaagcccaaatcctatgccatagg

SEQ ID NO: 1932901 - DNA, 25 bp, Homo sapien
gaagtactgaagaagatgagtcatt

SEQ ID NO: 1932902 - DNA, 25 bp, Homo sapien
tcttggttggttttactgacatgaa

SEQ ID NO: 1932903 - DNA, 25 bp, Homo sapien
aaagctccaggaatagaagacagga

SEQ ID NO: 1932904 - DNA, 25 bp, Homo sapien
ggagagatagagtaccaccactggg

SEQ ID NO: 1932905 - DNA, 25 bp, Homo sapien
tataacccagtttccccacgtgatc

SEQ ID NO: 1932906 - DNA, 25 bp, Homo sapien
atgttcgcgccctcgagagagcaga

SEQ ID NO: 1932907 - DNA, 25 bp, Homo sapien
aaatgtcgacaaatcttggataccc

SEQ ID NO: 1932908 - DNA, 25 bp, Homo sapien
atgcacttgtttcagcacagaaata

SEQ ID NO: 1932909 - DNA, 25 bp, Homo sapien
aatgcacttgtttcagcacagaaat

SEQ ID NO: 1932910 - DNA, 25 bp, Homo sapien
tcatgaagggggagtgatagaaaca

SEQ ID NO: 1932911 - DNA, 25 bp, Homo sapien
caaatgacgccgaattccaatacaa

SEQ ID NO: 1932912 - DNA, 25 bp, Homo sapien
gacgccgaattccaatacaaaaaca

SEQ ID NO: 1932913 - DNA, 25 bp, Homo sapien
catgtaaacaaatgacgccgaattc

SEQ ID NO: 1932914 - DNA, 25 bp, Homo sapien
tattcggctggagtctgaaggaacc

SEQ ID NO: 1932915 - DNA, 25 bp, Homo sapien
aacttacagcacgtgagagagaacc

SEQ ID NO: 1932916 - DNA, 25 bp, Homo sapien
aaaccgagagctctccatcactgcg

SEQ ID NO: 1932917 - DNA, 25 bp, Homo sapien
catcactgcgaaacagcctctttgt

SEQ ID NO: 1932918 - DNA, 25 bp, Homo sapien
tcttagacaacgctgacagtcaggc

SEQ ID NO: 1932919 - DNA, 25 bp, Homo sapien
ggcaccgcattatccaaaaagacgg

SEQ ID NO: 1932920 - DNA, 25 bp, Homo sapien
cagcccagcaaacaaaacgctgggt

SEQ ID NO: 1932921 - DNA, 25 bp, Homo sapien
cgctgggttttttgcgttggcccag

SEQ ID NO: 1932922 - DNA, 25 bp, Homo sapien
ggcgtgtccctagcatcccaaattg

SEQ ID NO: 1932923 - DNA, 25 bp, Homo sapien
gctgccctggtgaagtaactcctca

SEQ ID NO: 1932924 - DNA, 25 bp, Homo sapien
tagatccgcgatatccacggccaaa

SEQ ID NO: 1932925 - DNA, 25 bp, Homo sapien
tgtgaagcgctcgttcagagccgca

SEQ ID NO: 1932926 - DNA, 25 bp, Homo sapien
atttcagggcactccatttcaatac

SEQ ID NO: 1932927 - DNA, 25 bp, Homo sapien
ctggatgaccatgaatgagaatgta

SEQ ID NO: 1932928 - DNA, 25 bp, Homo sapien
tcttcaacaatttcagggcactcca

SEQ ID NO: 1932929 - DNA, 25 bp, Homo sapien
gaggaataactggatgaccatgaat

SEQ ID NO: 1932930 - DNA, 25 bp, Homo sapien
tacccaccacgactttgatttgaaa

SEQ ID NO: 1932931 - DNA, 25 bp, Homo sapien
aatggccaggtctcttgaatagcta

SEQ ID NO: 1932932 - DNA, 25 bp, Homo sapien
caatagtgtctctgctgaagggaac

SEQ ID NO: 1932933 - DNA, 25 bp, Homo sapien
taaaaagacaaaggtgtcagctatc

SEQ ID NO: 1932934 - DNA, 25 bp, Homo sapien
ggtgctaccatcaaaacctatgcat

SEQ ID NO: 1932935 - DNA, 25 bp, Homo sapien
tctggaaattagcatcacgcctgac

SEQ ID NO: 1932936 - DNA, 25 bp, Homo sapien
taatcagctaagataggacatcctc

SEQ ID NO: 1932937 - DNA, 25 bp, Homo sapien
catctgtaggtaatgctccacactg

SEQ ID NO: 1932938 - DNA, 25 bp, Homo sapien
gactataatctcatggagagctgca

SEQ ID NO: 1932939 - DNA, 25 bp, Homo sapien
catgcgaattggtaaagcgctgcac

SEQ ID NO: 1932940 - DNA, 25 bp, Homo sapien
gagctgcaaacaagcctatcttgga

SEQ ID NO: 1932941 - DNA, 25 bp, Homo sapien
aaattctcatcatcgtattgcacag

SEQ ID NO: 1932942 - DNA, 25 bp, Homo sapien
gaaatcatggaaagtcaaactgaat

SEQ ID NO: 1932943 - DNA, 25 bp, Homo sapien
cagtgttggttggtgtgtgtctcca

SEQ ID NO: 1932944 - DNA, 25 bp, Homo sapien
ggaatgcatgtgaaacgtacagtgt

SEQ ID NO: 1932945 - DNA, 25 bp, Homo sapien
tgtgtgtctccactaaatggtttag

SEQ ID NO: 1932946 - DNA, 25 bp, Homo sapien
taagcttacctatccctaccatgag

SEQ ID NO: 1932947 - DNA, 25 bp, Homo sapien
caagccaatacgatagatagtgaga

SEQ ID NO: 1932948 - DNA, 25 bp, Homo sapien
catacaaaggaagcttgagagttca

SEQ ID NO: 1932949 - DNA, 25 bp, Homo sapien
ttcagacagtgatgtaggcacatgc

SEQ ID NO: 1932950 - DNA, 25 bp, Homo sapien
aatgagttatggtatggaagcttgc

SEQ ID NO: 1932951 - DNA, 25 bp, Homo sapien
actgcaccggtgtctaattttctta

SEQ ID NO: 1932952 - DNA, 25 bp, Homo sapien
tttaattataacagcgctgcgtgac

SEQ ID NO: 1932953 - DNA, 25 bp, Homo sapien
aactttgcagtttaaattgttgcca

SEQ ID NO: 1932954 - DNA, 25 bp, Homo sapien
tcagtcgtctctcactaggaaaggc

SEQ ID NO: 1932955 - DNA, 25 bp, Homo sapien
caccattagggtgagtgtcaggcta

SEQ ID NO: 1932956 - DNA, 25 bp, Homo sapien
tagaggcttagttattatgcaacac

SEQ ID NO: 1932957 - DNA, 25 bp, Homo sapien
ggcagagaatactctcattccgtat

SEQ ID NO: 1932958 - DNA, 25 bp, Homo sapien
ggccctacatactcaggtacttcca

SEQ ID NO: 1932959 - DNA, 25 bp, Homo sapien
ttggaagagctggccctacatactc

SEQ ID NO: 1932960 - DNA, 25 bp, Homo sapien
agggtgaaagatgatcctgatgaca

SEQ ID NO: 1932961 - DNA, 25 bp, Homo sapien
tggccctacatactcaggtacttcc

SEQ ID NO: 1932962 - DNA, 25 bp, Homo sapien
cagccatgaggtcgccgactagcag

SEQ ID NO: 1932963 - DNA, 25 bp, Homo sapien
catgaggtcgccgactagcaggaag

SEQ ID NO: 1932964 - DNA, 25 bp, Homo sapien
ttcacagccatgaggtcgccgacta

SEQ ID NO: 1932965 - DNA, 25 bp, Homo sapien
acagccatgaggtcgccgactagca

SEQ ID NO: 1932966 - DNA, 25 bp, Homo sapien
tcaagcatttggtgtggctccggat

SEQ ID NO: 1932967 - DNA, 25 bp, Homo sapien
caagcatttggtgtggctccggatg

SEQ ID NO: 1932968 - DNA, 25 bp, Homo sapien
tgtcaagcatttggtgtggctccgg

SEQ ID NO: 1932969 - DNA, 25 bp, Homo sapien
ccctgtcaagcatttggtgtggctc

SEQ ID NO: 1932970 - DNA, 25 bp, Homo sapien
ctgatgaagtaggccagtaggttac

SEQ ID NO: 1932971 - DNA, 25 bp, Homo sapien
tgatgaagtaggccagtaggttaca

SEQ ID NO: 1932972 - DNA, 25 bp, Homo sapien
atgaagtaggccagtaggttacagc

SEQ ID NO: 1932973 - DNA, 25 bp, Homo sapien
gatgaagtaggccagtaggttacag

SEQ ID NO: 1932974 - DNA, 25 bp, Homo sapien
aagcttcccaatggagctcagcacg

SEQ ID NO: 1932975 - DNA, 25 bp, Homo sapien
tcaacatgcgggacacgcactgcat

SEQ ID NO: 1932976 - DNA, 25 bp, Homo sapien
gaccatccagcacattgagatgaca

SEQ ID NO: 1932977 - DNA, 25 bp, Homo sapien
caggaggtgagggattaatccaaca

SEQ ID NO: 1932978 - DNA, 25 bp, Homo sapien
atctcatctacagggaaagccttct

SEQ ID NO: 1932979 - DNA, 25 bp, Homo sapien
gatctcatctacagggaaagccttc

SEQ ID NO: 1932980 - DNA, 25 bp, Homo sapien
gcctcgggccttggaacagccctat

SEQ ID NO: 1932981 - DNA, 25 bp, Homo sapien
tgaagagggcgttggacatcagctg

SEQ ID NO: 1932982 - DNA, 25 bp, Homo sapien
gaagcttggcagatagaggaccttc

SEQ ID NO: 1932983 - DNA, 25 bp, Homo sapien
ccacttgcacaatgtatttggcata

SEQ ID NO: 1932984 - DNA, 25 bp, Homo sapien
gatgctattagtattctgggccaac

SEQ ID NO: 1932985 - DNA, 25 bp, Homo sapien
agtattctgggccaacgattcctcc

SEQ ID NO: 1932986 - DNA, 25 bp, Homo sapien
tattagtattctgggccaacgattc

SEQ ID NO: 1932987 - DNA, 25 bp, Homo sapien
aatgagatgctattagtattctggg

SEQ ID NO: 1932988 - DNA, 25 bp, Homo sapien
gaaaagtagctgcttcataagaagc

SEQ ID NO: 1932989 - DNA, 25 bp, Homo sapien
ggcagagctctaaaacaaggaggga

SEQ ID NO: 1932990 - DNA, 25 bp, Homo sapien
taaaaatccgtgaaatagacaccta

SEQ ID NO: 1932991 - DNA, 25 bp, Homo sapien
tagacacctaacttggcatgacttt

SEQ ID NO: 1932992 - DNA, 25 bp, Homo sapien
gactttacaacttctgtggtcggtc

SEQ ID NO: 1932993 - DNA, 25 bp, Homo sapien
tgaccaaacatctgggcgctatagc

SEQ ID NO: 1932994 - DNA, 25 bp, Homo sapien
tcctgctgaatatcccctggaagct

SEQ ID NO: 1932995 - DNA, 25 bp, Homo sapien
ggcccacccagctttattcaaatga

SEQ ID NO: 1932996 - DNA, 25 bp, Homo sapien
ctaccctaaagctatctgctgcttc

SEQ ID NO: 1932997 - DNA, 25 bp, Homo sapien
ttccaaagcttcacaaccacatatc

SEQ ID NO: 1932998 - DNA, 25 bp, Homo sapien
acaaccacatatcttgccaccatga

SEQ ID NO: 1932999 - DNA, 25 bp, Homo sapien
ttgccaccatgataccacaggaacc

SEQ ID NO: 1933000 - DNA, 25 bp, Homo sapien
ccttgcctggatggtggtcccagca

SEQ ID NO: 1933001 - DNA, 25 bp, Homo sapien
gagaaaccacagtgcacctcaacag

SEQ ID NO: 1933002 - DNA, 25 bp, Homo sapien
caactagctaatgagcacacctgga

SEQ ID NO: 1933003 - DNA, 25 bp, Homo sapien
aatgctgtcatgcagaaagccctca

SEQ ID NO: 1933004 - DNA, 25 bp, Homo sapien
ctgcttttctacatgggtggaaatg

SEQ ID NO: 1933005 - DNA, 25 bp, Homo sapien
ggaaatgtcttatgaaaccaatcaa

SEQ ID NO: 1933006 - DNA, 25 bp, Homo sapien
ggtaactgcttttctacatgggtgg

SEQ ID NO: 1933007 - DNA, 25 bp, Homo sapien
tgctgtaaacatttgaaatcattat

SEQ ID NO: 1933008 - DNA, 25 bp, Homo sapien
gtccttgctagggaggtctgttcct

SEQ ID NO: 1933009 - DNA, 25 bp, Homo sapien
tagatgggtgtttcccaaattcgcc

SEQ ID NO: 1933010 - DNA, 25 bp, Homo sapien
tgtcctgccgccctgaataaacaag

SEQ ID NO: 1933011 - DNA, 25 bp, Homo sapien
gatgcctcacacacggcctagatgg

SEQ ID NO: 1933012 - DNA, 25 bp, Homo sapien
taatttcaacctaaatgtaggtagc

SEQ ID NO: 1933013 - DNA, 25 bp, Homo sapien
gaggagactgatgttttgatttaaa

SEQ ID NO: 1933014 - DNA, 25 bp, Homo sapien
ttttaagcaggttatcattttccca

SEQ ID NO: 1933015 - DNA, 25 bp, Homo sapien
tatagcagaaaactagattacggct

SEQ ID NO: 1933016 - DNA, 25 bp, Homo sapien
gaccatagctaataacatgtattgc

SEQ ID NO: 1933017 - DNA, 25 bp, Homo sapien
taacccatgccacaatatataaaca

SEQ ID NO: 1933018 - DNA, 25 bp, Homo sapien
catgtattgcatacttgtaagtgtt

SEQ ID NO: 1933019 - DNA, 25 bp, Homo sapien
tgtgagataatgcctatatgttaat

SEQ ID NO: 1933020 - DNA, 25 bp, Homo sapien
cttcattcaccggagccagttaagc

SEQ ID NO: 1933021 - DNA, 25 bp, Homo sapien
tcattcaccggagccagttaagctg

SEQ ID NO: 1933022 - DNA, 25 bp, Homo sapien
cactatatcaggacatagacttgac

SEQ ID NO: 1933023 - DNA, 25 bp, Homo sapien
aaatgaaatggatcaccggagagat

SEQ ID NO: 1933024 - DNA, 25 bp, Homo sapien
gggattcagagcctgaactcaaggt

SEQ ID NO: 1933025 - DNA, 25 bp, Homo sapien
gacaaagatgaatgggattcagagc

SEQ ID NO: 1933026 - DNA, 25 bp, Homo sapien
tgaactcaaggtcaacgtcttctga

SEQ ID NO: 1933027 - DNA, 25 bp, Homo sapien
ttctgaatcacaaagagctggtggg

SEQ ID NO: 1933028 - DNA, 25 bp, Homo sapien
gaaagaaaattctgcgccaaatggg

SEQ ID NO: 1933029 - DNA, 25 bp, Homo sapien
tacaaacggatcgtcctgaagtctc

SEQ ID NO: 1933030 - DNA, 25 bp, Homo sapien
tgtgacagttttcccacgaacttgg

SEQ ID NO: 1933031 - DNA, 25 bp, Homo sapien
gctcgccgagatccccagggtttta

SEQ ID NO: 1933032 - DNA, 25 bp, Homo sapien
cgcagcgcgacaggtcggccagctg

SEQ ID NO: 1933033 - DNA, 25 bp, Homo sapien
aggcgcgcagcggcggcttgcaggg

SEQ ID NO: 1933034 - DNA, 25 bp, Homo sapien
gcagggcgtcgaggcggcggtgcag

SEQ ID NO: 1933035 - DNA, 25 bp, Homo sapien
tttcactcggcggtggtccaggcgc

SEQ ID NO: 1933036 - DNA, 25 bp, Homo sapien
ctccagcgagcggaagagtggcgcg

SEQ ID NO: 1933037 - DNA, 25 bp, Homo sapien
tccagcgagcggaagagtggcgcgc

SEQ ID NO: 1933038 - DNA, 25 bp, Homo sapien
agcgagcggaagagtggcgcgcccg

SEQ ID NO: 1933039 - DNA, 25 bp, Homo sapien
gagcggaagagtggcgcgcccgcag

SEQ ID NO: 1933040 - DNA, 25 bp, Homo sapien
cgagtcccgctgaagtttgcaggcg

SEQ ID NO: 1933041 - DNA, 25 bp, Homo sapien
gtgcagcgcagtgcgggcgccggga

SEQ ID NO: 1933042 - DNA, 25 bp, Homo sapien
tccctccctccggattggagaggga

SEQ ID NO: 1933043 - DNA, 25 bp, Homo sapien
aagcgagggaagtgccgccgacacc

SEQ ID NO: 1933044 - DNA, 25 bp, Homo sapien
ccaatatccccaagctaaaatccca

SEQ ID NO: 1933045 - DNA, 25 bp, Homo sapien
tccaatatccccaagctaaaatccc

SEQ ID NO: 1933046 - DNA, 25 bp, Homo sapien
caatatccccaagctaaaatcccac

SEQ ID NO: 1933047 - DNA, 25 bp, Homo sapien
ttacggcattttgggagtcggtctc

SEQ ID NO: 1933048 - DNA, 25 bp, Homo sapien
tgattgtaatgagaagcgcgttccc

SEQ ID NO: 1933049 - DNA, 25 bp, Homo sapien
gctttccagttgaccctggttgctc

SEQ ID NO: 1933050 - DNA, 25 bp, Homo sapien
gcccatcgctgtgtttgctcagaaa

SEQ ID NO: 1933051 - DNA, 25 bp, Homo sapien
acccggcccagcattgttctttagt

SEQ ID NO: 1933052 - DNA, 25 bp, Homo sapien
tgatttagccacataaactaataaa

SEQ ID NO: 1933053 - DNA, 25 bp, Homo sapien
cttctattcccttgagactttccca

SEQ ID NO: 1933054 - DNA, 25 bp, Homo sapien
ccttgagactttcccattggtttga

SEQ ID NO: 1933055 - DNA, 25 bp, Homo sapien
atgctggccttcctccgatgggagt

SEQ ID NO: 1933056 - DNA, 25 bp, Homo sapien
caagctccctgcgaggcctggagga

SEQ ID NO: 1933057 - DNA, 25 bp, Homo sapien
cagccctgtccaaataaatcctcta

SEQ ID NO: 1933058 - DNA, 25 bp, Homo sapien
cactcagcttggtgttcgatgccag

SEQ ID NO: 1933059 - DNA, 25 bp, Homo sapien
tgatccaggccatatggattcaatg

SEQ ID NO: 1933060 - DNA, 25 bp, Homo sapien
ggccatatggattcaatgcctcctc

SEQ ID NO: 1933061 - DNA, 25 bp, Homo sapien
catatggattcaatgcctcctccat

SEQ ID NO: 1933062 - DNA, 25 bp, Homo sapien
tccaggccatatggattcaatgcct

SEQ ID NO: 1933063 - DNA, 25 bp, Homo sapien
cactttcttgaaacttcgttcccag

SEQ ID NO: 1933064 - DNA, 25 bp, Homo sapien
tgaaacttcgttcccaggtgtctgc

SEQ ID NO: 1933065 - DNA, 25 bp, Homo sapien
ccttgctttgaaatggttctgctgc

SEQ ID NO: 1933066 - DNA, 25 bp, Homo sapien
tttgaaatggttctgctgctgtctc

SEQ ID NO: 1933067 - DNA, 25 bp, Homo sapien
gatccacccatgtagctggctctgg

SEQ ID NO: 1933068 - DNA, 25 bp, Homo sapien
taagagctcctagattgatagccaa

SEQ ID NO: 1933069 - DNA, 25 bp, Homo sapien
taaacctaaagctcactgaagtggg

SEQ ID NO: 1933070 - DNA, 25 bp, Homo sapien
tgtgattgccacgaagacagcatgc

SEQ ID NO: 1933071 - DNA, 25 bp, Homo sapien
aagatgacccacagtctgaagcaga

SEQ ID NO: 1933072 - DNA, 25 bp, Homo sapien
tgaagcagagttatcccagctgacc

SEQ ID NO: 1933073 - DNA, 25 bp, Homo sapien
cagtctgaagcagagttatcccagc

SEQ ID NO: 1933074 - DNA, 25 bp, Homo sapien
agtctgccaagccaagatgacccac

SEQ ID NO: 1933075 - DNA, 25 bp, Homo sapien
cacattggtaggtccagattgtaac

SEQ ID NO: 1933076 - DNA, 25 bp, Homo sapien
actggcatgtcccaatggcattgac

SEQ ID NO: 1933077 - DNA, 25 bp, Homo sapien
tctgttgagttactgactactggca

SEQ ID NO: 1933078 - DNA, 25 bp, Homo sapien
gaaacagcgccacaaatgagtaaag

SEQ ID NO: 1933079 - DNA, 25 bp, Homo sapien
tgagggaggcaaccatgcaagctga

SEQ ID NO: 1933080 - DNA, 25 bp, Homo sapien
catgtagcggaaaagcctcagtgtc

SEQ ID NO: 1933081 - DNA, 25 bp, Homo sapien
tgatagagaagccagcacaaaccca

SEQ ID NO: 1933082 - DNA, 25 bp, Homo sapien
gaagtgttgcctcagttagtatcca

SEQ ID NO: 1933083 - DNA, 25 bp, Homo sapien
acagtccgtgaaagtcttaactcat

SEQ ID NO: 1933084 - DNA, 25 bp, Homo sapien
agaaggggatgccatgaagacctcc

SEQ ID NO: 1933085 - DNA, 25 bp, Homo sapien
acattttctgaaatcgacacggagg

SEQ ID NO: 1933086 - DNA, 25 bp, Homo sapien
ttctgaaatcgacacggaggttccc

SEQ ID NO: 1933087 - DNA, 25 bp, Homo sapien
tgatagaaggggatgccatgaagac

SEQ ID NO: 1933088 - DNA, 25 bp, Homo sapien
aggagacaaaaactctgccctatac

SEQ ID NO: 1933089 - DNA, 25 bp, Homo sapien
gctcaggagacaaaaactctgccct

SEQ ID NO: 1933090 - DNA, 25 bp, Homo sapien
tcaggagacaaaaactctgccctat

SEQ ID NO: 1933091 - DNA, 25 bp, Homo sapien
ttagctcaggagacaaaaactctgc

SEQ ID NO: 1933092 - DNA, 25 bp, Homo sapien
gaacgacatgattctgctccactag

SEQ ID NO: 1933093 - DNA, 25 bp, Homo sapien
cagctgctctattcagtaggaaaca

SEQ ID NO: 1933094 - DNA, 25 bp, Homo sapien
aaagagctctggttcagtccagctg

SEQ ID NO: 1933095 - DNA, 25 bp, Homo sapien
tatttggacttggaacaaagagctc

SEQ ID NO: 1933096 - DNA, 25 bp, Homo sapien
tcccttttccaccgctaggacacca

SEQ ID NO: 1933097 - DNA, 25 bp, Homo sapien
ccagcagcttttgatgccaagaact

SEQ ID NO: 1933098 - DNA, 25 bp, Homo sapien
agcagcttttgatgccaagaactcc

SEQ ID NO: 1933099 - DNA, 25 bp, Homo sapien
cagcagcttttgatgccaagaactc

SEQ ID NO: 1933100 - DNA, 25 bp, Homo sapien
ggcatccagagtatttgtcactttc

SEQ ID NO: 1933101 - DNA, 25 bp, Homo sapien
tcacctcctacttgggcatccagag

SEQ ID NO: 1933102 - DNA, 25 bp, Homo sapien
gttcacctcctacttgggcatccag

SEQ ID NO: 1933103 - DNA, 25 bp, Homo sapien
ttgggcatccagagtatttgtcact

SEQ ID NO: 1933104 - DNA, 25 bp, Homo sapien
ggaatattccagatacacagatctg

SEQ ID NO: 1933105 - DNA, 25 bp, Homo sapien
tctcgccagcccctaaggaatattc

SEQ ID NO: 1933106 - DNA, 25 bp, Homo sapien
cacttggaggtcttcacagtcccac

SEQ ID NO: 1933107 - DNA, 25 bp, Homo sapien
caccctccttactggcacttggagg

SEQ ID NO: 1933108 - DNA, 25 bp, Homo sapien
atgtatttattggaggaccattaga

SEQ ID NO: 1933109 - DNA, 25 bp, Homo sapien
ccagaatggtttgaaactttataat

SEQ ID NO: 1933110 - DNA, 25 bp, Homo sapien
gtatttattggaggaccattagaaa

SEQ ID NO: 1933111 - DNA, 25 bp, Homo sapien
gaatggtttgaaactttataatgta

SEQ ID NO: 1933112 - DNA, 25 bp, Homo sapien
gtaatcaaactaagacaacatgaga

SEQ ID NO: 1933113 - DNA, 25 bp, Homo sapien
tatcaccgtcctataaatgctctat

SEQ ID NO: 1933114 - DNA, 25 bp, Homo sapien
tataactccacatgtgtataaagga

SEQ ID NO: 1933115 - DNA, 25 bp, Homo sapien
tatgataaattacctgatgaacaat

SEQ ID NO: 1933116 - DNA, 25 bp, Homo sapien
gcaatgagcccagatgacaccactg

SEQ ID NO: 1933117 - DNA, 25 bp, Homo sapien
ttgcaatgagcccagatgacaccac

SEQ ID NO: 1933118 - DNA, 25 bp, Homo sapien
aggttgcaatgagcccagatgacac

SEQ ID NO: 1933119 - DNA, 25 bp, Homo sapien
cactctagcttgggcgacacagcaa

SEQ ID NO: 1933120 - DNA, 25 bp, Homo sapien
cttcttctaaagctggagtgttcat

SEQ ID NO: 1933121 - DNA, 25 bp, Homo sapien
ccttcttctaaagctggagtgttca

SEQ ID NO: 1933122 - DNA, 25 bp, Homo sapien
accttcttctaaagctggagtgttc

SEQ ID NO: 1933123 - DNA, 25 bp, Homo sapien
gcgggtggcggaagaacatcctatc

SEQ ID NO: 1933124 - DNA, 25 bp, Homo sapien
gaactatctttgacgacagagagac

SEQ ID NO: 1933125 - DNA, 25 bp, Homo sapien
aaggctacccagaccaggcaatgaa

SEQ ID NO: 1933126 - DNA, 25 bp, Homo sapien
tctaaggacctgtgaatctaaaacc

SEQ ID NO: 1933127 - DNA, 25 bp, Homo sapien
ttgtagagaggtttagatacaccgt

SEQ ID NO: 1933128 - DNA, 25 bp, Homo sapien
agtggtaacagactctcaattaggg

SEQ ID NO: 1933129 - DNA, 25 bp, Homo sapien
cccgaacagagtagctattaatagt

SEQ ID NO: 1933130 - DNA, 25 bp, Homo sapien
gatacaccgttatgtgtagggcccg

SEQ ID NO: 1933131 - DNA, 25 bp, Homo sapien
catttcccgtttctacctccactgc

SEQ ID NO: 1933132 - DNA, 25 bp, Homo sapien
tagcttccggaaagggtactgcatt

SEQ ID NO: 1933133 - DNA, 25 bp, Homo sapien
tattgcgtcttgctcctgggtcaca

SEQ ID NO: 1933134 - DNA, 25 bp, Homo sapien
cactgcacccgcttattgcgtcttg

SEQ ID NO: 1933135 - DNA, 25 bp, Homo sapien
gataactgagggttaggttagttgc

SEQ ID NO: 1933136 - DNA, 25 bp, Homo sapien
tatacttaatatcatcacataggat

SEQ ID NO: 1933137 - DNA, 25 bp, Homo sapien
gttctgctttgctttgtactgttct

SEQ ID NO: 1933138 - DNA, 25 bp, Homo sapien
gctaactggcagtgagatattcaga

SEQ ID NO: 1933139 - DNA, 25 bp, Homo sapien
aatgccttcaaggaccatggcagac

SEQ ID NO: 1933140 - DNA, 25 bp, Homo sapien
ggcattctctgccattgagcctgga

SEQ ID NO: 1933141 - DNA, 25 bp, Homo sapien
gataatccaggaccttgtcacctga

SEQ ID NO: 1933142 - DNA, 25 bp, Homo sapien
tttggaatgcttggtaggcagccgt

SEQ ID NO: 1933143 - DNA, 25 bp, Homo sapien
atcgctggctttgtttgagatcaag

SEQ ID NO: 1933144 - DNA, 25 bp, Homo sapien
tgtttgagatcaagcaaacgttggc

SEQ ID NO: 1933145 - DNA, 25 bp, Homo sapien
tctgctgggcacctcgcagggcttc

SEQ ID NO: 1933146 - DNA, 25 bp, Homo sapien
aaacgttggcttcagtgtccaagtc

SEQ ID NO: 1933147 - DNA, 25 bp, Homo sapien
taatttctaagccactctgtctact

SEQ ID NO: 1933148 - DNA, 25 bp, Homo sapien
ctctgccgaggagcagtgttttaat

SEQ ID NO: 1933149 - DNA, 25 bp, Homo sapien
tttctccagctgtataacagataac

SEQ ID NO: 1933150 - DNA, 25 bp, Homo sapien
gtggagaaggaccagactaacttgc

SEQ ID NO: 1933151 - DNA, 25 bp, Homo sapien
tctctatatgggctggcaattgttc

SEQ ID NO: 1933152 - DNA, 25 bp, Homo sapien
agctctctatatgggctggcaattg

SEQ ID NO: 1933153 - DNA, 25 bp, Homo sapien
ttagctctctatatgggctggcaat

SEQ ID NO: 1933154 - DNA, 25 bp, Homo sapien
gctctctatatgggctggcaattgt

SEQ ID NO: 1933155 - DNA, 25 bp, Homo sapien
atcctttgtccggtaactgaattct

SEQ ID NO: 1933156 - DNA, 25 bp, Homo sapien
ttaactcaggcctgactttttgtca

SEQ ID NO: 1933157 - DNA, 25 bp, Homo sapien
ctcaggcctgactttttgtcactgg

SEQ ID NO: 1933158 - DNA, 25 bp, Homo sapien
ctggaaattgcatcctttgtccggt

SEQ ID NO: 1933159 - DNA, 25 bp, Homo sapien
tgcttagtgcctggtaattcctcaa

SEQ ID NO: 1933160 - DNA, 25 bp, Homo sapien
tggaaccggttttgaattgcctctg

SEQ ID NO: 1933161 - DNA, 25 bp, Homo sapien
aacccgtgaggagtttgaatcagtc

SEQ ID NO: 1933162 - DNA, 25 bp, Homo sapien
tgaatcagtccccttgccacactgg

SEQ ID NO: 1933163 - DNA, 25 bp, Homo sapien
tcagtgctttgaatttgatgtcggc

SEQ ID NO: 1933164 - DNA, 25 bp, Homo sapien
gcattagcattaggatctgctatgc

SEQ ID NO: 1933165 - DNA, 25 bp, Homo sapien
atttgatgtcggcattagcattagg

SEQ ID NO: 1933166 - DNA, 25 bp, Homo sapien
cattaggatctgctatgctgcttcc

SEQ ID NO: 1933167 - DNA, 25 bp, Homo sapien
tgcagtgcttccgtagtgaaaccaa

SEQ ID NO: 1933168 - DNA, 25 bp, Homo sapien
tcacatcattgaaaactccagatat

SEQ ID NO: 1933169 - DNA, 25 bp, Homo sapien
tttagaatgtgtttcactccaggca

SEQ ID NO: 1933170 - DNA, 25 bp, Homo sapien
ccaggcagcccgaacttgatgtgaa

SEQ ID NO: 1933171 - DNA, 25 bp, Homo sapien
ggaaaagggcctgcccactgcagtt

SEQ ID NO: 1933172 - DNA, 25 bp, Homo sapien
aagatcagtctgtgctgctttaagc

SEQ ID NO: 1933173 - DNA, 25 bp, Homo sapien
tcaacagtgagcagagcggaaaagg

SEQ ID NO: 1933174 - DNA, 25 bp, Homo sapien
tgacctccagaaccgtaagaagatc

SEQ ID NO: 1933175 - DNA, 25 bp, Homo sapien
taatatggaacagctcaaaaatttg

SEQ ID NO: 1933176 - DNA, 25 bp, Homo sapien
tctttgtgcagaggccacactaatc

SEQ ID NO: 1933177 - DNA, 25 bp, Homo sapien
tggaacagctcaaaaatttgcaggt

SEQ ID NO: 1933178 - DNA, 25 bp, Homo sapien
gctcaaaaatttgcaggtcatcttt

SEQ ID NO: 1933179 - DNA, 25 bp, Homo sapien
catttccacaagcagtatctgagaa

SEQ ID NO: 1933180 - DNA, 25 bp, Homo sapien
ttcctaatgacgaatgatgctcaag

SEQ ID NO: 1933181 - DNA, 25 bp, Homo sapien
tttagatttacccatccgatccatg

SEQ ID NO: 1933182 - DNA, 25 bp, Homo sapien
caccagctaaactgatttccaaagt

SEQ ID NO: 1933183 - DNA, 25 bp, Homo sapien
tctactcctaaatgccaagggcctt

SEQ ID NO: 1933184 - DNA, 25 bp, Homo sapien
gattaaaatgtaacacgggctgacc

SEQ ID NO: 1933185 - DNA, 25 bp, Homo sapien
tagaacttgggaaagctggcacaac

SEQ ID NO: 1933186 - DNA, 25 bp, Homo sapien
taaatcgtagctacaaagagatggc

SEQ ID NO: 1933187 - DNA, 25 bp, Homo sapien
agctgggattacaggtgtgcctcac

SEQ ID NO: 1933188 - DNA, 25 bp, Homo sapien
aggtgtgcctcaccacgcccggcta

SEQ ID NO: 1933189 - DNA, 25 bp, Homo sapien
gcatttttagtagagatgggatttc

SEQ ID NO: 1933190 - DNA, 25 bp, Homo sapien
gtcacccaggctgggcctcccaagt

SEQ ID NO: 1933191 - DNA, 25 bp, Homo sapien
cttggtctgtaagaatagcctctgg

SEQ ID NO: 1933192 - DNA, 25 bp, Homo sapien
gacaagccttgctattcacaatagg

SEQ ID NO: 1933193 - DNA, 25 bp, Homo sapien
tagcctctggcgtaaaatagcaagt

SEQ ID NO: 1933194 - DNA, 25 bp, Homo sapien
taaattgcaccaaggaaccatcctg

SEQ ID NO: 1933195 - DNA, 25 bp, Homo sapien
gtccagtaatgaaatcagtgaatat

SEQ ID NO: 1933196 - DNA, 25 bp, Homo sapien
gaatatttcacttggtcttagccga

SEQ ID NO: 1933197 - DNA, 25 bp, Homo sapien
tattaatatgattgaaatccatgaa

SEQ ID NO: 1933198 - DNA, 25 bp, Homo sapien
tgacatctttcaggcatggaaaggg

SEQ ID NO: 1933199 - DNA, 25 bp, Homo sapien
gggacttgaccactgcaattgacca

SEQ ID NO: 1933200 - DNA, 25 bp, Homo sapien
taatcttctctacgctgtcaggctt

SEQ ID NO: 1933201 - DNA, 25 bp, Homo sapien
tgtcaggcttcatacccctgcagag

SEQ ID NO: 1933202 - DNA, 25 bp, Homo sapien
tgctgtacccatcccgaagatttga

SEQ ID NO: 1933203 - DNA, 25 bp, Homo sapien
gaactccttgtagaagtaagatacc

SEQ ID NO: 1933204 - DNA, 25 bp, Homo sapien
tctccgttttgtagagaatctcctc

SEQ ID NO: 1933205 - DNA, 25 bp, Homo sapien
tactctcctcccttaagaattcagg

SEQ ID NO: 1933206 - DNA, 25 bp, Homo sapien
aaattctaggcctcccaatcgactg

SEQ ID NO: 1933207 - DNA, 25 bp, Homo sapien
tctctgaaatgacgaagactttctc

SEQ ID NO: 1933208 - DNA, 25 bp, Homo sapien
gactctttgttgacagtaaggtggg

SEQ ID NO: 1933209 - DNA, 25 bp, Homo sapien
gctgtaacccaaccatcttgggcac

SEQ ID NO: 1933210 - DNA, 25 bp, Homo sapien
tggacctatggtttgctgtcagtaa

SEQ ID NO: 1933211 - DNA, 25 bp, Homo sapien
tgtgtattttgcctcttagtacccc

SEQ ID NO: 1933212 - DNA, 25 bp, Homo sapien
aaatctctactatatctgagcctag

SEQ ID NO: 1933213 - DNA, 25 bp, Homo sapien
gagcctagttttgatgcttgccctg

SEQ ID NO: 1933214 - DNA, 25 bp, Homo sapien
tgtgtccagtgtattaatgacccca

SEQ ID NO: 1933215 - DNA, 25 bp, Homo sapien
ttattataccagagccctactgctg

SEQ ID NO: 1933216 - DNA, 25 bp, Homo sapien
catattaactgtttgttgcagcttg

SEQ ID NO: 1933217 - DNA, 25 bp, Homo sapien
tggctgggagttaggtcatattaac

SEQ ID NO: 1933218 - DNA, 25 bp, Homo sapien
taagatgtcagaggagaaacattct

SEQ ID NO: 1933219 - DNA, 25 bp, Homo sapien
tccaatggagtcttgccaaaggtct

SEQ ID NO: 1933220 - DNA, 25 bp, Homo sapien
tgcacgtggccaaagcttactgatt

SEQ ID NO: 1933221 - DNA, 25 bp, Homo sapien
tcaaggatactagactttggtccag

SEQ ID NO: 1933222 - DNA, 25 bp, Homo sapien
tgactcaggtcagctcacagtggtg

SEQ ID NO: 1933223 - DNA, 25 bp, Homo sapien
cttgtaatgaaatacagctgagtaa

SEQ ID NO: 1933224 - DNA, 25 bp, Homo sapien
ttgtaatgaaatacagctgagtaaa

SEQ ID NO: 1933225 - DNA, 25 bp, Homo sapien
cagtaacaaagtctatcggtgcagt

SEQ ID NO: 1933226 - DNA, 25 bp, Homo sapien
ggaagcttgaggttgtcagtttccc

SEQ ID NO: 1933227 - DNA, 25 bp, Homo sapien
aaagccatactgaaagccacttgga

SEQ ID NO: 1933228 - DNA, 25 bp, Homo sapien
gccacttggaaacttcagctgatgt

SEQ ID NO: 1933229 - DNA, 25 bp, Homo sapien
gaagttgatcacatttccacaagga

SEQ ID NO: 1933230 - DNA, 25 bp, Homo sapien
gaatgagtgacaagatggctaaagg

SEQ ID NO: 1933231 - DNA, 25 bp, Homo sapien
tctcataaaatagttcgaagtcgct

SEQ ID NO: 1933232 - DNA, 25 bp, Homo sapien
ttgtcctgaataaggcatactccag

SEQ ID NO: 1933233 - DNA, 25 bp, Homo sapien
tgactgagatgtaaatgaggagccc

SEQ ID NO: 1933234 - DNA, 25 bp, Homo sapien
cattgcatatcccagatgctaggga

SEQ ID NO: 1933235 - DNA, 25 bp, Homo sapien
gaaaaggtgggtgtgccaacaaaca

SEQ ID NO: 1933236 - DNA, 25 bp, Homo sapien
tgaagaatgtagacggctgcagaga

SEQ ID NO: 1933237 - DNA, 25 bp, Homo sapien
tttaatgttgagttaagcagtgagc

SEQ ID NO: 1933238 - DNA, 25 bp, Homo sapien
ttgagttaagcagtgagctgaatgt

SEQ ID NO: 1933239 - DNA, 25 bp, Homo sapien
acggtgaacatatagggcaaaacag

SEQ ID NO: 1933240 - DNA, 25 bp, Homo sapien
gatacttaaatacaacggtgaacat

SEQ ID NO: 1933241 - DNA, 25 bp, Homo sapien
aacaagtatgttcacagttaacggc

SEQ ID NO: 1933242 - DNA, 25 bp, Homo sapien
acaagtatgttcacagttaacggca

SEQ ID NO: 1933243 - DNA, 25 bp, Homo sapien
aaacaagtatgttcacagttaacgg

SEQ ID NO: 1933244 - DNA, 25 bp, Homo sapien
aaaacaagtatgttcacagttaacg

SEQ ID NO: 1933245 - DNA, 25 bp, Homo sapien
aagttgttccagttgaacttccagg

SEQ ID NO: 1933246 - DNA, 25 bp, Homo sapien
gaatggtcgaagttgttccagttga

SEQ ID NO: 1933247 - DNA, 25 bp, Homo sapien
gtgagagaatggtcgaagttgttcc

SEQ ID NO: 1933248 - DNA, 25 bp, Homo sapien
tggtcgaagttgttccagttgaact

SEQ ID NO: 1933249 - DNA, 25 bp, Homo sapien
tcaatctggccaaaacggtgttggt

SEQ ID NO: 1933250 - DNA, 25 bp, Homo sapien
tctaattgatgcctgaatagctttc

SEQ ID NO: 1933251 - DNA, 25 bp, Homo sapien
tgttgctgcaattcgctattcaatc

SEQ ID NO: 1933252 - DNA, 25 bp, Homo sapien
tggtttccttattacgtctaattga

SEQ ID NO: 1933253 - DNA, 25 bp, Homo sapien
ttaaatgtgtctaggaatagctttg

SEQ ID NO: 1933254 - DNA, 25 bp, Homo sapien
taaatgtgtctaggaatagctttga

SEQ ID NO: 1933255 - DNA, 25 bp, Homo sapien
attaaatgtgtctaggaatagcttt

SEQ ID NO: 1933256 - DNA, 25 bp, Homo sapien
tagaaggttgtgatgcaagaacagc

SEQ ID NO: 1933257 - DNA, 25 bp, Homo sapien
gcagctaagacacccgtcttttgtg

SEQ ID NO: 1933258 - DNA, 25 bp, Homo sapien
gtgtatgttcatcaacttctggcct

SEQ ID NO: 1933259 - DNA, 25 bp, Homo sapien
cttcttcgaacaggtttaggtggtg

SEQ ID NO: 1933260 - DNA, 25 bp, Homo sapien
gcaacatactgatgcaagactgtaa

SEQ ID NO: 1933261 - DNA, 25 bp, Homo sapien
caccacaatcatgaatgtacctgca

SEQ ID NO: 1933262 - DNA, 25 bp, Homo sapien
gacattcatagttagcactttgcaa

SEQ ID NO: 1933263 - DNA, 25 bp, Homo sapien
tgaatgtacctgcaatataagtatt

SEQ ID NO: 1933264 - DNA, 25 bp, Homo sapien
gactttgttctgagctagactgact

SEQ ID NO: 1933265 - DNA, 25 bp, Homo sapien
ctccattaaataggcagactttgtt

SEQ ID NO: 1933266 - DNA, 25 bp, Homo sapien
gactatactacagttaaaggcagag

SEQ ID NO: 1933267 - DNA, 25 bp, Homo sapien
agaaatgggttagatgatttctggc

SEQ ID NO: 1933268 - DNA, 25 bp, Homo sapien
ctgttttggcaactcgaagagaact

SEQ ID NO: 1933269 - DNA, 25 bp, Homo sapien
caactcgaagagaacttgcaggatc

SEQ ID NO: 1933270 - DNA, 25 bp, Homo sapien
ggcaactcgaagagaacttgcagga

SEQ ID NO: 1933271 - DNA, 25 bp, Homo sapien
ttttggcaactcgaagagaacttgc

SEQ ID NO: 1933272 - DNA, 25 bp, Homo sapien
ttctgacaagaaaactgagatgatg

SEQ ID NO: 1933273 - DNA, 25 bp, Homo sapien
ggaactttattaaatgagccttctc

SEQ ID NO: 1933274 - DNA, 25 bp, Homo sapien
aaatatagaatatgtaccaaatcag

SEQ ID NO: 1933275 - DNA, 25 bp, Homo sapien
ttctctgctactgaaaggcagatgg

SEQ ID NO: 1933276 - DNA, 25 bp, Homo sapien
agattcctagagaggttcttgccat

SEQ ID NO: 1933277 - DNA, 25 bp, Homo sapien
ttcctagagaggttcttgccattgg

SEQ ID NO: 1933278 - DNA, 25 bp, Homo sapien
ctagagaggttcttgccattggaac

SEQ ID NO: 1933279 - DNA, 25 bp, Homo sapien
cctagagaggttcttgccattggaa

SEQ ID NO: 1933280 - DNA, 25 bp, Homo sapien
attagccaagccctcgaaaactgac

SEQ ID NO: 1933281 - DNA, 25 bp, Homo sapien
gctctgttgacacaacatggtatgg

SEQ ID NO: 1933282 - DNA, 25 bp, Homo sapien
agtgactgcctgcagaaaattagcc

SEQ ID NO: 1933283 - DNA, 25 bp, Homo sapien
gatgtcccctctaatatctgctctg

SEQ ID NO: 1933284 - DNA, 25 bp, Homo sapien
tagtgtgagttatgaggccatcggc

SEQ ID NO: 1933285 - DNA, 25 bp, Homo sapien
gatgcagcaaatacttcaaactgac

SEQ ID NO: 1933286 - DNA, 25 bp, Homo sapien
tatctgctgaggtgaggtactagtg

SEQ ID NO: 1933287 - DNA, 25 bp, Homo sapien
tcgtcgtttacatttgatgcagcaa

SEQ ID NO: 1933288 - DNA, 25 bp, Homo sapien
tgggcgatgcacagcaggaccagga

SEQ ID NO: 1933289 - DNA, 25 bp, Homo sapien
ctgggcgatgcacagcaggaccagg

SEQ ID NO: 1933290 - DNA, 25 bp, Homo sapien
ggcgatgcacagcaggaccaggagc

SEQ ID NO: 1933291 - DNA, 25 bp, Homo sapien
gggcgatgcacagcaggaccaggag

SEQ ID NO: 1933292 - DNA, 25 bp, Homo sapien
ctgtgagggctgtggtcttggaggc

SEQ ID NO: 1933293 - DNA, 25 bp, Homo sapien
tgtgagggctgtggtcttggaggca

SEQ ID NO: 1933294 - DNA, 25 bp, Homo sapien
gatgggcaacaactccagcctgttg

SEQ ID NO: 1933295 - DNA, 25 bp, Homo sapien
ggaggatgggcaacaactccagcct

SEQ ID NO: 1933296 - DNA, 25 bp, Homo sapien
aggatgggcaacaactccagcctgt

SEQ ID NO: 1933297 - DNA, 25 bp, Homo sapien
aggaggatgggcaacaactccagcc

SEQ ID NO: 1933298 - DNA, 25 bp, Homo sapien
gtaacctaaagaccaaatctcacag

SEQ ID NO: 1933299 - DNA, 25 bp, Homo sapien
tctattacatgaagccctcctggca

SEQ ID NO: 1933300 - DNA, 25 bp, Homo sapien
tcttcgtgtatctctgactgctgtt

SEQ ID NO: 1933301 - DNA, 25 bp, Homo sapien
aaataggctgaatgaatgtgactac

SEQ ID NO: 1933302 - DNA, 25 bp, Homo sapien
accacactcgaccagataaatattt

SEQ ID NO: 1933303 - DNA, 25 bp, Homo sapien
tggtgcagtgttatcaggcgacgtt

SEQ ID NO: 1933304 - DNA, 25 bp, Homo sapien
ggtccgattcatatctaaagatgat

SEQ ID NO: 1933305 - DNA, 25 bp, Homo sapien
tgatgatctagaatgagagggctgt

SEQ ID NO: 1933306 - DNA, 25 bp, Homo sapien
tgtggtgactgtaaaggtccgattc

SEQ ID NO: 1933307 - DNA, 25 bp, Homo sapien
ttggtcatactactgatatcagagc

SEQ ID NO: 1933308 - DNA, 25 bp, Homo sapien
gcagcaaaggatcttattagcatga

SEQ ID NO: 1933309 - DNA, 25 bp, Homo sapien
tttacacttggctaagcagcaaagg

SEQ ID NO: 1933310 - DNA, 25 bp, Homo sapien
gatagcactgtttatgatgtaccct

SEQ ID NO: 1933311 - DNA, 25 bp, Homo sapien
tagactgcatacttagtgttacgct

SEQ ID NO: 1933312 - DNA, 25 bp, Homo sapien
tacagaagtgctcggcctcaaaaat

SEQ ID NO: 1933313 - DNA, 25 bp, Homo sapien
gaagtaccctttcatgtgtccgcag

SEQ ID NO: 1933314 - DNA, 25 bp, Homo sapien
ggtgactatgctcaaactcaactcg

SEQ ID NO: 1933315 - DNA, 25 bp, Homo sapien
cctctggtaatctgatctgcatata

SEQ ID NO: 1933316 - DNA, 25 bp, Homo sapien
ttgctaccaaagtctttcatattct

SEQ ID NO: 1933317 - DNA, 25 bp, Homo sapien
caaggcctctggtaatctgatctgc

SEQ ID NO: 1933318 - DNA, 25 bp, Homo sapien
ggcctctggtaatctgatctgcata

SEQ ID NO: 1933319 - DNA, 25 bp, Homo sapien
catccactgggcacacagcaaaatg

SEQ ID NO: 1933320 - DNA, 25 bp, Homo sapien
gctgcttggagattctgcatcctcg

SEQ ID NO: 1933321 - DNA, 25 bp, Homo sapien
tgatactcaacacgtgcaaaaagtg

SEQ ID NO: 1933322 - DNA, 25 bp, Homo sapien
tatatgtaacgcagaacttcagggt

SEQ ID NO: 1933323 - DNA, 25 bp, Homo sapien
tggaaaggatcaaaattacttgtct

SEQ ID NO: 1933324 - DNA, 25 bp, Homo sapien
tttaaacattaaaacgcagcaagat

SEQ ID NO: 1933325 - DNA, 25 bp, Homo sapien
gtaacctaacagctttcagagaaca

SEQ ID NO: 1933326 - DNA, 25 bp, Homo sapien
ttagagcttccacaacataccattt

SEQ ID NO: 1933327 - DNA, 25 bp, Homo sapien
gaagtaaaagagtctgaactactgt

SEQ ID NO: 1933328 - DNA, 25 bp, Homo sapien
tacattgctcccgatctgttctggg

SEQ ID NO: 1933329 - DNA, 25 bp, Homo sapien
taaaagagtctgaactactgtaacc

SEQ ID NO: 1933330 - DNA, 25 bp, Homo sapien
ctttgacgagttacattgctcccga

SEQ ID NO: 1933331 - DNA, 25 bp, Homo sapien
tggttctgtatctgtaggttccaca

SEQ ID NO: 1933332 - DNA, 25 bp, Homo sapien
ggccctccaaatctgtggttctgta

SEQ ID NO: 1933333 - DNA, 25 bp, Homo sapien
catggcatatttacacagtagacaa

SEQ ID NO: 1933334 - DNA, 25 bp, Homo sapien
gtgatatgctgtttcaagccagaga

SEQ ID NO: 1933335 - DNA, 25 bp, Homo sapien
tctgttaatcacagacatttgtgga

SEQ ID NO: 1933336 - DNA, 25 bp, Homo sapien
gtggaatagtgagaatatgaataat

SEQ ID NO: 1933337 - DNA, 25 bp, Homo sapien
ctggaaccaattccctaaacatatt

SEQ ID NO: 1933338 - DNA, 25 bp, Homo sapien
tccctaaacatattgagggatgact

SEQ ID NO: 1933339 - DNA, 25 bp, Homo sapien
gcctattaccattaggagagccaga

SEQ ID NO: 1933340 - DNA, 25 bp, Homo sapien
tgcttgcaccctagacaccaagctg

SEQ ID NO: 1933341 - DNA, 25 bp, Homo sapien
aaattgtgtcctgttttgtctcgcc

SEQ ID NO: 1933342 - DNA, 25 bp, Homo sapien
aaaagcaggctcaaatcatgtcact

SEQ ID NO: 1933343 - DNA, 25 bp, Homo sapien
gcgaatttcaccgatgaatttatct

SEQ ID NO: 1933344 - DNA, 25 bp, Homo sapien
taatgggctagtgggatttgtatga

SEQ ID NO: 1933345 - DNA, 25 bp, Homo sapien
cagtattaccagaagcgaatttcac

SEQ ID NO: 1933346 - DNA, 25 bp, Homo sapien
aaggtcagatggtttcacaagtaat

SEQ ID NO: 1933347 - DNA, 25 bp, Homo sapien
taatttataacgctgacttacacaa

SEQ ID NO: 1933348 - DNA, 25 bp, Homo sapien
tacataattgtagaaagtactagct

SEQ ID NO: 1933349 - DNA, 25 bp, Homo sapien
tctgccataatagaagatagtttat

SEQ ID NO: 1933350 - DNA, 25 bp, Homo sapien
cccacggggtattagaaatgtcaca

SEQ ID NO: 1933351 - DNA, 25 bp, Homo sapien
ttgcttggagtcatacgaatgggaa

SEQ ID NO: 1933352 - DNA, 25 bp, Homo sapien
ttggagtcatacgaatgggaactgg

SEQ ID NO: 1933353 - DNA, 25 bp, Homo sapien
ttttgcttggagtcatacgaatggg

SEQ ID NO: 1933354 - DNA, 25 bp, Homo sapien
gcttggagtcatacgaatgggaact

SEQ ID NO: 1933355 - DNA, 25 bp, Homo sapien
gagaaagcgaagttccagcataccc

SEQ ID NO: 1933356 - DNA, 25 bp, Homo sapien
aatttcttgcccctacaccacagag

SEQ ID NO: 1933357 - DNA, 25 bp, Homo sapien
tgtgctaacaccaagcccttgctag

SEQ ID NO: 1933358 - DNA, 25 bp, Homo sapien
tctggacagggttcatgtacttaac

SEQ ID NO: 1933359 - DNA, 25 bp, Homo sapien
tgaacttgattctctctaacaggac

SEQ ID NO: 1933360 - DNA, 25 bp, Homo sapien
ttttcaaagcaacacagtaagccac

SEQ ID NO: 1933361 - DNA, 25 bp, Homo sapien
gcttctctagacacatgtaccagat

SEQ ID NO: 1933362 - DNA, 25 bp, Homo sapien
cccaagggacaggtgtagcatatat

SEQ ID NO: 1933363 - DNA, 25 bp, Homo sapien
tgagcttgaagagcgttcactaaat

SEQ ID NO: 1933364 - DNA, 25 bp, Homo sapien
gtttgtgagcttgaagagcgttcac

SEQ ID NO: 1933365 - DNA, 25 bp, Homo sapien
aatcaaattgggtcagagtttgtga

SEQ ID NO: 1933366 - DNA, 25 bp, Homo sapien
aatgttagaatcaaattgggtcaga

SEQ ID NO: 1933367 - DNA, 25 bp, Homo sapien
cacaatacaggagcaaagtctaagt

SEQ ID NO: 1933368 - DNA, 25 bp, Homo sapien
aagtcagtgcgacttgccagtgcga

SEQ ID NO: 1933369 - DNA, 25 bp, Homo sapien
cagtgcgacccctgaaagatgattc

SEQ ID NO: 1933370 - DNA, 25 bp, Homo sapien
gagagacaagtcagcatgatgagaa

SEQ ID NO: 1933371 - DNA, 25 bp, Homo sapien
gagcctgaataacctacctcacctg

SEQ ID NO: 1933372 - DNA, 25 bp, Homo sapien
catgtctggtttagtgatggcatcg

SEQ ID NO: 1933373 - DNA, 25 bp, Homo sapien
tgctctgattcagctcaggccatgt

SEQ ID NO: 1933374 - DNA, 25 bp, Homo sapien
gatggcatcgatggtgacttgcttg

SEQ ID NO: 1933375 - DNA, 25 bp, Homo sapien
ctggaacactgtgtcaaccctgcct

SEQ ID NO: 1933376 - DNA, 25 bp, Homo sapien
gaacactgtgtcaaccctgcctccc

SEQ ID NO: 1933377 - DNA, 25 bp, Homo sapien
ggaacactgtgtcaaccctgcctcc

SEQ ID NO: 1933378 - DNA, 25 bp, Homo sapien
tggaacactgtgtcaaccctgcctc

SEQ ID NO: 1933379 - DNA, 25 bp, Homo sapien
tttgcatgcctatagaaagcctagc

SEQ ID NO: 1933380 - DNA, 25 bp, Homo sapien
taattcaggtcgacagaagtacttc

SEQ ID NO: 1933381 - DNA, 25 bp, Homo sapien
cataaacctagggtaacaaatcgct

SEQ ID NO: 1933382 - DNA, 25 bp, Homo sapien
cctagcatgttactccaaggagctg

SEQ ID NO: 1933383 - DNA, 25 bp, Homo sapien
catctttatcaaagtctgagagttc

SEQ ID NO: 1933384 - DNA, 25 bp, Homo sapien
cagtttgggcattaagctttcagga

SEQ ID NO: 1933385 - DNA, 25 bp, Homo sapien
cagcacaaaactcatccagtgtcaa

SEQ ID NO: 1933386 - DNA, 25 bp, Homo sapien
cattcttcctagcaaccaccagatg

SEQ ID NO: 1933387 - DNA, 25 bp, Homo sapien
tcaagaataggaagttttgattttg

SEQ ID NO: 1933388 - DNA, 25 bp, Homo sapien
agttcaagaataggaagttttgatt

SEQ ID NO: 1933389 - DNA, 25 bp, Homo sapien
gaataaatccgtttagatcaggctg

SEQ ID NO: 1933390 - DNA, 25 bp, Homo sapien
ggaataaatccgtttagatcaggct

SEQ ID NO: 1933391 - DNA, 25 bp, Homo sapien
ctggaataaatccgtttagatcagg

SEQ ID NO: 1933392 - DNA, 25 bp, Homo sapien
ataaatccgtttagatcaggctgaa

SEQ ID NO: 1933393 - DNA, 25 bp, Homo sapien
gctgatgctacagttcgtactgttg

SEQ ID NO: 1933394 - DNA, 25 bp, Homo sapien
tttccagggatcatcataactactg

SEQ ID NO: 1933395 - DNA, 25 bp, Homo sapien
gattgcctacgaatttcaatggcag

SEQ ID NO: 1933396 - DNA, 25 bp, Homo sapien
ctacagttcgtactgttgtctggtc

SEQ ID NO: 1933397 - DNA, 25 bp, Homo sapien
gagtatctgcaaaactgacccagtt

SEQ ID NO: 1933398 - DNA, 25 bp, Homo sapien
gaggtggggaatgccctgaccacac

SEQ ID NO: 1933399 - DNA, 25 bp, Homo sapien
ctggacagaagcaggatgcatggtt

SEQ ID NO: 1933400 - DNA, 25 bp, Homo sapien
agtactggttggtggagtatctgca

SEQ ID NO: 1933401 - DNA, 25 bp, Homo sapien
caaagggagaccaaaatggcccagg

SEQ ID NO: 1933402 - DNA, 25 bp, Homo sapien
tcctccatgtgtgtggagaagttgg

SEQ ID NO: 1933403 - DNA, 25 bp, Homo sapien
ggtcccgcgagaggcctctcactat

SEQ ID NO: 1933404 - DNA, 25 bp, Homo sapien
ccgctgggatgacggctgtgcttcc

SEQ ID NO: 1933405 - DNA, 25 bp, Homo sapien
gtgaaactactggggatgcaggttc

SEQ ID NO: 1933406 - DNA, 25 bp, Homo sapien
ctgtggtgaaactactggggatgca

SEQ ID NO: 1933407 - DNA, 25 bp, Homo sapien
tggtgaaactactggggatgcaggt

SEQ ID NO: 1933408 - DNA, 25 bp, Homo sapien
tgtggtgaaactactggggatgcag

SEQ ID NO: 1933409 - DNA, 25 bp, Homo sapien
tgcatctgcagatgtacgaggctga

SEQ ID NO: 1933410 - DNA, 25 bp, Homo sapien
catggcttacggatccctttttcac

SEQ ID NO: 1933411 - DNA, 25 bp, Homo sapien
gaattacaccagaatacgacccttg

SEQ ID NO: 1933412 - DNA, 25 bp, Homo sapien
gaggctgaaccgtatcatggcttac

SEQ ID NO: 1933413 - DNA, 25 bp, Homo sapien
aagaatatgaggctgcatggcgaga

SEQ ID NO: 1933414 - DNA, 25 bp, Homo sapien
gctgcatggcgagattcctgttcat

SEQ ID NO: 1933415 - DNA, 25 bp, Homo sapien
aggctgcatggcgagattcctgttc

SEQ ID NO: 1933416 - DNA, 25 bp, Homo sapien
tatgaggctgcatggcgagattcct

SEQ ID NO: 1933417 - DNA, 25 bp, Homo sapien
gtcttgttgcaccacaaagctccat

SEQ ID NO: 1933418 - DNA, 25 bp, Homo sapien
agtttcaaagcaatgtagaactgac

SEQ ID NO: 1933419 - DNA, 25 bp, Homo sapien
tacaagtttcaaagcaatgtagaac

SEQ ID NO: 1933420 - DNA, 25 bp, Homo sapien
aaaataaccaagtcttgttgcacca

SEQ ID NO: 1933421 - DNA, 25 bp, Homo sapien
tagaccaactcctgacgcacagtgt

SEQ ID NO: 1933422 - DNA, 25 bp, Homo sapien
gacaactgagtagtaaccaagggaa

SEQ ID NO: 1933423 - DNA, 25 bp, Homo sapien
gaggccttccttgagcactctactg

SEQ ID NO: 1933424 - DNA, 25 bp, Homo sapien
ttaaatgtcatgctttcagaggcct

SEQ ID NO: 1933425 - DNA, 25 bp, Homo sapien
ctttacatcatcttcagcattgaag

SEQ ID NO: 1933426 - DNA, 25 bp, Homo sapien
acatcatcttcagcattgaagtaca

SEQ ID NO: 1933427 - DNA, 25 bp, Homo sapien
tttacatcatcttcagcattgaagt

SEQ ID NO: 1933428 - DNA, 25 bp, Homo sapien
tacatcatcttcagcattgaagtac

SEQ ID NO: 1933429 - DNA, 25 bp, Homo sapien
caaaacataaggctgctctactgcc

SEQ ID NO: 1933430 - DNA, 25 bp, Homo sapien
tgattcaagtacacacccgtatctg

SEQ ID NO: 1933431 - DNA, 25 bp, Homo sapien
ttacagccacatcaaggcctatctg

SEQ ID NO: 1933432 - DNA, 25 bp, Homo sapien
cactatgtgcaagaattgggtacac

SEQ ID NO: 1933433 - DNA, 25 bp, Homo sapien
caatgcaaggactgtagtggtggct

SEQ ID NO: 1933434 - DNA, 25 bp, Homo sapien
tggttggcaacctgagcacaagctt

SEQ ID NO: 1933435 - DNA, 25 bp, Homo sapien
cagtaggaagacaatcaggacgtta

SEQ ID NO: 1933436 - DNA, 25 bp, Homo sapien
taattagtacttggcccctgtaaga

SEQ ID NO: 1933437 - DNA, 25 bp, Homo sapien
agaagagacaatatccaccaagaag

SEQ ID NO: 1933438 - DNA, 25 bp, Homo sapien
atttggtgatcaggataacaatgaa

SEQ ID NO: 1933439 - DNA, 25 bp, Homo sapien
gggaagtgaaaggtcactggatttg

SEQ ID NO: 1933440 - DNA, 25 bp, Homo sapien
tcagctccacgatgaacaagaagag

SEQ ID NO: 1933441 - DNA, 25 bp, Homo sapien
tgaaagcactatgcagtctggtctc

SEQ ID NO: 1933442 - DNA, 25 bp, Homo sapien
taagagaacagccttgaagtaacga

SEQ ID NO: 1933443 - DNA, 25 bp, Homo sapien
gactacatgcttgtctaccactgct

SEQ ID NO: 1933444 - DNA, 25 bp, Homo sapien
tgtttgactagcatcacctgaccaa

SEQ ID NO: 1933445 - DNA, 25 bp, Homo sapien
ggcatcaccattctataggctcaaa

SEQ ID NO: 1933446 - DNA, 25 bp, Homo sapien
tgagtcctctagtgctaaacttcac

SEQ ID NO: 1933447 - DNA, 25 bp, Homo sapien
caaattaattatccagtgaaagggc

SEQ ID NO: 1933448 - DNA, 25 bp, Homo sapien
tatttccacgttaatggcatcacca

SEQ ID NO: 1933449 - DNA, 25 bp, Homo sapien
taaagccaagattccacaaattctg

SEQ ID NO: 1933450 - DNA, 25 bp, Homo sapien
tctatagagcagagcttgagtgagt

SEQ ID NO: 1933451 - DNA, 25 bp, Homo sapien
ggcactatcagtttggtagcattaa

SEQ ID NO: 1933452 - DNA, 25 bp, Homo sapien
tacttgataaccttctaagaaccag

SEQ ID NO: 1933453 - DNA, 25 bp, Homo sapien
tattccagtggacaaagcaacccaa

SEQ ID NO: 1933454 - DNA, 25 bp, Homo sapien
tctagaactgtcgtattccaaagtc

SEQ ID NO: 1933455 - DNA, 25 bp, Homo sapien
tttaagtaacattagaatggcccac

SEQ ID NO: 1933456 - DNA, 25 bp, Homo sapien
ggattgggaccaagatctagctcct

SEQ ID NO: 1933457 - DNA, 25 bp, Homo sapien
taatctaagccattgctgtctgctg

SEQ ID NO: 1933458 - DNA, 25 bp, Homo sapien
gatctctctaacaggcctacttgac

SEQ ID NO: 1933459 - DNA, 25 bp, Homo sapien
cttgacaatcttacaggcttctgag

SEQ ID NO: 1933460 - DNA, 25 bp, Homo sapien
tatccactagcgtatctgcttccac

SEQ ID NO: 1933461 - DNA, 25 bp, Homo sapien
taatgtagaagtccataagatgagc

SEQ ID NO: 1933462 - DNA, 25 bp, Homo sapien
taagatgagcttgactcaattaggg

SEQ ID NO: 1933463 - DNA, 25 bp, Homo sapien
tcttttcgacattggcacaagtcag

SEQ ID NO: 1933464 - DNA, 25 bp, Homo sapien
ggaaggctggaaatcacaaattaag

SEQ ID NO: 1933465 - DNA, 25 bp, Homo sapien
caaatccacaagttccacaaatgct

SEQ ID NO: 1933466 - DNA, 25 bp, Homo sapien
ccaaatccacaagttccacaaatgc

SEQ ID NO: 1933467 - DNA, 25 bp, Homo sapien
aaatccacaagttccacaaatgctt

SEQ ID NO: 1933468 - DNA, 25 bp, Homo sapien
atccacaagttccacaaatgctttc

SEQ ID NO: 1933469 - DNA, 25 bp, Homo sapien
tgtaggaccacgtcgttcggcagct

SEQ ID NO: 1933470 - DNA, 25 bp, Homo sapien
caatgtcgcagtaggagaagagatc

SEQ ID NO: 1933471 - DNA, 25 bp, Homo sapien
tgaatagtatttctgctccgcatcg

SEQ ID NO: 1933472 - DNA, 25 bp, Homo sapien
gcatcgctcagcgttaagccttcca

SEQ ID NO: 1933473 - DNA, 25 bp, Homo sapien
tccgccgccatttacagtgccccgg

SEQ ID NO: 1933474 - DNA, 25 bp, Homo sapien
ctccggagcggcagcgcttcccgga

SEQ ID NO: 1933475 - DNA, 25 bp, Homo sapien
ggaggcgcgaggcactggcggactc

SEQ ID NO: 1933476 - DNA, 25 bp, Homo sapien
gcccgagcaacagggcccggaggtc

SEQ ID NO: 1933477 - DNA, 25 bp, Homo sapien
ggtagcttacaaactttcagactgc

SEQ ID NO: 1933478 - DNA, 25 bp, Homo sapien
ctggttctcctctaaaggcctttga

SEQ ID NO: 1933479 - DNA, 25 bp, Homo sapien
tgttcctggtttgaggatgtctggt

SEQ ID NO: 1933480 - DNA, 25 bp, Homo sapien
gatcccctttcatgtcaacattttg

SEQ ID NO: 1933481 - DNA, 25 bp, Homo sapien
acagggaccaaaccagtcatccttc

SEQ ID NO: 1933482 - DNA, 25 bp, Homo sapien
taaagaacccctttgtctacacaca

SEQ ID NO: 1933483 - DNA, 25 bp, Homo sapien
tttgtctacacacagggaccaaacc

SEQ ID NO: 1933484 - DNA, 25 bp, Homo sapien
ggaccaaaccagtcatccttcctgt

SEQ ID NO: 1933485 - DNA, 25 bp, Homo sapien
ggcttactccccatgtgattaccat

SEQ ID NO: 1933486 - DNA, 25 bp, Homo sapien
aatgcacacttgactccacccatgg

SEQ ID NO: 1933487 - DNA, 25 bp, Homo sapien
cttcaggcttactccccatgtgatt

SEQ ID NO: 1933488 - DNA, 25 bp, Homo sapien
catggtccgctcagcagagtgaagt

SEQ ID NO: 1933489 - DNA, 25 bp, Homo sapien
catgaccagaatatccacacaaggg

SEQ ID NO: 1933490 - DNA, 25 bp, Homo sapien
gaccagaatatccacacaagggctt

SEQ ID NO: 1933491 - DNA, 25 bp, Homo sapien
aaaattgccatgaccagaatatcca

SEQ ID NO: 1933492 - DNA, 25 bp, Homo sapien
ttgccatgaccagaatatccacaca

SEQ ID NO: 1933493 - DNA, 25 bp, Homo sapien
ccagtgtcctaatcaggctaagttc

SEQ ID NO: 1933494 - DNA, 25 bp, Homo sapien
gtgtcctaatcaggctaagttctcc

SEQ ID NO: 1933495 - DNA, 25 bp, Homo sapien
ggccagtgtcctaatcaggctaagt

SEQ ID NO: 1933496 - DNA, 25 bp, Homo sapien
ttggccagtgtcctaatcaggctaa

SEQ ID NO: 1933497 - DNA, 25 bp, Homo sapien
caagttcctttgagtaattatgctc

SEQ ID NO: 1933498 - DNA, 25 bp, Homo sapien
gagtaattatgctcattagtttcct

SEQ ID NO: 1933499 - DNA, 25 bp, Homo sapien
ctgtagggtccacctgtcaagttcc

SEQ ID NO: 1933500 - DNA, 25 bp, Homo sapien
ccacctgtcaagttcctttgagtaa

SEQ ID NO: 1933501 - DNA, 25 bp, Homo sapien
gggtccagacccacgcggcgccagt

SEQ ID NO: 1933502 - DNA, 25 bp, Homo sapien
gcgggaaggaaaaccgcgcagagag

SEQ ID NO: 1933503 - DNA, 25 bp, Homo sapien
gcgccagttctccggcgggaaggaa

SEQ ID NO: 1933504 - DNA, 25 bp, Homo sapien
ggtccagacccacgcggcgccagtt

SEQ ID NO: 1933505 - DNA, 25 bp, Homo sapien
ggatcacgaggttaacctcttagtg

SEQ ID NO: 1933506 - DNA, 25 bp, Homo sapien
cacgaggttaacctcttagtggagg

SEQ ID NO: 1933507 - DNA, 25 bp, Homo sapien
ttaacctcttagtggaggaaattca

SEQ ID NO: 1933508 - DNA, 25 bp, Homo sapien
tagtggaggaaattcatcgtttggg

SEQ ID NO: 1933509 - DNA, 25 bp, Homo sapien
gcaacaagcaaactgaagaccaact

SEQ ID NO: 1933510 - DNA, 25 bp, Homo sapien
gatgataaatgtgccaacctctttg

SEQ ID NO: 1933511 - DNA, 25 bp, Homo sapien
tcttaaagctgcaaaacgaaggaag

SEQ ID NO: 1933512 - DNA, 25 bp, Homo sapien
ttgacattctgcgaaagcaacaagc

SEQ ID NO: 1933513 - DNA, 25 bp, Homo sapien
attgtctgttgatgttgtaatctgc

SEQ ID NO: 1933514 - DNA, 25 bp, Homo sapien
ttattgtctgttgatgttgtaatct

SEQ ID NO: 1933515 - DNA, 25 bp, Homo sapien
ttgtctgttgatgttgtaatctgca

SEQ ID NO: 1933516 - DNA, 25 bp, Homo sapien
agaaaaggagcttattgacagctgg

SEQ ID NO: 1933517 - DNA, 25 bp, Homo sapien
ccaaaaggtattgcaagcatctgtt

SEQ ID NO: 1933518 - DNA, 25 bp, Homo sapien
cagctgtgttccagcggtcaggaag

SEQ ID NO: 1933519 - DNA, 25 bp, Homo sapien
tgttagtgcaacattaaaggcttgg

SEQ ID NO: 1933520 - DNA, 25 bp, Homo sapien
gactgctactagagccgtgagttca

SEQ ID NO: 1933521 - DNA, 25 bp, Homo sapien
ttcctgtggcagacaatcctgttag

SEQ ID NO: 1933522 - DNA, 25 bp, Homo sapien
ttagtgggtcagagggtccataggc

SEQ ID NO: 1933523 - DNA, 25 bp, Homo sapien
cacactgtcagtacgtttgggcttt

SEQ ID NO: 1933524 - DNA, 25 bp, Homo sapien
ttccacactgtcagtacgtttgggc

SEQ ID NO: 1933525 - DNA, 25 bp, Homo sapien
tcagagggtccataggcctctctga

SEQ ID NO: 1933526 - DNA, 25 bp, Homo sapien
gtctgccgcgggagagttttcacca

SEQ ID NO: 1933527 - DNA, 25 bp, Homo sapien
gctctgcagaaggtgtccttggcta

SEQ ID NO: 1933528 - DNA, 25 bp, Homo sapien
ttttcaccaaggagacaggaaggct

SEQ ID NO: 1933529 - DNA, 25 bp, Homo sapien
cctgatggcagcgtgcatgcgtaca

SEQ ID NO: 1933530 - DNA, 25 bp, Homo sapien
aagcatctgaaagaaatataagctc

SEQ ID NO: 1933531 - DNA, 25 bp, Homo sapien
ctgccaatgtgttcttctgtttcat

SEQ ID NO: 1933532 - DNA, 25 bp, Homo sapien
gtctcctcctcacccatctcttaat

SEQ ID NO: 1933533 - DNA, 25 bp, Homo sapien
caagtgtctgcagtcctgaggatga

SEQ ID NO: 1933534 - DNA, 25 bp, Homo sapien
tattgtcttcaagtgtctgcagtcc

SEQ ID NO: 1933535 - DNA, 25 bp, Homo sapien
ctcacccatctcttaatattgtctt

SEQ ID NO: 1933536 - DNA, 25 bp, Homo sapien
ggactgagcacagaggctcctctgt

SEQ ID NO: 1933537 - DNA, 25 bp, Homo sapien
tggactgagcacagaggctcctctg

SEQ ID NO: 1933538 - DNA, 25 bp, Homo sapien
ctggactgagcacagaggctcctct

SEQ ID NO: 1933539 - DNA, 25 bp, Homo sapien
actgagcacagaggctcctctgtat

SEQ ID NO: 1933540 - DNA, 25 bp, Homo sapien
tcttagagctggacaaatcaacttc

SEQ ID NO: 1933541 - DNA, 25 bp, Homo sapien
ccagctttgtacaccagagtgcgct

SEQ ID NO: 1933542 - DNA, 25 bp, Homo sapien
catgggtccctggtacaaactgtcc

SEQ ID NO: 1933543 - DNA, 25 bp, Homo sapien
ttcaaacttgggcaaggcattgctt

SEQ ID NO: 1933544 - DNA, 25 bp, Homo sapien
tcccagtgtgtaagctgctatggtg

SEQ ID NO: 1933545 - DNA, 25 bp, Homo sapien
catttttggtgtccaagtggccacc

SEQ ID NO: 1933546 - DNA, 25 bp, Homo sapien
gccaccaaagcaatatcccagtgtg

SEQ ID NO: 1933547 - DNA, 25 bp, Homo sapien
tatctggggacaagtctagttttgg

SEQ ID NO: 1933548 - DNA, 25 bp, Homo sapien
tggcagcggcgggcgcggcgggagc

SEQ ID NO: 1933549 - DNA, 25 bp, Homo sapien
ccctggcagcggcgggcgcggcggg

SEQ ID NO: 1933550 - DNA, 25 bp, Homo sapien
ctggcagcggcgggcgcggcgggag

SEQ ID NO: 1933551 - DNA, 25 bp, Homo sapien
ggcagcggcgggcgcggcgggagcg

SEQ ID NO: 1933552 - DNA, 25 bp, Homo sapien
tgctgcgtcgatcgccacaggtgaa

SEQ ID NO: 1933553 - DNA, 25 bp, Homo sapien
gaaagagccgcccaagttgagaaga

SEQ ID NO: 1933554 - DNA, 25 bp, Homo sapien
gatccgattgaaaacttaggcaccg

SEQ ID NO: 1933555 - DNA, 25 bp, Homo sapien
tgcgagagtcaggaagtgctcaccc

SEQ ID NO: 1933556 - DNA, 25 bp, Homo sapien
actgtaggccccgttggctgtgtct

SEQ ID NO: 1933557 - DNA, 25 bp, Homo sapien
gaatgtcgcctgttagaactgtagg

SEQ ID NO: 1933558 - DNA, 25 bp, Homo sapien
gaacataggcggctgaatgtcgcct

SEQ ID NO: 1933559 - DNA, 25 bp, Homo sapien
agtgctctgaacataggcggctgaa

SEQ ID NO: 1933560 - DNA, 25 bp, Homo sapien
aatactagttttgggtagcctgtgt

SEQ ID NO: 1933561 - DNA, 25 bp, Homo sapien
gaatactagttttgggtagcctgtg

SEQ ID NO: 1933562 - DNA, 25 bp, Homo sapien
tttcagaatactagttttgggtagc

SEQ ID NO: 1933563 - DNA, 25 bp, Homo sapien
cagaatactagttttgggtagcctg

SEQ ID NO: 1933564 - DNA, 25 bp, Homo sapien
tagtcttttcagcagaggtcattgg

SEQ ID NO: 1933565 - DNA, 25 bp, Homo sapien
aaggggccaaatcggccatggcctt

SEQ ID NO: 1933566 - DNA, 25 bp, Homo sapien
gaggtcattgggatttcagaggtaa

SEQ ID NO: 1933567 - DNA, 25 bp, Homo sapien
gggtaaagtcattagtcttttcagc

SEQ ID NO: 1933568 - DNA, 25 bp, Homo sapien
tggctctgtgtcatctcccacagtc

SEQ ID NO: 1933569 - DNA, 25 bp, Homo sapien
tatgagaccgtctatgttccagcgg

SEQ ID NO: 1933570 - DNA, 25 bp, Homo sapien
tcctttctgggaaccggcttggctg

SEQ ID NO: 1933571 - DNA, 25 bp, Homo sapien
tattcaggacaacctaaagctcagg

SEQ ID NO: 1933572 - DNA, 25 bp, Homo sapien
cagaccaccttagacgagaaatcgg

SEQ ID NO: 1933573 - DNA, 25 bp, Homo sapien
gctggaacgagaagcaatgccgcca

SEQ ID NO: 1933574 - DNA, 25 bp, Homo sapien
cacttgaagaaggacacagactggt

SEQ ID NO: 1933575 - DNA, 25 bp, Homo sapien
ttaaagaacgccatccatctggagc

SEQ ID NO: 1933576 - DNA, 25 bp, Homo sapien
tgatctgcagcttcggtaggccggt

SEQ ID NO: 1933577 - DNA, 25 bp, Homo sapien
ggcttggttcgtaaaaagaggcagc

SEQ ID NO: 1933578 - DNA, 25 bp, Homo sapien
tacccaggtcaggtgtttgttgatg

SEQ ID NO: 1933579 - DNA, 25 bp, Homo sapien
ttggtaagcagagggtctacccagg

SEQ ID NO: 1933580 - DNA, 25 bp, Homo sapien
aaggtggactggatcttggtaagca

SEQ ID NO: 1933581 - DNA, 25 bp, Homo sapien
gaatttagaactgccgtcagtgtag

SEQ ID NO: 1933582 - DNA, 25 bp, Homo sapien
gatgctgatctttaacccacctaaa

SEQ ID NO: 1933583 - DNA, 25 bp, Homo sapien
tcctgtacccagatgcaaaaagtgc

SEQ ID NO: 1933584 - DNA, 25 bp, Homo sapien
tagtgtatgctgtgttccatgttgc

SEQ ID NO: 1933585 - DNA, 25 bp, Homo sapien
taggatgctgcctaacccagttcat

SEQ ID NO: 1933586 - DNA, 25 bp, Homo sapien
tcctggtagcagctgttgagtaact

SEQ ID NO: 1933587 - DNA, 25 bp, Homo sapien
cctgttcactgaatattccgggtaa

SEQ ID NO: 1933588 - DNA, 25 bp, Homo sapien
tggatgggctccattaaaaccagct

SEQ ID NO: 1933589 - DNA, 25 bp, Homo sapien
tcagccctgattccccgacagttcc

SEQ ID NO: 1933590 - DNA, 25 bp, Homo sapien
cgacagttccctctttactggctcg

SEQ ID NO: 1933591 - DNA, 25 bp, Homo sapien
tgtatcagagattctctcagccctg

SEQ ID NO: 1933592 - DNA, 25 bp, Homo sapien
agttccctctttactggctcgtcag

SEQ ID NO: 1933593 - DNA, 25 bp, Homo sapien
agggcctttggaatgtgaccatgag

SEQ ID NO: 1933594 - DNA, 25 bp, Homo sapien
gagggcctttggaatgtgaccatga

SEQ ID NO: 1933595 - DNA, 25 bp, Homo sapien
ggcagtttcagagtgagggcctttg

SEQ ID NO: 1933596 - DNA, 25 bp, Homo sapien
agtttcagagtgagggcctttggaa

SEQ ID NO: 1933597 - DNA, 25 bp, Homo sapien
gcttagaaatgagggtgggacacac

SEQ ID NO: 1933598 - DNA, 25 bp, Homo sapien
ccaggagcttagaaatgagggtggg

SEQ ID NO: 1933599 - DNA, 25 bp, Homo sapien
cgttcacatcccatgccaggagctt

SEQ ID NO: 1933600 - DNA, 25 bp, Homo sapien
tcttctacaaactgcccgttcacat

SEQ ID NO: 1933601 - DNA, 25 bp, Homo sapien
ttcctccaggaggacgcacggcaga

SEQ ID NO: 1933602 - DNA, 25 bp, Homo sapien
tcttgttcgatgaaattcttggagc

SEQ ID NO: 1933603 - DNA, 25 bp, Homo sapien
agaatcaaaacgcagagcagctggg

SEQ ID NO: 1933604 - DNA, 25 bp, Homo sapien
gagagaggaaaagtgcatcggcacc

SEQ ID NO: 1933605 - DNA, 25 bp, Homo sapien
taatgttgaatttggctggataccc

SEQ ID NO: 1933606 - DNA, 25 bp, Homo sapien
tgttgcagctatcctttaccctagg

SEQ ID NO: 1933607 - DNA, 25 bp, Homo sapien
aggagaccctcctggattatggtga

SEQ ID NO: 1933608 - DNA, 25 bp, Homo sapien
gaagaagcctctgaaggcacggtga

SEQ ID NO: 1933609 - DNA, 25 bp, Homo sapien
ggactctctgaatcccgtgaaggga

SEQ ID NO: 1933610 - DNA, 25 bp, Homo sapien
tcacggcggtttggacactattaac

SEQ ID NO: 1933611 - DNA, 25 bp, Homo sapien
ttagtcgacgccttccagattggtg

SEQ ID NO: 1933612 - DNA, 25 bp, Homo sapien
ccttggagggaggttcagcatcact

SEQ ID NO: 1933613 - DNA, 25 bp, Homo sapien
gcagaggttctctagcctcccgatt

SEQ ID NO: 1933614 - DNA, 25 bp, Homo sapien
catcggagttgtgctgactttggtc

SEQ ID NO: 1933615 - DNA, 25 bp, Homo sapien
ctctcttcttgtaaagcacggcaga

SEQ ID NO: 1933616 - DNA, 25 bp, Homo sapien
tcatattctttagctctcagtgctt

SEQ ID NO: 1933617 - DNA, 25 bp, Homo sapien
tcaaatcgggctttccatgtggctg

SEQ ID NO: 1933618 - DNA, 25 bp, Homo sapien
cttcaatcatgtccaacagagcttt

SEQ ID NO: 1933619 - DNA, 25 bp, Homo sapien
tacagttctcaaatcgggctttcca

SEQ ID NO: 1933620 - DNA, 25 bp, Homo sapien
tccaacagagctttgttacagttct

SEQ ID NO: 1933621 - DNA, 25 bp, Homo sapien
agatgaagtggagaacgaggcatgt

SEQ ID NO: 1933622 - DNA, 25 bp, Homo sapien
ttcttgtttgtaggatctcttcttt

SEQ ID NO: 1933623 - DNA, 25 bp, Homo sapien
cttctttgcttagatgaagtggaga

SEQ ID NO: 1933624 - DNA, 25 bp, Homo sapien
gcttttagttagtgtgctctggaat

SEQ ID NO: 1933625 - DNA, 25 bp, Homo sapien
cgtggcaaacacctcgttgctttta

SEQ ID NO: 1933626 - DNA, 25 bp, Homo sapien
acctcgttgcttttagttagtgtgc

SEQ ID NO: 1933627 - DNA, 25 bp, Homo sapien
agttagtgtgctctggaattcttca

SEQ ID NO: 1933628 - DNA, 25 bp, Homo sapien
ctttgactggatgttgccggcgcag

SEQ ID NO: 1933629 - DNA, 25 bp, Homo sapien
gccggcgcagaacatttctttttca

SEQ ID NO: 1933630 - DNA, 25 bp, Homo sapien
ccatgcctcgtccacctggcctcac

SEQ ID NO: 1933631 - DNA, 25 bp, Homo sapien
ctttttcatagatataatattgtgc

SEQ ID NO: 1933632 - DNA, 25 bp, Homo sapien
ctgcaggactgtctcttgctccttc

SEQ ID NO: 1933633 - DNA, 25 bp, Homo sapien
cagcactttcgcctgaagtttccac

SEQ ID NO: 1933634 - DNA, 25 bp, Homo sapien
tctttttcccatgacccagcctctc

SEQ ID NO: 1933635 - DNA, 25 bp, Homo sapien
ctttttcctcatctaagtttgtctt

SEQ ID NO: 1933636 - DNA, 25 bp, Homo sapien
ttgtctttttcccatgacccagcct

SEQ ID NO: 1933637 - DNA, 25 bp, Homo sapien
aactggaaagcttctttttcctcat

SEQ ID NO: 1933638 - DNA, 25 bp, Homo sapien
ggtagaccagatatgcacaacgact

SEQ ID NO: 1933639 - DNA, 25 bp, Homo sapien
gtagaccagatatgcacaacgacta

SEQ ID NO: 1933640 - DNA, 25 bp, Homo sapien
aggtagaccagatatgcacaacgac

SEQ ID NO: 1933641 - DNA, 25 bp, Homo sapien
gaggtagaccagatatgcacaacga

SEQ ID NO: 1933642 - DNA, 25 bp, Homo sapien
tattccttttctcgtttgtgtcgct

SEQ ID NO: 1933643 - DNA, 25 bp, Homo sapien
ttttctcgtttgtgtcgctcctccg

SEQ ID NO: 1933644 - DNA, 25 bp, Homo sapien
tgcagttctctgtgtttaaatattt

SEQ ID NO: 1933645 - DNA, 25 bp, Homo sapien
ctgcagttctctgtgtttaaatatt

SEQ ID NO: 1933646 - DNA, 25 bp, Homo sapien
gagcttcatatttcgctcactctgc

SEQ ID NO: 1933647 - DNA, 25 bp, Homo sapien
ctctgctgctcgatctggccctgga

SEQ ID NO: 1933648 - DNA, 25 bp, Homo sapien
cgtgagggtactctggaaatggctt

SEQ ID NO: 1933649 - DNA, 25 bp, Homo sapien
tcctgacagagcttcatatttcgct

SEQ ID NO: 1933650 - DNA, 25 bp, Homo sapien
tctccaatttgcttcgagcgaggat

SEQ ID NO: 1933651 - DNA, 25 bp, Homo sapien
tgtgttcaccttgtaactggtcctt

SEQ ID NO: 1933652 - DNA, 25 bp, Homo sapien
gaggagctttaacttcttttgctca

SEQ ID NO: 1933653 - DNA, 25 bp, Homo sapien
cgaggatagctctgctgtgttcacc

SEQ ID NO: 1933654 - DNA, 25 bp, Homo sapien
tcaaacttttcttccggtgtttgca

SEQ ID NO: 1933655 - DNA, 25 bp, Homo sapien
ttcttccggtgtttgcaacttgttc

SEQ ID NO: 1933656 - DNA, 25 bp, Homo sapien
cttttcttccggtgtttgcaacttg

SEQ ID NO: 1933657 - DNA, 25 bp, Homo sapien
ttccggtgtttgcaacttgttcaga

SEQ ID NO: 1933658 - DNA, 25 bp, Homo sapien
ctaatgtgttcttccaaagcaagct

SEQ ID NO: 1933659 - DNA, 25 bp, Homo sapien
tccctaatgtgttcttccaaagcaa

SEQ ID NO: 1933660 - DNA, 25 bp, Homo sapien
tctccctaatgtgttcttccaaagc

SEQ ID NO: 1933661 - DNA, 25 bp, Homo sapien
ctgccttctccctaatgtgttcttc

SEQ ID NO: 1933662 - DNA, 25 bp, Homo sapien
aaatgctcagcgtggtaggaagtct

SEQ ID NO: 1933663 - DNA, 25 bp, Homo sapien
gcgtggtaggaagtctacatgaaag

SEQ ID NO: 1933664 - DNA, 25 bp, Homo sapien
cactgcgaaatgctcagcgtggtag

SEQ ID NO: 1933665 - DNA, 25 bp, Homo sapien
tagccaccacactgcgaaatgctca

SEQ ID NO: 1933666 - DNA, 25 bp, Homo sapien
ctaagaaggctgccaaagctacttg

SEQ ID NO: 1933667 - DNA, 25 bp, Homo sapien
gctctccagaagcaacgggttctct

SEQ ID NO: 1933668 - DNA, 25 bp, Homo sapien
ccttattgctgacgggctctttgac

SEQ ID NO: 1933669 - DNA, 25 bp, Homo sapien
ctttgacagtgggtggctctccaga

SEQ ID NO: 1933670 - DNA, 25 bp, Homo sapien
tgttgactgtcgttccgctgagagc

SEQ ID NO: 1933671 - DNA, 25 bp, Homo sapien
gaaggcaagaagctaagcaagaaga

SEQ ID NO: 1933672 - DNA, 25 bp, Homo sapien
agaaggcaagaagctaagcaagaag

SEQ ID NO: 1933673 - DNA, 25 bp, Homo sapien
cagaaggcaagaagctaagcaagaa

SEQ ID NO: 1933674 - DNA, 25 bp, Homo sapien
acttacatccaactcatccctgtga

SEQ ID NO: 1933675 - DNA, 25 bp, Homo sapien
tctggcttccctaacattagagctt

SEQ ID NO: 1933676 - DNA, 25 bp, Homo sapien
tagtcctcatccgttgtggtttggg

SEQ ID NO: 1933677 - DNA, 25 bp, Homo sapien
gaatcatttaccactatgtattgtg

SEQ ID NO: 1933678 - DNA, 25 bp, Homo sapien
ctgctactggtgacatgagtgtgtg

SEQ ID NO: 1933679 - DNA, 25 bp, Homo sapien
tgacatgagtgtgtgagtaagcctc

SEQ ID NO: 1933680 - DNA, 25 bp, Homo sapien
actggtgacatgagtgtgtgagtaa

SEQ ID NO: 1933681 - DNA, 25 bp, Homo sapien
gtgacatgagtgtgtgagtaagcct

SEQ ID NO: 1933682 - DNA, 25 bp, Homo sapien
catgggtctagggacccagagtgga

SEQ ID NO: 1933683 - DNA, 25 bp, Homo sapien
agtggaagtgggttgacacttccca

SEQ ID NO: 1933684 - DNA, 25 bp, Homo sapien
caacatagtattgggtattctttgg

SEQ ID NO: 1933685 - DNA, 25 bp, Homo sapien
ttatccagacgtgtttttacacaaa

SEQ ID NO: 1933686 - DNA, 25 bp, Homo sapien
tctgcatgcgagatttcagaaccca

SEQ ID NO: 1933687 - DNA, 25 bp, Homo sapien
agtgatcgatgcttccacacggcca

SEQ ID NO: 1933688 - DNA, 25 bp, Homo sapien
gacacctacctactgagagctctag

SEQ ID NO: 1933689 - DNA, 25 bp, Homo sapien
ggccacaatggctcttttaaaatga

SEQ ID NO: 1933690 - DNA, 25 bp, Homo sapien
atattccactctaaggcaactgtga

SEQ ID NO: 1933691 - DNA, 25 bp, Homo sapien
tatttgttagagctacagtggccat

SEQ ID NO: 1933692 - DNA, 25 bp, Homo sapien
gatgtatttgttagagctacagtgg

SEQ ID NO: 1933693 - DNA, 25 bp, Homo sapien
ggccatattccactctaaggcaact

SEQ ID NO: 1933694 - DNA, 25 bp, Homo sapien
tagttctatcctcaatacggtgcag

SEQ ID NO: 1933695 - DNA, 25 bp, Homo sapien
catctgatccaacacaaaagtccca

SEQ ID NO: 1933696 - DNA, 25 bp, Homo sapien
cggccactcccctaaaatatcgatg

SEQ ID NO: 1933697 - DNA, 25 bp, Homo sapien
tacggtgcagagttcaaccacctct

SEQ ID NO: 1933698 - DNA, 25 bp, Homo sapien
cagtgattgatcttggaatatgaaa

SEQ ID NO: 1933699 - DNA, 25 bp, Homo sapien
tggaatatgaaaagcgggaaaagtc

SEQ ID NO: 1933700 - DNA, 25 bp, Homo sapien
cttggaatatgaaaagcgggaaaag

SEQ ID NO: 1933701 - DNA, 25 bp, Homo sapien
attgttcagtgattgatcttggaat

SEQ ID NO: 1933702 - DNA, 25 bp, Homo sapien
ttgatggaggtggttggtctggttc

SEQ ID NO: 1933703 - DNA, 25 bp, Homo sapien
gttctgagtttggcatgattgatgg

SEQ ID NO: 1933704 - DNA, 25 bp, Homo sapien
acattctcagttggaactggaagta

SEQ ID NO: 1933705 - DNA, 25 bp, Homo sapien
ttctgagtttggcatgattgatgga

SEQ ID NO: 1933706 - DNA, 25 bp, Homo sapien
gtgttccggcgtttgagcagcagga

SEQ ID NO: 1933707 - DNA, 25 bp, Homo sapien
acagagcaggtgttgtggcttattc

SEQ ID NO: 1933708 - DNA, 25 bp, Homo sapien
cagagcaggtgttgtggcttattcc

SEQ ID NO: 1933709 - DNA, 25 bp, Homo sapien
tgttccggcgtttgagcagcaggag

SEQ ID NO: 1933710 - DNA, 25 bp, Homo sapien
tccgcttaagctcatcatgacctgt

SEQ ID NO: 1933711 - DNA, 25 bp, Homo sapien
tgttaaatcctgctctccgcttaag

SEQ ID NO: 1933712 - DNA, 25 bp, Homo sapien
tgattaaagcacaccaagaggcatg

SEQ ID NO: 1933713 - DNA, 25 bp, Homo sapien
gcagtgacaactttgcagcttttga

SEQ ID NO: 1933714 - DNA, 25 bp, Homo sapien
tgtttgccactgacgacattccaca

SEQ ID NO: 1933715 - DNA, 25 bp, Homo sapien
tcctgatccagaacagtttggccca

SEQ ID NO: 1933716 - DNA, 25 bp, Homo sapien
aatatctgcccttcgaagttcatgc

SEQ ID NO: 1933717 - DNA, 25 bp, Homo sapien
aatccacaagattaagcagtttgcc

SEQ ID NO: 1933718 - DNA, 25 bp, Homo sapien
ccatttctatcaccaaggacataag

SEQ ID NO: 1933719 - DNA, 25 bp, Homo sapien
gctgtttgcacacgaagtccgtcat

SEQ ID NO: 1933720 - DNA, 25 bp, Homo sapien
atcaaactcgttttgccccagccag

SEQ ID NO: 1933721 - DNA, 25 bp, Homo sapien
cataagaacttcctcgtcgatgaaa

SEQ ID NO: 1933722 - DNA, 25 bp, Homo sapien
ggcggcagcattgcagcggggacgt

SEQ ID NO: 1933723 - DNA, 25 bp, Homo sapien
tgggcggcagcattgcagcggggac

SEQ ID NO: 1933724 - DNA, 25 bp, Homo sapien
cggcagcattgcagcggggacgtgg

SEQ ID NO: 1933725 - DNA, 25 bp, Homo sapien
agcggggacgtgggccacggaggcg

SEQ ID NO: 1933726 - DNA, 25 bp, Homo sapien
gccgctgttgctgctgcccgcgccg

SEQ ID NO: 1933727 - DNA, 25 bp, Homo sapien
gggggtgctgctgccgcccgagccg

SEQ ID NO: 1933728 - DNA, 25 bp, Homo sapien
gcccgagccgccgggggtgctgctg

SEQ ID NO: 1933729 - DNA, 25 bp, Homo sapien
cgcccgagctgctgccagagccgcc

SEQ ID NO: 1933730 - DNA, 25 bp, Homo sapien
ttgcaatctcggaagtgctggtttg

SEQ ID NO: 1933731 - DNA, 25 bp, Homo sapien
gaagtgctggtttgtcccgttcatc

SEQ ID NO: 1933732 - DNA, 25 bp, Homo sapien
gggttgcaatctcggaagtgctggt

SEQ ID NO: 1933733 - DNA, 25 bp, Homo sapien
ttggggttgcaatctcggaagtgct

SEQ ID NO: 1933734 - DNA, 25 bp, Homo sapien
tgcagctgcatgctggccggcaggg

SEQ ID NO: 1933735 - DNA, 25 bp, Homo sapien
ctgcatgctggccggcagggagcct

SEQ ID NO: 1933736 - DNA, 25 bp, Homo sapien
ggagcctccctggctggccaccggg

SEQ ID NO: 1933737 - DNA, 25 bp, Homo sapien
atgctggccggcagggagcctccct

SEQ ID NO: 1933738 - DNA, 25 bp, Homo sapien
tgaactgggagttgttaaacctggc

SEQ ID NO: 1933739 - DNA, 25 bp, Homo sapien
tagtgtatgtgctcgcccattaggg

SEQ ID NO: 1933740 - DNA, 25 bp, Homo sapien
gctcgtggcattcatgttgcccgcg

SEQ ID NO: 1933741 - DNA, 25 bp, Homo sapien
cccattagggcgttgaaggcgtgct

SEQ ID NO: 1933742 - DNA, 25 bp, Homo sapien
cagggtgatggtgcagcccattggt

SEQ ID NO: 1933743 - DNA, 25 bp, Homo sapien
tcatggccatcatatggtctgccat

SEQ ID NO: 1933744 - DNA, 25 bp, Homo sapien
tgccccatgcccatgcggtgggcag

SEQ ID NO: 1933745 - DNA, 25 bp, Homo sapien
gcgcccgtggttcatggccatcata

SEQ ID NO: 1933746 - DNA, 25 bp, Homo sapien
acacgtgtcgcccaccacagcgcac

SEQ ID NO: 1933747 - DNA, 25 bp, Homo sapien
cagataatgagacccgcgccacacg

SEQ ID NO: 1933748 - DNA, 25 bp, Homo sapien
gggcagataatgagacccgcgccac

SEQ ID NO: 1933749 - DNA, 25 bp, Homo sapien
ctggaagtgaaaagggcagataatg

SEQ ID NO: 1933750 - DNA, 25 bp, Homo sapien
cactcataacacagccggacgctgc

SEQ ID NO: 1933751 - DNA, 25 bp, Homo sapien
aacacagccggacgctgcacaaaca

SEQ ID NO: 1933752 - DNA, 25 bp, Homo sapien
cataacacagccggacgctgcacaa

SEQ ID NO: 1933753 - DNA, 25 bp, Homo sapien
actcataacacagccggacgctgca

SEQ ID NO: 1933754 - DNA, 25 bp, Homo sapien
tcacgctcttcctccgggcaaaccc

SEQ ID NO: 1933755 - DNA, 25 bp, Homo sapien
cctcggaggactgggctggcaagag

SEQ ID NO: 1933756 - DNA, 25 bp, Homo sapien
accctgccctcggaggactgggctg

SEQ ID NO: 1933757 - DNA, 25 bp, Homo sapien
gcaaaccctgccctcggaggactgg

SEQ ID NO: 1933758 - DNA, 25 bp, Homo sapien
gaccttcctggcgtgcaaagcgctt

SEQ ID NO: 1933759 - DNA, 25 bp, Homo sapien
gatttctgctccgaagaccgagggc

SEQ ID NO: 1933760 - DNA, 25 bp, Homo sapien
caggaccggctcagcagcacataga

SEQ ID NO: 1933761 - DNA, 25 bp, Homo sapien
ttcgctgtcgcgatgtcggcgccga

SEQ ID NO: 1933762 - DNA, 25 bp, Homo sapien
tggggcagattcggagccgttccct

SEQ ID NO: 1933763 - DNA, 25 bp, Homo sapien
gcagattcggagccgttccctttta

SEQ ID NO: 1933764 - DNA, 25 bp, Homo sapien
ctggggcagattcggagccgttccc

SEQ ID NO: 1933765 - DNA, 25 bp, Homo sapien
ttcggaaaggcggagcgagagcctc

SEQ ID NO: 1933766 - DNA, 25 bp, Homo sapien
cgccaagacgcggattccggaacac

SEQ ID NO: 1933767 - DNA, 25 bp, Homo sapien
tggccacagttaatataggcatttc

SEQ ID NO: 1933768 - DNA, 25 bp, Homo sapien
gcggattccggaacaccgcgaacac

SEQ ID NO: 1933769 - DNA, 25 bp, Homo sapien
gtgtgcttctgctaagtttgcgttt

SEQ ID NO: 1933770 - DNA, 25 bp, Homo sapien
cagctcttggtagctttggcatccg

SEQ ID NO: 1933771 - DNA, 25 bp, Homo sapien
gaggcgtctctgctctgtaaacaaa

SEQ ID NO: 1933772 - DNA, 25 bp, Homo sapien
tggcatccgagctgaggcgtctctg

SEQ ID NO: 1933773 - DNA, 25 bp, Homo sapien
ggtgggggtgtgtacaaacttgcag

SEQ ID NO: 1933774 - DNA, 25 bp, Homo sapien
gtgtgtacaaacttgcagagcctcc

SEQ ID NO: 1933775 - DNA, 25 bp, Homo sapien
tgggggtgtgtacaaacttgcagag

SEQ ID NO: 1933776 - DNA, 25 bp, Homo sapien
ggggtgtgtacaaacttgcagagcc

SEQ ID NO: 1933777 - DNA, 25 bp, Homo sapien
tgagggctgagtaaggctgctcttg

SEQ ID NO: 1933778 - DNA, 25 bp, Homo sapien
cacttgggcaaaactgttatctgtt

SEQ ID NO: 1933779 - DNA, 25 bp, Homo sapien
caaaactgttatctgtttgggaaga

SEQ ID NO: 1933780 - DNA, 25 bp, Homo sapien
agccacttgggcaaaactgttatct

SEQ ID NO: 1933781 - DNA, 25 bp, Homo sapien
tgggcaaaactgttatctgtttggg

SEQ ID NO: 1933782 - DNA, 25 bp, Homo sapien
catcactgactgctgagtaatggac

SEQ ID NO: 1933783 - DNA, 25 bp, Homo sapien
tgaaacaagtttttagaggtgagtc

SEQ ID NO: 1933784 - DNA, 25 bp, Homo sapien
ggtgtgaacttttgactgaaacaag

SEQ ID NO: 1933785 - DNA, 25 bp, Homo sapien
gacaaaggtccccattggtgtgaac

SEQ ID NO: 1933786 - DNA, 25 bp, Homo sapien
ggactgccacccgtttcctctccgc

SEQ ID NO: 1933787 - DNA, 25 bp, Homo sapien
acactcataatgtccagtttccctg

SEQ ID NO: 1933788 - DNA, 25 bp, Homo sapien
actgtgaacctggttcacactcata

SEQ ID NO: 1933789 - DNA, 25 bp, Homo sapien
tgggtgtactgtgaacctggttcac

SEQ ID NO: 1933790 - DNA, 25 bp, Homo sapien
tgagggaaactgtgattttgctcca

SEQ ID NO: 1933791 - DNA, 25 bp, Homo sapien
ctttggcattcttccatgagggaaa

SEQ ID NO: 1933792 - DNA, 25 bp, Homo sapien
ttgctccagactggtcaggtctccc

SEQ ID NO: 1933793 - DNA, 25 bp, Homo sapien
gctccagactggtcaggtctcccat

SEQ ID NO: 1933794 - DNA, 25 bp, Homo sapien
gacctttagagagcatgtgatggac

SEQ ID NO: 1933795 - DNA, 25 bp, Homo sapien
gcctgtggtttctctcgtcctctaa

SEQ ID NO: 1933796 - DNA, 25 bp, Homo sapien
cgtcctctaagaacactcctgttgg

SEQ ID NO: 1933797 - DNA, 25 bp, Homo sapien
acccttggcatagagacaccgtaac

SEQ ID NO: 1933798 - DNA, 25 bp, Homo sapien
gccataccctggtgtttgccagtaa

SEQ ID NO: 1933799 - DNA, 25 bp, Homo sapien
tgtgaagataattgctggtgattct

SEQ ID NO: 1933800 - DNA, 25 bp, Homo sapien
gattctgcgatgacttccttgaaat

SEQ ID NO: 1933801 - DNA, 25 bp, Homo sapien
tgccataccctggtgtttgccagta

SEQ ID NO: 1933802 - DNA, 25 bp, Homo sapien
ggtggatgtcggtgccaaagatgcg

SEQ ID NO: 1933803 - DNA, 25 bp, Homo sapien
ctggaaagacattgacaggccatct

SEQ ID NO: 1933804 - DNA, 25 bp, Homo sapien
ttgggctagaatgctgtgatgccct

SEQ ID NO: 1933805 - DNA, 25 bp, Homo sapien
aagagagcacggcatgaaaacggtt

SEQ ID NO: 1933806 - DNA, 25 bp, Homo sapien
tgttttgcccaattactgagtttgg

SEQ ID NO: 1933807 - DNA, 25 bp, Homo sapien
ccaatgtgcatgactttgcacttgt

SEQ ID NO: 1933808 - DNA, 25 bp, Homo sapien
gagtaatttaagttgctacttccaa

SEQ ID NO: 1933809 - DNA, 25 bp, Homo sapien
caagtggatgagtaatttaagttgc

SEQ ID NO: 1933810 - DNA, 25 bp, Homo sapien
ctgatgacttctccaaatgttcttt

SEQ ID NO: 1933811 - DNA, 25 bp, Homo sapien
tgatgacttctccaaatgttctttt

SEQ ID NO: 1933812 - DNA, 25 bp, Homo sapien
tgacttctccaaatgttctttttcc

SEQ ID NO: 1933813 - DNA, 25 bp, Homo sapien
gatgacttctccaaatgttcttttt

SEQ ID NO: 1933814 - DNA, 25 bp, Homo sapien
agagctggtgttttaggatgtcaaa

SEQ ID NO: 1933815 - DNA, 25 bp, Homo sapien
tgactattagctgactggtccagaa

SEQ ID NO: 1933816 - DNA, 25 bp, Homo sapien
ggtgccatggttgacagaaatttgc

SEQ ID NO: 1933817 - DNA, 25 bp, Homo sapien
gaaatttgcaagatctccgtatcta

SEQ ID NO: 1933818 - DNA, 25 bp, Homo sapien
gctgctgctaacaaaacttgcaggg

SEQ ID NO: 1933819 - DNA, 25 bp, Homo sapien
aagtgaggctgaaagcaatggtagc

SEQ ID NO: 1933820 - DNA, 25 bp, Homo sapien
agaggatgaagtgaggctgaaagca

SEQ ID NO: 1933821 - DNA, 25 bp, Homo sapien
tagctgctgctaacaaaacttgcag

SEQ ID NO: 1933822 - DNA, 25 bp, Homo sapien
cttttccttgatgtctgtgcttcat

SEQ ID NO: 1933823 - DNA, 25 bp, Homo sapien
tctgccattcccactctgccttttc

SEQ ID NO: 1933824 - DNA, 25 bp, Homo sapien
tctgccttttccttgatgtctgtgc

SEQ ID NO: 1933825 - DNA, 25 bp, Homo sapien
ttctgccattcccactctgcctttt

SEQ ID NO: 1933826 - DNA, 25 bp, Homo sapien
ggtctccctctggtttagttccaca

SEQ ID NO: 1933827 - DNA, 25 bp, Homo sapien
catttgaattcggattttgctgcag

SEQ ID NO: 1933828 - DNA, 25 bp, Homo sapien
ttccacctggttcatttgaattcgg

SEQ ID NO: 1933829 - DNA, 25 bp, Homo sapien
gaattcggattttgctgcaggtctc

SEQ ID NO: 1933830 - DNA, 25 bp, Homo sapien
tgcagtgctggttaaacatgaaatt

SEQ ID NO: 1933831 - DNA, 25 bp, Homo sapien
ctgcagtgctggttaaacatgaaat

SEQ ID NO: 1933832 - DNA, 25 bp, Homo sapien
gatttctgagtgtcccaagtcagaa

SEQ ID NO: 1933833 - DNA, 25 bp, Homo sapien
ggtgcttccatcttgcacacttcct

SEQ ID NO: 1933834 - DNA, 25 bp, Homo sapien
gagtaaccacttaggtgcttccatc

SEQ ID NO: 1933835 - DNA, 25 bp, Homo sapien
ttcccaaattgttctatgagtaacc

SEQ ID NO: 1933836 - DNA, 25 bp, Homo sapien
tgttctatgagtaaccacttaggtg

SEQ ID NO: 1933837 - DNA, 25 bp, Homo sapien
ccagcgaagagatgggttggcttcc

SEQ ID NO: 1933838 - DNA, 25 bp, Homo sapien
catttccgtcgggatcacagatggt

SEQ ID NO: 1933839 - DNA, 25 bp, Homo sapien
tacatgcaggtcgtggtgagtcaat

SEQ ID NO: 1933840 - DNA, 25 bp, Homo sapien
catgaggaattccatgtgtacatgc

SEQ ID NO: 1933841 - DNA, 25 bp, Homo sapien
gttgaccctggtccactaatttgtg

SEQ ID NO: 1933842 - DNA, 25 bp, Homo sapien
ggtgttcccatgagttgatgaccag

SEQ ID NO: 1933843 - DNA, 25 bp, Homo sapien
gaccagtctggacctcgactcagaa

SEQ ID NO: 1933844 - DNA, 25 bp, Homo sapien
cagaggtttggtgctggtgttccca

SEQ ID NO: 1933845 - DNA, 25 bp, Homo sapien
attccctgaaactactggatatgct

SEQ ID NO: 1933846 - DNA, 25 bp, Homo sapien
acacacattaacaaagcatttctta

SEQ ID NO: 1933847 - DNA, 25 bp, Homo sapien
ttccctgaaactactggatatgcta

SEQ ID NO: 1933848 - DNA, 25 bp, Homo sapien
cattaacaaagcatttcttatagtt

SEQ ID NO: 1933849 - DNA, 25 bp, Homo sapien
atggaggatgaagtacccatcacag

SEQ ID NO: 1933850 - DNA, 25 bp, Homo sapien
tggaggatgaagtacccatcacagt

SEQ ID NO: 1933851 - DNA, 25 bp, Homo sapien
tcactgggtgtgatggaggatgaag

SEQ ID NO: 1933852 - DNA, 25 bp, Homo sapien
aagtttcactgggtgtgatggagga

SEQ ID NO: 1933853 - DNA, 25 bp, Homo sapien
caaatggtgcagtatcagaggttct

SEQ ID NO: 1933854 - DNA, 25 bp, Homo sapien
gacagccggactcttaacttcaata

SEQ ID NO: 1933855 - DNA, 25 bp, Homo sapien
tagtcgtgtaagacccattttggac

SEQ ID NO: 1933856 - DNA, 25 bp, Homo sapien
tgtgacctcagagaaccagacagtc

SEQ ID NO: 1933857 - DNA, 25 bp, Homo sapien
tccaacaatcggaagccagaaaggc

SEQ ID NO: 1933858 - DNA, 25 bp, Homo sapien
gcatactccattaactgtttccact

SEQ ID NO: 1933859 - DNA, 25 bp, Homo sapien
ctcattgcatactccattaactgtt

SEQ ID NO: 1933860 - DNA, 25 bp, Homo sapien
cacttctccaacaatcggaagccag

SEQ ID NO: 1933861 - DNA, 25 bp, Homo sapien
gatcgtgtgaactgattcacaagcc

SEQ ID NO: 1933862 - DNA, 25 bp, Homo sapien
tcatacccgcttttcacactgatcg

SEQ ID NO: 1933863 - DNA, 25 bp, Homo sapien
ccttcaagtgtcctagttagaccaa

SEQ ID NO: 1933864 - DNA, 25 bp, Homo sapien
tgcacacgtacacaccagcatctgg

SEQ ID NO: 1933865 - DNA, 25 bp, Homo sapien
gaagagaaatcctgatgggctccag

SEQ ID NO: 1933866 - DNA, 25 bp, Homo sapien
gacggaggtatcacgctgagctctg

SEQ ID NO: 1933867 - DNA, 25 bp, Homo sapien
gatgatttcgtctgagttcccagca

SEQ ID NO: 1933868 - DNA, 25 bp, Homo sapien
cactgtgcaagtgacccatttggca

SEQ ID NO: 1933869 - DNA, 25 bp, Homo sapien
atcggtatttaaactcaaacacttg

SEQ ID NO: 1933870 - DNA, 25 bp, Homo sapien
gagcctgcgttctgaacctgttggc

SEQ ID NO: 1933871 - DNA, 25 bp, Homo sapien
atgggtgggagcctgcgttctgaac

SEQ ID NO: 1933872 - DNA, 25 bp, Homo sapien
tgcgttctgaacctgttggctccat

SEQ ID NO: 1933873 - DNA, 25 bp, Homo sapien
atccacaggcatcaggcatgggtgg

SEQ ID NO: 1933874 - DNA, 25 bp, Homo sapien
gttgaggacgcacctgtggcagcct

SEQ ID NO: 1933875 - DNA, 25 bp, Homo sapien
ttgaggacgcacctgtggcagcctc

SEQ ID NO: 1933876 - DNA, 25 bp, Homo sapien
ggttgaggacgcacctgtggcagcc

SEQ ID NO: 1933877 - DNA, 25 bp, Homo sapien
tgtaatcagatgatgtgacatcaaa

SEQ ID NO: 1933878 - DNA, 25 bp, Homo sapien
catcaaatccatggtgtaattcaaa

SEQ ID NO: 1933879 - DNA, 25 bp, Homo sapien
cagctgtggggcaataatctggaac

SEQ ID NO: 1933880 - DNA, 25 bp, Homo sapien
tcaaaacacagctgtggggcaataa

SEQ ID NO: 1933881 - DNA, 25 bp, Homo sapien
tatgtttttcgtataaaggcatact

SEQ ID NO: 1933882 - DNA, 25 bp, Homo sapien
tatatgtttttcgtataaaggcata

SEQ ID NO: 1933883 - DNA, 25 bp, Homo sapien
atatatatgtttttcgtataaaggc

SEQ ID NO: 1933884 - DNA, 25 bp, Homo sapien
tatatatgtttttcgtataaaggca

SEQ ID NO: 1933885 - DNA, 25 bp, Homo sapien
cagattctaagctacccattgcaaa

SEQ ID NO: 1933886 - DNA, 25 bp, Homo sapien
gagatccacgagaggccatctgctg

SEQ ID NO: 1933887 - DNA, 25 bp, Homo sapien
aaagccatggtgtacggtgcaagtg

SEQ ID NO: 1933888 - DNA, 25 bp, Homo sapien
tccttgctgtctgcctagttgcaga

SEQ ID NO: 1933889 - DNA, 25 bp, Homo sapien
ctcataagtaagtgactctttttca

SEQ ID NO: 1933890 - DNA, 25 bp, Homo sapien
cataagtaagtgactctttttcagc

SEQ ID NO: 1933891 - DNA, 25 bp, Homo sapien
taagtaagtgactctttttcagcca

SEQ ID NO: 1933892 - DNA, 25 bp, Homo sapien
ataagtaagtgactctttttcagcc

SEQ ID NO: 1933893 - DNA, 25 bp, Homo sapien
gcagtctgctgagtgtaagatacac

SEQ ID NO: 1933894 - DNA, 25 bp, Homo sapien
catttgcctttaagcgcttgggcac

SEQ ID NO: 1933895 - DNA, 25 bp, Homo sapien
tgtctttaagtgcactgggctgggc

SEQ ID NO: 1933896 - DNA, 25 bp, Homo sapien
ctgggctaggcaacgcagctcgtgt

SEQ ID NO: 1933897 - DNA, 25 bp, Homo sapien
ggatgaagcatgtactggcactgtt

SEQ ID NO: 1933898 - DNA, 25 bp, Homo sapien
gttgtatcaggtatagtaacacaat

SEQ ID NO: 1933899 - DNA, 25 bp, Homo sapien
ttgtccaagagtaatgggcagcttg

SEQ ID NO: 1933900 - DNA, 25 bp, Homo sapien
cagccaatggtgaagaatttgaggt

SEQ ID NO: 1933901 - DNA, 25 bp, Homo sapien
cagcactgcatagggcagatttcac

SEQ ID NO: 1933902 - DNA, 25 bp, Homo sapien
ggaacaacaggactactggtcaggg

SEQ ID NO: 1933903 - DNA, 25 bp, Homo sapien
cagggagcaaattagtaaggccctt

SEQ ID NO: 1933904 - DNA, 25 bp, Homo sapien
ggcagatttcacagaatggggaaca

SEQ ID NO: 1933905 - DNA, 25 bp, Homo sapien
gattggttcgcccattttcctgcca

SEQ ID NO: 1933906 - DNA, 25 bp, Homo sapien
gctgtagagtcctaatattacgggc

SEQ ID NO: 1933907 - DNA, 25 bp, Homo sapien
gactgaagagaggatgtatgcagca

SEQ ID NO: 1933908 - DNA, 25 bp, Homo sapien
caatgggattggttcgcccattttc

SEQ ID NO: 1933909 - DNA, 25 bp, Homo sapien
ctgcgggagcaacaagaagcccctg

SEQ ID NO: 1933910 - DNA, 25 bp, Homo sapien
tgcgggagcaacaagaagcccctga

SEQ ID NO: 1933911 - DNA, 25 bp, Homo sapien
ttttggcattggtcagggcaagctt

SEQ ID NO: 1933912 - DNA, 25 bp, Homo sapien
ttgacctgcagccacttgctgttca

SEQ ID NO: 1933913 - DNA, 25 bp, Homo sapien
gtcagggcaagcttgacctgcagcc

SEQ ID NO: 1933914 - DNA, 25 bp, Homo sapien
tgtcttttttggcattggtcagggc

SEQ ID NO: 1933915 - DNA, 25 bp, Homo sapien
tccgtgtgtccccaaatgatggcca

SEQ ID NO: 1933916 - DNA, 25 bp, Homo sapien
gatattaggtttatccgtgtgtccc

SEQ ID NO: 1933917 - DNA, 25 bp, Homo sapien
tgagatgatattaggtttatccgtg

SEQ ID NO: 1933918 - DNA, 25 bp, Homo sapien
gtgtccccaaatgatggccattgat

SEQ ID NO: 1933919 - DNA, 25 bp, Homo sapien
tagagctctggttccatttcacttt

SEQ ID NO: 1933920 - DNA, 25 bp, Homo sapien
cttatagagctctggttccatttca

SEQ ID NO: 1933921 - DNA, 25 bp, Homo sapien
tatagagctctggttccatttcact

SEQ ID NO: 1933922 - DNA, 25 bp, Homo sapien
ccatttcactttctatgtcctttac

SEQ ID NO: 1933923 - DNA, 25 bp, Homo sapien
ttcctatgaaccagcagattcgttt

SEQ ID NO: 1933924 - DNA, 25 bp, Homo sapien
tcctatgaaccagcagattcgtttt

SEQ ID NO: 1933925 - DNA, 25 bp, Homo sapien
cttcctatgaaccagcagattcgtt

SEQ ID NO: 1933926 - DNA, 25 bp, Homo sapien
tgatgcatgtgattgccaggcatgg

SEQ ID NO: 1933927 - DNA, 25 bp, Homo sapien
tggctgtttccctccgtcacatttg

SEQ ID NO: 1933928 - DNA, 25 bp, Homo sapien
cctgtcccaaacaattgagcctgta

SEQ ID NO: 1933929 - DNA, 25 bp, Homo sapien
tccgtcacatttgcagagccctgtc

SEQ ID NO: 1933930 - DNA, 25 bp, Homo sapien
gcaaggacaggtacccaggccacat

SEQ ID NO: 1933931 - DNA, 25 bp, Homo sapien
tggcaaggacaggtacccaggccac

SEQ ID NO: 1933932 - DNA, 25 bp, Homo sapien
cccaggagtggcaaggacaggtacc

SEQ ID NO: 1933933 - DNA, 25 bp, Homo sapien
caggagtggcaaggacaggtaccca

SEQ ID NO: 1933934 - DNA, 25 bp, Homo sapien
aaagatagacgcaggaggagaagca

SEQ ID NO: 1933935 - DNA, 25 bp, Homo sapien
aacttccttcggatctgggttgaga

SEQ ID NO: 1933936 - DNA, 25 bp, Homo sapien
gaaacagaaagatagacgcaggagg

SEQ ID NO: 1933937 - DNA, 25 bp, Homo sapien
cctccttctggttcaagttgtccat

SEQ ID NO: 1933938 - DNA, 25 bp, Homo sapien
tttcatagtgttggactataaccac

SEQ ID NO: 1933939 - DNA, 25 bp, Homo sapien
tttgtagactgagatctgggatcct

SEQ ID NO: 1933940 - DNA, 25 bp, Homo sapien
ctttgtagactgagatctgggatcc

SEQ ID NO: 1933941 - DNA, 25 bp, Homo sapien
gactataaccacatgaacaacagaa

SEQ ID NO: 1933942 - DNA, 25 bp, Homo sapien
tgtttggtcaccaacctggttgtcc

SEQ ID NO: 1933943 - DNA, 25 bp, Homo sapien
ttggtcaccaacctggttgtccagg

SEQ ID NO: 1933944 - DNA, 25 bp, Homo sapien
ctgtttggtcaccaacctggttgtc

SEQ ID NO: 1933945 - DNA, 25 bp, Homo sapien
tggcaaacaaccagcatgaaaaaca

SEQ ID NO: 1933946 - DNA, 25 bp, Homo sapien
gtcttcggcatttaggatctcatta

SEQ ID NO: 1933947 - DNA, 25 bp, Homo sapien
gaagtcttcggcatttaggatctca

SEQ ID NO: 1933948 - DNA, 25 bp, Homo sapien
tcaggtgaagtcttcggcatttagg

SEQ ID NO: 1933949 - DNA, 25 bp, Homo sapien
cggcatttaggatctcattaaatct

SEQ ID NO: 1933950 - DNA, 25 bp, Homo sapien
aaacagatcaaataagggaggactg

SEQ ID NO: 1933951 - DNA, 25 bp, Homo sapien
gatcaaataagggaggactgaaagt

SEQ ID NO: 1933952 - DNA, 25 bp, Homo sapien
aagaaggttgcgaagatttagtggc

SEQ ID NO: 1933953 - DNA, 25 bp, Homo sapien
tgatatatgagtttaaccagttcac

SEQ ID NO: 1933954 - DNA, 25 bp, Homo sapien
tagtggcaatatagggtataatgtg

SEQ ID NO: 1933955 - DNA, 25 bp, Homo sapien
tgtggtgaagatagaaagaaatacc

SEQ ID NO: 1933956 - DNA, 25 bp, Homo sapien
aaacagtacgcatagatagaaagac

SEQ ID NO: 1933957 - DNA, 25 bp, Homo sapien
tctgaagttttgtgacagtgggtaa

SEQ ID NO: 1933958 - DNA, 25 bp, Homo sapien
gaaagactaagtgacagtccaggga

SEQ ID NO: 1933959 - DNA, 25 bp, Homo sapien
tgtgctggtctgtgtatggaatatc

SEQ ID NO: 1933960 - DNA, 25 bp, Homo sapien
tttaggttggcaatgcacttggcaa

SEQ ID NO: 1933961 - DNA, 25 bp, Homo sapien
cagcagctttaggttggcaatgcac

SEQ ID NO: 1933962 - DNA, 25 bp, Homo sapien
tcttgtttctttcgaagcatcatgt

SEQ ID NO: 1933963 - DNA, 25 bp, Homo sapien
tatcatgtgttcttgtttctttcga

SEQ ID NO: 1933964 - DNA, 25 bp, Homo sapien
gttatatgatagtccaggtgattct

SEQ ID NO: 1933965 - DNA, 25 bp, Homo sapien
tatatgatagtccaggtgattcttt

SEQ ID NO: 1933966 - DNA, 25 bp, Homo sapien
ctgcacagttatatgatagtccagg

SEQ ID NO: 1933967 - DNA, 25 bp, Homo sapien
tatgatagtccaggtgattctttac

SEQ ID NO: 1933968 - DNA, 25 bp, Homo sapien
agtctatgcagtcgttcccagtaac

SEQ ID NO: 1933969 - DNA, 25 bp, Homo sapien
tagtctatgcagtcgttcccagtaa

SEQ ID NO: 1933970 - DNA, 25 bp, Homo sapien
tatagtctatgcagtcgttcccagt

SEQ ID NO: 1933971 - DNA, 25 bp, Homo sapien
tatatagtctatgcagtcgttccca

SEQ ID NO: 1933972 - DNA, 25 bp, Homo sapien
tccaaagccatagcaatgttgtttt

SEQ ID NO: 1933973 - DNA, 25 bp, Homo sapien
ccaaagccatagcaatgttgttttt

SEQ ID NO: 1933974 - DNA, 25 bp, Homo sapien
ctccaaagccatagcaatgttgttt

SEQ ID NO: 1933975 - DNA, 25 bp, Homo sapien
cttctccaaatcagttgcatcctgg

SEQ ID NO: 1933976 - DNA, 25 bp, Homo sapien
ttgtctgatagaagcctgcttcacc

SEQ ID NO: 1933977 - DNA, 25 bp, Homo sapien
ctggatttgtctgatagaagcctgc

SEQ ID NO: 1933978 - DNA, 25 bp, Homo sapien
tgcttctgaacgagtgcctgctgtg

SEQ ID NO: 1933979 - DNA, 25 bp, Homo sapien
tttttgctcattgaatttttcagca

SEQ ID NO: 1933980 - DNA, 25 bp, Homo sapien
ttgctcattgaatttttcagcaaaa

SEQ ID NO: 1933981 - DNA, 25 bp, Homo sapien
gcaattttttgctcattgaattttt

SEQ ID NO: 1933982 - DNA, 25 bp, Homo sapien
aattttttgctcattgaatttttca

SEQ ID NO: 1933983 - DNA, 25 bp, Homo sapien
ccaatagaggcgcgatattttaaaa

SEQ ID NO: 1933984 - DNA, 25 bp, Homo sapien
ctccaatagaggcgcgatattttaa

SEQ ID NO: 1933985 - DNA, 25 bp, Homo sapien
atagaggcgcgatattttaaaatta

SEQ ID NO: 1933986 - DNA, 25 bp, Homo sapien
caatagaggcgcgatattttaaaat

SEQ ID NO: 1933987 - DNA, 25 bp, Homo sapien
atcatatatatttctttggataaac

SEQ ID NO: 1933988 - DNA, 25 bp, Homo sapien
ctggggtaatcatatatatttcttt

SEQ ID NO: 1933989 - DNA, 25 bp, Homo sapien
ggtaatcatatatatttctttggat

SEQ ID NO: 1933990 - DNA, 25 bp, Homo sapien
gtaatcatatatatttctttggata

SEQ ID NO: 1933991 - DNA, 25 bp, Homo sapien
ccagttctgagcacatagggtcctg

SEQ ID NO: 1933992 - DNA, 25 bp, Homo sapien
agttctgagcacatagggtcctgtt

SEQ ID NO: 1933993 - DNA, 25 bp, Homo sapien
agataagcccagttctgagcacata

SEQ ID NO: 1933994 - DNA, 25 bp, Homo sapien
taagcccagttctgagcacataggg

SEQ ID NO: 1933995 - DNA, 25 bp, Homo sapien
atccctggacctatgaaggctgtat

SEQ ID NO: 1933996 - DNA, 25 bp, Homo sapien
atatccctggacctatgaaggctgt

SEQ ID NO: 1933997 - DNA, 25 bp, Homo sapien
tatccctggacctatgaaggctgta

SEQ ID NO: 1933998 - DNA, 25 bp, Homo sapien
ggcagaatgtgccacctgggacagc

SEQ ID NO: 1933999 - DNA, 25 bp, Homo sapien
tggtggcagaatgtgccacctggga

SEQ ID NO: 1934000 - DNA, 25 bp, Homo sapien
gtggcagaatgtgccacctgggaca

SEQ ID NO: 1934001 - DNA, 25 bp, Homo sapien
ggtggtggcagaatgtgccacctgg

SEQ ID NO: 1934002 - DNA, 25 bp, Homo sapien
caaccaatgtgcactgtatggaacg

SEQ ID NO: 1934003 - DNA, 25 bp, Homo sapien
tccagcaaccaatgtgcactgtatg

SEQ ID NO: 1934004 - DNA, 25 bp, Homo sapien
accaatgtgcactgtatggaacggg

SEQ ID NO: 1934005 - DNA, 25 bp, Homo sapien
tttctccagcaaccaatgtgcactg

SEQ ID NO: 1934006 - DNA, 25 bp, Homo sapien
gagggcctcctccggttagttgctc

SEQ ID NO: 1934007 - DNA, 25 bp, Homo sapien
ctcctccggttagttgctctgtgtg

SEQ ID NO: 1934008 - DNA, 25 bp, Homo sapien
cctccggttagttgctctgtgtgtt

SEQ ID NO: 1934009 - DNA, 25 bp, Homo sapien
tccggttagttgctctgtgtgttcc

SEQ ID NO: 1934010 - DNA, 25 bp, Homo sapien
cttgggagaaaggtatgaggcagaa

SEQ ID NO: 1934011 - DNA, 25 bp, Homo sapien
ggagaaaggtatgaggcagaatgag

SEQ ID NO: 1934012 - DNA, 25 bp, Homo sapien
tgggagaaaggtatgaggcagaatg

SEQ ID NO: 1934013 - DNA, 25 bp, Homo sapien
gagaaaggtatgaggcagaatgagg

SEQ ID NO: 1934014 - DNA, 25 bp, Homo sapien
actttgggctttagtaataatctag

SEQ ID NO: 1934015 - DNA, 25 bp, Homo sapien
cttgatctactttgggctttagtaa

SEQ ID NO: 1934016 - DNA, 25 bp, Homo sapien
ttgatctactttgggctttagtaat

SEQ ID NO: 1934017 - DNA, 25 bp, Homo sapien
ttgggctttagtaataatctaggac

SEQ ID NO: 1934018 - DNA, 25 bp, Homo sapien
tgagcacaacagttgattctttcat

SEQ ID NO: 1934019 - DNA, 25 bp, Homo sapien
gtaccagcaggattcctccccttcc

SEQ ID NO: 1934020 - DNA, 25 bp, Homo sapien
tttttcaggaggtatgtggcatttg

SEQ ID NO: 1934021 - DNA, 25 bp, Homo sapien
cctgtaccagcaggattcctcccct

SEQ ID NO: 1934022 - DNA, 25 bp, Homo sapien
ttgtttttcaggaggtatgtggcat

SEQ ID NO: 1934023 - DNA, 25 bp, Homo sapien
tccagttttaagtactccagagtag

SEQ ID NO: 1934024 - DNA, 25 bp, Homo sapien
tactccagagtagatttagaaaggc

SEQ ID NO: 1934025 - DNA, 25 bp, Homo sapien
tttgccgctgcttatcacactttag

SEQ ID NO: 1934026 - DNA, 25 bp, Homo sapien
gatttagaaaggctttgccgctgct

SEQ ID NO: 1934027 - DNA, 25 bp, Homo sapien
gacactttggtagacgcattggaac

SEQ ID NO: 1934028 - DNA, 25 bp, Homo sapien
tagacgcattggaactgatttggct

SEQ ID NO: 1934029 - DNA, 25 bp, Homo sapien
gatttggcttcgtgccgagctttta

SEQ ID NO: 1934030 - DNA, 25 bp, Homo sapien
tcaatatcgacactttggtagacgc

SEQ ID NO: 1934031 - DNA, 25 bp, Homo sapien
catccctcctgttttcaatgacctt

SEQ ID NO: 1934032 - DNA, 25 bp, Homo sapien
tcatccctcctgttttcaatgacct

SEQ ID NO: 1934033 - DNA, 25 bp, Homo sapien
tttcatccctcctgttttcaatgac

SEQ ID NO: 1934034 - DNA, 25 bp, Homo sapien
atccctcctgttttcaatgaccttt

SEQ ID NO: 1934035 - DNA, 25 bp, Homo sapien
gggacagagaccatgagctactgtg

SEQ ID NO: 1934036 - DNA, 25 bp, Homo sapien
gccacagtttctatagtcttggggc

SEQ ID NO: 1934037 - DNA, 25 bp, Homo sapien
ccacagtttctatagtcttggggcc

SEQ ID NO: 1934038 - DNA, 25 bp, Homo sapien
atgagctactgtgcaaggaaatgtt

SEQ ID NO: 1934039 - DNA, 25 bp, Homo sapien
cacaccactgtagtatttgccacac

SEQ ID NO: 1934040 - DNA, 25 bp, Homo sapien
tccagctcaatctttatggcctctg

SEQ ID NO: 1934041 - DNA, 25 bp, Homo sapien
cactgtagtatttgccacactcgtt

SEQ ID NO: 1934042 - DNA, 25 bp, Homo sapien
ggcttcccactataccctgggctca

SEQ ID NO: 1934043 - DNA, 25 bp, Homo sapien
gaattccagttcccttctcacacat

SEQ ID NO: 1934044 - DNA, 25 bp, Homo sapien
aattccagttcccttctcacacatt

SEQ ID NO: 1934045 - DNA, 25 bp, Homo sapien
tcacacattgggctcatttctgctt

SEQ ID NO: 1934046 - DNA, 25 bp, Homo sapien
ccttctcacacattgggctcatttc

SEQ ID NO: 1934047 - DNA, 25 bp, Homo sapien
tgggagaaggacgacctgtgaactt

SEQ ID NO: 1934048 - DNA, 25 bp, Homo sapien
gactgtcagtctcagaacagccata

SEQ ID NO: 1934049 - DNA, 25 bp, Homo sapien
cttgttaggaaagactcggggactg

SEQ ID NO: 1934050 - DNA, 25 bp, Homo sapien
gactcggggactgaggtgactgtca

SEQ ID NO: 1934051 - DNA, 25 bp, Homo sapien
ctgggacttgcagaagcagggccca

SEQ ID NO: 1934052 - DNA, 25 bp, Homo sapien
tacatttgagtactgttgctgcagc

SEQ ID NO: 1934053 - DNA, 25 bp, Homo sapien
ttgtagttgtggctccccgctacat

SEQ ID NO: 1934054 - DNA, 25 bp, Homo sapien
attctgcatatgcttcagccccact

SEQ ID NO: 1934055 - DNA, 25 bp, Homo sapien
ttagtgatggctgggacgtgctgac

SEQ ID NO: 1934056 - DNA, 25 bp, Homo sapien
gatggctgggacgtgctgacagctg

SEQ ID NO: 1934057 - DNA, 25 bp, Homo sapien
tgtgcgagggttgcccggcatctcc

SEQ ID NO: 1934058 - DNA, 25 bp, Homo sapien
agctgtgtgcgagggttgcccggca

SEQ ID NO: 1934059 - DNA, 25 bp, Homo sapien
tgtaatttagctaattcactcaaac

SEQ ID NO: 1934060 - DNA, 25 bp, Homo sapien
ttgtcagttactcctggccattgct

SEQ ID NO: 1934061 - DNA, 25 bp, Homo sapien
tgctgtaatttagctaattcactca

SEQ ID NO: 1934062 - DNA, 25 bp, Homo sapien
tgtcagttactcctggccattgctg

SEQ ID NO: 1934063 - DNA, 25 bp, Homo sapien
gaaattcacccttttcatagtggca

SEQ ID NO: 1934064 - DNA, 25 bp, Homo sapien
cacccttttcatagtggcagaacat

SEQ ID NO: 1934065 - DNA, 25 bp, Homo sapien
ttcacccttttcatagtggcagaac

SEQ ID NO: 1934066 - DNA, 25 bp, Homo sapien
aattcacccttttcatagtggcaga

SEQ ID NO: 1934067 - DNA, 25 bp, Homo sapien
tctggaggatactttttggctcctt

SEQ ID NO: 1934068 - DNA, 25 bp, Homo sapien
tctctggaggatactttttggctcc

SEQ ID NO: 1934069 - DNA, 25 bp, Homo sapien
ctctggaggatactttttggctcct

SEQ ID NO: 1934070 - DNA, 25 bp, Homo sapien
gtttcttgtcctacctagatgggtg

SEQ ID NO: 1934071 - DNA, 25 bp, Homo sapien
tgttatgaccgtgacacacagttgc

SEQ ID NO: 1934072 - DNA, 25 bp, Homo sapien
gatatccatttatgtaaccaagctg

SEQ ID NO: 1934073 - DNA, 25 bp, Homo sapien
tctatgtgtccaacacgttgaggga

SEQ ID NO: 1934074 - DNA, 25 bp, Homo sapien
ggctggtagtgctttctcagaggca

SEQ ID NO: 1934075 - DNA, 25 bp, Homo sapien
gcagtacaattatcctgagcactga

SEQ ID NO: 1934076 - DNA, 25 bp, Homo sapien
caaacagcagtacaattatcctgag

SEQ ID NO: 1934077 - DNA, 25 bp, Homo sapien
gagtgctctgggcagctaccatcaa

SEQ ID NO: 1934078 - DNA, 25 bp, Homo sapien
tgctgttatctgtgcatcagtgaac

SEQ ID NO: 1934079 - DNA, 25 bp, Homo sapien
cagtgaacactttatcatagtaacg

SEQ ID NO: 1934080 - DNA, 25 bp, Homo sapien
tgttatctgtgcatcagtgaacact

SEQ ID NO: 1934081 - DNA, 25 bp, Homo sapien
gctgttatctgtgcatcagtgaaca

SEQ ID NO: 1934082 - DNA, 25 bp, Homo sapien
tactctgtaacatcaggctgtttca

SEQ ID NO: 1934083 - DNA, 25 bp, Homo sapien
accacgtctgcatcttgtattttct

SEQ ID NO: 1934084 - DNA, 25 bp, Homo sapien
acttgcttctaccacgtctgcatct

SEQ ID NO: 1934085 - DNA, 25 bp, Homo sapien
ctcctgggggcatgtatactctgta

SEQ ID NO: 1934086 - DNA, 25 bp, Homo sapien
cccttcattttgaccagcacagtag

SEQ ID NO: 1934087 - DNA, 25 bp, Homo sapien
ccttcattttgaccagcacagtagc

SEQ ID NO: 1934088 - DNA, 25 bp, Homo sapien
agcctcatagtccacttttgtctgt

SEQ ID NO: 1934089 - DNA, 25 bp, Homo sapien
tttacatatgaagagcataacagca

SEQ ID NO: 1934090 - DNA, 25 bp, Homo sapien
tcttcaaccttgattctgttgcatg

SEQ ID NO: 1934091 - DNA, 25 bp, Homo sapien
ctttacatatgaagagcataacagc

SEQ ID NO: 1934092 - DNA, 25 bp, Homo sapien
gaagctttcttcaaccttgattctg

SEQ ID NO: 1934093 - DNA, 25 bp, Homo sapien
aaaagaaattagaatgagaaagctg

SEQ ID NO: 1934094 - DNA, 25 bp, Homo sapien
cctgggtggatctgcctgaataact

SEQ ID NO: 1934095 - DNA, 25 bp, Homo sapien
ttccttgttctctgagtcatgcctt

SEQ ID NO: 1934096 - DNA, 25 bp, Homo sapien
gagacttgggtgctcgtctgcctgc

SEQ ID NO: 1934097 - DNA, 25 bp, Homo sapien
acctgtttgttccacaaagttctag

SEQ ID NO: 1934098 - DNA, 25 bp, Homo sapien
tgtgctcattagatgctcagtgtga

SEQ ID NO: 1934099 - DNA, 25 bp, Homo sapien
gagatgtcatttgaacgtagaggca

SEQ ID NO: 1934100 - DNA, 25 bp, Homo sapien
gaagcaggaagggaacgctgctcct

SEQ ID NO: 1934101 - DNA, 25 bp, Homo sapien
cgtagaggcatattagagagctgca

SEQ ID NO: 1934102 - DNA, 25 bp, Homo sapien
ccttgatttcaggatgggaagcttg

SEQ ID NO: 1934103 - DNA, 25 bp, Homo sapien
cttgatttcaggatgggaagcttgg

SEQ ID NO: 1934104 - DNA, 25 bp, Homo sapien
tttcatggattctcagaagactgcc

SEQ ID NO: 1934105 - DNA, 25 bp, Homo sapien
gaagcaggctcattctaccatgggt

SEQ ID NO: 1934106 - DNA, 25 bp, Homo sapien
cagatcagtgcactttcctgcttag

SEQ ID NO: 1934107 - DNA, 25 bp, Homo sapien
ggctgatcccttagtccctctgcaa

SEQ ID NO: 1934108 - DNA, 25 bp, Homo sapien
cagtgaccccaacatactcggtgct

SEQ ID NO: 1934109 - DNA, 25 bp, Homo sapien
ccccaacatactcggtgctgggaaa

SEQ ID NO: 1934110 - DNA, 25 bp, Homo sapien
caacatactcggtgctgggaaagag

SEQ ID NO: 1934111 - DNA, 25 bp, Homo sapien
gtgaccccaacatactcggtgctgg

SEQ ID NO: 1934112 - DNA, 25 bp, Homo sapien
gttgtcatccgtaggatttgcagaa

SEQ ID NO: 1934113 - DNA, 25 bp, Homo sapien
cagtttttcgttcttgttgtcatcc

SEQ ID NO: 1934114 - DNA, 25 bp, Homo sapien
ctctaacagtttttcgttcttgttg

SEQ ID NO: 1934115 - DNA, 25 bp, Homo sapien
tttcgttcttgttgtcatccgtagg

SEQ ID NO: 1934116 - DNA, 25 bp, Homo sapien
tcctgcagaactgtgtatcctccca

SEQ ID NO: 1934117 - DNA, 25 bp, Homo sapien
tgcagaactgtgtatcctcccatcc

SEQ ID NO: 1934118 - DNA, 25 bp, Homo sapien
gcagaactgtgtatcctcccatccg

SEQ ID NO: 1934119 - DNA, 25 bp, Homo sapien
gaactgtgtatcctcccatccgcgt

SEQ ID NO: 1934120 - DNA, 25 bp, Homo sapien
tttgccacgagggatgctccagcaa

SEQ ID NO: 1934121 - DNA, 25 bp, Homo sapien
ctttgccacgagggatgctccagca

SEQ ID NO: 1934122 - DNA, 25 bp, Homo sapien
aagcagggagctcatatgtcacaaa

SEQ ID NO: 1934123 - DNA, 25 bp, Homo sapien
tagccggcgttggatccaaatttag

SEQ ID NO: 1934124 - DNA, 25 bp, Homo sapien
gcttgcttagtgcacttagccggcg

SEQ ID NO: 1934125 - DNA, 25 bp, Homo sapien
tggaatctattgtgtgccagctgca

SEQ ID NO: 1934126 - DNA, 25 bp, Homo sapien
tgcgtagatgttgtaatcacctgtt

SEQ ID NO: 1934127 - DNA, 25 bp, Homo sapien
agcaaacaatgtttgcgtagatgtt

SEQ ID NO: 1934128 - DNA, 25 bp, Homo sapien
caatgtttgcgtagatgttgtaatc

SEQ ID NO: 1934129 - DNA, 25 bp, Homo sapien
tctatgttatcttcagattggcttc

SEQ ID NO: 1934130 - DNA, 25 bp, Homo sapien
gccatttgcagtgactgctatcctc

SEQ ID NO: 1934131 - DNA, 25 bp, Homo sapien
catttgcagtgactgctatcctcat

SEQ ID NO: 1934132 - DNA, 25 bp, Homo sapien
ttgccatttgcagtgactgctatcc

SEQ ID NO: 1934133 - DNA, 25 bp, Homo sapien
ctttgccatttgcagtgactgctat

SEQ ID NO: 1934134 - DNA, 25 bp, Homo sapien
ctttcttgttatattggcagatcac

SEQ ID NO: 1934135 - DNA, 25 bp, Homo sapien
tcttgttatattggcagatcactga

SEQ ID NO: 1934136 - DNA, 25 bp, Homo sapien
ttcttgttatattggcagatcactg

SEQ ID NO: 1934137 - DNA, 25 bp, Homo sapien
ttgttatattggcagatcactgaag

SEQ ID NO: 1934138 - DNA, 25 bp, Homo sapien
gaggttgtgtgtcacttcctgtagg

SEQ ID NO: 1934139 - DNA, 25 bp, Homo sapien
tgtgtgtcacttcctgtaggcccat

SEQ ID NO: 1934140 - DNA, 25 bp, Homo sapien
ctgaggttgtgtgtcacttcctgta

SEQ ID NO: 1934141 - DNA, 25 bp, Homo sapien
ggttgtgtgtcacttcctgtaggcc

SEQ ID NO: 1934142 - DNA, 25 bp, Homo sapien
ggcccgagtaggaaacagtgctatg

SEQ ID NO: 1934143 - DNA, 25 bp, Homo sapien
gaatgtttgtgtgcaggcccgagta

SEQ ID NO: 1934144 - DNA, 25 bp, Homo sapien
taatattcattgacctccccaggag

SEQ ID NO: 1934145 - DNA, 25 bp, Homo sapien
tagctgcagtctcactagccagagc

SEQ ID NO: 1934146 - DNA, 25 bp, Homo sapien
ttgccgttatctgccttcttgctcc

SEQ ID NO: 1934147 - DNA, 25 bp, Homo sapien
ctgtataaactcacttggtcctcca

SEQ ID NO: 1934148 - DNA, 25 bp, Homo sapien
cacttggtcctccacagtaaactac

SEQ ID NO: 1934149 - DNA, 25 bp, Homo sapien
tctttgccgttatctgccttcttgc

SEQ ID NO: 1934150 - DNA, 25 bp, Homo sapien
gcaaaatctgagagctgatttaagc

SEQ ID NO: 1934151 - DNA, 25 bp, Homo sapien
ttaagaacaggcttatctgacccat

SEQ ID NO: 1934152 - DNA, 25 bp, Homo sapien
tgacccatgaacaagcaccatggca

SEQ ID NO: 1934153 - DNA, 25 bp, Homo sapien
tctgagagctgatttaagcaacact

SEQ ID NO: 1934154 - DNA, 25 bp, Homo sapien
ccaaactcaggatttgcagagttaa

SEQ ID NO: 1934155 - DNA, 25 bp, Homo sapien
gcaatcctccaactgtgcagcgtgt

SEQ ID NO: 1934156 - DNA, 25 bp, Homo sapien
ggagtcctcattacataatcaccaa

SEQ ID NO: 1934157 - DNA, 25 bp, Homo sapien
gcgtgtattacaataggagtcctca

SEQ ID NO: 1934158 - DNA, 25 bp, Homo sapien
ggtctctcagggtgtttgtcactgt

SEQ ID NO: 1934159 - DNA, 25 bp, Homo sapien
cacgtgttagtgaatgaggtctctc

SEQ ID NO: 1934160 - DNA, 25 bp, Homo sapien
agatatttctctgttcacgtgttag

SEQ ID NO: 1934161 - DNA, 25 bp, Homo sapien
cactgtcatgttttgattgtttgtc

SEQ ID NO: 1934162 - DNA, 25 bp, Homo sapien
aaatgttcatggttgaaacatgttt

SEQ ID NO: 1934163 - DNA, 25 bp, Homo sapien
ccagaagctcttttcgtcatttcca

SEQ ID NO: 1934164 - DNA, 25 bp, Homo sapien
atgttcatggttgaaacatgtttcc

SEQ ID NO: 1934165 - DNA, 25 bp, Homo sapien
cagaagctcttttcgtcatttccag

SEQ ID NO: 1934166 - DNA, 25 bp, Homo sapien
ccaccttcatatttagcagttatca

SEQ ID NO: 1934167 - DNA, 25 bp, Homo sapien
cttttgccaccttcatatttagcag

SEQ ID NO: 1934168 - DNA, 25 bp, Homo sapien
gccaccttcatatttagcagttatc

SEQ ID NO: 1934169 - DNA, 25 bp, Homo sapien
tttgccaccttcatatttagcagtt

SEQ ID NO: 1934170 - DNA, 25 bp, Homo sapien
tgtgtaaagaaattctgccggaata

SEQ ID NO: 1934171 - DNA, 25 bp, Homo sapien
taattacttgtctgtcccctttgct

SEQ ID NO: 1934172 - DNA, 25 bp, Homo sapien
cgtacttctgccacggactttggaa

SEQ ID NO: 1934173 - DNA, 25 bp, Homo sapien
caaaaaagaaatgtgcagctgcgta

SEQ ID NO: 1934174 - DNA, 25 bp, Homo sapien
gatatagcacattttggagcaaaat

SEQ ID NO: 1934175 - DNA, 25 bp, Homo sapien
agtggagtctcctcatttcacccca

SEQ ID NO: 1934176 - DNA, 25 bp, Homo sapien
aaatgacatccatgaatattgcagg

SEQ ID NO: 1934177 - DNA, 25 bp, Homo sapien
tgagacaggctgttgatatagcaca

SEQ ID NO: 1934178 - DNA, 25 bp, Homo sapien
tgcgaacatagccattgttggacat

SEQ ID NO: 1934179 - DNA, 25 bp, Homo sapien
ctgcgaacatagccattgttggaca

SEQ ID NO: 1934180 - DNA, 25 bp, Homo sapien
ctctgaggatccctgatagttctgt

SEQ ID NO: 1934181 - DNA, 25 bp, Homo sapien
catactggaccacagcacacacatt

SEQ ID NO: 1934182 - DNA, 25 bp, Homo sapien
gctgtcaagataacaccccagtcct

SEQ ID NO: 1934183 - DNA, 25 bp, Homo sapien
tcttctggcttgctagaagggaaaa

SEQ ID NO: 1934184 - DNA, 25 bp, Homo sapien
ttagattacttgataggtccgagga

SEQ ID NO: 1934185 - DNA, 25 bp, Homo sapien
ccttttcctcatatgacttgtaagc

SEQ ID NO: 1934186 - DNA, 25 bp, Homo sapien
gacttgtaagcattgaaacatttat

SEQ ID NO: 1934187 - DNA, 25 bp, Homo sapien
tgataggtccgaggactctcctttt

SEQ ID NO: 1934188 - DNA, 25 bp, Homo sapien
tatagatgaatagcccccttttctg

SEQ ID NO: 1934189 - DNA, 25 bp, Homo sapien
aaatttccgtatagataaagcagtc

SEQ ID NO: 1934190 - DNA, 25 bp, Homo sapien
tactatggctatagatgaatagccc

SEQ ID NO: 1934191 - DNA, 25 bp, Homo sapien
tcttctaaagcgatgtttactatgg

SEQ ID NO: 1934192 - DNA, 25 bp, Homo sapien
caaattctaacagctggactgttcc

SEQ ID NO: 1934193 - DNA, 25 bp, Homo sapien
agctggactgttccacatatttctg

SEQ ID NO: 1934194 - DNA, 25 bp, Homo sapien
atagcaaattctaacagctggactg

SEQ ID NO: 1934195 - DNA, 25 bp, Homo sapien
aattctaacagctggactgttccac

SEQ ID NO: 1934196 - DNA, 25 bp, Homo sapien
cagtatgaagcacgggactgaaggc

SEQ ID NO: 1934197 - DNA, 25 bp, Homo sapien
tggattaaagggttgctctccaaag

SEQ ID NO: 1934198 - DNA, 25 bp, Homo sapien
aaagatggcagtatgaagcacggga

SEQ ID NO: 1934199 - DNA, 25 bp, Homo sapien
ttatggattaaagggttgctctcca

SEQ ID NO: 1934200 - DNA, 25 bp, Homo sapien
cttgtccatgtatggttctcttatt

SEQ ID NO: 1934201 - DNA, 25 bp, Homo sapien
ttgtccatgtatggttctcttattt

SEQ ID NO: 1934202 - DNA, 25 bp, Homo sapien
tgtccatgtatggttctcttatttc

SEQ ID NO: 1934203 - DNA, 25 bp, Homo sapien
gtcaaatgttttgggacctgggcaa

SEQ ID NO: 1934204 - DNA, 25 bp, Homo sapien
caagtggtagcctgttcatttctcc

SEQ ID NO: 1934205 - DNA, 25 bp, Homo sapien
caacttgttcgtccctgagactgag

SEQ ID NO: 1934206 - DNA, 25 bp, Homo sapien
cagcaatggcctgcggtcaaatgtt

SEQ ID NO: 1934207 - DNA, 25 bp, Homo sapien
ctgcatttgtcaagggtggctccat

SEQ ID NO: 1934208 - DNA, 25 bp, Homo sapien
ggctgcatttgtcaagggtggctcc

SEQ ID NO: 1934209 - DNA, 25 bp, Homo sapien
gctgcatttgtcaagggtggctcca

SEQ ID NO: 1934210 - DNA, 25 bp, Homo sapien
tggctgcatttgtcaagggtggctc

SEQ ID NO: 1934211 - DNA, 25 bp, Homo sapien
attgaaggcccttgtagcatatttt

SEQ ID NO: 1934212 - DNA, 25 bp, Homo sapien
caattgaaggcccttgtagcatatt

SEQ ID NO: 1934213 - DNA, 25 bp, Homo sapien
aattgaaggcccttgtagcatattt

SEQ ID NO: 1934214 - DNA, 25 bp, Homo sapien
gttccagaagatatggattcataag

SEQ ID NO: 1934215 - DNA, 25 bp, Homo sapien
gagttccagaagatatggattcata

SEQ ID NO: 1934216 - DNA, 25 bp, Homo sapien
ccagaagatatggattcataagagg

SEQ ID NO: 1934217 - DNA, 25 bp, Homo sapien
aggagttccagaagatatggattca

SEQ ID NO: 1934218 - DNA, 25 bp, Homo sapien
cctatgtttaaagggaattgctcta

SEQ ID NO: 1934219 - DNA, 25 bp, Homo sapien
gccttgtttgatctcctcgggactt

SEQ ID NO: 1934220 - DNA, 25 bp, Homo sapien
cttcattaccagatcccatttttga

SEQ ID NO: 1934221 - DNA, 25 bp, Homo sapien
gcaatgccccggattacttctgtat

SEQ ID NO: 1934222 - DNA, 25 bp, Homo sapien
taagcataaccattacaggtggcca

SEQ ID NO: 1934223 - DNA, 25 bp, Homo sapien
aataagcataaccattacaggtggc

SEQ ID NO: 1934224 - DNA, 25 bp, Homo sapien
cagcactggctctctataataagca

SEQ ID NO: 1934225 - DNA, 25 bp, Homo sapien
tatacaccctcattgtcagcactgg

SEQ ID NO: 1934226 - DNA, 25 bp, Homo sapien
tacaatcttgtaccagcaagagtct

SEQ ID NO: 1934227 - DNA, 25 bp, Homo sapien
ccaatgctggattatgtagtgatga

SEQ ID NO: 1934228 - DNA, 25 bp, Homo sapien
gcaagagtctcatagccaatgctgg

SEQ ID NO: 1934229 - DNA, 25 bp, Homo sapien
tctgttgccatcctcaagtaatggc

SEQ ID NO: 1934230 - DNA, 25 bp, Homo sapien
aaaacattgcaaattgtaaaggcca

SEQ ID NO: 1934231 - DNA, 25 bp, Homo sapien
aattgtaaaggccaccaatgctatg

SEQ ID NO: 1934232 - DNA, 25 bp, Homo sapien
tgtaaaggccaccaatgctatgaag

SEQ ID NO: 1934233 - DNA, 25 bp, Homo sapien
atgggcaaaataaacagcgaacatc

SEQ ID NO: 1934234 - DNA, 25 bp, Homo sapien
taaagtgctgacttaattgaatatt

SEQ ID NO: 1934235 - DNA, 25 bp, Homo sapien
ttatatgacagtatcaaaacatcac

SEQ ID NO: 1934236 - DNA, 25 bp, Homo sapien
tggaggggttgcatagttcagttac

SEQ ID NO: 1934237 - DNA, 25 bp, Homo sapien
tgctttggcctataaagtgctgact

SEQ ID NO: 1934238 - DNA, 25 bp, Homo sapien
gatggactagattttcagcaaagga

SEQ ID NO: 1934239 - DNA, 25 bp, Homo sapien
tgatgatgcattcttggatggacta

SEQ ID NO: 1934240 - DNA, 25 bp, Homo sapien
ccaccagccattgtttttggtcaga

SEQ ID NO: 1934241 - DNA, 25 bp, Homo sapien
ttttctcagtacggccttaccacca

SEQ ID NO: 1934242 - DNA, 25 bp, Homo sapien
tccaggacatttagctgctctgtta

SEQ ID NO: 1934243 - DNA, 25 bp, Homo sapien
tcactccaggacatttagctgctct

SEQ ID NO: 1934244 - DNA, 25 bp, Homo sapien
tgctctgttatccatttatgtgaag

SEQ ID NO: 1934245 - DNA, 25 bp, Homo sapien
tagctgctctgttatccatttatgt

SEQ ID NO: 1934246 - DNA, 25 bp, Homo sapien
acggttgaggtgtatacataaatgc

SEQ ID NO: 1934247 - DNA, 25 bp, Homo sapien
gagacggttgaggtgtatacataaa

SEQ ID NO: 1934248 - DNA, 25 bp, Homo sapien
gggagagacggttgaggtgtataca

SEQ ID NO: 1934249 - DNA, 25 bp, Homo sapien
cacattataggaagtgggatgggga

SEQ ID NO: 1934250 - DNA, 25 bp, Homo sapien
ttgtgaatataacaccactctctgg

SEQ ID NO: 1934251 - DNA, 25 bp, Homo sapien
actttgtgaatataacaccactctc

SEQ ID NO: 1934252 - DNA, 25 bp, Homo sapien
tgagagaacccaggtttatttgacc

SEQ ID NO: 1934253 - DNA, 25 bp, Homo sapien
gaacccaggtttatttgaccataga

SEQ ID NO: 1934254 - DNA, 25 bp, Homo sapien
tctagtagaacactagagcccaggg

SEQ ID NO: 1934255 - DNA, 25 bp, Homo sapien
tcacagatatctgaaccctctacgt

SEQ ID NO: 1934256 - DNA, 25 bp, Homo sapien
tacaagcttggaataaaaggctcac

SEQ ID NO: 1934257 - DNA, 25 bp, Homo sapien
gaaccctctacgtatccttcttcat

SEQ ID NO: 1934258 - DNA, 25 bp, Homo sapien
ccacaaaattcaatacgcctgcatg

SEQ ID NO: 1934259 - DNA, 25 bp, Homo sapien
cacaaaattcaatacgcctgcatgc

SEQ ID NO: 1934260 - DNA, 25 bp, Homo sapien
tgcgctggaagatccatcagtgtcc

SEQ ID NO: 1934261 - DNA, 25 bp, Homo sapien
gagtgtcttgctatcaacttcagcc

SEQ ID NO: 1934262 - DNA, 25 bp, Homo sapien
taaatgtcatgtgtccagtacccag

SEQ ID NO: 1934263 - DNA, 25 bp, Homo sapien
tcttggtttatatgccacactttat

SEQ ID NO: 1934264 - DNA, 25 bp, Homo sapien
cagcacataatatttagattgtgtc

SEQ ID NO: 1934265 - DNA, 25 bp, Homo sapien
catgcttattccacacccctaaatg

SEQ ID NO: 1934266 - DNA, 25 bp, Homo sapien
tgtgtcctcaccaagttcaattcaa

SEQ ID NO: 1934267 - DNA, 25 bp, Homo sapien
aatgtgatctctatttaatcagcac

SEQ ID NO: 1934268 - DNA, 25 bp, Homo sapien
ttacagggaccgcttcagaaatgca

SEQ ID NO: 1934269 - DNA, 25 bp, Homo sapien
tacagggaccgcttcagaaatgcag

SEQ ID NO: 1934270 - DNA, 25 bp, Homo sapien
acagggaccgcttcagaaatgcaga

SEQ ID NO: 1934271 - DNA, 25 bp, Homo sapien
cagagataaatagccatctctggtt

SEQ ID NO: 1934272 - DNA, 25 bp, Homo sapien
ccagagataaatagccatctctggt

SEQ ID NO: 1934273 - DNA, 25 bp, Homo sapien
tccagagataaatagccatctctgg

SEQ ID NO: 1934274 - DNA, 25 bp, Homo sapien
agagataaatagccatctctggttc

SEQ ID NO: 1934275 - DNA, 25 bp, Homo sapien
tttgtttttcacattttcatcaacc

SEQ ID NO: 1934276 - DNA, 25 bp, Homo sapien
atttgtttttcacattttcatcaac

SEQ ID NO: 1934277 - DNA, 25 bp, Homo sapien
tcatccgcaggtgtatttgtttttc

SEQ ID NO: 1934278 - DNA, 25 bp, Homo sapien
tccgcaggtgtatttgtttttcaca

SEQ ID NO: 1934279 - DNA, 25 bp, Homo sapien
gatactttccgaagtagtgattctg

SEQ ID NO: 1934280 - DNA, 25 bp, Homo sapien
gaatacctcttgatactttccgaag

SEQ ID NO: 1934281 - DNA, 25 bp, Homo sapien
tacaatgtgaatacctcttgatact

SEQ ID NO: 1934282 - DNA, 25 bp, Homo sapien
ctcttgatactttccgaagtagtga

SEQ ID NO: 1934283 - DNA, 25 bp, Homo sapien
cttcccctaaattctcgattgtcat

SEQ ID NO: 1934284 - DNA, 25 bp, Homo sapien
ccttcccctaaattctcgattgtca

SEQ ID NO: 1934285 - DNA, 25 bp, Homo sapien
ctgttatcataaatggggctcactt

SEQ ID NO: 1934286 - DNA, 25 bp, Homo sapien
tggggctcactttcttttctttctc

SEQ ID NO: 1934287 - DNA, 25 bp, Homo sapien
tgatgttgccatacataagactaac

SEQ ID NO: 1934288 - DNA, 25 bp, Homo sapien
ctaacatagtgagtaagaagcaggg

SEQ ID NO: 1934289 - DNA, 25 bp, Homo sapien
aattaccagaaagttccatattgta

SEQ ID NO: 1934290 - DNA, 25 bp, Homo sapien
tacttcaagtttattactaccaggc

SEQ ID NO: 1934291 - DNA, 25 bp, Homo sapien
agttagccagggcactggcaatgct

SEQ ID NO: 1934292 - DNA, 25 bp, Homo sapien
cctcctcctggtaagctggtagtta

SEQ ID NO: 1934293 - DNA, 25 bp, Homo sapien
cctcctggtaagctggtagttagcc

SEQ ID NO: 1934294 - DNA, 25 bp, Homo sapien
gcaatgctacccagactgctccagg

SEQ ID NO: 1934295 - DNA, 25 bp, Homo sapien
acagctctgctgtatttctctatat

SEQ ID NO: 1934296 - DNA, 25 bp, Homo sapien
gctctgctgtatttctctatattct

SEQ ID NO: 1934297 - DNA, 25 bp, Homo sapien
taaacagctctgctgtatttctcta

SEQ ID NO: 1934298 - DNA, 25 bp, Homo sapien
caaggaaaactttgataaacagctc

SEQ ID NO: 1934299 - DNA, 25 bp, Homo sapien
aattcagagtttgattgcaagttgt

SEQ ID NO: 1934300 - DNA, 25 bp, Homo sapien
aaattcagagtttgattgcaagttg

SEQ ID NO: 1934301 - DNA, 25 bp, Homo sapien
ttcagagtttgattgcaagttgtac

SEQ ID NO: 1934302 - DNA, 25 bp, Homo sapien
gaaattcagagtttgattgcaagtt

SEQ ID NO: 1934303 - DNA, 25 bp, Homo sapien
tctagactcacaaaagcgaatggct

SEQ ID NO: 1934304 - DNA, 25 bp, Homo sapien
gcccagctgtgcaagtgtactgcca

SEQ ID NO: 1934305 - DNA, 25 bp, Homo sapien
cttgttttagcttcctgtatgccca

SEQ ID NO: 1934306 - DNA, 25 bp, Homo sapien
gggtattcttaaggcagatcttctg

SEQ ID NO: 1934307 - DNA, 25 bp, Homo sapien
ccagaaagggtttgtggtctctgaa

SEQ ID NO: 1934308 - DNA, 25 bp, Homo sapien
caagatattgacacttcagccctag

SEQ ID NO: 1934309 - DNA, 25 bp, Homo sapien
catttgacttgagagcctatgccaa

SEQ ID NO: 1934310 - DNA, 25 bp, Homo sapien
tcagccctagagctgccagaaaggg

SEQ ID NO: 1934311 - DNA, 25 bp, Homo sapien
ccattaggatcattttgagtagtca

SEQ ID NO: 1934312 - DNA, 25 bp, Homo sapien
gcctaaaatatatgcctgtctgatt

SEQ ID NO: 1934313 - DNA, 25 bp, Homo sapien
tccatccaggttgagtacagaaaat

SEQ ID NO: 1934314 - DNA, 25 bp, Homo sapien
gaccctatagggcaaaggctgacta

SEQ ID NO: 1934315 - DNA, 25 bp, Homo sapien
gtctgcaaggttagaactattatta

SEQ ID NO: 1934316 - DNA, 25 bp, Homo sapien
taagtctgcaaggttagaactatta

SEQ ID NO: 1934317 - DNA, 25 bp, Homo sapien
aagtctgcaaggttagaactattat

SEQ ID NO: 1934318 - DNA, 25 bp, Homo sapien
ttaagtctgcaaggttagaactatt

SEQ ID NO: 1934319 - DNA, 25 bp, Homo sapien
tgtgcctgtggaacgagtaatgaat

SEQ ID NO: 1934320 - DNA, 25 bp, Homo sapien
agcattaatggccagaaaaacaaat

SEQ ID NO: 1934321 - DNA, 25 bp, Homo sapien
ttcttttgagttgtgcctgtggaac

SEQ ID NO: 1934322 - DNA, 25 bp, Homo sapien
tgagttgtgcctgtggaacgagtaa

SEQ ID NO: 1934323 - DNA, 25 bp, Homo sapien
ttggatgcagactctatgttcctgc

SEQ ID NO: 1934324 - DNA, 25 bp, Homo sapien
tgtcttctaatgtacaagtcaaagc

SEQ ID NO: 1934325 - DNA, 25 bp, Homo sapien
cattttactcctttctaattgtgga

SEQ ID NO: 1934326 - DNA, 25 bp, Homo sapien
gatcaactactaaagtaaacttgtc

SEQ ID NO: 1934327 - DNA, 25 bp, Homo sapien
tgtcctttcgaaagccagatcaact

SEQ ID NO: 1934328 - DNA, 25 bp, Homo sapien
gatgtttgaaagtaagactagcaga

SEQ ID NO: 1934329 - DNA, 25 bp, Homo sapien
gtttgaaagtaagactagcagaaat

SEQ ID NO: 1934330 - DNA, 25 bp, Homo sapien
aatctgatgtttgaaagtaagacta

SEQ ID NO: 1934331 - DNA, 25 bp, Homo sapien
tctgatgtttgaaagtaagactagc

SEQ ID NO: 1934332 - DNA, 25 bp, Homo sapien
gttaagcatatgagatctactcact

SEQ ID NO: 1934333 - DNA, 25 bp, Homo sapien
agatctactcactttacaaattttt

SEQ ID NO: 1934334 - DNA, 25 bp, Homo sapien
ttaagcatatgagatctactcactt

SEQ ID NO: 1934335 - DNA, 25 bp, Homo sapien
cctcccctggcccatagcaaccaca

SEQ ID NO: 1934336 - DNA, 25 bp, Homo sapien
aaggaaatgaacgtcggcagtcttt

SEQ ID NO: 1934337 - DNA, 25 bp, Homo sapien
tgaacgtcggcagtctttcctgtgt

SEQ ID NO: 1934338 - DNA, 25 bp, Homo sapien
tctatattagcagatgccattcttc

SEQ ID NO: 1934339 - DNA, 25 bp, Homo sapien
aagccatagggcatgaccagcctca

SEQ ID NO: 1934340 - DNA, 25 bp, Homo sapien
gaaggtctttgatgacgcttcagtg

SEQ ID NO: 1934341 - DNA, 25 bp, Homo sapien
aggtctttgatgacgcttcagtggc

SEQ ID NO: 1934342 - DNA, 25 bp, Homo sapien
tctttgatgacgcttcagtggcttc

SEQ ID NO: 1934343 - DNA, 25 bp, Homo sapien
ctttgatgacgcttcagtggcttca

SEQ ID NO: 1934344 - DNA, 25 bp, Homo sapien
gatgaaaatccttcccgtattctag

SEQ ID NO: 1934345 - DNA, 25 bp, Homo sapien
tagtttggcttctactactgagagc

SEQ ID NO: 1934346 - DNA, 25 bp, Homo sapien
caagagggtggagacaaatgcttcc

SEQ ID NO: 1934347 - DNA, 25 bp, Homo sapien
ctcaaatgacagcaagcaagccagc

SEQ ID NO: 1934348 - DNA, 25 bp, Homo sapien
aaatgggctgatcaggtagatgtca

SEQ ID NO: 1934349 - DNA, 25 bp, Homo sapien
tctcacctcataattgcatttgttg

SEQ ID NO: 1934350 - DNA, 25 bp, Homo sapien
gggctgatcaggtagatgtcaataa

SEQ ID NO: 1934351 - DNA, 25 bp, Homo sapien
cagctgtctcacctcataattgcat

SEQ ID NO: 1934352 - DNA, 25 bp, Homo sapien
tttcaccctctctatgttggcccgg

SEQ ID NO: 1934353 - DNA, 25 bp, Homo sapien
accctctctatgttggcccgggtgg

SEQ ID NO: 1934354 - DNA, 25 bp, Homo sapien
ccctctctatgttggcccgggtggt

SEQ ID NO: 1934355 - DNA, 25 bp, Homo sapien
tcaccctctctatgttggcccgggt

SEQ ID NO: 1934356 - DNA, 25 bp, Homo sapien
cttgaatcttctcctttgactggcc

SEQ ID NO: 1934357 - DNA, 25 bp, Homo sapien
tgactggccagtgctgatcaaggtg

SEQ ID NO: 1934358 - DNA, 25 bp, Homo sapien
aatcttctcctttgactggccagtg

SEQ ID NO: 1934359 - DNA, 25 bp, Homo sapien
ccagtgctgatcaaggtggaatgtg

SEQ ID NO: 1934360 - DNA, 25 bp, Homo sapien
tctgggatattgtactcagcttctt

SEQ ID NO: 1934361 - DNA, 25 bp, Homo sapien
ggatattgtactcagcttctttgtc

SEQ ID NO: 1934362 - DNA, 25 bp, Homo sapien
tgggatattgtactcagcttctttg

SEQ ID NO: 1934363 - DNA, 25 bp, Homo sapien
atttctgggatattgtactcagctt

SEQ ID NO: 1934364 - DNA, 25 bp, Homo sapien
ttaatctccaatctgattgtcatca

SEQ ID NO: 1934365 - DNA, 25 bp, Homo sapien
atctccaatctgattgtcatcatta

SEQ ID NO: 1934366 - DNA, 25 bp, Homo sapien
atctgattgtcatcattaagatacc

SEQ ID NO: 1934367 - DNA, 25 bp, Homo sapien
aatctgattgtcatcattaagatac

SEQ ID NO: 1934368 - DNA, 25 bp, Homo sapien
tattctgctacccacatacagggca

SEQ ID NO: 1934369 - DNA, 25 bp, Homo sapien
tactgaaaccttccagaacttggag

SEQ ID NO: 1934370 - DNA, 25 bp, Homo sapien
tactgaaactcggaagaggtgccct

SEQ ID NO: 1934371 - DNA, 25 bp, Homo sapien
cagctgggtgtaatcctcatccgaa

SEQ ID NO: 1934372 - DNA, 25 bp, Homo sapien
ttaaaggaacattgtaaaacatgga

SEQ ID NO: 1934373 - DNA, 25 bp, Homo sapien
taaaggaacattgtaaaacatggat

SEQ ID NO: 1934374 - DNA, 25 bp, Homo sapien
tatccacaattactggcgtcagcag

SEQ ID NO: 1934375 - DNA, 25 bp, Homo sapien
caaattcaggattgggtgagctatc

SEQ ID NO: 1934376 - DNA, 25 bp, Homo sapien
tttgaggacgatgaaagccccagtt

SEQ ID NO: 1934377 - DNA, 25 bp, Homo sapien
aacccatgcattttgccaggtagag

SEQ ID NO: 1934378 - DNA, 25 bp, Homo sapien
cagtgtgcctgttcatgaggtgagc

SEQ ID NO: 1934379 - DNA, 25 bp, Homo sapien
cagtatgttcagattcagtgtgcct

SEQ ID NO: 1934380 - DNA, 25 bp, Homo sapien
tgaggtgagcactccataagccatg

SEQ ID NO: 1934381 - DNA, 25 bp, Homo sapien
ccagggagacttgtattttctgaca

SEQ ID NO: 1934382 - DNA, 25 bp, Homo sapien
tcagactaggtcttggaggagagga

SEQ ID NO: 1934383 - DNA, 25 bp, Homo sapien
gctcttcctcctggtgtttaccagc

SEQ ID NO: 1934384 - DNA, 25 bp, Homo sapien
ttcctcctggtgtttaccagcccag

SEQ ID NO: 1934385 - DNA, 25 bp, Homo sapien
ggatgctcttcctcctggtgtttac

SEQ ID NO: 1934386 - DNA, 25 bp, Homo sapien
tgtgctcagtgtaggaattggatag

SEQ ID NO: 1934387 - DNA, 25 bp, Homo sapien
tctccttttggtgattgttgataga

SEQ ID NO: 1934388 - DNA, 25 bp, Homo sapien
ggataggcagttcctgttcagtctc

SEQ ID NO: 1934389 - DNA, 25 bp, Homo sapien
taggaattggataggcagttcctgt

SEQ ID NO: 1934390 - DNA, 25 bp, Homo sapien
aatctcaggaaaaagtccagagcag

SEQ ID NO: 1934391 - DNA, 25 bp, Homo sapien
gaaaatctcaggaaaaagtccagag

SEQ ID NO: 1934392 - DNA, 25 bp, Homo sapien
ggaaaaagtccagagcagttgccag

SEQ ID NO: 1934393 - DNA, 25 bp, Homo sapien
tcaggaaaaagtccagagcagttgc

SEQ ID NO: 1934394 - DNA, 25 bp, Homo sapien
tactcgggacgctgatgctgatcta

SEQ ID NO: 1934395 - DNA, 25 bp, Homo sapien
gctgatgctgatctaggagaactgc

SEQ ID NO: 1934396 - DNA, 25 bp, Homo sapien
tacataacagatctcagtcattgaa

SEQ ID NO: 1934397 - DNA, 25 bp, Homo sapien
ttgaaatacataacagatctcagtc

SEQ ID NO: 1934398 - DNA, 25 bp, Homo sapien
aaagtattacaagagggcacgcatt

SEQ ID NO: 1934399 - DNA, 25 bp, Homo sapien
caaagtattacaagagggcacgcat

SEQ ID NO: 1934400 - DNA, 25 bp, Homo sapien
agagggcacgcatttttctatagca

SEQ ID NO: 1934401 - DNA, 25 bp, Homo sapien
aagagggcacgcatttttctatagc

SEQ ID NO: 1934402 - DNA, 25 bp, Homo sapien
tgtcttacgtgcaaccatgtggtgt

SEQ ID NO: 1934403 - DNA, 25 bp, Homo sapien
ggatcccatgtatgctctagtcaag

SEQ ID NO: 1934404 - DNA, 25 bp, Homo sapien
aagtaacgatcaacctgccattggg

SEQ ID NO: 1934405 - DNA, 25 bp, Homo sapien
actgcacccggtcaacaaagctttc

SEQ ID NO: 1934406 - DNA, 25 bp, Homo sapien
caggagtatataacttatgtaatta

SEQ ID NO: 1934407 - DNA, 25 bp, Homo sapien
cacaggagtatataacttatgtaat

SEQ ID NO: 1934408 - DNA, 25 bp, Homo sapien
gatcacaggagtatataacttatgt

SEQ ID NO: 1934409 - DNA, 25 bp, Homo sapien
tcacaggagtatataacttatgtaa

SEQ ID NO: 1934410 - DNA, 25 bp, Homo sapien
ttacgctcacagatgctttaaagag

SEQ ID NO: 1934411 - DNA, 25 bp, Homo sapien
caggtaaacatgtggttcttgtcca

SEQ ID NO: 1934412 - DNA, 25 bp, Homo sapien
cacttttggagctcccatgctgcac

SEQ ID NO: 1934413 - DNA, 25 bp, Homo sapien
gaaggccacgatcacctactacaag

SEQ ID NO: 1934414 - DNA, 25 bp, Homo sapien
tatttagtctacagtaatagtatgg

SEQ ID NO: 1934415 - DNA, 25 bp, Homo sapien
gttatttagtctacagtaatagtat

SEQ ID NO: 1934416 - DNA, 25 bp, Homo sapien
ttatttagtctacagtaatagtatg

SEQ ID NO: 1934417 - DNA, 25 bp, Homo sapien
atttagtctacagtaatagtatggc

SEQ ID NO: 1934418 - DNA, 25 bp, Homo sapien
tgtgcgttgctgctctaagtcctgg

SEQ ID NO: 1934419 - DNA, 25 bp, Homo sapien
taatccaaaatgtgcgttgctgctc

SEQ ID NO: 1934420 - DNA, 25 bp, Homo sapien
tctaagtcctggttccttccaatat

SEQ ID NO: 1934421 - DNA, 25 bp, Homo sapien
tccaaaatgtgcgttgctgctctaa

SEQ ID NO: 1934422 - DNA, 25 bp, Homo sapien
cgtccttgcctcagacatgaaggcc

SEQ ID NO: 1934423 - DNA, 25 bp, Homo sapien
tcttggcgtccttgcctcagacatg

SEQ ID NO: 1934424 - DNA, 25 bp, Homo sapien
tggcgtccttgcctcagacatgaag

SEQ ID NO: 1934425 - DNA, 25 bp, Homo sapien
cagtggtcttggcgtccttgcctca

SEQ ID NO: 1934426 - DNA, 25 bp, Homo sapien
tacttctgtctgtttaaggaccagt

SEQ ID NO: 1934427 - DNA, 25 bp, Homo sapien
cttgtactggggtagattttgtata

SEQ ID NO: 1934428 - DNA, 25 bp, Homo sapien
cttgttttccagaccattggtcagg

SEQ ID NO: 1934429 - DNA, 25 bp, Homo sapien
ttgtataatggtgatcacaggttcc

SEQ ID NO: 1934430 - DNA, 25 bp, Homo sapien
tgttttccaccgcccattgatgttg

SEQ ID NO: 1934431 - DNA, 25 bp, Homo sapien
aaggctgttttccaccgcccattga

SEQ ID NO: 1934432 - DNA, 25 bp, Homo sapien
aaaggctgttttccaccgcccattg

SEQ ID NO: 1934433 - DNA, 25 bp, Homo sapien
ggctgttttccaccgcccattgatg

SEQ ID NO: 1934434 - DNA, 25 bp, Homo sapien
ctatggatatggcagcaacacaagt

SEQ ID NO: 1934435 - DNA, 25 bp, Homo sapien
tggatatggcagcaacacaagtgga

SEQ ID NO: 1934436 - DNA, 25 bp, Homo sapien
tatggcagcaacacaagtggaggtg

SEQ ID NO: 1934437 - DNA, 25 bp, Homo sapien
gatatggcagcaacacaagtggagg

SEQ ID NO: 1934438 - DNA, 25 bp, Homo sapien
gaaagctatatatgtagtctctaca

SEQ ID NO: 1934439 - DNA, 25 bp, Homo sapien
ctctaaagaaccctaatataatata

SEQ ID NO: 1934440 - DNA, 25 bp, Homo sapien
taaagaaccctaatataatatacac

SEQ ID NO: 1934441 - DNA, 25 bp, Homo sapien
catgtatttgtgtagaggataaaat

SEQ ID NO: 1934442 - DNA, 25 bp, Homo sapien
tggtgtagcccccaaattgccttta

SEQ ID NO: 1934443 - DNA, 25 bp, Homo sapien
tgtagcccccaaattgcctttataa

SEQ ID NO: 1934444 - DNA, 25 bp, Homo sapien
ctggtgtagcccccaaattgccttt

SEQ ID NO: 1934445 - DNA, 25 bp, Homo sapien
agcccccaaattgcctttataatgg

SEQ ID NO: 1934446 - DNA, 25 bp, Homo sapien
aatgccctcctttgatttggagact

SEQ ID NO: 1934447 - DNA, 25 bp, Homo sapien
tgccctcctttgatttggagacttg

SEQ ID NO: 1934448 - DNA, 25 bp, Homo sapien
ggaatgccctcctttgatttggaga

SEQ ID NO: 1934449 - DNA, 25 bp, Homo sapien
caaactcttgggtagtgtgggacat

SEQ ID NO: 1934450 - DNA, 25 bp, Homo sapien
gaacctacatgtgtctttgcatgag

SEQ ID NO: 1934451 - DNA, 25 bp, Homo sapien
acctacatgtgtctttgcatgagag

SEQ ID NO: 1934452 - DNA, 25 bp, Homo sapien
tattttgaacctacatgtgtctttg

SEQ ID NO: 1934453 - DNA, 25 bp, Homo sapien
ttgaacctacatgtgtctttgcatg

SEQ ID NO: 1934454 - DNA, 25 bp, Homo sapien
tatcctcgtcttctgcgttacacat

SEQ ID NO: 1934455 - DNA, 25 bp, Homo sapien
aaggtttatagaagcatatccctag

SEQ ID NO: 1934456 - DNA, 25 bp, Homo sapien
tatccctagagttttactatcctcg

SEQ ID NO: 1934457 - DNA, 25 bp, Homo sapien
gttttactatcctcgtcttctgcgt

SEQ ID NO: 1934458 - DNA, 25 bp, Homo sapien
ggcagatcagtcctgccaagtgaga

SEQ ID NO: 1934459 - DNA, 25 bp, Homo sapien
ttggcagatcagtcctgccaagtga

SEQ ID NO: 1934460 - DNA, 25 bp, Homo sapien
tcaacttggcagatcagtcctgcca

SEQ ID NO: 1934461 - DNA, 25 bp, Homo sapien
agatcagtcctgccaagtgagaacc

SEQ ID NO: 1934462 - DNA, 25 bp, Homo sapien
taaaatgatgtaggcctgggtgaag

SEQ ID NO: 1934463 - DNA, 25 bp, Homo sapien
gggcttctattgaagtgatttcatt

SEQ ID NO: 1934464 - DNA, 25 bp, Homo sapien
tgatgggatgggtagatggaagaga

SEQ ID NO: 1934465 - DNA, 25 bp, Homo sapien
tcaagtatcacacatgatgggggct

SEQ ID NO: 1934466 - DNA, 25 bp, Homo sapien
gtctccacattgttgccatgcacac

SEQ ID NO: 1934467 - DNA, 25 bp, Homo sapien
tcatgtctccacattgttgccatgc

SEQ ID NO: 1934468 - DNA, 25 bp, Homo sapien
catgtctccacattgttgccatgca

SEQ ID NO: 1934469 - DNA, 25 bp, Homo sapien
tgtctccacattgttgccatgcaca

SEQ ID NO: 1934470 - DNA, 25 bp, Homo sapien
tctgaagcaggctcagactgtttgg

SEQ ID NO: 1934471 - DNA, 25 bp, Homo sapien
gcaggctcagactgtttggctgtga

SEQ ID NO: 1934472 - DNA, 25 bp, Homo sapien
tggctctccgtgatgtctcacagct

SEQ ID NO: 1934473 - DNA, 25 bp, Homo sapien
tctggctctccgtgatgtctcacag

SEQ ID NO: 1934474 - DNA, 25 bp, Homo sapien
ttgtcattccatgtacctatagcag

SEQ ID NO: 1934475 - DNA, 25 bp, Homo sapien
ctatagcagtgttaagcttcccctc

SEQ ID NO: 1934476 - DNA, 25 bp, Homo sapien
tgctggacaagcaggtttcactgta

SEQ ID NO: 1934477 - DNA, 25 bp, Homo sapien
ggtttcactgtagtagtcactgcag

SEQ ID NO: 1934478 - DNA, 25 bp, Homo sapien
ctagattaatcttgtttcaatggtg

SEQ ID NO: 1934479 - DNA, 25 bp, Homo sapien
caatggtggctacaatcctgccata

SEQ ID NO: 1934480 - DNA, 25 bp, Homo sapien
tggatattgcaatagatgtgagtag

SEQ ID NO: 1934481 - DNA, 25 bp, Homo sapien
ttactataatttggtggatattgca

SEQ ID NO: 1934482 - DNA, 25 bp, Homo sapien
tcagtctgttttctgtgcgttcatg

SEQ ID NO: 1934483 - DNA, 25 bp, Homo sapien
tctgtgtttatgtgaggacatgtgt

SEQ ID NO: 1934484 - DNA, 25 bp, Homo sapien
catgtctgtgtttatgtgaggacat

SEQ ID NO: 1934485 - DNA, 25 bp, Homo sapien
tctgttttctgtgcgttcatgtctg

SEQ ID NO: 1934486 - DNA, 25 bp, Homo sapien
caagcagaaggcttcgagttgagaa

SEQ ID NO: 1934487 - DNA, 25 bp, Homo sapien
ctacaagcagaaggcttcgagttga

SEQ ID NO: 1934488 - DNA, 25 bp, Homo sapien
cagaaggcttcgagttgagaaagca

SEQ ID NO: 1934489 - DNA, 25 bp, Homo sapien
gaaggcttcgagttgagaaagcaaa

SEQ ID NO: 1934490 - DNA, 25 bp, Homo sapien
tcttggcatcaataatagcggagaa

SEQ ID NO: 1934491 - DNA, 25 bp, Homo sapien
aatcttggcatcaataatagcggag

SEQ ID NO: 1934492 - DNA, 25 bp, Homo sapien
gcatcaataatagcggagaaataca

SEQ ID NO: 1934493 - DNA, 25 bp, Homo sapien
gattaatcttggcatcaataatagc

SEQ ID NO: 1934494 - DNA, 25 bp, Homo sapien
ttttttattggtgtagcactcctga

SEQ ID NO: 1934495 - DNA, 25 bp, Homo sapien
ttttattggtgtagcactcctgacc

SEQ ID NO: 1934496 - DNA, 25 bp, Homo sapien
caattttttattggtgtagcactcc

SEQ ID NO: 1934497 - DNA, 25 bp, Homo sapien
ggacaattttttattggtgtagcac

SEQ ID NO: 1934498 - DNA, 25 bp, Homo sapien
tgaggggataatgttcttggtttag

SEQ ID NO: 1934499 - DNA, 25 bp, Homo sapien
cttagttgaggggataatgttcttg

SEQ ID NO: 1934500 - DNA, 25 bp, Homo sapien
gataatgttcttggtttaggttctc

SEQ ID NO: 1934501 - DNA, 25 bp, Homo sapien
agttgaggggataatgttcttggtt

SEQ ID NO: 1934502 - DNA, 25 bp, Homo sapien
tttactcctctagggagatcctctt

SEQ ID NO: 1934503 - DNA, 25 bp, Homo sapien
tttttactcctctagggagatcctc

SEQ ID NO: 1934504 - DNA, 25 bp, Homo sapien
tactcctctagggagatcctctttc

SEQ ID NO: 1934505 - DNA, 25 bp, Homo sapien
ttttactcctctagggagatcctct

SEQ ID NO: 1934506 - DNA, 25 bp, Homo sapien
aggagccctgagtgcactgactgtc

SEQ ID NO: 1934507 - DNA, 25 bp, Homo sapien
tgtgaagtattggagtgatgttaac

SEQ ID NO: 1934508 - DNA, 25 bp, Homo sapien
tgactgtccgccttgcagtcccaca

SEQ ID NO: 1934509 - DNA, 25 bp, Homo sapien
gatgttaacaggagccctgagtgca

SEQ ID NO: 1934510 - DNA, 25 bp, Homo sapien
tgtggataatgaaagccatagtcac

SEQ ID NO: 1934511 - DNA, 25 bp, Homo sapien
tcttgtgagaagagcctcaacatat

SEQ ID NO: 1934512 - DNA, 25 bp, Homo sapien
gaagagcctcaacatattccttaat

SEQ ID NO: 1934513 - DNA, 25 bp, Homo sapien
tagtcaccggcaacggtttctgcct

SEQ ID NO: 1934514 - DNA, 25 bp, Homo sapien
cagaacaattatttttgtcattgct

SEQ ID NO: 1934515 - DNA, 25 bp, Homo sapien
ctaatacagaacaattatttttgtc

SEQ ID NO: 1934516 - DNA, 25 bp, Homo sapien
tacagaacaattatttttgtcattg

SEQ ID NO: 1934517 - DNA, 25 bp, Homo sapien
aatacagaacaattatttttgtcat

SEQ ID NO: 1934518 - DNA, 25 bp, Homo sapien
gaatccaggctttcagccatatctg

SEQ ID NO: 1934519 - DNA, 25 bp, Homo sapien
agaatccaggctttcagccatatct

SEQ ID NO: 1934520 - DNA, 25 bp, Homo sapien
cttgctaaatagttattatgataca

SEQ ID NO: 1934521 - DNA, 25 bp, Homo sapien
ctggatacatcgctctaccatcttt

SEQ ID NO: 1934522 - DNA, 25 bp, Homo sapien
gatacatcgctctaccatcttttgg

SEQ ID NO: 1934523 - DNA, 25 bp, Homo sapien
ctctggatacatcgctctaccatct

SEQ ID NO: 1934524 - DNA, 25 bp, Homo sapien
tacctctggatacatcgctctacca

SEQ ID NO: 1934525 - DNA, 25 bp, Homo sapien
tctggatatctacactaaaactgca

SEQ ID NO: 1934526 - DNA, 25 bp, Homo sapien
aagttcttttcagtacaatagggca

SEQ ID NO: 1934527 - DNA, 25 bp, Homo sapien
gatactttctatgaccattgcccag

SEQ ID NO: 1934528 - DNA, 25 bp, Homo sapien
gatatagcgtaaatgaatacaaggc

SEQ ID NO: 1934529 - DNA, 25 bp, Homo sapien
ggtacatccgtttcttagtcactgc

SEQ ID NO: 1934530 - DNA, 25 bp, Homo sapien
taatgaagatagcttaaatcggtac

SEQ ID NO: 1934531 - DNA, 25 bp, Homo sapien
gcttctgatgagtgttttggcacag

SEQ ID NO: 1934532 - DNA, 25 bp, Homo sapien
tagtcactgcatagtcgtcaattgg

SEQ ID NO: 1934533 - DNA, 25 bp, Homo sapien
aacctctgtagttcctgtagtaacg

SEQ ID NO: 1934534 - DNA, 25 bp, Homo sapien
gaggtaactttaatcaggtatctgt

SEQ ID NO: 1934535 - DNA, 25 bp, Homo sapien
gaaggctcaaagattcctcaatggc

SEQ ID NO: 1934536 - DNA, 25 bp, Homo sapien
ctttgccaagattaagattgaggtg

SEQ ID NO: 1934537 - DNA, 25 bp, Homo sapien
gatgattctcaggaagatctccaaa

SEQ ID NO: 1934538 - DNA, 25 bp, Homo sapien
tctcaggaagatctccaaaatcaat

SEQ ID NO: 1934539 - DNA, 25 bp, Homo sapien
gattctcaggaagatctccaaaatc

SEQ ID NO: 1934540 - DNA, 25 bp, Homo sapien
ggaagatctccaaaatcaatgggca

SEQ ID NO: 1934541 - DNA, 25 bp, Homo sapien
gcagggaagcccatctactcacgtg

SEQ ID NO: 1934542 - DNA, 25 bp, Homo sapien
gggaacacctgtctagtcaaccaga

SEQ ID NO: 1934543 - DNA, 25 bp, Homo sapien
cacacagctttggaaggaacgcata

SEQ ID NO: 1934544 - DNA, 25 bp, Homo sapien
tagatgttgctcttagattgccctc

SEQ ID NO: 1934545 - DNA, 25 bp, Homo sapien
tttagaatccaatttgcattcatca

SEQ ID NO: 1934546 - DNA, 25 bp, Homo sapien
caactgtatcattaggatcaaactc

SEQ ID NO: 1934547 - DNA, 25 bp, Homo sapien
attcatcaactgtatcattaggatc

SEQ ID NO: 1934548 - DNA, 25 bp, Homo sapien
atccaatttgcattcatcaactgta

SEQ ID NO: 1934549 - DNA, 25 bp, Homo sapien
gagtcatctatgtagattgtggtcc

SEQ ID NO: 1934550 - DNA, 25 bp, Homo sapien
ctagagtcatctatgtagattgtgg

SEQ ID NO: 1934551 - DNA, 25 bp, Homo sapien
tcatctatgtagattgtggtccaat

SEQ ID NO: 1934552 - DNA, 25 bp, Homo sapien
aaagtctagagtcatctatgtagat

SEQ ID NO: 1934553 - DNA, 25 bp, Homo sapien
cctgctctcttgtgtcatacatcac

SEQ ID NO: 1934554 - DNA, 25 bp, Homo sapien
tcctgctctcttgtgtcatacatca

SEQ ID NO: 1934555 - DNA, 25 bp, Homo sapien
tgctctcttgtgtcatacatcacag

SEQ ID NO: 1934556 - DNA, 25 bp, Homo sapien
ctgctctcttgtgtcatacatcaca

SEQ ID NO: 1934557 - DNA, 25 bp, Homo sapien
cagtaatcagcgataaactgtgcat

SEQ ID NO: 1934558 - DNA, 25 bp, Homo sapien
ccagtaatcagcgataaactgtgca

SEQ ID NO: 1934559 - DNA, 25 bp, Homo sapien
tccccagtaatcagcgataaactgt

SEQ ID NO: 1934560 - DNA, 25 bp, Homo sapien
cttccccagtaatcagcgataaact

SEQ ID NO: 1934561 - DNA, 25 bp, Homo sapien
gaatgccatgatcggcagcagagga

SEQ ID NO: 1934562 - DNA, 25 bp, Homo sapien
gcttttgcacattcaatgaatgcca

SEQ ID NO: 1934563 - DNA, 25 bp, Homo sapien
atgggttttcctgcgattgtcctcc

SEQ ID NO: 1934564 - DNA, 25 bp, Homo sapien
actgtttctcacagaggtgaccgca

SEQ ID NO: 1934565 - DNA, 25 bp, Homo sapien
cagagatttgtctctttgcctttaa

SEQ ID NO: 1934566 - DNA, 25 bp, Homo sapien
agatttgtctctttgcctttaaaag

SEQ ID NO: 1934567 - DNA, 25 bp, Homo sapien
ggcagagatttgtctctttgccttt

SEQ ID NO: 1934568 - DNA, 25 bp, Homo sapien
ctggcagagatttgtctctttgcct

SEQ ID NO: 1934569 - DNA, 25 bp, Homo sapien
agcacttggtctaggattaaatgag

SEQ ID NO: 1934570 - DNA, 25 bp, Homo sapien
aatagtcaaatggtcctggcgcggc

SEQ ID NO: 1934571 - DNA, 25 bp, Homo sapien
cagtatccaggaaattagccggaaa

SEQ ID NO: 1934572 - DNA, 25 bp, Homo sapien
cccttatgtatcaaaagaaatggca

SEQ ID NO: 1934573 - DNA, 25 bp, Homo sapien
gatggccagatttccgttgccttgg

SEQ ID NO: 1934574 - DNA, 25 bp, Homo sapien
cagcagatggccagatttccgttgc

SEQ ID NO: 1934575 - DNA, 25 bp, Homo sapien
agcagtagcagtccaggaccagcag

SEQ ID NO: 1934576 - DNA, 25 bp, Homo sapien
tagcagtccaggaccagcagatggc

SEQ ID NO: 1934577 - DNA, 25 bp, Homo sapien
gaagaaactccagttctccttgaag

SEQ ID NO: 1934578 - DNA, 25 bp, Homo sapien
tatggaccttgtaggcagttatgag

SEQ ID NO: 1934579 - DNA, 25 bp, Homo sapien
tgtgcaaaaatagaacggcgcattt

SEQ ID NO: 1934580 - DNA, 25 bp, Homo sapien
aattgagtccttcatgatgccctgc

SEQ ID NO: 1934581 - DNA, 25 bp, Homo sapien
cgcatttccatccttaattgagtcc

SEQ ID NO: 1934582 - DNA, 25 bp, Homo sapien
tttgaattccccatagtgaactgca

SEQ ID NO: 1934583 - DNA, 25 bp, Homo sapien
ttgaattccccatagtgaactgcat

SEQ ID NO: 1934584 - DNA, 25 bp, Homo sapien
agtttgaattccccatagtgaactg

SEQ ID NO: 1934585 - DNA, 25 bp, Homo sapien
gtttgaattccccatagtgaactgc

SEQ ID NO: 1934586 - DNA, 25 bp, Homo sapien
gaccataagatgtgattccgtatcc

SEQ ID NO: 1934587 - DNA, 25 bp, Homo sapien
tgaggccatcaggtgcaatcatact

SEQ ID NO: 1934588 - DNA, 25 bp, Homo sapien
gcagactcttggaccgctgactcaa

SEQ ID NO: 1934589 - DNA, 25 bp, Homo sapien
gataatggaggtcacttctcatggg

SEQ ID NO: 1934590 - DNA, 25 bp, Homo sapien
tatgaataggtaaggccgtgtggct

SEQ ID NO: 1934591 - DNA, 25 bp, Homo sapien
ggcttttggatagctcaattatgaa

SEQ ID NO: 1934592 - DNA, 25 bp, Homo sapien
tcttagaattcacttatatggagga

SEQ ID NO: 1934593 - DNA, 25 bp, Homo sapien
ccatcccaaataggagtttatatgc

SEQ ID NO: 1934594 - DNA, 25 bp, Homo sapien
cattttcgtgcctcaatgggaatgt

SEQ ID NO: 1934595 - DNA, 25 bp, Homo sapien
tcttggtgcaagagactaatgggag

SEQ ID NO: 1934596 - DNA, 25 bp, Homo sapien
catcagagctgtggctagatccatt

SEQ ID NO: 1934597 - DNA, 25 bp, Homo sapien
caaagcacctggtttggaaactgaa

SEQ ID NO: 1934598 - DNA, 25 bp, Homo sapien
gatgctagctgtggatttctaacta

SEQ ID NO: 1934599 - DNA, 25 bp, Homo sapien
tagctcttgctaataaaccactagt

SEQ ID NO: 1934600 - DNA, 25 bp, Homo sapien
attacttccatagggtgatgctagc

SEQ ID NO: 1934601 - DNA, 25 bp, Homo sapien
cactagttgttaatgatgaatggtc

SEQ ID NO: 1934602 - DNA, 25 bp, Homo sapien
taatagactacacacttgtcttgaa

SEQ ID NO: 1934603 - DNA, 25 bp, Homo sapien
tattttatctgaattatactaagca

SEQ ID NO: 1934604 - DNA, 25 bp, Homo sapien
ttccactgattatttaatagactac

SEQ ID NO: 1934605 - DNA, 25 bp, Homo sapien
gattatttaatagactacacacttg

SEQ ID NO: 1934606 - DNA, 25 bp, Homo sapien
tcagatggcataatcaaggatgaag

SEQ ID NO: 1934607 - DNA, 25 bp, Homo sapien
ccagttccttcgacagatacattga

SEQ ID NO: 1934608 - DNA, 25 bp, Homo sapien
tgtaatgctagtcacaatctctggg

SEQ ID NO: 1934609 - DNA, 25 bp, Homo sapien
gctaaatgattatgaaggtggcact

SEQ ID NO: 1934610 - DNA, 25 bp, Homo sapien
tacacagaggagtatatgttgacat

SEQ ID NO: 1934611 - DNA, 25 bp, Homo sapien
tatagtgcatagtaataccatcagg

SEQ ID NO: 1934612 - DNA, 25 bp, Homo sapien
ctagttcctagcgacaaagttggtt

SEQ ID NO: 1934613 - DNA, 25 bp, Homo sapien
aaatgtgatacctacagttttggtc

SEQ ID NO: 1934614 - DNA, 25 bp, Homo sapien
aacttctatcttagtactccttttg

SEQ ID NO: 1934615 - DNA, 25 bp, Homo sapien
aggcactcatagctataaacttcta

SEQ ID NO: 1934616 - DNA, 25 bp, Homo sapien
ttgttcttgatggtctagtatttta

SEQ ID NO: 1934617 - DNA, 25 bp, Homo sapien
atcttagtactccttttgctatatc

SEQ ID NO: 1934618 - DNA, 25 bp, Homo sapien
tagtgagaacagcatgaacattttc

SEQ ID NO: 1934619 - DNA, 25 bp, Homo sapien
agtgagaacagcatgaacattttca

SEQ ID NO: 1934620 - DNA, 25 bp, Homo sapien
ttgtagtgagaacagcatgaacatt

SEQ ID NO: 1934621 - DNA, 25 bp, Homo sapien
agattgtagtgagaacagcatgaac

SEQ ID NO: 1934622 - DNA, 25 bp, Homo sapien
aactagttattttctcgatgaatct

SEQ ID NO: 1934623 - DNA, 25 bp, Homo sapien
gatgaatctctgtttgactcttcta

SEQ ID NO: 1934624 - DNA, 25 bp, Homo sapien
gactcttctaacactggcactatca

SEQ ID NO: 1934625 - DNA, 25 bp, Homo sapien
tctcgatgaatctctgtttgactct

SEQ ID NO: 1934626 - DNA, 25 bp, Homo sapien
tctctctgctaaggtatttgtgaaa

SEQ ID NO: 1934627 - DNA, 25 bp, Homo sapien
ggatatcctttagactccctataaa

SEQ ID NO: 1934628 - DNA, 25 bp, Homo sapien
gtatcagagtcctactttagggaga

SEQ ID NO: 1934629 - DNA, 25 bp, Homo sapien
cagaactgtgacatagttggtggtg

SEQ ID NO: 1934630 - DNA, 25 bp, Homo sapien
ctcaagagcttcataatctcaattt

SEQ ID NO: 1934631 - DNA, 25 bp, Homo sapien
tcaagagcttcataatctcaatttc

SEQ ID NO: 1934632 - DNA, 25 bp, Homo sapien
tttctcatttggttgggacagctga

SEQ ID NO: 1934633 - DNA, 25 bp, Homo sapien
gacagctgaagctttggaggaaatt

SEQ ID NO: 1934634 - DNA, 25 bp, Homo sapien
tccagcatctgttcctattttggtg

SEQ ID NO: 1934635 - DNA, 25 bp, Homo sapien
aattcttctaatgagtatgacagga

SEQ ID NO: 1934636 - DNA, 25 bp, Homo sapien
tgtctaattactgtgactactcccc

SEQ ID NO: 1934637 - DNA, 25 bp, Homo sapien
gaatacctgtgttcgcttctccact

SEQ ID NO: 1934638 - DNA, 25 bp, Homo sapien
tacaaagtagtgattgtgggcatgc

SEQ ID NO: 1934639 - DNA, 25 bp, Homo sapien
ccactatgtaggatagaattctggc

SEQ ID NO: 1934640 - DNA, 25 bp, Homo sapien
atatttttgaggctctagcaagcat

SEQ ID NO: 1934641 - DNA, 25 bp, Homo sapien
gaggctctagcaagcataggttgtt

SEQ ID NO: 1934642 - DNA, 25 bp, Homo sapien
tttttgaggctctagcaagcatagg

SEQ ID NO: 1934643 - DNA, 25 bp, Homo sapien
aatcccttctaaaagggactatatg

SEQ ID NO: 1934644 - DNA, 25 bp, Homo sapien
ggtaagaacgctcaataatttccgc

SEQ ID NO: 1934645 - DNA, 25 bp, Homo sapien
ttaaatttcctcatgggccgctaag

SEQ ID NO: 1934646 - DNA, 25 bp, Homo sapien
tcctctgccgataggattctccaca

SEQ ID NO: 1934647 - DNA, 25 bp, Homo sapien
taagtgaagtctgacaggactcatc

SEQ ID NO: 1934648 - DNA, 25 bp, Homo sapien
tctctattgatctctagttgatctc

SEQ ID NO: 1934649 - DNA, 25 bp, Homo sapien
taatttgatggaaggtttgtagaga

SEQ ID NO: 1934650 - DNA, 25 bp, Homo sapien
tgatgccaatggatgcactggattt

SEQ ID NO: 1934651 - DNA, 25 bp, Homo sapien
cttgatgccaatggatgcactggat

SEQ ID NO: 1934652 - DNA, 25 bp, Homo sapien
agaagcatctagtgaatcaggtcca

SEQ ID NO: 1934653 - DNA, 25 bp, Homo sapien
agcatctagtgaatcaggtccatta

SEQ ID NO: 1934654 - DNA, 25 bp, Homo sapien
gaagcatctagtgaatcaggtccat

SEQ ID NO: 1934655 - DNA, 25 bp, Homo sapien
gcatctagtgaatcaggtccattaa

SEQ ID NO: 1934656 - DNA, 25 bp, Homo sapien
cagtatgctataatgcatttggcaa

SEQ ID NO: 1934657 - DNA, 25 bp, Homo sapien
tttttgtccagtatgctataatgca

SEQ ID NO: 1934658 - DNA, 25 bp, Homo sapien
tccagtatgctataatgcatttggc

SEQ ID NO: 1934659 - DNA, 25 bp, Homo sapien
tgtccagtatgctataatgcatttg

SEQ ID NO: 1934660 - DNA, 25 bp, Homo sapien
tgagccaccgtgcttggcctaggtt

SEQ ID NO: 1934661 - DNA, 25 bp, Homo sapien
gagccaccgtgcttggcctaggtta

SEQ ID NO: 1934662 - DNA, 25 bp, Homo sapien
agccaccgtgcttggcctaggttac

SEQ ID NO: 1934663 - DNA, 25 bp, Homo sapien
atgagccaccgtgcttggcctaggt

SEQ ID NO: 1934664 - DNA, 25 bp, Homo sapien
tgcacttatcaaccgtaatctaggt

SEQ ID NO: 1934665 - DNA, 25 bp, Homo sapien
tgtagagtctattgtggtttgctgc

SEQ ID NO: 1934666 - DNA, 25 bp, Homo sapien
tgtccatttgattcatgttgccaca

SEQ ID NO: 1934667 - DNA, 25 bp, Homo sapien
tcttgagtgaaccatgatagattgt

SEQ ID NO: 1934668 - DNA, 25 bp, Homo sapien
gatggtgtgggaaagagatagatac

SEQ ID NO: 1934669 - DNA, 25 bp, Homo sapien
gtgggaaagagatagatacataaac

SEQ ID NO: 1934670 - DNA, 25 bp, Homo sapien
ggaaagagatagatacataaaccaa

SEQ ID NO: 1934671 - DNA, 25 bp, Homo sapien
tgggaaagagatagatacataaacc

SEQ ID NO: 1934672 - DNA, 25 bp, Homo sapien
ctgcatggtcattttgggatcttca

SEQ ID NO: 1934673 - DNA, 25 bp, Homo sapien
ctattctaccagcatccttgttaaa

SEQ ID NO: 1934674 - DNA, 25 bp, Homo sapien
gtcattttgggatcttcatgctggc

SEQ ID NO: 1934675 - DNA, 25 bp, Homo sapien
attttgggatcttcatgctggcaga

SEQ ID NO: 1934676 - DNA, 25 bp, Homo sapien
gcactgtggaacttctgccacaatt

SEQ ID NO: 1934677 - DNA, 25 bp, Homo sapien
ccactgatacctccctggaaaagtt

SEQ ID NO: 1934678 - DNA, 25 bp, Homo sapien
tttagtgcactgtggaacttctgcc

SEQ ID NO: 1934679 - DNA, 25 bp, Homo sapien
aatttcaccactgatacctccctgg

SEQ ID NO: 1934680 - DNA, 25 bp, Homo sapien
ttgcttctgctttagttctcagggg

SEQ ID NO: 1934681 - DNA, 25 bp, Homo sapien
tcagccttcttcagtccgcaagtct

SEQ ID NO: 1934682 - DNA, 25 bp, Homo sapien
agtccgcaagtctgggggatatccc

SEQ ID NO: 1934683 - DNA, 25 bp, Homo sapien
gccttcttcagtccgcaagtctggg

SEQ ID NO: 1934684 - DNA, 25 bp, Homo sapien
gtccgcaagtctgggggatatcccc

SEQ ID NO: 1934685 - DNA, 25 bp, Homo sapien
aaggtccgttccaaacctgcaccag

SEQ ID NO: 1934686 - DNA, 25 bp, Homo sapien
tcaaggtccgttccaaacctgcacc

SEQ ID NO: 1934687 - DNA, 25 bp, Homo sapien
aggtccgttccaaacctgcaccaga

SEQ ID NO: 1934688 - DNA, 25 bp, Homo sapien
caaggtccgttccaaacctgcacca

SEQ ID NO: 1934689 - DNA, 25 bp, Homo sapien
tacaagcatgactataaaacccaag

SEQ ID NO: 1934690 - DNA, 25 bp, Homo sapien
taccaaacgagaatgaggttcctcc

SEQ ID NO: 1934691 - DNA, 25 bp, Homo sapien
cttcctcttgtgtggagctccaaca

SEQ ID NO: 1934692 - DNA, 25 bp, Homo sapien
tgcaccagatcccagaagtaaagtt

SEQ ID NO: 1934693 - DNA, 25 bp, Homo sapien
gattctcagagaccattcactcatg

SEQ ID NO: 1934694 - DNA, 25 bp, Homo sapien
ctcagagaccattcactcatgcatt

SEQ ID NO: 1934695 - DNA, 25 bp, Homo sapien
acatcattatccacagtccctccca

SEQ ID NO: 1934696 - DNA, 25 bp, Homo sapien
acagattctcagagaccattcactc

SEQ ID NO: 1934697 - DNA, 25 bp, Homo sapien
agaagacctgagagccccgacaaac

SEQ ID NO: 1934698 - DNA, 25 bp, Homo sapien
ccagcgcgggagaaagataaacgct

SEQ ID NO: 1934699 - DNA, 25 bp, Homo sapien
cccgataggccgcgtgcaagctgag

SEQ ID NO: 1934700 - DNA, 25 bp, Homo sapien
ggcagaagacctgagagccccgaca

SEQ ID NO: 1934701 - DNA, 25 bp, Homo sapien
aaaagaataacagaccagccatgtt

SEQ ID NO: 1934702 - DNA, 25 bp, Homo sapien
gccatgtttatcttcaccttcattt

SEQ ID NO: 1934703 - DNA, 25 bp, Homo sapien
agccatgtttatcttcaccttcatt

SEQ ID NO: 1934704 - DNA, 25 bp, Homo sapien
gcttcctgatgagcaactgtgagct

SEQ ID NO: 1934705 - DNA, 25 bp, Homo sapien
gctacagtagaagcatggttcccac

SEQ ID NO: 1934706 - DNA, 25 bp, Homo sapien
taaaggcacaagcttctcatgtggc

SEQ ID NO: 1934707 - DNA, 25 bp, Homo sapien
tggttcccacatcataaagtgactg

SEQ ID NO: 1934708 - DNA, 25 bp, Homo sapien
cctcagtgattatattgatgattaa

SEQ ID NO: 1934709 - DNA, 25 bp, Homo sapien
gatagtaaatgtaaagctttaggac

SEQ ID NO: 1934710 - DNA, 25 bp, Homo sapien
tctcttgttcacctcagtgattata

SEQ ID NO: 1934711 - DNA, 25 bp, Homo sapien
aattagatccttctcttgttcacct

SEQ ID NO: 1934712 - DNA, 25 bp, Homo sapien
aaaaattgcctaagtgtgatcccac

SEQ ID NO: 1934713 - DNA, 25 bp, Homo sapien
ccaaatattcgaggatttagcaatg

SEQ ID NO: 1934714 - DNA, 25 bp, Homo sapien
taagatggccatgcaaacttgtgag

SEQ ID NO: 1934715 - DNA, 25 bp, Homo sapien
tgcaatttgggacatatgataccta

SEQ ID NO: 1934716 - DNA, 25 bp, Homo sapien
tactaagttctctccaggtagtgag

SEQ ID NO: 1934717 - DNA, 25 bp, Homo sapien
tccaggtagtgagttgaatggccaa

SEQ ID NO: 1934718 - DNA, 25 bp, Homo sapien
gttctctccaggtagtgagttgaat

SEQ ID NO: 1934719 - DNA, 25 bp, Homo sapien
caggtagtgagttgaatggccaaaa

SEQ ID NO: 1934720 - DNA, 25 bp, Homo sapien
tagtaaaacagaattggtcaccatg

SEQ ID NO: 1934721 - DNA, 25 bp, Homo sapien
tcatgctgtgcccatttagtaaaac

SEQ ID NO: 1934722 - DNA, 25 bp, Homo sapien
tggtcaccatgttcttagcattgct

SEQ ID NO: 1934723 - DNA, 25 bp, Homo sapien
attgcttttcagagatgtcatacgc

SEQ ID NO: 1934724 - DNA, 25 bp, Homo sapien
tgagaacccgggcaactaaggtgac

SEQ ID NO: 1934725 - DNA, 25 bp, Homo sapien
gaagatgaaacagcccacaaagaca

SEQ ID NO: 1934726 - DNA, 25 bp, Homo sapien
caatcatgtggcctagagatggatc

SEQ ID NO: 1934727 - DNA, 25 bp, Homo sapien
tcactgagtaggtaaagagcaaatg

SEQ ID NO: 1934728 - DNA, 25 bp, Homo sapien
tattctccaggaagattgtgtgcgc

SEQ ID NO: 1934729 - DNA, 25 bp, Homo sapien
catgctgtgaagctgctattatcca

SEQ ID NO: 1934730 - DNA, 25 bp, Homo sapien
tcatctgtttgagggtatgggatac

SEQ ID NO: 1934731 - DNA, 25 bp, Homo sapien
tattatccaagctactgatgcgagc

SEQ ID NO: 1934732 - DNA, 25 bp, Homo sapien
atggccttcacacaggtccgcagca

SEQ ID NO: 1934733 - DNA, 25 bp, Homo sapien
ttcgggaactgccagcaacacggag

SEQ ID NO: 1934734 - DNA, 25 bp, Homo sapien
cgcttcgggaactgccagcaacacg

SEQ ID NO: 1934735 - DNA, 25 bp, Homo sapien
gcagcaatgcccctgacgtctgcat

SEQ ID NO: 1934736 - DNA, 25 bp, Homo sapien
tccactcgtcgaagaagtagcgcga

SEQ ID NO: 1934737 - DNA, 25 bp, Homo sapien
cagtgagagtgaacacggaaacccc

SEQ ID NO: 1934738 - DNA, 25 bp, Homo sapien
accagcatgatgttgcccagcaagc

SEQ ID NO: 1934739 - DNA, 25 bp, Homo sapien
caccgagaggttggaaagagactta

SEQ ID NO: 1934740 - DNA, 25 bp, Homo sapien
gatctcctttccagcagagtccgct

SEQ ID NO: 1934741 - DNA, 25 bp, Homo sapien
ttccagcagagtccgctggagtttt

SEQ ID NO: 1934742 - DNA, 25 bp, Homo sapien
agcagagtccgctggagttttcacg

SEQ ID NO: 1934743 - DNA, 25 bp, Homo sapien
ctcctttccagcagagtccgctgga

SEQ ID NO: 1934744 - DNA, 25 bp, Homo sapien
gcccctgcaagtttactgtccgcgg

SEQ ID NO: 1934745 - DNA, 25 bp, Homo sapien
cgcccacgatttaggtttaatcgat

SEQ ID NO: 1934746 - DNA, 25 bp, Homo sapien
gtttaatcgatgtccctccctctcg

SEQ ID NO: 1934747 - DNA, 25 bp, Homo sapien
ccctgaggactgaacgcccacgatt

SEQ ID NO: 1934748 - DNA, 25 bp, Homo sapien
gctttatgcagcctgtgtttgatat

SEQ ID NO: 1934749 - DNA, 25 bp, Homo sapien
tcaagctttatgcagcctgtgtttg

SEQ ID NO: 1934750 - DNA, 25 bp, Homo sapien
tatgcagcctgtgtttgatatcatg

SEQ ID NO: 1934751 - DNA, 25 bp, Homo sapien
caagctttatgcagcctgtgtttga

SEQ ID NO: 1934752 - DNA, 25 bp, Homo sapien
aagtccaaatagtgggagtaagaga

SEQ ID NO: 1934753 - DNA, 25 bp, Homo sapien
tctagcaacttttgactggaaagtc

SEQ ID NO: 1934754 - DNA, 25 bp, Homo sapien
gaaaccatacattctccagtggtag

SEQ ID NO: 1934755 - DNA, 25 bp, Homo sapien
tgatttctctaccaatctagcaact

SEQ ID NO: 1934756 - DNA, 25 bp, Homo sapien
tgtgggttctaaccgccgagagcca

SEQ ID NO: 1934757 - DNA, 25 bp, Homo sapien
catttgctctgaacgctcgtgcgcg

SEQ ID NO: 1934758 - DNA, 25 bp, Homo sapien
cataagcgccaaaatgctcgggtct

SEQ ID NO: 1934759 - DNA, 25 bp, Homo sapien
gacttgacgtcgctgagcaacggaa

SEQ ID NO: 1934760 - DNA, 25 bp, Homo sapien
tatctggtctttaaatgcaccctgg

SEQ ID NO: 1934761 - DNA, 25 bp, Homo sapien
aattttttgtgaaaccaactagctg

SEQ ID NO: 1934762 - DNA, 25 bp, Homo sapien
tgtaggcccttacgattaataatgc

SEQ ID NO: 1934763 - DNA, 25 bp, Homo sapien
tcggcattctttccatatcagtaac

SEQ ID NO: 1934764 - DNA, 25 bp, Homo sapien
tgtcagcttggtatttgtgttaacg

SEQ ID NO: 1934765 - DNA, 25 bp, Homo sapien
acagtggttttactagttctgccag

SEQ ID NO: 1934766 - DNA, 25 bp, Homo sapien
tggttacgaattctatttggccgga

SEQ ID NO: 1934767 - DNA, 25 bp, Homo sapien
ggaacatcccactatatcttgctga

SEQ ID NO: 1934768 - DNA, 25 bp, Homo sapien
taatgaaataagaatacctagcact

SEQ ID NO: 1934769 - DNA, 25 bp, Homo sapien
ttttaagaatagagcttgcttctcc

SEQ ID NO: 1934770 - DNA, 25 bp, Homo sapien
aagattccatttgtcatgtgtataa

SEQ ID NO: 1934771 - DNA, 25 bp, Homo sapien
ccactgcattaaatagaattgcatt

SEQ ID NO: 1934772 - DNA, 25 bp, Homo sapien
tgggaatctttaaacacaagggtca

SEQ ID NO: 1934773 - DNA, 25 bp, Homo sapien
catgctactaagatgggaatcttta

SEQ ID NO: 1934774 - DNA, 25 bp, Homo sapien
tattcatgctactaagatgggaatc

SEQ ID NO: 1934775 - DNA, 25 bp, Homo sapien
tttattcatgctactaagatgggaa

SEQ ID NO: 1934776 - DNA, 25 bp, Homo sapien
gagactatcctgaatcgcccagatg

SEQ ID NO: 1934777 - DNA, 25 bp, Homo sapien
gttctgctaggtaaaacaatggcca

SEQ ID NO: 1934778 - DNA, 25 bp, Homo sapien
tttcccagctgtgatcaaagagggc

SEQ ID NO: 1934779 - DNA, 25 bp, Homo sapien
tggccaacaaagaagcctacaccgt

SEQ ID NO: 1934780 - DNA, 25 bp, Homo sapien
caggtggccttataagccttttcca

SEQ ID NO: 1934781 - DNA, 25 bp, Homo sapien
tgcaggtggccttataagccttttc

SEQ ID NO: 1934782 - DNA, 25 bp, Homo sapien
gatgcaggtggccttataagccttt

SEQ ID NO: 1934783 - DNA, 25 bp, Homo sapien
tgatgcaggtggccttataagcctt

SEQ ID NO: 1934784 - DNA, 25 bp, Homo sapien
acatccacattacttccaggacata

SEQ ID NO: 1934785 - DNA, 25 bp, Homo sapien
catccacattacttccaggacatac

SEQ ID NO: 1934786 - DNA, 25 bp, Homo sapien
gattccccaaattggtcagctttct

SEQ ID NO: 1934787 - DNA, 25 bp, Homo sapien
ggagcatggactagattccccaaat

SEQ ID NO: 1934788 - DNA, 25 bp, Homo sapien
agcggagcatggactagattcccca

SEQ ID NO: 1934789 - DNA, 25 bp, Homo sapien
tttgtaagagagcagcggagcatgg

SEQ ID NO: 1934790 - DNA, 25 bp, Homo sapien
tattcagattgctgattgattaggc

SEQ ID NO: 1934791 - DNA, 25 bp, Homo sapien
gcagcacaacctgaaatttggagga

SEQ ID NO: 1934792 - DNA, 25 bp, Homo sapien
tgaggttggtcactgtgtaggttga

SEQ ID NO: 1934793 - DNA, 25 bp, Homo sapien
gattgattaggctgcagcacaacct

SEQ ID NO: 1934794 - DNA, 25 bp, Homo sapien
taaaaaacatcagcgtcacactggt

SEQ ID NO: 1934795 - DNA, 25 bp, Homo sapien
taactttcttgctgacatggcacga

SEQ ID NO: 1934796 - DNA, 25 bp, Homo sapien
taatattaacccctcacaatggtgg

SEQ ID NO: 1934797 - DNA, 25 bp, Homo sapien
gcactacaactcgtgtccgacctgg

SEQ ID NO: 1934798 - DNA, 25 bp, Homo sapien
tgggaagctaagtcgtgaggattgc

SEQ ID NO: 1934799 - DNA, 25 bp, Homo sapien
ggaagctaagtcgtgaggattgctt

SEQ ID NO: 1934800 - DNA, 25 bp, Homo sapien
accttgggaagctaagtcgtgagga

SEQ ID NO: 1934801 - DNA, 25 bp, Homo sapien
cttgggaagctaagtcgtgaggatt

SEQ ID NO: 1934802 - DNA, 25 bp, Homo sapien
aatcaacagtaagtcttggatagaa

SEQ ID NO: 1934803 - DNA, 25 bp, Homo sapien
aaatcaacagtaagtcttggataga

SEQ ID NO: 1934804 - DNA, 25 bp, Homo sapien
ctggcacacattttgacagagtgaa

SEQ ID NO: 1934805 - DNA, 25 bp, Homo sapien
ccctggcacacattttgacagagtg

SEQ ID NO: 1934806 - DNA, 25 bp, Homo sapien
gcatattccttctgatcctgaccga

SEQ ID NO: 1934807 - DNA, 25 bp, Homo sapien
ggcccagtcccaaaccaaggatcta

SEQ ID NO: 1934808 - DNA, 25 bp, Homo sapien
tctagagtccttaggtgcagcaccc

SEQ ID NO: 1934809 - DNA, 25 bp, Homo sapien
acggatcttgcatggtggcttgaac

SEQ ID NO: 1934810 - DNA, 25 bp, Homo sapien
gcattctctgagaccagttgctcaa

SEQ ID NO: 1934811 - DNA, 25 bp, Homo sapien
tcacttcactgaggagaggtagtgc

SEQ ID NO: 1934812 - DNA, 25 bp, Homo sapien
tcggaacacgatgggtaaaatggca

SEQ ID NO: 1934813 - DNA, 25 bp, Homo sapien
aagttgtccaggtggtggatcatcc

SEQ ID NO: 1934814 - DNA, 25 bp, Homo sapien
gaagagctgctatcatgcattggtt

SEQ ID NO: 1934815 - DNA, 25 bp, Homo sapien
agctgaagggtcagtatctcctggc

SEQ ID NO: 1934816 - DNA, 25 bp, Homo sapien
ctgacagctgaagggtcagtatctc

SEQ ID NO: 1934817 - DNA, 25 bp, Homo sapien
gcacacaggtgacccacaccagttg

SEQ ID NO: 1934818 - DNA, 25 bp, Homo sapien
aaatcctgattcacttagctttggc

SEQ ID NO: 1934819 - DNA, 25 bp, Homo sapien
gttgcttttatcagtcagtgagcca

SEQ ID NO: 1934820 - DNA, 25 bp, Homo sapien
cagtgagccatcagaagtagaaggc

SEQ ID NO: 1934821 - DNA, 25 bp, Homo sapien
ttttgaccagttgagggaagactcc

SEQ ID NO: 1934822 - DNA, 25 bp, Homo sapien
cggtaggaaactgggagatgtaaat

SEQ ID NO: 1934823 - DNA, 25 bp, Homo sapien
taggaaactgggagatgtaaattga

SEQ ID NO: 1934824 - DNA, 25 bp, Homo sapien
tgcacacaacgggaggcggtaggaa

SEQ ID NO: 1934825 - DNA, 25 bp, Homo sapien
catggatgctgaatagtcaacacca

SEQ ID NO: 1934826 - DNA, 25 bp, Homo sapien
tttctaagaattcctgcattatatt

SEQ ID NO: 1934827 - DNA, 25 bp, Homo sapien
cctgcataagggtttctcttttcta

SEQ ID NO: 1934828 - DNA, 25 bp, Homo sapien
ctccgctcagtgttttggcttttag

SEQ ID NO: 1934829 - DNA, 25 bp, Homo sapien
gtgttttggcttttagtagctggta

SEQ ID NO: 1934830 - DNA, 25 bp, Homo sapien
tttagtagctggtattttacttcaa

SEQ ID NO: 1934831 - DNA, 25 bp, Homo sapien
gctggtattttacttcaactggcat

SEQ ID NO: 1934832 - DNA, 25 bp, Homo sapien
gattactctacacctccacagagca

SEQ ID NO: 1934833 - DNA, 25 bp, Homo sapien
tacagacactaaacagcatcacaga

SEQ ID NO: 1934834 - DNA, 25 bp, Homo sapien
tgtgtctttactccactgtgggcca

SEQ ID NO: 1934835 - DNA, 25 bp, Homo sapien
actataagagatttccaggatggga

SEQ ID NO: 1934836 - DNA, 25 bp, Homo sapien
tttgggactataccgtgtaatagcg

SEQ ID NO: 1934837 - DNA, 25 bp, Homo sapien
tgtaatagcgactgactcaaaaggg

SEQ ID NO: 1934838 - DNA, 25 bp, Homo sapien
aagtagatctttcccctgtccagcc

SEQ ID NO: 1934839 - DNA, 25 bp, Homo sapien
aggttcttgacccacaaactgtgaa

SEQ ID NO: 1934840 - DNA, 25 bp, Homo sapien
ggagatgccacaggagcgcctgcct

SEQ ID NO: 1934841 - DNA, 25 bp, Homo sapien
actcgggtaggctgcaaacgctggg

SEQ ID NO: 1934842 - DNA, 25 bp, Homo sapien
cctttctctcgccgagggtctctgg

SEQ ID NO: 1934843 - DNA, 25 bp, Homo sapien
agcaaagcaacagcccgggagcgtg

SEQ ID NO: 1934844 - DNA, 25 bp, Homo sapien
agcgctcccggcgtttcggcgacct

SEQ ID NO: 1934845 - DNA, 25 bp, Homo sapien
gctgctcgctccaaaagcgcctgtc

SEQ ID NO: 1934846 - DNA, 25 bp, Homo sapien
gggcagctgcgccttcgggacagcc

SEQ ID NO: 1934847 - DNA, 25 bp, Homo sapien
ggccctggggttgaagatcctgtgt

SEQ ID NO: 1934848 - DNA, 25 bp, Homo sapien
gcccagctccagtcacgccggaagc

SEQ ID NO: 1934849 - DNA, 25 bp, Homo sapien
agctccagtcacgccggaagcgcgg

SEQ ID NO: 1934850 - DNA, 25 bp, Homo sapien
cagtcacgccggaagcgcgggcgga

SEQ ID NO: 1934851 - DNA, 25 bp, Homo sapien
gagcgcacgggtccggggagagtcg

SEQ ID NO: 1934852 - DNA, 25 bp, Homo sapien
ttgcgccgtcgggaaagcccatgaa

SEQ ID NO: 1934853 - DNA, 25 bp, Homo sapien
gctgaacgctgccgcgcccagggtt

SEQ ID NO: 1934854 - DNA, 25 bp, Homo sapien
aacttccctgcgaggagggacctgc

SEQ ID NO: 1934855 - DNA, 25 bp, Homo sapien
actctccagaaacggcgtaaaggag

SEQ ID NO: 1934856 - DNA, 25 bp, Homo sapien
atcctcgtagctcattctgcatttc

SEQ ID NO: 1934857 - DNA, 25 bp, Homo sapien
gctacaaatcctcgtagctcattct

SEQ ID NO: 1934858 - DNA, 25 bp, Homo sapien
caaatcctcgtagctcattctgcat

SEQ ID NO: 1934859 - DNA, 25 bp, Homo sapien
tagaatgctacaaatcctcgtagct

SEQ ID NO: 1934860 - DNA, 25 bp, Homo sapien
taaatcatggctgaagtgatcacag

SEQ ID NO: 1934861 - DNA, 25 bp, Homo sapien
gagactgagatcatctgttatcaaa

SEQ ID NO: 1934862 - DNA, 25 bp, Homo sapien
tatcaaaactccgttattaggtgga

SEQ ID NO: 1934863 - DNA, 25 bp, Homo sapien
cattctatgagactgagatcatctg

SEQ ID NO: 1934864 - DNA, 25 bp, Homo sapien
ctgcaagagtattatgtaaccaatc

SEQ ID NO: 1934865 - DNA, 25 bp, Homo sapien
ttctctgcaagagtattatgtaacc

SEQ ID NO: 1934866 - DNA, 25 bp, Homo sapien
tctctgcaagagtattatgtaacca

SEQ ID NO: 1934867 - DNA, 25 bp, Homo sapien
ctctgcaagagtattatgtaaccaa

SEQ ID NO: 1934868 - DNA, 25 bp, Homo sapien
ctatttctataaagggtaagctctt

SEQ ID NO: 1934869 - DNA, 25 bp, Homo sapien
agctatttctataaagggtaagctc

SEQ ID NO: 1934870 - DNA, 25 bp, Homo sapien
tatttgggaagtcagctatttctat

SEQ ID NO: 1934871 - DNA, 25 bp, Homo sapien
cctatttgggaagtcagctatttct

SEQ ID NO: 1934872 - DNA, 25 bp, Homo sapien
ctctactaggctctggcaaggaaaa

SEQ ID NO: 1934873 - DNA, 25 bp, Homo sapien
gaataggtattcctgccttgagggt

SEQ ID NO: 1934874 - DNA, 25 bp, Homo sapien
taaaggtgagatacgtgagcactga

SEQ ID NO: 1934875 - DNA, 25 bp, Homo sapien
ccatatatagcctgcagttgtgtgc

SEQ ID NO: 1934876 - DNA, 25 bp, Homo sapien
tatgtcccaggtacaacttccagga

SEQ ID NO: 1934877 - DNA, 25 bp, Homo sapien
gaattaggctttggcgtgactggaa

SEQ ID NO: 1934878 - DNA, 25 bp, Homo sapien
gtcatgcacataacttgggtcttgg

SEQ ID NO: 1934879 - DNA, 25 bp, Homo sapien
taaatgctgtctagccactgaaggt

SEQ ID NO: 1934880 - DNA, 25 bp, Homo sapien
gacagatggattttgagagtggaca

SEQ ID NO: 1934881 - DNA, 25 bp, Homo sapien
gaacttgcaattgttcactcgccta

SEQ ID NO: 1934882 - DNA, 25 bp, Homo sapien
tatccaggagttgcagtgactactg

SEQ ID NO: 1934883 - DNA, 25 bp, Homo sapien
cactcgcctaactatacatgtggaa

SEQ ID NO: 1934884 - DNA, 25 bp, Homo sapien
tctaccaaagttgttattaggaagc

SEQ ID NO: 1934885 - DNA, 25 bp, Homo sapien
gagttcaaggccaatcaagccaaca

SEQ ID NO: 1934886 - DNA, 25 bp, Homo sapien
gcactcttagatttgcaagcatctg

SEQ ID NO: 1934887 - DNA, 25 bp, Homo sapien
caaaatgtgaatggtacagaaatgg

SEQ ID NO: 1934888 - DNA, 25 bp, Homo sapien
gacccttaaatatccccttcatgta

SEQ ID NO: 1934889 - DNA, 25 bp, Homo sapien
gttagcttgacctttctgttgggca

SEQ ID NO: 1934890 - DNA, 25 bp, Homo sapien
agtgttaaggaacctgcgcagtgtg

SEQ ID NO: 1934891 - DNA, 25 bp, Homo sapien
agaagcaaccggaccctgagagaag

SEQ ID NO: 1934892 - DNA, 25 bp, Homo sapien
taatttatgaagagctgggtctgca

SEQ ID NO: 1934893 - DNA, 25 bp, Homo sapien
tagaaatcggtctcagtgcatgctg

SEQ ID NO: 1934894 - DNA, 25 bp, Homo sapien
cacatttgctctgggttatctggga

SEQ ID NO: 1934895 - DNA, 25 bp, Homo sapien
tattatttatggatcaggctgctgc

SEQ ID NO: 1934896 - DNA, 25 bp, Homo sapien
atatatgtcaattggtttcctttct

SEQ ID NO: 1934897 - DNA, 25 bp, Homo sapien
gttgttggcatagattcttttgtac

SEQ ID NO: 1934898 - DNA, 25 bp, Homo sapien
agtctaggatcctgagagattttcc

SEQ ID NO: 1934899 - DNA, 25 bp, Homo sapien
ctacattgtgttagagtcatagtct

SEQ ID NO: 1934900 - DNA, 25 bp, Homo sapien
gttacacagatccagttcactaagg

SEQ ID NO: 1934901 - DNA, 25 bp, Homo sapien
ttaagcgagtgacatagggctactt

SEQ ID NO: 1934902 - DNA, 25 bp, Homo sapien
gatgcaaagccaagttctacagcag

SEQ ID NO: 1934903 - DNA, 25 bp, Homo sapien
aagttcttagaatttgttgggatga

SEQ ID NO: 1934904 - DNA, 25 bp, Homo sapien
cacttacttgatgagaacagaacct

SEQ ID NO: 1934905 - DNA, 25 bp, Homo sapien
cattttagcgaacttcacttacttg

SEQ ID NO: 1934906 - DNA, 25 bp, Homo sapien
tgtgagaggcttagcaaatgataca

SEQ ID NO: 1934907 - DNA, 25 bp, Homo sapien
tactgtagatatttaggataacttt

SEQ ID NO: 1934908 - DNA, 25 bp, Homo sapien
ccaagccaatgttcacaactcctgg

SEQ ID NO: 1934909 - DNA, 25 bp, Homo sapien
catgcaggttacttcggaaagctgg

SEQ ID NO: 1934910 - DNA, 25 bp, Homo sapien
tcatctacagtcatttacatgcagg

SEQ ID NO: 1934911 - DNA, 25 bp, Homo sapien
ttctatatagcctgttccgcaaaag

SEQ ID NO: 1934912 - DNA, 25 bp, Homo sapien
tatctggaagctgtagcctgactcc

SEQ ID NO: 1934913 - DNA, 25 bp, Homo sapien
ggaataggatgttcccagctctaag

SEQ ID NO: 1934914 - DNA, 25 bp, Homo sapien
gaaaaatccaggatggctagagcct

SEQ ID NO: 1934915 - DNA, 25 bp, Homo sapien
gaaagatccaagtgggatacccctg

SEQ ID NO: 1934916 - DNA, 25 bp, Homo sapien
catcttggtagaggggatttcatcc

SEQ ID NO: 1934917 - DNA, 25 bp, Homo sapien
cttcatcttggtagaggggatttca

SEQ ID NO: 1934918 - DNA, 25 bp, Homo sapien
tcatcctggtggatctgcagcccta

SEQ ID NO: 1934919 - DNA, 25 bp, Homo sapien
gatttcatcctggtggatctgcagc

SEQ ID NO: 1934920 - DNA, 25 bp, Homo sapien
ttcatattgtcaacttcaggcaaat

SEQ ID NO: 1934921 - DNA, 25 bp, Homo sapien
ggaatatgctgagcttcatattgtc

SEQ ID NO: 1934922 - DNA, 25 bp, Homo sapien
gaatatgctgagcttcatattgtca

SEQ ID NO: 1934923 - DNA, 25 bp, Homo sapien
atatgctgagcttcatattgtcaac

SEQ ID NO: 1934924 - DNA, 25 bp, Homo sapien
acattattagatgtaccttctgtct

SEQ ID NO: 1934925 - DNA, 25 bp, Homo sapien
tgtaccttctgtcttatctggatga

SEQ ID NO: 1934926 - DNA, 25 bp, Homo sapien
tcagaacattattagatgtaccttc

SEQ ID NO: 1934927 - DNA, 25 bp, Homo sapien
gaacattattagatgtaccttctgt

SEQ ID NO: 1934928 - DNA, 25 bp, Homo sapien
ggagctctgtctcaaccatatcact

SEQ ID NO: 1934929 - DNA, 25 bp, Homo sapien
tgagctttcctagtctactctgtga

SEQ ID NO: 1934930 - DNA, 25 bp, Homo sapien
taagcttctataaagcaggagctct

SEQ ID NO: 1934931 - DNA, 25 bp, Homo sapien
tctgtgaaaactgtaagcttctata

SEQ ID NO: 1934932 - DNA, 25 bp, Homo sapien
gctctgccatgtcagttaggttctg

SEQ ID NO: 1934933 - DNA, 25 bp, Homo sapien
taggtggcacttaggtgcacaggtc

SEQ ID NO: 1934934 - DNA, 25 bp, Homo sapien
ttttgtttcagggaaccagtcttca

SEQ ID NO: 1934935 - DNA, 25 bp, Homo sapien
tgcacaggtcagttgatcagctctt

SEQ ID NO: 1934936 - DNA, 25 bp, Homo sapien
tacctgggcagggataagggtcatc

SEQ ID NO: 1934937 - DNA, 25 bp, Homo sapien
tctacagagtcaagtgggctacagg

SEQ ID NO: 1934938 - DNA, 25 bp, Homo sapien
gacatctaatgacagaggctggcca

SEQ ID NO: 1934939 - DNA, 25 bp, Homo sapien
taccttgcaaggatgggacaccatt

SEQ ID NO: 1934940 - DNA, 25 bp, Homo sapien
ctgagtatatctggatgagcaacac

SEQ ID NO: 1934941 - DNA, 25 bp, Homo sapien
cacaacgtgtctgagtccaaatata

SEQ ID NO: 1934942 - DNA, 25 bp, Homo sapien
tgtaatgacacgagaagtaaatggg

SEQ ID NO: 1934943 - DNA, 25 bp, Homo sapien
agcaaatatcaaggacacttgttcc

SEQ ID NO: 1934944 - DNA, 25 bp, Homo sapien
gaagcttgactgtgaaagaacctct

SEQ ID NO: 1934945 - DNA, 25 bp, Homo sapien
agcttgactgtgaaagaacctcttt

SEQ ID NO: 1934946 - DNA, 25 bp, Homo sapien
ttcagctttttcaccctcctgaaag

SEQ ID NO: 1934947 - DNA, 25 bp, Homo sapien
tttcagctttttcaccctcctgaaa

SEQ ID NO: 1934948 - DNA, 25 bp, Homo sapien
gtgcacccgtggttccagttgctcc

SEQ ID NO: 1934949 - DNA, 25 bp, Homo sapien
gtggtggggtgcacccgtggttcca

SEQ ID NO: 1934950 - DNA, 25 bp, Homo sapien
gggtgcacccgtggttccagttgct

SEQ ID NO: 1934951 - DNA, 25 bp, Homo sapien
tggggtgcacccgtggttccagttg

SEQ ID NO: 1934952 - DNA, 25 bp, Homo sapien
agggacctgccgcaagcaaagaaac

SEQ ID NO: 1934953 - DNA, 25 bp, Homo sapien
agagggacctgccgcaagcaaagaa

SEQ ID NO: 1934954 - DNA, 25 bp, Homo sapien
aacaaggcttcctcagagaaaagat

SEQ ID NO: 1934955 - DNA, 25 bp, Homo sapien
gggacctgccgcaagcaaagaaaca

SEQ ID NO: 1934956 - DNA, 25 bp, Homo sapien
gtacagcagggggcatcggcatctt

SEQ ID NO: 1934957 - DNA, 25 bp, Homo sapien
catcggcatcttccaacatacaggc

SEQ ID NO: 1934958 - DNA, 25 bp, Homo sapien
gctgtacaaccttggcagagcagct

SEQ ID NO: 1934959 - DNA, 25 bp, Homo sapien
tgctccccttggcaacccagggtac

SEQ ID NO: 1934960 - DNA, 25 bp, Homo sapien
gtcccctaggctgtcgcaggcgtgg

SEQ ID NO: 1934961 - DNA, 25 bp, Homo sapien
cccctaggctgtcgcaggcgtggca

SEQ ID NO: 1934962 - DNA, 25 bp, Homo sapien
ccccggtcccctaggctgtcgcagg

SEQ ID NO: 1934963 - DNA, 25 bp, Homo sapien
cggtcccctaggctgtcgcaggcgt

SEQ ID NO: 1934964 - DNA, 25 bp, Homo sapien
tgatgaccgtgaagtctagccttca

SEQ ID NO: 1934965 - DNA, 25 bp, Homo sapien
tcattccaaccatatgcgaagagtg

SEQ ID NO: 1934966 - DNA, 25 bp, Homo sapien
aaattctgtttgatgatgatgaccg

SEQ ID NO: 1934967 - DNA, 25 bp, Homo sapien
caaccatatgcgaagagtgcttcaa

SEQ ID NO: 1934968 - DNA, 25 bp, Homo sapien
gctgtgatggacccaggtcctcacc

SEQ ID NO: 1934969 - DNA, 25 bp, Homo sapien
ctgtgatggacccaggtcctcacca

SEQ ID NO: 1934970 - DNA, 25 bp, Homo sapien
tgcactttgccaaatgatactattt

SEQ ID NO: 1934971 - DNA, 25 bp, Homo sapien
tttgcactttgccaaatgatactat

SEQ ID NO: 1934972 - DNA, 25 bp, Homo sapien
taggccatcttattatctggctttc

SEQ ID NO: 1934973 - DNA, 25 bp, Homo sapien
cactttgccaaatgatactattttg

SEQ ID NO: 1934974 - DNA, 25 bp, Homo sapien
taaatgcgttatccacaggcaaggc

SEQ ID NO: 1934975 - DNA, 25 bp, Homo sapien
gcaaggctattcctctttcagttga

SEQ ID NO: 1934976 - DNA, 25 bp, Homo sapien
tgagaggactcttggtcagtggaac

SEQ ID NO: 1934977 - DNA, 25 bp, Homo sapien
aattaagctccatgctcaccaaaga

SEQ ID NO: 1934978 - DNA, 25 bp, Homo sapien
tgctggaatatttgggttggccacc

SEQ ID NO: 1934979 - DNA, 25 bp, Homo sapien
ttgctggaatatttgggttggccac

SEQ ID NO: 1934980 - DNA, 25 bp, Homo sapien
ttctgggactcttcagcaaacagcc

SEQ ID NO: 1934981 - DNA, 25 bp, Homo sapien
agctttttctgggactcttcagcaa

SEQ ID NO: 1934982 - DNA, 25 bp, Homo sapien
accaatgaatacaatagcagtgtct

SEQ ID NO: 1934983 - DNA, 25 bp, Homo sapien
aaaccaatgaatacaatagcagtgt

SEQ ID NO: 1934984 - DNA, 25 bp, Homo sapien
aaccaatgaatacaatagcagtgtc

SEQ ID NO: 1934985 - DNA, 25 bp, Homo sapien
gaaaccaatgaatacaatagcagtg

SEQ ID NO: 1934986 - DNA, 25 bp, Homo sapien
ctggaagaatctaaagattcttcta

SEQ ID NO: 1934987 - DNA, 25 bp, Homo sapien
gaatctaaagattcttctaaatatt

SEQ ID NO: 1934988 - DNA, 25 bp, Homo sapien
ggaagaatctaaagattcttctaaa

SEQ ID NO: 1934989 - DNA, 25 bp, Homo sapien
aagaatctaaagattcttctaaata

SEQ ID NO: 1934990 - DNA, 25 bp, Homo sapien
ctactttgatcctgttgtttattct

SEQ ID NO: 1934991 - DNA, 25 bp, Homo sapien
cctctactttgatcctgttgtttat

SEQ ID NO: 1934992 - DNA, 25 bp, Homo sapien
gtccctctactttgatcctgttgtt

SEQ ID NO: 1934993 - DNA, 25 bp, Homo sapien
agtccctctactttgatcctgttgt

SEQ ID NO: 1934994 - DNA, 25 bp, Homo sapien
ttttgaatgtgcaaagtaacctcac

SEQ ID NO: 1934995 - DNA, 25 bp, Homo sapien
attttgaatgtgcaaagtaacctca

SEQ ID NO: 1934996 - DNA, 25 bp, Homo sapien
taattttgaatgtgcaaagtaacct

SEQ ID NO: 1934997 - DNA, 25 bp, Homo sapien
aattttgaatgtgcaaagtaacctc

SEQ ID NO: 1934998 - DNA, 25 bp, Homo sapien
tctctccggcagcagagcccttttg

SEQ ID NO: 1934999 - DNA, 25 bp, Homo sapien
aaacacagataagacccgctaatgc

SEQ ID NO: 1935000 - DNA, 25 bp, Homo sapien
acttcactagaccagctgtctctta

SEQ ID NO: 1935001 - DNA, 25 bp, Homo sapien
tgctccccattatgatacacacaag

SEQ ID NO: 1935002 - DNA, 25 bp, Homo sapien
cacttaacctgacaaatctccaatt

SEQ ID NO: 1935003 - DNA, 25 bp, Homo sapien
caagcgaaccaccactttttccttg

SEQ ID NO: 1935004 - DNA, 25 bp, Homo sapien
atctccaattttgggtcaagcgaac

SEQ ID NO: 1935005 - DNA, 25 bp, Homo sapien
agtctcatatgtcccaccccactta

SEQ ID NO: 1935006 - DNA, 25 bp, Homo sapien
gtaaggatgcatgttcagtgacacc

SEQ ID NO: 1935007 - DNA, 25 bp, Homo sapien
ctgcttgccgcttggagtggagttt

SEQ ID NO: 1935008 - DNA, 25 bp, Homo sapien
aagggtggggatgcatttgcctttc

SEQ ID NO: 1935009 - DNA, 25 bp, Homo sapien
ttcctccaaaatcttgtgatctttt

SEQ ID NO: 1935010 - DNA, 25 bp, Homo sapien
tctgagacgcagaccagggtaacta

SEQ ID NO: 1935011 - DNA, 25 bp, Homo sapien
aaataagtgacctgttacagacatt

SEQ ID NO: 1935012 - DNA, 25 bp, Homo sapien
cctgttacagacattgatgttggca

SEQ ID NO: 1935013 - DNA, 25 bp, Homo sapien
tgttggcaatatcagtaggtctgag

SEQ ID NO: 1935014 - DNA, 25 bp, Homo sapien
gatttgtggactctgactcagcagg

SEQ ID NO: 1935015 - DNA, 25 bp, Homo sapien
gaaatcactggtcattccaaatggt

SEQ ID NO: 1935016 - DNA, 25 bp, Homo sapien
attccaaatggtctgagggcccagt

SEQ ID NO: 1935017 - DNA, 25 bp, Homo sapien
caactgtagacacgtgctgatgaga

SEQ ID NO: 1935018 - DNA, 25 bp, Homo sapien
tgagcacataccttcccggtgcttc

SEQ ID NO: 1935019 - DNA, 25 bp, Homo sapien
ttcagccagttgtttgcacagacat

SEQ ID NO: 1935020 - DNA, 25 bp, Homo sapien
ccagttgtttgcacagacatctttg

SEQ ID NO: 1935021 - DNA, 25 bp, Homo sapien
gaaaatctgagcacataccttcccg

SEQ ID NO: 1935022 - DNA, 25 bp, Homo sapien
gagtcatcctggtcaatcagaaaac

SEQ ID NO: 1935023 - DNA, 25 bp, Homo sapien
cagattcccttgaagagtcatcctg

SEQ ID NO: 1935024 - DNA, 25 bp, Homo sapien
aactatagagctggagggaccgcca

SEQ ID NO: 1935025 - DNA, 25 bp, Homo sapien
aacgctgctctttaaccaaaccaga

SEQ ID NO: 1935026 - DNA, 25 bp, Homo sapien
tccacctgttatcgaatgtcctctc

SEQ ID NO: 1935027 - DNA, 25 bp, Homo sapien
tattttcaaccattgaaattccacc

SEQ ID NO: 1935028 - DNA, 25 bp, Homo sapien
ccattgaaattccacctgttatcga

SEQ ID NO: 1935029 - DNA, 25 bp, Homo sapien
cccagtcctctctgctagaattgaa

SEQ ID NO: 1935030 - DNA, 25 bp, Homo sapien
tatccttgtcggtcccatctgcttg

SEQ ID NO: 1935031 - DNA, 25 bp, Homo sapien
ttatccttgtcggtcccatctgctt

SEQ ID NO: 1935032 - DNA, 25 bp, Homo sapien
ccttgtcggtcccatctgcttgcct

SEQ ID NO: 1935033 - DNA, 25 bp, Homo sapien
atccttgtcggtcccatctgcttgc

SEQ ID NO: 1935034 - DNA, 25 bp, Homo sapien
gagcagcgctgtgtaggattgcttc

SEQ ID NO: 1935035 - DNA, 25 bp, Homo sapien
gtggtggaagagcacgacctctgca

SEQ ID NO: 1935036 - DNA, 25 bp, Homo sapien
agaacccaagtgaaggcagagcagc

SEQ ID NO: 1935037 - DNA, 25 bp, Homo sapien
cgctgtgtaggattgcttctctgca

SEQ ID NO: 1935038 - DNA, 25 bp, Homo sapien
tttcacaattttgcgatggcatcca

SEQ ID NO: 1935039 - DNA, 25 bp, Homo sapien
caattttgcgatggcatccattccc

SEQ ID NO: 1935040 - DNA, 25 bp, Homo sapien
tcacaattttgcgatggcatccatt

SEQ ID NO: 1935041 - DNA, 25 bp, Homo sapien
aatttcacaattttgcgatggcatc

SEQ ID NO: 1935042 - DNA, 25 bp, Homo sapien
tcatcatcatggggtgcaagaagag

SEQ ID NO: 1935043 - DNA, 25 bp, Homo sapien
gtcactactgtttggtgccacacaa

SEQ ID NO: 1935044 - DNA, 25 bp, Homo sapien
tctcctgtcactactgtttggtgcc

SEQ ID NO: 1935045 - DNA, 25 bp, Homo sapien
aagccccttcttgtgtaagcctgtc

SEQ ID NO: 1935046 - DNA, 25 bp, Homo sapien
cttgggtttgaaagattgaatccca

SEQ ID NO: 1935047 - DNA, 25 bp, Homo sapien
ttcccttgtgagtatgaatttgttc

SEQ ID NO: 1935048 - DNA, 25 bp, Homo sapien
gagtatgaatttgttcttgccttgg

SEQ ID NO: 1935049 - DNA, 25 bp, Homo sapien
ttcttgccttgggtttgaaagattg

SEQ ID NO: 1935050 - DNA, 25 bp, Homo sapien
taatccattttgaactgatctttgg

SEQ ID NO: 1935051 - DNA, 25 bp, Homo sapien
gatacccttggtgaagatcagttga

SEQ ID NO: 1935052 - DNA, 25 bp, Homo sapien
tcttctttctcgagactgcttttgc

SEQ ID NO: 1935053 - DNA, 25 bp, Homo sapien
catttgttaaagagacgaccctctc

SEQ ID NO: 1935054 - DNA, 25 bp, Homo sapien
tgaagagttgctagaatcctctcct

SEQ ID NO: 1935055 - DNA, 25 bp, Homo sapien
cactcacaagccaggcatttcctga

SEQ ID NO: 1935056 - DNA, 25 bp, Homo sapien
caggattggtttcccaatgacatca

SEQ ID NO: 1935057 - DNA, 25 bp, Homo sapien
gattcgggatcttctaggccatctt

SEQ ID NO: 1935058 - DNA, 25 bp, Homo sapien
ctaagagacaagcattcagatgatc

SEQ ID NO: 1935059 - DNA, 25 bp, Homo sapien
gacaagcattcagatgatctacccc

SEQ ID NO: 1935060 - DNA, 25 bp, Homo sapien
taagagacaagcattcagatgatct

SEQ ID NO: 1935061 - DNA, 25 bp, Homo sapien
gagacaagcattcagatgatctacc

SEQ ID NO: 1935062 - DNA, 25 bp, Homo sapien
gaaatattttatgacacggctctgt

SEQ ID NO: 1935063 - DNA, 25 bp, Homo sapien
tgaaatattttatgacacggctctg

SEQ ID NO: 1935064 - DNA, 25 bp, Homo sapien
tctgtggatcctgaaatgctcggtc

SEQ ID NO: 1935065 - DNA, 25 bp, Homo sapien
aaatattttatgacacggctctgtg

SEQ ID NO: 1935066 - DNA, 25 bp, Homo sapien
tcagatggtgaagcggccgtgcatt

SEQ ID NO: 1935067 - DNA, 25 bp, Homo sapien
tagcgtctgaggcatctccctggtt

SEQ ID NO: 1935068 - DNA, 25 bp, Homo sapien
tactttcatcagatggtgaagcggc

SEQ ID NO: 1935069 - DNA, 25 bp, Homo sapien
tctgaggcatctccctggttatact

SEQ ID NO: 1935070 - DNA, 25 bp, Homo sapien
aatcctggaacacactcaacattgt

SEQ ID NO: 1935071 - DNA, 25 bp, Homo sapien
cttcccatgaagagagcagtcacgt

SEQ ID NO: 1935072 - DNA, 25 bp, Homo sapien
gcagcataagaaaatgtgcccggga

SEQ ID NO: 1935073 - DNA, 25 bp, Homo sapien
aaatgtgcccgggaaaccagcacag

SEQ ID NO: 1935074 - DNA, 25 bp, Homo sapien
cagagctacattgtcctgtttctgt

SEQ ID NO: 1935075 - DNA, 25 bp, Homo sapien
gattgccagacacaagatatttatc

SEQ ID NO: 1935076 - DNA, 25 bp, Homo sapien
gtctctactgtctgtgtgactcctg

SEQ ID NO: 1935077 - DNA, 25 bp, Homo sapien
gagacagactcaggcgccctggcac

SEQ ID NO: 1935078 - DNA, 25 bp, Homo sapien
gccatctccaaacccgtctggtgga

SEQ ID NO: 1935079 - DNA, 25 bp, Homo sapien
gtgttgtaacaagccatctccaaac

SEQ ID NO: 1935080 - DNA, 25 bp, Homo sapien
cgtgttgtaacaagccatctccaaa

SEQ ID NO: 1935081 - DNA, 25 bp, Homo sapien
tgacgtgttgtaacaagccatctcc

SEQ ID NO: 1935082 - DNA, 25 bp, Homo sapien
tttatcttgtgatacggcatcctga

SEQ ID NO: 1935083 - DNA, 25 bp, Homo sapien
ttcattggccagtcttaatttctcc

SEQ ID NO: 1935084 - DNA, 25 bp, Homo sapien
tagtaataatagtatgattgcattg

SEQ ID NO: 1935085 - DNA, 25 bp, Homo sapien
tttagctgccttaattctgctccat

SEQ ID NO: 1935086 - DNA, 25 bp, Homo sapien
tacaatgtctggagctccgttcagg

SEQ ID NO: 1935087 - DNA, 25 bp, Homo sapien
ggctgcagtaagcatatgcatccat

SEQ ID NO: 1935088 - DNA, 25 bp, Homo sapien
cagtaagcatatgcatccatgtgtc

SEQ ID NO: 1935089 - DNA, 25 bp, Homo sapien
cccagtaatagggattgctcggttg

SEQ ID NO: 1935090 - DNA, 25 bp, Homo sapien
tctatcattgacaggcacttggatt

SEQ ID NO: 1935091 - DNA, 25 bp, Homo sapien
gagacctgaggaatggttcttccaa

SEQ ID NO: 1935092 - DNA, 25 bp, Homo sapien
ggcagtgaacttccattgatcatgg

SEQ ID NO: 1935093 - DNA, 25 bp, Homo sapien
accagtctgtgtgggatatgtgaga

SEQ ID NO: 1935094 - DNA, 25 bp, Homo sapien
tccattgatcatggacttcctgagt

SEQ ID NO: 1935095 - DNA, 25 bp, Homo sapien
cgggtatctaaggatccgcaggctg

SEQ ID NO: 1935096 - DNA, 25 bp, Homo sapien
attctgaaggtcttttcctttgcgg

SEQ ID NO: 1935097 - DNA, 25 bp, Homo sapien
tttcctttgcgggtatctaaggatc

SEQ ID NO: 1935098 - DNA, 25 bp, Homo sapien
tttgcgggtatctaaggatccgcag

SEQ ID NO: 1935099 - DNA, 25 bp, Homo sapien
ctggcttgcatggtagattctcatg

SEQ ID NO: 1935100 - DNA, 25 bp, Homo sapien
tggcttgcatggtagattctcatgg

SEQ ID NO: 1935101 - DNA, 25 bp, Homo sapien
tctcatggtagatttaggctcctcc

SEQ ID NO: 1935102 - DNA, 25 bp, Homo sapien
tcaggaatgttggagaagcagtatc

SEQ ID NO: 1935103 - DNA, 25 bp, Homo sapien
ggaccatgaggctagccggagcttg

SEQ ID NO: 1935104 - DNA, 25 bp, Homo sapien
ctgctggtgatctccaacccacagt

SEQ ID NO: 1935105 - DNA, 25 bp, Homo sapien
tcttttgtgtggtgcttcgtactgc

SEQ ID NO: 1935106 - DNA, 25 bp, Homo sapien
tagatggagacatgtgcagggcttt

SEQ ID NO: 1935107 - DNA, 25 bp, Homo sapien
aagtattttgcgaatagatggagac

SEQ ID NO: 1935108 - DNA, 25 bp, Homo sapien
gcagggcttttgaaagattcccaca

SEQ ID NO: 1935109 - DNA, 25 bp, Homo sapien
cagctcttggaaatcgatactctaa

SEQ ID NO: 1935110 - DNA, 25 bp, Homo sapien
agtgcgaccctctgtgtagccttag

SEQ ID NO: 1935111 - DNA, 25 bp, Homo sapien
gttcccatgtaaaccggctgacagg

SEQ ID NO: 1935112 - DNA, 25 bp, Homo sapien
gagtgtgacactcttcccctatgaa

SEQ ID NO: 1935113 - DNA, 25 bp, Homo sapien
ggtgacctcccctaacacagatgtt

SEQ ID NO: 1935114 - DNA, 25 bp, Homo sapien
aactaaggagattgctaagcccagg

SEQ ID NO: 1935115 - DNA, 25 bp, Homo sapien
tgtggcaacctagtgtccaactgag

SEQ ID NO: 1935116 - DNA, 25 bp, Homo sapien
gataaccaagctctacacagtccca

SEQ ID NO: 1935117 - DNA, 25 bp, Homo sapien
cagtcccatgtgctttgtcacctta

SEQ ID NO: 1935118 - DNA, 25 bp, Homo sapien
tagttacgcaacagtaaatcccatg

SEQ ID NO: 1935119 - DNA, 25 bp, Homo sapien
tactgtaacttaggacaggcatgct

SEQ ID NO: 1935120 - DNA, 25 bp, Homo sapien
catcatttagatccaagtgtccaaa

SEQ ID NO: 1935121 - DNA, 25 bp, Homo sapien
ggcatgctataaactggattacctc

SEQ ID NO: 1935122 - DNA, 25 bp, Homo sapien
catagtcattaggaccctcagggaa

SEQ ID NO: 1935123 - DNA, 25 bp, Homo sapien
tgtttcatcaacagccgaggagagg

SEQ ID NO: 1935124 - DNA, 25 bp, Homo sapien
cctggctcaggtctactaaagtgtc

SEQ ID NO: 1935125 - DNA, 25 bp, Homo sapien
tgactgcaaagcgtgaggacctcgc

SEQ ID NO: 1935126 - DNA, 25 bp, Homo sapien
cctgaaagtgtgagtgaaacggtgc

SEQ ID NO: 1935127 - DNA, 25 bp, Homo sapien
agctggaaacatggattctcctgaa

SEQ ID NO: 1935128 - DNA, 25 bp, Homo sapien
tgagtgaaacggtgcaatcattaac

SEQ ID NO: 1935129 - DNA, 25 bp, Homo sapien
ggtgcaatcattaacactatcgtta

SEQ ID NO: 1935130 - DNA, 25 bp, Homo sapien
acgtctccttcatcaaacaccagtt

SEQ ID NO: 1935131 - DNA, 25 bp, Homo sapien
gggaattttacggtatgagaatcat

SEQ ID NO: 1935132 - DNA, 25 bp, Homo sapien
tgcacatagacaaaatcccccttgt

SEQ ID NO: 1935133 - DNA, 25 bp, Homo sapien
gggaggaagacctgtaatgcctaca

SEQ ID NO: 1935134 - DNA, 25 bp, Homo sapien
atctcttcaacagtatggcagtagg

SEQ ID NO: 1935135 - DNA, 25 bp, Homo sapien
tcttcaacagtatggcagtagggac

SEQ ID NO: 1935136 - DNA, 25 bp, Homo sapien
gcatctcttcaacagtatggcagta

SEQ ID NO: 1935137 - DNA, 25 bp, Homo sapien
tctcttcaacagtatggcagtaggg

SEQ ID NO: 1935138 - DNA, 25 bp, Homo sapien
agtcctgtcctgaaggtgctgacat

SEQ ID NO: 1935139 - DNA, 25 bp, Homo sapien
tgacccatttgtgctcagtcactgg

SEQ ID NO: 1935140 - DNA, 25 bp, Homo sapien
acagtcctgtcctgaaggtgctgac

SEQ ID NO: 1935141 - DNA, 25 bp, Homo sapien
agaaggagaagtgacccatttgtgc

SEQ ID NO: 1935142 - DNA, 25 bp, Homo sapien
ttggtaccagacttgtgaaaagatg

SEQ ID NO: 1935143 - DNA, 25 bp, Homo sapien
tcccaattgctatatatgtttctgc

SEQ ID NO: 1935144 - DNA, 25 bp, Homo sapien
taatttgttagcttggtaaacaaca

SEQ ID NO: 1935145 - DNA, 25 bp, Homo sapien
catcaagatgaagttggtaccagac

SEQ ID NO: 1935146 - DNA, 25 bp, Homo sapien
tggtgaattatctcgacagggtgaa

SEQ ID NO: 1935147 - DNA, 25 bp, Homo sapien
tcttggtgaaacatctctttgggac

SEQ ID NO: 1935148 - DNA, 25 bp, Homo sapien
tgggtgacagatctctcctaggtga

SEQ ID NO: 1935149 - DNA, 25 bp, Homo sapien
gctgatcaacgaagaatgtcccagg

SEQ ID NO: 1935150 - DNA, 25 bp, Homo sapien
tgattcctcagcatcggagaactga

SEQ ID NO: 1935151 - DNA, 25 bp, Homo sapien
gggtacggcgccaacattcacaggc

SEQ ID NO: 1935152 - DNA, 25 bp, Homo sapien
tcacaggcaaggaggagaatctagg

SEQ ID NO: 1935153 - DNA, 25 bp, Homo sapien
taaatctccctggtcgtcaaagtca

SEQ ID NO: 1935154 - DNA, 25 bp, Homo sapien
ctgtatcatccaccgatgtcattga

SEQ ID NO: 1935155 - DNA, 25 bp, Homo sapien
gatttcatatgcttcgttaggtttc

SEQ ID NO: 1935156 - DNA, 25 bp, Homo sapien
caccgatgtcattgagactcccaat

SEQ ID NO: 1935157 - DNA, 25 bp, Homo sapien
tttagatttcatatgcttcgttagg

SEQ ID NO: 1935158 - DNA, 25 bp, Homo sapien
tctaagtagccatagagaagtattt

SEQ ID NO: 1935159 - DNA, 25 bp, Homo sapien
atctaagtagccatagagaagtatt

SEQ ID NO: 1935160 - DNA, 25 bp, Homo sapien
gagcatgcttggcttcttacagcga

SEQ ID NO: 1935161 - DNA, 25 bp, Homo sapien
ggccacgtcctctgacatatacata

SEQ ID NO: 1935162 - DNA, 25 bp, Homo sapien
ttgcatacataaggccgaacatcag

SEQ ID NO: 1935163 - DNA, 25 bp, Homo sapien
gaaggcaaagttacataacttgcat

SEQ ID NO: 1935164 - DNA, 25 bp, Homo sapien
ataaaaaggacgcatcaggtttcat

SEQ ID NO: 1935165 - DNA, 25 bp, Homo sapien
gattggctcagtttgtttggatcca

SEQ ID NO: 1935166 - DNA, 25 bp, Homo sapien
aatattttaattcggattggctcag

SEQ ID NO: 1935167 - DNA, 25 bp, Homo sapien
gatccaatatctttatctccatgaa

SEQ ID NO: 1935168 - DNA, 25 bp, Homo sapien
tctgctcagcaatcaaatccacaat

SEQ ID NO: 1935169 - DNA, 25 bp, Homo sapien
gtagtctgctcagcaatcaaatcca

SEQ ID NO: 1935170 - DNA, 25 bp, Homo sapien
agtctgctcagcaatcaaatccaca

SEQ ID NO: 1935171 - DNA, 25 bp, Homo sapien
atcaaatccacaatacaaagttctt

SEQ ID NO: 1935172 - DNA, 25 bp, Homo sapien
gaatcctatcccttgcatggctgcg

SEQ ID NO: 1935173 - DNA, 25 bp, Homo sapien
tcttgaagaacctgctcagagggcg

SEQ ID NO: 1935174 - DNA, 25 bp, Homo sapien
tgtgttgccgaactagcctgggctg

SEQ ID NO: 1935175 - DNA, 25 bp, Homo sapien
gaagaactctgtgggctcatgctca

SEQ ID NO: 1935176 - DNA, 25 bp, Homo sapien
taatctggggttgtctggactcact

SEQ ID NO: 1935177 - DNA, 25 bp, Homo sapien
gatttcagcatgctcgtttgactgg

SEQ ID NO: 1935178 - DNA, 25 bp, Homo sapien
cactgttgaacttagtggatttcag

SEQ ID NO: 1935179 - DNA, 25 bp, Homo sapien
gtttgactggggtcgacatctccct

SEQ ID NO: 1935180 - DNA, 25 bp, Homo sapien
agctgtgaaacaggatcttcaaaca

SEQ ID NO: 1935181 - DNA, 25 bp, Homo sapien
ggatcttcaaacatcttgacatcta

SEQ ID NO: 1935182 - DNA, 25 bp, Homo sapien
gatcttcaaacatcttgacatctaa

SEQ ID NO: 1935183 - DNA, 25 bp, Homo sapien
cttgggatcagctgtgaaacaggat

SEQ ID NO: 1935184 - DNA, 25 bp, Homo sapien
tttctaggataaccaccactgtggc

SEQ ID NO: 1935185 - DNA, 25 bp, Homo sapien
gtatacatggatatggccgctcccc

SEQ ID NO: 1935186 - DNA, 25 bp, Homo sapien
gacttgctgcaccacttcactaggg

SEQ ID NO: 1935187 - DNA, 25 bp, Homo sapien
tcagtacactaggtttggcacacgc

SEQ ID NO: 1935188 - DNA, 25 bp, Homo sapien
gaggtagctttttgtcctagagctg

SEQ ID NO: 1935189 - DNA, 25 bp, Homo sapien
tccatctacctgatgctttatcagt

SEQ ID NO: 1935190 - DNA, 25 bp, Homo sapien
ttcctgtctccatctacctgatgct

SEQ ID NO: 1935191 - DNA, 25 bp, Homo sapien
gaccttgaggtagctttttgtccta

SEQ ID NO: 1935192 - DNA, 25 bp, Homo sapien
cttcttaaagcttggttgcttccat

SEQ ID NO: 1935193 - DNA, 25 bp, Homo sapien
gcttcttaaagcttggttgcttcca

SEQ ID NO: 1935194 - DNA, 25 bp, Homo sapien
gcaaacttgctgattgctccttctc

SEQ ID NO: 1935195 - DNA, 25 bp, Homo sapien
caaacttgctgattgctccttctct

SEQ ID NO: 1935196 - DNA, 25 bp, Homo sapien
ctgcaaacttgctgattgctccttc

SEQ ID NO: 1935197 - DNA, 25 bp, Homo sapien
aaacttgctgattgctccttctctt

SEQ ID NO: 1935198 - DNA, 25 bp, Homo sapien
tggaccagggctataacacagttct

SEQ ID NO: 1935199 - DNA, 25 bp, Homo sapien
acgtccatccaaaagctaagtgcaa

SEQ ID NO: 1935200 - DNA, 25 bp, Homo sapien
tagctagtaatgtccttggaccagg

SEQ ID NO: 1935201 - DNA, 25 bp, Homo sapien
acacgcacaccacagtcgatgggca

SEQ ID NO: 1935202 - DNA, 25 bp, Homo sapien
gaaattttgcccatcaactagagca

SEQ ID NO: 1935203 - DNA, 25 bp, Homo sapien
agttcaattgccagtttcactaaga

SEQ ID NO: 1935204 - DNA, 25 bp, Homo sapien
tcaactaggatgaaattgggatgat

SEQ ID NO: 1935205 - DNA, 25 bp, Homo sapien
taaagatttcttatggcatttgaaa

SEQ ID NO: 1935206 - DNA, 25 bp, Homo sapien
aacagtttagagttcttatgggcat

SEQ ID NO: 1935207 - DNA, 25 bp, Homo sapien
tgaacagtttagagttcttatgggc

SEQ ID NO: 1935208 - DNA, 25 bp, Homo sapien
ctgaacagtttagagttcttatggg

SEQ ID NO: 1935209 - DNA, 25 bp, Homo sapien
gaacagtttagagttcttatgggca

SEQ ID NO: 1935210 - DNA, 25 bp, Homo sapien
caaccgtctttgatttccaagatgc

SEQ ID NO: 1935211 - DNA, 25 bp, Homo sapien
atcacaaccgtctttgatttccaag

SEQ ID NO: 1935212 - DNA, 25 bp, Homo sapien
aaaactgcatcacaaccgtctttga

SEQ ID NO: 1935213 - DNA, 25 bp, Homo sapien
aaaaactgcatcacaaccgtctttg

SEQ ID NO: 1935214 - DNA, 25 bp, Homo sapien
cataagattctggtgctgcaaaggg

SEQ ID NO: 1935215 - DNA, 25 bp, Homo sapien
ggcactcaaagtgacacctgacaag

SEQ ID NO: 1935216 - DNA, 25 bp, Homo sapien
attataagcaagtaggcccactcgg

SEQ ID NO: 1935217 - DNA, 25 bp, Homo sapien
caaatcaaccgtttgctggcactca

SEQ ID NO: 1935218 - DNA, 25 bp, Homo sapien
ttagcttcataagaacttaacaggc

SEQ ID NO: 1935219 - DNA, 25 bp, Homo sapien
aatcaacagtttacatagtatgcta

SEQ ID NO: 1935220 - DNA, 25 bp, Homo sapien
gaaatagtgctaatgaatcttgata

SEQ ID NO: 1935221 - DNA, 25 bp, Homo sapien
gagaatgtactatgacaactcatgc

SEQ ID NO: 1935222 - DNA, 25 bp, Homo sapien
aataactacttctagccaagccagc

SEQ ID NO: 1935223 - DNA, 25 bp, Homo sapien
tatgtttactattcggttgctgcag

SEQ ID NO: 1935224 - DNA, 25 bp, Homo sapien
agcataaagaaaggccgcagttaac

SEQ ID NO: 1935225 - DNA, 25 bp, Homo sapien
tttggagagacagggataaaagcaa

SEQ ID NO: 1935226 - DNA, 25 bp, Homo sapien
tctttgagggaagatcctcctgcat

SEQ ID NO: 1935227 - DNA, 25 bp, Homo sapien
cttgcctgaagaaaatccatctttg

SEQ ID NO: 1935228 - DNA, 25 bp, Homo sapien
tcctcctgcatcagtggaaataata

SEQ ID NO: 1935229 - DNA, 25 bp, Homo sapien
ctgaagaaaatccatctttgaggga

SEQ ID NO: 1935230 - DNA, 25 bp, Homo sapien
tcaagtggaagccatgatttgcaca

SEQ ID NO: 1935231 - DNA, 25 bp, Homo sapien
aaatctggactcacactgtcccagg

SEQ ID NO: 1935232 - DNA, 25 bp, Homo sapien
gaacaaccaggaaagactagacaga

SEQ ID NO: 1935233 - DNA, 25 bp, Homo sapien
gacatgaggttagcacacagcaaat

SEQ ID NO: 1935234 - DNA, 25 bp, Homo sapien
gaaagctattatatcccatttcttt

SEQ ID NO: 1935235 - DNA, 25 bp, Homo sapien
aagaactttagttggcagacacaga

SEQ ID NO: 1935236 - DNA, 25 bp, Homo sapien
ttccatccctttcgggcaaactctg

SEQ ID NO: 1935237 - DNA, 25 bp, Homo sapien
ccctttcgggcaaactctgcaaatg

SEQ ID NO: 1935238 - DNA, 25 bp, Homo sapien
caaatcctgtgcagtgtactgaagc

SEQ ID NO: 1935239 - DNA, 25 bp, Homo sapien
cacaaatcctgtgcagtgtactgaa

SEQ ID NO: 1935240 - DNA, 25 bp, Homo sapien
tcctgtgcagtgtactgaagcgggt

SEQ ID NO: 1935241 - DNA, 25 bp, Homo sapien
acacacaaatcctgtgcagtgtact

SEQ ID NO: 1935242 - DNA, 25 bp, Homo sapien
gaactaagtgaatctccatatgtga

SEQ ID NO: 1935243 - DNA, 25 bp, Homo sapien
taaaatggacacaataattcctgcc

SEQ ID NO: 1935244 - DNA, 25 bp, Homo sapien
catcacctctcagttagcagaccaa

SEQ ID NO: 1935245 - DNA, 25 bp, Homo sapien
tataagtcacttccacttagtggga

SEQ ID NO: 1935246 - DNA, 25 bp, Homo sapien
ttgcttcaccacacaagctttcaaa

SEQ ID NO: 1935247 - DNA, 25 bp, Homo sapien
tggaatttgcttcaccacacaagct

SEQ ID NO: 1935248 - DNA, 25 bp, Homo sapien
tcaccacacaagctttcaaaataga

SEQ ID NO: 1935249 - DNA, 25 bp, Homo sapien
tttagtggaatttgcttcaccacac

SEQ ID NO: 1935250 - DNA, 25 bp, Homo sapien
agaacactcgccctgcctcacccat

SEQ ID NO: 1935251 - DNA, 25 bp, Homo sapien
ccttcaggcctcaattctggcacca

SEQ ID NO: 1935252 - DNA, 25 bp, Homo sapien
tgaagcctgagaacactcgccctgc

SEQ ID NO: 1935253 - DNA, 25 bp, Homo sapien
tcaggcctcaattctggcaccatct

SEQ ID NO: 1935254 - DNA, 25 bp, Homo sapien
gaaaaatccactctagactaaatgc

SEQ ID NO: 1935255 - DNA, 25 bp, Homo sapien
ggtcttgccttgatagtggagaaaa

SEQ ID NO: 1935256 - DNA, 25 bp, Homo sapien
gaaaagtgtgacctataaagaggag

SEQ ID NO: 1935257 - DNA, 25 bp, Homo sapien
gctgccctggtcctacctaacaaag

SEQ ID NO: 1935258 - DNA, 25 bp, Homo sapien
cctgtggggaacatacatcatacca

SEQ ID NO: 1935259 - DNA, 25 bp, Homo sapien
tttcctgtggggaacatacatcata

SEQ ID NO: 1935260 - DNA, 25 bp, Homo sapien
cacagttcagctgccgttttccatt

SEQ ID NO: 1935261 - DNA, 25 bp, Homo sapien
acacagttcagctgccgttttccat

SEQ ID NO: 1935262 - DNA, 25 bp, Homo sapien
aatccaaatctagcattttgcagca

SEQ ID NO: 1935263 - DNA, 25 bp, Homo sapien
ggagccagagtcaatccaaatctag

SEQ ID NO: 1935264 - DNA, 25 bp, Homo sapien
tgctgacaagaaggcttcaaaagca

SEQ ID NO: 1935265 - DNA, 25 bp, Homo sapien
caagaaggcttcaaaagcaaagatc

SEQ ID NO: 1935266 - DNA, 25 bp, Homo sapien
ccttgtgatgccatgggacatagag

SEQ ID NO: 1935267 - DNA, 25 bp, Homo sapien
cttgtgatgccatgggacatagagg

SEQ ID NO: 1935268 - DNA, 25 bp, Homo sapien
gccttgtgatgccatgggacataga

SEQ ID NO: 1935269 - DNA, 25 bp, Homo sapien
atgccttgtgatgccatgggacata

SEQ ID NO: 1935270 - DNA, 25 bp, Homo sapien
gtctgacagccagtcacaacaccat

SEQ ID NO: 1935271 - DNA, 25 bp, Homo sapien
gcagatggcgccctcagtaagaatc

SEQ ID NO: 1935272 - DNA, 25 bp, Homo sapien
gccctcagtaagaatcctaatgccc

SEQ ID NO: 1935273 - DNA, 25 bp, Homo sapien
gcgtcctcaggaaggaacccctctg

SEQ ID NO: 1935274 - DNA, 25 bp, Homo sapien
tgcctttgtggggtttaggagcaat

SEQ ID NO: 1935275 - DNA, 25 bp, Homo sapien
tgtggggtttaggagcaattgcttc

SEQ ID NO: 1935276 - DNA, 25 bp, Homo sapien
tctactactcctgttaatttctctc

SEQ ID NO: 1935277 - DNA, 25 bp, Homo sapien
ttcttcttccattctactactcctg

SEQ ID NO: 1935278 - DNA, 25 bp, Homo sapien
ggaaccggaactccagaggccattc

SEQ ID NO: 1935279 - DNA, 25 bp, Homo sapien
tattaaccagactccgacgtcagta

SEQ ID NO: 1935280 - DNA, 25 bp, Homo sapien
tgcaggcatatgacaggaaaacttc

SEQ ID NO: 1935281 - DNA, 25 bp, Homo sapien
gacgtcagtaaagtgcattaaccca

SEQ ID NO: 1935282 - DNA, 25 bp, Homo sapien
gtaaaagagcattccaaccaaatca

SEQ ID NO: 1935283 - DNA, 25 bp, Homo sapien
caagtagatctgattactatggtct

SEQ ID NO: 1935284 - DNA, 25 bp, Homo sapien
taatttttcaagtagatctgattac

SEQ ID NO: 1935285 - DNA, 25 bp, Homo sapien
ggctgtatgttaaagcatcggtaaa

SEQ ID NO: 1935286 - DNA, 25 bp, Homo sapien
tacataaccgatatggtacatgaag

SEQ ID NO: 1935287 - DNA, 25 bp, Homo sapien
ggtacatgaagaattctagactctg

SEQ ID NO: 1935288 - DNA, 25 bp, Homo sapien
cataaccgatatggtacatgaagaa

SEQ ID NO: 1935289 - DNA, 25 bp, Homo sapien
acataaccgatatggtacatgaaga

SEQ ID NO: 1935290 - DNA, 25 bp, Homo sapien
aagctgttcaactcgccgggtcggt

SEQ ID NO: 1935291 - DNA, 25 bp, Homo sapien
caacaagctgggtgcaaactcgtct

SEQ ID NO: 1935292 - DNA, 25 bp, Homo sapien
caaatgaaggtcgatgcaatgtccc

SEQ ID NO: 1935293 - DNA, 25 bp, Homo sapien
ggctgccaggcttaaatcaaatgaa

SEQ ID NO: 1935294 - DNA, 25 bp, Homo sapien
catgctccactaagccagcagtttg

SEQ ID NO: 1935295 - DNA, 25 bp, Homo sapien
gcccagcgtgtcatccataatggca

SEQ ID NO: 1935296 - DNA, 25 bp, Homo sapien
gctccactaagccagcagtttgtca

SEQ ID NO: 1935297 - DNA, 25 bp, Homo sapien
tttgtcatagcccagcgtgtcatcc

SEQ ID NO: 1935298 - DNA, 25 bp, Homo sapien
ccaagcttgataggcgaagtctcca

SEQ ID NO: 1935299 - DNA, 25 bp, Homo sapien
gaaggaccaatctttgtgtgtgcac

SEQ ID NO: 1935300 - DNA, 25 bp, Homo sapien
ggtaagttcacccacaagagcaact

SEQ ID NO: 1935301 - DNA, 25 bp, Homo sapien
catgagaaatgctgactgtgaggat

SEQ ID NO: 1935302 - DNA, 25 bp, Homo sapien
atgaattcaaagcctatttctcgcc

SEQ ID NO: 1935303 - DNA, 25 bp, Homo sapien
gccggcagtggtcaaaagctgtcca

SEQ ID NO: 1935304 - DNA, 25 bp, Homo sapien
taaccccatgtgaagtcagtggcaa

SEQ ID NO: 1935305 - DNA, 25 bp, Homo sapien
agttccatatgagacaagcaggcac

SEQ ID NO: 1935306 - DNA, 25 bp, Homo sapien
tcagtggcaaccgtctccaagttcc

SEQ ID NO: 1935307 - DNA, 25 bp, Homo sapien
tatctcaaactcagatccccacttg

SEQ ID NO: 1935308 - DNA, 25 bp, Homo sapien
tctcctctatctcaaactcagatcc

SEQ ID NO: 1935309 - DNA, 25 bp, Homo sapien
tcaaactcagatccccacttgctaa

SEQ ID NO: 1935310 - DNA, 25 bp, Homo sapien
tctatctcaaactcagatccccact

SEQ ID NO: 1935311 - DNA, 25 bp, Homo sapien
ctttgggtccctgattctcaaccat

SEQ ID NO: 1935312 - DNA, 25 bp, Homo sapien
gactttgggtccctgattctcaacc

SEQ ID NO: 1935313 - DNA, 25 bp, Homo sapien
ttgactttgggtccctgattctcaa

SEQ ID NO: 1935314 - DNA, 25 bp, Homo sapien
gttgactttgggtccctgattctca

SEQ ID NO: 1935315 - DNA, 25 bp, Homo sapien
ccaggccatctgacttcagctgtct

SEQ ID NO: 1935316 - DNA, 25 bp, Homo sapien
catctgacttcagctgtctgagcag

SEQ ID NO: 1935317 - DNA, 25 bp, Homo sapien
aggccatctgacttcagctgtctga

SEQ ID NO: 1935318 - DNA, 25 bp, Homo sapien
gccatctgacttcagctgtctgagc

SEQ ID NO: 1935319 - DNA, 25 bp, Homo sapien
tctgagatcctagtccaaacctgtc

SEQ ID NO: 1935320 - DNA, 25 bp, Homo sapien
ggcattcggtgtcctctctttgaga

SEQ ID NO: 1935321 - DNA, 25 bp, Homo sapien
aaagctgccctacacctctgagatc

SEQ ID NO: 1935322 - DNA, 25 bp, Homo sapien
tccatatccaagagaaaggtttgct

SEQ ID NO: 1935323 - DNA, 25 bp, Homo sapien
gccccttactgcttgtggacaggca

SEQ ID NO: 1935324 - DNA, 25 bp, Homo sapien
cactatgactagcaacaatggtgct

SEQ ID NO: 1935325 - DNA, 25 bp, Homo sapien
caatgctgatactacaatgctcagg

SEQ ID NO: 1935326 - DNA, 25 bp, Homo sapien
cccacaagacgggtggagaaccaat

SEQ ID NO: 1935327 - DNA, 25 bp, Homo sapien
tccattcaagttgggatgaagacca

SEQ ID NO: 1935328 - DNA, 25 bp, Homo sapien
cagcagtgttcctttacgcctttga

SEQ ID NO: 1935329 - DNA, 25 bp, Homo sapien
gggctcaagacatccgtttctcaga

SEQ ID NO: 1935330 - DNA, 25 bp, Homo sapien
gcctttgattagaaccatgatccca

SEQ ID NO: 1935331 - DNA, 25 bp, Homo sapien
caaacacaggttccagtaatttaga

SEQ ID NO: 1935332 - DNA, 25 bp, Homo sapien
tgcagctcacatcaggaaccgtcta

SEQ ID NO: 1935333 - DNA, 25 bp, Homo sapien
aaaagccatgtaaccaagtctgaag

SEQ ID NO: 1935334 - DNA, 25 bp, Homo sapien
tacagacctttgaggcaagtcacct

SEQ ID NO: 1935335 - DNA, 25 bp, Homo sapien
ggtatacaattagcactccccaagc

SEQ ID NO: 1935336 - DNA, 25 bp, Homo sapien
caggttcctggtgctattttcaaat

SEQ ID NO: 1935337 - DNA, 25 bp, Homo sapien
caaatactgcctaagctcagtgaag

SEQ ID NO: 1935338 - DNA, 25 bp, Homo sapien
aaattcatgctctctggtctatacc

SEQ ID NO: 1935339 - DNA, 25 bp, Homo sapien
ctacagccagtactttcccaaatca

SEQ ID NO: 1935340 - DNA, 25 bp, Homo sapien
ctctacagccagtactttcccaaat

SEQ ID NO: 1935341 - DNA, 25 bp, Homo sapien
ctatttccatgacacactaaacgac

SEQ ID NO: 1935342 - DNA, 25 bp, Homo sapien
aaacgactgtgttgttcctctacag

SEQ ID NO: 1935343 - DNA, 25 bp, Homo sapien
tctccagaaccaaaagtgtgactag

SEQ ID NO: 1935344 - DNA, 25 bp, Homo sapien
gcagtgtccccacatgaattcaagt

SEQ ID NO: 1935345 - DNA, 25 bp, Homo sapien
tacagcccctgtaactgagacagtc

SEQ ID NO: 1935346 - DNA, 25 bp, Homo sapien
tatcatcacctcgtacctttcgggc

SEQ ID NO: 1935347 - DNA, 25 bp, Homo sapien
aaagtcactatccttgagattgctg

SEQ ID NO: 1935348 - DNA, 25 bp, Homo sapien
tcactatccttgagattgctggctt

SEQ ID NO: 1935349 - DNA, 25 bp, Homo sapien
agtcactatccttgagattgctggc

SEQ ID NO: 1935350 - DNA, 25 bp, Homo sapien
cactatccttgagattgctggcttt

SEQ ID NO: 1935351 - DNA, 25 bp, Homo sapien
tgagtctcttaagtaggcccaaggc

SEQ ID NO: 1935352 - DNA, 25 bp, Homo sapien
tgtgaacacccaagttgagtctctt

SEQ ID NO: 1935353 - DNA, 25 bp, Homo sapien
taataataacccatagctaccaggt

SEQ ID NO: 1935354 - DNA, 25 bp, Homo sapien
caaggccccacgagtaatcactggt

SEQ ID NO: 1935355 - DNA, 25 bp, Homo sapien
cccgtgggctacctgtttatccata

SEQ ID NO: 1935356 - DNA, 25 bp, Homo sapien
gacttcaaatcgaggttcttaatcc

SEQ ID NO: 1935357 - DNA, 25 bp, Homo sapien
taagtgataaatatggttggccttt

SEQ ID NO: 1935358 - DNA, 25 bp, Homo sapien
gaatttgccctattctgtctgactt

SEQ ID NO: 1935359 - DNA, 25 bp, Homo sapien
tggaatcctgcttcaccaatgacta

SEQ ID NO: 1935360 - DNA, 25 bp, Homo sapien
ttggaatcctgcttcaccaatgact

SEQ ID NO: 1935361 - DNA, 25 bp, Homo sapien
gaactcaagtgaatctgccacagtg

SEQ ID NO: 1935362 - DNA, 25 bp, Homo sapien
aagacaggactagatcttgcgtccc

SEQ ID NO: 1935363 - DNA, 25 bp, Homo sapien
ttacacaggcatggcaacgcatgta

SEQ ID NO: 1935364 - DNA, 25 bp, Homo sapien
tgtacacatatgcacgctgtcagat

SEQ ID NO: 1935365 - DNA, 25 bp, Homo sapien
cacaagatctggagctacgtacctt

SEQ ID NO: 1935366 - DNA, 25 bp, Homo sapien
cagtggcccattccttatacatgta

SEQ ID NO: 1935367 - DNA, 25 bp, Homo sapien
taaccacgaaatgaatcagtggccc

SEQ ID NO: 1935368 - DNA, 25 bp, Homo sapien
aaagcagtattccagttaaccacga

SEQ ID NO: 1935369 - DNA, 25 bp, Homo sapien
gaagagacaggcgttatgcacaagg

SEQ ID NO: 1935370 - DNA, 25 bp, Homo sapien
gatgctggctatttttgttaactgg

SEQ ID NO: 1935371 - DNA, 25 bp, Homo sapien
tgttaactggagcaccaaataagta

SEQ ID NO: 1935372 - DNA, 25 bp, Homo sapien
caaaacaattgatgtggaagcactg

SEQ ID NO: 1935373 - DNA, 25 bp, Homo sapien
gttggggtcgcattttctcatgtcc

SEQ ID NO: 1935374 - DNA, 25 bp, Homo sapien
cgggaggcacatgcgtataaagcgc

SEQ ID NO: 1935375 - DNA, 25 bp, Homo sapien
aaagcgcaccgatctgtgataacag

SEQ ID NO: 1935376 - DNA, 25 bp, Homo sapien
actggatgtgttatgtaagagggac

SEQ ID NO: 1935377 - DNA, 25 bp, Homo sapien
tcctgtggctgcaccacgtcatgga

SEQ ID NO: 1935378 - DNA, 25 bp, Homo sapien
tctgctttgatagcagccggcagtg

SEQ ID NO: 1935379 - DNA, 25 bp, Homo sapien
tcatggaacattcccggaacgggcc

SEQ ID NO: 1935380 - DNA, 25 bp, Homo sapien
taccagaggcacagaatggaaaggc

SEQ ID NO: 1935381 - DNA, 25 bp, Homo sapien
ggaggtaaagggagtcactgaaatg

SEQ ID NO: 1935382 - DNA, 25 bp, Homo sapien
cagcgccttcgctgcgctcgctcgg

SEQ ID NO: 1935383 - DNA, 25 bp, Homo sapien
tgcagccggtgcacccgcaaggcga

SEQ ID NO: 1935384 - DNA, 25 bp, Homo sapien
gggcgcctccgcctgaaccttccat

SEQ ID NO: 1935385 - DNA, 25 bp, Homo sapien
tcgcggtggccggtccgccctccgc

SEQ ID NO: 1935386 - DNA, 25 bp, Homo sapien
gattcccgccgctccgctctcgcgg

SEQ ID NO: 1935387 - DNA, 25 bp, Homo sapien
cccgccgctccgctctcgcggtggc

SEQ ID NO: 1935388 - DNA, 25 bp, Homo sapien
ccgctccgctctcgcggtggccggt

SEQ ID NO: 1935389 - DNA, 25 bp, Homo sapien
ccagcaccccagacgcgagacgtgg

SEQ ID NO: 1935390 - DNA, 25 bp, Homo sapien
caccccagacgcgagacgtggagga

SEQ ID NO: 1935391 - DNA, 25 bp, Homo sapien
ccccagacgcgagacgtggaggaac

SEQ ID NO: 1935392 - DNA, 25 bp, Homo sapien
agcaccccagacgcgagacgtggag

SEQ ID NO: 1935393 - DNA, 25 bp, Homo sapien
gggagaccctccaagttgctctggg

SEQ ID NO: 1935394 - DNA, 25 bp, Homo sapien
cgaagatgtttgtgcggagaccctc

SEQ ID NO: 1935395 - DNA, 25 bp, Homo sapien
cgtggagcgtcaaggtccaagacac

SEQ ID NO: 1935396 - DNA, 25 bp, Homo sapien
ttggcaaagacttgtgccacagtca

SEQ ID NO: 1935397 - DNA, 25 bp, Homo sapien
ggcgagggggatcctcgcagccgcg

SEQ ID NO: 1935398 - DNA, 25 bp, Homo sapien
gaaagtcaccgctgaggaggaggag

SEQ ID NO: 1935399 - DNA, 25 bp, Homo sapien
ggaaagtcaccgctgaggaggagga

SEQ ID NO: 1935400 - DNA, 25 bp, Homo sapien
tgaggaggaggagaaggaggacggg

SEQ ID NO: 1935401 - DNA, 25 bp, Homo sapien
ctggaaagtcaccgctgaggaggag

SEQ ID NO: 1935402 - DNA, 25 bp, Homo sapien
ccttgttctcgctgccgcggcggcc

SEQ ID NO: 1935403 - DNA, 25 bp, Homo sapien
ggtgcccttgttctcgctgccgcgg

SEQ ID NO: 1935404 - DNA, 25 bp, Homo sapien
tgcccttgttctcgctgccgcggcg

SEQ ID NO: 1935405 - DNA, 25 bp, Homo sapien
tggtgcccttgttctcgctgccgcg

SEQ ID NO: 1935406 - DNA, 25 bp, Homo sapien
gagggaaaagatcccgaccgccagc

SEQ ID NO: 1935407 - DNA, 25 bp, Homo sapien
ggaaaagatcccgaccgccagccca

SEQ ID NO: 1935408 - DNA, 25 bp, Homo sapien
gaaaagatcccgaccgccagcccag

SEQ ID NO: 1935409 - DNA, 25 bp, Homo sapien
aaaagatcccgaccgccagcccagg

SEQ ID NO: 1935410 - DNA, 25 bp, Homo sapien
gggccgcagctgtctgcgtgcggga

SEQ ID NO: 1935411 - DNA, 25 bp, Homo sapien
ggctgtggacgcaccgggttattcc

SEQ ID NO: 1935412 - DNA, 25 bp, Homo sapien
accgggttattcctggcagcgcctc

SEQ ID NO: 1935413 - DNA, 25 bp, Homo sapien
gtctgcgtgcgggagccgcagcggc

SEQ ID NO: 1935414 - DNA, 25 bp, Homo sapien
gaacctcggggcgagctgccacctt

SEQ ID NO: 1935415 - DNA, 25 bp, Homo sapien
accttcagcctgtgcgcttccctct

SEQ ID NO: 1935416 - DNA, 25 bp, Homo sapien
cagctgccggtttcctggtgggccg

SEQ ID NO: 1935417 - DNA, 25 bp, Homo sapien
ctctccacggaagggaccggagttg

SEQ ID NO: 1935418 - DNA, 25 bp, Homo sapien
tgacctacataggactcagaaagca

SEQ ID NO: 1935419 - DNA, 25 bp, Homo sapien
ccgaagacaaaactagtactggtag

SEQ ID NO: 1935420 - DNA, 25 bp, Homo sapien
gtccagttgcttgcatgtaagggca

SEQ ID NO: 1935421 - DNA, 25 bp, Homo sapien
cctgtgttcagtcccaatggcctat

SEQ ID NO: 1935422 - DNA, 25 bp, Homo sapien
gaaccacttgcaggtcttgggtgga

SEQ ID NO: 1935423 - DNA, 25 bp, Homo sapien
tattctaaagcacaagacctcctgc

SEQ ID NO: 1935424 - DNA, 25 bp, Homo sapien
tcttcctagataagcaacacagcag

SEQ ID NO: 1935425 - DNA, 25 bp, Homo sapien
tcaggcagccttagtcatgtcattg

SEQ ID NO: 1935426 - DNA, 25 bp, Homo sapien
tcatgggttttacaaggcacacaga

SEQ ID NO: 1935427 - DNA, 25 bp, Homo sapien
ctcatgggttttacaaggcacacag

SEQ ID NO: 1935428 - DNA, 25 bp, Homo sapien
cctcatgggttttacaaggcacaca

SEQ ID NO: 1935429 - DNA, 25 bp, Homo sapien
catgggttttacaaggcacacagag

SEQ ID NO: 1935430 - DNA, 25 bp, Homo sapien
tacctgacagtgatttggccaatcc

SEQ ID NO: 1935431 - DNA, 25 bp, Homo sapien
tcctatgccttcgagagacagtctg

SEQ ID NO: 1935432 - DNA, 25 bp, Homo sapien
tttacagcgtaagtaggaggccgtc

SEQ ID NO: 1935433 - DNA, 25 bp, Homo sapien
tagtgacaggccagagatcaaaacc

SEQ ID NO: 1935434 - DNA, 25 bp, Homo sapien
aaatgccctggcgatatctgcctca

SEQ ID NO: 1935435 - DNA, 25 bp, Homo sapien
gctttctgatccaaacttctaatag

SEQ ID NO: 1935436 - DNA, 25 bp, Homo sapien
tgtattattaccatctggtgtctgg

SEQ ID NO: 1935437 - DNA, 25 bp, Homo sapien
tgagataagacttccacctttagct

SEQ ID NO: 1935438 - DNA, 25 bp, Homo sapien
ccacataatgttagctgggactgca

SEQ ID NO: 1935439 - DNA, 25 bp, Homo sapien
tcatgaatagggactgcctgacact

SEQ ID NO: 1935440 - DNA, 25 bp, Homo sapien
catagtgctaagagaggccatttta

SEQ ID NO: 1935441 - DNA, 25 bp, Homo sapien
gaggtctcacaccattaagtcatga

SEQ ID NO: 1935442 - DNA, 25 bp, Homo sapien
ctgatccaagattgttggtaccagg

SEQ ID NO: 1935443 - DNA, 25 bp, Homo sapien
caaagaacttcaccattttacaata

SEQ ID NO: 1935444 - DNA, 25 bp, Homo sapien
tacaaagaacttcaccattttacaa

SEQ ID NO: 1935445 - DNA, 25 bp, Homo sapien
atctacaaagaacttcaccatttta

SEQ ID NO: 1935446 - DNA, 25 bp, Homo sapien
tctacaaagaacttcaccattttac

SEQ ID NO: 1935447 - DNA, 25 bp, Homo sapien
gcagtgataagagtgatcctgaagc

SEQ ID NO: 1935448 - DNA, 25 bp, Homo sapien
cagatgtttggcccagatgttaaca

SEQ ID NO: 1935449 - DNA, 25 bp, Homo sapien
taagagtgatcctgaagcacagcag

SEQ ID NO: 1935450 - DNA, 25 bp, Homo sapien
ctttctgatgttgctgcccagatgt

SEQ ID NO: 1935451 - DNA, 25 bp, Homo sapien
gaatcctaatggtaattacaaactg

SEQ ID NO: 1935452 - DNA, 25 bp, Homo sapien
tacagaggagatttgcaaagtgggt

SEQ ID NO: 1935453 - DNA, 25 bp, Homo sapien
agtgggttgccatctgtaattgttt

SEQ ID NO: 1935454 - DNA, 25 bp, Homo sapien
taaagtgacggcaaaattattgtgc

SEQ ID NO: 1935455 - DNA, 25 bp, Homo sapien
cacactttattcgtatgttcttaga

SEQ ID NO: 1935456 - DNA, 25 bp, Homo sapien
tcacactttattcgtatgttcttag

SEQ ID NO: 1935457 - DNA, 25 bp, Homo sapien
aagttcacactttattcgtatgttc

SEQ ID NO: 1935458 - DNA, 25 bp, Homo sapien
ttaaagttcacactttattcgtatg

SEQ ID NO: 1935459 - DNA, 25 bp, Homo sapien
cgaaggttcatgctgtcaacgtgac

SEQ ID NO: 1935460 - DNA, 25 bp, Homo sapien
cactgagtcatcacgtttccctgga

SEQ ID NO: 1935461 - DNA, 25 bp, Homo sapien
cattttcctcacatcacatcgaagg

SEQ ID NO: 1935462 - DNA, 25 bp, Homo sapien
ccctggattgtctttaggctgtggc

SEQ ID NO: 1935463 - DNA, 25 bp, Homo sapien
ggattagcacagtttaaatatggcc

SEQ ID NO: 1935464 - DNA, 25 bp, Homo sapien
gccaccttctgtactatcatcacga

SEQ ID NO: 1935465 - DNA, 25 bp, Homo sapien
gggactgactggctaacttggtagc

SEQ ID NO: 1935466 - DNA, 25 bp, Homo sapien
actgggtacaggttatatagccacc

SEQ ID NO: 1935467 - DNA, 25 bp, Homo sapien
cttggtgactctctggcgccacact

SEQ ID NO: 1935468 - DNA, 25 bp, Homo sapien
gggcttggtgactctctggcgccac

SEQ ID NO: 1935469 - DNA, 25 bp, Homo sapien
tggtgactctctggcgccacactct

SEQ ID NO: 1935470 - DNA, 25 bp, Homo sapien
ggcttggtgactctctggcgccaca

SEQ ID NO: 1935471 - DNA, 25 bp, Homo sapien
caggctgctgcctagcttgtggcta

SEQ ID NO: 1935472 - DNA, 25 bp, Homo sapien
tgctcattgtatctgccaacccaga

SEQ ID NO: 1935473 - DNA, 25 bp, Homo sapien
gattacttctgatgcactcctgctc

SEQ ID NO: 1935474 - DNA, 25 bp, Homo sapien
tcctgcatgcagtttgaccatacat

SEQ ID NO: 1935475 - DNA, 25 bp, Homo sapien
gcaggtagaatagcctttgatcacc

SEQ ID NO: 1935476 - DNA, 25 bp, Homo sapien
tattgggcaaatgaacttgatcttc

SEQ ID NO: 1935477 - DNA, 25 bp, Homo sapien
tattgccttccaccgaaagtgttcc

SEQ ID NO: 1935478 - DNA, 25 bp, Homo sapien
aataaaaccataaagggtccagatg

SEQ ID NO: 1935479 - DNA, 25 bp, Homo sapien
gaatcagaagctggtttcagttttg

SEQ ID NO: 1935480 - DNA, 25 bp, Homo sapien
tctgaatcagaagctggtttcagtt

SEQ ID NO: 1935481 - DNA, 25 bp, Homo sapien
ttctgaatcagaagctggtttcagt

SEQ ID NO: 1935482 - DNA, 25 bp, Homo sapien
ttattctgaatcagaagctggtttc

SEQ ID NO: 1935483 - DNA, 25 bp, Homo sapien
tgtacctccgattcacttctgttct

SEQ ID NO: 1935484 - DNA, 25 bp, Homo sapien
ctaagtgtacctccgattcacttct

SEQ ID NO: 1935485 - DNA, 25 bp, Homo sapien
cttctgttcttagggtgtagccctc

SEQ ID NO: 1935486 - DNA, 25 bp, Homo sapien
ctgttcttagggtgtagccctccag

SEQ ID NO: 1935487 - DNA, 25 bp, Homo sapien
caattgagagcctggtggatctctg

SEQ ID NO: 1935488 - DNA, 25 bp, Homo sapien
ttgagagcctggtggatctctgtct

SEQ ID NO: 1935489 - DNA, 25 bp, Homo sapien
agagcctggtggatctctgtcttcc

SEQ ID NO: 1935490 - DNA, 25 bp, Homo sapien
tcaattgagagcctggtggatctct

SEQ ID NO: 1935491 - DNA, 25 bp, Homo sapien
aaattcagcaactcgcttgaaagga

SEQ ID NO: 1935492 - DNA, 25 bp, Homo sapien
cgcttgaaaggaagactggcaatgt

SEQ ID NO: 1935493 - DNA, 25 bp, Homo sapien
gaaaggaagactggcaatgtgtttg

SEQ ID NO: 1935494 - DNA, 25 bp, Homo sapien
caactcgcttgaaaggaagactggc

SEQ ID NO: 1935495 - DNA, 25 bp, Homo sapien
agtgagtcaccaaagccccatataa

SEQ ID NO: 1935496 - DNA, 25 bp, Homo sapien
ccaaagccccatataactgctaaaa

SEQ ID NO: 1935497 - DNA, 25 bp, Homo sapien
tagtttaacttttttccgcagctgc

SEQ ID NO: 1935498 - DNA, 25 bp, Homo sapien
gtttaacttttttccgcagctgcat

SEQ ID NO: 1935499 - DNA, 25 bp, Homo sapien
agatgattgacttggacctggagtt

SEQ ID NO: 1935500 - DNA, 25 bp, Homo sapien
gaagcaaagatgattgacttggacc

SEQ ID NO: 1935501 - DNA, 25 bp, Homo sapien
cagtagtgatgaagcgatgaggata

SEQ ID NO: 1935502 - DNA, 25 bp, Homo sapien
aatgctggggtaaatgtcgatgaca

SEQ ID NO: 1935503 - DNA, 25 bp, Homo sapien
tgcccacagatttgataacccaggt

SEQ ID NO: 1935504 - DNA, 25 bp, Homo sapien
gacacaagttcctaatatcacaaat

SEQ ID NO: 1935505 - DNA, 25 bp, Homo sapien
tagattcggtaagtctgcagtccca

SEQ ID NO: 1935506 - DNA, 25 bp, Homo sapien
tctttcacaagacaatagattcggt

SEQ ID NO: 1935507 - DNA, 25 bp, Homo sapien
tatggattggctacttggatgtgaa

SEQ ID NO: 1935508 - DNA, 25 bp, Homo sapien
cattgtgcaggaatgcccaagggtt

SEQ ID NO: 1935509 - DNA, 25 bp, Homo sapien
cccaagggttgagatgccacagaca

SEQ ID NO: 1935510 - DNA, 25 bp, Homo sapien
tcccagggcaattcctattatatgg

SEQ ID NO: 1935511 - DNA, 25 bp, Homo sapien
tgaacttttaagcaacgaccaatag

SEQ ID NO: 1935512 - DNA, 25 bp, Homo sapien
ggacatgtcctaactttcacccttg

SEQ ID NO: 1935513 - DNA, 25 bp, Homo sapien
cagacatcctccctgatacggtttg

SEQ ID NO: 1935514 - DNA, 25 bp, Homo sapien
caatttaagggtgacataggagtcc

SEQ ID NO: 1935515 - DNA, 25 bp, Homo sapien
aaattggtaactgctcttgagggtt

SEQ ID NO: 1935516 - DNA, 25 bp, Homo sapien
ggcaaaattggtaactgctcttgag

SEQ ID NO: 1935517 - DNA, 25 bp, Homo sapien
atttggcaaaattggtaactgctct

SEQ ID NO: 1935518 - DNA, 25 bp, Homo sapien
ggtaactgctcttgagggttttcat

SEQ ID NO: 1935519 - DNA, 25 bp, Homo sapien
agtgagacaccacttgatcagatcc

SEQ ID NO: 1935520 - DNA, 25 bp, Homo sapien
tgagacaccacttgatcagatccat

SEQ ID NO: 1935521 - DNA, 25 bp, Homo sapien
agcccttctgagtgcggtggaagca

SEQ ID NO: 1935522 - DNA, 25 bp, Homo sapien
tgcagggtagcccttctgagtgcgg

SEQ ID NO: 1935523 - DNA, 25 bp, Homo sapien
agccacttaactgcggttagggtag

SEQ ID NO: 1935524 - DNA, 25 bp, Homo sapien
tccagccacttaactgcggttaggg

SEQ ID NO: 1935525 - DNA, 25 bp, Homo sapien
cactccagccacttaactgcggtta

SEQ ID NO: 1935526 - DNA, 25 bp, Homo sapien
cacttaactgcggttagggtagata

SEQ ID NO: 1935527 - DNA, 25 bp, Homo sapien
atctgggaggcagccaatgtgttgc

SEQ ID NO: 1935528 - DNA, 25 bp, Homo sapien
gattcttttccgtttgactcagaga

SEQ ID NO: 1935529 - DNA, 25 bp, Homo sapien
ccatctgtgagttgagtgcggtaaa

SEQ ID NO: 1935530 - DNA, 25 bp, Homo sapien
tctaaaatctgaggtggcgtccata

SEQ ID NO: 1935531 - DNA, 25 bp, Homo sapien
tctactgctgttttccatatcatgt

SEQ ID NO: 1935532 - DNA, 25 bp, Homo sapien
ccctgaagtagctgccatcctgaat

SEQ ID NO: 1935533 - DNA, 25 bp, Homo sapien
attttgtgtttatatcctcctcctt

SEQ ID NO: 1935534 - DNA, 25 bp, Homo sapien
gactgtaattttgcctcctgccctg

SEQ ID NO: 1935535 - DNA, 25 bp, Homo sapien
tgactgatacaggattaaacaccag

SEQ ID NO: 1935536 - DNA, 25 bp, Homo sapien
tattctgcatgagaagcaccaagca

SEQ ID NO: 1935537 - DNA, 25 bp, Homo sapien
tgatcacaggcttattgaccatgag

SEQ ID NO: 1935538 - DNA, 25 bp, Homo sapien
tagagttcccgacaggtgtactggc

SEQ ID NO: 1935539 - DNA, 25 bp, Homo sapien
ccagtggcagcgtgggccttacaaa

SEQ ID NO: 1935540 - DNA, 25 bp, Homo sapien
gccttacaaaactgtagggccttca

SEQ ID NO: 1935541 - DNA, 25 bp, Homo sapien
acagcattgaagcattagggctttc

SEQ ID NO: 1935542 - DNA, 25 bp, Homo sapien
agggctttctacactccagtggcag

SEQ ID NO: 1935543 - DNA, 25 bp, Homo sapien
ggtagggtcactccagtttaatcaa

SEQ ID NO: 1935544 - DNA, 25 bp, Homo sapien
ccattagggccaacatagagattca

SEQ ID NO: 1935545 - DNA, 25 bp, Homo sapien
ttttatgtttactagccagattagc

SEQ ID NO: 1935546 - DNA, 25 bp, Homo sapien
ctagccagattagctagtaatgaag

SEQ ID NO: 1935547 - DNA, 25 bp, Homo sapien
taattttatcgaataactatagtcc

SEQ ID NO: 1935548 - DNA, 25 bp, Homo sapien
tgtctctcctgtgtacttatagcta

SEQ ID NO: 1935549 - DNA, 25 bp, Homo sapien
tatagctaccctttgaatattcata

SEQ ID NO: 1935550 - DNA, 25 bp, Homo sapien
tgtgtacttatagctaccctttgaa

SEQ ID NO: 1935551 - DNA, 25 bp, Homo sapien
tgacagagcgtgaaagaagccttgc

SEQ ID NO: 1935552 - DNA, 25 bp, Homo sapien
tcacctgtgtgaggcataagaccac

SEQ ID NO: 1935553 - DNA, 25 bp, Homo sapien
tcaccttatgggatgatctcacctg

SEQ ID NO: 1935554 - DNA, 25 bp, Homo sapien
tctaaatggatctaactctgggccc

SEQ ID NO: 1935555 - DNA, 25 bp, Homo sapien
taatgtgctatgacagcatgtgcaa

SEQ ID NO: 1935556 - DNA, 25 bp, Homo sapien
gaagagatagacttgtctctgccct

SEQ ID NO: 1935557 - DNA, 25 bp, Homo sapien
gaaaccagtaattacacagtcagtt

SEQ ID NO: 1935558 - DNA, 25 bp, Homo sapien
gctcagtgttacgaaggaaaaatgt

SEQ ID NO: 1935559 - DNA, 25 bp, Homo sapien
cactatgcgtttctgaatttgagga

SEQ ID NO: 1935560 - DNA, 25 bp, Homo sapien
gagagccctaagcttcactatgcgt

SEQ ID NO: 1935561 - DNA, 25 bp, Homo sapien
tatggttgaggaaaattagtcagaa

SEQ ID NO: 1935562 - DNA, 25 bp, Homo sapien
ggaaaggacttggacactcaggatt

SEQ ID NO: 1935563 - DNA, 25 bp, Homo sapien
ccacagacagatcattcattagcca

SEQ ID NO: 1935564 - DNA, 25 bp, Homo sapien
cagacagatcattcattagccacag

SEQ ID NO: 1935565 - DNA, 25 bp, Homo sapien
gacagatcattcattagccacagac

SEQ ID NO: 1935566 - DNA, 25 bp, Homo sapien
cttcactgccacagacagatcattc

SEQ ID NO: 1935567 - DNA, 25 bp, Homo sapien
ctggtttcttggcagaagtccatac

SEQ ID NO: 1935568 - DNA, 25 bp, Homo sapien
tggcagaagtccatacctgtatcct

SEQ ID NO: 1935569 - DNA, 25 bp, Homo sapien
tttcttggcagaagtccatacctgt

SEQ ID NO: 1935570 - DNA, 25 bp, Homo sapien
agtccatacctgtatcctttccagt

SEQ ID NO: 1935571 - DNA, 25 bp, Homo sapien
tgaggcaggatgctaacttgaatct

SEQ ID NO: 1935572 - DNA, 25 bp, Homo sapien
gaggcaggatgctaacttgaatctg

SEQ ID NO: 1935573 - DNA, 25 bp, Homo sapien
tcattaggttttgctgagtgtcata

SEQ ID NO: 1935574 - DNA, 25 bp, Homo sapien
caaaaccctcatccctaatttagag

SEQ ID NO: 1935575 - DNA, 25 bp, Homo sapien
gtaagtttgcatggaaagttctgac

SEQ ID NO: 1935576 - DNA, 25 bp, Homo sapien
gagtgtcatatgctaagttatttgc

SEQ ID NO: 1935577 - DNA, 25 bp, Homo sapien
ctgtccccgatgctgtcccgcagca

SEQ ID NO: 1935578 - DNA, 25 bp, Homo sapien
ctctgggcacatctgcagctctcta

SEQ ID NO: 1935579 - DNA, 25 bp, Homo sapien
atcactgtccccgatgctgtcccgc

SEQ ID NO: 1935580 - DNA, 25 bp, Homo sapien
gctctctagaccagaaccataaaga

SEQ ID NO: 1935581 - DNA, 25 bp, Homo sapien
ctggcacaggtgctcccgagtgcca

SEQ ID NO: 1935582 - DNA, 25 bp, Homo sapien
gaccacaagaaaagccgccagaaga

SEQ ID NO: 1935583 - DNA, 25 bp, Homo sapien
aagccgccagaagaaaagaggagcc

SEQ ID NO: 1935584 - DNA, 25 bp, Homo sapien
ggcacaggtgctcccgagtgccaaa

SEQ ID NO: 1935585 - DNA, 25 bp, Homo sapien
ctttcctgtcccaatctttgataaa

SEQ ID NO: 1935586 - DNA, 25 bp, Homo sapien
tttcctgtcccaatctttgataaac

SEQ ID NO: 1935587 - DNA, 25 bp, Homo sapien
tctttgtgtaccaaacacatgtagc

SEQ ID NO: 1935588 - DNA, 25 bp, Homo sapien
tggctgacttgttcaatgctctttg

SEQ ID NO: 1935589 - DNA, 25 bp, Homo sapien
attggcttccctggaaaatatgtcc

SEQ ID NO: 1935590 - DNA, 25 bp, Homo sapien
ccaaactctggtgtagtccagggca

SEQ ID NO: 1935591 - DNA, 25 bp, Homo sapien
tacaacactctagggcattcatgag

SEQ ID NO: 1935592 - DNA, 25 bp, Homo sapien
tggccttgccaatggaaataccgtg

SEQ ID NO: 1935593 - DNA, 25 bp, Homo sapien
caaccgtgagaatttatggatagca

SEQ ID NO: 1935594 - DNA, 25 bp, Homo sapien
acttgcccatacaacacagatgtgg

SEQ ID NO: 1935595 - DNA, 25 bp, Homo sapien
gaatatggccctaagtgggccctgt

SEQ ID NO: 1935596 - DNA, 25 bp, Homo sapien
gacttggccttaaggcagtgtgaag

SEQ ID NO: 1935597 - DNA, 25 bp, Homo sapien
gccagtaggaggaactgtgactctc

SEQ ID NO: 1935598 - DNA, 25 bp, Homo sapien
gactccaggagtacccttggacttg

SEQ ID NO: 1935599 - DNA, 25 bp, Homo sapien
tatagaccagtaacgtccagcagaa

SEQ ID NO: 1935600 - DNA, 25 bp, Homo sapien
cacagaatggcagtacctaatgccg

SEQ ID NO: 1935601 - DNA, 25 bp, Homo sapien
ggaactatctcgtgaacagagtgaa

SEQ ID NO: 1935602 - DNA, 25 bp, Homo sapien
gaggcgcattgacttagctgggaaa

SEQ ID NO: 1935603 - DNA, 25 bp, Homo sapien
ggagcatcagatgtctttcaggagc

SEQ ID NO: 1935604 - DNA, 25 bp, Homo sapien
gccataaatatcctaagggagttcc

SEQ ID NO: 1935605 - DNA, 25 bp, Homo sapien
tcaagtgttctttctggaatcgggt

SEQ ID NO: 1935606 - DNA, 25 bp, Homo sapien
cattgattgagagctgactaggaat

SEQ ID NO: 1935607 - DNA, 25 bp, Homo sapien
gttgagcgcatacggctggtgtccc

SEQ ID NO: 1935608 - DNA, 25 bp, Homo sapien
cagatgcctcattcggactccgagt

SEQ ID NO: 1935609 - DNA, 25 bp, Homo sapien
agggcctctgccgtgagtttgcaga

SEQ ID NO: 1935610 - DNA, 25 bp, Homo sapien
gtgtctgtccggctcagcccagcgg

SEQ ID NO: 1935611 - DNA, 25 bp, Homo sapien
caagtccagtggaatctcgtaacag

SEQ ID NO: 1935612 - DNA, 25 bp, Homo sapien
taagaaaagggcaatcaagtccagt

SEQ ID NO: 1935613 - DNA, 25 bp, Homo sapien
tgggaaaaccttcacgacccacaga

SEQ ID NO: 1935614 - DNA, 25 bp, Homo sapien
gaaggaccatgtgttctatctccca

SEQ ID NO: 1935615 - DNA, 25 bp, Homo sapien
tggctaggaaggcctcacaatcatc

SEQ ID NO: 1935616 - DNA, 25 bp, Homo sapien
tccacgtggctaggaaggcctcaca

SEQ ID NO: 1935617 - DNA, 25 bp, Homo sapien
ccacgtggctaggaaggcctcacaa

SEQ ID NO: 1935618 - DNA, 25 bp, Homo sapien
ctaggaaggcctcacaatcatcgtg

SEQ ID NO: 1935619 - DNA, 25 bp, Homo sapien
gaggagatcaacaccttcatcacca

SEQ ID NO: 1935620 - DNA, 25 bp, Homo sapien
tggttttgccagtagtgggaggaga

SEQ ID NO: 1935621 - DNA, 25 bp, Homo sapien
ctcatcagggctcgctggttttgcc

SEQ ID NO: 1935622 - DNA, 25 bp, Homo sapien
aaagactatgtctcagttgctcatc

SEQ ID NO: 1935623 - DNA, 25 bp, Homo sapien
gatgtacagccgtggcaagcaatgc

SEQ ID NO: 1935624 - DNA, 25 bp, Homo sapien
gtctttggatcaagccctggctcct

SEQ ID NO: 1935625 - DNA, 25 bp, Homo sapien
aatactgagatgtacagccgtggca

SEQ ID NO: 1935626 - DNA, 25 bp, Homo sapien
ttggatcaagccctggctccttgtc

SEQ ID NO: 1935627 - DNA, 25 bp, Homo sapien
tgatgcccagagtcctccaattgaa

SEQ ID NO: 1935628 - DNA, 25 bp, Homo sapien
gcccagagtcctccaattgaatcca

SEQ ID NO: 1935629 - DNA, 25 bp, Homo sapien
gatgcccagagtcctccaattgaat

SEQ ID NO: 1935630 - DNA, 25 bp, Homo sapien
tgcccagagtcctccaattgaatcc

SEQ ID NO: 1935631 - DNA, 25 bp, Homo sapien
tgtcccccactgtgaaaaactgatt

SEQ ID NO: 1935632 - DNA, 25 bp, Homo sapien
ccccactgtgaaaaactgattggca

SEQ ID NO: 1935633 - DNA, 25 bp, Homo sapien
cctggcgcttgcaggaagccccaca

SEQ ID NO: 1935634 - DNA, 25 bp, Homo sapien
actgtgaaaaactgattggcatctg

SEQ ID NO: 1935635 - DNA, 25 bp, Homo sapien
tatgttagggccgacatacccgtga

SEQ ID NO: 1935636 - DNA, 25 bp, Homo sapien
tgacacaacagccaaaggttcggga

SEQ ID NO: 1935637 - DNA, 25 bp, Homo sapien
gactctaacttgctatccagtggcc

SEQ ID NO: 1935638 - DNA, 25 bp, Homo sapien
gagccccatgccaagatgaaagaaa

SEQ ID NO: 1935639 - DNA, 25 bp, Homo sapien
aaaagagaagacatctttgctccac

SEQ ID NO: 1935640 - DNA, 25 bp, Homo sapien
cttctagttgacatgtataaaagag

SEQ ID NO: 1935641 - DNA, 25 bp, Homo sapien
taaaagagaagacatctttgctcca

SEQ ID NO: 1935642 - DNA, 25 bp, Homo sapien
tcaccttctagttgacatgtataaa

SEQ ID NO: 1935643 - DNA, 25 bp, Homo sapien
gctgaatcttttcccgggctggctc

SEQ ID NO: 1935644 - DNA, 25 bp, Homo sapien
gggctgaatcttttcccgggctggc

SEQ ID NO: 1935645 - DNA, 25 bp, Homo sapien
caccctcacttccaagcacctggaa

SEQ ID NO: 1935646 - DNA, 25 bp, Homo sapien
gcttctcattgctctgcctttcagt

SEQ ID NO: 1935647 - DNA, 25 bp, Homo sapien
tagtactaccagaccagatgggatg

SEQ ID NO: 1935648 - DNA, 25 bp, Homo sapien
tagcaggacacatggtagtactacc

SEQ ID NO: 1935649 - DNA, 25 bp, Homo sapien
catggaagtgctatcttgagtgcca

SEQ ID NO: 1935650 - DNA, 25 bp, Homo sapien
tctgctggaaggtcaagacagtcgc

SEQ ID NO: 1935651 - DNA, 25 bp, Homo sapien
tgggtgccacaatcatctaagtcta

SEQ ID NO: 1935652 - DNA, 25 bp, Homo sapien
cagctagcagagtcgagaaatagca

SEQ ID NO: 1935653 - DNA, 25 bp, Homo sapien
caatggtagctcctgtttgacatcc

SEQ ID NO: 1935654 - DNA, 25 bp, Homo sapien
gaaatagcatgacatagggcaggtg

SEQ ID NO: 1935655 - DNA, 25 bp, Homo sapien
tagcagtacacatagctgggctact

SEQ ID NO: 1935656 - DNA, 25 bp, Homo sapien
gcagtacacatagctgggctactga

SEQ ID NO: 1935657 - DNA, 25 bp, Homo sapien
aatagcagtacacatagctgggcta

SEQ ID NO: 1935658 - DNA, 25 bp, Homo sapien
cagtacacatagctgggctactgaa

SEQ ID NO: 1935659 - DNA, 25 bp, Homo sapien
acaaaggccatcaggtaggtttcca

SEQ ID NO: 1935660 - DNA, 25 bp, Homo sapien
agtggctcatgcctgtaatcccggc

SEQ ID NO: 1935661 - DNA, 25 bp, Homo sapien
gtggatcacgaggtcaagagatgga

SEQ ID NO: 1935662 - DNA, 25 bp, Homo sapien
ccggcactttgggagactgaggcag

SEQ ID NO: 1935663 - DNA, 25 bp, Homo sapien
taaaattgggtgattttggctgggc

SEQ ID NO: 1935664 - DNA, 25 bp, Homo sapien
taatcatgaacctaggccaccatgg

SEQ ID NO: 1935665 - DNA, 25 bp, Homo sapien
gaaaagcctgagtgtattgcatctc

SEQ ID NO: 1935666 - DNA, 25 bp, Homo sapien
taatgtcacagttgcctcaaatgag

SEQ ID NO: 1935667 - DNA, 25 bp, Homo sapien
cactgtgtgttaaagaattcttccc

SEQ ID NO: 1935668 - DNA, 25 bp, Homo sapien
gattaacaagcggtggaataaccta

SEQ ID NO: 1935669 - DNA, 25 bp, Homo sapien
gaagatcagacacggcaacaagtgg

SEQ ID NO: 1935670 - DNA, 25 bp, Homo sapien
ggtatcatagctgcaaacgtccttg

SEQ ID NO: 1935671 - DNA, 25 bp, Homo sapien
tggccagcggactcaggtatcatag

SEQ ID NO: 1935672 - DNA, 25 bp, Homo sapien
ctctaacacctttaaggtatccaag

SEQ ID NO: 1935673 - DNA, 25 bp, Homo sapien
tcgggtatgcctctcttactaatca

SEQ ID NO: 1935674 - DNA, 25 bp, Homo sapien
ccaaggagaaaatcaggtgcatgga

SEQ ID NO: 1935675 - DNA, 25 bp, Homo sapien
gatggcaggtcaacttcgggtatgc

SEQ ID NO: 1935676 - DNA, 25 bp, Homo sapien
tgcctgagggctaaatggccctggt

SEQ ID NO: 1935677 - DNA, 25 bp, Homo sapien
ctaaatggccctggttctttatctc

SEQ ID NO: 1935678 - DNA, 25 bp, Homo sapien
tgagggctaaatggccctggttctt

SEQ ID NO: 1935679 - DNA, 25 bp, Homo sapien
tgtgcctgagggctaaatggccctg

SEQ ID NO: 1935680 - DNA, 25 bp, Homo sapien
agagttagtgttggtttggctgctc

SEQ ID NO: 1935681 - DNA, 25 bp, Homo sapien
ttgaaagagagttagtgttggtttg

SEQ ID NO: 1935682 - DNA, 25 bp, Homo sapien
gtagttgaaagagagttagtgttgg

SEQ ID NO: 1935683 - DNA, 25 bp, Homo sapien
aaagagagttagtgttggtttggct

SEQ ID NO: 1935684 - DNA, 25 bp, Homo sapien
agggacagcagccaaatggtggatc

SEQ ID NO: 1935685 - DNA, 25 bp, Homo sapien
ttctcttcggcatcttccctgagcg

SEQ ID NO: 1935686 - DNA, 25 bp, Homo sapien
cccgtgaatttgagctggccagttc

SEQ ID NO: 1935687 - DNA, 25 bp, Homo sapien
gcaagtttctttaccacccctgctg

SEQ ID NO: 1935688 - DNA, 25 bp, Homo sapien
caatcttaagggcttcactgatgaa

SEQ ID NO: 1935689 - DNA, 25 bp, Homo sapien
tagtcaagacctcgtgcagcaagtg

SEQ ID NO: 1935690 - DNA, 25 bp, Homo sapien
gcttcaggatttctaatagtgccaa

SEQ ID NO: 1935691 - DNA, 25 bp, Homo sapien
cactgatgaatgagctgactctact

SEQ ID NO: 1935692 - DNA, 25 bp, Homo sapien
aaatttggaagaattgcttattaga

SEQ ID NO: 1935693 - DNA, 25 bp, Homo sapien
gtttcttcagctcaacatactctga

SEQ ID NO: 1935694 - DNA, 25 bp, Homo sapien
agccagatgctgtggtgatgggcac

SEQ ID NO: 1935695 - DNA, 25 bp, Homo sapien
gcacacagctccctataataaccat

SEQ ID NO: 1935696 - DNA, 25 bp, Homo sapien
tgacatcctatggtgtggttctgga

SEQ ID NO: 1935697 - DNA, 25 bp, Homo sapien
ggctccgcattcctgctcttatttc

SEQ ID NO: 1935698 - DNA, 25 bp, Homo sapien
ctgacatcctatggtgtggttctgg

SEQ ID NO: 1935699 - DNA, 25 bp, Homo sapien
agaacacacactggctccgcattcc

SEQ ID NO: 1935700 - DNA, 25 bp, Homo sapien
cgatgactaacagccacctgcgctt

SEQ ID NO: 1935701 - DNA, 25 bp, Homo sapien
ttggaagttaaaactggcggcttgc

SEQ ID NO: 1935702 - DNA, 25 bp, Homo sapien
tggcggcttgctgcgatgactaaca

SEQ ID NO: 1935703 - DNA, 25 bp, Homo sapien
agccacctgcgcttgccattcttgt

SEQ ID NO: 1935704 - DNA, 25 bp, Homo sapien
taaaaccttaacaagcttgtttgca

SEQ ID NO: 1935705 - DNA, 25 bp, Homo sapien
gtctctgattcatgtttaaaacctt

SEQ ID NO: 1935706 - DNA, 25 bp, Homo sapien
tttgcaggggttgcaatcttccagg

SEQ ID NO: 1935707 - DNA, 25 bp, Homo sapien
aaccttaacaagcttgtttgcaggg

SEQ ID NO: 1935708 - DNA, 25 bp, Homo sapien
tggctgcccacgaacgaaaccagct

SEQ ID NO: 1935709 - DNA, 25 bp, Homo sapien
agagctctcctcactagtggctgcc

SEQ ID NO: 1935710 - DNA, 25 bp, Homo sapien
caaaatcatagaccttagggaagaa

SEQ ID NO: 1935711 - DNA, 25 bp, Homo sapien
tcactagtggctgcccacgaacgaa

SEQ ID NO: 1935712 - DNA, 25 bp, Homo sapien
atgaaccaggggttatcatacacta

SEQ ID NO: 1935713 - DNA, 25 bp, Homo sapien
ggatgaaccaggggttatcatacac

SEQ ID NO: 1935714 - DNA, 25 bp, Homo sapien
gatgaaccaggggttatcatacact

SEQ ID NO: 1935715 - DNA, 25 bp, Homo sapien
tgaaccaggggttatcatacactac

SEQ ID NO: 1935716 - DNA, 25 bp, Homo sapien
aatctgcgctactggtgctttgtcc

SEQ ID NO: 1935717 - DNA, 25 bp, Homo sapien
caatctgcgctactggtgctttgtc

SEQ ID NO: 1935718 - DNA, 25 bp, Homo sapien
ccccaatctgcgctactggtgcttt

SEQ ID NO: 1935719 - DNA, 25 bp, Homo sapien
tttgcctcctacctctataattttc

SEQ ID NO: 1935720 - DNA, 25 bp, Homo sapien
tcccaatgttaaagagagggtcttc

SEQ ID NO: 1935721 - DNA, 25 bp, Homo sapien
tatgttacccgaccaagcagggtga

SEQ ID NO: 1935722 - DNA, 25 bp, Homo sapien
tgtacactgtagttctgcccactag

SEQ ID NO: 1935723 - DNA, 25 bp, Homo sapien
tcctcaggtaacgagatcaggagag

SEQ ID NO: 1935724 - DNA, 25 bp, Homo sapien
tctggactaacctagcaagagagtt

SEQ ID NO: 1935725 - DNA, 25 bp, Homo sapien
gttaagttagctcctagcaaagcag

SEQ ID NO: 1935726 - DNA, 25 bp, Homo sapien
ttatataaatgtctacacagcacag

SEQ ID NO: 1935727 - DNA, 25 bp, Homo sapien
tcatttttatgcctccacagttaag

SEQ ID NO: 1935728 - DNA, 25 bp, Homo sapien
cagctaacattttctcgaagggcca

SEQ ID NO: 1935729 - DNA, 25 bp, Homo sapien
tcatgagtggtaccgaaaccggcag

SEQ ID NO: 1935730 - DNA, 25 bp, Homo sapien
taacaggcttctcgttgaagggagg

SEQ ID NO: 1935731 - DNA, 25 bp, Homo sapien
tcatggatatgtggtgttcaaccca

SEQ ID NO: 1935732 - DNA, 25 bp, Homo sapien
tgtgcctccagatgtgatatcctgt

SEQ ID NO: 1935733 - DNA, 25 bp, Homo sapien
caacaccttgaccagatgaccaaaa

SEQ ID NO: 1935734 - DNA, 25 bp, Homo sapien
catcaccttggtgtgacggcctttg

SEQ ID NO: 1935735 - DNA, 25 bp, Homo sapien
gactgcttattcattgcaacagaga

SEQ ID NO: 1935736 - DNA, 25 bp, Homo sapien
cagtctctgggctagaatgctcata

SEQ ID NO: 1935737 - DNA, 25 bp, Homo sapien
gattttctcccaaagcgatggaggg

SEQ ID NO: 1935738 - DNA, 25 bp, Homo sapien
tactgggtggtactctagagaggca

SEQ ID NO: 1935739 - DNA, 25 bp, Homo sapien
cactgtcacttggaaattgctagca

SEQ ID NO: 1935740 - DNA, 25 bp, Homo sapien
taagaagtcagcacttgcctggact

SEQ ID NO: 1935741 - DNA, 25 bp, Homo sapien
tgattctgaaatgccagtcctggag

SEQ ID NO: 1935742 - DNA, 25 bp, Homo sapien
ttctcagggtggcaaactgcagtcc

SEQ ID NO: 1935743 - DNA, 25 bp, Homo sapien
cctggactgggcacttgtggctaga

SEQ ID NO: 1935744 - DNA, 25 bp, Homo sapien
tcaagatttctgacattcctttttc

SEQ ID NO: 1935745 - DNA, 25 bp, Homo sapien
agatttctgacattcctttttccga

SEQ ID NO: 1935746 - DNA, 25 bp, Homo sapien
gatttctgacattcctttttccgaa

SEQ ID NO: 1935747 - DNA, 25 bp, Homo sapien
aagatttctgacattcctttttccg

SEQ ID NO: 1935748 - DNA, 25 bp, Homo sapien
cctcagcccgatatccagggataca

SEQ ID NO: 1935749 - DNA, 25 bp, Homo sapien
ttcctcagcccgatatccagggata

SEQ ID NO: 1935750 - DNA, 25 bp, Homo sapien
tcctcagcccgatatccagggatac

SEQ ID NO: 1935751 - DNA, 25 bp, Homo sapien
cttcctcagcccgatatccagggat

SEQ ID NO: 1935752 - DNA, 25 bp, Homo sapien
atatttagaacagagccacaaccac

SEQ ID NO: 1935753 - DNA, 25 bp, Homo sapien
cagccatatacaaccagcgggattt

SEQ ID NO: 1935754 - DNA, 25 bp, Homo sapien
ctgacagccatatacaaccagcggg

SEQ ID NO: 1935755 - DNA, 25 bp, Homo sapien
tgacagccatatacaaccagcggga

SEQ ID NO: 1935756 - DNA, 25 bp, Homo sapien
gacagccatatacaaccagcgggat

SEQ ID NO: 1935757 - DNA, 25 bp, Homo sapien
cctggagaggaacgctcatgctact

SEQ ID NO: 1935758 - DNA, 25 bp, Homo sapien
gcttaggattcgtcttataaaccat

SEQ ID NO: 1935759 - DNA, 25 bp, Homo sapien
caagtatgtatcgtgacaaaatcag

SEQ ID NO: 1935760 - DNA, 25 bp, Homo sapien
aggtcctgcatagaatgtacatttc

SEQ ID NO: 1935761 - DNA, 25 bp, Homo sapien
catcaggcggagagcagctgcacac

SEQ ID NO: 1935762 - DNA, 25 bp, Homo sapien
tcatcaggcggagagcagctgcaca

SEQ ID NO: 1935763 - DNA, 25 bp, Homo sapien
ggctccacagtgacatacaacacag

SEQ ID NO: 1935764 - DNA, 25 bp, Homo sapien
acagtgacatacaacacagtgtgtt

SEQ ID NO: 1935765 - DNA, 25 bp, Homo sapien
tgcacggctccacagtgacatacaa

SEQ ID NO: 1935766 - DNA, 25 bp, Homo sapien
ataatgcacggctccacagtgacat

SEQ ID NO: 1935767 - DNA, 25 bp, Homo sapien
tgccactttgacgacaccaatcgag

SEQ ID NO: 1935768 - DNA, 25 bp, Homo sapien
gactcttgccactttgacgacacca

SEQ ID NO: 1935769 - DNA, 25 bp, Homo sapien
cgacaccaatcgaggacctgatcga

SEQ ID NO: 1935770 - DNA, 25 bp, Homo sapien
tttgacgacaccaatcgaggacctg

SEQ ID NO: 1935771 - DNA, 25 bp, Homo sapien
gatatctaatcagagatgccacagg

SEQ ID NO: 1935772 - DNA, 25 bp, Homo sapien
aaagatatctaatcagagatgccac

SEQ ID NO: 1935773 - DNA, 25 bp, Homo sapien
tctaatcagagatgccacaggaatc

SEQ ID NO: 1935774 - DNA, 25 bp, Homo sapien
tgcgaaagatatctaatcagagatg

SEQ ID NO: 1935775 - DNA, 25 bp, Homo sapien
atagggcagggtatgaaaagtgcta

SEQ ID NO: 1935776 - DNA, 25 bp, Homo sapien
tgagatagggcagggtatgaaaagt

SEQ ID NO: 1935777 - DNA, 25 bp, Homo sapien
agatagggcagggtatgaaaagtgc

SEQ ID NO: 1935778 - DNA, 25 bp, Homo sapien
gatagggcagggtatgaaaagtgct

SEQ ID NO: 1935779 - DNA, 25 bp, Homo sapien
tgtttgcaattatactgctcaactc

SEQ ID NO: 1935780 - DNA, 25 bp, Homo sapien
ctactgtatgtttgcaattatactg

SEQ ID NO: 1935781 - DNA, 25 bp, Homo sapien
tatgtttgcaattatactgctcaac

SEQ ID NO: 1935782 - DNA, 25 bp, Homo sapien
tttgcaattatactgctcaactcac

SEQ ID NO: 1935783 - DNA, 25 bp, Homo sapien
ctccccttccctacaacttcattgt

SEQ ID NO: 1935784 - DNA, 25 bp, Homo sapien
tctccccttccctacaacttcattg

SEQ ID NO: 1935785 - DNA, 25 bp, Homo sapien
ccccttccctacaacttcattgttg

SEQ ID NO: 1935786 - DNA, 25 bp, Homo sapien
gacagccaacaggaacttcagtatt

SEQ ID NO: 1935787 - DNA, 25 bp, Homo sapien
caggaacttcagtattttcgagggc

SEQ ID NO: 1935788 - DNA, 25 bp, Homo sapien
cagtattttcgagggcttctttggc

SEQ ID NO: 1935789 - DNA, 25 bp, Homo sapien
aacttcagtattttcgagggcttct

SEQ ID NO: 1935790 - DNA, 25 bp, Homo sapien
tggaaaatgtaagacgtaatactcc

SEQ ID NO: 1935791 - DNA, 25 bp, Homo sapien
cacaaagtggaaaatgtaagacgta

SEQ ID NO: 1935792 - DNA, 25 bp, Homo sapien
gaaaatgtaagacgtaatactccat

SEQ ID NO: 1935793 - DNA, 25 bp, Homo sapien
agtggaaaatgtaagacgtaatact

SEQ ID NO: 1935794 - DNA, 25 bp, Homo sapien
tagtttataaagagaagaagttgat

SEQ ID NO: 1935795 - DNA, 25 bp, Homo sapien
aagagaagaagttgatttggctcac

SEQ ID NO: 1935796 - DNA, 25 bp, Homo sapien
gctgggtagtttataaagagaagaa

SEQ ID NO: 1935797 - DNA, 25 bp, Homo sapien
aaagagaagaagttgatttggctca

SEQ ID NO: 1935798 - DNA, 25 bp, Homo sapien
catgggaatcatgctgaatggagaa

SEQ ID NO: 1935799 - DNA, 25 bp, Homo sapien
caaaattgcataggcacgcatacac

SEQ ID NO: 1935800 - DNA, 25 bp, Homo sapien
ggtacacctgtaccatgggacacaa

SEQ ID NO: 1935801 - DNA, 25 bp, Homo sapien
gccatgtggtagtgaaacagttcca

SEQ ID NO: 1935802 - DNA, 25 bp, Homo sapien
taccaagggccagattccagggctc

SEQ ID NO: 1935803 - DNA, 25 bp, Homo sapien
taacaacagacacttcaccgatcag

SEQ ID NO: 1935804 - DNA, 25 bp, Homo sapien
tgagtttagagtgaatcaagggacc

SEQ ID NO: 1935805 - DNA, 25 bp, Homo sapien
gctgctttatcagggtttgagttta

SEQ ID NO: 1935806 - DNA, 25 bp, Homo sapien
tgttcacctggagatagcacccacg

SEQ ID NO: 1935807 - DNA, 25 bp, Homo sapien
cactgctgtccgaaacagagagcaa

SEQ ID NO: 1935808 - DNA, 25 bp, Homo sapien
ggacaaataacgtcattgttgagga

SEQ ID NO: 1935809 - DNA, 25 bp, Homo sapien
gagagcaaatatgagcgatcggaat

SEQ ID NO: 1935810 - DNA, 25 bp, Homo sapien
gcacctagatggaagagacttcgta

SEQ ID NO: 1935811 - DNA, 25 bp, Homo sapien
ttttttctctagtcagggcctgccc

SEQ ID NO: 1935812 - DNA, 25 bp, Homo sapien
cagaccttgtttgcacacagtttga

SEQ ID NO: 1935813 - DNA, 25 bp, Homo sapien
gggcctgcccagatacagataatga

SEQ ID NO: 1935814 - DNA, 25 bp, Homo sapien
catgaaaacactgtgcatagcatag

SEQ ID NO: 1935815 - DNA, 25 bp, Homo sapien
cacatgaaaacactgtgcatagcat

SEQ ID NO: 1935816 - DNA, 25 bp, Homo sapien
ggcccacatgaaaacactgtgcata

SEQ ID NO: 1935817 - DNA, 25 bp, Homo sapien
gaaaacactgtgcatagcatagtat

SEQ ID NO: 1935818 - DNA, 25 bp, Homo sapien
cgacaccgagcacgcgccgcttgca

SEQ ID NO: 1935819 - DNA, 25 bp, Homo sapien
ttcggtctcctctgccgacaccgag

SEQ ID NO: 1935820 - DNA, 25 bp, Homo sapien
atccacttttcggtctcctctgccg

SEQ ID NO: 1935821 - DNA, 25 bp, Homo sapien
agcacgcgccgcttgcagctggctt

SEQ ID NO: 1935822 - DNA, 25 bp, Homo sapien
aaaggcactcgggagctatttctga

SEQ ID NO: 1935823 - DNA, 25 bp, Homo sapien
taatgaaaaggcactcgggagctat

SEQ ID NO: 1935824 - DNA, 25 bp, Homo sapien
gtctaatgaaaaggcactcgggagc

SEQ ID NO: 1935825 - DNA, 25 bp, Homo sapien
gggtagtctaatgaaaaggcactcg

SEQ ID NO: 1935826 - DNA, 25 bp, Homo sapien
ggccaggtgacgaagaaacagtttc

SEQ ID NO: 1935827 - DNA, 25 bp, Homo sapien
gacggcgctcttgctgggtcatctg

SEQ ID NO: 1935828 - DNA, 25 bp, Homo sapien
tctctgcggaaagtcacgtttgtga

SEQ ID NO: 1935829 - DNA, 25 bp, Homo sapien
atttcgggagagcacagaacgggac

SEQ ID NO: 1935830 - DNA, 25 bp, Homo sapien
ccctggcttggccagtaggctgttc

SEQ ID NO: 1935831 - DNA, 25 bp, Homo sapien
ctggcttggccagtaggctgttcat

SEQ ID NO: 1935832 - DNA, 25 bp, Homo sapien
cctggcttggccagtaggctgttca

SEQ ID NO: 1935833 - DNA, 25 bp, Homo sapien
tccctggcttggccagtaggctgtt

SEQ ID NO: 1935834 - DNA, 25 bp, Homo sapien
tatgttcctccagcgtaacatgtag

SEQ ID NO: 1935835 - DNA, 25 bp, Homo sapien
ttatgttcctccagcgtaacatgta

SEQ ID NO: 1935836 - DNA, 25 bp, Homo sapien
cattatatatcattagtatgttgac

SEQ ID NO: 1935837 - DNA, 25 bp, Homo sapien
aaatcattatatatcattagtatgt

SEQ ID NO: 1935838 - DNA, 25 bp, Homo sapien
gccactcacatatgctaatcttggc

SEQ ID NO: 1935839 - DNA, 25 bp, Homo sapien
gtgccactcacatatgctaatcttg

SEQ ID NO: 1935840 - DNA, 25 bp, Homo sapien
tgtgccactcacatatgctaatctt

SEQ ID NO: 1935841 - DNA, 25 bp, Homo sapien
tgccactcacatatgctaatcttgg

SEQ ID NO: 1935842 - DNA, 25 bp, Homo sapien
cactgacaacacactaggcaccgag

SEQ ID NO: 1935843 - DNA, 25 bp, Homo sapien
aaaccaagtacagatagaccgaata

SEQ ID NO: 1935844 - DNA, 25 bp, Homo sapien
tagaccgaatatggcctgacatttg

SEQ ID NO: 1935845 - DNA, 25 bp, Homo sapien
caaagaaatggaacactgacaacac

SEQ ID NO: 1935846 - DNA, 25 bp, Homo sapien
ctatggaagaccagttagcatgtgg

SEQ ID NO: 1935847 - DNA, 25 bp, Homo sapien
cagttagcatgtggactgaagctga

SEQ ID NO: 1935848 - DNA, 25 bp, Homo sapien
agacaggatacaagtgggagcacat

SEQ ID NO: 1935849 - DNA, 25 bp, Homo sapien
ctaaaatcaagacaggatacaagtg

SEQ ID NO: 1935850 - DNA, 25 bp, Homo sapien
caagacaggatacaagtgggagcac

SEQ ID NO: 1935851 - DNA, 25 bp, Homo sapien
aaaatcaagacaggatacaagtggg

SEQ ID NO: 1935852 - DNA, 25 bp, Homo sapien
gccagctaccaggtcaattttgaga

SEQ ID NO: 1935853 - DNA, 25 bp, Homo sapien
acattgctgagccttcagtccgagg

SEQ ID NO: 1935854 - DNA, 25 bp, Homo sapien
tatgaggattggctggccagctacc

SEQ ID NO: 1935855 - DNA, 25 bp, Homo sapien
cagagcaactttgcggttggccaca

SEQ ID NO: 1935856 - DNA, 25 bp, Homo sapien
aagaaacaggaacactcgcttcaga

SEQ ID NO: 1935857 - DNA, 25 bp, Homo sapien
gaacactcgcttcagaatagcagcc

SEQ ID NO: 1935858 - DNA, 25 bp, Homo sapien
caagtatcagatcgatcctaaagcc

SEQ ID NO: 1935859 - DNA, 25 bp, Homo sapien
tcagatcgatcctaaagcccacttc

SEQ ID NO: 1935860 - DNA, 25 bp, Homo sapien
ggtaaacataccttgcagcaaatgg

SEQ ID NO: 1935861 - DNA, 25 bp, Homo sapien
ggaacactatttgacccactacagt

SEQ ID NO: 1935862 - DNA, 25 bp, Homo sapien
cacttccggtggctagaaatccaaa

SEQ ID NO: 1935863 - DNA, 25 bp, Homo sapien
aatctctgcctagtcgtcacatggc

SEQ ID NO: 1935864 - DNA, 25 bp, Homo sapien
taaaggccctgtttcgaaatatagc

SEQ ID NO: 1935865 - DNA, 25 bp, Homo sapien
catatatgttggtggtgccatacga

SEQ ID NO: 1935866 - DNA, 25 bp, Homo sapien
gccatcataaggtagcacaacacga

SEQ ID NO: 1935867 - DNA, 25 bp, Homo sapien
tgacagctccgtgggtattattgcc

SEQ ID NO: 1935868 - DNA, 25 bp, Homo sapien
aattgactagcaatgcatttcccag

SEQ ID NO: 1935869 - DNA, 25 bp, Homo sapien
cagtctataccatacacattaggtg

SEQ ID NO: 1935870 - DNA, 25 bp, Homo sapien
tcagttcggtccataataccaccaa

SEQ ID NO: 1935871 - DNA, 25 bp, Homo sapien
ccaattccttgctactataatgtga

SEQ ID NO: 1935872 - DNA, 25 bp, Homo sapien
caatgtgaagagactttaatggcaa

SEQ ID NO: 1935873 - DNA, 25 bp, Homo sapien
agagactttaatggcaaagtgcact

SEQ ID NO: 1935874 - DNA, 25 bp, Homo sapien
gaagagactttaatggcaaagtgca

SEQ ID NO: 1935875 - DNA, 25 bp, Homo sapien
gactttaatggcaaagtgcactgga

SEQ ID NO: 1935876 - DNA, 25 bp, Homo sapien
gaaagggctgaactgccaaaataat

SEQ ID NO: 1935877 - DNA, 25 bp, Homo sapien
tagacataacttgcagcatcagcca

SEQ ID NO: 1935878 - DNA, 25 bp, Homo sapien
gctttctccatgtgctacaattata

SEQ ID NO: 1935879 - DNA, 25 bp, Homo sapien
gacacctgatagttcctagccttag

SEQ ID NO: 1935880 - DNA, 25 bp, Homo sapien
accataatgccattttgctccaaag

SEQ ID NO: 1935881 - DNA, 25 bp, Homo sapien
cagccccatttacacggcatctgat

SEQ ID NO: 1935882 - DNA, 25 bp, Homo sapien
acacggcatctgatgaatggttagc

SEQ ID NO: 1935883 - DNA, 25 bp, Homo sapien
aatccagttaagtggctgtccatgg

SEQ ID NO: 1935884 - DNA, 25 bp, Homo sapien
gaaggagtgattagtagttcaaaca

SEQ ID NO: 1935885 - DNA, 25 bp, Homo sapien
caaaattgtagacaagaggttcatt

SEQ ID NO: 1935886 - DNA, 25 bp, Homo sapien
aaacatacatgcaaatgtctccaaa

SEQ ID NO: 1935887 - DNA, 25 bp, Homo sapien
cacccactttctattgggaaggagt

SEQ ID NO: 1935888 - DNA, 25 bp, Homo sapien
tgcatgcagtgaacttgaacaacgt

SEQ ID NO: 1935889 - DNA, 25 bp, Homo sapien
cagtatcatacctgggctactaagc

SEQ ID NO: 1935890 - DNA, 25 bp, Homo sapien
gaatgaactcaatgccagatctggt

SEQ ID NO: 1935891 - DNA, 25 bp, Homo sapien
gatatgcatagagatactgcagctg

SEQ ID NO: 1935892 - DNA, 25 bp, Homo sapien
tctgttgcccccagaatagctttgg

SEQ ID NO: 1935893 - DNA, 25 bp, Homo sapien
tggccaaggaacagctgtcctgatg

SEQ ID NO: 1935894 - DNA, 25 bp, Homo sapien
ttgcccccagaatagctttgggatg

SEQ ID NO: 1935895 - DNA, 25 bp, Homo sapien
cctgatgtgggccatttaagaaaaa

SEQ ID NO: 1935896 - DNA, 25 bp, Homo sapien
gtgtcattctgggatcgccaggtat

SEQ ID NO: 1935897 - DNA, 25 bp, Homo sapien
tctgggatcgccaggtatgggtttc

SEQ ID NO: 1935898 - DNA, 25 bp, Homo sapien
gatcgccaggtatgggtttcataaa

SEQ ID NO: 1935899 - DNA, 25 bp, Homo sapien
caggaccccatttgcctcagtcgct

SEQ ID NO: 1935900 - DNA, 25 bp, Homo sapien
gccatctagtgtgggcccaatattc

SEQ ID NO: 1935901 - DNA, 25 bp, Homo sapien
atattcatcaaaagatttcctccac

SEQ ID NO: 1935902 - DNA, 25 bp, Homo sapien
gaaatggtgccatctagtgtgggcc

SEQ ID NO: 1935903 - DNA, 25 bp, Homo sapien
tagtgtgggcccaatattcatcaaa

SEQ ID NO: 1935904 - DNA, 25 bp, Homo sapien
tgtcctgggttataacgatcactgc

SEQ ID NO: 1935905 - DNA, 25 bp, Homo sapien
tcattggtgactactgtgccccgaa

SEQ ID NO: 1935906 - DNA, 25 bp, Homo sapien
tagaagccaccatgcttacagatgc

SEQ ID NO: 1935907 - DNA, 25 bp, Homo sapien
cgatcactgcaggtatagaagccac

SEQ ID NO: 1935908 - DNA, 25 bp, Homo sapien
catagtacagtggaaagcccatggt

SEQ ID NO: 1935909 - DNA, 25 bp, Homo sapien
caaacagacctgagttgattggagt

SEQ ID NO: 1935910 - DNA, 25 bp, Homo sapien
caattctgaaaagggaccatggcat

SEQ ID NO: 1935911 - DNA, 25 bp, Homo sapien
tctagctcccagacctagagcaaat

SEQ ID NO: 1935912 - DNA, 25 bp, Homo sapien
tcaaagttcttgatcctgtgatttt

SEQ ID NO: 1935913 - DNA, 25 bp, Homo sapien
gcagtctgcgggattcagaagcaaa

SEQ ID NO: 1935914 - DNA, 25 bp, Homo sapien
cagaagcaaatagtcagaaatagtg

SEQ ID NO: 1935915 - DNA, 25 bp, Homo sapien
gtctgatctcaaaatcagaccattg

SEQ ID NO: 1935916 - DNA, 25 bp, Homo sapien
taactcatagagctctggcaatgtc

SEQ ID NO: 1935917 - DNA, 25 bp, Homo sapien
gaaactggaaattgccgcttatgga

SEQ ID NO: 1935918 - DNA, 25 bp, Homo sapien
ccaagaagcctgtgctgttccagta

SEQ ID NO: 1935919 - DNA, 25 bp, Homo sapien
tgttccagtattgatccggtgctcc

SEQ ID NO: 1935920 - DNA, 25 bp, Homo sapien
gggcccctcatctatggcattccag

SEQ ID NO: 1935921 - DNA, 25 bp, Homo sapien
caaaacgcaggtcagttctgttcct

SEQ ID NO: 1935922 - DNA, 25 bp, Homo sapien
tccagttccacgaatattctgaccc

SEQ ID NO: 1935923 - DNA, 25 bp, Homo sapien
tcaaaaagggaatagtacagtccaa

SEQ ID NO: 1935924 - DNA, 25 bp, Homo sapien
tgtggtaagcttcagagcagtgttg

SEQ ID NO: 1935925 - DNA, 25 bp, Homo sapien
tcctatcatttctgtggtaagcttc

SEQ ID NO: 1935926 - DNA, 25 bp, Homo sapien
cagagcagtgttgatatctaaagtc

SEQ ID NO: 1935927 - DNA, 25 bp, Homo sapien
gtgttgatatctaaagtcatactca

SEQ ID NO: 1935928 - DNA, 25 bp, Homo sapien
taatgaatgaacaagccgttggaac

SEQ ID NO: 1935929 - DNA, 25 bp, Homo sapien
caatttgttaatgcttccctggcct

SEQ ID NO: 1935930 - DNA, 25 bp, Homo sapien
cctggccttacaaatactggagtgg

SEQ ID NO: 1935931 - DNA, 25 bp, Homo sapien
tgtagtaagcctatctccgctcact

SEQ ID NO: 1935932 - DNA, 25 bp, Homo sapien
tttcataaattccacatacttcggt

SEQ ID NO: 1935933 - DNA, 25 bp, Homo sapien
tgctgtaaatagtggtccaaaatct

SEQ ID NO: 1935934 - DNA, 25 bp, Homo sapien
tggcaccagaggcctgaaaaatatc

SEQ ID NO: 1935935 - DNA, 25 bp, Homo sapien
tgtttggaagttaagacaatgtatt

SEQ ID NO: 1935936 - DNA, 25 bp, Homo sapien
gatgaagatgccgaacttggcctgg

SEQ ID NO: 1935937 - DNA, 25 bp, Homo sapien
agaaccactcgctaccgaagctggg

SEQ ID NO: 1935938 - DNA, 25 bp, Homo sapien
tgggcacggaaaacactccccagtg

SEQ ID NO: 1935939 - DNA, 25 bp, Homo sapien
cttggcctggtcaaaccacgcgggc

SEQ ID NO: 1935940 - DNA, 25 bp, Homo sapien
caacagcagcaacgggaacgcgagc

SEQ ID NO: 1935941 - DNA, 25 bp, Homo sapien
ccgcggcctcgggagcgctgttctt

SEQ ID NO: 1935942 - DNA, 25 bp, Homo sapien
ctctgccgctgagtatgccgcgccg

SEQ ID NO: 1935943 - DNA, 25 bp, Homo sapien
cgcaggccggctgtcctctctgcag

SEQ ID NO: 1935944 - DNA, 25 bp, Homo sapien
gagcgctgttcttccgtctctgccg

SEQ ID NO: 1935945 - DNA, 25 bp, Homo sapien
ccttctggaaccatcacggccagca

SEQ ID NO: 1935946 - DNA, 25 bp, Homo sapien
ttctgcaggtacacatggctcatgt

SEQ ID NO: 1935947 - DNA, 25 bp, Homo sapien
tcatgtataaggcatttgaagggct

SEQ ID NO: 1935948 - DNA, 25 bp, Homo sapien
agatgaagacagaagggcgtgcctc

SEQ ID NO: 1935949 - DNA, 25 bp, Homo sapien
gaggctctcgaggacacattctgga

SEQ ID NO: 1935950 - DNA, 25 bp, Homo sapien
agcagtcttgccatgtgtgtccaca

SEQ ID NO: 1935951 - DNA, 25 bp, Homo sapien
catatgggagttggatgactgccac

SEQ ID NO: 1935952 - DNA, 25 bp, Homo sapien
tccacagggataagattagctgccg

SEQ ID NO: 1935953 - DNA, 25 bp, Homo sapien
aagtgaaacatttgcctggcagctg

SEQ ID NO: 1935954 - DNA, 25 bp, Homo sapien
agtgaaacatttgcctggcagctgg

SEQ ID NO: 1935955 - DNA, 25 bp, Homo sapien
gaagtgaaacatttgcctggcagct

SEQ ID NO: 1935956 - DNA, 25 bp, Homo sapien
gcagctggcatcaatgcagtctctc

SEQ ID NO: 1935957 - DNA, 25 bp, Homo sapien
gggtgaccttgatattcgagtgaca

SEQ ID NO: 1935958 - DNA, 25 bp, Homo sapien
tagccaagaacctaactggaaatct

SEQ ID NO: 1935959 - DNA, 25 bp, Homo sapien
tctgtcctgagtggttctctgtggc

SEQ ID NO: 1935960 - DNA, 25 bp, Homo sapien
caaacaggacccagaagtagccaag

SEQ ID NO: 1935961 - DNA, 25 bp, Homo sapien
gctctctctgatctctcttaaccag

SEQ ID NO: 1935962 - DNA, 25 bp, Homo sapien
tagaaccccattgtgaatgtggaca

SEQ ID NO: 1935963 - DNA, 25 bp, Homo sapien
gacattgttatggatgcaaatgtcc

SEQ ID NO: 1935964 - DNA, 25 bp, Homo sapien
tcttaaccaggagctctagaacccc

SEQ ID NO: 1935965 - DNA, 25 bp, Homo sapien
attttgatctctgccgtttcttttc

SEQ ID NO: 1935966 - DNA, 25 bp, Homo sapien
tgatctttctcttacttgcagtcat

SEQ ID NO: 1935967 - DNA, 25 bp, Homo sapien
ttcattttcatcgtgtatcgtcaat

SEQ ID NO: 1935968 - DNA, 25 bp, Homo sapien
catcgtgtatcgtcaattttgatct

SEQ ID NO: 1935969 - DNA, 25 bp, Homo sapien
tctgcggccggattgctgggtgaac

SEQ ID NO: 1935970 - DNA, 25 bp, Homo sapien
aaactcggcttttctgcggccggat

SEQ ID NO: 1935971 - DNA, 25 bp, Homo sapien
ccggattgctgggtgaacagagctt

SEQ ID NO: 1935972 - DNA, 25 bp, Homo sapien
attgctgggtgaacagagcttcgcg

SEQ ID NO: 1935973 - DNA, 25 bp, Homo sapien
ctcgtcgtcctcgagcaggggccgc

SEQ ID NO: 1935974 - DNA, 25 bp, Homo sapien
tcgtcctcgagcaggggccgcccgc

SEQ ID NO: 1935975 - DNA, 25 bp, Homo sapien
cgtcgtcctcgagcaggggccgccc

SEQ ID NO: 1935976 - DNA, 25 bp, Homo sapien
gcaggggccgcccgctccgggtcca

SEQ ID NO: 1935977 - DNA, 25 bp, Homo sapien
cagctgatgacagtcctgtatcaga

SEQ ID NO: 1935978 - DNA, 25 bp, Homo sapien
cagtcctgtatcagagcttggcaca

SEQ ID NO: 1935979 - DNA, 25 bp, Homo sapien
gatgacagtcctgtatcagagcttg

SEQ ID NO: 1935980 - DNA, 25 bp, Homo sapien
gacagtcctgtatcagagcttggca

SEQ ID NO: 1935981 - DNA, 25 bp, Homo sapien
cctgacaccagctatatccgttttg

SEQ ID NO: 1935982 - DNA, 25 bp, Homo sapien
ggtgtattcttgcaggtgtggagag

SEQ ID NO: 1935983 - DNA, 25 bp, Homo sapien
gagaccactggggtgtattcttgca

SEQ ID NO: 1935984 - DNA, 25 bp, Homo sapien
gcctgggccaggtagccattcctga

SEQ ID NO: 1935985 - DNA, 25 bp, Homo sapien
caggcaatggcaagatgagaatgtt

SEQ ID NO: 1935986 - DNA, 25 bp, Homo sapien
agaatgtttgcccaagcccaggaac

SEQ ID NO: 1935987 - DNA, 25 bp, Homo sapien
tgacacattctcagaaggccggcca

SEQ ID NO: 1935988 - DNA, 25 bp, Homo sapien
gggtgactgctccttaggcagctga

SEQ ID NO: 1935989 - DNA, 25 bp, Homo sapien
gatgggcctagaagatccaggagcc

SEQ ID NO: 1935990 - DNA, 25 bp, Homo sapien
aacgtcagcgttagagcagtcttgc

SEQ ID NO: 1935991 - DNA, 25 bp, Homo sapien
gacaggacaggatgatcagccctca

SEQ ID NO: 1935992 - DNA, 25 bp, Homo sapien
gcacatttacgtcgagcctgccgag

SEQ ID NO: 1935993 - DNA, 25 bp, Homo sapien
ttctccatgtggttcggcaagagga

SEQ ID NO: 1935994 - DNA, 25 bp, Homo sapien
gtggttcggcaagaggattcacttg

SEQ ID NO: 1935995 - DNA, 25 bp, Homo sapien
gagggccacaggagctcgcctacca

SEQ ID NO: 1935996 - DNA, 25 bp, Homo sapien
agggccacaggagctcgcctaccat

SEQ ID NO: 1935997 - DNA, 25 bp, Homo sapien
gggtctcgatttttcgagaactgac

SEQ ID NO: 1935998 - DNA, 25 bp, Homo sapien
acacagggtctcgatttttcgagaa

SEQ ID NO: 1935999 - DNA, 25 bp, Homo sapien
cagggtctcgatttttcgagaactg

SEQ ID NO: 1936000 - DNA, 25 bp, Homo sapien
cacagggtctcgatttttcgagaac

SEQ ID NO: 1936001 - DNA, 25 bp, Homo sapien
cttctttctccgtaaggtcttgtcg

SEQ ID NO: 1936002 - DNA, 25 bp, Homo sapien
tccagtcgtttttccttggctgact

SEQ ID NO: 1936003 - DNA, 25 bp, Homo sapien
tctccgtaaggtcttgtcgcgagtc

SEQ ID NO: 1936004 - DNA, 25 bp, Homo sapien
ccacactccagtcgtttttccttgg

SEQ ID NO: 1936005 - DNA, 25 bp, Homo sapien
ctagaggcaaccagttccttgcgta

SEQ ID NO: 1936006 - DNA, 25 bp, Homo sapien
cccaccctccttcgtcagcatgctg

SEQ ID NO: 1936007 - DNA, 25 bp, Homo sapien
gaggcaaccagttccttgcgtaccc

SEQ ID NO: 1936008 - DNA, 25 bp, Homo sapien
accccaccctccttcgtcagcatgc

SEQ ID NO: 1936009 - DNA, 25 bp, Homo sapien
tccttgtcacctaaggtcccttatg

SEQ ID NO: 1936010 - DNA, 25 bp, Homo sapien
ttgtcacctaaggtcccttatgtct

SEQ ID NO: 1936011 - DNA, 25 bp, Homo sapien
cctaaggtcccttatgtcttcattt

SEQ ID NO: 1936012 - DNA, 25 bp, Homo sapien
cacctaaggtcccttatgtcttcat

SEQ ID NO: 1936013 - DNA, 25 bp, Homo sapien
ttttaactcggtctccagagcccag

SEQ ID NO: 1936014 - DNA, 25 bp, Homo sapien
tgaccttggcgggatgcttgaacca

SEQ ID NO: 1936015 - DNA, 25 bp, Homo sapien
tggtgatcaccacccaggtcctgtg

SEQ ID NO: 1936016 - DNA, 25 bp, Homo sapien
cactcaagatgtggtgacctgtcgg

SEQ ID NO: 1936017 - DNA, 25 bp, Homo sapien
gcaaggttaatacgggctggtatac

SEQ ID NO: 1936018 - DNA, 25 bp, Homo sapien
cttttggaggaaggcgttgcaaggt

SEQ ID NO: 1936019 - DNA, 25 bp, Homo sapien
aatacgggctggtatacagggttgc

SEQ ID NO: 1936020 - DNA, 25 bp, Homo sapien
aggcgttgcaaggttaatacgggct

SEQ ID NO: 1936021 - DNA, 25 bp, Homo sapien
tgagaggagtcaagttaccacgtga

SEQ ID NO: 1936022 - DNA, 25 bp, Homo sapien
cttcaccgccagctcatgaagtctg

SEQ ID NO: 1936023 - DNA, 25 bp, Homo sapien
taccacgtgaccttgaatgaaagac

SEQ ID NO: 1936024 - DNA, 25 bp, Homo sapien
tattactgcttgtgtgatctcaccc

SEQ ID NO: 1936025 - DNA, 25 bp, Homo sapien
aatacatcctctctttttgccccat

SEQ ID NO: 1936026 - DNA, 25 bp, Homo sapien
gttcctttgcttggagggcctcctg

SEQ ID NO: 1936027 - DNA, 25 bp, Homo sapien
tgaatgatagccttcggttactctc

SEQ ID NO: 1936028 - DNA, 25 bp, Homo sapien
tgaagactatcactgattgaatgat

SEQ ID NO: 1936029 - DNA, 25 bp, Homo sapien
tgcatcatgtaagggctcagcaccc

SEQ ID NO: 1936030 - DNA, 25 bp, Homo sapien
aatgccactggctgatcggacggca

SEQ ID NO: 1936031 - DNA, 25 bp, Homo sapien
ctgatcggacggcagttctcggaag

SEQ ID NO: 1936032 - DNA, 25 bp, Homo sapien
ctgagctgctgacgaggcctcggct

SEQ ID NO: 1936033 - DNA, 25 bp, Homo sapien
gaatgaatgtacttcaagcttagca

SEQ ID NO: 1936034 - DNA, 25 bp, Homo sapien
tccacgcaagtatggtattatttac

SEQ ID NO: 1936035 - DNA, 25 bp, Homo sapien
agcacgtcccttatacactgtagga

SEQ ID NO: 1936036 - DNA, 25 bp, Homo sapien
gatagatctatgttgacctgaatga

SEQ ID NO: 1936037 - DNA, 25 bp, Homo sapien
tccacggaatagtagatcaacaggc

SEQ ID NO: 1936038 - DNA, 25 bp, Homo sapien
gaagctcgtgcataattctccaggc

SEQ ID NO: 1936039 - DNA, 25 bp, Homo sapien
taggcagggctatgtgattggttcc

SEQ ID NO: 1936040 - DNA, 25 bp, Homo sapien
gagagatgtttcgtgctcacccgtg

SEQ ID NO: 1936041 - DNA, 25 bp, Homo sapien
taatccccacacctttttatgaaga

SEQ ID NO: 1936042 - DNA, 25 bp, Homo sapien
gcaagtggagaagtagcaggttcat

SEQ ID NO: 1936043 - DNA, 25 bp, Homo sapien
catggccagcgtgaggtgcatgtgc

SEQ ID NO: 1936044 - DNA, 25 bp, Homo sapien
gatcagtcctttgcacagcagccat

SEQ ID NO: 1936045 - DNA, 25 bp, Homo sapien
tttgctctcattaaccaggtcagaa

SEQ ID NO: 1936046 - DNA, 25 bp, Homo sapien
agtgcttggccctgttttgctctca

SEQ ID NO: 1936047 - DNA, 25 bp, Homo sapien
ctagagtttgccgtccatggatctg

SEQ ID NO: 1936048 - DNA, 25 bp, Homo sapien
aggtcagaattgctggctgccgttg

SEQ ID NO: 1936049 - DNA, 25 bp, Homo sapien
gggatttgggccacatttacttggc

SEQ ID NO: 1936050 - DNA, 25 bp, Homo sapien
ttaggtaaagggagaagtgtacatg

SEQ ID NO: 1936051 - DNA, 25 bp, Homo sapien
gaagtgtacatgacaggtttctgat

SEQ ID NO: 1936052 - DNA, 25 bp, Homo sapien
tccagcattcgaccaaaatgcaggg

SEQ ID NO: 1936053 - DNA, 25 bp, Homo sapien
tctggatctttctacacttggcatg

SEQ ID NO: 1936054 - DNA, 25 bp, Homo sapien
tgtgtcttgcaacagccctattgct

SEQ ID NO: 1936055 - DNA, 25 bp, Homo sapien
tgctcccagtatgcacatcaaggtc

SEQ ID NO: 1936056 - DNA, 25 bp, Homo sapien
tcttctgctctatactctggatctt

SEQ ID NO: 1936057 - DNA, 25 bp, Homo sapien
cattgctgagtaagtgccatctgtg

SEQ ID NO: 1936058 - DNA, 25 bp, Homo sapien
gagattcattgctgagtaagtgcca

SEQ ID NO: 1936059 - DNA, 25 bp, Homo sapien
ttcattgctgagtaagtgccatctg

SEQ ID NO: 1936060 - DNA, 25 bp, Homo sapien
ttgagattcattgctgagtaagtgc

SEQ ID NO: 1936061 - DNA, 25 bp, Homo sapien
tgtgctttttcacggttgcattgcc

SEQ ID NO: 1936062 - DNA, 25 bp, Homo sapien
acggttgcattgcccttcctctgat

SEQ ID NO: 1936063 - DNA, 25 bp, Homo sapien
cggttgcattgcccttcctctgatg

SEQ ID NO: 1936064 - DNA, 25 bp, Homo sapien
tgtgtcctgacagcgtaagcagttt

SEQ ID NO: 1936065 - DNA, 25 bp, Homo sapien
ccttgtgtcctgacagcgtaagcag

SEQ ID NO: 1936066 - DNA, 25 bp, Homo sapien
tcctgacagcgtaagcagtttttgg

SEQ ID NO: 1936067 - DNA, 25 bp, Homo sapien
cctgacagcgtaagcagtttttggt

SEQ ID NO: 1936068 - DNA, 25 bp, Homo sapien
cttttcatgatcagtgcctcttcct

SEQ ID NO: 1936069 - DNA, 25 bp, Homo sapien
ttcctgctcctgtttgccctggcat

SEQ ID NO: 1936070 - DNA, 25 bp, Homo sapien
cttcctgctcctgtttgccctggca

SEQ ID NO: 1936071 - DNA, 25 bp, Homo sapien
ttcatgatcagtgcctcttcctgct

SEQ ID NO: 1936072 - DNA, 25 bp, Homo sapien
ctagtagtttagagcggggcactcg

SEQ ID NO: 1936073 - DNA, 25 bp, Homo sapien
ggggcactcgtactgacaactggat

SEQ ID NO: 1936074 - DNA, 25 bp, Homo sapien
gagccagaccttcttctagcaaggc

SEQ ID NO: 1936075 - DNA, 25 bp, Homo sapien
ccagaccttcttctagcaaggcttt

SEQ ID NO: 1936076 - DNA, 25 bp, Homo sapien
gtgactacaagcatcatcagcattc

SEQ ID NO: 1936077 - DNA, 25 bp, Homo sapien
tcgtgaatgaactgtgataagacat

SEQ ID NO: 1936078 - DNA, 25 bp, Homo sapien
tgtgactacaagcatcatcagcatt

SEQ ID NO: 1936079 - DNA, 25 bp, Homo sapien
ctccttacctccatcaagtggttct

SEQ ID NO: 1936080 - DNA, 25 bp, Homo sapien
gaatttgttctgagcgtttctttct

SEQ ID NO: 1936081 - DNA, 25 bp, Homo sapien
tctttgcaaacgctcatctttccaa

SEQ ID NO: 1936082 - DNA, 25 bp, Homo sapien
gaaatagaaatccttgtcaaatggc

SEQ ID NO: 1936083 - DNA, 25 bp, Homo sapien
agatgaaatagaaatccttgtcaaa

SEQ ID NO: 1936084 - DNA, 25 bp, Homo sapien
cccctgttggaacacgtagcagata

SEQ ID NO: 1936085 - DNA, 25 bp, Homo sapien
tgttggaacacgtagcagatatacc

SEQ ID NO: 1936086 - DNA, 25 bp, Homo sapien
cctgttggaacacgtagcagatata

SEQ ID NO: 1936087 - DNA, 25 bp, Homo sapien
tctcctccccgaaaactctcttcta

SEQ ID NO: 1936088 - DNA, 25 bp, Homo sapien
aatgcttacaaatatagcttgtttc

SEQ ID NO: 1936089 - DNA, 25 bp, Homo sapien
ttctccggtgaattatgtaaatact

SEQ ID NO: 1936090 - DNA, 25 bp, Homo sapien
ctcacagttctccggtgaattatgt

SEQ ID NO: 1936091 - DNA, 25 bp, Homo sapien
cagttctccggtgaattatgtaaat

SEQ ID NO: 1936092 - DNA, 25 bp, Homo sapien
atgcatgctggctgactcacttctt

SEQ ID NO: 1936093 - DNA, 25 bp, Homo sapien
tttccttagtcctaccccagatgtg

SEQ ID NO: 1936094 - DNA, 25 bp, Homo sapien
ctaccccagatgtggcacacagtaa

SEQ ID NO: 1936095 - DNA, 25 bp, Homo sapien
aagtatttaatgcatgctggctgac

SEQ ID NO: 1936096 - DNA, 25 bp, Homo sapien
gaggtccacatgatattgttcttta

SEQ ID NO: 1936097 - DNA, 25 bp, Homo sapien
tgctgctttgaggtccacatgatat

SEQ ID NO: 1936098 - DNA, 25 bp, Homo sapien
tgctttgaggtccacatgatattgt

SEQ ID NO: 1936099 - DNA, 25 bp, Homo sapien
ctttgaggtccacatgatattgttc

SEQ ID NO: 1936100 - DNA, 25 bp, Homo sapien
agagcaaagtacaatgaattctcac

SEQ ID NO: 1936101 - DNA, 25 bp, Homo sapien
ccgactatggacatccaccactaga

SEQ ID NO: 1936102 - DNA, 25 bp, Homo sapien
ttatcacctaaagcccaacattagg

SEQ ID NO: 1936103 - DNA, 25 bp, Homo sapien
cactagaatggtggatgatttgtta

SEQ ID NO: 1936104 - DNA, 25 bp, Homo sapien
tctgactgtctctgcactgggagtc

SEQ ID NO: 1936105 - DNA, 25 bp, Homo sapien
ggtagaaaatggatctgactgtctc

SEQ ID NO: 1936106 - DNA, 25 bp, Homo sapien
aaatggatctgactgtctctgcact

SEQ ID NO: 1936107 - DNA, 25 bp, Homo sapien
agaaaatggatctgactgtctctgc

SEQ ID NO: 1936108 - DNA, 25 bp, Homo sapien
ggagataagtcttggctgtcacacc

SEQ ID NO: 1936109 - DNA, 25 bp, Homo sapien
ggctgtcacacctggaccgcctgct

SEQ ID NO: 1936110 - DNA, 25 bp, Homo sapien
ctggagataagtcttggctgtcaca

SEQ ID NO: 1936111 - DNA, 25 bp, Homo sapien
gagataagtcttggctgtcacacct

SEQ ID NO: 1936112 - DNA, 25 bp, Homo sapien
ctggggtctaccttcacatctgtcc

SEQ ID NO: 1936113 - DNA, 25 bp, Homo sapien
tgtgtttgaaatccgcagggtgaca

SEQ ID NO: 1936114 - DNA, 25 bp, Homo sapien
tttgaaatccgcagggtgacatgtc

SEQ ID NO: 1936115 - DNA, 25 bp, Homo sapien
tcttagatgtgtttgaaatccgcag

SEQ ID NO: 1936116 - DNA, 25 bp, Homo sapien
tagatgtgtttgaaatccgcagggt

SEQ ID NO: 1936117 - DNA, 25 bp, Homo sapien
tgtctgtaccattcttatgagtgtt

SEQ ID NO: 1936118 - DNA, 25 bp, Homo sapien
ctgaaaactgtgtcagcaatgtctg

SEQ ID NO: 1936119 - DNA, 25 bp, Homo sapien
gcaatgtctgtaccattcttatgag

SEQ ID NO: 1936120 - DNA, 25 bp, Homo sapien
tgtgtcagcaatgtctgtaccattc

SEQ ID NO: 1936121 - DNA, 25 bp, Homo sapien
ccttggggaccctgtatgactgcca

SEQ ID NO: 1936122 - DNA, 25 bp, Homo sapien
tgtggccacggtctctccacagata

SEQ ID NO: 1936123 - DNA, 25 bp, Homo sapien
gattgtccgggatactacatgtggc

SEQ ID NO: 1936124 - DNA, 25 bp, Homo sapien
cttctccatgggatggatctcccag

SEQ ID NO: 1936125 - DNA, 25 bp, Homo sapien
cagggtgatcattatcctatcatgg

SEQ ID NO: 1936126 - DNA, 25 bp, Homo sapien
cattatcctatcatggatgagttga

SEQ ID NO: 1936127 - DNA, 25 bp, Homo sapien
tcccagcatgaacagggtgatcatt

SEQ ID NO: 1936128 - DNA, 25 bp, Homo sapien
gcatgaacagggtgatcattatcct

SEQ ID NO: 1936129 - DNA, 25 bp, Homo sapien
cagactccgggagttgttgtatatg

SEQ ID NO: 1936130 - DNA, 25 bp, Homo sapien
tcagactccgggagttgttgtatat

SEQ ID NO: 1936131 - DNA, 25 bp, Homo sapien
agactccgggagttgttgtatatga

SEQ ID NO: 1936132 - DNA, 25 bp, Homo sapien
tattcagctacgacattcagcgacc

SEQ ID NO: 1936133 - DNA, 25 bp, Homo sapien
gatacttgggatcagattcgagcag

SEQ ID NO: 1936134 - DNA, 25 bp, Homo sapien
ggtgtaagcttcaaagtcaaagagc

SEQ ID NO: 1936135 - DNA, 25 bp, Homo sapien
gtcttccctggcagtatcttggttg

SEQ ID NO: 1936136 - DNA, 25 bp, Homo sapien
gtgctcggtcgcctgcagtttgttc

SEQ ID NO: 1936137 - DNA, 25 bp, Homo sapien
tttccgtgctcggtcgcctgcagtt

SEQ ID NO: 1936138 - DNA, 25 bp, Homo sapien
tggccctgtacagaggtatccgcat

SEQ ID NO: 1936139 - DNA, 25 bp, Homo sapien
ttctcattggccctgtacagaggta

SEQ ID NO: 1936140 - DNA, 25 bp, Homo sapien
caagatacaaatgtgctgcctgcag

SEQ ID NO: 1936141 - DNA, 25 bp, Homo sapien
gctattttccatggagtcacaggca

SEQ ID NO: 1936142 - DNA, 25 bp, Homo sapien
gcagatggcatccatagatacagta

SEQ ID NO: 1936143 - DNA, 25 bp, Homo sapien
taacagaacatggaaagttcccact

SEQ ID NO: 1936144 - DNA, 25 bp, Homo sapien
tagcaatgcacttgaacaaacctgg

SEQ ID NO: 1936145 - DNA, 25 bp, Homo sapien
tgaactgtggctagcaaaatggaat

SEQ ID NO: 1936146 - DNA, 25 bp, Homo sapien
ggccgagtaacgcagagtcaataaa

SEQ ID NO: 1936147 - DNA, 25 bp, Homo sapien
gattaactgtgggttgcatgcctgt

SEQ ID NO: 1936148 - DNA, 25 bp, Homo sapien
tatttgtgccacttgccaactcggg

SEQ ID NO: 1936149 - DNA, 25 bp, Homo sapien
cagaatgattcaagggtcaaaccac

SEQ ID NO: 1936150 - DNA, 25 bp, Homo sapien
cattatgttgtttagagagcctcca

SEQ ID NO: 1936151 - DNA, 25 bp, Homo sapien
acaatgagaagttgccactgcaggg

SEQ ID NO: 1936152 - DNA, 25 bp, Homo sapien
tccagtgagtgatctagttctacgt

SEQ ID NO: 1936153 - DNA, 25 bp, Homo sapien
tgagtgtaaataactggaactgtac

SEQ ID NO: 1936154 - DNA, 25 bp, Homo sapien
tattagaggatactttgctgtgcac

SEQ ID NO: 1936155 - DNA, 25 bp, Homo sapien
ggaactgtacactgattaacatgac

SEQ ID NO: 1936156 - DNA, 25 bp, Homo sapien
gatcaagtctgatgcagtctataaa

SEQ ID NO: 1936157 - DNA, 25 bp, Homo sapien
cagcctccgttgctacggcaaccga

SEQ ID NO: 1936158 - DNA, 25 bp, Homo sapien
gaacctgaaacttggcgaccccagc

SEQ ID NO: 1936159 - DNA, 25 bp, Homo sapien
tataacctgatcaagtctgatgcag

SEQ ID NO: 1936160 - DNA, 25 bp, Homo sapien
caaggaccttgacgaagccgagcgg

SEQ ID NO: 1936161 - DNA, 25 bp, Homo sapien
ctcaaggaccttgacgaagccgagc

SEQ ID NO: 1936162 - DNA, 25 bp, Homo sapien
accttgacgaagccgagcgggttga

SEQ ID NO: 1936163 - DNA, 25 bp, Homo sapien
tgacgaagccgagcgggttgaggtt

SEQ ID NO: 1936164 - DNA, 25 bp, Homo sapien
ggataaggctaccagataattccta

SEQ ID NO: 1936165 - DNA, 25 bp, Homo sapien
tgaaatacccatccacgcatgtagg

SEQ ID NO: 1936166 - DNA, 25 bp, Homo sapien
tgtaagacagcacctggcaccaagt

SEQ ID NO: 1936167 - DNA, 25 bp, Homo sapien
gaatgcttactccttgatttcagag

SEQ ID NO: 1936168 - DNA, 25 bp, Homo sapien
cataagacaatggagctttaaaaaa

SEQ ID NO: 1936169 - DNA, 25 bp, Homo sapien
atagttacattgtaaaacgtaatct

SEQ ID NO: 1936170 - DNA, 25 bp, Homo sapien
ccaaattcaagagattatagttaca

SEQ ID NO: 1936171 - DNA, 25 bp, Homo sapien
agatatatgtttacggaaaagcctc

SEQ ID NO: 1936172 - DNA, 25 bp, Homo sapien
aaaatgcctttgactgacgcctgga

SEQ ID NO: 1936173 - DNA, 25 bp, Homo sapien
tgaacactcaggacagattggcaca

SEQ ID NO: 1936174 - DNA, 25 bp, Homo sapien
gattggcacaatacatgcagttcga

SEQ ID NO: 1936175 - DNA, 25 bp, Homo sapien
tagttcccttactaggcagtgccac

SEQ ID NO: 1936176 - DNA, 25 bp, Homo sapien
atctgaatgcatgatggaaatgagg

SEQ ID NO: 1936177 - DNA, 25 bp, Homo sapien
gctcacagtgcccatggcaagtggg

SEQ ID NO: 1936178 - DNA, 25 bp, Homo sapien
gagaacacatgagggatggggggca

SEQ ID NO: 1936179 - DNA, 25 bp, Homo sapien
ccagctgagaacacatgagggatgg

SEQ ID NO: 1936180 - DNA, 25 bp, Homo sapien
ggcaggtattgttaggttcacagca

SEQ ID NO: 1936181 - DNA, 25 bp, Homo sapien
gcaagagtgctattcccaaaggtat

SEQ ID NO: 1936182 - DNA, 25 bp, Homo sapien
ccaaaggtattttgggtagcaggag

SEQ ID NO: 1936183 - DNA, 25 bp, Homo sapien
cccagggcaagagtgctattcccaa

SEQ ID NO: 1936184 - DNA, 25 bp, Homo sapien
aggcagctccttgggcaggtttact

SEQ ID NO: 1936185 - DNA, 25 bp, Homo sapien
cagctccttgggcaggtttacttta

SEQ ID NO: 1936186 - DNA, 25 bp, Homo sapien
gcaggcagctccttgggcaggttta

SEQ ID NO: 1936187 - DNA, 25 bp, Homo sapien
ctgcaggcagctccttgggcaggtt

SEQ ID NO: 1936188 - DNA, 25 bp, Homo sapien
tgggcagaagctcctaaagggaaag

SEQ ID NO: 1936189 - DNA, 25 bp, Homo sapien
gaggcaagtcctcaaacaaactgat

SEQ ID NO: 1936190 - DNA, 25 bp, Homo sapien
agaaggtctccggtctgcaagctct

SEQ ID NO: 1936191 - DNA, 25 bp, Homo sapien
cgggtgaggtgatccttgcgcccaa

SEQ ID NO: 1936192 - DNA, 25 bp, Homo sapien
tgagcacactggtgagatttctggg

SEQ ID NO: 1936193 - DNA, 25 bp, Homo sapien
tggcgtcgcacatccttccgggtgt

SEQ ID NO: 1936194 - DNA, 25 bp, Homo sapien
cagcatggtgttgtacttcttccca

SEQ ID NO: 1936195 - DNA, 25 bp, Homo sapien
ccggttgaacgtcttctcacagtga

SEQ ID NO: 1936196 - DNA, 25 bp, Homo sapien
tgtagcttcatatccctcagggcag

SEQ ID NO: 1936197 - DNA, 25 bp, Homo sapien
caatagcagccgttgagtggaggcc

SEQ ID NO: 1936198 - DNA, 25 bp, Homo sapien
catagctcttgggtcagtttgtgcc

SEQ ID NO: 1936199 - DNA, 25 bp, Homo sapien
cccagtactggtgaacaggatccca

SEQ ID NO: 1936200 - DNA, 25 bp, Homo sapien
cttgtacggccgctccctggagtgg

SEQ ID NO: 1936201 - DNA, 25 bp, Homo sapien
ccctggagtgggaataattgtgaat

SEQ ID NO: 1936202 - DNA, 25 bp, Homo sapien
attgtgaatcgtgaacttctccagg

SEQ ID NO: 1936203 - DNA, 25 bp, Homo sapien
tctccagggtgaggaacgtcttgcc

SEQ ID NO: 1936204 - DNA, 25 bp, Homo sapien
cagctgaactccagaccacgggaga

SEQ ID NO: 1936205 - DNA, 25 bp, Homo sapien
ggtaatctgcatcactatagctggg

SEQ ID NO: 1936206 - DNA, 25 bp, Homo sapien
gtttacatgcagtctcaagctgagg

SEQ ID NO: 1936207 - DNA, 25 bp, Homo sapien
caaacagaacgatggtgctgggcac

SEQ ID NO: 1936208 - DNA, 25 bp, Homo sapien
gccacctccaggagatgggcctact

SEQ ID NO: 1936209 - DNA, 25 bp, Homo sapien
tcaaacccaaatcattatcatcctt

SEQ ID NO: 1936210 - DNA, 25 bp, Homo sapien
tggccctaccctggagggcccatcc

SEQ ID NO: 1936211 - DNA, 25 bp, Homo sapien
tcaaacccaacttgtctcaaaccca

SEQ ID NO: 1936212 - DNA, 25 bp, Homo sapien
gcaggtttcaaatcggcctctacct

SEQ ID NO: 1936213 - DNA, 25 bp, Homo sapien
tgcatcatgaacaatactccactta

SEQ ID NO: 1936214 - DNA, 25 bp, Homo sapien
tgtctcctcctagcttcactctcag

SEQ ID NO: 1936215 - DNA, 25 bp, Homo sapien
aattggccatcattggaggaacctg

SEQ ID NO: 1936216 - DNA, 25 bp, Homo sapien
cagagttcgcggtaccaagcaaata

SEQ ID NO: 1936217 - DNA, 25 bp, Homo sapien
caattgcagtgagtctttaaagccc

SEQ ID NO: 1936218 - DNA, 25 bp, Homo sapien
taccaccctgtgctattctagagag

SEQ ID NO: 1936219 - DNA, 25 bp, Homo sapien
tatagcattatgtagcacacggaca

SEQ ID NO: 1936220 - DNA, 25 bp, Homo sapien
gaaacgtgaaagctgactcgggcac

SEQ ID NO: 1936221 - DNA, 25 bp, Homo sapien
ggagtcctcggccagcaccttggca

SEQ ID NO: 1936222 - DNA, 25 bp, Homo sapien
actcgggcacttttggtcagcgcta

SEQ ID NO: 1936223 - DNA, 25 bp, Homo sapien
cacaccttctttgtgacggctgtga

SEQ ID NO: 1936224 - DNA, 25 bp, Homo sapien
tatctgtgtcgagtttcagtttcct

SEQ ID NO: 1936225 - DNA, 25 bp, Homo sapien
catgttatctgtgtcgagtttcagt

SEQ ID NO: 1936226 - DNA, 25 bp, Homo sapien
ccatgttatctgtgtcgagtttcag

SEQ ID NO: 1936227 - DNA, 25 bp, Homo sapien
tgttatctgtgtcgagtttcagttt

SEQ ID NO: 1936228 - DNA, 25 bp, Homo sapien
tgatgcgagtcattctgttctgtga

SEQ ID NO: 1936229 - DNA, 25 bp, Homo sapien
agagcaatggtcctgatgcgagtca

SEQ ID NO: 1936230 - DNA, 25 bp, Homo sapien
tagaaattgcatttgagtcttaaat

SEQ ID NO: 1936231 - DNA, 25 bp, Homo sapien
tctgtgacttgacatagaaattgca

SEQ ID NO: 1936232 - DNA, 25 bp, Homo sapien
cttgaatttatgtggagatgcagtg

SEQ ID NO: 1936233 - DNA, 25 bp, Homo sapien
cagcctgtgattgtgagcctcaaag

SEQ ID NO: 1936234 - DNA, 25 bp, Homo sapien
tagagaatgccaataaaatgctgtg

SEQ ID NO: 1936235 - DNA, 25 bp, Homo sapien
tctatttagtcaagtccagccacaa

SEQ ID NO: 1936236 - DNA, 25 bp, Homo sapien
tggtaactctggcagggacgtataa

SEQ ID NO: 1936237 - DNA, 25 bp, Homo sapien
ctctggcagggacgtataagacatg

SEQ ID NO: 1936238 - DNA, 25 bp, Homo sapien
tgatggtaactctggcagggacgta

SEQ ID NO: 1936239 - DNA, 25 bp, Homo sapien
caatggggaccgatcagaagcagtg

SEQ ID NO: 1936240 - DNA, 25 bp, Homo sapien
acaggcctgcacaaggagagagggc

SEQ ID NO: 1936241 - DNA, 25 bp, Homo sapien
catttaggcttctgccagatctcag

SEQ ID NO: 1936242 - DNA, 25 bp, Homo sapien
taatgagatcatttaggcttctgcc

SEQ ID NO: 1936243 - DNA, 25 bp, Homo sapien
tggtgggctggataatgagatcatt

SEQ ID NO: 1936244 - DNA, 25 bp, Homo sapien
gacacaggccgtactttattagaca

SEQ ID NO: 1936245 - DNA, 25 bp, Homo sapien
caaatcggattaccctagacacaaa

SEQ ID NO: 1936246 - DNA, 25 bp, Homo sapien
tgagatgaacccaagaccaaatcgg

SEQ ID NO: 1936247 - DNA, 25 bp, Homo sapien
caagctcgatgtagaaatatccaga

SEQ ID NO: 1936248 - DNA, 25 bp, Homo sapien
ttccaagcgacaacactggcttttc

SEQ ID NO: 1936249 - DNA, 25 bp, Homo sapien
gagacaaggcaagttttccaagcga

SEQ ID NO: 1936250 - DNA, 25 bp, Homo sapien
aatgtgaactctctgagtagctgtc

SEQ ID NO: 1936251 - DNA, 25 bp, Homo sapien
cttaaaaagagtggaacactagcaa

SEQ ID NO: 1936252 - DNA, 25 bp, Homo sapien
gcagctttcatgtgctgctctgcgc

SEQ ID NO: 1936253 - DNA, 25 bp, Homo sapien
tgctcacaataagcctcaatttccc

SEQ ID NO: 1936254 - DNA, 25 bp, Homo sapien
cgcaggcagctttcatgtgctgctc

SEQ ID NO: 1936255 - DNA, 25 bp, Homo sapien
cggaggccggcaccttgctcacaat

SEQ ID NO: 1936256 - DNA, 25 bp, Homo sapien
ttgccttgcaatcatactgtccacc

SEQ ID NO: 1936257 - DNA, 25 bp, Homo sapien
ctgcttgccttgcaatcatactgtc

SEQ ID NO: 1936258 - DNA, 25 bp, Homo sapien
tgccttgcaatcatactgtccaccc

SEQ ID NO: 1936259 - DNA, 25 bp, Homo sapien
gcttgccttgcaatcatactgtcca

SEQ ID NO: 1936260 - DNA, 25 bp, Homo sapien
gacaaggcctgctgtgttagccaca

SEQ ID NO: 1936261 - DNA, 25 bp, Homo sapien
acaaggcctgctgtgttagccacac

SEQ ID NO: 1936262 - DNA, 25 bp, Homo sapien
acagacaaggcctgctgtgttagcc

SEQ ID NO: 1936263 - DNA, 25 bp, Homo sapien
ctgagacagacaaggcctgctgtgt

SEQ ID NO: 1936264 - DNA, 25 bp, Homo sapien
tcctagtcttctaatgtcaggcaca

SEQ ID NO: 1936265 - DNA, 25 bp, Homo sapien
ctgttcgcagcccatggactcgcca

SEQ ID NO: 1936266 - DNA, 25 bp, Homo sapien
ggctagcactcctagtcttctaatg

SEQ ID NO: 1936267 - DNA, 25 bp, Homo sapien
aatacttcggcagacacattccagg

SEQ ID NO: 1936268 - DNA, 25 bp, Homo sapien
cagaagtttgtctgaagattcaaac

SEQ ID NO: 1936269 - DNA, 25 bp, Homo sapien
agggaacatctgctgcgaggcaggg

SEQ ID NO: 1936270 - DNA, 25 bp, Homo sapien
acatctgctgcgaggcagggaccga

SEQ ID NO: 1936271 - DNA, 25 bp, Homo sapien
cccagaagtttgtctgaagattcaa

SEQ ID NO: 1936272 - DNA, 25 bp, Homo sapien
ccaggaaagggtgcacataacgtga

SEQ ID NO: 1936273 - DNA, 25 bp, Homo sapien
taacgtgaggtacgcaaaccaggca

SEQ ID NO: 1936274 - DNA, 25 bp, Homo sapien
acttctagagcacacacacgactgg

SEQ ID NO: 1936275 - DNA, 25 bp, Homo sapien
gctttgtgccactgaaccctgatga

SEQ ID NO: 1936276 - DNA, 25 bp, Homo sapien
tgggcaaccctcaaacactgggaag

SEQ ID NO: 1936277 - DNA, 25 bp, Homo sapien
taatgaactggtttagccgcctgct

SEQ ID NO: 1936278 - DNA, 25 bp, Homo sapien
taaggaggtatgtcagtccccagca

SEQ ID NO: 1936279 - DNA, 25 bp, Homo sapien
tccagggtgcgtgtcaaaagtcaac

SEQ ID NO: 1936280 - DNA, 25 bp, Homo sapien
actcctctgattcctatgcaaatac

SEQ ID NO: 1936281 - DNA, 25 bp, Homo sapien
aactcctctgattcctatgcaaata

SEQ ID NO: 1936282 - DNA, 25 bp, Homo sapien
taactcctctgattcctatgcaaat

SEQ ID NO: 1936283 - DNA, 25 bp, Homo sapien
tcccagggtagcatgctggcacgga

SEQ ID NO: 1936284 - DNA, 25 bp, Homo sapien
gtttcccaagcctggatgtgcctcc

SEQ ID NO: 1936285 - DNA, 25 bp, Homo sapien
cacggagcgggatggctgatttcca

SEQ ID NO: 1936286 - DNA, 25 bp, Homo sapien
aatgattgcatgctggaaactgaga

SEQ ID NO: 1936287 - DNA, 25 bp, Homo sapien
tgaaatcagtcacgttatccaaaca

SEQ ID NO: 1936288 - DNA, 25 bp, Homo sapien
aattccacttgagttccgtggctga

SEQ ID NO: 1936289 - DNA, 25 bp, Homo sapien
gcagcaccaaatgggcacgtctaag

SEQ ID NO: 1936290 - DNA, 25 bp, Homo sapien
gggtccgggctttgaaatcagtcac

SEQ ID NO: 1936291 - DNA, 25 bp, Homo sapien
tgccggccattacgcagagactaga

SEQ ID NO: 1936292 - DNA, 25 bp, Homo sapien
gctgctctggtctcacaagggtcta

SEQ ID NO: 1936293 - DNA, 25 bp, Homo sapien
tagatacgccaaagatatgccggcc

SEQ ID NO: 1936294 - DNA, 25 bp, Homo sapien
caagaagataactcacaaggcaagg

SEQ ID NO: 1936295 - DNA, 25 bp, Homo sapien
gctagaggcagatccatattggttc

SEQ ID NO: 1936296 - DNA, 25 bp, Homo sapien
gagatatttccgcatgctagaggca

SEQ ID NO: 1936297 - DNA, 25 bp, Homo sapien
caggctgattcttctaacatgcaaa

SEQ ID NO: 1936298 - DNA, 25 bp, Homo sapien
aacgagttcactctattggcccaaa

SEQ ID NO: 1936299 - DNA, 25 bp, Homo sapien
ctgtttggaattcttcaatggtccc

SEQ ID NO: 1936300 - DNA, 25 bp, Homo sapien
aatggtcccattaggtttctgtcga

SEQ ID NO: 1936301 - DNA, 25 bp, Homo sapien
tgtttggaattcttcaatggtccca

SEQ ID NO: 1936302 - DNA, 25 bp, Homo sapien
ttcaatggtcccattaggtttctgt

SEQ ID NO: 1936303 - DNA, 25 bp, Homo sapien
tcaggagagcaatatgttcaggctt

SEQ ID NO: 1936304 - DNA, 25 bp, Homo sapien
tgttcaggcttgtgttatagaaaga

SEQ ID NO: 1936305 - DNA, 25 bp, Homo sapien
tgttaatcaggagagcaatatgttc

SEQ ID NO: 1936306 - DNA, 25 bp, Homo sapien
ctgaaagttgttaatcaggagagca

SEQ ID NO: 1936307 - DNA, 25 bp, Homo sapien
tgggcctggcatgaactagtcctac

SEQ ID NO: 1936308 - DNA, 25 bp, Homo sapien
cgttacacgtgtacatacagaggca

SEQ ID NO: 1936309 - DNA, 25 bp, Homo sapien
gatgggtctaagttcgaatgctggc

SEQ ID NO: 1936310 - DNA, 25 bp, Homo sapien
tcagtctccgtcaccataaaatggg

SEQ ID NO: 1936311 - DNA, 25 bp, Homo sapien
tagcaatgatcgttcttagcgtgtc

SEQ ID NO: 1936312 - DNA, 25 bp, Homo sapien
taacagaaagagatcacgaagtttc

SEQ ID NO: 1936313 - DNA, 25 bp, Homo sapien
tcttttctgggacataagcccctct

SEQ ID NO: 1936314 - DNA, 25 bp, Homo sapien
tctagtgagcaagtcatgataagta

SEQ ID NO: 1936315 - DNA, 25 bp, Homo sapien
tctggtttgtgctgtaatgcgagga

SEQ ID NO: 1936316 - DNA, 25 bp, Homo sapien
gaatacagagccatgactgatggca

SEQ ID NO: 1936317 - DNA, 25 bp, Homo sapien
agccatgactgatggcaggagcact

SEQ ID NO: 1936318 - DNA, 25 bp, Homo sapien
gagggttccgcatagacgtatttac

SEQ ID NO: 1936319 - DNA, 25 bp, Homo sapien
tttcagatgtgacacgaggcagcag

SEQ ID NO: 1936320 - DNA, 25 bp, Homo sapien
gcagcagccacattagacgtgacag

SEQ ID NO: 1936321 - DNA, 25 bp, Homo sapien
ggcagcagccacattagacgtgaca

SEQ ID NO: 1936322 - DNA, 25 bp, Homo sapien
gtttcagatgtgacacgaggcagca

SEQ ID NO: 1936323 - DNA, 25 bp, Homo sapien
ggttaagaccacagtatggtgccag

SEQ ID NO: 1936324 - DNA, 25 bp, Homo sapien
cttgacactgtctggtaagcaggga

SEQ ID NO: 1936325 - DNA, 25 bp, Homo sapien
tggagccacttagagacctcatgca

SEQ ID NO: 1936326 - DNA, 25 bp, Homo sapien
ggagataacgattacacccacatca

SEQ ID NO: 1936327 - DNA, 25 bp, Homo sapien
cattactgattagcagtgcaatcca

SEQ ID NO: 1936328 - DNA, 25 bp, Homo sapien
ggcataaacttttaggtataagctg

SEQ ID NO: 1936329 - DNA, 25 bp, Homo sapien
caaaaaggctgctgttgtatgtgtt

SEQ ID NO: 1936330 - DNA, 25 bp, Homo sapien
cacatttgtgccttgaccaaaaagg

SEQ ID NO: 1936331 - DNA, 25 bp, Homo sapien
aatcactggcttgagtggaacgtag

SEQ ID NO: 1936332 - DNA, 25 bp, Homo sapien
gtggaacgtagcttccaagttcaaa

SEQ ID NO: 1936333 - DNA, 25 bp, Homo sapien
tataatgaatgaaagatggatttta

SEQ ID NO: 1936334 - DNA, 25 bp, Homo sapien
tgtaatattcccatgcaatacacac

SEQ ID NO: 1936335 - DNA, 25 bp, Homo sapien
taatgtaagcatgagaaactcccgt

SEQ ID NO: 1936336 - DNA, 25 bp, Homo sapien
tcacaaagctagttaggcagagcca

SEQ ID NO: 1936337 - DNA, 25 bp, Homo sapien
ggttttcacaagaaggtccattcca

SEQ ID NO: 1936338 - DNA, 25 bp, Homo sapien
taaacagaggcagtgaattccccac

SEQ ID NO: 1936339 - DNA, 25 bp, Homo sapien
acttaaagatggagttagtttgcat

SEQ ID NO: 1936340 - DNA, 25 bp, Homo sapien
aaagatggagttagtttgcataaat

SEQ ID NO: 1936341 - DNA, 25 bp, Homo sapien
taaagatggagttagtttgcataaa

SEQ ID NO: 1936342 - DNA, 25 bp, Homo sapien
cttaaagatggagttagtttgcata

SEQ ID NO: 1936343 - DNA, 25 bp, Homo sapien
ctacaggtatagtctgtatacctga

SEQ ID NO: 1936344 - DNA, 25 bp, Homo sapien
caggtatagtctgtatacctgagat

SEQ ID NO: 1936345 - DNA, 25 bp, Homo sapien
ggactacaggtatagtctgtatacc

SEQ ID NO: 1936346 - DNA, 25 bp, Homo sapien
gactacaggtatagtctgtatacct

SEQ ID NO: 1936347 - DNA, 25 bp, Homo sapien
tatctattgaaggaagggtgctgaa

SEQ ID NO: 1936348 - DNA, 25 bp, Homo sapien
tgtttcagctgtatcccacatggtt

SEQ ID NO: 1936349 - DNA, 25 bp, Homo sapien
tgtgcccctgggttatttggaagtg

SEQ ID NO: 1936350 - DNA, 25 bp, Homo sapien
tccatgggattagcagaataacacc

SEQ ID NO: 1936351 - DNA, 25 bp, Homo sapien
gataagctgtgtttgggttctgcct

SEQ ID NO: 1936352 - DNA, 25 bp, Homo sapien
tcatctcaacctaggataagctgtg

SEQ ID NO: 1936353 - DNA, 25 bp, Homo sapien
tctctcagggttcactgtctcgtgc

SEQ ID NO: 1936354 - DNA, 25 bp, Homo sapien
tgtaactaactctctcttctctggt

SEQ ID NO: 1936355 - DNA, 25 bp, Homo sapien
aagccaatcacgatgtttatgaatc

SEQ ID NO: 1936356 - DNA, 25 bp, Homo sapien
caatcacgatgtttatgaatcaggc

SEQ ID NO: 1936357 - DNA, 25 bp, Homo sapien
aaaagccaatcacgatgtttatgaa

SEQ ID NO: 1936358 - DNA, 25 bp, Homo sapien
gccaatcacgatgtttatgaatcag

SEQ ID NO: 1936359 - DNA, 25 bp, Homo sapien
taaaagaggctttactcagtctccc

SEQ ID NO: 1936360 - DNA, 25 bp, Homo sapien
gagatcactgtaggttcatatgcaa

SEQ ID NO: 1936361 - DNA, 25 bp, Homo sapien
tagcatggcatagatcactcatttc

SEQ ID NO: 1936362 - DNA, 25 bp, Homo sapien
cgcaaaaagtaagggagtcagaaat

SEQ ID NO: 1936363 - DNA, 25 bp, Homo sapien
tccaaccacatgagaataggtggct

SEQ ID NO: 1936364 - DNA, 25 bp, Homo sapien
aaaaggaccttgctttgcctatgaa

SEQ ID NO: 1936365 - DNA, 25 bp, Homo sapien
gtaccttcccttcaagatatgcaag

SEQ ID NO: 1936366 - DNA, 25 bp, Homo sapien
tttcctcccttgtgtcatgccgctg

SEQ ID NO: 1936367 - DNA, 25 bp, Homo sapien
ggtattcagacattgcactcgctca

SEQ ID NO: 1936368 - DNA, 25 bp, Homo sapien
tgtacctctagaacatggcactggg

SEQ ID NO: 1936369 - DNA, 25 bp, Homo sapien
tgtgcttatcccataacctgtctgg

SEQ ID NO: 1936370 - DNA, 25 bp, Homo sapien
tgagtggagctctgccttaggatcc

SEQ ID NO: 1936371 - DNA, 25 bp, Homo sapien
taactgtctgatattgggaaaggct

SEQ ID NO: 1936372 - DNA, 25 bp, Homo sapien
taggtgcgaaccattttagtcaaag

SEQ ID NO: 1936373 - DNA, 25 bp, Homo sapien
gatagaaccatcacaaagagcaggc

SEQ ID NO: 1936374 - DNA, 25 bp, Homo sapien
tgtatgcacgtatcaagctaccctt

SEQ ID NO: 1936375 - DNA, 25 bp, Homo sapien
tgtcatcatgcaatcacactccagc

SEQ ID NO: 1936376 - DNA, 25 bp, Homo sapien
cacagcaggtctatttgtaagaacc

SEQ ID NO: 1936377 - DNA, 25 bp, Homo sapien
aaattgtggtaatggagtcctactc

SEQ ID NO: 1936378 - DNA, 25 bp, Homo sapien
agaatagacaaaacagggaggctca

SEQ ID NO: 1936379 - DNA, 25 bp, Homo sapien
tagcaagcgcacaaaatacaagatc

SEQ ID NO: 1936380 - DNA, 25 bp, Homo sapien
tgaacaatgtgtaagtcctctatac

SEQ ID NO: 1936381 - DNA, 25 bp, Homo sapien
tgcatactgccaaaactataagtga

SEQ ID NO: 1936382 - DNA, 25 bp, Homo sapien
gtttccatacactaggcaagatgtt

SEQ ID NO: 1936383 - DNA, 25 bp, Homo sapien
taatcacagatccaacagctaaaac

SEQ ID NO: 1936384 - DNA, 25 bp, Homo sapien
taattagtccaagtggaaagaacag

SEQ ID NO: 1936385 - DNA, 25 bp, Homo sapien
ggagggtttacaataccatgtcaag

SEQ ID NO: 1936386 - DNA, 25 bp, Homo sapien
catttattaacaaagtccccacgca

SEQ ID NO: 1936387 - DNA, 25 bp, Homo sapien
taaataggcaaacttcagggtagaa

SEQ ID NO: 1936388 - DNA, 25 bp, Homo sapien
aaaattcctgcaaacatatacccaa

SEQ ID NO: 1936389 - DNA, 25 bp, Homo sapien
aagagaataaataggcaaacttcag

SEQ ID NO: 1936390 - DNA, 25 bp, Homo sapien
ttcctgcaaacatatacccaagaaa

SEQ ID NO: 1936391 - DNA, 25 bp, Homo sapien
ctcttgactggctggaattatagac

SEQ ID NO: 1936392 - DNA, 25 bp, Homo sapien
taagaataacagacggagagcccta

SEQ ID NO: 1936393 - DNA, 25 bp, Homo sapien
tcaggaaacacggacatcggacgtc

SEQ ID NO: 1936394 - DNA, 25 bp, Homo sapien
ttaaggatgaatacccaggcgtgca

SEQ ID NO: 1936395 - DNA, 25 bp, Homo sapien
tcataccagataggcgcgaacgcct

SEQ ID NO: 1936396 - DNA, 25 bp, Homo sapien
cgacgacccccggagctcaggcgag

SEQ ID NO: 1936397 - DNA, 25 bp, Homo sapien
ccccggagctcaggcgaggccgctc

SEQ ID NO: 1936398 - DNA, 25 bp, Homo sapien
acgacccccggagctcaggcgaggc

SEQ ID NO: 1936399 - DNA, 25 bp, Homo sapien
tgcggggcgacgacccccggagctc

SEQ ID NO: 1936400 - DNA, 25 bp, Homo sapien
gacagatgctgggacgctgcaatag

SEQ ID NO: 1936401 - DNA, 25 bp, Homo sapien
acgccccagccgtgtctaaatcaag

SEQ ID NO: 1936402 - DNA, 25 bp, Homo sapien
tcacacatgagaaacgcgacagatg

SEQ ID NO: 1936403 - DNA, 25 bp, Homo sapien
taccgacgggctgaatgacaaatgg

SEQ ID NO: 1936404 - DNA, 25 bp, Homo sapien
actggagtgggctggtgagaaactt

SEQ ID NO: 1936405 - DNA, 25 bp, Homo sapien
aagaaacgcagttcagggatcactg

SEQ ID NO: 1936406 - DNA, 25 bp, Homo sapien
caaagaaacgcagttcagggatcac

SEQ ID NO: 1936407 - DNA, 25 bp, Homo sapien
ggcaaagaaacgcagttcagggatc

SEQ ID NO: 1936408 - DNA, 25 bp, Homo sapien
tgttcgacagagaagaaagcttacc

SEQ ID NO: 1936409 - DNA, 25 bp, Homo sapien
aaatgtctaatgagcacggagaggc

SEQ ID NO: 1936410 - DNA, 25 bp, Homo sapien
ctagcttcttgttgccctgggtgcc

SEQ ID NO: 1936411 - DNA, 25 bp, Homo sapien
taaggaagcagactcaaaggtcaca

SEQ ID NO: 1936412 - DNA, 25 bp, Homo sapien
gtggcccactgggtcagctccggcc

SEQ ID NO: 1936413 - DNA, 25 bp, Homo sapien
cccgcttggaaagttctggagtccg

SEQ ID NO: 1936414 - DNA, 25 bp, Homo sapien
gagtccggagcccgtggcccactgg

SEQ ID NO: 1936415 - DNA, 25 bp, Homo sapien
tggaaagttctggagtccggagccc

SEQ ID NO: 1936416 - DNA, 25 bp, Homo sapien
tcccagatgcctacatttgaaaact

SEQ ID NO: 1936417 - DNA, 25 bp, Homo sapien
tgcctgctgaacatcttgccctgca

SEQ ID NO: 1936418 - DNA, 25 bp, Homo sapien
gtatgtcccaaatctatcaaaagtg

SEQ ID NO: 1936419 - DNA, 25 bp, Homo sapien
aaagtgcacttagagtaagcttggc

SEQ ID NO: 1936420 - DNA, 25 bp, Homo sapien
tttcttgaagcgatggcccatttca

SEQ ID NO: 1936421 - DNA, 25 bp, Homo sapien
ttgccaattattacaatctattttc

SEQ ID NO: 1936422 - DNA, 25 bp, Homo sapien
tgtttttcttgaagcgatggcccat

SEQ ID NO: 1936423 - DNA, 25 bp, Homo sapien
aattgccaattattacaatctattt

SEQ ID NO: 1936424 - DNA, 25 bp, Homo sapien
ttaggagcaatgactcacccctgta

SEQ ID NO: 1936425 - DNA, 25 bp, Homo sapien
aaccttccaatggtctgcagtggtg

SEQ ID NO: 1936426 - DNA, 25 bp, Homo sapien
caaatatgggaatcaagctgtcctc

SEQ ID NO: 1936427 - DNA, 25 bp, Homo sapien
gacttctctgcgtaaaaaccttcca

SEQ ID NO: 1936428 - DNA, 25 bp, Homo sapien
ccccgcactgcggtggtaaggcaga

SEQ ID NO: 1936429 - DNA, 25 bp, Homo sapien
ttctgtacgcggaaagcacgaggcg

SEQ ID NO: 1936430 - DNA, 25 bp, Homo sapien
tcaattagccaaaaacgagacgcca

SEQ ID NO: 1936431 - DNA, 25 bp, Homo sapien
attggcaaaccggagaaacgctggg

SEQ ID NO: 1936432 - DNA, 25 bp, Homo sapien
tagttgagaaggtcgaagtggccca

SEQ ID NO: 1936433 - DNA, 25 bp, Homo sapien
tccgcaatggcgaagtagttgagaa

SEQ ID NO: 1936434 - DNA, 25 bp, Homo sapien
ccatgtaggagcagtacgagtcgcg

SEQ ID NO: 1936435 - DNA, 25 bp, Homo sapien
tccatcaagttgaagcggactcgcg

SEQ ID NO: 1936436 - DNA, 25 bp, Homo sapien
caggtaacaactcgccgctctagcg

SEQ ID NO: 1936437 - DNA, 25 bp, Homo sapien
agagtgaagccaccgcgcggaagct

SEQ ID NO: 1936438 - DNA, 25 bp, Homo sapien
tcaggtcagaggacgcaggtaacaa

SEQ ID NO: 1936439 - DNA, 25 bp, Homo sapien
gaagaatggcgtcacaacgactaag

SEQ ID NO: 1936440 - DNA, 25 bp, Homo sapien
tagaacccagcaactactattcagt

SEQ ID NO: 1936441 - DNA, 25 bp, Homo sapien
ccagcaactactattcagtttgctt

SEQ ID NO: 1936442 - DNA, 25 bp, Homo sapien
aaccgtagaacccagcaactactat

SEQ ID NO: 1936443 - DNA, 25 bp, Homo sapien
aacccagcaactactattcagtttg

SEQ ID NO: 1936444 - DNA, 25 bp, Homo sapien
tcctggactctgttttgcccacgct

SEQ ID NO: 1936445 - DNA, 25 bp, Homo sapien
taatctgtcctcaacaaaacggtag

SEQ ID NO: 1936446 - DNA, 25 bp, Homo sapien
gactatcatgactaccaatgcccta

SEQ ID NO: 1936447 - DNA, 25 bp, Homo sapien
cttagatggctttgcaatataccca

SEQ ID NO: 1936448 - DNA, 25 bp, Homo sapien
gccgtggaggaactcagcctcggcc

SEQ ID NO: 1936449 - DNA, 25 bp, Homo sapien
gggcttctcggttcgcactctcgct

SEQ ID NO: 1936450 - DNA, 25 bp, Homo sapien
ccgggagtcgcgcaacaggtttcct

SEQ ID NO: 1936451 - DNA, 25 bp, Homo sapien
cttctccatcgctgcgcccacaggg

SEQ ID NO: 1936452 - DNA, 25 bp, Homo sapien
ttgatagagccttcgaggagtccct

SEQ ID NO: 1936453 - DNA, 25 bp, Homo sapien
catggagagaagtagtggcaatgcc

SEQ ID NO: 1936454 - DNA, 25 bp, Homo sapien
cacgccgtcctgagagggaattctg

SEQ ID NO: 1936455 - DNA, 25 bp, Homo sapien
tttttctagactccgctgacaccag

SEQ ID NO: 1936456 - DNA, 25 bp, Homo sapien
gaaactccagcctgtttagtgacgg

SEQ ID NO: 1936457 - DNA, 25 bp, Homo sapien
gaaggaacagcacccatagagaagt

SEQ ID NO: 1936458 - DNA, 25 bp, Homo sapien
gaattgtctgctgtaggtgacccag

SEQ ID NO: 1936459 - DNA, 25 bp, Homo sapien
cagcactggacgttcaggaaactcc

SEQ ID NO: 1936460 - DNA, 25 bp, Homo sapien
attccatctcatccacttgttgcat

SEQ ID NO: 1936461 - DNA, 25 bp, Homo sapien
cattccatctcatccacttgttgca

SEQ ID NO: 1936462 - DNA, 25 bp, Homo sapien
catcaaaatgcatccattccatctc

SEQ ID NO: 1936463 - DNA, 25 bp, Homo sapien
tgttcatcaaaatgcatccattcca

SEQ ID NO: 1936464 - DNA, 25 bp, Homo sapien
tggagtccctgtaccgagacatccg

SEQ ID NO: 1936465 - DNA, 25 bp, Homo sapien
cgaggacatcgtgttcgagacggac

SEQ ID NO: 1936466 - DNA, 25 bp, Homo sapien
gatgagtttgactcgccccacgagg

SEQ ID NO: 1936467 - DNA, 25 bp, Homo sapien
aagaccggctagcagaacttctgga

SEQ ID NO: 1936468 - DNA, 25 bp, Homo sapien
tcgagctcaacgtacaaaagacggt

SEQ ID NO: 1936469 - DNA, 25 bp, Homo sapien
gacaccctgaacgtcatcgagctca

SEQ ID NO: 1936470 - DNA, 25 bp, Homo sapien
aaagatggttagttgataccgtccg

SEQ ID NO: 1936471 - DNA, 25 bp, Homo sapien
caagaattgcaaaccagcctgtgct

SEQ ID NO: 1936472 - DNA, 25 bp, Homo sapien
gactctgggcgcgtgccacaatgtc

SEQ ID NO: 1936473 - DNA, 25 bp, Homo sapien
ctctgggcgcgtgccacaatgtctg

SEQ ID NO: 1936474 - DNA, 25 bp, Homo sapien
gaagttgggactctgggcgcgtgcc

SEQ ID NO: 1936475 - DNA, 25 bp, Homo sapien
tgggactctgggcgcgtgccacaat

SEQ ID NO: 1936476 - DNA, 25 bp, Homo sapien
gctgttgtgaaaagtgatgactgaa

SEQ ID NO: 1936477 - DNA, 25 bp, Homo sapien
tgttagtgacccaagtaaatttata

SEQ ID NO: 1936478 - DNA, 25 bp, Homo sapien
gagagcactgttagtgacccaagta

SEQ ID NO: 1936479 - DNA, 25 bp, Homo sapien
gccacatactagctgtctgactgaa

SEQ ID NO: 1936480 - DNA, 25 bp, Homo sapien
gacagagtgtcaacatcacccaaga

SEQ ID NO: 1936481 - DNA, 25 bp, Homo sapien
caagattcccacgtgctgttagcat

SEQ ID NO: 1936482 - DNA, 25 bp, Homo sapien
taggcaacgtccctgggcagatggc

SEQ ID NO: 1936483 - DNA, 25 bp, Homo sapien
cctttgtggagagatggttgactgc

SEQ ID NO: 1936484 - DNA, 25 bp, Homo sapien
tcaagatgacatcagccccaatttg

SEQ ID NO: 1936485 - DNA, 25 bp, Homo sapien
tatttttcgacaacatacataacat

SEQ ID NO: 1936486 - DNA, 25 bp, Homo sapien
atttttcgacaacatacataacatg

SEQ ID NO: 1936487 - DNA, 25 bp, Homo sapien
aagaaaatcatatatggggtcacac

SEQ ID NO: 1936488 - DNA, 25 bp, Homo sapien
ttttccatttctaaatcatccttaa

SEQ ID NO: 1936489 - DNA, 25 bp, Homo sapien
cttaaagaaaatcatatatggggtc

SEQ ID NO: 1936490 - DNA, 25 bp, Homo sapien
catttctaaatcatccttaaagaaa

SEQ ID NO: 1936491 - DNA, 25 bp, Homo sapien
aaggatgtccttgatttgttttgca

SEQ ID NO: 1936492 - DNA, 25 bp, Homo sapien
catgttttcacaattaaagaactgg

SEQ ID NO: 1936493 - DNA, 25 bp, Homo sapien
gtccttgatttgttttgcagcccct

SEQ ID NO: 1936494 - DNA, 25 bp, Homo sapien
cttcacggtagtccaatagagcaac

SEQ ID NO: 1936495 - DNA, 25 bp, Homo sapien
ctagggtcattcagcggaggtatta

SEQ ID NO: 1936496 - DNA, 25 bp, Homo sapien
tagggtcattcagcggaggtattac

SEQ ID NO: 1936497 - DNA, 25 bp, Homo sapien
gtcatcaatgttaccttctatccta

SEQ ID NO: 1936498 - DNA, 25 bp, Homo sapien
caatgttaccttctatcctactgac

SEQ ID NO: 1936499 - DNA, 25 bp, Homo sapien
atcaatgttaccttctatcctactg

SEQ ID NO: 1936500 - DNA, 25 bp, Homo sapien
gcgagtcatcaatgttaccttctat

SEQ ID NO: 1936501 - DNA, 25 bp, Homo sapien
tccaggtacagcccgtccatgatct

SEQ ID NO: 1936502 - DNA, 25 bp, Homo sapien
caggtacagcccgtccatgatctcc

SEQ ID NO: 1936503 - DNA, 25 bp, Homo sapien
ctccaggtacagcccgtccatgatc

SEQ ID NO: 1936504 - DNA, 25 bp, Homo sapien
aggtacagcccgtccatgatctccc

SEQ ID NO: 1936505 - DNA, 25 bp, Homo sapien
gggagacgatgcagcactagcttag

SEQ ID NO: 1936506 - DNA, 25 bp, Homo sapien
tgaagggagacgatgcagcactagc

SEQ ID NO: 1936507 - DNA, 25 bp, Homo sapien
tacgaagttccctacttgagcaaca

SEQ ID NO: 1936508 - DNA, 25 bp, Homo sapien
ccagagtatcatgtaatatatccat

SEQ ID NO: 1936509 - DNA, 25 bp, Homo sapien
aagggttgcaagactattaggtacg

SEQ ID NO: 1936510 - DNA, 25 bp, Homo sapien
gcaacaggtttattagaggccctaa

SEQ ID NO: 1936511 - DNA, 25 bp, Homo sapien
ccatatgaacaagggcgtggccgga

SEQ ID NO: 1936512 - DNA, 25 bp, Homo sapien
cacagtgaggttagtgtgtgcagtc

SEQ ID NO: 1936513 - DNA, 25 bp, Homo sapien
gcagtctccaggctgatagaagttc

SEQ ID NO: 1936514 - DNA, 25 bp, Homo sapien
gctctgggttctgtggtagatatga

SEQ ID NO: 1936515 - DNA, 25 bp, Homo sapien
acatatgtccgcgtgggttcgaacc

SEQ ID NO: 1936516 - DNA, 25 bp, Homo sapien
aaaactctctgcgttctggagggag

SEQ ID NO: 1936517 - DNA, 25 bp, Homo sapien
tagaggatgccttgtaagcggagca

SEQ ID NO: 1936518 - DNA, 25 bp, Homo sapien
caaggttcaacgtctgcaccaggat

SEQ ID NO: 1936519 - DNA, 25 bp, Homo sapien
cacgccttggacattagaattccga

SEQ ID NO: 1936520 - DNA, 25 bp, Homo sapien
gaattccgacttctggctgggagaa

SEQ ID NO: 1936521 - DNA, 25 bp, Homo sapien
aacgctcacacgcaaagtcctgctt

SEQ ID NO: 1936522 - DNA, 25 bp, Homo sapien
ctgggagaagcgcaacgctcacacg

SEQ ID NO: 1936523 - DNA, 25 bp, Homo sapien
atcacattgttgtagaatcaacacc

SEQ ID NO: 1936524 - DNA, 25 bp, Homo sapien
tctggatcacattgttgtagaatca

SEQ ID NO: 1936525 - DNA, 25 bp, Homo sapien
tggatcacattgttgtagaatcaac

SEQ ID NO: 1936526 - DNA, 25 bp, Homo sapien
ttctggatcacattgttgtagaatc

SEQ ID NO: 1936527 - DNA, 25 bp, Homo sapien
acaggctggctaaagaccatctctg

SEQ ID NO: 1936528 - DNA, 25 bp, Homo sapien
ctcacaggctggctaaagaccatct

SEQ ID NO: 1936529 - DNA, 25 bp, Homo sapien
ttggtatctccctttgcacatacaa

SEQ ID NO: 1936530 - DNA, 25 bp, Homo sapien
gcacatacaacagaggagcagccct

SEQ ID NO: 1936531 - DNA, 25 bp, Homo sapien
tgtttgggctgtctgcagctctttg

SEQ ID NO: 1936532 - DNA, 25 bp, Homo sapien
aatttggagtgttgtttgggctgtc

SEQ ID NO: 1936533 - DNA, 25 bp, Homo sapien
atttggagtgttgtttgggctgtct

SEQ ID NO: 1936534 - DNA, 25 bp, Homo sapien
gtctgtccctcactaaagagtcagg

SEQ ID NO: 1936535 - DNA, 25 bp, Homo sapien
ctcaatgaggtaggaataactagcc

SEQ ID NO: 1936536 - DNA, 25 bp, Homo sapien
tggagttcagtaacacatacagggt

SEQ ID NO: 1936537 - DNA, 25 bp, Homo sapien
catacagggttaccaaaattgaagc

SEQ ID NO: 1936538 - DNA, 25 bp, Homo sapien
acacctctcaggctgggtaggaata

SEQ ID NO: 1936539 - DNA, 25 bp, Homo sapien
aatcacagggtcttggcccacttgc

SEQ ID NO: 1936540 - DNA, 25 bp, Homo sapien
tactgatgttctgcgccgtgttgac

SEQ ID NO: 1936541 - DNA, 25 bp, Homo sapien
tgttgacttttgactggcgtatcca

SEQ ID NO: 1936542 - DNA, 25 bp, Homo sapien
caagtgaattgcaagggtgtgtcca

SEQ ID NO: 1936543 - DNA, 25 bp, Homo sapien
caaataggctgcgatttagggcaca

SEQ ID NO: 1936544 - DNA, 25 bp, Homo sapien
ttccagttccaatagccaactggag

SEQ ID NO: 1936545 - DNA, 25 bp, Homo sapien
gtgtgtccaggaacccgaaccttgc

SEQ ID NO: 1936546 - DNA, 25 bp, Homo sapien
ataaagggagtgatagggcactgcc

SEQ ID NO: 1936547 - DNA, 25 bp, Homo sapien
tgcctgaagccttctcataggcctg

SEQ ID NO: 1936548 - DNA, 25 bp, Homo sapien
ggcatggaagccagcgactcttgca

SEQ ID NO: 1936549 - DNA, 25 bp, Homo sapien
cacattaacattcaggataaaggga

SEQ ID NO: 1936550 - DNA, 25 bp, Homo sapien
acgcacggttcactctggagcgcgc

SEQ ID NO: 1936551 - DNA, 25 bp, Homo sapien
cggcagacgctgacccgggaacgta

SEQ ID NO: 1936552 - DNA, 25 bp, Homo sapien
gaattgtgtctgctcgaggcatcca

SEQ ID NO: 1936553 - DNA, 25 bp, Homo sapien
cattctggttcggtctccggactcc

SEQ ID NO: 1936554 - DNA, 25 bp, Homo sapien
gagggctggcgctgatctgcaccct

SEQ ID NO: 1936555 - DNA, 25 bp, Homo sapien
tggcgctgatctgcacccttctcat

SEQ ID NO: 1936556 - DNA, 25 bp, Homo sapien
ggagggctggcgctgatctgcaccc

SEQ ID NO: 1936557 - DNA, 25 bp, Homo sapien
ggctggcgctgatctgcacccttct

SEQ ID NO: 1936558 - DNA, 25 bp, Homo sapien
ccaacaaaggggcaggcccgcagcg

SEQ ID NO: 1936559 - DNA, 25 bp, Homo sapien
ggagccgccgaaggagcgagcctct

SEQ ID NO: 1936560 - DNA, 25 bp, Homo sapien
gagccgccgaaggagcgagcctctc

SEQ ID NO: 1936561 - DNA, 25 bp, Homo sapien
tccagcgctcggctccaacaaaggg

SEQ ID NO: 1936562 - DNA, 25 bp, Homo sapien
cgtttttcctcggagcagggaagcg

SEQ ID NO: 1936563 - DNA, 25 bp, Homo sapien
ttgtggagtcgtttttcctcggagc

SEQ ID NO: 1936564 - DNA, 25 bp, Homo sapien
tccagaagccgattggggaatcacg

SEQ ID NO: 1936565 - DNA, 25 bp, Homo sapien
gagtcgtttttcctcggagcaggga

SEQ ID NO: 1936566 - DNA, 25 bp, Homo sapien
ttttttaaatacatcgcaccaccaa

SEQ ID NO: 1936567 - DNA, 25 bp, Homo sapien
taaatacatcgcaccaccaaactaa

SEQ ID NO: 1936568 - DNA, 25 bp, Homo sapien
aatacatcgcaccaccaaactaaca

SEQ ID NO: 1936569 - DNA, 25 bp, Homo sapien
accaccaaactaacactcgcacaca

SEQ ID NO: 1936570 - DNA, 25 bp, Homo sapien
ggcagcaggtaagcccatgcattat

SEQ ID NO: 1936571 - DNA, 25 bp, Homo sapien
atgcattattgaagcctcgggctgg

SEQ ID NO: 1936572 - DNA, 25 bp, Homo sapien
gcccgcgggcagcaggtaagcccat

SEQ ID NO: 1936573 - DNA, 25 bp, Homo sapien
aactcctagaggagcccttggccag

SEQ ID NO: 1936574 - DNA, 25 bp, Homo sapien
tctgtggttcttccgcctgggatcg

SEQ ID NO: 1936575 - DNA, 25 bp, Homo sapien
tgggatcggcgtcccgagctgcttc

SEQ ID NO: 1936576 - DNA, 25 bp, Homo sapien
tccccgcggtgcgagagagaatgcc

SEQ ID NO: 1936577 - DNA, 25 bp, Homo sapien
cttgggatccgtactagttgtgaac

SEQ ID NO: 1936578 - DNA, 25 bp, Homo sapien
ggtggctgtgtggtcggcggccagc

SEQ ID NO: 1936579 - DNA, 25 bp, Homo sapien
tggctgtgtggtcggcggccagcgg

SEQ ID NO: 1936580 - DNA, 25 bp, Homo sapien
ggtcggcggccagcggagcgcttcc

SEQ ID NO: 1936581 - DNA, 25 bp, Homo sapien
ggggctccggcggtgtccacaggag

SEQ ID NO: 1936582 - DNA, 25 bp, Homo sapien
gtgtggcgcgatcgccaagctccct

SEQ ID NO: 1936583 - DNA, 25 bp, Homo sapien
attggtgtgtagtcccgcgcagtcg

SEQ ID NO: 1936584 - DNA, 25 bp, Homo sapien
gggctccggagagtgtggcgcgatc

SEQ ID NO: 1936585 - DNA, 25 bp, Homo sapien
ctctgggtggttgctgctcccaagg

SEQ ID NO: 1936586 - DNA, 25 bp, Homo sapien
gccggattccctaggtctgagccga

SEQ ID NO: 1936587 - DNA, 25 bp, Homo sapien
cagagctcgggttctaactccacgg

SEQ ID NO: 1936588 - DNA, 25 bp, Homo sapien
cattccagtgcgtttttcgaggagg

SEQ ID NO: 1936589 - DNA, 25 bp, Homo sapien
tgaggtgttcaggacagggcctcct

SEQ ID NO: 1936590 - DNA, 25 bp, Homo sapien
acccactcggtcgtcaaggctggag

SEQ ID NO: 1936591 - DNA, 25 bp, Homo sapien
tggagtctcacccactcggtcgtca

SEQ ID NO: 1936592 - DNA, 25 bp, Homo sapien
agtctcacccactcggtcgtcaagg

SEQ ID NO: 1936593 - DNA, 25 bp, Homo sapien
tcacccactcggtcgtcaaggctgg

SEQ ID NO: 1936594 - DNA, 25 bp, Homo sapien
tgcccgtcccttgacgatcttttaa

SEQ ID NO: 1936595 - DNA, 25 bp, Homo sapien
tgttggttccctccttcgaaccatc

SEQ ID NO: 1936596 - DNA, 25 bp, Homo sapien
tcgaaccatctactggctccccatt

SEQ ID NO: 1936597 - DNA, 25 bp, Homo sapien
cgtgcccgtcccttgacgatctttt

SEQ ID NO: 1936598 - DNA, 25 bp, Homo sapien
ctggactgtgaggtagagctcctct

SEQ ID NO: 1936599 - DNA, 25 bp, Homo sapien
ggaccccaggttagtatctcagagc

SEQ ID NO: 1936600 - DNA, 25 bp, Homo sapien
tcctctggaccccaggttagtatct

SEQ ID NO: 1936601 - DNA, 25 bp, Homo sapien
gactgtgaggtagagctcctctgga

SEQ ID NO: 1936602 - DNA, 25 bp, Homo sapien
gaagcaggtagtttccagcatccat

SEQ ID NO: 1936603 - DNA, 25 bp, Homo sapien
ttgcacatgtcaattccaggaagca

SEQ ID NO: 1936604 - DNA, 25 bp, Homo sapien
aggaagcaggtagtttccagcatcc

SEQ ID NO: 1936605 - DNA, 25 bp, Homo sapien
catgtggttttccaatctttgcatt

SEQ ID NO: 1936606 - DNA, 25 bp, Homo sapien
tctgtgacttcgcttgttttgtgtt

SEQ ID NO: 1936607 - DNA, 25 bp, Homo sapien
ggcttgattgttctccttctccctg

SEQ ID NO: 1936608 - DNA, 25 bp, Homo sapien
tgtgttctgggcttgattgttctcc

SEQ ID NO: 1936609 - DNA, 25 bp, Homo sapien
tgttttgtgttctgggcttgattgt

SEQ ID NO: 1936610 - DNA, 25 bp, Homo sapien
gccatcggattgcatcaccaactca

SEQ ID NO: 1936611 - DNA, 25 bp, Homo sapien
cagctgcaatctcctgccatcggat

SEQ ID NO: 1936612 - DNA, 25 bp, Homo sapien
gagagagagataatggccctttgct

SEQ ID NO: 1936613 - DNA, 25 bp, Homo sapien
tcattccgcattcagaccagattcc

SEQ ID NO: 1936614 - DNA, 25 bp, Homo sapien
tgtgggtgtaagcatggccacctgc

SEQ ID NO: 1936615 - DNA, 25 bp, Homo sapien
caaggatggcatggtattagattac

SEQ ID NO: 1936616 - DNA, 25 bp, Homo sapien
tgtgaacctggacaaatggcttagc

SEQ ID NO: 1936617 - DNA, 25 bp, Homo sapien
tggattctaacctgcaatattgctg

SEQ ID NO: 1936618 - DNA, 25 bp, Homo sapien
ttcaaatctcatgccgttgttgatg

SEQ ID NO: 1936619 - DNA, 25 bp, Homo sapien
ctaggggtccaaacttggcattctt

SEQ ID NO: 1936620 - DNA, 25 bp, Homo sapien
ctttctgcgtctctaggccacctgg

SEQ ID NO: 1936621 - DNA, 25 bp, Homo sapien
tgatgctcgtctggtggatttgtac

SEQ ID NO: 1936622 - DNA, 25 bp, Homo sapien
tacagtcttcccataacagaccttc

SEQ ID NO: 1936623 - DNA, 25 bp, Homo sapien
agctcagcctgatattaacctttta

SEQ ID NO: 1936624 - DNA, 25 bp, Homo sapien
taattcaatacagtcttcccataac

SEQ ID NO: 1936625 - DNA, 25 bp, Homo sapien
actgagctcagcctgatattaacct

SEQ ID NO: 1936626 - DNA, 25 bp, Homo sapien
gacaggaggtattgcatagtatcat

SEQ ID NO: 1936627 - DNA, 25 bp, Homo sapien
tttgctgtttggctatgactgagga

SEQ ID NO: 1936628 - DNA, 25 bp, Homo sapien
taactttgacatctctaggcttcat

SEQ ID NO: 1936629 - DNA, 25 bp, Homo sapien
aggaagacaggaggtattgcatagt

SEQ ID NO: 1936630 - DNA, 25 bp, Homo sapien
tgatcctgatatggtgggaacttca

SEQ ID NO: 1936631 - DNA, 25 bp, Homo sapien
agactccgacatcgccacgggcaag

SEQ ID NO: 1936632 - DNA, 25 bp, Homo sapien
tcatggagggtgatcctgatatggt

SEQ ID NO: 1936633 - DNA, 25 bp, Homo sapien
gggaacttcaatccagactccgaca

SEQ ID NO: 1936634 - DNA, 25 bp, Homo sapien
tgttccacagcccagcaggttgcca

SEQ ID NO: 1936635 - DNA, 25 bp, Homo sapien
ctttgttccacagcccagcaggttg

SEQ ID NO: 1936636 - DNA, 25 bp, Homo sapien
gttccacagcccagcaggttgccac

SEQ ID NO: 1936637 - DNA, 25 bp, Homo sapien
tttgttccacagcccagcaggttgc

SEQ ID NO: 1936638 - DNA, 25 bp, Homo sapien
gagactcttgaggacagttgatgcc

SEQ ID NO: 1936639 - DNA, 25 bp, Homo sapien
caggtgcaggttaatagaaagatca

SEQ ID NO: 1936640 - DNA, 25 bp, Homo sapien
tcttgggtgccgtgtagttgatcag

SEQ ID NO: 1936641 - DNA, 25 bp, Homo sapien
tgcatgaagcagacgagactccatc

SEQ ID NO: 1936642 - DNA, 25 bp, Homo sapien
aggatcacaggatctcccaaccagg

SEQ ID NO: 1936643 - DNA, 25 bp, Homo sapien
gatgccccgggagagtgtggtcagg

SEQ ID NO: 1936644 - DNA, 25 bp, Homo sapien
cacaggatctcccaaccagggagga

SEQ ID NO: 1936645 - DNA, 25 bp, Homo sapien
gccatcgtcagggtaagtcactgaa

SEQ ID NO: 1936646 - DNA, 25 bp, Homo sapien
tccacttggcactctgagaagcaac

SEQ ID NO: 1936647 - DNA, 25 bp, Homo sapien
tcagatagcgatccacttggcactc

SEQ ID NO: 1936648 - DNA, 25 bp, Homo sapien
cgatccacttggcactctgagaagc

SEQ ID NO: 1936649 - DNA, 25 bp, Homo sapien
tagcgatccacttggcactctgaga

SEQ ID NO: 1936650 - DNA, 25 bp, Homo sapien
gcttctccttggactcattggccat

SEQ ID NO: 1936651 - DNA, 25 bp, Homo sapien
ttagcttctccttggactcattggc

SEQ ID NO: 1936652 - DNA, 25 bp, Homo sapien
attttcttgttgacttctggattct

SEQ ID NO: 1936653 - DNA, 25 bp, Homo sapien
tgctgccagagttagtcacttggct

SEQ ID NO: 1936654 - DNA, 25 bp, Homo sapien
tgcagcatccaaccacgttctagaa

SEQ ID NO: 1936655 - DNA, 25 bp, Homo sapien
gagccagtgtccagtgactttcaga

SEQ ID NO: 1936656 - DNA, 25 bp, Homo sapien
tagtggcccgagttaggcagtttcc

SEQ ID NO: 1936657 - DNA, 25 bp, Homo sapien
tcatattttgttggacccaactgga

SEQ ID NO: 1936658 - DNA, 25 bp, Homo sapien
tttgctccatgggatgtttctgtcc

SEQ ID NO: 1936659 - DNA, 25 bp, Homo sapien
ttgctccatgggatgtttctgtcct

SEQ ID NO: 1936660 - DNA, 25 bp, Homo sapien
ccaaatgtggtgtggaatcccagtc

SEQ ID NO: 1936661 - DNA, 25 bp, Homo sapien
ttatattccacagcgttagcatgag

SEQ ID NO: 1936662 - DNA, 25 bp, Homo sapien
tatagattagattcctacatctggg

SEQ ID NO: 1936663 - DNA, 25 bp, Homo sapien
ccaccaagactgactggcttctaga

SEQ ID NO: 1936664 - DNA, 25 bp, Homo sapien
gacgaccagtgccaacaggcttcat

SEQ ID NO: 1936665 - DNA, 25 bp, Homo sapien
gaaaaagctgcgaacctgaagaaag

SEQ ID NO: 1936666 - DNA, 25 bp, Homo sapien
gaagaaagacttggcagagatgcag

SEQ ID NO: 1936667 - DNA, 25 bp, Homo sapien
agagatgcaggaatggatgacccag

SEQ ID NO: 1936668 - DNA, 25 bp, Homo sapien
caaaattcctggcttgtaattgttt

SEQ ID NO: 1936669 - DNA, 25 bp, Homo sapien
ctggccaagatttatgcttcaagaa

SEQ ID NO: 1936670 - DNA, 25 bp, Homo sapien
gctggcttaatagcagcaaattctc

SEQ ID NO: 1936671 - DNA, 25 bp, Homo sapien
cttctgttaatgtgatagattcttc

SEQ ID NO: 1936672 - DNA, 25 bp, Homo sapien
gggatgtccgctttctatctgcagc

SEQ ID NO: 1936673 - DNA, 25 bp, Homo sapien
tagagacggtgaatgctctgttctc

SEQ ID NO: 1936674 - DNA, 25 bp, Homo sapien
cagtgatatgttgaatccctgttcc

SEQ ID NO: 1936675 - DNA, 25 bp, Homo sapien
tacagggcatgcaccgtggtggtgg

SEQ ID NO: 1936676 - DNA, 25 bp, Homo sapien
ttggctgctcgacaacttccttcat

SEQ ID NO: 1936677 - DNA, 25 bp, Homo sapien
agcgcttggctgctcgacaacttcc

SEQ ID NO: 1936678 - DNA, 25 bp, Homo sapien
cagccggcagcgcttggctgctcga

SEQ ID NO: 1936679 - DNA, 25 bp, Homo sapien
tcctctcccgcagccggcagcgctt

SEQ ID NO: 1936680 - DNA, 25 bp, Homo sapien
gctgagcaagtgctgcctgtgagca

SEQ ID NO: 1936681 - DNA, 25 bp, Homo sapien
taaattgagaagttgaaggaatacc

SEQ ID NO: 1936682 - DNA, 25 bp, Homo sapien
gggctttctctgtggcgtttgtctg

SEQ ID NO: 1936683 - DNA, 25 bp, Homo sapien
ctgagcaagtgctgcctgtgagcat

SEQ ID NO: 1936684 - DNA, 25 bp, Homo sapien
cttccccggaatactgtgtcttctg

SEQ ID NO: 1936685 - DNA, 25 bp, Homo sapien
tcttccccggaatactgtgtcttct

SEQ ID NO: 1936686 - DNA, 25 bp, Homo sapien
gtcttccccggaatactgtgtcttc

SEQ ID NO: 1936687 - DNA, 25 bp, Homo sapien
agtcttccccggaatactgtgtctt

SEQ ID NO: 1936688 - DNA, 25 bp, Homo sapien
aaacatgagctggagcatgagaaca

SEQ ID NO: 1936689 - DNA, 25 bp, Homo sapien
aaaacatgagctggagcatgagaac

SEQ ID NO: 1936690 - DNA, 25 bp, Homo sapien
agttatcgtaaaagactgacattgc

SEQ ID NO: 1936691 - DNA, 25 bp, Homo sapien
cattgctaccctttggatgttaaga

SEQ ID NO: 1936692 - DNA, 25 bp, Homo sapien
ttgctaccctttggatgttaagaaa

SEQ ID NO: 1936693 - DNA, 25 bp, Homo sapien
acattgctaccctttggatgttaag

SEQ ID NO: 1936694 - DNA, 25 bp, Homo sapien
ttgtaagggacctgggaagcgccag

SEQ ID NO: 1936695 - DNA, 25 bp, Homo sapien
ttagaacatgcatatccgaaagctt

SEQ ID NO: 1936696 - DNA, 25 bp, Homo sapien
catgcatatccgaaagctttctgaa

SEQ ID NO: 1936697 - DNA, 25 bp, Homo sapien
cgccagggtccatcaaaaatgtaaa

SEQ ID NO: 1936698 - DNA, 25 bp, Homo sapien
ttagagcccagtaaatagctcatga

SEQ ID NO: 1936699 - DNA, 25 bp, Homo sapien
agtaaatagctcatgagaacttggg

SEQ ID NO: 1936700 - DNA, 25 bp, Homo sapien
gcccagtaaatagctcatgagaact

SEQ ID NO: 1936701 - DNA, 25 bp, Homo sapien
gagcccagtaaatagctcatgagaa

SEQ ID NO: 1936702 - DNA, 25 bp, Homo sapien
gatgagctgccaccttgtgactgtc

SEQ ID NO: 1936703 - DNA, 25 bp, Homo sapien
tgtgactgtccgtcagggtcatctt

SEQ ID NO: 1936704 - DNA, 25 bp, Homo sapien
ggccatccctggttagcgttgccat

SEQ ID NO: 1936705 - DNA, 25 bp, Homo sapien
tgaagtatcttgaattgaggagctt

SEQ ID NO: 1936706 - DNA, 25 bp, Homo sapien
catgtttagatcttatttcaagcca

SEQ ID NO: 1936707 - DNA, 25 bp, Homo sapien
tcatgtttagatcttatttcaagcc

SEQ ID NO: 1936708 - DNA, 25 bp, Homo sapien
tctgtcgtgtcgcatttgtaatgta

SEQ ID NO: 1936709 - DNA, 25 bp, Homo sapien
gagttcatgatatttctgtcgtgtc

SEQ ID NO: 1936710 - DNA, 25 bp, Homo sapien
tgatatttctgtcgtgtcgcatttg

SEQ ID NO: 1936711 - DNA, 25 bp, Homo sapien
ctgcacaattgagttcatgatattt

SEQ ID NO: 1936712 - DNA, 25 bp, Homo sapien
ttcatggcctgtcgtcaagtggacc

SEQ ID NO: 1936713 - DNA, 25 bp, Homo sapien
caagtggaccgtatgggctgagcta

SEQ ID NO: 1936714 - DNA, 25 bp, Homo sapien
tctgagaaggtctcccaaaacagct

SEQ ID NO: 1936715 - DNA, 25 bp, Homo sapien
tgagtggagctgtcaaccaaacccc

SEQ ID NO: 1936716 - DNA, 25 bp, Homo sapien
tttccaggagatcaagggcagactg

SEQ ID NO: 1936717 - DNA, 25 bp, Homo sapien
tattacattcgacctggccatgtgc

SEQ ID NO: 1936718 - DNA, 25 bp, Homo sapien
tatccctgttctaagtcccgtagac

SEQ ID NO: 1936719 - DNA, 25 bp, Homo sapien
cctattagttagtgaagagccctct

SEQ ID NO: 1936720 - DNA, 25 bp, Homo sapien
tcccattgcatgcatcaatatgcta

SEQ ID NO: 1936721 - DNA, 25 bp, Homo sapien
tactaataggactatacatagcaca

SEQ ID NO: 1936722 - DNA, 25 bp, Homo sapien
caggaacctatactgtaaacattat

SEQ ID NO: 1936723 - DNA, 25 bp, Homo sapien
taaattctccactacaatccaggta

SEQ ID NO: 1936724 - DNA, 25 bp, Homo sapien
tctgagttcttctaggatctaagac

SEQ ID NO: 1936725 - DNA, 25 bp, Homo sapien
aactgaatcgataaaaaagagtgcc

SEQ ID NO: 1936726 - DNA, 25 bp, Homo sapien
gataaagtgtttagaggctttgcct

SEQ ID NO: 1936727 - DNA, 25 bp, Homo sapien
catttgataagaccaatggaaggtt

SEQ ID NO: 1936728 - DNA, 25 bp, Homo sapien
cctccaattctcttagaccctgttt

SEQ ID NO: 1936729 - DNA, 25 bp, Homo sapien
aaagatttgcaggatcccatctcgg

SEQ ID NO: 1936730 - DNA, 25 bp, Homo sapien
ctgctagtttaggagagaagggttt

SEQ ID NO: 1936731 - DNA, 25 bp, Homo sapien
gatcccatctcggtcagtgatgtca

SEQ ID NO: 1936732 - DNA, 25 bp, Homo sapien
cagcagtttattcggctgcctggtg

SEQ ID NO: 1936733 - DNA, 25 bp, Homo sapien
aagcagcagtttattcggctgcctg

SEQ ID NO: 1936734 - DNA, 25 bp, Homo sapien
gcagcagtttattcggctgcctggt

SEQ ID NO: 1936735 - DNA, 25 bp, Homo sapien
ggcacaccagtagcatccaaagagc

SEQ ID NO: 1936736 - DNA, 25 bp, Homo sapien
gtgcagtggtctttgtggcctgacc

SEQ ID NO: 1936737 - DNA, 25 bp, Homo sapien
gctgctaccgctctctgagtactga

SEQ ID NO: 1936738 - DNA, 25 bp, Homo sapien
ctgacctccgcccacaccttcagct

SEQ ID NO: 1936739 - DNA, 25 bp, Homo sapien
tcagtgcataggaagcagtgcagtg

SEQ ID NO: 1936740 - DNA, 25 bp, Homo sapien
cacaagctgcgtttgttaaatagga

SEQ ID NO: 1936741 - DNA, 25 bp, Homo sapien
catcctgcgatttcttcacaagctg

SEQ ID NO: 1936742 - DNA, 25 bp, Homo sapien
gatttgtgcttgcttcgctgtcagt

SEQ ID NO: 1936743 - DNA, 25 bp, Homo sapien
tgatggaaggtttgttatccccgcc

SEQ ID NO: 1936744 - DNA, 25 bp, Homo sapien
cttttcctcacaatcttgagtctat

SEQ ID NO: 1936745 - DNA, 25 bp, Homo sapien
cacaatcttgagtctataaagaata

SEQ ID NO: 1936746 - DNA, 25 bp, Homo sapien
tttcctcacaatcttgagtctataa

SEQ ID NO: 1936747 - DNA, 25 bp, Homo sapien
ctcacaatcttgagtctataaagaa

SEQ ID NO: 1936748 - DNA, 25 bp, Homo sapien
tctgacctgatttccaacgcttgcc

SEQ ID NO: 1936749 - DNA, 25 bp, Homo sapien
gggctttgtgtcttcctggacgctt

SEQ ID NO: 1936750 - DNA, 25 bp, Homo sapien
gcatgccatgggatctgagctcctc

SEQ ID NO: 1936751 - DNA, 25 bp, Homo sapien
aaaactgcccgtagtgcatgccatg

SEQ ID NO: 1936752 - DNA, 25 bp, Homo sapien
catgatgggatgtctgtctctggac

SEQ ID NO: 1936753 - DNA, 25 bp, Homo sapien
ttggtttgctccatcatgatgggat

SEQ ID NO: 1936754 - DNA, 25 bp, Homo sapien
ccatcatgatgggatgtctgtctct

SEQ ID NO: 1936755 - DNA, 25 bp, Homo sapien
cagtactgttgtcgtggggattgaa

SEQ ID NO: 1936756 - DNA, 25 bp, Homo sapien
gtttattattaatctgcttcttcct

SEQ ID NO: 1936757 - DNA, 25 bp, Homo sapien
tctgcactggcttgtaacccttttt

SEQ ID NO: 1936758 - DNA, 25 bp, Homo sapien
ctgcactggcttgtaaccctttttt

SEQ ID NO: 1936759 - DNA, 25 bp, Homo sapien
tgcactggcttgtaacccttttttc

SEQ ID NO: 1936760 - DNA, 25 bp, Homo sapien
tgcctttgtgtgctcgaataatgtt

SEQ ID NO: 1936761 - DNA, 25 bp, Homo sapien
tgtgtgctcgaataatgtttggtgg

SEQ ID NO: 1936762 - DNA, 25 bp, Homo sapien
cctttgtgtgctcgaataatgtttg

SEQ ID NO: 1936763 - DNA, 25 bp, Homo sapien
ctttgtgtgctcgaataatgtttgg

SEQ ID NO: 1936764 - DNA, 25 bp, Homo sapien
tagtgacttaactccattagggaaa

SEQ ID NO: 1936765 - DNA, 25 bp, Homo sapien
agaaaaaatacctctatgtggagaa

SEQ ID NO: 1936766 - DNA, 25 bp, Homo sapien
tgaatacccttttacataccaggca

SEQ ID NO: 1936767 - DNA, 25 bp, Homo sapien
cacacacacgcagttagcacattgg

SEQ ID NO: 1936768 - DNA, 25 bp, Homo sapien
caatgaatggatacggacacttagc

SEQ ID NO: 1936769 - DNA, 25 bp, Homo sapien
gctgctaagatcacctaagagaggt

SEQ ID NO: 1936770 - DNA, 25 bp, Homo sapien
tatcaagaggacagacgaaagtact

SEQ ID NO: 1936771 - DNA, 25 bp, Homo sapien
tagatggtgcccactgattagatgg

SEQ ID NO: 1936772 - DNA, 25 bp, Homo sapien
caaactgtagggaaatggcaggtgt

SEQ ID NO: 1936773 - DNA, 25 bp, Homo sapien
gcaggtgtggaggagggacctgtaa

SEQ ID NO: 1936774 - DNA, 25 bp, Homo sapien
atggcaggtgtggaggagggacctg

SEQ ID NO: 1936775 - DNA, 25 bp, Homo sapien
caggtgtggaggagggacctgtaaa

SEQ ID NO: 1936776 - DNA, 25 bp, Homo sapien
gaagatcacaataaacagctggagt

SEQ ID NO: 1936777 - DNA, 25 bp, Homo sapien
gctggagcaggtagggtgtgtagaa

SEQ ID NO: 1936778 - DNA, 25 bp, Homo sapien
gtgtagaattcagcgtcacacctcc

SEQ ID NO: 1936779 - DNA, 25 bp, Homo sapien
tcctcaggcagcacaaaggtcggct

SEQ ID NO: 1936780 - DNA, 25 bp, Homo sapien
ttctttcttaatgctggtcaggacc

SEQ ID NO: 1936781 - DNA, 25 bp, Homo sapien
ctttatagagaaatgccagctctta

SEQ ID NO: 1936782 - DNA, 25 bp, Homo sapien
gaaatgccagctcttattttctatt

SEQ ID NO: 1936783 - DNA, 25 bp, Homo sapien
ggtcaggacctactaaattgattct

SEQ ID NO: 1936784 - DNA, 25 bp, Homo sapien
tcatggagcagattcacagcacgtt

SEQ ID NO: 1936785 - DNA, 25 bp, Homo sapien
taagctggcctaagctgaagtctcc

SEQ ID NO: 1936786 - DNA, 25 bp, Homo sapien
tatgaaagattgcagcaccacagct

SEQ ID NO: 1936787 - DNA, 25 bp, Homo sapien
ccagcacggatctcacggaggtcat

SEQ ID NO: 1936788 - DNA, 25 bp, Homo sapien
aacacccttgggttatgattcctgc

SEQ ID NO: 1936789 - DNA, 25 bp, Homo sapien
tgataccacttccatgagtgtggcc

SEQ ID NO: 1936790 - DNA, 25 bp, Homo sapien
gctcaccattggtaccttcagcaga

SEQ ID NO: 1936791 - DNA, 25 bp, Homo sapien
gaagacatgggatattttcaccagc

SEQ ID NO: 1936792 - DNA, 25 bp, Homo sapien
tcatcattacatgcacagcagacct

SEQ ID NO: 1936793 - DNA, 25 bp, Homo sapien
tattaccaaaggttgcccacttgag

SEQ ID NO: 1936794 - DNA, 25 bp, Homo sapien
gacacacatttagtgcacggcttat

SEQ ID NO: 1936795 - DNA, 25 bp, Homo sapien
gcagacctttacctattgtgatacc

SEQ ID NO: 1936796 - DNA, 25 bp, Homo sapien
gcctgtatttgtatgcaaaatgtcc

SEQ ID NO: 1936797 - DNA, 25 bp, Homo sapien
aattccctgagctctcaactccaag

SEQ ID NO: 1936798 - DNA, 25 bp, Homo sapien
caaagtctagagcttttatcaggcc

SEQ ID NO: 1936799 - DNA, 25 bp, Homo sapien
tatcaggccatgtcatacccaagaa

SEQ ID NO: 1936800 - DNA, 25 bp, Homo sapien
gacatctgttgaagggtccaagtcg

SEQ ID NO: 1936801 - DNA, 25 bp, Homo sapien
gcagtgttgctcaaagcagccagtg

SEQ ID NO: 1936802 - DNA, 25 bp, Homo sapien
tgagaaaatgggctgactgctggca

SEQ ID NO: 1936803 - DNA, 25 bp, Homo sapien
tccaagtcgtgaatgtggttgcatg

SEQ ID NO: 1936804 - DNA, 25 bp, Homo sapien
tcaggagaatcaggaaggtggggtg

SEQ ID NO: 1936805 - DNA, 25 bp, Homo sapien
aggagaatcaggaaggtggggtgtg

SEQ ID NO: 1936806 - DNA, 25 bp, Homo sapien
ttcaggagaatcaggaaggtggggt

SEQ ID NO: 1936807 - DNA, 25 bp, Homo sapien
cttcaggagaatcaggaaggtgggg

SEQ ID NO: 1936808 - DNA, 25 bp, Homo sapien
aggcaggcagtgaggaaagcagagc

SEQ ID NO: 1936809 - DNA, 25 bp, Homo sapien
ggccttccttagaggggccctctgc

SEQ ID NO: 1936810 - DNA, 25 bp, Homo sapien
gcacctcacctacgaaacatgtaat

SEQ ID NO: 1936811 - DNA, 25 bp, Homo sapien
cctacgaaacatgtaatttcccaca

SEQ ID NO: 1936812 - DNA, 25 bp, Homo sapien
tctgcacctcacctacgaaacatgt

SEQ ID NO: 1936813 - DNA, 25 bp, Homo sapien
ccttctctgttagaggctgaattgt

SEQ ID NO: 1936814 - DNA, 25 bp, Homo sapien
agtgttggagccctgactcctagga

SEQ ID NO: 1936815 - DNA, 25 bp, Homo sapien
tccccagaattaaagtgttggagcc

SEQ ID NO: 1936816 - DNA, 25 bp, Homo sapien
gctgttggaactcagcggtcgtcct

SEQ ID NO: 1936817 - DNA, 25 bp, Homo sapien
gttggaggcttgtgtaattcatggt

SEQ ID NO: 1936818 - DNA, 25 bp, Homo sapien
ctagttcctgctaccattcatagct

SEQ ID NO: 1936819 - DNA, 25 bp, Homo sapien
catggttacatcttccctgccttgg

SEQ ID NO: 1936820 - DNA, 25 bp, Homo sapien
tagttcctgctaccattcatagctg

SEQ ID NO: 1936821 - DNA, 25 bp, Homo sapien
tgagtctctggcacattctttcttt

SEQ ID NO: 1936822 - DNA, 25 bp, Homo sapien
gtctctggcacattctttctttggc

SEQ ID NO: 1936823 - DNA, 25 bp, Homo sapien
ctcttttacctcaagataggctgaa

SEQ ID NO: 1936824 - DNA, 25 bp, Homo sapien
ggctcttttacctcaagataggctg

SEQ ID NO: 1936825 - DNA, 25 bp, Homo sapien
ctcaacgtgtctgtaccaccttcta

SEQ ID NO: 1936826 - DNA, 25 bp, Homo sapien
tcaagtcattcccctcaacgtgtct

SEQ ID NO: 1936827 - DNA, 25 bp, Homo sapien
tctgtaccaccttctatgctcttgc

SEQ ID NO: 1936828 - DNA, 25 bp, Homo sapien
aacgtgtctgtaccaccttctatgc

SEQ ID NO: 1936829 - DNA, 25 bp, Homo sapien
tcccagaaggtatcatgcaggatgg

SEQ ID NO: 1936830 - DNA, 25 bp, Homo sapien
taccatgcttgttgagaggtgccaa

SEQ ID NO: 1936831 - DNA, 25 bp, Homo sapien
tgacactggctctgtggcatcactg

SEQ ID NO: 1936832 - DNA, 25 bp, Homo sapien
tgcactggcttacccatcagggaaa

SEQ ID NO: 1936833 - DNA, 25 bp, Homo sapien
cctttaggaagaagcatagaggagg

SEQ ID NO: 1936834 - DNA, 25 bp, Homo sapien
gatttgtcaattgaggatagaataa

SEQ ID NO: 1936835 - DNA, 25 bp, Homo sapien
ttttctggtgacataaatttctcac

SEQ ID NO: 1936836 - DNA, 25 bp, Homo sapien
gaaagtagcctcatcggtcctaagt

SEQ ID NO: 1936837 - DNA, 25 bp, Homo sapien
cagaaggatcatggattttaactgc

SEQ ID NO: 1936838 - DNA, 25 bp, Homo sapien
tactcaacaagacctttgtctgcct

SEQ ID NO: 1936839 - DNA, 25 bp, Homo sapien
ggatcatggattttaactgctctga

SEQ ID NO: 1936840 - DNA, 25 bp, Homo sapien
ctttgtctgcctctggtcagtttcc

SEQ ID NO: 1936841 - DNA, 25 bp, Homo sapien
tataggggtaatgatacttttgtcc

SEQ ID NO: 1936842 - DNA, 25 bp, Homo sapien
ccagaaggcaacttctgttataggg

SEQ ID NO: 1936843 - DNA, 25 bp, Homo sapien
agccgatgacagaaggccagaaggc

SEQ ID NO: 1936844 - DNA, 25 bp, Homo sapien
ccttcttgcctggagccgatgacag

SEQ ID NO: 1936845 - DNA, 25 bp, Homo sapien
gggggaatgcaaggaagggagtaga

SEQ ID NO: 1936846 - DNA, 25 bp, Homo sapien
tgagaatattcgtgaggggaaaatg

SEQ ID NO: 1936847 - DNA, 25 bp, Homo sapien
gagcattggagaccaaaagattggg

SEQ ID NO: 1936848 - DNA, 25 bp, Homo sapien
aaatattgtgagaatattcgtgagg

SEQ ID NO: 1936849 - DNA, 25 bp, Homo sapien
ttctaggggataattcctcctgaaa

SEQ ID NO: 1936850 - DNA, 25 bp, Homo sapien
gtttttacgttggtgagtgcctgca

SEQ ID NO: 1936851 - DNA, 25 bp, Homo sapien
gcctctgtgggctagtgtggaactc

SEQ ID NO: 1936852 - DNA, 25 bp, Homo sapien
aaacactgtccatactcttctggtg

SEQ ID NO: 1936853 - DNA, 25 bp, Homo sapien
taaacaagaggcagcataacgtcgt

SEQ ID NO: 1936854 - DNA, 25 bp, Homo sapien
ttactgctctccttgtaaacaagag

SEQ ID NO: 1936855 - DNA, 25 bp, Homo sapien
gagttagaatttgtagcacacgcta

SEQ ID NO: 1936856 - DNA, 25 bp, Homo sapien
gtcacaggtgaattttctatactcc

SEQ ID NO: 1936857 - DNA, 25 bp, Homo sapien
tatttccatcagataaaggctggca

SEQ ID NO: 1936858 - DNA, 25 bp, Homo sapien
ggttcgtgaaattgagtgcgtgcca

SEQ ID NO: 1936859 - DNA, 25 bp, Homo sapien
gatcttcactttgtgacaagccgga

SEQ ID NO: 1936860 - DNA, 25 bp, Homo sapien
taactctcatcacggttttccaagg

SEQ ID NO: 1936861 - DNA, 25 bp, Homo sapien
tcaaagatggtctcaggaaagcgct

SEQ ID NO: 1936862 - DNA, 25 bp, Homo sapien
gacaggttgtaggttgtattcccag

SEQ ID NO: 1936863 - DNA, 25 bp, Homo sapien
tttgcctggatctgattcaaagatg

SEQ ID NO: 1936864 - DNA, 25 bp, Homo sapien
ggaaagcgctgaaggatgaaattac

SEQ ID NO: 1936865 - DNA, 25 bp, Homo sapien
gcctttgccttaatgtggccaccat

SEQ ID NO: 1936866 - DNA, 25 bp, Homo sapien
taatgtggccaccatctgagaattc

SEQ ID NO: 1936867 - DNA, 25 bp, Homo sapien
tggagagctcttatgtgcctttgcc

SEQ ID NO: 1936868 - DNA, 25 bp, Homo sapien
gctgacattggtcttgaggtgacct

SEQ ID NO: 1936869 - DNA, 25 bp, Homo sapien
cacgtctttccagagctatactcat

SEQ ID NO: 1936870 - DNA, 25 bp, Homo sapien
gggctcacgtctttccagagctata

SEQ ID NO: 1936871 - DNA, 25 bp, Homo sapien
gctcacgtctttccagagctatact

SEQ ID NO: 1936872 - DNA, 25 bp, Homo sapien
tcacgtctttccagagctatactca

SEQ ID NO: 1936873 - DNA, 25 bp, Homo sapien
aagtattggagatgtaaataatcat

SEQ ID NO: 1936874 - DNA, 25 bp, Homo sapien
aaagtattggagatgtaaataatca

SEQ ID NO: 1936875 - DNA, 25 bp, Homo sapien
gagctaacagattgtaagcacaact

SEQ ID NO: 1936876 - DNA, 25 bp, Homo sapien
gattgtaagcacaactttcctgttt

SEQ ID NO: 1936877 - DNA, 25 bp, Homo sapien
gttcttccggagctaacagattgta

SEQ ID NO: 1936878 - DNA, 25 bp, Homo sapien
tacaaaggcaatgttcttccggagc

SEQ ID NO: 1936879 - DNA, 25 bp, Homo sapien
tatagcacagtcaaaaggattgtgg

SEQ ID NO: 1936880 - DNA, 25 bp, Homo sapien
tcagctccatcacctcgtgggaaat

SEQ ID NO: 1936881 - DNA, 25 bp, Homo sapien
tgtcacagacagaatagctgcatct

SEQ ID NO: 1936882 - DNA, 25 bp, Homo sapien
gagtgaatcaggcaaggattttgag

SEQ ID NO: 1936883 - DNA, 25 bp, Homo sapien
ggaagcaagggccagaaccaatatg

SEQ ID NO: 1936884 - DNA, 25 bp, Homo sapien
ccaatatggcgtcttttattgttac

SEQ ID NO: 1936885 - DNA, 25 bp, Homo sapien
agccctgaagaagaagttccctctt

SEQ ID NO: 1936886 - DNA, 25 bp, Homo sapien
cagtggaccgaattagatgttagaa

SEQ ID NO: 1936887 - DNA, 25 bp, Homo sapien
ttctggactggtcatggtggaggat

SEQ ID NO: 1936888 - DNA, 25 bp, Homo sapien
actacatcatctagaagaattctgg

SEQ ID NO: 1936889 - DNA, 25 bp, Homo sapien
gaaccccttgtgagatgtgcaacag

SEQ ID NO: 1936890 - DNA, 25 bp, Homo sapien
aagactcaggtcagttgctagctcc

SEQ ID NO: 1936891 - DNA, 25 bp, Homo sapien
tgtaggagccaaggcgagtgctttt

SEQ ID NO: 1936892 - DNA, 25 bp, Homo sapien
ggtctgaccctatggcagtgcctag

SEQ ID NO: 1936893 - DNA, 25 bp, Homo sapien
taaaattcaccgaatatttagccat

SEQ ID NO: 1936894 - DNA, 25 bp, Homo sapien
cattaaaattcaccgaatatttagc

SEQ ID NO: 1936895 - DNA, 25 bp, Homo sapien
tcattaaaattcaccgaatatttag

SEQ ID NO: 1936896 - DNA, 25 bp, Homo sapien
ttaaaattcaccgaatatttagcca

SEQ ID NO: 1936897 - DNA, 25 bp, Homo sapien
tcccgtaaggagaagaggtatttgc

SEQ ID NO: 1936898 - DNA, 25 bp, Homo sapien
caacagcaggaacagatagcctgtg

SEQ ID NO: 1936899 - DNA, 25 bp, Homo sapien
ctctctgagggaaagaatacagagc

SEQ ID NO: 1936900 - DNA, 25 bp, Homo sapien
ctatattcgaaagtgctggctcttt

SEQ ID NO: 1936901 - DNA, 25 bp, Homo sapien
catggagatctctgattcctttcat

SEQ ID NO: 1936902 - DNA, 25 bp, Homo sapien
attttgttttacatggagatctctg

SEQ ID NO: 1936903 - DNA, 25 bp, Homo sapien
tgttttacatggagatctctgattc

SEQ ID NO: 1936904 - DNA, 25 bp, Homo sapien
tttacatggagatctctgattcctt

SEQ ID NO: 1936905 - DNA, 25 bp, Homo sapien
gattaactcctacgcttatgaagga

SEQ ID NO: 1936906 - DNA, 25 bp, Homo sapien
gcaagtacttctggtattatcagaa

SEQ ID NO: 1936907 - DNA, 25 bp, Homo sapien
ccctttgggcaaacaagagataaca

SEQ ID NO: 1936908 - DNA, 25 bp, Homo sapien
ggtatactgatccaaaaaggcaaga

SEQ ID NO: 1936909 - DNA, 25 bp, Homo sapien
aaaatatacagtctgaagagtcaaa

SEQ ID NO: 1936910 - DNA, 25 bp, Homo sapien
gctgaaaaatttgattggcaaactg

SEQ ID NO: 1936911 - DNA, 25 bp, Homo sapien
tattggtctcaaagaggaggtagag

SEQ ID NO: 1936912 - DNA, 25 bp, Homo sapien
gaatcatgcctacaggatccagaaa

SEQ ID NO: 1936913 - DNA, 25 bp, Homo sapien
tactccagtgagaattctaaacttc

SEQ ID NO: 1936914 - DNA, 25 bp, Homo sapien
catagtcttggatcatatactccag

SEQ ID NO: 1936915 - DNA, 25 bp, Homo sapien
acttcttggcaattttatggaggtt

SEQ ID NO: 1936916 - DNA, 25 bp, Homo sapien
ttcttggcaattttatggaggtttc

SEQ ID NO: 1936917 - DNA, 25 bp, Homo sapien
gcacatattcttggtctatagttct

SEQ ID NO: 1936918 - DNA, 25 bp, Homo sapien
tggctagagttccacatggaggagt

SEQ ID NO: 1936919 - DNA, 25 bp, Homo sapien
tcttatagatgaaattggctagagt

SEQ ID NO: 1936920 - DNA, 25 bp, Homo sapien
cattctctggtggatgtgactctga

SEQ ID NO: 1936921 - DNA, 25 bp, Homo sapien
gaaaccagggtattgcagaaattaa

SEQ ID NO: 1936922 - DNA, 25 bp, Homo sapien
ctgtacagagagaaataacgtgtcc

SEQ ID NO: 1936923 - DNA, 25 bp, Homo sapien
tagctattctaatctgcatgtcgga

SEQ ID NO: 1936924 - DNA, 25 bp, Homo sapien
taaactaagcactgaactccgtatc

SEQ ID NO: 1936925 - DNA, 25 bp, Homo sapien
agtcactgccacttttctgttttgc

SEQ ID NO: 1936926 - DNA, 25 bp, Homo sapien
ttagtcactgccacttttctgtttt

SEQ ID NO: 1936927 - DNA, 25 bp, Homo sapien
tctgttttgccagtttcatttttcc

SEQ ID NO: 1936928 - DNA, 25 bp, Homo sapien
ttttgccagtttcatttttcctcca

SEQ ID NO: 1936929 - DNA, 25 bp, Homo sapien
caagcacctgttcattaaatctgct

SEQ ID NO: 1936930 - DNA, 25 bp, Homo sapien
gcacctgttcattaaatctgctcat

SEQ ID NO: 1936931 - DNA, 25 bp, Homo sapien
tgatgcaagcacctgttcattaaat

SEQ ID NO: 1936932 - DNA, 25 bp, Homo sapien
tgcaagcacctgttcattaaatctg

SEQ ID NO: 1936933 - DNA, 25 bp, Homo sapien
gtccttggtacatccttaaaatgcc

SEQ ID NO: 1936934 - DNA, 25 bp, Homo sapien
gtgtttttcatgtgctcctcgtcct

SEQ ID NO: 1936935 - DNA, 25 bp, Homo sapien
gtttttcatgtgctcctcgtccttg

SEQ ID NO: 1936936 - DNA, 25 bp, Homo sapien
gctcctcgtccttggtacatcctta

SEQ ID NO: 1936937 - DNA, 25 bp, Homo sapien
agatgtccgaggcacacttgctggc

SEQ ID NO: 1936938 - DNA, 25 bp, Homo sapien
cacagatgtccgaggcacacttgct

SEQ ID NO: 1936939 - DNA, 25 bp, Homo sapien
atgtccgaggcacacttgctggcct

SEQ ID NO: 1936940 - DNA, 25 bp, Homo sapien
ccacagatgtccgaggcacacttgc

SEQ ID NO: 1936941 - DNA, 25 bp, Homo sapien
gaggtcctgccttgacgttctgaac

SEQ ID NO: 1936942 - DNA, 25 bp, Homo sapien
ccagcagaggagcaagatggaagct

SEQ ID NO: 1936943 - DNA, 25 bp, Homo sapien
tgatggcccctcctccaagatgaat

SEQ ID NO: 1936944 - DNA, 25 bp, Homo sapien
tgaacaggtgaagctcgatcatcct

SEQ ID NO: 1936945 - DNA, 25 bp, Homo sapien
ggctatcaaggagacaaggtgcatt

SEQ ID NO: 1936946 - DNA, 25 bp, Homo sapien
tcaaggagacaaggtgcatttccat

SEQ ID NO: 1936947 - DNA, 25 bp, Homo sapien
tgcagcaggaggctatcaaggagac

SEQ ID NO: 1936948 - DNA, 25 bp, Homo sapien
gaggctatcaaggagacaaggtgca

SEQ ID NO: 1936949 - DNA, 25 bp, Homo sapien
gaccactggtatcaggtggaaacca

SEQ ID NO: 1936950 - DNA, 25 bp, Homo sapien
tcccacagcacaaccatctgttcca

SEQ ID NO: 1936951 - DNA, 25 bp, Homo sapien
gcacaaccatctgttccacttccag

SEQ ID NO: 1936952 - DNA, 25 bp, Homo sapien
tggaaaccagtccattcccacagca

SEQ ID NO: 1936953 - DNA, 25 bp, Homo sapien
acattttattaatgctgtccattcc

SEQ ID NO: 1936954 - DNA, 25 bp, Homo sapien
ccatagcattggtcctttctgtatg

SEQ ID NO: 1936955 - DNA, 25 bp, Homo sapien
ccttgtagtcatgacagaaattgag

SEQ ID NO: 1936956 - DNA, 25 bp, Homo sapien
tgaggttgctgttcataatatccat

SEQ ID NO: 1936957 - DNA, 25 bp, Homo sapien
taaagagctgtactttagtactaaa

SEQ ID NO: 1936958 - DNA, 25 bp, Homo sapien
ggtactgaagtaatgaacaaaattg

SEQ ID NO: 1936959 - DNA, 25 bp, Homo sapien
aggtactgaagtaatgaacaaaatt

SEQ ID NO: 1936960 - DNA, 25 bp, Homo sapien
caaaattgctaaagagctgtacttt

SEQ ID NO: 1936961 - DNA, 25 bp, Homo sapien
ccatccttgaggtgtagtcacaacc

SEQ ID NO: 1936962 - DNA, 25 bp, Homo sapien
ttttctttatcaactgggcactgaa

SEQ ID NO: 1936963 - DNA, 25 bp, Homo sapien
ttttcagagtacacgaagagtaatt

SEQ ID NO: 1936964 - DNA, 25 bp, Homo sapien
ttgtcaatgatgacggccaatttac

SEQ ID NO: 1936965 - DNA, 25 bp, Homo sapien
gaaaatatcaaacatgcaaatattc

SEQ ID NO: 1936966 - DNA, 25 bp, Homo sapien
cttgtaggaatattagaaaatatca

SEQ ID NO: 1936967 - DNA, 25 bp, Homo sapien
aaatatcaaacatgcaaatattctc

SEQ ID NO: 1936968 - DNA, 25 bp, Homo sapien
atatcaaacatgcaaatattctcat

SEQ ID NO: 1936969 - DNA, 25 bp, Homo sapien
tcctcgcaagtagacggaagcattt

SEQ ID NO: 1936970 - DNA, 25 bp, Homo sapien
cgtaaaaactcctcgcaagtagacg

SEQ ID NO: 1936971 - DNA, 25 bp, Homo sapien
tcacgtaaaaactcctcgcaagtag

SEQ ID NO: 1936972 - DNA, 25 bp, Homo sapien
aaaactcctcgcaagtagacggaag

SEQ ID NO: 1936973 - DNA, 25 bp, Homo sapien
ttgggcaggatggaagtactccaga

SEQ ID NO: 1936974 - DNA, 25 bp, Homo sapien
gatggaagtactccagatcaactcc

SEQ ID NO: 1936975 - DNA, 25 bp, Homo sapien
caggatggaagtactccagatcaac

SEQ ID NO: 1936976 - DNA, 25 bp, Homo sapien
cttccacactcagttctgccttcag

SEQ ID NO: 1936977 - DNA, 25 bp, Homo sapien
tggctttcttgatgccggttggtct

SEQ ID NO: 1936978 - DNA, 25 bp, Homo sapien
ctaaattagccttcccaagtggctt

SEQ ID NO: 1936979 - DNA, 25 bp, Homo sapien
gatgccggttggtctctgcttgaag

SEQ ID NO: 1936980 - DNA, 25 bp, Homo sapien
ttcttgatgccggttggtctctgct

SEQ ID NO: 1936981 - DNA, 25 bp, Homo sapien
agctgcagatcatgaaaccactgtc

SEQ ID NO: 1936982 - DNA, 25 bp, Homo sapien
aagactggctttggttgtactgtgc

SEQ ID NO: 1936983 - DNA, 25 bp, Homo sapien
ctttggttgtactgtgctctgggcc

SEQ ID NO: 1936984 - DNA, 25 bp, Homo sapien
tgtcttgatcctgcccacttaggga

SEQ ID NO: 1936985 - DNA, 25 bp, Homo sapien
cgctgtctttgcctaatcaactaag

SEQ ID NO: 1936986 - DNA, 25 bp, Homo sapien
gtcacatcttcaggagccactactg

SEQ ID NO: 1936987 - DNA, 25 bp, Homo sapien
gtcaatcctttccaacgctgtcttt

SEQ ID NO: 1936988 - DNA, 25 bp, Homo sapien
gaagtcaagtcttgaacctcccaaa

SEQ ID NO: 1936989 - DNA, 25 bp, Homo sapien
tcatctctctcattaactgtattcc

SEQ ID NO: 1936990 - DNA, 25 bp, Homo sapien
tgtctcgtgatagcaaatgggtttc

SEQ ID NO: 1936991 - DNA, 25 bp, Homo sapien
taggaatgctactgactttcatact

SEQ ID NO: 1936992 - DNA, 25 bp, Homo sapien
gcttgggtgctgttactgtatagga

SEQ ID NO: 1936993 - DNA, 25 bp, Homo sapien
agggagagtgcaaacgaaattcctc

SEQ ID NO: 1936994 - DNA, 25 bp, Homo sapien
gcaaacgaaattcctcactaccaca

SEQ ID NO: 1936995 - DNA, 25 bp, Homo sapien
caatggataagcccactctgggtaa

SEQ ID NO: 1936996 - DNA, 25 bp, Homo sapien
ttgtaatcacaatatctcacctgcc

SEQ ID NO: 1936997 - DNA, 25 bp, Homo sapien
atcttcgtgatcttccctggcagcc

SEQ ID NO: 1936998 - DNA, 25 bp, Homo sapien
catcttcgtgatcttccctggcagc

SEQ ID NO: 1936999 - DNA, 25 bp, Homo sapien
tctctcttctctcggttcatagatt

SEQ ID NO: 1937000 - DNA, 25 bp, Homo sapien
aagcttctctacgtgtacttcagta

SEQ ID NO: 1937001 - DNA, 25 bp, Homo sapien
cactggcacctgatttatccattca

SEQ ID NO: 1937002 - DNA, 25 bp, Homo sapien
ttctctcggttcatagatttctggg

SEQ ID NO: 1937003 - DNA, 25 bp, Homo sapien
tggaagcacactcgtgtgaacaaag

SEQ ID NO: 1937004 - DNA, 25 bp, Homo sapien
aagcacactcgtgtgaacaaagtac

SEQ ID NO: 1937005 - DNA, 25 bp, Homo sapien
tctggaagcacactcgtgtgaacaa

SEQ ID NO: 1937006 - DNA, 25 bp, Homo sapien
gctctggaagcacactcgtgtgaac

SEQ ID NO: 1937007 - DNA, 25 bp, Homo sapien
gaatccacagtcacttgtgctgaat

SEQ ID NO: 1937008 - DNA, 25 bp, Homo sapien
ctggatggacgtgttccacagtcac

SEQ ID NO: 1937009 - DNA, 25 bp, Homo sapien
ttccacagtcacttgtgctgaatcc

SEQ ID NO: 1937010 - DNA, 25 bp, Homo sapien
ttgtgctgaatccacagtcacttgt

SEQ ID NO: 1937011 - DNA, 25 bp, Homo sapien
caatagttgggtttacacccagtgt

SEQ ID NO: 1937012 - DNA, 25 bp, Homo sapien
gacgctctgaaatagtgtcactgag

SEQ ID NO: 1937013 - DNA, 25 bp, Homo sapien
ctgagatgcctcattaatttacttc

SEQ ID NO: 1937014 - DNA, 25 bp, Homo sapien
ttgatatgtcacaggttcagtttgc

SEQ ID NO: 1937015 - DNA, 25 bp, Homo sapien
gcagacatggcatttatagagcttc

SEQ ID NO: 1937016 - DNA, 25 bp, Homo sapien
gacatacataaactttcttcccagt

SEQ ID NO: 1937017 - DNA, 25 bp, Homo sapien
catacataaactttcttcccagttc

SEQ ID NO: 1937018 - DNA, 25 bp, Homo sapien
tgttgcagacatggcatttatagag

SEQ ID NO: 1937019 - DNA, 25 bp, Homo sapien
cccaaagatacctttcattgcatat

SEQ ID NO: 1937020 - DNA, 25 bp, Homo sapien
gtagagtgtgatttcatgcgttcct

SEQ ID NO: 1937021 - DNA, 25 bp, Homo sapien
tccatgtgctctcccaaagatacct

SEQ ID NO: 1937022 - DNA, 25 bp, Homo sapien
catgcgttccttcaaatgataaaac

SEQ ID NO: 1937023 - DNA, 25 bp, Homo sapien
tgtgaaggttgtcacatgtgacaac

SEQ ID NO: 1937024 - DNA, 25 bp, Homo sapien
catgtgaaggttgtcacatgtgaca

SEQ ID NO: 1937025 - DNA, 25 bp, Homo sapien
gtgaaggttgtcacatgtgacaact

SEQ ID NO: 1937026 - DNA, 25 bp, Homo sapien
acatgtgaaggttgtcacatgtgac

SEQ ID NO: 1937027 - DNA, 25 bp, Homo sapien
gttccacagtttcgatactttctac

SEQ ID NO: 1937028 - DNA, 25 bp, Homo sapien
actttgatgatacttgctggtaata

SEQ ID NO: 1937029 - DNA, 25 bp, Homo sapien
cttgtagggtcagatgcatggccat

SEQ ID NO: 1937030 - DNA, 25 bp, Homo sapien
ctgtatgcttgtagggtcagatgca

SEQ ID NO: 1937031 - DNA, 25 bp, Homo sapien
gggtcagatgcatggccatcttctt

SEQ ID NO: 1937032 - DNA, 25 bp, Homo sapien
gtgtactttatggatgcttggcaga

SEQ ID NO: 1937033 - DNA, 25 bp, Homo sapien
gaatcattagaggaacttgtgttct

SEQ ID NO: 1937034 - DNA, 25 bp, Homo sapien
tctgtgtgtactttatggatgcttg

SEQ ID NO: 1937035 - DNA, 25 bp, Homo sapien
tcacttcaattgtgccttcagcaat

SEQ ID NO: 1937036 - DNA, 25 bp, Homo sapien
ggtcattttaccaacaacttctatc

SEQ ID NO: 1937037 - DNA, 25 bp, Homo sapien
aggtcattttaccaacaacttctat

SEQ ID NO: 1937038 - DNA, 25 bp, Homo sapien
gtcattttaccaacaacttctatct

SEQ ID NO: 1937039 - DNA, 25 bp, Homo sapien
tcattttaccaacaacttctatctc

SEQ ID NO: 1937040 - DNA, 25 bp, Homo sapien
tgtcagtaaaccagtcccgatcttg

SEQ ID NO: 1937041 - DNA, 25 bp, Homo sapien
ggatgatgtcagtaaaccagtcccg

SEQ ID NO: 1937042 - DNA, 25 bp, Homo sapien
atcaggatgatgtcagtaaaccagt

SEQ ID NO: 1937043 - DNA, 25 bp, Homo sapien
gatgtcagtaaaccagtcccgatct

SEQ ID NO: 1937044 - DNA, 25 bp, Homo sapien
cagtcagtcgaggatcatctgatga

SEQ ID NO: 1937045 - DNA, 25 bp, Homo sapien
agtcagtcgaggatcatctgatgat

SEQ ID NO: 1937046 - DNA, 25 bp, Homo sapien
tcagtcagtcgaggatcatctgatg

SEQ ID NO: 1937047 - DNA, 25 bp, Homo sapien
cctattattacatattgggcagaag

SEQ ID NO: 1937048 - DNA, 25 bp, Homo sapien
gagtacaattattcagagcatgcct

SEQ ID NO: 1937049 - DNA, 25 bp, Homo sapien
ctgtgtgagcttgcaccagtcgtca

SEQ ID NO: 1937050 - DNA, 25 bp, Homo sapien
gaaggagttacgaagattgtcccac

SEQ ID NO: 1937051 - DNA, 25 bp, Homo sapien
ttgttttaagtaatccagaatccca

SEQ ID NO: 1937052 - DNA, 25 bp, Homo sapien
tgttttaagtaatccagaatcccaa

SEQ ID NO: 1937053 - DNA, 25 bp, Homo sapien
tttaagtaatccagaatcccaaggc

SEQ ID NO: 1937054 - DNA, 25 bp, Homo sapien
ttaagtaatccagaatcccaaggcc

SEQ ID NO: 1937055 - DNA, 25 bp, Homo sapien
atccccgagcagcacatgtcagctg

SEQ ID NO: 1937056 - DNA, 25 bp, Homo sapien
tccccgagcagcacatgtcagctgt

SEQ ID NO: 1937057 - DNA, 25 bp, Homo sapien
tttcctgtctctttgaaatttaaca

SEQ ID NO: 1937058 - DNA, 25 bp, Homo sapien
ttgccctttcctgtctctttgaaat

SEQ ID NO: 1937059 - DNA, 25 bp, Homo sapien
tttcagctcttgctttgccctttcc

SEQ ID NO: 1937060 - DNA, 25 bp, Homo sapien
gctttgccctttcctgtctctttga

SEQ ID NO: 1937061 - DNA, 25 bp, Homo sapien
tcactggtgcctgctactcttaatc

SEQ ID NO: 1937062 - DNA, 25 bp, Homo sapien
cacagattctgtagataaggcttat

SEQ ID NO: 1937063 - DNA, 25 bp, Homo sapien
aaaattccgtcatagtcactggtgc

SEQ ID NO: 1937064 - DNA, 25 bp, Homo sapien
taaggcttatatgcttgtaagggag

SEQ ID NO: 1937065 - DNA, 25 bp, Homo sapien
atagagacacgttattttgtacacg

SEQ ID NO: 1937066 - DNA, 25 bp, Homo sapien
aatagagacacgttattttgtacac

SEQ ID NO: 1937067 - DNA, 25 bp, Homo sapien
gctaattaccagcacaccacaatca

SEQ ID NO: 1937068 - DNA, 25 bp, Homo sapien
ctaattaccagcacaccacaatcac

SEQ ID NO: 1937069 - DNA, 25 bp, Homo sapien
tgtcacactctccatccaatctctc

SEQ ID NO: 1937070 - DNA, 25 bp, Homo sapien
ttgcttcttagagcatcacttatca

SEQ ID NO: 1937071 - DNA, 25 bp, Homo sapien
gtcacactctccatccaatctctcc

SEQ ID NO: 1937072 - DNA, 25 bp, Homo sapien
tgcttcttagagcatcacttatcaa

SEQ ID NO: 1937073 - DNA, 25 bp, Homo sapien
caaatttcatgtgggatgcttgcat

SEQ ID NO: 1937074 - DNA, 25 bp, Homo sapien
atttcatgtgggatgcttgcatcca

SEQ ID NO: 1937075 - DNA, 25 bp, Homo sapien
ttcccaaatttcatgtgggatgctt

SEQ ID NO: 1937076 - DNA, 25 bp, Homo sapien
cccaaatttcatgtgggatgcttgc

SEQ ID NO: 1937077 - DNA, 25 bp, Homo sapien
ttcagcgatgagtgaacagtcatgc

SEQ ID NO: 1937078 - DNA, 25 bp, Homo sapien
agaaagttatggcatgctgacacag

SEQ ID NO: 1937079 - DNA, 25 bp, Homo sapien
ccctttgccataacaactggacaga

SEQ ID NO: 1937080 - DNA, 25 bp, Homo sapien
acaagtggatttcagcgatgagtga

SEQ ID NO: 1937081 - DNA, 25 bp, Homo sapien
tgatgccctgtatagcagccactgc

SEQ ID NO: 1937082 - DNA, 25 bp, Homo sapien
cagcagccggagagtggatagcaaa

SEQ ID NO: 1937083 - DNA, 25 bp, Homo sapien
gtgatgccctgtatagcagccactg

SEQ ID NO: 1937084 - DNA, 25 bp, Homo sapien
accaccagcagccggagagtggata

SEQ ID NO: 1937085 - DNA, 25 bp, Homo sapien
acgtgacagtggtggtagtagtaca

SEQ ID NO: 1937086 - DNA, 25 bp, Homo sapien
tcccagcttccgtgcaagtagaaac

SEQ ID NO: 1937087 - DNA, 25 bp, Homo sapien
tgtaatgcttcttgctccccagacc

SEQ ID NO: 1937088 - DNA, 25 bp, Homo sapien
ctcttagggaagaacttacaggtct

SEQ ID NO: 1937089 - DNA, 25 bp, Homo sapien
tctaatgactggaagaatttgcccc

SEQ ID NO: 1937090 - DNA, 25 bp, Homo sapien
taccatgggcaacaggaatttttct

SEQ ID NO: 1937091 - DNA, 25 bp, Homo sapien
ggaagccattcctataccaggatgg

SEQ ID NO: 1937092 - DNA, 25 bp, Homo sapien
tggtggtgcccctacaagacatatt

SEQ ID NO: 1937093 - DNA, 25 bp, Homo sapien
ttaccacatttaacacattctattg

SEQ ID NO: 1937094 - DNA, 25 bp, Homo sapien
aattatctgtttatgcatctgcaca

SEQ ID NO: 1937095 - DNA, 25 bp, Homo sapien
ttatctgtttatgcatctgcacact

SEQ ID NO: 1937096 - DNA, 25 bp, Homo sapien
gaaattatctgtttatgcatctgca

SEQ ID NO: 1937097 - DNA, 25 bp, Homo sapien
tgattttgaaatacattagacatcc

SEQ ID NO: 1937098 - DNA, 25 bp, Homo sapien
tgggtgattttgaaatacattagac

SEQ ID NO: 1937099 - DNA, 25 bp, Homo sapien
tgaaatacattagacatcccattca

SEQ ID NO: 1937100 - DNA, 25 bp, Homo sapien
tgccaaaagttttgggtgattttga

SEQ ID NO: 1937101 - DNA, 25 bp, Homo sapien
tttcttagacattaaagaaattcac

SEQ ID NO: 1937102 - DNA, 25 bp, Homo sapien
aatagtcctaaactgattttgtcta

SEQ ID NO: 1937103 - DNA, 25 bp, Homo sapien
aaactgattttgtctatcagagcaa

SEQ ID NO: 1937104 - DNA, 25 bp, Homo sapien
tgtatcatggaaattatgaagctgg

SEQ ID NO: 1937105 - DNA, 25 bp, Homo sapien
cctgaataccaattattacctctag

SEQ ID NO: 1937106 - DNA, 25 bp, Homo sapien
cttaatgctagcttataaatttaac

SEQ ID NO: 1937107 - DNA, 25 bp, Homo sapien
tgtaaatgagttacctgaataccaa

SEQ ID NO: 1937108 - DNA, 25 bp, Homo sapien
aagggagctggacttcactttactt

SEQ ID NO: 1937109 - DNA, 25 bp, Homo sapien
ttatagtggaaatgtgtcctggcta

SEQ ID NO: 1937110 - DNA, 25 bp, Homo sapien
tagtggaaatgtgtcctggctagct

SEQ ID NO: 1937111 - DNA, 25 bp, Homo sapien
tatagtggaaatgtgtcctggctag

SEQ ID NO: 1937112 - DNA, 25 bp, Homo sapien
gtggaaatgtgtcctggctagctgc

SEQ ID NO: 1937113 - DNA, 25 bp, Homo sapien
gacagttgagttaacccttctgacc

SEQ ID NO: 1937114 - DNA, 25 bp, Homo sapien
tcaccttgcacatagaggctctcaa

SEQ ID NO: 1937115 - DNA, 25 bp, Homo sapien
gagctccactgaaacttaccttgta

SEQ ID NO: 1937116 - DNA, 25 bp, Homo sapien
taagggctttgaatcaaacccagct

SEQ ID NO: 1937117 - DNA, 25 bp, Homo sapien
ttctaggcagcacatttttgaaggc

SEQ ID NO: 1937118 - DNA, 25 bp, Homo sapien
tgtttctaggcagcacatttttgaa

SEQ ID NO: 1937119 - DNA, 25 bp, Homo sapien
gtagaacctagggtgatgagctgca

SEQ ID NO: 1937120 - DNA, 25 bp, Homo sapien
atttcctgtagaacctagggtgatg

SEQ ID NO: 1937121 - DNA, 25 bp, Homo sapien
cagactttaacaactgtgaggcagg

SEQ ID NO: 1937122 - DNA, 25 bp, Homo sapien
gaaagtgctgtcacggatccatcgt

SEQ ID NO: 1937123 - DNA, 25 bp, Homo sapien
gcataatcgaaagtcatcccaggtg

SEQ ID NO: 1937124 - DNA, 25 bp, Homo sapien
tatgtctcgctatagaaactcctgc

SEQ ID NO: 1937125 - DNA, 25 bp, Homo sapien
tacaggctacacacagaagaacgaa

SEQ ID NO: 1937126 - DNA, 25 bp, Homo sapien
acaggctacacacagaagaacgaac

SEQ ID NO: 1937127 - DNA, 25 bp, Homo sapien
ctacaggctacacacagaagaacga

SEQ ID NO: 1937128 - DNA, 25 bp, Homo sapien
aaaatcttcttgtgcccgggccaag

SEQ ID NO: 1937129 - DNA, 25 bp, Homo sapien
aaatcttcttgtgcccgggccaagg

SEQ ID NO: 1937130 - DNA, 25 bp, Homo sapien
aatcttcttgtgcccgggccaaggc

SEQ ID NO: 1937131 - DNA, 25 bp, Homo sapien
gattccagcccatcacatactggag

SEQ ID NO: 1937132 - DNA, 25 bp, Homo sapien
gcgttgcagtgcacgtacacgatgt

SEQ ID NO: 1937133 - DNA, 25 bp, Homo sapien
tcttcgtcaatgtagacagccggcc

SEQ ID NO: 1937134 - DNA, 25 bp, Homo sapien
cagacagccgcggtggagcggccca

SEQ ID NO: 1937135 - DNA, 25 bp, Homo sapien
tctctagctacaggaacacagtggc

SEQ ID NO: 1937136 - DNA, 25 bp, Homo sapien
tgaccaaagagatgggaacacccct

SEQ ID NO: 1937137 - DNA, 25 bp, Homo sapien
aaaatagttgtcaggtctggccacc

SEQ ID NO: 1937138 - DNA, 25 bp, Homo sapien
tccgacggtcacacacaagagttct

SEQ ID NO: 1937139 - DNA, 25 bp, Homo sapien
ggatctgccgtgaggcccagaattc

SEQ ID NO: 1937140 - DNA, 25 bp, Homo sapien
aggcccagaattctcccatgacagc

SEQ ID NO: 1937141 - DNA, 25 bp, Homo sapien
tttggtgaaatacaagtgcccctga

SEQ ID NO: 1937142 - DNA, 25 bp, Homo sapien
caacacaacacactgagatgaggca

SEQ ID NO: 1937143 - DNA, 25 bp, Homo sapien
gaaggacagagtttaccaaggacca

SEQ ID NO: 1937144 - DNA, 25 bp, Homo sapien
tcctcagcttcaggctcatcaagct

SEQ ID NO: 1937145 - DNA, 25 bp, Homo sapien
atcatcctcagcttcaggctcatca

SEQ ID NO: 1937146 - DNA, 25 bp, Homo sapien
attccacccagccaggcatcatcct

SEQ ID NO: 1937147 - DNA, 25 bp, Homo sapien
catcctcagcttcaggctcatcaag

SEQ ID NO: 1937148 - DNA, 25 bp, Homo sapien
tacccagtggtgacaaggctttagc

SEQ ID NO: 1937149 - DNA, 25 bp, Homo sapien
catttaacgtaggttcaggcttgcc

SEQ ID NO: 1937150 - DNA, 25 bp, Homo sapien
cacggcaccgtgagattacagcgag

SEQ ID NO: 1937151 - DNA, 25 bp, Homo sapien
catttccgtgcaatgggagagccga

SEQ ID NO: 1937152 - DNA, 25 bp, Homo sapien
gaacctgcctgaagcgtctgtgtaa

SEQ ID NO: 1937153 - DNA, 25 bp, Homo sapien
gcagggagaagcttcatagctggta

SEQ ID NO: 1937154 - DNA, 25 bp, Homo sapien
taaggggttgaaattgcatgggtct

SEQ ID NO: 1937155 - DNA, 25 bp, Homo sapien
cagatgatcatgaacataaggggtt

SEQ ID NO: 1937156 - DNA, 25 bp, Homo sapien
gaggcagaacagttctgatccttac

SEQ ID NO: 1937157 - DNA, 25 bp, Homo sapien
aagatattaaattatagatagacag

SEQ ID NO: 1937158 - DNA, 25 bp, Homo sapien
ctctgggtagcggttacagcctgag

SEQ ID NO: 1937159 - DNA, 25 bp, Homo sapien
ggccaagccttcttccctatatagt

SEQ ID NO: 1937160 - DNA, 25 bp, Homo sapien
aatcatagtgtctggagtcatgggc

SEQ ID NO: 1937161 - DNA, 25 bp, Homo sapien
gctcatatctggtgttggcatccag

SEQ ID NO: 1937162 - DNA, 25 bp, Homo sapien
tacatgttccacctgacgagggcag

SEQ ID NO: 1937163 - DNA, 25 bp, Homo sapien
aatccccaattcatgcttcagtttg

SEQ ID NO: 1937164 - DNA, 25 bp, Homo sapien
cttcagtttgatggttacatgttcc

SEQ ID NO: 1937165 - DNA, 25 bp, Homo sapien
gttacatgttccacctgacgagggc

SEQ ID NO: 1937166 - DNA, 25 bp, Homo sapien
ctacccagccagatatttggtagaa

SEQ ID NO: 1937167 - DNA, 25 bp, Homo sapien
tacccagccagatatttggtagaat

SEQ ID NO: 1937168 - DNA, 25 bp, Homo sapien
acccagccagatatttggtagaatt

SEQ ID NO: 1937169 - DNA, 25 bp, Homo sapien
tctgtattgtgacttcctagagaac

SEQ ID NO: 1937170 - DNA, 25 bp, Homo sapien
gtgttcccatggcatcttatacata

SEQ ID NO: 1937171 - DNA, 25 bp, Homo sapien
agtacccacggcacttaacattgca

SEQ ID NO: 1937172 - DNA, 25 bp, Homo sapien
ttgcatccagcatatagttataagc

SEQ ID NO: 1937173 - DNA, 25 bp, Homo sapien
tatttccgcagaaacggtaggtata

SEQ ID NO: 1937174 - DNA, 25 bp, Homo sapien
ctatttccgtttagtttgagtcctg

SEQ ID NO: 1937175 - DNA, 25 bp, Homo sapien
tcccagttgcctacagaactttaca

SEQ ID NO: 1937176 - DNA, 25 bp, Homo sapien
taaaatggagagtttagcttatggc

SEQ ID NO: 1937177 - DNA, 25 bp, Homo sapien
ggctataagcaataagacacacaaa

SEQ ID NO: 1937178 - DNA, 25 bp, Homo sapien
tataagcaataagacacacaaaaag

SEQ ID NO: 1937179 - DNA, 25 bp, Homo sapien
tcattatggctataagcaataagac

SEQ ID NO: 1937180 - DNA, 25 bp, Homo sapien
tatggctataagcaataagacacac

SEQ ID NO: 1937181 - DNA, 25 bp, Homo sapien
gaagcagaccttccataatggttca

SEQ ID NO: 1937182 - DNA, 25 bp, Homo sapien
cctggaaaaaggctagccaagcttg

SEQ ID NO: 1937183 - DNA, 25 bp, Homo sapien
tagcgtcacatagaaaaccctggaa

SEQ ID NO: 1937184 - DNA, 25 bp, Homo sapien
tgaccctaatataatcagctgggct

SEQ ID NO: 1937185 - DNA, 25 bp, Homo sapien
aaagcaccatcttgaggcacaactg

SEQ ID NO: 1937186 - DNA, 25 bp, Homo sapien
ctggaattcaggcctttggtccctg

SEQ ID NO: 1937187 - DNA, 25 bp, Homo sapien
gtagagctggactcttgagttgaat

SEQ ID NO: 1937188 - DNA, 25 bp, Homo sapien
gagttgaatgtacgtcttgagctac

SEQ ID NO: 1937189 - DNA, 25 bp, Homo sapien
taagtagcaaattatgaacttaaag

SEQ ID NO: 1937190 - DNA, 25 bp, Homo sapien
gcaaattatgaacttaaagagatga

SEQ ID NO: 1937191 - DNA, 25 bp, Homo sapien
tagcaaattatgaacttaaagagat

SEQ ID NO: 1937192 - DNA, 25 bp, Homo sapien
agtagcaaattatgaacttaaagag

SEQ ID NO: 1937193 - DNA, 25 bp, Homo sapien
tacatgttgtcttccactacagcat

SEQ ID NO: 1937194 - DNA, 25 bp, Homo sapien
caaggatcatgtctctccattattg

SEQ ID NO: 1937195 - DNA, 25 bp, Homo sapien
ttgatggtccagcactcaagatggg

SEQ ID NO: 1937196 - DNA, 25 bp, Homo sapien
tctgttcaagttctacgtcctcata

SEQ ID NO: 1937197 - DNA, 25 bp, Homo sapien
cttgaataatgcatggcttggtggc

SEQ ID NO: 1937198 - DNA, 25 bp, Homo sapien
aaatagaagtctgttgtgtgcttca

SEQ ID NO: 1937199 - DNA, 25 bp, Homo sapien
caatccagtgtcctattgggagaca

SEQ ID NO: 1937200 - DNA, 25 bp, Homo sapien
ccagtgtcctattgggagacaatac

SEQ ID NO: 1937201 - DNA, 25 bp, Homo sapien
tggcctcaatccagtgtcctattgg

SEQ ID NO: 1937202 - DNA, 25 bp, Homo sapien
tgtcctattgggagacaatacacac

SEQ ID NO: 1937203 - DNA, 25 bp, Homo sapien
cagcaacggtcatgatgaggtccat

SEQ ID NO: 1937204 - DNA, 25 bp, Homo sapien
catccaccaagttgttttcattgta

SEQ ID NO: 1937205 - DNA, 25 bp, Homo sapien
taagtacagcaacggtcatgatgag

SEQ ID NO: 1937206 - DNA, 25 bp, Homo sapien
gttttcattgtaagtacagcaacgg

SEQ ID NO: 1937207 - DNA, 25 bp, Homo sapien
caaaactagtagtgcggagctagta

SEQ ID NO: 1937208 - DNA, 25 bp, Homo sapien
tagtagtgcggagctagtagcacct

SEQ ID NO: 1937209 - DNA, 25 bp, Homo sapien
aggtcacaaaactagtagtgcggag

SEQ ID NO: 1937210 - DNA, 25 bp, Homo sapien
tgcggagctagtagcacctgcctct

SEQ ID NO: 1937211 - DNA, 25 bp, Homo sapien
ctgatgcctttgtgatgctccctgc

SEQ ID NO: 1937212 - DNA, 25 bp, Homo sapien
ctccctgctgatgtcacatgcacaa

SEQ ID NO: 1937213 - DNA, 25 bp, Homo sapien
ctttctggcgtctgatgcctttgtg

SEQ ID NO: 1937214 - DNA, 25 bp, Homo sapien
gcctttgtgatgctccctgctgatg

SEQ ID NO: 1937215 - DNA, 25 bp, Homo sapien
cacattttgctacttcatttcgtat

SEQ ID NO: 1937216 - DNA, 25 bp, Homo sapien
cattttgctacttcatttcgtatac

SEQ ID NO: 1937217 - DNA, 25 bp, Homo sapien
acattttgctacttcatttcgtata

SEQ ID NO: 1937218 - DNA, 25 bp, Homo sapien
tcccattactttgggtcacctaggc

SEQ ID NO: 1937219 - DNA, 25 bp, Homo sapien
ggataaaacgctacattcatgtggc

SEQ ID NO: 1937220 - DNA, 25 bp, Homo sapien
tactaagacttctcacacctggtga

SEQ ID NO: 1937221 - DNA, 25 bp, Homo sapien
gaagtcctgggaccaacaatggtac

SEQ ID NO: 1937222 - DNA, 25 bp, Homo sapien
tctcactcctgtatgtactggcggc

SEQ ID NO: 1937223 - DNA, 25 bp, Homo sapien
tgcgcagggacgcgggcaaaaagcc

SEQ ID NO: 1937224 - DNA, 25 bp, Homo sapien
gcaaaaagcccgggacgcgcgccgc

SEQ ID NO: 1937225 - DNA, 25 bp, Homo sapien
tcagcccaggtcgcccggggagtgc

SEQ ID NO: 1937226 - DNA, 25 bp, Homo sapien
agcccaggtcgcccggggagtgcgc

SEQ ID NO: 1937227 - DNA, 25 bp, Homo sapien
ttcaggaacttgtaccagaacgtgt

SEQ ID NO: 1937228 - DNA, 25 bp, Homo sapien
cttcaggaacttgtaccagaacgtg

SEQ ID NO: 1937229 - DNA, 25 bp, Homo sapien
tcaggaacttgtaccagaacgtgtc

SEQ ID NO: 1937230 - DNA, 25 bp, Homo sapien
ccggccggcctcaggcggacggcac

SEQ ID NO: 1937231 - DNA, 25 bp, Homo sapien
gccggcctcaggcggacggcaccgc

SEQ ID NO: 1937232 - DNA, 25 bp, Homo sapien
cggccggcctcaggcggacggcacc

SEQ ID NO: 1937233 - DNA, 25 bp, Homo sapien
ggccggcctcaggcggacggcaccg

SEQ ID NO: 1937234 - DNA, 25 bp, Homo sapien
gctccggccgggcgccggccacggc

SEQ ID NO: 1937235 - DNA, 25 bp, Homo sapien
ccaccaccccaaagcggaagcgcat

SEQ ID NO: 1937236 - DNA, 25 bp, Homo sapien
cgggtggcaccaccaccccaaagcg

SEQ ID NO: 1937237 - DNA, 25 bp, Homo sapien
cggccacggcgggtggcaccaccac

SEQ ID NO: 1937238 - DNA, 25 bp, Homo sapien
tctttgggatgcatcacgcggctcc

SEQ ID NO: 1937239 - DNA, 25 bp, Homo sapien
gaggaaaacttctaagccaggcgat

SEQ ID NO: 1937240 - DNA, 25 bp, Homo sapien
gacacgcgaccggaagaaatggaag

SEQ ID NO: 1937241 - DNA, 25 bp, Homo sapien
ccgcgggcggttgatttccacctgt

SEQ ID NO: 1937242 - DNA, 25 bp, Homo sapien
ctagacagccgccttctaattgtga

SEQ ID NO: 1937243 - DNA, 25 bp, Homo sapien
ctaattgtgaaacgggggaagatct

SEQ ID NO: 1937244 - DNA, 25 bp, Homo sapien
ccctatcttaaccaagtcacttact

SEQ ID NO: 1937245 - DNA, 25 bp, Homo sapien
gtctctggagcgctccctatcttaa

SEQ ID NO: 1937246 - DNA, 25 bp, Homo sapien
aagacagaagggctggccaaacaca

SEQ ID NO: 1937247 - DNA, 25 bp, Homo sapien
taacagctccggactttcttgtgct

SEQ ID NO: 1937248 - DNA, 25 bp, Homo sapien
caaacacagctgattcggcagcaaa

SEQ ID NO: 1937249 - DNA, 25 bp, Homo sapien
cagactccggtgaaagttctcattc

SEQ ID NO: 1937250 - DNA, 25 bp, Homo sapien
gataccatttaacacccagtagaat

SEQ ID NO: 1937251 - DNA, 25 bp, Homo sapien
tcaacaatataaagagcacctgatt

SEQ ID NO: 1937252 - DNA, 25 bp, Homo sapien
aagagtccactatctagaatatata

SEQ ID NO: 1937253 - DNA, 25 bp, Homo sapien
aatgtttgccaatcacacgtatttg

SEQ ID NO: 1937254 - DNA, 25 bp, Homo sapien
gtttccagaatacgcaaatacatgt

SEQ ID NO: 1937255 - DNA, 25 bp, Homo sapien
tatagtagcccaaagttgaaacaac

SEQ ID NO: 1937256 - DNA, 25 bp, Homo sapien
aagttgatttgagggttgccagaag

SEQ ID NO: 1937257 - DNA, 25 bp, Homo sapien
caaatgaggtatgttacatggtgca

SEQ ID NO: 1937258 - DNA, 25 bp, Homo sapien
gattggcagaatgctagttccacac

SEQ ID NO: 1937259 - DNA, 25 bp, Homo sapien
tacaagaacactggctactctacag

SEQ ID NO: 1937260 - DNA, 25 bp, Homo sapien
taagcatgcaattggctcatccgac

SEQ ID NO: 1937261 - DNA, 25 bp, Homo sapien
tcagtcagattcctgcagaataagc

SEQ ID NO: 1937262 - DNA, 25 bp, Homo sapien
catgagaggaaacgaactatgtacc

SEQ ID NO: 1937263 - DNA, 25 bp, Homo sapien
gagaggaaacgaactatgtaccaaa

SEQ ID NO: 1937264 - DNA, 25 bp, Homo sapien
cttccatgagaggaaacgaactatg

SEQ ID NO: 1937265 - DNA, 25 bp, Homo sapien
atgtaccaaacattctgcatggcct

SEQ ID NO: 1937266 - DNA, 25 bp, Homo sapien
ccacagaggtaaactagatcatccc

SEQ ID NO: 1937267 - DNA, 25 bp, Homo sapien
caatttgttatccacaacaggtcag

SEQ ID NO: 1937268 - DNA, 25 bp, Homo sapien
gaatgcctatggaggactgacttat

SEQ ID NO: 1937269 - DNA, 25 bp, Homo sapien
ttttcaaatctagggtcaccatgca

SEQ ID NO: 1937270 - DNA, 25 bp, Homo sapien
attattgtccctaaaggccttccag

SEQ ID NO: 1937271 - DNA, 25 bp, Homo sapien
aggcctaggctaatgggtgggtctg

SEQ ID NO: 1937272 - DNA, 25 bp, Homo sapien
caggagacgacagctccacaagtat

SEQ ID NO: 1937273 - DNA, 25 bp, Homo sapien
gcctaggctaatgggtgggtctgtg

SEQ ID NO: 1937274 - DNA, 25 bp, Homo sapien
catccttctgcggtgctaacttagt

SEQ ID NO: 1937275 - DNA, 25 bp, Homo sapien
tctgcggtgctaacttagttgtatc

SEQ ID NO: 1937276 - DNA, 25 bp, Homo sapien
ggtcgcatccttctgcggtgctaac

SEQ ID NO: 1937277 - DNA, 25 bp, Homo sapien
cctccactgaaagggtcgcatcctt

SEQ ID NO: 1937278 - DNA, 25 bp, Homo sapien
ttggaggccatcagttcataacatg

SEQ ID NO: 1937279 - DNA, 25 bp, Homo sapien
ttcaccaggctgacatgaagatgcc

SEQ ID NO: 1937280 - DNA, 25 bp, Homo sapien
tcttatcgtagggtggaggtcccag

SEQ ID NO: 1937281 - DNA, 25 bp, Homo sapien
agccagggacctctctcaacatttg

SEQ ID NO: 1937282 - DNA, 25 bp, Homo sapien
tatgacctagcagctccaagcgtac

SEQ ID NO: 1937283 - DNA, 25 bp, Homo sapien
gagaaggctccacaacaggtctagg

SEQ ID NO: 1937284 - DNA, 25 bp, Homo sapien
tactatctaattggcaagacctgaa

SEQ ID NO: 1937285 - DNA, 25 bp, Homo sapien
cagatagggataatgtttgcagcct

SEQ ID NO: 1937286 - DNA, 25 bp, Homo sapien
caagtaaggtccatgaagaagtggc

SEQ ID NO: 1937287 - DNA, 25 bp, Homo sapien
cctgaaggcacaagtaaggtccatg

SEQ ID NO: 1937288 - DNA, 25 bp, Homo sapien
ggctcctcttctcagcctgtagctg

SEQ ID NO: 1937289 - DNA, 25 bp, Homo sapien
taacctcatgggaagttcgctatga

SEQ ID NO: 1937290 - DNA, 25 bp, Homo sapien
cctcagtagaggagaattgtaaaaa

SEQ ID NO: 1937291 - DNA, 25 bp, Homo sapien
gataccagtaagtctctttcctcag

SEQ ID NO: 1937292 - DNA, 25 bp, Homo sapien
gatgacccagtctgtagataccagt

SEQ ID NO: 1937293 - DNA, 25 bp, Homo sapien
gacctcagtagaggagaattgtaaa

SEQ ID NO: 1937294 - DNA, 25 bp, Homo sapien
gagaacttgtgagaggaaactccca

SEQ ID NO: 1937295 - DNA, 25 bp, Homo sapien
tcagctgaccatggacgtgagccaa

SEQ ID NO: 1937296 - DNA, 25 bp, Homo sapien
gccaactgccagatgtgtaaggtga

SEQ ID NO: 1937297 - DNA, 25 bp, Homo sapien
gaaatgctgagccaaccaatcatga

SEQ ID NO: 1937298 - DNA, 25 bp, Homo sapien
taaaacataacgagtcactttagct

SEQ ID NO: 1937299 - DNA, 25 bp, Homo sapien
taacgagtcactttagctccaattc

SEQ ID NO: 1937300 - DNA, 25 bp, Homo sapien
aacataacgagtcactttagctcca

SEQ ID NO: 1937301 - DNA, 25 bp, Homo sapien
gagtcactttagctccaattcccaa

SEQ ID NO: 1937302 - DNA, 25 bp, Homo sapien
actgggaagaaaaataggtttgatg

SEQ ID NO: 1937303 - DNA, 25 bp, Homo sapien
agcagcatctcactctactggtacc

SEQ ID NO: 1937304 - DNA, 25 bp, Homo sapien
aaaataggtttgatggagttacagt

SEQ ID NO: 1937305 - DNA, 25 bp, Homo sapien
cttgctactgataaagatatatgag

SEQ ID NO: 1937306 - DNA, 25 bp, Homo sapien
cagaagtcaatcactcagtcacaga

SEQ ID NO: 1937307 - DNA, 25 bp, Homo sapien
aaaagcgtgattgggatgtgccaca

SEQ ID NO: 1937308 - DNA, 25 bp, Homo sapien
tgggcatttcacaaacgttgagaac

SEQ ID NO: 1937309 - DNA, 25 bp, Homo sapien
gccaatcggcgcaatgacctttcag

SEQ ID NO: 1937310 - DNA, 25 bp, Homo sapien
taatacatctcaaggtgtactggcc

SEQ ID NO: 1937311 - DNA, 25 bp, Homo sapien
cacgggtgagctgagagagacttta

SEQ ID NO: 1937312 - DNA, 25 bp, Homo sapien
caagaggccctcatttcgcaaagat

SEQ ID NO: 1937313 - DNA, 25 bp, Homo sapien
taggacagcagaatgcaggacccct

SEQ ID NO: 1937314 - DNA, 25 bp, Homo sapien
tcaggttgggatgcaaaacatgaag

SEQ ID NO: 1937315 - DNA, 25 bp, Homo sapien
gaatgagggccaattgctttctctc

SEQ ID NO: 1937316 - DNA, 25 bp, Homo sapien
tcaccaatgtggcatgtcatgcatg

SEQ ID NO: 1937317 - DNA, 25 bp, Homo sapien
taaaactagtcaaatctccacaggc

SEQ ID NO: 1937318 - DNA, 25 bp, Homo sapien
tgaacgtttttaagttattgagcca

SEQ ID NO: 1937319 - DNA, 25 bp, Homo sapien
taaggaacgcctctgcctgattgcc

SEQ ID NO: 1937320 - DNA, 25 bp, Homo sapien
taacacactgcgatgagtcttcgga

SEQ ID NO: 1937321 - DNA, 25 bp, Homo sapien
cattttttaagcagaccacatcagg

SEQ ID NO: 1937322 - DNA, 25 bp, Homo sapien
taatcgtggagtactctcagggaca

SEQ ID NO: 1937323 - DNA, 25 bp, Homo sapien
tagtgaacgtccttctttagtgagt

SEQ ID NO: 1937324 - DNA, 25 bp, Homo sapien
tctttagtgagttctcgtgtcacac

SEQ ID NO: 1937325 - DNA, 25 bp, Homo sapien
agtgagttctcgtgtcacacacata

SEQ ID NO: 1937326 - DNA, 25 bp, Homo sapien
ttaaaactgagcgtagtgaacgtcc

SEQ ID NO: 1937327 - DNA, 25 bp, Homo sapien
gtttctcgacaacattgtaactgca

SEQ ID NO: 1937328 - DNA, 25 bp, Homo sapien
caaaatgcagtactaaatcgccata

SEQ ID NO: 1937329 - DNA, 25 bp, Homo sapien
tggcaaagggattgcttcctcccgt

SEQ ID NO: 1937330 - DNA, 25 bp, Homo sapien
tggtctgccatgcttaggatgtcag

SEQ ID NO: 1937331 - DNA, 25 bp, Homo sapien
cacacgttgaactgcagatgcttta

SEQ ID NO: 1937332 - DNA, 25 bp, Homo sapien
ggtaggacaggcctagccatgcctg

SEQ ID NO: 1937333 - DNA, 25 bp, Homo sapien
tggacacccctgctttagaaagtgg

SEQ ID NO: 1937334 - DNA, 25 bp, Homo sapien
gagcaggacagacctagataacaag

SEQ ID NO: 1937335 - DNA, 25 bp, Homo sapien
tcaaataagaggttgtaaagattac

SEQ ID NO: 1937336 - DNA, 25 bp, Homo sapien
caaataagaggttgtaaagattaca

SEQ ID NO: 1937337 - DNA, 25 bp, Homo sapien
gtcaaataagaggttgtaaagatta

SEQ ID NO: 1937338 - DNA, 25 bp, Homo sapien
tggaggcccataggatcttctgcaa

SEQ ID NO: 1937339 - DNA, 25 bp, Homo sapien
taaagggcacctctgttccatccag

SEQ ID NO: 1937340 - DNA, 25 bp, Homo sapien
tatgaccatgccacgagactgaagc

SEQ ID NO: 1937341 - DNA, 25 bp, Homo sapien
tgatcagatctattccttggaggcc

SEQ ID NO: 1937342 - DNA, 25 bp, Homo sapien
gatatgctgaactgtgccattaggc

SEQ ID NO: 1937343 - DNA, 25 bp, Homo sapien
cattagcatgtggtatttctgggac

SEQ ID NO: 1937344 - DNA, 25 bp, Homo sapien
aagttgtgctgccaccgcaagtgag

SEQ ID NO: 1937345 - DNA, 25 bp, Homo sapien
tacagtagcttgataaagtgcacca

SEQ ID NO: 1937346 - DNA, 25 bp, Homo sapien
caaggcactcgttcaaatggacata

SEQ ID NO: 1937347 - DNA, 25 bp, Homo sapien
ggtaaatggacatccaaagtcacta

SEQ ID NO: 1937348 - DNA, 25 bp, Homo sapien
gacataaaagtcgatgctcatcagc

SEQ ID NO: 1937349 - DNA, 25 bp, Homo sapien
tcatcagctttacaagaatggaaaa

SEQ ID NO: 1937350 - DNA, 25 bp, Homo sapien
atcaaatcacaggaaatccctggct

SEQ ID NO: 1937351 - DNA, 25 bp, Homo sapien
tgcaccacaaaccaatggacaacca

SEQ ID NO: 1937352 - DNA, 25 bp, Homo sapien
ggcctggtcatgcaccgtctactga

SEQ ID NO: 1937353 - DNA, 25 bp, Homo sapien
tctactgacacaattcacacaatgg

SEQ ID NO: 1937354 - DNA, 25 bp, Homo sapien
cctcgaggcttaagtcgccatttgc

SEQ ID NO: 1937355 - DNA, 25 bp, Homo sapien
cgaggcttaagtcgccatttgctga

SEQ ID NO: 1937356 - DNA, 25 bp, Homo sapien
gtgccctcgaggcttaagtcgccat

SEQ ID NO: 1937357 - DNA, 25 bp, Homo sapien
gccctcgaggcttaagtcgccattt

SEQ ID NO: 1937358 - DNA, 25 bp, Homo sapien
acgccctctcagggcgcccggacgg

SEQ ID NO: 1937359 - DNA, 25 bp, Homo sapien
ggctggcccggcatgcggcccggcg

SEQ ID NO: 1937360 - DNA, 25 bp, Homo sapien
atgcggcccggcgaggacacgagcg

SEQ ID NO: 1937361 - DNA, 25 bp, Homo sapien
acgagcgcggcggacgccctctcag

SEQ ID NO: 1937362 - DNA, 25 bp, Homo sapien
acacagccgtccgaaccgcctcctc

SEQ ID NO: 1937363 - DNA, 25 bp, Homo sapien
ccggcgcggccgaaccgcggcccag

SEQ ID NO: 1937364 - DNA, 25 bp, Homo sapien
gcccaggccctagctgccctggacg

SEQ ID NO: 1937365 - DNA, 25 bp, Homo sapien
tctgtcccggcgacgctccgtaccc

SEQ ID NO: 1937366 - DNA, 25 bp, Homo sapien
caaggcatgggcagatttggttgtc

SEQ ID NO: 1937367 - DNA, 25 bp, Homo sapien
ccagccctcttataagggcatctaa

SEQ ID NO: 1937368 - DNA, 25 bp, Homo sapien
tgcttctaagatagcaccttgaaca

SEQ ID NO: 1937369 - DNA, 25 bp, Homo sapien
tctagagcccatgagatacagtctc

SEQ ID NO: 1937370 - DNA, 25 bp, Homo sapien
gcagacttactgtttggcacccata

SEQ ID NO: 1937371 - DNA, 25 bp, Homo sapien
tgaacttaccctacagacatctggg

SEQ ID NO: 1937372 - DNA, 25 bp, Homo sapien
agcaaaatgccctacagtcccgatg

SEQ ID NO: 1937373 - DNA, 25 bp, Homo sapien
ttaaactaatgagactgtgcgtgca

SEQ ID NO: 1937374 - DNA, 25 bp, Homo sapien
aaccacttgaagaatgcactgtcac

SEQ ID NO: 1937375 - DNA, 25 bp, Homo sapien
tgtgaacttgagaggccatgctctg

SEQ ID NO: 1937376 - DNA, 25 bp, Homo sapien
gcagggccaatacttgtgtcctgtg

SEQ ID NO: 1937377 - DNA, 25 bp, Homo sapien
aagcaatgcaattggagtcagtccc

SEQ ID NO: 1937378 - DNA, 25 bp, Homo sapien
gctctctctggcgttgccactgttg

SEQ ID NO: 1937379 - DNA, 25 bp, Homo sapien
ccagctctctctggcgttgccactg

SEQ ID NO: 1937380 - DNA, 25 bp, Homo sapien
ctctctggcgttgccactgttggct

SEQ ID NO: 1937381 - DNA, 25 bp, Homo sapien
tctctctggcgttgccactgttggc

SEQ ID NO: 1937382 - DNA, 25 bp, Homo sapien
ccttggtccactggtttagttgtga

SEQ ID NO: 1937383 - DNA, 25 bp, Homo sapien
tggtccactggtttagttgtgaccc

SEQ ID NO: 1937384 - DNA, 25 bp, Homo sapien
cttggtccactggtttagttgtgac

SEQ ID NO: 1937385 - DNA, 25 bp, Homo sapien
gccttggtccactggtttagttgtg

SEQ ID NO: 1937386 - DNA, 25 bp, Homo sapien
ggagtccttaatgatagatgctgct

SEQ ID NO: 1937387 - DNA, 25 bp, Homo sapien
ccatgaagagaaagactgactcagt

SEQ ID NO: 1937388 - DNA, 25 bp, Homo sapien
gagtttctatcactttcaagcagga

SEQ ID NO: 1937389 - DNA, 25 bp, Homo sapien
tgaggactctaaggatgggtaacca

SEQ ID NO: 1937390 - DNA, 25 bp, Homo sapien
tctaggcttgactgagacaacacag

SEQ ID NO: 1937391 - DNA, 25 bp, Homo sapien
gatgtcaggtagcttcagttctagg

SEQ ID NO: 1937392 - DNA, 25 bp, Homo sapien
tgcctgtttactcctggaagtgcag

SEQ ID NO: 1937393 - DNA, 25 bp, Homo sapien
gctggtcctggacaattggcttgat

SEQ ID NO: 1937394 - DNA, 25 bp, Homo sapien
catgtggaaataccccaatggacgc

SEQ ID NO: 1937395 - DNA, 25 bp, Homo sapien
ggatggtgccaacctataccagtga

SEQ ID NO: 1937396 - DNA, 25 bp, Homo sapien
taaccatcacacctaggaacacagg

SEQ ID NO: 1937397 - DNA, 25 bp, Homo sapien
tggcacaggtgagttgacgcataca

SEQ ID NO: 1937398 - DNA, 25 bp, Homo sapien
caatgtgataccactatagccctag

SEQ ID NO: 1937399 - DNA, 25 bp, Homo sapien
tgactatactaagagttggtgagga

SEQ ID NO: 1937400 - DNA, 25 bp, Homo sapien
taaaaaggtcaccacacctaccata

SEQ ID NO: 1937401 - DNA, 25 bp, Homo sapien
aatcaatcaacacaattaaaacgtg

SEQ ID NO: 1937402 - DNA, 25 bp, Homo sapien
taatctggcatactttcaacaggca

SEQ ID NO: 1937403 - DNA, 25 bp, Homo sapien
gagaactggagtgatatggtacttt

SEQ ID NO: 1937404 - DNA, 25 bp, Homo sapien
aacaacgatggttttctgctgagcc

SEQ ID NO: 1937405 - DNA, 25 bp, Homo sapien
caaaatgctaatgccggatgaaaga

SEQ ID NO: 1937406 - DNA, 25 bp, Homo sapien
tatggcactaggcatcaattaaaga

SEQ ID NO: 1937407 - DNA, 25 bp, Homo sapien
catgtagacaaatcgatgagtggag

SEQ ID NO: 1937408 - DNA, 25 bp, Homo sapien
gaatgctaacaatgcaatctcaccc

SEQ ID NO: 1937409 - DNA, 25 bp, Homo sapien
tccttgggagatctttgtatgtaca

SEQ ID NO: 1937410 - DNA, 25 bp, Homo sapien
tattactgaataagccccataattt

SEQ ID NO: 1937411 - DNA, 25 bp, Homo sapien
atgtattactgaataagccccataa

SEQ ID NO: 1937412 - DNA, 25 bp, Homo sapien
ttccttacagacatgtattactgaa

SEQ ID NO: 1937413 - DNA, 25 bp, Homo sapien
attccttacagacatgtattactga

SEQ ID NO: 1937414 - DNA, 25 bp, Homo sapien
acaactcacaaatcaccaaatctct

SEQ ID NO: 1937415 - DNA, 25 bp, Homo sapien
aaaacaactcacaaatcaccaaatc

SEQ ID NO: 1937416 - DNA, 25 bp, Homo sapien
aatggcagttgtcagggaccagggg

SEQ ID NO: 1937417 - DNA, 25 bp, Homo sapien
gaatggggtgatgtcatgaaaacaa

SEQ ID NO: 1937418 - DNA, 25 bp, Homo sapien
tagattctgtgacagtctacactga

SEQ ID NO: 1937419 - DNA, 25 bp, Homo sapien
ggattgaacatcttcttgcccataa

SEQ ID NO: 1937420 - DNA, 25 bp, Homo sapien
agcccaaagggatcaaagtttgatg

SEQ ID NO: 1937421 - DNA, 25 bp, Homo sapien
cacacactttgagaccgtggtgcct

SEQ ID NO: 1937422 - DNA, 25 bp, Homo sapien
catgagtggcagcaacctctgacct

SEQ ID NO: 1937423 - DNA, 25 bp, Homo sapien
tgacctccttttgcaagtggccaga

SEQ ID NO: 1937424 - DNA, 25 bp, Homo sapien
tgggccaacagggacgtagatactt

SEQ ID NO: 1937425 - DNA, 25 bp, Homo sapien
ggtgtagaagtctcacgctgggcca

SEQ ID NO: 1937426 - DNA, 25 bp, Homo sapien
acttgtcacttctggcctttgcctg

SEQ ID NO: 1937427 - DNA, 25 bp, Homo sapien
cacaatcacttgtcacttctggcct

SEQ ID NO: 1937428 - DNA, 25 bp, Homo sapien
ctagtacacaatcacttgtcacttc

SEQ ID NO: 1937429 - DNA, 25 bp, Homo sapien
aatcacttgtcacttctggcctttg

SEQ ID NO: 1937430 - DNA, 25 bp, Homo sapien
tatgtggctccaagctggcatttca

SEQ ID NO: 1937431 - DNA, 25 bp, Homo sapien
caagggcagtcttttaatagaatac

SEQ ID NO: 1937432 - DNA, 25 bp, Homo sapien
tagcaaatcctttactaggtggcaa

SEQ ID NO: 1937433 - DNA, 25 bp, Homo sapien
aaacagctcattccttatgtggctc

SEQ ID NO: 1937434 - DNA, 25 bp, Homo sapien
aagtacataggagtggcatagctgc

SEQ ID NO: 1937435 - DNA, 25 bp, Homo sapien
tgtccgcacagggaaacaccatgtg

SEQ ID NO: 1937436 - DNA, 25 bp, Homo sapien
gtacctgccagactgttcatatgag

SEQ ID NO: 1937437 - DNA, 25 bp, Homo sapien
catagctgctaggtgtacatttaac

SEQ ID NO: 1937438 - DNA, 25 bp, Homo sapien
tctgataagcgtcctttttatgtaa

SEQ ID NO: 1937439 - DNA, 25 bp, Homo sapien
taagtccactgactccagttaggaa

SEQ ID NO: 1937440 - DNA, 25 bp, Homo sapien
tttcctttcgtaagtccactgactc

SEQ ID NO: 1937441 - DNA, 25 bp, Homo sapien
ccagttaggaatgcttggtctgata

SEQ ID NO: 1937442 - DNA, 25 bp, Homo sapien
gacaaatggctcctctaataggcta

SEQ ID NO: 1937443 - DNA, 25 bp, Homo sapien
tgtggagcattaagagcaggtttac

SEQ ID NO: 1937444 - DNA, 25 bp, Homo sapien
gatcccataggtcgaaaatgtgtcc

SEQ ID NO: 1937445 - DNA, 25 bp, Homo sapien
tgtgtgcatatacaaatcacaggtc

SEQ ID NO: 1937446 - DNA, 25 bp, Homo sapien
cacggtgatctctgcatttttgaaa

SEQ ID NO: 1937447 - DNA, 25 bp, Homo sapien
taagcctgaggttattcagcacggt

SEQ ID NO: 1937448 - DNA, 25 bp, Homo sapien
tagcagagctatctgggtttgaagc

SEQ ID NO: 1937449 - DNA, 25 bp, Homo sapien
cacctgacaggatagcttgcattgg

SEQ ID NO: 1937450 - DNA, 25 bp, Homo sapien
tcattttgtctcattggttcattag

SEQ ID NO: 1937451 - DNA, 25 bp, Homo sapien
ttgtctcattggttcattagcatag

SEQ ID NO: 1937452 - DNA, 25 bp, Homo sapien
ctcattggttcattagcatagcacc

SEQ ID NO: 1937453 - DNA, 25 bp, Homo sapien
cattttgtctcattggttcattagc

SEQ ID NO: 1937454 - DNA, 25 bp, Homo sapien
aaccccatatgttctaagtctcaga

SEQ ID NO: 1937455 - DNA, 25 bp, Homo sapien
gtgaggatcagatttgtacttgttt

SEQ ID NO: 1937456 - DNA, 25 bp, Homo sapien
caattggaaactgtcacaattgttt

SEQ ID NO: 1937457 - DNA, 25 bp, Homo sapien
tgtacttgttttgaacaattggaaa

SEQ ID NO: 1937458 - DNA, 25 bp, Homo sapien
tccaggcagctaactgggagctaat

SEQ ID NO: 1937459 - DNA, 25 bp, Homo sapien
taagcatgggccttctgaatctcag

SEQ ID NO: 1937460 - DNA, 25 bp, Homo sapien
caaagcctctcggacaaatgggatc

SEQ ID NO: 1937461 - DNA, 25 bp, Homo sapien
gactcgtgcttaagggaggaacaac

SEQ ID NO: 1937462 - DNA, 25 bp, Homo sapien
tactaagccactgtataaccagaac

SEQ ID NO: 1937463 - DNA, 25 bp, Homo sapien
tgtaactttgctctacagctatgaa

SEQ ID NO: 1937464 - DNA, 25 bp, Homo sapien
aaattcattcaactaggaacagtgt

SEQ ID NO: 1937465 - DNA, 25 bp, Homo sapien
taatacactaaagtccatggaatga

SEQ ID NO: 1937466 - DNA, 25 bp, Homo sapien
ggtaaataggtctgccaggtcagcc

SEQ ID NO: 1937467 - DNA, 25 bp, Homo sapien
gtttctttggtaaataggtctgcca

SEQ ID NO: 1937468 - DNA, 25 bp, Homo sapien
tcagtttctttggtaaataggtctg

SEQ ID NO: 1937469 - DNA, 25 bp, Homo sapien
ctttggtaaataggtctgccaggtc

SEQ ID NO: 1937470 - DNA, 25 bp, Homo sapien
agctaagactatggtgcgtgtcacc

SEQ ID NO: 1937471 - DNA, 25 bp, Homo sapien
tgaaaaggcaaaacgtcagactttg

SEQ ID NO: 1937472 - DNA, 25 bp, Homo sapien
tacaaagtctggagcactgactggg

SEQ ID NO: 1937473 - DNA, 25 bp, Homo sapien
cagcctcagaaagtgatccaatgtg

SEQ ID NO: 1937474 - DNA, 25 bp, Homo sapien
tctctcagcagttttcagcattgcc

SEQ ID NO: 1937475 - DNA, 25 bp, Homo sapien
cagttttcagcattgcctgcattct

SEQ ID NO: 1937476 - DNA, 25 bp, Homo sapien
gctttaattaagaatctgtgtacaa

SEQ ID NO: 1937477 - DNA, 25 bp, Homo sapien
ttgttgctttaattaagaatctgtg

SEQ ID NO: 1937478 - DNA, 25 bp, Homo sapien
taatctccatgagctgacattctaa

SEQ ID NO: 1937479 - DNA, 25 bp, Homo sapien
tatattcatcagtcagttggtgccc

SEQ ID NO: 1937480 - DNA, 25 bp, Homo sapien
cataaaagagtaagacggtttcagg

SEQ ID NO: 1937481 - DNA, 25 bp, Homo sapien
ggttcagcagcgaataaaatgaact

SEQ ID NO: 1937482 - DNA, 25 bp, Homo sapien
tcaagaggccaaaagaaggctggca

SEQ ID NO: 1937483 - DNA, 25 bp, Homo sapien
ttaagaagtcctgtagtcatctggg

SEQ ID NO: 1937484 - DNA, 25 bp, Homo sapien
tatcgtggttataatgggaagccct

SEQ ID NO: 1937485 - DNA, 25 bp, Homo sapien
agaaatccctttggcaaccgtgtgg

SEQ ID NO: 1937486 - DNA, 25 bp, Homo sapien
aagtctcacttcagtgatatggtgg

SEQ ID NO: 1937487 - DNA, 25 bp, Homo sapien
cattaaaaacgttgttttgtgcaca

SEQ ID NO: 1937488 - DNA, 25 bp, Homo sapien
caccttcaggctatgagtagaattt

SEQ ID NO: 1937489 - DNA, 25 bp, Homo sapien
aaatcaaccagacaggttgacagag

SEQ ID NO: 1937490 - DNA, 25 bp, Homo sapien
taatgatctcttggagctgacctag

SEQ ID NO: 1937491 - DNA, 25 bp, Homo sapien
ggtaatacatttagcaggccttatc

SEQ ID NO: 1937492 - DNA, 25 bp, Homo sapien
gagggttggaaatctcatgcctttc

SEQ ID NO: 1937493 - DNA, 25 bp, Homo sapien
gctttgggccttaaactgaatctaa

SEQ ID NO: 1937494 - DNA, 25 bp, Homo sapien
cctatggcctgaagctcatgggcag

SEQ ID NO: 1937495 - DNA, 25 bp, Homo sapien
taatccattagaacctgtgtgcagg

SEQ ID NO: 1937496 - DNA, 25 bp, Homo sapien
catgggcagggttcaatatgggctc

SEQ ID NO: 1937497 - DNA, 25 bp, Homo sapien
tgggctccaccaagagaacatgagt

SEQ ID NO: 1937498 - DNA, 25 bp, Homo sapien
gtcttaacacgactgatttgtgcaa

SEQ ID NO: 1937499 - DNA, 25 bp, Homo sapien
tgaaatgtcttaacacgactgattt

SEQ ID NO: 1937500 - DNA, 25 bp, Homo sapien
cgactgatttgtgcaaattccatgt

SEQ ID NO: 1937501 - DNA, 25 bp, Homo sapien
tgttgtcagtaagagcttttgaaat

SEQ ID NO: 1937502 - DNA, 25 bp, Homo sapien
tatagctatacaaattgccttgtga

SEQ ID NO: 1937503 - DNA, 25 bp, Homo sapien
tctcagctgtaaactgattagagag

SEQ ID NO: 1937504 - DNA, 25 bp, Homo sapien
taattctatcttatggatttgggaa

SEQ ID NO: 1937505 - DNA, 25 bp, Homo sapien
tacataatggagtgcatactggaat

SEQ ID NO: 1937506 - DNA, 25 bp, Homo sapien
ttggcccctggatctctaagctgta

SEQ ID NO: 1937507 - DNA, 25 bp, Homo sapien
gttgagaaaacgagtgctttggccc

SEQ ID NO: 1937508 - DNA, 25 bp, Homo sapien
ccctggatctctaagctgtattttc

SEQ ID NO: 1937509 - DNA, 25 bp, Homo sapien
cgttgagaaaacgagtgctttggcc

SEQ ID NO: 1937510 - DNA, 25 bp, Homo sapien
taacatctggtaaggagtaaacact

SEQ ID NO: 1937511 - DNA, 25 bp, Homo sapien
gtgtttcctcatctatccaataggg

SEQ ID NO: 1937512 - DNA, 25 bp, Homo sapien
gcaagtatttctgtagccctcaatg

SEQ ID NO: 1937513 - DNA, 25 bp, Homo sapien
tatacgaagcatttagcctaacatc

SEQ ID NO: 1937514 - DNA, 25 bp, Homo sapien
aatgtaagtgtccatccattgatga

SEQ ID NO: 1937515 - DNA, 25 bp, Homo sapien
ggtgctcaacgaccctaatcatcag

SEQ ID NO: 1937516 - DNA, 25 bp, Homo sapien
tgagatacaccacctcattcctgtt

SEQ ID NO: 1937517 - DNA, 25 bp, Homo sapien
cattggtggcaatacaaattagtag

SEQ ID NO: 1937518 - DNA, 25 bp, Homo sapien
gagatgcccagtaggttccaaaggt

SEQ ID NO: 1937519 - DNA, 25 bp, Homo sapien
ccagtatatagggtcagggtttcca

SEQ ID NO: 1937520 - DNA, 25 bp, Homo sapien
ccatcacactgttgctagggaagaa

SEQ ID NO: 1937521 - DNA, 25 bp, Homo sapien
ttaagtgcatccaccgaacaggaca

SEQ ID NO: 1937522 - DNA, 25 bp, Homo sapien
taagggtgagccacctcttcttagc

SEQ ID NO: 1937523 - DNA, 25 bp, Homo sapien
tctttcttatgccagttccttgtac

SEQ ID NO: 1937524 - DNA, 25 bp, Homo sapien
tctctgcgcaaaacctgacacagca

SEQ ID NO: 1937525 - DNA, 25 bp, Homo sapien
tgatgcatgctgtcacctaagggtg

SEQ ID NO: 1937526 - DNA, 25 bp, Homo sapien
tgcctgtgtgctagtacgtgtccaa

SEQ ID NO: 1937527 - DNA, 25 bp, Homo sapien
aaattctcaaatgttcaggtggccc

SEQ ID NO: 1937528 - DNA, 25 bp, Homo sapien
tatctgtgagggactgactgcttcc

SEQ ID NO: 1937529 - DNA, 25 bp, Homo sapien
gaagcagcatagctcctaagtgcag

SEQ ID NO: 1937530 - DNA, 25 bp, Homo sapien
gattgcacacttaatggagcttctg

SEQ ID NO: 1937531 - DNA, 25 bp, Homo sapien
tttctctgaggtaaagacatacgag

SEQ ID NO: 1937532 - DNA, 25 bp, Homo sapien
cgagatttctttgtgagatgtggtc

SEQ ID NO: 1937533 - DNA, 25 bp, Homo sapien
gcttctgtgagatcccacgctgtat

SEQ ID NO: 1937534 - DNA, 25 bp, Homo sapien
gcacagattgggcaaggttctggat

SEQ ID NO: 1937535 - DNA, 25 bp, Homo sapien
tgttttcctagctgtcgagcacaga

SEQ ID NO: 1937536 - DNA, 25 bp, Homo sapien
caaggttctggattaacacctcccg

SEQ ID NO: 1937537 - DNA, 25 bp, Homo sapien
cacctcccgatgttttatcttgaga

SEQ ID NO: 1937538 - DNA, 25 bp, Homo sapien
tctgtgtctggtctccaatgagttt

SEQ ID NO: 1937539 - DNA, 25 bp, Homo sapien
tccagttcatcttatgttgtccagt

SEQ ID NO: 1937540 - DNA, 25 bp, Homo sapien
tgtaatctaaaacgctctaaaatca

SEQ ID NO: 1937541 - DNA, 25 bp, Homo sapien
cttgagttcatgaatcccatctttt

SEQ ID NO: 1937542 - DNA, 25 bp, Homo sapien
agttaggtaaagaagctgcccaagt

SEQ ID NO: 1937543 - DNA, 25 bp, Homo sapien
tctgaagctgtgatgtagcaacagc

SEQ ID NO: 1937544 - DNA, 25 bp, Homo sapien
agttaaatgatctgttgctctggcc

SEQ ID NO: 1937545 - DNA, 25 bp, Homo sapien
gtgtccctatgtacctgaagtcaga

SEQ ID NO: 1937546 - DNA, 25 bp, Homo sapien
acttacagtagagctcagtgccctg

SEQ ID NO: 1937547 - DNA, 25 bp, Homo sapien
tcaaaaacagatgaatgcgcaacct

SEQ ID NO: 1937548 - DNA, 25 bp, Homo sapien
gctccctaggatcacgcactcttag

SEQ ID NO: 1937549 - DNA, 25 bp, Homo sapien
cctcagagccatccaatattcatga

SEQ ID NO: 1937550 - DNA, 25 bp, Homo sapien
cagcagacacacgattcctcagagc

SEQ ID NO: 1937551 - DNA, 25 bp, Homo sapien
gatatgaagaacaggcggattaggc

SEQ ID NO: 1937552 - DNA, 25 bp, Homo sapien
ccaaggcttactgtaattaactgtg

SEQ ID NO: 1937553 - DNA, 25 bp, Homo sapien
tgtaccaagacctgggagaactgca

SEQ ID NO: 1937554 - DNA, 25 bp, Homo sapien
gggtatgtggccaaactgagtcgaa

SEQ ID NO: 1937555 - DNA, 25 bp, Homo sapien
cagcaggagctcattcaattgctct

SEQ ID NO: 1937556 - DNA, 25 bp, Homo sapien
gcaaatgatagtattgctttcatag

SEQ ID NO: 1937557 - DNA, 25 bp, Homo sapien
catctcctcaaatattgcagtctgg

SEQ ID NO: 1937558 - DNA, 25 bp, Homo sapien
gtggtggtaggtgctcgatcatcca

SEQ ID NO: 1937559 - DNA, 25 bp, Homo sapien
tagatcgctctgtctcacttattgc

SEQ ID NO: 1937560 - DNA, 25 bp, Homo sapien
ccggacattatgagttctaccttga

SEQ ID NO: 1937561 - DNA, 25 bp, Homo sapien
cttgaagaagttatgccggacatta

SEQ ID NO: 1937562 - DNA, 25 bp, Homo sapien
cagaagtgaacgtttggcaaggaaa

SEQ ID NO: 1937563 - DNA, 25 bp, Homo sapien
ggattttaccactccacaaaactgc

SEQ ID NO: 1937564 - DNA, 25 bp, Homo sapien
atactctgtgaacaattcatcagct

SEQ ID NO: 1937565 - DNA, 25 bp, Homo sapien
catactctgtgaacaattcatcagc

SEQ ID NO: 1937566 - DNA, 25 bp, Homo sapien
tcatactctgtgaacaattcatcag

SEQ ID NO: 1937567 - DNA, 25 bp, Homo sapien
ttcatactctgtgaacaattcatca

SEQ ID NO: 1937568 - DNA, 25 bp, Homo sapien
gttttttacagcctctcttactagc

SEQ ID NO: 1937569 - DNA, 25 bp, Homo sapien
gactgttgcagactcaataacatta

SEQ ID NO: 1937570 - DNA, 25 bp, Homo sapien
ctcaataacattacgagatggaggt

SEQ ID NO: 1937571 - DNA, 25 bp, Homo sapien
gaagtctggctggtcggaggtgaca

SEQ ID NO: 1937572 - DNA, 25 bp, Homo sapien
ctctgacatagaaagcttgccagtt

SEQ ID NO: 1937573 - DNA, 25 bp, Homo sapien
tcatttcgcactcgctgaactagct

SEQ ID NO: 1937574 - DNA, 25 bp, Homo sapien
ttgcttgtagttgctggttatttca

SEQ ID NO: 1937575 - DNA, 25 bp, Homo sapien
tagctcctcatcaatagtaaattct

SEQ ID NO: 1937576 - DNA, 25 bp, Homo sapien
catttagccaccaaggagaattaga

SEQ ID NO: 1937577 - DNA, 25 bp, Homo sapien
ctgtggatcacatttagccaccaag

SEQ ID NO: 1937578 - DNA, 25 bp, Homo sapien
ggatcacatttagccaccaaggaga

SEQ ID NO: 1937579 - DNA, 25 bp, Homo sapien
tcacatttagccaccaaggagaatt

SEQ ID NO: 1937580 - DNA, 25 bp, Homo sapien
catgtagtgctctcgcagctgtttg

SEQ ID NO: 1937581 - DNA, 25 bp, Homo sapien
tctttgaagctcatggatggtctgc

SEQ ID NO: 1937582 - DNA, 25 bp, Homo sapien
tcagcaacttctgtattacacttgc

SEQ ID NO: 1937583 - DNA, 25 bp, Homo sapien
ggtctgctgcacaggatataaagct

SEQ ID NO: 1937584 - DNA, 25 bp, Homo sapien
tttatagacagaatgaaaaaaataa

SEQ ID NO: 1937585 - DNA, 25 bp, Homo sapien
ttttatagacagaatgaaaaaaata

SEQ ID NO: 1937586 - DNA, 25 bp, Homo sapien
ctgggtgcctggctatcaacaattc

SEQ ID NO: 1937587 - DNA, 25 bp, Homo sapien
gccatcacgcaaggtaggtggtatc

SEQ ID NO: 1937588 - DNA, 25 bp, Homo sapien
ggtgcctggctatcaacaattccat

SEQ ID NO: 1937589 - DNA, 25 bp, Homo sapien
atcacgcaaggtaggtggtatccct

SEQ ID NO: 1937590 - DNA, 25 bp, Homo sapien
ctttgtgttcctccgaggagcgcaa

SEQ ID NO: 1937591 - DNA, 25 bp, Homo sapien
gaggagcgcaacacttctctgtaca

SEQ ID NO: 1937592 - DNA, 25 bp, Homo sapien
tctctgtacaattctgctgccaagg

SEQ ID NO: 1937593 - DNA, 25 bp, Homo sapien
gaagtgaatcagttttgagttttcc

SEQ ID NO: 1937594 - DNA, 25 bp, Homo sapien
taaagcatacgagagtcacatattt

SEQ ID NO: 1937595 - DNA, 25 bp, Homo sapien
gcatacgagagtcacatatttagtt

SEQ ID NO: 1937596 - DNA, 25 bp, Homo sapien
tatttaaagcatacgagagtcacat

SEQ ID NO: 1937597 - DNA, 25 bp, Homo sapien
tgtatttaaagcatacgagagtcac

SEQ ID NO: 1937598 - DNA, 25 bp, Homo sapien
taccatttcacagggttccaactgc

SEQ ID NO: 1937599 - DNA, 25 bp, Homo sapien
aattgaggactttctagggaatgcc

SEQ ID NO: 1937600 - DNA, 25 bp, Homo sapien
tctattaatggactttctggtggcg

SEQ ID NO: 1937601 - DNA, 25 bp, Homo sapien
actgcagcatgtaagtaggcccacc

SEQ ID NO: 1937602 - DNA, 25 bp, Homo sapien
tgcctgctaagccattgagagcaca

SEQ ID NO: 1937603 - DNA, 25 bp, Homo sapien
gagcacaaactagctgtcgatgtgc

SEQ ID NO: 1937604 - DNA, 25 bp, Homo sapien
cattgagagcacaaactagctgtcg

SEQ ID NO: 1937605 - DNA, 25 bp, Homo sapien
gcctgctaagccattgagagcacaa

SEQ ID NO: 1937606 - DNA, 25 bp, Homo sapien
ctgcaattaaaaaaaagttgataat

SEQ ID NO: 1937607 - DNA, 25 bp, Homo sapien
caactgcaattaaaaaaaagttgat

SEQ ID NO: 1937608 - DNA, 25 bp, Homo sapien
tgcaattaaaaaaaagttgataata

SEQ ID NO: 1937609 - DNA, 25 bp, Homo sapien
agtggcaagaactctccacgaacag

SEQ ID NO: 1937610 - DNA, 25 bp, Homo sapien
gcttcagagcccagtcagaaatctt

SEQ ID NO: 1937611 - DNA, 25 bp, Homo sapien
tccacgaacagcctgtgggtgacag

SEQ ID NO: 1937612 - DNA, 25 bp, Homo sapien
aggatagaggtgacagtccttctgt

SEQ ID NO: 1937613 - DNA, 25 bp, Homo sapien
ctcatgctgacggtgatagaaatgc

SEQ ID NO: 1937614 - DNA, 25 bp, Homo sapien
tgtatttcttcggtttgtggtggta

SEQ ID NO: 1937615 - DNA, 25 bp, Homo sapien
gtggagccagtgtatttcttcggtt

SEQ ID NO: 1937616 - DNA, 25 bp, Homo sapien
catgctgacggtgatagaaatgcct

SEQ ID NO: 1937617 - DNA, 25 bp, Homo sapien
ggtcaatcacatctttctttgcaga

SEQ ID NO: 1937618 - DNA, 25 bp, Homo sapien
tggtcaatcacatctttctttgcag

SEQ ID NO: 1937619 - DNA, 25 bp, Homo sapien
ttggtcaatcacatctttctttgca

SEQ ID NO: 1937620 - DNA, 25 bp, Homo sapien
gtcaatcacatctttctttgcagac

SEQ ID NO: 1937621 - DNA, 25 bp, Homo sapien
gaagtcgaacccaccagtgtttgac

SEQ ID NO: 1937622 - DNA, 25 bp, Homo sapien
tccacagtatcttggcaataaagct

SEQ ID NO: 1937623 - DNA, 25 bp, Homo sapien
gattcttcttgcagtaaggccgata

SEQ ID NO: 1937624 - DNA, 25 bp, Homo sapien
gacacagtaaggttcaataccaaga

SEQ ID NO: 1937625 - DNA, 25 bp, Homo sapien
gatgatcctcgccagttgccagtgt

SEQ ID NO: 1937626 - DNA, 25 bp, Homo sapien
ggttgttacaaagcgagtccagccc

SEQ ID NO: 1937627 - DNA, 25 bp, Homo sapien
gatgcgccagcctctagaattgcga

SEQ ID NO: 1937628 - DNA, 25 bp, Homo sapien
cacgtgttagaagcttaaactccag

SEQ ID NO: 1937629 - DNA, 25 bp, Homo sapien
taatcccactcaaacgctgggccat

SEQ ID NO: 1937630 - DNA, 25 bp, Homo sapien
ccactgatacaccatcgattaatcc

SEQ ID NO: 1937631 - DNA, 25 bp, Homo sapien
tcgattaatcccactcaaacgctgg

SEQ ID NO: 1937632 - DNA, 25 bp, Homo sapien
ctctgtactggagtgccactgatac

SEQ ID NO: 1937633 - DNA, 25 bp, Homo sapien
caaaagattttgcagaaactctcac

SEQ ID NO: 1937634 - DNA, 25 bp, Homo sapien
ttccccagccctcaaaagattttgc

SEQ ID NO: 1937635 - DNA, 25 bp, Homo sapien
cctcaaaagattttgcagaaactct

SEQ ID NO: 1937636 - DNA, 25 bp, Homo sapien
ccagccctcaaaagattttgcagaa

SEQ ID NO: 1937637 - DNA, 25 bp, Homo sapien
gagcttcatcaaggcagatcctcca

SEQ ID NO: 1937638 - DNA, 25 bp, Homo sapien
tgtgggacactcaaccatctgagct

SEQ ID NO: 1937639 - DNA, 25 bp, Homo sapien
tatagcgcttctggttccgtaggcg

SEQ ID NO: 1937640 - DNA, 25 bp, Homo sapien
actattgctatgtgggatatcgaca

SEQ ID NO: 1937641 - DNA, 25 bp, Homo sapien
agactcgaagagatgacgacctcac

SEQ ID NO: 1937642 - DNA, 25 bp, Homo sapien
aagactcgaagagatgacgacctca

SEQ ID NO: 1937643 - DNA, 25 bp, Homo sapien
caagactcgaagagatgacgacctc

SEQ ID NO: 1937644 - DNA, 25 bp, Homo sapien
gttgctcttgttgacactggttcca

SEQ ID NO: 1937645 - DNA, 25 bp, Homo sapien
cacactttgcatgttgccacaggtg

SEQ ID NO: 1937646 - DNA, 25 bp, Homo sapien
ctggttccattgcaacaaggcagtg

SEQ ID NO: 1937647 - DNA, 25 bp, Homo sapien
tcaggcattgaacacgaggcttacg

SEQ ID NO: 1937648 - DNA, 25 bp, Homo sapien
cagttattccagagtcgctagtagc

SEQ ID NO: 1937649 - DNA, 25 bp, Homo sapien
tggacagtgaccttgtgaatcggga

SEQ ID NO: 1937650 - DNA, 25 bp, Homo sapien
tagaaggtggtacatcactatcagc

SEQ ID NO: 1937651 - DNA, 25 bp, Homo sapien
cagaggtgtctgatggcaagtattc

SEQ ID NO: 1937652 - DNA, 25 bp, Homo sapien
gatctgtttcacgagaccttcaaaa

SEQ ID NO: 1937653 - DNA, 25 bp, Homo sapien
tcacagctgtcagtatcatcacacg

SEQ ID NO: 1937654 - DNA, 25 bp, Homo sapien
gcatccgtttcaaaagactcctgtt

SEQ ID NO: 1937655 - DNA, 25 bp, Homo sapien
tagaactgacatacttatagatgga

SEQ ID NO: 1937656 - DNA, 25 bp, Homo sapien
ccaaaataatgtgacggaataaaat

SEQ ID NO: 1937657 - DNA, 25 bp, Homo sapien
ttcttttggttcaaattcgatattc

SEQ ID NO: 1937658 - DNA, 25 bp, Homo sapien
tggttcaaattcgatattctggatt

SEQ ID NO: 1937659 - DNA, 25 bp, Homo sapien
tcctccaaaataatgtgacggaata

SEQ ID NO: 1937660 - DNA, 25 bp, Homo sapien
ccagaatttgggtactcacgaatga

SEQ ID NO: 1937661 - DNA, 25 bp, Homo sapien
cgagtatgtgtcagaatcagagcca

SEQ ID NO: 1937662 - DNA, 25 bp, Homo sapien
tcgggaagagtgagagcatcttgct

SEQ ID NO: 1937663 - DNA, 25 bp, Homo sapien
tctcatctgctaaaattccaccaag

SEQ ID NO: 1937664 - DNA, 25 bp, Homo sapien
gcctgtatatggattatagtagagt

SEQ ID NO: 1937665 - DNA, 25 bp, Homo sapien
gagtttcagaccctcagatgtaaca

SEQ ID NO: 1937666 - DNA, 25 bp, Homo sapien
tcgccataagaagtgcagggcactt

SEQ ID NO: 1937667 - DNA, 25 bp, Homo sapien
gatgtaacaatctctcgccataaga

SEQ ID NO: 1937668 - DNA, 25 bp, Homo sapien
cagtagcaggactgcttctgaaaca

SEQ ID NO: 1937669 - DNA, 25 bp, Homo sapien
agcaggactgcttctgaaacactct

SEQ ID NO: 1937670 - DNA, 25 bp, Homo sapien
gtagcaggactgcttctgaaacact

SEQ ID NO: 1937671 - DNA, 25 bp, Homo sapien
ttctgaaacactcttgttgtagcat

SEQ ID NO: 1937672 - DNA, 25 bp, Homo sapien
ggtagggtctcaacacagggatcaa

SEQ ID NO: 1937673 - DNA, 25 bp, Homo sapien
cacaaagtgatacagctcgtcaatg

SEQ ID NO: 1937674 - DNA, 25 bp, Homo sapien
cacttggatggactgcgtttcttgc

SEQ ID NO: 1937675 - DNA, 25 bp, Homo sapien
cagggatcaatgcaggatgctggac

SEQ ID NO: 1937676 - DNA, 25 bp, Homo sapien
cagtagtgttgatgagctgcaccaa

SEQ ID NO: 1937677 - DNA, 25 bp, Homo sapien
ggcagacaactctgaatctgcagtc

SEQ ID NO: 1937678 - DNA, 25 bp, Homo sapien
tggcagacaactctgaatctgcagt

SEQ ID NO: 1937679 - DNA, 25 bp, Homo sapien
ttttccagtagtgttgatgagctgc

SEQ ID NO: 1937680 - DNA, 25 bp, Homo sapien
taatagaattgtgtaacttttccat

SEQ ID NO: 1937681 - DNA, 25 bp, Homo sapien
tagaattgtgtaacttttccattac

SEQ ID NO: 1937682 - DNA, 25 bp, Homo sapien
gaataatagaattgtgtaacttttc

SEQ ID NO: 1937683 - DNA, 25 bp, Homo sapien
ctggaataatagaattgtgtaactt

SEQ ID NO: 1937684 - DNA, 25 bp, Homo sapien
ctagttttgctaggccagcttccaa

SEQ ID NO: 1937685 - DNA, 25 bp, Homo sapien
tttgctaggccagcttccaaaagat

SEQ ID NO: 1937686 - DNA, 25 bp, Homo sapien
tcttcatgagctgattgaacttttt

SEQ ID NO: 1937687 - DNA, 25 bp, Homo sapien
agtctagttttgctaggccagcttc

SEQ ID NO: 1937688 - DNA, 25 bp, Homo sapien
tgaaggatgactccaccagaatacc

SEQ ID NO: 1937689 - DNA, 25 bp, Homo sapien
tttctgatagagttttattcttctc

SEQ ID NO: 1937690 - DNA, 25 bp, Homo sapien
catttcaccactgaaggatgactcc

SEQ ID NO: 1937691 - DNA, 25 bp, Homo sapien
tcttttgtagccaccccaaatcttc

SEQ ID NO: 1937692 - DNA, 25 bp, Homo sapien
caattggttttgagaagctcaccac

SEQ ID NO: 1937693 - DNA, 25 bp, Homo sapien
ggcagggctgctcgtcatcatcact

SEQ ID NO: 1937694 - DNA, 25 bp, Homo sapien
cagaagaggtatctgaacctgggca

SEQ ID NO: 1937695 - DNA, 25 bp, Homo sapien
tcactggaggagcacgtttccgtcg

SEQ ID NO: 1937696 - DNA, 25 bp, Homo sapien
ttcaagttttcttggctggtaactg

SEQ ID NO: 1937697 - DNA, 25 bp, Homo sapien
tcaagttttcttggctggtaactgt

SEQ ID NO: 1937698 - DNA, 25 bp, Homo sapien
gttttcttggctggtaactgtgaac

SEQ ID NO: 1937699 - DNA, 25 bp, Homo sapien
aagttttcttggctggtaactgtga

SEQ ID NO: 1937700 - DNA, 25 bp, Homo sapien
tatcttccgaaagacccacaagcgg

SEQ ID NO: 1937701 - DNA, 25 bp, Homo sapien
tccgaagttcgctagtccgggatcg

SEQ ID NO: 1937702 - DNA, 25 bp, Homo sapien
tgttggacgctcgagacaaacaccg

SEQ ID NO: 1937703 - DNA, 25 bp, Homo sapien
gactcccggatcctagtgtgttgga

SEQ ID NO: 1937704 - DNA, 25 bp, Homo sapien
caagctggttctccgagcctcttga

SEQ ID NO: 1937705 - DNA, 25 bp, Homo sapien
gcacgagcgctttttgccggaacgt

SEQ ID NO: 1937706 - DNA, 25 bp, Homo sapien
cacccaccgaacatgggcttgaggt

SEQ ID NO: 1937707 - DNA, 25 bp, Homo sapien
ctctacagacccagcagatcacggg

SEQ ID NO: 1937708 - DNA, 25 bp, Homo sapien
tgaattacaacgtccaaaaccactg

SEQ ID NO: 1937709 - DNA, 25 bp, Homo sapien
tctctggaaacaaagtaggtggccc

SEQ ID NO: 1937710 - DNA, 25 bp, Homo sapien
tactaccaacctgtcttgggactgc

SEQ ID NO: 1937711 - DNA, 25 bp, Homo sapien
ggatcaaagtctccgctattctgga

SEQ ID NO: 1937712 - DNA, 25 bp, Homo sapien
cttccaagctaatcttgtttcccat

SEQ ID NO: 1937713 - DNA, 25 bp, Homo sapien
tcttccaagctaatcttgtttccca

SEQ ID NO: 1937714 - DNA, 25 bp, Homo sapien
tgactttatcccgaaatataagtcc

SEQ ID NO: 1937715 - DNA, 25 bp, Homo sapien
tcttttcgtcctgtatcctcaggaa

SEQ ID NO: 1937716 - DNA, 25 bp, Homo sapien
ccaaacagactcaggtgagcggaca

SEQ ID NO: 1937717 - DNA, 25 bp, Homo sapien
tgagcggacacttcctccggtgaaa

SEQ ID NO: 1937718 - DNA, 25 bp, Homo sapien
ggtcccaggcgcattctcgcttatg

SEQ ID NO: 1937719 - DNA, 25 bp, Homo sapien
gctgagatttggcgcctctgtcccc

SEQ ID NO: 1937720 - DNA, 25 bp, Homo sapien
ggagccaacttcagccccgcaggcg

SEQ ID NO: 1937721 - DNA, 25 bp, Homo sapien
tggcgcctctgtccccaagcgggtg

SEQ ID NO: 1937722 - DNA, 25 bp, Homo sapien
ggaacgggagagggagccaacttca

SEQ ID NO: 1937723 - DNA, 25 bp, Homo sapien
aatgtctggctggaccgagcactgt

SEQ ID NO: 1937724 - DNA, 25 bp, Homo sapien
tctggctggaccgagcactgtccag

SEQ ID NO: 1937725 - DNA, 25 bp, Homo sapien
tggtcaaagcgtcccttgcaggccc

SEQ ID NO: 1937726 - DNA, 25 bp, Homo sapien
gtcaaagcgtcccttgcaggccctg

SEQ ID NO: 1937727 - DNA, 25 bp, Homo sapien
caccgccctccaagttagaaagcat

SEQ ID NO: 1937728 - DNA, 25 bp, Homo sapien
ccaccgccctccaagttagaaagca

SEQ ID NO: 1937729 - DNA, 25 bp, Homo sapien
caaaagtcgtgttttcggcatacac

SEQ ID NO: 1937730 - DNA, 25 bp, Homo sapien
ggcagtgactggagtgatgggttca

SEQ ID NO: 1937731 - DNA, 25 bp, Homo sapien
gatgggttcacaaagagacttatca

SEQ ID NO: 1937732 - DNA, 25 bp, Homo sapien
gctttgtggattttcagtaactggg

SEQ ID NO: 1937733 - DNA, 25 bp, Homo sapien
gaaagcgacacctttgcaaggaagc

SEQ ID NO: 1937734 - DNA, 25 bp, Homo sapien
tgttagaaagcgacacctttgcaag

SEQ ID NO: 1937735 - DNA, 25 bp, Homo sapien
tgtagcatttgtgttagaaagcgac

SEQ ID NO: 1937736 - DNA, 25 bp, Homo sapien
ttcctccttgtagcatttgtgttag

SEQ ID NO: 1937737 - DNA, 25 bp, Homo sapien
cagctgcctgctgccttcagaagga

SEQ ID NO: 1937738 - DNA, 25 bp, Homo sapien
agctgcctgctgccttcagaaggat

SEQ ID NO: 1937739 - DNA, 25 bp, Homo sapien
tcagctgcctgctgccttcagaagg

SEQ ID NO: 1937740 - DNA, 25 bp, Homo sapien
tctgcagggcagtatcttgttccct

SEQ ID NO: 1937741 - DNA, 25 bp, Homo sapien
catatgttgggtgtttctgcagggc

SEQ ID NO: 1937742 - DNA, 25 bp, Homo sapien
ggtctggttttgtcatatgttgggt

SEQ ID NO: 1937743 - DNA, 25 bp, Homo sapien
tttctgcagggcagtatcttgttcc

SEQ ID NO: 1937744 - DNA, 25 bp, Homo sapien
gaagaggtgttctctgattatctct

SEQ ID NO: 1937745 - DNA, 25 bp, Homo sapien
ccttcttacttttctgaagaggtgt

SEQ ID NO: 1937746 - DNA, 25 bp, Homo sapien
tgccaatgccttgcttggcatcagg

SEQ ID NO: 1937747 - DNA, 25 bp, Homo sapien
attcaccctgaatgccaatgccttg

SEQ ID NO: 1937748 - DNA, 25 bp, Homo sapien
gaataagccattcgctggccagctg

SEQ ID NO: 1937749 - DNA, 25 bp, Homo sapien
caatgcctgtcttttgagtcgtgac

SEQ ID NO: 1937750 - DNA, 25 bp, Homo sapien
tctcccttgtaatcagtcaatgcct

SEQ ID NO: 1937751 - DNA, 25 bp, Homo sapien
cctgcatgtattgtgagaaagtggc

SEQ ID NO: 1937752 - DNA, 25 bp, Homo sapien
gcagagagatgaccttatgacccca

SEQ ID NO: 1937753 - DNA, 25 bp, Homo sapien
cttgattttgagcttgcagagagat

SEQ ID NO: 1937754 - DNA, 25 bp, Homo sapien
cagagagatgaccttatgaccccag

SEQ ID NO: 1937755 - DNA, 25 bp, Homo sapien
ttgattttgagcttgcagagagatg

SEQ ID NO: 1937756 - DNA, 25 bp, Homo sapien
tatagctcaagctgtcaatttctcc

SEQ ID NO: 1937757 - DNA, 25 bp, Homo sapien
ctaaggactaagtgcctgagtctat

SEQ ID NO: 1937758 - DNA, 25 bp, Homo sapien
tagaaattcataggttgatccaaaa

SEQ ID NO: 1937759 - DNA, 25 bp, Homo sapien
tcgaataactagcaagtagggtact

SEQ ID NO: 1937760 - DNA, 25 bp, Homo sapien
tctatctcttgcatatggcataaat

SEQ ID NO: 1937761 - DNA, 25 bp, Homo sapien
tggtggttccaatatctaccctgac

SEQ ID NO: 1937762 - DNA, 25 bp, Homo sapien
tagtctgactcctaatgttggtggt

SEQ ID NO: 1937763 - DNA, 25 bp, Homo sapien
ttcgtgtataggctgattgcttggt

SEQ ID NO: 1937764 - DNA, 25 bp, Homo sapien
catatttttctaagttctttgtgca

SEQ ID NO: 1937765 - DNA, 25 bp, Homo sapien
tcatatttttctaagttctttgtgc

SEQ ID NO: 1937766 - DNA, 25 bp, Homo sapien
atttttctaagttctttgtgcagtt

SEQ ID NO: 1937767 - DNA, 25 bp, Homo sapien
tatttttctaagttctttgtgcagt

SEQ ID NO: 1937768 - DNA, 25 bp, Homo sapien
tccttgcacagaccctgatttggct

SEQ ID NO: 1937769 - DNA, 25 bp, Homo sapien
cctctgaaagattccttcctttctg

SEQ ID NO: 1937770 - DNA, 25 bp, Homo sapien
ctctctgtgaccctctgaaagattc

SEQ ID NO: 1937771 - DNA, 25 bp, Homo sapien
ggctacctgggagtagctcccttgt

SEQ ID NO: 1937772 - DNA, 25 bp, Homo sapien
ctctgaaaaactggtattggaaaat

SEQ ID NO: 1937773 - DNA, 25 bp, Homo sapien
aggcctgggcagctttccacatcca

SEQ ID NO: 1937774 - DNA, 25 bp, Homo sapien
aaatatgccttctttcaggcctggg

SEQ ID NO: 1937775 - DNA, 25 bp, Homo sapien
cttctttcaggcctgggcagctttc

SEQ ID NO: 1937776 - DNA, 25 bp, Homo sapien
catattagtgccacctgggaacttg

SEQ ID NO: 1937777 - DNA, 25 bp, Homo sapien
caggacccatccaaacctactgaat

SEQ ID NO: 1937778 - DNA, 25 bp, Homo sapien
taaggggacccatattagtgccacc

SEQ ID NO: 1937779 - DNA, 25 bp, Homo sapien
tgaggattctcaggacccatccaaa

SEQ ID NO: 1937780 - DNA, 25 bp, Homo sapien
tgtgcacgcagagttctgaaacagc

SEQ ID NO: 1937781 - DNA, 25 bp, Homo sapien
aggttcatgggcaaacacagcaggg

SEQ ID NO: 1937782 - DNA, 25 bp, Homo sapien
atgctcaggttcatgggcaaacaca

SEQ ID NO: 1937783 - DNA, 25 bp, Homo sapien
gggcacttttgtgcacgcagagttc

SEQ ID NO: 1937784 - DNA, 25 bp, Homo sapien
ctgcccctgtcctgattaatatttg

SEQ ID NO: 1937785 - DNA, 25 bp, Homo sapien
tgcccctgtcctgattaatatttgg

SEQ ID NO: 1937786 - DNA, 25 bp, Homo sapien
gcccctgtcctgattaatatttgga

SEQ ID NO: 1937787 - DNA, 25 bp, Homo sapien
caagcaaaaacttgcaggcatgtgc

SEQ ID NO: 1937788 - DNA, 25 bp, Homo sapien
tgctccaagcaaaaacttgcaggca

SEQ ID NO: 1937789 - DNA, 25 bp, Homo sapien
gcaaaaacttgcaggcatgtgcaga

SEQ ID NO: 1937790 - DNA, 25 bp, Homo sapien
cacatgctccaagcaaaaacttgca

SEQ ID NO: 1937791 - DNA, 25 bp, Homo sapien
tgtttcgtaacatgtccagtccggt

SEQ ID NO: 1937792 - DNA, 25 bp, Homo sapien
tggagagagcctggtaaaatcgaga

SEQ ID NO: 1937793 - DNA, 25 bp, Homo sapien
tcacttcttatcacaagagtctgtg

SEQ ID NO: 1937794 - DNA, 25 bp, Homo sapien
ccagtccggtgtaatagtaagcaac

SEQ ID NO: 1937795 - DNA, 25 bp, Homo sapien
ttctttttccctatgactgccaaat

SEQ ID NO: 1937796 - DNA, 25 bp, Homo sapien
attattcctgttgggaggtgtaact

SEQ ID NO: 1937797 - DNA, 25 bp, Homo sapien
ctttttccctatgactgccaaatcc

SEQ ID NO: 1937798 - DNA, 25 bp, Homo sapien
ttaattattcctgttgggaggtgta

SEQ ID NO: 1937799 - DNA, 25 bp, Homo sapien
aatgccgctctatctgaaggcctag

SEQ ID NO: 1937800 - DNA, 25 bp, Homo sapien
gttgtaatgccgctctatctgaagg

SEQ ID NO: 1937801 - DNA, 25 bp, Homo sapien
ctctttgttgtaatgccgctctatc

SEQ ID NO: 1937802 - DNA, 25 bp, Homo sapien
gctctatctgaaggcctagaatatt

SEQ ID NO: 1937803 - DNA, 25 bp, Homo sapien
cactgagtcctattatgtccactta

SEQ ID NO: 1937804 - DNA, 25 bp, Homo sapien
gcttaagaagttcactccttcatga

SEQ ID NO: 1937805 - DNA, 25 bp, Homo sapien
tcctcaatggtcataacaagacttt

SEQ ID NO: 1937806 - DNA, 25 bp, Homo sapien
cacaagtcagtaattggattgctgg

SEQ ID NO: 1937807 - DNA, 25 bp, Homo sapien
tatttcgcatcatcatcctccttgg

SEQ ID NO: 1937808 - DNA, 25 bp, Homo sapien
agggccaggcggctgtctgcctcta

SEQ ID NO: 1937809 - DNA, 25 bp, Homo sapien
gacggagcatgctcctctgattggg

SEQ ID NO: 1937810 - DNA, 25 bp, Homo sapien
tcctccttggcgtcctctgacggag

SEQ ID NO: 1937811 - DNA, 25 bp, Homo sapien
ctttgatctcctcctgaggagtctc

SEQ ID NO: 1937812 - DNA, 25 bp, Homo sapien
tctgttaccatctgttaccagcaca

SEQ ID NO: 1937813 - DNA, 25 bp, Homo sapien
cacaccctgggaccatctgttacca

SEQ ID NO: 1937814 - DNA, 25 bp, Homo sapien
tttgatctcctcctgaggagtctct

SEQ ID NO: 1937815 - DNA, 25 bp, Homo sapien
tgagatctgcctgtgctactaaaat

SEQ ID NO: 1937816 - DNA, 25 bp, Homo sapien
caaaatggcaagttctgagtacaaa

SEQ ID NO: 1937817 - DNA, 25 bp, Homo sapien
caaagaatcttgtacttgagaagtc

SEQ ID NO: 1937818 - DNA, 25 bp, Homo sapien
cactatgagtaatgcccacaccttc

SEQ ID NO: 1937819 - DNA, 25 bp, Homo sapien
tccaaacctccgaaaacatgcaact

SEQ ID NO: 1937820 - DNA, 25 bp, Homo sapien
caacttcatagacagctaacctgac

SEQ ID NO: 1937821 - DNA, 25 bp, Homo sapien
attcaaagtcactgttacccaaata

SEQ ID NO: 1937822 - DNA, 25 bp, Homo sapien
atagacagctaacctgactgtgtgc

SEQ ID NO: 1937823 - DNA, 25 bp, Homo sapien
ttacagcccttcaaactccttggag

SEQ ID NO: 1937824 - DNA, 25 bp, Homo sapien
aaatgtctgctactgaacctggcca

SEQ ID NO: 1937825 - DNA, 25 bp, Homo sapien
gaccatgttcagttcgttgtgcacg

SEQ ID NO: 1937826 - DNA, 25 bp, Homo sapien
ttcagatgagaagagcccaatttgt

SEQ ID NO: 1937827 - DNA, 25 bp, Homo sapien
agggctgacgaatgtgaagttgaaa

SEQ ID NO: 1937828 - DNA, 25 bp, Homo sapien
caagctgcactagggtaccagaggg

SEQ ID NO: 1937829 - DNA, 25 bp, Homo sapien
ttctcaagctgcactagggtaccag

SEQ ID NO: 1937830 - DNA, 25 bp, Homo sapien
gaaatatctggacagctgtatttcc

SEQ ID NO: 1937831 - DNA, 25 bp, Homo sapien
gacagaagcttcctcgggtttatga

SEQ ID NO: 1937832 - DNA, 25 bp, Homo sapien
gttacgcaattcatggacagaagct

SEQ ID NO: 1937833 - DNA, 25 bp, Homo sapien
cacatttcttttgatgccaggggcc

SEQ ID NO: 1937834 - DNA, 25 bp, Homo sapien
cattttcccattcataagacctcaa

SEQ ID NO: 1937835 - DNA, 25 bp, Homo sapien
tgagatataactggaatcttggcct

SEQ ID NO: 1937836 - DNA, 25 bp, Homo sapien
gctggatggagtaggtgaggtcaac

SEQ ID NO: 1937837 - DNA, 25 bp, Homo sapien
gtaggtgaggtcaacggctgtgtcc

SEQ ID NO: 1937838 - DNA, 25 bp, Homo sapien
taaaatcccgtttctctccttgaga

SEQ ID NO: 1937839 - DNA, 25 bp, Homo sapien
gcactaccgggccaccatcggggtg

SEQ ID NO: 1937840 - DNA, 25 bp, Homo sapien
gaccagcatcatcaagcgctacgtc

SEQ ID NO: 1937841 - DNA, 25 bp, Homo sapien
gcttggcgtgggcaagaccagcatc

SEQ ID NO: 1937842 - DNA, 25 bp, Homo sapien
caaggtgctggtgatcggcgagctt

SEQ ID NO: 1937843 - DNA, 25 bp, Homo sapien
tacaccaggactagttgagaaggct

SEQ ID NO: 1937844 - DNA, 25 bp, Homo sapien
ttgggtgacttaacccgaagctgca

SEQ ID NO: 1937845 - DNA, 25 bp, Homo sapien
cctgggtacctttaggagaagagag

SEQ ID NO: 1937846 - DNA, 25 bp, Homo sapien
gaagctgcactcctagttagtgaca

SEQ ID NO: 1937847 - DNA, 25 bp, Homo sapien
actgggcgcctgcacttatttgaaa

SEQ ID NO: 1937848 - DNA, 25 bp, Homo sapien
tgtcatgttagctgggagtcttccc

SEQ ID NO: 1937849 - DNA, 25 bp, Homo sapien
ggagaagtatccctgctagtggctc

SEQ ID NO: 1937850 - DNA, 25 bp, Homo sapien
tcctcaggatttggtaaggcttcca

SEQ ID NO: 1937851 - DNA, 25 bp, Homo sapien
caaagggtgagtgtctctgtccaga

SEQ ID NO: 1937852 - DNA, 25 bp, Homo sapien
tgcaacgcagttgtaacagaagcct

SEQ ID NO: 1937853 - DNA, 25 bp, Homo sapien
ggaaatccctaagctcagtcccagg

SEQ ID NO: 1937854 - DNA, 25 bp, Homo sapien
gaagtatagattagagagaggccct

SEQ ID NO: 1937855 - DNA, 25 bp, Homo sapien
gctgagtggagagccctgagcattc

SEQ ID NO: 1937856 - DNA, 25 bp, Homo sapien
tagtagtggtcctaggcctaagggc

SEQ ID NO: 1937857 - DNA, 25 bp, Homo sapien
tagtctgacaaaccataggctatgc

SEQ ID NO: 1937858 - DNA, 25 bp, Homo sapien
ggctgtctgtcatctaggtaacccc

SEQ ID NO: 1937859 - DNA, 25 bp, Homo sapien
tctgtcatctctgaaagagtggctc

SEQ ID NO: 1937860 - DNA, 25 bp, Homo sapien
tatttgctgcgctttgcatcttatc

SEQ ID NO: 1937861 - DNA, 25 bp, Homo sapien
ttcattcattcacgctgtctgctgc

SEQ ID NO: 1937862 - DNA, 25 bp, Homo sapien
tgtctgctgctcctcgaaaccaggt

SEQ ID NO: 1937863 - DNA, 25 bp, Homo sapien
gggatgtgggatttcagtttatgct

SEQ ID NO: 1937864 - DNA, 25 bp, Homo sapien
gatgtgggatttcagtttatgctct

SEQ ID NO: 1937865 - DNA, 25 bp, Homo sapien
tcagtttatgctcttgcgtccctct

SEQ ID NO: 1937866 - DNA, 25 bp, Homo sapien
ttatgctcttgcgtccctctgcagc

SEQ ID NO: 1937867 - DNA, 25 bp, Homo sapien
tgcactctcatgctgaggcgagcgg

SEQ ID NO: 1937868 - DNA, 25 bp, Homo sapien
ggaggcagtgctagcccatggtcca

SEQ ID NO: 1937869 - DNA, 25 bp, Homo sapien
gcaggtggatgcaccgggcttccac

SEQ ID NO: 1937870 - DNA, 25 bp, Homo sapien
tcattgtagatgctggtcctgccac

SEQ ID NO: 1937871 - DNA, 25 bp, Homo sapien
tgagacaggaagatgttacctctgc

SEQ ID NO: 1937872 - DNA, 25 bp, Homo sapien
ctgagacaggaagatgttacctctg

SEQ ID NO: 1937873 - DNA, 25 bp, Homo sapien
tctttcccgtttcccatcttatgag

SEQ ID NO: 1937874 - DNA, 25 bp, Homo sapien
ttctttcccgtttcccatcttatga

SEQ ID NO: 1937875 - DNA, 25 bp, Homo sapien
tttcccgtttcccatcttatgagac

SEQ ID NO: 1937876 - DNA, 25 bp, Homo sapien
tcccgtttcccatcttatgagacat

SEQ ID NO: 1937877 - DNA, 25 bp, Homo sapien
tcacttctttgaggcaaaccaacct

SEQ ID NO: 1937878 - DNA, 25 bp, Homo sapien
gaggcaaaccaacctctcagagcct

SEQ ID NO: 1937879 - DNA, 25 bp, Homo sapien
atcacttctttgaggcaaaccaacc

SEQ ID NO: 1937880 - DNA, 25 bp, Homo sapien
tctttgaggcaaaccaacctctcag

SEQ ID NO: 1937881 - DNA, 25 bp, Homo sapien
ggatagtcagctgaagccgtgactc

SEQ ID NO: 1937882 - DNA, 25 bp, Homo sapien
agctgaagccgtgactcccgggcag

SEQ ID NO: 1937883 - DNA, 25 bp, Homo sapien
tagtcagctgaagccgtgactcccg

SEQ ID NO: 1937884 - DNA, 25 bp, Homo sapien
tgactcccgggcagaagggagatat

SEQ ID NO: 1937885 - DNA, 25 bp, Homo sapien
tgttgtaagagtgtgtcccttgcag

SEQ ID NO: 1937886 - DNA, 25 bp, Homo sapien
cccttgcaggtatcgttaggctgta

SEQ ID NO: 1937887 - DNA, 25 bp, Homo sapien
aatgatgactggtagaattccaagc

SEQ ID NO: 1937888 - DNA, 25 bp, Homo sapien
gactgtgagtcatgactggcaagaa

SEQ ID NO: 1937889 - DNA, 25 bp, Homo sapien
cctttgcctaaggaatctggagcat

SEQ ID NO: 1937890 - DNA, 25 bp, Homo sapien
tagttagatcccatggcatcattgg

SEQ ID NO: 1937891 - DNA, 25 bp, Homo sapien
tataatgaagtctgaaccctgtagg

SEQ ID NO: 1937892 - DNA, 25 bp, Homo sapien
taagtatactctgcaagaaatcccc

SEQ ID NO: 1937893 - DNA, 25 bp, Homo sapien
tcaatccaattgtgtggacgcacac

SEQ ID NO: 1937894 - DNA, 25 bp, Homo sapien
ggtgagatcttgcacccaattttct

SEQ ID NO: 1937895 - DNA, 25 bp, Homo sapien
gaacagaccctcttatacaagttgc

SEQ ID NO: 1937896 - DNA, 25 bp, Homo sapien
aacaaactcccctatgagggcatcg

SEQ ID NO: 1937897 - DNA, 25 bp, Homo sapien
gaagacaagaacacctctggctctg

SEQ ID NO: 1937898 - DNA, 25 bp, Homo sapien
gacagacctgcactttatagctcct

SEQ ID NO: 1937899 - DNA, 25 bp, Homo sapien
tctggctctgtctagacctctaaaa

SEQ ID NO: 1937900 - DNA, 25 bp, Homo sapien
caaaccaggatagatggttacccta

SEQ ID NO: 1937901 - DNA, 25 bp, Homo sapien
ttgcaggccacgtctcaagccgaat

SEQ ID NO: 1937902 - DNA, 25 bp, Homo sapien
cttgcaggccacgtctcaagccgaa

SEQ ID NO: 1937903 - DNA, 25 bp, Homo sapien
ggaaaaattcaaagagacccagagc

SEQ ID NO: 1937904 - DNA, 25 bp, Homo sapien
agaaacattaactggcacattcaag

SEQ ID NO: 1937905 - DNA, 25 bp, Homo sapien
cacatacaagtgattctcggtaata

SEQ ID NO: 1937906 - DNA, 25 bp, Homo sapien
gctagacacctcataattaaactct

SEQ ID NO: 1937907 - DNA, 25 bp, Homo sapien
ttggaaacatctccacgacttattc

SEQ ID NO: 1937908 - DNA, 25 bp, Homo sapien
aacatctccacgacttattcgaaaa

SEQ ID NO: 1937909 - DNA, 25 bp, Homo sapien
gaaacatctccacgacttattcgaa

SEQ ID NO: 1937910 - DNA, 25 bp, Homo sapien
ggaaacatctccacgacttattcga

SEQ ID NO: 1937911 - DNA, 25 bp, Homo sapien
gaaggcaatctaccacaacgccaag

SEQ ID NO: 1937912 - DNA, 25 bp, Homo sapien
tatgcaggattgcattaaaatccag

SEQ ID NO: 1937913 - DNA, 25 bp, Homo sapien
gaatcactggagttaaccaaatatg

SEQ ID NO: 1937914 - DNA, 25 bp, Homo sapien
gatgattggtcttggtggttcctag

SEQ ID NO: 1937915 - DNA, 25 bp, Homo sapien
gaaatgatcctcaatcttattacaa

SEQ ID NO: 1937916 - DNA, 25 bp, Homo sapien
gcgcctcatggtaccgcggcgcctc

SEQ ID NO: 1937917 - DNA, 25 bp, Homo sapien
tctttctgcgatagatcactttacg

SEQ ID NO: 1937918 - DNA, 25 bp, Homo sapien
cgaagtttatctgggcttttcacag

SEQ ID NO: 1937919 - DNA, 25 bp, Homo sapien
tgtaatgatctttaactgcctgctg

SEQ ID NO: 1937920 - DNA, 25 bp, Homo sapien
tgttagttttcctcagaaagctagt

SEQ ID NO: 1937921 - DNA, 25 bp, Homo sapien
gccattcgagtttaagatgctctaa

SEQ ID NO: 1937922 - DNA, 25 bp, Homo sapien
gctgataagatattgggccaactga

SEQ ID NO: 1937923 - DNA, 25 bp, Homo sapien
agctggaaactctggctgctcagga

SEQ ID NO: 1937924 - DNA, 25 bp, Homo sapien
aagctggaaactctggctgctcagg

SEQ ID NO: 1937925 - DNA, 25 bp, Homo sapien
cagtgttcttgttctgaagacatag

SEQ ID NO: 1937926 - DNA, 25 bp, Homo sapien
ttcaagatcaagctgtcccttctct

SEQ ID NO: 1937927 - DNA, 25 bp, Homo sapien
cttctctgggctggtataagggcag

SEQ ID NO: 1937928 - DNA, 25 bp, Homo sapien
aagtacttcaagatcaagctgtccc

SEQ ID NO: 1937929 - DNA, 25 bp, Homo sapien
tttaataattgcagggccgctgagt

SEQ ID NO: 1937930 - DNA, 25 bp, Homo sapien
tcatgggtgggagtcacagaaccag

SEQ ID NO: 1937931 - DNA, 25 bp, Homo sapien
tggtctaccagaatgcaaagtctga

SEQ ID NO: 1937932 - DNA, 25 bp, Homo sapien
tcagttctttggcatgggtcatggg

SEQ ID NO: 1937933 - DNA, 25 bp, Homo sapien
tggtccacattagagattttgaaac

SEQ ID NO: 1937934 - DNA, 25 bp, Homo sapien
gtagcacctaaacctcccacaattg

SEQ ID NO: 1937935 - DNA, 25 bp, Homo sapien
cttaacctgggatctttggatgaga

SEQ ID NO: 1937936 - DNA, 25 bp, Homo sapien
cacgttggcctactaagtatctggg

SEQ ID NO: 1937937 - DNA, 25 bp, Homo sapien
tctcagatggcagcaagacaagata

SEQ ID NO: 1937938 - DNA, 25 bp, Homo sapien
cattggctcgaattagtacaccacc

SEQ ID NO: 1937939 - DNA, 25 bp, Homo sapien
ccgactcagagtttatttgccatag

SEQ ID NO: 1937940 - DNA, 25 bp, Homo sapien
gacaagatagtggattcctgcacca

SEQ ID NO: 1937941 - DNA, 25 bp, Homo sapien
tcataccaagtggagtgggctgcca

SEQ ID NO: 1937942 - DNA, 25 bp, Homo sapien
cagagctgcgatgtgatcctttgca

SEQ ID NO: 1937943 - DNA, 25 bp, Homo sapien
tacagcagttaactttcagccaagg

SEQ ID NO: 1937944 - DNA, 25 bp, Homo sapien
tgacaagtatgcaatacagacctgg

SEQ ID NO: 1937945 - DNA, 25 bp, Homo sapien
cacttggaaacagtgcatgcacgta

SEQ ID NO: 1937946 - DNA, 25 bp, Homo sapien
tcttggtcttggaaaatgtcttggg

SEQ ID NO: 1937947 - DNA, 25 bp, Homo sapien
tgtttaaggcacagaacacaagaac

SEQ ID NO: 1937948 - DNA, 25 bp, Homo sapien
aatgccagtcatagaaattgctgtc

SEQ ID NO: 1937949 - DNA, 25 bp, Homo sapien
tgaaaaatttctatagtcctggtgg

SEQ ID NO: 1937950 - DNA, 25 bp, Homo sapien
tcctccaatggtatgtgcaactggt

SEQ ID NO: 1937951 - DNA, 25 bp, Homo sapien
gagacaccacaacccgctgaaatgt

SEQ ID NO: 1937952 - DNA, 25 bp, Homo sapien
tacatcagattactttccacaaggt

SEQ ID NO: 1937953 - DNA, 25 bp, Homo sapien
agggaaggcgtttatacaaccatca

SEQ ID NO: 1937954 - DNA, 25 bp, Homo sapien
ccggctccaccccacgacacgtggg

SEQ ID NO: 1937955 - DNA, 25 bp, Homo sapien
ccagcgaagagggaaggcgtttata

SEQ ID NO: 1937956 - DNA, 25 bp, Homo sapien
gagtgcccagcgaagagggaaggcg

SEQ ID NO: 1937957 - DNA, 25 bp, Homo sapien
gatttaggtggggacgctgccatta

SEQ ID NO: 1937958 - DNA, 25 bp, Homo sapien
ggacgctgccattagcctcttcaaa

SEQ ID NO: 1937959 - DNA, 25 bp, Homo sapien
cgaaagtctcatcagcgacaaggca

SEQ ID NO: 1937960 - DNA, 25 bp, Homo sapien
tcgaaagtctcatcagcgacaaggc

SEQ ID NO: 1937961 - DNA, 25 bp, Homo sapien
gaaagtctcatcagcgacaaggcaa

SEQ ID NO: 1937962 - DNA, 25 bp, Homo sapien
gtcgaaagtctcatcagcgacaagg

SEQ ID NO: 1937963 - DNA, 25 bp, Homo sapien
taagtcatagccctcgacagtgagc

SEQ ID NO: 1937964 - DNA, 25 bp, Homo sapien
cctaataagatgtcgcatgaaggcg

SEQ ID NO: 1937965 - DNA, 25 bp, Homo sapien
gaaattataccagagagatcagagg

SEQ ID NO: 1937966 - DNA, 25 bp, Homo sapien
ggcttatattccctacctctgcagg

SEQ ID NO: 1937967 - DNA, 25 bp, Homo sapien
ttctactgtgcgtttctgttccatt

SEQ ID NO: 1937968 - DNA, 25 bp, Homo sapien
acagattccgctctagtttctactg

SEQ ID NO: 1937969 - DNA, 25 bp, Homo sapien
aatatgtccacagattccgctctag

SEQ ID NO: 1937970 - DNA, 25 bp, Homo sapien
tctagtttctactgtgcgtttctgt

SEQ ID NO: 1937971 - DNA, 25 bp, Homo sapien
aatctaaattttgagtgggaaacat

SEQ ID NO: 1937972 - DNA, 25 bp, Homo sapien
atctaaattttgagtgggaaacatt

SEQ ID NO: 1937973 - DNA, 25 bp, Homo sapien
gctgagtcacgcactccgatgcaaa

SEQ ID NO: 1937974 - DNA, 25 bp, Homo sapien
gagacaggatacacatcgaatctga

SEQ ID NO: 1937975 - DNA, 25 bp, Homo sapien
ccttgcaagggcagagtgtacctta

SEQ ID NO: 1937976 - DNA, 25 bp, Homo sapien
cgatgactcaggttgggtttcctca

SEQ ID NO: 1937977 - DNA, 25 bp, Homo sapien
gaagcaggagtactaagcagaacag

SEQ ID NO: 1937978 - DNA, 25 bp, Homo sapien
cctggtgcttcccaaaagatgaagt

SEQ ID NO: 1937979 - DNA, 25 bp, Homo sapien
tcaaggtggctcactcagaggctat

SEQ ID NO: 1937980 - DNA, 25 bp, Homo sapien
ctagggtgtcccaatcaggtgagca

SEQ ID NO: 1937981 - DNA, 25 bp, Homo sapien
catccgacaggagagctttgaccat

SEQ ID NO: 1937982 - DNA, 25 bp, Homo sapien
caaagattcacaaccaacatccgac

SEQ ID NO: 1937983 - DNA, 25 bp, Homo sapien
tcaaggaccaccaaagattcacaac

SEQ ID NO: 1937984 - DNA, 25 bp, Homo sapien
tcacaaccaacatccgacaggagag

SEQ ID NO: 1937985 - DNA, 25 bp, Homo sapien
tggcagctgccggtgaacccagtga

SEQ ID NO: 1937986 - DNA, 25 bp, Homo sapien
tttctggttgacttgcgctgcgtgc

SEQ ID NO: 1937987 - DNA, 25 bp, Homo sapien
cccagtgacactggttcagtgctca

SEQ ID NO: 1937988 - DNA, 25 bp, Homo sapien
ggaatcgtcatccttcccatgaaat

SEQ ID NO: 1937989 - DNA, 25 bp, Homo sapien
ctattcctacctgccctctggcttc

SEQ ID NO: 1937990 - DNA, 25 bp, Homo sapien
ttcctacctgccctctggcttcatt

SEQ ID NO: 1937991 - DNA, 25 bp, Homo sapien
tcctacctgccctctggcttcattc

SEQ ID NO: 1937992 - DNA, 25 bp, Homo sapien
cctctggcttcattcatggtcatag

SEQ ID NO: 1937993 - DNA, 25 bp, Homo sapien
ttccacagcccgtttatatccatct

SEQ ID NO: 1937994 - DNA, 25 bp, Homo sapien
gtttttggacagagagcaccaccat

SEQ ID NO: 1937995 - DNA, 25 bp, Homo sapien
cagtttttggacagagagcaccacc

SEQ ID NO: 1937996 - DNA, 25 bp, Homo sapien
agcccgtttatatccatctggtcac

SEQ ID NO: 1937997 - DNA, 25 bp, Homo sapien
ataacaatgactgctccctccactg

SEQ ID NO: 1937998 - DNA, 25 bp, Homo sapien
agtaaataacaatgactgctccctc

SEQ ID NO: 1937999 - DNA, 25 bp, Homo sapien
ttgagccactgctggacaagagccg

SEQ ID NO: 1938000 - DNA, 25 bp, Homo sapien
tgctggacaagagccgttgattgct

SEQ ID NO: 1938001 - DNA, 25 bp, Homo sapien
gctttcctgtgatattcatctgatg

SEQ ID NO: 1938002 - DNA, 25 bp, Homo sapien
tacaatttggcctactgcttggtgg

SEQ ID NO: 1938003 - DNA, 25 bp, Homo sapien
gggctattagatcagaaatattcca

SEQ ID NO: 1938004 - DNA, 25 bp, Homo sapien
actcactgcagagcaatccagcttt

SEQ ID NO: 1938005 - DNA, 25 bp, Homo sapien
cagcctccgagtgatacagaaattc

SEQ ID NO: 1938006 - DNA, 25 bp, Homo sapien
tgtatagttcaatagccccagctga

SEQ ID NO: 1938007 - DNA, 25 bp, Homo sapien
ctaaaaccttgagaacagccccttg

SEQ ID NO: 1938008 - DNA, 25 bp, Homo sapien
tttagcgacccagaaaacactgagc

SEQ ID NO: 1938009 - DNA, 25 bp, Homo sapien
accatttcatttcaccttgcatttc

SEQ ID NO: 1938010 - DNA, 25 bp, Homo sapien
ttaagctcagcatgaaccaagatcc

SEQ ID NO: 1938011 - DNA, 25 bp, Homo sapien
ggcagtctaatgacaaagtcagtcg

SEQ ID NO: 1938012 - DNA, 25 bp, Homo sapien
tattcaccagaaagagtctttctgc

SEQ ID NO: 1938013 - DNA, 25 bp, Homo sapien
cagtcgataattgctcagaagatct

SEQ ID NO: 1938014 - DNA, 25 bp, Homo sapien
gtcttggctacatcatcctgtgaca

SEQ ID NO: 1938015 - DNA, 25 bp, Homo sapien
tcttggctacatcatcctgtgacat

SEQ ID NO: 1938016 - DNA, 25 bp, Homo sapien
tgtcttggctacatcatcctgtgac

SEQ ID NO: 1938017 - DNA, 25 bp, Homo sapien
catataaaaggccgtagtaggcctt

SEQ ID NO: 1938018 - DNA, 25 bp, Homo sapien
ggctccttgttagctatgggaaagt

SEQ ID NO: 1938019 - DNA, 25 bp, Homo sapien
ttccccaaatcgatgccaaaacttg

SEQ ID NO: 1938020 - DNA, 25 bp, Homo sapien
tatgggaaagtcattgtatcttttt

SEQ ID NO: 1938021 - DNA, 25 bp, Homo sapien
gctatgggaaagtcattgtatcttt

SEQ ID NO: 1938022 - DNA, 25 bp, Homo sapien
cagatgcttagctcagggtttttct

SEQ ID NO: 1938023 - DNA, 25 bp, Homo sapien
atggctcctcatggctccaccttcc

SEQ ID NO: 1938024 - DNA, 25 bp, Homo sapien
cactaacccagatgcttagctcagg

SEQ ID NO: 1938025 - DNA, 25 bp, Homo sapien
ggccctgatgaatgagtgtttcctg

SEQ ID NO: 1938026 - DNA, 25 bp, Homo sapien
agatgctacaccaagatgttctcat

SEQ ID NO: 1938027 - DNA, 25 bp, Homo sapien
catggaagagcaaactccagaaaag

SEQ ID NO: 1938028 - DNA, 25 bp, Homo sapien
catcattgctacctgcagcctgttc

SEQ ID NO: 1938029 - DNA, 25 bp, Homo sapien
aaagatgctacaccaagatgttctc

SEQ ID NO: 1938030 - DNA, 25 bp, Homo sapien
tgtgagaatctcttgtggacagaca

SEQ ID NO: 1938031 - DNA, 25 bp, Homo sapien
ccagtaatgactgttcctcagagga

SEQ ID NO: 1938032 - DNA, 25 bp, Homo sapien
tggctgtgaaagagctccctgccct

SEQ ID NO: 1938033 - DNA, 25 bp, Homo sapien
tgtctcaagagaaacaactccagta

SEQ ID NO: 1938034 - DNA, 25 bp, Homo sapien
tatttgaaaccaagtgctcctgttc

SEQ ID NO: 1938035 - DNA, 25 bp, Homo sapien
gtattttatttgaaaccaagtgctc

SEQ ID NO: 1938036 - DNA, 25 bp, Homo sapien
gggtctactttctgccaccagccta

SEQ ID NO: 1938037 - DNA, 25 bp, Homo sapien
tcctgttctccagggtctactttct

SEQ ID NO: 1938038 - DNA, 25 bp, Homo sapien
tttggaccaggatggtacttccatc

SEQ ID NO: 1938039 - DNA, 25 bp, Homo sapien
aggatggtacttccatcagagcaga

SEQ ID NO: 1938040 - DNA, 25 bp, Homo sapien
cagagcagagtattccgccaagcta

SEQ ID NO: 1938041 - DNA, 25 bp, Homo sapien
catcagagcagagtattccgccaag

SEQ ID NO: 1938042 - DNA, 25 bp, Homo sapien
tgacttcacctccagatagaccttg

SEQ ID NO: 1938043 - DNA, 25 bp, Homo sapien
aagcttcctcagtagaaatctagcc

SEQ ID NO: 1938044 - DNA, 25 bp, Homo sapien
catctgaagtgcattctaaactagg

SEQ ID NO: 1938045 - DNA, 25 bp, Homo sapien
accttgttctagcttggaatccatc

SEQ ID NO: 1938046 - DNA, 25 bp, Homo sapien
taaccaggcggatgatatgctaatg

SEQ ID NO: 1938047 - DNA, 25 bp, Homo sapien
tgatgtgagcctaatgaccgcgaac

SEQ ID NO: 1938048 - DNA, 25 bp, Homo sapien
cacacgaggtgtaggagcgaaaaga

SEQ ID NO: 1938049 - DNA, 25 bp, Homo sapien
catccttgcgtcatgggtctctcag

SEQ ID NO: 1938050 - DNA, 25 bp, Homo sapien
ccagagctgtggcatcccagtgaga

SEQ ID NO: 1938051 - DNA, 25 bp, Homo sapien
gtgttccaaacaacatctataagaa

SEQ ID NO: 1938052 - DNA, 25 bp, Homo sapien
ccaaacaacatctataagaagtctc

SEQ ID NO: 1938053 - DNA, 25 bp, Homo sapien
ggagctcttgctgaatggtggagcc

SEQ ID NO: 1938054 - DNA, 25 bp, Homo sapien
cattccgctgctcccatctatggtg

SEQ ID NO: 1938055 - DNA, 25 bp, Homo sapien
tgcccactctgatgtcacctgctgc

SEQ ID NO: 1938056 - DNA, 25 bp, Homo sapien
ggtgtcacagtcccagactgccaac

SEQ ID NO: 1938057 - DNA, 25 bp, Homo sapien
actgttgtgggcacactacccaggg

SEQ ID NO: 1938058 - DNA, 25 bp, Homo sapien
aatgcagataccttatggactgtca

SEQ ID NO: 1938059 - DNA, 25 bp, Homo sapien
tgctctgacaaatgtagtgccactg

SEQ ID NO: 1938060 - DNA, 25 bp, Homo sapien
actgtcacgggcacttgagatttct

SEQ ID NO: 1938061 - DNA, 25 bp, Homo sapien
gacaaatgtagtgccactgatgtca

SEQ ID NO: 1938062 - DNA, 25 bp, Homo sapien
gatctgccagctcaggtcatctgtc

SEQ ID NO: 1938063 - DNA, 25 bp, Homo sapien
catttcataaacatcaggctctagg

SEQ ID NO: 1938064 - DNA, 25 bp, Homo sapien
tgaggtccaaattagcagtgtgagt

SEQ ID NO: 1938065 - DNA, 25 bp, Homo sapien
ttacaggaccacattaagcagatct

SEQ ID NO: 1938066 - DNA, 25 bp, Homo sapien
gagaaaacgtcaattaggcctacac

SEQ ID NO: 1938067 - DNA, 25 bp, Homo sapien
cagtaagttcatagcatgagtcccc

SEQ ID NO: 1938068 - DNA, 25 bp, Homo sapien
gaatgtacttgacgacacatgccac

SEQ ID NO: 1938069 - DNA, 25 bp, Homo sapien
tacacagtagctagatgggcaggat

SEQ ID NO: 1938070 - DNA, 25 bp, Homo sapien
cagataatgtctgcttgtggactca

SEQ ID NO: 1938071 - DNA, 25 bp, Homo sapien
taagacaagatgatggaaacatggg

SEQ ID NO: 1938072 - DNA, 25 bp, Homo sapien
tgtagcctggcctaagtcagaagtg

SEQ ID NO: 1938073 - DNA, 25 bp, Homo sapien
tataggccctgctctaagactcttg

SEQ ID NO: 1938074 - DNA, 25 bp, Homo sapien
tccatcctccaagctattttttctt

SEQ ID NO: 1938075 - DNA, 25 bp, Homo sapien
tggtcatgctgccagctctagcgtc

SEQ ID NO: 1938076 - DNA, 25 bp, Homo sapien
acagccagaaggatgtcactggaaa

SEQ ID NO: 1938077 - DNA, 25 bp, Homo sapien
tcttgctaactctgccatctattca

SEQ ID NO: 1938078 - DNA, 25 bp, Homo sapien
tcagtatctcttcttttgtgggtct

SEQ ID NO: 1938079 - DNA, 25 bp, Homo sapien
ctcagtatctcttcttttgtgggtc

SEQ ID NO: 1938080 - DNA, 25 bp, Homo sapien
cagtcagtctcaaataccctttgga

SEQ ID NO: 1938081 - DNA, 25 bp, Homo sapien
caaataccctttggaataatagtct

SEQ ID NO: 1938082 - DNA, 25 bp, Homo sapien
tggaataatagtcttctgttctcta

SEQ ID NO: 1938083 - DNA, 25 bp, Homo sapien
aataatgttccagacctgattcagt

SEQ ID NO: 1938084 - DNA, 25 bp, Homo sapien
gattccttcaaaggaggactgagag

SEQ ID NO: 1938085 - DNA, 25 bp, Homo sapien
tcctgagacaccactagagattcct

SEQ ID NO: 1938086 - DNA, 25 bp, Homo sapien
tcataactcaactgttcctcagcat

SEQ ID NO: 1938087 - DNA, 25 bp, Homo sapien
gagttttggcaatgtcaagggacac

SEQ ID NO: 1938088 - DNA, 25 bp, Homo sapien
cccgcttacgtgaatagaaatatct

SEQ ID NO: 1938089 - DNA, 25 bp, Homo sapien
tgctcaaatgcagtctccaagattg

SEQ ID NO: 1938090 - DNA, 25 bp, Homo sapien
tatatcatgaatgcccaggaatttc

SEQ ID NO: 1938091 - DNA, 25 bp, Homo sapien
tgcaatatcacatttcccgcttacg

SEQ ID NO: 1938092 - DNA, 25 bp, Homo sapien
taaatctattccctagttgctgagt

SEQ ID NO: 1938093 - DNA, 25 bp, Homo sapien
ccgaaccagtaaatctattccctag

SEQ ID NO: 1938094 - DNA, 25 bp, Homo sapien
gttgaacgccaattccttccagcca

SEQ ID NO: 1938095 - DNA, 25 bp, Homo sapien
ccctagttgctgagttgaacgccaa

SEQ ID NO: 1938096 - DNA, 25 bp, Homo sapien
tcaggcagacctagttttgctataa

SEQ ID NO: 1938097 - DNA, 25 bp, Homo sapien
ttttgctataaagaagctaccaccc

SEQ ID NO: 1938098 - DNA, 25 bp, Homo sapien
tcatcaggcagacctagttttgcta

SEQ ID NO: 1938099 - DNA, 25 bp, Homo sapien
tataaagaagctaccacccacagtt

SEQ ID NO: 1938100 - DNA, 25 bp, Homo sapien
caaaactgtcagtacttggagtatc

SEQ ID NO: 1938101 - DNA, 25 bp, Homo sapien
tgaccaagcgaaaaacaaatgcatc

SEQ ID NO: 1938102 - DNA, 25 bp, Homo sapien
caaatgcatctggtacagctgatgc

SEQ ID NO: 1938103 - DNA, 25 bp, Homo sapien
tctgtgcaagctggaatgacggcct

SEQ ID NO: 1938104 - DNA, 25 bp, Homo sapien
gagagtggaagggatgatgacagat

SEQ ID NO: 1938105 - DNA, 25 bp, Homo sapien
cttggctccattggaaatggaaatg

SEQ ID NO: 1938106 - DNA, 25 bp, Homo sapien
ttggctccattggaaatggaaatga

SEQ ID NO: 1938107 - DNA, 25 bp, Homo sapien
gaagggatgatgacagattctgtga

SEQ ID NO: 1938108 - DNA, 25 bp, Homo sapien
tttcacccatggatgccacaaaagc

SEQ ID NO: 1938109 - DNA, 25 bp, Homo sapien
gatttgtgcacttgaaccaaagcat

SEQ ID NO: 1938110 - DNA, 25 bp, Homo sapien
cctggtgagtttaggctgcacggct

SEQ ID NO: 1938111 - DNA, 25 bp, Homo sapien
aagaggaggtatagcagctgttgac

SEQ ID NO: 1938112 - DNA, 25 bp, Homo sapien
agaagacttggggaagttgtgcttt

SEQ ID NO: 1938113 - DNA, 25 bp, Homo sapien
gggaagttgtgcttttatgaagctt

SEQ ID NO: 1938114 - DNA, 25 bp, Homo sapien
tgaagctttctgcattgcttatcaa

SEQ ID NO: 1938115 - DNA, 25 bp, Homo sapien
aagctttctgcattgcttatcaaaa

SEQ ID NO: 1938116 - DNA, 25 bp, Homo sapien
ctgagaaataccagcccaggaacaa

SEQ ID NO: 1938117 - DNA, 25 bp, Homo sapien
aacatggccttcactgagaaatacc

SEQ ID NO: 1938118 - DNA, 25 bp, Homo sapien
tcactgagaaataccagcccaggaa

SEQ ID NO: 1938119 - DNA, 25 bp, Homo sapien
gctaaacatggccttcactgagaaa

SEQ ID NO: 1938120 - DNA, 25 bp, Homo sapien
gaaaagttcatttggcaccaacatt

SEQ ID NO: 1938121 - DNA, 25 bp, Homo sapien
aagttcatttggcaccaacatttca

SEQ ID NO: 1938122 - DNA, 25 bp, Homo sapien
cagaaaagttcatttggcaccaaca

SEQ ID NO: 1938123 - DNA, 25 bp, Homo sapien
accagaaaagttcatttggcaccaa

SEQ ID NO: 1938124 - DNA, 25 bp, Homo sapien
gttggagccatcaacatgcccggca

SEQ ID NO: 1938125 - DNA, 25 bp, Homo sapien
gggcctgcagcagaatcaaagacag

SEQ ID NO: 1938126 - DNA, 25 bp, Homo sapien
taatacttgagaagccgctggcatg

SEQ ID NO: 1938127 - DNA, 25 bp, Homo sapien
ctggcatgacgggtaaacactggca

SEQ ID NO: 1938128 - DNA, 25 bp, Homo sapien
tatcagtaaggtctcctgcagtctc

SEQ ID NO: 1938129 - DNA, 25 bp, Homo sapien
agagaaacagggcaaccacgctgca

SEQ ID NO: 1938130 - DNA, 25 bp, Homo sapien
taaaggaacactgtgtcactaacag

SEQ ID NO: 1938131 - DNA, 25 bp, Homo sapien
gaggagaatgcccataaacgggaac

SEQ ID NO: 1938132 - DNA, 25 bp, Homo sapien
tccatccaaatgagtccctggtgtt

SEQ ID NO: 1938133 - DNA, 25 bp, Homo sapien
tgctcactacttctccatccaaatg

SEQ ID NO: 1938134 - DNA, 25 bp, Homo sapien
ggcctctgaccctttcagattcaat

SEQ ID NO: 1938135 - DNA, 25 bp, Homo sapien
caacatgaatttgatttggcacggg

SEQ ID NO: 1938136 - DNA, 25 bp, Homo sapien
taatctttaaatcggtcaactcatg

SEQ ID NO: 1938137 - DNA, 25 bp, Homo sapien
aaaacctctgcgctagaccatgtgt

SEQ ID NO: 1938138 - DNA, 25 bp, Homo sapien
aagtctaaatcaagacaactacttg

SEQ ID NO: 1938139 - DNA, 25 bp, Homo sapien
gaccatgtgtttctaagaaaaacca

SEQ ID NO: 1938140 - DNA, 25 bp, Homo sapien
tccacagagatatcagcgtaaacgt

SEQ ID NO: 1938141 - DNA, 25 bp, Homo sapien
ctctccaaaagtgggtgagagttgc

SEQ ID NO: 1938142 - DNA, 25 bp, Homo sapien
gcgtaaacgtctaagatatatagca

SEQ ID NO: 1938143 - DNA, 25 bp, Homo sapien
taagtggtgaccagtcaaagaacaa

SEQ ID NO: 1938144 - DNA, 25 bp, Homo sapien
caatgatattctccgaggcatctct

SEQ ID NO: 1938145 - DNA, 25 bp, Homo sapien
aatgatattctccgaggcatctctc

SEQ ID NO: 1938146 - DNA, 25 bp, Homo sapien
tggacaacacaacatgtttgtgatg

SEQ ID NO: 1938147 - DNA, 25 bp, Homo sapien
gacaacacaacatgtttgtgatgtt

SEQ ID NO: 1938148 - DNA, 25 bp, Homo sapien
gtgggtggacaacacaacatgtttg

SEQ ID NO: 1938149 - DNA, 25 bp, Homo sapien
ggtggacaacacaacatgtttgtga

SEQ ID NO: 1938150 - DNA, 25 bp, Homo sapien
gccaacttgaccttgacaatctggg

SEQ ID NO: 1938151 - DNA, 25 bp, Homo sapien
gactatgtctcattgccaacttgac

SEQ ID NO: 1938152 - DNA, 25 bp, Homo sapien
aattgttccttcaagagccaagact

SEQ ID NO: 1938153 - DNA, 25 bp, Homo sapien
gccaagacttgactatgtctcattg

SEQ ID NO: 1938154 - DNA, 25 bp, Homo sapien
gaaaggatgttctccctcacatgat

SEQ ID NO: 1938155 - DNA, 25 bp, Homo sapien
tatctgcaggaattactgtatatct

SEQ ID NO: 1938156 - DNA, 25 bp, Homo sapien
ctgagtttcctgaatagaggaagga

SEQ ID NO: 1938157 - DNA, 25 bp, Homo sapien
gaaacttacaggaaagggcctcatg

SEQ ID NO: 1938158 - DNA, 25 bp, Homo sapien
atccagaggcaagcaccatcaacac

SEQ ID NO: 1938159 - DNA, 25 bp, Homo sapien
ttatccagaggcaagcaccatcaac

SEQ ID NO: 1938160 - DNA, 25 bp, Homo sapien
tatccagaggcaagcaccatcaaca

SEQ ID NO: 1938161 - DNA, 25 bp, Homo sapien
tgcacaattgagaactgcatacttc

SEQ ID NO: 1938162 - DNA, 25 bp, Homo sapien
gtcactgaagatcccacctctaact

SEQ ID NO: 1938163 - DNA, 25 bp, Homo sapien
gttaatgccttgctcagtaagtgca

SEQ ID NO: 1938164 - DNA, 25 bp, Homo sapien
gaactgcatacttctctttgttgta

SEQ ID NO: 1938165 - DNA, 25 bp, Homo sapien
gctctctcctccgaaaggcagtaat

SEQ ID NO: 1938166 - DNA, 25 bp, Homo sapien
tgtctggattatatccgaccttatg

SEQ ID NO: 1938167 - DNA, 25 bp, Homo sapien
gattatatccgaccttatgttctaa

SEQ ID NO: 1938168 - DNA, 25 bp, Homo sapien
ccgaaaggcagtaattgtttccaat

SEQ ID NO: 1938169 - DNA, 25 bp, Homo sapien
gaggtacttcgagtagtcaaattca

SEQ ID NO: 1938170 - DNA, 25 bp, Homo sapien
atgaggtacttcgagtagtcaaatt

SEQ ID NO: 1938171 - DNA, 25 bp, Homo sapien
gacggaaagtagaatggtgtttgcc

SEQ ID NO: 1938172 - DNA, 25 bp, Homo sapien
gagacggaaagtagaatggtgtttg

SEQ ID NO: 1938173 - DNA, 25 bp, Homo sapien
ctttgctgtgaaccaagacacttgt

SEQ ID NO: 1938174 - DNA, 25 bp, Homo sapien
tgtagcagagtgtttctgctgcaaa

SEQ ID NO: 1938175 - DNA, 25 bp, Homo sapien
ctctttgctgtgaaccaagacactt

SEQ ID NO: 1938176 - DNA, 25 bp, Homo sapien
caagacacttgttctgtagcagagt

SEQ ID NO: 1938177 - DNA, 25 bp, Homo sapien
tcagcctcttgcctaatgtaaatcc

SEQ ID NO: 1938178 - DNA, 25 bp, Homo sapien
aatgtaaatcccatcctcattctcc

SEQ ID NO: 1938179 - DNA, 25 bp, Homo sapien
tgcaggccaaattcatccaggaaat

SEQ ID NO: 1938180 - DNA, 25 bp, Homo sapien
attctcccccaattcattctgcagg

SEQ ID NO: 1938181 - DNA, 25 bp, Homo sapien
gaatgttcgctgcagtgcaccctct

SEQ ID NO: 1938182 - DNA, 25 bp, Homo sapien
ctgattcagcagaatgttcgctgca

SEQ ID NO: 1938183 - DNA, 25 bp, Homo sapien
cagtgcaccctctcaagataatgca

SEQ ID NO: 1938184 - DNA, 25 bp, Homo sapien
ttcagcagaatgttcgctgcagtgc

SEQ ID NO: 1938185 - DNA, 25 bp, Homo sapien
cattgtacttgagggagctgtttgc

SEQ ID NO: 1938186 - DNA, 25 bp, Homo sapien
tatgcttcttcacagtgccctaaaa

SEQ ID NO: 1938187 - DNA, 25 bp, Homo sapien
tctcaggccttgcatatctagaatc

SEQ ID NO: 1938188 - DNA, 25 bp, Homo sapien
ggtataaatctaagctagaacaggg

SEQ ID NO: 1938189 - DNA, 25 bp, Homo sapien
tttcctcacataaattgtaagctcc

SEQ ID NO: 1938190 - DNA, 25 bp, Homo sapien
cctcacataaattgtaagctcctgg

SEQ ID NO: 1938191 - DNA, 25 bp, Homo sapien
acataaattgtaagctcctgggtgg

SEQ ID NO: 1938192 - DNA, 25 bp, Homo sapien
ctgtttcctcacataaattgtaagc

SEQ ID NO: 1938193 - DNA, 25 bp, Homo sapien
atttctttgagtccaaagttttgca

SEQ ID NO: 1938194 - DNA, 25 bp, Homo sapien
tttctttgagtccaaagttttgcat

SEQ ID NO: 1938195 - DNA, 25 bp, Homo sapien
tccttagcgccagatgccatcactt

SEQ ID NO: 1938196 - DNA, 25 bp, Homo sapien
gtgggagaataagatccctgtggca

SEQ ID NO: 1938197 - DNA, 25 bp, Homo sapien
aataagatccctgtggcaaaatccc

SEQ ID NO: 1938198 - DNA, 25 bp, Homo sapien
attctttgtccttagcgccagatgc

SEQ ID NO: 1938199 - DNA, 25 bp, Homo sapien
ggtcgttgcacccagcgaatcaact

SEQ ID NO: 1938200 - DNA, 25 bp, Homo sapien
caataaatattaaacgacaaatcaa

SEQ ID NO: 1938201 - DNA, 25 bp, Homo sapien
taggttccaaatgcaagacatcgtc

SEQ ID NO: 1938202 - DNA, 25 bp, Homo sapien
aaattttgtaggttccaaatgcaag

SEQ ID NO: 1938203 - DNA, 25 bp, Homo sapien
gcgacaccgtcattgaaaaattggg

SEQ ID NO: 1938204 - DNA, 25 bp, Homo sapien
ttcagctctgcaaggtgaacggagc

SEQ ID NO: 1938205 - DNA, 25 bp, Homo sapien
caacatcaggaaggtgctggacggc

SEQ ID NO: 1938206 - DNA, 25 bp, Homo sapien
gggctactcgggctttacatgggaa

SEQ ID NO: 1938207 - DNA, 25 bp, Homo sapien
tctgatagctgcatagttgatcatg

SEQ ID NO: 1938208 - DNA, 25 bp, Homo sapien
ctgtgcctgggtgtgaatgagtttt

SEQ ID NO: 1938209 - DNA, 25 bp, Homo sapien
tgttaaccttgcatatcctggccac

SEQ ID NO: 1938210 - DNA, 25 bp, Homo sapien
tataatcacatattggttgcaggag

SEQ ID NO: 1938211 - DNA, 25 bp, Homo sapien
cctgttacatgtacgccttttgttg

SEQ ID NO: 1938212 - DNA, 25 bp, Homo sapien
ctcgaatttgtggttggtatccgac

SEQ ID NO: 1938213 - DNA, 25 bp, Homo sapien
actactatggagtctgtcaaaggca

SEQ ID NO: 1938214 - DNA, 25 bp, Homo sapien
caggttaagagactatttccttagc

SEQ ID NO: 1938215 - DNA, 25 bp, Homo sapien
gctagtacttttccttctgcaacta

SEQ ID NO: 1938216 - DNA, 25 bp, Homo sapien
tacaaagagaagctagtacttttcc

SEQ ID NO: 1938217 - DNA, 25 bp, Homo sapien
gaaagcccaggaccaaacggattca

SEQ ID NO: 1938218 - DNA, 25 bp, Homo sapien
aagagaagctagtacttttccttct

SEQ ID NO: 1938219 - DNA, 25 bp, Homo sapien
ggatgcaaggccgattcaacatacg

SEQ ID NO: 1938220 - DNA, 25 bp, Homo sapien
cagaacctatgaaaaaaaccacgat

SEQ ID NO: 1938221 - DNA, 25 bp, Homo sapien
cctatgaaaaaaaccacgattatct

SEQ ID NO: 1938222 - DNA, 25 bp, Homo sapien
gcaaggccgattcaacatacgcaaa

SEQ ID NO: 1938223 - DNA, 25 bp, Homo sapien
tgcctaagccagtcttaaacacctg

SEQ ID NO: 1938224 - DNA, 25 bp, Homo sapien
gtgcctggtttagactgccatttta

SEQ ID NO: 1938225 - DNA, 25 bp, Homo sapien
cctttcaatgggaggcatggtagga

SEQ ID NO: 1938226 - DNA, 25 bp, Homo sapien
gattttgtgcaggagtttaaccagg

SEQ ID NO: 1938227 - DNA, 25 bp, Homo sapien
acgttcccgttgcagcacaagtgga

SEQ ID NO: 1938228 - DNA, 25 bp, Homo sapien
tttctgcgacagagcacgttcccgt

SEQ ID NO: 1938229 - DNA, 25 bp, Homo sapien
caagtggagctgcagtatcagaacc

SEQ ID NO: 1938230 - DNA, 25 bp, Homo sapien
gagatacatgaggtgagccccacgt

SEQ ID NO: 1938231 - DNA, 25 bp, Homo sapien
tgaaccctggagagagcacaatgtt

SEQ ID NO: 1938232 - DNA, 25 bp, Homo sapien
cacacactttggacaaggcgcgttc

SEQ ID NO: 1938233 - DNA, 25 bp, Homo sapien
aataccacctgcgtatgaaccctgg

SEQ ID NO: 1938234 - DNA, 25 bp, Homo sapien
taaagtccgaatcctgtcaatgagc

SEQ ID NO: 1938235 - DNA, 25 bp, Homo sapien
tgtcagtattcaaggccaacaacct

SEQ ID NO: 1938236 - DNA, 25 bp, Homo sapien
tcttgttggaagtttcaggagagaa

SEQ ID NO: 1938237 - DNA, 25 bp, Homo sapien
cttacaattccataggttagaaatc

SEQ ID NO: 1938238 - DNA, 25 bp, Homo sapien
gaaatcaacacaggtcttatgggtg

SEQ ID NO: 1938239 - DNA, 25 bp, Homo sapien
catctggagttgttggtgaattagc

SEQ ID NO: 1938240 - DNA, 25 bp, Homo sapien
cagttggagaatcgtcctcaggaaa

SEQ ID NO: 1938241 - DNA, 25 bp, Homo sapien
tgaattagcacgagccaggctggca

SEQ ID NO: 1938242 - DNA, 25 bp, Homo sapien
cacagcatattcctggccctggtgg

SEQ ID NO: 1938243 - DNA, 25 bp, Homo sapien
attaatgattttactactgcctccg

SEQ ID NO: 1938244 - DNA, 25 bp, Homo sapien
aatgattttactactgcctccgaag

SEQ ID NO: 1938245 - DNA, 25 bp, Homo sapien
ttcatcactctgatcaatttcttgt

SEQ ID NO: 1938246 - DNA, 25 bp, Homo sapien
tgattttactactgcctccgaagtt

SEQ ID NO: 1938247 - DNA, 25 bp, Homo sapien
tcaacatagcaatggaaagcaatgc

SEQ ID NO: 1938248 - DNA, 25 bp, Homo sapien
gagctctagcttgtgtataccttaa

SEQ ID NO: 1938249 - DNA, 25 bp, Homo sapien
tactgtgatactttaggtgtgacct

SEQ ID NO: 1938250 - DNA, 25 bp, Homo sapien
taactatctcaaaggtaattgctgg

SEQ ID NO: 1938251 - DNA, 25 bp, Homo sapien
catccaggtatctactctcatgtgg

SEQ ID NO: 1938252 - DNA, 25 bp, Homo sapien
cacttgcatctcaggtaagatgctc

SEQ ID NO: 1938253 - DNA, 25 bp, Homo sapien
taccccagcctgtgagattattttc

SEQ ID NO: 1938254 - DNA, 25 bp, Homo sapien
tctgtgtccctctgggtcactagac

SEQ ID NO: 1938255 - DNA, 25 bp, Homo sapien
tttttacttcccacgtggctctcaa

SEQ ID NO: 1938256 - DNA, 25 bp, Homo sapien
ctcagggcctgccgctgtttctgca

SEQ ID NO: 1938257 - DNA, 25 bp, Homo sapien
tcagggcctgccgctgtttctgcat

SEQ ID NO: 1938258 - DNA, 25 bp, Homo sapien
gctcagggcctgccgctgtttctgc

SEQ ID NO: 1938259 - DNA, 25 bp, Homo sapien
gaactagtatcaccaggaaagacct

SEQ ID NO: 1938260 - DNA, 25 bp, Homo sapien
taagaattgggtactacgtgctggg

SEQ ID NO: 1938261 - DNA, 25 bp, Homo sapien
ggtcaggtatcattacaacagaagg

SEQ ID NO: 1938262 - DNA, 25 bp, Homo sapien
tgcacatgtaagattgagcccttta

SEQ ID NO: 1938263 - DNA, 25 bp, Homo sapien
ctaaagagtttcctcgatgtttaat

SEQ ID NO: 1938264 - DNA, 25 bp, Homo sapien
caaaaactaaagagtttcctcgatg

SEQ ID NO: 1938265 - DNA, 25 bp, Homo sapien
agttgtttcatagtatgtggacaca

SEQ ID NO: 1938266 - DNA, 25 bp, Homo sapien
tacagcaagaattaggggtctagtt

SEQ ID NO: 1938267 - DNA, 25 bp, Homo sapien
aaatctctcagctgagatgcggttc

SEQ ID NO: 1938268 - DNA, 25 bp, Homo sapien
tcctgttgctgattgatgggcttct

SEQ ID NO: 1938269 - DNA, 25 bp, Homo sapien
tgacttcccgcattcctgttgctga

SEQ ID NO: 1938270 - DNA, 25 bp, Homo sapien
agtgtctgtcggtgcctcttcatga

SEQ ID NO: 1938271 - DNA, 25 bp, Homo sapien
tagggactcagcactttgcggaagc

SEQ ID NO: 1938272 - DNA, 25 bp, Homo sapien
gataaatctgtttaggagctgcctg

SEQ ID NO: 1938273 - DNA, 25 bp, Homo sapien
tctctgaggatgctatgaaggctgt

SEQ ID NO: 1938274 - DNA, 25 bp, Homo sapien
gatagcaggatgtctaacttcacag

SEQ ID NO: 1938275 - DNA, 25 bp, Homo sapien
agcgaggagtgaaccacaggtatgc

SEQ ID NO: 1938276 - DNA, 25 bp, Homo sapien
gaggagtgaaccacaggtatgctcc

SEQ ID NO: 1938277 - DNA, 25 bp, Homo sapien
ctgggagcgaggagtgaaccacagg

SEQ ID NO: 1938278 - DNA, 25 bp, Homo sapien
ggagtgaaccacaggtatgctccat

SEQ ID NO: 1938279 - DNA, 25 bp, Homo sapien
aataccaacatctcagaagctcttt

SEQ ID NO: 1938280 - DNA, 25 bp, Homo sapien
aaataccaacatctcagaagctctt

SEQ ID NO: 1938281 - DNA, 25 bp, Homo sapien
taccaacatctcagaagctctttct

SEQ ID NO: 1938282 - DNA, 25 bp, Homo sapien
ataccaacatctcagaagctctttc

SEQ ID NO: 1938283 - DNA, 25 bp, Homo sapien
gacaagaaatggcacggcagctatg

SEQ ID NO: 1938284 - DNA, 25 bp, Homo sapien
ggagaattcacccacattatgcaag

SEQ ID NO: 1938285 - DNA, 25 bp, Homo sapien
caggttaagcaggagcaaactgaca

SEQ ID NO: 1938286 - DNA, 25 bp, Homo sapien
gactgttaaacctcctgcatggatg

SEQ ID NO: 1938287 - DNA, 25 bp, Homo sapien
cgtatcaatgataggccttgcccaa

SEQ ID NO: 1938288 - DNA, 25 bp, Homo sapien
tggaaccgatgactccacctgcaga

SEQ ID NO: 1938289 - DNA, 25 bp, Homo sapien
cattcagctggcatgaggagagcat

SEQ ID NO: 1938290 - DNA, 25 bp, Homo sapien
taaggtgcagacaagtattccggag

SEQ ID NO: 1938291 - DNA, 25 bp, Homo sapien
gttctgtaaacctgaagtgagcagc

SEQ ID NO: 1938292 - DNA, 25 bp, Homo sapien
gattccaatgggatattttcccaag

SEQ ID NO: 1938293 - DNA, 25 bp, Homo sapien
caaggccccctctgttgatgtctgt

SEQ ID NO: 1938294 - DNA, 25 bp, Homo sapien
gcctctgagcaaacataagattcca

SEQ ID NO: 1938295 - DNA, 25 bp, Homo sapien
tatgaaggtctaaaccattatcagg

SEQ ID NO: 1938296 - DNA, 25 bp, Homo sapien
taaaccattatcaggttgcttaggg

SEQ ID NO: 1938297 - DNA, 25 bp, Homo sapien
agttggctgtaggttcttatgaagg

SEQ ID NO: 1938298 - DNA, 25 bp, Homo sapien
ctgaatgctaccaagagttggctgt

SEQ ID NO: 1938299 - DNA, 25 bp, Homo sapien
taaattaagaccatcgcagcctcca

SEQ ID NO: 1938300 - DNA, 25 bp, Homo sapien
taccctcagttccttatcggtgcct

SEQ ID NO: 1938301 - DNA, 25 bp, Homo sapien
tatacccatattagagatgctacgt

SEQ ID NO: 1938302 - DNA, 25 bp, Homo sapien
taacaaatcctcttcaagttggagg

SEQ ID NO: 1938303 - DNA, 25 bp, Homo sapien
catacaagatgaaggccaagctgct

SEQ ID NO: 1938304 - DNA, 25 bp, Homo sapien
cgtagatcatctctacatacaagat

SEQ ID NO: 1938305 - DNA, 25 bp, Homo sapien
tgcaattggctaggaaaccacagcc

SEQ ID NO: 1938306 - DNA, 25 bp, Homo sapien
taaaaccacaagtcacgtagatcat

SEQ ID NO: 1938307 - DNA, 25 bp, Homo sapien
ggcatatgtacaccagcaagataat

SEQ ID NO: 1938308 - DNA, 25 bp, Homo sapien
aattaaaggcactttccagaacagg

SEQ ID NO: 1938309 - DNA, 25 bp, Homo sapien
ggttggcttgttctttcactaggga

SEQ ID NO: 1938310 - DNA, 25 bp, Homo sapien
tagggacagtacataaagtggaaac

SEQ ID NO: 1938311 - DNA, 25 bp, Homo sapien
catactaggtcactgttggctcttc

SEQ ID NO: 1938312 - DNA, 25 bp, Homo sapien
ccagacatcagagttcgagtcccag

SEQ ID NO: 1938313 - DNA, 25 bp, Homo sapien
tgtagtggttcagcgcaacaggctc

SEQ ID NO: 1938314 - DNA, 25 bp, Homo sapien
tatggagatgagatgagctaacact

SEQ ID NO: 1938315 - DNA, 25 bp, Homo sapien
agaagggatatcttgatttgcccca

SEQ ID NO: 1938316 - DNA, 25 bp, Homo sapien
caaaattcaaagaggctcaccggat

SEQ ID NO: 1938317 - DNA, 25 bp, Homo sapien
cactgtgagtcagctctaaggccca

SEQ ID NO: 1938318 - DNA, 25 bp, Homo sapien
taaggtgctgtcagggtctttcaca

SEQ ID NO: 1938319 - DNA, 25 bp, Homo sapien
cagtgagaggcaaaccttgcagaca

SEQ ID NO: 1938320 - DNA, 25 bp, Homo sapien
tgagaggcaaaccttgcagacaggg

SEQ ID NO: 1938321 - DNA, 25 bp, Homo sapien
ttgaggtttgtgcacttaataagca

SEQ ID NO: 1938322 - DNA, 25 bp, Homo sapien
accagtgagaggcaaaccttgcaga

SEQ ID NO: 1938323 - DNA, 25 bp, Homo sapien
cagttttatattccatgcagttcag

SEQ ID NO: 1938324 - DNA, 25 bp, Homo sapien
tagggcattcttgctattaagctgc

SEQ ID NO: 1938325 - DNA, 25 bp, Homo sapien
gctgcttattagttatggtcagtga

SEQ ID NO: 1938326 - DNA, 25 bp, Homo sapien
caaaatgcacccagtaattacagag

SEQ ID NO: 1938327 - DNA, 25 bp, Homo sapien
tggcgtttcccattagtcggtccca

SEQ ID NO: 1938328 - DNA, 25 bp, Homo sapien
tagtcggtcccactttgggtcctgc

SEQ ID NO: 1938329 - DNA, 25 bp, Homo sapien
tgagaataacaccatacagctgggc

SEQ ID NO: 1938330 - DNA, 25 bp, Homo sapien
cagctgggcagcgttggcgtttccc

SEQ ID NO: 1938331 - DNA, 25 bp, Homo sapien
tttcccctgttgaatgctcttttct

SEQ ID NO: 1938332 - DNA, 25 bp, Homo sapien
ctttcccctgttgaatgctcttttc

SEQ ID NO: 1938333 - DNA, 25 bp, Homo sapien
gcagtgctttatcccaccttgctct

SEQ ID NO: 1938334 - DNA, 25 bp, Homo sapien
aggcttctgacttcaggcctgtggg

SEQ ID NO: 1938335 - DNA, 25 bp, Homo sapien
tccaggcttctgacttcaggcctgt

SEQ ID NO: 1938336 - DNA, 25 bp, Homo sapien
tgttctgagctgcagtgctttatcc

SEQ ID NO: 1938337 - DNA, 25 bp, Homo sapien
tcatttccaggtgtcgcatccgtgg

SEQ ID NO: 1938338 - DNA, 25 bp, Homo sapien
tgttgaactttgctaggaaggactc

SEQ ID NO: 1938339 - DNA, 25 bp, Homo sapien
tctactgcaatggaaaaagggttcc

SEQ ID NO: 1938340 - DNA, 25 bp, Homo sapien
gtattgaaggatgcccacgaattcc

SEQ ID NO: 1938341 - DNA, 25 bp, Homo sapien
atggcttgaacccaggaggtggagg

SEQ ID NO: 1938342 - DNA, 25 bp, Homo sapien
cgcgccagtgcgctccagcctgggc

SEQ ID NO: 1938343 - DNA, 25 bp, Homo sapien
taatcccagctactaaggcaggaga

SEQ ID NO: 1938344 - DNA, 25 bp, Homo sapien
tcgcagtgagctgagatcgcgccag

SEQ ID NO: 1938345 - DNA, 25 bp, Homo sapien
cacaccctgtgaaaggtttgagaca

SEQ ID NO: 1938346 - DNA, 25 bp, Homo sapien
gtctcccatctgcaaaagtgctcag

SEQ ID NO: 1938347 - DNA, 25 bp, Homo sapien
ggacagcattgctaaacacaccctg

SEQ ID NO: 1938348 - DNA, 25 bp, Homo sapien
tggtgcttccctcgttcctagtgta

SEQ ID NO: 1938349 - DNA, 25 bp, Homo sapien
ttgtgtttggcttactgccattatt

SEQ ID NO: 1938350 - DNA, 25 bp, Homo sapien
gttgtgtttggcttactgccattat

SEQ ID NO: 1938351 - DNA, 25 bp, Homo sapien
ggttgtgtttggcttactgccatta

SEQ ID NO: 1938352 - DNA, 25 bp, Homo sapien
ggctctgaagggaattgttgctaaa

SEQ ID NO: 1938353 - DNA, 25 bp, Homo sapien
tgaagggaattgttgctaaatccaa

SEQ ID NO: 1938354 - DNA, 25 bp, Homo sapien
gggctctgaagggaattgttgctaa

SEQ ID NO: 1938355 - DNA, 25 bp, Homo sapien
tctgaagggaattgttgctaaatcc

SEQ ID NO: 1938356 - DNA, 25 bp, Homo sapien
aactgcctagtctcatatcatcaca

SEQ ID NO: 1938357 - DNA, 25 bp, Homo sapien
aatgtcttcaattacgggcaaactg

SEQ ID NO: 1938358 - DNA, 25 bp, Homo sapien
cctgtgacttgctggcaaaatgtct

SEQ ID NO: 1938359 - DNA, 25 bp, Homo sapien
gcctgtgacttgctggcaaaatgtc

SEQ ID NO: 1938360 - DNA, 25 bp, Homo sapien
tgactgacccatcctgtcatctggt

SEQ ID NO: 1938361 - DNA, 25 bp, Homo sapien
cctgaacagtccttttgtggctgta

SEQ ID NO: 1938362 - DNA, 25 bp, Homo sapien
tccagtagcttacagggtgacttct

SEQ ID NO: 1938363 - DNA, 25 bp, Homo sapien
taggaatcaccagggagtcacgatc

SEQ ID NO: 1938364 - DNA, 25 bp, Homo sapien
cagtgactttggtggccccctttgt

SEQ ID NO: 1938365 - DNA, 25 bp, Homo sapien
tgaggctttaatagtgctcttggac

SEQ ID NO: 1938366 - DNA, 25 bp, Homo sapien
gtgtctgatgtactgtaaagtgatc

SEQ ID NO: 1938367 - DNA, 25 bp, Homo sapien
tttggtggccccctttgtgtctgat

SEQ ID NO: 1938368 - DNA, 25 bp, Homo sapien
tgggaatgagcaatgacactgttct

SEQ ID NO: 1938369 - DNA, 25 bp, Homo sapien
agggaagccccgtgcgttccatcct

SEQ ID NO: 1938370 - DNA, 25 bp, Homo sapien
tttggtccccggagccacgtgtagc

SEQ ID NO: 1938371 - DNA, 25 bp, Homo sapien
cacgtgtagcccttgtgggaatgag

SEQ ID NO: 1938372 - DNA, 25 bp, Homo sapien
agccacttcaggaatccatccaaca

SEQ ID NO: 1938373 - DNA, 25 bp, Homo sapien
gccacttcaggaatccatccaacag

SEQ ID NO: 1938374 - DNA, 25 bp, Homo sapien
atctcagcgggcttcactcccaagg

SEQ ID NO: 1938375 - DNA, 25 bp, Homo sapien
ggtgggtgctacatctccatcctcc

SEQ ID NO: 1938376 - DNA, 25 bp, Homo sapien
ggagctatggctcatcctcatctca

SEQ ID NO: 1938377 - DNA, 25 bp, Homo sapien
cactttgtgcatagctgtgttcaga

SEQ ID NO: 1938378 - DNA, 25 bp, Homo sapien
gaagatgaaaggagtatagtatttt

SEQ ID NO: 1938379 - DNA, 25 bp, Homo sapien
gatgaaaggagtatagtattttttg

SEQ ID NO: 1938380 - DNA, 25 bp, Homo sapien
gcagaagatgaaaggagtatagtat

SEQ ID NO: 1938381 - DNA, 25 bp, Homo sapien
aagcagaagatgaaaggagtatagt

SEQ ID NO: 1938382 - DNA, 25 bp, Homo sapien
atgtgataccatctttcaatgaagg

SEQ ID NO: 1938383 - DNA, 25 bp, Homo sapien
ccatctttcaatgaaggagatgtct

SEQ ID NO: 1938384 - DNA, 25 bp, Homo sapien
tggagcccctgaagcatcaacagac

SEQ ID NO: 1938385 - DNA, 25 bp, Homo sapien
ctgccccttcaaccagccacaaaac

SEQ ID NO: 1938386 - DNA, 25 bp, Homo sapien
cctgaagccttttgtcatatgtgtc

SEQ ID NO: 1938387 - DNA, 25 bp, Homo sapien
ttcctgcagtagccctttcccccat

SEQ ID NO: 1938388 - DNA, 25 bp, Homo sapien
agccttttgtcatatgtgtctttcc

SEQ ID NO: 1938389 - DNA, 25 bp, Homo sapien
gaagccttttgtcatatgtgtcttt

SEQ ID NO: 1938390 - DNA, 25 bp, Homo sapien
tatgacttgagctcataaatcaaat

SEQ ID NO: 1938391 - DNA, 25 bp, Homo sapien
tgagctcataaatcaaatcttcaga

SEQ ID NO: 1938392 - DNA, 25 bp, Homo sapien
taccgacaatgtcagcctgctgatg

SEQ ID NO: 1938393 - DNA, 25 bp, Homo sapien
aatcttcagagctaccgacaatgtc

SEQ ID NO: 1938394 - DNA, 25 bp, Homo sapien
tgggagcaaggccatgggacatcgg

SEQ ID NO: 1938395 - DNA, 25 bp, Homo sapien
gcttgggagcaaggccatgggacat

SEQ ID NO: 1938396 - DNA, 25 bp, Homo sapien
ggagcaaggccatgggacatcggca

SEQ ID NO: 1938397 - DNA, 25 bp, Homo sapien
gaagcaggaagggtgcccagggatg

SEQ ID NO: 1938398 - DNA, 25 bp, Homo sapien
ctttggttagcctttgaatcaaagg

SEQ ID NO: 1938399 - DNA, 25 bp, Homo sapien
tgtattaagtagtggaagtatgtgt

SEQ ID NO: 1938400 - DNA, 25 bp, Homo sapien
tcaaaggagtagagtttattgaaag

SEQ ID NO: 1938401 - DNA, 25 bp, Homo sapien
tgaagtaggctcttttcaggatgtt

SEQ ID NO: 1938402 - DNA, 25 bp, Homo sapien
tcataaggccgtatgctgcagagcc

SEQ ID NO: 1938403 - DNA, 25 bp, Homo sapien
taattgggtacttgaggaagattca

SEQ ID NO: 1938404 - DNA, 25 bp, Homo sapien
gtcaggacgctgacagggctgcaca

SEQ ID NO: 1938405 - DNA, 25 bp, Homo sapien
gctgcacagtgggataattgggtac

SEQ ID NO: 1938406 - DNA, 25 bp, Homo sapien
agcctgtgtcaccattcttcataag

SEQ ID NO: 1938407 - DNA, 25 bp, Homo sapien
cagcctgtgtcaccattcttcataa

SEQ ID NO: 1938408 - DNA, 25 bp, Homo sapien
ccagcctgtgtcaccattcttcata

SEQ ID NO: 1938409 - DNA, 25 bp, Homo sapien
tgcttcatcagtaataccactgatg

SEQ ID NO: 1938410 - DNA, 25 bp, Homo sapien
attgcttcatcagtaataccactga

SEQ ID NO: 1938411 - DNA, 25 bp, Homo sapien
gcttcatcagtaataccactgatga

SEQ ID NO: 1938412 - DNA, 25 bp, Homo sapien
gattgcttcatcagtaataccactg

SEQ ID NO: 1938413 - DNA, 25 bp, Homo sapien
tacagtagaaggaattcttaccatg

SEQ ID NO: 1938414 - DNA, 25 bp, Homo sapien
aatgcggatgtctccaaaggctcct

SEQ ID NO: 1938415 - DNA, 25 bp, Homo sapien
ctggagaatgcggatgtctccaaag

SEQ ID NO: 1938416 - DNA, 25 bp, Homo sapien
cttaccatggttttctagtttgctg

SEQ ID NO: 1938417 - DNA, 25 bp, Homo sapien
tgctggagtagtgagccgtgaggct

SEQ ID NO: 1938418 - DNA, 25 bp, Homo sapien
agtagtgagccgtgaggctgctcac

SEQ ID NO: 1938419 - DNA, 25 bp, Homo sapien
cccctgtggagatcctgctggagta

SEQ ID NO: 1938420 - DNA, 25 bp, Homo sapien
agatcctgctggagtagtgagccgt

SEQ ID NO: 1938421 - DNA, 25 bp, Homo sapien
gcatattgtcctgctggtgtttctg

SEQ ID NO: 1938422 - DNA, 25 bp, Homo sapien
ttgcatattgtcctgctggtgtttc

SEQ ID NO: 1938423 - DNA, 25 bp, Homo sapien
tgcatattgtcctgctggtgtttct

SEQ ID NO: 1938424 - DNA, 25 bp, Homo sapien
ttacttcagctaatggcgggagtca

SEQ ID NO: 1938425 - DNA, 25 bp, Homo sapien
tgattttagatggagccgccaaggg

SEQ ID NO: 1938426 - DNA, 25 bp, Homo sapien
gctacaaactgggtggactaaaaca

SEQ ID NO: 1938427 - DNA, 25 bp, Homo sapien
tcagaggaacatagaaccgcgggct

SEQ ID NO: 1938428 - DNA, 25 bp, Homo sapien
cagcatgtaacatgttggttttatt

SEQ ID NO: 1938429 - DNA, 25 bp, Homo sapien
catgtaacatgttggttttattagt

SEQ ID NO: 1938430 - DNA, 25 bp, Homo sapien
ttcagcatgtaacatgttggtttta

SEQ ID NO: 1938431 - DNA, 25 bp, Homo sapien
gcatgtaacatgttggttttattag

SEQ ID NO: 1938432 - DNA, 25 bp, Homo sapien
tgttggcaggtatcccatgcgccgt

SEQ ID NO: 1938433 - DNA, 25 bp, Homo sapien
catgcgccgtttccaagggtaggaa

SEQ ID NO: 1938434 - DNA, 25 bp, Homo sapien
gatcacaaccccacagaagggaaag

SEQ ID NO: 1938435 - DNA, 25 bp, Homo sapien
cctgagggtagtgtgttaccacgaa

SEQ ID NO: 1938436 - DNA, 25 bp, Homo sapien
ctgccatttctttgaagaggtttag

SEQ ID NO: 1938437 - DNA, 25 bp, Homo sapien
gccatttctttgaagaggtttagta

SEQ ID NO: 1938438 - DNA, 25 bp, Homo sapien
catttctttgaagaggtttagtaag

SEQ ID NO: 1938439 - DNA, 25 bp, Homo sapien
gctgccatttctttgaagaggttta

SEQ ID NO: 1938440 - DNA, 25 bp, Homo sapien
gaggcttcccgaagattaagataat

SEQ ID NO: 1938441 - DNA, 25 bp, Homo sapien
aagataatgaagtttctccttgatc

SEQ ID NO: 1938442 - DNA, 25 bp, Homo sapien
agaggcttcccgaagattaagataa

SEQ ID NO: 1938443 - DNA, 25 bp, Homo sapien
gataatgaagtttctccttgatcac

SEQ ID NO: 1938444 - DNA, 25 bp, Homo sapien
ccatttactcctcaactaggccggg

SEQ ID NO: 1938445 - DNA, 25 bp, Homo sapien
taactttaatccagtccatttactc

SEQ ID NO: 1938446 - DNA, 25 bp, Homo sapien
gccagaaaggccgtacaacagatgt

SEQ ID NO: 1938447 - DNA, 25 bp, Homo sapien
tagggacgtcggaactgctaaaggc

SEQ ID NO: 1938448 - DNA, 25 bp, Homo sapien
gctgtggtgaggcacgggctgaaga

SEQ ID NO: 1938449 - DNA, 25 bp, Homo sapien
cctccctggaggatactggaactct

SEQ ID NO: 1938450 - DNA, 25 bp, Homo sapien
tttccggaagcggtagcactccacc

SEQ ID NO: 1938451 - DNA, 25 bp, Homo sapien
tgggtatgcctgtgatggcacatcc

SEQ ID NO: 1938452 - DNA, 25 bp, Homo sapien
ccctactgactgctaaagcgtgaaa

SEQ ID NO: 1938453 - DNA, 25 bp, Homo sapien
ctttgggataagcagtgggtatgcc

SEQ ID NO: 1938454 - DNA, 25 bp, Homo sapien
cactctctccctgggtcactggtgt

SEQ ID NO: 1938455 - DNA, 25 bp, Homo sapien
tgggtcactggtgtctttctcttca

SEQ ID NO: 1938456 - DNA, 25 bp, Homo sapien
ctgggtcactggtgtctttctcttc

SEQ ID NO: 1938457 - DNA, 25 bp, Homo sapien
tctccctgggtcactggtgtctttc

SEQ ID NO: 1938458 - DNA, 25 bp, Homo sapien
cttttaacaggtcattataggactc

SEQ ID NO: 1938459 - DNA, 25 bp, Homo sapien
ttttaacaggtcattataggactca

SEQ ID NO: 1938460 - DNA, 25 bp, Homo sapien
tttaacaggtcattataggactcac

SEQ ID NO: 1938461 - DNA, 25 bp, Homo sapien
ccttttaacaggtcattataggact

SEQ ID NO: 1938462 - DNA, 25 bp, Homo sapien
ttggctttcctggtgatactaatac

SEQ ID NO: 1938463 - DNA, 25 bp, Homo sapien
gggaagatgaacagttagagatcct

SEQ ID NO: 1938464 - DNA, 25 bp, Homo sapien
ccgaaagctttgacggcggtgaaga

SEQ ID NO: 1938465 - DNA, 25 bp, Homo sapien
tgaacagttagagatcctttctggt

SEQ ID NO: 1938466 - DNA, 25 bp, Homo sapien
gccagtgtggaagttgttttcaggc

SEQ ID NO: 1938467 - DNA, 25 bp, Homo sapien
gggaggacaagacagtggccagtgt

SEQ ID NO: 1938468 - DNA, 25 bp, Homo sapien
ggaggacaagacagtggccagtgtg

SEQ ID NO: 1938469 - DNA, 25 bp, Homo sapien
cagtggccagtgtggaagttgtttt

SEQ ID NO: 1938470 - DNA, 25 bp, Homo sapien
ttactcaaacttgtctcctccagcc

SEQ ID NO: 1938471 - DNA, 25 bp, Homo sapien
tactcaaacttgtctcctccagccc

SEQ ID NO: 1938472 - DNA, 25 bp, Homo sapien
ttgttcaagttcccacttaggtgcc

SEQ ID NO: 1938473 - DNA, 25 bp, Homo sapien
caggtcacccataggtctattcagc

SEQ ID NO: 1938474 - DNA, 25 bp, Homo sapien
ggtcacccataggtctattcagcca

SEQ ID NO: 1938475 - DNA, 25 bp, Homo sapien
ctccaggtcacccataggtctattc

SEQ ID NO: 1938476 - DNA, 25 bp, Homo sapien
tcacccataggtctattcagccaca

SEQ ID NO: 1938477 - DNA, 25 bp, Homo sapien
tgccagataatctagcatcaaagtt

SEQ ID NO: 1938478 - DNA, 25 bp, Homo sapien
cttaacgtacagagaagaaggctca

SEQ ID NO: 1938479 - DNA, 25 bp, Homo sapien
gaagaaggctcataacaactgcttg

SEQ ID NO: 1938480 - DNA, 25 bp, Homo sapien
tttgctgttcccagcccttaacgta

SEQ ID NO: 1938481 - DNA, 25 bp, Homo sapien
tttagttccaactggccctcaggag

SEQ ID NO: 1938482 - DNA, 25 bp, Homo sapien
caccttgctgtgtgtagtgcgggct

SEQ ID NO: 1938483 - DNA, 25 bp, Homo sapien
cacaattgtgagctggtcctggtac

SEQ ID NO: 1938484 - DNA, 25 bp, Homo sapien
tgtatcttccagaaaggctggtgaa

SEQ ID NO: 1938485 - DNA, 25 bp, Homo sapien
ctgtgatttccaaggggaagctcat

SEQ ID NO: 1938486 - DNA, 25 bp, Homo sapien
tgataccatccaaacctccagagca

SEQ ID NO: 1938487 - DNA, 25 bp, Homo sapien
gatctggctttatggtatgcttcct

SEQ ID NO: 1938488 - DNA, 25 bp, Homo sapien
ttccttcattatggctctcactggg

SEQ ID NO: 1938489 - DNA, 25 bp, Homo sapien
gagagctttctgataccatccaaac

SEQ ID NO: 1938490 - DNA, 25 bp, Homo sapien
gtgtacctttgccatgcaaatttcc

SEQ ID NO: 1938491 - DNA, 25 bp, Homo sapien
tatttacagccttttattcttctaa

SEQ ID NO: 1938492 - DNA, 25 bp, Homo sapien
ttgtgtacctttgccatgcaaattt

SEQ ID NO: 1938493 - DNA, 25 bp, Homo sapien
atttgtgtacctttgccatgcaaat

SEQ ID NO: 1938494 - DNA, 25 bp, Homo sapien
ttcaatatccacaacgccaatggcc

SEQ ID NO: 1938495 - DNA, 25 bp, Homo sapien
ccaatggcccggacctgtctctggt

SEQ ID NO: 1938496 - DNA, 25 bp, Homo sapien
gagttttgtgctaaacacgtgtgta

SEQ ID NO: 1938497 - DNA, 25 bp, Homo sapien
gaagaggtttggtagtgaactaaca

SEQ ID NO: 1938498 - DNA, 25 bp, Homo sapien
ggcttaagatgaaaagacttattgg

SEQ ID NO: 1938499 - DNA, 25 bp, Homo sapien
agacttattggattctctgttgtca

SEQ ID NO: 1938500 - DNA, 25 bp, Homo sapien
atttaaaacagacctgtaggcttgg

SEQ ID NO: 1938501 - DNA, 25 bp, Homo sapien
tgtcaagatccttggattccatttg

SEQ ID NO: 1938502 - DNA, 25 bp, Homo sapien
tggtgacatattggtcctctgtctc

SEQ ID NO: 1938503 - DNA, 25 bp, Homo sapien
ttgatgcttcgtttttgtgaccttt

SEQ ID NO: 1938504 - DNA, 25 bp, Homo sapien
cagaagtagtcctttattgatgctt

SEQ ID NO: 1938505 - DNA, 25 bp, Homo sapien
tcctgtgttggtgacatattggtcc

SEQ ID NO: 1938506 - DNA, 25 bp, Homo sapien
tatcatcggtaagggccgtgtcaca

SEQ ID NO: 1938507 - DNA, 25 bp, Homo sapien
tccacatatcatcggtaagggccgt

SEQ ID NO: 1938508 - DNA, 25 bp, Homo sapien
gcagccctccacatatcatcggtaa

SEQ ID NO: 1938509 - DNA, 25 bp, Homo sapien
aaggcagcagccctccacatatcat

SEQ ID NO: 1938510 - DNA, 25 bp, Homo sapien
aggtaaagcacaggccaatgcggct

SEQ ID NO: 1938511 - DNA, 25 bp, Homo sapien
aagcacaggccaatgcggctacagg

SEQ ID NO: 1938512 - DNA, 25 bp, Homo sapien
taaagcacaggccaatgcggctaca

SEQ ID NO: 1938513 - DNA, 25 bp, Homo sapien
gcacaggccaatgcggctacaggag

SEQ ID NO: 1938514 - DNA, 25 bp, Homo sapien
agtttttggtattcacctccgacat

SEQ ID NO: 1938515 - DNA, 25 bp, Homo sapien
cagggcaacaactgagcattttggg

SEQ ID NO: 1938516 - DNA, 25 bp, Homo sapien
tgaagcatgtgcaacaagtcagggc

SEQ ID NO: 1938517 - DNA, 25 bp, Homo sapien
tggggcctggaataaatcacagttt

SEQ ID NO: 1938518 - DNA, 25 bp, Homo sapien
tgaccactggcaggatatggcattg

SEQ ID NO: 1938519 - DNA, 25 bp, Homo sapien
ttttgaccactggcaggatatggca

SEQ ID NO: 1938520 - DNA, 25 bp, Homo sapien
gaccactggcaggatatggcattgt

SEQ ID NO: 1938521 - DNA, 25 bp, Homo sapien
tttgaccactggcaggatatggcat

SEQ ID NO: 1938522 - DNA, 25 bp, Homo sapien
tcttgagggttctaaaactgcgtgc

SEQ ID NO: 1938523 - DNA, 25 bp, Homo sapien
tggcagcctccggatatttcacttg

SEQ ID NO: 1938524 - DNA, 25 bp, Homo sapien
gcctggaaatcctatcctttgacag

SEQ ID NO: 1938525 - DNA, 25 bp, Homo sapien
tgcgtgcctactaccaagatgaaaa

SEQ ID NO: 1938526 - DNA, 25 bp, Homo sapien
gaccatcttgtgctacgtctctgag

SEQ ID NO: 1938527 - DNA, 25 bp, Homo sapien
tgagggacctggctaaaaatgtcgg

SEQ ID NO: 1938528 - DNA, 25 bp, Homo sapien
gaaagtgtcagcctctaagtgtact

SEQ ID NO: 1938529 - DNA, 25 bp, Homo sapien
aaaatgtcggtttcactgttcgaga

SEQ ID NO: 1938530 - DNA, 25 bp, Homo sapien
gaagaagctgcgatttcacaactgc

SEQ ID NO: 1938531 - DNA, 25 bp, Homo sapien
aggctgcgctgaagaagctgcgatt

SEQ ID NO: 1938532 - DNA, 25 bp, Homo sapien
tgcgctgaagaagctgcgatttcac

SEQ ID NO: 1938533 - DNA, 25 bp, Homo sapien
gctgaagaagctgcgatttcacaac

SEQ ID NO: 1938534 - DNA, 25 bp, Homo sapien
agcacgtatgtatttcaccttgaga

SEQ ID NO: 1938535 - DNA, 25 bp, Homo sapien
ggtgccaattacagcacgtatgtat

SEQ ID NO: 1938536 - DNA, 25 bp, Homo sapien
tgtttcaaaggtgccaattacagca

SEQ ID NO: 1938537 - DNA, 25 bp, Homo sapien
gagaatttcaattggcaaagataat

SEQ ID NO: 1938538 - DNA, 25 bp, Homo sapien
actggattctgattcgctgatggaa

SEQ ID NO: 1938539 - DNA, 25 bp, Homo sapien
tggacacctagacgtggtttctttc

SEQ ID NO: 1938540 - DNA, 25 bp, Homo sapien
ataaattagcttgttctaacccgtg

SEQ ID NO: 1938541 - DNA, 25 bp, Homo sapien
cgctgatggaacgttgtatgtaaat

SEQ ID NO: 1938542 - DNA, 25 bp, Homo sapien
cctgctctgtcaagacaacccttac

SEQ ID NO: 1938543 - DNA, 25 bp, Homo sapien
ctctgtcaagacaacccttacccct

SEQ ID NO: 1938544 - DNA, 25 bp, Homo sapien
tgctctgtcaagacaacccttaccc

SEQ ID NO: 1938545 - DNA, 25 bp, Homo sapien
gctctgtcaagacaacccttacccc

SEQ ID NO: 1938546 - DNA, 25 bp, Homo sapien
tttacatcatacagactgtccgtca

SEQ ID NO: 1938547 - DNA, 25 bp, Homo sapien
ttacatcatacagactgtccgtcat

SEQ ID NO: 1938548 - DNA, 25 bp, Homo sapien
cttcagctcgtgggtggttttaatg

SEQ ID NO: 1938549 - DNA, 25 bp, Homo sapien
gcagaggtggataagtggtacatca

SEQ ID NO: 1938550 - DNA, 25 bp, Homo sapien
tagatgccacctgactcaaaatgaa

SEQ ID NO: 1938551 - DNA, 25 bp, Homo sapien
tggtacatcagaccctcacattctt

SEQ ID NO: 1938552 - DNA, 25 bp, Homo sapien
atgaaactttctccaagccccgcgt

SEQ ID NO: 1938553 - DNA, 25 bp, Homo sapien
tggctcacatgaagcagagatgatg

SEQ ID NO: 1938554 - DNA, 25 bp, Homo sapien
gaaagctgtgacacgtcgcttccat

SEQ ID NO: 1938555 - DNA, 25 bp, Homo sapien
gttcccaacttgtcaggacccatgg

SEQ ID NO: 1938556 - DNA, 25 bp, Homo sapien
gacccatggaggatcggtcaaagga

SEQ ID NO: 1938557 - DNA, 25 bp, Homo sapien
tgctggagacgcaaaagtgtgcaca

SEQ ID NO: 1938558 - DNA, 25 bp, Homo sapien
tgtgcacacaggtcattcgtataat

SEQ ID NO: 1938559 - DNA, 25 bp, Homo sapien
ggtagtaagaccagccccgtaatga

SEQ ID NO: 1938560 - DNA, 25 bp, Homo sapien
cgtaatgaacaggattgccccagcc

SEQ ID NO: 1938561 - DNA, 25 bp, Homo sapien
ggccatttctattatactcagggta

SEQ ID NO: 1938562 - DNA, 25 bp, Homo sapien
ccatttctattatactcagggtagc

SEQ ID NO: 1938563 - DNA, 25 bp, Homo sapien
tctggaactaaagtatgaggatagg

SEQ ID NO: 1938564 - DNA, 25 bp, Homo sapien
taaagtatgaggataggcatctgta

SEQ ID NO: 1938565 - DNA, 25 bp, Homo sapien
aggttcaagtgattgtcctgcctca

SEQ ID NO: 1938566 - DNA, 25 bp, Homo sapien
cttagcctccgcctccctccaggtt

SEQ ID NO: 1938567 - DNA, 25 bp, Homo sapien
ttttgtatttatagtagaaacagga

SEQ ID NO: 1938568 - DNA, 25 bp, Homo sapien
ggcacaatctctgcttagcctccgc

SEQ ID NO: 1938569 - DNA, 25 bp, Homo sapien
cattccataggagagtaactttaac

SEQ ID NO: 1938570 - DNA, 25 bp, Homo sapien
gaggtctgccgaagtctgattaatc

SEQ ID NO: 1938571 - DNA, 25 bp, Homo sapien
tcaaaggtattttcttgtaatagcc

SEQ ID NO: 1938572 - DNA, 25 bp, Homo sapien
cttgaggatttaggtggctttgtcc

SEQ ID NO: 1938573 - DNA, 25 bp, Homo sapien
ggttttagctcttcatggcaggcag

SEQ ID NO: 1938574 - DNA, 25 bp, Homo sapien
gcaaaggtcagaatccaacggaaca

SEQ ID NO: 1938575 - DNA, 25 bp, Homo sapien
taacctaacgtggtgcctgcatatg

SEQ ID NO: 1938576 - DNA, 25 bp, Homo sapien
tgaagaagccccaaaagtgaatgtg

SEQ ID NO: 1938577 - DNA, 25 bp, Homo sapien
gtttatttgaatcttggaggctgct

SEQ ID NO: 1938578 - DNA, 25 bp, Homo sapien
gcttttgtacagtaaagtccttgaa

SEQ ID NO: 1938579 - DNA, 25 bp, Homo sapien
ttcgagtcagtaatgttgatctcac

SEQ ID NO: 1938580 - DNA, 25 bp, Homo sapien
acctgtggggtacataaactgctaa

SEQ ID NO: 1938581 - DNA, 25 bp, Homo sapien
tacactgcagtggtaaggttgagtc

SEQ ID NO: 1938582 - DNA, 25 bp, Homo sapien
gggtggaacagctgtcctcgtttgt

SEQ ID NO: 1938583 - DNA, 25 bp, Homo sapien
tgtgacagaaaacttatgcctaaaa

SEQ ID NO: 1938584 - DNA, 25 bp, Homo sapien
tgtccatactgcttttacactgcag

SEQ ID NO: 1938585 - DNA, 25 bp, Homo sapien
ggggtgagtcaaaggttcaatggct

SEQ ID NO: 1938586 - DNA, 25 bp, Homo sapien
gtgagtcaaaggttcaatggctgcc

SEQ ID NO: 1938587 - DNA, 25 bp, Homo sapien
ggtgagtcaaaggttcaatggctgc

SEQ ID NO: 1938588 - DNA, 25 bp, Homo sapien
tatacctgtgttatttggttacttc

SEQ ID NO: 1938589 - DNA, 25 bp, Homo sapien
catgggcatgaacagggactgtgta

SEQ ID NO: 1938590 - DNA, 25 bp, Homo sapien
cagtcttggtattcaggtcttcaga

SEQ ID NO: 1938591 - DNA, 25 bp, Homo sapien
tgcttgccatggacctgaatagtgc

SEQ ID NO: 1938592 - DNA, 25 bp, Homo sapien
aacaaaaattggatcctgcttgcca

SEQ ID NO: 1938593 - DNA, 25 bp, Homo sapien
aagagtggtttaacatcatggaggc

SEQ ID NO: 1938594 - DNA, 25 bp, Homo sapien
taagtgcacaaattcctacaggcat

SEQ ID NO: 1938595 - DNA, 25 bp, Homo sapien
cactggaattccaaacgtgcctgca

SEQ ID NO: 1938596 - DNA, 25 bp, Homo sapien
ctacaggcatgtggttaaagggact

SEQ ID NO: 1938597 - DNA, 25 bp, Homo sapien
gatgtcgattccttgcaaatcactt

SEQ ID NO: 1938598 - DNA, 25 bp, Homo sapien
cacttcattcctgattctctgacca

SEQ ID NO: 1938599 - DNA, 25 bp, Homo sapien
tgaggtctcgtttacggggcaaatc

SEQ ID NO: 1938600 - DNA, 25 bp, Homo sapien
tgcaaactgaggatggttgaggtct

SEQ ID NO: 1938601 - DNA, 25 bp, Homo sapien
tgaaaatacgtacattcaaggccgg

SEQ ID NO: 1938602 - DNA, 25 bp, Homo sapien
tacagaattcctcttgccattgaac

SEQ ID NO: 1938603 - DNA, 25 bp, Homo sapien
tgacttcttcctcatatagtttgaa

SEQ ID NO: 1938604 - DNA, 25 bp, Homo sapien
ttaattgtacggagctacagaattc

SEQ ID NO: 1938605 - DNA, 25 bp, Homo sapien
cacgggctctatagggtaggcactc

SEQ ID NO: 1938606 - DNA, 25 bp, Homo sapien
caataactttctgactgagtgaatg

SEQ ID NO: 1938607 - DNA, 25 bp, Homo sapien
gacgtcgatggaggatggcactctt

SEQ ID NO: 1938608 - DNA, 25 bp, Homo sapien
taggcactcaataactttctgactg

SEQ ID NO: 1938609 - DNA, 25 bp, Homo sapien
ttggaagtcaacagaggagacttgg

SEQ ID NO: 1938610 - DNA, 25 bp, Homo sapien
aaggcttctttcaagtgactgcttg

SEQ ID NO: 1938611 - DNA, 25 bp, Homo sapien
gcttttggcatagcctggtcaagga

SEQ ID NO: 1938612 - DNA, 25 bp, Homo sapien
tttgacttaattaagataaggcttc

SEQ ID NO: 1938613 - DNA, 25 bp, Homo sapien
tttgctttggtcgcttgttgaacat

SEQ ID NO: 1938614 - DNA, 25 bp, Homo sapien
gagtttgctttggtcgcttgttgaa

SEQ ID NO: 1938615 - DNA, 25 bp, Homo sapien
ctgagtttgctttggtcgcttgttg

SEQ ID NO: 1938616 - DNA, 25 bp, Homo sapien
gtttgctttggtcgcttgttgaaca

SEQ ID NO: 1938617 - DNA, 25 bp, Homo sapien
tctggattgccagtatgatacgctt

SEQ ID NO: 1938618 - DNA, 25 bp, Homo sapien
tggttcgccctacagtatgcaggta

SEQ ID NO: 1938619 - DNA, 25 bp, Homo sapien
aattcagatgcctcctattgcagga

SEQ ID NO: 1938620 - DNA, 25 bp, Homo sapien
catgtcttcaaacttgctgggagtt

SEQ ID NO: 1938621 - DNA, 25 bp, Homo sapien
caggtagtcactgaacgtttgttga

SEQ ID NO: 1938622 - DNA, 25 bp, Homo sapien
cgaagtatagtgagttccacaaggg

SEQ ID NO: 1938623 - DNA, 25 bp, Homo sapien
caagggcatatggaagggagttttc

SEQ ID NO: 1938624 - DNA, 25 bp, Homo sapien
gaagaggtagatgcacttgaattaa

SEQ ID NO: 1938625 - DNA, 25 bp, Homo sapien
tcctaggccgatggatacacccaag

SEQ ID NO: 1938626 - DNA, 25 bp, Homo sapien
catcacgtggtgttaggtgttccta

SEQ ID NO: 1938627 - DNA, 25 bp, Homo sapien
cacccaaggatgaaagatggttagg

SEQ ID NO: 1938628 - DNA, 25 bp, Homo sapien
caagctgaaagtgtcgatggtttgc

SEQ ID NO: 1938629 - DNA, 25 bp, Homo sapien
cttaatgtctgtcatccagttgcag

SEQ ID NO: 1938630 - DNA, 25 bp, Homo sapien
ctctctgcatggactactttgggct

SEQ ID NO: 1938631 - DNA, 25 bp, Homo sapien
cagttgcagtttgacgtgtctggag

SEQ ID NO: 1938632 - DNA, 25 bp, Homo sapien
cagctggaagcaggtcaggcatctt

SEQ ID NO: 1938633 - DNA, 25 bp, Homo sapien
ctgggtttccgtcagctgggcctgg

SEQ ID NO: 1938634 - DNA, 25 bp, Homo sapien
gagaactgggtttccgtcagctggg

SEQ ID NO: 1938635 - DNA, 25 bp, Homo sapien
agaactgggtttccgtcagctgggc

SEQ ID NO: 1938636 - DNA, 25 bp, Homo sapien
aactgggtttccgtcagctgggcct

SEQ ID NO: 1938637 - DNA, 25 bp, Homo sapien
cagcttgaaaggtctctaccacttt

SEQ ID NO: 1938638 - DNA, 25 bp, Homo sapien
gctcaggtgaatcacagcttgaaag

SEQ ID NO: 1938639 - DNA, 25 bp, Homo sapien
gggctcaggtgaatcacagcttgaa

SEQ ID NO: 1938640 - DNA, 25 bp, Homo sapien
gaaaggtctctaccactttgaacca

SEQ ID NO: 1938641 - DNA, 25 bp, Homo sapien
tcccctttgtctgcacaaggcgcta

SEQ ID NO: 1938642 - DNA, 25 bp, Homo sapien
tgcacaaggcgctaaacaaaaccct

SEQ ID NO: 1938643 - DNA, 25 bp, Homo sapien
cagggcatattagggtgacacctga

SEQ ID NO: 1938644 - DNA, 25 bp, Homo sapien
ttgcagcagggcatattagggtgac

SEQ ID NO: 1938645 - DNA, 25 bp, Homo sapien
tgaccggcagccaagaacggttctg

SEQ ID NO: 1938646 - DNA, 25 bp, Homo sapien
aactggtgcattgggttgaccggca

SEQ ID NO: 1938647 - DNA, 25 bp, Homo sapien
tactactggagtggttggcatcatc

SEQ ID NO: 1938648 - DNA, 25 bp, Homo sapien
ccacgtggcttcatgaactggtgca

SEQ ID NO: 1938649 - DNA, 25 bp, Homo sapien
catggccaccttgtgttgctttgga

SEQ ID NO: 1938650 - DNA, 25 bp, Homo sapien
gatgtattcccctgtcaccatggcc

SEQ ID NO: 1938651 - DNA, 25 bp, Homo sapien
cagagctacatgtttatcaagatgt

SEQ ID NO: 1938652 - DNA, 25 bp, Homo sapien
tacagttgtgttacacgagtgtccc

SEQ ID NO: 1938653 - DNA, 25 bp, Homo sapien
acatgctctgaaataccctggaaca

SEQ ID NO: 1938654 - DNA, 25 bp, Homo sapien
catgctctgaaataccctggaacag

SEQ ID NO: 1938655 - DNA, 25 bp, Homo sapien
ccagaaagcaggtccattcgatcta

SEQ ID NO: 1938656 - DNA, 25 bp, Homo sapien
tcgatctattatgagttgggctgtg

SEQ ID NO: 1938657 - DNA, 25 bp, Homo sapien
taacaaccactaagagaagtgctgg

SEQ ID NO: 1938658 - DNA, 25 bp, Homo sapien
tttgggataagaatatggtcgctga

SEQ ID NO: 1938659 - DNA, 25 bp, Homo sapien
cacattaaaccgaaagcattcagaa

SEQ ID NO: 1938660 - DNA, 25 bp, Homo sapien
gaatatggtcgctgatgctctgctc

SEQ ID NO: 1938661 - DNA, 25 bp, Homo sapien
tctgatagagtgagaacatttctcc

SEQ ID NO: 1938662 - DNA, 25 bp, Homo sapien
caagaagtttggtgccagcatgtgc

SEQ ID NO: 1938663 - DNA, 25 bp, Homo sapien
tcaatcaagtgcttacagatcccca

SEQ ID NO: 1938664 - DNA, 25 bp, Homo sapien
caccaccgaggaaggagattaatct

SEQ ID NO: 1938665 - DNA, 25 bp, Homo sapien
cgctcatagccctgaaggtgtgtat

SEQ ID NO: 1938666 - DNA, 25 bp, Homo sapien
gctgagcacgctcatagccctgaag

SEQ ID NO: 1938667 - DNA, 25 bp, Homo sapien
catagccctgaaggtgtgtatgagg

SEQ ID NO: 1938668 - DNA, 25 bp, Homo sapien
gaaggtgtgtatgaggtgctcccaa

SEQ ID NO: 1938669 - DNA, 25 bp, Homo sapien
ggcaccttgctatccacggaagtgg

SEQ ID NO: 1938670 - DNA, 25 bp, Homo sapien
gtgacaggcaccttgctatccacgg

SEQ ID NO: 1938671 - DNA, 25 bp, Homo sapien
tatccacggaagtggtgtccctcac

SEQ ID NO: 1938672 - DNA, 25 bp, Homo sapien
tggtgtccctcaccgagggcctctt

SEQ ID NO: 1938673 - DNA, 25 bp, Homo sapien
gacagggttcattcacgctactact

SEQ ID NO: 1938674 - DNA, 25 bp, Homo sapien
gatgttaagggctttgcgttcctcc

SEQ ID NO: 1938675 - DNA, 25 bp, Homo sapien
cattcatgtcccgttgcagaccgca

SEQ ID NO: 1938676 - DNA, 25 bp, Homo sapien
tcttccacatgctttagacagggtt

SEQ ID NO: 1938677 - DNA, 25 bp, Homo sapien
aattgaatgaaactgcatggatata

SEQ ID NO: 1938678 - DNA, 25 bp, Homo sapien
cttatgaaaattgctgatcggtctc

SEQ ID NO: 1938679 - DNA, 25 bp, Homo sapien
tagcacagtgaagactacgttcatc

SEQ ID NO: 1938680 - DNA, 25 bp, Homo sapien
tatattcagagcaggtagcacagtg

SEQ ID NO: 1938681 - DNA, 25 bp, Homo sapien
cttctcccaactcctgtgtttgcat

SEQ ID NO: 1938682 - DNA, 25 bp, Homo sapien
cttcccctgggagctgaagggactg

SEQ ID NO: 1938683 - DNA, 25 bp, Homo sapien
gcttcccctgggagctgaagggact

SEQ ID NO: 1938684 - DNA, 25 bp, Homo sapien
ttcccctgggagctgaagggactgg

SEQ ID NO: 1938685 - DNA, 25 bp, Homo sapien
catatataggacaataccttactct

SEQ ID NO: 1938686 - DNA, 25 bp, Homo sapien
tatataggacaataccttactctgc

SEQ ID NO: 1938687 - DNA, 25 bp, Homo sapien
agtattcacgctttgtgcattttca

SEQ ID NO: 1938688 - DNA, 25 bp, Homo sapien
agatgaatgtactccgggttttaga

SEQ ID NO: 1938689 - DNA, 25 bp, Homo sapien
ttgattccaatcagtgtagtctctg

SEQ ID NO: 1938690 - DNA, 25 bp, Homo sapien
taaacttgattccaatcagtgtagt

SEQ ID NO: 1938691 - DNA, 25 bp, Homo sapien
ctgaatgtaagccatgcctttaaac

SEQ ID NO: 1938692 - DNA, 25 bp, Homo sapien
aagccatgcctttaaacttgattcc

SEQ ID NO: 1938693 - DNA, 25 bp, Homo sapien
tgaaggagaaaagcatgtctctcct

SEQ ID NO: 1938694 - DNA, 25 bp, Homo sapien
tcatctccagtacatccctgggcag

SEQ ID NO: 1938695 - DNA, 25 bp, Homo sapien
agcatgtctctcctgatcatctcca

SEQ ID NO: 1938696 - DNA, 25 bp, Homo sapien
cattccgaatatccaagaaggggtg

SEQ ID NO: 1938697 - DNA, 25 bp, Homo sapien
tcattccgaatatccaagaaggggt

SEQ ID NO: 1938698 - DNA, 25 bp, Homo sapien
aggtgactgggtacatttgtatagg

SEQ ID NO: 1938699 - DNA, 25 bp, Homo sapien
aaaaggtgactgggtacatttgtat

SEQ ID NO: 1938700 - DNA, 25 bp, Homo sapien
gatggttcaacagtctccttgataa

SEQ ID NO: 1938701 - DNA, 25 bp, Homo sapien
cccaaacaagtagacatcgaagatg

SEQ ID NO: 1938702 - DNA, 25 bp, Homo sapien
tagcagtttgcaccccaaagtacac

SEQ ID NO: 1938703 - DNA, 25 bp, Homo sapien
gcctgtttctccacgttactgtaaa

SEQ ID NO: 1938704 - DNA, 25 bp, Homo sapien
cacagaagggactaccaatggccat

SEQ ID NO: 1938705 - DNA, 25 bp, Homo sapien
taccacttgcatattggaatttaaa

SEQ ID NO: 1938706 - DNA, 25 bp, Homo sapien
caatggccatattattaccacttgc

SEQ ID NO: 1938707 - DNA, 25 bp, Homo sapien
ctgtgattcacagaagggactacca

SEQ ID NO: 1938708 - DNA, 25 bp, Homo sapien
acttgtttagacgttagctgtcaga

SEQ ID NO: 1938709 - DNA, 25 bp, Homo sapien
cacttatttattcacggagccaaaa

SEQ ID NO: 1938710 - DNA, 25 bp, Homo sapien
gtcagaagagaatcgaatattcact

SEQ ID NO: 1938711 - DNA, 25 bp, Homo sapien
tcacggagccaaaatgtattgacca

SEQ ID NO: 1938712 - DNA, 25 bp, Homo sapien
ctctgtagacataaggatctgaagg

SEQ ID NO: 1938713 - DNA, 25 bp, Homo sapien
taggtaccagtttctctgtagacat

SEQ ID NO: 1938714 - DNA, 25 bp, Homo sapien
cagtttctctgtagacataaggatc

SEQ ID NO: 1938715 - DNA, 25 bp, Homo sapien
gacataaggatctgaaggttcagaa

SEQ ID NO: 1938716 - DNA, 25 bp, Homo sapien
ccagaggtctgtgcacagggttggc

SEQ ID NO: 1938717 - DNA, 25 bp, Homo sapien
agacaggaacagaacggcctggtag

SEQ ID NO: 1938718 - DNA, 25 bp, Homo sapien
gcagcttgctgtactagatgtaagg

SEQ ID NO: 1938719 - DNA, 25 bp, Homo sapien
gaacggcctggtaggtgcaatgcca

SEQ ID NO: 1938720 - DNA, 25 bp, Homo sapien
ccaattgtagctccttttaaggcgc

SEQ ID NO: 1938721 - DNA, 25 bp, Homo sapien
tcccaggacagttttgctcgcacac

SEQ ID NO: 1938722 - DNA, 25 bp, Homo sapien
tgtgtcggctgctagtattgcctgg

SEQ ID NO: 1938723 - DNA, 25 bp, Homo sapien
taaggcgctgaactctgatgtgtcg

SEQ ID NO: 1938724 - DNA, 25 bp, Homo sapien
cctgctgtgaagatttctctggctc

SEQ ID NO: 1938725 - DNA, 25 bp, Homo sapien
gctgtgaagatttctctggctctgt

SEQ ID NO: 1938726 - DNA, 25 bp, Homo sapien
cccctgctgtgaagatttctctggc

SEQ ID NO: 1938727 - DNA, 25 bp, Homo sapien
tgctgtgaagatttctctggctctg

SEQ ID NO: 1938728 - DNA, 25 bp, Homo sapien
tacaggcacgctatgcaacacacgt

SEQ ID NO: 1938729 - DNA, 25 bp, Homo sapien
cacacgtgcagtcaatttaataggc

SEQ ID NO: 1938730 - DNA, 25 bp, Homo sapien
ctttctgagcagtacaggcacgcta

SEQ ID NO: 1938731 - DNA, 25 bp, Homo sapien
caacacacgtgcagtcaatttaata

SEQ ID NO: 1938732 - DNA, 25 bp, Homo sapien
tgataagtcatttcccctccaaggg

SEQ ID NO: 1938733 - DNA, 25 bp, Homo sapien
gaacatgtttgcagggttgcataac

SEQ ID NO: 1938734 - DNA, 25 bp, Homo sapien
tggagttctgaacaaacgttggaaa

SEQ ID NO: 1938735 - DNA, 25 bp, Homo sapien
tatgacctggatgatctatgagagc

SEQ ID NO: 1938736 - DNA, 25 bp, Homo sapien
ctggacggagcggccggccaggcag

SEQ ID NO: 1938737 - DNA, 25 bp, Homo sapien
cagatgatgggtggccgggaagagg

SEQ ID NO: 1938738 - DNA, 25 bp, Homo sapien
atctcagatgatgggtggccgggaa

SEQ ID NO: 1938739 - DNA, 25 bp, Homo sapien
tgccggacgaggtggctgccgggca

SEQ ID NO: 1938740 - DNA, 25 bp, Homo sapien
aagccacacattgtacaatggagag

SEQ ID NO: 1938741 - DNA, 25 bp, Homo sapien
tctttgcaggattaagtgtttattt

SEQ ID NO: 1938742 - DNA, 25 bp, Homo sapien
gtttgaggtagggactcgagaggca

SEQ ID NO: 1938743 - DNA, 25 bp, Homo sapien
cacacattgtacaatggagagcagg

SEQ ID NO: 1938744 - DNA, 25 bp, Homo sapien
gtgtccacatcccacgtgatagatc

SEQ ID NO: 1938745 - DNA, 25 bp, Homo sapien
aggacggaagccacgtgctaggtca

SEQ ID NO: 1938746 - DNA, 25 bp, Homo sapien
cgtgctaggtcacaaagctgcgtgt

SEQ ID NO: 1938747 - DNA, 25 bp, Homo sapien
atcccacgtgatagatctgcagagg

SEQ ID NO: 1938748 - DNA, 25 bp, Homo sapien
gcaccagaatgagtacccggtatga

SEQ ID NO: 1938749 - DNA, 25 bp, Homo sapien
ttgttttaaagccactgtgagcccc

SEQ ID NO: 1938750 - DNA, 25 bp, Homo sapien
taaggaagcttatacaatacccagt

SEQ ID NO: 1938751 - DNA, 25 bp, Homo sapien
cagagctgcaccagatttaaggaag

SEQ ID NO: 1938752 - DNA, 25 bp, Homo sapien
gtccgagaaacgttcattgaaagtg

SEQ ID NO: 1938753 - DNA, 25 bp, Homo sapien
cataacctttcgcaatttcattgga

SEQ ID NO: 1938754 - DNA, 25 bp, Homo sapien
atttcattggatccaaatgtccgag

SEQ ID NO: 1938755 - DNA, 25 bp, Homo sapien
cattgaaagtgtaaagtccacagaa

SEQ ID NO: 1938756 - DNA, 25 bp, Homo sapien
ctggagggtgttcgtgataccaagg

SEQ ID NO: 1938757 - DNA, 25 bp, Homo sapien
ggtgttcgtgataccaaggatctga

SEQ ID NO: 1938758 - DNA, 25 bp, Homo sapien
gaaccaggaccagtggaagtgacat

SEQ ID NO: 1938759 - DNA, 25 bp, Homo sapien
aaggatctgaaccaggaccagtgga

SEQ ID NO: 1938760 - DNA, 25 bp, Homo sapien
cagcagttgatgaatccctctcggg

SEQ ID NO: 1938761 - DNA, 25 bp, Homo sapien
gccgctcggcaaggctctgatgtaa

SEQ ID NO: 1938762 - DNA, 25 bp, Homo sapien
aactgttggcaactgaaggtgtcag

SEQ ID NO: 1938763 - DNA, 25 bp, Homo sapien
tagggtaacgctttctacagatcat

SEQ ID NO: 1938764 - DNA, 25 bp, Homo sapien
gaacttgtcaagaggtctcgggtca

SEQ ID NO: 1938765 - DNA, 25 bp, Homo sapien
ggttcttatacctctgtcgtcccag

SEQ ID NO: 1938766 - DNA, 25 bp, Homo sapien
taaccactctccttcgacttgaaat

SEQ ID NO: 1938767 - DNA, 25 bp, Homo sapien
taactgggccttgcgcttggttgcc

SEQ ID NO: 1938768 - DNA, 25 bp, Homo sapien
catgagatttcatgccgttattacc

SEQ ID NO: 1938769 - DNA, 25 bp, Homo sapien
catagtgctttgcatgacatgagat

SEQ ID NO: 1938770 - DNA, 25 bp, Homo sapien
ttatactgtatagcagtctgtaggg

SEQ ID NO: 1938771 - DNA, 25 bp, Homo sapien
ggctcaatgtgtttctgctgaactg

SEQ ID NO: 1938772 - DNA, 25 bp, Homo sapien
agacgaccagtcaggtccgtccagc

SEQ ID NO: 1938773 - DNA, 25 bp, Homo sapien
tccaggaagaccgctggcatctggg

SEQ ID NO: 1938774 - DNA, 25 bp, Homo sapien
tttgtgtgagacgaccagtcaggtc

SEQ ID NO: 1938775 - DNA, 25 bp, Homo sapien
gacatttgtgtgagacgaccagtca

SEQ ID NO: 1938776 - DNA, 25 bp, Homo sapien
gcaaaaaattggcagagctaaggga

SEQ ID NO: 1938777 - DNA, 25 bp, Homo sapien
aattggcagagctaagggaacgtac

SEQ ID NO: 1938778 - DNA, 25 bp, Homo sapien
tctggctccacacttaaggggaccc

SEQ ID NO: 1938779 - DNA, 25 bp, Homo sapien
cacacttaaggggaccctcctctgg

SEQ ID NO: 1938780 - DNA, 25 bp, Homo sapien
tgcaatggttcaatggcagctttca

SEQ ID NO: 1938781 - DNA, 25 bp, Homo sapien
ctgagaccctgctgcaatggttcaa

SEQ ID NO: 1938782 - DNA, 25 bp, Homo sapien
accctgctgcaatggttcaatggca

SEQ ID NO: 1938783 - DNA, 25 bp, Homo sapien
caatggttcaatggcagctttcatg

SEQ ID NO: 1938784 - DNA, 25 bp, Homo sapien
ttagcataataccactacttaatgg

SEQ ID NO: 1938785 - DNA, 25 bp, Homo sapien
aaatgctttaggctgctggtaatag

SEQ ID NO: 1938786 - DNA, 25 bp, Homo sapien
cattatctcccacaacgcgaagtgg

SEQ ID NO: 1938787 - DNA, 25 bp, Homo sapien
tacacatttaatcgttcagtcagga

SEQ ID NO: 1938788 - DNA, 25 bp, Homo sapien
aaggattgggttatatgtctctgcc

SEQ ID NO: 1938789 - DNA, 25 bp, Homo sapien
ggaatgccctgattggtttagagag

SEQ ID NO: 1938790 - DNA, 25 bp, Homo sapien
caggttaacccttaagctccattgg

SEQ ID NO: 1938791 - DNA, 25 bp, Homo sapien
caaaattttggattgatgagcaggg

SEQ ID NO: 1938792 - DNA, 25 bp, Homo sapien
gaggtttgatcatgtcatactccga

SEQ ID NO: 1938793 - DNA, 25 bp, Homo sapien
cacaatagttattgtccactcttcc

SEQ ID NO: 1938794 - DNA, 25 bp, Homo sapien
gtgacatggtgcaaagaagaggttt

SEQ ID NO: 1938795 - DNA, 25 bp, Homo sapien
tcttccattaaggtggttctgtgac

SEQ ID NO: 1938796 - DNA, 25 bp, Homo sapien
attttgggataatctgataacaagc

SEQ ID NO: 1938797 - DNA, 25 bp, Homo sapien
gaagtagaatagtatccattttggg

SEQ ID NO: 1938798 - DNA, 25 bp, Homo sapien
gataacaagcaccaacaatacatgg

SEQ ID NO: 1938799 - DNA, 25 bp, Homo sapien
gctgtcttcggtcccaggtgaagta

SEQ ID NO: 1938800 - DNA, 25 bp, Homo sapien
caactatgcccagggtttatgatgg

SEQ ID NO: 1938801 - DNA, 25 bp, Homo sapien
ttgtcctctacagcagaattgaata

SEQ ID NO: 1938802 - DNA, 25 bp, Homo sapien
ttcacattataaccagtgtcgattc

SEQ ID NO: 1938803 - DNA, 25 bp, Homo sapien
gaatattctcaagtaatgtcataaa

SEQ ID NO: 1938804 - DNA, 25 bp, Homo sapien
ggcttggcgtacagtgggttctcat

SEQ ID NO: 1938805 - DNA, 25 bp, Homo sapien
caaaagtcactctgggatacgctgt

SEQ ID NO: 1938806 - DNA, 25 bp, Homo sapien
ctcattgctgagtttcctggactag

SEQ ID NO: 1938807 - DNA, 25 bp, Homo sapien
tcttttgtcacatctaggcacgttc

SEQ ID NO: 1938808 - DNA, 25 bp, Homo sapien
ttgagtgtcagtgttgaccagtgct

SEQ ID NO: 1938809 - DNA, 25 bp, Homo sapien
ggccccgtcacctcttcggcatcac

SEQ ID NO: 1938810 - DNA, 25 bp, Homo sapien
gttgagtgtcagtgttgaccagtgc

SEQ ID NO: 1938811 - DNA, 25 bp, Homo sapien
gacactgacgtgtggcagtaagaca

SEQ ID NO: 1938812 - DNA, 25 bp, Homo sapien
tcatctcccaggacactgacgtgtg

SEQ ID NO: 1938813 - DNA, 25 bp, Homo sapien
cccaggacactgacgtgtggcagta

SEQ ID NO: 1938814 - DNA, 25 bp, Homo sapien
cgtgtggcagtaagacagaaagctt

SEQ ID NO: 1938815 - DNA, 25 bp, Homo sapien
tattcgccaacttggagctgaaggc

SEQ ID NO: 1938816 - DNA, 25 bp, Homo sapien
cgccaacttggagctgaaggctttt

SEQ ID NO: 1938817 - DNA, 25 bp, Homo sapien
aacttggagctgaaggcttttcaac

SEQ ID NO: 1938818 - DNA, 25 bp, Homo sapien
agtattcgccaacttggagctgaag

SEQ ID NO: 1938819 - DNA, 25 bp, Homo sapien
tccatctcctaaaatggggagacct

SEQ ID NO: 1938820 - DNA, 25 bp, Homo sapien
acctcctctagtggacagtgagcac

SEQ ID NO: 1938821 - DNA, 25 bp, Homo sapien
gcacctcctctagtggacagtgagc

SEQ ID NO: 1938822 - DNA, 25 bp, Homo sapien
cctgacgctgtgatggcagaagtca
